United States Patent Application Publication US 2014/0004565 A1 - sequence listing, part 19

SEQ ID NO: 354857 - RNA, 19 nt, Artificial Sequence
  Description of Artificial Sequence: Synthetic oligonucleotide
aagggcgaagaccgaggug

SEQ ID NO: 354858 - RNA, 19 nt, Artificial Sequence
  Description of Artificial Sequence: Synthetic oligonucleotide
gaguagcauccagugaugc

SEQ ID NO: 354859 - RNA, 19 nt, Artificial Sequence
  Description of Artificial Sequence: Synthetic oligonucleotide
gcguuugugagccauuaug

SEQ ID NO: 354860 - RNA, 19 nt, Artificial Sequence
  Description of Artificial Sequence: Synthetic oligonucleotide
gucacaugccuguggaaac

SEQ ID NO: 354861 - RNA, 19 nt, Artificial Sequence
  Description of Artificial Sequence: Synthetic oligonucleotide
agucacaugccuguggaaa

SEQ ID NO: 354862 - RNA, 19 nt, Artificial Sequence
  Description of Artificial Sequence: Synthetic oligonucleotide
gauagacaacugcuaccac

SEQ ID NO: 354863 - RNA, 19 nt, Artificial Sequence
  Description of Artificial Sequence: Synthetic oligonucleotide
cuaacaaagcaaagcccca

SEQ ID NO: 354864 - RNA, 19 nt, Artificial Sequence
  Description of Artificial Sequence: Synthetic oligonucleotide
gagugaacugguggguuag

SEQ ID NO: 354865 - RNA, 19 nt, Artificial Sequence
  Description of Artificial Sequence: Synthetic oligonucleotide
acuuauccccaucauccau

SEQ ID NO: 354866 - RNA, 19 nt, Artificial Sequence
  Description of Artificial Sequence: Synthetic oligonucleotide
aacccuaagugggacgccu

SEQ ID NO: 354867 - RNA, 19 nt, Artificial Sequence
  Description of Artificial Sequence: Synthetic oligonucleotide
aaaccuggauucauuggau

SEQ ID NO: 354868 - RNA, 19 nt, Artificial Sequence
  Description of Artificial Sequence: Synthetic oligonucleotide
ccgaagacagcaauucuag

SEQ ID NO: 354869 - RNA, 19 nt, Artificial Sequence
  Description of Artificial Sequence: Synthetic oligonucleotide
gaacugugggguuucccuc

SEQ ID NO: 354870 - RNA, 19 nt, Artificial Sequence
  Description of Artificial Sequence: Synthetic oligonucleotide
ugagugaacugguggguua

SEQ ID NO: 354871 - RNA, 19 nt, Artificial Sequence
  Description of Artificial Sequence: Synthetic oligonucleotide
cacuguagccugcugcgag

SEQ ID NO: 354872 - RNA, 19 nt, Artificial Sequence
  Description of Artificial Sequence: Synthetic oligonucleotide
ggagacgucacauaacugu

SEQ ID NO: 354873 - RNA, 19 nt, Artificial Sequence
  Description of Artificial Sequence: Synthetic oligonucleotide
aguuaaaacccacgcugua

SEQ ID NO: 354874 - RNA, 19 nt, Artificial Sequence
  Description of Artificial Sequence: Synthetic oligonucleotide
gacaugaaagagcucaguu

SEQ ID NO: 354875 - RNA, 19 nt, Artificial Sequence
  Description of Artificial Sequence: Synthetic oligonucleotide
uagauaggagaauguucuc

SEQ ID NO: 354876 - RNA, 19 nt, Artificial Sequence
  Description of Artificial Sequence: Synthetic oligonucleotide
acagggcacuaucaguaga

SEQ ID NO: 354877 - RNA, 19 nt, Artificial Sequence
  Description of Artificial Sequence: Synthetic oligonucleotide
ugcccggaaaauguggccu

SEQ ID NO: 354878 - RNA, 19 nt, Artificial Sequence
  Description of Artificial Sequence: Synthetic oligonucleotide
aguguagugcgacccugcu

SEQ ID NO: 354879 - RNA, 19 nt, Artificial Sequence
  Description of Artificial Sequence: Synthetic oligonucleotide
ucuuaccgcagaccccaca

SEQ ID NO: 354880 - RNA, 19 nt, Artificial Sequence
  Description of Artificial Sequence: Synthetic oligonucleotide
gcggagaacccuaaguggg

SEQ ID NO: 354881 - RNA, 19 nt, Artificial Sequence
  Description of Artificial Sequence: Synthetic oligonucleotide
aaguggcacgcaucaucug

SEQ ID NO: 354882 - RNA, 19 nt, Artificial Sequence
  Description of Artificial Sequence: Synthetic oligonucleotide
agugggacgccucuucuuu

SEQ ID NO: 354883 - RNA, 19 nt, Artificial Sequence
  Description of Artificial Sequence: Synthetic oligonucleotide
ggguucaucacaucaggca

SEQ ID NO: 354884 - RNA, 19 nt, Artificial Sequence
  Description of Artificial Sequence: Synthetic oligonucleotide
uggaugaguuacugggcaa

SEQ ID NO: 354885 - RNA, 19 nt, Artificial Sequence
  Description of Artificial Sequence: Synthetic oligonucleotide
auaggagaauguucucaaa

SEQ ID NO: 354886 - RNA, 19 nt, Artificial Sequence
  Description of Artificial Sequence: Synthetic oligonucleotide
cacauuugcaaagguguuc

SEQ ID NO: 354887 - RNA, 19 nt, Artificial Sequence
  Description of Artificial Sequence: Synthetic oligonucleotide
cccacacugacaaggauac

SEQ ID NO: 354888 - RNA, 19 nt, Artificial Sequence
  Description of Artificial Sequence: Synthetic oligonucleotide
ucaguggcggagaacccua

SEQ ID NO: 354889 - RNA, 19 nt, Artificial Sequence
  Description of Artificial Sequence: Synthetic oligonucleotide
auaugcaccuaaugacaau

SEQ ID NO: 354890 - RNA, 19 nt, Artificial Sequence
  Description of Artificial Sequence: Synthetic oligonucleotide
acaauggagacgucacaua

SEQ ID NO: 354891 - RNA, 19 nt, Artificial Sequence
  Description of Artificial Sequence: Synthetic oligonucleotide
ggucauugccaugauuuag

SEQ ID NO: 354892 - RNA, 19 nt, Artificial Sequence
  Description of Artificial Sequence: Synthetic oligonucleotide
uauccccgucaccauuuca

SEQ ID NO: 354893 - RNA, 19 nt, Artificial Sequence
  Description of Artificial Sequence: Synthetic oligonucleotide
caguguagugcgacccugc

SEQ ID NO: 354894 - RNA, 19 nt, Artificial Sequence
  Description of Artificial Sequence: Synthetic oligonucleotide
caucugugcccagauuugc

SEQ ID NO: 354895 - RNA, 19 nt, Artificial Sequence
  Description of Artificial Sequence: Synthetic oligonucleotide
aggcguccuguguagcuag

SEQ ID NO: 354896 - RNA, 19 nt, Artificial Sequence
  Description of Artificial Sequence: Synthetic oligonucleotide
aagucacaugccuguggaa

SEQ ID NO: 354897 - RNA, 19 nt, Artificial Sequence
  Description of Artificial Sequence: Synthetic oligonucleotide
aacaggacuucagggcacu

SEQ ID NO: 354898 - RNA, 19 nt, Artificial Sequence
  Description of Artificial Sequence: Synthetic oligonucleotide
aguggcggagaacccuaag

SEQ ID NO: 354899 - RNA, 19 nt, Artificial Sequence
  Description of Artificial Sequence: Synthetic oligonucleotide
ggguuagucugccaccaag

SEQ ID NO: 354900 - RNA, 19 nt, Artificial Sequence
  Description of Artificial Sequence: Synthetic oligonucleotide
auacaaauuugaggaauua

SEQ ID NO: 354901 - RNA, 19 nt, Artificial Sequence
  Description of Artificial Sequence: Synthetic oligonucleotide
aagcaaccuagcaguguag

SEQ ID NO: 354902 - RNA, 19 nt, Artificial Sequence
  Description of Artificial Sequence: Synthetic oligonucleotide
aaguccaccgcggcaguca

SEQ ID NO: 354903 - RNA, 19 nt, Artificial Sequence
  Description of Artificial Sequence: Synthetic oligonucleotide
cagucaaagcaaccuagca

SEQ ID NO: 354904 - RNA, 19 nt, Artificial Sequence
  Description of Artificial Sequence: Synthetic oligonucleotide
gauucauuggauaguuagu

SEQ ID NO: 354905 - RNA, 19 nt, Artificial Sequence
  Description of Artificial Sequence: Synthetic oligonucleotide
uggggaaaucagugugccc

SEQ ID NO: 354906 - RNA, 19 nt, Artificial Sequence
  Description of Artificial Sequence: Synthetic oligonucleotide
gugugcccggaaaaugugg

SEQ ID NO: 354907 - RNA, 19 nt, Artificial Sequence
  Description of Artificial Sequence: Synthetic oligonucleotide
acgcuguacaccgaagaca

SEQ ID NO: 354908 - RNA, 19 nt, Artificial Sequence
  Description of Artificial Sequence: Synthetic oligonucleotide
gugaugcgcuaacaaagca

SEQ ID NO: 354909 - RNA, 19 nt, Artificial Sequence
  Description of Artificial Sequence: Synthetic oligonucleotide
gcacgcaucaucugugccc

SEQ ID NO: 354910 - RNA, 19 nt, Artificial Sequence
  Description of Artificial Sequence: Synthetic oligonucleotide
cgcuguacaccgaagacag

SEQ ID NO: 354911 - RNA, 19 nt, Artificial Sequence
  Description of Artificial Sequence: Synthetic oligonucleotide
uggucauugccaugauuua

SEQ ID NO: 354912 - RNA, 19 nt, Artificial Sequence
  Description of Artificial Sequence: Synthetic oligonucleotide
uugcuguacagaggccggg

SEQ ID NO: 354913 - RNA, 19 nt, Artificial Sequence
  Description of Artificial Sequence: Synthetic oligonucleotide
uguacagaggccgggugua

SEQ ID NO: 354914 - RNA, 19 nt, Artificial Sequence
  Description of Artificial Sequence: Synthetic oligonucleotide
agcuagauaggagaauguu

SEQ ID NO: 354915 - RNA, 19 nt, Artificial Sequence
  Description of Artificial Sequence: Synthetic oligonucleotide
acauggauccagcguuugu

SEQ ID NO: 354916 - RNA, 19 nt, Artificial Sequence
  Description of Artificial Sequence: Synthetic oligonucleotide
gcuagauaggagaauguuc

SEQ ID NO: 354917 - RNA, 19 nt, Artificial Sequence
  Description of Artificial Sequence: Synthetic oligonucleotide
agcaaccuagcaguguagu

SEQ ID NO: 354918 - RNA, 19 nt, Artificial Sequence
  Description of Artificial Sequence: Synthetic oligonucleotide
agacugguggucauugcca

SEQ ID NO: 354919 - RNA, 19 nt, Artificial Sequence
  Description of Artificial Sequence: Synthetic oligonucleotide
aagugggacgccucuucuu

SEQ ID NO: 354920 - RNA, 19 nt, Artificial Sequence
  Description of Artificial Sequence: Synthetic oligonucleotide
caauuagauucccauccaa

SEQ ID NO: 354921 - RNA, 19 nt, Artificial Sequence
  Description of Artificial Sequence: Synthetic oligonucleotide
agacaugaaagagcucagu

SEQ ID NO: 354922 - RNA, 19 nt, Artificial Sequence
  Description of Artificial Sequence: Synthetic oligonucleotide
gguggguuagucugccacc

SEQ ID NO: 354923 - RNA, 19 nt, Artificial Sequence
  Description of Artificial Sequence: Synthetic oligonucleotide
cuggcucgccaucucagug

SEQ ID NO: 354924 - RNA, 19 nt, Artificial Sequence
  Description of Artificial Sequence: Synthetic oligonucleotide
agcaguguagugcgacccu

SEQ ID NO: 354925 - RNA, 19 nt, Artificial Sequence
  Description of Artificial Sequence: Synthetic oligonucleotide
ugguguuaauggacucagu

SEQ ID NO: 354926 - RNA, 19 nt, Artificial Sequence
  Description of Artificial Sequence: Synthetic oligonucleotide
gcuaucuugccaguugggc

SEQ ID NO: 354927 - RNA, 19 nt, Artificial Sequence
  Description of Artificial Sequence: Synthetic oligonucleotide
uggccuauuagagcugguc

SEQ ID NO: 354928 - RNA, 19 nt, Artificial Sequence
  Description of Artificial Sequence: Synthetic oligonucleotide
uguagccugcugcgagggc

SEQ ID NO: 354929 - RNA, 19 nt, Artificial Sequence
  Description of Artificial Sequence: Synthetic oligonucleotide
agaggccggguguagugga

SEQ ID NO: 354930 - RNA, 19 nt, Artificial Sequence
  Description of Artificial Sequence: Synthetic oligonucleotide
ucguaggcugcaugcacau

SEQ ID NO: 354931 - RNA, 19 nt, Artificial Sequence
  Description of Artificial Sequence: Synthetic oligonucleotide
gcaaguggcacgcaucauc

SEQ ID NO: 354932 - RNA, 19 nt, Artificial Sequence
  Description of Artificial Sequence: Synthetic oligonucleotide
accgaagacagcaauucua

SEQ ID NO: 354933 - RNA, 19 nt, Artificial Sequence
  Description of Artificial Sequence: Synthetic oligonucleotide
ucaggaguacuuggucaca

SEQ ID NO: 354934 - RNA, 19 nt, Artificial Sequence
  Description of Artificial Sequence: Synthetic oligonucleotide
agauggugcuucauuuuga

SEQ ID NO: 354935 - RNA, 19 nt, Artificial Sequence
  Description of Artificial Sequence: Synthetic oligonucleotide
cgugucauacaaaagggca

SEQ ID NO: 354936 - RNA, 19 nt, Artificial Sequence
  Description of Artificial Sequence: Synthetic oligonucleotide
ucgcugacucuugugugug

SEQ ID NO: 354937 - RNA, 19 nt, Artificial Sequence
  Description of Artificial Sequence: Synthetic oligonucleotide
caaguggcacgcaucaucu

SEQ ID NO: 354938 - RNA, 19 nt, Artificial Sequence
  Description of Artificial Sequence: Synthetic oligonucleotide
gggaguagcauccagugau

SEQ ID NO: 354939 - RNA, 19 nt, Artificial Sequence
  Description of Artificial Sequence: Synthetic oligonucleotide
uuauccccgucaccauuuc

SEQ ID NO: 354940 - RNA, 19 nt, Artificial Sequence
  Description of Artificial Sequence: Synthetic oligonucleotide
cauucuaggccaggaccag

SEQ ID NO: 354941 - RNA, 19 nt, Artificial Sequence
  Description of Artificial Sequence: Synthetic oligonucleotide
uuggugcucgucguaggcu

SEQ ID NO: 354942 - RNA, 19 nt, Artificial Sequence
  Description of Artificial Sequence: Synthetic oligonucleotide
cacaauuuggaaguccucu

SEQ ID NO: 354943 - RNA, 19 nt, Artificial Sequence
  Description of Artificial Sequence: Synthetic oligonucleotide
cauacaaauuugaggaauu

SEQ ID NO: 354944 - RNA, 19 nt, Artificial Sequence
  Description of Artificial Sequence: Synthetic oligonucleotide
agaugacagcucaucuuug

SEQ ID NO: 354945 - RNA, 19 nt, Artificial Sequence
  Description of Artificial Sequence: Synthetic oligonucleotide
uccagcguuugugagccau

SEQ ID NO: 354946 - RNA, 19 nt, Artificial Sequence
  Description of Artificial Sequence: Synthetic oligonucleotide
gcaaccuagcaguguagug

SEQ ID NO: 354947 - RNA, 19 nt, Artificial Sequence
  Description of Artificial Sequence: Synthetic oligonucleotide
gugcccggaaaauguggcc

SEQ ID NO: 354948 - RNA, 19 nt, Artificial Sequence
  Description of Artificial Sequence: Synthetic oligonucleotide
guaguggaacuccgcgcug

SEQ ID NO: 354949 - RNA, 19 nt, Artificial Sequence
  Description of Artificial Sequence: Synthetic oligonucleotide
guagccugcugcgagggca

SEQ ID NO: 354950 - RNA, 19 nt, Artificial Sequence
  Description of Artificial Sequence: Synthetic oligonucleotide
cacaacucagcccacgagu

SEQ ID NO: 354951 - RNA, 19 nt, Artificial Sequence
  Description of Artificial Sequence: Synthetic oligonucleotide
cugcucgucauaguugcuc

SEQ ID NO: 354952 - RNA, 19 nt, Artificial Sequence
  Description of Artificial Sequence: Synthetic oligonucleotide
ccagaacauacaaauuuga

SEQ ID NO: 354953 - RNA, 19 nt, Artificial Sequence
  Description of Artificial Sequence: Synthetic oligonucleotide
acaaaagggcauggucucu

SEQ ID NO: 354954 - RNA, 19 nt, Artificial Sequence
  Description of Artificial Sequence: Synthetic oligonucleotide
ugcccucacacgucuguuc

SEQ ID NO: 354955 - RNA, 19 nt, Artificial Sequence
  Description of Artificial Sequence: Synthetic oligonucleotide
aguucacaacucagcccac

SEQ ID NO: 354956 - RNA, 19 nt, Artificial Sequence
  Description of Artificial Sequence: Synthetic oligonucleotide
ucccaugguccuguggccu

SEQ ID NO: 354957 - RNA, 19 nt, Artificial Sequence
  Description of Artificial Sequence: Synthetic oligonucleotide
cagccauaagggcgaagac

SEQ ID NO: 354958 - RNA, 19 nt, Artificial Sequence
  Description of Artificial Sequence: Synthetic oligonucleotide
caguuaaaacccacgcugu

SEQ ID NO: 354959 - RNA, 19 nt, Artificial Sequence
  Description of Artificial Sequence: Synthetic oligonucleotide
auccccgucaccauuucaa

SEQ ID NO: 354960 - RNA, 19 nt, Artificial Sequence
  Description of Artificial Sequence: Synthetic oligonucleotide
ugggacgccucuucuuuua

SEQ ID NO: 354961 - RNA, 19 nt, Artificial Sequence
  Description of Artificial Sequence: Synthetic oligonucleotide
gcacuaucaguagagaucu

SEQ ID NO: 354962 - RNA, 19 nt, Artificial Sequence
  Description of Artificial Sequence: Synthetic oligonucleotide
cagaggccggguguagugg

SEQ ID NO: 354963 - RNA, 19 nt, Artificial Sequence
  Description of Artificial Sequence: Synthetic oligonucleotide
ucgucguaggcugcaugca

SEQ ID NO: 354964 - RNA, 19 nt, Artificial Sequence
  Description of Artificial Sequence: Synthetic oligonucleotide
uccccgucaccauuucaau

SEQ ID NO: 354965 - RNA, 19 nt, Artificial Sequence
  Description of Artificial Sequence: Synthetic oligonucleotide
cuucacauggauccagcgu

SEQ ID NO: 354966 - RNA, 19 nt, Artificial Sequence
  Description of Artificial Sequence: Synthetic oligonucleotide
uacagaggccggguguagu

SEQ ID NO: 354967 - RNA, 19 nt, Artificial Sequence
  Description of Artificial Sequence: Synthetic oligonucleotide
gcccucacacgucuguucc

SEQ ID NO: 354968 - RNA, 19 nt, Artificial Sequence
  Description of Artificial Sequence: Synthetic oligonucleotide
ccggaacccagcucaaagc

SEQ ID NO: 354969 - RNA, 19 nt, Artificial Sequence
  Description of Artificial Sequence: Synthetic oligonucleotide
ugugucgaucucgcugacu

SEQ ID NO: 354970 - RNA, 19 nt, Artificial Sequence
  Description of Artificial Sequence: Synthetic oligonucleotide
uaauagcaaguggcacgca

SEQ ID NO: 354971 - RNA, 19 nt, Artificial Sequence
  Description of Artificial Sequence: Synthetic oligonucleotide
agcguuugugagccauuau

SEQ ID NO: 354972 - RNA, 19 nt, Artificial Sequence
  Description of Artificial Sequence: Synthetic oligonucleotide
augcgcuaacaaagcaaag

SEQ ID NO: 354973 - RNA, 19 nt, Artificial Sequence
  Description of Artificial Sequence: Synthetic oligonucleotide
auuuagcuucuggcaaaga

SEQ ID NO: 354974 - RNA, 19 nt, Artificial Sequence
  Description of Artificial Sequence: Synthetic oligonucleotide
guguagcuagauaggagaa

SEQ ID NO: 354975 - RNA, 19 nt, Artificial Sequence
  Description of Artificial Sequence: Synthetic oligonucleotide
guagucugcucagccuuug

SEQ ID NO: 354976 - RNA, 19 nt, Artificial Sequence
  Description of Artificial Sequence: Synthetic oligonucleotide
uggguuagucugccaccaa

SEQ ID NO: 354977 - RNA, 19 nt, Artificial Sequence
  Description of Artificial Sequence: Synthetic oligonucleotide
guggguuagucugccacca

SEQ ID NO: 354978 - RNA, 19 nt, Artificial Sequence
  Description of Artificial Sequence: Synthetic oligonucleotide
gaacccuaagugggacgcc

SEQ ID NO: 354979 - RNA, 19 nt, Artificial Sequence
  Description of Artificial Sequence: Synthetic oligonucleotide
cacgcaucaucugugccca

SEQ ID NO: 354980 - RNA, 19 nt, Artificial Sequence
  Description of Artificial Sequence: Synthetic oligonucleotide
ggcaucacaaggcguccug

SEQ ID NO: 354981 - RNA, 19 nt, Artificial Sequence
  Description of Artificial Sequence: Synthetic oligonucleotide
caggcaucacaaggcgucc

SEQ ID NO: 354982 - RNA, 19 nt, Artificial Sequence
  Description of Artificial Sequence: Synthetic oligonucleotide
caccugacuugcauaaaua

SEQ ID NO: 354983 - RNA, 19 nt, Artificial Sequence
  Description of Artificial Sequence: Synthetic oligonucleotide
gucguaggcugcaugcaca

SEQ ID NO: 354984 - RNA, 19 nt, Artificial Sequence
  Description of Artificial Sequence: Synthetic oligonucleotide
gcugagaugacagcucauc

SEQ ID NO: 354985 - RNA, 19 nt, Artificial Sequence
  Description of Artificial Sequence: Synthetic oligonucleotide
auucuaggccaggaccaga

SEQ ID NO: 354986 - RNA, 19 nt, Artificial Sequence
  Description of Artificial Sequence: Synthetic oligonucleotide
guggcggagaacccuaagu

SEQ ID NO: 354987 - RNA, 19 nt, Artificial Sequence
  Description of Artificial Sequence: Synthetic oligonucleotide
acccacgcuguacaccgaa

SEQ ID NO: 354988 - RNA, 19 nt, Artificial Sequence
  Description of Artificial Sequence: Synthetic oligonucleotide
agggcacuaucaguagaga

SEQ ID NO: 354989 - RNA, 19 nt, Artificial Sequence
  Description of Artificial Sequence: Synthetic oligonucleotide
uucuuaccgcagaccccac

SEQ ID NO: 354990 - RNA, 19 nt, Artificial Sequence
  Description of Artificial Sequence: Synthetic oligonucleotide
acgucuguuccaggcgcuc

SEQ ID NO: 354991 - RNA, 19 nt, Artificial Sequence
  Description of Artificial Sequence: Synthetic oligonucleotide
ggccuauuagagcuggucu

SEQ ID NO: 354992 - RNA, 19 nt, Artificial Sequence
  Description of Artificial Sequence: Synthetic oligonucleotide
ugccaugauuuagcuucug

SEQ ID NO: 354993 - RNA, 19 nt, Artificial Sequence
  Description of Artificial Sequence: Synthetic oligonucleotide
gucacauaacuguccuugu

SEQ ID NO: 354994 - RNA, 19 nt, Artificial Sequence
  Description of Artificial Sequence: Synthetic oligonucleotide
gacugguggucauugccau

SEQ ID NO: 354995 - RNA, 19 nt, Artificial Sequence
  Description of Artificial Sequence: Synthetic oligonucleotide
ggcuaucuugccaguuggg

SEQ ID NO: 354996 - RNA, 19 nt, Artificial Sequence
  Description of Artificial Sequence: Synthetic oligonucleotide
cacuaucaguagagaucug

SEQ ID NO: 354997 - RNA, 19 nt, Artificial Sequence
  Description of Artificial Sequence: Synthetic oligonucleotide
ggaguagcauccagugaug

SEQ ID NO: 354998 - RNA, 19 nt, Artificial Sequence
  Description of Artificial Sequence: Synthetic oligonucleotide
gugcgacccugcuuucagc

SEQ ID NO: 354999 - RNA, 19 nt, Artificial Sequence
  Description of Artificial Sequence: Synthetic oligonucleotide
guacagaggccggguguag

SEQ ID NO: 355000 - RNA, 19 nt, Artificial Sequence
  Description of Artificial Sequence: Synthetic oligonucleotide
gugucauacaaaagggcau

SEQ ID NO: 355001 - RNA, 19 nt, Artificial Sequence
  Description of Artificial Sequence: Synthetic oligonucleotide
agauucccauccaaccuuu

SEQ ID NO: 355002 - RNA, 19 nt, Artificial Sequence
  Description of Artificial Sequence: Synthetic oligonucleotide
ugcuaccaccugagugaac

SEQ ID NO: 355003 - RNA, 19 nt, Artificial Sequence
  Description of Artificial Sequence: Synthetic oligonucleotide
acccuaagugggacgccuc

SEQ ID NO: 355004 - RNA, 19 nt, Artificial Sequence
  Description of Artificial Sequence: Synthetic oligonucleotide
gauucccauccaaccuuuc

SEQ ID NO: 355005 - RNA, 19 nt, Artificial Sequence
  Description of Artificial Sequence: Synthetic oligonucleotide
guacaccgaagacagcaau

SEQ ID NO: 355006 - RNA, 19 nt, Artificial Sequence
  Description of Artificial Sequence: Synthetic oligonucleotide
agugaacugguggguuagu

SEQ ID NO: 355007 - RNA, 19 nt, Artificial Sequence
  Description of Artificial Sequence: Synthetic oligonucleotide
ccaauuagauucccaucca

SEQ ID NO: 355008 - RNA, 19 nt, Artificial Sequence
  Description of Artificial Sequence: Synthetic oligonucleotide
acgucacauaacuguccuu

SEQ ID NO: 355009 - RNA, 19 nt, Artificial Sequence
  Description of Artificial Sequence: Synthetic oligonucleotide
gcaccuaaugacaaucugu

SEQ ID NO: 355010 - RNA, 19 nt, Artificial Sequence
  Description of Artificial Sequence: Synthetic oligonucleotide
ggcuucacauggauccagc

SEQ ID NO: 355011 - RNA, 19 nt, Artificial Sequence
  Description of Artificial Sequence: Synthetic oligonucleotide
cgacccugcuuucagcuag

SEQ ID NO: 355012 - RNA, 19 nt, Artificial Sequence
  Description of Artificial Sequence: Synthetic oligonucleotide
ggaacccagcucaaagcuc

SEQ ID NO: 355013 - RNA, 19 nt, Artificial Sequence
  Description of Artificial Sequence: Synthetic oligonucleotide
gcaguguagugcgacccug

SEQ ID NO: 355014 - RNA, 19 nt, Artificial Sequence
  Description of Artificial Sequence: Synthetic oligonucleotide
aggcaucacaaggcguccu

SEQ ID NO: 355015 - RNA, 19 nt, Artificial Sequence
  Description of Artificial Sequence: Synthetic oligonucleotide
gguuagucugccaccaagu

SEQ ID NO: 355016 - RNA, 19 nt, Artificial Sequence
  Description of Artificial Sequence: Synthetic oligonucleotide
ggggaguagcauccaguga

SEQ ID NO: 355017 - RNA, 19 nt, Artificial Sequence
  Description of Artificial Sequence: Synthetic oligonucleotide
accgcggcagucacugcug

SEQ ID NO: 355018 - RNA, 19 nt, Artificial Sequence
  Description of Artificial Sequence: Synthetic oligonucleotide
caccaaguccaccgcggca

SEQ ID NO: 355019 - RNA, 19 nt, Artificial Sequence
  Description of Artificial Sequence: Synthetic oligonucleotide
gcucgucguaggcugcaug

SEQ ID NO: 355020 - RNA, 19 nt, Artificial Sequence
  Description of Artificial Sequence: Synthetic oligonucleotide
cccgucaccauuucaauau

SEQ ID NO: 355021 - RNA, 19 nt, Artificial Sequence
  Description of Artificial Sequence: Synthetic oligonucleotide
ggccuaagagucaccugac

SEQ ID NO: 355022 - RNA, 19 nt, Artificial Sequence
  Description of Artificial Sequence: Synthetic oligonucleotide
caccgaagacagcaauucu

SEQ ID NO: 355023 - RNA, 19 nt, Artificial Sequence
  Description of Artificial Sequence: Synthetic oligonucleotide
cacgagauggugcuucauu

SEQ ID NO: 355024 - RNA, 19 nt, Artificial Sequence
  Description of Artificial Sequence: Synthetic oligonucleotide
agcaaguggcacgcaucau

SEQ ID NO: 355025 - RNA, 19 nt, Artificial Sequence
  Description of Artificial Sequence: Synthetic oligonucleotide
cgucguaggcugcaugcac

SEQ ID NO: 355026 - RNA, 19 nt, Artificial Sequence
  Description of Artificial Sequence: Synthetic oligonucleotide
cagcguuugugagccauua

SEQ ID NO: 355027 - RNA, 19 nt, Artificial Sequence
  Description of Artificial Sequence: Synthetic oligonucleotide
ugcucgucguaggcugcau

SEQ ID NO: 355028 - RNA, 19 nt, Artificial Sequence
  Description of Artificial Sequence: Synthetic oligonucleotide
cucaugugucgaucucgcu

SEQ ID NO: 355029 - RNA, 19 nt, Artificial Sequence
  Description of Artificial Sequence: Synthetic oligonucleotide
ccagaaccucugcauccac

SEQ ID NO: 355030 - RNA, 19 nt, Artificial Sequence
  Description of Artificial Sequence: Synthetic oligonucleotide
auggccuauuagagcuggu

SEQ ID NO: 355031 - RNA, 19 nt, Artificial Sequence
  Description of Artificial Sequence: Synthetic oligonucleotide
cagugacuuggugcucguc

SEQ ID NO: 355032 - RNA, 19 nt, Artificial Sequence
  Description of Artificial Sequence: Synthetic oligonucleotide
gcccacgagauggugcuuc

SEQ ID NO: 355033 - RNA, 19 nt, Artificial Sequence
  Description of Artificial Sequence: Synthetic oligonucleotide
cuagaaccucagugcauuu

SEQ ID NO: 355034 - RNA, 19 nt, Artificial Sequence
  Description of Artificial Sequence: Synthetic oligonucleotide
auccagcguuugugagcca

SEQ ID NO: 355035 - RNA, 19 nt, Artificial Sequence
  Description of Artificial Sequence: Synthetic oligonucleotide
gaagaccgaggugcaugcu

SEQ ID NO: 355036 - RNA, 19 nt, Artificial Sequence
  Description of Artificial Sequence: Synthetic oligonucleotide
ggcucgccaucucagugcu

SEQ ID NO: 355037 - RNA, 19 nt, Artificial Sequence
  Description of Artificial Sequence: Synthetic oligonucleotide
accuagcaguguagugcga

SEQ ID NO: 355038 - RNA, 19 nt, Artificial Sequence
  Description of Artificial Sequence: Synthetic oligonucleotide
guguagugcgacccugcuu

SEQ ID NO: 355039 - RNA, 19 nt, Artificial Sequence
  Description of Artificial Sequence: Synthetic oligonucleotide
gugcucgucguaggcugca

SEQ ID NO: 355040 - RNA, 19 nt, Artificial Sequence
  Description of Artificial Sequence: Synthetic oligonucleotide
cacgucuguuccaggcgcu

SEQ ID NO: 355041 - RNA, 19 nt, Artificial Sequence
  Description of Artificial Sequence: Synthetic oligonucleotide
gguuuaguuucugcagaau

SEQ ID NO: 355042 - RNA, 19 nt, Artificial Sequence
  Description of Artificial Sequence: Synthetic oligonucleotide
caguggcggagaacccuaa

SEQ ID NO: 355043 - RNA, 19 nt, Artificial Sequence
  Description of Artificial Sequence: Synthetic oligonucleotide
cugagugaacugguggguu

SEQ ID NO: 355044 - RNA, 19 nt, Artificial Sequence
  Description of Artificial Sequence: Synthetic oligonucleotide
gccuaagagucaccugacu

SEQ ID NO: 355045 - RNA, 19 nt, Artificial Sequence
  Description of Artificial Sequence: Synthetic oligonucleotide
cugcgagggcagccuccug

SEQ ID NO: 355046 - RNA, 19 nt, Artificial Sequence
  Description of Artificial Sequence: Synthetic oligonucleotide
ggaacuccgcgcugucacu

SEQ ID NO: 355047 - RNA, 19 nt, Artificial Sequence
  Description of Artificial Sequence: Synthetic oligonucleotide
ccuggauucauuggauagu

SEQ ID NO: 355048 - RNA, 19 nt, Artificial Sequence
  Description of Artificial Sequence: Synthetic oligonucleotide
caacugcuaccaccugagu

SEQ ID NO: 355049 - RNA, 19 nt, Artificial Sequence
  Description of Artificial Sequence: Synthetic oligonucleotide
ggaccagaacauacaaauu

SEQ ID NO: 355050 - RNA, 19 nt, Artificial Sequence
  Description of Artificial Sequence: Synthetic oligonucleotide
ccauaagggcgaagaccga

SEQ ID NO: 355051 - RNA, 19 nt, Artificial Sequence
  Description of Artificial Sequence: Synthetic oligonucleotide
cggaacccagcucaaagcu

SEQ ID NO: 355052 - RNA, 19 nt, Artificial Sequence
  Description of Artificial Sequence: Synthetic oligonucleotide
cccacgagauggugcuuca

SEQ ID NO: 355053 - RNA, 19 nt, Artificial Sequence
  Description of Artificial Sequence: Synthetic oligonucleotide
ccccgucaccauuucaaua

SEQ ID NO: 355054 - RNA, 19 nt, Artificial Sequence
  Description of Artificial Sequence: Synthetic oligonucleotide
ccuauuagagcuggucuuu

SEQ ID NO: 355055 - RNA, 19 nt, Artificial Sequence
  Description of Artificial Sequence: Synthetic oligonucleotide
gcgacccugcuuucagcua

SEQ ID NO: 355056 - RNA, 19 nt, Artificial Sequence
  Description of Artificial Sequence: Synthetic oligonucleotide
cccuaagugggacgccucu

SEQ ID NO: 355057 - RNA, 19 nt, Artificial Sequence
  Description of Artificial Sequence: Synthetic oligonucleotide
ggcguccuguguagcuaga

SEQ ID NO: 355058 - RNA, 19 nt, Artificial Sequence
  Description of Artificial Sequence: Synthetic oligonucleotide
cccaugguccuguggccua

SEQ ID NO: 355059 - RNA, 19 nt, Artificial Sequence
  Description of Artificial Sequence: Synthetic oligonucleotide
gcccggaaaauguggccuu

SEQ ID NO: 355060 - RNA, 19 nt, Artificial Sequence
  Description of Artificial Sequence: Synthetic oligonucleotide
cccacgagucaggcugcug

SEQ ID NO: 355061 - RNA, 19 nt, Artificial Sequence
  Description of Artificial Sequence: Synthetic oligonucleotide
ccuggcucgccaucucagu

SEQ ID NO: 355062 - RNA, 19 nt, Artificial Sequence
  Description of Artificial Sequence: Synthetic oligonucleotide
ccggucaugcucuguggau

SEQ ID NO: 355063 - RNA, 19 nt, Artificial Sequence
  Description of Artificial Sequence: Synthetic oligonucleotide
ggcgaagaccgaggugcau

SEQ ID NO: 355064 - RNA, 19 nt, Artificial Sequence
  Description of Artificial Sequence: Synthetic oligonucleotide
ccgucaccauuucaauauu

SEQ ID NO: 355065 - RNA, 19 nt, Artificial Sequence
  Description of Artificial Sequence: Synthetic oligonucleotide
gcucgccaucucagugcuc

SEQ ID NO: 355066 - RNA, 19 nt, Artificial Sequence
  Description of Artificial Sequence: Synthetic oligonucleotide
ccaggccauuauaguuacu

SEQ ID NO: 355067 - RNA, 19 nt, Artificial Sequence
  Description of Artificial Sequence: Synthetic oligonucleotide
ccuaagugggacgccucuu

SEQ ID NO: 355068 - RNA, 19 nt, Artificial Sequence
  Description of Artificial Sequence: Synthetic oligonucleotide
ccccggaacccagcucaaa

SEQ ID NO: 355069 - RNA, 19 nt, Artificial Sequence
  Description of Artificial Sequence: Synthetic oligonucleotide
gcccacgagucaggcugcu

SEQ ID NO: 355070 - RNA, 19 nt, Artificial Sequence
  Description of Artificial Sequence: Synthetic oligonucleotide
cgcagaccccacagccaua

SEQ ID NO: 355071 - RNA, 19 nt, Artificial Sequence
  Description of Artificial Sequence: Synthetic oligonucleotide
ggcccacgagauggugcuu

SEQ ID NO: 355072 - RNA, 19 nt, Artificial Sequence
  Description of Artificial Sequence: Synthetic oligonucleotide
aauagagugcucccaaagg

SEQ ID NO: 355073 - RNA, 19 nt, Artificial Sequence
  Description of Artificial Sequence: Synthetic oligonucleotide
ugaauuuagauuuuaccca

SEQ ID NO: 355074 - RNA, 19 nt, Artificial Sequence
  Description of Artificial Sequence: Synthetic oligonucleotide
cuuguaaggauguaaggcg

SEQ ID NO: 355075 - RNA, 19 nt, Artificial Sequence
  Description of Artificial Sequence: Synthetic oligonucleotide
ucagauacgacuuuugggu

SEQ ID NO: 355076 - RNA, 19 nt, Artificial Sequence
  Description of Artificial Sequence: Synthetic oligonucleotide
aaggauguaaggcgaaaac

SEQ ID NO: 355077 - RNA, 19 nt, Artificial Sequence
  Description of Artificial Sequence: Synthetic oligonucleotide
aauaaggacucucuggaca

SEQ ID NO: 355078 - RNA, 19 nt, Artificial Sequence
  Description of Artificial Sequence: Synthetic oligonucleotide
uguagacucaguaaggcca

SEQ ID NO: 355079 - RNA, 19 nt, Artificial Sequence
  Description of Artificial Sequence: Synthetic oligonucleotide
uagauuuuacccaagaguu

SEQ ID NO: 355080 - RNA, 19 nt, Artificial Sequence
  Description of Artificial Sequence: Synthetic oligonucleotide
uucacgaucgcccacacgu

SEQ ID NO: 355081 - RNA, 19 nt, Artificial Sequence
  Description of Artificial Sequence: Synthetic oligonucleotide
uucagauacgacuuuuggg

SEQ ID NO: 355082 - RNA, 19 nt, Artificial Sequence
  Description of Artificial Sequence: Synthetic oligonucleotide
auaccacccauguucaucc

SEQ ID NO: 355083 - RNA, 19 nt, Artificial Sequence
  Description of Artificial Sequence: Synthetic oligonucleotide
guuuguaccacucuucugc

SEQ ID NO: 355084 - RNA, 19 nt, Artificial Sequence
  Description of Artificial Sequence: Synthetic oligonucleotide
aaugaacgggaacacgagg

SEQ ID NO: 355085 - RNA, 19 nt, Artificial Sequence
  Description of Artificial Sequence: Synthetic oligonucleotide
aaggcgaaaacgaagcugg

SEQ ID NO: 355086 - RNA, 19 nt, Artificial Sequence
  Description of Artificial Sequence: Synthetic oligonucleotide
uuaucacagguauacauca

SEQ ID NO: 355087 - RNA, 19 nt, Artificial Sequence
  Description of Artificial Sequence: Synthetic oligonucleotide
auaauagccccuugcagac

SEQ ID NO: 355088 - RNA, 19 nt, Artificial Sequence
  Description of Artificial Sequence: Synthetic oligonucleotide
agcaacaacacaguagacc

SEQ ID NO: 355089 - RNA, 19 nt, Artificial Sequence
  Description of Artificial Sequence: Synthetic oligonucleotide
uaauagagugcucccaaag

SEQ ID NO: 355090 - RNA, 19 nt, Artificial Sequence
  Description of Artificial Sequence: Synthetic oligonucleotide
aaauuaugauuucagcuuu

SEQ ID NO: 355091 - RNA, 19 nt, Artificial Sequence
  Description of Artificial Sequence: Synthetic oligonucleotide
ucauaauagccccuugcag

SEQ ID NO: 355092 - RNA, 19 nt, Artificial Sequence
  Description of Artificial Sequence: Synthetic oligonucleotide
aagacuguuuuaucacagg

SEQ ID NO: 355093 - RNA, 19 nt, Artificial Sequence
  Description of Artificial Sequence: Synthetic oligonucleotide
auaguuguaaugaaccuuc

SEQ ID NO: 355094 - RNA, 19 nt, Artificial Sequence
  Description of Artificial Sequence: Synthetic oligonucleotide
cacugcuaaaaccugagcc

SEQ ID NO: 355095 - RNA, 19 nt, Artificial Sequence
  Description of Artificial Sequence: Synthetic oligonucleotide
cuucguagcucucaaaagc

SEQ ID NO: 355096 - RNA, 19 nt, Artificial Sequence
  Description of Artificial Sequence: Synthetic oligonucleotide
aguguagacucaguaaggc

SEQ ID NO: 355097 - RNA, 19 nt, Artificial Sequence
  Description of Artificial Sequence: Synthetic oligonucleotide
agacacauagcuucccugg

SEQ ID NO: 355098 - RNA, 19 nt, Artificial Sequence
  Description of Artificial Sequence: Synthetic oligonucleotide
uagcauuccaggcaucggg

SEQ ID NO: 355099 - RNA, 19 nt, Artificial Sequence
  Description of Artificial Sequence: Synthetic oligonucleotide
aucgggguuccucagacac

SEQ ID NO: 355100 - RNA, 19 nt, Artificial Sequence
  Description of Artificial Sequence: Synthetic oligonucleotide
ugcacgaagagaaugcagu

SEQ ID NO: 355101 - RNA, 19 nt, Artificial Sequence
  Description of Artificial Sequence: Synthetic oligonucleotide
uuugugaagaagaguucag

SEQ ID NO: 355102 - RNA, 19 nt, Artificial Sequence
  Description of Artificial Sequence: Synthetic oligonucleotide
gacacuaugcgacugguca

SEQ ID NO: 355103 - RNA, 19 nt, Artificial Sequence
  Description of Artificial Sequence: Synthetic oligonucleotide
ucgggguuguucacgaucg

SEQ ID NO: 355104 - RNA, 19 nt, Artificial Sequence
  Description of Artificial Sequence: Synthetic oligonucleotide
guagagucggcccagauuc

SEQ ID NO: 355105 - RNA, 19 nt, Artificial Sequence
  Description of Artificial Sequence: Synthetic oligonucleotide
aagucguucgcgaaacggc

SEQ ID NO: 355106 - RNA, 19 nt, Artificial Sequence
  Description of Artificial Sequence: Synthetic oligonucleotide
aaaacgaagcuggauuguc

SEQ ID NO: 355107 - RNA, 19 nt, Artificial Sequence
  Description of Artificial Sequence: Synthetic oligonucleotide
aaaccaagcacacuccaaa

SEQ ID NO: 355108 - RNA, 19 nt, Artificial Sequence
  Description of Artificial Sequence: Synthetic oligonucleotide
uccucagacacuaugcgac

SEQ ID NO: 355109 - RNA, 19 nt, Artificial Sequence
  Description of Artificial Sequence: Synthetic oligonucleotide
acaaccaaauuucauucug

SEQ ID NO: 355110 - RNA, 19 nt, Artificial Sequence
  Description of Artificial Sequence: Synthetic oligonucleotide
aaacgaagcuggauugucc

SEQ ID NO: 355111 - RNA, 19 nt, Artificial Sequence
  Description of Artificial Sequence: Synthetic oligonucleotide
auaacugugugggaagcgc

SEQ ID NO: 355112 - RNA, 19 nt, Artificial Sequence
  Description of Artificial Sequence: Synthetic oligonucleotide
aacaccgugacacccgucu

SEQ ID NO: 355113 - RNA, 19 nt, Artificial Sequence
  Description of Artificial Sequence: Synthetic oligonucleotide
aaccuucgcauuguggggc

SEQ ID NO: 355114 - RNA, 19 nt, Artificial Sequence
  Description of Artificial Sequence: Synthetic oligonucleotide
aagcaaguagcaacaacac

SEQ ID NO: 355115 - RNA, 19 nt, Artificial Sequence
  Description of Artificial Sequence: Synthetic oligonucleotide
cuugaagacuguuuuauca

SEQ ID NO: 355116 - RNA, 19 nt, Artificial Sequence
  Description of Artificial Sequence: Synthetic oligonucleotide
uguaauagagugcucccaa

SEQ ID NO: 355117 - RNA, 19 nt, Artificial Sequence
  Description of Artificial Sequence: Synthetic oligonucleotide
aacgaagcuggauuguccu

SEQ ID NO: 355118 - RNA, 19 nt, Artificial Sequence
  Description of Artificial Sequence: Synthetic oligonucleotide
ugugaagaagaguucagau

SEQ ID NO: 355119 - RNA, 19 nt, Artificial Sequence
  Description of Artificial Sequence: Synthetic oligonucleotide
auagagugcucccaaaggu

SEQ ID NO: 355120 - RNA, 19 nt, Artificial Sequence
  Description of Artificial Sequence: Synthetic oligonucleotide
aggauguaaggcgaaaacg

SEQ ID NO: 355121 - RNA, 19 nt, Artificial Sequence
  Description of Artificial Sequence: Synthetic oligonucleotide
gacaugcuaacacaucagc

SEQ ID NO: 355122 - RNA, 19 nt, Artificial Sequence
  Description of Artificial Sequence: Synthetic oligonucleotide
cauauggucuccaccagag

SEQ ID NO: 355123 - RNA, 19 nt, Artificial Sequence
  Description of Artificial Sequence: Synthetic oligonucleotide
aaccuuguaaggauguaag

SEQ ID NO: 355124 - RNA, 19 nt, Artificial Sequence
  Description of Artificial Sequence: Synthetic oligonucleotide
acauucaccgcauggaagu

SEQ ID NO: 355125 - RNA, 19 nt, Artificial Sequence
  Description of Artificial Sequence: Synthetic oligonucleotide
auaaguuauacaauaaaua

SEQ ID NO: 355126 - RNA, 19 nt, Artificial Sequence
  Description of Artificial Sequence: Synthetic oligonucleotide
uauacaucagcacgagggu

SEQ ID NO: 355127 - RNA, 19 nt, Artificial Sequence
  Description of Artificial Sequence: Synthetic oligonucleotide
ucccgguacacuuccaagg

SEQ ID NO: 355128 - RNA, 19 nt, Artificial Sequence
  Description of Artificial Sequence: Synthetic oligonucleotide
aguagcaacaacacaguag

SEQ ID NO: 355129 - RNA, 19 nt, Artificial Sequence
  Description of Artificial Sequence: Synthetic oligonucleotide
uucacgguuuuccagguaa

SEQ ID NO: 355130 - RNA, 19 nt, Artificial Sequence
  Description of Artificial Sequence: Synthetic oligonucleotide
uauguuuagccugaaggac

SEQ ID NO: 355131 - RNA, 19 nt, Artificial Sequence
  Description of Artificial Sequence: Synthetic oligonucleotide
acaaacucgccccgcagcg

SEQ ID NO: 355132 - RNA, 19 nt, Artificial Sequence
  Description of Artificial Sequence: Synthetic oligonucleotide
gaagucguucgcgaaacgg

SEQ ID NO: 355133 - RNA, 19 nt, Artificial Sequence
  Description of Artificial Sequence: Synthetic oligonucleotide
uuaggaaauuggcauaguu

SEQ ID NO: 355134 - RNA, 19 nt, Artificial Sequence
  Description of Artificial Sequence: Synthetic oligonucleotide
uggacaaccaaauuucauu

SEQ ID NO: 355135 - RNA, 19 nt, Artificial Sequence
  Description of Artificial Sequence: Synthetic oligonucleotide
uccacaggcggaaauacaa

SEQ ID NO: 355136 - RNA, 19 nt, Artificial Sequence
  Description of Artificial Sequence: Synthetic oligonucleotide
uauguuugaucccuuucuc

SEQ ID NO: 355137 - RNA, 19 nt, Artificial Sequence
  Description of Artificial Sequence: Synthetic oligonucleotide
aaaagccaguccgcgauuc

SEQ ID NO: 355138 - RNA, 19 nt, Artificial Sequence
  Description of Artificial Sequence: Synthetic oligonucleotide
ucgucgugcacaaacucgc

SEQ ID NO: 355139 - RNA, 19 nt, Artificial Sequence
  Description of Artificial Sequence: Synthetic oligonucleotide
ucuauguuugaucccuuuc

SEQ ID NO: 355140 - RNA, 19 nt, Artificial Sequence
  Description of Artificial Sequence: Synthetic oligonucleotide
ugccagucguagcacaggg

SEQ ID NO: 355141 - RNA, 19 nt, Artificial Sequence
  Description of Artificial Sequence: Synthetic oligonucleotide
uaguuguaaugaaccuucg

SEQ ID NO: 355142 - RNA, 19 nt, Artificial Sequence
  Description of Artificial Sequence: Synthetic oligonucleotide
uaaggcgaaaacgaagcug

SEQ ID NO: 355143 - RNA, 19 nt, Artificial Sequence
  Description of Artificial Sequence: Synthetic oligonucleotide
ucucugacuucuuguaacc

SEQ ID NO: 355144 - RNA, 19 nt, Artificial Sequence
  Description of Artificial Sequence: Synthetic oligonucleotide
caguagacccaucagggag

SEQ ID NO: 355145 - RNA, 19 nt, Artificial Sequence
  Description of Artificial Sequence: Synthetic oligonucleotide
gauugcugacagaaggcgg

SEQ ID NO: 355146 - RNA, 19 nt, Artificial Sequence
  Description of Artificial Sequence: Synthetic oligonucleotide
caggcggaaauacaaaaug

SEQ ID NO: 355147 - RNA, 19 nt, Artificial Sequence
  Description of Artificial Sequence: Synthetic oligonucleotide
uguaaccuucucuccaggc

SEQ ID NO: 355148 - RNA, 19 nt, Artificial Sequence
  Description of Artificial Sequence: Synthetic oligonucleotide
uugugcuccagccucuuga

SEQ ID NO: 355149 - RNA, 19 nt, Artificial Sequence
  Description of Artificial Sequence: Synthetic oligonucleotide
ucgugcacaaacucgcccc

SEQ ID NO: 355150 - RNA, 19 nt, Artificial Sequence
  Description of Artificial Sequence: Synthetic oligonucleotide
gaaauuggcauaguuguaa

SEQ ID NO: 355151 - RNA, 19 nt, Artificial Sequence
  Description of Artificial Sequence: Synthetic oligonucleotide
uucgcgaaacggcccagcg

SEQ ID NO: 355152 - RNA, 19 nt, Artificial Sequence
  Description of Artificial Sequence: Synthetic oligonucleotide
cuaggcauguacaggacuc

SEQ ID NO: 355153 - RNA, 19 nt, Artificial Sequence
  Description of Artificial Sequence: Synthetic oligonucleotide
ugucggauaccacccaugu

SEQ ID NO: 355154 - RNA, 19 nt, Artificial Sequence
  Description of Artificial Sequence: Synthetic oligonucleotide
cucggugugaaccgggugc

SEQ ID NO: 355155 - RNA, 19 nt, Artificial Sequence
  Description of Artificial Sequence: Synthetic oligonucleotide
aggaugguagcaagguucc

SEQ ID NO: 355156 - RNA, 19 nt, Artificial Sequence
  Description of Artificial Sequence: Synthetic oligonucleotide
uggucaucuuuucagcuuc

SEQ ID NO: 355157 - RNA, 19 nt, Artificial Sequence
  Description of Artificial Sequence: Synthetic oligonucleotide
ucauccaugcuugugccug

SEQ ID NO: 355158 - RNA, 19 nt, Artificial Sequence
  Description of Artificial Sequence: Synthetic oligonucleotide
uggcauaguuguaaugaac

SEQ ID NO: 355159 - RNA, 19 nt, Artificial Sequence
  Description of Artificial Sequence: Synthetic oligonucleotide
aauuaugauuucagcuuug

SEQ ID NO: 355160 - RNA, 19 nt, Artificial Sequence
  Description of Artificial Sequence: Synthetic oligonucleotide
auaaggacucucuggacaa

SEQ ID NO: 355161 - RNA, 19 nt, Artificial Sequence
  Description of Artificial Sequence: Synthetic oligonucleotide
agucguucgcgaaacggcc

SEQ ID NO: 355162 - RNA, 19 nt, Artificial Sequence
  Description of Artificial Sequence: Synthetic oligonucleotide
acgacuuuugggucccugg

SEQ ID NO: 355163 - RNA, 19 nt, Artificial Sequence
  Description of Artificial Sequence: Synthetic oligonucleotide
uguccuugggucuauguuu

SEQ ID NO: 355164 - RNA, 19 nt, Artificial Sequence
  Description of Artificial Sequence: Synthetic oligonucleotide
gacuggucaucuuuucagc

SEQ ID NO: 355165 - RNA, 19 nt, Artificial Sequence
  Description of Artificial Sequence: Synthetic oligonucleotide
uucaccgcauggaaguaga

SEQ ID NO: 355166 - RNA, 19 nt, Artificial Sequence
  Description of Artificial Sequence: Synthetic oligonucleotide
ugacauucaccgcauggaa

SEQ ID NO: 355167 - RNA, 19 nt, Artificial Sequence
  Description of Artificial Sequence: Synthetic oligonucleotide
agcacgagggucaccaggc

SEQ ID NO: 355168 - RNA, 19 nt, Artificial Sequence
  Description of Artificial Sequence: Synthetic oligonucleotide
uggaaugaacgggaacacg

SEQ ID NO: 355169 - RNA, 19 nt, Artificial Sequence
  Description of Artificial Sequence: Synthetic oligonucleotide
uguaaggauguaaggcgaa

SEQ ID NO: 355170 - RNA, 19 nt, Artificial Sequence
  Description of Artificial Sequence: Synthetic oligonucleotide
gaaugaacgggaacacgag

SEQ ID NO: 355171 - RNA, 19 nt, Artificial Sequence
  Description of Artificial Sequence: Synthetic oligonucleotide
agcaaguagcaacaacaca

SEQ ID NO: 355172 - RNA, 19 nt, Artificial Sequence
  Description of Artificial Sequence: Synthetic oligonucleotide
cuugagggcgguucuguag

SEQ ID NO: 355173 - RNA, 19 nt, Artificial Sequence
  Description of Artificial Sequence: Synthetic oligonucleotide
aguagacccaucagggagg

SEQ ID NO: 355174 - RNA, 19 nt, Artificial Sequence
  Description of Artificial Sequence: Synthetic oligonucleotide
cauugcucaacuuguccug

SEQ ID NO: 355175 - RNA, 19 nt, Artificial Sequence
  Description of Artificial Sequence: Synthetic oligonucleotide
agagccagagucaacuaag

SEQ ID NO: 355176 - RNA, 19 nt, Artificial Sequence
  Description of Artificial Sequence: Synthetic oligonucleotide
accaagcacacuccaaaca

SEQ ID NO: 355177 - RNA, 19 nt, Artificial Sequence
  Description of Artificial Sequence: Synthetic oligonucleotide
guguagacucaguaaggcc

SEQ ID NO: 355178 - RNA, 19 nt, Artificial Sequence
  Description of Artificial Sequence: Synthetic oligonucleotide
aggaccucagcugugcggg

SEQ ID NO: 355179 - RNA, 19 nt, Artificial Sequence
  Description of Artificial Sequence: Synthetic oligonucleotide
guagaaugacauucaccgc

SEQ ID NO: 355180 - RNA, 19 nt, Artificial Sequence
  Description of Artificial Sequence: Synthetic oligonucleotide
ucacugcuaaaaccugagc

SEQ ID NO: 355181 - RNA, 19 nt, Artificial Sequence
  Description of Artificial Sequence: Synthetic oligonucleotide
uuagccugaaggacagcac

SEQ ID NO: 355182 - RNA, 19 nt, Artificial Sequence
  Description of Artificial Sequence: Synthetic oligonucleotide
acguuuguaccacucuucu

SEQ ID NO: 355183 - RNA, 19 nt, Artificial Sequence
  Description of Artificial Sequence: Synthetic oligonucleotide
uccgaccuuggucuuuuag

SEQ ID NO: 355184 - RNA, 19 nt, Artificial Sequence
  Description of Artificial Sequence: Synthetic oligonucleotide
ggacaaccaaauuucauuc

SEQ ID NO: 355185 - RNA, 19 nt, Artificial Sequence
  Description of Artificial Sequence: Synthetic oligonucleotide
aacagcagacaugcuaaca

SEQ ID NO: 355186 - RNA, 19 nt, Artificial Sequence
  Description of Artificial Sequence: Synthetic oligonucleotide
auacaucagcacgaggguc

SEQ ID NO: 355187 - RNA, 19 nt, Artificial Sequence
  Description of Artificial Sequence: Synthetic oligonucleotide
caaauuaugauuucagcuu

SEQ ID NO: 355188 - RNA, 19 nt, Artificial Sequence
  Description of Artificial Sequence: Synthetic oligonucleotide
cucgagugccuucucgugg

SEQ ID NO: 355189 - RNA, 19 nt, Artificial Sequence
  Description of Artificial Sequence: Synthetic oligonucleotide
cuugugucggccaguguug

SEQ ID NO: 355190 - RNA, 19 nt, Artificial Sequence
  Description of Artificial Sequence: Synthetic oligonucleotide
cacauagcuucccuggaug

SEQ ID NO: 355191 - RNA, 19 nt, Artificial Sequence
  Description of Artificial Sequence: Synthetic oligonucleotide
uacaggacucucucggcca

SEQ ID NO: 355192 - RNA, 19 nt, Artificial Sequence
  Description of Artificial Sequence: Synthetic oligonucleotide
cacgucgucgugcacaaac

SEQ ID NO: 355193 - RNA, 19 nt, Artificial Sequence
  Description of Artificial Sequence: Synthetic oligonucleotide
caguccgcgauucuugaag

SEQ ID NO: 355194 - RNA, 19 nt, Artificial Sequence
  Description of Artificial Sequence: Synthetic oligonucleotide
gucgucgugcacaaacucg

SEQ ID NO: 355195 - RNA, 19 nt, Artificial Sequence
  Description of Artificial Sequence: Synthetic oligonucleotide
uuguaauagagugcuccca

SEQ ID NO: 355196 - RNA, 19 nt, Artificial Sequence
  Description of Artificial Sequence: Synthetic oligonucleotide
uaaggauguaaggcgaaaa

SEQ ID NO: 355197 - RNA, 19 nt, Artificial Sequence
  Description of Artificial Sequence: Synthetic oligonucleotide
ggucuuuuaggaaauuggc

SEQ ID NO: 355198 - RNA, 19 nt, Artificial Sequence
  Description of Artificial Sequence: Synthetic oligonucleotide
uucccgguacacuuccaag

SEQ ID NO: 355199 - RNA, 19 nt, Artificial Sequence
  Description of Artificial Sequence: Synthetic oligonucleotide
guacaggacucucucggcc

SEQ ID NO: 355200 - RNA, 19 nt, Artificial Sequence
  Description of Artificial Sequence: Synthetic oligonucleotide
caccccauugcucaacuug

SEQ ID NO: 355201 - RNA, 19 nt, Artificial Sequence
  Description of Artificial Sequence: Synthetic oligonucleotide
ucugacccaucacugcuaa

SEQ ID NO: 355202 - RNA, 19 nt, Artificial Sequence
  Description of Artificial Sequence: Synthetic oligonucleotide
ggaucuguagagucggccc

SEQ ID NO: 355203 - RNA, 19 nt, Artificial Sequence
  Description of Artificial Sequence: Synthetic oligonucleotide
acccgucuccuucaccagc

SEQ ID NO: 355204 - RNA, 19 nt, Artificial Sequence
  Description of Artificial Sequence: Synthetic oligonucleotide
aaccgggugcaccgcaaag

SEQ ID NO: 355205 - RNA, 19 nt, Artificial Sequence
  Description of Artificial Sequence: Synthetic oligonucleotide
gaucuguagagucggccca

SEQ ID NO: 355206 - RNA, 19 nt, Artificial Sequence
  Description of Artificial Sequence: Synthetic oligonucleotide
cagguauacaucagcacga

SEQ ID NO: 355207 - RNA, 19 nt, Artificial Sequence
  Description of Artificial Sequence: Synthetic oligonucleotide
agucggcccagauucacca

SEQ ID NO: 355208 - RNA, 19 nt, Artificial Sequence
  Description of Artificial Sequence: Synthetic oligonucleotide
auguuuagccugaaggaca

SEQ ID NO: 355209 - RNA, 19 nt, Artificial Sequence
  Description of Artificial Sequence: Synthetic oligonucleotide
uggaaguagaaaggauuca

SEQ ID NO: 355210 - RNA, 19 nt, Artificial Sequence
  Description of Artificial Sequence: Synthetic oligonucleotide
agaagucguucgcgaaacg

SEQ ID NO: 355211 - RNA, 19 nt, Artificial Sequence
  Description of Artificial Sequence: Synthetic oligonucleotide
ggauguaaggcgaaaacga

SEQ ID NO: 355212 - RNA, 19 nt, Artificial Sequence
  Description of Artificial Sequence: Synthetic oligonucleotide
cacgaagagaaugcaguag

SEQ ID NO: 355213 - RNA, 19 nt, Artificial Sequence
  Description of Artificial Sequence: Synthetic oligonucleotide
gguagcauuccaggcaucg

SEQ ID NO: 355214 - RNA, 19 nt, Artificial Sequence
  Description of Artificial Sequence: Synthetic oligonucleotide
acaugcuaacacaucagcu

SEQ ID NO: 355215 - RNA, 19 nt, Artificial Sequence
  Description of Artificial Sequence: Synthetic oligonucleotide
uggucugacccaucacugc

SEQ ID NO: 355216 - RNA, 19 nt, Artificial Sequence
  Description of Artificial Sequence: Synthetic oligonucleotide
cacgaucgcccacacgucg

SEQ ID NO: 355217 - RNA, 19 nt, Artificial Sequence
  Description of Artificial Sequence: Synthetic oligonucleotide
auagcuucccuggaugugu

SEQ ID NO: 355218 - RNA, 19 nt, Artificial Sequence
  Description of Artificial Sequence: Synthetic oligonucleotide
uaaugaaccuucgcauugu

SEQ ID NO: 355219 - RNA, 19 nt, Artificial Sequence
  Description of Artificial Sequence: Synthetic oligonucleotide
accgccucggugugaaccg

SEQ ID NO: 355220 - RNA, 19 nt, Artificial Sequence
  Description of Artificial Sequence: Synthetic oligonucleotide
gauguaaggcgaaaacgaa

SEQ ID NO: 355221 - RNA, 19 nt, Artificial Sequence
  Description of Artificial Sequence: Synthetic oligonucleotide
gauggcucgggcugagcug

SEQ ID NO: 355222 - RNA, 19 nt, Artificial Sequence
  Description of Artificial Sequence: Synthetic oligonucleotide
cacguuuguaccacucuuc

SEQ ID NO: 355223 - RNA, 19 nt, Artificial Sequence
  Description of Artificial Sequence: Synthetic oligonucleotide
cugacagaucaccccauug

SEQ ID NO: 355224 - RNA, 19 nt, Artificial Sequence
  Description of Artificial Sequence: Synthetic oligonucleotide
auggcucgggcugagcugg

SEQ ID NO: 355225 - RNA, 19 nt, Artificial Sequence
  Description of Artificial Sequence: Synthetic oligonucleotide
ugucgauggccucgagugc

SEQ ID NO: 355226 - RNA, 19 nt, Artificial Sequence
  Description of Artificial Sequence: Synthetic oligonucleotide
aguccgcgauucuugaaga

SEQ ID NO: 355227 - RNA, 19 nt, Artificial Sequence
  Description of Artificial Sequence: Synthetic oligonucleotide
auuuuacccaagaguuuuc

SEQ ID NO: 355228 - RNA, 19 nt, Artificial Sequence
  Description of Artificial Sequence: Synthetic oligonucleotide
gaacuccagaccugaauaa

SEQ ID NO: 355229 - RNA, 19 nt, Artificial Sequence
  Description of Artificial Sequence: Synthetic oligonucleotide
gguauacaucagcacgagg

SEQ ID NO: 355230 - RNA, 19 nt, Artificial Sequence
  Description of Artificial Sequence: Synthetic oligonucleotide
ggaaugaacgggaacacga

SEQ ID NO: 355231 - RNA, 19 nt, Artificial Sequence
  Description of Artificial Sequence: Synthetic oligonucleotide
uccgcgauucuugaagacu

SEQ ID NO: 355232 - RNA, 19 nt, Artificial Sequence
  Description of Artificial Sequence: Synthetic oligonucleotide
ucgagugccuucucguggu

SEQ ID NO: 355233 - RNA, 19 nt, Artificial Sequence
  Description of Artificial Sequence: Synthetic oligonucleotide
ugggucuauguuugauccc

SEQ ID NO: 355234 - RNA, 19 nt, Artificial Sequence
  Description of Artificial Sequence: Synthetic oligonucleotide
ucguucgcgaaacggccca

SEQ ID NO: 355235 - RNA, 19 nt, Artificial Sequence
  Description of Artificial Sequence: Synthetic oligonucleotide
caacacaguagacccauca

SEQ ID NO: 355236 - RNA, 19 nt, Artificial Sequence
  Description of Artificial Sequence: Synthetic oligonucleotide
cagauacgacuuuuggguc

SEQ ID NO: 355237 - RNA, 19 nt, Artificial Sequence
  Description of Artificial Sequence: Synthetic oligonucleotide
cuaacacaucagcucugcc

SEQ ID NO: 355238 - RNA, 19 nt, Artificial Sequence
  Description of Artificial Sequence: Synthetic oligonucleotide
gucgugcacaaacucgccc

SEQ ID NO: 355239 - RNA, 19 nt, Artificial Sequence
  Description of Artificial Sequence: Synthetic oligonucleotide
ccaugcuugugccuggucg

SEQ ID NO: 355240 - RNA, 19 nt, Artificial Sequence
  Description of Artificial Sequence: Synthetic oligonucleotide
aguucagauacgacuuuug

SEQ ID NO: 355241 - RNA, 19 nt, Artificial Sequence
  Description of Artificial Sequence: Synthetic oligonucleotide
ccaugcacgaagagaaugc

SEQ ID NO: 355242 - RNA, 19 nt, Artificial Sequence
  Description of Artificial Sequence: Synthetic oligonucleotide
caagguuccucacauccca

SEQ ID NO: 355243 - RNA, 19 nt, Artificial Sequence
  Description of Artificial Sequence: Synthetic oligonucleotide
cuauguuugaucccuuucu

SEQ ID NO: 355244 - RNA, 19 nt, Artificial Sequence
  Description of Artificial Sequence: Synthetic oligonucleotide
agagucggcccagauucac

SEQ ID NO: 355245 - RNA, 19 nt, Artificial Sequence
  Description of Artificial Sequence: Synthetic oligonucleotide
ugggaagcgcuguuuucug

SEQ ID NO: 355246 - RNA, 19 nt, Artificial Sequence
  Description of Artificial Sequence: Synthetic oligonucleotide
auucaccgcauggaaguag

SEQ ID NO: 355247 - RNA, 19 nt, Artificial Sequence
  Description of Artificial Sequence: Synthetic oligonucleotide
agggagacagcuucccggu

SEQ ID NO: 355248 - RNA, 19 nt, Artificial Sequence
  Description of Artificial Sequence: Synthetic oligonucleotide
uggauagccugcugguagu

SEQ ID NO: 355249 - RNA, 19 nt, Artificial Sequence
  Description of Artificial Sequence: Synthetic oligonucleotide
gcucucucauaauagcccc

SEQ ID NO: 355250 - RNA, 19 nt, Artificial Sequence
  Description of Artificial Sequence: Synthetic oligonucleotide
uucgcauuguggggcagag

SEQ ID NO: 355251 - RNA, 19 nt, Artificial Sequence
  Description of Artificial Sequence: Synthetic oligonucleotide
gcuucguagcucucaaaag

SEQ ID NO: 355252 - RNA, 19 nt, Artificial Sequence
  Description of Artificial Sequence: Synthetic oligonucleotide
uuuaggaaauuggcauagu

SEQ ID NO: 355253 - RNA, 19 nt, Artificial Sequence
  Description of Artificial Sequence: Synthetic oligonucleotide
ucgcgaaacggcccagcgc

SEQ ID NO: 355254 - RNA, 19 nt, Artificial Sequence
  Description of Artificial Sequence: Synthetic oligonucleotide
gagagccagagucaacuaa

SEQ ID NO: 355255 - RNA, 19 nt, Artificial Sequence
  Description of Artificial Sequence: Synthetic oligonucleotide
ggcggaaauacaaaaugac

SEQ ID NO: 355256 - RNA, 19 nt, Artificial Sequence
  Description of Artificial Sequence: Synthetic oligonucleotide
caucacugcuaaaaccuga

SEQ ID NO: 355257 - RNA, 19 nt, Artificial Sequence
  Description of Artificial Sequence: Synthetic oligonucleotide
agguauacaucagcacgag

SEQ ID NO: 355258 - RNA, 19 nt, Artificial Sequence
  Description of Artificial Sequence: Synthetic oligonucleotide
gacaaccaaauuucauucu

SEQ ID NO: 355259 - RNA, 19 nt, Artificial Sequence
  Description of Artificial Sequence: Synthetic oligonucleotide
ugcucucacgguggggugg

SEQ ID NO: 355260 - RNA, 19 nt, Artificial Sequence
  Description of Artificial Sequence: Synthetic oligonucleotide
uugccagucguagcacagg

SEQ ID NO: 355261 - RNA, 19 nt, Artificial Sequence
  Description of Artificial Sequence: Synthetic oligonucleotide
cagaagucguucgcgaaac

SEQ ID NO: 355262 - RNA, 19 nt, Artificial Sequence
  Description of Artificial Sequence: Synthetic oligonucleotide
ugcuaggcauguacaggac

SEQ ID NO: 355263 - RNA, 19 nt, Artificial Sequence
  Description of Artificial Sequence: Synthetic oligonucleotide
ccagucguagcacagggug

SEQ ID NO: 355264 - RNA, 19 nt, Artificial Sequence
  Description of Artificial Sequence: Synthetic oligonucleotide
auacaaaaugacagucaca

SEQ ID NO: 355265 - RNA, 19 nt, Artificial Sequence
  Description of Artificial Sequence: Synthetic oligonucleotide
cauccaugcuugugccugg

SEQ ID NO: 355266 - RNA, 19 nt, Artificial Sequence
  Description of Artificial Sequence: Synthetic oligonucleotide
uucauccaugcuugugccu

SEQ ID NO: 355267 - RNA, 19 nt, Artificial Sequence
  Description of Artificial Sequence: Synthetic oligonucleotide
ggccgauaggacuuguggc

SEQ ID NO: 355268 - RNA, 19 nt, Artificial Sequence
  Description of Artificial Sequence: Synthetic oligonucleotide
caccgugacacccgucucc

SEQ ID NO: 355269 - RNA, 19 nt, Artificial Sequence
  Description of Artificial Sequence: Synthetic oligonucleotide
guagcauuccaggcaucgg

SEQ ID NO: 355270 - RNA, 19 nt, Artificial Sequence
  Description of Artificial Sequence: Synthetic oligonucleotide
uguggggcagagucugaac

SEQ ID NO: 355271 - RNA, 19 nt, Artificial Sequence
  Description of Artificial Sequence: Synthetic oligonucleotide
ggcuagauucuccuucagc

SEQ ID NO: 355272 - RNA, 19 nt, Artificial Sequence
  Description of Artificial Sequence: Synthetic oligonucleotide
ccucacaucccauaugguc

SEQ ID NO: 355273 - RNA, 19 nt, Artificial Sequence
  Description of Artificial Sequence: Synthetic oligonucleotide
guccuugggucuauguuug

SEQ ID NO: 355274 - RNA, 19 nt, Artificial Sequence
  Description of Artificial Sequence: Synthetic oligonucleotide
agggcgguucuguaguggu

SEQ ID NO: 355275 - RNA, 19 nt, Artificial Sequence
  Description of Artificial Sequence: Synthetic oligonucleotide
ucacgguuuuccagguaaa

SEQ ID NO: 355276 - RNA, 19 nt, Artificial Sequence
  Description of Artificial Sequence: Synthetic oligonucleotide
acacuaugcgacuggucau

SEQ ID NO: 355277 - RNA, 19 nt, Artificial Sequence
  Description of Artificial Sequence: Synthetic oligonucleotide
gguucuguagugguagaug

SEQ ID NO: 355278 - RNA, 19 nt, Artificial Sequence
  Description of Artificial Sequence: Synthetic oligonucleotide
agacuccuaugguaggaaa

SEQ ID NO: 355279 - RNA, 19 nt, Artificial Sequence
  Description of Artificial Sequence: Synthetic oligonucleotide
gucgggguuguucacgauc

SEQ ID NO: 355280 - RNA, 19 nt, Artificial Sequence
  Description of Artificial Sequence: Synthetic oligonucleotide
acaccgugacacccgucuc

SEQ ID NO: 355281 - RNA, 19 nt, Artificial Sequence
  Description of Artificial Sequence: Synthetic oligonucleotide
guaauagagugcucccaaa

SEQ ID NO: 355282 - RNA, 19 nt, Artificial Sequence
  Description of Artificial Sequence: Synthetic oligonucleotide
augcacgaagagaaugcag

SEQ ID NO: 355283 - RNA, 19 nt, Artificial Sequence
  Description of Artificial Sequence: Synthetic oligonucleotide
cgaaaacgaagcuggauug

SEQ ID NO: 355284 - RNA, 19 nt, Artificial Sequence
  Description of Artificial Sequence: Synthetic oligonucleotide
gagggcgguucuguagugg

SEQ ID NO: 355285 - RNA, 19 nt, Artificial Sequence
  Description of Artificial Sequence: Synthetic oligonucleotide
uccucacaucccauauggu

SEQ ID NO: 355286 - RNA, 19 nt, Artificial Sequence
  Description of Artificial Sequence: Synthetic oligonucleotide
agaguucagauacgacuuu

SEQ ID NO: 355287 - RNA, 19 nt, Artificial Sequence
  Description of Artificial Sequence: Synthetic oligonucleotide
gucaacuaagaaaacugcu

SEQ ID NO: 355288 - RNA, 19 nt, Artificial Sequence
  Description of Artificial Sequence: Synthetic oligonucleotide
ggagacagcuucccgguac

SEQ ID NO: 355289 - RNA, 19 nt, Artificial Sequence
  Description of Artificial Sequence: Synthetic oligonucleotide
gagacagcuucccgguaca

SEQ ID NO: 355290 - RNA, 19 nt, Artificial Sequence
  Description of Artificial Sequence: Synthetic oligonucleotide
gaucgcccacacgucgucg

SEQ ID NO: 355291 - RNA, 19 nt, Artificial Sequence
  Description of Artificial Sequence: Synthetic oligonucleotide
ccugaauaaggacucucug

SEQ ID NO: 355292 - RNA, 19 nt, Artificial Sequence
  Description of Artificial Sequence: Synthetic oligonucleotide
auacugcccacuugccagu

SEQ ID NO: 355293 - RNA, 19 nt, Artificial Sequence
  Description of Artificial Sequence: Synthetic oligonucleotide
agaaugacauucaccgcau

SEQ ID NO: 355294 - RNA, 19 nt, Artificial Sequence
  Description of Artificial Sequence: Synthetic oligonucleotide
ugagggcgguucuguagug

SEQ ID NO: 355295 - RNA, 19 nt, Artificial Sequence
  Description of Artificial Sequence: Synthetic oligonucleotide
ggcgguucuguagugguag

SEQ ID NO: 355296 - RNA, 19 nt, Artificial Sequence
  Description of Artificial Sequence: Synthetic oligonucleotide
ccuuuugugaagaagaguu

SEQ ID NO: 355297 - RNA, 19 nt, Artificial Sequence
  Description of Artificial Sequence: Synthetic oligonucleotide
cucagacacuaugcgacug

SEQ ID NO: 355298 - RNA, 19 nt, Artificial Sequence
  Description of Artificial Sequence: Synthetic oligonucleotide
cugcucggagaagaggggc

SEQ ID NO: 355299 - RNA, 19 nt, Artificial Sequence
  Description of Artificial Sequence: Synthetic oligonucleotide
ugcgacuggucaucuuuuc

SEQ ID NO: 355300 - RNA, 19 nt, Artificial Sequence
  Description of Artificial Sequence: Synthetic oligonucleotide
uagcucucaaaagcuuugu

SEQ ID NO: 355301 - RNA, 19 nt, Artificial Sequence
  Description of Artificial Sequence: Synthetic oligonucleotide
gcggaaauacaaaaugaca

SEQ ID NO: 355302 - RNA, 19 nt, Artificial Sequence
  Description of Artificial Sequence: Synthetic oligonucleotide
aggcggagauccccucugg

SEQ ID NO: 355303 - RNA, 19 nt, Artificial Sequence
  Description of Artificial Sequence: Synthetic oligonucleotide
ggcgauccagcuuggcuag

SEQ ID NO: 355304 - RNA, 19 nt, Artificial Sequence
  Description of Artificial Sequence: Synthetic oligonucleotide
agacacuaugcgacugguc

SEQ ID NO: 355305 - RNA, 19 nt, Artificial Sequence
  Description of Artificial Sequence: Synthetic oligonucleotide
accccauugcucaacuugu

SEQ ID NO: 355306 - RNA, 19 nt, Artificial Sequence
  Description of Artificial Sequence: Synthetic oligonucleotide
acgucgggguuguucacga

SEQ ID NO: 355307 - RNA, 19 nt, Artificial Sequence
  Description of Artificial Sequence: Synthetic oligonucleotide
cacgucgggguuguucacg

SEQ ID NO: 355308 - RNA, 19 nt, Artificial Sequence
  Description of Artificial Sequence: Synthetic oligonucleotide
caccgccucggugugaacc

SEQ ID NO: 355309 - RNA, 19 nt, Artificial Sequence
  Description of Artificial Sequence: Synthetic oligonucleotide
ccgcgauucuugaagacug

SEQ ID NO: 355310 - RNA, 19 nt, Artificial Sequence
  Description of Artificial Sequence: Synthetic oligonucleotide
uacgacuuuugggucccug

SEQ ID NO: 355311 - RNA, 19 nt, Artificial Sequence
  Description of Artificial Sequence: Synthetic oligonucleotide
cagaaggcgguagcauucc

SEQ ID NO: 355312 - RNA, 19 nt, Artificial Sequence
  Description of Artificial Sequence: Synthetic oligonucleotide
ggguuccucagacacuaug

SEQ ID NO: 355313 - RNA, 19 nt, Artificial Sequence
  Description of Artificial Sequence: Synthetic oligonucleotide
acuaugcgacuggucaucu

SEQ ID NO: 355314 - RNA, 19 nt, Artificial Sequence
  Description of Artificial Sequence: Synthetic oligonucleotide
aucgcccacacgucgucgu

SEQ ID NO: 355315 - RNA, 19 nt, Artificial Sequence
  Description of Artificial Sequence: Synthetic oligonucleotide
gguaggaauaggucaggaa

SEQ ID NO: 355316 - RNA, 19 nt, Artificial Sequence
  Description of Artificial Sequence: Synthetic oligonucleotide
gaaaacgaagcuggauugu

SEQ ID NO: 355317 - RNA, 19 nt, Artificial Sequence
  Description of Artificial Sequence: Synthetic oligonucleotide
aaacaccgugacacccguc

SEQ ID NO: 355318 - RNA, 19 nt, Artificial Sequence
  Description of Artificial Sequence: Synthetic oligonucleotide
ugccaggcggagauccccu

SEQ ID NO: 355319 - RNA, 19 nt, Artificial Sequence
  Description of Artificial Sequence: Synthetic oligonucleotide
aacucgccccgcagcgagc

SEQ ID NO: 355320 - RNA, 19 nt, Artificial Sequence
  Description of Artificial Sequence: Synthetic oligonucleotide
ugugaaccgggugcaccgc

SEQ ID NO: 355321 - RNA, 19 nt, Artificial Sequence
  Description of Artificial Sequence: Synthetic oligonucleotide
caggcaucgggguuccuca

SEQ ID NO: 355322 - RNA, 19 nt, Artificial Sequence
  Description of Artificial Sequence: Synthetic oligonucleotide
cacuaugcgacuggucauc

SEQ ID NO: 355323 - RNA, 19 nt, Artificial Sequence
  Description of Artificial Sequence: Synthetic oligonucleotide
gacagaaggcgguagcauu

SEQ ID NO: 355324 - RNA, 19 nt, Artificial Sequence
  Description of Artificial Sequence: Synthetic oligonucleotide
caugcacgaagagaaugca

SEQ ID NO: 355325 - RNA, 19 nt, Artificial Sequence
  Description of Artificial Sequence: Synthetic oligonucleotide
uggcuggaaugaacgggaa

SEQ ID NO: 355326 - RNA, 19 nt, Artificial Sequence
  Description of Artificial Sequence: Synthetic oligonucleotide
gagucggcccagauucacc

SEQ ID NO: 355327 - RNA, 19 nt, Artificial Sequence
  Description of Artificial Sequence: Synthetic oligonucleotide
gaucaccccauugcucaac

SEQ ID NO: 355328 - RNA, 19 nt, Artificial Sequence
  Description of Artificial Sequence: Synthetic oligonucleotide
accuucgcauuguggggca

SEQ ID NO: 355329 - RNA, 19 nt, Artificial Sequence
  Description of Artificial Sequence: Synthetic oligonucleotide
uugugucggccaguguugu

SEQ ID NO: 355330 - RNA, 19 nt, Artificial Sequence
  Description of Artificial Sequence: Synthetic oligonucleotide
guaaggccaucaccaccgc

SEQ ID NO: 355331 - RNA, 19 nt, Artificial Sequence
  Description of Artificial Sequence: Synthetic oligonucleotide
ggcggagauccccucuggg

SEQ ID NO: 355332 - RNA, 19 nt, Artificial Sequence
  Description of Artificial Sequence: Synthetic oligonucleotide
ggcauuguuccucccauua

SEQ ID NO: 355333 - RNA, 19 nt, Artificial Sequence
  Description of Artificial Sequence: Synthetic oligonucleotide
gucguucgcgaaacggccc

SEQ ID NO: 355334 - RNA, 19 nt, Artificial Sequence
  Description of Artificial Sequence: Synthetic oligonucleotide
uccuugggucuauguuuga

SEQ ID NO: 355335 - RNA, 19 nt, Artificial Sequence
  Description of Artificial Sequence: Synthetic oligonucleotide
ccacccauguucauccaug

SEQ ID NO: 355336 - RNA, 19 nt, Artificial Sequence
  Description of Artificial Sequence: Synthetic oligonucleotide
caggcggagauccccucug

SEQ ID NO: 355337 - RNA, 19 nt, Artificial Sequence
  Description of Artificial Sequence: Synthetic oligonucleotide
gcccaugcuaggcauguac

SEQ ID NO: 355338 - RNA, 19 nt, Artificial Sequence
  Description of Artificial Sequence: Synthetic oligonucleotide
guccgcgauucuugaagac

SEQ ID NO: 355339 - RNA, 19 nt, Artificial Sequence
  Description of Artificial Sequence: Synthetic oligonucleotide
gugucggauaccacccaug

SEQ ID NO: 355340 - RNA, 19 nt, Artificial Sequence
  Description of Artificial Sequence: Synthetic oligonucleotide
guaaggauguaaggcgaaa

SEQ ID NO: 355341 - RNA, 19 nt, Artificial Sequence
  Description of Artificial Sequence: Synthetic oligonucleotide
agccaguccgcgauucuug

SEQ ID NO: 355342 - RNA, 19 nt, Artificial Sequence
  Description of Artificial Sequence: Synthetic oligonucleotide
ugacacccgucuccuucac

SEQ ID NO: 355343 - RNA, 19 nt, Artificial Sequence
  Description of Artificial Sequence: Synthetic oligonucleotide
cauaguuguaaugaaccuu

SEQ ID NO: 355344 - RNA, 19 nt, Artificial Sequence
  Description of Artificial Sequence: Synthetic oligonucleotide
ggggaaagcacugcccggc

SEQ ID NO: 355345 - RNA, 19 nt, Artificial Sequence
  Description of Artificial Sequence: Synthetic oligonucleotide
gggaagcgcuguuuucugc

SEQ ID NO: 355346 - RNA, 19 nt, Artificial Sequence
  Description of Artificial Sequence: Synthetic oligonucleotide
uagcaagguuccucacauc

SEQ ID NO: 355347 - RNA, 19 nt, Artificial Sequence
  Description of Artificial Sequence: Synthetic oligonucleotide
cacggugggguggccaugc

SEQ ID NO: 355348 - RNA, 19 nt, Artificial Sequence
  Description of Artificial Sequence: Synthetic oligonucleotide
accgugacacccgucuccu

SEQ ID NO: 355349 - RNA, 19 nt, Artificial Sequence
  Description of Artificial Sequence: Synthetic oligonucleotide
ccagaccugaauaaggacu

SEQ ID NO: 355350 - RNA, 19 nt, Artificial Sequence
  Description of Artificial Sequence: Synthetic oligonucleotide
cuugugccuggucgggauc

SEQ ID NO: 355351 - RNA, 19 nt, Artificial Sequence
  Description of Artificial Sequence: Synthetic oligonucleotide
cagggcacguuuguaccac

SEQ ID NO: 355352 - RNA, 19 nt, Artificial Sequence
  Description of Artificial Sequence: Synthetic oligonucleotide
uccuugugucggccagugu

SEQ ID NO: 355353 - RNA, 19 nt, Artificial Sequence
  Description of Artificial Sequence: Synthetic oligonucleotide
gugauaggugccagcagaa

SEQ ID NO: 355354 - RNA, 19 nt, Artificial Sequence
  Description of Artificial Sequence: Synthetic oligonucleotide
cuucccuggaugugucgga

SEQ ID NO: 355355 - RNA, 19 nt, Artificial Sequence
  Description of Artificial Sequence: Synthetic oligonucleotide
ugcuugugccuggucggga

SEQ ID NO: 355356 - RNA, 19 nt, Artificial Sequence
  Description of Artificial Sequence: Synthetic oligonucleotide
uucccuggaugugucggau

SEQ ID NO: 355357 - RNA, 19 nt, Artificial Sequence
  Description of Artificial Sequence: Synthetic oligonucleotide
uuccaggcaucgggguucc

SEQ ID NO: 355358 - RNA, 19 nt, Artificial Sequence
  Description of Artificial Sequence: Synthetic oligonucleotide
gcgaaaacgaagcuggauu

SEQ ID NO: 355359 - RNA, 19 nt, Artificial Sequence
  Description of Artificial Sequence: Synthetic oligonucleotide
gccacaugauggcucgggc

SEQ ID NO: 355360 - RNA, 19 nt, Artificial Sequence
  Description of Artificial Sequence: Synthetic oligonucleotide
cacccgucuccuucaccag

SEQ ID NO: 355361 - RNA, 19 nt, Artificial Sequence
  Description of Artificial Sequence: Synthetic oligonucleotide
agggcacguuuguaccacu

SEQ ID NO: 355362 - RNA, 19 nt, Artificial Sequence
  Description of Artificial Sequence: Synthetic oligonucleotide
accacucuucugccaugcu

SEQ ID NO: 355363 - RNA, 19 nt, Artificial Sequence
  Description of Artificial Sequence: Synthetic oligonucleotide
acgucgucgugcacaaacu

SEQ ID NO: 355364 - RNA, 19 nt, Artificial Sequence
  Description of Artificial Sequence: Synthetic oligonucleotide
cggccgauaggacuugugg

SEQ ID NO: 355365 - RNA, 19 nt, Artificial Sequence
  Description of Artificial Sequence: Synthetic oligonucleotide
ggaaagcacugcccggcac

SEQ ID NO: 355366 - RNA, 19 nt, Artificial Sequence
  Description of Artificial Sequence: Synthetic oligonucleotide
ggauucaugccagccagaa

SEQ ID NO: 355367 - RNA, 19 nt, Artificial Sequence
  Description of Artificial Sequence: Synthetic oligonucleotide
cccacuugccagucguagc

SEQ ID NO: 355368 - RNA, 19 nt, Artificial Sequence
  Description of Artificial Sequence: Synthetic oligonucleotide
guucgcgaaacggcccagc

SEQ ID NO: 355369 - RNA, 19 nt, Artificial Sequence
  Description of Artificial Sequence: Synthetic oligonucleotide
ggacuuguggcuggugcug

SEQ ID NO: 355370 - RNA, 19 nt, Artificial Sequence
  Description of Artificial Sequence: Synthetic oligonucleotide
cacagcggccgauaggacu

SEQ ID NO: 355371 - RNA, 19 nt, Artificial Sequence
  Description of Artificial Sequence: Synthetic oligonucleotide
gaaccgggugcaccgcaaa

SEQ ID NO: 355372 - RNA, 19 nt, Artificial Sequence
  Description of Artificial Sequence: Synthetic oligonucleotide
agcccugauccagacuccu

SEQ ID NO: 355373 - RNA, 19 nt, Artificial Sequence
  Description of Artificial Sequence: Synthetic oligonucleotide
gugaaccgggugcaccgca

SEQ ID NO: 355374 - RNA, 19 nt, Artificial Sequence
  Description of Artificial Sequence: Synthetic oligonucleotide
ucccuggaugugucggaua

SEQ ID NO: 355375 - RNA, 19 nt, Artificial Sequence
  Description of Artificial Sequence: Synthetic oligonucleotide
cacacgucgucgugcacaa

SEQ ID NO: 355376 - RNA, 19 nt, Artificial Sequence
  Description of Artificial Sequence: Synthetic oligonucleotide
gguagugagccacagccuu

SEQ ID NO: 355377 - RNA, 19 nt, Artificial Sequence
  Description of Artificial Sequence: Synthetic oligonucleotide
gcgacuggucaucuuuuca

SEQ ID NO: 355378 - RNA, 19 nt, Artificial Sequence
  Description of Artificial Sequence: Synthetic oligonucleotide
ucaccccauugcucaacuu

SEQ ID NO: 355379 - RNA, 19 nt, Artificial Sequence
  Description of Artificial Sequence: Synthetic oligonucleotide
gucauaaaccaagcacacu

SEQ ID NO: 355380 - RNA, 19 nt, Artificial Sequence
  Description of Artificial Sequence: Synthetic oligonucleotide
gcggagauccccucuggga

SEQ ID NO: 355381 - RNA, 19 nt, Artificial Sequence
  Description of Artificial Sequence: Synthetic oligonucleotide
gggucuauguuugaucccu

SEQ ID NO: 355382 - RNA, 19 nt, Artificial Sequence
  Description of Artificial Sequence: Synthetic oligonucleotide
gcacgaagagaaugcagua

SEQ ID NO: 355383 - RNA, 19 nt, Artificial Sequence
  Description of Artificial Sequence: Synthetic oligonucleotide
acgaucgcccacacgucgu

SEQ ID NO: 355384 - RNA, 19 nt, Artificial Sequence
  Description of Artificial Sequence: Synthetic oligonucleotide
cgcgaaacggcccagcgca

SEQ ID NO: 355385 - RNA, 19 nt, Artificial Sequence
  Description of Artificial Sequence: Synthetic oligonucleotide
gucggcccagauucaccac

SEQ ID NO: 355386 - RNA, 19 nt, Artificial Sequence
  Description of Artificial Sequence: Synthetic oligonucleotide
gguuccucacaucccauau

SEQ ID NO: 355387 - RNA, 19 nt, Artificial Sequence
  Description of Artificial Sequence: Synthetic oligonucleotide
cgugcacaaacucgccccg

SEQ ID NO: 355388 - RNA, 19 nt, Artificial Sequence
  Description of Artificial Sequence: Synthetic oligonucleotide
ccccuugcagacacauagc

SEQ ID NO: 355389 - RNA, 19 nt, Artificial Sequence
  Description of Artificial Sequence: Synthetic oligonucleotide
gugcacaaacucgccccgc

SEQ ID NO: 355390 - RNA, 19 nt, Artificial Sequence
  Description of Artificial Sequence: Synthetic oligonucleotide
cccaugcuaggcauguaca

SEQ ID NO: 355391 - RNA, 19 nt, Artificial Sequence
  Description of Artificial Sequence: Synthetic oligonucleotide
caccggcucagcccagcac

SEQ ID NO: 355392 - RNA, 19 nt, Artificial Sequence
  Description of Artificial Sequence: Synthetic oligonucleotide
cacgguuuuccagguaaaa

SEQ ID NO: 355393 - RNA, 19 nt, Artificial Sequence
  Description of Artificial Sequence: Synthetic oligonucleotide
gucuauguuugaucccuuu

SEQ ID NO: 355394 - RNA, 19 nt, Artificial Sequence
  Description of Artificial Sequence: Synthetic oligonucleotide
ccucgagugccuucucgug

SEQ ID NO: 355395 - RNA, 19 nt, Artificial Sequence
  Description of Artificial Sequence: Synthetic oligonucleotide
guagacucaguaaggccau

SEQ ID NO: 355396 - RNA, 19 nt, Artificial Sequence
  Description of Artificial Sequence: Synthetic oligonucleotide
cguuuguaccacucuucug

SEQ ID NO: 355397 - RNA, 19 nt, Artificial Sequence
  Description of Artificial Sequence: Synthetic oligonucleotide
gcagcuucguagcucucaa

SEQ ID NO: 355398 - RNA, 19 nt, Artificial Sequence
  Description of Artificial Sequence: Synthetic oligonucleotide
cagacuccuaugguaggaa

SEQ ID NO: 355399 - RNA, 19 nt, Artificial Sequence
  Description of Artificial Sequence: Synthetic oligonucleotide
gcuguagauugcugacaga

SEQ ID NO: 355400 - RNA, 19 nt, Artificial Sequence
  Description of Artificial Sequence: Synthetic oligonucleotide
augcgacuggucaucuuuu

SEQ ID NO: 355401 - RNA, 19 nt, Artificial Sequence
  Description of Artificial Sequence: Synthetic oligonucleotide
gggaaagcacugcccggca

SEQ ID NO: 355402 - RNA, 19 nt, Artificial Sequence
  Description of Artificial Sequence: Synthetic oligonucleotide
ggcacguuuguaccacucu

SEQ ID NO: 355403 - RNA, 19 nt, Artificial Sequence
  Description of Artificial Sequence: Synthetic oligonucleotide
aggcgaaaacgaagcugga

SEQ ID NO: 355404 - RNA, 19 nt, Artificial Sequence
  Description of Artificial Sequence: Synthetic oligonucleotide
ccagaagucguucgcgaaa

SEQ ID NO: 355405 - RNA, 19 nt, Artificial Sequence
  Description of Artificial Sequence: Synthetic oligonucleotide
cccacaccggcucagccca

SEQ ID NO: 355406 - RNA, 19 nt, Artificial Sequence
  Description of Artificial Sequence: Synthetic oligonucleotide
ggagagccagagucaacua

SEQ ID NO: 355407 - RNA, 19 nt, Artificial Sequence
  Description of Artificial Sequence: Synthetic oligonucleotide
cgucgugcacaaacucgcc

SEQ ID NO: 355408 - RNA, 19 nt, Artificial Sequence
  Description of Artificial Sequence: Synthetic oligonucleotide
ccuugugucggccaguguu

SEQ ID NO: 355409 - RNA, 19 nt, Artificial Sequence
  Description of Artificial Sequence: Synthetic oligonucleotide
cgucgucgugcacaaacuc

SEQ ID NO: 355410 - RNA, 19 nt, Artificial Sequence
  Description of Artificial Sequence: Synthetic oligonucleotide
cgcacagcggccgauagga

SEQ ID NO: 355411 - RNA, 19 nt, Artificial Sequence
  Description of Artificial Sequence: Synthetic oligonucleotide
ccacacgucgucgugcaca

SEQ ID NO: 355412 - RNA, 19 nt, Artificial Sequence
  Description of Artificial Sequence: Synthetic oligonucleotide
ggcauguacaggacucucu

SEQ ID NO: 355413 - RNA, 19 nt, Artificial Sequence
  Description of Artificial Sequence: Synthetic oligonucleotide
cagacacuaugcgacuggu

SEQ ID NO: 355414 - RNA, 19 nt, Artificial Sequence
  Description of Artificial Sequence: Synthetic oligonucleotide
cagcuucguagcucucaaa

SEQ ID NO: 355415 - RNA, 19 nt, Artificial Sequence
  Description of Artificial Sequence: Synthetic oligonucleotide
ccucggugugaaccgggug

SEQ ID NO: 355416 - RNA, 19 nt, Artificial Sequence
  Description of Artificial Sequence: Synthetic oligonucleotide
gcacguuuguaccacucuu

SEQ ID NO: 355417 - RNA, 19 nt, Artificial Sequence
  Description of Artificial Sequence: Synthetic oligonucleotide
uuccgaccuuggucuuuua

SEQ ID NO: 355418 - RNA, 19 nt, Artificial Sequence
  Description of Artificial Sequence: Synthetic oligonucleotide
ccaggcaucgggguuccuc

SEQ ID NO: 355419 - RNA, 19 nt, Artificial Sequence
  Description of Artificial Sequence: Synthetic oligonucleotide
ccacaggcggaaauacaaa

SEQ ID NO: 355420 - RNA, 19 nt, Artificial Sequence
  Description of Artificial Sequence: Synthetic oligonucleotide
agcacgcacagcggccgau

SEQ ID NO: 355421 - RNA, 19 nt, Artificial Sequence
  Description of Artificial Sequence: Synthetic oligonucleotide
cacugcccggcacagcccu

SEQ ID NO: 355422 - RNA, 19 nt, Artificial Sequence
  Description of Artificial Sequence: Synthetic oligonucleotide
gggcacguuuguaccacuc

SEQ ID NO: 355423 - RNA, 19 nt, Artificial Sequence
  Description of Artificial Sequence: Synthetic oligonucleotide
cucacggugggguggccau

SEQ ID NO: 355424 - RNA, 19 nt, Artificial Sequence
  Description of Artificial Sequence: Synthetic oligonucleotide
agcggccgauaggacuugu

SEQ ID NO: 355425 - RNA, 19 nt, Artificial Sequence
  Description of Artificial Sequence: Synthetic oligonucleotide
gucggauaccacccauguu

SEQ ID NO: 355426 - RNA, 19 nt, Artificial Sequence
  Description of Artificial Sequence: Synthetic oligonucleotide
ggcgaaaacgaagcuggau

SEQ ID NO: 355427 - RNA, 19 nt, Artificial Sequence
  Description of Artificial Sequence: Synthetic oligonucleotide
caaaagccaguccgcgauu

SEQ ID NO: 355428 - RNA, 19 nt, Artificial Sequence
  Description of Artificial Sequence: Synthetic oligonucleotide
cgccucggugugaaccggg

SEQ ID NO: 355429 - RNA, 19 nt, Artificial Sequence
  Description of Artificial Sequence: Synthetic oligonucleotide
gcacgucgggguuguucac

SEQ ID NO: 355430 - RNA, 19 nt, Artificial Sequence
  Description of Artificial Sequence: Synthetic oligonucleotide
gcuugugccuggucgggau

SEQ ID NO: 355431 - RNA, 19 nt, Artificial Sequence
  Description of Artificial Sequence: Synthetic oligonucleotide
acugcccggcacagcccug

SEQ ID NO: 355432 - RNA, 19 nt, Artificial Sequence
  Description of Artificial Sequence: Synthetic oligonucleotide
gcgaaacggcccagcgcag

SEQ ID NO: 355433 - RNA, 19 nt, Artificial Sequence
  Description of Artificial Sequence: Synthetic oligonucleotide
gcggccgauaggacuugug

SEQ ID NO: 355434 - RNA, 19 nt, Artificial Sequence
  Description of Artificial Sequence: Synthetic oligonucleotide
gcauuguggggcagagucu

SEQ ID NO: 355435 - RNA, 19 nt, Artificial Sequence
  Description of Artificial Sequence: Synthetic oligonucleotide
cuaugcgacuggucaucuu

SEQ ID NO: 355436 - RNA, 19 nt, Artificial Sequence
  Description of Artificial Sequence: Synthetic oligonucleotide
cagcacgcacagcggccga

SEQ ID NO: 355437 - RNA, 19 nt, Artificial Sequence
  Description of Artificial Sequence: Synthetic oligonucleotide
ccucagacacuaugcgacu

SEQ ID NO: 355438 - RNA, 19 nt, Artificial Sequence
  Description of Artificial Sequence: Synthetic oligonucleotide
agcggggucccgggccgca

SEQ ID NO: 355439 - RNA, 19 nt, Artificial Sequence
  Description of Artificial Sequence: Synthetic oligonucleotide
ccuucgcauuguggggcag

SEQ ID NO: 355440 - RNA, 19 nt, Artificial Sequence
  Description of Artificial Sequence: Synthetic oligonucleotide
gggagacagcuucccggua

SEQ ID NO: 355441 - RNA, 19 nt, Artificial Sequence
  Description of Artificial Sequence: Synthetic oligonucleotide
ccgcacgucgggguuguuc

SEQ ID NO: 355442 - RNA, 19 nt, Artificial Sequence
  Description of Artificial Sequence: Synthetic oligonucleotide
ggauaccacccauguucau

SEQ ID NO: 355443 - RNA, 19 nt, Artificial Sequence
  Description of Artificial Sequence: Synthetic oligonucleotide
cgaucgcccacacgucguc

SEQ ID NO: 355444 - RNA, 19 nt, Artificial Sequence
  Description of Artificial Sequence: Synthetic oligonucleotide
cgcccacacgucgucgugc

SEQ ID NO: 355445 - RNA, 19 nt, Artificial Sequence
  Description of Artificial Sequence: Synthetic oligonucleotide
ccaguccgcgauucuugaa

SEQ ID NO: 355446 - RNA, 19 nt, Artificial Sequence
  Description of Artificial Sequence: Synthetic oligonucleotide
ccgccucggugugaaccgg

SEQ ID NO: 355447 - RNA, 19 nt, Artificial Sequence
  Description of Artificial Sequence: Synthetic oligonucleotide
caucagcucugcccacgau

SEQ ID NO: 355448 - RNA, 19 nt, Artificial Sequence
  Description of Artificial Sequence: Synthetic oligonucleotide
gcgauucuugaagacuguu

SEQ ID NO: 355449 - RNA, 19 nt, Artificial Sequence
  Description of Artificial Sequence: Synthetic oligonucleotide
acacgucgucgugcacaaa

SEQ ID NO: 355450 - RNA, 19 nt, Artificial Sequence
  Description of Artificial Sequence: Synthetic oligonucleotide
cagcggggucccgggccgc

SEQ ID NO: 355451 - RNA, 19 nt, Artificial Sequence
  Description of Artificial Sequence: Synthetic oligonucleotide
cgggguuccucagacacua

SEQ ID NO: 355452 - RNA, 19 nt, Artificial Sequence
  Description of Artificial Sequence: Synthetic oligonucleotide
gcccggcacagcccugauc

SEQ ID NO: 355453 - RNA, 19 nt, Artificial Sequence
  Description of Artificial Sequence: Synthetic oligonucleotide
cgagugccuucucguggug

SEQ ID NO: 355454 - RNA, 19 nt, Artificial Sequence
  Description of Artificial Sequence: Synthetic oligonucleotide
cguucgcgaaacggcccag

SEQ ID NO: 355455 - RNA, 19 nt, Artificial Sequence
  Description of Artificial Sequence: Synthetic oligonucleotide
ggucuauguuugaucccuu

SEQ ID NO: 355456 - RNA, 19 nt, Artificial Sequence
  Description of Artificial Sequence: Synthetic oligonucleotide
gggcauuguuccucccauu

SEQ ID NO: 355457 - RNA, 19 nt, Artificial Sequence
  Description of Artificial Sequence: Synthetic oligonucleotide
cccgggccgcacgucgggg

SEQ ID NO: 355458 - RNA, 19 nt, Artificial Sequence
  Description of Artificial Sequence: Synthetic oligonucleotide
gccagucguagcacagggu

SEQ ID NO: 355459 - RNA, 19 nt, Artificial Sequence
  Description of Artificial Sequence: Synthetic oligonucleotide
cgguagcauuccaggcauc

SEQ ID NO: 355460 - RNA, 19 nt, Artificial Sequence
  Description of Artificial Sequence: Synthetic oligonucleotide
gggcgguucuguaguggua

SEQ ID NO: 355461 - RNA, 19 nt, Artificial Sequence
  Description of Artificial Sequence: Synthetic oligonucleotide
ccaggcggagauccccucu

SEQ ID NO: 355462 - RNA, 19 nt, Artificial Sequence
  Description of Artificial Sequence: Synthetic oligonucleotide
gcuguccgccaggcccuug

SEQ ID NO: 355463 - RNA, 19 nt, Artificial Sequence
  Description of Artificial Sequence: Synthetic oligonucleotide
ccggcacagcccugaucca

SEQ ID NO: 355464 - RNA, 19 nt, Artificial Sequence
  Description of Artificial Sequence: Synthetic oligonucleotide
gccucggugugaaccgggu

SEQ ID NO: 355465 - RNA, 19 nt, Artificial Sequence
  Description of Artificial Sequence: Synthetic oligonucleotide
cgcgauucuugaagacugu

SEQ ID NO: 355466 - RNA, 19 nt, Artificial Sequence
  Description of Artificial Sequence: Synthetic oligonucleotide
gcgauccagcuuggcuaga

SEQ ID NO: 355467 - RNA, 19 nt, Artificial Sequence
  Description of Artificial Sequence: Synthetic oligonucleotide
ggccgcacgucgggguugu

SEQ ID NO: 355468 - RNA, 19 nt, Artificial Sequence
  Description of Artificial Sequence: Synthetic oligonucleotide
ccuugccccagaagucguu

SEQ ID NO: 355469 - RNA, 19 nt, Artificial Sequence
  Description of Artificial Sequence: Synthetic oligonucleotide
cgucgggguuguucacgau

SEQ ID NO: 355470 - RNA, 19 nt, Artificial Sequence
  Description of Artificial Sequence: Synthetic oligonucleotide
ccgugacacccgucuccuu

SEQ ID NO: 355471 - RNA, 19 nt, Artificial Sequence
  Description of Artificial Sequence: Synthetic oligonucleotide
uuuguaacauacaaaaugg

SEQ ID NO: 355472 - RNA, 19 nt, Artificial Sequence
  Description of Artificial Sequence: Synthetic oligonucleotide
acagauaauauauugcgac

SEQ ID NO: 355473 - RNA, 19 nt, Artificial Sequence
  Description of Artificial Sequence: Synthetic oligonucleotide
auugcgacagcuuagacag

SEQ ID NO: 355474 - RNA, 19 nt, Artificial Sequence
  Description of Artificial Sequence: Synthetic oligonucleotide
aaauggguugaauacaguc

SEQ ID NO: 355475 - RNA, 19 nt, Artificial Sequence
  Description of Artificial Sequence: Synthetic oligonucleotide
aaguaguauugcuagacgg

SEQ ID NO: 355476 - RNA, 19 nt, Artificial Sequence
  Description of Artificial Sequence: Synthetic oligonucleotide
aauacuuauggggaggggc

SEQ ID NO: 355477 - RNA, 19 nt, Artificial Sequence
  Description of Artificial Sequence: Synthetic oligonucleotide
agauugaugacuugagacc

SEQ ID NO: 355478 - RNA, 19 nt, Artificial Sequence
  Description of Artificial Sequence: Synthetic oligonucleotide
aaugguugcacguuacuuc

SEQ ID NO: 355479 - RNA, 19 nt, Artificial Sequence
  Description of Artificial Sequence: Synthetic oligonucleotide
ugccuuaauacuuaugggg

SEQ ID NO: 355480 - RNA, 19 nt, Artificial Sequence
  Description of Artificial Sequence: Synthetic oligonucleotide
aacuuauucaaauuuguaa

SEQ ID NO: 355481 - RNA, 19 nt, Artificial Sequence
  Description of Artificial Sequence: Synthetic oligonucleotide
uuuagaauuaaggugggag

SEQ ID NO: 355482 - RNA, 19 nt, Artificial Sequence
  Description of Artificial Sequence: Synthetic oligonucleotide
uacucgauauucuugaaag

SEQ ID NO: 355483 - RNA, 19 nt, Artificial Sequence
  Description of Artificial Sequence: Synthetic oligonucleotide
uuugcuuaggaaaacaaaa

SEQ ID NO: 355484 - RNA, 19 nt, Artificial Sequence
  Description of Artificial Sequence: Synthetic oligonucleotide
ucuggcaacacucugguca

SEQ ID NO: 355485 - RNA, 19 nt, Artificial Sequence
  Description of Artificial Sequence: Synthetic oligonucleotide
guaauuauugaacuuauuc

SEQ ID NO: 355486 - RNA, 19 nt, Artificial Sequence
  Description of Artificial Sequence: Synthetic oligonucleotide
agagaaauacucgauauuc

SEQ ID NO: 355487 - RNA, 19 nt, Artificial Sequence
  Description of Artificial Sequence: Synthetic oligonucleotide
guuucaaaagucuuggcgc

SEQ ID NO: 355488 - RNA, 19 nt, Artificial Sequence
  Description of Artificial Sequence: Synthetic oligonucleotide
aacuauacagggaagugac

SEQ ID NO: 355489 - RNA, 19 nt, Artificial Sequence
  Description of Artificial Sequence: Synthetic oligonucleotide
ugcagugcggccaugagag

SEQ ID NO: 355490 - RNA, 19 nt, Artificial Sequence
  Description of Artificial Sequence: Synthetic oligonucleotide
ucuguuuuaaggaaacagu

SEQ ID NO: 355491 - RNA, 19 nt, Artificial Sequence
  Description of Artificial Sequence: Synthetic oligonucleotide
uccucguuuauuuacaugu

SEQ ID NO: 355492 - RNA, 19 nt, Artificial Sequence
  Description of Artificial Sequence: Synthetic oligonucleotide
uuacaugugaaauggguug

SEQ ID NO: 355493 - RNA, 19 nt, Artificial Sequence
  Description of Artificial Sequence: Synthetic oligonucleotide
gacacuuaagaguugcuag

SEQ ID NO: 355494 - RNA, 19 nt, Artificial Sequence
  Description of Artificial Sequence: Synthetic oligonucleotide
ucuauggccaauugcagag

SEQ ID NO: 355495 - RNA, 19 nt, Artificial Sequence
  Description of Artificial Sequence: Synthetic oligonucleotide
agauauaaaaugcaacgga

SEQ ID NO: 355496 - RNA, 19 nt, Artificial Sequence
  Description of Artificial Sequence: Synthetic oligonucleotide
cuuucaaggaacugaacgc

SEQ ID NO: 355497 - RNA, 19 nt, Artificial Sequence
  Description of Artificial Sequence: Synthetic oligonucleotide
uucauuacacuccaaacau

SEQ ID NO: 355498 - RNA, 19 nt, Artificial Sequence
  Description of Artificial Sequence: Synthetic oligonucleotide
ugaacuuauucaaauuugu

SEQ ID NO: 355499 - RNA, 19 nt, Artificial Sequence
  Description of Artificial Sequence: Synthetic oligonucleotide
aacuugacuagagaacuac

SEQ ID NO: 355500 - RNA, 19 nt, Artificial Sequence
  Description of Artificial Sequence: Synthetic oligonucleotide
ggacagauaauauauugcg

SEQ ID NO: 355501 - RNA, 19 nt, Artificial Sequence
  Description of Artificial Sequence: Synthetic oligonucleotide
gaggacagauaauauauug

SEQ ID NO: 355502 - RNA, 19 nt, Artificial Sequence
  Description of Artificial Sequence: Synthetic oligonucleotide
agaaguaguauugcuagac

SEQ ID NO: 355503 - RNA, 19 nt, Artificial Sequence
  Description of Artificial Sequence: Synthetic oligonucleotide
cugacuacagucuagcaug

SEQ ID NO: 355504 - RNA, 19 nt, Artificial Sequence
  Description of Artificial Sequence: Synthetic oligonucleotide
aaugcaacggaaaacacaa

SEQ ID NO: 355505 - RNA, 19 nt, Artificial Sequence
  Description of Artificial Sequence: Synthetic oligonucleotide
agugagcacacccaacagc

SEQ ID NO: 355506 - RNA, 19 nt, Artificial Sequence
  Description of Artificial Sequence: Synthetic oligonucleotide
uuugauaauggcacugcug

SEQ ID NO: 355507 - RNA, 19 nt, Artificial Sequence
  Description of Artificial Sequence: Synthetic oligonucleotide
ucaacuuugacaguaggcu

SEQ ID NO: 355508 - RNA, 19 nt, Artificial Sequence
  Description of Artificial Sequence: Synthetic oligonucleotide
aaaacauaucugaagauaa

SEQ ID NO: 355509 - RNA, 19 nt, Artificial Sequence
  Description of Artificial Sequence: Synthetic oligonucleotide
gaaguaguauugcuagacg

SEQ ID NO: 355510 - RNA, 19 nt, Artificial Sequence
  Description of Artificial Sequence: Synthetic oligonucleotide
cagauugaugacuugagac

SEQ ID NO: 355511 - RNA, 19 nt, Artificial Sequence
  Description of Artificial Sequence: Synthetic oligonucleotide
ugcaugacaaaacuugacu

SEQ ID NO: 355512 - RNA, 19 nt, Artificial Sequence
  Description of Artificial Sequence: Synthetic oligonucleotide
uugcacguuacuucgaugc

SEQ ID NO: 355513 - RNA, 19 nt, Artificial Sequence
  Description of Artificial Sequence: Synthetic oligonucleotide
aacucuguuauacugcaaa

SEQ ID NO: 355514 - RNA, 19 nt, Artificial Sequence
  Description of Artificial Sequence: Synthetic oligonucleotide
uguuauacugcaaacuuuu

SEQ ID NO: 355515 - RNA, 19 nt, Artificial Sequence
  Description of Artificial Sequence: Synthetic oligonucleotide
agauaauauauugcgacag

SEQ ID NO: 355516 - RNA, 19 nt, Artificial Sequence
  Description of Artificial Sequence: Synthetic oligonucleotide
aaagucuuggcgcacacuu

SEQ ID NO: 355517 - RNA, 19 nt, Artificial Sequence
  Description of Artificial Sequence: Synthetic oligonucleotide
gauaauauauugcgacagc

SEQ ID NO: 355518 - RNA, 19 nt, Artificial Sequence
  Description of Artificial Sequence: Synthetic oligonucleotide
aacuuugacaguaggcugg

SEQ ID NO: 355519 - RNA, 19 nt, Artificial Sequence
  Description of Artificial Sequence: Synthetic oligonucleotide
ugacuugagacccugcugu

SEQ ID NO: 355520 - RNA, 19 nt, Artificial Sequence
  Description of Artificial Sequence: Synthetic oligonucleotide
ucgauauucuugaaagaug

SEQ ID NO: 355521 - RNA, 19 nt, Artificial Sequence
  Description of Artificial Sequence: Synthetic oligonucleotide
aggacagauaauauauugc

SEQ ID NO: 355522 - RNA, 19 nt, Artificial Sequence
  Description of Artificial Sequence: Synthetic oligonucleotide
ugcauugcuaggucggugg

SEQ ID NO: 355523 - RNA, 19 nt, Artificial Sequence
  Description of Artificial Sequence: Synthetic oligonucleotide
agacggagaaacuaucauc

SEQ ID NO: 355524 - RNA, 19 nt, Artificial Sequence
  Description of Artificial Sequence: Synthetic oligonucleotide
uauugcgacagcuuagaca

SEQ ID NO: 355525 - RNA, 19 nt, Artificial Sequence
  Description of Artificial Sequence: Synthetic oligonucleotide
caucccaacucuaaguacc

SEQ ID NO: 355526 - RNA, 19 nt, Artificial Sequence
  Description of Artificial Sequence: Synthetic oligonucleotide
caugcaagucuauauacac

SEQ ID NO: 355527 - RNA, 19 nt, Artificial Sequence
  Description of Artificial Sequence: Synthetic oligonucleotide
acuaccuuucaacuuugac

SEQ ID NO: 355528 - RNA, 19 nt, Artificial Sequence
  Description of Artificial Sequence: Synthetic oligonucleotide
agaaacuaucaucuggucu

SEQ ID NO: 355529 - RNA, 19 nt, Artificial Sequence
  Description of Artificial Sequence: Synthetic oligonucleotide
uuuacaugugaaauggguu

SEQ ID NO: 355530 - RNA, 19 nt, Artificial Sequence
  Description of Artificial Sequence: Synthetic oligonucleotide
augguugcacguuacuucg

SEQ ID NO: 355531 - RNA, 19 nt, Artificial Sequence
  Description of Artificial Sequence: Synthetic oligonucleotide
cuaaguguggugcuaagac

SEQ ID NO: 355532 - RNA, 19 nt, Artificial Sequence
  Description of Artificial Sequence: Synthetic oligonucleotide
uuugauugaaggccaugcc

SEQ ID NO: 355533 - RNA, 19 nt, Artificial Sequence
  Description of Artificial Sequence: Synthetic oligonucleotide
cauguuccuaucaaagagc

SEQ ID NO: 355534 - RNA, 19 nt, Artificial Sequence
  Description of Artificial Sequence: Synthetic oligonucleotide
uccguuucaaaagucuugg

SEQ ID NO: 355535 - RNA, 19 nt, Artificial Sequence
  Description of Artificial Sequence: Synthetic oligonucleotide
auguuccuaucaaagagcc

SEQ ID NO: 355536 - RNA, 19 nt, Artificial Sequence
  Description of Artificial Sequence: Synthetic oligonucleotide
gaggcgcugaaacuaaccg

SEQ ID NO: 355537 - RNA, 19 nt, Artificial Sequence
  Description of Artificial Sequence: Synthetic oligonucleotide
uugcuuaggaaaacaaaac

SEQ ID NO: 355538 - RNA, 19 nt, Artificial Sequence
  Description of Artificial Sequence: Synthetic oligonucleotide
uguuagccuguaauuauug

SEQ ID NO: 355539 - RNA, 19 nt, Artificial Sequence
  Description of Artificial Sequence: Synthetic oligonucleotide
gagaggaaaggacagcggc

SEQ ID NO: 355540 - RNA, 19 nt, Artificial Sequence
  Description of Artificial Sequence: Synthetic oligonucleotide
caugagagggugcugagag

SEQ ID NO: 355541 - RNA, 19 nt, Artificial Sequence
  Description of Artificial Sequence: Synthetic oligonucleotide
aauggguugaauacaguca

SEQ ID NO: 355542 - RNA, 19 nt, Artificial Sequence
  Description of Artificial Sequence: Synthetic oligonucleotide
acucuguuauacugcaaac

SEQ ID NO: 355543 - RNA, 19 nt, Artificial Sequence
  Description of Artificial Sequence: Synthetic oligonucleotide
cuaaccgccccguuuaugc

SEQ ID NO: 355544 - RNA, 19 nt, Artificial Sequence
  Description of Artificial Sequence: Synthetic oligonucleotide
gauuaaggagcugucuggg

SEQ ID NO: 355545 - RNA, 19 nt, Artificial Sequence
  Description of Artificial Sequence: Synthetic oligonucleotide
agacgucucauccuggaag

SEQ ID NO: 355546 - RNA, 19 nt, Artificial Sequence
  Description of Artificial Sequence: Synthetic oligonucleotide
aguauugcuagacggagaa

SEQ ID NO: 355547 - RNA, 19 nt, Artificial Sequence
  Description of Artificial Sequence: Synthetic oligonucleotide
acauacaggucugacuacc

SEQ ID NO: 355548 - RNA, 19 nt, Artificial Sequence
  Description of Artificial Sequence: Synthetic oligonucleotide
acgccaacuguguagacag

SEQ ID NO: 355549 - RNA, 19 nt, Artificial Sequence
  Description of Artificial Sequence: Synthetic oligonucleotide
guucuuuguacaaugguug

SEQ ID NO: 355550 - RNA, 19 nt, Artificial Sequence
  Description of Artificial Sequence: Synthetic oligonucleotide
aaaugcaacggaaaacaca

SEQ ID NO: 355551 - RNA, 19 nt, Artificial Sequence
  Description of Artificial Sequence: Synthetic oligonucleotide
uucuuuguacaaugguugc

SEQ ID NO: 355552 - RNA, 19 nt, Artificial Sequence
  Description of Artificial Sequence: Synthetic oligonucleotide
aaugguugguuugaauuca

SEQ ID NO: 355553 - RNA, 19 nt, Artificial Sequence
  Description of Artificial Sequence: Synthetic oligonucleotide
ugcugcauugcuaggucgg

SEQ ID NO: 355554 - RNA, 19 nt, Artificial Sequence
  Description of Artificial Sequence: Synthetic oligonucleotide
cuucauuacacuccaaaca

SEQ ID NO: 355555 - RNA, 19 nt, Artificial Sequence
  Description of Artificial Sequence: Synthetic oligonucleotide
acuacauacaggucugacu

SEQ ID NO: 355556 - RNA, 19 nt, Artificial Sequence
  Description of Artificial Sequence: Synthetic oligonucleotide
aggcgcugaaacuaaccgc

SEQ ID NO: 355557 - RNA, 19 nt, Artificial Sequence
  Description of Artificial Sequence: Synthetic oligonucleotide
ugaauacagucacaaugga

SEQ ID NO: 355558 - RNA, 19 nt, Artificial Sequence
  Description of Artificial Sequence: Synthetic oligonucleotide
uguuccucguuuauuuaca

SEQ ID NO: 355559 - RNA, 19 nt, Artificial Sequence
  Description of Artificial Sequence: Synthetic oligonucleotide
uuccguuucaaaagucuug

SEQ ID NO: 355560 - RNA, 19 nt, Artificial Sequence
  Description of Artificial Sequence: Synthetic oligonucleotide
acgguuugcugcuggaugg

SEQ ID NO: 355561 - RNA, 19 nt, Artificial Sequence
  Description of Artificial Sequence: Synthetic oligonucleotide
aaacuaaccgccccguuua

SEQ ID NO: 355562 - RNA, 19 nt, Artificial Sequence
  Description of Artificial Sequence: Synthetic oligonucleotide
uucgucuaggggcauagcu

SEQ ID NO: 355563 - RNA, 19 nt, Artificial Sequence
  Description of Artificial Sequence: Synthetic oligonucleotide
gaaggaaagcaguugccac

SEQ ID NO: 355564 - RNA, 19 nt, Artificial Sequence
  Description of Artificial Sequence: Synthetic oligonucleotide
ucuguaauaguuggugagc

SEQ ID NO: 355565 - RNA, 19 nt, Artificial Sequence
  Description of Artificial Sequence: Synthetic oligonucleotide
cuagccugucucaucaugc

SEQ ID NO: 355566 - RNA, 19 nt, Artificial Sequence
  Description of Artificial Sequence: Synthetic oligonucleotide
guuaacucuguuauacugc

SEQ ID NO: 355567 - RNA, 19 nt, Artificial Sequence
  Description of Artificial Sequence: Synthetic oligonucleotide
uguguagccagagacgucu

SEQ ID NO: 355568 - RNA, 19 nt, Artificial Sequence
  Description of Artificial Sequence: Synthetic oligonucleotide
cacacuacgccugucauag

SEQ ID NO: 355569 - RNA, 19 nt, Artificial Sequence
  Description of Artificial Sequence: Synthetic oligonucleotide
ugucugacggcaagggugc

SEQ ID NO: 355570 - RNA, 19 nt, Artificial Sequence
  Description of Artificial Sequence: Synthetic oligonucleotide
guuacuucgaugcgcacac

SEQ ID NO: 355571 - RNA, 19 nt, Artificial Sequence
  Description of Artificial Sequence: Synthetic oligonucleotide
ucggugguaaaguugugca

SEQ ID NO: 355572 - RNA, 19 nt, Artificial Sequence
  Description of Artificial Sequence: Synthetic oligonucleotide
uaauauauugcgacagcuu

SEQ ID NO: 355573 - RNA, 19 nt, Artificial Sequence
  Description of Artificial Sequence: Synthetic oligonucleotide
ucgucuaggggcauagcug

SEQ ID NO: 355574 - RNA, 19 nt, Artificial Sequence
  Description of Artificial Sequence: Synthetic oligonucleotide
uauauugcgacagcuuaga

SEQ ID NO: 355575 - RNA, 19 nt, Artificial Sequence
  Description of Artificial Sequence: Synthetic oligonucleotide
cuucgaugcgcacacuacg

SEQ ID NO: 355576 - RNA, 19 nt, Artificial Sequence
  Description of Artificial Sequence: Synthetic oligonucleotide
ugcacguuacuucgaugcg

SEQ ID NO: 355577 - RNA, 19 nt, Artificial Sequence
  Description of Artificial Sequence: Synthetic oligonucleotide
auagagcuuucccagagaa

SEQ ID NO: 355578 - RNA, 19 nt, Artificial Sequence
  Description of Artificial Sequence: Synthetic oligonucleotide
guggcuauuucucagcuga

SEQ ID NO: 355579 - RNA, 19 nt, Artificial Sequence
  Description of Artificial Sequence: Synthetic oligonucleotide
aagaaguaguauugcuaga

SEQ ID NO: 355580 - RNA, 19 nt, Artificial Sequence
  Description of Artificial Sequence: Synthetic oligonucleotide
ggauuaaggagcugucugg

SEQ ID NO: 355581 - RNA, 19 nt, Artificial Sequence
  Description of Artificial Sequence: Synthetic oligonucleotide
guaguauugcuagacggag

SEQ ID NO: 355582 - RNA, 19 nt, Artificial Sequence
  Description of Artificial Sequence: Synthetic oligonucleotide
agacaguacuguuaacucu

SEQ ID NO: 355583 - RNA, 19 nt, Artificial Sequence
  Description of Artificial Sequence: Synthetic oligonucleotide
gaacaggaaacgccaacug

SEQ ID NO: 355584 - RNA, 19 nt, Artificial Sequence
  Description of Artificial Sequence: Synthetic oligonucleotide
agauguuccucguuuauuu

SEQ ID NO: 355585 - RNA, 19 nt, Artificial Sequence
  Description of Artificial Sequence: Synthetic oligonucleotide
cauucuuccagauggauua

SEQ ID NO: 355586 - RNA, 19 nt, Artificial Sequence
  Description of Artificial Sequence: Synthetic oligonucleotide
acggaaaacacaaacaaua

SEQ ID NO: 355587 - RNA, 19 nt, Artificial Sequence
  Description of Artificial Sequence: Synthetic oligonucleotide
uuuaaggcagcuuccguuu

SEQ ID NO: 355588 - RNA, 19 nt, Artificial Sequence
  Description of Artificial Sequence: Synthetic oligonucleotide
ugcaucccaacucuaagua

SEQ ID NO: 355589 - RNA, 19 nt, Artificial Sequence
  Description of Artificial Sequence: Synthetic oligonucleotide
auauugcgacagcuuagac

SEQ ID NO: 355590 - RNA, 19 nt, Artificial Sequence
  Description of Artificial Sequence: Synthetic oligonucleotide
uuggcgcacacuuugcuac

SEQ ID NO: 355591 - RNA, 19 nt, Artificial Sequence
  Description of Artificial Sequence: Synthetic oligonucleotide
gauaauggcacugcuggca

SEQ ID NO: 355592 - RNA, 19 nt, Artificial Sequence
  Description of Artificial Sequence: Synthetic oligonucleotide
acacuuaagaguugcuagu

SEQ ID NO: 355593 - RNA, 19 nt, Artificial Sequence
  Description of Artificial Sequence: Synthetic oligonucleotide
agggaagugaccagagagc

SEQ ID NO: 355594 - RNA, 19 nt, Artificial Sequence
  Description of Artificial Sequence: Synthetic oligonucleotide
uuuaugccagacuggauuu

SEQ ID NO: 355595 - RNA, 19 nt, Artificial Sequence
  Description of Artificial Sequence: Synthetic oligonucleotide
cuacauacaggucugacua

SEQ ID NO: 355596 - RNA, 19 nt, Artificial Sequence
  Description of Artificial Sequence: Synthetic oligonucleotide
agcaagaccuuucaaggaa

SEQ ID NO: 355597 - RNA, 19 nt, Artificial Sequence
  Description of Artificial Sequence: Synthetic oligonucleotide
gagacccacaaucaccuac

SEQ ID NO: 355598 - RNA, 19 nt, Artificial Sequence
  Description of Artificial Sequence: Synthetic oligonucleotide
aauacugccuuaauacuua

SEQ ID NO: 355599 - RNA, 19 nt, Artificial Sequence
  Description of Artificial Sequence: Synthetic oligonucleotide
uacagucuagcaugcaagu

SEQ ID NO: 355600 - RNA, 19 nt, Artificial Sequence
  Description of Artificial Sequence: Synthetic oligonucleotide
aauacucgauauucuugaa

SEQ ID NO: 355601 - RNA, 19 nt, Artificial Sequence
  Description of Artificial Sequence: Synthetic oligonucleotide
ugcuaguguugugagaccc

SEQ ID NO: 355602 - RNA, 19 nt, Artificial Sequence
  Description of Artificial Sequence: Synthetic oligonucleotide
  modified_base (5)..(5): a, c, u, g, unknown or other
aaggnggcugcauuuguua

SEQ ID NO: 355603 - RNA, 19 nt, Artificial Sequence
  Description of Artificial Sequence: Synthetic oligonucleotide
ucuacagugcagugcggcc

SEQ ID NO: 355604 - RNA, 19 nt, Artificial Sequence
  Description of Artificial Sequence: Synthetic oligonucleotide
aagucaaccaugccuucau

SEQ ID NO: 355605 - RNA, 19 nt, Artificial Sequence
  Description of Artificial Sequence: Synthetic oligonucleotide
  modified_base (4)..(4): a, c, u, g, unknown or other
aggnggcugcauuuguuag

SEQ ID NO: 355606 - RNA, 19 nt, Artificial Sequence
  Description of Artificial Sequence: Synthetic oligonucleotide
gaguugcuaguguugugag

SEQ ID NO: 355607 - RNA, 19 nt, Artificial Sequence
  Description of Artificial Sequence: Synthetic oligonucleotide
uacaaugguugcacguuac

SEQ ID NO: 355608 - RNA, 19 nt, Artificial Sequence
  Description of Artificial Sequence: Synthetic oligonucleotide
cagagaacuauacagggaa

SEQ ID NO: 355609 - RNA, 19 nt, Artificial Sequence
  Description of Artificial Sequence: Synthetic oligonucleotide
ugcuagacggagaaacuau

SEQ ID NO: 355610 - RNA, 19 nt, Artificial Sequence
  Description of Artificial Sequence: Synthetic oligonucleotide
acgccugucauagugcacg

SEQ ID NO: 355611 - RNA, 19 nt, Artificial Sequence
  Description of Artificial Sequence: Synthetic oligonucleotide
ugaacucauucuuuuggau

SEQ ID NO: 355612 - RNA, 19 nt, Artificial Sequence
  Description of Artificial Sequence: Synthetic oligonucleotide
ugacuacagucuagcaugc

SEQ ID NO: 355613 - RNA, 19 nt, Artificial Sequence
  Description of Artificial Sequence: Synthetic oligonucleotide
aaacgccaacuguguagac

SEQ ID NO: 355614 - RNA, 19 nt, Artificial Sequence
  Description of Artificial Sequence: Synthetic oligonucleotide
ugggacuggcuuuagaauu

SEQ ID NO: 355615 - RNA, 19 nt, Artificial Sequence
  Description of Artificial Sequence: Synthetic oligonucleotide
uaguauugcuagacggaga

SEQ ID NO: 355616 - RNA, 19 nt, Artificial Sequence
  Description of Artificial Sequence: Synthetic oligonucleotide
  modified_base (4)..(4): a, c, u, g, unknown or other
aagngucugauggucuuga

SEQ ID NO: 355617 - RNA, 19 nt, Artificial Sequence
  Description of Artificial Sequence: Synthetic oligonucleotide
agaguugcuaguguuguga

SEQ ID NO: 355618 - RNA, 19 nt, Artificial Sequence
  Description of Artificial Sequence: Synthetic oligonucleotide
uggccaauugcagaguaca

SEQ ID NO: 355619 - RNA, 19 nt, Artificial Sequence
  Description of Artificial Sequence: Synthetic oligonucleotide
uguagugagcacacccaac

SEQ ID NO: 355620 - RNA, 19 nt, Artificial Sequence
  Description of Artificial Sequence: Synthetic oligonucleotide
aacugaacgcugacuacag

SEQ ID NO: 355621 - RNA, 19 nt, Artificial Sequence
  Description of Artificial Sequence: Synthetic oligonucleotide
gacggagaaacuaucaucu

SEQ ID NO: 355622 - RNA, 19 nt, Artificial Sequence
  Description of Artificial Sequence: Synthetic oligonucleotide
auacucgauauucuugaaa

SEQ ID NO: 355623 - RNA, 19 nt, Artificial Sequence
  Description of Artificial Sequence: Synthetic oligonucleotide
uguuacgaagaacucuguu

SEQ ID NO: 355624 - RNA, 19 nt, Artificial Sequence
  Description of Artificial Sequence: Synthetic oligonucleotide
acuuugacaguaggcuggc

SEQ ID NO: 355625 - RNA, 19 nt, Artificial Sequence
  Description of Artificial Sequence: Synthetic oligonucleotide
cauagugcacgguuugcug

SEQ ID NO: 355626 - RNA, 19 nt, Artificial Sequence
  Description of Artificial Sequence: Synthetic oligonucleotide
agguucuuuguacaauggu

SEQ ID NO: 355627 - RNA, 19 nt, Artificial Sequence
  Description of Artificial Sequence: Synthetic oligonucleotide
ucuuuguacaaugguugca

SEQ ID NO: 355628 - RNA, 19 nt, Artificial Sequence
  Description of Artificial Sequence: Synthetic oligonucleotide
ucugacuaccuuucaacuu

SEQ ID NO: 355629 - RNA, 19 nt, Artificial Sequence
  Description of Artificial Sequence: Synthetic oligonucleotide
uccuaucaaagagccagag

SEQ ID NO: 355630 - RNA, 19 nt, Artificial Sequence
  Description of Artificial Sequence: Synthetic oligonucleotide
aacggaaaacacaaacaau

SEQ ID NO: 355631 - RNA, 19 nt, Artificial Sequence
  Description of Artificial Sequence: Synthetic oligonucleotide
gacagauaauauauugcga

SEQ ID NO: 355632 - RNA, 19 nt, Artificial Sequence
  Description of Artificial Sequence: Synthetic oligonucleotide
cacuacgccugucauagug

SEQ ID NO: 355633 - RNA, 19 nt, Artificial Sequence
  Description of Artificial Sequence: Synthetic oligonucleotide
ugacuaccuuucaacuuug

SEQ ID NO: 355634 - RNA, 19 nt, Artificial Sequence
  Description of Artificial Sequence: Synthetic oligonucleotide
uggugcuaagacacuuaag

SEQ ID NO: 355635 - RNA, 19 nt, Artificial Sequence
  Description of Artificial Sequence: Synthetic oligonucleotide
ucgaugcgcacacuacgcc

SEQ ID NO: 355636 - RNA, 19 nt, Artificial Sequence
  Description of Artificial Sequence: Synthetic oligonucleotide
aguaguauugcuagacgga

SEQ ID NO: 355637 - RNA, 19 nt, Artificial Sequence
  Description of Artificial Sequence: Synthetic oligonucleotide
cagauaauauauugcgaca

SEQ ID NO: 355638 - RNA, 19 nt, Artificial Sequence
  Description of Artificial Sequence: Synthetic oligonucleotide
acuauacagggaagugacc

SEQ ID NO: 355639 - RNA, 19 nt, Artificial Sequence
  Description of Artificial Sequence: Synthetic oligonucleotide
aacgccaacuguguagaca

SEQ ID NO: 355640 - RNA, 19 nt, Artificial Sequence
  Description of Artificial Sequence: Synthetic oligonucleotide
aauuaaggugggagcacug

SEQ ID NO: 355641 - RNA, 19 nt, Artificial Sequence
  Description of Artificial Sequence: Synthetic oligonucleotide
ccuguuacgaagaacucug

SEQ ID NO: 355642 - RNA, 19 nt, Artificial Sequence
  Description of Artificial Sequence: Synthetic oligonucleotide
ucuucgucuaggggcauag

SEQ ID NO: 355643 - RNA, 19 nt, Artificial Sequence
  Description of Artificial Sequence: Synthetic oligonucleotide
uuuaaggguccagauguuc

SEQ ID NO: 355644 - RNA, 19 nt, Artificial Sequence
  Description of Artificial Sequence: Synthetic oligonucleotide
agggcuuuucuuguggaag

SEQ ID NO: 355645 - RNA, 19 nt, Artificial Sequence
  Description of Artificial Sequence: Synthetic oligonucleotide
gacgucucauccuggaaga

SEQ ID NO: 355646 - RNA, 19 nt, Artificial Sequence
  Description of Artificial Sequence: Synthetic oligonucleotide
acgcugacuacagucuagc

SEQ ID NO: 355647 - RNA, 19 nt, Artificial Sequence
  Description of Artificial Sequence: Synthetic oligonucleotide
acucgauauucuugaaaga

SEQ ID NO: 355648 - RNA, 19 nt, Artificial Sequence
  Description of Artificial Sequence: Synthetic oligonucleotide
uacuucgaugcgcacacua

SEQ ID NO: 355649 - RNA, 19 nt, Artificial Sequence
  Description of Artificial Sequence: Synthetic oligonucleotide
ucaaaagucuuggcgcaca

SEQ ID NO: 355650 - RNA, 19 nt, Artificial Sequence
  Description of Artificial Sequence: Synthetic oligonucleotide
gcaugugcguguuuaaggc

SEQ ID NO: 355651 - RNA, 19 nt, Artificial Sequence
  Description of Artificial Sequence: Synthetic oligonucleotide
gcugaaacuaaccgccccg

SEQ ID NO: 355652 - RNA, 19 nt, Artificial Sequence
  Description of Artificial Sequence: Synthetic oligonucleotide
acaaguuauguggugaguu

SEQ ID NO: 355653 - RNA, 19 nt, Artificial Sequence
  Description of Artificial Sequence: Synthetic oligonucleotide
acuucgaugcgcacacuac

SEQ ID NO: 355654 - RNA, 19 nt, Artificial Sequence
  Description of Artificial Sequence: Synthetic oligonucleotide
auuaaggagcugucuggga

SEQ ID NO: 355655 - RNA, 19 nt, Artificial Sequence
  Description of Artificial Sequence: Synthetic oligonucleotide
gauuugauugaaggccaug

SEQ ID NO: 355656 - RNA, 19 nt, Artificial Sequence
  Description of Artificial Sequence: Synthetic oligonucleotide
uguggcuauuucucagcug

SEQ ID NO: 355657 - RNA, 19 nt, Artificial Sequence
  Description of Artificial Sequence: Synthetic oligonucleotide
ugcuaggucggugguaaag

SEQ ID NO: 355658 - RNA, 19 nt, Artificial Sequence
  Description of Artificial Sequence: Synthetic oligonucleotide
agcagauaugacuguggcu

SEQ ID NO: 355659 - RNA, 19 nt, Artificial Sequence
  Description of Artificial Sequence: Synthetic oligonucleotide
gagaaacuaucaucugguc

SEQ ID NO: 355660 - RNA, 19 nt, Artificial Sequence
  Description of Artificial Sequence: Synthetic oligonucleotide
aaccgccccguuuaugcca

SEQ ID NO: 355661 - RNA, 19 nt, Artificial Sequence
  Description of Artificial Sequence: Synthetic oligonucleotide
auugcuaggucggugguaa

SEQ ID NO: 355662 - RNA, 19 nt, Artificial Sequence
  Description of Artificial Sequence: Synthetic oligonucleotide
accuacaaguuauguggug

SEQ ID NO: 355663 - RNA, 19 nt, Artificial Sequence
  Description of Artificial Sequence: Synthetic oligonucleotide
uguuugggagucagcucug

SEQ ID NO: 355664 - RNA, 19 nt, Artificial Sequence
  Description of Artificial Sequence: Synthetic oligonucleotide
cacuuaagaguugcuagug

SEQ ID NO: 355665 - RNA, 19 nt, Artificial Sequence
  Description of Artificial Sequence: Synthetic oligonucleotide
guuuaugccagacuggauu

SEQ ID NO: 355666 - RNA, 19 nt, Artificial Sequence
  Description of Artificial Sequence: Synthetic oligonucleotide
agcaaaguguuaagucaac

SEQ ID NO: 355667 - RNA, 19 nt, Artificial Sequence
  Description of Artificial Sequence: Synthetic oligonucleotide
guuagccuguaauuauuga

SEQ ID NO: 355668 - RNA, 19 nt, Artificial Sequence
  Description of Artificial Sequence: Synthetic oligonucleotide
gaugacuugagacccugcu

SEQ ID NO: 355669 - RNA, 19 nt, Artificial Sequence
  Description of Artificial Sequence: Synthetic oligonucleotide
ugggagcacugcaucacca

SEQ ID NO: 355670 - RNA, 19 nt, Artificial Sequence
  Description of Artificial Sequence: Synthetic oligonucleotide
agagacgucucauccugga

SEQ ID NO: 355671 - RNA, 19 nt, Artificial Sequence
  Description of Artificial Sequence: Synthetic oligonucleotide
uguggugcuaagacacuua

SEQ ID NO: 355672 - RNA, 19 nt, Artificial Sequence
  Description of Artificial Sequence: Synthetic oligonucleotide
guuacgaagaacucuguuu

SEQ ID NO: 355673 - RNA, 19 nt, Artificial Sequence
  Description of Artificial Sequence: Synthetic oligonucleotide
cuaagacacuuaagaguug

SEQ ID NO: 355674 - RNA, 19 nt, Artificial Sequence
  Description of Artificial Sequence: Synthetic oligonucleotide
cacgguuugcugcuggaug

SEQ ID NO: 355675 - RNA, 19 nt, Artificial Sequence
  Description of Artificial Sequence: Synthetic oligonucleotide
ggcgcugaaacuaaccgcc

SEQ ID NO: 355676 - RNA, 19 nt, Artificial Sequence
  Description of Artificial Sequence: Synthetic oligonucleotide
uggagcccucaauugcuag

SEQ ID NO: 355677 - RNA, 19 nt, Artificial Sequence
  Description of Artificial Sequence: Synthetic oligonucleotide
ucuagcaugcaagucuaua

SEQ ID NO: 355678 - RNA, 19 nt, Artificial Sequence
  Description of Artificial Sequence: Synthetic oligonucleotide
uugacaguaggcuggccuu

SEQ ID NO: 355679 - RNA, 19 nt, Artificial Sequence
  Description of Artificial Sequence: Synthetic oligonucleotide
uaaccauggcugucugcag

SEQ ID NO: 355680 - RNA, 19 nt, Artificial Sequence
  Description of Artificial Sequence: Synthetic oligonucleotide
cccaacucuaaguaccagg

SEQ ID NO: 355681 - RNA, 19 nt, Artificial Sequence
  Description of Artificial Sequence: Synthetic oligonucleotide
gagagugcugagacgacac

SEQ ID NO: 355682 - RNA, 19 nt, Artificial Sequence
  Description of Artificial Sequence: Synthetic oligonucleotide
guguguaccagcucccaca

SEQ ID NO: 355683 - RNA, 19 nt, Artificial Sequence
  Description of Artificial Sequence: Synthetic oligonucleotide
auacuuauggggaggggca

SEQ ID NO: 355684 - RNA, 19 nt, Artificial Sequence
  Description of Artificial Sequence: Synthetic oligonucleotide
  modified_base (6)..(6): a, c, u, g, unknown or other
agaagngucugauggucuu

SEQ ID NO: 355685 - RNA, 19 nt, Artificial Sequence
  Description of Artificial Sequence: Synthetic oligonucleotide
aaaagucuuggcgcacacu

SEQ ID NO: 355686 - RNA, 19 nt, Artificial Sequence
  Description of Artificial Sequence: Synthetic oligonucleotide
auguagugagcacacccaa

SEQ ID NO: 355687 - RNA, 19 nt, Artificial Sequence
  Description of Artificial Sequence: Synthetic oligonucleotide
ccuuaauacuuauggggag

SEQ ID NO: 355688 - RNA, 19 nt, Artificial Sequence
  Description of Artificial Sequence: Synthetic oligonucleotide
  modified_base (5)..(5): a, c, u, g, unknown or other
gaagngucugauggucuug

SEQ ID NO: 355689 - RNA, 19 nt, Artificial Sequence
  Description of Artificial Sequence: Synthetic oligonucleotide
agagaacuauacagggaag

SEQ ID NO: 355690 - RNA, 19 nt, Artificial Sequence
  Description of Artificial Sequence: Synthetic oligonucleotide
aguuggugagcugcaugac

SEQ ID NO: 355691 - RNA, 19 nt, Artificial Sequence
  Description of Artificial Sequence: Synthetic oligonucleotide
aguugcuaguguugugaga

SEQ ID NO: 355692 - RNA, 19 nt, Artificial Sequence
  Description of Artificial Sequence: Synthetic oligonucleotide
gaacaggcacacuaagugu

SEQ ID NO: 355693 - RNA, 19 nt, Artificial Sequence
  Description of Artificial Sequence: Synthetic oligonucleotide
gccaauugcagaguacagg

SEQ ID NO: 355694 - RNA, 19 nt, Artificial Sequence
  Description of Artificial Sequence: Synthetic oligonucleotide
ugcgacagcuuagacagua

SEQ ID NO: 355695 - RNA, 19 nt, Artificial Sequence
  Description of Artificial Sequence: Synthetic oligonucleotide
guugcacguuacuucgaug

SEQ ID NO: 355696 - RNA, 19 nt, Artificial Sequence
  Description of Artificial Sequence: Synthetic oligonucleotide
  modified_base (7)..(7): a, c, u, g, unknown or other
gaaaggnggcugcauuugu

SEQ ID NO: 355697 - RNA, 19 nt, Artificial Sequence
  Description of Artificial Sequence: Synthetic oligonucleotide
aggcuggccuuuuccuagc

SEQ ID NO: 355698 - RNA, 19 nt, Artificial Sequence
  Description of Artificial Sequence: Synthetic oligonucleotide
cauuugagacugugucuac

SEQ ID NO: 355699 - RNA, 19 nt, Artificial Sequence
  Description of Artificial Sequence: Synthetic oligonucleotide
uugcuagacggagaaacua

SEQ ID NO: 355700 - RNA, 19 nt, Artificial Sequence
  Description of Artificial Sequence: Synthetic oligonucleotide
auggauuaaggagcugucu

SEQ ID NO: 355701 - RNA, 19 nt, Artificial Sequence
  Description of Artificial Sequence: Synthetic oligonucleotide
auugcuagacggagaaacu

SEQ ID NO: 355702 - RNA, 19 nt, Artificial Sequence
  Description of Artificial Sequence: Synthetic oligonucleotide
gcguguuuaaggcagcuuc

SEQ ID NO: 355703 - RNA, 19 nt, Artificial Sequence
  Description of Artificial Sequence: Synthetic oligonucleotide
caaaagucuuggcgcacac

SEQ ID NO: 355704 - RNA, 19 nt, Artificial Sequence
  Description of Artificial Sequence: Synthetic oligonucleotide
uuuccuagccugucucauc

SEQ ID NO: 355705 - RNA, 19 nt, Artificial Sequence
  Description of Artificial Sequence: Synthetic oligonucleotide
acaguaggcuggccuuuuc

SEQ ID NO: 355706 - RNA, 19 nt, Artificial Sequence
  Description of Artificial Sequence: Synthetic oligonucleotide
uaaccgccccguuuaugcc

SEQ ID NO: 355707 - RNA, 19 nt, Artificial Sequence
  Description of Artificial Sequence: Synthetic oligonucleotide
acgaagaacucuguuuuaa

SEQ ID NO: 355708 - RNA, 19 nt, Artificial Sequence
  Description of Artificial Sequence: Synthetic oligonucleotide
  modified_base (2)..(2): a, c, u, g, unknown or other
gngucugauggucuugaua

SEQ ID NO: 355709 - RNA, 19 nt, Artificial Sequence
  Description of Artificial Sequence: Synthetic oligonucleotide
cuugacuagagaacuacau

SEQ ID NO: 355710 - RNA, 19 nt, Artificial Sequence
  Description of Artificial Sequence: Synthetic oligonucleotide
uacuuccugucugacggca

SEQ ID NO: 355711 - RNA, 19 nt, Artificial Sequence
  Description of Artificial Sequence: Synthetic oligonucleotide
ggagggaucuucgucuagg

SEQ ID NO: 355712 - RNA, 19 nt, Artificial Sequence
  Description of Artificial Sequence: Synthetic oligonucleotide
gcaugacaaaacuugacua

SEQ ID NO: 355713 - RNA, 19 nt, Artificial Sequence
  Description of Artificial Sequence: Synthetic oligonucleotide
aagacacuuaagaguugcu

SEQ ID NO: 355714 - RNA, 19 nt, Artificial Sequence
  Description of Artificial Sequence: Synthetic oligonucleotide
uucaaaagucuuggcgcac

SEQ ID NO: 355715 - RNA, 19 nt, Artificial Sequence
  Description of Artificial Sequence: Synthetic oligonucleotide
uaacucuguuauacugcaa

SEQ ID NO: 355716 - RNA, 19 nt, Artificial Sequence
  Description of Artificial Sequence: Synthetic oligonucleotide
gauguuccucguuuauuua

SEQ ID NO: 355717 - RNA, 19 nt, Artificial Sequence
  Description of Artificial Sequence: Synthetic oligonucleotide
gaaacuaaccgccccguuu

SEQ ID NO: 355718 - RNA, 19 nt, Artificial Sequence
  Description of Artificial Sequence: Synthetic oligonucleotide
cgucuaggggcauagcugg

SEQ ID NO: 355719 - RNA, 19 nt, Artificial Sequence
  Description of Artificial Sequence: Synthetic oligonucleotide
augcaagucuauauacaca

SEQ ID NO: 355720 - RNA, 19 nt, Artificial Sequence
  Description of Artificial Sequence: Synthetic oligonucleotide
auggccaauugcagaguac

SEQ ID NO: 355721 - RNA, 19 nt, Artificial Sequence
  Description of Artificial Sequence: Synthetic oligonucleotide
augccauguguccgcaugu

SEQ ID NO: 355722 - RNA, 19 nt, Artificial Sequence
  Description of Artificial Sequence: Synthetic oligonucleotide
ucccuguuacgaagaacuc

SEQ ID NO: 355723 - RNA, 19 nt, Artificial Sequence
  Description of Artificial Sequence: Synthetic oligonucleotide
gcaaaguguuaagucaacc

SEQ ID NO: 355724 - RNA, 19 nt, Artificial Sequence
  Description of Artificial Sequence: Synthetic oligonucleotide
caugugcguguuuaaggca

SEQ ID NO: 355725 - RNA, 19 nt, Artificial Sequence
  Description of Artificial Sequence: Synthetic oligonucleotide
  modified_base (6)..(6): a, c, u, g, unknown or other
aaaggnggcugcauuuguu

SEQ ID NO: 355726 - RNA, 19 nt, Artificial Sequence
  Description of Artificial Sequence: Synthetic oligonucleotide
ugaaacuaaccgccccguu

SEQ ID NO: 355727 - RNA, 19 nt, Artificial Sequence
  Description of Artificial Sequence: Synthetic oligonucleotide
acuugacuagagaacuaca

SEQ ID NO: 355728 - RNA, 19 nt, Artificial Sequence
  Description of Artificial Sequence: Synthetic oligonucleotide
cacuaaguguggugcuaag

SEQ ID NO: 355729 - RNA, 19 nt, Artificial Sequence
  Description of Artificial Sequence: Synthetic oligonucleotide
uagggcuuuucuuguggaa

SEQ ID NO: 355730 - RNA, 19 nt, Artificial Sequence
  Description of Artificial Sequence: Synthetic oligonucleotide
uacacagcuuggagggauc

SEQ ID NO: 355731 - RNA, 19 nt, Artificial Sequence
  Description of Artificial Sequence: Synthetic oligonucleotide
gaauuaaggugggagcacu

SEQ ID NO: 355732 - RNA, 19 nt, Artificial Sequence
  Description of Artificial Sequence: Synthetic oligonucleotide
gcuuuagaauuaagguggg

SEQ ID NO: 355733 - RNA, 19 nt, Artificial Sequence
  Description of Artificial Sequence: Synthetic oligonucleotide
gccuuaauacuuaugggga

SEQ ID NO: 355734 - RNA, 19 nt, Artificial Sequence
  Description of Artificial Sequence: Synthetic oligonucleotide
acguuacuucgaugcgcac

SEQ ID NO: 355735 - RNA, 19 nt, Artificial Sequence
  Description of Artificial Sequence: Synthetic oligonucleotide
ccuuggagcccucaauugc

SEQ ID NO: 355736 - RNA, 19 nt, Artificial Sequence
  Description of Artificial Sequence: Synthetic oligonucleotide
ccaacucuaaguaccagga

SEQ ID NO: 355737 - RNA, 19 nt, Artificial Sequence
  Description of Artificial Sequence: Synthetic oligonucleotide
cugucagacagccuugcaa

SEQ ID NO: 355738 - RNA, 19 nt, Artificial Sequence
  Description of Artificial Sequence: Synthetic oligonucleotide
  modified_base (2)..(2): a, c, u, g, unknown or other
gnggcugcauuuguuagua

SEQ ID NO: 355739 - RNA, 19 nt, Artificial Sequence
  Description of Artificial Sequence: Synthetic oligonucleotide
cucgauauucuugaaagau

SEQ ID NO: 355740 - RNA, 19 nt, Artificial Sequence
  Description of Artificial Sequence: Synthetic oligonucleotide
gugggagcacugcaucacc

SEQ ID NO: 355741 - RNA, 19 nt, Artificial Sequence
  Description of Artificial Sequence: Synthetic oligonucleotide
guggugcuaagacacuuaa

SEQ ID NO: 355742 - RNA, 19 nt, Artificial Sequence
  Description of Artificial Sequence: Synthetic oligonucleotide
ccccguuuaugccagacug

SEQ ID NO: 355743 - RNA, 19 nt, Artificial Sequence
  Description of Artificial Sequence: Synthetic oligonucleotide
cgcaugugcguguuuaagg

SEQ ID NO: 355744 - RNA, 19 nt, Artificial Sequence
  Description of Artificial Sequence: Synthetic oligonucleotide
cucccagcauccagacucc

SEQ ID NO: 355745 - RNA, 19 nt, Artificial Sequence
  Description of Artificial Sequence: Synthetic oligonucleotide
uacuuauggggaggggcac

SEQ ID NO: 355746 - RNA, 19 nt, Artificial Sequence
  Description of Artificial Sequence: Synthetic oligonucleotide
cugacggcaagggugcuuc

SEQ ID NO: 355747 - RNA, 19 nt, Artificial Sequence
  Description of Artificial Sequence: Synthetic oligonucleotide
uaucgcccugggcauggga

SEQ ID NO: 355748 - RNA, 19 nt, Artificial Sequence
  Description of Artificial Sequence: Synthetic oligonucleotide
ugguugcacguuacuucga

SEQ ID NO: 355749 - RNA, 19 nt, Artificial Sequence
  Description of Artificial Sequence: Synthetic oligonucleotide
cagcaagaccuuucaagga

SEQ ID NO: 355750 - RNA, 19 nt, Artificial Sequence
  Description of Artificial Sequence: Synthetic oligonucleotide
guacaaugguugcacguua

SEQ ID NO: 355751 - RNA, 19 nt, Artificial Sequence
  Description of Artificial Sequence: Synthetic oligonucleotide
gcuaagacacuuaagaguu

SEQ ID NO: 355752 - RNA, 19 nt, Artificial Sequence
  Description of Artificial Sequence: Synthetic oligonucleotide
uggauguagugagcacacc

SEQ ID NO: 355753 - RNA, 19 nt, Artificial Sequence
  Description of Artificial Sequence: Synthetic oligonucleotide
uggaggcgcugaaacuaac

SEQ ID NO: 355754 - RNA, 19 nt, Artificial Sequence
  Description of Artificial Sequence: Synthetic oligonucleotide
cuuggagcccucaauugcu

SEQ ID NO: 355755 - RNA, 19 nt, Artificial Sequence
  Description of Artificial Sequence: Synthetic oligonucleotide
  modified_base (8)..(8): a, c, u, g, unknown or other
ggaaaggnggcugcauuug

SEQ ID NO: 355756 - RNA, 19 nt, Artificial Sequence
  Description of Artificial Sequence: Synthetic oligonucleotide
uggcaguagcacccagaac

SEQ ID NO: 355757 - RNA, 19 nt, Artificial Sequence
  Description of Artificial Sequence: Synthetic oligonucleotide
ucuacacagcuuggaggga

SEQ ID NO: 355758 - RNA, 19 nt, Artificial Sequence
  Description of Artificial Sequence: Synthetic oligonucleotide
agcuuagacaguacuguua

SEQ ID NO: 355759 - RNA, 19 nt, Artificial Sequence
  Description of Artificial Sequence: Synthetic oligonucleotide
cugacuaccuuucaacuuu

SEQ ID NO: 355760 - RNA, 19 nt, Artificial Sequence
  Description of Artificial Sequence: Synthetic oligonucleotide
gcagauaugacuguggcuu

SEQ ID NO: 355761 - RNA, 19 nt, Artificial Sequence
  Description of Artificial Sequence: Synthetic oligonucleotide
  modified_base (7)..(7): a, c, u, g, unknown or other
cagaagngucugauggucu

SEQ ID NO: 355762 - RNA, 19 nt, Artificial Sequence
  Description of Artificial Sequence: Synthetic oligonucleotide
aggaaacgccaacugugua

SEQ ID NO: 355763 - RNA, 19 nt, Artificial Sequence
  Description of Artificial Sequence: Synthetic oligonucleotide
cccguuuaugccagacugg

SEQ ID NO: 355764 - RNA, 19 nt, Artificial Sequence
  Description of Artificial Sequence: Synthetic oligonucleotide
cuuugauaauggcacugcu

SEQ ID NO: 355765 - RNA, 19 nt, Artificial Sequence
  Description of Artificial Sequence: Synthetic oligonucleotide
gguaaccauggcugucugc

SEQ ID NO: 355766 - RNA, 19 nt, Artificial Sequence
  Description of Artificial Sequence: Synthetic oligonucleotide
cccagaacaggaaacgcca

SEQ ID NO: 355767 - RNA, 19 nt, Artificial Sequence
  Description of Artificial Sequence: Synthetic oligonucleotide
agaggacagauaauauauu

SEQ ID NO: 355768 - RNA, 19 nt, Artificial Sequence
  Description of Artificial Sequence: Synthetic oligonucleotide
acuaaccgccccguuuaug

SEQ ID NO: 355769 - RNA, 19 nt, Artificial Sequence
  Description of Artificial Sequence: Synthetic oligonucleotide
auguuagccuguaauuauu

SEQ ID NO: 355770 - RNA, 19 nt, Artificial Sequence
  Description of Artificial Sequence: Synthetic oligonucleotide
  modified_base (3)..(3): a, c, u, g, unknown or other
agngucugauggucuugau

SEQ ID NO: 355771 - RNA, 19 nt, Artificial Sequence
  Description of Artificial Sequence: Synthetic oligonucleotide
cuguaauaguuggugagcu

SEQ ID NO: 355772 - RNA, 19 nt, Artificial Sequence
  Description of Artificial Sequence: Synthetic oligonucleotide
cuuuagaauuaagguggga

SEQ ID NO: 355773 - RNA, 19 nt, Artificial Sequence
  Description of Artificial Sequence: Synthetic oligonucleotide
ugcggccaugagagggugc

SEQ ID NO: 355774 - RNA, 19 nt, Artificial Sequence
  Description of Artificial Sequence: Synthetic oligonucleotide
guuugggagucagcucugc

SEQ ID NO: 355775 - RNA, 19 nt, Artificial Sequence
  Description of Artificial Sequence: Synthetic oligonucleotide
gcuuggagggaucuucguc

SEQ ID NO: 355776 - RNA, 19 nt, Artificial Sequence
  Description of Artificial Sequence: Synthetic oligonucleotide
ggaucuucgucuaggggca

SEQ ID NO: 355777 - RNA, 19 nt, Artificial Sequence
  Description of Artificial Sequence: Synthetic oligonucleotide
ccuacaaguuaugugguga

SEQ ID NO: 355778 - RNA, 19 nt, Artificial Sequence
  Description of Artificial Sequence: Synthetic oligonucleotide
ggaggcgcugaaacuaacc

SEQ ID NO: 355779 - RNA, 19 nt, Artificial Sequence
  Description of Artificial Sequence: Synthetic oligonucleotide
gcacguuacuucgaugcgc

SEQ ID NO: 355780 - RNA, 19 nt, Artificial Sequence
  Description of Artificial Sequence: Synthetic oligonucleotide
guaggcuggccuuuuccua

SEQ ID NO: 355781 - RNA, 19 nt, Artificial Sequence
  Description of Artificial Sequence: Synthetic oligonucleotide
cuguuauacugcaaacuuu

SEQ ID NO: 355782 - RNA, 19 nt, Artificial Sequence
  Description of Artificial Sequence: Synthetic oligonucleotide
gccagagaaauacucgaua

SEQ ID NO: 355783 - RNA, 19 nt, Artificial Sequence
  Description of Artificial Sequence: Synthetic oligonucleotide
  modified_base (8)..(8): a, c, u, g, unknown or other
ccagaagngucugaugguc

SEQ ID NO: 355784 - RNA, 19 nt, Artificial Sequence
  Description of Artificial Sequence: Synthetic oligonucleotide
uuaucgcccugggcauggg

SEQ ID NO: 355785 - RNA, 19 nt, Artificial Sequence
  Description of Artificial Sequence: Synthetic oligonucleotide
cuuugacaguaggcuggcc

SEQ ID NO: 355786 - RNA, 19 nt, Artificial Sequence
  Description of Artificial Sequence: Synthetic oligonucleotide
agccagagaaauacucgau

SEQ ID NO: 355787 - RNA, 19 nt, Artificial Sequence
  Description of Artificial Sequence: Synthetic oligonucleotide
gcugacuacagucuagcau

SEQ ID NO: 355788 - RNA, 19 nt, Artificial Sequence
  Description of Artificial Sequence: Synthetic oligonucleotide
cugcauugcuaggucggug

SEQ ID NO: 355789 - RNA, 19 nt, Artificial Sequence
  Description of Artificial Sequence: Synthetic oligonucleotide
ccuagccugucucaucaug

SEQ ID NO: 355790 - RNA, 19 nt, Artificial Sequence
  Description of Artificial Sequence: Synthetic oligonucleotide
caggaaacgccaacugugu

SEQ ID NO: 355791 - RNA, 19 nt, Artificial Sequence
  Description of Artificial Sequence: Synthetic oligonucleotide
cuggcggcuuagugcuucc

SEQ ID NO: 355792 - RNA, 19 nt, Artificial Sequence
  Description of Artificial Sequence: Synthetic oligonucleotide
gguucuuuguacaaugguu

SEQ ID NO: 355793 - RNA, 19 nt, Artificial Sequence
  Description of Artificial Sequence: Synthetic oligonucleotide
gcuagacggagaaacuauc

SEQ ID NO: 355794 - RNA, 19 nt, Artificial Sequence
  Description of Artificial Sequence: Synthetic oligonucleotide
aucgcccugggcaugggaa

SEQ ID NO: 355795 - RNA, 19 nt, Artificial Sequence
  Description of Artificial Sequence: Synthetic oligonucleotide
ugacaguaggcuggccuuu

SEQ ID NO: 355796 - RNA, 19 nt, Artificial Sequence
  Description of Artificial Sequence: Synthetic oligonucleotide
gacuaccuuucaacuuuga

SEQ ID NO: 355797 - RNA, 19 nt, Artificial Sequence
  Description of Artificial Sequence: Synthetic oligonucleotide
cuucgucuaggggcauagc

SEQ ID NO: 355798 - RNA, 19 nt, Artificial Sequence
  Description of Artificial Sequence: Synthetic oligonucleotide
ccagagaaauacucgauau

SEQ ID NO: 355799 - RNA, 19 nt, Artificial Sequence
  Description of Artificial Sequence: Synthetic oligonucleotide
uccuagccugucucaucau

SEQ ID NO: 355800 - RNA, 19 nt, Artificial Sequence
  Description of Artificial Sequence: Synthetic oligonucleotide
ccuaucaaagagccagaga

SEQ ID NO: 355801 - RNA, 19 nt, Artificial Sequence
  Description of Artificial Sequence: Synthetic oligonucleotide
agcccucaauugcuaggaa

SEQ ID NO: 355802 - RNA, 19 nt, Artificial Sequence
  Description of Artificial Sequence: Synthetic oligonucleotide
uuacuucgaugcgcacacu

SEQ ID NO: 355803 - RNA, 19 nt, Artificial Sequence
  Description of Artificial Sequence: Synthetic oligonucleotide
cuguggcuauuucucagcu

SEQ ID NO: 355804 - RNA, 19 nt, Artificial Sequence
  Description of Artificial Sequence: Synthetic oligonucleotide
uugcuaggucggugguaaa

SEQ ID NO: 355805 - RNA, 19 nt, Artificial Sequence
  Description of Artificial Sequence: Synthetic oligonucleotide
ggcggcuuagugcuuccuc

SEQ ID NO: 355806 - RNA, 19 nt, Artificial Sequence
  Description of Artificial Sequence: Synthetic oligonucleotide
  modified_base (3)..(3): a, c, u, g, unknown or other
ggnggcugcauuuguuagu

SEQ ID NO: 355807 - RNA, 19 nt, Artificial Sequence
  Description of Artificial Sequence: Synthetic oligonucleotide
acacuacgccugucauagu

SEQ ID NO: 355808 - RNA, 19 nt, Artificial Sequence
  Description of Artificial Sequence: Synthetic oligonucleotide
cgcugaaacuaaccgcccc

SEQ ID NO: 355809 - RNA, 19 nt, Artificial Sequence
  Description of Artificial Sequence: Synthetic oligonucleotide
gagcuuucccagagaacua

SEQ ID NO: 355810 - RNA, 19 nt, Artificial Sequence
  Description of Artificial Sequence: Synthetic oligonucleotide
guguguguaccagcuccca

SEQ ID NO: 355811 - RNA, 19 nt, Artificial Sequence
  Description of Artificial Sequence: Synthetic oligonucleotide
guagccagagacgucucau

SEQ ID NO: 355812 - RNA, 19 nt, Artificial Sequence
  Description of Artificial Sequence: Synthetic oligonucleotide
caaugguugcacguuacuu

SEQ ID NO: 355813 - RNA, 19 nt, Artificial Sequence
  Description of Artificial Sequence: Synthetic oligonucleotide
guauugcuagacggagaaa

SEQ ID NO: 355814 - RNA, 19 nt, Artificial Sequence
  Description of Artificial Sequence: Synthetic oligonucleotide
cuaggucggugguaaaguu

SEQ ID NO: 355815 - RNA, 19 nt, Artificial Sequence
  Description of Artificial Sequence: Synthetic oligonucleotide
cacacuaaguguggugcua

SEQ ID NO: 355816 - RNA, 19 nt, Artificial Sequence
  Description of Artificial Sequence: Synthetic oligonucleotide
cuguuacgaagaacucugu

SEQ ID NO: 355817 - RNA, 19 nt, Artificial Sequence
  Description of Artificial Sequence: Synthetic oligonucleotide
ccguuuaugccagacugga

SEQ ID NO: 355818 - RNA, 19 nt, Artificial Sequence
  Description of Artificial Sequence: Synthetic oligonucleotide
ggcuggccuuuuccuagcc

SEQ ID NO: 355819 - RNA, 19 nt, Artificial Sequence
  Description of Artificial Sequence: Synthetic oligonucleotide
  modified_base (9)..(9): a, c, u, g, unknown or other
gggaaaggnggcugcauuu

SEQ ID NO: 355820 - RNA, 19 nt, Artificial Sequence
  Description of Artificial Sequence: Synthetic oligonucleotide
gguugcacguuacuucgau

SEQ ID NO: 355821 - RNA, 19 nt, Artificial Sequence
  Description of Artificial Sequence: Synthetic oligonucleotide
acgacacuggcggcuuagu

SEQ ID NO: 355822 - RNA, 19 nt, Artificial Sequence
  Description of Artificial Sequence: Synthetic oligonucleotide
cuuuaaggguccagauguu

SEQ ID NO: 355823 - RNA, 19 nt, Artificial Sequence
  Description of Artificial Sequence: Synthetic oligonucleotide
gcuaguguugugagaccca

SEQ ID NO: 355824 - RNA, 19 nt, Artificial Sequence
  Description of Artificial Sequence: Synthetic oligonucleotide
cuacacagcuuggagggau

SEQ ID NO: 355825 - RNA, 19 nt, Artificial Sequence
  Description of Artificial Sequence: Synthetic oligonucleotide
gggacuggcuuuagaauua

SEQ ID NO: 355826 - RNA, 19 nt, Artificial Sequence
  Description of Artificial Sequence: Synthetic oligonucleotide
cugaaacuaaccgccccgu

SEQ ID NO: 355827 - RNA, 19 nt, Artificial Sequence
  Description of Artificial Sequence: Synthetic oligonucleotide
gcggcuuagugcuuccucu

SEQ ID NO: 355828 - RNA, 19 nt, Artificial Sequence
  Description of Artificial Sequence: Synthetic oligonucleotide
gcgcacacuacgccuguca

SEQ ID NO: 355829 - RNA, 19 nt, Artificial Sequence
  Description of Artificial Sequence: Synthetic oligonucleotide
gcuaggucggugguaaagu

SEQ ID NO: 355830 - RNA, 19 nt, Artificial Sequence
  Description of Artificial Sequence: Synthetic oligonucleotide
gugcggccaugagagggug

SEQ ID NO: 355831 - RNA, 19 nt, Artificial Sequence
  Description of Artificial Sequence: Synthetic oligonucleotide
cccuuuauggaucccuucu

SEQ ID NO: 355832 - RNA, 19 nt, Artificial Sequence
  Description of Artificial Sequence: Synthetic oligonucleotide
cauugcuaggucgguggua

SEQ ID NO: 355833 - RNA, 19 nt, Artificial Sequence
  Description of Artificial Sequence: Synthetic oligonucleotide
guguaccagcucccacaga

SEQ ID NO: 355834 - RNA, 19 nt, Artificial Sequence
  Description of Artificial Sequence: Synthetic oligonucleotide
cuuauggggaggggcacau

SEQ ID NO: 355835 - RNA, 19 nt, Artificial Sequence
  Description of Artificial Sequence: Synthetic oligonucleotide
cagauaugacuguggcuuu

SEQ ID NO: 355836 - RNA, 19 nt, Artificial Sequence
  Description of Artificial Sequence: Synthetic oligonucleotide
cguuacuucgaugcgcaca

SEQ ID NO: 355837 - RNA, 19 nt, Artificial Sequence
  Description of Artificial Sequence: Synthetic oligonucleotide
guguugugagacccacaau

SEQ ID NO: 355838 - RNA, 19 nt, Artificial Sequence
  Description of Artificial Sequence: Synthetic oligonucleotide
gcgcugaaacuaaccgccc

SEQ ID NO: 355839 - RNA, 19 nt, Artificial Sequence
  Description of Artificial Sequence: Synthetic oligonucleotide
gcacacuacgccugucaua

SEQ ID NO: 355840 - RNA, 19 nt, Artificial Sequence
  Description of Artificial Sequence: Synthetic oligonucleotide
guguggugcuaagacacuu

SEQ ID NO: 355841 - RNA, 19 nt, Artificial Sequence
  Description of Artificial Sequence: Synthetic oligonucleotide
gcacacuaaguguggugcu

SEQ ID NO: 355842 - RNA, 19 nt, Artificial Sequence
  Description of Artificial Sequence: Synthetic oligonucleotide
cgacacuggcggcuuagug

SEQ ID NO: 355843 - RNA, 19 nt, Artificial Sequence
  Description of Artificial Sequence: Synthetic oligonucleotide
cgccugucauagugcacgg

SEQ ID NO: 355844 - RNA, 19 nt, Artificial Sequence
  Description of Artificial Sequence: Synthetic oligonucleotide
cuauggccaauugcagagu

SEQ ID NO: 355845 - RNA, 19 nt, Artificial Sequence
  Description of Artificial Sequence: Synthetic oligonucleotide
ggucggugguaaaguugug

SEQ ID NO: 355846 - RNA, 19 nt, Artificial Sequence
  Description of Artificial Sequence: Synthetic oligonucleotide
gugcguguuuaaggcagcu

SEQ ID NO: 355847 - RNA, 19 nt, Artificial Sequence
  Description of Artificial Sequence: Synthetic oligonucleotide
gcauugcuaggucgguggu

SEQ ID NO: 355848 - RNA, 19 nt, Artificial Sequence
  Description of Artificial Sequence: Synthetic oligonucleotide
  modified_base (9)..(9): a, c, u, g, unknown or other
cccagaagngucugauggu

SEQ ID NO: 355849 - RNA, 19 nt, Artificial Sequence
  Description of Artificial Sequence: Synthetic oligonucleotide
gacggcaagggugcuucuu

SEQ ID NO: 355850 - RNA, 19 nt, Artificial Sequence
  Description of Artificial Sequence: Synthetic oligonucleotide
cccuguuacgaagaacucu

SEQ ID NO: 355851 - RNA, 19 nt, Artificial Sequence
  Description of Artificial Sequence: Synthetic oligonucleotide
ggauuugauugaaggccau

SEQ ID NO: 355852 - RNA, 19 nt, Artificial Sequence
  Description of Artificial Sequence: Synthetic oligonucleotide
cgacagcuuagacaguacu

SEQ ID NO: 355853 - RNA, 19 nt, Artificial Sequence
  Description of Artificial Sequence: Synthetic oligonucleotide
gaucuucgucuaggggcau

SEQ ID NO: 355854 - RNA, 19 nt, Artificial Sequence
  Description of Artificial Sequence: Synthetic oligonucleotide
gccccguuuaugccagacu

SEQ ID NO: 355855 - RNA, 19 nt, Artificial Sequence
  Description of Artificial Sequence: Synthetic oligonucleotide
ccagauguuccucguuuau

SEQ ID NO: 355856 - RNA, 19 nt, Artificial Sequence
  Description of Artificial Sequence: Synthetic oligonucleotide
gcugcauugcuaggucggu

SEQ ID NO: 355857 - RNA, 19 nt, Artificial Sequence
  Description of Artificial Sequence: Synthetic oligonucleotide
cgcugacuacagucuagca

SEQ ID NO: 355858 - RNA, 19 nt, Artificial Sequence
  Description of Artificial Sequence: Synthetic oligonucleotide
cuauguggauagggcuuuu

SEQ ID NO: 355859 - RNA, 19 nt, Artificial Sequence
  Description of Artificial Sequence: Synthetic oligonucleotide
cgccccguuuaugccagac

SEQ ID NO: 355860 - RNA, 19 nt, Artificial Sequence
  Description of Artificial Sequence: Synthetic oligonucleotide
gcacgguuugcugcuggau

SEQ ID NO: 355861 - RNA, 19 nt, Artificial Sequence
  Description of Artificial Sequence: Synthetic oligonucleotide
cguuuaugccagacuggau

SEQ ID NO: 355862 - RNA, 19 nt, Artificial Sequence
  Description of Artificial Sequence: Synthetic oligonucleotide
cacuggcggcuuagugcuu

SEQ ID NO: 355863 - RNA, 19 nt, Artificial Sequence
  Description of Artificial Sequence: Synthetic oligonucleotide
ccgccccguuuaugccaga

SEQ ID NO: 355864 - RNA, 19 nt, Artificial Sequence
  Description of Artificial Sequence: Synthetic oligonucleotide
  modified_base (1)..(1): a, c, u, g, unknown or other
ngucugauggucuugauac

SEQ ID NO: 355865 - RNA, 19 nt, Artificial Sequence
  Description of Artificial Sequence: Synthetic oligonucleotide
acuguauucagauagcucc

SEQ ID NO: 355866 - RNA, 19 nt, Artificial Sequence
  Description of Artificial Sequence: Synthetic oligonucleotide
  modified_base (5)..(5): a, c, u, g, unknown or other
uuuunuuuaauauaaaaua

SEQ ID NO: 355867 - RNA, 19 nt, Artificial Sequence
  Description of Artificial Sequence: Synthetic oligonucleotide
aacauuauagagucuauag

SEQ ID NO: 355868 - RNA, 19 nt, Artificial Sequence
  Description of Artificial Sequence: Synthetic oligonucleotide
  modified_base (4)..(4): a, c, u, g, unknown or other
uuunuuuaauauaaaauaa

SEQ ID NO: 355869 - RNA, 19 nt, Artificial Sequence
  Description of Artificial Sequence: Synthetic oligonucleotide
aauagcauacagcaguccg

SEQ ID NO: 355870 - RNA, 19 nt, Artificial Sequence
  Description of Artificial Sequence: Synthetic oligonucleotide
aaagaacgaauuccaaggc

SEQ ID NO: 355871 - RNA, 19 nt, Artificial Sequence
  Description of Artificial Sequence: Synthetic oligonucleotide
uuaagcauaacacuguacu

SEQ ID NO: 355872 - RNA, 19 nt, Artificial Sequence
  Description of Artificial Sequence: Synthetic oligonucleotide
uguacuguaauaacucugg

SEQ ID NO: 355873 - RNA, 19 nt, Artificial Sequence
  Description of Artificial Sequence: Synthetic oligonucleotide
uuuaauaucauuguaccug

SEQ ID NO: 355874 - RNA, 19 nt, Artificial Sequence
  Description of Artificial Sequence: Synthetic oligonucleotide
aacgaauucggcucuacac

SEQ ID NO: 355875 - RNA, 19 nt, Artificial Sequence
  Description of Artificial Sequence: Synthetic oligonucleotide
acaacaugcuuccacaacc

SEQ ID NO: 355876 - RNA, 19 nt, Artificial Sequence
  Description of Artificial Sequence: Synthetic oligonucleotide
aaacuuauaaaguaguauu

SEQ ID NO: 355877 - RNA, 19 nt, Artificial Sequence
  Description of Artificial Sequence: Synthetic oligonucleotide
aucuauuuuauauuaaggu

SEQ ID NO: 355878 - RNA, 19 nt, Artificial Sequence
  Description of Artificial Sequence: Synthetic oligonucleotide
uguaauuagaauuuacaaa

SEQ ID NO: 355879 - RNA, 19 nt, Artificial Sequence
  Description of Artificial Sequence: Synthetic oligonucleotide
uguuucauuagaaauuuac

SEQ ID NO: 355880 - RNA, 19 nt, Artificial Sequence
  Description of Artificial Sequence: Synthetic oligonucleotide
cauucuacugacuugagac

SEQ ID NO: 355881 - RNA, 19 nt, Artificial Sequence
  Description of Artificial Sequence: Synthetic oligonucleotide
uaugcguacugaauuaagg

SEQ ID NO: 355882 - RNA, 19 nt, Artificial Sequence
  Description of Artificial Sequence: Synthetic oligonucleotide
acuauguucagguaggucu

SEQ ID NO: 355883 - RNA, 19 nt, Artificial Sequence
  Description of Artificial Sequence: Synthetic oligonucleotide
gacucuguaacaugggucg

SEQ ID NO: 355884 - RNA, 19 nt, Artificial Sequence
  Description of Artificial Sequence: Synthetic oligonucleotide
aaaguaguauuuuggaagu

SEQ ID NO: 355885 - RNA, 19 nt, Artificial Sequence
  Description of Artificial Sequence: Synthetic oligonucleotide
aaacaauucacugagacua

SEQ ID NO: 355886 - RNA, 19 nt, Artificial Sequence
  Description of Artificial Sequence: Synthetic oligonucleotide
uagccuaucacacaguucu

SEQ ID NO: 355887 - RNA, 19 nt, Artificial Sequence
  Description of Artificial Sequence: Synthetic oligonucleotide
cauaguggcaacaaaauuc

SEQ ID NO: 355888 - RNA, 19 nt, Artificial Sequence
  Description of Artificial Sequence: Synthetic oligonucleotide
uauaguauuuguuuucucu

SEQ ID NO: 355889 - RNA, 19 nt, Artificial Sequence
  Description of Artificial Sequence: Synthetic oligonucleotide
ucuauuuuauauuaaggua

SEQ ID NO: 355890 - RNA, 19 nt, Artificial Sequence
  Description of Artificial Sequence: Synthetic oligonucleotide
uguacuuugagagagcgga

SEQ ID NO: 355891 - RNA, 19 nt, Artificial Sequence
  Description of Artificial Sequence: Synthetic oligonucleotide
acgaauucggcucuacacc

SEQ ID NO: 355892 - RNA, 19 nt, Artificial Sequence
  Description of Artificial Sequence: Synthetic oligonucleotide
uuugggaucauaucucucc

SEQ ID NO: 355893 - RNA, 19 nt, Artificial Sequence
  Description of Artificial Sequence: Synthetic oligonucleotide
gaaguuuauauguuuguac

SEQ ID NO: 355894 - RNA, 19 nt, Artificial Sequence
  Description of Artificial Sequence: Synthetic oligonucleotide
gacaagaacucccaucgcg

SEQ ID NO: 355895 - RNA, 19 nt, Artificial Sequence
  Description of Artificial Sequence: Synthetic oligonucleotide
cuauguguggacauaggcg

SEQ ID NO: 355896 - RNA, 19 nt, Artificial Sequence
  Description of Artificial Sequence: Synthetic oligonucleotide
agguucuuaacacaauggg

SEQ ID NO: 355897 - RNA, 19 nt, Artificial Sequence
  Description of Artificial Sequence: Synthetic oligonucleotide
auauucaauuagcaucccc

SEQ ID NO: 355898 - RNA, 19 nt, Artificial Sequence
  Description of Artificial Sequence: Synthetic oligonucleotide
accacaacgaauucggcuc

SEQ ID NO: 355899 - RNA, 19 nt, Artificial Sequence
  Description of Artificial Sequence: Synthetic oligonucleotide
agacuauuaacauucacau

SEQ ID NO: 355900 - RNA, 19 nt, Artificial Sequence
  Description of Artificial Sequence: Synthetic oligonucleotide
gauggaauggcuauuuaag

SEQ ID NO: 355901 - RNA, 19 nt, Artificial Sequence
  Description of Artificial Sequence: Synthetic oligonucleotide
agcacaauagguucuuaac

SEQ ID NO: 355902 - RNA, 19 nt, Artificial Sequence
  Description of Artificial Sequence: Synthetic oligonucleotide
aauacuaguuagguggaag

SEQ ID NO: 355903 - RNA, 19 nt, Artificial Sequence
  Description of Artificial Sequence: Synthetic oligonucleotide
cuaccuuaaagaaaguuuc

SEQ ID NO: 355904 - RNA, 19 nt, Artificial Sequence
  Description of Artificial Sequence: Synthetic oligonucleotide
uuuaguuccagccggccug

SEQ ID NO: 355905 - RNA, 19 nt, Artificial Sequence
  Description of Artificial Sequence: Synthetic oligonucleotide
aacaauugcaucaguauca

SEQ ID NO: 355906 - RNA, 19 nt, Artificial Sequence
  Description of Artificial Sequence: Synthetic oligonucleotide
aguauugucuccucauuag

SEQ ID NO: 355907 - RNA, 19 nt, Artificial Sequence
  Description of Artificial Sequence: Synthetic oligonucleotide
uggaagcucauuaugacaa

SEQ ID NO: 355908 - RNA, 19 nt, Artificial Sequence
  Description of Artificial Sequence: Synthetic oligonucleotide
aagaagggcauuuaguauu

SEQ ID NO: 355909 - RNA, 19 nt, Artificial Sequence
  Description of Artificial Sequence: Synthetic oligonucleotide
uccucauuaggaauguuca

SEQ ID NO: 355910 - RNA, 19 nt, Artificial Sequence
  Description of Artificial Sequence: Synthetic oligonucleotide
acaacuagagcauauuuaa

SEQ ID NO: 355911 - RNA, 19 nt, Artificial Sequence
  Description of Artificial Sequence: Synthetic oligonucleotide
ucugcuaaugcucauggau

SEQ ID NO: 355912 - RNA, 19 nt, Artificial Sequence
  Description of Artificial Sequence: Synthetic oligonucleotide
acuuccgagguuuuguccg

SEQ ID NO: 355913 - RNA, 19 nt, Artificial Sequence
  Description of Artificial Sequence: Synthetic oligonucleotide
caaugggucaaaaugugag

SEQ ID NO: 355914 - RNA, 19 nt, Artificial Sequence
  Description of Artificial Sequence: Synthetic oligonucleotide
aaaguuucauacaauauua

SEQ ID NO: 355915 - RNA, 19 nt, Artificial Sequence
  Description of Artificial Sequence: Synthetic oligonucleotide
ugcaacaccgaacugcagc

SEQ ID NO: 355916 - RNA, 19 nt, Artificial Sequence
  Description of Artificial Sequence: Synthetic oligonucleotide
gagguagccuaauauaagc

SEQ ID NO: 355917 - RNA, 19 nt, Artificial Sequence
  Description of Artificial Sequence: Synthetic oligonucleotide
uuuaguuuugggguuguag

SEQ ID NO: 355918 - RNA, 19 nt, Artificial Sequence
  Description of Artificial Sequence: Synthetic oligonucleotide
ucaucuaacacugcaacac

SEQ ID NO: 355919 - RNA, 19 nt, Artificial Sequence
  Description of Artificial Sequence: Synthetic oligonucleotide
aagaacgaauuccaaggca

SEQ ID NO: 355920 - RNA, 19 nt, Artificial Sequence
  Description of Artificial Sequence: Synthetic oligonucleotide
uagugguuugauuaaauaa

SEQ ID NO: 355921 - RNA, 19 nt, Artificial Sequence
  Description of Artificial Sequence: Synthetic oligonucleotide
aguauggaagcucauuaug

SEQ ID NO: 355922 - RNA, 19 nt, Artificial Sequence
  Description of Artificial Sequence: Synthetic oligonucleotide
aucuagaugggauggaaug

SEQ ID NO: 355923 - RNA, 19 nt, Artificial Sequence
  Description of Artificial Sequence: Synthetic oligonucleotide
aguuuauauguuuguacug

SEQ ID NO: 355924 - RNA, 19 nt, Artificial Sequence
  Description of Artificial Sequence: Synthetic oligonucleotide
aauauucaauuagcauccc

SEQ ID NO: 355925 - RNA, 19 nt, Artificial Sequence
  Description of Artificial Sequence: Synthetic oligonucleotide
uaucacacaguucuccgug

SEQ ID NO: 355926 - RNA, 19 nt, Artificial Sequence
  Description of Artificial Sequence: Synthetic oligonucleotide
ggaauggcuauuuaaguag

SEQ ID NO: 355927 - RNA, 19 nt, Artificial Sequence
  Description of Artificial Sequence: Synthetic oligonucleotide
uguaacaugggucgucucu

SEQ ID NO: 355928 - RNA, 19 nt, Artificial Sequence
  Description of Artificial Sequence: Synthetic oligonucleotide
uugcauaucuuaauguaaa

SEQ ID NO: 355929 - RNA, 19 nt, Artificial Sequence
  Description of Artificial Sequence: Synthetic oligonucleotide
ucaaguuggaugugggagc

SEQ ID NO: 355930 - RNA, 19 nt, Artificial Sequence
  Description of Artificial Sequence: Synthetic oligonucleotide
gagacuauuaacauucaca

SEQ ID NO: 355931 - RNA, 19 nt, Artificial Sequence
  Description of Artificial Sequence: Synthetic oligonucleotide
uguccgaggacucuguaac

SEQ ID NO: 355932 - RNA, 19 nt, Artificial Sequence
  Description of Artificial Sequence: Synthetic oligonucleotide
guucuuaacacaauggguc

SEQ ID NO: 355933 - RNA, 19 nt, Artificial Sequence
  Description of Artificial Sequence: Synthetic oligonucleotide
uuagugugaggaucaaagc

SEQ ID NO: 355934 - RNA, 19 nt, Artificial Sequence
  Description of Artificial Sequence: Synthetic oligonucleotide
aauugugggccacuuuaug

SEQ ID NO: 355935 - RNA, 19 nt, Artificial Sequence
  Description of Artificial Sequence: Synthetic oligonucleotide
ugagaacaaagcauagagu

SEQ ID NO: 355936 - RNA, 19 nt, Artificial Sequence
  Description of Artificial Sequence: Synthetic oligonucleotide
acugagaucuuuccgccuc

SEQ ID NO: 355937 - RNA, 19 nt, Artificial Sequence
  Description of Artificial Sequence: Synthetic oligonucleotide
gguuaaaccaauuuuagua

SEQ ID NO: 355938 - RNA, 19 nt, Artificial Sequence
  Description of Artificial Sequence: Synthetic oligonucleotide
auaaugucccaacagucga

SEQ ID NO: 355939 - RNA, 19 nt, Artificial Sequence
  Description of Artificial Sequence: Synthetic oligonucleotide
ugcguacugaauuaaggac

SEQ ID NO: 355940 - RNA, 19 nt, Artificial Sequence
  Description of Artificial Sequence: Synthetic oligonucleotide
uaugcaaaucagugcagcc

SEQ ID NO: 355941 - RNA, 19 nt, Artificial Sequence
  Description of Artificial Sequence: Synthetic oligonucleotide
uacuguaauaacucuggac

SEQ ID NO: 355942 - RNA, 19 nt, Artificial Sequence
  Description of Artificial Sequence: Synthetic oligonucleotide
cuaguuagguggaagaaca

SEQ ID NO: 355943 - RNA, 19 nt, Artificial Sequence
  Description of Artificial Sequence: Synthetic oligonucleotide
agguggaagaacauuauag

SEQ ID NO: 355944 - RNA, 19 nt, Artificial Sequence
  Description of Artificial Sequence: Synthetic oligonucleotide
uauggaagcucauuaugac

SEQ ID NO: 355945 - RNA, 19 nt, Artificial Sequence
  Description of Artificial Sequence: Synthetic oligonucleotide
ugcauaucuuaauguaaag

SEQ ID NO: 355946 - RNA, 19 nt, Artificial Sequence
  Description of Artificial Sequence: Synthetic oligonucleotide
uccaaaucgugccggaccc

SEQ ID NO: 355947 - RNA, 19 nt, Artificial Sequence
  Description of Artificial Sequence: Synthetic oligonucleotide
aaugagaacaaagcauaga

SEQ ID NO: 355948 - RNA, 19 nt, Artificial Sequence
  Description of Artificial Sequence: Synthetic oligonucleotide
auauaagccaaaaguuuac

SEQ ID NO: 355949 - RNA, 19 nt, Artificial Sequence
  Description of Artificial Sequence: Synthetic oligonucleotide
cacaaccugggaaagcugg

SEQ ID NO: 355950 - RNA, 19 nt, Artificial Sequence
  Description of Artificial Sequence: Synthetic oligonucleotide
acaauauuacugcccgggg

SEQ ID NO: 355951 - RNA, 19 nt, Artificial Sequence
  Description of Artificial Sequence: Synthetic oligonucleotide
aauguucaugucgucacug

SEQ ID NO: 355952 - RNA, 19 nt, Artificial Sequence
  Description of Artificial Sequence: Synthetic oligonucleotide
uuacugagaucuuuccgcc

SEQ ID NO: 355953 - RNA, 19 nt, Artificial Sequence
  Description of Artificial Sequence: Synthetic oligonucleotide
uguagcauucuacaguguu

SEQ ID NO: 355954 - RNA, 19 nt, Artificial Sequence
  Description of Artificial Sequence: Synthetic oligonucleotide
gaauggcuauuuaaguagg

SEQ ID NO: 355955 - RNA, 19 nt, Artificial Sequence
  Description of Artificial Sequence: Synthetic oligonucleotide
guguccauuuauuagugug

SEQ ID NO: 355956 - RNA, 19 nt, Artificial Sequence
  Description of Artificial Sequence: Synthetic oligonucleotide
uccacuggcgagcuugagg

SEQ ID NO: 355957 - RNA, 19 nt, Artificial Sequence
  Description of Artificial Sequence: Synthetic oligonucleotide
auacuaguuagguggaaga

SEQ ID NO: 355958 - RNA, 19 nt, Artificial Sequence
  Description of Artificial Sequence: Synthetic oligonucleotide
caaaauuccacuggcgagc

SEQ ID NO: 355959 - RNA, 19 nt, Artificial Sequence
  Description of Artificial Sequence: Synthetic oligonucleotide
uuguaguauaaaagaaauc

SEQ ID NO: 355960 - RNA, 19 nt, Artificial Sequence
  Description of Artificial Sequence: Synthetic oligonucleotide
aaguauggaagcucauuau

SEQ ID NO: 355961 - RNA, 19 nt, Artificial Sequence
  Description of Artificial Sequence: Synthetic oligonucleotide
caacagucgacuuccgagg

SEQ ID NO: 355962 - RNA, 19 nt, Artificial Sequence
  Description of Artificial Sequence: Synthetic oligonucleotide
uuaguacugccacaccuac

SEQ ID NO: 355963 - RNA, 19 nt, Artificial Sequence
  Description of Artificial Sequence: Synthetic oligonucleotide
augcguacugaauuaagga

SEQ ID NO: 355964 - RNA, 19 nt, Artificial Sequence
  Description of Artificial Sequence: Synthetic oligonucleotide
acaauagguucuuaacaca

SEQ ID NO: 355965 - RNA, 19 nt, Artificial Sequence
  Description of Artificial Sequence: Synthetic oligonucleotide
acaugggaccuuccaauac

SEQ ID NO: 355966 - RNA, 19 nt, Artificial Sequence
  Description of Artificial Sequence: Synthetic oligonucleotide
agguagccuaauauaagcc

SEQ ID NO: 355967 - RNA, 19 nt, Artificial Sequence
  Description of Artificial Sequence: Synthetic oligonucleotide
gucaaguuggaugugggag

SEQ ID NO: 355968 - RNA, 19 nt, Artificial Sequence
  Description of Artificial Sequence: Synthetic oligonucleotide
ugagacuauuaacauucac

SEQ ID NO: 355969 - RNA, 19 nt, Artificial Sequence
  Description of Artificial Sequence: Synthetic oligonucleotide
auaguauuuguuuucucua

SEQ ID NO: 355970 - RNA, 19 nt, Artificial Sequence
  Description of Artificial Sequence: Synthetic oligonucleotide
guaauaacucuggacaaug

SEQ ID NO: 355971 - RNA, 19 nt, Artificial Sequence
  Description of Artificial Sequence: Synthetic oligonucleotide
ccagguuuuaguuuugggg

SEQ ID NO: 355972 - RNA, 19 nt, Artificial Sequence
  Description of Artificial Sequence: Synthetic oligonucleotide
uuccacuuaguacugccac

SEQ ID NO: 355973 - RNA, 19 nt, Artificial Sequence
  Description of Artificial Sequence: Synthetic oligonucleotide
cucauuaugacaaacuuau

SEQ ID NO: 355974 - RNA, 19 nt, Artificial Sequence
  Description of Artificial Sequence: Synthetic oligonucleotide
auuaagcauaacacuguac

SEQ ID NO: 355975 - RNA, 19 nt, Artificial Sequence
  Description of Artificial Sequence: Synthetic oligonucleotide
ugcaucucugcuaaugcuc

SEQ ID NO: 355976 - RNA, 19 nt, Artificial Sequence
  Description of Artificial Sequence: Synthetic oligonucleotide
cauauuugugcggagauca

SEQ ID NO: 355977 - RNA, 19 nt, Artificial Sequence
  Description of Artificial Sequence: Synthetic oligonucleotide
cuauuuaaguaggaccuag

SEQ ID NO: 355978 - RNA, 19 nt, Artificial Sequence
  Description of Artificial Sequence: Synthetic oligonucleotide
auuucagucauagccuauc

SEQ ID NO: 355979 - RNA, 19 nt, Artificial Sequence
  Description of Artificial Sequence: Synthetic oligonucleotide
aguuucugacauucuaugu

SEQ ID NO: 355980 - RNA, 19 nt, Artificial Sequence
  Description of Artificial Sequence: Synthetic oligonucleotide
ucccgcuuuaauuucaguc

SEQ ID NO: 355981 - RNA, 19 nt, Artificial Sequence
  Description of Artificial Sequence: Synthetic oligonucleotide
uagagauccuaucaaguuu

SEQ ID NO: 355982 - RNA, 19 nt, Artificial Sequence
  Description of Artificial Sequence: Synthetic oligonucleotide
ugggucgucucucagguaa

SEQ ID NO: 355983 - RNA, 19 nt, Artificial Sequence
  Description of Artificial Sequence: Synthetic oligonucleotide
ugagagagcggacuuuagu

SEQ ID NO: 355984 - RNA, 19 nt, Artificial Sequence
  Description of Artificial Sequence: Synthetic oligonucleotide
acgguguccauuuauuagu

SEQ ID NO: 355985 - RNA, 19 nt, Artificial Sequence
  Description of Artificial Sequence: Synthetic oligonucleotide
uacaacaugcuuccacaac

SEQ ID NO: 355986 - RNA, 19 nt, Artificial Sequence
  Description of Artificial Sequence: Synthetic oligonucleotide
ucuuuuaguuccagccggc

SEQ ID NO: 355987 - RNA, 19 nt, Artificial Sequence
  Description of Artificial Sequence: Synthetic oligonucleotide
auguuugcuacaggagucc

SEQ ID NO: 355988 - RNA, 19 nt, Artificial Sequence
  Description of Artificial Sequence: Synthetic oligonucleotide
aaccacguacaguuuguca

SEQ ID NO: 355989 - RNA, 19 nt, Artificial Sequence
  Description of Artificial Sequence: Synthetic oligonucleotide
cacgguguccauuuauuag

SEQ ID NO: 355990 - RNA, 19 nt, Artificial Sequence
  Description of Artificial Sequence: Synthetic oligonucleotide
gggaccuuccaauacagcc

SEQ ID NO: 355991 - RNA, 19 nt, Artificial Sequence
  Description of Artificial Sequence: Synthetic oligonucleotide
auagagucuauaguauuug

SEQ ID NO: 355992 - RNA, 19 nt, Artificial Sequence
  Description of Artificial Sequence: Synthetic oligonucleotide
aggaccuagagauccuauc

SEQ ID NO: 355993 - RNA, 19 nt, Artificial Sequence
  Description of Artificial Sequence: Synthetic oligonucleotide
uaacacugcaacaccgaac

SEQ ID NO: 355994 - RNA, 19 nt, Artificial Sequence
  Description of Artificial Sequence: Synthetic oligonucleotide
auacaugggaccuuccaau

SEQ ID NO: 355995 - RNA, 19 nt, Artificial Sequence
  Description of Artificial Sequence: Synthetic oligonucleotide
aacagucgacuuccgaggu

SEQ ID NO: 355996 - RNA, 19 nt, Artificial Sequence
  Description of Artificial Sequence: Synthetic oligonucleotide
cacaaugggucaaaaugug

SEQ ID NO: 355997 - RNA, 19 nt, Artificial Sequence
  Description of Artificial Sequence: Synthetic oligonucleotide
aauuggauggguggagcug

SEQ ID NO: 355998 - RNA, 19 nt, Artificial Sequence
  Description of Artificial Sequence: Synthetic oligonucleotide
auggaagcucauuaugaca

SEQ ID NO: 355999 - RNA, 19 nt, Artificial Sequence
  Description of Artificial Sequence: Synthetic oligonucleotide
acacaaugggucaaaaugu

SEQ ID NO: 356000 - RNA, 19 nt, Artificial Sequence
  Description of Artificial Sequence: Synthetic oligonucleotide
caucuaacacugcaacacc

SEQ ID NO: 356001 - RNA, 19 nt, Artificial Sequence
  Description of Artificial Sequence: Synthetic oligonucleotide
auaguauaauugugggcca

SEQ ID NO: 356002 - RNA, 19 nt, Artificial Sequence
  Description of Artificial Sequence: Synthetic oligonucleotide
uuagguggaagaacauuau

SEQ ID NO: 356003 - RNA, 19 nt, Artificial Sequence
  Description of Artificial Sequence: Synthetic oligonucleotide
uucagucauagccuaucac

SEQ ID NO: 356004 - RNA, 19 nt, Artificial Sequence
  Description of Artificial Sequence: Synthetic oligonucleotide
uuuauuuggucagucuuau

SEQ ID NO: 356005 - RNA, 19 nt, Artificial Sequence
  Description of Artificial Sequence: Synthetic oligonucleotide
aacaugggucgucucucag

SEQ ID NO: 356006 - RNA, 19 nt, Artificial Sequence
  Description of Artificial Sequence: Synthetic oligonucleotide
uucuacugacuugagacaa

SEQ ID NO: 356007 - RNA, 19 nt, Artificial Sequence
  Description of Artificial Sequence: Synthetic oligonucleotide
guggaucuagaugggaugg

SEQ ID NO: 356008 - RNA, 19 nt, Artificial Sequence
  Description of Artificial Sequence: Synthetic oligonucleotide
uccacaaccugggaaagcu

SEQ ID NO: 356009 - RNA, 19 nt, Artificial Sequence
  Description of Artificial Sequence: Synthetic oligonucleotide
agcaucccgcuuuaauuuc

SEQ ID NO: 356010 - RNA, 19 nt, Artificial Sequence
  Description of Artificial Sequence: Synthetic oligonucleotide
aaaauuccacuggcgagcu

SEQ ID NO: 356011 - RNA, 19 nt, Artificial Sequence
  Description of Artificial Sequence: Synthetic oligonucleotide
gaucuuuccgccucugcuc

SEQ ID NO: 356012 - RNA, 19 nt, Artificial Sequence
  Description of Artificial Sequence: Synthetic oligonucleotide
uuaguauugucuccucauu

SEQ ID NO: 356013 - RNA, 19 nt, Artificial Sequence
  Description of Artificial Sequence: Synthetic oligonucleotide
gaccuuccaauacagccac

SEQ ID NO: 356014 - RNA, 19 nt, Artificial Sequence
  Description of Artificial Sequence: Synthetic oligonucleotide
cuccaaaucgugccggacc

SEQ ID NO: 356015 - RNA, 19 nt, Artificial Sequence
  Description of Artificial Sequence: Synthetic oligonucleotide
aaauagugguuugauuaaa

SEQ ID NO: 356016 - RNA, 19 nt, Artificial Sequence
  Description of Artificial Sequence: Synthetic oligonucleotide
agggcauuuaguauugucu

SEQ ID NO: 356017 - RNA, 19 nt, Artificial Sequence
  Description of Artificial Sequence: Synthetic oligonucleotide
auuucauuggcugggagua

SEQ ID NO: 356018 - RNA, 19 nt, Artificial Sequence
  Description of Artificial Sequence: Synthetic oligonucleotide
guauggaagcucauuauga

SEQ ID NO: 356019 - RNA, 19 nt, Artificial Sequence
  Description of Artificial Sequence: Synthetic oligonucleotide
agaacgaauuccaaggcaa

SEQ ID NO: 356020 - RNA, 19 nt, Artificial Sequence
  Description of Artificial Sequence: Synthetic oligonucleotide
acauaguggcaacaaaauu

SEQ ID NO: 356021 - RNA, 19 nt, Artificial Sequence
  Description of Artificial Sequence: Synthetic oligonucleotide
ugauuacaaaggagcacaa

SEQ ID NO: 356022 - RNA, 19 nt, Artificial Sequence
  Description of Artificial Sequence: Synthetic oligonucleotide
acauucuaugucaucccgg

SEQ ID NO: 356023 - RNA, 19 nt, Artificial Sequence
  Description of Artificial Sequence: Synthetic oligonucleotide
ggaauguucaugucgucac

SEQ ID NO: 356024 - RNA, 19 nt, Artificial Sequence
  Description of Artificial Sequence: Synthetic oligonucleotide
caaagucuucaguccgucg

SEQ ID NO: 356025 - RNA, 19 nt, Artificial Sequence
  Description of Artificial Sequence: Synthetic oligonucleotide
ugucccaacagucgacuuc

SEQ ID NO: 356026 - RNA, 19 nt, Artificial Sequence
  Description of Artificial Sequence: Synthetic oligonucleotide
ugugaggaucaaagcauuc

SEQ ID NO: 356027 - RNA, 19 nt, Artificial Sequence
  Description of Artificial Sequence: Synthetic oligonucleotide
uucucaaugcuuguugcuc

SEQ ID NO: 356028 - RNA, 19 nt, Artificial Sequence
  Description of Artificial Sequence: Synthetic oligonucleotide
uugugcggagaucauacuu

SEQ ID NO: 356029 - RNA, 19 nt, Artificial Sequence
  Description of Artificial Sequence: Synthetic oligonucleotide
gcauaucuuaauguaaagc

SEQ ID NO: 356030 - RNA, 19 nt, Artificial Sequence
  Description of Artificial Sequence: Synthetic oligonucleotide
ccacuggcgagcuugaggg

SEQ ID NO: 356031 - RNA, 19 nt, Artificial Sequence
  Description of Artificial Sequence: Synthetic oligonucleotide
cauucuaugucaucccgga

SEQ ID NO: 356032 - RNA, 19 nt, Artificial Sequence
  Description of Artificial Sequence: Synthetic oligonucleotide
gagaaggcaugcuguagac

SEQ ID NO: 356033 - RNA, 19 nt, Artificial Sequence
  Description of Artificial Sequence: Synthetic oligonucleotide
cauaaacuugcauaucuua

SEQ ID NO: 356034 - RNA, 19 nt, Artificial Sequence
  Description of Artificial Sequence: Synthetic oligonucleotide
uacuuugagagagcggacu

SEQ ID NO: 356035 - RNA, 19 nt, Artificial Sequence
  Description of Artificial Sequence: Synthetic oligonucleotide
uggccaagagcuuugcaau

SEQ ID NO: 356036 - RNA, 19 nt, Artificial Sequence
  Description of Artificial Sequence: Synthetic oligonucleotide
aggacucuguaacaugggu

SEQ ID NO: 356037 - RNA, 19 nt, Artificial Sequence
  Description of Artificial Sequence: Synthetic oligonucleotide
guuagguggaagaacauua

SEQ ID NO: 356038 - RNA, 19 nt, Artificial Sequence
  Description of Artificial Sequence: Synthetic oligonucleotide
agagguagccuaauauaag

SEQ ID NO: 356039 - RNA, 19 nt, Artificial Sequence
  Description of Artificial Sequence: Synthetic oligonucleotide
gguagccuaauauaagcca

SEQ ID NO: 356040 - RNA, 19 nt, Artificial Sequence
  Description of Artificial Sequence: Synthetic oligonucleotide
guucagguaggucugucca

SEQ ID NO: 356041 - RNA, 19 nt, Artificial Sequence
  Description of Artificial Sequence: Synthetic oligonucleotide
aucgcgaccaccaacugca

SEQ ID NO: 356042 - RNA, 19 nt, Artificial Sequence
  Description of Artificial Sequence: Synthetic oligonucleotide
guagacagcaggcacucga

SEQ ID NO: 356043 - RNA, 19 nt, Artificial Sequence
  Description of Artificial Sequence: Synthetic oligonucleotide
ucgucucucagguaauaaa

SEQ ID NO: 356044 - RNA, 19 nt, Artificial Sequence
  Description of Artificial Sequence: Synthetic oligonucleotide
agcaguccguuccauguug

SEQ ID NO: 356045 - RNA, 19 nt, Artificial Sequence
  Description of Artificial Sequence: Synthetic oligonucleotide
aucagcaaaagaacgaauu

SEQ ID NO: 356046 - RNA, 19 nt, Artificial Sequence
  Description of Artificial Sequence: Synthetic oligonucleotide
uugagagagcggacuuuag

SEQ ID NO: 356047 - RNA, 19 nt, Artificial Sequence
  Description of Artificial Sequence: Synthetic oligonucleotide
auuaaggaccacaacgaau

SEQ ID NO: 356048 - RNA, 19 nt, Artificial Sequence
  Description of Artificial Sequence: Synthetic oligonucleotide
uguaugcguacugaauuaa

SEQ ID NO: 356049 - RNA, 19 nt, Artificial Sequence
  Description of Artificial Sequence: Synthetic oligonucleotide
uagccuaauauaagccaaa

SEQ ID NO: 356050 - RNA, 19 nt, Artificial Sequence
  Description of Artificial Sequence: Synthetic oligonucleotide
ccaacagucgacuuccgag

SEQ ID NO: 356051 - RNA, 19 nt, Artificial Sequence
  Description of Artificial Sequence: Synthetic oligonucleotide
ccggacccaaguaagaagg

SEQ ID NO: 356052 - RNA, 19 nt, Artificial Sequence
  Description of Artificial Sequence: Synthetic oligonucleotide
aggaauguucaugucguca

SEQ ID NO: 356053 - RNA, 19 nt, Artificial Sequence
  Description of Artificial Sequence: Synthetic oligonucleotide
cuuccuaggcacaguggag

SEQ ID NO: 356054 - RNA, 19 nt, Artificial Sequence
  Description of Artificial Sequence: Synthetic oligonucleotide
guuggaugugggagcaucg

SEQ ID NO: 356055 - RNA, 19 nt, Artificial Sequence
  Description of Artificial Sequence: Synthetic oligonucleotide
agucaaguuggauguggga

SEQ ID NO: 356056 - RNA, 19 nt, Artificial Sequence
  Description of Artificial Sequence: Synthetic oligonucleotide
uaggcggcaucacacucca

SEQ ID NO: 356057 - RNA, 19 nt, Artificial Sequence
  Description of Artificial Sequence: Synthetic oligonucleotide
cucuuccuaggcacagugg

SEQ ID NO: 356058 - RNA, 19 nt, Artificial Sequence
  Description of Artificial Sequence: Synthetic oligonucleotide
cacaacuagagcauauuua

SEQ ID NO: 356059 - RNA, 19 nt, Artificial Sequence
  Description of Artificial Sequence: Synthetic oligonucleotide
gcguacugaauuaaggacc

SEQ ID NO: 356060 - RNA, 19 nt, Artificial Sequence
  Description of Artificial Sequence: Synthetic oligonucleotide
augcaaaucagugcagccu

SEQ ID NO: 356061 - RNA, 19 nt, Artificial Sequence
  Description of Artificial Sequence: Synthetic oligonucleotide
caauacagccacaccaaga

SEQ ID NO: 356062 - RNA, 19 nt, Artificial Sequence
  Description of Artificial Sequence: Synthetic oligonucleotide
uacuaguuagguggaagaa

SEQ ID NO: 356063 - RNA, 19 nt, Artificial Sequence
  Description of Artificial Sequence: Synthetic oligonucleotide
aacucccaucgcgaccacc

SEQ ID NO: 356064 - RNA, 19 nt, Artificial Sequence
  Description of Artificial Sequence: Synthetic oligonucleotide
cuccaauagcauacagcag

SEQ ID NO: 356065 - RNA, 19 nt, Artificial Sequence
  Description of Artificial Sequence: Synthetic oligonucleotide
guaugcguacugaauuaag

SEQ ID NO: 356066 - RNA, 19 nt, Artificial Sequence
  Description of Artificial Sequence: Synthetic oligonucleotide
acaagaacucccaucgcga

SEQ ID NO: 356067 - RNA, 19 nt, Artificial Sequence
  Description of Artificial Sequence: Synthetic oligonucleotide
gccuaauauaagccaaaag

SEQ ID NO: 356068 - RNA, 19 nt, Artificial Sequence
  Description of Artificial Sequence: Synthetic oligonucleotide
aacgaauuccaaggcaauu

SEQ ID NO: 356069 - RNA, 19 nt, Artificial Sequence
  Description of Artificial Sequence: Synthetic oligonucleotide
aucgcuccacuguauucag

SEQ ID NO: 356070 - RNA, 19 nt, Artificial Sequence
  Description of Artificial Sequence: Synthetic oligonucleotide
ucgacuuccgagguuuugu

SEQ ID NO: 356071 - RNA, 19 nt, Artificial Sequence
  Description of Artificial Sequence: Synthetic oligonucleotide
acaacgaauucggcucuac

SEQ ID NO: 356072 - RNA, 19 nt, Artificial Sequence
  Description of Artificial Sequence: Synthetic oligonucleotide
caucgcgaccaccaacugc

SEQ ID NO: 356073 - RNA, 19 nt, Artificial Sequence
  Description of Artificial Sequence: Synthetic oligonucleotide
ucuuaacacaaugggucaa

SEQ ID NO: 356074 - RNA, 19 nt, Artificial Sequence
  Description of Artificial Sequence: Synthetic oligonucleotide
cuuuuaguuccagccggcc

SEQ ID NO: 356075 - RNA, 19 nt, Artificial Sequence
  Description of Artificial Sequence: Synthetic oligonucleotide
ccauaguauaauugugggc

SEQ ID NO: 356076 - RNA, 19 nt, Artificial Sequence
  Description of Artificial Sequence: Synthetic oligonucleotide
uacaugggaccuuccaaua

SEQ ID NO: 356077 - RNA, 19 nt, Artificial Sequence
  Description of Artificial Sequence: Synthetic oligonucleotide
auagccuaucacacaguuc

SEQ ID NO: 356078 - RNA, 19 nt, Artificial Sequence
  Description of Artificial Sequence: Synthetic oligonucleotide
ggaccuagagauccuauca

SEQ ID NO: 356079 - RNA, 19 nt, Artificial Sequence
  Description of Artificial Sequence: Synthetic oligonucleotide
uccgucgcgcccuccaacc

SEQ ID NO: 356080 - RNA, 19 nt, Artificial Sequence
  Description of Artificial Sequence: Synthetic oligonucleotide
aaauacuaguuagguggaa

SEQ ID NO: 356081 - RNA, 19 nt, Artificial Sequence
  Description of Artificial Sequence: Synthetic oligonucleotide
agcaucguguccuccaaua

SEQ ID NO: 356082 - RNA, 19 nt, Artificial Sequence
  Description of Artificial Sequence: Synthetic oligonucleotide
uaguggcaacaaaauucca

SEQ ID NO: 356083 - RNA, 19 nt, Artificial Sequence
  Description of Artificial Sequence: Synthetic oligonucleotide
gucaccaaguaaacagacc

SEQ ID NO: 356084 - RNA, 19 nt, Artificial Sequence
  Description of Artificial Sequence: Synthetic oligonucleotide
agcauacagcaguccguuc

SEQ ID NO: 356085 - RNA, 19 nt, Artificial Sequence
  Description of Artificial Sequence: Synthetic oligonucleotide
auagcauacagcaguccgu

SEQ ID NO: 356086 - RNA, 19 nt, Artificial Sequence
  Description of Artificial Sequence: Synthetic oligonucleotide
guagccuaauauaagccaa

SEQ ID NO: 356087 - RNA, 19 nt, Artificial Sequence
  Description of Artificial Sequence: Synthetic oligonucleotide
ugggaccuuccaauacagc

SEQ ID NO: 356088 - RNA, 19 nt, Artificial Sequence
  Description of Artificial Sequence: Synthetic oligonucleotide
uguuugcuacaggagucca

SEQ ID NO: 356089 - RNA, 19 nt, Artificial Sequence
  Description of Artificial Sequence: Synthetic oligonucleotide
cauaggcggcaucacacuc

SEQ ID NO: 356090 - RNA, 19 nt, Artificial Sequence
  Description of Artificial Sequence: Synthetic oligonucleotide
uaguuagguggaagaacau

SEQ ID NO: 356091 - RNA, 19 nt, Artificial Sequence
  Description of Artificial Sequence: Synthetic oligonucleotide
caauagcauacagcagucc

SEQ ID NO: 356092 - RNA, 19 nt, Artificial Sequence
  Description of Artificial Sequence: Synthetic oligonucleotide
gcggagaucauacuucuca

SEQ ID NO: 356093 - RNA, 19 nt, Artificial Sequence
  Description of Artificial Sequence: Synthetic oligonucleotide
caucccgcuuuaauuucag

SEQ ID NO: 356094 - RNA, 19 nt, Artificial Sequence
  Description of Artificial Sequence: Synthetic oligonucleotide
ucgugccggacccaaguaa

SEQ ID NO: 356095 - RNA, 19 nt, Artificial Sequence
  Description of Artificial Sequence: Synthetic oligonucleotide
gguggagcuguuucauuag

SEQ ID NO: 356096 - RNA, 19 nt, Artificial Sequence
  Description of Artificial Sequence: Synthetic oligonucleotide
acaaugggucaaaauguga

SEQ ID NO: 356097 - RNA, 19 nt, Artificial Sequence
  Description of Artificial Sequence: Synthetic oligonucleotide
cuuaguacugccacaccua

SEQ ID NO: 356098 - RNA, 19 nt, Artificial Sequence
  Description of Artificial Sequence: Synthetic oligonucleotide
guaguauuuuggaaguuua

SEQ ID NO: 356099 - RNA, 19 nt, Artificial Sequence
  Description of Artificial Sequence: Synthetic oligonucleotide
cuaaugcucauggaugcca

SEQ ID NO: 356100 - RNA, 19 nt, Artificial Sequence
  Description of Artificial Sequence: Synthetic oligonucleotide
uugggguuguagcauucua

SEQ ID NO: 356101 - RNA, 19 nt, Artificial Sequence
  Description of Artificial Sequence: Synthetic oligonucleotide
acaccgaacugcagccucc

SEQ ID NO: 356102 - RNA, 19 nt, Artificial Sequence
  Description of Artificial Sequence: Synthetic oligonucleotide
guaacaugggucgucucuc

SEQ ID NO: 356103 - RNA, 19 nt, Artificial Sequence
  Description of Artificial Sequence: Synthetic oligonucleotide
aguuagguggaagaacauu

SEQ ID NO: 356104 - RNA, 19 nt, Artificial Sequence
  Description of Artificial Sequence: Synthetic oligonucleotide
uccugguuucugaucacuu

SEQ ID NO: 356105 - RNA, 19 nt, Artificial Sequence
  Description of Artificial Sequence: Synthetic oligonucleotide
acaaugugaaugagaacaa

SEQ ID NO: 356106 - RNA, 19 nt, Artificial Sequence
  Description of Artificial Sequence: Synthetic oligonucleotide
acacgguguccauuuauua

SEQ ID NO: 356107 - RNA, 19 nt, Artificial Sequence
  Description of Artificial Sequence: Synthetic oligonucleotide
gacauaguggcaacaaaau

SEQ ID NO: 356108 - RNA, 19 nt, Artificial Sequence
  Description of Artificial Sequence: Synthetic oligonucleotide
ucccaucgcgaccaccaac

SEQ ID NO: 356109 - RNA, 19 nt, Artificial Sequence
  Description of Artificial Sequence: Synthetic oligonucleotide
ggagagguagccuaauaua

SEQ ID NO: 356110 - RNA, 19 nt, Artificial Sequence
  Description of Artificial Sequence: Synthetic oligonucleotide
uaggucuguccaucguaac

SEQ ID NO: 356111 - RNA, 19 nt, Artificial Sequence
  Description of Artificial Sequence: Synthetic oligonucleotide
ggcuauuuaaguaggaccu

SEQ ID NO: 356112 - RNA, 19 nt, Artificial Sequence
  Description of Artificial Sequence: Synthetic oligonucleotide
cuccuacugcauacauggg

SEQ ID NO: 356113 - RNA, 19 nt, Artificial Sequence
  Description of Artificial Sequence: Synthetic oligonucleotide
aaguaguauuuuggaaguu

SEQ ID NO: 356114 - RNA, 19 nt, Artificial Sequence
  Description of Artificial Sequence: Synthetic oligonucleotide
agguuuuguccgaggacuc

SEQ ID NO: 356115 - RNA, 19 nt, Artificial Sequence
  Description of Artificial Sequence: Synthetic oligonucleotide
gguuuuaguuuugggguug

SEQ ID NO: 356116 - RNA, 19 nt, Artificial Sequence
  Description of Artificial Sequence: Synthetic oligonucleotide
uagcauacagcaguccguu

SEQ ID NO: 356117 - RNA, 19 nt, Artificial Sequence
  Description of Artificial Sequence: Synthetic oligonucleotide
ggacauaguggcaacaaaa

SEQ ID NO: 356118 - RNA, 19 nt, Artificial Sequence
  Description of Artificial Sequence: Synthetic oligonucleotide
guguaugcguacugaauua

SEQ ID NO: 356119 - RNA, 19 nt, Artificial Sequence
  Description of Artificial Sequence: Synthetic oligonucleotide
aaaucgugccggacccaag

SEQ ID NO: 356120 - RNA, 19 nt, Artificial Sequence
  Description of Artificial Sequence: Synthetic oligonucleotide
acauaaacuugcauaucuu

SEQ ID NO: 356121 - RNA, 19 nt, Artificial Sequence
  Description of Artificial Sequence: Synthetic oligonucleotide
agagcauauuuaauaucau

SEQ ID NO: 356122 - RNA, 19 nt, Artificial Sequence
  Description of Artificial Sequence: Synthetic oligonucleotide
agcggacuuuaguuuacau

SEQ ID NO: 356123 - RNA, 19 nt, Artificial Sequence
  Description of Artificial Sequence: Synthetic oligonucleotide
gcggacuuuaguuuacauc

SEQ ID NO: 356124 - RNA, 19 nt, Artificial Sequence
  Description of Artificial Sequence: Synthetic oligonucleotide
uccuacgccaccucuccuu

SEQ ID NO: 356125 - RNA, 19 nt, Artificial Sequence
  Description of Artificial Sequence: Synthetic oligonucleotide
uggaucuagaugggaugga

SEQ ID NO: 356126 - RNA, 19 nt, Artificial Sequence
  Description of Artificial Sequence: Synthetic oligonucleotide
cccgcuuuaauuucaguca

SEQ ID NO: 356127 - RNA, 19 nt, Artificial Sequence
  Description of Artificial Sequence: Synthetic oligonucleotide
agccuaauauaagccaaaa

SEQ ID NO: 356128 - RNA, 19 nt, Artificial Sequence
  Description of Artificial Sequence: Synthetic oligonucleotide
gucuucaguccgucgcgcc

SEQ ID NO: 356129 - RNA, 19 nt, Artificial Sequence
  Description of Artificial Sequence: Synthetic oligonucleotide
guggcgcaaggagagguag

SEQ ID NO: 356130 - RNA, 19 nt, Artificial Sequence
  Description of Artificial Sequence: Synthetic oligonucleotide
uacugcccggggcauuuac

SEQ ID NO: 356131 - RNA, 19 nt, Artificial Sequence
  Description of Artificial Sequence: Synthetic oligonucleotide
ucggcucuacaccuuccau

SEQ ID NO: 356132 - RNA, 19 nt, Artificial Sequence
  Description of Artificial Sequence: Synthetic oligonucleotide
ucccggaaaagugcauugu

SEQ ID NO: 356133 - RNA, 19 nt, Artificial Sequence
  Description of Artificial Sequence: Synthetic oligonucleotide
uuaguuccagccggccugu

SEQ ID NO: 356134 - RNA, 19 nt, Artificial Sequence
  Description of Artificial Sequence: Synthetic oligonucleotide
aggcacucgauguuaucuu

SEQ ID NO: 356135 - RNA, 19 nt, Artificial Sequence
  Description of Artificial Sequence: Synthetic oligonucleotide
uccguggaucuagauggga

SEQ ID NO: 356136 - RNA, 19 nt, Artificial Sequence
  Description of Artificial Sequence: Synthetic oligonucleotide
gcccggggcauuuacaaac

SEQ ID NO: 356137 - RNA, 19 nt, Artificial Sequence
  Description of Artificial Sequence: Synthetic oligonucleotide
caaguuggaugugggagca

SEQ ID NO: 356138 - RNA, 19 nt, Artificial Sequence
  Description of Artificial Sequence: Synthetic oligonucleotide
ugccggacccaaguaagaa

SEQ ID NO: 356139 - RNA, 19 nt, Artificial Sequence
  Description of Artificial Sequence: Synthetic oligonucleotide
ggacccaaguaagaagggc

SEQ ID NO: 356140 - RNA, 19 nt, Artificial Sequence
  Description of Artificial Sequence: Synthetic oligonucleotide
cugagacuauuaacauuca

SEQ ID NO: 356141 - RNA, 19 nt, Artificial Sequence
  Description of Artificial Sequence: Synthetic oligonucleotide
gccggacccaaguaagaag

SEQ ID NO: 356142 - RNA, 19 nt, Artificial Sequence
  Description of Artificial Sequence: Synthetic oligonucleotide
guaggucuguccaucguaa

SEQ ID NO: 356143 - RNA, 19 nt, Artificial Sequence
  Description of Artificial Sequence: Synthetic oligonucleotide
ugcggagaucauacuucuc

SEQ ID NO: 356144 - RNA, 19 nt, Artificial Sequence
  Description of Artificial Sequence: Synthetic oligonucleotide
caugggucgucucucaggu

SEQ ID NO: 356145 - RNA, 19 nt, Artificial Sequence
  Description of Artificial Sequence: Synthetic oligonucleotide
guuugcuacaggaguccac

SEQ ID NO: 356146 - RNA, 19 nt, Artificial Sequence
  Description of Artificial Sequence: Synthetic oligonucleotide
ggcgcaaggagagguagcc

SEQ ID NO: 356147 - RNA, 19 nt, Artificial Sequence
  Description of Artificial Sequence: Synthetic oligonucleotide
uuccgagguuuuguccgag

SEQ ID NO: 356148 - RNA, 19 nt, Artificial Sequence
  Description of Artificial Sequence: Synthetic oligonucleotide
cacuauguucagguagguc

SEQ ID NO: 356149 - RNA, 19 nt, Artificial Sequence
  Description of Artificial Sequence: Synthetic oligonucleotide
ggaaguuuauauguuugua

SEQ ID NO: 356150 - RNA, 19 nt, Artificial Sequence
  Description of Artificial Sequence: Synthetic oligonucleotide
caacgaauucggcucuaca

SEQ ID NO: 356151 - RNA, 19 nt, Artificial Sequence
  Description of Artificial Sequence: Synthetic oligonucleotide
gguucuuaacacaaugggu

SEQ ID NO: 356152 - RNA, 19 nt, Artificial Sequence
  Description of Artificial Sequence: Synthetic oligonucleotide
ggacaaugugaaugagaac

SEQ ID NO: 356153 - RNA, 19 nt, Artificial Sequence
  Description of Artificial Sequence: Synthetic oligonucleotide
auuacugcccggggcauuu

SEQ ID NO: 356154 - RNA, 19 nt, Artificial Sequence
  Description of Artificial Sequence: Synthetic oligonucleotide
agcauucuacugacuugag

SEQ ID NO: 356155 - RNA, 19 nt, Artificial Sequence
  Description of Artificial Sequence: Synthetic oligonucleotide
ggcacucgauguuaucuuc

SEQ ID NO: 356156 - RNA, 19 nt, Artificial Sequence
  Description of Artificial Sequence: Synthetic oligonucleotide
ccacuuaguacugccacac

SEQ ID NO: 356157 - RNA, 19 nt, Artificial Sequence
  Description of Artificial Sequence: Synthetic oligonucleotide
cguacugaauuaaggacca

SEQ ID NO: 356158 - RNA, 19 nt, Artificial Sequence
  Description of Artificial Sequence: Synthetic oligonucleotide
gcgcccuccaaccacguac

SEQ ID NO: 356159 - RNA, 19 nt, Artificial Sequence
  Description of Artificial Sequence: Synthetic oligonucleotide
uggguccauucauuuguuu

SEQ ID NO: 356160 - RNA, 19 nt, Artificial Sequence
  Description of Artificial Sequence: Synthetic oligonucleotide
guggacauaguggcaacaa

SEQ ID NO: 356161 - RNA, 19 nt, Artificial Sequence
  Description of Artificial Sequence: Synthetic oligonucleotide
gaucuagaugggauggaau

SEQ ID NO: 356162 - RNA, 19 nt, Artificial Sequence
  Description of Artificial Sequence: Synthetic oligonucleotide
cuguaacaugggucgucuc

SEQ ID NO: 356163 - RNA, 19 nt, Artificial Sequence
  Description of Artificial Sequence: Synthetic oligonucleotide
cguggaucuagaugggaug

SEQ ID NO: 356164 - RNA, 19 nt, Artificial Sequence
  Description of Artificial Sequence: Synthetic oligonucleotide
auauuacugcccggggcau

SEQ ID NO: 356165 - RNA, 19 nt, Artificial Sequence
  Description of Artificial Sequence: Synthetic oligonucleotide
cugcccggggcauuuacaa

SEQ ID NO: 356166 - RNA, 19 nt, Artificial Sequence
  Description of Artificial Sequence: Synthetic oligonucleotide
agccuaucacacaguucuc

SEQ ID NO: 356167 - RNA, 19 nt, Artificial Sequence
  Description of Artificial Sequence: Synthetic oligonucleotide
cuuccgagguuuuguccga

SEQ ID NO: 356168 - RNA, 19 nt, Artificial Sequence
  Description of Artificial Sequence: Synthetic oligonucleotide
ugcccggggcauuuacaaa

SEQ ID NO: 356169 - RNA, 19 nt, Artificial Sequence
  Description of Artificial Sequence: Synthetic oligonucleotide
acagucgacuuccgagguu

SEQ ID NO: 356170 - RNA, 19 nt, Artificial Sequence
  Description of Artificial Sequence: Synthetic oligonucleotide
ucccaucgcuccacuguau

SEQ ID NO: 356171 - RNA, 19 nt, Artificial Sequence
  Description of Artificial Sequence: Synthetic oligonucleotide
gugcggagaucauacuucu

SEQ ID NO: 356172 - RNA, 19 nt, Artificial Sequence
  Description of Artificial Sequence: Synthetic oligonucleotide
guccgaggacucuguaaca

SEQ ID NO: 356173 - RNA, 19 nt, Artificial Sequence
  Description of Artificial Sequence: Synthetic oligonucleotide
acucuguaacaugggucgu

SEQ ID NO: 356174 - RNA, 19 nt, Artificial Sequence
  Description of Artificial Sequence: Synthetic oligonucleotide
gucgacuuccgagguuuug

SEQ ID NO: 356175 - RNA, 19 nt, Artificial Sequence
  Description of Artificial Sequence: Synthetic oligonucleotide
gcaucucugcuaaugcuca

SEQ ID NO: 356176 - RNA, 19 nt, Artificial Sequence
  Description of Artificial Sequence: Synthetic oligonucleotide
gcuaaugcucauggaugcc

SEQ ID NO: 356177 - RNA, 19 nt, Artificial Sequence
  Description of Artificial Sequence: Synthetic oligonucleotide
gggcauuuacaaacaauaa

SEQ ID NO: 356178 - RNA, 19 nt, Artificial Sequence
  Description of Artificial Sequence: Synthetic oligonucleotide
ccacguacaguuugucauc

SEQ ID NO: 356179 - RNA, 19 nt, Artificial Sequence
  Description of Artificial Sequence: Synthetic oligonucleotide
cacaccuacugugcuccug

SEQ ID NO: 356180 - RNA, 19 nt, Artificial Sequence
  Description of Artificial Sequence: Synthetic oligonucleotide
cagccggccuguguaugcg

SEQ ID NO: 356181 - RNA, 19 nt, Artificial Sequence
  Description of Artificial Sequence: Synthetic oligonucleotide
caaaucgugccggacccaa

SEQ ID NO: 356182 - RNA, 19 nt, Artificial Sequence
  Description of Artificial Sequence: Synthetic oligonucleotide
cugcaucucugcuaaugcu

SEQ ID NO: 356183 - RNA, 19 nt, Artificial Sequence
  Description of Artificial Sequence: Synthetic oligonucleotide
ggaucuagaugggauggaa

SEQ ID NO: 356184 - RNA, 19 nt, Artificial Sequence
  Description of Artificial Sequence: Synthetic oligonucleotide
gagcggacuuuaguuuaca

SEQ ID NO: 356185 - RNA, 19 nt, Artificial Sequence
  Description of Artificial Sequence: Synthetic oligonucleotide
ggaugugggagcaucgugu

SEQ ID NO: 356186 - RNA, 19 nt, Artificial Sequence
  Description of Artificial Sequence: Synthetic oligonucleotide
gaacgaauuccaaggcaau

SEQ ID NO: 356187 - RNA, 19 nt, Artificial Sequence
  Description of Artificial Sequence: Synthetic oligonucleotide
ggucaaaaugugagacaac

SEQ ID NO: 356188 - RNA, 19 nt, Artificial Sequence
  Description of Artificial Sequence: Synthetic oligonucleotide
gucgucucucagguaauaa

SEQ ID NO: 356189 - RNA, 19 nt, Artificial Sequence
  Description of Artificial Sequence: Synthetic oligonucleotide
gucccaucgcuccacugua

SEQ ID NO: 356190 - RNA, 19 nt, Artificial Sequence
  Description of Artificial Sequence: Synthetic oligonucleotide
uucaguccgucgcgcccuc

SEQ ID NO: 356191 - RNA, 19 nt, Artificial Sequence
  Description of Artificial Sequence: Synthetic oligonucleotide
acugcccggggcauuuaca

SEQ ID NO: 356192 - RNA, 19 nt, Artificial Sequence
  Description of Artificial Sequence: Synthetic oligonucleotide
ccaucgcuccacuguauuc

SEQ ID NO: 356193 - RNA, 19 nt, Artificial Sequence
  Description of Artificial Sequence: Synthetic oligonucleotide
ccuggguccauucauuugu

SEQ ID NO: 356194 - RNA, 19 nt, Artificial Sequence
  Description of Artificial Sequence: Synthetic oligonucleotide
cgguguccauuuauuagug

SEQ ID NO: 356195 - RNA, 19 nt, Artificial Sequence
  Description of Artificial Sequence: Synthetic oligonucleotide
guaggaccuagagauccua

SEQ ID NO: 356196 - RNA, 19 nt, Artificial Sequence
  Description of Artificial Sequence: Synthetic oligonucleotide
guccgucgcgcccuccaac

SEQ ID NO: 356197 - RNA, 19 nt, Artificial Sequence
  Description of Artificial Sequence: Synthetic oligonucleotide
ccagccggccuguguaugc

SEQ ID NO: 356198 - RNA, 19 nt, Artificial Sequence
  Description of Artificial Sequence: Synthetic oligonucleotide
gguggacauaguggcaaca

SEQ ID NO: 356199 - RNA, 19 nt, Artificial Sequence
  Description of Artificial Sequence: Synthetic oligonucleotide
aguccgucgcgcccuccaa

SEQ ID NO: 356200 - RNA, 19 nt, Artificial Sequence
  Description of Artificial Sequence: Synthetic oligonucleotide
agcaggcacucgauguuau

SEQ ID NO: 356201 - RNA, 19 nt, Artificial Sequence
  Description of Artificial Sequence: Synthetic oligonucleotide
cggacccaaguaagaaggg

SEQ ID NO: 356202 - RNA, 19 nt, Artificial Sequence
  Description of Artificial Sequence: Synthetic oligonucleotide
ccaccaacugcauaaaguu

SEQ ID NO: 356203 - RNA, 19 nt, Artificial Sequence
  Description of Artificial Sequence: Synthetic oligonucleotide
auacagcaguccguuccau

SEQ ID NO: 356204 - RNA, 19 nt, Artificial Sequence
  Description of Artificial Sequence: Synthetic oligonucleotide
cacguacaguuugucaucu

SEQ ID NO: 356205 - RNA, 19 nt, Artificial Sequence
  Description of Artificial Sequence: Synthetic oligonucleotide
ccacaaccugggaaagcug

SEQ ID NO: 356206 - RNA, 19 nt, Artificial Sequence
  Description of Artificial Sequence: Synthetic oligonucleotide
gcuauuuaaguaggaccua

SEQ ID NO: 356207 - RNA, 19 nt, Artificial Sequence
  Description of Artificial Sequence: Synthetic oligonucleotide
ucgcgaccaccaacugcau

SEQ ID NO: 356208 - RNA, 19 nt, Artificial Sequence
  Description of Artificial Sequence: Synthetic oligonucleotide
ucaguccgucgcgcccucc

SEQ ID NO: 356209 - RNA, 19 nt, Artificial Sequence
  Description of Artificial Sequence: Synthetic oligonucleotide
uggagcaaccuggguccau

SEQ ID NO: 356210 - RNA, 19 nt, Artificial Sequence
  Description of Artificial Sequence: Synthetic oligonucleotide
gcaucccgcuuuaauuuca

SEQ ID NO: 356211 - RNA, 19 nt, Artificial Sequence
  Description of Artificial Sequence: Synthetic oligonucleotide
caguccgucgcgcccucca

SEQ ID NO: 356212 - RNA, 19 nt, Artificial Sequence
  Description of Artificial Sequence: Synthetic oligonucleotide
gugccggacccaaguaaga

SEQ ID NO: 356213 - RNA, 19 nt, Artificial Sequence
  Description of Artificial Sequence: Synthetic oligonucleotide
gugugaggaucaaagcauu

SEQ ID NO: 356214 - RNA, 19 nt, Artificial Sequence
  Description of Artificial Sequence: Synthetic oligonucleotide
cagucgacuuccgagguuu

SEQ ID NO: 356215 - RNA, 19 nt, Artificial Sequence
  Description of Artificial Sequence: Synthetic oligonucleotide
ggacuuuaguuuacaucua

SEQ ID NO: 356216 - RNA, 19 nt, Artificial Sequence
  Description of Artificial Sequence: Synthetic oligonucleotide
caagucugccaggaacugu

SEQ ID NO: 356217 - RNA, 19 nt, Artificial Sequence
  Description of Artificial Sequence: Synthetic oligonucleotide
cgacuuccgagguuuuguc

SEQ ID NO: 356218 - RNA, 19 nt, Artificial Sequence
  Description of Artificial Sequence: Synthetic oligonucleotide
cgaauucggcucuacaccu

SEQ ID NO: 356219 - RNA, 19 nt, Artificial Sequence
  Description of Artificial Sequence: Synthetic oligonucleotide
cuucaguccgucgcgcccu

SEQ ID NO: 356220 - RNA, 19 nt, Artificial Sequence
  Description of Artificial Sequence: Synthetic oligonucleotide
gaauucggcucuacaccuu

SEQ ID NO: 356221 - RNA, 19 nt, Artificial Sequence
  Description of Artificial Sequence: Synthetic oligonucleotide
uuacugcccggggcauuua

SEQ ID NO: 356222 - RNA, 19 nt, Artificial Sequence
  Description of Artificial Sequence: Synthetic oligonucleotide
ccggccuguguaugcguac

SEQ ID NO: 356223 - RNA, 19 nt, Artificial Sequence
  Description of Artificial Sequence: Synthetic oligonucleotide
cccggggcauuuacaaaca

SEQ ID NO: 356224 - RNA, 19 nt, Artificial Sequence
  Description of Artificial Sequence: Synthetic oligonucleotide
cccaacagucgacuuccga

SEQ ID NO: 356225 - RNA, 19 nt, Artificial Sequence
  Description of Artificial Sequence: Synthetic oligonucleotide
gcacucgauguuaucuucu

SEQ ID NO: 356226 - RNA, 19 nt, Artificial Sequence
  Description of Artificial Sequence: Synthetic oligonucleotide
ccggaaaagugcauuguuu

SEQ ID NO: 356227 - RNA, 19 nt, Artificial Sequence
  Description of Artificial Sequence: Synthetic oligonucleotide
cuggguccauucauuuguu

SEQ ID NO: 356228 - RNA, 19 nt, Artificial Sequence
  Description of Artificial Sequence: Synthetic oligonucleotide
agucgacuuccgagguuuu

SEQ ID NO: 356229 - RNA, 19 nt, Artificial Sequence
  Description of Artificial Sequence: Synthetic oligonucleotide
gggcacacgguguccauuu

SEQ ID NO: 356230 - RNA, 19 nt, Artificial Sequence
  Description of Artificial Sequence: Synthetic oligonucleotide
cacaacgaauucggcucua

SEQ ID NO: 356231 - RNA, 19 nt, Artificial Sequence
  Description of Artificial Sequence: Synthetic oligonucleotide
ggccaagagcuuugcaauu

SEQ ID NO: 356232 - RNA, 19 nt, Artificial Sequence
  Description of Artificial Sequence: Synthetic oligonucleotide
ccguggaucuagaugggau

SEQ ID NO: 356233 - RNA, 19 nt, Artificial Sequence
  Description of Artificial Sequence: Synthetic oligonucleotide
cgucgcgcccuccaaccac

SEQ ID NO: 356234 - RNA, 19 nt, Artificial Sequence
  Description of Artificial Sequence: Synthetic oligonucleotide
ggcacacgguguccauuua

SEQ ID NO: 356235 - RNA, 19 nt, Artificial Sequence
  Description of Artificial Sequence: Synthetic oligonucleotide
ccacaacgaauucggcucu

SEQ ID NO: 356236 - RNA, 19 nt, Artificial Sequence
  Description of Artificial Sequence: Synthetic oligonucleotide
aggcggcaucacacuccag

SEQ ID NO: 356237 - RNA, 19 nt, Artificial Sequence
  Description of Artificial Sequence: Synthetic oligonucleotide
ccggggcauuuacaaacaa

SEQ ID NO: 356238 - RNA, 19 nt, Artificial Sequence
  Description of Artificial Sequence: Synthetic oligonucleotide
cuacgccaccucuccuuuu

SEQ ID NO: 356239 - RNA, 19 nt, Artificial Sequence
  Description of Artificial Sequence: Synthetic oligonucleotide
ccuaggcacaguggagcaa

SEQ ID NO: 356240 - RNA, 19 nt, Artificial Sequence
  Description of Artificial Sequence: Synthetic oligonucleotide
gcgcaaggagagguagccu

SEQ ID NO: 356241 - RNA, 19 nt, Artificial Sequence
  Description of Artificial Sequence: Synthetic oligonucleotide
cccuccaaccacguacagu

SEQ ID NO: 356242 - RNA, 19 nt, Artificial Sequence
  Description of Artificial Sequence: Synthetic oligonucleotide
ccuacgccaccucuccuuu

SEQ ID NO: 356243 - RNA, 19 nt, Artificial Sequence
  Description of Artificial Sequence: Synthetic oligonucleotide
ccgucgcgcccuccaacca

SEQ ID NO: 356244 - RNA, 19 nt, Artificial Sequence
  Description of Artificial Sequence: Synthetic oligonucleotide
ccacuauguucagguaggu

SEQ ID NO: 356245 - RNA, 19 nt, Artificial Sequence
  Description of Artificial Sequence: Synthetic oligonucleotide
gggucgucucucagguaau

SEQ ID NO: 356246 - RNA, 19 nt, Artificial Sequence
  Description of Artificial Sequence: Synthetic oligonucleotide
ccacaccuacugugcuccu

SEQ ID NO: 356247 - RNA, 19 nt, Artificial Sequence
  Description of Artificial Sequence: Synthetic oligonucleotide
cggccuguguaugcguacu

SEQ ID NO: 356248 - RNA, 19 nt, Artificial Sequence
  Description of Artificial Sequence: Synthetic oligonucleotide
aauauauauauauauauag

SEQ ID NO: 356249 - RNA, 19 nt, Artificial Sequence
  Description of Artificial Sequence: Synthetic oligonucleotide
uuaacuaccagucuggugg

SEQ ID NO: 356250 - RNA, 19 nt, Artificial Sequence
  Description of Artificial Sequence: Synthetic oligonucleotide
aaaauauauauauauauau

SEQ ID NO: 356251 - RNA, 19 nt, Artificial Sequence
  Description of Artificial Sequence: Synthetic oligonucleotide
uauauauauauauauagga

SEQ ID NO: 356252 - RNA, 19 nt, Artificial Sequence
  Description of Artificial Sequence: Synthetic oligonucleotide
ucuaguuuagacuuaauug

SEQ ID NO: 356253 - RNA, 19 nt, Artificial Sequence
  Description of Artificial Sequence: Synthetic oligonucleotide
agauaugccaacuauguuc

SEQ ID NO: 356254 - RNA, 19 nt, Artificial Sequence
  Description of Artificial Sequence: Synthetic oligonucleotide
gaugucuagacuuagcugc

SEQ ID NO: 356255 - RNA, 19 nt, Artificial Sequence
  Description of Artificial Sequence: Synthetic oligonucleotide
uauauauauauauaggaaa

SEQ ID NO: 356256 - RNA, 19 nt, Artificial Sequence
  Description of Artificial Sequence: Synthetic oligonucleotide
acuugacucauacugaggc

SEQ ID NO: 356257 - RNA, 19 nt, Artificial Sequence
  Description of Artificial Sequence: Synthetic oligonucleotide
aacacuuauagagagcggc

SEQ ID NO: 356258 - RNA, 19 nt, Artificial Sequence
  Description of Artificial Sequence: Synthetic oligonucleotide
ucauguaccgcuuugagcu

SEQ ID NO: 356259 - RNA, 19 nt, Artificial Sequence
  Description of Artificial Sequence: Synthetic oligonucleotide
aaucguagcugccauugcc

SEQ ID NO: 356260 - RNA, 19 nt, Artificial Sequence
  Description of Artificial Sequence: Synthetic oligonucleotide
aguuggagaacaucaaucg

SEQ ID NO: 356261 - RNA, 19 nt, Artificial Sequence
  Description of Artificial Sequence: Synthetic oligonucleotide
ucuuccgcaaacaagaggu

SEQ ID NO: 356262 - RNA, 19 nt, Artificial Sequence
  Description of Artificial Sequence: Synthetic oligonucleotide
aauucaugucaaucguagc

SEQ ID NO: 356263 - RNA, 19 nt, Artificial Sequence
  Description of Artificial Sequence: Synthetic oligonucleotide
cuuaauugugcucaugucc

SEQ ID NO: 356264 - RNA, 19 nt, Artificial Sequence
  Description of Artificial Sequence: Synthetic oligonucleotide
acuagaugaggguugggcc

SEQ ID NO: 356265 - RNA, 19 nt, Artificial Sequence
  Description of Artificial Sequence: Synthetic oligonucleotide
auauauauauauauauagg

SEQ ID NO: 356266 - RNA, 19 nt, Artificial Sequence
  Description of Artificial Sequence: Synthetic oligonucleotide
uuagacuuaauugugcuca

SEQ ID NO: 356267 - RNA, 19 nt, Artificial Sequence
  Description of Artificial Sequence: Synthetic oligonucleotide
aaauucaugucaaucguag

SEQ ID NO: 356268 - RNA, 19 nt, Artificial Sequence
  Description of Artificial Sequence: Synthetic oligonucleotide
aucuguucaaggcaaaguc

SEQ ID NO: 356269 - RNA, 19 nt, Artificial Sequence
  Description of Artificial Sequence: Synthetic oligonucleotide
gacggaaaugcucaaaagc

SEQ ID NO: 356270 - RNA, 19 nt, Artificial Sequence
  Description of Artificial Sequence: Synthetic oligonucleotide
aaacgucauguucucaggg

SEQ ID NO: 356271 - RNA, 19 nt, Artificial Sequence
  Description of Artificial Sequence: Synthetic oligonucleotide
aaaccagucacgguggcgg

SEQ ID NO: 356272 - RNA, 19 nt, Artificial Sequence
  Description of Artificial Sequence: Synthetic oligonucleotide
auacaguacagccacgguc

SEQ ID NO: 356273 - RNA, 19 nt, Artificial Sequence
  Description of Artificial Sequence: Synthetic oligonucleotide
ucaucuuggaagaaccagc

SEQ ID NO: 356274 - RNA, 19 nt, Artificial Sequence
  Description of Artificial Sequence: Synthetic oligonucleotide
uccgaauugccaugaaugg

SEQ ID NO: 356275 - RNA, 19 nt, Artificial Sequence
  Description of Artificial Sequence: Synthetic oligonucleotide
acaaacgucauguucucag

SEQ ID NO: 356276 - RNA, 19 nt, Artificial Sequence
  Description of Artificial Sequence: Synthetic oligonucleotide
aguguggacgguuucagag

SEQ ID NO: 356277 - RNA, 19 nt, Artificial Sequence
  Description of Artificial Sequence: Synthetic oligonucleotide
caaaagaucacucuggaaa

SEQ ID NO: 356278 - RNA, 19 nt, Artificial Sequence
  Description of Artificial Sequence: Synthetic oligonucleotide
uaguuuagacuuaauugug

SEQ ID NO: 356279 - RNA, 19 nt, Artificial Sequence
  Description of Artificial Sequence: Synthetic oligonucleotide
aguuuagacuuaauugugc

SEQ ID NO: 356280 - RNA, 19 nt, Artificial Sequence
  Description of Artificial Sequence: Synthetic oligonucleotide
auacuguguagacauuugg

SEQ ID NO: 356281 - RNA, 19 nt, Artificial Sequence
  Description of Artificial Sequence: Synthetic oligonucleotide
ucaaacgaagauaugccaa

SEQ ID NO: 356282 - RNA, 19 nt, Artificial Sequence
  Description of Artificial Sequence: Synthetic oligonucleotide
aaauauauauauauauaua

SEQ ID NO: 356283 - RNA, 19 nt, Artificial Sequence
  Description of Artificial Sequence: Synthetic oligonucleotide
ucaaucggacaucagcacc

SEQ ID NO: 356284 - RNA, 19 nt, Artificial Sequence
  Description of Artificial Sequence: Synthetic oligonucleotide
ucugauucguaugugggag

SEQ ID NO: 356285 - RNA, 19 nt, Artificial Sequence
  Description of Artificial Sequence: Synthetic oligonucleotide
aacugacguccucugaggg

SEQ ID NO: 356286 - RNA, 19 nt, Artificial Sequence
  Description of Artificial Sequence: Synthetic oligonucleotide
cauagcaugcaggagagcc

SEQ ID NO: 356287 - RNA, 19 nt, Artificial Sequence
  Description of Artificial Sequence: Synthetic oligonucleotide
uguguagacauuuggcgca

SEQ ID NO: 356288 - RNA, 19 nt, Artificial Sequence
  Description of Artificial Sequence: Synthetic oligonucleotide
ucguuuucgggccaauucc

SEQ ID NO: 356289 - RNA, 19 nt, Artificial Sequence
  Description of Artificial Sequence: Synthetic oligonucleotide
gagaggaucuguucaaggc

SEQ ID NO: 356290 - RNA, 19 nt, Artificial Sequence
  Description of Artificial Sequence: Synthetic oligonucleotide
acuuaauugugcucauguc

SEQ ID NO: 356291 - RNA, 19 nt, Artificial Sequence
  Description of Artificial Sequence: Synthetic oligonucleotide
caaagcgcauuucaaauac

SEQ ID NO: 356292 - RNA, 19 nt, Artificial Sequence
  Description of Artificial Sequence: Synthetic oligonucleotide
auauauauauauaggaaaa

SEQ ID NO: 356293 - RNA, 19 nt, Artificial Sequence
  Description of Artificial Sequence: Synthetic oligonucleotide
cuguguagacauuuggcgc

SEQ ID NO: 356294 - RNA, 19 nt, Artificial Sequence
  Description of Artificial Sequence: Synthetic oligonucleotide
gaguuuucgagccauggca

SEQ ID NO: 356295 - RNA, 19 nt, Artificial Sequence
  Description of Artificial Sequence: Synthetic oligonucleotide
acacacuacccacagcgcg

SEQ ID NO: 356296 - RNA, 19 nt, Artificial Sequence
  Description of Artificial Sequence: Synthetic oligonucleotide
auauauauauauauaggaa

SEQ ID NO: 356297 - RNA, 19 nt, Artificial Sequence
  Description of Artificial Sequence: Synthetic oligonucleotide
ucacuauacaguacagcca

SEQ ID NO: 356298 - RNA, 19 nt, Artificial Sequence
  Description of Artificial Sequence: Synthetic oligonucleotide
acgucauguucucagggac

SEQ ID NO: 356299 - RNA, 19 nt, Artificial Sequence
  Description of Artificial Sequence: Synthetic oligonucleotide
ucaaucguagcugccauug

SEQ ID NO: 356300 - RNA, 19 nt, Artificial Sequence
  Description of Artificial Sequence: Synthetic oligonucleotide
cuaguuuagacuuaauugu

SEQ ID NO: 356301 - RNA, 19 nt, Artificial Sequence
  Description of Artificial Sequence: Synthetic oligonucleotide
ugucacuagaugaggguug

SEQ ID NO: 356302 - RNA, 19 nt, Artificial Sequence
  Description of Artificial Sequence: Synthetic oligonucleotide
aaagcgcauuucaaauacc

SEQ ID NO: 356303 - RNA, 19 nt, Artificial Sequence
  Description of Artificial Sequence: Synthetic oligonucleotide
ugcacaagcgaacacuuau

SEQ ID NO: 356304 - RNA, 19 nt, Artificial Sequence
  Description of Artificial Sequence: Synthetic oligonucleotide
uuuaacuaccagucuggug

SEQ ID NO: 356305 - RNA, 19 nt, Artificial Sequence
  Description of Artificial Sequence: Synthetic oligonucleotide
aacgucauguucucaggga

SEQ ID NO: 356306 - RNA, 19 nt, Artificial Sequence
  Description of Artificial Sequence: Synthetic oligonucleotide
uguccgacuggcuguaagg

SEQ ID NO: 356307 - RNA, 19 nt, Artificial Sequence
  Description of Artificial Sequence: Synthetic oligonucleotide
ugauucguaugugggaggg

SEQ ID NO: 356308 - RNA, 19 nt, Artificial Sequence
  Description of Artificial Sequence: Synthetic oligonucleotide
auagacuggggcgugagag

SEQ ID NO: 356309 - RNA, 19 nt, Artificial Sequence
  Description of Artificial Sequence: Synthetic oligonucleotide
gaacugacguccucugagg

SEQ ID NO: 356310 - RNA, 19 nt, Artificial Sequence
  Description of Artificial Sequence: Synthetic oligonucleotide
caaacgaagauaugccaac

SEQ ID NO: 356311 - RNA, 19 nt, Artificial Sequence
  Description of Artificial Sequence: Synthetic oligonucleotide
gagauaagcagugccacug

SEQ ID NO: 356312 - RNA, 19 nt, Artificial Sequence
  Description of Artificial Sequence: Synthetic oligonucleotide
aaacaagaggugacauagc

SEQ ID NO: 356313 - RNA, 19 nt, Artificial Sequence
  Description of Artificial Sequence: Synthetic oligonucleotide
gagacgaucacaccauuuc

SEQ ID NO: 356314 - RNA, 19 nt, Artificial Sequence
  Description of Artificial Sequence: Synthetic oligonucleotide
uuuguaggagguggcaccg

SEQ ID NO: 356315 - RNA, 19 nt, Artificial Sequence
  Description of Artificial Sequence: Synthetic oligonucleotide
cuugacucauacugaggcg

SEQ ID NO: 356316 - RNA, 19 nt, Artificial Sequence
  Description of Artificial Sequence: Synthetic oligonucleotide
caccauuucggagauaagc

SEQ ID NO: 356317 - RNA, 19 nt, Artificial Sequence
  Description of Artificial Sequence: Synthetic oligonucleotide
uuuagacuuaauugugcuc

SEQ ID NO: 356318 - RNA, 19 nt, Artificial Sequence
  Description of Artificial Sequence: Synthetic oligonucleotide
guuggaugacuucuguacc

SEQ ID NO: 356319 - RNA, 19 nt, Artificial Sequence
  Description of Artificial Sequence: Synthetic oligonucleotide
ucgacggaaaugcucaaaa

SEQ ID NO: 356320 - RNA, 19 nt, Artificial Sequence
  Description of Artificial Sequence: Synthetic oligonucleotide
ucugugauccucagcugcc

SEQ ID NO: 356321 - RNA, 19 nt, Artificial Sequence
  Description of Artificial Sequence: Synthetic oligonucleotide
aaagucaccuaggugcucu

SEQ ID NO: 356322 - RNA, 19 nt, Artificial Sequence
  Description of Artificial Sequence: Synthetic oligonucleotide
caguuggagaacaucaauc

SEQ ID NO: 356323 - RNA, 19 nt, Artificial Sequence
  Description of Artificial Sequence: Synthetic oligonucleotide
uuggaugacuucuguacca

SEQ ID NO: 356324 - RNA, 19 nt, Artificial Sequence
  Description of Artificial Sequence: Synthetic oligonucleotide
guaacgacaggcucuucag

SEQ ID NO: 356325 - RNA, 19 nt, Artificial Sequence
  Description of Artificial Sequence: Synthetic oligonucleotide
ucgucaguggaacugucac

SEQ ID NO: 356326 - RNA, 19 nt, Artificial Sequence
  Description of Artificial Sequence: Synthetic oligonucleotide
acggaaaugcucaaaagcu

SEQ ID NO: 356327 - RNA, 19 nt, Artificial Sequence
  Description of Artificial Sequence: Synthetic oligonucleotide
gguggagucaccaacaaac

SEQ ID NO: 356328 - RNA, 19 nt, Artificial Sequence
  Description of Artificial Sequence: Synthetic oligonucleotide
gacaaaagaucacucugga

SEQ ID NO: 356329 - RNA, 19 nt, Artificial Sequence
  Description of Artificial Sequence: Synthetic oligonucleotide
uguggacgguuucagaguc

SEQ ID NO: 356330 - RNA, 19 nt, Artificial Sequence
  Description of Artificial Sequence: Synthetic oligonucleotide
uugacucauacugaggcgu

SEQ ID NO: 356331 - RNA, 19 nt, Artificial Sequence
  Description of Artificial Sequence: Synthetic oligonucleotide
uauguucacuauacaguac

SEQ ID NO: 356332 - RNA, 19 nt, Artificial Sequence
  Description of Artificial Sequence: Synthetic oligonucleotide
ucaaugaggagacgaucac

SEQ ID NO: 356333 - RNA, 19 nt, Artificial Sequence
  Description of Artificial Sequence: Synthetic oligonucleotide
ucccuuuugcacaagcgaa

SEQ ID NO: 356334 - RNA, 19 nt, Artificial Sequence
  Description of Artificial Sequence: Synthetic oligonucleotide
ugagugacggcucccuuga

SEQ ID NO: 356335 - RNA, 19 nt, Artificial Sequence
  Description of Artificial Sequence: Synthetic oligonucleotide
caugggcuuacacuugucc

SEQ ID NO: 356336 - RNA, 19 nt, Artificial Sequence
  Description of Artificial Sequence: Synthetic oligonucleotide
aagcgcauuucaaauaccu

SEQ ID NO: 356337 - RNA, 19 nt, Artificial Sequence
  Description of Artificial Sequence: Synthetic oligonucleotide
ugggaaggaacugacuuug

SEQ ID NO: 356338 - RNA, 19 nt, Artificial Sequence
  Description of Artificial Sequence: Synthetic oligonucleotide
aacucccgcaguguggacg

SEQ ID NO: 356339 - RNA, 19 nt, Artificial Sequence
  Description of Artificial Sequence: Synthetic oligonucleotide
acaccguaacgacaggcuc

SEQ ID NO: 356340 - RNA, 19 nt, Artificial Sequence
  Description of Artificial Sequence: Synthetic oligonucleotide
caaacgucauguucucagg

SEQ ID NO: 356341 - RNA, 19 nt, Artificial Sequence
  Description of Artificial Sequence: Synthetic oligonucleotide
gaaguuuguugaugucuag

SEQ ID NO: 356342 - RNA, 19 nt, Artificial Sequence
  Description of Artificial Sequence: Synthetic oligonucleotide
guucaaggcaaagucagug

SEQ ID NO: 356343 - RNA, 19 nt, Artificial Sequence
  Description of Artificial Sequence: Synthetic oligonucleotide
gacuuaauugugcucaugu

SEQ ID NO: 356344 - RNA, 19 nt, Artificial Sequence
  Description of Artificial Sequence: Synthetic oligonucleotide
ggauuggaguucuugagug

SEQ ID NO: 356345 - RNA, 19 nt, Artificial Sequence
  Description of Artificial Sequence: Synthetic oligonucleotide
acgaagauaugccaacuau

SEQ ID NO: 356346 - RNA, 19 nt, Artificial Sequence
  Description of Artificial Sequence: Synthetic oligonucleotide
acugacguccucugagggg

SEQ ID NO: 356347 - RNA, 19 nt, Artificial Sequence
  Description of Artificial Sequence: Synthetic oligonucleotide
aacgaagauaugccaacua

SEQ ID NO: 356348 - RNA, 19 nt, Artificial Sequence
  Description of Artificial Sequence: Synthetic oligonucleotide
acgggacucuaguuuagac

SEQ ID NO: 356349 - RNA, 19 nt, Artificial Sequence
  Description of Artificial Sequence: Synthetic oligonucleotide
uguacucacgggacucuag

SEQ ID NO: 356350 - RNA, 19 nt, Artificial Sequence
  Description of Artificial Sequence: Synthetic oligonucleotide
aaccagucacgguggcggc

SEQ ID NO: 356351 - RNA, 19 nt, Artificial Sequence
  Description of Artificial Sequence: Synthetic oligonucleotide
ugagucgucaguggaacug

SEQ ID NO: 356352 - RNA, 19 nt, Artificial Sequence
  Description of Artificial Sequence: Synthetic oligonucleotide
aagauaugccaacuauguu

SEQ ID NO: 356353 - RNA, 19 nt, Artificial Sequence
  Description of Artificial Sequence: Synthetic oligonucleotide
aaacgaagauaugccaacu

SEQ ID NO: 356354 - RNA, 19 nt, Artificial Sequence
  Description of Artificial Sequence: Synthetic oligonucleotide
uauggagagucaauauuuu

SEQ ID NO: 356355 - RNA, 19 nt, Artificial Sequence
  Description of Artificial Sequence: Synthetic oligonucleotide
aggaaguuuguugaugucu

SEQ ID NO: 356356 - RNA, 19 nt, Artificial Sequence
  Description of Artificial Sequence: Synthetic oligonucleotide
agcggcgcucaauuaaagg

SEQ ID NO: 356357 - RNA, 19 nt, Artificial Sequence
  Description of Artificial Sequence: Synthetic oligonucleotide
uauacaguacagccacggu

SEQ ID NO: 356358 - RNA, 19 nt, Artificial Sequence
  Description of Artificial Sequence: Synthetic oligonucleotide
aauugugcucauguccaug

SEQ ID NO: 356359 - RNA, 19 nt, Artificial Sequence
  Description of Artificial Sequence: Synthetic oligonucleotide
uugagugacggcucccuug

SEQ ID NO: 356360 - RNA, 19 nt, Artificial Sequence
  Description of Artificial Sequence: Synthetic oligonucleotide
cacacuacccacagcgcgg

SEQ ID NO: 356361 - RNA, 19 nt, Artificial Sequence
  Description of Artificial Sequence: Synthetic oligonucleotide
gauguuuaaugaugucaca

SEQ ID NO: 356362 - RNA, 19 nt, Artificial Sequence
  Description of Artificial Sequence: Synthetic oligonucleotide
uauccgaauugccaugaau

SEQ ID NO: 356363 - RNA, 19 nt, Artificial Sequence
  Description of Artificial Sequence: Synthetic oligonucleotide
cagaugggcucugugaucc

SEQ ID NO: 356364 - RNA, 19 nt, Artificial Sequence
  Description of Artificial Sequence: Synthetic oligonucleotide
uaccgcuuugagcugcucc

SEQ ID NO: 356365 - RNA, 19 nt, Artificial Sequence
  Description of Artificial Sequence: Synthetic oligonucleotide
agacuuagcugccucuucu

SEQ ID NO: 356366 - RNA, 19 nt, Artificial Sequence
  Description of Artificial Sequence: Synthetic oligonucleotide
uggaguaguuggaugacuu

SEQ ID NO: 356367 - RNA, 19 nt, Artificial Sequence
  Description of Artificial Sequence: Synthetic oligonucleotide
augggcuuacacuuguccu

SEQ ID NO: 356368 - RNA, 19 nt, Artificial Sequence
  Description of Artificial Sequence: Synthetic oligonucleotide
ucuauccgaauugccauga

SEQ ID NO: 356369 - RNA, 19 nt, Artificial Sequence
  Description of Artificial Sequence: Synthetic oligonucleotide
gagaggacaccguaacgac

SEQ ID NO: 356370 - RNA, 19 nt, Artificial Sequence
  Description of Artificial Sequence: Synthetic oligonucleotide
cuuacuccccaggugaggc

SEQ ID NO: 356371 - RNA, 19 nt, Artificial Sequence
  Description of Artificial Sequence: Synthetic oligonucleotide
ugcccguuaggccugcccc

SEQ ID NO: 356372 - RNA, 19 nt, Artificial Sequence
  Description of Artificial Sequence: Synthetic oligonucleotide
cacuagaugaggguugggc

SEQ ID NO: 356373 - RNA, 19 nt, Artificial Sequence
  Description of Artificial Sequence: Synthetic oligonucleotide
ucauacugaggcgugcucu

SEQ ID NO: 356374 - RNA, 19 nt, Artificial Sequence
  Description of Artificial Sequence: Synthetic oligonucleotide
ucuccgacucagaggauga

SEQ ID NO: 356375 - RNA, 19 nt, Artificial Sequence
  Description of Artificial Sequence: Synthetic oligonucleotide
acacuuauagagagcggcg

SEQ ID NO: 356376 - RNA, 19 nt, Artificial Sequence
  Description of Artificial Sequence: Synthetic oligonucleotide
ucugagucgucaguggaac

SEQ ID NO: 356377 - RNA, 19 nt, Artificial Sequence
  Description of Artificial Sequence: Synthetic oligonucleotide
guguauacuguguagacau

SEQ ID NO: 356378 - RNA, 19 nt, Artificial Sequence
  Description of Artificial Sequence: Synthetic oligonucleotide
ucacaguagucgugcagcc

SEQ ID NO: 356379 - RNA, 19 nt, Artificial Sequence
  Description of Artificial Sequence: Synthetic oligonucleotide
ucucccgagcagcucgacg

SEQ ID NO: 356380 - RNA, 19 nt, Artificial Sequence
  Description of Artificial Sequence: Synthetic oligonucleotide
cugacguccucugaggggc

SEQ ID NO: 356381 - RNA, 19 nt, Artificial Sequence
  Description of Artificial Sequence: Synthetic oligonucleotide
cugauucguaugugggagg

SEQ ID NO: 356382 - RNA, 19 nt, Artificial Sequence
  Description of Artificial Sequence: Synthetic oligonucleotide
ugacucauacugaggcgug

SEQ ID NO: 356383 - RNA, 19 nt, Artificial Sequence
  Description of Artificial Sequence: Synthetic oligonucleotide
cacuugacucauacugagg

SEQ ID NO: 356384 - RNA, 19 nt, Artificial Sequence
  Description of Artificial Sequence: Synthetic oligonucleotide
cucguuuucgggccaauuc

SEQ ID NO: 356385 - RNA, 19 nt, Artificial Sequence
  Description of Artificial Sequence: Synthetic oligonucleotide
uggcacuauucccuuuugc

SEQ ID NO: 356386 - RNA, 19 nt, Artificial Sequence
  Description of Artificial Sequence: Synthetic oligonucleotide
guuuagacuuaauugugcu

SEQ ID NO: 356387 - RNA, 19 nt, Artificial Sequence
  Description of Artificial Sequence: Synthetic oligonucleotide
uuccgcaaacaagagguga

SEQ ID NO: 356388 - RNA, 19 nt, Artificial Sequence
  Description of Artificial Sequence: Synthetic oligonucleotide
auguaccgcuuugagcugc

SEQ ID NO: 356389 - RNA, 19 nt, Artificial Sequence
  Description of Artificial Sequence: Synthetic oligonucleotide
uuuuaacuaccagucuggu

SEQ ID NO: 356390 - RNA, 19 nt, Artificial Sequence
  Description of Artificial Sequence: Synthetic oligonucleotide
ugucaaucguagcugccau

SEQ ID NO: 356391 - RNA, 19 nt, Artificial Sequence
  Description of Artificial Sequence: Synthetic oligonucleotide
gacgucacaaacgucaugu

SEQ ID NO: 356392 - RNA, 19 nt, Artificial Sequence
  Description of Artificial Sequence: Synthetic oligonucleotide
caugucaaucguagcugcc

SEQ ID NO: 356393 - RNA, 19 nt, Artificial Sequence
  Description of Artificial Sequence: Synthetic oligonucleotide
aucaggauuggaguucuug

SEQ ID NO: 356394 - RNA, 19 nt, Artificial Sequence
  Description of Artificial Sequence: Synthetic oligonucleotide
acaaaagaucacucuggaa

SEQ ID NO: 356395 - RNA, 19 nt, Artificial Sequence
  Description of Artificial Sequence: Synthetic oligonucleotide
gaacacuuauagagagcgg

SEQ ID NO: 356396 - RNA, 19 nt, Artificial Sequence
  Description of Artificial Sequence: Synthetic oligonucleotide
acuauucccuuuugcacaa

SEQ ID NO: 356397 - RNA, 19 nt, Artificial Sequence
  Description of Artificial Sequence: Synthetic oligonucleotide
cacuuauagagagcggcgc

SEQ ID NO: 356398 - RNA, 19 nt, Artificial Sequence
  Description of Artificial Sequence: Synthetic oligonucleotide
caaucggacaucagcacca

SEQ ID NO: 356399 - RNA, 19 nt, Artificial Sequence
  Description of Artificial Sequence: Synthetic oligonucleotide
agugacggcucccuugacu

SEQ ID NO: 356400 - RNA, 19 nt, Artificial Sequence
  Description of Artificial Sequence: Synthetic oligonucleotide
aacacuauggagagucaau

SEQ ID NO: 356401 - RNA, 19 nt, Artificial Sequence
  Description of Artificial Sequence: Synthetic oligonucleotide
aagucaccuaggugcucuc

SEQ ID NO: 356402 - RNA, 19 nt, Artificial Sequence
  Description of Artificial Sequence: Synthetic oligonucleotide
gcggcgcucaauuaaaggc

SEQ ID NO: 356403 - RNA, 19 nt, Artificial Sequence
  Description of Artificial Sequence: Synthetic oligonucleotide
agcgcauccucauccucuc

SEQ ID NO: 356404 - RNA, 19 nt, Artificial Sequence
  Description of Artificial Sequence: Synthetic oligonucleotide
accgcaggagaggacaccg

SEQ ID NO: 356405 - RNA, 19 nt, Artificial Sequence
  Description of Artificial Sequence: Synthetic oligonucleotide
cuguaaggcagaugggcuc

SEQ ID NO: 356406 - RNA, 19 nt, Artificial Sequence
  Description of Artificial Sequence: Synthetic oligonucleotide
acucacgggacucuaguuu

SEQ ID NO: 356407 - RNA, 19 nt, Artificial Sequence
  Description of Artificial Sequence: Synthetic oligonucleotide
agauaagcagugccacugu

SEQ ID NO: 356408 - RNA, 19 nt, Artificial Sequence
  Description of Artificial Sequence: Synthetic oligonucleotide
uagacuggggcgugagagc

SEQ ID NO: 356409 - RNA, 19 nt, Artificial Sequence
  Description of Artificial Sequence: Synthetic oligonucleotide
uccucaugcgcuccugccu

SEQ ID NO: 356410 - RNA, 19 nt, Artificial Sequence
  Description of Artificial Sequence: Synthetic oligonucleotide
ucacaaacgucauguucuc

SEQ ID NO: 356411 - RNA, 19 nt, Artificial Sequence
  Description of Artificial Sequence: Synthetic oligonucleotide
aucacucuggaaauucaug

SEQ ID NO: 356412 - RNA, 19 nt, Artificial Sequence
  Description of Artificial Sequence: Synthetic oligonucleotide
cuugacuggaugaugugua

SEQ ID NO: 356413 - RNA, 19 nt, Artificial Sequence
  Description of Artificial Sequence: Synthetic oligonucleotide
gcacuugacucauacugag

SEQ ID NO: 356414 - RNA, 19 nt, Artificial Sequence
  Description of Artificial Sequence: Synthetic oligonucleotide
cuauggagagucaauauuu

SEQ ID NO: 356415 - RNA, 19 nt, Artificial Sequence
  Description of Artificial Sequence: Synthetic oligonucleotide
gaaggaacugacuuugguu

SEQ ID NO: 356416 - RNA, 19 nt, Artificial Sequence
  Description of Artificial Sequence: Synthetic oligonucleotide
accucuauccgaauugcca

SEQ ID NO: 356417 - RNA, 19 nt, Artificial Sequence
  Description of Artificial Sequence: Synthetic oligonucleotide
agcucgacggaaaugcuca

SEQ ID NO: 356418 - RNA, 19 nt, Artificial Sequence
  Description of Artificial Sequence: Synthetic oligonucleotide
gauucguaugugggagggg

SEQ ID NO: 356419 - RNA, 19 nt, Artificial Sequence
  Description of Artificial Sequence: Synthetic oligonucleotide
aacaucaaucggacaucag

SEQ ID NO: 356420 - RNA, 19 nt, Artificial Sequence
  Description of Artificial Sequence: Synthetic oligonucleotide
uagacuuagcugccucuuc

SEQ ID NO: 356421 - RNA, 19 nt, Artificial Sequence
  Description of Artificial Sequence: Synthetic oligonucleotide
gaaauucaugucaaucgua

SEQ ID NO: 356422 - RNA, 19 nt, Artificial Sequence
  Description of Artificial Sequence: Synthetic oligonucleotide
gauggaguaguuggaugac

SEQ ID NO: 356423 - RNA, 19 nt, Artificial Sequence
  Description of Artificial Sequence: Synthetic oligonucleotide
agcgcauuucaaauaccuc

SEQ ID NO: 356424 - RNA, 19 nt, Artificial Sequence
  Description of Artificial Sequence: Synthetic oligonucleotide
agcaaucacaucaacuuuu

SEQ ID NO: 356425 - RNA, 19 nt, Artificial Sequence
  Description of Artificial Sequence: Synthetic oligonucleotide
uccucaugggcucgacgug

SEQ ID NO: 356426 - RNA, 19 nt, Artificial Sequence
  Description of Artificial Sequence: Synthetic oligonucleotide
gagagcggcgcucaauuaa

SEQ ID NO: 356427 - RNA, 19 nt, Artificial Sequence
  Description of Artificial Sequence: Synthetic oligonucleotide
cacacacuacccacagcgc

SEQ ID NO: 356428 - RNA, 19 nt, Artificial Sequence
  Description of Artificial Sequence: Synthetic oligonucleotide
ccauuucggagauaagcag

SEQ ID NO: 356429 - RNA, 19 nt, Artificial Sequence
  Description of Artificial Sequence: Synthetic oligonucleotide
ggaguuuucgagccauggc

SEQ ID NO: 356430 - RNA, 19 nt, Artificial Sequence
  Description of Artificial Sequence: Synthetic oligonucleotide
gacgguuucagagucucaa

SEQ ID NO: 356431 - RNA, 19 nt, Artificial Sequence
  Description of Artificial Sequence: Synthetic oligonucleotide
uuucggagauaagcagugc

SEQ ID NO: 356432 - RNA, 19 nt, Artificial Sequence
  Description of Artificial Sequence: Synthetic oligonucleotide
ucugcugcugcugcugcug

SEQ ID NO: 356433 - RNA, 19 nt, Artificial Sequence
  Description of Artificial Sequence: Synthetic oligonucleotide
ucgugccuccucaugggcu

SEQ ID NO: 356434 - RNA, 19 nt, Artificial Sequence
  Description of Artificial Sequence: Synthetic oligonucleotide
cuuuucgcgcuccuccuuc

SEQ ID NO: 356435 - RNA, 19 nt, Artificial Sequence
  Description of Artificial Sequence: Synthetic oligonucleotide
ucucggcuccucaugcgcu

SEQ ID NO: 356436 - RNA, 19 nt, Artificial Sequence
  Description of Artificial Sequence: Synthetic oligonucleotide
ucgacgugccuguuccagc

SEQ ID NO: 356437 - RNA, 19 nt, Artificial Sequence
  Description of Artificial Sequence: Synthetic oligonucleotide
uguauacuguguagacauu

SEQ ID NO: 356438 - RNA, 19 nt, Artificial Sequence
  Description of Artificial Sequence: Synthetic oligonucleotide
augaggguugggccaccac

SEQ ID NO: 356439 - RNA, 19 nt, Artificial Sequence
  Description of Artificial Sequence: Synthetic oligonucleotide
acacuauggagagucaaua

SEQ ID NO: 356440 - RNA, 19 nt, Artificial Sequence
  Description of Artificial Sequence: Synthetic oligonucleotide
caccucuauccgaauugcc

SEQ ID NO: 356441 - RNA, 19 nt, Artificial Sequence
  Description of Artificial Sequence: Synthetic oligonucleotide
gguaggacgucacaaacgu

SEQ ID NO: 356442 - RNA, 19 nt, Artificial Sequence
  Description of Artificial Sequence: Synthetic oligonucleotide
ucaccuaggugcucucaaa

SEQ ID NO: 356443 - RNA, 19 nt, Artificial Sequence
  Description of Artificial Sequence: Synthetic oligonucleotide
aguuuucgagccauggcaa

SEQ ID NO: 356444 - RNA, 19 nt, Artificial Sequence
  Description of Artificial Sequence: Synthetic oligonucleotide
gaacuaucacugcugcugu

SEQ ID NO: 356445 - RNA, 19 nt, Artificial Sequence
  Description of Artificial Sequence: Synthetic oligonucleotide
cuuccgcaaacaagaggug

SEQ ID NO: 356446 - RNA, 19 nt, Artificial Sequence
  Description of Artificial Sequence: Synthetic oligonucleotide
caaucguagcugccauugc

SEQ ID NO: 356447 - RNA, 19 nt, Artificial Sequence
  Description of Artificial Sequence: Synthetic oligonucleotide
gacgucgugccuccucaug

SEQ ID NO: 356448 - RNA, 19 nt, Artificial Sequence
  Description of Artificial Sequence: Synthetic oligonucleotide
agacuggggcgugagagcu

SEQ ID NO: 356449 - RNA, 19 nt, Artificial Sequence
  Description of Artificial Sequence: Synthetic oligonucleotide
ucgagccauggcaaccacu

SEQ ID NO: 356450 - RNA, 19 nt, Artificial Sequence
  Description of Artificial Sequence: Synthetic oligonucleotide
ggcucgacgugccuguucc

SEQ ID NO: 356451 - RNA, 19 nt, Artificial Sequence
  Description of Artificial Sequence: Synthetic oligonucleotide
ggguaggacgucacaaacg

SEQ ID NO: 356452 - RNA, 19 nt, Artificial Sequence
  Description of Artificial Sequence: Synthetic oligonucleotide
gccguuccaguccacacag

SEQ ID NO: 356453 - RNA, 19 nt, Artificial Sequence
  Description of Artificial Sequence: Synthetic oligonucleotide
gacucuaguuuagacuuaa

SEQ ID NO: 356454 - RNA, 19 nt, Artificial Sequence
  Description of Artificial Sequence: Synthetic oligonucleotide
aucguagcugccauugccu

SEQ ID NO: 356455 - RNA, 19 nt, Artificial Sequence
  Description of Artificial Sequence: Synthetic oligonucleotide
gccacugugucugaaggag

SEQ ID NO: 356456 - RNA, 19 nt, Artificial Sequence
  Description of Artificial Sequence: Synthetic oligonucleotide
uuuucgcgcuccuccuucu

SEQ ID NO: 356457 - RNA, 19 nt, Artificial Sequence
  Description of Artificial Sequence: Synthetic oligonucleotide
cgaagauaugccaacuaug

SEQ ID NO: 356458 - RNA, 19 nt, Artificial Sequence
  Description of Artificial Sequence: Synthetic oligonucleotide
ucuguacucacgggacucu

SEQ ID NO: 356459 - RNA, 19 nt, Artificial Sequence
  Description of Artificial Sequence: Synthetic oligonucleotide
ugguaggacgucuguccga

SEQ ID NO: 356460 - RNA, 19 nt, Artificial Sequence
  Description of Artificial Sequence: Synthetic oligonucleotide
gacucauacugaggcgugc

SEQ ID NO: 356461 - RNA, 19 nt, Artificial Sequence
  Description of Artificial Sequence: Synthetic oligonucleotide
gcucauguaccgcuuugag

SEQ ID NO: 356462 - RNA, 19 nt, Artificial Sequence
  Description of Artificial Sequence: Synthetic oligonucleotide
uguaccgcuuugagcugcu

SEQ ID NO: 356463 - RNA, 19 nt, Artificial Sequence
  Description of Artificial Sequence: Synthetic oligonucleotide
gccccuaacacuauggaga

SEQ ID NO: 356464 - RNA, 19 nt, Artificial Sequence
  Description of Artificial Sequence: Synthetic oligonucleotide
cuguccgacuggcuguaag

SEQ ID NO: 356465 - RNA, 19 nt, Artificial Sequence
  Description of Artificial Sequence: Synthetic oligonucleotide
ugccccgggcauagcaugc

SEQ ID NO: 356466 - RNA, 19 nt, Artificial Sequence
  Description of Artificial Sequence: Synthetic oligonucleotide
cagcucgacggaaaugcuc

SEQ ID NO: 356467 - RNA, 19 nt, Artificial Sequence
  Description of Artificial Sequence: Synthetic oligonucleotide
agacuuaauugugcucaug

SEQ ID NO: 356468 - RNA, 19 nt, Artificial Sequence
  Description of Artificial Sequence: Synthetic oligonucleotide
ucacuagaugaggguuggg

SEQ ID NO: 356469 - RNA, 19 nt, Artificial Sequence
  Description of Artificial Sequence: Synthetic oligonucleotide
guccgacuggcuguaaggc

SEQ ID NO: 356470 - RNA, 19 nt, Artificial Sequence
  Description of Artificial Sequence: Synthetic oligonucleotide
cauguaccgcuuugagcug

SEQ ID NO: 356471 - RNA, 19 nt, Artificial Sequence
  Description of Artificial Sequence: Synthetic oligonucleotide
auagcaugcaggagagcca

SEQ ID NO: 356472 - RNA, 19 nt, Artificial Sequence
  Description of Artificial Sequence: Synthetic oligonucleotide
auggaguaguuggaugacu

SEQ ID NO: 356473 - RNA, 19 nt, Artificial Sequence
  Description of Artificial Sequence: Synthetic oligonucleotide
aggacaccguaacgacagg

SEQ ID NO: 356474 - RNA, 19 nt, Artificial Sequence
  Description of Artificial Sequence: Synthetic oligonucleotide
gaaggacucccaaugggua

SEQ ID NO: 356475 - RNA, 19 nt, Artificial Sequence
  Description of Artificial Sequence: Synthetic oligonucleotide
gacaugggcuuacacuugu

SEQ ID NO: 356476 - RNA, 19 nt, Artificial Sequence
  Description of Artificial Sequence: Synthetic oligonucleotide
cucgacgugccuguuccag

SEQ ID NO: 356477 - RNA, 19 nt, Artificial Sequence
  Description of Artificial Sequence: Synthetic oligonucleotide
augggcucgacgugccugu

SEQ ID NO: 356478 - RNA, 19 nt, Artificial Sequence
  Description of Artificial Sequence: Synthetic oligonucleotide
cucacgggacucuaguuua

SEQ ID NO: 356479 - RNA, 19 nt, Artificial Sequence
  Description of Artificial Sequence: Synthetic oligonucleotide
gggacucuaguuuagacuu

SEQ ID NO: 356480 - RNA, 19 nt, Artificial Sequence
  Description of Artificial Sequence: Synthetic oligonucleotide
uacucacgggacucuaguu

SEQ ID NO: 356481 - RNA, 19 nt, Artificial Sequence
  Description of Artificial Sequence: Synthetic oligonucleotide
uguguacuacacggcccag

SEQ ID NO: 356482 - RNA, 19 nt, Artificial Sequence
  Description of Artificial Sequence: Synthetic oligonucleotide
acgguuucagagucucaaa

SEQ ID NO: 356483 - RNA, 19 nt, Artificial Sequence
  Description of Artificial Sequence: Synthetic oligonucleotide
uucgagccauggcaaccac

SEQ ID NO: 356484 - RNA, 19 nt, Artificial Sequence
  Description of Artificial Sequence: Synthetic oligonucleotide
ccccuaacacuauggagag

SEQ ID NO: 356485 - RNA, 19 nt, Artificial Sequence
  Description of Artificial Sequence: Synthetic oligonucleotide
acccacagcgcggugggag

SEQ ID NO: 356486 - RNA, 19 nt, Artificial Sequence
  Description of Artificial Sequence: Synthetic oligonucleotide
agaggacaccguaacgaca

SEQ ID NO: 356487 - RNA, 19 nt, Artificial Sequence
  Description of Artificial Sequence: Synthetic oligonucleotide
guaguuggaugacuucugu

SEQ ID NO: 356488 - RNA, 19 nt, Artificial Sequence
  Description of Artificial Sequence: Synthetic oligonucleotide
guguagacauuuggcgcag

SEQ ID NO: 356489 - RNA, 19 nt, Artificial Sequence
  Description of Artificial Sequence: Synthetic oligonucleotide
ugcucucguuuucgggcca

SEQ ID NO: 356490 - RNA, 19 nt, Artificial Sequence
  Description of Artificial Sequence: Synthetic oligonucleotide
aaucggacaucagcaccaa

SEQ ID NO: 356491 - RNA, 19 nt, Artificial Sequence
  Description of Artificial Sequence: Synthetic oligonucleotide
gucgugccuccucaugggc

SEQ ID NO: 356492 - RNA, 19 nt, Artificial Sequence
  Description of Artificial Sequence: Synthetic oligonucleotide
ggaaaugcucaaaagcugu

SEQ ID NO: 356493 - RNA, 19 nt, Artificial Sequence
  Description of Artificial Sequence: Synthetic oligonucleotide
uuaggccugccccgggcau

SEQ ID NO: 356494 - RNA, 19 nt, Artificial Sequence
  Description of Artificial Sequence: Synthetic oligonucleotide
ggaguaguuggaugacuuc

SEQ ID NO: 356495 - RNA, 19 nt, Artificial Sequence
  Description of Artificial Sequence: Synthetic oligonucleotide
gagcggcgcucaauuaaag

SEQ ID NO: 356496 - RNA, 19 nt, Artificial Sequence
  Description of Artificial Sequence: Synthetic oligonucleotide
ucccgagcagcucgacgga

SEQ ID NO: 356497 - RNA, 19 nt, Artificial Sequence
  Description of Artificial Sequence: Synthetic oligonucleotide
gacaccguaacgacaggcu

SEQ ID NO: 356498 - RNA, 19 nt, Artificial Sequence
  Description of Artificial Sequence: Synthetic oligonucleotide
gguaggacgucuguccgac

SEQ ID NO: 356499 - RNA, 19 nt, Artificial Sequence
  Description of Artificial Sequence: Synthetic oligonucleotide
gacgugccuguuccagcgc

SEQ ID NO: 356500 - RNA, 19 nt, Artificial Sequence
  Description of Artificial Sequence: Synthetic oligonucleotide
ggacaccguaacgacaggc

SEQ ID NO: 356501 - RNA, 19 nt, Artificial Sequence
  Description of Artificial Sequence: Synthetic oligonucleotide
ugccaacuauguucacuau

SEQ ID NO: 356502 - RNA, 19 nt, Artificial Sequence
  Description of Artificial Sequence: Synthetic oligonucleotide
agucgucaguggaacuguc

SEQ ID NO: 356503 - RNA, 19 nt, Artificial Sequence
  Description of Artificial Sequence: Synthetic oligonucleotide
cguuuucgggccaauuccc

SEQ ID NO: 356504 - RNA, 19 nt, Artificial Sequence
  Description of Artificial Sequence: Synthetic oligonucleotide
cugccccgggcauagcaug

SEQ ID NO: 356505 - RNA, 19 nt, Artificial Sequence
  Description of Artificial Sequence: Synthetic oligonucleotide
ggcaaagcgcauuucaaau

SEQ ID NO: 356506 - RNA, 19 nt, Artificial Sequence
  Description of Artificial Sequence: Synthetic oligonucleotide
auucgcuggugcucuccga

SEQ ID NO: 356507 - RNA, 19 nt, Artificial Sequence
  Description of Artificial Sequence: Synthetic oligonucleotide
ugccgccccuaacacuaug

SEQ ID NO: 356508 - RNA, 19 nt, Artificial Sequence
  Description of Artificial Sequence: Synthetic oligonucleotide
cucugcaugcucagccuga

SEQ ID NO: 356509 - RNA, 19 nt, Artificial Sequence
  Description of Artificial Sequence: Synthetic oligonucleotide
cugcugcugcugcugcucc

SEQ ID NO: 356510 - RNA, 19 nt, Artificial Sequence
  Description of Artificial Sequence: Synthetic oligonucleotide
guacucacgggacucuagu

SEQ ID NO: 356511 - RNA, 19 nt, Artificial Sequence
  Description of Artificial Sequence: Synthetic oligonucleotide
cagacuggcccaggagccg

SEQ ID NO: 356512 - RNA, 19 nt, Artificial Sequence
  Description of Artificial Sequence: Synthetic oligonucleotide
cugcccguuaggccugccc

SEQ ID NO: 356513 - RNA, 19 nt, Artificial Sequence
  Description of Artificial Sequence: Synthetic oligonucleotide
gccggcacuugacucauac

SEQ ID NO: 356514 - RNA, 19 nt, Artificial Sequence
  Description of Artificial Sequence: Synthetic oligonucleotide
agagcggcgcucaauuaaa

SEQ ID NO: 356515 - RNA, 19 nt, Artificial Sequence
  Description of Artificial Sequence: Synthetic oligonucleotide
aggcgugcucugaacugac

SEQ ID NO: 356516 - RNA, 19 nt, Artificial Sequence
  Description of Artificial Sequence: Synthetic oligonucleotide
cugcugcugcugcugcugc

SEQ ID NO: 356517 - RNA, 19 nt, Artificial Sequence
  Description of Artificial Sequence: Synthetic oligonucleotide
ucgggccaauucccucugc

SEQ ID NO: 356518 - RNA, 19 nt, Artificial Sequence
  Description of Artificial Sequence: Synthetic oligonucleotide
cucccuugacuggaugaug

SEQ ID NO: 356519 - RNA, 19 nt, Artificial Sequence
  Description of Artificial Sequence: Synthetic oligonucleotide
ggggcgugagagcucuggg

SEQ ID NO: 356520 - RNA, 19 nt, Artificial Sequence
  Description of Artificial Sequence: Synthetic oligonucleotide
ggcacuugacucauacuga

SEQ ID NO: 356521 - RNA, 19 nt, Artificial Sequence
  Description of Artificial Sequence: Synthetic oligonucleotide
acacuacccacagcgcggu

SEQ ID NO: 356522 - RNA, 19 nt, Artificial Sequence
  Description of Artificial Sequence: Synthetic oligonucleotide
ugcugcugcugcugcugcu

SEQ ID NO: 356523 - RNA, 19 nt, Artificial Sequence
  Description of Artificial Sequence: Synthetic oligonucleotide
acgucacaaacgucauguu

SEQ ID NO: 356524 - RNA, 19 nt, Artificial Sequence
  Description of Artificial Sequence: Synthetic oligonucleotide
cgacgugccuguuccagcg

SEQ ID NO: 356525 - RNA, 19 nt, Artificial Sequence
  Description of Artificial Sequence: Synthetic oligonucleotide
ggcgugagagcucugggcu

SEQ ID NO: 356526 - RNA, 19 nt, Artificial Sequence
  Description of Artificial Sequence: Synthetic oligonucleotide
ucucguuuucgggccaauu

SEQ ID NO: 356527 - RNA, 19 nt, Artificial Sequence
  Description of Artificial Sequence: Synthetic oligonucleotide
agucaccuaggugcucuca

SEQ ID NO: 356528 - RNA, 19 nt, Artificial Sequence
  Description of Artificial Sequence: Synthetic oligonucleotide
cgacggaaaugcucaaaag

SEQ ID NO: 356529 - RNA, 19 nt, Artificial Sequence
  Description of Artificial Sequence: Synthetic oligonucleotide
ggacgucacaaacgucaug

SEQ ID NO: 356530 - RNA, 19 nt, Artificial Sequence
  Description of Artificial Sequence: Synthetic oligonucleotide
gaggagacgaucacaccau

SEQ ID NO: 356531 - RNA, 19 nt, Artificial Sequence
  Description of Artificial Sequence: Synthetic oligonucleotide
gcccguuaggccugccccg

SEQ ID NO: 356532 - RNA, 19 nt, Artificial Sequence
  Description of Artificial Sequence: Synthetic oligonucleotide
gagucgucaguggaacugu

SEQ ID NO: 356533 - RNA, 19 nt, Artificial Sequence
  Description of Artificial Sequence: Synthetic oligonucleotide
ccucaugggcucgacgugc

SEQ ID NO: 356534 - RNA, 19 nt, Artificial Sequence
  Description of Artificial Sequence: Synthetic oligonucleotide
aucggacaucagcaccaaa

SEQ ID NO: 356535 - RNA, 19 nt, Artificial Sequence
  Description of Artificial Sequence: Synthetic oligonucleotide
cuauucccuuuugcacaag

SEQ ID NO: 356536 - RNA, 19 nt, Artificial Sequence
  Description of Artificial Sequence: Synthetic oligonucleotide
guaggacgucacaaacguc

SEQ ID NO: 356537 - RNA, 19 nt, Artificial Sequence
  Description of Artificial Sequence: Synthetic oligonucleotide
aggacgucacaaacgucau

SEQ ID NO: 356538 - RNA, 19 nt, Artificial Sequence
  Description of Artificial Sequence: Synthetic oligonucleotide
agcauagacuggggcguga

SEQ ID NO: 356539 - RNA, 19 nt, Artificial Sequence
  Description of Artificial Sequence: Synthetic oligonucleotide
caguguggacgguuucaga

SEQ ID NO: 356540 - RNA, 19 nt, Artificial Sequence
  Description of Artificial Sequence: Synthetic oligonucleotide
cguaacgacaggcucuuca

SEQ ID NO: 356541 - RNA, 19 nt, Artificial Sequence
  Description of Artificial Sequence: Synthetic oligonucleotide
ggacgucuguccgacuggc

SEQ ID NO: 356542 - RNA, 19 nt, Artificial Sequence
  Description of Artificial Sequence: Synthetic oligonucleotide
guggagucaccaacaaacu

SEQ ID NO: 356543 - RNA, 19 nt, Artificial Sequence
  Description of Artificial Sequence: Synthetic oligonucleotide
gcugucacuagaugagggu

SEQ ID NO: 356544 - RNA, 19 nt, Artificial Sequence
  Description of Artificial Sequence: Synthetic oligonucleotide
cuccgacucagaggaugag

SEQ ID NO: 356545 - RNA, 19 nt, Artificial Sequence
  Description of Artificial Sequence: Synthetic oligonucleotide
caccgcaggagaggacacc

SEQ ID NO: 356546 - RNA, 19 nt, Artificial Sequence
  Description of Artificial Sequence: Synthetic oligonucleotide
ggauucgcuggugcucucc

SEQ ID NO: 356547 - RNA, 19 nt, Artificial Sequence
  Description of Artificial Sequence: Synthetic oligonucleotide
gagugacggcucccuugac

SEQ ID NO: 356548 - RNA, 19 nt, Artificial Sequence
  Description of Artificial Sequence: Synthetic oligonucleotide
gcaugugguaggacgucug

SEQ ID NO: 356549 - RNA, 19 nt, Artificial Sequence
  Description of Artificial Sequence: Synthetic oligonucleotide
guuuucgggccaauucccu

SEQ ID NO: 356550 - RNA, 19 nt, Artificial Sequence
  Description of Artificial Sequence: Synthetic oligonucleotide
cgccccuaacacuauggag

SEQ ID NO: 356551 - RNA, 19 nt, Artificial Sequence
  Description of Artificial Sequence: Synthetic oligonucleotide
uggauucgcuggugcucuc

SEQ ID NO: 356552 - RNA, 19 nt, Artificial Sequence
  Description of Artificial Sequence: Synthetic oligonucleotide
ggugugaaggacucccaau

SEQ ID NO: 356553 - RNA, 19 nt, Artificial Sequence
  Description of Artificial Sequence: Synthetic oligonucleotide
gugauccucagcugcccgu

SEQ ID NO: 356554 - RNA, 19 nt, Artificial Sequence
  Description of Artificial Sequence: Synthetic oligonucleotide
cuauccgaauugccaugaa

SEQ ID NO: 356555 - RNA, 19 nt, Artificial Sequence
  Description of Artificial Sequence: Synthetic oligonucleotide
ccuuacuccccaggugagg

SEQ ID NO: 356556 - RNA, 19 nt, Artificial Sequence
  Description of Artificial Sequence: Synthetic oligonucleotide
caguagucgugcagcccca

SEQ ID NO: 356557 - RNA, 19 nt, Artificial Sequence
  Description of Artificial Sequence: Synthetic oligonucleotide
cucaugcgcuccugccuca

SEQ ID NO: 356558 - RNA, 19 nt, Artificial Sequence
  Description of Artificial Sequence: Synthetic oligonucleotide
gcgacgucgugccuccuca

SEQ ID NO: 356559 - RNA, 19 nt, Artificial Sequence
  Description of Artificial Sequence: Synthetic oligonucleotide
ggcgugcucugaacugacg

SEQ ID NO: 356560 - RNA, 19 nt, Artificial Sequence
  Description of Artificial Sequence: Synthetic oligonucleotide
caacucccgcaguguggac

SEQ ID NO: 356561 - RNA, 19 nt, Artificial Sequence
  Description of Artificial Sequence: Synthetic oligonucleotide
cugucacuagaugaggguu

SEQ ID NO: 356562 - RNA, 19 nt, Artificial Sequence
  Description of Artificial Sequence: Synthetic oligonucleotide
cucgacggaaaugcucaaa

SEQ ID NO: 356563 - RNA, 19 nt, Artificial Sequence
  Description of Artificial Sequence: Synthetic oligonucleotide
ccagucacgguggcggcag

SEQ ID NO: 356564 - RNA, 19 nt, Artificial Sequence
  Description of Artificial Sequence: Synthetic oligonucleotide
cacgggacucuaguuuaga

SEQ ID NO: 356565 - RNA, 19 nt, Artificial Sequence
  Description of Artificial Sequence: Synthetic oligonucleotide
acguccucugaggggcaug

SEQ ID NO: 356566 - RNA, 19 nt, Artificial Sequence
  Description of Artificial Sequence: Synthetic oligonucleotide
ccgaauugccaugaaugga

SEQ ID NO: 356567 - RNA, 19 nt, Artificial Sequence
  Description of Artificial Sequence: Synthetic oligonucleotide
uccuggcgacgucgugccu

SEQ ID NO: 356568 - RNA, 19 nt, Artificial Sequence
  Description of Artificial Sequence: Synthetic oligonucleotide
ucccgcaguguggacgguu

SEQ ID NO: 356569 - RNA, 19 nt, Artificial Sequence
  Description of Artificial Sequence: Synthetic oligonucleotide
ucuguccgacuggcuguaa

SEQ ID NO: 356570 - RNA, 19 nt, Artificial Sequence
  Description of Artificial Sequence: Synthetic oligonucleotide
cugagucgucaguggaacu

SEQ ID NO: 356571 - RNA, 19 nt, Artificial Sequence
  Description of Artificial Sequence: Synthetic oligonucleotide
cuagacuuagcugccucuu

SEQ ID NO: 356572 - RNA, 19 nt, Artificial Sequence
  Description of Artificial Sequence: Synthetic oligonucleotide
ccacugugucugaaggaga

SEQ ID NO: 356573 - RNA, 19 nt, Artificial Sequence
  Description of Artificial Sequence: Synthetic oligonucleotide
gccuugccguuccagucca

SEQ ID NO: 356574 - RNA, 19 nt, Artificial Sequence
  Description of Artificial Sequence: Synthetic oligonucleotide
gcaggagaggacaccguaa

SEQ ID NO: 356575 - RNA, 19 nt, Artificial Sequence
  Description of Artificial Sequence: Synthetic oligonucleotide
gucacgguggcggcagcaa

SEQ ID NO: 356576 - RNA, 19 nt, Artificial Sequence
  Description of Artificial Sequence: Synthetic oligonucleotide
gucaaucguagcugccauu

SEQ ID NO: 356577 - RNA, 19 nt, Artificial Sequence
  Description of Artificial Sequence: Synthetic oligonucleotide
gcugcugcugcugcugcuc

SEQ ID NO: 356578 - RNA, 19 nt, Artificial Sequence
  Description of Artificial Sequence: Synthetic oligonucleotide
cacuacccacagcgcggug

SEQ ID NO: 356579 - RNA, 19 nt, Artificial Sequence
  Description of Artificial Sequence: Synthetic oligonucleotide
ccgccacucaaugaggaga

SEQ ID NO: 356580 - RNA, 19 nt, Artificial Sequence
  Description of Artificial Sequence: Synthetic oligonucleotide
gcacaagcgaacacuuaua

SEQ ID NO: 356581 - RNA, 19 nt, Artificial Sequence
  Description of Artificial Sequence: Synthetic oligonucleotide
ggcgacgucgugccuccuc

SEQ ID NO: 356582 - RNA, 19 nt, Artificial Sequence
  Description of Artificial Sequence: Synthetic oligonucleotide
gcaccaaauuccugggcau

SEQ ID NO: 356583 - RNA, 19 nt, Artificial Sequence
  Description of Artificial Sequence: Synthetic oligonucleotide
cccguuaggccugccccgg

SEQ ID NO: 356584 - RNA, 19 nt, Artificial Sequence
  Description of Artificial Sequence: Synthetic oligonucleotide
cauccucucggcuccucau

SEQ ID NO: 356585 - RNA, 19 nt, Artificial Sequence
  Description of Artificial Sequence: Synthetic oligonucleotide
cccaauggguaggacguca

SEQ ID NO: 356586 - RNA, 19 nt, Artificial Sequence
  Description of Artificial Sequence: Synthetic oligonucleotide
ccaauucccucugcugguc

SEQ ID NO: 356587 - RNA, 19 nt, Artificial Sequence
  Description of Artificial Sequence: Synthetic oligonucleotide
ggggcaugugguaggacgu

SEQ ID NO: 356588 - RNA, 19 nt, Artificial Sequence
  Description of Artificial Sequence: Synthetic oligonucleotide
ggcaugugguaggacgucu

SEQ ID NO: 356589 - RNA, 19 nt, Artificial Sequence
  Description of Artificial Sequence: Synthetic oligonucleotide
gucuguccgacuggcugua

SEQ ID NO: 356590 - RNA, 19 nt, Artificial Sequence
  Description of Artificial Sequence: Synthetic oligonucleotide
cgggacucuaguuuagacu

SEQ ID NO: 356591 - RNA, 19 nt, Artificial Sequence
  Description of Artificial Sequence: Synthetic oligonucleotide
ccacagcgcggugggagcc

SEQ ID NO: 356592 - RNA, 19 nt, Artificial Sequence
  Description of Artificial Sequence: Synthetic oligonucleotide
gacgucuguccgacuggcu

SEQ ID NO: 356593 - RNA, 19 nt, Artificial Sequence
  Description of Artificial Sequence: Synthetic oligonucleotide
gggcucgacgugccuguuc

SEQ ID NO: 356594 - RNA, 19 nt, Artificial Sequence
  Description of Artificial Sequence: Synthetic oligonucleotide
cacgcggggccgcaggccu

SEQ ID NO: 356595 - RNA, 19 nt, Artificial Sequence
  Description of Artificial Sequence: Synthetic oligonucleotide
guaggacgucuguccgacu

SEQ ID NO: 356596 - RNA, 19 nt, Artificial Sequence
  Description of Artificial Sequence: Synthetic oligonucleotide
ggacucuaguuuagacuua

SEQ ID NO: 356597 - RNA, 19 nt, Artificial Sequence
  Description of Artificial Sequence: Synthetic oligonucleotide
cucugcugcugcugcugcu

SEQ ID NO: 356598 - RNA, 19 nt, Artificial Sequence
  Description of Artificial Sequence: Synthetic oligonucleotide
ggagacgaucacaccauuu

SEQ ID NO: 356599 - RNA, 19 nt, Artificial Sequence
  Description of Artificial Sequence: Synthetic oligonucleotide
guaccgcuuugagcugcuc

SEQ ID NO: 356600 - RNA, 19 nt, Artificial Sequence
  Description of Artificial Sequence: Synthetic oligonucleotide
ccguuaggccugccccggg

SEQ ID NO: 356601 - RNA, 19 nt, Artificial Sequence
  Description of Artificial Sequence: Synthetic oligonucleotide
gcucgacggaaaugcucaa

SEQ ID NO: 356602 - RNA, 19 nt, Artificial Sequence
  Description of Artificial Sequence: Synthetic oligonucleotide
ccgccccuaacacuaugga

SEQ ID NO: 356603 - RNA, 19 nt, Artificial Sequence
  Description of Artificial Sequence: Synthetic oligonucleotide
cggcgcucaauuaaaggcu

SEQ ID NO: 356604 - RNA, 19 nt, Artificial Sequence
  Description of Artificial Sequence: Synthetic oligonucleotide
ggcgcucaauuaaaggcuu

SEQ ID NO: 356605 - RNA, 19 nt, Artificial Sequence
  Description of Artificial Sequence: Synthetic oligonucleotide
ugggcucgacgugccuguu

SEQ ID NO: 356606 - RNA, 19 nt, Artificial Sequence
  Description of Artificial Sequence: Synthetic oligonucleotide
gcucgacgugccuguucca

SEQ ID NO: 356607 - RNA, 19 nt, Artificial Sequence
  Description of Artificial Sequence: Synthetic oligonucleotide
ccgcacgcggggccgcagg

SEQ ID NO: 356608 - RNA, 19 nt, Artificial Sequence
  Description of Artificial Sequence: Synthetic oligonucleotide
ccuugccguuccaguccac

SEQ ID NO: 356609 - RNA, 19 nt, Artificial Sequence
  Description of Artificial Sequence: Synthetic oligonucleotide
ccggcacuugacucauacu

SEQ ID NO: 356610 - RNA, 19 nt, Artificial Sequence
  Description of Artificial Sequence: Synthetic oligonucleotide
gcguuccaacucccgcagu

SEQ ID NO: 356611 - RNA, 19 nt, Artificial Sequence
  Description of Artificial Sequence: Synthetic oligonucleotide
ggacuuggcuguggaggau

SEQ ID NO: 356612 - RNA, 19 nt, Artificial Sequence
  Description of Artificial Sequence: Synthetic oligonucleotide
ccuuuucgcgcuccuccuu

SEQ ID NO: 356613 - RNA, 19 nt, Artificial Sequence
  Description of Artificial Sequence: Synthetic oligonucleotide
ccguaacgacaggcucuuc

SEQ ID NO: 356614 - RNA, 19 nt, Artificial Sequence
  Description of Artificial Sequence: Synthetic oligonucleotide
ccgcaggagaggacaccgu

SEQ ID NO: 356615 - RNA, 19 nt, Artificial Sequence
  Description of Artificial Sequence: Synthetic oligonucleotide
cccgcacgcggggccgcag

SEQ ID NO: 356616 - RNA, 19 nt, Artificial Sequence
  Description of Artificial Sequence: Synthetic oligonucleotide
cccuaacacuauggagagu

SEQ ID NO: 356617 - RNA, 19 nt, Artificial Sequence
  Description of Artificial Sequence: Synthetic oligonucleotide
cucccgcaguguggacggu

SEQ ID NO: 356618 - RNA, 19 nt, Artificial Sequence
  Description of Artificial Sequence: Synthetic oligonucleotide
gcucuccgacucagaggau

SEQ ID NO: 356619 - RNA, 19 nt, Artificial Sequence
  Description of Artificial Sequence: Synthetic oligonucleotide
cgacgucgugccuccucau

SEQ ID NO: 356620 - RNA, 19 nt, Artificial Sequence
  Description of Artificial Sequence: Synthetic oligonucleotide
auacauagaggccacagcc

SEQ ID NO: 356621 - RNA, 19 nt, Artificial Sequence
  Description of Artificial Sequence: Synthetic oligonucleotide
aaagucaucgccguguugc

SEQ ID NO: 356622 - RNA, 19 nt, Artificial Sequence
  Description of Artificial Sequence: Synthetic oligonucleotide
aauacauagaggccacagc

SEQ ID NO: 356623 - RNA, 19 nt, Artificial Sequence
  Description of Artificial Sequence: Synthetic oligonucleotide
uuaucuacagcccagcccc

SEQ ID NO: 356624 - RNA, 19 nt, Artificial Sequence
  Description of Artificial Sequence: Synthetic oligonucleotide
uuaucagggaagauuaggg

SEQ ID NO: 356625 - RNA, 19 nt, Artificial Sequence
  Description of Artificial Sequence: Synthetic oligonucleotide
aagauuagggaacaggugu

SEQ ID NO: 356626 - RNA, 19 nt, Artificial Sequence
  Description of Artificial Sequence: Synthetic oligonucleotide
ugggcauaaauacauagag

SEQ ID NO: 356627 - RNA, 19 nt, Artificial Sequence
  Description of Artificial Sequence: Synthetic oligonucleotide
aacacuacacgcuccaauc

SEQ ID NO: 356628 - RNA, 19 nt, Artificial Sequence
  Description of Artificial Sequence: Synthetic oligonucleotide
gacaguaacacuccaaagc

SEQ ID NO: 356629 - RNA, 19 nt, Artificial Sequence
  Description of Artificial Sequence: Synthetic oligonucleotide
ucuaacaacuuaucuacag

SEQ ID NO: 356630 - RNA, 19 nt, Artificial Sequence
  Description of Artificial Sequence: Synthetic oligonucleotide
ucggcaauagcacagugag

SEQ ID NO: 356631 - RNA, 19 nt, Artificial Sequence
  Description of Artificial Sequence: Synthetic oligonucleotide
aaggugguaauaccauacc

SEQ ID NO: 356632 - RNA, 19 nt, Artificial Sequence
  Description of Artificial Sequence: Synthetic oligonucleotide
ugcgaagacaucugcaugg

SEQ ID NO: 356633 - RNA, 19 nt, Artificial Sequence
  Description of Artificial Sequence: Synthetic oligonucleotide
ucugcuaguauucuggauc

SEQ ID NO: 356634 - RNA, 19 nt, Artificial Sequence
  Description of Artificial Sequence: Synthetic oligonucleotide
agaaacaacucauacacau

SEQ ID NO: 356635 - RNA, 19 nt, Artificial Sequence
  Description of Artificial Sequence: Synthetic oligonucleotide
aacaacuuaucuacagccc

SEQ ID NO: 356636 - RNA, 19 nt, Artificial Sequence
  Description of Artificial Sequence: Synthetic oligonucleotide
aggugguaauaccauaccc

SEQ ID NO: 356637 - RNA, 19 nt, Artificial Sequence
  Description of Artificial Sequence: Synthetic oligonucleotide
uagcguuguagcaaggccg

SEQ ID NO: 356638 - RNA, 19 nt, Artificial Sequence
  Description of Artificial Sequence: Synthetic oligonucleotide
aacgccgauagccauucac

SEQ ID NO: 356639 - RNA, 19 nt, Artificial Sequence
  Description of Artificial Sequence: Synthetic oligonucleotide
aaauacauagaggccacag

SEQ ID NO: 356640 - RNA, 19 nt, Artificial Sequence
  Description of Artificial Sequence: Synthetic oligonucleotide
aaagaguagcauggcaagc

SEQ ID NO: 356641 - RNA, 19 nt, Artificial Sequence
  Description of Artificial Sequence: Synthetic oligonucleotide
aauaccauaccccuccuuu

SEQ ID NO: 356642 - RNA, 19 nt, Artificial Sequence
  Description of Artificial Sequence: Synthetic oligonucleotide
caaagcgugaggcagggcg

SEQ ID NO: 356643 - RNA, 19 nt, Artificial Sequence
  Description of Artificial Sequence: Synthetic oligonucleotide
agcgcagaaccucaaagcg

SEQ ID NO: 356644 - RNA, 19 nt, Artificial Sequence
  Description of Artificial Sequence: Synthetic oligonucleotide
gucccaaccacucaucugg

SEQ ID NO: 356645 - RNA, 19 nt, Artificial Sequence
  Description of Artificial Sequence: Synthetic oligonucleotide
agugucacggcccaguucu

SEQ ID NO: 356646 - RNA, 19 nt, Artificial Sequence
  Description of Artificial Sequence: Synthetic oligonucleotide
uucucuaacaacuuaucua

SEQ ID NO: 356647 - RNA, 19 nt, Artificial Sequence
  Description of Artificial Sequence: Synthetic oligonucleotide
ugcgccucaguguaggugg

SEQ ID NO: 356648 - RNA, 19 nt, Artificial Sequence
  Description of Artificial Sequence: Synthetic oligonucleotide
gagaguagauccaugagac

SEQ ID NO: 356649 - RNA, 19 nt, Artificial Sequence
  Description of Artificial Sequence: Synthetic oligonucleotide
agauccaugagacgcagug

SEQ ID NO: 356650 - RNA, 19 nt, Artificial Sequence
  Description of Artificial Sequence: Synthetic oligonucleotide
acuuaucuacagcccagcc

SEQ ID NO: 356651 - RNA, 19 nt, Artificial Sequence
  Description of Artificial Sequence: Synthetic oligonucleotide
aaaguguacuguucuguga

SEQ ID NO: 356652 - RNA, 19 nt, Artificial Sequence
  Description of Artificial Sequence: Synthetic oligonucleotide
aaaacgccgauagccauuc

SEQ ID NO: 356653 - RNA, 19 nt, Artificial Sequence
  Description of Artificial Sequence: Synthetic oligonucleotide
ggcaauagcacagugagcc

SEQ ID NO: 356654 - RNA, 19 nt, Artificial Sequence
  Description of Artificial Sequence: Synthetic oligonucleotide
gguaauaccauaccccucc

SEQ ID NO: 356655 - RNA, 19 nt, Artificial Sequence
  Description of Artificial Sequence: Synthetic oligonucleotide
aagauagagauggguugcc

SEQ ID NO: 356656 - RNA, 19 nt, Artificial Sequence
  Description of Artificial Sequence: Synthetic oligonucleotide
cuuaucuacagcccagccc

SEQ ID NO: 356657 - RNA, 19 nt, Artificial Sequence
  Description of Artificial Sequence: Synthetic oligonucleotide
acaacuuaucuacagccca

SEQ ID NO: 356658 - RNA, 19 nt, Artificial Sequence
  Description of Artificial Sequence: Synthetic oligonucleotide
ucagcugcggcuaucggca

SEQ ID NO: 356659 - RNA, 19 nt, Artificial Sequence
  Description of Artificial Sequence: Synthetic oligonucleotide
auagagauggguugccgag

SEQ ID NO: 356660 - RNA, 19 nt, Artificial Sequence
  Description of Artificial Sequence: Synthetic oligonucleotide
uuggagaguagauccauga

SEQ ID NO: 356661 - RNA, 19 nt, Artificial Sequence
  Description of Artificial Sequence: Synthetic oligonucleotide
agcguggcgagccaucagc

SEQ ID NO: 356662 - RNA, 19 nt, Artificial Sequence
  Description of Artificial Sequence: Synthetic oligonucleotide
auacaguagcagcaggguc

SEQ ID NO: 356663 - RNA, 19 nt, Artificial Sequence
  Description of Artificial Sequence: Synthetic oligonucleotide
agaaccucaaagcgugagg

SEQ ID NO: 356664 - RNA, 19 nt, Artificial Sequence
  Description of Artificial Sequence: Synthetic oligonucleotide
agugcugguugguaacggc

SEQ ID NO: 356665 - RNA, 19 nt, Artificial Sequence
  Description of Artificial Sequence: Synthetic oligonucleotide
ugacaguaacacuccaaag

SEQ ID NO: 356666 - RNA, 19 nt, Artificial Sequence
  Description of Artificial Sequence: Synthetic oligonucleotide
uguagaagcacgccucacu

SEQ ID NO: 356667 - RNA, 19 nt, Artificial Sequence
  Description of Artificial Sequence: Synthetic oligonucleotide
aagaguagcauggcaagcu

SEQ ID NO: 356668 - RNA, 19 nt, Artificial Sequence
  Description of Artificial Sequence: Synthetic oligonucleotide
uggcguugggcauaaauac

SEQ ID NO: 356669 - RNA, 19 nt, Artificial Sequence
  Description of Artificial Sequence: Synthetic oligonucleotide
gaaacgcagaaacaacuca

SEQ ID NO: 356670 - RNA, 19 nt, Artificial Sequence
  Description of Artificial Sequence: Synthetic oligonucleotide
aucagggaagauuagggaa

SEQ ID NO: 356671 - RNA, 19 nt, Artificial Sequence
  Description of Artificial Sequence: Synthetic oligonucleotide
uggagaguagauccaugag

SEQ ID NO: 356672 - RNA, 19 nt, Artificial Sequence
  Description of Artificial Sequence: Synthetic oligonucleotide
agggaaacgccgcucuagc

SEQ ID NO: 356673 - RNA, 19 nt, Artificial Sequence
  Description of Artificial Sequence: Synthetic oligonucleotide
aucggugucccagaguucg

SEQ ID NO: 356674 - RNA, 19 nt, Artificial Sequence
  Description of Artificial Sequence: Synthetic oligonucleotide
gaaggugguaauaccauac

SEQ ID NO: 356675 - RNA, 19 nt, Artificial Sequence
  Description of Artificial Sequence: Synthetic oligonucleotide
caugagacgcaguggagag

SEQ ID NO: 356676 - RNA, 19 nt, Artificial Sequence
  Description of Artificial Sequence: Synthetic oligonucleotide
gauuagggaacaggugugg

SEQ ID NO: 356677 - RNA, 19 nt, Artificial Sequence
  Description of Artificial Sequence: Synthetic oligonucleotide
caucauggauccagaaggg

SEQ ID NO: 356678 - RNA, 19 nt, Artificial Sequence
  Description of Artificial Sequence: Synthetic oligonucleotide
gagccgagaagccucagug

SEQ ID NO: 356679 - RNA, 19 nt, Artificial Sequence
  Description of Artificial Sequence: Synthetic oligonucleotide
ugcuggaaugcccacuggc

SEQ ID NO: 356680 - RNA, 19 nt, Artificial Sequence
  Description of Artificial Sequence: Synthetic oligonucleotide
ccgaccaagauagagaugg

SEQ ID NO: 356681 - RNA, 19 nt, Artificial Sequence
  Description of Artificial Sequence: Synthetic oligonucleotide
agaaacgcagaaacaacuc

SEQ ID NO: 356682 - RNA, 19 nt, Artificial Sequence
  Description of Artificial Sequence: Synthetic oligonucleotide
cagaguuguagaagcacgc

SEQ ID NO: 356683 - RNA, 19 nt, Artificial Sequence
  Description of Artificial Sequence: Synthetic oligonucleotide
agcacagugagccgagaag

SEQ ID NO: 356684 - RNA, 19 nt, Artificial Sequence
  Description of Artificial Sequence: Synthetic oligonucleotide
caagauagagauggguugc

SEQ ID NO: 356685 - RNA, 19 nt, Artificial Sequence
  Description of Artificial Sequence: Synthetic oligonucleotide
gauagagauggguugccga

SEQ ID NO: 356686 - RNA, 19 nt, Artificial Sequence
  Description of Artificial Sequence: Synthetic oligonucleotide
ugcaauucucgaaucuccu

SEQ ID NO: 356687 - RNA, 19 nt, Artificial Sequence
  Description of Artificial Sequence: Synthetic oligonucleotide
guagcguuguagcaaggcc

SEQ ID NO: 356688 - RNA, 19 nt, Artificial Sequence
  Description of Artificial Sequence: Synthetic oligonucleotide
ugcgugacaguaacacucc

SEQ ID NO: 356689 - RNA, 19 nt, Artificial Sequence
  Description of Artificial Sequence: Synthetic oligonucleotide
uugaccggugcgaagacau

SEQ ID NO: 356690 - RNA, 19 nt, Artificial Sequence
  Description of Artificial Sequence: Synthetic oligonucleotide
cacuacacgcuccaaucgg

SEQ ID NO: 356691 - RNA, 19 nt, Artificial Sequence
  Description of Artificial Sequence: Synthetic oligonucleotide
aaacgcagaaacaacucau

SEQ ID NO: 356692 - RNA, 19 nt, Artificial Sequence
  Description of Artificial Sequence: Synthetic oligonucleotide
cauugcggcagcuuuccag

SEQ ID NO: 356693 - RNA, 19 nt, Artificial Sequence
  Description of Artificial Sequence: Synthetic oligonucleotide
aguagcauggcaagcuggg

SEQ ID NO: 356694 - RNA, 19 nt, Artificial Sequence
  Description of Artificial Sequence: Synthetic oligonucleotide
ucugggcgagcacugacga

SEQ ID NO: 356695 - RNA, 19 nt, Artificial Sequence
  Description of Artificial Sequence: Synthetic oligonucleotide
caacuuaucuacagcccag

SEQ ID NO: 356696 - RNA, 19 nt, Artificial Sequence
  Description of Artificial Sequence: Synthetic oligonucleotide
uccacgggccgucacguag

SEQ ID NO: 356697 - RNA, 19 nt, Artificial Sequence
  Description of Artificial Sequence: Synthetic oligonucleotide
cacgccuguggcaucaagg

SEQ ID NO: 356698 - RNA, 19 nt, Artificial Sequence
  Description of Artificial Sequence: Synthetic oligonucleotide
cucagcugcggcuaucggc

SEQ ID NO: 356699 - RNA, 19 nt, Artificial Sequence
  Description of Artificial Sequence: Synthetic oligonucleotide
ucaaggaugcaccguccca

SEQ ID NO: 356700 - RNA, 19 nt, Artificial Sequence
  Description of Artificial Sequence: Synthetic oligonucleotide
uaccauaccccuccuuucu

SEQ ID NO: 356701 - RNA, 19 nt, Artificial Sequence
  Description of Artificial Sequence: Synthetic oligonucleotide
auuagggaacagguguggg

SEQ ID NO: 356702 - RNA, 19 nt, Artificial Sequence
  Description of Artificial Sequence: Synthetic oligonucleotide
uacccuucgggugaggggc

SEQ ID NO: 356703 - RNA, 19 nt, Artificial Sequence
  Description of Artificial Sequence: Synthetic oligonucleotide
gaguagcauggcaagcugg

SEQ ID NO: 356704 - RNA, 19 nt, Artificial Sequence
  Description of Artificial Sequence: Synthetic oligonucleotide
acacgcuccaaucgguguc

SEQ ID NO: 356705 - RNA, 19 nt, Artificial Sequence
  Description of Artificial Sequence: Synthetic oligonucleotide
acgccgauagccauucacc

SEQ ID NO: 356706 - RNA, 19 nt, Artificial Sequence
  Description of Artificial Sequence: Synthetic oligonucleotide
cagagugucuagugggugc

SEQ ID NO: 356707 - RNA, 19 nt, Artificial Sequence
  Description of Artificial Sequence: Synthetic oligonucleotide
aacguggccugugagguca

SEQ ID NO: 356708 - RNA, 19 nt, Artificial Sequence
  Description of Artificial Sequence: Synthetic oligonucleotide
agaguagcauggcaagcug

SEQ ID NO: 356709 - RNA, 19 nt, Artificial Sequence
  Description of Artificial Sequence: Synthetic oligonucleotide
uugguaacggcgguugagc

SEQ ID NO: 356710 - RNA, 19 nt, Artificial Sequence
  Description of Artificial Sequence: Synthetic oligonucleotide
ucgggcaccagggaaacgc

SEQ ID NO: 356711 - RNA, 19 nt, Artificial Sequence
  Description of Artificial Sequence: Synthetic oligonucleotide
cccaguguaggcaacgugg

SEQ ID NO: 356712 - RNA, 19 nt, Artificial Sequence
  Description of Artificial Sequence: Synthetic oligonucleotide
ggagaguagauccaugaga

SEQ ID NO: 356713 - RNA, 19 nt, Artificial Sequence
  Description of Artificial Sequence: Synthetic oligonucleotide
uuauuaaagccagggcuuc

SEQ ID NO: 356714 - RNA, 19 nt, Artificial Sequence
  Description of Artificial Sequence: Synthetic oligonucleotide
ggcauugcggaaacgaggg

SEQ ID NO: 356715 - RNA, 19 nt, Artificial Sequence
  Description of Artificial Sequence: Synthetic oligonucleotide
uccaugagacgcaguggag

SEQ ID NO: 356716 - RNA, 19 nt, Artificial Sequence
  Description of Artificial Sequence: Synthetic oligonucleotide
ugguacaugugcacagggu

SEQ ID NO: 356717 - RNA, 19 nt, Artificial Sequence
  Description of Artificial Sequence: Synthetic oligonucleotide
ugggccuaggugcuguuac

SEQ ID NO: 356718 - RNA, 19 nt, Artificial Sequence
  Description of Artificial Sequence: Synthetic oligonucleotide
agauggugcuggaaugccc

SEQ ID NO: 356719 - RNA, 19 nt, Artificial Sequence
  Description of Artificial Sequence: Synthetic oligonucleotide
ugugcgugacaguaacacu

SEQ ID NO: 356720 - RNA, 19 nt, Artificial Sequence
  Description of Artificial Sequence: Synthetic oligonucleotide
uggcaaacgccuugugcag

SEQ ID NO: 356721 - RNA, 19 nt, Artificial Sequence
  Description of Artificial Sequence: Synthetic oligonucleotide
gaaguaaucccagcgcaga

SEQ ID NO: 356722 - RNA, 19 nt, Artificial Sequence
  Description of Artificial Sequence: Synthetic oligonucleotide
agggucauacacagggugg

SEQ ID NO: 356723 - RNA, 19 nt, Artificial Sequence
  Description of Artificial Sequence: Synthetic oligonucleotide
acccuguuccugcucaaag

SEQ ID NO: 356724 - RNA, 19 nt, Artificial Sequence
  Description of Artificial Sequence: Synthetic oligonucleotide
aggaacacuacacgcucca

SEQ ID NO: 356725 - RNA, 19 nt, Artificial Sequence
  Description of Artificial Sequence: Synthetic oligonucleotide
cacagugagccgagaagcc

SEQ ID NO: 356726 - RNA, 19 nt, Artificial Sequence
  Description of Artificial Sequence: Synthetic oligonucleotide
cuaguauucuggaucucca

SEQ ID NO: 356727 - RNA, 19 nt, Artificial Sequence
  Description of Artificial Sequence: Synthetic oligonucleotide
aucaaaacgccgauagcca

SEQ ID NO: 356728 - RNA, 19 nt, Artificial Sequence
  Description of Artificial Sequence: Synthetic oligonucleotide
ugucaccacggccaugccu

SEQ ID NO: 356729 - RNA, 19 nt, Artificial Sequence
  Description of Artificial Sequence: Synthetic oligonucleotide
aacaacucauacacaucca

SEQ ID NO: 356730 - RNA, 19 nt, Artificial Sequence
  Description of Artificial Sequence: Synthetic oligonucleotide
ucgagcaugcucuggcgac

SEQ ID NO: 356731 - RNA, 19 nt, Artificial Sequence
  Description of Artificial Sequence: Synthetic oligonucleotide
ugucauugcggcagcuuuc

SEQ ID NO: 356732 - RNA, 19 nt, Artificial Sequence
  Description of Artificial Sequence: Synthetic oligonucleotide
gggcauaaauacauagagg

SEQ ID NO: 356733 - RNA, 19 nt, Artificial Sequence
  Description of Artificial Sequence: Synthetic oligonucleotide
uggcgaucaaaguggccag

SEQ ID NO: 356734 - RNA, 19 nt, Artificial Sequence
  Description of Artificial Sequence: Synthetic oligonucleotide
agcguuguagcaaggccgg

SEQ ID NO: 356735 - RNA, 19 nt, Artificial Sequence
  Description of Artificial Sequence: Synthetic oligonucleotide
agguuaucagggaagauua

SEQ ID NO: 356736 - RNA, 19 nt, Artificial Sequence
  Description of Artificial Sequence: Synthetic oligonucleotide
gugcgugacaguaacacuc

SEQ ID NO: 356737 - RNA, 19 nt, Artificial Sequence
  Description of Artificial Sequence: Synthetic oligonucleotide
gugugcgugacaguaacac

SEQ ID NO: 356738 - RNA, 19 nt, Artificial Sequence
  Description of Artificial Sequence: Synthetic oligonucleotide
ugguugguaacggcgguug

SEQ ID NO: 356739 - RNA, 19 nt, Artificial Sequence
  Description of Artificial Sequence: Synthetic oligonucleotide
gagaaacgcagaaacaacu

SEQ ID NO: 356740 - RNA, 19 nt, Artificial Sequence
  Description of Artificial Sequence: Synthetic oligonucleotide
aagucaucgccguguugcu

SEQ ID NO: 356741 - RNA, 19 nt, Artificial Sequence
  Description of Artificial Sequence: Synthetic oligonucleotide
gagaguuguagugcacacc

SEQ ID NO: 356742 - RNA, 19 nt, Artificial Sequence
  Description of Artificial Sequence: Synthetic oligonucleotide
uacacgcuccaaucggugu

SEQ ID NO: 356743 - RNA, 19 nt, Artificial Sequence
  Description of Artificial Sequence: Synthetic oligonucleotide
gcuguuacccuguuccugc

SEQ ID NO: 356744 - RNA, 19 nt, Artificial Sequence
  Description of Artificial Sequence: Synthetic oligonucleotide
agaaggugguaauaccaua

SEQ ID NO: 356745 - RNA, 19 nt, Artificial Sequence
  Description of Artificial Sequence: Synthetic oligonucleotide
augucauugcggcagcuuu

SEQ ID NO: 356746 - RNA, 19 nt, Artificial Sequence
  Description of Artificial Sequence: Synthetic oligonucleotide
guacccuucgggugagggg

SEQ ID NO: 356747 - RNA, 19 nt, Artificial Sequence
  Description of Artificial Sequence: Synthetic oligonucleotide
cacguagccaguuuauuaa

SEQ ID NO: 356748 - RNA, 19 nt, Artificial Sequence
  Description of Artificial Sequence: Synthetic oligonucleotide
ccuggcguggcucauacag

SEQ ID NO: 356749 - RNA, 19 nt, Artificial Sequence
  Description of Artificial Sequence: Synthetic oligonucleotide
uguagcaaggccgguucca

SEQ ID NO: 356750 - RNA, 19 nt, Artificial Sequence
  Description of Artificial Sequence: Synthetic oligonucleotide
gugcugguugguaacggcg

SEQ ID NO: 356751 - RNA, 19 nt, Artificial Sequence
  Description of Artificial Sequence: Synthetic oligonucleotide
uauuaaagccagggcuuca

SEQ ID NO: 356752 - RNA, 19 nt, Artificial Sequence
  Description of Artificial Sequence: Synthetic oligonucleotide
ugguaacggcgguugagcu

SEQ ID NO: 356753 - RNA, 19 nt, Artificial Sequence
  Description of Artificial Sequence: Synthetic oligonucleotide
uaggcaacguggccuguga

SEQ ID NO: 356754 - RNA, 19 nt, Artificial Sequence
  Description of Artificial Sequence: Synthetic oligonucleotide
cacagggugggcugucacg

SEQ ID NO: 356755 - RNA, 19 nt, Artificial Sequence
  Description of Artificial Sequence: Synthetic oligonucleotide
guugguaacggcgguugag

SEQ ID NO: 356756 - RNA, 19 nt, Artificial Sequence
  Description of Artificial Sequence: Synthetic oligonucleotide
cagugugcgugacaguaac

SEQ ID NO: 356757 - RNA, 19 nt, Artificial Sequence
  Description of Artificial Sequence: Synthetic oligonucleotide
ugagccgagaagccucagu

SEQ ID NO: 356758 - RNA, 19 nt, Artificial Sequence
  Description of Artificial Sequence: Synthetic oligonucleotide
ugcuguuacccuguuccug

SEQ ID NO: 356759 - RNA, 19 nt, Artificial Sequence
  Description of Artificial Sequence: Synthetic oligonucleotide
uucgguucacagccacgcc

SEQ ID NO: 356760 - RNA, 19 nt, Artificial Sequence
  Description of Artificial Sequence: Synthetic oligonucleotide
gcuaguauucuggaucucc

SEQ ID NO: 356761 - RNA, 19 nt, Artificial Sequence
  Description of Artificial Sequence: Synthetic oligonucleotide
gaguucgguucacagccac

SEQ ID NO: 356762 - RNA, 19 nt, Artificial Sequence
  Description of Artificial Sequence: Synthetic oligonucleotide
guagauccaugagacgcag

SEQ ID NO: 356763 - RNA, 19 nt, Artificial Sequence
  Description of Artificial Sequence: Synthetic oligonucleotide
gaaacgccgcucuagcucu

SEQ ID NO: 356764 - RNA, 19 nt, Artificial Sequence
  Description of Artificial Sequence: Synthetic oligonucleotide
accagggaaacgccgcucu

SEQ ID NO: 356765 - RNA, 19 nt, Artificial Sequence
  Description of Artificial Sequence: Synthetic oligonucleotide
uggcguggcucauacagua

SEQ ID NO: 356766 - RNA, 19 nt, Artificial Sequence
  Description of Artificial Sequence: Synthetic oligonucleotide
cuacacgcuccaaucggug

SEQ ID NO: 356767 - RNA, 19 nt, Artificial Sequence
  Description of Artificial Sequence: Synthetic oligonucleotide
uaaucccagcgcagaaccu

SEQ ID NO: 356768 - RNA, 19 nt, Artificial Sequence
  Description of Artificial Sequence: Synthetic oligonucleotide
augcaugcggcagcgguuc

SEQ ID NO: 356769 - RNA, 19 nt, Artificial Sequence
  Description of Artificial Sequence: Synthetic oligonucleotide
gccguguugcuccagcagg

SEQ ID NO: 356770 - RNA, 19 nt, Artificial Sequence
  Description of Artificial Sequence: Synthetic oligonucleotide
gcggcuaucggcaauagca

SEQ ID NO: 356771 - RNA, 19 nt, Artificial Sequence
  Description of Artificial Sequence: Synthetic oligonucleotide
gauggguugccgaggcaag

SEQ ID NO: 356772 - RNA, 19 nt, Artificial Sequence
  Description of Artificial Sequence: Synthetic oligonucleotide
guacagcccacgccugugg

SEQ ID NO: 356773 - RNA, 19 nt, Artificial Sequence
  Description of Artificial Sequence: Synthetic oligonucleotide
cugcaaguccaauguguac

SEQ ID NO: 356774 - RNA, 19 nt, Artificial Sequence
  Description of Artificial Sequence: Synthetic oligonucleotide
gaaguccuggggccgacca

SEQ ID NO: 356775 - RNA, 19 nt, Artificial Sequence
  Description of Artificial Sequence: Synthetic oligonucleotide
cagugagccgagaagccuc

SEQ ID NO: 356776 - RNA, 19 nt, Artificial Sequence
  Description of Artificial Sequence: Synthetic oligonucleotide
gucuagugggugcuucuug

SEQ ID NO: 356777 - RNA, 19 nt, Artificial Sequence
  Description of Artificial Sequence: Synthetic oligonucleotide
aaucggugucccagaguuc

SEQ ID NO: 356778 - RNA, 19 nt, Artificial Sequence
  Description of Artificial Sequence: Synthetic oligonucleotide
cacugacgaugucauugcg

SEQ ID NO: 356779 - RNA, 19 nt, Artificial Sequence
  Description of Artificial Sequence: Synthetic oligonucleotide
gcugucacggcauugcgga

SEQ ID NO: 356780 - RNA, 19 nt, Artificial Sequence
  Description of Artificial Sequence: Synthetic oligonucleotide
ucggcucaggggccggagg

SEQ ID NO: 356781 - RNA, 19 nt, Artificial Sequence
  Description of Artificial Sequence: Synthetic oligonucleotide
ugcccuagggucugaggcu

SEQ ID NO: 356782 - RNA, 19 nt, Artificial Sequence
  Description of Artificial Sequence: Synthetic oligonucleotide
agcagugugcgugacagua

SEQ ID NO: 356783 - RNA, 19 nt, Artificial Sequence
  Description of Artificial Sequence: Synthetic oligonucleotide
ugcggcuaucggcaauagc

SEQ ID NO: 356784 - RNA, 19 nt, Artificial Sequence
  Description of Artificial Sequence: Synthetic oligonucleotide
agcacgccucacuggcagc

SEQ ID NO: 356785 - RNA, 19 nt, Artificial Sequence
  Description of Artificial Sequence: Synthetic oligonucleotide
ugguacgugcgguccagcu

SEQ ID NO: 356786 - RNA, 19 nt, Artificial Sequence
  Description of Artificial Sequence: Synthetic oligonucleotide
aucugggcgagcacugacg

SEQ ID NO: 356787 - RNA, 19 nt, Artificial Sequence
  Description of Artificial Sequence: Synthetic oligonucleotide
cagggcgagauggugcugg

SEQ ID NO: 356788 - RNA, 19 nt, Artificial Sequence
  Description of Artificial Sequence: Synthetic oligonucleotide
cuucucuaacaacuuaucu

SEQ ID NO: 356789 - RNA, 19 nt, Artificial Sequence
  Description of Artificial Sequence: Synthetic oligonucleotide
uucuacacguagccaguuu

SEQ ID NO: 356790 - RNA, 19 nt, Artificial Sequence
  Description of Artificial Sequence: Synthetic oligonucleotide
ugucacggcauugcggaaa

SEQ ID NO: 356791 - RNA, 19 nt, Artificial Sequence
  Description of Artificial Sequence: Synthetic oligonucleotide
uggguugccgaggcaaggc

SEQ ID NO: 356792 - RNA, 19 nt, Artificial Sequence
  Description of Artificial Sequence: Synthetic oligonucleotide
uguccggcggccccgcgca

SEQ ID NO: 356793 - RNA, 19 nt, Artificial Sequence
  Description of Artificial Sequence: Synthetic oligonucleotide
ugacgaugucauugcggca

SEQ ID NO: 356794 - RNA, 19 nt, Artificial Sequence
  Description of Artificial Sequence: Synthetic oligonucleotide
uucgggugaggggccagcg

SEQ ID NO: 356795 - RNA, 19 nt, Artificial Sequence
  Description of Artificial Sequence: Synthetic oligonucleotide
ucggugucccagaguucgg

SEQ ID NO: 356796 - RNA, 19 nt, Artificial Sequence
  Description of Artificial Sequence: Synthetic oligonucleotide
acguagccaguuuauuaaa

SEQ ID NO: 356797 - RNA, 19 nt, Artificial Sequence
  Description of Artificial Sequence: Synthetic oligonucleotide
ucaguguagguggcaucag

SEQ ID NO: 356798 - RNA, 19 nt, Artificial Sequence
  Description of Artificial Sequence: Synthetic oligonucleotide
aucauggauccagaaggga

SEQ ID NO: 356799 - RNA, 19 nt, Artificial Sequence
  Description of Artificial Sequence: Synthetic oligonucleotide
agagugucuagugggugcu

SEQ ID NO: 356800 - RNA, 19 nt, Artificial Sequence
  Description of Artificial Sequence: Synthetic oligonucleotide
acagugagccgagaagccu

SEQ ID NO: 356801 - RNA, 19 nt, Artificial Sequence
  Description of Artificial Sequence: Synthetic oligonucleotide
cagcacaggagaaagugua

SEQ ID NO: 356802 - RNA, 19 nt, Artificial Sequence
  Description of Artificial Sequence: Synthetic oligonucleotide
ggaucaaaacgccgauagc

SEQ ID NO: 356803 - RNA, 19 nt, Artificial Sequence
  Description of Artificial Sequence: Synthetic oligonucleotide
uccaugcgccucaguguag

SEQ ID NO: 356804 - RNA, 19 nt, Artificial Sequence
  Description of Artificial Sequence: Synthetic oligonucleotide
ggcaguaucggccuggggu

SEQ ID NO: 356805 - RNA, 19 nt, Artificial Sequence
  Description of Artificial Sequence: Synthetic oligonucleotide
gucacggcauugcggaaac

SEQ ID NO: 356806 - RNA, 19 nt, Artificial Sequence
  Description of Artificial Sequence: Synthetic oligonucleotide
guuguagugcacacccuca

SEQ ID NO: 356807 - RNA, 19 nt, Artificial Sequence
  Description of Artificial Sequence: Synthetic oligonucleotide
gguagcguuguagcaaggc

SEQ ID NO: 356808 - RNA, 19 nt, Artificial Sequence
  Description of Artificial Sequence: Synthetic oligonucleotide
aguucgguucacagccacg

SEQ ID NO: 356809 - RNA, 19 nt, Artificial Sequence
  Description of Artificial Sequence: Synthetic oligonucleotide
auggguugccgaggcaagg

SEQ ID NO: 356810 - RNA, 19 nt, Artificial Sequence
  Description of Artificial Sequence: Synthetic oligonucleotide
cugggugcgggagccaagg

SEQ ID NO: 356811 - RNA, 19 nt, Artificial Sequence
  Description of Artificial Sequence: Synthetic oligonucleotide
acuacacgcuccaaucggu

SEQ ID NO: 356812 - RNA, 19 nt, Artificial Sequence
  Description of Artificial Sequence: Synthetic oligonucleotide
caaucggugucccagaguu

SEQ ID NO: 356813 - RNA, 19 nt, Artificial Sequence
  Description of Artificial Sequence: Synthetic oligonucleotide
aggcaacguggccugugag

SEQ ID NO: 356814 - RNA, 19 nt, Artificial Sequence
  Description of Artificial Sequence: Synthetic oligonucleotide
cgcagaaccucaaagcgug

SEQ ID NO: 356815 - RNA, 19 nt, Artificial Sequence
  Description of Artificial Sequence: Synthetic oligonucleotide
gcguggcucauacaguagc

SEQ ID NO: 356816 - RNA, 19 nt, Artificial Sequence
  Description of Artificial Sequence: Synthetic oligonucleotide
cagugcugguugguaacgg

SEQ ID NO: 356817 - RNA, 19 nt, Artificial Sequence
  Description of Artificial Sequence: Synthetic oligonucleotide
agucaucgccguguugcuc

SEQ ID NO: 356818 - RNA, 19 nt, Artificial Sequence
  Description of Artificial Sequence: Synthetic oligonucleotide
cugcuaguauucuggaucu

SEQ ID NO: 356819 - RNA, 19 nt, Artificial Sequence
  Description of Artificial Sequence: Synthetic oligonucleotide
guggcaucaggcacuagga

SEQ ID NO: 356820 - RNA, 19 nt, Artificial Sequence
  Description of Artificial Sequence: Synthetic oligonucleotide
ggcaagaucuccacucggc

SEQ ID NO: 356821 - RNA, 19 nt, Artificial Sequence
  Description of Artificial Sequence: Synthetic oligonucleotide
caugcggcagcgguucaag

SEQ ID NO: 356822 - RNA, 19 nt, Artificial Sequence
  Description of Artificial Sequence: Synthetic oligonucleotide
acgcagugggcagcguggc

SEQ ID NO: 356823 - RNA, 19 nt, Artificial Sequence
  Description of Artificial Sequence: Synthetic oligonucleotide
cacgcuccaaucggugucc

SEQ ID NO: 356824 - RNA, 19 nt, Artificial Sequence
  Description of Artificial Sequence: Synthetic oligonucleotide
cguagccaguuuauuaaag

SEQ ID NO: 356825 - RNA, 19 nt, Artificial Sequence
  Description of Artificial Sequence: Synthetic oligonucleotide
gaagcccguucuccaucag

SEQ ID NO: 356826 - RNA, 19 nt, Artificial Sequence
  Description of Artificial Sequence: Synthetic oligonucleotide
uacacguagccaguuuauu

SEQ ID NO: 356827 - RNA, 19 nt, Artificial Sequence
  Description of Artificial Sequence: Synthetic oligonucleotide
guccaugcgccucagugua

SEQ ID NO: 356828 - RNA, 19 nt, Artificial Sequence
  Description of Artificial Sequence: Synthetic oligonucleotide
uuucuacacguagccaguu

SEQ ID NO: 356829 - RNA, 19 nt, Artificial Sequence
  Description of Artificial Sequence: Synthetic oligonucleotide
ugcggaaacgagggucccc

SEQ ID NO: 356830 - RNA, 19 nt, Artificial Sequence
  Description of Artificial Sequence: Synthetic oligonucleotide
guagcaaggccgguuccac

SEQ ID NO: 356831 - RNA, 19 nt, Artificial Sequence
  Description of Artificial Sequence: Synthetic oligonucleotide
gguuaucagggaagauuag

SEQ ID NO: 356832 - RNA, 19 nt, Artificial Sequence
  Description of Artificial Sequence: Synthetic oligonucleotide
gauccucacugagccgugc

SEQ ID NO: 356833 - RNA, 19 nt, Artificial Sequence
  Description of Artificial Sequence: Synthetic oligonucleotide
gucaggaacacuacacgcu

SEQ ID NO: 356834 - RNA, 19 nt, Artificial Sequence
  Description of Artificial Sequence: Synthetic oligonucleotide
guugccgaggcaaggcuga

SEQ ID NO: 356835 - RNA, 19 nt, Artificial Sequence
  Description of Artificial Sequence: Synthetic oligonucleotide
gucacguagucagaguugu

SEQ ID NO: 356836 - RNA, 19 nt, Artificial Sequence
  Description of Artificial Sequence: Synthetic oligonucleotide
acgcccaguguaggcaacg

SEQ ID NO: 356837 - RNA, 19 nt, Artificial Sequence
  Description of Artificial Sequence: Synthetic oligonucleotide
uuacccuguuccugcucaa

SEQ ID NO: 356838 - RNA, 19 nt, Artificial Sequence
  Description of Artificial Sequence: Synthetic oligonucleotide
aaacgccgauagccauuca

SEQ ID NO: 356839 - RNA, 19 nt, Artificial Sequence
  Description of Artificial Sequence: Synthetic oligonucleotide
caaggaugcaccgucccaa

SEQ ID NO: 356840 - RNA, 19 nt, Artificial Sequence
  Description of Artificial Sequence: Synthetic oligonucleotide
cucgagcaugcucuggcga

SEQ ID NO: 356841 - RNA, 19 nt, Artificial Sequence
  Description of Artificial Sequence: Synthetic oligonucleotide
augcgccucaguguaggug

SEQ ID NO: 356842 - RNA, 19 nt, Artificial Sequence
  Description of Artificial Sequence: Synthetic oligonucleotide
gcccgcagcacaugcaagc

SEQ ID NO: 356843 - RNA, 19 nt, Artificial Sequence
  Description of Artificial Sequence: Synthetic oligonucleotide
cagcacaugcaagcuggag

SEQ ID NO: 356844 - RNA, 19 nt, Artificial Sequence
  Description of Artificial Sequence: Synthetic oligonucleotide
uggggcgucagcgcuucca

SEQ ID NO: 356845 - RNA, 19 nt, Artificial Sequence
  Description of Artificial Sequence: Synthetic oligonucleotide
ucaucgccguguugcucca

SEQ ID NO: 356846 - RNA, 19 nt, Artificial Sequence
  Description of Artificial Sequence: Synthetic oligonucleotide
guaggcaacguggccugug

SEQ ID NO: 356847 - RNA, 19 nt, Artificial Sequence
  Description of Artificial Sequence: Synthetic oligonucleotide
ggcuaucggcaauagcaca

SEQ ID NO: 356848 - RNA, 19 nt, Artificial Sequence
  Description of Artificial Sequence: Synthetic oligonucleotide
cacugagccgugcacugca

SEQ ID NO: 356849 - RNA, 19 nt, Artificial Sequence
  Description of Artificial Sequence: Synthetic oligonucleotide
ggcuggaucaaaacgccga

SEQ ID NO: 356850 - RNA, 19 nt, Artificial Sequence
  Description of Artificial Sequence: Synthetic oligonucleotide
ggcugucacggcauugcgg

SEQ ID NO: 356851 - RNA, 19 nt, Artificial Sequence
  Description of Artificial Sequence: Synthetic oligonucleotide
uacgugcgguccagcucag

SEQ ID NO: 356852 - RNA, 19 nt, Artificial Sequence
  Description of Artificial Sequence: Synthetic oligonucleotide
caccggucaggaacacuac

SEQ ID NO: 356853 - RNA, 19 nt, Artificial Sequence
  Description of Artificial Sequence: Synthetic oligonucleotide
ucacggcauugcggaaacg

SEQ ID NO: 356854 - RNA, 19 nt, Artificial Sequence
  Description of Artificial Sequence: Synthetic oligonucleotide
ccgguagcguuguagcaag

SEQ ID NO: 356855 - RNA, 19 nt, Artificial Sequence
  Description of Artificial Sequence: Synthetic oligonucleotide
ugucuagugggugcuucuu

SEQ ID NO: 356856 - RNA, 19 nt, Artificial Sequence
  Description of Artificial Sequence: Synthetic oligonucleotide
gaccggugcgaagacaucu

SEQ ID NO: 356857 - RNA, 19 nt, Artificial Sequence
  Description of Artificial Sequence: Synthetic oligonucleotide
cagguguccgaugggccgc

SEQ ID NO: 356858 - RNA, 19 nt, Artificial Sequence
  Description of Artificial Sequence: Synthetic oligonucleotide
ucaaagcgugaggcagggc

SEQ ID NO: 356859 - RNA, 19 nt, Artificial Sequence
  Description of Artificial Sequence: Synthetic oligonucleotide
ucuggcgacagcgguggua

SEQ ID NO: 356860 - RNA, 19 nt, Artificial Sequence
  Description of Artificial Sequence: Synthetic oligonucleotide
acgcuccaaucgguguccc

SEQ ID NO: 356861 - RNA, 19 nt, Artificial Sequence
  Description of Artificial Sequence: Synthetic oligonucleotide
accgucccaaccacucauc

SEQ ID NO: 356862 - RNA, 19 nt, Artificial Sequence
  Description of Artificial Sequence: Synthetic oligonucleotide
ggcgguugagcucuucuaa

SEQ ID NO: 356863 - RNA, 19 nt, Artificial Sequence
  Description of Artificial Sequence: Synthetic oligonucleotide
ccgugcacugcaaggcugg

SEQ ID NO: 356864 - RNA, 19 nt, Artificial Sequence
  Description of Artificial Sequence: Synthetic oligonucleotide
agugagccgagaagccuca

SEQ ID NO: 356865 - RNA, 19 nt, Artificial Sequence
  Description of Artificial Sequence: Synthetic oligonucleotide
guagguggcaucaggcacu

SEQ ID NO: 356866 - RNA, 19 nt, Artificial Sequence
  Description of Artificial Sequence: Synthetic oligonucleotide
gggcugucacggcauugcg

SEQ ID NO: 356867 - RNA, 19 nt, Artificial Sequence
  Description of Artificial Sequence: Synthetic oligonucleotide
cuaggugcuguuacccugu

SEQ ID NO: 356868 - RNA, 19 nt, Artificial Sequence
  Description of Artificial Sequence: Synthetic oligonucleotide
agugugcgugacaguaaca

SEQ ID NO: 356869 - RNA, 19 nt, Artificial Sequence
  Description of Artificial Sequence: Synthetic oligonucleotide
accggugcgaagacaucug

SEQ ID NO: 356870 - RNA, 19 nt, Artificial Sequence
  Description of Artificial Sequence: Synthetic oligonucleotide
ccucgagcaugcucuggcg

SEQ ID NO: 356871 - RNA, 19 nt, Artificial Sequence
  Description of Artificial Sequence: Synthetic oligonucleotide
ggucacgcucagcugcggc

SEQ ID NO: 356872 - RNA, 19 nt, Artificial Sequence
  Description of Artificial Sequence: Synthetic oligonucleotide
gggcuggaucaaaacgccg

SEQ ID NO: 356873 - RNA, 19 nt, Artificial Sequence
  Description of Artificial Sequence: Synthetic oligonucleotide
cuccaaucggugucccaga

SEQ ID NO: 356874 - RNA, 19 nt, Artificial Sequence
  Description of Artificial Sequence: Synthetic oligonucleotide
acccuucgggugaggggcc

SEQ ID NO: 356875 - RNA, 19 nt, Artificial Sequence
  Description of Artificial Sequence: Synthetic oligonucleotide
cuucgggugaggggccagc

SEQ ID NO: 356876 - RNA, 19 nt, Artificial Sequence
  Description of Artificial Sequence: Synthetic oligonucleotide
ccaugcgccucaguguagg

SEQ ID NO: 356877 - RNA, 19 nt, Artificial Sequence
  Description of Artificial Sequence: Synthetic oligonucleotide
aggguguccggcggccccg

SEQ ID NO: 356878 - RNA, 19 nt, Artificial Sequence
  Description of Artificial Sequence: Synthetic oligonucleotide
ggcgucagcgcuuccagcu

SEQ ID NO: 356879 - RNA, 19 nt, Artificial Sequence
  Description of Artificial Sequence: Synthetic oligonucleotide
ggcguugggcauaaauaca

SEQ ID NO: 356880 - RNA, 19 nt, Artificial Sequence
  Description of Artificial Sequence: Synthetic oligonucleotide
ggccgucacguagucagag

SEQ ID NO: 356881 - RNA, 19 nt, Artificial Sequence
  Description of Artificial Sequence: Synthetic oligonucleotide
uguaggcaacguggccugu

SEQ ID NO: 356882 - RNA, 19 nt, Artificial Sequence
  Description of Artificial Sequence: Synthetic oligonucleotide
ggccgaccaagauagagau

SEQ ID NO: 356883 - RNA, 19 nt, Artificial Sequence
  Description of Artificial Sequence: Synthetic oligonucleotide
ccgcgcaccggucaggaac

SEQ ID NO: 356884 - RNA, 19 nt, Artificial Sequence
  Description of Artificial Sequence: Synthetic oligonucleotide
gcgucaccaggcuccagug

SEQ ID NO: 356885 - RNA, 19 nt, Artificial Sequence
  Description of Artificial Sequence: Synthetic oligonucleotide
cacgcccaguguaggcaac

SEQ ID NO: 356886 - RNA, 19 nt, Artificial Sequence
  Description of Artificial Sequence: Synthetic oligonucleotide
cuucgcccagugucaccac

SEQ ID NO: 356887 - RNA, 19 nt, Artificial Sequence
  Description of Artificial Sequence: Synthetic oligonucleotide
gccgaggcaaggcugaggu

SEQ ID NO: 356888 - RNA, 19 nt, Artificial Sequence
  Description of Artificial Sequence: Synthetic oligonucleotide
gccuugaccggugcgaaga

SEQ ID NO: 356889 - RNA, 19 nt, Artificial Sequence
  Description of Artificial Sequence: Synthetic oligonucleotide
cgucacguagucagaguug

SEQ ID NO: 356890 - RNA, 19 nt, Artificial Sequence
  Description of Artificial Sequence: Synthetic oligonucleotide
ccggugcgaagacaucugc

SEQ ID NO: 356891 - RNA, 19 nt, Artificial Sequence
  Description of Artificial Sequence: Synthetic oligonucleotide
acgcaguggagagggugca

SEQ ID NO: 356892 - RNA, 19 nt, Artificial Sequence
  Description of Artificial Sequence: Synthetic oligonucleotide
agcccacgccuguggcauc

SEQ ID NO: 356893 - RNA, 19 nt, Artificial Sequence
  Description of Artificial Sequence: Synthetic oligonucleotide
gggccgaccaagauagaga

SEQ ID NO: 356894 - RNA, 19 nt, Artificial Sequence
  Description of Artificial Sequence: Synthetic oligonucleotide
acgugcgguccagcucagc

SEQ ID NO: 356895 - RNA, 19 nt, Artificial Sequence
  Description of Artificial Sequence: Synthetic oligonucleotide
cccaaccacucaucugggc

SEQ ID NO: 356896 - RNA, 19 nt, Artificial Sequence
  Description of Artificial Sequence: Synthetic oligonucleotide
gcaccggucaggaacacua

SEQ ID NO: 356897 - RNA, 19 nt, Artificial Sequence
  Description of Artificial Sequence: Synthetic oligonucleotide
ucggccugggguggucucu

SEQ ID NO: 356898 - RNA, 19 nt, Artificial Sequence
  Description of Artificial Sequence: Synthetic oligonucleotide
ccaugagacgcaguggaga

SEQ ID NO: 356899 - RNA, 19 nt, Artificial Sequence
  Description of Artificial Sequence: Synthetic oligonucleotide
gucacggcccaguucuggu

SEQ ID NO: 356900 - RNA, 19 nt, Artificial Sequence
  Description of Artificial Sequence: Synthetic oligonucleotide
gguugguaacggcgguuga

SEQ ID NO: 356901 - RNA, 19 nt, Artificial Sequence
  Description of Artificial Sequence: Synthetic oligonucleotide
ccucgggcuggaucaaaac

SEQ ID NO: 356902 - RNA, 19 nt, Artificial Sequence
  Description of Artificial Sequence: Synthetic oligonucleotide
cggcuaucggcaauagcac

SEQ ID NO: 356903 - RNA, 19 nt, Artificial Sequence
  Description of Artificial Sequence: Synthetic oligonucleotide
gucugcuaguauucuggau

SEQ ID NO: 356904 - RNA, 19 nt, Artificial Sequence
  Description of Artificial Sequence: Synthetic oligonucleotide
cugguacgugcgguccagc

SEQ ID NO: 356905 - RNA, 19 nt, Artificial Sequence
  Description of Artificial Sequence: Synthetic oligonucleotide
gcucuagggcaucucucuc

SEQ ID NO: 356906 - RNA, 19 nt, Artificial Sequence
  Description of Artificial Sequence: Synthetic oligonucleotide
gccagcuagacguuccagu

SEQ ID NO: 356907 - RNA, 19 nt, Artificial Sequence
  Description of Artificial Sequence: Synthetic oligonucleotide
ugugggccuaggugcuguu

SEQ ID NO: 356908 - RNA, 19 nt, Artificial Sequence
  Description of Artificial Sequence: Synthetic oligonucleotide
gcacgccucacuggcagcc

SEQ ID NO: 356909 - RNA, 19 nt, Artificial Sequence
  Description of Artificial Sequence: Synthetic oligonucleotide
ggcguggcucauacaguag

SEQ ID NO: 356910 - RNA, 19 nt, Artificial Sequence
  Description of Artificial Sequence: Synthetic oligonucleotide
cugcggcuaucggcaauag

SEQ ID NO: 356911 - RNA, 19 nt, Artificial Sequence
  Description of Artificial Sequence: Synthetic oligonucleotide
ggcuucuaggaagcuagaa

SEQ ID NO: 356912 - RNA, 19 nt, Artificial Sequence
  Description of Artificial Sequence: Synthetic oligonucleotide
cuggaucaaaacgccgaua

SEQ ID NO: 356913 - RNA, 19 nt, Artificial Sequence
  Description of Artificial Sequence: Synthetic oligonucleotide
ccacgcagugggcagcgug

SEQ ID NO: 356914 - RNA, 19 nt, Artificial Sequence
  Description of Artificial Sequence: Synthetic oligonucleotide
cacgggccgucacguaguc

SEQ ID NO: 356915 - RNA, 19 nt, Artificial Sequence
  Description of Artificial Sequence: Synthetic oligonucleotide
ccguccacgggccgucacg

SEQ ID NO: 356916 - RNA, 19 nt, Artificial Sequence
  Description of Artificial Sequence: Synthetic oligonucleotide
ggcccggccagcaggaaca

SEQ ID NO: 356917 - RNA, 19 nt, Artificial Sequence
  Description of Artificial Sequence: Synthetic oligonucleotide
aggcuucuaggaagcuaga

SEQ ID NO: 356918 - RNA, 19 nt, Artificial Sequence
  Description of Artificial Sequence: Synthetic oligonucleotide
gcguugggcauaaauacau

SEQ ID NO: 356919 - RNA, 19 nt, Artificial Sequence
  Description of Artificial Sequence: Synthetic oligonucleotide
cgucagcgcuuccagcugc

SEQ ID NO: 356920 - RNA, 19 nt, Artificial Sequence
  Description of Artificial Sequence: Synthetic oligonucleotide
caugcaugcggcagcgguu

SEQ ID NO: 356921 - RNA, 19 nt, Artificial Sequence
  Description of Artificial Sequence: Synthetic oligonucleotide
ccuugaccggugcgaagac

SEQ ID NO: 356922 - RNA, 19 nt, Artificial Sequence
  Description of Artificial Sequence: Synthetic oligonucleotide
cgucccaaccacucaucug

SEQ ID NO: 356923 - RNA, 19 nt, Artificial Sequence
  Description of Artificial Sequence: Synthetic oligonucleotide
gcgugacaguaacacucca

SEQ ID NO: 356924 - RNA, 19 nt, Artificial Sequence
  Description of Artificial Sequence: Synthetic oligonucleotide
cggcaauagcacagugagc

SEQ ID NO: 356925 - RNA, 19 nt, Artificial Sequence
  Description of Artificial Sequence: Synthetic oligonucleotide
ccugguacgugcgguccag

SEQ ID NO: 356926 - RNA, 19 nt, Artificial Sequence
  Description of Artificial Sequence: Synthetic oligonucleotide
cuccaccgaugaaguccug

SEQ ID NO: 356927 - RNA, 19 nt, Artificial Sequence
  Description of Artificial Sequence: Synthetic oligonucleotide
ccgaugggccgcucuucgc

SEQ ID NO: 356928 - RNA, 19 nt, Artificial Sequence
  Description of Artificial Sequence: Synthetic oligonucleotide
ggccgcucuucgcccagug

SEQ ID NO: 356929 - RNA, 19 nt, Artificial Sequence
  Description of Artificial Sequence: Synthetic oligonucleotide
cugucacggcauugcggaa

SEQ ID NO: 356930 - RNA, 19 nt, Artificial Sequence
  Description of Artificial Sequence: Synthetic oligonucleotide
gcccgguagcguuguagca

SEQ ID NO: 356931 - RNA, 19 nt, Artificial Sequence
  Description of Artificial Sequence: Synthetic oligonucleotide
ggaccagugggcugcccua

SEQ ID NO: 356932 - RNA, 19 nt, Artificial Sequence
  Description of Artificial Sequence: Synthetic oligonucleotide
accgcccgcagcacaugca

SEQ ID NO: 356933 - RNA, 19 nt, Artificial Sequence
  Description of Artificial Sequence: Synthetic oligonucleotide
guaucggccuggggugguc

SEQ ID NO: 356934 - RNA, 19 nt, Artificial Sequence
  Description of Artificial Sequence: Synthetic oligonucleotide
cgggcaccagggaaacgcc

SEQ ID NO: 356935 - RNA, 19 nt, Artificial Sequence
  Description of Artificial Sequence: Synthetic oligonucleotide
gccgaccaagauagagaug

SEQ ID NO: 356936 - RNA, 19 nt, Artificial Sequence
  Description of Artificial Sequence: Synthetic oligonucleotide
cacaugggccuugaccggu

SEQ ID NO: 356937 - RNA, 19 nt, Artificial Sequence
  Description of Artificial Sequence: Synthetic oligonucleotide
ggcccucgagcaugcucug

SEQ ID NO: 356938 - RNA, 19 nt, Artificial Sequence
  Description of Artificial Sequence: Synthetic oligonucleotide
gcagcguggcgagccauca

SEQ ID NO: 356939 - RNA, 19 nt, Artificial Sequence
  Description of Artificial Sequence: Synthetic oligonucleotide
ggaacacuacacgcuccaa

SEQ ID NO: 356940 - RNA, 19 nt, Artificial Sequence
  Description of Artificial Sequence: Synthetic oligonucleotide
gcugguugguaacggcggu

SEQ ID NO: 356941 - RNA, 19 nt, Artificial Sequence
  Description of Artificial Sequence: Synthetic oligonucleotide
ggguugccgaggcaaggcu

SEQ ID NO: 356942 - RNA, 19 nt, Artificial Sequence
  Description of Artificial Sequence: Synthetic oligonucleotide
cgccguguugcuccagcag

SEQ ID NO: 356943 - RNA, 19 nt, Artificial Sequence
  Description of Artificial Sequence: Synthetic oligonucleotide
gguguccggcggccccgcg

SEQ ID NO: 356944 - RNA, 19 nt, Artificial Sequence
  Description of Artificial Sequence: Synthetic oligonucleotide
gcgguucaagaagucaggu

SEQ ID NO: 356945 - RNA, 19 nt, Artificial Sequence
  Description of Artificial Sequence: Synthetic oligonucleotide
gcugcggcuaucggcaaua

SEQ ID NO: 356946 - RNA, 19 nt, Artificial Sequence
  Description of Artificial Sequence: Synthetic oligonucleotide
gcguggcgagccaucagca

SEQ ID NO: 356947 - RNA, 19 nt, Artificial Sequence
  Description of Artificial Sequence: Synthetic oligonucleotide
cgguagcguuguagcaagg

SEQ ID NO: 356948 - RNA, 19 nt, Artificial Sequence
  Description of Artificial Sequence: Synthetic oligonucleotide
ccgaggcaaggcugaggug

SEQ ID NO: 356949 - RNA, 19 nt, Artificial Sequence
  Description of Artificial Sequence: Synthetic oligonucleotide
ccacucggcucaggggccg

SEQ ID NO: 356950 - RNA, 19 nt, Artificial Sequence
  Description of Artificial Sequence: Synthetic oligonucleotide
cccggacaagaucccagga

SEQ ID NO: 356951 - RNA, 19 nt, Artificial Sequence
  Description of Artificial Sequence: Synthetic oligonucleotide
cccgguagcguuguagcaa

SEQ ID NO: 356952 - RNA, 19 nt, Artificial Sequence
  Description of Artificial Sequence: Synthetic oligonucleotide
cuggggcgucagcgcuucc

SEQ ID NO: 356953 - RNA, 19 nt, Artificial Sequence
  Description of Artificial Sequence: Synthetic oligonucleotide
gcagccagucugcuaguau

SEQ ID NO: 356954 - RNA, 19 nt, Artificial Sequence
  Description of Artificial Sequence: Synthetic oligonucleotide
ggugucccagaguucgguu

SEQ ID NO: 356955 - RNA, 19 nt, Artificial Sequence
  Description of Artificial Sequence: Synthetic oligonucleotide
ccccacgcagugggcagcg

SEQ ID NO: 356956 - RNA, 19 nt, Artificial Sequence
  Description of Artificial Sequence: Synthetic oligonucleotide
ggcagcguggcgagccauc

SEQ ID NO: 356957 - RNA, 19 nt, Artificial Sequence
  Description of Artificial Sequence: Synthetic oligonucleotide
gccacccuggggcgucagc

SEQ ID NO: 356958 - RNA, 19 nt, Artificial Sequence
  Description of Artificial Sequence: Synthetic oligonucleotide
gugggccuaggugcuguua

SEQ ID NO: 356959 - RNA, 19 nt, Artificial Sequence
  Description of Artificial Sequence: Synthetic oligonucleotide
ccgucacguagucagaguu

SEQ ID NO: 356960 - RNA, 19 nt, Artificial Sequence
  Description of Artificial Sequence: Synthetic oligonucleotide
cgagcacugacgaugucau

SEQ ID NO: 356961 - RNA, 19 nt, Artificial Sequence
  Description of Artificial Sequence: Synthetic oligonucleotide
cagcccacgccuguggcau

SEQ ID NO: 356962 - RNA, 19 nt, Artificial Sequence
  Description of Artificial Sequence: Synthetic oligonucleotide
ccacgcccaguguaggcaa

SEQ ID NO: 356963 - RNA, 19 nt, Artificial Sequence
  Description of Artificial Sequence: Synthetic oligonucleotide
gccgucacguagucagagu

SEQ ID NO: 356964 - RNA, 19 nt, Artificial Sequence
  Description of Artificial Sequence: Synthetic oligonucleotide
gcauugcggaaacgagggu

SEQ ID NO: 356965 - RNA, 19 nt, Artificial Sequence
  Description of Artificial Sequence: Synthetic oligonucleotide
ugggcccgguagcguugua

SEQ ID NO: 356966 - RNA, 19 nt, Artificial Sequence
  Description of Artificial Sequence: Synthetic oligonucleotide
cgcgcaccggucaggaaca

SEQ ID NO: 356967 - RNA, 19 nt, Artificial Sequence
  Description of Artificial Sequence: Synthetic oligonucleotide
aggggccagcggccacccu

SEQ ID NO: 356968 - RNA, 19 nt, Artificial Sequence
  Description of Artificial Sequence: Synthetic oligonucleotide
cacuggcagccuggcgauc

SEQ ID NO: 356969 - RNA, 19 nt, Artificial Sequence
  Description of Artificial Sequence: Synthetic oligonucleotide
ggcgagcacugacgauguc

SEQ ID NO: 356970 - RNA, 19 nt, Artificial Sequence
  Description of Artificial Sequence: Synthetic oligonucleotide
gcgccucaguguagguggc

SEQ ID NO: 356971 - RNA, 19 nt, Artificial Sequence
  Description of Artificial Sequence: Synthetic oligonucleotide
guccacgggccgucacgua

SEQ ID NO: 356972 - RNA, 19 nt, Artificial Sequence
  Description of Artificial Sequence: Synthetic oligonucleotide
cugguugguaacggcgguu

SEQ ID NO: 356973 - RNA, 19 nt, Artificial Sequence
  Description of Artificial Sequence: Synthetic oligonucleotide
gggcgagcacugacgaugu

SEQ ID NO: 356974 - RNA, 19 nt, Artificial Sequence
  Description of Artificial Sequence: Synthetic oligonucleotide
ccuagggucugaggcuaca

SEQ ID NO: 356975 - RNA, 19 nt, Artificial Sequence
  Description of Artificial Sequence: Synthetic oligonucleotide
gcagggcgagauggugcug

SEQ ID NO: 356976 - RNA, 19 nt, Artificial Sequence
  Description of Artificial Sequence: Synthetic oligonucleotide
gagugucuagugggugcuu

SEQ ID NO: 356977 - RNA, 19 nt, Artificial Sequence
  Description of Artificial Sequence: Synthetic oligonucleotide
ccaaucggugucccagagu

SEQ ID NO: 356978 - RNA, 19 nt, Artificial Sequence
  Description of Artificial Sequence: Synthetic oligonucleotide
ccgucccaaccacucaucu

SEQ ID NO: 356979 - RNA, 19 nt, Artificial Sequence
  Description of Artificial Sequence: Synthetic oligonucleotide
cgaucaaaguggccagugu

SEQ ID NO: 356980 - RNA, 19 nt, Artificial Sequence
  Description of Artificial Sequence: Synthetic oligonucleotide
gcaugcggcagcgguucaa

SEQ ID NO: 356981 - RNA, 19 nt, Artificial Sequence
  Description of Artificial Sequence: Synthetic oligonucleotide
cccagcgcagaaccucaaa

SEQ ID NO: 356982 - RNA, 19 nt, Artificial Sequence
  Description of Artificial Sequence: Synthetic oligonucleotide
gccggaggagcuguacccu

SEQ ID NO: 356983 - RNA, 19 nt, Artificial Sequence
  Description of Artificial Sequence: Synthetic oligonucleotide
ccguggcaguaucggccug

SEQ ID NO: 356984 - RNA, 19 nt, Artificial Sequence
  Description of Artificial Sequence: Synthetic oligonucleotide
guccggcggccccgcgcac

SEQ ID NO: 356985 - RNA, 19 nt, Artificial Sequence
  Description of Artificial Sequence: Synthetic oligonucleotide
gccccgcgcaccggucagg

SEQ ID NO: 356986 - RNA, 19 nt, Artificial Sequence
  Description of Artificial Sequence: Synthetic oligonucleotide
gggccgucacguagucaga

SEQ ID NO: 356987 - RNA, 19 nt, Artificial Sequence
  Description of Artificial Sequence: Synthetic oligonucleotide
ggguguccggcggccccgc

SEQ ID NO: 356988 - RNA, 19 nt, Artificial Sequence
  Description of Artificial Sequence: Synthetic oligonucleotide
gugcgggagccaaggcccu

SEQ ID NO: 356989 - RNA, 19 nt, Artificial Sequence
  Description of Artificial Sequence: Synthetic oligonucleotide
ccacgggccgucacguagu

SEQ ID NO: 356990 - RNA, 19 nt, Artificial Sequence
  Description of Artificial Sequence: Synthetic oligonucleotide
cacgccucacuggcagccu

SEQ ID NO: 356991 - RNA, 19 nt, Artificial Sequence
  Description of Artificial Sequence: Synthetic oligonucleotide
cuggagccgcagugcuggu

SEQ ID NO: 356992 - RNA, 19 nt, Artificial Sequence
  Description of Artificial Sequence: Synthetic oligonucleotide
cggcgguugagcucuucua

SEQ ID NO: 356993 - RNA, 19 nt, Artificial Sequence
  Description of Artificial Sequence: Synthetic oligonucleotide
gguguccgaugggccgcuc

SEQ ID NO: 356994 - RNA, 19 nt, Artificial Sequence
  Description of Artificial Sequence: Synthetic oligonucleotide
gcgcaccggucaggaacac

SEQ ID NO: 356995 - RNA, 19 nt, Artificial Sequence
  Description of Artificial Sequence: Synthetic oligonucleotide
cgauagccauucaccaguu

SEQ ID NO: 356996 - RNA, 19 nt, Artificial Sequence
  Description of Artificial Sequence: Synthetic oligonucleotide
cguuguagcaaggccgguu

SEQ ID NO: 356997 - RNA, 19 nt, Artificial Sequence
  Description of Artificial Sequence: Synthetic oligonucleotide
ccggaggagcuguacccuu

SEQ ID NO: 356998 - RNA, 19 nt, Artificial Sequence
  Description of Artificial Sequence: Synthetic oligonucleotide
gcuagacguuccaguccau

SEQ ID NO: 356999 - RNA, 19 nt, Artificial Sequence
  Description of Artificial Sequence: Synthetic oligonucleotide
gcguuguagcaaggccggu

SEQ ID NO: 357000 - RNA, 19 nt, Artificial Sequence
  Description of Artificial Sequence: Synthetic oligonucleotide
cguccacgggccgucacgu

SEQ ID NO: 357001 - RNA, 19 nt, Artificial Sequence
  Description of Artificial Sequence: Synthetic oligonucleotide
gggcagcguggcgagccau

SEQ ID NO: 357002 - RNA, 19 nt, Artificial Sequence
  Description of Artificial Sequence: Synthetic oligonucleotide
cccgcgcaccggucaggaa

SEQ ID NO: 357003 - RNA, 19 nt, Artificial Sequence
  Description of Artificial Sequence: Synthetic oligonucleotide
cgcccaguguaggcaacgu

SEQ ID NO: 357004 - RNA, 19 nt, Artificial Sequence
  Description of Artificial Sequence: Synthetic oligonucleotide
cgcaccggucaggaacacu

SEQ ID NO: 357005 - RNA, 19 nt, Artificial Sequence
  Description of Artificial Sequence: Synthetic oligonucleotide
cccacgcagugggcagcgu

SEQ ID NO: 357006 - RNA, 19 nt, Artificial Sequence
  Description of Artificial Sequence: Synthetic oligonucleotide
aagguaucgauccaaaucc

SEQ ID NO: 357007 - RNA, 19 nt, Artificial Sequence
  Description of Artificial Sequence: Synthetic oligonucleotide
aauaguauggccuuaauga

SEQ ID NO: 357008 - RNA, 19 nt, Artificial Sequence
  Description of Artificial Sequence: Synthetic oligonucleotide
uuacauaugcuuaagaagg

SEQ ID NO: 357009 - RNA, 19 nt, Artificial Sequence
  Description of Artificial Sequence: Synthetic oligonucleotide
ugagauauuaugaagaucu

SEQ ID NO: 357010 - RNA, 19 nt, Artificial Sequence
  Description of Artificial Sequence: Synthetic oligonucleotide
aauucauuggcacugggag

SEQ ID NO: 357011 - RNA, 19 nt, Artificial Sequence
  Description of Artificial Sequence: Synthetic oligonucleotide
auuaauaucguauggaugu

SEQ ID NO: 357012 - RNA, 19 nt, Artificial Sequence
  Description of Artificial Sequence: Synthetic oligonucleotide
agugacaacaaacaugugg

SEQ ID NO: 357013 - RNA, 19 nt, Artificial Sequence
  Description of Artificial Sequence: Synthetic oligonucleotide
aaaucauuaauucuauccu

SEQ ID NO: 357014 - RNA, 19 nt, Artificial Sequence
  Description of Artificial Sequence: Synthetic oligonucleotide
aaucauuaaggcucagagc

SEQ ID NO: 357015 - RNA, 19 nt, Artificial Sequence
  Description of Artificial Sequence: Synthetic oligonucleotide
uuaaagacgacacuaagaa

SEQ ID NO: 357016 - RNA, 19 nt, Artificial Sequence
  Description of Artificial Sequence: Synthetic oligonucleotide
agcuaguaaauacaaaugg

SEQ ID NO: 357017 - RNA, 19 nt, Artificial Sequence
  Description of Artificial Sequence: Synthetic oligonucleotide
auuauagcugcuuuucccc

SEQ ID NO: 357018 - RNA, 19 nt, Artificial Sequence
  Description of Artificial Sequence: Synthetic oligonucleotide
uuuagcuugggauauaaca

SEQ ID NO: 357019 - RNA, 19 nt, Artificial Sequence
  Description of Artificial Sequence: Synthetic oligonucleotide
gagaauaccacaauaaaug

SEQ ID NO: 357020 - RNA, 19 nt, Artificial Sequence
  Description of Artificial Sequence: Synthetic oligonucleotide
ucagauaggaaagagaugu

SEQ ID NO: 357021 - RNA, 19 nt, Artificial Sequence
  Description of Artificial Sequence: Synthetic oligonucleotide
ucgagaaucauuaaggcuc

SEQ ID NO: 357022 - RNA, 19 nt, Artificial Sequence
  Description of Artificial Sequence: Synthetic oligonucleotide
agauacaccugucaugugc

SEQ ID NO: 357023 - RNA, 19 nt, Artificial Sequence
  Description of Artificial Sequence: Synthetic oligonucleotide
aaaccgcucagcuaauccc

SEQ ID NO: 357024 - RNA, 19 nt, Artificial Sequence
  Description of Artificial Sequence: Synthetic oligonucleotide
uuauucgagaaucauuaag

SEQ ID NO: 357025 - RNA, 19 nt, Artificial Sequence
  Description of Artificial Sequence: Synthetic oligonucleotide
cauaguuuuccuuuaaaag

SEQ ID NO: 357026 - RNA, 19 nt, Artificial Sequence
  Description of Artificial Sequence: Synthetic oligonucleotide
uucaacuauacacugauau

SEQ ID NO: 357027 - RNA, 19 nt, Artificial Sequence
  Description of Artificial Sequence: Synthetic oligonucleotide
auucgagaaucauuaaggc

SEQ ID NO: 357028 - RNA, 19 nt, Artificial Sequence
  Description of Artificial Sequence: Synthetic oligonucleotide
auuagguagauuuuaauaa

SEQ ID NO: 357029 - RNA, 19 nt, Artificial Sequence
  Description of Artificial Sequence: Synthetic oligonucleotide
uugaauguucacaaauagg

SEQ ID NO: 357030 - RNA, 19 nt, Artificial Sequence
  Description of Artificial Sequence: Synthetic oligonucleotide
ugacuuaagguaucgaucc

SEQ ID NO: 357031 - RNA, 19 nt, Artificial Sequence
  Description of Artificial Sequence: Synthetic oligonucleotide
cuauaaguuucuuucaagc

SEQ ID NO: 357032 - RNA, 19 nt, Artificial Sequence
  Description of Artificial Sequence: Synthetic oligonucleotide
cuuaagaaggaauagccug

SEQ ID NO: 357033 - RNA, 19 nt, Artificial Sequence
  Description of Artificial Sequence: Synthetic oligonucleotide
uuuaauauagcacggcaaa

SEQ ID NO: 357034 - RNA, 19 nt, Artificial Sequence
  Description of Artificial Sequence: Synthetic oligonucleotide
agagaagucuggcuaaacc

SEQ ID NO: 357035 - RNA, 19 nt, Artificial Sequence
  Description of Artificial Sequence: Synthetic oligonucleotide
ugugccaacaaauuaauau

SEQ ID NO: 357036 - RNA, 19 nt, Artificial Sequence
  Description of Artificial Sequence: Synthetic oligonucleotide
uuacuuaucucccugaaua

SEQ ID NO: 357037 - RNA, 19 nt, Artificial Sequence
  Description of Artificial Sequence: Synthetic oligonucleotide
uucaaugaacagcuguugg

SEQ ID NO: 357038 - RNA, 19 nt, Artificial Sequence
  Description of Artificial Sequence: Synthetic oligonucleotide
agcacugauucacagcucc

SEQ ID NO: 357039 - RNA, 19 nt, Artificial Sequence
  Description of Artificial Sequence: Synthetic oligonucleotide
uuaaagcuaguaaauacaa

SEQ ID NO: 357040 - RNA, 19 nt, Artificial Sequence
  Description of Artificial Sequence: Synthetic oligonucleotide
uuuacuaggauuggagagg

SEQ ID NO: 357041 - RNA, 19 nt, Artificial Sequence
  Description of Artificial Sequence: Synthetic oligonucleotide
agaauuuuaaagcuaguaa

SEQ ID NO: 357042 - RNA, 19 nt, Artificial Sequence
  Description of Artificial Sequence: Synthetic oligonucleotide
uuguuuacuaggauuggag

SEQ ID NO: 357043 - RNA, 19 nt, Artificial Sequence
  Description of Artificial Sequence: Synthetic oligonucleotide
uguccuuuguaucuuuagg

SEQ ID NO: 357044 - RNA, 19 nt, Artificial Sequence
  Description of Artificial Sequence: Synthetic oligonucleotide
ucgaaaaccgcucagcuaa

SEQ ID NO: 357045 - RNA, 19 nt, Artificial Sequence
  Description of Artificial Sequence: Synthetic oligonucleotide
gauauuaugaagaucugca

SEQ ID NO: 357046 - RNA, 19 nt, Artificial Sequence
  Description of Artificial Sequence: Synthetic oligonucleotide
aaagcuagaaagggaggcc

SEQ ID NO: 357047 - RNA, 19 nt, Artificial Sequence
  Description of Artificial Sequence: Synthetic oligonucleotide
aauaggagcaaagaacuca

SEQ ID NO: 357048 - RNA, 19 nt, Artificial Sequence
  Description of Artificial Sequence: Synthetic oligonucleotide
cuggguaucacuaucauca

SEQ ID NO: 357049 - RNA, 19 nt, Artificial Sequence
  Description of Artificial Sequence: Synthetic oligonucleotide
agaaggaauagccuguuug

SEQ ID NO: 357050 - RNA, 19 nt, Artificial Sequence
  Description of Artificial Sequence: Synthetic oligonucleotide
ugaccuucagauaggaaag

SEQ ID NO: 357051 - RNA, 19 nt, Artificial Sequence
  Description of Artificial Sequence: Synthetic oligonucleotide
guuuacuaggauuggagag

SEQ ID NO: 357052 - RNA, 19 nt, Artificial Sequence
  Description of Artificial Sequence: Synthetic oligonucleotide
uuuagcuugccgaugcugc

SEQ ID NO: 357053 - RNA, 19 nt, Artificial Sequence
  Description of Artificial Sequence: Synthetic oligonucleotide
uuaaacgcuguucuuuaag

SEQ ID NO: 357054 - RNA, 19 nt, Artificial Sequence
  Description of Artificial Sequence: Synthetic oligonucleotide
ugucucuacuuaaagacga

SEQ ID NO: 357055 - RNA, 19 nt, Artificial Sequence
  Description of Artificial Sequence: Synthetic oligonucleotide
uaucaagcuuucauguggg

SEQ ID NO: 357056 - RNA, 19 nt, Artificial Sequence
  Description of Artificial Sequence: Synthetic oligonucleotide
auugucucauaaucuauuc

SEQ ID NO: 357057 - RNA, 19 nt, Artificial Sequence
  Description of Artificial Sequence: Synthetic oligonucleotide
ucaugugccagugauauca

SEQ ID NO: 357058 - RNA, 19 nt, Artificial Sequence
  Description of Artificial Sequence: Synthetic oligonucleotide
uuagcuugggauauaacau

SEQ ID NO: 357059 - RNA, 19 nt, Artificial Sequence
  Description of Artificial Sequence: Synthetic oligonucleotide
aauuaauaucguauggaug

SEQ ID NO: 357060 - RNA, 19 nt, Artificial Sequence
  Description of Artificial Sequence: Synthetic oligonucleotide
cuccauauugcucauagac

SEQ ID NO: 357061 - RNA, 19 nt, Artificial Sequence
  Description of Artificial Sequence: Synthetic oligonucleotide
uuaagaaggaauagccugu

SEQ ID NO: 357062 - RNA, 19 nt, Artificial Sequence
  Description of Artificial Sequence: Synthetic oligonucleotide
gaaggaauagccuguuugc

SEQ ID NO: 357063 - RNA, 19 nt, Artificial Sequence
  Description of Artificial Sequence: Synthetic oligonucleotide
gauuuaauauagcacggca

SEQ ID NO: 357064 - RNA, 19 nt, Artificial Sequence
  Description of Artificial Sequence: Synthetic oligonucleotide
cugaaaaccucgcagaaug

SEQ ID NO: 357065 - RNA, 19 nt, Artificial Sequence
  Description of Artificial Sequence: Synthetic oligonucleotide
uaaacgcuguucuuuaagc

SEQ ID NO: 357066 - RNA, 19 nt, Artificial Sequence
  Description of Artificial Sequence: Synthetic oligonucleotide
cauuauagcugcuuuuccc

SEQ ID NO: 357067 - RNA, 19 nt, Artificial Sequence
  Description of Artificial Sequence: Synthetic oligonucleotide
gacgauacagucaucacug

SEQ ID NO: 357068 - RNA, 19 nt, Artificial Sequence
  Description of Artificial Sequence: Synthetic oligonucleotide
acuaggauuggagagguuc

SEQ ID NO: 357069 - RNA, 19 nt, Artificial Sequence
  Description of Artificial Sequence: Synthetic oligonucleotide
uggaaguaaauguaccagc

SEQ ID NO: 357070 - RNA, 19 nt, Artificial Sequence
  Description of Artificial Sequence: Synthetic oligonucleotide
agauuuaauauagcacggc

SEQ ID NO: 357071 - RNA, 19 nt, Artificial Sequence
  Description of Artificial Sequence: Synthetic oligonucleotide
ucauaguuuuccuuuaaaa

SEQ ID NO: 357072 - RNA, 19 nt, Artificial Sequence
  Description of Artificial Sequence: Synthetic oligonucleotide
uuauacaauucugugguca

SEQ ID NO: 357073 - RNA, 19 nt, Artificial Sequence
  Description of Artificial Sequence: Synthetic oligonucleotide
uaugcuuaagaaggaauag

SEQ ID NO: 357074 - RNA, 19 nt, Artificial Sequence
  Description of Artificial Sequence: Synthetic oligonucleotide
uguuauuuagcuugggaua

SEQ ID NO: 357075 - RNA, 19 nt, Artificial Sequence
  Description of Artificial Sequence: Synthetic oligonucleotide
ugcagcacggucuuuuagg

SEQ ID NO: 357076 - RNA, 19 nt, Artificial Sequence
  Description of Artificial Sequence: Synthetic oligonucleotide
gagauuuaauauagcacgg

SEQ ID NO: 357077 - RNA, 19 nt, Artificial Sequence
  Description of Artificial Sequence: Synthetic oligonucleotide
uacuaguuacuguuucugg

SEQ ID NO: 357078 - RNA, 19 nt, Artificial Sequence
  Description of Artificial Sequence: Synthetic oligonucleotide
uguuuacuaggauuggaga

SEQ ID NO: 357079 - RNA, 19 nt, Artificial Sequence
  Description of Artificial Sequence: Synthetic oligonucleotide
gccguuagagcacagaugg

SEQ ID NO: 357080 - RNA, 19 nt, Artificial Sequence
  Description of Artificial Sequence: Synthetic oligonucleotide
ugccccaugguacagacac

SEQ ID NO: 357081 - RNA, 19 nt, Artificial Sequence
  Description of Artificial Sequence: Synthetic oligonucleotide
ucaacaugagcaaugccaa

SEQ ID NO: 357082 - RNA, 19 nt, Artificial Sequence
  Description of Artificial Sequence: Synthetic oligonucleotide
aaaccucgcagaaugcagc

SEQ ID NO: 357083 - RNA, 19 nt, Artificial Sequence
  Description of Artificial Sequence: Synthetic oligonucleotide
uagccuguuugcaaaacag

SEQ ID NO: 357084 - RNA, 19 nt, Artificial Sequence
  Description of Artificial Sequence: Synthetic oligonucleotide
cauuagcaggcuuugaaug

SEQ ID NO: 357085 - RNA, 19 nt, Artificial Sequence
  Description of Artificial Sequence: Synthetic oligonucleotide
acuuaaagacgacacuaag

SEQ ID NO: 357086 - RNA, 19 nt, Artificial Sequence
  Description of Artificial Sequence: Synthetic oligonucleotide
cucuacuuaaagacgacac

SEQ ID NO: 357087 - RNA, 19 nt, Artificial Sequence
  Description of Artificial Sequence: Synthetic oligonucleotide
aaacgcuguucuuuaagcu

SEQ ID NO: 357088 - RNA, 19 nt, Artificial Sequence
  Description of Artificial Sequence: Synthetic oligonucleotide
augcuuaagaaggaauagc

SEQ ID NO: 357089 - RNA, 19 nt, Artificial Sequence
  Description of Artificial Sequence: Synthetic oligonucleotide
ucaaugaacagcuguugga

SEQ ID NO: 357090 - RNA, 19 nt, Artificial Sequence
  Description of Artificial Sequence: Synthetic oligonucleotide
ucgauccaaauccaaauuc

SEQ ID NO: 357091 - RNA, 19 nt, Artificial Sequence
  Description of Artificial Sequence: Synthetic oligonucleotide
uauauagcugacucacuug

SEQ ID NO: 357092 - RNA, 19 nt, Artificial Sequence
  Description of Artificial Sequence: Synthetic oligonucleotide
uaccacaauaaaugucucg

SEQ ID NO: 357093 - RNA, 19 nt, Artificial Sequence
  Description of Artificial Sequence: Synthetic oligonucleotide
aaugucucgaaaaccgcuc

SEQ ID NO: 357094 - RNA, 19 nt, Artificial Sequence
  Description of Artificial Sequence: Synthetic oligonucleotide
uauuggucccacaaagugu

SEQ ID NO: 357095 - RNA, 19 nt, Artificial Sequence
  Description of Artificial Sequence: Synthetic oligonucleotide
uuccuuuaaaaguucucgc

SEQ ID NO: 357096 - RNA, 19 nt, Artificial Sequence
  Description of Artificial Sequence: Synthetic oligonucleotide
ucugacuuaagguaucgau

SEQ ID NO: 357097 - RNA, 19 nt, Artificial Sequence
  Description of Artificial Sequence: Synthetic oligonucleotide
gauacagucaucacuguca

SEQ ID NO: 357098 - RNA, 19 nt, Artificial Sequence
  Description of Artificial Sequence: Synthetic oligonucleotide
ugggagaauaccacaauaa

SEQ ID NO: 357099 - RNA, 19 nt, Artificial Sequence
  Description of Artificial Sequence: Synthetic oligonucleotide
guacagacacaauuuauac

SEQ ID NO: 357100 - RNA, 19 nt, Artificial Sequence
  Description of Artificial Sequence: Synthetic oligonucleotide
aagcuaguaaauacaaaug

SEQ ID NO: 357101 - RNA, 19 nt, Artificial Sequence
  Description of Artificial Sequence: Synthetic oligonucleotide
cuauuggucccacaaagug

SEQ ID NO: 357102 - RNA, 19 nt, Artificial Sequence
  Description of Artificial Sequence: Synthetic oligonucleotide
aauagccuguuugcaaaac

SEQ ID NO: 357103 - RNA, 19 nt, Artificial Sequence
  Description of Artificial Sequence: Synthetic oligonucleotide
uacugcagggaauaguaug

SEQ ID NO: 357104 - RNA, 19 nt, Artificial Sequence
  Description of Artificial Sequence: Synthetic oligonucleotide
uucgagaaucauuaaggcu

SEQ ID NO: 357105 - RNA, 19 nt, Artificial Sequence
  Description of Artificial Sequence: Synthetic oligonucleotide
agagggaaugccuaauucu

SEQ ID NO: 357106 - RNA, 19 nt, Artificial Sequence
  Description of Artificial Sequence: Synthetic oligonucleotide
ggaaugagauauuaugaag

SEQ ID NO: 357107 - RNA, 19 nt, Artificial Sequence
  Description of Artificial Sequence: Synthetic oligonucleotide
aauuacuuaucucccugaa

SEQ ID NO: 357108 - RNA, 19 nt, Artificial Sequence
  Description of Artificial Sequence: Synthetic oligonucleotide
acuaguuacuguuucuggu

SEQ ID NO: 357109 - RNA, 19 nt, Artificial Sequence
  Description of Artificial Sequence: Synthetic oligonucleotide
augccuaauucucuaaaug

SEQ ID NO: 357110 - RNA, 19 nt, Artificial Sequence
  Description of Artificial Sequence: Synthetic oligonucleotide
augaaauggucugugauca

SEQ ID NO: 357111 - RNA, 19 nt, Artificial Sequence
  Description of Artificial Sequence: Synthetic oligonucleotide
aggaaugagauauuaugaa

SEQ ID NO: 357112 - RNA, 19 nt, Artificial Sequence
  Description of Artificial Sequence: Synthetic oligonucleotide
guaaauauucuccugggua

SEQ ID NO: 357113 - RNA, 19 nt, Artificial Sequence
  Description of Artificial Sequence: Synthetic oligonucleotide
aaaaccucgcagaaugcag

SEQ ID NO: 357114 - RNA, 19 nt, Artificial Sequence
  Description of Artificial Sequence: Synthetic oligonucleotide
uaucguauggaugucauuu

SEQ ID NO: 357115 - RNA, 19 nt, Artificial Sequence
  Description of Artificial Sequence: Synthetic oligonucleotide
auuagcaggcuuugaaugu

SEQ ID NO: 357116 - RNA, 19 nt, Artificial Sequence
  Description of Artificial Sequence: Synthetic oligonucleotide
cugucucuacuuaaagacg

SEQ ID NO: 357117 - RNA, 19 nt, Artificial Sequence
  Description of Artificial Sequence: Synthetic oligonucleotide
uaucgauccaaauccaaau

SEQ ID NO: 357118 - RNA, 19 nt, Artificial Sequence
  Description of Artificial Sequence: Synthetic oligonucleotide
ugaugauucuuugguaucc

SEQ ID NO: 357119 - RNA, 19 nt, Artificial Sequence
  Description of Artificial Sequence: Synthetic oligonucleotide
aagcgcacacuucugugag

SEQ ID NO: 357120 - RNA, 19 nt, Artificial Sequence
  Description of Artificial Sequence: Synthetic oligonucleotide
ucucgaaaaccgcucagcu

SEQ ID NO: 357121 - RNA, 19 nt, Artificial Sequence
  Description of Artificial Sequence: Synthetic oligonucleotide
ucuauuggucccacaaagu

SEQ ID NO: 357122 - RNA, 19 nt, Artificial Sequence
  Description of Artificial Sequence: Synthetic oligonucleotide
gaugucauuucaaagccuc

SEQ ID NO: 357123 - RNA, 19 nt, Artificial Sequence
  Description of Artificial Sequence: Synthetic oligonucleotide
uucagauaggaaagagaug

SEQ ID NO: 357124 - RNA, 19 nt, Artificial Sequence
  Description of Artificial Sequence: Synthetic oligonucleotide
aaguaggaugccucuauaa

SEQ ID NO: 357125 - RNA, 19 nt, Artificial Sequence
  Description of Artificial Sequence: Synthetic oligonucleotide
uaaaaucuauauagcugac

SEQ ID NO: 357126 - RNA, 19 nt, Artificial Sequence
  Description of Artificial Sequence: Synthetic oligonucleotide
agugaaaacccacagccua

SEQ ID NO: 357127 - RNA, 19 nt, Artificial Sequence
  Description of Artificial Sequence: Synthetic oligonucleotide
uauaaucuggcuguuuuaa

SEQ ID NO: 357128 - RNA, 19 nt, Artificial Sequence
  Description of Artificial Sequence: Synthetic oligonucleotide
cugacuuaagguaucgauc

SEQ ID NO: 357129 - RNA, 19 nt, Artificial Sequence
  Description of Artificial Sequence: Synthetic oligonucleotide
ucuguggucacaucauacu

SEQ ID NO: 357130 - RNA, 19 nt, Artificial Sequence
  Description of Artificial Sequence: Synthetic oligonucleotide
aaacccagagacucugacu

SEQ ID NO: 357131 - RNA, 19 nt, Artificial Sequence
  Description of Artificial Sequence: Synthetic oligonucleotide
ggcuuuuaaucacacaaag

SEQ ID NO: 357132 - RNA, 19 nt, Artificial Sequence
  Description of Artificial Sequence: Synthetic oligonucleotide
ucaucccugguuauucgag

SEQ ID NO: 357133 - RNA, 19 nt, Artificial Sequence
  Description of Artificial Sequence: Synthetic oligonucleotide
uaaauguaccagcuggcau

SEQ ID NO: 357134 - RNA, 19 nt, Artificial Sequence
  Description of Artificial Sequence: Synthetic oligonucleotide
uguuggauagugucauccc

SEQ ID NO: 357135 - RNA, 19 nt, Artificial Sequence
  Description of Artificial Sequence: Synthetic oligonucleotide
uucuguggucacaucauac

SEQ ID NO: 357136 - RNA, 19 nt, Artificial Sequence
  Description of Artificial Sequence: Synthetic oligonucleotide
aagccguuagagcacagau

SEQ ID NO: 357137 - RNA, 19 nt, Artificial Sequence
  Description of Artificial Sequence: Synthetic oligonucleotide
ucagcgggaagacuguaga

SEQ ID NO: 357138 - RNA, 19 nt, Artificial Sequence
  Description of Artificial Sequence: Synthetic oligonucleotide
aaaugucucgaaaaccgcu

SEQ ID NO: 357139 - RNA, 19 nt, Artificial Sequence
  Description of Artificial Sequence: Synthetic oligonucleotide
aucguauggaugucauuuc

SEQ ID NO: 357140 - RNA, 19 nt, Artificial Sequence
  Description of Artificial Sequence: Synthetic oligonucleotide
cuuauuuagcucaucucca

SEQ ID NO: 357141 - RNA, 19 nt, Artificial Sequence
  Description of Artificial Sequence: Synthetic oligonucleotide
ugucaugugccagugauau

SEQ ID NO: 357142 - RNA, 19 nt, Artificial Sequence
  Description of Artificial Sequence: Synthetic oligonucleotide
cucacuuguagacauuuuc

SEQ ID NO: 357143 - RNA, 19 nt, Artificial Sequence
  Description of Artificial Sequence: Synthetic oligonucleotide
ugauucacagcuccauuaa

SEQ ID NO: 357144 - RNA, 19 nt, Artificial Sequence
  Description of Artificial Sequence: Synthetic oligonucleotide
ugauuaaacauagucucua

SEQ ID NO: 357145 - RNA, 19 nt, Artificial Sequence
  Description of Artificial Sequence: Synthetic oligonucleotide
uucucaaggcugcaggcac

SEQ ID NO: 357146 - RNA, 19 nt, Artificial Sequence
  Description of Artificial Sequence: Synthetic oligonucleotide
agcgggaagacuguagaac

SEQ ID NO: 357147 - RNA, 19 nt, Artificial Sequence
  Description of Artificial Sequence: Synthetic oligonucleotide
ucuggcuaaaccccuaauu

SEQ ID NO: 357148 - RNA, 19 nt, Artificial Sequence
  Description of Artificial Sequence: Synthetic oligonucleotide
cuuggaaguaaauguacca

SEQ ID NO: 357149 - RNA, 19 nt, Artificial Sequence
  Description of Artificial Sequence: Synthetic oligonucleotide
aaauucauuggcacuggga

SEQ ID NO: 357150 - RNA, 19 nt, Artificial Sequence
  Description of Artificial Sequence: Synthetic oligonucleotide
ucucauaaucuauuccauc

SEQ ID NO: 357151 - RNA, 19 nt, Artificial Sequence
  Description of Artificial Sequence: Synthetic oligonucleotide
caucccauuuuccuccugg

SEQ ID NO: 357152 - RNA, 19 nt, Artificial Sequence
  Description of Artificial Sequence: Synthetic oligonucleotide
cacugaagccguuagagca

SEQ ID NO: 357153 - RNA, 19 nt, Artificial Sequence
  Description of Artificial Sequence: Synthetic oligonucleotide
ucucaauccgaauuuccuc

SEQ ID NO: 357154 - RNA, 19 nt, Artificial Sequence
  Description of Artificial Sequence: Synthetic oligonucleotide
ucagcuaaucccaggguau

SEQ ID NO: 357155 - RNA, 19 nt, Artificial Sequence
  Description of Artificial Sequence: Synthetic oligonucleotide
uuccuauguaaauauucuc

SEQ ID NO: 357156 - RNA, 19 nt, Artificial Sequence
  Description of Artificial Sequence: Synthetic oligonucleotide
ugucaucccugguuauucg

SEQ ID NO: 357157 - RNA, 19 nt, Artificial Sequence
  Description of Artificial Sequence: Synthetic oligonucleotide
accgacauucaaugaacag

SEQ ID NO: 357158 - RNA, 19 nt, Artificial Sequence
  Description of Artificial Sequence: Synthetic oligonucleotide
cuguuggauagugucaucc

SEQ ID NO: 357159 - RNA, 19 nt, Artificial Sequence
  Description of Artificial Sequence: Synthetic oligonucleotide
ucaacuauacacugauauu

SEQ ID NO: 357160 - RNA, 19 nt, Artificial Sequence
  Description of Artificial Sequence: Synthetic oligonucleotide
uaauauagcacggcaaauu

SEQ ID NO: 357161 - RNA, 19 nt, Artificial Sequence
  Description of Artificial Sequence: Synthetic oligonucleotide
cuaaucccaggguauaauc

SEQ ID NO: 357162 - RNA, 19 nt, Artificial Sequence
  Description of Artificial Sequence: Synthetic oligonucleotide
uuaaggcucagagcuauga

SEQ ID NO: 357163 - RNA, 19 nt, Artificial Sequence
  Description of Artificial Sequence: Synthetic oligonucleotide
ugggacgauacagucauca

SEQ ID NO: 357164 - RNA, 19 nt, Artificial Sequence
  Description of Artificial Sequence: Synthetic oligonucleotide
uaauaucguauggauguca

SEQ ID NO: 357165 - RNA, 19 nt, Artificial Sequence
  Description of Artificial Sequence: Synthetic oligonucleotide
ugaagcgcacacuucugug

SEQ ID NO: 357166 - RNA, 19 nt, Artificial Sequence
  Description of Artificial Sequence: Synthetic oligonucleotide
auacuaguuacuguuucug

SEQ ID NO: 357167 - RNA, 19 nt, Artificial Sequence
  Description of Artificial Sequence: Synthetic oligonucleotide
uggcauacuaguuacuguu

SEQ ID NO: 357168 - RNA, 19 nt, Artificial Sequence
  Description of Artificial Sequence: Synthetic oligonucleotide
uuauuuagcucaucuccau

SEQ ID NO: 357169 - RNA, 19 nt, Artificial Sequence
  Description of Artificial Sequence: Synthetic oligonucleotide
aauaucguauggaugucau

SEQ ID NO: 357170 - RNA, 19 nt, Artificial Sequence
  Description of Artificial Sequence: Synthetic oligonucleotide
cuuccguuauuucuguuuc

SEQ ID NO: 357171 - RNA, 19 nt, Artificial Sequence
  Description of Artificial Sequence: Synthetic oligonucleotide
auagccuguuugcaaaaca

SEQ ID NO: 357172 - RNA, 19 nt, Artificial Sequence
  Description of Artificial Sequence: Synthetic oligonucleotide
gaucucaauccgaauuucc

SEQ ID NO: 357173 - RNA, 19 nt, Artificial Sequence
  Description of Artificial Sequence: Synthetic oligonucleotide
auagugucaucccugguua

SEQ ID NO: 357174 - RNA, 19 nt, Artificial Sequence
  Description of Artificial Sequence: Synthetic oligonucleotide
aaauuacugcagggaauag

SEQ ID NO: 357175 - RNA, 19 nt, Artificial Sequence
  Description of Artificial Sequence: Synthetic oligonucleotide
aauugucucauaaucuauu

SEQ ID NO: 357176 - RNA, 19 nt, Artificial Sequence
  Description of Artificial Sequence: Synthetic oligonucleotide
uccaugaggucaacaugag

SEQ ID NO: 357177 - RNA, 19 nt, Artificial Sequence
  Description of Artificial Sequence: Synthetic oligonucleotide
ucugguguguguuccauuu

SEQ ID NO: 357178 - RNA, 19 nt, Artificial Sequence
  Description of Artificial Sequence: Synthetic oligonucleotide
aaggaauagccuguuugca

SEQ ID NO: 357179 - RNA, 19 nt, Artificial Sequence
  Description of Artificial Sequence: Synthetic oligonucleotide
ugguacagacacaauuuau

SEQ ID NO: 357180 - RNA, 19 nt, Artificial Sequence
  Description of Artificial Sequence: Synthetic oligonucleotide
gaugguucaacuauacacu

SEQ ID NO: 357181 - RNA, 19 nt, Artificial Sequence
  Description of Artificial Sequence: Synthetic oligonucleotide
uuacuaggauuggagaggu

SEQ ID NO: 357182 - RNA, 19 nt, Artificial Sequence
  Description of Artificial Sequence: Synthetic oligonucleotide
auuuaauauagcacggcaa

SEQ ID NO: 357183 - RNA, 19 nt, Artificial Sequence
  Description of Artificial Sequence: Synthetic oligonucleotide
uuuggugaugcaagcugac

SEQ ID NO: 357184 - RNA, 19 nt, Artificial Sequence
  Description of Artificial Sequence: Synthetic oligonucleotide
ugguuauucgagaaucauu

SEQ ID NO: 357185 - RNA, 19 nt, Artificial Sequence
  Description of Artificial Sequence: Synthetic oligonucleotide
ucucuacuuaaagacgaca

SEQ ID NO: 357186 - RNA, 19 nt, Artificial Sequence
  Description of Artificial Sequence: Synthetic oligonucleotide
aacauagucucuauuuauu

SEQ ID NO: 357187 - RNA, 19 nt, Artificial Sequence
  Description of Artificial Sequence: Synthetic oligonucleotide
ugguucaacuauacacuga

SEQ ID NO: 357188 - RNA, 19 nt, Artificial Sequence
  Description of Artificial Sequence: Synthetic oligonucleotide
uuaagguaucgauccaaau

SEQ ID NO: 357189 - RNA, 19 nt, Artificial Sequence
  Description of Artificial Sequence: Synthetic oligonucleotide
agcagagauuuaauauagc

SEQ ID NO: 357190 - RNA, 19 nt, Artificial Sequence
  Description of Artificial Sequence: Synthetic oligonucleotide
gaaccgacauucaaugaac

SEQ ID NO: 357191 - RNA, 19 nt, Artificial Sequence
  Description of Artificial Sequence: Synthetic oligonucleotide
ucaauccgaauuuccucug

SEQ ID NO: 357192 - RNA, 19 nt, Artificial Sequence
  Description of Artificial Sequence: Synthetic oligonucleotide
auuacuuaucucccugaau

SEQ ID NO: 357193 - RNA, 19 nt, Artificial Sequence
  Description of Artificial Sequence: Synthetic oligonucleotide
agaaagcuagaaagggagg

SEQ ID NO: 357194 - RNA, 19 nt, Artificial Sequence
  Description of Artificial Sequence: Synthetic oligonucleotide
aaaucauccaugaggucaa

SEQ ID NO: 357195 - RNA, 19 nt, Artificial Sequence
  Description of Artificial Sequence: Synthetic oligonucleotide
uuaauauagcacggcaaau

SEQ ID NO: 357196 - RNA, 19 nt, Artificial Sequence
  Description of Artificial Sequence: Synthetic oligonucleotide
uuuauacaauucugugguc

SEQ ID NO: 357197 - RNA, 19 nt, Artificial Sequence
  Description of Artificial Sequence: Synthetic oligonucleotide
uacaauucuguggucacau

SEQ ID NO: 357198 - RNA, 19 nt, Artificial Sequence
  Description of Artificial Sequence: Synthetic oligonucleotide
uuagcuugccgaugcugcc

SEQ ID NO: 357199 - RNA, 19 nt, Artificial Sequence
  Description of Artificial Sequence: Synthetic oligonucleotide
cagagcuaugaucucaauc

SEQ ID NO: 357200 - RNA, 19 nt, Artificial Sequence
  Description of Artificial Sequence: Synthetic oligonucleotide
auauagcacggcaaauuag

SEQ ID NO: 357201 - RNA, 19 nt, Artificial Sequence
  Description of Artificial Sequence: Synthetic oligonucleotide
aucauaguuuuccuuuaaa

SEQ ID NO: 357202 - RNA, 19 nt, Artificial Sequence
  Description of Artificial Sequence: Synthetic oligonucleotide
uggggaauuguccuuugua

SEQ ID NO: 357203 - RNA, 19 nt, Artificial Sequence
  Description of Artificial Sequence: Synthetic oligonucleotide
caaauuagguagauuuuaa

SEQ ID NO: 357204 - RNA, 19 nt, Artificial Sequence
  Description of Artificial Sequence: Synthetic oligonucleotide
gaagcgcacacuucuguga

SEQ ID NO: 357205 - RNA, 19 nt, Artificial Sequence
  Description of Artificial Sequence: Synthetic oligonucleotide
acugaagccguuagagcac

SEQ ID NO: 357206 - RNA, 19 nt, Artificial Sequence
  Description of Artificial Sequence: Synthetic oligonucleotide
uagcugacucacuuguaga

SEQ ID NO: 357207 - RNA, 19 nt, Artificial Sequence
  Description of Artificial Sequence: Synthetic oligonucleotide
auaugcuuaagaaggaaua

SEQ ID NO: 357208 - RNA, 19 nt, Artificial Sequence
  Description of Artificial Sequence: Synthetic oligonucleotide
uauuuagcucaucuccauu

SEQ ID NO: 357209 - RNA, 19 nt, Artificial Sequence
  Description of Artificial Sequence: Synthetic oligonucleotide
uguaaugaauugucucaua

SEQ ID NO: 357210 - RNA, 19 nt, Artificial Sequence
  Description of Artificial Sequence: Synthetic oligonucleotide
gguuauucgagaaucauua

SEQ ID NO: 357211 - RNA, 19 nt, Artificial Sequence
  Description of Artificial Sequence: Synthetic oligonucleotide
gaaugccuaauucucuaaa

SEQ ID NO: 357212 - RNA, 19 nt, Artificial Sequence
  Description of Artificial Sequence: Synthetic oligonucleotide
ucccaggguauaaucuggc

SEQ ID NO: 357213 - RNA, 19 nt, Artificial Sequence
  Description of Artificial Sequence: Synthetic oligonucleotide
agccaaagaaagcuagaaa

SEQ ID NO: 357214 - RNA, 19 nt, Artificial Sequence
  Description of Artificial Sequence: Synthetic oligonucleotide
gugacaacaaacauguggu

SEQ ID NO: 357215 - RNA, 19 nt, Artificial Sequence
  Description of Artificial Sequence: Synthetic oligonucleotide
aucgauccaaauccaaauu

SEQ ID NO: 357216 - RNA, 19 nt, Artificial Sequence
  Description of Artificial Sequence: Synthetic oligonucleotide
guaggaugccucuauaagu

SEQ ID NO: 357217 - RNA, 19 nt, Artificial Sequence
  Description of Artificial Sequence: Synthetic oligonucleotide
ugcucauagacagacugua

SEQ ID NO: 357218 - RNA, 19 nt, Artificial Sequence
  Description of Artificial Sequence: Synthetic oligonucleotide
cugaccacggugaagcgca

SEQ ID NO: 357219 - RNA, 19 nt, Artificial Sequence
  Description of Artificial Sequence: Synthetic oligonucleotide
gauagugucaucccugguu

SEQ ID NO: 357220 - RNA, 19 nt, Artificial Sequence
  Description of Artificial Sequence: Synthetic oligonucleotide
agaaucauuaaggcucaga

SEQ ID NO: 357221 - RNA, 19 nt, Artificial Sequence
  Description of Artificial Sequence: Synthetic oligonucleotide
guuagagcacagaugguuc

SEQ ID NO: 357222 - RNA, 19 nt, Artificial Sequence
  Description of Artificial Sequence: Synthetic oligonucleotide
aggauguuuguggucacug

SEQ ID NO: 357223 - RNA, 19 nt, Artificial Sequence
  Description of Artificial Sequence: Synthetic oligonucleotide
agucugaugagagcaagau

SEQ ID NO: 357224 - RNA, 19 nt, Artificial Sequence
  Description of Artificial Sequence: Synthetic oligonucleotide
ggauguuuguggucacugg

SEQ ID NO: 357225 - RNA, 19 nt, Artificial Sequence
  Description of Artificial Sequence: Synthetic oligonucleotide
gcauggagugcuuccacgg

SEQ ID NO: 357226 - RNA, 19 nt, Artificial Sequence
  Description of Artificial Sequence: Synthetic oligonucleotide
acgacacuaagaagucagc

SEQ ID NO: 357227 - RNA, 19 nt, Artificial Sequence
  Description of Artificial Sequence: Synthetic oligonucleotide
gguauccucggagacagag

SEQ ID NO: 357228 - RNA, 19 nt, Artificial Sequence
  Description of Artificial Sequence: Synthetic oligonucleotide
uuaauaucguauggauguc

SEQ ID NO: 357229 - RNA, 19 nt, Artificial Sequence
  Description of Artificial Sequence: Synthetic oligonucleotide
gcgggaagacuguagaacc

SEQ ID NO: 357230 - RNA, 19 nt, Artificial Sequence
  Description of Artificial Sequence: Synthetic oligonucleotide
aucucaauccgaauuuccu

SEQ ID NO: 357231 - RNA, 19 nt, Artificial Sequence
  Description of Artificial Sequence: Synthetic oligonucleotide
ucauuaaggcucagagcua

SEQ ID NO: 357232 - RNA, 19 nt, Artificial Sequence
  Description of Artificial Sequence: Synthetic oligonucleotide
aaccgacauucaaugaaca

SEQ ID NO: 357233 - RNA, 19 nt, Artificial Sequence
  Description of Artificial Sequence: Synthetic oligonucleotide
uccguuauuucuguuucau

SEQ ID NO: 357234 - RNA, 19 nt, Artificial Sequence
  Description of Artificial Sequence: Synthetic oligonucleotide
uuacugcagggaauaguau

SEQ ID NO: 357235 - RNA, 19 nt, Artificial Sequence
  Description of Artificial Sequence: Synthetic oligonucleotide
cuuaagguaucgauccaaa

SEQ ID NO: 357236 - RNA, 19 nt, Artificial Sequence
  Description of Artificial Sequence: Synthetic oligonucleotide
agcacagaugguucaacua

SEQ ID NO: 357237 - RNA, 19 nt, Artificial Sequence
  Description of Artificial Sequence: Synthetic oligonucleotide
acuuaagguaucgauccaa

SEQ ID NO: 357238 - RNA, 19 nt, Artificial Sequence
  Description of Artificial Sequence: Synthetic oligonucleotide
uagcacggcaaauuaggua

SEQ ID NO: 357239 - RNA, 19 nt, Artificial Sequence
  Description of Artificial Sequence: Synthetic oligonucleotide
ccgacauucaaugaacagc

SEQ ID NO: 357240 - RNA, 19 nt, Artificial Sequence
  Description of Artificial Sequence: Synthetic oligonucleotide
uuggugaugcaagcugacc

SEQ ID NO: 357241 - RNA, 19 nt, Artificial Sequence
  Description of Artificial Sequence: Synthetic oligonucleotide
aagaaggaauagccuguuu

SEQ ID NO: 357242 - RNA, 19 nt, Artificial Sequence
  Description of Artificial Sequence: Synthetic oligonucleotide
ugaucucaauccgaauuuc

SEQ ID NO: 357243 - RNA, 19 nt, Artificial Sequence
  Description of Artificial Sequence: Synthetic oligonucleotide
uuccuuugcagcacugauu

SEQ ID NO: 357244 - RNA, 19 nt, Artificial Sequence
  Description of Artificial Sequence: Synthetic oligonucleotide
gaacagcuguuggauagug

SEQ ID NO: 357245 - RNA, 19 nt, Artificial Sequence
  Description of Artificial Sequence: Synthetic oligonucleotide
gcuaguaaauacaaaugga

SEQ ID NO: 357246 - RNA, 19 nt, Artificial Sequence
  Description of Artificial Sequence: Synthetic oligonucleotide
uuuuggggaauuguccuuu

SEQ ID NO: 357247 - RNA, 19 nt, Artificial Sequence
  Description of Artificial Sequence: Synthetic oligonucleotide
uugcauuauagcugcuuuu

SEQ ID NO: 357248 - RNA, 19 nt, Artificial Sequence
  Description of Artificial Sequence: Synthetic oligonucleotide
uuccguuauuucuguuuca

SEQ ID NO: 357249 - RNA, 19 nt, Artificial Sequence
  Description of Artificial Sequence: Synthetic oligonucleotide
auaggagcaaagaacucau

SEQ ID NO: 357250 - RNA, 19 nt, Artificial Sequence
  Description of Artificial Sequence: Synthetic oligonucleotide
cacaucauacucuauuggu

SEQ ID NO: 357251 - RNA, 19 nt, Artificial Sequence
  Description of Artificial Sequence: Synthetic oligonucleotide
cacuguuauaaaguuuauc

SEQ ID NO: 357252 - RNA, 19 nt, Artificial Sequence
  Description of Artificial Sequence: Synthetic oligonucleotide
guuguuuacuaggauugga

SEQ ID NO: 357253 - RNA, 19 nt, Artificial Sequence
  Description of Artificial Sequence: Synthetic oligonucleotide
caugugccagugauaucag

SEQ ID NO: 357254 - RNA, 19 nt, Artificial Sequence
  Description of Artificial Sequence: Synthetic oligonucleotide
gcauuauagcugcuuuucc

SEQ ID NO: 357255 - RNA, 19 nt, Artificial Sequence
  Description of Artificial Sequence: Synthetic oligonucleotide
aucccugguuauucgagaa

SEQ ID NO: 357256 - RNA, 19 nt, Artificial Sequence
  Description of Artificial Sequence: Synthetic oligonucleotide
agccagcuaaagugacaac

SEQ ID NO: 357257 - RNA, 19 nt, Artificial Sequence
  Description of Artificial Sequence: Synthetic oligonucleotide
uaaaccccuaauugugcuu

SEQ ID NO: 357258 - RNA, 19 nt, Artificial Sequence
  Description of Artificial Sequence: Synthetic oligonucleotide
ggcacuguuauaaaguuua

SEQ ID NO: 357259 - RNA, 19 nt, Artificial Sequence
  Description of Artificial Sequence: Synthetic oligonucleotide
gucucgaaaaccgcucagc

SEQ ID NO: 357260 - RNA, 19 nt, Artificial Sequence
  Description of Artificial Sequence: Synthetic oligonucleotide
guuauuuagcuugggauau

SEQ ID NO: 357261 - RNA, 19 nt, Artificial Sequence
  Description of Artificial Sequence: Synthetic oligonucleotide
caugguacagacacaauuu

SEQ ID NO: 357262 - RNA, 19 nt, Artificial Sequence
  Description of Artificial Sequence: Synthetic oligonucleotide
cacaaagagggaaugccua

SEQ ID NO: 357263 - RNA, 19 nt, Artificial Sequence
  Description of Artificial Sequence: Synthetic oligonucleotide
gguuguuuacuaggauugg

SEQ ID NO: 357264 - RNA, 19 nt, Artificial Sequence
  Description of Artificial Sequence: Synthetic oligonucleotide
uuagcaggcuuugaauguu

SEQ ID NO: 357265 - RNA, 19 nt, Artificial Sequence
  Description of Artificial Sequence: Synthetic oligonucleotide
aaccccuaauugugcuuga

SEQ ID NO: 357266 - RNA, 19 nt, Artificial Sequence
  Description of Artificial Sequence: Synthetic oligonucleotide
cauauugcucauagacaga

SEQ ID NO: 357267 - RNA, 19 nt, Artificial Sequence
  Description of Artificial Sequence: Synthetic oligonucleotide
uaauugugcuugagguaua

SEQ ID NO: 357268 - RNA, 19 nt, Artificial Sequence
  Description of Artificial Sequence: Synthetic oligonucleotide
guaucgauccaaauccaaa

SEQ ID NO: 357269 - RNA, 19 nt, Artificial Sequence
  Description of Artificial Sequence: Synthetic oligonucleotide
ugaacagcuguuggauagu

SEQ ID NO: 357270 - RNA, 19 nt, Artificial Sequence
  Description of Artificial Sequence: Synthetic oligonucleotide
caauuccuuugcagcacug

SEQ ID NO: 357271 - RNA, 19 nt, Artificial Sequence
  Description of Artificial Sequence: Synthetic oligonucleotide
uaagaaggaauagccuguu

SEQ ID NO: 357272 - RNA, 19 nt, Artificial Sequence
  Description of Artificial Sequence: Synthetic oligonucleotide
gggagaauaccacaauaaa

SEQ ID NO: 357273 - RNA, 19 nt, Artificial Sequence
  Description of Artificial Sequence: Synthetic oligonucleotide
auagcacggcaaauuaggu

SEQ ID NO: 357274 - RNA, 19 nt, Artificial Sequence
  Description of Artificial Sequence: Synthetic oligonucleotide
guauaaucuggcuguuuua

SEQ ID NO: 357275 - RNA, 19 nt, Artificial Sequence
  Description of Artificial Sequence: Synthetic oligonucleotide
uuaaaaguucucgcuccuu

SEQ ID NO: 357276 - RNA, 19 nt, Artificial Sequence
  Description of Artificial Sequence: Synthetic oligonucleotide
gagauacaccugucaugug

SEQ ID NO: 357277 - RNA, 19 nt, Artificial Sequence
  Description of Artificial Sequence: Synthetic oligonucleotide
aucaagcuuucaugugggu

SEQ ID NO: 357278 - RNA, 19 nt, Artificial Sequence
  Description of Artificial Sequence: Synthetic oligonucleotide
ugaaaacccacagccuaua

SEQ ID NO: 357279 - RNA, 19 nt, Artificial Sequence
  Description of Artificial Sequence: Synthetic oligonucleotide
cuuaucucccugaauacuu

SEQ ID NO: 357280 - RNA, 19 nt, Artificial Sequence
  Description of Artificial Sequence: Synthetic oligonucleotide
gguacagacacaauuuaua

SEQ ID NO: 357281 - RNA, 19 nt, Artificial Sequence
  Description of Artificial Sequence: Synthetic oligonucleotide
ucaagccucugagucuucu

SEQ ID NO: 357282 - RNA, 19 nt, Artificial Sequence
  Description of Artificial Sequence: Synthetic oligonucleotide
cauacucuauuggucccac

SEQ ID NO: 357283 - RNA, 19 nt, Artificial Sequence
  Description of Artificial Sequence: Synthetic oligonucleotide
gccagcuaaagugacaaca

SEQ ID NO: 357284 - RNA, 19 nt, Artificial Sequence
  Description of Artificial Sequence: Synthetic oligonucleotide
cauacuaguuacuguuucu

SEQ ID NO: 357285 - RNA, 19 nt, Artificial Sequence
  Description of Artificial Sequence: Synthetic oligonucleotide
ucccugguuauucgagaau

SEQ ID NO: 357286 - RNA, 19 nt, Artificial Sequence
  Description of Artificial Sequence: Synthetic oligonucleotide
auacaauucuguggucaca

SEQ ID NO: 357287 - RNA, 19 nt, Artificial Sequence
  Description of Artificial Sequence: Synthetic oligonucleotide
gacacuguagcugcacaaa

SEQ ID NO: 357288 - RNA, 19 nt, Artificial Sequence
  Description of Artificial Sequence: Synthetic oligonucleotide
uaauucuauccugcagcuc

SEQ ID NO: 357289 - RNA, 19 nt, Artificial Sequence
  Description of Artificial Sequence: Synthetic oligonucleotide
acgauacagucaucacugu

SEQ ID NO: 357290 - RNA, 19 nt, Artificial Sequence
  Description of Artificial Sequence: Synthetic oligonucleotide
cuccuggguaucacuauca

SEQ ID NO: 357291 - RNA, 19 nt, Artificial Sequence
  Description of Artificial Sequence: Synthetic oligonucleotide
guauccucggagacagagc

SEQ ID NO: 357292 - RNA, 19 nt, Artificial Sequence
  Description of Artificial Sequence: Synthetic oligonucleotide
gcuaaaccccuaauugugc

SEQ ID NO: 357293 - RNA, 19 nt, Artificial Sequence
  Description of Artificial Sequence: Synthetic oligonucleotide
gcuuugaauguucacaaau

SEQ ID NO: 357294 - RNA, 19 nt, Artificial Sequence
  Description of Artificial Sequence: Synthetic oligonucleotide
auaucguauggaugucauu

SEQ ID NO: 357295 - RNA, 19 nt, Artificial Sequence
  Description of Artificial Sequence: Synthetic oligonucleotide
agucuggcuaaaccccuaa

SEQ ID NO: 357296 - RNA, 19 nt, Artificial Sequence
  Description of Artificial Sequence: Synthetic oligonucleotide
agcuugggauauaacauuu

SEQ ID NO: 357297 - RNA, 19 nt, Artificial Sequence
  Description of Artificial Sequence: Synthetic oligonucleotide
cacugaagcagagauuuaa

SEQ ID NO: 357298 - RNA, 19 nt, Artificial Sequence
  Description of Artificial Sequence: Synthetic oligonucleotide
gagcacagaugguucaacu

SEQ ID NO: 357299 - RNA, 19 nt, Artificial Sequence
  Description of Artificial Sequence: Synthetic oligonucleotide
gaauugucucauaaucuau

SEQ ID NO: 357300 - RNA, 19 nt, Artificial Sequence
  Description of Artificial Sequence: Synthetic oligonucleotide
uccagaggaaugagauauu

SEQ ID NO: 357301 - RNA, 19 nt, Artificial Sequence
  Description of Artificial Sequence: Synthetic oligonucleotide
gaagccguuagagcacaga

SEQ ID NO: 357302 - RNA, 19 nt, Artificial Sequence
  Description of Artificial Sequence: Synthetic oligonucleotide
agccguuagagcacagaug

SEQ ID NO: 357303 - RNA, 19 nt, Artificial Sequence
  Description of Artificial Sequence: Synthetic oligonucleotide
caucccugguuauucgaga

SEQ ID NO: 357304 - RNA, 19 nt, Artificial Sequence
  Description of Artificial Sequence: Synthetic oligonucleotide
gagucugaugagagcaaga

SEQ ID NO: 357305 - RNA, 19 nt, Artificial Sequence
  Description of Artificial Sequence: Synthetic oligonucleotide
ccccuaauugugcuugagg

SEQ ID NO: 357306 - RNA, 19 nt, Artificial Sequence
  Description of Artificial Sequence: Synthetic oligonucleotide
ucagagcuaugaucucaau

SEQ ID NO: 357307 - RNA, 19 nt, Artificial Sequence
  Description of Artificial Sequence: Synthetic oligonucleotide
ggucaacaugagcaaugcc

SEQ ID NO: 357308 - RNA, 19 nt, Artificial Sequence
  Description of Artificial Sequence: Synthetic oligonucleotide
ggagaauaccacaauaaau

SEQ ID NO: 357309 - RNA, 19 nt, Artificial Sequence
  Description of Artificial Sequence: Synthetic oligonucleotide
auacucuauuggucccaca

SEQ ID NO: 357310 - RNA, 19 nt, Artificial Sequence
  Description of Artificial Sequence: Synthetic oligonucleotide
ggacgauacagucaucacu

SEQ ID NO: 357311 - RNA, 19 nt, Artificial Sequence
  Description of Artificial Sequence: Synthetic oligonucleotide
ggugcugcucguccucagg

SEQ ID NO: 357312 - RNA, 19 nt, Artificial Sequence
  Description of Artificial Sequence: Synthetic oligonucleotide
caauccgaauuuccucuga

SEQ ID NO: 357313 - RNA, 19 nt, Artificial Sequence
  Description of Artificial Sequence: Synthetic oligonucleotide
uagugucaucccugguuau

SEQ ID NO: 357314 - RNA, 19 nt, Artificial Sequence
  Description of Artificial Sequence: Synthetic oligonucleotide
gaugucucucucagcggga

SEQ ID NO: 357315 - RNA, 19 nt, Artificial Sequence
  Description of Artificial Sequence: Synthetic oligonucleotide
gaagucuggcuaaaccccu

SEQ ID NO: 357316 - RNA, 19 nt, Artificial Sequence
  Description of Artificial Sequence: Synthetic oligonucleotide
cuauccugcagcuccucua

SEQ ID NO: 357317 - RNA, 19 nt, Artificial Sequence
  Description of Artificial Sequence: Synthetic oligonucleotide
cucgaaaaccgcucagcua

SEQ ID NO: 357318 - RNA, 19 nt, Artificial Sequence
  Description of Artificial Sequence: Synthetic oligonucleotide
cagcuaaagugacaacaaa

SEQ ID NO: 357319 - RNA, 19 nt, Artificial Sequence
  Description of Artificial Sequence: Synthetic oligonucleotide
cgauccaaauccaaauuca

SEQ ID NO: 357320 - RNA, 19 nt, Artificial Sequence
  Description of Artificial Sequence: Synthetic oligonucleotide
cucguccucaggaggguca

SEQ ID NO: 357321 - RNA, 19 nt, Artificial Sequence
  Description of Artificial Sequence: Synthetic oligonucleotide
auuaaggcucagagcuaug

SEQ ID NO: 357322 - RNA, 19 nt, Artificial Sequence
  Description of Artificial Sequence: Synthetic oligonucleotide
cugccauuagcaggcuuug

SEQ ID NO: 357323 - RNA, 19 nt, Artificial Sequence
  Description of Artificial Sequence: Synthetic oligonucleotide
cucccugaauacuuuacau

SEQ ID NO: 357324 - RNA, 19 nt, Artificial Sequence
  Description of Artificial Sequence: Synthetic oligonucleotide
cccuaauugugcuugaggu

SEQ ID NO: 357325 - RNA, 19 nt, Artificial Sequence
  Description of Artificial Sequence: Synthetic oligonucleotide
accccuaauugugcuugag

SEQ ID NO: 357326 - RNA, 19 nt, Artificial Sequence
  Description of Artificial Sequence: Synthetic oligonucleotide
agugucaucccugguuauu

SEQ ID NO: 357327 - RNA, 19 nt, Artificial Sequence
  Description of Artificial Sequence: Synthetic oligonucleotide
ggggaauuguccuuuguau

SEQ ID NO: 357328 - RNA, 19 nt, Artificial Sequence
  Description of Artificial Sequence: Synthetic oligonucleotide
gggacgauacagucaucac

SEQ ID NO: 357329 - RNA, 19 nt, Artificial Sequence
  Description of Artificial Sequence: Synthetic oligonucleotide
gugaagcgcacacuucugu

SEQ ID NO: 357330 - RNA, 19 nt, Artificial Sequence
  Description of Artificial Sequence: Synthetic oligonucleotide
agcgcacacuucugugagu

SEQ ID NO: 357331 - RNA, 19 nt, Artificial Sequence
  Description of Artificial Sequence: Synthetic oligonucleotide
cccugguuauucgagaauc

SEQ ID NO: 357332 - RNA, 19 nt, Artificial Sequence
  Description of Artificial Sequence: Synthetic oligonucleotide
gcaccaucccauuuuccuc

SEQ ID NO: 357333 - RNA, 19 nt, Artificial Sequence
  Description of Artificial Sequence: Synthetic oligonucleotide
cuggcauacuaguuacugu

SEQ ID NO: 357334 - RNA, 19 nt, Artificial Sequence
  Description of Artificial Sequence: Synthetic oligonucleotide
ccuggguaucacuaucauc

SEQ ID NO: 357335 - RNA, 19 nt, Artificial Sequence
  Description of Artificial Sequence: Synthetic oligonucleotide
cgggaagacuguagaaccg

SEQ ID NO: 357336 - RNA, 19 nt, Artificial Sequence
  Description of Artificial Sequence: Synthetic oligonucleotide
cauuaaggcucagagcuau

SEQ ID NO: 357337 - RNA, 19 nt, Artificial Sequence
  Description of Artificial Sequence: Synthetic oligonucleotide
ucguccucaggagggucac

SEQ ID NO: 357338 - RNA, 19 nt, Artificial Sequence
  Description of Artificial Sequence: Synthetic oligonucleotide
gucaugugccagugauauc

SEQ ID NO: 357339 - RNA, 19 nt, Artificial Sequence
  Description of Artificial Sequence: Synthetic oligonucleotide
cagaggaaugagauauuau

SEQ ID NO: 357340 - RNA, 19 nt, Artificial Sequence
  Description of Artificial Sequence: Synthetic oligonucleotide
aagucuggcuaaaccccua

SEQ ID NO: 357341 - RNA, 19 nt, Artificial Sequence
  Description of Artificial Sequence: Synthetic oligonucleotide
cagugaaaacccacagccu

SEQ ID NO: 357342 - RNA, 19 nt, Artificial Sequence
  Description of Artificial Sequence: Synthetic oligonucleotide
ugaccacggugaagcgcac

SEQ ID NO: 357343 - RNA, 19 nt, Artificial Sequence
  Description of Artificial Sequence: Synthetic oligonucleotide
gcauuauaucucagacccc

SEQ ID NO: 357344 - RNA, 19 nt, Artificial Sequence
  Description of Artificial Sequence: Synthetic oligonucleotide
agcuagaaagggaggccaa

SEQ ID NO: 357345 - RNA, 19 nt, Artificial Sequence
  Description of Artificial Sequence: Synthetic oligonucleotide
cagugauaucagaggcaca

SEQ ID NO: 357346 - RNA, 19 nt, Artificial Sequence
  Description of Artificial Sequence: Synthetic oligonucleotide
guagggcauggagugcuuc

SEQ ID NO: 357347 - RNA, 19 nt, Artificial Sequence
  Description of Artificial Sequence: Synthetic oligonucleotide
ugcucguccucaggagggu

SEQ ID NO: 357348 - RNA, 19 nt, Artificial Sequence
  Description of Artificial Sequence: Synthetic oligonucleotide
ccguuauuucuguuucauc

SEQ ID NO: 357349 - RNA, 19 nt, Artificial Sequence
  Description of Artificial Sequence: Synthetic oligonucleotide
acggcaaauuagguagauu

SEQ ID NO: 357350 - RNA, 19 nt, Artificial Sequence
  Description of Artificial Sequence: Synthetic oligonucleotide
ccuaauugugcuugaggua

SEQ ID NO: 357351 - RNA, 19 nt, Artificial Sequence
  Description of Artificial Sequence: Synthetic oligonucleotide
cuaugaucucaauccgaau

SEQ ID NO: 357352 - RNA, 19 nt, Artificial Sequence
  Description of Artificial Sequence: Synthetic oligonucleotide
gcgcacacuucugugaguc

SEQ ID NO: 357353 - RNA, 19 nt, Artificial Sequence
  Description of Artificial Sequence: Synthetic oligonucleotide
cuggcucuaguucuuccgu

SEQ ID NO: 357354 - RNA, 19 nt, Artificial Sequence
  Description of Artificial Sequence: Synthetic oligonucleotide
cagggaauaguauggccuu

SEQ ID NO: 357355 - RNA, 19 nt, Artificial Sequence
  Description of Artificial Sequence: Synthetic oligonucleotide
agggaauaguauggccuua

SEQ ID NO: 357356 - RNA, 19 nt, Artificial Sequence
  Description of Artificial Sequence: Synthetic oligonucleotide
cgagaaucauuaaggcuca

SEQ ID NO: 357357 - RNA, 19 nt, Artificial Sequence
  Description of Artificial Sequence: Synthetic oligonucleotide
cauggagugcuuccacggu

SEQ ID NO: 357358 - RNA, 19 nt, Artificial Sequence
  Description of Artificial Sequence: Synthetic oligonucleotide
ugccuccgucugcucgggc

SEQ ID NO: 357359 - RNA, 19 nt, Artificial Sequence
  Description of Artificial Sequence: Synthetic oligonucleotide
cggcaaauuagguagauuu

SEQ ID NO: 357360 - RNA, 19 nt, Artificial Sequence
  Description of Artificial Sequence: Synthetic oligonucleotide
ccaugguacagacacaauu

SEQ ID NO: 357361 - RNA, 19 nt, Artificial Sequence
  Description of Artificial Sequence: Synthetic oligonucleotide
gugugccaacaaauuaaua

SEQ ID NO: 357362 - RNA, 19 nt, Artificial Sequence
  Description of Artificial Sequence: Synthetic oligonucleotide
cugggacgauacagucauc

SEQ ID NO: 357363 - RNA, 19 nt, Artificial Sequence
  Description of Artificial Sequence: Synthetic oligonucleotide
cugccuccgucugcucggg

SEQ ID NO: 357364 - RNA, 19 nt, Artificial Sequence
  Description of Artificial Sequence: Synthetic oligonucleotide
aggaggagccugagauaca

SEQ ID NO: 357365 - RNA, 19 nt, Artificial Sequence
  Description of Artificial Sequence: Synthetic oligonucleotide
ggaauaguauggccuuaau

SEQ ID NO: 357366 - RNA, 19 nt, Artificial Sequence
  Description of Artificial Sequence: Synthetic oligonucleotide
ccauuagcaggcuuugaau

SEQ ID NO: 357367 - RNA, 19 nt, Artificial Sequence
  Description of Artificial Sequence: Synthetic oligonucleotide
caacaugagcaaugccaau

SEQ ID NO: 357368 - RNA, 19 nt, Artificial Sequence
  Description of Artificial Sequence: Synthetic oligonucleotide
gcuagaaagggaggccaaa

SEQ ID NO: 357369 - RNA, 19 nt, Artificial Sequence
  Description of Artificial Sequence: Synthetic oligonucleotide
gccgaugcugccuccgucu

SEQ ID NO: 357370 - RNA, 19 nt, Artificial Sequence
  Description of Artificial Sequence: Synthetic oligonucleotide
ccgaugcugccuccgucug

SEQ ID NO: 357371 - RNA, 19 nt, Artificial Sequence
  Description of Artificial Sequence: Synthetic oligonucleotide
gcacggcaaauuagguaga

SEQ ID NO: 357372 - RNA, 19 nt, Artificial Sequence
  Description of Artificial Sequence: Synthetic oligonucleotide
cuccgucugcucgggcauc

SEQ ID NO: 357373 - RNA, 19 nt, Artificial Sequence
  Description of Artificial Sequence: Synthetic oligonucleotide
cacggcaaauuagguagau

SEQ ID NO: 357374 - RNA, 19 nt, Artificial Sequence
  Description of Artificial Sequence: Synthetic oligonucleotide
ggcauacuaguuacuguuu

SEQ ID NO: 357375 - RNA, 19 nt, Artificial Sequence
  Description of Artificial Sequence: Synthetic oligonucleotide
cguuagagcacagaugguu

SEQ ID NO: 357376 - RNA, 19 nt, Artificial Sequence
  Description of Artificial Sequence: Synthetic oligonucleotide
cgaauuuccucugaugauu

SEQ ID NO: 357377 - RNA, 19 nt, Artificial Sequence
  Description of Artificial Sequence: Synthetic oligonucleotide
gcuugggauauaacauuuu

SEQ ID NO: 357378 - RNA, 19 nt, Artificial Sequence
  Description of Artificial Sequence: Synthetic oligonucleotide
ccguuagagcacagauggu

SEQ ID NO: 357379 - RNA, 19 nt, Artificial Sequence
  Description of Artificial Sequence: Synthetic oligonucleotide
uuuauuugaaccagcaccu

SEQ ID NO: 357380 - RNA, 19 nt, Artificial Sequence
  Description of Artificial Sequence: Synthetic oligonucleotide
ucuggcauuacgaugccgg

SEQ ID NO: 357381 - RNA, 19 nt, Artificial Sequence
  Description of Artificial Sequence: Synthetic oligonucleotide
auuuaaggacacccgaugg

SEQ ID NO: 357382 - RNA, 19 nt, Artificial Sequence
  Description of Artificial Sequence: Synthetic oligonucleotide
caaauuuggguccaccucg

SEQ ID NO: 357383 - RNA, 19 nt, Artificial Sequence
  Description of Artificial Sequence: Synthetic oligonucleotide
aagaacucgaacacuacuc

SEQ ID NO: 357384 - RNA, 19 nt, Artificial Sequence
  Description of Artificial Sequence: Synthetic oligonucleotide
caugcuuagucaauauugg

SEQ ID NO: 357385 - RNA, 19 nt, Artificial Sequence
  Description of Artificial Sequence: Synthetic oligonucleotide
agaaccuccgccguaaccc

SEQ ID NO: 357386 - RNA, 19 nt, Artificial Sequence
  Description of Artificial Sequence: Synthetic oligonucleotide
aagacacggagucccaaac

SEQ ID NO: 357387 - RNA, 19 nt, Artificial Sequence
  Description of Artificial Sequence: Synthetic oligonucleotide
ucauauuuaaggccacgcc

SEQ ID NO: 357388 - RNA, 19 nt, Artificial Sequence
  Description of Artificial Sequence: Synthetic oligonucleotide
auuccuaggacuuuaugga

SEQ ID NO: 357389 - RNA, 19 nt, Artificial Sequence
  Description of Artificial Sequence: Synthetic oligonucleotide
accggguauaaacagacag

SEQ ID NO: 357390 - RNA, 19 nt, Artificial Sequence
  Description of Artificial Sequence: Synthetic oligonucleotide
aaccguuugucguggcugc

SEQ ID NO: 357391 - RNA, 19 nt, Artificial Sequence
  Description of Artificial Sequence: Synthetic oligonucleotide
uuauggaguugaccaaacg

SEQ ID NO: 357392 - RNA, 19 nt, Artificial Sequence
  Description of Artificial Sequence: Synthetic oligonucleotide
cuugguaugaagagcugcc

SEQ ID NO: 357393 - RNA, 19 nt, Artificial Sequence
  Description of Artificial Sequence: Synthetic oligonucleotide
cuguguuguaggaugaccc

SEQ ID NO: 357394 - RNA, 19 nt, Artificial Sequence
  Description of Artificial Sequence: Synthetic oligonucleotide
gaugacguaucccuucugc

SEQ ID NO: 357395 - RNA, 19 nt, Artificial Sequence
  Description of Artificial Sequence: Synthetic oligonucleotide
auuuggguccaccucggac

SEQ ID NO: 357396 - RNA, 19 nt, Artificial Sequence
  Description of Artificial Sequence: Synthetic oligonucleotide
uggaguugaccaaacgcag

SEQ ID NO: 357397 - RNA, 19 nt, Artificial Sequence
  Description of Artificial Sequence: Synthetic oligonucleotide
agcuaaauaggggucacgg

SEQ ID NO: 357398 - RNA, 19 nt, Artificial Sequence
  Description of Artificial Sequence: Synthetic oligonucleotide
auggcaacuaacaaaccac

SEQ ID NO: 357399 - RNA, 19 nt, Artificial Sequence
  Description of Artificial Sequence: Synthetic oligonucleotide
ucuucgaagggcuucgcca

SEQ ID NO: 357400 - RNA, 19 nt, Artificial Sequence
  Description of Artificial Sequence: Synthetic oligonucleotide
auauuuaaggccacgccuc

SEQ ID NO: 357401 - RNA, 19 nt, Artificial Sequence
  Description of Artificial Sequence: Synthetic oligonucleotide
uccauaacuggguucuugc

SEQ ID NO: 357402 - RNA, 19 nt, Artificial Sequence
  Description of Artificial Sequence: Synthetic oligonucleotide
gcuuagucaauauuggccc

SEQ ID NO: 357403 - RNA, 19 nt, Artificial Sequence
  Description of Artificial Sequence: Synthetic oligonucleotide
uguaguuggaugagccacc

SEQ ID NO: 357404 - RNA, 19 nt, Artificial Sequence
  Description of Artificial Sequence: Synthetic oligonucleotide
acgucggcaacauggacgg

SEQ ID NO: 357405 - RNA, 19 nt, Artificial Sequence
  Description of Artificial Sequence: Synthetic oligonucleotide
gacacaagacuucagccca

SEQ ID NO: 357406 - RNA, 19 nt, Artificial Sequence
  Description of Artificial Sequence: Synthetic oligonucleotide
gaccaaacgcagcaagccg

SEQ ID NO: 357407 - RNA, 19 nt, Artificial Sequence
  Description of Artificial Sequence: Synthetic oligonucleotide
aacuggguucuugccaugc

SEQ ID NO: 357408 - RNA, 19 nt, Artificial Sequence
  Description of Artificial Sequence: Synthetic oligonucleotide
agaacucgaacacuacuca

SEQ ID NO: 357409 - RNA, 19 nt, Artificial Sequence
  Description of Artificial Sequence: Synthetic oligonucleotide
cacccauuggccuauuggc

SEQ ID NO: 357410 - RNA, 19 nt, Artificial Sequence
  Description of Artificial Sequence: Synthetic oligonucleotide
gaacucgaacacuacucag

SEQ ID NO: 357411 - RNA, 19 nt, Artificial Sequence
  Description of Artificial Sequence: Synthetic oligonucleotide
acucagacaagguguaaug

SEQ ID NO: 357412 - RNA, 19 nt, Artificial Sequence
  Description of Artificial Sequence: Synthetic oligonucleotide
uaggacuuuauggaguuga

SEQ ID NO: 357413 - RNA, 19 nt, Artificial Sequence
  Description of Artificial Sequence: Synthetic oligonucleotide
ucacaccggguauaaacag

SEQ ID NO: 357414 - RNA, 19 nt, Artificial Sequence
  Description of Artificial Sequence: Synthetic oligonucleotide
accaaacgcagcaagccgc

SEQ ID NO: 357415 - RNA, 19 nt, Artificial Sequence
  Description of Artificial Sequence: Synthetic oligonucleotide
ugacaaaccguuugucgug

SEQ ID NO: 357416 - RNA, 19 nt, Artificial Sequence
  Description of Artificial Sequence: Synthetic oligonucleotide
agacccuuggcuaccaggc

SEQ ID NO: 357417 - RNA, 19 nt, Artificial Sequence
  Description of Artificial Sequence: Synthetic oligonucleotide
ugucguagcuguagucacg

SEQ ID NO: 357418 - RNA, 19 nt, Artificial Sequence
  Description of Artificial Sequence: Synthetic oligonucleotide
uggcaacuaacaaaccacu

SEQ ID NO: 357419 - RNA, 19 nt, Artificial Sequence
  Description of Artificial Sequence: Synthetic oligonucleotide
aaauuuggguccaccucgg

SEQ ID NO: 357420 - RNA, 19 nt, Artificial Sequence
  Description of Artificial Sequence: Synthetic oligonucleotide
accuugugaggacugguag

SEQ ID NO: 357421 - RNA, 19 nt, Artificial Sequence
  Description of Artificial Sequence: Synthetic oligonucleotide
acaccggguauaaacagac

SEQ ID NO: 357422 - RNA, 19 nt, Artificial Sequence
  Description of Artificial Sequence: Synthetic oligonucleotide
uauuuaaggccacgccucu

SEQ ID NO: 357423 - RNA, 19 nt, Artificial Sequence
  Description of Artificial Sequence: Synthetic oligonucleotide
agguguaauggcaacuaac

SEQ ID NO: 357424 - RNA, 19 nt, Artificial Sequence
  Description of Artificial Sequence: Synthetic oligonucleotide
gacguaucccuucugcaac

SEQ ID NO: 357425 - RNA, 19 nt, Artificial Sequence
  Description of Artificial Sequence: Synthetic oligonucleotide
auauccggcaccagcauuc

SEQ ID NO: 357426 - RNA, 19 nt, Artificial Sequence
  Description of Artificial Sequence: Synthetic oligonucleotide
ucugucuagaugcccaaua

SEQ ID NO: 357427 - RNA, 19 nt, Artificial Sequence
  Description of Artificial Sequence: Synthetic oligonucleotide
acugacuguagccugccgu

SEQ ID NO: 357428 - RNA, 19 nt, Artificial Sequence
  Description of Artificial Sequence: Synthetic oligonucleotide
cugucuagaugcccaauag

SEQ ID NO: 357429 - RNA, 19 nt, Artificial Sequence
  Description of Artificial Sequence: Synthetic oligonucleotide
gugaugaguagccuccuug

SEQ ID NO: 357430 - RNA, 19 nt, Artificial Sequence
  Description of Artificial Sequence: Synthetic oligonucleotide
aacucgaacacuacucaga

SEQ ID NO: 357431 - RNA, 19 nt, Artificial Sequence
  Description of Artificial Sequence: Synthetic oligonucleotide
uacgaugccggaugccagg

SEQ ID NO: 357432 - RNA, 19 nt, Artificial Sequence
  Description of Artificial Sequence: Synthetic oligonucleotide
uuacgaugccggaugccag

SEQ ID NO: 357433 - RNA, 19 nt, Artificial Sequence
  Description of Artificial Sequence: Synthetic oligonucleotide
cacucggguacacaagucc

SEQ ID NO: 357434 - RNA, 19 nt, Artificial Sequence
  Description of Artificial Sequence: Synthetic oligonucleotide
auuacgaugccggaugcca

SEQ ID NO: 357435 - RNA, 19 nt, Artificial Sequence
  Description of Artificial Sequence: Synthetic oligonucleotide
acggaugacaaugacacaa

SEQ ID NO: 357436 - RNA, 19 nt, Artificial Sequence
  Description of Artificial Sequence: Synthetic oligonucleotide
ucgaagguugggagguggg

SEQ ID NO: 357437 - RNA, 19 nt, Artificial Sequence
  Description of Artificial Sequence: Synthetic oligonucleotide
ucuuccauggggcguuuca

SEQ ID NO: 357438 - RNA, 19 nt, Artificial Sequence
  Description of Artificial Sequence: Synthetic oligonucleotide
ugacguaucccuucugcaa

SEQ ID NO: 357439 - RNA, 19 nt, Artificial Sequence
  Description of Artificial Sequence: Synthetic oligonucleotide
accucguuaugcaugggac

SEQ ID NO: 357440 - RNA, 19 nt, Artificial Sequence
  Description of Artificial Sequence: Synthetic oligonucleotide
ugccguggcggaauuacug

SEQ ID NO: 357441 - RNA, 19 nt, Artificial Sequence
  Description of Artificial Sequence: Synthetic oligonucleotide
gguuggugccaccaaaucc

SEQ ID NO: 357442 - RNA, 19 nt, Artificial Sequence
  Description of Artificial Sequence: Synthetic oligonucleotide
gacaagguguaauggcaac

SEQ ID NO: 357443 - RNA, 19 nt, Artificial Sequence
  Description of Artificial Sequence: Synthetic oligonucleotide
gacuguagccaccuuguga

SEQ ID NO: 357444 - RNA, 19 nt, Artificial Sequence
  Description of Artificial Sequence: Synthetic oligonucleotide
cacccgauggaacucacac

SEQ ID NO: 357445 - RNA, 19 nt, Artificial Sequence
  Description of Artificial Sequence: Synthetic oligonucleotide
caacuggugaugugcagac

SEQ ID NO: 357446 - RNA, 19 nt, Artificial Sequence
  Description of Artificial Sequence: Synthetic oligonucleotide
guccuagucauguguuccg

SEQ ID NO: 357447 - RNA, 19 nt, Artificial Sequence
  Description of Artificial Sequence: Synthetic oligonucleotide
ugugugauaucuucccguu

SEQ ID NO: 357448 - RNA, 19 nt, Artificial Sequence
  Description of Artificial Sequence: Synthetic oligonucleotide
agucccuuaggacacggau

SEQ ID NO: 357449 - RNA, 19 nt, Artificial Sequence
  Description of Artificial Sequence: Synthetic oligonucleotide
aggauuguguggcuuggca

SEQ ID NO: 357450 - RNA, 19 nt, Artificial Sequence
  Description of Artificial Sequence: Synthetic oligonucleotide
augacguaucccuucugca

SEQ ID NO: 357451 - RNA, 19 nt, Artificial Sequence
  Description of Artificial Sequence: Synthetic oligonucleotide
ugcggcgugcuguagcugc

SEQ ID NO: 357452 - RNA, 19 nt, Artificial Sequence
  Description of Artificial Sequence: Synthetic oligonucleotide
cuguaguucgacugugaug

SEQ ID NO: 357453 - RNA, 19 nt, Artificial Sequence
  Description of Artificial Sequence: Synthetic oligonucleotide
cauuaacagaugacguauc

SEQ ID NO: 357454 - RNA, 19 nt, Artificial Sequence
  Description of Artificial Sequence: Synthetic oligonucleotide
cugacuguagccugccgug

SEQ ID NO: 357455 - RNA, 19 nt, Artificial Sequence
  Description of Artificial Sequence: Synthetic oligonucleotide
uaccgauggacuucucaca

SEQ ID NO: 357456 - RNA, 19 nt, Artificial Sequence
  Description of Artificial Sequence: Synthetic oligonucleotide
uugguaugaagagcugccc

SEQ ID NO: 357457 - RNA, 19 nt, Artificial Sequence
  Description of Artificial Sequence: Synthetic oligonucleotide
uuaaggccacgccucuucu

SEQ ID NO: 357458 - RNA, 19 nt, Artificial Sequence
  Description of Artificial Sequence: Synthetic oligonucleotide
uguuccgacuguagccacc

SEQ ID NO: 357459 - RNA, 19 nt, Artificial Sequence
  Description of Artificial Sequence: Synthetic oligonucleotide
acugcgccaguggacaugg

SEQ ID NO: 357460 - RNA, 19 nt, Artificial Sequence
  Description of Artificial Sequence: Synthetic oligonucleotide
agggucauaaaugccagaa

SEQ ID NO: 357461 - RNA, 19 nt, Artificial Sequence
  Description of Artificial Sequence: Synthetic oligonucleotide
ucuccuuacagagcagaac

SEQ ID NO: 357462 - RNA, 19 nt, Artificial Sequence
  Description of Artificial Sequence: Synthetic oligonucleotide
accccaagagggcacucgg

SEQ ID NO: 357463 - RNA, 19 nt, Artificial Sequence
  Description of Artificial Sequence: Synthetic oligonucleotide
uugccuugguaugaagagc

SEQ ID NO: 357464 - RNA, 19 nt, Artificial Sequence
  Description of Artificial Sequence: Synthetic oligonucleotide
auguguuccgccuucuguu

SEQ ID NO: 357465 - RNA, 19 nt, Artificial Sequence
  Description of Artificial Sequence: Synthetic oligonucleotide
cacggcacgggucccaggg

SEQ ID NO: 357466 - RNA, 19 nt, Artificial Sequence
  Description of Artificial Sequence: Synthetic oligonucleotide
aauuuggguccaccucgga

SEQ ID NO: 357467 - RNA, 19 nt, Artificial Sequence
  Description of Artificial Sequence: Synthetic oligonucleotide
caucacgccccucaggguc

SEQ ID NO: 357468 - RNA, 19 nt, Artificial Sequence
  Description of Artificial Sequence: Synthetic oligonucleotide
aguucgacugugaugagua

SEQ ID NO: 357469 - RNA, 19 nt, Artificial Sequence
  Description of Artificial Sequence: Synthetic oligonucleotide
cacggauguucccuccucg

SEQ ID NO: 357470 - RNA, 19 nt, Artificial Sequence
  Description of Artificial Sequence: Synthetic oligonucleotide
cucaaucucccaagacgag

SEQ ID NO: 357471 - RNA, 19 nt, Artificial Sequence
  Description of Artificial Sequence: Synthetic oligonucleotide
gcacccauuggccuauugg

SEQ ID NO: 357472 - RNA, 19 nt, Artificial Sequence
  Description of Artificial Sequence: Synthetic oligonucleotide
acaagguguaauggcaacu

SEQ ID NO: 357473 - RNA, 19 nt, Artificial Sequence
  Description of Artificial Sequence: Synthetic oligonucleotide
gaaccuccgccguaacccc

SEQ ID NO: 357474 - RNA, 19 nt, Artificial Sequence
  Description of Artificial Sequence: Synthetic oligonucleotide
ggcguguccauauuuucug

SEQ ID NO: 357475 - RNA, 19 nt, Artificial Sequence
  Description of Artificial Sequence: Synthetic oligonucleotide
caugggaccucccaugcca

SEQ ID NO: 357476 - RNA, 19 nt, Artificial Sequence
  Description of Artificial Sequence: Synthetic oligonucleotide
gagcaugcugcgcacucug

SEQ ID NO: 357477 - RNA, 19 nt, Artificial Sequence
  Description of Artificial Sequence: Synthetic oligonucleotide
cucgaagguugggaggugg

SEQ ID NO: 357478 - RNA, 19 nt, Artificial Sequence
  Description of Artificial Sequence: Synthetic oligonucleotide
aggacuuuauggaguugac

SEQ ID NO: 357479 - RNA, 19 nt, Artificial Sequence
  Description of Artificial Sequence: Synthetic oligonucleotide
gagccauagcuguucccgc

SEQ ID NO: 357480 - RNA, 19 nt, Artificial Sequence
  Description of Artificial Sequence: Synthetic oligonucleotide
acugccguaaccauagcuu

SEQ ID NO: 357481 - RNA, 19 nt, Artificial Sequence
  Description of Artificial Sequence: Synthetic oligonucleotide
ccuauuggcaguaccgaug

SEQ ID NO: 357482 - RNA, 19 nt, Artificial Sequence
  Description of Artificial Sequence: Synthetic oligonucleotide
cacucuucgaagggcuucg

SEQ ID NO: 357483 - RNA, 19 nt, Artificial Sequence
  Description of Artificial Sequence: Synthetic oligonucleotide
uaguucgacugugaugagu

SEQ ID NO: 357484 - RNA, 19 nt, Artificial Sequence
  Description of Artificial Sequence: Synthetic oligonucleotide
acgaugccggaugccaggc

SEQ ID NO: 357485 - RNA, 19 nt, Artificial Sequence
  Description of Artificial Sequence: Synthetic oligonucleotide
uccuagucauguguuccgc

SEQ ID NO: 357486 - RNA, 19 nt, Artificial Sequence
  Description of Artificial Sequence: Synthetic oligonucleotide
cgauggacuucucacauag

SEQ ID NO: 357487 - RNA, 19 nt, Artificial Sequence
  Description of Artificial Sequence: Synthetic oligonucleotide
cagaaccuccgccguaacc

SEQ ID NO: 357488 - RNA, 19 nt, Artificial Sequence
  Description of Artificial Sequence: Synthetic oligonucleotide
cuuguuugccuugguauga

SEQ ID NO: 357489 - RNA, 19 nt, Artificial Sequence
  Description of Artificial Sequence: Synthetic oligonucleotide
aaagcucauuuaacucacu

SEQ ID NO: 357490 - RNA, 19 nt, Artificial Sequence
  Description of Artificial Sequence: Synthetic oligonucleotide
accacacggcaagaacucg

SEQ ID NO: 357491 - RNA, 19 nt, Artificial Sequence
  Description of Artificial Sequence: Synthetic oligonucleotide
caagucccuuaggacacgg

SEQ ID NO: 357492 - RNA, 19 nt, Artificial Sequence
  Description of Artificial Sequence: Synthetic oligonucleotide
guagaacugacuguagccu

SEQ ID NO: 357493 - RNA, 19 nt, Artificial Sequence
  Description of Artificial Sequence: Synthetic oligonucleotide
ccuuguuugccuugguaug

SEQ ID NO: 357494 - RNA, 19 nt, Artificial Sequence
  Description of Artificial Sequence: Synthetic oligonucleotide
acggauguucccuccucga

SEQ ID NO: 357495 - RNA, 19 nt, Artificial Sequence
  Description of Artificial Sequence: Synthetic oligonucleotide
cauuacgaugccggaugcc

SEQ ID NO: 357496 - RNA, 19 nt, Artificial Sequence
  Description of Artificial Sequence: Synthetic oligonucleotide
uuacugccguaaccauagc

SEQ ID NO: 357497 - RNA, 19 nt, Artificial Sequence
  Description of Artificial Sequence: Synthetic oligonucleotide
ggacuuuauggaguugacc

SEQ ID NO: 357498 - RNA, 19 nt, Artificial Sequence
  Description of Artificial Sequence: Synthetic oligonucleotide
uguagccugccguggcgga

SEQ ID NO: 357499 - RNA, 19 nt, Artificial Sequence
  Description of Artificial Sequence: Synthetic oligonucleotide
uaacuggguucuugccaug

SEQ ID NO: 357500 - RNA, 19 nt, Artificial Sequence
  Description of Artificial Sequence: Synthetic oligonucleotide
auuggccuauuggcaguac

SEQ ID NO: 357501 - RNA, 19 nt, Artificial Sequence
  Description of Artificial Sequence: Synthetic oligonucleotide
cacaccggguauaaacaga

SEQ ID NO: 357502 - RNA, 19 nt, Artificial Sequence
  Description of Artificial Sequence: Synthetic oligonucleotide
agacaagguguaauggcaa

SEQ ID NO: 357503 - RNA, 19 nt, Artificial Sequence
  Description of Artificial Sequence: Synthetic oligonucleotide
uggugaguuguagcugucu

SEQ ID NO: 357504 - RNA, 19 nt, Artificial Sequence
  Description of Artificial Sequence: Synthetic oligonucleotide
aucuggcauuacgaugccg

SEQ ID NO: 357505 - RNA, 19 nt, Artificial Sequence
  Description of Artificial Sequence: Synthetic oligonucleotide
gucguagcuguagucacga

SEQ ID NO: 357506 - RNA, 19 nt, Artificial Sequence
  Description of Artificial Sequence: Synthetic oligonucleotide
ggcaacuaacaaaccacug

SEQ ID NO: 357507 - RNA, 19 nt, Artificial Sequence
  Description of Artificial Sequence: Synthetic oligonucleotide
cgcaucacgccccucaggg

SEQ ID NO: 357508 - RNA, 19 nt, Artificial Sequence
  Description of Artificial Sequence: Synthetic oligonucleotide
acaagucccuuaggacacg

SEQ ID NO: 357509 - RNA, 19 nt, Artificial Sequence
  Description of Artificial Sequence: Synthetic oligonucleotide
caccucacagcguggcaac

SEQ ID NO: 357510 - RNA, 19 nt, Artificial Sequence
  Description of Artificial Sequence: Synthetic oligonucleotide
aacuggugaugugcagacu

SEQ ID NO: 357511 - RNA, 19 nt, Artificial Sequence
  Description of Artificial Sequence: Synthetic oligonucleotide
gguacaggggcucuuuucu

SEQ ID NO: 357512 - RNA, 19 nt, Artificial Sequence
  Description of Artificial Sequence: Synthetic oligonucleotide
ggaguugaccaaacgcagc

SEQ ID NO: 357513 - RNA, 19 nt, Artificial Sequence
  Description of Artificial Sequence: Synthetic oligonucleotide
acaccucacagcguggcaa

SEQ ID NO: 357514 - RNA, 19 nt, Artificial Sequence
  Description of Artificial Sequence: Synthetic oligonucleotide
uggcaguaccgauggacuu

SEQ ID NO: 357515 - RNA, 19 nt, Artificial Sequence
  Description of Artificial Sequence: Synthetic oligonucleotide
gcucauauuuaaggccacg

SEQ ID NO: 357516 - RNA, 19 nt, Artificial Sequence
  Description of Artificial Sequence: Synthetic oligonucleotide
cugugugauaucuucccgu

SEQ ID NO: 357517 - RNA, 19 nt, Artificial Sequence
  Description of Artificial Sequence: Synthetic oligonucleotide
ccuagucauguguuccgcc

SEQ ID NO: 357518 - RNA, 19 nt, Artificial Sequence
  Description of Artificial Sequence: Synthetic oligonucleotide
ucgcccacggauguucccu

SEQ ID NO: 357519 - RNA, 19 nt, Artificial Sequence
  Description of Artificial Sequence: Synthetic oligonucleotide
uauccggcaccagcauuca

SEQ ID NO: 357520 - RNA, 19 nt, Artificial Sequence
  Description of Artificial Sequence: Synthetic oligonucleotide
ggcaacuggugaugugcag

SEQ ID NO: 357521 - RNA, 19 nt, Artificial Sequence
  Description of Artificial Sequence: Synthetic oligonucleotide
ugguugugggcuucuccuu

SEQ ID NO: 357522 - RNA, 19 nt, Artificial Sequence
  Description of Artificial Sequence: Synthetic oligonucleotide
gaacucacaccggguauaa

SEQ ID NO: 357523 - RNA, 19 nt, Artificial Sequence
  Description of Artificial Sequence: Synthetic oligonucleotide
cuuggcuaccaggccgacc

SEQ ID NO: 357524 - RNA, 19 nt, Artificial Sequence
  Description of Artificial Sequence: Synthetic oligonucleotide
accucacagcguggcaacg

SEQ ID NO: 357525 - RNA, 19 nt, Artificial Sequence
  Description of Artificial Sequence: Synthetic oligonucleotide
aguagcugcccugcccgug

SEQ ID NO: 357526 - RNA, 19 nt, Artificial Sequence
  Description of Artificial Sequence: Synthetic oligonucleotide
gagggauaccacacggcaa

SEQ ID NO: 357527 - RNA, 19 nt, Artificial Sequence
  Description of Artificial Sequence: Synthetic oligonucleotide
cuaggacuuuauggaguug

SEQ ID NO: 357528 - RNA, 19 nt, Artificial Sequence
  Description of Artificial Sequence: Synthetic oligonucleotide
gcguguccauauuuucugc

SEQ ID NO: 357529 - RNA, 19 nt, Artificial Sequence
  Description of Artificial Sequence: Synthetic oligonucleotide
cguggcggaauuacugccg

SEQ ID NO: 357530 - RNA, 19 nt, Artificial Sequence
  Description of Artificial Sequence: Synthetic oligonucleotide
ucggguacacaagucccuu

SEQ ID NO: 357531 - RNA, 19 nt, Artificial Sequence
  Description of Artificial Sequence: Synthetic oligonucleotide
cucgcccacggauguuccc

SEQ ID NO: 357532 - RNA, 19 nt, Artificial Sequence
  Description of Artificial Sequence: Synthetic oligonucleotide
gaugaguagccuccuuguu

SEQ ID NO: 357533 - RNA, 19 nt, Artificial Sequence
  Description of Artificial Sequence: Synthetic oligonucleotide
caggauuguguggcuuggc

SEQ ID NO: 357534 - RNA, 19 nt, Artificial Sequence
  Description of Artificial Sequence: Synthetic oligonucleotide
ccauggggcguuucauggg

SEQ ID NO: 357535 - RNA, 19 nt, Artificial Sequence
  Description of Artificial Sequence: Synthetic oligonucleotide
ccggguauaaacagacaga

SEQ ID NO: 357536 - RNA, 19 nt, Artificial Sequence
  Description of Artificial Sequence: Synthetic oligonucleotide
ccguggcggaauuacugcc

SEQ ID NO: 357537 - RNA, 19 nt, Artificial Sequence
  Description of Artificial Sequence: Synthetic oligonucleotide
gucggcaacauggacgggu

SEQ ID NO: 357538 - RNA, 19 nt, Artificial Sequence
  Description of Artificial Sequence: Synthetic oligonucleotide
cuuccauauccggcaccag

SEQ ID NO: 357539 - RNA, 19 nt, Artificial Sequence
  Description of Artificial Sequence: Synthetic oligonucleotide
ggcggaauuacugccguaa

SEQ ID NO: 357540 - RNA, 19 nt, Artificial Sequence
  Description of Artificial Sequence: Synthetic oligonucleotide
gcacuggugaguuguagcu

SEQ ID NO: 357541 - RNA, 19 nt, Artificial Sequence
  Description of Artificial Sequence: Synthetic oligonucleotide
gcaagaacucgaacacuac

SEQ ID NO: 357542 - RNA, 19 nt, Artificial Sequence
  Description of Artificial Sequence: Synthetic oligonucleotide
caccuugugaggacuggua

SEQ ID NO: 357543 - RNA, 19 nt, Artificial Sequence
  Description of Artificial Sequence: Synthetic oligonucleotide
gcggaauuacugccguaac

SEQ ID NO: 357544 - RNA, 19 nt, Artificial Sequence
  Description of Artificial Sequence: Synthetic oligonucleotide
caaacgcagcaagccgcag

SEQ ID NO: 357545 - RNA, 19 nt, Artificial Sequence
  Description of Artificial Sequence: Synthetic oligonucleotide
ggcaguaccgauggacuuc

SEQ ID NO: 357546 - RNA, 19 nt, Artificial Sequence
  Description of Artificial Sequence: Synthetic oligonucleotide
aagucaccuuugagcagaa

SEQ ID NO: 357547 - RNA, 19 nt, Artificial Sequence
  Description of Artificial Sequence: Synthetic oligonucleotide
ccgauggaacucacaccgg

SEQ ID NO: 357548 - RNA, 19 nt, Artificial Sequence
  Description of Artificial Sequence: Synthetic oligonucleotide
gguugugggcuucuccuua

SEQ ID NO: 357549 - RNA, 19 nt, Artificial Sequence
  Description of Artificial Sequence: Synthetic oligonucleotide
caccggguauaaacagaca

SEQ ID NO: 357550 - RNA, 19 nt, Artificial Sequence
  Description of Artificial Sequence: Synthetic oligonucleotide
ggguccuagucauguguuc

SEQ ID NO: 357551 - RNA, 19 nt, Artificial Sequence
  Description of Artificial Sequence: Synthetic oligonucleotide
ccgaccaggggaguuguag

SEQ ID NO: 357552 - RNA, 19 nt, Artificial Sequence
  Description of Artificial Sequence: Synthetic oligonucleotide
guggcggaauuacugccgu

SEQ ID NO: 357553 - RNA, 19 nt, Artificial Sequence
  Description of Artificial Sequence: Synthetic oligonucleotide
gucacggcacgggucccag

SEQ ID NO: 357554 - RNA, 19 nt, Artificial Sequence
  Description of Artificial Sequence: Synthetic oligonucleotide
cguuugucguggcugcccc

SEQ ID NO: 357555 - RNA, 19 nt, Artificial Sequence
  Description of Artificial Sequence: Synthetic oligonucleotide
cacugcgccaguggacaug

SEQ ID NO: 357556 - RNA, 19 nt, Artificial Sequence
  Description of Artificial Sequence: Synthetic oligonucleotide
uggcggaauuacugccgua

SEQ ID NO: 357557 - RNA, 19 nt, Artificial Sequence
  Description of Artificial Sequence: Synthetic oligonucleotide
gcaugggaccucccaugcc

SEQ ID NO: 357558 - RNA, 19 nt, Artificial Sequence
  Description of Artificial Sequence: Synthetic oligonucleotide
ggccuauuggcaguaccga

SEQ ID NO: 357559 - RNA, 19 nt, Artificial Sequence
  Description of Artificial Sequence: Synthetic oligonucleotide
ugcccugcggcgugcugua

SEQ ID NO: 357560 - RNA, 19 nt, Artificial Sequence
  Description of Artificial Sequence: Synthetic oligonucleotide
cacaccucacagcguggca

SEQ ID NO: 357561 - RNA, 19 nt, Artificial Sequence
  Description of Artificial Sequence: Synthetic oligonucleotide
guaggagcuguaguuggau

SEQ ID NO: 357562 - RNA, 19 nt, Artificial Sequence
  Description of Artificial Sequence: Synthetic oligonucleotide
ggaacucacaccggguaua

SEQ ID NO: 357563 - RNA, 19 nt, Artificial Sequence
  Description of Artificial Sequence: Synthetic oligonucleotide
uucuuccauggggcguuuc

SEQ ID NO: 357564 - RNA, 19 nt, Artificial Sequence
  Description of Artificial Sequence: Synthetic oligonucleotide
gcuguaguucgacugugau

SEQ ID NO: 357565 - RNA, 19 nt, Artificial Sequence
  Description of Artificial Sequence: Synthetic oligonucleotide
ccacacggcaagaacucga

SEQ ID NO: 357566 - RNA, 19 nt, Artificial Sequence
  Description of Artificial Sequence: Synthetic oligonucleotide
ccaaacgcagcaagccgca

SEQ ID NO: 357567 - RNA, 19 nt, Artificial Sequence
  Description of Artificial Sequence: Synthetic oligonucleotide
gccuuuaucuguacuggua

SEQ ID NO: 357568 - RNA, 19 nt, Artificial Sequence
  Description of Artificial Sequence: Synthetic oligonucleotide
cuaggguuggagacagcuu

SEQ ID NO: 357569 - RNA, 19 nt, Artificial Sequence
  Description of Artificial Sequence: Synthetic oligonucleotide
ggacacccgauggaacuca

SEQ ID NO: 357570 - RNA, 19 nt, Artificial Sequence
  Description of Artificial Sequence: Synthetic oligonucleotide
cauuggccuauuggcagua

SEQ ID NO: 357571 - RNA, 19 nt, Artificial Sequence
  Description of Artificial Sequence: Synthetic oligonucleotide
ggccuuuaucuguacuggu

SEQ ID NO: 357572 - RNA, 19 nt, Artificial Sequence
  Description of Artificial Sequence: Synthetic oligonucleotide
gcccacggauguucccucc

SEQ ID NO: 357573 - RNA, 19 nt, Artificial Sequence
  Description of Artificial Sequence: Synthetic oligonucleotide
ggggcguuucaugggugug

SEQ ID NO: 357574 - RNA, 19 nt, Artificial Sequence
  Description of Artificial Sequence: Synthetic oligonucleotide
gcguuucaugggugugaug

SEQ ID NO: 357575 - RNA, 19 nt, Artificial Sequence
  Description of Artificial Sequence: Synthetic oligonucleotide
ccuaggacuuuauggaguu

SEQ ID NO: 357576 - RNA, 19 nt, Artificial Sequence
  Description of Artificial Sequence: Synthetic oligonucleotide
ccgcaucacgccccucagg

SEQ ID NO: 357577 - RNA, 19 nt, Artificial Sequence
  Description of Artificial Sequence: Synthetic oligonucleotide
cugcgccaguggacauggc

SEQ ID NO: 357578 - RNA, 19 nt, Artificial Sequence
  Description of Artificial Sequence: Synthetic oligonucleotide
gccacgccucuucucauua

SEQ ID NO: 357579 - RNA, 19 nt, Artificial Sequence
  Description of Artificial Sequence: Synthetic oligonucleotide
gcaguaccgauggacuucu

SEQ ID NO: 357580 - RNA, 19 nt, Artificial Sequence
  Description of Artificial Sequence: Synthetic oligonucleotide
gcagcaaauuuggguccac

SEQ ID NO: 357581 - RNA, 19 nt, Artificial Sequence
  Description of Artificial Sequence: Synthetic oligonucleotide
gccuauuggcaguaccgau

SEQ ID NO: 357582 - RNA, 19 nt, Artificial Sequence
  Description of Artificial Sequence: Synthetic oligonucleotide
guagccugccguggcggaa

SEQ ID NO: 357583 - RNA, 19 nt, Artificial Sequence
  Description of Artificial Sequence: Synthetic oligonucleotide
cugcggcgugcuguagcug

SEQ ID NO: 357584 - RNA, 19 nt, Artificial Sequence
  Description of Artificial Sequence: Synthetic oligonucleotide
ccaccgaccaggggaguug

SEQ ID NO: 357585 - RNA, 19 nt, Artificial Sequence
  Description of Artificial Sequence: Synthetic oligonucleotide
agccugccguggcggaauu

SEQ ID NO: 357586 - RNA, 19 nt, Artificial Sequence
  Description of Artificial Sequence: Synthetic oligonucleotide
cugccguggcggaauuacu

SEQ ID NO: 357587 - RNA, 19 nt, Artificial Sequence
  Description of Artificial Sequence: Synthetic oligonucleotide
gcaccucguuaugcauggg

SEQ ID NO: 357588 - RNA, 19 nt, Artificial Sequence
  Description of Artificial Sequence: Synthetic oligonucleotide
ggcacgggucccagggaca

SEQ ID NO: 357589 - RNA, 19 nt, Artificial Sequence
  Description of Artificial Sequence: Synthetic oligonucleotide
cgacuguagccaccuugug

SEQ ID NO: 357590 - RNA, 19 nt, Artificial Sequence
  Description of Artificial Sequence: Synthetic oligonucleotide
ggcguuucaugggugugau

SEQ ID NO: 357591 - RNA, 19 nt, Artificial Sequence
  Description of Artificial Sequence: Synthetic oligonucleotide
ggucacggcacggguccca

SEQ ID NO: 357592 - RNA, 19 nt, Artificial Sequence
  Description of Artificial Sequence: Synthetic oligonucleotide
gcaucacgccccucagggu

SEQ ID NO: 357593 - RNA, 19 nt, Artificial Sequence
  Description of Artificial Sequence: Synthetic oligonucleotide
cacaagacuucagcccauu

SEQ ID NO: 357594 - RNA, 19 nt, Artificial Sequence
  Description of Artificial Sequence: Synthetic oligonucleotide
caccgaccaggggaguugu

SEQ ID NO: 357595 - RNA, 19 nt, Artificial Sequence
  Description of Artificial Sequence: Synthetic oligonucleotide
ccaagacgaguuggaggca

SEQ ID NO: 357596 - RNA, 19 nt, Artificial Sequence
  Description of Artificial Sequence: Synthetic oligonucleotide
ccuuggcuaccaggccgac

SEQ ID NO: 357597 - RNA, 19 nt, Artificial Sequence
  Description of Artificial Sequence: Synthetic oligonucleotide
cuggccuagugagcuggau

SEQ ID NO: 357598 - RNA, 19 nt, Artificial Sequence
  Description of Artificial Sequence: Synthetic oligonucleotide
ggcuucgccagcacccauu

SEQ ID NO: 357599 - RNA, 19 nt, Artificial Sequence
  Description of Artificial Sequence: Synthetic oligonucleotide
ggccacgccucuucucauu

SEQ ID NO: 357600 - RNA, 19 nt, Artificial Sequence
  Description of Artificial Sequence: Synthetic oligonucleotide
gcccugcggcgugcuguag

SEQ ID NO: 357601 - RNA, 19 nt, Artificial Sequence
  Description of Artificial Sequence: Synthetic oligonucleotide
cugccucagcgagcucgcu

SEQ ID NO: 357602 - RNA, 19 nt, Artificial Sequence
  Description of Artificial Sequence: Synthetic oligonucleotide
gccugccguggcggaauua

SEQ ID NO: 357603 - RNA, 19 nt, Artificial Sequence
  Description of Artificial Sequence: Synthetic oligonucleotide
cgccccucaggguccuagu

SEQ ID NO: 357604 - RNA, 19 nt, Artificial Sequence
  Description of Artificial Sequence: Synthetic oligonucleotide
aacacccuaacauucagcc

SEQ ID NO: 357605 - RNA, 19 nt, Artificial Sequence
  Description of Artificial Sequence: Synthetic oligonucleotide
aaacauuagaaauaaugag

SEQ ID NO: 357606 - RNA, 19 nt, Artificial Sequence
  Description of Artificial Sequence: Synthetic oligonucleotide
aaugcuacaucucguaccc

SEQ ID NO: 357607 - RNA, 19 nt, Artificial Sequence
  Description of Artificial Sequence: Synthetic oligonucleotide
uuauauacgccauagaguc

SEQ ID NO: 357608 - RNA, 19 nt, Artificial Sequence
  Description of Artificial Sequence: Synthetic oligonucleotide
ugaacauguaccaugagac

SEQ ID NO: 357609 - RNA, 19 nt, Artificial Sequence
  Description of Artificial Sequence: Synthetic oligonucleotide
cuuuauauacgccauagag

SEQ ID NO: 357610 - RNA, 19 nt, Artificial Sequence
  Description of Artificial Sequence: Synthetic oligonucleotide
uuaucugaggacaacaaug

SEQ ID NO: 357611 - RNA, 19 nt, Artificial Sequence
  Description of Artificial Sequence: Synthetic oligonucleotide
aacucgaacucacuguacc

SEQ ID NO: 357612 - RNA, 19 nt, Artificial Sequence
  Description of Artificial Sequence: Synthetic oligonucleotide
uauagugauuccuacauca

SEQ ID NO: 357613 - RNA, 19 nt, Artificial Sequence
  Description of Artificial Sequence: Synthetic oligonucleotide
agauaaaacaacccuacag

SEQ ID NO: 357614 - RNA, 19 nt, Artificial Sequence
  Description of Artificial Sequence: Synthetic oligonucleotide
aaagucuggauccauguug

SEQ ID NO: 357615 - RNA, 19 nt, Artificial Sequence
  Description of Artificial Sequence: Synthetic oligonucleotide
aaggcaagauaaaacaacc

SEQ ID NO: 357616 - RNA, 19 nt, Artificial Sequence
  Description of Artificial Sequence: Synthetic oligonucleotide
cauaauaauguauuuacuc

SEQ ID NO: 357617 - RNA, 19 nt, Artificial Sequence
  Description of Artificial Sequence: Synthetic oligonucleotide
aacgagaauguucucacag

SEQ ID NO: 357618 - RNA, 19 nt, Artificial Sequence
  Description of Artificial Sequence: Synthetic oligonucleotide
uuuauauacgccauagagu

SEQ ID NO: 357619 - RNA, 19 nt, Artificial Sequence
  Description of Artificial Sequence: Synthetic oligonucleotide
aaugagugcacaguuaaag

SEQ ID NO: 357620 - RNA, 19 nt, Artificial Sequence
  Description of Artificial Sequence: Synthetic oligonucleotide
aagagauacuccuuuagcu

SEQ ID NO: 357621 - RNA, 19 nt, Artificial Sequence
  Description of Artificial Sequence: Synthetic oligonucleotide
ucuagcaccuuuauucugg

SEQ ID NO: 357622 - RNA, 19 nt, Artificial Sequence
  Description of Artificial Sequence: Synthetic oligonucleotide
cauuccuuagcauuggucc

SEQ ID NO: 357623 - RNA, 19 nt, Artificial Sequence
  Description of Artificial Sequence: Synthetic oligonucleotide
uauauagugauuccuacau

SEQ ID NO: 357624 - RNA, 19 nt, Artificial Sequence
  Description of Artificial Sequence: Synthetic oligonucleotide
uaaagagucuggaagcuag

SEQ ID NO: 357625 - RNA, 19 nt, Artificial Sequence
  Description of Artificial Sequence: Synthetic oligonucleotide
uuucucaacaacucgaacu

SEQ ID NO: 357626 - RNA, 19 nt, Artificial Sequence
  Description of Artificial Sequence: Synthetic oligonucleotide
agaaauugaggcucacugc

SEQ ID NO: 357627 - RNA, 19 nt, Artificial Sequence
  Description of Artificial Sequence: Synthetic oligonucleotide
uuuggaaucagcaccaguc

SEQ ID NO: 357628 - RNA, 19 nt, Artificial Sequence
  Description of Artificial Sequence: Synthetic oligonucleotide
auggaaaugcuacaucucg

SEQ ID NO: 357629 - RNA, 19 nt, Artificial Sequence
  Description of Artificial Sequence: Synthetic oligonucleotide
ugaauguugcauuaagcgc

SEQ ID NO: 357630 - RNA, 19 nt, Artificial Sequence
  Description of Artificial Sequence: Synthetic oligonucleotide
uuacacauggaaaugcuac

SEQ ID NO: 357631 - RNA, 19 nt, Artificial Sequence
  Description of Artificial Sequence: Synthetic oligonucleotide
ugagugcacaguuaaagag

SEQ ID NO: 357632 - RNA, 19 nt, Artificial Sequence
  Description of Artificial Sequence: Synthetic oligonucleotide
uacuguaugcuuuauauau

SEQ ID NO: 357633 - RNA, 19 nt, Artificial Sequence
  Description of Artificial Sequence: Synthetic oligonucleotide
uuaagcgcuuuuaaccugg

SEQ ID NO: 357634 - RNA, 19 nt, Artificial Sequence
  Description of Artificial Sequence: Synthetic oligonucleotide
ugcauaaaagagauacucc

SEQ ID NO: 357635 - RNA, 19 nt, Artificial Sequence
  Description of Artificial Sequence: Synthetic oligonucleotide
cauagagucgaucagcuac

SEQ ID NO: 357636 - RNA, 19 nt, Artificial Sequence
  Description of Artificial Sequence: Synthetic oligonucleotide
uaggggucuacgaacaggg

SEQ ID NO: 357637 - RNA, 19 nt, Artificial Sequence
  Description of Artificial Sequence: Synthetic oligonucleotide
aucaauagaggaugcguac

SEQ ID NO: 357638 - RNA, 19 nt, Artificial Sequence
  Description of Artificial Sequence: Synthetic oligonucleotide
uuagcauugguccacacuu

SEQ ID NO: 357639 - RNA, 19 nt, Artificial Sequence
  Description of Artificial Sequence: Synthetic oligonucleotide
ugcuauaugaacacaacua

SEQ ID NO: 357640 - RNA, 19 nt, Artificial Sequence
  Description of Artificial Sequence: Synthetic oligonucleotide
aacccuacagcagaagugg

SEQ ID NO: 357641 - RNA, 19 nt, Artificial Sequence
  Description of Artificial Sequence: Synthetic oligonucleotide
uuugauuggagagaaaguc

SEQ ID NO: 357642 - RNA, 19 nt, Artificial Sequence
  Description of Artificial Sequence: Synthetic oligonucleotide
acgaacagggaagaaaacc

SEQ ID NO: 357643 - RNA, 19 nt, Artificial Sequence
  Description of Artificial Sequence: Synthetic oligonucleotide
uuuaucugcucuucuagca

SEQ ID NO: 357644 - RNA, 19 nt, Artificial Sequence
  Description of Artificial Sequence: Synthetic oligonucleotide
ugcauagugcucuucaucu

SEQ ID NO: 357645 - RNA, 19 nt, Artificial Sequence
  Description of Artificial Sequence: Synthetic oligonucleotide
ucaauaucagcccaugcau

SEQ ID NO: 357646 - RNA, 19 nt, Artificial Sequence
  Description of Artificial Sequence: Synthetic oligonucleotide
aacaacucgaacucacugu

SEQ ID NO: 357647 - RNA, 19 nt, Artificial Sequence
  Description of Artificial Sequence: Synthetic oligonucleotide
aacuaacacccuaacauuc

SEQ ID NO: 357648 - RNA, 19 nt, Artificial Sequence
  Description of Artificial Sequence: Synthetic oligonucleotide
uuuucuaagccuauccguc

SEQ ID NO: 357649 - RNA, 19 nt, Artificial Sequence
  Description of Artificial Sequence: Synthetic oligonucleotide
aauaucaucaauagaggau

SEQ ID NO: 357650 - RNA, 19 nt, Artificial Sequence
  Description of Artificial Sequence: Synthetic oligonucleotide
uuagcugaucugcauagug

SEQ ID NO: 357651 - RNA, 19 nt, Artificial Sequence
  Description of Artificial Sequence: Synthetic oligonucleotide
uaacaauuaucugaggaca

SEQ ID NO: 357652 - RNA, 19 nt, Artificial Sequence
  Description of Artificial Sequence: Synthetic oligonucleotide
agagauacuccuuuagcug

SEQ ID NO: 357653 - RNA, 19 nt, Artificial Sequence
  Description of Artificial Sequence: Synthetic oligonucleotide
aucucguacccugaaaugc

SEQ ID NO: 357654 - RNA, 19 nt, Artificial Sequence
  Description of Artificial Sequence: Synthetic oligonucleotide
auuaacuuuuggaaucagc

SEQ ID NO: 357655 - RNA, 19 nt, Artificial Sequence
  Description of Artificial Sequence: Synthetic oligonucleotide
uucucaacaacucgaacuc

SEQ ID NO: 357656 - RNA, 19 nt, Artificial Sequence
  Description of Artificial Sequence: Synthetic oligonucleotide
aaguguucacuacaagugu

SEQ ID NO: 357657 - RNA, 19 nt, Artificial Sequence
  Description of Artificial Sequence: Synthetic oligonucleotide
uucacuacaagugucuuac

SEQ ID NO: 357658 - RNA, 19 nt, Artificial Sequence
  Description of Artificial Sequence: Synthetic oligonucleotide
uguaccgccuccaaaguga

SEQ ID NO: 357659 - RNA, 19 nt, Artificial Sequence
  Description of Artificial Sequence: Synthetic oligonucleotide
auguucacggcauuucuuc

SEQ ID NO: 357660 - RNA, 19 nt, Artificial Sequence
  Description of Artificial Sequence: Synthetic oligonucleotide
cagaaauugaggcucacug

SEQ ID NO: 357661 - RNA, 19 nt, Artificial Sequence
  Description of Artificial Sequence: Synthetic oligonucleotide
cuuuagcugaucugcauag

SEQ ID NO: 357662 - RNA, 19 nt, Artificial Sequence
  Description of Artificial Sequence: Synthetic oligonucleotide
uguacuuuauauacgccau

SEQ ID NO: 357663 - RNA, 19 nt, Artificial Sequence
  Description of Artificial Sequence: Synthetic oligonucleotide
gagaguuuaugccacacga

SEQ ID NO: 357664 - RNA, 19 nt, Artificial Sequence
  Description of Artificial Sequence: Synthetic oligonucleotide
agcgcuuuuaaccuggagu

SEQ ID NO: 357665 - RNA, 19 nt, Artificial Sequence
  Description of Artificial Sequence: Synthetic oligonucleotide
uguauuuacuccacugcgu

SEQ ID NO: 357666 - RNA, 19 nt, Artificial Sequence
  Description of Artificial Sequence: Synthetic oligonucleotide
uugaccaaagaguuuggug

SEQ ID NO: 357667 - RNA, 19 nt, Artificial Sequence
  Description of Artificial Sequence: Synthetic oligonucleotide
cuaccaaguaaauacagga

SEQ ID NO: 357668 - RNA, 19 nt, Artificial Sequence
  Description of Artificial Sequence: Synthetic oligonucleotide
uccacugcguaucugagaa

SEQ ID NO: 357669 - RNA, 19 nt, Artificial Sequence
  Description of Artificial Sequence: Synthetic oligonucleotide
gcauuaagcgcuuuuaacc

SEQ ID NO: 357670 - RNA, 19 nt, Artificial Sequence
  Description of Artificial Sequence: Synthetic oligonucleotide
uauauacgccauagagucg

SEQ ID NO: 357671 - RNA, 19 nt, Artificial Sequence
  Description of Artificial Sequence: Synthetic oligonucleotide
aauaaucuguugguuuauc

SEQ ID NO: 357672 - RNA, 19 nt, Artificial Sequence
  Description of Artificial Sequence: Synthetic oligonucleotide
ugcuucugcauaaaagaga

SEQ ID NO: 357673 - RNA, 19 nt, Artificial Sequence
  Description of Artificial Sequence: Synthetic oligonucleotide
acuaaaagguaguuucuca

SEQ ID NO: 357674 - RNA, 19 nt, Artificial Sequence
  Description of Artificial Sequence: Synthetic oligonucleotide
acuacaagugucuuacaca

SEQ ID NO: 357675 - RNA, 19 nt, Artificial Sequence
  Description of Artificial Sequence: Synthetic oligonucleotide
cacaacuauacuuaaagaa

SEQ ID NO: 357676 - RNA, 19 nt, Artificial Sequence
  Description of Artificial Sequence: Synthetic oligonucleotide
ucaacgagaauguucucac

SEQ ID NO: 357677 - RNA, 19 nt, Artificial Sequence
  Description of Artificial Sequence: Synthetic oligonucleotide
caguaaaucucuugucugg

SEQ ID NO: 357678 - RNA, 19 nt, Artificial Sequence
  Description of Artificial Sequence: Synthetic oligonucleotide
uacguuucuugcauguuca

SEQ ID NO: 357679 - RNA, 19 nt, Artificial Sequence
  Description of Artificial Sequence: Synthetic oligonucleotide
aaguaaauacaggaauuca

SEQ ID NO: 357680 - RNA, 19 nt, Artificial Sequence
  Description of Artificial Sequence: Synthetic oligonucleotide
aucgugucgaccccugagc

SEQ ID NO: 357681 - RNA, 19 nt, Artificial Sequence
  Description of Artificial Sequence: Synthetic oligonucleotide
guacgcacaugguauaggg

SEQ ID NO: 357682 - RNA, 19 nt, Artificial Sequence
  Description of Artificial Sequence: Synthetic oligonucleotide
gucagcagagaguuuaugc

SEQ ID NO: 357683 - RNA, 19 nt, Artificial Sequence
  Description of Artificial Sequence: Synthetic oligonucleotide
uucuauauagugauuccua

SEQ ID NO: 357684 - RNA, 19 nt, Artificial Sequence
  Description of Artificial Sequence: Synthetic oligonucleotide
uugguuuaucuuauuaaau

SEQ ID NO: 357685 - RNA, 19 nt, Artificial Sequence
  Description of Artificial Sequence: Synthetic oligonucleotide
aaagcugauuuguucaauu

SEQ ID NO: 357686 - RNA, 19 nt, Artificial Sequence
  Description of Artificial Sequence: Synthetic oligonucleotide
ugcauuaagcgcuuuuaac

SEQ ID NO: 357687 - RNA, 19 nt, Artificial Sequence
  Description of Artificial Sequence: Synthetic oligonucleotide
aaagugagucugugaggac

SEQ ID NO: 357688 - RNA, 19 nt, Artificial Sequence
  Description of Artificial Sequence: Synthetic oligonucleotide
auuuacuccacugcguauc

SEQ ID NO: 357689 - RNA, 19 nt, Artificial Sequence
  Description of Artificial Sequence: Synthetic oligonucleotide
auauagugauuccuacauc

SEQ ID NO: 357690 - RNA, 19 nt, Artificial Sequence
  Description of Artificial Sequence: Synthetic oligonucleotide
ucccauaauucccauguac

SEQ ID NO: 357691 - RNA, 19 nt, Artificial Sequence
  Description of Artificial Sequence: Synthetic oligonucleotide
aagugucuuacacauggaa

SEQ ID NO: 357692 - RNA, 19 nt, Artificial Sequence
  Description of Artificial Sequence: Synthetic oligonucleotide
ugugcuauaugaacacaac

SEQ ID NO: 357693 - RNA, 19 nt, Artificial Sequence
  Description of Artificial Sequence: Synthetic oligonucleotide
aucauuucccgucaucgug

SEQ ID NO: 357694 - RNA, 19 nt, Artificial Sequence
  Description of Artificial Sequence: Synthetic oligonucleotide
cagcauguucaacugaccg

SEQ ID NO: 357695 - RNA, 19 nt, Artificial Sequence
  Description of Artificial Sequence: Synthetic oligonucleotide
ucucguacccugaaaugcc

SEQ ID NO: 357696 - RNA, 19 nt, Artificial Sequence
  Description of Artificial Sequence: Synthetic oligonucleotide
uuuuacuugugcuucguuu

SEQ ID NO: 357697 - RNA, 19 nt, Artificial Sequence
  Description of Artificial Sequence: Synthetic oligonucleotide
aaucauuucccgucaucgu

SEQ ID NO: 357698 - RNA, 19 nt, Artificial Sequence
  Description of Artificial Sequence: Synthetic oligonucleotide
agguuaacaauuaucugag

SEQ ID NO: 357699 - RNA, 19 nt, Artificial Sequence
  Description of Artificial Sequence: Synthetic oligonucleotide
uugucucuacaaaggacag

SEQ ID NO: 357700 - RNA, 19 nt, Artificial Sequence
  Description of Artificial Sequence: Synthetic oligonucleotide
uucaacgagaauguucuca

SEQ ID NO: 357701 - RNA, 19 nt, Artificial Sequence
  Description of Artificial Sequence: Synthetic oligonucleotide
uuucuauauagugauuccu

SEQ ID NO: 357702 - RNA, 19 nt, Artificial Sequence
  Description of Artificial Sequence: Synthetic oligonucleotide
auguauaaguuuggcaaac

SEQ ID NO: 357703 - RNA, 19 nt, Artificial Sequence
  Description of Artificial Sequence: Synthetic oligonucleotide
acaacuauacuuaaagaaa

SEQ ID NO: 357704 - RNA, 19 nt, Artificial Sequence
  Description of Artificial Sequence: Synthetic oligonucleotide
ugcguaucugagaagcuga

SEQ ID NO: 357705 - RNA, 19 nt, Artificial Sequence
  Description of Artificial Sequence: Synthetic oligonucleotide
aagucauacugcauaagcu

SEQ ID NO: 357706 - RNA, 19 nt, Artificial Sequence
  Description of Artificial Sequence: Synthetic oligonucleotide
ucaucaauagaggaugcgu

SEQ ID NO: 357707 - RNA, 19 nt, Artificial Sequence
  Description of Artificial Sequence: Synthetic oligonucleotide
uguucaacugaccgugucu

SEQ ID NO: 357708 - RNA, 19 nt, Artificial Sequence
  Description of Artificial Sequence: Synthetic oligonucleotide
agaacucccuacaugaaag

SEQ ID NO: 357709 - RNA, 19 nt, Artificial Sequence
  Description of Artificial Sequence: Synthetic oligonucleotide
guuuaugccacacgaacuc

SEQ ID NO: 357710 - RNA, 19 nt, Artificial Sequence
  Description of Artificial Sequence: Synthetic oligonucleotide
acgcacaugguauaggggu

SEQ ID NO: 357711 - RNA, 19 nt, Artificial Sequence
  Description of Artificial Sequence: Synthetic oligonucleotide
gaaauugaggcucacugcu

SEQ ID NO: 357712 - RNA, 19 nt, Artificial Sequence
  Description of Artificial Sequence: Synthetic oligonucleotide
cugcauaaaagagauacuc

SEQ ID NO: 357713 - RNA, 19 nt, Artificial Sequence
  Description of Artificial Sequence: Synthetic oligonucleotide
ucauuucccgucaucgugu

SEQ ID NO: 357714 - RNA, 19 nt, Artificial Sequence
  Description of Artificial Sequence: Synthetic oligonucleotide
acucgaacucacuguaccg

SEQ ID NO: 357715 - RNA, 19 nt, Artificial Sequence
  Description of Artificial Sequence: Synthetic oligonucleotide
uacgcacaugguauagggg

SEQ ID NO: 357716 - RNA, 19 nt, Artificial Sequence
  Description of Artificial Sequence: Synthetic oligonucleotide
auccagcaacauuuuaaac

SEQ ID NO: 357717 - RNA, 19 nt, Artificial Sequence
  Description of Artificial Sequence: Synthetic oligonucleotide
ggaagaacucccuacauga

SEQ ID NO: 357718 - RNA, 19 nt, Artificial Sequence
  Description of Artificial Sequence: Synthetic oligonucleotide
ucuacgaacagggaagaaa

SEQ ID NO: 357719 - RNA, 19 nt, Artificial Sequence
  Description of Artificial Sequence: Synthetic oligonucleotide
uaccaaguaaauacaggaa

SEQ ID NO: 357720 - RNA, 19 nt, Artificial Sequence
  Description of Artificial Sequence: Synthetic oligonucleotide
uucacggcauuucuuccag

SEQ ID NO: 357721 - RNA, 19 nt, Artificial Sequence
  Description of Artificial Sequence: Synthetic oligonucleotide
auagaggaugcguacacau

SEQ ID NO: 357722 - RNA, 19 nt, Artificial Sequence
  Description of Artificial Sequence: Synthetic oligonucleotide
guacauggaaauuaacuaa

SEQ ID NO: 357723 - RNA, 19 nt, Artificial Sequence
  Description of Artificial Sequence: Synthetic oligonucleotide
uaaaucucuugucuggguu

SEQ ID NO: 357724 - RNA, 19 nt, Artificial Sequence
  Description of Artificial Sequence: Synthetic oligonucleotide
gaugcguacacauccaugu

SEQ ID NO: 357725 - RNA, 19 nt, Artificial Sequence
  Description of Artificial Sequence: Synthetic oligonucleotide
acacaacuauacuuaaaga

SEQ ID NO: 357726 - RNA, 19 nt, Artificial Sequence
  Description of Artificial Sequence: Synthetic oligonucleotide
aacugaccgugucucaaug

SEQ ID NO: 357727 - RNA, 19 nt, Artificial Sequence
  Description of Artificial Sequence: Synthetic oligonucleotide
auauacgccauagagucga

SEQ ID NO: 357728 - RNA, 19 nt, Artificial Sequence
  Description of Artificial Sequence: Synthetic oligonucleotide
gaauguugcauuaagcgcu

SEQ ID NO: 357729 - RNA, 19 nt, Artificial Sequence
  Description of Artificial Sequence: Synthetic oligonucleotide
aggcaagauaaaacaaccc

SEQ ID NO: 357730 - RNA, 19 nt, Artificial Sequence
  Description of Artificial Sequence: Synthetic oligonucleotide
cacuacaagugucuuacac

SEQ ID NO: 357731 - RNA, 19 nt, Artificial Sequence
  Description of Artificial Sequence: Synthetic oligonucleotide
cucaauaucagcccaugca

SEQ ID NO: 357732 - RNA, 19 nt, Artificial Sequence
  Description of Artificial Sequence: Synthetic oligonucleotide
acaacccuacagcagaagu

SEQ ID NO: 357733 - RNA, 19 nt, Artificial Sequence
  Description of Artificial Sequence: Synthetic oligonucleotide
aauuaucugaggacaacaa

SEQ ID NO: 357734 - RNA, 19 nt, Artificial Sequence
  Description of Artificial Sequence: Synthetic oligonucleotide
cugaccgucagcauguuca

SEQ ID NO: 357735 - RNA, 19 nt, Artificial Sequence
  Description of Artificial Sequence: Synthetic oligonucleotide
caugcuaaucugcaugaug

SEQ ID NO: 357736 - RNA, 19 nt, Artificial Sequence
  Description of Artificial Sequence: Synthetic oligonucleotide
uaacuaacacccuaacauu

SEQ ID NO: 357737 - RNA, 19 nt, Artificial Sequence
  Description of Artificial Sequence: Synthetic oligonucleotide
uuucccgucaucgugucga

SEQ ID NO: 357738 - RNA, 19 nt, Artificial Sequence
  Description of Artificial Sequence: Synthetic oligonucleotide
ucuaguguacgcacauggu

SEQ ID NO: 357739 - RNA, 19 nt, Artificial Sequence
  Description of Artificial Sequence: Synthetic oligonucleotide
ugguauaggggucuacgaa

SEQ ID NO: 357740 - RNA, 19 nt, Artificial Sequence
  Description of Artificial Sequence: Synthetic oligonucleotide
ugaaaggaucugaaacagu

SEQ ID NO: 357741 - RNA, 19 nt, Artificial Sequence
  Description of Artificial Sequence: Synthetic oligonucleotide
aguguucacuacaaguguc

SEQ ID NO: 357742 - RNA, 19 nt, Artificial Sequence
  Description of Artificial Sequence: Synthetic oligonucleotide
agucaaauguuaaacagua

SEQ ID NO: 357743 - RNA, 19 nt, Artificial Sequence
  Description of Artificial Sequence: Synthetic oligonucleotide
cuaacauucagccauuggu

SEQ ID NO: 357744 - RNA, 19 nt, Artificial Sequence
  Description of Artificial Sequence: Synthetic oligonucleotide
uaaaagagauacuccuuua

SEQ ID NO: 357745 - RNA, 19 nt, Artificial Sequence
  Description of Artificial Sequence: Synthetic oligonucleotide
uuuacuccacugcguaucu

SEQ ID NO: 357746 - RNA, 19 nt, Artificial Sequence
  Description of Artificial Sequence: Synthetic oligonucleotide
ucaauagaggaugcguaca

SEQ ID NO: 357747 - RNA, 19 nt, Artificial Sequence
  Description of Artificial Sequence: Synthetic oligonucleotide
ucgaacucacuguaccgcc

SEQ ID NO: 357748 - RNA, 19 nt, Artificial Sequence
  Description of Artificial Sequence: Synthetic oligonucleotide
cucccuacaugaaaggauc

SEQ ID NO: 357749 - RNA, 19 nt, Artificial Sequence
  Description of Artificial Sequence: Synthetic oligonucleotide
ucaacaacucgaacucacu

SEQ ID NO: 357750 - RNA, 19 nt, Artificial Sequence
  Description of Artificial Sequence: Synthetic oligonucleotide
cuacgaacagggaagaaaa

SEQ ID NO: 357751 - RNA, 19 nt, Artificial Sequence
  Description of Artificial Sequence: Synthetic oligonucleotide
uguacgcacaugguauagg

SEQ ID NO: 357752 - RNA, 19 nt, Artificial Sequence
  Description of Artificial Sequence: Synthetic oligonucleotide
uguucacggcauuucuucc

SEQ ID NO: 357753 - RNA, 19 nt, Artificial Sequence
  Description of Artificial Sequence: Synthetic oligonucleotide
uggaagcuagcagagugag

SEQ ID NO: 357754 - RNA, 19 nt, Artificial Sequence
  Description of Artificial Sequence: Synthetic oligonucleotide
caauagaggaugcguacac

SEQ ID NO: 357755 - RNA, 19 nt, Artificial Sequence
  Description of Artificial Sequence: Synthetic oligonucleotide
gaggcaacccucaagagaa

SEQ ID NO: 357756 - RNA, 19 nt, Artificial Sequence
  Description of Artificial Sequence: Synthetic oligonucleotide
caacaacucgaacucacug

SEQ ID NO: 357757 - RNA, 19 nt, Artificial Sequence
  Description of Artificial Sequence: Synthetic oligonucleotide
ugucuuacacauggaaaug

SEQ ID NO: 357758 - RNA, 19 nt, Artificial Sequence
  Description of Artificial Sequence: Synthetic oligonucleotide
auguucaacugaccguguc

SEQ ID NO: 357759 - RNA, 19 nt, Artificial Sequence
  Description of Artificial Sequence: Synthetic oligonucleotide
agcauguucaacugaccgu

SEQ ID NO: 357760 - RNA, 19 nt, Artificial Sequence
  Description of Artificial Sequence: Synthetic oligonucleotide
cuaacacccuaacauucag

SEQ ID NO: 357761 - RNA, 19 nt, Artificial Sequence
  Description of Artificial Sequence: Synthetic oligonucleotide
aagccuauccgucgucucu

SEQ ID NO: 357762 - RNA, 19 nt, Artificial Sequence
  Description of Artificial Sequence: Synthetic oligonucleotide
gguauaggggucuacgaac

SEQ ID NO: 357763 - RNA, 19 nt, Artificial Sequence
  Description of Artificial Sequence: Synthetic oligonucleotide
aucaucaauagaggaugcg

SEQ ID NO: 357764 - RNA, 19 nt, Artificial Sequence
  Description of Artificial Sequence: Synthetic oligonucleotide
caacccuacagcagaagug

SEQ ID NO: 357765 - RNA, 19 nt, Artificial Sequence
  Description of Artificial Sequence: Synthetic oligonucleotide
acuuuauauacgccauaga

SEQ ID NO: 357766 - RNA, 19 nt, Artificial Sequence
  Description of Artificial Sequence: Synthetic oligonucleotide
ucgauagcgcuccauucac

SEQ ID NO: 357767 - RNA, 19 nt, Artificial Sequence
  Description of Artificial Sequence: Synthetic oligonucleotide
uauccgucgucucuccaca

SEQ ID NO: 357768 - RNA, 19 nt, Artificial Sequence
  Description of Artificial Sequence: Synthetic oligonucleotide
cuauauagugauuccuaca

SEQ ID NO: 357769 - RNA, 19 nt, Artificial Sequence
  Description of Artificial Sequence: Synthetic oligonucleotide
agccugaugaauaaucugu

SEQ ID NO: 357770 - RNA, 19 nt, Artificial Sequence
  Description of Artificial Sequence: Synthetic oligonucleotide
caaagugagucugugagga

SEQ ID NO: 357771 - RNA, 19 nt, Artificial Sequence
  Description of Artificial Sequence: Synthetic oligonucleotide
uagugauuccuacaucaua

SEQ ID NO: 357772 - RNA, 19 nt, Artificial Sequence
  Description of Artificial Sequence: Synthetic oligonucleotide
aacucccuacaugaaagga

SEQ ID NO: 357773 - RNA, 19 nt, Artificial Sequence
  Description of Artificial Sequence: Synthetic oligonucleotide
uucuaagccuauccgucgu

SEQ ID NO: 357774 - RNA, 19 nt, Artificial Sequence
  Description of Artificial Sequence: Synthetic oligonucleotide
uucacucugaauguugcau

SEQ ID NO: 357775 - RNA, 19 nt, Artificial Sequence
  Description of Artificial Sequence: Synthetic oligonucleotide
aacaauuaucugaggacaa

SEQ ID NO: 357776 - RNA, 19 nt, Artificial Sequence
  Description of Artificial Sequence: Synthetic oligonucleotide
gaacauguaccaugagaca

SEQ ID NO: 357777 - RNA, 19 nt, Artificial Sequence
  Description of Artificial Sequence: Synthetic oligonucleotide
uacucuagcucugacucga

SEQ ID NO: 357778 - RNA, 19 nt, Artificial Sequence
  Description of Artificial Sequence: Synthetic oligonucleotide
auacuccuuuagcugaucu

SEQ ID NO: 357779 - RNA, 19 nt, Artificial Sequence
  Description of Artificial Sequence: Synthetic oligonucleotide
cacaaauucucugccuucc

SEQ ID NO: 357780 - RNA, 19 nt, Artificial Sequence
  Description of Artificial Sequence: Synthetic oligonucleotide
aggcauuuucuaguguacg

SEQ ID NO: 357781 - RNA, 19 nt, Artificial Sequence
  Description of Artificial Sequence: Synthetic oligonucleotide
caugcuuccugcacacagc

SEQ ID NO: 357782 - RNA, 19 nt, Artificial Sequence
  Description of Artificial Sequence: Synthetic oligonucleotide
acugcugagguuaacaauu

SEQ ID NO: 357783 - RNA, 19 nt, Artificial Sequence
  Description of Artificial Sequence: Synthetic oligonucleotide
guacguuucuugcauguuc

SEQ ID NO: 357784 - RNA, 19 nt, Artificial Sequence
  Description of Artificial Sequence: Synthetic oligonucleotide
aacuauaaggcaagauaaa

SEQ ID NO: 357785 - RNA, 19 nt, Artificial Sequence
  Description of Artificial Sequence: Synthetic oligonucleotide
gugguacaacaacaugggg

SEQ ID NO: 357786 - RNA, 19 nt, Artificial Sequence
  Description of Artificial Sequence: Synthetic oligonucleotide
aguggguccuaccaaguaa

SEQ ID NO: 357787 - RNA, 19 nt, Artificial Sequence
  Description of Artificial Sequence: Synthetic oligonucleotide
ucgcacugcugcuucuugg

SEQ ID NO: 357788 - RNA, 19 nt, Artificial Sequence
  Description of Artificial Sequence: Synthetic oligonucleotide
augguauaggggucuacga

SEQ ID NO: 357789 - RNA, 19 nt, Artificial Sequence
  Description of Artificial Sequence: Synthetic oligonucleotide
uaagcucaugcuuccugca

SEQ ID NO: 357790 - RNA, 19 nt, Artificial Sequence
  Description of Artificial Sequence: Synthetic oligonucleotide
acgagaauguucucacagu

SEQ ID NO: 357791 - RNA, 19 nt, Artificial Sequence
  Description of Artificial Sequence: Synthetic oligonucleotide
aagcgcuuuuaaccuggag

SEQ ID NO: 357792 - RNA, 19 nt, Artificial Sequence
  Description of Artificial Sequence: Synthetic oligonucleotide
ucguuuuggggcacuuuga

SEQ ID NO: 357793 - RNA, 19 nt, Artificial Sequence
  Description of Artificial Sequence: Synthetic oligonucleotide
gauagcgcuccauucacua

SEQ ID NO: 357794 - RNA, 19 nt, Artificial Sequence
  Description of Artificial Sequence: Synthetic oligonucleotide
ggcauuuucuaguguacgc

SEQ ID NO: 357795 - RNA, 19 nt, Artificial Sequence
  Description of Artificial Sequence: Synthetic oligonucleotide
uacgaacagggaagaaaac

SEQ ID NO: 357796 - RNA, 19 nt, Artificial Sequence
  Description of Artificial Sequence: Synthetic oligonucleotide
caucucguacccugaaaug

SEQ ID NO: 357797 - RNA, 19 nt, Artificial Sequence
  Description of Artificial Sequence: Synthetic oligonucleotide
ucgugucgaccccugagcu

SEQ ID NO: 357798 - RNA, 19 nt, Artificial Sequence
  Description of Artificial Sequence: Synthetic oligonucleotide
cauuaagcgcuuuuaaccu

SEQ ID NO: 357799 - RNA, 19 nt, Artificial Sequence
  Description of Artificial Sequence: Synthetic oligonucleotide
aaacaguacugaguauagu

SEQ ID NO: 357800 - RNA, 19 nt, Artificial Sequence
  Description of Artificial Sequence: Synthetic oligonucleotide
agcuacucuagcucugacu

SEQ ID NO: 357801 - RNA, 19 nt, Artificial Sequence
  Description of Artificial Sequence: Synthetic oligonucleotide
cuauccgucgucucuccac

SEQ ID NO: 357802 - RNA, 19 nt, Artificial Sequence
  Description of Artificial Sequence: Synthetic oligonucleotide
agcucaacuauaaggcaag

SEQ ID NO: 357803 - RNA, 19 nt, Artificial Sequence
  Description of Artificial Sequence: Synthetic oligonucleotide
gacaggaugugaggcaacc

SEQ ID NO: 357804 - RNA, 19 nt, Artificial Sequence
  Description of Artificial Sequence: Synthetic oligonucleotide
uguugcauuaagcgcuuuu

SEQ ID NO: 357805 - RNA, 19 nt, Artificial Sequence
  Description of Artificial Sequence: Synthetic oligonucleotide
guauuuacuccacugcgua

SEQ ID NO: 357806 - RNA, 19 nt, Artificial Sequence
  Description of Artificial Sequence: Synthetic oligonucleotide
uuuaugccacacgaacucu

SEQ ID NO: 357807 - RNA, 19 nt, Artificial Sequence
  Description of Artificial Sequence: Synthetic oligonucleotide
cuagcaccuuuauucuggc

SEQ ID NO: 357808 - RNA, 19 nt, Artificial Sequence
  Description of Artificial Sequence: Synthetic oligonucleotide
agugucuuacacauggaaa

SEQ ID NO: 357809 - RNA, 19 nt, Artificial Sequence
  Description of Artificial Sequence: Synthetic oligonucleotide
guccggaggagccugcucc

SEQ ID NO: 357810 - RNA, 19 nt, Artificial Sequence
  Description of Artificial Sequence: Synthetic oligonucleotide
uauuuacuccacugcguau

SEQ ID NO: 357811 - RNA, 19 nt, Artificial Sequence
  Description of Artificial Sequence: Synthetic oligonucleotide
uagaggaugcguacacauc

SEQ ID NO: 357812 - RNA, 19 nt, Artificial Sequence
  Description of Artificial Sequence: Synthetic oligonucleotide
gcauaaaagagauacuccu

SEQ ID NO: 357813 - RNA, 19 nt, Artificial Sequence
  Description of Artificial Sequence: Synthetic oligonucleotide
gugucuuacacauggaaau

SEQ ID NO: 357814 - RNA, 19 nt, Artificial Sequence
  Description of Artificial Sequence: Synthetic oligonucleotide
ucccuacaugaaaggaucu

SEQ ID NO: 357815 - RNA, 19 nt, Artificial Sequence
  Description of Artificial Sequence: Synthetic oligonucleotide
uacaucucguacccugaaa

SEQ ID NO: 357816 - RNA, 19 nt, Artificial Sequence
  Description of Artificial Sequence: Synthetic oligonucleotide
caucaauagaggaugcgua

SEQ ID NO: 357817 - RNA, 19 nt, Artificial Sequence
  Description of Artificial Sequence: Synthetic oligonucleotide
ugcuucggaaacacugauc

SEQ ID NO: 357818 - RNA, 19 nt, Artificial Sequence
  Description of Artificial Sequence: Synthetic oligonucleotide
ugcuucagcucaguaaauc

SEQ ID NO: 357819 - RNA, 19 nt, Artificial Sequence
  Description of Artificial Sequence: Synthetic oligonucleotide
cauucagccauugguucag

SEQ ID NO: 357820 - RNA, 19 nt, Artificial Sequence
  Description of Artificial Sequence: Synthetic oligonucleotide
gcuucggaaacacugaucu

SEQ ID NO: 357821 - RNA, 19 nt, Artificial Sequence
  Description of Artificial Sequence: Synthetic oligonucleotide
gaucagcuacucuagcucu

SEQ ID NO: 357822 - RNA, 19 nt, Artificial Sequence
  Description of Artificial Sequence: Synthetic oligonucleotide
uuaaagagucuggaagcua

SEQ ID NO: 357823 - RNA, 19 nt, Artificial Sequence
  Description of Artificial Sequence: Synthetic oligonucleotide
ucaacugaccgugucucaa

SEQ ID NO: 357824 - RNA, 19 nt, Artificial Sequence
  Description of Artificial Sequence: Synthetic oligonucleotide
uucaacugaccgugucuca

SEQ ID NO: 357825 - RNA, 19 nt, Artificial Sequence
  Description of Artificial Sequence: Synthetic oligonucleotide
caucgugucgaccccugag

SEQ ID NO: 357826 - RNA, 19 nt, Artificial Sequence
  Description of Artificial Sequence: Synthetic oligonucleotide
gcgcuuuuaaccuggaguc

SEQ ID NO: 357827 - RNA, 19 nt, Artificial Sequence
  Description of Artificial Sequence: Synthetic oligonucleotide
gcauguucaacugaccgug

SEQ ID NO: 357828 - RNA, 19 nt, Artificial Sequence
  Description of Artificial Sequence: Synthetic oligonucleotide
uugccuuccuguguuaaaa

SEQ ID NO: 357829 - RNA, 19 nt, Artificial Sequence
  Description of Artificial Sequence: Synthetic oligonucleotide
uuucuaguguacgcacaug

SEQ ID NO: 357830 - RNA, 19 nt, Artificial Sequence
  Description of Artificial Sequence: Synthetic oligonucleotide
agucgaucagcuacucuag

SEQ ID NO: 357831 - RNA, 19 nt, Artificial Sequence
  Description of Artificial Sequence: Synthetic oligonucleotide
guucaacugaccgugucuc

SEQ ID NO: 357832 - RNA, 19 nt, Artificial Sequence
  Description of Artificial Sequence: Synthetic oligonucleotide
auagagucgaucagcuacu

SEQ ID NO: 357833 - RNA, 19 nt, Artificial Sequence
  Description of Artificial Sequence: Synthetic oligonucleotide
cuaguguacgcacauggua

SEQ ID NO: 357834 - RNA, 19 nt, Artificial Sequence
  Description of Artificial Sequence: Synthetic oligonucleotide
acuguaccgccuccaaagu

SEQ ID NO: 357835 - RNA, 19 nt, Artificial Sequence
  Description of Artificial Sequence: Synthetic oligonucleotide
acgccauagagucgaucag

SEQ ID NO: 357836 - RNA, 19 nt, Artificial Sequence
  Description of Artificial Sequence: Synthetic oligonucleotide
guauaggggucuacgaaca

SEQ ID NO: 357837 - RNA, 19 nt, Artificial Sequence
  Description of Artificial Sequence: Synthetic oligonucleotide
cagacugcaacucaucacu

SEQ ID NO: 357838 - RNA, 19 nt, Artificial Sequence
  Description of Artificial Sequence: Synthetic oligonucleotide
ucagcuacucuagcucuga

SEQ ID NO: 357839 - RNA, 19 nt, Artificial Sequence
  Description of Artificial Sequence: Synthetic oligonucleotide
uuuagcugaucugcauagu

SEQ ID NO: 357840 - RNA, 19 nt, Artificial Sequence
  Description of Artificial Sequence: Synthetic oligonucleotide
uuccuuagcauugguccac

SEQ ID NO: 357841 - RNA, 19 nt, Artificial Sequence
  Description of Artificial Sequence: Synthetic oligonucleotide
uaucagcccaugcauucuu

SEQ ID NO: 357842 - RNA, 19 nt, Artificial Sequence
  Description of Artificial Sequence: Synthetic oligonucleotide
gugcuauaugaacacaacu

SEQ ID NO: 357843 - RNA, 19 nt, Artificial Sequence
  Description of Artificial Sequence: Synthetic oligonucleotide
acacccuaacauucagcca

SEQ ID NO: 357844 - RNA, 19 nt, Artificial Sequence
  Description of Artificial Sequence: Synthetic oligonucleotide
cccgucaucgugucgaccc

SEQ ID NO: 357845 - RNA, 19 nt, Artificial Sequence
  Description of Artificial Sequence: Synthetic oligonucleotide
gcuuuuaaccuggagucug

SEQ ID NO: 357846 - RNA, 19 nt, Artificial Sequence
  Description of Artificial Sequence: Synthetic oligonucleotide
gguaguaaacuaaaaggua

SEQ ID NO: 357847 - RNA, 19 nt, Artificial Sequence
  Description of Artificial Sequence: Synthetic oligonucleotide
acucugaccgucagcaugu

SEQ ID NO: 357848 - RNA, 19 nt, Artificial Sequence
  Description of Artificial Sequence: Synthetic oligonucleotide
aguguacgcacaugguaua

SEQ ID NO: 357849 - RNA, 19 nt, Artificial Sequence
  Description of Artificial Sequence: Synthetic oligonucleotide
ucagcucaguaaaucucuu

SEQ ID NO: 357850 - RNA, 19 nt, Artificial Sequence
  Description of Artificial Sequence: Synthetic oligonucleotide
uaagcgcuuuuaaccugga

SEQ ID NO: 357851 - RNA, 19 nt, Artificial Sequence
  Description of Artificial Sequence: Synthetic oligonucleotide
cuguaccgccuccaaagug

SEQ ID NO: 357852 - RNA, 19 nt, Artificial Sequence
  Description of Artificial Sequence: Synthetic oligonucleotide
acaugguauaggggucuac

SEQ ID NO: 357853 - RNA, 19 nt, Artificial Sequence
  Description of Artificial Sequence: Synthetic oligonucleotide
acucccuacaugaaaggau

SEQ ID NO: 357854 - RNA, 19 nt, Artificial Sequence
  Description of Artificial Sequence: Synthetic oligonucleotide
agccuauccgucgucucuc

SEQ ID NO: 357855 - RNA, 19 nt, Artificial Sequence
  Description of Artificial Sequence: Synthetic oligonucleotide
ggagagaaagucacuuccc

SEQ ID NO: 357856 - RNA, 19 nt, Artificial Sequence
  Description of Artificial Sequence: Synthetic oligonucleotide
ucacuacaagugucuuaca

SEQ ID NO: 357857 - RNA, 19 nt, Artificial Sequence
  Description of Artificial Sequence: Synthetic oligonucleotide
cagagaguuuaugccacac

SEQ ID NO: 357858 - RNA, 19 nt, Artificial Sequence
  Description of Artificial Sequence: Synthetic oligonucleotide
cacccuaacauucagccau

SEQ ID NO: 357859 - RNA, 19 nt, Artificial Sequence
  Description of Artificial Sequence: Synthetic oligonucleotide
ucugaccgucagcauguuc

SEQ ID NO: 357860 - RNA, 19 nt, Artificial Sequence
  Description of Artificial Sequence: Synthetic oligonucleotide
caguccaucgcccauuucu

SEQ ID NO: 357861 - RNA, 19 nt, Artificial Sequence
  Description of Artificial Sequence: Synthetic oligonucleotide
guguacgcacaugguauag

SEQ ID NO: 357862 - RNA, 19 nt, Artificial Sequence
  Description of Artificial Sequence: Synthetic oligonucleotide
ucaucgugucgaccccuga

SEQ ID NO: 357863 - RNA, 19 nt, Artificial Sequence
  Description of Artificial Sequence: Synthetic oligonucleotide
gaguuugguggucauuccu

SEQ ID NO: 357864 - RNA, 19 nt, Artificial Sequence
  Description of Artificial Sequence: Synthetic oligonucleotide
auacgccauagagucgauc

SEQ ID NO: 357865 - RNA, 19 nt, Artificial Sequence
  Description of Artificial Sequence: Synthetic oligonucleotide
uguucacuacaagugucuu

SEQ ID NO: 357866 - RNA, 19 nt, Artificial Sequence
  Description of Artificial Sequence: Synthetic oligonucleotide
ucguacccugaaaugccau

SEQ ID NO: 357867 - RNA, 19 nt, Artificial Sequence
  Description of Artificial Sequence: Synthetic oligonucleotide
uccgucgucucuccacaaa

SEQ ID NO: 357868 - RNA, 19 nt, Artificial Sequence
  Description of Artificial Sequence: Synthetic oligonucleotide
auagcgcuccauucacuaa

SEQ ID NO: 357869 - RNA, 19 nt, Artificial Sequence
  Description of Artificial Sequence: Synthetic oligonucleotide
cuguagugcuucagcucag

SEQ ID NO: 357870 - RNA, 19 nt, Artificial Sequence
  Description of Artificial Sequence: Synthetic oligonucleotide
acuguaugcuuuauauaua

SEQ ID NO: 357871 - RNA, 19 nt, Artificial Sequence
  Description of Artificial Sequence: Synthetic oligonucleotide
aguacugaguauaguuuua

SEQ ID NO: 357872 - RNA, 19 nt, Artificial Sequence
  Description of Artificial Sequence: Synthetic oligonucleotide
gcucaauaucagcccaugc

SEQ ID NO: 357873 - RNA, 19 nt, Artificial Sequence
  Description of Artificial Sequence: Synthetic oligonucleotide
uggguccuaccaaguaaau

SEQ ID NO: 357874 - RNA, 19 nt, Artificial Sequence
  Description of Artificial Sequence: Synthetic oligonucleotide
ggcaacccucaagagaaag

SEQ ID NO: 357875 - RNA, 19 nt, Artificial Sequence
  Description of Artificial Sequence: Synthetic oligonucleotide
guaaaucucuugucugggu

SEQ ID NO: 357876 - RNA, 19 nt, Artificial Sequence
  Description of Artificial Sequence: Synthetic oligonucleotide
aggcucacugcugagguua

SEQ ID NO: 357877 - RNA, 19 nt, Artificial Sequence
  Description of Artificial Sequence: Synthetic oligonucleotide
guccuaccaaguaaauaca

SEQ ID NO: 357878 - RNA, 19 nt, Artificial Sequence
  Description of Artificial Sequence: Synthetic oligonucleotide
uguacguuucuugcauguu

SEQ ID NO: 357879 - RNA, 19 nt, Artificial Sequence
  Description of Artificial Sequence: Synthetic oligonucleotide
cucguacccugaaaugcca

SEQ ID NO: 357880 - RNA, 19 nt, Artificial Sequence
  Description of Artificial Sequence: Synthetic oligonucleotide
guguacguuucuugcaugu

SEQ ID NO: 357881 - RNA, 19 nt, Artificial Sequence
  Description of Artificial Sequence: Synthetic oligonucleotide
ggggucuacgaacagggaa

SEQ ID NO: 357882 - RNA, 19 nt, Artificial Sequence
  Description of Artificial Sequence: Synthetic oligonucleotide
agcuuggcuucugaacaug

SEQ ID NO: 357883 - RNA, 19 nt, Artificial Sequence
  Description of Artificial Sequence: Synthetic oligonucleotide
gcaccuuuauucuggcuuc

SEQ ID NO: 357884 - RNA, 19 nt, Artificial Sequence
  Description of Artificial Sequence: Synthetic oligonucleotide
agcacggcgccagggcccc

SEQ ID NO: 357885 - RNA, 19 nt, Artificial Sequence
  Description of Artificial Sequence: Synthetic oligonucleotide
guaccgccuccaaagugag

SEQ ID NO: 357886 - RNA, 19 nt, Artificial Sequence
  Description of Artificial Sequence: Synthetic oligonucleotide
uucccgggugcccucgguc

SEQ ID NO: 357887 - RNA, 19 nt, Artificial Sequence
  Description of Artificial Sequence: Synthetic oligonucleotide
cagcacggcgccagggccc

SEQ ID NO: 357888 - RNA, 19 nt, Artificial Sequence
  Description of Artificial Sequence: Synthetic oligonucleotide
uauacgccauagagucgau

SEQ ID NO: 357889 - RNA, 19 nt, Artificial Sequence
  Description of Artificial Sequence: Synthetic oligonucleotide
cugaucugcauagugcucu

SEQ ID NO: 357890 - RNA, 19 nt, Artificial Sequence
  Description of Artificial Sequence: Synthetic oligonucleotide
gaggaugcguacacaucca

SEQ ID NO: 357891 - RNA, 19 nt, Artificial Sequence
  Description of Artificial Sequence: Synthetic oligonucleotide
aucagcuacucuagcucug

SEQ ID NO: 357892 - RNA, 19 nt, Artificial Sequence
  Description of Artificial Sequence: Synthetic oligonucleotide
aaccuggagucugccuuca

SEQ ID NO: 357893 - RNA, 19 nt, Artificial Sequence
  Description of Artificial Sequence: Synthetic oligonucleotide
cucgcacugcugcuucuug

SEQ ID NO: 357894 - RNA, 19 nt, Artificial Sequence
  Description of Artificial Sequence: Synthetic oligonucleotide
agcccacaaguguucacua

SEQ ID NO: 357895 - RNA, 19 nt, Artificial Sequence
  Description of Artificial Sequence: Synthetic oligonucleotide
accaguccccaaaaccuca

SEQ ID NO: 357896 - RNA, 19 nt, Artificial Sequence
  Description of Artificial Sequence: Synthetic oligonucleotide
caguacugaguauaguuuu

SEQ ID NO: 357897 - RNA, 19 nt, Artificial Sequence
  Description of Artificial Sequence: Synthetic oligonucleotide
guuaaacaguacugaguau

SEQ ID NO: 357898 - RNA, 19 nt, Artificial Sequence
  Description of Artificial Sequence: Synthetic oligonucleotide
aguugccuuccuguguuaa

SEQ ID NO: 357899 - RNA, 19 nt, Artificial Sequence
  Description of Artificial Sequence: Synthetic oligonucleotide
ucacggcauuucuuccagu

SEQ ID NO: 357900 - RNA, 19 nt, Artificial Sequence
  Description of Artificial Sequence: Synthetic oligonucleotide
ggaugcguacacauccaug

SEQ ID NO: 357901 - RNA, 19 nt, Artificial Sequence
  Description of Artificial Sequence: Synthetic oligonucleotide
ggggaguacauggaaauua

SEQ ID NO: 357902 - RNA, 19 nt, Artificial Sequence
  Description of Artificial Sequence: Synthetic oligonucleotide
cgugucucaaugagguaag

SEQ ID NO: 357903 - RNA, 19 nt, Artificial Sequence
  Description of Artificial Sequence: Synthetic oligonucleotide
ccgucgucucuccacaaag

SEQ ID NO: 357904 - RNA, 19 nt, Artificial Sequence
  Description of Artificial Sequence: Synthetic oligonucleotide
uggggaguacauggaaauu

SEQ ID NO: 357905 - RNA, 19 nt, Artificial Sequence
  Description of Artificial Sequence: Synthetic oligonucleotide
gaaagucacuucccaggau

SEQ ID NO: 357906 - RNA, 19 nt, Artificial Sequence
  Description of Artificial Sequence: Synthetic oligonucleotide
agauacuccuuuagcugau

SEQ ID NO: 357907 - RNA, 19 nt, Artificial Sequence
  Description of Artificial Sequence: Synthetic oligonucleotide
gaggacacucugaccguca

SEQ ID NO: 357908 - RNA, 19 nt, Artificial Sequence
  Description of Artificial Sequence: Synthetic oligonucleotide
guaccaugagacacauuaa

SEQ ID NO: 357909 - RNA, 19 nt, Artificial Sequence
  Description of Artificial Sequence: Synthetic oligonucleotide
cccacaaguguucacuaca

SEQ ID NO: 357910 - RNA, 19 nt, Artificial Sequence
  Description of Artificial Sequence: Synthetic oligonucleotide
aguccaucgcccauuucuu

SEQ ID NO: 357911 - RNA, 19 nt, Artificial Sequence
  Description of Artificial Sequence: Synthetic oligonucleotide
gcccaugcauucuucacaa

SEQ ID NO: 357912 - RNA, 19 nt, Artificial Sequence
  Description of Artificial Sequence: Synthetic oligonucleotide
ucgaccccugagcugucuu

SEQ ID NO: 357913 - RNA, 19 nt, Artificial Sequence
  Description of Artificial Sequence: Synthetic oligonucleotide
gugucgaccccugagcugu

SEQ ID NO: 357914 - RNA, 19 nt, Artificial Sequence
  Description of Artificial Sequence: Synthetic oligonucleotide
cgaaggagaugugagauga

SEQ ID NO: 357915 - RNA, 19 nt, Artificial Sequence
  Description of Artificial Sequence: Synthetic oligonucleotide
gucaucgugucgaccccug

SEQ ID NO: 357916 - RNA, 19 nt, Artificial Sequence
  Description of Artificial Sequence: Synthetic oligonucleotide
gucaaacagaacagcucaa

SEQ ID NO: 357917 - RNA, 19 nt, Artificial Sequence
  Description of Artificial Sequence: Synthetic oligonucleotide
cuacaucucguacccugaa

SEQ ID NO: 357918 - RNA, 19 nt, Artificial Sequence
  Description of Artificial Sequence: Synthetic oligonucleotide
gagucugccuucagcugga

SEQ ID NO: 357919 - RNA, 19 nt, Artificial Sequence
  Description of Artificial Sequence: Synthetic oligonucleotide
caauaucagcccaugcauu

SEQ ID NO: 357920 - RNA, 19 nt, Artificial Sequence
  Description of Artificial Sequence: Synthetic oligonucleotide
ggaugugaggcaacccuca

SEQ ID NO: 357921 - RNA, 19 nt, Artificial Sequence
  Description of Artificial Sequence: Synthetic oligonucleotide
ggacacucugaccgucagc

SEQ ID NO: 357922 - RNA, 19 nt, Artificial Sequence
  Description of Artificial Sequence: Synthetic oligonucleotide
cucugacucgaaggagaug

SEQ ID NO: 357923 - RNA, 19 nt, Artificial Sequence
  Description of Artificial Sequence: Synthetic oligonucleotide
ucccgucaucgugucgacc

SEQ ID NO: 357924 - RNA, 19 nt, Artificial Sequence
  Description of Artificial Sequence: Synthetic oligonucleotide
aguuggcauuggggaguac

SEQ ID NO: 357925 - RNA, 19 nt, Artificial Sequence
  Description of Artificial Sequence: Synthetic oligonucleotide
gcguaucugagaagcugag

SEQ ID NO: 357926 - RNA, 19 nt, Artificial Sequence
  Description of Artificial Sequence: Synthetic oligonucleotide
ggucuacgaacagggaaga

SEQ ID NO: 357927 - RNA, 19 nt, Artificial Sequence
  Description of Artificial Sequence: Synthetic oligonucleotide
cauguucacggcauuucuu

SEQ ID NO: 357928 - RNA, 19 nt, Artificial Sequence
  Description of Artificial Sequence: Synthetic oligonucleotide
accgugucucaaugaggua

SEQ ID NO: 357929 - RNA, 19 nt, Artificial Sequence
  Description of Artificial Sequence: Synthetic oligonucleotide
cucaacuauaaggcaagau

SEQ ID NO: 357930 - RNA, 19 nt, Artificial Sequence
  Description of Artificial Sequence: Synthetic oligonucleotide
gcccacaaguguucacuac

SEQ ID NO: 357931 - RNA, 19 nt, Artificial Sequence
  Description of Artificial Sequence: Synthetic oligonucleotide
cuaagccuauccgucgucu

SEQ ID NO: 357932 - RNA, 19 nt, Artificial Sequence
  Description of Artificial Sequence: Synthetic oligonucleotide
cacggcauuucuuccaguu

SEQ ID NO: 357933 - RNA, 19 nt, Artificial Sequence
  Description of Artificial Sequence: Synthetic oligonucleotide
cccuacaugaaaggaucug

SEQ ID NO: 357934 - RNA, 19 nt, Artificial Sequence
  Description of Artificial Sequence: Synthetic oligonucleotide
auccgucgucucuccacaa

SEQ ID NO: 357935 - RNA, 19 nt, Artificial Sequence
  Description of Artificial Sequence: Synthetic oligonucleotide
cguacccugaaaugccaug

SEQ ID NO: 357936 - RNA, 19 nt, Artificial Sequence
  Description of Artificial Sequence: Synthetic oligonucleotide
ccaaagaguuuggugguca

SEQ ID NO: 357937 - RNA, 19 nt, Artificial Sequence
  Description of Artificial Sequence: Synthetic oligonucleotide
gcuacaucucguacccuga

SEQ ID NO: 357938 - RNA, 19 nt, Artificial Sequence
  Description of Artificial Sequence: Synthetic oligonucleotide
cgccauagagucgaucagc

SEQ ID NO: 357939 - RNA, 19 nt, Artificial Sequence
  Description of Artificial Sequence: Synthetic oligonucleotide
guaccagcccacaaguguu

SEQ ID NO: 357940 - RNA, 19 nt, Artificial Sequence
  Description of Artificial Sequence: Synthetic oligonucleotide
ccgugucucaaugagguaa

SEQ ID NO: 357941 - RNA, 19 nt, Artificial Sequence
  Description of Artificial Sequence: Synthetic oligonucleotide
gccuauccgucgucucucc

SEQ ID NO: 357942 - RNA, 19 nt, Artificial Sequence
  Description of Artificial Sequence: Synthetic oligonucleotide
augcuacaucucguacccu

SEQ ID NO: 357943 - RNA, 19 nt, Artificial Sequence
  Description of Artificial Sequence: Synthetic oligonucleotide
cccaaaaccucaaauuauu

SEQ ID NO: 357944 - RNA, 19 nt, Artificial Sequence
  Description of Artificial Sequence: Synthetic oligonucleotide
aggggucuacgaacaggga

SEQ ID NO: 357945 - RNA, 19 nt, Artificial Sequence
  Description of Artificial Sequence: Synthetic oligonucleotide
ccuuagcauugguccacac

SEQ ID NO: 357946 - RNA, 19 nt, Artificial Sequence
  Description of Artificial Sequence: Synthetic oligonucleotide
gcugaucugcauagugcuc

SEQ ID NO: 357947 - RNA, 19 nt, Artificial Sequence
  Description of Artificial Sequence: Synthetic oligonucleotide
gucuacgaacagggaagaa

SEQ ID NO: 357948 - RNA, 19 nt, Artificial Sequence
  Description of Artificial Sequence: Synthetic oligonucleotide
gugcccggcgcucugcagu

SEQ ID NO: 357949 - RNA, 19 nt, Artificial Sequence
  Description of Artificial Sequence: Synthetic oligonucleotide
ggguccuaccaaguaaaua

SEQ ID NO: 357950 - RNA, 19 nt, Artificial Sequence
  Description of Artificial Sequence: Synthetic oligonucleotide
caacugaccgugucucaau

SEQ ID NO: 357951 - RNA, 19 nt, Artificial Sequence
  Description of Artificial Sequence: Synthetic oligonucleotide
ccacugcguaucugagaag

SEQ ID NO: 357952 - RNA, 19 nt, Artificial Sequence
  Description of Artificial Sequence: Synthetic oligonucleotide
acccuaacauucagccauu

SEQ ID NO: 357953 - RNA, 19 nt, Artificial Sequence
  Description of Artificial Sequence: Synthetic oligonucleotide
ccgucaucgugucgacccc

SEQ ID NO: 357954 - RNA, 19 nt, Artificial Sequence
  Description of Artificial Sequence: Synthetic oligonucleotide
gcucaacuauaaggcaaga

SEQ ID NO: 357955 - RNA, 19 nt, Artificial Sequence
  Description of Artificial Sequence: Synthetic oligonucleotide
cgugucgaccccugagcug

SEQ ID NO: 357956 - RNA, 19 nt, Artificial Sequence
  Description of Artificial Sequence: Synthetic oligonucleotide
gcagaaauugaggcucacu

SEQ ID NO: 357957 - RNA, 19 nt, Artificial Sequence
  Description of Artificial Sequence: Synthetic oligonucleotide
gguccggaggagccugcuc

SEQ ID NO: 357958 - RNA, 19 nt, Artificial Sequence
  Description of Artificial Sequence: Synthetic oligonucleotide
auguugcauuaagcgcuuu

SEQ ID NO: 357959 - RNA, 19 nt, Artificial Sequence
  Description of Artificial Sequence: Synthetic oligonucleotide
cccuaacauucagccauug

SEQ ID NO: 357960 - RNA, 19 nt, Artificial Sequence
  Description of Artificial Sequence: Synthetic oligonucleotide
gcacaugguauaggggucu

SEQ ID NO: 357961 - RNA, 19 nt, Artificial Sequence
  Description of Artificial Sequence: Synthetic oligonucleotide
guccaucgcccauuucuuu

SEQ ID NO: 357962 - RNA, 19 nt, Artificial Sequence
  Description of Artificial Sequence: Synthetic oligonucleotide
cgcucaauaucagcccaug

SEQ ID NO: 357963 - RNA, 19 nt, Artificial Sequence
  Description of Artificial Sequence: Synthetic oligonucleotide
cacaugguauaggggucua

SEQ ID NO: 357964 - RNA, 19 nt, Artificial Sequence
  Description of Artificial Sequence: Synthetic oligonucleotide
aggcaacccucaagagaaa

SEQ ID NO: 357965 - RNA, 19 nt, Artificial Sequence
  Description of Artificial Sequence: Synthetic oligonucleotide
cugccucucgggguccgga

SEQ ID NO: 357966 - RNA, 19 nt, Artificial Sequence
  Description of Artificial Sequence: Synthetic oligonucleotide
ccauagagucgaucagcua

SEQ ID NO: 357967 - RNA, 19 nt, Artificial Sequence
  Description of Artificial Sequence: Synthetic oligonucleotide
cguaucugagaagcugaga

SEQ ID NO: 357968 - RNA, 19 nt, Artificial Sequence
  Description of Artificial Sequence: Synthetic oligonucleotide
ccuauccgucgucucucca

SEQ ID NO: 357969 - RNA, 19 nt, Artificial Sequence
  Description of Artificial Sequence: Synthetic oligonucleotide
cagcugucuccaagucaua

SEQ ID NO: 357970 - RNA, 19 nt, Artificial Sequence
  Description of Artificial Sequence: Synthetic oligonucleotide
ccgcagugcuucugcauaa

SEQ ID NO: 357971 - RNA, 19 nt, Artificial Sequence
  Description of Artificial Sequence: Synthetic oligonucleotide
cccggcgcucugcagucca

SEQ ID NO: 357972 - RNA, 19 nt, Artificial Sequence
  Description of Artificial Sequence: Synthetic oligonucleotide
gcgcucaauaucagcccau

SEQ ID NO: 357973 - RNA, 19 nt, Artificial Sequence
  Description of Artificial Sequence: Synthetic oligonucleotide
cucugaccgucagcauguu

SEQ ID NO: 357974 - RNA, 19 nt, Artificial Sequence
  Description of Artificial Sequence: Synthetic oligonucleotide
cgucaucgugucgaccccu

SEQ ID NO: 357975 - RNA, 19 nt, Artificial Sequence
  Description of Artificial Sequence: Synthetic oligonucleotide
cggccgcggcuuccagcac

SEQ ID NO: 357976 - RNA, 19 nt, Artificial Sequence
  Description of Artificial Sequence: Synthetic oligonucleotide
ccggcgcucugcaguccau

SEQ ID NO: 357977 - RNA, 19 nt, Artificial Sequence
  Description of Artificial Sequence: Synthetic oligonucleotide
aaaccuacaauauccaugg

SEQ ID NO: 357978 - RNA, 19 nt, Artificial Sequence
  Description of Artificial Sequence: Synthetic oligonucleotide
ugauauagcaucuauggca

SEQ ID NO: 357979 - RNA, 19 nt, Artificial Sequence
  Description of Artificial Sequence: Synthetic oligonucleotide
uucaauuauaagaagagau

SEQ ID NO: 357980 - RNA, 19 nt, Artificial Sequence
  Description of Artificial Sequence: Synthetic oligonucleotide
uguucuuacauacugaaau

SEQ ID NO: 357981 - RNA, 19 nt, Artificial Sequence
  Description of Artificial Sequence: Synthetic oligonucleotide
aaaggggacuauugaaucc

SEQ ID NO: 357982 - RNA, 19 nt, Artificial Sequence
  Description of Artificial Sequence: Synthetic oligonucleotide
aauuauaagaagagauggc

SEQ ID NO: 357983 - RNA, 19 nt, Artificial Sequence
  Description of Artificial Sequence: Synthetic oligonucleotide
uguaaugauucuuaauuag

SEQ ID NO: 357984 - RNA, 19 nt, Artificial Sequence
  Description of Artificial Sequence: Synthetic oligonucleotide
uuuuacuucgagcuuagcc

SEQ ID NO: 357985 - RNA, 19 nt, Artificial Sequence
  Description of Artificial Sequence: Synthetic oligonucleotide
ucaauuauaagaagagaug

SEQ ID NO: 357986 - RNA, 19 nt, Artificial Sequence
  Description of Artificial Sequence: Synthetic oligonucleotide
uuagaauuucccuuacugg

SEQ ID NO: 357987 - RNA, 19 nt, Artificial Sequence
  Description of Artificial Sequence: Synthetic oligonucleotide
uccauuaccauauaauuga

SEQ ID NO: 357988 - RNA, 19 nt, Artificial Sequence
  Description of Artificial Sequence: Synthetic oligonucleotide
auagaugguacuuuguguc

SEQ ID NO: 357989 - RNA, 19 nt, Artificial Sequence
  Description of Artificial Sequence: Synthetic oligonucleotide
uuucaugacgucaugaaac

SEQ ID NO: 357990 - RNA, 19 nt, Artificial Sequence
  Description of Artificial Sequence: Synthetic oligonucleotide
ucguugaugauugauaagg

SEQ ID NO: 357991 - RNA, 19 nt, Artificial Sequence
  Description of Artificial Sequence: Synthetic oligonucleotide
uuuacuucgagcuuagccu

SEQ ID NO: 357992 - RNA, 19 nt, Artificial Sequence
  Description of Artificial Sequence: Synthetic oligonucleotide
ggugauauagcaucuaugg

SEQ ID NO: 357993 - RNA, 19 nt, Artificial Sequence
  Description of Artificial Sequence: Synthetic oligonucleotide
uuaauuaggucuucacggg

SEQ ID NO: 357994 - RNA, 19 nt, Artificial Sequence
  Description of Artificial Sequence: Synthetic oligonucleotide
agauguaggaaguuaagug

SEQ ID NO: 357995 - RNA, 19 nt, Artificial Sequence
  Description of Artificial Sequence: Synthetic oligonucleotide
aauccauuaccauauaauu

SEQ ID NO: 357996 - RNA, 19 nt, Artificial Sequence
  Description of Artificial Sequence: Synthetic oligonucleotide
uacaaauguacuucaaaug

SEQ ID NO: 357997 - RNA, 19 nt, Artificial Sequence
  Description of Artificial Sequence: Synthetic oligonucleotide
agaagagugacguaugucu

SEQ ID NO: 357998 - RNA, 19 nt, Artificial Sequence
  Description of Artificial Sequence: Synthetic oligonucleotide
aaguuaagugaucugaaaa

SEQ ID NO: 357999 - RNA, 19 nt, Artificial Sequence
  Description of Artificial Sequence: Synthetic oligonucleotide
uuacuggacaucuuuagug

SEQ ID NO: 358000 - RNA, 19 nt, Artificial Sequence
  Description of Artificial Sequence: Synthetic oligonucleotide
cuuagaauuucccuuacug

SEQ ID NO: 358001 - RNA, 19 nt, Artificial Sequence
  Description of Artificial Sequence: Synthetic oligonucleotide
aauauccaugguuaugucu

SEQ ID NO: 358002 - RNA, 19 nt, Artificial Sequence
  Description of Artificial Sequence: Synthetic oligonucleotide
auagauaccaaauccauua

SEQ ID NO: 358003 - RNA, 19 nt, Artificial Sequence
  Description of Artificial Sequence: Synthetic oligonucleotide
uuacaaauguacuucaaau

SEQ ID NO: 358004 - RNA, 19 nt, Artificial Sequence
  Description of Artificial Sequence: Synthetic oligonucleotide
agugcacugacuuacuguc

SEQ ID NO: 358005 - RNA, 19 nt, Artificial Sequence
  Description of Artificial Sequence: Synthetic oligonucleotide
aagacggaaguguaguuug

SEQ ID NO: 358006 - RNA, 19 nt, Artificial Sequence
  Description of Artificial Sequence: Synthetic oligonucleotide
gacgucaugaaacccaugc

SEQ ID NO: 358007 - RNA, 19 nt, Artificial Sequence
  Description of Artificial Sequence: Synthetic oligonucleotide
uuuacuagguccaacgaua

SEQ ID NO: 358008 - RNA, 19 nt, Artificial Sequence
  Description of Artificial Sequence: Synthetic oligonucleotide
uauaauugaguuugaaaau

SEQ ID NO: 358009 - RNA, 19 nt, Artificial Sequence
  Description of Artificial Sequence: Synthetic oligonucleotide
uucgaaaucuuuuccaaac

SEQ ID NO: 358010 - RNA, 19 nt, Artificial Sequence
  Description of Artificial Sequence: Synthetic oligonucleotide
ucuauggcagaaucaacag

SEQ ID NO: 358011 - RNA, 19 nt, Artificial Sequence
  Description of Artificial Sequence: Synthetic oligonucleotide
aauuaggucuucacgggac

SEQ ID NO: 358012 - RNA, 19 nt, Artificial Sequence
  Description of Artificial Sequence: Synthetic oligonucleotide
cuauuguuuuccauuagac

SEQ ID NO: 358013 - RNA, 19 nt, Artificial Sequence
  Description of Artificial Sequence: Synthetic oligonucleotide
aguguaguuugcccgaagg

SEQ ID NO: 358014 - RNA, 19 nt, Artificial Sequence
  Description of Artificial Sequence: Synthetic oligonucleotide
uauuguuuuccauuagacu

SEQ ID NO: 358015 - RNA, 19 nt, Artificial Sequence
  Description of Artificial Sequence: Synthetic oligonucleotide
ccaacguuuguuaagacgg

SEQ ID NO: 358016 - RNA, 19 nt, Artificial Sequence
  Description of Artificial Sequence: Synthetic oligonucleotide
cauuagacugucaacauca

SEQ ID NO: 358017 - RNA, 19 nt, Artificial Sequence
  Description of Artificial Sequence: Synthetic oligonucleotide
uuucguugaugauugauaa

SEQ ID NO: 358018 - RNA, 19 nt, Artificial Sequence
  Description of Artificial Sequence: Synthetic oligonucleotide
ucugacgggaccuuggcug

SEQ ID NO: 358019 - RNA, 19 nt, Artificial Sequence
  Description of Artificial Sequence: Synthetic oligonucleotide
uagcuaguuuacuaggucc

SEQ ID NO: 358020 - RNA, 19 nt, Artificial Sequence
  Description of Artificial Sequence: Synthetic oligonucleotide
uguuaagacggaaguguag

SEQ ID NO: 358021 - RNA, 19 nt, Artificial Sequence
  Description of Artificial Sequence: Synthetic oligonucleotide
uacucucgaauaaaugcag

SEQ ID NO: 358022 - RNA, 19 nt, Artificial Sequence
  Description of Artificial Sequence: Synthetic oligonucleotide
aagaugcaaucuucccugc

SEQ ID NO: 358023 - RNA, 19 nt, Artificial Sequence
  Description of Artificial Sequence: Synthetic oligonucleotide
aagcacacgacgguuggcc

SEQ ID NO: 358024 - RNA, 19 nt, Artificial Sequence
  Description of Artificial Sequence: Synthetic oligonucleotide
ucgaagucgacacuccuug

SEQ ID NO: 358025 - RNA, 19 nt, Artificial Sequence
  Description of Artificial Sequence: Synthetic oligonucleotide
uucaugacgucaugaaacc

SEQ ID NO: 358026 - RNA, 19 nt, Artificial Sequence
  Description of Artificial Sequence: Synthetic oligonucleotide
caugcacucagcugaaagg

SEQ ID NO: 358027 - RNA, 19 nt, Artificial Sequence
  Description of Artificial Sequence: Synthetic oligonucleotide
uucuguucgaagucgacac

SEQ ID NO: 358028 - RNA, 19 nt, Artificial Sequence
  Description of Artificial Sequence: Synthetic oligonucleotide
acggaaguguaguuugccc

SEQ ID NO: 358029 - RNA, 19 nt, Artificial Sequence
  Description of Artificial Sequence: Synthetic oligonucleotide
ucuccuuacacuucuccgc

SEQ ID NO: 358030 - RNA, 19 nt, Artificial Sequence
  Description of Artificial Sequence: Synthetic oligonucleotide
uccaugguuaugucuauug

SEQ ID NO: 358031 - RNA, 19 nt, Artificial Sequence
  Description of Artificial Sequence: Synthetic oligonucleotide
agcauuguauagaugguac

SEQ ID NO: 358032 - RNA, 19 nt, Artificial Sequence
  Description of Artificial Sequence: Synthetic oligonucleotide
uugauaaggauuccucuaa

SEQ ID NO: 358033 - RNA, 19 nt, Artificial Sequence
  Description of Artificial Sequence: Synthetic oligonucleotide
aacgauacuucagcuuccc

SEQ ID NO: 358034 - RNA, 19 nt, Artificial Sequence
  Description of Artificial Sequence: Synthetic oligonucleotide
acacuagcuaguuuacuag

SEQ ID NO: 358035 - RNA, 19 nt, Artificial Sequence
  Description of Artificial Sequence: Synthetic oligonucleotide
gaaaggggacuauugaauc

SEQ ID NO: 358036 - RNA, 19 nt, Artificial Sequence
  Description of Artificial Sequence: Synthetic oligonucleotide
uguauaggugugaaaguuc

SEQ ID NO: 358037 - RNA, 19 nt, Artificial Sequence
  Description of Artificial Sequence: Synthetic oligonucleotide
ucauucgucgucaccagcu

SEQ ID NO: 358038 - RNA, 19 nt, Artificial Sequence
  Description of Artificial Sequence: Synthetic oligonucleotide
uaauuaggucuucacggga

SEQ ID NO: 358039 - RNA, 19 nt, Artificial Sequence
  Description of Artificial Sequence: Synthetic oligonucleotide
uguauagaugguacuuugu

SEQ ID NO: 358040 - RNA, 19 nt, Artificial Sequence
  Description of Artificial Sequence: Synthetic oligonucleotide
ucaaaaucccaaucagacu

SEQ ID NO: 358041 - RNA, 19 nt, Artificial Sequence
  Description of Artificial Sequence: Synthetic oligonucleotide
ugugcuucuagcauccaau

SEQ ID NO: 358042 - RNA, 19 nt, Artificial Sequence
  Description of Artificial Sequence: Synthetic oligonucleotide
aaggugauauagcaucuau

SEQ ID NO: 358043 - RNA, 19 nt, Artificial Sequence
  Description of Artificial Sequence: Synthetic oligonucleotide
caucaugcuuaacuggucc

SEQ ID NO: 358044 - RNA, 19 nt, Artificial Sequence
  Description of Artificial Sequence: Synthetic oligonucleotide
cuuaacugguccucguagc

SEQ ID NO: 358045 - RNA, 19 nt, Artificial Sequence
  Description of Artificial Sequence: Synthetic oligonucleotide
aacuaucgauuccuguucu

SEQ ID NO: 358046 - RNA, 19 nt, Artificial Sequence
  Description of Artificial Sequence: Synthetic oligonucleotide
auaucccgcaucuucagcu

SEQ ID NO: 358047 - RNA, 19 nt, Artificial Sequence
  Description of Artificial Sequence: Synthetic oligonucleotide
uuaacugguccucguagcu

SEQ ID NO: 358048 - RNA, 19 nt, Artificial Sequence
  Description of Artificial Sequence: Synthetic oligonucleotide
ucgagcuuagccuugucgu

SEQ ID NO: 358049 - RNA, 19 nt, Artificial Sequence
  Description of Artificial Sequence: Synthetic oligonucleotide
cucgaauaaaugcagcauc

SEQ ID NO: 358050 - RNA, 19 nt, Artificial Sequence
  Description of Artificial Sequence: Synthetic oligonucleotide
cuauggcagaaucaacagg

SEQ ID NO: 358051 - RNA, 19 nt, Artificial Sequence
  Description of Artificial Sequence: Synthetic oligonucleotide
accugacaaaucuucauga

SEQ ID NO: 358052 - RNA, 19 nt, Artificial Sequence
  Description of Artificial Sequence: Synthetic oligonucleotide
ucuguauaggugugaaagu

SEQ ID NO: 358053 - RNA, 19 nt, Artificial Sequence
  Description of Artificial Sequence: Synthetic oligonucleotide
agaauuucccuuacuggac

SEQ ID NO: 358054 - RNA, 19 nt, Artificial Sequence
  Description of Artificial Sequence: Synthetic oligonucleotide
ugucuauuguuuuccauua

SEQ ID NO: 358055 - RNA, 19 nt, Artificial Sequence
  Description of Artificial Sequence: Synthetic oligonucleotide
cacuagcuaguuuacuagg

SEQ ID NO: 358056 - RNA, 19 nt, Artificial Sequence
  Description of Artificial Sequence: Synthetic oligonucleotide
uuacuagguccaacgauac

SEQ ID NO: 358057 - RNA, 19 nt, Artificial Sequence
  Description of Artificial Sequence: Synthetic oligonucleotide
cuauugaauccacuggcug

SEQ ID NO: 358058 - RNA, 19 nt, Artificial Sequence
  Description of Artificial Sequence: Synthetic oligonucleotide
guaauugacauucuucugu

SEQ ID NO: 358059 - RNA, 19 nt, Artificial Sequence
  Description of Artificial Sequence: Synthetic oligonucleotide
aggugugaaaguucagaag

SEQ ID NO: 358060 - RNA, 19 nt, Artificial Sequence
  Description of Artificial Sequence: Synthetic oligonucleotide
auguaaugauucuuaauua

SEQ ID NO: 358061 - RNA, 19 nt, Artificial Sequence
  Description of Artificial Sequence: Synthetic oligonucleotide
cagacgacuccucaacucg

SEQ ID NO: 358062 - RNA, 19 nt, Artificial Sequence
  Description of Artificial Sequence: Synthetic oligonucleotide
aggaaguuaagugaucuga

SEQ ID NO: 358063 - RNA, 19 nt, Artificial Sequence
  Description of Artificial Sequence: Synthetic oligonucleotide
aaacccaugcagagcagcg

SEQ ID NO: 358064 - RNA, 19 nt, Artificial Sequence
  Description of Artificial Sequence: Synthetic oligonucleotide
caaacucugcugaaccugc

SEQ ID NO: 358065 - RNA, 19 nt, Artificial Sequence
  Description of Artificial Sequence: Synthetic oligonucleotide
uccucguagcuccucuugg

SEQ ID NO: 358066 - RNA, 19 nt, Artificial Sequence
  Description of Artificial Sequence: Synthetic oligonucleotide
guaggacgcauuuucauga

SEQ ID NO: 358067 - RNA, 19 nt, Artificial Sequence
  Description of Artificial Sequence: Synthetic oligonucleotide
ggacuauugaauccacugg

SEQ ID NO: 358068 - RNA, 19 nt, Artificial Sequence
  Description of Artificial Sequence: Synthetic oligonucleotide
cuucuagcauccaauguuc

SEQ ID NO: 358069 - RNA, 19 nt, Artificial Sequence
  Description of Artificial Sequence: Synthetic oligonucleotide
uuuaacugguaagggagga

SEQ ID NO: 358070 - RNA, 19 nt, Artificial Sequence
  Description of Artificial Sequence: Synthetic oligonucleotide
agagucugagauuuuacuu

SEQ ID NO: 358071 - RNA, 19 nt, Artificial Sequence
  Description of Artificial Sequence: Synthetic oligonucleotide
auccauuaccauauaauug

SEQ ID NO: 358072 - RNA, 19 nt, Artificial Sequence
  Description of Artificial Sequence: Synthetic oligonucleotide
gugauauagcaucuauggc

SEQ ID NO: 358073 - RNA, 19 nt, Artificial Sequence
  Description of Artificial Sequence: Synthetic oligonucleotide
uaucgauuccuguucuucu

SEQ ID NO: 358074 - RNA, 19 nt, Artificial Sequence
  Description of Artificial Sequence: Synthetic oligonucleotide
uguucgaagucgacacucc

SEQ ID NO: 358075 - RNA, 19 nt, Artificial Sequence
  Description of Artificial Sequence: Synthetic oligonucleotide
uauaucccgcaucuucagc

SEQ ID NO: 358076 - RNA, 19 nt, Artificial Sequence
  Description of Artificial Sequence: Synthetic oligonucleotide
uggaacguugagagcauug

SEQ ID NO: 358077 - RNA, 19 nt, Artificial Sequence
  Description of Artificial Sequence: Synthetic oligonucleotide
uucguugaugauugauaag

SEQ ID NO: 358078 - RNA, 19 nt, Artificial Sequence
  Description of Artificial Sequence: Synthetic oligonucleotide
uagauaccaaauccauuac

SEQ ID NO: 358079 - RNA, 19 nt, Artificial Sequence
  Description of Artificial Sequence: Synthetic oligonucleotide
aaggggacuauugaaucca

SEQ ID NO: 358080 - RNA, 19 nt, Artificial Sequence
  Description of Artificial Sequence: Synthetic oligonucleotide
uuucgaaaucuuuuccaaa

SEQ ID NO: 358081 - RNA, 19 nt, Artificial Sequence
  Description of Artificial Sequence: Synthetic oligonucleotide
acaaaagccagggccugcc

SEQ ID NO: 358082 - RNA, 19 nt, Artificial Sequence
  Description of Artificial Sequence: Synthetic oligonucleotide
uuucccuuacuggacaucu

SEQ ID NO: 358083 - RNA, 19 nt, Artificial Sequence
  Description of Artificial Sequence: Synthetic oligonucleotide
uucuuacauacugaaauua

SEQ ID NO: 358084 - RNA, 19 nt, Artificial Sequence
  Description of Artificial Sequence: Synthetic oligonucleotide
aguuuacuagguccaacga

SEQ ID NO: 358085 - RNA, 19 nt, Artificial Sequence
  Description of Artificial Sequence: Synthetic oligonucleotide
gggacuauugaauccacug

SEQ ID NO: 358086 - RNA, 19 nt, Artificial Sequence
  Description of Artificial Sequence: Synthetic oligonucleotide
gagccguggacacaguggc

SEQ ID NO: 358087 - RNA, 19 nt, Artificial Sequence
  Description of Artificial Sequence: Synthetic oligonucleotide
ugacuuacugucagccagc

SEQ ID NO: 358088 - RNA, 19 nt, Artificial Sequence
  Description of Artificial Sequence: Synthetic oligonucleotide
caugacgucaugaaaccca

SEQ ID NO: 358089 - RNA, 19 nt, Artificial Sequence
  Description of Artificial Sequence: Synthetic oligonucleotide
ucuuagaauuucccuuacu

SEQ ID NO: 358090 - RNA, 19 nt, Artificial Sequence
  Description of Artificial Sequence: Synthetic oligonucleotide
gaauuucccuuacuggaca

SEQ ID NO: 358091 - RNA, 19 nt, Artificial Sequence
  Description of Artificial Sequence: Synthetic oligonucleotide
ucauaaggcacggacucug

SEQ ID NO: 358092 - RNA, 19 nt, Artificial Sequence
  Description of Artificial Sequence: Synthetic oligonucleotide
accuacaauauccaugguu

SEQ ID NO: 358093 - RNA, 19 nt, Artificial Sequence
  Description of Artificial Sequence: Synthetic oligonucleotide
uuaccauauaauugaguuu

SEQ ID NO: 358094 - RNA, 19 nt, Artificial Sequence
  Description of Artificial Sequence: Synthetic oligonucleotide
auaaggacaucugacaauu

SEQ ID NO: 358095 - RNA, 19 nt, Artificial Sequence
  Description of Artificial Sequence: Synthetic oligonucleotide
acucucgaauaaaugcagc

SEQ ID NO: 358096 - RNA, 19 nt, Artificial Sequence
  Description of Artificial Sequence: Synthetic oligonucleotide
gaaguuaagugaucugaaa

SEQ ID NO: 358097 - RNA, 19 nt, Artificial Sequence
  Description of Artificial Sequence: Synthetic oligonucleotide
ucauguaggcagcagcuuu

SEQ ID NO: 358098 - RNA, 19 nt, Artificial Sequence
  Description of Artificial Sequence: Synthetic oligonucleotide
uuagacugucaacaucaaa

SEQ ID NO: 358099 - RNA, 19 nt, Artificial Sequence
  Description of Artificial Sequence: Synthetic oligonucleotide
gauuuuacuucgagcuuag

SEQ ID NO: 358100 - RNA, 19 nt, Artificial Sequence
  Description of Artificial Sequence: Synthetic oligonucleotide
auacucucgaauaaaugca

SEQ ID NO: 358101 - RNA, 19 nt, Artificial Sequence
  Description of Artificial Sequence: Synthetic oligonucleotide
ggacgcauuuucaugaagg

SEQ ID NO: 358102 - RNA, 19 nt, Artificial Sequence
  Description of Artificial Sequence: Synthetic oligonucleotide
aauuucccuuacuggacau

SEQ ID NO: 358103 - RNA, 19 nt, Artificial Sequence
  Description of Artificial Sequence: Synthetic oligonucleotide
ugcuucuagcauccaaugu

SEQ ID NO: 358104 - RNA, 19 nt, Artificial Sequence
  Description of Artificial Sequence: Synthetic oligonucleotide
uguaggaaguuaagugauc

SEQ ID NO: 358105 - RNA, 19 nt, Artificial Sequence
  Description of Artificial Sequence: Synthetic oligonucleotide
uuguuaagacggaagugua

SEQ ID NO: 358106 - RNA, 19 nt, Artificial Sequence
  Description of Artificial Sequence: Synthetic oligonucleotide
gaagagugacguaugucug

SEQ ID NO: 358107 - RNA, 19 nt, Artificial Sequence
  Description of Artificial Sequence: Synthetic oligonucleotide
aaguguaguuugcccgaag

SEQ ID NO: 358108 - RNA, 19 nt, Artificial Sequence
  Description of Artificial Sequence: Synthetic oligonucleotide
ucaacucggccucuacaug

SEQ ID NO: 358109 - RNA, 19 nt, Artificial Sequence
  Description of Artificial Sequence: Synthetic oligonucleotide
ucuccauguacuuccgggu

SEQ ID NO: 358110 - RNA, 19 nt, Artificial Sequence
  Description of Artificial Sequence: Synthetic oligonucleotide
uucuuagaauuucccuuac

SEQ ID NO: 358111 - RNA, 19 nt, Artificial Sequence
  Description of Artificial Sequence: Synthetic oligonucleotide
guaugucugcagcuucucg

SEQ ID NO: 358112 - RNA, 19 nt, Artificial Sequence
  Description of Artificial Sequence: Synthetic oligonucleotide
gguccaacgauacuucagc

SEQ ID NO: 358113 - RNA, 19 nt, Artificial Sequence
  Description of Artificial Sequence: Synthetic oligonucleotide
acaacacuagcuaguuuac

SEQ ID NO: 358114 - RNA, 19 nt, Artificial Sequence
  Description of Artificial Sequence: Synthetic oligonucleotide
gccaacguuuguuaagacg

SEQ ID NO: 358115 - RNA, 19 nt, Artificial Sequence
  Description of Artificial Sequence: Synthetic oligonucleotide
uaacugguaagggaggauc

SEQ ID NO: 358116 - RNA, 19 nt, Artificial Sequence
  Description of Artificial Sequence: Synthetic oligonucleotide
gaugauugauaaggauucc

SEQ ID NO: 358117 - RNA, 19 nt, Artificial Sequence
  Description of Artificial Sequence: Synthetic oligonucleotide
auucgucgucaccagcuuc

SEQ ID NO: 358118 - RNA, 19 nt, Artificial Sequence
  Description of Artificial Sequence: Synthetic oligonucleotide
cuauaucccgcaucuucag

SEQ ID NO: 358119 - RNA, 19 nt, Artificial Sequence
  Description of Artificial Sequence: Synthetic oligonucleotide
uccucuaaucuaccugaca

SEQ ID NO: 358120 - RNA, 19 nt, Artificial Sequence
  Description of Artificial Sequence: Synthetic oligonucleotide
auauccaugguuaugucua

SEQ ID NO: 358121 - RNA, 19 nt, Artificial Sequence
  Description of Artificial Sequence: Synthetic oligonucleotide
uccauuagacugucaacau

SEQ ID NO: 358122 - RNA, 19 nt, Artificial Sequence
  Description of Artificial Sequence: Synthetic oligonucleotide
uguuagugccacugcugag

SEQ ID NO: 358123 - RNA, 19 nt, Artificial Sequence
  Description of Artificial Sequence: Synthetic oligonucleotide
auccgcuucauguccuggg

SEQ ID NO: 358124 - RNA, 19 nt, Artificial Sequence
  Description of Artificial Sequence: Synthetic oligonucleotide
ucucgaauaaaugcagcau

SEQ ID NO: 358125 - RNA, 19 nt, Artificial Sequence
  Description of Artificial Sequence: Synthetic oligonucleotide
agcgccaacguuuguuaag

SEQ ID NO: 358126 - RNA, 19 nt, Artificial Sequence
  Description of Artificial Sequence: Synthetic oligonucleotide
ucuauuccauagauaccaa

SEQ ID NO: 358127 - RNA, 19 nt, Artificial Sequence
  Description of Artificial Sequence: Synthetic oligonucleotide
uuacuucgagcuuagccuu

SEQ ID NO: 358128 - RNA, 19 nt, Artificial Sequence
  Description of Artificial Sequence: Synthetic oligonucleotide
cuagguccaacgauacuuc

SEQ ID NO: 358129 - RNA, 19 nt, Artificial Sequence
  Description of Artificial Sequence: Synthetic oligonucleotide
acgguuggccacugcuucc

SEQ ID NO: 358130 - RNA, 19 nt, Artificial Sequence
  Description of Artificial Sequence: Synthetic oligonucleotide
cacggacaacacuagcuag

SEQ ID NO: 358131 - RNA, 19 nt, Artificial Sequence
  Description of Artificial Sequence: Synthetic oligonucleotide
ugagacgugagcuccgcua

SEQ ID NO: 358132 - RNA, 19 nt, Artificial Sequence
  Description of Artificial Sequence: Synthetic oligonucleotide
augguuaugucuauuguuu

SEQ ID NO: 358133 - RNA, 19 nt, Artificial Sequence
  Description of Artificial Sequence: Synthetic oligonucleotide
agggcgagaagagugacgu

SEQ ID NO: 358134 - RNA, 19 nt, Artificial Sequence
  Description of Artificial Sequence: Synthetic oligonucleotide
gaacacggcugucauccgc

SEQ ID NO: 358135 - RNA, 19 nt, Artificial Sequence
  Description of Artificial Sequence: Synthetic oligonucleotide
cuauccuggccauguaaug

SEQ ID NO: 358136 - RNA, 19 nt, Artificial Sequence
  Description of Artificial Sequence: Synthetic oligonucleotide
gguacuuugugucauuaaa

SEQ ID NO: 358137 - RNA, 19 nt, Artificial Sequence
  Description of Artificial Sequence: Synthetic oligonucleotide
ucuucuguucgaagucgac

SEQ ID NO: 358138 - RNA, 19 nt, Artificial Sequence
  Description of Artificial Sequence: Synthetic oligonucleotide
accaacuaucgauuccugu

SEQ ID NO: 358139 - RNA, 19 nt, Artificial Sequence
  Description of Artificial Sequence: Synthetic oligonucleotide
ugugcacugcuuguacucc

SEQ ID NO: 358140 - RNA, 19 nt, Artificial Sequence
  Description of Artificial Sequence: Synthetic oligonucleotide
uaagacggaaguguaguuu

SEQ ID NO: 358141 - RNA, 19 nt, Artificial Sequence
  Description of Artificial Sequence: Synthetic oligonucleotide
ucaugacgucaugaaaccc

SEQ ID NO: 358142 - RNA, 19 nt, Artificial Sequence
  Description of Artificial Sequence: Synthetic oligonucleotide
ucguucuguaguuucucaa

SEQ ID NO: 358143 - RNA, 19 nt, Artificial Sequence
  Description of Artificial Sequence: Synthetic oligonucleotide
ucuguucgaagucgacacu

SEQ ID NO: 358144 - RNA, 19 nt, Artificial Sequence
  Description of Artificial Sequence: Synthetic oligonucleotide
caacgauacuucagcuucc

SEQ ID NO: 358145 - RNA, 19 nt, Artificial Sequence
  Description of Artificial Sequence: Synthetic oligonucleotide
acguuuguuaagacggaag

SEQ ID NO: 358146 - RNA, 19 nt, Artificial Sequence
  Description of Artificial Sequence: Synthetic oligonucleotide
aacguuuguuaagacggaa

SEQ ID NO: 358147 - RNA, 19 nt, Artificial Sequence
  Description of Artificial Sequence: Synthetic oligonucleotide
aggacgcauuuucaugaag

SEQ ID NO: 358148 - RNA, 19 nt, Artificial Sequence
  Description of Artificial Sequence: Synthetic oligonucleotide
gacgugagcuccgcuaucc

SEQ ID NO: 358149 - RNA, 19 nt, Artificial Sequence
  Description of Artificial Sequence: Synthetic oligonucleotide
uccaacgauacuucagcuu

SEQ ID NO: 358150 - RNA, 19 nt, Artificial Sequence
  Description of Artificial Sequence: Synthetic oligonucleotide
cuaucgauuccuguucuuc

SEQ ID NO: 358151 - RNA, 19 nt, Artificial Sequence
  Description of Artificial Sequence: Synthetic oligonucleotide
gugacaguauccucgguaa

SEQ ID NO: 358152 - RNA, 19 nt, Artificial Sequence
  Description of Artificial Sequence: Synthetic oligonucleotide
agucgacacuccuuggccu

SEQ ID NO: 358153 - RNA, 19 nt, Artificial Sequence
  Description of Artificial Sequence: Synthetic oligonucleotide
cauaaggcacggacucugc

SEQ ID NO: 358154 - RNA, 19 nt, Artificial Sequence
  Description of Artificial Sequence: Synthetic oligonucleotide
ucuagcauccaauguucuu

SEQ ID NO: 358155 - RNA, 19 nt, Artificial Sequence
  Description of Artificial Sequence: Synthetic oligonucleotide
gacggaaguguaguuugcc

SEQ ID NO: 358156 - RNA, 19 nt, Artificial Sequence
  Description of Artificial Sequence: Synthetic oligonucleotide
uccgcuucauguccuggga

SEQ ID NO: 358157 - RNA, 19 nt, Artificial Sequence
  Description of Artificial Sequence: Synthetic oligonucleotide
acuagcuaguuuacuaggu

SEQ ID NO: 358158 - RNA, 19 nt, Artificial Sequence
  Description of Artificial Sequence: Synthetic oligonucleotide
gacuccucaacucggccuc

SEQ ID NO: 358159 - RNA, 19 nt, Artificial Sequence
  Description of Artificial Sequence: Synthetic oligonucleotide
caucuggcucgguacuugg

SEQ ID NO: 358160 - RNA, 19 nt, Artificial Sequence
  Description of Artificial Sequence: Synthetic oligonucleotide
uucgaagucgacacuccuu

SEQ ID NO: 358161 - RNA, 19 nt, Artificial Sequence
  Description of Artificial Sequence: Synthetic oligonucleotide
gacguaugucugcagcuuc

SEQ ID NO: 358162 - RNA, 19 nt, Artificial Sequence
  Description of Artificial Sequence: Synthetic oligonucleotide
ccuacaauauccaugguua

SEQ ID NO: 358163 - RNA, 19 nt, Artificial Sequence
  Description of Artificial Sequence: Synthetic oligonucleotide
cugaaaggggacuauugaa

SEQ ID NO: 358164 - RNA, 19 nt, Artificial Sequence
  Description of Artificial Sequence: Synthetic oligonucleotide
acgucaugaaacccaugca

SEQ ID NO: 358165 - RNA, 19 nt, Artificial Sequence
  Description of Artificial Sequence: Synthetic oligonucleotide
ugguuaugucuauuguuuu

SEQ ID NO: 358166 - RNA, 19 nt, Artificial Sequence
  Description of Artificial Sequence: Synthetic oligonucleotide
aacacggcugucauccgcu

SEQ ID NO: 358167 - RNA, 19 nt, Artificial Sequence
  Description of Artificial Sequence: Synthetic oligonucleotide
gcaugcacucagcugaaag

SEQ ID NO: 358168 - RNA, 19 nt, Artificial Sequence
  Description of Artificial Sequence: Synthetic oligonucleotide
gaacaaaagccagggccug

SEQ ID NO: 358169 - RNA, 19 nt, Artificial Sequence
  Description of Artificial Sequence: Synthetic oligonucleotide
aggugugcaaaagggaaga

SEQ ID NO: 358170 - RNA, 19 nt, Artificial Sequence
  Description of Artificial Sequence: Synthetic oligonucleotide
aaauauccucugcucugua

SEQ ID NO: 358171 - RNA, 19 nt, Artificial Sequence
  Description of Artificial Sequence: Synthetic oligonucleotide
agacggaaguguaguuugc

SEQ ID NO: 358172 - RNA, 19 nt, Artificial Sequence
  Description of Artificial Sequence: Synthetic oligonucleotide
cuaguuuacuagguccaac

SEQ ID NO: 358173 - RNA, 19 nt, Artificial Sequence
  Description of Artificial Sequence: Synthetic oligonucleotide
agcuaguuuacuaggucca

SEQ ID NO: 358174 - RNA, 19 nt, Artificial Sequence
  Description of Artificial Sequence: Synthetic oligonucleotide
uccgcuauccuggccaugu

SEQ ID NO: 358175 - RNA, 19 nt, Artificial Sequence
  Description of Artificial Sequence: Synthetic oligonucleotide
guacuuugugucauuaaaa

SEQ ID NO: 358176 - RNA, 19 nt, Artificial Sequence
  Description of Artificial Sequence: Synthetic oligonucleotide
cuguucgaagucgacacuc

SEQ ID NO: 358177 - RNA, 19 nt, Artificial Sequence
  Description of Artificial Sequence: Synthetic oligonucleotide
ucuucacgggacuccacau

SEQ ID NO: 358178 - RNA, 19 nt, Artificial Sequence
  Description of Artificial Sequence: Synthetic oligonucleotide
acgagauccugaacaaaag

SEQ ID NO: 358179 - RNA, 19 nt, Artificial Sequence
  Description of Artificial Sequence: Synthetic oligonucleotide
ccuuacuggacaucuuuag

SEQ ID NO: 358180 - RNA, 19 nt, Artificial Sequence
  Description of Artificial Sequence: Synthetic oligonucleotide
gacagcgcucggcacucgg

SEQ ID NO: 358181 - RNA, 19 nt, Artificial Sequence
  Description of Artificial Sequence: Synthetic oligonucleotide
cugacgggaccuuggcugc

SEQ ID NO: 358182 - RNA, 19 nt, Artificial Sequence
  Description of Artificial Sequence: Synthetic oligonucleotide
uucccgacucucaguggag

SEQ ID NO: 358183 - RNA, 19 nt, Artificial Sequence
  Description of Artificial Sequence: Synthetic oligonucleotide
guaggaaguuaagugaucu

SEQ ID NO: 358184 - RNA, 19 nt, Artificial Sequence
  Description of Artificial Sequence: Synthetic oligonucleotide
caauauccaugguuauguc

SEQ ID NO: 358185 - RNA, 19 nt, Artificial Sequence
  Description of Artificial Sequence: Synthetic oligonucleotide
ggacguaggacgcauuuuc

SEQ ID NO: 358186 - RNA, 19 nt, Artificial Sequence
  Description of Artificial Sequence: Synthetic oligonucleotide
ugguacuuugugucauuaa

SEQ ID NO: 358187 - RNA, 19 nt, Artificial Sequence
  Description of Artificial Sequence: Synthetic oligonucleotide
cucguagcuccucuuggug

SEQ ID NO: 358188 - RNA, 19 nt, Artificial Sequence
  Description of Artificial Sequence: Synthetic oligonucleotide
acguaggacgcauuuucau

SEQ ID NO: 358189 - RNA, 19 nt, Artificial Sequence
  Description of Artificial Sequence: Synthetic oligonucleotide
ucccucuguuuggacaggg

SEQ ID NO: 358190 - RNA, 19 nt, Artificial Sequence
  Description of Artificial Sequence: Synthetic oligonucleotide
cagccugucugccauccgc

SEQ ID NO: 358191 - RNA, 19 nt, Artificial Sequence
  Description of Artificial Sequence: Synthetic oligonucleotide
gacgcauuuucaugaaggu

SEQ ID NO: 358192 - RNA, 19 nt, Artificial Sequence
  Description of Artificial Sequence: Synthetic oligonucleotide
uguuuuccauuagacuguc

SEQ ID NO: 358193 - RNA, 19 nt, Artificial Sequence
  Description of Artificial Sequence: Synthetic oligonucleotide
uggcguccuggucaaaauc

SEQ ID NO: 358194 - RNA, 19 nt, Artificial Sequence
  Description of Artificial Sequence: Synthetic oligonucleotide
cuucccgacucucagugga

SEQ ID NO: 358195 - RNA, 19 nt, Artificial Sequence
  Description of Artificial Sequence: Synthetic oligonucleotide
aaccuacaauauccauggu

SEQ ID NO: 358196 - RNA, 19 nt, Artificial Sequence
  Description of Artificial Sequence: Synthetic oligonucleotide
guuuacuagguccaacgau

SEQ ID NO: 358197 - RNA, 19 nt, Artificial Sequence
  Description of Artificial Sequence: Synthetic oligonucleotide
cuagucucuuggacagcgc

SEQ ID NO: 358198 - RNA, 19 nt, Artificial Sequence
  Description of Artificial Sequence: Synthetic oligonucleotide
auaggcucugacgggaccu

SEQ ID NO: 358199 - RNA, 19 nt, Artificial Sequence
  Description of Artificial Sequence: Synthetic oligonucleotide
uuaacugguaagggaggau

SEQ ID NO: 358200 - RNA, 19 nt, Artificial Sequence
  Description of Artificial Sequence: Synthetic oligonucleotide
ugcccagcuauaucccgca

SEQ ID NO: 358201 - RNA, 19 nt, Artificial Sequence
  Description of Artificial Sequence: Synthetic oligonucleotide
ggcguccuggucaaaaucc

SEQ ID NO: 358202 - RNA, 19 nt, Artificial Sequence
  Description of Artificial Sequence: Synthetic oligonucleotide
agacgacuccucaacucgg

SEQ ID NO: 358203 - RNA, 19 nt, Artificial Sequence
  Description of Artificial Sequence: Synthetic oligonucleotide
aguuugcccgaaggagccc

SEQ ID NO: 358204 - RNA, 19 nt, Artificial Sequence
  Description of Artificial Sequence: Synthetic oligonucleotide
ucuggcguccuggucaaaa

SEQ ID NO: 358205 - RNA, 19 nt, Artificial Sequence
  Description of Artificial Sequence: Synthetic oligonucleotide
agacgugagcuccgcuauc

SEQ ID NO: 358206 - RNA, 19 nt, Artificial Sequence
  Description of Artificial Sequence: Synthetic oligonucleotide
ucgguacuuggcagggcga

SEQ ID NO: 358207 - RNA, 19 nt, Artificial Sequence
  Description of Artificial Sequence: Synthetic oligonucleotide
ugacgucaugaaacccaug

SEQ ID NO: 358208 - RNA, 19 nt, Artificial Sequence
  Description of Artificial Sequence: Synthetic oligonucleotide
gagcuuagccuugucguuc

SEQ ID NO: 358209 - RNA, 19 nt, Artificial Sequence
  Description of Artificial Sequence: Synthetic oligonucleotide
aaucuaccugacaaaucuu

SEQ ID NO: 358210 - RNA, 19 nt, Artificial Sequence
  Description of Artificial Sequence: Synthetic oligonucleotide
ggacaggacacagucauuc

SEQ ID NO: 358211 - RNA, 19 nt, Artificial Sequence
  Description of Artificial Sequence: Synthetic oligonucleotide
cagcauaaggaaaccuaca

SEQ ID NO: 358212 - RNA, 19 nt, Artificial Sequence
  Description of Artificial Sequence: Synthetic oligonucleotide
uaggacgcauuuucaugaa

SEQ ID NO: 358213 - RNA, 19 nt, Artificial Sequence
  Description of Artificial Sequence: Synthetic oligonucleotide
auauagcaucuauggcaga

SEQ ID NO: 358214 - RNA, 19 nt, Artificial Sequence
  Description of Artificial Sequence: Synthetic oligonucleotide
ggagccguggacacagugg

SEQ ID NO: 358215 - RNA, 19 nt, Artificial Sequence
  Description of Artificial Sequence: Synthetic oligonucleotide
agaugguacuuugugucau

SEQ ID NO: 358216 - RNA, 19 nt, Artificial Sequence
  Description of Artificial Sequence: Synthetic oligonucleotide
cuuggacagcgcucggcac

SEQ ID NO: 358217 - RNA, 19 nt, Artificial Sequence
  Description of Artificial Sequence: Synthetic oligonucleotide
cuucacgggacuccacauc

SEQ ID NO: 358218 - RNA, 19 nt, Artificial Sequence
  Description of Artificial Sequence: Synthetic oligonucleotide
guaagggaggaucuuccua

SEQ ID NO: 358219 - RNA, 19 nt, Artificial Sequence
  Description of Artificial Sequence: Synthetic oligonucleotide
uguugugcaguggaacguu

SEQ ID NO: 358220 - RNA, 19 nt, Artificial Sequence
  Description of Artificial Sequence: Synthetic oligonucleotide
gucguucuguaguuucuca

SEQ ID NO: 358221 - RNA, 19 nt, Artificial Sequence
  Description of Artificial Sequence: Synthetic oligonucleotide
agagcagcgccaacguuug

SEQ ID NO: 358222 - RNA, 19 nt, Artificial Sequence
  Description of Artificial Sequence: Synthetic oligonucleotide
uaacugguccucguagcuc

SEQ ID NO: 358223 - RNA, 19 nt, Artificial Sequence
  Description of Artificial Sequence: Synthetic oligonucleotide
acggacaacacuagcuagu

SEQ ID NO: 358224 - RNA, 19 nt, Artificial Sequence
  Description of Artificial Sequence: Synthetic oligonucleotide
gacguaggacgcauuuuca

SEQ ID NO: 358225 - RNA, 19 nt, Artificial Sequence
  Description of Artificial Sequence: Synthetic oligonucleotide
cuuacuggacaucuuuagu

SEQ ID NO: 358226 - RNA, 19 nt, Artificial Sequence
  Description of Artificial Sequence: Synthetic oligonucleotide
gcccauagcucagugaggc

SEQ ID NO: 358227 - RNA, 19 nt, Artificial Sequence
  Description of Artificial Sequence: Synthetic oligonucleotide
ggcacggacucugcgaggg

SEQ ID NO: 358228 - RNA, 19 nt, Artificial Sequence
  Description of Artificial Sequence: Synthetic oligonucleotide
aggggacuauugaauccac

SEQ ID NO: 358229 - RNA, 19 nt, Artificial Sequence
  Description of Artificial Sequence: Synthetic oligonucleotide
caugguuaugucuauuguu

SEQ ID NO: 358230 - RNA, 19 nt, Artificial Sequence
  Description of Artificial Sequence: Synthetic oligonucleotide
ugacguaugucugcagcuu

SEQ ID NO: 358231 - RNA, 19 nt, Artificial Sequence
  Description of Artificial Sequence: Synthetic oligonucleotide
ggcuaacugugcuucuagc

SEQ ID NO: 358232 - RNA, 19 nt, Artificial Sequence
  Description of Artificial Sequence: Synthetic oligonucleotide
guugugcaguggaacguug

SEQ ID NO: 358233 - RNA, 19 nt, Artificial Sequence
  Description of Artificial Sequence: Synthetic oligonucleotide
gccuucccgacucucagug

SEQ ID NO: 358234 - RNA, 19 nt, Artificial Sequence
  Description of Artificial Sequence: Synthetic oligonucleotide
ugucuggcguccuggucaa

SEQ ID NO: 358235 - RNA, 19 nt, Artificial Sequence
  Description of Artificial Sequence: Synthetic oligonucleotide
acuaucgauuccuguucuu

SEQ ID NO: 358236 - RNA, 19 nt, Artificial Sequence
  Description of Artificial Sequence: Synthetic oligonucleotide
gcagauguaggaaguuaag

SEQ ID NO: 358237 - RNA, 19 nt, Artificial Sequence
  Description of Artificial Sequence: Synthetic oligonucleotide
ucccgacucucaguggagc

SEQ ID NO: 358238 - RNA, 19 nt, Artificial Sequence
  Description of Artificial Sequence: Synthetic oligonucleotide
gaagcacacgacgguuggc

SEQ ID NO: 358239 - RNA, 19 nt, Artificial Sequence
  Description of Artificial Sequence: Synthetic oligonucleotide
acgauacuucagcuuccca

SEQ ID NO: 358240 - RNA, 19 nt, Artificial Sequence
  Description of Artificial Sequence: Synthetic oligonucleotide
gucgacacuccuuggccuc

SEQ ID NO: 358241 - RNA, 19 nt, Artificial Sequence
  Description of Artificial Sequence: Synthetic oligonucleotide
caacguuuguuaagacgga

SEQ ID NO: 358242 - RNA, 19 nt, Artificial Sequence
  Description of Artificial Sequence: Synthetic oligonucleotide
caccaacuaucgauuccug

SEQ ID NO: 358243 - RNA, 19 nt, Artificial Sequence
  Description of Artificial Sequence: Synthetic oligonucleotide
guauccucgguaauacucu

SEQ ID NO: 358244 - RNA, 19 nt, Artificial Sequence
  Description of Artificial Sequence: Synthetic oligonucleotide
gcugucuugggcccauagc

SEQ ID NO: 358245 - RNA, 19 nt, Artificial Sequence
  Description of Artificial Sequence: Synthetic oligonucleotide
ggcguagaagugcacugac

SEQ ID NO: 358246 - RNA, 19 nt, Artificial Sequence
  Description of Artificial Sequence: Synthetic oligonucleotide
aggcacggacucugcgagg

SEQ ID NO: 358247 - RNA, 19 nt, Artificial Sequence
  Description of Artificial Sequence: Synthetic oligonucleotide
augacgucaugaaacccau

SEQ ID NO: 358248 - RNA, 19 nt, Artificial Sequence
  Description of Artificial Sequence: Synthetic oligonucleotide
cucacugucuggcguccug

SEQ ID NO: 358249 - RNA, 19 nt, Artificial Sequence
  Description of Artificial Sequence: Synthetic oligonucleotide
ugccagcgucuccuuacac

SEQ ID NO: 358250 - RNA, 19 nt, Artificial Sequence
  Description of Artificial Sequence: Synthetic oligonucleotide
cguaggacgcauuuucaug

SEQ ID NO: 358251 - RNA, 19 nt, Artificial Sequence
  Description of Artificial Sequence: Synthetic oligonucleotide
ggaaguuaagugaucugaa

SEQ ID NO: 358252 - RNA, 19 nt, Artificial Sequence
  Description of Artificial Sequence: Synthetic oligonucleotide
acgggacuccacaucuggg

SEQ ID NO: 358253 - RNA, 19 nt, Artificial Sequence
  Description of Artificial Sequence: Synthetic oligonucleotide
acgcauuuucaugaaggua

SEQ ID NO: 358254 - RNA, 19 nt, Artificial Sequence
  Description of Artificial Sequence: Synthetic oligonucleotide
augguacuuugugucauua

SEQ ID NO: 358255 - RNA, 19 nt, Artificial Sequence
  Description of Artificial Sequence: Synthetic oligonucleotide
ucgacacuccuuggccucc

SEQ ID NO: 358256 - RNA, 19 nt, Artificial Sequence
  Description of Artificial Sequence: Synthetic oligonucleotide
guacuuggcagggcgagaa

SEQ ID NO: 358257 - RNA, 19 nt, Artificial Sequence
  Description of Artificial Sequence: Synthetic oligonucleotide
auuagacugucaacaucaa

SEQ ID NO: 358258 - RNA, 19 nt, Artificial Sequence
  Description of Artificial Sequence: Synthetic oligonucleotide
ucccgcaucuucagcugau

SEQ ID NO: 358259 - RNA, 19 nt, Artificial Sequence
  Description of Artificial Sequence: Synthetic oligonucleotide
guuugcccgaaggagccca

SEQ ID NO: 358260 - RNA, 19 nt, Artificial Sequence
  Description of Artificial Sequence: Synthetic oligonucleotide
acguaugucugcagcuucu

SEQ ID NO: 358261 - RNA, 19 nt, Artificial Sequence
  Description of Artificial Sequence: Synthetic oligonucleotide
gugcaaaagggaagauuca

SEQ ID NO: 358262 - RNA, 19 nt, Artificial Sequence
  Description of Artificial Sequence: Synthetic oligonucleotide
ggacacaguggcguuuucc

SEQ ID NO: 358263 - RNA, 19 nt, Artificial Sequence
  Description of Artificial Sequence: Synthetic oligonucleotide
cuagcauccaauguucuuu

SEQ ID NO: 358264 - RNA, 19 nt, Artificial Sequence
  Description of Artificial Sequence: Synthetic oligonucleotide
gcaggugugcaaaagggaa

SEQ ID NO: 358265 - RNA, 19 nt, Artificial Sequence
  Description of Artificial Sequence: Synthetic oligonucleotide
cucgaacacggcugucauc

SEQ ID NO: 358266 - RNA, 19 nt, Artificial Sequence
  Description of Artificial Sequence: Synthetic oligonucleotide
cuaccugacaaaucuucau

SEQ ID NO: 358267 - RNA, 19 nt, Artificial Sequence
  Description of Artificial Sequence: Synthetic oligonucleotide
uuugcccgaaggagcccau

SEQ ID NO: 358268 - RNA, 19 nt, Artificial Sequence
  Description of Artificial Sequence: Synthetic oligonucleotide
gaaguguaguuugcccgaa

SEQ ID NO: 358269 - RNA, 19 nt, Artificial Sequence
  Description of Artificial Sequence: Synthetic oligonucleotide
gagagggagagaaucguuu

SEQ ID NO: 358270 - RNA, 19 nt, Artificial Sequence
  Description of Artificial Sequence: Synthetic oligonucleotide
gacgggaccuuggcugcag

SEQ ID NO: 358271 - RNA, 19 nt, Artificial Sequence
  Description of Artificial Sequence: Synthetic oligonucleotide
acgugagcuccgcuauccu

SEQ ID NO: 358272 - RNA, 19 nt, Artificial Sequence
  Description of Artificial Sequence: Synthetic oligonucleotide
uggacagcgcucggcacuc

SEQ ID NO: 358273 - RNA, 19 nt, Artificial Sequence
  Description of Artificial Sequence: Synthetic oligonucleotide
ggcugucuugggcccauag

SEQ ID NO: 358274 - RNA, 19 nt, Artificial Sequence
  Description of Artificial Sequence: Synthetic oligonucleotide
cagagcagcgccaacguuu

SEQ ID NO: 358275 - RNA, 19 nt, Artificial Sequence
  Description of Artificial Sequence: Synthetic oligonucleotide
guucgaagucgacacuccu

SEQ ID NO: 358276 - RNA, 19 nt, Artificial Sequence
  Description of Artificial Sequence: Synthetic oligonucleotide
cgguacgagauccugaaca

SEQ ID NO: 358277 - RNA, 19 nt, Artificial Sequence
  Description of Artificial Sequence: Synthetic oligonucleotide
guccaacgauacuucagcu

SEQ ID NO: 358278 - RNA, 19 nt, Artificial Sequence
  Description of Artificial Sequence: Synthetic oligonucleotide
gcaguggaacguugagagc

SEQ ID NO: 358279 - RNA, 19 nt, Artificial Sequence
  Description of Artificial Sequence: Synthetic oligonucleotide
gagcccaucuggcucggua

SEQ ID NO: 358280 - RNA, 19 nt, Artificial Sequence
  Description of Artificial Sequence: Synthetic oligonucleotide
cuacaauauccaugguuau

SEQ ID NO: 358281 - RNA, 19 nt, Artificial Sequence
  Description of Artificial Sequence: Synthetic oligonucleotide
cucugcgaggggcuuucuc

SEQ ID NO: 358282 - RNA, 19 nt, Artificial Sequence
  Description of Artificial Sequence: Synthetic oligonucleotide
gggagccguggacacagug

SEQ ID NO: 358283 - RNA, 19 nt, Artificial Sequence
  Description of Artificial Sequence: Synthetic oligonucleotide
aguggaacguugagagcau

SEQ ID NO: 358284 - RNA, 19 nt, Artificial Sequence
  Description of Artificial Sequence: Synthetic oligonucleotide
uggacacaguggcguuuuc

SEQ ID NO: 358285 - RNA, 19 nt, Artificial Sequence
  Description of Artificial Sequence: Synthetic oligonucleotide
gcauuguauagaugguacu

SEQ ID NO: 358286 - RNA, 19 nt, Artificial Sequence
  Description of Artificial Sequence: Synthetic oligonucleotide
gagcuccgcuauccuggcc

SEQ ID NO: 358287 - RNA, 19 nt, Artificial Sequence
  Description of Artificial Sequence: Synthetic oligonucleotide
ggaaaccuacaauauccau

SEQ ID NO: 358288 - RNA, 19 nt, Artificial Sequence
  Description of Artificial Sequence: Synthetic oligonucleotide
guacgagauccugaacaaa

SEQ ID NO: 358289 - RNA, 19 nt, Artificial Sequence
  Description of Artificial Sequence: Synthetic oligonucleotide
ccagcuauaucccgcaucu

SEQ ID NO: 358290 - RNA, 19 nt, Artificial Sequence
  Description of Artificial Sequence: Synthetic oligonucleotide
gacuuacugucagccagcu

SEQ ID NO: 358291 - RNA, 19 nt, Artificial Sequence
  Description of Artificial Sequence: Synthetic oligonucleotide
gcgagaagagugacguaug

SEQ ID NO: 358292 - RNA, 19 nt, Artificial Sequence
  Description of Artificial Sequence: Synthetic oligonucleotide
cugcgaggggcuuucucaa

SEQ ID NO: 358293 - RNA, 19 nt, Artificial Sequence
  Description of Artificial Sequence: Synthetic oligonucleotide
ggcgagaagagugacguau

SEQ ID NO: 358294 - RNA, 19 nt, Artificial Sequence
  Description of Artificial Sequence: Synthetic oligonucleotide
gccgguacgagauccugaa

SEQ ID NO: 358295 - RNA, 19 nt, Artificial Sequence
  Description of Artificial Sequence: Synthetic oligonucleotide
agccgguacgagauccuga

SEQ ID NO: 358296 - RNA, 19 nt, Artificial Sequence
  Description of Artificial Sequence: Synthetic oligonucleotide
agagccgguacgagauccu

SEQ ID NO: 358297 - RNA, 19 nt, Artificial Sequence
  Description of Artificial Sequence: Synthetic oligonucleotide
gcgcuggucauggagucug

SEQ ID NO: 358298 - RNA, 19 nt, Artificial Sequence
  Description of Artificial Sequence: Synthetic oligonucleotide
gcguccuggucaaaauccc

SEQ ID NO: 358299 - RNA, 19 nt, Artificial Sequence
  Description of Artificial Sequence: Synthetic oligonucleotide
ccuucccgacucucagugg

SEQ ID NO: 358300 - RNA, 19 nt, Artificial Sequence
  Description of Artificial Sequence: Synthetic oligonucleotide
gugcacugacuuacuguca

SEQ ID NO: 358301 - RNA, 19 nt, Artificial Sequence
  Description of Artificial Sequence: Synthetic oligonucleotide
ccaacuaucgauuccuguu

SEQ ID NO: 358302 - RNA, 19 nt, Artificial Sequence
  Description of Artificial Sequence: Synthetic oligonucleotide
cccaaucagacuggcacuc

SEQ ID NO: 358303 - RNA, 19 nt, Artificial Sequence
  Description of Artificial Sequence: Synthetic oligonucleotide
ccauagcucagugaggcaa

SEQ ID NO: 358304 - RNA, 19 nt, Artificial Sequence
  Description of Artificial Sequence: Synthetic oligonucleotide
guacuggagcaugcacuca

SEQ ID NO: 358305 - RNA, 19 nt, Artificial Sequence
  Description of Artificial Sequence: Synthetic oligonucleotide
gcguuuuccugggccagcc

SEQ ID NO: 358306 - RNA, 19 nt, Artificial Sequence
  Description of Artificial Sequence: Synthetic oligonucleotide
cucggcguagaagugcacu

SEQ ID NO: 358307 - RNA, 19 nt, Artificial Sequence
  Description of Artificial Sequence: Synthetic oligonucleotide
ccuugcuguuuacaaaugu

SEQ ID NO: 358308 - RNA, 19 nt, Artificial Sequence
  Description of Artificial Sequence: Synthetic oligonucleotide
cagcgccaacguuuguuaa

SEQ ID NO: 358309 - RNA, 19 nt, Artificial Sequence
  Description of Artificial Sequence: Synthetic oligonucleotide
ggcagggcgagaagaguga

SEQ ID NO: 358310 - RNA, 19 nt, Artificial Sequence
  Description of Artificial Sequence: Synthetic oligonucleotide
gcucuguauaggugugaaa

SEQ ID NO: 358311 - RNA, 19 nt, Artificial Sequence
  Description of Artificial Sequence: Synthetic oligonucleotide
gcuaguuuacuagguccaa

SEQ ID NO: 358312 - RNA, 19 nt, Artificial Sequence
  Description of Artificial Sequence: Synthetic oligonucleotide
cuuccucauaaggcacgga

SEQ ID NO: 358313 - RNA, 19 nt, Artificial Sequence
  Description of Artificial Sequence: Synthetic oligonucleotide
agcaugcacucagcugaaa

SEQ ID NO: 358314 - RNA, 19 nt, Artificial Sequence
  Description of Artificial Sequence: Synthetic oligonucleotide
gcuauccuggccauguaau

SEQ ID NO: 358315 - RNA, 19 nt, Artificial Sequence
  Description of Artificial Sequence: Synthetic oligonucleotide
cucugacgggaccuuggcu

SEQ ID NO: 358316 - RNA, 19 nt, Artificial Sequence
  Description of Artificial Sequence: Synthetic oligonucleotide
ccaugguuaugucuauugu

SEQ ID NO: 358317 - RNA, 19 nt, Artificial Sequence
  Description of Artificial Sequence: Synthetic oligonucleotide
gguacuuggcagggcgaga

SEQ ID NO: 358318 - RNA, 19 nt, Artificial Sequence
  Description of Artificial Sequence: Synthetic oligonucleotide
cucggcacucggcguagaa

SEQ ID NO: 358319 - RNA, 19 nt, Artificial Sequence
  Description of Artificial Sequence: Synthetic oligonucleotide
gcauaggcucugacgggac

SEQ ID NO: 358320 - RNA, 19 nt, Artificial Sequence
  Description of Artificial Sequence: Synthetic oligonucleotide
cuggcguccuggucaaaau

SEQ ID NO: 358321 - RNA, 19 nt, Artificial Sequence
  Description of Artificial Sequence: Synthetic oligonucleotide
cgaacacggcugucauccg

SEQ ID NO: 358322 - RNA, 19 nt, Artificial Sequence
  Description of Artificial Sequence: Synthetic oligonucleotide
cauucgucgucaccagcuu

SEQ ID NO: 358323 - RNA, 19 nt, Artificial Sequence
  Description of Artificial Sequence: Synthetic oligonucleotide
gccagacgacuccucaacu

SEQ ID NO: 358324 - RNA, 19 nt, Artificial Sequence
  Description of Artificial Sequence: Synthetic oligonucleotide
ccgguacgagauccugaac

SEQ ID NO: 358325 - RNA, 19 nt, Artificial Sequence
  Description of Artificial Sequence: Synthetic oligonucleotide
cugagacgugagcuccgcu

SEQ ID NO: 358326 - RNA, 19 nt, Artificial Sequence
  Description of Artificial Sequence: Synthetic oligonucleotide
cggcacucggcguagaagu

SEQ ID NO: 358327 - RNA, 19 nt, Artificial Sequence
  Description of Artificial Sequence: Synthetic oligonucleotide
ggggacuauugaauccacu

SEQ ID NO: 358328 - RNA, 19 nt, Artificial Sequence
  Description of Artificial Sequence: Synthetic oligonucleotide
cccauagcucagugaggca

SEQ ID NO: 358329 - RNA, 19 nt, Artificial Sequence
  Description of Artificial Sequence: Synthetic oligonucleotide
gcggacguaggacgcauuu

SEQ ID NO: 358330 - RNA, 19 nt, Artificial Sequence
  Description of Artificial Sequence: Synthetic oligonucleotide
ccucguagcuccucuuggu

SEQ ID NO: 358331 - RNA, 19 nt, Artificial Sequence
  Description of Artificial Sequence: Synthetic oligonucleotide
cagugacaguauccucggu

SEQ ID NO: 358332 - RNA, 19 nt, Artificial Sequence
  Description of Artificial Sequence: Synthetic oligonucleotide
gacacuccuuggccuccuu

SEQ ID NO: 358333 - RNA, 19 nt, Artificial Sequence
  Description of Artificial Sequence: Synthetic oligonucleotide
guggaacguugagagcauu

SEQ ID NO: 358334 - RNA, 19 nt, Artificial Sequence
  Description of Artificial Sequence: Synthetic oligonucleotide
gggcgagaagagugacgua

SEQ ID NO: 358335 - RNA, 19 nt, Artificial Sequence
  Description of Artificial Sequence: Synthetic oligonucleotide
gcgcucggcacucggcgua

SEQ ID NO: 358336 - RNA, 19 nt, Artificial Sequence
  Description of Artificial Sequence: Synthetic oligonucleotide
ggggcggacguaggacgca

SEQ ID NO: 358337 - RNA, 19 nt, Artificial Sequence
  Description of Artificial Sequence: Synthetic oligonucleotide
cgcucggcacucggcguag

SEQ ID NO: 358338 - RNA, 19 nt, Artificial Sequence
  Description of Artificial Sequence: Synthetic oligonucleotide
gucuggcguccuggucaaa

SEQ ID NO: 358339 - RNA, 19 nt, Artificial Sequence
  Description of Artificial Sequence: Synthetic oligonucleotide
gggcggacguaggacgcau

SEQ ID NO: 358340 - RNA, 19 nt, Artificial Sequence
  Description of Artificial Sequence: Synthetic oligonucleotide
gcucggcacucggcguaga

SEQ ID NO: 358341 - RNA, 19 nt, Artificial Sequence
  Description of Artificial Sequence: Synthetic oligonucleotide
cgacgguuggccacugcuu

SEQ ID NO: 358342 - RNA, 19 nt, Artificial Sequence
  Description of Artificial Sequence: Synthetic oligonucleotide
ccgcuauccuggccaugua

SEQ ID NO: 358343 - RNA, 19 nt, Artificial Sequence
  Description of Artificial Sequence: Synthetic oligonucleotide
ccguggacacaguggcguu

SEQ ID NO: 358344 - RNA, 19 nt, Artificial Sequence
  Description of Artificial Sequence: Synthetic oligonucleotide
ggcggacguaggacgcauu

SEQ ID NO: 358345 - RNA, 19 nt, Artificial Sequence
  Description of Artificial Sequence: Synthetic oligonucleotide
cggacguaggacgcauuuu

SEQ ID NO: 358346 - RNA, 19 nt, Artificial Sequence
  Description of Artificial Sequence: Synthetic oligonucleotide
ccgccauggcuagucucuu

SEQ ID NO: 358347 - RNA, 19 nt, Artificial Sequence
  Description of Artificial Sequence: Synthetic oligonucleotide
agaacaaacacucagggag

SEQ ID NO: 358348 - RNA, 19 nt, Artificial Sequence
  Description of Artificial Sequence: Synthetic oligonucleotide
ugagggauauacuugaugg

SEQ ID NO: 358349 - RNA, 19 nt, Artificial Sequence
  Description of Artificial Sequence: Synthetic oligonucleotide
uccucauuuauuaugagug

SEQ ID NO: 358350 - RNA, 19 nt, Artificial Sequence
  Description of Artificial Sequence: Synthetic oligonucleotide
acgguaauacuccauaccc

SEQ ID NO: 358351 - RNA, 19 nt, Artificial Sequence
  Description of Artificial Sequence: Synthetic oligonucleotide
aggcuauucugccagaucc

SEQ ID NO: 358352 - RNA, 19 nt, Artificial Sequence
  Description of Artificial Sequence: Synthetic oligonucleotide
cugaguaugaccaggaaag

SEQ ID NO: 358353 - RNA, 19 nt, Artificial Sequence
  Description of Artificial Sequence: Synthetic oligonucleotide
aauuguaagcaacuuccag

SEQ ID NO: 358354 - RNA, 19 nt, Artificial Sequence
  Description of Artificial Sequence: Synthetic oligonucleotide
gaacacuagguacugacgg

SEQ ID NO: 358355 - RNA, 19 nt, Artificial Sequence
  Description of Artificial Sequence: Synthetic oligonucleotide
uuugggauagagcaggagc

SEQ ID NO: 358356 - RNA, 19 nt, Artificial Sequence
  Description of Artificial Sequence: Synthetic oligonucleotide
uggggcaugacuaccaugg

SEQ ID NO: 358357 - RNA, 19 nt, Artificial Sequence
  Description of Artificial Sequence: Synthetic oligonucleotide
caaagugcaagacagacug

SEQ ID NO: 358358 - RNA, 19 nt, Artificial Sequence
  Description of Artificial Sequence: Synthetic oligonucleotide
aacacuagguacugacggc

SEQ ID NO: 358359 - RNA, 19 nt, Artificial Sequence
  Description of Artificial Sequence: Synthetic oligonucleotide
agcacaguauucaugaagc

SEQ ID NO: 358360 - RNA, 19 nt, Artificial Sequence
  Description of Artificial Sequence: Synthetic oligonucleotide
gaagcggauaccuaaccgg

SEQ ID NO: 358361 - RNA, 19 nt, Artificial Sequence
  Description of Artificial Sequence: Synthetic oligonucleotide
uuaucuagcaucuccuccc

SEQ ID NO: 358362 - RNA, 19 nt, Artificial Sequence
  Description of Artificial Sequence: Synthetic oligonucleotide
uucuccgccacauacaaca

SEQ ID NO: 358363 - RNA, 19 nt, Artificial Sequence
  Description of Artificial Sequence: Synthetic oligonucleotide
acgauaguucacuagcaac

SEQ ID NO: 358364 - RNA, 19 nt, Artificial Sequence
  Description of Artificial Sequence: Synthetic oligonucleotide
uauaacggaagccagccuc

SEQ ID NO: 358365 - RNA, 19 nt, Artificial Sequence
  Description of Artificial Sequence: Synthetic oligonucleotide
ugaucaauuguaagcaacu

SEQ ID NO: 358366 - RNA, 19 nt, Artificial Sequence
  Description of Artificial Sequence: Synthetic oligonucleotide
agguacaauguccaccacc

SEQ ID NO: 358367 - RNA, 19 nt, Artificial Sequence
  Description of Artificial Sequence: Synthetic oligonucleotide
aaccggauguucuccauuc

SEQ ID NO: 358368 - RNA, 19 nt, Artificial Sequence
  Description of Artificial Sequence: Synthetic oligonucleotide
ugcgcugagucaaagacca

SEQ ID NO: 358369 - RNA, 19 nt, Artificial Sequence
  Description of Artificial Sequence: Synthetic oligonucleotide
uugauuacaggguuccgag

SEQ ID NO: 358370 - RNA, 19 nt, Artificial Sequence
  Description of Artificial Sequence: Synthetic oligonucleotide
guauucaugaagcugucug

SEQ ID NO: 358371 - RNA, 19 nt, Artificial Sequence
  Description of Artificial Sequence: Synthetic oligonucleotide
agaaggauugcuucaaagu

SEQ ID NO: 358372 - RNA, 19 nt, Artificial Sequence
  Description of Artificial Sequence: Synthetic oligonucleotide
agaagcggauaccuaaccg

SEQ ID NO: 358373 - RNA, 19 nt, Artificial Sequence
  Description of Artificial Sequence: Synthetic oligonucleotide
aaacuggacauccuucaca

SEQ ID NO: 358374 - RNA, 19 nt, Artificial Sequence
  Description of Artificial Sequence: Synthetic oligonucleotide
ucaucgcuggcauugaugu

SEQ ID NO: 358375 - RNA, 19 nt, Artificial Sequence
  Description of Artificial Sequence: Synthetic oligonucleotide
ucauggaacacuagguacu

SEQ ID NO: 358376 - RNA, 19 nt, Artificial Sequence
  Description of Artificial Sequence: Synthetic oligonucleotide
caccauaaggucuugauca

SEQ ID NO: 358377 - RNA, 19 nt, Artificial Sequence
  Description of Artificial Sequence: Synthetic oligonucleotide
gauccuggcgcuuaccaag

SEQ ID NO: 358378 - RNA, 19 nt, Artificial Sequence
  Description of Artificial Sequence: Synthetic oligonucleotide
uucacuagcaacacugcaa

SEQ ID NO: 358379 - RNA, 19 nt, Artificial Sequence
  Description of Artificial Sequence: Synthetic oligonucleotide
aggguuccgagcuauacag

SEQ ID NO: 358380 - RNA, 19 nt, Artificial Sequence
  Description of Artificial Sequence: Synthetic oligonucleotide
ggagaacaaacacucaggg

SEQ ID NO: 358381 - RNA, 19 nt, Artificial Sequence
  Description of Artificial Sequence: Synthetic oligonucleotide
ucugauagugcgugggugc

SEQ ID NO: 358382 - RNA, 19 nt, Artificial Sequence
  Description of Artificial Sequence: Synthetic oligonucleotide
agagaaguucucucccagc

SEQ ID NO: 358383 - RNA, 19 nt, Artificial Sequence
  Description of Artificial Sequence: Synthetic oligonucleotide
agucaaagaccacucuccg

SEQ ID NO: 358384 - RNA, 19 nt, Artificial Sequence
  Description of Artificial Sequence: Synthetic oligonucleotide
ugugugcgcagccaaagca

SEQ ID NO: 358385 - RNA, 19 nt, Artificial Sequence
  Description of Artificial Sequence: Synthetic oligonucleotide
gacgccuucaagcacugag

SEQ ID NO: 358386 - RNA, 19 nt, Artificial Sequence
  Description of Artificial Sequence: Synthetic oligonucleotide
aagugugucucugaguaug

SEQ ID NO: 358387 - RNA, 19 nt, Artificial Sequence
  Description of Artificial Sequence: Synthetic oligonucleotide
uccgccacauacaacaagu

SEQ ID NO: 358388 - RNA, 19 nt, Artificial Sequence
  Description of Artificial Sequence: Synthetic oligonucleotide
uaaccggaaggguucaugc

SEQ ID NO: 358389 - RNA, 19 nt, Artificial Sequence
  Description of Artificial Sequence: Synthetic oligonucleotide
caccgagucuccaucaugg

SEQ ID NO: 358390 - RNA, 19 nt, Artificial Sequence
  Description of Artificial Sequence: Synthetic oligonucleotide
gaugaggcacuagcgaugg

SEQ ID NO: 358391 - RNA, 19 nt, Artificial Sequence
  Description of Artificial Sequence: Synthetic oligonucleotide
uccauacccugccugaaug

SEQ ID NO: 358392 - RNA, 19 nt, Artificial Sequence
  Description of Artificial Sequence: Synthetic oligonucleotide
agccgaggagaacaaacac

SEQ ID NO: 358393 - RNA, 19 nt, Artificial Sequence
  Description of Artificial Sequence: Synthetic oligonucleotide
aguaugaccaggaaaggca

SEQ ID NO: 358394 - RNA, 19 nt, Artificial Sequence
  Description of Artificial Sequence: Synthetic oligonucleotide
cuagcgauggguacugcag

SEQ ID NO: 358395 - RNA, 19 nt, Artificial Sequence
  Description of Artificial Sequence: Synthetic oligonucleotide
agcaacuuccagcuuccac

SEQ ID NO: 358396 - RNA, 19 nt, Artificial Sequence
  Description of Artificial Sequence: Synthetic oligonucleotide
ggaaccacccaucagggcc

SEQ ID NO: 358397 - RNA, 19 nt, Artificial Sequence
  Description of Artificial Sequence: Synthetic oligonucleotide
cuugguguaccagucauac

SEQ ID NO: 358398 - RNA, 19 nt, Artificial Sequence
  Description of Artificial Sequence: Synthetic oligonucleotide
acacccacgacacggacug

SEQ ID NO: 358399 - RNA, 19 nt, Artificial Sequence
  Description of Artificial Sequence: Synthetic oligonucleotide
agugugcacgguccgauag

SEQ ID NO: 358400 - RNA, 19 nt, Artificial Sequence
  Description of Artificial Sequence: Synthetic oligonucleotide
ucagggacgccuucaagca

SEQ ID NO: 358401 - RNA, 19 nt, Artificial Sequence
  Description of Artificial Sequence: Synthetic oligonucleotide
gaguagcucacacuuuccc

SEQ ID NO: 358402 - RNA, 19 nt, Artificial Sequence
  Description of Artificial Sequence: Synthetic oligonucleotide
ugcuuuugggauagagcag

SEQ ID NO: 358403 - RNA, 19 nt, Artificial Sequence
  Description of Artificial Sequence: Synthetic oligonucleotide
auaacggaagccagccucc

SEQ ID NO: 358404 - RNA, 19 nt, Artificial Sequence
  Description of Artificial Sequence: Synthetic oligonucleotide
cacgguaauacuccauacc

SEQ ID NO: 358405 - RNA, 19 nt, Artificial Sequence
  Description of Artificial Sequence: Synthetic oligonucleotide
cauaguacagggcugaucu

SEQ ID NO: 358406 - RNA, 19 nt, Artificial Sequence
  Description of Artificial Sequence: Synthetic oligonucleotide
ugaguaugaccaggaaagg

SEQ ID NO: 358407 - RNA, 19 nt, Artificial Sequence
  Description of Artificial Sequence: Synthetic oligonucleotide
gaaggguucaugccaccag

SEQ ID NO: 358408 - RNA, 19 nt, Artificial Sequence
  Description of Artificial Sequence: Synthetic oligonucleotide
cuccauucgcuccaagucc

SEQ ID NO: 358409 - RNA, 19 nt, Artificial Sequence
  Description of Artificial Sequence: Synthetic oligonucleotide
cucuaggcuauucugccag

SEQ ID NO: 358410 - RNA, 19 nt, Artificial Sequence
  Description of Artificial Sequence: Synthetic oligonucleotide
guacugacggcaaaaccgg

SEQ ID NO: 358411 - RNA, 19 nt, Artificial Sequence
  Description of Artificial Sequence: Synthetic oligonucleotide
gaguaugaccaggaaaggc

SEQ ID NO: 358412 - RNA, 19 nt, Artificial Sequence
  Description of Artificial Sequence: Synthetic oligonucleotide
cuaaggccccgguacagcg

SEQ ID NO: 358413 - RNA, 19 nt, Artificial Sequence
  Description of Artificial Sequence: Synthetic oligonucleotide
aguccacucagugugcacg

SEQ ID NO: 358414 - RNA, 19 nt, Artificial Sequence
  Description of Artificial Sequence: Synthetic oligonucleotide
gacgcuuuuggaaaccaug

SEQ ID NO: 358415 - RNA, 19 nt, Artificial Sequence
  Description of Artificial Sequence: Synthetic oligonucleotide
auugauuacaggguuccga

SEQ ID NO: 358416 - RNA, 19 nt, Artificial Sequence
  Description of Artificial Sequence: Synthetic oligonucleotide
agggauauacuugaugggu

SEQ ID NO: 358417 - RNA, 19 nt, Artificial Sequence
  Description of Artificial Sequence: Synthetic oligonucleotide
gucucuaggcuauucugcc

SEQ ID NO: 358418 - RNA, 19 nt, Artificial Sequence
  Description of Artificial Sequence: Synthetic oligonucleotide
gucaaagaccacucuccgg

SEQ ID NO: 358419 - RNA, 19 nt, Artificial Sequence
  Description of Artificial Sequence: Synthetic oligonucleotide
acgcuuuuggaaaccaugg

SEQ ID NO: 358420 - RNA, 19 nt, Artificial Sequence
  Description of Artificial Sequence: Synthetic oligonucleotide
gccugaaugguacacgccg

SEQ ID NO: 358421 - RNA, 19 nt, Artificial Sequence
  Description of Artificial Sequence: Synthetic oligonucleotide
aguucacgcagaauguuag

SEQ ID NO: 358422 - RNA, 19 nt, Artificial Sequence
  Description of Artificial Sequence: Synthetic oligonucleotide
acacggacuguuccuuccc

SEQ ID NO: 358423 - RNA, 19 nt, Artificial Sequence
  Description of Artificial Sequence: Synthetic oligonucleotide
aacccaacuuucaggcucg

SEQ ID NO: 358424 - RNA, 19 nt, Artificial Sequence
  Description of Artificial Sequence: Synthetic oligonucleotide
cauugcuauaacggaagcc

SEQ ID NO: 358425 - RNA, 19 nt, Artificial Sequence
  Description of Artificial Sequence: Synthetic oligonucleotide
cuggcgcuuaccaagagca

SEQ ID NO: 358426 - RNA, 19 nt, Artificial Sequence
  Description of Artificial Sequence: Synthetic oligonucleotide
gcuacacugaugaugaggc

SEQ ID NO: 358427 - RNA, 19 nt, Artificial Sequence
  Description of Artificial Sequence: Synthetic oligonucleotide
cugccugaaugguacacgc

SEQ ID NO: 358428 - RNA, 19 nt, Artificial Sequence
  Description of Artificial Sequence: Synthetic oligonucleotide
ugcaaagcauggcugggaa

SEQ ID NO: 358429 - RNA, 19 nt, Artificial Sequence
  Description of Artificial Sequence: Synthetic oligonucleotide
ugauuacaggguuccgagc

SEQ ID NO: 358430 - RNA, 19 nt, Artificial Sequence
  Description of Artificial Sequence: Synthetic oligonucleotide
auggguacugcagguagac

SEQ ID NO: 358431 - RNA, 19 nt, Artificial Sequence
  Description of Artificial Sequence: Synthetic oligonucleotide
ugcggcacuggucugggcu

SEQ ID NO: 358432 - RNA, 19 nt, Artificial Sequence
  Description of Artificial Sequence: Synthetic oligonucleotide
ugccgagguacaaugucca

SEQ ID NO: 358433 - RNA, 19 nt, Artificial Sequence
  Description of Artificial Sequence: Synthetic oligonucleotide
ugacggcaaaaccggaugu

SEQ ID NO: 358434 - RNA, 19 nt, Artificial Sequence
  Description of Artificial Sequence: Synthetic oligonucleotide
uaccuaaccggaaggguuc

SEQ ID NO: 358435 - RNA, 19 nt, Artificial Sequence
  Description of Artificial Sequence: Synthetic oligonucleotide
ugggugauuuaucuagcau

SEQ ID NO: 358436 - RNA, 19 nt, Artificial Sequence
  Description of Artificial Sequence: Synthetic oligonucleotide
auacuccauacccugccug

SEQ ID NO: 358437 - RNA, 19 nt, Artificial Sequence
  Description of Artificial Sequence: Synthetic oligonucleotide
guaugaccaggaaaggcag

SEQ ID NO: 358438 - RNA, 19 nt, Artificial Sequence
  Description of Artificial Sequence: Synthetic oligonucleotide
aaaaccggauguucuccau

SEQ ID NO: 358439 - RNA, 19 nt, Artificial Sequence
  Description of Artificial Sequence: Synthetic oligonucleotide
ucauccgagaguagcucac

SEQ ID NO: 358440 - RNA, 19 nt, Artificial Sequence
  Description of Artificial Sequence: Synthetic oligonucleotide
gccacgauaguucacuagc

SEQ ID NO: 358441 - RNA, 19 nt, Artificial Sequence
  Description of Artificial Sequence: Synthetic oligonucleotide
acuagcgauggguacugca

SEQ ID NO: 358442 - RNA, 19 nt, Artificial Sequence
  Description of Artificial Sequence: Synthetic oligonucleotide
acaccaccgagucuccauc

SEQ ID NO: 358443 - RNA, 19 nt, Artificial Sequence
  Description of Artificial Sequence: Synthetic oligonucleotide
ggucuugaucaauuguaag

SEQ ID NO: 358444 - RNA, 19 nt, Artificial Sequence
  Description of Artificial Sequence: Synthetic oligonucleotide
cuugaugggugauuuaucu

SEQ ID NO: 358445 - RNA, 19 nt, Artificial Sequence
  Description of Artificial Sequence: Synthetic oligonucleotide
ugaccuugguguaccaguc

SEQ ID NO: 358446 - RNA, 19 nt, Artificial Sequence
  Description of Artificial Sequence: Synthetic oligonucleotide
cugacggcaaaaccggaug

SEQ ID NO: 358447 - RNA, 19 nt, Artificial Sequence
  Description of Artificial Sequence: Synthetic oligonucleotide
acggcaaaaccggauguuc

SEQ ID NO: 358448 - RNA, 19 nt, Artificial Sequence
  Description of Artificial Sequence: Synthetic oligonucleotide
cugcgcugagucaaagacc

SEQ ID NO: 358449 - RNA, 19 nt, Artificial Sequence
  Description of Artificial Sequence: Synthetic oligonucleotide
cagagaaguucucucccag

SEQ ID NO: 358450 - RNA, 19 nt, Artificial Sequence
  Description of Artificial Sequence: Synthetic oligonucleotide
uguuagggcuucagcugcc

SEQ ID NO: 358451 - RNA, 19 nt, Artificial Sequence
  Description of Artificial Sequence: Synthetic oligonucleotide
cagaagcggauaccuaacc

SEQ ID NO: 358452 - RNA, 19 nt, Artificial Sequence
  Description of Artificial Sequence: Synthetic oligonucleotide
uuaugagugcauaguccau

SEQ ID NO: 358453 - RNA, 19 nt, Artificial Sequence
  Description of Artificial Sequence: Synthetic oligonucleotide
aagcggauaccuaaccgga

SEQ ID NO: 358454 - RNA, 19 nt, Artificial Sequence
  Description of Artificial Sequence: Synthetic oligonucleotide
agucauccgagaguagcuc

SEQ ID NO: 358455 - RNA, 19 nt, Artificial Sequence
  Description of Artificial Sequence: Synthetic oligonucleotide
guagaucccagagaaguuc

SEQ ID NO: 358456 - RNA, 19 nt, Artificial Sequence
  Description of Artificial Sequence: Synthetic oligonucleotide
accucugauagugcguggg

SEQ ID NO: 358457 - RNA, 19 nt, Artificial Sequence
  Description of Artificial Sequence: Synthetic oligonucleotide
agccacgauaguucacuag

SEQ ID NO: 358458 - RNA, 19 nt, Artificial Sequence
  Description of Artificial Sequence: Synthetic oligonucleotide
acauaguacagggcugauc

SEQ ID NO: 358459 - RNA, 19 nt, Artificial Sequence
  Description of Artificial Sequence: Synthetic oligonucleotide
ucucuaggcuauucugcca

SEQ ID NO: 358460 - RNA, 19 nt, Artificial Sequence
  Description of Artificial Sequence: Synthetic oligonucleotide
gcuauaacggaagccagcc

SEQ ID NO: 358461 - RNA, 19 nt, Artificial Sequence
  Description of Artificial Sequence: Synthetic oligonucleotide
uucaagcacugagauguug

SEQ ID NO: 358462 - RNA, 19 nt, Artificial Sequence
  Description of Artificial Sequence: Synthetic oligonucleotide
ugaucugcgguuggugcag

SEQ ID NO: 358463 - RNA, 19 nt, Artificial Sequence
  Description of Artificial Sequence: Synthetic oligonucleotide
aaaccggauguucuccauu

SEQ ID NO: 358464 - RNA, 19 nt, Artificial Sequence
  Description of Artificial Sequence: Synthetic oligonucleotide
ccgaggagaacaaacacuc

SEQ ID NO: 358465 - RNA, 19 nt, Artificial Sequence
  Description of Artificial Sequence: Synthetic oligonucleotide
ugccugaaugguacacgcc

SEQ ID NO: 358466 - RNA, 19 nt, Artificial Sequence
  Description of Artificial Sequence: Synthetic oligonucleotide
gcugcgcugagucaaagac

SEQ ID NO: 358467 - RNA, 19 nt, Artificial Sequence
  Description of Artificial Sequence: Synthetic oligonucleotide
cacgguccgauagaggccc

SEQ ID NO: 358468 - RNA, 19 nt, Artificial Sequence
  Description of Artificial Sequence: Synthetic oligonucleotide
ggauauacuugauggguga

SEQ ID NO: 358469 - RNA, 19 nt, Artificial Sequence
  Description of Artificial Sequence: Synthetic oligonucleotide
gcuauacaggcacuguaug

SEQ ID NO: 358470 - RNA, 19 nt, Artificial Sequence
  Description of Artificial Sequence: Synthetic oligonucleotide
gaagucucuaggcuauucu

SEQ ID NO: 358471 - RNA, 19 nt, Artificial Sequence
  Description of Artificial Sequence: Synthetic oligonucleotide
uaggcuauucugccagauc

SEQ ID NO: 358472 - RNA, 19 nt, Artificial Sequence
  Description of Artificial Sequence: Synthetic oligonucleotide
aucuugcaaagcauggcug

SEQ ID NO: 358473 - RNA, 19 nt, Artificial Sequence
  Description of Artificial Sequence: Synthetic oligonucleotide
ggauaccuaaccggaaggg

SEQ ID NO: 358474 - RNA, 19 nt, Artificial Sequence
  Description of Artificial Sequence: Synthetic oligonucleotide
cauccagaguccagagccc

SEQ ID NO: 358475 - RNA, 19 nt, Artificial Sequence
  Description of Artificial Sequence: Synthetic oligonucleotide
auaguacagggcugaucug

SEQ ID NO: 358476 - RNA, 19 nt, Artificial Sequence
  Description of Artificial Sequence: Synthetic oligonucleotide
aggauguugucuuggccaa

SEQ ID NO: 358477 - RNA, 19 nt, Artificial Sequence
  Description of Artificial Sequence: Synthetic oligonucleotide
gauagagcaggagccgaac

SEQ ID NO: 358478 - RNA, 19 nt, Artificial Sequence
  Description of Artificial Sequence: Synthetic oligonucleotide
auacugcguggugaccucc

SEQ ID NO: 358479 - RNA, 19 nt, Artificial Sequence
  Description of Artificial Sequence: Synthetic oligonucleotide
cuguagaaggauugcuuca

SEQ ID NO: 358480 - RNA, 19 nt, Artificial Sequence
  Description of Artificial Sequence: Synthetic oligonucleotide
acggacuguuccuucccag

SEQ ID NO: 358481 - RNA, 19 nt, Artificial Sequence
  Description of Artificial Sequence: Synthetic oligonucleotide
cauggaacacuagguacug

SEQ ID NO: 358482 - RNA, 19 nt, Artificial Sequence
  Description of Artificial Sequence: Synthetic oligonucleotide
cauggaagcaauauugauu

SEQ ID NO: 358483 - RNA, 19 nt, Artificial Sequence
  Description of Artificial Sequence: Synthetic oligonucleotide
caugacuaccaugggcacc

SEQ ID NO: 358484 - RNA, 19 nt, Artificial Sequence
  Description of Artificial Sequence: Synthetic oligonucleotide
cuugaucaauuguaagcaa

SEQ ID NO: 358485 - RNA, 19 nt, Artificial Sequence
  Description of Artificial Sequence: Synthetic oligonucleotide
uagguacugacggcaaaac

SEQ ID NO: 358486 - RNA, 19 nt, Artificial Sequence
  Description of Artificial Sequence: Synthetic oligonucleotide
uaaggccccgguacagcgc

SEQ ID NO: 358487 - RNA, 19 nt, Artificial Sequence
  Description of Artificial Sequence: Synthetic oligonucleotide
cuugagcuuucgauucuuc

SEQ ID NO: 358488 - RNA, 19 nt, Artificial Sequence
  Description of Artificial Sequence: Synthetic oligonucleotide
accugacgcuccauagucc

SEQ ID NO: 358489 - RNA, 19 nt, Artificial Sequence
  Description of Artificial Sequence: Synthetic oligonucleotide
uuggggcgcuucuucuccg

SEQ ID NO: 358490 - RNA, 19 nt, Artificial Sequence
  Description of Artificial Sequence: Synthetic oligonucleotide
ucuaggcuauucugccaga

SEQ ID NO: 358491 - RNA, 19 nt, Artificial Sequence
  Description of Artificial Sequence: Synthetic oligonucleotide
uacugacggcaaaaccgga

SEQ ID NO: 358492 - RNA, 19 nt, Artificial Sequence
  Description of Artificial Sequence: Synthetic oligonucleotide
gaccuccgggcccaggcag

SEQ ID NO: 358493 - RNA, 19 nt, Artificial Sequence
  Description of Artificial Sequence: Synthetic oligonucleotide
auaccuaaccggaaggguu

SEQ ID NO: 358494 - RNA, 19 nt, Artificial Sequence
  Description of Artificial Sequence: Synthetic oligonucleotide
cucugauagugcgugggug

SEQ ID NO: 358495 - RNA, 19 nt, Artificial Sequence
  Description of Artificial Sequence: Synthetic oligonucleotide
ugacgcuccauaguccuuc

SEQ ID NO: 358496 - RNA, 19 nt, Artificial Sequence
  Description of Artificial Sequence: Synthetic oligonucleotide
gucauccgagaguagcuca

SEQ ID NO: 358497 - RNA, 19 nt, Artificial Sequence
  Description of Artificial Sequence: Synthetic oligonucleotide
caaacaccaccgagucucc

SEQ ID NO: 358498 - RNA, 19 nt, Artificial Sequence
  Description of Artificial Sequence: Synthetic oligonucleotide
cuaaccggaaggguucaug

SEQ ID NO: 358499 - RNA, 19 nt, Artificial Sequence
  Description of Artificial Sequence: Synthetic oligonucleotide
caaaaccggauguucucca

SEQ ID NO: 358500 - RNA, 19 nt, Artificial Sequence
  Description of Artificial Sequence: Synthetic oligonucleotide
uggaagcaauauugauuac

SEQ ID NO: 358501 - RNA, 19 nt, Artificial Sequence
  Description of Artificial Sequence: Synthetic oligonucleotide
uggguacugcagguagacg

SEQ ID NO: 358502 - RNA, 19 nt, Artificial Sequence
  Description of Artificial Sequence: Synthetic oligonucleotide
agauguugccacucucgau

SEQ ID NO: 358503 - RNA, 19 nt, Artificial Sequence
  Description of Artificial Sequence: Synthetic oligonucleotide
ugaguccacucagugugca

SEQ ID NO: 358504 - RNA, 19 nt, Artificial Sequence
  Description of Artificial Sequence: Synthetic oligonucleotide
auacaacaagugugucucu

SEQ ID NO: 358505 - RNA, 19 nt, Artificial Sequence
  Description of Artificial Sequence: Synthetic oligonucleotide
agugaccuugguguaccag

SEQ ID NO: 358506 - RNA, 19 nt, Artificial Sequence
  Description of Artificial Sequence: Synthetic oligonucleotide
gcggauaccuaaccggaag

SEQ ID NO: 358507 - RNA, 19 nt, Artificial Sequence
  Description of Artificial Sequence: Synthetic oligonucleotide
gugaccuccgggcccaggc

SEQ ID NO: 358508 - RNA, 19 nt, Artificial Sequence
  Description of Artificial Sequence: Synthetic oligonucleotide
ugguacacgccgguccucc

SEQ ID NO: 358509 - RNA, 19 nt, Artificial Sequence
  Description of Artificial Sequence: Synthetic oligonucleotide
acuagguacugacggcaaa

SEQ ID NO: 358510 - RNA, 19 nt, Artificial Sequence
  Description of Artificial Sequence: Synthetic oligonucleotide
uuacaggguuccgagcuau

SEQ ID NO: 358511 - RNA, 19 nt, Artificial Sequence
  Description of Artificial Sequence: Synthetic oligonucleotide
ccugaaugguacacgccgg

SEQ ID NO: 358512 - RNA, 19 nt, Artificial Sequence
  Description of Artificial Sequence: Synthetic oligonucleotide
gggcaugacuaccaugggc

SEQ ID NO: 358513 - RNA, 19 nt, Artificial Sequence
  Description of Artificial Sequence: Synthetic oligonucleotide
cuccgccacauacaacaag

SEQ ID NO: 358514 - RNA, 19 nt, Artificial Sequence
  Description of Artificial Sequence: Synthetic oligonucleotide
ugaaugguacacgccgguc

SEQ ID NO: 358515 - RNA, 19 nt, Artificial Sequence
  Description of Artificial Sequence: Synthetic oligonucleotide
agauccuggcgcuuaccaa

SEQ ID NO: 358516 - RNA, 19 nt, Artificial Sequence
  Description of Artificial Sequence: Synthetic oligonucleotide
gacgcuccauaguccuucc

SEQ ID NO: 358517 - RNA, 19 nt, Artificial Sequence
  Description of Artificial Sequence: Synthetic oligonucleotide
caguauucaugaagcuguc

SEQ ID NO: 358518 - RNA, 19 nt, Artificial Sequence
  Description of Artificial Sequence: Synthetic oligonucleotide
cauaaggucuugaucaauu

SEQ ID NO: 358519 - RNA, 19 nt, Artificial Sequence
  Description of Artificial Sequence: Synthetic oligonucleotide
ggugauuuaucuagcaucu

SEQ ID NO: 358520 - RNA, 19 nt, Artificial Sequence
  Description of Artificial Sequence: Synthetic oligonucleotide
gugacacuuccagucuggg

SEQ ID NO: 358521 - RNA, 19 nt, Artificial Sequence
  Description of Artificial Sequence: Synthetic oligonucleotide
ugcccaagugugugcgcag

SEQ ID NO: 358522 - RNA, 19 nt, Artificial Sequence
  Description of Artificial Sequence: Synthetic oligonucleotide
auauacuugaugggugauu

SEQ ID NO: 358523 - RNA, 19 nt, Artificial Sequence
  Description of Artificial Sequence: Synthetic oligonucleotide
gauaccuaaccggaagggu

SEQ ID NO: 358524 - RNA, 19 nt, Artificial Sequence
  Description of Artificial Sequence: Synthetic oligonucleotide
gaugcagcacacggacgcc

SEQ ID NO: 358525 - RNA, 19 nt, Artificial Sequence
  Description of Artificial Sequence: Synthetic oligonucleotide
uccuggcgcuuaccaagag

SEQ ID NO: 358526 - RNA, 19 nt, Artificial Sequence
  Description of Artificial Sequence: Synthetic oligonucleotide
uaccaagagcaaagugcaa

SEQ ID NO: 358527 - RNA, 19 nt, Artificial Sequence
  Description of Artificial Sequence: Synthetic oligonucleotide
cagccgaggagaacaaaca

SEQ ID NO: 358528 - RNA, 19 nt, Artificial Sequence
  Description of Artificial Sequence: Synthetic oligonucleotide
guagacgaugcggcacugg

SEQ ID NO: 358529 - RNA, 19 nt, Artificial Sequence
  Description of Artificial Sequence: Synthetic oligonucleotide
gagguggaugcagcacacg

SEQ ID NO: 358530 - RNA, 19 nt, Artificial Sequence
  Description of Artificial Sequence: Synthetic oligonucleotide
cacauuuucagggacgccu

SEQ ID NO: 358531 - RNA, 19 nt, Artificial Sequence
  Description of Artificial Sequence: Synthetic oligonucleotide
cauacugcguggugaccuc

SEQ ID NO: 358532 - RNA, 19 nt, Artificial Sequence
  Description of Artificial Sequence: Synthetic oligonucleotide
uagugcgugggugcuuuug

SEQ ID NO: 358533 - RNA, 19 nt, Artificial Sequence
  Description of Artificial Sequence: Synthetic oligonucleotide
gaacaaacacucagggagu

SEQ ID NO: 358534 - RNA, 19 nt, Artificial Sequence
  Description of Artificial Sequence: Synthetic oligonucleotide
gugugcgcagccaaagcac

SEQ ID NO: 358535 - RNA, 19 nt, Artificial Sequence
  Description of Artificial Sequence: Synthetic oligonucleotide
ggcaaaaccggauguucuc

SEQ ID NO: 358536 - RNA, 19 nt, Artificial Sequence
  Description of Artificial Sequence: Synthetic oligonucleotide
gauggguacugcagguaga

SEQ ID NO: 358537 - RNA, 19 nt, Artificial Sequence
  Description of Artificial Sequence: Synthetic oligonucleotide
cuuuugggauagagcagga

SEQ ID NO: 358538 - RNA, 19 nt, Artificial Sequence
  Description of Artificial Sequence: Synthetic oligonucleotide
cagguagacgaugcggcac

SEQ ID NO: 358539 - RNA, 19 nt, Artificial Sequence
  Description of Artificial Sequence: Synthetic oligonucleotide
gcggcuaaggccccgguac

SEQ ID NO: 358540 - RNA, 19 nt, Artificial Sequence
  Description of Artificial Sequence: Synthetic oligonucleotide
cugcaggcccggcaaacac

SEQ ID NO: 358541 - RNA, 19 nt, Artificial Sequence
  Description of Artificial Sequence: Synthetic oligonucleotide
gaguccacucagugugcac

SEQ ID NO: 358542 - RNA, 19 nt, Artificial Sequence
  Description of Artificial Sequence: Synthetic oligonucleotide
aaacaccaccgagucucca

SEQ ID NO: 358543 - RNA, 19 nt, Artificial Sequence
  Description of Artificial Sequence: Synthetic oligonucleotide
cuagguacugacggcaaaa

SEQ ID NO: 358544 - RNA, 19 nt, Artificial Sequence
  Description of Artificial Sequence: Synthetic oligonucleotide
cuucuccgccacauacaac

SEQ ID NO: 358545 - RNA, 19 nt, Artificial Sequence
  Description of Artificial Sequence: Synthetic oligonucleotide
guacacgccgguccuccug

SEQ ID NO: 358546 - RNA, 19 nt, Artificial Sequence
  Description of Artificial Sequence: Synthetic oligonucleotide
caguucacgcagaauguua

SEQ ID NO: 358547 - RNA, 19 nt, Artificial Sequence
  Description of Artificial Sequence: Synthetic oligonucleotide
gcgcuuaccaagagcaaag

SEQ ID NO: 358548 - RNA, 19 nt, Artificial Sequence
  Description of Artificial Sequence: Synthetic oligonucleotide
cacucauccagaguccaga

SEQ ID NO: 358549 - RNA, 19 nt, Artificial Sequence
  Description of Artificial Sequence: Synthetic oligonucleotide
ccaccagcccacaaacacc

SEQ ID NO: 358550 - RNA, 19 nt, Artificial Sequence
  Description of Artificial Sequence: Synthetic oligonucleotide
acacgccgguccuccuggc

SEQ ID NO: 358551 - RNA, 19 nt, Artificial Sequence
  Description of Artificial Sequence: Synthetic oligonucleotide
gcuauucugccagauccug

SEQ ID NO: 358552 - RNA, 19 nt, Artificial Sequence
  Description of Artificial Sequence: Synthetic oligonucleotide
gaaaggcagccaaagcagu

SEQ ID NO: 358553 - RNA, 19 nt, Artificial Sequence
  Description of Artificial Sequence: Synthetic oligonucleotide
ggcccggcaaacaccaccg

SEQ ID NO: 358554 - RNA, 19 nt, Artificial Sequence
  Description of Artificial Sequence: Synthetic oligonucleotide
ccaagagcaaagugcaaga

SEQ ID NO: 358555 - RNA, 19 nt, Artificial Sequence
  Description of Artificial Sequence: Synthetic oligonucleotide
gaugucaguggagcccauc

SEQ ID NO: 358556 - RNA, 19 nt, Artificial Sequence
  Description of Artificial Sequence: Synthetic oligonucleotide
acgccuucaagcacugaga

SEQ ID NO: 358557 - RNA, 19 nt, Artificial Sequence
  Description of Artificial Sequence: Synthetic oligonucleotide
agcaucccaaaggcagaag

SEQ ID NO: 358558 - RNA, 19 nt, Artificial Sequence
  Description of Artificial Sequence: Synthetic oligonucleotide
gcugccgagguacaauguc

SEQ ID NO: 358559 - RNA, 19 nt, Artificial Sequence
  Description of Artificial Sequence: Synthetic oligonucleotide
ggcacgguaauacuccaua

SEQ ID NO: 358560 - RNA, 19 nt, Artificial Sequence
  Description of Artificial Sequence: Synthetic oligonucleotide
uggcgcuuaccaagagcaa

SEQ ID NO: 358561 - RNA, 19 nt, Artificial Sequence
  Description of Artificial Sequence: Synthetic oligonucleotide
ccaccauaaggucuugauc

SEQ ID NO: 358562 - RNA, 19 nt, Artificial Sequence
  Description of Artificial Sequence: Synthetic oligonucleotide
ccgagguacaauguccacc

SEQ ID NO: 358563 - RNA, 19 nt, Artificial Sequence
  Description of Artificial Sequence: Synthetic oligonucleotide
cggauaccuaaccggaagg

SEQ ID NO: 358564 - RNA, 19 nt, Artificial Sequence
  Description of Artificial Sequence: Synthetic oligonucleotide
guuccgagcuauacaggca

SEQ ID NO: 358565 - RNA, 19 nt, Artificial Sequence
  Description of Artificial Sequence: Synthetic oligonucleotide
ggaguaccugcuccacugc

SEQ ID NO: 358566 - RNA, 19 nt, Artificial Sequence
  Description of Artificial Sequence: Synthetic oligonucleotide
augcggcacuggucugggc

SEQ ID NO: 358567 - RNA, 19 nt, Artificial Sequence
  Description of Artificial Sequence: Synthetic oligonucleotide
cucagggagucauccgaga

SEQ ID NO: 358568 - RNA, 19 nt, Artificial Sequence
  Description of Artificial Sequence: Synthetic oligonucleotide
ucuucggccuggccaucuc

SEQ ID NO: 358569 - RNA, 19 nt, Artificial Sequence
  Description of Artificial Sequence: Synthetic oligonucleotide
ccugccugaaugguacacg

SEQ ID NO: 358570 - RNA, 19 nt, Artificial Sequence
  Description of Artificial Sequence: Synthetic oligonucleotide
aagugugugcgcagccaaa

SEQ ID NO: 358571 - RNA, 19 nt, Artificial Sequence
  Description of Artificial Sequence: Synthetic oligonucleotide
gcgguuggugcagaagcgg

SEQ ID NO: 358572 - RNA, 19 nt, Artificial Sequence
  Description of Artificial Sequence: Synthetic oligonucleotide
ccuggcgcuuaccaagagc

SEQ ID NO: 358573 - RNA, 19 nt, Artificial Sequence
  Description of Artificial Sequence: Synthetic oligonucleotide
gugauuuaucuagcaucuc

SEQ ID NO: 358574 - RNA, 19 nt, Artificial Sequence
  Description of Artificial Sequence: Synthetic oligonucleotide
caucgcuggcauugauguc

SEQ ID NO: 358575 - RNA, 19 nt, Artificial Sequence
  Description of Artificial Sequence: Synthetic oligonucleotide
gugugcacgguccgauaga

SEQ ID NO: 358576 - RNA, 19 nt, Artificial Sequence
  Description of Artificial Sequence: Synthetic oligonucleotide
ggugcagaagcggauaccu

SEQ ID NO: 358577 - RNA, 19 nt, Artificial Sequence
  Description of Artificial Sequence: Synthetic oligonucleotide
gcaaagcauggcugggaac

SEQ ID NO: 358578 - RNA, 19 nt, Artificial Sequence
  Description of Artificial Sequence: Synthetic oligonucleotide
ccacacuguugccugcagg

SEQ ID NO: 358579 - RNA, 19 nt, Artificial Sequence
  Description of Artificial Sequence: Synthetic oligonucleotide
gugcgcagccaaagcacag

SEQ ID NO: 358580 - RNA, 19 nt, Artificial Sequence
  Description of Artificial Sequence: Synthetic oligonucleotide
gugcacgguccgauagagg

SEQ ID NO: 358581 - RNA, 19 nt, Artificial Sequence
  Description of Artificial Sequence: Synthetic oligonucleotide
gauagugcgugggugcuuu

SEQ ID NO: 358582 - RNA, 19 nt, Artificial Sequence
  Description of Artificial Sequence: Synthetic oligonucleotide
cacuagguacugacggcaa

SEQ ID NO: 358583 - RNA, 19 nt, Artificial Sequence
  Description of Artificial Sequence: Synthetic oligonucleotide
ggcugcgcugcgcugaguc

SEQ ID NO: 358584 - RNA, 19 nt, Artificial Sequence
  Description of Artificial Sequence: Synthetic oligonucleotide
ggguuccgagcuauacagg

SEQ ID NO: 358585 - RNA, 19 nt, Artificial Sequence
  Description of Artificial Sequence: Synthetic oligonucleotide
gcccauguuucuccagggc

SEQ ID NO: 358586 - RNA, 19 nt, Artificial Sequence
  Description of Artificial Sequence: Synthetic oligonucleotide
ucggccuggccaucucauc

SEQ ID NO: 358587 - RNA, 19 nt, Artificial Sequence
  Description of Artificial Sequence: Synthetic oligonucleotide
accuaaccggaaggguuca

SEQ ID NO: 358588 - RNA, 19 nt, Artificial Sequence
  Description of Artificial Sequence: Synthetic oligonucleotide
cccggcaaacaccaccgag

SEQ ID NO: 358589 - RNA, 19 nt, Artificial Sequence
  Description of Artificial Sequence: Synthetic oligonucleotide
caccaccgagucuccauca

SEQ ID NO: 358590 - RNA, 19 nt, Artificial Sequence
  Description of Artificial Sequence: Synthetic oligonucleotide
cauucgcuccaagucccuc

SEQ ID NO: 358591 - RNA, 19 nt, Artificial Sequence
  Description of Artificial Sequence: Synthetic oligonucleotide
agcccaucuugcaaagcau

SEQ ID NO: 358592 - RNA, 19 nt, Artificial Sequence
  Description of Artificial Sequence: Synthetic oligonucleotide
auccuggcgcuuaccaaga

SEQ ID NO: 358593 - RNA, 19 nt, Artificial Sequence
  Description of Artificial Sequence: Synthetic oligonucleotide
gagccacgauaguucacua

SEQ ID NO: 358594 - RNA, 19 nt, Artificial Sequence
  Description of Artificial Sequence: Synthetic oligonucleotide
uccacucagugugcacggu

SEQ ID NO: 358595 - RNA, 19 nt, Artificial Sequence
  Description of Artificial Sequence: Synthetic oligonucleotide
ggagccacgauaguucacu

SEQ ID NO: 358596 - RNA, 19 nt, Artificial Sequence
  Description of Artificial Sequence: Synthetic oligonucleotide
cugcccaagugugugcgca

SEQ ID NO: 358597 - RNA, 19 nt, Artificial Sequence
  Description of Artificial Sequence: Synthetic oligonucleotide
acgacacggacuguuccuu

SEQ ID NO: 358598 - RNA, 19 nt, Artificial Sequence
  Description of Artificial Sequence: Synthetic oligonucleotide
auacccugccugaauggua

SEQ ID NO: 358599 - RNA, 19 nt, Artificial Sequence
  Description of Artificial Sequence: Synthetic oligonucleotide
ccaggaagucucuaggcua

SEQ ID NO: 358600 - RNA, 19 nt, Artificial Sequence
  Description of Artificial Sequence: Synthetic oligonucleotide
ugauagugcgugggugcuu

SEQ ID NO: 358601 - RNA, 19 nt, Artificial Sequence
  Description of Artificial Sequence: Synthetic oligonucleotide
acgccccagaggaugucag

SEQ ID NO: 358602 - RNA, 19 nt, Artificial Sequence
  Description of Artificial Sequence: Synthetic oligonucleotide
ggcgcuuaccaagagcaaa

SEQ ID NO: 358603 - RNA, 19 nt, Artificial Sequence
  Description of Artificial Sequence: Synthetic oligonucleotide
ggagguggaugcagcacac

SEQ ID NO: 358604 - RNA, 19 nt, Artificial Sequence
  Description of Artificial Sequence: Synthetic oligonucleotide
acgcuccauaguccuuccu

SEQ ID NO: 358605 - RNA, 19 nt, Artificial Sequence
  Description of Artificial Sequence: Synthetic oligonucleotide
cacgacacggacuguuccu

SEQ ID NO: 358606 - RNA, 19 nt, Artificial Sequence
  Description of Artificial Sequence: Synthetic oligonucleotide
agcugccgagguacaaugu

SEQ ID NO: 358607 - RNA, 19 nt, Artificial Sequence
  Description of Artificial Sequence: Synthetic oligonucleotide
gcacuagcgauggguacug

SEQ ID NO: 358608 - RNA, 19 nt, Artificial Sequence
  Description of Artificial Sequence: Synthetic oligonucleotide
acccacgacacggacuguu

SEQ ID NO: 358609 - RNA, 19 nt, Artificial Sequence
  Description of Artificial Sequence: Synthetic oligonucleotide
agcggauaccuaaccggaa

SEQ ID NO: 358610 - RNA, 19 nt, Artificial Sequence
  Description of Artificial Sequence: Synthetic oligonucleotide
cuauaacggaagccagccu

SEQ ID NO: 358611 - RNA, 19 nt, Artificial Sequence
  Description of Artificial Sequence: Synthetic oligonucleotide
ggacacccacgacacggac

SEQ ID NO: 358612 - RNA, 19 nt, Artificial Sequence
  Description of Artificial Sequence: Synthetic oligonucleotide
ccgccacauacaacaagug

SEQ ID NO: 358613 - RNA, 19 nt, Artificial Sequence
  Description of Artificial Sequence: Synthetic oligonucleotide
ccugggagagaaaggaugu

SEQ ID NO: 358614 - RNA, 19 nt, Artificial Sequence
  Description of Artificial Sequence: Synthetic oligonucleotide
cauccgagaguagcucaca

SEQ ID NO: 358615 - RNA, 19 nt, Artificial Sequence
  Description of Artificial Sequence: Synthetic oligonucleotide
cauacccugccugaauggu

SEQ ID NO: 358616 - RNA, 19 nt, Artificial Sequence
  Description of Artificial Sequence: Synthetic oligonucleotide
acgcagaauguuagggcuu

SEQ ID NO: 358617 - RNA, 19 nt, Artificial Sequence
  Description of Artificial Sequence: Synthetic oligonucleotide
aggagccgaacaggcacau

SEQ ID NO: 358618 - RNA, 19 nt, Artificial Sequence
  Description of Artificial Sequence: Synthetic oligonucleotide
caccugggucuuaucugga

SEQ ID NO: 358619 - RNA, 19 nt, Artificial Sequence
  Description of Artificial Sequence: Synthetic oligonucleotide
cacuagcgauggguacugc

SEQ ID NO: 358620 - RNA, 19 nt, Artificial Sequence
  Description of Artificial Sequence: Synthetic oligonucleotide
ccaccgagucuccaucaug

SEQ ID NO: 358621 - RNA, 19 nt, Artificial Sequence
  Description of Artificial Sequence: Synthetic oligonucleotide
ggacucagccuuggggcgc

SEQ ID NO: 358622 - RNA, 19 nt, Artificial Sequence
  Description of Artificial Sequence: Synthetic oligonucleotide
ccacucagugugcacgguc

SEQ ID NO: 358623 - RNA, 19 nt, Artificial Sequence
  Description of Artificial Sequence: Synthetic oligonucleotide
cacucuccggcugucagcu

SEQ ID NO: 358624 - RNA, 19 nt, Artificial Sequence
  Description of Artificial Sequence: Synthetic oligonucleotide
acgguccgauagaggcccc

SEQ ID NO: 358625 - RNA, 19 nt, Artificial Sequence
  Description of Artificial Sequence: Synthetic oligonucleotide
ccgagcuauacaggcacug

SEQ ID NO: 358626 - RNA, 19 nt, Artificial Sequence
  Description of Artificial Sequence: Synthetic oligonucleotide
gcaagacagacugaccagu

SEQ ID NO: 358627 - RNA, 19 nt, Artificial Sequence
  Description of Artificial Sequence: Synthetic oligonucleotide
gaucugcgguuggugcaga

SEQ ID NO: 358628 - RNA, 19 nt, Artificial Sequence
  Description of Artificial Sequence: Synthetic oligonucleotide
ggggcgcuucuucuccgcc

SEQ ID NO: 358629 - RNA, 19 nt, Artificial Sequence
  Description of Artificial Sequence: Synthetic oligonucleotide
auagugcgugggugcuuuu

SEQ ID NO: 358630 - RNA, 19 nt, Artificial Sequence
  Description of Artificial Sequence: Synthetic oligonucleotide
gccgagguacaauguccac

SEQ ID NO: 358631 - RNA, 19 nt, Artificial Sequence
  Description of Artificial Sequence: Synthetic oligonucleotide
gccgaggagaacaaacacu

SEQ ID NO: 358632 - RNA, 19 nt, Artificial Sequence
  Description of Artificial Sequence: Synthetic oligonucleotide
cugcgcugcgcugagucaa

SEQ ID NO: 358633 - RNA, 19 nt, Artificial Sequence
  Description of Artificial Sequence: Synthetic oligonucleotide
gacggcaaaaccggauguu

SEQ ID NO: 358634 - RNA, 19 nt, Artificial Sequence
  Description of Artificial Sequence: Synthetic oligonucleotide
ccgagaguagcucacacuu

SEQ ID NO: 358635 - RNA, 19 nt, Artificial Sequence
  Description of Artificial Sequence: Synthetic oligonucleotide
gggacgcuuuuggaaacca

SEQ ID NO: 358636 - RNA, 19 nt, Artificial Sequence
  Description of Artificial Sequence: Synthetic oligonucleotide
cugauagugcgugggugcu

SEQ ID NO: 358637 - RNA, 19 nt, Artificial Sequence
  Description of Artificial Sequence: Synthetic oligonucleotide
ccugacgcuccauaguccu

SEQ ID NO: 358638 - RNA, 19 nt, Artificial Sequence
  Description of Artificial Sequence: Synthetic oligonucleotide
gccuuccuccuggaguacc

SEQ ID NO: 358639 - RNA, 19 nt, Artificial Sequence
  Description of Artificial Sequence: Synthetic oligonucleotide
guccaaggcuuugguuuga

SEQ ID NO: 358640 - RNA, 19 nt, Artificial Sequence
  Description of Artificial Sequence: Synthetic oligonucleotide
ccggcaaacaccaccgagu

SEQ ID NO: 358641 - RNA, 19 nt, Artificial Sequence
  Description of Artificial Sequence: Synthetic oligonucleotide
cuaggcuauucugccagau

SEQ ID NO: 358642 - RNA, 19 nt, Artificial Sequence
  Description of Artificial Sequence: Synthetic oligonucleotide
gccagauccuggcgcuuac

SEQ ID NO: 358643 - RNA, 19 nt, Artificial Sequence
  Description of Artificial Sequence: Synthetic oligonucleotide
cccaacuuucaggcucggg

SEQ ID NO: 358644 - RNA, 19 nt, Artificial Sequence
  Description of Artificial Sequence: Synthetic oligonucleotide
gcugcgcugcgcugaguca

SEQ ID NO: 358645 - RNA, 19 nt, Artificial Sequence
  Description of Artificial Sequence: Synthetic oligonucleotide
cgcagaauguuagggcuuc

SEQ ID NO: 358646 - RNA, 19 nt, Artificial Sequence
  Description of Artificial Sequence: Synthetic oligonucleotide
ggcggcgcucagcguaggc

SEQ ID NO: 358647 - RNA, 19 nt, Artificial Sequence
  Description of Artificial Sequence: Synthetic oligonucleotide
cccguggggcaugacuacc

SEQ ID NO: 358648 - RNA, 19 nt, Artificial Sequence
  Description of Artificial Sequence: Synthetic oligonucleotide
ggcaaacaccaccgagucu

SEQ ID NO: 358649 - RNA, 19 nt, Artificial Sequence
  Description of Artificial Sequence: Synthetic oligonucleotide
ccccgguacagcgcugccg

SEQ ID NO: 358650 - RNA, 19 nt, Artificial Sequence
  Description of Artificial Sequence: Synthetic oligonucleotide
ccguggggcaugacuacca

SEQ ID NO: 358651 - RNA, 19 nt, Artificial Sequence
  Description of Artificial Sequence: Synthetic oligonucleotide
gacucagccuuggggcgcu

SEQ ID NO: 358652 - RNA, 19 nt, Artificial Sequence
  Description of Artificial Sequence: Synthetic oligonucleotide
ggcuauucugccagauccu

SEQ ID NO: 358653 - RNA, 19 nt, Artificial Sequence
  Description of Artificial Sequence: Synthetic oligonucleotide
aggcggcgcucagcguagg

SEQ ID NO: 358654 - RNA, 19 nt, Artificial Sequence
  Description of Artificial Sequence: Synthetic oligonucleotide
gggacacccacgacacgga

SEQ ID NO: 358655 - RNA, 19 nt, Artificial Sequence
  Description of Artificial Sequence: Synthetic oligonucleotide
cccauacugcguggugacc

SEQ ID NO: 358656 - RNA, 19 nt, Artificial Sequence
  Description of Artificial Sequence: Synthetic oligonucleotide
ccccguggggcaugacuac

SEQ ID NO: 358657 - RNA, 19 nt, Artificial Sequence
  Description of Artificial Sequence: Synthetic oligonucleotide
cuucaagcacugagauguu

SEQ ID NO: 358658 - RNA, 19 nt, Artificial Sequence
  Description of Artificial Sequence: Synthetic oligonucleotide
gcagaauguuagggcuuca

SEQ ID NO: 358659 - RNA, 19 nt, Artificial Sequence
  Description of Artificial Sequence: Synthetic oligonucleotide
cgacacggacuguuccuuc

SEQ ID NO: 358660 - RNA, 19 nt, Artificial Sequence
  Description of Artificial Sequence: Synthetic oligonucleotide
ccgcugucagggaggugac

SEQ ID NO: 358661 - RNA, 19 nt, Artificial Sequence
  Description of Artificial Sequence: Synthetic oligonucleotide
ggcggcuaaggccccggua

SEQ ID NO: 358662 - RNA, 19 nt, Artificial Sequence
  Description of Artificial Sequence: Synthetic oligonucleotide
ggauguugucuuggccaaa

SEQ ID NO: 358663 - RNA, 19 nt, Artificial Sequence
  Description of Artificial Sequence: Synthetic oligonucleotide
ccgguacagcgcugccgcc

SEQ ID NO: 358664 - RNA, 19 nt, Artificial Sequence
  Description of Artificial Sequence: Synthetic oligonucleotide
gcgcugcgcugagucaaag

SEQ ID NO: 358665 - RNA, 19 nt, Artificial Sequence
  Description of Artificial Sequence: Synthetic oligonucleotide
gggucuuaucuggaggguu

SEQ ID NO: 358666 - RNA, 19 nt, Artificial Sequence
  Description of Artificial Sequence: Synthetic oligonucleotide
gcguaggcuggcggcuaag

SEQ ID NO: 358667 - RNA, 19 nt, Artificial Sequence
  Description of Artificial Sequence: Synthetic oligonucleotide
gcgauggguacugcaggua

SEQ ID NO: 358668 - RNA, 19 nt, Artificial Sequence
  Description of Artificial Sequence: Synthetic oligonucleotide
cugacagguugaagcucuu

SEQ ID NO: 358669 - RNA, 19 nt, Artificial Sequence
  Description of Artificial Sequence: Synthetic oligonucleotide
cacauaguacagggcugau

SEQ ID NO: 358670 - RNA, 19 nt, Artificial Sequence
  Description of Artificial Sequence: Synthetic oligonucleotide
ccucugauagugcgugggu

SEQ ID NO: 358671 - RNA, 19 nt, Artificial Sequence
  Description of Artificial Sequence: Synthetic oligonucleotide
gguacacgccgguccuccu

SEQ ID NO: 358672 - RNA, 19 nt, Artificial Sequence
  Description of Artificial Sequence: Synthetic oligonucleotide
cugacgcuccauaguccuu

SEQ ID NO: 358673 - RNA, 19 nt, Artificial Sequence
  Description of Artificial Sequence: Synthetic oligonucleotide
ccacacggugugcaucaaa

SEQ ID NO: 358674 - RNA, 19 nt, Artificial Sequence
  Description of Artificial Sequence: Synthetic oligonucleotide
ggacgcuuuuggaaaccau

SEQ ID NO: 358675 - RNA, 19 nt, Artificial Sequence
  Description of Artificial Sequence: Synthetic oligonucleotide
ggaauggguucagccuccu

SEQ ID NO: 358676 - RNA, 19 nt, Artificial Sequence
  Description of Artificial Sequence: Synthetic oligonucleotide
gcccggcaaacaccaccga

SEQ ID NO: 358677 - RNA, 19 nt, Artificial Sequence
  Description of Artificial Sequence: Synthetic oligonucleotide
cgcugcgcugagucaaaga

SEQ ID NO: 358678 - RNA, 19 nt, Artificial Sequence
  Description of Artificial Sequence: Synthetic oligonucleotide
cagcguaggcuggcggcua

SEQ ID NO: 358679 - RNA, 19 nt, Artificial Sequence
  Description of Artificial Sequence: Synthetic oligonucleotide
gcggcgcucagcguaggcu

SEQ ID NO: 358680 - RNA, 19 nt, Artificial Sequence
  Description of Artificial Sequence: Synthetic oligonucleotide
ccauaaggucuugaucaau

SEQ ID NO: 358681 - RNA, 19 nt, Artificial Sequence
  Description of Artificial Sequence: Synthetic oligonucleotide
gcgcugagucaaagaccac

SEQ ID NO: 358682 - RNA, 19 nt, Artificial Sequence
  Description of Artificial Sequence: Synthetic oligonucleotide
ccaguucacgcagaauguu

SEQ ID NO: 358683 - RNA, 19 nt, Artificial Sequence
  Description of Artificial Sequence: Synthetic oligonucleotide
cgagcuauacaggcacugu

SEQ ID NO: 358684 - RNA, 19 nt, Artificial Sequence
  Description of Artificial Sequence: Synthetic oligonucleotide
ccagcugccgagguacaau

SEQ ID NO: 358685 - RNA, 19 nt, Artificial Sequence
  Description of Artificial Sequence: Synthetic oligonucleotide
cgagaguagcucacacuuu

SEQ ID NO: 358686 - RNA, 19 nt, Artificial Sequence
  Description of Artificial Sequence: Synthetic oligonucleotide
cccagcugccgagguacaa

SEQ ID NO: 358687 - RNA, 19 nt, Artificial Sequence
  Description of Artificial Sequence: Synthetic oligonucleotide
gccuuacgcagcacagcuu

SEQ ID NO: 358688 - RNA, 19 nt, Artificial Sequence
  Description of Artificial Sequence: Synthetic oligonucleotide
ggaugucaguggagcccau

SEQ ID NO: 358689 - RNA, 19 nt, Artificial Sequence
  Description of Artificial Sequence: Synthetic oligonucleotide
ggagccgaacaggcacauu

SEQ ID NO: 358690 - RNA, 19 nt, Artificial Sequence
  Description of Artificial Sequence: Synthetic oligonucleotide
cacccacgacacggacugu

SEQ ID NO: 358691 - RNA, 19 nt, Artificial Sequence
  Description of Artificial Sequence: Synthetic oligonucleotide
caggcacauuccgggccuu

SEQ ID NO: 358692 - RNA, 19 nt, Artificial Sequence
  Description of Artificial Sequence: Synthetic oligonucleotide
ccuaaccggaaggguucau

SEQ ID NO: 358693 - RNA, 19 nt, Artificial Sequence
  Description of Artificial Sequence: Synthetic oligonucleotide
aaggaaauaaauccguacg

SEQ ID NO: 358694 - RNA, 19 nt, Artificial Sequence
  Description of Artificial Sequence: Synthetic oligonucleotide
uggaaauuaguacagaacc

SEQ ID NO: 358695 - RNA, 19 nt, Artificial Sequence
  Description of Artificial Sequence: Synthetic oligonucleotide
aauaaagcagcaccguccc

SEQ ID NO: 358696 - RNA, 19 nt, Artificial Sequence
  Description of Artificial Sequence: Synthetic oligonucleotide
aauaaguccaaccaguccu

SEQ ID NO: 358697 - RNA, 19 nt, Artificial Sequence
  Description of Artificial Sequence: Synthetic oligonucleotide
ucaacuacacgguagaggg

SEQ ID NO: 358698 - RNA, 19 nt, Artificial Sequence
  Description of Artificial Sequence: Synthetic oligonucleotide
uuguggauaaaccaguucc

SEQ ID NO: 358699 - RNA, 19 nt, Artificial Sequence
  Description of Artificial Sequence: Synthetic oligonucleotide
aaaacuuauguccaaggca

SEQ ID NO: 358700 - RNA, 19 nt, Artificial Sequence
  Description of Artificial Sequence: Synthetic oligonucleotide
cuuaaaagcggcaagggag

SEQ ID NO: 358701 - RNA, 19 nt, Artificial Sequence
  Description of Artificial Sequence: Synthetic oligonucleotide
gaaaacauggcucaggguc

SEQ ID NO: 358702 - RNA, 19 nt, Artificial Sequence
  Description of Artificial Sequence: Synthetic oligonucleotide
agggauagcagccugggcc

SEQ ID NO: 358703 - RNA, 19 nt, Artificial Sequence
  Description of Artificial Sequence: Synthetic oligonucleotide
uuaaaagcggcaagggagg

SEQ ID NO: 358704 - RNA, 19 nt, Artificial Sequence
  Description of Artificial Sequence: Synthetic oligonucleotide
aaaaccaauuuguaaccag

SEQ ID NO: 358705 - RNA, 19 nt, Artificial Sequence
  Description of Artificial Sequence: Synthetic oligonucleotide
caugauaggauacagggug

SEQ ID NO: 358706 - RNA, 19 nt, Artificial Sequence
  Description of Artificial Sequence: Synthetic oligonucleotide
ggaauugaaacccacacag

SEQ ID NO: 358707 - RNA, 19 nt, Artificial Sequence
  Description of Artificial Sequence: Synthetic oligonucleotide
aggaaauaaauccguacgg

SEQ ID NO: 358708 - RNA, 19 nt, Artificial Sequence
  Description of Artificial Sequence: Synthetic oligonucleotide
uuuauucuaacuccugcca

SEQ ID NO: 358709 - RNA, 19 nt, Artificial Sequence
  Description of Artificial Sequence: Synthetic oligonucleotide
gaaauuaguacagaacccc

SEQ ID NO: 358710 - RNA, 19 nt, Artificial Sequence
  Description of Artificial Sequence: Synthetic oligonucleotide
gagccaaggaacaauaggg

SEQ ID NO: 358711 - RNA, 19 nt, Artificial Sequence
  Description of Artificial Sequence: Synthetic oligonucleotide
uaacuuaaaagcggcaagg

SEQ ID NO: 358712 - RNA, 19 nt, Artificial Sequence
  Description of Artificial Sequence: Synthetic oligonucleotide
auccaaggaacucucgacc

SEQ ID NO: 358713 - RNA, 19 nt, Artificial Sequence
  Description of Artificial Sequence: Synthetic oligonucleotide
auaacuuaaaagcggcaag

SEQ ID NO: 358714 - RNA, 19 nt, Artificial Sequence
  Description of Artificial Sequence: Synthetic oligonucleotide
acgaguacagaauaaauaa

SEQ ID NO: 358715 - RNA, 19 nt, Artificial Sequence
  Description of Artificial Sequence: Synthetic oligonucleotide
caaacuacucccucuaacc

SEQ ID NO: 358716 - RNA, 19 nt, Artificial Sequence
  Description of Artificial Sequence: Synthetic oligonucleotide
uuuaccuaacgggagaugc

SEQ ID NO: 358717 - RNA, 19 nt, Artificial Sequence
  Description of Artificial Sequence: Synthetic oligonucleotide
aauaacuuaaaagcggcaa

SEQ ID NO: 358718 - RNA, 19 nt, Artificial Sequence
  Description of Artificial Sequence: Synthetic oligonucleotide
auaaauaggaaaaccaccu

SEQ ID NO: 358719 - RNA, 19 nt, Artificial Sequence
  Description of Artificial Sequence: Synthetic oligonucleotide
gaugcauggaaggaaaagc

SEQ ID NO: 358720 - RNA, 19 nt, Artificial Sequence
  Description of Artificial Sequence: Synthetic oligonucleotide
gaggaugggaauugaaacc

SEQ ID NO: 358721 - RNA, 19 nt, Artificial Sequence
  Description of Artificial Sequence: Synthetic oligonucleotide
uguucaacuacacgguaga

SEQ ID NO: 358722 - RNA, 19 nt, Artificial Sequence
  Description of Artificial Sequence: Synthetic oligonucleotide
aaacuacucccucuaacca

SEQ ID NO: 358723 - RNA, 19 nt, Artificial Sequence
  Description of Artificial Sequence: Synthetic oligonucleotide
aauccguacgguucgccuc

SEQ ID NO: 358724 - RNA, 19 nt, Artificial Sequence
  Description of Artificial Sequence: Synthetic oligonucleotide
uguggauaaaccaguuccc

SEQ ID NO: 358725 - RNA, 19 nt, Artificial Sequence
  Description of Artificial Sequence: Synthetic oligonucleotide
auaggauacaggguggacg

SEQ ID NO: 358726 - RNA, 19 nt, Artificial Sequence
  Description of Artificial Sequence: Synthetic oligonucleotide
augcauggaaggaaaagcc

SEQ ID NO: 358727 - RNA, 19 nt, Artificial Sequence
  Description of Artificial Sequence: Synthetic oligonucleotide
ucuaacuccugccaaaauu

SEQ ID NO: 358728 - RNA, 19 nt, Artificial Sequence
  Description of Artificial Sequence: Synthetic oligonucleotide
agcagaaugaguuggccug

SEQ ID NO: 358729 - RNA, 19 nt, Artificial Sequence
  Description of Artificial Sequence: Synthetic oligonucleotide
uucccuuaacccucuaggg

SEQ ID NO: 358730 - RNA, 19 nt, Artificial Sequence
  Description of Artificial Sequence: Synthetic oligonucleotide
uggacauccaguaacucaa

SEQ ID NO: 358731 - RNA, 19 nt, Artificial Sequence
  Description of Artificial Sequence: Synthetic oligonucleotide
uuguaaccaggcaucagcc

SEQ ID NO: 358732 - RNA, 19 nt, Artificial Sequence
  Description of Artificial Sequence: Synthetic oligonucleotide
caaggaaauaaauccguac

SEQ ID NO: 358733 - RNA, 19 nt, Artificial Sequence
  Description of Artificial Sequence: Synthetic oligonucleotide
aaggguuuguucccucagg

SEQ ID NO: 358734 - RNA, 19 nt, Artificial Sequence
  Description of Artificial Sequence: Synthetic oligonucleotide
cagggcacgcuuuagaggc

SEQ ID NO: 358735 - RNA, 19 nt, Artificial Sequence
  Description of Artificial Sequence: Synthetic oligonucleotide
uaacuccccagaaggaagg

SEQ ID NO: 358736 - RNA, 19 nt, Artificial Sequence
  Description of Artificial Sequence: Synthetic oligonucleotide
cauaauaauguccaggucu

SEQ ID NO: 358737 - RNA, 19 nt, Artificial Sequence
  Description of Artificial Sequence: Synthetic oligonucleotide
caagccagcgcuuggaagc

SEQ ID NO: 358738 - RNA, 19 nt, Artificial Sequence
  Description of Artificial Sequence: Synthetic oligonucleotide
guggacgacaccuagccag

SEQ ID NO: 358739 - RNA, 19 nt, Artificial Sequence
  Description of Artificial Sequence: Synthetic oligonucleotide
uaacuccugccaaaauugg

SEQ ID NO: 358740 - RNA, 19 nt, Artificial Sequence
  Description of Artificial Sequence: Synthetic oligonucleotide
ugagggugagccaaggaac

SEQ ID NO: 358741 - RNA, 19 nt, Artificial Sequence
  Description of Artificial Sequence: Synthetic oligonucleotide
ugucauuauccaaggaacu

SEQ ID NO: 358742 - RNA, 19 nt, Artificial Sequence
  Description of Artificial Sequence: Synthetic oligonucleotide
agcuccaagcaccggaccc

SEQ ID NO: 358743 - RNA, 19 nt, Artificial Sequence
  Description of Artificial Sequence: Synthetic oligonucleotide
cccaccaaaacuuaugucc

SEQ ID NO: 358744 - RNA, 19 nt, Artificial Sequence
  Description of Artificial Sequence: Synthetic oligonucleotide
uuauguccaaggcauaaua

SEQ ID NO: 358745 - RNA, 19 nt, Artificial Sequence
  Description of Artificial Sequence: Synthetic oligonucleotide
ugcauggaaggaaaagcca

SEQ ID NO: 358746 - RNA, 19 nt, Artificial Sequence
  Description of Artificial Sequence: Synthetic oligonucleotide
uuauucuaacuccugccaa

SEQ ID NO: 358747 - RNA, 19 nt, Artificial Sequence
  Description of Artificial Sequence: Synthetic oligonucleotide
aacccuagcucuguuguuc

SEQ ID NO: 358748 - RNA, 19 nt, Artificial Sequence
  Description of Artificial Sequence: Synthetic oligonucleotide
gagacuaccuucucauccc

SEQ ID NO: 358749 - RNA, 19 nt, Artificial Sequence
  Description of Artificial Sequence: Synthetic oligonucleotide
agcguuuacaaaguuagcu

SEQ ID NO: 358750 - RNA, 19 nt, Artificial Sequence
  Description of Artificial Sequence: Synthetic oligonucleotide
aaauccguacgguucgccu

SEQ ID NO: 358751 - RNA, 19 nt, Artificial Sequence
  Description of Artificial Sequence: Synthetic oligonucleotide
ugcuguuagagggaggaag

SEQ ID NO: 358752 - RNA, 19 nt, Artificial Sequence
  Description of Artificial Sequence: Synthetic oligonucleotide
aagcaccggacccauucac

SEQ ID NO: 358753 - RNA, 19 nt, Artificial Sequence
  Description of Artificial Sequence: Synthetic oligonucleotide
aaaccacgaguacagaaua

SEQ ID NO: 358754 - RNA, 19 nt, Artificial Sequence
  Description of Artificial Sequence: Synthetic oligonucleotide
aaggcauaauaauguccag

SEQ ID NO: 358755 - RNA, 19 nt, Artificial Sequence
  Description of Artificial Sequence: Synthetic oligonucleotide
acuuaaaagcggcaaggga

SEQ ID NO: 358756 - RNA, 19 nt, Artificial Sequence
  Description of Artificial Sequence: Synthetic oligonucleotide
uguauagcaagugccagaa

SEQ ID NO: 358757 - RNA, 19 nt, Artificial Sequence
  Description of Artificial Sequence: Synthetic oligonucleotide
gacagcgugagccccaccc

SEQ ID NO: 358758 - RNA, 19 nt, Artificial Sequence
  Description of Artificial Sequence: Synthetic oligonucleotide
accggacccauucacauug

SEQ ID NO: 358759 - RNA, 19 nt, Artificial Sequence
  Description of Artificial Sequence: Synthetic oligonucleotide
aggcauaauaauguccagg

SEQ ID NO: 358760 - RNA, 19 nt, Artificial Sequence
  Description of Artificial Sequence: Synthetic oligonucleotide
acucaacagaauaaauagg

SEQ ID NO: 358761 - RNA, 19 nt, Artificial Sequence
  Description of Artificial Sequence: Synthetic oligonucleotide
auaauguccaggucugagu

SEQ ID NO: 358762 - RNA, 19 nt, Artificial Sequence
  Description of Artificial Sequence: Synthetic oligonucleotide
acaacccuagcucuguugu

SEQ ID NO: 358763 - RNA, 19 nt, Artificial Sequence
  Description of Artificial Sequence: Synthetic oligonucleotide
guuagcuaccuguacagga

SEQ ID NO: 358764 - RNA, 19 nt, Artificial Sequence
  Description of Artificial Sequence: Synthetic oligonucleotide
gaaugaguuggccugagcu

SEQ ID NO: 358765 - RNA, 19 nt, Artificial Sequence
  Description of Artificial Sequence: Synthetic oligonucleotide
agagggaauacacagcguu

SEQ ID NO: 358766 - RNA, 19 nt, Artificial Sequence
  Description of Artificial Sequence: Synthetic oligonucleotide
uuagcuaccuguacaggau

SEQ ID NO: 358767 - RNA, 19 nt, Artificial Sequence
  Description of Artificial Sequence: Synthetic oligonucleotide
acuagcuacccaauguggg

SEQ ID NO: 358768 - RNA, 19 nt, Artificial Sequence
  Description of Artificial Sequence: Synthetic oligonucleotide
aaagcggcaagggagggga

SEQ ID NO: 358769 - RNA, 19 nt, Artificial Sequence
  Description of Artificial Sequence: Synthetic oligonucleotide
cuguucaacuacacgguag

SEQ ID NO: 358770 - RNA, 19 nt, Artificial Sequence
  Description of Artificial Sequence: Synthetic oligonucleotide
aguaacucaacagaauaaa

SEQ ID NO: 358771 - RNA, 19 nt, Artificial Sequence
  Description of Artificial Sequence: Synthetic oligonucleotide
cuuaguccaguuccguggg

SEQ ID NO: 358772 - RNA, 19 nt, Artificial Sequence
  Description of Artificial Sequence: Synthetic oligonucleotide
gguucuacaacccuagcuc

SEQ ID NO: 358773 - RNA, 19 nt, Artificial Sequence
  Description of Artificial Sequence: Synthetic oligonucleotide
aaaaccaccuccccaccaa

SEQ ID NO: 358774 - RNA, 19 nt, Artificial Sequence
  Description of Artificial Sequence: Synthetic oligonucleotide
ucccuuaacccucuagggu

SEQ ID NO: 358775 - RNA, 19 nt, Artificial Sequence
  Description of Artificial Sequence: Synthetic oligonucleotide
agccacaaucagaacaacc

SEQ ID NO: 358776 - RNA, 19 nt, Artificial Sequence
  Description of Artificial Sequence: Synthetic oligonucleotide
auaacuggauccucugccu

SEQ ID NO: 358777 - RNA, 19 nt, Artificial Sequence
  Description of Artificial Sequence: Synthetic oligonucleotide
uccccaccaaaacuuaugu

SEQ ID NO: 358778 - RNA, 19 nt, Artificial Sequence
  Description of Artificial Sequence: Synthetic oligonucleotide
ugggaacucaggcugcccc

SEQ ID NO: 358779 - RNA, 19 nt, Artificial Sequence
  Description of Artificial Sequence: Synthetic oligonucleotide
gcuuaguccaguuccgugg

SEQ ID NO: 358780 - RNA, 19 nt, Artificial Sequence
  Description of Artificial Sequence: Synthetic oligonucleotide
acccuagcucuguuguucc

SEQ ID NO: 358781 - RNA, 19 nt, Artificial Sequence
  Description of Artificial Sequence: Synthetic oligonucleotide
cauuauccaaggaacucuc

SEQ ID NO: 358782 - RNA, 19 nt, Artificial Sequence
  Description of Artificial Sequence: Synthetic oligonucleotide
aaaagcggcaagggagggg

SEQ ID NO: 358783 - RNA, 19 nt, Artificial Sequence
  Description of Artificial Sequence: Synthetic oligonucleotide
gaaggguuuguucccucag

SEQ ID NO: 358784 - RNA, 19 nt, Artificial Sequence
  Description of Artificial Sequence: Synthetic oligonucleotide
uuaccuaacgggagaugca

SEQ ID NO: 358785 - RNA, 19 nt, Artificial Sequence
  Description of Artificial Sequence: Synthetic oligonucleotide
uaccuaacgggagaugcag

SEQ ID NO: 358786 - RNA, 19 nt, Artificial Sequence
  Description of Artificial Sequence: Synthetic oligonucleotide
guuuacaaaguuagcuacc

SEQ ID NO: 358787 - RNA, 19 nt, Artificial Sequence
  Description of Artificial Sequence: Synthetic oligonucleotide
acgacaccuagccagggug

SEQ ID NO: 358788 - RNA, 19 nt, Artificial Sequence
  Description of Artificial Sequence: Synthetic oligonucleotide
gggagugaugcauggaagg

SEQ ID NO: 358789 - RNA, 19 nt, Artificial Sequence
  Description of Artificial Sequence: Synthetic oligonucleotide
aacaaccccaggggaagac

SEQ ID NO: 358790 - RNA, 19 nt, Artificial Sequence
  Description of Artificial Sequence: Synthetic oligonucleotide
aaaccaaagccgccugggu

SEQ ID NO: 358791 - RNA, 19 nt, Artificial Sequence
  Description of Artificial Sequence: Synthetic oligonucleotide
uccaguaacucaacagaau

SEQ ID NO: 358792 - RNA, 19 nt, Artificial Sequence
  Description of Artificial Sequence: Synthetic oligonucleotide
cagucagcaggccaaguag

SEQ ID NO: 358793 - RNA, 19 nt, Artificial Sequence
  Description of Artificial Sequence: Synthetic oligonucleotide
ucuuacccagccugggcag

SEQ ID NO: 358794 - RNA, 19 nt, Artificial Sequence
  Description of Artificial Sequence: Synthetic oligonucleotide
auaacuccccagaaggaag

SEQ ID NO: 358795 - RNA, 19 nt, Artificial Sequence
  Description of Artificial Sequence: Synthetic oligonucleotide
cagacacaugauaggauac

SEQ ID NO: 358796 - RNA, 19 nt, Artificial Sequence
  Description of Artificial Sequence: Synthetic oligonucleotide
auguauagcaagugccaga

SEQ ID NO: 358797 - RNA, 19 nt, Artificial Sequence
  Description of Artificial Sequence: Synthetic oligonucleotide
uggauaaaccaguucccaa

SEQ ID NO: 358798 - RNA, 19 nt, Artificial Sequence
  Description of Artificial Sequence: Synthetic oligonucleotide
cauguauagcaagugccag

SEQ ID NO: 358799 - RNA, 19 nt, Artificial Sequence
  Description of Artificial Sequence: Synthetic oligonucleotide
ggauggauuacauaugcaa

SEQ ID NO: 358800 - RNA, 19 nt, Artificial Sequence
  Description of Artificial Sequence: Synthetic oligonucleotide
cuaccuucucaucccaccc

SEQ ID NO: 358801 - RNA, 19 nt, Artificial Sequence
  Description of Artificial Sequence: Synthetic oligonucleotide
uacaacccuagcucuguug

SEQ ID NO: 358802 - RNA, 19 nt, Artificial Sequence
  Description of Artificial Sequence: Synthetic oligonucleotide
uaaaagcggcaagggaggg

SEQ ID NO: 358803 - RNA, 19 nt, Artificial Sequence
  Description of Artificial Sequence: Synthetic oligonucleotide
gccacaaucagaacaaccc

SEQ ID NO: 358804 - RNA, 19 nt, Artificial Sequence
  Description of Artificial Sequence: Synthetic oligonucleotide
ucaugcuuccuugcagagg

SEQ ID NO: 358805 - RNA, 19 nt, Artificial Sequence
  Description of Artificial Sequence: Synthetic oligonucleotide
ugaaucggaaggugagaga

SEQ ID NO: 358806 - RNA, 19 nt, Artificial Sequence
  Description of Artificial Sequence: Synthetic oligonucleotide
gguuuguucccucaggguc

SEQ ID NO: 358807 - RNA, 19 nt, Artificial Sequence
  Description of Artificial Sequence: Synthetic oligonucleotide
caggguucuacaacccuag

SEQ ID NO: 358808 - RNA, 19 nt, Artificial Sequence
  Description of Artificial Sequence: Synthetic oligonucleotide
ggacauguauagcaagugc

SEQ ID NO: 358809 - RNA, 19 nt, Artificial Sequence
  Description of Artificial Sequence: Synthetic oligonucleotide
augauaggauacagggugg

SEQ ID NO: 358810 - RNA, 19 nt, Artificial Sequence
  Description of Artificial Sequence: Synthetic oligonucleotide
augugggaguggcuccucc

SEQ ID NO: 358811 - RNA, 19 nt, Artificial Sequence
  Description of Artificial Sequence: Synthetic oligonucleotide
aaucggaaggugagagauc

SEQ ID NO: 358812 - RNA, 19 nt, Artificial Sequence
  Description of Artificial Sequence: Synthetic oligonucleotide
cacauaacuggauccucug

SEQ ID NO: 358813 - RNA, 19 nt, Artificial Sequence
  Description of Artificial Sequence: Synthetic oligonucleotide
agucagcaggccaaguagg

SEQ ID NO: 358814 - RNA, 19 nt, Artificial Sequence
  Description of Artificial Sequence: Synthetic oligonucleotide
cacgaguacagaauaaaua

SEQ ID NO: 358815 - RNA, 19 nt, Artificial Sequence
  Description of Artificial Sequence: Synthetic oligonucleotide
aggguucuacaacccuagc

SEQ ID NO: 358816 - RNA, 19 nt, Artificial Sequence
  Description of Artificial Sequence: Synthetic oligonucleotide
ucuacaacccuagcucugu

SEQ ID NO: 358817 - RNA, 19 nt, Artificial Sequence
  Description of Artificial Sequence: Synthetic oligonucleotide
aguuagcuaccuguacagg

SEQ ID NO: 358818 - RNA, 19 nt, Artificial Sequence
  Description of Artificial Sequence: Synthetic oligonucleotide
uucuggacgcccaccucag

SEQ ID NO: 358819 - RNA, 19 nt, Artificial Sequence
  Description of Artificial Sequence: Synthetic oligonucleotide
cacccuacuccuagcaaag

SEQ ID NO: 358820 - RNA, 19 nt, Artificial Sequence
  Description of Artificial Sequence: Synthetic oligonucleotide
ugauaggauacagggugga

SEQ ID NO: 358821 - RNA, 19 nt, Artificial Sequence
  Description of Artificial Sequence: Synthetic oligonucleotide
cugauaggacucugcacac

SEQ ID NO: 358822 - RNA, 19 nt, Artificial Sequence
  Description of Artificial Sequence: Synthetic oligonucleotide
auacaggguggacgacacc

SEQ ID NO: 358823 - RNA, 19 nt, Artificial Sequence
  Description of Artificial Sequence: Synthetic oligonucleotide
uuuuaccuaacgggagaug

SEQ ID NO: 358824 - RNA, 19 nt, Artificial Sequence
  Description of Artificial Sequence: Synthetic oligonucleotide
ggcacccaacaacaaaagg

SEQ ID NO: 358825 - RNA, 19 nt, Artificial Sequence
  Description of Artificial Sequence: Synthetic oligonucleotide
gucauuauccaaggaacuc

SEQ ID NO: 358826 - RNA, 19 nt, Artificial Sequence
  Description of Artificial Sequence: Synthetic oligonucleotide
cguuuacaaaguuagcuac

SEQ ID NO: 358827 - RNA, 19 nt, Artificial Sequence
  Description of Artificial Sequence: Synthetic oligonucleotide
caucugauaggacucugca

SEQ ID NO: 358828 - RNA, 19 nt, Artificial Sequence
  Description of Artificial Sequence: Synthetic oligonucleotide
ggcauaauaauguccaggu

SEQ ID NO: 358829 - RNA, 19 nt, Artificial Sequence
  Description of Artificial Sequence: Synthetic oligonucleotide
cuggguacuagcuacccaa

SEQ ID NO: 358830 - RNA, 19 nt, Artificial Sequence
  Description of Artificial Sequence: Synthetic oligonucleotide
ccaaccuccgcugacaacc

SEQ ID NO: 358831 - RNA, 19 nt, Artificial Sequence
  Description of Artificial Sequence: Synthetic oligonucleotide
uaaauccguacgguucgcc

SEQ ID NO: 358832 - RNA, 19 nt, Artificial Sequence
  Description of Artificial Sequence: Synthetic oligonucleotide
auuuguaaccaggcaucag

SEQ ID NO: 358833 - RNA, 19 nt, Artificial Sequence
  Description of Artificial Sequence: Synthetic oligonucleotide
cucccucuaaccagaggag

SEQ ID NO: 358834 - RNA, 19 nt, Artificial Sequence
  Description of Artificial Sequence: Synthetic oligonucleotide
aagagaggggacauguaua

SEQ ID NO: 358835 - RNA, 19 nt, Artificial Sequence
  Description of Artificial Sequence: Synthetic oligonucleotide
uggaccaagcccaucucuu

SEQ ID NO: 358836 - RNA, 19 nt, Artificial Sequence
  Description of Artificial Sequence: Synthetic oligonucleotide
gaaucggaaggugagagau

SEQ ID NO: 358837 - RNA, 19 nt, Artificial Sequence
  Description of Artificial Sequence: Synthetic oligonucleotide
cuagcuacccaauguggga

SEQ ID NO: 358838 - RNA, 19 nt, Artificial Sequence
  Description of Artificial Sequence: Synthetic oligonucleotide
ggauaaaccaguucccaaa

SEQ ID NO: 358839 - RNA, 19 nt, Artificial Sequence
  Description of Artificial Sequence: Synthetic oligonucleotide
caacuacacgguagagggg

SEQ ID NO: 358840 - RNA, 19 nt, Artificial Sequence
  Description of Artificial Sequence: Synthetic oligonucleotide
cuguuagagggaggaaggg

SEQ ID NO: 358841 - RNA, 19 nt, Artificial Sequence
  Description of Artificial Sequence: Synthetic oligonucleotide
ggggcacauaacuggaucc

SEQ ID NO: 358842 - RNA, 19 nt, Artificial Sequence
  Description of Artificial Sequence: Synthetic oligonucleotide
aggaacaauagggaaguuu

SEQ ID NO: 358843 - RNA, 19 nt, Artificial Sequence
  Description of Artificial Sequence: Synthetic oligonucleotide
gagccgucccacugaagcc

SEQ ID NO: 358844 - RNA, 19 nt, Artificial Sequence
  Description of Artificial Sequence: Synthetic oligonucleotide
cuagccccuguucaacuac

SEQ ID NO: 358845 - RNA, 19 nt, Artificial Sequence
  Description of Artificial Sequence: Synthetic oligonucleotide
gauaggauacaggguggac

SEQ ID NO: 358846 - RNA, 19 nt, Artificial Sequence
  Description of Artificial Sequence: Synthetic oligonucleotide
ccaugaaucggaaggugag

SEQ ID NO: 358847 - RNA, 19 nt, Artificial Sequence
  Description of Artificial Sequence: Synthetic oligonucleotide
auaaguccaaccaguccug

SEQ ID NO: 358848 - RNA, 19 nt, Artificial Sequence
  Description of Artificial Sequence: Synthetic oligonucleotide
uguagaggcuggaggcccu

SEQ ID NO: 358849 - RNA, 19 nt, Artificial Sequence
  Description of Artificial Sequence: Synthetic oligonucleotide
ucccucuaaccagaggaga

SEQ ID NO: 358850 - RNA, 19 nt, Artificial Sequence
  Description of Artificial Sequence: Synthetic oligonucleotide
gcccaaggaaauaaauccg

SEQ ID NO: 358851 - RNA, 19 nt, Artificial Sequence
  Description of Artificial Sequence: Synthetic oligonucleotide
uuacccagccugggcaggg

SEQ ID NO: 358852 - RNA, 19 nt, Artificial Sequence
  Description of Artificial Sequence: Synthetic oligonucleotide
aaccaguccuggguacuag

SEQ ID NO: 358853 - RNA, 19 nt, Artificial Sequence
  Description of Artificial Sequence: Synthetic oligonucleotide
ccacaaucagaacaacccc

SEQ ID NO: 358854 - RNA, 19 nt, Artificial Sequence
  Description of Artificial Sequence: Synthetic oligonucleotide
ugugggaguggcuccuccu

SEQ ID NO: 358855 - RNA, 19 nt, Artificial Sequence
  Description of Artificial Sequence: Synthetic oligonucleotide
auccguacgguucgccucu

SEQ ID NO: 358856 - RNA, 19 nt, Artificial Sequence
  Description of Artificial Sequence: Synthetic oligonucleotide
accacgaguacagaauaaa

SEQ ID NO: 358857 - RNA, 19 nt, Artificial Sequence
  Description of Artificial Sequence: Synthetic oligonucleotide
uccuagccccuguucaacu

SEQ ID NO: 358858 - RNA, 19 nt, Artificial Sequence
  Description of Artificial Sequence: Synthetic oligonucleotide
gccauggaaauuaguacag

SEQ ID NO: 358859 - RNA, 19 nt, Artificial Sequence
  Description of Artificial Sequence: Synthetic oligonucleotide
gguacuagcuacccaaugu

SEQ ID NO: 358860 - RNA, 19 nt, Artificial Sequence
  Description of Artificial Sequence: Synthetic oligonucleotide
ugauaggacucugcacaca

SEQ ID NO: 358861 - RNA, 19 nt, Artificial Sequence
  Description of Artificial Sequence: Synthetic oligonucleotide
gugaggcaguucuggacgc

SEQ ID NO: 358862 - RNA, 19 nt, Artificial Sequence
  Description of Artificial Sequence: Synthetic oligonucleotide
guucaacuacacgguagag

SEQ ID NO: 358863 - RNA, 19 nt, Artificial Sequence
  Description of Artificial Sequence: Synthetic oligonucleotide
gagagaucagaagagccgu

SEQ ID NO: 358864 - RNA, 19 nt, Artificial Sequence
  Description of Artificial Sequence: Synthetic oligonucleotide
agggaauacacagcguuua

SEQ ID NO: 358865 - RNA, 19 nt, Artificial Sequence
  Description of Artificial Sequence: Synthetic oligonucleotide
gggucccuaacccaaauaa

SEQ ID NO: 358866 - RNA, 19 nt, Artificial Sequence
  Description of Artificial Sequence: Synthetic oligonucleotide
ucggaaggugagagaucag

SEQ ID NO: 358867 - RNA, 19 nt, Artificial Sequence
  Description of Artificial Sequence: Synthetic oligonucleotide
aggguggacgacaccuagc

SEQ ID NO: 358868 - RNA, 19 nt, Artificial Sequence
  Description of Artificial Sequence: Synthetic oligonucleotide
aggaaccaaagcuggucaa

SEQ ID NO: 358869 - RNA, 19 nt, Artificial Sequence
  Description of Artificial Sequence: Synthetic oligonucleotide
caaggaacaauagggaagu

SEQ ID NO: 358870 - RNA, 19 nt, Artificial Sequence
  Description of Artificial Sequence: Synthetic oligonucleotide
agcggcaagggaggggaac

SEQ ID NO: 358871 - RNA, 19 nt, Artificial Sequence
  Description of Artificial Sequence: Synthetic oligonucleotide
caccgucccucucaccugg

SEQ ID NO: 358872 - RNA, 19 nt, Artificial Sequence
  Description of Artificial Sequence: Synthetic oligonucleotide
gucccuaacccaaauaagu

SEQ ID NO: 358873 - RNA, 19 nt, Artificial Sequence
  Description of Artificial Sequence: Synthetic oligonucleotide
caaaccacgaguacagaau

SEQ ID NO: 358874 - RNA, 19 nt, Artificial Sequence
  Description of Artificial Sequence: Synthetic oligonucleotide
agcaagugccagaaaacau

SEQ ID NO: 358875 - RNA, 19 nt, Artificial Sequence
  Description of Artificial Sequence: Synthetic oligonucleotide
agggcuuaguccaguuccg

SEQ ID NO: 358876 - RNA, 19 nt, Artificial Sequence
  Description of Artificial Sequence: Synthetic oligonucleotide
ggaaccaaagcuggucaag

SEQ ID NO: 358877 - RNA, 19 nt, Artificial Sequence
  Description of Artificial Sequence: Synthetic oligonucleotide
uggguacuagcuacccaau

SEQ ID NO: 358878 - RNA, 19 nt, Artificial Sequence
  Description of Artificial Sequence: Synthetic oligonucleotide
gacagcacucugccugcug

SEQ ID NO: 358879 - RNA, 19 nt, Artificial Sequence
  Description of Artificial Sequence: Synthetic oligonucleotide
ccaaacuacucccucuaac

SEQ ID NO: 358880 - RNA, 19 nt, Artificial Sequence
  Description of Artificial Sequence: Synthetic oligonucleotide
caaccuccgcugacaaccc

SEQ ID NO: 358881 - RNA, 19 nt, Artificial Sequence
  Description of Artificial Sequence: Synthetic oligonucleotide
cgaguacagaauaaauaac

SEQ ID NO: 358882 - RNA, 19 nt, Artificial Sequence
  Description of Artificial Sequence: Synthetic oligonucleotide
ggucccuaacccaaauaag

SEQ ID NO: 358883 - RNA, 19 nt, Artificial Sequence
  Description of Artificial Sequence: Synthetic oligonucleotide
gaagagccgucccacugaa

SEQ ID NO: 358884 - RNA, 19 nt, Artificial Sequence
  Description of Artificial Sequence: Synthetic oligonucleotide
aacccucuagggucccuaa

SEQ ID NO: 358885 - RNA, 19 nt, Artificial Sequence
  Description of Artificial Sequence: Synthetic oligonucleotide
cuacccaaugugggagugg

SEQ ID NO: 358886 - RNA, 19 nt, Artificial Sequence
  Description of Artificial Sequence: Synthetic oligonucleotide
cuacucccucuaaccagag

SEQ ID NO: 358887 - RNA, 19 nt, Artificial Sequence
  Description of Artificial Sequence: Synthetic oligonucleotide
ccuuaacccucuagggucc

SEQ ID NO: 358888 - RNA, 19 nt, Artificial Sequence
  Description of Artificial Sequence: Synthetic oligonucleotide
ccucuagggucccuaaccc

SEQ ID NO: 358889 - RNA, 19 nt, Artificial Sequence
  Description of Artificial Sequence: Synthetic oligonucleotide
ggaacaauagggaaguuuu

SEQ ID NO: 358890 - RNA, 19 nt, Artificial Sequence
  Description of Artificial Sequence: Synthetic oligonucleotide
uuccuagccccuguucaac

SEQ ID NO: 358891 - RNA, 19 nt, Artificial Sequence
  Description of Artificial Sequence: Synthetic oligonucleotide
ccaagcccaucucuuaccc

SEQ ID NO: 358892 - RNA, 19 nt, Artificial Sequence
  Description of Artificial Sequence: Synthetic oligonucleotide
ggcuuaguccaguuccgug

SEQ ID NO: 358893 - RNA, 19 nt, Artificial Sequence
  Description of Artificial Sequence: Synthetic oligonucleotide
gcguuuacaaaguuagcua

SEQ ID NO: 358894 - RNA, 19 nt, Artificial Sequence
  Description of Artificial Sequence: Synthetic oligonucleotide
ucuggacgcccaccucagc

SEQ ID NO: 358895 - RNA, 19 nt, Artificial Sequence
  Description of Artificial Sequence: Synthetic oligonucleotide
cuuacccagccugggcagg

SEQ ID NO: 358896 - RNA, 19 nt, Artificial Sequence
  Description of Artificial Sequence: Synthetic oligonucleotide
ccuacuccuagcaaaggga

SEQ ID NO: 358897 - RNA, 19 nt, Artificial Sequence
  Description of Artificial Sequence: Synthetic oligonucleotide
ccaaugugggaguggcucc

SEQ ID NO: 358898 - RNA, 19 nt, Artificial Sequence
  Description of Artificial Sequence: Synthetic oligonucleotide
ugaccccggggacugggaa

SEQ ID NO: 358899 - RNA, 19 nt, Artificial Sequence
  Description of Artificial Sequence: Synthetic oligonucleotide
ggaauacacagcguuuaca

SEQ ID NO: 358900 - RNA, 19 nt, Artificial Sequence
  Description of Artificial Sequence: Synthetic oligonucleotide
gcauaauaauguccagguc

SEQ ID NO: 358901 - RNA, 19 nt, Artificial Sequence
  Description of Artificial Sequence: Synthetic oligonucleotide
ggguacuagcuacccaaug

SEQ ID NO: 358902 - RNA, 19 nt, Artificial Sequence
  Description of Artificial Sequence: Synthetic oligonucleotide
accuccgcugacaacccag

SEQ ID NO: 358903 - RNA, 19 nt, Artificial Sequence
  Description of Artificial Sequence: Synthetic oligonucleotide
gggaauacacagcguuuac

SEQ ID NO: 358904 - RNA, 19 nt, Artificial Sequence
  Description of Artificial Sequence: Synthetic oligonucleotide
uccaaccuccgcugacaac

SEQ ID NO: 358905 - RNA, 19 nt, Artificial Sequence
  Description of Artificial Sequence: Synthetic oligonucleotide
agccgucccacugaagccu

SEQ ID NO: 358906 - RNA, 19 nt, Artificial Sequence
  Description of Artificial Sequence: Synthetic oligonucleotide
acacagcguuuacaaaguu

SEQ ID NO: 358907 - RNA, 19 nt, Artificial Sequence
  Description of Artificial Sequence: Synthetic oligonucleotide
acaggguucuacaacccua

SEQ ID NO: 358908 - RNA, 19 nt, Artificial Sequence
  Description of Artificial Sequence: Synthetic oligonucleotide
gaccccggggacugggaac

SEQ ID NO: 358909 - RNA, 19 nt, Artificial Sequence
  Description of Artificial Sequence: Synthetic oligonucleotide
acaccuagccagggugggg

SEQ ID NO: 358910 - RNA, 19 nt, Artificial Sequence
  Description of Artificial Sequence: Synthetic oligonucleotide
guuccuagccccuguucaa

SEQ ID NO: 358911 - RNA, 19 nt, Artificial Sequence
  Description of Artificial Sequence: Synthetic oligonucleotide
gggagggugaacacagggc

SEQ ID NO: 358912 - RNA, 19 nt, Artificial Sequence
  Description of Artificial Sequence: Synthetic oligonucleotide
cuuaacccucuaggguccc

SEQ ID NO: 358913 - RNA, 19 nt, Artificial Sequence
  Description of Artificial Sequence: Synthetic oligonucleotide
gacuaccuucucaucccac

SEQ ID NO: 358914 - RNA, 19 nt, Artificial Sequence
  Description of Artificial Sequence: Synthetic oligonucleotide
ugacaacccagggcagaga

SEQ ID NO: 358915 - RNA, 19 nt, Artificial Sequence
  Description of Artificial Sequence: Synthetic oligonucleotide
acgccgaggggucaugcuu

SEQ ID NO: 358916 - RNA, 19 nt, Artificial Sequence
  Description of Artificial Sequence: Synthetic oligonucleotide
agggucccuaacccaaaua

SEQ ID NO: 358917 - RNA, 19 nt, Artificial Sequence
  Description of Artificial Sequence: Synthetic oligonucleotide
ucaucccacccuacuccua

SEQ ID NO: 358918 - RNA, 19 nt, Artificial Sequence
  Description of Artificial Sequence: Synthetic oligonucleotide
aagagccgucccacugaag

SEQ ID NO: 358919 - RNA, 19 nt, Artificial Sequence
  Description of Artificial Sequence: Synthetic oligonucleotide
uaacccucuagggucccua

SEQ ID NO: 358920 - RNA, 19 nt, Artificial Sequence
  Description of Artificial Sequence: Synthetic oligonucleotide
ccaaaccacgaguacagaa

SEQ ID NO: 358921 - RNA, 19 nt, Artificial Sequence
  Description of Artificial Sequence: Synthetic oligonucleotide
cccaugaaucggaagguga

SEQ ID NO: 358922 - RNA, 19 nt, Artificial Sequence
  Description of Artificial Sequence: Synthetic oligonucleotide
aaggaacaauagggaaguu

SEQ ID NO: 358923 - RNA, 19 nt, Artificial Sequence
  Description of Artificial Sequence: Synthetic oligonucleotide
accccggggacugggaaca

SEQ ID NO: 358924 - RNA, 19 nt, Artificial Sequence
  Description of Artificial Sequence: Synthetic oligonucleotide
ggaacagggcacgcuuuag

SEQ ID NO: 358925 - RNA, 19 nt, Artificial Sequence
  Description of Artificial Sequence: Synthetic oligonucleotide
uuaacccucuagggucccu

SEQ ID NO: 358926 - RNA, 19 nt, Artificial Sequence
  Description of Artificial Sequence: Synthetic oligonucleotide
caagcaccggacccauuca

SEQ ID NO: 358927 - RNA, 19 nt, Artificial Sequence
  Description of Artificial Sequence: Synthetic oligonucleotide
guccaaccaguccugggua

SEQ ID NO: 358928 - RNA, 19 nt, Artificial Sequence
  Description of Artificial Sequence: Synthetic oligonucleotide
gaacaaccccaggggaaga

SEQ ID NO: 358929 - RNA, 19 nt, Artificial Sequence
  Description of Artificial Sequence: Synthetic oligonucleotide
caccggccauggaaauuag

SEQ ID NO: 358930 - RNA, 19 nt, Artificial Sequence
  Description of Artificial Sequence: Synthetic oligonucleotide
ccggccauggaaauuagua

SEQ ID NO: 358931 - RNA, 19 nt, Artificial Sequence
  Description of Artificial Sequence: Synthetic oligonucleotide
gggcacgcuuuagaggcgg

SEQ ID NO: 358932 - RNA, 19 nt, Artificial Sequence
  Description of Artificial Sequence: Synthetic oligonucleotide
gacgacaccuagccagggu

SEQ ID NO: 358933 - RNA, 19 nt, Artificial Sequence
  Description of Artificial Sequence: Synthetic oligonucleotide
accuaacgggagaugcagu

SEQ ID NO: 358934 - RNA, 19 nt, Artificial Sequence
  Description of Artificial Sequence: Synthetic oligonucleotide
ccuccgcugacaacccagg

SEQ ID NO: 358935 - RNA, 19 nt, Artificial Sequence
  Description of Artificial Sequence: Synthetic oligonucleotide
cgacaccuagccagggugg

SEQ ID NO: 358936 - RNA, 19 nt, Artificial Sequence
  Description of Artificial Sequence: Synthetic oligonucleotide
cuuuagaggcgggagcacu

SEQ ID NO: 358937 - RNA, 19 nt, Artificial Sequence
  Description of Artificial Sequence: Synthetic oligonucleotide
agcacccauccaaccuccg

SEQ ID NO: 358938 - RNA, 19 nt, Artificial Sequence
  Description of Artificial Sequence: Synthetic oligonucleotide
ggccaaguaggugggugcc

SEQ ID NO: 358939 - RNA, 19 nt, Artificial Sequence
  Description of Artificial Sequence: Synthetic oligonucleotide
ccaaggaaauaaauccgua

SEQ ID NO: 358940 - RNA, 19 nt, Artificial Sequence
  Description of Artificial Sequence: Synthetic oligonucleotide
cccaaggaaauaaauccgu

SEQ ID NO: 358941 - RNA, 19 nt, Artificial Sequence
  Description of Artificial Sequence: Synthetic oligonucleotide
gcuacccaaugugggagug

SEQ ID NO: 358942 - RNA, 19 nt, Artificial Sequence
  Description of Artificial Sequence: Synthetic oligonucleotide
cucaucccacccuacuccu

SEQ ID NO: 358943 - RNA, 19 nt, Artificial Sequence
  Description of Artificial Sequence: Synthetic oligonucleotide
cuggaccaagcccaucucu

SEQ ID NO: 358944 - RNA, 19 nt, Artificial Sequence
  Description of Artificial Sequence: Synthetic oligonucleotide
gcauaacuccccagaagga

SEQ ID NO: 358945 - RNA, 19 nt, Artificial Sequence
  Description of Artificial Sequence: Synthetic oligonucleotide
agggugagccaaggaacaa

SEQ ID NO: 358946 - RNA, 19 nt, Artificial Sequence
  Description of Artificial Sequence: Synthetic oligonucleotide
gagcacugagaggaaccaa

SEQ ID NO: 358947 - RNA, 19 nt, Artificial Sequence
  Description of Artificial Sequence: Synthetic oligonucleotide
gagggaauacacagcguuu

SEQ ID NO: 358948 - RNA, 19 nt, Artificial Sequence
  Description of Artificial Sequence: Synthetic oligonucleotide
caguccuggguacuagcua

SEQ ID NO: 358949 - RNA, 19 nt, Artificial Sequence
  Description of Artificial Sequence: Synthetic oligonucleotide
gguggacgacaccuagcca

SEQ ID NO: 358950 - RNA, 19 nt, Artificial Sequence
  Description of Artificial Sequence: Synthetic oligonucleotide
caggacagcgugagcccca

SEQ ID NO: 358951 - RNA, 19 nt, Artificial Sequence
  Description of Artificial Sequence: Synthetic oligonucleotide
cccauggggacugagggga

SEQ ID NO: 358952 - RNA, 19 nt, Artificial Sequence
  Description of Artificial Sequence: Synthetic oligonucleotide
cuuauguccaaggcauaau

SEQ ID NO: 358953 - RNA, 19 nt, Artificial Sequence
  Description of Artificial Sequence: Synthetic oligonucleotide
ccccaccaaaacuuauguc

SEQ ID NO: 358954 - RNA, 19 nt, Artificial Sequence
  Description of Artificial Sequence: Synthetic oligonucleotide
cccucuaaccagaggagaa

SEQ ID NO: 358955 - RNA, 19 nt, Artificial Sequence
  Description of Artificial Sequence: Synthetic oligonucleotide
ccaaaauugguuugacuuu

SEQ ID NO: 358956 - RNA, 19 nt, Artificial Sequence
  Description of Artificial Sequence: Synthetic oligonucleotide
ggaccaagcccaucucuua

SEQ ID NO: 358957 - RNA, 19 nt, Artificial Sequence
  Description of Artificial Sequence: Synthetic oligonucleotide
gcagcaccgucccucucac

SEQ ID NO: 358958 - RNA, 19 nt, Artificial Sequence
  Description of Artificial Sequence: Synthetic oligonucleotide
ugcacgccgaggggucaug

SEQ ID NO: 358959 - RNA, 19 nt, Artificial Sequence
  Description of Artificial Sequence: Synthetic oligonucleotide
accggccauggaaauuagu

SEQ ID NO: 358960 - RNA, 19 nt, Artificial Sequence
  Description of Artificial Sequence: Synthetic oligonucleotide
gcucccaagccagcgcuug

SEQ ID NO: 358961 - RNA, 19 nt, Artificial Sequence
  Description of Artificial Sequence: Synthetic oligonucleotide
gcagaaugaguuggccuga

SEQ ID NO: 358962 - RNA, 19 nt, Artificial Sequence
  Description of Artificial Sequence: Synthetic oligonucleotide
gccgaggggucaugcuucc

SEQ ID NO: 358963 - RNA, 19 nt, Artificial Sequence
  Description of Artificial Sequence: Synthetic oligonucleotide
gcacauaacuggauccucu

SEQ ID NO: 358964 - RNA, 19 nt, Artificial Sequence
  Description of Artificial Sequence: Synthetic oligonucleotide
gggacugggaacaucugau

SEQ ID NO: 358965 - RNA, 19 nt, Artificial Sequence
  Description of Artificial Sequence: Synthetic oligonucleotide
gccaaguaggugggugccc

SEQ ID NO: 358966 - RNA, 19 nt, Artificial Sequence
  Description of Artificial Sequence: Synthetic oligonucleotide
gcuuuagaggcgggagcac

SEQ ID NO: 358967 - RNA, 19 nt, Artificial Sequence
  Description of Artificial Sequence: Synthetic oligonucleotide
ggcacgcuuuagaggcggg

SEQ ID NO: 358968 - RNA, 19 nt, Artificial Sequence
  Description of Artificial Sequence: Synthetic oligonucleotide
acccaaugugggaguggcu

SEQ ID NO: 358969 - RNA, 19 nt, Artificial Sequence
  Description of Artificial Sequence: Synthetic oligonucleotide
ggucaaccccaucccuguc

SEQ ID NO: 358970 - RNA, 19 nt, Artificial Sequence
  Description of Artificial Sequence: Synthetic oligonucleotide
caaugugggaguggcuccu

SEQ ID NO: 358971 - RNA, 19 nt, Artificial Sequence
  Description of Artificial Sequence: Synthetic oligonucleotide
gcggcaagggaggggaaca

SEQ ID NO: 358972 - RNA, 19 nt, Artificial Sequence
  Description of Artificial Sequence: Synthetic oligonucleotide
ccacgaguacagaauaaau

SEQ ID NO: 358973 - RNA, 19 nt, Artificial Sequence
  Description of Artificial Sequence: Synthetic oligonucleotide
ccuguacaggauggauuac

SEQ ID NO: 358974 - RNA, 19 nt, Artificial Sequence
  Description of Artificial Sequence: Synthetic oligonucleotide
ggggaguuccuagccccug

SEQ ID NO: 358975 - RNA, 19 nt, Artificial Sequence
  Description of Artificial Sequence: Synthetic oligonucleotide
ccggacccauucacauugc

SEQ ID NO: 358976 - RNA, 19 nt, Artificial Sequence
  Description of Artificial Sequence: Synthetic oligonucleotide
ccucucaccugggcugucc

SEQ ID NO: 358977 - RNA, 19 nt, Artificial Sequence
  Description of Artificial Sequence: Synthetic oligonucleotide
caaccaguccuggguacua

SEQ ID NO: 358978 - RNA, 19 nt, Artificial Sequence
  Description of Artificial Sequence: Synthetic oligonucleotide
ccuaacgggagaugcaguu

SEQ ID NO: 358979 - RNA, 19 nt, Artificial Sequence
  Description of Artificial Sequence: Synthetic oligonucleotide
ccggggacugggaacaucu

SEQ ID NO: 358980 - RNA, 19 nt, Artificial Sequence
  Description of Artificial Sequence: Synthetic oligonucleotide
gggugaacacagggccacc

SEQ ID NO: 358981 - RNA, 19 nt, Artificial Sequence
  Description of Artificial Sequence: Synthetic oligonucleotide
cgcuuuagaggcgggagca

SEQ ID NO: 358982 - RNA, 19 nt, Artificial Sequence
  Description of Artificial Sequence: Synthetic oligonucleotide
ccaccggccauggaaauua

SEQ ID NO: 358983 - RNA, 19 nt, Artificial Sequence
  Description of Artificial Sequence: Synthetic oligonucleotide
gggccggcuuccccugacc

SEQ ID NO: 358984 - RNA, 19 nt, Artificial Sequence
  Description of Artificial Sequence: Synthetic oligonucleotide
gggaguuccuagccccugu

SEQ ID NO: 358985 - RNA, 19 nt, Artificial Sequence
  Description of Artificial Sequence: Synthetic oligonucleotide
ggugcccuggcaugacagu

SEQ ID NO: 358986 - RNA, 19 nt, Artificial Sequence
  Description of Artificial Sequence: Synthetic oligonucleotide
cugcuguuagagggaggaa

SEQ ID NO: 358987 - RNA, 19 nt, Artificial Sequence
  Description of Artificial Sequence: Synthetic oligonucleotide
gcacgccgaggggucaugc

SEQ ID NO: 358988 - RNA, 19 nt, Artificial Sequence
  Description of Artificial Sequence: Synthetic oligonucleotide
ccuagccccuguucaacua

SEQ ID NO: 358989 - RNA, 19 nt, Artificial Sequence
  Description of Artificial Sequence: Synthetic oligonucleotide
caacccuagcucuguuguu

SEQ ID NO: 358990 - RNA, 19 nt, Artificial Sequence
  Description of Artificial Sequence: Synthetic oligonucleotide
gggugagccaaggaacaau

SEQ ID NO: 358991 - RNA, 19 nt, Artificial Sequence
  Description of Artificial Sequence: Synthetic oligonucleotide
cccaaacuacucccucuaa

SEQ ID NO: 358992 - RNA, 19 nt, Artificial Sequence
  Description of Artificial Sequence: Synthetic oligonucleotide
ggaguuccuagccccuguu

SEQ ID NO: 358993 - RNA, 19 nt, Artificial Sequence
  Description of Artificial Sequence: Synthetic oligonucleotide
ccaaguaggugggugcccu

SEQ ID NO: 358994 - RNA, 19 nt, Artificial Sequence
  Description of Artificial Sequence: Synthetic oligonucleotide
caccggacccauucacauu

SEQ ID NO: 358995 - RNA, 19 nt, Artificial Sequence
  Description of Artificial Sequence: Synthetic oligonucleotide
cugggccggcuuccccuga

SEQ ID NO: 358996 - RNA, 19 nt, Artificial Sequence
  Description of Artificial Sequence: Synthetic oligonucleotide
gccuagcuggacauccagu

SEQ ID NO: 358997 - RNA, 19 nt, Artificial Sequence
  Description of Artificial Sequence: Synthetic oligonucleotide
gggcuuaguccaguuccgu

SEQ ID NO: 358998 - RNA, 19 nt, Artificial Sequence
  Description of Artificial Sequence: Synthetic oligonucleotide
ggggaagacugggguucca

SEQ ID NO: 358999 - RNA, 19 nt, Artificial Sequence
  Description of Artificial Sequence: Synthetic oligonucleotide
ccagaaggaaggguuuguu

SEQ ID NO: 359000 - RNA, 19 nt, Artificial Sequence
  Description of Artificial Sequence: Synthetic oligonucleotide
ccugcacgccgagggguca

SEQ ID NO: 359001 - RNA, 19 nt, Artificial Sequence
  Description of Artificial Sequence: Synthetic oligonucleotide
gccggcuuccccugaccuu

SEQ ID NO: 359002 - RNA, 19 nt, Artificial Sequence
  Description of Artificial Sequence: Synthetic oligonucleotide
cguacgguucgccucuguu

SEQ ID NO: 359003 - RNA, 19 nt, Artificial Sequence
  Description of Artificial Sequence: Synthetic oligonucleotide
cugcacgccgaggggucau

SEQ ID NO: 359004 - RNA, 19 nt, Artificial Sequence
  Description of Artificial Sequence: Synthetic oligonucleotide
cggacccauucacauugcu

SEQ ID NO: 359005 - RNA, 19 nt, Artificial Sequence
  Description of Artificial Sequence: Synthetic oligonucleotide
ccguacgguucgccucugu

SEQ ID NO: 359006 - RNA, 19 nt, Artificial Sequence
  Description of Artificial Sequence: Synthetic oligonucleotide
ccgaggggucaugcuuccu

SEQ ID NO: 359007 - RNA, 19 nt, Artificial Sequence
  Description of Artificial Sequence: Synthetic oligonucleotide
ccccucggcagggcuuagu

SEQ ID NO: 359008 - RNA, 19 nt, Artificial Sequence
  Description of Artificial Sequence: Synthetic oligonucleotide
ccccggggacugggaacau

SEQ ID NO: 359009 - RNA, 19 nt, Artificial Sequence
  Description of Artificial Sequence: Synthetic oligonucleotide
aaaucuggaauguauagcc

SEQ ID NO: 359010 - RNA, 19 nt, Artificial Sequence
  Description of Artificial Sequence: Synthetic oligonucleotide
aauacuaaagcuuuuccac

SEQ ID NO: 359011 - RNA, 19 nt, Artificial Sequence
  Description of Artificial Sequence: Synthetic oligonucleotide
aauucuaucauccacucuc

SEQ ID NO: 359012 - RNA, 19 nt, Artificial Sequence
  Description of Artificial Sequence: Synthetic oligonucleotide
aaagcuauaaagaagguag

SEQ ID NO: 359013 - RNA, 19 nt, Artificial Sequence
  Description of Artificial Sequence: Synthetic oligonucleotide
cauauagugaacaagagac

SEQ ID NO: 359014 - RNA, 19 nt, Artificial Sequence
  Description of Artificial Sequence: Synthetic oligonucleotide
ucuuaugccacucagagga

SEQ ID NO: 359015 - RNA, 19 nt, Artificial Sequence
  Description of Artificial Sequence: Synthetic oligonucleotide
aaaucuuacugcuuggcac

SEQ ID NO: 359016 - RNA, 19 nt, Artificial Sequence
  Description of Artificial Sequence: Synthetic oligonucleotide
agcuguauaguccaaaacc

SEQ ID NO: 359017 - RNA, 19 nt, Artificial Sequence
  Description of Artificial Sequence: Synthetic oligonucleotide
accacuauuccauaaaggc

SEQ ID NO: 359018 - RNA, 19 nt, Artificial Sequence
  Description of Artificial Sequence: Synthetic oligonucleotide
cuaacgacaaucuagacug

SEQ ID NO: 359019 - RNA, 19 nt, Artificial Sequence
  Description of Artificial Sequence: Synthetic oligonucleotide
aagucuaaggaauucacag

SEQ ID NO: 359020 - RNA, 19 nt, Artificial Sequence
  Description of Artificial Sequence: Synthetic oligonucleotide
aaaaccaaguaugagcccc

SEQ ID NO: 359021 - RNA, 19 nt, Artificial Sequence
  Description of Artificial Sequence: Synthetic oligonucleotide
uguauguacaagcaaauca

SEQ ID NO: 359022 - RNA, 19 nt, Artificial Sequence
  Description of Artificial Sequence: Synthetic oligonucleotide
aaauuuguccauuuucaag

SEQ ID NO: 359023 - RNA, 19 nt, Artificial Sequence
  Description of Artificial Sequence: Synthetic oligonucleotide
auuaggaauuaucuguagc

SEQ ID NO: 359024 - RNA, 19 nt, Artificial Sequence
  Description of Artificial Sequence: Synthetic oligonucleotide
uuaggaauuaagacaaugc

SEQ ID NO: 359025 - RNA, 19 nt, Artificial Sequence
  Description of Artificial Sequence: Synthetic oligonucleotide
cuucuggacaucaagaccg

SEQ ID NO: 359026 - RNA, 19 nt, Artificial Sequence
  Description of Artificial Sequence: Synthetic oligonucleotide
aauacauauagugaacaag

SEQ ID NO: 359027 - RNA, 19 nt, Artificial Sequence
  Description of Artificial Sequence: Synthetic oligonucleotide
ugucuuaugccacucagag

SEQ ID NO: 359028 - RNA, 19 nt, Artificial Sequence
  Description of Artificial Sequence: Synthetic oligonucleotide
aucagaacagaacuugggc

SEQ ID NO: 359029 - RNA, 19 nt, Artificial Sequence
  Description of Artificial Sequence: Synthetic oligonucleotide
aaacacaacagugauacug

SEQ ID NO: 359030 - RNA, 19 nt, Artificial Sequence
  Description of Artificial Sequence: Synthetic oligonucleotide
ugauaaaccguccacucag

SEQ ID NO: 359031 - RNA, 19 nt, Artificial Sequence
  Description of Artificial Sequence: Synthetic oligonucleotide
aacgccuaaacucaccauc

SEQ ID NO: 359032 - RNA, 19 nt, Artificial Sequence
  Description of Artificial Sequence: Synthetic oligonucleotide
ucacuuacgaaguuuauga

SEQ ID NO: 359033 - RNA, 19 nt, Artificial Sequence
  Description of Artificial Sequence: Synthetic oligonucleotide
aacuguccaaccuaacgac

SEQ ID NO: 359034 - RNA, 19 nt, Artificial Sequence
  Description of Artificial Sequence: Synthetic oligonucleotide
cauucugagagucaugugg

SEQ ID NO: 359035 - RNA, 19 nt, Artificial Sequence
  Description of Artificial Sequence: Synthetic oligonucleotide
auauacugacuauaaaauc

SEQ ID NO: 359036 - RNA, 19 nt, Artificial Sequence
  Description of Artificial Sequence: Synthetic oligonucleotide
uauccuagauguaauaugu

SEQ ID NO: 359037 - RNA, 19 nt, Artificial Sequence
  Description of Artificial Sequence: Synthetic oligonucleotide
aaauuaagcuuugaauuuc

SEQ ID NO: 359038 - RNA, 19 nt, Artificial Sequence
  Description of Artificial Sequence: Synthetic oligonucleotide
aacauggcaagucuaagga

SEQ ID NO: 359039 - RNA, 19 nt, Artificial Sequence
  Description of Artificial Sequence: Synthetic oligonucleotide
aaggucgugaacgaaauag

SEQ ID NO: 359040 - RNA, 19 nt, Artificial Sequence
  Description of Artificial Sequence: Synthetic oligonucleotide
aguaaugcaaaucuuggga

SEQ ID NO: 359041 - RNA, 19 nt, Artificial Sequence
  Description of Artificial Sequence: Synthetic oligonucleotide
uuaauuucauucaacuuaa

SEQ ID NO: 359042 - RNA, 19 nt, Artificial Sequence
  Description of Artificial Sequence: Synthetic oligonucleotide
aaaaugauagcaaucuucu

SEQ ID NO: 359043 - RNA, 19 nt, Artificial Sequence
  Description of Artificial Sequence: Synthetic oligonucleotide
ugaagugagcagcauaucc

SEQ ID NO: 359044 - RNA, 19 nt, Artificial Sequence
  Description of Artificial Sequence: Synthetic oligonucleotide
gacaaaagcaaucugccac

SEQ ID NO: 359045 - RNA, 19 nt, Artificial Sequence
  Description of Artificial Sequence: Synthetic oligonucleotide
aaagcgcugacauaguagu

SEQ ID NO: 359046 - RNA, 19 nt, Artificial Sequence
  Description of Artificial Sequence: Synthetic oligonucleotide
aaguuuaugaaguccuucu

SEQ ID NO: 359047 - RNA, 19 nt, Artificial Sequence
  Description of Artificial Sequence: Synthetic oligonucleotide
acaagaacaauacaauaca

SEQ ID NO: 359048 - RNA, 19 nt, Artificial Sequence
  Description of Artificial Sequence: Synthetic oligonucleotide
aaaccguccacucaguccu

SEQ ID NO: 359049 - RNA, 19 nt, Artificial Sequence
  Description of Artificial Sequence: Synthetic oligonucleotide
uccuagauguaauauguag

SEQ ID NO: 359050 - RNA, 19 nt, Artificial Sequence
  Description of Artificial Sequence: Synthetic oligonucleotide
aaauagcuguggcuagucc

SEQ ID NO: 359051 - RNA, 19 nt, Artificial Sequence
  Description of Artificial Sequence: Synthetic oligonucleotide
agccuuaucaaugaaguac

SEQ ID NO: 359052 - RNA, 19 nt, Artificial Sequence
  Description of Artificial Sequence: Synthetic oligonucleotide
cacuauuccauaaaggcug

SEQ ID NO: 359053 - RNA, 19 nt, Artificial Sequence
  Description of Artificial Sequence: Synthetic oligonucleotide
aauagcuguggcuaguccu

SEQ ID NO: 359054 - RNA, 19 nt, Artificial Sequence
  Description of Artificial Sequence: Synthetic oligonucleotide
uuucuaagccaccacaaac

SEQ ID NO: 359055 - RNA, 19 nt, Artificial Sequence
  Description of Artificial Sequence: Synthetic oligonucleotide
ucgugaacgaaauagcugu

SEQ ID NO: 359056 - RNA, 19 nt, Artificial Sequence
  Description of Artificial Sequence: Synthetic oligonucleotide
auucagcaaaacuucuccc

SEQ ID NO: 359057 - RNA, 19 nt, Artificial Sequence
  Description of Artificial Sequence: Synthetic oligonucleotide
uugaaucucacaugaaaca

SEQ ID NO: 359058 - RNA, 19 nt, Artificial Sequence
  Description of Artificial Sequence: Synthetic oligonucleotide
caaccuaacgacaaucuag

SEQ ID NO: 359059 - RNA, 19 nt, Artificial Sequence
  Description of Artificial Sequence: Synthetic oligonucleotide
uuuaaccucaagaucuucu

SEQ ID NO: 359060 - RNA, 19 nt, Artificial Sequence
  Description of Artificial Sequence: Synthetic oligonucleotide
guugcgaaaauucugguga

SEQ ID NO: 359061 - RNA, 19 nt, Artificial Sequence
  Description of Artificial Sequence: Synthetic oligonucleotide
uucucaaauagaauacaga

SEQ ID NO: 359062 - RNA, 19 nt, Artificial Sequence
  Description of Artificial Sequence: Synthetic oligonucleotide
acucuaccuaagcacagcc

SEQ ID NO: 359063 - RNA, 19 nt, Artificial Sequence
  Description of Artificial Sequence: Synthetic oligonucleotide
gaaaaugauagcaaucuuc

SEQ ID NO: 359064 - RNA, 19 nt, Artificial Sequence
  Description of Artificial Sequence: Synthetic oligonucleotide
uucuaagccaccacaaacu

SEQ ID NO: 359065 - RNA, 19 nt, Artificial Sequence
  Description of Artificial Sequence: Synthetic oligonucleotide
agcguaaaauucuaucauc

SEQ ID NO: 359066 - RNA, 19 nt, Artificial Sequence
  Description of Artificial Sequence: Synthetic oligonucleotide
aacguucccaguuauggga

SEQ ID NO: 359067 - RNA, 19 nt, Artificial Sequence
  Description of Artificial Sequence: Synthetic oligonucleotide
ugugacauccacuuuugca

SEQ ID NO: 359068 - RNA, 19 nt, Artificial Sequence
  Description of Artificial Sequence: Synthetic oligonucleotide
auauccuagauguaauaug

SEQ ID NO: 359069 - RNA, 19 nt, Artificial Sequence
  Description of Artificial Sequence: Synthetic oligonucleotide
acacaaaucuuacugcuug

SEQ ID NO: 359070 - RNA, 19 nt, Artificial Sequence
  Description of Artificial Sequence: Synthetic oligonucleotide
ugaugauucccucaguaaa

SEQ ID NO: 359071 - RNA, 19 nt, Artificial Sequence
  Description of Artificial Sequence: Synthetic oligonucleotide
cuuaaauaccccaguaaug

SEQ ID NO: 359072 - RNA, 19 nt, Artificial Sequence
  Description of Artificial Sequence: Synthetic oligonucleotide
uauaaagaagguaguucug

SEQ ID NO: 359073 - RNA, 19 nt, Artificial Sequence
  Description of Artificial Sequence: Synthetic oligonucleotide
aaguaugagccccacgcug

SEQ ID NO: 359074 - RNA, 19 nt, Artificial Sequence
  Description of Artificial Sequence: Synthetic oligonucleotide
ugaaugaacuguccaaccu

SEQ ID NO: 359075 - RNA, 19 nt, Artificial Sequence
  Description of Artificial Sequence: Synthetic oligonucleotide
guucucaucggugaggacg

SEQ ID NO: 359076 - RNA, 19 nt, Artificial Sequence
  Description of Artificial Sequence: Synthetic oligonucleotide
agcgcaguuaugauaaacc

SEQ ID NO: 359077 - RNA, 19 nt, Artificial Sequence
  Description of Artificial Sequence: Synthetic oligonucleotide
acauauagugaacaagaga

SEQ ID NO: 359078 - RNA, 19 nt, Artificial Sequence
  Description of Artificial Sequence: Synthetic oligonucleotide
uauguacaagcaaaucaca

SEQ ID NO: 359079 - RNA, 19 nt, Artificial Sequence
  Description of Artificial Sequence: Synthetic oligonucleotide
auucacagagcacguaagg

SEQ ID NO: 359080 - RNA, 19 nt, Artificial Sequence
  Description of Artificial Sequence: Synthetic oligonucleotide
uaggagauauuucucaaau

SEQ ID NO: 359081 - RNA, 19 nt, Artificial Sequence
  Description of Artificial Sequence: Synthetic oligonucleotide
cuugaaacaaugggcaacg

SEQ ID NO: 359082 - RNA, 19 nt, Artificial Sequence
  Description of Artificial Sequence: Synthetic oligonucleotide
cauaauacccuucccuugc

SEQ ID NO: 359083 - RNA, 19 nt, Artificial Sequence
  Description of Artificial Sequence: Synthetic oligonucleotide
auuugugagaugcacagua

SEQ ID NO: 359084 - RNA, 19 nt, Artificial Sequence
  Description of Artificial Sequence: Synthetic oligonucleotide
aaaagcgcugacauaguag

SEQ ID NO: 359085 - RNA, 19 nt, Artificial Sequence
  Description of Artificial Sequence: Synthetic oligonucleotide
uaguaggagauauuucuca

SEQ ID NO: 359086 - RNA, 19 nt, Artificial Sequence
  Description of Artificial Sequence: Synthetic oligonucleotide
aaaugauagcaaucuucug

SEQ ID NO: 359087 - RNA, 19 nt, Artificial Sequence
  Description of Artificial Sequence: Synthetic oligonucleotide
aacgaaauagcuguggcua

SEQ ID NO: 359088 - RNA, 19 nt, Artificial Sequence
  Description of Artificial Sequence: Synthetic oligonucleotide
uaaaccguccacucagucc

SEQ ID NO: 359089 - RNA, 19 nt, Artificial Sequence
  Description of Artificial Sequence: Synthetic oligonucleotide
caaucuagacuguauguac

SEQ ID NO: 359090 - RNA, 19 nt, Artificial Sequence
  Description of Artificial Sequence: Synthetic oligonucleotide
aaauacaacccauggcaaa

SEQ ID NO: 359091 - RNA, 19 nt, Artificial Sequence
  Description of Artificial Sequence: Synthetic oligonucleotide
gaacuguccaaccuaacga

SEQ ID NO: 359092 - RNA, 19 nt, Artificial Sequence
  Description of Artificial Sequence: Synthetic oligonucleotide
uguggacucuaccuaagca

SEQ ID NO: 359093 - RNA, 19 nt, Artificial Sequence
  Description of Artificial Sequence: Synthetic oligonucleotide
ugacgagacagguucaaca

SEQ ID NO: 359094 - RNA, 19 nt, Artificial Sequence
  Description of Artificial Sequence: Synthetic oligonucleotide
uggacucuaccuaagcaca

SEQ ID NO: 359095 - RNA, 19 nt, Artificial Sequence
  Description of Artificial Sequence: Synthetic oligonucleotide
agcgccauagaaacaaacc

SEQ ID NO: 359096 - RNA, 19 nt, Artificial Sequence
  Description of Artificial Sequence: Synthetic oligonucleotide
uuaugauaaaccguccacu

SEQ ID NO: 359097 - RNA, 19 nt, Artificial Sequence
  Description of Artificial Sequence: Synthetic oligonucleotide
auaaauggaaggaagcgca

SEQ ID NO: 359098 - RNA, 19 nt, Artificial Sequence
  Description of Artificial Sequence: Synthetic oligonucleotide
uuucuuaaauaccccagua

SEQ ID NO: 359099 - RNA, 19 nt, Artificial Sequence
  Description of Artificial Sequence: Synthetic oligonucleotide
auacuaaagcuuuuccaca

SEQ ID NO: 359100 - RNA, 19 nt, Artificial Sequence
  Description of Artificial Sequence: Synthetic oligonucleotide
aagcgcaguuaugauaaac

SEQ ID NO: 359101 - RNA, 19 nt, Artificial Sequence
  Description of Artificial Sequence: Synthetic oligonucleotide
agcuguugcacaucacaac

SEQ ID NO: 359102 - RNA, 19 nt, Artificial Sequence
  Description of Artificial Sequence: Synthetic oligonucleotide
uucucaucggugaggacgc

SEQ ID NO: 359103 - RNA, 19 nt, Artificial Sequence
  Description of Artificial Sequence: Synthetic oligonucleotide
uguuacaccuaacugcuuu

SEQ ID NO: 359104 - RNA, 19 nt, Artificial Sequence
  Description of Artificial Sequence: Synthetic oligonucleotide
uugugagaugcacaguacu

SEQ ID NO: 359105 - RNA, 19 nt, Artificial Sequence
  Description of Artificial Sequence: Synthetic oligonucleotide
aggacgcgcacguugcucc

SEQ ID NO: 359106 - RNA, 19 nt, Artificial Sequence
  Description of Artificial Sequence: Synthetic oligonucleotide
aaaggcaguuuugaaucuc

SEQ ID NO: 359107 - RNA, 19 nt, Artificial Sequence
  Description of Artificial Sequence: Synthetic oligonucleotide
aagugcgccaugucagccg

SEQ ID NO: 359108 - RNA, 19 nt, Artificial Sequence
  Description of Artificial Sequence: Synthetic oligonucleotide
agcaacgagguccaguucu

SEQ ID NO: 359109 - RNA, 19 nt, Artificial Sequence
  Description of Artificial Sequence: Synthetic oligonucleotide
aauacaacccauggcaaau

SEQ ID NO: 359110 - RNA, 19 nt, Artificial Sequence
  Description of Artificial Sequence: Synthetic oligonucleotide
uccaaccuaacgacaaucu

SEQ ID NO: 359111 - RNA, 19 nt, Artificial Sequence
  Description of Artificial Sequence: Synthetic oligonucleotide
auaaaccguccacucaguc

SEQ ID NO: 359112 - RNA, 19 nt, Artificial Sequence
  Description of Artificial Sequence: Synthetic oligonucleotide
cauaguaggagauauuucu

SEQ ID NO: 359113 - RNA, 19 nt, Artificial Sequence
  Description of Artificial Sequence: Synthetic oligonucleotide
gaaggaagcgcaguuauga

SEQ ID NO: 359114 - RNA, 19 nt, Artificial Sequence
  Description of Artificial Sequence: Synthetic oligonucleotide
caaagcaauauacugacua

SEQ ID NO: 359115 - RNA, 19 nt, Artificial Sequence
  Description of Artificial Sequence: Synthetic oligonucleotide
aaccuaacgacaaucuaga

SEQ ID NO: 359116 - RNA, 19 nt, Artificial Sequence
  Description of Artificial Sequence: Synthetic oligonucleotide
ugugagaugcacaguacua

SEQ ID NO: 359117 - RNA, 19 nt, Artificial Sequence
  Description of Artificial Sequence: Synthetic oligonucleotide
auucuaucauccacucucc

SEQ ID NO: 359118 - RNA, 19 nt, Artificial Sequence
  Description of Artificial Sequence: Synthetic oligonucleotide
auaaaggagaggccuaaaa

SEQ ID NO: 359119 - RNA, 19 nt, Artificial Sequence
  Description of Artificial Sequence: Synthetic oligonucleotide
acaguucacuuuaaaacag

SEQ ID NO: 359120 - RNA, 19 nt, Artificial Sequence
  Description of Artificial Sequence: Synthetic oligonucleotide
uaggaauuaucuguagcca

SEQ ID NO: 359121 - RNA, 19 nt, Artificial Sequence
  Description of Artificial Sequence: Synthetic oligonucleotide
gaaguuguggacucuaccu

SEQ ID NO: 359122 - RNA, 19 nt, Artificial Sequence
  Description of Artificial Sequence: Synthetic oligonucleotide
guggacucuaccuaagcac

SEQ ID NO: 359123 - RNA, 19 nt, Artificial Sequence
  Description of Artificial Sequence: Synthetic oligonucleotide
guaaugcaaaucuugggaa

SEQ ID NO: 359124 - RNA, 19 nt, Artificial Sequence
  Description of Artificial Sequence: Synthetic oligonucleotide
auaguaggagauauuucuc

SEQ ID NO: 359125 - RNA, 19 nt, Artificial Sequence
  Description of Artificial Sequence: Synthetic oligonucleotide
ccaaguaugagccccacgc

SEQ ID NO: 359126 - RNA, 19 nt, Artificial Sequence
  Description of Artificial Sequence: Synthetic oligonucleotide
cacguaaggagagggagcg

SEQ ID NO: 359127 - RNA, 19 nt, Artificial Sequence
  Description of Artificial Sequence: Synthetic oligonucleotide
aacuucucccauucuggcu

SEQ ID NO: 359128 - RNA, 19 nt, Artificial Sequence
  Description of Artificial Sequence: Synthetic oligonucleotide
uucacagagcacguaagga

SEQ ID NO: 359129 - RNA, 19 nt, Artificial Sequence
  Description of Artificial Sequence: Synthetic oligonucleotide
uauuccauaaaggcugggu

SEQ ID NO: 359130 - RNA, 19 nt, Artificial Sequence
  Description of Artificial Sequence: Synthetic oligonucleotide
uuaugggaaauauguuccu

SEQ ID NO: 359131 - RNA, 19 nt, Artificial Sequence
  Description of Artificial Sequence: Synthetic oligonucleotide
cacaguacuagcagacaag

SEQ ID NO: 359132 - RNA, 19 nt, Artificial Sequence
  Description of Artificial Sequence: Synthetic oligonucleotide
aaguuguggacucuaccua

SEQ ID NO: 359133 - RNA, 19 nt, Artificial Sequence
  Description of Artificial Sequence: Synthetic oligonucleotide
ccagguaacgccuaaacuc

SEQ ID NO: 359134 - RNA, 19 nt, Artificial Sequence
  Description of Artificial Sequence: Synthetic oligonucleotide
uugcgaaaauucuggugag

SEQ ID NO: 359135 - RNA, 19 nt, Artificial Sequence
  Description of Artificial Sequence: Synthetic oligonucleotide
aguaugagccccacgcugg

SEQ ID NO: 359136 - RNA, 19 nt, Artificial Sequence
  Description of Artificial Sequence: Synthetic oligonucleotide
ggagcguaaaauucuauca

SEQ ID NO: 359137 - RNA, 19 nt, Artificial Sequence
  Description of Artificial Sequence: Synthetic oligonucleotide
uguagaaaugaaagcuaua

SEQ ID NO: 359138 - RNA, 19 nt, Artificial Sequence
  Description of Artificial Sequence: Synthetic oligonucleotide
aggucgugaacgaaauagc

SEQ ID NO: 359139 - RNA, 19 nt, Artificial Sequence
  Description of Artificial Sequence: Synthetic oligonucleotide
acuacauauccaaaugaca

SEQ ID NO: 359140 - RNA, 19 nt, Artificial Sequence
  Description of Artificial Sequence: Synthetic oligonucleotide
aguacugucuacccacagu

SEQ ID NO: 359141 - RNA, 19 nt, Artificial Sequence
  Description of Artificial Sequence: Synthetic oligonucleotide
cugucuacccacaguaaac

SEQ ID NO: 359142 - RNA, 19 nt, Artificial Sequence
  Description of Artificial Sequence: Synthetic oligonucleotide
agcacguaaggagagggag

SEQ ID NO: 359143 - RNA, 19 nt, Artificial Sequence
  Description of Artificial Sequence: Synthetic oligonucleotide
guaauauguagaaaugaaa

SEQ ID NO: 359144 - RNA, 19 nt, Artificial Sequence
  Description of Artificial Sequence: Synthetic oligonucleotide
cuaugaggaaguuguggac

SEQ ID NO: 359145 - RNA, 19 nt, Artificial Sequence
  Description of Artificial Sequence: Synthetic oligonucleotide
uuaugaaguccuucuuagu

SEQ ID NO: 359146 - RNA, 19 nt, Artificial Sequence
  Description of Artificial Sequence: Synthetic oligonucleotide
aggaauuaucuguagccaa

SEQ ID NO: 359147 - RNA, 19 nt, Artificial Sequence
  Description of Artificial Sequence: Synthetic oligonucleotide
aaaucuugggaaaggcagu

SEQ ID NO: 359148 - RNA, 19 nt, Artificial Sequence
  Description of Artificial Sequence: Synthetic oligonucleotide
acugucuacccacaguaaa

SEQ ID NO: 359149 - RNA, 19 nt, Artificial Sequence
  Description of Artificial Sequence: Synthetic oligonucleotide
gugaacgaaauagcugugg

SEQ ID NO: 359150 - RNA, 19 nt, Artificial Sequence
  Description of Artificial Sequence: Synthetic oligonucleotide
aucuguagccaaugacggg

SEQ ID NO: 359151 - RNA, 19 nt, Artificial Sequence
  Description of Artificial Sequence: Synthetic oligonucleotide
gcaacguucccaguuaugg

SEQ ID NO: 359152 - RNA, 19 nt, Artificial Sequence
  Description of Artificial Sequence: Synthetic oligonucleotide
gugagaugcacaguacuag

SEQ ID NO: 359153 - RNA, 19 nt, Artificial Sequence
  Description of Artificial Sequence: Synthetic oligonucleotide
caaugacgggcccacacag

SEQ ID NO: 359154 - RNA, 19 nt, Artificial Sequence
  Description of Artificial Sequence: Synthetic oligonucleotide
acgaaauagcuguggcuag

SEQ ID NO: 359155 - RNA, 19 nt, Artificial Sequence
  Description of Artificial Sequence: Synthetic oligonucleotide
caacguucccaguuauggg

SEQ ID NO: 359156 - RNA, 19 nt, Artificial Sequence
  Description of Artificial Sequence: Synthetic oligonucleotide
acaguacuagcagacaaga

SEQ ID NO: 359157 - RNA, 19 nt, Artificial Sequence
  Description of Artificial Sequence: Synthetic oligonucleotide
guaacgccuaaacucacca

SEQ ID NO: 359158 - RNA, 19 nt, Artificial Sequence
  Description of Artificial Sequence: Synthetic oligonucleotide
uacaacccauggcaaauaa

SEQ ID NO: 359159 - RNA, 19 nt, Artificial Sequence
  Description of Artificial Sequence: Synthetic oligonucleotide
uuuugaugauucccucagu

SEQ ID NO: 359160 - RNA, 19 nt, Artificial Sequence
  Description of Artificial Sequence: Synthetic oligonucleotide
ugauuuccauuugugagau

SEQ ID NO: 359161 - RNA, 19 nt, Artificial Sequence
  Description of Artificial Sequence: Synthetic oligonucleotide
accuaacgacaaucuagac

SEQ ID NO: 359162 - RNA, 19 nt, Artificial Sequence
  Description of Artificial Sequence: Synthetic oligonucleotide
aguuguggacucuaccuaa

SEQ ID NO: 359163 - RNA, 19 nt, Artificial Sequence
  Description of Artificial Sequence: Synthetic oligonucleotide
uaauacccuucccuugcug

SEQ ID NO: 359164 - RNA, 19 nt, Artificial Sequence
  Description of Artificial Sequence: Synthetic oligonucleotide
gcgcaguuaugauaaaccg

SEQ ID NO: 359165 - RNA, 19 nt, Artificial Sequence
  Description of Artificial Sequence: Synthetic oligonucleotide
ugcgaaaauucuggugagg

SEQ ID NO: 359166 - RNA, 19 nt, Artificial Sequence
  Description of Artificial Sequence: Synthetic oligonucleotide
ccauuugugagaugcacag

SEQ ID NO: 359167 - RNA, 19 nt, Artificial Sequence
  Description of Artificial Sequence: Synthetic oligonucleotide
gcgaaaauucuggugaggg

SEQ ID NO: 359168 - RNA, 19 nt, Artificial Sequence
  Description of Artificial Sequence: Synthetic oligonucleotide
gcaguuaugauaaaccguc

SEQ ID NO: 359169 - RNA, 19 nt, Artificial Sequence
  Description of Artificial Sequence: Synthetic oligonucleotide
caguuaugauaaaccgucc

SEQ ID NO: 359170 - RNA, 19 nt, Artificial Sequence
  Description of Artificial Sequence: Synthetic oligonucleotide
agaaaaugauagcaaucuu

SEQ ID NO: 359171 - RNA, 19 nt, Artificial Sequence
  Description of Artificial Sequence: Synthetic oligonucleotide
uuguugcuuagaauguuuu

SEQ ID NO: 359172 - RNA, 19 nt, Artificial Sequence
  Description of Artificial Sequence: Synthetic oligonucleotide
aaucuggaauguauagcca

SEQ ID NO: 359173 - RNA, 19 nt, Artificial Sequence
  Description of Artificial Sequence: Synthetic oligonucleotide
uccauaaaggcugggugac

SEQ ID NO: 359174 - RNA, 19 nt, Artificial Sequence
  Description of Artificial Sequence: Synthetic oligonucleotide
augggaaauauguuccuuu

SEQ ID NO: 359175 - RNA, 19 nt, Artificial Sequence
  Description of Artificial Sequence: Synthetic oligonucleotide
caagaaccuguaaaggaca

SEQ ID NO: 359176 - RNA, 19 nt, Artificial Sequence
  Description of Artificial Sequence: Synthetic oligonucleotide
cucacuuacgaaguuuaug

SEQ ID NO: 359177 - RNA, 19 nt, Artificial Sequence
  Description of Artificial Sequence: Synthetic oligonucleotide
aucuagacuguauguacaa

SEQ ID NO: 359178 - RNA, 19 nt, Artificial Sequence
  Description of Artificial Sequence: Synthetic oligonucleotide
agagguugcgaaaauucug

SEQ ID NO: 359179 - RNA, 19 nt, Artificial Sequence
  Description of Artificial Sequence: Synthetic oligonucleotide
guauaguccaaaaccuaug

SEQ ID NO: 359180 - RNA, 19 nt, Artificial Sequence
  Description of Artificial Sequence: Synthetic oligonucleotide
cagguaacgccuaaacuca

SEQ ID NO: 359181 - RNA, 19 nt, Artificial Sequence
  Description of Artificial Sequence: Synthetic oligonucleotide
aaggaagcgcaguuaugau

SEQ ID NO: 359182 - RNA, 19 nt, Artificial Sequence
  Description of Artificial Sequence: Synthetic oligonucleotide
guacugucuacccacagua

SEQ ID NO: 359183 - RNA, 19 nt, Artificial Sequence
  Description of Artificial Sequence: Synthetic oligonucleotide
aagcuauaaagaagguagu

SEQ ID NO: 359184 - RNA, 19 nt, Artificial Sequence
  Description of Artificial Sequence: Synthetic oligonucleotide
aggccuaaaaggaagcugu

SEQ ID NO: 359185 - RNA, 19 nt, Artificial Sequence
  Description of Artificial Sequence: Synthetic oligonucleotide
aacgagguccaguucucau

SEQ ID NO: 359186 - RNA, 19 nt, Artificial Sequence
  Description of Artificial Sequence: Synthetic oligonucleotide
acuauuccauaaaggcugg

SEQ ID NO: 359187 - RNA, 19 nt, Artificial Sequence
  Description of Artificial Sequence: Synthetic oligonucleotide
auucugagagucauguggu

SEQ ID NO: 359188 - RNA, 19 nt, Artificial Sequence
  Description of Artificial Sequence: Synthetic oligonucleotide
aguuuaugaaguccuucuu

SEQ ID NO: 359189 - RNA, 19 nt, Artificial Sequence
  Description of Artificial Sequence: Synthetic oligonucleotide
acaaucuagacuguaugua

SEQ ID NO: 359190 - RNA, 19 nt, Artificial Sequence
  Description of Artificial Sequence: Synthetic oligonucleotide
gucgugaacgaaauagcug

SEQ ID NO: 359191 - RNA, 19 nt, Artificial Sequence
  Description of Artificial Sequence: Synthetic oligonucleotide
caagucuaaggaauucaca

SEQ ID NO: 359192 - RNA, 19 nt, Artificial Sequence
  Description of Artificial Sequence: Synthetic oligonucleotide
acaacauggcaagucuaag

SEQ ID NO: 359193 - RNA, 19 nt, Artificial Sequence
  Description of Artificial Sequence: Synthetic oligonucleotide
accaaguaugagccccacg

SEQ ID NO: 359194 - RNA, 19 nt, Artificial Sequence
  Description of Artificial Sequence: Synthetic oligonucleotide
caaaucuuacugcuuggca

SEQ ID NO: 359195 - RNA, 19 nt, Artificial Sequence
  Description of Artificial Sequence: Synthetic oligonucleotide
aaccaaguaugagccccac

SEQ ID NO: 359196 - RNA, 19 nt, Artificial Sequence
  Description of Artificial Sequence: Synthetic oligonucleotide
agacuguauguacaagcaa

SEQ ID NO: 359197 - RNA, 19 nt, Artificial Sequence
  Description of Artificial Sequence: Synthetic oligonucleotide
gguugcgaaaauucuggug

SEQ ID NO: 359198 - RNA, 19 nt, Artificial Sequence
  Description of Artificial Sequence: Synthetic oligonucleotide
gcuguugcacaucacaaca

SEQ ID NO: 359199 - RNA, 19 nt, Artificial Sequence
  Description of Artificial Sequence: Synthetic oligonucleotide
gauagcaaucuucuguuuu

SEQ ID NO: 359200 - RNA, 19 nt, Artificial Sequence
  Description of Artificial Sequence: Synthetic oligonucleotide
uguagccaaugacgggccc

SEQ ID NO: 359201 - RNA, 19 nt, Artificial Sequence
  Description of Artificial Sequence: Synthetic oligonucleotide
guagcuguauaguccaaaa

SEQ ID NO: 359202 - RNA, 19 nt, Artificial Sequence
  Description of Artificial Sequence: Synthetic oligonucleotide
aggagagggagcgccauag

SEQ ID NO: 359203 - RNA, 19 nt, Artificial Sequence
  Description of Artificial Sequence: Synthetic oligonucleotide
guccacucaguccugucug

SEQ ID NO: 359204 - RNA, 19 nt, Artificial Sequence
  Description of Artificial Sequence: Synthetic oligonucleotide
caucacaacauggcaaguc

SEQ ID NO: 359205 - RNA, 19 nt, Artificial Sequence
  Description of Artificial Sequence: Synthetic oligonucleotide
auaauacccuucccuugcu

SEQ ID NO: 359206 - RNA, 19 nt, Artificial Sequence
  Description of Artificial Sequence: Synthetic oligonucleotide
ccaguuaugggaaauaugu

SEQ ID NO: 359207 - RNA, 19 nt, Artificial Sequence
  Description of Artificial Sequence: Synthetic oligonucleotide
ugggccaaaccaugacgag

SEQ ID NO: 359208 - RNA, 19 nt, Artificial Sequence
  Description of Artificial Sequence: Synthetic oligonucleotide
gcugucuuaugccacucag

SEQ ID NO: 359209 - RNA, 19 nt, Artificial Sequence
  Description of Artificial Sequence: Synthetic oligonucleotide
acauggcaagucuaaggaa

SEQ ID NO: 359210 - RNA, 19 nt, Artificial Sequence
  Description of Artificial Sequence: Synthetic oligonucleotide
ccaaccuuaggaauuaaga

SEQ ID NO: 359211 - RNA, 19 nt, Artificial Sequence
  Description of Artificial Sequence: Synthetic oligonucleotide
aggaagcgcaguuaugaua

SEQ ID NO: 359212 - RNA, 19 nt, Artificial Sequence
  Description of Artificial Sequence: Synthetic oligonucleotide
augacgagacagguucaac

SEQ ID NO: 359213 - RNA, 19 nt, Artificial Sequence
  Description of Artificial Sequence: Synthetic oligonucleotide
ccuagauguaauauguaga

SEQ ID NO: 359214 - RNA, 19 nt, Artificial Sequence
  Description of Artificial Sequence: Synthetic oligonucleotide
ggugaggacgcgcacguug

SEQ ID NO: 359215 - RNA, 19 nt, Artificial Sequence
  Description of Artificial Sequence: Synthetic oligonucleotide
ggaagcgcaguuaugauaa

SEQ ID NO: 359216 - RNA, 19 nt, Artificial Sequence
  Description of Artificial Sequence: Synthetic oligonucleotide
uacugucuacccacaguaa

SEQ ID NO: 359217 - RNA, 19 nt, Artificial Sequence
  Description of Artificial Sequence: Synthetic oligonucleotide
gagcguaaaauucuaucau

SEQ ID NO: 359218 - RNA, 19 nt, Artificial Sequence
  Description of Artificial Sequence: Synthetic oligonucleotide
aaaccaaguaugagcccca

SEQ ID NO: 359219 - RNA, 19 nt, Artificial Sequence
  Description of Artificial Sequence: Synthetic oligonucleotide
acagagcacguaaggagag

SEQ ID NO: 359220 - RNA, 19 nt, Artificial Sequence
  Description of Artificial Sequence: Synthetic oligonucleotide
ucaagaucuucuccccauu

SEQ ID NO: 359221 - RNA, 19 nt, Artificial Sequence
  Description of Artificial Sequence: Synthetic oligonucleotide
accaaccuuaggaauuaag

SEQ ID NO: 359222 - RNA, 19 nt, Artificial Sequence
  Description of Artificial Sequence: Synthetic oligonucleotide
aacgacaaucuagacugua

SEQ ID NO: 359223 - RNA, 19 nt, Artificial Sequence
  Description of Artificial Sequence: Synthetic oligonucleotide
cgcugguaagccaaggucg

SEQ ID NO: 359224 - RNA, 19 nt, Artificial Sequence
  Description of Artificial Sequence: Synthetic oligonucleotide
cauggcaagucuaaggaau

SEQ ID NO: 359225 - RNA, 19 nt, Artificial Sequence
  Description of Artificial Sequence: Synthetic oligonucleotide
gggagcguaaaauucuauc

SEQ ID NO: 359226 - RNA, 19 nt, Artificial Sequence
  Description of Artificial Sequence: Synthetic oligonucleotide
cuguauguacaagcaaauc

SEQ ID NO: 359227 - RNA, 19 nt, Artificial Sequence
  Description of Artificial Sequence: Synthetic oligonucleotide
uucuuaguccuugggccca

SEQ ID NO: 359228 - RNA, 19 nt, Artificial Sequence
  Description of Artificial Sequence: Synthetic oligonucleotide
gcgccauagaaacaaacca

SEQ ID NO: 359229 - RNA, 19 nt, Artificial Sequence
  Description of Artificial Sequence: Synthetic oligonucleotide
uguccaaccuaacgacaau

SEQ ID NO: 359230 - RNA, 19 nt, Artificial Sequence
  Description of Artificial Sequence: Synthetic oligonucleotide
acgcgcacguugcuccgcc

SEQ ID NO: 359231 - RNA, 19 nt, Artificial Sequence
  Description of Artificial Sequence: Synthetic oligonucleotide
uacaccuaacugcuuuauu

SEQ ID NO: 359232 - RNA, 19 nt, Artificial Sequence
  Description of Artificial Sequence: Synthetic oligonucleotide
ugggcaacguucccaguua

SEQ ID NO: 359233 - RNA, 19 nt, Artificial Sequence
  Description of Artificial Sequence: Synthetic oligonucleotide
aggagacgccccaagugcg

SEQ ID NO: 359234 - RNA, 19 nt, Artificial Sequence
  Description of Artificial Sequence: Synthetic oligonucleotide
ucccaguuaugggaaauau

SEQ ID NO: 359235 - RNA, 19 nt, Artificial Sequence
  Description of Artificial Sequence: Synthetic oligonucleotide
ugagagucauguggucugc

SEQ ID NO: 359236 - RNA, 19 nt, Artificial Sequence
  Description of Artificial Sequence: Synthetic oligonucleotide
uaacgacaaucuagacugu

SEQ ID NO: 359237 - RNA, 19 nt, Artificial Sequence
  Description of Artificial Sequence: Synthetic oligonucleotide
accuaagcacagccuuauc

SEQ ID NO: 359238 - RNA, 19 nt, Artificial Sequence
  Description of Artificial Sequence: Synthetic oligonucleotide
cuguccaaccuaacgacaa

SEQ ID NO: 359239 - RNA, 19 nt, Artificial Sequence
  Description of Artificial Sequence: Synthetic oligonucleotide
uaguucugguagcuguaua

SEQ ID NO: 359240 - RNA, 19 nt, Artificial Sequence
  Description of Artificial Sequence: Synthetic oligonucleotide
uuacaccuaacugcuuuau

SEQ ID NO: 359241 - RNA, 19 nt, Artificial Sequence
  Description of Artificial Sequence: Synthetic oligonucleotide
acuagcagacaagaacaau

SEQ ID NO: 359242 - RNA, 19 nt, Artificial Sequence
  Description of Artificial Sequence: Synthetic oligonucleotide
uaacgccuaaacucaccau

SEQ ID NO: 359243 - RNA, 19 nt, Artificial Sequence
  Description of Artificial Sequence: Synthetic oligonucleotide
ccuaagcacagccuuauca

SEQ ID NO: 359244 - RNA, 19 nt, Artificial Sequence
  Description of Artificial Sequence: Synthetic oligonucleotide
agagucauguggucugcuu

SEQ ID NO: 359245 - RNA, 19 nt, Artificial Sequence
  Description of Artificial Sequence: Synthetic oligonucleotide
caagugcgccaugucagcc

SEQ ID NO: 359246 - RNA, 19 nt, Artificial Sequence
  Description of Artificial Sequence: Synthetic oligonucleotide
uccagcaacgagguccagu

SEQ ID NO: 359247 - RNA, 19 nt, Artificial Sequence
  Description of Artificial Sequence: Synthetic oligonucleotide
acgccuaaacucaccaucu

SEQ ID NO: 359248 - RNA, 19 nt, Artificial Sequence
  Description of Artificial Sequence: Synthetic oligonucleotide
cuucuccccauucagcaaa

SEQ ID NO: 359249 - RNA, 19 nt, Artificial Sequence
  Description of Artificial Sequence: Synthetic oligonucleotide
ccaaaccaugacgagacag

SEQ ID NO: 359250 - RNA, 19 nt, Artificial Sequence
  Description of Artificial Sequence: Synthetic oligonucleotide
cugugacauccacuuuugc

SEQ ID NO: 359251 - RNA, 19 nt, Artificial Sequence
  Description of Artificial Sequence: Synthetic oligonucleotide
agguaacgccuaaacucac

SEQ ID NO: 359252 - RNA, 19 nt, Artificial Sequence
  Description of Artificial Sequence: Synthetic oligonucleotide
cacaaacuacauauccaaa

SEQ ID NO: 359253 - RNA, 19 nt, Artificial Sequence
  Description of Artificial Sequence: Synthetic oligonucleotide
agagggagcgccauagaaa

SEQ ID NO: 359254 - RNA, 19 nt, Artificial Sequence
  Description of Artificial Sequence: Synthetic oligonucleotide
guugcuccgccgcccgugg

SEQ ID NO: 359255 - RNA, 19 nt, Artificial Sequence
  Description of Artificial Sequence: Synthetic oligonucleotide
ccauaauacccuucccuug

SEQ ID NO: 359256 - RNA, 19 nt, Artificial Sequence
  Description of Artificial Sequence: Synthetic oligonucleotide
guuacaccuaacugcuuua

SEQ ID NO: 359257 - RNA, 19 nt, Artificial Sequence
  Description of Artificial Sequence: Synthetic oligonucleotide
cugucuuaugccacucaga

SEQ ID NO: 359258 - RNA, 19 nt, Artificial Sequence
  Description of Artificial Sequence: Synthetic oligonucleotide
uguggcuaguccugaugua

SEQ ID NO: 359259 - RNA, 19 nt, Artificial Sequence
  Description of Artificial Sequence: Synthetic oligonucleotide
acuguccaaccuaacgaca

SEQ ID NO: 359260 - RNA, 19 nt, Artificial Sequence
  Description of Artificial Sequence: Synthetic oligonucleotide
guccaaccuaacgacaauc

SEQ ID NO: 359261 - RNA, 19 nt, Artificial Sequence
  Description of Artificial Sequence: Synthetic oligonucleotide
gaccgcccagagcaacagg

SEQ ID NO: 359262 - RNA, 19 nt, Artificial Sequence
  Description of Artificial Sequence: Synthetic oligonucleotide
uucuccccauucagcaaaa

SEQ ID NO: 359263 - RNA, 19 nt, Artificial Sequence
  Description of Artificial Sequence: Synthetic oligonucleotide
gcaagucuaaggaauucac

SEQ ID NO: 359264 - RNA, 19 nt, Artificial Sequence
  Description of Artificial Sequence: Synthetic oligonucleotide
ggacaaaagcaaucugcca

SEQ ID NO: 359265 - RNA, 19 nt, Artificial Sequence
  Description of Artificial Sequence: Synthetic oligonucleotide
ucuuacugcuuggcaccag

SEQ ID NO: 359266 - RNA, 19 nt, Artificial Sequence
  Description of Artificial Sequence: Synthetic oligonucleotide
cgccauagaaacaaaccac

SEQ ID NO: 359267 - RNA, 19 nt, Artificial Sequence
  Description of Artificial Sequence: Synthetic oligonucleotide
ggcuaguccugauguauac

SEQ ID NO: 359268 - RNA, 19 nt, Artificial Sequence
  Description of Artificial Sequence: Synthetic oligonucleotide
acgacaaucuagacuguau

SEQ ID NO: 359269 - RNA, 19 nt, Artificial Sequence
  Description of Artificial Sequence: Synthetic oligonucleotide
auacccuucccuugcugua

SEQ ID NO: 359270 - RNA, 19 nt, Artificial Sequence
  Description of Artificial Sequence: Synthetic oligonucleotide
gucauguggucugcuuucc

SEQ ID NO: 359271 - RNA, 19 nt, Artificial Sequence
  Description of Artificial Sequence: Synthetic oligonucleotide
uugcucccucuuuauuuuc

SEQ ID NO: 359272 - RNA, 19 nt, Artificial Sequence
  Description of Artificial Sequence: Synthetic oligonucleotide
cacaguugcgaacgcaaaa

SEQ ID NO: 359273 - RNA, 19 nt, Artificial Sequence
  Description of Artificial Sequence: Synthetic oligonucleotide
cauauccuagauguaauau

SEQ ID NO: 359274 - RNA, 19 nt, Artificial Sequence
  Description of Artificial Sequence: Synthetic oligonucleotide
gcuguugcugugguuugcg

SEQ ID NO: 359275 - RNA, 19 nt, Artificial Sequence
  Description of Artificial Sequence: Synthetic oligonucleotide
gagacgccccaagugcgcc

SEQ ID NO: 359276 - RNA, 19 nt, Artificial Sequence
  Description of Artificial Sequence: Synthetic oligonucleotide
gguaacgccuaaacucacc

SEQ ID NO: 359277 - RNA, 19 nt, Artificial Sequence
  Description of Artificial Sequence: Synthetic oligonucleotide
gcacaguacuagcagacaa

SEQ ID NO: 359278 - RNA, 19 nt, Artificial Sequence
  Description of Artificial Sequence: Synthetic oligonucleotide
aaucugccacaaauaucau

SEQ ID NO: 359279 - RNA, 19 nt, Artificial Sequence
  Description of Artificial Sequence: Synthetic oligonucleotide
gacgggcccacacagcgcu

SEQ ID NO: 359280 - RNA, 19 nt, Artificial Sequence
  Description of Artificial Sequence: Synthetic oligonucleotide
acaucacaacauggcaagu

SEQ ID NO: 359281 - RNA, 19 nt, Artificial Sequence
  Description of Artificial Sequence: Synthetic oligonucleotide
gccuaaaaggaagcuguug

SEQ ID NO: 359282 - RNA, 19 nt, Artificial Sequence
  Description of Artificial Sequence: Synthetic oligonucleotide
ccuaacgacaaucuagacu

SEQ ID NO: 359283 - RNA, 19 nt, Artificial Sequence
  Description of Artificial Sequence: Synthetic oligonucleotide
cugaagugagcagcauauc

SEQ ID NO: 359284 - RNA, 19 nt, Artificial Sequence
  Description of Artificial Sequence: Synthetic oligonucleotide
ggacucuaccuaagcacag

SEQ ID NO: 359285 - RNA, 19 nt, Artificial Sequence
  Description of Artificial Sequence: Synthetic oligonucleotide
auacaacccauggcaaaua

SEQ ID NO: 359286 - RNA, 19 nt, Artificial Sequence
  Description of Artificial Sequence: Synthetic oligonucleotide
gggagcgccauagaaacaa

SEQ ID NO: 359287 - RNA, 19 nt, Artificial Sequence
  Description of Artificial Sequence: Synthetic oligonucleotide
gcaaucugccacaaauauc

SEQ ID NO: 359288 - RNA, 19 nt, Artificial Sequence
  Description of Artificial Sequence: Synthetic oligonucleotide
ccaagugcgccaugucagc

SEQ ID NO: 359289 - RNA, 19 nt, Artificial Sequence
  Description of Artificial Sequence: Synthetic oligonucleotide
cucaagaucuucuccccau

SEQ ID NO: 359290 - RNA, 19 nt, Artificial Sequence
  Description of Artificial Sequence: Synthetic oligonucleotide
gcccagguaacgccuaaac

SEQ ID NO: 359291 - RNA, 19 nt, Artificial Sequence
  Description of Artificial Sequence: Synthetic oligonucleotide
gagcacguaaggagaggga

SEQ ID NO: 359292 - RNA, 19 nt, Artificial Sequence
  Description of Artificial Sequence: Synthetic oligonucleotide
gauaaaccguccacucagu

SEQ ID NO: 359293 - RNA, 19 nt, Artificial Sequence
  Description of Artificial Sequence: Synthetic oligonucleotide
gcauauccuagauguaaua

SEQ ID NO: 359294 - RNA, 19 nt, Artificial Sequence
  Description of Artificial Sequence: Synthetic oligonucleotide
acguucccaguuaugggaa

SEQ ID NO: 359295 - RNA, 19 nt, Artificial Sequence
  Description of Artificial Sequence: Synthetic oligonucleotide
gaagcgcaguuaugauaaa

SEQ ID NO: 359296 - RNA, 19 nt, Artificial Sequence
  Description of Artificial Sequence: Synthetic oligonucleotide
caucggugaggacgcgcac

SEQ ID NO: 359297 - RNA, 19 nt, Artificial Sequence
  Description of Artificial Sequence: Synthetic oligonucleotide
auccuagauguaauaugua

SEQ ID NO: 359298 - RNA, 19 nt, Artificial Sequence
  Description of Artificial Sequence: Synthetic oligonucleotide
ucuccccauucagcaaaac

SEQ ID NO: 359299 - RNA, 19 nt, Artificial Sequence
  Description of Artificial Sequence: Synthetic oligonucleotide
cagggagcguaaaauucua

SEQ ID NO: 359300 - RNA, 19 nt, Artificial Sequence
  Description of Artificial Sequence: Synthetic oligonucleotide
caaguaugagccccacgcu

SEQ ID NO: 359301 - RNA, 19 nt, Artificial Sequence
  Description of Artificial Sequence: Synthetic oligonucleotide
ggucgugaacgaaauagcu

SEQ ID NO: 359302 - RNA, 19 nt, Artificial Sequence
  Description of Artificial Sequence: Synthetic oligonucleotide
agacgccccaagugcgcca

SEQ ID NO: 359303 - RNA, 19 nt, Artificial Sequence
  Description of Artificial Sequence: Synthetic oligonucleotide
ccacuauuccauaaaggcu

SEQ ID NO: 359304 - RNA, 19 nt, Artificial Sequence
  Description of Artificial Sequence: Synthetic oligonucleotide
ccauuccuucucacuuacg

SEQ ID NO: 359305 - RNA, 19 nt, Artificial Sequence
  Description of Artificial Sequence: Synthetic oligonucleotide
caugacgagacagguucaa

SEQ ID NO: 359306 - RNA, 19 nt, Artificial Sequence
  Description of Artificial Sequence: Synthetic oligonucleotide
uccuuccagcaacgagguc

SEQ ID NO: 359307 - RNA, 19 nt, Artificial Sequence
  Description of Artificial Sequence: Synthetic oligonucleotide
guggcuaguccugauguau

SEQ ID NO: 359308 - RNA, 19 nt, Artificial Sequence
  Description of Artificial Sequence: Synthetic oligonucleotide
cuguugcacaucacaacau

SEQ ID NO: 359309 - RNA, 19 nt, Artificial Sequence
  Description of Artificial Sequence: Synthetic oligonucleotide
ggacgcgcacguugcuccg

SEQ ID NO: 359310 - RNA, 19 nt, Artificial Sequence
  Description of Artificial Sequence: Synthetic oligonucleotide
gacgcgcacguugcuccgc

SEQ ID NO: 359311 - RNA, 19 nt, Artificial Sequence
  Description of Artificial Sequence: Synthetic oligonucleotide
gccaaggucgugaacgaaa

SEQ ID NO: 359312 - RNA, 19 nt, Artificial Sequence
  Description of Artificial Sequence: Synthetic oligonucleotide
aaccguccacucaguccug

SEQ ID NO: 359313 - RNA, 19 nt, Artificial Sequence
  Description of Artificial Sequence: Synthetic oligonucleotide
cacgcugguaagccaaggu

SEQ ID NO: 359314 - RNA, 19 nt, Artificial Sequence
  Description of Artificial Sequence: Synthetic oligonucleotide
cgugaacgaaauagcugug

SEQ ID NO: 359315 - RNA, 19 nt, Artificial Sequence
  Description of Artificial Sequence: Synthetic oligonucleotide
ggcaacguucccaguuaug

SEQ ID NO: 359316 - RNA, 19 nt, Artificial Sequence
  Description of Artificial Sequence: Synthetic oligonucleotide
ggagacgccccaagugcgc

SEQ ID NO: 359317 - RNA, 19 nt, Artificial Sequence
  Description of Artificial Sequence: Synthetic oligonucleotide
caaggucgugaacgaaaua

SEQ ID NO: 359318 - RNA, 19 nt, Artificial Sequence
  Description of Artificial Sequence: Synthetic oligonucleotide
accguccacucaguccugu

SEQ ID NO: 359319 - RNA, 19 nt, Artificial Sequence
  Description of Artificial Sequence: Synthetic oligonucleotide
caacgagguccaguucuca

SEQ ID NO: 359320 - RNA, 19 nt, Artificial Sequence
  Description of Artificial Sequence: Synthetic oligonucleotide
guaugagccccacgcuggu

SEQ ID NO: 359321 - RNA, 19 nt, Artificial Sequence
  Description of Artificial Sequence: Synthetic oligonucleotide
agggagcgccauagaaaca

SEQ ID NO: 359322 - RNA, 19 nt, Artificial Sequence
  Description of Artificial Sequence: Synthetic oligonucleotide
gagagucauguggucugcu

SEQ ID NO: 359323 - RNA, 19 nt, Artificial Sequence
  Description of Artificial Sequence: Synthetic oligonucleotide
ggaauucacagagcacgua

SEQ ID NO: 359324 - RNA, 19 nt, Artificial Sequence
  Description of Artificial Sequence: Synthetic oligonucleotide
ccccauaauacccuucccu

SEQ ID NO: 359325 - RNA, 19 nt, Artificial Sequence
  Description of Artificial Sequence: Synthetic oligonucleotide
ccaaccuaacgacaaucua

SEQ ID NO: 359326 - RNA, 19 nt, Artificial Sequence
  Description of Artificial Sequence: Synthetic oligonucleotide
acaaugccacaaacuuaua

SEQ ID NO: 359327 - RNA, 19 nt, Artificial Sequence
  Description of Artificial Sequence: Synthetic oligonucleotide
cccuugcuguaagaugaag

SEQ ID NO: 359328 - RNA, 19 nt, Artificial Sequence
  Description of Artificial Sequence: Synthetic oligonucleotide
gcaacgagguccaguucuc

SEQ ID NO: 359329 - RNA, 19 nt, Artificial Sequence
  Description of Artificial Sequence: Synthetic oligonucleotide
cccauaauacccuucccuu

SEQ ID NO: 359330 - RNA, 19 nt, Artificial Sequence
  Description of Artificial Sequence: Synthetic oligonucleotide
ccacgcugguaagccaagg

SEQ ID NO: 359331 - RNA, 19 nt, Artificial Sequence
  Description of Artificial Sequence: Synthetic oligonucleotide
ccgcccagagcaacaggac

SEQ ID NO: 359332 - RNA, 19 nt, Artificial Sequence
  Description of Artificial Sequence: Synthetic oligonucleotide
ccaugacgagacagguuca

SEQ ID NO: 359333 - RNA, 19 nt, Artificial Sequence
  Description of Artificial Sequence: Synthetic oligonucleotide
ccaaggucgugaacgaaau

SEQ ID NO: 359334 - RNA, 19 nt, Artificial Sequence
  Description of Artificial Sequence: Synthetic oligonucleotide
gcacguugcuccgccgccc

SEQ ID NO: 359335 - RNA, 19 nt, Artificial Sequence
  Description of Artificial Sequence: Synthetic oligonucleotide
cuccgccgcccgugggccc

SEQ ID NO: 359336 - RNA, 19 nt, Artificial Sequence
  Description of Artificial Sequence: Synthetic oligonucleotide
cgcacguugcuccgccgcc

SEQ ID NO: 359337 - RNA, 19 nt, Artificial Sequence
  Description of Artificial Sequence: Synthetic oligonucleotide
gcgcugacauaguagucau

SEQ ID NO: 359338 - RNA, 19 nt, Artificial Sequence
  Description of Artificial Sequence: Synthetic oligonucleotide
ggggaccgcccagagcaac

SEQ ID NO: 359339 - RNA, 19 nt, Artificial Sequence
  Description of Artificial Sequence: Synthetic oligonucleotide
ccccacgcugguaagccaa

SEQ ID NO: 359340 - RNA, 19 nt, Artificial Sequence
  Description of Artificial Sequence: Synthetic oligonucleotide
gcuccgccgcccgugggcc

SEQ ID NO: 359341 - RNA, 19 nt, Artificial Sequence
  Description of Artificial Sequence: Synthetic oligonucleotide
ccguccacucaguccuguc

SEQ ID NO: 359342 - RNA, 19 nt, Artificial Sequence
  Description of Artificial Sequence: Synthetic oligonucleotide
gggcaacguucccaguuau

SEQ ID NO: 359343 - RNA, 19 nt, Artificial Sequence
  Description of Artificial Sequence: Synthetic oligonucleotide
cgcgcacguugcuccgccg

SEQ ID NO: 359344 - RNA, 19 nt, Artificial Sequence
  Description of Artificial Sequence: Synthetic oligonucleotide
ggcccagguaacgccuaaa

SEQ ID NO: 359345 - RNA, 19 nt, Artificial Sequence
  Description of Artificial Sequence: Synthetic oligonucleotide
ggccuaaaaggaagcuguu

SEQ ID NO: 359346 - RNA, 19 nt, Artificial Sequence
  Description of Artificial Sequence: Synthetic oligonucleotide
gccccggggaccgcccaga

SEQ ID NO: 359347 - RNA, 19 nt, Artificial Sequence
  Description of Artificial Sequence: Synthetic oligonucleotide
cgccccaagugcgccaugu

SEQ ID NO: 359348 - RNA, 19 nt, Artificial Sequence
  Description of Artificial Sequence: Synthetic oligonucleotide
uucaucaucaucaucauca

SEQ ID NO: 359349 - RNA, 19 nt, Artificial Sequence
  Description of Artificial Sequence: Synthetic oligonucleotide
ugugguucuauccugaagg

SEQ ID NO: 359350 - RNA, 19 nt, Artificial Sequence
  Description of Artificial Sequence: Synthetic oligonucleotide
auuacuuucagcuccgccc

SEQ ID NO: 359351 - RNA, 19 nt, Artificial Sequence
  Description of Artificial Sequence: Synthetic oligonucleotide
acuaauccgaccuucauac

SEQ ID NO: 359352 - RNA, 19 nt, Artificial Sequence
  Description of Artificial Sequence: Synthetic oligonucleotide
agauuugccaaucuuauuc

SEQ ID NO: 359353 - RNA, 19 nt, Artificial Sequence
  Description of Artificial Sequence: Synthetic oligonucleotide
uaguagaacgaacagaucc

SEQ ID NO: 359354 - RNA, 19 nt, Artificial Sequence
  Description of Artificial Sequence: Synthetic oligonucleotide
uuuuacaccagcuaggugu

SEQ ID NO: 359355 - RNA, 19 nt, Artificial Sequence
  Description of Artificial Sequence: Synthetic oligonucleotide
aacgaacagauccacuugc

SEQ ID NO: 359356 - RNA, 19 nt, Artificial Sequence
  Description of Artificial Sequence: Synthetic oligonucleotide
  modified_base (10)..(10): a, c, u, g, unknown or other
aauuucgagngaaagauga

SEQ ID NO: 359357 - RNA, 19 nt, Artificial Sequence
  Description of Artificial Sequence: Synthetic oligonucleotide
agcauaccuauuuaaauac

SEQ ID NO: 359358 - RNA, 19 nt, Artificial Sequence
  Description of Artificial Sequence: Synthetic oligonucleotide
aauacuguaacauguucca

SEQ ID NO: 359359 - RNA, 19 nt, Artificial Sequence
  Description of Artificial Sequence: Synthetic oligonucleotide
uaaagaauguugaaaugag

SEQ ID NO: 359360 - RNA, 19 nt, Artificial Sequence
  Description of Artificial Sequence: Synthetic oligonucleotide
agauucaucagaugcuugc

SEQ ID NO: 359361 - RNA, 19 nt, Artificial Sequence
  Description of Artificial Sequence: Synthetic oligonucleotide
uguaacauguuccacuggc

SEQ ID NO: 359362 - RNA, 19 nt, Artificial Sequence
  Description of Artificial Sequence: Synthetic oligonucleotide
cugaagugguccaagaucg

SEQ ID NO: 359363 - RNA, 19 nt, Artificial Sequence
  Description of Artificial Sequence: Synthetic oligonucleotide
uucacagguguuauuauag

SEQ ID NO: 359364 - RNA, 19 nt, Artificial Sequence
  Description of Artificial Sequence: Synthetic oligonucleotide
cauuaggacuaguagaacg

SEQ ID NO: 359365 - RNA, 19 nt, Artificial Sequence
  Description of Artificial Sequence: Synthetic oligonucleotide
aagaauguugaaaugagca

SEQ ID NO: 359366 - RNA, 19 nt, Artificial Sequence
  Description of Artificial Sequence: Synthetic oligonucleotide
aaagaauguugaaaugagc

SEQ ID NO: 359367 - RNA, 19 nt, Artificial Sequence
  Description of Artificial Sequence: Synthetic oligonucleotide
ucucuaagcgacuaauccg

SEQ ID NO: 359368 - RNA, 19 nt, Artificial Sequence
  Description of Artificial Sequence: Synthetic oligonucleotide
  modified_base (7)..(7): a, c, u, g, unknown or other
uucgagngaaagaugauuc

SEQ ID NO: 359369 - RNA, 19 nt, Artificial Sequence
  Description of Artificial Sequence: Synthetic oligonucleotide
uugucugaagucuuacucg

SEQ ID NO: 359370 - RNA, 19 nt, Artificial Sequence
  Description of Artificial Sequence: Synthetic oligonucleotide
ugaucuaaagcuccauucc

SEQ ID NO: 359371 - RNA, 19 nt, Artificial Sequence
  Description of Artificial Sequence: Synthetic oligonucleotide
uguugaaaugagcauaccu

SEQ ID NO: 359372 - RNA, 19 nt, Artificial Sequence
  Description of Artificial Sequence: Synthetic oligonucleotide
acaacucuugguuugcugg

SEQ ID NO: 359373 - RNA, 19 nt, Artificial Sequence
  Description of Artificial Sequence: Synthetic oligonucleotide
ugagugaucguuuugacuu

SEQ ID NO: 359374 - RNA, 19 nt, Artificial Sequence
  Description of Artificial Sequence: Synthetic oligonucleotide
aucaucaucaucaucaucu

SEQ ID NO: 359375 - RNA, 19 nt, Artificial Sequence
  Description of Artificial Sequence: Synthetic oligonucleotide
agucuuacucgucugaaag

SEQ ID NO: 359376 - RNA, 19 nt, Artificial Sequence
  Description of Artificial Sequence: Synthetic oligonucleotide
  modified_base (12)..(12): a, c, u, g, unknown or other
ucaauuucgagngaaagau

SEQ ID NO: 359377 - RNA, 19 nt, Artificial Sequence
  Description of Artificial Sequence: Synthetic oligonucleotide
uucgccauuguuuugagaa

SEQ ID NO: 359378 - RNA, 19 nt, Artificial Sequence
  Description of Artificial Sequence: Synthetic oligonucleotide
ugguuguuagucaaggaug

SEQ ID NO: 359379 - RNA, 19 nt, Artificial Sequence
  Description of Artificial Sequence: Synthetic oligonucleotide
uagauggccgcucaacugg

SEQ ID NO: 359380 - RNA, 19 nt, Artificial Sequence
  Description of Artificial Sequence: Synthetic oligonucleotide
gaucgauuuguagagauug

SEQ ID NO: 359381 - RNA, 19 nt, Artificial Sequence
  Description of Artificial Sequence: Synthetic oligonucleotide
aauacugcuguggaaguag

SEQ ID NO: 359382 - RNA, 19 nt, Artificial Sequence
  Description of Artificial Sequence: Synthetic oligonucleotide
uaaacuggcgaccacgaac

SEQ ID NO: 359383 - RNA, 19 nt, Artificial Sequence
  Description of Artificial Sequence: Synthetic oligonucleotide
aaugagcauaccuauuuaa

SEQ ID NO: 359384 - RNA, 19 nt, Artificial Sequence
  Description of Artificial Sequence: Synthetic oligonucleotide
uguuaaacuggcgaccacg

SEQ ID NO: 359385 - RNA, 19 nt, Artificial Sequence
  Description of Artificial Sequence: Synthetic oligonucleotide
gauauuggcuguugguggg

SEQ ID NO: 359386 - RNA, 19 nt, Artificial Sequence
  Description of Artificial Sequence: Synthetic oligonucleotide
agaaauggagggcugaaca

SEQ ID NO: 359387 - RNA, 19 nt, Artificial Sequence
  Description of Artificial Sequence: Synthetic oligonucleotide
uguugacuuauuuccagcc

SEQ ID NO: 359388 - RNA, 19 nt, Artificial Sequence
  Description of Artificial Sequence: Synthetic oligonucleotide
uauaguuuacagaucacuu

SEQ ID NO: 359389 - RNA, 19 nt, Artificial Sequence
  Description of Artificial Sequence: Synthetic oligonucleotide
uuaagagcagucauucgga

SEQ ID NO: 359390 - RNA, 19 nt, Artificial Sequence
  Description of Artificial Sequence: Synthetic oligonucleotide
aaggcgugacaguucagac

SEQ ID NO: 359391 - RNA, 19 nt, Artificial Sequence
  Description of Artificial Sequence: Synthetic oligonucleotide
accucaacuauguuugggg

SEQ ID NO: 359392 - RNA, 19 nt, Artificial Sequence
  Description of Artificial Sequence: Synthetic oligonucleotide
ucuaaaucuuucugaaugu

SEQ ID NO: 359393 - RNA, 19 nt, Artificial Sequence
  Description of Artificial Sequence: Synthetic oligonucleotide
cucucuaagcgacuaaucc

SEQ ID NO: 359394 - RNA, 19 nt, Artificial Sequence
  Description of Artificial Sequence: Synthetic oligonucleotide
aagaucgauuuguagagau

SEQ ID NO: 359395 - RNA, 19 nt, Artificial Sequence
  Description of Artificial Sequence: Synthetic oligonucleotide
uuauaguuuacagaucacu

SEQ ID NO: 359396 - RNA, 19 nt, Artificial Sequence
  Description of Artificial Sequence: Synthetic oligonucleotide
ugcuaguauccacagaaga

SEQ ID NO: 359397 - RNA, 19 nt, Artificial Sequence
  Description of Artificial Sequence: Synthetic oligonucleotide
aacauuaggacuaguagaa

SEQ ID NO: 359398 - RNA, 19 nt, Artificial Sequence
  Description of Artificial Sequence: Synthetic oligonucleotide
  modified_base (4)..(4): a, c, u, g, unknown or other
gagngaaagaugauucugc

SEQ ID NO: 359399 - RNA, 19 nt, Artificial Sequence
  Description of Artificial Sequence: Synthetic oligonucleotide
  modified_base (19)..(19): a, c, u, g, unknown or other
cuggcuaucaauuucgagn

SEQ ID NO: 359400 - RNA, 19 nt, Artificial Sequence
  Description of Artificial Sequence: Synthetic oligonucleotide
uuauuagugggcuccugag

SEQ ID NO: 359401 - RNA, 19 nt, Artificial Sequence
  Description of Artificial Sequence: Synthetic oligonucleotide
aauuucagccuuaagucgu

SEQ ID NO: 359402 - RNA, 19 nt, Artificial Sequence
  Description of Artificial Sequence: Synthetic oligonucleotide
cauagguguauaaucuccc

SEQ ID NO: 359403 - RNA, 19 nt, Artificial Sequence
  Description of Artificial Sequence: Synthetic oligonucleotide
gacaguugcagguguaacc

SEQ ID NO: 359404 - RNA, 19 nt, Artificial Sequence
  Description of Artificial Sequence: Synthetic oligonucleotide
ugagcauaccuauuuaaau

SEQ ID NO: 359405 - RNA, 19 nt, Artificial Sequence
  Description of Artificial Sequence: Synthetic oligonucleotide
acuaguagaacgaacagau

SEQ ID NO: 359406 - RNA, 19 nt, Artificial Sequence
  Description of Artificial Sequence: Synthetic oligonucleotide
uaauuaauauucccucuau

SEQ ID NO: 359407 - RNA, 19 nt, Artificial Sequence
  Description of Artificial Sequence: Synthetic oligonucleotide
cuuccauagguguauaauc

SEQ ID NO: 359408 - RNA, 19 nt, Artificial Sequence
  Description of Artificial Sequence: Synthetic oligonucleotide
uuccaaauacuguaacaug

SEQ ID NO: 359409 - RNA, 19 nt, Artificial Sequence
  Description of Artificial Sequence: Synthetic oligonucleotide
agagcagucauucggacau

SEQ ID NO: 359410 - RNA, 19 nt, Artificial Sequence
  Description of Artificial Sequence: Synthetic oligonucleotide
ugauuauaaacuugaguuu

SEQ ID NO: 359411 - RNA, 19 nt, Artificial Sequence
  Description of Artificial Sequence: Synthetic oligonucleotide
acaauugccuuccuugucu

SEQ ID NO: 359412 - RNA, 19 nt, Artificial Sequence
  Description of Artificial Sequence: Synthetic oligonucleotide
uuaggaugggcugagaaau

SEQ ID NO: 359413 - RNA, 19 nt, Artificial Sequence
  Description of Artificial Sequence: Synthetic oligonucleotide
uuacuuucagcuccgccca

SEQ ID NO: 359414 - RNA, 19 nt, Artificial Sequence
  Description of Artificial Sequence: Synthetic oligonucleotide
agaaacaacaggaguuggc

SEQ ID NO: 359415 - RNA, 19 nt, Artificial Sequence
  Description of Artificial Sequence: Synthetic oligonucleotide
ucaacuauguuuggggaca

SEQ ID NO: 359416 - RNA, 19 nt, Artificial Sequence
  Description of Artificial Sequence: Synthetic oligonucleotide
uaguauccacagaagaacu

SEQ ID NO: 359417 - RNA, 19 nt, Artificial Sequence
  Description of Artificial Sequence: Synthetic oligonucleotide
agaagugguuugcugaucu

SEQ ID NO: 359418 - RNA, 19 nt, Artificial Sequence
  Description of Artificial Sequence: Synthetic oligonucleotide
  modified_base (3)..(3): a, c, u, g, unknown or other
agngaaagaugauucugcu

SEQ ID NO: 359419 - RNA, 19 nt, Artificial Sequence
  Description of Artificial Sequence: Synthetic oligonucleotide
agaacgaacagauccacuu

SEQ ID NO: 359420 - RNA, 19 nt, Artificial Sequence
  Description of Artificial Sequence: Synthetic oligonucleotide
agccuuauuagugggcucc

SEQ ID NO: 359421 - RNA, 19 nt, Artificial Sequence
  Description of Artificial Sequence: Synthetic oligonucleotide
aauccugauuauaaacuug

SEQ ID NO: 359422 - RNA, 19 nt, Artificial Sequence
  Description of Artificial Sequence: Synthetic oligonucleotide
uagguguauaaucucccug

SEQ ID NO: 359423 - RNA, 19 nt, Artificial Sequence
  Description of Artificial Sequence: Synthetic oligonucleotide
agguguaaccauugggcgg

SEQ ID NO: 359424 - RNA, 19 nt, Artificial Sequence
  Description of Artificial Sequence: Synthetic oligonucleotide
cuugcacuuccaaauacug

SEQ ID NO: 359425 - RNA, 19 nt, Artificial Sequence
  Description of Artificial Sequence: Synthetic oligonucleotide
  modified_base (2)..(2): a, c, u, g, unknown or other
gngaaagaugauucugcug

SEQ ID NO: 359426 - RNA, 19 nt, Artificial Sequence
  Description of Artificial Sequence: Synthetic oligonucleotide
uuagacucuggauuaaauu

SEQ ID NO: 359427 - RNA, 19 nt, Artificial Sequence
  Description of Artificial Sequence: Synthetic oligonucleotide
ugccauaacuucuuccuca

SEQ ID NO: 359428 - RNA, 19 nt, Artificial Sequence
  Description of Artificial Sequence: Synthetic oligonucleotide
uccggagccuuauuagugg

SEQ ID NO: 359429 - RNA, 19 nt, Artificial Sequence
  Description of Artificial Sequence: Synthetic oligonucleotide
cuugacaaucauuauauua

SEQ ID NO: 359430 - RNA, 19 nt, Artificial Sequence
  Description of Artificial Sequence: Synthetic oligonucleotide
ggucuuuuacaccagcuag

SEQ ID NO: 359431 - RNA, 19 nt, Artificial Sequence
  Description of Artificial Sequence: Synthetic oligonucleotide
uuuagacucuggauuaaau

SEQ ID NO: 359432 - RNA, 19 nt, Artificial Sequence
  Description of Artificial Sequence: Synthetic oligonucleotide
gaugcauuugaucuugcaa

SEQ ID NO: 359433 - RNA, 19 nt, Artificial Sequence
  Description of Artificial Sequence: Synthetic oligonucleotide
agaauguugaaaugagcau

SEQ ID NO: 359434 - RNA, 19 nt, Artificial Sequence
  Description of Artificial Sequence: Synthetic oligonucleotide
uucuguugaucuaaagcuc

SEQ ID NO: 359435 - RNA, 19 nt, Artificial Sequence
  Description of Artificial Sequence: Synthetic oligonucleotide
aaacuggcgaccacgaaca

SEQ ID NO: 359436 - RNA, 19 nt, Artificial Sequence
  Description of Artificial Sequence: Synthetic oligonucleotide
gguucuauccugaaggucc

SEQ ID NO: 359437 - RNA, 19 nt, Artificial Sequence
  Description of Artificial Sequence: Synthetic oligonucleotide
uucuguaccuggaucaguc

SEQ ID NO: 359438 - RNA, 19 nt, Artificial Sequence
  Description of Artificial Sequence: Synthetic oligonucleotide
uguuagucaaggaugcauu

SEQ ID NO: 359439 - RNA, 19 nt, Artificial Sequence
  Description of Artificial Sequence: Synthetic oligonucleotide
gauuacuuucagcuccgcc

SEQ ID NO: 359440 - RNA, 19 nt, Artificial Sequence
  Description of Artificial Sequence: Synthetic oligonucleotide
ugagucuuguaccugcguc

SEQ ID NO: 359441 - RNA, 19 nt, Artificial Sequence
  Description of Artificial Sequence: Synthetic oligonucleotide
uagugguuggguuugugac

SEQ ID NO: 359442 - RNA, 19 nt, Artificial Sequence
  Description of Artificial Sequence: Synthetic oligonucleotide
acuaccaguuccuucauua

SEQ ID NO: 359443 - RNA, 19 nt, Artificial Sequence
  Description of Artificial Sequence: Synthetic oligonucleotide
auaguuuacagaucacuua

SEQ ID NO: 359444 - RNA, 19 nt, Artificial Sequence
  Description of Artificial Sequence: Synthetic oligonucleotide
ucauuucguacuuugcuua

SEQ ID NO: 359445 - RNA, 19 nt, Artificial Sequence
  Description of Artificial Sequence: Synthetic oligonucleotide
gagauugugaagucucuuc

SEQ ID NO: 359446 - RNA, 19 nt, Artificial Sequence
  Description of Artificial Sequence: Synthetic oligonucleotide
aagacugaauggaacucuc

SEQ ID NO: 359447 - RNA, 19 nt, Artificial Sequence
  Description of Artificial Sequence: Synthetic oligonucleotide
ucgucugaaaggcuuuggc

SEQ ID NO: 359448 - RNA, 19 nt, Artificial Sequence
  Description of Artificial Sequence: Synthetic oligonucleotide
ucuguuaaacuggcgacca

SEQ ID NO: 359449 - RNA, 19 nt, Artificial Sequence
  Description of Artificial Sequence: Synthetic oligonucleotide
gacuuaagagcagucauuc

SEQ ID NO: 359450 - RNA, 19 nt, Artificial Sequence
  Description of Artificial Sequence: Synthetic oligonucleotide
guagaaacaacaggaguug

SEQ ID NO: 359451 - RNA, 19 nt, Artificial Sequence
  Description of Artificial Sequence: Synthetic oligonucleotide
ucuuuuacaccagcuaggu

SEQ ID NO: 359452 - RNA, 19 nt, Artificial Sequence
  Description of Artificial Sequence: Synthetic oligonucleotide
ucgauuuguagagauugug

SEQ ID NO: 359453 - RNA, 19 nt, Artificial Sequence
  Description of Artificial Sequence: Synthetic oligonucleotide
gaacgaacagauccacuug

SEQ ID NO: 359454 - RNA, 19 nt, Artificial Sequence
  Description of Artificial Sequence: Synthetic oligonucleotide
gagcauaccuauuuaaaua

SEQ ID NO: 359455 - RNA, 19 nt, Artificial Sequence
  Description of Artificial Sequence: Synthetic oligonucleotide
uuugcugaucugacugaag

SEQ ID NO: 359456 - RNA, 19 nt, Artificial Sequence
  Description of Artificial Sequence: Synthetic oligonucleotide
uugagugaucguuuugacu

SEQ ID NO: 359457 - RNA, 19 nt, Artificial Sequence
  Description of Artificial Sequence: Synthetic oligonucleotide
gaauggaacucuccauggc

SEQ ID NO: 359458 - RNA, 19 nt, Artificial Sequence
  Description of Artificial Sequence: Synthetic oligonucleotide
gagggcugaacauuaggac

SEQ ID NO: 359459 - RNA, 19 nt, Artificial Sequence
  Description of Artificial Sequence: Synthetic oligonucleotide
ugacauugaaauacauuuu

SEQ ID NO: 359460 - RNA, 19 nt, Artificial Sequence
  Description of Artificial Sequence: Synthetic oligonucleotide
uuuguaccaccucaacuau

SEQ ID NO: 359461 - RNA, 19 nt, Artificial Sequence
  Description of Artificial Sequence: Synthetic oligonucleotide
auuaggacuaguagaacga

SEQ ID NO: 359462 - RNA, 19 nt, Artificial Sequence
  Description of Artificial Sequence: Synthetic oligonucleotide
gacuuauuuccagccauag

SEQ ID NO: 359463 - RNA, 19 nt, Artificial Sequence
  Description of Artificial Sequence: Synthetic oligonucleotide
cagucauucggacauccag

SEQ ID NO: 359464 - RNA, 19 nt, Artificial Sequence
  Description of Artificial Sequence: Synthetic oligonucleotide
cucaacuauguuuggggac

SEQ ID NO: 359465 - RNA, 19 nt, Artificial Sequence
  Description of Artificial Sequence: Synthetic oligonucleotide
aggacuaguagaacgaaca

SEQ ID NO: 359466 - RNA, 19 nt, Artificial Sequence
  Description of Artificial Sequence: Synthetic oligonucleotide
agcagucauucggacaucc

SEQ ID NO: 359467 - RNA, 19 nt, Artificial Sequence
  Description of Artificial Sequence: Synthetic oligonucleotide
ccaagaucgauuuguagag

SEQ ID NO: 359468 - RNA, 19 nt, Artificial Sequence
  Description of Artificial Sequence: Synthetic oligonucleotide
  modified_base (6)..(6): a, c, u, g, unknown or other
ucgagngaaagaugauucu

SEQ ID NO: 359469 - RNA, 19 nt, Artificial Sequence
  Description of Artificial Sequence: Synthetic oligonucleotide
ugaggggagaucagauuca

SEQ ID NO: 359470 - RNA, 19 nt, Artificial Sequence
  Description of Artificial Sequence: Synthetic oligonucleotide
aguggguugcacaaaagcu

SEQ ID NO: 359471 - RNA, 19 nt, Artificial Sequence
  Description of Artificial Sequence: Synthetic oligonucleotide
uaggacuaguagaacgaac

SEQ ID NO: 359472 - RNA, 19 nt, Artificial Sequence
  Description of Artificial Sequence: Synthetic oligonucleotide
ucuaaagcuccauuccuuu

SEQ ID NO: 359473 - RNA, 19 nt, Artificial Sequence
  Description of Artificial Sequence: Synthetic oligonucleotide
cuguaccuggaucaguccc

SEQ ID NO: 359474 - RNA, 19 nt, Artificial Sequence
  Description of Artificial Sequence: Synthetic oligonucleotide
cuaagcgacuaauccgacc

SEQ ID NO: 359475 - RNA, 19 nt, Artificial Sequence
  Description of Artificial Sequence: Synthetic oligonucleotide
uugcacuuccaaauacugu

SEQ ID NO: 359476 - RNA, 19 nt, Artificial Sequence
  Description of Artificial Sequence: Synthetic oligonucleotide
guugaaaugagcauaccua

SEQ ID NO: 359477 - RNA, 19 nt, Artificial Sequence
  Description of Artificial Sequence: Synthetic oligonucleotide
auagguguauaaucucccu

SEQ ID NO: 359478 - RNA, 19 nt, Artificial Sequence
  Description of Artificial Sequence: Synthetic oligonucleotide
  modified_base (11)..(11): a, c, u, g, unknown or other
caauuucgagngaaagaug

SEQ ID NO: 359479 - RNA, 19 nt, Artificial Sequence
  Description of Artificial Sequence: Synthetic oligonucleotide
uguuuaagcucuucauuuu

SEQ ID NO: 359480 - RNA, 19 nt, Artificial Sequence
  Description of Artificial Sequence: Synthetic oligonucleotide
acuacugcuaguauccaca

SEQ ID NO: 359481 - RNA, 19 nt, Artificial Sequence
  Description of Artificial Sequence: Synthetic oligonucleotide
aucacgguugcugucgggg

SEQ ID NO: 359482 - RNA, 19 nt, Artificial Sequence
  Description of Artificial Sequence: Synthetic oligonucleotide
uagagauugugaagucucu

SEQ ID NO: 359483 - RNA, 19 nt, Artificial Sequence
  Description of Artificial Sequence: Synthetic oligonucleotide
cugucuguuaaacuggcga

SEQ ID NO: 359484 - RNA, 19 nt, Artificial Sequence
  Description of Artificial Sequence: Synthetic oligonucleotide
uucguacuuugcuuaaauc

SEQ ID NO: 359485 - RNA, 19 nt, Artificial Sequence
  Description of Artificial Sequence: Synthetic oligonucleotide
guagagauugugaagucuc

SEQ ID NO: 359486 - RNA, 19 nt, Artificial Sequence
  Description of Artificial Sequence: Synthetic oligonucleotide
cucaaucugagggugacuc

SEQ ID NO: 359487 - RNA, 19 nt, Artificial Sequence
  Description of Artificial Sequence: Synthetic oligonucleotide
guacaguuaggaugggcug

SEQ ID NO: 359488 - RNA, 19 nt, Artificial Sequence
  Description of Artificial Sequence: Synthetic oligonucleotide
aagaagugguuugcugauc

SEQ ID NO: 359489 - RNA, 19 nt, Artificial Sequence
  Description of Artificial Sequence: Synthetic oligonucleotide
auccugauuauaaacuuga

SEQ ID NO: 359490 - RNA, 19 nt, Artificial Sequence
  Description of Artificial Sequence: Synthetic oligonucleotide
uggucuuuuacaccagcua

SEQ ID NO: 359491 - RNA, 19 nt, Artificial Sequence
  Description of Artificial Sequence: Synthetic oligonucleotide
agugcgcuuuggcaaagag

SEQ ID NO: 359492 - RNA, 19 nt, Artificial Sequence
  Description of Artificial Sequence: Synthetic oligonucleotide
cuucauacugggacuuaag

SEQ ID NO: 359493 - RNA, 19 nt, Artificial Sequence
  Description of Artificial Sequence: Synthetic oligonucleotide
aagucuuacucgucugaaa

SEQ ID NO: 359494 - RNA, 19 nt, Artificial Sequence
  Description of Artificial Sequence: Synthetic oligonucleotide
aguagaacgaacagaucca

SEQ ID NO: 359495 - RNA, 19 nt, Artificial Sequence
  Description of Artificial Sequence: Synthetic oligonucleotide
ugaaaugagcauaccuauu

SEQ ID NO: 359496 - RNA, 19 nt, Artificial Sequence
  Description of Artificial Sequence: Synthetic oligonucleotide
ucucucuaagcgacuaauc

SEQ ID NO: 359497 - RNA, 19 nt, Artificial Sequence
  Description of Artificial Sequence: Synthetic oligonucleotide
acauuaggacuaguagaac

SEQ ID NO: 359498 - RNA, 19 nt, Artificial Sequence
  Description of Artificial Sequence: Synthetic oligonucleotide
uacaguuaggaugggcuga

SEQ ID NO: 359499 - RNA, 19 nt, Artificial Sequence
  Description of Artificial Sequence: Synthetic oligonucleotide
uacaauugccuuccuuguc

SEQ ID NO: 359500 - RNA, 19 nt, Artificial Sequence
  Description of Artificial Sequence: Synthetic oligonucleotide
gacuaguagaacgaacaga

SEQ ID NO: 359501 - RNA, 19 nt, Artificial Sequence
  Description of Artificial Sequence: Synthetic oligonucleotide
  modified_base (8)..(8): a, c, u, g, unknown or other
uuucgagngaaagaugauu

SEQ ID NO: 359502 - RNA, 19 nt, Artificial Sequence
  Description of Artificial Sequence: Synthetic oligonucleotide
cacuuaauuaauauucccu

SEQ ID NO: 359503 - RNA, 19 nt, Artificial Sequence
  Description of Artificial Sequence: Synthetic oligonucleotide
uauaaucucccuggguaac

SEQ ID NO: 359504 - RNA, 19 nt, Artificial Sequence
  Description of Artificial Sequence: Synthetic oligonucleotide
cuuauuagugggcuccuga

SEQ ID NO: 359505 - RNA, 19 nt, Artificial Sequence
  Description of Artificial Sequence: Synthetic oligonucleotide
ccauagguguauaaucucc

SEQ ID NO: 359506 - RNA, 19 nt, Artificial Sequence
  Description of Artificial Sequence: Synthetic oligonucleotide
uuguaccaccucaacuaug

SEQ ID NO: 359507 - RNA, 19 nt, Artificial Sequence
  Description of Artificial Sequence: Synthetic oligonucleotide
cuacugcuaguauccacag

SEQ ID NO: 359508 - RNA, 19 nt, Artificial Sequence
  Description of Artificial Sequence: Synthetic oligonucleotide
gguguauaaucucccuggg

SEQ ID NO: 359509 - RNA, 19 nt, Artificial Sequence
  Description of Artificial Sequence: Synthetic oligonucleotide
gguuguuagucaaggaugc

SEQ ID NO: 359510 - RNA, 19 nt, Artificial Sequence
  Description of Artificial Sequence: Synthetic oligonucleotide
gguguuauuauaguuuaca

SEQ ID NO: 359511 - RNA, 19 nt, Artificial Sequence
  Description of Artificial Sequence: Synthetic oligonucleotide
gaucuaaagcuccauuccu

SEQ ID NO: 359512 - RNA, 19 nt, Artificial Sequence
  Description of Artificial Sequence: Synthetic oligonucleotide
gaaacaacaggaguuggcu

SEQ ID NO: 359513 - RNA, 19 nt, Artificial Sequence
  Description of Artificial Sequence: Synthetic oligonucleotide
guuugugacaguugcaggu

SEQ ID NO: 359514 - RNA, 19 nt, Artificial Sequence
  Description of Artificial Sequence: Synthetic oligonucleotide
aauggagggcugaacauua

SEQ ID NO: 359515 - RNA, 19 nt, Artificial Sequence
  Description of Artificial Sequence: Synthetic oligonucleotide
ucuaagcgacuaauccgac

SEQ ID NO: 359516 - RNA, 19 nt, Artificial Sequence
  Description of Artificial Sequence: Synthetic oligonucleotide
uccuucgccauuguuuuga

SEQ ID NO: 359517 - RNA, 19 nt, Artificial Sequence
  Description of Artificial Sequence: Synthetic oligonucleotide
agcgacuaauccgaccuuc

SEQ ID NO: 359518 - RNA, 19 nt, Artificial Sequence
  Description of Artificial Sequence: Synthetic oligonucleotide
cacuugcacuuccaaauac

SEQ ID NO: 359519 - RNA, 19 nt, Artificial Sequence
  Description of Artificial Sequence: Synthetic oligonucleotide
acucucgagugacuuuguc

SEQ ID NO: 359520 - RNA, 19 nt, Artificial Sequence
  Description of Artificial Sequence: Synthetic oligonucleotide
cauggcuuacaccucucug

SEQ ID NO: 359521 - RNA, 19 nt, Artificial Sequence
  Description of Artificial Sequence: Synthetic oligonucleotide
cacuuccaaauacuguaac

SEQ ID NO: 359522 - RNA, 19 nt, Artificial Sequence
  Description of Artificial Sequence: Synthetic oligonucleotide
gacuugagugaucguuuug

SEQ ID NO: 359523 - RNA, 19 nt, Artificial Sequence
  Description of Artificial Sequence: Synthetic oligonucleotide
ucaucaucaucaucaucau

SEQ ID NO: 359524 - RNA, 19 nt, Artificial Sequence
  Description of Artificial Sequence: Synthetic oligonucleotide
uuuuagacucuggauuaaa

SEQ ID NO: 359525 - RNA, 19 nt, Artificial Sequence
  Description of Artificial Sequence: Synthetic oligonucleotide
ugacuuauuuccagccaua

SEQ ID NO: 359526 - RNA, 19 nt, Artificial Sequence
  Description of Artificial Sequence: Synthetic oligonucleotide
uuaaacuggcgaccacgaa

SEQ ID NO: 359527 - RNA, 19 nt, Artificial Sequence
  Description of Artificial Sequence: Synthetic oligonucleotide
cugaacauuaggacuagua

SEQ ID NO: 359528 - RNA, 19 nt, Artificial Sequence
  Description of Artificial Sequence: Synthetic oligonucleotide
ucaaucugagggugacucu

SEQ ID NO: 359529 - RNA, 19 nt, Artificial Sequence
  Description of Artificial Sequence: Synthetic oligonucleotide
guauaaucucccuggguaa

SEQ ID NO: 359530 - RNA, 19 nt, Artificial Sequence
  Description of Artificial Sequence: Synthetic oligonucleotide
guaacauguuccacuggcc

SEQ ID NO: 359531 - RNA, 19 nt, Artificial Sequence
  Description of Artificial Sequence: Synthetic oligonucleotide
uuaggacuaguagaacgaa

SEQ ID NO: 359532 - RNA, 19 nt, Artificial Sequence
  Description of Artificial Sequence: Synthetic oligonucleotide
gucuguuaaacuggcgacc

SEQ ID NO: 359533 - RNA, 19 nt, Artificial Sequence
  Description of Artificial Sequence: Synthetic oligonucleotide
gauucaucagaugcuugca

SEQ ID NO: 359534 - RNA, 19 nt, Artificial Sequence
  Description of Artificial Sequence: Synthetic oligonucleotide
gaagugguuugcugaucug

SEQ ID NO: 359535 - RNA, 19 nt, Artificial Sequence
  Description of Artificial Sequence: Synthetic oligonucleotide
gacuaauccgaccuucaua

SEQ ID NO: 359536 - RNA, 19 nt, Artificial Sequence
  Description of Artificial Sequence: Synthetic oligonucleotide
cuggguaacuccuucucca

SEQ ID NO: 359537 - RNA, 19 nt, Artificial Sequence
  Description of Artificial Sequence: Synthetic oligonucleotide
cuaguagaacgaacagauc

SEQ ID NO: 359538 - RNA, 19 nt, Artificial Sequence
  Description of Artificial Sequence: Synthetic oligonucleotide
uggguuugugacaguugca

SEQ ID NO: 359539 - RNA, 19 nt, Artificial Sequence
  Description of Artificial Sequence: Synthetic oligonucleotide
ggguuugugacaguugcag

SEQ ID NO: 359540 - RNA, 19 nt, Artificial Sequence
  Description of Artificial Sequence: Synthetic oligonucleotide
auccgaccuucauacuggg

SEQ ID NO: 359541 - RNA, 19 nt, Artificial Sequence
  Description of Artificial Sequence: Synthetic oligonucleotide
aauguugucugaagucuua

SEQ ID NO: 359542 - RNA, 19 nt, Artificial Sequence
  Description of Artificial Sequence: Synthetic oligonucleotide
cagauucaucagaugcuug

SEQ ID NO: 359543 - RNA, 19 nt, Artificial Sequence
  Description of Artificial Sequence: Synthetic oligonucleotide
gagaaucagcagcucucug

SEQ ID NO: 359544 - RNA, 19 nt, Artificial Sequence
  Description of Artificial Sequence: Synthetic oligonucleotide
gugcgcuuuggcaaagagg

SEQ ID NO: 359545 - RNA, 19 nt, Artificial Sequence
  Description of Artificial Sequence: Synthetic oligonucleotide
acuugcacuuccaaauacu

SEQ ID NO: 359546 - RNA, 19 nt, Artificial Sequence
  Description of Artificial Sequence: Synthetic oligonucleotide
guagaacgaacagauccac

SEQ ID NO: 359547 - RNA, 19 nt, Artificial Sequence
  Description of Artificial Sequence: Synthetic oligonucleotide
cauacugagucuuguaccu

SEQ ID NO: 359548 - RNA, 19 nt, Artificial Sequence
  Description of Artificial Sequence: Synthetic oligonucleotide
ccgaccuucauacugggac

SEQ ID NO: 359549 - RNA, 19 nt, Artificial Sequence
  Description of Artificial Sequence: Synthetic oligonucleotide
aggcgugacaguucagacu

SEQ ID NO: 359550 - RNA, 19 nt, Artificial Sequence
  Description of Artificial Sequence: Synthetic oligonucleotide
gcugcuacaauugccuucc

SEQ ID NO: 359551 - RNA, 19 nt, Artificial Sequence
  Description of Artificial Sequence: Synthetic oligonucleotide
cagguguuauuauaguuua

SEQ ID NO: 359552 - RNA, 19 nt, Artificial Sequence
  Description of Artificial Sequence: Synthetic oligonucleotide
ucaucaucaucaucaucuu

SEQ ID NO: 359553 - RNA, 19 nt, Artificial Sequence
  Description of Artificial Sequence: Synthetic oligonucleotide
uugggcggauacuugcccu

SEQ ID NO: 359554 - RNA, 19 nt, Artificial Sequence
  Description of Artificial Sequence: Synthetic oligonucleotide
aaauacugcuguggaagua

SEQ ID NO: 359555 - RNA, 19 nt, Artificial Sequence
  Description of Artificial Sequence: Synthetic oligonucleotide
  modified_base (16)..(16): a, c, u, g, unknown or other
gcuaucaauuucgagngaa

SEQ ID NO: 359556 - RNA, 19 nt, Artificial Sequence
  Description of Artificial Sequence: Synthetic oligonucleotide
augagcauaccuauuuaaa

SEQ ID NO: 359557 - RNA, 19 nt, Artificial Sequence
  Description of Artificial Sequence: Synthetic oligonucleotide
guuaaacuggcgaccacga

SEQ ID NO: 359558 - RNA, 19 nt, Artificial Sequence
  Description of Artificial Sequence: Synthetic oligonucleotide
auuucagccuuaagucguc

SEQ ID NO: 359559 - RNA, 19 nt, Artificial Sequence
  Description of Artificial Sequence: Synthetic oligonucleotide
agguguuauuauaguuuac

SEQ ID NO: 359560 - RNA, 19 nt, Artificial Sequence
  Description of Artificial Sequence: Synthetic oligonucleotide
guuuugagaaucagcagcu

SEQ ID NO: 359561 - RNA, 19 nt, Artificial Sequence
  Description of Artificial Sequence: Synthetic oligonucleotide
guuuacagaucacuuaauu

SEQ ID NO: 359562 - RNA, 19 nt, Artificial Sequence
  Description of Artificial Sequence: Synthetic oligonucleotide
ucuugcaauuucagccuua

SEQ ID NO: 359563 - RNA, 19 nt, Artificial Sequence
  Description of Artificial Sequence: Synthetic oligonucleotide
cuucaucaucaucaucauc

SEQ ID NO: 359564 - RNA, 19 nt, Artificial Sequence
  Description of Artificial Sequence: Synthetic oligonucleotide
gaagacugaauggaacucu

SEQ ID NO: 359565 - RNA, 19 nt, Artificial Sequence
  Description of Artificial Sequence: Synthetic oligonucleotide
auggccgcucaacugguga

SEQ ID NO: 359566 - RNA, 19 nt, Artificial Sequence
  Description of Artificial Sequence: Synthetic oligonucleotide
cauuaccaucugcacuacc

SEQ ID NO: 359567 - RNA, 19 nt, Artificial Sequence
  Description of Artificial Sequence: Synthetic oligonucleotide
ugugugguucuauccugaa

SEQ ID NO: 359568 - RNA, 19 nt, Artificial Sequence
  Description of Artificial Sequence: Synthetic oligonucleotide
ugcuacaauugccuuccuu

SEQ ID NO: 359569 - RNA, 19 nt, Artificial Sequence
  Description of Artificial Sequence: Synthetic oligonucleotide
cagaagacugaauggaacu

SEQ ID NO: 359570 - RNA, 19 nt, Artificial Sequence
  Description of Artificial Sequence: Synthetic oligonucleotide
gaagaagugguuugcugau

SEQ ID NO: 359571 - RNA, 19 nt, Artificial Sequence
  Description of Artificial Sequence: Synthetic oligonucleotide
ugacgaaggcgugacaguu

SEQ ID NO: 359572 - RNA, 19 nt, Artificial Sequence
  Description of Artificial Sequence: Synthetic oligonucleotide
ugggcggauacuugcccug

SEQ ID NO: 359573 - RNA, 19 nt, Artificial Sequence
  Description of Artificial Sequence: Synthetic oligonucleotide
cucuauuuauuccuccucu

SEQ ID NO: 359574 - RNA, 19 nt, Artificial Sequence
  Description of Artificial Sequence: Synthetic oligonucleotide
uguugaucuaaagcuccau

SEQ ID NO: 359575 - RNA, 19 nt, Artificial Sequence
  Description of Artificial Sequence: Synthetic oligonucleotide
cacuugacucucgagugac

SEQ ID NO: 359576 - RNA, 19 nt, Artificial Sequence
  Description of Artificial Sequence: Synthetic oligonucleotide
guaccugcguccaauuuuc

SEQ ID NO: 359577 - RNA, 19 nt, Artificial Sequence
  Description of Artificial Sequence: Synthetic oligonucleotide
caucaucaucaucaucauc

SEQ ID NO: 359578 - RNA, 19 nt, Artificial Sequence
  Description of Artificial Sequence: Synthetic oligonucleotide
ggcaucacgguugcugucg

SEQ ID NO: 359579 - RNA, 19 nt, Artificial Sequence
  Description of Artificial Sequence: Synthetic oligonucleotide
ggggacaacucuugguuug

SEQ ID NO: 359580 - RNA, 19 nt, Artificial Sequence
  Description of Artificial Sequence: Synthetic oligonucleotide
gaagucuuacucgucugaa

SEQ ID NO: 359581 - RNA, 19 nt, Artificial Sequence
  Description of Artificial Sequence: Synthetic oligonucleotide
aacuggucuuuuacaccag

SEQ ID NO: 359582 - RNA, 19 nt, Artificial Sequence
  Description of Artificial Sequence: Synthetic oligonucleotide
cuggcucaaucugagggug

SEQ ID NO: 359583 - RNA, 19 nt, Artificial Sequence
  Description of Artificial Sequence: Synthetic oligonucleotide
caucauuaccaucugcacu

SEQ ID NO: 359584 - RNA, 19 nt, Artificial Sequence
  Description of Artificial Sequence: Synthetic oligonucleotide
uaaccauugggcggauacu

SEQ ID NO: 359585 - RNA, 19 nt, Artificial Sequence
  Description of Artificial Sequence: Synthetic oligonucleotide
gccauaacuucuuccucag

SEQ ID NO: 359586 - RNA, 19 nt, Artificial Sequence
  Description of Artificial Sequence: Synthetic oligonucleotide
ucacgguugcugucggggu

SEQ ID NO: 359587 - RNA, 19 nt, Artificial Sequence
  Description of Artificial Sequence: Synthetic oligonucleotide
uuguaccugcguccaauuu

SEQ ID NO: 359588 - RNA, 19 nt, Artificial Sequence
  Description of Artificial Sequence: Synthetic oligonucleotide
uacucgucugaaaggcuuu

SEQ ID NO: 359589 - RNA, 19 nt, Artificial Sequence
  Description of Artificial Sequence: Synthetic oligonucleotide
uaaucucccuggguaacuc

SEQ ID NO: 359590 - RNA, 19 nt, Artificial Sequence
  Description of Artificial Sequence: Synthetic oligonucleotide
ccaaucuuauucacaggug

SEQ ID NO: 359591 - RNA, 19 nt, Artificial Sequence
  Description of Artificial Sequence: Synthetic oligonucleotide
cucgucugaaaggcuuugg

SEQ ID NO: 359592 - RNA, 19 nt, Artificial Sequence
  Description of Artificial Sequence: Synthetic oligonucleotide
ugguucuauccugaagguc

SEQ ID NO: 359593 - RNA, 19 nt, Artificial Sequence
  Description of Artificial Sequence: Synthetic oligonucleotide
uuucagcuccgcccauacu

SEQ ID NO: 359594 - RNA, 19 nt, Artificial Sequence
  Description of Artificial Sequence: Synthetic oligonucleotide
ucgccauuguuuugagaau

SEQ ID NO: 359595 - RNA, 19 nt, Artificial Sequence
  Description of Artificial Sequence: Synthetic oligonucleotide
guggcugaaacagugccaa

SEQ ID NO: 359596 - RNA, 19 nt, Artificial Sequence
  Description of Artificial Sequence: Synthetic oligonucleotide
cugccauaacuucuuccuc

SEQ ID NO: 359597 - RNA, 19 nt, Artificial Sequence
  Description of Artificial Sequence: Synthetic oligonucleotide
ugauuacuuucagcuccgc

SEQ ID NO: 359598 - RNA, 19 nt, Artificial Sequence
  Description of Artificial Sequence: Synthetic oligonucleotide
cugucgggguagugguugg

SEQ ID NO: 359599 - RNA, 19 nt, Artificial Sequence
  Description of Artificial Sequence: Synthetic oligonucleotide
uugacucucgagugacuuu

SEQ ID NO: 359600 - RNA, 19 nt, Artificial Sequence
  Description of Artificial Sequence: Synthetic oligonucleotide
aucuaaagcuccauuccuu

SEQ ID NO: 359601 - RNA, 19 nt, Artificial Sequence
  Description of Artificial Sequence: Synthetic oligonucleotide
aucgauuuguagagauugu

SEQ ID NO: 359602 - RNA, 19 nt, Artificial Sequence
  Description of Artificial Sequence: Synthetic oligonucleotide
gcuaguauccacagaagaa

SEQ ID NO: 359603 - RNA, 19 nt, Artificial Sequence
  Description of Artificial Sequence: Synthetic oligonucleotide
  modified_base (9)..(9): a, c, u, g, unknown or other
auuucgagngaaagaugau

SEQ ID NO: 359604 - RNA, 19 nt, Artificial Sequence
  Description of Artificial Sequence: Synthetic oligonucleotide
agagauugugaagucucuu

SEQ ID NO: 359605 - RNA, 19 nt, Artificial Sequence
  Description of Artificial Sequence: Synthetic oligonucleotide
acgaacaccuugucucaau

SEQ ID NO: 359606 - RNA, 19 nt, Artificial Sequence
  Description of Artificial Sequence: Synthetic oligonucleotide
ucccauccccgugucaucu

SEQ ID NO: 359607 - RNA, 19 nt, Artificial Sequence
  Description of Artificial Sequence: Synthetic oligonucleotide
acgguugcugucgggguag

SEQ ID NO: 359608 - RNA, 19 nt, Artificial Sequence
  Description of Artificial Sequence: Synthetic oligonucleotide
cugcacuaccaguuccuuc

SEQ ID NO: 359609 - RNA, 19 nt, Artificial Sequence
  Description of Artificial Sequence: Synthetic oligonucleotide
acuuuacuuggaguagaaa

SEQ ID NO: 359610 - RNA, 19 nt, Artificial Sequence
  Description of Artificial Sequence: Synthetic oligonucleotide
gaaguagauggccgcucaa

SEQ ID NO: 359611 - RNA, 19 nt, Artificial Sequence
  Description of Artificial Sequence: Synthetic oligonucleotide
uacaccucucugucuguua

SEQ ID NO: 359612 - RNA, 19 nt, Artificial Sequence
  Description of Artificial Sequence: Synthetic oligonucleotide
ggaaguagauggccgcuca

SEQ ID NO: 359613 - RNA, 19 nt, Artificial Sequence
  Description of Artificial Sequence: Synthetic oligonucleotide
agauuggcugaggguaucu

SEQ ID NO: 359614 - RNA, 19 nt, Artificial Sequence
  Description of Artificial Sequence: Synthetic oligonucleotide
cuguuaaacuggcgaccac

SEQ ID NO: 359615 - RNA, 19 nt, Artificial Sequence
  Description of Artificial Sequence: Synthetic oligonucleotide
gggugugacugucuucagc

SEQ ID NO: 359616 - RNA, 19 nt, Artificial Sequence
  Description of Artificial Sequence: Synthetic oligonucleotide
ccuggguaacuccuucucc

SEQ ID NO: 359617 - RNA, 19 nt, Artificial Sequence
  Description of Artificial Sequence: Synthetic oligonucleotide
acucgucugaaaggcuuug

SEQ ID NO: 359618 - RNA, 19 nt, Artificial Sequence
  Description of Artificial Sequence: Synthetic oligonucleotide
gguuugcugaucugacuga

SEQ ID NO: 359619 - RNA, 19 nt, Artificial Sequence
  Description of Artificial Sequence: Synthetic oligonucleotide
ugcguccaauuuucuugac

SEQ ID NO: 359620 - RNA, 19 nt, Artificial Sequence
  Description of Artificial Sequence: Synthetic oligonucleotide
ucgggguagugguuggguu

SEQ ID NO: 359621 - RNA, 19 nt, Artificial Sequence
  Description of Artificial Sequence: Synthetic oligonucleotide
auauuggcuguuggugggu

SEQ ID NO: 359622 - RNA, 19 nt, Artificial Sequence
  Description of Artificial Sequence: Synthetic oligonucleotide
accugcguccaauuuucuu

SEQ ID NO: 359623 - RNA, 19 nt, Artificial Sequence
  Description of Artificial Sequence: Synthetic oligonucleotide
guuccggagccuuauuagu

SEQ ID NO: 359624 - RNA, 19 nt, Artificial Sequence
  Description of Artificial Sequence: Synthetic oligonucleotide
uggccgcucaacuggugaa

SEQ ID NO: 359625 - RNA, 19 nt, Artificial Sequence
  Description of Artificial Sequence: Synthetic oligonucleotide
gaugcuugcacaggcuccu

SEQ ID NO: 359626 - RNA, 19 nt, Artificial Sequence
  Description of Artificial Sequence: Synthetic oligonucleotide
uaccugcguccaauuuucu

SEQ ID NO: 359627 - RNA, 19 nt, Artificial Sequence
  Description of Artificial Sequence: Synthetic oligonucleotide
cccauugcauggcuuacac

SEQ ID NO: 359628 - RNA, 19 nt, Artificial Sequence
  Description of Artificial Sequence: Synthetic oligonucleotide
cucaguugccacgggugug

SEQ ID NO: 359629 - RNA, 19 nt, Artificial Sequence
  Description of Artificial Sequence: Synthetic oligonucleotide
  modified_base (5)..(5): a, c, u, g, unknown or other
cgagngaaagaugauucug

SEQ ID NO: 359630 - RNA, 19 nt, Artificial Sequence
  Description of Artificial Sequence: Synthetic oligonucleotide
guuguuagucaaggaugca

SEQ ID NO: 359631 - RNA, 19 nt, Artificial Sequence
  Description of Artificial Sequence: Synthetic oligonucleotide
ggauacuugcccugggugu

SEQ ID NO: 359632 - RNA, 19 nt, Artificial Sequence
  Description of Artificial Sequence: Synthetic oligonucleotide
gucauucggacauccaguu

SEQ ID NO: 359633 - RNA, 19 nt, Artificial Sequence
  Description of Artificial Sequence: Synthetic oligonucleotide
aggggagaucagauucauc

SEQ ID NO: 359634 - RNA, 19 nt, Artificial Sequence
  Description of Artificial Sequence: Synthetic oligonucleotide
uccccgugucaucuucauc

SEQ ID NO: 359635 - RNA, 19 nt, Artificial Sequence
  Description of Artificial Sequence: Synthetic oligonucleotide
gcugucgggguagugguug

SEQ ID NO: 359636 - RNA, 19 nt, Artificial Sequence
  Description of Artificial Sequence: Synthetic oligonucleotide
ccggagccuuauuaguggg

SEQ ID NO: 359637 - RNA, 19 nt, Artificial Sequence
  Description of Artificial Sequence: Synthetic oligonucleotide
gucuuccauagguguauaa

SEQ ID NO: 359638 - RNA, 19 nt, Artificial Sequence
  Description of Artificial Sequence: Synthetic oligonucleotide
agaucgauuuguagagauu

SEQ ID NO: 359639 - RNA, 19 nt, Artificial Sequence
  Description of Artificial Sequence: Synthetic oligonucleotide
ccauugcauggcuuacacc

SEQ ID NO: 359640 - RNA, 19 nt, Artificial Sequence
  Description of Artificial Sequence: Synthetic oligonucleotide
gggacuuaagagcagucau

SEQ ID NO: 359641 - RNA, 19 nt, Artificial Sequence
  Description of Artificial Sequence: Synthetic oligonucleotide
auccccgugucaucuucau

SEQ ID NO: 359642 - RNA, 19 nt, Artificial Sequence
  Description of Artificial Sequence: Synthetic oligonucleotide
ccucaacuauguuugggga

SEQ ID NO: 359643 - RNA, 19 nt, Artificial Sequence
  Description of Artificial Sequence: Synthetic oligonucleotide
cuucgccauuguuuugaga

SEQ ID NO: 359644 - RNA, 19 nt, Artificial Sequence
  Description of Artificial Sequence: Synthetic oligonucleotide
ggcggauacuugcccuggg

SEQ ID NO: 359645 - RNA, 19 nt, Artificial Sequence
  Description of Artificial Sequence: Synthetic oligonucleotide
cacgggugugacugucuuc

SEQ ID NO: 359646 - RNA, 19 nt, Artificial Sequence
  Description of Artificial Sequence: Synthetic oligonucleotide
gauacuugcccuggguguu

SEQ ID NO: 359647 - RNA, 19 nt, Artificial Sequence
  Description of Artificial Sequence: Synthetic oligonucleotide
cauccccgugucaucuuca

SEQ ID NO: 359648 - RNA, 19 nt, Artificial Sequence
  Description of Artificial Sequence: Synthetic oligonucleotide
gggacaacucuugguuugc

SEQ ID NO: 359649 - RNA, 19 nt, Artificial Sequence
  Description of Artificial Sequence: Synthetic oligonucleotide
cuccgcccauacuuucuuc

SEQ ID NO: 359650 - RNA, 19 nt, Artificial Sequence
  Description of Artificial Sequence: Synthetic oligonucleotide
ggcucaaucugagggugac

SEQ ID NO: 359651 - RNA, 19 nt, Artificial Sequence
  Description of Artificial Sequence: Synthetic oligonucleotide
caaggaugcauuugaucuu

SEQ ID NO: 359652 - RNA, 19 nt, Artificial Sequence
  Description of Artificial Sequence: Synthetic oligonucleotide
ggagccuuauuagugggcu

SEQ ID NO: 359653 - RNA, 19 nt, Artificial Sequence
  Description of Artificial Sequence: Synthetic oligonucleotide
acuugacucucgagugacu

SEQ ID NO: 359654 - RNA, 19 nt, Artificial Sequence
  Description of Artificial Sequence: Synthetic oligonucleotide
uguaaccauugggcggaua

SEQ ID NO: 359655 - RNA, 19 nt, Artificial Sequence
  Description of Artificial Sequence: Synthetic oligonucleotide
caguacuuucuucugccau

SEQ ID NO: 359656 - RNA, 19 nt, Artificial Sequence
  Description of Artificial Sequence: Synthetic oligonucleotide
cggauacuugcccugggug

SEQ ID NO: 359657 - RNA, 19 nt, Artificial Sequence
  Description of Artificial Sequence: Synthetic oligonucleotide
gagugaucguuuugacuuu

SEQ ID NO: 359658 - RNA, 19 nt, Artificial Sequence
  Description of Artificial Sequence: Synthetic oligonucleotide
agcuccgcccauacuuucu

SEQ ID NO: 359659 - RNA, 19 nt, Artificial Sequence
  Description of Artificial Sequence: Synthetic oligonucleotide
gaacuugggguggcugaaa

SEQ ID NO: 359660 - RNA, 19 nt, Artificial Sequence
  Description of Artificial Sequence: Synthetic oligonucleotide
ccuucgccauuguuuugag

SEQ ID NO: 359661 - RNA, 19 nt, Artificial Sequence
  Description of Artificial Sequence: Synthetic oligonucleotide
ugccacgggugugacuguc

SEQ ID NO: 359662 - RNA, 19 nt, Artificial Sequence
  Description of Artificial Sequence: Synthetic oligonucleotide
cugacgaaggcgugacagu

SEQ ID NO: 359663 - RNA, 19 nt, Artificial Sequence
  Description of Artificial Sequence: Synthetic oligonucleotide
uugccacgggugugacugu

SEQ ID NO: 359664 - RNA, 19 nt, Artificial Sequence
  Description of Artificial Sequence: Synthetic oligonucleotide
  modified_base (17)..(17): a, c, u, g, unknown or other
ggcuaucaauuucgagnga

SEQ ID NO: 359665 - RNA, 19 nt, Artificial Sequence
  Description of Artificial Sequence: Synthetic oligonucleotide
cuaauccgaccuucauacu

SEQ ID NO: 359666 - RNA, 19 nt, Artificial Sequence
  Description of Artificial Sequence: Synthetic oligonucleotide
gggcggauacuugcccugg

SEQ ID NO: 359667 - RNA, 19 nt, Artificial Sequence
  Description of Artificial Sequence: Synthetic oligonucleotide
cuuacaccucucugucugu

SEQ ID NO: 359668 - RNA, 19 nt, Artificial Sequence
  Description of Artificial Sequence: Synthetic oligonucleotide
gagugcgcuuuggcaaaga

SEQ ID NO: 359669 - RNA, 19 nt, Artificial Sequence
  Description of Artificial Sequence: Synthetic oligonucleotide
gaacucuccauggccuuau

SEQ ID NO: 359670 - RNA, 19 nt, Artificial Sequence
  Description of Artificial Sequence: Synthetic oligonucleotide
gaggggagaucagauucau

SEQ ID NO: 359671 - RNA, 19 nt, Artificial Sequence
  Description of Artificial Sequence: Synthetic oligonucleotide
gaccuucauacugggacuu

SEQ ID NO: 359672 - RNA, 19 nt, Artificial Sequence
  Description of Artificial Sequence: Synthetic oligonucleotide
ccgcccauacuuucuucug

SEQ ID NO: 359673 - RNA, 19 nt, Artificial Sequence
  Description of Artificial Sequence: Synthetic oligonucleotide
gagcagucauucggacauc

SEQ ID NO: 359674 - RNA, 19 nt, Artificial Sequence
  Description of Artificial Sequence: Synthetic oligonucleotide
gcacuuccaaauacuguaa

SEQ ID NO: 359675 - RNA, 19 nt, Artificial Sequence
  Description of Artificial Sequence: Synthetic oligonucleotide
cuuguaccugcguccaauu

SEQ ID NO: 359676 - RNA, 19 nt, Artificial Sequence
  Description of Artificial Sequence: Synthetic oligonucleotide
cagauuugccaaucuuauu

SEQ ID NO: 359677 - RNA, 19 nt, Artificial Sequence
  Description of Artificial Sequence: Synthetic oligonucleotide
gcguccaauuuucuugacu

SEQ ID NO: 359678 - RNA, 19 nt, Artificial Sequence
  Description of Artificial Sequence: Synthetic oligonucleotide
accuucauacugggacuua

SEQ ID NO: 359679 - RNA, 19 nt, Artificial Sequence
  Description of Artificial Sequence: Synthetic oligonucleotide
gguccugacgaaggcguga

SEQ ID NO: 359680 - RNA, 19 nt, Artificial Sequence
  Description of Artificial Sequence: Synthetic oligonucleotide
cacgguugcugucggggua

SEQ ID NO: 359681 - RNA, 19 nt, Artificial Sequence
  Description of Artificial Sequence: Synthetic oligonucleotide
gcgacuaauccgaccuuca

SEQ ID NO: 359682 - RNA, 19 nt, Artificial Sequence
  Description of Artificial Sequence: Synthetic oligonucleotide
gguccaagaucgauuugua

SEQ ID NO: 359683 - RNA, 19 nt, Artificial Sequence
  Description of Artificial Sequence: Synthetic oligonucleotide
ccauccccgugucaucuuc

SEQ ID NO: 359684 - RNA, 19 nt, Artificial Sequence
  Description of Artificial Sequence: Synthetic oligonucleotide
ccacuugacucucgaguga

SEQ ID NO: 359685 - RNA, 19 nt, Artificial Sequence
  Description of Artificial Sequence: Synthetic oligonucleotide
gcgaccacgaacaccuugu

SEQ ID NO: 359686 - RNA, 19 nt, Artificial Sequence
  Description of Artificial Sequence: Synthetic oligonucleotide
gucgggguagugguugggu

SEQ ID NO: 359687 - RNA, 19 nt, Artificial Sequence
  Description of Artificial Sequence: Synthetic oligonucleotide
ggacuuaagagcagucauu

SEQ ID NO: 359688 - RNA, 19 nt, Artificial Sequence
  Description of Artificial Sequence: Synthetic oligonucleotide
caccuguguggugggcauc

SEQ ID NO: 359689 - RNA, 19 nt, Artificial Sequence
  Description of Artificial Sequence: Synthetic oligonucleotide
ggaacucuccauggccuua

SEQ ID NO: 359690 - RNA, 19 nt, Artificial Sequence
  Description of Artificial Sequence: Synthetic oligonucleotide
gcggauacuugcccugggu

SEQ ID NO: 359691 - RNA, 19 nt, Artificial Sequence
  Description of Artificial Sequence: Synthetic oligonucleotide
ccucccgagugcgcuuugg

SEQ ID NO: 359692 - RNA, 19 nt, Artificial Sequence
  Description of Artificial Sequence: Synthetic oligonucleotide
ccgagugcgcuuuggcaaa

SEQ ID NO: 359693 - RNA, 19 nt, Artificial Sequence
  Description of Artificial Sequence: Synthetic oligonucleotide
ggauuaaauuuugguuguu

SEQ ID NO: 359694 - RNA, 19 nt, Artificial Sequence
  Description of Artificial Sequence: Synthetic oligonucleotide
cagcuaggugugcaauuuu

SEQ ID NO: 359695 - RNA, 19 nt, Artificial Sequence
  Description of Artificial Sequence: Synthetic oligonucleotide
ggcugacuacugcuaguau

SEQ ID NO: 359696 - RNA, 19 nt, Artificial Sequence
  Description of Artificial Sequence: Synthetic oligonucleotide
gccuguguuugcugcugua

SEQ ID NO: 359697 - RNA, 19 nt, Artificial Sequence
  Description of Artificial Sequence: Synthetic oligonucleotide
ccucaguugccacgggugu

SEQ ID NO: 359698 - RNA, 19 nt, Artificial Sequence
  Description of Artificial Sequence: Synthetic oligonucleotide
cgaccuucauacugggacu

SEQ ID NO: 359699 - RNA, 19 nt, Artificial Sequence
  Description of Artificial Sequence: Synthetic oligonucleotide
cgaccacgaacaccuuguc

SEQ ID NO: 359700 - RNA, 19 nt, Artificial Sequence
  Description of Artificial Sequence: Synthetic oligonucleotide
gcugaacauuaggacuagu

SEQ ID NO: 359701 - RNA, 19 nt, Artificial Sequence
  Description of Artificial Sequence: Synthetic oligonucleotide
cgagugcgcuuuggcaaag

SEQ ID NO: 359702 - RNA, 19 nt, Artificial Sequence
  Description of Artificial Sequence: Synthetic oligonucleotide
gcuccgcccauacuuucuu

SEQ ID NO: 359703 - RNA, 19 nt, Artificial Sequence
  Description of Artificial Sequence: Synthetic oligonucleotide
gcgugacaguucagacuga

SEQ ID NO: 359704 - RNA, 19 nt, Artificial Sequence
  Description of Artificial Sequence: Synthetic oligonucleotide
gcuguuccggagccuuauu

SEQ ID NO: 359705 - RNA, 19 nt, Artificial Sequence
  Description of Artificial Sequence: Synthetic oligonucleotide
gccacgggugugacugucu

SEQ ID NO: 359706 - RNA, 19 nt, Artificial Sequence
  Description of Artificial Sequence: Synthetic oligonucleotide
guguaaccauugggcggau

SEQ ID NO: 359707 - RNA, 19 nt, Artificial Sequence
  Description of Artificial Sequence: Synthetic oligonucleotide
cgacuaauccgaccuucau

SEQ ID NO: 359708 - RNA, 19 nt, Artificial Sequence
  Description of Artificial Sequence: Synthetic oligonucleotide
cgcucaacuggugaacuuu

SEQ ID NO: 359709 - RNA, 19 nt, Artificial Sequence
  Description of Artificial Sequence: Synthetic oligonucleotide
ccacgggugugacugucuu

SEQ ID NO: 359710 - RNA, 19 nt, Artificial Sequence
  Description of Artificial Sequence: Synthetic oligonucleotide
cgguugcugucgggguagu

SEQ ID NO: 359711 - RNA, 19 nt, Artificial Sequence
  Description of Artificial Sequence: Synthetic oligonucleotide
aaugcaucgacauugaacu

SEQ ID NO: 359712 - RNA, 19 nt, Artificial Sequence
  Description of Artificial Sequence: Synthetic oligonucleotide
ucaugcauaaucuucauug

SEQ ID NO: 359713 - RNA, 19 nt, Artificial Sequence
  Description of Artificial Sequence: Synthetic oligonucleotide
gaugauauugaugaggcgg

SEQ ID NO: 359714 - RNA, 19 nt, Artificial Sequence
  Description of Artificial Sequence: Synthetic oligonucleotide
aaacaaauuauugaguccu

SEQ ID NO: 359715 - RNA, 19 nt, Artificial Sequence
  Description of Artificial Sequence: Synthetic oligonucleotide
aaauuauugaguccuggga

SEQ ID NO: 359716 - RNA, 19 nt, Artificial Sequence
  Description of Artificial Sequence: Synthetic oligonucleotide
aauuauugaguccugggau

SEQ ID NO: 359717 - RNA, 19 nt, Artificial Sequence
  Description of Artificial Sequence: Synthetic oligonucleotide
ucuauguccauguagggcu

SEQ ID NO: 359718 - RNA, 19 nt, Artificial Sequence
  Description of Artificial Sequence: Synthetic oligonucleotide
gacucugacacuuuucuag

SEQ ID NO: 359719 - RNA, 19 nt, Artificial Sequence
  Description of Artificial Sequence: Synthetic oligonucleotide
gaagcucagacagagauag

SEQ ID NO: 359720 - RNA, 19 nt, Artificial Sequence
  Description of Artificial Sequence: Synthetic oligonucleotide
uuuucuagucgccaguuug

SEQ ID NO: 359721 - RNA, 19 nt, Artificial Sequence
  Description of Artificial Sequence: Synthetic oligonucleotide
aaucgguccaaugacagag

SEQ ID NO: 359722 - RNA, 19 nt, Artificial Sequence
  Description of Artificial Sequence: Synthetic oligonucleotide
acugaaacucuggagaagc

SEQ ID NO: 359723 - RNA, 19 nt, Artificial Sequence
  Description of Artificial Sequence: Synthetic oligonucleotide
caguaugagaagcugaugc

SEQ ID NO: 359724 - RNA, 19 nt, Artificial Sequence
  Description of Artificial Sequence: Synthetic oligonucleotide
ugucuagccauguauacca

SEQ ID NO: 359725 - RNA, 19 nt, Artificial Sequence
  Description of Artificial Sequence: Synthetic oligonucleotide
gagacaagagcuucuaggc

SEQ ID NO: 359726 - RNA, 19 nt, Artificial Sequence
  Description of Artificial Sequence: Synthetic oligonucleotide
gacagaguaacacagcgca

SEQ ID NO: 359727 - RNA, 19 nt, Artificial Sequence
  Description of Artificial Sequence: Synthetic oligonucleotide
aucucuugaaugcaucgac

SEQ ID NO: 359728 - RNA, 19 nt, Artificial Sequence
  Description of Artificial Sequence: Synthetic oligonucleotide
uuuagcuccugauuguuga

SEQ ID NO: 359729 - RNA, 19 nt, Artificial Sequence
  Description of Artificial Sequence: Synthetic oligonucleotide
uccggcagaaguuagcaag

SEQ ID NO: 359730 - RNA, 19 nt, Artificial Sequence
  Description of Artificial Sequence: Synthetic oligonucleotide
uaagcucucagccaggcuc

SEQ ID NO: 359731 - RNA, 19 nt, Artificial Sequence
  Description of Artificial Sequence: Synthetic oligonucleotide
guuaguaagccccucuugc

SEQ ID NO: 359732 - RNA, 19 nt, Artificial Sequence
  Description of Artificial Sequence: Synthetic oligonucleotide
ggaacuauucuccaggcag

SEQ ID NO: 359733 - RNA, 19 nt, Artificial Sequence
  Description of Artificial Sequence: Synthetic oligonucleotide
ucgggaugaacacaguggc

SEQ ID NO: 359734 - RNA, 19 nt, Artificial Sequence
  Description of Artificial Sequence: Synthetic oligonucleotide
aaugagcgaagacccagag

SEQ ID NO: 359735 - RNA, 19 nt, Artificial Sequence
  Description of Artificial Sequence: Synthetic oligonucleotide
cacaaugcaguauaagaug

SEQ ID NO: 359736 - RNA, 19 nt, Artificial Sequence
  Description of Artificial Sequence: Synthetic oligonucleotide
aucgacauugaacuucauc

SEQ ID NO: 359737 - RNA, 19 nt, Artificial Sequence
  Description of Artificial Sequence: Synthetic oligonucleotide
ugagguaugcggcagcgca

SEQ ID NO: 359738 - RNA, 19 nt, Artificial Sequence
  Description of Artificial Sequence: Synthetic oligonucleotide
ggagacaagagcuucuagg

SEQ ID NO: 359739 - RNA, 19 nt, Artificial Sequence
  Description of Artificial Sequence: Synthetic oligonucleotide
gaacaucuggucugcauag

SEQ ID NO: 359740 - RNA, 19 nt, Artificial Sequence
  Description of Artificial Sequence: Synthetic oligonucleotide
caaaucgguccaaugacag

SEQ ID NO: 359741 - RNA, 19 nt, Artificial Sequence
  Description of Artificial Sequence: Synthetic oligonucleotide
ggaggcuuggcucacaggg

SEQ ID NO: 359742 - RNA, 19 nt, Artificial Sequence
  Description of Artificial Sequence: Synthetic oligonucleotide
ugaugcaggaacuauucuc

SEQ ID NO: 359743 - RNA, 19 nt, Artificial Sequence
  Description of Artificial Sequence: Synthetic oligonucleotide
uuucuagucgccaguuugc

SEQ ID NO: 359744 - RNA, 19 nt, Artificial Sequence
  Description of Artificial Sequence: Synthetic oligonucleotide
uuugcaaagccguuccaca

SEQ ID NO: 359745 - RNA, 19 nt, Artificial Sequence
  Description of Artificial Sequence: Synthetic oligonucleotide
ggaaacuuuccacagcccg

SEQ ID NO: 359746 - RNA, 19 nt, Artificial Sequence
  Description of Artificial Sequence: Synthetic oligonucleotide
ggauauguaggcaagcagg

SEQ ID NO: 359747 - RNA, 19 nt, Artificial Sequence
  Description of Artificial Sequence: Synthetic oligonucleotide
ugagccuauaccugaaaac

SEQ ID NO: 359748 - RNA, 19 nt, Artificial Sequence
  Description of Artificial Sequence: Synthetic oligonucleotide
gaaugcaucgacauugaac

SEQ ID NO: 359749 - RNA, 19 nt, Artificial Sequence
  Description of Artificial Sequence: Synthetic oligonucleotide
uuaguaagccccucuugcc

SEQ ID NO: 359750 - RNA, 19 nt, Artificial Sequence
  Description of Artificial Sequence: Synthetic oligonucleotide
acaggggucugacucuucc

SEQ ID NO: 359751 - RNA, 19 nt, Artificial Sequence
  Description of Artificial Sequence: Synthetic oligonucleotide
ugcaguauaagaugugcuc

SEQ ID NO: 359752 - RNA, 19 nt, Artificial Sequence
  Description of Artificial Sequence: Synthetic oligonucleotide
auggugacagccagaaucc

SEQ ID NO: 359753 - RNA, 19 nt, Artificial Sequence
  Description of Artificial Sequence: Synthetic oligonucleotide
acagagauaguuucccaug

SEQ ID NO: 359754 - RNA, 19 nt, Artificial Sequence
  Description of Artificial Sequence: Synthetic oligonucleotide
aggguaagcucucagccag

SEQ ID NO: 359755 - RNA, 19 nt, Artificial Sequence
  Description of Artificial Sequence: Synthetic oligonucleotide
uggaguacaucccucgacu

SEQ ID NO: 359756 - RNA, 19 nt, Artificial Sequence
  Description of Artificial Sequence: Synthetic oligonucleotide
cauucgcuguagaagacgc

SEQ ID NO: 359757 - RNA, 19 nt, Artificial Sequence
  Description of Artificial Sequence: Synthetic oligonucleotide
auuguccuuacccugggga

SEQ ID NO: 359758 - RNA, 19 nt, Artificial Sequence
  Description of Artificial Sequence: Synthetic oligonucleotide
auauauuuauugaaucucu

SEQ ID NO: 359759 - RNA, 19 nt, Artificial Sequence
  Description of Artificial Sequence: Synthetic oligonucleotide
agcauucuccgauacccac

SEQ ID NO: 359760 - RNA, 19 nt, Artificial Sequence
  Description of Artificial Sequence: Synthetic oligonucleotide
aguaugagaagcugaugca

SEQ ID NO: 359761 - RNA, 19 nt, Artificial Sequence
  Description of Artificial Sequence: Synthetic oligonucleotide
ucuugcugugcuccauucg

SEQ ID NO: 359762 - RNA, 19 nt, Artificial Sequence
  Description of Artificial Sequence: Synthetic oligonucleotide
uaauguccgggcuacaguc

SEQ ID NO: 359763 - RNA, 19 nt, Artificial Sequence
  Description of Artificial Sequence: Synthetic oligonucleotide
uauuugcuguuaauuggca

SEQ ID NO: 359764 - RNA, 19 nt, Artificial Sequence
  Description of Artificial Sequence: Synthetic oligonucleotide
ucucuugaaugcaucgaca

SEQ ID NO: 359765 - RNA, 19 nt, Artificial Sequence
  Description of Artificial Sequence: Synthetic oligonucleotide
agcgaagacccagaggagc

SEQ ID NO: 359766 - RNA, 19 nt, Artificial Sequence
  Description of Artificial Sequence: Synthetic oligonucleotide
aaguuagcaagcugcugcu

SEQ ID NO: 359767 - RNA, 19 nt, Artificial Sequence
  Description of Artificial Sequence: Synthetic oligonucleotide
uggccaaugagcgaagacc

SEQ ID NO: 359768 - RNA, 19 nt, Artificial Sequence
  Description of Artificial Sequence: Synthetic oligonucleotide
agcuaaaggaagacaaggg

SEQ ID NO: 359769 - RNA, 19 nt, Artificial Sequence
  Description of Artificial Sequence: Synthetic oligonucleotide
ucgccaguuugcaaagccg

SEQ ID NO: 359770 - RNA, 19 nt, Artificial Sequence
  Description of Artificial Sequence: Synthetic oligonucleotide
gcauaaucuucauugacug

SEQ ID NO: 359771 - RNA, 19 nt, Artificial Sequence
  Description of Artificial Sequence: Synthetic oligonucleotide
uguuugucgucauucccug

SEQ ID NO: 359772 - RNA, 19 nt, Artificial Sequence
  Description of Artificial Sequence: Synthetic oligonucleotide
uuccaguaugagaagcuga

SEQ ID NO: 359773 - RNA, 19 nt, Artificial Sequence
  Description of Artificial Sequence: Synthetic oligonucleotide
gauauugaugaggcggaag

SEQ ID NO: 359774 - RNA, 19 nt, Artificial Sequence
  Description of Artificial Sequence: Synthetic oligonucleotide
uccaguaugagaagcugau

SEQ ID NO: 359775 - RNA, 19 nt, Artificial Sequence
  Description of Artificial Sequence: Synthetic oligonucleotide
ugaagugccuugacugugc

SEQ ID NO: 359776 - RNA, 19 nt, Artificial Sequence
  Description of Artificial Sequence: Synthetic oligonucleotide
cugaaauggugacagccag

SEQ ID NO: 359777 - RNA, 19 nt, Artificial Sequence
  Description of Artificial Sequence: Synthetic oligonucleotide
aguuaguaagccccucuug

SEQ ID NO: 359778 - RNA, 19 nt, Artificial Sequence
  Description of Artificial Sequence: Synthetic oligonucleotide
uuucguugacgccccauca

SEQ ID NO: 359779 - RNA, 19 nt, Artificial Sequence
  Description of Artificial Sequence: Synthetic oligonucleotide
aauccggcagaaguuagca

SEQ ID NO: 359780 - RNA, 19 nt, Artificial Sequence
  Description of Artificial Sequence: Synthetic oligonucleotide
uucguugacgccccaucag

SEQ ID NO: 359781 - RNA, 19 nt, Artificial Sequence
  Description of Artificial Sequence: Synthetic oligonucleotide
aguucauuuagcuccugau

SEQ ID NO: 359782 - RNA, 19 nt, Artificial Sequence
  Description of Artificial Sequence: Synthetic oligonucleotide
cagaguaacacagcgcacc

SEQ ID NO: 359783 - RNA, 19 nt, Artificial Sequence
  Description of Artificial Sequence: Synthetic oligonucleotide
auguauaccacuccuccaa

SEQ ID NO: 359784 - RNA, 19 nt, Artificial Sequence
  Description of Artificial Sequence: Synthetic oligonucleotide
uagggcuccucaauguagc

SEQ ID NO: 359785 - RNA, 19 nt, Artificial Sequence
  Description of Artificial Sequence: Synthetic oligonucleotide
gaccugguuucguugacgc

SEQ ID NO: 359786 - RNA, 19 nt, Artificial Sequence
  Description of Artificial Sequence: Synthetic oligonucleotide
aaguguguguuugucguca

SEQ ID NO: 359787 - RNA, 19 nt, Artificial Sequence
  Description of Artificial Sequence: Synthetic oligonucleotide
aacuuuccacagcccgggc

SEQ ID NO: 359788 - RNA, 19 nt, Artificial Sequence
  Description of Artificial Sequence: Synthetic oligonucleotide
aaucucuugaaugcaucga

SEQ ID NO: 359789 - RNA, 19 nt, Artificial Sequence
  Description of Artificial Sequence: Synthetic oligonucleotide
gaacuuugcaucaguguug

SEQ ID NO: 359790 - RNA, 19 nt, Artificial Sequence
  Description of Artificial Sequence: Synthetic oligonucleotide
ucguugacgccccaucagc

SEQ ID NO: 359791 - RNA, 19 nt, Artificial Sequence
  Description of Artificial Sequence: Synthetic oligonucleotide
ucacugaaacucuggagaa

SEQ ID NO: 359792 - RNA, 19 nt, Artificial Sequence
  Description of Artificial Sequence: Synthetic oligonucleotide
acacuuuucuagucgccag

SEQ ID NO: 359793 - RNA, 19 nt, Artificial Sequence
  Description of Artificial Sequence: Synthetic oligonucleotide
guugucuagccauguauac

SEQ ID NO: 359794 - RNA, 19 nt, Artificial Sequence
  Description of Artificial Sequence: Synthetic oligonucleotide
uugaaugcaucgacauuga

SEQ ID NO: 359795 - RNA, 19 nt, Artificial Sequence
  Description of Artificial Sequence: Synthetic oligonucleotide
ucgcuguccacaaugcagu

SEQ ID NO: 359796 - RNA, 19 nt, Artificial Sequence
  Description of Artificial Sequence: Synthetic oligonucleotide
gauuucagcugcagaaggc

SEQ ID NO: 359797 - RNA, 19 nt, Artificial Sequence
  Description of Artificial Sequence: Synthetic oligonucleotide
uuuccgucgggccagcauc

SEQ ID NO: 359798 - RNA, 19 nt, Artificial Sequence
  Description of Artificial Sequence: Synthetic oligonucleotide
gcagaaguuagcaagcugc

SEQ ID NO: 359799 - RNA, 19 nt, Artificial Sequence
  Description of Artificial Sequence: Synthetic oligonucleotide
ggcaucuaacaccagcgcg

SEQ ID NO: 359800 - RNA, 19 nt, Artificial Sequence
  Description of Artificial Sequence: Synthetic oligonucleotide
cuucuggggaaccuucggg

SEQ ID NO: 359801 - RNA, 19 nt, Artificial Sequence
  Description of Artificial Sequence: Synthetic oligonucleotide
accagcgcguugucuagcc

SEQ ID NO: 359802 - RNA, 19 nt, Artificial Sequence
  Description of Artificial Sequence: Synthetic oligonucleotide
ugcaucgacauugaacuuc

SEQ ID NO: 359803 - RNA, 19 nt, Artificial Sequence
  Description of Artificial Sequence: Synthetic oligonucleotide
aaaguagcucuggaguaca

SEQ ID NO: 359804 - RNA, 19 nt, Artificial Sequence
  Description of Artificial Sequence: Synthetic oligonucleotide
uugucuagccauguauacc

SEQ ID NO: 359805 - RNA, 19 nt, Artificial Sequence
  Description of Artificial Sequence: Synthetic oligonucleotide
augagcgaagacccagagg

SEQ ID NO: 359806 - RNA, 19 nt, Artificial Sequence
  Description of Artificial Sequence: Synthetic oligonucleotide
cauuguccccugaagugcc

SEQ ID NO: 359807 - RNA, 19 nt, Artificial Sequence
  Description of Artificial Sequence: Synthetic oligonucleotide
uccgauacccaccccugcc

SEQ ID NO: 359808 - RNA, 19 nt, Artificial Sequence
  Description of Artificial Sequence: Synthetic oligonucleotide
uugacgccccaucagcagc

SEQ ID NO: 359809 - RNA, 19 nt, Artificial Sequence
  Description of Artificial Sequence: Synthetic oligonucleotide
cuucgggaugaacacagug

SEQ ID NO: 359810 - RNA, 19 nt, Artificial Sequence
  Description of Artificial Sequence: Synthetic oligonucleotide
uuagcuccugauuguugag

SEQ ID NO: 359811 - RNA, 19 nt, Artificial Sequence
  Description of Artificial Sequence: Synthetic oligonucleotide
cagacagagauaguuuccc

SEQ ID NO: 359812 - RNA, 19 nt, Artificial Sequence
  Description of Artificial Sequence: Synthetic oligonucleotide
auauguaggcaagcaggcg

SEQ ID NO: 359813 - RNA, 19 nt, Artificial Sequence
  Description of Artificial Sequence: Synthetic oligonucleotide
caggacguagagcacuucc

SEQ ID NO: 359814 - RNA, 19 nt, Artificial Sequence
  Description of Artificial Sequence: Synthetic oligonucleotide
uugcuguuaauuggcaaca

SEQ ID NO: 359815 - RNA, 19 nt, Artificial Sequence
  Description of Artificial Sequence: Synthetic oligonucleotide
acguagagcacuuccaguu

SEQ ID NO: 359816 - RNA, 19 nt, Artificial Sequence
  Description of Artificial Sequence: Synthetic oligonucleotide
cuccauucgcuguagaaga

SEQ ID NO: 359817 - RNA, 19 nt, Artificial Sequence
  Description of Artificial Sequence: Synthetic oligonucleotide
caggaacuauucuccaggc

SEQ ID NO: 359818 - RNA, 19 nt, Artificial Sequence
  Description of Artificial Sequence: Synthetic oligonucleotide
aggagcuaaaggaagacaa

SEQ ID NO: 359819 - RNA, 19 nt, Artificial Sequence
  Description of Artificial Sequence: Synthetic oligonucleotide
ugccauuguccuuacccug

SEQ ID NO: 359820 - RNA, 19 nt, Artificial Sequence
  Description of Artificial Sequence: Synthetic oligonucleotide
uuguccuuacccuggggac

SEQ ID NO: 359821 - RNA, 19 nt, Artificial Sequence
  Description of Artificial Sequence: Synthetic oligonucleotide
ucgucauucccugugucca

SEQ ID NO: 359822 - RNA, 19 nt, Artificial Sequence
  Description of Artificial Sequence: Synthetic oligonucleotide
cuagucgccaguuugcaaa

SEQ ID NO: 359823 - RNA, 19 nt, Artificial Sequence
  Description of Artificial Sequence: Synthetic oligonucleotide
cugcauaggaggugguccc

SEQ ID NO: 359824 - RNA, 19 nt, Artificial Sequence
  Description of Artificial Sequence: Synthetic oligonucleotide
ucuccgauacccaccccug

SEQ ID NO: 359825 - RNA, 19 nt, Artificial Sequence
  Description of Artificial Sequence: Synthetic oligonucleotide
gcuaaaggaagacaaggga

SEQ ID NO: 359826 - RNA, 19 nt, Artificial Sequence
  Description of Artificial Sequence: Synthetic oligonucleotide
gucgccaguuugcaaagcc

SEQ ID NO: 359827 - RNA, 19 nt, Artificial Sequence
  Description of Artificial Sequence: Synthetic oligonucleotide
caauguagcugaccagggc

SEQ ID NO: 359828 - RNA, 19 nt, Artificial Sequence
  Description of Artificial Sequence: Synthetic oligonucleotide
cugaaacucuggagaagcc

SEQ ID NO: 359829 - RNA, 19 nt, Artificial Sequence
  Description of Artificial Sequence: Synthetic oligonucleotide
caccugguuuucaaaucgg

SEQ ID NO: 359830 - RNA, 19 nt, Artificial Sequence
  Description of Artificial Sequence: Synthetic oligonucleotide
uguagggcuccucaaugua

SEQ ID NO: 359831 - RNA, 19 nt, Artificial Sequence
  Description of Artificial Sequence: Synthetic oligonucleotide
ugccaaaagcgcagcaggu

SEQ ID NO: 359832 - RNA, 19 nt, Artificial Sequence
  Description of Artificial Sequence: Synthetic oligonucleotide
cagcagccgaguuaguaag

SEQ ID NO: 359833 - RNA, 19 nt, Artificial Sequence
  Description of Artificial Sequence: Synthetic oligonucleotide
ccauguauaccacuccucc

SEQ ID NO: 359834 - RNA, 19 nt, Artificial Sequence
  Description of Artificial Sequence: Synthetic oligonucleotide
caugcauaaucuucauuga

SEQ ID NO: 359835 - RNA, 19 nt, Artificial Sequence
  Description of Artificial Sequence: Synthetic oligonucleotide
guugauauauuuauugaau

SEQ ID NO: 359836 - RNA, 19 nt, Artificial Sequence
  Description of Artificial Sequence: Synthetic oligonucleotide
uagucgccaguuugcaaag

SEQ ID NO: 359837 - RNA, 19 nt, Artificial Sequence
  Description of Artificial Sequence: Synthetic oligonucleotide
gcaguauaagaugugcucc

SEQ ID NO: 359838 - RNA, 19 nt, Artificial Sequence
  Description of Artificial Sequence: Synthetic oligonucleotide
augauauugaugaggcgga

SEQ ID NO: 359839 - RNA, 19 nt, Artificial Sequence
  Description of Artificial Sequence: Synthetic oligonucleotide
uggguuagugucugcacau

SEQ ID NO: 359840 - RNA, 19 nt, Artificial Sequence
  Description of Artificial Sequence: Synthetic oligonucleotide
gccuauaccugaaaacugg

SEQ ID NO: 359841 - RNA, 19 nt, Artificial Sequence
  Description of Artificial Sequence: Synthetic oligonucleotide
gggauauguaggcaagcag

SEQ ID NO: 359842 - RNA, 19 nt, Artificial Sequence
  Description of Artificial Sequence: Synthetic oligonucleotide
accuucgggaugaacacag

SEQ ID NO: 359843 - RNA, 19 nt, Artificial Sequence
  Description of Artificial Sequence: Synthetic oligonucleotide
gaagggugggcacggugcc

SEQ ID NO: 359844 - RNA, 19 nt, Artificial Sequence
  Description of Artificial Sequence: Synthetic oligonucleotide
guugacgccccaucagcag

SEQ ID NO: 359845 - RNA, 19 nt, Artificial Sequence
  Description of Artificial Sequence: Synthetic oligonucleotide
uaccugaaaacuggguaga

SEQ ID NO: 359846 - RNA, 19 nt, Artificial Sequence
  Description of Artificial Sequence: Synthetic oligonucleotide
gagccuauaccugaaaacu

SEQ ID NO: 359847 - RNA, 19 nt, Artificial Sequence
  Description of Artificial Sequence: Synthetic oligonucleotide
aggagacaagagcuucuag

SEQ ID NO: 359848 - RNA, 19 nt, Artificial Sequence
  Description of Artificial Sequence: Synthetic oligonucleotide
gacacuuuucuagucgcca

SEQ ID NO: 359849 - RNA, 19 nt, Artificial Sequence
  Description of Artificial Sequence: Synthetic oligonucleotide
aggaaacuuuccacagccc

SEQ ID NO: 359850 - RNA, 19 nt, Artificial Sequence
  Description of Artificial Sequence: Synthetic oligonucleotide
cauucggacaggaccucag

SEQ ID NO: 359851 - RNA, 19 nt, Artificial Sequence
  Description of Artificial Sequence: Synthetic oligonucleotide
uccauucgcuguagaagac

SEQ ID NO: 359852 - RNA, 19 nt, Artificial Sequence
  Description of Artificial Sequence: Synthetic oligonucleotide
uugucgucauucccugugu

SEQ ID NO: 359853 - RNA, 19 nt, Artificial Sequence
  Description of Artificial Sequence: Synthetic oligonucleotide
aguaagccccucuugccau

SEQ ID NO: 359854 - RNA, 19 nt, Artificial Sequence
  Description of Artificial Sequence: Synthetic oligonucleotide
aauuggcaacacaggagga

SEQ ID NO: 359855 - RNA, 19 nt, Artificial Sequence
  Description of Artificial Sequence: Synthetic oligonucleotide
gaucacuaggcugguguug

SEQ ID NO: 359856 - RNA, 19 nt, Artificial Sequence
  Description of Artificial Sequence: Synthetic oligonucleotide
ugaaugcaucgacauugaa

SEQ ID NO: 359857 - RNA, 19 nt, Artificial Sequence
  Description of Artificial Sequence: Synthetic oligonucleotide
ccaccugguuuucaaaucg

SEQ ID NO: 359858 - RNA, 19 nt, Artificial Sequence
  Description of Artificial Sequence: Synthetic oligonucleotide
cugguuucguugacgcccc

SEQ ID NO: 359859 - RNA, 19 nt, Artificial Sequence
  Description of Artificial Sequence: Synthetic oligonucleotide
aucacuaggcugguguuga

SEQ ID NO: 359860 - RNA, 19 nt, Artificial Sequence
  Description of Artificial Sequence: Synthetic oligonucleotide
ucgguccaaugacagagua

SEQ ID NO: 359861 - RNA, 19 nt, Artificial Sequence
  Description of Artificial Sequence: Synthetic oligonucleotide
ugcggcgugugcacucacg

SEQ ID NO: 359862 - RNA, 19 nt, Artificial Sequence
  Description of Artificial Sequence: Synthetic oligonucleotide
guagggcuccucaauguag

SEQ ID NO: 359863 - RNA, 19 nt, Artificial Sequence
  Description of Artificial Sequence: Synthetic oligonucleotide
ugacgccccaucagcagca

SEQ ID NO: 359864 - RNA, 19 nt, Artificial Sequence
  Description of Artificial Sequence: Synthetic oligonucleotide
cuuugcaucaguguugaua

SEQ ID NO: 359865 - RNA, 19 nt, Artificial Sequence
  Description of Artificial Sequence: Synthetic oligonucleotide
uguccuuacccuggggaca

SEQ ID NO: 359866 - RNA, 19 nt, Artificial Sequence
  Description of Artificial Sequence: Synthetic oligonucleotide
acauucuccuggguuagug

SEQ ID NO: 359867 - RNA, 19 nt, Artificial Sequence
  Description of Artificial Sequence: Synthetic oligonucleotide
gaauccggcagaaguuagc

SEQ ID NO: 359868 - RNA, 19 nt, Artificial Sequence
  Description of Artificial Sequence: Synthetic oligonucleotide
accugaaaacuggguagac

SEQ ID NO: 359869 - RNA, 19 nt, Artificial Sequence
  Description of Artificial Sequence: Synthetic oligonucleotide
guuucguugacgccccauc

SEQ ID NO: 359870 - RNA, 19 nt, Artificial Sequence
  Description of Artificial Sequence: Synthetic oligonucleotide
uguccacaaugcaguauaa

SEQ ID NO: 359871 - RNA, 19 nt, Artificial Sequence
  Description of Artificial Sequence: Synthetic oligonucleotide
uucuagucgccaguuugca

SEQ ID NO: 359872 - RNA, 19 nt, Artificial Sequence
  Description of Artificial Sequence: Synthetic oligonucleotide
gguagacagagccgugggg

SEQ ID NO: 359873 - RNA, 19 nt, Artificial Sequence
  Description of Artificial Sequence: Synthetic oligonucleotide
agccuauaccugaaaacug

SEQ ID NO: 359874 - RNA, 19 nt, Artificial Sequence
  Description of Artificial Sequence: Synthetic oligonucleotide
ggccaaugagcgaagaccc

SEQ ID NO: 359875 - RNA, 19 nt, Artificial Sequence
  Description of Artificial Sequence: Synthetic oligonucleotide
ugucgucauucccuguguc

SEQ ID NO: 359876 - RNA, 19 nt, Artificial Sequence
  Description of Artificial Sequence: Synthetic oligonucleotide
ucuagucgccaguuugcaa

SEQ ID NO: 359877 - RNA, 19 nt, Artificial Sequence
  Description of Artificial Sequence: Synthetic oligonucleotide
cacgcucacccacacuugc

SEQ ID NO: 359878 - RNA, 19 nt, Artificial Sequence
  Description of Artificial Sequence: Synthetic oligonucleotide
ccugguuucguugacgccc

SEQ ID NO: 359879 - RNA, 19 nt, Artificial Sequence
  Description of Artificial Sequence: Synthetic oligonucleotide
cauguauaccacuccucca

SEQ ID NO: 359880 - RNA, 19 nt, Artificial Sequence
  Description of Artificial Sequence: Synthetic oligonucleotide
gacagagauaguuucccau

SEQ ID NO: 359881 - RNA, 19 nt, Artificial Sequence
  Description of Artificial Sequence: Synthetic oligonucleotide
aauguccgggcuacaguca

SEQ ID NO: 359882 - RNA, 19 nt, Artificial Sequence
  Description of Artificial Sequence: Synthetic oligonucleotide
aggaacaucuggucugcau

SEQ ID NO: 359883 - RNA, 19 nt, Artificial Sequence
  Description of Artificial Sequence: Synthetic oligonucleotide
ggaggaaacuuuccacagc

SEQ ID NO: 359884 - RNA, 19 nt, Artificial Sequence
  Description of Artificial Sequence: Synthetic oligonucleotide
agcagccgaguuaguaagc

SEQ ID NO: 359885 - RNA, 19 nt, Artificial Sequence
  Description of Artificial Sequence: Synthetic oligonucleotide
cauuguccuuacccugggg

SEQ ID NO: 359886 - RNA, 19 nt, Artificial Sequence
  Description of Artificial Sequence: Synthetic oligonucleotide
agagauaguuucccauguu

SEQ ID NO: 359887 - RNA, 19 nt, Artificial Sequence
  Description of Artificial Sequence: Synthetic oligonucleotide
uuccgucgggccagcauca

SEQ ID NO: 359888 - RNA, 19 nt, Artificial Sequence
  Description of Artificial Sequence: Synthetic oligonucleotide
cucugacacuuuucuaguc

SEQ ID NO: 359889 - RNA, 19 nt, Artificial Sequence
  Description of Artificial Sequence: Synthetic oligonucleotide
ucccucggaggaaacuuuc

SEQ ID NO: 359890 - RNA, 19 nt, Artificial Sequence
  Description of Artificial Sequence: Synthetic oligonucleotide
cugaagugccuugacugug

SEQ ID NO: 359891 - RNA, 19 nt, Artificial Sequence
  Description of Artificial Sequence: Synthetic oligonucleotide
ggagcuaaaggaagacaag

SEQ ID NO: 359892 - RNA, 19 nt, Artificial Sequence
  Description of Artificial Sequence: Synthetic oligonucleotide
caacaggauggacacuguc

SEQ ID NO: 359893 - RNA, 19 nt, Artificial Sequence
  Description of Artificial Sequence: Synthetic oligonucleotide
acgggcagagugugcggcg

SEQ ID NO: 359894 - RNA, 19 nt, Artificial Sequence
  Description of Artificial Sequence: Synthetic oligonucleotide
agucgccaguuugcaaagc

SEQ ID NO: 359895 - RNA, 19 nt, Artificial Sequence
  Description of Artificial Sequence: Synthetic oligonucleotide
auacccaccccugccuagg

SEQ ID NO: 359896 - RNA, 19 nt, Artificial Sequence
  Description of Artificial Sequence: Synthetic oligonucleotide
ucccucgacuugcacucgc

SEQ ID NO: 359897 - RNA, 19 nt, Artificial Sequence
  Description of Artificial Sequence: Synthetic oligonucleotide
ugcuguuaauuggcaacac

SEQ ID NO: 359898 - RNA, 19 nt, Artificial Sequence
  Description of Artificial Sequence: Synthetic oligonucleotide
uccuccaaaucaguuuguc

SEQ ID NO: 359899 - RNA, 19 nt, Artificial Sequence
  Description of Artificial Sequence: Synthetic oligonucleotide
ggauugugagggaagggug

SEQ ID NO: 359900 - RNA, 19 nt, Artificial Sequence
  Description of Artificial Sequence: Synthetic oligonucleotide
uacaucccucgacuugcac

SEQ ID NO: 359901 - RNA, 19 nt, Artificial Sequence
  Description of Artificial Sequence: Synthetic oligonucleotide
cuauguccauguagggcuc

SEQ ID NO: 359902 - RNA, 19 nt, Artificial Sequence
  Description of Artificial Sequence: Synthetic oligonucleotide
agacagagccguggggagg

SEQ ID NO: 359903 - RNA, 19 nt, Artificial Sequence
  Description of Artificial Sequence: Synthetic oligonucleotide
ugauauugaugaggcggaa

SEQ ID NO: 359904 - RNA, 19 nt, Artificial Sequence
  Description of Artificial Sequence: Synthetic oligonucleotide
ucacuaggcugguguugag

SEQ ID NO: 359905 - RNA, 19 nt, Artificial Sequence
  Description of Artificial Sequence: Synthetic oligonucleotide
ucauugacuggggcagcug

SEQ ID NO: 359906 - RNA, 19 nt, Artificial Sequence
  Description of Artificial Sequence: Synthetic oligonucleotide
gcggucuggguucaacagg

SEQ ID NO: 359907 - RNA, 19 nt, Artificial Sequence
  Description of Artificial Sequence: Synthetic oligonucleotide
ggcggucuggguucaacag

SEQ ID NO: 359908 - RNA, 19 nt, Artificial Sequence
  Description of Artificial Sequence: Synthetic oligonucleotide
ggcacuccacaccccaagg

SEQ ID NO: 359909 - RNA, 19 nt, Artificial Sequence
  Description of Artificial Sequence: Synthetic oligonucleotide
gguugauuucagcugcaga

SEQ ID NO: 359910 - RNA, 19 nt, Artificial Sequence
  Description of Artificial Sequence: Synthetic oligonucleotide
gggacgggcagagugugcg

SEQ ID NO: 359911 - RNA, 19 nt, Artificial Sequence
  Description of Artificial Sequence: Synthetic oligonucleotide
gcuguuaauuggcaacaca

SEQ ID NO: 359912 - RNA, 19 nt, Artificial Sequence
  Description of Artificial Sequence: Synthetic oligonucleotide
guccuuacccuggggacag

SEQ ID NO: 359913 - RNA, 19 nt, Artificial Sequence
  Description of Artificial Sequence: Synthetic oligonucleotide
caaugagcgaagacccaga

SEQ ID NO: 359914 - RNA, 19 nt, Artificial Sequence
  Description of Artificial Sequence: Synthetic oligonucleotide
ggcgugugcacucacgcuc

SEQ ID NO: 359915 - RNA, 19 nt, Artificial Sequence
  Description of Artificial Sequence: Synthetic oligonucleotide
cugucucuuuccaguauga

SEQ ID NO: 359916 - RNA, 19 nt, Artificial Sequence
  Description of Artificial Sequence: Synthetic oligonucleotide
cucaugguggucacugaaa

SEQ ID NO: 359917 - RNA, 19 nt, Artificial Sequence
  Description of Artificial Sequence: Synthetic oligonucleotide
gacguagagcacuuccagu

SEQ ID NO: 359918 - RNA, 19 nt, Artificial Sequence
  Description of Artificial Sequence: Synthetic oligonucleotide
cagccucucuuuccgucgg

SEQ ID NO: 359919 - RNA, 19 nt, Artificial Sequence
  Description of Artificial Sequence: Synthetic oligonucleotide
gugccuguugacucugaca

SEQ ID NO: 359920 - RNA, 19 nt, Artificial Sequence
  Description of Artificial Sequence: Synthetic oligonucleotide
aggacguagagcacuucca

SEQ ID NO: 359921 - RNA, 19 nt, Artificial Sequence
  Description of Artificial Sequence: Synthetic oligonucleotide
uugcacucgcuguccacaa

SEQ ID NO: 359922 - RNA, 19 nt, Artificial Sequence
  Description of Artificial Sequence: Synthetic oligonucleotide
acuauucuccaggcaggug

SEQ ID NO: 359923 - RNA, 19 nt, Artificial Sequence
  Description of Artificial Sequence: Synthetic oligonucleotide
gaagcugaugcaggaacua

SEQ ID NO: 359924 - RNA, 19 nt, Artificial Sequence
  Description of Artificial Sequence: Synthetic oligonucleotide
gaagacccagaggagcuaa

SEQ ID NO: 359925 - RNA, 19 nt, Artificial Sequence
  Description of Artificial Sequence: Synthetic oligonucleotide
accugguuuucaaaucggu

SEQ ID NO: 359926 - RNA, 19 nt, Artificial Sequence
  Description of Artificial Sequence: Synthetic oligonucleotide
cuuacccuggggacaguga

SEQ ID NO: 359927 - RNA, 19 nt, Artificial Sequence
  Description of Artificial Sequence: Synthetic oligonucleotide
guaacacagcgcaccagca

SEQ ID NO: 359928 - RNA, 19 nt, Artificial Sequence
  Description of Artificial Sequence: Synthetic oligonucleotide
guaauguccgggcuacagu

SEQ ID NO: 359929 - RNA, 19 nt, Artificial Sequence
  Description of Artificial Sequence: Synthetic oligonucleotide
ccaaugagcgaagacccag

SEQ ID NO: 359930 - RNA, 19 nt, Artificial Sequence
  Description of Artificial Sequence: Synthetic oligonucleotide
cuccgauacccaccccugc

SEQ ID NO: 359931 - RNA, 19 nt, Artificial Sequence
  Description of Artificial Sequence: Synthetic oligonucleotide
aucuaacaccagcgcguug

SEQ ID NO: 359932 - RNA, 19 nt, Artificial Sequence
  Description of Artificial Sequence: Synthetic oligonucleotide
gguaagcucucagccaggc

SEQ ID NO: 359933 - RNA, 19 nt, Artificial Sequence
  Description of Artificial Sequence: Synthetic oligonucleotide
gcugagguaugcggcagcg

SEQ ID NO: 359934 - RNA, 19 nt, Artificial Sequence
  Description of Artificial Sequence: Synthetic oligonucleotide
ccggcagaaguuagcaagc

SEQ ID NO: 359935 - RNA, 19 nt, Artificial Sequence
  Description of Artificial Sequence: Synthetic oligonucleotide
ccauucgcuguagaagacg

SEQ ID NO: 359936 - RNA, 19 nt, Artificial Sequence
  Description of Artificial Sequence: Synthetic oligonucleotide
agccucucuuuccgucggg

SEQ ID NO: 359937 - RNA, 19 nt, Artificial Sequence
  Description of Artificial Sequence: Synthetic oligonucleotide
agcccgggccugccaaaac

SEQ ID NO: 359938 - RNA, 19 nt, Artificial Sequence
  Description of Artificial Sequence: Synthetic oligonucleotide
augcggcagcgcauugucc

SEQ ID NO: 359939 - RNA, 19 nt, Artificial Sequence
  Description of Artificial Sequence: Synthetic oligonucleotide
gcagccgaguuaguaagcc

SEQ ID NO: 359940 - RNA, 19 nt, Artificial Sequence
  Description of Artificial Sequence: Synthetic oligonucleotide
cuaacaccagcgcguuguc

SEQ ID NO: 359941 - RNA, 19 nt, Artificial Sequence
  Description of Artificial Sequence: Synthetic oligonucleotide
ugugcggcgugugcacuca

SEQ ID NO: 359942 - RNA, 19 nt, Artificial Sequence
  Description of Artificial Sequence: Synthetic oligonucleotide
ggaccugguuucguugacg

SEQ ID NO: 359943 - RNA, 19 nt, Artificial Sequence
  Description of Artificial Sequence: Synthetic oligonucleotide
acaggacguagagcacuuc

SEQ ID NO: 359944 - RNA, 19 nt, Artificial Sequence
  Description of Artificial Sequence: Synthetic oligonucleotide
ugggcacggugccauuguc

SEQ ID NO: 359945 - RNA, 19 nt, Artificial Sequence
  Description of Artificial Sequence: Synthetic oligonucleotide
ggcagcauucuccgauacc

SEQ ID NO: 359946 - RNA, 19 nt, Artificial Sequence
  Description of Artificial Sequence: Synthetic oligonucleotide
gaguuaguaagccccucuu

SEQ ID NO: 359947 - RNA, 19 nt, Artificial Sequence
  Description of Artificial Sequence: Synthetic oligonucleotide
cuggaucuucaagguaaug

SEQ ID NO: 359948 - RNA, 19 nt, Artificial Sequence
  Description of Artificial Sequence: Synthetic oligonucleotide
agcgcaccagcauguugga

SEQ ID NO: 359949 - RNA, 19 nt, Artificial Sequence
  Description of Artificial Sequence: Synthetic oligonucleotide
agaagcucagacagagaua

SEQ ID NO: 359950 - RNA, 19 nt, Artificial Sequence
  Description of Artificial Sequence: Synthetic oligonucleotide
agggcgacuggcggucugg

SEQ ID NO: 359951 - RNA, 19 nt, Artificial Sequence
  Description of Artificial Sequence: Synthetic oligonucleotide
gcggcgugugcacucacgc

SEQ ID NO: 359952 - RNA, 19 nt, Artificial Sequence
  Description of Artificial Sequence: Synthetic oligonucleotide
caaaagcgcagcagguugu

SEQ ID NO: 359953 - RNA, 19 nt, Artificial Sequence
  Description of Artificial Sequence: Synthetic oligonucleotide
acucacgcucacccacacu

SEQ ID NO: 359954 - RNA, 19 nt, Artificial Sequence
  Description of Artificial Sequence: Synthetic oligonucleotide
gcauucuccgauacccacc

SEQ ID NO: 359955 - RNA, 19 nt, Artificial Sequence
  Description of Artificial Sequence: Synthetic oligonucleotide
gcaucgacauugaacuuca

SEQ ID NO: 359956 - RNA, 19 nt, Artificial Sequence
  Description of Artificial Sequence: Synthetic oligonucleotide
ugcacucgcuguccacaau

SEQ ID NO: 359957 - RNA, 19 nt, Artificial Sequence
  Description of Artificial Sequence: Synthetic oligonucleotide
cagcauucuccgauaccca

SEQ ID NO: 359958 - RNA, 19 nt, Artificial Sequence
  Description of Artificial Sequence: Synthetic oligonucleotide
augcaucgacauugaacuu

SEQ ID NO: 359959 - RNA, 19 nt, Artificial Sequence
  Description of Artificial Sequence: Synthetic oligonucleotide
auucgcuguagaagacgca

SEQ ID NO: 359960 - RNA, 19 nt, Artificial Sequence
  Description of Artificial Sequence: Synthetic oligonucleotide
cauucuccuggguuagugu

SEQ ID NO: 359961 - RNA, 19 nt, Artificial Sequence
  Description of Artificial Sequence: Synthetic oligonucleotide
cagaauccggcagaaguua

SEQ ID NO: 359962 - RNA, 19 nt, Artificial Sequence
  Description of Artificial Sequence: Synthetic oligonucleotide
ccuccaaaucaguuuguca

SEQ ID NO: 359963 - RNA, 19 nt, Artificial Sequence
  Description of Artificial Sequence: Synthetic oligonucleotide
agcgcguugucuagccaug

SEQ ID NO: 359964 - RNA, 19 nt, Artificial Sequence
  Description of Artificial Sequence: Synthetic oligonucleotide
aucccucgacuugcacucg

SEQ ID NO: 359965 - RNA, 19 nt, Artificial Sequence
  Description of Artificial Sequence: Synthetic oligonucleotide
ggacgggcagagugugcgg

SEQ ID NO: 359966 - RNA, 19 nt, Artificial Sequence
  Description of Artificial Sequence: Synthetic oligonucleotide
agugugcggcgugugcacu

SEQ ID NO: 359967 - RNA, 19 nt, Artificial Sequence
  Description of Artificial Sequence: Synthetic oligonucleotide
cccucggaggaaacuuucc

SEQ ID NO: 359968 - RNA, 19 nt, Artificial Sequence
  Description of Artificial Sequence: Synthetic oligonucleotide
agguaugcggcagcgcauu

SEQ ID NO: 359969 - RNA, 19 nt, Artificial Sequence
  Description of Artificial Sequence: Synthetic oligonucleotide
gcaucuaacaccagcgcgu

SEQ ID NO: 359970 - RNA, 19 nt, Artificial Sequence
  Description of Artificial Sequence: Synthetic oligonucleotide
gguaugcggcagcgcauug

SEQ ID NO: 359971 - RNA, 19 nt, Artificial Sequence
  Description of Artificial Sequence: Synthetic oligonucleotide
ugguuucguugacgcccca

SEQ ID NO: 359972 - RNA, 19 nt, Artificial Sequence
  Description of Artificial Sequence: Synthetic oligonucleotide
cacuuccaguuuguacaug

SEQ ID NO: 359973 - RNA, 19 nt, Artificial Sequence
  Description of Artificial Sequence: Synthetic oligonucleotide
gugugcggcgugugcacuc

SEQ ID NO: 359974 - RNA, 19 nt, Artificial Sequence
  Description of Artificial Sequence: Synthetic oligonucleotide
cacugagccuauaccugaa

SEQ ID NO: 359975 - RNA, 19 nt, Artificial Sequence
  Description of Artificial Sequence: Synthetic oligonucleotide
acucgcaucagggcaucua

SEQ ID NO: 359976 - RNA, 19 nt, Artificial Sequence
  Description of Artificial Sequence: Synthetic oligonucleotide
cuggcggucuggguucaac

SEQ ID NO: 359977 - RNA, 19 nt, Artificial Sequence
  Description of Artificial Sequence: Synthetic oligonucleotide
cgggcuacagucacaguuc

SEQ ID NO: 359978 - RNA, 19 nt, Artificial Sequence
  Description of Artificial Sequence: Synthetic oligonucleotide
uccgucgggccagcaucag

SEQ ID NO: 359979 - RNA, 19 nt, Artificial Sequence
  Description of Artificial Sequence: Synthetic oligonucleotide
ggguuagugucugcacaug

SEQ ID NO: 359980 - RNA, 19 nt, Artificial Sequence
  Description of Artificial Sequence: Synthetic oligonucleotide
guaagcucucagccaggcu

SEQ ID NO: 359981 - RNA, 19 nt, Artificial Sequence
  Description of Artificial Sequence: Synthetic oligonucleotide
caccagcgcguugucuagc

SEQ ID NO: 359982 - RNA, 19 nt, Artificial Sequence
  Description of Artificial Sequence: Synthetic oligonucleotide
ccugaaaacuggguagaca

SEQ ID NO: 359983 - RNA, 19 nt, Artificial Sequence
  Description of Artificial Sequence: Synthetic oligonucleotide
ccaguaugagaagcugaug

SEQ ID NO: 359984 - RNA, 19 nt, Artificial Sequence
  Description of Artificial Sequence: Synthetic oligonucleotide
guuugucgucauucccugu

SEQ ID NO: 359985 - RNA, 19 nt, Artificial Sequence
  Description of Artificial Sequence: Synthetic oligonucleotide
acgccccaucagcagcaca

SEQ ID NO: 359986 - RNA, 19 nt, Artificial Sequence
  Description of Artificial Sequence: Synthetic oligonucleotide
gcguugucuagccauguau

SEQ ID NO: 359987 - RNA, 19 nt, Artificial Sequence
  Description of Artificial Sequence: Synthetic oligonucleotide
gcucacccacacuugccca

SEQ ID NO: 359988 - RNA, 19 nt, Artificial Sequence
  Description of Artificial Sequence: Synthetic oligonucleotide
ggcaagcaggcggcauucg

SEQ ID NO: 359989 - RNA, 19 nt, Artificial Sequence
  Description of Artificial Sequence: Synthetic oligonucleotide
gcgcauuguccccugaagu

SEQ ID NO: 359990 - RNA, 19 nt, Artificial Sequence
  Description of Artificial Sequence: Synthetic oligonucleotide
cagcgcguugucuagccau

SEQ ID NO: 359991 - RNA, 19 nt, Artificial Sequence
  Description of Artificial Sequence: Synthetic oligonucleotide
gccucgcuucagcaggaac

SEQ ID NO: 359992 - RNA, 19 nt, Artificial Sequence
  Description of Artificial Sequence: Synthetic oligonucleotide
gcggcagcgcauugucccc

SEQ ID NO: 359993 - RNA, 19 nt, Artificial Sequence
  Description of Artificial Sequence: Synthetic oligonucleotide
ccuuacccuggggacagug

SEQ ID NO: 359994 - RNA, 19 nt, Artificial Sequence
  Description of Artificial Sequence: Synthetic oligonucleotide
ggcagcgcauuguccccug

SEQ ID NO: 359995 - RNA, 19 nt, Artificial Sequence
  Description of Artificial Sequence: Synthetic oligonucleotide
guaugcggcagcgcauugu

SEQ ID NO: 359996 - RNA, 19 nt, Artificial Sequence
  Description of Artificial Sequence: Synthetic oligonucleotide
ggcuacagucacaguucug

SEQ ID NO: 359997 - RNA, 19 nt, Artificial Sequence
  Description of Artificial Sequence: Synthetic oligonucleotide
cucgcuucagcaggaacau

SEQ ID NO: 359998 - RNA, 19 nt, Artificial Sequence
  Description of Artificial Sequence: Synthetic oligonucleotide
ggaaaacaggcuccccaau

SEQ ID NO: 359999 - RNA, 19 nt, Artificial Sequence
  Description of Artificial Sequence: Synthetic oligonucleotide
gugggcacggugccauugu

SEQ ID NO: 360000 - RNA, 19 nt, Artificial Sequence
  Description of Artificial Sequence: Synthetic oligonucleotide
cuuuccgucgggccagcau

SEQ ID NO: 360001 - RNA, 19 nt, Artificial Sequence
  Description of Artificial Sequence: Synthetic oligonucleotide
cguugacgccccaucagca

SEQ ID NO: 360002 - RNA, 19 nt, Artificial Sequence
  Description of Artificial Sequence: Synthetic oligonucleotide
gagguaugcggcagcgcau

SEQ ID NO: 360003 - RNA, 19 nt, Artificial Sequence
  Description of Artificial Sequence: Synthetic oligonucleotide
gggcagagugugcggcgug

SEQ ID NO: 360004 - RNA, 19 nt, Artificial Sequence
  Description of Artificial Sequence: Synthetic oligonucleotide
ccgucgggccagcaucagg

SEQ ID NO: 360005 - RNA, 19 nt, Artificial Sequence
  Description of Artificial Sequence: Synthetic oligonucleotide
agagggcgacuggcggucu

SEQ ID NO: 360006 - RNA, 19 nt, Artificial Sequence
  Description of Artificial Sequence: Synthetic oligonucleotide
gggaaccuucgggaugaac

SEQ ID NO: 360007 - RNA, 19 nt, Artificial Sequence
  Description of Artificial Sequence: Synthetic oligonucleotide
gcauucggacaggaccuca

SEQ ID NO: 360008 - RNA, 19 nt, Artificial Sequence
  Description of Artificial Sequence: Synthetic oligonucleotide
gggcgacuggcggucuggg

SEQ ID NO: 360009 - RNA, 19 nt, Artificial Sequence
  Description of Artificial Sequence: Synthetic oligonucleotide
ggaucacuaggcugguguu

SEQ ID NO: 360010 - RNA, 19 nt, Artificial Sequence
  Description of Artificial Sequence: Synthetic oligonucleotide
gcgaagacccagaggagcu

SEQ ID NO: 360011 - RNA, 19 nt, Artificial Sequence
  Description of Artificial Sequence: Synthetic oligonucleotide
cagugaagucucugucuau

SEQ ID NO: 360012 - RNA, 19 nt, Artificial Sequence
  Description of Artificial Sequence: Synthetic oligonucleotide
gcgugugcacucacgcuca

SEQ ID NO: 360013 - RNA, 19 nt, Artificial Sequence
  Description of Artificial Sequence: Synthetic oligonucleotide
gccaaugagcgaagaccca

SEQ ID NO: 360014 - RNA, 19 nt, Artificial Sequence
  Description of Artificial Sequence: Synthetic oligonucleotide
cuguggaccugguuucguu

SEQ ID NO: 360015 - RNA, 19 nt, Artificial Sequence
  Description of Artificial Sequence: Synthetic oligonucleotide
gugcggcgugugcacucac

SEQ ID NO: 360016 - RNA, 19 nt, Artificial Sequence
  Description of Artificial Sequence: Synthetic oligonucleotide
caucuaacaccagcgcguu

SEQ ID NO: 360017 - RNA, 19 nt, Artificial Sequence
  Description of Artificial Sequence: Synthetic oligonucleotide
ggcauucggacaggaccuc

SEQ ID NO: 360018 - RNA, 19 nt, Artificial Sequence
  Description of Artificial Sequence: Synthetic oligonucleotide
uccuuacccuggggacagu

SEQ ID NO: 360019 - RNA, 19 nt, Artificial Sequence
  Description of Artificial Sequence: Synthetic oligonucleotide
guaggcaagcaggcggcau

SEQ ID NO: 360020 - RNA, 19 nt, Artificial Sequence
  Description of Artificial Sequence: Synthetic oligonucleotide
ccgggcuacagucacaguu

SEQ ID NO: 360021 - RNA, 19 nt, Artificial Sequence
  Description of Artificial Sequence: Synthetic oligonucleotide
caggaacaucuggucugca

SEQ ID NO: 360022 - RNA, 19 nt, Artificial Sequence
  Description of Artificial Sequence: Synthetic oligonucleotide
gccccgaggccagggaggc

SEQ ID NO: 360023 - RNA, 19 nt, Artificial Sequence
  Description of Artificial Sequence: Synthetic oligonucleotide
guguguguuugucgucauu

SEQ ID NO: 360024 - RNA, 19 nt, Artificial Sequence
  Description of Artificial Sequence: Synthetic oligonucleotide
ggucccucggaggaaacuu

SEQ ID NO: 360025 - RNA, 19 nt, Artificial Sequence
  Description of Artificial Sequence: Synthetic oligonucleotide
gaagagcagcuugguugau

SEQ ID NO: 360026 - RNA, 19 nt, Artificial Sequence
  Description of Artificial Sequence: Synthetic oligonucleotide
ccgaguuaguaagccccuc

SEQ ID NO: 360027 - RNA, 19 nt, Artificial Sequence
  Description of Artificial Sequence: Synthetic oligonucleotide
cccugccuagggcucagga

SEQ ID NO: 360028 - RNA, 19 nt, Artificial Sequence
  Description of Artificial Sequence: Synthetic oligonucleotide
cgaguuaguaagccccucu

SEQ ID NO: 360029 - RNA, 19 nt, Artificial Sequence
  Description of Artificial Sequence: Synthetic oligonucleotide
gcaucaguguugauauauu

SEQ ID NO: 360030 - RNA, 19 nt, Artificial Sequence
  Description of Artificial Sequence: Synthetic oligonucleotide
cggcauucggacaggaccu

SEQ ID NO: 360031 - RNA, 19 nt, Artificial Sequence
  Description of Artificial Sequence: Synthetic oligonucleotide
gccgaguuaguaagccccu

SEQ ID NO: 360032 - RNA, 19 nt, Artificial Sequence
  Description of Artificial Sequence: Synthetic oligonucleotide
caucgacauugaacuucau

SEQ ID NO: 360033 - RNA, 19 nt, Artificial Sequence
  Description of Artificial Sequence: Synthetic oligonucleotide
gguuucguugacgccccau

SEQ ID NO: 360034 - RNA, 19 nt, Artificial Sequence
  Description of Artificial Sequence: Synthetic oligonucleotide
ccgauacccaccccugccu

SEQ ID NO: 360035 - RNA, 19 nt, Artificial Sequence
  Description of Artificial Sequence: Synthetic oligonucleotide
cagcccgggccugccaaaa

SEQ ID NO: 360036 - RNA, 19 nt, Artificial Sequence
  Description of Artificial Sequence: Synthetic oligonucleotide
ccacucgcaucagggcauc

SEQ ID NO: 360037 - RNA, 19 nt, Artificial Sequence
  Description of Artificial Sequence: Synthetic oligonucleotide
ggcgacuggcggucugggu

SEQ ID NO: 360038 - RNA, 19 nt, Artificial Sequence
  Description of Artificial Sequence: Synthetic oligonucleotide
ccuucgggaugaacacagu

SEQ ID NO: 360039 - RNA, 19 nt, Artificial Sequence
  Description of Artificial Sequence: Synthetic oligonucleotide
gcgcguugucuagccaugu

SEQ ID NO: 360040 - RNA, 19 nt, Artificial Sequence
  Description of Artificial Sequence: Synthetic oligonucleotide
cgcuguccacaaugcagua

SEQ ID NO: 360041 - RNA, 19 nt, Artificial Sequence
  Description of Artificial Sequence: Synthetic oligonucleotide
cgcguugucuagccaugua

SEQ ID NO: 360042 - RNA, 19 nt, Artificial Sequence
  Description of Artificial Sequence: Synthetic oligonucleotide
ccuguggaccugguuucgu

SEQ ID NO: 360043 - RNA, 19 nt, Artificial Sequence
  Description of Artificial Sequence: Synthetic oligonucleotide
cccacuucuggggaaccuu

SEQ ID NO: 360044 - RNA, 19 nt, Artificial Sequence
  Description of Artificial Sequence: Synthetic oligonucleotide
cggcgugugcacucacgcu

SEQ ID NO: 360045 - RNA, 19 nt, Artificial Sequence
  Description of Artificial Sequence: Synthetic oligonucleotide
aauaaaccggaacacaagc

SEQ ID NO: 360046 - RNA, 19 nt, Artificial Sequence
  Description of Artificial Sequence: Synthetic oligonucleotide
ucugaaaacauuaagcggc

SEQ ID NO: 360047 - RNA, 19 nt, Artificial Sequence
  Description of Artificial Sequence: Synthetic oligonucleotide
uauugugucgccaauauca

SEQ ID NO: 360048 - RNA, 19 nt, Artificial Sequence
  Description of Artificial Sequence: Synthetic oligonucleotide
aaauugacacaccagcuuc

SEQ ID NO: 360049 - RNA, 19 nt, Artificial Sequence
  Description of Artificial Sequence: Synthetic oligonucleotide
aauguaauacgaaagauga

SEQ ID NO: 360050 - RNA, 19 nt, Artificial Sequence
  Description of Artificial Sequence: Synthetic oligonucleotide
gaacacauaaucccaaacg

SEQ ID NO: 360051 - RNA, 19 nt, Artificial Sequence
  Description of Artificial Sequence: Synthetic oligonucleotide
agcucagugaaccagauag

SEQ ID NO: 360052 - RNA, 19 nt, Artificial Sequence
  Description of Artificial Sequence: Synthetic oligonucleotide
uauuaguccaauuugcaug

SEQ ID NO: 360053 - RNA, 19 nt, Artificial Sequence
  Description of Artificial Sequence: Synthetic oligonucleotide
aauacacgaucauugaaug

SEQ ID NO: 360054 - RNA, 19 nt, Artificial Sequence
  Description of Artificial Sequence: Synthetic oligonucleotide
ugagauacugugaggaacg

SEQ ID NO: 360055 - RNA, 19 nt, Artificial Sequence
  Description of Artificial Sequence: Synthetic oligonucleotide
uauauguucuaacucaaga

SEQ ID NO: 360056 - RNA, 19 nt, Artificial Sequence
  Description of Artificial Sequence: Synthetic oligonucleotide
caauuuuccaccauuggcc

SEQ ID NO: 360057 - RNA, 19 nt, Artificial Sequence
  Description of Artificial Sequence: Synthetic oligonucleotide
agaaggaacacucgugacc

SEQ ID NO: 360058 - RNA, 19 nt, Artificial Sequence
  Description of Artificial Sequence: Synthetic oligonucleotide
ucuaacucaagagaauugg

SEQ ID NO: 360059 - RNA, 19 nt, Artificial Sequence
  Description of Artificial Sequence: Synthetic oligonucleotide
ugugucgccaauaucagug

SEQ ID NO: 360060 - RNA, 19 nt, Artificial Sequence
  Description of Artificial Sequence: Synthetic oligonucleotide
aacguagaccaccuuauag

SEQ ID NO: 360061 - RNA, 19 nt, Artificial Sequence
  Description of Artificial Sequence: Synthetic oligonucleotide
acguagaccaccuuauagc

SEQ ID NO: 360062 - RNA, 19 nt, Artificial Sequence
  Description of Artificial Sequence: Synthetic oligonucleotide
uucauuaagcgucugauua

SEQ ID NO: 360063 - RNA, 19 nt, Artificial Sequence
  Description of Artificial Sequence: Synthetic oligonucleotide
aaauguaauacgaaagaug

SEQ ID NO: 360064 - RNA, 19 nt, Artificial Sequence
  Description of Artificial Sequence: Synthetic oligonucleotide
ugagucuuaggaaauggag

SEQ ID NO: 360065 - RNA, 19 nt, Artificial Sequence
  Description of Artificial Sequence: Synthetic oligonucleotide
agauagacuauugugucgc

SEQ ID NO: 360066 - RNA, 19 nt, Artificial Sequence
  Description of Artificial Sequence: Synthetic oligonucleotide
ucauauaauucuugagccg

SEQ ID NO: 360067 - RNA, 19 nt, Artificial Sequence
  Description of Artificial Sequence: Synthetic oligonucleotide
uguaaauccaagacucgag

SEQ ID NO: 360068 - RNA, 19 nt, Artificial Sequence
  Description of Artificial Sequence: Synthetic oligonucleotide
uacacgaucauugaaugag

SEQ ID NO: 360069 - RNA, 19 nt, Artificial Sequence
  Description of Artificial Sequence: Synthetic oligonucleotide
uacgacauauuccuggcag

SEQ ID NO: 360070 - RNA, 19 nt, Artificial Sequence
  Description of Artificial Sequence: Synthetic oligonucleotide
aucuuucgcagccugaaac

SEQ ID NO: 360071 - RNA, 19 nt, Artificial Sequence
  Description of Artificial Sequence: Synthetic oligonucleotide
ucaauaaaccggaacacaa

SEQ ID NO: 360072 - RNA, 19 nt, Artificial Sequence
  Description of Artificial Sequence: Synthetic oligonucleotide
ugguuguaaauguaauacg

SEQ ID NO: 360073 - RNA, 19 nt, Artificial Sequence
  Description of Artificial Sequence: Synthetic oligonucleotide
guaaucuaaggucaugugc

SEQ ID NO: 360074 - RNA, 19 nt, Artificial Sequence
  Description of Artificial Sequence: Synthetic oligonucleotide
uguguaaaaugccauguaa

SEQ ID NO: 360075 - RNA, 19 nt, Artificial Sequence
  Description of Artificial Sequence: Synthetic oligonucleotide
guaaauccaagacucgagg

SEQ ID NO: 360076 - RNA, 19 nt, Artificial Sequence
  Description of Artificial Sequence: Synthetic oligonucleotide
gguuagauagacuauauuc

SEQ ID NO: 360077 - RNA, 19 nt, Artificial Sequence
  Description of Artificial Sequence: Synthetic oligonucleotide
ggaaaauugacacaccagc

SEQ ID NO: 360078 - RNA, 19 nt, Artificial Sequence
  Description of Artificial Sequence: Synthetic oligonucleotide
gaauugguuagauagacua

SEQ ID NO: 360079 - RNA, 19 nt, Artificial Sequence
  Description of Artificial Sequence: Synthetic oligonucleotide
uagauagacuauauucucc

SEQ ID NO: 360080 - RNA, 19 nt, Artificial Sequence
  Description of Artificial Sequence: Synthetic oligonucleotide
ugguacgacauauuccugg

SEQ ID NO: 360081 - RNA, 19 nt, Artificial Sequence
  Description of Artificial Sequence: Synthetic oligonucleotide
ucauugaaugagcuggcag

SEQ ID NO: 360082 - RNA, 19 nt, Artificial Sequence
  Description of Artificial Sequence: Synthetic oligonucleotide
uguaauacgaaagaugauu

SEQ ID NO: 360083 - RNA, 19 nt, Artificial Sequence
  Description of Artificial Sequence: Synthetic oligonucleotide
aagaugccuaguuuauuag

SEQ ID NO: 360084 - RNA, 19 nt, Artificial Sequence
  Description of Artificial Sequence: Synthetic oligonucleotide
uuagauagacuauauucuc

SEQ ID NO: 360085 - RNA, 19 nt, Artificial Sequence
  Description of Artificial Sequence: Synthetic oligonucleotide
auuaguccaauuugcauga

SEQ ID NO: 360086 - RNA, 19 nt, Artificial Sequence
  Description of Artificial Sequence: Synthetic oligonucleotide
uucauaauugaaucaggcu

SEQ ID NO: 360087 - RNA, 19 nt, Artificial Sequence
  Description of Artificial Sequence: Synthetic oligonucleotide
aggauucauccacaggacc

SEQ ID NO: 360088 - RNA, 19 nt, Artificial Sequence
  Description of Artificial Sequence: Synthetic oligonucleotide
auuaaggauucauccacag

SEQ ID NO: 360089 - RNA, 19 nt, Artificial Sequence
  Description of Artificial Sequence: Synthetic oligonucleotide
ugagccguaaucuaagguc

SEQ ID NO: 360090 - RNA, 19 nt, Artificial Sequence
  Description of Artificial Sequence: Synthetic oligonucleotide
acucaagagaauugguuag

SEQ ID NO: 360091 - RNA, 19 nt, Artificial Sequence
  Description of Artificial Sequence: Synthetic oligonucleotide
uaaaccggaacacaagcuc

SEQ ID NO: 360092 - RNA, 19 nt, Artificial Sequence
  Description of Artificial Sequence: Synthetic oligonucleotide
agauagacuauauucucca

SEQ ID NO: 360093 - RNA, 19 nt, Artificial Sequence
  Description of Artificial Sequence: Synthetic oligonucleotide
cugauuauggaaucacagc

SEQ ID NO: 360094 - RNA, 19 nt, Artificial Sequence
  Description of Artificial Sequence: Synthetic oligonucleotide
uccaauuugcaugagcuca

SEQ ID NO: 360095 - RNA, 19 nt, Artificial Sequence
  Description of Artificial Sequence: Synthetic oligonucleotide
agauggugcagugugaggg

SEQ ID NO: 360096 - RNA, 19 nt, Artificial Sequence
  Description of Artificial Sequence: Synthetic oligonucleotide
ugauaugcugccagagagg

SEQ ID NO: 360097 - RNA, 19 nt, Artificial Sequence
  Description of Artificial Sequence: Synthetic oligonucleotide
ucuugagccguaaucuaag

SEQ ID NO: 360098 - RNA, 19 nt, Artificial Sequence
  Description of Artificial Sequence: Synthetic oligonucleotide
acguuuuggaucuucuguc

SEQ ID NO: 360099 - RNA, 19 nt, Artificial Sequence
  Description of Artificial Sequence: Synthetic oligonucleotide
ugaaccagauagacuauug

SEQ ID NO: 360100 - RNA, 19 nt, Artificial Sequence
  Description of Artificial Sequence: Synthetic oligonucleotide
ucuccauaaguacugccug

SEQ ID NO: 360101 - RNA, 19 nt, Artificial Sequence
  Description of Artificial Sequence: Synthetic oligonucleotide
cuacccauguguacaaacg

SEQ ID NO: 360102 - RNA, 19 nt, Artificial Sequence
  Description of Artificial Sequence: Synthetic oligonucleotide
aaauugccuaguucagaag

SEQ ID NO: 360103 - RNA, 19 nt, Artificial Sequence
  Description of Artificial Sequence: Synthetic oligonucleotide
ugagaaguggccauuggau

SEQ ID NO: 360104 - RNA, 19 nt, Artificial Sequence
  Description of Artificial Sequence: Synthetic oligonucleotide
acauuaagcggcuucccag

SEQ ID NO: 360105 - RNA, 19 nt, Artificial Sequence
  Description of Artificial Sequence: Synthetic oligonucleotide
aacggauuaaggauucauc

SEQ ID NO: 360106 - RNA, 19 nt, Artificial Sequence
  Description of Artificial Sequence: Synthetic oligonucleotide
uggggauuuacuaggaaaa

SEQ ID NO: 360107 - RNA, 19 nt, Artificial Sequence
  Description of Artificial Sequence: Synthetic oligonucleotide
caugaggcauucauaauug

SEQ ID NO: 360108 - RNA, 19 nt, Artificial Sequence
  Description of Artificial Sequence: Synthetic oligonucleotide
augagauacugugaggaac

SEQ ID NO: 360109 - RNA, 19 nt, Artificial Sequence
  Description of Artificial Sequence: Synthetic oligonucleotide
uaaaccauagguucuugaa

SEQ ID NO: 360110 - RNA, 19 nt, Artificial Sequence
  Description of Artificial Sequence: Synthetic oligonucleotide
ucccaaacguccuugguca

SEQ ID NO: 360111 - RNA, 19 nt, Artificial Sequence
  Description of Artificial Sequence: Synthetic oligonucleotide
agaucuuugauuccucggu

SEQ ID NO: 360112 - RNA, 19 nt, Artificial Sequence
  Description of Artificial Sequence: Synthetic oligonucleotide
ggauuuacuaggaaaauug

SEQ ID NO: 360113 - RNA, 19 nt, Artificial Sequence
  Description of Artificial Sequence: Synthetic oligonucleotide
gagucuuaggaaauggagc

SEQ ID NO: 360114 - RNA, 19 nt, Artificial Sequence
  Description of Artificial Sequence: Synthetic oligonucleotide
uuauuaguccaauuugcau

SEQ ID NO: 360115 - RNA, 19 nt, Artificial Sequence
  Description of Artificial Sequence: Synthetic oligonucleotide
gauggucugaacuucaaua

SEQ ID NO: 360116 - RNA, 19 nt, Artificial Sequence
  Description of Artificial Sequence: Synthetic oligonucleotide
uuaagcgucugauuaugga

SEQ ID NO: 360117 - RNA, 19 nt, Artificial Sequence
  Description of Artificial Sequence: Synthetic oligonucleotide
cuuguagccagucuaagga

SEQ ID NO: 360118 - RNA, 19 nt, Artificial Sequence
  Description of Artificial Sequence: Synthetic oligonucleotide
auucgaucaaccauugcuc

SEQ ID NO: 360119 - RNA, 19 nt, Artificial Sequence
  Description of Artificial Sequence: Synthetic oligonucleotide
acgguauuuaucuuucgca

SEQ ID NO: 360120 - RNA, 19 nt, Artificial Sequence
  Description of Artificial Sequence: Synthetic oligonucleotide
gugaggugaacuuucuugc

SEQ ID NO: 360121 - RNA, 19 nt, Artificial Sequence
  Description of Artificial Sequence: Synthetic oligonucleotide
cauuaagcggcuucccagg

SEQ ID NO: 360122 - RNA, 19 nt, Artificial Sequence
  Description of Artificial Sequence: Synthetic oligonucleotide
ugcccguagauuuugacau

SEQ ID NO: 360123 - RNA, 19 nt, Artificial Sequence
  Description of Artificial Sequence: Synthetic oligonucleotide
gaaucagaaggaacacucg

SEQ ID NO: 360124 - RNA, 19 nt, Artificial Sequence
  Description of Artificial Sequence: Synthetic oligonucleotide
aaaugagcgucuucucacu

SEQ ID NO: 360125 - RNA, 19 nt, Artificial Sequence
  Description of Artificial Sequence: Synthetic oligonucleotide
cagauagacuauugugucg

SEQ ID NO: 360126 - RNA, 19 nt, Artificial Sequence
  Description of Artificial Sequence: Synthetic oligonucleotide
ugucacuuuguuccggcca

SEQ ID NO: 360127 - RNA, 19 nt, Artificial Sequence
  Description of Artificial Sequence: Synthetic oligonucleotide
ucuaaggucaugugcuacu

SEQ ID NO: 360128 - RNA, 19 nt, Artificial Sequence
  Description of Artificial Sequence: Synthetic oligonucleotide
ucuacccauguguacaaac

SEQ ID NO: 360129 - RNA, 19 nt, Artificial Sequence
  Description of Artificial Sequence: Synthetic oligonucleotide
caaacggaggauaccugcg

SEQ ID NO: 360130 - RNA, 19 nt, Artificial Sequence
  Description of Artificial Sequence: Synthetic oligonucleotide
gaugccuaguuuauuaguc

SEQ ID NO: 360131 - RNA, 19 nt, Artificial Sequence
  Description of Artificial Sequence: Synthetic oligonucleotide
ucuuucgcagccugaaacu

SEQ ID NO: 360132 - RNA, 19 nt, Artificial Sequence
  Description of Artificial Sequence: Synthetic oligonucleotide
uacgaaagaugauuuggaa

SEQ ID NO: 360133 - RNA, 19 nt, Artificial Sequence
  Description of Artificial Sequence: Synthetic oligonucleotide
aaacggaggauaccugcgu

SEQ ID NO: 360134 - RNA, 19 nt, Artificial Sequence
  Description of Artificial Sequence: Synthetic oligonucleotide
cuugguacgacauauuccu

SEQ ID NO: 360135 - RNA, 19 nt, Artificial Sequence
  Description of Artificial Sequence: Synthetic oligonucleotide
gacuucuauauguucuaac

SEQ ID NO: 360136 - RNA, 19 nt, Artificial Sequence
  Description of Artificial Sequence: Synthetic oligonucleotide
uugagccguaaucuaaggu

SEQ ID NO: 360137 - RNA, 19 nt, Artificial Sequence
  Description of Artificial Sequence: Synthetic oligonucleotide
cacgguauuuaucuuucgc

SEQ ID NO: 360138 - RNA, 19 nt, Artificial Sequence
  Description of Artificial Sequence: Synthetic oligonucleotide
uucuugagccguaaucuaa

SEQ ID NO: 360139 - RNA, 19 nt, Artificial Sequence
  Description of Artificial Sequence: Synthetic oligonucleotide
uguacaaacggaggauacc

SEQ ID NO: 360140 - RNA, 19 nt, Artificial Sequence
  Description of Artificial Sequence: Synthetic oligonucleotide
ucucccuaggaccggaacu

SEQ ID NO: 360141 - RNA, 19 nt, Artificial Sequence
  Description of Artificial Sequence: Synthetic oligonucleotide
agcgucugauuauggaauc

SEQ ID NO: 360142 - RNA, 19 nt, Artificial Sequence
  Description of Artificial Sequence: Synthetic oligonucleotide
uugcccguagauuuugaca

SEQ ID NO: 360143 - RNA, 19 nt, Artificial Sequence
  Description of Artificial Sequence: Synthetic oligonucleotide
cuugagccguaaucuaagg

SEQ ID NO: 360144 - RNA, 19 nt, Artificial Sequence
  Description of Artificial Sequence: Synthetic oligonucleotide
guuagauagacuauauucu

SEQ ID NO: 360145 - RNA, 19 nt, Artificial Sequence
  Description of Artificial Sequence: Synthetic oligonucleotide
uacugugaggaacggauua

SEQ ID NO: 360146 - RNA, 19 nt, Artificial Sequence
  Description of Artificial Sequence: Synthetic oligonucleotide
ugacccauucuacccaugu

SEQ ID NO: 360147 - RNA, 19 nt, Artificial Sequence
  Description of Artificial Sequence: Synthetic oligonucleotide
agaggguaauucuuugcca

SEQ ID NO: 360148 - RNA, 19 nt, Artificial Sequence
  Description of Artificial Sequence: Synthetic oligonucleotide
gcucccuagguccacaugg

SEQ ID NO: 360149 - RNA, 19 nt, Artificial Sequence
  Description of Artificial Sequence: Synthetic oligonucleotide
cagacgagugccuaaacca

SEQ ID NO: 360150 - RNA, 19 nt, Artificial Sequence
  Description of Artificial Sequence: Synthetic oligonucleotide
agaugccuaguuuauuagu

SEQ ID NO: 360151 - RNA, 19 nt, Artificial Sequence
  Description of Artificial Sequence: Synthetic oligonucleotide
uuuccucgcccauuaauuc

SEQ ID NO: 360152 - RNA, 19 nt, Artificial Sequence
  Description of Artificial Sequence: Synthetic oligonucleotide
auaaguacugccugcucau

SEQ ID NO: 360153 - RNA, 19 nt, Artificial Sequence
  Description of Artificial Sequence: Synthetic oligonucleotide
gauaccugcgucugccaug

SEQ ID NO: 360154 - RNA, 19 nt, Artificial Sequence
  Description of Artificial Sequence: Synthetic oligonucleotide
acgaucauugaaugagcug

SEQ ID NO: 360155 - RNA, 19 nt, Artificial Sequence
  Description of Artificial Sequence: Synthetic oligonucleotide
acacgaucauugaaugagc

SEQ ID NO: 360156 - RNA, 19 nt, Artificial Sequence
  Description of Artificial Sequence: Synthetic oligonucleotide
ccuuauagcaugucagggg

SEQ ID NO: 360157 - RNA, 19 nt, Artificial Sequence
  Description of Artificial Sequence: Synthetic oligonucleotide
agugauucgaucaaccauu

SEQ ID NO: 360158 - RNA, 19 nt, Artificial Sequence
  Description of Artificial Sequence: Synthetic oligonucleotide
auuaagcgucugauuaugg

SEQ ID NO: 360159 - RNA, 19 nt, Artificial Sequence
  Description of Artificial Sequence: Synthetic oligonucleotide
cgaucauugaaugagcugg

SEQ ID NO: 360160 - RNA, 19 nt, Artificial Sequence
  Description of Artificial Sequence: Synthetic oligonucleotide
auaccugcgucugccaugg

SEQ ID NO: 360161 - RNA, 19 nt, Artificial Sequence
  Description of Artificial Sequence: Synthetic oligonucleotide
aaucuaaggucaugugcua

SEQ ID NO: 360162 - RNA, 19 nt, Artificial Sequence
  Description of Artificial Sequence: Synthetic oligonucleotide
accggaacucuucgaggcc

SEQ ID NO: 360163 - RNA, 19 nt, Artificial Sequence
  Description of Artificial Sequence: Synthetic oligonucleotide
agucuaaggaagcuucaaa

SEQ ID NO: 360164 - RNA, 19 nt, Artificial Sequence
  Description of Artificial Sequence: Synthetic oligonucleotide
gauagacuauugugucgcc

SEQ ID NO: 360165 - RNA, 19 nt, Artificial Sequence
  Description of Artificial Sequence: Synthetic oligonucleotide
cagaccucgauaucacuug

SEQ ID NO: 360166 - RNA, 19 nt, Artificial Sequence
  Description of Artificial Sequence: Synthetic oligonucleotide
gauacugugaggaacggau

SEQ ID NO: 360167 - RNA, 19 nt, Artificial Sequence
  Description of Artificial Sequence: Synthetic oligonucleotide
auacacgaucauugaauga

SEQ ID NO: 360168 - RNA, 19 nt, Artificial Sequence
  Description of Artificial Sequence: Synthetic oligonucleotide
cauuaagcgucugauuaug

SEQ ID NO: 360169 - RNA, 19 nt, Artificial Sequence
  Description of Artificial Sequence: Synthetic oligonucleotide
uagguucuugaacaagcau

SEQ ID NO: 360170 - RNA, 19 nt, Artificial Sequence
  Description of Artificial Sequence: Synthetic oligonucleotide
agugcguagcccguucucg

SEQ ID NO: 360171 - RNA, 19 nt, Artificial Sequence
  Description of Artificial Sequence: Synthetic oligonucleotide
ugauucgaucaaccauugc

SEQ ID NO: 360172 - RNA, 19 nt, Artificial Sequence
  Description of Artificial Sequence: Synthetic oligonucleotide
aucagaucuuugccagagg

SEQ ID NO: 360173 - RNA, 19 nt, Artificial Sequence
  Description of Artificial Sequence: Synthetic oligonucleotide
ggaaucagaaggaacacuc

SEQ ID NO: 360174 - RNA, 19 nt, Artificial Sequence
  Description of Artificial Sequence: Synthetic oligonucleotide
uccauaaguacugccugcu

SEQ ID NO: 360175 - RNA, 19 nt, Artificial Sequence
  Description of Artificial Sequence: Synthetic oligonucleotide
auugugucgccaauaucag

SEQ ID NO: 360176 - RNA, 19 nt, Artificial Sequence
  Description of Artificial Sequence: Synthetic oligonucleotide
auaaaccggaacacaagcu

SEQ ID NO: 360177 - RNA, 19 nt, Artificial Sequence
  Description of Artificial Sequence: Synthetic oligonucleotide
gguacgacauauuccuggc

SEQ ID NO: 360178 - RNA, 19 nt, Artificial Sequence
  Description of Artificial Sequence: Synthetic oligonucleotide
gagccguaaucuaagguca

SEQ ID NO: 360179 - RNA, 19 nt, Artificial Sequence
  Description of Artificial Sequence: Synthetic oligonucleotide
caggucauuccccugcaac

SEQ ID NO: 360180 - RNA, 19 nt, Artificial Sequence
  Description of Artificial Sequence: Synthetic oligonucleotide
uuaagcggcuucccaggac

SEQ ID NO: 360181 - RNA, 19 nt, Artificial Sequence
  Description of Artificial Sequence: Synthetic oligonucleotide
accucgauaucacuuguuu

SEQ ID NO: 360182 - RNA, 19 nt, Artificial Sequence
  Description of Artificial Sequence: Synthetic oligonucleotide
ugcaacaggugugcaacug

SEQ ID NO: 360183 - RNA, 19 nt, Artificial Sequence
  Description of Artificial Sequence: Synthetic oligonucleotide
uugguacgacauauuccug

SEQ ID NO: 360184 - RNA, 19 nt, Artificial Sequence
  Description of Artificial Sequence: Synthetic oligonucleotide
auuaagcggcuucccagga

SEQ ID NO: 360185 - RNA, 19 nt, Artificial Sequence
  Description of Artificial Sequence: Synthetic oligonucleotide
agugccuaaaccauagguu

SEQ ID NO: 360186 - RNA, 19 nt, Artificial Sequence
  Description of Artificial Sequence: Synthetic oligonucleotide
cuaaaccauagguucuuga

SEQ ID NO: 360187 - RNA, 19 nt, Artificial Sequence
  Description of Artificial Sequence: Synthetic oligonucleotide
ucgaacagccacaggccac

SEQ ID NO: 360188 - RNA, 19 nt, Artificial Sequence
  Description of Artificial Sequence: Synthetic oligonucleotide
ccuugguacgacauauucc

SEQ ID NO: 360189 - RNA, 19 nt, Artificial Sequence
  Description of Artificial Sequence: Synthetic oligonucleotide
aguucagaagcaauggcuu

SEQ ID NO: 360190 - RNA, 19 nt, Artificial Sequence
  Description of Artificial Sequence: Synthetic oligonucleotide
guuccggccacauggcuac

SEQ ID NO: 360191 - RNA, 19 nt, Artificial Sequence
  Description of Artificial Sequence: Synthetic oligonucleotide
gaccgacagggugauaugc

SEQ ID NO: 360192 - RNA, 19 nt, Artificial Sequence
  Description of Artificial Sequence: Synthetic oligonucleotide
acgagugccuaaaccauag

SEQ ID NO: 360193 - RNA, 19 nt, Artificial Sequence
  Description of Artificial Sequence: Synthetic oligonucleotide
cuuugccagaggcucgaag

SEQ ID NO: 360194 - RNA, 19 nt, Artificial Sequence
  Description of Artificial Sequence: Synthetic oligonucleotide
gacccauucuacccaugug

SEQ ID NO: 360195 - RNA, 19 nt, Artificial Sequence
  Description of Artificial Sequence: Synthetic oligonucleotide
ccagauagacuauuguguc

SEQ ID NO: 360196 - RNA, 19 nt, Artificial Sequence
  Description of Artificial Sequence: Synthetic oligonucleotide
cuuugacccauucuaccca

SEQ ID NO: 360197 - RNA, 19 nt, Artificial Sequence
  Description of Artificial Sequence: Synthetic oligonucleotide
agaacguagaccaccuuau

SEQ ID NO: 360198 - RNA, 19 nt, Artificial Sequence
  Description of Artificial Sequence: Synthetic oligonucleotide
ggagcauccuugaagaaca

SEQ ID NO: 360199 - RNA, 19 nt, Artificial Sequence
  Description of Artificial Sequence: Synthetic oligonucleotide
auagacuauugugucgcca

SEQ ID NO: 360200 - RNA, 19 nt, Artificial Sequence
  Description of Artificial Sequence: Synthetic oligonucleotide
gaacacucgugaccacacc

SEQ ID NO: 360201 - RNA, 19 nt, Artificial Sequence
  Description of Artificial Sequence: Synthetic oligonucleotide
cauaacuuucuucauguau

SEQ ID NO: 360202 - RNA, 19 nt, Artificial Sequence
  Description of Artificial Sequence: Synthetic oligonucleotide
agucgucccugacuuuauc

SEQ ID NO: 360203 - RNA, 19 nt, Artificial Sequence
  Description of Artificial Sequence: Synthetic oligonucleotide
ugccuaguucagaagcaau

SEQ ID NO: 360204 - RNA, 19 nt, Artificial Sequence
  Description of Artificial Sequence: Synthetic oligonucleotide
auuuccucgcccauuaauu

SEQ ID NO: 360205 - RNA, 19 nt, Artificial Sequence
  Description of Artificial Sequence: Synthetic oligonucleotide
agaccucgauaucacuugu

SEQ ID NO: 360206 - RNA, 19 nt, Artificial Sequence
  Description of Artificial Sequence: Synthetic oligonucleotide
gugcguagcccguucucgg

SEQ ID NO: 360207 - RNA, 19 nt, Artificial Sequence
  Description of Artificial Sequence: Synthetic oligonucleotide
cuauugugucgccaauauc

SEQ ID NO: 360208 - RNA, 19 nt, Artificial Sequence
  Description of Artificial Sequence: Synthetic oligonucleotide
ggcgcauuccaucagcuga

SEQ ID NO: 360209 - RNA, 19 nt, Artificial Sequence
  Description of Artificial Sequence: Synthetic oligonucleotide
uugugucgccaauaucagu

SEQ ID NO: 360210 - RNA, 19 nt, Artificial Sequence
  Description of Artificial Sequence: Synthetic oligonucleotide
cacgacacauucaucugca

SEQ ID NO: 360211 - RNA, 19 nt, Artificial Sequence
  Description of Artificial Sequence: Synthetic oligonucleotide
gugucgccaauaucagugc

SEQ ID NO: 360212 - RNA, 19 nt, Artificial Sequence
  Description of Artificial Sequence: Synthetic oligonucleotide
cauguaaauaguggaaucu

SEQ ID NO: 360213 - RNA, 19 nt, Artificial Sequence
  Description of Artificial Sequence: Synthetic oligonucleotide
cugaaagugauucgaucaa

SEQ ID NO: 360214 - RNA, 19 nt, Artificial Sequence
  Description of Artificial Sequence: Synthetic oligonucleotide
ggaccggaacucuucgagg

SEQ ID NO: 360215 - RNA, 19 nt, Artificial Sequence
  Description of Artificial Sequence: Synthetic oligonucleotide
guguacaaacggaggauac

SEQ ID NO: 360216 - RNA, 19 nt, Artificial Sequence
  Description of Artificial Sequence: Synthetic oligonucleotide
cgguauuuaucuuucgcag

SEQ ID NO: 360217 - RNA, 19 nt, Artificial Sequence
  Description of Artificial Sequence: Synthetic oligonucleotide
aggcucgaagguccacugg

SEQ ID NO: 360218 - RNA, 19 nt, Artificial Sequence
  Description of Artificial Sequence: Synthetic oligonucleotide
uuguuccggccacauggcu

SEQ ID NO: 360219 - RNA, 19 nt, Artificial Sequence
  Description of Artificial Sequence: Synthetic oligonucleotide
ugcagaccucgauaucacu

SEQ ID NO: 360220 - RNA, 19 nt, Artificial Sequence
  Description of Artificial Sequence: Synthetic oligonucleotide
cuuucgcagccugaaacuc

SEQ ID NO: 360221 - RNA, 19 nt, Artificial Sequence
  Description of Artificial Sequence: Synthetic oligonucleotide
auuugcucgaacagccaca

SEQ ID NO: 360222 - RNA, 19 nt, Artificial Sequence
  Description of Artificial Sequence: Synthetic oligonucleotide
acacucgugaccacaccag

SEQ ID NO: 360223 - RNA, 19 nt, Artificial Sequence
  Description of Artificial Sequence: Synthetic oligonucleotide
cuccucgcagaauguuucc

SEQ ID NO: 360224 - RNA, 19 nt, Artificial Sequence
  Description of Artificial Sequence: Synthetic oligonucleotide
gugauucgaucaaccauug

SEQ ID NO: 360225 - RNA, 19 nt, Artificial Sequence
  Description of Artificial Sequence: Synthetic oligonucleotide
cauccgggaaucagaagga

SEQ ID NO: 360226 - RNA, 19 nt, Artificial Sequence
  Description of Artificial Sequence: Synthetic oligonucleotide
uuaguccaauuugcaugag

SEQ ID NO: 360227 - RNA, 19 nt, Artificial Sequence
  Description of Artificial Sequence: Synthetic oligonucleotide
uugacccauucuacccaug

SEQ ID NO: 360228 - RNA, 19 nt, Artificial Sequence
  Description of Artificial Sequence: Synthetic oligonucleotide
ucccuagguccacauggaa

SEQ ID NO: 360229 - RNA, 19 nt, Artificial Sequence
  Description of Artificial Sequence: Synthetic oligonucleotide
uaggaccggaacucuucga

SEQ ID NO: 360230 - RNA, 19 nt, Artificial Sequence
  Description of Artificial Sequence: Synthetic oligonucleotide
gugcuuagugaagccuugg

SEQ ID NO: 360231 - RNA, 19 nt, Artificial Sequence
  Description of Artificial Sequence: Synthetic oligonucleotide
agauacugugaggaacgga

SEQ ID NO: 360232 - RNA, 19 nt, Artificial Sequence
  Description of Artificial Sequence: Synthetic oligonucleotide
ugcucccuagguccacaug

SEQ ID NO: 360233 - RNA, 19 nt, Artificial Sequence
  Description of Artificial Sequence: Synthetic oligonucleotide
cucccuaggaccggaacuc

SEQ ID NO: 360234 - RNA, 19 nt, Artificial Sequence
  Description of Artificial Sequence: Synthetic oligonucleotide
agaggcucgaagguccacu

SEQ ID NO: 360235 - RNA, 19 nt, Artificial Sequence
  Description of Artificial Sequence: Synthetic oligonucleotide
gauagacuauauucuccau

SEQ ID NO: 360236 - RNA, 19 nt, Artificial Sequence
  Description of Artificial Sequence: Synthetic oligonucleotide
ggccacgacacauucaucu

SEQ ID NO: 360237 - RNA, 19 nt, Artificial Sequence
  Description of Artificial Sequence: Synthetic oligonucleotide
cacgaucauugaaugagcu

SEQ ID NO: 360238 - RNA, 19 nt, Artificial Sequence
  Description of Artificial Sequence: Synthetic oligonucleotide
auguaauacgaaagaugau

SEQ ID NO: 360239 - RNA, 19 nt, Artificial Sequence
  Description of Artificial Sequence: Synthetic oligonucleotide
cucucccuaggaccggaac

SEQ ID NO: 360240 - RNA, 19 nt, Artificial Sequence
  Description of Artificial Sequence: Synthetic oligonucleotide
auaucagugcguagcccgu

SEQ ID NO: 360241 - RNA, 19 nt, Artificial Sequence
  Description of Artificial Sequence: Synthetic oligonucleotide
caucugcagaccucgauau

SEQ ID NO: 360242 - RNA, 19 nt, Artificial Sequence
  Description of Artificial Sequence: Synthetic oligonucleotide
auauaauucuugagccgua

SEQ ID NO: 360243 - RNA, 19 nt, Artificial Sequence
  Description of Artificial Sequence: Synthetic oligonucleotide
gcauagggagaacguagac

SEQ ID NO: 360244 - RNA, 19 nt, Artificial Sequence
  Description of Artificial Sequence: Synthetic oligonucleotide
cguaaucuaaggucaugug

SEQ ID NO: 360245 - RNA, 19 nt, Artificial Sequence
  Description of Artificial Sequence: Synthetic oligonucleotide
accgacagggugauaugcu

SEQ ID NO: 360246 - RNA, 19 nt, Artificial Sequence
  Description of Artificial Sequence: Synthetic oligonucleotide
auuggauggcuggggauuu

SEQ ID NO: 360247 - RNA, 19 nt, Artificial Sequence
  Description of Artificial Sequence: Synthetic oligonucleotide
gccagucuaaggaagcuuc

SEQ ID NO: 360248 - RNA, 19 nt, Artificial Sequence
  Description of Artificial Sequence: Synthetic oligonucleotide
cuuuagcuggcaucauaua

SEQ ID NO: 360249 - RNA, 19 nt, Artificial Sequence
  Description of Artificial Sequence: Synthetic oligonucleotide
gugaagccuugguacgaca

SEQ ID NO: 360250 - RNA, 19 nt, Artificial Sequence
  Description of Artificial Sequence: Synthetic oligonucleotide
cguagaccaccuuauagca

SEQ ID NO: 360251 - RNA, 19 nt, Artificial Sequence
  Description of Artificial Sequence: Synthetic oligonucleotide
ccuaggaccggaacucuuc

SEQ ID NO: 360252 - RNA, 19 nt, Artificial Sequence
  Description of Artificial Sequence: Synthetic oligonucleotide
ucaggaccgacagggugau

SEQ ID NO: 360253 - RNA, 19 nt, Artificial Sequence
  Description of Artificial Sequence: Synthetic oligonucleotide
cuaguuuauuaguccaauu

SEQ ID NO: 360254 - RNA, 19 nt, Artificial Sequence
  Description of Artificial Sequence: Synthetic oligonucleotide
gcagaggaucaucaaaccu

SEQ ID NO: 360255 - RNA, 19 nt, Artificial Sequence
  Description of Artificial Sequence: Synthetic oligonucleotide
gacgagugccuaaaccaua

SEQ ID NO: 360256 - RNA, 19 nt, Artificial Sequence
  Description of Artificial Sequence: Synthetic oligonucleotide
cagaucuuugccagaggcu

SEQ ID NO: 360257 - RNA, 19 nt, Artificial Sequence
  Description of Artificial Sequence: Synthetic oligonucleotide
ucccuaggaccggaacucu

SEQ ID NO: 360258 - RNA, 19 nt, Artificial Sequence
  Description of Artificial Sequence: Synthetic oligonucleotide
cucgaagguccacuggaua

SEQ ID NO: 360259 - RNA, 19 nt, Artificial Sequence
  Description of Artificial Sequence: Synthetic oligonucleotide
agccagucuaaggaagcuu

SEQ ID NO: 360260 - RNA, 19 nt, Artificial Sequence
  Description of Artificial Sequence: Synthetic oligonucleotide
auccgggaaucagaaggaa

SEQ ID NO: 360261 - RNA, 19 nt, Artificial Sequence
  Description of Artificial Sequence: Synthetic oligonucleotide
ccuuaauggugagcauagg

SEQ ID NO: 360262 - RNA, 19 nt, Artificial Sequence
  Description of Artificial Sequence: Synthetic oligonucleotide
gugucgccagcaucagcca

SEQ ID NO: 360263 - RNA, 19 nt, Artificial Sequence
  Description of Artificial Sequence: Synthetic oligonucleotide
cagucuaaggaagcuucaa

SEQ ID NO: 360264 - RNA, 19 nt, Artificial Sequence
  Description of Artificial Sequence: Synthetic oligonucleotide
gaccaccuuauagcauguc

SEQ ID NO: 360265 - RNA, 19 nt, Artificial Sequence
  Description of Artificial Sequence: Synthetic oligonucleotide
auccaagacucgaggcccu

SEQ ID NO: 360266 - RNA, 19 nt, Artificial Sequence
  Description of Artificial Sequence: Synthetic oligonucleotide
gguguccauuugcucgaac

SEQ ID NO: 360267 - RNA, 19 nt, Artificial Sequence
  Description of Artificial Sequence: Synthetic oligonucleotide
cgaagguccacuggauacc

SEQ ID NO: 360268 - RNA, 19 nt, Artificial Sequence
  Description of Artificial Sequence: Synthetic oligonucleotide
gccguaaucuaaggucaug

SEQ ID NO: 360269 - RNA, 19 nt, Artificial Sequence
  Description of Artificial Sequence: Synthetic oligonucleotide
cgucccugacuuuaucuuc

SEQ ID NO: 360270 - RNA, 19 nt, Artificial Sequence
  Description of Artificial Sequence: Synthetic oligonucleotide
agccguaaucuaaggucau

SEQ ID NO: 360271 - RNA, 19 nt, Artificial Sequence
  Description of Artificial Sequence: Synthetic oligonucleotide
ccagucuaaggaagcuuca

SEQ ID NO: 360272 - RNA, 19 nt, Artificial Sequence
  Description of Artificial Sequence: Synthetic oligonucleotide
cgacacauucaucugcaga

SEQ ID NO: 360273 - RNA, 19 nt, Artificial Sequence
  Description of Artificial Sequence: Synthetic oligonucleotide
cccauucuacccaugugua

SEQ ID NO: 360274 - RNA, 19 nt, Artificial Sequence
  Description of Artificial Sequence: Synthetic oligonucleotide
cacucgugaccacaccagu

SEQ ID NO: 360275 - RNA, 19 nt, Artificial Sequence
  Description of Artificial Sequence: Synthetic oligonucleotide
cccguucucggugagguga

SEQ ID NO: 360276 - RNA, 19 nt, Artificial Sequence
  Description of Artificial Sequence: Synthetic oligonucleotide
cgagugccuaaaccauagg

SEQ ID NO: 360277 - RNA, 19 nt, Artificial Sequence
  Description of Artificial Sequence: Synthetic oligonucleotide
cuaaggucaugugcuacuu

SEQ ID NO: 360278 - RNA, 19 nt, Artificial Sequence
  Description of Artificial Sequence: Synthetic oligonucleotide
ccguaaucuaaggucaugu

SEQ ID NO: 360279 - RNA, 19 nt, Artificial Sequence
  Description of Artificial Sequence: Synthetic oligonucleotide
ccaaacguccuuggucauc

SEQ ID NO: 360280 - RNA, 19 nt, Artificial Sequence
  Description of Artificial Sequence: Synthetic oligonucleotide
gcagaccucgauaucacuu

SEQ ID NO: 360281 - RNA, 19 nt, Artificial Sequence
  Description of Artificial Sequence: Synthetic oligonucleotide
cgagcauuucuuugaccca

SEQ ID NO: 360282 - RNA, 19 nt, Artificial Sequence
  Description of Artificial Sequence: Synthetic oligonucleotide
gugcuacuuccaugagaua

SEQ ID NO: 360283 - RNA, 19 nt, Artificial Sequence
  Description of Artificial Sequence: Synthetic oligonucleotide
cccguagauuuugacaucu

SEQ ID NO: 360284 - RNA, 19 nt, Artificial Sequence
  Description of Artificial Sequence: Synthetic oligonucleotide
ccuaguuuauuaguccaau

SEQ ID NO: 360285 - RNA, 19 nt, Artificial Sequence
  Description of Artificial Sequence: Synthetic oligonucleotide
uuccggccacauggcuaca

SEQ ID NO: 360286 - RNA, 19 nt, Artificial Sequence
  Description of Artificial Sequence: Synthetic oligonucleotide
gaccugccacgggccauga

SEQ ID NO: 360287 - RNA, 19 nt, Artificial Sequence
  Description of Artificial Sequence: Synthetic oligonucleotide
ccucgauaucacuuguuuu

SEQ ID NO: 360288 - RNA, 19 nt, Artificial Sequence
  Description of Artificial Sequence: Synthetic oligonucleotide
gcuuuguuaucaggcaauu

SEQ ID NO: 360289 - RNA, 19 nt, Artificial Sequence
  Description of Artificial Sequence: Synthetic oligonucleotide
ccucgcagaauguuuccau

SEQ ID NO: 360290 - RNA, 19 nt, Artificial Sequence
  Description of Artificial Sequence: Synthetic oligonucleotide
gccuaaaccauagguucuu

SEQ ID NO: 360291 - RNA, 19 nt, Artificial Sequence
  Description of Artificial Sequence: Synthetic oligonucleotide
gggccacgacacauucauc

SEQ ID NO: 360292 - RNA, 19 nt, Artificial Sequence
  Description of Artificial Sequence: Synthetic oligonucleotide
ccguagauuuugacaucuu

SEQ ID NO: 360293 - RNA, 19 nt, Artificial Sequence
  Description of Artificial Sequence: Synthetic oligonucleotide
cccaaacguccuuggucau

SEQ ID NO: 360294 - RNA, 19 nt, Artificial Sequence
  Description of Artificial Sequence: Synthetic oligonucleotide
cccuaggaccggaacucuu

SEQ ID NO: 360295 - RNA, 19 nt, Artificial Sequence
  Description of Artificial Sequence: Synthetic oligonucleotide
caggaccgacagggugaua

SEQ ID NO: 360296 - RNA, 19 nt, Artificial Sequence
  Description of Artificial Sequence: Synthetic oligonucleotide
acgucuaucaccuuuaccc

SEQ ID NO: 360297 - RNA, 19 nt, Artificial Sequence
  Description of Artificial Sequence: Synthetic oligonucleotide
aauaacuccagagagcugc

SEQ ID NO: 360298 - RNA, 19 nt, Artificial Sequence
  Description of Artificial Sequence: Synthetic oligonucleotide
acauaauugguacagugcc

SEQ ID NO: 360299 - RNA, 19 nt, Artificial Sequence
  Description of Artificial Sequence: Synthetic oligonucleotide
aauggacugggauaugugc

SEQ ID NO: 360300 - RNA, 19 nt, Artificial Sequence
  Description of Artificial Sequence: Synthetic oligonucleotide
ucagcaaugaguaauaguc

SEQ ID NO: 360301 - RNA, 19 nt, Artificial Sequence
  Description of Artificial Sequence: Synthetic oligonucleotide
acuauugucccaaagaagc

SEQ ID NO: 360302 - RNA, 19 nt, Artificial Sequence
  Description of Artificial Sequence: Synthetic oligonucleotide
aaguuaauggaaccgccgc

SEQ ID NO: 360303 - RNA, 19 nt, Artificial Sequence
  Description of Artificial Sequence: Synthetic oligonucleotide
aaauagaugaccagcggcc

SEQ ID NO: 360304 - RNA, 19 nt, Artificial Sequence
  Description of Artificial Sequence: Synthetic oligonucleotide
ugucccuucacauaauugg

SEQ ID NO: 360305 - RNA, 19 nt, Artificial Sequence
  Description of Artificial Sequence: Synthetic oligonucleotide
ucuguaucgauccugugag

SEQ ID NO: 360306 - RNA, 19 nt, Artificial Sequence
  Description of Artificial Sequence: Synthetic oligonucleotide
aauuuguagacucccagga

SEQ ID NO: 360307 - RNA, 19 nt, Artificial Sequence
  Description of Artificial Sequence: Synthetic oligonucleotide
acaaauuucccguaccagg

SEQ ID NO: 360308 - RNA, 19 nt, Artificial Sequence
  Description of Artificial Sequence: Synthetic oligonucleotide
uuacggaacagcuugagac

SEQ ID NO: 360309 - RNA, 19 nt, Artificial Sequence
  Description of Artificial Sequence: Synthetic oligonucleotide
gagauuacggaacagcuug

SEQ ID NO: 360310 - RNA, 19 nt, Artificial Sequence
  Description of Artificial Sequence: Synthetic oligonucleotide
uuugucgucacaaagcauc

SEQ ID NO: 360311 - RNA, 19 nt, Artificial Sequence
  Description of Artificial Sequence: Synthetic oligonucleotide
gacuuugagagacacaccc

SEQ ID NO: 360312 - RNA, 19 nt, Artificial Sequence
  Description of Artificial Sequence: Synthetic oligonucleotide
ucacaaagcaucuuggugu

SEQ ID NO: 360313 - RNA, 19 nt, Artificial Sequence
  Description of Artificial Sequence: Synthetic oligonucleotide
ucgauuauucuccggacag

SEQ ID NO: 360314 - RNA, 19 nt, Artificial Sequence
  Description of Artificial Sequence: Synthetic oligonucleotide
uauuaaucucaaucugugg

SEQ ID NO: 360315 - RNA, 19 nt, Artificial Sequence
  Description of Artificial Sequence: Synthetic oligonucleotide
auaauugguacagugccac

SEQ ID NO: 360316 - RNA, 19 nt, Artificial Sequence
  Description of Artificial Sequence: Synthetic oligonucleotide
uccacuauugucccaaaga

SEQ ID NO: 360317 - RNA, 19 nt, Artificial Sequence
  Description of Artificial Sequence: Synthetic oligonucleotide
acgacgaugagccccauuc

SEQ ID NO: 360318 - RNA, 19 nt, Artificial Sequence
  Description of Artificial Sequence: Synthetic oligonucleotide
aaaguuaauggaaccgccg

SEQ ID NO: 360319 - RNA, 19 nt, Artificial Sequence
  Description of Artificial Sequence: Synthetic oligonucleotide
uggugaacaagguuaaaca

SEQ ID NO: 360320 - RNA, 19 nt, Artificial Sequence
  Description of Artificial Sequence: Synthetic oligonucleotide
ugugagacugcuuugguau

SEQ ID NO: 360321 - RNA, 19 nt, Artificial Sequence
  Description of Artificial Sequence: Synthetic oligonucleotide
ucccauauaugucauagau

SEQ ID NO: 360322 - RNA, 19 nt, Artificial Sequence
  Description of Artificial Sequence: Synthetic oligonucleotide
agcaguuuuauaaacccac

SEQ ID NO: 360323 - RNA, 19 nt, Artificial Sequence
  Description of Artificial Sequence: Synthetic oligonucleotide
gaucaaacggugcauugcc

SEQ ID NO: 360324 - RNA, 19 nt, Artificial Sequence
  Description of Artificial Sequence: Synthetic oligonucleotide
agaauguuccaaauaacuc

SEQ ID NO: 360325 - RNA, 19 nt, Artificial Sequence
  Description of Artificial Sequence: Synthetic oligonucleotide
uuauccaucuguaucgauc

SEQ ID NO: 360326 - RNA, 19 nt, Artificial Sequence
  Description of Artificial Sequence: Synthetic oligonucleotide
caugcaacagugcaaacug

SEQ ID NO: 360327 - RNA, 19 nt, Artificial Sequence
  Description of Artificial Sequence: Synthetic oligonucleotide
uucccuuuggguugguucg

SEQ ID NO: 360328 - RNA, 19 nt, Artificial Sequence
  Description of Artificial Sequence: Synthetic oligonucleotide
uucucaaguaguuuaucca

SEQ ID NO: 360329 - RNA, 19 nt, Artificial Sequence
  Description of Artificial Sequence: Synthetic oligonucleotide
uggucacucaugaugagga

SEQ ID NO: 360330 - RNA, 19 nt, Artificial Sequence
  Description of Artificial Sequence: Synthetic oligonucleotide
gagagacacacccugcggg

SEQ ID NO: 360331 - RNA, 19 nt, Artificial Sequence
  Description of Artificial Sequence: Synthetic oligonucleotide
aguccuuacccaaagcacc

SEQ ID NO: 360332 - RNA, 19 nt, Artificial Sequence
  Description of Artificial Sequence: Synthetic oligonucleotide
aguuugucgucacaaagca

SEQ ID NO: 360333 - RNA, 19 nt, Artificial Sequence
  Description of Artificial Sequence: Synthetic oligonucleotide
agugacaagucuugguguc

SEQ ID NO: 360334 - RNA, 19 nt, Artificial Sequence
  Description of Artificial Sequence: Synthetic oligonucleotide
ucaaucuggggcaaagaac

SEQ ID NO: 360335 - RNA, 19 nt, Artificial Sequence
  Description of Artificial Sequence: Synthetic oligonucleotide
uugacaaauuucccguacc

SEQ ID NO: 360336 - RNA, 19 nt, Artificial Sequence
  Description of Artificial Sequence: Synthetic oligonucleotide
aagugacaagucuuggugu

SEQ ID NO: 360337 - RNA, 19 nt, Artificial Sequence
  Description of Artificial Sequence: Synthetic oligonucleotide
ggucauagaacccuggcag

SEQ ID NO: 360338 - RNA, 19 nt, Artificial Sequence
  Description of Artificial Sequence: Synthetic oligonucleotide
ugaucagugcgaaggagug

SEQ ID NO: 360339 - RNA, 19 nt, Artificial Sequence
  Description of Artificial Sequence: Synthetic oligonucleotide
ugacaaauuucccguacca

SEQ ID NO: 360340 - RNA, 19 nt, Artificial Sequence
  Description of Artificial Sequence: Synthetic oligonucleotide
caaucuggggcaaagaaca

SEQ ID NO: 360341 - RNA, 19 nt, Artificial Sequence
  Description of Artificial Sequence: Synthetic oligonucleotide
ucaaucuguggaaagccac

SEQ ID NO: 360342 - RNA, 19 nt, Artificial Sequence
  Description of Artificial Sequence: Synthetic oligonucleotide
cuuugguauccucagggcc

SEQ ID NO: 360343 - RNA, 19 nt, Artificial Sequence
  Description of Artificial Sequence: Synthetic oligonucleotide
acagugguaaggccaggcc

SEQ ID NO: 360344 - RNA, 19 nt, Artificial Sequence
  Description of Artificial Sequence: Synthetic oligonucleotide
uugagggacccuuucacgc

SEQ ID NO: 360345 - RNA, 19 nt, Artificial Sequence
  Description of Artificial Sequence: Synthetic oligonucleotide
uauuguugggcagugcugc

SEQ ID NO: 360346 - RNA, 19 nt, Artificial Sequence
  Description of Artificial Sequence: Synthetic oligonucleotide
caguuugucgucacaaagc

SEQ ID NO: 360347 - RNA, 19 nt, Artificial Sequence
  Description of Artificial Sequence: Synthetic oligonucleotide
aauugguacagugccaccu

SEQ ID NO: 360348 - RNA, 19 nt, Artificial Sequence
  Description of Artificial Sequence: Synthetic oligonucleotide
ugcagagcacaguuugucg

SEQ ID NO: 360349 - RNA, 19 nt, Artificial Sequence
  Description of Artificial Sequence: Synthetic oligonucleotide
uaucgauccugugagacug

SEQ ID NO: 360350 - RNA, 19 nt, Artificial Sequence
  Description of Artificial Sequence: Synthetic oligonucleotide
accaaauaaaggccccugg

SEQ ID NO: 360351 - RNA, 19 nt, Artificial Sequence
  Description of Artificial Sequence: Synthetic oligonucleotide
gauuccacgggaugaaaac

SEQ ID NO: 360352 - RNA, 19 nt, Artificial Sequence
  Description of Artificial Sequence: Synthetic oligonucleotide
aauuucccguaccaggcgu

SEQ ID NO: 360353 - RNA, 19 nt, Artificial Sequence
  Description of Artificial Sequence: Synthetic oligonucleotide
ucgucugcggaucacuaag

SEQ ID NO: 360354 - RNA, 19 nt, Artificial Sequence
  Description of Artificial Sequence: Synthetic oligonucleotide
cuuugagagacacacccug

SEQ ID NO: 360355 - RNA, 19 nt, Artificial Sequence
  Description of Artificial Sequence: Synthetic oligonucleotide
uuccacgggaugaaaacug

SEQ ID NO: 360356 - RNA, 19 nt, Artificial Sequence
  Description of Artificial Sequence: Synthetic oligonucleotide
auagaugaccagcggcccc

SEQ ID NO: 360357 - RNA, 19 nt, Artificial Sequence
  Description of Artificial Sequence: Synthetic oligonucleotide
uauaaacccacaguccucu

SEQ ID NO: 360358 - RNA, 19 nt, Artificial Sequence
  Description of Artificial Sequence: Synthetic oligonucleotide
cucacugucagguaccauc

SEQ ID NO: 360359 - RNA, 19 nt, Artificial Sequence
  Description of Artificial Sequence: Synthetic oligonucleotide
ugaaacuugugcugauagc

SEQ ID NO: 360360 - RNA, 19 nt, Artificial Sequence
  Description of Artificial Sequence: Synthetic oligonucleotide
gucacaaagcaucuuggug

SEQ ID NO: 360361 - RNA, 19 nt, Artificial Sequence
  Description of Artificial Sequence: Synthetic oligonucleotide
uuucacgcgcgucugguca

SEQ ID NO: 360362 - RNA, 19 nt, Artificial Sequence
  Description of Artificial Sequence: Synthetic oligonucleotide
ugggauuugagauccgggu

SEQ ID NO: 360363 - RNA, 19 nt, Artificial Sequence
  Description of Artificial Sequence: Synthetic oligonucleotide
uugugggacgucuucuggg

SEQ ID NO: 360364 - RNA, 19 nt, Artificial Sequence
  Description of Artificial Sequence: Synthetic oligonucleotide
uacggaacagcuugagacc

SEQ ID NO: 360365 - RNA, 19 nt, Artificial Sequence
  Description of Artificial Sequence: Synthetic oligonucleotide
ugccaaauagaugaccagc

SEQ ID NO: 360366 - RNA, 19 nt, Artificial Sequence
  Description of Artificial Sequence: Synthetic oligonucleotide
guaccaggcguucacgacg

SEQ ID NO: 360367 - RNA, 19 nt, Artificial Sequence
  Description of Artificial Sequence: Synthetic oligonucleotide
gugaauugggaagaaguag

SEQ ID NO: 360368 - RNA, 19 nt, Artificial Sequence
  Description of Artificial Sequence: Synthetic oligonucleotide
uucagcaaugaguaauagu

SEQ ID NO: 360369 - RNA, 19 nt, Artificial Sequence
  Description of Artificial Sequence: Synthetic oligonucleotide
cuuccagacaggauggcug

SEQ ID NO: 360370 - RNA, 19 nt, Artificial Sequence
  Description of Artificial Sequence: Synthetic oligonucleotide
cacuauugucccaaagaag

SEQ ID NO: 360371 - RNA, 19 nt, Artificial Sequence
  Description of Artificial Sequence: Synthetic oligonucleotide
aacacacgggucauagaac

SEQ ID NO: 360372 - RNA, 19 nt, Artificial Sequence
  Description of Artificial Sequence: Synthetic oligonucleotide
ugagggacccuuucacgcg

SEQ ID NO: 360373 - RNA, 19 nt, Artificial Sequence
  Description of Artificial Sequence: Synthetic oligonucleotide
uccguuaggugaauuggga

SEQ ID NO: 360374 - RNA, 19 nt, Artificial Sequence
  Description of Artificial Sequence: Synthetic oligonucleotide
aucaaucuggggcaaagaa

SEQ ID NO: 360375 - RNA, 19 nt, Artificial Sequence
  Description of Artificial Sequence: Synthetic oligonucleotide
ugucgggagaucuuucucu

SEQ ID NO: 360376 - RNA, 19 nt, Artificial Sequence
  Description of Artificial Sequence: Synthetic oligonucleotide
agagacuaguuuccaaacu

SEQ ID NO: 360377 - RNA, 19 nt, Artificial Sequence
  Description of Artificial Sequence: Synthetic oligonucleotide
aaagccaccgccggacacg

SEQ ID NO: 360378 - RNA, 19 nt, Artificial Sequence
  Description of Artificial Sequence: Synthetic oligonucleotide
gacaaauuucccguaccag

SEQ ID NO: 360379 - RNA, 19 nt, Artificial Sequence
  Description of Artificial Sequence: Synthetic oligonucleotide
cagugguaaggccaggccg

SEQ ID NO: 360380 - RNA, 19 nt, Artificial Sequence
  Description of Artificial Sequence: Synthetic oligonucleotide
ucaaacggugcauugccaa

SEQ ID NO: 360381 - RNA, 19 nt, Artificial Sequence
  Description of Artificial Sequence: Synthetic oligonucleotide
ucggagugcaaaguuaaug

SEQ ID NO: 360382 - RNA, 19 nt, Artificial Sequence
  Description of Artificial Sequence: Synthetic oligonucleotide
agagcugcuaugugugguc

SEQ ID NO: 360383 - RNA, 19 nt, Artificial Sequence
  Description of Artificial Sequence: Synthetic oligonucleotide
uucccugcuuccaaauuug

SEQ ID NO: 360384 - RNA, 19 nt, Artificial Sequence
  Description of Artificial Sequence: Synthetic oligonucleotide
cacgggaugaaaacugcag

SEQ ID NO: 360385 - RNA, 19 nt, Artificial Sequence
  Description of Artificial Sequence: Synthetic oligonucleotide
agcuugagaccaaauaaag

SEQ ID NO: 360386 - RNA, 19 nt, Artificial Sequence
  Description of Artificial Sequence: Synthetic oligonucleotide
cauauaugucauagauggc

SEQ ID NO: 360387 - RNA, 19 nt, Artificial Sequence
  Description of Artificial Sequence: Synthetic oligonucleotide
uugccaaauagaugaccag

SEQ ID NO: 360388 - RNA, 19 nt, Artificial Sequence
  Description of Artificial Sequence: Synthetic oligonucleotide
ucuucaguccacucuguaa

SEQ ID NO: 360389 - RNA, 19 nt, Artificial Sequence
  Description of Artificial Sequence: Synthetic oligonucleotide
acccucucguucuuccugc

SEQ ID NO: 360390 - RNA, 19 nt, Artificial Sequence
  Description of Artificial Sequence: Synthetic oligonucleotide
uucugggcggcacaugaca

SEQ ID NO: 360391 - RNA, 19 nt, Artificial Sequence
  Description of Artificial Sequence: Synthetic oligonucleotide
aggugaauugggaagaagu

SEQ ID NO: 360392 - RNA, 19 nt, Artificial Sequence
  Description of Artificial Sequence: Synthetic oligonucleotide
uccacgggaugaaaacugc

SEQ ID NO: 360393 - RNA, 19 nt, Artificial Sequence
  Description of Artificial Sequence: Synthetic oligonucleotide
cugguacagaacucgcagg

SEQ ID NO: 360394 - RNA, 19 nt, Artificial Sequence
  Description of Artificial Sequence: Synthetic oligonucleotide
ugggacgucuucugggcgg

SEQ ID NO: 360395 - RNA, 19 nt, Artificial Sequence
  Description of Artificial Sequence: Synthetic oligonucleotide
agugaagugacaagucuug

SEQ ID NO: 360396 - RNA, 19 nt, Artificial Sequence
  Description of Artificial Sequence: Synthetic oligonucleotide
cuggugaacaagguuaaac

SEQ ID NO: 360397 - RNA, 19 nt, Artificial Sequence
  Description of Artificial Sequence: Synthetic oligonucleotide
guuugaugaucaaacggug

SEQ ID NO: 360398 - RNA, 19 nt, Artificial Sequence
  Description of Artificial Sequence: Synthetic oligonucleotide
uuggugucgcggacgaugc

SEQ ID NO: 360399 - RNA, 19 nt, Artificial Sequence
  Description of Artificial Sequence: Synthetic oligonucleotide
acgaagcuaggcugucugc

SEQ ID NO: 360400 - RNA, 19 nt, Artificial Sequence
  Description of Artificial Sequence: Synthetic oligonucleotide
cacugaguugggcucaugc

SEQ ID NO: 360401 - RNA, 19 nt, Artificial Sequence
  Description of Artificial Sequence: Synthetic oligonucleotide
uucacgacgaugagcccca

SEQ ID NO: 360402 - RNA, 19 nt, Artificial Sequence
  Description of Artificial Sequence: Synthetic oligonucleotide
ugagauuacggaacagcuu

SEQ ID NO: 360403 - RNA, 19 nt, Artificial Sequence
  Description of Artificial Sequence: Synthetic oligonucleotide
uuccgagcuaggacagugg

SEQ ID NO: 360404 - RNA, 19 nt, Artificial Sequence
  Description of Artificial Sequence: Synthetic oligonucleotide
uugucgucacaaagcaucu

SEQ ID NO: 360405 - RNA, 19 nt, Artificial Sequence
  Description of Artificial Sequence: Synthetic oligonucleotide
acugaguugggcucaugca

SEQ ID NO: 360406 - RNA, 19 nt, Artificial Sequence
  Description of Artificial Sequence: Synthetic oligonucleotide
aaagcaucuuggugugaga

SEQ ID NO: 360407 - RNA, 19 nt, Artificial Sequence
  Description of Artificial Sequence: Synthetic oligonucleotide
ugacuuugagagacacacc

SEQ ID NO: 360408 - RNA, 19 nt, Artificial Sequence
  Description of Artificial Sequence: Synthetic oligonucleotide
ugugucgggagaucuuucu

SEQ ID NO: 360409 - RNA, 19 nt, Artificial Sequence
  Description of Artificial Sequence: Synthetic oligonucleotide
guugguucgcugcugcagc

SEQ ID NO: 360410 - RNA, 19 nt, Artificial Sequence
  Description of Artificial Sequence: Synthetic oligonucleotide
cauugccaaauagaugacc

SEQ ID NO: 360411 - RNA, 19 nt, Artificial Sequence
  Description of Artificial Sequence: Synthetic oligonucleotide
gacucgucggagugcaaag

SEQ ID NO: 360412 - RNA, 19 nt, Artificial Sequence
  Description of Artificial Sequence: Synthetic oligonucleotide
aacuuguuguucucagaua

SEQ ID NO: 360413 - RNA, 19 nt, Artificial Sequence
  Description of Artificial Sequence: Synthetic oligonucleotide
acuccaacgcugaugguuc

SEQ ID NO: 360414 - RNA, 19 nt, Artificial Sequence
  Description of Artificial Sequence: Synthetic oligonucleotide
agacuuccagacaggaugg

SEQ ID NO: 360415 - RNA, 19 nt, Artificial Sequence
  Description of Artificial Sequence: Synthetic oligonucleotide
ucgcggacgaugcuggugu

SEQ ID NO: 360416 - RNA, 19 nt, Artificial Sequence
  Description of Artificial Sequence: Synthetic oligonucleotide
ucugggugguacagcauac

SEQ ID NO: 360417 - RNA, 19 nt, Artificial Sequence
  Description of Artificial Sequence: Synthetic oligonucleotide
uggggcaaagaacauccuc

SEQ ID NO: 360418 - RNA, 19 nt, Artificial Sequence
  Description of Artificial Sequence: Synthetic oligonucleotide
gacgugacucgucggagug

SEQ ID NO: 360419 - RNA, 19 nt, Artificial Sequence
  Description of Artificial Sequence: Synthetic oligonucleotide
guuaggugaauugggaaga

SEQ ID NO: 360420 - RNA, 19 nt, Artificial Sequence
  Description of Artificial Sequence: Synthetic oligonucleotide
cuucacauagaaggggcag

SEQ ID NO: 360421 - RNA, 19 nt, Artificial Sequence
  Description of Artificial Sequence: Synthetic oligonucleotide
ccaaauaacuccagagagc

SEQ ID NO: 360422 - RNA, 19 nt, Artificial Sequence
  Description of Artificial Sequence: Synthetic oligonucleotide
cacggucacgucuaucacc

SEQ ID NO: 360423 - RNA, 19 nt, Artificial Sequence
  Description of Artificial Sequence: Synthetic oligonucleotide
auaugucauagauggcccu

SEQ ID NO: 360424 - RNA, 19 nt, Artificial Sequence
  Description of Artificial Sequence: Synthetic oligonucleotide
uccgagcuaggacaguggu

SEQ ID NO: 360425 - RNA, 19 nt, Artificial Sequence
  Description of Artificial Sequence: Synthetic oligonucleotide
gucauagaacccuggcagc

SEQ ID NO: 360426 - RNA, 19 nt, Artificial Sequence
  Description of Artificial Sequence: Synthetic oligonucleotide
cggagugcaaaguuaaugg

SEQ ID NO: 360427 - RNA, 19 nt, Artificial Sequence
  Description of Artificial Sequence: Synthetic oligonucleotide
cuaggacagugguaaggcc

SEQ ID NO: 360428 - RNA, 19 nt, Artificial Sequence
  Description of Artificial Sequence: Synthetic oligonucleotide
guucacgacgaugagcccc

SEQ ID NO: 360429 - RNA, 19 nt, Artificial Sequence
  Description of Artificial Sequence: Synthetic oligonucleotide
uacccucucguucuuccug

SEQ ID NO: 360430 - RNA, 19 nt, Artificial Sequence
  Description of Artificial Sequence: Synthetic oligonucleotide
caacacacgggucauagaa

SEQ ID NO: 360431 - RNA, 19 nt, Artificial Sequence
  Description of Artificial Sequence: Synthetic oligonucleotide
ugugucuguagcugucaga

SEQ ID NO: 360432 - RNA, 19 nt, Artificial Sequence
  Description of Artificial Sequence: Synthetic oligonucleotide
ugacaagucuuggugucgc

SEQ ID NO: 360433 - RNA, 19 nt, Artificial Sequence
  Description of Artificial Sequence: Synthetic oligonucleotide
cagugcgaaggagugaggg

SEQ ID NO: 360434 - RNA, 19 nt, Artificial Sequence
  Description of Artificial Sequence: Synthetic oligonucleotide
ucugggcggcacaugacac

SEQ ID NO: 360435 - RNA, 19 nt, Artificial Sequence
  Description of Artificial Sequence: Synthetic oligonucleotide
uggguugguucgcugcugc

SEQ ID NO: 360436 - RNA, 19 nt, Artificial Sequence
  Description of Artificial Sequence: Synthetic oligonucleotide
uuaaacagccgcucugcuu

SEQ ID NO: 360437 - RNA, 19 nt, Artificial Sequence
  Description of Artificial Sequence: Synthetic oligonucleotide
cuuggugucgcggacgaug

SEQ ID NO: 360438 - RNA, 19 nt, Artificial Sequence
  Description of Artificial Sequence: Synthetic oligonucleotide
agcauacacagccuccggu

SEQ ID NO: 360439 - RNA, 19 nt, Artificial Sequence
  Description of Artificial Sequence: Synthetic oligonucleotide
uuugcagacgugacucguc

SEQ ID NO: 360440 - RNA, 19 nt, Artificial Sequence
  Description of Artificial Sequence: Synthetic oligonucleotide
aguuccaugugugagggua

SEQ ID NO: 360441 - RNA, 19 nt, Artificial Sequence
  Description of Artificial Sequence: Synthetic oligonucleotide
gacaagucuuggugucgcg

SEQ ID NO: 360442 - RNA, 19 nt, Artificial Sequence
  Description of Artificial Sequence: Synthetic oligonucleotide
uaccaggcguucacgacga

SEQ ID NO: 360443 - RNA, 19 nt, Artificial Sequence
  Description of Artificial Sequence: Synthetic oligonucleotide
cauaauugguacagugcca

SEQ ID NO: 360444 - RNA, 19 nt, Artificial Sequence
  Description of Artificial Sequence: Synthetic oligonucleotide
auagcugaucagugcgaag

SEQ ID NO: 360445 - RNA, 19 nt, Artificial Sequence
  Description of Artificial Sequence: Synthetic oligonucleotide
gauuugagauccggguccc

SEQ ID NO: 360446 - RNA, 19 nt, Artificial Sequence
  Description of Artificial Sequence: Synthetic oligonucleotide
auccguuaggugaauuggg

SEQ ID NO: 360447 - RNA, 19 nt, Artificial Sequence
  Description of Artificial Sequence: Synthetic oligonucleotide
caauggacugggauaugug

SEQ ID NO: 360448 - RNA, 19 nt, Artificial Sequence
  Description of Artificial Sequence: Synthetic oligonucleotide
acggugcauugccaaauag

SEQ ID NO: 360449 - RNA, 19 nt, Artificial Sequence
  Description of Artificial Sequence: Synthetic oligonucleotide
ugcuauguguggucacuca

SEQ ID NO: 360450 - RNA, 19 nt, Artificial Sequence
  Description of Artificial Sequence: Synthetic oligonucleotide
gauccugugagacugcuuu

SEQ ID NO: 360451 - RNA, 19 nt, Artificial Sequence
  Description of Artificial Sequence: Synthetic oligonucleotide
uguggucacucaugaugag

SEQ ID NO: 360452 - RNA, 19 nt, Artificial Sequence
  Description of Artificial Sequence: Synthetic oligonucleotide
guuaauggaaccgccgcca

SEQ ID NO: 360453 - RNA, 19 nt, Artificial Sequence
  Description of Artificial Sequence: Synthetic oligonucleotide
gugaagugacaagucuugg

SEQ ID NO: 360454 - RNA, 19 nt, Artificial Sequence
  Description of Artificial Sequence: Synthetic oligonucleotide
cagaggugccucaauggac

SEQ ID NO: 360455 - RNA, 19 nt, Artificial Sequence
  Description of Artificial Sequence: Synthetic oligonucleotide
acguucagcaaugaguaau

SEQ ID NO: 360456 - RNA, 19 nt, Artificial Sequence
  Description of Artificial Sequence: Synthetic oligonucleotide
gcguucacgacgaugagcc

SEQ ID NO: 360457 - RNA, 19 nt, Artificial Sequence
  Description of Artificial Sequence: Synthetic oligonucleotide
agaggugccucaauggacu

SEQ ID NO: 360458 - RNA, 19 nt, Artificial Sequence
  Description of Artificial Sequence: Synthetic oligonucleotide
ugggaagaaguaggucugg

SEQ ID NO: 360459 - RNA, 19 nt, Artificial Sequence
  Description of Artificial Sequence: Synthetic oligonucleotide
agugcgaaggagugaggga

SEQ ID NO: 360460 - RNA, 19 nt, Artificial Sequence
  Description of Artificial Sequence: Synthetic oligonucleotide
cucggaacugguacagaac

SEQ ID NO: 360461 - RNA, 19 nt, Artificial Sequence
  Description of Artificial Sequence: Synthetic oligonucleotide
gagacuaguuuccaaacuu

SEQ ID NO: 360462 - RNA, 19 nt, Artificial Sequence
  Description of Artificial Sequence: Synthetic oligonucleotide
uuaauggaaccgccgccau

SEQ ID NO: 360463 - RNA, 19 nt, Artificial Sequence
  Description of Artificial Sequence: Synthetic oligonucleotide
gaccaaauaaaggccccug

SEQ ID NO: 360464 - RNA, 19 nt, Artificial Sequence
  Description of Artificial Sequence: Synthetic oligonucleotide
agcugcuauguguggucac

SEQ ID NO: 360465 - RNA, 19 nt, Artificial Sequence
  Description of Artificial Sequence: Synthetic oligonucleotide
caaguaguuuauccaucug

SEQ ID NO: 360466 - RNA, 19 nt, Artificial Sequence
  Description of Artificial Sequence: Synthetic oligonucleotide
agcuaggcugucugcaugu

SEQ ID NO: 360467 - RNA, 19 nt, Artificial Sequence
  Description of Artificial Sequence: Synthetic oligonucleotide
agguaugguuugaugauca

SEQ ID NO: 360468 - RNA, 19 nt, Artificial Sequence
  Description of Artificial Sequence: Synthetic oligonucleotide
ugagcccugagguaugguu

SEQ ID NO: 360469 - RNA, 19 nt, Artificial Sequence
  Description of Artificial Sequence: Synthetic oligonucleotide
agcacccacgaagcuaggc

SEQ ID NO: 360470 - RNA, 19 nt, Artificial Sequence
  Description of Artificial Sequence: Synthetic oligonucleotide
uggaaagccaccgccggac

SEQ ID NO: 360471 - RNA, 19 nt, Artificial Sequence
  Description of Artificial Sequence: Synthetic oligonucleotide
acaugauccuuggggagag

SEQ ID NO: 360472 - RNA, 19 nt, Artificial Sequence
  Description of Artificial Sequence: Synthetic oligonucleotide
agucuuggugucgcggacg

SEQ ID NO: 360473 - RNA, 19 nt, Artificial Sequence
  Description of Artificial Sequence: Synthetic oligonucleotide
ugggaagcagcugauccgu

SEQ ID NO: 360474 - RNA, 19 nt, Artificial Sequence
  Description of Artificial Sequence: Synthetic oligonucleotide
gacgaugcugguguucaug

SEQ ID NO: 360475 - RNA, 19 nt, Artificial Sequence
  Description of Artificial Sequence: Synthetic oligonucleotide
aaauaacuccagagagcug

SEQ ID NO: 360476 - RNA, 19 nt, Artificial Sequence
  Description of Artificial Sequence: Synthetic oligonucleotide
aacggugcauugccaaaua

SEQ ID NO: 360477 - RNA, 19 nt, Artificial Sequence
  Description of Artificial Sequence: Synthetic oligonucleotide
gaugucgcuggcuguguuc

SEQ ID NO: 360478 - RNA, 19 nt, Artificial Sequence
  Description of Artificial Sequence: Synthetic oligonucleotide
acgcugaugguucccuuug

SEQ ID NO: 360479 - RNA, 19 nt, Artificial Sequence
  Description of Artificial Sequence: Synthetic oligonucleotide
gagggacccuuucacgcgc

SEQ ID NO: 360480 - RNA, 19 nt, Artificial Sequence
  Description of Artificial Sequence: Synthetic oligonucleotide
gugacaagucuuggugucg

SEQ ID NO: 360481 - RNA, 19 nt, Artificial Sequence
  Description of Artificial Sequence: Synthetic oligonucleotide
ccaaauagaugaccagcgg

SEQ ID NO: 360482 - RNA, 19 nt, Artificial Sequence
  Description of Artificial Sequence: Synthetic oligonucleotide
gaaagccaccgccggacac

SEQ ID NO: 360483 - RNA, 19 nt, Artificial Sequence
  Description of Artificial Sequence: Synthetic oligonucleotide
ucgucggagugcaaaguua

SEQ ID NO: 360484 - RNA, 19 nt, Artificial Sequence
  Description of Artificial Sequence: Synthetic oligonucleotide
acggucacgucuaucaccu

SEQ ID NO: 360485 - RNA, 19 nt, Artificial Sequence
  Description of Artificial Sequence: Synthetic oligonucleotide
cauaagccuggugaacaag

SEQ ID NO: 360486 - RNA, 19 nt, Artificial Sequence
  Description of Artificial Sequence: Synthetic oligonucleotide
gguuaaacagccgcucugc

SEQ ID NO: 360487 - RNA, 19 nt, Artificial Sequence
  Description of Artificial Sequence: Synthetic oligonucleotide
cauagaacccuggcagccc

SEQ ID NO: 360488 - RNA, 19 nt, Artificial Sequence
  Description of Artificial Sequence: Synthetic oligonucleotide
cauguuucccacgggcagc

SEQ ID NO: 360489 - RNA, 19 nt, Artificial Sequence
  Description of Artificial Sequence: Synthetic oligonucleotide
guuccgagcuaggacagug

SEQ ID NO: 360490 - RNA, 19 nt, Artificial Sequence
  Description of Artificial Sequence: Synthetic oligonucleotide
guaggcagccuucaguucu

SEQ ID NO: 360491 - RNA, 19 nt, Artificial Sequence
  Description of Artificial Sequence: Synthetic oligonucleotide
cucgauuauucuccggaca

SEQ ID NO: 360492 - RNA, 19 nt, Artificial Sequence
  Description of Artificial Sequence: Synthetic oligonucleotide
gagauccgggucccggugc

SEQ ID NO: 360493 - RNA, 19 nt, Artificial Sequence
  Description of Artificial Sequence: Synthetic oligonucleotide
ucgcgcacguucagcaaug

SEQ ID NO: 360494 - RNA, 19 nt, Artificial Sequence
  Description of Artificial Sequence: Synthetic oligonucleotide
gcuaggacagugguaaggc

SEQ ID NO: 360495 - RNA, 19 nt, Artificial Sequence
  Description of Artificial Sequence: Synthetic oligonucleotide
gcagccugcgcucuucacg

SEQ ID NO: 360496 - RNA, 19 nt, Artificial Sequence
  Description of Artificial Sequence: Synthetic oligonucleotide
ucaccuuuacccucucguu

SEQ ID NO: 360497 - RNA, 19 nt, Artificial Sequence
  Description of Artificial Sequence: Synthetic oligonucleotide
acggaacagcuugagacca

SEQ ID NO: 360498 - RNA, 19 nt, Artificial Sequence
  Description of Artificial Sequence: Synthetic oligonucleotide
uaaaggccccuggaggucu

SEQ ID NO: 360499 - RNA, 19 nt, Artificial Sequence
  Description of Artificial Sequence: Synthetic oligonucleotide
gauuauucuccggacagau

SEQ ID NO: 360500 - RNA, 19 nt, Artificial Sequence
  Description of Artificial Sequence: Synthetic oligonucleotide
agacgugacucgucggagu

SEQ ID NO: 360501 - RNA, 19 nt, Artificial Sequence
  Description of Artificial Sequence: Synthetic oligonucleotide
acacgggucauagaacccu

SEQ ID NO: 360502 - RNA, 19 nt, Artificial Sequence
  Description of Artificial Sequence: Synthetic oligonucleotide
ugagccccauucuggacuc

SEQ ID NO: 360503 - RNA, 19 nt, Artificial Sequence
  Description of Artificial Sequence: Synthetic oligonucleotide
gccggacacgucuucauag

SEQ ID NO: 360504 - RNA, 19 nt, Artificial Sequence
  Description of Artificial Sequence: Synthetic oligonucleotide
ugacucgucggagugcaaa

SEQ ID NO: 360505 - RNA, 19 nt, Artificial Sequence
  Description of Artificial Sequence: Synthetic oligonucleotide
ugggcggcacaugacaccu

SEQ ID NO: 360506 - RNA, 19 nt, Artificial Sequence
  Description of Artificial Sequence: Synthetic oligonucleotide
gaguugggcucaugcaaca

SEQ ID NO: 360507 - RNA, 19 nt, Artificial Sequence
  Description of Artificial Sequence: Synthetic oligonucleotide
ggucagguuuauuguuggg

SEQ ID NO: 360508 - RNA, 19 nt, Artificial Sequence
  Description of Artificial Sequence: Synthetic oligonucleotide
uacccaaagcacccacgaa

SEQ ID NO: 360509 - RNA, 19 nt, Artificial Sequence
  Description of Artificial Sequence: Synthetic oligonucleotide
agcacaguuugucgucaca

SEQ ID NO: 360510 - RNA, 19 nt, Artificial Sequence
  Description of Artificial Sequence: Synthetic oligonucleotide
gcuuugguauccucagggc

SEQ ID NO: 360511 - RNA, 19 nt, Artificial Sequence
  Description of Artificial Sequence: Synthetic oligonucleotide
cugggcggcacaugacacc

SEQ ID NO: 360512 - RNA, 19 nt, Artificial Sequence
  Description of Artificial Sequence: Synthetic oligonucleotide
caucauccugaaacuugug

SEQ ID NO: 360513 - RNA, 19 nt, Artificial Sequence
  Description of Artificial Sequence: Synthetic oligonucleotide
gacuaguuuccaaacuugu

SEQ ID NO: 360514 - RNA, 19 nt, Artificial Sequence
  Description of Artificial Sequence: Synthetic oligonucleotide
ugcggaucacuaagcacuu

SEQ ID NO: 360515 - RNA, 19 nt, Artificial Sequence
  Description of Artificial Sequence: Synthetic oligonucleotide
uagaacccuggcagcccag

SEQ ID NO: 360516 - RNA, 19 nt, Artificial Sequence
  Description of Artificial Sequence: Synthetic oligonucleotide
cagcauacacagccuccgg

SEQ ID NO: 360517 - RNA, 19 nt, Artificial Sequence
  Description of Artificial Sequence: Synthetic oligonucleotide
acgugacucgucggagugc

SEQ ID NO: 360518 - RNA, 19 nt, Artificial Sequence
  Description of Artificial Sequence: Synthetic oligonucleotide
caucccuuugcagacguga

SEQ ID NO: 360519 - RNA, 19 nt, Artificial Sequence
  Description of Artificial Sequence: Synthetic oligonucleotide
acuaguuuccaaacuuguu

SEQ ID NO: 360520 - RNA, 19 nt, Artificial Sequence
  Description of Artificial Sequence: Synthetic oligonucleotide
cacgggucauagaacccug

SEQ ID NO: 360521 - RNA, 19 nt, Artificial Sequence
  Description of Artificial Sequence: Synthetic oligonucleotide
uccggacagauuccugcau

SEQ ID NO: 360522 - RNA, 19 nt, Artificial Sequence
  Description of Artificial Sequence: Synthetic oligonucleotide
ucccaagucagggcgugga

SEQ ID NO: 360523 - RNA, 19 nt, Artificial Sequence
  Description of Artificial Sequence: Synthetic oligonucleotide
agauggcccucgucugcgg

SEQ ID NO: 360524 - RNA, 19 nt, Artificial Sequence
  Description of Artificial Sequence: Synthetic oligonucleotide
uaauggaaccgccgccauu

SEQ ID NO: 360525 - RNA, 19 nt, Artificial Sequence
  Description of Artificial Sequence: Synthetic oligonucleotide
gaggccucggugaggauga

SEQ ID NO: 360526 - RNA, 19 nt, Artificial Sequence
  Description of Artificial Sequence: Synthetic oligonucleotide
aucgauccugugagacugc

SEQ ID NO: 360527 - RNA, 19 nt, Artificial Sequence
  Description of Artificial Sequence: Synthetic oligonucleotide
caucuguaucgauccugug

SEQ ID NO: 360528 - RNA, 19 nt, Artificial Sequence
  Description of Artificial Sequence: Synthetic oligonucleotide
uccaacgcugaugguuccc

SEQ ID NO: 360529 - RNA, 19 nt, Artificial Sequence
  Description of Artificial Sequence: Synthetic oligonucleotide
gcuccauacuccacuauug

SEQ ID NO: 360530 - RNA, 19 nt, Artificial Sequence
  Description of Artificial Sequence: Synthetic oligonucleotide
acugugucgggagaucuuu

SEQ ID NO: 360531 - RNA, 19 nt, Artificial Sequence
  Description of Artificial Sequence: Synthetic oligonucleotide
auuugagauccgggucccg

SEQ ID NO: 360532 - RNA, 19 nt, Artificial Sequence
  Description of Artificial Sequence: Synthetic oligonucleotide
agauccgggucccggugcu

SEQ ID NO: 360533 - RNA, 19 nt, Artificial Sequence
  Description of Artificial Sequence: Synthetic oligonucleotide
cagacgugacucgucggag

SEQ ID NO: 360534 - RNA, 19 nt, Artificial Sequence
  Description of Artificial Sequence: Synthetic oligonucleotide
cuuucacgcgcgucugguc

SEQ ID NO: 360535 - RNA, 19 nt, Artificial Sequence
  Description of Artificial Sequence: Synthetic oligonucleotide
ccauguuucccacgggcag

SEQ ID NO: 360536 - RNA, 19 nt, Artificial Sequence
  Description of Artificial Sequence: Synthetic oligonucleotide
cuccaacgcugaugguucc

SEQ ID NO: 360537 - RNA, 19 nt, Artificial Sequence
  Description of Artificial Sequence: Synthetic oligonucleotide
guaccaucaccuggugcag

SEQ ID NO: 360538 - RNA, 19 nt, Artificial Sequence
  Description of Artificial Sequence: Synthetic oligonucleotide
uuggguugguucgcugcug

SEQ ID NO: 360539 - RNA, 19 nt, Artificial Sequence
  Description of Artificial Sequence: Synthetic oligonucleotide
ucgauccugugagacugcu

SEQ ID NO: 360540 - RNA, 19 nt, Artificial Sequence
  Description of Artificial Sequence: Synthetic oligonucleotide
gugucgggagaucuuucuc

SEQ ID NO: 360541 - RNA, 19 nt, Artificial Sequence
  Description of Artificial Sequence: Synthetic oligonucleotide
aucaaacggugcauugcca

SEQ ID NO: 360542 - RNA, 19 nt, Artificial Sequence
  Description of Artificial Sequence: Synthetic oligonucleotide
gcaucuuggugugagauua

SEQ ID NO: 360543 - RNA, 19 nt, Artificial Sequence
  Description of Artificial Sequence: Synthetic oligonucleotide
agguuccgagcuaggacag

SEQ ID NO: 360544 - RNA, 19 nt, Artificial Sequence
  Description of Artificial Sequence: Synthetic oligonucleotide
gauggcccucgucugcgga

SEQ ID NO: 360545 - RNA, 19 nt, Artificial Sequence
  Description of Artificial Sequence: Synthetic oligonucleotide
gaucagugcgaaggaguga

SEQ ID NO: 360546 - RNA, 19 nt, Artificial Sequence
  Description of Artificial Sequence: Synthetic oligonucleotide
gaugaucaaacggugcauu

SEQ ID NO: 360547 - RNA, 19 nt, Artificial Sequence
  Description of Artificial Sequence: Synthetic oligonucleotide
gggagaucuuucucucagc

SEQ ID NO: 360548 - RNA, 19 nt, Artificial Sequence
  Description of Artificial Sequence: Synthetic oligonucleotide
guaucgauccugugagacu

SEQ ID NO: 360549 - RNA, 19 nt, Artificial Sequence
  Description of Artificial Sequence: Synthetic oligonucleotide
ccgccauugccauucuggg

SEQ ID NO: 360550 - RNA, 19 nt, Artificial Sequence
  Description of Artificial Sequence: Synthetic oligonucleotide
gcaaugaguaauagucuuc

SEQ ID NO: 360551 - RNA, 19 nt, Artificial Sequence
  Description of Artificial Sequence: Synthetic oligonucleotide
cugugucgggagaucuuuc

SEQ ID NO: 360552 - RNA, 19 nt, Artificial Sequence
  Description of Artificial Sequence: Synthetic oligonucleotide
cguggaggaaugauuugag

SEQ ID NO: 360553 - RNA, 19 nt, Artificial Sequence
  Description of Artificial Sequence: Synthetic oligonucleotide
acgccucggaacugguaca

SEQ ID NO: 360554 - RNA, 19 nt, Artificial Sequence
  Description of Artificial Sequence: Synthetic oligonucleotide
ggaaccgccgccauugcca

SEQ ID NO: 360555 - RNA, 19 nt, Artificial Sequence
  Description of Artificial Sequence: Synthetic oligonucleotide
guuaaacagccgcucugcu

SEQ ID NO: 360556 - RNA, 19 nt, Artificial Sequence
  Description of Artificial Sequence: Synthetic oligonucleotide
gaagcuaggcugucugcau

SEQ ID NO: 360557 - RNA, 19 nt, Artificial Sequence
  Description of Artificial Sequence: Synthetic oligonucleotide
ucccuuuggguugguucgc

SEQ ID NO: 360558 - RNA, 19 nt, Artificial Sequence
  Description of Artificial Sequence: Synthetic oligonucleotide
uucacgcgcgucuggucau

SEQ ID NO: 360559 - RNA, 19 nt, Artificial Sequence
  Description of Artificial Sequence: Synthetic oligonucleotide
uguagacucccaggagaau

SEQ ID NO: 360560 - RNA, 19 nt, Artificial Sequence
  Description of Artificial Sequence: Synthetic oligonucleotide
gccaggccggauuccacgg

SEQ ID NO: 360561 - RNA, 19 nt, Artificial Sequence
  Description of Artificial Sequence: Synthetic oligonucleotide
gaccagcggccccacggug

SEQ ID NO: 360562 - RNA, 19 nt, Artificial Sequence
  Description of Artificial Sequence: Synthetic oligonucleotide
cugugagacugcuuuggua

SEQ ID NO: 360563 - RNA, 19 nt, Artificial Sequence
  Description of Artificial Sequence: Synthetic oligonucleotide
gacgucuucugggcggcac

SEQ ID NO: 360564 - RNA, 19 nt, Artificial Sequence
  Description of Artificial Sequence: Synthetic oligonucleotide
ccucgauuauucuccggac

SEQ ID NO: 360565 - RNA, 19 nt, Artificial Sequence
  Description of Artificial Sequence: Synthetic oligonucleotide
cagcacgccucggaacugg

SEQ ID NO: 360566 - RNA, 19 nt, Artificial Sequence
  Description of Artificial Sequence: Synthetic oligonucleotide
cccaacacacgggucauag

SEQ ID NO: 360567 - RNA, 19 nt, Artificial Sequence
  Description of Artificial Sequence: Synthetic oligonucleotide
cugcuauguguggucacuc

SEQ ID NO: 360568 - RNA, 19 nt, Artificial Sequence
  Description of Artificial Sequence: Synthetic oligonucleotide
ggcguucacgacgaugagc

SEQ ID NO: 360569 - RNA, 19 nt, Artificial Sequence
  Description of Artificial Sequence: Synthetic oligonucleotide
gcucaugcaacagugcaaa

SEQ ID NO: 360570 - RNA, 19 nt, Artificial Sequence
  Description of Artificial Sequence: Synthetic oligonucleotide
ggucacucaugaugaggac

SEQ ID NO: 360571 - RNA, 19 nt, Artificial Sequence
  Description of Artificial Sequence: Synthetic oligonucleotide
cagugaagugacaagucuu

SEQ ID NO: 360572 - RNA, 19 nt, Artificial Sequence
  Description of Artificial Sequence: Synthetic oligonucleotide
gugcugauagcugaucagu

SEQ ID NO: 360573 - RNA, 19 nt, Artificial Sequence
  Description of Artificial Sequence: Synthetic oligonucleotide
auuauucuccggacagauu

SEQ ID NO: 360574 - RNA, 19 nt, Artificial Sequence
  Description of Artificial Sequence: Synthetic oligonucleotide
gcgcgucuggucaucaucc

SEQ ID NO: 360575 - RNA, 19 nt, Artificial Sequence
  Description of Artificial Sequence: Synthetic oligonucleotide
guggaaagccaccgccgga

SEQ ID NO: 360576 - RNA, 19 nt, Artificial Sequence
  Description of Artificial Sequence: Synthetic oligonucleotide
gucacgucuaucaccuuua

SEQ ID NO: 360577 - RNA, 19 nt, Artificial Sequence
  Description of Artificial Sequence: Synthetic oligonucleotide
gacugggauaugugcauuu

SEQ ID NO: 360578 - RNA, 19 nt, Artificial Sequence
  Description of Artificial Sequence: Synthetic oligonucleotide
gcagcaaggcccagggagc

SEQ ID NO: 360579 - RNA, 19 nt, Artificial Sequence
  Description of Artificial Sequence: Synthetic oligonucleotide
cccaagacacugugucggg

SEQ ID NO: 360580 - RNA, 19 nt, Artificial Sequence
  Description of Artificial Sequence: Synthetic oligonucleotide
uggugucgcggacgaugcu

SEQ ID NO: 360581 - RNA, 19 nt, Artificial Sequence
  Description of Artificial Sequence: Synthetic oligonucleotide
gucgcggacgaugcuggug

SEQ ID NO: 360582 - RNA, 19 nt, Artificial Sequence
  Description of Artificial Sequence: Synthetic oligonucleotide
cuguaucgauccugugaga

SEQ ID NO: 360583 - RNA, 19 nt, Artificial Sequence
  Description of Artificial Sequence: Synthetic oligonucleotide
gugcgaaggagugagggau

SEQ ID NO: 360584 - RNA, 19 nt, Artificial Sequence
  Description of Artificial Sequence: Synthetic oligonucleotide
aagcacccacgaagcuagg

SEQ ID NO: 360585 - RNA, 19 nt, Artificial Sequence
  Description of Artificial Sequence: Synthetic oligonucleotide
acuccacuauugucccaaa

SEQ ID NO: 360586 - RNA, 19 nt, Artificial Sequence
  Description of Artificial Sequence: Synthetic oligonucleotide
ugucgucacaaagcaucuu

SEQ ID NO: 360587 - RNA, 19 nt, Artificial Sequence
  Description of Artificial Sequence: Synthetic oligonucleotide
cucaauggacugggauaug

SEQ ID NO: 360588 - RNA, 19 nt, Artificial Sequence
  Description of Artificial Sequence: Synthetic oligonucleotide
cucgucugcggaucacuaa

SEQ ID NO: 360589 - RNA, 19 nt, Artificial Sequence
  Description of Artificial Sequence: Synthetic oligonucleotide
agggcguggaggaaugauu

SEQ ID NO: 360590 - RNA, 19 nt, Artificial Sequence
  Description of Artificial Sequence: Synthetic oligonucleotide
gguaugguuugaugaucaa

SEQ ID NO: 360591 - RNA, 19 nt, Artificial Sequence
  Description of Artificial Sequence: Synthetic oligonucleotide
caggccggauuccacggga

SEQ ID NO: 360592 - RNA, 19 nt, Artificial Sequence
  Description of Artificial Sequence: Synthetic oligonucleotide
ggauuccacgggaugaaaa

SEQ ID NO: 360593 - RNA, 19 nt, Artificial Sequence
  Description of Artificial Sequence: Synthetic oligonucleotide
agggacccuuucacgcgcg

SEQ ID NO: 360594 - RNA, 19 nt, Artificial Sequence
  Description of Artificial Sequence: Synthetic oligonucleotide
cacucaugaugaggaccag

SEQ ID NO: 360595 - RNA, 19 nt, Artificial Sequence
  Description of Artificial Sequence: Synthetic oligonucleotide
uccccaacacacgggucau

SEQ ID NO: 360596 - RNA, 19 nt, Artificial Sequence
  Description of Artificial Sequence: Synthetic oligonucleotide
cggcacaugacaccuuccc

SEQ ID NO: 360597 - RNA, 19 nt, Artificial Sequence
  Description of Artificial Sequence: Synthetic oligonucleotide
ggucuccggccccaaacuc

SEQ ID NO: 360598 - RNA, 19 nt, Artificial Sequence
  Description of Artificial Sequence: Synthetic oligonucleotide
ccggacagauuccugcauc

SEQ ID NO: 360599 - RNA, 19 nt, Artificial Sequence
  Description of Artificial Sequence: Synthetic oligonucleotide
ugucgcuggcuguguucuc

SEQ ID NO: 360600 - RNA, 19 nt, Artificial Sequence
  Description of Artificial Sequence: Synthetic oligonucleotide
ggccggauuccacgggaug

SEQ ID NO: 360601 - RNA, 19 nt, Artificial Sequence
  Description of Artificial Sequence: Synthetic oligonucleotide
cuuugcagacgugacucgu

SEQ ID NO: 360602 - RNA, 19 nt, Artificial Sequence
  Description of Artificial Sequence: Synthetic oligonucleotide
cgucugcggaucacuaagc

SEQ ID NO: 360603 - RNA, 19 nt, Artificial Sequence
  Description of Artificial Sequence: Synthetic oligonucleotide
cacguucagcaaugaguaa

SEQ ID NO: 360604 - RNA, 19 nt, Artificial Sequence
  Description of Artificial Sequence: Synthetic oligonucleotide
auuucccguaccaggcguu

SEQ ID NO: 360605 - RNA, 19 nt, Artificial Sequence
  Description of Artificial Sequence: Synthetic oligonucleotide
gcgcacguucagcaaugag

SEQ ID NO: 360606 - RNA, 19 nt, Artificial Sequence
  Description of Artificial Sequence: Synthetic oligonucleotide
accgccggacacgucuuca

SEQ ID NO: 360607 - RNA, 19 nt, Artificial Sequence
  Description of Artificial Sequence: Synthetic oligonucleotide
guauccucagggccucacu

SEQ ID NO: 360608 - RNA, 19 nt, Artificial Sequence
  Description of Artificial Sequence: Synthetic oligonucleotide
uggcccucgucugcggauc

SEQ ID NO: 360609 - RNA, 19 nt, Artificial Sequence
  Description of Artificial Sequence: Synthetic oligonucleotide
cucccucgcgcacguucag

SEQ ID NO: 360610 - RNA, 19 nt, Artificial Sequence
  Description of Artificial Sequence: Synthetic oligonucleotide
gguggggcgccucaguccu

SEQ ID NO: 360611 - RNA, 19 nt, Artificial Sequence
  Description of Artificial Sequence: Synthetic oligonucleotide
ucccacgggcagccuggac

SEQ ID NO: 360612 - RNA, 19 nt, Artificial Sequence
  Description of Artificial Sequence: Synthetic oligonucleotide
gccggauuccacgggauga

SEQ ID NO: 360613 - RNA, 19 nt, Artificial Sequence
  Description of Artificial Sequence: Synthetic oligonucleotide
ccucgcucaaggccgucgc

SEQ ID NO: 360614 - RNA, 19 nt, Artificial Sequence
  Description of Artificial Sequence: Synthetic oligonucleotide
cugggugguacagcauaca

SEQ ID NO: 360615 - RNA, 19 nt, Artificial Sequence
  Description of Artificial Sequence: Synthetic oligonucleotide
cgcacguucagcaaugagu

SEQ ID NO: 360616 - RNA, 19 nt, Artificial Sequence
  Description of Artificial Sequence: Synthetic oligonucleotide
ggaaagccaccgccggaca

SEQ ID NO: 360617 - RNA, 19 nt, Artificial Sequence
  Description of Artificial Sequence: Synthetic oligonucleotide
agcggcacggucacgucua

SEQ ID NO: 360618 - RNA, 19 nt, Artificial Sequence
  Description of Artificial Sequence: Synthetic oligonucleotide
uggggcgccucaguccuua

SEQ ID NO: 360619 - RNA, 19 nt, Artificial Sequence
  Description of Artificial Sequence: Synthetic oligonucleotide
gaaccgccgccauugccau

SEQ ID NO: 360620 - RNA, 19 nt, Artificial Sequence
  Description of Artificial Sequence: Synthetic oligonucleotide
cacuccaacgcugaugguu

SEQ ID NO: 360621 - RNA, 19 nt, Artificial Sequence
  Description of Artificial Sequence: Synthetic oligonucleotide
ccguuaggugaauugggaa

SEQ ID NO: 360622 - RNA, 19 nt, Artificial Sequence
  Description of Artificial Sequence: Synthetic oligonucleotide
cucgucggagugcaaaguu

SEQ ID NO: 360623 - RNA, 19 nt, Artificial Sequence
  Description of Artificial Sequence: Synthetic oligonucleotide
agacucccaggagaauauu

SEQ ID NO: 360624 - RNA, 19 nt, Artificial Sequence
  Description of Artificial Sequence: Synthetic oligonucleotide
agccugcgcucuucacgcu

SEQ ID NO: 360625 - RNA, 19 nt, Artificial Sequence
  Description of Artificial Sequence: Synthetic oligonucleotide
aggccucccucgcgcacgu

SEQ ID NO: 360626 - RNA, 19 nt, Artificial Sequence
  Description of Artificial Sequence: Synthetic oligonucleotide
gcgaaggagugagggauuc

SEQ ID NO: 360627 - RNA, 19 nt, Artificial Sequence
  Description of Artificial Sequence: Synthetic oligonucleotide
gggcgccucaguccuuacc

SEQ ID NO: 360628 - RNA, 19 nt, Artificial Sequence
  Description of Artificial Sequence: Synthetic oligonucleotide
guuugucgucacaaagcau

SEQ ID NO: 360629 - RNA, 19 nt, Artificial Sequence
  Description of Artificial Sequence: Synthetic oligonucleotide
cgucggagugcaaaguuaa

SEQ ID NO: 360630 - RNA, 19 nt, Artificial Sequence
  Description of Artificial Sequence: Synthetic oligonucleotide
caggccacucuucccauau

SEQ ID NO: 360631 - RNA, 19 nt, Artificial Sequence
  Description of Artificial Sequence: Synthetic oligonucleotide
gggacgucuucugggcggc

SEQ ID NO: 360632 - RNA, 19 nt, Artificial Sequence
  Description of Artificial Sequence: Synthetic oligonucleotide
ugguauccucagggccuca

SEQ ID NO: 360633 - RNA, 19 nt, Artificial Sequence
  Description of Artificial Sequence: Synthetic oligonucleotide
cucgcgcacguucagcaau

SEQ ID NO: 360634 - RNA, 19 nt, Artificial Sequence
  Description of Artificial Sequence: Synthetic oligonucleotide
ccuccgguaggcagccuuc

SEQ ID NO: 360635 - RNA, 19 nt, Artificial Sequence
  Description of Artificial Sequence: Synthetic oligonucleotide
agcacgccucggaacuggu

SEQ ID NO: 360636 - RNA, 19 nt, Artificial Sequence
  Description of Artificial Sequence: Synthetic oligonucleotide
ccguaccaggcguucacga

SEQ ID NO: 360637 - RNA, 19 nt, Artificial Sequence
  Description of Artificial Sequence: Synthetic oligonucleotide
acgcgcgucuggucaucau

SEQ ID NO: 360638 - RNA, 19 nt, Artificial Sequence
  Description of Artificial Sequence: Synthetic oligonucleotide
cugcgcucuucacgcucuc

SEQ ID NO: 360639 - RNA, 19 nt, Artificial Sequence
  Description of Artificial Sequence: Synthetic oligonucleotide
caccgccggacacgucuuc

SEQ ID NO: 360640 - RNA, 19 nt, Artificial Sequence
  Description of Artificial Sequence: Synthetic oligonucleotide
cacccugcgggacaccaau

SEQ ID NO: 360641 - RNA, 19 nt, Artificial Sequence
  Description of Artificial Sequence: Synthetic oligonucleotide
aggccggauuccacgggau

SEQ ID NO: 360642 - RNA, 19 nt, Artificial Sequence
  Description of Artificial Sequence: Synthetic oligonucleotide
ccaacacacgggucauaga

SEQ ID NO: 360643 - RNA, 19 nt, Artificial Sequence
  Description of Artificial Sequence: Synthetic oligonucleotide
gcggcacaugacaccuucc

SEQ ID NO: 360644 - RNA, 19 nt, Artificial Sequence
  Description of Artificial Sequence: Synthetic oligonucleotide
gcgccucaguccuuaccca

SEQ ID NO: 360645 - RNA, 19 nt, Artificial Sequence
  Description of Artificial Sequence: Synthetic oligonucleotide
cguucacgacgaugagccc

SEQ ID NO: 360646 - RNA, 19 nt, Artificial Sequence
  Description of Artificial Sequence: Synthetic oligonucleotide
gggcguggaggaaugauuu

SEQ ID NO: 360647 - RNA, 19 nt, Artificial Sequence
  Description of Artificial Sequence: Synthetic oligonucleotide
cgcgcgucuggucaucauc

SEQ ID NO: 360648 - RNA, 19 nt, Artificial Sequence
  Description of Artificial Sequence: Synthetic oligonucleotide
accaggcguucacgacgau

SEQ ID NO: 360649 - RNA, 19 nt, Artificial Sequence
  Description of Artificial Sequence: Synthetic oligonucleotide
cgucuaucaccuuuacccu

SEQ ID NO: 360650 - RNA, 19 nt, Artificial Sequence
  Description of Artificial Sequence: Synthetic oligonucleotide
gcagcacgccucggaacug

SEQ ID NO: 360651 - RNA, 19 nt, Artificial Sequence
  Description of Artificial Sequence: Synthetic oligonucleotide
ccaagacacugugucggga

SEQ ID NO: 360652 - RNA, 19 nt, Artificial Sequence
  Description of Artificial Sequence: Synthetic oligonucleotide
cugucagaggugccucaau

SEQ ID NO: 360653 - RNA, 19 nt, Artificial Sequence
  Description of Artificial Sequence: Synthetic oligonucleotide
gucggagugcaaaguuaau

SEQ ID NO: 360654 - RNA, 19 nt, Artificial Sequence
  Description of Artificial Sequence: Synthetic oligonucleotide
aggccucggugaggaugag

SEQ ID NO: 360655 - RNA, 19 nt, Artificial Sequence
  Description of Artificial Sequence: Synthetic oligonucleotide
cgccucggaacugguacag

SEQ ID NO: 360656 - RNA, 19 nt, Artificial Sequence
  Description of Artificial Sequence: Synthetic oligonucleotide
ccugaaacuugugcugaua

SEQ ID NO: 360657 - RNA, 19 nt, Artificial Sequence
  Description of Artificial Sequence: Synthetic oligonucleotide
ggcccucgucugcggauca

SEQ ID NO: 360658 - RNA, 19 nt, Artificial Sequence
  Description of Artificial Sequence: Synthetic oligonucleotide
ccaugugugaggguagaau

SEQ ID NO: 360659 - RNA, 19 nt, Artificial Sequence
  Description of Artificial Sequence: Synthetic oligonucleotide
ccucgucugcggaucacua

SEQ ID NO: 360660 - RNA, 19 nt, Artificial Sequence
  Description of Artificial Sequence: Synthetic oligonucleotide
ccgagcuaggacaguggua

SEQ ID NO: 360661 - RNA, 19 nt, Artificial Sequence
  Description of Artificial Sequence: Synthetic oligonucleotide
ccaaagcacccacgaagcu

SEQ ID NO: 360662 - RNA, 19 nt, Artificial Sequence
  Description of Artificial Sequence: Synthetic oligonucleotide
ccggacacgucuucauagu

SEQ ID NO: 360663 - RNA, 19 nt, Artificial Sequence
  Description of Artificial Sequence: Synthetic oligonucleotide
gcggaucacuaagcacuuc

SEQ ID NO: 360664 - RNA, 19 nt, Artificial Sequence
  Description of Artificial Sequence: Synthetic oligonucleotide
gccccacgguggcauagaa

SEQ ID NO: 360665 - RNA, 19 nt, Artificial Sequence
  Description of Artificial Sequence: Synthetic oligonucleotide
gccucggaacugguacaga

SEQ ID NO: 360666 - RNA, 19 nt, Artificial Sequence
  Description of Artificial Sequence: Synthetic oligonucleotide
ggggcgccucaguccuuac

SEQ ID NO: 360667 - RNA, 19 nt, Artificial Sequence
  Description of Artificial Sequence: Synthetic oligonucleotide
gugacucgucggagugcaa

SEQ ID NO: 360668 - RNA, 19 nt, Artificial Sequence
  Description of Artificial Sequence: Synthetic oligonucleotide
ccggauuccacgggaugaa

SEQ ID NO: 360669 - RNA, 19 nt, Artificial Sequence
  Description of Artificial Sequence: Synthetic oligonucleotide
ggacugggauaugugcauu

SEQ ID NO: 360670 - RNA, 19 nt, Artificial Sequence
  Description of Artificial Sequence: Synthetic oligonucleotide
ggccccacgguggcauaga

SEQ ID NO: 360671 - RNA, 19 nt, Artificial Sequence
  Description of Artificial Sequence: Synthetic oligonucleotide
gguuccgagcuaggacagu

SEQ ID NO: 360672 - RNA, 19 nt, Artificial Sequence
  Description of Artificial Sequence: Synthetic oligonucleotide
cacgacgaugagccccauu

SEQ ID NO: 360673 - RNA, 19 nt, Artificial Sequence
  Description of Artificial Sequence: Synthetic oligonucleotide
ggacgaugcugguguucau

SEQ ID NO: 360674 - RNA, 19 nt, Artificial Sequence
  Description of Artificial Sequence: Synthetic oligonucleotide
ggacgucuucugggcggca

SEQ ID NO: 360675 - RNA, 19 nt, Artificial Sequence
  Description of Artificial Sequence: Synthetic oligonucleotide
cgccauugccauucugggu

SEQ ID NO: 360676 - RNA, 19 nt, Artificial Sequence
  Description of Artificial Sequence: Synthetic oligonucleotide
ccgggucccggugcuuguc

SEQ ID NO: 360677 - RNA, 19 nt, Artificial Sequence
  Description of Artificial Sequence: Synthetic oligonucleotide
cccucgucugcggaucacu

SEQ ID NO: 360678 - RNA, 19 nt, Artificial Sequence
  Description of Artificial Sequence: Synthetic oligonucleotide
cgccggacacgucuucaua

SEQ ID NO: 360679 - RNA, 19 nt, Artificial Sequence
  Description of Artificial Sequence: Synthetic oligonucleotide
cagcggccccacgguggca

SEQ ID NO: 360680 - RNA, 19 nt, Artificial Sequence
  Description of Artificial Sequence: Synthetic oligonucleotide
cccuuuggguugguucgcu

SEQ ID NO: 360681 - RNA, 19 nt, Artificial Sequence
  Description of Artificial Sequence: Synthetic oligonucleotide
cgcgcacguucagcaauga

SEQ ID NO: 360682 - RNA, 19 nt, Artificial Sequence
  Description of Artificial Sequence: Synthetic oligonucleotide
ccgccggacacgucuucau

SEQ ID NO: 360683 - RNA, 19 nt, Artificial Sequence
  Description of Artificial Sequence: Synthetic oligonucleotide
cgauccugugagacugcuu

SEQ ID NO: 360684 - RNA, 19 nt, Artificial Sequence
  Description of Artificial Sequence: Synthetic oligonucleotide
gcggcacggucacgucuau

SEQ ID NO: 360685 - RNA, 19 nt, Artificial Sequence
  Description of Artificial Sequence: Synthetic oligonucleotide
ccaccgccggacacgucuu

SEQ ID NO: 360686 - RNA, 19 nt, Artificial Sequence
  Description of Artificial Sequence: Synthetic oligonucleotide
ccccaacacacgggucaua

SEQ ID NO: 360687 - RNA, 19 nt, Artificial Sequence
  Description of Artificial Sequence: Synthetic oligonucleotide
guggggcgccucaguccuu

SEQ ID NO: 360688 - RNA, 19 nt, Artificial Sequence
  Description of Artificial Sequence: Synthetic oligonucleotide
cgcggacgaugcugguguu

SEQ ID NO: 360689 - RNA, 19 nt, Artificial Sequence
  Description of Artificial Sequence: Synthetic oligonucleotide
auaacuuucguauaacuuc

SEQ ID NO: 360690 - RNA, 19 nt, Artificial Sequence
  Description of Artificial Sequence: Synthetic oligonucleotide
uuauuauauacucucagca

SEQ ID NO: 360691 - RNA, 19 nt, Artificial Sequence
  Description of Artificial Sequence: Synthetic oligonucleotide
aauaauacaucccagucuu

SEQ ID NO: 360692 - RNA, 19 nt, Artificial Sequence
  Description of Artificial Sequence: Synthetic oligonucleotide
ucuuucauacucaaaagga

SEQ ID NO: 360693 - RNA, 19 nt, Artificial Sequence
  Description of Artificial Sequence: Synthetic oligonucleotide
uuaaucacaugcaucgccg

SEQ ID NO: 360694 - RNA, 19 nt, Artificial Sequence
  Description of Artificial Sequence: Synthetic oligonucleotide
ugagagauuucccacacag

SEQ ID NO: 360695 - RNA, 19 nt, Artificial Sequence
  Description of Artificial Sequence: Synthetic oligonucleotide
uguuauuauauacucucag

SEQ ID NO: 360696 - RNA, 19 nt, Artificial Sequence
  Description of Artificial Sequence: Synthetic oligonucleotide
aucugcuagaccuuguacc

SEQ ID NO: 360697 - RNA, 19 nt, Artificial Sequence
  Description of Artificial Sequence: Synthetic oligonucleotide
agucuuauagaguugcuuc

SEQ ID NO: 360698 - RNA, 19 nt, Artificial Sequence
  Description of Artificial Sequence: Synthetic oligonucleotide
ucaaauuucggacaaugac

SEQ ID NO: 360699 - RNA, 19 nt, Artificial Sequence
  Description of Artificial Sequence: Synthetic oligonucleotide
aucucgcuuaaucacaugc

SEQ ID NO: 360700 - RNA, 19 nt, Artificial Sequence
  Description of Artificial Sequence: Synthetic oligonucleotide
aaauuccucuccccaaacc

SEQ ID NO: 360701 - RNA, 19 nt, Artificial Sequence
  Description of Artificial Sequence: Synthetic oligonucleotide
agauguuacugguauaagg

SEQ ID NO: 360702 - RNA, 19 nt, Artificial Sequence
  Description of Artificial Sequence: Synthetic oligonucleotide
agaacuaagucucuuuguc

SEQ ID NO: 360703 - RNA, 19 nt, Artificial Sequence
  Description of Artificial Sequence: Synthetic oligonucleotide
aacauaacucgcucuuggc

SEQ ID NO: 360704 - RNA, 19 nt, Artificial Sequence
  Description of Artificial Sequence: Synthetic oligonucleotide
aacuaagucucuuugucca

SEQ ID NO: 360705 - RNA, 19 nt, Artificial Sequence
  Description of Artificial Sequence: Synthetic oligonucleotide
ucuuacaccauacuuugca

SEQ ID NO: 360706 - RNA, 19 nt, Artificial Sequence
  Description of Artificial Sequence: Synthetic oligonucleotide
uuaauaucaaagcuggguu

SEQ ID NO: 360707 - RNA, 19 nt, Artificial Sequence
  Description of Artificial Sequence: Synthetic oligonucleotide
cagacuuagaaaucaaggc

SEQ ID NO: 360708 - RNA, 19 nt, Artificial Sequence
  Description of Artificial Sequence: Synthetic oligonucleotide
cauaacucgcucuuggcgg

SEQ ID NO: 360709 - RNA, 19 nt, Artificial Sequence
  Description of Artificial Sequence: Synthetic oligonucleotide
uugauaguucccaaguucu

SEQ ID NO: 360710 - RNA, 19 nt, Artificial Sequence
  Description of Artificial Sequence: Synthetic oligonucleotide
caaggcuccagguaaauag

SEQ ID NO: 360711 - RNA, 19 nt, Artificial Sequence
  Description of Artificial Sequence: Synthetic oligonucleotide
acauaacucgcucuuggcg

SEQ ID NO: 360712 - RNA, 19 nt, Artificial Sequence
  Description of Artificial Sequence: Synthetic oligonucleotide
aacuggauuggauuagcug

SEQ ID NO: 360713 - RNA, 19 nt, Artificial Sequence
  Description of Artificial Sequence: Synthetic oligonucleotide
acaaaccucgcucaguaag

SEQ ID NO: 360714 - RNA, 19 nt, Artificial Sequence
  Description of Artificial Sequence: Synthetic oligonucleotide
cuuaaucacaugcaucgcc

SEQ ID NO: 360715 - RNA, 19 nt, Artificial Sequence
  Description of Artificial Sequence: Synthetic oligonucleotide
uaacuuucguauaacuucu

SEQ ID NO: 360716 - RNA, 19 nt, Artificial Sequence
  Description of Artificial Sequence: Synthetic oligonucleotide
uggauaucucaucaggaug

SEQ ID NO: 360717 - RNA, 19 nt, Artificial Sequence
  Description of Artificial Sequence: Synthetic oligonucleotide
uucccacacagucuuauag

SEQ ID NO: 360718 - RNA, 19 nt, Artificial Sequence
  Description of Artificial Sequence: Synthetic oligonucleotide
ugcaaagaagagaucccgg

SEQ ID NO: 360719 - RNA, 19 nt, Artificial Sequence
  Description of Artificial Sequence: Synthetic oligonucleotide
uuauagaguugcuucaggu

SEQ ID NO: 360720 - RNA, 19 nt, Artificial Sequence
  Description of Artificial Sequence: Synthetic oligonucleotide
uacucuacuauuucuguac

SEQ ID NO: 360721 - RNA, 19 nt, Artificial Sequence
  Description of Artificial Sequence: Synthetic oligonucleotide
uggggcaauaaguaaacug

SEQ ID NO: 360722 - RNA, 19 nt, Artificial Sequence
  Description of Artificial Sequence: Synthetic oligonucleotide
uauucaauaacugggcuuc

SEQ ID NO: 360723 - RNA, 19 nt, Artificial Sequence
  Description of Artificial Sequence: Synthetic oligonucleotide
uuugauucuuaauaucaaa

SEQ ID NO: 360724 - RNA, 19 nt, Artificial Sequence
  Description of Artificial Sequence: Synthetic oligonucleotide
gaacuaagucucuuugucc

SEQ ID NO: 360725 - RNA, 19 nt, Artificial Sequence
  Description of Artificial Sequence: Synthetic oligonucleotide
ucuuaauaucaaagcuggg

SEQ ID NO: 360726 - RNA, 19 nt, Artificial Sequence
  Description of Artificial Sequence: Synthetic oligonucleotide
auaagugugccucuggaau

SEQ ID NO: 360727 - RNA, 19 nt, Artificial Sequence
  Description of Artificial Sequence: Synthetic oligonucleotide
gauggcguuuauuugauaa

SEQ ID NO: 360728 - RNA, 19 nt, Artificial Sequence
  Description of Artificial Sequence: Synthetic oligonucleotide
auuagucccagcaauguag

SEQ ID NO: 360729 - RNA, 19 nt, Artificial Sequence
  Description of Artificial Sequence: Synthetic oligonucleotide
auaacucgcucuuggcggc

SEQ ID NO: 360730 - RNA, 19 nt, Artificial Sequence
  Description of Artificial Sequence: Synthetic oligonucleotide
ucaaacauaacucgcucuu

SEQ ID NO: 360731 - RNA, 19 nt, Artificial Sequence
  Description of Artificial Sequence: Synthetic oligonucleotide
uugauaagugugccucugg

SEQ ID NO: 360732 - RNA, 19 nt, Artificial Sequence
  Description of Artificial Sequence: Synthetic oligonucleotide
uucgagaccaaagugcagc

SEQ ID NO: 360733 - RNA, 19 nt, Artificial Sequence
  Description of Artificial Sequence: Synthetic oligonucleotide
aaugaccaguccugguuag

SEQ ID NO: 360734 - RNA, 19 nt, Artificial Sequence
  Description of Artificial Sequence: Synthetic oligonucleotide
ugaguuugccauaguuagg

SEQ ID NO: 360735 - RNA, 19 nt, Artificial Sequence
  Description of Artificial Sequence: Synthetic oligonucleotide
uuagucccagcaauguagc

SEQ ID NO: 360736 - RNA, 19 nt, Artificial Sequence
  Description of Artificial Sequence: Synthetic oligonucleotide
auucaaauuucggacaaug

SEQ ID NO: 360737 - RNA, 19 nt, Artificial Sequence
  Description of Artificial Sequence: Synthetic oligonucleotide
uauagaguugcuucagguc

SEQ ID NO: 360738 - RNA, 19 nt, Artificial Sequence
  Description of Artificial Sequence: Synthetic oligonucleotide
gcaauauggauguuuaaug

SEQ ID NO: 360739 - RNA, 19 nt, Artificial Sequence
  Description of Artificial Sequence: Synthetic oligonucleotide
augauggcauaccaaagcu

SEQ ID NO: 360740 - RNA, 19 nt, Artificial Sequence
  Description of Artificial Sequence: Synthetic oligonucleotide
ucgagcaguguuauuauau

SEQ ID NO: 360741 - RNA, 19 nt, Artificial Sequence
  Description of Artificial Sequence: Synthetic oligonucleotide
cucauaggggccauacucc

SEQ ID NO: 360742 - RNA, 19 nt, Artificial Sequence
  Description of Artificial Sequence: Synthetic oligonucleotide
agcuuucacgacuuugcgg

SEQ ID NO: 360743 - RNA, 19 nt, Artificial Sequence
  Description of Artificial Sequence: Synthetic oligonucleotide
uugugcaaguuagacacag

SEQ ID NO: 360744 - RNA, 19 nt, Artificial Sequence
  Description of Artificial Sequence: Synthetic oligonucleotide
ugacuuuagugacuucagc

SEQ ID NO: 360745 - RNA, 19 nt, Artificial Sequence
  Description of Artificial Sequence: Synthetic oligonucleotide
auacguauguucuggugug

SEQ ID NO: 360746 - RNA, 19 nt, Artificial Sequence
  Description of Artificial Sequence: Synthetic oligonucleotide
cuugagaagcuuccagucc

SEQ ID NO: 360747 - RNA, 19 nt, Artificial Sequence
  Description of Artificial Sequence: Synthetic oligonucleotide
uuggucccagcauugaaca

SEQ ID NO: 360748 - RNA, 19 nt, Artificial Sequence
  Description of Artificial Sequence: Synthetic oligonucleotide
gagcaguguuauuauauac

SEQ ID NO: 360749 - RNA, 19 nt, Artificial Sequence
  Description of Artificial Sequence: Synthetic oligonucleotide
ggaugaaagcaucugcuag

SEQ ID NO: 360750 - RNA, 19 nt, Artificial Sequence
  Description of Artificial Sequence: Synthetic oligonucleotide
gauguuacugguauaaggu

SEQ ID NO: 360751 - RNA, 19 nt, Artificial Sequence
  Description of Artificial Sequence: Synthetic oligonucleotide
gggguaguaguuuauauca

SEQ ID NO: 360752 - RNA, 19 nt, Artificial Sequence
  Description of Artificial Sequence: Synthetic oligonucleotide
gugcauacuagugaguuug

SEQ ID NO: 360753 - RNA, 19 nt, Artificial Sequence
  Description of Artificial Sequence: Synthetic oligonucleotide
auaguucccaaguucugcu

SEQ ID NO: 360754 - RNA, 19 nt, Artificial Sequence
  Description of Artificial Sequence: Synthetic oligonucleotide
uuuaagcccugcuuccagc

SEQ ID NO: 360755 - RNA, 19 nt, Artificial Sequence
  Description of Artificial Sequence: Synthetic oligonucleotide
ucugaggcgcugaaggaac

SEQ ID NO: 360756 - RNA, 19 nt, Artificial Sequence
  Description of Artificial Sequence: Synthetic oligonucleotide
ugggcucucaaauggauau

SEQ ID NO: 360757 - RNA, 19 nt, Artificial Sequence
  Description of Artificial Sequence: Synthetic oligonucleotide
gaguaucauaaauuccuuc

SEQ ID NO: 360758 - RNA, 19 nt, Artificial Sequence
  Description of Artificial Sequence: Synthetic oligonucleotide
auaucgagcaguguuauua

SEQ ID NO: 360759 - RNA, 19 nt, Artificial Sequence
  Description of Artificial Sequence: Synthetic oligonucleotide
aagugcauacuagugaguu

SEQ ID NO: 360760 - RNA, 19 nt, Artificial Sequence
  Description of Artificial Sequence: Synthetic oligonucleotide
uagucagggugcuucguag

SEQ ID NO: 360761 - RNA, 19 nt, Artificial Sequence
  Description of Artificial Sequence: Synthetic oligonucleotide
ugggguaguaguuuauauc

SEQ ID NO: 360762 - RNA, 19 nt, Artificial Sequence
  Description of Artificial Sequence: Synthetic oligonucleotide
caaauuucggacaaugacu

SEQ ID NO: 360763 - RNA, 19 nt, Artificial Sequence
  Description of Artificial Sequence: Synthetic oligonucleotide
guagaagugcauacuagug

SEQ ID NO: 360764 - RNA, 19 nt, Artificial Sequence
  Description of Artificial Sequence: Synthetic oligonucleotide
auaaaucagucaaagcaga

SEQ ID NO: 360765 - RNA, 19 nt, Artificial Sequence
  Description of Artificial Sequence: Synthetic oligonucleotide
agcaauauggauguuuaau

SEQ ID NO: 360766 - RNA, 19 nt, Artificial Sequence
  Description of Artificial Sequence: Synthetic oligonucleotide
cucaaauggauaucucauc

SEQ ID NO: 360767 - RNA, 19 nt, Artificial Sequence
  Description of Artificial Sequence: Synthetic oligonucleotide
ccugacaagacucugcgag

SEQ ID NO: 360768 - RNA, 19 nt, Artificial Sequence
  Description of Artificial Sequence: Synthetic oligonucleotide
ucgaaugugaggguuggac

SEQ ID NO: 360769 - RNA, 19 nt, Artificial Sequence
  Description of Artificial Sequence: Synthetic oligonucleotide
caaaguccauauugagucc

SEQ ID NO: 360770 - RNA, 19 nt, Artificial Sequence
  Description of Artificial Sequence: Synthetic oligonucleotide
uaaucacaugcaucgccgc

SEQ ID NO: 360771 - RNA, 19 nt, Artificial Sequence
  Description of Artificial Sequence: Synthetic oligonucleotide
uucacgacuuugcggacac

SEQ ID NO: 360772 - RNA, 19 nt, Artificial Sequence
  Description of Artificial Sequence: Synthetic oligonucleotide
ucuuccgauuacaggaauc

SEQ ID NO: 360773 - RNA, 19 nt, Artificial Sequence
  Description of Artificial Sequence: Synthetic oligonucleotide
uaauacaucccagucuuua

SEQ ID NO: 360774 - RNA, 19 nt, Artificial Sequence
  Description of Artificial Sequence: Synthetic oligonucleotide
cugguuaguuuccacucgc

SEQ ID NO: 360775 - RNA, 19 nt, Artificial Sequence
  Description of Artificial Sequence: Synthetic oligonucleotide
ugcuagaccuuguacccca

SEQ ID NO: 360776 - RNA, 19 nt, Artificial Sequence
  Description of Artificial Sequence: Synthetic oligonucleotide
ucgcuuaaucacaugcauc

SEQ ID NO: 360777 - RNA, 19 nt, Artificial Sequence
  Description of Artificial Sequence: Synthetic oligonucleotide
cuuccagccguagaagugc

SEQ ID NO: 360778 - RNA, 19 nt, Artificial Sequence
  Description of Artificial Sequence: Synthetic oligonucleotide
ugaaagcaucugcuagacc

SEQ ID NO: 360779 - RNA, 19 nt, Artificial Sequence
  Description of Artificial Sequence: Synthetic oligonucleotide
acucugcgaguguagaugu

SEQ ID NO: 360780 - RNA, 19 nt, Artificial Sequence
  Description of Artificial Sequence: Synthetic oligonucleotide
aguaggggauuuauuguag

SEQ ID NO: 360781 - RNA, 19 nt, Artificial Sequence
  Description of Artificial Sequence: Synthetic oligonucleotide
gguauaagguucaauggac

SEQ ID NO: 360782 - RNA, 19 nt, Artificial Sequence
  Description of Artificial Sequence: Synthetic oligonucleotide
cuuugcuaguauacucuac

SEQ ID NO: 360783 - RNA, 19 nt, Artificial Sequence
  Description of Artificial Sequence: Synthetic oligonucleotide
gauaagugugccucuggaa

SEQ ID NO: 360784 - RNA, 19 nt, Artificial Sequence
  Description of Artificial Sequence: Synthetic oligonucleotide
cuuaauaucaaagcugggu

SEQ ID NO: 360785 - RNA, 19 nt, Artificial Sequence
  Description of Artificial Sequence: Synthetic oligonucleotide
ggauagagccauugcaugc

SEQ ID NO: 360786 - RNA, 19 nt, Artificial Sequence
  Description of Artificial Sequence: Synthetic oligonucleotide
uguugagcuuucacgacuu

SEQ ID NO: 360787 - RNA, 19 nt, Artificial Sequence
  Description of Artificial Sequence: Synthetic oligonucleotide
gcauugaacagaguagggg

SEQ ID NO: 360788 - RNA, 19 nt, Artificial Sequence
  Description of Artificial Sequence: Synthetic oligonucleotide
uagauguuacugguauaag

SEQ ID NO: 360789 - RNA, 19 nt, Artificial Sequence
  Description of Artificial Sequence: Synthetic oligonucleotide
uucuuacaccauacuuugc

SEQ ID NO: 360790 - RNA, 19 nt, Artificial Sequence
  Description of Artificial Sequence: Synthetic oligonucleotide
gauagagccauugcaugca

SEQ ID NO: 360791 - RNA, 19 nt, Artificial Sequence
  Description of Artificial Sequence: Synthetic oligonucleotide
cucuaaggagcacaccaug

SEQ ID NO: 360792 - RNA, 19 nt, Artificial Sequence
  Description of Artificial Sequence: Synthetic oligonucleotide
gacucauuauuccccagaa

SEQ ID NO: 360793 - RNA, 19 nt, Artificial Sequence
  Description of Artificial Sequence: Synthetic oligonucleotide
cuuugauucuuaauaucaa

SEQ ID NO: 360794 - RNA, 19 nt, Artificial Sequence
  Description of Artificial Sequence: Synthetic oligonucleotide
ucacaugcaucgccgccag

SEQ ID NO: 360795 - RNA, 19 nt, Artificial Sequence
  Description of Artificial Sequence: Synthetic oligonucleotide
aucgaugaaagcaccucuc

SEQ ID NO: 360796 - RNA, 19 nt, Artificial Sequence
  Description of Artificial Sequence: Synthetic oligonucleotide
gacgagacuuccuaagucu

SEQ ID NO: 360797 - RNA, 19 nt, Artificial Sequence
  Description of Artificial Sequence: Synthetic oligonucleotide
uuccuaagucuccaucuau

SEQ ID NO: 360798 - RNA, 19 nt, Artificial Sequence
  Description of Artificial Sequence: Synthetic oligonucleotide
agagccgacggucgaaugu

SEQ ID NO: 360799 - RNA, 19 nt, Artificial Sequence
  Description of Artificial Sequence: Synthetic oligonucleotide
uagcccgaauacaacuuac

SEQ ID NO: 360800 - RNA, 19 nt, Artificial Sequence
  Description of Artificial Sequence: Synthetic oligonucleotide
uucauuccacaaaccucgc

SEQ ID NO: 360801 - RNA, 19 nt, Artificial Sequence
  Description of Artificial Sequence: Synthetic oligonucleotide
ugaucgaugaaagcaccuc

SEQ ID NO: 360802 - RNA, 19 nt, Artificial Sequence
  Description of Artificial Sequence: Synthetic oligonucleotide
aacuuucguauaacuucuc

SEQ ID NO: 360803 - RNA, 19 nt, Artificial Sequence
  Description of Artificial Sequence: Synthetic oligonucleotide
aagacucugcgaguguaga

SEQ ID NO: 360804 - RNA, 19 nt, Artificial Sequence
  Description of Artificial Sequence: Synthetic oligonucleotide
caagacucugcgaguguag

SEQ ID NO: 360805 - RNA, 19 nt, Artificial Sequence
  Description of Artificial Sequence: Synthetic oligonucleotide
acguauguucuggugugac

SEQ ID NO: 360806 - RNA, 19 nt, Artificial Sequence
  Description of Artificial Sequence: Synthetic oligonucleotide
ggauaucucaucaggauga

SEQ ID NO: 360807 - RNA, 19 nt, Artificial Sequence
  Description of Artificial Sequence: Synthetic oligonucleotide
gacucgaugauggcauacc

SEQ ID NO: 360808 - RNA, 19 nt, Artificial Sequence
  Description of Artificial Sequence: Synthetic oligonucleotide
cugaaagucauacguaugu

SEQ ID NO: 360809 - RNA, 19 nt, Artificial Sequence
  Description of Artificial Sequence: Synthetic oligonucleotide
agacucgaugauggcauac

SEQ ID NO: 360810 - RNA, 19 nt, Artificial Sequence
  Description of Artificial Sequence: Synthetic oligonucleotide
agaagagaucccgggcucg

SEQ ID NO: 360811 - RNA, 19 nt, Artificial Sequence
  Description of Artificial Sequence: Synthetic oligonucleotide
gaucgaugaaagcaccucu

SEQ ID NO: 360812 - RNA, 19 nt, Artificial Sequence
  Description of Artificial Sequence: Synthetic oligonucleotide
acgacgagacuuccuaagu

SEQ ID NO: 360813 - RNA, 19 nt, Artificial Sequence
  Description of Artificial Sequence: Synthetic oligonucleotide
ugauuugagcaggaucaac

SEQ ID NO: 360814 - RNA, 19 nt, Artificial Sequence
  Description of Artificial Sequence: Synthetic oligonucleotide
ucgagaccaaagugcagcu

SEQ ID NO: 360815 - RNA, 19 nt, Artificial Sequence
  Description of Artificial Sequence: Synthetic oligonucleotide
uuccuuugcugaccgggga

SEQ ID NO: 360816 - RNA, 19 nt, Artificial Sequence
  Description of Artificial Sequence: Synthetic oligonucleotide
uugugaagaucuuccuauc

SEQ ID NO: 360817 - RNA, 19 nt, Artificial Sequence
  Description of Artificial Sequence: Synthetic oligonucleotide
ugcaauaaucugguucuuc

SEQ ID NO: 360818 - RNA, 19 nt, Artificial Sequence
  Description of Artificial Sequence: Synthetic oligonucleotide
ugguuaguuuccacucgcu

SEQ ID NO: 360819 - RNA, 19 nt, Artificial Sequence
  Description of Artificial Sequence: Synthetic oligonucleotide
guaccccaauuccaauggg

SEQ ID NO: 360820 - RNA, 19 nt, Artificial Sequence
  Description of Artificial Sequence: Synthetic oligonucleotide
uaggggauuuauuguaguu

SEQ ID NO: 360821 - RNA, 19 nt, Artificial Sequence
  Description of Artificial Sequence: Synthetic oligonucleotide
aggacgacgagacuuccua

SEQ ID NO: 360822 - RNA, 19 nt, Artificial Sequence
  Description of Artificial Sequence: Synthetic oligonucleotide
ccgauuacaggaaucuuug

SEQ ID NO: 360823 - RNA, 19 nt, Artificial Sequence
  Description of Artificial Sequence: Synthetic oligonucleotide
cugcgaguguagauguuac

SEQ ID NO: 360824 - RNA, 19 nt, Artificial Sequence
  Description of Artificial Sequence: Synthetic oligonucleotide
acgagacuuccuaagucuc

SEQ ID NO: 360825 - RNA, 19 nt, Artificial Sequence
  Description of Artificial Sequence: Synthetic oligonucleotide
ggguucgagaccaaagugc

SEQ ID NO: 360826 - RNA, 19 nt, Artificial Sequence
  Description of Artificial Sequence: Synthetic oligonucleotide
ugaaagucauacguauguu

SEQ ID NO: 360827 - RNA, 19 nt, Artificial Sequence
  Description of Artificial Sequence: Synthetic oligonucleotide
caaacauaacucgcucuug

SEQ ID NO: 360828 - RNA, 19 nt, Artificial Sequence
  Description of Artificial Sequence: Synthetic oligonucleotide
caaaccucgcucaguaaga

SEQ ID NO: 360829 - RNA, 19 nt, Artificial Sequence
  Description of Artificial Sequence: Synthetic oligonucleotide
gucuaagugccaaggcucc

SEQ ID NO: 360830 - RNA, 19 nt, Artificial Sequence
  Description of Artificial Sequence: Synthetic oligonucleotide
gggugcuucguagucaagg

SEQ ID NO: 360831 - RNA, 19 nt, Artificial Sequence
  Description of Artificial Sequence: Synthetic oligonucleotide
cuacuuugauucuuaauau

SEQ ID NO: 360832 - RNA, 19 nt, Artificial Sequence
  Description of Artificial Sequence: Synthetic oligonucleotide
cuuacaccauacuuugcaa

SEQ ID NO: 360833 - RNA, 19 nt, Artificial Sequence
  Description of Artificial Sequence: Synthetic oligonucleotide
auagucagggugcuucgua

SEQ ID NO: 360834 - RNA, 19 nt, Artificial Sequence
  Description of Artificial Sequence: Synthetic oligonucleotide
gauucgugauguaauuuua

SEQ ID NO: 360835 - RNA, 19 nt, Artificial Sequence
  Description of Artificial Sequence: Synthetic oligonucleotide
ugcgaguguagauguuacu

SEQ ID NO: 360836 - RNA, 19 nt, Artificial Sequence
  Description of Artificial Sequence: Synthetic oligonucleotide
gcaaguuagacacagcaau

SEQ ID NO: 360837 - RNA, 19 nt, Artificial Sequence
  Description of Artificial Sequence: Synthetic oligonucleotide
uggaaugggguaguaguuu

SEQ ID NO: 360838 - RNA, 19 nt, Artificial Sequence
  Description of Artificial Sequence: Synthetic oligonucleotide
agugcauacuagugaguuu

SEQ ID NO: 360839 - RNA, 19 nt, Artificial Sequence
  Description of Artificial Sequence: Synthetic oligonucleotide
uggauucgugauguaauuu

SEQ ID NO: 360840 - RNA, 19 nt, Artificial Sequence
  Description of Artificial Sequence: Synthetic oligonucleotide
auaguuaggcucagcaaua

SEQ ID NO: 360841 - RNA, 19 nt, Artificial Sequence
  Description of Artificial Sequence: Synthetic oligonucleotide
gcggacacgacccugcuuc

SEQ ID NO: 360842 - RNA, 19 nt, Artificial Sequence
  Description of Artificial Sequence: Synthetic oligonucleotide
acgacuuugcggacacgac

SEQ ID NO: 360843 - RNA, 19 nt, Artificial Sequence
  Description of Artificial Sequence: Synthetic oligonucleotide
cucgcuucaugaagagauc

SEQ ID NO: 360844 - RNA, 19 nt, Artificial Sequence
  Description of Artificial Sequence: Synthetic oligonucleotide
gguucgagaccaaagugca

SEQ ID NO: 360845 - RNA, 19 nt, Artificial Sequence
  Description of Artificial Sequence: Synthetic oligonucleotide
agacucugcgaguguagau

SEQ ID NO: 360846 - RNA, 19 nt, Artificial Sequence
  Description of Artificial Sequence: Synthetic oligonucleotide
gucagggugcuucguaguc

SEQ ID NO: 360847 - RNA, 19 nt, Artificial Sequence
  Description of Artificial Sequence: Synthetic oligonucleotide
ucuaagugccaaggcucca

SEQ ID NO: 360848 - RNA, 19 nt, Artificial Sequence
  Description of Artificial Sequence: Synthetic oligonucleotide
ggggcaauaaguaaacugu

SEQ ID NO: 360849 - RNA, 19 nt, Artificial Sequence
  Description of Artificial Sequence: Synthetic oligonucleotide
ggucgaaugugaggguugg

SEQ ID NO: 360850 - RNA, 19 nt, Artificial Sequence
  Description of Artificial Sequence: Synthetic oligonucleotide
cauccagaccaggacacuc

SEQ ID NO: 360851 - RNA, 19 nt, Artificial Sequence
  Description of Artificial Sequence: Synthetic oligonucleotide
ggcuuugaucgaugaaagc

SEQ ID NO: 360852 - RNA, 19 nt, Artificial Sequence
  Description of Artificial Sequence: Synthetic oligonucleotide
cuggauagagccauugcau

SEQ ID NO: 360853 - RNA, 19 nt, Artificial Sequence
  Description of Artificial Sequence: Synthetic oligonucleotide
ggguuggacuccuagggga

SEQ ID NO: 360854 - RNA, 19 nt, Artificial Sequence
  Description of Artificial Sequence: Synthetic oligonucleotide
cagaguauccaguuccacu

SEQ ID NO: 360855 - RNA, 19 nt, Artificial Sequence
  Description of Artificial Sequence: Synthetic oligonucleotide
cauuugaauugccauuagu

SEQ ID NO: 360856 - RNA, 19 nt, Artificial Sequence
  Description of Artificial Sequence: Synthetic oligonucleotide
cacgacuuugcggacacga

SEQ ID NO: 360857 - RNA, 19 nt, Artificial Sequence
  Description of Artificial Sequence: Synthetic oligonucleotide
uacugguauaagguucaau

SEQ ID NO: 360858 - RNA, 19 nt, Artificial Sequence
  Description of Artificial Sequence: Synthetic oligonucleotide
guagcccgaauacaacuua

SEQ ID NO: 360859 - RNA, 19 nt, Artificial Sequence
  Description of Artificial Sequence: Synthetic oligonucleotide
cgacggucgaaugugaggg

SEQ ID NO: 360860 - RNA, 19 nt, Artificial Sequence
  Description of Artificial Sequence: Synthetic oligonucleotide
ggcgcuuguuuccaccuug

SEQ ID NO: 360861 - RNA, 19 nt, Artificial Sequence
  Description of Artificial Sequence: Synthetic oligonucleotide
gcguuuauuugauaagugu

SEQ ID NO: 360862 - RNA, 19 nt, Artificial Sequence
  Description of Artificial Sequence: Synthetic oligonucleotide
acaagacucugcgagugua

SEQ ID NO: 360863 - RNA, 19 nt, Artificial Sequence
  Description of Artificial Sequence: Synthetic oligonucleotide
aucgagcaguguuauuaua

SEQ ID NO: 360864 - RNA, 19 nt, Artificial Sequence
  Description of Artificial Sequence: Synthetic oligonucleotide
aguagcccgaauacaacuu

SEQ ID NO: 360865 - RNA, 19 nt, Artificial Sequence
  Description of Artificial Sequence: Synthetic oligonucleotide
cuuccgauuacaggaaucu

SEQ ID NO: 360866 - RNA, 19 nt, Artificial Sequence
  Description of Artificial Sequence: Synthetic oligonucleotide
caucucgcuuaaucacaug

SEQ ID NO: 360867 - RNA, 19 nt, Artificial Sequence
  Description of Artificial Sequence: Synthetic oligonucleotide
guaggggauuuauuguagu

SEQ ID NO: 360868 - RNA, 19 nt, Artificial Sequence
  Description of Artificial Sequence: Synthetic oligonucleotide
guucgagaccaaagugcag

SEQ ID NO: 360869 - RNA, 19 nt, Artificial Sequence
  Description of Artificial Sequence: Synthetic oligonucleotide
ugguugcucuuccgauuac

SEQ ID NO: 360870 - RNA, 19 nt, Artificial Sequence
  Description of Artificial Sequence: Synthetic oligonucleotide
auacaggccuuggauuacu

SEQ ID NO: 360871 - RNA, 19 nt, Artificial Sequence
  Description of Artificial Sequence: Synthetic oligonucleotide
guaagaucuuucaguaagu

SEQ ID NO: 360872 - RNA, 19 nt, Artificial Sequence
  Description of Artificial Sequence: Synthetic oligonucleotide
aguguagauguuacuggua

SEQ ID NO: 360873 - RNA, 19 nt, Artificial Sequence
  Description of Artificial Sequence: Synthetic oligonucleotide
caguagcccgaauacaacu

SEQ ID NO: 360874 - RNA, 19 nt, Artificial Sequence
  Description of Artificial Sequence: Synthetic oligonucleotide
cuuugcggacacgacccug

SEQ ID NO: 360875 - RNA, 19 nt, Artificial Sequence
  Description of Artificial Sequence: Synthetic oligonucleotide
cauuagucccagcaaugua

SEQ ID NO: 360876 - RNA, 19 nt, Artificial Sequence
  Description of Artificial Sequence: Synthetic oligonucleotide
ggauucgugauguaauuuu

SEQ ID NO: 360877 - RNA, 19 nt, Artificial Sequence
  Description of Artificial Sequence: Synthetic oligonucleotide
ccgacggucgaaugugagg

SEQ ID NO: 360878 - RNA, 19 nt, Artificial Sequence
  Description of Artificial Sequence: Synthetic oligonucleotide
aaugggccgauggcguuua

SEQ ID NO: 360879 - RNA, 19 nt, Artificial Sequence
  Description of Artificial Sequence: Synthetic oligonucleotide
gcggccaucucgcuuaauc

SEQ ID NO: 360880 - RNA, 19 nt, Artificial Sequence
  Description of Artificial Sequence: Synthetic oligonucleotide
gcauacuagugaguuugcc

SEQ ID NO: 360881 - RNA, 19 nt, Artificial Sequence
  Description of Artificial Sequence: Synthetic oligonucleotide
cgacuuugcggacacgacc

SEQ ID NO: 360882 - RNA, 19 nt, Artificial Sequence
  Description of Artificial Sequence: Synthetic oligonucleotide
uaacucgcucuuggcggcc

SEQ ID NO: 360883 - RNA, 19 nt, Artificial Sequence
  Description of Artificial Sequence: Synthetic oligonucleotide
gcuuaaucacaugcaucgc

SEQ ID NO: 360884 - RNA, 19 nt, Artificial Sequence
  Description of Artificial Sequence: Synthetic oligonucleotide
ucacgacuuugcggacacg

SEQ ID NO: 360885 - RNA, 19 nt, Artificial Sequence
  Description of Artificial Sequence: Synthetic oligonucleotide
gacaagacucugcgagugu

SEQ ID NO: 360886 - RNA, 19 nt, Artificial Sequence
  Description of Artificial Sequence: Synthetic oligonucleotide
cagagccgacggucgaaug

SEQ ID NO: 360887 - RNA, 19 nt, Artificial Sequence
  Description of Artificial Sequence: Synthetic oligonucleotide
cgagacuuccuaagucucc

SEQ ID NO: 360888 - RNA, 19 nt, Artificial Sequence
  Description of Artificial Sequence: Synthetic oligonucleotide
ggugcuucguagucaaggu

SEQ ID NO: 360889 - RNA, 19 nt, Artificial Sequence
  Description of Artificial Sequence: Synthetic oligonucleotide
acggucgaaugugaggguu

SEQ ID NO: 360890 - RNA, 19 nt, Artificial Sequence
  Description of Artificial Sequence: Synthetic oligonucleotide
cccacuauacaggccuugg

SEQ ID NO: 360891 - RNA, 19 nt, Artificial Sequence
  Description of Artificial Sequence: Synthetic oligonucleotide
gcucuggauagagccauug

SEQ ID NO: 360892 - RNA, 19 nt, Artificial Sequence
  Description of Artificial Sequence: Synthetic oligonucleotide
acagagccgacggucgaau

SEQ ID NO: 360893 - RNA, 19 nt, Artificial Sequence
  Description of Artificial Sequence: Synthetic oligonucleotide
cugacaagacucugcgagu

SEQ ID NO: 360894 - RNA, 19 nt, Artificial Sequence
  Description of Artificial Sequence: Synthetic oligonucleotide
gagacucgaugauggcaua

SEQ ID NO: 360895 - RNA, 19 nt, Artificial Sequence
  Description of Artificial Sequence: Synthetic oligonucleotide
cugaggcgcugaaggaaca

SEQ ID NO: 360896 - RNA, 19 nt, Artificial Sequence
  Description of Artificial Sequence: Synthetic oligonucleotide
ugcggacacgacccugcuu

SEQ ID NO: 360897 - RNA, 19 nt, Artificial Sequence
  Description of Artificial Sequence: Synthetic oligonucleotide
auaauacaucccagucuuu

SEQ ID NO: 360898 - RNA, 19 nt, Artificial Sequence
  Description of Artificial Sequence: Synthetic oligonucleotide
gccaucucgcuuaaucaca

SEQ ID NO: 360899 - RNA, 19 nt, Artificial Sequence
  Description of Artificial Sequence: Synthetic oligonucleotide
agcaucugcuagaccuugu

SEQ ID NO: 360900 - RNA, 19 nt, Artificial Sequence
  Description of Artificial Sequence: Synthetic oligonucleotide
cuggauucgugauguaauu

SEQ ID NO: 360901 - RNA, 19 nt, Artificial Sequence
  Description of Artificial Sequence: Synthetic oligonucleotide
gacggucgaaugugagggu

SEQ ID NO: 360902 - RNA, 19 nt, Artificial Sequence
  Description of Artificial Sequence: Synthetic oligonucleotide
cgacgagacuuccuaaguc

SEQ ID NO: 360903 - RNA, 19 nt, Artificial Sequence
  Description of Artificial Sequence: Synthetic oligonucleotide
ggaggacgacgagacuucc

SEQ ID NO: 360904 - RNA, 19 nt, Artificial Sequence
  Description of Artificial Sequence: Synthetic oligonucleotide
cgcucaguaagaucuuuca

SEQ ID NO: 360905 - RNA, 19 nt, Artificial Sequence
  Description of Artificial Sequence: Synthetic oligonucleotide
cuucguagucaagguugca

SEQ ID NO: 360906 - RNA, 19 nt, Artificial Sequence
  Description of Artificial Sequence: Synthetic oligonucleotide
ggacgacgagacuuccuaa

SEQ ID NO: 360907 - RNA, 19 nt, Artificial Sequence
  Description of Artificial Sequence: Synthetic oligonucleotide
caauuccaaugggccgaug

SEQ ID NO: 360908 - RNA, 19 nt, Artificial Sequence
  Description of Artificial Sequence: Synthetic oligonucleotide
gcgguuggucccagcauug

SEQ ID NO: 360909 - RNA, 19 nt, Artificial Sequence
  Description of Artificial Sequence: Synthetic oligonucleotide
guauggggugcccgucucu

SEQ ID NO: 360910 - RNA, 19 nt, Artificial Sequence
  Description of Artificial Sequence: Synthetic oligonucleotide
gucgaaugugaggguugga

SEQ ID NO: 360911 - RNA, 19 nt, Artificial Sequence
  Description of Artificial Sequence: Synthetic oligonucleotide
cggucgaaugugaggguug

SEQ ID NO: 360912 - RNA, 19 nt, Artificial Sequence
  Description of Artificial Sequence: Synthetic oligonucleotide
cucuuccgauuacaggaau

SEQ ID NO: 360913 - RNA, 19 nt, Artificial Sequence
  Description of Artificial Sequence: Synthetic oligonucleotide
gcucuuccgauuacaggaa

SEQ ID NO: 360914 - RNA, 19 nt, Artificial Sequence
  Description of Artificial Sequence: Synthetic oligonucleotide
cgagcaguguuauuauaua

SEQ ID NO: 360915 - RNA, 19 nt, Artificial Sequence
  Description of Artificial Sequence: Synthetic oligonucleotide
cgaaugugaggguuggacu

SEQ ID NO: 360916 - RNA, 19 nt, Artificial Sequence
  Description of Artificial Sequence: Synthetic oligonucleotide
ggcgguuggucccagcauu

SEQ ID NO: 360917 - RNA, 19 nt, Artificial Sequence
  Description of Artificial Sequence: Synthetic oligonucleotide
gcuccauaauaaauaguuu

SEQ ID NO: 360918 - RNA, 19 nt, Artificial Sequence
  Description of Artificial Sequence: Synthetic oligonucleotide
ggacacucauuuggacaca

SEQ ID NO: 360919 - RNA, 19 nt, Artificial Sequence
  Description of Artificial Sequence: Synthetic oligonucleotide
cacgacccugcuucucaua

SEQ ID NO: 360920 - RNA, 19 nt, Artificial Sequence
  Description of Artificial Sequence: Synthetic oligonucleotide
ccccacuauacaggccuug

SEQ ID NO: 360921 - RNA, 19 nt, Artificial Sequence
  Description of Artificial Sequence: Synthetic oligonucleotide
ggugcccgucucugucuga

SEQ ID NO: 360922 - RNA, 19 nt, Artificial Sequence
  Description of Artificial Sequence: Synthetic oligonucleotide
cucgcucaguaagaucuuu

SEQ ID NO: 360923 - RNA, 19 nt, Artificial Sequence
  Description of Artificial Sequence: Synthetic oligonucleotide
cucugcgaguguagauguu

SEQ ID NO: 360924 - RNA, 19 nt, Artificial Sequence
  Description of Artificial Sequence: Synthetic oligonucleotide
ccaaggcuccagguaaaua

SEQ ID NO: 360925 - RNA, 19 nt, Artificial Sequence
  Description of Artificial Sequence: Synthetic oligonucleotide
gcuagaccuuguaccccaa

SEQ ID NO: 360926 - RNA, 19 nt, Artificial Sequence
  Description of Artificial Sequence: Synthetic oligonucleotide
cacaugcaucgccgccagu

SEQ ID NO: 360927 - RNA, 19 nt, Artificial Sequence
  Description of Artificial Sequence: Synthetic oligonucleotide
ggcggccaucucgcuuaau

SEQ ID NO: 360928 - RNA, 19 nt, Artificial Sequence
  Description of Artificial Sequence: Synthetic oligonucleotide
gaagacauagaucuugucc

SEQ ID NO: 360929 - RNA, 19 nt, Artificial Sequence
  Description of Artificial Sequence: Synthetic oligonucleotide
ugaauguacucauucauag

SEQ ID NO: 360930 - RNA, 19 nt, Artificial Sequence
  Description of Artificial Sequence: Synthetic oligonucleotide
uggacggaaacucagaagc

SEQ ID NO: 360931 - RNA, 19 nt, Artificial Sequence
  Description of Artificial Sequence: Synthetic oligonucleotide
ugaaucaauaucaagucaa

SEQ ID NO: 360932 - RNA, 19 nt, Artificial Sequence
  Description of Artificial Sequence: Synthetic oligonucleotide
uaaaccuggcaccagcugg

SEQ ID NO: 360933 - RNA, 19 nt, Artificial Sequence
  Description of Artificial Sequence: Synthetic oligonucleotide
uuggcuaaauacuggacgg

SEQ ID NO: 360934 - RNA, 19 nt, Artificial Sequence
  Description of Artificial Sequence: Synthetic oligonucleotide
caguggauagacaaaacgg

SEQ ID NO: 360935 - RNA, 19 nt, Artificial Sequence
  Description of Artificial Sequence: Synthetic oligonucleotide
auauggaugaccgagaaga

SEQ ID NO: 360936 - RNA, 19 nt, Artificial Sequence
  Description of Artificial Sequence: Synthetic oligonucleotide
aacuggacugacucacugc

SEQ ID NO: 360937 - RNA, 19 nt, Artificial Sequence
  Description of Artificial Sequence: Synthetic oligonucleotide
gaggguuguaccuaggccc

SEQ ID NO: 360938 - RNA, 19 nt, Artificial Sequence
  Description of Artificial Sequence: Synthetic oligonucleotide
aacacugagaagaaagcag

SEQ ID NO: 360939 - RNA, 19 nt, Artificial Sequence
  Description of Artificial Sequence: Synthetic oligonucleotide
ucucgcugcagaaugauga

SEQ ID NO: 360940 - RNA, 19 nt, Artificial Sequence
  Description of Artificial Sequence: Synthetic oligonucleotide
auguaguagagcugugugc

SEQ ID NO: 360941 - RNA, 19 nt, Artificial Sequence
  Description of Artificial Sequence: Synthetic oligonucleotide
  modified_base (7)..(7): a, c, u, g, unknown or other
aaaaccncgcccagaacgg

SEQ ID NO: 360942 - RNA, 19 nt, Artificial Sequence
  Description of Artificial Sequence: Synthetic oligonucleotide
ugugcaaggggacacugag

SEQ ID NO: 360943 - RNA, 19 nt, Artificial Sequence
  Description of Artificial Sequence: Synthetic oligonucleotide
agcucauggaguccaaucg

SEQ ID NO: 360944 - RNA, 19 nt, Artificial Sequence
  Description of Artificial Sequence: Synthetic oligonucleotide
acuaacacagaacuuggcu

SEQ ID NO: 360945 - RNA, 19 nt, Artificial Sequence
  Description of Artificial Sequence: Synthetic oligonucleotide
augcgguccauauaaagag

SEQ ID NO: 360946 - RNA, 19 nt, Artificial Sequence
  Description of Artificial Sequence: Synthetic oligonucleotide
ugcacuguaggcacuggcg

SEQ ID NO: 360947 - RNA, 19 nt, Artificial Sequence
  Description of Artificial Sequence: Synthetic oligonucleotide
uucucaccaacccuggugc

SEQ ID NO: 360948 - RNA, 19 nt, Artificial Sequence
  Description of Artificial Sequence: Synthetic oligonucleotide
aacggagaagaagaugacg

SEQ ID NO: 360949 - RNA, 19 nt, Artificial Sequence
  Description of Artificial Sequence: Synthetic oligonucleotide
ucuuauugaauguacucau

SEQ ID NO: 360950 - RNA, 19 nt, Artificial Sequence
  Description of Artificial Sequence: Synthetic oligonucleotide
cagaauugcaaccauagca

SEQ ID NO: 360951 - RNA, 19 nt, Artificial Sequence
  Description of Artificial Sequence: Synthetic oligonucleotide
ucauggaguccaaucgugg

SEQ ID NO: 360952 - RNA, 19 nt, Artificial Sequence
  Description of Artificial Sequence: Synthetic oligonucleotide
ugagaagugaccucugagu

SEQ ID NO: 360953 - RNA, 19 nt, Artificial Sequence
  Description of Artificial Sequence: Synthetic oligonucleotide
auugaauguacucauucau

SEQ ID NO: 360954 - RNA, 19 nt, Artificial Sequence
  Description of Artificial Sequence: Synthetic oligonucleotide
auggaguccaaucguggcc

SEQ ID NO: 360955 - RNA, 19 nt, Artificial Sequence
  Description of Artificial Sequence: Synthetic oligonucleotide
augaccgagaagacgaucc

SEQ ID NO: 360956 - RNA, 19 nt, Artificial Sequence
  Description of Artificial Sequence: Synthetic oligonucleotide
ugcaaccauagcaugagac

SEQ ID NO: 360957 - RNA, 19 nt, Artificial Sequence
  Description of Artificial Sequence: Synthetic oligonucleotide
aggccuuagcaccauaaac

SEQ ID NO: 360958 - RNA, 19 nt, Artificial Sequence
  Description of Artificial Sequence: Synthetic oligonucleotide
uguaguagagcugugugcu

SEQ ID NO: 360959 - RNA, 19 nt, Artificial Sequence
  Description of Artificial Sequence: Synthetic oligonucleotide
agaacggagaagaagauga

SEQ ID NO: 360960 - RNA, 19 nt, Artificial Sequence
  Description of Artificial Sequence: Synthetic oligonucleotide
uguagacccagagagaacu

SEQ ID NO: 360961 - RNA, 19 nt, Artificial Sequence
  Description of Artificial Sequence: Synthetic oligonucleotide
aaacuggacugacucacug

SEQ ID NO: 360962 - RNA, 19 nt, Artificial Sequence
  Description of Artificial Sequence: Synthetic oligonucleotide
agugccagaugucaugguc

SEQ ID NO: 360963 - RNA, 19 nt, Artificial Sequence
  Description of Artificial Sequence: Synthetic oligonucleotide
gaugacgauggccaagcag

SEQ ID NO: 360964 - RNA, 19 nt, Artificial Sequence
  Description of Artificial Sequence: Synthetic oligonucleotide
acaaaacggauggacagac

SEQ ID NO: 360965 - RNA, 19 nt, Artificial Sequence
  Description of Artificial Sequence: Synthetic oligonucleotide
ugucuuauugaauguacuc

SEQ ID NO: 360966 - RNA, 19 nt, Artificial Sequence
  Description of Artificial Sequence: Synthetic oligonucleotide
cuaguaugcugcuagaaga

SEQ ID NO: 360967 - RNA, 19 nt, Artificial Sequence
  Description of Artificial Sequence: Synthetic oligonucleotide
guaccuaggcccuugcagg

SEQ ID NO: 360968 - RNA, 19 nt, Artificial Sequence
  Description of Artificial Sequence: Synthetic oligonucleotide
aaucauguacaugaaugga

SEQ ID NO: 360969 - RNA, 19 nt, Artificial Sequence
  Description of Artificial Sequence: Synthetic oligonucleotide
ucuuaggcccauaugacua

SEQ ID NO: 360970 - RNA, 19 nt, Artificial Sequence
  Description of Artificial Sequence: Synthetic oligonucleotide
aggcccauaugacuaacac

SEQ ID NO: 360971 - RNA, 19 nt, Artificial Sequence
  Description of Artificial Sequence: Synthetic oligonucleotide
uauugcuuggugcgaauga

SEQ ID NO: 360972 - RNA, 19 nt, Artificial Sequence
  Description of Artificial Sequence: Synthetic oligonucleotide
aaugguugcuauguuccag

SEQ ID NO: 360973 - RNA, 19 nt, Artificial Sequence
  Description of Artificial Sequence: Synthetic oligonucleotide
uaacacagaacuuggcuaa

SEQ ID NO: 360974 - RNA, 19 nt, Artificial Sequence
  Description of Artificial Sequence: Synthetic oligonucleotide
aagucaucauccaauguca

SEQ ID NO: 360975 - RNA, 19 nt, Artificial Sequence
  Description of Artificial Sequence: Synthetic oligonucleotide
ugcgguccauauaaagagg

SEQ ID NO: 360976 - RNA, 19 nt, Artificial Sequence
  Description of Artificial Sequence: Synthetic oligonucleotide
gacccaaacauggcaaugg

SEQ ID NO: 360977 - RNA, 19 nt, Artificial Sequence
  Description of Artificial Sequence: Synthetic oligonucleotide
aagucauuggggcgcauga

SEQ ID NO: 360978 - RNA, 19 nt, Artificial Sequence
  Description of Artificial Sequence: Synthetic oligonucleotide
uugugauugaucucucgcu

SEQ ID NO: 360979 - RNA, 19 nt, Artificial Sequence
  Description of Artificial Sequence: Synthetic oligonucleotide
gaauugcaaccauagcaug

SEQ ID NO: 360980 - RNA, 19 nt, Artificial Sequence
  Description of Artificial Sequence: Synthetic oligonucleotide
uaguaugcugcuagaagac

SEQ ID NO: 360981 - RNA, 19 nt, Artificial Sequence
  Description of Artificial Sequence: Synthetic oligonucleotide
gaguccuauagugaggcag

SEQ ID NO: 360982 - RNA, 19 nt, Artificial Sequence
  Description of Artificial Sequence: Synthetic oligonucleotide
agaagaccgcaaugguugc

SEQ ID NO: 360983 - RNA, 19 nt, Artificial Sequence
  Description of Artificial Sequence: Synthetic oligonucleotide
cuuucgugccagaucagcc

SEQ ID NO: 360984 - RNA, 19 nt, Artificial Sequence
  Description of Artificial Sequence: Synthetic oligonucleotide
uugggacucacacccuugg

SEQ ID NO: 360985 - RNA, 19 nt, Artificial Sequence
  Description of Artificial Sequence: Synthetic oligonucleotide
uggaguccaaucguggccg

SEQ ID NO: 360986 - RNA, 19 nt, Artificial Sequence
  Description of Artificial Sequence: Synthetic oligonucleotide
auaucaagucaaauguguc

SEQ ID NO: 360987 - RNA, 19 nt, Artificial Sequence
  Description of Artificial Sequence: Synthetic oligonucleotide
agaaugaaauacauuccag

SEQ ID NO: 360988 - RNA, 19 nt, Artificial Sequence
  Description of Artificial Sequence: Synthetic oligonucleotide
gcaaucauguacaugaaug

SEQ ID NO: 360989 - RNA, 19 nt, Artificial Sequence
  Description of Artificial Sequence: Synthetic oligonucleotide
agcccugaguccuauagug

SEQ ID NO: 360990 - RNA, 19 nt, Artificial Sequence
  Description of Artificial Sequence: Synthetic oligonucleotide
gauauggaugaccgagaag

SEQ ID NO: 360991 - RNA, 19 nt, Artificial Sequence
  Description of Artificial Sequence: Synthetic oligonucleotide
accaccgucugauagguga

SEQ ID NO: 360992 - RNA, 19 nt, Artificial Sequence
  Description of Artificial Sequence: Synthetic oligonucleotide
uguguucccgcaaagucau

SEQ ID NO: 360993 - RNA, 19 nt, Artificial Sequence
  Description of Artificial Sequence: Synthetic oligonucleotide
ucugauaggugaugaccag

SEQ ID NO: 360994 - RNA, 19 nt, Artificial Sequence
  Description of Artificial Sequence: Synthetic oligonucleotide
ccuauagugaggcagggcc

SEQ ID NO: 360995 - RNA, 19 nt, Artificial Sequence
  Description of Artificial Sequence: Synthetic oligonucleotide
auugcuuggugcgaaugac

SEQ ID NO: 360996 - RNA, 19 nt, Artificial Sequence
  Description of Artificial Sequence: Synthetic oligonucleotide
cagaaugaaauacauucca

SEQ ID NO: 360997 - RNA, 19 nt, Artificial Sequence
  Description of Artificial Sequence: Synthetic oligonucleotide
uuucgugccagaucagcca

SEQ ID NO: 360998 - RNA, 19 nt, Artificial Sequence
  Description of Artificial Sequence: Synthetic oligonucleotide
agaauugcaaccauagcau

SEQ ID NO: 360999 - RNA, 19 nt, Artificial Sequence
  Description of Artificial Sequence: Synthetic oligonucleotide
uagaggucauuucgcauca

SEQ ID NO: 361000 - RNA, 19 nt, Artificial Sequence
  Description of Artificial Sequence: Synthetic oligonucleotide
aaugugucauagucauccu

SEQ ID NO: 361001 - RNA, 19 nt, Artificial Sequence
  Description of Artificial Sequence: Synthetic oligonucleotide
caccaaggcucuuaggccc

SEQ ID NO: 361002 - RNA, 19 nt, Artificial Sequence
  Description of Artificial Sequence: Synthetic oligonucleotide
cauggaguccaaucguggc

SEQ ID NO: 361003 - RNA, 19 nt, Artificial Sequence
  Description of Artificial Sequence: Synthetic oligonucleotide
aguaccaugcgguccauau

SEQ ID NO: 361004 - RNA, 19 nt, Artificial Sequence
  Description of Artificial Sequence: Synthetic oligonucleotide
uucagcaugcagaggccag

SEQ ID NO: 361005 - RNA, 19 nt, Artificial Sequence
  Description of Artificial Sequence: Synthetic oligonucleotide
uagacccagagagaacugg

SEQ ID NO: 361006 - RNA, 19 nt, Artificial Sequence
  Description of Artificial Sequence: Synthetic oligonucleotide
ucccuuucuaaaacaggca

SEQ ID NO: 361007 - RNA, 19 nt, Artificial Sequence
  Description of Artificial Sequence: Synthetic oligonucleotide
caaacggagagccagugga

SEQ ID NO: 361008 - RNA, 19 nt, Artificial Sequence
  Description of Artificial Sequence: Synthetic oligonucleotide
ggaaaugauauggaugacc

SEQ ID NO: 361009 - RNA, 19 nt, Artificial Sequence
  Description of Artificial Sequence: Synthetic oligonucleotide
cauuccggcagcuggucgg

SEQ ID NO: 361010 - RNA, 19 nt, Artificial Sequence
  Description of Artificial Sequence: Synthetic oligonucleotide
uggcguugauaucugggug

SEQ ID NO: 361011 - RNA, 19 nt, Artificial Sequence
  Description of Artificial Sequence: Synthetic oligonucleotide
acugacucacugcucaaga

SEQ ID NO: 361012 - RNA, 19 nt, Artificial Sequence
  Description of Artificial Sequence: Synthetic oligonucleotide
gaauguacucauucauaga

SEQ ID NO: 361013 - RNA, 19 nt, Artificial Sequence
  Description of Artificial Sequence: Synthetic oligonucleotide
ucuccuaccugcauccauc

SEQ ID NO: 361014 - RNA, 19 nt, Artificial Sequence
  Description of Artificial Sequence: Synthetic oligonucleotide
gucuuauugaauguacuca

SEQ ID NO: 361015 - RNA, 19 nt, Artificial Sequence
  Description of Artificial Sequence: Synthetic oligonucleotide
cccaacacugagaagaaag

SEQ ID NO: 361016 - RNA, 19 nt, Artificial Sequence
  Description of Artificial Sequence: Synthetic oligonucleotide
ugggugcccgcuuucgugg

SEQ ID NO: 361017 - RNA, 19 nt, Artificial Sequence
  Description of Artificial Sequence: Synthetic oligonucleotide
aaagucauuggggcgcaug

SEQ ID NO: 361018 - RNA, 19 nt, Artificial Sequence
  Description of Artificial Sequence: Synthetic oligonucleotide
gaagggguccugcacugag

SEQ ID NO: 361019 - RNA, 19 nt, Artificial Sequence
  Description of Artificial Sequence: Synthetic oligonucleotide
aguccuauagugaggcagg

SEQ ID NO: 361020 - RNA, 19 nt, Artificial Sequence
  Description of Artificial Sequence: Synthetic oligonucleotide
caugaauggaggugggauc

SEQ ID NO: 361021 - RNA, 19 nt, Artificial Sequence
  Description of Artificial Sequence: Synthetic oligonucleotide
cuaacacagaacuuggcua

SEQ ID NO: 361022 - RNA, 19 nt, Artificial Sequence
  Description of Artificial Sequence: Synthetic oligonucleotide
caggaugcagucacgguug

SEQ ID NO: 361023 - RNA, 19 nt, Artificial Sequence
  Description of Artificial Sequence: Synthetic oligonucleotide
gaagacgauccagaaggcc

SEQ ID NO: 361024 - RNA, 19 nt, Artificial Sequence
  Description of Artificial Sequence: Synthetic oligonucleotide
gaggacccaacacugagaa

SEQ ID NO: 361025 - RNA, 19 nt, Artificial Sequence
  Description of Artificial Sequence: Synthetic oligonucleotide
augguugcuauguuccaga

SEQ ID NO: 361026 - RNA, 19 nt, Artificial Sequence
  Description of Artificial Sequence: Synthetic oligonucleotide
ccgugaaagaggcaaaagg

SEQ ID NO: 361027 - RNA, 19 nt, Artificial Sequence
  Description of Artificial Sequence: Synthetic oligonucleotide
ggaagggcguagaagaccg

SEQ ID NO: 361028 - RNA, 19 nt, Artificial Sequence
  Description of Artificial Sequence: Synthetic oligonucleotide
uucgugccagaucagccac

SEQ ID NO: 361029 - RNA, 19 nt, Artificial Sequence
  Description of Artificial Sequence: Synthetic oligonucleotide
uuccgcaaaacacguuugu

SEQ ID NO: 361030 - RNA, 19 nt, Artificial Sequence
  Description of Artificial Sequence: Synthetic oligonucleotide
ggacccaacacugagaaga

SEQ ID NO: 361031 - RNA, 19 nt, Artificial Sequence
  Description of Artificial Sequence: Synthetic oligonucleotide
acuggcguugauaucuggg

SEQ ID NO: 361032 - RNA, 19 nt, Artificial Sequence
  Description of Artificial Sequence: Synthetic oligonucleotide
acgauggccaagcaggcau

SEQ ID NO: 361033 - RNA, 19 nt, Artificial Sequence
  Description of Artificial Sequence: Synthetic oligonucleotide
accgcaaugguugcuaugu

SEQ ID NO: 361034 - RNA, 19 nt, Artificial Sequence
  Description of Artificial Sequence: Synthetic oligonucleotide
agcuggucggaugagaagu

SEQ ID NO: 361035 - RNA, 19 nt, Artificial Sequence
  Description of Artificial Sequence: Synthetic oligonucleotide
caauuuggccaguguuugg

SEQ ID NO: 361036 - RNA, 19 nt, Artificial Sequence
  Description of Artificial Sequence: Synthetic oligonucleotide
uggucggaugagaagugac

SEQ ID NO: 361037 - RNA, 19 nt, Artificial Sequence
  Description of Artificial Sequence: Synthetic oligonucleotide
ugcuauguuccagaaguaa

SEQ ID NO: 361038 - RNA, 19 nt, Artificial Sequence
  Description of Artificial Sequence: Synthetic oligonucleotide
ggugcuggcaucauuccgg

SEQ ID NO: 361039 - RNA, 19 nt, Artificial Sequence
  Description of Artificial Sequence: Synthetic oligonucleotide
uguccuuucgugccagauc

SEQ ID NO: 361040 - RNA, 19 nt, Artificial Sequence
  Description of Artificial Sequence: Synthetic oligonucleotide
ugauaauguugcccaugac

SEQ ID NO: 361041 - RNA, 19 nt, Artificial Sequence
  Description of Artificial Sequence: Synthetic oligonucleotide
ugacuccauguaaacgcca

SEQ ID NO: 361042 - RNA, 19 nt, Artificial Sequence
  Description of Artificial Sequence: Synthetic oligonucleotide
auguaaacgccaaggacca

SEQ ID NO: 361043 - RNA, 19 nt, Artificial Sequence
  Description of Artificial Sequence: Synthetic oligonucleotide
uuggggcgcaugaugaguc

SEQ ID NO: 361044 - RNA, 19 nt, Artificial Sequence
  Description of Artificial Sequence: Synthetic oligonucleotide
ugaccgagaagacgaucca

SEQ ID NO: 361045 - RNA, 19 nt, Artificial Sequence
  Description of Artificial Sequence: Synthetic oligonucleotide
agcucuaagcacaggguag

SEQ ID NO: 361046 - RNA, 19 nt, Artificial Sequence
  Description of Artificial Sequence: Synthetic oligonucleotide
ggcguugauaucugggugc

SEQ ID NO: 361047 - RNA, 19 nt, Artificial Sequence
  Description of Artificial Sequence: Synthetic oligonucleotide
gucugauaggugaugacca

SEQ ID NO: 361048 - RNA, 19 nt, Artificial Sequence
  Description of Artificial Sequence: Synthetic oligonucleotide
acuccauguaaacgccaag

SEQ ID NO: 361049 - RNA, 19 nt, Artificial Sequence
  Description of Artificial Sequence: Synthetic oligonucleotide
agcaacuguccugagucag

SEQ ID NO: 361050 - RNA, 19 nt, Artificial Sequence
  Description of Artificial Sequence: Synthetic oligonucleotide
gaacaaacagggaccuggc

SEQ ID NO: 361051 - RNA, 19 nt, Artificial Sequence
  Description of Artificial Sequence: Synthetic oligonucleotide
gcguagaagaccgcaaugg

SEQ ID NO: 361052 - RNA, 19 nt, Artificial Sequence
  Description of Artificial Sequence: Synthetic oligonucleotide
gacggaaacucagaagcca

SEQ ID NO: 361053 - RNA, 19 nt, Artificial Sequence
  Description of Artificial Sequence: Synthetic oligonucleotide
cugauaggugaugaccagc

SEQ ID NO: 361054 - RNA, 19 nt, Artificial Sequence
  Description of Artificial Sequence: Synthetic oligonucleotide
gacauagaucuugucccgc

SEQ ID NO: 361055 - RNA, 19 nt, Artificial Sequence
  Description of Artificial Sequence: Synthetic oligonucleotide
uaccuaggcccuugcaggc

SEQ ID NO: 361056 - RNA, 19 nt, Artificial Sequence
  Description of Artificial Sequence: Synthetic oligonucleotide
ccuaguaugcugcuagaag

SEQ ID NO: 361057 - RNA, 19 nt, Artificial Sequence
  Description of Artificial Sequence: Synthetic oligonucleotide
cugcucccgugaaagaggc

SEQ ID NO: 361058 - RNA, 19 nt, Artificial Sequence
  Description of Artificial Sequence: Synthetic oligonucleotide
gguugugauugaucucucg

SEQ ID NO: 361059 - RNA, 19 nt, Artificial Sequence
  Description of Artificial Sequence: Synthetic oligonucleotide
auauugcuuggugcgaaug

SEQ ID NO: 361060 - RNA, 19 nt, Artificial Sequence
  Description of Artificial Sequence: Synthetic oligonucleotide
gggacaaacggagagccag

SEQ ID NO: 361061 - RNA, 19 nt, Artificial Sequence
  Description of Artificial Sequence: Synthetic oligonucleotide
gaaucaauaucaagucaaa

SEQ ID NO: 361062 - RNA, 19 nt, Artificial Sequence
  Description of Artificial Sequence: Synthetic oligonucleotide
cucgcugcagaaugaugag

SEQ ID NO: 361063 - RNA, 19 nt, Artificial Sequence
  Description of Artificial Sequence: Synthetic oligonucleotide
cuugguggagugaaaugga

SEQ ID NO: 361064 - RNA, 19 nt, Artificial Sequence
  Description of Artificial Sequence: Synthetic oligonucleotide
uaggcccauaugacuaaca

SEQ ID NO: 361065 - RNA, 19 nt, Artificial Sequence
  Description of Artificial Sequence: Synthetic oligonucleotide
gucacgguuguguucccgc

SEQ ID NO: 361066 - RNA, 19 nt, Artificial Sequence
  Description of Artificial Sequence: Synthetic oligonucleotide
gacaaacggagagccagug

SEQ ID NO: 361067 - RNA, 19 nt, Artificial Sequence
  Description of Artificial Sequence: Synthetic oligonucleotide
gacuaacacagaacuuggc

SEQ ID NO: 361068 - RNA, 19 nt, Artificial Sequence
  Description of Artificial Sequence: Synthetic oligonucleotide
caaucguggccgaguaccc

SEQ ID NO: 361069 - RNA, 19 nt, Artificial Sequence
  Description of Artificial Sequence: Synthetic oligonucleotide
cccgcaaagucauuggggc

SEQ ID NO: 361070 - RNA, 19 nt, Artificial Sequence
  Description of Artificial Sequence: Synthetic oligonucleotide
auaugcacuguaggcacug

SEQ ID NO: 361071 - RNA, 19 nt, Artificial Sequence
  Description of Artificial Sequence: Synthetic oligonucleotide
ggaggguuguaccuaggcc

SEQ ID NO: 361072 - RNA, 19 nt, Artificial Sequence
  Description of Artificial Sequence: Synthetic oligonucleotide
guaaacgccaaggaccaga

SEQ ID NO: 361073 - RNA, 19 nt, Artificial Sequence
  Description of Artificial Sequence: Synthetic oligonucleotide
  modified_base (5)..(5): a, c, u, g, unknown or other
aaccncgcccagaacggag

SEQ ID NO: 361074 - RNA, 19 nt, Artificial Sequence
  Description of Artificial Sequence: Synthetic oligonucleotide
caacugcaaggcucggugc

SEQ ID NO: 361075 - RNA, 19 nt, Artificial Sequence
  Description of Artificial Sequence: Synthetic oligonucleotide
gaaaugggauagggcauug

SEQ ID NO: 361076 - RNA, 19 nt, Artificial Sequence
  Description of Artificial Sequence: Synthetic oligonucleotide
uaugcacuguaggcacugg

SEQ ID NO: 361077 - RNA, 19 nt, Artificial Sequence
  Description of Artificial Sequence: Synthetic oligonucleotide
aaacagggaccuggcaugu

SEQ ID NO: 361078 - RNA, 19 nt, Artificial Sequence
  Description of Artificial Sequence: Synthetic oligonucleotide
uugcaaccauagcaugaga

SEQ ID NO: 361079 - RNA, 19 nt, Artificial Sequence
  Description of Artificial Sequence: Synthetic oligonucleotide
gacaaaacggauggacaga

SEQ ID NO: 361080 - RNA, 19 nt, Artificial Sequence
  Description of Artificial Sequence: Synthetic oligonucleotide
gggacucacacccuuggug

SEQ ID NO: 361081 - RNA, 19 nt, Artificial Sequence
  Description of Artificial Sequence: Synthetic oligonucleotide
uuucgugguagagcuucag

SEQ ID NO: 361082 - RNA, 19 nt, Artificial Sequence
  Description of Artificial Sequence: Synthetic oligonucleotide
uuguaccuaggcccuugca

SEQ ID NO: 361083 - RNA, 19 nt, Artificial Sequence
  Description of Artificial Sequence: Synthetic oligonucleotide
caauggcacugagaggucc

SEQ ID NO: 361084 - RNA, 19 nt, Artificial Sequence
  Description of Artificial Sequence: Synthetic oligonucleotide
guccauauaaagaggccca

SEQ ID NO: 361085 - RNA, 19 nt, Artificial Sequence
  Description of Artificial Sequence: Synthetic oligonucleotide
cuguacuguguccaaguca

SEQ ID NO: 361086 - RNA, 19 nt, Artificial Sequence
  Description of Artificial Sequence: Synthetic oligonucleotide
gugacuccauguaaacacc

SEQ ID NO: 361087 - RNA, 19 nt, Artificial Sequence
  Description of Artificial Sequence: Synthetic oligonucleotide
ccaaucguggccgaguacc

SEQ ID NO: 361088 - RNA, 19 nt, Artificial Sequence
  Description of Artificial Sequence: Synthetic oligonucleotide
ggagaaugaaggcaugaaa

SEQ ID NO: 361089 - RNA, 19 nt, Artificial Sequence
  Description of Artificial Sequence: Synthetic oligonucleotide
gugacuccauguaaacgcc

SEQ ID NO: 361090 - RNA, 19 nt, Artificial Sequence
  Description of Artificial Sequence: Synthetic oligonucleotide
aagaccgcaaugguugcua

SEQ ID NO: 361091 - RNA, 19 nt, Artificial Sequence
  Description of Artificial Sequence: Synthetic oligonucleotide
uacaugaauggagguggga

SEQ ID NO: 361092 - RNA, 19 nt, Artificial Sequence
  Description of Artificial Sequence: Synthetic oligonucleotide
uccuaguaugcugcuagaa

SEQ ID NO: 361093 - RNA, 19 nt, Artificial Sequence
  Description of Artificial Sequence: Synthetic oligonucleotide
ucacgguuguguucccgca

SEQ ID NO: 361094 - RNA, 19 nt, Artificial Sequence
  Description of Artificial Sequence: Synthetic oligonucleotide
agcaauuuggccaguguuu

SEQ ID NO: 361095 - RNA, 19 nt, Artificial Sequence
  Description of Artificial Sequence: Synthetic oligonucleotide
cugugggugugcaagggga

SEQ ID NO: 361096 - RNA, 19 nt, Artificial Sequence
  Description of Artificial Sequence: Synthetic oligonucleotide
uccuauagugaggcagggc

SEQ ID NO: 361097 - RNA, 19 nt, Artificial Sequence
  Description of Artificial Sequence: Synthetic oligonucleotide
gcaauuuggccaguguuug

SEQ ID NO: 361098 - RNA, 19 nt, Artificial Sequence
  Description of Artificial Sequence: Synthetic oligonucleotide
uggcuaaauacuggacgga

SEQ ID NO: 361099 - RNA, 19 nt, Artificial Sequence
  Description of Artificial Sequence: Synthetic oligonucleotide
guuguaccuaggcccuugc

SEQ ID NO: 361100 - RNA, 19 nt, Artificial Sequence
  Description of Artificial Sequence: Synthetic oligonucleotide
cccugaguccuauagugag

SEQ ID NO: 361101 - RNA, 19 nt, Artificial Sequence
  Description of Artificial Sequence: Synthetic oligonucleotide
caggaguaccaugcggucc

SEQ ID NO: 361102 - RNA, 19 nt, Artificial Sequence
  Description of Artificial Sequence: Synthetic oligonucleotide
uugcuauguuccagaagua

SEQ ID NO: 361103 - RNA, 19 nt, Artificial Sequence
  Description of Artificial Sequence: Synthetic oligonucleotide
aacggagagccaguggaua

SEQ ID NO: 361104 - RNA, 19 nt, Artificial Sequence
  Description of Artificial Sequence: Synthetic oligonucleotide
cucagagccccaugaggug

SEQ ID NO: 361105 - RNA, 19 nt, Artificial Sequence
  Description of Artificial Sequence: Synthetic oligonucleotide
cuuggugcgaaugacauuu

SEQ ID NO: 361106 - RNA, 19 nt, Artificial Sequence
  Description of Artificial Sequence: Synthetic oligonucleotide
ugagagcaagggcgggcug

SEQ ID NO: 361107 - RNA, 19 nt, Artificial Sequence
  Description of Artificial Sequence: Synthetic oligonucleotide
aaucguggccgaguaccca

SEQ ID NO: 361108 - RNA, 19 nt, Artificial Sequence
  Description of Artificial Sequence: Synthetic oligonucleotide
gucccucccuuucuaaaac

SEQ ID NO: 361109 - RNA, 19 nt, Artificial Sequence
  Description of Artificial Sequence: Synthetic oligonucleotide
agcaggaugcagucacggu

SEQ ID NO: 361110 - RNA, 19 nt, Artificial Sequence
  Description of Artificial Sequence: Synthetic oligonucleotide
cauuucgcaucagggcccg

SEQ ID NO: 361111 - RNA, 19 nt, Artificial Sequence
  Description of Artificial Sequence: Synthetic oligonucleotide
uccaaucguggccgaguac

SEQ ID NO: 361112 - RNA, 19 nt, Artificial Sequence
  Description of Artificial Sequence: Synthetic oligonucleotide
aguugggacucacacccuu

SEQ ID NO: 361113 - RNA, 19 nt, Artificial Sequence
  Description of Artificial Sequence: Synthetic oligonucleotide
gaccgcaaugguugcuaug

SEQ ID NO: 361114 - RNA, 19 nt, Artificial Sequence
  Description of Artificial Sequence: Synthetic oligonucleotide
gagauauugcuuggugcga

SEQ ID NO: 361115 - RNA, 19 nt, Artificial Sequence
  Description of Artificial Sequence: Synthetic oligonucleotide
accgucugauaggugauga

SEQ ID NO: 361116 - RNA, 19 nt, Artificial Sequence
  Description of Artificial Sequence: Synthetic oligonucleotide
gugcuggacagagaaucag

SEQ ID NO: 361117 - RNA, 19 nt, Artificial Sequence
  Description of Artificial Sequence: Synthetic oligonucleotide
  modified_base (6)..(6): a, c, u, g, unknown or other
aaaccncgcccagaacgga

SEQ ID NO: 361118 - RNA, 19 nt, Artificial Sequence
  Description of Artificial Sequence: Synthetic oligonucleotide
guccuauagugaggcaggg

SEQ ID NO: 361119 - RNA, 19 nt, Artificial Sequence
  Description of Artificial Sequence: Synthetic oligonucleotide
gcgguccauauaaagaggc

SEQ ID NO: 361120 - RNA, 19 nt, Artificial Sequence
  Description of Artificial Sequence: Synthetic oligonucleotide
cacuggcguugauaucugg

SEQ ID NO: 361121 - RNA, 19 nt, Artificial Sequence
  Description of Artificial Sequence: Synthetic oligonucleotide
gggugacuccauguaaacg

SEQ ID NO: 361122 - RNA, 19 nt, Artificial Sequence
  Description of Artificial Sequence: Synthetic oligonucleotide
aaacggagagccaguggau

SEQ ID NO: 361123 - RNA, 19 nt, Artificial Sequence
  Description of Artificial Sequence: Synthetic oligonucleotide
aguccaaucguggccgagu

SEQ ID NO: 361124 - RNA, 19 nt, Artificial Sequence
  Description of Artificial Sequence: Synthetic oligonucleotide
agucacgguuguguucccg

SEQ ID NO: 361125 - RNA, 19 nt, Artificial Sequence
  Description of Artificial Sequence: Synthetic oligonucleotide
uguaaacgccaaggaccag

SEQ ID NO: 361126 - RNA, 19 nt, Artificial Sequence
  Description of Artificial Sequence: Synthetic oligonucleotide
aucagggcccgguugugau

SEQ ID NO: 361127 - RNA, 19 nt, Artificial Sequence
  Description of Artificial Sequence: Synthetic oligonucleotide
aucugggugcccgcuuucg

SEQ ID NO: 361128 - RNA, 19 nt, Artificial Sequence
  Description of Artificial Sequence: Synthetic oligonucleotide
gugccagaugucaugguca

SEQ ID NO: 361129 - RNA, 19 nt, Artificial Sequence
  Description of Artificial Sequence: Synthetic oligonucleotide
aggacccaacacugagaag

SEQ ID NO: 361130 - RNA, 19 nt, Artificial Sequence
  Description of Artificial Sequence: Synthetic oligonucleotide
ggucggaugagaagugacc

SEQ ID NO: 361131 - RNA, 19 nt, Artificial Sequence
  Description of Artificial Sequence: Synthetic oligonucleotide
uggggcgcaugaugagucc

SEQ ID NO: 361132 - RNA, 19 nt, Artificial Sequence
  Description of Artificial Sequence: Synthetic oligonucleotide
accauaaaccuggcaccag

SEQ ID NO: 361133 - RNA, 19 nt, Artificial Sequence
  Description of Artificial Sequence: Synthetic oligonucleotide
uuggugcuaugguggcacc

SEQ ID NO: 361134 - RNA, 19 nt, Artificial Sequence
  Description of Artificial Sequence: Synthetic oligonucleotide
gacuccauguaaacgccaa

SEQ ID NO: 361135 - RNA, 19 nt, Artificial Sequence
  Description of Artificial Sequence: Synthetic oligonucleotide
uuccagcggcccauguagu

SEQ ID NO: 361136 - RNA, 19 nt, Artificial Sequence
  Description of Artificial Sequence: Synthetic oligonucleotide
cucuaagcacaggguagag

SEQ ID NO: 361137 - RNA, 19 nt, Artificial Sequence
  Description of Artificial Sequence: Synthetic oligonucleotide
uaucugggugcccgcuuuc

SEQ ID NO: 361138 - RNA, 19 nt, Artificial Sequence
  Description of Artificial Sequence: Synthetic oligonucleotide
guccauaugcagccagaga

SEQ ID NO: 361139 - RNA, 19 nt, Artificial Sequence
  Description of Artificial Sequence: Synthetic oligonucleotide
ggaugcagucuguguacag

SEQ ID NO: 361140 - RNA, 19 nt, Artificial Sequence
  Description of Artificial Sequence: Synthetic oligonucleotide
gcauccauccuggugggcc

SEQ ID NO: 361141 - RNA, 19 nt, Artificial Sequence
  Description of Artificial Sequence: Synthetic oligonucleotide
agacgauccagaaggccgu

SEQ ID NO: 361142 - RNA, 19 nt, Artificial Sequence
  Description of Artificial Sequence: Synthetic oligonucleotide
ucccgugaaagaggcaaaa

SEQ ID NO: 361143 - RNA, 19 nt, Artificial Sequence
  Description of Artificial Sequence: Synthetic oligonucleotide
uccuaccugcauccauccu

SEQ ID NO: 361144 - RNA, 19 nt, Artificial Sequence
  Description of Artificial Sequence: Synthetic oligonucleotide
cuuaggcccauaugacuaa

SEQ ID NO: 361145 - RNA, 19 nt, Artificial Sequence
  Description of Artificial Sequence: Synthetic oligonucleotide
agaugacgauggccaagca

SEQ ID NO: 361146 - RNA, 19 nt, Artificial Sequence
  Description of Artificial Sequence: Synthetic oligonucleotide
ggauagggcauugccuucc

SEQ ID NO: 361147 - RNA, 19 nt, Artificial Sequence
  Description of Artificial Sequence: Synthetic oligonucleotide
ggcccauaugacuaacaca

SEQ ID NO: 361148 - RNA, 19 nt, Artificial Sequence
  Description of Artificial Sequence: Synthetic oligonucleotide
gaggaggguuguaccuagg

SEQ ID NO: 361149 - RNA, 19 nt, Artificial Sequence
  Description of Artificial Sequence: Synthetic oligonucleotide
auagggcauugccuuccca

SEQ ID NO: 361150 - RNA, 19 nt, Artificial Sequence
  Description of Artificial Sequence: Synthetic oligonucleotide
auacauuccaggaccccaa

SEQ ID NO: 361151 - RNA, 19 nt, Artificial Sequence
  Description of Artificial Sequence: Synthetic oligonucleotide
ugcggcggaagaugccaga

SEQ ID NO: 361152 - RNA, 19 nt, Artificial Sequence
  Description of Artificial Sequence: Synthetic oligonucleotide
cucuuaggcccauaugacu

SEQ ID NO: 361153 - RNA, 19 nt, Artificial Sequence
  Description of Artificial Sequence: Synthetic oligonucleotide
aggcacuggcguugauauc

SEQ ID NO: 361154 - RNA, 19 nt, Artificial Sequence
  Description of Artificial Sequence: Synthetic oligonucleotide
uggguccuaguaugcugcu

SEQ ID NO: 361155 - RNA, 19 nt, Artificial Sequence
  Description of Artificial Sequence: Synthetic oligonucleotide
aggguuguaccuaggcccu

SEQ ID NO: 361156 - RNA, 19 nt, Artificial Sequence
  Description of Artificial Sequence: Synthetic oligonucleotide
caaaacggauggacagaca

SEQ ID NO: 361157 - RNA, 19 nt, Artificial Sequence
  Description of Artificial Sequence: Synthetic oligonucleotide
cgucugauaggugaugacc

SEQ ID NO: 361158 - RNA, 19 nt, Artificial Sequence
  Description of Artificial Sequence: Synthetic oligonucleotide
cuggacugacucacugcuc

SEQ ID NO: 361159 - RNA, 19 nt, Artificial Sequence
  Description of Artificial Sequence: Synthetic oligonucleotide
guagacccagagagaacug

SEQ ID NO: 361160 - RNA, 19 nt, Artificial Sequence
  Description of Artificial Sequence: Synthetic oligonucleotide
cagcucuaagcacagggua

SEQ ID NO: 361161 - RNA, 19 nt, Artificial Sequence
  Description of Artificial Sequence: Synthetic oligonucleotide
ggacggaaacucagaagcc

SEQ ID NO: 361162 - RNA, 19 nt, Artificial Sequence
  Description of Artificial Sequence: Synthetic oligonucleotide
uggugcuaugguggcaccu

SEQ ID NO: 361163 - RNA, 19 nt, Artificial Sequence
  Description of Artificial Sequence: Synthetic oligonucleotide
gauauugcuuggugcgaau

SEQ ID NO: 361164 - RNA, 19 nt, Artificial Sequence
  Description of Artificial Sequence: Synthetic oligonucleotide
ggcacuggcguugauaucu

SEQ ID NO: 361165 - RNA, 19 nt, Artificial Sequence
  Description of Artificial Sequence: Synthetic oligonucleotide
guaugcugcuagaagacau

SEQ ID NO: 361166 - RNA, 19 nt, Artificial Sequence
  Description of Artificial Sequence: Synthetic oligonucleotide
agaccgcaaugguugcuau

SEQ ID NO: 361167 - RNA, 19 nt, Artificial Sequence
  Description of Artificial Sequence: Synthetic oligonucleotide
gaguccaaucguggccgag

SEQ ID NO: 361168 - RNA, 19 nt, Artificial Sequence
  Description of Artificial Sequence: Synthetic oligonucleotide
cuuucgugguagagcuuca

SEQ ID NO: 361169 - RNA, 19 nt, Artificial Sequence
  Description of Artificial Sequence: Synthetic oligonucleotide
gugaugcagaggcgcucag

SEQ ID NO: 361170 - RNA, 19 nt, Artificial Sequence
  Description of Artificial Sequence: Synthetic oligonucleotide
gcucuuaggcccauaugac

SEQ ID NO: 361171 - RNA, 19 nt, Artificial Sequence
  Description of Artificial Sequence: Synthetic oligonucleotide
gcccagaacggagaagaag

SEQ ID NO: 361172 - RNA, 19 nt, Artificial Sequence
  Description of Artificial Sequence: Synthetic oligonucleotide
uuggugcgaaugacauuuu

SEQ ID NO: 361173 - RNA, 19 nt, Artificial Sequence
  Description of Artificial Sequence: Synthetic oligonucleotide
ccuuucgugccagaucagc

SEQ ID NO: 361174 - RNA, 19 nt, Artificial Sequence
  Description of Artificial Sequence: Synthetic oligonucleotide
guccuaguaugcugcuaga

SEQ ID NO: 361175 - RNA, 19 nt, Artificial Sequence
  Description of Artificial Sequence: Synthetic oligonucleotide
ugcucccgugaaagaggca

SEQ ID NO: 361176 - RNA, 19 nt, Artificial Sequence
  Description of Artificial Sequence: Synthetic oligonucleotide
  modified_base (4)..(4): a, c, u, g, unknown or other
accncgcccagaacggaga

SEQ ID NO: 361177 - RNA, 19 nt, Artificial Sequence
  Description of Artificial Sequence: Synthetic oligonucleotide
ggugugcaaggggacacug

SEQ ID NO: 361178 - RNA, 19 nt, Artificial Sequence
  Description of Artificial Sequence: Synthetic oligonucleotide
gacgauccagaaggccgug

SEQ ID NO: 361179 - RNA, 19 nt, Artificial Sequence
  Description of Artificial Sequence: Synthetic oligonucleotide
ggcuaaauacuggacggaa

SEQ ID NO: 361180 - RNA, 19 nt, Artificial Sequence
  Description of Artificial Sequence: Synthetic oligonucleotide
ggcagugauagcagccagc

SEQ ID NO: 361181 - RNA, 19 nt, Artificial Sequence
  Description of Artificial Sequence: Synthetic oligonucleotide
gaagggcguagaagaccgc

SEQ ID NO: 361182 - RNA, 19 nt, Artificial Sequence
  Description of Artificial Sequence: Synthetic oligonucleotide
cgcaaugguugcuauguuc

SEQ ID NO: 361183 - RNA, 19 nt, Artificial Sequence
  Description of Artificial Sequence: Synthetic oligonucleotide
ccggaugcagucuguguac

SEQ ID NO: 361184 - RNA, 19 nt, Artificial Sequence
  Description of Artificial Sequence: Synthetic oligonucleotide
caugucccucccuuucuaa

SEQ ID NO: 361185 - RNA, 19 nt, Artificial Sequence
  Description of Artificial Sequence: Synthetic oligonucleotide
gguuguaccuaggcccuug

SEQ ID NO: 361186 - RNA, 19 nt, Artificial Sequence
  Description of Artificial Sequence: Synthetic oligonucleotide
gcucccgugaaagaggcaa

SEQ ID NO: 361187 - RNA, 19 nt, Artificial Sequence
  Description of Artificial Sequence: Synthetic oligonucleotide
gcguugauaucugggugcc

SEQ ID NO: 361188 - RNA, 19 nt, Artificial Sequence
  Description of Artificial Sequence: Synthetic oligonucleotide
gacucaaacuggacugacu

SEQ ID NO: 361189 - RNA, 19 nt, Artificial Sequence
  Description of Artificial Sequence: Synthetic oligonucleotide
agcagaguugggacucaca

SEQ ID NO: 361190 - RNA, 19 nt, Artificial Sequence
  Description of Artificial Sequence: Synthetic oligonucleotide
guccaaucguggccgagua

SEQ ID NO: 361191 - RNA, 19 nt, Artificial Sequence
  Description of Artificial Sequence: Synthetic oligonucleotide
cagcggcccauguaguaga

SEQ ID NO: 361192 - RNA, 19 nt, Artificial Sequence
  Description of Artificial Sequence: Synthetic oligonucleotide
gcucggugccaccagcaac

SEQ ID NO: 361193 - RNA, 19 nt, Artificial Sequence
  Description of Artificial Sequence: Synthetic oligonucleotide
gauaucugggugcccgcuu

SEQ ID NO: 361194 - RNA, 19 nt, Artificial Sequence
  Description of Artificial Sequence: Synthetic oligonucleotide
caggccuuagcaccauaaa

SEQ ID NO: 361195 - RNA, 19 nt, Artificial Sequence
  Description of Artificial Sequence: Synthetic oligonucleotide
  modified_base (2)..(2): a, c, u, g, unknown or other
cncgcccagaacggagaag

SEQ ID NO: 361196 - RNA, 19 nt, Artificial Sequence
  Description of Artificial Sequence: Synthetic oligonucleotide
gcuaugaaacaaagaccca

SEQ ID NO: 361197 - RNA, 19 nt, Artificial Sequence
  Description of Artificial Sequence: Synthetic oligonucleotide
auuccggcagcuggucgga

SEQ ID NO: 361198 - RNA, 19 nt, Artificial Sequence
  Description of Artificial Sequence: Synthetic oligonucleotide
cgguccauauaaagaggcc

SEQ ID NO: 361199 - RNA, 19 nt, Artificial Sequence
  Description of Artificial Sequence: Synthetic oligonucleotide
gcucuaagcacaggguaga

SEQ ID NO: 361200 - RNA, 19 nt, Artificial Sequence
  Description of Artificial Sequence: Synthetic oligonucleotide
cagcaauuuggccaguguu

SEQ ID NO: 361201 - RNA, 19 nt, Artificial Sequence
  Description of Artificial Sequence: Synthetic oligonucleotide
gcccgguugugauugaucu

SEQ ID NO: 361202 - RNA, 19 nt, Artificial Sequence
  Description of Artificial Sequence: Synthetic oligonucleotide
uggcaucauuccggcagcu

SEQ ID NO: 361203 - RNA, 19 nt, Artificial Sequence
  Description of Artificial Sequence: Synthetic oligonucleotide
ggugcuggacagagaauca

SEQ ID NO: 361204 - RNA, 19 nt, Artificial Sequence
  Description of Artificial Sequence: Synthetic oligonucleotide
cugcaaggcucggugccac

SEQ ID NO: 361205 - RNA, 19 nt, Artificial Sequence
  Description of Artificial Sequence: Synthetic oligonucleotide
caccgucugauaggugaug

SEQ ID NO: 361206 - RNA, 19 nt, Artificial Sequence
  Description of Artificial Sequence: Synthetic oligonucleotide
cauaugcacuguaggcacu

SEQ ID NO: 361207 - RNA, 19 nt, Artificial Sequence
  Description of Artificial Sequence: Synthetic oligonucleotide
gcggaagaugccagagucc

SEQ ID NO: 361208 - RNA, 19 nt, Artificial Sequence
  Description of Artificial Sequence: Synthetic oligonucleotide
gcucauggaguccaaucgu

SEQ ID NO: 361209 - RNA, 19 nt, Artificial Sequence
  Description of Artificial Sequence: Synthetic oligonucleotide
aggcgcucagagccccaug

SEQ ID NO: 361210 - RNA, 19 nt, Artificial Sequence
  Description of Artificial Sequence: Synthetic oligonucleotide
uccccaucuggggcuuggc

SEQ ID NO: 361211 - RNA, 19 nt, Artificial Sequence
  Description of Artificial Sequence: Synthetic oligonucleotide
gcggcggaagaugccagag

SEQ ID NO: 361212 - RNA, 19 nt, Artificial Sequence
  Description of Artificial Sequence: Synthetic oligonucleotide
gaagaccgcaaugguugcu

SEQ ID NO: 361213 - RNA, 19 nt, Artificial Sequence
  Description of Artificial Sequence: Synthetic oligonucleotide
auuucgcaucagggcccgg

SEQ ID NO: 361214 - RNA, 19 nt, Artificial Sequence
  Description of Artificial Sequence: Synthetic oligonucleotide
gcgcucagagccccaugag

SEQ ID NO: 361215 - RNA, 19 nt, Artificial Sequence
  Description of Artificial Sequence: Synthetic oligonucleotide
caccaacccuggugcuggc

SEQ ID NO: 361216 - RNA, 19 nt, Artificial Sequence
  Description of Artificial Sequence: Synthetic oligonucleotide
ccgucugauaggugaugac

SEQ ID NO: 361217 - RNA, 19 nt, Artificial Sequence
  Description of Artificial Sequence: Synthetic oligonucleotide
aacaggcacugggguuccu

SEQ ID NO: 361218 - RNA, 19 nt, Artificial Sequence
  Description of Artificial Sequence: Synthetic oligonucleotide
caucagggcccgguuguga

SEQ ID NO: 361219 - RNA, 19 nt, Artificial Sequence
  Description of Artificial Sequence: Synthetic oligonucleotide
ccgguugugauugaucucu

SEQ ID NO: 361220 - RNA, 19 nt, Artificial Sequence
  Description of Artificial Sequence: Synthetic oligonucleotide
ccgcuuucgugguagagcu

SEQ ID NO: 361221 - RNA, 19 nt, Artificial Sequence
  Description of Artificial Sequence: Synthetic oligonucleotide
uugcaggccuuagcaccau

SEQ ID NO: 361222 - RNA, 19 nt, Artificial Sequence
  Description of Artificial Sequence: Synthetic oligonucleotide
cccgguugugauugaucuc

SEQ ID NO: 361223 - RNA, 19 nt, Artificial Sequence
  Description of Artificial Sequence: Synthetic oligonucleotide
  modified_base (17)..(17): a, c, u, g, unknown or other
ucccagcccgagagcunua

SEQ ID NO: 361224 - RNA, 19 nt, Artificial Sequence
  Description of Artificial Sequence: Synthetic oligonucleotide
ggaguccaaucguggccga

SEQ ID NO: 361225 - RNA, 19 nt, Artificial Sequence
  Description of Artificial Sequence: Synthetic oligonucleotide
gcccugaguccuauaguga

SEQ ID NO: 361226 - RNA, 19 nt, Artificial Sequence
  Description of Artificial Sequence: Synthetic oligonucleotide
gcuuccagcggcccaugua

SEQ ID NO: 361227 - RNA, 19 nt, Artificial Sequence
  Description of Artificial Sequence: Synthetic oligonucleotide
ggacagaaugaaauacauu

SEQ ID NO: 361228 - RNA, 19 nt, Artificial Sequence
  Description of Artificial Sequence: Synthetic oligonucleotide
gcaugucccucccuuucua

SEQ ID NO: 361229 - RNA, 19 nt, Artificial Sequence
  Description of Artificial Sequence: Synthetic oligonucleotide
ggggcgcaugaugagucca

SEQ ID NO: 361230 - RNA, 19 nt, Artificial Sequence
  Description of Artificial Sequence: Synthetic oligonucleotide
gaguaccaugcgguccaua

SEQ ID NO: 361231 - RNA, 19 nt, Artificial Sequence
  Description of Artificial Sequence: Synthetic oligonucleotide
cagaggcaacugcaaggcu

SEQ ID NO: 361232 - RNA, 19 nt, Artificial Sequence
  Description of Artificial Sequence: Synthetic oligonucleotide
ggcccgguugugauugauc

SEQ ID NO: 361233 - RNA, 19 nt, Artificial Sequence
  Description of Artificial Sequence: Synthetic oligonucleotide
gaguugggacucacacccu

SEQ ID NO: 361234 - RNA, 19 nt, Artificial Sequence
  Description of Artificial Sequence: Synthetic oligonucleotide
gugcaaggggacacugagu

SEQ ID NO: 361235 - RNA, 19 nt, Artificial Sequence
  Description of Artificial Sequence: Synthetic oligonucleotide
cgguuguguucccgcaaag

SEQ ID NO: 361236 - RNA, 19 nt, Artificial Sequence
  Description of Artificial Sequence: Synthetic oligonucleotide
ggggaggacccaacacuga

SEQ ID NO: 361237 - RNA, 19 nt, Artificial Sequence
  Description of Artificial Sequence: Synthetic oligonucleotide
gcgcaugaugaguccauau

SEQ ID NO: 361238 - RNA, 19 nt, Artificial Sequence
  Description of Artificial Sequence: Synthetic oligonucleotide
ggacaaacggagagccagu

SEQ ID NO: 361239 - RNA, 19 nt, Artificial Sequence
  Description of Artificial Sequence: Synthetic oligonucleotide
uuccggcagcuggucggau

SEQ ID NO: 361240 - RNA, 19 nt, Artificial Sequence
  Description of Artificial Sequence: Synthetic oligonucleotide
cgguugugauugaucucuc

SEQ ID NO: 361241 - RNA, 19 nt, Artificial Sequence
  Description of Artificial Sequence: Synthetic oligonucleotide
ccauauaaagaggcccacu

SEQ ID NO: 361242 - RNA, 19 nt, Artificial Sequence
  Description of Artificial Sequence: Synthetic oligonucleotide
cguugauaucugggugccc

SEQ ID NO: 361243 - RNA, 19 nt, Artificial Sequence
  Description of Artificial Sequence: Synthetic oligonucleotide
ggcauugccuucccaccuu

SEQ ID NO: 361244 - RNA, 19 nt, Artificial Sequence
  Description of Artificial Sequence: Synthetic oligonucleotide
ccccaucuggggcuuggca

SEQ ID NO: 361245 - RNA, 19 nt, Artificial Sequence
  Description of Artificial Sequence: Synthetic oligonucleotide
ggcgcaugaugaguccaua

SEQ ID NO: 361246 - RNA, 19 nt, Artificial Sequence
  Description of Artificial Sequence: Synthetic oligonucleotide
ccauagcaugagacacaga

SEQ ID NO: 361247 - RNA, 19 nt, Artificial Sequence
  Description of Artificial Sequence: Synthetic oligonucleotide
gccccaugaggugaagccu

SEQ ID NO: 361248 - RNA, 19 nt, Artificial Sequence
  Description of Artificial Sequence: Synthetic oligonucleotide
ggacacugaguugccacuu

SEQ ID NO: 361249 - RNA, 19 nt, Artificial Sequence
  Description of Artificial Sequence: Synthetic oligonucleotide
ccaacccuggugcuggcau

SEQ ID NO: 361250 - RNA, 19 nt, Artificial Sequence
  Description of Artificial Sequence: Synthetic oligonucleotide
ggguccuaguaugcugcua

SEQ ID NO: 361251 - RNA, 19 nt, Artificial Sequence
  Description of Artificial Sequence: Synthetic oligonucleotide
  modified_base (3)..(3): a, c, u, g, unknown or other
ccncgcccagaacggagaa

SEQ ID NO: 361252 - RNA, 19 nt, Artificial Sequence
  Description of Artificial Sequence: Synthetic oligonucleotide
  modified_base (16)..(16): a, c, u, g, unknown or other
cccagcccgagagcunuaa

SEQ ID NO: 361253 - RNA, 19 nt, Artificial Sequence
  Description of Artificial Sequence: Synthetic oligonucleotide
cuaggcccuugcaggccuu

SEQ ID NO: 361254 - RNA, 19 nt, Artificial Sequence
  Description of Artificial Sequence: Synthetic oligonucleotide
cgcccagaacggagaagaa

SEQ ID NO: 361255 - RNA, 19 nt, Artificial Sequence
  Description of Artificial Sequence: Synthetic oligonucleotide
gggcccgguugugauugau

SEQ ID NO: 361256 - RNA, 19 nt, Artificial Sequence
  Description of Artificial Sequence: Synthetic oligonucleotide
ccgcaaugguugcuauguu

SEQ ID NO: 361257 - RNA, 19 nt, Artificial Sequence
  Description of Artificial Sequence: Synthetic oligonucleotide
cgcuuucgugguagagcuu

SEQ ID NO: 361258 - RNA, 19 nt, Artificial Sequence
  Description of Artificial Sequence: Synthetic oligonucleotide
  modified_base (1)..(1): a, c, u, g, unknown or other
ncgcccagaacggagaaga

SEQ ID NO: 361259 - RNA, 19 nt, Artificial Sequence
  Description of Artificial Sequence: Synthetic oligonucleotide
aagaaguaauucuaaaacc

SEQ ID NO: 361260 - RNA, 19 nt, Artificial Sequence
  Description of Artificial Sequence: Synthetic oligonucleotide
uugacaacgauacugagcg

SEQ ID NO: 361261 - RNA, 19 nt, Artificial Sequence
  Description of Artificial Sequence: Synthetic oligonucleotide
aaagauuugccaauaaucc

SEQ ID NO: 361262 - RNA, 19 nt, Artificial Sequence
  Description of Artificial Sequence: Synthetic oligonucleotide
uauaugaauacaucaaacg

SEQ ID NO: 361263 - RNA, 19 nt, Artificial Sequence
  Description of Artificial Sequence: Synthetic oligonucleotide
aguaaucaaacguggaucc

SEQ ID NO: 361264 - RNA, 19 nt, Artificial Sequence
  Description of Artificial Sequence: Synthetic oligonucleotide
uuuacuaaguuaauaggag

SEQ ID NO: 361265 - RNA, 19 nt, Artificial Sequence
  Description of Artificial Sequence: Synthetic oligonucleotide
uaguacuugauuaagacac

SEQ ID NO: 361266 - RNA, 19 nt, Artificial Sequence
  Description of Artificial Sequence: Synthetic oligonucleotide
ucuuuagaggcuaaugugg

SEQ ID NO: 361267 - RNA, 19 nt, Artificial Sequence
  Description of Artificial Sequence: Synthetic oligonucleotide
aaggauuuaacauuacuca

SEQ ID NO: 361268 - RNA, 19 nt, Artificial Sequence
  Description of Artificial Sequence: Synthetic oligonucleotide
ugaauaauauugaaagugc

SEQ ID NO: 361269 - RNA, 19 nt, Artificial Sequence
  Description of Artificial Sequence: Synthetic oligonucleotide
aaaggauuuaacauuacuc

SEQ ID NO: 361270 - RNA, 19 nt, Artificial Sequence
  Description of Artificial Sequence: Synthetic oligonucleotide
uauuucauguucuuuagcc

SEQ ID NO: 361271 - RNA, 19 nt, Artificial Sequence
  Description of Artificial Sequence: Synthetic oligonucleotide
guuuguaacagaaagauug

SEQ ID NO: 361272 - RNA, 19 nt, Artificial Sequence
  Description of Artificial Sequence: Synthetic oligonucleotide
aacguauucauuuuaauuu

SEQ ID NO: 361273 - RNA, 19 nt, Artificial Sequence
  Description of Artificial Sequence: Synthetic oligonucleotide
ucaauauucaaugaaggag

SEQ ID NO: 361274 - RNA, 19 nt, Artificial Sequence
  Description of Artificial Sequence: Synthetic oligonucleotide
acgaccuucuaauugagcc

SEQ ID NO: 361275 - RNA, 19 nt, Artificial Sequence
  Description of Artificial Sequence: Synthetic oligonucleotide
uuuccuaaggacaucaaug

SEQ ID NO: 361276 - RNA, 19 nt, Artificial Sequence
  Description of Artificial Sequence: Synthetic oligonucleotide
gauuguaggcagcagaagg

SEQ ID NO: 361277 - RNA, 19 nt, Artificial Sequence
  Description of Artificial Sequence: Synthetic oligonucleotide
uauauauauuguuugcugc

SEQ ID NO: 361278 - RNA, 19 nt, Artificial Sequence
  Description of Artificial Sequence: Synthetic oligonucleotide
aaccaauuguuuuaguuug

SEQ ID NO: 361279 - RNA, 19 nt, Artificial Sequence
  Description of Artificial Sequence: Synthetic oligonucleotide
ugagcgaucagucugucag

SEQ ID NO: 361280 - RNA, 19 nt, Artificial Sequence
  Description of Artificial Sequence: Synthetic oligonucleotide
aauaugcauuuucagagug

SEQ ID NO: 361281 - RNA, 19 nt, Artificial Sequence
  Description of Artificial Sequence: Synthetic oligonucleotide
uuuaugagaauauuaaaua

SEQ ID NO: 361282 - RNA, 19 nt, Artificial Sequence
  Description of Artificial Sequence: Synthetic oligonucleotide
uauuaguuccucaauauuc

SEQ ID NO: 361283 - RNA, 19 nt, Artificial Sequence
  Description of Artificial Sequence: Synthetic oligonucleotide
aaagagaugcucaauauca

SEQ ID NO: 361284 - RNA, 19 nt, Artificial Sequence
  Description of Artificial Sequence: Synthetic oligonucleotide
caaacguggauccugaagg

SEQ ID NO: 361285 - RNA, 19 nt, Artificial Sequence
  Description of Artificial Sequence: Synthetic oligonucleotide
agggaagaagccuuaauac

SEQ ID NO: 361286 - RNA, 19 nt, Artificial Sequence
  Description of Artificial Sequence: Synthetic oligonucleotide
caauauaccaagcucuucg

SEQ ID NO: 361287 - RNA, 19 nt, Artificial Sequence
  Description of Artificial Sequence: Synthetic oligonucleotide
aauguuucgagaaugaaaa

SEQ ID NO: 361288 - RNA, 19 nt, Artificial Sequence
  Description of Artificial Sequence: Synthetic oligonucleotide
uuaaggagauccauuagca

SEQ ID NO: 361289 - RNA, 19 nt, Artificial Sequence
  Description of Artificial Sequence: Synthetic oligonucleotide
uccucaauauucaaugaag

SEQ ID NO: 361290 - RNA, 19 nt, Artificial Sequence
  Description of Artificial Sequence: Synthetic oligonucleotide
ucugacugagcacauggcg

SEQ ID NO: 361291 - RNA, 19 nt, Artificial Sequence
  Description of Artificial Sequence: Synthetic oligonucleotide
acaaguuccauguaggacu

SEQ ID NO: 361292 - RNA, 19 nt, Artificial Sequence
  Description of Artificial Sequence: Synthetic oligonucleotide
aguucguugacaacgauac

SEQ ID NO: 361293 - RNA, 19 nt, Artificial Sequence
  Description of Artificial Sequence: Synthetic oligonucleotide
ugugcuaggaagcuuauaa

SEQ ID NO: 361294 - RNA, 19 nt, Artificial Sequence
  Description of Artificial Sequence: Synthetic oligonucleotide
ucacaaaacgaucagucga

SEQ ID NO: 361295 - RNA, 19 nt, Artificial Sequence
  Description of Artificial Sequence: Synthetic oligonucleotide
aaacgaucagucgaggaac

SEQ ID NO: 361296 - RNA, 19 nt, Artificial Sequence
  Description of Artificial Sequence: Synthetic oligonucleotide
auauaugaauacaucaaac

SEQ ID NO: 361297 - RNA, 19 nt, Artificial Sequence
  Description of Artificial Sequence: Synthetic oligonucleotide
uuugccaauaaucccagac

SEQ ID NO: 361298 - RNA, 19 nt, Artificial Sequence
  Description of Artificial Sequence: Synthetic oligonucleotide
uuaugagaauauuaaauau

SEQ ID NO: 361299 - RNA, 19 nt, Artificial Sequence
  Description of Artificial Sequence: Synthetic oligonucleotide
aaaggaguaaucaaacgug

SEQ ID NO: 361300 - RNA, 19 nt, Artificial Sequence
  Description of Artificial Sequence: Synthetic oligonucleotide
aaacguauucauuuuaauu

SEQ ID NO: 361301 - RNA, 19 nt, Artificial Sequence
  Description of Artificial Sequence: Synthetic oligonucleotide
uucacaaaacgaucagucg

SEQ ID NO: 361302 - RNA, 19 nt, Artificial Sequence
  Description of Artificial Sequence: Synthetic oligonucleotide
aaaacgaucagucgaggaa

SEQ ID NO: 361303 - RNA, 19 nt, Artificial Sequence
  Description of Artificial Sequence: Synthetic oligonucleotide
agucucauuucuuugaaca

SEQ ID NO: 361304 - RNA, 19 nt, Artificial Sequence
  Description of Artificial Sequence: Synthetic oligonucleotide
uguaaguauuucauguucu

SEQ ID NO: 361305 - RNA, 19 nt, Artificial Sequence
  Description of Artificial Sequence: Synthetic oligonucleotide
uguuaggguaccaucacca

SEQ ID NO: 361306 - RNA, 19 nt, Artificial Sequence
  Description of Artificial Sequence: Synthetic oligonucleotide
gauccuuuaccauuacucc

SEQ ID NO: 361307 - RNA, 19 nt, Artificial Sequence
  Description of Artificial Sequence: Synthetic oligonucleotide
uaagacacgaagagaagug

SEQ ID NO: 361308 - RNA, 19 nt, Artificial Sequence
  Description of Artificial Sequence: Synthetic oligonucleotide
gucuuucgcauuuagaagc

SEQ ID NO: 361309 - RNA, 19 nt, Artificial Sequence
  Description of Artificial Sequence: Synthetic oligonucleotide
guuaauaggaguaagcaga

SEQ ID NO: 361310 - RNA, 19 nt, Artificial Sequence
  Description of Artificial Sequence: Synthetic oligonucleotide
aauauuagcuggaaagucu

SEQ ID NO: 361311 - RNA, 19 nt, Artificial Sequence
  Description of Artificial Sequence: Synthetic oligonucleotide
acaagugaucuguaagucg

SEQ ID NO: 361312 - RNA, 19 nt, Artificial Sequence
  Description of Artificial Sequence: Synthetic oligonucleotide
uaacagaaagauugugccg

SEQ ID NO: 361313 - RNA, 19 nt, Artificial Sequence
  Description of Artificial Sequence: Synthetic oligonucleotide
accacuuaaacuguggauc

SEQ ID NO: 361314 - RNA, 19 nt, Artificial Sequence
  Description of Artificial Sequence: Synthetic oligonucleotide
ugcuaggaagcuuauaaga

SEQ ID NO: 361315 - RNA, 19 nt, Artificial Sequence
  Description of Artificial Sequence: Synthetic oligonucleotide
uggauucuuaaggagaucc

SEQ ID NO: 361316 - RNA, 19 nt, Artificial Sequence
  Description of Artificial Sequence: Synthetic oligonucleotide
uucauaccugguaagauaa

SEQ ID NO: 361317 - RNA, 19 nt, Artificial Sequence
  Description of Artificial Sequence: Synthetic oligonucleotide
uuaccaguaucaaugacau

SEQ ID NO: 361318 - RNA, 19 nt, Artificial Sequence
  Description of Artificial Sequence: Synthetic oligonucleotide
uuguuaagaccucauccag

SEQ ID NO: 361319 - RNA, 19 nt, Artificial Sequence
  Description of Artificial Sequence: Synthetic oligonucleotide
ucaaacguggauccugaag

SEQ ID NO: 361320 - RNA, 19 nt, Artificial Sequence
  Description of Artificial Sequence: Synthetic oligonucleotide
agaaguaauucuaaaaccu

SEQ ID NO: 361321 - RNA, 19 nt, Artificial Sequence
  Description of Artificial Sequence: Synthetic oligonucleotide
uuacuaaguuaauaggagu

SEQ ID NO: 361322 - RNA, 19 nt, Artificial Sequence
  Description of Artificial Sequence: Synthetic oligonucleotide
uacuaaguuaauaggagua

SEQ ID NO: 361323 - RNA, 19 nt, Artificial Sequence
  Description of Artificial Sequence: Synthetic oligonucleotide
uuguuuguaacagaaagau

SEQ ID NO: 361324 - RNA, 19 nt, Artificial Sequence
  Description of Artificial Sequence: Synthetic oligonucleotide
auauuguuugcugcuauac

SEQ ID NO: 361325 - RNA, 19 nt, Artificial Sequence
  Description of Artificial Sequence: Synthetic oligonucleotide
ugccuauauauauuguuug

SEQ ID NO: 361326 - RNA, 19 nt, Artificial Sequence
  Description of Artificial Sequence: Synthetic oligonucleotide
ucuuacuguguugaaagag

SEQ ID NO: 361327 - RNA, 19 nt, Artificial Sequence
  Description of Artificial Sequence: Synthetic oligonucleotide
guagucaauacuuuuacaa

SEQ ID NO: 361328 - RNA, 19 nt, Artificial Sequence
  Description of Artificial Sequence: Synthetic oligonucleotide
aauauaccaagcucuucgu

SEQ ID NO: 361329 - RNA, 19 nt, Artificial Sequence
  Description of Artificial Sequence: Synthetic oligonucleotide
uuuggauucuuaaggagau

SEQ ID NO: 361330 - RNA, 19 nt, Artificial Sequence
  Description of Artificial Sequence: Synthetic oligonucleotide
agccuuaauacucaauucu

SEQ ID NO: 361331 - RNA, 19 nt, Artificial Sequence
  Description of Artificial Sequence: Synthetic oligonucleotide
cauacauaaacuguuguuc

SEQ ID NO: 361332 - RNA, 19 nt, Artificial Sequence
  Description of Artificial Sequence: Synthetic oligonucleotide
uguugugacuucaacaaua

SEQ ID NO: 361333 - RNA, 19 nt, Artificial Sequence
  Description of Artificial Sequence: Synthetic oligonucleotide
cugaucaaggauuguaggc

SEQ ID NO: 361334 - RNA, 19 nt, Artificial Sequence
  Description of Artificial Sequence: Synthetic oligonucleotide
uguuccgugaacugaagcu

SEQ ID NO: 361335 - RNA, 19 nt, Artificial Sequence
  Description of Artificial Sequence: Synthetic oligonucleotide
aaucugauccuuuaccauu

SEQ ID NO: 361336 - RNA, 19 nt, Artificial Sequence
  Description of Artificial Sequence: Synthetic oligonucleotide
aaagucugaugaauguuuc

SEQ ID NO: 361337 - RNA, 19 nt, Artificial Sequence
  Description of Artificial Sequence: Synthetic oligonucleotide
ucagucgaggaacaguuac

SEQ ID NO: 361338 - RNA, 19 nt, Artificial Sequence
  Description of Artificial Sequence: Synthetic oligonucleotide
ucuacuaacuggcucugga

SEQ ID NO: 361339 - RNA, 19 nt, Artificial Sequence
  Description of Artificial Sequence: Synthetic oligonucleotide
aaguguucauaccugguaa

SEQ ID NO: 361340 - RNA, 19 nt, Artificial Sequence
  Description of Artificial Sequence: Synthetic oligonucleotide
ugaucaaggauuguaggca

SEQ ID NO: 361341 - RNA, 19 nt, Artificial Sequence
  Description of Artificial Sequence: Synthetic oligonucleotide
ucgaggaacaguuaccagu

SEQ ID NO: 361342 - RNA, 19 nt, Artificial Sequence
  Description of Artificial Sequence: Synthetic oligonucleotide
aggaacaguuaccaguauc

SEQ ID NO: 361343 - RNA, 19 nt, Artificial Sequence
  Description of Artificial Sequence: Synthetic oligonucleotide
uuuguucaacucuucuugc

SEQ ID NO: 361344 - RNA, 19 nt, Artificial Sequence
  Description of Artificial Sequence: Synthetic oligonucleotide
ucaauacuuuuacaauaug

SEQ ID NO: 361345 - RNA, 19 nt, Artificial Sequence
  Description of Artificial Sequence: Synthetic oligonucleotide
uaacauaccugcaaguguu

SEQ ID NO: 361346 - RNA, 19 nt, Artificial Sequence
  Description of Artificial Sequence: Synthetic oligonucleotide
agucaauacuuuuacaaua

SEQ ID NO: 361347 - RNA, 19 nt, Artificial Sequence
  Description of Artificial Sequence: Synthetic oligonucleotide
ucgguauucuucuuuucag

SEQ ID NO: 361348 - RNA, 19 nt, Artificial Sequence
  Description of Artificial Sequence: Synthetic oligonucleotide
uguggugcacuuuauagua

SEQ ID NO: 361349 - RNA, 19 nt, Artificial Sequence
  Description of Artificial Sequence: Synthetic oligonucleotide
uccauuaacugagcaauag

SEQ ID NO: 361350 - RNA, 19 nt, Artificial Sequence
  Description of Artificial Sequence: Synthetic oligonucleotide
caauauucccaauccagac

SEQ ID NO: 361351 - RNA, 19 nt, Artificial Sequence
  Description of Artificial Sequence: Synthetic oligonucleotide
cucuuuagaggcuaaugug

SEQ ID NO: 361352 - RNA, 19 nt, Artificial Sequence
  Description of Artificial Sequence: Synthetic oligonucleotide
cacaaaacgaucagucgag

SEQ ID NO: 361353 - RNA, 19 nt, Artificial Sequence
  Description of Artificial Sequence: Synthetic oligonucleotide
uguuaagaccucauccaga

SEQ ID NO: 361354 - RNA, 19 nt, Artificial Sequence
  Description of Artificial Sequence: Synthetic oligonucleotide
gaagagaaguguucauacc

SEQ ID NO: 361355 - RNA, 19 nt, Artificial Sequence
  Description of Artificial Sequence: Synthetic oligonucleotide
aacuguuuagaagucacaa

SEQ ID NO: 361356 - RNA, 19 nt, Artificial Sequence
  Description of Artificial Sequence: Synthetic oligonucleotide
uauuguuugcugcuauacu

SEQ ID NO: 361357 - RNA, 19 nt, Artificial Sequence
  Description of Artificial Sequence: Synthetic oligonucleotide
uauaccaagcucuucguuu

SEQ ID NO: 361358 - RNA, 19 nt, Artificial Sequence
  Description of Artificial Sequence: Synthetic oligonucleotide
gcuuauaagaguucgauaa

SEQ ID NO: 361359 - RNA, 19 nt, Artificial Sequence
  Description of Artificial Sequence: Synthetic oligonucleotide
agaaagauugugccgacaa

SEQ ID NO: 361360 - RNA, 19 nt, Artificial Sequence
  Description of Artificial Sequence: Synthetic oligonucleotide
gauuuuguuccgugaacug

SEQ ID NO: 361361 - RNA, 19 nt, Artificial Sequence
  Description of Artificial Sequence: Synthetic oligonucleotide
ugugccgacaaagauuugc

SEQ ID NO: 361362 - RNA, 19 nt, Artificial Sequence
  Description of Artificial Sequence: Synthetic oligonucleotide
uuccucaauauucaaugaa

SEQ ID NO: 361363 - RNA, 19 nt, Artificial Sequence
  Description of Artificial Sequence: Synthetic oligonucleotide
uagaggcuaauguggaaag

SEQ ID NO: 361364 - RNA, 19 nt, Artificial Sequence
  Description of Artificial Sequence: Synthetic oligonucleotide
ugguuuaaccaacgaagca

SEQ ID NO: 361365 - RNA, 19 nt, Artificial Sequence
  Description of Artificial Sequence: Synthetic oligonucleotide
aauggcuuugaccauccuu

SEQ ID NO: 361366 - RNA, 19 nt, Artificial Sequence
  Description of Artificial Sequence: Synthetic oligonucleotide
ucuuaacauaccugcaagu

SEQ ID NO: 361367 - RNA, 19 nt, Artificial Sequence
  Description of Artificial Sequence: Synthetic oligonucleotide
gaauaauauugaaagugca

SEQ ID NO: 361368 - RNA, 19 nt, Artificial Sequence
  Description of Artificial Sequence: Synthetic oligonucleotide
uuuagaagcccuaguacuu

SEQ ID NO: 361369 - RNA, 19 nt, Artificial Sequence
  Description of Artificial Sequence: Synthetic oligonucleotide
uuaugucagauauucuuau

SEQ ID NO: 361370 - RNA, 19 nt, Artificial Sequence
  Description of Artificial Sequence: Synthetic oligonucleotide
uaaucaaacguggauccug

SEQ ID NO: 361371 - RNA, 19 nt, Artificial Sequence
  Description of Artificial Sequence: Synthetic oligonucleotide
ucccaauccagacuguacu

SEQ ID NO: 361372 - RNA, 19 nt, Artificial Sequence
  Description of Artificial Sequence: Synthetic oligonucleotide
agguucuaagcucuuagga

SEQ ID NO: 361373 - RNA, 19 nt, Artificial Sequence
  Description of Artificial Sequence: Synthetic oligonucleotide
ucgacugaguacuuucuug

SEQ ID NO: 361374 - RNA, 19 nt, Artificial Sequence
  Description of Artificial Sequence: Synthetic oligonucleotide
gaaugcaagaaguaauucu

SEQ ID NO: 361375 - RNA, 19 nt, Artificial Sequence
  Description of Artificial Sequence: Synthetic oligonucleotide
aagcuugcacaauucagaa

SEQ ID NO: 361376 - RNA, 19 nt, Artificial Sequence
  Description of Artificial Sequence: Synthetic oligonucleotide
uugcuaucaugugagaaug

SEQ ID NO: 361377 - RNA, 19 nt, Artificial Sequence
  Description of Artificial Sequence: Synthetic oligonucleotide
aacgauacugagcgaucag

SEQ ID NO: 361378 - RNA, 19 nt, Artificial Sequence
  Description of Artificial Sequence: Synthetic oligonucleotide
agagucuucaaaauuacau

SEQ ID NO: 361379 - RNA, 19 nt, Artificial Sequence
  Description of Artificial Sequence: Synthetic oligonucleotide
ugcuauacuuucuccaagu

SEQ ID NO: 361380 - RNA, 19 nt, Artificial Sequence
  Description of Artificial Sequence: Synthetic oligonucleotide
acaaagauuugccaauaau

SEQ ID NO: 361381 - RNA, 19 nt, Artificial Sequence
  Description of Artificial Sequence: Synthetic oligonucleotide
uacuaaggcagggaaaucu

SEQ ID NO: 361382 - RNA, 19 nt, Artificial Sequence
  Description of Artificial Sequence: Synthetic oligonucleotide
ugcuaaaacagaacaguuu

SEQ ID NO: 361383 - RNA, 19 nt, Artificial Sequence
  Description of Artificial Sequence: Synthetic oligonucleotide
ucaaauuaagagucuucaa

SEQ ID NO: 361384 - RNA, 19 nt, Artificial Sequence
  Description of Artificial Sequence: Synthetic oligonucleotide
ugauuaagacacgaagaga

SEQ ID NO: 361385 - RNA, 19 nt, Artificial Sequence
  Description of Artificial Sequence: Synthetic oligonucleotide
ugucaaacugaauaauauu

SEQ ID NO: 361386 - RNA, 19 nt, Artificial Sequence
  Description of Artificial Sequence: Synthetic oligonucleotide
uguaggacuuuguaaguau

SEQ ID NO: 361387 - RNA, 19 nt, Artificial Sequence
  Description of Artificial Sequence: Synthetic oligonucleotide
aggauuuaacauuacucaa

SEQ ID NO: 361388 - RNA, 19 nt, Artificial Sequence
  Description of Artificial Sequence: Synthetic oligonucleotide
ugaucuguaagucgguauu

SEQ ID NO: 361389 - RNA, 19 nt, Artificial Sequence
  Description of Artificial Sequence: Synthetic oligonucleotide
ccucaauauucaaugaagg

SEQ ID NO: 361390 - RNA, 19 nt, Artificial Sequence
  Description of Artificial Sequence: Synthetic oligonucleotide
uuagaggcuaauguggaaa

SEQ ID NO: 361391 - RNA, 19 nt, Artificial Sequence
  Description of Artificial Sequence: Synthetic oligonucleotide
aggucgacugaguacuuuc

SEQ ID NO: 361392 - RNA, 19 nt, Artificial Sequence
  Description of Artificial Sequence: Synthetic oligonucleotide
uguugaaagagaugcucaa

SEQ ID NO: 361393 - RNA, 19 nt, Artificial Sequence
  Description of Artificial Sequence: Synthetic oligonucleotide
agggaaaucuggcagugga

SEQ ID NO: 361394 - RNA, 19 nt, Artificial Sequence
  Description of Artificial Sequence: Synthetic oligonucleotide
aaaagugauuuaagggcug

SEQ ID NO: 361395 - RNA, 19 nt, Artificial Sequence
  Description of Artificial Sequence: Synthetic oligonucleotide
gguguuaagcacuuugcug

SEQ ID NO: 361396 - RNA, 19 nt, Artificial Sequence
  Description of Artificial Sequence: Synthetic oligonucleotide
uuguuccgugaacugaagc

SEQ ID NO: 361397 - RNA, 19 nt, Artificial Sequence
  Description of Artificial Sequence: Synthetic oligonucleotide
aguagucaauacuuuuaca

SEQ ID NO: 361398 - RNA, 19 nt, Artificial Sequence
  Description of Artificial Sequence: Synthetic oligonucleotide
aauugagccuucugcacuu

SEQ ID NO: 361399 - RNA, 19 nt, Artificial Sequence
  Description of Artificial Sequence: Synthetic oligonucleotide
uugaaagugcaaacacaac

SEQ ID NO: 361400 - RNA, 19 nt, Artificial Sequence
  Description of Artificial Sequence: Synthetic oligonucleotide
agacaaggcauuguuaacu

SEQ ID NO: 361401 - RNA, 19 nt, Artificial Sequence
  Description of Artificial Sequence: Synthetic oligonucleotide
acagaaagauugugccgac

SEQ ID NO: 361402 - RNA, 19 nt, Artificial Sequence
  Description of Artificial Sequence: Synthetic oligonucleotide
agaagguucacaaaacgau

SEQ ID NO: 361403 - RNA, 19 nt, Artificial Sequence
  Description of Artificial Sequence: Synthetic oligonucleotide
acuguucaaacaucaucug

SEQ ID NO: 361404 - RNA, 19 nt, Artificial Sequence
  Description of Artificial Sequence: Synthetic oligonucleotide
ucuaucaauguggugcacu

SEQ ID NO: 361405 - RNA, 19 nt, Artificial Sequence
  Description of Artificial Sequence: Synthetic oligonucleotide
gcagaagguucacaaaacg

SEQ ID NO: 361406 - RNA, 19 nt, Artificial Sequence
  Description of Artificial Sequence: Synthetic oligonucleotide
cuuguucucuauuaucuga

SEQ ID NO: 361407 - RNA, 19 nt, Artificial Sequence
  Description of Artificial Sequence: Synthetic oligonucleotide
agcuuacuuccauaccagg

SEQ ID NO: 361408 - RNA, 19 nt, Artificial Sequence
  Description of Artificial Sequence: Synthetic oligonucleotide
uguucucuauuaucugaug

SEQ ID NO: 361409 - RNA, 19 nt, Artificial Sequence
  Description of Artificial Sequence: Synthetic oligonucleotide
gaagccuuaauacucaauu

SEQ ID NO: 361410 - RNA, 19 nt, Artificial Sequence
  Description of Artificial Sequence: Synthetic oligonucleotide
uuuguuccgugaacugaag

SEQ ID NO: 361411 - RNA, 19 nt, Artificial Sequence
  Description of Artificial Sequence: Synthetic oligonucleotide
uccuuuuccuuuaguaaaa

SEQ ID NO: 361412 - RNA, 19 nt, Artificial Sequence
  Description of Artificial Sequence: Synthetic oligonucleotide
aaggauuuuguagaagcuu

SEQ ID NO: 361413 - RNA, 19 nt, Artificial Sequence
  Description of Artificial Sequence: Synthetic oligonucleotide
auguggugcacuuuauagu

SEQ ID NO: 361414 - RNA, 19 nt, Artificial Sequence
  Description of Artificial Sequence: Synthetic oligonucleotide
auauauuguuugcugcuau

SEQ ID NO: 361415 - RNA, 19 nt, Artificial Sequence
  Description of Artificial Sequence: Synthetic oligonucleotide
gguucuaagcucuuaggac

SEQ ID NO: 361416 - RNA, 19 nt, Artificial Sequence
  Description of Artificial Sequence: Synthetic oligonucleotide
uuguucagggacucacaag

SEQ ID NO: 361417 - RNA, 19 nt, Artificial Sequence
  Description of Artificial Sequence: Synthetic oligonucleotide
ucugcuuaguucuuuccua

SEQ ID NO: 361418 - RNA, 19 nt, Artificial Sequence
  Description of Artificial Sequence: Synthetic oligonucleotide
aagcuuacuuccauaccag

SEQ ID NO: 361419 - RNA, 19 nt, Artificial Sequence
  Description of Artificial Sequence: Synthetic oligonucleotide
ucucuauuaucugauguua

SEQ ID NO: 361420 - RNA, 19 nt, Artificial Sequence
  Description of Artificial Sequence: Synthetic oligonucleotide
gcauuguuaacucaucuuc

SEQ ID NO: 361421 - RNA, 19 nt, Artificial Sequence
  Description of Artificial Sequence: Synthetic oligonucleotide
cauuguuaacucaucuuca

SEQ ID NO: 361422 - RNA, 19 nt, Artificial Sequence
  Description of Artificial Sequence: Synthetic oligonucleotide
aagucgguauucuucuuuu

SEQ ID NO: 361423 - RNA, 19 nt, Artificial Sequence
  Description of Artificial Sequence: Synthetic oligonucleotide
uaagucgguauucuucuuu

SEQ ID NO: 361424 - RNA, 19 nt, Artificial Sequence
  Description of Artificial Sequence: Synthetic oligonucleotide
gagucaauaagauuucaau

SEQ ID NO: 361425 - RNA, 19 nt, Artificial Sequence
  Description of Artificial Sequence: Synthetic oligonucleotide
auugugccgacaaagauuu

SEQ ID NO: 361426 - RNA, 19 nt, Artificial Sequence
  Description of Artificial Sequence: Synthetic oligonucleotide
gaagguucacaaaacgauc

SEQ ID NO: 361427 - RNA, 19 nt, Artificial Sequence
  Description of Artificial Sequence: Synthetic oligonucleotide
uuugaccauccuuucacau

SEQ ID NO: 361428 - RNA, 19 nt, Artificial Sequence
  Description of Artificial Sequence: Synthetic oligonucleotide
aagauugugccgacaaaga

SEQ ID NO: 361429 - RNA, 19 nt, Artificial Sequence
  Description of Artificial Sequence: Synthetic oligonucleotide
ccuacuucuucauuuagug

SEQ ID NO: 361430 - RNA, 19 nt, Artificial Sequence
  Description of Artificial Sequence: Synthetic oligonucleotide
aaucaaacguggauccuga

SEQ ID NO: 361431 - RNA, 19 nt, Artificial Sequence
  Description of Artificial Sequence: Synthetic oligonucleotide
ccuaguacuugauuaagac

SEQ ID NO: 361432 - RNA, 19 nt, Artificial Sequence
  Description of Artificial Sequence: Synthetic oligonucleotide
ugccaccuccaauauauga

SEQ ID NO: 361433 - RNA, 19 nt, Artificial Sequence
  Description of Artificial Sequence: Synthetic oligonucleotide
cauuacuccagccugaagu

SEQ ID NO: 361434 - RNA, 19 nt, Artificial Sequence
  Description of Artificial Sequence: Synthetic oligonucleotide
uggugcacuuuauaguagu

SEQ ID NO: 361435 - RNA, 19 nt, Artificial Sequence
  Description of Artificial Sequence: Synthetic oligonucleotide
cugcacagaaugcaagaag

SEQ ID NO: 361436 - RNA, 19 nt, Artificial Sequence
  Description of Artificial Sequence: Synthetic oligonucleotide
agguucacaaaacgaucag

SEQ ID NO: 361437 - RNA, 19 nt, Artificial Sequence
  Description of Artificial Sequence: Synthetic oligonucleotide
agauugugccgacaaagau

SEQ ID NO: 361438 - RNA, 19 nt, Artificial Sequence
  Description of Artificial Sequence: Synthetic oligonucleotide
ccugguaagauaaucagca

SEQ ID NO: 361439 - RNA, 19 nt, Artificial Sequence
  Description of Artificial Sequence: Synthetic oligonucleotide
uguuuguaacagaaagauu

SEQ ID NO: 361440 - RNA, 19 nt, Artificial Sequence
  Description of Artificial Sequence: Synthetic oligonucleotide
uuguucaacucuucuugcu

SEQ ID NO: 361441 - RNA, 19 nt, Artificial Sequence
  Description of Artificial Sequence: Synthetic oligonucleotide
gagcacauggcgcagcuga

SEQ ID NO: 361442 - RNA, 19 nt, Artificial Sequence
  Description of Artificial Sequence: Synthetic oligonucleotide
acugccaccuccaauauau

SEQ ID NO: 361443 - RNA, 19 nt, Artificial Sequence
  Description of Artificial Sequence: Synthetic oligonucleotide
cagaugcucgguuucuugc

SEQ ID NO: 361444 - RNA, 19 nt, Artificial Sequence
  Description of Artificial Sequence: Synthetic oligonucleotide
cuuguuaggguaccaucac

SEQ ID NO: 361445 - RNA, 19 nt, Artificial Sequence
  Description of Artificial Sequence: Synthetic oligonucleotide
auaccugguaagauaauca

SEQ ID NO: 361446 - RNA, 19 nt, Artificial Sequence
  Description of Artificial Sequence: Synthetic oligonucleotide
ggucuuucgcauuuagaag

SEQ ID NO: 361447 - RNA, 19 nt, Artificial Sequence
  Description of Artificial Sequence: Synthetic oligonucleotide
auuacuccagccugaaguu

SEQ ID NO: 361448 - RNA, 19 nt, Artificial Sequence
  Description of Artificial Sequence: Synthetic oligonucleotide
agcaggucgacugaguacu

SEQ ID NO: 361449 - RNA, 19 nt, Artificial Sequence
  Description of Artificial Sequence: Synthetic oligonucleotide
gugcuaggaagcuuauaag

SEQ ID NO: 361450 - RNA, 19 nt, Artificial Sequence
  Description of Artificial Sequence: Synthetic oligonucleotide
gcuaggaagcuuauaagag

SEQ ID NO: 361451 - RNA, 19 nt, Artificial Sequence
  Description of Artificial Sequence: Synthetic oligonucleotide
auuaagacacgaagagaag

SEQ ID NO: 361452 - RNA, 19 nt, Artificial Sequence
  Description of Artificial Sequence: Synthetic oligonucleotide
acaauauaccaagcucuuc

SEQ ID NO: 361453 - RNA, 19 nt, Artificial Sequence
  Description of Artificial Sequence: Synthetic oligonucleotide
agcaagcuugcacaauuca

SEQ ID NO: 361454 - RNA, 19 nt, Artificial Sequence
  Description of Artificial Sequence: Synthetic oligonucleotide
gacucuaacuucuuacugu

SEQ ID NO: 361455 - RNA, 19 nt, Artificial Sequence
  Description of Artificial Sequence: Synthetic oligonucleotide
uauauuguuugcugcuaua

SEQ ID NO: 361456 - RNA, 19 nt, Artificial Sequence
  Description of Artificial Sequence: Synthetic oligonucleotide
uuccauguaggacuuugua

SEQ ID NO: 361457 - RNA, 19 nt, Artificial Sequence
  Description of Artificial Sequence: Synthetic oligonucleotide
guacuuguucucuauuauc

SEQ ID NO: 361458 - RNA, 19 nt, Artificial Sequence
  Description of Artificial Sequence: Synthetic oligonucleotide
cuacuaacuggcucuggac

SEQ ID NO: 361459 - RNA, 19 nt, Artificial Sequence
  Description of Artificial Sequence: Synthetic oligonucleotide
cugucucugcuugaguucg

SEQ ID NO: 361460 - RNA, 19 nt, Artificial Sequence
  Description of Artificial Sequence: Synthetic oligonucleotide
aucaaacguauucauuuua

SEQ ID NO: 361461 - RNA, 19 nt, Artificial Sequence
  Description of Artificial Sequence: Synthetic oligonucleotide
acauaccugcaaguguucg

SEQ ID NO: 361462 - RNA, 19 nt, Artificial Sequence
  Description of Artificial Sequence: Synthetic oligonucleotide
uacugagcgaucagucugu

SEQ ID NO: 361463 - RNA, 19 nt, Artificial Sequence
  Description of Artificial Sequence: Synthetic oligonucleotide
ucuuuccgacuccagcugu

SEQ ID NO: 361464 - RNA, 19 nt, Artificial Sequence
  Description of Artificial Sequence: Synthetic oligonucleotide
uucccaauccagacuguac

SEQ ID NO: 361465 - RNA, 19 nt, Artificial Sequence
  Description of Artificial Sequence: Synthetic oligonucleotide
agucgguauucuucuuuuc

SEQ ID NO: 361466 - RNA, 19 nt, Artificial Sequence
  Description of Artificial Sequence: Synthetic oligonucleotide
uucaguagucucauuucuu

SEQ ID NO: 361467 - RNA, 19 nt, Artificial Sequence
  Description of Artificial Sequence: Synthetic oligonucleotide
cagaugauaacuguuuaga

SEQ ID NO: 361468 - RNA, 19 nt, Artificial Sequence
  Description of Artificial Sequence: Synthetic oligonucleotide
auaccugcaaguguucgug

SEQ ID NO: 361469 - RNA, 19 nt, Artificial Sequence
  Description of Artificial Sequence: Synthetic oligonucleotide
aacauaccugcaaguguuc

SEQ ID NO: 361470 - RNA, 19 nt, Artificial Sequence
  Description of Artificial Sequence: Synthetic oligonucleotide
agucgaggaacaguuacca

SEQ ID NO: 361471 - RNA, 19 nt, Artificial Sequence
  Description of Artificial Sequence: Synthetic oligonucleotide
uacauaaacuguuguucua

SEQ ID NO: 361472 - RNA, 19 nt, Artificial Sequence
  Description of Artificial Sequence: Synthetic oligonucleotide
gcagaugauaacuguuuag

SEQ ID NO: 361473 - RNA, 19 nt, Artificial Sequence
  Description of Artificial Sequence: Synthetic oligonucleotide
uguucauaccugguaagau

SEQ ID NO: 361474 - RNA, 19 nt, Artificial Sequence
  Description of Artificial Sequence: Synthetic oligonucleotide
ggaagaagccuuaauacuc

SEQ ID NO: 361475 - RNA, 19 nt, Artificial Sequence
  Description of Artificial Sequence: Synthetic oligonucleotide
auuguaggcagcagaaggu

SEQ ID NO: 361476 - RNA, 19 nt, Artificial Sequence
  Description of Artificial Sequence: Synthetic oligonucleotide
acaaaacgaucagucgagg

SEQ ID NO: 361477 - RNA, 19 nt, Artificial Sequence
  Description of Artificial Sequence: Synthetic oligonucleotide
uaccauuacuccagccuga

SEQ ID NO: 361478 - RNA, 19 nt, Artificial Sequence
  Description of Artificial Sequence: Synthetic oligonucleotide
aguucuuuccuaaggacau

SEQ ID NO: 361479 - RNA, 19 nt, Artificial Sequence
  Description of Artificial Sequence: Synthetic oligonucleotide
uaugucagauauucuuaua

SEQ ID NO: 361480 - RNA, 19 nt, Artificial Sequence
  Description of Artificial Sequence: Synthetic oligonucleotide
acuaacuggcucuggacuu

SEQ ID NO: 361481 - RNA, 19 nt, Artificial Sequence
  Description of Artificial Sequence: Synthetic oligonucleotide
aaacgaccuucuaauugag

SEQ ID NO: 361482 - RNA, 19 nt, Artificial Sequence
  Description of Artificial Sequence: Synthetic oligonucleotide
uuccccuacuucuucauuu

SEQ ID NO: 361483 - RNA, 19 nt, Artificial Sequence
  Description of Artificial Sequence: Synthetic oligonucleotide
cagucgaggaacaguuacc

SEQ ID NO: 361484 - RNA, 19 nt, Artificial Sequence
  Description of Artificial Sequence: Synthetic oligonucleotide
gacacgaagagaaguguuc

SEQ ID NO: 361485 - RNA, 19 nt, Artificial Sequence
  Description of Artificial Sequence: Synthetic oligonucleotide
cauuaugucagauauucuu

SEQ ID NO: 361486 - RNA, 19 nt, Artificial Sequence
  Description of Artificial Sequence: Synthetic oligonucleotide
ugcuugagugacucauuca

SEQ ID NO: 361487 - RNA, 19 nt, Artificial Sequence
  Description of Artificial Sequence: Synthetic oligonucleotide
aacgaagcagagccacagu

SEQ ID NO: 361488 - RNA, 19 nt, Artificial Sequence
  Description of Artificial Sequence: Synthetic oligonucleotide
ggaaaucuggcaguggagc

SEQ ID NO: 361489 - RNA, 19 nt, Artificial Sequence
  Description of Artificial Sequence: Synthetic oligonucleotide
auaguagucaauacuuuua

SEQ ID NO: 361490 - RNA, 19 nt, Artificial Sequence
  Description of Artificial Sequence: Synthetic oligonucleotide
gccuauauauauuguuugc

SEQ ID NO: 361491 - RNA, 19 nt, Artificial Sequence
  Description of Artificial Sequence: Synthetic oligonucleotide
uugcugcuauacuuucucc

SEQ ID NO: 361492 - RNA, 19 nt, Artificial Sequence
  Description of Artificial Sequence: Synthetic oligonucleotide
aaacuguggaucauugcua

SEQ ID NO: 361493 - RNA, 19 nt, Artificial Sequence
  Description of Artificial Sequence: Synthetic oligonucleotide
gccacaguagguucuaagc

SEQ ID NO: 361494 - RNA, 19 nt, Artificial Sequence
  Description of Artificial Sequence: Synthetic oligonucleotide
caguagucucauuucuuug

SEQ ID NO: 361495 - RNA, 19 nt, Artificial Sequence
  Description of Artificial Sequence: Synthetic oligonucleotide
gaguaagcagaugauaacu

SEQ ID NO: 361496 - RNA, 19 nt, Artificial Sequence
  Description of Artificial Sequence: Synthetic oligonucleotide
uuacauucucugucuacua

SEQ ID NO: 361497 - RNA, 19 nt, Artificial Sequence
  Description of Artificial Sequence: Synthetic oligonucleotide
uaauuucccuaaagccaca

SEQ ID NO: 361498 - RNA, 19 nt, Artificial Sequence
  Description of Artificial Sequence: Synthetic oligonucleotide
gauacugagcgaucagucu

SEQ ID NO: 361499 - RNA, 19 nt, Artificial Sequence
  Description of Artificial Sequence: Synthetic oligonucleotide
uagucucauuucuuugaac

SEQ ID NO: 361500 - RNA, 19 nt, Artificial Sequence
  Description of Artificial Sequence: Synthetic oligonucleotide
ucgcauuuagaagcccuag

SEQ ID NO: 361501 - RNA, 19 nt, Artificial Sequence
  Description of Artificial Sequence: Synthetic oligonucleotide
agcagaugauaacuguuua

SEQ ID NO: 361502 - RNA, 19 nt, Artificial Sequence
  Description of Artificial Sequence: Synthetic oligonucleotide
uucgcauuuagaagcccua

SEQ ID NO: 361503 - RNA, 19 nt, Artificial Sequence
  Description of Artificial Sequence: Synthetic oligonucleotide
cuuaggacggcuucccaga

SEQ ID NO: 361504 - RNA, 19 nt, Artificial Sequence
  Description of Artificial Sequence: Synthetic oligonucleotide
ugcuaucaugugagaaugu

SEQ ID NO: 361505 - RNA, 19 nt, Artificial Sequence
  Description of Artificial Sequence: Synthetic oligonucleotide
ugccgacaaagauuugcca

SEQ ID NO: 361506 - RNA, 19 nt, Artificial Sequence
  Description of Artificial Sequence: Synthetic oligonucleotide
agauccauuagcaggucga

SEQ ID NO: 361507 - RNA, 19 nt, Artificial Sequence
  Description of Artificial Sequence: Synthetic oligonucleotide
ccaaacgaccuucuaauug

SEQ ID NO: 361508 - RNA, 19 nt, Artificial Sequence
  Description of Artificial Sequence: Synthetic oligonucleotide
caaaacgaucagucgagga

SEQ ID NO: 361509 - RNA, 19 nt, Artificial Sequence
  Description of Artificial Sequence: Synthetic oligonucleotide
caaguacuaaggcagggaa

SEQ ID NO: 361510 - RNA, 19 nt, Artificial Sequence
  Description of Artificial Sequence: Synthetic oligonucleotide
aauuucccuaaagccacaa

SEQ ID NO: 361511 - RNA, 19 nt, Artificial Sequence
  Description of Artificial Sequence: Synthetic oligonucleotide
cucucuuuagaggcuaaug

SEQ ID NO: 361512 - RNA, 19 nt, Artificial Sequence
  Description of Artificial Sequence: Synthetic oligonucleotide
ucaauguggugcacuuuau

SEQ ID NO: 361513 - RNA, 19 nt, Artificial Sequence
  Description of Artificial Sequence: Synthetic oligonucleotide
cacaagugaucuguaaguc

SEQ ID NO: 361514 - RNA, 19 nt, Artificial Sequence
  Description of Artificial Sequence: Synthetic oligonucleotide
gacaaagauuugccaauaa

SEQ ID NO: 361515 - RNA, 19 nt, Artificial Sequence
  Description of Artificial Sequence: Synthetic oligonucleotide
ugcugccuauauauauugu

SEQ ID NO: 361516 - RNA, 19 nt, Artificial Sequence
  Description of Artificial Sequence: Synthetic oligonucleotide
aacuucuuacuguguugaa

SEQ ID NO: 361517 - RNA, 19 nt, Artificial Sequence
  Description of Artificial Sequence: Synthetic oligonucleotide
cuuauaagaguucgauaaa

SEQ ID NO: 361518 - RNA, 19 nt, Artificial Sequence
  Description of Artificial Sequence: Synthetic oligonucleotide
guaagcagaugauaacugu

SEQ ID NO: 361519 - RNA, 19 nt, Artificial Sequence
  Description of Artificial Sequence: Synthetic oligonucleotide
agaaucugcuaccuuuguu

SEQ ID NO: 361520 - RNA, 19 nt, Artificial Sequence
  Description of Artificial Sequence: Synthetic oligonucleotide
aagagaugcucaauaucau

SEQ ID NO: 361521 - RNA, 19 nt, Artificial Sequence
  Description of Artificial Sequence: Synthetic oligonucleotide
aguguucgugccucugucu

SEQ ID NO: 361522 - RNA, 19 nt, Artificial Sequence
  Description of Artificial Sequence: Synthetic oligonucleotide
acaacgauacugagcgauc

SEQ ID NO: 361523 - RNA, 19 nt, Artificial Sequence
  Description of Artificial Sequence: Synthetic oligonucleotide
uaggaguaagcagaugaua

SEQ ID NO: 361524 - RNA, 19 nt, Artificial Sequence
  Description of Artificial Sequence: Synthetic oligonucleotide
auauaccaagcucuucguu

SEQ ID NO: 361525 - RNA, 19 nt, Artificial Sequence
  Description of Artificial Sequence: Synthetic oligonucleotide
gaagcuuauaagaguucga

SEQ ID NO: 361526 - RNA, 19 nt, Artificial Sequence
  Description of Artificial Sequence: Synthetic oligonucleotide
uucaaugaaggagcauuau

SEQ ID NO: 361527 - RNA, 19 nt, Artificial Sequence
  Description of Artificial Sequence: Synthetic oligonucleotide
aacgaucagucgaggaaca

SEQ ID NO: 361528 - RNA, 19 nt, Artificial Sequence
  Description of Artificial Sequence: Synthetic oligonucleotide
agcccuaguacuugauuaa

SEQ ID NO: 361529 - RNA, 19 nt, Artificial Sequence
  Description of Artificial Sequence: Synthetic oligonucleotide
aaguacuaaggcagggaaa

SEQ ID NO: 361530 - RNA, 19 nt, Artificial Sequence
  Description of Artificial Sequence: Synthetic oligonucleotide
agagucaauaagauuucaa

SEQ ID NO: 361531 - RNA, 19 nt, Artificial Sequence
  Description of Artificial Sequence: Synthetic oligonucleotide
ccuaaagccacaauguuua

SEQ ID NO: 361532 - RNA, 19 nt, Artificial Sequence
  Description of Artificial Sequence: Synthetic oligonucleotide
gcuaccuuuguuccaaauc

SEQ ID NO: 361533 - RNA, 19 nt, Artificial Sequence
  Description of Artificial Sequence: Synthetic oligonucleotide
gucgaggaacaguuaccag

SEQ ID NO: 361534 - RNA, 19 nt, Artificial Sequence
  Description of Artificial Sequence: Synthetic oligonucleotide
acgauacugagcgaucagu

SEQ ID NO: 361535 - RNA, 19 nt, Artificial Sequence
  Description of Artificial Sequence: Synthetic oligonucleotide
ugaauacaucaaacguauu

SEQ ID NO: 361536 - RNA, 19 nt, Artificial Sequence
  Description of Artificial Sequence: Synthetic oligonucleotide
uuaggacggcuucccagaa

SEQ ID NO: 361537 - RNA, 19 nt, Artificial Sequence
  Description of Artificial Sequence: Synthetic oligonucleotide
gugccgacaaagauuugcc

SEQ ID NO: 361538 - RNA, 19 nt, Artificial Sequence
  Description of Artificial Sequence: Synthetic oligonucleotide
uucuagggaagaagccuua

SEQ ID NO: 361539 - RNA, 19 nt, Artificial Sequence
  Description of Artificial Sequence: Synthetic oligonucleotide
guucgauaaaaggauuuaa

SEQ ID NO: 361540 - RNA, 19 nt, Artificial Sequence
  Description of Artificial Sequence: Synthetic oligonucleotide
gcaagcuugcacaauucag

SEQ ID NO: 361541 - RNA, 19 nt, Artificial Sequence
  Description of Artificial Sequence: Synthetic oligonucleotide
auaccaggaaccaauuguu

SEQ ID NO: 361542 - RNA, 19 nt, Artificial Sequence
  Description of Artificial Sequence: Synthetic oligonucleotide
cugucuacuaacuggcucu

SEQ ID NO: 361543 - RNA, 19 nt, Artificial Sequence
  Description of Artificial Sequence: Synthetic oligonucleotide
gacaacgauacugagcgau

SEQ ID NO: 361544 - RNA, 19 nt, Artificial Sequence
  Description of Artificial Sequence: Synthetic oligonucleotide
guaggcagcagaagguuca

SEQ ID NO: 361545 - RNA, 19 nt, Artificial Sequence
  Description of Artificial Sequence: Synthetic oligonucleotide
gcacuucuagggaagaagc

SEQ ID NO: 361546 - RNA, 19 nt, Artificial Sequence
  Description of Artificial Sequence: Synthetic oligonucleotide
cacaauucagaaucugcua

SEQ ID NO: 361547 - RNA, 19 nt, Artificial Sequence
  Description of Artificial Sequence: Synthetic oligonucleotide
uuuccgacuccagcuguug

SEQ ID NO: 361548 - RNA, 19 nt, Artificial Sequence
  Description of Artificial Sequence: Synthetic oligonucleotide
uuccgacuccagcuguugu

SEQ ID NO: 361549 - RNA, 19 nt, Artificial Sequence
  Description of Artificial Sequence: Synthetic oligonucleotide
ucaucugacugagcacaug

SEQ ID NO: 361550 - RNA, 19 nt, Artificial Sequence
  Description of Artificial Sequence: Synthetic oligonucleotide
ugugugcuaggaagcuuau

SEQ ID NO: 361551 - RNA, 19 nt, Artificial Sequence
  Description of Artificial Sequence: Synthetic oligonucleotide
cauugcuaucaugugagaa

SEQ ID NO: 361552 - RNA, 19 nt, Artificial Sequence
  Description of Artificial Sequence: Synthetic oligonucleotide
gauugugccgacaaagauu

SEQ ID NO: 361553 - RNA, 19 nt, Artificial Sequence
  Description of Artificial Sequence: Synthetic oligonucleotide
ggcagcagaagguucacaa

SEQ ID NO: 361554 - RNA, 19 nt, Artificial Sequence
  Description of Artificial Sequence: Synthetic oligonucleotide
uccccuacuucuucauuua

SEQ ID NO: 361555 - RNA, 19 nt, Artificial Sequence
  Description of Artificial Sequence: Synthetic oligonucleotide
gucaauacuuuuacaauau

SEQ ID NO: 361556 - RNA, 19 nt, Artificial Sequence
  Description of Artificial Sequence: Synthetic oligonucleotide
aggaaccaauuguuuuagu

SEQ ID NO: 361557 - RNA, 19 nt, Artificial Sequence
  Description of Artificial Sequence: Synthetic oligonucleotide
auguaggacuuuguaagua

SEQ ID NO: 361558 - RNA, 19 nt, Artificial Sequence
  Description of Artificial Sequence: Synthetic oligonucleotide
ugcuaccuuuguuccaaau

SEQ ID NO: 361559 - RNA, 19 nt, Artificial Sequence
  Description of Artificial Sequence: Synthetic oligonucleotide
guggugcacuuuauaguag

SEQ ID NO: 361560 - RNA, 19 nt, Artificial Sequence
  Description of Artificial Sequence: Synthetic oligonucleotide
cagcaagcuugcacaauuc

SEQ ID NO: 361561 - RNA, 19 nt, Artificial Sequence
  Description of Artificial Sequence: Synthetic oligonucleotide
guguucauaccugguaaga

SEQ ID NO: 361562 - RNA, 19 nt, Artificial Sequence
  Description of Artificial Sequence: Synthetic oligonucleotide
gcaauauucccaauccaga

SEQ ID NO: 361563 - RNA, 19 nt, Artificial Sequence
  Description of Artificial Sequence: Synthetic oligonucleotide
gguaagauaaucagcaauu

SEQ ID NO: 361564 - RNA, 19 nt, Artificial Sequence
  Description of Artificial Sequence: Synthetic oligonucleotide
gggaagaagccuuaauacu

SEQ ID NO: 361565 - RNA, 19 nt, Artificial Sequence
  Description of Artificial Sequence: Synthetic oligonucleotide
ugacaacgauacugagcga

SEQ ID NO: 361566 - RNA, 19 nt, Artificial Sequence
  Description of Artificial Sequence: Synthetic oligonucleotide
gccgacaaagauuugccaa

SEQ ID NO: 361567 - RNA, 19 nt, Artificial Sequence
  Description of Artificial Sequence: Synthetic oligonucleotide
agaggcuaauguggaaagu

SEQ ID NO: 361568 - RNA, 19 nt, Artificial Sequence
  Description of Artificial Sequence: Synthetic oligonucleotide
ugcaaguguucgugccucu

SEQ ID NO: 361569 - RNA, 19 nt, Artificial Sequence
  Description of Artificial Sequence: Synthetic oligonucleotide
auuagcaggucgacugagu

SEQ ID NO: 361570 - RNA, 19 nt, Artificial Sequence
  Description of Artificial Sequence: Synthetic oligonucleotide
agaguucgauaaaaggauu

SEQ ID NO: 361571 - RNA, 19 nt, Artificial Sequence
  Description of Artificial Sequence: Synthetic oligonucleotide
guucgugccucugucucug

SEQ ID NO: 361572 - RNA, 19 nt, Artificial Sequence
  Description of Artificial Sequence: Synthetic oligonucleotide
caacgauacugagcgauca

SEQ ID NO: 361573 - RNA, 19 nt, Artificial Sequence
  Description of Artificial Sequence: Synthetic oligonucleotide
acggcuucccagaaugcug

SEQ ID NO: 361574 - RNA, 19 nt, Artificial Sequence
  Description of Artificial Sequence: Synthetic oligonucleotide
ggaguaaucaaacguggau

SEQ ID NO: 361575 - RNA, 19 nt, Artificial Sequence
  Description of Artificial Sequence: Synthetic oligonucleotide
cugccuauauauauuguuu

SEQ ID NO: 361576 - RNA, 19 nt, Artificial Sequence
  Description of Artificial Sequence: Synthetic oligonucleotide
aagaccucauccagauuuu

SEQ ID NO: 361577 - RNA, 19 nt, Artificial Sequence
  Description of Artificial Sequence: Synthetic oligonucleotide
gucuacuaacuggcucugg

SEQ ID NO: 361578 - RNA, 19 nt, Artificial Sequence
  Description of Artificial Sequence: Synthetic oligonucleotide
acugagcgaucagucuguc

SEQ ID NO: 361579 - RNA, 19 nt, Artificial Sequence
  Description of Artificial Sequence: Synthetic oligonucleotide
gggcuuuugcuuccaggag

SEQ ID NO: 361580 - RNA, 19 nt, Artificial Sequence
  Description of Artificial Sequence: Synthetic oligonucleotide
uuggauucuuaaggagauc

SEQ ID NO: 361581 - RNA, 19 nt, Artificial Sequence
  Description of Artificial Sequence: Synthetic oligonucleotide
cauguaggacuuuguaagu

SEQ ID NO: 361582 - RNA, 19 nt, Artificial Sequence
  Description of Artificial Sequence: Synthetic oligonucleotide
gcuuacuuccauaccagga

SEQ ID NO: 361583 - RNA, 19 nt, Artificial Sequence
  Description of Artificial Sequence: Synthetic oligonucleotide
aaccaacgaagcagagcca

SEQ ID NO: 361584 - RNA, 19 nt, Artificial Sequence
  Description of Artificial Sequence: Synthetic oligonucleotide
caaacguauucauuuuaau

SEQ ID NO: 361585 - RNA, 19 nt, Artificial Sequence
  Description of Artificial Sequence: Synthetic oligonucleotide
cagggaaaucuggcagugg

SEQ ID NO: 361586 - RNA, 19 nt, Artificial Sequence
  Description of Artificial Sequence: Synthetic oligonucleotide
agcggggucuuucgcauuu

SEQ ID NO: 361587 - RNA, 19 nt, Artificial Sequence
  Description of Artificial Sequence: Synthetic oligonucleotide
aggcuaauguggaaaguuu

SEQ ID NO: 361588 - RNA, 19 nt, Artificial Sequence
  Description of Artificial Sequence: Synthetic oligonucleotide
aucaaacguggauccugaa

SEQ ID NO: 361589 - RNA, 19 nt, Artificial Sequence
  Description of Artificial Sequence: Synthetic oligonucleotide
gaguucgauaaaaggauuu

SEQ ID NO: 361590 - RNA, 19 nt, Artificial Sequence
  Description of Artificial Sequence: Synthetic oligonucleotide
uucuaucaauguggugcac

SEQ ID NO: 361591 - RNA, 19 nt, Artificial Sequence
  Description of Artificial Sequence: Synthetic oligonucleotide
agaagccuuaauacucaau

SEQ ID NO: 361592 - RNA, 19 nt, Artificial Sequence
  Description of Artificial Sequence: Synthetic oligonucleotide
gggaaaucuggcaguggag

SEQ ID NO: 361593 - RNA, 19 nt, Artificial Sequence
  Description of Artificial Sequence: Synthetic oligonucleotide
uuacuccagccugaaguuu

SEQ ID NO: 361594 - RNA, 19 nt, Artificial Sequence
  Description of Artificial Sequence: Synthetic oligonucleotide
gccaauaaucccagacaag

SEQ ID NO: 361595 - RNA, 19 nt, Artificial Sequence
  Description of Artificial Sequence: Synthetic oligonucleotide
gggacucacaagugaucug

SEQ ID NO: 361596 - RNA, 19 nt, Artificial Sequence
  Description of Artificial Sequence: Synthetic oligonucleotide
cauaccugcaaguguucgu

SEQ ID NO: 361597 - RNA, 19 nt, Artificial Sequence
  Description of Artificial Sequence: Synthetic oligonucleotide
gaccuucuaauugagccuu

SEQ ID NO: 361598 - RNA, 19 nt, Artificial Sequence
  Description of Artificial Sequence: Synthetic oligonucleotide
cuaauguggaaaguuucau

SEQ ID NO: 361599 - RNA, 19 nt, Artificial Sequence
  Description of Artificial Sequence: Synthetic oligonucleotide
cugccaccuccaauauaug

SEQ ID NO: 361600 - RNA, 19 nt, Artificial Sequence
  Description of Artificial Sequence: Synthetic oligonucleotide
caucaaacguauucauuuu

SEQ ID NO: 361601 - RNA, 19 nt, Artificial Sequence
  Description of Artificial Sequence: Synthetic oligonucleotide
guacuaaggcagggaaauc

SEQ ID NO: 361602 - RNA, 19 nt, Artificial Sequence
  Description of Artificial Sequence: Synthetic oligonucleotide
cauccaaaggcugguuuaa

SEQ ID NO: 361603 - RNA, 19 nt, Artificial Sequence
  Description of Artificial Sequence: Synthetic oligonucleotide
gcccuaguacuugauuaag

SEQ ID NO: 361604 - RNA, 19 nt, Artificial Sequence
  Description of Artificial Sequence: Synthetic oligonucleotide
ggacucacaagugaucugu

SEQ ID NO: 361605 - RNA, 19 nt, Artificial Sequence
  Description of Artificial Sequence: Synthetic oligonucleotide
guuaggguaccaucaccau

SEQ ID NO: 361606 - RNA, 19 nt, Artificial Sequence
  Description of Artificial Sequence: Synthetic oligonucleotide
gacggcuucccagaaugcu

SEQ ID NO: 361607 - RNA, 19 nt, Artificial Sequence
  Description of Artificial Sequence: Synthetic oligonucleotide
gccaccuccaauauaugaa

SEQ ID NO: 361608 - RNA, 19 nt, Artificial Sequence
  Description of Artificial Sequence: Synthetic oligonucleotide
cccuaguacuugauuaaga

SEQ ID NO: 361609 - RNA, 19 nt, Artificial Sequence
  Description of Artificial Sequence: Synthetic oligonucleotide
cugagcgaucagucuguca

SEQ ID NO: 361610 - RNA, 19 nt, Artificial Sequence
  Description of Artificial Sequence: Synthetic oligonucleotide
caccacuuaaacuguggau

SEQ ID NO: 361611 - RNA, 19 nt, Artificial Sequence
  Description of Artificial Sequence: Synthetic oligonucleotide
cucgauggugacuguucaa

SEQ ID NO: 361612 - RNA, 19 nt, Artificial Sequence
  Description of Artificial Sequence: Synthetic oligonucleotide
gcucuggacuucuuuucuc

SEQ ID NO: 361613 - RNA, 19 nt, Artificial Sequence
  Description of Artificial Sequence: Synthetic oligonucleotide
ggugcacuuuauaguaguc

SEQ ID NO: 361614 - RNA, 19 nt, Artificial Sequence
  Description of Artificial Sequence: Synthetic oligonucleotide
cgauggugacuguucaaac

SEQ ID NO: 361615 - RNA, 19 nt, Artificial Sequence
  Description of Artificial Sequence: Synthetic oligonucleotide
guaaucaaacguggauccu

SEQ ID NO: 361616 - RNA, 19 nt, Artificial Sequence
  Description of Artificial Sequence: Synthetic oligonucleotide
cagaaagauugugccgaca

SEQ ID NO: 361617 - RNA, 19 nt, Artificial Sequence
  Description of Artificial Sequence: Synthetic oligonucleotide
gguuucuugcugccuauau

SEQ ID NO: 361618 - RNA, 19 nt, Artificial Sequence
  Description of Artificial Sequence: Synthetic oligonucleotide
ccaccacuuaaacugugga

SEQ ID NO: 361619 - RNA, 19 nt, Artificial Sequence
  Description of Artificial Sequence: Synthetic oligonucleotide
caaguuccauguaggacuu

SEQ ID NO: 361620 - RNA, 19 nt, Artificial Sequence
  Description of Artificial Sequence: Synthetic oligonucleotide
cuuuugcuuccaggagauc

SEQ ID NO: 361621 - RNA, 19 nt, Artificial Sequence
  Description of Artificial Sequence: Synthetic oligonucleotide
ccacaguagguucuaagcu

SEQ ID NO: 361622 - RNA, 19 nt, Artificial Sequence
  Description of Artificial Sequence: Synthetic oligonucleotide
guucguugacaacgauacu

SEQ ID NO: 361623 - RNA, 19 nt, Artificial Sequence
  Description of Artificial Sequence: Synthetic oligonucleotide
gaggaacaguuaccaguau

SEQ ID NO: 361624 - RNA, 19 nt, Artificial Sequence
  Description of Artificial Sequence: Synthetic oligonucleotide
aucagucgaggaacaguua

SEQ ID NO: 361625 - RNA, 19 nt, Artificial Sequence
  Description of Artificial Sequence: Synthetic oligonucleotide
ccauuacuccagccugaag

SEQ ID NO: 361626 - RNA, 19 nt, Artificial Sequence
  Description of Artificial Sequence: Synthetic oligonucleotide
ggaaagucugaugaauguu

SEQ ID NO: 361627 - RNA, 19 nt, Artificial Sequence
  Description of Artificial Sequence: Synthetic oligonucleotide
guaagucgguauucuucuu

SEQ ID NO: 361628 - RNA, 19 nt, Artificial Sequence
  Description of Artificial Sequence: Synthetic oligonucleotide
ccagaaugcuguugcucga

SEQ ID NO: 361629 - RNA, 19 nt, Artificial Sequence
  Description of Artificial Sequence: Synthetic oligonucleotide
ccgacaaagauuugccaau

SEQ ID NO: 361630 - RNA, 19 nt, Artificial Sequence
  Description of Artificial Sequence: Synthetic oligonucleotide
ccaacgaagcagagccaca

SEQ ID NO: 361631 - RNA, 19 nt, Artificial Sequence
  Description of Artificial Sequence: Synthetic oligonucleotide
cgacugaguacuuucuugu

SEQ ID NO: 361632 - RNA, 19 nt, Artificial Sequence
  Description of Artificial Sequence: Synthetic oligonucleotide
cccuacuucuucauuuagu

SEQ ID NO: 361633 - RNA, 19 nt, Artificial Sequence
  Description of Artificial Sequence: Synthetic oligonucleotide
cugcuaccuuuguuccaaa

SEQ ID NO: 361634 - RNA, 19 nt, Artificial Sequence
  Description of Artificial Sequence: Synthetic oligonucleotide
gugugcuaggaagcuuaua

SEQ ID NO: 361635 - RNA, 19 nt, Artificial Sequence
  Description of Artificial Sequence: Synthetic oligonucleotide
cggggucuuucgcauuuag

SEQ ID NO: 361636 - RNA, 19 nt, Artificial Sequence
  Description of Artificial Sequence: Synthetic oligonucleotide
cagaaugcuguugcucgau

SEQ ID NO: 361637 - RNA, 19 nt, Artificial Sequence
  Description of Artificial Sequence: Synthetic oligonucleotide
gcacuuuauaguagucaau

SEQ ID NO: 361638 - RNA, 19 nt, Artificial Sequence
  Description of Artificial Sequence: Synthetic oligonucleotide
caucaccauuuaugagaau

SEQ ID NO: 361639 - RNA, 19 nt, Artificial Sequence
  Description of Artificial Sequence: Synthetic oligonucleotide
cugucucaaucuguuuguu

SEQ ID NO: 361640 - RNA, 19 nt, Artificial Sequence
  Description of Artificial Sequence: Synthetic oligonucleotide
caguagguucuaagcucuu

SEQ ID NO: 361641 - RNA, 19 nt, Artificial Sequence
  Description of Artificial Sequence: Synthetic oligonucleotide
ccuucuaauugagccuucu

SEQ ID NO: 361642 - RNA, 19 nt, Artificial Sequence
  Description of Artificial Sequence: Synthetic oligonucleotide
caggucgacugaguacuuu

SEQ ID NO: 361643 - RNA, 19 nt, Artificial Sequence
  Description of Artificial Sequence: Synthetic oligonucleotide
gcggggucuuucgcauuua

SEQ ID NO: 361644 - RNA, 19 nt, Artificial Sequence
  Description of Artificial Sequence: Synthetic oligonucleotide
gcaggucgacugaguacuu

SEQ ID NO: 361645 - RNA, 19 nt, Artificial Sequence
  Description of Artificial Sequence: Synthetic oligonucleotide
aauaguauaaacuguauga

SEQ ID NO: 361646 - RNA, 19 nt, Artificial Sequence
  Description of Artificial Sequence: Synthetic oligonucleotide
aacuguaugaccuuaacag

SEQ ID NO: 361647 - RNA, 19 nt, Artificial Sequence
  Description of Artificial Sequence: Synthetic oligonucleotide
aacgaaagauuacauagcc

SEQ ID NO: 361648 - RNA, 19 nt, Artificial Sequence
  Description of Artificial Sequence: Synthetic oligonucleotide
ucuuuaaguacuaugaagc

SEQ ID NO: 361649 - RNA, 19 nt, Artificial Sequence
  Description of Artificial Sequence: Synthetic oligonucleotide
aauuaucucacauugacaa

SEQ ID NO: 361650 - RNA, 19 nt, Artificial Sequence
  Description of Artificial Sequence: Synthetic oligonucleotide
ucaaagaucgagcauagag

SEQ ID NO: 361651 - RNA, 19 nt, Artificial Sequence
  Description of Artificial Sequence: Synthetic oligonucleotide
uaaauggucacccuuaagc

SEQ ID NO: 361652 - RNA, 19 nt, Artificial Sequence
  Description of Artificial Sequence: Synthetic oligonucleotide
uauauuuagagacagaauu

SEQ ID NO: 361653 - RNA, 19 nt, Artificial Sequence
  Description of Artificial Sequence: Synthetic oligonucleotide
aacgcagugaaguagauga

SEQ ID NO: 361654 - RNA, 19 nt, Artificial Sequence
  Description of Artificial Sequence: Synthetic oligonucleotide
aaaauaguagccugaaaug

SEQ ID NO: 361655 - RNA, 19 nt, Artificial Sequence
  Description of Artificial Sequence: Synthetic oligonucleotide
aaguaagcuauguauuuac

SEQ ID NO: 361656 - RNA, 19 nt, Artificial Sequence
  Description of Artificial Sequence: Synthetic oligonucleotide
ugaguuugcacaacgaaag

SEQ ID NO: 361657 - RNA, 19 nt, Artificial Sequence
  Description of Artificial Sequence: Synthetic oligonucleotide
uuaaccaagaccauugcca

SEQ ID NO: 361658 - RNA, 19 nt, Artificial Sequence
  Description of Artificial Sequence: Synthetic oligonucleotide
ugaauauaaaagucuagag

SEQ ID NO: 361659 - RNA, 19 nt, Artificial Sequence
  Description of Artificial Sequence: Synthetic oligonucleotide
acauacaagagcuggaaac

SEQ ID NO: 361660 - RNA, 19 nt, Artificial Sequence
  Description of Artificial Sequence: Synthetic oligonucleotide
ugacaauuaucucacauug

SEQ ID NO: 361661 - RNA, 19 nt, Artificial Sequence
  Description of Artificial Sequence: Synthetic oligonucleotide
aaucguagacagcauuucc

SEQ ID NO: 361662 - RNA, 19 nt, Artificial Sequence
  Description of Artificial Sequence: Synthetic oligonucleotide
auagcuuugaauauaaaag

SEQ ID NO: 361663 - RNA, 19 nt, Artificial Sequence
  Description of Artificial Sequence: Synthetic oligonucleotide
ugcaagugcgaacugaagg

SEQ ID NO: 361664 - RNA, 19 nt, Artificial Sequence
  Description of Artificial Sequence: Synthetic oligonucleotide
uaaucgaaacccaaaaugu

SEQ ID NO: 361665 - RNA, 19 nt, Artificial Sequence
  Description of Artificial Sequence: Synthetic oligonucleotide
cauagaugugcuuuaaggg

SEQ ID NO: 361666 - RNA, 19 nt, Artificial Sequence
  Description of Artificial Sequence: Synthetic oligonucleotide
uguacuuucauuucagcca

SEQ ID NO: 361667 - RNA, 19 nt, Artificial Sequence
  Description of Artificial Sequence: Synthetic oligonucleotide
aauucgaggguuuaacuca

SEQ ID NO: 361668 - RNA, 19 nt, Artificial Sequence
  Description of Artificial Sequence: Synthetic oligonucleotide
ugggucaguaaacauaggg

SEQ ID NO: 361669 - RNA, 19 nt, Artificial Sequence
  Description of Artificial Sequence: Synthetic oligonucleotide
acauaacacagcucuaugc

SEQ ID NO: 361670 - RNA, 19 nt, Artificial Sequence
  Description of Artificial Sequence: Synthetic oligonucleotide
guaaucgaaacccaaaaug

SEQ ID NO: 361671 - RNA, 19 nt, Artificial Sequence
  Description of Artificial Sequence: Synthetic oligonucleotide
aaagaucgagcauagagau

SEQ ID NO: 361672 - RNA, 19 nt, Artificial Sequence
  Description of Artificial Sequence: Synthetic oligonucleotide
agucuagagaauuugccac

SEQ ID NO: 361673 - RNA, 19 nt, Artificial Sequence
  Description of Artificial Sequence: Synthetic oligonucleotide
uacuguguagcuaugaaac

SEQ ID NO: 361674 - RNA, 19 nt, Artificial Sequence
  Description of Artificial Sequence: Synthetic oligonucleotide
ucacaaaaguauuugaggu

SEQ ID NO: 361675 - RNA, 19 nt, Artificial Sequence
  Description of Artificial Sequence: Synthetic oligonucleotide
uuuuagggaguucugaaga

SEQ ID NO: 361676 - RNA, 19 nt, Artificial Sequence
  Description of Artificial Sequence: Synthetic oligonucleotide
aacauaggggaguaugcgg

SEQ ID NO: 361677 - RNA, 19 nt, Artificial Sequence
  Description of Artificial Sequence: Synthetic oligonucleotide
auaacacagcucuaugccc

SEQ ID NO: 361678 - RNA, 19 nt, Artificial Sequence
  Description of Artificial Sequence: Synthetic oligonucleotide
gaugacauagaaguaaggc

SEQ ID NO: 361679 - RNA, 19 nt, Artificial Sequence
  Description of Artificial Sequence: Synthetic oligonucleotide
acacacuauaauuacaucu

SEQ ID NO: 361680 - RNA, 19 nt, Artificial Sequence
  Description of Artificial Sequence: Synthetic oligonucleotide
aaauggucacccuuaagca

SEQ ID NO: 361681 - RNA, 19 nt, Artificial Sequence
  Description of Artificial Sequence: Synthetic oligonucleotide
ucugugaguuugcacaacg

SEQ ID NO: 361682 - RNA, 19 nt, Artificial Sequence
  Description of Artificial Sequence: Synthetic oligonucleotide
uaacucacggccaaugaag

SEQ ID NO: 361683 - RNA, 19 nt, Artificial Sequence
  Description of Artificial Sequence: Synthetic oligonucleotide
aaaaguaagcuauguauuu

SEQ ID NO: 361684 - RNA, 19 nt, Artificial Sequence
  Description of Artificial Sequence: Synthetic oligonucleotide
auaauuacaucuuuguguu

SEQ ID NO: 361685 - RNA, 19 nt, Artificial Sequence
  Description of Artificial Sequence: Synthetic oligonucleotide
uaguauaaacuguaugacc

SEQ ID NO: 361686 - RNA, 19 nt, Artificial Sequence
  Description of Artificial Sequence: Synthetic oligonucleotide
aaacuguaugaccuuaaca

SEQ ID NO: 361687 - RNA, 19 nt, Artificial Sequence
  Description of Artificial Sequence: Synthetic oligonucleotide
uagcuuugaauauaaaagu

SEQ ID NO: 361688 - RNA, 19 nt, Artificial Sequence
  Description of Artificial Sequence: Synthetic oligonucleotide
aguauaaacuguaugaccu

SEQ ID NO: 361689 - RNA, 19 nt, Artificial Sequence
  Description of Artificial Sequence: Synthetic oligonucleotide
accaaguuaacaaccaccc

SEQ ID NO: 361690 - RNA, 19 nt, Artificial Sequence
  Description of Artificial Sequence: Synthetic oligonucleotide
uguguagcuaugaaacugc

SEQ ID NO: 361691 - RNA, 19 nt, Artificial Sequence
  Description of Artificial Sequence: Synthetic oligonucleotide
auagaugugcuuuaagggu

SEQ ID NO: 361692 - RNA, 19 nt, Artificial Sequence
  Description of Artificial Sequence: Synthetic oligonucleotide
ugagcgaugcaccagguac

SEQ ID NO: 361693 - RNA, 19 nt, Artificial Sequence
  Description of Artificial Sequence: Synthetic oligonucleotide
aaacuacuuaguuccugac

SEQ ID NO: 361694 - RNA, 19 nt, Artificial Sequence
  Description of Artificial Sequence: Synthetic oligonucleotide
uguaugaccuuaacaguag

SEQ ID NO: 361695 - RNA, 19 nt, Artificial Sequence
  Description of Artificial Sequence: Synthetic oligonucleotide
ucgagcauagagauaaaca

SEQ ID NO: 361696 - RNA, 19 nt, Artificial Sequence
  Description of Artificial Sequence: Synthetic oligonucleotide
aguuaacaaccacccaucc

SEQ ID NO: 361697 - RNA, 19 nt, Artificial Sequence
  Description of Artificial Sequence: Synthetic oligonucleotide
uguauagcuuugaauauaa

SEQ ID NO: 361698 - RNA, 19 nt, Artificial Sequence
  Description of Artificial Sequence: Synthetic oligonucleotide
acuacuuaguuccugacaa

SEQ ID NO: 361699 - RNA, 19 nt, Artificial Sequence
  Description of Artificial Sequence: Synthetic oligonucleotide
gacaagcagacucuuaccc

SEQ ID NO: 361700 - RNA, 19 nt, Artificial Sequence
  Description of Artificial Sequence: Synthetic oligonucleotide
ugggauggcgaacaaagcc

SEQ ID NO: 361701 - RNA, 19 nt, Artificial Sequence
  Description of Artificial Sequence: Synthetic oligonucleotide
gaagugaguauacacauaa

SEQ ID NO: 361702 - RNA, 19 nt, Artificial Sequence
  Description of Artificial Sequence: Synthetic oligonucleotide
uuaugucucuuuaaguacu

SEQ ID NO: 361703 - RNA, 19 nt, Artificial Sequence
  Description of Artificial Sequence: Synthetic oligonucleotide
uaguuccugacaauuaucu

SEQ ID NO: 361704 - RNA, 19 nt, Artificial Sequence
  Description of Artificial Sequence: Synthetic oligonucleotide
aagaccauugccaaagaug

SEQ ID NO: 361705 - RNA, 19 nt, Artificial Sequence
  Description of Artificial Sequence: Synthetic oligonucleotide
ucuaauaccaauguaugua

SEQ ID NO: 361706 - RNA, 19 nt, Artificial Sequence
  Description of Artificial Sequence: Synthetic oligonucleotide
aaagauuacauagccacaa

SEQ ID NO: 361707 - RNA, 19 nt, Artificial Sequence
  Description of Artificial Sequence: Synthetic oligonucleotide
agguagcaaagccaaauuc

SEQ ID NO: 361708 - RNA, 19 nt, Artificial Sequence
  Description of Artificial Sequence: Synthetic oligonucleotide
aaaagcguugaauccauuu

SEQ ID NO: 361709 - RNA, 19 nt, Artificial Sequence
  Description of Artificial Sequence: Synthetic oligonucleotide
auacauugaugcuguuucc

SEQ ID NO: 361710 - RNA, 19 nt, Artificial Sequence
  Description of Artificial Sequence: Synthetic oligonucleotide
ugacagcucaucccuaggg

SEQ ID NO: 361711 - RNA, 19 nt, Artificial Sequence
  Description of Artificial Sequence: Synthetic oligonucleotide
aaguuaacaaccacccauc

SEQ ID NO: 361712 - RNA, 19 nt, Artificial Sequence
  Description of Artificial Sequence: Synthetic oligonucleotide
aucgaaacccaaaauguac

SEQ ID NO: 361713 - RNA, 19 nt, Artificial Sequence
  Description of Artificial Sequence: Synthetic oligonucleotide
ucgaaacccaaaauguaca

SEQ ID NO: 361714 - RNA, 19 nt, Artificial Sequence
  Description of Artificial Sequence: Synthetic oligonucleotide
uuugcacaacgaaagauua

SEQ ID NO: 361715 - RNA, 19 nt, Artificial Sequence
  Description of Artificial Sequence: Synthetic oligonucleotide
ucgaggguuuaacucacgg

SEQ ID NO: 361716 - RNA, 19 nt, Artificial Sequence
  Description of Artificial Sequence: Synthetic oligonucleotide
uaugaccuuaacaguagca

SEQ ID NO: 361717 - RNA, 19 nt, Artificial Sequence
  Description of Artificial Sequence: Synthetic oligonucleotide
aauacaagcggagucaauu

SEQ ID NO: 361718 - RNA, 19 nt, Artificial Sequence
  Description of Artificial Sequence: Synthetic oligonucleotide
uaaguacuaugaagcauag

SEQ ID NO: 361719 - RNA, 19 nt, Artificial Sequence
  Description of Artificial Sequence: Synthetic oligonucleotide
aaugaaaaccagaggaggu

SEQ ID NO: 361720 - RNA, 19 nt, Artificial Sequence
  Description of Artificial Sequence: Synthetic oligonucleotide
uuuacgagauaugucauuc

SEQ ID NO: 361721 - RNA, 19 nt, Artificial Sequence
  Description of Artificial Sequence: Synthetic oligonucleotide
ugcacaacgaaagauuaca

SEQ ID NO: 361722 - RNA, 19 nt, Artificial Sequence
  Description of Artificial Sequence: Synthetic oligonucleotide
cuuuuaaaggcugagguca

SEQ ID NO: 361723 - RNA, 19 nt, Artificial Sequence
  Description of Artificial Sequence: Synthetic oligonucleotide
cagaugucaggacaaaagc

SEQ ID NO: 361724 - RNA, 19 nt, Artificial Sequence
  Description of Artificial Sequence: Synthetic oligonucleotide
agaucgagcauagagauaa

SEQ ID NO: 361725 - RNA, 19 nt, Artificial Sequence
  Description of Artificial Sequence: Synthetic oligonucleotide
aaagcguugaauccauuua

SEQ ID NO: 361726 - RNA, 19 nt, Artificial Sequence
  Description of Artificial Sequence: Synthetic oligonucleotide
auagccacaaaguuucaga

SEQ ID NO: 361727 - RNA, 19 nt, Artificial Sequence
  Description of Artificial Sequence: Synthetic oligonucleotide
aucacaagucaccauauau

SEQ ID NO: 361728 - RNA, 19 nt, Artificial Sequence
  Description of Artificial Sequence: Synthetic oligonucleotide
gaugcuguuuccaaauggc

SEQ ID NO: 361729 - RNA, 19 nt, Artificial Sequence
  Description of Artificial Sequence: Synthetic oligonucleotide
cauauaccaccaauacugg

SEQ ID NO: 361730 - RNA, 19 nt, Artificial Sequence
  Description of Artificial Sequence: Synthetic oligonucleotide
agaauuugccaccuguccu

SEQ ID NO: 361731 - RNA, 19 nt, Artificial Sequence
  Description of Artificial Sequence: Synthetic oligonucleotide
cuuacucuucacauauacc

SEQ ID NO: 361732 - RNA, 19 nt, Artificial Sequence
  Description of Artificial Sequence: Synthetic oligonucleotide
guaaacauaggggaguaug

SEQ ID NO: 361733 - RNA, 19 nt, Artificial Sequence
  Description of Artificial Sequence: Synthetic oligonucleotide
uucuaauaccaauguaugu

SEQ ID NO: 361734 - RNA, 19 nt, Artificial Sequence
  Description of Artificial Sequence: Synthetic oligonucleotide
aagagagauguucccacga

SEQ ID NO: 361735 - RNA, 19 nt, Artificial Sequence
  Description of Artificial Sequence: Synthetic oligonucleotide
aaaugcacuuuuaaaggcu

SEQ ID NO: 361736 - RNA, 19 nt, Artificial Sequence
  Description of Artificial Sequence: Synthetic oligonucleotide
acaagcaacgcagugaagu

SEQ ID NO: 361737 - RNA, 19 nt, Artificial Sequence
  Description of Artificial Sequence: Synthetic oligonucleotide
uuaacucacggccaaugaa

SEQ ID NO: 361738 - RNA, 19 nt, Artificial Sequence
  Description of Artificial Sequence: Synthetic oligonucleotide
ucacaagucaccauauauu

SEQ ID NO: 361739 - RNA, 19 nt, Artificial Sequence
  Description of Artificial Sequence: Synthetic oligonucleotide
cacuauaauuacaucuuug

SEQ ID NO: 361740 - RNA, 19 nt, Artificial Sequence
  Description of Artificial Sequence: Synthetic oligonucleotide
acaaccacccauccaauca

SEQ ID NO: 361741 - RNA, 19 nt, Artificial Sequence
  Description of Artificial Sequence: Synthetic oligonucleotide
uucgcgguggacaagcaac

SEQ ID NO: 361742 - RNA, 19 nt, Artificial Sequence
  Description of Artificial Sequence: Synthetic oligonucleotide
cauuaugucucuuuaagua

SEQ ID NO: 361743 - RNA, 19 nt, Artificial Sequence
  Description of Artificial Sequence: Synthetic oligonucleotide
cuuuggaucagugggauuc

SEQ ID NO: 361744 - RNA, 19 nt, Artificial Sequence
  Description of Artificial Sequence: Synthetic oligonucleotide
auugaugcuguuuccaaau

SEQ ID NO: 361745 - RNA, 19 nt, Artificial Sequence
  Description of Artificial Sequence: Synthetic oligonucleotide
caauucgaggguuuaacuc

SEQ ID NO: 361746 - RNA, 19 nt, Artificial Sequence
  Description of Artificial Sequence: Synthetic oligonucleotide
ugcgguagggcacucguug

SEQ ID NO: 361747 - RNA, 19 nt, Artificial Sequence
  Description of Artificial Sequence: Synthetic oligonucleotide
caaagaucgagcauagaga

SEQ ID NO: 361748 - RNA, 19 nt, Artificial Sequence
  Description of Artificial Sequence: Synthetic oligonucleotide
acuguaugaccuuaacagu

SEQ ID NO: 361749 - RNA, 19 nt, Artificial Sequence
  Description of Artificial Sequence: Synthetic oligonucleotide
uuuagggaguucugaagac

SEQ ID NO: 361750 - RNA, 19 nt, Artificial Sequence
  Description of Artificial Sequence: Synthetic oligonucleotide
ucaguaaacauaggggagu

SEQ ID NO: 361751 - RNA, 19 nt, Artificial Sequence
  Description of Artificial Sequence: Synthetic oligonucleotide
aaagcaucaccaaguuaac

SEQ ID NO: 361752 - RNA, 19 nt, Artificial Sequence
  Description of Artificial Sequence: Synthetic oligonucleotide
cuucaaagaucgagcauag

SEQ ID NO: 361753 - RNA, 19 nt, Artificial Sequence
  Description of Artificial Sequence: Synthetic oligonucleotide
uaaaguuguuucagguaga

SEQ ID NO: 361754 - RNA, 19 nt, Artificial Sequence
  Description of Artificial Sequence: Synthetic oligonucleotide
aguaauugggauggcgaac

SEQ ID NO: 361755 - RNA, 19 nt, Artificial Sequence
  Description of Artificial Sequence: Synthetic oligonucleotide
uacucuucacauauaccac

SEQ ID NO: 361756 - RNA, 19 nt, Artificial Sequence
  Description of Artificial Sequence: Synthetic oligonucleotide
ugucaggacaaaagcguug

SEQ ID NO: 361757 - RNA, 19 nt, Artificial Sequence
  Description of Artificial Sequence: Synthetic oligonucleotide
uuaaagccacaugggaggg

SEQ ID NO: 361758 - RNA, 19 nt, Artificial Sequence
  Description of Artificial Sequence: Synthetic oligonucleotide
ugggaagacgcuuuuguuc

SEQ ID NO: 361759 - RNA, 19 nt, Artificial Sequence
  Description of Artificial Sequence: Synthetic oligonucleotide
ugaagcauagaugugcuuu

SEQ ID NO: 361760 - RNA, 19 nt, Artificial Sequence
  Description of Artificial Sequence: Synthetic oligonucleotide
ucccuaggggccuucaaag

SEQ ID NO: 361761 - RNA, 19 nt, Artificial Sequence
  Description of Artificial Sequence: Synthetic oligonucleotide
accaauucgaggguuuaac

SEQ ID NO: 361762 - RNA, 19 nt, Artificial Sequence
  Description of Artificial Sequence: Synthetic oligonucleotide
uacaagagcuggaaacugu

SEQ ID NO: 361763 - RNA, 19 nt, Artificial Sequence
  Description of Artificial Sequence: Synthetic oligonucleotide
uauacacauaacacagcuc

SEQ ID NO: 361764 - RNA, 19 nt, Artificial Sequence
  Description of Artificial Sequence: Synthetic oligonucleotide
uucagccaaaagcaucacc

SEQ ID NO: 361765 - RNA, 19 nt, Artificial Sequence
  Description of Artificial Sequence: Synthetic oligonucleotide
cgaaagauuacauagccac

SEQ ID NO: 361766 - RNA, 19 nt, Artificial Sequence
  Description of Artificial Sequence: Synthetic oligonucleotide
agguacuccuccaaacucc

SEQ ID NO: 361767 - RNA, 19 nt, Artificial Sequence
  Description of Artificial Sequence: Synthetic oligonucleotide
cacaguucacccaaagcug

SEQ ID NO: 361768 - RNA, 19 nt, Artificial Sequence
  Description of Artificial Sequence: Synthetic oligonucleotide
accaauacugggcuggggu

SEQ ID NO: 361769 - RNA, 19 nt, Artificial Sequence
  Description of Artificial Sequence: Synthetic oligonucleotide
cacaaaaguauuugagguc

SEQ ID NO: 361770 - RNA, 19 nt, Artificial Sequence
  Description of Artificial Sequence: Synthetic oligonucleotide
uccauuuagucuguacuug

SEQ ID NO: 361771 - RNA, 19 nt, Artificial Sequence
  Description of Artificial Sequence: Synthetic oligonucleotide
uagaugugcuuuaaggguu

SEQ ID NO: 361772 - RNA, 19 nt, Artificial Sequence
  Description of Artificial Sequence: Synthetic oligonucleotide
aagacauaaaugauacaaa

SEQ ID NO: 361773 - RNA, 19 nt, Artificial Sequence
  Description of Artificial Sequence: Synthetic oligonucleotide
uucccaauuggcagaaggu

SEQ ID NO: 361774 - RNA, 19 nt, Artificial Sequence
  Description of Artificial Sequence: Synthetic oligonucleotide
ggucaguaaacauagggga

SEQ ID NO: 361775 - RNA, 19 nt, Artificial Sequence
  Description of Artificial Sequence: Synthetic oligonucleotide
aucgagcauagagauaaac

SEQ ID NO: 361776 - RNA, 19 nt, Artificial Sequence
  Description of Artificial Sequence: Synthetic oligonucleotide
ugccccagaagagagaugu

SEQ ID NO: 361777 - RNA, 19 nt, Artificial Sequence
  Description of Artificial Sequence: Synthetic oligonucleotide
uguagcuaugaaacugccu

SEQ ID NO: 361778 - RNA, 19 nt, Artificial Sequence
  Description of Artificial Sequence: Synthetic oligonucleotide
gaaggcuguacuguguagc

SEQ ID NO: 361779 - RNA, 19 nt, Artificial Sequence
  Description of Artificial Sequence: Synthetic oligonucleotide
aaguuguuucagguagaac

SEQ ID NO: 361780 - RNA, 19 nt, Artificial Sequence
  Description of Artificial Sequence: Synthetic oligonucleotide
auuccagagggcauccacc

SEQ ID NO: 361781 - RNA, 19 nt, Artificial Sequence
  Description of Artificial Sequence: Synthetic oligonucleotide
cuuccaucaacaagaggug

SEQ ID NO: 361782 - RNA, 19 nt, Artificial Sequence
  Description of Artificial Sequence: Synthetic oligonucleotide
agacucuuacccguggacg

SEQ ID NO: 361783 - RNA, 19 nt, Artificial Sequence
  Description of Artificial Sequence: Synthetic oligonucleotide
aaaguaagcuauguauuua

SEQ ID NO: 361784 - RNA, 19 nt, Artificial Sequence
  Description of Artificial Sequence: Synthetic oligonucleotide
uggaaacuguuaaccaaga

SEQ ID NO: 361785 - RNA, 19 nt, Artificial Sequence
  Description of Artificial Sequence: Synthetic oligonucleotide
gagagauguucccacgaug

SEQ ID NO: 361786 - RNA, 19 nt, Artificial Sequence
  Description of Artificial Sequence: Synthetic oligonucleotide
uccaggacgcaauucacaa

SEQ ID NO: 361787 - RNA, 19 nt, Artificial Sequence
  Description of Artificial Sequence: Synthetic oligonucleotide
cuguaggugaaugggaccc

SEQ ID NO: 361788 - RNA, 19 nt, Artificial Sequence
  Description of Artificial Sequence: Synthetic oligonucleotide
aagcaacgcagugaaguag

SEQ ID NO: 361789 - RNA, 19 nt, Artificial Sequence
  Description of Artificial Sequence: Synthetic oligonucleotide
acaguucacccaaagcugg

SEQ ID NO: 361790 - RNA, 19 nt, Artificial Sequence
  Description of Artificial Sequence: Synthetic oligonucleotide
gggaagacgcuuuuguucc

SEQ ID NO: 361791 - RNA, 19 nt, Artificial Sequence
  Description of Artificial Sequence: Synthetic oligonucleotide
uaugcgguagggcacucgu

SEQ ID NO: 361792 - RNA, 19 nt, Artificial Sequence
  Description of Artificial Sequence: Synthetic oligonucleotide
aagauuacauagccacaaa

SEQ ID NO: 361793 - RNA, 19 nt, Artificial Sequence
  Description of Artificial Sequence: Synthetic oligonucleotide
gucuagagaauuugccacc

SEQ ID NO: 361794 - RNA, 19 nt, Artificial Sequence
  Description of Artificial Sequence: Synthetic oligonucleotide
uguuuaaauagugcuguua

SEQ ID NO: 361795 - RNA, 19 nt, Artificial Sequence
  Description of Artificial Sequence: Synthetic oligonucleotide
ggaucagugggauucuucc

SEQ ID NO: 361796 - RNA, 19 nt, Artificial Sequence
  Description of Artificial Sequence: Synthetic oligonucleotide
ucaccauauauuacauaaa

SEQ ID NO: 361797 - RNA, 19 nt, Artificial Sequence
  Description of Artificial Sequence: Synthetic oligonucleotide
ucgcgguggacaagcaacg

SEQ ID NO: 361798 - RNA, 19 nt, Artificial Sequence
  Description of Artificial Sequence: Synthetic oligonucleotide
agaaaucguagacagcauu

SEQ ID NO: 361799 - RNA, 19 nt, Artificial Sequence
  Description of Artificial Sequence: Synthetic oligonucleotide
uggacucuauuucuuuaac

SEQ ID NO: 361800 - RNA, 19 nt, Artificial Sequence
  Description of Artificial Sequence: Synthetic oligonucleotide
gugguuaaagccacauggg

SEQ ID NO: 361801 - RNA, 19 nt, Artificial Sequence
  Description of Artificial Sequence: Synthetic oligonucleotide
gucaguaaacauaggggag

SEQ ID NO: 361802 - RNA, 19 nt, Artificial Sequence
  Description of Artificial Sequence: Synthetic oligonucleotide
aaaguuguuucagguagaa

SEQ ID NO: 361803 - RNA, 19 nt, Artificial Sequence
  Description of Artificial Sequence: Synthetic oligonucleotide
uuggacgaaggcuguacug

SEQ ID NO: 361804 - RNA, 19 nt, Artificial Sequence
  Description of Artificial Sequence: Synthetic oligonucleotide
acaugggagggaccaugcc

SEQ ID NO: 361805 - RNA, 19 nt, Artificial Sequence
  Description of Artificial Sequence: Synthetic oligonucleotide
ucuagagaauuugccaccu

SEQ ID NO: 361806 - RNA, 19 nt, Artificial Sequence
  Description of Artificial Sequence: Synthetic oligonucleotide
ugcaagcuuuggaucagug

SEQ ID NO: 361807 - RNA, 19 nt, Artificial Sequence
  Description of Artificial Sequence: Synthetic oligonucleotide
caagagguguuccuucuac

SEQ ID NO: 361808 - RNA, 19 nt, Artificial Sequence
  Description of Artificial Sequence: Synthetic oligonucleotide
guagcuaugaaacugccuu

SEQ ID NO: 361809 - RNA, 19 nt, Artificial Sequence
  Description of Artificial Sequence: Synthetic oligonucleotide
ucacccaaagcuggcagag

SEQ ID NO: 361810 - RNA, 19 nt, Artificial Sequence
  Description of Artificial Sequence: Synthetic oligonucleotide
aaucgaaacccaaaaugua

SEQ ID NO: 361811 - RNA, 19 nt, Artificial Sequence
  Description of Artificial Sequence: Synthetic oligonucleotide
aagugcgaacugaaggaag

SEQ ID NO: 361812 - RNA, 19 nt, Artificial Sequence
  Description of Artificial Sequence: Synthetic oligonucleotide
gacgcaauucacaaaagua

SEQ ID NO: 361813 - RNA, 19 nt, Artificial Sequence
  Description of Artificial Sequence: Synthetic oligonucleotide
uacaagcggagucaauuua

SEQ ID NO: 361814 - RNA, 19 nt, Artificial Sequence
  Description of Artificial Sequence: Synthetic oligonucleotide
uuuuacgagauaugucauu

SEQ ID NO: 361815 - RNA, 19 nt, Artificial Sequence
  Description of Artificial Sequence: Synthetic oligonucleotide
cacaagucaccauauauua

SEQ ID NO: 361816 - RNA, 19 nt, Artificial Sequence
  Description of Artificial Sequence: Synthetic oligonucleotide
uuacgagauaugucauucu

SEQ ID NO: 361817 - RNA, 19 nt, Artificial Sequence
  Description of Artificial Sequence: Synthetic oligonucleotide
uaaccgugaccucuucucu

SEQ ID NO: 361818 - RNA, 19 nt, Artificial Sequence
  Description of Artificial Sequence: Synthetic oligonucleotide
cacgauggcagaugucagg

SEQ ID NO: 361819 - RNA, 19 nt, Artificial Sequence
  Description of Artificial Sequence: Synthetic oligonucleotide
caauccaggacgcaauuca

SEQ ID NO: 361820 - RNA, 19 nt, Artificial Sequence
  Description of Artificial Sequence: Synthetic oligonucleotide
acgcaauucacaaaaguau

SEQ ID NO: 361821 - RNA, 19 nt, Artificial Sequence
  Description of Artificial Sequence: Synthetic oligonucleotide
guaauugggauggcgaaca

SEQ ID NO: 361822 - RNA, 19 nt, Artificial Sequence
  Description of Artificial Sequence: Synthetic oligonucleotide
ccauguauagcuuugaaua

SEQ ID NO: 361823 - RNA, 19 nt, Artificial Sequence
  Description of Artificial Sequence: Synthetic oligonucleotide
cauagagauaaacacucaa

SEQ ID NO: 361824 - RNA, 19 nt, Artificial Sequence
  Description of Artificial Sequence: Synthetic oligonucleotide
ggacucuauuucuuuaacc

SEQ ID NO: 361825 - RNA, 19 nt, Artificial Sequence
  Description of Artificial Sequence: Synthetic oligonucleotide
uccaucaacaagagguguu

SEQ ID NO: 361826 - RNA, 19 nt, Artificial Sequence
  Description of Artificial Sequence: Synthetic oligonucleotide
uugcacaacgaaagauuac

SEQ ID NO: 361827 - RNA, 19 nt, Artificial Sequence
  Description of Artificial Sequence: Synthetic oligonucleotide
agcuauguauuuacauuuc

SEQ ID NO: 361828 - RNA, 19 nt, Artificial Sequence
  Description of Artificial Sequence: Synthetic oligonucleotide
uaugccccagaagagagau

SEQ ID NO: 361829 - RNA, 19 nt, Artificial Sequence
  Description of Artificial Sequence: Synthetic oligonucleotide
augaccuuaacaguagcaa

SEQ ID NO: 361830 - RNA, 19 nt, Artificial Sequence
  Description of Artificial Sequence: Synthetic oligonucleotide
aaucaauccaggacgcaau

SEQ ID NO: 361831 - RNA, 19 nt, Artificial Sequence
  Description of Artificial Sequence: Synthetic oligonucleotide
guaugaccuuaacaguagc

SEQ ID NO: 361832 - RNA, 19 nt, Artificial Sequence
  Description of Artificial Sequence: Synthetic oligonucleotide
cuaaauggucacccuuaag

SEQ ID NO: 361833 - RNA, 19 nt, Artificial Sequence
  Description of Artificial Sequence: Synthetic oligonucleotide
uggcuucaauacaagcgga

SEQ ID NO: 361834 - RNA, 19 nt, Artificial Sequence
  Description of Artificial Sequence: Synthetic oligonucleotide
cuguaugaccuuaacagua

SEQ ID NO: 361835 - RNA, 19 nt, Artificial Sequence
  Description of Artificial Sequence: Synthetic oligonucleotide
auucgaggguuuaacucac

SEQ ID NO: 361836 - RNA, 19 nt, Artificial Sequence
  Description of Artificial Sequence: Synthetic oligonucleotide
cacauaacacagcucuaug

SEQ ID NO: 361837 - RNA, 19 nt, Artificial Sequence
  Description of Artificial Sequence: Synthetic oligonucleotide
uucgaggguuuaacucacg

SEQ ID NO: 361838 - RNA, 19 nt, Artificial Sequence
  Description of Artificial Sequence: Synthetic oligonucleotide
agcagacucuuacccgugg

SEQ ID NO: 361839 - RNA, 19 nt, Artificial Sequence
  Description of Artificial Sequence: Synthetic oligonucleotide
gaaagauuacauagccaca

SEQ ID NO: 361840 - RNA, 19 nt, Artificial Sequence
  Description of Artificial Sequence: Synthetic oligonucleotide
uacuuaguuccugacaauu

SEQ ID NO: 361841 - RNA, 19 nt, Artificial Sequence
  Description of Artificial Sequence: Synthetic oligonucleotide
acugaaggaagugaguaua

SEQ ID NO: 361842 - RNA, 19 nt, Artificial Sequence
  Description of Artificial Sequence: Synthetic oligonucleotide
gaccuuaacaguagcaaaa

SEQ ID NO: 361843 - RNA, 19 nt, Artificial Sequence
  Description of Artificial Sequence: Synthetic oligonucleotide
uucacccaaagcuggcaga

SEQ ID NO: 361844 - RNA, 19 nt, Artificial Sequence
  Description of Artificial Sequence: Synthetic oligonucleotide
cuaggggccuucaaagauc

SEQ ID NO: 361845 - RNA, 19 nt, Artificial Sequence
  Description of Artificial Sequence: Synthetic oligonucleotide
ucaauacaagcggagucaa

SEQ ID NO: 361846 - RNA, 19 nt, Artificial Sequence
  Description of Artificial Sequence: Synthetic oligonucleotide
ucuuuaaccgugaccucuu

SEQ ID NO: 361847 - RNA, 19 nt, Artificial Sequence
  Description of Artificial Sequence: Synthetic oligonucleotide
cuugcacuggugcucauca

SEQ ID NO: 361848 - RNA, 19 nt, Artificial Sequence
  Description of Artificial Sequence: Synthetic oligonucleotide
caaguuaacaaccacccau

SEQ ID NO: 361849 - RNA, 19 nt, Artificial Sequence
  Description of Artificial Sequence: Synthetic oligonucleotide
auacaagcggagucaauuu

SEQ ID NO: 361850 - RNA, 19 nt, Artificial Sequence
  Description of Artificial Sequence: Synthetic oligonucleotide
auggcgaacaaagccccac

SEQ ID NO: 361851 - RNA, 19 nt, Artificial Sequence
  Description of Artificial Sequence: Synthetic oligonucleotide
uggaucagugggauucuuc

SEQ ID NO: 361852 - RNA, 19 nt, Artificial Sequence
  Description of Artificial Sequence: Synthetic oligonucleotide
gacgcuuuuguuccuugga

SEQ ID NO: 361853 - RNA, 19 nt, Artificial Sequence
  Description of Artificial Sequence: Synthetic oligonucleotide
uuccaaaggugcagguacu

SEQ ID NO: 361854 - RNA, 19 nt, Artificial Sequence
  Description of Artificial Sequence: Synthetic oligonucleotide
acucguuggcaguacuucu

SEQ ID NO: 361855 - RNA, 19 nt, Artificial Sequence
  Description of Artificial Sequence: Synthetic oligonucleotide
agugggauucuuccggaau

SEQ ID NO: 361856 - RNA, 19 nt, Artificial Sequence
  Description of Artificial Sequence: Synthetic oligonucleotide
augggagggaccaugccag

SEQ ID NO: 361857 - RNA, 19 nt, Artificial Sequence
  Description of Artificial Sequence: Synthetic oligonucleotide
cacaugggagggaccaugc

SEQ ID NO: 361858 - RNA, 19 nt, Artificial Sequence
  Description of Artificial Sequence: Synthetic oligonucleotide
uggcgaacaaagccccacc

SEQ ID NO: 361859 - RNA, 19 nt, Artificial Sequence
  Description of Artificial Sequence: Synthetic oligonucleotide
acauaggggaguaugcggu

SEQ ID NO: 361860 - RNA, 19 nt, Artificial Sequence
  Description of Artificial Sequence: Synthetic oligonucleotide
uauuuggcucuaugguccu

SEQ ID NO: 361861 - RNA, 19 nt, Artificial Sequence
  Description of Artificial Sequence: Synthetic oligonucleotide
ucuuggacgaaggcuguac

SEQ ID NO: 361862 - RNA, 19 nt, Artificial Sequence
  Description of Artificial Sequence: Synthetic oligonucleotide
agagagauguucccacgau

SEQ ID NO: 361863 - RNA, 19 nt, Artificial Sequence
  Description of Artificial Sequence: Synthetic oligonucleotide
uggcaguacuucucccagg

SEQ ID NO: 361864 - RNA, 19 nt, Artificial Sequence
  Description of Artificial Sequence: Synthetic oligonucleotide
agugcgaacugaaggaagu

SEQ ID NO: 361865 - RNA, 19 nt, Artificial Sequence
  Description of Artificial Sequence: Synthetic oligonucleotide
uacccguggacguaugaau

SEQ ID NO: 361866 - RNA, 19 nt, Artificial Sequence
  Description of Artificial Sequence: Synthetic oligonucleotide
gcaagugcgaacugaagga

SEQ ID NO: 361867 - RNA, 19 nt, Artificial Sequence
  Description of Artificial Sequence: Synthetic oligonucleotide
uuccaucaacaagaggugu

SEQ ID NO: 361868 - RNA, 19 nt, Artificial Sequence
  Description of Artificial Sequence: Synthetic oligonucleotide
cagguacuccuccaaacuc

SEQ ID NO: 361869 - RNA, 19 nt, Artificial Sequence
  Description of Artificial Sequence: Synthetic oligonucleotide
cacccauccaaucaaucca

SEQ ID NO: 361870 - RNA, 19 nt, Artificial Sequence
  Description of Artificial Sequence: Synthetic oligonucleotide
ugcucuaaauggucacccu

SEQ ID NO: 361871 - RNA, 19 nt, Artificial Sequence
  Description of Artificial Sequence: Synthetic oligonucleotide
aggugguuaaagccacaug

SEQ ID NO: 361872 - RNA, 19 nt, Artificial Sequence
  Description of Artificial Sequence: Synthetic oligonucleotide
auaggggaguaugcgguag

SEQ ID NO: 361873 - RNA, 19 nt, Artificial Sequence
  Description of Artificial Sequence: Synthetic oligonucleotide
ccacccauccaaucaaucc

SEQ ID NO: 361874 - RNA, 19 nt, Artificial Sequence
  Description of Artificial Sequence: Synthetic oligonucleotide
cucguuggcaguacuucuc

SEQ ID NO: 361875 - RNA, 19 nt, Artificial Sequence
  Description of Artificial Sequence: Synthetic oligonucleotide
gggauggcgaacaaagccc

SEQ ID NO: 361876 - RNA, 19 nt, Artificial Sequence
  Description of Artificial Sequence: Synthetic oligonucleotide
agcuugaaugaaaaccaga

SEQ ID NO: 361877 - RNA, 19 nt, Artificial Sequence
  Description of Artificial Sequence: Synthetic oligonucleotide
gugaguuugcacaacgaaa

SEQ ID NO: 361878 - RNA, 19 nt, Artificial Sequence
  Description of Artificial Sequence: Synthetic oligonucleotide
ugcggaguggucacuugaa

SEQ ID NO: 361879 - RNA, 19 nt, Artificial Sequence
  Description of Artificial Sequence: Synthetic oligonucleotide
cagacucuuacccguggac

SEQ ID NO: 361880 - RNA, 19 nt, Artificial Sequence
  Description of Artificial Sequence: Synthetic oligonucleotide
cucuaaauggucacccuua

SEQ ID NO: 361881 - RNA, 19 nt, Artificial Sequence
  Description of Artificial Sequence: Synthetic oligonucleotide
agcaacgcagugaaguaga

SEQ ID NO: 361882 - RNA, 19 nt, Artificial Sequence
  Description of Artificial Sequence: Synthetic oligonucleotide
uaggugaaugggacccaca

SEQ ID NO: 361883 - RNA, 19 nt, Artificial Sequence
  Description of Artificial Sequence: Synthetic oligonucleotide
aaguacuaugaagcauaga

SEQ ID NO: 361884 - RNA, 19 nt, Artificial Sequence
  Description of Artificial Sequence: Synthetic oligonucleotide
cugcuuaaggaucugcuua

SEQ ID NO: 361885 - RNA, 19 nt, Artificial Sequence
  Description of Artificial Sequence: Synthetic oligonucleotide
gagcauagagauaaacacu

SEQ ID NO: 361886 - RNA, 19 nt, Artificial Sequence
  Description of Artificial Sequence: Synthetic oligonucleotide
acccauccaaucaauccag

SEQ ID NO: 361887 - RNA, 19 nt, Artificial Sequence
  Description of Artificial Sequence: Synthetic oligonucleotide
uuuggaucagugggauucu

SEQ ID NO: 361888 - RNA, 19 nt, Artificial Sequence
  Description of Artificial Sequence: Synthetic oligonucleotide
aaacaccaauucgaggguu

SEQ ID NO: 361889 - RNA, 19 nt, Artificial Sequence
  Description of Artificial Sequence: Synthetic oligonucleotide
acgaaagauuacauagcca

SEQ ID NO: 361890 - RNA, 19 nt, Artificial Sequence
  Description of Artificial Sequence: Synthetic oligonucleotide
gucacuugaaagguuucca

SEQ ID NO: 361891 - RNA, 19 nt, Artificial Sequence
  Description of Artificial Sequence: Synthetic oligonucleotide
aagaaaucguagacagcau

SEQ ID NO: 361892 - RNA, 19 nt, Artificial Sequence
  Description of Artificial Sequence: Synthetic oligonucleotide
guacuugagucuucuucca

SEQ ID NO: 361893 - RNA, 19 nt, Artificial Sequence
  Description of Artificial Sequence: Synthetic oligonucleotide
uuacccguggacguaugaa

SEQ ID NO: 361894 - RNA, 19 nt, Artificial Sequence
  Description of Artificial Sequence: Synthetic oligonucleotide
accugcaaauugagguagc

SEQ ID NO: 361895 - RNA, 19 nt, Artificial Sequence
  Description of Artificial Sequence: Synthetic oligonucleotide
aucacgggcuucgcggugg

SEQ ID NO: 361896 - RNA, 19 nt, Artificial Sequence
  Description of Artificial Sequence: Synthetic oligonucleotide
caguucacccaaagcuggc

SEQ ID NO: 361897 - RNA, 19 nt, Artificial Sequence
  Description of Artificial Sequence: Synthetic oligonucleotide
gcacuuuuaaaggcugagg

SEQ ID NO: 361898 - RNA, 19 nt, Artificial Sequence
  Description of Artificial Sequence: Synthetic oligonucleotide
gacucuuacccguggacgu

SEQ ID NO: 361899 - RNA, 19 nt, Artificial Sequence
  Description of Artificial Sequence: Synthetic oligonucleotide
acaagcggagucaauuuaa

SEQ ID NO: 361900 - RNA, 19 nt, Artificial Sequence
  Description of Artificial Sequence: Synthetic oligonucleotide
ucuuacccguggacguaug

SEQ ID NO: 361901 - RNA, 19 nt, Artificial Sequence
  Description of Artificial Sequence: Synthetic oligonucleotide
gaaaucguagacagcauuu

SEQ ID NO: 361902 - RNA, 19 nt, Artificial Sequence
  Description of Artificial Sequence: Synthetic oligonucleotide
ccaaguaauugggauggcg

SEQ ID NO: 361903 - RNA, 19 nt, Artificial Sequence
  Description of Artificial Sequence: Synthetic oligonucleotide
cuuaagcaggcccugcuua

SEQ ID NO: 361904 - RNA, 19 nt, Artificial Sequence
  Description of Artificial Sequence: Synthetic oligonucleotide
cuagagaauuugccaccug

SEQ ID NO: 361905 - RNA, 19 nt, Artificial Sequence
  Description of Artificial Sequence: Synthetic oligonucleotide
ggacaagcaacgcagugaa

SEQ ID NO: 361906 - RNA, 19 nt, Artificial Sequence
  Description of Artificial Sequence: Synthetic oligonucleotide
agcguugaauccauuuagu

SEQ ID NO: 361907 - RNA, 19 nt, Artificial Sequence
  Description of Artificial Sequence: Synthetic oligonucleotide
agguaaaagagagcuugaa

SEQ ID NO: 361908 - RNA, 19 nt, Artificial Sequence
  Description of Artificial Sequence: Synthetic oligonucleotide
cauacaagagcuggaaacu

SEQ ID NO: 361909 - RNA, 19 nt, Artificial Sequence
  Description of Artificial Sequence: Synthetic oligonucleotide
acccguggacguaugaaug

SEQ ID NO: 361910 - RNA, 19 nt, Artificial Sequence
  Description of Artificial Sequence: Synthetic oligonucleotide
acuuaguuccugacaauua

SEQ ID NO: 361911 - RNA, 19 nt, Artificial Sequence
  Description of Artificial Sequence: Synthetic oligonucleotide
aguucacccaaagcuggca

SEQ ID NO: 361912 - RNA, 19 nt, Artificial Sequence
  Description of Artificial Sequence: Synthetic oligonucleotide
caaucaauccaggacgcaa

SEQ ID NO: 361913 - RNA, 19 nt, Artificial Sequence
  Description of Artificial Sequence: Synthetic oligonucleotide
cacucguuggcaguacuuc

SEQ ID NO: 361914 - RNA, 19 nt, Artificial Sequence
  Description of Artificial Sequence: Synthetic oligonucleotide
aggguuuaacucacggcca

SEQ ID NO: 361915 - RNA, 19 nt, Artificial Sequence
  Description of Artificial Sequence: Synthetic oligonucleotide
aggacaagucauggggaug

SEQ ID NO: 361916 - RNA, 19 nt, Artificial Sequence
  Description of Artificial Sequence: Synthetic oligonucleotide
caggcuccccguuguauac

SEQ ID NO: 361917 - RNA, 19 nt, Artificial Sequence
  Description of Artificial Sequence: Synthetic oligonucleotide
ggcuucaauacaagcggag

SEQ ID NO: 361918 - RNA, 19 nt, Artificial Sequence
  Description of Artificial Sequence: Synthetic oligonucleotide
acaagucauggggauggcu

SEQ ID NO: 361919 - RNA, 19 nt, Artificial Sequence
  Description of Artificial Sequence: Synthetic oligonucleotide
aagcagacucuuacccgug

SEQ ID NO: 361920 - RNA, 19 nt, Artificial Sequence
  Description of Artificial Sequence: Synthetic oligonucleotide
auguguaaucgaaacccaa

SEQ ID NO: 361921 - RNA, 19 nt, Artificial Sequence
  Description of Artificial Sequence: Synthetic oligonucleotide
gguaaaagagagcuugaau

SEQ ID NO: 361922 - RNA, 19 nt, Artificial Sequence
  Description of Artificial Sequence: Synthetic oligonucleotide
acgcagugaaguagaugac

SEQ ID NO: 361923 - RNA, 19 nt, Artificial Sequence
  Description of Artificial Sequence: Synthetic oligonucleotide
gacguaugaauggucuuua

SEQ ID NO: 361924 - RNA, 19 nt, Artificial Sequence
  Description of Artificial Sequence: Synthetic oligonucleotide
acguaugaauggucuuuaa

SEQ ID NO: 361925 - RNA, 19 nt, Artificial Sequence
  Description of Artificial Sequence: Synthetic oligonucleotide
cuuuaaccgugaccucuuc

SEQ ID NO: 361926 - RNA, 19 nt, Artificial Sequence
  Description of Artificial Sequence: Synthetic oligonucleotide
caagcaacgcagugaagua

SEQ ID NO: 361927 - RNA, 19 nt, Artificial Sequence
  Description of Artificial Sequence: Synthetic oligonucleotide
caacgcagugaaguagaug

SEQ ID NO: 361928 - RNA, 19 nt, Artificial Sequence
  Description of Artificial Sequence: Synthetic oligonucleotide
cucuaugccccagaagaga

SEQ ID NO: 361929 - RNA, 19 nt, Artificial Sequence
  Description of Artificial Sequence: Synthetic oligonucleotide
aggacgcaauucacaaaag

SEQ ID NO: 361930 - RNA, 19 nt, Artificial Sequence
  Description of Artificial Sequence: Synthetic oligonucleotide
gacaagcaacgcagugaag

SEQ ID NO: 361931 - RNA, 19 nt, Artificial Sequence
  Description of Artificial Sequence: Synthetic oligonucleotide
caggccguauuuccucuug

SEQ ID NO: 361932 - RNA, 19 nt, Artificial Sequence
  Description of Artificial Sequence: Synthetic oligonucleotide
guaugcgguagggcacucg

SEQ ID NO: 361933 - RNA, 19 nt, Artificial Sequence
  Description of Artificial Sequence: Synthetic oligonucleotide
ugggguuuguggacauaua

SEQ ID NO: 361934 - RNA, 19 nt, Artificial Sequence
  Description of Artificial Sequence: Synthetic oligonucleotide
uacuuucauuucagccaaa

SEQ ID NO: 361935 - RNA, 19 nt, Artificial Sequence
  Description of Artificial Sequence: Synthetic oligonucleotide
augaagcauagaugugcuu

SEQ ID NO: 361936 - RNA, 19 nt, Artificial Sequence
  Description of Artificial Sequence: Synthetic oligonucleotide
acgggcuucgcgguggaca

SEQ ID NO: 361937 - RNA, 19 nt, Artificial Sequence
  Description of Artificial Sequence: Synthetic oligonucleotide
caaccacccauccaaucaa

SEQ ID NO: 361938 - RNA, 19 nt, Artificial Sequence
  Description of Artificial Sequence: Synthetic oligonucleotide
aguaaacauaggggaguau

SEQ ID NO: 361939 - RNA, 19 nt, Artificial Sequence
  Description of Artificial Sequence: Synthetic oligonucleotide
aagaucgagcauagagaua

SEQ ID NO: 361940 - RNA, 19 nt, Artificial Sequence
  Description of Artificial Sequence: Synthetic oligonucleotide
gagguagcaaagccaaauu

SEQ ID NO: 361941 - RNA, 19 nt, Artificial Sequence
  Description of Artificial Sequence: Synthetic oligonucleotide
uccaaaggugcagguacuu

SEQ ID NO: 361942 - RNA, 19 nt, Artificial Sequence
  Description of Artificial Sequence: Synthetic oligonucleotide
ugggagggaccaugccagc

SEQ ID NO: 361943 - RNA, 19 nt, Artificial Sequence
  Description of Artificial Sequence: Synthetic oligonucleotide
gacaagucauggggauggc

SEQ ID NO: 361944 - RNA, 19 nt, Artificial Sequence
  Description of Artificial Sequence: Synthetic oligonucleotide
guggacguaugaauggucu

SEQ ID NO: 361945 - RNA, 19 nt, Artificial Sequence
  Description of Artificial Sequence: Synthetic oligonucleotide
augucaggacaaaagcguu

SEQ ID NO: 361946 - RNA, 19 nt, Artificial Sequence
  Description of Artificial Sequence: Synthetic oligonucleotide
gucacccaaguaauuggga

SEQ ID NO: 361947 - RNA, 19 nt, Artificial Sequence
  Description of Artificial Sequence: Synthetic oligonucleotide
ccauuuagucuguacuuga

SEQ ID NO: 361948 - RNA, 19 nt, Artificial Sequence
  Description of Artificial Sequence: Synthetic oligonucleotide
cucuaugguccugggucag

SEQ ID NO: 361949 - RNA, 19 nt, Artificial Sequence
  Description of Artificial Sequence: Synthetic oligonucleotide
ccuucaaagaucgagcaua

SEQ ID NO: 361950 - RNA, 19 nt, Artificial Sequence
  Description of Artificial Sequence: Synthetic oligonucleotide
cuuacccguggacguauga

SEQ ID NO: 361951 - RNA, 19 nt, Artificial Sequence
  Description of Artificial Sequence: Synthetic oligonucleotide
ggacgcaauucacaaaagu

SEQ ID NO: 361952 - RNA, 19 nt, Artificial Sequence
  Description of Artificial Sequence: Synthetic oligonucleotide
ggaguaugcgguagggcac

SEQ ID NO: 361953 - RNA, 19 nt, Artificial Sequence
  Description of Artificial Sequence: Synthetic oligonucleotide
uggcugcaagugcgaacug

SEQ ID NO: 361954 - RNA, 19 nt, Artificial Sequence
  Description of Artificial Sequence: Synthetic oligonucleotide
aguaugcgguagggcacuc

SEQ ID NO: 361955 - RNA, 19 nt, Artificial Sequence
  Description of Artificial Sequence: Synthetic oligonucleotide
aaccacccauccaaucaau

SEQ ID NO: 361956 - RNA, 19 nt, Artificial Sequence
  Description of Artificial Sequence: Synthetic oligonucleotide
ggcgaacaaagccccacca

SEQ ID NO: 361957 - RNA, 19 nt, Artificial Sequence
  Description of Artificial Sequence: Synthetic oligonucleotide
cuaugccccagaagagaga

SEQ ID NO: 361958 - RNA, 19 nt, Artificial Sequence
  Description of Artificial Sequence: Synthetic oligonucleotide
caagugcgaacugaaggaa

SEQ ID NO: 361959 - RNA, 19 nt, Artificial Sequence
  Description of Artificial Sequence: Synthetic oligonucleotide
cggagucaauuuaacuugc

SEQ ID NO: 361960 - RNA, 19 nt, Artificial Sequence
  Description of Artificial Sequence: Synthetic oligonucleotide
gagcaugaugagcgaugca

SEQ ID NO: 361961 - RNA, 19 nt, Artificial Sequence
  Description of Artificial Sequence: Synthetic oligonucleotide
acguuccuguacuuucauu

SEQ ID NO: 361962 - RNA, 19 nt, Artificial Sequence
  Description of Artificial Sequence: Synthetic oligonucleotide
cccaauuggcagaagguaa

SEQ ID NO: 361963 - RNA, 19 nt, Artificial Sequence
  Description of Artificial Sequence: Synthetic oligonucleotide
gaugggguaccacguuccu

SEQ ID NO: 361964 - RNA, 19 nt, Artificial Sequence
  Description of Artificial Sequence: Synthetic oligonucleotide
ucccacgauggcagauguc

SEQ ID NO: 361965 - RNA, 19 nt, Artificial Sequence
  Description of Artificial Sequence: Synthetic oligonucleotide
cauaggggaguaugcggua

SEQ ID NO: 361966 - RNA, 19 nt, Artificial Sequence
  Description of Artificial Sequence: Synthetic oligonucleotide
ugcucaucacgggcuucgc

SEQ ID NO: 361967 - RNA, 19 nt, Artificial Sequence
  Description of Artificial Sequence: Synthetic oligonucleotide
caucacgggcuucgcggug

SEQ ID NO: 361968 - RNA, 19 nt, Artificial Sequence
  Description of Artificial Sequence: Synthetic oligonucleotide
cuuggacgaaggcuguacu

SEQ ID NO: 361969 - RNA, 19 nt, Artificial Sequence
  Description of Artificial Sequence: Synthetic oligonucleotide
auccagagacaagcagacu

SEQ ID NO: 361970 - RNA, 19 nt, Artificial Sequence
  Description of Artificial Sequence: Synthetic oligonucleotide
caguaaacauaggggagua

SEQ ID NO: 361971 - RNA, 19 nt, Artificial Sequence
  Description of Artificial Sequence: Synthetic oligonucleotide
ccacgauggcagaugucag

SEQ ID NO: 361972 - RNA, 19 nt, Artificial Sequence
  Description of Artificial Sequence: Synthetic oligonucleotide
gcgguggacaagcaacgca

SEQ ID NO: 361973 - RNA, 19 nt, Artificial Sequence
  Description of Artificial Sequence: Synthetic oligonucleotide
gguacuuugggaagacgcu

SEQ ID NO: 361974 - RNA, 19 nt, Artificial Sequence
  Description of Artificial Sequence: Synthetic oligonucleotide
uucuuggacgaaggcugua

SEQ ID NO: 361975 - RNA, 19 nt, Artificial Sequence
  Description of Artificial Sequence: Synthetic oligonucleotide
gagggaaacucagcaggcu

SEQ ID NO: 361976 - RNA, 19 nt, Artificial Sequence
  Description of Artificial Sequence: Synthetic oligonucleotide
caagaccauugccaaagau

SEQ ID NO: 361977 - RNA, 19 nt, Artificial Sequence
  Description of Artificial Sequence: Synthetic oligonucleotide
uucuuccggaaugcauuuu

SEQ ID NO: 361978 - RNA, 19 nt, Artificial Sequence
  Description of Artificial Sequence: Synthetic oligonucleotide
cuucgcgguggacaagcaa

SEQ ID NO: 361979 - RNA, 19 nt, Artificial Sequence
  Description of Artificial Sequence: Synthetic oligonucleotide
guguguucaggcuccccgu

SEQ ID NO: 361980 - RNA, 19 nt, Artificial Sequence
  Description of Artificial Sequence: Synthetic oligonucleotide
acucuuacccguggacgua

SEQ ID NO: 361981 - RNA, 19 nt, Artificial Sequence
  Description of Artificial Sequence: Synthetic oligonucleotide
guacuuugggaagacgcuu

SEQ ID NO: 361982 - RNA, 19 nt, Artificial Sequence
  Description of Artificial Sequence: Synthetic oligonucleotide
gcuucaauacaagcggagu

SEQ ID NO: 361983 - RNA, 19 nt, Artificial Sequence
  Description of Artificial Sequence: Synthetic oligonucleotide
ccaaguuaacaaccaccca

SEQ ID NO: 361984 - RNA, 19 nt, Artificial Sequence
  Description of Artificial Sequence: Synthetic oligonucleotide
cuacuuaguuccugacaau

SEQ ID NO: 361985 - RNA, 19 nt, Artificial Sequence
  Description of Artificial Sequence: Synthetic oligonucleotide
ccugacaauuaucucacau

SEQ ID NO: 361986 - RNA, 19 nt, Artificial Sequence
  Description of Artificial Sequence: Synthetic oligonucleotide
gaucgagcauagagauaaa

SEQ ID NO: 361987 - RNA, 19 nt, Artificial Sequence
  Description of Artificial Sequence: Synthetic oligonucleotide
ccaauucgaggguuuaacu

SEQ ID NO: 361988 - RNA, 19 nt, Artificial Sequence
  Description of Artificial Sequence: Synthetic oligonucleotide
gcucuaaauggucacccuu

SEQ ID NO: 361989 - RNA, 19 nt, Artificial Sequence
  Description of Artificial Sequence: Synthetic oligonucleotide
caauacaagcggagucaau

SEQ ID NO: 361990 - RNA, 19 nt, Artificial Sequence
  Description of Artificial Sequence: Synthetic oligonucleotide
agggaguucugaagacaua

SEQ ID NO: 361991 - RNA, 19 nt, Artificial Sequence
  Description of Artificial Sequence: Synthetic oligonucleotide
gcggaguggucacuugaaa

SEQ ID NO: 361992 - RNA, 19 nt, Artificial Sequence
  Description of Artificial Sequence: Synthetic oligonucleotide
caucccuaggggccuucaa

SEQ ID NO: 361993 - RNA, 19 nt, Artificial Sequence
  Description of Artificial Sequence: Synthetic oligonucleotide
cguuguauacauugaugcu

SEQ ID NO: 361994 - RNA, 19 nt, Artificial Sequence
  Description of Artificial Sequence: Synthetic oligonucleotide
caauacugggcugggguuu

SEQ ID NO: 361995 - RNA, 19 nt, Artificial Sequence
  Description of Artificial Sequence: Synthetic oligonucleotide
ggaccaugccagcgccaug

SEQ ID NO: 361996 - RNA, 19 nt, Artificial Sequence
  Description of Artificial Sequence: Synthetic oligonucleotide
ggguuuguggacauauauu

SEQ ID NO: 361997 - RNA, 19 nt, Artificial Sequence
  Description of Artificial Sequence: Synthetic oligonucleotide
cccuaggggccuucaaaga

SEQ ID NO: 361998 - RNA, 19 nt, Artificial Sequence
  Description of Artificial Sequence: Synthetic oligonucleotide
ccuaggggccuucaaagau

SEQ ID NO: 361999 - RNA, 19 nt, Artificial Sequence
  Description of Artificial Sequence: Synthetic oligonucleotide
cccaaguaauugggauggc

SEQ ID NO: 362000 - RNA, 19 nt, Artificial Sequence
  Description of Artificial Sequence: Synthetic oligonucleotide
cacguuccuguacuuucau

SEQ ID NO: 362001 - RNA, 19 nt, Artificial Sequence
  Description of Artificial Sequence: Synthetic oligonucleotide
gccuucaaagaucgagcau

SEQ ID NO: 362002 - RNA, 19 nt, Artificial Sequence
  Description of Artificial Sequence: Synthetic oligonucleotide
ccaggacgcaauucacaaa

SEQ ID NO: 362003 - RNA, 19 nt, Artificial Sequence
  Description of Artificial Sequence: Synthetic oligonucleotide
gcgaugcaccagguacucc

SEQ ID NO: 362004 - RNA, 19 nt, Artificial Sequence
  Description of Artificial Sequence: Synthetic oligonucleotide
ggcacucguuggcaguacu

SEQ ID NO: 362005 - RNA, 19 nt, Artificial Sequence
  Description of Artificial Sequence: Synthetic oligonucleotide
gguggacaagcaacgcagu

SEQ ID NO: 362006 - RNA, 19 nt, Artificial Sequence
  Description of Artificial Sequence: Synthetic oligonucleotide
augcgguagggcacucguu

SEQ ID NO: 362007 - RNA, 19 nt, Artificial Sequence
  Description of Artificial Sequence: Synthetic oligonucleotide
cucuuacccguggacguau

SEQ ID NO: 362008 - RNA, 19 nt, Artificial Sequence
  Description of Artificial Sequence: Synthetic oligonucleotide
ggccgagcaugaugagcga

SEQ ID NO: 362009 - RNA, 19 nt, Artificial Sequence
  Description of Artificial Sequence: Synthetic oligonucleotide
ccaaucaauccaggacgca

SEQ ID NO: 362010 - RNA, 19 nt, Artificial Sequence
  Description of Artificial Sequence: Synthetic oligonucleotide
gccaggccguauuuccucu

SEQ ID NO: 362011 - RNA, 19 nt, Artificial Sequence
  Description of Artificial Sequence: Synthetic oligonucleotide
aggggccuucaaagaucga

SEQ ID NO: 362012 - RNA, 19 nt, Artificial Sequence
  Description of Artificial Sequence: Synthetic oligonucleotide
gguucacuauuuggcucua

SEQ ID NO: 362013 - RNA, 19 nt, Artificial Sequence
  Description of Artificial Sequence: Synthetic oligonucleotide
gggcacucguuggcaguac

SEQ ID NO: 362014 - RNA, 19 nt, Artificial Sequence
  Description of Artificial Sequence: Synthetic oligonucleotide
cacgggcuucgcgguggac

SEQ ID NO: 362015 - RNA, 19 nt, Artificial Sequence
  Description of Artificial Sequence: Synthetic oligonucleotide
gggcuucgcgguggacaag

SEQ ID NO: 362016 - RNA, 19 nt, Artificial Sequence
  Description of Artificial Sequence: Synthetic oligonucleotide
gcgccaugaugaggucacc

SEQ ID NO: 362017 - RNA, 19 nt, Artificial Sequence
  Description of Artificial Sequence: Synthetic oligonucleotide
cgggcuucgcgguggacaa

SEQ ID NO: 362018 - RNA, 19 nt, Artificial Sequence
  Description of Artificial Sequence: Synthetic oligonucleotide
gcaacgcagugaaguagau

SEQ ID NO: 362019 - RNA, 19 nt, Artificial Sequence
  Description of Artificial Sequence: Synthetic oligonucleotide
gccgagcaugaugagcgau

SEQ ID NO: 362020 - RNA, 19 nt, Artificial Sequence
  Description of Artificial Sequence: Synthetic oligonucleotide
gcacucguuggcaguacuu

SEQ ID NO: 362021 - RNA, 19 nt, Artificial Sequence
  Description of Artificial Sequence: Synthetic oligonucleotide
ccaaaggugcagguacuuu

SEQ ID NO: 362022 - RNA, 19 nt, Artificial Sequence
  Description of Artificial Sequence: Synthetic oligonucleotide
gcugggguuuguggacaua

SEQ ID NO: 362023 - RNA, 19 nt, Artificial Sequence
  Description of Artificial Sequence: Synthetic oligonucleotide
uuuagaaggacaaaacuag

SEQ ID NO: 362024 - RNA, 19 nt, Artificial Sequence
  Description of Artificial Sequence: Synthetic oligonucleotide
ucaguauagauuuagacca

SEQ ID NO: 362025 - RNA, 19 nt, Artificial Sequence
  Description of Artificial Sequence: Synthetic oligonucleotide
aaugucccuugauagaucc

SEQ ID NO: 362026 - RNA, 19 nt, Artificial Sequence
  Description of Artificial Sequence: Synthetic oligonucleotide
aguucgaaaacauuaacuc

SEQ ID NO: 362027 - RNA, 19 nt, Artificial Sequence
  Description of Artificial Sequence: Synthetic oligonucleotide
ugugcugacuccuugaagg

SEQ ID NO: 362028 - RNA, 19 nt, Artificial Sequence
  Description of Artificial Sequence: Synthetic oligonucleotide
uucaguauagauuuagacc

SEQ ID NO: 362029 - RNA, 19 nt, Artificial Sequence
  Description of Artificial Sequence: Synthetic oligonucleotide
gaaggacaaaacuagaccc

SEQ ID NO: 362030 - RNA, 19 nt, Artificial Sequence
  Description of Artificial Sequence: Synthetic oligonucleotide
uuaaaauugagacuacagu

SEQ ID NO: 362031 - RNA, 19 nt, Artificial Sequence
  Description of Artificial Sequence: Synthetic oligonucleotide
ugcgacuugagaaagaaga

SEQ ID NO: 362032 - RNA, 19 nt, Artificial Sequence
  Description of Artificial Sequence: Synthetic oligonucleotide
ucgaauuauauuuaaggca

SEQ ID NO: 362033 - RNA, 19 nt, Artificial Sequence
  Description of Artificial Sequence: Synthetic oligonucleotide
uuaaacuuaguagauacug

SEQ ID NO: 362034 - RNA, 19 nt, Artificial Sequence
  Description of Artificial Sequence: Synthetic oligonucleotide
uggaacguugcuuuggucg

SEQ ID NO: 362035 - RNA, 19 nt, Artificial Sequence
  Description of Artificial Sequence: Synthetic oligonucleotide
aaagacuugggacagacua

SEQ ID NO: 362036 - RNA, 19 nt, Artificial Sequence
  Description of Artificial Sequence: Synthetic oligonucleotide
acuuaguagauacugaaca

SEQ ID NO: 362037 - RNA, 19 nt, Artificial Sequence
  Description of Artificial Sequence: Synthetic oligonucleotide
uaguguugaaacaaugugc

SEQ ID NO: 362038 - RNA, 19 nt, Artificial Sequence
  Description of Artificial Sequence: Synthetic oligonucleotide
cucgaauuauauuuaaggc

SEQ ID NO: 362039 - RNA, 19 nt, Artificial Sequence
  Description of Artificial Sequence: Synthetic oligonucleotide
cuuagauucacugucuugg

SEQ ID NO: 362040 - RNA, 19 nt, Artificial Sequence
  Description of Artificial Sequence: Synthetic oligonucleotide
agaucugucuaucuguaac

SEQ ID NO: 362041 - RNA, 19 nt, Artificial Sequence
  Description of Artificial Sequence: Synthetic oligonucleotide
uucgaaaacauuaacucaa

SEQ ID NO: 362042 - RNA, 19 nt, Artificial Sequence
  Description of Artificial Sequence: Synthetic oligonucleotide
acuggauucauucaugugu

SEQ ID NO: 362043 - RNA, 19 nt, Artificial Sequence
  Description of Artificial Sequence: Synthetic oligonucleotide
aaaccccuuuccuacauuc

SEQ ID NO: 362044 - RNA, 19 nt, Artificial Sequence
  Description of Artificial Sequence: Synthetic oligonucleotide
uagugaaccacacugcuca

SEQ ID NO: 362045 - RNA, 19 nt, Artificial Sequence
  Description of Artificial Sequence: Synthetic oligonucleotide
ucauguguaguguugaaac

SEQ ID NO: 362046 - RNA, 19 nt, Artificial Sequence
  Description of Artificial Sequence: Synthetic oligonucleotide
acuucuucgauucaguggu

SEQ ID NO: 362047 - RNA, 19 nt, Artificial Sequence
  Description of Artificial Sequence: Synthetic oligonucleotide
augcuaaauaaauaucuag

SEQ ID NO: 362048 - RNA, 19 nt, Artificial Sequence
  Description of Artificial Sequence: Synthetic oligonucleotide
aaacuuaguagauacugaa

SEQ ID NO: 362049 - RNA, 19 nt, Artificial Sequence
  Description of Artificial Sequence: Synthetic oligonucleotide
aaccacacugcucacugac

SEQ ID NO: 362050 - RNA, 19 nt, Artificial Sequence
  Description of Artificial Sequence: Synthetic oligonucleotide
gauccugucuucaauaucc

SEQ ID NO: 362051 - RNA, 19 nt, Artificial Sequence
  Description of Artificial Sequence: Synthetic oligonucleotide
uuaauaucauaacuccuac

SEQ ID NO: 362052 - RNA, 19 nt, Artificial Sequence
  Description of Artificial Sequence: Synthetic oligonucleotide
uuuaauuggcaaucuaacu

SEQ ID NO: 362053 - RNA, 19 nt, Artificial Sequence
  Description of Artificial Sequence: Synthetic oligonucleotide
agcuguuauugcuuuauac

SEQ ID NO: 362054 - RNA, 19 nt, Artificial Sequence
  Description of Artificial Sequence: Synthetic oligonucleotide
uuuagaccacaucacacug

SEQ ID NO: 362055 - RNA, 19 nt, Artificial Sequence
  Description of Artificial Sequence: Synthetic oligonucleotide
uguugaaacaaugugccug

SEQ ID NO: 362056 - RNA, 19 nt, Artificial Sequence
  Description of Artificial Sequence: Synthetic oligonucleotide
uaaacuuaguagauacuga

SEQ ID NO: 362057 - RNA, 19 nt, Artificial Sequence
  Description of Artificial Sequence: Synthetic oligonucleotide
cucuaucugaaacagggcc

SEQ ID NO: 362058 - RNA, 19 nt, Artificial Sequence
  Description of Artificial Sequence: Synthetic oligonucleotide
auuaaaauugagacuacag

SEQ ID NO: 362059 - RNA, 19 nt, Artificial Sequence
  Description of Artificial Sequence: Synthetic oligonucleotide
auaucguccauucucuaag

SEQ ID NO: 362060 - RNA, 19 nt, Artificial Sequence
  Description of Artificial Sequence: Synthetic oligonucleotide
ugacuuugaaguuagugaa

SEQ ID NO: 362061 - RNA, 19 nt, Artificial Sequence
  Description of Artificial Sequence: Synthetic oligonucleotide
ugucuuaggagaagcagug

SEQ ID NO: 362062 - RNA, 19 nt, Artificial Sequence
  Description of Artificial Sequence: Synthetic oligonucleotide
guaguguugaaacaaugug

SEQ ID NO: 362063 - RNA, 19 nt, Artificial Sequence
  Description of Artificial Sequence: Synthetic oligonucleotide
ucuaucugaaacagggcca

SEQ ID NO: 362064 - RNA, 19 nt, Artificial Sequence
  Description of Artificial Sequence: Synthetic oligonucleotide
aaaacuagacccgugacuu

SEQ ID NO: 362065 - RNA, 19 nt, Artificial Sequence
  Description of Artificial Sequence: Synthetic oligonucleotide
ugagacauggaguccaagc

SEQ ID NO: 362066 - RNA, 19 nt, Artificial Sequence
  Description of Artificial Sequence: Synthetic oligonucleotide
uucuggacaaaaccaaucu

SEQ ID NO: 362067 - RNA, 19 nt, Artificial Sequence
  Description of Artificial Sequence: Synthetic oligonucleotide
auauuuaaggcaaugggcu

SEQ ID NO: 362068 - RNA, 19 nt, Artificial Sequence
  Description of Artificial Sequence: Synthetic oligonucleotide
uuaaagagcgaguuucugu

SEQ ID NO: 362069 - RNA, 19 nt, Artificial Sequence
  Description of Artificial Sequence: Synthetic oligonucleotide
uuggucgacauucuggaca

SEQ ID NO: 362070 - RNA, 19 nt, Artificial Sequence
  Description of Artificial Sequence: Synthetic oligonucleotide
acaaaacuagacccgugac

SEQ ID NO: 362071 - RNA, 19 nt, Artificial Sequence
  Description of Artificial Sequence: Synthetic oligonucleotide
auuuagaccacaucacacu

SEQ ID NO: 362072 - RNA, 19 nt, Artificial Sequence
  Description of Artificial Sequence: Synthetic oligonucleotide
guucaguauagauuuagac

SEQ ID NO: 362073 - RNA, 19 nt, Artificial Sequence
  Description of Artificial Sequence: Synthetic oligonucleotide
ugagugcuuaauauuaaaa

SEQ ID NO: 362074 - RNA, 19 nt, Artificial Sequence
  Description of Artificial Sequence: Synthetic oligonucleotide
ggcacuaggaguuuucugg

SEQ ID NO: 362075 - RNA, 19 nt, Artificial Sequence
  Description of Artificial Sequence: Synthetic oligonucleotide
gacgcaguaggugugaugc

SEQ ID NO: 362076 - RNA, 19 nt, Artificial Sequence
  Description of Artificial Sequence: Synthetic oligonucleotide
cugucuaucuguaaccuug

SEQ ID NO: 362077 - RNA, 19 nt, Artificial Sequence
  Description of Artificial Sequence: Synthetic oligonucleotide
cuuguucuaccucauauuc

SEQ ID NO: 362078 - RNA, 19 nt, Artificial Sequence
  Description of Artificial Sequence: Synthetic oligonucleotide
uugauaaauucagucagca

SEQ ID NO: 362079 - RNA, 19 nt, Artificial Sequence
  Description of Artificial Sequence: Synthetic oligonucleotide
ucaucuguguagauaaguc

SEQ ID NO: 362080 - RNA, 19 nt, Artificial Sequence
  Description of Artificial Sequence: Synthetic oligonucleotide
aggacgguuuuauaagaac

SEQ ID NO: 362081 - RNA, 19 nt, Artificial Sequence
  Description of Artificial Sequence: Synthetic oligonucleotide
ucugccucgaggaaagucu

SEQ ID NO: 362082 - RNA, 19 nt, Artificial Sequence
  Description of Artificial Sequence: Synthetic oligonucleotide
uuagaaggacaaaacuaga

SEQ ID NO: 362083 - RNA, 19 nt, Artificial Sequence
  Description of Artificial Sequence: Synthetic oligonucleotide
uuaugaacgcuucauguuu

SEQ ID NO: 362084 - RNA, 19 nt, Artificial Sequence
  Description of Artificial Sequence: Synthetic oligonucleotide
uguagauaaguccucuuua

SEQ ID NO: 362085 - RNA, 19 nt, Artificial Sequence
  Description of Artificial Sequence: Synthetic oligonucleotide
ucuaguugauaaauucagu

SEQ ID NO: 362086 - RNA, 19 nt, Artificial Sequence
  Description of Artificial Sequence: Synthetic oligonucleotide
auuaaagaacauuuuccaa

SEQ ID NO: 362087 - RNA, 19 nt, Artificial Sequence
  Description of Artificial Sequence: Synthetic oligonucleotide
ucauucauguguaguguug

SEQ ID NO: 362088 - RNA, 19 nt, Artificial Sequence
  Description of Artificial Sequence: Synthetic oligonucleotide
uugagcuuuggucggacgc

SEQ ID NO: 362089 - RNA, 19 nt, Artificial Sequence
  Description of Artificial Sequence: Synthetic oligonucleotide
gacuuugaaugcuaaauaa

SEQ ID NO: 362090 - RNA, 19 nt, Artificial Sequence
  Description of Artificial Sequence: Synthetic oligonucleotide
uuauccaaugcaucuauua

SEQ ID NO: 362091 - RNA, 19 nt, Artificial Sequence
  Description of Artificial Sequence: Synthetic oligonucleotide
uauuaaaauugagacuaca

SEQ ID NO: 362092 - RNA, 19 nt, Artificial Sequence
  Description of Artificial Sequence: Synthetic oligonucleotide
gauuuagaccacaucacac

SEQ ID NO: 362093 - RNA, 19 nt, Artificial Sequence
  Description of Artificial Sequence: Synthetic oligonucleotide
ucugcuuuagagcaugauu

SEQ ID NO: 362094 - RNA, 19 nt, Artificial Sequence
  Description of Artificial Sequence: Synthetic oligonucleotide
aaccucuguaaaccaggac

SEQ ID NO: 362095 - RNA, 19 nt, Artificial Sequence
  Description of Artificial Sequence: Synthetic oligonucleotide
uuauaagaacguccgcugu

SEQ ID NO: 362096 - RNA, 19 nt, Artificial Sequence
  Description of Artificial Sequence: Synthetic oligonucleotide
ucacuaugacccuugcuug

SEQ ID NO: 362097 - RNA, 19 nt, Artificial Sequence
  Description of Artificial Sequence: Synthetic oligonucleotide
gaacacaugaaugauucuc

SEQ ID NO: 362098 - RNA, 19 nt, Artificial Sequence
  Description of Artificial Sequence: Synthetic oligonucleotide
uagauucacugucuuggag

SEQ ID NO: 362099 - RNA, 19 nt, Artificial Sequence
  Description of Artificial Sequence: Synthetic oligonucleotide
uuuaugaacgcuucauguu

SEQ ID NO: 362100 - RNA, 19 nt, Artificial Sequence
  Description of Artificial Sequence: Synthetic oligonucleotide
gacuguggcgaguggaacg

SEQ ID NO: 362101 - RNA, 19 nt, Artificial Sequence
  Description of Artificial Sequence: Synthetic oligonucleotide
uuagaccacaucacacugc

SEQ ID NO: 362102 - RNA, 19 nt, Artificial Sequence
  Description of Artificial Sequence: Synthetic oligonucleotide
uauaagaacguccgcuguc

SEQ ID NO: 362103 - RNA, 19 nt, Artificial Sequence
  Description of Artificial Sequence: Synthetic oligonucleotide
acuugggacagacuagcag

SEQ ID NO: 362104 - RNA, 19 nt, Artificial Sequence
  Description of Artificial Sequence: Synthetic oligonucleotide
uuaguagauacugaacaaa

SEQ ID NO: 362105 - RNA, 19 nt, Artificial Sequence
  Description of Artificial Sequence: Synthetic oligonucleotide
aguuagugaagcugggacu

SEQ ID NO: 362106 - RNA, 19 nt, Artificial Sequence
  Description of Artificial Sequence: Synthetic oligonucleotide
ucuuaaagagcgaguuucu

SEQ ID NO: 362107 - RNA, 19 nt, Artificial Sequence
  Description of Artificial Sequence: Synthetic oligonucleotide
uggcacgcuaaccuggucc

SEQ ID NO: 362108 - RNA, 19 nt, Artificial Sequence
  Description of Artificial Sequence: Synthetic oligonucleotide
ggagagauucucuccaacg

SEQ ID NO: 362109 - RNA, 19 nt, Artificial Sequence
  Description of Artificial Sequence: Synthetic oligonucleotide
uuugcagcgacuggcacgc

SEQ ID NO: 362110 - RNA, 19 nt, Artificial Sequence
  Description of Artificial Sequence: Synthetic oligonucleotide
guucgaaaacauuaacuca

SEQ ID NO: 362111 - RNA, 19 nt, Artificial Sequence
  Description of Artificial Sequence: Synthetic oligonucleotide
uuucccggaggacuaagca

SEQ ID NO: 362112 - RNA, 19 nt, Artificial Sequence
  Description of Artificial Sequence: Synthetic oligonucleotide
auauuuuccaagauaccug

SEQ ID NO: 362113 - RNA, 19 nt, Artificial Sequence
  Description of Artificial Sequence: Synthetic oligonucleotide
ucaauaaacucagaugcua

SEQ ID NO: 362114 - RNA, 19 nt, Artificial Sequence
  Description of Artificial Sequence: Synthetic oligonucleotide
accuugauugcuccuaaug

SEQ ID NO: 362115 - RNA, 19 nt, Artificial Sequence
  Description of Artificial Sequence: Synthetic oligonucleotide
uccaaggacggucucugcc

SEQ ID NO: 362116 - RNA, 19 nt, Artificial Sequence
  Description of Artificial Sequence: Synthetic oligonucleotide
uagacgagcuguuauugcu

SEQ ID NO: 362117 - RNA, 19 nt, Artificial Sequence
  Description of Artificial Sequence: Synthetic oligonucleotide
aacgacuagcaauucuuaa

SEQ ID NO: 362118 - RNA, 19 nt, Artificial Sequence
  Description of Artificial Sequence: Synthetic oligonucleotide
aauaucuaguugauaaauu

SEQ ID NO: 362119 - RNA, 19 nt, Artificial Sequence
  Description of Artificial Sequence: Synthetic oligonucleotide
uuggguauuaucagcgcuc

SEQ ID NO: 362120 - RNA, 19 nt, Artificial Sequence
  Description of Artificial Sequence: Synthetic oligonucleotide
uucgauucagugguacagg

SEQ ID NO: 362121 - RNA, 19 nt, Artificial Sequence
  Description of Artificial Sequence: Synthetic oligonucleotide
ugagacggcacuaggaguu

SEQ ID NO: 362122 - RNA, 19 nt, Artificial Sequence
  Description of Artificial Sequence: Synthetic oligonucleotide
ucauaacuccuacaagguc

SEQ ID NO: 362123 - RNA, 19 nt, Artificial Sequence
  Description of Artificial Sequence: Synthetic oligonucleotide
agaacguccgcugucacug

SEQ ID NO: 362124 - RNA, 19 nt, Artificial Sequence
  Description of Artificial Sequence: Synthetic oligonucleotide
ucccggaggacuaagcagu

SEQ ID NO: 362125 - RNA, 19 nt, Artificial Sequence
  Description of Artificial Sequence: Synthetic oligonucleotide
aagcaguucgaaaacauua

SEQ ID NO: 362126 - RNA, 19 nt, Artificial Sequence
  Description of Artificial Sequence: Synthetic oligonucleotide
ggacgguuuuauaagaacg

SEQ ID NO: 362127 - RNA, 19 nt, Artificial Sequence
  Description of Artificial Sequence: Synthetic oligonucleotide
ugucccuugauagauccug

SEQ ID NO: 362128 - RNA, 19 nt, Artificial Sequence
  Description of Artificial Sequence: Synthetic oligonucleotide
agacaauucaugaacgccu

SEQ ID NO: 362129 - RNA, 19 nt, Artificial Sequence
  Description of Artificial Sequence: Synthetic oligonucleotide
cuuuugagcuugauaauga

SEQ ID NO: 362130 - RNA, 19 nt, Artificial Sequence
  Description of Artificial Sequence: Synthetic oligonucleotide
uguaaaccaggacuuuauc

SEQ ID NO: 362131 - RNA, 19 nt, Artificial Sequence
  Description of Artificial Sequence: Synthetic oligonucleotide
gaggaaagucuccuggaac

SEQ ID NO: 362132 - RNA, 19 nt, Artificial Sequence
  Description of Artificial Sequence: Synthetic oligonucleotide
cucaaagcaguucgaaaac

SEQ ID NO: 362133 - RNA, 19 nt, Artificial Sequence
  Description of Artificial Sequence: Synthetic oligonucleotide
cagacaauucaugaacgcc

SEQ ID NO: 362134 - RNA, 19 nt, Artificial Sequence
  Description of Artificial Sequence: Synthetic oligonucleotide
aggucaauaacaaaauaaa

SEQ ID NO: 362135 - RNA, 19 nt, Artificial Sequence
  Description of Artificial Sequence: Synthetic oligonucleotide
uuagauucacugucuugga

SEQ ID NO: 362136 - RNA, 19 nt, Artificial Sequence
  Description of Artificial Sequence: Synthetic oligonucleotide
uucccggaggacuaagcag

SEQ ID NO: 362137 - RNA, 19 nt, Artificial Sequence
  Description of Artificial Sequence: Synthetic oligonucleotide
acugacugugguguacugc

SEQ ID NO: 362138 - RNA, 19 nt, Artificial Sequence
  Description of Artificial Sequence: Synthetic oligonucleotide
aggaaccgccguucaaugc

SEQ ID NO: 362139 - RNA, 19 nt, Artificial Sequence
  Description of Artificial Sequence: Synthetic oligonucleotide
ucgauucagugguacagga

SEQ ID NO: 362140 - RNA, 19 nt, Artificial Sequence
  Description of Artificial Sequence: Synthetic oligonucleotide
  modified_base (18)..(18): a, c, u, g, unknown or other
auucucuaaggccgaucnc

SEQ ID NO: 362141 - RNA, 19 nt, Artificial Sequence
  Description of Artificial Sequence: Synthetic oligonucleotide
acgacuagcaauucuuaaa

SEQ ID NO: 362142 - RNA, 19 nt, Artificial Sequence
  Description of Artificial Sequence: Synthetic oligonucleotide
uuugaggaaccgccguuca

SEQ ID NO: 362143 - RNA, 19 nt, Artificial Sequence
  Description of Artificial Sequence: Synthetic oligonucleotide
aggugugaugcccucgauc

SEQ ID NO: 362144 - RNA, 19 nt, Artificial Sequence
  Description of Artificial Sequence: Synthetic oligonucleotide
caagauaccugaacacaug

SEQ ID NO: 362145 - RNA, 19 nt, Artificial Sequence
  Description of Artificial Sequence: Synthetic oligonucleotide
ggaccuggauuuuagaaac

SEQ ID NO: 362146 - RNA, 19 nt, Artificial Sequence
  Description of Artificial Sequence: Synthetic oligonucleotide
aucaucaugccguaccaau

SEQ ID NO: 362147 - RNA, 19 nt, Artificial Sequence
  Description of Artificial Sequence: Synthetic oligonucleotide
  modified_base (19)..(19): a, c, u, g, unknown or other
cauucucuaaggccgaucn

SEQ ID NO: 362148 - RNA, 19 nt, Artificial Sequence
  Description of Artificial Sequence: Synthetic oligonucleotide
ucacacugcgauccaaagu

SEQ ID NO: 362149 - RNA, 19 nt, Artificial Sequence
  Description of Artificial Sequence: Synthetic oligonucleotide
uggaacgacuagcaauucu

SEQ ID NO: 362150 - RNA, 19 nt, Artificial Sequence
  Description of Artificial Sequence: Synthetic oligonucleotide
agcuaagucucccucuugu

SEQ ID NO: 362151 - RNA, 19 nt, Artificial Sequence
  Description of Artificial Sequence: Synthetic oligonucleotide
ugucuaucuguaaccuuga

SEQ ID NO: 362152 - RNA, 19 nt, Artificial Sequence
  Description of Artificial Sequence: Synthetic oligonucleotide
acgguuuuauaagaacguc

SEQ ID NO: 362153 - RNA, 19 nt, Artificial Sequence
  Description of Artificial Sequence: Synthetic oligonucleotide
gcaucuauuaaacuuagua

SEQ ID NO: 362154 - RNA, 19 nt, Artificial Sequence
  Description of Artificial Sequence: Synthetic oligonucleotide
caucaaguggagcuuugag

SEQ ID NO: 362155 - RNA, 19 nt, Artificial Sequence
  Description of Artificial Sequence: Synthetic oligonucleotide
aggacuaagcaguuccaca

SEQ ID NO: 362156 - RNA, 19 nt, Artificial Sequence
  Description of Artificial Sequence: Synthetic oligonucleotide
cuuuggucgacauucugga

SEQ ID NO: 362157 - RNA, 19 nt, Artificial Sequence
  Description of Artificial Sequence: Synthetic oligonucleotide
caugaacgccuccuugucg

SEQ ID NO: 362158 - RNA, 19 nt, Artificial Sequence
  Description of Artificial Sequence: Synthetic oligonucleotide
ggugugaugcccucgauca

SEQ ID NO: 362159 - RNA, 19 nt, Artificial Sequence
  Description of Artificial Sequence: Synthetic oligonucleotide
gagcaugauuuaauguucc

SEQ ID NO: 362160 - RNA, 19 nt, Artificial Sequence
  Description of Artificial Sequence: Synthetic oligonucleotide
cuuaguagauacugaacaa

SEQ ID NO: 362161 - RNA, 19 nt, Artificial Sequence
  Description of Artificial Sequence: Synthetic oligonucleotide
aagaacguccgcugucacu

SEQ ID NO: 362162 - RNA, 19 nt, Artificial Sequence
  Description of Artificial Sequence: Synthetic oligonucleotide
ucuuguucuaccucauauu

SEQ ID NO: 362163 - RNA, 19 nt, Artificial Sequence
  Description of Artificial Sequence: Synthetic oligonucleotide
uauuuaaggcaaugggcuu

SEQ ID NO: 362164 - RNA, 19 nt, Artificial Sequence
  Description of Artificial Sequence: Synthetic oligonucleotide
uaugaacgcuucauguuuu

SEQ ID NO: 362165 - RNA, 19 nt, Artificial Sequence
  Description of Artificial Sequence: Synthetic oligonucleotide
aacuccuacaaggucaaua

SEQ ID NO: 362166 - RNA, 19 nt, Artificial Sequence
  Description of Artificial Sequence: Synthetic oligonucleotide
ucgaaaacauuaacucaau

SEQ ID NO: 362167 - RNA, 19 nt, Artificial Sequence
  Description of Artificial Sequence: Synthetic oligonucleotide
auucagucagcacuggcua

SEQ ID NO: 362168 - RNA, 19 nt, Artificial Sequence
  Description of Artificial Sequence: Synthetic oligonucleotide
accacaucacacugcgauc

SEQ ID NO: 362169 - RNA, 19 nt, Artificial Sequence
  Description of Artificial Sequence: Synthetic oligonucleotide
uguguucuuggguauuauc

SEQ ID NO: 362170 - RNA, 19 nt, Artificial Sequence
  Description of Artificial Sequence: Synthetic oligonucleotide
  modified_base (4)..(4): a, c, u, g, unknown or other
aucnccagaucugucuauc

SEQ ID NO: 362171 - RNA, 19 nt, Artificial Sequence
  Description of Artificial Sequence: Synthetic oligonucleotide
uucugguuuugucugucuc

SEQ ID NO: 362172 - RNA, 19 nt, Artificial Sequence
  Description of Artificial Sequence: Synthetic oligonucleotide
uugcgacuugagaaagaag

SEQ ID NO: 362173 - RNA, 19 nt, Artificial Sequence
  Description of Artificial Sequence: Synthetic oligonucleotide
uguuccgaggguuguacuc

SEQ ID NO: 362174 - RNA, 19 nt, Artificial Sequence
  Description of Artificial Sequence: Synthetic oligonucleotide
uugagacggcacuaggagu

SEQ ID NO: 362175 - RNA, 19 nt, Artificial Sequence
  Description of Artificial Sequence: Synthetic oligonucleotide
acgcuaaccugguccacac

SEQ ID NO: 362176 - RNA, 19 nt, Artificial Sequence
  Description of Artificial Sequence: Synthetic oligonucleotide
auaagaacguccgcuguca

SEQ ID NO: 362177 - RNA, 19 nt, Artificial Sequence
  Description of Artificial Sequence: Synthetic oligonucleotide
uggucgacauucuggacaa

SEQ ID NO: 362178 - RNA, 19 nt, Artificial Sequence
  Description of Artificial Sequence: Synthetic oligonucleotide
ggaaccgccguucaaugcc

SEQ ID NO: 362179 - RNA, 19 nt, Artificial Sequence
  Description of Artificial Sequence: Synthetic oligonucleotide
uuaucagcgcucuuccgua

SEQ ID NO: 362180 - RNA, 19 nt, Artificial Sequence
  Description of Artificial Sequence: Synthetic oligonucleotide
auguguaguguugaaacaa

SEQ ID NO: 362181 - RNA, 19 nt, Artificial Sequence
  Description of Artificial Sequence: Synthetic oligonucleotide
uucauguguaguguugaaa

SEQ ID NO: 362182 - RNA, 19 nt, Artificial Sequence
  Description of Artificial Sequence: Synthetic oligonucleotide
gagacauggaguccaagcu

SEQ ID NO: 362183 - RNA, 19 nt, Artificial Sequence
  Description of Artificial Sequence: Synthetic oligonucleotide
gacuggcacgcuaaccugg

SEQ ID NO: 362184 - RNA, 19 nt, Artificial Sequence
  Description of Artificial Sequence: Synthetic oligonucleotide
auuaaacuuaguagauacu

SEQ ID NO: 362185 - RNA, 19 nt, Artificial Sequence
  Description of Artificial Sequence: Synthetic oligonucleotide
gacuagcagaggaaaggag

SEQ ID NO: 362186 - RNA, 19 nt, Artificial Sequence
  Description of Artificial Sequence: Synthetic oligonucleotide
gaggaaccgccguucaaug

SEQ ID NO: 362187 - RNA, 19 nt, Artificial Sequence
  Description of Artificial Sequence: Synthetic oligonucleotide
ggcagacaauucaugaacg

SEQ ID NO: 362188 - RNA, 19 nt, Artificial Sequence
  Description of Artificial Sequence: Synthetic oligonucleotide
gguauuaucagcgcucuuc

SEQ ID NO: 362189 - RNA, 19 nt, Artificial Sequence
  Description of Artificial Sequence: Synthetic oligonucleotide
cuuaaagagcgaguuucug

SEQ ID NO: 362190 - RNA, 19 nt, Artificial Sequence
  Description of Artificial Sequence: Synthetic oligonucleotide
ucaucaugccguaccaauu

SEQ ID NO: 362191 - RNA, 19 nt, Artificial Sequence
  Description of Artificial Sequence: Synthetic oligonucleotide
uguggcgaguggaacgacu

SEQ ID NO: 362192 - RNA, 19 nt, Artificial Sequence
  Description of Artificial Sequence: Synthetic oligonucleotide
ugaagcugggacuguguuc

SEQ ID NO: 362193 - RNA, 19 nt, Artificial Sequence
  Description of Artificial Sequence: Synthetic oligonucleotide
ugcuuuagagcaugauuua

SEQ ID NO: 362194 - RNA, 19 nt, Artificial Sequence
  Description of Artificial Sequence: Synthetic oligonucleotide
  modified_base (3)..(3): a, c, u, g, unknown or other
ucnccagaucugucuaucu

SEQ ID NO: 362195 - RNA, 19 nt, Artificial Sequence
  Description of Artificial Sequence: Synthetic oligonucleotide
aguggaacgacuagcaauu

SEQ ID NO: 362196 - RNA, 19 nt, Artificial Sequence
  Description of Artificial Sequence: Synthetic oligonucleotide
gucggccggaacuucuucg

SEQ ID NO: 362197 - RNA, 19 nt, Artificial Sequence
  Description of Artificial Sequence: Synthetic oligonucleotide
ugguugcgacuugagaaag

SEQ ID NO: 362198 - RNA, 19 nt, Artificial Sequence
  Description of Artificial Sequence: Synthetic oligonucleotide
acacuacuggaugagacau

SEQ ID NO: 362199 - RNA, 19 nt, Artificial Sequence
  Description of Artificial Sequence: Synthetic oligonucleotide
uucuucgauucagugguac

SEQ ID NO: 362200 - RNA, 19 nt, Artificial Sequence
  Description of Artificial Sequence: Synthetic oligonucleotide
cuuggaugugguagacgag

SEQ ID NO: 362201 - RNA, 19 nt, Artificial Sequence
  Description of Artificial Sequence: Synthetic oligonucleotide
agaugcuaauuuauauuca

SEQ ID NO: 362202 - RNA, 19 nt, Artificial Sequence
  Description of Artificial Sequence: Synthetic oligonucleotide
cauguguaguguugaaaca

SEQ ID NO: 362203 - RNA, 19 nt, Artificial Sequence
  Description of Artificial Sequence: Synthetic oligonucleotide
ugagcuuuggucggacgca

SEQ ID NO: 362204 - RNA, 19 nt, Artificial Sequence
  Description of Artificial Sequence: Synthetic oligonucleotide
gcuuuugagcuugauaaug

SEQ ID NO: 362205 - RNA, 19 nt, Artificial Sequence
  Description of Artificial Sequence: Synthetic oligonucleotide
gacaauucaugaacgccuc

SEQ ID NO: 362206 - RNA, 19 nt, Artificial Sequence
  Description of Artificial Sequence: Synthetic oligonucleotide
caguucgaaaacauuaacu

SEQ ID NO: 362207 - RNA, 19 nt, Artificial Sequence
  Description of Artificial Sequence: Synthetic oligonucleotide
  modified_base (2)..(2): a, c, u, g, unknown or other
cnccagaucugucuaucug

SEQ ID NO: 362208 - RNA, 19 nt, Artificial Sequence
  Description of Artificial Sequence: Synthetic oligonucleotide
aucugucuaucuguaaccu

SEQ ID NO: 362209 - RNA, 19 nt, Artificial Sequence
  Description of Artificial Sequence: Synthetic oligonucleotide
guguaguguugaaacaaug

SEQ ID NO: 362210 - RNA, 19 nt, Artificial Sequence
  Description of Artificial Sequence: Synthetic oligonucleotide
gaguggaacgacuagcaau

SEQ ID NO: 362211 - RNA, 19 nt, Artificial Sequence
  Description of Artificial Sequence: Synthetic oligonucleotide
acgcaguaggugugaugcc

SEQ ID NO: 362212 - RNA, 19 nt, Artificial Sequence
  Description of Artificial Sequence: Synthetic oligonucleotide
uuuggucgacauucuggac

SEQ ID NO: 362213 - RNA, 19 nt, Artificial Sequence
  Description of Artificial Sequence: Synthetic oligonucleotide
acagaguaccauguuuuca

SEQ ID NO: 362214 - RNA, 19 nt, Artificial Sequence
  Description of Artificial Sequence: Synthetic oligonucleotide
uaagaacguccgcugucac

SEQ ID NO: 362215 - RNA, 19 nt, Artificial Sequence
  Description of Artificial Sequence: Synthetic oligonucleotide
guccaggacgguuuuauaa

SEQ ID NO: 362216 - RNA, 19 nt, Artificial Sequence
  Description of Artificial Sequence: Synthetic oligonucleotide
uggguauuaucagcgcucu

SEQ ID NO: 362217 - RNA, 19 nt, Artificial Sequence
  Description of Artificial Sequence: Synthetic oligonucleotide
cugcuuuagagcaugauuu

SEQ ID NO: 362218 - RNA, 19 nt, Artificial Sequence
  Description of Artificial Sequence: Synthetic oligonucleotide
gcagacaauucaugaacgc

SEQ ID NO: 362219 - RNA, 19 nt, Artificial Sequence
  Description of Artificial Sequence: Synthetic oligonucleotide
gagcuuugaggaaccgccg

SEQ ID NO: 362220 - RNA, 19 nt, Artificial Sequence
  Description of Artificial Sequence: Synthetic oligonucleotide
uguguagauaaguccucuu

SEQ ID NO: 362221 - RNA, 19 nt, Artificial Sequence
  Description of Artificial Sequence: Synthetic oligonucleotide
aguugagacggcacuagga

SEQ ID NO: 362222 - RNA, 19 nt, Artificial Sequence
  Description of Artificial Sequence: Synthetic oligonucleotide
uggcgaguggaacgacuag

SEQ ID NO: 362223 - RNA, 19 nt, Artificial Sequence
  Description of Artificial Sequence: Synthetic oligonucleotide
ugcuccuaaugucccuuga

SEQ ID NO: 362224 - RNA, 19 nt, Artificial Sequence
  Description of Artificial Sequence: Synthetic oligonucleotide
ugcuguuaguugagacggc

SEQ ID NO: 362225 - RNA, 19 nt, Artificial Sequence
  Description of Artificial Sequence: Synthetic oligonucleotide
uugucguugguugcgacuu

SEQ ID NO: 362226 - RNA, 19 nt, Artificial Sequence
  Description of Artificial Sequence: Synthetic oligonucleotide
cacagaguaccauguuuuc

SEQ ID NO: 362227 - RNA, 19 nt, Artificial Sequence
  Description of Artificial Sequence: Synthetic oligonucleotide
gugcguucaguauagauuu

SEQ ID NO: 362228 - RNA, 19 nt, Artificial Sequence
  Description of Artificial Sequence: Synthetic oligonucleotide
acuuuucguuuucccggag

SEQ ID NO: 362229 - RNA, 19 nt, Artificial Sequence
  Description of Artificial Sequence: Synthetic oligonucleotide
gaggacuaagcaguuccac

SEQ ID NO: 362230 - RNA, 19 nt, Artificial Sequence
  Description of Artificial Sequence: Synthetic oligonucleotide
gccagcuaucaucaugccg

SEQ ID NO: 362231 - RNA, 19 nt, Artificial Sequence
  Description of Artificial Sequence: Synthetic oligonucleotide
cacacuacuggaugagaca

SEQ ID NO: 362232 - RNA, 19 nt, Artificial Sequence
  Description of Artificial Sequence: Synthetic oligonucleotide
ucguuuucccggaggacua

SEQ ID NO: 362233 - RNA, 19 nt, Artificial Sequence
  Description of Artificial Sequence: Synthetic oligonucleotide
aaacuagacccgugacuuu

SEQ ID NO: 362234 - RNA, 19 nt, Artificial Sequence
  Description of Artificial Sequence: Synthetic oligonucleotide
gacgguuuuauaagaacgu

SEQ ID NO: 362235 - RNA, 19 nt, Artificial Sequence
  Description of Artificial Sequence: Synthetic oligonucleotide
gugcugacuuugaaguuag

SEQ ID NO: 362236 - RNA, 19 nt, Artificial Sequence
  Description of Artificial Sequence: Synthetic oligonucleotide
ugguagacgagcuguuauu

SEQ ID NO: 362237 - RNA, 19 nt, Artificial Sequence
  Description of Artificial Sequence: Synthetic oligonucleotide
cuccaacgguccaggacgg

SEQ ID NO: 362238 - RNA, 19 nt, Artificial Sequence
  Description of Artificial Sequence: Synthetic oligonucleotide
cagcgugcguucaguauag

SEQ ID NO: 362239 - RNA, 19 nt, Artificial Sequence
  Description of Artificial Sequence: Synthetic oligonucleotide
cuuugaggaaccgccguuc

SEQ ID NO: 362240 - RNA, 19 nt, Artificial Sequence
  Description of Artificial Sequence: Synthetic oligonucleotide
uuccguacuuuucguuuuc

SEQ ID NO: 362241 - RNA, 19 nt, Artificial Sequence
  Description of Artificial Sequence: Synthetic oligonucleotide
guaggugugaugcccucga

SEQ ID NO: 362242 - RNA, 19 nt, Artificial Sequence
  Description of Artificial Sequence: Synthetic oligonucleotide
guugcgacuugagaaagaa

SEQ ID NO: 362243 - RNA, 19 nt, Artificial Sequence
  Description of Artificial Sequence: Synthetic oligonucleotide
aaccuugauugcuccuaau

SEQ ID NO: 362244 - RNA, 19 nt, Artificial Sequence
  Description of Artificial Sequence: Synthetic oligonucleotide
agcaguucgaaaacauuaa

SEQ ID NO: 362245 - RNA, 19 nt, Artificial Sequence
  Description of Artificial Sequence: Synthetic oligonucleotide
uccguacuuuucguuuucc

SEQ ID NO: 362246 - RNA, 19 nt, Artificial Sequence
  Description of Artificial Sequence: Synthetic oligonucleotide
ucuugucguugguugcgac

SEQ ID NO: 362247 - RNA, 19 nt, Artificial Sequence
  Description of Artificial Sequence: Synthetic oligonucleotide
ugacccuugcuuguucaac

SEQ ID NO: 362248 - RNA, 19 nt, Artificial Sequence
  Description of Artificial Sequence: Synthetic oligonucleotide
uuggucggacgcaguaggu

SEQ ID NO: 362249 - RNA, 19 nt, Artificial Sequence
  Description of Artificial Sequence: Synthetic oligonucleotide
cugagugcuuaauauuaaa

SEQ ID NO: 362250 - RNA, 19 nt, Artificial Sequence
  Description of Artificial Sequence: Synthetic oligonucleotide
uggucggacgcaguaggug

SEQ ID NO: 362251 - RNA, 19 nt, Artificial Sequence
  Description of Artificial Sequence: Synthetic oligonucleotide
aaggagcagaucugaucuu

SEQ ID NO: 362252 - RNA, 19 nt, Artificial Sequence
  Description of Artificial Sequence: Synthetic oligonucleotide
caucaucgacuucauuguc

SEQ ID NO: 362253 - RNA, 19 nt, Artificial Sequence
  Description of Artificial Sequence: Synthetic oligonucleotide
caaaacuagacccgugacu

SEQ ID NO: 362254 - RNA, 19 nt, Artificial Sequence
  Description of Artificial Sequence: Synthetic oligonucleotide
ugucguugguugcgacuug

SEQ ID NO: 362255 - RNA, 19 nt, Artificial Sequence
  Description of Artificial Sequence: Synthetic oligonucleotide
acuguggcgaguggaacga

SEQ ID NO: 362256 - RNA, 19 nt, Artificial Sequence
  Description of Artificial Sequence: Synthetic oligonucleotide
ucauaucguccauucucua

SEQ ID NO: 362257 - RNA, 19 nt, Artificial Sequence
  Description of Artificial Sequence: Synthetic oligonucleotide
cacacguucuccaaacugu

SEQ ID NO: 362258 - RNA, 19 nt, Artificial Sequence
  Description of Artificial Sequence: Synthetic oligonucleotide
caagcuuuugagcuugaua

SEQ ID NO: 362259 - RNA, 19 nt, Artificial Sequence
  Description of Artificial Sequence: Synthetic oligonucleotide
ugcagcgugcguucaguau

SEQ ID NO: 362260 - RNA, 19 nt, Artificial Sequence
  Description of Artificial Sequence: Synthetic oligonucleotide
gagcuaagucucccucuug

SEQ ID NO: 362261 - RNA, 19 nt, Artificial Sequence
  Description of Artificial Sequence: Synthetic oligonucleotide
ccagcuaucaucaugccgu

SEQ ID NO: 362262 - RNA, 19 nt, Artificial Sequence
  Description of Artificial Sequence: Synthetic oligonucleotide
uaucagcgcucuuccguac

SEQ ID NO: 362263 - RNA, 19 nt, Artificial Sequence
  Description of Artificial Sequence: Synthetic oligonucleotide
gaaccgccguucaaugccc

SEQ ID NO: 362264 - RNA, 19 nt, Artificial Sequence
  Description of Artificial Sequence: Synthetic oligonucleotide
gacccuugcuuguucaacu

SEQ ID NO: 362265 - RNA, 19 nt, Artificial Sequence
  Description of Artificial Sequence: Synthetic oligonucleotide
cacugcgauccaaaguuga

SEQ ID NO: 362266 - RNA, 19 nt, Artificial Sequence
  Description of Artificial Sequence: Synthetic oligonucleotide
cacuacuggaugagacaug

SEQ ID NO: 362267 - RNA, 19 nt, Artificial Sequence
  Description of Artificial Sequence: Synthetic oligonucleotide
ugaacgccuccuugucggc

SEQ ID NO: 362268 - RNA, 19 nt, Artificial Sequence
  Description of Artificial Sequence: Synthetic oligonucleotide
gccggaacuucuucgauuc

SEQ ID NO: 362269 - RNA, 19 nt, Artificial Sequence
  Description of Artificial Sequence: Synthetic oligonucleotide
agcuaucaucaugccguac

SEQ ID NO: 362270 - RNA, 19 nt, Artificial Sequence
  Description of Artificial Sequence: Synthetic oligonucleotide
ggaacguugcuuuggucga

SEQ ID NO: 362271 - RNA, 19 nt, Artificial Sequence
  Description of Artificial Sequence: Synthetic oligonucleotide
gcguucaguauagauuuag

SEQ ID NO: 362272 - RNA, 19 nt, Artificial Sequence
  Description of Artificial Sequence: Synthetic oligonucleotide
ugcugacuccuugaagggu

SEQ ID NO: 362273 - RNA, 19 nt, Artificial Sequence
  Description of Artificial Sequence: Synthetic oligonucleotide
accugaacacaugaaugau

SEQ ID NO: 362274 - RNA, 19 nt, Artificial Sequence
  Description of Artificial Sequence: Synthetic oligonucleotide
cucucacuaugacccuugc

SEQ ID NO: 362275 - RNA, 19 nt, Artificial Sequence
  Description of Artificial Sequence: Synthetic oligonucleotide
aacgguccaggacgguuuu

SEQ ID NO: 362276 - RNA, 19 nt, Artificial Sequence
  Description of Artificial Sequence: Synthetic oligonucleotide
cuuggguauuaucagcgcu

SEQ ID NO: 362277 - RNA, 19 nt, Artificial Sequence
  Description of Artificial Sequence: Synthetic oligonucleotide
gcgacuugagaaagaagag

SEQ ID NO: 362278 - RNA, 19 nt, Artificial Sequence
  Description of Artificial Sequence: Synthetic oligonucleotide
uccuuaggcuccugccaga

SEQ ID NO: 362279 - RNA, 19 nt, Artificial Sequence
  Description of Artificial Sequence: Synthetic oligonucleotide
uuagugaagcugggacugu

SEQ ID NO: 362280 - RNA, 19 nt, Artificial Sequence
  Description of Artificial Sequence: Synthetic oligonucleotide
gucgacauucuggacaaaa

SEQ ID NO: 362281 - RNA, 19 nt, Artificial Sequence
  Description of Artificial Sequence: Synthetic oligonucleotide
guccacacuacuggaugag

SEQ ID NO: 362282 - RNA, 19 nt, Artificial Sequence
  Description of Artificial Sequence: Synthetic oligonucleotide
guuccgaggguuguacuca

SEQ ID NO: 362283 - RNA, 19 nt, Artificial Sequence
  Description of Artificial Sequence: Synthetic oligonucleotide
cuccuaaugucccuugaua

SEQ ID NO: 362284 - RNA, 19 nt, Artificial Sequence
  Description of Artificial Sequence: Synthetic oligonucleotide
ugugguagacgagcuguua

SEQ ID NO: 362285 - RNA, 19 nt, Artificial Sequence
  Description of Artificial Sequence: Synthetic oligonucleotide
  modified_base (10)..(10): a, c, u, g, unknown or other
aggccgaucnccagaucug

SEQ ID NO: 362286 - RNA, 19 nt, Artificial Sequence
  Description of Artificial Sequence: Synthetic oligonucleotide
agcaauucuuaaagagcga

SEQ ID NO: 362287 - RNA, 19 nt, Artificial Sequence
  Description of Artificial Sequence: Synthetic oligonucleotide
gcuaaccugguccacacua

SEQ ID NO: 362288 - RNA, 19 nt, Artificial Sequence
  Description of Artificial Sequence: Synthetic oligonucleotide
ugcagcgacuggcacgcua

SEQ ID NO: 362289 - RNA, 19 nt, Artificial Sequence
  Description of Artificial Sequence: Synthetic oligonucleotide
caggacgguuuuauaagaa

SEQ ID NO: 362290 - RNA, 19 nt, Artificial Sequence
  Description of Artificial Sequence: Synthetic oligonucleotide
ucgacuucauugucaccuu

SEQ ID NO: 362291 - RNA, 19 nt, Artificial Sequence
  Description of Artificial Sequence: Synthetic oligonucleotide
guacucaaagcaguucgaa

SEQ ID NO: 362292 - RNA, 19 nt, Artificial Sequence
  Description of Artificial Sequence: Synthetic oligonucleotide
caaggacggucucugccuc

SEQ ID NO: 362293 - RNA, 19 nt, Artificial Sequence
  Description of Artificial Sequence: Synthetic oligonucleotide
gaacguccgcugucacugc

SEQ ID NO: 362294 - RNA, 19 nt, Artificial Sequence
  Description of Artificial Sequence: Synthetic oligonucleotide
uuccgaggguuguacucaa

SEQ ID NO: 362295 - RNA, 19 nt, Artificial Sequence
  Description of Artificial Sequence: Synthetic oligonucleotide
gaacgacuagcaauucuua

SEQ ID NO: 362296 - RNA, 19 nt, Artificial Sequence
  Description of Artificial Sequence: Synthetic oligonucleotide
guguagauaaguccucuuu

SEQ ID NO: 362297 - RNA, 19 nt, Artificial Sequence
  Description of Artificial Sequence: Synthetic oligonucleotide
gaaccacacugcucacuga

SEQ ID NO: 362298 - RNA, 19 nt, Artificial Sequence
  Description of Artificial Sequence: Synthetic oligonucleotide
gccuaguuccagcuuuugc

SEQ ID NO: 362299 - RNA, 19 nt, Artificial Sequence
  Description of Artificial Sequence: Synthetic oligonucleotide
caggguagaaaacuggauu

SEQ ID NO: 362300 - RNA, 19 nt, Artificial Sequence
  Description of Artificial Sequence: Synthetic oligonucleotide
cuggaacguugcuuugguc

SEQ ID NO: 362301 - RNA, 19 nt, Artificial Sequence
  Description of Artificial Sequence: Synthetic oligonucleotide
cuuaggcuccugccagaug

SEQ ID NO: 362302 - RNA, 19 nt, Artificial Sequence
  Description of Artificial Sequence: Synthetic oligonucleotide
ggacuuuauccaaugcauc

SEQ ID NO: 362303 - RNA, 19 nt, Artificial Sequence
  Description of Artificial Sequence: Synthetic oligonucleotide
cacaucuugcagugugcca

SEQ ID NO: 362304 - RNA, 19 nt, Artificial Sequence
  Description of Artificial Sequence: Synthetic oligonucleotide
acuaugacccuugcuuguu

SEQ ID NO: 362305 - RNA, 19 nt, Artificial Sequence
  Description of Artificial Sequence: Synthetic oligonucleotide
ccguacuuuucguuuuccc

SEQ ID NO: 362306 - RNA, 19 nt, Artificial Sequence
  Description of Artificial Sequence: Synthetic oligonucleotide
guagucugggaccuggauu

SEQ ID NO: 362307 - RNA, 19 nt, Artificial Sequence
  Description of Artificial Sequence: Synthetic oligonucleotide
acacugcgauccaaaguug

SEQ ID NO: 362308 - RNA, 19 nt, Artificial Sequence
  Description of Artificial Sequence: Synthetic oligonucleotide
ggagcagaucugaucuucc

SEQ ID NO: 362309 - RNA, 19 nt, Artificial Sequence
  Description of Artificial Sequence: Synthetic oligonucleotide
cuguaaaccaggacuuuau

SEQ ID NO: 362310 - RNA, 19 nt, Artificial Sequence
  Description of Artificial Sequence: Synthetic oligonucleotide
cuuaggagaagcagugguu

SEQ ID NO: 362311 - RNA, 19 nt, Artificial Sequence
  Description of Artificial Sequence: Synthetic oligonucleotide
acggcacuaggaguuuucu

SEQ ID NO: 362312 - RNA, 19 nt, Artificial Sequence
  Description of Artificial Sequence: Synthetic oligonucleotide
gaacguugcuuuggucgac

SEQ ID NO: 362313 - RNA, 19 nt, Artificial Sequence
  Description of Artificial Sequence: Synthetic oligonucleotide
acugcgauccaaaguugau

SEQ ID NO: 362314 - RNA, 19 nt, Artificial Sequence
  Description of Artificial Sequence: Synthetic oligonucleotide
uaggugugaugcccucgau

SEQ ID NO: 362315 - RNA, 19 nt, Artificial Sequence
  Description of Artificial Sequence: Synthetic oligonucleotide
gacggcacuaggaguuuuc

SEQ ID NO: 362316 - RNA, 19 nt, Artificial Sequence
  Description of Artificial Sequence: Synthetic oligonucleotide
gaccuggauuuuagaaaca

SEQ ID NO: 362317 - RNA, 19 nt, Artificial Sequence
  Description of Artificial Sequence: Synthetic oligonucleotide
ggcacgcuaaccuggucca

SEQ ID NO: 362318 - RNA, 19 nt, Artificial Sequence
  Description of Artificial Sequence: Synthetic oligonucleotide
gacacacguucuccaaacu

SEQ ID NO: 362319 - RNA, 19 nt, Artificial Sequence
  Description of Artificial Sequence: Synthetic oligonucleotide
  modified_base (5)..(5): a, c, u, g, unknown or other
gaucnccagaucugucuau

SEQ ID NO: 362320 - RNA, 19 nt, Artificial Sequence
  Description of Artificial Sequence: Synthetic oligonucleotide
cuugucguugguugcgacu

SEQ ID NO: 362321 - RNA, 19 nt, Artificial Sequence
  Description of Artificial Sequence: Synthetic oligonucleotide
gcuguuaguugagacggca

SEQ ID NO: 362322 - RNA, 19 nt, Artificial Sequence
  Description of Artificial Sequence: Synthetic oligonucleotide
gugugaugcccucgaucac

SEQ ID NO: 362323 - RNA, 19 nt, Artificial Sequence
  Description of Artificial Sequence: Synthetic oligonucleotide
accgccguucaaugcccug

SEQ ID NO: 362324 - RNA, 19 nt, Artificial Sequence
  Description of Artificial Sequence: Synthetic oligonucleotide
acuuguggucuuccucguu

SEQ ID NO: 362325 - RNA, 19 nt, Artificial Sequence
  Description of Artificial Sequence: Synthetic oligonucleotide
ccuugauugcuccuaaugu

SEQ ID NO: 362326 - RNA, 19 nt, Artificial Sequence
  Description of Artificial Sequence: Synthetic oligonucleotide
agacgagcuguuauugcuu

SEQ ID NO: 362327 - RNA, 19 nt, Artificial Sequence
  Description of Artificial Sequence: Synthetic oligonucleotide
gcaaucuaacuuguggucu

SEQ ID NO: 362328 - RNA, 19 nt, Artificial Sequence
  Description of Artificial Sequence: Synthetic oligonucleotide
ggacaaaacuagacccgug

SEQ ID NO: 362329 - RNA, 19 nt, Artificial Sequence
  Description of Artificial Sequence: Synthetic oligonucleotide
gcagcgugcguucaguaua

SEQ ID NO: 362330 - RNA, 19 nt, Artificial Sequence
  Description of Artificial Sequence: Synthetic oligonucleotide
gcgaguuucuguagaagga

SEQ ID NO: 362331 - RNA, 19 nt, Artificial Sequence
  Description of Artificial Sequence: Synthetic oligonucleotide
aagccuaguuccagcuuuu

SEQ ID NO: 362332 - RNA, 19 nt, Artificial Sequence
  Description of Artificial Sequence: Synthetic oligonucleotide
gcgacuggcacgcuaaccu

SEQ ID NO: 362333 - RNA, 19 nt, Artificial Sequence
  Description of Artificial Sequence: Synthetic oligonucleotide
acuggcacgcuaaccuggu

SEQ ID NO: 362334 - RNA, 19 nt, Artificial Sequence
  Description of Artificial Sequence: Synthetic oligonucleotide
gucguugguugcgacuuga

SEQ ID NO: 362335 - RNA, 19 nt, Artificial Sequence
  Description of Artificial Sequence: Synthetic oligonucleotide
ggacgcaguaggugugaug

SEQ ID NO: 362336 - RNA, 19 nt, Artificial Sequence
  Description of Artificial Sequence: Synthetic oligonucleotide
cgauucagugguacaggag

SEQ ID NO: 362337 - RNA, 19 nt, Artificial Sequence
  Description of Artificial Sequence: Synthetic oligonucleotide
ggucggacgcaguaggugu

SEQ ID NO: 362338 - RNA, 19 nt, Artificial Sequence
  Description of Artificial Sequence: Synthetic oligonucleotide
ccaggacgguuuuauaaga

SEQ ID NO: 362339 - RNA, 19 nt, Artificial Sequence
  Description of Artificial Sequence: Synthetic oligonucleotide
cucguuugggugggcugag

SEQ ID NO: 362340 - RNA, 19 nt, Artificial Sequence
  Description of Artificial Sequence: Synthetic oligonucleotide
agccuaguuccagcuuuug

SEQ ID NO: 362341 - RNA, 19 nt, Artificial Sequence
  Description of Artificial Sequence: Synthetic oligonucleotide
caaucuaacuuguggucuu

SEQ ID NO: 362342 - RNA, 19 nt, Artificial Sequence
  Description of Artificial Sequence: Synthetic oligonucleotide
cacuaugacccuugcuugu

SEQ ID NO: 362343 - RNA, 19 nt, Artificial Sequence
  Description of Artificial Sequence: Synthetic oligonucleotide
cuugucggccggaacuucu

SEQ ID NO: 362344 - RNA, 19 nt, Artificial Sequence
  Description of Artificial Sequence: Synthetic oligonucleotide
ggaacgacuagcaauucuu

SEQ ID NO: 362345 - RNA, 19 nt, Artificial Sequence
  Description of Artificial Sequence: Synthetic oligonucleotide
aggacggucucugccucga

SEQ ID NO: 362346 - RNA, 19 nt, Artificial Sequence
  Description of Artificial Sequence: Synthetic oligonucleotide
gaaagacuugggacagacu

SEQ ID NO: 362347 - RNA, 19 nt, Artificial Sequence
  Description of Artificial Sequence: Synthetic oligonucleotide
aggugucaacuguccacuu

SEQ ID NO: 362348 - RNA, 19 nt, Artificial Sequence
  Description of Artificial Sequence: Synthetic oligonucleotide
cuaucugaaacagggccau

SEQ ID NO: 362349 - RNA, 19 nt, Artificial Sequence
  Description of Artificial Sequence: Synthetic oligonucleotide
gcgaguggaacgacuagca

SEQ ID NO: 362350 - RNA, 19 nt, Artificial Sequence
  Description of Artificial Sequence: Synthetic oligonucleotide
cugcgauccaaaguugaua

SEQ ID NO: 362351 - RNA, 19 nt, Artificial Sequence
  Description of Artificial Sequence: Synthetic oligonucleotide
cggaacuucuucgauucag

SEQ ID NO: 362352 - RNA, 19 nt, Artificial Sequence
  Description of Artificial Sequence: Synthetic oligonucleotide
aaccgccguucaaugcccu

SEQ ID NO: 362353 - RNA, 19 nt, Artificial Sequence
  Description of Artificial Sequence: Synthetic oligonucleotide
guggcgaguggaacgacua

SEQ ID NO: 362354 - RNA, 19 nt, Artificial Sequence
  Description of Artificial Sequence: Synthetic oligonucleotide
gucuugucguugguugcga

SEQ ID NO: 362355 - RNA, 19 nt, Artificial Sequence
  Description of Artificial Sequence: Synthetic oligonucleotide
ggcaguguuuaaagguguc

SEQ ID NO: 362356 - RNA, 19 nt, Artificial Sequence
  Description of Artificial Sequence: Synthetic oligonucleotide
ccaagauaccugaacacau

SEQ ID NO: 362357 - RNA, 19 nt, Artificial Sequence
  Description of Artificial Sequence: Synthetic oligonucleotide
cccugcucuaucugaaaca

SEQ ID NO: 362358 - RNA, 19 nt, Artificial Sequence
  Description of Artificial Sequence: Synthetic oligonucleotide
guggaacgacuagcaauuc

SEQ ID NO: 362359 - RNA, 19 nt, Artificial Sequence
  Description of Artificial Sequence: Synthetic oligonucleotide
gcugacuccuugaagggua

SEQ ID NO: 362360 - RNA, 19 nt, Artificial Sequence
  Description of Artificial Sequence: Synthetic oligonucleotide
gaaagucuccuggaacguu

SEQ ID NO: 362361 - RNA, 19 nt, Artificial Sequence
  Description of Artificial Sequence: Synthetic oligonucleotide
gaaaccccuuuccuacauu

SEQ ID NO: 362362 - RNA, 19 nt, Artificial Sequence
  Description of Artificial Sequence: Synthetic oligonucleotide
cguucaguauagauuuaga

SEQ ID NO: 362363 - RNA, 19 nt, Artificial Sequence
  Description of Artificial Sequence: Synthetic oligonucleotide
  modified_base (7)..(7): a, c, u, g, unknown or other
ccgaucnccagaucugucu

SEQ ID NO: 362364 - RNA, 19 nt, Artificial Sequence
  Description of Artificial Sequence: Synthetic oligonucleotide
ggccagcuaucaucaugcc

SEQ ID NO: 362365 - RNA, 19 nt, Artificial Sequence
  Description of Artificial Sequence: Synthetic oligonucleotide
ggaacuucuucgauucagu

SEQ ID NO: 362366 - RNA, 19 nt, Artificial Sequence
  Description of Artificial Sequence: Synthetic oligonucleotide
gguagaaaacuggauucau

SEQ ID NO: 362367 - RNA, 19 nt, Artificial Sequence
  Description of Artificial Sequence: Synthetic oligonucleotide
gcacuaggaguuuucuggu

SEQ ID NO: 362368 - RNA, 19 nt, Artificial Sequence
  Description of Artificial Sequence: Synthetic oligonucleotide
cuggcacgcuaaccugguc

SEQ ID NO: 362369 - RNA, 19 nt, Artificial Sequence
  Description of Artificial Sequence: Synthetic oligonucleotide
uccaacgguccaggacggu

SEQ ID NO: 362370 - RNA, 19 nt, Artificial Sequence
  Description of Artificial Sequence: Synthetic oligonucleotide
ccuugauagauccugucuu

SEQ ID NO: 362371 - RNA, 19 nt, Artificial Sequence
  Description of Artificial Sequence: Synthetic oligonucleotide
cagcgacuggcacgcuaac

SEQ ID NO: 362372 - RNA, 19 nt, Artificial Sequence
  Description of Artificial Sequence: Synthetic oligonucleotide
ucucugccucgaggaaagu

SEQ ID NO: 362373 - RNA, 19 nt, Artificial Sequence
  Description of Artificial Sequence: Synthetic oligonucleotide
acguccgcugucacugcca

SEQ ID NO: 362374 - RNA, 19 nt, Artificial Sequence
  Description of Artificial Sequence: Synthetic oligonucleotide
gguugcgacuugagaaaga

SEQ ID NO: 362375 - RNA, 19 nt, Artificial Sequence
  Description of Artificial Sequence: Synthetic oligonucleotide
cuucuucgauucaguggua

SEQ ID NO: 362376 - RNA, 19 nt, Artificial Sequence
  Description of Artificial Sequence: Synthetic oligonucleotide
ccguaccaauuccacaaca

SEQ ID NO: 362377 - RNA, 19 nt, Artificial Sequence
  Description of Artificial Sequence: Synthetic oligonucleotide
uaacuccuacaaggucaau

SEQ ID NO: 362378 - RNA, 19 nt, Artificial Sequence
  Description of Artificial Sequence: Synthetic oligonucleotide
gugguguacugcuguuagu

SEQ ID NO: 362379 - RNA, 19 nt, Artificial Sequence
  Description of Artificial Sequence: Synthetic oligonucleotide
gucuaucuguaaccuugau

SEQ ID NO: 362380 - RNA, 19 nt, Artificial Sequence
  Description of Artificial Sequence: Synthetic oligonucleotide
cuugcagcgugcguucagu

SEQ ID NO: 362381 - RNA, 19 nt, Artificial Sequence
  Description of Artificial Sequence: Synthetic oligonucleotide
caacgguccaggacgguuu

SEQ ID NO: 362382 - RNA, 19 nt, Artificial Sequence
  Description of Artificial Sequence: Synthetic oligonucleotide
agacggcacuaggaguuuu

SEQ ID NO: 362383 - RNA, 19 nt, Artificial Sequence
  Description of Artificial Sequence: Synthetic oligonucleotide
cuguggcgaguggaacgac

SEQ ID NO: 362384 - RNA, 19 nt, Artificial Sequence
  Description of Artificial Sequence: Synthetic oligonucleotide
cagcuaucaucaugccgua

SEQ ID NO: 362385 - RNA, 19 nt, Artificial Sequence
  Description of Artificial Sequence: Synthetic oligonucleotide
cugugguguacugcuguua

SEQ ID NO: 362386 - RNA, 19 nt, Artificial Sequence
  Description of Artificial Sequence: Synthetic oligonucleotide
uuaaggcaaugggcuucuu

SEQ ID NO: 362387 - RNA, 19 nt, Artificial Sequence
  Description of Artificial Sequence: Synthetic oligonucleotide
ggacaaaaccaaucuccuu

SEQ ID NO: 362388 - RNA, 19 nt, Artificial Sequence
  Description of Artificial Sequence: Synthetic oligonucleotide
gcgauccaaaguugauaaa

SEQ ID NO: 362389 - RNA, 19 nt, Artificial Sequence
  Description of Artificial Sequence: Synthetic oligonucleotide
cuuccucguuugggugggc

SEQ ID NO: 362390 - RNA, 19 nt, Artificial Sequence
  Description of Artificial Sequence: Synthetic oligonucleotide
gucccuugauagauccugu

SEQ ID NO: 362391 - RNA, 19 nt, Artificial Sequence
  Description of Artificial Sequence: Synthetic oligonucleotide
gcagcgacuggcacgcuaa

SEQ ID NO: 362392 - RNA, 19 nt, Artificial Sequence
  Description of Artificial Sequence: Synthetic oligonucleotide
ccaaggacggucucugccu

SEQ ID NO: 362393 - RNA, 19 nt, Artificial Sequence
  Description of Artificial Sequence: Synthetic oligonucleotide
agcgugcguucaguauaga

SEQ ID NO: 362394 - RNA, 19 nt, Artificial Sequence
  Description of Artificial Sequence: Synthetic oligonucleotide
cgugcguucaguauagauu

SEQ ID NO: 362395 - RNA, 19 nt, Artificial Sequence
  Description of Artificial Sequence: Synthetic oligonucleotide
cugacuccuugaaggguau

SEQ ID NO: 362396 - RNA, 19 nt, Artificial Sequence
  Description of Artificial Sequence: Synthetic oligonucleotide
cacuaggaguuuucugguu

SEQ ID NO: 362397 - RNA, 19 nt, Artificial Sequence
  Description of Artificial Sequence: Synthetic oligonucleotide
ggacggucucugccucgag

SEQ ID NO: 362398 - RNA, 19 nt, Artificial Sequence
  Description of Artificial Sequence: Synthetic oligonucleotide
gucugggaccuggauuuua

SEQ ID NO: 362399 - RNA, 19 nt, Artificial Sequence
  Description of Artificial Sequence: Synthetic oligonucleotide
gcuccuaaugucccuugau

SEQ ID NO: 362400 - RNA, 19 nt, Artificial Sequence
  Description of Artificial Sequence: Synthetic oligonucleotide
cagaucuugcagcgugcgu

SEQ ID NO: 362401 - RNA, 19 nt, Artificial Sequence
  Description of Artificial Sequence: Synthetic oligonucleotide
gcgugcguucaguauagau

SEQ ID NO: 362402 - RNA, 19 nt, Artificial Sequence
  Description of Artificial Sequence: Synthetic oligonucleotide
gcuuugaggaaccgccguu

SEQ ID NO: 362403 - RNA, 19 nt, Artificial Sequence
  Description of Artificial Sequence: Synthetic oligonucleotide
ccuggaacguugcuuuggu

SEQ ID NO: 362404 - RNA, 19 nt, Artificial Sequence
  Description of Artificial Sequence: Synthetic oligonucleotide
  modified_base (8)..(8): a, c, u, g, unknown or other
gccgaucnccagaucuguc

SEQ ID NO: 362405 - RNA, 19 nt, Artificial Sequence
  Description of Artificial Sequence: Synthetic oligonucleotide
  modified_base (6)..(6): a, c, u, g, unknown or other
cgaucnccagaucugucua

SEQ ID NO: 362406 - RNA, 19 nt, Artificial Sequence
  Description of Artificial Sequence: Synthetic oligonucleotide
  modified_base (9)..(9): a, c, u, g, unknown or other
ggccgaucnccagaucugu

SEQ ID NO: 362407 - RNA, 19 nt, Artificial Sequence
  Description of Artificial Sequence: Synthetic oligonucleotide
gagacggcacuaggaguuu

SEQ ID NO: 362408 - RNA, 19 nt, Artificial Sequence
  Description of Artificial Sequence: Synthetic oligonucleotide
gcgcucuuccguacuuuuc

SEQ ID NO: 362409 - RNA, 19 nt, Artificial Sequence
  Description of Artificial Sequence: Synthetic oligonucleotide
ccuugucggccggaacuuc

SEQ ID NO: 362410 - RNA, 19 nt, Artificial Sequence
  Description of Artificial Sequence: Synthetic oligonucleotide
acgguccaggacgguuuua

SEQ ID NO: 362411 - RNA, 19 nt, Artificial Sequence
  Description of Artificial Sequence: Synthetic oligonucleotide
cgaguggaacgacuagcaa

SEQ ID NO: 362412 - RNA, 19 nt, Artificial Sequence
  Description of Artificial Sequence: Synthetic oligonucleotide
ccggaggacuaagcaguuc

SEQ ID NO: 362413 - RNA, 19 nt, Artificial Sequence
  Description of Artificial Sequence: Synthetic oligonucleotide
ggguaucuuccauggucuu

SEQ ID NO: 362414 - RNA, 19 nt, Artificial Sequence
  Description of Artificial Sequence: Synthetic oligonucleotide
ccggaacuucuucgauuca

SEQ ID NO: 362415 - RNA, 19 nt, Artificial Sequence
  Description of Artificial Sequence: Synthetic oligonucleotide
ggguauuaucagcgcucuu

SEQ ID NO: 362416 - RNA, 19 nt, Artificial Sequence
  Description of Artificial Sequence: Synthetic oligonucleotide
ggucgacauucuggacaaa

SEQ ID NO: 362417 - RNA, 19 nt, Artificial Sequence
  Description of Artificial Sequence: Synthetic oligonucleotide
ccaacgguccaggacgguu

SEQ ID NO: 362418 - RNA, 19 nt, Artificial Sequence
  Description of Artificial Sequence: Synthetic oligonucleotide
ccuuaggcuccugccagau

SEQ ID NO: 362419 - RNA, 19 nt, Artificial Sequence
  Description of Artificial Sequence: Synthetic oligonucleotide
cguccgcugucacugccau

SEQ ID NO: 362420 - RNA, 19 nt, Artificial Sequence
  Description of Artificial Sequence: Synthetic oligonucleotide
cgcuaaccugguccacacu

SEQ ID NO: 362421 - RNA, 19 nt, Artificial Sequence
  Description of Artificial Sequence: Synthetic oligonucleotide
  modified_base (1)..(1): a, c, u, g, unknown or other
nccagaucugucuaucugu

SEQ ID NO: 362422 - RNA, 19 nt, Artificial Sequence
  Description of Artificial Sequence: Synthetic oligonucleotide
uauucaauaguuaagaaca

SEQ ID NO: 362423 - RNA, 19 nt, Artificial Sequence
  Description of Artificial Sequence: Synthetic oligonucleotide
aaagauauaaaccgcuagg

SEQ ID NO: 362424 - RNA, 19 nt, Artificial Sequence
  Description of Artificial Sequence: Synthetic oligonucleotide
ucaauaguuaagaacaucc

SEQ ID NO: 362425 - RNA, 19 nt, Artificial Sequence
  Description of Artificial Sequence: Synthetic oligonucleotide
aauaguuaagaacauccag

SEQ ID NO: 362426 - RNA, 19 nt, Artificial Sequence
  Description of Artificial Sequence: Synthetic oligonucleotide
aauagaacgagaggcagcc

SEQ ID NO: 362427 - RNA, 19 nt, Artificial Sequence
  Description of Artificial Sequence: Synthetic oligonucleotide
aaugcagacuuaaauaagc

SEQ ID NO: 362428 - RNA, 19 nt, Artificial Sequence
  Description of Artificial Sequence: Synthetic oligonucleotide
ugauaauagaacgagaggc

SEQ ID NO: 362429 - RNA, 19 nt, Artificial Sequence
  Description of Artificial Sequence: Synthetic oligonucleotide
aaugaaaacgcacacagua

SEQ ID NO: 362430 - RNA, 19 nt, Artificial Sequence
  Description of Artificial Sequence: Synthetic oligonucleotide
uuaacuggcaccaaaauua

SEQ ID NO: 362431 - RNA, 19 nt, Artificial Sequence
  Description of Artificial Sequence: Synthetic oligonucleotide
aaaccaucaauaccuaguc

SEQ ID NO: 362432 - RNA, 19 nt, Artificial Sequence
  Description of Artificial Sequence: Synthetic oligonucleotide
uuaagaacauccaguaucc

SEQ ID NO: 362433 - RNA, 19 nt, Artificial Sequence
  Description of Artificial Sequence: Synthetic oligonucleotide
aagauauaaaccgcuaggg

SEQ ID NO: 362434 - RNA, 19 nt, Artificial Sequence
  Description of Artificial Sequence: Synthetic oligonucleotide
uuugcauaggcucauaaaa

SEQ ID NO: 362435 - RNA, 19 nt, Artificial Sequence
  Description of Artificial Sequence: Synthetic oligonucleotide
auagacagaguccacguac

SEQ ID NO: 362436 - RNA, 19 nt, Artificial Sequence
  Description of Artificial Sequence: Synthetic oligonucleotide
uguacuucuaguaacaguu

SEQ ID NO: 362437 - RNA, 19 nt, Artificial Sequence
  Description of Artificial Sequence: Synthetic oligonucleotide
aaaaccaguagccuguacu

SEQ ID NO: 362438 - RNA, 19 nt, Artificial Sequence
  Description of Artificial Sequence: Synthetic oligonucleotide
gauggcauaaugaaaacgc

SEQ ID NO: 362439 - RNA, 19 nt, Artificial Sequence
  Description of Artificial Sequence: Synthetic oligonucleotide
guauaggccagucauaucc

SEQ ID NO: 362440 - RNA, 19 nt, Artificial Sequence
  Description of Artificial Sequence: Synthetic oligonucleotide
ucgauauacauguaguagc

SEQ ID NO: 362441 - RNA, 19 nt, Artificial Sequence
  Description of Artificial Sequence: Synthetic oligonucleotide
gaacgugugauccuguggg

SEQ ID NO: 362442 - RNA, 19 nt, Artificial Sequence
  Description of Artificial Sequence: Synthetic oligonucleotide
acucaauuucauuuaaguc

SEQ ID NO: 362443 - RNA, 19 nt, Artificial Sequence
  Description of Artificial Sequence: Synthetic oligonucleotide
ugagacguaaauuuagugu

SEQ ID NO: 362444 - RNA, 19 nt, Artificial Sequence
  Description of Artificial Sequence: Synthetic oligonucleotide
ugaaugcagacuuaaauaa

SEQ ID NO: 362445 - RNA, 19 nt, Artificial Sequence
  Description of Artificial Sequence: Synthetic oligonucleotide
uccacguacauauaguggc

SEQ ID NO: 362446 - RNA, 19 nt, Artificial Sequence
  Description of Artificial Sequence: Synthetic oligonucleotide
aagugcacucuccaggugg

SEQ ID NO: 362447 - RNA, 19 nt, Artificial Sequence
  Description of Artificial Sequence: Synthetic oligonucleotide
uccuuaguagaccaaagca

SEQ ID NO: 362448 - RNA, 19 nt, Artificial Sequence
  Description of Artificial Sequence: Synthetic oligonucleotide
uguccgaccaccaugugag

SEQ ID NO: 362449 - RNA, 19 nt, Artificial Sequence
  Description of Artificial Sequence: Synthetic oligonucleotide
aguacugcauguuuccugg

SEQ ID NO: 362450 - RNA, 19 nt, Artificial Sequence
  Description of Artificial Sequence: Synthetic oligonucleotide
aauuaagaugaaauggucu

SEQ ID NO: 362451 - RNA, 19 nt, Artificial Sequence
  Description of Artificial Sequence: Synthetic oligonucleotide
aaccacaugguuuucuuca

SEQ ID NO: 362452 - RNA, 19 nt, Artificial Sequence
  Description of Artificial Sequence: Synthetic oligonucleotide
uucaacuuauucaauaguu

SEQ ID NO: 362453 - RNA, 19 nt, Artificial Sequence
  Description of Artificial Sequence: Synthetic oligonucleotide
auuaucugguguugcgucc

SEQ ID NO: 362454 - RNA, 19 nt, Artificial Sequence
  Description of Artificial Sequence: Synthetic oligonucleotide
ugacuuuaacauagcacgg

SEQ ID NO: 362455 - RNA, 19 nt, Artificial Sequence
  Description of Artificial Sequence: Synthetic oligonucleotide
ucacguugggauuccaucg

SEQ ID NO: 362456 - RNA, 19 nt, Artificial Sequence
  Description of Artificial Sequence: Synthetic oligonucleotide
aaaaccaucaauaccuagu

SEQ ID NO: 362457 - RNA, 19 nt, Artificial Sequence
  Description of Artificial Sequence: Synthetic oligonucleotide
ugcagcuguauucaacccg

SEQ ID NO: 362458 - RNA, 19 nt, Artificial Sequence
  Description of Artificial Sequence: Synthetic oligonucleotide
ucaucuugaucgaaagugc

SEQ ID NO: 362459 - RNA, 19 nt, Artificial Sequence
  Description of Artificial Sequence: Synthetic oligonucleotide
ugccugaaauuuaacauca

SEQ ID NO: 362460 - RNA, 19 nt, Artificial Sequence
  Description of Artificial Sequence: Synthetic oligonucleotide
auccagacuggcuaugagc

SEQ ID NO: 362461 - RNA, 19 nt, Artificial Sequence
  Description of Artificial Sequence: Synthetic oligonucleotide
aaggcaauuccauuccuca

SEQ ID NO: 362462 - RNA, 19 nt, Artificial Sequence
  Description of Artificial Sequence: Synthetic oligonucleotide
aaagguaagcccugaguca

SEQ ID NO: 362463 - RNA, 19 nt, Artificial Sequence
  Description of Artificial Sequence: Synthetic oligonucleotide
gauauuaccgacaccuugc

SEQ ID NO: 362464 - RNA, 19 nt, Artificial Sequence
  Description of Artificial Sequence: Synthetic oligonucleotide
caauacauucacugaaugc

SEQ ID NO: 362465 - RNA, 19 nt, Artificial Sequence
  Description of Artificial Sequence: Synthetic oligonucleotide
accgucuuuaucuugauaa

SEQ ID NO: 362466 - RNA, 19 nt, Artificial Sequence
  Description of Artificial Sequence: Synthetic oligonucleotide
uagaacgagaggcagccag

SEQ ID NO: 362467 - RNA, 19 nt, Artificial Sequence
  Description of Artificial Sequence: Synthetic oligonucleotide
auuaagaugaaauggucua

SEQ ID NO: 362468 - RNA, 19 nt, Artificial Sequence
  Description of Artificial Sequence: Synthetic oligonucleotide
ugugugauccccaauccga

SEQ ID NO: 362469 - RNA, 19 nt, Artificial Sequence
  Description of Artificial Sequence: Synthetic oligonucleotide
uguugugugauccccaauc

SEQ ID NO: 362470 - RNA, 19 nt, Artificial Sequence
  Description of Artificial Sequence: Synthetic oligonucleotide
uuugcagauauuaccgaca

SEQ ID NO: 362471 - RNA, 19 nt, Artificial Sequence
  Description of Artificial Sequence: Synthetic oligonucleotide
uguguaaaggcacauucau

SEQ ID NO: 362472 - RNA, 19 nt, Artificial Sequence
  Description of Artificial Sequence: Synthetic oligonucleotide
aagcccugagucaauauac

SEQ ID NO: 362473 - RNA, 19 nt, Artificial Sequence
  Description of Artificial Sequence: Synthetic oligonucleotide
aaucgaucaaaacuuucau

SEQ ID NO: 362474 - RNA, 19 nt, Artificial Sequence
  Description of Artificial Sequence: Synthetic oligonucleotide
caaagauauaaaccgcuag

SEQ ID NO: 362475 - RNA, 19 nt, Artificial Sequence
  Description of Artificial Sequence: Synthetic oligonucleotide
uuuuguccgaccaccaugu

SEQ ID NO: 362476 - RNA, 19 nt, Artificial Sequence
  Description of Artificial Sequence: Synthetic oligonucleotide
ugaacgugugauccugugg

SEQ ID NO: 362477 - RNA, 19 nt, Artificial Sequence
  Description of Artificial Sequence: Synthetic oligonucleotide
gucuauguaaaaccaguag

SEQ ID NO: 362478 - RNA, 19 nt, Artificial Sequence
  Description of Artificial Sequence: Synthetic oligonucleotide
aauggucuauguaaaacca

SEQ ID NO: 362479 - RNA, 19 nt, Artificial Sequence
  Description of Artificial Sequence: Synthetic oligonucleotide
agaguccacguacauauag

SEQ ID NO: 362480 - RNA, 19 nt, Artificial Sequence
  Description of Artificial Sequence: Synthetic oligonucleotide
cugauaauagaacgagagg

SEQ ID NO: 362481 - RNA, 19 nt, Artificial Sequence
  Description of Artificial Sequence: Synthetic oligonucleotide
caucgguucacaaagccac

SEQ ID NO: 362482 - RNA, 19 nt, Artificial Sequence
  Description of Artificial Sequence: Synthetic oligonucleotide
auguaaaaccaguagccug

SEQ ID NO: 362483 - RNA, 19 nt, Artificial Sequence
  Description of Artificial Sequence: Synthetic oligonucleotide
ucaacuuauucaauaguua

SEQ ID NO: 362484 - RNA, 19 nt, Artificial Sequence
  Description of Artificial Sequence: Synthetic oligonucleotide
uuuugcagauauuaccgac

SEQ ID NO: 362485 - RNA, 19 nt, Artificial Sequence
  Description of Artificial Sequence: Synthetic oligonucleotide
uugagacguaaauuuagug

SEQ ID NO: 362486 - RNA, 19 nt, Artificial Sequence
  Description of Artificial Sequence: Synthetic oligonucleotide
auuaccgacaccuugcauu

SEQ ID NO: 362487 - RNA, 19 nt, Artificial Sequence
  Description of Artificial Sequence: Synthetic oligonucleotide
uccccaauccgauacaugu

SEQ ID NO: 362488 - RNA, 19 nt, Artificial Sequence
  Description of Artificial Sequence: Synthetic oligonucleotide
uugugugauccccaauccg

SEQ ID NO: 362489 - RNA, 19 nt, Artificial Sequence
  Description of Artificial Sequence: Synthetic oligonucleotide
auaguuaagaacauccagu

SEQ ID NO: 362490 - RNA, 19 nt, Artificial Sequence
  Description of Artificial Sequence: Synthetic oligonucleotide
ucacguggggaaaugagcu

SEQ ID NO: 362491 - RNA, 19 nt, Artificial Sequence
  Description of Artificial Sequence: Synthetic oligonucleotide
auaauagaacgagaggcag

SEQ ID NO: 362492 - RNA, 19 nt, Artificial Sequence
  Description of Artificial Sequence: Synthetic oligonucleotide
uacuucuaguaacaguugu

SEQ ID NO: 362493 - RNA, 19 nt, Artificial Sequence
  Description of Artificial Sequence: Synthetic oligonucleotide
uggcauaaugaaaacgcac

SEQ ID NO: 362494 - RNA, 19 nt, Artificial Sequence
  Description of Artificial Sequence: Synthetic oligonucleotide
cacaugguuuucuucaaag

SEQ ID NO: 362495 - RNA, 19 nt, Artificial Sequence
  Description of Artificial Sequence: Synthetic oligonucleotide
ugucuacuuaauccaaugu

SEQ ID NO: 362496 - RNA, 19 nt, Artificial Sequence
  Description of Artificial Sequence: Synthetic oligonucleotide
auuuccagaguaauguguc

SEQ ID NO: 362497 - RNA, 19 nt, Artificial Sequence
  Description of Artificial Sequence: Synthetic oligonucleotide
uacuuaauccaauguauau

SEQ ID NO: 362498 - RNA, 19 nt, Artificial Sequence
  Description of Artificial Sequence: Synthetic oligonucleotide
accaucaauaccuagucuu

SEQ ID NO: 362499 - RNA, 19 nt, Artificial Sequence
  Description of Artificial Sequence: Synthetic oligonucleotide
ugcagacuuaaauaagcac

SEQ ID NO: 362500 - RNA, 19 nt, Artificial Sequence
  Description of Artificial Sequence: Synthetic oligonucleotide
agauggcauaaugaaaacg

SEQ ID NO: 362501 - RNA, 19 nt, Artificial Sequence
  Description of Artificial Sequence: Synthetic oligonucleotide
agugugaucucccuugggu

SEQ ID NO: 362502 - RNA, 19 nt, Artificial Sequence
  Description of Artificial Sequence: Synthetic oligonucleotide
cucgauauacauguaguag

SEQ ID NO: 362503 - RNA, 19 nt, Artificial Sequence
  Description of Artificial Sequence: Synthetic oligonucleotide
ugcuccauacaugugguag

SEQ ID NO: 362504 - RNA, 19 nt, Artificial Sequence
  Description of Artificial Sequence: Synthetic oligonucleotide
gauaauagaacgagaggca

SEQ ID NO: 362505 - RNA, 19 nt, Artificial Sequence
  Description of Artificial Sequence: Synthetic oligonucleotide
cauucaucuugauuaugcc

SEQ ID NO: 362506 - RNA, 19 nt, Artificial Sequence
  Description of Artificial Sequence: Synthetic oligonucleotide
cauaucccgaguguaaagg

SEQ ID NO: 362507 - RNA, 19 nt, Artificial Sequence
  Description of Artificial Sequence: Synthetic oligonucleotide
cuacuuggccacuaaacug

SEQ ID NO: 362508 - RNA, 19 nt, Artificial Sequence
  Description of Artificial Sequence: Synthetic oligonucleotide
ucuugaucgaaagugcacu

SEQ ID NO: 362509 - RNA, 19 nt, Artificial Sequence
  Description of Artificial Sequence: Synthetic oligonucleotide
agcccugucugauuuuggc

SEQ ID NO: 362510 - RNA, 19 nt, Artificial Sequence
  Description of Artificial Sequence: Synthetic oligonucleotide
aaaccaguagccuguacuu

SEQ ID NO: 362511 - RNA, 19 nt, Artificial Sequence
  Description of Artificial Sequence: Synthetic oligonucleotide
acguaaauuuaguguuggc

SEQ ID NO: 362512 - RNA, 19 nt, Artificial Sequence
  Description of Artificial Sequence: Synthetic oligonucleotide
gcugauaauagaacgagag

SEQ ID NO: 362513 - RNA, 19 nt, Artificial Sequence
  Description of Artificial Sequence: Synthetic oligonucleotide
uauaggccagucauauccc

SEQ ID NO: 362514 - RNA, 19 nt, Artificial Sequence
  Description of Artificial Sequence: Synthetic oligonucleotide
uauugacccuccucgaaug

SEQ ID NO: 362515 - RNA, 19 nt, Artificial Sequence
  Description of Artificial Sequence: Synthetic oligonucleotide
guaaggagggaccguaaag

SEQ ID NO: 362516 - RNA, 19 nt, Artificial Sequence
  Description of Artificial Sequence: Synthetic oligonucleotide
uuucccaguuguaugguaa

SEQ ID NO: 362517 - RNA, 19 nt, Artificial Sequence
  Description of Artificial Sequence: Synthetic oligonucleotide
gagaccggcaguuucccag

SEQ ID NO: 362518 - RNA, 19 nt, Artificial Sequence
  Description of Artificial Sequence: Synthetic oligonucleotide
uuauugacccuccucgaau

SEQ ID NO: 362519 - RNA, 19 nt, Artificial Sequence
  Description of Artificial Sequence: Synthetic oligonucleotide
accguaaagccuuccaaug

SEQ ID NO: 362520 - RNA, 19 nt, Artificial Sequence
  Description of Artificial Sequence: Synthetic oligonucleotide
cauccaaacagcccucggg

SEQ ID NO: 362521 - RNA, 19 nt, Artificial Sequence
  Description of Artificial Sequence: Synthetic oligonucleotide
caaucgaucaaaacuuuca

SEQ ID NO: 362522 - RNA, 19 nt, Artificial Sequence
  Description of Artificial Sequence: Synthetic oligonucleotide
ugguagaccaggcgaaggc

SEQ ID NO: 362523 - RNA, 19 nt, Artificial Sequence
  Description of Artificial Sequence: Synthetic oligonucleotide
cauguaguagccuacccca

SEQ ID NO: 362524 - RNA, 19 nt, Artificial Sequence
  Description of Artificial Sequence: Synthetic oligonucleotide
cuguauucaacccgugccc

SEQ ID NO: 362525 - RNA, 19 nt, Artificial Sequence
  Description of Artificial Sequence: Synthetic oligonucleotide
uuaguagaccaaagcaauc

SEQ ID NO: 362526 - RNA, 19 nt, Artificial Sequence
  Description of Artificial Sequence: Synthetic oligonucleotide
auuuugcagauauuaccga

SEQ ID NO: 362527 - RNA, 19 nt, Artificial Sequence
  Description of Artificial Sequence: Synthetic oligonucleotide
uccucgaauggcuucaaaa

SEQ ID NO: 362528 - RNA, 19 nt, Artificial Sequence
  Description of Artificial Sequence: Synthetic oligonucleotide
agaguaaugugucaccaua

SEQ ID NO: 362529 - RNA, 19 nt, Artificial Sequence
  Description of Artificial Sequence: Synthetic oligonucleotide
guugugugauccccaaucc

SEQ ID NO: 362530 - RNA, 19 nt, Artificial Sequence
  Description of Artificial Sequence: Synthetic oligonucleotide
uaugugcacuuugaaauga

SEQ ID NO: 362531 - RNA, 19 nt, Artificial Sequence
  Description of Artificial Sequence: Synthetic oligonucleotide
uuaugcccuuuauaugugc

SEQ ID NO: 362532 - RNA, 19 nt, Artificial Sequence
  Description of Artificial Sequence: Synthetic oligonucleotide
auaggccagucauaucccg

SEQ ID NO: 362533 - RNA, 19 nt, Artificial Sequence
  Description of Artificial Sequence: Synthetic oligonucleotide
uccagaguaaugugucacc

SEQ ID NO: 362534 - RNA, 19 nt, Artificial Sequence
  Description of Artificial Sequence: Synthetic oligonucleotide
uguugcguccugcagcugu

SEQ ID NO: 362535 - RNA, 19 nt, Artificial Sequence
  Description of Artificial Sequence: Synthetic oligonucleotide
uagacagaguccacguaca

SEQ ID NO: 362536 - RNA, 19 nt, Artificial Sequence
  Description of Artificial Sequence: Synthetic oligonucleotide
uaccccaguagugugaucu

SEQ ID NO: 362537 - RNA, 19 nt, Artificial Sequence
  Description of Artificial Sequence: Synthetic oligonucleotide
cuccuuaguagaccaaagc

SEQ ID NO: 362538 - RNA, 19 nt, Artificial Sequence
  Description of Artificial Sequence: Synthetic oligonucleotide
uucacguugggauuccauc

SEQ ID NO: 362539 - RNA, 19 nt, Artificial Sequence
  Description of Artificial Sequence: Synthetic oligonucleotide
uucaauacaguagccggcu

SEQ ID NO: 362540 - RNA, 19 nt, Artificial Sequence
  Description of Artificial Sequence: Synthetic oligonucleotide
uuguccgaccaccauguga

SEQ ID NO: 362541 - RNA, 19 nt, Artificial Sequence
  Description of Artificial Sequence: Synthetic oligonucleotide
ucgaaagugcacucuccag

SEQ ID NO: 362542 - RNA, 19 nt, Artificial Sequence
  Description of Artificial Sequence: Synthetic oligonucleotide
ugcauguuuccugguaagg

SEQ ID NO: 362543 - RNA, 19 nt, Artificial Sequence
  Description of Artificial Sequence: Synthetic oligonucleotide
auacauguuggguuucacu

SEQ ID NO: 362544 - RNA, 19 nt, Artificial Sequence
  Description of Artificial Sequence: Synthetic oligonucleotide
gcuguauucaacccgugcc

SEQ ID NO: 362545 - RNA, 19 nt, Artificial Sequence
  Description of Artificial Sequence: Synthetic oligonucleotide
uaagcccugagucaauaua

SEQ ID NO: 362546 - RNA, 19 nt, Artificial Sequence
  Description of Artificial Sequence: Synthetic oligonucleotide
aaccgcuagggugucacuc

SEQ ID NO: 362547 - RNA, 19 nt, Artificial Sequence
  Description of Artificial Sequence: Synthetic oligonucleotide
ucuuauugacccuccucga

SEQ ID NO: 362548 - RNA, 19 nt, Artificial Sequence
  Description of Artificial Sequence: Synthetic oligonucleotide
uggguguucuucauaguuc

SEQ ID NO: 362549 - RNA, 19 nt, Artificial Sequence
  Description of Artificial Sequence: Synthetic oligonucleotide
aucaauaccuagucuucca

SEQ ID NO: 362550 - RNA, 19 nt, Artificial Sequence
  Description of Artificial Sequence: Synthetic oligonucleotide
auauaguggcccugcucac

SEQ ID NO: 362551 - RNA, 19 nt, Artificial Sequence
  Description of Artificial Sequence: Synthetic oligonucleotide
aguaaugugucaccauaaa

SEQ ID NO: 362552 - RNA, 19 nt, Artificial Sequence
  Description of Artificial Sequence: Synthetic oligonucleotide
gagacguaaauuuaguguu

SEQ ID NO: 362553 - RNA, 19 nt, Artificial Sequence
  Description of Artificial Sequence: Synthetic oligonucleotide
aacauagcacgguugcauu

SEQ ID NO: 362554 - RNA, 19 nt, Artificial Sequence
  Description of Artificial Sequence: Synthetic oligonucleotide
aucgaaagugcacucucca

SEQ ID NO: 362555 - RNA, 19 nt, Artificial Sequence
  Description of Artificial Sequence: Synthetic oligonucleotide
uguaguagccuaccccagu

SEQ ID NO: 362556 - RNA, 19 nt, Artificial Sequence
  Description of Artificial Sequence: Synthetic oligonucleotide
aaaucagagcucagcagca

SEQ ID NO: 362557 - RNA, 19 nt, Artificial Sequence
  Description of Artificial Sequence: Synthetic oligonucleotide
aacccgugcccguagccag

SEQ ID NO: 362558 - RNA, 19 nt, Artificial Sequence
  Description of Artificial Sequence: Synthetic oligonucleotide
uucaauaguuaagaacauc

SEQ ID NO: 362559 - RNA, 19 nt, Artificial Sequence
  Description of Artificial Sequence: Synthetic oligonucleotide
cucaaaucucaaguagagg

SEQ ID NO: 362560 - RNA, 19 nt, Artificial Sequence
  Description of Artificial Sequence: Synthetic oligonucleotide
aguagccuaccccaguagu

SEQ ID NO: 362561 - RNA, 19 nt, Artificial Sequence
  Description of Artificial Sequence: Synthetic oligonucleotide
ugauugaagagagguacaa

SEQ ID NO: 362562 - RNA, 19 nt, Artificial Sequence
  Description of Artificial Sequence: Synthetic oligonucleotide
uagccuguacuucuaguaa

SEQ ID NO: 362563 - RNA, 19 nt, Artificial Sequence
  Description of Artificial Sequence: Synthetic oligonucleotide
acucugguccaaccgggac

SEQ ID NO: 362564 - RNA, 19 nt, Artificial Sequence
  Description of Artificial Sequence: Synthetic oligonucleotide
ucuugauuaugcccuuuau

SEQ ID NO: 362565 - RNA, 19 nt, Artificial Sequence
  Description of Artificial Sequence: Synthetic oligonucleotide
guaaugugucaccauaaaa

SEQ ID NO: 362566 - RNA, 19 nt, Artificial Sequence
  Description of Artificial Sequence: Synthetic oligonucleotide
uuaagaugaaauggucuau

SEQ ID NO: 362567 - RNA, 19 nt, Artificial Sequence
  Description of Artificial Sequence: Synthetic oligonucleotide
uaguagccuaccccaguag

SEQ ID NO: 362568 - RNA, 19 nt, Artificial Sequence
  Description of Artificial Sequence: Synthetic oligonucleotide
gucuacuuaauccaaugua

SEQ ID NO: 362569 - RNA, 19 nt, Artificial Sequence
  Description of Artificial Sequence: Synthetic oligonucleotide
uuaccgacaccuugcauua

SEQ ID NO: 362570 - RNA, 19 nt, Artificial Sequence
  Description of Artificial Sequence: Synthetic oligonucleotide
aaccgggaccgucuuuauc

SEQ ID NO: 362571 - RNA, 19 nt, Artificial Sequence
  Description of Artificial Sequence: Synthetic oligonucleotide
ggguguucuucauaguucc

SEQ ID NO: 362572 - RNA, 19 nt, Artificial Sequence
  Description of Artificial Sequence: Synthetic oligonucleotide
uagugugaucucccuuggg

SEQ ID NO: 362573 - RNA, 19 nt, Artificial Sequence
  Description of Artificial Sequence: Synthetic oligonucleotide
cuugcauccaaacagcccu

SEQ ID NO: 362574 - RNA, 19 nt, Artificial Sequence
  Description of Artificial Sequence: Synthetic oligonucleotide
auggcuccuuaguagacca

SEQ ID NO: 362575 - RNA, 19 nt, Artificial Sequence
  Description of Artificial Sequence: Synthetic oligonucleotide
auauacaaucuuauuucca

SEQ ID NO: 362576 - RNA, 19 nt, Artificial Sequence
  Description of Artificial Sequence: Synthetic oligonucleotide
auauuaccgacaccuugca

SEQ ID NO: 362577 - RNA, 19 nt, Artificial Sequence
  Description of Artificial Sequence: Synthetic oligonucleotide
caucaauaccuagucuucc

SEQ ID NO: 362578 - RNA, 19 nt, Artificial Sequence
  Description of Artificial Sequence: Synthetic oligonucleotide
gauccagacuggcuaugag

SEQ ID NO: 362579 - RNA, 19 nt, Artificial Sequence
  Description of Artificial Sequence: Synthetic oligonucleotide
ucucaaguagagguucagc

SEQ ID NO: 362580 - RNA, 19 nt, Artificial Sequence
  Description of Artificial Sequence: Synthetic oligonucleotide
auaaccuccaugggguaag

SEQ ID NO: 362581 - RNA, 19 nt, Artificial Sequence
  Description of Artificial Sequence: Synthetic oligonucleotide
uggguguuucuccucuccc

SEQ ID NO: 362582 - RNA, 19 nt, Artificial Sequence
  Description of Artificial Sequence: Synthetic oligonucleotide
gguugagacguaaauuuag

SEQ ID NO: 362583 - RNA, 19 nt, Artificial Sequence
  Description of Artificial Sequence: Synthetic oligonucleotide
cuugaucgaaagugcacuc

SEQ ID NO: 362584 - RNA, 19 nt, Artificial Sequence
  Description of Artificial Sequence: Synthetic oligonucleotide
ucguauaggccagucauau

SEQ ID NO: 362585 - RNA, 19 nt, Artificial Sequence
  Description of Artificial Sequence: Synthetic oligonucleotide
uccgauacauguuggguuu

SEQ ID NO: 362586 - RNA, 19 nt, Artificial Sequence
  Description of Artificial Sequence: Synthetic oligonucleotide
aaaccaguucacguuggga

SEQ ID NO: 362587 - RNA, 19 nt, Artificial Sequence
  Description of Artificial Sequence: Synthetic oligonucleotide
auccgauacauguuggguu

SEQ ID NO: 362588 - RNA, 19 nt, Artificial Sequence
  Description of Artificial Sequence: Synthetic oligonucleotide
ugacccuccucgaauggcu

SEQ ID NO: 362589 - RNA, 19 nt, Artificial Sequence
  Description of Artificial Sequence: Synthetic oligonucleotide
uaaaccgcuagggugucac

SEQ ID NO: 362590 - RNA, 19 nt, Artificial Sequence
  Description of Artificial Sequence: Synthetic oligonucleotide
cacguugggauuccaucgg

SEQ ID NO: 362591 - RNA, 19 nt, Artificial Sequence
  Description of Artificial Sequence: Synthetic oligonucleotide
gcgguuaucugguagacca

SEQ ID NO: 362592 - RNA, 19 nt, Artificial Sequence
  Description of Artificial Sequence: Synthetic oligonucleotide
ugcagauauuaccgacacc

SEQ ID NO: 362593 - RNA, 19 nt, Artificial Sequence
  Description of Artificial Sequence: Synthetic oligonucleotide
aauaaccuccaugggguaa

SEQ ID NO: 362594 - RNA, 19 nt, Artificial Sequence
  Description of Artificial Sequence: Synthetic oligonucleotide
gaucgaaagugcacucucc

SEQ ID NO: 362595 - RNA, 19 nt, Artificial Sequence
  Description of Artificial Sequence: Synthetic oligonucleotide
ugucauuccccugcugaag

SEQ ID NO: 362596 - RNA, 19 nt, Artificial Sequence
  Description of Artificial Sequence: Synthetic oligonucleotide
aacgugugauccuguggga

SEQ ID NO: 362597 - RNA, 19 nt, Artificial Sequence
  Description of Artificial Sequence: Synthetic oligonucleotide
uguaagagguggguguuuc

SEQ ID NO: 362598 - RNA, 19 nt, Artificial Sequence
  Description of Artificial Sequence: Synthetic oligonucleotide
aguagccuguacuucuagu

SEQ ID NO: 362599 - RNA, 19 nt, Artificial Sequence
  Description of Artificial Sequence: Synthetic oligonucleotide
cuuaguagaccaaagcaau

SEQ ID NO: 362600 - RNA, 19 nt, Artificial Sequence
  Description of Artificial Sequence: Synthetic oligonucleotide
ccucaaaucucaaguagag

SEQ ID NO: 362601 - RNA, 19 nt, Artificial Sequence
  Description of Artificial Sequence: Synthetic oligonucleotide
aaauaaccuccauggggua

SEQ ID NO: 362602 - RNA, 19 nt, Artificial Sequence
  Description of Artificial Sequence: Synthetic oligonucleotide
ucaacccgugcccguagcc

SEQ ID NO: 362603 - RNA, 19 nt, Artificial Sequence
  Description of Artificial Sequence: Synthetic oligonucleotide
ucgguucacaaagccacag

SEQ ID NO: 362604 - RNA, 19 nt, Artificial Sequence
  Description of Artificial Sequence: Synthetic oligonucleotide
aaucucaaguagagguuca

SEQ ID NO: 362605 - RNA, 19 nt, Artificial Sequence
  Description of Artificial Sequence: Synthetic oligonucleotide
uccgaccaccaugugagag

SEQ ID NO: 362606 - RNA, 19 nt, Artificial Sequence
  Description of Artificial Sequence: Synthetic oligonucleotide
guacauauaguggcccugc

SEQ ID NO: 362607 - RNA, 19 nt, Artificial Sequence
  Description of Artificial Sequence: Synthetic oligonucleotide
uccucguauaggccaguca

SEQ ID NO: 362608 - RNA, 19 nt, Artificial Sequence
  Description of Artificial Sequence: Synthetic oligonucleotide
gcagauauuaccgacaccu

SEQ ID NO: 362609 - RNA, 19 nt, Artificial Sequence
  Description of Artificial Sequence: Synthetic oligonucleotide
cugucugauggcuccuuag

SEQ ID NO: 362610 - RNA, 19 nt, Artificial Sequence
  Description of Artificial Sequence: Synthetic oligonucleotide
cuugauuaugcccuuuaua

SEQ ID NO: 362611 - RNA, 19 nt, Artificial Sequence
  Description of Artificial Sequence: Synthetic oligonucleotide
uccugaacgugugauccug

SEQ ID NO: 362612 - RNA, 19 nt, Artificial Sequence
  Description of Artificial Sequence: Synthetic oligonucleotide
ugaugauuguugaguuguc

SEQ ID NO: 362613 - RNA, 19 nt, Artificial Sequence
  Description of Artificial Sequence: Synthetic oligonucleotide
uccuguugugugaucccca

SEQ ID NO: 362614 - RNA, 19 nt, Artificial Sequence
  Description of Artificial Sequence: Synthetic oligonucleotide
cacguacauauaguggccc

SEQ ID NO: 362615 - RNA, 19 nt, Artificial Sequence
  Description of Artificial Sequence: Synthetic oligonucleotide
gucacguggggaaaugagc

SEQ ID NO: 362616 - RNA, 19 nt, Artificial Sequence
  Description of Artificial Sequence: Synthetic oligonucleotide
ggggaaaugagcugggcca

SEQ ID NO: 362617 - RNA, 19 nt, Artificial Sequence
  Description of Artificial Sequence: Synthetic oligonucleotide
augugcacuuugaaaugac

SEQ ID NO: 362618 - RNA, 19 nt, Artificial Sequence
  Description of Artificial Sequence: Synthetic oligonucleotide
ggcgaaggcaauuccauuc

SEQ ID NO: 362619 - RNA, 19 nt, Artificial Sequence
  Description of Artificial Sequence: Synthetic oligonucleotide
acguacauauaguggcccu

SEQ ID NO: 362620 - RNA, 19 nt, Artificial Sequence
  Description of Artificial Sequence: Synthetic oligonucleotide
agacguaaauuuaguguug

SEQ ID NO: 362621 - RNA, 19 nt, Artificial Sequence
  Description of Artificial Sequence: Synthetic oligonucleotide
gugagaggccucgauauac

SEQ ID NO: 362622 - RNA, 19 nt, Artificial Sequence
  Description of Artificial Sequence: Synthetic oligonucleotide
auuaugcccuuuauaugug

SEQ ID NO: 362623 - RNA, 19 nt, Artificial Sequence
  Description of Artificial Sequence: Synthetic oligonucleotide
uauuaccgacaccuugcau

SEQ ID NO: 362624 - RNA, 19 nt, Artificial Sequence
  Description of Artificial Sequence: Synthetic oligonucleotide
aucuugauuaugcccuuua

SEQ ID NO: 362625 - RNA, 19 nt, Artificial Sequence
  Description of Artificial Sequence: Synthetic oligonucleotide
auucaacccgugcccguag

SEQ ID NO: 362626 - RNA, 19 nt, Artificial Sequence
  Description of Artificial Sequence: Synthetic oligonucleotide
uagccuaccccaguagugu

SEQ ID NO: 362627 - RNA, 19 nt, Artificial Sequence
  Description of Artificial Sequence: Synthetic oligonucleotide
cugcagcuguauucaaccc

SEQ ID NO: 362628 - RNA, 19 nt, Artificial Sequence
  Description of Artificial Sequence: Synthetic oligonucleotide
uucaacccgugcccguagc

SEQ ID NO: 362629 - RNA, 19 nt, Artificial Sequence
  Description of Artificial Sequence: Synthetic oligonucleotide
cugaacgugugauccugug

SEQ ID NO: 362630 - RNA, 19 nt, Artificial Sequence
  Description of Artificial Sequence: Synthetic oligonucleotide
auggcauaaugaaaacgca

SEQ ID NO: 362631 - RNA, 19 nt, Artificial Sequence
  Description of Artificial Sequence: Synthetic oligonucleotide
agcccucggggacucgagc

SEQ ID NO: 362632 - RNA, 19 nt, Artificial Sequence
  Description of Artificial Sequence: Synthetic oligonucleotide
guagccuaccccaguagug

SEQ ID NO: 362633 - RNA, 19 nt, Artificial Sequence
  Description of Artificial Sequence: Synthetic oligonucleotide
ucccgaguguaaagggaga

SEQ ID NO: 362634 - RNA, 19 nt, Artificial Sequence
  Description of Artificial Sequence: Synthetic oligonucleotide
ccauacaugugguagaaaa

SEQ ID NO: 362635 - RNA, 19 nt, Artificial Sequence
  Description of Artificial Sequence: Synthetic oligonucleotide
ccaauacauucacugaaug

SEQ ID NO: 362636 - RNA, 19 nt, Artificial Sequence
  Description of Artificial Sequence: Synthetic oligonucleotide
guacuucuaguaacaguug

SEQ ID NO: 362637 - RNA, 19 nt, Artificial Sequence
  Description of Artificial Sequence: Synthetic oligonucleotide
cugguagaccaggcgaagg

SEQ ID NO: 362638 - RNA, 19 nt, Artificial Sequence
  Description of Artificial Sequence: Synthetic oligonucleotide
acgugugauccugugggag

SEQ ID NO: 362639 - RNA, 19 nt, Artificial Sequence
  Description of Artificial Sequence: Synthetic oligonucleotide
caccaugugagaggccucg

SEQ ID NO: 362640 - RNA, 19 nt, Artificial Sequence
  Description of Artificial Sequence: Synthetic oligonucleotide
aaacagcccucggggacuc

SEQ ID NO: 362641 - RNA, 19 nt, Artificial Sequence
  Description of Artificial Sequence: Synthetic oligonucleotide
gaacgagaggcagccagac

SEQ ID NO: 362642 - RNA, 19 nt, Artificial Sequence
  Description of Artificial Sequence: Synthetic oligonucleotide
ugugagaggccucgauaua

SEQ ID NO: 362643 - RNA, 19 nt, Artificial Sequence
  Description of Artificial Sequence: Synthetic oligonucleotide
accgcuagggugucacuca

SEQ ID NO: 362644 - RNA, 19 nt, Artificial Sequence
  Description of Artificial Sequence: Synthetic oligonucleotide
aucucaaguagagguucag

SEQ ID NO: 362645 - RNA, 19 nt, Artificial Sequence
  Description of Artificial Sequence: Synthetic oligonucleotide
auucaauaguuaagaacau

SEQ ID NO: 362646 - RNA, 19 nt, Artificial Sequence
  Description of Artificial Sequence: Synthetic oligonucleotide
gggacucgagcacagacca

SEQ ID NO: 362647 - RNA, 19 nt, Artificial Sequence
  Description of Artificial Sequence: Synthetic oligonucleotide
guuguaugguaaugucauc

SEQ ID NO: 362648 - RNA, 19 nt, Artificial Sequence
  Description of Artificial Sequence: Synthetic oligonucleotide
uucccaguuguaugguaau

SEQ ID NO: 362649 - RNA, 19 nt, Artificial Sequence
  Description of Artificial Sequence: Synthetic oligonucleotide
acauagcacgguugcauuu

SEQ ID NO: 362650 - RNA, 19 nt, Artificial Sequence
  Description of Artificial Sequence: Synthetic oligonucleotide
ccuuaguagaccaaagcaa

SEQ ID NO: 362651 - RNA, 19 nt, Artificial Sequence
  Description of Artificial Sequence: Synthetic oligonucleotide
uuuguccgaccaccaugug

SEQ ID NO: 362652 - RNA, 19 nt, Artificial Sequence
  Description of Artificial Sequence: Synthetic oligonucleotide
aagcccugucugauuuugg

SEQ ID NO: 362653 - RNA, 19 nt, Artificial Sequence
  Description of Artificial Sequence: Synthetic oligonucleotide
uacagagcccaggggugcg

SEQ ID NO: 362654 - RNA, 19 nt, Artificial Sequence
  Description of Artificial Sequence: Synthetic oligonucleotide
gccacauagccuccuuugg

SEQ ID NO: 362655 - RNA, 19 nt, Artificial Sequence
  Description of Artificial Sequence: Synthetic oligonucleotide
cuuauugacccuccucgaa

SEQ ID NO: 362656 - RNA, 19 nt, Artificial Sequence
  Description of Artificial Sequence: Synthetic oligonucleotide
ugcgguuaucugguagacc

SEQ ID NO: 362657 - RNA, 19 nt, Artificial Sequence
  Description of Artificial Sequence: Synthetic oligonucleotide
guccacuuuccagaucucc

SEQ ID NO: 362658 - RNA, 19 nt, Artificial Sequence
  Description of Artificial Sequence: Synthetic oligonucleotide
gcgaaggcaauuccauucc

SEQ ID NO: 362659 - RNA, 19 nt, Artificial Sequence
  Description of Artificial Sequence: Synthetic oligonucleotide
aguggguguucuucauagu

SEQ ID NO: 362660 - RNA, 19 nt, Artificial Sequence
  Description of Artificial Sequence: Synthetic oligonucleotide
aaaccgcuagggugucacu

SEQ ID NO: 362661 - RNA, 19 nt, Artificial Sequence
  Description of Artificial Sequence: Synthetic oligonucleotide
accccaguagugugaucuc

SEQ ID NO: 362662 - RNA, 19 nt, Artificial Sequence
  Description of Artificial Sequence: Synthetic oligonucleotide
cuccuguugugugaucccc

SEQ ID NO: 362663 - RNA, 19 nt, Artificial Sequence
  Description of Artificial Sequence: Synthetic oligonucleotide
ggcaauaucacuucuuauu

SEQ ID NO: 362664 - RNA, 19 nt, Artificial Sequence
  Description of Artificial Sequence: Synthetic oligonucleotide
gacuuuaacauagcacggu

SEQ ID NO: 362665 - RNA, 19 nt, Artificial Sequence
  Description of Artificial Sequence: Synthetic oligonucleotide
gaccguaaagccuuccaau

SEQ ID NO: 362666 - RNA, 19 nt, Artificial Sequence
  Description of Artificial Sequence: Synthetic oligonucleotide
ugguaaggagggaccguaa

SEQ ID NO: 362667 - RNA, 19 nt, Artificial Sequence
  Description of Artificial Sequence: Synthetic oligonucleotide
agcugauaauagaacgaga

SEQ ID NO: 362668 - RNA, 19 nt, Artificial Sequence
  Description of Artificial Sequence: Synthetic oligonucleotide
accacaugguuuucuucaa

SEQ ID NO: 362669 - RNA, 19 nt, Artificial Sequence
  Description of Artificial Sequence: Synthetic oligonucleotide
cacguggggaaaugagcug

SEQ ID NO: 362670 - RNA, 19 nt, Artificial Sequence
  Description of Artificial Sequence: Synthetic oligonucleotide
uugcauccaaacagcccuc

SEQ ID NO: 362671 - RNA, 19 nt, Artificial Sequence
  Description of Artificial Sequence: Synthetic oligonucleotide
ccugagucaauauacauau

SEQ ID NO: 362672 - RNA, 19 nt, Artificial Sequence
  Description of Artificial Sequence: Synthetic oligonucleotide
agaggccucgauauacaug

SEQ ID NO: 362673 - RNA, 19 nt, Artificial Sequence
  Description of Artificial Sequence: Synthetic oligonucleotide
agccuaccccaguagugug

SEQ ID NO: 362674 - RNA, 19 nt, Artificial Sequence
  Description of Artificial Sequence: Synthetic oligonucleotide
aacgcacacaguacugcau

SEQ ID NO: 362675 - RNA, 19 nt, Artificial Sequence
  Description of Artificial Sequence: Synthetic oligonucleotide
gauauacauguaguagccu

SEQ ID NO: 362676 - RNA, 19 nt, Artificial Sequence
  Description of Artificial Sequence: Synthetic oligonucleotide
agucauaucccgaguguaa

SEQ ID NO: 362677 - RNA, 19 nt, Artificial Sequence
  Description of Artificial Sequence: Synthetic oligonucleotide
guaguagccuaccccagua

SEQ ID NO: 362678 - RNA, 19 nt, Artificial Sequence
  Description of Artificial Sequence: Synthetic oligonucleotide
agauccagacuggcuauga

SEQ ID NO: 362679 - RNA, 19 nt, Artificial Sequence
  Description of Artificial Sequence: Synthetic oligonucleotide
agacagaguccacguacau

SEQ ID NO: 362680 - RNA, 19 nt, Artificial Sequence
  Description of Artificial Sequence: Synthetic oligonucleotide
caguagccuguacuucuag

SEQ ID NO: 362681 - RNA, 19 nt, Artificial Sequence
  Description of Artificial Sequence: Synthetic oligonucleotide
cacauucaucuugauuaug

SEQ ID NO: 362682 - RNA, 19 nt, Artificial Sequence
  Description of Artificial Sequence: Synthetic oligonucleotide
gaagauccagacuggcuau

SEQ ID NO: 362683 - RNA, 19 nt, Artificial Sequence
  Description of Artificial Sequence: Synthetic oligonucleotide
ccaucaauaccuagucuuc

SEQ ID NO: 362684 - RNA, 19 nt, Artificial Sequence
  Description of Artificial Sequence: Synthetic oligonucleotide
uauaaaccgcuaggguguc

SEQ ID NO: 362685 - RNA, 19 nt, Artificial Sequence
  Description of Artificial Sequence: Synthetic oligonucleotide
agaccggcaguuucccagu

SEQ ID NO: 362686 - RNA, 19 nt, Artificial Sequence
  Description of Artificial Sequence: Synthetic oligonucleotide
accgacaccuugcauuauu

SEQ ID NO: 362687 - RNA, 19 nt, Artificial Sequence
  Description of Artificial Sequence: Synthetic oligonucleotide
gcuacuuggccacuaaacu

SEQ ID NO: 362688 - RNA, 19 nt, Artificial Sequence
  Description of Artificial Sequence: Synthetic oligonucleotide
ccgaccaccaugugagagg

SEQ ID NO: 362689 - RNA, 19 nt, Artificial Sequence
  Description of Artificial Sequence: Synthetic oligonucleotide
guugagacguaaauuuagu

SEQ ID NO: 362690 - RNA, 19 nt, Artificial Sequence
  Description of Artificial Sequence: Synthetic oligonucleotide
agggaccguaaagccuucc

SEQ ID NO: 362691 - RNA, 19 nt, Artificial Sequence
  Description of Artificial Sequence: Synthetic oligonucleotide
auguaguagccuaccccag

SEQ ID NO: 362692 - RNA, 19 nt, Artificial Sequence
  Description of Artificial Sequence: Synthetic oligonucleotide
ggucacguggggaaaugag

SEQ ID NO: 362693 - RNA, 19 nt, Artificial Sequence
  Description of Artificial Sequence: Synthetic oligonucleotide
ccacguacauauaguggcc

SEQ ID NO: 362694 - RNA, 19 nt, Artificial Sequence
  Description of Artificial Sequence: Synthetic oligonucleotide
cauugucauuccccugcug

SEQ ID NO: 362695 - RNA, 19 nt, Artificial Sequence
  Description of Artificial Sequence: Synthetic oligonucleotide
cccaguagugugaucuccc

SEQ ID NO: 362696 - RNA, 19 nt, Artificial Sequence
  Description of Artificial Sequence: Synthetic oligonucleotide
ugcuccgguuucuuuucuc

SEQ ID NO: 362697 - RNA, 19 nt, Artificial Sequence
  Description of Artificial Sequence: Synthetic oligonucleotide
gucauaucccgaguguaaa

SEQ ID NO: 362698 - RNA, 19 nt, Artificial Sequence
  Description of Artificial Sequence: Synthetic oligonucleotide
agaacgagaggcagccaga

SEQ ID NO: 362699 - RNA, 19 nt, Artificial Sequence
  Description of Artificial Sequence: Synthetic oligonucleotide
gggugcgguuaucugguag

SEQ ID NO: 362700 - RNA, 19 nt, Artificial Sequence
  Description of Artificial Sequence: Synthetic oligonucleotide
uccauacaugugguagaaa

SEQ ID NO: 362701 - RNA, 19 nt, Artificial Sequence
  Description of Artificial Sequence: Synthetic oligonucleotide
gacagaguccacguacaua

SEQ ID NO: 362702 - RNA, 19 nt, Artificial Sequence
  Description of Artificial Sequence: Synthetic oligonucleotide
cucaguggccaggacaaga

SEQ ID NO: 362703 - RNA, 19 nt, Artificial Sequence
  Description of Artificial Sequence: Synthetic oligonucleotide
caacaaaccaguucacguu

SEQ ID NO: 362704 - RNA, 19 nt, Artificial Sequence
  Description of Artificial Sequence: Synthetic oligonucleotide
gcuccauacaugugguaga

SEQ ID NO: 362705 - RNA, 19 nt, Artificial Sequence
  Description of Artificial Sequence: Synthetic oligonucleotide
agcaaucgaucaaaacuuu

SEQ ID NO: 362706 - RNA, 19 nt, Artificial Sequence
  Description of Artificial Sequence: Synthetic oligonucleotide
agguugagacguaaauuua

SEQ ID NO: 362707 - RNA, 19 nt, Artificial Sequence
  Description of Artificial Sequence: Synthetic oligonucleotide
gcuccuuaguagaccaaag

SEQ ID NO: 362708 - RNA, 19 nt, Artificial Sequence
  Description of Artificial Sequence: Synthetic oligonucleotide
cucgagcacagaccagauc

SEQ ID NO: 362709 - RNA, 19 nt, Artificial Sequence
  Description of Artificial Sequence: Synthetic oligonucleotide
agcccugagucaauauaca

SEQ ID NO: 362710 - RNA, 19 nt, Artificial Sequence
  Description of Artificial Sequence: Synthetic oligonucleotide
gguaaggagggaccguaaa

SEQ ID NO: 362711 - RNA, 19 nt, Artificial Sequence
  Description of Artificial Sequence: Synthetic oligonucleotide
ccaacaaaccaguucacgu

SEQ ID NO: 362712 - RNA, 19 nt, Artificial Sequence
  Description of Artificial Sequence: Synthetic oligonucleotide
gcccguagccaggagaugc

SEQ ID NO: 362713 - RNA, 19 nt, Artificial Sequence
  Description of Artificial Sequence: Synthetic oligonucleotide
gggguaaggagcacugaac

SEQ ID NO: 362714 - RNA, 19 nt, Artificial Sequence
  Description of Artificial Sequence: Synthetic oligonucleotide
gguacaaauuuugucuacu

SEQ ID NO: 362715 - RNA, 19 nt, Artificial Sequence
  Description of Artificial Sequence: Synthetic oligonucleotide
gcaaucgaucaaaacuuuc

SEQ ID NO: 362716 - RNA, 19 nt, Artificial Sequence
  Description of Artificial Sequence: Synthetic oligonucleotide
cauagacagaguccacgua

SEQ ID NO: 362717 - RNA, 19 nt, Artificial Sequence
  Description of Artificial Sequence: Synthetic oligonucleotide
gcuguggucacguggggaa

SEQ ID NO: 362718 - RNA, 19 nt, Artificial Sequence
  Description of Artificial Sequence: Synthetic oligonucleotide
gcguccugcagcuguauuc

SEQ ID NO: 362719 - RNA, 19 nt, Artificial Sequence
  Description of Artificial Sequence: Synthetic oligonucleotide
ggggacucgagcacagacc

SEQ ID NO: 362720 - RNA, 19 nt, Artificial Sequence
  Description of Artificial Sequence: Synthetic oligonucleotide
ccaacagguaaugcccugc

SEQ ID NO: 362721 - RNA, 19 nt, Artificial Sequence
  Description of Artificial Sequence: Synthetic oligonucleotide
cucguauaggccagucaua

SEQ ID NO: 362722 - RNA, 19 nt, Artificial Sequence
  Description of Artificial Sequence: Synthetic oligonucleotide
uggcuccuuaguagaccaa

SEQ ID NO: 362723 - RNA, 19 nt, Artificial Sequence
  Description of Artificial Sequence: Synthetic oligonucleotide
ugguccaaccgggaccguc

SEQ ID NO: 362724 - RNA, 19 nt, Artificial Sequence
  Description of Artificial Sequence: Synthetic oligonucleotide
gggaccgucuuuaucuuga

SEQ ID NO: 362725 - RNA, 19 nt, Artificial Sequence
  Description of Artificial Sequence: Synthetic oligonucleotide
gugcgguuaucugguagac

SEQ ID NO: 362726 - RNA, 19 nt, Artificial Sequence
  Description of Artificial Sequence: Synthetic oligonucleotide
auagaacgagaggcagcca

SEQ ID NO: 362727 - RNA, 19 nt, Artificial Sequence
  Description of Artificial Sequence: Synthetic oligonucleotide
cuccauacaugugguagaa

SEQ ID NO: 362728 - RNA, 19 nt, Artificial Sequence
  Description of Artificial Sequence: Synthetic oligonucleotide
agccugcaaaucagagcuc

SEQ ID NO: 362729 - RNA, 19 nt, Artificial Sequence
  Description of Artificial Sequence: Synthetic oligonucleotide
guguuucccagggacaccu

SEQ ID NO: 362730 - RNA, 19 nt, Artificial Sequence
  Description of Artificial Sequence: Synthetic oligonucleotide
cgaguguaaagggagaaga

SEQ ID NO: 362731 - RNA, 19 nt, Artificial Sequence
  Description of Artificial Sequence: Synthetic oligonucleotide
gggaccguaaagccuucca

SEQ ID NO: 362732 - RNA, 19 nt, Artificial Sequence
  Description of Artificial Sequence: Synthetic oligonucleotide
ccaucgguucacaaagcca

SEQ ID NO: 362733 - RNA, 19 nt, Artificial Sequence
  Description of Artificial Sequence: Synthetic oligonucleotide
ugcauucauuuugcagaua

SEQ ID NO: 362734 - RNA, 19 nt, Artificial Sequence
  Description of Artificial Sequence: Synthetic oligonucleotide
aacagcccucggggacucg

SEQ ID NO: 362735 - RNA, 19 nt, Artificial Sequence
  Description of Artificial Sequence: Synthetic oligonucleotide
auaaaccgcuaggguguca

SEQ ID NO: 362736 - RNA, 19 nt, Artificial Sequence
  Description of Artificial Sequence: Synthetic oligonucleotide
guauucaacccgugcccgu

SEQ ID NO: 362737 - RNA, 19 nt, Artificial Sequence
  Description of Artificial Sequence: Synthetic oligonucleotide
cagucauaucccgagugua

SEQ ID NO: 362738 - RNA, 19 nt, Artificial Sequence
  Description of Artificial Sequence: Synthetic oligonucleotide
uccaaccgggaccgucuuu

SEQ ID NO: 362739 - RNA, 19 nt, Artificial Sequence
  Description of Artificial Sequence: Synthetic oligonucleotide
gguccugccugaaauuuaa

SEQ ID NO: 362740 - RNA, 19 nt, Artificial Sequence
  Description of Artificial Sequence: Synthetic oligonucleotide
gauccccaauccgauacau

SEQ ID NO: 362741 - RNA, 19 nt, Artificial Sequence
  Description of Artificial Sequence: Synthetic oligonucleotide
uuccccugcugaagcugau

SEQ ID NO: 362742 - RNA, 19 nt, Artificial Sequence
  Description of Artificial Sequence: Synthetic oligonucleotide
ccagaguaaugugucacca

SEQ ID NO: 362743 - RNA, 19 nt, Artificial Sequence
  Description of Artificial Sequence: Synthetic oligonucleotide
acagcccucggggacucga

SEQ ID NO: 362744 - RNA, 19 nt, Artificial Sequence
  Description of Artificial Sequence: Synthetic oligonucleotide
guaagcccugagucaauau

SEQ ID NO: 362745 - RNA, 19 nt, Artificial Sequence
  Description of Artificial Sequence: Synthetic oligonucleotide
cacucugguccaaccggga

SEQ ID NO: 362746 - RNA, 19 nt, Artificial Sequence
  Description of Artificial Sequence: Synthetic oligonucleotide
cagcccucggggacucgag

SEQ ID NO: 362747 - RNA, 19 nt, Artificial Sequence
  Description of Artificial Sequence: Synthetic oligonucleotide
ggguguuccaaagucauuu

SEQ ID NO: 362748 - RNA, 19 nt, Artificial Sequence
  Description of Artificial Sequence: Synthetic oligonucleotide
caacagguaaugcccugcu

SEQ ID NO: 362749 - RNA, 19 nt, Artificial Sequence
  Description of Artificial Sequence: Synthetic oligonucleotide
caacccgugcccguagcca

SEQ ID NO: 362750 - RNA, 19 nt, Artificial Sequence
  Description of Artificial Sequence: Synthetic oligonucleotide
cuccucguauaggccaguc

SEQ ID NO: 362751 - RNA, 19 nt, Artificial Sequence
  Description of Artificial Sequence: Synthetic oligonucleotide
ggcuccuuaguagaccaaa

SEQ ID NO: 362752 - RNA, 19 nt, Artificial Sequence
  Description of Artificial Sequence: Synthetic oligonucleotide
cagaguaaugugucaccau

SEQ ID NO: 362753 - RNA, 19 nt, Artificial Sequence
  Description of Artificial Sequence: Synthetic oligonucleotide
gcagcuguauucaacccgu

SEQ ID NO: 362754 - RNA, 19 nt, Artificial Sequence
  Description of Artificial Sequence: Synthetic oligonucleotide
ccucgucuucuccacaaca

SEQ ID NO: 362755 - RNA, 19 nt, Artificial Sequence
  Description of Artificial Sequence: Synthetic oligonucleotide
cuaccccaguagugugauc

SEQ ID NO: 362756 - RNA, 19 nt, Artificial Sequence
  Description of Artificial Sequence: Synthetic oligonucleotide
gccucgauauacauguagu

SEQ ID NO: 362757 - RNA, 19 nt, Artificial Sequence
  Description of Artificial Sequence: Synthetic oligonucleotide
ccccaguagugugaucucc

SEQ ID NO: 362758 - RNA, 19 nt, Artificial Sequence
  Description of Artificial Sequence: Synthetic oligonucleotide
cguacauauaguggcccug

SEQ ID NO: 362759 - RNA, 19 nt, Artificial Sequence
  Description of Artificial Sequence: Synthetic oligonucleotide
acccgugcccguagccagg

SEQ ID NO: 362760 - RNA, 19 nt, Artificial Sequence
  Description of Artificial Sequence: Synthetic oligonucleotide
caaacagcccucggggacu

SEQ ID NO: 362761 - RNA, 19 nt, Artificial Sequence
  Description of Artificial Sequence: Synthetic oligonucleotide
ggaccauugaaagcaacuu

SEQ ID NO: 362762 - RNA, 19 nt, Artificial Sequence
  Description of Artificial Sequence: Synthetic oligonucleotide
caguagccggcugucaucu

SEQ ID NO: 362763 - RNA, 19 nt, Artificial Sequence
  Description of Artificial Sequence: Synthetic oligonucleotide
gcacugaaaggaagcccug

SEQ ID NO: 362764 - RNA, 19 nt, Artificial Sequence
  Description of Artificial Sequence: Synthetic oligonucleotide
cguaaagccuuccaaugua

SEQ ID NO: 362765 - RNA, 19 nt, Artificial Sequence
  Description of Artificial Sequence: Synthetic oligonucleotide
ggagggaccguaaagccuu

SEQ ID NO: 362766 - RNA, 19 nt, Artificial Sequence
  Description of Artificial Sequence: Synthetic oligonucleotide
cauagcacgguugcauuuu

SEQ ID NO: 362767 - RNA, 19 nt, Artificial Sequence
  Description of Artificial Sequence: Synthetic oligonucleotide
cggggacucgagcacagac

SEQ ID NO: 362768 - RNA, 19 nt, Artificial Sequence
  Description of Artificial Sequence: Synthetic oligonucleotide
ccgucuuuaucuugauaaa

SEQ ID NO: 362769 - RNA, 19 nt, Artificial Sequence
  Description of Artificial Sequence: Synthetic oligonucleotide
gagggaccguaaagccuuc

SEQ ID NO: 362770 - RNA, 19 nt, Artificial Sequence
  Description of Artificial Sequence: Synthetic oligonucleotide
guacugcauguuuccuggu

SEQ ID NO: 362771 - RNA, 19 nt, Artificial Sequence
  Description of Artificial Sequence: Synthetic oligonucleotide
cgguuaucugguagaccag

SEQ ID NO: 362772 - RNA, 19 nt, Artificial Sequence
  Description of Artificial Sequence: Synthetic oligonucleotide
gugcccguagccaggagau

SEQ ID NO: 362773 - RNA, 19 nt, Artificial Sequence
  Description of Artificial Sequence: Synthetic oligonucleotide
gugugauccccaauccgau

SEQ ID NO: 362774 - RNA, 19 nt, Artificial Sequence
  Description of Artificial Sequence: Synthetic oligonucleotide
cagggacucuuuacucucu

SEQ ID NO: 362775 - RNA, 19 nt, Artificial Sequence
  Description of Artificial Sequence: Synthetic oligonucleotide
ggacucgagcacagaccag

SEQ ID NO: 362776 - RNA, 19 nt, Artificial Sequence
  Description of Artificial Sequence: Synthetic oligonucleotide
guugcguccugcagcugua

SEQ ID NO: 362777 - RNA, 19 nt, Artificial Sequence
  Description of Artificial Sequence: Synthetic oligonucleotide
cguauaggccagucauauc

SEQ ID NO: 362778 - RNA, 19 nt, Artificial Sequence
  Description of Artificial Sequence: Synthetic oligonucleotide
guccgaccaccaugugaga

SEQ ID NO: 362779 - RNA, 19 nt, Artificial Sequence
  Description of Artificial Sequence: Synthetic oligonucleotide
uaccgacaccuugcauuau

SEQ ID NO: 362780 - RNA, 19 nt, Artificial Sequence
  Description of Artificial Sequence: Synthetic oligonucleotide
gcccugagucaauauacau

SEQ ID NO: 362781 - RNA, 19 nt, Artificial Sequence
  Description of Artificial Sequence: Synthetic oligonucleotide
ccguaaagccuuccaaugu

SEQ ID NO: 362782 - RNA, 19 nt, Artificial Sequence
  Description of Artificial Sequence: Synthetic oligonucleotide
ccagucauaucccgagugu

SEQ ID NO: 362783 - RNA, 19 nt, Artificial Sequence
  Description of Artificial Sequence: Synthetic oligonucleotide
caguagugugaucucccuu

SEQ ID NO: 362784 - RNA, 19 nt, Artificial Sequence
  Description of Artificial Sequence: Synthetic oligonucleotide
ccaccaugugagaggccuc

SEQ ID NO: 362785 - RNA, 19 nt, Artificial Sequence
  Description of Artificial Sequence: Synthetic oligonucleotide
gguccaaccgggaccgucu

SEQ ID NO: 362786 - RNA, 19 nt, Artificial Sequence
  Description of Artificial Sequence: Synthetic oligonucleotide
ccaaccgggaccgucuuua

SEQ ID NO: 362787 - RNA, 19 nt, Artificial Sequence
  Description of Artificial Sequence: Synthetic oligonucleotide
cuguggucacguggggaaa

SEQ ID NO: 362788 - RNA, 19 nt, Artificial Sequence
  Description of Artificial Sequence: Synthetic oligonucleotide
ggacaccuucuaucaaaau

SEQ ID NO: 362789 - RNA, 19 nt, Artificial Sequence
  Description of Artificial Sequence: Synthetic oligonucleotide
guguugcguccugcagcug

SEQ ID NO: 362790 - RNA, 19 nt, Artificial Sequence
  Description of Artificial Sequence: Synthetic oligonucleotide
ccaguagugugaucucccu

SEQ ID NO: 362791 - RNA, 19 nt, Artificial Sequence
  Description of Artificial Sequence: Synthetic oligonucleotide
cgggaccgucuuuaucuug

SEQ ID NO: 362792 - RNA, 19 nt, Artificial Sequence
  Description of Artificial Sequence: Synthetic oligonucleotide
ccgauacauguuggguuuc

SEQ ID NO: 362793 - RNA, 19 nt, Artificial Sequence
  Description of Artificial Sequence: Synthetic oligonucleotide
cugcuccgguuucuuuucu

SEQ ID NO: 362794 - RNA, 19 nt, Artificial Sequence
  Description of Artificial Sequence: Synthetic oligonucleotide
guguaagagguggguguuu

SEQ ID NO: 362795 - RNA, 19 nt, Artificial Sequence
  Description of Artificial Sequence: Synthetic oligonucleotide
ccaaggcuacaaguccaca

SEQ ID NO: 362796 - RNA, 19 nt, Artificial Sequence
  Description of Artificial Sequence: Synthetic oligonucleotide
ccuagucuuccaauacauu

SEQ ID NO: 362797 - RNA, 19 nt, Artificial Sequence
  Description of Artificial Sequence: Synthetic oligonucleotide
ccguagccaggagaugcuc

SEQ ID NO: 362798 - RNA, 19 nt, Artificial Sequence
  Description of Artificial Sequence: Synthetic oligonucleotide
ggaccgucuuuaucuugau

SEQ ID NO: 362799 - RNA, 19 nt, Artificial Sequence
  Description of Artificial Sequence: Synthetic oligonucleotide
cgacaccuugcauuauuua

SEQ ID NO: 362800 - RNA, 19 nt, Artificial Sequence
  Description of Artificial Sequence: Synthetic oligonucleotide
cguagccaggagaugcucu

SEQ ID NO: 362801 - RNA, 19 nt, Artificial Sequence
  Description of Artificial Sequence: Synthetic oligonucleotide
gcuuuugcauaggcucaua

SEQ ID NO: 362802 - RNA, 19 nt, Artificial Sequence
  Description of Artificial Sequence: Synthetic oligonucleotide
caaccgggaccgucuuuau

SEQ ID NO: 362803 - RNA, 19 nt, Artificial Sequence
  Description of Artificial Sequence: Synthetic oligonucleotide
ccugaacgugugauccugu

SEQ ID NO: 362804 - RNA, 19 nt, Artificial Sequence
  Description of Artificial Sequence: Synthetic oligonucleotide
guccaaccgggaccgucuu

SEQ ID NO: 362805 - RNA, 19 nt, Artificial Sequence
  Description of Artificial Sequence: Synthetic oligonucleotide
ccgacaccuugcauuauuu

SEQ ID NO: 362806 - RNA, 19 nt, Artificial Sequence
  Description of Artificial Sequence: Synthetic oligonucleotide
ccucggggacucgagcaca

SEQ ID NO: 362807 - RNA, 19 nt, Artificial Sequence
  Description of Artificial Sequence: Synthetic oligonucleotide
ggggugcgguuaucuggua

SEQ ID NO: 362808 - RNA, 19 nt, Artificial Sequence
  Description of Artificial Sequence: Synthetic oligonucleotide
ccuaccccaguagugugau

SEQ ID NO: 362809 - RNA, 19 nt, Artificial Sequence
  Description of Artificial Sequence: Synthetic oligonucleotide
ccccaauccgauacauguu

SEQ ID NO: 362810 - RNA, 19 nt, Artificial Sequence
  Description of Artificial Sequence: Synthetic oligonucleotide
ccgugcccguagccaggag

SEQ ID NO: 362811 - RNA, 19 nt, Artificial Sequence
  Description of Artificial Sequence: Synthetic oligonucleotide
gggguguuccaaagucauu

SEQ ID NO: 362812 - RNA, 19 nt, Artificial Sequence
  Description of Artificial Sequence: Synthetic oligonucleotide
cccgugcccguagccagga

SEQ ID NO: 362813 - RNA, 19 nt, Artificial Sequence
  Description of Artificial Sequence: Synthetic oligonucleotide
ccgcuagggugucacucau

SEQ ID NO: 362814 - RNA, 19 nt, Artificial Sequence
  Description of Artificial Sequence: Synthetic oligonucleotide
ccgggaccgucuuuaucuu

SEQ ID NO: 362815 - RNA, 19 nt, Artificial Sequence
  Description of Artificial Sequence: Synthetic oligonucleotide
gcccaggggugcgguuauc

SEQ ID NO: 362816 - RNA, 19 nt, Artificial Sequence
  Description of Artificial Sequence: Synthetic oligonucleotide
  modified_base (11)..(11): a, c, u, g, unknown or other
  modified_base (15)..(15): a, c, u, g, unknown or other
uaaaauuaaanaaanaaaa

SEQ ID NO: 362817 - RNA, 19 nt, Artificial Sequence
  Description of Artificial Sequence: Synthetic oligonucleotide
aauguuauauauuuuaagu

SEQ ID NO: 362818 - RNA, 19 nt, Artificial Sequence
  Description of Artificial Sequence: Synthetic oligonucleotide
aauuauuggcaguucaggc

SEQ ID NO: 362819 - RNA, 19 nt, Artificial Sequence
  Description of Artificial Sequence: Synthetic oligonucleotide
agucuuaggacucagcucc

SEQ ID NO: 362820 - RNA, 19 nt, Artificial Sequence
  Description of Artificial Sequence: Synthetic oligonucleotide
aguaaauucuuguugagag

SEQ ID NO: 362821 - RNA, 19 nt, Artificial Sequence
  Description of Artificial Sequence: Synthetic oligonucleotide
uauauggcaaucauggucc

SEQ ID NO: 362822 - RNA, 19 nt, Artificial Sequence
  Description of Artificial Sequence: Synthetic oligonucleotide
uuccaagugaacuagacag

SEQ ID NO: 362823 - RNA, 19 nt, Artificial Sequence
  Description of Artificial Sequence: Synthetic oligonucleotide
cauauuuugcccaugacgc

SEQ ID NO: 362824 - RNA, 19 nt, Artificial Sequence
  Description of Artificial Sequence: Synthetic oligonucleotide
aguacagccauauagacca

SEQ ID NO: 362825 - RNA, 19 nt, Artificial Sequence
  Description of Artificial Sequence: Synthetic oligonucleotide
aaagaaccaagguagguag

SEQ ID NO: 362826 - RNA, 19 nt, Artificial Sequence
  Description of Artificial Sequence: Synthetic oligonucleotide
aagugcaaaauuccuuucc

SEQ ID NO: 362827 - RNA, 19 nt, Artificial Sequence
  Description of Artificial Sequence: Synthetic oligonucleotide
aagugaacuagacagcuag

SEQ ID NO: 362828 - RNA, 19 nt, Artificial Sequence
  Description of Artificial Sequence: Synthetic oligonucleotide
acauauuuugcccaugacg

SEQ ID NO: 362829 - RNA, 19 nt, Artificial Sequence
  Description of Artificial Sequence: Synthetic oligonucleotide
guugaaagaaccaagguag

SEQ ID NO: 362830 - RNA, 19 nt, Artificial Sequence
  Description of Artificial Sequence: Synthetic oligonucleotide
gugauuaugaucaaaauac

SEQ ID NO: 362831 - RNA, 19 nt, Artificial Sequence
  Description of Artificial Sequence: Synthetic oligonucleotide
aaagggaacaagauuggcc

SEQ ID NO: 362832 - RNA, 19 nt, Artificial Sequence
  Description of Artificial Sequence: Synthetic oligonucleotide
acuacaauuacguguuggc

SEQ ID NO: 362833 - RNA, 19 nt, Artificial Sequence
  Description of Artificial Sequence: Synthetic oligonucleotide
aacgagaggagguaagagg

SEQ ID NO: 362834 - RNA, 19 nt, Artificial Sequence
  Description of Artificial Sequence: Synthetic oligonucleotide
aucgaaaucaucaagagca

SEQ ID NO: 362835 - RNA, 19 nt, Artificial Sequence
  Description of Artificial Sequence: Synthetic oligonucleotide
ucugacacuacaauuacgu

SEQ ID NO: 362836 - RNA, 19 nt, Artificial Sequence
  Description of Artificial Sequence: Synthetic oligonucleotide
ugucaauaaauuauuggca

SEQ ID NO: 362837 - RNA, 19 nt, Artificial Sequence
  Description of Artificial Sequence: Synthetic oligonucleotide
uuaaaccuagguaauuuag

SEQ ID NO: 362838 - RNA, 19 nt, Artificial Sequence
  Description of Artificial Sequence: Synthetic oligonucleotide
uauccauaaaauauauggc

SEQ ID NO: 362839 - RNA, 19 nt, Artificial Sequence
  Description of Artificial Sequence: Synthetic oligonucleotide
acuaucuccuaacacuucc

SEQ ID NO: 362840 - RNA, 19 nt, Artificial Sequence
  Description of Artificial Sequence: Synthetic oligonucleotide
aaauuauuggcaguucagg

SEQ ID NO: 362841 - RNA, 19 nt, Artificial Sequence
  Description of Artificial Sequence: Synthetic oligonucleotide
aaucuaaaacgagaggagg

SEQ ID NO: 362842 - RNA, 19 nt, Artificial Sequence
  Description of Artificial Sequence: Synthetic oligonucleotide
agaacuaucuccuaacacu

SEQ ID NO: 362843 - RNA, 19 nt, Artificial Sequence
  Description of Artificial Sequence: Synthetic oligonucleotide
cuagcauaacauuacacag

SEQ ID NO: 362844 - RNA, 19 nt, Artificial Sequence
  Description of Artificial Sequence: Synthetic oligonucleotide
agaagugagaauaaaggac

SEQ ID NO: 362845 - RNA, 19 nt, Artificial Sequence
  Description of Artificial Sequence: Synthetic oligonucleotide
uaaauuauuggcaguucag

SEQ ID NO: 362846 - RNA, 19 nt, Artificial Sequence
  Description of Artificial Sequence: Synthetic oligonucleotide
  modified_base (15)..(15): a, c, u, g, unknown or other
  modified_base (19)..(19): a, c, u, g, unknown or other
aaauuaaaauuaaanaaan

SEQ ID NO: 362847 - RNA, 19 nt, Artificial Sequence
  Description of Artificial Sequence: Synthetic oligonucleotide
uuauuggcaguucaggccc

SEQ ID NO: 362848 - RNA, 19 nt, Artificial Sequence
  Description of Artificial Sequence: Synthetic oligonucleotide
uggaguaaaauaagaaucu

SEQ ID NO: 362849 - RNA, 19 nt, Artificial Sequence
  Description of Artificial Sequence: Synthetic oligonucleotide
agaaguaaauucuuguuga

SEQ ID NO: 362850 - RNA, 19 nt, Artificial Sequence
  Description of Artificial Sequence: Synthetic oligonucleotide
cuggaguaaaauaagaauc

SEQ ID NO: 362851 - RNA, 19 nt, Artificial Sequence
  Description of Artificial Sequence: Synthetic oligonucleotide
acuagcauaacauuacaca

SEQ ID NO: 362852 - RNA, 19 nt, Artificial Sequence
  Description of Artificial Sequence: Synthetic oligonucleotide
agaaucuaaaacgagagga

SEQ ID NO: 362853 - RNA, 19 nt, Artificial Sequence
  Description of Artificial Sequence: Synthetic oligonucleotide
aauaagaaucuaaaacgag

SEQ ID NO: 362854 - RNA, 19 nt, Artificial Sequence
  Description of Artificial Sequence: Synthetic oligonucleotide
ugaauauccauaaaauaua

SEQ ID NO: 362855 - RNA, 19 nt, Artificial Sequence
  Description of Artificial Sequence: Synthetic oligonucleotide
cuugucaagcuuuuguagg

SEQ ID NO: 362856 - RNA, 19 nt, Artificial Sequence
  Description of Artificial Sequence: Synthetic oligonucleotide
auaucagcuaagcuggagg

SEQ ID NO: 362857 - RNA, 19 nt, Artificial Sequence
  Description of Artificial Sequence: Synthetic oligonucleotide
accuagguaauuuagaaaa

SEQ ID NO: 362858 - RNA, 19 nt, Artificial Sequence
  Description of Artificial Sequence: Synthetic oligonucleotide
ucuagggagaaugacacag

SEQ ID NO: 362859 - RNA, 19 nt, Artificial Sequence
  Description of Artificial Sequence: Synthetic oligonucleotide
uacaauuacguguuggcca

SEQ ID NO: 362860 - RNA, 19 nt, Artificial Sequence
  Description of Artificial Sequence: Synthetic oligonucleotide
guagaaacaaggcacgaag

SEQ ID NO: 362861 - RNA, 19 nt, Artificial Sequence
  Description of Artificial Sequence: Synthetic oligonucleotide
aauaaauuauuggcaguuc

SEQ ID NO: 362862 - RNA, 19 nt, Artificial Sequence
  Description of Artificial Sequence: Synthetic oligonucleotide
cuuagaccuacugagaagg

SEQ ID NO: 362863 - RNA, 19 nt, Artificial Sequence
  Description of Artificial Sequence: Synthetic oligonucleotide
ugacacuacaauuacgugu

SEQ ID NO: 362864 - RNA, 19 nt, Artificial Sequence
  Description of Artificial Sequence: Synthetic oligonucleotide
aucgcaaccuuccucagcg

SEQ ID NO: 362865 - RNA, 19 nt, Artificial Sequence
  Description of Artificial Sequence: Synthetic oligonucleotide
uaucagcuaagcuggaggg

SEQ ID NO: 362866 - RNA, 19 nt, Artificial Sequence
  Description of Artificial Sequence: Synthetic oligonucleotide
ucgaaaugaaggcaaggag

SEQ ID NO: 362867 - RNA, 19 nt, Artificial Sequence
  Description of Artificial Sequence: Synthetic oligonucleotide
ucauuuaccagcucugaca

SEQ ID NO: 362868 - RNA, 19 nt, Artificial Sequence
  Description of Artificial Sequence: Synthetic oligonucleotide
auaaauuauuggcaguuca

SEQ ID NO: 362869 - RNA, 19 nt, Artificial Sequence
  Description of Artificial Sequence: Synthetic oligonucleotide
aagucuuaggacucagcuc

SEQ ID NO: 362870 - RNA, 19 nt, Artificial Sequence
  Description of Artificial Sequence: Synthetic oligonucleotide
aaguaagccagaauguauc

SEQ ID NO: 362871 - RNA, 19 nt, Artificial Sequence
  Description of Artificial Sequence: Synthetic oligonucleotide
uuuauuagauacugucccc

SEQ ID NO: 362872 - RNA, 19 nt, Artificial Sequence
  Description of Artificial Sequence: Synthetic oligonucleotide
cugccuaauagaaacaaac

SEQ ID NO: 362873 - RNA, 19 nt, Artificial Sequence
  Description of Artificial Sequence: Synthetic oligonucleotide
agcuagguggacuaaaaug

SEQ ID NO: 362874 - RNA, 19 nt, Artificial Sequence
  Description of Artificial Sequence: Synthetic oligonucleotide
aacuagcauaacauuacac

SEQ ID NO: 362875 - RNA, 19 nt, Artificial Sequence
  Description of Artificial Sequence: Synthetic oligonucleotide
ugauuaugaucaaaauaca

SEQ ID NO: 362876 - RNA, 19 nt, Artificial Sequence
  Description of Artificial Sequence: Synthetic oligonucleotide
gaauuaagugggcagcacc

SEQ ID NO: 362877 - RNA, 19 nt, Artificial Sequence
  Description of Artificial Sequence: Synthetic oligonucleotide
ucaaaacgagcccugugag

SEQ ID NO: 362878 - RNA, 19 nt, Artificial Sequence
  Description of Artificial Sequence: Synthetic oligonucleotide
uuuuguaggaaugucaaua

SEQ ID NO: 362879 - RNA, 19 nt, Artificial Sequence
  Description of Artificial Sequence: Synthetic oligonucleotide
uggaggaugccccaagucc

SEQ ID NO: 362880 - RNA, 19 nt, Artificial Sequence
  Description of Artificial Sequence: Synthetic oligonucleotide
uuggcuagcccacuuaaug

SEQ ID NO: 362881 - RNA, 19 nt, Artificial Sequence
  Description of Artificial Sequence: Synthetic oligonucleotide
auuagauacuguccccugg

SEQ ID NO: 362882 - RNA, 19 nt, Artificial Sequence
  Description of Artificial Sequence: Synthetic oligonucleotide
ugaacuagacagcuaggug

SEQ ID NO: 362883 - RNA, 19 nt, Artificial Sequence
  Description of Artificial Sequence: Synthetic oligonucleotide
ucuagcaccgccucaaaac

SEQ ID NO: 362884 - RNA, 19 nt, Artificial Sequence
  Description of Artificial Sequence: Synthetic oligonucleotide
aauauauggcaaucauggu

SEQ ID NO: 362885 - RNA, 19 nt, Artificial Sequence
  Description of Artificial Sequence: Synthetic oligonucleotide
aacguguuguguuucacau

SEQ ID NO: 362886 - RNA, 19 nt, Artificial Sequence
  Description of Artificial Sequence: Synthetic oligonucleotide
cagguuaagugcaaaauuc

SEQ ID NO: 362887 - RNA, 19 nt, Artificial Sequence
  Description of Artificial Sequence: Synthetic oligonucleotide
ugaugucucaaguaagcca

SEQ ID NO: 362888 - RNA, 19 nt, Artificial Sequence
  Description of Artificial Sequence: Synthetic oligonucleotide
gaaucuaaaacgagaggag

SEQ ID NO: 362889 - RNA, 19 nt, Artificial Sequence
  Description of Artificial Sequence: Synthetic oligonucleotide
acaauuacguguuggccag

SEQ ID NO: 362890 - RNA, 19 nt, Artificial Sequence
  Description of Artificial Sequence: Synthetic oligonucleotide
cuagggacaggaaaagccc

SEQ ID NO: 362891 - RNA, 19 nt, Artificial Sequence
  Description of Artificial Sequence: Synthetic oligonucleotide
ugcugcaugagaucuagca

SEQ ID NO: 362892 - RNA, 19 nt, Artificial Sequence
  Description of Artificial Sequence: Synthetic oligonucleotide
uuaagugggcagcaccuag

SEQ ID NO: 362893 - RNA, 19 nt, Artificial Sequence
  Description of Artificial Sequence: Synthetic oligonucleotide
auaagaaucuaaaacgaga

SEQ ID NO: 362894 - RNA, 19 nt, Artificial Sequence
  Description of Artificial Sequence: Synthetic oligonucleotide
agaguuugcaucacugccc

SEQ ID NO: 362895 - RNA, 19 nt, Artificial Sequence
  Description of Artificial Sequence: Synthetic oligonucleotide
gagagcucgaaaugaaggc

SEQ ID NO: 362896 - RNA, 19 nt, Artificial Sequence
  Description of Artificial Sequence: Synthetic oligonucleotide
aaaccuacagccccagggu

SEQ ID NO: 362897 - RNA, 19 nt, Artificial Sequence
  Description of Artificial Sequence: Synthetic oligonucleotide
auaaaauauauggcaauca

SEQ ID NO: 362898 - RNA, 19 nt, Artificial Sequence
  Description of Artificial Sequence: Synthetic oligonucleotide
agagagcucgaaaugaagg

SEQ ID NO: 362899 - RNA, 19 nt, Artificial Sequence
  Description of Artificial Sequence: Synthetic oligonucleotide
acuaucgaacaguuccugg

SEQ ID NO: 362900 - RNA, 19 nt, Artificial Sequence
  Description of Artificial Sequence: Synthetic oligonucleotide
cauuuaccagcucugacac

SEQ ID NO: 362901 - RNA, 19 nt, Artificial Sequence
  Description of Artificial Sequence: Synthetic oligonucleotide
aauuacguguuggccaggg

SEQ ID NO: 362902 - RNA, 19 nt, Artificial Sequence
  Description of Artificial Sequence: Synthetic oligonucleotide
aucuccuaacacuuccuac

SEQ ID NO: 362903 - RNA, 19 nt, Artificial Sequence
  Description of Artificial Sequence: Synthetic oligonucleotide
ugagaaggucaauuuaaac

SEQ ID NO: 362904 - RNA, 19 nt, Artificial Sequence
  Description of Artificial Sequence: Synthetic oligonucleotide
aaacguguuguguuucaca

SEQ ID NO: 362905 - RNA, 19 nt, Artificial Sequence
  Description of Artificial Sequence: Synthetic oligonucleotide
aaaacguguuguguuucac

SEQ ID NO: 362906 - RNA, 19 nt, Artificial Sequence
  Description of Artificial Sequence: Synthetic oligonucleotide
acauguuaacaaaauauca

SEQ ID NO: 362907 - RNA, 19 nt, Artificial Sequence
  Description of Artificial Sequence: Synthetic oligonucleotide
aauaucagcuaagcuggag

SEQ ID NO: 362908 - RNA, 19 nt, Artificial Sequence
  Description of Artificial Sequence: Synthetic oligonucleotide
ugguauugagcacaauuaa

SEQ ID NO: 362909 - RNA, 19 nt, Artificial Sequence
  Description of Artificial Sequence: Synthetic oligonucleotide
gagaguguggggcagccag

SEQ ID NO: 362910 - RNA, 19 nt, Artificial Sequence
  Description of Artificial Sequence: Synthetic oligonucleotide
uguuccuaucuccucaccu

SEQ ID NO: 362911 - RNA, 19 nt, Artificial Sequence
  Description of Artificial Sequence: Synthetic oligonucleotide
uagaaacaaggcacgaagu

SEQ ID NO: 362912 - RNA, 19 nt, Artificial Sequence
  Description of Artificial Sequence: Synthetic oligonucleotide
aggaaugucaauaaauuau

SEQ ID NO: 362913 - RNA, 19 nt, Artificial Sequence
  Description of Artificial Sequence: Synthetic oligonucleotide
aaacgagaggagguaagag

SEQ ID NO: 362914 - RNA, 19 nt, Artificial Sequence
  Description of Artificial Sequence: Synthetic oligonucleotide
auuaugaucaaaauacauu

SEQ ID NO: 362915 - RNA, 19 nt, Artificial Sequence
  Description of Artificial Sequence: Synthetic oligonucleotide
gaagggucuagggagaaug

SEQ ID NO: 362916 - RNA, 19 nt, Artificial Sequence
  Description of Artificial Sequence: Synthetic oligonucleotide
uuccuaucuccucaccuag

SEQ ID NO: 362917 - RNA, 19 nt, Artificial Sequence
  Description of Artificial Sequence: Synthetic oligonucleotide
aaccuagguaauuuagaaa

SEQ ID NO: 362918 - RNA, 19 nt, Artificial Sequence
  Description of Artificial Sequence: Synthetic oligonucleotide
agcaucgcaaccuuccuca

SEQ ID NO: 362919 - RNA, 19 nt, Artificial Sequence
  Description of Artificial Sequence: Synthetic oligonucleotide
uaggaaugucaauaaauua

SEQ ID NO: 362920 - RNA, 19 nt, Artificial Sequence
  Description of Artificial Sequence: Synthetic oligonucleotide
aggggaauuaagugggcag

SEQ ID NO: 362921 - RNA, 19 nt, Artificial Sequence
  Description of Artificial Sequence: Synthetic oligonucleotide
auaacccacacaugcgcuc

SEQ ID NO: 362922 - RNA, 19 nt, Artificial Sequence
  Description of Artificial Sequence: Synthetic oligonucleotide
ccaagcaucuuccugaacc

SEQ ID NO: 362923 - RNA, 19 nt, Artificial Sequence
  Description of Artificial Sequence: Synthetic oligonucleotide
uuuuggcuagcccacuuaa

SEQ ID NO: 362924 - RNA, 19 nt, Artificial Sequence
  Description of Artificial Sequence: Synthetic oligonucleotide
ugcucacauauuuugccca

SEQ ID NO: 362925 - RNA, 19 nt, Artificial Sequence
  Description of Artificial Sequence: Synthetic oligonucleotide
aguaagccagaauguaucu

SEQ ID NO: 362926 - RNA, 19 nt, Artificial Sequence
  Description of Artificial Sequence: Synthetic oligonucleotide
guauugagcacaauuaaaa

SEQ ID NO: 362927 - RNA, 19 nt, Artificial Sequence
  Description of Artificial Sequence: Synthetic oligonucleotide
gauagauugaggguaucca

SEQ ID NO: 362928 - RNA, 19 nt, Artificial Sequence
  Description of Artificial Sequence: Synthetic oligonucleotide
aaggggaacaugaguacag

SEQ ID NO: 362929 - RNA, 19 nt, Artificial Sequence
  Description of Artificial Sequence: Synthetic oligonucleotide
ucuagggaaucugaugucu

SEQ ID NO: 362930 - RNA, 19 nt, Artificial Sequence
  Description of Artificial Sequence: Synthetic oligonucleotide
cuagggagaaugacacagg

SEQ ID NO: 362931 - RNA, 19 nt, Artificial Sequence
  Description of Artificial Sequence: Synthetic oligonucleotide
gacgcugugcugcuccugg

SEQ ID NO: 362932 - RNA, 19 nt, Artificial Sequence
  Description of Artificial Sequence: Synthetic oligonucleotide
cuacaauuacguguuggcc

SEQ ID NO: 362933 - RNA, 19 nt, Artificial Sequence
  Description of Artificial Sequence: Synthetic oligonucleotide
ucacuaucgaacaguuccu

SEQ ID NO: 362934 - RNA, 19 nt, Artificial Sequence
  Description of Artificial Sequence: Synthetic oligonucleotide
aauaacccacacaugcgcu

SEQ ID NO: 362935 - RNA, 19 nt, Artificial Sequence
  Description of Artificial Sequence: Synthetic oligonucleotide
aaggcacgaagucccuggg

SEQ ID NO: 362936 - RNA, 19 nt, Artificial Sequence
  Description of Artificial Sequence: Synthetic oligonucleotide
aagguagguagcaacuuga

SEQ ID NO: 362937 - RNA, 19 nt, Artificial Sequence
  Description of Artificial Sequence: Synthetic oligonucleotide
agagacgacauuccugccu

SEQ ID NO: 362938 - RNA, 19 nt, Artificial Sequence
  Description of Artificial Sequence: Synthetic oligonucleotide
cuggcgauuucuucugggg

SEQ ID NO: 362939 - RNA, 19 nt, Artificial Sequence
  Description of Artificial Sequence: Synthetic oligonucleotide
gaagccaacucacuaucga

SEQ ID NO: 362940 - RNA, 19 nt, Artificial Sequence
  Description of Artificial Sequence: Synthetic oligonucleotide
caagauuggccuucaucag

SEQ ID NO: 362941 - RNA, 19 nt, Artificial Sequence
  Description of Artificial Sequence: Synthetic oligonucleotide
cagucaucaucacaaauca

SEQ ID NO: 362942 - RNA, 19 nt, Artificial Sequence
  Description of Artificial Sequence: Synthetic oligonucleotide
gggaguagaaacaaggcac

SEQ ID NO: 362943 - RNA, 19 nt, Artificial Sequence
  Description of Artificial Sequence: Synthetic oligonucleotide
agccaacucacuaucgaac

SEQ ID NO: 362944 - RNA, 19 nt, Artificial Sequence
  Description of Artificial Sequence: Synthetic oligonucleotide
aaacgagcccugugaguag

SEQ ID NO: 362945 - RNA, 19 nt, Artificial Sequence
  Description of Artificial Sequence: Synthetic oligonucleotide
uggcuagcccacuuaaugu

SEQ ID NO: 362946 - RNA, 19 nt, Artificial Sequence
  Description of Artificial Sequence: Synthetic oligonucleotide
ucgaaaucaucaagagcac

SEQ ID NO: 362947 - RNA, 19 nt, Artificial Sequence
  Description of Artificial Sequence: Synthetic oligonucleotide
ucuaaaacgagaggaggua

SEQ ID NO: 362948 - RNA, 19 nt, Artificial Sequence
  Description of Artificial Sequence: Synthetic oligonucleotide
gagguaagaggacagucaa

SEQ ID NO: 362949 - RNA, 19 nt, Artificial Sequence
  Description of Artificial Sequence: Synthetic oligonucleotide
cucaaaacgagcccuguga

SEQ ID NO: 362950 - RNA, 19 nt, Artificial Sequence
  Description of Artificial Sequence: Synthetic oligonucleotide
uaagugcaaaauuccuuuc

SEQ ID NO: 362951 - RNA, 19 nt, Artificial Sequence
  Description of Artificial Sequence: Synthetic oligonucleotide
ugagaucuagcaccgccuc

SEQ ID NO: 362952 - RNA, 19 nt, Artificial Sequence
  Description of Artificial Sequence: Synthetic oligonucleotide
gaaagaaccaagguaggua

SEQ ID NO: 362953 - RNA, 19 nt, Artificial Sequence
  Description of Artificial Sequence: Synthetic oligonucleotide
cuaucgaacaguuccugga

SEQ ID NO: 362954 - RNA, 19 nt, Artificial Sequence
  Description of Artificial Sequence: Synthetic oligonucleotide
gggcccgauagauugaggg

SEQ ID NO: 362955 - RNA, 19 nt, Artificial Sequence
  Description of Artificial Sequence: Synthetic oligonucleotide
auauuuugcccaugacgcu

SEQ ID NO: 362956 - RNA, 19 nt, Artificial Sequence
  Description of Artificial Sequence: Synthetic oligonucleotide
acgagaggagguaagagga

SEQ ID NO: 362957 - RNA, 19 nt, Artificial Sequence
  Description of Artificial Sequence: Synthetic oligonucleotide
ggaguagaaacaaggcacg

SEQ ID NO: 362958 - RNA, 19 nt, Artificial Sequence
  Description of Artificial Sequence: Synthetic oligonucleotide
ucccgguccgcuucgaccc

SEQ ID NO: 362959 - RNA, 19 nt, Artificial Sequence
  Description of Artificial Sequence: Synthetic oligonucleotide
aaggggaauuaagugggca

SEQ ID NO: 362960 - RNA, 19 nt, Artificial Sequence
  Description of Artificial Sequence: Synthetic oligonucleotide
uuuccgugaucuccuucag

SEQ ID NO: 362961 - RNA, 19 nt, Artificial Sequence
  Description of Artificial Sequence: Synthetic oligonucleotide
uggcgauuucuucuggggu

SEQ ID NO: 362962 - RNA, 19 nt, Artificial Sequence
  Description of Artificial Sequence: Synthetic oligonucleotide
gcuagguggacuaaaauga

SEQ ID NO: 362963 - RNA, 19 nt, Artificial Sequence
  Description of Artificial Sequence: Synthetic oligonucleotide
agaaugacacaggaguaga

SEQ ID NO: 362964 - RNA, 19 nt, Artificial Sequence
  Description of Artificial Sequence: Synthetic oligonucleotide
cagagagcucgaaaugaag

SEQ ID NO: 362965 - RNA, 19 nt, Artificial Sequence
  Description of Artificial Sequence: Synthetic oligonucleotide
aggggaacaugaguacagc

SEQ ID NO: 362966 - RNA, 19 nt, Artificial Sequence
  Description of Artificial Sequence: Synthetic oligonucleotide
caccgccucaaaacgagcc

SEQ ID NO: 362967 - RNA, 19 nt, Artificial Sequence
  Description of Artificial Sequence: Synthetic oligonucleotide
uuagaccuacugagaaggu

SEQ ID NO: 362968 - RNA, 19 nt, Artificial Sequence
  Description of Artificial Sequence: Synthetic oligonucleotide
agagcucgaaaugaaggca

SEQ ID NO: 362969 - RNA, 19 nt, Artificial Sequence
  Description of Artificial Sequence: Synthetic oligonucleotide
cugacacuacaauuacgug

SEQ ID NO: 362970 - RNA, 19 nt, Artificial Sequence
  Description of Artificial Sequence: Synthetic oligonucleotide
augguauugagcacaauua

SEQ ID NO: 362971 - RNA, 19 nt, Artificial Sequence
  Description of Artificial Sequence: Synthetic oligonucleotide
guagccucgcugucugugg

SEQ ID NO: 362972 - RNA, 19 nt, Artificial Sequence
  Description of Artificial Sequence: Synthetic oligonucleotide
agggucuagggagaaugac

SEQ ID NO: 362973 - RNA, 19 nt, Artificial Sequence
  Description of Artificial Sequence: Synthetic oligonucleotide
ggacggguacaguacaucc

SEQ ID NO: 362974 - RNA, 19 nt, Artificial Sequence
  Description of Artificial Sequence: Synthetic oligonucleotide
gucaaggggccaaggaagg

SEQ ID NO: 362975 - RNA, 19 nt, Artificial Sequence
  Description of Artificial Sequence: Synthetic oligonucleotide
gaucagacacugcucgcca

SEQ ID NO: 362976 - RNA, 19 nt, Artificial Sequence
  Description of Artificial Sequence: Synthetic oligonucleotide
cuguucuggagggauagac

SEQ ID NO: 362977 - RNA, 19 nt, Artificial Sequence
  Description of Artificial Sequence: Synthetic oligonucleotide
cucgaaaugaaggcaagga

SEQ ID NO: 362978 - RNA, 19 nt, Artificial Sequence
  Description of Artificial Sequence: Synthetic oligonucleotide
agugaacuagacagcuagg

SEQ ID NO: 362979 - RNA, 19 nt, Artificial Sequence
  Description of Artificial Sequence: Synthetic oligonucleotide
uugaggguauccaggucaa

SEQ ID NO: 362980 - RNA, 19 nt, Artificial Sequence
  Description of Artificial Sequence: Synthetic oligonucleotide
cuacucugcagcuuauaga

SEQ ID NO: 362981 - RNA, 19 nt, Artificial Sequence
  Description of Artificial Sequence: Synthetic oligonucleotide
ggucuagggagaaugacac

SEQ ID NO: 362982 - RNA, 19 nt, Artificial Sequence
  Description of Artificial Sequence: Synthetic oligonucleotide
caccuggugggcccgauag

SEQ ID NO: 362983 - RNA, 19 nt, Artificial Sequence
  Description of Artificial Sequence: Synthetic oligonucleotide
agauccaagagagggagua

SEQ ID NO: 362984 - RNA, 19 nt, Artificial Sequence
  Description of Artificial Sequence: Synthetic oligonucleotide
ucaugguccuuagaccuac

SEQ ID NO: 362985 - RNA, 19 nt, Artificial Sequence
  Description of Artificial Sequence: Synthetic oligonucleotide
gaagcccugccuaauagaa

SEQ ID NO: 362986 - RNA, 19 nt, Artificial Sequence
  Description of Artificial Sequence: Synthetic oligonucleotide
gagauguggugacaaaccu

SEQ ID NO: 362987 - RNA, 19 nt, Artificial Sequence
  Description of Artificial Sequence: Synthetic oligonucleotide
ggacucagggaggaaaacg

SEQ ID NO: 362988 - RNA, 19 nt, Artificial Sequence
  Description of Artificial Sequence: Synthetic oligonucleotide
uauuggcaguucaggcccc

SEQ ID NO: 362989 - RNA, 19 nt, Artificial Sequence
  Description of Artificial Sequence: Synthetic oligonucleotide
aacucacuaucgaacaguu

SEQ ID NO: 362990 - RNA, 19 nt, Artificial Sequence
  Description of Artificial Sequence: Synthetic oligonucleotide
ugccccaaguccuguaacu

SEQ ID NO: 362991 - RNA, 19 nt, Artificial Sequence
  Description of Artificial Sequence: Synthetic oligonucleotide
gauccaagagagggaguag

SEQ ID NO: 362992 - RNA, 19 nt, Artificial Sequence
  Description of Artificial Sequence: Synthetic oligonucleotide
uuuggcuagcccacuuaau

SEQ ID NO: 362993 - RNA, 19 nt, Artificial Sequence
  Description of Artificial Sequence: Synthetic oligonucleotide
ugcgcucagaguauuuauu

SEQ ID NO: 362994 - RNA, 19 nt, Artificial Sequence
  Description of Artificial Sequence: Synthetic oligonucleotide
aggggcuggaguaaaauaa

SEQ ID NO: 362995 - RNA, 19 nt, Artificial Sequence
  Description of Artificial Sequence: Synthetic oligonucleotide
ggguacaguacauccuuag

SEQ ID NO: 362996 - RNA, 19 nt, Artificial Sequence
  Description of Artificial Sequence: Synthetic oligonucleotide
uagcaccgccucaaaacga

SEQ ID NO: 362997 - RNA, 19 nt, Artificial Sequence
  Description of Artificial Sequence: Synthetic oligonucleotide
acggguacaguacauccuu

SEQ ID NO: 362998 - RNA, 19 nt, Artificial Sequence
  Description of Artificial Sequence: Synthetic oligonucleotide
cagaccccgagucugggug

SEQ ID NO: 362999 - RNA, 19 nt, Artificial Sequence
  Description of Artificial Sequence: Synthetic oligonucleotide
aucgaacaguuccuggaaa

SEQ ID NO: 363000 - RNA, 19 nt, Artificial Sequence
  Description of Artificial Sequence: Synthetic oligonucleotide
uccugaaccaaggauucua

SEQ ID NO: 363001 - RNA, 19 nt, Artificial Sequence
  Description of Artificial Sequence: Synthetic oligonucleotide
gacacuacaauuacguguu

SEQ ID NO: 363002 - RNA, 19 nt, Artificial Sequence
  Description of Artificial Sequence: Synthetic oligonucleotide
auagacuccuggugacucu

SEQ ID NO: 363003 - RNA, 19 nt, Artificial Sequence
  Description of Artificial Sequence: Synthetic oligonucleotide
ccuacucugcagcuuauag

SEQ ID NO: 363004 - RNA, 19 nt, Artificial Sequence
  Description of Artificial Sequence: Synthetic oligonucleotide
cuagcccacuuaaugucuc

SEQ ID NO: 363005 - RNA, 19 nt, Artificial Sequence
  Description of Artificial Sequence: Synthetic oligonucleotide
aggguaagcuacauuuucu

SEQ ID NO: 363006 - RNA, 19 nt, Artificial Sequence
  Description of Artificial Sequence: Synthetic oligonucleotide
acguguuguguuucacaug

SEQ ID NO: 363007 - RNA, 19 nt, Artificial Sequence
  Description of Artificial Sequence: Synthetic oligonucleotide
agccagaauguaucugggu

SEQ ID NO: 363008 - RNA, 19 nt, Artificial Sequence
  Description of Artificial Sequence: Synthetic oligonucleotide
gacgacauuccugccucag

SEQ ID NO: 363009 - RNA, 19 nt, Artificial Sequence
  Description of Artificial Sequence: Synthetic oligonucleotide
acccaaaccagagcuguug

SEQ ID NO: 363010 - RNA, 19 nt, Artificial Sequence
  Description of Artificial Sequence: Synthetic oligonucleotide
gggaaucugaugucucaag

SEQ ID NO: 363011 - RNA, 19 nt, Artificial Sequence
  Description of Artificial Sequence: Synthetic oligonucleotide
agcaccgccucaaaacgag

SEQ ID NO: 363012 - RNA, 19 nt, Artificial Sequence
  Description of Artificial Sequence: Synthetic oligonucleotide
ugucaagcuuuuguaggaa

SEQ ID NO: 363013 - RNA, 19 nt, Artificial Sequence
  Description of Artificial Sequence: Synthetic oligonucleotide
uucagaccccgagucuggg

SEQ ID NO: 363014 - RNA, 19 nt, Artificial Sequence
  Description of Artificial Sequence: Synthetic oligonucleotide
caucgcaaccuuccucagc

SEQ ID NO: 363015 - RNA, 19 nt, Artificial Sequence
  Description of Artificial Sequence: Synthetic oligonucleotide
aguucccaauaguucugcu

SEQ ID NO: 363016 - RNA, 19 nt, Artificial Sequence
  Description of Artificial Sequence: Synthetic oligonucleotide
agggagaaugacacaggag

SEQ ID NO: 363017 - RNA, 19 nt, Artificial Sequence
  Description of Artificial Sequence: Synthetic oligonucleotide
ccccagauccaagagaggg

SEQ ID NO: 363018 - RNA, 19 nt, Artificial Sequence
  Description of Artificial Sequence: Synthetic oligonucleotide
aagggucuagggagaauga

SEQ ID NO: 363019 - RNA, 19 nt, Artificial Sequence
  Description of Artificial Sequence: Synthetic oligonucleotide
aggauucuagggaaucuga

SEQ ID NO: 363020 - RNA, 19 nt, Artificial Sequence
  Description of Artificial Sequence: Synthetic oligonucleotide
guuccuaucuccucaccua

SEQ ID NO: 363021 - RNA, 19 nt, Artificial Sequence
  Description of Artificial Sequence: Synthetic oligonucleotide
augagaucuagcaccgccu

SEQ ID NO: 363022 - RNA, 19 nt, Artificial Sequence
  Description of Artificial Sequence: Synthetic oligonucleotide
gaugccccaaguccuguaa

SEQ ID NO: 363023 - RNA, 19 nt, Artificial Sequence
  Description of Artificial Sequence: Synthetic oligonucleotide
augcgcucagaguauuuau

SEQ ID NO: 363024 - RNA, 19 nt, Artificial Sequence
  Description of Artificial Sequence: Synthetic oligonucleotide
auauggcaaucaugguccu

SEQ ID NO: 363025 - RNA, 19 nt, Artificial Sequence
  Description of Artificial Sequence: Synthetic oligonucleotide
gacucagggaggaaaacgu

SEQ ID NO: 363026 - RNA, 19 nt, Artificial Sequence
  Description of Artificial Sequence: Synthetic oligonucleotide
gauggggaggauguuccca

SEQ ID NO: 363027 - RNA, 19 nt, Artificial Sequence
  Description of Artificial Sequence: Synthetic oligonucleotide
gagcucgaaaugaaggcaa

SEQ ID NO: 363028 - RNA, 19 nt, Artificial Sequence
  Description of Artificial Sequence: Synthetic oligonucleotide
agguagguagcaacuugag

SEQ ID NO: 363029 - RNA, 19 nt, Artificial Sequence
  Description of Artificial Sequence: Synthetic oligonucleotide
aggucaagagcuggguuca

SEQ ID NO: 363030 - RNA, 19 nt, Artificial Sequence
  Description of Artificial Sequence: Synthetic oligonucleotide
ucuuaggacucagcuccug

SEQ ID NO: 363031 - RNA, 19 nt, Artificial Sequence
  Description of Artificial Sequence: Synthetic oligonucleotide
gcuggaguaaaauaagaau

SEQ ID NO: 363032 - RNA, 19 nt, Artificial Sequence
  Description of Artificial Sequence: Synthetic oligonucleotide
gagaucuagcaccgccuca

SEQ ID NO: 363033 - RNA, 19 nt, Artificial Sequence
  Description of Artificial Sequence: Synthetic oligonucleotide
uguugagaguuugcaucac

SEQ ID NO: 363034 - RNA, 19 nt, Artificial Sequence
  Description of Artificial Sequence: Synthetic oligonucleotide
cuaaaacgagaggagguaa

SEQ ID NO: 363035 - RNA, 19 nt, Artificial Sequence
  Description of Artificial Sequence: Synthetic oligonucleotide
acgacauuccugccucagu

SEQ ID NO: 363036 - RNA, 19 nt, Artificial Sequence
  Description of Artificial Sequence: Synthetic oligonucleotide
ccuuagaccuacugagaag

SEQ ID NO: 363037 - RNA, 19 nt, Artificial Sequence
  Description of Artificial Sequence: Synthetic oligonucleotide
gguauugagcacaauuaaa

SEQ ID NO: 363038 - RNA, 19 nt, Artificial Sequence
  Description of Artificial Sequence: Synthetic oligonucleotide
ucgcaaccuuccucagcgg

SEQ ID NO: 363039 - RNA, 19 nt, Artificial Sequence
  Description of Artificial Sequence: Synthetic oligonucleotide
acacuacaauuacguguug

SEQ ID NO: 363040 - RNA, 19 nt, Artificial Sequence
  Description of Artificial Sequence: Synthetic oligonucleotide
agaauguaucuggguagca

SEQ ID NO: 363041 - RNA, 19 nt, Artificial Sequence
  Description of Artificial Sequence: Synthetic oligonucleotide
ggcuagcccacuuaauguc

SEQ ID NO: 363042 - RNA, 19 nt, Artificial Sequence
  Description of Artificial Sequence: Synthetic oligonucleotide
agcucgaaaugaaggcaag

SEQ ID NO: 363043 - RNA, 19 nt, Artificial Sequence
  Description of Artificial Sequence: Synthetic oligonucleotide
gugaacuagacagcuaggu

SEQ ID NO: 363044 - RNA, 19 nt, Artificial Sequence
  Description of Artificial Sequence: Synthetic oligonucleotide
ugguagaaacuagcauaac

SEQ ID NO: 363045 - RNA, 19 nt, Artificial Sequence
  Description of Artificial Sequence: Synthetic oligonucleotide
gcucgaaaugaaggcaagg

SEQ ID NO: 363046 - RNA, 19 nt, Artificial Sequence
  Description of Artificial Sequence: Synthetic oligonucleotide
gggauagacuccuggugac

SEQ ID NO: 363047 - RNA, 19 nt, Artificial Sequence
  Description of Artificial Sequence: Synthetic oligonucleotide
ccugugaguagccucgcug

SEQ ID NO: 363048 - RNA, 19 nt, Artificial Sequence
  Description of Artificial Sequence: Synthetic oligonucleotide
ccuuuaggcaagaaguaaa

SEQ ID NO: 363049 - RNA, 19 nt, Artificial Sequence
  Description of Artificial Sequence: Synthetic oligonucleotide
caucagucacagugguuca

SEQ ID NO: 363050 - RNA, 19 nt, Artificial Sequence
  Description of Artificial Sequence: Synthetic oligonucleotide
agggaaucugaugucucaa

SEQ ID NO: 363051 - RNA, 19 nt, Artificial Sequence
  Description of Artificial Sequence: Synthetic oligonucleotide
ccaacucacuaucgaacag

SEQ ID NO: 363052 - RNA, 19 nt, Artificial Sequence
  Description of Artificial Sequence: Synthetic oligonucleotide
ggacuaaaaugaauaucca

SEQ ID NO: 363053 - RNA, 19 nt, Artificial Sequence
  Description of Artificial Sequence: Synthetic oligonucleotide
ccuggcgauuucuucuggg

SEQ ID NO: 363054 - RNA, 19 nt, Artificial Sequence
  Description of Artificial Sequence: Synthetic oligonucleotide
ggcgaagagggcaucuuug

SEQ ID NO: 363055 - RNA, 19 nt, Artificial Sequence
  Description of Artificial Sequence: Synthetic oligonucleotide
ugcccaugacgcugugcug

SEQ ID NO: 363056 - RNA, 19 nt, Artificial Sequence
  Description of Artificial Sequence: Synthetic oligonucleotide
gccauauagaccauuauuu

SEQ ID NO: 363057 - RNA, 19 nt, Artificial Sequence
  Description of Artificial Sequence: Synthetic oligonucleotide
gcucccagagacgacauuc

SEQ ID NO: 363058 - RNA, 19 nt, Artificial Sequence
  Description of Artificial Sequence: Synthetic oligonucleotide
auuaagugggcagcaccua

SEQ ID NO: 363059 - RNA, 19 nt, Artificial Sequence
  Description of Artificial Sequence: Synthetic oligonucleotide
agaccccgagucuggguga

SEQ ID NO: 363060 - RNA, 19 nt, Artificial Sequence
  Description of Artificial Sequence: Synthetic oligonucleotide
cugcaguggcuugggaagc

SEQ ID NO: 363061 - RNA, 19 nt, Artificial Sequence
  Description of Artificial Sequence: Synthetic oligonucleotide
aggcgaagagggcaucuuu

SEQ ID NO: 363062 - RNA, 19 nt, Artificial Sequence
  Description of Artificial Sequence: Synthetic oligonucleotide
cccagagacgacauuccug

SEQ ID NO: 363063 - RNA, 19 nt, Artificial Sequence
  Description of Artificial Sequence: Synthetic oligonucleotide
cagacaugccugaguucug

SEQ ID NO: 363064 - RNA, 19 nt, Artificial Sequence
  Description of Artificial Sequence: Synthetic oligonucleotide
aggcacgaagucccuggga

SEQ ID NO: 363065 - RNA, 19 nt, Artificial Sequence
  Description of Artificial Sequence: Synthetic oligonucleotide
gguggacuaaaaugaauau

SEQ ID NO: 363066 - RNA, 19 nt, Artificial Sequence
  Description of Artificial Sequence: Synthetic oligonucleotide
gggucaugguagaaacuag

SEQ ID NO: 363067 - RNA, 19 nt, Artificial Sequence
  Description of Artificial Sequence: Synthetic oligonucleotide
acgagcccugugaguagcc

SEQ ID NO: 363068 - RNA, 19 nt, Artificial Sequence
  Description of Artificial Sequence: Synthetic oligonucleotide
acaugaguacagccauaua

SEQ ID NO: 363069 - RNA, 19 nt, Artificial Sequence
  Description of Artificial Sequence: Synthetic oligonucleotide
gggucuagggagaaugaca

SEQ ID NO: 363070 - RNA, 19 nt, Artificial Sequence
  Description of Artificial Sequence: Synthetic oligonucleotide
ccggccagcucuuuuggag

SEQ ID NO: 363071 - RNA, 19 nt, Artificial Sequence
  Description of Artificial Sequence: Synthetic oligonucleotide
caauuacguguuggccagg

SEQ ID NO: 363072 - RNA, 19 nt, Artificial Sequence
  Description of Artificial Sequence: Synthetic oligonucleotide
ggaaugucaauaaauuauu

SEQ ID NO: 363073 - RNA, 19 nt, Artificial Sequence
  Description of Artificial Sequence: Synthetic oligonucleotide
cgauagauugaggguaucc

SEQ ID NO: 363074 - RNA, 19 nt, Artificial Sequence
  Description of Artificial Sequence: Synthetic oligonucleotide
gggaauuaagugggcagca

SEQ ID NO: 363075 - RNA, 19 nt, Artificial Sequence
  Description of Artificial Sequence: Synthetic oligonucleotide
gagucugggugauuaugau

SEQ ID NO: 363076 - RNA, 19 nt, Artificial Sequence
  Description of Artificial Sequence: Synthetic oligonucleotide
ccucaaacugcucacauau

SEQ ID NO: 363077 - RNA, 19 nt, Artificial Sequence
  Description of Artificial Sequence: Synthetic oligonucleotide
caacucacuaucgaacagu

SEQ ID NO: 363078 - RNA, 19 nt, Artificial Sequence
  Description of Artificial Sequence: Synthetic oligonucleotide
caaaacgagcccugugagu

SEQ ID NO: 363079 - RNA, 19 nt, Artificial Sequence
  Description of Artificial Sequence: Synthetic oligonucleotide
agcaugguauugagcacaa

SEQ ID NO: 363080 - RNA, 19 nt, Artificial Sequence
  Description of Artificial Sequence: Synthetic oligonucleotide
gcgcucagaguauuuauua

SEQ ID NO: 363081 - RNA, 19 nt, Artificial Sequence
  Description of Artificial Sequence: Synthetic oligonucleotide
cagggacggguacaguaca

SEQ ID NO: 363082 - RNA, 19 nt, Artificial Sequence
  Description of Artificial Sequence: Synthetic oligonucleotide
cccacacaugcgcucagag

SEQ ID NO: 363083 - RNA, 19 nt, Artificial Sequence
  Description of Artificial Sequence: Synthetic oligonucleotide
gacggguacaguacauccu

SEQ ID NO: 363084 - RNA, 19 nt, Artificial Sequence
  Description of Artificial Sequence: Synthetic oligonucleotide
cuagacagcuagguggacu

SEQ ID NO: 363085 - RNA, 19 nt, Artificial Sequence
  Description of Artificial Sequence: Synthetic oligonucleotide
gaccuacugagaaggucaa

SEQ ID NO: 363086 - RNA, 19 nt, Artificial Sequence
  Description of Artificial Sequence: Synthetic oligonucleotide
cacgaagucccugggaaua

SEQ ID NO: 363087 - RNA, 19 nt, Artificial Sequence
  Description of Artificial Sequence: Synthetic oligonucleotide
acgaagucccugggaauaa

SEQ ID NO: 363088 - RNA, 19 nt, Artificial Sequence
  Description of Artificial Sequence: Synthetic oligonucleotide
ugugggcgucucugccuca

SEQ ID NO: 363089 - RNA, 19 nt, Artificial Sequence
  Description of Artificial Sequence: Synthetic oligonucleotide
caugcgcucagaguauuua

SEQ ID NO: 363090 - RNA, 19 nt, Artificial Sequence
  Description of Artificial Sequence: Synthetic oligonucleotide
acacaugcgcucagaguau

SEQ ID NO: 363091 - RNA, 19 nt, Artificial Sequence
  Description of Artificial Sequence: Synthetic oligonucleotide
cgcuucgaccccagcaucg

SEQ ID NO: 363092 - RNA, 19 nt, Artificial Sequence
  Description of Artificial Sequence: Synthetic oligonucleotide
gucucaaguaagccagaau

SEQ ID NO: 363093 - RNA, 19 nt, Artificial Sequence
  Description of Artificial Sequence: Synthetic oligonucleotide
gggcuggaguaaaauaaga

SEQ ID NO: 363094 - RNA, 19 nt, Artificial Sequence
  Description of Artificial Sequence: Synthetic oligonucleotide
ggaacaagauuggccuuca

SEQ ID NO: 363095 - RNA, 19 nt, Artificial Sequence
  Description of Artificial Sequence: Synthetic oligonucleotide
cgagucugggugauuauga

SEQ ID NO: 363096 - RNA, 19 nt, Artificial Sequence
  Description of Artificial Sequence: Synthetic oligonucleotide
caucaucacaaaucagcuu

SEQ ID NO: 363097 - RNA, 19 nt, Artificial Sequence
  Description of Artificial Sequence: Synthetic oligonucleotide
cuccucaccuagccuuguc

SEQ ID NO: 363098 - RNA, 19 nt, Artificial Sequence
  Description of Artificial Sequence: Synthetic oligonucleotide
cugggugauuaugaucaaa

SEQ ID NO: 363099 - RNA, 19 nt, Artificial Sequence
  Description of Artificial Sequence: Synthetic oligonucleotide
cuaucuccucaccuagccu

SEQ ID NO: 363100 - RNA, 19 nt, Artificial Sequence
  Description of Artificial Sequence: Synthetic oligonucleotide
aucaugguccuuagaccua

SEQ ID NO: 363101 - RNA, 19 nt, Artificial Sequence
  Description of Artificial Sequence: Synthetic oligonucleotide
ugggcgucucugccucaaa

SEQ ID NO: 363102 - RNA, 19 nt, Artificial Sequence
  Description of Artificial Sequence: Synthetic oligonucleotide
ggguauccaggucaaaguu

SEQ ID NO: 363103 - RNA, 19 nt, Artificial Sequence
  Description of Artificial Sequence: Synthetic oligonucleotide
gcccgauagauugagggua

SEQ ID NO: 363104 - RNA, 19 nt, Artificial Sequence
  Description of Artificial Sequence: Synthetic oligonucleotide
ggacagucaaggggccaag

SEQ ID NO: 363105 - RNA, 19 nt, Artificial Sequence
  Description of Artificial Sequence: Synthetic oligonucleotide
ccugccuaauagaaacaaa

SEQ ID NO: 363106 - RNA, 19 nt, Artificial Sequence
  Description of Artificial Sequence: Synthetic oligonucleotide
gcuucgaccccagcaucgc

SEQ ID NO: 363107 - RNA, 19 nt, Artificial Sequence
  Description of Artificial Sequence: Synthetic oligonucleotide
ccgagucugggugauuaug

SEQ ID NO: 363108 - RNA, 19 nt, Artificial Sequence
  Description of Artificial Sequence: Synthetic oligonucleotide
agggacggguacaguacau

SEQ ID NO: 363109 - RNA, 19 nt, Artificial Sequence
  Description of Artificial Sequence: Synthetic oligonucleotide
cacuuccuacucugcagcu

SEQ ID NO: 363110 - RNA, 19 nt, Artificial Sequence
  Description of Artificial Sequence: Synthetic oligonucleotide
ccucaccuagccuugucaa

SEQ ID NO: 363111 - RNA, 19 nt, Artificial Sequence
  Description of Artificial Sequence: Synthetic oligonucleotide
gggacggguacaguacauc

SEQ ID NO: 363112 - RNA, 19 nt, Artificial Sequence
  Description of Artificial Sequence: Synthetic oligonucleotide
agacagcuagguggacuaa

SEQ ID NO: 363113 - RNA, 19 nt, Artificial Sequence
  Description of Artificial Sequence: Synthetic oligonucleotide
ggcccgauagauugagggu

SEQ ID NO: 363114 - RNA, 19 nt, Artificial Sequence
  Description of Artificial Sequence: Synthetic oligonucleotide
ggauucuagggaaucugau

SEQ ID NO: 363115 - RNA, 19 nt, Artificial Sequence
  Description of Artificial Sequence: Synthetic oligonucleotide
cagcuagguggacuaaaau

SEQ ID NO: 363116 - RNA, 19 nt, Artificial Sequence
  Description of Artificial Sequence: Synthetic oligonucleotide
gguagcauggccacucauu

SEQ ID NO: 363117 - RNA, 19 nt, Artificial Sequence
  Description of Artificial Sequence: Synthetic oligonucleotide
gcuagcccacuuaaugucu

SEQ ID NO: 363118 - RNA, 19 nt, Artificial Sequence
  Description of Artificial Sequence: Synthetic oligonucleotide
cucaaacugcucacauauu

SEQ ID NO: 363119 - RNA, 19 nt, Artificial Sequence
  Description of Artificial Sequence: Synthetic oligonucleotide
cagauccaagagagggagu

SEQ ID NO: 363120 - RNA, 19 nt, Artificial Sequence
  Description of Artificial Sequence: Synthetic oligonucleotide
cccugccuaauagaaacaa

SEQ ID NO: 363121 - RNA, 19 nt, Artificial Sequence
  Description of Artificial Sequence: Synthetic oligonucleotide
gcaccgccucaaaacgagc

SEQ ID NO: 363122 - RNA, 19 nt, Artificial Sequence
  Description of Artificial Sequence: Synthetic oligonucleotide
ugcucgccauuggcaccug

SEQ ID NO: 363123 - RNA, 19 nt, Artificial Sequence
  Description of Artificial Sequence: Synthetic oligonucleotide
caugguccuuagaccuacu

SEQ ID NO: 363124 - RNA, 19 nt, Artificial Sequence
  Description of Artificial Sequence: Synthetic oligonucleotide
cagcaccuagggacaggaa

SEQ ID NO: 363125 - RNA, 19 nt, Artificial Sequence
  Description of Artificial Sequence: Synthetic oligonucleotide
gaggcgaagagggcaucuu

SEQ ID NO: 363126 - RNA, 19 nt, Artificial Sequence
  Description of Artificial Sequence: Synthetic oligonucleotide
ggucaagagcuggguucac

SEQ ID NO: 363127 - RNA, 19 nt, Artificial Sequence
  Description of Artificial Sequence: Synthetic oligonucleotide
gcccugccuaauagaaaca

SEQ ID NO: 363128 - RNA, 19 nt, Artificial Sequence
  Description of Artificial Sequence: Synthetic oligonucleotide
ggagaguguggggcagcca

SEQ ID NO: 363129 - RNA, 19 nt, Artificial Sequence
  Description of Artificial Sequence: Synthetic oligonucleotide
ccgauagauugaggguauc

SEQ ID NO: 363130 - RNA, 19 nt, Artificial Sequence
  Description of Artificial Sequence: Synthetic oligonucleotide
cccgauagauugaggguau

SEQ ID NO: 363131 - RNA, 19 nt, Artificial Sequence
  Description of Artificial Sequence: Synthetic oligonucleotide
caccaccagaagugagaau

SEQ ID NO: 363132 - RNA, 19 nt, Artificial Sequence
  Description of Artificial Sequence: Synthetic oligonucleotide
cacaugcgcucagaguauu

SEQ ID NO: 363133 - RNA, 19 nt, Artificial Sequence
  Description of Artificial Sequence: Synthetic oligonucleotide
gaccccgagucugggugau

SEQ ID NO: 363134 - RNA, 19 nt, Artificial Sequence
  Description of Artificial Sequence: Synthetic oligonucleotide
gggaggcgaagagggcauc

SEQ ID NO: 363135 - RNA, 19 nt, Artificial Sequence
  Description of Artificial Sequence: Synthetic oligonucleotide
guacagccauauagaccau

SEQ ID NO: 363136 - RNA, 19 nt, Artificial Sequence
  Description of Artificial Sequence: Synthetic oligonucleotide
ggaagggucuagggagaau

SEQ ID NO: 363137 - RNA, 19 nt, Artificial Sequence
  Description of Artificial Sequence: Synthetic oligonucleotide
ccgccucaaaacgagcccu

SEQ ID NO: 363138 - RNA, 19 nt, Artificial Sequence
  Description of Artificial Sequence: Synthetic oligonucleotide
gcaccuggugggcccgaua

SEQ ID NO: 363139 - RNA, 19 nt, Artificial Sequence
  Description of Artificial Sequence: Synthetic oligonucleotide
accccgagucugggugauu

SEQ ID NO: 363140 - RNA, 19 nt, Artificial Sequence
  Description of Artificial Sequence: Synthetic oligonucleotide
gccccaggguaagcuacau

SEQ ID NO: 363141 - RNA, 19 nt, Artificial Sequence
  Description of Artificial Sequence: Synthetic oligonucleotide
ccccaggguaagcuacauu

SEQ ID NO: 363142 - RNA, 19 nt, Artificial Sequence
  Description of Artificial Sequence: Synthetic oligonucleotide
uuaagaaagauccaguucu

SEQ ID NO: 363143 - RNA, 19 nt, Artificial Sequence
  Description of Artificial Sequence: Synthetic oligonucleotide
uuaugcauaauauaaaguc

SEQ ID NO: 363144 - RNA, 19 nt, Artificial Sequence
  Description of Artificial Sequence: Synthetic oligonucleotide
uacucugucaauaagagaa

SEQ ID NO: 363145 - RNA, 19 nt, Artificial Sequence
  Description of Artificial Sequence: Synthetic oligonucleotide
uuguuguaaaggaacaugg

SEQ ID NO: 363146 - RNA, 19 nt, Artificial Sequence
  Description of Artificial Sequence: Synthetic oligonucleotide
gauuaaguaaugcuguucc

SEQ ID NO: 363147 - RNA, 19 nt, Artificial Sequence
  Description of Artificial Sequence: Synthetic oligonucleotide
uaaacccagauacucaugg

SEQ ID NO: 363148 - RNA, 19 nt, Artificial Sequence
  Description of Artificial Sequence: Synthetic oligonucleotide
aguaagaggauccucauug

SEQ ID NO: 363149 - RNA, 19 nt, Artificial Sequence
  Description of Artificial Sequence: Synthetic oligonucleotide
uuauggggcucaaagaugg

SEQ ID NO: 363150 - RNA, 19 nt, Artificial Sequence
  Description of Artificial Sequence: Synthetic oligonucleotide
uuuaguuuuagucgauagg

SEQ ID NO: 363151 - RNA, 19 nt, Artificial Sequence
  Description of Artificial Sequence: Synthetic oligonucleotide
uuauuugaggaguaagagg

SEQ ID NO: 363152 - RNA, 19 nt, Artificial Sequence
  Description of Artificial Sequence: Synthetic oligonucleotide
ggggauauaaaguagaugc

SEQ ID NO: 363153 - RNA, 19 nt, Artificial Sequence
  Description of Artificial Sequence: Synthetic oligonucleotide
ucaaaucaagucuaggacc

SEQ ID NO: 363154 - RNA, 19 nt, Artificial Sequence
  Description of Artificial Sequence: Synthetic oligonucleotide
agaggauccucauugaagg

SEQ ID NO: 363155 - RNA, 19 nt, Artificial Sequence
  Description of Artificial Sequence: Synthetic oligonucleotide
uuuguuacggcacaguuau

SEQ ID NO: 363156 - RNA, 19 nt, Artificial Sequence
  Description of Artificial Sequence: Synthetic oligonucleotide
aagagaauuguccuggaga

SEQ ID NO: 363157 - RNA, 19 nt, Artificial Sequence
  Description of Artificial Sequence: Synthetic oligonucleotide
uucaaaucaagucuaggac

SEQ ID NO: 363158 - RNA, 19 nt, Artificial Sequence
  Description of Artificial Sequence: Synthetic oligonucleotide
aaauccaccuagcuugagg

SEQ ID NO: 363159 - RNA, 19 nt, Artificial Sequence
  Description of Artificial Sequence: Synthetic oligonucleotide
aaaccagaagggcaucagc

SEQ ID NO: 363160 - RNA, 19 nt, Artificial Sequence
  Description of Artificial Sequence: Synthetic oligonucleotide
uacccguaauuucugaugg

SEQ ID NO: 363161 - RNA, 19 nt, Artificial Sequence
  Description of Artificial Sequence: Synthetic oligonucleotide
aguuuuagucgauagggag

SEQ ID NO: 363162 - RNA, 19 nt, Artificial Sequence
  Description of Artificial Sequence: Synthetic oligonucleotide
aaauccuuccuccauggca

SEQ ID NO: 363163 - RNA, 19 nt, Artificial Sequence
  Description of Artificial Sequence: Synthetic oligonucleotide
uuuaagaaagauccaguuc

SEQ ID NO: 363164 - RNA, 19 nt, Artificial Sequence
  Description of Artificial Sequence: Synthetic oligonucleotide
uauagcuuggaguuagcag

SEQ ID NO: 363165 - RNA, 19 nt, Artificial Sequence
  Description of Artificial Sequence: Synthetic oligonucleotide
aaugagauugguccuaaaa

SEQ ID NO: 363166 - RNA, 19 nt, Artificial Sequence
  Description of Artificial Sequence: Synthetic oligonucleotide
cacaauuugaagaggcugg

SEQ ID NO: 363167 - RNA, 19 nt, Artificial Sequence
  Description of Artificial Sequence: Synthetic oligonucleotide
uuaaccugggcuuagucac

SEQ ID NO: 363168 - RNA, 19 nt, Artificial Sequence
  Description of Artificial Sequence: Synthetic oligonucleotide
uauuuaugcauaauauaaa

SEQ ID NO: 363169 - RNA, 19 nt, Artificial Sequence
  Description of Artificial Sequence: Synthetic oligonucleotide
gauucucaugucuugagac

SEQ ID NO: 363170 - RNA, 19 nt, Artificial Sequence
  Description of Artificial Sequence: Synthetic oligonucleotide
agauugcacaauuugaaga

SEQ ID NO: 363171 - RNA, 19 nt, Artificial Sequence
  Description of Artificial Sequence: Synthetic oligonucleotide
uucguuuggaaaccuaggc

SEQ ID NO: 363172 - RNA, 19 nt, Artificial Sequence
  Description of Artificial Sequence: Synthetic oligonucleotide
ugaucucgcaaaaugugag

SEQ ID NO: 363173 - RNA, 19 nt, Artificial Sequence
  Description of Artificial Sequence: Synthetic oligonucleotide
uucccuaccaaauacucug

SEQ ID NO: 363174 - RNA, 19 nt, Artificial Sequence
  Description of Artificial Sequence: Synthetic oligonucleotide
uaaguaaugcuguuccacc

SEQ ID NO: 363175 - RNA, 19 nt, Artificial Sequence
  Description of Artificial Sequence: Synthetic oligonucleotide
uccauuaggaugaucucgc

SEQ ID NO: 363176 - RNA, 19 nt, Artificial Sequence
  Description of Artificial Sequence: Synthetic oligonucleotide
cuuuaguuuuagucgauag

SEQ ID NO: 363177 - RNA, 19 nt, Artificial Sequence
  Description of Artificial Sequence: Synthetic oligonucleotide
uugcacaauuugaagaggc

SEQ ID NO: 363178 - RNA, 19 nt, Artificial Sequence
  Description of Artificial Sequence: Synthetic oligonucleotide
cugauggucucuuagugcc

SEQ ID NO: 363179 - RNA, 19 nt, Artificial Sequence
  Description of Artificial Sequence: Synthetic oligonucleotide
ugcaucucuuauuugagga

SEQ ID NO: 363180 - RNA, 19 nt, Artificial Sequence
  Description of Artificial Sequence: Synthetic oligonucleotide
auuaggaugaucucgcaaa

SEQ ID NO: 363181 - RNA, 19 nt, Artificial Sequence
  Description of Artificial Sequence: Synthetic oligonucleotide
auuugaagaggcuggaaca

SEQ ID NO: 363182 - RNA, 19 nt, Artificial Sequence
  Description of Artificial Sequence: Synthetic oligonucleotide
accggguauacucauuggc

SEQ ID NO: 363183 - RNA, 19 nt, Artificial Sequence
  Description of Artificial Sequence: Synthetic oligonucleotide
aagagaaaauccaccuagc

SEQ ID NO: 363184 - RNA, 19 nt, Artificial Sequence
  Description of Artificial Sequence: Synthetic oligonucleotide
uuuuagucgauagggagug

SEQ ID NO: 363185 - RNA, 19 nt, Artificial Sequence
  Description of Artificial Sequence: Synthetic oligonucleotide
caugucuugagacuugaag

SEQ ID NO: 363186 - RNA, 19 nt, Artificial Sequence
  Description of Artificial Sequence: Synthetic oligonucleotide
ucguuuggaaaccuaggcc

SEQ ID NO: 363187 - RNA, 19 nt, Artificial Sequence
  Description of Artificial Sequence: Synthetic oligonucleotide
uuucucgguuccuugacag

SEQ ID NO: 363188 - RNA, 19 nt, Artificial Sequence
  Description of Artificial Sequence: Synthetic oligonucleotide
gcgacuuuaguuuuagucg

SEQ ID NO: 363189 - RNA, 19 nt, Artificial Sequence
  Description of Artificial Sequence: Synthetic oligonucleotide
aaagauugcacaauuugaa

SEQ ID NO: 363190 - RNA, 19 nt, Artificial Sequence
  Description of Artificial Sequence: Synthetic oligonucleotide
agucaauucaaauauucuu

SEQ ID NO: 363191 - RNA, 19 nt, Artificial Sequence
  Description of Artificial Sequence: Synthetic oligonucleotide
uuagucgauagggagugcg

SEQ ID NO: 363192 - RNA, 19 nt, Artificial Sequence
  Description of Artificial Sequence: Synthetic oligonucleotide
aagaugggaucaguuaagg

SEQ ID NO: 363193 - RNA, 19 nt, Artificial Sequence
  Description of Artificial Sequence: Synthetic oligonucleotide
gaaaaucgccgucucuugg

SEQ ID NO: 363194 - RNA, 19 nt, Artificial Sequence
  Description of Artificial Sequence: Synthetic oligonucleotide
ucaugguuuaagaaagauc

SEQ ID NO: 363195 - RNA, 19 nt, Artificial Sequence
  Description of Artificial Sequence: Synthetic oligonucleotide
agaaaggcgacuuuaguuu

SEQ ID NO: 363196 - RNA, 19 nt, Artificial Sequence
  Description of Artificial Sequence: Synthetic oligonucleotide
aaguaaugcuguuccaccu

SEQ ID NO: 363197 - RNA, 19 nt, Artificial Sequence
  Description of Artificial Sequence: Synthetic oligonucleotide
uuaaguaaugcuguuccac

SEQ ID NO: 363198 - RNA, 19 nt, Artificial Sequence
  Description of Artificial Sequence: Synthetic oligonucleotide
uguuguaaaggaacaugga

SEQ ID NO: 363199 - RNA, 19 nt, Artificial Sequence
  Description of Artificial Sequence: Synthetic oligonucleotide
agcuaguauacccuccccg

SEQ ID NO: 363200 - RNA, 19 nt, Artificial Sequence
  Description of Artificial Sequence: Synthetic oligonucleotide
ugagcuaguauacccuccc

SEQ ID NO: 363201 - RNA, 19 nt, Artificial Sequence
  Description of Artificial Sequence: Synthetic oligonucleotide
aaaaucgccgucucuugga

SEQ ID NO: 363202 - RNA, 19 nt, Artificial Sequence
  Description of Artificial Sequence: Synthetic oligonucleotide
ucuugagacuugaagcuac

SEQ ID NO: 363203 - RNA, 19 nt, Artificial Sequence
  Description of Artificial Sequence: Synthetic oligonucleotide
uuacggcacaguuauuuag

SEQ ID NO: 363204 - RNA, 19 nt, Artificial Sequence
  Description of Artificial Sequence: Synthetic oligonucleotide
gaugaucucgcaaaaugug

SEQ ID NO: 363205 - RNA, 19 nt, Artificial Sequence
  Description of Artificial Sequence: Synthetic oligonucleotide
auggcuauagcuuggaguu

SEQ ID NO: 363206 - RNA, 19 nt, Artificial Sequence
  Description of Artificial Sequence: Synthetic oligonucleotide
aucgccgucucuuggaggg

SEQ ID NO: 363207 - RNA, 19 nt, Artificial Sequence
  Description of Artificial Sequence: Synthetic oligonucleotide
ucgauagggagugcgauag

SEQ ID NO: 363208 - RNA, 19 nt, Artificial Sequence
  Description of Artificial Sequence: Synthetic oligonucleotide
auuuuaugccaagggaaac

SEQ ID NO: 363209 - RNA, 19 nt, Artificial Sequence
  Description of Artificial Sequence: Synthetic oligonucleotide
aaaucgccgucucuuggag

SEQ ID NO: 363210 - RNA, 19 nt, Artificial Sequence
  Description of Artificial Sequence: Synthetic oligonucleotide
gagcaugacauccaguguc

SEQ ID NO: 363211 - RNA, 19 nt, Artificial Sequence
  Description of Artificial Sequence: Synthetic oligonucleotide
uacccuuccucgcagauuc

SEQ ID NO: 363212 - RNA, 19 nt, Artificial Sequence
  Description of Artificial Sequence: Synthetic oligonucleotide
uaguauacccuccccggag

SEQ ID NO: 363213 - RNA, 19 nt, Artificial Sequence
  Description of Artificial Sequence: Synthetic oligonucleotide
cuucguuuggaaaccuagg

SEQ ID NO: 363214 - RNA, 19 nt, Artificial Sequence
  Description of Artificial Sequence: Synthetic oligonucleotide
agggcuguaagcaaacuuc

SEQ ID NO: 363215 - RNA, 19 nt, Artificial Sequence
  Description of Artificial Sequence: Synthetic oligonucleotide
ugcucauaaauccuuccuc

SEQ ID NO: 363216 - RNA, 19 nt, Artificial Sequence
  Description of Artificial Sequence: Synthetic oligonucleotide
uaguuuuagucgauaggga

SEQ ID NO: 363217 - RNA, 19 nt, Artificial Sequence
  Description of Artificial Sequence: Synthetic oligonucleotide
uguaagcaaacuucccgca

SEQ ID NO: 363218 - RNA, 19 nt, Artificial Sequence
  Description of Artificial Sequence: Synthetic oligonucleotide
agauacucaugguuuaaga

SEQ ID NO: 363219 - RNA, 19 nt, Artificial Sequence
  Description of Artificial Sequence: Synthetic oligonucleotide
auagggagugaguguaggg

SEQ ID NO: 363220 - RNA, 19 nt, Artificial Sequence
  Description of Artificial Sequence: Synthetic oligonucleotide
uacggcacaguuauuuaga

SEQ ID NO: 363221 - RNA, 19 nt, Artificial Sequence
  Description of Artificial Sequence: Synthetic oligonucleotide
gaagagaauuguccuggag

SEQ ID NO: 363222 - RNA, 19 nt, Artificial Sequence
  Description of Artificial Sequence: Synthetic oligonucleotide
cucugcuuaggccagcuag

SEQ ID NO: 363223 - RNA, 19 nt, Artificial Sequence
  Description of Artificial Sequence: Synthetic oligonucleotide
agagaguuccugcugaaaa

SEQ ID NO: 363224 - RNA, 19 nt, Artificial Sequence
  Description of Artificial Sequence: Synthetic oligonucleotide
aaaguuuguuacggcacag

SEQ ID NO: 363225 - RNA, 19 nt, Artificial Sequence
  Description of Artificial Sequence: Synthetic oligonucleotide
  modified_base (8)..(8): a, c, u, g, unknown or other
ucacccunugggaaguuca

SEQ ID NO: 363226 - RNA, 19 nt, Artificial Sequence
  Description of Artificial Sequence: Synthetic oligonucleotide
uuaaccugcuuucccuacc

SEQ ID NO: 363227 - RNA, 19 nt, Artificial Sequence
  Description of Artificial Sequence: Synthetic oligonucleotide
gcagugguagaccagaccc

SEQ ID NO: 363228 - RNA, 19 nt, Artificial Sequence
  Description of Artificial Sequence: Synthetic oligonucleotide
ugaaaaucgccgucucuug

SEQ ID NO: 363229 - RNA, 19 nt, Artificial Sequence
  Description of Artificial Sequence: Synthetic oligonucleotide
cuccauuaggaugaucucg

SEQ ID NO: 363230 - RNA, 19 nt, Artificial Sequence
  Description of Artificial Sequence: Synthetic oligonucleotide
uccucgcagauucucaugu

SEQ ID NO: 363231 - RNA, 19 nt, Artificial Sequence
  Description of Artificial Sequence: Synthetic oligonucleotide
aauccauaggguucuugau

SEQ ID NO: 363232 - RNA, 19 nt, Artificial Sequence
  Description of Artificial Sequence: Synthetic oligonucleotide
aaucgccgucucuuggagg

SEQ ID NO: 363233 - RNA, 19 nt, Artificial Sequence
  Description of Artificial Sequence: Synthetic oligonucleotide
ucauugaaaaucgccgucu

SEQ ID NO: 363234 - RNA, 19 nt, Artificial Sequence
  Description of Artificial Sequence: Synthetic oligonucleotide
aaacaccacauuugguuau

SEQ ID NO: 363235 - RNA, 19 nt, Artificial Sequence
  Description of Artificial Sequence: Synthetic oligonucleotide
cuuucccuaccaaauacuc

SEQ ID NO: 363236 - RNA, 19 nt, Artificial Sequence
  Description of Artificial Sequence: Synthetic oligonucleotide
uuaggaugaucucgcaaaa

SEQ ID NO: 363237 - RNA, 19 nt, Artificial Sequence
  Description of Artificial Sequence: Synthetic oligonucleotide
auuaaguaaugcuguucca

SEQ ID NO: 363238 - RNA, 19 nt, Artificial Sequence
  Description of Artificial Sequence: Synthetic oligonucleotide
uccguuuugguugucccag

SEQ ID NO: 363239 - RNA, 19 nt, Artificial Sequence
  Description of Artificial Sequence: Synthetic oligonucleotide
cucgcaaaaugugagauca

SEQ ID NO: 363240 - RNA, 19 nt, Artificial Sequence
  Description of Artificial Sequence: Synthetic oligonucleotide
ugcacaauuugaagaggcu

SEQ ID NO: 363241 - RNA, 19 nt, Artificial Sequence
  Description of Artificial Sequence: Synthetic oligonucleotide
guacccguaauuucugaug

SEQ ID NO: 363242 - RNA, 19 nt, Artificial Sequence
  Description of Artificial Sequence: Synthetic oligonucleotide
gcucauaaauccuuccucc

SEQ ID NO: 363243 - RNA, 19 nt, Artificial Sequence
  Description of Artificial Sequence: Synthetic oligonucleotide
cuuaaccugggcuuaguca

SEQ ID NO: 363244 - RNA, 19 nt, Artificial Sequence
  Description of Artificial Sequence: Synthetic oligonucleotide
ccaccucuuauuuaaaagc

SEQ ID NO: 363245 - RNA, 19 nt, Artificial Sequence
  Description of Artificial Sequence: Synthetic oligonucleotide
agugcaaguacccguaauu

SEQ ID NO: 363246 - RNA, 19 nt, Artificial Sequence
  Description of Artificial Sequence: Synthetic oligonucleotide
agauucucaugucuugaga

SEQ ID NO: 363247 - RNA, 19 nt, Artificial Sequence
  Description of Artificial Sequence: Synthetic oligonucleotide
aaagugagaaauggccccu

SEQ ID NO: 363248 - RNA, 19 nt, Artificial Sequence
  Description of Artificial Sequence: Synthetic oligonucleotide
gcuaguauacccuccccgg

SEQ ID NO: 363249 - RNA, 19 nt, Artificial Sequence
  Description of Artificial Sequence: Synthetic oligonucleotide
augcauaauauaaagucaa

SEQ ID NO: 363250 - RNA, 19 nt, Artificial Sequence
  Description of Artificial Sequence: Synthetic oligonucleotide
cugcaucucuuauuugagg

SEQ ID NO: 363251 - RNA, 19 nt, Artificial Sequence
  Description of Artificial Sequence: Synthetic oligonucleotide
ggcuuagucacacagggca

SEQ ID NO: 363252 - RNA, 19 nt, Artificial Sequence
  Description of Artificial Sequence: Synthetic oligonucleotide
aguuuguuacggcacaguu

SEQ ID NO: 363253 - RNA, 19 nt, Artificial Sequence
  Description of Artificial Sequence: Synthetic oligonucleotide
auaagagaaaauccaccua

SEQ ID NO: 363254 - RNA, 19 nt, Artificial Sequence
  Description of Artificial Sequence: Synthetic oligonucleotide
auugaaaaucgccgucucu

SEQ ID NO: 363255 - RNA, 19 nt, Artificial Sequence
  Description of Artificial Sequence: Synthetic oligonucleotide
ggcgacuuuaguuuuaguc

SEQ ID NO: 363256 - RNA, 19 nt, Artificial Sequence
  Description of Artificial Sequence: Synthetic oligonucleotide
caacuaaacccagauacuc

SEQ ID NO: 363257 - RNA, 19 nt, Artificial Sequence
  Description of Artificial Sequence: Synthetic oligonucleotide
gaguacaaggaacucucca

SEQ ID NO: 363258 - RNA, 19 nt, Artificial Sequence
  Description of Artificial Sequence: Synthetic oligonucleotide
gcuggauuaaguaaugcug

SEQ ID NO: 363259 - RNA, 19 nt, Artificial Sequence
  Description of Artificial Sequence: Synthetic oligonucleotide
aaggcgacuuuaguuuuag

SEQ ID NO: 363260 - RNA, 19 nt, Artificial Sequence
  Description of Artificial Sequence: Synthetic oligonucleotide
uuggggauauaaaguagau

SEQ ID NO: 363261 - RNA, 19 nt, Artificial Sequence
  Description of Artificial Sequence: Synthetic oligonucleotide
caccucuuauuuaaaagca

SEQ ID NO: 363262 - RNA, 19 nt, Artificial Sequence
  Description of Artificial Sequence: Synthetic oligonucleotide
ugagcaugacauccagugu

SEQ ID NO: 363263 - RNA, 19 nt, Artificial Sequence
  Description of Artificial Sequence: Synthetic oligonucleotide
agugguagaccagacccuc

SEQ ID NO: 363264 - RNA, 19 nt, Artificial Sequence
  Description of Artificial Sequence: Synthetic oligonucleotide
uugcuaagguguuugugaa

SEQ ID NO: 363265 - RNA, 19 nt, Artificial Sequence
  Description of Artificial Sequence: Synthetic oligonucleotide
uaccccacgaccccuucag

SEQ ID NO: 363266 - RNA, 19 nt, Artificial Sequence
  Description of Artificial Sequence: Synthetic oligonucleotide
guagaugcaaggaaggaaa

SEQ ID NO: 363267 - RNA, 19 nt, Artificial Sequence
  Description of Artificial Sequence: Synthetic oligonucleotide
uggggauauaaaguagaug

SEQ ID NO: 363268 - RNA, 19 nt, Artificial Sequence
  Description of Artificial Sequence: Synthetic oligonucleotide
  modified_base (2)..(2): a, c, u, g, unknown or other
unugggaaguucaguggaa

SEQ ID NO: 363269 - RNA, 19 nt, Artificial Sequence
  Description of Artificial Sequence: Synthetic oligonucleotide
aaguacccguaauuucuga

SEQ ID NO: 363270 - RNA, 19 nt, Artificial Sequence
  Description of Artificial Sequence: Synthetic oligonucleotide
aacuccucugagcuaguau

SEQ ID NO: 363271 - RNA, 19 nt, Artificial Sequence
  Description of Artificial Sequence: Synthetic oligonucleotide
  modified_base (3)..(3): a, c, u, g, unknown or other
cunugggaaguucagugga

SEQ ID NO: 363272 - RNA, 19 nt, Artificial Sequence
  Description of Artificial Sequence: Synthetic oligonucleotide
auacccuccccggaguagc

SEQ ID NO: 363273 - RNA, 19 nt, Artificial Sequence
  Description of Artificial Sequence: Synthetic oligonucleotide
gaacucuccaccccaccug

SEQ ID NO: 363274 - RNA, 19 nt, Artificial Sequence
  Description of Artificial Sequence: Synthetic oligonucleotide
  modified_base (15)..(15): a, c, u, g, unknown or other
gcggcugucacccunuggg

SEQ ID NO: 363275 - RNA, 19 nt, Artificial Sequence
  Description of Artificial Sequence: Synthetic oligonucleotide
ugcgucaugggacuccauc

SEQ ID NO: 363276 - RNA, 19 nt, Artificial Sequence
  Description of Artificial Sequence: Synthetic oligonucleotide
acagggauuggcagcaccg

SEQ ID NO: 363277 - RNA, 19 nt, Artificial Sequence
  Description of Artificial Sequence: Synthetic oligonucleotide
cucauugaaaaucgccguc

SEQ ID NO: 363278 - RNA, 19 nt, Artificial Sequence
  Description of Artificial Sequence: Synthetic oligonucleotide
  modified_base (4)..(4): a, c, u, g, unknown or other
ccunugggaaguucagugg

SEQ ID NO: 363279 - RNA, 19 nt, Artificial Sequence
  Description of Artificial Sequence: Synthetic oligonucleotide
accuuaagagugccugguc

SEQ ID NO: 363280 - RNA, 19 nt, Artificial Sequence
  Description of Artificial Sequence: Synthetic oligonucleotide
cguaauuucugaugggagg

SEQ ID NO: 363281 - RNA, 19 nt, Artificial Sequence
  Description of Artificial Sequence: Synthetic oligonucleotide
uuguagguuuauuggcaga

SEQ ID NO: 363282 - RNA, 19 nt, Artificial Sequence
  Description of Artificial Sequence: Synthetic oligonucleotide
guuggggauauaaaguaga

SEQ ID NO: 363283 - RNA, 19 nt, Artificial Sequence
  Description of Artificial Sequence: Synthetic oligonucleotide
aguagccguucucgcaugg

SEQ ID NO: 363284 - RNA, 19 nt, Artificial Sequence
  Description of Artificial Sequence: Synthetic oligonucleotide
aguuaagggcuguaagcaa

SEQ ID NO: 363285 - RNA, 19 nt, Artificial Sequence
  Description of Artificial Sequence: Synthetic oligonucleotide
gaucucgcaaaaugugaga

SEQ ID NO: 363286 - RNA, 19 nt, Artificial Sequence
  Description of Artificial Sequence: Synthetic oligonucleotide
caaguacccguaauuucug

SEQ ID NO: 363287 - RNA, 19 nt, Artificial Sequence
  Description of Artificial Sequence: Synthetic oligonucleotide
caugcccuaccccacgacc

SEQ ID NO: 363288 - RNA, 19 nt, Artificial Sequence
  Description of Artificial Sequence: Synthetic oligonucleotide
caucgcucuacccauccug

SEQ ID NO: 363289 - RNA, 19 nt, Artificial Sequence
  Description of Artificial Sequence: Synthetic oligonucleotide
ugcgauagggagugagugu

SEQ ID NO: 363290 - RNA, 19 nt, Artificial Sequence
  Description of Artificial Sequence: Synthetic oligonucleotide
ugcuuaggccagcuagcag

SEQ ID NO: 363291 - RNA, 19 nt, Artificial Sequence
  Description of Artificial Sequence: Synthetic oligonucleotide
ucgguuccuugacagcacc

SEQ ID NO: 363292 - RNA, 19 nt, Artificial Sequence
  Description of Artificial Sequence: Synthetic oligonucleotide
augcccuaccccacgaccc

SEQ ID NO: 363293 - RNA, 19 nt, Artificial Sequence
  Description of Artificial Sequence: Synthetic oligonucleotide
uagucgauagggagugcga

SEQ ID NO: 363294 - RNA, 19 nt, Artificial Sequence
  Description of Artificial Sequence: Synthetic oligonucleotide
gcaaacuccucugagcuag

SEQ ID NO: 363295 - RNA, 19 nt, Artificial Sequence
  Description of Artificial Sequence: Synthetic oligonucleotide
aguauacccuccccggagu

SEQ ID NO: 363296 - RNA, 19 nt, Artificial Sequence
  Description of Artificial Sequence: Synthetic oligonucleotide
acccucucaucgcucuacc

SEQ ID NO: 363297 - RNA, 19 nt, Artificial Sequence
  Description of Artificial Sequence: Synthetic oligonucleotide
gauaggcugggcugucagc

SEQ ID NO: 363298 - RNA, 19 nt, Artificial Sequence
  Description of Artificial Sequence: Synthetic oligonucleotide
aaguuuguuacggcacagu

SEQ ID NO: 363299 - RNA, 19 nt, Artificial Sequence
  Description of Artificial Sequence: Synthetic oligonucleotide
ucucgcaaaaugugagauc

SEQ ID NO: 363300 - RNA, 19 nt, Artificial Sequence
  Description of Artificial Sequence: Synthetic oligonucleotide
  modified_base (7)..(7): a, c, u, g, unknown or other
cacccunugggaaguucag

SEQ ID NO: 363301 - RNA, 19 nt, Artificial Sequence
  Description of Artificial Sequence: Synthetic oligonucleotide
cuggauuaaguaaugcugu

SEQ ID NO: 363302 - RNA, 19 nt, Artificial Sequence
  Description of Artificial Sequence: Synthetic oligonucleotide
augaucucgcaaaauguga

SEQ ID NO: 363303 - RNA, 19 nt, Artificial Sequence
  Description of Artificial Sequence: Synthetic oligonucleotide
caguacauuuuaugccaag

SEQ ID NO: 363304 - RNA, 19 nt, Artificial Sequence
  Description of Artificial Sequence: Synthetic oligonucleotide
ugaugacucgccgguaccc

SEQ ID NO: 363305 - RNA, 19 nt, Artificial Sequence
  Description of Artificial Sequence: Synthetic oligonucleotide
acccguaauuucugauggg

SEQ ID NO: 363306 - RNA, 19 nt, Artificial Sequence
  Description of Artificial Sequence: Synthetic oligonucleotide
uugcuguuaccggggaggg

SEQ ID NO: 363307 - RNA, 19 nt, Artificial Sequence
  Description of Artificial Sequence: Synthetic oligonucleotide
cauugaaaaucgccgucuc

SEQ ID NO: 363308 - RNA, 19 nt, Artificial Sequence
  Description of Artificial Sequence: Synthetic oligonucleotide
aucucgcaaaaugugagau

SEQ ID NO: 363309 - RNA, 19 nt, Artificial Sequence
  Description of Artificial Sequence: Synthetic oligonucleotide
uggauuaaguaaugcuguu

SEQ ID NO: 363310 - RNA, 19 nt, Artificial Sequence
  Description of Artificial Sequence: Synthetic oligonucleotide
ccuucguuuggaaaccuag

SEQ ID NO: 363311 - RNA, 19 nt, Artificial Sequence
  Description of Artificial Sequence: Synthetic oligonucleotide
uuuggaaaccuaggccucu

SEQ ID NO: 363312 - RNA, 19 nt, Artificial Sequence
  Description of Artificial Sequence: Synthetic oligonucleotide
gacuuucucgguuccuuga

SEQ ID NO: 363313 - RNA, 19 nt, Artificial Sequence
  Description of Artificial Sequence: Synthetic oligonucleotide
cucauaaauccuuccucca

SEQ ID NO: 363314 - RNA, 19 nt, Artificial Sequence
  Description of Artificial Sequence: Synthetic oligonucleotide
ggaaaccuaggccucugag

SEQ ID NO: 363315 - RNA, 19 nt, Artificial Sequence
  Description of Artificial Sequence: Synthetic oligonucleotide
cagauacucaugguuuaag

SEQ ID NO: 363316 - RNA, 19 nt, Artificial Sequence
  Description of Artificial Sequence: Synthetic oligonucleotide
cuccccagugcaaguaccc

SEQ ID NO: 363317 - RNA, 19 nt, Artificial Sequence
  Description of Artificial Sequence: Synthetic oligonucleotide
guacccacucaccaggcga

SEQ ID NO: 363318 - RNA, 19 nt, Artificial Sequence
  Description of Artificial Sequence: Synthetic oligonucleotide
  modified_base (5)..(5): a, c, u, g, unknown or other
cccunugggaaguucagug

SEQ ID NO: 363319 - RNA, 19 nt, Artificial Sequence
  Description of Artificial Sequence: Synthetic oligonucleotide
ucgcagauucucaugucuu

SEQ ID NO: 363320 - RNA, 19 nt, Artificial Sequence
  Description of Artificial Sequence: Synthetic oligonucleotide
gugcgauagggagugagug

SEQ ID NO: 363321 - RNA, 19 nt, Artificial Sequence
  Description of Artificial Sequence: Synthetic oligonucleotide
uucucgguuccuugacagc

SEQ ID NO: 363322 - RNA, 19 nt, Artificial Sequence
  Description of Artificial Sequence: Synthetic oligonucleotide
auguagugccuugagcaug

SEQ ID NO: 363323 - RNA, 19 nt, Artificial Sequence
  Description of Artificial Sequence: Synthetic oligonucleotide
ucuacccuuccucgcagau

SEQ ID NO: 363324 - RNA, 19 nt, Artificial Sequence
  Description of Artificial Sequence: Synthetic oligonucleotide
uccucugagcuaguauacc

SEQ ID NO: 363325 - RNA, 19 nt, Artificial Sequence
  Description of Artificial Sequence: Synthetic oligonucleotide
ccucugagcuaguauaccc

SEQ ID NO: 363326 - RNA, 19 nt, Artificial Sequence
  Description of Artificial Sequence: Synthetic oligonucleotide
gagcuaguauacccucccc

SEQ ID NO: 363327 - RNA, 19 nt, Artificial Sequence
  Description of Artificial Sequence: Synthetic oligonucleotide
cucaguacugcuggaguac

SEQ ID NO: 363328 - RNA, 19 nt, Artificial Sequence
  Description of Artificial Sequence: Synthetic oligonucleotide
ccaguucuacccuuccucg

SEQ ID NO: 363329 - RNA, 19 nt, Artificial Sequence
  Description of Artificial Sequence: Synthetic oligonucleotide
gaccagacccucucaucgc

SEQ ID NO: 363330 - RNA, 19 nt, Artificial Sequence
  Description of Artificial Sequence: Synthetic oligonucleotide
uaaccugggcuuagucaca

SEQ ID NO: 363331 - RNA, 19 nt, Artificial Sequence
  Description of Artificial Sequence: Synthetic oligonucleotide
guucuacccuuccucgcag

SEQ ID NO: 363332 - RNA, 19 nt, Artificial Sequence
  Description of Artificial Sequence: Synthetic oligonucleotide
ucccuaccaaauacucugu

SEQ ID NO: 363333 - RNA, 19 nt, Artificial Sequence
  Description of Artificial Sequence: Synthetic oligonucleotide
guaccaaaacaaugggaaa

SEQ ID NO: 363334 - RNA, 19 nt, Artificial Sequence
  Description of Artificial Sequence: Synthetic oligonucleotide
gguauacucauuggcuuag

SEQ ID NO: 363335 - RNA, 19 nt, Artificial Sequence
  Description of Artificial Sequence: Synthetic oligonucleotide
accuaggccucugagagaa

SEQ ID NO: 363336 - RNA, 19 nt, Artificial Sequence
  Description of Artificial Sequence: Synthetic oligonucleotide
caguucuacccuuccucgc

SEQ ID NO: 363337 - RNA, 19 nt, Artificial Sequence
  Description of Artificial Sequence: Synthetic oligonucleotide
uguugggacucuguggcau

SEQ ID NO: 363338 - RNA, 19 nt, Artificial Sequence
  Description of Artificial Sequence: Synthetic oligonucleotide
uccccagugcaaguacccg

SEQ ID NO: 363339 - RNA, 19 nt, Artificial Sequence
  Description of Artificial Sequence: Synthetic oligonucleotide
ccugauggucucuuagugc

SEQ ID NO: 363340 - RNA, 19 nt, Artificial Sequence
  Description of Artificial Sequence: Synthetic oligonucleotide
uugcuaggaggucuuccuc

SEQ ID NO: 363341 - RNA, 19 nt, Artificial Sequence
  Description of Artificial Sequence: Synthetic oligonucleotide
caucugacuaacacaaagu

SEQ ID NO: 363342 - RNA, 19 nt, Artificial Sequence
  Description of Artificial Sequence: Synthetic oligonucleotide
cauugcuuggaugccucag

SEQ ID NO: 363343 - RNA, 19 nt, Artificial Sequence
  Description of Artificial Sequence: Synthetic oligonucleotide
accagacccucucaucgcu

SEQ ID NO: 363344 - RNA, 19 nt, Artificial Sequence
  Description of Artificial Sequence: Synthetic oligonucleotide
acggcacaguuauuuagau

SEQ ID NO: 363345 - RNA, 19 nt, Artificial Sequence
  Description of Artificial Sequence: Synthetic oligonucleotide
cuaggaggucuuccucucc

SEQ ID NO: 363346 - RNA, 19 nt, Artificial Sequence
  Description of Artificial Sequence: Synthetic oligonucleotide
caccggguauacucauugg

SEQ ID NO: 363347 - RNA, 19 nt, Artificial Sequence
  Description of Artificial Sequence: Synthetic oligonucleotide
cucgccgguacccacucac

SEQ ID NO: 363348 - RNA, 19 nt, Artificial Sequence
  Description of Artificial Sequence: Synthetic oligonucleotide
auggccccuuugaucaugc

SEQ ID NO: 363349 - RNA, 19 nt, Artificial Sequence
  Description of Artificial Sequence: Synthetic oligonucleotide
ucgcaaaaugugagaucac

SEQ ID NO: 363350 - RNA, 19 nt, Artificial Sequence
  Description of Artificial Sequence: Synthetic oligonucleotide
cauuaggaugaucucgcaa

SEQ ID NO: 363351 - RNA, 19 nt, Artificial Sequence
  Description of Artificial Sequence: Synthetic oligonucleotide
uggccuucguuuggaaacc

SEQ ID NO: 363352 - RNA, 19 nt, Artificial Sequence
  Description of Artificial Sequence: Synthetic oligonucleotide
guuuuagucgauagggagu

SEQ ID NO: 363353 - RNA, 19 nt, Artificial Sequence
  Description of Artificial Sequence: Synthetic oligonucleotide
cugcaaacuccucugagcu

SEQ ID NO: 363354 - RNA, 19 nt, Artificial Sequence
  Description of Artificial Sequence: Synthetic oligonucleotide
ugacucgccgguacccacu

SEQ ID NO: 363355 - RNA, 19 nt, Artificial Sequence
  Description of Artificial Sequence: Synthetic oligonucleotide
gaucaguuaagggcuguaa

SEQ ID NO: 363356 - RNA, 19 nt, Artificial Sequence
  Description of Artificial Sequence: Synthetic oligonucleotide
agagacagccuugucccca

SEQ ID NO: 363357 - RNA, 19 nt, Artificial Sequence
  Description of Artificial Sequence: Synthetic oligonucleotide
gcaccggguauacucauug

SEQ ID NO: 363358 - RNA, 19 nt, Artificial Sequence
  Description of Artificial Sequence: Synthetic oligonucleotide
ccguaauuucugaugggag

SEQ ID NO: 363359 - RNA, 19 nt, Artificial Sequence
  Description of Artificial Sequence: Synthetic oligonucleotide
ucggggauguagugccuug

SEQ ID NO: 363360 - RNA, 19 nt, Artificial Sequence
  Description of Artificial Sequence: Synthetic oligonucleotide
uccucuccguuuugguugu

SEQ ID NO: 363361 - RNA, 19 nt, Artificial Sequence
  Description of Artificial Sequence: Synthetic oligonucleotide
ucaucgcucuacccauccu

SEQ ID NO: 363362 - RNA, 19 nt, Artificial Sequence
  Description of Artificial Sequence: Synthetic oligonucleotide
ggauuaaguaaugcuguuc

SEQ ID NO: 363363 - RNA, 19 nt, Artificial Sequence
  Description of Artificial Sequence: Synthetic oligonucleotide
uuuagucgauagggagugc

SEQ ID NO: 363364 - RNA, 19 nt, Artificial Sequence
  Description of Artificial Sequence: Synthetic oligonucleotide
ccaauggaacauugcuugg

SEQ ID NO: 363365 - RNA, 19 nt, Artificial Sequence
  Description of Artificial Sequence: Synthetic oligonucleotide
ucaugcccuaccccacgac

SEQ ID NO: 363366 - RNA, 19 nt, Artificial Sequence
  Description of Artificial Sequence: Synthetic oligonucleotide
guagggcuccccaggaacc

SEQ ID NO: 363367 - RNA, 19 nt, Artificial Sequence
  Description of Artificial Sequence: Synthetic oligonucleotide
gaguagccguucucgcaug

SEQ ID NO: 363368 - RNA, 19 nt, Artificial Sequence
  Description of Artificial Sequence: Synthetic oligonucleotide
acuuuaguuuuagucgaua

SEQ ID NO: 363369 - RNA, 19 nt, Artificial Sequence
  Description of Artificial Sequence: Synthetic oligonucleotide
uaggaugaucucgcaaaau

SEQ ID NO: 363370 - RNA, 19 nt, Artificial Sequence
  Description of Artificial Sequence: Synthetic oligonucleotide
aggccucugagagaauucu

SEQ ID NO: 363371 - RNA, 19 nt, Artificial Sequence
  Description of Artificial Sequence: Synthetic oligonucleotide
cuuucucgguuccuugaca

SEQ ID NO: 363372 - RNA, 19 nt, Artificial Sequence
  Description of Artificial Sequence: Synthetic oligonucleotide
agucgauagggagugcgau

SEQ ID NO: 363373 - RNA, 19 nt, Artificial Sequence
  Description of Artificial Sequence: Synthetic oligonucleotide
gguacccacucaccaggcg

SEQ ID NO: 363374 - RNA, 19 nt, Artificial Sequence
  Description of Artificial Sequence: Synthetic oligonucleotide
ucggauccaccaccagcca

SEQ ID NO: 363375 - RNA, 19 nt, Artificial Sequence
  Description of Artificial Sequence: Synthetic oligonucleotide
guuuguuacggcacaguua

SEQ ID NO: 363376 - RNA, 19 nt, Artificial Sequence
  Description of Artificial Sequence: Synthetic oligonucleotide
agugagaaauggccccuuu

SEQ ID NO: 363377 - RNA, 19 nt, Artificial Sequence
  Description of Artificial Sequence: Synthetic oligonucleotide
ggaacauugcuuggaugcc

SEQ ID NO: 363378 - RNA, 19 nt, Artificial Sequence
  Description of Artificial Sequence: Synthetic oligonucleotide
ucgccgguacccacucacc

SEQ ID NO: 363379 - RNA, 19 nt, Artificial Sequence
  Description of Artificial Sequence: Synthetic oligonucleotide
gaaaggcgacuuuaguuuu

SEQ ID NO: 363380 - RNA, 19 nt, Artificial Sequence
  Description of Artificial Sequence: Synthetic oligonucleotide
gaucucggauccaccacca

SEQ ID NO: 363381 - RNA, 19 nt, Artificial Sequence
  Description of Artificial Sequence: Synthetic oligonucleotide
ucgcucuacccauccugug

SEQ ID NO: 363382 - RNA, 19 nt, Artificial Sequence
  Description of Artificial Sequence: Synthetic oligonucleotide
aucucggauccaccaccag

SEQ ID NO: 363383 - RNA, 19 nt, Artificial Sequence
  Description of Artificial Sequence: Synthetic oligonucleotide
gaugacucgccgguaccca

SEQ ID NO: 363384 - RNA, 19 nt, Artificial Sequence
  Description of Artificial Sequence: Synthetic oligonucleotide
ugcuguuaccggggagggg

SEQ ID NO: 363385 - RNA, 19 nt, Artificial Sequence
  Description of Artificial Sequence: Synthetic oligonucleotide
augccucggggauguagug

SEQ ID NO: 363386 - RNA, 19 nt, Artificial Sequence
  Description of Artificial Sequence: Synthetic oligonucleotide
guuaccggggaggggacac

SEQ ID NO: 363387 - RNA, 19 nt, Artificial Sequence
  Description of Artificial Sequence: Synthetic oligonucleotide
aggcuggaacagaaaugac

SEQ ID NO: 363388 - RNA, 19 nt, Artificial Sequence
  Description of Artificial Sequence: Synthetic oligonucleotide
aaaggcgacuuuaguuuua

SEQ ID NO: 363389 - RNA, 19 nt, Artificial Sequence
  Description of Artificial Sequence: Synthetic oligonucleotide
aucgcucuacccauccugu

SEQ ID NO: 363390 - RNA, 19 nt, Artificial Sequence
  Description of Artificial Sequence: Synthetic oligonucleotide
uacccuccccggaguagcc

SEQ ID NO: 363391 - RNA, 19 nt, Artificial Sequence
  Description of Artificial Sequence: Synthetic oligonucleotide
gggauauaaaguagaugca

SEQ ID NO: 363392 - RNA, 19 nt, Artificial Sequence
  Description of Artificial Sequence: Synthetic oligonucleotide
  modified_base (16)..(16): a, c, u, g, unknown or other
ggcggcugucacccunugg

SEQ ID NO: 363393 - RNA, 19 nt, Artificial Sequence
  Description of Artificial Sequence: Synthetic oligonucleotide
cucccugaugccucgggga

SEQ ID NO: 363394 - RNA, 19 nt, Artificial Sequence
  Description of Artificial Sequence: Synthetic oligonucleotide
cccaccaauggaacauugc

SEQ ID NO: 363395 - RNA, 19 nt, Artificial Sequence
  Description of Artificial Sequence: Synthetic oligonucleotide
cccaccuuaagagugccug

SEQ ID NO: 363396 - RNA, 19 nt, Artificial Sequence
  Description of Artificial Sequence: Synthetic oligonucleotide
gagaaacaguuccuguguu

SEQ ID NO: 363397 - RNA, 19 nt, Artificial Sequence
  Description of Artificial Sequence: Synthetic oligonucleotide
gacucgccgguacccacuc

SEQ ID NO: 363398 - RNA, 19 nt, Artificial Sequence
  Description of Artificial Sequence: Synthetic oligonucleotide
uguuaccggggaggggaca

SEQ ID NO: 363399 - RNA, 19 nt, Artificial Sequence
  Description of Artificial Sequence: Synthetic oligonucleotide
cggcuuauggggcucaaag

SEQ ID NO: 363400 - RNA, 19 nt, Artificial Sequence
  Description of Artificial Sequence: Synthetic oligonucleotide
agggagugcgauagggagu

SEQ ID NO: 363401 - RNA, 19 nt, Artificial Sequence
  Description of Artificial Sequence: Synthetic oligonucleotide
cugcucauaaauccuuccu

SEQ ID NO: 363402 - RNA, 19 nt, Artificial Sequence
  Description of Artificial Sequence: Synthetic oligonucleotide
cuguuaccggggaggggac

SEQ ID NO: 363403 - RNA, 19 nt, Artificial Sequence
  Description of Artificial Sequence: Synthetic oligonucleotide
  modified_base (6)..(6): a, c, u, g, unknown or other
acccunugggaaguucagu

SEQ ID NO: 363404 - RNA, 19 nt, Artificial Sequence
  Description of Artificial Sequence: Synthetic oligonucleotide
cgacuuuaguuuuagucga

SEQ ID NO: 363405 - RNA, 19 nt, Artificial Sequence
  Description of Artificial Sequence: Synthetic oligonucleotide
gcuacugugaggagagaga

SEQ ID NO: 363406 - RNA, 19 nt, Artificial Sequence
  Description of Artificial Sequence: Synthetic oligonucleotide
ggcuguaagcaaacuuccc

SEQ ID NO: 363407 - RNA, 19 nt, Artificial Sequence
  Description of Artificial Sequence: Synthetic oligonucleotide
uccccggaguagccguucu

SEQ ID NO: 363408 - RNA, 19 nt, Artificial Sequence
  Description of Artificial Sequence: Synthetic oligonucleotide
ggagugaguguagggcucc

SEQ ID NO: 363409 - RNA, 19 nt, Artificial Sequence
  Description of Artificial Sequence: Synthetic oligonucleotide
caguuccuguguuuuccca

SEQ ID NO: 363410 - RNA, 19 nt, Artificial Sequence
  Description of Artificial Sequence: Synthetic oligonucleotide
cucuaccugcugcucauaa

SEQ ID NO: 363411 - RNA, 19 nt, Artificial Sequence
  Description of Artificial Sequence: Synthetic oligonucleotide
cccggaguagccguucucg

SEQ ID NO: 363412 - RNA, 19 nt, Artificial Sequence
  Description of Artificial Sequence: Synthetic oligonucleotide
gccgguacccacucaccag

SEQ ID NO: 363413 - RNA, 19 nt, Artificial Sequence
  Description of Artificial Sequence: Synthetic oligonucleotide
ggguauacucauuggcuua

SEQ ID NO: 363414 - RNA, 19 nt, Artificial Sequence
  Description of Artificial Sequence: Synthetic oligonucleotide
cucaugguuuaagaaagau

SEQ ID NO: 363415 - RNA, 19 nt, Artificial Sequence
  Description of Artificial Sequence: Synthetic oligonucleotide
aggcgacuuuaguuuuagu

SEQ ID NO: 363416 - RNA, 19 nt, Artificial Sequence
  Description of Artificial Sequence: Synthetic oligonucleotide
  modified_base (9)..(9): a, c, u, g, unknown or other
gucacccunugggaaguuc

SEQ ID NO: 363417 - RNA, 19 nt, Artificial Sequence
  Description of Artificial Sequence: Synthetic oligonucleotide
ggggcucaaagaugggauc

SEQ ID NO: 363418 - RNA, 19 nt, Artificial Sequence
  Description of Artificial Sequence: Synthetic oligonucleotide
ggauccucauugaaggucu

SEQ ID NO: 363419 - RNA, 19 nt, Artificial Sequence
  Description of Artificial Sequence: Synthetic oligonucleotide
gaguaagaggauccucauu

SEQ ID NO: 363420 - RNA, 19 nt, Artificial Sequence
  Description of Artificial Sequence: Synthetic oligonucleotide
uaccggggaggggacacaa

SEQ ID NO: 363421 - RNA, 19 nt, Artificial Sequence
  Description of Artificial Sequence: Synthetic oligonucleotide
guauacccuccccggagua

SEQ ID NO: 363422 - RNA, 19 nt, Artificial Sequence
  Description of Artificial Sequence: Synthetic oligonucleotide
acaccacauuugguuauau

SEQ ID NO: 363423 - RNA, 19 nt, Artificial Sequence
  Description of Artificial Sequence: Synthetic oligonucleotide
uggccccuuugaucaugcc

SEQ ID NO: 363424 - RNA, 19 nt, Artificial Sequence
  Description of Artificial Sequence: Synthetic oligonucleotide
ggcgaggguucacaggcuc

SEQ ID NO: 363425 - RNA, 19 nt, Artificial Sequence
  Description of Artificial Sequence: Synthetic oligonucleotide
ggaacucuccaccccaccu

SEQ ID NO: 363426 - RNA, 19 nt, Artificial Sequence
  Description of Artificial Sequence: Synthetic oligonucleotide
uugggacucuguggcauuu

SEQ ID NO: 363427 - RNA, 19 nt, Artificial Sequence
  Description of Artificial Sequence: Synthetic oligonucleotide
uuaccggggaggggacaca

SEQ ID NO: 363428 - RNA, 19 nt, Artificial Sequence
  Description of Artificial Sequence: Synthetic oligonucleotide
cgcucuacccauccugugc

SEQ ID NO: 363429 - RNA, 19 nt, Artificial Sequence
  Description of Artificial Sequence: Synthetic oligonucleotide
uuguuacggcacaguuauu

SEQ ID NO: 363430 - RNA, 19 nt, Artificial Sequence
  Description of Artificial Sequence: Synthetic oligonucleotide
ccuggucccuaggaaagag

SEQ ID NO: 363431 - RNA, 19 nt, Artificial Sequence
  Description of Artificial Sequence: Synthetic oligonucleotide
cuucuggccuucguuugga

SEQ ID NO: 363432 - RNA, 19 nt, Artificial Sequence
  Description of Artificial Sequence: Synthetic oligonucleotide
cgcagauucucaugucuug

SEQ ID NO: 363433 - RNA, 19 nt, Artificial Sequence
  Description of Artificial Sequence: Synthetic oligonucleotide
ggauuggcagcaccgggua

SEQ ID NO: 363434 - RNA, 19 nt, Artificial Sequence
  Description of Artificial Sequence: Synthetic oligonucleotide
  modified_base (10)..(10): a, c, u, g, unknown or other
ugucacccunugggaaguu

SEQ ID NO: 363435 - RNA, 19 nt, Artificial Sequence
  Description of Artificial Sequence: Synthetic oligonucleotide
cuuccucgcagauucucau

SEQ ID NO: 363436 - RNA, 19 nt, Artificial Sequence
  Description of Artificial Sequence: Synthetic oligonucleotide
cccguaauuucugauggga

SEQ ID NO: 363437 - RNA, 19 nt, Artificial Sequence
  Description of Artificial Sequence: Synthetic oligonucleotide
gugucucaggaucucggau

SEQ ID NO: 363438 - RNA, 19 nt, Artificial Sequence
  Description of Artificial Sequence: Synthetic oligonucleotide
gugcaaguacccguaauuu

SEQ ID NO: 363439 - RNA, 19 nt, Artificial Sequence
  Description of Artificial Sequence: Synthetic oligonucleotide
ccggaguagccguucucgc

SEQ ID NO: 363440 - RNA, 19 nt, Artificial Sequence
  Description of Artificial Sequence: Synthetic oligonucleotide
gcgauagggagugagugua

SEQ ID NO: 363441 - RNA, 19 nt, Artificial Sequence
  Description of Artificial Sequence: Synthetic oligonucleotide
ccacgaccccuucagcccc

SEQ ID NO: 363442 - RNA, 19 nt, Artificial Sequence
  Description of Artificial Sequence: Synthetic oligonucleotide
gacuuuaguuuuagucgau

SEQ ID NO: 363443 - RNA, 19 nt, Artificial Sequence
  Description of Artificial Sequence: Synthetic oligonucleotide
cccucucaucgcucuaccc

SEQ ID NO: 363444 - RNA, 19 nt, Artificial Sequence
  Description of Artificial Sequence: Synthetic oligonucleotide
gcgucaugggacuccaucu

SEQ ID NO: 363445 - RNA, 19 nt, Artificial Sequence
  Description of Artificial Sequence: Synthetic oligonucleotide
gcuuuuccgcuucuggccu

SEQ ID NO: 363446 - RNA, 19 nt, Artificial Sequence
  Description of Artificial Sequence: Synthetic oligonucleotide
cagugguagaccagacccu

SEQ ID NO: 363447 - RNA, 19 nt, Artificial Sequence
  Description of Artificial Sequence: Synthetic oligonucleotide
agcagacaaggaggccuca

SEQ ID NO: 363448 - RNA, 19 nt, Artificial Sequence
  Description of Artificial Sequence: Synthetic oligonucleotide
cccuaccaaauacucuguc

SEQ ID NO: 363449 - RNA, 19 nt, Artificial Sequence
  Description of Artificial Sequence: Synthetic oligonucleotide
ggaguaagaggauccucau

SEQ ID NO: 363450 - RNA, 19 nt, Artificial Sequence
  Description of Artificial Sequence: Synthetic oligonucleotide
gccguucucgcauggugga

SEQ ID NO: 363451 - RNA, 19 nt, Artificial Sequence
  Description of Artificial Sequence: Synthetic oligonucleotide
gauuggcagcaccggguau

SEQ ID NO: 363452 - RNA, 19 nt, Artificial Sequence
  Description of Artificial Sequence: Synthetic oligonucleotide
cuaccccacgaccccuuca

SEQ ID NO: 363453 - RNA, 19 nt, Artificial Sequence
  Description of Artificial Sequence: Synthetic oligonucleotide
ccauaggguucuugaugac

SEQ ID NO: 363454 - RNA, 19 nt, Artificial Sequence
  Description of Artificial Sequence: Synthetic oligonucleotide
agacccucucaucgcucua

SEQ ID NO: 363455 - RNA, 19 nt, Artificial Sequence
  Description of Artificial Sequence: Synthetic oligonucleotide
agcccuguugggacucugu

SEQ ID NO: 363456 - RNA, 19 nt, Artificial Sequence
  Description of Artificial Sequence: Synthetic oligonucleotide
ccguuuugguugucccagc

SEQ ID NO: 363457 - RNA, 19 nt, Artificial Sequence
  Description of Artificial Sequence: Synthetic oligonucleotide
ccggguauacucauuggcu

SEQ ID NO: 363458 - RNA, 19 nt, Artificial Sequence
  Description of Artificial Sequence: Synthetic oligonucleotide
caccuuaagagugccuggu

SEQ ID NO: 363459 - RNA, 19 nt, Artificial Sequence
  Description of Artificial Sequence: Synthetic oligonucleotide
cuugaggggcagugaaaau

SEQ ID NO: 363460 - RNA, 19 nt, Artificial Sequence
  Description of Artificial Sequence: Synthetic oligonucleotide
ggcugcgucaugggacucc

SEQ ID NO: 363461 - RNA, 19 nt, Artificial Sequence
  Description of Artificial Sequence: Synthetic oligonucleotide
  modified_base (19)..(19): a, c, u, g, unknown or other
gucggcggcugucacccun

SEQ ID NO: 363462 - RNA, 19 nt, Artificial Sequence
  Description of Artificial Sequence: Synthetic oligonucleotide
gggcuuaaccugggcuuag

SEQ ID NO: 363463 - RNA, 19 nt, Artificial Sequence
  Description of Artificial Sequence: Synthetic oligonucleotide
ccucgcagauucucauguc

SEQ ID NO: 363464 - RNA, 19 nt, Artificial Sequence
  Description of Artificial Sequence: Synthetic oligonucleotide
ucgccgucucuuggaggga

SEQ ID NO: 363465 - RNA, 19 nt, Artificial Sequence
  Description of Artificial Sequence: Synthetic oligonucleotide
ggcuuagaagaggcaggca

SEQ ID NO: 363466 - RNA, 19 nt, Artificial Sequence
  Description of Artificial Sequence: Synthetic oligonucleotide
cagugcaaguacccguaau

SEQ ID NO: 363467 - RNA, 19 nt, Artificial Sequence
  Description of Artificial Sequence: Synthetic oligonucleotide
gggauuggcagcaccgggu

SEQ ID NO: 363468 - RNA, 19 nt, Artificial Sequence
  Description of Artificial Sequence: Synthetic oligonucleotide
cgauagggagugcgauagg

SEQ ID NO: 363469 - RNA, 19 nt, Artificial Sequence
  Description of Artificial Sequence: Synthetic oligonucleotide
cuccccggaguagccguuc

SEQ ID NO: 363470 - RNA, 19 nt, Artificial Sequence
  Description of Artificial Sequence: Synthetic oligonucleotide
aggcgaggguucacaggcu

SEQ ID NO: 363471 - RNA, 19 nt, Artificial Sequence
  Description of Artificial Sequence: Synthetic oligonucleotide
agcaccggguauacucauu

SEQ ID NO: 363472 - RNA, 19 nt, Artificial Sequence
  Description of Artificial Sequence: Synthetic oligonucleotide
ggaucaguuaagggcugua

SEQ ID NO: 363473 - RNA, 19 nt, Artificial Sequence
  Description of Artificial Sequence: Synthetic oligonucleotide
ccgucucuuggagggagac

SEQ ID NO: 363474 - RNA, 19 nt, Artificial Sequence
  Description of Artificial Sequence: Synthetic oligonucleotide
cgguacccacucaccaggc

SEQ ID NO: 363475 - RNA, 19 nt, Artificial Sequence
  Description of Artificial Sequence: Synthetic oligonucleotide
aggcggcuuauggggcuca

SEQ ID NO: 363476 - RNA, 19 nt, Artificial Sequence
  Description of Artificial Sequence: Synthetic oligonucleotide
cagcccuguugggacucug

SEQ ID NO: 363477 - RNA, 19 nt, Artificial Sequence
  Description of Artificial Sequence: Synthetic oligonucleotide
caaacuccucugagcuagu

SEQ ID NO: 363478 - RNA, 19 nt, Artificial Sequence
  Description of Artificial Sequence: Synthetic oligonucleotide
ccagauacucaugguuuaa

SEQ ID NO: 363479 - RNA, 19 nt, Artificial Sequence
  Description of Artificial Sequence: Synthetic oligonucleotide
gccagcuagcagccaccuc

SEQ ID NO: 363480 - RNA, 19 nt, Artificial Sequence
  Description of Artificial Sequence: Synthetic oligonucleotide
cagcaccggguauacucau

SEQ ID NO: 363481 - RNA, 19 nt, Artificial Sequence
  Description of Artificial Sequence: Synthetic oligonucleotide
cuggacuuucucgguuccu

SEQ ID NO: 363482 - RNA, 19 nt, Artificial Sequence
  Description of Artificial Sequence: Synthetic oligonucleotide
gggaucaguuaagggcugu

SEQ ID NO: 363483 - RNA, 19 nt, Artificial Sequence
  Description of Artificial Sequence: Synthetic oligonucleotide
ccagugcaaguacccguaa

SEQ ID NO: 363484 - RNA, 19 nt, Artificial Sequence
  Description of Artificial Sequence: Synthetic oligonucleotide
cguucucgcaugguggaaa

SEQ ID NO: 363485 - RNA, 19 nt, Artificial Sequence
  Description of Artificial Sequence: Synthetic oligonucleotide
cggguauacucauuggcuu

SEQ ID NO: 363486 - RNA, 19 nt, Artificial Sequence
  Description of Artificial Sequence: Synthetic oligonucleotide
cgccgguacccacucacca

SEQ ID NO: 363487 - RNA, 19 nt, Artificial Sequence
  Description of Artificial Sequence: Synthetic oligonucleotide
cuacccuuccucgcagauu

SEQ ID NO: 363488 - RNA, 19 nt, Artificial Sequence
  Description of Artificial Sequence: Synthetic oligonucleotide
gccuucguuuggaaaccua

SEQ ID NO: 363489 - RNA, 19 nt, Artificial Sequence
  Description of Artificial Sequence: Synthetic oligonucleotide
ccccggaguagccguucuc

SEQ ID NO: 363490 - RNA, 19 nt, Artificial Sequence
  Description of Artificial Sequence: Synthetic oligonucleotide
ggcuuaaccugggcuuagu

SEQ ID NO: 363491 - RNA, 19 nt, Artificial Sequence
  Description of Artificial Sequence: Synthetic oligonucleotide
gccgucucuuggagggaga

SEQ ID NO: 363492 - RNA, 19 nt, Artificial Sequence
  Description of Artificial Sequence: Synthetic oligonucleotide
cacccgccgucggcggcug

SEQ ID NO: 363493 - RNA, 19 nt, Artificial Sequence
  Description of Artificial Sequence: Synthetic oligonucleotide
ggccuucguuuggaaaccu

SEQ ID NO: 363494 - RNA, 19 nt, Artificial Sequence
  Description of Artificial Sequence: Synthetic oligonucleotide
ggagugcgauagggaguga

SEQ ID NO: 363495 - RNA, 19 nt, Artificial Sequence
  Description of Artificial Sequence: Synthetic oligonucleotide
ccauggcaggcggcuuaug

SEQ ID NO: 363496 - RNA, 19 nt, Artificial Sequence
  Description of Artificial Sequence: Synthetic oligonucleotide
gcggcuuauggggcucaaa

SEQ ID NO: 363497 - RNA, 19 nt, Artificial Sequence
  Description of Artificial Sequence: Synthetic oligonucleotide
ccccuuugaucaugcccua

SEQ ID NO: 363498 - RNA, 19 nt, Artificial Sequence
  Description of Artificial Sequence: Synthetic oligonucleotide
cccuccccggaguagccgu

SEQ ID NO: 363499 - RNA, 19 nt, Artificial Sequence
  Description of Artificial Sequence: Synthetic oligonucleotide
cggggauguagugccuuga

SEQ ID NO: 363500 - RNA, 19 nt, Artificial Sequence
  Description of Artificial Sequence: Synthetic oligonucleotide
ggcggcuuauggggcucaa

SEQ ID NO: 363501 - RNA, 19 nt, Artificial Sequence
  Description of Artificial Sequence: Synthetic oligonucleotide
cugcgucaugggacuccau

SEQ ID NO: 363502 - RNA, 19 nt, Artificial Sequence
  Description of Artificial Sequence: Synthetic oligonucleotide
ccguucucgcaugguggaa

SEQ ID NO: 363503 - RNA, 19 nt, Artificial Sequence
  Description of Artificial Sequence: Synthetic oligonucleotide
  modified_base (17)..(17): a, c, u, g, unknown or other
cggcggcugucacccunug

SEQ ID NO: 363504 - RNA, 19 nt, Artificial Sequence
  Description of Artificial Sequence: Synthetic oligonucleotide
gcuugcuguuggggauaua

SEQ ID NO: 363505 - RNA, 19 nt, Artificial Sequence
  Description of Artificial Sequence: Synthetic oligonucleotide
cgucggcggcugucacccu

SEQ ID NO: 363506 - RNA, 19 nt, Artificial Sequence
  Description of Artificial Sequence: Synthetic oligonucleotide
ucagugaucauuuaaacca

SEQ ID NO: 363507 - RNA, 19 nt, Artificial Sequence
  Description of Artificial Sequence: Synthetic oligonucleotide
gaaacguucauacagguug

SEQ ID NO: 363508 - RNA, 19 nt, Artificial Sequence
  Description of Artificial Sequence: Synthetic oligonucleotide
aaacacaguggacuugucc

SEQ ID NO: 363509 - RNA, 19 nt, Artificial Sequence
  Description of Artificial Sequence: Synthetic oligonucleotide
uuuauuaagggagucagug

SEQ ID NO: 363510 - RNA, 19 nt, Artificial Sequence
  Description of Artificial Sequence: Synthetic oligonucleotide
auaggguugccauaacucc

SEQ ID NO: 363511 - RNA, 19 nt, Artificial Sequence
  Description of Artificial Sequence: Synthetic oligonucleotide
ugaccaacgaacaagcaug

SEQ ID NO: 363512 - RNA, 19 nt, Artificial Sequence
  Description of Artificial Sequence: Synthetic oligonucleotide
auuuugauagcccgcugcc

SEQ ID NO: 363513 - RNA, 19 nt, Artificial Sequence
  Description of Artificial Sequence: Synthetic oligonucleotide
uuugagaucgggccaaugc

SEQ ID NO: 363514 - RNA, 19 nt, Artificial Sequence
  Description of Artificial Sequence: Synthetic oligonucleotide
ugguauuucauacagugau

SEQ ID NO: 363515 - RNA, 19 nt, Artificial Sequence
  Description of Artificial Sequence: Synthetic oligonucleotide
agugccuaaagacaccaac

SEQ ID NO: 363516 - RNA, 19 nt, Artificial Sequence
  Description of Artificial Sequence: Synthetic oligonucleotide
uugagugacacuuuuagua

SEQ ID NO: 363517 - RNA, 19 nt, Artificial Sequence
  Description of Artificial Sequence: Synthetic oligonucleotide
aguuccuagggacaauagc

SEQ ID NO: 363518 - RNA, 19 nt, Artificial Sequence
  Description of Artificial Sequence: Synthetic oligonucleotide
uguauagcucaucagggga

SEQ ID NO: 363519 - RNA, 19 nt, Artificial Sequence
  Description of Artificial Sequence: Synthetic oligonucleotide
uauaaagcgaguuugucuu

SEQ ID NO: 363520 - RNA, 19 nt, Artificial Sequence
  Description of Artificial Sequence: Synthetic oligonucleotide
cauaggugaaacaaacccc

SEQ ID NO: 363521 - RNA, 19 nt, Artificial Sequence
  Description of Artificial Sequence: Synthetic oligonucleotide
cuuugagugacacuuuuag

SEQ ID NO: 363522 - RNA, 19 nt, Artificial Sequence
  Description of Artificial Sequence: Synthetic oligonucleotide
ugagguacacuccacauau

SEQ ID NO: 363523 - RNA, 19 nt, Artificial Sequence
  Description of Artificial Sequence: Synthetic oligonucleotide
gaauucgugagccuucugc

SEQ ID NO: 363524 - RNA, 19 nt, Artificial Sequence
  Description of Artificial Sequence: Synthetic oligonucleotide
aaucaugaugucuccgaag

SEQ ID NO: 363525 - RNA, 19 nt, Artificial Sequence
  Description of Artificial Sequence: Synthetic oligonucleotide
uaaucugggauccuagaga

SEQ ID NO: 363526 - RNA, 19 nt, Artificial Sequence
  Description of Artificial Sequence: Synthetic oligonucleotide
uccaacagacaucugauuc

SEQ ID NO: 363527 - RNA, 19 nt, Artificial Sequence
  Description of Artificial Sequence: Synthetic oligonucleotide
ucccaugcaagcaaaagcu

SEQ ID NO: 363528 - RNA, 19 nt, Artificial Sequence
  Description of Artificial Sequence: Synthetic oligonucleotide
agcuauaaacauucaggac

SEQ ID NO: 363529 - RNA, 19 nt, Artificial Sequence
  Description of Artificial Sequence: Synthetic oligonucleotide
gacaauauguucauacagc

SEQ ID NO: 363530 - RNA, 19 nt, Artificial Sequence
  Description of Artificial Sequence: Synthetic oligonucleotide
cugauagucaggaaaguug

SEQ ID NO: 363531 - RNA, 19 nt, Artificial Sequence
  Description of Artificial Sequence: Synthetic oligonucleotide
aggguauugaguccuuccc

SEQ ID NO: 363532 - RNA, 19 nt, Artificial Sequence
  Description of Artificial Sequence: Synthetic oligonucleotide
aaccuacacugccaagugc

SEQ ID NO: 363533 - RNA, 19 nt, Artificial Sequence
  Description of Artificial Sequence: Synthetic oligonucleotide
aggauguuuauuaagggag

SEQ ID NO: 363534 - RNA, 19 nt, Artificial Sequence
  Description of Artificial Sequence: Synthetic oligonucleotide
uccgcaacgauccagccac

SEQ ID NO: 363535 - RNA, 19 nt, Artificial Sequence
  Description of Artificial Sequence: Synthetic oligonucleotide
cuagucucggaacuaaacc

SEQ ID NO: 363536 - RNA, 19 nt, Artificial Sequence
  Description of Artificial Sequence: Synthetic oligonucleotide
ugugcaauccgcaacgauc

SEQ ID NO: 363537 - RNA, 19 nt, Artificial Sequence
  Description of Artificial Sequence: Synthetic oligonucleotide
aaacauucaggacggccag

SEQ ID NO: 363538 - RNA, 19 nt, Artificial Sequence
  Description of Artificial Sequence: Synthetic oligonucleotide
ugaaagacgcaggaauucg

SEQ ID NO: 363539 - RNA, 19 nt, Artificial Sequence
  Description of Artificial Sequence: Synthetic oligonucleotide
uucgugagccuucugcagg

SEQ ID NO: 363540 - RNA, 19 nt, Artificial Sequence
  Description of Artificial Sequence: Synthetic oligonucleotide
agcagacccaucuugguag

SEQ ID NO: 363541 - RNA, 19 nt, Artificial Sequence
  Description of Artificial Sequence: Synthetic oligonucleotide
uuaagggagucagugauca

SEQ ID NO: 363542 - RNA, 19 nt, Artificial Sequence
  Description of Artificial Sequence: Synthetic oligonucleotide
ccagcuauaaacauucagg

SEQ ID NO: 363543 - RNA, 19 nt, Artificial Sequence
  Description of Artificial Sequence: Synthetic oligonucleotide
aaaccuacacugccaagug

SEQ ID NO: 363544 - RNA, 19 nt, Artificial Sequence
  Description of Artificial Sequence: Synthetic oligonucleotide
aauccgcaacgauccagcc

SEQ ID NO: 363545 - RNA, 19 nt, Artificial Sequence
  Description of Artificial Sequence: Synthetic oligonucleotide
uagugaaccggucaucggc

SEQ ID NO: 363546 - RNA, 19 nt, Artificial Sequence
  Description of Artificial Sequence: Synthetic oligonucleotide
gauagcaaaugcaguaucc

SEQ ID NO: 363547 - RNA, 19 nt, Artificial Sequence
  Description of Artificial Sequence: Synthetic oligonucleotide
guuccgagcacgaacaagg

SEQ ID NO: 363548 - RNA, 19 nt, Artificial Sequence
  Description of Artificial Sequence: Synthetic oligonucleotide
cuuagugaaccggucaucg

SEQ ID NO: 363549 - RNA, 19 nt, Artificial Sequence
  Description of Artificial Sequence: Synthetic oligonucleotide
gaugcucuuagugaaccgg

SEQ ID NO: 363550 - RNA, 19 nt, Artificial Sequence
  Description of Artificial Sequence: Synthetic oligonucleotide
uaaaccuacacugccaagu

SEQ ID NO: 363551 - RNA, 19 nt, Artificial Sequence
  Description of Artificial Sequence: Synthetic oligonucleotide
ugaagcuagucucggaacu

SEQ ID NO: 363552 - RNA, 19 nt, Artificial Sequence
  Description of Artificial Sequence: Synthetic oligonucleotide
guagcacagacuucaaacc

SEQ ID NO: 363553 - RNA, 19 nt, Artificial Sequence
  Description of Artificial Sequence: Synthetic oligonucleotide
aauguuccgagcacgaaca

SEQ ID NO: 363554 - RNA, 19 nt, Artificial Sequence
  Description of Artificial Sequence: Synthetic oligonucleotide
uuauuaagggagucaguga

SEQ ID NO: 363555 - RNA, 19 nt, Artificial Sequence
  Description of Artificial Sequence: Synthetic oligonucleotide
cauaggguugccauaacuc

SEQ ID NO: 363556 - RNA, 19 nt, Artificial Sequence
  Description of Artificial Sequence: Synthetic oligonucleotide
guaaucugggauccuagag

SEQ ID NO: 363557 - RNA, 19 nt, Artificial Sequence
  Description of Artificial Sequence: Synthetic oligonucleotide
uuggauagcaaaugcagua

SEQ ID NO: 363558 - RNA, 19 nt, Artificial Sequence
  Description of Artificial Sequence: Synthetic oligonucleotide
agagacgugcuccuggaag

SEQ ID NO: 363559 - RNA, 19 nt, Artificial Sequence
  Description of Artificial Sequence: Synthetic oligonucleotide
gaauguuccgagcacgaac

SEQ ID NO: 363560 - RNA, 19 nt, Artificial Sequence
  Description of Artificial Sequence: Synthetic oligonucleotide
ugcacgagcagacccaucu

SEQ ID NO: 363561 - RNA, 19 nt, Artificial Sequence
  Description of Artificial Sequence: Synthetic oligonucleotide
caaauguaaucugggaucc

SEQ ID NO: 363562 - RNA, 19 nt, Artificial Sequence
  Description of Artificial Sequence: Synthetic oligonucleotide
gcgguaauacuucugauag

SEQ ID NO: 363563 - RNA, 19 nt, Artificial Sequence
  Description of Artificial Sequence: Synthetic oligonucleotide
aguauaaagcgaguuuguc

SEQ ID NO: 363564 - RNA, 19 nt, Artificial Sequence
  Description of Artificial Sequence: Synthetic oligonucleotide
uugagaucgggccaaugcu

SEQ ID NO: 363565 - RNA, 19 nt, Artificial Sequence
  Description of Artificial Sequence: Synthetic oligonucleotide
cacucugcacauaacgccg

SEQ ID NO: 363566 - RNA, 19 nt, Artificial Sequence
  Description of Artificial Sequence: Synthetic oligonucleotide
auucaggacggccagccag

SEQ ID NO: 363567 - RNA, 19 nt, Artificial Sequence
  Description of Artificial Sequence: Synthetic oligonucleotide
gggaauaggguauugaguc

SEQ ID NO: 363568 - RNA, 19 nt, Artificial Sequence
  Description of Artificial Sequence: Synthetic oligonucleotide
uagguaugucccaugcaag

SEQ ID NO: 363569 - RNA, 19 nt, Artificial Sequence
  Description of Artificial Sequence: Synthetic oligonucleotide
ugagugacacuuuuaguau

SEQ ID NO: 363570 - RNA, 19 nt, Artificial Sequence
  Description of Artificial Sequence: Synthetic oligonucleotide
ccauaggugaaacaaaccc

SEQ ID NO: 363571 - RNA, 19 nt, Artificial Sequence
  Description of Artificial Sequence: Synthetic oligonucleotide
ugcuuggauagcaaaugca

SEQ ID NO: 363572 - RNA, 19 nt, Artificial Sequence
  Description of Artificial Sequence: Synthetic oligonucleotide
ugccaagugccuaaagaca

SEQ ID NO: 363573 - RNA, 19 nt, Artificial Sequence
  Description of Artificial Sequence: Synthetic oligonucleotide
agauggcccauccacugac

SEQ ID NO: 363574 - RNA, 19 nt, Artificial Sequence
  Description of Artificial Sequence: Synthetic oligonucleotide
caacgauccagccacaguc

SEQ ID NO: 363575 - RNA, 19 nt, Artificial Sequence
  Description of Artificial Sequence: Synthetic oligonucleotide
uuccuagggacaauagcca

SEQ ID NO: 363576 - RNA, 19 nt, Artificial Sequence
  Description of Artificial Sequence: Synthetic oligonucleotide
cagggaauaggguauugag

SEQ ID NO: 363577 - RNA, 19 nt, Artificial Sequence
  Description of Artificial Sequence: Synthetic oligonucleotide
uaggguugccauaacuccc

SEQ ID NO: 363578 - RNA, 19 nt, Artificial Sequence
  Description of Artificial Sequence: Synthetic oligonucleotide
caacgaacaagcauguuga

SEQ ID NO: 363579 - RNA, 19 nt, Artificial Sequence
  Description of Artificial Sequence: Synthetic oligonucleotide
agacgcaggaauucgugag

SEQ ID NO: 363580 - RNA, 19 nt, Artificial Sequence
  Description of Artificial Sequence: Synthetic oligonucleotide
cuggcggaggcucugaacc

SEQ ID NO: 363581 - RNA, 19 nt, Artificial Sequence
  Description of Artificial Sequence: Synthetic oligonucleotide
aagacgcaggaauucguga

SEQ ID NO: 363582 - RNA, 19 nt, Artificial Sequence
  Description of Artificial Sequence: Synthetic oligonucleotide
auagguagcaaacccucca

SEQ ID NO: 363583 - RNA, 19 nt, Artificial Sequence
  Description of Artificial Sequence: Synthetic oligonucleotide
ugguagguaugucccaugc

SEQ ID NO: 363584 - RNA, 19 nt, Artificial Sequence
  Description of Artificial Sequence: Synthetic oligonucleotide
uuauggaccugggacuugg

SEQ ID NO: 363585 - RNA, 19 nt, Artificial Sequence
  Description of Artificial Sequence: Synthetic oligonucleotide
aacccuccaucagaauucc

SEQ ID NO: 363586 - RNA, 19 nt, Artificial Sequence
  Description of Artificial Sequence: Synthetic oligonucleotide
cagcuauaaacauucagga

SEQ ID NO: 363587 - RNA, 19 nt, Artificial Sequence
  Description of Artificial Sequence: Synthetic oligonucleotide
agcuguguggaguguauag

SEQ ID NO: 363588 - RNA, 19 nt, Artificial Sequence
  Description of Artificial Sequence: Synthetic oligonucleotide
agggacauugcuucugcag

SEQ ID NO: 363589 - RNA, 19 nt, Artificial Sequence
  Description of Artificial Sequence: Synthetic oligonucleotide
uguaaucugggauccuaga

SEQ ID NO: 363590 - RNA, 19 nt, Artificial Sequence
  Description of Artificial Sequence: Synthetic oligonucleotide
ucggaacuaaaccuacacu

SEQ ID NO: 363591 - RNA, 19 nt, Artificial Sequence
  Description of Artificial Sequence: Synthetic oligonucleotide
gugaagaauguuccgagca

SEQ ID NO: 363592 - RNA, 19 nt, Artificial Sequence
  Description of Artificial Sequence: Synthetic oligonucleotide
uacguccacagcaucacac

SEQ ID NO: 363593 - RNA, 19 nt, Artificial Sequence
  Description of Artificial Sequence: Synthetic oligonucleotide
agcgagggaauugucaggg

SEQ ID NO: 363594 - RNA, 19 nt, Artificial Sequence
  Description of Artificial Sequence: Synthetic oligonucleotide
accacuuugagugacacuu

SEQ ID NO: 363595 - RNA, 19 nt, Artificial Sequence
  Description of Artificial Sequence: Synthetic oligonucleotide
acuaaaccuacacugccaa

SEQ ID NO: 363596 - RNA, 19 nt, Artificial Sequence
  Description of Artificial Sequence: Synthetic oligonucleotide
caauccgcaacgauccagc

SEQ ID NO: 363597 - RNA, 19 nt, Artificial Sequence
  Description of Artificial Sequence: Synthetic oligonucleotide
cuuucggcagaacuccagg

SEQ ID NO: 363598 - RNA, 19 nt, Artificial Sequence
  Description of Artificial Sequence: Synthetic oligonucleotide
aguacguccacagcaucac

SEQ ID NO: 363599 - RNA, 19 nt, Artificial Sequence
  Description of Artificial Sequence: Synthetic oligonucleotide
ugguacuauggaaacguuc

SEQ ID NO: 363600 - RNA, 19 nt, Artificial Sequence
  Description of Artificial Sequence: Synthetic oligonucleotide
aaagacgcaggaauucgug

SEQ ID NO: 363601 - RNA, 19 nt, Artificial Sequence
  Description of Artificial Sequence: Synthetic oligonucleotide
guagguaugucccaugcaa

SEQ ID NO: 363602 - RNA, 19 nt, Artificial Sequence
  Description of Artificial Sequence: Synthetic oligonucleotide
gggacauugcuucugcagg

SEQ ID NO: 363603 - RNA, 19 nt, Artificial Sequence
  Description of Artificial Sequence: Synthetic oligonucleotide
uuaaaccacuuugagugac

SEQ ID NO: 363604 - RNA, 19 nt, Artificial Sequence
  Description of Artificial Sequence: Synthetic oligonucleotide
cauucagggaacaaccaca

SEQ ID NO: 363605 - RNA, 19 nt, Artificial Sequence
  Description of Artificial Sequence: Synthetic oligonucleotide
ugcugaugcucuuagugaa

SEQ ID NO: 363606 - RNA, 19 nt, Artificial Sequence
  Description of Artificial Sequence: Synthetic oligonucleotide
aggcugguacuauggaaac

SEQ ID NO: 363607 - RNA, 19 nt, Artificial Sequence
  Description of Artificial Sequence: Synthetic oligonucleotide
ugauugagggacauugcuu

SEQ ID NO: 363608 - RNA, 19 nt, Artificial Sequence
  Description of Artificial Sequence: Synthetic oligonucleotide
uggagaagcgacccagggc

SEQ ID NO: 363609 - RNA, 19 nt, Artificial Sequence
  Description of Artificial Sequence: Synthetic oligonucleotide
ucaucaggggacacguugu

SEQ ID NO: 363610 - RNA, 19 nt, Artificial Sequence
  Description of Artificial Sequence: Synthetic oligonucleotide
cuucugcacgagcagaccc

SEQ ID NO: 363611 - RNA, 19 nt, Artificial Sequence
  Description of Artificial Sequence: Synthetic oligonucleotide
gaauugucaggguacaggu

SEQ ID NO: 363612 - RNA, 19 nt, Artificial Sequence
  Description of Artificial Sequence: Synthetic oligonucleotide
ggcgacaauauguucauac

SEQ ID NO: 363613 - RNA, 19 nt, Artificial Sequence
  Description of Artificial Sequence: Synthetic oligonucleotide
guagcaaacccuccaucag

SEQ ID NO: 363614 - RNA, 19 nt, Artificial Sequence
  Description of Artificial Sequence: Synthetic oligonucleotide
agcgcugucccaaacacag

SEQ ID NO: 363615 - RNA, 19 nt, Artificial Sequence
  Description of Artificial Sequence: Synthetic oligonucleotide
acgcaggaauucgugagcc

SEQ ID NO: 363616 - RNA, 19 nt, Artificial Sequence
  Description of Artificial Sequence: Synthetic oligonucleotide
ucggcagaacuccaggccu

SEQ ID NO: 363617 - RNA, 19 nt, Artificial Sequence
  Description of Artificial Sequence: Synthetic oligonucleotide
ggaauugucaggguacagg

SEQ ID NO: 363618 - RNA, 19 nt, Artificial Sequence
  Description of Artificial Sequence: Synthetic oligonucleotide
ugagggguucagcaacucc

SEQ ID NO: 363619 - RNA, 19 nt, Artificial Sequence
  Description of Artificial Sequence: Synthetic oligonucleotide
cauagguagcaaacccucc

SEQ ID NO: 363620 - RNA, 19 nt, Artificial Sequence
  Description of Artificial Sequence: Synthetic oligonucleotide
uguaacuuguguagcugau

SEQ ID NO: 363621 - RNA, 19 nt, Artificial Sequence
  Description of Artificial Sequence: Synthetic oligonucleotide
aacuaaaccuacacugcca

SEQ ID NO: 363622 - RNA, 19 nt, Artificial Sequence
  Description of Artificial Sequence: Synthetic oligonucleotide
ccaaauguaaucugggauc

SEQ ID NO: 363623 - RNA, 19 nt, Artificial Sequence
  Description of Artificial Sequence: Synthetic oligonucleotide
ugaaggggaaaccacccuu

SEQ ID NO: 363624 - RNA, 19 nt, Artificial Sequence
  Description of Artificial Sequence: Synthetic oligonucleotide
uccuguaacuuguguagcu

SEQ ID NO: 363625 - RNA, 19 nt, Artificial Sequence
  Description of Artificial Sequence: Synthetic oligonucleotide
ucaucggcgacaauauguu

SEQ ID NO: 363626 - RNA, 19 nt, Artificial Sequence
  Description of Artificial Sequence: Synthetic oligonucleotide
cauugagccuuucucugag

SEQ ID NO: 363627 - RNA, 19 nt, Artificial Sequence
  Description of Artificial Sequence: Synthetic oligonucleotide
uccgaagaccucugagggg

SEQ ID NO: 363628 - RNA, 19 nt, Artificial Sequence
  Description of Artificial Sequence: Synthetic oligonucleotide
guauaaagcgaguuugucu

SEQ ID NO: 363629 - RNA, 19 nt, Artificial Sequence
  Description of Artificial Sequence: Synthetic oligonucleotide
uccccauugagccuuucuc

SEQ ID NO: 363630 - RNA, 19 nt, Artificial Sequence
  Description of Artificial Sequence: Synthetic oligonucleotide
gugcaauccgcaacgaucc

SEQ ID NO: 363631 - RNA, 19 nt, Artificial Sequence
  Description of Artificial Sequence: Synthetic oligonucleotide
ggacuuguccucaacaugc

SEQ ID NO: 363632 - RNA, 19 nt, Artificial Sequence
  Description of Artificial Sequence: Synthetic oligonucleotide
ugccucacuccccauugag

SEQ ID NO: 363633 - RNA, 19 nt, Artificial Sequence
  Description of Artificial Sequence: Synthetic oligonucleotide
gguacuauggaaacguuca

SEQ ID NO: 363634 - RNA, 19 nt, Artificial Sequence
  Description of Artificial Sequence: Synthetic oligonucleotide
aguugcaggccugggacac

SEQ ID NO: 363635 - RNA, 19 nt, Artificial Sequence
  Description of Artificial Sequence: Synthetic oligonucleotide
agugaaccggucaucggcg

SEQ ID NO: 363636 - RNA, 19 nt, Artificial Sequence
  Description of Artificial Sequence: Synthetic oligonucleotide
caggauguuuauuaaggga

SEQ ID NO: 363637 - RNA, 19 nt, Artificial Sequence
  Description of Artificial Sequence: Synthetic oligonucleotide
ccaacgaacaagcauguug

SEQ ID NO: 363638 - RNA, 19 nt, Artificial Sequence
  Description of Artificial Sequence: Synthetic oligonucleotide
cuagggacaauagccacug

SEQ ID NO: 363639 - RNA, 19 nt, Artificial Sequence
  Description of Artificial Sequence: Synthetic oligonucleotide
uucugcacgagcagaccca

SEQ ID NO: 363640 - RNA, 19 nt, Artificial Sequence
  Description of Artificial Sequence: Synthetic oligonucleotide
gugcuuggauagcaaaugc

SEQ ID NO: 363641 - RNA, 19 nt, Artificial Sequence
  Description of Artificial Sequence: Synthetic oligonucleotide
ucaggcugguacuauggaa

SEQ ID NO: 363642 - RNA, 19 nt, Artificial Sequence
  Description of Artificial Sequence: Synthetic oligonucleotide
guguagucaaucaugaugu

SEQ ID NO: 363643 - RNA, 19 nt, Artificial Sequence
  Description of Artificial Sequence: Synthetic oligonucleotide
cggaacuaaaccuacacug

SEQ ID NO: 363644 - RNA, 19 nt, Artificial Sequence
  Description of Artificial Sequence: Synthetic oligonucleotide
aagcgaguuugucuuuccu

SEQ ID NO: 363645 - RNA, 19 nt, Artificial Sequence
  Description of Artificial Sequence: Synthetic oligonucleotide
ucaccgcugagguacacuc

SEQ ID NO: 363646 - RNA, 19 nt, Artificial Sequence
  Description of Artificial Sequence: Synthetic oligonucleotide
auuaagggagucagugauc

SEQ ID NO: 363647 - RNA, 19 nt, Artificial Sequence
  Description of Artificial Sequence: Synthetic oligonucleotide
gugccuaaagacaccaacc

SEQ ID NO: 363648 - RNA, 19 nt, Artificial Sequence
  Description of Artificial Sequence: Synthetic oligonucleotide
aucggcgacaauauguuca

SEQ ID NO: 363649 - RNA, 19 nt, Artificial Sequence
  Description of Artificial Sequence: Synthetic oligonucleotide
aaaccacccuugugcaucu

SEQ ID NO: 363650 - RNA, 19 nt, Artificial Sequence
  Description of Artificial Sequence: Synthetic oligonucleotide
uccuagggacaauagccac

SEQ ID NO: 363651 - RNA, 19 nt, Artificial Sequence
  Description of Artificial Sequence: Synthetic oligonucleotide
uguuccgagcacgaacaag

SEQ ID NO: 363652 - RNA, 19 nt, Artificial Sequence
  Description of Artificial Sequence: Synthetic oligonucleotide
aaacguucauacagguuga

SEQ ID NO: 363653 - RNA, 19 nt, Artificial Sequence
  Description of Artificial Sequence: Synthetic oligonucleotide
aagaauguuccgagcacga

SEQ ID NO: 363654 - RNA, 19 nt, Artificial Sequence
  Description of Artificial Sequence: Synthetic oligonucleotide
ucaacaugcaggccccauc

SEQ ID NO: 363655 - RNA, 19 nt, Artificial Sequence
  Description of Artificial Sequence: Synthetic oligonucleotide
cugaagcuagucucggaac

SEQ ID NO: 363656 - RNA, 19 nt, Artificial Sequence
  Description of Artificial Sequence: Synthetic oligonucleotide
agucggguggcguagcagu

SEQ ID NO: 363657 - RNA, 19 nt, Artificial Sequence
  Description of Artificial Sequence: Synthetic oligonucleotide
caacccugacccuaucccc

SEQ ID NO: 363658 - RNA, 19 nt, Artificial Sequence
  Description of Artificial Sequence: Synthetic oligonucleotide
auguuuauuaagggaguca

SEQ ID NO: 363659 - RNA, 19 nt, Artificial Sequence
  Description of Artificial Sequence: Synthetic oligonucleotide
agcauaccagcaccauagg

SEQ ID NO: 363660 - RNA, 19 nt, Artificial Sequence
  Description of Artificial Sequence: Synthetic oligonucleotide
ugggauccuagagacgugc

SEQ ID NO: 363661 - RNA, 19 nt, Artificial Sequence
  Description of Artificial Sequence: Synthetic oligonucleotide
guugaggaguccauacacc

SEQ ID NO: 363662 - RNA, 19 nt, Artificial Sequence
  Description of Artificial Sequence: Synthetic oligonucleotide
accgcugagguacacucca

SEQ ID NO: 363663 - RNA, 19 nt, Artificial Sequence
  Description of Artificial Sequence: Synthetic oligonucleotide
ucacacagucgcucucggg

SEQ ID NO: 363664 - RNA, 19 nt, Artificial Sequence
  Description of Artificial Sequence: Synthetic oligonucleotide
ugcucaacaguacguccac

SEQ ID NO: 363665 - RNA, 19 nt, Artificial Sequence
  Description of Artificial Sequence: Synthetic oligonucleotide
cuucaaacccucagcugug

SEQ ID NO: 363666 - RNA, 19 nt, Artificial Sequence
  Description of Artificial Sequence: Synthetic oligonucleotide
cacguauuauggaccuggg

SEQ ID NO: 363667 - RNA, 19 nt, Artificial Sequence
  Description of Artificial Sequence: Synthetic oligonucleotide
cuaaaccuacacugccaag

SEQ ID NO: 363668 - RNA, 19 nt, Artificial Sequence
  Description of Artificial Sequence: Synthetic oligonucleotide
cagaggaagucacugguca

SEQ ID NO: 363669 - RNA, 19 nt, Artificial Sequence
  Description of Artificial Sequence: Synthetic oligonucleotide
acgaacaagcauguugaug

SEQ ID NO: 363670 - RNA, 19 nt, Artificial Sequence
  Description of Artificial Sequence: Synthetic oligonucleotide
acguucauacagguugagg

SEQ ID NO: 363671 - RNA, 19 nt, Artificial Sequence
  Description of Artificial Sequence: Synthetic oligonucleotide
guauugaguccuucccagc

SEQ ID NO: 363672 - RNA, 19 nt, Artificial Sequence
  Description of Artificial Sequence: Synthetic oligonucleotide
gcacguauuauggaccugg

SEQ ID NO: 363673 - RNA, 19 nt, Artificial Sequence
  Description of Artificial Sequence: Synthetic oligonucleotide
ugacccuauccccagccuc

SEQ ID NO: 363674 - RNA, 19 nt, Artificial Sequence
  Description of Artificial Sequence: Synthetic oligonucleotide
ggaauaggguauugagucc

SEQ ID NO: 363675 - RNA, 19 nt, Artificial Sequence
  Description of Artificial Sequence: Synthetic oligonucleotide
uggauagcaaaugcaguau

SEQ ID NO: 363676 - RNA, 19 nt, Artificial Sequence
  Description of Artificial Sequence: Synthetic oligonucleotide
aacguucauacagguugag

SEQ ID NO: 363677 - RNA, 19 nt, Artificial Sequence
  Description of Artificial Sequence: Synthetic oligonucleotide
uauuauggaccugggacuu

SEQ ID NO: 363678 - RNA, 19 nt, Artificial Sequence
  Description of Artificial Sequence: Synthetic oligonucleotide
cacauaacgccgcugcuca

SEQ ID NO: 363679 - RNA, 19 nt, Artificial Sequence
  Description of Artificial Sequence: Synthetic oligonucleotide
acgagcagacccaucuugg

SEQ ID NO: 363680 - RNA, 19 nt, Artificial Sequence
  Description of Artificial Sequence: Synthetic oligonucleotide
ggaguguauagcucaucag

SEQ ID NO: 363681 - RNA, 19 nt, Artificial Sequence
  Description of Artificial Sequence: Synthetic oligonucleotide
aacaagggucuugccucac

SEQ ID NO: 363682 - RNA, 19 nt, Artificial Sequence
  Description of Artificial Sequence: Synthetic oligonucleotide
caucuggcgguaauacuuc

SEQ ID NO: 363683 - RNA, 19 nt, Artificial Sequence
  Description of Artificial Sequence: Synthetic oligonucleotide
guauagcucaucaggggac

SEQ ID NO: 363684 - RNA, 19 nt, Artificial Sequence
  Description of Artificial Sequence: Synthetic oligonucleotide
gaauaggguauugaguccu

SEQ ID NO: 363685 - RNA, 19 nt, Artificial Sequence
  Description of Artificial Sequence: Synthetic oligonucleotide
agacgugcuccuggaaggc

SEQ ID NO: 363686 - RNA, 19 nt, Artificial Sequence
  Description of Artificial Sequence: Synthetic oligonucleotide
acaagcauguugaugguuu

SEQ ID NO: 363687 - RNA, 19 nt, Artificial Sequence
  Description of Artificial Sequence: Synthetic oligonucleotide
gaccugugaaagacgcagg

SEQ ID NO: 363688 - RNA, 19 nt, Artificial Sequence
  Description of Artificial Sequence: Synthetic oligonucleotide
uuuugauagcccgcugccu

SEQ ID NO: 363689 - RNA, 19 nt, Artificial Sequence
  Description of Artificial Sequence: Synthetic oligonucleotide
uuagucggguggcguagca

SEQ ID NO: 363690 - RNA, 19 nt, Artificial Sequence
  Description of Artificial Sequence: Synthetic oligonucleotide
cagguuggagaagcgaccc

SEQ ID NO: 363691 - RNA, 19 nt, Artificial Sequence
  Description of Artificial Sequence: Synthetic oligonucleotide
agggaauaggguauugagu

SEQ ID NO: 363692 - RNA, 19 nt, Artificial Sequence
  Description of Artificial Sequence: Synthetic oligonucleotide
acguauuauggaccuggga

SEQ ID NO: 363693 - RNA, 19 nt, Artificial Sequence
  Description of Artificial Sequence: Synthetic oligonucleotide
uguagucaaucaugauguc

SEQ ID NO: 363694 - RNA, 19 nt, Artificial Sequence
  Description of Artificial Sequence: Synthetic oligonucleotide
cgacaauauguucauacag

SEQ ID NO: 363695 - RNA, 19 nt, Artificial Sequence
  Description of Artificial Sequence: Synthetic oligonucleotide
ugcucuuagugaaccgguc

SEQ ID NO: 363696 - RNA, 19 nt, Artificial Sequence
  Description of Artificial Sequence: Synthetic oligonucleotide
acauugcuucugcaggagu

SEQ ID NO: 363697 - RNA, 19 nt, Artificial Sequence
  Description of Artificial Sequence: Synthetic oligonucleotide
uccgagcacgaacaagguc

SEQ ID NO: 363698 - RNA, 19 nt, Artificial Sequence
  Description of Artificial Sequence: Synthetic oligonucleotide
agugacacuuuuaguauaa

SEQ ID NO: 363699 - RNA, 19 nt, Artificial Sequence
  Description of Artificial Sequence: Synthetic oligonucleotide
ccgagcacgaacaagguca

SEQ ID NO: 363700 - RNA, 19 nt, Artificial Sequence
  Description of Artificial Sequence: Synthetic oligonucleotide
gaguuccuagggacaauag

SEQ ID NO: 363701 - RNA, 19 nt, Artificial Sequence
  Description of Artificial Sequence: Synthetic oligonucleotide
ggugccauaggugaaacaa

SEQ ID NO: 363702 - RNA, 19 nt, Artificial Sequence
  Description of Artificial Sequence: Synthetic oligonucleotide
gugaacaagggucuugccu

SEQ ID NO: 363703 - RNA, 19 nt, Artificial Sequence
  Description of Artificial Sequence: Synthetic oligonucleotide
uauaaacauucaggacggc

SEQ ID NO: 363704 - RNA, 19 nt, Artificial Sequence
  Description of Artificial Sequence: Synthetic oligonucleotide
ucggcgacaauauguucau

SEQ ID NO: 363705 - RNA, 19 nt, Artificial Sequence
  Description of Artificial Sequence: Synthetic oligonucleotide
acuuagucggguggcguag

SEQ ID NO: 363706 - RNA, 19 nt, Artificial Sequence
  Description of Artificial Sequence: Synthetic oligonucleotide
ggcagauagaccugccggc

SEQ ID NO: 363707 - RNA, 19 nt, Artificial Sequence
  Description of Artificial Sequence: Synthetic oligonucleotide
ugaaccggucaucggcgac

SEQ ID NO: 363708 - RNA, 19 nt, Artificial Sequence
  Description of Artificial Sequence: Synthetic oligonucleotide
guaugucccaugcaagcaa

SEQ ID NO: 363709 - RNA, 19 nt, Artificial Sequence
  Description of Artificial Sequence: Synthetic oligonucleotide
auggcccauccacugacca

SEQ ID NO: 363710 - RNA, 19 nt, Artificial Sequence
  Description of Artificial Sequence: Synthetic oligonucleotide
ggacaauagccacugcuca

SEQ ID NO: 363711 - RNA, 19 nt, Artificial Sequence
  Description of Artificial Sequence: Synthetic oligonucleotide
ucuuagugaaccggucauc

SEQ ID NO: 363712 - RNA, 19 nt, Artificial Sequence
  Description of Artificial Sequence: Synthetic oligonucleotide
caggaauucgugagccuuc

SEQ ID NO: 363713 - RNA, 19 nt, Artificial Sequence
  Description of Artificial Sequence: Synthetic oligonucleotide
ccuagagacgugcuccugg

SEQ ID NO: 363714 - RNA, 19 nt, Artificial Sequence
  Description of Artificial Sequence: Synthetic oligonucleotide
cuuggauagcaaaugcagu

SEQ ID NO: 363715 - RNA, 19 nt, Artificial Sequence
  Description of Artificial Sequence: Synthetic oligonucleotide
cugugcuggccaauugaug

SEQ ID NO: 363716 - RNA, 19 nt, Artificial Sequence
  Description of Artificial Sequence: Synthetic oligonucleotide
guagacaaaggaggcggug

SEQ ID NO: 363717 - RNA, 19 nt, Artificial Sequence
  Description of Artificial Sequence: Synthetic oligonucleotide
auccgcaacgauccagcca

SEQ ID NO: 363718 - RNA, 19 nt, Artificial Sequence
  Description of Artificial Sequence: Synthetic oligonucleotide
aagaccucugagggguuca

SEQ ID NO: 363719 - RNA, 19 nt, Artificial Sequence
  Description of Artificial Sequence: Synthetic oligonucleotide
auaacgccgcugcucacaa

SEQ ID NO: 363720 - RNA, 19 nt, Artificial Sequence
  Description of Artificial Sequence: Synthetic oligonucleotide
cuggguaguguucauggaa

SEQ ID NO: 363721 - RNA, 19 nt, Artificial Sequence
  Description of Artificial Sequence: Synthetic oligonucleotide
aguccuucccagcuauaaa

SEQ ID NO: 363722 - RNA, 19 nt, Artificial Sequence
  Description of Artificial Sequence: Synthetic oligonucleotide
cugugaaagacgcaggaau

SEQ ID NO: 363723 - RNA, 19 nt, Artificial Sequence
  Description of Artificial Sequence: Synthetic oligonucleotide
gugagccuucugcaggcag

SEQ ID NO: 363724 - RNA, 19 nt, Artificial Sequence
  Description of Artificial Sequence: Synthetic oligonucleotide
caguacguccacagcauca

SEQ ID NO: 363725 - RNA, 19 nt, Artificial Sequence
  Description of Artificial Sequence: Synthetic oligonucleotide
gucaucggcgacaauaugu

SEQ ID NO: 363726 - RNA, 19 nt, Artificial Sequence
  Description of Artificial Sequence: Synthetic oligonucleotide
auccuagagacgugcuccu

SEQ ID NO: 363727 - RNA, 19 nt, Artificial Sequence
  Description of Artificial Sequence: Synthetic oligonucleotide
cugaccgcagguaccgcac

SEQ ID NO: 363728 - RNA, 19 nt, Artificial Sequence
  Description of Artificial Sequence: Synthetic oligonucleotide
ggggcacuuagucgggugg

SEQ ID NO: 363729 - RNA, 19 nt, Artificial Sequence
  Description of Artificial Sequence: Synthetic oligonucleotide
ggcacucugcacauaacgc

SEQ ID NO: 363730 - RNA, 19 nt, Artificial Sequence
  Description of Artificial Sequence: Synthetic oligonucleotide
ccaacccugacccuauccc

SEQ ID NO: 363731 - RNA, 19 nt, Artificial Sequence
  Description of Artificial Sequence: Synthetic oligonucleotide
cccagcacguauuauggac

SEQ ID NO: 363732 - RNA, 19 nt, Artificial Sequence
  Description of Artificial Sequence: Synthetic oligonucleotide
auaaagcgaguuugucuuu

SEQ ID NO: 363733 - RNA, 19 nt, Artificial Sequence
  Description of Artificial Sequence: Synthetic oligonucleotide
uauguucauacagcauuuu

SEQ ID NO: 363734 - RNA, 19 nt, Artificial Sequence
  Description of Artificial Sequence: Synthetic oligonucleotide
ggucucauagguagcaaac

SEQ ID NO: 363735 - RNA, 19 nt, Artificial Sequence
  Description of Artificial Sequence: Synthetic oligonucleotide
cuagagacgugcuccugga

SEQ ID NO: 363736 - RNA, 19 nt, Artificial Sequence
  Description of Artificial Sequence: Synthetic oligonucleotide
ugugcaucuggcgguaaua

SEQ ID NO: 363737 - RNA, 19 nt, Artificial Sequence
  Description of Artificial Sequence: Synthetic oligonucleotide
aucagggcccagcacguau

SEQ ID NO: 363738 - RNA, 19 nt, Artificial Sequence
  Description of Artificial Sequence: Synthetic oligonucleotide
ccaauugaugcuggcauag

SEQ ID NO: 363739 - RNA, 19 nt, Artificial Sequence
  Description of Artificial Sequence: Synthetic oligonucleotide
guagucaaucaugaugucu

SEQ ID NO: 363740 - RNA, 19 nt, Artificial Sequence
  Description of Artificial Sequence: Synthetic oligonucleotide
accacaucucagggaauag

SEQ ID NO: 363741 - RNA, 19 nt, Artificial Sequence
  Description of Artificial Sequence: Synthetic oligonucleotide
cgcuuggucucauagguag

SEQ ID NO: 363742 - RNA, 19 nt, Artificial Sequence
  Description of Artificial Sequence: Synthetic oligonucleotide
auagagcuccuggcggagg

SEQ ID NO: 363743 - RNA, 19 nt, Artificial Sequence
  Description of Artificial Sequence: Synthetic oligonucleotide
acaucucagggaauagggu

SEQ ID NO: 363744 - RNA, 19 nt, Artificial Sequence
  Description of Artificial Sequence: Synthetic oligonucleotide
auaguucagcgcuguccca

SEQ ID NO: 363745 - RNA, 19 nt, Artificial Sequence
  Description of Artificial Sequence: Synthetic oligonucleotide
uacuucugauagucaggaa

SEQ ID NO: 363746 - RNA, 19 nt, Artificial Sequence
  Description of Artificial Sequence: Synthetic oligonucleotide
cccugauugagggacauug

SEQ ID NO: 363747 - RNA, 19 nt, Artificial Sequence
  Description of Artificial Sequence: Synthetic oligonucleotide
gugcaucuggcgguaauac

SEQ ID NO: 363748 - RNA, 19 nt, Artificial Sequence
  Description of Artificial Sequence: Synthetic oligonucleotide
gagcagacccaucuuggua

SEQ ID NO: 363749 - RNA, 19 nt, Artificial Sequence
  Description of Artificial Sequence: Synthetic oligonucleotide
agucucggaacuaaaccua

SEQ ID NO: 363750 - RNA, 19 nt, Artificial Sequence
  Description of Artificial Sequence: Synthetic oligonucleotide
uagucggguggcguagcag

SEQ ID NO: 363751 - RNA, 19 nt, Artificial Sequence
  Description of Artificial Sequence: Synthetic oligonucleotide
ccugauugagggacauugc

SEQ ID NO: 363752 - RNA, 19 nt, Artificial Sequence
  Description of Artificial Sequence: Synthetic oligonucleotide
aggaauucgugagccuucu

SEQ ID NO: 363753 - RNA, 19 nt, Artificial Sequence
  Description of Artificial Sequence: Synthetic oligonucleotide
caaucaugaugucuccgaa

SEQ ID NO: 363754 - RNA, 19 nt, Artificial Sequence
  Description of Artificial Sequence: Synthetic oligonucleotide
gcgacaauauguucauaca

SEQ ID NO: 363755 - RNA, 19 nt, Artificial Sequence
  Description of Artificial Sequence: Synthetic oligonucleotide
uagagacgugcuccuggaa

SEQ ID NO: 363756 - RNA, 19 nt, Artificial Sequence
  Description of Artificial Sequence: Synthetic oligonucleotide
caucggcgacaauauguuc

SEQ ID NO: 363757 - RNA, 19 nt, Artificial Sequence
  Description of Artificial Sequence: Synthetic oligonucleotide
uggcgguaauacuucugau

SEQ ID NO: 363758 - RNA, 19 nt, Artificial Sequence
  Description of Artificial Sequence: Synthetic oligonucleotide
ggacauugcuucugcagga

SEQ ID NO: 363759 - RNA, 19 nt, Artificial Sequence
  Description of Artificial Sequence: Synthetic oligonucleotide
uggccagcgagggaauugu

SEQ ID NO: 363760 - RNA, 19 nt, Artificial Sequence
  Description of Artificial Sequence: Synthetic oligonucleotide
aguagacaaaggaggcggu

SEQ ID NO: 363761 - RNA, 19 nt, Artificial Sequence
  Description of Artificial Sequence: Synthetic oligonucleotide
gcucuuagugaaccgguca

SEQ ID NO: 363762 - RNA, 19 nt, Artificial Sequence
  Description of Artificial Sequence: Synthetic oligonucleotide
cugaccaacgaacaagcau

SEQ ID NO: 363763 - RNA, 19 nt, Artificial Sequence
  Description of Artificial Sequence: Synthetic oligonucleotide
auuauggaccugggacuug

SEQ ID NO: 363764 - RNA, 19 nt, Artificial Sequence
  Description of Artificial Sequence: Synthetic oligonucleotide
aauaggguauugaguccuu

SEQ ID NO: 363765 - RNA, 19 nt, Artificial Sequence
  Description of Artificial Sequence: Synthetic oligonucleotide
cuuagucggguggcguagc

SEQ ID NO: 363766 - RNA, 19 nt, Artificial Sequence
  Description of Artificial Sequence: Synthetic oligonucleotide
uccccagccucauguuuac

SEQ ID NO: 363767 - RNA, 19 nt, Artificial Sequence
  Description of Artificial Sequence: Synthetic oligonucleotide
ccggcagugacaccagagg

SEQ ID NO: 363768 - RNA, 19 nt, Artificial Sequence
  Description of Artificial Sequence: Synthetic oligonucleotide
ccucuggggcacuuagucg

SEQ ID NO: 363769 - RNA, 19 nt, Artificial Sequence
  Description of Artificial Sequence: Synthetic oligonucleotide
gcagacccaucuugguagg

SEQ ID NO: 363770 - RNA, 19 nt, Artificial Sequence
  Description of Artificial Sequence: Synthetic oligonucleotide
aguucagcgcugucccaaa

SEQ ID NO: 363771 - RNA, 19 nt, Artificial Sequence
  Description of Artificial Sequence: Synthetic oligonucleotide
ggcccaauacccaggauuc

SEQ ID NO: 363772 - RNA, 19 nt, Artificial Sequence
  Description of Artificial Sequence: Synthetic oligonucleotide
cccacgcuuggucucauag

SEQ ID NO: 363773 - RNA, 19 nt, Artificial Sequence
  Description of Artificial Sequence: Synthetic oligonucleotide
gugugcugaaggggaaacc

SEQ ID NO: 363774 - RNA, 19 nt, Artificial Sequence
  Description of Artificial Sequence: Synthetic oligonucleotide
gaagaccucugagggguuc

SEQ ID NO: 363775 - RNA, 19 nt, Artificial Sequence
  Description of Artificial Sequence: Synthetic oligonucleotide
agaauguuccgagcacgaa

SEQ ID NO: 363776 - RNA, 19 nt, Artificial Sequence
  Description of Artificial Sequence: Synthetic oligonucleotide
cauaacgccgcugcucaca

SEQ ID NO: 363777 - RNA, 19 nt, Artificial Sequence
  Description of Artificial Sequence: Synthetic oligonucleotide
ggauccuagagacgugcuc

SEQ ID NO: 363778 - RNA, 19 nt, Artificial Sequence
  Description of Artificial Sequence: Synthetic oligonucleotide
gagaagcgacccagggccc

SEQ ID NO: 363779 - RNA, 19 nt, Artificial Sequence
  Description of Artificial Sequence: Synthetic oligonucleotide
gguagguaugucccaugca

SEQ ID NO: 363780 - RNA, 19 nt, Artificial Sequence
  Description of Artificial Sequence: Synthetic oligonucleotide
ccacaucucagggaauagg

SEQ ID NO: 363781 - RNA, 19 nt, Artificial Sequence
  Description of Artificial Sequence: Synthetic oligonucleotide
cugagguacacuccacaua

SEQ ID NO: 363782 - RNA, 19 nt, Artificial Sequence
  Description of Artificial Sequence: Synthetic oligonucleotide
aaccggucaucggcgacaa

SEQ ID NO: 363783 - RNA, 19 nt, Artificial Sequence
  Description of Artificial Sequence: Synthetic oligonucleotide
guggccagcgagggaauug

SEQ ID NO: 363784 - RNA, 19 nt, Artificial Sequence
  Description of Artificial Sequence: Synthetic oligonucleotide
uaacgccgcugcucacaag

SEQ ID NO: 363785 - RNA, 19 nt, Artificial Sequence
  Description of Artificial Sequence: Synthetic oligonucleotide
gugggcagggaaccauuca

SEQ ID NO: 363786 - RNA, 19 nt, Artificial Sequence
  Description of Artificial Sequence: Synthetic oligonucleotide
caccauaggguugccauaa

SEQ ID NO: 363787 - RNA, 19 nt, Artificial Sequence
  Description of Artificial Sequence: Synthetic oligonucleotide
gcccauuacacaguagaca

SEQ ID NO: 363788 - RNA, 19 nt, Artificial Sequence
  Description of Artificial Sequence: Synthetic oligonucleotide
auguuccgagcacgaacaa

SEQ ID NO: 363789 - RNA, 19 nt, Artificial Sequence
  Description of Artificial Sequence: Synthetic oligonucleotide
gagcacgaacaaggucagg

SEQ ID NO: 363790 - RNA, 19 nt, Artificial Sequence
  Description of Artificial Sequence: Synthetic oligonucleotide
ugaugucgggaugccugac

SEQ ID NO: 363791 - RNA, 19 nt, Artificial Sequence
  Description of Artificial Sequence: Synthetic oligonucleotide
cacauaguucagcgcuguc

SEQ ID NO: 363792 - RNA, 19 nt, Artificial Sequence
  Description of Artificial Sequence: Synthetic oligonucleotide
gaccucugagggguucagc

SEQ ID NO: 363793 - RNA, 19 nt, Artificial Sequence
  Description of Artificial Sequence: Synthetic oligonucleotide
ggucaucggcgacaauaug

SEQ ID NO: 363794 - RNA, 19 nt, Artificial Sequence
  Description of Artificial Sequence: Synthetic oligonucleotide
gccaaaccaggugccauag

SEQ ID NO: 363795 - RNA, 19 nt, Artificial Sequence
  Description of Artificial Sequence: Synthetic oligonucleotide
guacguccacagcaucaca

SEQ ID NO: 363796 - RNA, 19 nt, Artificial Sequence
  Description of Artificial Sequence: Synthetic oligonucleotide
cucuuagugaaccggucau

SEQ ID NO: 363797 - RNA, 19 nt, Artificial Sequence
  Description of Artificial Sequence: Synthetic oligonucleotide
gugaaccggucaucggcga

SEQ ID NO: 363798 - RNA, 19 nt, Artificial Sequence
  Description of Artificial Sequence: Synthetic oligonucleotide
agcacguauuauggaccug

SEQ ID NO: 363799 - RNA, 19 nt, Artificial Sequence
  Description of Artificial Sequence: Synthetic oligonucleotide
gaccaacgaacaagcaugu

SEQ ID NO: 363800 - RNA, 19 nt, Artificial Sequence
  Description of Artificial Sequence: Synthetic oligonucleotide
ccagucuccauuggagagc

SEQ ID NO: 363801 - RNA, 19 nt, Artificial Sequence
  Description of Artificial Sequence: Synthetic oligonucleotide
caacagacaucugauuccu

SEQ ID NO: 363802 - RNA, 19 nt, Artificial Sequence
  Description of Artificial Sequence: Synthetic oligonucleotide
gguaccgcaccaucuccuc

SEQ ID NO: 363803 - RNA, 19 nt, Artificial Sequence
  Description of Artificial Sequence: Synthetic oligonucleotide
agccucauguuuacagaaa

SEQ ID NO: 363804 - RNA, 19 nt, Artificial Sequence
  Description of Artificial Sequence: Synthetic oligonucleotide
gcuggccaauugaugcugg

SEQ ID NO: 363805 - RNA, 19 nt, Artificial Sequence
  Description of Artificial Sequence: Synthetic oligonucleotide
gcuuucggcagaacuccag

SEQ ID NO: 363806 - RNA, 19 nt, Artificial Sequence
  Description of Artificial Sequence: Synthetic oligonucleotide
cagcacguauuauggaccu

SEQ ID NO: 363807 - RNA, 19 nt, Artificial Sequence
  Description of Artificial Sequence: Synthetic oligonucleotide
ggcccauuacacaguagac

SEQ ID NO: 363808 - RNA, 19 nt, Artificial Sequence
  Description of Artificial Sequence: Synthetic oligonucleotide
acgccgcugcucacaagac

SEQ ID NO: 363809 - RNA, 19 nt, Artificial Sequence
  Description of Artificial Sequence: Synthetic oligonucleotide
auagaccugccggcaguga

SEQ ID NO: 363810 - RNA, 19 nt, Artificial Sequence
  Description of Artificial Sequence: Synthetic oligonucleotide
guacuauggaaacguucau

SEQ ID NO: 363811 - RNA, 19 nt, Artificial Sequence
  Description of Artificial Sequence: Synthetic oligonucleotide
acccaucuugguagguaug

SEQ ID NO: 363812 - RNA, 19 nt, Artificial Sequence
  Description of Artificial Sequence: Synthetic oligonucleotide
ggauguuuauuaagggagu

SEQ ID NO: 363813 - RNA, 19 nt, Artificial Sequence
  Description of Artificial Sequence: Synthetic oligonucleotide
ggaauucgugagccuucug

SEQ ID NO: 363814 - RNA, 19 nt, Artificial Sequence
  Description of Artificial Sequence: Synthetic oligonucleotide
cugcccuauggucugggua

SEQ ID NO: 363815 - RNA, 19 nt, Artificial Sequence
  Description of Artificial Sequence: Synthetic oligonucleotide
gcacauaacgccgcugcuc

SEQ ID NO: 363816 - RNA, 19 nt, Artificial Sequence
  Description of Artificial Sequence: Synthetic oligonucleotide
guggaguguauagcucauc

SEQ ID NO: 363817 - RNA, 19 nt, Artificial Sequence
  Description of Artificial Sequence: Synthetic oligonucleotide
ccugccggcagugacacca

SEQ ID NO: 363818 - RNA, 19 nt, Artificial Sequence
  Description of Artificial Sequence: Synthetic oligonucleotide
ggcggaggcucugaaccag

SEQ ID NO: 363819 - RNA, 19 nt, Artificial Sequence
  Description of Artificial Sequence: Synthetic oligonucleotide
gcagauagaccugccggca

SEQ ID NO: 363820 - RNA, 19 nt, Artificial Sequence
  Description of Artificial Sequence: Synthetic oligonucleotide
gcugaugcucuuagugaac

SEQ ID NO: 363821 - RNA, 19 nt, Artificial Sequence
  Description of Artificial Sequence: Synthetic oligonucleotide
agcgacccagggcccagau

SEQ ID NO: 363822 - RNA, 19 nt, Artificial Sequence
  Description of Artificial Sequence: Synthetic oligonucleotide
cgagcacgaacaaggucag

SEQ ID NO: 363823 - RNA, 19 nt, Artificial Sequence
  Description of Artificial Sequence: Synthetic oligonucleotide
ucgggccaaugcugaugcu

SEQ ID NO: 363824 - RNA, 19 nt, Artificial Sequence
  Description of Artificial Sequence: Synthetic oligonucleotide
gcagugaugucgggaugcc

SEQ ID NO: 363825 - RNA, 19 nt, Artificial Sequence
  Description of Artificial Sequence: Synthetic oligonucleotide
gccaauugaugcuggcaua

SEQ ID NO: 363826 - RNA, 19 nt, Artificial Sequence
  Description of Artificial Sequence: Synthetic oligonucleotide
cagucuccauuggagagcu

SEQ ID NO: 363827 - RNA, 19 nt, Artificial Sequence
  Description of Artificial Sequence: Synthetic oligonucleotide
cuacacugccaagugccua

SEQ ID NO: 363828 - RNA, 19 nt, Artificial Sequence
  Description of Artificial Sequence: Synthetic oligonucleotide
ccuggcggaggcucugaac

SEQ ID NO: 363829 - RNA, 19 nt, Artificial Sequence
  Description of Artificial Sequence: Synthetic oligonucleotide
guaccgcaccaucuccucu

SEQ ID NO: 363830 - RNA, 19 nt, Artificial Sequence
  Description of Artificial Sequence: Synthetic oligonucleotide
accaacgaacaagcauguu

SEQ ID NO: 363831 - RNA, 19 nt, Artificial Sequence
  Description of Artificial Sequence: Synthetic oligonucleotide
acuccccauugagccuuuc

SEQ ID NO: 363832 - RNA, 19 nt, Artificial Sequence
  Description of Artificial Sequence: Synthetic oligonucleotide
cugcacgagcagacccauc

SEQ ID NO: 363833 - RNA, 19 nt, Artificial Sequence
  Description of Artificial Sequence: Synthetic oligonucleotide
caucaccgcugagguacac

SEQ ID NO: 363834 - RNA, 19 nt, Artificial Sequence
  Description of Artificial Sequence: Synthetic oligonucleotide
ggcguagcaguagcucaug

SEQ ID NO: 363835 - RNA, 19 nt, Artificial Sequence
  Description of Artificial Sequence: Synthetic oligonucleotide
caccaucagggagcugcac

SEQ ID NO: 363836 - RNA, 19 nt, Artificial Sequence
  Description of Artificial Sequence: Synthetic oligonucleotide
gccuccaacagugcuugga

SEQ ID NO: 363837 - RNA, 19 nt, Artificial Sequence
  Description of Artificial Sequence: Synthetic oligonucleotide
gcccauccacugaccaacg

SEQ ID NO: 363838 - RNA, 19 nt, Artificial Sequence
  Description of Artificial Sequence: Synthetic oligonucleotide
ggcccagauggggaagaug

SEQ ID NO: 363839 - RNA, 19 nt, Artificial Sequence
  Description of Artificial Sequence: Synthetic oligonucleotide
ccggucaucggcgacaaua

SEQ ID NO: 363840 - RNA, 19 nt, Artificial Sequence
  Description of Artificial Sequence: Synthetic oligonucleotide
caucaagacccagccaaau

SEQ ID NO: 363841 - RNA, 19 nt, Artificial Sequence
  Description of Artificial Sequence: Synthetic oligonucleotide
ucccugauugagggacauu

SEQ ID NO: 363842 - RNA, 19 nt, Artificial Sequence
  Description of Artificial Sequence: Synthetic oligonucleotide
cuccccauugagccuuucu

SEQ ID NO: 363843 - RNA, 19 nt, Artificial Sequence
  Description of Artificial Sequence: Synthetic oligonucleotide
gcaacgauccagccacagu

SEQ ID NO: 363844 - RNA, 19 nt, Artificial Sequence
  Description of Artificial Sequence: Synthetic oligonucleotide
ccuagggacaauagccacu

SEQ ID NO: 363845 - RNA, 19 nt, Artificial Sequence
  Description of Artificial Sequence: Synthetic oligonucleotide
gggaaccauucagggaaca

SEQ ID NO: 363846 - RNA, 19 nt, Artificial Sequence
  Description of Artificial Sequence: Synthetic oligonucleotide
ccccauugagccuuucucu

SEQ ID NO: 363847 - RNA, 19 nt, Artificial Sequence
  Description of Artificial Sequence: Synthetic oligonucleotide
cugugcaauccgcaacgau

SEQ ID NO: 363848 - RNA, 19 nt, Artificial Sequence
  Description of Artificial Sequence: Synthetic oligonucleotide
cugguacuauggaaacguu

SEQ ID NO: 363849 - RNA, 19 nt, Artificial Sequence
  Description of Artificial Sequence: Synthetic oligonucleotide
cgagggaauugucagggua

SEQ ID NO: 363850 - RNA, 19 nt, Artificial Sequence
  Description of Artificial Sequence: Synthetic oligonucleotide
ccaucaagacccagccaaa

SEQ ID NO: 363851 - RNA, 19 nt, Artificial Sequence
  Description of Artificial Sequence: Synthetic oligonucleotide
gcgacccagggcccagaug

SEQ ID NO: 363852 - RNA, 19 nt, Artificial Sequence
  Description of Artificial Sequence: Synthetic oligonucleotide
ggaaacguucauacagguu

SEQ ID NO: 363853 - RNA, 19 nt, Artificial Sequence
  Description of Artificial Sequence: Synthetic oligonucleotide
gcugugcaauccgcaacga

SEQ ID NO: 363854 - RNA, 19 nt, Artificial Sequence
  Description of Artificial Sequence: Synthetic oligonucleotide
cgcaacgauccagccacag

SEQ ID NO: 363855 - RNA, 19 nt, Artificial Sequence
  Description of Artificial Sequence: Synthetic oligonucleotide
cccaggauucugagagcca

SEQ ID NO: 363856 - RNA, 19 nt, Artificial Sequence
  Description of Artificial Sequence: Synthetic oligonucleotide
cagcuguguggaguguaua

SEQ ID NO: 363857 - RNA, 19 nt, Artificial Sequence
  Description of Artificial Sequence: Synthetic oligonucleotide
agguggccagcgagggaau

SEQ ID NO: 363858 - RNA, 19 nt, Artificial Sequence
  Description of Artificial Sequence: Synthetic oligonucleotide
accggucaucggcgacaau

SEQ ID NO: 363859 - RNA, 19 nt, Artificial Sequence
  Description of Artificial Sequence: Synthetic oligonucleotide
gcucccugauugagggaca

SEQ ID NO: 363860 - RNA, 19 nt, Artificial Sequence
  Description of Artificial Sequence: Synthetic oligonucleotide
gggauccuagagacgugcu

SEQ ID NO: 363861 - RNA, 19 nt, Artificial Sequence
  Description of Artificial Sequence: Synthetic oligonucleotide
cucccugauugagggacau

SEQ ID NO: 363862 - RNA, 19 nt, Artificial Sequence
  Description of Artificial Sequence: Synthetic oligonucleotide
cauuggugcccugcauuuu

SEQ ID NO: 363863 - RNA, 19 nt, Artificial Sequence
  Description of Artificial Sequence: Synthetic oligonucleotide
gcgagggaauugucagggu

SEQ ID NO: 363864 - RNA, 19 nt, Artificial Sequence
  Description of Artificial Sequence: Synthetic oligonucleotide
cggucaucggcgacaauau

SEQ ID NO: 363865 - RNA, 19 nt, Artificial Sequence
  Description of Artificial Sequence: Synthetic oligonucleotide
cgguaauacuucugauagu

SEQ ID NO: 363866 - RNA, 19 nt, Artificial Sequence
  Description of Artificial Sequence: Synthetic oligonucleotide
cuggggcacuuagucgggu

SEQ ID NO: 363867 - RNA, 19 nt, Artificial Sequence
  Description of Artificial Sequence: Synthetic oligonucleotide
gcacgagcagacccaucuu

SEQ ID NO: 363868 - RNA, 19 nt, Artificial Sequence
  Description of Artificial Sequence: Synthetic oligonucleotide
gcccaauacccaggauucu

SEQ ID NO: 363869 - RNA, 19 nt, Artificial Sequence
  Description of Artificial Sequence: Synthetic oligonucleotide
gcccuauggucuggguagu

SEQ ID NO: 363870 - RNA, 19 nt, Artificial Sequence
  Description of Artificial Sequence: Synthetic oligonucleotide
ccgcaacgauccagccaca

SEQ ID NO: 363871 - RNA, 19 nt, Artificial Sequence
  Description of Artificial Sequence: Synthetic oligonucleotide
cgcaggaauucgugagccu

SEQ ID NO: 363872 - RNA, 19 nt, Artificial Sequence
  Description of Artificial Sequence: Synthetic oligonucleotide
gcgcugucccaaacacagu

SEQ ID NO: 363873 - RNA, 19 nt, Artificial Sequence
  Description of Artificial Sequence: Synthetic oligonucleotide
cggcgacaauauguucaua

SEQ ID NO: 363874 - RNA, 19 nt, Artificial Sequence
  Description of Artificial Sequence: Synthetic oligonucleotide
ccgcugccucaggcuggua

SEQ ID NO: 363875 - RNA, 19 nt, Artificial Sequence
  Description of Artificial Sequence: Synthetic oligonucleotide
aggguuaugaauccgaaac

SEQ ID NO: 363876 - RNA, 19 nt, Artificial Sequence
  Description of Artificial Sequence: Synthetic oligonucleotide
uguguagagacucuguagg

SEQ ID NO: 363877 - RNA, 19 nt, Artificial Sequence
  Description of Artificial Sequence: Synthetic oligonucleotide
uuaugaauccgaaacagga

SEQ ID NO: 363878 - RNA, 19 nt, Artificial Sequence
  Description of Artificial Sequence: Synthetic oligonucleotide
guaucuggcagauaggugg

SEQ ID NO: 363879 - RNA, 19 nt, Artificial Sequence
  Description of Artificial Sequence: Synthetic oligonucleotide
ugcccuaugacccaggcgc

SEQ ID NO: 363880 - RNA, 19 nt, Artificial Sequence
  Description of Artificial Sequence: Synthetic oligonucleotide
uauggaaaccaauugggug

SEQ ID NO: 363881 - RNA, 19 nt, Artificial Sequence
  Description of Artificial Sequence: Synthetic oligonucleotide
agugcgacuccacagcucc

SEQ ID NO: 363882 - RNA, 19 nt, Artificial Sequence
  Description of Artificial Sequence: Synthetic oligonucleotide
auagcgaugugguacacag

SEQ ID NO: 363883 - RNA, 19 nt, Artificial Sequence
  Description of Artificial Sequence: Synthetic oligonucleotide
gaaaccucgguacuucugg

SEQ ID NO: 363884 - RNA, 19 nt, Artificial Sequence
  Description of Artificial Sequence: Synthetic oligonucleotide
aaaccaauuggguggagcu

SEQ ID NO: 363885 - RNA, 19 nt, Artificial Sequence
  Description of Artificial Sequence: Synthetic oligonucleotide
guagagacucuguaggugg

SEQ ID NO: 363886 - RNA, 19 nt, Artificial Sequence
  Description of Artificial Sequence: Synthetic oligonucleotide
ucuucuauucaggacaaag

SEQ ID NO: 363887 - RNA, 19 nt, Artificial Sequence
  Description of Artificial Sequence: Synthetic oligonucleotide
ugagaugauaaaggcaugg

SEQ ID NO: 363888 - RNA, 19 nt, Artificial Sequence
  Description of Artificial Sequence: Synthetic oligonucleotide
uguccaaacugccaaauuc

SEQ ID NO: 363889 - RNA, 19 nt, Artificial Sequence
  Description of Artificial Sequence: Synthetic oligonucleotide
ucgucaaauucccugagga

SEQ ID NO: 363890 - RNA, 19 nt, Artificial Sequence
  Description of Artificial Sequence: Synthetic oligonucleotide
cagacgaucaucuaugguc

SEQ ID NO: 363891 - RNA, 19 nt, Artificial Sequence
  Description of Artificial Sequence: Synthetic oligonucleotide
gcugaucagacauugaucc

SEQ ID NO: 363892 - RNA, 19 nt, Artificial Sequence
  Description of Artificial Sequence: Synthetic oligonucleotide
gcuauggucacugugaagg

SEQ ID NO: 363893 - RNA, 19 nt, Artificial Sequence
  Description of Artificial Sequence: Synthetic oligonucleotide
aaagauauggaaaccaauu

SEQ ID NO: 363894 - RNA, 19 nt, Artificial Sequence
  Description of Artificial Sequence: Synthetic oligonucleotide
ucuaccuuccagaugugca

SEQ ID NO: 363895 - RNA, 19 nt, Artificial Sequence
  Description of Artificial Sequence: Synthetic oligonucleotide
ucagacauugauccuucag

SEQ ID NO: 363896 - RNA, 19 nt, Artificial Sequence
  Description of Artificial Sequence: Synthetic oligonucleotide
ugagucucaccauccaccg

SEQ ID NO: 363897 - RNA, 19 nt, Artificial Sequence
  Description of Artificial Sequence: Synthetic oligonucleotide
acuuagucaggcuuucauc

SEQ ID NO: 363898 - RNA, 19 nt, Artificial Sequence
  Description of Artificial Sequence: Synthetic oligonucleotide
ugaaagauauggaaaccaa

SEQ ID NO: 363899 - RNA, 19 nt, Artificial Sequence
  Description of Artificial Sequence: Synthetic oligonucleotide
gacaggugaagaaaccucg

SEQ ID NO: 363900 - RNA, 19 nt, Artificial Sequence
  Description of Artificial Sequence: Synthetic oligonucleotide
gugccagcaacucagacgc

SEQ ID NO: 363901 - RNA, 19 nt, Artificial Sequence
  Description of Artificial Sequence: Synthetic oligonucleotide
gacccugccaacaacgucg

SEQ ID NO: 363902 - RNA, 19 nt, Artificial Sequence
  Description of Artificial Sequence: Synthetic oligonucleotide
ugccaaauucgacagguga

SEQ ID NO: 363903 - RNA, 19 nt, Artificial Sequence
  Description of Artificial Sequence: Synthetic oligonucleotide
acaacgucggccccaaggg

SEQ ID NO: 363904 - RNA, 19 nt, Artificial Sequence
  Description of Artificial Sequence: Synthetic oligonucleotide
aaauucgacaggugaagaa

SEQ ID NO: 363905 - RNA, 19 nt, Artificial Sequence
  Description of Artificial Sequence: Synthetic oligonucleotide
aaugcggcguccuggaaga

SEQ ID NO: 363906 - RNA, 19 nt, Artificial Sequence
  Description of Artificial Sequence: Synthetic oligonucleotide
ugacccacuaagcaccucc

SEQ ID NO: 363907 - RNA, 19 nt, Artificial Sequence
  Description of Artificial Sequence: Synthetic oligonucleotide
ugugccuggaugcugagau

SEQ ID NO: 363908 - RNA, 19 nt, Artificial Sequence
  Description of Artificial Sequence: Synthetic oligonucleotide
guuaugaauccgaaacagg

SEQ ID NO: 363909 - RNA, 19 nt, Artificial Sequence
  Description of Artificial Sequence: Synthetic oligonucleotide
uuugugacuggguagccaa

SEQ ID NO: 363910 - RNA, 19 nt, Artificial Sequence
  Description of Artificial Sequence: Synthetic oligonucleotide
cuucaggcggaguaguugc

SEQ ID NO: 363911 - RNA, 19 nt, Artificial Sequence
  Description of Artificial Sequence: Synthetic oligonucleotide
ugaagguacccucuguauc

SEQ ID NO: 363912 - RNA, 19 nt, Artificial Sequence
  Description of Artificial Sequence: Synthetic oligonucleotide
aacuguuguuccggcagcc

SEQ ID NO: 363913 - RNA, 19 nt, Artificial Sequence
  Description of Artificial Sequence: Synthetic oligonucleotide
aaccucgguacuucugguc

SEQ ID NO: 363914 - RNA, 19 nt, Artificial Sequence
  Description of Artificial Sequence: Synthetic oligonucleotide
cuaggcucacaacuggccg

SEQ ID NO: 363915 - RNA, 19 nt, Artificial Sequence
  Description of Artificial Sequence: Synthetic oligonucleotide
auccagucgguccucagag

SEQ ID NO: 363916 - RNA, 19 nt, Artificial Sequence
  Description of Artificial Sequence: Synthetic oligonucleotide
auccgaaacaggaggauac

SEQ ID NO: 363917 - RNA, 19 nt, Artificial Sequence
  Description of Artificial Sequence: Synthetic oligonucleotide
gaacucaccugcucugggg

SEQ ID NO: 363918 - RNA, 19 nt, Artificial Sequence
  Description of Artificial Sequence: Synthetic oligonucleotide
auucgacaggugaagaaac

SEQ ID NO: 363919 - RNA, 19 nt, Artificial Sequence
  Description of Artificial Sequence: Synthetic oligonucleotide
aguugugccagcaacucag

SEQ ID NO: 363920 - RNA, 19 nt, Artificial Sequence
  Description of Artificial Sequence: Synthetic oligonucleotide
uguagagacucuguaggug

SEQ ID NO: 363921 - RNA, 19 nt, Artificial Sequence
  Description of Artificial Sequence: Synthetic oligonucleotide
uauucugguugcuaugguc

SEQ ID NO: 363922 - RNA, 19 nt, Artificial Sequence
  Description of Artificial Sequence: Synthetic oligonucleotide
uccaaacugccaaauucga

SEQ ID NO: 363923 - RNA, 19 nt, Artificial Sequence
  Description of Artificial Sequence: Synthetic oligonucleotide
ucccacuaugucuuucagg

SEQ ID NO: 363924 - RNA, 19 nt, Artificial Sequence
  Description of Artificial Sequence: Synthetic oligonucleotide
uaggcucacaacuggccgg

SEQ ID NO: 363925 - RNA, 19 nt, Artificial Sequence
  Description of Artificial Sequence: Synthetic oligonucleotide
gugauacggauguagcgag

SEQ ID NO: 363926 - RNA, 19 nt, Artificial Sequence
  Description of Artificial Sequence: Synthetic oligonucleotide
ggugacgcacccuuggugg

SEQ ID NO: 363927 - RNA, 19 nt, Artificial Sequence
  Description of Artificial Sequence: Synthetic oligonucleotide
gagauucacuggugcaugg

SEQ ID NO: 363928 - RNA, 19 nt, Artificial Sequence
  Description of Artificial Sequence: Synthetic oligonucleotide
uucgccugcaggcagggcu

SEQ ID NO: 363929 - RNA, 19 nt, Artificial Sequence
  Description of Artificial Sequence: Synthetic oligonucleotide
ggauccauggaucuuagca

SEQ ID NO: 363930 - RNA, 19 nt, Artificial Sequence
  Description of Artificial Sequence: Synthetic oligonucleotide
gaccucgucaaauucccug

SEQ ID NO: 363931 - RNA, 19 nt, Artificial Sequence
  Description of Artificial Sequence: Synthetic oligonucleotide
agggguaagaggcaaaguu

SEQ ID NO: 363932 - RNA, 19 nt, Artificial Sequence
  Description of Artificial Sequence: Synthetic oligonucleotide
ggucagaccagcuuggcug

SEQ ID NO: 363933 - RNA, 19 nt, Artificial Sequence
  Description of Artificial Sequence: Synthetic oligonucleotide
ugauacggauguagcgagg

SEQ ID NO: 363934 - RNA, 19 nt, Artificial Sequence
  Description of Artificial Sequence: Synthetic oligonucleotide
uugccgacaaguccuuugc

SEQ ID NO: 363935 - RNA, 19 nt, Artificial Sequence
  Description of Artificial Sequence: Synthetic oligonucleotide
aacggagaaggggaggcag

SEQ ID NO: 363936 - RNA, 19 nt, Artificial Sequence
  Description of Artificial Sequence: Synthetic oligonucleotide
aagaaaccucgguacuucu

SEQ ID NO: 363937 - RNA, 19 nt, Artificial Sequence
  Description of Artificial Sequence: Synthetic oligonucleotide
agaacucuccuuccuggag

SEQ ID NO: 363938 - RNA, 19 nt, Artificial Sequence
  Description of Artificial Sequence: Synthetic oligonucleotide
auaaaggcauggaacucac

SEQ ID NO: 363939 - RNA, 19 nt, Artificial Sequence
  Description of Artificial Sequence: Synthetic oligonucleotide
ucuggcagauagguggagg

SEQ ID NO: 363940 - RNA, 19 nt, Artificial Sequence
  Description of Artificial Sequence: Synthetic oligonucleotide
acucagacgccucggcugg

SEQ ID NO: 363941 - RNA, 19 nt, Artificial Sequence
  Description of Artificial Sequence: Synthetic oligonucleotide
ugucuucuauucaggacaa

SEQ ID NO: 363942 - RNA, 19 nt, Artificial Sequence
  Description of Artificial Sequence: Synthetic oligonucleotide
uccaccgggaccugaaaga

SEQ ID NO: 363943 - RNA, 19 nt, Artificial Sequence
  Description of Artificial Sequence: Synthetic oligonucleotide
ucuggcaccgggagaagca

SEQ ID NO: 363944 - RNA, 19 nt, Artificial Sequence
  Description of Artificial Sequence: Synthetic oligonucleotide
aaggguuaugaauccgaaa

SEQ ID NO: 363945 - RNA, 19 nt, Artificial Sequence
  Description of Artificial Sequence: Synthetic oligonucleotide
agggugauacggauguagc

SEQ ID NO: 363946 - RNA, 19 nt, Artificial Sequence
  Description of Artificial Sequence: Synthetic oligonucleotide
uagucaggcuuucaucacu

SEQ ID NO: 363947 - RNA, 19 nt, Artificial Sequence
  Description of Artificial Sequence: Synthetic oligonucleotide
gaagguacccucuguaucu

SEQ ID NO: 363948 - RNA, 19 nt, Artificial Sequence
  Description of Artificial Sequence: Synthetic oligonucleotide
acgaucaucuauggucacc

SEQ ID NO: 363949 - RNA, 19 nt, Artificial Sequence
  Description of Artificial Sequence: Synthetic oligonucleotide
accucgguacuucugguca

SEQ ID NO: 363950 - RNA, 19 nt, Artificial Sequence
  Description of Artificial Sequence: Synthetic oligonucleotide
agccuaggcucacaacugg

SEQ ID NO: 363951 - RNA, 19 nt, Artificial Sequence
  Description of Artificial Sequence: Synthetic oligonucleotide
agaggacccugccaacaac

SEQ ID NO: 363952 - RNA, 19 nt, Artificial Sequence
  Description of Artificial Sequence: Synthetic oligonucleotide
cugggagauucacuggugc

SEQ ID NO: 363953 - RNA, 19 nt, Artificial Sequence
  Description of Artificial Sequence: Synthetic oligonucleotide
cuggaguugugccagcaac

SEQ ID NO: 363954 - RNA, 19 nt, Artificial Sequence
  Description of Artificial Sequence: Synthetic oligonucleotide
agcugaucagacauugauc

SEQ ID NO: 363955 - RNA, 19 nt, Artificial Sequence
  Description of Artificial Sequence: Synthetic oligonucleotide
acgaccagguaguagccug

SEQ ID NO: 363956 - RNA, 19 nt, Artificial Sequence
  Description of Artificial Sequence: Synthetic oligonucleotide
auacggauguagcgaggac

SEQ ID NO: 363957 - RNA, 19 nt, Artificial Sequence
  Description of Artificial Sequence: Synthetic oligonucleotide
aacuggccggagaugugcc

SEQ ID NO: 363958 - RNA, 19 nt, Artificial Sequence
  Description of Artificial Sequence: Synthetic oligonucleotide
aacccuguagguccccacu

SEQ ID NO: 363959 - RNA, 19 nt, Artificial Sequence
  Description of Artificial Sequence: Synthetic oligonucleotide
auggacugucugucuauuc

SEQ ID NO: 363960 - RNA, 19 nt, Artificial Sequence
  Description of Artificial Sequence: Synthetic oligonucleotide
cucgucaaauucccugagg

SEQ ID NO: 363961 - RNA, 19 nt, Artificial Sequence
  Description of Artificial Sequence: Synthetic oligonucleotide
agaggcguggacaaguuga

SEQ ID NO: 363962 - RNA, 19 nt, Artificial Sequence
  Description of Artificial Sequence: Synthetic oligonucleotide
guugccgacaaguccuuug

SEQ ID NO: 363963 - RNA, 19 nt, Artificial Sequence
  Description of Artificial Sequence: Synthetic oligonucleotide
uagagacucuguagguggc

SEQ ID NO: 363964 - RNA, 19 nt, Artificial Sequence
  Description of Artificial Sequence: Synthetic oligonucleotide
ugggagauucacuggugca

SEQ ID NO: 363965 - RNA, 19 nt, Artificial Sequence
  Description of Artificial Sequence: Synthetic oligonucleotide
gaagaaaccucgguacuuc

SEQ ID NO: 363966 - RNA, 19 nt, Artificial Sequence
  Description of Artificial Sequence: Synthetic oligonucleotide
guuggugcagggugauacg

SEQ ID NO: 363967 - RNA, 19 nt, Artificial Sequence
  Description of Artificial Sequence: Synthetic oligonucleotide
gauacggauguagcgagga

SEQ ID NO: 363968 - RNA, 19 nt, Artificial Sequence
  Description of Artificial Sequence: Synthetic oligonucleotide
gcugaugagaagccuaggc

SEQ ID NO: 363969 - RNA, 19 nt, Artificial Sequence
  Description of Artificial Sequence: Synthetic oligonucleotide
aggugaagaaaccucggua

SEQ ID NO: 363970 - RNA, 19 nt, Artificial Sequence
  Description of Artificial Sequence: Synthetic oligonucleotide
ggaccucacggucauaugc

SEQ ID NO: 363971 - RNA, 19 nt, Artificial Sequence
  Description of Artificial Sequence: Synthetic oligonucleotide
auauggaaaccaauugggu

SEQ ID NO: 363972 - RNA, 19 nt, Artificial Sequence
  Description of Artificial Sequence: Synthetic oligonucleotide
auuuucccaguggagaaga

SEQ ID NO: 363973 - RNA, 19 nt, Artificial Sequence
  Description of Artificial Sequence: Synthetic oligonucleotide
acuaagcaccuccgggguc

SEQ ID NO: 363974 - RNA, 19 nt, Artificial Sequence
  Description of Artificial Sequence: Synthetic oligonucleotide
accucgucaaauucccuga

SEQ ID NO: 363975 - RNA, 19 nt, Artificial Sequence
  Description of Artificial Sequence: Synthetic oligonucleotide
gggugauacggauguagcg

SEQ ID NO: 363976 - RNA, 19 nt, Artificial Sequence
  Description of Artificial Sequence: Synthetic oligonucleotide
aauccgaaacaggaggaua

SEQ ID NO: 363977 - RNA, 19 nt, Artificial Sequence
  Description of Artificial Sequence: Synthetic oligonucleotide
agguguugauucuucugca

SEQ ID NO: 363978 - RNA, 19 nt, Artificial Sequence
  Description of Artificial Sequence: Synthetic oligonucleotide
agcacccuauuuucacuuc

SEQ ID NO: 363979 - RNA, 19 nt, Artificial Sequence
  Description of Artificial Sequence: Synthetic oligonucleotide
aggauccauggaucuuagc

SEQ ID NO: 363980 - RNA, 19 nt, Artificial Sequence
  Description of Artificial Sequence: Synthetic oligonucleotide
ucuaccugguuccacccuu

SEQ ID NO: 363981 - RNA, 19 nt, Artificial Sequence
  Description of Artificial Sequence: Synthetic oligonucleotide
auccauggaucuuagcaua

SEQ ID NO: 363982 - RNA, 19 nt, Artificial Sequence
  Description of Artificial Sequence: Synthetic oligonucleotide
cucacagcgcaaguggacc

SEQ ID NO: 363983 - RNA, 19 nt, Artificial Sequence
  Description of Artificial Sequence: Synthetic oligonucleotide
gauccuucaggcggaguag

SEQ ID NO: 363984 - RNA, 19 nt, Artificial Sequence
  Description of Artificial Sequence: Synthetic oligonucleotide
agcgcaaguggaccucacg

SEQ ID NO: 363985 - RNA, 19 nt, Artificial Sequence
  Description of Artificial Sequence: Synthetic oligonucleotide
agacuuccacagcaggucu

SEQ ID NO: 363986 - RNA, 19 nt, Artificial Sequence
  Description of Artificial Sequence: Synthetic oligonucleotide
uguccucccgaaacugggc

SEQ ID NO: 363987 - RNA, 19 nt, Artificial Sequence
  Description of Artificial Sequence: Synthetic oligonucleotide
gaccugaaagauauggaaa

SEQ ID NO: 363988 - RNA, 19 nt, Artificial Sequence
  Description of Artificial Sequence: Synthetic oligonucleotide
cacauccucucucuggcac

SEQ ID NO: 363989 - RNA, 19 nt, Artificial Sequence
  Description of Artificial Sequence: Synthetic oligonucleotide
caagaaggugcuggggacg

SEQ ID NO: 363990 - RNA, 19 nt, Artificial Sequence
  Description of Artificial Sequence: Synthetic oligonucleotide
acugaggaaugaagaugcc

SEQ ID NO: 363991 - RNA, 19 nt, Artificial Sequence
  Description of Artificial Sequence: Synthetic oligonucleotide
auaggauccauggaucuua

SEQ ID NO: 363992 - RNA, 19 nt, Artificial Sequence
  Description of Artificial Sequence: Synthetic oligonucleotide
acaggugaagaaaccucgg

SEQ ID NO: 363993 - RNA, 19 nt, Artificial Sequence
  Description of Artificial Sequence: Synthetic oligonucleotide
caucuauggucaccucucc

SEQ ID NO: 363994 - RNA, 19 nt, Artificial Sequence
  Description of Artificial Sequence: Synthetic oligonucleotide
cuuugcuccccgccgcugg

SEQ ID NO: 363995 - RNA, 19 nt, Artificial Sequence
  Description of Artificial Sequence: Synthetic oligonucleotide
ccgacaaguccuuugcucc

SEQ ID NO: 363996 - RNA, 19 nt, Artificial Sequence
  Description of Artificial Sequence: Synthetic oligonucleotide
ggauacccuggccagugcg

SEQ ID NO: 363997 - RNA, 19 nt, Artificial Sequence
  Description of Artificial Sequence: Synthetic oligonucleotide
cacuugggaguccuagccc

SEQ ID NO: 363998 - RNA, 19 nt, Artificial Sequence
  Description of Artificial Sequence: Synthetic oligonucleotide
ugaagaaaccucgguacuu

SEQ ID NO: 363999 - RNA, 19 nt, Artificial Sequence
  Description of Artificial Sequence: Synthetic oligonucleotide
uggucagaccagcuuggcu

SEQ ID NO: 364000 - RNA, 19 nt, Artificial Sequence
  Description of Artificial Sequence: Synthetic oligonucleotide
uagugcccgagugugacac

SEQ ID NO: 364001 - RNA, 19 nt, Artificial Sequence
  Description of Artificial Sequence: Synthetic oligonucleotide
ggaccugaaagauauggaa

SEQ ID NO: 364002 - RNA, 19 nt, Artificial Sequence
  Description of Artificial Sequence: Synthetic oligonucleotide
guggguuaucuggaaacag

SEQ ID NO: 364003 - RNA, 19 nt, Artificial Sequence
  Description of Artificial Sequence: Synthetic oligonucleotide
aggugacgcacccuuggug

SEQ ID NO: 364004 - RNA, 19 nt, Artificial Sequence
  Description of Artificial Sequence: Synthetic oligonucleotide
agugcgcgaccgucgcugc

SEQ ID NO: 364005 - RNA, 19 nt, Artificial Sequence
  Description of Artificial Sequence: Synthetic oligonucleotide
auacccuggccagugcgac

SEQ ID NO: 364006 - RNA, 19 nt, Artificial Sequence
  Description of Artificial Sequence: Synthetic oligonucleotide
uucaggcggaguaguugcc

SEQ ID NO: 364007 - RNA, 19 nt, Artificial Sequence
  Description of Artificial Sequence: Synthetic oligonucleotide
gauccagucgguccucaga

SEQ ID NO: 364008 - RNA, 19 nt, Artificial Sequence
  Description of Artificial Sequence: Synthetic oligonucleotide
agacgccucggcuggaucu

SEQ ID NO: 364009 - RNA, 19 nt, Artificial Sequence
  Description of Artificial Sequence: Synthetic oligonucleotide
accgggaccugaaagauau

SEQ ID NO: 364010 - RNA, 19 nt, Artificial Sequence
  Description of Artificial Sequence: Synthetic oligonucleotide
ggauugcagggguaagagg

SEQ ID NO: 364011 - RNA, 19 nt, Artificial Sequence
  Description of Artificial Sequence: Synthetic oligonucleotide
guaaccagaacuugggguu

SEQ ID NO: 364012 - RNA, 19 nt, Artificial Sequence
  Description of Artificial Sequence: Synthetic oligonucleotide
uccgaaacaggaggauacc

SEQ ID NO: 364013 - RNA, 19 nt, Artificial Sequence
  Description of Artificial Sequence: Synthetic oligonucleotide
acuggguuccaagagccgu

SEQ ID NO: 364014 - RNA, 19 nt, Artificial Sequence
  Description of Artificial Sequence: Synthetic oligonucleotide
aggcagacgaucaucuaug

SEQ ID NO: 364015 - RNA, 19 nt, Artificial Sequence
  Description of Artificial Sequence: Synthetic oligonucleotide
aagccagaacacauccucu

SEQ ID NO: 364016 - RNA, 19 nt, Artificial Sequence
  Description of Artificial Sequence: Synthetic oligonucleotide
guaguugccgacaaguccu

SEQ ID NO: 364017 - RNA, 19 nt, Artificial Sequence
  Description of Artificial Sequence: Synthetic oligonucleotide
ggucauaugcauggcaggc

SEQ ID NO: 364018 - RNA, 19 nt, Artificial Sequence
  Description of Artificial Sequence: Synthetic oligonucleotide
ggugauacggauguagcga

SEQ ID NO: 364019 - RNA, 19 nt, Artificial Sequence
  Description of Artificial Sequence: Synthetic oligonucleotide
aggcggaguaguugccgac

SEQ ID NO: 364020 - RNA, 19 nt, Artificial Sequence
  Description of Artificial Sequence: Synthetic oligonucleotide
agucaggcuuucaucacug

SEQ ID NO: 364021 - RNA, 19 nt, Artificial Sequence
  Description of Artificial Sequence: Synthetic oligonucleotide
ggcagacgaucaucuaugg

SEQ ID NO: 364022 - RNA, 19 nt, Artificial Sequence
  Description of Artificial Sequence: Synthetic oligonucleotide
aagguacccucuguaucug

SEQ ID NO: 364023 - RNA, 19 nt, Artificial Sequence
  Description of Artificial Sequence: Synthetic oligonucleotide
acggauguagcgaggacca

SEQ ID NO: 364024 - RNA, 19 nt, Artificial Sequence
  Description of Artificial Sequence: Synthetic oligonucleotide
uccgccaggcuuccaguga

SEQ ID NO: 364025 - RNA, 19 nt, Artificial Sequence
  Description of Artificial Sequence: Synthetic oligonucleotide
uucaccugucccucccgug

SEQ ID NO: 364026 - RNA, 19 nt, Artificial Sequence
  Description of Artificial Sequence: Synthetic oligonucleotide
ggcguggacaaguugaaaa

SEQ ID NO: 364027 - RNA, 19 nt, Artificial Sequence
  Description of Artificial Sequence: Synthetic oligonucleotide
gaacucuccuuccuggagu

SEQ ID NO: 364028 - RNA, 19 nt, Artificial Sequence
  Description of Artificial Sequence: Synthetic oligonucleotide
cuuccgcuuuucuaccuuc

SEQ ID NO: 364029 - RNA, 19 nt, Artificial Sequence
  Description of Artificial Sequence: Synthetic oligonucleotide
uaccugguuccacccuucc

SEQ ID NO: 364030 - RNA, 19 nt, Artificial Sequence
  Description of Artificial Sequence: Synthetic oligonucleotide
caccgggagaagcacaguc

SEQ ID NO: 364031 - RNA, 19 nt, Artificial Sequence
  Description of Artificial Sequence: Synthetic oligonucleotide
gggagaagcacagucuccc

SEQ ID NO: 364032 - RNA, 19 nt, Artificial Sequence
  Description of Artificial Sequence: Synthetic oligonucleotide
agagccguaaccagaacuu

SEQ ID NO: 364033 - RNA, 19 nt, Artificial Sequence
  Description of Artificial Sequence: Synthetic oligonucleotide
aggaaugaagaugccacuu

SEQ ID NO: 364034 - RNA, 19 nt, Artificial Sequence
  Description of Artificial Sequence: Synthetic oligonucleotide
gagugcgcgaccgucgcug

SEQ ID NO: 364035 - RNA, 19 nt, Artificial Sequence
  Description of Artificial Sequence: Synthetic oligonucleotide
uguagguggccugccuuug

SEQ ID NO: 364036 - RNA, 19 nt, Artificial Sequence
  Description of Artificial Sequence: Synthetic oligonucleotide
gggauugcagggguaagag

SEQ ID NO: 364037 - RNA, 19 nt, Artificial Sequence
  Description of Artificial Sequence: Synthetic oligonucleotide
ggguuaugaauccgaaaca

SEQ ID NO: 364038 - RNA, 19 nt, Artificial Sequence
  Description of Artificial Sequence: Synthetic oligonucleotide
uaguagccuggggagagcu

SEQ ID NO: 364039 - RNA, 19 nt, Artificial Sequence
  Description of Artificial Sequence: Synthetic oligonucleotide
acggucucccauucgccug

SEQ ID NO: 364040 - RNA, 19 nt, Artificial Sequence
  Description of Artificial Sequence: Synthetic oligonucleotide
ccaaauucgacaggugaag

SEQ ID NO: 364041 - RNA, 19 nt, Artificial Sequence
  Description of Artificial Sequence: Synthetic oligonucleotide
agucgguccucagagcuga

SEQ ID NO: 364042 - RNA, 19 nt, Artificial Sequence
  Description of Artificial Sequence: Synthetic oligonucleotide
cagcugacugcccuaugac

SEQ ID NO: 364043 - RNA, 19 nt, Artificial Sequence
  Description of Artificial Sequence: Synthetic oligonucleotide
ucuucggcgcccugggcuc

SEQ ID NO: 364044 - RNA, 19 nt, Artificial Sequence
  Description of Artificial Sequence: Synthetic oligonucleotide
auucaggacaaagcacccu

SEQ ID NO: 364045 - RNA, 19 nt, Artificial Sequence
  Description of Artificial Sequence: Synthetic oligonucleotide
gccguaaccagaacuuggg

SEQ ID NO: 364046 - RNA, 19 nt, Artificial Sequence
  Description of Artificial Sequence: Synthetic oligonucleotide
agaaaccucgguacuucug

SEQ ID NO: 364047 - RNA, 19 nt, Artificial Sequence
  Description of Artificial Sequence: Synthetic oligonucleotide
caagugauguccucccgaa

SEQ ID NO: 364048 - RNA, 19 nt, Artificial Sequence
  Description of Artificial Sequence: Synthetic oligonucleotide
ugccgacaaguccuuugcu

SEQ ID NO: 364049 - RNA, 19 nt, Artificial Sequence
  Description of Artificial Sequence: Synthetic oligonucleotide
cugcccuaugacccaggcg

SEQ ID NO: 364050 - RNA, 19 nt, Artificial Sequence
  Description of Artificial Sequence: Synthetic oligonucleotide
ucacugagucggcaguguu

SEQ ID NO: 364051 - RNA, 19 nt, Artificial Sequence
  Description of Artificial Sequence: Synthetic oligonucleotide
caaauucgacaggugaaga

SEQ ID NO: 364052 - RNA, 19 nt, Artificial Sequence
  Description of Artificial Sequence: Synthetic oligonucleotide
uggaccucacggucauaug

SEQ ID NO: 364053 - RNA, 19 nt, Artificial Sequence
  Description of Artificial Sequence: Synthetic oligonucleotide
ggauguagcgaggaccagc

SEQ ID NO: 364054 - RNA, 19 nt, Artificial Sequence
  Description of Artificial Sequence: Synthetic oligonucleotide
gggcauagcgaugugguac

SEQ ID NO: 364055 - RNA, 19 nt, Artificial Sequence
  Description of Artificial Sequence: Synthetic oligonucleotide
agggauugcagggguaaga

SEQ ID NO: 364056 - RNA, 19 nt, Artificial Sequence
  Description of Artificial Sequence: Synthetic oligonucleotide
ucggccccaaggguuauga

SEQ ID NO: 364057 - RNA, 19 nt, Artificial Sequence
  Description of Artificial Sequence: Synthetic oligonucleotide
ccaaacugccaaauucgac

SEQ ID NO: 364058 - RNA, 19 nt, Artificial Sequence
  Description of Artificial Sequence: Synthetic oligonucleotide
ggagauucacuggugcaug

SEQ ID NO: 364059 - RNA, 19 nt, Artificial Sequence
  Description of Artificial Sequence: Synthetic oligonucleotide
auugcagggguaagaggca

SEQ ID NO: 364060 - RNA, 19 nt, Artificial Sequence
  Description of Artificial Sequence: Synthetic oligonucleotide
uggcaccgggagaagcaca

SEQ ID NO: 364061 - RNA, 19 nt, Artificial Sequence
  Description of Artificial Sequence: Synthetic oligonucleotide
gucaggcuuucaucacugc

SEQ ID NO: 364062 - RNA, 19 nt, Artificial Sequence
  Description of Artificial Sequence: Synthetic oligonucleotide
gaguccgaggcggggaaug

SEQ ID NO: 364063 - RNA, 19 nt, Artificial Sequence
  Description of Artificial Sequence: Synthetic oligonucleotide
ugacugcccuaugacccag

SEQ ID NO: 364064 - RNA, 19 nt, Artificial Sequence
  Description of Artificial Sequence: Synthetic oligonucleotide
accagugcccgggucugac

SEQ ID NO: 364065 - RNA, 19 nt, Artificial Sequence
  Description of Artificial Sequence: Synthetic oligonucleotide
auugauccuucaggcggag

SEQ ID NO: 364066 - RNA, 19 nt, Artificial Sequence
  Description of Artificial Sequence: Synthetic oligonucleotide
ggagggcacaacccuguag

SEQ ID NO: 364067 - RNA, 19 nt, Artificial Sequence
  Description of Artificial Sequence: Synthetic oligonucleotide
agcgagugcgcgaccgucg

SEQ ID NO: 364068 - RNA, 19 nt, Artificial Sequence
  Description of Artificial Sequence: Synthetic oligonucleotide
uggaucuaccugguuccac

SEQ ID NO: 364069 - RNA, 19 nt, Artificial Sequence
  Description of Artificial Sequence: Synthetic oligonucleotide
accucacggucauaugcau

SEQ ID NO: 364070 - RNA, 19 nt, Artificial Sequence
  Description of Artificial Sequence: Synthetic oligonucleotide
gugacgcacccuugguggc

SEQ ID NO: 364071 - RNA, 19 nt, Artificial Sequence
  Description of Artificial Sequence: Synthetic oligonucleotide
cuguagguccccacugaca

SEQ ID NO: 364072 - RNA, 19 nt, Artificial Sequence
  Description of Artificial Sequence: Synthetic oligonucleotide
uccagcugacugcccuaug

SEQ ID NO: 364073 - RNA, 19 nt, Artificial Sequence
  Description of Artificial Sequence: Synthetic oligonucleotide
cauucgccugcaggcaggg

SEQ ID NO: 364074 - RNA, 19 nt, Artificial Sequence
  Description of Artificial Sequence: Synthetic oligonucleotide
cacggucauaugcauggca

SEQ ID NO: 364075 - RNA, 19 nt, Artificial Sequence
  Description of Artificial Sequence: Synthetic oligonucleotide
ucccauucgccugcaggca

SEQ ID NO: 364076 - RNA, 19 nt, Artificial Sequence
  Description of Artificial Sequence: Synthetic oligonucleotide
gguagugcccgagugugac

SEQ ID NO: 364077 - RNA, 19 nt, Artificial Sequence
  Description of Artificial Sequence: Synthetic oligonucleotide
ucacggucauaugcauggc

SEQ ID NO: 364078 - RNA, 19 nt, Artificial Sequence
  Description of Artificial Sequence: Synthetic oligonucleotide
ucgguacuucuggucagac

SEQ ID NO: 364079 - RNA, 19 nt, Artificial Sequence
  Description of Artificial Sequence: Synthetic oligonucleotide
gccgacaaguccuuugcuc

SEQ ID NO: 364080 - RNA, 19 nt, Artificial Sequence
  Description of Artificial Sequence: Synthetic oligonucleotide
cuguaucuggcagauaggu

SEQ ID NO: 364081 - RNA, 19 nt, Artificial Sequence
  Description of Artificial Sequence: Synthetic oligonucleotide
ccggagaugugccuggaug

SEQ ID NO: 364082 - RNA, 19 nt, Artificial Sequence
  Description of Artificial Sequence: Synthetic oligonucleotide
gcagggguaagaggcaaag

SEQ ID NO: 364083 - RNA, 19 nt, Artificial Sequence
  Description of Artificial Sequence: Synthetic oligonucleotide
cagucgguccucagagcug

SEQ ID NO: 364084 - RNA, 19 nt, Artificial Sequence
  Description of Artificial Sequence: Synthetic oligonucleotide
ugggcauagcgauguggua

SEQ ID NO: 364085 - RNA, 19 nt, Artificial Sequence
  Description of Artificial Sequence: Synthetic oligonucleotide
gaccccaagaugucuucua

SEQ ID NO: 364086 - RNA, 19 nt, Artificial Sequence
  Description of Artificial Sequence: Synthetic oligonucleotide
guguagagacucuguaggu

SEQ ID NO: 364087 - RNA, 19 nt, Artificial Sequence
  Description of Artificial Sequence: Synthetic oligonucleotide
cucacaacuggccggagau

SEQ ID NO: 364088 - RNA, 19 nt, Artificial Sequence
  Description of Artificial Sequence: Synthetic oligonucleotide
caacccuguagguccccac

SEQ ID NO: 364089 - RNA, 19 nt, Artificial Sequence
  Description of Artificial Sequence: Synthetic oligonucleotide
gacucggccgccgcccggg

SEQ ID NO: 364090 - RNA, 19 nt, Artificial Sequence
  Description of Artificial Sequence: Synthetic oligonucleotide
ccaaggguuaugaauccga

SEQ ID NO: 364091 - RNA, 19 nt, Artificial Sequence
  Description of Artificial Sequence: Synthetic oligonucleotide
cuuugugacuggguagcca

SEQ ID NO: 364092 - RNA, 19 nt, Artificial Sequence
  Description of Artificial Sequence: Synthetic oligonucleotide
ccgggucugacccacuaag

SEQ ID NO: 364093 - RNA, 19 nt, Artificial Sequence
  Description of Artificial Sequence: Synthetic oligonucleotide
auccuucaggcggaguagu

SEQ ID NO: 364094 - RNA, 19 nt, Artificial Sequence
  Description of Artificial Sequence: Synthetic oligonucleotide
ccguaaccagaacuugggg

SEQ ID NO: 364095 - RNA, 19 nt, Artificial Sequence
  Description of Artificial Sequence: Synthetic oligonucleotide
cuggccggagaugugccug

SEQ ID NO: 364096 - RNA, 19 nt, Artificial Sequence
  Description of Artificial Sequence: Synthetic oligonucleotide
ccgcacacaccucacuggg

SEQ ID NO: 364097 - RNA, 19 nt, Artificial Sequence
  Description of Artificial Sequence: Synthetic oligonucleotide
cagcugaucagacauugau

SEQ ID NO: 364098 - RNA, 19 nt, Artificial Sequence
  Description of Artificial Sequence: Synthetic oligonucleotide
ccgucuccaagugaugucc

SEQ ID NO: 364099 - RNA, 19 nt, Artificial Sequence
  Description of Artificial Sequence: Synthetic oligonucleotide
acccugccaacaacgucgg

SEQ ID NO: 364100 - RNA, 19 nt, Artificial Sequence
  Description of Artificial Sequence: Synthetic oligonucleotide
ggcaccgggagaagcacag

SEQ ID NO: 364101 - RNA, 19 nt, Artificial Sequence
  Description of Artificial Sequence: Synthetic oligonucleotide
ccgaaacaggaggauaccc

SEQ ID NO: 364102 - RNA, 19 nt, Artificial Sequence
  Description of Artificial Sequence: Synthetic oligonucleotide
aggcggggaaugcggcguc

SEQ ID NO: 364103 - RNA, 19 nt, Artificial Sequence
  Description of Artificial Sequence: Synthetic oligonucleotide
gugaagguacccucuguau

SEQ ID NO: 364104 - RNA, 19 nt, Artificial Sequence
  Description of Artificial Sequence: Synthetic oligonucleotide
gcgaccgucgcugcaaacc

SEQ ID NO: 364105 - RNA, 19 nt, Artificial Sequence
  Description of Artificial Sequence: Synthetic oligonucleotide
uaguugccgacaaguccuu

SEQ ID NO: 364106 - RNA, 19 nt, Artificial Sequence
  Description of Artificial Sequence: Synthetic oligonucleotide
cugcacggucucccauucg

SEQ ID NO: 364107 - RNA, 19 nt, Artificial Sequence
  Description of Artificial Sequence: Synthetic oligonucleotide
ugagauccaccagggcauc

SEQ ID NO: 364108 - RNA, 19 nt, Artificial Sequence
  Description of Artificial Sequence: Synthetic oligonucleotide
auucgccugcaggcagggc

SEQ ID NO: 364109 - RNA, 19 nt, Artificial Sequence
  Description of Artificial Sequence: Synthetic oligonucleotide
ccgcuuuucuaccuuccag

SEQ ID NO: 364110 - RNA, 19 nt, Artificial Sequence
  Description of Artificial Sequence: Synthetic oligonucleotide
acagcgcaaguggaccuca

SEQ ID NO: 364111 - RNA, 19 nt, Artificial Sequence
  Description of Artificial Sequence: Synthetic oligonucleotide
ugccagcaacucagacgcc

SEQ ID NO: 364112 - RNA, 19 nt, Artificial Sequence
  Description of Artificial Sequence: Synthetic oligonucleotide
cagugcgacuccacagcuc

SEQ ID NO: 364113 - RNA, 19 nt, Artificial Sequence
  Description of Artificial Sequence: Synthetic oligonucleotide
ugcgcgaccgucgcugcaa

SEQ ID NO: 364114 - RNA, 19 nt, Artificial Sequence
  Description of Artificial Sequence: Synthetic oligonucleotide
agcccuugcuucaccuguc

SEQ ID NO: 364115 - RNA, 19 nt, Artificial Sequence
  Description of Artificial Sequence: Synthetic oligonucleotide
agucggcaguguuggugca

SEQ ID NO: 364116 - RNA, 19 nt, Artificial Sequence
  Description of Artificial Sequence: Synthetic oligonucleotide
gcggcguccuggaagaggc

SEQ ID NO: 364117 - RNA, 19 nt, Artificial Sequence
  Description of Artificial Sequence: Synthetic oligonucleotide
ccccaaggguuaugaaucc

SEQ ID NO: 364118 - RNA, 19 nt, Artificial Sequence
  Description of Artificial Sequence: Synthetic oligonucleotide
aggcucacaacuggccgga

SEQ ID NO: 364119 - RNA, 19 nt, Artificial Sequence
  Description of Artificial Sequence: Synthetic oligonucleotide
aggcaaggcagacgaucau

SEQ ID NO: 364120 - RNA, 19 nt, Artificial Sequence
  Description of Artificial Sequence: Synthetic oligonucleotide
cuggcaccgggagaagcac

SEQ ID NO: 364121 - RNA, 19 nt, Artificial Sequence
  Description of Artificial Sequence: Synthetic oligonucleotide
cuggggacgaccagguagu

SEQ ID NO: 364122 - RNA, 19 nt, Artificial Sequence
  Description of Artificial Sequence: Synthetic oligonucleotide
gaccgcccgcaucuucggc

SEQ ID NO: 364123 - RNA, 19 nt, Artificial Sequence
  Description of Artificial Sequence: Synthetic oligonucleotide
ccauggaucuuagcauagg

SEQ ID NO: 364124 - RNA, 19 nt, Artificial Sequence
  Description of Artificial Sequence: Synthetic oligonucleotide
gucagaccagcuuggcugu

SEQ ID NO: 364125 - RNA, 19 nt, Artificial Sequence
  Description of Artificial Sequence: Synthetic oligonucleotide
ggucacugugaagguaccc

SEQ ID NO: 364126 - RNA, 19 nt, Artificial Sequence
  Description of Artificial Sequence: Synthetic oligonucleotide
gccaaauucgacaggugaa

SEQ ID NO: 364127 - RNA, 19 nt, Artificial Sequence
  Description of Artificial Sequence: Synthetic oligonucleotide
ggcaaggcagacgaucauc

SEQ ID NO: 364128 - RNA, 19 nt, Artificial Sequence
  Description of Artificial Sequence: Synthetic oligonucleotide
guagugcccgagugugaca

SEQ ID NO: 364129 - RNA, 19 nt, Artificial Sequence
  Description of Artificial Sequence: Synthetic oligonucleotide
uccuugccugggagauuca

SEQ ID NO: 364130 - RNA, 19 nt, Artificial Sequence
  Description of Artificial Sequence: Synthetic oligonucleotide
gaggcguggacaaguugaa

SEQ ID NO: 364131 - RNA, 19 nt, Artificial Sequence
  Description of Artificial Sequence: Synthetic oligonucleotide
uuguuccggcagccuccag

SEQ ID NO: 364132 - RNA, 19 nt, Artificial Sequence
  Description of Artificial Sequence: Synthetic oligonucleotide
acaacuggccggagaugug

SEQ ID NO: 364133 - RNA, 19 nt, Artificial Sequence
  Description of Artificial Sequence: Synthetic oligonucleotide
cuauggucacugugaaggu

SEQ ID NO: 364134 - RNA, 19 nt, Artificial Sequence
  Description of Artificial Sequence: Synthetic oligonucleotide
cuggggccgucuccaagug

SEQ ID NO: 364135 - RNA, 19 nt, Artificial Sequence
  Description of Artificial Sequence: Synthetic oligonucleotide
ugucccucccguggguuau

SEQ ID NO: 364136 - RNA, 19 nt, Artificial Sequence
  Description of Artificial Sequence: Synthetic oligonucleotide
caggugaagaaaccucggu

SEQ ID NO: 364137 - RNA, 19 nt, Artificial Sequence
  Description of Artificial Sequence: Synthetic oligonucleotide
agcuuagcagcggcuccug

SEQ ID NO: 364138 - RNA, 19 nt, Artificial Sequence
  Description of Artificial Sequence: Synthetic oligonucleotide
gagcgagugcgcgaccguc

SEQ ID NO: 364139 - RNA, 19 nt, Artificial Sequence
  Description of Artificial Sequence: Synthetic oligonucleotide
ccucgucaaauucccugag

SEQ ID NO: 364140 - RNA, 19 nt, Artificial Sequence
  Description of Artificial Sequence: Synthetic oligonucleotide
agauuuccuggggccgucu

SEQ ID NO: 364141 - RNA, 19 nt, Artificial Sequence
  Description of Artificial Sequence: Synthetic oligonucleotide
cccaaggguuaugaauccg

SEQ ID NO: 364142 - RNA, 19 nt, Artificial Sequence
  Description of Artificial Sequence: Synthetic oligonucleotide
guacuuagucaggcuuuca

SEQ ID NO: 364143 - RNA, 19 nt, Artificial Sequence
  Description of Artificial Sequence: Synthetic oligonucleotide
ggaccgcccgcaucuucgg

SEQ ID NO: 364144 - RNA, 19 nt, Artificial Sequence
  Description of Artificial Sequence: Synthetic oligonucleotide
ccaagugauguccucccga

SEQ ID NO: 364145 - RNA, 19 nt, Artificial Sequence
  Description of Artificial Sequence: Synthetic oligonucleotide
ucagacgccucggcuggau

SEQ ID NO: 364146 - RNA, 19 nt, Artificial Sequence
  Description of Artificial Sequence: Synthetic oligonucleotide
ccucgguacuucuggucag

SEQ ID NO: 364147 - RNA, 19 nt, Artificial Sequence
  Description of Artificial Sequence: Synthetic oligonucleotide
ccagcugacugcccuauga

SEQ ID NO: 364148 - RNA, 19 nt, Artificial Sequence
  Description of Artificial Sequence: Synthetic oligonucleotide
cacuaagcaccuccggggu

SEQ ID NO: 364149 - RNA, 19 nt, Artificial Sequence
  Description of Artificial Sequence: Synthetic oligonucleotide
cccauucgccugcaggcag

SEQ ID NO: 364150 - RNA, 19 nt, Artificial Sequence
  Description of Artificial Sequence: Synthetic oligonucleotide
gcagauagguggagggcac

SEQ ID NO: 364151 - RNA, 19 nt, Artificial Sequence
  Description of Artificial Sequence: Synthetic oligonucleotide
guggaccucacggucauau

SEQ ID NO: 364152 - RNA, 19 nt, Artificial Sequence
  Description of Artificial Sequence: Synthetic oligonucleotide
caacucagacgccucggcu

SEQ ID NO: 364153 - RNA, 19 nt, Artificial Sequence
  Description of Artificial Sequence: Synthetic oligonucleotide
ucccucccguggguuaucu

SEQ ID NO: 364154 - RNA, 19 nt, Artificial Sequence
  Description of Artificial Sequence: Synthetic oligonucleotide
ggcggcucacuuccugggc

SEQ ID NO: 364155 - RNA, 19 nt, Artificial Sequence
  Description of Artificial Sequence: Synthetic oligonucleotide
aacugcccuggcacauccu

SEQ ID NO: 364156 - RNA, 19 nt, Artificial Sequence
  Description of Artificial Sequence: Synthetic oligonucleotide
gcaaggcagacgaucaucu

SEQ ID NO: 364157 - RNA, 19 nt, Artificial Sequence
  Description of Artificial Sequence: Synthetic oligonucleotide
caaggcagacgaucaucua

SEQ ID NO: 364158 - RNA, 19 nt, Artificial Sequence
  Description of Artificial Sequence: Synthetic oligonucleotide
cagcgcaaguggaccucac

SEQ ID NO: 364159 - RNA, 19 nt, Artificial Sequence
  Description of Artificial Sequence: Synthetic oligonucleotide
gcucacaacuggccggaga

SEQ ID NO: 364160 - RNA, 19 nt, Artificial Sequence
  Description of Artificial Sequence: Synthetic oligonucleotide
cacaacccuguaggucccc

SEQ ID NO: 364161 - RNA, 19 nt, Artificial Sequence
  Description of Artificial Sequence: Synthetic oligonucleotide
ccgccaggcuuccagugag

SEQ ID NO: 364162 - RNA, 19 nt, Artificial Sequence
  Description of Artificial Sequence: Synthetic oligonucleotide
gcgagugcgcgaccgucgc

SEQ ID NO: 364163 - RNA, 19 nt, Artificial Sequence
  Description of Artificial Sequence: Synthetic oligonucleotide
gcucacagcgcaaguggac

SEQ ID NO: 364164 - RNA, 19 nt, Artificial Sequence
  Description of Artificial Sequence: Synthetic oligonucleotide
cucgguacuucuggucaga

SEQ ID NO: 364165 - RNA, 19 nt, Artificial Sequence
  Description of Artificial Sequence: Synthetic oligonucleotide
acccaggcgccagguagug

SEQ ID NO: 364166 - RNA, 19 nt, Artificial Sequence
  Description of Artificial Sequence: Synthetic oligonucleotide
gacgaccagguaguagccu

SEQ ID NO: 364167 - RNA, 19 nt, Artificial Sequence
  Description of Artificial Sequence: Synthetic oligonucleotide
gggcacaacccuguagguc

SEQ ID NO: 364168 - RNA, 19 nt, Artificial Sequence
  Description of Artificial Sequence: Synthetic oligonucleotide
gccgucuccaagugauguc

SEQ ID NO: 364169 - RNA, 19 nt, Artificial Sequence
  Description of Artificial Sequence: Synthetic oligonucleotide
ccuuugugacuggguagcc

SEQ ID NO: 364170 - RNA, 19 nt, Artificial Sequence
  Description of Artificial Sequence: Synthetic oligonucleotide
aggcguggacaaguugaaa

SEQ ID NO: 364171 - RNA, 19 nt, Artificial Sequence
  Description of Artificial Sequence: Synthetic oligonucleotide
cagauagguggagggcaca

SEQ ID NO: 364172 - RNA, 19 nt, Artificial Sequence
  Description of Artificial Sequence: Synthetic oligonucleotide
cugccgcccguggacucgg

SEQ ID NO: 364173 - RNA, 19 nt, Artificial Sequence
  Description of Artificial Sequence: Synthetic oligonucleotide
guagguggccugccuuugu

SEQ ID NO: 364174 - RNA, 19 nt, Artificial Sequence
  Description of Artificial Sequence: Synthetic oligonucleotide
cuucggcgcccugggcucc

SEQ ID NO: 364175 - RNA, 19 nt, Artificial Sequence
  Description of Artificial Sequence: Synthetic oligonucleotide
ggcggaguaguugccgaca

SEQ ID NO: 364176 - RNA, 19 nt, Artificial Sequence
  Description of Artificial Sequence: Synthetic oligonucleotide
gcgacuccacagcucccgc

SEQ ID NO: 364177 - RNA, 19 nt, Artificial Sequence
  Description of Artificial Sequence: Synthetic oligonucleotide
gguggccggccugacagca

SEQ ID NO: 364178 - RNA, 19 nt, Artificial Sequence
  Description of Artificial Sequence: Synthetic oligonucleotide
caacaacgucggccccaag

SEQ ID NO: 364179 - RNA, 19 nt, Artificial Sequence
  Description of Artificial Sequence: Synthetic oligonucleotide
gcggaguaguugccgacaa

SEQ ID NO: 364180 - RNA, 19 nt, Artificial Sequence
  Description of Artificial Sequence: Synthetic oligonucleotide
gcagacgaucaucuauggu

SEQ ID NO: 364181 - RNA, 19 nt, Artificial Sequence
  Description of Artificial Sequence: Synthetic oligonucleotide
cgaaacaggaggauacccu

SEQ ID NO: 364182 - RNA, 19 nt, Artificial Sequence
  Description of Artificial Sequence: Synthetic oligonucleotide
gugcccgggucugacccac

SEQ ID NO: 364183 - RNA, 19 nt, Artificial Sequence
  Description of Artificial Sequence: Synthetic oligonucleotide
gggagauucacuggugcau

SEQ ID NO: 364184 - RNA, 19 nt, Artificial Sequence
  Description of Artificial Sequence: Synthetic oligonucleotide
gacgccucggcuggaucua

SEQ ID NO: 364185 - RNA, 19 nt, Artificial Sequence
  Description of Artificial Sequence: Synthetic oligonucleotide
ugcccgggucugacccacu

SEQ ID NO: 364186 - RNA, 19 nt, Artificial Sequence
  Description of Artificial Sequence: Synthetic oligonucleotide
gcacaacccuguagguccc

SEQ ID NO: 364187 - RNA, 19 nt, Artificial Sequence
  Description of Artificial Sequence: Synthetic oligonucleotide
ccggccugacagcacugag

SEQ ID NO: 364188 - RNA, 19 nt, Artificial Sequence
  Description of Artificial Sequence: Synthetic oligonucleotide
cugacccacuaagcaccuc

SEQ ID NO: 364189 - RNA, 19 nt, Artificial Sequence
  Description of Artificial Sequence: Synthetic oligonucleotide
uggggacgaccagguagua

SEQ ID NO: 364190 - RNA, 19 nt, Artificial Sequence
  Description of Artificial Sequence: Synthetic oligonucleotide
gcgaggaguccgaggcggg

SEQ ID NO: 364191 - RNA, 19 nt, Artificial Sequence
  Description of Artificial Sequence: Synthetic oligonucleotide
aguccuugccugggagauu

SEQ ID NO: 364192 - RNA, 19 nt, Artificial Sequence
  Description of Artificial Sequence: Synthetic oligonucleotide
ggcucccaucugccgcccg

SEQ ID NO: 364193 - RNA, 19 nt, Artificial Sequence
  Description of Artificial Sequence: Synthetic oligonucleotide
cggucucccauucgccugc

SEQ ID NO: 364194 - RNA, 19 nt, Artificial Sequence
  Description of Artificial Sequence: Synthetic oligonucleotide
ugccgcccguggacucggc

SEQ ID NO: 364195 - RNA, 19 nt, Artificial Sequence
  Description of Artificial Sequence: Synthetic oligonucleotide
augcggcguccuggaagag

SEQ ID NO: 364196 - RNA, 19 nt, Artificial Sequence
  Description of Artificial Sequence: Synthetic oligonucleotide
ccggggucucugaaggaca

SEQ ID NO: 364197 - RNA, 19 nt, Artificial Sequence
  Description of Artificial Sequence: Synthetic oligonucleotide
caggugacgcacccuuggu

SEQ ID NO: 364198 - RNA, 19 nt, Artificial Sequence
  Description of Artificial Sequence: Synthetic oligonucleotide
gucggccccaaggguuaug

SEQ ID NO: 364199 - RNA, 19 nt, Artificial Sequence
  Description of Artificial Sequence: Synthetic oligonucleotide
cggaguaguugccgacaag

SEQ ID NO: 364200 - RNA, 19 nt, Artificial Sequence
  Description of Artificial Sequence: Synthetic oligonucleotide
ggaguccuagccccacccu

SEQ ID NO: 364201 - RNA, 19 nt, Artificial Sequence
  Description of Artificial Sequence: Synthetic oligonucleotide
gcauagcgaugugguacac

SEQ ID NO: 364202 - RNA, 19 nt, Artificial Sequence
  Description of Artificial Sequence: Synthetic oligonucleotide
cguggguuaucuggaaaca

SEQ ID NO: 364203 - RNA, 19 nt, Artificial Sequence
  Description of Artificial Sequence: Synthetic oligonucleotide
ggcucccacuaugucuuuc

SEQ ID NO: 364204 - RNA, 19 nt, Artificial Sequence
  Description of Artificial Sequence: Synthetic oligonucleotide
ggcugucacugagucggca

SEQ ID NO: 364205 - RNA, 19 nt, Artificial Sequence
  Description of Artificial Sequence: Synthetic oligonucleotide
cgaucaucuauggucaccu

SEQ ID NO: 364206 - RNA, 19 nt, Artificial Sequence
  Description of Artificial Sequence: Synthetic oligonucleotide
ccgggagcgagugcgcgac

SEQ ID NO: 364207 - RNA, 19 nt, Artificial Sequence
  Description of Artificial Sequence: Synthetic oligonucleotide
gccgcccguggacucggcc

SEQ ID NO: 364208 - RNA, 19 nt, Artificial Sequence
  Description of Artificial Sequence: Synthetic oligonucleotide
gugcgcgaccgucgcugca

SEQ ID NO: 364209 - RNA, 19 nt, Artificial Sequence
  Description of Artificial Sequence: Synthetic oligonucleotide
ggcgcccugggcucccauc

SEQ ID NO: 364210 - RNA, 19 nt, Artificial Sequence
  Description of Artificial Sequence: Synthetic oligonucleotide
ccagguagugcccgagugu

SEQ ID NO: 364211 - RNA, 19 nt, Artificial Sequence
  Description of Artificial Sequence: Synthetic oligonucleotide
ggcucacaacuggccggag

SEQ ID NO: 364212 - RNA, 19 nt, Artificial Sequence
  Description of Artificial Sequence: Synthetic oligonucleotide
ggaccccaagaugucuucu

SEQ ID NO: 364213 - RNA, 19 nt, Artificial Sequence
  Description of Artificial Sequence: Synthetic oligonucleotide
cacccuugguggccggccu

SEQ ID NO: 364214 - RNA, 19 nt, Artificial Sequence
  Description of Artificial Sequence: Synthetic oligonucleotide
ccgggaccugaaagauaug

SEQ ID NO: 364215 - RNA, 19 nt, Artificial Sequence
  Description of Artificial Sequence: Synthetic oligonucleotide
ccguggacucggccgccgc

SEQ ID NO: 364216 - RNA, 19 nt, Artificial Sequence
  Description of Artificial Sequence: Synthetic oligonucleotide
cucccgaaacugggccaga

SEQ ID NO: 364217 - RNA, 19 nt, Artificial Sequence
  Description of Artificial Sequence: Synthetic oligonucleotide
cgcaaguggaccucacggu

SEQ ID NO: 364218 - RNA, 19 nt, Artificial Sequence
  Description of Artificial Sequence: Synthetic oligonucleotide
cagccgcacacaccucacu

SEQ ID NO: 364219 - RNA, 19 nt, Artificial Sequence
  Description of Artificial Sequence: Synthetic oligonucleotide
ccgcagaucugagaugaua

SEQ ID NO: 364220 - RNA, 19 nt, Artificial Sequence
  Description of Artificial Sequence: Synthetic oligonucleotide
gcucccaucugccgcccgu

SEQ ID NO: 364221 - RNA, 19 nt, Artificial Sequence
  Description of Artificial Sequence: Synthetic oligonucleotide
cucagacgccucggcugga

SEQ ID NO: 364222 - RNA, 19 nt, Artificial Sequence
  Description of Artificial Sequence: Synthetic oligonucleotide
cccucccguggguuaucug

SEQ ID NO: 364223 - RNA, 19 nt, Artificial Sequence
  Description of Artificial Sequence: Synthetic oligonucleotide
agcacccacuggaccccaa

SEQ ID NO: 364224 - RNA, 19 nt, Artificial Sequence
  Description of Artificial Sequence: Synthetic oligonucleotide
cccguggacucggccgccg

SEQ ID NO: 364225 - RNA, 19 nt, Artificial Sequence
  Description of Artificial Sequence: Synthetic oligonucleotide
ccaacaacgucggccccaa

SEQ ID NO: 364226 - RNA, 19 nt, Artificial Sequence
  Description of Artificial Sequence: Synthetic oligonucleotide
gucccucccguggguuauc

SEQ ID NO: 364227 - RNA, 19 nt, Artificial Sequence
  Description of Artificial Sequence: Synthetic oligonucleotide
ggccggccugacagcacug

SEQ ID NO: 364228 - RNA, 19 nt, Artificial Sequence
  Description of Artificial Sequence: Synthetic oligonucleotide
cccaggcgccagguagugc

SEQ ID NO: 364229 - RNA, 19 nt, Artificial Sequence
  Description of Artificial Sequence: Synthetic oligonucleotide
ccggaccgcccgcaucuuc

SEQ ID NO: 364230 - RNA, 19 nt, Artificial Sequence
  Description of Artificial Sequence: Synthetic oligonucleotide
cagaggcggcucacuuccu

SEQ ID NO: 364231 - RNA, 19 nt, Artificial Sequence
  Description of Artificial Sequence: Synthetic oligonucleotide
gccgcccgggagcgagugc

SEQ ID NO: 364232 - RNA, 19 nt, Artificial Sequence
  Description of Artificial Sequence: Synthetic oligonucleotide
gcccgggucugacccacua

SEQ ID NO: 364233 - RNA, 19 nt, Artificial Sequence
  Description of Artificial Sequence: Synthetic oligonucleotide
caccagugcccgggucuga

SEQ ID NO: 364234 - RNA, 19 nt, Artificial Sequence
  Description of Artificial Sequence: Synthetic oligonucleotide
gcggcgucucggcccggac

SEQ ID NO: 364235 - RNA, 19 nt, Artificial Sequence
  Description of Artificial Sequence: Synthetic oligonucleotide
ggccggagaugugccugga

SEQ ID NO: 364236 - RNA, 19 nt, Artificial Sequence
  Description of Artificial Sequence: Synthetic oligonucleotide
cgcgaccgucgcugcaaac

SEQ ID NO: 364237 - RNA, 19 nt, Artificial Sequence
  Description of Artificial Sequence: Synthetic oligonucleotide
cccgggucugacccacuaa

SEQ ID NO: 364238 - RNA, 19 nt, Artificial Sequence
  Description of Artificial Sequence: Synthetic oligonucleotide
gcgcgaccgucgcugcaaa

SEQ ID NO: 364239 - RNA, 19 nt, Artificial Sequence
  Description of Artificial Sequence: Synthetic oligonucleotide
gcccguggacucggccgcc

SEQ ID NO: 364240 - RNA, 19 nt, Artificial Sequence
  Description of Artificial Sequence: Synthetic oligonucleotide
gcagggugauacggaugua

SEQ ID NO: 364241 - RNA, 19 nt, Artificial Sequence
  Description of Artificial Sequence: Synthetic oligonucleotide
gccggagaugugccuggau

SEQ ID NO: 364242 - RNA, 19 nt, Artificial Sequence
  Description of Artificial Sequence: Synthetic oligonucleotide
gcgaugugguacacagcuu

SEQ ID NO: 364243 - RNA, 19 nt, Artificial Sequence
  Description of Artificial Sequence: Synthetic oligonucleotide
gcggggaaugcggcguccu

SEQ ID NO: 364244 - RNA, 19 nt, Artificial Sequence
  Description of Artificial Sequence: Synthetic oligonucleotide
ccgcaucuucggcgcccug

SEQ ID NO: 364245 - RNA, 19 nt, Artificial Sequence
  Description of Artificial Sequence: Synthetic oligonucleotide
ccgccgcugggucuguccu

SEQ ID NO: 364246 - RNA, 19 nt, Artificial Sequence
  Description of Artificial Sequence: Synthetic oligonucleotide
gcaccgggagaagcacagu

SEQ ID NO: 364247 - RNA, 19 nt, Artificial Sequence
  Description of Artificial Sequence: Synthetic oligonucleotide
cgccagguagugcccgagu

SEQ ID NO: 364248 - RNA, 19 nt, Artificial Sequence
  Description of Artificial Sequence: Synthetic oligonucleotide
cccgcaucuucggcgcccu

SEQ ID NO: 364249 - RNA, 19 nt, Artificial Sequence
  Description of Artificial Sequence: Synthetic oligonucleotide
cgucggccccaaggguuau

SEQ ID NO: 364250 - RNA, 19 nt, Artificial Sequence
  Description of Artificial Sequence: Synthetic oligonucleotide
ucugacgucacuuagauau

SEQ ID NO: 364251 - RNA, 19 nt, Artificial Sequence
  Description of Artificial Sequence: Synthetic oligonucleotide
uagauauccauucuggcca

SEQ ID NO: 364252 - RNA, 19 nt, Artificial Sequence
  Description of Artificial Sequence: Synthetic oligonucleotide
uuauuguugucacugauaa

SEQ ID NO: 364253 - RNA, 19 nt, Artificial Sequence
  Description of Artificial Sequence: Synthetic oligonucleotide
uuagauauccauucuggcc

SEQ ID NO: 364254 - RNA, 19 nt, Artificial Sequence
  Description of Artificial Sequence: Synthetic oligonucleotide
uccaauuuuagcagcauca

SEQ ID NO: 364255 - RNA, 19 nt, Artificial Sequence
  Description of Artificial Sequence: Synthetic oligonucleotide
ugaauuauauccugggugu

SEQ ID NO: 364256 - RNA, 19 nt, Artificial Sequence
  Description of Artificial Sequence: Synthetic oligonucleotide
auuaauuccauggugggag

SEQ ID NO: 364257 - RNA, 19 nt, Artificial Sequence
  Description of Artificial Sequence: Synthetic oligonucleotide
aguguacugaaccacgagg

SEQ ID NO: 364258 - RNA, 19 nt, Artificial Sequence
  Description of Artificial Sequence: Synthetic oligonucleotide
ugauaugaggucaucugag

SEQ ID NO: 364259 - RNA, 19 nt, Artificial Sequence
  Description of Artificial Sequence: Synthetic oligonucleotide
auaugaggucaucugaggg

SEQ ID NO: 364260 - RNA, 19 nt, Artificial Sequence
  Description of Artificial Sequence: Synthetic oligonucleotide
uuuaguuauaaauuugcuu

SEQ ID NO: 364261 - RNA, 19 nt, Artificial Sequence
  Description of Artificial Sequence: Synthetic oligonucleotide
gucaguauauucuuggcug

SEQ ID NO: 364262 - RNA, 19 nt, Artificial Sequence
  Description of Artificial Sequence: Synthetic oligonucleotide
aauggcugacccaacaggg

SEQ ID NO: 364263 - RNA, 19 nt, Artificial Sequence
  Description of Artificial Sequence: Synthetic oligonucleotide
aauaugacagaaauuaauu

SEQ ID NO: 364264 - RNA, 19 nt, Artificial Sequence
  Description of Artificial Sequence: Synthetic oligonucleotide
agaguaguguuacuguuag

SEQ ID NO: 364265 - RNA, 19 nt, Artificial Sequence
  Description of Artificial Sequence: Synthetic oligonucleotide
ucauguaggucuauuccag

SEQ ID NO: 364266 - RNA, 19 nt, Artificial Sequence
  Description of Artificial Sequence: Synthetic oligonucleotide
ucaguauauucuuggcugg

SEQ ID NO: 364267 - RNA, 19 nt, Artificial Sequence
  Description of Artificial Sequence: Synthetic oligonucleotide
aagucgacuggccauggag

SEQ ID NO: 364268 - RNA, 19 nt, Artificial Sequence
  Description of Artificial Sequence: Synthetic oligonucleotide
ucuuuuccuggcaugacca

SEQ ID NO: 364269 - RNA, 19 nt, Artificial Sequence
  Description of Artificial Sequence: Synthetic oligonucleotide
uaguguuacuguuagacau

SEQ ID NO: 364270 - RNA, 19 nt, Artificial Sequence
  Description of Artificial Sequence: Synthetic oligonucleotide
ugagagcuagaagaaaagg

SEQ ID NO: 364271 - RNA, 19 nt, Artificial Sequence
  Description of Artificial Sequence: Synthetic oligonucleotide
uuauuggguagcuggcucg

SEQ ID NO: 364272 - RNA, 19 nt, Artificial Sequence
  Description of Artificial Sequence: Synthetic oligonucleotide
acuuagauauccauucugg

SEQ ID NO: 364273 - RNA, 19 nt, Artificial Sequence
  Description of Artificial Sequence: Synthetic oligonucleotide
gagagcuagaagaaaaggc

SEQ ID NO: 364274 - RNA, 19 nt, Artificial Sequence
  Description of Artificial Sequence: Synthetic oligonucleotide
ugucuaguggcccaucagc

SEQ ID NO: 364275 - RNA, 19 nt, Artificial Sequence
  Description of Artificial Sequence: Synthetic oligonucleotide
gucacuuagauauccauuc

SEQ ID NO: 364276 - RNA, 19 nt, Artificial Sequence
  Description of Artificial Sequence: Synthetic oligonucleotide
gacagauuguacuguaaug

SEQ ID NO: 364277 - RNA, 19 nt, Artificial Sequence
  Description of Artificial Sequence: Synthetic oligonucleotide
uauauucuuggcuggaguc

SEQ ID NO: 364278 - RNA, 19 nt, Artificial Sequence
  Description of Artificial Sequence: Synthetic oligonucleotide
uucaguguauuuacaagaa

SEQ ID NO: 364279 - RNA, 19 nt, Artificial Sequence
  Description of Artificial Sequence: Synthetic oligonucleotide
uuaauucuguccauauaaa

SEQ ID NO: 364280 - RNA, 19 nt, Artificial Sequence
  Description of Artificial Sequence: Synthetic oligonucleotide
gaugugacggggcugcugc

SEQ ID NO: 364281 - RNA, 19 nt, Artificial Sequence
  Description of Artificial Sequence: Synthetic oligonucleotide
gauaaacuccagaaucucc

SEQ ID NO: 364282 - RNA, 19 nt, Artificial Sequence
  Description of Artificial Sequence: Synthetic oligonucleotide
ugugcaacugaauuauauc

SEQ ID NO: 364283 - RNA, 19 nt, Artificial Sequence
  Description of Artificial Sequence: Synthetic oligonucleotide
guuguugaggcgaagggag

SEQ ID NO: 364284 - RNA, 19 nt, Artificial Sequence
  Description of Artificial Sequence: Synthetic oligonucleotide
cagauuguacuguaauggc

SEQ ID NO: 364285 - RNA, 19 nt, Artificial Sequence
  Description of Artificial Sequence: Synthetic oligonucleotide
uguacugaaccacgaggcc

SEQ ID NO: 364286 - RNA, 19 nt, Artificial Sequence
  Description of Artificial Sequence: Synthetic oligonucleotide
ucguugguccacauuguag

SEQ ID NO: 364287 - RNA, 19 nt, Artificial Sequence
  Description of Artificial Sequence: Synthetic oligonucleotide
cuauaguguacaaggcagc

SEQ ID NO: 364288 - RNA, 19 nt, Artificial Sequence
  Description of Artificial Sequence: Synthetic oligonucleotide
gaaguuugaagcgacucac

SEQ ID NO: 364289 - RNA, 19 nt, Artificial Sequence
  Description of Artificial Sequence: Synthetic oligonucleotide
uccuagaguaguguuacug

SEQ ID NO: 364290 - RNA, 19 nt, Artificial Sequence
  Description of Artificial Sequence: Synthetic oligonucleotide
ucuauuccaguggagucag

SEQ ID NO: 364291 - RNA, 19 nt, Artificial Sequence
  Description of Artificial Sequence: Synthetic oligonucleotide
agagucugacgucacuuag

SEQ ID NO: 364292 - RNA, 19 nt, Artificial Sequence
  Description of Artificial Sequence: Synthetic oligonucleotide
aguggagucaguauauucu

SEQ ID NO: 364293 - RNA, 19 nt, Artificial Sequence
  Description of Artificial Sequence: Synthetic oligonucleotide
cauucugucccuuggguuc

SEQ ID NO: 364294 - RNA, 19 nt, Artificial Sequence
  Description of Artificial Sequence: Synthetic oligonucleotide
ucuccuagaguaguguuac

SEQ ID NO: 364295 - RNA, 19 nt, Artificial Sequence
  Description of Artificial Sequence: Synthetic oligonucleotide
aguaucgcccaucacccug

SEQ ID NO: 364296 - RNA, 19 nt, Artificial Sequence
  Description of Artificial Sequence: Synthetic oligonucleotide
gguguaauagcauccggug

SEQ ID NO: 364297 - RNA, 19 nt, Artificial Sequence
  Description of Artificial Sequence: Synthetic oligonucleotide
gagucaguauauucuuggc

SEQ ID NO: 364298 - RNA, 19 nt, Artificial Sequence
  Description of Artificial Sequence: Synthetic oligonucleotide
aguggaguguacugaacca

SEQ ID NO: 364299 - RNA, 19 nt, Artificial Sequence
  Description of Artificial Sequence: Synthetic oligonucleotide
cacuuagauauccauucug

SEQ ID NO: 364300 - RNA, 19 nt, Artificial Sequence
  Description of Artificial Sequence: Synthetic oligonucleotide
ugaucaacauuguggucca

SEQ ID NO: 364301 - RNA, 19 nt, Artificial Sequence
  Description of Artificial Sequence: Synthetic oligonucleotide
cuuggcucgguuuccgugc

SEQ ID NO: 364302 - RNA, 19 nt, Artificial Sequence
  Description of Artificial Sequence: Synthetic oligonucleotide
agugucggccauucucagc

SEQ ID NO: 364303 - RNA, 19 nt, Artificial Sequence
  Description of Artificial Sequence: Synthetic oligonucleotide
ugugcgagugauuccuuca

SEQ ID NO: 364304 - RNA, 19 nt, Artificial Sequence
  Description of Artificial Sequence: Synthetic oligonucleotide
agcuacccgguguaauagc

SEQ ID NO: 364305 - RNA, 19 nt, Artificial Sequence
  Description of Artificial Sequence: Synthetic oligonucleotide
agucugacgucacuuagau

SEQ ID NO: 364306 - RNA, 19 nt, Artificial Sequence
  Description of Artificial Sequence: Synthetic oligonucleotide
uagaguaguguuacuguua

SEQ ID NO: 364307 - RNA, 19 nt, Artificial Sequence
  Description of Artificial Sequence: Synthetic oligonucleotide
uuagggacauucaguugca

SEQ ID NO: 364308 - RNA, 19 nt, Artificial Sequence
  Description of Artificial Sequence: Synthetic oligonucleotide
aagcgacucacagaguugu

SEQ ID NO: 364309 - RNA, 19 nt, Artificial Sequence
  Description of Artificial Sequence: Synthetic oligonucleotide
ugacgucacuuagauaucc

SEQ ID NO: 364310 - RNA, 19 nt, Artificial Sequence
  Description of Artificial Sequence: Synthetic oligonucleotide
aucauucugucccuugggu

SEQ ID NO: 364311 - RNA, 19 nt, Artificial Sequence
  Description of Artificial Sequence: Synthetic oligonucleotide
agggacauucaguugcaug

SEQ ID NO: 364312 - RNA, 19 nt, Artificial Sequence
  Description of Artificial Sequence: Synthetic oligonucleotide
gacccaacagggaguaucg

SEQ ID NO: 364313 - RNA, 19 nt, Artificial Sequence
  Description of Artificial Sequence: Synthetic oligonucleotide
caagaaauucauguagguc

SEQ ID NO: 364314 - RNA, 19 nt, Artificial Sequence
  Description of Artificial Sequence: Synthetic oligonucleotide
gaguguacugaaccacgag

SEQ ID NO: 364315 - RNA, 19 nt, Artificial Sequence
  Description of Artificial Sequence: Synthetic oligonucleotide
cuucucuugugagagcuag

SEQ ID NO: 364316 - RNA, 19 nt, Artificial Sequence
  Description of Artificial Sequence: Synthetic oligonucleotide
ucucuugugagagcuagaa

SEQ ID NO: 364317 - RNA, 19 nt, Artificial Sequence
  Description of Artificial Sequence: Synthetic oligonucleotide
gacauggcgagcuggguga

SEQ ID NO: 364318 - RNA, 19 nt, Artificial Sequence
  Description of Artificial Sequence: Synthetic oligonucleotide
aguauauucuuggcuggag

SEQ ID NO: 364319 - RNA, 19 nt, Artificial Sequence
  Description of Artificial Sequence: Synthetic oligonucleotide
ugugaucaugcuguaguac

SEQ ID NO: 364320 - RNA, 19 nt, Artificial Sequence
  Description of Artificial Sequence: Synthetic oligonucleotide
ucuuggcucgguuuccgug

SEQ ID NO: 364321 - RNA, 19 nt, Artificial Sequence
  Description of Artificial Sequence: Synthetic oligonucleotide
gaagugagagaauggggaa

SEQ ID NO: 364322 - RNA, 19 nt, Artificial Sequence
  Description of Artificial Sequence: Synthetic oligonucleotide
uggggaaaucaauuuacuu

SEQ ID NO: 364323 - RNA, 19 nt, Artificial Sequence
  Description of Artificial Sequence: Synthetic oligonucleotide
gcaacugaauuauauccug

SEQ ID NO: 364324 - RNA, 19 nt, Artificial Sequence
  Description of Artificial Sequence: Synthetic oligonucleotide
aauuggacuuggcucuuuu

SEQ ID NO: 364325 - RNA, 19 nt, Artificial Sequence
  Description of Artificial Sequence: Synthetic oligonucleotide
ugacggcuuucccaguuug

SEQ ID NO: 364326 - RNA, 19 nt, Artificial Sequence
  Description of Artificial Sequence: Synthetic oligonucleotide
gugcagacguugcugaggc

SEQ ID NO: 364327 - RNA, 19 nt, Artificial Sequence
  Description of Artificial Sequence: Synthetic oligonucleotide
accacacucugugagucac

SEQ ID NO: 364328 - RNA, 19 nt, Artificial Sequence
  Description of Artificial Sequence: Synthetic oligonucleotide
uuauauccugggugucuag

SEQ ID NO: 364329 - RNA, 19 nt, Artificial Sequence
  Description of Artificial Sequence: Synthetic oligonucleotide
agugcagacguugcugagg

SEQ ID NO: 364330 - RNA, 19 nt, Artificial Sequence
  Description of Artificial Sequence: Synthetic oligonucleotide
cauucugggcagccaaggg

SEQ ID NO: 364331 - RNA, 19 nt, Artificial Sequence
  Description of Artificial Sequence: Synthetic oligonucleotide
uuugagugccugucucuug

SEQ ID NO: 364332 - RNA, 19 nt, Artificial Sequence
  Description of Artificial Sequence: Synthetic oligonucleotide
uaggucuauuccaguggag

SEQ ID NO: 364333 - RNA, 19 nt, Artificial Sequence
  Description of Artificial Sequence: Synthetic oligonucleotide
ucgaaguuugaagcgacuc

SEQ ID NO: 364334 - RNA, 19 nt, Artificial Sequence
  Description of Artificial Sequence: Synthetic oligonucleotide
cauuagggacauucaguug

SEQ ID NO: 364335 - RNA, 19 nt, Artificial Sequence
  Description of Artificial Sequence: Synthetic oligonucleotide
acucgaaguuugaagcgac

SEQ ID NO: 364336 - RNA, 19 nt, Artificial Sequence
  Description of Artificial Sequence: Synthetic oligonucleotide
uauuccaguggagucagua

SEQ ID NO: 364337 - RNA, 19 nt, Artificial Sequence
  Description of Artificial Sequence: Synthetic oligonucleotide
uccugaguacugcuguggu

SEQ ID NO: 364338 - RNA, 19 nt, Artificial Sequence
  Description of Artificial Sequence: Synthetic oligonucleotide
ggauuccucacacaccgcc

SEQ ID NO: 364339 - RNA, 19 nt, Artificial Sequence
  Description of Artificial Sequence: Synthetic oligonucleotide
ugacccaacagggaguauc

SEQ ID NO: 364340 - RNA, 19 nt, Artificial Sequence
  Description of Artificial Sequence: Synthetic oligonucleotide
ugguuauuguugucacuga

SEQ ID NO: 364341 - RNA, 19 nt, Artificial Sequence
  Description of Artificial Sequence: Synthetic oligonucleotide
cuugugagagcuagaagaa

SEQ ID NO: 364342 - RNA, 19 nt, Artificial Sequence
  Description of Artificial Sequence: Synthetic oligonucleotide
auauucuuggcuggagucu

SEQ ID NO: 364343 - RNA, 19 nt, Artificial Sequence
  Description of Artificial Sequence: Synthetic oligonucleotide
uggguagcuggcucgcucc

SEQ ID NO: 364344 - RNA, 19 nt, Artificial Sequence
  Description of Artificial Sequence: Synthetic oligonucleotide
ugacuccacuggaccaugg

SEQ ID NO: 364345 - RNA, 19 nt, Artificial Sequence
  Description of Artificial Sequence: Synthetic oligonucleotide
aguccagugcagacguugc

SEQ ID NO: 364346 - RNA, 19 nt, Artificial Sequence
  Description of Artificial Sequence: Synthetic oligonucleotide
uacccgguguaauagcauc

SEQ ID NO: 364347 - RNA, 19 nt, Artificial Sequence
  Description of Artificial Sequence: Synthetic oligonucleotide
auguccgucucugugucuc

SEQ ID NO: 364348 - RNA, 19 nt, Artificial Sequence
  Description of Artificial Sequence: Synthetic oligonucleotide
uacacggguacaccuccug

SEQ ID NO: 364349 - RNA, 19 nt, Artificial Sequence
  Description of Artificial Sequence: Synthetic oligonucleotide
cagacguugcugaggcugg

SEQ ID NO: 364350 - RNA, 19 nt, Artificial Sequence
  Description of Artificial Sequence: Synthetic oligonucleotide
aagugagagaauggggaaa

SEQ ID NO: 364351 - RNA, 19 nt, Artificial Sequence
  Description of Artificial Sequence: Synthetic oligonucleotide
aaaccccacagaagggcuc

SEQ ID NO: 364352 - RNA, 19 nt, Artificial Sequence
  Description of Artificial Sequence: Synthetic oligonucleotide
uagcauccggugauaugag

SEQ ID NO: 364353 - RNA, 19 nt, Artificial Sequence
  Description of Artificial Sequence: Synthetic oligonucleotide
aguguuacuguuagacaug

SEQ ID NO: 364354 - RNA, 19 nt, Artificial Sequence
  Description of Artificial Sequence: Synthetic oligonucleotide
uacugaaccacgaggccuu

SEQ ID NO: 364355 - RNA, 19 nt, Artificial Sequence
  Description of Artificial Sequence: Synthetic oligonucleotide
gggaacacggccacuauag

SEQ ID NO: 364356 - RNA, 19 nt, Artificial Sequence
  Description of Artificial Sequence: Synthetic oligonucleotide
acccgguguaauagcaucc

SEQ ID NO: 364357 - RNA, 19 nt, Artificial Sequence
  Description of Artificial Sequence: Synthetic oligonucleotide
cacgacaucugcugucccc

SEQ ID NO: 364358 - RNA, 19 nt, Artificial Sequence
  Description of Artificial Sequence: Synthetic oligonucleotide
uggacagauuguacuguaa

SEQ ID NO: 364359 - RNA, 19 nt, Artificial Sequence
  Description of Artificial Sequence: Synthetic oligonucleotide
uuaacucuguggggcuugg

SEQ ID NO: 364360 - RNA, 19 nt, Artificial Sequence
  Description of Artificial Sequence: Synthetic oligonucleotide
gagagugugggacccuuuc

SEQ ID NO: 364361 - RNA, 19 nt, Artificial Sequence
  Description of Artificial Sequence: Synthetic oligonucleotide
caccaucaggauuguacag

SEQ ID NO: 364362 - RNA, 19 nt, Artificial Sequence
  Description of Artificial Sequence: Synthetic oligonucleotide
ucgguuuccgugcuucaau

SEQ ID NO: 364363 - RNA, 19 nt, Artificial Sequence
  Description of Artificial Sequence: Synthetic oligonucleotide
agagugugggacccuuuca

SEQ ID NO: 364364 - RNA, 19 nt, Artificial Sequence
  Description of Artificial Sequence: Synthetic oligonucleotide
cagaagguggacacuccug

SEQ ID NO: 364365 - RNA, 19 nt, Artificial Sequence
  Description of Artificial Sequence: Synthetic oligonucleotide
gugcgagugauuccuucag

SEQ ID NO: 364366 - RNA, 19 nt, Artificial Sequence
  Description of Artificial Sequence: Synthetic oligonucleotide
uauuggguagcuggcucgc

SEQ ID NO: 364367 - RNA, 19 nt, Artificial Sequence
  Description of Artificial Sequence: Synthetic oligonucleotide
acgucacuuagauauccau

SEQ ID NO: 364368 - RNA, 19 nt, Artificial Sequence
  Description of Artificial Sequence: Synthetic oligonucleotide
gaagcgacucacagaguug

SEQ ID NO: 364369 - RNA, 19 nt, Artificial Sequence
  Description of Artificial Sequence: Synthetic oligonucleotide
uuccgugcuucaauccacu

SEQ ID NO: 364370 - RNA, 19 nt, Artificial Sequence
  Description of Artificial Sequence: Synthetic oligonucleotide
uucucuugugagagcuaga

SEQ ID NO: 364371 - RNA, 19 nt, Artificial Sequence
  Description of Artificial Sequence: Synthetic oligonucleotide
ggauuguacaggucuccag

SEQ ID NO: 364372 - RNA, 19 nt, Artificial Sequence
  Description of Artificial Sequence: Synthetic oligonucleotide
acggguacaccuccugcug

SEQ ID NO: 364373 - RNA, 19 nt, Artificial Sequence
  Description of Artificial Sequence: Synthetic oligonucleotide
uuggguagcuggcucgcuc

SEQ ID NO: 364374 - RNA, 19 nt, Artificial Sequence
  Description of Artificial Sequence: Synthetic oligonucleotide
gaauuauauccuggguguc

SEQ ID NO: 364375 - RNA, 19 nt, Artificial Sequence
  Description of Artificial Sequence: Synthetic oligonucleotide
cuccugaguacugcugugg

SEQ ID NO: 364376 - RNA, 19 nt, Artificial Sequence
  Description of Artificial Sequence: Synthetic oligonucleotide
acggccacuauaguguaca

SEQ ID NO: 364377 - RNA, 19 nt, Artificial Sequence
  Description of Artificial Sequence: Synthetic oligonucleotide
agcgagguccgagugucgg

SEQ ID NO: 364378 - RNA, 19 nt, Artificial Sequence
  Description of Artificial Sequence: Synthetic oligonucleotide
gagugucggccauucucag

SEQ ID NO: 364379 - RNA, 19 nt, Artificial Sequence
  Description of Artificial Sequence: Synthetic oligonucleotide
gugucuaguggcccaucag

SEQ ID NO: 364380 - RNA, 19 nt, Artificial Sequence
  Description of Artificial Sequence: Synthetic oligonucleotide
gauuugagugccugucucu

SEQ ID NO: 364381 - RNA, 19 nt, Artificial Sequence
  Description of Artificial Sequence: Synthetic oligonucleotide
ggugugaucaugcuguagu

SEQ ID NO: 364382 - RNA, 19 nt, Artificial Sequence
  Description of Artificial Sequence: Synthetic oligonucleotide
gacuggguaggagauguga

SEQ ID NO: 364383 - RNA, 19 nt, Artificial Sequence
  Description of Artificial Sequence: Synthetic oligonucleotide
agugugggacccuuucaau

SEQ ID NO: 364384 - RNA, 19 nt, Artificial Sequence
  Description of Artificial Sequence: Synthetic oligonucleotide
ucaauccacucugucccug

SEQ ID NO: 364385 - RNA, 19 nt, Artificial Sequence
  Description of Artificial Sequence: Synthetic oligonucleotide
aggauccucaggucguagu

SEQ ID NO: 364386 - RNA, 19 nt, Artificial Sequence
  Description of Artificial Sequence: Synthetic oligonucleotide
cauccuuuguggacuuuuc

SEQ ID NO: 364387 - RNA, 19 nt, Artificial Sequence
  Description of Artificial Sequence: Synthetic oligonucleotide
ugcaccguguaagucgacu

SEQ ID NO: 364388 - RNA, 19 nt, Artificial Sequence
  Description of Artificial Sequence: Synthetic oligonucleotide
uggcaccagacauggcgag

SEQ ID NO: 364389 - RNA, 19 nt, Artificial Sequence
  Description of Artificial Sequence: Synthetic oligonucleotide
agucuccuagaguaguguu

SEQ ID NO: 364390 - RNA, 19 nt, Artificial Sequence
  Description of Artificial Sequence: Synthetic oligonucleotide
augugacggggcugcugcc

SEQ ID NO: 364391 - RNA, 19 nt, Artificial Sequence
  Description of Artificial Sequence: Synthetic oligonucleotide
agggaguaucgcccaucac

SEQ ID NO: 364392 - RNA, 19 nt, Artificial Sequence
  Description of Artificial Sequence: Synthetic oligonucleotide
uaccaacuugagcuuggaa

SEQ ID NO: 364393 - RNA, 19 nt, Artificial Sequence
  Description of Artificial Sequence: Synthetic oligonucleotide
agucuccuacugugccagc

SEQ ID NO: 364394 - RNA, 19 nt, Artificial Sequence
  Description of Artificial Sequence: Synthetic oligonucleotide
ggggaaaucaauuuacuuu

SEQ ID NO: 364395 - RNA, 19 nt, Artificial Sequence
  Description of Artificial Sequence: Synthetic oligonucleotide
guaagucgacuggccaugg

SEQ ID NO: 364396 - RNA, 19 nt, Artificial Sequence
  Description of Artificial Sequence: Synthetic oligonucleotide
ugugacggggcugcugccc

SEQ ID NO: 364397 - RNA, 19 nt, Artificial Sequence
  Description of Artificial Sequence: Synthetic oligonucleotide
ucugugagucacugcccac

SEQ ID NO: 364398 - RNA, 19 nt, Artificial Sequence
  Description of Artificial Sequence: Synthetic oligonucleotide
aguguacaaggcagcgagg

SEQ ID NO: 364399 - RNA, 19 nt, Artificial Sequence
  Description of Artificial Sequence: Synthetic oligonucleotide
cccaacagggaguaucgcc

SEQ ID NO: 364400 - RNA, 19 nt, Artificial Sequence
  Description of Artificial Sequence: Synthetic oligonucleotide
gcucgugccauucugcuga

SEQ ID NO: 364401 - RNA, 19 nt, Artificial Sequence
  Description of Artificial Sequence: Synthetic oligonucleotide
gucgacuggccauggagca

SEQ ID NO: 364402 - RNA, 19 nt, Artificial Sequence
  Description of Artificial Sequence: Synthetic oligonucleotide
gaauggcgugaggacaggc

SEQ ID NO: 364403 - RNA, 19 nt, Artificial Sequence
  Description of Artificial Sequence: Synthetic oligonucleotide
uccggugauaugaggucau

SEQ ID NO: 364404 - RNA, 19 nt, Artificial Sequence
  Description of Artificial Sequence: Synthetic oligonucleotide
cugugguaccugugguggg

SEQ ID NO: 364405 - RNA, 19 nt, Artificial Sequence
  Description of Artificial Sequence: Synthetic oligonucleotide
acagggaguaucgcccauc

SEQ ID NO: 364406 - RNA, 19 nt, Artificial Sequence
  Description of Artificial Sequence: Synthetic oligonucleotide
gcagacguugcugaggcug

SEQ ID NO: 364407 - RNA, 19 nt, Artificial Sequence
  Description of Artificial Sequence: Synthetic oligonucleotide
gacugcguaccaacuugag

SEQ ID NO: 364408 - RNA, 19 nt, Artificial Sequence
  Description of Artificial Sequence: Synthetic oligonucleotide
auccggugauaugagguca

SEQ ID NO: 364409 - RNA, 19 nt, Artificial Sequence
  Description of Artificial Sequence: Synthetic oligonucleotide
uugaagcgacucacagagu

SEQ ID NO: 364410 - RNA, 19 nt, Artificial Sequence
  Description of Artificial Sequence: Synthetic oligonucleotide
cagcuacccgguguaauag

SEQ ID NO: 364411 - RNA, 19 nt, Artificial Sequence
  Description of Artificial Sequence: Synthetic oligonucleotide
gauggacagauuguacugu

SEQ ID NO: 364412 - RNA, 19 nt, Artificial Sequence
  Description of Artificial Sequence: Synthetic oligonucleotide
uucuggccagucugguugu

SEQ ID NO: 364413 - RNA, 19 nt, Artificial Sequence
  Description of Artificial Sequence: Synthetic oligonucleotide
ugaggucaucugagggaac

SEQ ID NO: 364414 - RNA, 19 nt, Artificial Sequence
  Description of Artificial Sequence: Synthetic oligonucleotide
acccaacagggaguaucgc

SEQ ID NO: 364415 - RNA, 19 nt, Artificial Sequence
  Description of Artificial Sequence: Synthetic oligonucleotide
cugugcgagugauuccuuc

SEQ ID NO: 364416 - RNA, 19 nt, Artificial Sequence
  Description of Artificial Sequence: Synthetic oligonucleotide
gggaauggcgugaggacag

SEQ ID NO: 364417 - RNA, 19 nt, Artificial Sequence
  Description of Artificial Sequence: Synthetic oligonucleotide
gagucugacgucacuuaga

SEQ ID NO: 364418 - RNA, 19 nt, Artificial Sequence
  Description of Artificial Sequence: Synthetic oligonucleotide
ugcguaccaacuugagcuu

SEQ ID NO: 364419 - RNA, 19 nt, Artificial Sequence
  Description of Artificial Sequence: Synthetic oligonucleotide
ugaaggcaguggaguguac

SEQ ID NO: 364420 - RNA, 19 nt, Artificial Sequence
  Description of Artificial Sequence: Synthetic oligonucleotide
aggauuccucacacaccgc

SEQ ID NO: 364421 - RNA, 19 nt, Artificial Sequence
  Description of Artificial Sequence: Synthetic oligonucleotide
uguuacuguuagacauguu

SEQ ID NO: 364422 - RNA, 19 nt, Artificial Sequence
  Description of Artificial Sequence: Synthetic oligonucleotide
gcaccguguaagucgacug

SEQ ID NO: 364423 - RNA, 19 nt, Artificial Sequence
  Description of Artificial Sequence: Synthetic oligonucleotide
gacgucacuuagauaucca

SEQ ID NO: 364424 - RNA, 19 nt, Artificial Sequence
  Description of Artificial Sequence: Synthetic oligonucleotide
aggggacccauggcaaggg

SEQ ID NO: 364425 - RNA, 19 nt, Artificial Sequence
  Description of Artificial Sequence: Synthetic oligonucleotide
cacucgaaguuugaagcga

SEQ ID NO: 364426 - RNA, 19 nt, Artificial Sequence
  Description of Artificial Sequence: Synthetic oligonucleotide
ggcgcaaaccagcaucuuc

SEQ ID NO: 364427 - RNA, 19 nt, Artificial Sequence
  Description of Artificial Sequence: Synthetic oligonucleotide
agacugcguaccaacuuga

SEQ ID NO: 364428 - RNA, 19 nt, Artificial Sequence
  Description of Artificial Sequence: Synthetic oligonucleotide
gggucccaaguuuuaacuc

SEQ ID NO: 364429 - RNA, 19 nt, Artificial Sequence
  Description of Artificial Sequence: Synthetic oligonucleotide
ggaggauuccucacacacc

SEQ ID NO: 364430 - RNA, 19 nt, Artificial Sequence
  Description of Artificial Sequence: Synthetic oligonucleotide
uccgugcuucaauccacuc

SEQ ID NO: 364431 - RNA, 19 nt, Artificial Sequence
  Description of Artificial Sequence: Synthetic oligonucleotide
cucucgguccauacuggca

SEQ ID NO: 364432 - RNA, 19 nt, Artificial Sequence
  Description of Artificial Sequence: Synthetic oligonucleotide
guacugaaccacgaggccu

SEQ ID NO: 364433 - RNA, 19 nt, Artificial Sequence
  Description of Artificial Sequence: Synthetic oligonucleotide
cuagaguaguguuacuguu

SEQ ID NO: 364434 - RNA, 19 nt, Artificial Sequence
  Description of Artificial Sequence: Synthetic oligonucleotide
guguacaaggcagcgaggu

SEQ ID NO: 364435 - RNA, 19 nt, Artificial Sequence
  Description of Artificial Sequence: Synthetic oligonucleotide
ucugaccucguugguccac

SEQ ID NO: 364436 - RNA, 19 nt, Artificial Sequence
  Description of Artificial Sequence: Synthetic oligonucleotide
ucugugcgagugauuccuu

SEQ ID NO: 364437 - RNA, 19 nt, Artificial Sequence
  Description of Artificial Sequence: Synthetic oligonucleotide
accgccagacugcguacca

SEQ ID NO: 364438 - RNA, 19 nt, Artificial Sequence
  Description of Artificial Sequence: Synthetic oligonucleotide
agacauccuuuguggacuu

SEQ ID NO: 364439 - RNA, 19 nt, Artificial Sequence
  Description of Artificial Sequence: Synthetic oligonucleotide
uggggaacacggccacuau

SEQ ID NO: 364440 - RNA, 19 nt, Artificial Sequence
  Description of Artificial Sequence: Synthetic oligonucleotide
ggugucuaguggcccauca

SEQ ID NO: 364441 - RNA, 19 nt, Artificial Sequence
  Description of Artificial Sequence: Synthetic oligonucleotide
cguaccaacuugagcuugg

SEQ ID NO: 364442 - RNA, 19 nt, Artificial Sequence
  Description of Artificial Sequence: Synthetic oligonucleotide
gggacuugguaugaaggca

SEQ ID NO: 364443 - RNA, 19 nt, Artificial Sequence
  Description of Artificial Sequence: Synthetic oligonucleotide
gccucugugcgagugauuc

SEQ ID NO: 364444 - RNA, 19 nt, Artificial Sequence
  Description of Artificial Sequence: Synthetic oligonucleotide
gaugacggcuuucccaguu

SEQ ID NO: 364445 - RNA, 19 nt, Artificial Sequence
  Description of Artificial Sequence: Synthetic oligonucleotide
acgaggccuugcaucuggc

SEQ ID NO: 364446 - RNA, 19 nt, Artificial Sequence
  Description of Artificial Sequence: Synthetic oligonucleotide
gcgcaaaccagcaucuuca

SEQ ID NO: 364447 - RNA, 19 nt, Artificial Sequence
  Description of Artificial Sequence: Synthetic oligonucleotide
gggacccauggcaagggag

SEQ ID NO: 364448 - RNA, 19 nt, Artificial Sequence
  Description of Artificial Sequence: Synthetic oligonucleotide
caucuggccucccaccuaa

SEQ ID NO: 364449 - RNA, 19 nt, Artificial Sequence
  Description of Artificial Sequence: Synthetic oligonucleotide
augacggcuuucccaguuu

SEQ ID NO: 364450 - RNA, 19 nt, Artificial Sequence
  Description of Artificial Sequence: Synthetic oligonucleotide
gucagaggggcagcugaug

SEQ ID NO: 364451 - RNA, 19 nt, Artificial Sequence
  Description of Artificial Sequence: Synthetic oligonucleotide
acacggccacuauagugua

SEQ ID NO: 364452 - RNA, 19 nt, Artificial Sequence
  Description of Artificial Sequence: Synthetic oligonucleotide
auggcugacccaacaggga

SEQ ID NO: 364453 - RNA, 19 nt, Artificial Sequence
  Description of Artificial Sequence: Synthetic oligonucleotide
ccgagugucggccauucuc

SEQ ID NO: 364454 - RNA, 19 nt, Artificial Sequence
  Description of Artificial Sequence: Synthetic oligonucleotide
cucgguccauacuggcauc

SEQ ID NO: 364455 - RNA, 19 nt, Artificial Sequence
  Description of Artificial Sequence: Synthetic oligonucleotide
cacugauaaacuccagaau

SEQ ID NO: 364456 - RNA, 19 nt, Artificial Sequence
  Description of Artificial Sequence: Synthetic oligonucleotide
ccguguaagucgacuggcc

SEQ ID NO: 364457 - RNA, 19 nt, Artificial Sequence
  Description of Artificial Sequence: Synthetic oligonucleotide
gguggacacuccugaguac

SEQ ID NO: 364458 - RNA, 19 nt, Artificial Sequence
  Description of Artificial Sequence: Synthetic oligonucleotide
gucuccuagaguaguguua

SEQ ID NO: 364459 - RNA, 19 nt, Artificial Sequence
  Description of Artificial Sequence: Synthetic oligonucleotide
cacggccacuauaguguac

SEQ ID NO: 364460 - RNA, 19 nt, Artificial Sequence
  Description of Artificial Sequence: Synthetic oligonucleotide
ggggucccaaguuuuaacu

SEQ ID NO: 364461 - RNA, 19 nt, Artificial Sequence
  Description of Artificial Sequence: Synthetic oligonucleotide
gacggcuuucccaguuuga

SEQ ID NO: 364462 - RNA, 19 nt, Artificial Sequence
  Description of Artificial Sequence: Synthetic oligonucleotide
gagucuccuagaguagugu

SEQ ID NO: 364463 - RNA, 19 nt, Artificial Sequence
  Description of Artificial Sequence: Synthetic oligonucleotide
uuguccccgccaccugcac

SEQ ID NO: 364464 - RNA, 19 nt, Artificial Sequence
  Description of Artificial Sequence: Synthetic oligonucleotide
agacggagacugaggcauc

SEQ ID NO: 364465 - RNA, 19 nt, Artificial Sequence
  Description of Artificial Sequence: Synthetic oligonucleotide
cccgguguaauagcauccg

SEQ ID NO: 364466 - RNA, 19 nt, Artificial Sequence
  Description of Artificial Sequence: Synthetic oligonucleotide
gugacuccacuggaccaug

SEQ ID NO: 364467 - RNA, 19 nt, Artificial Sequence
  Description of Artificial Sequence: Synthetic oligonucleotide
ccgguguaauagcauccgg

SEQ ID NO: 364468 - RNA, 19 nt, Artificial Sequence
  Description of Artificial Sequence: Synthetic oligonucleotide
gcuacccgguguaauagca

SEQ ID NO: 364469 - RNA, 19 nt, Artificial Sequence
  Description of Artificial Sequence: Synthetic oligonucleotide
cagcgagguccgagugucg

SEQ ID NO: 364470 - RNA, 19 nt, Artificial Sequence
  Description of Artificial Sequence: Synthetic oligonucleotide
uacuggcaucaucucucuu

SEQ ID NO: 364471 - RNA, 19 nt, Artificial Sequence
  Description of Artificial Sequence: Synthetic oligonucleotide
uggcaugaccauggcugga

SEQ ID NO: 364472 - RNA, 19 nt, Artificial Sequence
  Description of Artificial Sequence: Synthetic oligonucleotide
ucgacuggccauggagcaa

SEQ ID NO: 364473 - RNA, 19 nt, Artificial Sequence
  Description of Artificial Sequence: Synthetic oligonucleotide
ggggaauggcgugaggaca

SEQ ID NO: 364474 - RNA, 19 nt, Artificial Sequence
  Description of Artificial Sequence: Synthetic oligonucleotide
gugacggggcugcugccca

SEQ ID NO: 364475 - RNA, 19 nt, Artificial Sequence
  Description of Artificial Sequence: Synthetic oligonucleotide
ggugcaccguguaagucga

SEQ ID NO: 364476 - RNA, 19 nt, Artificial Sequence
  Description of Artificial Sequence: Synthetic oligonucleotide
cucguugguccacauugua

SEQ ID NO: 364477 - RNA, 19 nt, Artificial Sequence
  Description of Artificial Sequence: Synthetic oligonucleotide
ugaccucguugguccacau

SEQ ID NO: 364478 - RNA, 19 nt, Artificial Sequence
  Description of Artificial Sequence: Synthetic oligonucleotide
ccuagaguaguguuacugu

SEQ ID NO: 364479 - RNA, 19 nt, Artificial Sequence
  Description of Artificial Sequence: Synthetic oligonucleotide
ggcucgugccauucugcug

SEQ ID NO: 364480 - RNA, 19 nt, Artificial Sequence
  Description of Artificial Sequence: Synthetic oligonucleotide
ccauuagggacauucaguu

SEQ ID NO: 364481 - RNA, 19 nt, Artificial Sequence
  Description of Artificial Sequence: Synthetic oligonucleotide
ggaauggcgugaggacagg

SEQ ID NO: 364482 - RNA, 19 nt, Artificial Sequence
  Description of Artificial Sequence: Synthetic oligonucleotide
gugaagaguuugucugccu

SEQ ID NO: 364483 - RNA, 19 nt, Artificial Sequence
  Description of Artificial Sequence: Synthetic oligonucleotide
cccgaguccagugcagacg

SEQ ID NO: 364484 - RNA, 19 nt, Artificial Sequence
  Description of Artificial Sequence: Synthetic oligonucleotide
cgaaguuugaagcgacuca

SEQ ID NO: 364485 - RNA, 19 nt, Artificial Sequence
  Description of Artificial Sequence: Synthetic oligonucleotide
guaccaacuugagcuugga

SEQ ID NO: 364486 - RNA, 19 nt, Artificial Sequence
  Description of Artificial Sequence: Synthetic oligonucleotide
agguccgagugucggccau

SEQ ID NO: 364487 - RNA, 19 nt, Artificial Sequence
  Description of Artificial Sequence: Synthetic oligonucleotide
caccagacauggcgagcug

SEQ ID NO: 364488 - RNA, 19 nt, Artificial Sequence
  Description of Artificial Sequence: Synthetic oligonucleotide
acggagacugaggcaucug

SEQ ID NO: 364489 - RNA, 19 nt, Artificial Sequence
  Description of Artificial Sequence: Synthetic oligonucleotide
gcagcuacccgguguaaua

SEQ ID NO: 364490 - RNA, 19 nt, Artificial Sequence
  Description of Artificial Sequence: Synthetic oligonucleotide
ugggugucuaguggcccau

SEQ ID NO: 364491 - RNA, 19 nt, Artificial Sequence
  Description of Artificial Sequence: Synthetic oligonucleotide
gcuagaagaaaaggcuucu

SEQ ID NO: 364492 - RNA, 19 nt, Artificial Sequence
  Description of Artificial Sequence: Synthetic oligonucleotide
gauguccgucucugugucu

SEQ ID NO: 364493 - RNA, 19 nt, Artificial Sequence
  Description of Artificial Sequence: Synthetic oligonucleotide
cucgaaguuugaagcgacu

SEQ ID NO: 364494 - RNA, 19 nt, Artificial Sequence
  Description of Artificial Sequence: Synthetic oligonucleotide
cgagugucggccauucuca

SEQ ID NO: 364495 - RNA, 19 nt, Artificial Sequence
  Description of Artificial Sequence: Synthetic oligonucleotide
cccauuagggacauucagu

SEQ ID NO: 364496 - RNA, 19 nt, Artificial Sequence
  Description of Artificial Sequence: Synthetic oligonucleotide
gacggagacugaggcaucu

SEQ ID NO: 364497 - RNA, 19 nt, Artificial Sequence
  Description of Artificial Sequence: Synthetic oligonucleotide
cauggcgagcugggugaag

SEQ ID NO: 364498 - RNA, 19 nt, Artificial Sequence
  Description of Artificial Sequence: Synthetic oligonucleotide
gcguaccaacuugagcuug

SEQ ID NO: 364499 - RNA, 19 nt, Artificial Sequence
  Description of Artificial Sequence: Synthetic oligonucleotide
agacuggguaggagaugug

SEQ ID NO: 364500 - RNA, 19 nt, Artificial Sequence
  Description of Artificial Sequence: Synthetic oligonucleotide
ucgugccauucugcugagc

SEQ ID NO: 364501 - RNA, 19 nt, Artificial Sequence
  Description of Artificial Sequence: Synthetic oligonucleotide
cugaccucguugguccaca

SEQ ID NO: 364502 - RNA, 19 nt, Artificial Sequence
  Description of Artificial Sequence: Synthetic oligonucleotide
acuuggaguuuuaguuaua

SEQ ID NO: 364503 - RNA, 19 nt, Artificial Sequence
  Description of Artificial Sequence: Synthetic oligonucleotide
ggcucgguuuccgugcuuc

SEQ ID NO: 364504 - RNA, 19 nt, Artificial Sequence
  Description of Artificial Sequence: Synthetic oligonucleotide
cugugagucacugcccacu

SEQ ID NO: 364505 - RNA, 19 nt, Artificial Sequence
  Description of Artificial Sequence: Synthetic oligonucleotide
gucugacgucacuuagaua

SEQ ID NO: 364506 - RNA, 19 nt, Artificial Sequence
  Description of Artificial Sequence: Synthetic oligonucleotide
aggcgaagggaggcauucu

SEQ ID NO: 364507 - RNA, 19 nt, Artificial Sequence
  Description of Artificial Sequence: Synthetic oligonucleotide
ggcaccagacauggcgagc

SEQ ID NO: 364508 - RNA, 19 nt, Artificial Sequence
  Description of Artificial Sequence: Synthetic oligonucleotide
agacguugcugaggcuggu

SEQ ID NO: 364509 - RNA, 19 nt, Artificial Sequence
  Description of Artificial Sequence: Synthetic oligonucleotide
gcgagguccgagugucggc

SEQ ID NO: 364510 - RNA, 19 nt, Artificial Sequence
  Description of Artificial Sequence: Synthetic oligonucleotide
guaucgcccaucacccugu

SEQ ID NO: 364511 - RNA, 19 nt, Artificial Sequence
  Description of Artificial Sequence: Synthetic oligonucleotide
ugauuccuucagggagguc

SEQ ID NO: 364512 - RNA, 19 nt, Artificial Sequence
  Description of Artificial Sequence: Synthetic oligonucleotide
cuacccgguguaauagcau

SEQ ID NO: 364513 - RNA, 19 nt, Artificial Sequence
  Description of Artificial Sequence: Synthetic oligonucleotide
ggggcccgaguccagugca

SEQ ID NO: 364514 - RNA, 19 nt, Artificial Sequence
  Description of Artificial Sequence: Synthetic oligonucleotide
cucaggucguaguucuuuu

SEQ ID NO: 364515 - RNA, 19 nt, Artificial Sequence
  Description of Artificial Sequence: Synthetic oligonucleotide
guucagggauucucguguu

SEQ ID NO: 364516 - RNA, 19 nt, Artificial Sequence
  Description of Artificial Sequence: Synthetic oligonucleotide
gcaaauggaguggaggauu

SEQ ID NO: 364517 - RNA, 19 nt, Artificial Sequence
  Description of Artificial Sequence: Synthetic oligonucleotide
ugacggggcugcugcccau

SEQ ID NO: 364518 - RNA, 19 nt, Artificial Sequence
  Description of Artificial Sequence: Synthetic oligonucleotide
ggggaacacggccacuaua

SEQ ID NO: 364519 - RNA, 19 nt, Artificial Sequence
  Description of Artificial Sequence: Synthetic oligonucleotide
cagggaggucugucaccuc

SEQ ID NO: 364520 - RNA, 19 nt, Artificial Sequence
  Description of Artificial Sequence: Synthetic oligonucleotide
ggaacacggccacuauagu

SEQ ID NO: 364521 - RNA, 19 nt, Artificial Sequence
  Description of Artificial Sequence: Synthetic oligonucleotide
ggauucucguguugcuggu

SEQ ID NO: 364522 - RNA, 19 nt, Artificial Sequence
  Description of Artificial Sequence: Synthetic oligonucleotide
uggcgcaaaccagcaucuu

SEQ ID NO: 364523 - RNA, 19 nt, Artificial Sequence
  Description of Artificial Sequence: Synthetic oligonucleotide
cgguguaauagcauccggu

SEQ ID NO: 364524 - RNA, 19 nt, Artificial Sequence
  Description of Artificial Sequence: Synthetic oligonucleotide
gaauuggacuuggcucuuu

SEQ ID NO: 364525 - RNA, 19 nt, Artificial Sequence
  Description of Artificial Sequence: Synthetic oligonucleotide
cuccuagaguaguguuacu

SEQ ID NO: 364526 - RNA, 19 nt, Artificial Sequence
  Description of Artificial Sequence: Synthetic oligonucleotide
ccgaguccagugcagacgu

SEQ ID NO: 364527 - RNA, 19 nt, Artificial Sequence
  Description of Artificial Sequence: Synthetic oligonucleotide
ccauggcuggauguccguc

SEQ ID NO: 364528 - RNA, 19 nt, Artificial Sequence
  Description of Artificial Sequence: Synthetic oligonucleotide
ccgugcuucaauccacucu

SEQ ID NO: 364529 - RNA, 19 nt, Artificial Sequence
  Description of Artificial Sequence: Synthetic oligonucleotide
aggcagcuacccgguguaa

SEQ ID NO: 364530 - RNA, 19 nt, Artificial Sequence
  Description of Artificial Sequence: Synthetic oligonucleotide
gcgugaggacaggcagggg

SEQ ID NO: 364531 - RNA, 19 nt, Artificial Sequence
  Description of Artificial Sequence: Synthetic oligonucleotide
ggcccgaguccagugcaga

SEQ ID NO: 364532 - RNA, 19 nt, Artificial Sequence
  Description of Artificial Sequence: Synthetic oligonucleotide
cuauuccaguggagucagu

SEQ ID NO: 364533 - RNA, 19 nt, Artificial Sequence
  Description of Artificial Sequence: Synthetic oligonucleotide
gagaugugacggggcugcu

SEQ ID NO: 364534 - RNA, 19 nt, Artificial Sequence
  Description of Artificial Sequence: Synthetic oligonucleotide
gugcaccguguaagucgac

SEQ ID NO: 364535 - RNA, 19 nt, Artificial Sequence
  Description of Artificial Sequence: Synthetic oligonucleotide
gccagacugcguaccaacu

SEQ ID NO: 364536 - RNA, 19 nt, Artificial Sequence
  Description of Artificial Sequence: Synthetic oligonucleotide
ggggaccuuuucuuugcuu

SEQ ID NO: 364537 - RNA, 19 nt, Artificial Sequence
  Description of Artificial Sequence: Synthetic oligonucleotide
ggcagcuacccgguguaau

SEQ ID NO: 364538 - RNA, 19 nt, Artificial Sequence
  Description of Artificial Sequence: Synthetic oligonucleotide
gggugucuaguggcccauc

SEQ ID NO: 364539 - RNA, 19 nt, Artificial Sequence
  Description of Artificial Sequence: Synthetic oligonucleotide
ccacgaggccuugcaucug

SEQ ID NO: 364540 - RNA, 19 nt, Artificial Sequence
  Description of Artificial Sequence: Synthetic oligonucleotide
cggugauaugaggucaucu

SEQ ID NO: 364541 - RNA, 19 nt, Artificial Sequence
  Description of Artificial Sequence: Synthetic oligonucleotide
ccccagcacgacaucugcu

SEQ ID NO: 364542 - RNA, 19 nt, Artificial Sequence
  Description of Artificial Sequence: Synthetic oligonucleotide
cugacccaacagggaguau

SEQ ID NO: 364543 - RNA, 19 nt, Artificial Sequence
  Description of Artificial Sequence: Synthetic oligonucleotide
ccaguggagucaguauauu

SEQ ID NO: 364544 - RNA, 19 nt, Artificial Sequence
  Description of Artificial Sequence: Synthetic oligonucleotide
gguccgagugucggccauu

SEQ ID NO: 364545 - RNA, 19 nt, Artificial Sequence
  Description of Artificial Sequence: Synthetic oligonucleotide
gauaagaccaacuagagca

SEQ ID NO: 364546 - RNA, 19 nt, Artificial Sequence
  Description of Artificial Sequence: Synthetic oligonucleotide
uaaauuauaaccugaagac

SEQ ID NO: 364547 - RNA, 19 nt, Artificial Sequence
  Description of Artificial Sequence: Synthetic oligonucleotide
auuaacuuuagacagcagg

SEQ ID NO: 364548 - RNA, 19 nt, Artificial Sequence
  Description of Artificial Sequence: Synthetic oligonucleotide
uauugugugucugagaugg

SEQ ID NO: 364549 - RNA, 19 nt, Artificial Sequence
  Description of Artificial Sequence: Synthetic oligonucleotide
uuuauuagaaucuuccaga

SEQ ID NO: 364550 - RNA, 19 nt, Artificial Sequence
  Description of Artificial Sequence: Synthetic oligonucleotide
aacucuuagagauuccuuc

SEQ ID NO: 364551 - RNA, 19 nt, Artificial Sequence
  Description of Artificial Sequence: Synthetic oligonucleotide
aaaaguacccuccaacaag

SEQ ID NO: 364552 - RNA, 19 nt, Artificial Sequence
  Description of Artificial Sequence: Synthetic oligonucleotide
aaacagaaauugcaagccc

SEQ ID NO: 364553 - RNA, 19 nt, Artificial Sequence
  Description of Artificial Sequence: Synthetic oligonucleotide
uuaugaucgacucuaaaac

SEQ ID NO: 364554 - RNA, 19 nt, Artificial Sequence
  Description of Artificial Sequence: Synthetic oligonucleotide
uucuaugugccucagcugg

SEQ ID NO: 364555 - RNA, 19 nt, Artificial Sequence
  Description of Artificial Sequence: Synthetic oligonucleotide
auggauuaacuuuagacag

SEQ ID NO: 364556 - RNA, 19 nt, Artificial Sequence
  Description of Artificial Sequence: Synthetic oligonucleotide
ugugucaaccacaauagag

SEQ ID NO: 364557 - RNA, 19 nt, Artificial Sequence
  Description of Artificial Sequence: Synthetic oligonucleotide
ucaauuguugaaaacugag

SEQ ID NO: 364558 - RNA, 19 nt, Artificial Sequence
  Description of Artificial Sequence: Synthetic oligonucleotide
aaaauggugucuauaauag

SEQ ID NO: 364559 - RNA, 19 nt, Artificial Sequence
  Description of Artificial Sequence: Synthetic oligonucleotide
agauuuauuuccuuuauga

SEQ ID NO: 364560 - RNA, 19 nt, Artificial Sequence
  Description of Artificial Sequence: Synthetic oligonucleotide
uguugcuaagguaauauca

SEQ ID NO: 364561 - RNA, 19 nt, Artificial Sequence
  Description of Artificial Sequence: Synthetic oligonucleotide
uauauaauuucauguguag

SEQ ID NO: 364562 - RNA, 19 nt, Artificial Sequence
  Description of Artificial Sequence: Synthetic oligonucleotide
aaggaguaagaauagagaa

SEQ ID NO: 364563 - RNA, 19 nt, Artificial Sequence
  Description of Artificial Sequence: Synthetic oligonucleotide
ugcguaacgaacuggauag

SEQ ID NO: 364564 - RNA, 19 nt, Artificial Sequence
  Description of Artificial Sequence: Synthetic oligonucleotide
agacauaacucuuagagau

SEQ ID NO: 364565 - RNA, 19 nt, Artificial Sequence
  Description of Artificial Sequence: Synthetic oligonucleotide
ugaagacauauuaugaccu

SEQ ID NO: 364566 - RNA, 19 nt, Artificial Sequence
  Description of Artificial Sequence: Synthetic oligonucleotide
gauauaacguggcauuggg

SEQ ID NO: 364567 - RNA, 19 nt, Artificial Sequence
  Description of Artificial Sequence: Synthetic oligonucleotide
uauaauaggaugauucguc

SEQ ID NO: 364568 - RNA, 19 nt, Artificial Sequence
  Description of Artificial Sequence: Synthetic oligonucleotide
caauguagcaccaaacgcc

SEQ ID NO: 364569 - RNA, 19 nt, Artificial Sequence
  Description of Artificial Sequence: Synthetic oligonucleotide
aagugauaagaccaacuag

SEQ ID NO: 364570 - RNA, 19 nt, Artificial Sequence
  Description of Artificial Sequence: Synthetic oligonucleotide
aaaguacccuccaacaagc

SEQ ID NO: 364571 - RNA, 19 nt, Artificial Sequence
  Description of Artificial Sequence: Synthetic oligonucleotide
aauuauaaccugaagacau

SEQ ID NO: 364572 - RNA, 19 nt, Artificial Sequence
  Description of Artificial Sequence: Synthetic oligonucleotide
auacacacggaccaauggc

SEQ ID NO: 364573 - RNA, 19 nt, Artificial Sequence
  Description of Artificial Sequence: Synthetic oligonucleotide
aacacuugaagaaauggag

SEQ ID NO: 364574 - RNA, 19 nt, Artificial Sequence
  Description of Artificial Sequence: Synthetic oligonucleotide
uguuauacugcccaaacuu

SEQ ID NO: 364575 - RNA, 19 nt, Artificial Sequence
  Description of Artificial Sequence: Synthetic oligonucleotide
uauaacguggcauugggaa

SEQ ID NO: 364576 - RNA, 19 nt, Artificial Sequence
  Description of Artificial Sequence: Synthetic oligonucleotide
ucuacaauuagcagaacau

SEQ ID NO: 364577 - RNA, 19 nt, Artificial Sequence
  Description of Artificial Sequence: Synthetic oligonucleotide
accuuauauaauuucaugu

SEQ ID NO: 364578 - RNA, 19 nt, Artificial Sequence
  Description of Artificial Sequence: Synthetic oligonucleotide
aaagugauaagaccaacua

SEQ ID NO: 364579 - RNA, 19 nt, Artificial Sequence
  Description of Artificial Sequence: Synthetic oligonucleotide
uuuacuuccaauguagcac

SEQ ID NO: 364580 - RNA, 19 nt, Artificial Sequence
  Description of Artificial Sequence: Synthetic oligonucleotide
ucgauuagcaagcaucuca

SEQ ID NO: 364581 - RNA, 19 nt, Artificial Sequence
  Description of Artificial Sequence: Synthetic oligonucleotide
acagcuuagcucgugaacc

SEQ ID NO: 364582 - RNA, 19 nt, Artificial Sequence
  Description of Artificial Sequence: Synthetic oligonucleotide
aacuagagcauccggagga

SEQ ID NO: 364583 - RNA, 19 nt, Artificial Sequence
  Description of Artificial Sequence: Synthetic oligonucleotide
ucaauaucgugccaggaac

SEQ ID NO: 364584 - RNA, 19 nt, Artificial Sequence
  Description of Artificial Sequence: Synthetic oligonucleotide
cugaagacauauuaugacc

SEQ ID NO: 364585 - RNA, 19 nt, Artificial Sequence
  Description of Artificial Sequence: Synthetic oligonucleotide
ucgacucuaaaacaauaag

SEQ ID NO: 364586 - RNA, 19 nt, Artificial Sequence
  Description of Artificial Sequence: Synthetic oligonucleotide
aaacaucuacaauuagcag

SEQ ID NO: 364587 - RNA, 19 nt, Artificial Sequence
  Description of Artificial Sequence: Synthetic oligonucleotide
gaccauuuguagcaguucg

SEQ ID NO: 364588 - RNA, 19 nt, Artificial Sequence
  Description of Artificial Sequence: Synthetic oligonucleotide
uuauauaauuucaugugua

SEQ ID NO: 364589 - RNA, 19 nt, Artificial Sequence
  Description of Artificial Sequence: Synthetic oligonucleotide
caugugucaaccacaauag

SEQ ID NO: 364590 - RNA, 19 nt, Artificial Sequence
  Description of Artificial Sequence: Synthetic oligonucleotide
ucauccgucaggaugggag

SEQ ID NO: 364591 - RNA, 19 nt, Artificial Sequence
  Description of Artificial Sequence: Synthetic oligonucleotide
agaucgagcaccucgcugg

SEQ ID NO: 364592 - RNA, 19 nt, Artificial Sequence
  Description of Artificial Sequence: Synthetic oligonucleotide
caauuguugaaaacugagg

SEQ ID NO: 364593 - RNA, 19 nt, Artificial Sequence
  Description of Artificial Sequence: Synthetic oligonucleotide
aguucgauuagcaagcauc

SEQ ID NO: 364594 - RNA, 19 nt, Artificial Sequence
  Description of Artificial Sequence: Synthetic oligonucleotide
gauacacacggaccaaugg

SEQ ID NO: 364595 - RNA, 19 nt, Artificial Sequence
  Description of Artificial Sequence: Synthetic oligonucleotide
aaaggagucugacaaucug

SEQ ID NO: 364596 - RNA, 19 nt, Artificial Sequence
  Description of Artificial Sequence: Synthetic oligonucleotide
uaacgaacuggauagcacc

SEQ ID NO: 364597 - RNA, 19 nt, Artificial Sequence
  Description of Artificial Sequence: Synthetic oligonucleotide
aaauuauaaccugaagaca

SEQ ID NO: 364598 - RNA, 19 nt, Artificial Sequence
  Description of Artificial Sequence: Synthetic oligonucleotide
aaugcugguacugcguaac

SEQ ID NO: 364599 - RNA, 19 nt, Artificial Sequence
  Description of Artificial Sequence: Synthetic oligonucleotide
guaagaauagagaaugggc

SEQ ID NO: 364600 - RNA, 19 nt, Artificial Sequence
  Description of Artificial Sequence: Synthetic oligonucleotide
uaugaucgacucuaaaaca

SEQ ID NO: 364601 - RNA, 19 nt, Artificial Sequence
  Description of Artificial Sequence: Synthetic oligonucleotide
ugcuaagguaauaucaagu

SEQ ID NO: 364602 - RNA, 19 nt, Artificial Sequence
  Description of Artificial Sequence: Synthetic oligonucleotide
aguuacuggccaugggucc

SEQ ID NO: 364603 - RNA, 19 nt, Artificial Sequence
  Description of Artificial Sequence: Synthetic oligonucleotide
gguaauaucaaguguggcc

SEQ ID NO: 364604 - RNA, 19 nt, Artificial Sequence
  Description of Artificial Sequence: Synthetic oligonucleotide
ugcaguuaaauccuugguc

SEQ ID NO: 364605 - RNA, 19 nt, Artificial Sequence
  Description of Artificial Sequence: Synthetic oligonucleotide
uccguguugauauaacgug

SEQ ID NO: 364606 - RNA, 19 nt, Artificial Sequence
  Description of Artificial Sequence: Synthetic oligonucleotide
ugauaagaccaacuagagc

SEQ ID NO: 364607 - RNA, 19 nt, Artificial Sequence
  Description of Artificial Sequence: Synthetic oligonucleotide
cacauucagagauacacac

SEQ ID NO: 364608 - RNA, 19 nt, Artificial Sequence
  Description of Artificial Sequence: Synthetic oligonucleotide
auacaaguuauuguguguc

SEQ ID NO: 364609 - RNA, 19 nt, Artificial Sequence
  Description of Artificial Sequence: Synthetic oligonucleotide
agcaguucgauuagcaagc

SEQ ID NO: 364610 - RNA, 19 nt, Artificial Sequence
  Description of Artificial Sequence: Synthetic oligonucleotide
aaacugaggcaucaauuca

SEQ ID NO: 364611 - RNA, 19 nt, Artificial Sequence
  Description of Artificial Sequence: Synthetic oligonucleotide
uauuaugaccugaaggcau

SEQ ID NO: 364612 - RNA, 19 nt, Artificial Sequence
  Description of Artificial Sequence: Synthetic oligonucleotide
uagcaagcaucucauaaug

SEQ ID NO: 364613 - RNA, 19 nt, Artificial Sequence
  Description of Artificial Sequence: Synthetic oligonucleotide
uuuguagcaguucgauuag

SEQ ID NO: 364614 - RNA, 19 nt, Artificial Sequence
  Description of Artificial Sequence: Synthetic oligonucleotide
guagaugugggauccaggc

SEQ ID NO: 364615 - RNA, 19 nt, Artificial Sequence
  Description of Artificial Sequence: Synthetic oligonucleotide
ucggaugcgcuucugagug

SEQ ID NO: 364616 - RNA, 19 nt, Artificial Sequence
  Description of Artificial Sequence: Synthetic oligonucleotide
aucuacaauuagcagaaca

SEQ ID NO: 364617 - RNA, 19 nt, Artificial Sequence
  Description of Artificial Sequence: Synthetic oligonucleotide
ugugcaucauccaguggcg

SEQ ID NO: 364618 - RNA, 19 nt, Artificial Sequence
  Description of Artificial Sequence: Synthetic oligonucleotide
aaaagugauaagaccaacu

SEQ ID NO: 364619 - RNA, 19 nt, Artificial Sequence
  Description of Artificial Sequence: Synthetic oligonucleotide
ggaaacaaaaggcugcucc

SEQ ID NO: 364620 - RNA, 19 nt, Artificial Sequence
  Description of Artificial Sequence: Synthetic oligonucleotide
gcaguuaaauccuuggucc

SEQ ID NO: 364621 - RNA, 19 nt, Artificial Sequence
  Description of Artificial Sequence: Synthetic oligonucleotide
uccauugaagucuuuacua

SEQ ID NO: 364622 - RNA, 19 nt, Artificial Sequence
  Description of Artificial Sequence: Synthetic oligonucleotide
uuuggaaaaguacccucca

SEQ ID NO: 364623 - RNA, 19 nt, Artificial Sequence
  Description of Artificial Sequence: Synthetic oligonucleotide
uucaauaucgugccaggaa

SEQ ID NO: 364624 - RNA, 19 nt, Artificial Sequence
  Description of Artificial Sequence: Synthetic oligonucleotide
aaauaucaaugcagugacc

SEQ ID NO: 364625 - RNA, 19 nt, Artificial Sequence
  Description of Artificial Sequence: Synthetic oligonucleotide
gaucgcaaaggucucuucc

SEQ ID NO: 364626 - RNA, 19 nt, Artificial Sequence
  Description of Artificial Sequence: Synthetic oligonucleotide
acagauuuuccacugacuu

SEQ ID NO: 364627 - RNA, 19 nt, Artificial Sequence
  Description of Artificial Sequence: Synthetic oligonucleotide
accacaauagagaaagauc

SEQ ID NO: 364628 - RNA, 19 nt, Artificial Sequence
  Description of Artificial Sequence: Synthetic oligonucleotide
ugccuguauaugcuggagg

SEQ ID NO: 364629 - RNA, 19 nt, Artificial Sequence
  Description of Artificial Sequence: Synthetic oligonucleotide
ucugacucugcccggaaca

SEQ ID NO: 364630 - RNA, 19 nt, Artificial Sequence
  Description of Artificial Sequence: Synthetic oligonucleotide
uggauuaacuuuagacagc

SEQ ID NO: 364631 - RNA, 19 nt, Artificial Sequence
  Description of Artificial Sequence: Synthetic oligonucleotide
gaaacaugaacugaggaua

SEQ ID NO: 364632 - RNA, 19 nt, Artificial Sequence
  Description of Artificial Sequence: Synthetic oligonucleotide
aacagaaauugcaagccca

SEQ ID NO: 364633 - RNA, 19 nt, Artificial Sequence
  Description of Artificial Sequence: Synthetic oligonucleotide
uugcuaagguaauaucaag

SEQ ID NO: 364634 - RNA, 19 nt, Artificial Sequence
  Description of Artificial Sequence: Synthetic oligonucleotide
ugauucgucaggacuguug

SEQ ID NO: 364635 - RNA, 19 nt, Artificial Sequence
  Description of Artificial Sequence: Synthetic oligonucleotide
caauaucgugccaggaacg

SEQ ID NO: 364636 - RNA, 19 nt, Artificial Sequence
  Description of Artificial Sequence: Synthetic oligonucleotide
ugucgauccagccaccgga

SEQ ID NO: 364637 - RNA, 19 nt, Artificial Sequence
  Description of Artificial Sequence: Synthetic oligonucleotide
gcuaagguaauaucaagug

SEQ ID NO: 364638 - RNA, 19 nt, Artificial Sequence
  Description of Artificial Sequence: Synthetic oligonucleotide
cuugaguuauuuauuagaa

SEQ ID NO: 364639 - RNA, 19 nt, Artificial Sequence
  Description of Artificial Sequence: Synthetic oligonucleotide
uuagcaagcaucucauaau

SEQ ID NO: 364640 - RNA, 19 nt, Artificial Sequence
  Description of Artificial Sequence: Synthetic oligonucleotide
uacugcguaacgaacugga

SEQ ID NO: 364641 - RNA, 19 nt, Artificial Sequence
  Description of Artificial Sequence: Synthetic oligonucleotide
ucggaugaguugucgaucc

SEQ ID NO: 364642 - RNA, 19 nt, Artificial Sequence
  Description of Artificial Sequence: Synthetic oligonucleotide
aauguagcaccaaacgcca

SEQ ID NO: 364643 - RNA, 19 nt, Artificial Sequence
  Description of Artificial Sequence: Synthetic oligonucleotide
ucgugaaccugcaccaucc

SEQ ID NO: 364644 - RNA, 19 nt, Artificial Sequence
  Description of Artificial Sequence: Synthetic oligonucleotide
ugaaaucuccauugaaguc

SEQ ID NO: 364645 - RNA, 19 nt, Artificial Sequence
  Description of Artificial Sequence: Synthetic oligonucleotide
agaugccaagaguagaugu

SEQ ID NO: 364646 - RNA, 19 nt, Artificial Sequence
  Description of Artificial Sequence: Synthetic oligonucleotide
ugaccuuauauaauuucau

SEQ ID NO: 364647 - RNA, 19 nt, Artificial Sequence
  Description of Artificial Sequence: Synthetic oligonucleotide
uaaccugaagacauauuau

SEQ ID NO: 364648 - RNA, 19 nt, Artificial Sequence
  Description of Artificial Sequence: Synthetic oligonucleotide
auaacguggcauugggaag

SEQ ID NO: 364649 - RNA, 19 nt, Artificial Sequence
  Description of Artificial Sequence: Synthetic oligonucleotide
ugcuugaaaagagaagugu

SEQ ID NO: 364650 - RNA, 19 nt, Artificial Sequence
  Description of Artificial Sequence: Synthetic oligonucleotide
gauccugccuggcaaaaug

SEQ ID NO: 364651 - RNA, 19 nt, Artificial Sequence
  Description of Artificial Sequence: Synthetic oligonucleotide
acaugaacugaggauacag

SEQ ID NO: 364652 - RNA, 19 nt, Artificial Sequence
  Description of Artificial Sequence: Synthetic oligonucleotide
acgaauaggagucuucaau

SEQ ID NO: 364653 - RNA, 19 nt, Artificial Sequence
  Description of Artificial Sequence: Synthetic oligonucleotide
auguugcuaagguaauauc

SEQ ID NO: 364654 - RNA, 19 nt, Artificial Sequence
  Description of Artificial Sequence: Synthetic oligonucleotide
agauguggggucuucuuug

SEQ ID NO: 364655 - RNA, 19 nt, Artificial Sequence
  Description of Artificial Sequence: Synthetic oligonucleotide
auuuuggccaaugcucuac

SEQ ID NO: 364656 - RNA, 19 nt, Artificial Sequence
  Description of Artificial Sequence: Synthetic oligonucleotide
agaucagaggagaucgagc

SEQ ID NO: 364657 - RNA, 19 nt, Artificial Sequence
  Description of Artificial Sequence: Synthetic oligonucleotide
accucgcuggaucauguac

SEQ ID NO: 364658 - RNA, 19 nt, Artificial Sequence
  Description of Artificial Sequence: Synthetic oligonucleotide
agguaauaucaaguguggc

SEQ ID NO: 364659 - RNA, 19 nt, Artificial Sequence
  Description of Artificial Sequence: Synthetic oligonucleotide
uguugauauaacguggcau

SEQ ID NO: 364660 - RNA, 19 nt, Artificial Sequence
  Description of Artificial Sequence: Synthetic oligonucleotide
gcagugucaguuuaagagg

SEQ ID NO: 364661 - RNA, 19 nt, Artificial Sequence
  Description of Artificial Sequence: Synthetic oligonucleotide
ugucugagauggauuaacu

SEQ ID NO: 364662 - RNA, 19 nt, Artificial Sequence
  Description of Artificial Sequence: Synthetic oligonucleotide
aguuuaagaggcacuggac

SEQ ID NO: 364663 - RNA, 19 nt, Artificial Sequence
  Description of Artificial Sequence: Synthetic oligonucleotide
ugaaaggaauguugcuaag

SEQ ID NO: 364664 - RNA, 19 nt, Artificial Sequence
  Description of Artificial Sequence: Synthetic oligonucleotide
acucuuagagauuccuuca

SEQ ID NO: 364665 - RNA, 19 nt, Artificial Sequence
  Description of Artificial Sequence: Synthetic oligonucleotide
uaacguggcauugggaagc

SEQ ID NO: 364666 - RNA, 19 nt, Artificial Sequence
  Description of Artificial Sequence: Synthetic oligonucleotide
acucaauuguugaaaacug

SEQ ID NO: 364667 - RNA, 19 nt, Artificial Sequence
  Description of Artificial Sequence: Synthetic oligonucleotide
ucaguuuaagaggcacugg

SEQ ID NO: 364668 - RNA, 19 nt, Artificial Sequence
  Description of Artificial Sequence: Synthetic oligonucleotide
ccacaauagagaaagauca

SEQ ID NO: 364669 - RNA, 19 nt, Artificial Sequence
  Description of Artificial Sequence: Synthetic oligonucleotide
gaugccaagaguagaugug

SEQ ID NO: 364670 - RNA, 19 nt, Artificial Sequence
  Description of Artificial Sequence: Synthetic oligonucleotide
uuaugaccuuauauaauuu

SEQ ID NO: 364671 - RNA, 19 nt, Artificial Sequence
  Description of Artificial Sequence: Synthetic oligonucleotide
agcaagcaucucauaaugc

SEQ ID NO: 364672 - RNA, 19 nt, Artificial Sequence
  Description of Artificial Sequence: Synthetic oligonucleotide
caucaagacugcugcagcc

SEQ ID NO: 364673 - RNA, 19 nt, Artificial Sequence
  Description of Artificial Sequence: Synthetic oligonucleotide
uguauaugcuggagggaac

SEQ ID NO: 364674 - RNA, 19 nt, Artificial Sequence
  Description of Artificial Sequence: Synthetic oligonucleotide
ugggcuauggucucaccca

SEQ ID NO: 364675 - RNA, 19 nt, Artificial Sequence
  Description of Artificial Sequence: Synthetic oligonucleotide
ucuacuuauccagauuuau

SEQ ID NO: 364676 - RNA, 19 nt, Artificial Sequence
  Description of Artificial Sequence: Synthetic oligonucleotide
gaugaguugucgauccagc

SEQ ID NO: 364677 - RNA, 19 nt, Artificial Sequence
  Description of Artificial Sequence: Synthetic oligonucleotide
agccgugccaucaagacug

SEQ ID NO: 364678 - RNA, 19 nt, Artificial Sequence
  Description of Artificial Sequence: Synthetic oligonucleotide
caucaauucagcaggcuga

SEQ ID NO: 364679 - RNA, 19 nt, Artificial Sequence
  Description of Artificial Sequence: Synthetic oligonucleotide
cuugaagaaauggagaucu

SEQ ID NO: 364680 - RNA, 19 nt, Artificial Sequence
  Description of Artificial Sequence: Synthetic oligonucleotide
auauuaugaccugaaggca

SEQ ID NO: 364681 - RNA, 19 nt, Artificial Sequence
  Description of Artificial Sequence: Synthetic oligonucleotide
gccuguauaugcuggaggg

SEQ ID NO: 364682 - RNA, 19 nt, Artificial Sequence
  Description of Artificial Sequence: Synthetic oligonucleotide
gugauaagaccaacuagag

SEQ ID NO: 364683 - RNA, 19 nt, Artificial Sequence
  Description of Artificial Sequence: Synthetic oligonucleotide
caguuaaauccuugguccc

SEQ ID NO: 364684 - RNA, 19 nt, Artificial Sequence
  Description of Artificial Sequence: Synthetic oligonucleotide
uacaaguuauugugugucu

SEQ ID NO: 364685 - RNA, 19 nt, Artificial Sequence
  Description of Artificial Sequence: Synthetic oligonucleotide
ugaucgacucuaaaacaau

SEQ ID NO: 364686 - RNA, 19 nt, Artificial Sequence
  Description of Artificial Sequence: Synthetic oligonucleotide
auaucaaguguggccauag

SEQ ID NO: 364687 - RNA, 19 nt, Artificial Sequence
  Description of Artificial Sequence: Synthetic oligonucleotide
caggacuguuguuaaacac

SEQ ID NO: 364688 - RNA, 19 nt, Artificial Sequence
  Description of Artificial Sequence: Synthetic oligonucleotide
aaaaggagucugacaaucu

SEQ ID NO: 364689 - RNA, 19 nt, Artificial Sequence
  Description of Artificial Sequence: Synthetic oligonucleotide
gugaaaggaauguugcuaa

SEQ ID NO: 364690 - RNA, 19 nt, Artificial Sequence
  Description of Artificial Sequence: Synthetic oligonucleotide
gcugacaucauccgucagg

SEQ ID NO: 364691 - RNA, 19 nt, Artificial Sequence
  Description of Artificial Sequence: Synthetic oligonucleotide
ugaacaggcugcagaaauc

SEQ ID NO: 364692 - RNA, 19 nt, Artificial Sequence
  Description of Artificial Sequence: Synthetic oligonucleotide
aacgaauaggagucuucaa

SEQ ID NO: 364693 - RNA, 19 nt, Artificial Sequence
  Description of Artificial Sequence: Synthetic oligonucleotide
ucucacccagauaaaugac

SEQ ID NO: 364694 - RNA, 19 nt, Artificial Sequence
  Description of Artificial Sequence: Synthetic oligonucleotide
cauaacucuuagagauucc

SEQ ID NO: 364695 - RNA, 19 nt, Artificial Sequence
  Description of Artificial Sequence: Synthetic oligonucleotide
uaugccuguauaugcugga

SEQ ID NO: 364696 - RNA, 19 nt, Artificial Sequence
  Description of Artificial Sequence: Synthetic oligonucleotide
aguacccuccaacaagcca

SEQ ID NO: 364697 - RNA, 19 nt, Artificial Sequence
  Description of Artificial Sequence: Synthetic oligonucleotide
aaguacccuccaacaagcc

SEQ ID NO: 364698 - RNA, 19 nt, Artificial Sequence
  Description of Artificial Sequence: Synthetic oligonucleotide
ucugaaagauguggggucu

SEQ ID NO: 364699 - RNA, 19 nt, Artificial Sequence
  Description of Artificial Sequence: Synthetic oligonucleotide
uuucgggcaauggugguca

SEQ ID NO: 364700 - RNA, 19 nt, Artificial Sequence
  Description of Artificial Sequence: Synthetic oligonucleotide
aaaaguaaguaaacaucua

SEQ ID NO: 364701 - RNA, 19 nt, Artificial Sequence
  Description of Artificial Sequence: Synthetic oligonucleotide
cugggcuauggucucaccc

SEQ ID NO: 364702 - RNA, 19 nt, Artificial Sequence
  Description of Artificial Sequence: Synthetic oligonucleotide
gaacgaauaggagucuuca

SEQ ID NO: 364703 - RNA, 19 nt, Artificial Sequence
  Description of Artificial Sequence: Synthetic oligonucleotide
gugucaaccacaauagaga

SEQ ID NO: 364704 - RNA, 19 nt, Artificial Sequence
  Description of Artificial Sequence: Synthetic oligonucleotide
ccaauuucgggcaauggug

SEQ ID NO: 364705 - RNA, 19 nt, Artificial Sequence
  Description of Artificial Sequence: Synthetic oligonucleotide
aagccgugccaucaagacu

SEQ ID NO: 364706 - RNA, 19 nt, Artificial Sequence
  Description of Artificial Sequence: Synthetic oligonucleotide
aggagaucgagcaccucgc

SEQ ID NO: 364707 - RNA, 19 nt, Artificial Sequence
  Description of Artificial Sequence: Synthetic oligonucleotide
caacuagagcauccggagg

SEQ ID NO: 364708 - RNA, 19 nt, Artificial Sequence
  Description of Artificial Sequence: Synthetic oligonucleotide
ccaauguagcaccaaacgc

SEQ ID NO: 364709 - RNA, 19 nt, Artificial Sequence
  Description of Artificial Sequence: Synthetic oligonucleotide
ggcauagcagacuugguca

SEQ ID NO: 364710 - RNA, 19 nt, Artificial Sequence
  Description of Artificial Sequence: Synthetic oligonucleotide
uucgucaggacuguuguua

SEQ ID NO: 364711 - RNA, 19 nt, Artificial Sequence
  Description of Artificial Sequence: Synthetic oligonucleotide
aaacgccauucugaaaucu

SEQ ID NO: 364712 - RNA, 19 nt, Artificial Sequence
  Description of Artificial Sequence: Synthetic oligonucleotide
auaggaugauucgucagga

SEQ ID NO: 364713 - RNA, 19 nt, Artificial Sequence
  Description of Artificial Sequence: Synthetic oligonucleotide
ugguccuuucacauucaga

SEQ ID NO: 364714 - RNA, 19 nt, Artificial Sequence
  Description of Artificial Sequence: Synthetic oligonucleotide
gauucgucaggacuguugu

SEQ ID NO: 364715 - RNA, 19 nt, Artificial Sequence
  Description of Artificial Sequence: Synthetic oligonucleotide
ucggaagacauaacucuua

SEQ ID NO: 364716 - RNA, 19 nt, Artificial Sequence
  Description of Artificial Sequence: Synthetic oligonucleotide
cugagauggauuaacuuua

SEQ ID NO: 364717 - RNA, 19 nt, Artificial Sequence
  Description of Artificial Sequence: Synthetic oligonucleotide
gagaucgagcaccucgcug

SEQ ID NO: 364718 - RNA, 19 nt, Artificial Sequence
  Description of Artificial Sequence: Synthetic oligonucleotide
aacgaacuggauagcaccu

SEQ ID NO: 364719 - RNA, 19 nt, Artificial Sequence
  Description of Artificial Sequence: Synthetic oligonucleotide
cucuuagagauuccuucac

SEQ ID NO: 364720 - RNA, 19 nt, Artificial Sequence
  Description of Artificial Sequence: Synthetic oligonucleotide
guacucaauuguugaaaac

SEQ ID NO: 364721 - RNA, 19 nt, Artificial Sequence
  Description of Artificial Sequence: Synthetic oligonucleotide
caguuuaagaggcacugga

SEQ ID NO: 364722 - RNA, 19 nt, Artificial Sequence
  Description of Artificial Sequence: Synthetic oligonucleotide
uaacucuuagagauuccuu

SEQ ID NO: 364723 - RNA, 19 nt, Artificial Sequence
  Description of Artificial Sequence: Synthetic oligonucleotide
gcaucaauucagcaggcug

SEQ ID NO: 364724 - RNA, 19 nt, Artificial Sequence
  Description of Artificial Sequence: Synthetic oligonucleotide
cuuugagugcuugaagguc

SEQ ID NO: 364725 - RNA, 19 nt, Artificial Sequence
  Description of Artificial Sequence: Synthetic oligonucleotide
augaucgacucuaaaacaa

SEQ ID NO: 364726 - RNA, 19 nt, Artificial Sequence
  Description of Artificial Sequence: Synthetic oligonucleotide
agaccaacuagagcauccg

SEQ ID NO: 364727 - RNA, 19 nt, Artificial Sequence
  Description of Artificial Sequence: Synthetic oligonucleotide
guugcuaagguaauaucaa

SEQ ID NO: 364728 - RNA, 19 nt, Artificial Sequence
  Description of Artificial Sequence: Synthetic oligonucleotide
caaguuauugugugucuga

SEQ ID NO: 364729 - RNA, 19 nt, Artificial Sequence
  Description of Artificial Sequence: Synthetic oligonucleotide
aguauccaucagcagaauu

SEQ ID NO: 364730 - RNA, 19 nt, Artificial Sequence
  Description of Artificial Sequence: Synthetic oligonucleotide
gcuccguguugauauaacg

SEQ ID NO: 364731 - RNA, 19 nt, Artificial Sequence
  Description of Artificial Sequence: Synthetic oligonucleotide
caguggaucgcaaaggucu

SEQ ID NO: 364732 - RNA, 19 nt, Artificial Sequence
  Description of Artificial Sequence: Synthetic oligonucleotide
agucggaugaguugucgau

SEQ ID NO: 364733 - RNA, 19 nt, Artificial Sequence
  Description of Artificial Sequence: Synthetic oligonucleotide
auaucaaugcagugaccau

SEQ ID NO: 364734 - RNA, 19 nt, Artificial Sequence
  Description of Artificial Sequence: Synthetic oligonucleotide
aguuaaauccuuggucccu

SEQ ID NO: 364735 - RNA, 19 nt, Artificial Sequence
  Description of Artificial Sequence: Synthetic oligonucleotide
guaacgaacuggauagcac

SEQ ID NO: 364736 - RNA, 19 nt, Artificial Sequence
  Description of Artificial Sequence: Synthetic oligonucleotide
gccaccaacaccaaguuca

SEQ ID NO: 364737 - RNA, 19 nt, Artificial Sequence
  Description of Artificial Sequence: Synthetic oligonucleotide
cugguacugcguaacgaac

SEQ ID NO: 364738 - RNA, 19 nt, Artificial Sequence
  Description of Artificial Sequence: Synthetic oligonucleotide
cacacggaccaauggcucc

SEQ ID NO: 364739 - RNA, 19 nt, Artificial Sequence
  Description of Artificial Sequence: Synthetic oligonucleotide
uauaugcuggagggaacug

SEQ ID NO: 364740 - RNA, 19 nt, Artificial Sequence
  Description of Artificial Sequence: Synthetic oligonucleotide
acagucggaugaguugucg

SEQ ID NO: 364741 - RNA, 19 nt, Artificial Sequence
  Description of Artificial Sequence: Synthetic oligonucleotide
auagucugacagugcuguc

SEQ ID NO: 364742 - RNA, 19 nt, Artificial Sequence
  Description of Artificial Sequence: Synthetic oligonucleotide
cagcuuuccgccacugggc

SEQ ID NO: 364743 - RNA, 19 nt, Artificial Sequence
  Description of Artificial Sequence: Synthetic oligonucleotide
gaugggagcuccaguuucc

SEQ ID NO: 364744 - RNA, 19 nt, Artificial Sequence
  Description of Artificial Sequence: Synthetic oligonucleotide
uaauaucaaguguggccau

SEQ ID NO: 364745 - RNA, 19 nt, Artificial Sequence
  Description of Artificial Sequence: Synthetic oligonucleotide
cuaagguaauaucaagugu

SEQ ID NO: 364746 - RNA, 19 nt, Artificial Sequence
  Description of Artificial Sequence: Synthetic oligonucleotide
aacaugaacugaggauaca

SEQ ID NO: 364747 - RNA, 19 nt, Artificial Sequence
  Description of Artificial Sequence: Synthetic oligonucleotide
gguacugcguaacgaacug

SEQ ID NO: 364748 - RNA, 19 nt, Artificial Sequence
  Description of Artificial Sequence: Synthetic oligonucleotide
ucgugccaggaacgaauag

SEQ ID NO: 364749 - RNA, 19 nt, Artificial Sequence
  Description of Artificial Sequence: Synthetic oligonucleotide
ccguguugauauaacgugg

SEQ ID NO: 364750 - RNA, 19 nt, Artificial Sequence
  Description of Artificial Sequence: Synthetic oligonucleotide
ugcuccguguugauauaac

SEQ ID NO: 364751 - RNA, 19 nt, Artificial Sequence
  Description of Artificial Sequence: Synthetic oligonucleotide
aucgacucuaaaacaauaa

SEQ ID NO: 364752 - RNA, 19 nt, Artificial Sequence
  Description of Artificial Sequence: Synthetic oligonucleotide
auaggagucuucaauucau

SEQ ID NO: 364753 - RNA, 19 nt, Artificial Sequence
  Description of Artificial Sequence: Synthetic oligonucleotide
aauaucaaguguggccaua

SEQ ID NO: 364754 - RNA, 19 nt, Artificial Sequence
  Description of Artificial Sequence: Synthetic oligonucleotide
ucccgagaggucuuuacuu

SEQ ID NO: 364755 - RNA, 19 nt, Artificial Sequence
  Description of Artificial Sequence: Synthetic oligonucleotide
aguacaggcucuggugguc

SEQ ID NO: 364756 - RNA, 19 nt, Artificial Sequence
  Description of Artificial Sequence: Synthetic oligonucleotide
auaugcuggagggaacuga

SEQ ID NO: 364757 - RNA, 19 nt, Artificial Sequence
  Description of Artificial Sequence: Synthetic oligonucleotide
uacucaggcauguccuggu

SEQ ID NO: 364758 - RNA, 19 nt, Artificial Sequence
  Description of Artificial Sequence: Synthetic oligonucleotide
gaucaagagcacaagcaua

SEQ ID NO: 364759 - RNA, 19 nt, Artificial Sequence
  Description of Artificial Sequence: Synthetic oligonucleotide
gaagcgagcuugcagaauu

SEQ ID NO: 364760 - RNA, 19 nt, Artificial Sequence
  Description of Artificial Sequence: Synthetic oligonucleotide
augugucaaccacaauaga

SEQ ID NO: 364761 - RNA, 19 nt, Artificial Sequence
  Description of Artificial Sequence: Synthetic oligonucleotide
ucgucaggacuguuguuaa

SEQ ID NO: 364762 - RNA, 19 nt, Artificial Sequence
  Description of Artificial Sequence: Synthetic oligonucleotide
agauacacacggaccaaug

SEQ ID NO: 364763 - RNA, 19 nt, Artificial Sequence
  Description of Artificial Sequence: Synthetic oligonucleotide
agcuuuccgccacugggcu

SEQ ID NO: 364764 - RNA, 19 nt, Artificial Sequence
  Description of Artificial Sequence: Synthetic oligonucleotide
ugcucuacuuauccagauu

SEQ ID NO: 364765 - RNA, 19 nt, Artificial Sequence
  Description of Artificial Sequence: Synthetic oligonucleotide
gagauuccuucacagcuua

SEQ ID NO: 364766 - RNA, 19 nt, Artificial Sequence
  Description of Artificial Sequence: Synthetic oligonucleotide
guacccuccaacaagccaa

SEQ ID NO: 364767 - RNA, 19 nt, Artificial Sequence
  Description of Artificial Sequence: Synthetic oligonucleotide
guacugcguaacgaacugg

SEQ ID NO: 364768 - RNA, 19 nt, Artificial Sequence
  Description of Artificial Sequence: Synthetic oligonucleotide
cuguuguuaaacacuugaa

SEQ ID NO: 364769 - RNA, 19 nt, Artificial Sequence
  Description of Artificial Sequence: Synthetic oligonucleotide
agcgagcuugcagaauuuc

SEQ ID NO: 364770 - RNA, 19 nt, Artificial Sequence
  Description of Artificial Sequence: Synthetic oligonucleotide
gacucugcccggaacacuc

SEQ ID NO: 364771 - RNA, 19 nt, Artificial Sequence
  Description of Artificial Sequence: Synthetic oligonucleotide
cauagcagacuuggucagg

SEQ ID NO: 364772 - RNA, 19 nt, Artificial Sequence
  Description of Artificial Sequence: Synthetic oligonucleotide
acggaccaauggcuccugc

SEQ ID NO: 364773 - RNA, 19 nt, Artificial Sequence
  Description of Artificial Sequence: Synthetic oligonucleotide
guuacuggccauggguccc

SEQ ID NO: 364774 - RNA, 19 nt, Artificial Sequence
  Description of Artificial Sequence: Synthetic oligonucleotide
uuaugaccugaaggcauac

SEQ ID NO: 364775 - RNA, 19 nt, Artificial Sequence
  Description of Artificial Sequence: Synthetic oligonucleotide
ugaccauuuguagcaguuc

SEQ ID NO: 364776 - RNA, 19 nt, Artificial Sequence
  Description of Artificial Sequence: Synthetic oligonucleotide
acgaacuggauagcaccuc

SEQ ID NO: 364777 - RNA, 19 nt, Artificial Sequence
  Description of Artificial Sequence: Synthetic oligonucleotide
uuguagcaguucgauuagc

SEQ ID NO: 364778 - RNA, 19 nt, Artificial Sequence
  Description of Artificial Sequence: Synthetic oligonucleotide
guguugauauaacguggca

SEQ ID NO: 364779 - RNA, 19 nt, Artificial Sequence
  Description of Artificial Sequence: Synthetic oligonucleotide
uccggaggaaggagacuca

SEQ ID NO: 364780 - RNA, 19 nt, Artificial Sequence
  Description of Artificial Sequence: Synthetic oligonucleotide
cuauaauaggaugauucgu

SEQ ID NO: 364781 - RNA, 19 nt, Artificial Sequence
  Description of Artificial Sequence: Synthetic oligonucleotide
caugaaccgugcauuaucu

SEQ ID NO: 364782 - RNA, 19 nt, Artificial Sequence
  Description of Artificial Sequence: Synthetic oligonucleotide
cauagucugacagugcugu

SEQ ID NO: 364783 - RNA, 19 nt, Artificial Sequence
  Description of Artificial Sequence: Synthetic oligonucleotide
gacuguuguuaaacacuug

SEQ ID NO: 364784 - RNA, 19 nt, Artificial Sequence
  Description of Artificial Sequence: Synthetic oligonucleotide
cucgugaaccugcaccauc

SEQ ID NO: 364785 - RNA, 19 nt, Artificial Sequence
  Description of Artificial Sequence: Synthetic oligonucleotide
ugagggacugggucagauc

SEQ ID NO: 364786 - RNA, 19 nt, Artificial Sequence
  Description of Artificial Sequence: Synthetic oligonucleotide
auauaacguggcauuggga

SEQ ID NO: 364787 - RNA, 19 nt, Artificial Sequence
  Description of Artificial Sequence: Synthetic oligonucleotide
acagaaauugcaagcccaa

SEQ ID NO: 364788 - RNA, 19 nt, Artificial Sequence
  Description of Artificial Sequence: Synthetic oligonucleotide
auuauaaccugaagacaua

SEQ ID NO: 364789 - RNA, 19 nt, Artificial Sequence
  Description of Artificial Sequence: Synthetic oligonucleotide
auaagaccaacuagagcau

SEQ ID NO: 364790 - RNA, 19 nt, Artificial Sequence
  Description of Artificial Sequence: Synthetic oligonucleotide
ggaaucgagccugacugcc

SEQ ID NO: 364791 - RNA, 19 nt, Artificial Sequence
  Description of Artificial Sequence: Synthetic oligonucleotide
ggggucuucuuuguuauac

SEQ ID NO: 364792 - RNA, 19 nt, Artificial Sequence
  Description of Artificial Sequence: Synthetic oligonucleotide
aguugucgauccagccacc

SEQ ID NO: 364793 - RNA, 19 nt, Artificial Sequence
  Description of Artificial Sequence: Synthetic oligonucleotide
guucgauuagcaagcaucu

SEQ ID NO: 364794 - RNA, 19 nt, Artificial Sequence
  Description of Artificial Sequence: Synthetic oligonucleotide
gaaugcugguacugcguaa

SEQ ID NO: 364795 - RNA, 19 nt, Artificial Sequence
  Description of Artificial Sequence: Synthetic oligonucleotide
gccaccggagcacaucagg

SEQ ID NO: 364796 - RNA, 19 nt, Artificial Sequence
  Description of Artificial Sequence: Synthetic oligonucleotide
gcauugggaagcgagcuug

SEQ ID NO: 364797 - RNA, 19 nt, Artificial Sequence
  Description of Artificial Sequence: Synthetic oligonucleotide
cuccguguugauauaacgu

SEQ ID NO: 364798 - RNA, 19 nt, Artificial Sequence
  Description of Artificial Sequence: Synthetic oligonucleotide
cugcguaacgaacuggaua

SEQ ID NO: 364799 - RNA, 19 nt, Artificial Sequence
  Description of Artificial Sequence: Synthetic oligonucleotide
ggugaaaggaauguugcua

SEQ ID NO: 364800 - RNA, 19 nt, Artificial Sequence
  Description of Artificial Sequence: Synthetic oligonucleotide
cccggaacacuccaagccg

SEQ ID NO: 364801 - RNA, 19 nt, Artificial Sequence
  Description of Artificial Sequence: Synthetic oligonucleotide
aucaauucagcaggcugau

SEQ ID NO: 364802 - RNA, 19 nt, Artificial Sequence
  Description of Artificial Sequence: Synthetic oligonucleotide
cugauucaccucagauaug

SEQ ID NO: 364803 - RNA, 19 nt, Artificial Sequence
  Description of Artificial Sequence: Synthetic oligonucleotide
cuuagcucgugaaccugca

SEQ ID NO: 364804 - RNA, 19 nt, Artificial Sequence
  Description of Artificial Sequence: Synthetic oligonucleotide
gauuagcaagcaucucaua

SEQ ID NO: 364805 - RNA, 19 nt, Artificial Sequence
  Description of Artificial Sequence: Synthetic oligonucleotide
auuaugaccugaaggcaua

SEQ ID NO: 364806 - RNA, 19 nt, Artificial Sequence
  Description of Artificial Sequence: Synthetic oligonucleotide
uuccacugacuugugccac

SEQ ID NO: 364807 - RNA, 19 nt, Artificial Sequence
  Description of Artificial Sequence: Synthetic oligonucleotide
agacuacaaauaaauuaua

SEQ ID NO: 364808 - RNA, 19 nt, Artificial Sequence
  Description of Artificial Sequence: Synthetic oligonucleotide
uagcaccaaacgccauucu

SEQ ID NO: 364809 - RNA, 19 nt, Artificial Sequence
  Description of Artificial Sequence: Synthetic oligonucleotide
cuccugcaaucuucaauuc

SEQ ID NO: 364810 - RNA, 19 nt, Artificial Sequence
  Description of Artificial Sequence: Synthetic oligonucleotide
uccagaaguccaguuugau

SEQ ID NO: 364811 - RNA, 19 nt, Artificial Sequence
  Description of Artificial Sequence: Synthetic oligonucleotide
cguggcauugggaagcgag

SEQ ID NO: 364812 - RNA, 19 nt, Artificial Sequence
  Description of Artificial Sequence: Synthetic oligonucleotide
aaguguggccauagucuga

SEQ ID NO: 364813 - RNA, 19 nt, Artificial Sequence
  Description of Artificial Sequence: Synthetic oligonucleotide
accauuuguagcaguucga

SEQ ID NO: 364814 - RNA, 19 nt, Artificial Sequence
  Description of Artificial Sequence: Synthetic oligonucleotide
caccaaacgccauucugaa

SEQ ID NO: 364815 - RNA, 19 nt, Artificial Sequence
  Description of Artificial Sequence: Synthetic oligonucleotide
gaauguugcuaagguaaua

SEQ ID NO: 364816 - RNA, 19 nt, Artificial Sequence
  Description of Artificial Sequence: Synthetic oligonucleotide
cuccauugaagucuuuacu

SEQ ID NO: 364817 - RNA, 19 nt, Artificial Sequence
  Description of Artificial Sequence: Synthetic oligonucleotide
agcauccggaggaaggaga

SEQ ID NO: 364818 - RNA, 19 nt, Artificial Sequence
  Description of Artificial Sequence: Synthetic oligonucleotide
cccuccaacaagccaacag

SEQ ID NO: 364819 - RNA, 19 nt, Artificial Sequence
  Description of Artificial Sequence: Synthetic oligonucleotide
gcugguacugcguaacgaa

SEQ ID NO: 364820 - RNA, 19 nt, Artificial Sequence
  Description of Artificial Sequence: Synthetic oligonucleotide
gcuagaaugcugcugcugu

SEQ ID NO: 364821 - RNA, 19 nt, Artificial Sequence
  Description of Artificial Sequence: Synthetic oligonucleotide
agcuuagcucgugaaccug

SEQ ID NO: 364822 - RNA, 19 nt, Artificial Sequence
  Description of Artificial Sequence: Synthetic oligonucleotide
gucgauccagccaccggag

SEQ ID NO: 364823 - RNA, 19 nt, Artificial Sequence
  Description of Artificial Sequence: Synthetic oligonucleotide
acucugcccggaacacucc

SEQ ID NO: 364824 - RNA, 19 nt, Artificial Sequence
  Description of Artificial Sequence: Synthetic oligonucleotide
guauaugcuggagggaacu

SEQ ID NO: 364825 - RNA, 19 nt, Artificial Sequence
  Description of Artificial Sequence: Synthetic oligonucleotide
aacuucugacacagucgga

SEQ ID NO: 364826 - RNA, 19 nt, Artificial Sequence
  Description of Artificial Sequence: Synthetic oligonucleotide
augaaccgugcauuaucuu

SEQ ID NO: 364827 - RNA, 19 nt, Artificial Sequence
  Description of Artificial Sequence: Synthetic oligonucleotide
guagaugccaagaguagau

SEQ ID NO: 364828 - RNA, 19 nt, Artificial Sequence
  Description of Artificial Sequence: Synthetic oligonucleotide
gaaggagacucaaggacau

SEQ ID NO: 364829 - RNA, 19 nt, Artificial Sequence
  Description of Artificial Sequence: Synthetic oligonucleotide
ccaaacgccauucugaaau

SEQ ID NO: 364830 - RNA, 19 nt, Artificial Sequence
  Description of Artificial Sequence: Synthetic oligonucleotide
gucggaugaguugucgauc

SEQ ID NO: 364831 - RNA, 19 nt, Artificial Sequence
  Description of Artificial Sequence: Synthetic oligonucleotide
gaaucgagccugacugcca

SEQ ID NO: 364832 - RNA, 19 nt, Artificial Sequence
  Description of Artificial Sequence: Synthetic oligonucleotide
accaaacgccauucugaaa

SEQ ID NO: 364833 - RNA, 19 nt, Artificial Sequence
  Description of Artificial Sequence: Synthetic oligonucleotide
ggaccaauggcuccugcaa

SEQ ID NO: 364834 - RNA, 19 nt, Artificial Sequence
  Description of Artificial Sequence: Synthetic oligonucleotide
cccucggaagacauaacuc

SEQ ID NO: 364835 - RNA, 19 nt, Artificial Sequence
  Description of Artificial Sequence: Synthetic oligonucleotide
cugacucugcccggaacac

SEQ ID NO: 364836 - RNA, 19 nt, Artificial Sequence
  Description of Artificial Sequence: Synthetic oligonucleotide
cagucggaugaguugucga

SEQ ID NO: 364837 - RNA, 19 nt, Artificial Sequence
  Description of Artificial Sequence: Synthetic oligonucleotide
cucuacuuauccagauuua

SEQ ID NO: 364838 - RNA, 19 nt, Artificial Sequence
  Description of Artificial Sequence: Synthetic oligonucleotide
gaugauucgucaggacugu

SEQ ID NO: 364839 - RNA, 19 nt, Artificial Sequence
  Description of Artificial Sequence: Synthetic oligonucleotide
gcuuagcucgugaaccugc

SEQ ID NO: 364840 - RNA, 19 nt, Artificial Sequence
  Description of Artificial Sequence: Synthetic oligonucleotide
acacggaccaauggcuccu

SEQ ID NO: 364841 - RNA, 19 nt, Artificial Sequence
  Description of Artificial Sequence: Synthetic oligonucleotide
caucaggucccuccucuga

SEQ ID NO: 364842 - RNA, 19 nt, Artificial Sequence
  Description of Artificial Sequence: Synthetic oligonucleotide
cacagauuuuccacugacu

SEQ ID NO: 364843 - RNA, 19 nt, Artificial Sequence
  Description of Artificial Sequence: Synthetic oligonucleotide
aggaacgaauaggagucuu

SEQ ID NO: 364844 - RNA, 19 nt, Artificial Sequence
  Description of Artificial Sequence: Synthetic oligonucleotide
auaucgugccaggaacgaa

SEQ ID NO: 364845 - RNA, 19 nt, Artificial Sequence
  Description of Artificial Sequence: Synthetic oligonucleotide
auucgucaggacuguuguu

SEQ ID NO: 364846 - RNA, 19 nt, Artificial Sequence
  Description of Artificial Sequence: Synthetic oligonucleotide
cacaagcauaaauaucaau

SEQ ID NO: 364847 - RNA, 19 nt, Artificial Sequence
  Description of Artificial Sequence: Synthetic oligonucleotide
agaggagaucgagcaccuc

SEQ ID NO: 364848 - RNA, 19 nt, Artificial Sequence
  Description of Artificial Sequence: Synthetic oligonucleotide
ggaaugcugguacugcgua

SEQ ID NO: 364849 - RNA, 19 nt, Artificial Sequence
  Description of Artificial Sequence: Synthetic oligonucleotide
ggaacgaauaggagucuuc

SEQ ID NO: 364850 - RNA, 19 nt, Artificial Sequence
  Description of Artificial Sequence: Synthetic oligonucleotide
ggucccucggaagacauaa

SEQ ID NO: 364851 - RNA, 19 nt, Artificial Sequence
  Description of Artificial Sequence: Synthetic oligonucleotide
cacagucggaugaguuguc

SEQ ID NO: 364852 - RNA, 19 nt, Artificial Sequence
  Description of Artificial Sequence: Synthetic oligonucleotide
gccauagucugacagugcu

SEQ ID NO: 364853 - RNA, 19 nt, Artificial Sequence
  Description of Artificial Sequence: Synthetic oligonucleotide
aguggcgccugcagaaggu

SEQ ID NO: 364854 - RNA, 19 nt, Artificial Sequence
  Description of Artificial Sequence: Synthetic oligonucleotide
cccgagaggucuuuacuuc

SEQ ID NO: 364855 - RNA, 19 nt, Artificial Sequence
  Description of Artificial Sequence: Synthetic oligonucleotide
cuacaauuagcagaacauu

SEQ ID NO: 364856 - RNA, 19 nt, Artificial Sequence
  Description of Artificial Sequence: Synthetic oligonucleotide
ccuguaagauuugggcagc

SEQ ID NO: 364857 - RNA, 19 nt, Artificial Sequence
  Description of Artificial Sequence: Synthetic oligonucleotide
ccucggaagacauaacucu

SEQ ID NO: 364858 - RNA, 19 nt, Artificial Sequence
  Description of Artificial Sequence: Synthetic oligonucleotide
ccauagucugacagugcug

SEQ ID NO: 364859 - RNA, 19 nt, Artificial Sequence
  Description of Artificial Sequence: Synthetic oligonucleotide
caucuacaauuagcagaac

SEQ ID NO: 364860 - RNA, 19 nt, Artificial Sequence
  Description of Artificial Sequence: Synthetic oligonucleotide
aagcgagcuugcagaauuu

SEQ ID NO: 364861 - RNA, 19 nt, Artificial Sequence
  Description of Artificial Sequence: Synthetic oligonucleotide
ggucagauccugccuggca

SEQ ID NO: 364862 - RNA, 19 nt, Artificial Sequence
  Description of Artificial Sequence: Synthetic oligonucleotide
cagugaacagcaugauccu

SEQ ID NO: 364863 - RNA, 19 nt, Artificial Sequence
  Description of Artificial Sequence: Synthetic oligonucleotide
caccauguggccuccugua

SEQ ID NO: 364864 - RNA, 19 nt, Artificial Sequence
  Description of Artificial Sequence: Synthetic oligonucleotide
acugcguaacgaacuggau

SEQ ID NO: 364865 - RNA, 19 nt, Artificial Sequence
  Description of Artificial Sequence: Synthetic oligonucleotide
ggucaaaugcugcuucuau

SEQ ID NO: 364866 - RNA, 19 nt, Artificial Sequence
  Description of Artificial Sequence: Synthetic oligonucleotide
cucggaagacauaacucuu

SEQ ID NO: 364867 - RNA, 19 nt, Artificial Sequence
  Description of Artificial Sequence: Synthetic oligonucleotide
cucggaugcgcuucugagu

SEQ ID NO: 364868 - RNA, 19 nt, Artificial Sequence
  Description of Artificial Sequence: Synthetic oligonucleotide
gcccaauuucgggcaaugg

SEQ ID NO: 364869 - RNA, 19 nt, Artificial Sequence
  Description of Artificial Sequence: Synthetic oligonucleotide
gcauccggaggaaggagac

SEQ ID NO: 364870 - RNA, 19 nt, Artificial Sequence
  Description of Artificial Sequence: Synthetic oligonucleotide
cagaaauugcaagcccaaa

SEQ ID NO: 364871 - RNA, 19 nt, Artificial Sequence
  Description of Artificial Sequence: Synthetic oligonucleotide
ggacucuuugagugcuuga

SEQ ID NO: 364872 - RNA, 19 nt, Artificial Sequence
  Description of Artificial Sequence: Synthetic oligonucleotide
ggagucugacaaucugaaa

SEQ ID NO: 364873 - RNA, 19 nt, Artificial Sequence
  Description of Artificial Sequence: Synthetic oligonucleotide
gcuugaaaagagaaguguu

SEQ ID NO: 364874 - RNA, 19 nt, Artificial Sequence
  Description of Artificial Sequence: Synthetic oligonucleotide
auugugugucugagaugga

SEQ ID NO: 364875 - RNA, 19 nt, Artificial Sequence
  Description of Artificial Sequence: Synthetic oligonucleotide
cagcuuagcucgugaaccu

SEQ ID NO: 364876 - RNA, 19 nt, Artificial Sequence
  Description of Artificial Sequence: Synthetic oligonucleotide
ggcugacaucauccgucag

SEQ ID NO: 364877 - RNA, 19 nt, Artificial Sequence
  Description of Artificial Sequence: Synthetic oligonucleotide
ccaugcuccguguugauau

SEQ ID NO: 364878 - RNA, 19 nt, Artificial Sequence
  Description of Artificial Sequence: Synthetic oligonucleotide
ccucagauaugccuguaua

SEQ ID NO: 364879 - RNA, 19 nt, Artificial Sequence
  Description of Artificial Sequence: Synthetic oligonucleotide
ccaagccgugccaucaaga

SEQ ID NO: 364880 - RNA, 19 nt, Artificial Sequence
  Description of Artificial Sequence: Synthetic oligonucleotide
gugaccauuuguagcaguu

SEQ ID NO: 364881 - RNA, 19 nt, Artificial Sequence
  Description of Artificial Sequence: Synthetic oligonucleotide
cguaacgaacuggauagca

SEQ ID NO: 364882 - RNA, 19 nt, Artificial Sequence
  Description of Artificial Sequence: Synthetic oligonucleotide
accugaaggcauacauaua

SEQ ID NO: 364883 - RNA, 19 nt, Artificial Sequence
  Description of Artificial Sequence: Synthetic oligonucleotide
caugcuccguguugauaua

SEQ ID NO: 364884 - RNA, 19 nt, Artificial Sequence
  Description of Artificial Sequence: Synthetic oligonucleotide
gcaacaccaguggaucgca

SEQ ID NO: 364885 - RNA, 19 nt, Artificial Sequence
  Description of Artificial Sequence: Synthetic oligonucleotide
agccaccggagcacaucag

SEQ ID NO: 364886 - RNA, 19 nt, Artificial Sequence
  Description of Artificial Sequence: Synthetic oligonucleotide
augauucgucaggacuguu

SEQ ID NO: 364887 - RNA, 19 nt, Artificial Sequence
  Description of Artificial Sequence: Synthetic oligonucleotide
cuaugugccucagcuggcu

SEQ ID NO: 364888 - RNA, 19 nt, Artificial Sequence
  Description of Artificial Sequence: Synthetic oligonucleotide
cgaauaggagucuucaauu

SEQ ID NO: 364889 - RNA, 19 nt, Artificial Sequence
  Description of Artificial Sequence: Synthetic oligonucleotide
ccgucaggaugggagcucc

SEQ ID NO: 364890 - RNA, 19 nt, Artificial Sequence
  Description of Artificial Sequence: Synthetic oligonucleotide
auguagcaccaaacgccau

SEQ ID NO: 364891 - RNA, 19 nt, Artificial Sequence
  Description of Artificial Sequence: Synthetic oligonucleotide
gucccucggaagacauaac

SEQ ID NO: 364892 - RNA, 19 nt, Artificial Sequence
  Description of Artificial Sequence: Synthetic oligonucleotide
gccaacagcaauggacaaa

SEQ ID NO: 364893 - RNA, 19 nt, Artificial Sequence
  Description of Artificial Sequence: Synthetic oligonucleotide
cacggaccaauggcuccug

SEQ ID NO: 364894 - RNA, 19 nt, Artificial Sequence
  Description of Artificial Sequence: Synthetic oligonucleotide
acccuccaacaagccaaca

SEQ ID NO: 364895 - RNA, 19 nt, Artificial Sequence
  Description of Artificial Sequence: Synthetic oligonucleotide
gcaguucgauuagcaagca

SEQ ID NO: 364896 - RNA, 19 nt, Artificial Sequence
  Description of Artificial Sequence: Synthetic oligonucleotide
cuccaagccgugccaucaa

SEQ ID NO: 364897 - RNA, 19 nt, Artificial Sequence
  Description of Artificial Sequence: Synthetic oligonucleotide
cagauccugccuggcaaaa

SEQ ID NO: 364898 - RNA, 19 nt, Artificial Sequence
  Description of Artificial Sequence: Synthetic oligonucleotide
ccuguauaugcuggaggga

SEQ ID NO: 364899 - RNA, 19 nt, Artificial Sequence
  Description of Artificial Sequence: Synthetic oligonucleotide
augugggauccaggccaca

SEQ ID NO: 364900 - RNA, 19 nt, Artificial Sequence
  Description of Artificial Sequence: Synthetic oligonucleotide
ggagaucgagcaccucgcu

SEQ ID NO: 364901 - RNA, 19 nt, Artificial Sequence
  Description of Artificial Sequence: Synthetic oligonucleotide
guggaucgcaaaggucucu

SEQ ID NO: 364902 - RNA, 19 nt, Artificial Sequence
  Description of Artificial Sequence: Synthetic oligonucleotide
caguucgauuagcaagcau

SEQ ID NO: 364903 - RNA, 19 nt, Artificial Sequence
  Description of Artificial Sequence: Synthetic oligonucleotide
gcgagcuugcagaauuucu

SEQ ID NO: 364904 - RNA, 19 nt, Artificial Sequence
  Description of Artificial Sequence: Synthetic oligonucleotide
cgauuagcaagcaucucau

SEQ ID NO: 364905 - RNA, 19 nt, Artificial Sequence
  Description of Artificial Sequence: Synthetic oligonucleotide
ccaguggcgccugcagaag

SEQ ID NO: 364906 - RNA, 19 nt, Artificial Sequence
  Description of Artificial Sequence: Synthetic oligonucleotide
uacuggccaugggucccuc

SEQ ID NO: 364907 - RNA, 19 nt, Artificial Sequence
  Description of Artificial Sequence: Synthetic oligonucleotide
ccauuuguagcaguucgau

SEQ ID NO: 364908 - RNA, 19 nt, Artificial Sequence
  Description of Artificial Sequence: Synthetic oligonucleotide
caggaacgaauaggagucu

SEQ ID NO: 364909 - RNA, 19 nt, Artificial Sequence
  Description of Artificial Sequence: Synthetic oligonucleotide
ggcuauggucucacccaga

SEQ ID NO: 364910 - RNA, 19 nt, Artificial Sequence
  Description of Artificial Sequence: Synthetic oligonucleotide
caccucgcuggaucaugua

SEQ ID NO: 364911 - RNA, 19 nt, Artificial Sequence
  Description of Artificial Sequence: Synthetic oligonucleotide
ccaccggagcacaucaggu

SEQ ID NO: 364912 - RNA, 19 nt, Artificial Sequence
  Description of Artificial Sequence: Synthetic oligonucleotide
ggcauugggaagcgagcuu

SEQ ID NO: 364913 - RNA, 19 nt, Artificial Sequence
  Description of Artificial Sequence: Synthetic oligonucleotide
gcuuuccgccacugggcua

SEQ ID NO: 364914 - RNA, 19 nt, Artificial Sequence
  Description of Artificial Sequence: Synthetic oligonucleotide
gccgugccaucaagacugc

SEQ ID NO: 364915 - RNA, 19 nt, Artificial Sequence
  Description of Artificial Sequence: Synthetic oligonucleotide
gcgcuucugagugcuggaa

SEQ ID NO: 364916 - RNA, 19 nt, Artificial Sequence
  Description of Artificial Sequence: Synthetic oligonucleotide
caccaugcuccguguugau

SEQ ID NO: 364917 - RNA, 19 nt, Artificial Sequence
  Description of Artificial Sequence: Synthetic oligonucleotide
cggaugaguugucgaucca

SEQ ID NO: 364918 - RNA, 19 nt, Artificial Sequence
  Description of Artificial Sequence: Synthetic oligonucleotide
cugcccaauuucgggcaau

SEQ ID NO: 364919 - RNA, 19 nt, Artificial Sequence
  Description of Artificial Sequence: Synthetic oligonucleotide
ccgugccaucaagacugcu

SEQ ID NO: 364920 - RNA, 19 nt, Artificial Sequence
  Description of Artificial Sequence: Synthetic oligonucleotide
aauggugcaaguuugcucc

SEQ ID NO: 364921 - RNA, 19 nt, Artificial Sequence
  Description of Artificial Sequence: Synthetic oligonucleotide
auaaagaugacacaggcac

SEQ ID NO: 364922 - RNA, 19 nt, Artificial Sequence
  Description of Artificial Sequence: Synthetic oligonucleotide
uuauucaccaguaagaucu

SEQ ID NO: 364923 - RNA, 19 nt, Artificial Sequence
  Description of Artificial Sequence: Synthetic oligonucleotide
gauaacacaacacaggaug

SEQ ID NO: 364924 - RNA, 19 nt, Artificial Sequence
  Description of Artificial Sequence: Synthetic oligonucleotide
ugauagaagccucauaggg

SEQ ID NO: 364925 - RNA, 19 nt, Artificial Sequence
  Description of Artificial Sequence: Synthetic oligonucleotide
ucagauaacacaacacagg

SEQ ID NO: 364926 - RNA, 19 nt, Artificial Sequence
  Description of Artificial Sequence: Synthetic oligonucleotide
ucuaagagcagcccaaggg

SEQ ID NO: 364927 - RNA, 19 nt, Artificial Sequence
  Description of Artificial Sequence: Synthetic oligonucleotide
auacacccaaacuaaaacc

SEQ ID NO: 364928 - RNA, 19 nt, Artificial Sequence
  Description of Artificial Sequence: Synthetic oligonucleotide
  modified_base (10)..(10): a, c, u, g, unknown or other
aauaucaacncaugucuga

SEQ ID NO: 364929 - RNA, 19 nt, Artificial Sequence
  Description of Artificial Sequence: Synthetic oligonucleotide
uccauuaugagaaggggag

SEQ ID NO: 364930 - RNA, 19 nt, Artificial Sequence
  Description of Artificial Sequence: Synthetic oligonucleotide
aaacuaaaaccuuuaguga

SEQ ID NO: 364931 - RNA, 19 nt, Artificial Sequence
  Description of Artificial Sequence: Synthetic oligonucleotide
aaaccagggauccuucggc

SEQ ID NO: 364932 - RNA, 19 nt, Artificial Sequence
  Description of Artificial Sequence: Synthetic oligonucleotide
acuuguacgccguauaagg

SEQ ID NO: 364933 - RNA, 19 nt, Artificial Sequence
  Description of Artificial Sequence: Synthetic oligonucleotide
aaggauuaaugccaacccg

SEQ ID NO: 364934 - RNA, 19 nt, Artificial Sequence
  Description of Artificial Sequence: Synthetic oligonucleotide
aaacacuaaaggccugugc

SEQ ID NO: 364935 - RNA, 19 nt, Artificial Sequence
  Description of Artificial Sequence: Synthetic oligonucleotide
acuugcuuagucuccaacc

SEQ ID NO: 364936 - RNA, 19 nt, Artificial Sequence
  Description of Artificial Sequence: Synthetic oligonucleotide
aacuaaaaccuuuagugaa

SEQ ID NO: 364937 - RNA, 19 nt, Artificial Sequence
  Description of Artificial Sequence: Synthetic oligonucleotide
aaacauuuggccaugugag

SEQ ID NO: 364938 - RNA, 19 nt, Artificial Sequence
  Description of Artificial Sequence: Synthetic oligonucleotide
aguagaacccuucauccac

SEQ ID NO: 364939 - RNA, 19 nt, Artificial Sequence
  Description of Artificial Sequence: Synthetic oligonucleotide
uguacaguaucaaauucca

SEQ ID NO: 364940 - RNA, 19 nt, Artificial Sequence
  Description of Artificial Sequence: Synthetic oligonucleotide
aaaaccagggauccuucgg

SEQ ID NO: 364941 - RNA, 19 nt, Artificial Sequence
  Description of Artificial Sequence: Synthetic oligonucleotide
augacaggacccuucaagc

SEQ ID NO: 364942 - RNA, 19 nt, Artificial Sequence
  Description of Artificial Sequence: Synthetic oligonucleotide
aaguagauacuccagccca

SEQ ID NO: 364943 - RNA, 19 nt, Artificial Sequence
  Description of Artificial Sequence: Synthetic oligonucleotide
auagaagccucauagggug

SEQ ID NO: 364944 - RNA, 19 nt, Artificial Sequence
  Description of Artificial Sequence: Synthetic oligonucleotide
acucccaugaaccaucauc

SEQ ID NO: 364945 - RNA, 19 nt, Artificial Sequence
  Description of Artificial Sequence: Synthetic oligonucleotide
uguacgccguauaaggagg

SEQ ID NO: 364946 - RNA, 19 nt, Artificial Sequence
  Description of Artificial Sequence: Synthetic oligonucleotide
uggaccaugaaaagcagca

SEQ ID NO: 364947 - RNA, 19 nt, Artificial Sequence
  Description of Artificial Sequence: Synthetic oligonucleotide
uccuuaggguccuugacgg

SEQ ID NO: 364948 - RNA, 19 nt, Artificial Sequence
  Description of Artificial Sequence: Synthetic oligonucleotide
aaaccuuuagugaaaggag

SEQ ID NO: 364949 - RNA, 19 nt, Artificial Sequence
  Description of Artificial Sequence: Synthetic oligonucleotide
acucagauaacacaacaca

SEQ ID NO: 364950 - RNA, 19 nt, Artificial Sequence
  Description of Artificial Sequence: Synthetic oligonucleotide
ggaauuauucaccaguaag

SEQ ID NO: 364951 - RNA, 19 nt, Artificial Sequence
  Description of Artificial Sequence: Synthetic oligonucleotide
auacuguccggguugauag

SEQ ID NO: 364952 - RNA, 19 nt, Artificial Sequence
  Description of Artificial Sequence: Synthetic oligonucleotide
uauccagggacaaaucuca

SEQ ID NO: 364953 - RNA, 19 nt, Artificial Sequence
  Description of Artificial Sequence: Synthetic oligonucleotide
auuauucaccaguaagauc

SEQ ID NO: 364954 - RNA, 19 nt, Artificial Sequence
  Description of Artificial Sequence: Synthetic oligonucleotide
agagcuacgccauggagag

SEQ ID NO: 364955 - RNA, 19 nt, Artificial Sequence
  Description of Artificial Sequence: Synthetic oligonucleotide
uggaguuagcaacaggggc

SEQ ID NO: 364956 - RNA, 19 nt, Artificial Sequence
  Description of Artificial Sequence: Synthetic oligonucleotide
cuugcagcauuccuuaggg

SEQ ID NO: 364957 - RNA, 19 nt, Artificial Sequence
  Description of Artificial Sequence: Synthetic oligonucleotide
aucucauaccuccaguuag

SEQ ID NO: 364958 - RNA, 19 nt, Artificial Sequence
  Description of Artificial Sequence: Synthetic oligonucleotide
ugaucaagcacccacucau

SEQ ID NO: 364959 - RNA, 19 nt, Artificial Sequence
  Description of Artificial Sequence: Synthetic oligonucleotide
agauguaguggggugaggc

SEQ ID NO: 364960 - RNA, 19 nt, Artificial Sequence
  Description of Artificial Sequence: Synthetic oligonucleotide
accacauugucuuuaauau

SEQ ID NO: 364961 - RNA, 19 nt, Artificial Sequence
  Description of Artificial Sequence: Synthetic oligonucleotide
ucuagagucuacuccuggg

SEQ ID NO: 364962 - RNA, 19 nt, Artificial Sequence
  Description of Artificial Sequence: Synthetic oligonucleotide
gaauuauucaccaguaaga

SEQ ID NO: 364963 - RNA, 19 nt, Artificial Sequence
  Description of Artificial Sequence: Synthetic oligonucleotide
aaguuuauuuggcauugga

SEQ ID NO: 364964 - RNA, 19 nt, Artificial Sequence
  Description of Artificial Sequence: Synthetic oligonucleotide
cauguucuuagcuggacag

SEQ ID NO: 364965 - RNA, 19 nt, Artificial Sequence
  Description of Artificial Sequence: Synthetic oligonucleotide
auaggugucuucugaacag

SEQ ID NO: 364966 - RNA, 19 nt, Artificial Sequence
  Description of Artificial Sequence: Synthetic oligonucleotide
uuguacgccguauaaggag

SEQ ID NO: 364967 - RNA, 19 nt, Artificial Sequence
  Description of Artificial Sequence: Synthetic oligonucleotide
acucaauacuugcuggagg

SEQ ID NO: 364968 - RNA, 19 nt, Artificial Sequence
  Description of Artificial Sequence: Synthetic oligonucleotide
agauaggugucuucugaac

SEQ ID NO: 364969 - RNA, 19 nt, Artificial Sequence
  Description of Artificial Sequence: Synthetic oligonucleotide
ugucuucugaacaggaagu

SEQ ID NO: 364970 - RNA, 19 nt, Artificial Sequence
  Description of Artificial Sequence: Synthetic oligonucleotide
  modified_base (9)..(9): a, c, u, g, unknown or other
auaucaacncaugucugac

SEQ ID NO: 364971 - RNA, 19 nt, Artificial Sequence
  Description of Artificial Sequence: Synthetic oligonucleotide
uacauauggccuucagagg

SEQ ID NO: 364972 - RNA, 19 nt, Artificial Sequence
  Description of Artificial Sequence: Synthetic oligonucleotide
aacacaggaugucuacuug

SEQ ID NO: 364973 - RNA, 19 nt, Artificial Sequence
  Description of Artificial Sequence: Synthetic oligonucleotide
aauugcacagaacuugcuu

SEQ ID NO: 364974 - RNA, 19 nt, Artificial Sequence
  Description of Artificial Sequence: Synthetic oligonucleotide
guaagaaugugccuagaac

SEQ ID NO: 364975 - RNA, 19 nt, Artificial Sequence
  Description of Artificial Sequence: Synthetic oligonucleotide
uuuccaagcaguguaagaa

SEQ ID NO: 364976 - RNA, 19 nt, Artificial Sequence
  Description of Artificial Sequence: Synthetic oligonucleotide
gauaggugucuucugaaca

SEQ ID NO: 364977 - RNA, 19 nt, Artificial Sequence
  Description of Artificial Sequence: Synthetic oligonucleotide
aaacaacccuuuauggcac

SEQ ID NO: 364978 - RNA, 19 nt, Artificial Sequence
  Description of Artificial Sequence: Synthetic oligonucleotide
acaaaucucauaccuccag

SEQ ID NO: 364979 - RNA, 19 nt, Artificial Sequence
  Description of Artificial Sequence: Synthetic oligonucleotide
gaacauacuguccggguug

SEQ ID NO: 364980 - RNA, 19 nt, Artificial Sequence
  Description of Artificial Sequence: Synthetic oligonucleotide
  modified_base (7)..(7): a, c, u, g, unknown or other
aucaacncaugucugacuu

SEQ ID NO: 364981 - RNA, 19 nt, Artificial Sequence
  Description of Artificial Sequence: Synthetic oligonucleotide
uggaccuggaauuauucac

SEQ ID NO: 364982 - RNA, 19 nt, Artificial Sequence
  Description of Artificial Sequence: Synthetic oligonucleotide
ggacaaaucucauaccucc

SEQ ID NO: 364983 - RNA, 19 nt, Artificial Sequence
  Description of Artificial Sequence: Synthetic oligonucleotide
ugaggccugugccaaaucc

SEQ ID NO: 364984 - RNA, 19 nt, Artificial Sequence
  Description of Artificial Sequence: Synthetic oligonucleotide
aauacuugcuggagguacg

SEQ ID NO: 364985 - RNA, 19 nt, Artificial Sequence
  Description of Artificial Sequence: Synthetic oligonucleotide
agggucguagaacauacug

SEQ ID NO: 364986 - RNA, 19 nt, Artificial Sequence
  Description of Artificial Sequence: Synthetic oligonucleotide
cuagagucuacuccugggg

SEQ ID NO: 364987 - RNA, 19 nt, Artificial Sequence
  Description of Artificial Sequence: Synthetic oligonucleotide
agcguggcugcccagugcc

SEQ ID NO: 364988 - RNA, 19 nt, Artificial Sequence
  Description of Artificial Sequence: Synthetic oligonucleotide
aaguggucuaagagcagcc

SEQ ID NO: 364989 - RNA, 19 nt, Artificial Sequence
  Description of Artificial Sequence: Synthetic oligonucleotide
ucauguucuuagcuggaca

SEQ ID NO: 364990 - RNA, 19 nt, Artificial Sequence
  Description of Artificial Sequence: Synthetic oligonucleotide
agaucuggcaaccccaaca

SEQ ID NO: 364991 - RNA, 19 nt, Artificial Sequence
  Description of Artificial Sequence: Synthetic oligonucleotide
ucucauaccuccaguuagc

SEQ ID NO: 364992 - RNA, 19 nt, Artificial Sequence
  Description of Artificial Sequence: Synthetic oligonucleotide
uguccggguugauagaagc

SEQ ID NO: 364993 - RNA, 19 nt, Artificial Sequence
  Description of Artificial Sequence: Synthetic oligonucleotide
uguucuuagcuggacagga

SEQ ID NO: 364994 - RNA, 19 nt, Artificial Sequence
  Description of Artificial Sequence: Synthetic oligonucleotide
uuuauggcacagacaaggu

SEQ ID NO: 364995 - RNA, 19 nt, Artificial Sequence
  Description of Artificial Sequence: Synthetic oligonucleotide
auugcacagaacuugcuua

SEQ ID NO: 364996 - RNA, 19 nt, Artificial Sequence
  Description of Artificial Sequence: Synthetic oligonucleotide
auccagacauccaacauag

SEQ ID NO: 364997 - RNA, 19 nt, Artificial Sequence
  Description of Artificial Sequence: Synthetic oligonucleotide
ucggccaagguugaaaaug

SEQ ID NO: 364998 - RNA, 19 nt, Artificial Sequence
  Description of Artificial Sequence: Synthetic oligonucleotide
aaucucauaccuccaguua

SEQ ID NO: 364999 - RNA, 19 nt, Artificial Sequence
  Description of Artificial Sequence: Synthetic oligonucleotide
aagaucuggcaaccccaac

SEQ ID NO: 365000 - RNA, 19 nt, Artificial Sequence
  Description of Artificial Sequence: Synthetic oligonucleotide
cagauaacacaacacagga

SEQ ID NO: 365001 - RNA, 19 nt, Artificial Sequence
  Description of Artificial Sequence: Synthetic oligonucleotide
cuauccagggacaaaucuc

SEQ ID NO: 365002 - RNA, 19 nt, Artificial Sequence
  Description of Artificial Sequence: Synthetic oligonucleotide
cuuuggcagaggauguccg

SEQ ID NO: 365003 - RNA, 19 nt, Artificial Sequence
  Description of Artificial Sequence: Synthetic oligonucleotide
cauuaugagaaggggagac

SEQ ID NO: 365004 - RNA, 19 nt, Artificial Sequence
  Description of Artificial Sequence: Synthetic oligonucleotide
aaugccaacccgaucaaaa

SEQ ID NO: 365005 - RNA, 19 nt, Artificial Sequence
  Description of Artificial Sequence: Synthetic oligonucleotide
uuccccgucaucagaaaga

SEQ ID NO: 365006 - RNA, 19 nt, Artificial Sequence
  Description of Artificial Sequence: Synthetic oligonucleotide
ugacaggacccuucaagcc

SEQ ID NO: 365007 - RNA, 19 nt, Artificial Sequence
  Description of Artificial Sequence: Synthetic oligonucleotide
ucuuagcuggacaggaguc

SEQ ID NO: 365008 - RNA, 19 nt, Artificial Sequence
  Description of Artificial Sequence: Synthetic oligonucleotide
acaagaccaccacauggag

SEQ ID NO: 365009 - RNA, 19 nt, Artificial Sequence
  Description of Artificial Sequence: Synthetic oligonucleotide
uugagacaaugaauguaca

SEQ ID NO: 365010 - RNA, 19 nt, Artificial Sequence
  Description of Artificial Sequence: Synthetic oligonucleotide
cugacgaccaggcgcaucc

SEQ ID NO: 365011 - RNA, 19 nt, Artificial Sequence
  Description of Artificial Sequence: Synthetic oligonucleotide
accugcaaacauuuggcca

SEQ ID NO: 365012 - RNA, 19 nt, Artificial Sequence
  Description of Artificial Sequence: Synthetic oligonucleotide
uggaaagucccaccuuccc

SEQ ID NO: 365013 - RNA, 19 nt, Artificial Sequence
  Description of Artificial Sequence: Synthetic oligonucleotide
cuucaaggcaggucagagg

SEQ ID NO: 365014 - RNA, 19 nt, Artificial Sequence
  Description of Artificial Sequence: Synthetic oligonucleotide
aguggucuaagagcagccc

SEQ ID NO: 365015 - RNA, 19 nt, Artificial Sequence
  Description of Artificial Sequence: Synthetic oligonucleotide
cccuuagaaacacuaaagg

SEQ ID NO: 365016 - RNA, 19 nt, Artificial Sequence
  Description of Artificial Sequence: Synthetic oligonucleotide
uggaauuauucaccaguaa

SEQ ID NO: 365017 - RNA, 19 nt, Artificial Sequence
  Description of Artificial Sequence: Synthetic oligonucleotide
cauaccuccaguuagcccu

SEQ ID NO: 365018 - RNA, 19 nt, Artificial Sequence
  Description of Artificial Sequence: Synthetic oligonucleotide
guagaacauacuguccggg

SEQ ID NO: 365019 - RNA, 19 nt, Artificial Sequence
  Description of Artificial Sequence: Synthetic oligonucleotide
acauggaguuagcaacagg

SEQ ID NO: 365020 - RNA, 19 nt, Artificial Sequence
  Description of Artificial Sequence: Synthetic oligonucleotide
ccaacagucauuugguccc

SEQ ID NO: 365021 - RNA, 19 nt, Artificial Sequence
  Description of Artificial Sequence: Synthetic oligonucleotide
acacuaaaggccugugcug

SEQ ID NO: 365022 - RNA, 19 nt, Artificial Sequence
  Description of Artificial Sequence: Synthetic oligonucleotide
caaaaccagggauccuucg

SEQ ID NO: 365023 - RNA, 19 nt, Artificial Sequence
  Description of Artificial Sequence: Synthetic oligonucleotide
gguauucccauucugggca

SEQ ID NO: 365024 - RNA, 19 nt, Artificial Sequence
  Description of Artificial Sequence: Synthetic oligonucleotide
aaauggaaagucccaccuu

SEQ ID NO: 365025 - RNA, 19 nt, Artificial Sequence
  Description of Artificial Sequence: Synthetic oligonucleotide
caauacuugcuggagguac

SEQ ID NO: 365026 - RNA, 19 nt, Artificial Sequence
  Description of Artificial Sequence: Synthetic oligonucleotide
uacuuguacgccguauaag

SEQ ID NO: 365027 - RNA, 19 nt, Artificial Sequence
  Description of Artificial Sequence: Synthetic oligonucleotide
uagaacauacuguccgggu

SEQ ID NO: 365028 - RNA, 19 nt, Artificial Sequence
  Description of Artificial Sequence: Synthetic oligonucleotide
aucaagcacccacucaugu

SEQ ID NO: 365029 - RNA, 19 nt, Artificial Sequence
  Description of Artificial Sequence: Synthetic oligonucleotide
ccagggacaaaucucauac

SEQ ID NO: 365030 - RNA, 19 nt, Artificial Sequence
  Description of Artificial Sequence: Synthetic oligonucleotide
ucauaccuccaguuagccc

SEQ ID NO: 365031 - RNA, 19 nt, Artificial Sequence
  Description of Artificial Sequence: Synthetic oligonucleotide
  modified_base (8)..(8): a, c, u, g, unknown or other
uaucaacncaugucugacu

SEQ ID NO: 365032 - RNA, 19 nt, Artificial Sequence
  Description of Artificial Sequence: Synthetic oligonucleotide
cauacagggugcuaccauc

SEQ ID NO: 365033 - RNA, 19 nt, Artificial Sequence
  Description of Artificial Sequence: Synthetic oligonucleotide
aggauuaaugccaacccga

SEQ ID NO: 365034 - RNA, 19 nt, Artificial Sequence
  Description of Artificial Sequence: Synthetic oligonucleotide
uuaggguccuugacgguac

SEQ ID NO: 365035 - RNA, 19 nt, Artificial Sequence
  Description of Artificial Sequence: Synthetic oligonucleotide
uguaguggggugaggccug

SEQ ID NO: 365036 - RNA, 19 nt, Artificial Sequence
  Description of Artificial Sequence: Synthetic oligonucleotide
ggucguagaacauacuguc

SEQ ID NO: 365037 - RNA, 19 nt, Artificial Sequence
  Description of Artificial Sequence: Synthetic oligonucleotide
agguacgcugaacuucccg

SEQ ID NO: 365038 - RNA, 19 nt, Artificial Sequence
  Description of Artificial Sequence: Synthetic oligonucleotide
uaggugucuucugaacagg

SEQ ID NO: 365039 - RNA, 19 nt, Artificial Sequence
  Description of Artificial Sequence: Synthetic oligonucleotide
agagugcuagcccucagau

SEQ ID NO: 365040 - RNA, 19 nt, Artificial Sequence
  Description of Artificial Sequence: Synthetic oligonucleotide
agcccucagauaaagauga

SEQ ID NO: 365041 - RNA, 19 nt, Artificial Sequence
  Description of Artificial Sequence: Synthetic oligonucleotide
uggucuaagagcagcccaa

SEQ ID NO: 365042 - RNA, 19 nt, Artificial Sequence
  Description of Artificial Sequence: Synthetic oligonucleotide
ggaaauggaaagucccacc

SEQ ID NO: 365043 - RNA, 19 nt, Artificial Sequence
  Description of Artificial Sequence: Synthetic oligonucleotide
uccggguugauagaagccu

SEQ ID NO: 365044 - RNA, 19 nt, Artificial Sequence
  Description of Artificial Sequence: Synthetic oligonucleotide
gucuaagagcagcccaagg

SEQ ID NO: 365045 - RNA, 19 nt, Artificial Sequence
  Description of Artificial Sequence: Synthetic oligonucleotide
cuagcuucaguuucuaugu

SEQ ID NO: 365046 - RNA, 19 nt, Artificial Sequence
  Description of Artificial Sequence: Synthetic oligonucleotide
aguuuauuuggcauuggau

SEQ ID NO: 365047 - RNA, 19 nt, Artificial Sequence
  Description of Artificial Sequence: Synthetic oligonucleotide
aguagauacuccagcccac

SEQ ID NO: 365048 - RNA, 19 nt, Artificial Sequence
  Description of Artificial Sequence: Synthetic oligonucleotide
uggacucagauaacacaac

SEQ ID NO: 365049 - RNA, 19 nt, Artificial Sequence
  Description of Artificial Sequence: Synthetic oligonucleotide
ugcuuagucuccaacccuu

SEQ ID NO: 365050 - RNA, 19 nt, Artificial Sequence
  Description of Artificial Sequence: Synthetic oligonucleotide
cagcccaagggcaaauggc

SEQ ID NO: 365051 - RNA, 19 nt, Artificial Sequence
  Description of Artificial Sequence: Synthetic oligonucleotide
uagccauggaguacauaca

SEQ ID NO: 365052 - RNA, 19 nt, Artificial Sequence
  Description of Artificial Sequence: Synthetic oligonucleotide
caccugcaaacauuuggcc

SEQ ID NO: 365053 - RNA, 19 nt, Artificial Sequence
  Description of Artificial Sequence: Synthetic oligonucleotide
aggggucuagagucuacuc

SEQ ID NO: 365054 - RNA, 19 nt, Artificial Sequence
  Description of Artificial Sequence: Synthetic oligonucleotide
uggggccgcucacacaggg

SEQ ID NO: 365055 - RNA, 19 nt, Artificial Sequence
  Description of Artificial Sequence: Synthetic oligonucleotide
cauuggaugaaaugguucu

SEQ ID NO: 365056 - RNA, 19 nt, Artificial Sequence
  Description of Artificial Sequence: Synthetic oligonucleotide
agacuauccagggacaaau

SEQ ID NO: 365057 - RNA, 19 nt, Artificial Sequence
  Description of Artificial Sequence: Synthetic oligonucleotide
aagauacagaugugcuaaa

SEQ ID NO: 365058 - RNA, 19 nt, Artificial Sequence
  Description of Artificial Sequence: Synthetic oligonucleotide
auaacacaacacaggaugu

SEQ ID NO: 365059 - RNA, 19 nt, Artificial Sequence
  Description of Artificial Sequence: Synthetic oligonucleotide
cuuccccgucaucagaaag

SEQ ID NO: 365060 - RNA, 19 nt, Artificial Sequence
  Description of Artificial Sequence: Synthetic oligonucleotide
ggauccagucugaagaugc

SEQ ID NO: 365061 - RNA, 19 nt, Artificial Sequence
  Description of Artificial Sequence: Synthetic oligonucleotide
gggucguggaaauggaaag

SEQ ID NO: 365062 - RNA, 19 nt, Artificial Sequence
  Description of Artificial Sequence: Synthetic oligonucleotide
aacaacccuuuauggcaca

SEQ ID NO: 365063 - RNA, 19 nt, Artificial Sequence
  Description of Artificial Sequence: Synthetic oligonucleotide
agccaccuaaaccacagua

SEQ ID NO: 365064 - RNA, 19 nt, Artificial Sequence
  Description of Artificial Sequence: Synthetic oligonucleotide
cauucgccagcaagcagag

SEQ ID NO: 365065 - RNA, 19 nt, Artificial Sequence
  Description of Artificial Sequence: Synthetic oligonucleotide
aaauugcacagaacuugcu

SEQ ID NO: 365066 - RNA, 19 nt, Artificial Sequence
  Description of Artificial Sequence: Synthetic oligonucleotide
caauucucuucccaaacaa

SEQ ID NO: 365067 - RNA, 19 nt, Artificial Sequence
  Description of Artificial Sequence: Synthetic oligonucleotide
gagauaggugucuucugaa

SEQ ID NO: 365068 - RNA, 19 nt, Artificial Sequence
  Description of Artificial Sequence: Synthetic oligonucleotide
  modified_base (3)..(3): a, c, u, g, unknown or other
acncaugucugacuucuuu

SEQ ID NO: 365069 - RNA, 19 nt, Artificial Sequence
  Description of Artificial Sequence: Synthetic oligonucleotide
aagauguaguggggugagg

SEQ ID NO: 365070 - RNA, 19 nt, Artificial Sequence
  Description of Artificial Sequence: Synthetic oligonucleotide
cguggaaauggaaaguccc

SEQ ID NO: 365071 - RNA, 19 nt, Artificial Sequence
  Description of Artificial Sequence: Synthetic oligonucleotide
uggagguacgcugaacuuc

SEQ ID NO: 365072 - RNA, 19 nt, Artificial Sequence
  Description of Artificial Sequence: Synthetic oligonucleotide
uagaacccuucauccacca

SEQ ID NO: 365073 - RNA, 19 nt, Artificial Sequence
  Description of Artificial Sequence: Synthetic oligonucleotide
agaaugugccuagaacugu

SEQ ID NO: 365074 - RNA, 19 nt, Artificial Sequence
  Description of Artificial Sequence: Synthetic oligonucleotide
aacauacuguccggguuga

SEQ ID NO: 365075 - RNA, 19 nt, Artificial Sequence
  Description of Artificial Sequence: Synthetic oligonucleotide
  modified_base (6)..(6): a, c, u, g, unknown or other
ucaacncaugucugacuuc

SEQ ID NO: 365076 - RNA, 19 nt, Artificial Sequence
  Description of Artificial Sequence: Synthetic oligonucleotide
cuuguacgccguauaagga

SEQ ID NO: 365077 - RNA, 19 nt, Artificial Sequence
  Description of Artificial Sequence: Synthetic oligonucleotide
aaagucccaccuuccccgu

SEQ ID NO: 365078 - RNA, 19 nt, Artificial Sequence
  Description of Artificial Sequence: Synthetic oligonucleotide
cucauaccuccaguuagcc

SEQ ID NO: 365079 - RNA, 19 nt, Artificial Sequence
  Description of Artificial Sequence: Synthetic oligonucleotide
cacucaauacuugcuggag

SEQ ID NO: 365080 - RNA, 19 nt, Artificial Sequence
  Description of Artificial Sequence: Synthetic oligonucleotide
acgccguauaaggaggcgg

SEQ ID NO: 365081 - RNA, 19 nt, Artificial Sequence
  Description of Artificial Sequence: Synthetic oligonucleotide
gagucuacuccuggggagc

SEQ ID NO: 365082 - RNA, 19 nt, Artificial Sequence
  Description of Artificial Sequence: Synthetic oligonucleotide
guauucccauucugggcag

SEQ ID NO: 365083 - RNA, 19 nt, Artificial Sequence
  Description of Artificial Sequence: Synthetic oligonucleotide
ucaagcacccacucauguu

SEQ ID NO: 365084 - RNA, 19 nt, Artificial Sequence
  Description of Artificial Sequence: Synthetic oligonucleotide
gucauucgccagcaagcag

SEQ ID NO: 365085 - RNA, 19 nt, Artificial Sequence
  Description of Artificial Sequence: Synthetic oligonucleotide
guggucuaagagcagccca

SEQ ID NO: 365086 - RNA, 19 nt, Artificial Sequence
  Description of Artificial Sequence: Synthetic oligonucleotide
ggaccuggaauuauucacc

SEQ ID NO: 365087 - RNA, 19 nt, Artificial Sequence
  Description of Artificial Sequence: Synthetic oligonucleotide
cuggaauuauucaccagua

SEQ ID NO: 365088 - RNA, 19 nt, Artificial Sequence
  Description of Artificial Sequence: Synthetic oligonucleotide
cccgucaucagaaagaugu

SEQ ID NO: 365089 - RNA, 19 nt, Artificial Sequence
  Description of Artificial Sequence: Synthetic oligonucleotide
ggagguacgcugaacuucc

SEQ ID NO: 365090 - RNA, 19 nt, Artificial Sequence
  Description of Artificial Sequence: Synthetic oligonucleotide
gaucaagcacccacucaug

SEQ ID NO: 365091 - RNA, 19 nt, Artificial Sequence
  Description of Artificial Sequence: Synthetic oligonucleotide
caccaagacaguugcccac

SEQ ID NO: 365092 - RNA, 19 nt, Artificial Sequence
  Description of Artificial Sequence: Synthetic oligonucleotide
ggguauucccauucugggc

SEQ ID NO: 365093 - RNA, 19 nt, Artificial Sequence
  Description of Artificial Sequence: Synthetic oligonucleotide
agauacagaugugcuaaaa

SEQ ID NO: 365094 - RNA, 19 nt, Artificial Sequence
  Description of Artificial Sequence: Synthetic oligonucleotide
ggguggcuaaacccaacgg

SEQ ID NO: 365095 - RNA, 19 nt, Artificial Sequence
  Description of Artificial Sequence: Synthetic oligonucleotide
acagguuuccaagcagugu

SEQ ID NO: 365096 - RNA, 19 nt, Artificial Sequence
  Description of Artificial Sequence: Synthetic oligonucleotide
agcccaagggcaaauggcu

SEQ ID NO: 365097 - RNA, 19 nt, Artificial Sequence
  Description of Artificial Sequence: Synthetic oligonucleotide
uacgccauggagagugcua

SEQ ID NO: 365098 - RNA, 19 nt, Artificial Sequence
  Description of Artificial Sequence: Synthetic oligonucleotide
gacaaaucucauaccucca

SEQ ID NO: 365099 - RNA, 19 nt, Artificial Sequence
  Description of Artificial Sequence: Synthetic oligonucleotide
auacagggugcuaccaucu

SEQ ID NO: 365100 - RNA, 19 nt, Artificial Sequence
  Description of Artificial Sequence: Synthetic oligonucleotide
gcaugggucaucucccuug

SEQ ID NO: 365101 - RNA, 19 nt, Artificial Sequence
  Description of Artificial Sequence: Synthetic oligonucleotide
agauaacacaacacaggau

SEQ ID NO: 365102 - RNA, 19 nt, Artificial Sequence
  Description of Artificial Sequence: Synthetic oligonucleotide
cuucggccaagguugaaaa

SEQ ID NO: 365103 - RNA, 19 nt, Artificial Sequence
  Description of Artificial Sequence: Synthetic oligonucleotide
accagggauccuucggcca

SEQ ID NO: 365104 - RNA, 19 nt, Artificial Sequence
  Description of Artificial Sequence: Synthetic oligonucleotide
uguggcaguggaguagguc

SEQ ID NO: 365105 - RNA, 19 nt, Artificial Sequence
  Description of Artificial Sequence: Synthetic oligonucleotide
agccgguggaccaugaaaa

SEQ ID NO: 365106 - RNA, 19 nt, Artificial Sequence
  Description of Artificial Sequence: Synthetic oligonucleotide
  modified_base (2)..(2): a, c, u, g, unknown or other
cncaugucugacuucuuua

SEQ ID NO: 365107 - RNA, 19 nt, Artificial Sequence
  Description of Artificial Sequence: Synthetic oligonucleotide
guggaccaugaaaagcagc

SEQ ID NO: 365108 - RNA, 19 nt, Artificial Sequence
  Description of Artificial Sequence: Synthetic oligonucleotide
acgaccaggcgcaucccac

SEQ ID NO: 365109 - RNA, 19 nt, Artificial Sequence
  Description of Artificial Sequence: Synthetic oligonucleotide
cuguccggguugauagaag

SEQ ID NO: 365110 - RNA, 19 nt, Artificial Sequence
  Description of Artificial Sequence: Synthetic oligonucleotide
ccacucauguucuuagcug

SEQ ID NO: 365111 - RNA, 19 nt, Artificial Sequence
  Description of Artificial Sequence: Synthetic oligonucleotide
gccaagguugaaaauggug

SEQ ID NO: 365112 - RNA, 19 nt, Artificial Sequence
  Description of Artificial Sequence: Synthetic oligonucleotide
ccagacauccaacauagaa

SEQ ID NO: 365113 - RNA, 19 nt, Artificial Sequence
  Description of Artificial Sequence: Synthetic oligonucleotide
caguuagcccuggggaucc

SEQ ID NO: 365114 - RNA, 19 nt, Artificial Sequence
  Description of Artificial Sequence: Synthetic oligonucleotide
cuuagcuggacaggaguca

SEQ ID NO: 365115 - RNA, 19 nt, Artificial Sequence
  Description of Artificial Sequence: Synthetic oligonucleotide
accaggcgcaucccacuag

SEQ ID NO: 365116 - RNA, 19 nt, Artificial Sequence
  Description of Artificial Sequence: Synthetic oligonucleotide
agggucguggaaauggaaa

SEQ ID NO: 365117 - RNA, 19 nt, Artificial Sequence
  Description of Artificial Sequence: Synthetic oligonucleotide
caucuuaagaaaggauuaa

SEQ ID NO: 365118 - RNA, 19 nt, Artificial Sequence
  Description of Artificial Sequence: Synthetic oligonucleotide
uacuguccggguugauaga

SEQ ID NO: 365119 - RNA, 19 nt, Artificial Sequence
  Description of Artificial Sequence: Synthetic oligonucleotide
acuguccggguugauagaa

SEQ ID NO: 365120 - RNA, 19 nt, Artificial Sequence
  Description of Artificial Sequence: Synthetic oligonucleotide
cugaucaagcacccacuca

SEQ ID NO: 365121 - RNA, 19 nt, Artificial Sequence
  Description of Artificial Sequence: Synthetic oligonucleotide
ccaacggucauucgccagc

SEQ ID NO: 365122 - RNA, 19 nt, Artificial Sequence
  Description of Artificial Sequence: Synthetic oligonucleotide
ucaauacuugcuggaggua

SEQ ID NO: 365123 - RNA, 19 nt, Artificial Sequence
  Description of Artificial Sequence: Synthetic oligonucleotide
gguuuccaagcaguguaag

SEQ ID NO: 365124 - RNA, 19 nt, Artificial Sequence
  Description of Artificial Sequence: Synthetic oligonucleotide
ggaggcauguauguggcca

SEQ ID NO: 365125 - RNA, 19 nt, Artificial Sequence
  Description of Artificial Sequence: Synthetic oligonucleotide
ugcuccaaucagggacucg

SEQ ID NO: 365126 - RNA, 19 nt, Artificial Sequence
  Description of Artificial Sequence: Synthetic oligonucleotide
guguccagacacaugaacu

SEQ ID NO: 365127 - RNA, 19 nt, Artificial Sequence
  Description of Artificial Sequence: Synthetic oligonucleotide
uggagagugcuagcccuca

SEQ ID NO: 365128 - RNA, 19 nt, Artificial Sequence
  Description of Artificial Sequence: Synthetic oligonucleotide
acaggggucuagagucuac

SEQ ID NO: 365129 - RNA, 19 nt, Artificial Sequence
  Description of Artificial Sequence: Synthetic oligonucleotide
caguaagaucuggcaaccc

SEQ ID NO: 365130 - RNA, 19 nt, Artificial Sequence
  Description of Artificial Sequence: Synthetic oligonucleotide
  modified_base (5)..(5): a, c, u, g, unknown or other
caacncaugucugacuucu

SEQ ID NO: 365131 - RNA, 19 nt, Artificial Sequence
  Description of Artificial Sequence: Synthetic oligonucleotide
guccggguugauagaagcc

SEQ ID NO: 365132 - RNA, 19 nt, Artificial Sequence
  Description of Artificial Sequence: Synthetic oligonucleotide
gaguagguccaggcuauga

SEQ ID NO: 365133 - RNA, 19 nt, Artificial Sequence
  Description of Artificial Sequence: Synthetic oligonucleotide
guacgccguauaaggaggc

SEQ ID NO: 365134 - RNA, 19 nt, Artificial Sequence
  Description of Artificial Sequence: Synthetic oligonucleotide
caaaucucauaccuccagu

SEQ ID NO: 365135 - RNA, 19 nt, Artificial Sequence
  Description of Artificial Sequence: Synthetic oligonucleotide
gcauuggaugaaaugguuc

SEQ ID NO: 365136 - RNA, 19 nt, Artificial Sequence
  Description of Artificial Sequence: Synthetic oligonucleotide
agggugcuaccaucugugu

SEQ ID NO: 365137 - RNA, 19 nt, Artificial Sequence
  Description of Artificial Sequence: Synthetic oligonucleotide
ccaguaagaucuggcaacc

SEQ ID NO: 365138 - RNA, 19 nt, Artificial Sequence
  Description of Artificial Sequence: Synthetic oligonucleotide
gagcguggcugcccagugc

SEQ ID NO: 365139 - RNA, 19 nt, Artificial Sequence
  Description of Artificial Sequence: Synthetic oligonucleotide
cagggacucgaugcgcucc

SEQ ID NO: 365140 - RNA, 19 nt, Artificial Sequence
  Description of Artificial Sequence: Synthetic oligonucleotide
gguacuuguacgccguaua

SEQ ID NO: 365141 - RNA, 19 nt, Artificial Sequence
  Description of Artificial Sequence: Synthetic oligonucleotide
gguggaccaugaaaagcag

SEQ ID NO: 365142 - RNA, 19 nt, Artificial Sequence
  Description of Artificial Sequence: Synthetic oligonucleotide
gcagggucguagaacauac

SEQ ID NO: 365143 - RNA, 19 nt, Artificial Sequence
  Description of Artificial Sequence: Synthetic oligonucleotide
gugaggaaacacauagaua

SEQ ID NO: 365144 - RNA, 19 nt, Artificial Sequence
  Description of Artificial Sequence: Synthetic oligonucleotide
auucgccagcaagcagagc

SEQ ID NO: 365145 - RNA, 19 nt, Artificial Sequence
  Description of Artificial Sequence: Synthetic oligonucleotide
agcagcuagccuguggguu

SEQ ID NO: 365146 - RNA, 19 nt, Artificial Sequence
  Description of Artificial Sequence: Synthetic oligonucleotide
caugggcggaggaggcaag

SEQ ID NO: 365147 - RNA, 19 nt, Artificial Sequence
  Description of Artificial Sequence: Synthetic oligonucleotide
ccuggaccuggaauuauuc

SEQ ID NO: 365148 - RNA, 19 nt, Artificial Sequence
  Description of Artificial Sequence: Synthetic oligonucleotide
ugacgguacugcugacauc

SEQ ID NO: 365149 - RNA, 19 nt, Artificial Sequence
  Description of Artificial Sequence: Synthetic oligonucleotide
guuagcccuggggauccag

SEQ ID NO: 365150 - RNA, 19 nt, Artificial Sequence
  Description of Artificial Sequence: Synthetic oligonucleotide
ggucuaagagcagcccaag

SEQ ID NO: 365151 - RNA, 19 nt, Artificial Sequence
  Description of Artificial Sequence: Synthetic oligonucleotide
aggacccuucaagccuccc

SEQ ID NO: 365152 - RNA, 19 nt, Artificial Sequence
  Description of Artificial Sequence: Synthetic oligonucleotide
ccguauaaggaggcggagg

SEQ ID NO: 365153 - RNA, 19 nt, Artificial Sequence
  Description of Artificial Sequence: Synthetic oligonucleotide
agggauccuucggccaagg

SEQ ID NO: 365154 - RNA, 19 nt, Artificial Sequence
  Description of Artificial Sequence: Synthetic oligonucleotide
uaggguccuugacgguacu

SEQ ID NO: 365155 - RNA, 19 nt, Artificial Sequence
  Description of Artificial Sequence: Synthetic oligonucleotide
gccgguggaccaugaaaag

SEQ ID NO: 365156 - RNA, 19 nt, Artificial Sequence
  Description of Artificial Sequence: Synthetic oligonucleotide
gggacaaaucucauaccuc

SEQ ID NO: 365157 - RNA, 19 nt, Artificial Sequence
  Description of Artificial Sequence: Synthetic oligonucleotide
gagugcuagcccucagaua

SEQ ID NO: 365158 - RNA, 19 nt, Artificial Sequence
  Description of Artificial Sequence: Synthetic oligonucleotide
gggugcuaccaucuguguc

SEQ ID NO: 365159 - RNA, 19 nt, Artificial Sequence
  Description of Artificial Sequence: Synthetic oligonucleotide
cgguggaccaugaaaagca

SEQ ID NO: 365160 - RNA, 19 nt, Artificial Sequence
  Description of Artificial Sequence: Synthetic oligonucleotide
agcaaauccuggaccugga

SEQ ID NO: 365161 - RNA, 19 nt, Artificial Sequence
  Description of Artificial Sequence: Synthetic oligonucleotide
gccaaggaggucucugcac

SEQ ID NO: 365162 - RNA, 19 nt, Artificial Sequence
  Description of Artificial Sequence: Synthetic oligonucleotide
  modified_base (4)..(4): a, c, u, g, unknown or other
aacncaugucugacuucuu

SEQ ID NO: 365163 - RNA, 19 nt, Artificial Sequence
  Description of Artificial Sequence: Synthetic oligonucleotide
ggucauucgccagcaagca

SEQ ID NO: 365164 - RNA, 19 nt, Artificial Sequence
  Description of Artificial Sequence: Synthetic oligonucleotide
caacacaggaugucuacuu

SEQ ID NO: 365165 - RNA, 19 nt, Artificial Sequence
  Description of Artificial Sequence: Synthetic oligonucleotide
gguugauagaagccucaua

SEQ ID NO: 365166 - RNA, 19 nt, Artificial Sequence
  Description of Artificial Sequence: Synthetic oligonucleotide
ccgguggaccaugaaaagc

SEQ ID NO: 365167 - RNA, 19 nt, Artificial Sequence
  Description of Artificial Sequence: Synthetic oligonucleotide
uggguacuuguacgccgua

SEQ ID NO: 365168 - RNA, 19 nt, Artificial Sequence
  Description of Artificial Sequence: Synthetic oligonucleotide
uggugcaaguuugcuccaa

SEQ ID NO: 365169 - RNA, 19 nt, Artificial Sequence
  Description of Artificial Sequence: Synthetic oligonucleotide
ggagagugcuagcccucag

SEQ ID NO: 365170 - RNA, 19 nt, Artificial Sequence
  Description of Artificial Sequence: Synthetic oligonucleotide
guuccucucuuggggugcc

SEQ ID NO: 365171 - RNA, 19 nt, Artificial Sequence
  Description of Artificial Sequence: Synthetic oligonucleotide
gagguacgcugaacuuccc

SEQ ID NO: 365172 - RNA, 19 nt, Artificial Sequence
  Description of Artificial Sequence: Synthetic oligonucleotide
ccaaguggucuaagagcag

SEQ ID NO: 365173 - RNA, 19 nt, Artificial Sequence
  Description of Artificial Sequence: Synthetic oligonucleotide
ggauccuucggccaagguu

SEQ ID NO: 365174 - RNA, 19 nt, Artificial Sequence
  Description of Artificial Sequence: Synthetic oligonucleotide
gaggcggagggucguggaa

SEQ ID NO: 365175 - RNA, 19 nt, Artificial Sequence
  Description of Artificial Sequence: Synthetic oligonucleotide
ugacgaccaggcgcauccc

SEQ ID NO: 365176 - RNA, 19 nt, Artificial Sequence
  Description of Artificial Sequence: Synthetic oligonucleotide
gauccagucugaagaugcu

SEQ ID NO: 365177 - RNA, 19 nt, Artificial Sequence
  Description of Artificial Sequence: Synthetic oligonucleotide
aggcggagggucguggaaa

SEQ ID NO: 365178 - RNA, 19 nt, Artificial Sequence
  Description of Artificial Sequence: Synthetic oligonucleotide
gggauccagucugaagaug

SEQ ID NO: 365179 - RNA, 19 nt, Artificial Sequence
  Description of Artificial Sequence: Synthetic oligonucleotide
guagauacuccagcccacu

SEQ ID NO: 365180 - RNA, 19 nt, Artificial Sequence
  Description of Artificial Sequence: Synthetic oligonucleotide
guguaagaaugugccuaga

SEQ ID NO: 365181 - RNA, 19 nt, Artificial Sequence
  Description of Artificial Sequence: Synthetic oligonucleotide
cuggguacuuguacgccgu

SEQ ID NO: 365182 - RNA, 19 nt, Artificial Sequence
  Description of Artificial Sequence: Synthetic oligonucleotide
ccggguugauagaagccuc

SEQ ID NO: 365183 - RNA, 19 nt, Artificial Sequence
  Description of Artificial Sequence: Synthetic oligonucleotide
gcucagaccaaguggucua

SEQ ID NO: 365184 - RNA, 19 nt, Artificial Sequence
  Description of Artificial Sequence: Synthetic oligonucleotide
cacugaccacagacuagga

SEQ ID NO: 365185 - RNA, 19 nt, Artificial Sequence
  Description of Artificial Sequence: Synthetic oligonucleotide
caacggucauucgccagca

SEQ ID NO: 365186 - RNA, 19 nt, Artificial Sequence
  Description of Artificial Sequence: Synthetic oligonucleotide
cagggauccuucggccaag

SEQ ID NO: 365187 - RNA, 19 nt, Artificial Sequence
  Description of Artificial Sequence: Synthetic oligonucleotide
gggucguagaacauacugu

SEQ ID NO: 365188 - RNA, 19 nt, Artificial Sequence
  Description of Artificial Sequence: Synthetic oligonucleotide
gaguacauacagggugcua

SEQ ID NO: 365189 - RNA, 19 nt, Artificial Sequence
  Description of Artificial Sequence: Synthetic oligonucleotide
cccaacggucauucgccag

SEQ ID NO: 365190 - RNA, 19 nt, Artificial Sequence
  Description of Artificial Sequence: Synthetic oligonucleotide
ggcgcaucccacuagccau

SEQ ID NO: 365191 - RNA, 19 nt, Artificial Sequence
  Description of Artificial Sequence: Synthetic oligonucleotide
acuagccauggaguacaua

SEQ ID NO: 365192 - RNA, 19 nt, Artificial Sequence
  Description of Artificial Sequence: Synthetic oligonucleotide
guacgcugaacuucccguu

SEQ ID NO: 365193 - RNA, 19 nt, Artificial Sequence
  Description of Artificial Sequence: Synthetic oligonucleotide
ccacuagccauggaguaca

SEQ ID NO: 365194 - RNA, 19 nt, Artificial Sequence
  Description of Artificial Sequence: Synthetic oligonucleotide
gccguauaaggaggcggag

SEQ ID NO: 365195 - RNA, 19 nt, Artificial Sequence
  Description of Artificial Sequence: Synthetic oligonucleotide
ggcauguauguggccagca

SEQ ID NO: 365196 - RNA, 19 nt, Artificial Sequence
  Description of Artificial Sequence: Synthetic oligonucleotide
guauaaggaggcggagggu

SEQ ID NO: 365197 - RNA, 19 nt, Artificial Sequence
  Description of Artificial Sequence: Synthetic oligonucleotide
ccaagcaguguaagaaugu

SEQ ID NO: 365198 - RNA, 19 nt, Artificial Sequence
  Description of Artificial Sequence: Synthetic oligonucleotide
auccagggacaaaucucau

SEQ ID NO: 365199 - RNA, 19 nt, Artificial Sequence
  Description of Artificial Sequence: Synthetic oligonucleotide
gggagugaaguagaacccu

SEQ ID NO: 365200 - RNA, 19 nt, Artificial Sequence
  Description of Artificial Sequence: Synthetic oligonucleotide
gaugcgcucccggcgccuc

SEQ ID NO: 365201 - RNA, 19 nt, Artificial Sequence
  Description of Artificial Sequence: Synthetic oligonucleotide
ccucuggcgcagccggugg

SEQ ID NO: 365202 - RNA, 19 nt, Artificial Sequence
  Description of Artificial Sequence: Synthetic oligonucleotide
ccuuaugauucuucugggu

SEQ ID NO: 365203 - RNA, 19 nt, Artificial Sequence
  Description of Artificial Sequence: Synthetic oligonucleotide
ccaaggaggucucugcacu

SEQ ID NO: 365204 - RNA, 19 nt, Artificial Sequence
  Description of Artificial Sequence: Synthetic oligonucleotide
auccuucggccaagguuga

SEQ ID NO: 365205 - RNA, 19 nt, Artificial Sequence
  Description of Artificial Sequence: Synthetic oligonucleotide
ccauuaugagaaggggaga

SEQ ID NO: 365206 - RNA, 19 nt, Artificial Sequence
  Description of Artificial Sequence: Synthetic oligonucleotide
uccuucggccaagguugaa

SEQ ID NO: 365207 - RNA, 19 nt, Artificial Sequence
  Description of Artificial Sequence: Synthetic oligonucleotide
gcaaccccaacagucauuu

SEQ ID NO: 365208 - RNA, 19 nt, Artificial Sequence
  Description of Artificial Sequence: Synthetic oligonucleotide
cucuggcgcagccggugga

SEQ ID NO: 365209 - RNA, 19 nt, Artificial Sequence
  Description of Artificial Sequence: Synthetic oligonucleotide
augcgcucccggcgccucu

SEQ ID NO: 365210 - RNA, 19 nt, Artificial Sequence
  Description of Artificial Sequence: Synthetic oligonucleotide
ggggauccagucugaagau

SEQ ID NO: 365211 - RNA, 19 nt, Artificial Sequence
  Description of Artificial Sequence: Synthetic oligonucleotide
aguuagcccuggggaucca

SEQ ID NO: 365212 - RNA, 19 nt, Artificial Sequence
  Description of Artificial Sequence: Synthetic oligonucleotide
caggggucuagagucuacu

SEQ ID NO: 365213 - RNA, 19 nt, Artificial Sequence
  Description of Artificial Sequence: Synthetic oligonucleotide
ccuugacgguacugcugac

SEQ ID NO: 365214 - RNA, 19 nt, Artificial Sequence
  Description of Artificial Sequence: Synthetic oligonucleotide
cgccguauaaggaggcgga

SEQ ID NO: 365215 - RNA, 19 nt, Artificial Sequence
  Description of Artificial Sequence: Synthetic oligonucleotide
gcgcaucccacuagccaug

SEQ ID NO: 365216 - RNA, 19 nt, Artificial Sequence
  Description of Artificial Sequence: Synthetic oligonucleotide
cagggucguagaacauacu

SEQ ID NO: 365217 - RNA, 19 nt, Artificial Sequence
  Description of Artificial Sequence: Synthetic oligonucleotide
ggagugaaguagaacccuu

SEQ ID NO: 365218 - RNA, 19 nt, Artificial Sequence
  Description of Artificial Sequence: Synthetic oligonucleotide
cccguucuucucagucaug

SEQ ID NO: 365219 - RNA, 19 nt, Artificial Sequence
  Description of Artificial Sequence: Synthetic oligonucleotide
ccccgucaucagaaagaug

SEQ ID NO: 365220 - RNA, 19 nt, Artificial Sequence
  Description of Artificial Sequence: Synthetic oligonucleotide
ccuucggccaagguugaaa

SEQ ID NO: 365221 - RNA, 19 nt, Artificial Sequence
  Description of Artificial Sequence: Synthetic oligonucleotide
agccucccacugagauagg

SEQ ID NO: 365222 - RNA, 19 nt, Artificial Sequence
  Description of Artificial Sequence: Synthetic oligonucleotide
cuacgccauggagagugcu

SEQ ID NO: 365223 - RNA, 19 nt, Artificial Sequence
  Description of Artificial Sequence: Synthetic oligonucleotide
gcuuagucuccaacccuua

SEQ ID NO: 365224 - RNA, 19 nt, Artificial Sequence
  Description of Artificial Sequence: Synthetic oligonucleotide
gcugacgaccaggcgcauc

SEQ ID NO: 365225 - RNA, 19 nt, Artificial Sequence
  Description of Artificial Sequence: Synthetic oligonucleotide
gguggaucaucuggcuggu

SEQ ID NO: 365226 - RNA, 19 nt, Artificial Sequence
  Description of Artificial Sequence: Synthetic oligonucleotide
ccgucaucagaaagaugua

SEQ ID NO: 365227 - RNA, 19 nt, Artificial Sequence
  Description of Artificial Sequence: Synthetic oligonucleotide
ggcggagggucguggaaau

SEQ ID NO: 365228 - RNA, 19 nt, Artificial Sequence
  Description of Artificial Sequence: Synthetic oligonucleotide
ggccaagguugaaaauggu

SEQ ID NO: 365229 - RNA, 19 nt, Artificial Sequence
  Description of Artificial Sequence: Synthetic oligonucleotide
cugcagggucguagaacau

SEQ ID NO: 365230 - RNA, 19 nt, Artificial Sequence
  Description of Artificial Sequence: Synthetic oligonucleotide
gggugccuagcuucaguuu

SEQ ID NO: 365231 - RNA, 19 nt, Artificial Sequence
  Description of Artificial Sequence: Synthetic oligonucleotide
cacuagccauggaguacau

SEQ ID NO: 365232 - RNA, 19 nt, Artificial Sequence
  Description of Artificial Sequence: Synthetic oligonucleotide
ggguacuuguacgccguau

SEQ ID NO: 365233 - RNA, 19 nt, Artificial Sequence
  Description of Artificial Sequence: Synthetic oligonucleotide
ccuuccccgucaucagaaa

SEQ ID NO: 365234 - RNA, 19 nt, Artificial Sequence
  Description of Artificial Sequence: Synthetic oligonucleotide
gccucccacugagauaggu

SEQ ID NO: 365235 - RNA, 19 nt, Artificial Sequence
  Description of Artificial Sequence: Synthetic oligonucleotide
gcguggcugcccagugccc

SEQ ID NO: 365236 - RNA, 19 nt, Artificial Sequence
  Description of Artificial Sequence: Synthetic oligonucleotide
gagcuacgccauggagagu

SEQ ID NO: 365237 - RNA, 19 nt, Artificial Sequence
  Description of Artificial Sequence: Synthetic oligonucleotide
caggggccucuuggcaaaa

SEQ ID NO: 365238 - RNA, 19 nt, Artificial Sequence
  Description of Artificial Sequence: Synthetic oligonucleotide
cgaccaggcgcaucccacu

SEQ ID NO: 365239 - RNA, 19 nt, Artificial Sequence
  Description of Artificial Sequence: Synthetic oligonucleotide
cggcgccucuggcgcagcc

SEQ ID NO: 365240 - RNA, 19 nt, Artificial Sequence
  Description of Artificial Sequence: Synthetic oligonucleotide
ugaaauucgagucaucagg

SEQ ID NO: 365241 - RNA, 19 nt, Artificial Sequence
  Description of Artificial Sequence: Synthetic oligonucleotide
ucuuauauacacaggaagc

SEQ ID NO: 365242 - RNA, 19 nt, Artificial Sequence
  Description of Artificial Sequence: Synthetic oligonucleotide
uagacguacauauagcagg

SEQ ID NO: 365243 - RNA, 19 nt, Artificial Sequence
  Description of Artificial Sequence: Synthetic oligonucleotide
caugaaaagggcuauuucg

SEQ ID NO: 365244 - RNA, 19 nt, Artificial Sequence
  Description of Artificial Sequence: Synthetic oligonucleotide
aauucgagucaucaggaag

SEQ ID NO: 365245 - RNA, 19 nt, Artificial Sequence
  Description of Artificial Sequence: Synthetic oligonucleotide
uaugguacucuccagcagg

SEQ ID NO: 365246 - RNA, 19 nt, Artificial Sequence
  Description of Artificial Sequence: Synthetic oligonucleotide
gaugguguagacaagauac

SEQ ID NO: 365247 - RNA, 19 nt, Artificial Sequence
  Description of Artificial Sequence: Synthetic oligonucleotide
aaaagggcuauuucgccgg

SEQ ID NO: 365248 - RNA, 19 nt, Artificial Sequence
  Description of Artificial Sequence: Synthetic oligonucleotide
uguuggucgguuaaguagg

SEQ ID NO: 365249 - RNA, 19 nt, Artificial Sequence
  Description of Artificial Sequence: Synthetic oligonucleotide
uugacauagacguacauau

SEQ ID NO: 365250 - RNA, 19 nt, Artificial Sequence
  Description of Artificial Sequence: Synthetic oligonucleotide
guauuuucgguccagggag

SEQ ID NO: 365251 - RNA, 19 nt, Artificial Sequence
  Description of Artificial Sequence: Synthetic oligonucleotide
uacgguagcaggaauaaca

SEQ ID NO: 365252 - RNA, 19 nt, Artificial Sequence
  Description of Artificial Sequence: Synthetic oligonucleotide
gaaguaagacacaaagacg

SEQ ID NO: 365253 - RNA, 19 nt, Artificial Sequence
  Description of Artificial Sequence: Synthetic oligonucleotide
cuaauagcagauuucggag

SEQ ID NO: 365254 - RNA, 19 nt, Artificial Sequence
  Description of Artificial Sequence: Synthetic oligonucleotide
ucaucaacugguucgaaug

SEQ ID NO: 365255 - RNA, 19 nt, Artificial Sequence
  Description of Artificial Sequence: Synthetic oligonucleotide
guagacaagauacauccag

SEQ ID NO: 365256 - RNA, 19 nt, Artificial Sequence
  Description of Artificial Sequence: Synthetic oligonucleotide
ugcgaauucaugcagugga

SEQ ID NO: 365257 - RNA, 19 nt, Artificial Sequence
  Description of Artificial Sequence: Synthetic oligonucleotide
ugcgucgaaagacauacag

SEQ ID NO: 365258 - RNA, 19 nt, Artificial Sequence
  Description of Artificial Sequence: Synthetic oligonucleotide
gacuaaagagccaaugccg

SEQ ID NO: 365259 - RNA, 19 nt, Artificial Sequence
  Description of Artificial Sequence: Synthetic oligonucleotide
aguagggucacgaaucucc

SEQ ID NO: 365260 - RNA, 19 nt, Artificial Sequence
  Description of Artificial Sequence: Synthetic oligonucleotide
aaacguaccaguacgguag

SEQ ID NO: 365261 - RNA, 19 nt, Artificial Sequence
  Description of Artificial Sequence: Synthetic oligonucleotide
ugaaauagagggacuacca

SEQ ID NO: 365262 - RNA, 19 nt, Artificial Sequence
  Description of Artificial Sequence: Synthetic oligonucleotide
agugugguuguccagacug

SEQ ID NO: 365263 - RNA, 19 nt, Artificial Sequence
  Description of Artificial Sequence: Synthetic oligonucleotide
aacauaccuaugcugaaga

SEQ ID NO: 365264 - RNA, 19 nt, Artificial Sequence
  Description of Artificial Sequence: Synthetic oligonucleotide
gaaucgcucaugaaaaggg

SEQ ID NO: 365265 - RNA, 19 nt, Artificial Sequence
  Description of Artificial Sequence: Synthetic oligonucleotide
agggucacgaaucuccgcc

SEQ ID NO: 365266 - RNA, 19 nt, Artificial Sequence
  Description of Artificial Sequence: Synthetic oligonucleotide
augacguagggaaacauac

SEQ ID NO: 365267 - RNA, 19 nt, Artificial Sequence
  Description of Artificial Sequence: Synthetic oligonucleotide
agugguuguacccaaggug

SEQ ID NO: 365268 - RNA, 19 nt, Artificial Sequence
  Description of Artificial Sequence: Synthetic oligonucleotide
ucgaaagacauacagcuuu

SEQ ID NO: 365269 - RNA, 19 nt, Artificial Sequence
  Description of Artificial Sequence: Synthetic oligonucleotide
aaucgcucaugaaaagggc

SEQ ID NO: 365270 - RNA, 19 nt, Artificial Sequence
  Description of Artificial Sequence: Synthetic oligonucleotide
agaacgcaaagagaaaacg

SEQ ID NO: 365271 - RNA, 19 nt, Artificial Sequence
  Description of Artificial Sequence: Synthetic oligonucleotide
ugaaaagggcuauuucgcc

SEQ ID NO: 365272 - RNA, 19 nt, Artificial Sequence
  Description of Artificial Sequence: Synthetic oligonucleotide
uugaaauagagggacuacc

SEQ ID NO: 365273 - RNA, 19 nt, Artificial Sequence
  Description of Artificial Sequence: Synthetic oligonucleotide
cugugugaauagaauagcc

SEQ ID NO: 365274 - RNA, 19 nt, Artificial Sequence
  Description of Artificial Sequence: Synthetic oligonucleotide
aaacgaaagaccgccaggu

SEQ ID NO: 365275 - RNA, 19 nt, Artificial Sequence
  Description of Artificial Sequence: Synthetic oligonucleotide
aacguaccaguacgguagc

SEQ ID NO: 365276 - RNA, 19 nt, Artificial Sequence
  Description of Artificial Sequence: Synthetic oligonucleotide
acauauagcaggaaggacu

SEQ ID NO: 365277 - RNA, 19 nt, Artificial Sequence
  Description of Artificial Sequence: Synthetic oligonucleotide
caaggugugcgcuggaagg

SEQ ID NO: 365278 - RNA, 19 nt, Artificial Sequence
  Description of Artificial Sequence: Synthetic oligonucleotide
aaaacguaccaguacggua

SEQ ID NO: 365279 - RNA, 19 nt, Artificial Sequence
  Description of Artificial Sequence: Synthetic oligonucleotide
cucagagugaacaugcuca

SEQ ID NO: 365280 - RNA, 19 nt, Artificial Sequence
  Description of Artificial Sequence: Synthetic oligonucleotide
aaugcgaccucuguagugu

SEQ ID NO: 365281 - RNA, 19 nt, Artificial Sequence
  Description of Artificial Sequence: Synthetic oligonucleotide
cauagacguacauauagca

SEQ ID NO: 365282 - RNA, 19 nt, Artificial Sequence
  Description of Artificial Sequence: Synthetic oligonucleotide
uaauagcagauuucggagu

SEQ ID NO: 365283 - RNA, 19 nt, Artificial Sequence
  Description of Artificial Sequence: Synthetic oligonucleotide
ucggagugaaauucgaguc

SEQ ID NO: 365284 - RNA, 19 nt, Artificial Sequence
  Description of Artificial Sequence: Synthetic oligonucleotide
guaccaguacgguagcagg

SEQ ID NO: 365285 - RNA, 19 nt, Artificial Sequence
  Description of Artificial Sequence: Synthetic oligonucleotide
auuucgccggcguucaauc

SEQ ID NO: 365286 - RNA, 19 nt, Artificial Sequence
  Description of Artificial Sequence: Synthetic oligonucleotide
aaagggcuauuucgccggc

SEQ ID NO: 365287 - RNA, 19 nt, Artificial Sequence
  Description of Artificial Sequence: Synthetic oligonucleotide
acgaaucuccgccagcuag

SEQ ID NO: 365288 - RNA, 19 nt, Artificial Sequence
  Description of Artificial Sequence: Synthetic oligonucleotide
aauggucgcaaguuugcau

SEQ ID NO: 365289 - RNA, 19 nt, Artificial Sequence
  Description of Artificial Sequence: Synthetic oligonucleotide
aaugccgggacaaguguuc

SEQ ID NO: 365290 - RNA, 19 nt, Artificial Sequence
  Description of Artificial Sequence: Synthetic oligonucleotide
agcccguccaaguauuuuc

SEQ ID NO: 365291 - RNA, 19 nt, Artificial Sequence
  Description of Artificial Sequence: Synthetic oligonucleotide
aggauuaggguuugaagaa

SEQ ID NO: 365292 - RNA, 19 nt, Artificial Sequence
  Description of Artificial Sequence: Synthetic oligonucleotide
gugaaauucgagucaucag

SEQ ID NO: 365293 - RNA, 19 nt, Artificial Sequence
  Description of Artificial Sequence: Synthetic oligonucleotide
gaaauucgagucaucagga

SEQ ID NO: 365294 - RNA, 19 nt, Artificial Sequence
  Description of Artificial Sequence: Synthetic oligonucleotide
aguagcaucaagaacgcaa

SEQ ID NO: 365295 - RNA, 19 nt, Artificial Sequence
  Description of Artificial Sequence: Synthetic oligonucleotide
ugacguagggaaacauacc

SEQ ID NO: 365296 - RNA, 19 nt, Artificial Sequence
  Description of Artificial Sequence: Synthetic oligonucleotide
uggucgguuaaguaggguc

SEQ ID NO: 365297 - RNA, 19 nt, Artificial Sequence
  Description of Artificial Sequence: Synthetic oligonucleotide
auagacguacauauagcag

SEQ ID NO: 365298 - RNA, 19 nt, Artificial Sequence
  Description of Artificial Sequence: Synthetic oligonucleotide
guuguaaccugagugagga

SEQ ID NO: 365299 - RNA, 19 nt, Artificial Sequence
  Description of Artificial Sequence: Synthetic oligonucleotide
aaauucgagucaucaggaa

SEQ ID NO: 365300 - RNA, 19 nt, Artificial Sequence
  Description of Artificial Sequence: Synthetic oligonucleotide
gaugcuaguguugcccagg

SEQ ID NO: 365301 - RNA, 19 nt, Artificial Sequence
  Description of Artificial Sequence: Synthetic oligonucleotide
uauuuucgguccagggagc

SEQ ID NO: 365302 - RNA, 19 nt, Artificial Sequence
  Description of Artificial Sequence: Synthetic oligonucleotide
uuccacgacgucuugucca

SEQ ID NO: 365303 - RNA, 19 nt, Artificial Sequence
  Description of Artificial Sequence: Synthetic oligonucleotide
ugaugguguagacaagaua

SEQ ID NO: 365304 - RNA, 19 nt, Artificial Sequence
  Description of Artificial Sequence: Synthetic oligonucleotide
gacguagggaaacauaccu

SEQ ID NO: 365305 - RNA, 19 nt, Artificial Sequence
  Description of Artificial Sequence: Synthetic oligonucleotide
acuuuaugguacucuccag

SEQ ID NO: 365306 - RNA, 19 nt, Artificial Sequence
  Description of Artificial Sequence: Synthetic oligonucleotide
uuguccaguuguuguaacc

SEQ ID NO: 365307 - RNA, 19 nt, Artificial Sequence
  Description of Artificial Sequence: Synthetic oligonucleotide
gaacgcaaagagaaaacga

SEQ ID NO: 365308 - RNA, 19 nt, Artificial Sequence
  Description of Artificial Sequence: Synthetic oligonucleotide
guuguacccaaggugugcg

SEQ ID NO: 365309 - RNA, 19 nt, Artificial Sequence
  Description of Artificial Sequence: Synthetic oligonucleotide
gacuaccaugaguuugagg

SEQ ID NO: 365310 - RNA, 19 nt, Artificial Sequence
  Description of Artificial Sequence: Synthetic oligonucleotide
uaggagugguuguuccacg

SEQ ID NO: 365311 - RNA, 19 nt, Artificial Sequence
  Description of Artificial Sequence: Synthetic oligonucleotide
ggaggauuaggguuugaag

SEQ ID NO: 365312 - RNA, 19 nt, Artificial Sequence
  Description of Artificial Sequence: Synthetic oligonucleotide
gggaaggacggccuaauag

SEQ ID NO: 365313 - RNA, 19 nt, Artificial Sequence
  Description of Artificial Sequence: Synthetic oligonucleotide
cugcgugauccuuccaucg

SEQ ID NO: 365314 - RNA, 19 nt, Artificial Sequence
  Description of Artificial Sequence: Synthetic oligonucleotide
gaaucgguguuugaagcac

SEQ ID NO: 365315 - RNA, 19 nt, Artificial Sequence
  Description of Artificial Sequence: Synthetic oligonucleotide
ggccuaauagcagauuucg

SEQ ID NO: 365316 - RNA, 19 nt, Artificial Sequence
  Description of Artificial Sequence: Synthetic oligonucleotide
aggaaucgcucaugaaaag

SEQ ID NO: 365317 - RNA, 19 nt, Artificial Sequence
  Description of Artificial Sequence: Synthetic oligonucleotide
ggaaucgcucaugaaaagg

SEQ ID NO: 365318 - RNA, 19 nt, Artificial Sequence
  Description of Artificial Sequence: Synthetic oligonucleotide
ugcgugauccuuccaucgc

SEQ ID NO: 365319 - RNA, 19 nt, Artificial Sequence
  Description of Artificial Sequence: Synthetic oligonucleotide
uacauauagcaggaaggac

SEQ ID NO: 365320 - RNA, 19 nt, Artificial Sequence
  Description of Artificial Sequence: Synthetic oligonucleotide
gaggaaucgcucaugaaaa

SEQ ID NO: 365321 - RNA, 19 nt, Artificial Sequence
  Description of Artificial Sequence: Synthetic oligonucleotide
guacauauagcaggaagga

SEQ ID NO: 365322 - RNA, 19 nt, Artificial Sequence
  Description of Artificial Sequence: Synthetic oligonucleotide
acgaaagaccgccagguuu

SEQ ID NO: 365323 - RNA, 19 nt, Artificial Sequence
  Description of Artificial Sequence: Synthetic oligonucleotide
uccacgacgucuuguccag

SEQ ID NO: 365324 - RNA, 19 nt, Artificial Sequence
  Description of Artificial Sequence: Synthetic oligonucleotide
guaauuccaaaggggcacg

SEQ ID NO: 365325 - RNA, 19 nt, Artificial Sequence
  Description of Artificial Sequence: Synthetic oligonucleotide
auggucgcaaguuugcaua

SEQ ID NO: 365326 - RNA, 19 nt, Artificial Sequence
  Description of Artificial Sequence: Synthetic oligonucleotide
cacacccgcaaugaaauac

SEQ ID NO: 365327 - RNA, 19 nt, Artificial Sequence
  Description of Artificial Sequence: Synthetic oligonucleotide
ccuaauagcagauuucgga

SEQ ID NO: 365328 - RNA, 19 nt, Artificial Sequence
  Description of Artificial Sequence: Synthetic oligonucleotide
uccgccagcuagauaaguc

SEQ ID NO: 365329 - RNA, 19 nt, Artificial Sequence
  Description of Artificial Sequence: Synthetic oligonucleotide
ucaaguggcagugggcgca

SEQ ID NO: 365330 - RNA, 19 nt, Artificial Sequence
  Description of Artificial Sequence: Synthetic oligonucleotide
ucacgaaucuccgccagcu

SEQ ID NO: 365331 - RNA, 19 nt, Artificial Sequence
  Description of Artificial Sequence: Synthetic oligonucleotide
gaaacauaccuaugcugaa

SEQ ID NO: 365332 - RNA, 19 nt, Artificial Sequence
  Description of Artificial Sequence: Synthetic oligonucleotide
ucuguuggucgguuaagua

SEQ ID NO: 365333 - RNA, 19 nt, Artificial Sequence
  Description of Artificial Sequence: Synthetic oligonucleotide
guuugcauaugucaccucu

SEQ ID NO: 365334 - RNA, 19 nt, Artificial Sequence
  Description of Artificial Sequence: Synthetic oligonucleotide
uguugacauagacguacau

SEQ ID NO: 365335 - RNA, 19 nt, Artificial Sequence
  Description of Artificial Sequence: Synthetic oligonucleotide
cauauagcaggaaggacua

SEQ ID NO: 365336 - RNA, 19 nt, Artificial Sequence
  Description of Artificial Sequence: Synthetic oligonucleotide
aaguagggucacgaaucuc

SEQ ID NO: 365337 - RNA, 19 nt, Artificial Sequence
  Description of Artificial Sequence: Synthetic oligonucleotide
ugguuguuccacgacgucu

SEQ ID NO: 365338 - RNA, 19 nt, Artificial Sequence
  Description of Artificial Sequence: Synthetic oligonucleotide
gaagcugcgucgaaagaca

SEQ ID NO: 365339 - RNA, 19 nt, Artificial Sequence
  Description of Artificial Sequence: Synthetic oligonucleotide
acggccuaauagcagauuu

SEQ ID NO: 365340 - RNA, 19 nt, Artificial Sequence
  Description of Artificial Sequence: Synthetic oligonucleotide
ugguuguacccaaggugug

SEQ ID NO: 365341 - RNA, 19 nt, Artificial Sequence
  Description of Artificial Sequence: Synthetic oligonucleotide
guuaaguagggucacgaau

SEQ ID NO: 365342 - RNA, 19 nt, Artificial Sequence
  Description of Artificial Sequence: Synthetic oligonucleotide
aguacgguagcaggaauaa

SEQ ID NO: 365343 - RNA, 19 nt, Artificial Sequence
  Description of Artificial Sequence: Synthetic oligonucleotide
caaugcgaccucuguagug

SEQ ID NO: 365344 - RNA, 19 nt, Artificial Sequence
  Description of Artificial Sequence: Synthetic oligonucleotide
uguacccaaggugugcgcu

SEQ ID NO: 365345 - RNA, 19 nt, Artificial Sequence
  Description of Artificial Sequence: Synthetic oligonucleotide
gcugcgucgaaagacauac

SEQ ID NO: 365346 - RNA, 19 nt, Artificial Sequence
  Description of Artificial Sequence: Synthetic oligonucleotide
guagggucacgaaucuccg

SEQ ID NO: 365347 - RNA, 19 nt, Artificial Sequence
  Description of Artificial Sequence: Synthetic oligonucleotide
aaagaccgccagguuugcg

SEQ ID NO: 365348 - RNA, 19 nt, Artificial Sequence
  Description of Artificial Sequence: Synthetic oligonucleotide
uccaucgccggcucugugu

SEQ ID NO: 365349 - RNA, 19 nt, Artificial Sequence
  Description of Artificial Sequence: Synthetic oligonucleotide
aacgaaagaccgccagguu

SEQ ID NO: 365350 - RNA, 19 nt, Artificial Sequence
  Description of Artificial Sequence: Synthetic oligonucleotide
aaucgguguuugaagcacu

SEQ ID NO: 365351 - RNA, 19 nt, Artificial Sequence
  Description of Artificial Sequence: Synthetic oligonucleotide
ccggcguucaaucucuugg

SEQ ID NO: 365352 - RNA, 19 nt, Artificial Sequence
  Description of Artificial Sequence: Synthetic oligonucleotide
agugguuguuccacgacgu

SEQ ID NO: 365353 - RNA, 19 nt, Artificial Sequence
  Description of Artificial Sequence: Synthetic oligonucleotide
agggcuauuucgccggcgu

SEQ ID NO: 365354 - RNA, 19 nt, Artificial Sequence
  Description of Artificial Sequence: Synthetic oligonucleotide
aagggcuauuucgccggcg

SEQ ID NO: 365355 - RNA, 19 nt, Artificial Sequence
  Description of Artificial Sequence: Synthetic oligonucleotide
ucgcaaguuugcauauguc

SEQ ID NO: 365356 - RNA, 19 nt, Artificial Sequence
  Description of Artificial Sequence: Synthetic oligonucleotide
ucgguuaaguagggucacg

SEQ ID NO: 365357 - RNA, 19 nt, Artificial Sequence
  Description of Artificial Sequence: Synthetic oligonucleotide
augccgggacaaguguucc

SEQ ID NO: 365358 - RNA, 19 nt, Artificial Sequence
  Description of Artificial Sequence: Synthetic oligonucleotide
ggaagcugcgucgaaagac

SEQ ID NO: 365359 - RNA, 19 nt, Artificial Sequence
  Description of Artificial Sequence: Synthetic oligonucleotide
uguccgugcggacuuguuu

SEQ ID NO: 365360 - RNA, 19 nt, Artificial Sequence
  Description of Artificial Sequence: Synthetic oligonucleotide
guugacauagacguacaua

SEQ ID NO: 365361 - RNA, 19 nt, Artificial Sequence
  Description of Artificial Sequence: Synthetic oligonucleotide
guuggucgguuaaguaggg

SEQ ID NO: 365362 - RNA, 19 nt, Artificial Sequence
  Description of Artificial Sequence: Synthetic oligonucleotide
guagcaucaagaacgcaaa

SEQ ID NO: 365363 - RNA, 19 nt, Artificial Sequence
  Description of Artificial Sequence: Synthetic oligonucleotide
guuccacgacgucuugucc

SEQ ID NO: 365364 - RNA, 19 nt, Artificial Sequence
  Description of Artificial Sequence: Synthetic oligonucleotide
uuccgaggccauucaguug

SEQ ID NO: 365365 - RNA, 19 nt, Artificial Sequence
  Description of Artificial Sequence: Synthetic oligonucleotide
uaccuaugcugaagagcug

SEQ ID NO: 365366 - RNA, 19 nt, Artificial Sequence
  Description of Artificial Sequence: Synthetic oligonucleotide
uagggucacgaaucuccgc

SEQ ID NO: 365367 - RNA, 19 nt, Artificial Sequence
  Description of Artificial Sequence: Synthetic oligonucleotide
uagcagauuucggagugaa

SEQ ID NO: 365368 - RNA, 19 nt, Artificial Sequence
  Description of Artificial Sequence: Synthetic oligonucleotide
ucuccgccagcuagauaag

SEQ ID NO: 365369 - RNA, 19 nt, Artificial Sequence
  Description of Artificial Sequence: Synthetic oligonucleotide
guagugguuugcauccaug

SEQ ID NO: 365370 - RNA, 19 nt, Artificial Sequence
  Description of Artificial Sequence: Synthetic oligonucleotide
uuguacccaaggugugcgc

SEQ ID NO: 365371 - RNA, 19 nt, Artificial Sequence
  Description of Artificial Sequence: Synthetic oligonucleotide
uauuucgccggcguucaau

SEQ ID NO: 365372 - RNA, 19 nt, Artificial Sequence
  Description of Artificial Sequence: Synthetic oligonucleotide
cuaaggccccguuccuggg

SEQ ID NO: 365373 - RNA, 19 nt, Artificial Sequence
  Description of Artificial Sequence: Synthetic oligonucleotide
acgacgucuuguccaggag

SEQ ID NO: 365374 - RNA, 19 nt, Artificial Sequence
  Description of Artificial Sequence: Synthetic oligonucleotide
guagggaaacauaccuaug

SEQ ID NO: 365375 - RNA, 19 nt, Artificial Sequence
  Description of Artificial Sequence: Synthetic oligonucleotide
gugguuguacccaaggugu

SEQ ID NO: 365376 - RNA, 19 nt, Artificial Sequence
  Description of Artificial Sequence: Synthetic oligonucleotide
agacgaggccaaugggucu

SEQ ID NO: 365377 - RNA, 19 nt, Artificial Sequence
  Description of Artificial Sequence: Synthetic oligonucleotide
augcuaguguugcccaggu

SEQ ID NO: 365378 - RNA, 19 nt, Artificial Sequence
  Description of Artificial Sequence: Synthetic oligonucleotide
gucgcaaguuugcauaugu

SEQ ID NO: 365379 - RNA, 19 nt, Artificial Sequence
  Description of Artificial Sequence: Synthetic oligonucleotide
uggucgcaaguuugcauau

SEQ ID NO: 365380 - RNA, 19 nt, Artificial Sequence
  Description of Artificial Sequence: Synthetic oligonucleotide
auuuucgguccagggagcu

SEQ ID NO: 365381 - RNA, 19 nt, Artificial Sequence
  Description of Artificial Sequence: Synthetic oligonucleotide
ggcguucaaucucuuggag

SEQ ID NO: 365382 - RNA, 19 nt, Artificial Sequence
  Description of Artificial Sequence: Synthetic oligonucleotide
aagcggucauugauggaga

SEQ ID NO: 365383 - RNA, 19 nt, Artificial Sequence
  Description of Artificial Sequence: Synthetic oligonucleotide
agaaaacgaaagaccgcca

SEQ ID NO: 365384 - RNA, 19 nt, Artificial Sequence
  Description of Artificial Sequence: Synthetic oligonucleotide
gguguagacaagauacauc

SEQ ID NO: 365385 - RNA, 19 nt, Artificial Sequence
  Description of Artificial Sequence: Synthetic oligonucleotide
gucacgaaucuccgccagc

SEQ ID NO: 365386 - RNA, 19 nt, Artificial Sequence
  Description of Artificial Sequence: Synthetic oligonucleotide
augguguagacaagauaca

SEQ ID NO: 365387 - RNA, 19 nt, Artificial Sequence
  Description of Artificial Sequence: Synthetic oligonucleotide
cgaaagaccgccagguuug

SEQ ID NO: 365388 - RNA, 19 nt, Artificial Sequence
  Description of Artificial Sequence: Synthetic oligonucleotide
cuccaauauccuuugcaua

SEQ ID NO: 365389 - RNA, 19 nt, Artificial Sequence
  Description of Artificial Sequence: Synthetic oligonucleotide
caaguggcauauugcuuca

SEQ ID NO: 365390 - RNA, 19 nt, Artificial Sequence
  Description of Artificial Sequence: Synthetic oligonucleotide
acauuguacuugggaagca

SEQ ID NO: 365391 - RNA, 19 nt, Artificial Sequence
  Description of Artificial Sequence: Synthetic oligonucleotide
gaaagaccgccagguuugc

SEQ ID NO: 365392 - RNA, 19 nt, Artificial Sequence
  Description of Artificial Sequence: Synthetic oligonucleotide
ggucacgaaucuccgccag

SEQ ID NO: 365393 - RNA, 19 nt, Artificial Sequence
  Description of Artificial Sequence: Synthetic oligonucleotide
gaccgccagguuugcgggg

SEQ ID NO: 365394 - RNA, 19 nt, Artificial Sequence
  Description of Artificial Sequence: Synthetic oligonucleotide
ggucgguuaaguaggguca

SEQ ID NO: 365395 - RNA, 19 nt, Artificial Sequence
  Description of Artificial Sequence: Synthetic oligonucleotide
cacgacgucuuguccagga

SEQ ID NO: 365396 - RNA, 19 nt, Artificial Sequence
  Description of Artificial Sequence: Synthetic oligonucleotide
accaguacgguagcaggaa

SEQ ID NO: 365397 - RNA, 19 nt, Artificial Sequence
  Description of Artificial Sequence: Synthetic oligonucleotide
gccuaauagcagauuucgg

SEQ ID NO: 365398 - RNA, 19 nt, Artificial Sequence
  Description of Artificial Sequence: Synthetic oligonucleotide
gggcuguacugugaaagcc

SEQ ID NO: 365399 - RNA, 19 nt, Artificial Sequence
  Description of Artificial Sequence: Synthetic oligonucleotide
gcuguacugugaaagccug

SEQ ID NO: 365400 - RNA, 19 nt, Artificial Sequence
  Description of Artificial Sequence: Synthetic oligonucleotide
gucgguuaaguagggucac

SEQ ID NO: 365401 - RNA, 19 nt, Artificial Sequence
  Description of Artificial Sequence: Synthetic oligonucleotide
uuccaucgccggcucugug

SEQ ID NO: 365402 - RNA, 19 nt, Artificial Sequence
  Description of Artificial Sequence: Synthetic oligonucleotide
uuguaaccugagugaggaa

SEQ ID NO: 365403 - RNA, 19 nt, Artificial Sequence
  Description of Artificial Sequence: Synthetic oligonucleotide
ugucugcgugauccuucca

SEQ ID NO: 365404 - RNA, 19 nt, Artificial Sequence
  Description of Artificial Sequence: Synthetic oligonucleotide
caucugcgcagaacaucug

SEQ ID NO: 365405 - RNA, 19 nt, Artificial Sequence
  Description of Artificial Sequence: Synthetic oligonucleotide
gcgucgaaagacauacagc

SEQ ID NO: 365406 - RNA, 19 nt, Artificial Sequence
  Description of Artificial Sequence: Synthetic oligonucleotide
ugccgggacaaguguucca

SEQ ID NO: 365407 - RNA, 19 nt, Artificial Sequence
  Description of Artificial Sequence: Synthetic oligonucleotide
ccucaacccagucagcauc

SEQ ID NO: 365408 - RNA, 19 nt, Artificial Sequence
  Description of Artificial Sequence: Synthetic oligonucleotide
caguacgguagcaggaaua

SEQ ID NO: 365409 - RNA, 19 nt, Artificial Sequence
  Description of Artificial Sequence: Synthetic oligonucleotide
uuggucgguuaaguagggu

SEQ ID NO: 365410 - RNA, 19 nt, Artificial Sequence
  Description of Artificial Sequence: Synthetic oligonucleotide
ggccauucaguugagcaga

SEQ ID NO: 365411 - RNA, 19 nt, Artificial Sequence
  Description of Artificial Sequence: Synthetic oligonucleotide
aagcugcgucgaaagacau

SEQ ID NO: 365412 - RNA, 19 nt, Artificial Sequence
  Description of Artificial Sequence: Synthetic oligonucleotide
gcccguccaaguauuuucg

SEQ ID NO: 365413 - RNA, 19 nt, Artificial Sequence
  Description of Artificial Sequence: Synthetic oligonucleotide
gagccaaugccgggacaag

SEQ ID NO: 365414 - RNA, 19 nt, Artificial Sequence
  Description of Artificial Sequence: Synthetic oligonucleotide
ucacacccgcaaugaaaua

SEQ ID NO: 365415 - RNA, 19 nt, Artificial Sequence
  Description of Artificial Sequence: Synthetic oligonucleotide
agcggaggaaucgcucaug

SEQ ID NO: 365416 - RNA, 19 nt, Artificial Sequence
  Description of Artificial Sequence: Synthetic oligonucleotide
cucaucaacugguucgaau

SEQ ID NO: 365417 - RNA, 19 nt, Artificial Sequence
  Description of Artificial Sequence: Synthetic oligonucleotide
guguugacauagacguaca

SEQ ID NO: 365418 - RNA, 19 nt, Artificial Sequence
  Description of Artificial Sequence: Synthetic oligonucleotide
gcuugaaauagagggacua

SEQ ID NO: 365419 - RNA, 19 nt, Artificial Sequence
  Description of Artificial Sequence: Synthetic oligonucleotide
gagugaaauucgagucauc

SEQ ID NO: 365420 - RNA, 19 nt, Artificial Sequence
  Description of Artificial Sequence: Synthetic oligonucleotide
acguagggaaacauaccua

SEQ ID NO: 365421 - RNA, 19 nt, Artificial Sequence
  Description of Artificial Sequence: Synthetic oligonucleotide
gucugcgugauccuuccau

SEQ ID NO: 365422 - RNA, 19 nt, Artificial Sequence
  Description of Artificial Sequence: Synthetic oligonucleotide
guacgguagcaggaauaac

SEQ ID NO: 365423 - RNA, 19 nt, Artificial Sequence
  Description of Artificial Sequence: Synthetic oligonucleotide
cccgggcccucuuauauac

SEQ ID NO: 365424 - RNA, 19 nt, Artificial Sequence
  Description of Artificial Sequence: Synthetic oligonucleotide
ugauguccgugcggacuug

SEQ ID NO: 365425 - RNA, 19 nt, Artificial Sequence
  Description of Artificial Sequence: Synthetic oligonucleotide
ggcuauuucgccggcguuc

SEQ ID NO: 365426 - RNA, 19 nt, Artificial Sequence
  Description of Artificial Sequence: Synthetic oligonucleotide
ggaauacggcaggaagagc

SEQ ID NO: 365427 - RNA, 19 nt, Artificial Sequence
  Description of Artificial Sequence: Synthetic oligonucleotide
ugcuggccaacaugacgua

SEQ ID NO: 365428 - RNA, 19 nt, Artificial Sequence
  Description of Artificial Sequence: Synthetic oligonucleotide
ggucuguuggucgguuaag

SEQ ID NO: 365429 - RNA, 19 nt, Artificial Sequence
  Description of Artificial Sequence: Synthetic oligonucleotide
cguaccaguacgguagcag

SEQ ID NO: 365430 - RNA, 19 nt, Artificial Sequence
  Description of Artificial Sequence: Synthetic oligonucleotide
aucgccggcucugugugaa

SEQ ID NO: 365431 - RNA, 19 nt, Artificial Sequence
  Description of Artificial Sequence: Synthetic oligonucleotide
guccgugcggacuuguuuu

SEQ ID NO: 365432 - RNA, 19 nt, Artificial Sequence
  Description of Artificial Sequence: Synthetic oligonucleotide
gcuauuucgccggcguuca

SEQ ID NO: 365433 - RNA, 19 nt, Artificial Sequence
  Description of Artificial Sequence: Synthetic oligonucleotide
ggacuagaugauauagugu

SEQ ID NO: 365434 - RNA, 19 nt, Artificial Sequence
  Description of Artificial Sequence: Synthetic oligonucleotide
gcguucaaucucuuggagu

SEQ ID NO: 365435 - RNA, 19 nt, Artificial Sequence
  Description of Artificial Sequence: Synthetic oligonucleotide
gcagccuuuuggggcaccg

SEQ ID NO: 365436 - RNA, 19 nt, Artificial Sequence
  Description of Artificial Sequence: Synthetic oligonucleotide
gucuguuggucgguuaagu

SEQ ID NO: 365437 - RNA, 19 nt, Artificial Sequence
  Description of Artificial Sequence: Synthetic oligonucleotide
ccaucgccggcucugugug

SEQ ID NO: 365438 - RNA, 19 nt, Artificial Sequence
  Description of Artificial Sequence: Synthetic oligonucleotide
gcaccgggcuaccagcuuc

SEQ ID NO: 365439 - RNA, 19 nt, Artificial Sequence
  Description of Artificial Sequence: Synthetic oligonucleotide
cuaguguugcccaggucuu

SEQ ID NO: 365440 - RNA, 19 nt, Artificial Sequence
  Description of Artificial Sequence: Synthetic oligonucleotide
acguaccaguacgguagca

SEQ ID NO: 365441 - RNA, 19 nt, Artificial Sequence
  Description of Artificial Sequence: Synthetic oligonucleotide
cgccagcuagauaagucug

SEQ ID NO: 365442 - RNA, 19 nt, Artificial Sequence
  Description of Artificial Sequence: Synthetic oligonucleotide
gcuagauaagucuguccau

SEQ ID NO: 365443 - RNA, 19 nt, Artificial Sequence
  Description of Artificial Sequence: Synthetic oligonucleotide
ggcuugugagcuccucaga

SEQ ID NO: 365444 - RNA, 19 nt, Artificial Sequence
  Description of Artificial Sequence: Synthetic oligonucleotide
ggcuguacugugaaagccu

SEQ ID NO: 365445 - RNA, 19 nt, Artificial Sequence
  Description of Artificial Sequence: Synthetic oligonucleotide
cguagggaaacauaccuau

SEQ ID NO: 365446 - RNA, 19 nt, Artificial Sequence
  Description of Artificial Sequence: Synthetic oligonucleotide
cugcgucgaaagacauaca

SEQ ID NO: 365447 - RNA, 19 nt, Artificial Sequence
  Description of Artificial Sequence: Synthetic oligonucleotide
aguuuccgcugccgucuua

SEQ ID NO: 365448 - RNA, 19 nt, Artificial Sequence
  Description of Artificial Sequence: Synthetic oligonucleotide
cugauguccgugcggacuu

SEQ ID NO: 365449 - RNA, 19 nt, Artificial Sequence
  Description of Artificial Sequence: Synthetic oligonucleotide
acgaggccaaugggucuug

SEQ ID NO: 365450 - RNA, 19 nt, Artificial Sequence
  Description of Artificial Sequence: Synthetic oligonucleotide
gccggcguucaaucucuug

SEQ ID NO: 365451 - RNA, 19 nt, Artificial Sequence
  Description of Artificial Sequence: Synthetic oligonucleotide
cugguucgaauggucgcaa

SEQ ID NO: 365452 - RNA, 19 nt, Artificial Sequence
  Description of Artificial Sequence: Synthetic oligonucleotide
cggccuaauagcagauuuc

SEQ ID NO: 365453 - RNA, 19 nt, Artificial Sequence
  Description of Artificial Sequence: Synthetic oligonucleotide
uuggggcaccgggcuacca

SEQ ID NO: 365454 - RNA, 19 nt, Artificial Sequence
  Description of Artificial Sequence: Synthetic oligonucleotide
gacgaggccaaugggucuu

SEQ ID NO: 365455 - RNA, 19 nt, Artificial Sequence
  Description of Artificial Sequence: Synthetic oligonucleotide
caguagcaucaagaacgca

SEQ ID NO: 365456 - RNA, 19 nt, Artificial Sequence
  Description of Artificial Sequence: Synthetic oligonucleotide
agcugcgucgaaagacaua

SEQ ID NO: 365457 - RNA, 19 nt, Artificial Sequence
  Description of Artificial Sequence: Synthetic oligonucleotide
gcgaauucaugcaguggaa

SEQ ID NO: 365458 - RNA, 19 nt, Artificial Sequence
  Description of Artificial Sequence: Synthetic oligonucleotide
ccagcuugaagggacuaaa

SEQ ID NO: 365459 - RNA, 19 nt, Artificial Sequence
  Description of Artificial Sequence: Synthetic oligonucleotide
cccguuguccaguuguugu

SEQ ID NO: 365460 - RNA, 19 nt, Artificial Sequence
  Description of Artificial Sequence: Synthetic oligonucleotide
ccgccagcuagauaagucu

SEQ ID NO: 365461 - RNA, 19 nt, Artificial Sequence
  Description of Artificial Sequence: Synthetic oligonucleotide
cacgaaucuccgccagcua

SEQ ID NO: 365462 - RNA, 19 nt, Artificial Sequence
  Description of Artificial Sequence: Synthetic oligonucleotide
cggcuucccuggcugagcc

SEQ ID NO: 365463 - RNA, 19 nt, Artificial Sequence
  Description of Artificial Sequence: Synthetic oligonucleotide
caucgccggcucuguguga

SEQ ID NO: 365464 - RNA, 19 nt, Artificial Sequence
  Description of Artificial Sequence: Synthetic oligonucleotide
ggcccuguuucacuuccgu

SEQ ID NO: 365465 - RNA, 19 nt, Artificial Sequence
  Description of Artificial Sequence: Synthetic oligonucleotide
cgguuaaguagggucacga

SEQ ID NO: 365466 - RNA, 19 nt, Artificial Sequence
  Description of Artificial Sequence: Synthetic oligonucleotide
gccagcuagauaagucugu

SEQ ID NO: 365467 - RNA, 19 nt, Artificial Sequence
  Description of Artificial Sequence: Synthetic oligonucleotide
cuauuucgccggcguucaa

SEQ ID NO: 365468 - RNA, 19 nt, Artificial Sequence
  Description of Artificial Sequence: Synthetic oligonucleotide
aggccccguuccuggggaa

SEQ ID NO: 365469 - RNA, 19 nt, Artificial Sequence
  Description of Artificial Sequence: Synthetic oligonucleotide
gacggccuaauagcagauu

SEQ ID NO: 365470 - RNA, 19 nt, Artificial Sequence
  Description of Artificial Sequence: Synthetic oligonucleotide
cggcguucaaucucuugga

SEQ ID NO: 365471 - RNA, 19 nt, Artificial Sequence
  Description of Artificial Sequence: Synthetic oligonucleotide
auguccgugcggacuuguu

SEQ ID NO: 365472 - RNA, 19 nt, Artificial Sequence
  Description of Artificial Sequence: Synthetic oligonucleotide
ccguuguccaguuguugua

SEQ ID NO: 365473 - RNA, 19 nt, Artificial Sequence
  Description of Artificial Sequence: Synthetic oligonucleotide
ggcaaguggcauauugcuu

SEQ ID NO: 365474 - RNA, 19 nt, Artificial Sequence
  Description of Artificial Sequence: Synthetic oligonucleotide
ccugauguccgugcggacu

SEQ ID NO: 365475 - RNA, 19 nt, Artificial Sequence
  Description of Artificial Sequence: Synthetic oligonucleotide
ccaaugcgaccucuguagu

SEQ ID NO: 365476 - RNA, 19 nt, Artificial Sequence
  Description of Artificial Sequence: Synthetic oligonucleotide
cuccgccagcuagauaagu

SEQ ID NO: 365477 - RNA, 19 nt, Artificial Sequence
  Description of Artificial Sequence: Synthetic oligonucleotide
ccacgacgucuuguccagg

SEQ ID NO: 365478 - RNA, 19 nt, Artificial Sequence
  Description of Artificial Sequence: Synthetic oligonucleotide
cagguuugcggggucuguu

SEQ ID NO: 365479 - RNA, 19 nt, Artificial Sequence
  Description of Artificial Sequence: Synthetic oligonucleotide
gcccgggcccucuuauaua

SEQ ID NO: 365480 - RNA, 19 nt, Artificial Sequence
  Description of Artificial Sequence: Synthetic oligonucleotide
ccaguacgguagcaggaau

SEQ ID NO: 365481 - RNA, 19 nt, Artificial Sequence
  Description of Artificial Sequence: Synthetic oligonucleotide
ccgggcuaccagcuuccga

SEQ ID NO: 365482 - RNA, 19 nt, Artificial Sequence
  Description of Artificial Sequence: Synthetic oligonucleotide
ccgggcccucuuauauaca

SEQ ID NO: 365483 - RNA, 19 nt, Artificial Sequence
  Description of Artificial Sequence: Synthetic oligonucleotide
cagcccguccaaguauuuu

SEQ ID NO: 365484 - RNA, 19 nt, Artificial Sequence
  Description of Artificial Sequence: Synthetic oligonucleotide
gggcuauuucgccggcguu

SEQ ID NO: 365485 - RNA, 19 nt, Artificial Sequence
  Description of Artificial Sequence: Synthetic oligonucleotide
ccgccagguuugcgggguc

SEQ ID NO: 365486 - RNA, 19 nt, Artificial Sequence
  Description of Artificial Sequence: Synthetic oligonucleotide
gcggggucuguuggucggu

SEQ ID NO: 365487 - RNA, 19 nt, Artificial Sequence
  Description of Artificial Sequence: Synthetic oligonucleotide
cggggucuguuggucgguu

SEQ ID NO: 365488 - RNA, 19 nt, Artificial Sequence
  Description of Artificial Sequence: Synthetic oligonucleotide
cgccggcguucaaucucuu

SEQ ID NO: 365489 - RNA, 19 nt, Artificial Sequence
  Description of Artificial Sequence: Synthetic oligonucleotide
aacaacuuugaccugaguc

SEQ ID NO: 365490 - RNA, 19 nt, Artificial Sequence
  Description of Artificial Sequence: Synthetic oligonucleotide
uuauauucagccaacagca

SEQ ID NO: 365491 - RNA, 19 nt, Artificial Sequence
  Description of Artificial Sequence: Synthetic oligonucleotide
uauaaguacgccaaggccc

SEQ ID NO: 365492 - RNA, 19 nt, Artificial Sequence
  Description of Artificial Sequence: Synthetic oligonucleotide
auauaaguacgccaaggcc

SEQ ID NO: 365493 - RNA, 19 nt, Artificial Sequence
  Description of Artificial Sequence: Synthetic oligonucleotide
uauauaaguacgccaaggc

SEQ ID NO: 365494 - RNA, 19 nt, Artificial Sequence
  Description of Artificial Sequence: Synthetic oligonucleotide
aguaacuuaacaccaauca

SEQ ID NO: 365495 - RNA, 19 nt, Artificial Sequence
  Description of Artificial Sequence: Synthetic oligonucleotide
agauaagaaccuuggauac

SEQ ID NO: 365496 - RNA, 19 nt, Artificial Sequence
  Description of Artificial Sequence: Synthetic oligonucleotide
ucauauauaaguacgccaa

SEQ ID NO: 365497 - RNA, 19 nt, Artificial Sequence
  Description of Artificial Sequence: Synthetic oligonucleotide
ucuagguucagagaagacg

SEQ ID NO: 365498 - RNA, 19 nt, Artificial Sequence
  Description of Artificial Sequence: Synthetic oligonucleotide
agauuuggauuuuggacgc

SEQ ID NO: 365499 - RNA, 19 nt, Artificial Sequence
  Description of Artificial Sequence: Synthetic oligonucleotide
aguuaagugauuaaucuuc

SEQ ID NO: 365500 - RNA, 19 nt, Artificial Sequence
  Description of Artificial Sequence: Synthetic oligonucleotide
aguguaaacuucugguccc

SEQ ID NO: 365501 - RNA, 19 nt, Artificial Sequence
  Description of Artificial Sequence: Synthetic oligonucleotide
aagucaucgguuuucagga

SEQ ID NO: 365502 - RNA, 19 nt, Artificial Sequence
  Description of Artificial Sequence: Synthetic oligonucleotide
gauggggacuauuaaagag

SEQ ID NO: 365503 - RNA, 19 nt, Artificial Sequence
  Description of Artificial Sequence: Synthetic oligonucleotide
aauagagacacaugccaug

SEQ ID NO: 365504 - RNA, 19 nt, Artificial Sequence
  Description of Artificial Sequence: Synthetic oligonucleotide
acaguuaagugauuaaucu

SEQ ID NO: 365505 - RNA, 19 nt, Artificial Sequence
  Description of Artificial Sequence: Synthetic oligonucleotide
gaaauuuccaguucacgug

SEQ ID NO: 365506 - RNA, 19 nt, Artificial Sequence
  Description of Artificial Sequence: Synthetic oligonucleotide
uucauauauaaguacgcca

SEQ ID NO: 365507 - RNA, 19 nt, Artificial Sequence
  Description of Artificial Sequence: Synthetic oligonucleotide
auuucauauauaaguacgc

SEQ ID NO: 365508 - RNA, 19 nt, Artificial Sequence
  Description of Artificial Sequence: Synthetic oligonucleotide
uagauaagaaccuuggaua

SEQ ID NO: 365509 - RNA, 19 nt, Artificial Sequence
  Description of Artificial Sequence: Synthetic oligonucleotide
ucuguagauaagaaccuug

SEQ ID NO: 365510 - RNA, 19 nt, Artificial Sequence
  Description of Artificial Sequence: Synthetic oligonucleotide
auuugcaauggauuuccac

SEQ ID NO: 365511 - RNA, 19 nt, Artificial Sequence
  Description of Artificial Sequence: Synthetic oligonucleotide
uguccuaucuccauacccc

SEQ ID NO: 365512 - RNA, 19 nt, Artificial Sequence
  Description of Artificial Sequence: Synthetic oligonucleotide
uguaucuagcaacaaauua

SEQ ID NO: 365513 - RNA, 19 nt, Artificial Sequence
  Description of Artificial Sequence: Synthetic oligonucleotide
uacuucgucauuuacaaua

SEQ ID NO: 365514 - RNA, 19 nt, Artificial Sequence
  Description of Artificial Sequence: Synthetic oligonucleotide
uuuagccacaucuucacgu

SEQ ID NO: 365515 - RNA, 19 nt, Artificial Sequence
  Description of Artificial Sequence: Synthetic oligonucleotide
cacuccaacaacuuugacc

SEQ ID NO: 365516 - RNA, 19 nt, Artificial Sequence
  Description of Artificial Sequence: Synthetic oligonucleotide
cuuggcaccccauaagacg

SEQ ID NO: 365517 - RNA, 19 nt, Artificial Sequence
  Description of Artificial Sequence: Synthetic oligonucleotide
aggaaugucaagcucauau

SEQ ID NO: 365518 - RNA, 19 nt, Artificial Sequence
  Description of Artificial Sequence: Synthetic oligonucleotide
acuauuaaagagugguucu

SEQ ID NO: 365519 - RNA, 19 nt, Artificial Sequence
  Description of Artificial Sequence: Synthetic oligonucleotide
gaugcgugcaucaaccacg

SEQ ID NO: 365520 - RNA, 19 nt, Artificial Sequence
  Description of Artificial Sequence: Synthetic oligonucleotide
gaaugucaagcucauauuc

SEQ ID NO: 365521 - RNA, 19 nt, Artificial Sequence
  Description of Artificial Sequence: Synthetic oligonucleotide
uccagggacauucucuagg

SEQ ID NO: 365522 - RNA, 19 nt, Artificial Sequence
  Description of Artificial Sequence: Synthetic oligonucleotide
cuuuugaccguccagggac

SEQ ID NO: 365523 - RNA, 19 nt, Artificial Sequence
  Description of Artificial Sequence: Synthetic oligonucleotide
cuguagauaagaaccuugg

SEQ ID NO: 365524 - RNA, 19 nt, Artificial Sequence
  Description of Artificial Sequence: Synthetic oligonucleotide
auagagacacaugccaugc

SEQ ID NO: 365525 - RNA, 19 nt, Artificial Sequence
  Description of Artificial Sequence: Synthetic oligonucleotide
auaagacggacuuccaaag

SEQ ID NO: 365526 - RNA, 19 nt, Artificial Sequence
  Description of Artificial Sequence: Synthetic oligonucleotide
agagaugcgugcaucaacc

SEQ ID NO: 365527 - RNA, 19 nt, Artificial Sequence
  Description of Artificial Sequence: Synthetic oligonucleotide
acagagaucgccaaucacg

SEQ ID NO: 365528 - RNA, 19 nt, Artificial Sequence
  Description of Artificial Sequence: Synthetic oligonucleotide
uucugcguggauaucacug

SEQ ID NO: 365529 - RNA, 19 nt, Artificial Sequence
  Description of Artificial Sequence: Synthetic oligonucleotide
uucgcuuggacuccauccg

SEQ ID NO: 365530 - RNA, 19 nt, Artificial Sequence
  Description of Artificial Sequence: Synthetic oligonucleotide
guagucaaaaucucggaac

SEQ ID NO: 365531 - RNA, 19 nt, Artificial Sequence
  Description of Artificial Sequence: Synthetic oligonucleotide
uguagucaaaaucucggaa

SEQ ID NO: 365532 - RNA, 19 nt, Artificial Sequence
  Description of Artificial Sequence: Synthetic oligonucleotide
gauaucacugcucugccga

SEQ ID NO: 365533 - RNA, 19 nt, Artificial Sequence
  Description of Artificial Sequence: Synthetic oligonucleotide
ucuaaccucagaaauuuua

SEQ ID NO: 365534 - RNA, 19 nt, Artificial Sequence
  Description of Artificial Sequence: Synthetic oligonucleotide
cuauaaacaauuuugugcu

SEQ ID NO: 365535 - RNA, 19 nt, Artificial Sequence
  Description of Artificial Sequence: Synthetic oligonucleotide
agcuaguuugaccaaccac

SEQ ID NO: 365536 - RNA, 19 nt, Artificial Sequence
  Description of Artificial Sequence: Synthetic oligonucleotide
aaaaugugcuuguccuauc

SEQ ID NO: 365537 - RNA, 19 nt, Artificial Sequence
  Description of Artificial Sequence: Synthetic oligonucleotide
auauuguaacccaagaacu

SEQ ID NO: 365538 - RNA, 19 nt, Artificial Sequence
  Description of Artificial Sequence: Synthetic oligonucleotide
aaucacgccaauaaacuga

SEQ ID NO: 365539 - RNA, 19 nt, Artificial Sequence
  Description of Artificial Sequence: Synthetic oligonucleotide
uuccacuuaaggcaggccu

SEQ ID NO: 365540 - RNA, 19 nt, Artificial Sequence
  Description of Artificial Sequence: Synthetic oligonucleotide
acaaaguacccugugguuc

SEQ ID NO: 365541 - RNA, 19 nt, Artificial Sequence
  Description of Artificial Sequence: Synthetic oligonucleotide
aaacuucuggucccacgac

SEQ ID NO: 365542 - RNA, 19 nt, Artificial Sequence
  Description of Artificial Sequence: Synthetic oligonucleotide
cucuauaaacaauuuugug

SEQ ID NO: 365543 - RNA, 19 nt, Artificial Sequence
  Description of Artificial Sequence: Synthetic oligonucleotide
aauuugguuacuguagaau

SEQ ID NO: 365544 - RNA, 19 nt, Artificial Sequence
  Description of Artificial Sequence: Synthetic oligonucleotide
gauugaacugaaaccuugg

SEQ ID NO: 365545 - RNA, 19 nt, Artificial Sequence
  Description of Artificial Sequence: Synthetic oligonucleotide
auaaguacgccaaggcccc

SEQ ID NO: 365546 - RNA, 19 nt, Artificial Sequence
  Description of Artificial Sequence: Synthetic oligonucleotide
uguaacccaagaacuacac

SEQ ID NO: 365547 - RNA, 19 nt, Artificial Sequence
  Description of Artificial Sequence: Synthetic oligonucleotide
acgugaccugucuaguucc

SEQ ID NO: 365548 - RNA, 19 nt, Artificial Sequence
  Description of Artificial Sequence: Synthetic oligonucleotide
uaucuagcuucaaaacagc

SEQ ID NO: 365549 - RNA, 19 nt, Artificial Sequence
  Description of Artificial Sequence: Synthetic oligonucleotide
agaugcgugcaucaaccac

SEQ ID NO: 365550 - RNA, 19 nt, Artificial Sequence
  Description of Artificial Sequence: Synthetic oligonucleotide
aaacucucacuucggaaga

SEQ ID NO: 365551 - RNA, 19 nt, Artificial Sequence
  Description of Artificial Sequence: Synthetic oligonucleotide
guucacucagccuaaacuc

SEQ ID NO: 365552 - RNA, 19 nt, Artificial Sequence
  Description of Artificial Sequence: Synthetic oligonucleotide
cagaaugauuuacuguggg

SEQ ID NO: 365553 - RNA, 19 nt, Artificial Sequence
  Description of Artificial Sequence: Synthetic oligonucleotide
aaaggguaaccucugcaaa

SEQ ID NO: 365554 - RNA, 19 nt, Artificial Sequence
  Description of Artificial Sequence: Synthetic oligonucleotide
acuaacaucuucccguccu

SEQ ID NO: 365555 - RNA, 19 nt, Artificial Sequence
  Description of Artificial Sequence: Synthetic oligonucleotide
aagacggacuuccaaagua

SEQ ID NO: 365556 - RNA, 19 nt, Artificial Sequence
  Description of Artificial Sequence: Synthetic oligonucleotide
uaccgguuagugcugcugg

SEQ ID NO: 365557 - RNA, 19 nt, Artificial Sequence
  Description of Artificial Sequence: Synthetic oligonucleotide
agcaacaaauuauccagcu

SEQ ID NO: 365558 - RNA, 19 nt, Artificial Sequence
  Description of Artificial Sequence: Synthetic oligonucleotide
aagggcgcuguuuucaaga

SEQ ID NO: 365559 - RNA, 19 nt, Artificial Sequence
  Description of Artificial Sequence: Synthetic oligonucleotide
cuaguuugaccaaccacag

SEQ ID NO: 365560 - RNA, 19 nt, Artificial Sequence
  Description of Artificial Sequence: Synthetic oligonucleotide
cagagaucgccaaucacgc

SEQ ID NO: 365561 - RNA, 19 nt, Artificial Sequence
  Description of Artificial Sequence: Synthetic oligonucleotide
aaaccucggaagcuccuag

SEQ ID NO: 365562 - RNA, 19 nt, Artificial Sequence
  Description of Artificial Sequence: Synthetic oligonucleotide
aacuucuggucccacgacu

SEQ ID NO: 365563 - RNA, 19 nt, Artificial Sequence
  Description of Artificial Sequence: Synthetic oligonucleotide
gagaucgccaaucacgcca

SEQ ID NO: 365564 - RNA, 19 nt, Artificial Sequence
  Description of Artificial Sequence: Synthetic oligonucleotide
uuguaacccaagaacuaca

SEQ ID NO: 365565 - RNA, 19 nt, Artificial Sequence
  Description of Artificial Sequence: Synthetic oligonucleotide
aucuagcaacaaauuaucc

SEQ ID NO: 365566 - RNA, 19 nt, Artificial Sequence
  Description of Artificial Sequence: Synthetic oligonucleotide
ucgccaaucacgccaauaa

SEQ ID NO: 365567 - RNA, 19 nt, Artificial Sequence
  Description of Artificial Sequence: Synthetic oligonucleotide
ucugcguggauaucacugc

SEQ ID NO: 365568 - RNA, 19 nt, Artificial Sequence
  Description of Artificial Sequence: Synthetic oligonucleotide
gaauaggugcuucugaggu

SEQ ID NO: 365569 - RNA, 19 nt, Artificial Sequence
  Description of Artificial Sequence: Synthetic oligonucleotide
agaaugauuuacuguggga

SEQ ID NO: 365570 - RNA, 19 nt, Artificial Sequence
  Description of Artificial Sequence: Synthetic oligonucleotide
guuaagugauuaaucuucc

SEQ ID NO: 365571 - RNA, 19 nt, Artificial Sequence
  Description of Artificial Sequence: Synthetic oligonucleotide
guucacgugaccugucuag

SEQ ID NO: 365572 - RNA, 19 nt, Artificial Sequence
  Description of Artificial Sequence: Synthetic oligonucleotide
aagacgcacgugguggggc

SEQ ID NO: 365573 - RNA, 19 nt, Artificial Sequence
  Description of Artificial Sequence: Synthetic oligonucleotide
uuaagugauuaaucuuccu

SEQ ID NO: 365574 - RNA, 19 nt, Artificial Sequence
  Description of Artificial Sequence: Synthetic oligonucleotide
aacugacguugcuuuugac

SEQ ID NO: 365575 - RNA, 19 nt, Artificial Sequence
  Description of Artificial Sequence: Synthetic oligonucleotide
uggauaucacugcucugcc

SEQ ID NO: 365576 - RNA, 19 nt, Artificial Sequence
  Description of Artificial Sequence: Synthetic oligonucleotide
cuauacugguucugcgugg

SEQ ID NO: 365577 - RNA, 19 nt, Artificial Sequence
  Description of Artificial Sequence: Synthetic oligonucleotide
aauggauuuccacggccaa

SEQ ID NO: 365578 - RNA, 19 nt, Artificial Sequence
  Description of Artificial Sequence: Synthetic oligonucleotide
uuauagcaaacauuucauu

SEQ ID NO: 365579 - RNA, 19 nt, Artificial Sequence
  Description of Artificial Sequence: Synthetic oligonucleotide
aauuuccaguucacgugac

SEQ ID NO: 365580 - RNA, 19 nt, Artificial Sequence
  Description of Artificial Sequence: Synthetic oligonucleotide
uuggacgcauguuacuucu

SEQ ID NO: 365581 - RNA, 19 nt, Artificial Sequence
  Description of Artificial Sequence: Synthetic oligonucleotide
aagaaccuuggauaccuua

SEQ ID NO: 365582 - RNA, 19 nt, Artificial Sequence
  Description of Artificial Sequence: Synthetic oligonucleotide
uaagacggacuuccaaagu

SEQ ID NO: 365583 - RNA, 19 nt, Artificial Sequence
  Description of Artificial Sequence: Synthetic oligonucleotide
ugcuauacugguucugcgu

SEQ ID NO: 365584 - RNA, 19 nt, Artificial Sequence
  Description of Artificial Sequence: Synthetic oligonucleotide
agagaucgccaaucacgcc

SEQ ID NO: 365585 - RNA, 19 nt, Artificial Sequence
  Description of Artificial Sequence: Synthetic oligonucleotide
aaguaccgguuagugcugc

SEQ ID NO: 365586 - RNA, 19 nt, Artificial Sequence
  Description of Artificial Sequence: Synthetic oligonucleotide
aggagauugcggcuacuuc

SEQ ID NO: 365587 - RNA, 19 nt, Artificial Sequence
  Description of Artificial Sequence: Synthetic oligonucleotide
ugaccaaccacaguauuau

SEQ ID NO: 365588 - RNA, 19 nt, Artificial Sequence
  Description of Artificial Sequence: Synthetic oligonucleotide
auaucuuggcaccccauaa

SEQ ID NO: 365589 - RNA, 19 nt, Artificial Sequence
  Description of Artificial Sequence: Synthetic oligonucleotide
agauggggacuauuaaaga

SEQ ID NO: 365590 - RNA, 19 nt, Artificial Sequence
  Description of Artificial Sequence: Synthetic oligonucleotide
agacggacuuccaaaguac

SEQ ID NO: 365591 - RNA, 19 nt, Artificial Sequence
  Description of Artificial Sequence: Synthetic oligonucleotide
uggagucagaauaggugcu

SEQ ID NO: 365592 - RNA, 19 nt, Artificial Sequence
  Description of Artificial Sequence: Synthetic oligonucleotide
cagguucaagaucaaaguc

SEQ ID NO: 365593 - RNA, 19 nt, Artificial Sequence
  Description of Artificial Sequence: Synthetic oligonucleotide
gagaagguauuuaacagua

SEQ ID NO: 365594 - RNA, 19 nt, Artificial Sequence
  Description of Artificial Sequence: Synthetic oligonucleotide
acgccaauaaacugaaauu

SEQ ID NO: 365595 - RNA, 19 nt, Artificial Sequence
  Description of Artificial Sequence: Synthetic oligonucleotide
cucacuagccuuccccacg

SEQ ID NO: 365596 - RNA, 19 nt, Artificial Sequence
  Description of Artificial Sequence: Synthetic oligonucleotide
uugcuuuuacuaguucugc

SEQ ID NO: 365597 - RNA, 19 nt, Artificial Sequence
  Description of Artificial Sequence: Synthetic oligonucleotide
guacuuuagccacaucuuc

SEQ ID NO: 365598 - RNA, 19 nt, Artificial Sequence
  Description of Artificial Sequence: Synthetic oligonucleotide
gcuaguuugaccaaccaca

SEQ ID NO: 365599 - RNA, 19 nt, Artificial Sequence
  Description of Artificial Sequence: Synthetic oligonucleotide
uccaguaacuuaacaccaa

SEQ ID NO: 365600 - RNA, 19 nt, Artificial Sequence
  Description of Artificial Sequence: Synthetic oligonucleotide
ugucuacuucgucucgagc

SEQ ID NO: 365601 - RNA, 19 nt, Artificial Sequence
  Description of Artificial Sequence: Synthetic oligonucleotide
ugcgucuuucucaccagcu

SEQ ID NO: 365602 - RNA, 19 nt, Artificial Sequence
  Description of Artificial Sequence: Synthetic oligonucleotide
cucauauucagauuuggau

SEQ ID NO: 365603 - RNA, 19 nt, Artificial Sequence
  Description of Artificial Sequence: Synthetic oligonucleotide
ugguucugcguggauauca

SEQ ID NO: 365604 - RNA, 19 nt, Artificial Sequence
  Description of Artificial Sequence: Synthetic oligonucleotide
uuggacagugugcuauacu

SEQ ID NO: 365605 - RNA, 19 nt, Artificial Sequence
  Description of Artificial Sequence: Synthetic oligonucleotide
ugguucucgagguggaguc

SEQ ID NO: 365606 - RNA, 19 nt, Artificial Sequence
  Description of Artificial Sequence: Synthetic oligonucleotide
ugacgcuauucacagucuc

SEQ ID NO: 365607 - RNA, 19 nt, Artificial Sequence
  Description of Artificial Sequence: Synthetic oligonucleotide
auagcucgucucacuagcc

SEQ ID NO: 365608 - RNA, 19 nt, Artificial Sequence
  Description of Artificial Sequence: Synthetic oligonucleotide
acaugcugcauaaaauaca

SEQ ID NO: 365609 - RNA, 19 nt, Artificial Sequence
  Description of Artificial Sequence: Synthetic oligonucleotide
uccucugaugguugguaca

SEQ ID NO: 365610 - RNA, 19 nt, Artificial Sequence
  Description of Artificial Sequence: Synthetic oligonucleotide
uacugugggaauagcucgu

SEQ ID NO: 365611 - RNA, 19 nt, Artificial Sequence
  Description of Artificial Sequence: Synthetic oligonucleotide
gcuauacugguucugcgug

SEQ ID NO: 365612 - RNA, 19 nt, Artificial Sequence
  Description of Artificial Sequence: Synthetic oligonucleotide
uacuaacaucuucccgucc

SEQ ID NO: 365613 - RNA, 19 nt, Artificial Sequence
  Description of Artificial Sequence: Synthetic oligonucleotide
auauucauuugaggagcuc

SEQ ID NO: 365614 - RNA, 19 nt, Artificial Sequence
  Description of Artificial Sequence: Synthetic oligonucleotide
gauaucuuggcaccccaua

SEQ ID NO: 365615 - RNA, 19 nt, Artificial Sequence
  Description of Artificial Sequence: Synthetic oligonucleotide
gagacacaugccaugccgc

SEQ ID NO: 365616 - RNA, 19 nt, Artificial Sequence
  Description of Artificial Sequence: Synthetic oligonucleotide
cacuccagucaguuagccg

SEQ ID NO: 365617 - RNA, 19 nt, Artificial Sequence
  Description of Artificial Sequence: Synthetic oligonucleotide
ucgucucgagccacaaugu

SEQ ID NO: 365618 - RNA, 19 nt, Artificial Sequence
  Description of Artificial Sequence: Synthetic oligonucleotide
gacggacuuccaaaguacc

SEQ ID NO: 365619 - RNA, 19 nt, Artificial Sequence
  Description of Artificial Sequence: Synthetic oligonucleotide
uccucucggacacuccaac

SEQ ID NO: 365620 - RNA, 19 nt, Artificial Sequence
  Description of Artificial Sequence: Synthetic oligonucleotide
aaccucggaagcuccuagu

SEQ ID NO: 365621 - RNA, 19 nt, Artificial Sequence
  Description of Artificial Sequence: Synthetic oligonucleotide
cacgacugauuggaaauag

SEQ ID NO: 365622 - RNA, 19 nt, Artificial Sequence
  Description of Artificial Sequence: Synthetic oligonucleotide
acggacuuccaaaguaccg

SEQ ID NO: 365623 - RNA, 19 nt, Artificial Sequence
  Description of Artificial Sequence: Synthetic oligonucleotide
uucaggagauugcggcuac

SEQ ID NO: 365624 - RNA, 19 nt, Artificial Sequence
  Description of Artificial Sequence: Synthetic oligonucleotide
agucaucgguuuucaggag

SEQ ID NO: 365625 - RNA, 19 nt, Artificial Sequence
  Description of Artificial Sequence: Synthetic oligonucleotide
gaagggcgcuguuuucaag

SEQ ID NO: 365626 - RNA, 19 nt, Artificial Sequence
  Description of Artificial Sequence: Synthetic oligonucleotide
acaguauuaucuagcuuca

SEQ ID NO: 365627 - RNA, 19 nt, Artificial Sequence
  Description of Artificial Sequence: Synthetic oligonucleotide
aguacuuuagccacaucuu

SEQ ID NO: 365628 - RNA, 19 nt, Artificial Sequence
  Description of Artificial Sequence: Synthetic oligonucleotide
ccugacgcuauucacaguc

SEQ ID NO: 365629 - RNA, 19 nt, Artificial Sequence
  Description of Artificial Sequence: Synthetic oligonucleotide
acgacugauuggaaauagg

SEQ ID NO: 365630 - RNA, 19 nt, Artificial Sequence
  Description of Artificial Sequence: Synthetic oligonucleotide
cacggguacuguagcaggc

SEQ ID NO: 365631 - RNA, 19 nt, Artificial Sequence
  Description of Artificial Sequence: Synthetic oligonucleotide
gacgucggugugaaugugc

SEQ ID NO: 365632 - RNA, 19 nt, Artificial Sequence
  Description of Artificial Sequence: Synthetic oligonucleotide
ucccacgacugauuggaaa

SEQ ID NO: 365633 - RNA, 19 nt, Artificial Sequence
  Description of Artificial Sequence: Synthetic oligonucleotide
auaccccauuccuucuuug

SEQ ID NO: 365634 - RNA, 19 nt, Artificial Sequence
  Description of Artificial Sequence: Synthetic oligonucleotide
ucggaagcuccuaguggca

SEQ ID NO: 365635 - RNA, 19 nt, Artificial Sequence
  Description of Artificial Sequence: Synthetic oligonucleotide
ugcggcuacuuccacuuuu

SEQ ID NO: 365636 - RNA, 19 nt, Artificial Sequence
  Description of Artificial Sequence: Synthetic oligonucleotide
accguccagggacauucuc

SEQ ID NO: 365637 - RNA, 19 nt, Artificial Sequence
  Description of Artificial Sequence: Synthetic oligonucleotide
auuuggauuuuggacgcau

SEQ ID NO: 365638 - RNA, 19 nt, Artificial Sequence
  Description of Artificial Sequence: Synthetic oligonucleotide
cacgccaauaaacugaaau

SEQ ID NO: 365639 - RNA, 19 nt, Artificial Sequence
  Description of Artificial Sequence: Synthetic oligonucleotide
ucggacacuccaacaacuu

SEQ ID NO: 365640 - RNA, 19 nt, Artificial Sequence
  Description of Artificial Sequence: Synthetic oligonucleotide
gcagauugaacugaaaccu

SEQ ID NO: 365641 - RNA, 19 nt, Artificial Sequence
  Description of Artificial Sequence: Synthetic oligonucleotide
accugucuaguuccagugu

SEQ ID NO: 365642 - RNA, 19 nt, Artificial Sequence
  Description of Artificial Sequence: Synthetic oligonucleotide
cuucuguagauaagaaccu

SEQ ID NO: 365643 - RNA, 19 nt, Artificial Sequence
  Description of Artificial Sequence: Synthetic oligonucleotide
gacgcuauucacagucuca

SEQ ID NO: 365644 - RNA, 19 nt, Artificial Sequence
  Description of Artificial Sequence: Synthetic oligonucleotide
uucacgugaccugucuagu

SEQ ID NO: 365645 - RNA, 19 nt, Artificial Sequence
  Description of Artificial Sequence: Synthetic oligonucleotide
uucuguagauaagaaccuu

SEQ ID NO: 365646 - RNA, 19 nt, Artificial Sequence
  Description of Artificial Sequence: Synthetic oligonucleotide
aaaaccucggaagcuccua

SEQ ID NO: 365647 - RNA, 19 nt, Artificial Sequence
  Description of Artificial Sequence: Synthetic oligonucleotide
gggacuauuaaagaguggu

SEQ ID NO: 365648 - RNA, 19 nt, Artificial Sequence
  Description of Artificial Sequence: Synthetic oligonucleotide
ugccgaggacuuaggguug

SEQ ID NO: 365649 - RNA, 19 nt, Artificial Sequence
  Description of Artificial Sequence: Synthetic oligonucleotide
agagaagacgucgguguga

SEQ ID NO: 365650 - RNA, 19 nt, Artificial Sequence
  Description of Artificial Sequence: Synthetic oligonucleotide
cagucaguuagccggaaaa

SEQ ID NO: 365651 - RNA, 19 nt, Artificial Sequence
  Description of Artificial Sequence: Synthetic oligonucleotide
ugcaucaaccacggguacu

SEQ ID NO: 365652 - RNA, 19 nt, Artificial Sequence
  Description of Artificial Sequence: Synthetic oligonucleotide
uacuucgucucgagccaca

SEQ ID NO: 365653 - RNA, 19 nt, Artificial Sequence
  Description of Artificial Sequence: Synthetic oligonucleotide
uuacuucgucauuuacaau

SEQ ID NO: 365654 - RNA, 19 nt, Artificial Sequence
  Description of Artificial Sequence: Synthetic oligonucleotide
ugacguugcuuuugaccgu

SEQ ID NO: 365655 - RNA, 19 nt, Artificial Sequence
  Description of Artificial Sequence: Synthetic oligonucleotide
uuccaaaguaccgguuagu

SEQ ID NO: 365656 - RNA, 19 nt, Artificial Sequence
  Description of Artificial Sequence: Synthetic oligonucleotide
uccccacguggcaauauua

SEQ ID NO: 365657 - RNA, 19 nt, Artificial Sequence
  Description of Artificial Sequence: Synthetic oligonucleotide
gagaugcgugcaucaacca

SEQ ID NO: 365658 - RNA, 19 nt, Artificial Sequence
  Description of Artificial Sequence: Synthetic oligonucleotide
aauaggcuuccagcuaguu

SEQ ID NO: 365659 - RNA, 19 nt, Artificial Sequence
  Description of Artificial Sequence: Synthetic oligonucleotide
ccuuacuucgucauuuaca

SEQ ID NO: 365660 - RNA, 19 nt, Artificial Sequence
  Description of Artificial Sequence: Synthetic oligonucleotide
agcucgucucacuagccuu

SEQ ID NO: 365661 - RNA, 19 nt, Artificial Sequence
  Description of Artificial Sequence: Synthetic oligonucleotide
guccuaucuccauacccca

SEQ ID NO: 365662 - RNA, 19 nt, Artificial Sequence
  Description of Artificial Sequence: Synthetic oligonucleotide
aauguucacucagccuaaa

SEQ ID NO: 365663 - RNA, 19 nt, Artificial Sequence
  Description of Artificial Sequence: Synthetic oligonucleotide
caugccgcugguuagucua

SEQ ID NO: 365664 - RNA, 19 nt, Artificial Sequence
  Description of Artificial Sequence: Synthetic oligonucleotide
gacguugcuuuugaccguc

SEQ ID NO: 365665 - RNA, 19 nt, Artificial Sequence
  Description of Artificial Sequence: Synthetic oligonucleotide
ucucgagguggagucagaa

SEQ ID NO: 365666 - RNA, 19 nt, Artificial Sequence
  Description of Artificial Sequence: Synthetic oligonucleotide
uaccuuacuucgucauuua

SEQ ID NO: 365667 - RNA, 19 nt, Artificial Sequence
  Description of Artificial Sequence: Synthetic oligonucleotide
uuccucucggacacuccaa

SEQ ID NO: 365668 - RNA, 19 nt, Artificial Sequence
  Description of Artificial Sequence: Synthetic oligonucleotide
aucacgccaauaaacugaa

SEQ ID NO: 365669 - RNA, 19 nt, Artificial Sequence
  Description of Artificial Sequence: Synthetic oligonucleotide
gauugcggcuacuuccacu

SEQ ID NO: 365670 - RNA, 19 nt, Artificial Sequence
  Description of Artificial Sequence: Synthetic oligonucleotide
acucucacuucggaagacu

SEQ ID NO: 365671 - RNA, 19 nt, Artificial Sequence
  Description of Artificial Sequence: Synthetic oligonucleotide
uucucgagguggagucaga

SEQ ID NO: 365672 - RNA, 19 nt, Artificial Sequence
  Description of Artificial Sequence: Synthetic oligonucleotide
aucuucccguccucugaug

SEQ ID NO: 365673 - RNA, 19 nt, Artificial Sequence
  Description of Artificial Sequence: Synthetic oligonucleotide
ugcgugcaucaaccacggg

SEQ ID NO: 365674 - RNA, 19 nt, Artificial Sequence
  Description of Artificial Sequence: Synthetic oligonucleotide
agacgcacgugguggggcu

SEQ ID NO: 365675 - RNA, 19 nt, Artificial Sequence
  Description of Artificial Sequence: Synthetic oligonucleotide
caacugacguugcuuuuga

SEQ ID NO: 365676 - RNA, 19 nt, Artificial Sequence
  Description of Artificial Sequence: Synthetic oligonucleotide
ccacggguacuguagcagg

SEQ ID NO: 365677 - RNA, 19 nt, Artificial Sequence
  Description of Artificial Sequence: Synthetic oligonucleotide
aguaccgguuagugcugcu

SEQ ID NO: 365678 - RNA, 19 nt, Artificial Sequence
  Description of Artificial Sequence: Synthetic oligonucleotide
accccauaagacggacuuc

SEQ ID NO: 365679 - RNA, 19 nt, Artificial Sequence
  Description of Artificial Sequence: Synthetic oligonucleotide
cucgagccacaaugucucc

SEQ ID NO: 365680 - RNA, 19 nt, Artificial Sequence
  Description of Artificial Sequence: Synthetic oligonucleotide
cugccgaggacuuaggguu

SEQ ID NO: 365681 - RNA, 19 nt, Artificial Sequence
  Description of Artificial Sequence: Synthetic oligonucleotide
cucggacacuccaacaacu

SEQ ID NO: 365682 - RNA, 19 nt, Artificial Sequence
  Description of Artificial Sequence: Synthetic oligonucleotide
gguugguacaaaugguggu

SEQ ID NO: 365683 - RNA, 19 nt, Artificial Sequence
  Description of Artificial Sequence: Synthetic oligonucleotide
gggcgcuguuuucaagagg

SEQ ID NO: 365684 - RNA, 19 nt, Artificial Sequence
  Description of Artificial Sequence: Synthetic oligonucleotide
acguugcuuuugaccgucc

SEQ ID NO: 365685 - RNA, 19 nt, Artificial Sequence
  Description of Artificial Sequence: Synthetic oligonucleotide
gcgugcaucaaccacgggu

SEQ ID NO: 365686 - RNA, 19 nt, Artificial Sequence
  Description of Artificial Sequence: Synthetic oligonucleotide
ucacgccaauaaacugaaa

SEQ ID NO: 365687 - RNA, 19 nt, Artificial Sequence
  Description of Artificial Sequence: Synthetic oligonucleotide
guugguacaaauggugguu

SEQ ID NO: 365688 - RNA, 19 nt, Artificial Sequence
  Description of Artificial Sequence: Synthetic oligonucleotide
ccacguggcaauauuaaua

SEQ ID NO: 365689 - RNA, 19 nt, Artificial Sequence
  Description of Artificial Sequence: Synthetic oligonucleotide
cagcuaguuugaccaacca

SEQ ID NO: 365690 - RNA, 19 nt, Artificial Sequence
  Description of Artificial Sequence: Synthetic oligonucleotide
agaucgccaaucacgccaa

SEQ ID NO: 365691 - RNA, 19 nt, Artificial Sequence
  Description of Artificial Sequence: Synthetic oligonucleotide
agacgucggugugaaugug

SEQ ID NO: 365692 - RNA, 19 nt, Artificial Sequence
  Description of Artificial Sequence: Synthetic oligonucleotide
gcuuuugaccguccaggga

SEQ ID NO: 365693 - RNA, 19 nt, Artificial Sequence
  Description of Artificial Sequence: Synthetic oligonucleotide
ucaggagauugcggcuacu

SEQ ID NO: 365694 - RNA, 19 nt, Artificial Sequence
  Description of Artificial Sequence: Synthetic oligonucleotide
gugcaacugacguugcuuu

SEQ ID NO: 365695 - RNA, 19 nt, Artificial Sequence
  Description of Artificial Sequence: Synthetic oligonucleotide
gcguggauaucacugcucu

SEQ ID NO: 365696 - RNA, 19 nt, Artificial Sequence
  Description of Artificial Sequence: Synthetic oligonucleotide
cucacuucggaagacucau

SEQ ID NO: 365697 - RNA, 19 nt, Artificial Sequence
  Description of Artificial Sequence: Synthetic oligonucleotide
ggacuuccaaaguaccggu

SEQ ID NO: 365698 - RNA, 19 nt, Artificial Sequence
  Description of Artificial Sequence: Synthetic oligonucleotide
caccccauaagacggacuu

SEQ ID NO: 365699 - RNA, 19 nt, Artificial Sequence
  Description of Artificial Sequence: Synthetic oligonucleotide
ggauaccuuacuucgucau

SEQ ID NO: 365700 - RNA, 19 nt, Artificial Sequence
  Description of Artificial Sequence: Synthetic oligonucleotide
cuauuaaagagugguucuu

SEQ ID NO: 365701 - RNA, 19 nt, Artificial Sequence
  Description of Artificial Sequence: Synthetic oligonucleotide
cagauugaacugaaaccuu

SEQ ID NO: 365702 - RNA, 19 nt, Artificial Sequence
  Description of Artificial Sequence: Synthetic oligonucleotide
gcggcuacuuccacuuuug

SEQ ID NO: 365703 - RNA, 19 nt, Artificial Sequence
  Description of Artificial Sequence: Synthetic oligonucleotide
cgugcaucaaccacgggua

SEQ ID NO: 365704 - RNA, 19 nt, Artificial Sequence
  Description of Artificial Sequence: Synthetic oligonucleotide
gacgcacgugguggggcug

SEQ ID NO: 365705 - RNA, 19 nt, Artificial Sequence
  Description of Artificial Sequence: Synthetic oligonucleotide
ccugucuaguuccagugua

SEQ ID NO: 365706 - RNA, 19 nt, Artificial Sequence
  Description of Artificial Sequence: Synthetic oligonucleotide
ccauaagacggacuuccaa

SEQ ID NO: 365707 - RNA, 19 nt, Artificial Sequence
  Description of Artificial Sequence: Synthetic oligonucleotide
cccguccucugaugguugg

SEQ ID NO: 365708 - RNA, 19 nt, Artificial Sequence
  Description of Artificial Sequence: Synthetic oligonucleotide
gcugucuacuucgucucga

SEQ ID NO: 365709 - RNA, 19 nt, Artificial Sequence
  Description of Artificial Sequence: Synthetic oligonucleotide
caguucacgugaccugucu

SEQ ID NO: 365710 - RNA, 19 nt, Artificial Sequence
  Description of Artificial Sequence: Synthetic oligonucleotide
aggggugccugacgcuauu

SEQ ID NO: 365711 - RNA, 19 nt, Artificial Sequence
  Description of Artificial Sequence: Synthetic oligonucleotide
caguauuaucuagcuucaa

SEQ ID NO: 365712 - RNA, 19 nt, Artificial Sequence
  Description of Artificial Sequence: Synthetic oligonucleotide
uugaccguccagggacauu

SEQ ID NO: 365713 - RNA, 19 nt, Artificial Sequence
  Description of Artificial Sequence: Synthetic oligonucleotide
cucgagguggagucagaau

SEQ ID NO: 365714 - RNA, 19 nt, Artificial Sequence
  Description of Artificial Sequence: Synthetic oligonucleotide
cccacgacugauuggaaau

SEQ ID NO: 365715 - RNA, 19 nt, Artificial Sequence
  Description of Artificial Sequence: Synthetic oligonucleotide
ccccacguggcaauauuaa

SEQ ID NO: 365716 - RNA, 19 nt, Artificial Sequence
  Description of Artificial Sequence: Synthetic oligonucleotide
gcagugcaacugacguugc

SEQ ID NO: 365717 - RNA, 19 nt, Artificial Sequence
  Description of Artificial Sequence: Synthetic oligonucleotide
ucgccgcucaggguuucuu

SEQ ID NO: 365718 - RNA, 19 nt, Artificial Sequence
  Description of Artificial Sequence: Synthetic oligonucleotide
gccgcugguuagucuaaaa

SEQ ID NO: 365719 - RNA, 19 nt, Artificial Sequence
  Description of Artificial Sequence: Synthetic oligonucleotide
caggagauugcggcuacuu

SEQ ID NO: 365720 - RNA, 19 nt, Artificial Sequence
  Description of Artificial Sequence: Synthetic oligonucleotide
ggagucagaauaggugcuu

SEQ ID NO: 365721 - RNA, 19 nt, Artificial Sequence
  Description of Artificial Sequence: Synthetic oligonucleotide
gccaugccgcugguuaguc

SEQ ID NO: 365722 - RNA, 19 nt, Artificial Sequence
  Description of Artificial Sequence: Synthetic oligonucleotide
caucaaccacggguacugu

SEQ ID NO: 365723 - RNA, 19 nt, Artificial Sequence
  Description of Artificial Sequence: Synthetic oligonucleotide
guuuucgcuuggacuccau

SEQ ID NO: 365724 - RNA, 19 nt, Artificial Sequence
  Description of Artificial Sequence: Synthetic oligonucleotide
ggacuccauccgggcagug

SEQ ID NO: 365725 - RNA, 19 nt, Artificial Sequence
  Description of Artificial Sequence: Synthetic oligonucleotide
gccugacgcuauucacagu

SEQ ID NO: 365726 - RNA, 19 nt, Artificial Sequence
  Description of Artificial Sequence: Synthetic oligonucleotide
ccgguuagugcugcugguu

SEQ ID NO: 365727 - RNA, 19 nt, Artificial Sequence
  Description of Artificial Sequence: Synthetic oligonucleotide
ccgaggacuuaggguuggu

SEQ ID NO: 365728 - RNA, 19 nt, Artificial Sequence
  Description of Artificial Sequence: Synthetic oligonucleotide
auaucguugagguacaucc

SEQ ID NO: 365729 - RNA, 19 nt, Artificial Sequence
  Description of Artificial Sequence: Synthetic oligonucleotide
uuuauuaccuuccagacua

SEQ ID NO: 365730 - RNA, 19 nt, Artificial Sequence
  Description of Artificial Sequence: Synthetic oligonucleotide
aauuaaugggugcauucac

SEQ ID NO: 365731 - RNA, 19 nt, Artificial Sequence
  Description of Artificial Sequence: Synthetic oligonucleotide
aagggguagaggcuaaccc

SEQ ID NO: 365732 - RNA, 19 nt, Artificial Sequence
  Description of Artificial Sequence: Synthetic oligonucleotide
gauagcaccacucugguca

SEQ ID NO: 365733 - RNA, 19 nt, Artificial Sequence
  Description of Artificial Sequence: Synthetic oligonucleotide
aguuugacucaucaaaggg

SEQ ID NO: 365734 - RNA, 19 nt, Artificial Sequence
  Description of Artificial Sequence: Synthetic oligonucleotide
aaaaccguugacaagagca

SEQ ID NO: 365735 - RNA, 19 nt, Artificial Sequence
  Description of Artificial Sequence: Synthetic oligonucleotide
gaaaguacuauaugguggc

SEQ ID NO: 365736 - RNA, 19 nt, Artificial Sequence
  Description of Artificial Sequence: Synthetic oligonucleotide
agucucuacacaccaaagc

SEQ ID NO: 365737 - RNA, 19 nt, Artificial Sequence
  Description of Artificial Sequence: Synthetic oligonucleotide
uauaugguggcccaacuga

SEQ ID NO: 365738 - RNA, 19 nt, Artificial Sequence
  Description of Artificial Sequence: Synthetic oligonucleotide
gacaagagcagguggaagg

SEQ ID NO: 365739 - RNA, 19 nt, Artificial Sequence
  Description of Artificial Sequence: Synthetic oligonucleotide
aaguacuauaugguggccc

SEQ ID NO: 365740 - RNA, 19 nt, Artificial Sequence
  Description of Artificial Sequence: Synthetic oligonucleotide
uagaggcuaacccagcacg

SEQ ID NO: 365741 - RNA, 19 nt, Artificial Sequence
  Description of Artificial Sequence: Synthetic oligonucleotide
acaauuaaugggugcauuc

SEQ ID NO: 365742 - RNA, 19 nt, Artificial Sequence
  Description of Artificial Sequence: Synthetic oligonucleotide
agacauagcaguucccagc

SEQ ID NO: 365743 - RNA, 19 nt, Artificial Sequence
  Description of Artificial Sequence: Synthetic oligonucleotide
uguuugacggacaaagugu

SEQ ID NO: 365744 - RNA, 19 nt, Artificial Sequence
  Description of Artificial Sequence: Synthetic oligonucleotide
ugugacuauguacugggag

SEQ ID NO: 365745 - RNA, 19 nt, Artificial Sequence
  Description of Artificial Sequence: Synthetic oligonucleotide
aggauuacuacucuugaug

SEQ ID NO: 365746 - RNA, 19 nt, Artificial Sequence
  Description of Artificial Sequence: Synthetic oligonucleotide
cuuagagccacuauaccag

SEQ ID NO: 365747 - RNA, 19 nt, Artificial Sequence
  Description of Artificial Sequence: Synthetic oligonucleotide
uacuguuugacggacaaag

SEQ ID NO: 365748 - RNA, 19 nt, Artificial Sequence
  Description of Artificial Sequence: Synthetic oligonucleotide
agaaaguacuauauggugg

SEQ ID NO: 365749 - RNA, 19 nt, Artificial Sequence
  Description of Artificial Sequence: Synthetic oligonucleotide
gauacaguuugacucauca

SEQ ID NO: 365750 - RNA, 19 nt, Artificial Sequence
  Description of Artificial Sequence: Synthetic oligonucleotide
ggauacaagagucaggacc

SEQ ID NO: 365751 - RNA, 19 nt, Artificial Sequence
  Description of Artificial Sequence: Synthetic oligonucleotide
uuugacucaucaaagggau

SEQ ID NO: 365752 - RNA, 19 nt, Artificial Sequence
  Description of Artificial Sequence: Synthetic oligonucleotide
cauguagcuggcaucaggg

SEQ ID NO: 365753 - RNA, 19 nt, Artificial Sequence
  Description of Artificial Sequence: Synthetic oligonucleotide
acuuagagccacuauacca

SEQ ID NO: 365754 - RNA, 19 nt, Artificial Sequence
  Description of Artificial Sequence: Synthetic oligonucleotide
cuugacuuaccuaucugcc

SEQ ID NO: 365755 - RNA, 19 nt, Artificial Sequence
  Description of Artificial Sequence: Synthetic oligonucleotide
agguaagugucucuacccc

SEQ ID NO: 365756 - RNA, 19 nt, Artificial Sequence
  Description of Artificial Sequence: Synthetic oligonucleotide
ugagguaagugucucuacc

SEQ ID NO: 365757 - RNA, 19 nt, Artificial Sequence
  Description of Artificial Sequence: Synthetic oligonucleotide
auacuguggacccugcccg

SEQ ID NO: 365758 - RNA, 19 nt, Artificial Sequence
  Description of Artificial Sequence: Synthetic oligonucleotide
ucuacuggcccaacgagca

SEQ ID NO: 365759 - RNA, 19 nt, Artificial Sequence
  Description of Artificial Sequence: Synthetic oligonucleotide
accugagagucacuuaggc

SEQ ID NO: 365760 - RNA, 19 nt, Artificial Sequence
  Description of Artificial Sequence: Synthetic oligonucleotide
caagacacccacuaugccc

SEQ ID NO: 365761 - RNA, 19 nt, Artificial Sequence
  Description of Artificial Sequence: Synthetic oligonucleotide
agcacgcugucauugaagg

SEQ ID NO: 365762 - RNA, 19 nt, Artificial Sequence
  Description of Artificial Sequence: Synthetic oligonucleotide
agaacuaucaggguggccu

SEQ ID NO: 365763 - RNA, 19 nt, Artificial Sequence
  Description of Artificial Sequence: Synthetic oligonucleotide
aucguugagguacauccac

SEQ ID NO: 365764 - RNA, 19 nt, Artificial Sequence
  Description of Artificial Sequence: Synthetic oligonucleotide
ugcauugucagcaggggcu

SEQ ID NO: 365765 - RNA, 19 nt, Artificial Sequence
  Description of Artificial Sequence: Synthetic oligonucleotide
agaucgggagaccuuacgg

SEQ ID NO: 365766 - RNA, 19 nt, Artificial Sequence
  Description of Artificial Sequence: Synthetic oligonucleotide
uuugcuugaacacucccau

SEQ ID NO: 365767 - RNA, 19 nt, Artificial Sequence
  Description of Artificial Sequence: Synthetic oligonucleotide
ggcauugcaaggcauagcg

SEQ ID NO: 365768 - RNA, 19 nt, Artificial Sequence
  Description of Artificial Sequence: Synthetic oligonucleotide
gcucucuuaacccagaagc

SEQ ID NO: 365769 - RNA, 19 nt, Artificial Sequence
  Description of Artificial Sequence: Synthetic oligonucleotide
gauuaccuggccauagugg

SEQ ID NO: 365770 - RNA, 19 nt, Artificial Sequence
  Description of Artificial Sequence: Synthetic oligonucleotide
auaugcgagccguacaguc

SEQ ID NO: 365771 - RNA, 19 nt, Artificial Sequence
  Description of Artificial Sequence: Synthetic oligonucleotide
caaggcucugguuucaggg

SEQ ID NO: 365772 - RNA, 19 nt, Artificial Sequence
  Description of Artificial Sequence: Synthetic oligonucleotide
gaaggaagcagugggauug

SEQ ID NO: 365773 - RNA, 19 nt, Artificial Sequence
  Description of Artificial Sequence: Synthetic oligonucleotide
aagaucgggagaccuuacg

SEQ ID NO: 365774 - RNA, 19 nt, Artificial Sequence
  Description of Artificial Sequence: Synthetic oligonucleotide
uuucaggggaacagaaagc

SEQ ID NO: 365775 - RNA, 19 nt, Artificial Sequence
  Description of Artificial Sequence: Synthetic oligonucleotide
ugugcagcccaacugggcc

SEQ ID NO: 365776 - RNA, 19 nt, Artificial Sequence
  Description of Artificial Sequence: Synthetic oligonucleotide
ugggaguccccugagaagg

SEQ ID NO: 365777 - RNA, 19 nt, Artificial Sequence
  Description of Artificial Sequence: Synthetic oligonucleotide
gaacacucccaucuacugg

SEQ ID NO: 365778 - RNA, 19 nt, Artificial Sequence
  Description of Artificial Sequence: Synthetic oligonucleotide
augcauucaccugagaguc

SEQ ID NO: 365779 - RNA, 19 nt, Artificial Sequence
  Description of Artificial Sequence: Synthetic oligonucleotide
auaucagauacuggcaggg

SEQ ID NO: 365780 - RNA, 19 nt, Artificial Sequence
  Description of Artificial Sequence: Synthetic oligonucleotide
auuacuacucuugaugcug

SEQ ID NO: 365781 - RNA, 19 nt, Artificial Sequence
  Description of Artificial Sequence: Synthetic oligonucleotide
acuauguacugggaguccc

SEQ ID NO: 365782 - RNA, 19 nt, Artificial Sequence
  Description of Artificial Sequence: Synthetic oligonucleotide
gagguaagugucucuaccc

SEQ ID NO: 365783 - RNA, 19 nt, Artificial Sequence
  Description of Artificial Sequence: Synthetic oligonucleotide
gacccuggauaucagauac

SEQ ID NO: 365784 - RNA, 19 nt, Artificial Sequence
  Description of Artificial Sequence: Synthetic oligonucleotide
agaucauacaugcggauau

SEQ ID NO: 365785 - RNA, 19 nt, Artificial Sequence
  Description of Artificial Sequence: Synthetic oligonucleotide
agggcuacaucuguuaccg

SEQ ID NO: 365786 - RNA, 19 nt, Artificial Sequence
  Description of Artificial Sequence: Synthetic oligonucleotide
uguggauagcaccacucug

SEQ ID NO: 365787 - RNA, 19 nt, Artificial Sequence
  Description of Artificial Sequence: Synthetic oligonucleotide
uguacugggaguccccuga

SEQ ID NO: 365788 - RNA, 19 nt, Artificial Sequence
  Description of Artificial Sequence: Synthetic oligonucleotide
uggauaucagauacuggca

SEQ ID NO: 365789 - RNA, 19 nt, Artificial Sequence
  Description of Artificial Sequence: Synthetic oligonucleotide
gguguucauugcuugaugg

SEQ ID NO: 365790 - RNA, 19 nt, Artificial Sequence
  Description of Artificial Sequence: Synthetic oligonucleotide
ggauuacuacucuugaugc

SEQ ID NO: 365791 - RNA, 19 nt, Artificial Sequence
  Description of Artificial Sequence: Synthetic oligonucleotide
uugacggacaaagugugag

SEQ ID NO: 365792 - RNA, 19 nt, Artificial Sequence
  Description of Artificial Sequence: Synthetic oligonucleotide
uuagagccacuauaccagg

SEQ ID NO: 365793 - RNA, 19 nt, Artificial Sequence
  Description of Artificial Sequence: Synthetic oligonucleotide
ugacuuaccuaucugccuc

SEQ ID NO: 365794 - RNA, 19 nt, Artificial Sequence
  Description of Artificial Sequence: Synthetic oligonucleotide
aguacuauaugguggccca

SEQ ID NO: 365795 - RNA, 19 nt, Artificial Sequence
  Description of Artificial Sequence: Synthetic oligonucleotide
ugaacacucccaucuacug

SEQ ID NO: 365796 - RNA, 19 nt, Artificial Sequence
  Description of Artificial Sequence: Synthetic oligonucleotide
gaucgggagaccuuacggc

SEQ ID NO: 365797 - RNA, 19 nt, Artificial Sequence
  Description of Artificial Sequence: Synthetic oligonucleotide
augguggcccaacugaguc

SEQ ID NO: 365798 - RNA, 19 nt, Artificial Sequence
  Description of Artificial Sequence: Synthetic oligonucleotide
ugugccugccaaaagcgca

SEQ ID NO: 365799 - RNA, 19 nt, Artificial Sequence
  Description of Artificial Sequence: Synthetic oligonucleotide
uucggugcaacaccuuugc

SEQ ID NO: 365800 - RNA, 19 nt, Artificial Sequence
  Description of Artificial Sequence: Synthetic oligonucleotide
agauuaccuggccauagug

SEQ ID NO: 365801 - RNA, 19 nt, Artificial Sequence
  Description of Artificial Sequence: Synthetic oligonucleotide
agccguacagucuuccccg

SEQ ID NO: 365802 - RNA, 19 nt, Artificial Sequence
  Description of Artificial Sequence: Synthetic oligonucleotide
auugacuccgucguaacug

SEQ ID NO: 365803 - RNA, 19 nt, Artificial Sequence
  Description of Artificial Sequence: Synthetic oligonucleotide
agggauacaagagucagga

SEQ ID NO: 365804 - RNA, 19 nt, Artificial Sequence
  Description of Artificial Sequence: Synthetic oligonucleotide
acuaaguccccuacugacc

SEQ ID NO: 365805 - RNA, 19 nt, Artificial Sequence
  Description of Artificial Sequence: Synthetic oligonucleotide
uugguaaccugcagcagca

SEQ ID NO: 365806 - RNA, 19 nt, Artificial Sequence
  Description of Artificial Sequence: Synthetic oligonucleotide
ugucagaggaggcugugac

SEQ ID NO: 365807 - RNA, 19 nt, Artificial Sequence
  Description of Artificial Sequence: Synthetic oligonucleotide
ggauaucagauacuggcag

SEQ ID NO: 365808 - RNA, 19 nt, Artificial Sequence
  Description of Artificial Sequence: Synthetic oligonucleotide
ugagguacauccacuuaga

SEQ ID NO: 365809 - RNA, 19 nt, Artificial Sequence
  Description of Artificial Sequence: Synthetic oligonucleotide
uccgucguaacugaugaug

SEQ ID NO: 365810 - RNA, 19 nt, Artificial Sequence
  Description of Artificial Sequence: Synthetic oligonucleotide
uccaaugcauucaccugag

SEQ ID NO: 365811 - RNA, 19 nt, Artificial Sequence
  Description of Artificial Sequence: Synthetic oligonucleotide
aagacacccacuaugccca

SEQ ID NO: 365812 - RNA, 19 nt, Artificial Sequence
  Description of Artificial Sequence: Synthetic oligonucleotide
agagacaugccuggugacc

SEQ ID NO: 365813 - RNA, 19 nt, Artificial Sequence
  Description of Artificial Sequence: Synthetic oligonucleotide
acuccgucguaacugauga

SEQ ID NO: 365814 - RNA, 19 nt, Artificial Sequence
  Description of Artificial Sequence: Synthetic oligonucleotide
aaccguugacaagagcagg

SEQ ID NO: 365815 - RNA, 19 nt, Artificial Sequence
  Description of Artificial Sequence: Synthetic oligonucleotide
gcugugacuauguacuggg

SEQ ID NO: 365816 - RNA, 19 nt, Artificial Sequence
  Description of Artificial Sequence: Synthetic oligonucleotide
ucuaucuucuccugacuaa

SEQ ID NO: 365817 - RNA, 19 nt, Artificial Sequence
  Description of Artificial Sequence: Synthetic oligonucleotide
uuuuacaugucuggucagc

SEQ ID NO: 365818 - RNA, 19 nt, Artificial Sequence
  Description of Artificial Sequence: Synthetic oligonucleotide
acuacucuugaugcugagc

SEQ ID NO: 365819 - RNA, 19 nt, Artificial Sequence
  Description of Artificial Sequence: Synthetic oligonucleotide
uacacaccaaagccgggcc

SEQ ID NO: 365820 - RNA, 19 nt, Artificial Sequence
  Description of Artificial Sequence: Synthetic oligonucleotide
ggaagauacgcugacacug

SEQ ID NO: 365821 - RNA, 19 nt, Artificial Sequence
  Description of Artificial Sequence: Synthetic oligonucleotide
uugacuuaccuaucugccu

SEQ ID NO: 365822 - RNA, 19 nt, Artificial Sequence
  Description of Artificial Sequence: Synthetic oligonucleotide
ugaagcggcauugcaaggc

SEQ ID NO: 365823 - RNA, 19 nt, Artificial Sequence
  Description of Artificial Sequence: Synthetic oligonucleotide
gacggacaaagugugagug

SEQ ID NO: 365824 - RNA, 19 nt, Artificial Sequence
  Description of Artificial Sequence: Synthetic oligonucleotide
cagacuaaguccccuacug

SEQ ID NO: 365825 - RNA, 19 nt, Artificial Sequence
  Description of Artificial Sequence: Synthetic oligonucleotide
uuuacaugucuggucagcu

SEQ ID NO: 365826 - RNA, 19 nt, Artificial Sequence
  Description of Artificial Sequence: Synthetic oligonucleotide
uaaggaccgggccuguuga

SEQ ID NO: 365827 - RNA, 19 nt, Artificial Sequence
  Description of Artificial Sequence: Synthetic oligonucleotide
guuaccgcccugcagagca

SEQ ID NO: 365828 - RNA, 19 nt, Artificial Sequence
  Description of Artificial Sequence: Synthetic oligonucleotide
cuaaaaccguugacaagag

SEQ ID NO: 365829 - RNA, 19 nt, Artificial Sequence
  Description of Artificial Sequence: Synthetic oligonucleotide
auauguugguaaccugcag

SEQ ID NO: 365830 - RNA, 19 nt, Artificial Sequence
  Description of Artificial Sequence: Synthetic oligonucleotide
uccugacuaaaaccguuga

SEQ ID NO: 365831 - RNA, 19 nt, Artificial Sequence
  Description of Artificial Sequence: Synthetic oligonucleotide
caugcuucggucuggugug

SEQ ID NO: 365832 - RNA, 19 nt, Artificial Sequence
  Description of Artificial Sequence: Synthetic oligonucleotide
gauacaagagucaggaccu

SEQ ID NO: 365833 - RNA, 19 nt, Artificial Sequence
  Description of Artificial Sequence: Synthetic oligonucleotide
augcggauauguugguaac

SEQ ID NO: 365834 - RNA, 19 nt, Artificial Sequence
  Description of Artificial Sequence: Synthetic oligonucleotide
uaugcgagccguacagucu

SEQ ID NO: 365835 - RNA, 19 nt, Artificial Sequence
  Description of Artificial Sequence: Synthetic oligonucleotide
uauaccuggccaagacacc

SEQ ID NO: 365836 - RNA, 19 nt, Artificial Sequence
  Description of Artificial Sequence: Synthetic oligonucleotide
guagacaaucagugcauug

SEQ ID NO: 365837 - RNA, 19 nt, Artificial Sequence
  Description of Artificial Sequence: Synthetic oligonucleotide
cugaggucccauaugcgag

SEQ ID NO: 365838 - RNA, 19 nt, Artificial Sequence
  Description of Artificial Sequence: Synthetic oligonucleotide
gagguacauccacuuagag

SEQ ID NO: 365839 - RNA, 19 nt, Artificial Sequence
  Description of Artificial Sequence: Synthetic oligonucleotide
aggcauagcgcgugugggc

SEQ ID NO: 365840 - RNA, 19 nt, Artificial Sequence
  Description of Artificial Sequence: Synthetic oligonucleotide
uauugacuccgucguaacu

SEQ ID NO: 365841 - RNA, 19 nt, Artificial Sequence
  Description of Artificial Sequence: Synthetic oligonucleotide
agagccacuauaccaggca

SEQ ID NO: 365842 - RNA, 19 nt, Artificial Sequence
  Description of Artificial Sequence: Synthetic oligonucleotide
uaucguugagguacaucca

SEQ ID NO: 365843 - RNA, 19 nt, Artificial Sequence
  Description of Artificial Sequence: Synthetic oligonucleotide
ggaaucagggcugaagcgg

SEQ ID NO: 365844 - RNA, 19 nt, Artificial Sequence
  Description of Artificial Sequence: Synthetic oligonucleotide
uccuccgucugauggaagc

SEQ ID NO: 365845 - RNA, 19 nt, Artificial Sequence
  Description of Artificial Sequence: Synthetic oligonucleotide
ggauauguugguaaccugc

SEQ ID NO: 365846 - RNA, 19 nt, Artificial Sequence
  Description of Artificial Sequence: Synthetic oligonucleotide
guuugacggacaaagugug

SEQ ID NO: 365847 - RNA, 19 nt, Artificial Sequence
  Description of Artificial Sequence: Synthetic oligonucleotide
uuauugacuccgucguaac

SEQ ID NO: 365848 - RNA, 19 nt, Artificial Sequence
  Description of Artificial Sequence: Synthetic oligonucleotide
gagccguacagucuucccc

SEQ ID NO: 365849 - RNA, 19 nt, Artificial Sequence
  Description of Artificial Sequence: Synthetic oligonucleotide
gaagauacgcugacacugc

SEQ ID NO: 365850 - RNA, 19 nt, Artificial Sequence
  Description of Artificial Sequence: Synthetic oligonucleotide
gauauguugguaaccugca

SEQ ID NO: 365851 - RNA, 19 nt, Artificial Sequence
  Description of Artificial Sequence: Synthetic oligonucleotide
uuugacggacaaaguguga

SEQ ID NO: 365852 - RNA, 19 nt, Artificial Sequence
  Description of Artificial Sequence: Synthetic oligonucleotide
aucgggagaccuuacggcu

SEQ ID NO: 365853 - RNA, 19 nt, Artificial Sequence
  Description of Artificial Sequence: Synthetic oligonucleotide
gcugaagcggcauugcaag

SEQ ID NO: 365854 - RNA, 19 nt, Artificial Sequence
  Description of Artificial Sequence: Synthetic oligonucleotide
gccaaaagcgcacagugug

SEQ ID NO: 365855 - RNA, 19 nt, Artificial Sequence
  Description of Artificial Sequence: Synthetic oligonucleotide
cuauaugguggcccaacug

SEQ ID NO: 365856 - RNA, 19 nt, Artificial Sequence
  Description of Artificial Sequence: Synthetic oligonucleotide
acaguguggucguagccug

SEQ ID NO: 365857 - RNA, 19 nt, Artificial Sequence
  Description of Artificial Sequence: Synthetic oligonucleotide
agguuucccuggcugacuc

SEQ ID NO: 365858 - RNA, 19 nt, Artificial Sequence
  Description of Artificial Sequence: Synthetic oligonucleotide
caucuacuggcccaacgag

SEQ ID NO: 365859 - RNA, 19 nt, Artificial Sequence
  Description of Artificial Sequence: Synthetic oligonucleotide
uugacuccgucguaacuga

SEQ ID NO: 365860 - RNA, 19 nt, Artificial Sequence
  Description of Artificial Sequence: Synthetic oligonucleotide
uccaaccacgggaugacuc

SEQ ID NO: 365861 - RNA, 19 nt, Artificial Sequence
  Description of Artificial Sequence: Synthetic oligonucleotide
ucauacaugcggauauguu

SEQ ID NO: 365862 - RNA, 19 nt, Artificial Sequence
  Description of Artificial Sequence: Synthetic oligonucleotide
aagcugguuaggucaccag

SEQ ID NO: 365863 - RNA, 19 nt, Artificial Sequence
  Description of Artificial Sequence: Synthetic oligonucleotide
aaccacgggaugacucucc

SEQ ID NO: 365864 - RNA, 19 nt, Artificial Sequence
  Description of Artificial Sequence: Synthetic oligonucleotide
uccagacuaaguccccuac

SEQ ID NO: 365865 - RNA, 19 nt, Artificial Sequence
  Description of Artificial Sequence: Synthetic oligonucleotide
agaggcuaacccagcacgc

SEQ ID NO: 365866 - RNA, 19 nt, Artificial Sequence
  Description of Artificial Sequence: Synthetic oligonucleotide
ugacuauguacugggaguc

SEQ ID NO: 365867 - RNA, 19 nt, Artificial Sequence
  Description of Artificial Sequence: Synthetic oligonucleotide
auguggauagcaccacucu

SEQ ID NO: 365868 - RNA, 19 nt, Artificial Sequence
  Description of Artificial Sequence: Synthetic oligonucleotide
caccaaugccacuugucag

SEQ ID NO: 365869 - RNA, 19 nt, Artificial Sequence
  Description of Artificial Sequence: Synthetic oligonucleotide
uccgccaaggggcuguaga

SEQ ID NO: 365870 - RNA, 19 nt, Artificial Sequence
  Description of Artificial Sequence: Synthetic oligonucleotide
guagccugcaguugccaag

SEQ ID NO: 365871 - RNA, 19 nt, Artificial Sequence
  Description of Artificial Sequence: Synthetic oligonucleotide
cagacauagcaguucccag

SEQ ID NO: 365872 - RNA, 19 nt, Artificial Sequence
  Description of Artificial Sequence: Synthetic oligonucleotide
cuauguacugggagucccc

SEQ ID NO: 365873 - RNA, 19 nt, Artificial Sequence
  Description of Artificial Sequence: Synthetic oligonucleotide
gauguggauagcaccacuc

SEQ ID NO: 365874 - RNA, 19 nt, Artificial Sequence
  Description of Artificial Sequence: Synthetic oligonucleotide
gacuuaccuaucugccucc

SEQ ID NO: 365875 - RNA, 19 nt, Artificial Sequence
  Description of Artificial Sequence: Synthetic oligonucleotide
agacuaaguccccuacuga

SEQ ID NO: 365876 - RNA, 19 nt, Artificial Sequence
  Description of Artificial Sequence: Synthetic oligonucleotide
ucguugagguacauccacu

SEQ ID NO: 365877 - RNA, 19 nt, Artificial Sequence
  Description of Artificial Sequence: Synthetic oligonucleotide
cagggauacaagagucagg

SEQ ID NO: 365878 - RNA, 19 nt, Artificial Sequence
  Description of Artificial Sequence: Synthetic oligonucleotide
cuacucuugaugcugagcu

SEQ ID NO: 365879 - RNA, 19 nt, Artificial Sequence
  Description of Artificial Sequence: Synthetic oligonucleotide
agaugugauggaaaacuca

SEQ ID NO: 365880 - RNA, 19 nt, Artificial Sequence
  Description of Artificial Sequence: Synthetic oligonucleotide
cuccugacuaaaaccguug

SEQ ID NO: 365881 - RNA, 19 nt, Artificial Sequence
  Description of Artificial Sequence: Synthetic oligonucleotide
cuccaaugcauucaccuga

SEQ ID NO: 365882 - RNA, 19 nt, Artificial Sequence
  Description of Artificial Sequence: Synthetic oligonucleotide
guucauugcuugauggcug

SEQ ID NO: 365883 - RNA, 19 nt, Artificial Sequence
  Description of Artificial Sequence: Synthetic oligonucleotide
ugccaaaagcgcacagugu

SEQ ID NO: 365884 - RNA, 19 nt, Artificial Sequence
  Description of Artificial Sequence: Synthetic oligonucleotide
aucauacaugcggauaugu

SEQ ID NO: 365885 - RNA, 19 nt, Artificial Sequence
  Description of Artificial Sequence: Synthetic oligonucleotide
cagauuccgggaucugagg

SEQ ID NO: 365886 - RNA, 19 nt, Artificial Sequence
  Description of Artificial Sequence: Synthetic oligonucleotide
uccgucugauggaagccca

SEQ ID NO: 365887 - RNA, 19 nt, Artificial Sequence
  Description of Artificial Sequence: Synthetic oligonucleotide
ugacggacaaagugugagu

SEQ ID NO: 365888 - RNA, 19 nt, Artificial Sequence
  Description of Artificial Sequence: Synthetic oligonucleotide
cuucggugcaacaccuuug

SEQ ID NO: 365889 - RNA, 19 nt, Artificial Sequence
  Description of Artificial Sequence: Synthetic oligonucleotide
ugcggauauguugguaacc

SEQ ID NO: 365890 - RNA, 19 nt, Artificial Sequence
  Description of Artificial Sequence: Synthetic oligonucleotide
gaccuaucagccccuuccc

SEQ ID NO: 365891 - RNA, 19 nt, Artificial Sequence
  Description of Artificial Sequence: Synthetic oligonucleotide
cuaaggaccgggccuguug

SEQ ID NO: 365892 - RNA, 19 nt, Artificial Sequence
  Description of Artificial Sequence: Synthetic oligonucleotide
gguaauuucuggaggggcc

SEQ ID NO: 365893 - RNA, 19 nt, Artificial Sequence
  Description of Artificial Sequence: Synthetic oligonucleotide
ggagcuucggugcaacacc

SEQ ID NO: 365894 - RNA, 19 nt, Artificial Sequence
  Description of Artificial Sequence: Synthetic oligonucleotide
aacucaggcucaggaauca

SEQ ID NO: 365895 - RNA, 19 nt, Artificial Sequence
  Description of Artificial Sequence: Synthetic oligonucleotide
cacacaauuaaugggugca

SEQ ID NO: 365896 - RNA, 19 nt, Artificial Sequence
  Description of Artificial Sequence: Synthetic oligonucleotide
agaggagaacuaucagggu

SEQ ID NO: 365897 - RNA, 19 nt, Artificial Sequence
  Description of Artificial Sequence: Synthetic oligonucleotide
uggacccugcccgagcagg

SEQ ID NO: 365898 - RNA, 19 nt, Artificial Sequence
  Description of Artificial Sequence: Synthetic oligonucleotide
aaugcccuacccagucagg

SEQ ID NO: 365899 - RNA, 19 nt, Artificial Sequence
  Description of Artificial Sequence: Synthetic oligonucleotide
auaugguggcccaacugag

SEQ ID NO: 365900 - RNA, 19 nt, Artificial Sequence
  Description of Artificial Sequence: Synthetic oligonucleotide
ugagaguccugaugcugca

SEQ ID NO: 365901 - RNA, 19 nt, Artificial Sequence
  Description of Artificial Sequence: Synthetic oligonucleotide
guagaggcuaacccagcac

SEQ ID NO: 365902 - RNA, 19 nt, Artificial Sequence
  Description of Artificial Sequence: Synthetic oligonucleotide
uguugguaaccugcagcag

SEQ ID NO: 365903 - RNA, 19 nt, Artificial Sequence
  Description of Artificial Sequence: Synthetic oligonucleotide
uacuacucuugaugcugag

SEQ ID NO: 365904 - RNA, 19 nt, Artificial Sequence
  Description of Artificial Sequence: Synthetic oligonucleotide
gaaggcacagccccacauc

SEQ ID NO: 365905 - RNA, 19 nt, Artificial Sequence
  Description of Artificial Sequence: Synthetic oligonucleotide
gagacaugccuggugacca

SEQ ID NO: 365906 - RNA, 19 nt, Artificial Sequence
  Description of Artificial Sequence: Synthetic oligonucleotide
uguacauccagcggccauc

SEQ ID NO: 365907 - RNA, 19 nt, Artificial Sequence
  Description of Artificial Sequence: Synthetic oligonucleotide
ucuuauugacuccgucgua

SEQ ID NO: 365908 - RNA, 19 nt, Artificial Sequence
  Description of Artificial Sequence: Synthetic oligonucleotide
cauauaccuggccaagaca

SEQ ID NO: 365909 - RNA, 19 nt, Artificial Sequence
  Description of Artificial Sequence: Synthetic oligonucleotide
caauccugacuguccaaug

SEQ ID NO: 365910 - RNA, 19 nt, Artificial Sequence
  Description of Artificial Sequence: Synthetic oligonucleotide
cugaagcggcauugcaagg

SEQ ID NO: 365911 - RNA, 19 nt, Artificial Sequence
  Description of Artificial Sequence: Synthetic oligonucleotide
aggcaauccugacugucca

SEQ ID NO: 365912 - RNA, 19 nt, Artificial Sequence
  Description of Artificial Sequence: Synthetic oligonucleotide
gugacuauguacugggagu

SEQ ID NO: 365913 - RNA, 19 nt, Artificial Sequence
  Description of Artificial Sequence: Synthetic oligonucleotide
cuuauugacuccgucguaa

SEQ ID NO: 365914 - RNA, 19 nt, Artificial Sequence
  Description of Artificial Sequence: Synthetic oligonucleotide
uccccuacugaccugccuu

SEQ ID NO: 365915 - RNA, 19 nt, Artificial Sequence
  Description of Artificial Sequence: Synthetic oligonucleotide
gugcauugucagcaggggc

SEQ ID NO: 365916 - RNA, 19 nt, Artificial Sequence
  Description of Artificial Sequence: Synthetic oligonucleotide
gauuacuacucuugaugcu

SEQ ID NO: 365917 - RNA, 19 nt, Artificial Sequence
  Description of Artificial Sequence: Synthetic oligonucleotide
aggcuaacccagcacgcug

SEQ ID NO: 365918 - RNA, 19 nt, Artificial Sequence
  Description of Artificial Sequence: Synthetic oligonucleotide
ggucguagccugcaguugc

SEQ ID NO: 365919 - RNA, 19 nt, Artificial Sequence
  Description of Artificial Sequence: Synthetic oligonucleotide
gaccugagagucacuuagg

SEQ ID NO: 365920 - RNA, 19 nt, Artificial Sequence
  Description of Artificial Sequence: Synthetic oligonucleotide
ccgucguaacugaugaugg

SEQ ID NO: 365921 - RNA, 19 nt, Artificial Sequence
  Description of Artificial Sequence: Synthetic oligonucleotide
ucccauauaccuggccaag

SEQ ID NO: 365922 - RNA, 19 nt, Artificial Sequence
  Description of Artificial Sequence: Synthetic oligonucleotide
caggggaacagaaagcucu

SEQ ID NO: 365923 - RNA, 19 nt, Artificial Sequence
  Description of Artificial Sequence: Synthetic oligonucleotide
aaggaccgggccuguugag

SEQ ID NO: 365924 - RNA, 19 nt, Artificial Sequence
  Description of Artificial Sequence: Synthetic oligonucleotide
gggugcauucaccuggaag

SEQ ID NO: 365925 - RNA, 19 nt, Artificial Sequence
  Description of Artificial Sequence: Synthetic oligonucleotide
agaccuuacggcugcuggu

SEQ ID NO: 365926 - RNA, 19 nt, Artificial Sequence
  Description of Artificial Sequence: Synthetic oligonucleotide
cagcacuauugacugcugc

SEQ ID NO: 365927 - RNA, 19 nt, Artificial Sequence
  Description of Artificial Sequence: Synthetic oligonucleotide
cuugucagguuccagacau

SEQ ID NO: 365928 - RNA, 19 nt, Artificial Sequence
  Description of Artificial Sequence: Synthetic oligonucleotide
gaccuuacggcugcuggug

SEQ ID NO: 365929 - RNA, 19 nt, Artificial Sequence
  Description of Artificial Sequence: Synthetic oligonucleotide
uuauuaccuuccagacuaa

SEQ ID NO: 365930 - RNA, 19 nt, Artificial Sequence
  Description of Artificial Sequence: Synthetic oligonucleotide
ccauaugcgagccguacag

SEQ ID NO: 365931 - RNA, 19 nt, Artificial Sequence
  Description of Artificial Sequence: Synthetic oligonucleotide
ggacaugaaugcccuaccc

SEQ ID NO: 365932 - RNA, 19 nt, Artificial Sequence
  Description of Artificial Sequence: Synthetic oligonucleotide
ccaaaagcgcacagugugg

SEQ ID NO: 365933 - RNA, 19 nt, Artificial Sequence
  Description of Artificial Sequence: Synthetic oligonucleotide
cugguuaggucaccagcac

SEQ ID NO: 365934 - RNA, 19 nt, Artificial Sequence
  Description of Artificial Sequence: Synthetic oligonucleotide
ugagucaccucgucaccaa

SEQ ID NO: 365935 - RNA, 19 nt, Artificial Sequence
  Description of Artificial Sequence: Synthetic oligonucleotide
gguuaggucaccagcacca

SEQ ID NO: 365936 - RNA, 19 nt, Artificial Sequence
  Description of Artificial Sequence: Synthetic oligonucleotide
uacaucuguuaccgcccug

SEQ ID NO: 365937 - RNA, 19 nt, Artificial Sequence
  Description of Artificial Sequence: Synthetic oligonucleotide
cuucccugagcaagccagc

SEQ ID NO: 365938 - RNA, 19 nt, Artificial Sequence
  Description of Artificial Sequence: Synthetic oligonucleotide
ccgguguacauccagcggc

SEQ ID NO: 365939 - RNA, 19 nt, Artificial Sequence
  Description of Artificial Sequence: Synthetic oligonucleotide
cacuauaccaggcaauccu

SEQ ID NO: 365940 - RNA, 19 nt, Artificial Sequence
  Description of Artificial Sequence: Synthetic oligonucleotide
ugagguuucccuggcugac

SEQ ID NO: 365941 - RNA, 19 nt, Artificial Sequence
  Description of Artificial Sequence: Synthetic oligonucleotide
ugcacuguucgggugcaga

SEQ ID NO: 365942 - RNA, 19 nt, Artificial Sequence
  Description of Artificial Sequence: Synthetic oligonucleotide
acuuaggccaggauaucgu

SEQ ID NO: 365943 - RNA, 19 nt, Artificial Sequence
  Description of Artificial Sequence: Synthetic oligonucleotide
uucgggugcagaugccacu

SEQ ID NO: 365944 - RNA, 19 nt, Artificial Sequence
  Description of Artificial Sequence: Synthetic oligonucleotide
ggagccuaaggaccgggcc

SEQ ID NO: 365945 - RNA, 19 nt, Artificial Sequence
  Description of Artificial Sequence: Synthetic oligonucleotide
gcccaagagucccauauac

SEQ ID NO: 365946 - RNA, 19 nt, Artificial Sequence
  Description of Artificial Sequence: Synthetic oligonucleotide
cuaaguccccuacugaccu

SEQ ID NO: 365947 - RNA, 19 nt, Artificial Sequence
  Description of Artificial Sequence: Synthetic oligonucleotide
cagcauggagcaagggcac

SEQ ID NO: 365948 - RNA, 19 nt, Artificial Sequence
  Description of Artificial Sequence: Synthetic oligonucleotide
uccagucucuacacaccaa

SEQ ID NO: 365949 - RNA, 19 nt, Artificial Sequence
  Description of Artificial Sequence: Synthetic oligonucleotide
ucccauaugcgagccguac

SEQ ID NO: 365950 - RNA, 19 nt, Artificial Sequence
  Description of Artificial Sequence: Synthetic oligonucleotide
auccucaugaaagcccaca

SEQ ID NO: 365951 - RNA, 19 nt, Artificial Sequence
  Description of Artificial Sequence: Synthetic oligonucleotide
cuccgucugauggaagccc

SEQ ID NO: 365952 - RNA, 19 nt, Artificial Sequence
  Description of Artificial Sequence: Synthetic oligonucleotide
uucaccugagaguccugau

SEQ ID NO: 365953 - RNA, 19 nt, Artificial Sequence
  Description of Artificial Sequence: Synthetic oligonucleotide
caagaucgggagaccuuac

SEQ ID NO: 365954 - RNA, 19 nt, Artificial Sequence
  Description of Artificial Sequence: Synthetic oligonucleotide
guacuacuuggcuugccaa

SEQ ID NO: 365955 - RNA, 19 nt, Artificial Sequence
  Description of Artificial Sequence: Synthetic oligonucleotide
gccaugguagucuggucag

SEQ ID NO: 365956 - RNA, 19 nt, Artificial Sequence
  Description of Artificial Sequence: Synthetic oligonucleotide
uaaguccccuacugaccug

SEQ ID NO: 365957 - RNA, 19 nt, Artificial Sequence
  Description of Artificial Sequence: Synthetic oligonucleotide
cucuaucuucuccugacua

SEQ ID NO: 365958 - RNA, 19 nt, Artificial Sequence
  Description of Artificial Sequence: Synthetic oligonucleotide
augcgagccguacagucuu

SEQ ID NO: 365959 - RNA, 19 nt, Artificial Sequence
  Description of Artificial Sequence: Synthetic oligonucleotide
auacgcugacacugcagau

SEQ ID NO: 365960 - RNA, 19 nt, Artificial Sequence
  Description of Artificial Sequence: Synthetic oligonucleotide
ccuaucugccuccccaggg

SEQ ID NO: 365961 - RNA, 19 nt, Artificial Sequence
  Description of Artificial Sequence: Synthetic oligonucleotide
uuccuccgucugauggaag

SEQ ID NO: 365962 - RNA, 19 nt, Artificial Sequence
  Description of Artificial Sequence: Synthetic oligonucleotide
cagagacaugccuggugac

SEQ ID NO: 365963 - RNA, 19 nt, Artificial Sequence
  Description of Artificial Sequence: Synthetic oligonucleotide
cauccaaccacgggaugac

SEQ ID NO: 365964 - RNA, 19 nt, Artificial Sequence
  Description of Artificial Sequence: Synthetic oligonucleotide
uugucagaggaggcuguga

SEQ ID NO: 365965 - RNA, 19 nt, Artificial Sequence
  Description of Artificial Sequence: Synthetic oligonucleotide
acacaauuaaugggugcau

SEQ ID NO: 365966 - RNA, 19 nt, Artificial Sequence
  Description of Artificial Sequence: Synthetic oligonucleotide
uucccugagcaagccagcu

SEQ ID NO: 365967 - RNA, 19 nt, Artificial Sequence
  Description of Artificial Sequence: Synthetic oligonucleotide
aggucccauaugcgagccg

SEQ ID NO: 365968 - RNA, 19 nt, Artificial Sequence
  Description of Artificial Sequence: Synthetic oligonucleotide
aguguggucguagccugca

SEQ ID NO: 365969 - RNA, 19 nt, Artificial Sequence
  Description of Artificial Sequence: Synthetic oligonucleotide
uacagucuuccccgccggu

SEQ ID NO: 365970 - RNA, 19 nt, Artificial Sequence
  Description of Artificial Sequence: Synthetic oligonucleotide
accacgggaugacucucca

SEQ ID NO: 365971 - RNA, 19 nt, Artificial Sequence
  Description of Artificial Sequence: Synthetic oligonucleotide
cauagcgcgugugggccgg

SEQ ID NO: 365972 - RNA, 19 nt, Artificial Sequence
  Description of Artificial Sequence: Synthetic oligonucleotide
ccugacuaaaaccguugac

SEQ ID NO: 365973 - RNA, 19 nt, Artificial Sequence
  Description of Artificial Sequence: Synthetic oligonucleotide
aaggggcuguagacaauca

SEQ ID NO: 365974 - RNA, 19 nt, Artificial Sequence
  Description of Artificial Sequence: Synthetic oligonucleotide
augcccuacccagucagga

SEQ ID NO: 365975 - RNA, 19 nt, Artificial Sequence
  Description of Artificial Sequence: Synthetic oligonucleotide
gagaacuaucaggguggcc

SEQ ID NO: 365976 - RNA, 19 nt, Artificial Sequence
  Description of Artificial Sequence: Synthetic oligonucleotide
ggcauagcgcgugugggcc

SEQ ID NO: 365977 - RNA, 19 nt, Artificial Sequence
  Description of Artificial Sequence: Synthetic oligonucleotide
ggacauacuguggacccug

SEQ ID NO: 365978 - RNA, 19 nt, Artificial Sequence
  Description of Artificial Sequence: Synthetic oligonucleotide
cagauguggauagcaccac

SEQ ID NO: 365979 - RNA, 19 nt, Artificial Sequence
  Description of Artificial Sequence: Synthetic oligonucleotide
ugcccuacccagucaggau

SEQ ID NO: 365980 - RNA, 19 nt, Artificial Sequence
  Description of Artificial Sequence: Synthetic oligonucleotide
caccaacaaaggacagcug

SEQ ID NO: 365981 - RNA, 19 nt, Artificial Sequence
  Description of Artificial Sequence: Synthetic oligonucleotide
cccuggauaucagauacug

SEQ ID NO: 365982 - RNA, 19 nt, Artificial Sequence
  Description of Artificial Sequence: Synthetic oligonucleotide
ugucugcuuuuauuaccuu

SEQ ID NO: 365983 - RNA, 19 nt, Artificial Sequence
  Description of Artificial Sequence: Synthetic oligonucleotide
gcaaggagcguggaaucag

SEQ ID NO: 365984 - RNA, 19 nt, Artificial Sequence
  Description of Artificial Sequence: Synthetic oligonucleotide
gccgguguacauccagcgg

SEQ ID NO: 365985 - RNA, 19 nt, Artificial Sequence
  Description of Artificial Sequence: Synthetic oligonucleotide
cuacuggcccaacgagcag

SEQ ID NO: 365986 - RNA, 19 nt, Artificial Sequence
  Description of Artificial Sequence: Synthetic oligonucleotide
cugacccuggauaucagau

SEQ ID NO: 365987 - RNA, 19 nt, Artificial Sequence
  Description of Artificial Sequence: Synthetic oligonucleotide
aggauaucguugagguaca

SEQ ID NO: 365988 - RNA, 19 nt, Artificial Sequence
  Description of Artificial Sequence: Synthetic oligonucleotide
uguuaccgcccugcagagc

SEQ ID NO: 365989 - RNA, 19 nt, Artificial Sequence
  Description of Artificial Sequence: Synthetic oligonucleotide
caguguggucguagccugc

SEQ ID NO: 365990 - RNA, 19 nt, Artificial Sequence
  Description of Artificial Sequence: Synthetic oligonucleotide
ugugggccgggaucuuggu

SEQ ID NO: 365991 - RNA, 19 nt, Artificial Sequence
  Description of Artificial Sequence: Synthetic oligonucleotide
gugagugagcuugggcgug

SEQ ID NO: 365992 - RNA, 19 nt, Artificial Sequence
  Description of Artificial Sequence: Synthetic oligonucleotide
cuucggucuggugugaucu

SEQ ID NO: 365993 - RNA, 19 nt, Artificial Sequence
  Description of Artificial Sequence: Synthetic oligonucleotide
guucgggugcagaugccac

SEQ ID NO: 365994 - RNA, 19 nt, Artificial Sequence
  Description of Artificial Sequence: Synthetic oligonucleotide
ugacuccgucguaacugau

SEQ ID NO: 365995 - RNA, 19 nt, Artificial Sequence
  Description of Artificial Sequence: Synthetic oligonucleotide
ccagauuaccuggccauag

SEQ ID NO: 365996 - RNA, 19 nt, Artificial Sequence
  Description of Artificial Sequence: Synthetic oligonucleotide
gcccaacugagucuuucug

SEQ ID NO: 365997 - RNA, 19 nt, Artificial Sequence
  Description of Artificial Sequence: Synthetic oligonucleotide
cauugaaggccaagcagau

SEQ ID NO: 365998 - RNA, 19 nt, Artificial Sequence
  Description of Artificial Sequence: Synthetic oligonucleotide
uaccgcccugcagagcacc

SEQ ID NO: 365999 - RNA, 19 nt, Artificial Sequence
  Description of Artificial Sequence: Synthetic oligonucleotide
gcaccaacaaaggacagcu

SEQ ID NO: 366000 - RNA, 19 nt, Artificial Sequence
  Description of Artificial Sequence: Synthetic oligonucleotide
guguggucguagccugcag

SEQ ID NO: 366001 - RNA, 19 nt, Artificial Sequence
  Description of Artificial Sequence: Synthetic oligonucleotide
aguccccuacugaccugcc

SEQ ID NO: 366002 - RNA, 19 nt, Artificial Sequence
  Description of Artificial Sequence: Synthetic oligonucleotide
caggaucaagaaaguacua

SEQ ID NO: 366003 - RNA, 19 nt, Artificial Sequence
  Description of Artificial Sequence: Synthetic oligonucleotide
gacagggucacugcccacu

SEQ ID NO: 366004 - RNA, 19 nt, Artificial Sequence
  Description of Artificial Sequence: Synthetic oligonucleotide
gucguagccugcaguugcc

SEQ ID NO: 366005 - RNA, 19 nt, Artificial Sequence
  Description of Artificial Sequence: Synthetic oligonucleotide
cagcuuucugauggccacc

SEQ ID NO: 366006 - RNA, 19 nt, Artificial Sequence
  Description of Artificial Sequence: Synthetic oligonucleotide
guggcaaggagcguggaau

SEQ ID NO: 366007 - RNA, 19 nt, Artificial Sequence
  Description of Artificial Sequence: Synthetic oligonucleotide
cugugacuauguacuggga

SEQ ID NO: 366008 - RNA, 19 nt, Artificial Sequence
  Description of Artificial Sequence: Synthetic oligonucleotide
ugacagggucacugcccac

SEQ ID NO: 366009 - RNA, 19 nt, Artificial Sequence
  Description of Artificial Sequence: Synthetic oligonucleotide
ccaggauuacuacucuuga

SEQ ID NO: 366010 - RNA, 19 nt, Artificial Sequence
  Description of Artificial Sequence: Synthetic oligonucleotide
gggccuguugagguaagug

SEQ ID NO: 366011 - RNA, 19 nt, Artificial Sequence
  Description of Artificial Sequence: Synthetic oligonucleotide
cgucguaacugaugauggg

SEQ ID NO: 366012 - RNA, 19 nt, Artificial Sequence
  Description of Artificial Sequence: Synthetic oligonucleotide
caguucccagcacuauuga

SEQ ID NO: 366013 - RNA, 19 nt, Artificial Sequence
  Description of Artificial Sequence: Synthetic oligonucleotide
gggaggauacaguuugacu

SEQ ID NO: 366014 - RNA, 19 nt, Artificial Sequence
  Description of Artificial Sequence: Synthetic oligonucleotide
gcccuacccagucaggauc

SEQ ID NO: 366015 - RNA, 19 nt, Artificial Sequence
  Description of Artificial Sequence: Synthetic oligonucleotide
gcauagcgcgugugggccg

SEQ ID NO: 366016 - RNA, 19 nt, Artificial Sequence
  Description of Artificial Sequence: Synthetic oligonucleotide
ggagaacuaucaggguggc

SEQ ID NO: 366017 - RNA, 19 nt, Artificial Sequence
  Description of Artificial Sequence: Synthetic oligonucleotide
gggauacaagagucaggac

SEQ ID NO: 366018 - RNA, 19 nt, Artificial Sequence
  Description of Artificial Sequence: Synthetic oligonucleotide
gcggcauugcaaggcauag

SEQ ID NO: 366019 - RNA, 19 nt, Artificial Sequence
  Description of Artificial Sequence: Synthetic oligonucleotide
gcuggcaaccacagcuggg

SEQ ID NO: 366020 - RNA, 19 nt, Artificial Sequence
  Description of Artificial Sequence: Synthetic oligonucleotide
agccacuauaccaggcaau

SEQ ID NO: 366021 - RNA, 19 nt, Artificial Sequence
  Description of Artificial Sequence: Synthetic oligonucleotide
ggacaaagugugagugagc

SEQ ID NO: 366022 - RNA, 19 nt, Artificial Sequence
  Description of Artificial Sequence: Synthetic oligonucleotide
gccgggaucuuggucuugg

SEQ ID NO: 366023 - RNA, 19 nt, Artificial Sequence
  Description of Artificial Sequence: Synthetic oligonucleotide
ugcgagccguacagucuuc

SEQ ID NO: 366024 - RNA, 19 nt, Artificial Sequence
  Description of Artificial Sequence: Synthetic oligonucleotide
aagcggcauugcaaggcau

SEQ ID NO: 366025 - RNA, 19 nt, Artificial Sequence
  Description of Artificial Sequence: Synthetic oligonucleotide
caaccacgggaugacucuc

SEQ ID NO: 366026 - RNA, 19 nt, Artificial Sequence
  Description of Artificial Sequence: Synthetic oligonucleotide
ccacuauaccaggcaaucc

SEQ ID NO: 366027 - RNA, 19 nt, Artificial Sequence
  Description of Artificial Sequence: Synthetic oligonucleotide
augggugcauucaccugga

SEQ ID NO: 366028 - RNA, 19 nt, Artificial Sequence
  Description of Artificial Sequence: Synthetic oligonucleotide
gaacuaucaggguggccuu

SEQ ID NO: 366029 - RNA, 19 nt, Artificial Sequence
  Description of Artificial Sequence: Synthetic oligonucleotide
ugggugcauucaccuggaa

SEQ ID NO: 366030 - RNA, 19 nt, Artificial Sequence
  Description of Artificial Sequence: Synthetic oligonucleotide
guggacccugcccgagcag

SEQ ID NO: 366031 - RNA, 19 nt, Artificial Sequence
  Description of Artificial Sequence: Synthetic oligonucleotide
cguggaaucagggcugaag

SEQ ID NO: 366032 - RNA, 19 nt, Artificial Sequence
  Description of Artificial Sequence: Synthetic oligonucleotide
agucuuucugcaggcccaa

SEQ ID NO: 366033 - RNA, 19 nt, Artificial Sequence
  Description of Artificial Sequence: Synthetic oligonucleotide
guggucguagccugcaguu

SEQ ID NO: 366034 - RNA, 19 nt, Artificial Sequence
  Description of Artificial Sequence: Synthetic oligonucleotide
caggauuacuacucuugau

SEQ ID NO: 366035 - RNA, 19 nt, Artificial Sequence
  Description of Artificial Sequence: Synthetic oligonucleotide
guacauccacuuagagcca

SEQ ID NO: 366036 - RNA, 19 nt, Artificial Sequence
  Description of Artificial Sequence: Synthetic oligonucleotide
cuuaggccaggauaucguu

SEQ ID NO: 366037 - RNA, 19 nt, Artificial Sequence
  Description of Artificial Sequence: Synthetic oligonucleotide
agcggcauugcaaggcaua

SEQ ID NO: 366038 - RNA, 19 nt, Artificial Sequence
  Description of Artificial Sequence: Synthetic oligonucleotide
gaggcuaacccagcacgcu

SEQ ID NO: 366039 - RNA, 19 nt, Artificial Sequence
  Description of Artificial Sequence: Synthetic oligonucleotide
ggauagcaccacucugguc

SEQ ID NO: 366040 - RNA, 19 nt, Artificial Sequence
  Description of Artificial Sequence: Synthetic oligonucleotide
gagcuucggugcaacaccu

SEQ ID NO: 366041 - RNA, 19 nt, Artificial Sequence
  Description of Artificial Sequence: Synthetic oligonucleotide
cgccgguguacauccagcg

SEQ ID NO: 366042 - RNA, 19 nt, Artificial Sequence
  Description of Artificial Sequence: Synthetic oligonucleotide
ugguaaccugcagcagcaa

SEQ ID NO: 366043 - RNA, 19 nt, Artificial Sequence
  Description of Artificial Sequence: Synthetic oligonucleotide
cgguguacauccagcggcc

SEQ ID NO: 366044 - RNA, 19 nt, Artificial Sequence
  Description of Artificial Sequence: Synthetic oligonucleotide
ccccacauccaaccacggg

SEQ ID NO: 366045 - RNA, 19 nt, Artificial Sequence
  Description of Artificial Sequence: Synthetic oligonucleotide
ggaaucagcugcucauuau

SEQ ID NO: 366046 - RNA, 19 nt, Artificial Sequence
  Description of Artificial Sequence: Synthetic oligonucleotide
ccgccaaggggcuguagac

SEQ ID NO: 366047 - RNA, 19 nt, Artificial Sequence
  Description of Artificial Sequence: Synthetic oligonucleotide
gcggauauguugguaaccu

SEQ ID NO: 366048 - RNA, 19 nt, Artificial Sequence
  Description of Artificial Sequence: Synthetic oligonucleotide
ggggugggacaugaaugcc

SEQ ID NO: 366049 - RNA, 19 nt, Artificial Sequence
  Description of Artificial Sequence: Synthetic oligonucleotide
guggaagggccaucaggcu

SEQ ID NO: 366050 - RNA, 19 nt, Artificial Sequence
  Description of Artificial Sequence: Synthetic oligonucleotide
cuaacccagcacgcuguca

SEQ ID NO: 366051 - RNA, 19 nt, Artificial Sequence
  Description of Artificial Sequence: Synthetic oligonucleotide
cagauuaccuggccauagu

SEQ ID NO: 366052 - RNA, 19 nt, Artificial Sequence
  Description of Artificial Sequence: Synthetic oligonucleotide
gcugacaguagggacaaau

SEQ ID NO: 366053 - RNA, 19 nt, Artificial Sequence
  Description of Artificial Sequence: Synthetic oligonucleotide
ugcuucggucuggugugau

SEQ ID NO: 366054 - RNA, 19 nt, Artificial Sequence
  Description of Artificial Sequence: Synthetic oligonucleotide
cugcccgagcaggagcuuc

SEQ ID NO: 366055 - RNA, 19 nt, Artificial Sequence
  Description of Artificial Sequence: Synthetic oligonucleotide
ggucccauaugcgagccgu

SEQ ID NO: 366056 - RNA, 19 nt, Artificial Sequence
  Description of Artificial Sequence: Synthetic oligonucleotide
gguggcaaggagcguggaa

SEQ ID NO: 366057 - RNA, 19 nt, Artificial Sequence
  Description of Artificial Sequence: Synthetic oligonucleotide
cggauauguugguaaccug

SEQ ID NO: 366058 - RNA, 19 nt, Artificial Sequence
  Description of Artificial Sequence: Synthetic oligonucleotide
cagcucucuuaacccagaa

SEQ ID NO: 366059 - RNA, 19 nt, Artificial Sequence
  Description of Artificial Sequence: Synthetic oligonucleotide
ccguugacaagagcaggug

SEQ ID NO: 366060 - RNA, 19 nt, Artificial Sequence
  Description of Artificial Sequence: Synthetic oligonucleotide
augcagccucaagggguag

SEQ ID NO: 366061 - RNA, 19 nt, Artificial Sequence
  Description of Artificial Sequence: Synthetic oligonucleotide
gcuucggucuggugugauc

SEQ ID NO: 366062 - RNA, 19 nt, Artificial Sequence
  Description of Artificial Sequence: Synthetic oligonucleotide
gcuaacccagcacgcuguc

SEQ ID NO: 366063 - RNA, 19 nt, Artificial Sequence
  Description of Artificial Sequence: Synthetic oligonucleotide
ggaccgggccuguugaggu

SEQ ID NO: 366064 - RNA, 19 nt, Artificial Sequence
  Description of Artificial Sequence: Synthetic oligonucleotide
gaagccccacugacaguaa

SEQ ID NO: 366065 - RNA, 19 nt, Artificial Sequence
  Description of Artificial Sequence: Synthetic oligonucleotide
cugcagauuccgggaucug

SEQ ID NO: 366066 - RNA, 19 nt, Artificial Sequence
  Description of Artificial Sequence: Synthetic oligonucleotide
ccaugguagucuggucagg

SEQ ID NO: 366067 - RNA, 19 nt, Artificial Sequence
  Description of Artificial Sequence: Synthetic oligonucleotide
gggagccuaaggaccgggc

SEQ ID NO: 366068 - RNA, 19 nt, Artificial Sequence
  Description of Artificial Sequence: Synthetic oligonucleotide
cgagccguacagucuuccc

SEQ ID NO: 366069 - RNA, 19 nt, Artificial Sequence
  Description of Artificial Sequence: Synthetic oligonucleotide
ucccaucuacuggcccaac

SEQ ID NO: 366070 - RNA, 19 nt, Artificial Sequence
  Description of Artificial Sequence: Synthetic oligonucleotide
cccgccgguguacauccag

SEQ ID NO: 366071 - RNA, 19 nt, Artificial Sequence
  Description of Artificial Sequence: Synthetic oligonucleotide
ggcaauccugacuguccaa

SEQ ID NO: 366072 - RNA, 19 nt, Artificial Sequence
  Description of Artificial Sequence: Synthetic oligonucleotide
ccguacagucuuccccgcc

SEQ ID NO: 366073 - RNA, 19 nt, Artificial Sequence
  Description of Artificial Sequence: Synthetic oligonucleotide
gcgagccguacagucuucc

SEQ ID NO: 366074 - RNA, 19 nt, Artificial Sequence
  Description of Artificial Sequence: Synthetic oligonucleotide
cauaugcgagccguacagu

SEQ ID NO: 366075 - RNA, 19 nt, Artificial Sequence
  Description of Artificial Sequence: Synthetic oligonucleotide
ccgggaucuuggucuuggg

SEQ ID NO: 366076 - RNA, 19 nt, Artificial Sequence
  Description of Artificial Sequence: Synthetic oligonucleotide
cccauaugcgagccguaca

SEQ ID NO: 366077 - RNA, 19 nt, Artificial Sequence
  Description of Artificial Sequence: Synthetic oligonucleotide
ggaggggccaugguagucu

SEQ ID NO: 366078 - RNA, 19 nt, Artificial Sequence
  Description of Artificial Sequence: Synthetic oligonucleotide
ccaagaucgggagaccuua

SEQ ID NO: 366079 - RNA, 19 nt, Artificial Sequence
  Description of Artificial Sequence: Synthetic oligonucleotide
ccugagcaagccagcucuc

SEQ ID NO: 366080 - RNA, 19 nt, Artificial Sequence
  Description of Artificial Sequence: Synthetic oligonucleotide
ccaaccacgggaugacucu

SEQ ID NO: 366081 - RNA, 19 nt, Artificial Sequence
  Description of Artificial Sequence: Synthetic oligonucleotide
cugagcaagccagcucucu

SEQ ID NO: 366082 - RNA, 19 nt, Artificial Sequence
  Description of Artificial Sequence: Synthetic oligonucleotide
gccccacauccaaccacgg

SEQ ID NO: 366083 - RNA, 19 nt, Artificial Sequence
  Description of Artificial Sequence: Synthetic oligonucleotide
cugcacuguucgggugcag

SEQ ID NO: 366084 - RNA, 19 nt, Artificial Sequence
  Description of Artificial Sequence: Synthetic oligonucleotide
gcgcgugugggccgggauc

SEQ ID NO: 366085 - RNA, 19 nt, Artificial Sequence
  Description of Artificial Sequence: Synthetic oligonucleotide
guccccuacugaccugccu

SEQ ID NO: 366086 - RNA, 19 nt, Artificial Sequence
  Description of Artificial Sequence: Synthetic oligonucleotide
gcuugggcguggggcagag

SEQ ID NO: 366087 - RNA, 19 nt, Artificial Sequence
  Description of Artificial Sequence: Synthetic oligonucleotide
ggcuaacccagcacgcugu

SEQ ID NO: 366088 - RNA, 19 nt, Artificial Sequence
  Description of Artificial Sequence: Synthetic oligonucleotide
ugccuggggugguguucau

SEQ ID NO: 366089 - RNA, 19 nt, Artificial Sequence
  Description of Artificial Sequence: Synthetic oligonucleotide
cuccgccaaggggcuguag

SEQ ID NO: 366090 - RNA, 19 nt, Artificial Sequence
  Description of Artificial Sequence: Synthetic oligonucleotide
ccucaagggguagaggcua

SEQ ID NO: 366091 - RNA, 19 nt, Artificial Sequence
  Description of Artificial Sequence: Synthetic oligonucleotide
ccagacuaaguccccuacu

SEQ ID NO: 366092 - RNA, 19 nt, Artificial Sequence
  Description of Artificial Sequence: Synthetic oligonucleotide
ccaaugcauucaccugaga

SEQ ID NO: 366093 - RNA, 19 nt, Artificial Sequence
  Description of Artificial Sequence: Synthetic oligonucleotide
cgcugacacugcagauucc

SEQ ID NO: 366094 - RNA, 19 nt, Artificial Sequence
  Description of Artificial Sequence: Synthetic oligonucleotide
ccagcacgcugucauugaa

SEQ ID NO: 366095 - RNA, 19 nt, Artificial Sequence
  Description of Artificial Sequence: Synthetic oligonucleotide
gucccauaugcgagccgua

SEQ ID NO: 366096 - RNA, 19 nt, Artificial Sequence
  Description of Artificial Sequence: Synthetic oligonucleotide
ugaugggguugggguuauu

SEQ ID NO: 366097 - RNA, 19 nt, Artificial Sequence
  Description of Artificial Sequence: Synthetic oligonucleotide
ccccuucccugagcaagcc

SEQ ID NO: 366098 - RNA, 19 nt, Artificial Sequence
  Description of Artificial Sequence: Synthetic oligonucleotide
cggugcaacaccuuugcuu

SEQ ID NO: 366099 - RNA, 19 nt, Artificial Sequence
  Description of Artificial Sequence: Synthetic oligonucleotide
cguagccugcaguugccaa

SEQ ID NO: 366100 - RNA, 19 nt, Artificial Sequence
  Description of Artificial Sequence: Synthetic oligonucleotide
cuccgucguaacugaugau

SEQ ID NO: 366101 - RNA, 19 nt, Artificial Sequence
  Description of Artificial Sequence: Synthetic oligonucleotide
cguugagguacauccacuu

SEQ ID NO: 366102 - RNA, 19 nt, Artificial Sequence
  Description of Artificial Sequence: Synthetic oligonucleotide
acuccgccaaggggcugua

SEQ ID NO: 366103 - RNA, 19 nt, Artificial Sequence
  Description of Artificial Sequence: Synthetic oligonucleotide
ccgucugauggaagcccaa

SEQ ID NO: 366104 - RNA, 19 nt, Artificial Sequence
  Description of Artificial Sequence: Synthetic oligonucleotide
cguaacugaugaugggguu

SEQ ID NO: 366105 - RNA, 19 nt, Artificial Sequence
  Description of Artificial Sequence: Synthetic oligonucleotide
cuuccccgccgguguacau

SEQ ID NO: 366106 - RNA, 19 nt, Artificial Sequence
  Description of Artificial Sequence: Synthetic oligonucleotide
cccaagaucgggagaccuu

SEQ ID NO: 366107 - RNA, 19 nt, Artificial Sequence
  Description of Artificial Sequence: Synthetic oligonucleotide
ccaaggggcuguagacaau

SEQ ID NO: 366108 - RNA, 19 nt, Artificial Sequence
  Description of Artificial Sequence: Synthetic oligonucleotide
ccaucaggcugggguggga

SEQ ID NO: 366109 - RNA, 19 nt, Artificial Sequence
  Description of Artificial Sequence: Synthetic oligonucleotide
cgcgugugggccgggaucu

SEQ ID NO: 366110 - RNA, 19 nt, Artificial Sequence
  Description of Artificial Sequence: Synthetic oligonucleotide
caggaccuaucagccccuu

SEQ ID NO: 366111 - RNA, 19 nt, Artificial Sequence
  Description of Artificial Sequence: Synthetic oligonucleotide
gccuaaggaccgggccugu

SEQ ID NO: 366112 - RNA, 19 nt, Artificial Sequence
  Description of Artificial Sequence: Synthetic oligonucleotide
guggcccaacugagucuuu

SEQ ID NO: 366113 - RNA, 19 nt, Artificial Sequence
  Description of Artificial Sequence: Synthetic oligonucleotide
ccccgccgguguacaucca

SEQ ID NO: 366114 - RNA, 19 nt, Artificial Sequence
  Description of Artificial Sequence: Synthetic oligonucleotide
ccuaaggaccgggccuguu

SEQ ID NO: 366115 - RNA, 19 nt, Artificial Sequence
  Description of Artificial Sequence: Synthetic oligonucleotide
aauauucuuagguggaagc

SEQ ID NO: 366116 - RNA, 19 nt, Artificial Sequence
  Description of Artificial Sequence: Synthetic oligonucleotide
auaucuaugaaccgguagc

SEQ ID NO: 366117 - RNA, 19 nt, Artificial Sequence
  Description of Artificial Sequence: Synthetic oligonucleotide
aacuguaacagugaugagc

SEQ ID NO: 366118 - RNA, 19 nt, Artificial Sequence
  Description of Artificial Sequence: Synthetic oligonucleotide
auaucauucuugcuaaagc

SEQ ID NO: 366119 - RNA, 19 nt, Artificial Sequence
  Description of Artificial Sequence: Synthetic oligonucleotide
gaugcugggcuuuauaagg

SEQ ID NO: 366120 - RNA, 19 nt, Artificial Sequence
  Description of Artificial Sequence: Synthetic oligonucleotide
aauacugcccaucaacuug

SEQ ID NO: 366121 - RNA, 19 nt, Artificial Sequence
  Description of Artificial Sequence: Synthetic oligonucleotide
uguaacacugcacaucucc

SEQ ID NO: 366122 - RNA, 19 nt, Artificial Sequence
  Description of Artificial Sequence: Synthetic oligonucleotide
uuuugcacggaucacuggg

SEQ ID NO: 366123 - RNA, 19 nt, Artificial Sequence
  Description of Artificial Sequence: Synthetic oligonucleotide
auaucgaugagauuggaca

SEQ ID NO: 366124 - RNA, 19 nt, Artificial Sequence
  Description of Artificial Sequence: Synthetic oligonucleotide
cucaaauuaagucccaugc

SEQ ID NO: 366125 - RNA, 19 nt, Artificial Sequence
  Description of Artificial Sequence: Synthetic oligonucleotide
uauaaaacuugucuaagau

SEQ ID NO: 366126 - RNA, 19 nt, Artificial Sequence
  Description of Artificial Sequence: Synthetic oligonucleotide
uguacagaagcucagugac

SEQ ID NO: 366127 - RNA, 19 nt, Artificial Sequence
  Description of Artificial Sequence: Synthetic oligonucleotide
cauguugcagacaaaauac

SEQ ID NO: 366128 - RNA, 19 nt, Artificial Sequence
  Description of Artificial Sequence: Synthetic oligonucleotide
uuagguggaagcaauggcc

SEQ ID NO: 366129 - RNA, 19 nt, Artificial Sequence
  Description of Artificial Sequence: Synthetic oligonucleotide
agauucaaaagcuugcgug

SEQ ID NO: 366130 - RNA, 19 nt, Artificial Sequence
  Description of Artificial Sequence: Synthetic oligonucleotide
uuuacggagaucuuccuug

SEQ ID NO: 366131 - RNA, 19 nt, Artificial Sequence
  Description of Artificial Sequence: Synthetic oligonucleotide
gagguaaggacaucgaggc

SEQ ID NO: 366132 - RNA, 19 nt, Artificial Sequence
  Description of Artificial Sequence: Synthetic oligonucleotide
ugauuuacggagaucuucc

SEQ ID NO: 366133 - RNA, 19 nt, Artificial Sequence
  Description of Artificial Sequence: Synthetic oligonucleotide
aauaucauucuugcuaaag

SEQ ID NO: 366134 - RNA, 19 nt, Artificial Sequence
  Description of Artificial Sequence: Synthetic oligonucleotide
uucauaaggaguuguaaca

SEQ ID NO: 366135 - RNA, 19 nt, Artificial Sequence
  Description of Artificial Sequence: Synthetic oligonucleotide
uuugcuccacucuuuaagg

SEQ ID NO: 366136 - RNA, 19 nt, Artificial Sequence
  Description of Artificial Sequence: Synthetic oligonucleotide
ugcagagaacuuaaaauca

SEQ ID NO: 366137 - RNA, 19 nt, Artificial Sequence
  Description of Artificial Sequence: Synthetic oligonucleotide
aagaccucgaacaagguug

SEQ ID NO: 366138 - RNA, 19 nt, Artificial Sequence
  Description of Artificial Sequence: Synthetic oligonucleotide
aaaccuaggucagagcugg

SEQ ID NO: 366139 - RNA, 19 nt, Artificial Sequence
  Description of Artificial Sequence: Synthetic oligonucleotide
ucuuuaagguuccugacaa

SEQ ID NO: 366140 - RNA, 19 nt, Artificial Sequence
  Description of Artificial Sequence: Synthetic oligonucleotide
aaaauaucgaugagauugg

SEQ ID NO: 366141 - RNA, 19 nt, Artificial Sequence
  Description of Artificial Sequence: Synthetic oligonucleotide
gaacauaucuaugaaccgg

SEQ ID NO: 366142 - RNA, 19 nt, Artificial Sequence
  Description of Artificial Sequence: Synthetic oligonucleotide
agcauuacucuucucaaag

SEQ ID NO: 366143 - RNA, 19 nt, Artificial Sequence
  Description of Artificial Sequence: Synthetic oligonucleotide
aagcagaugucauucaaga

SEQ ID NO: 366144 - RNA, 19 nt, Artificial Sequence
  Description of Artificial Sequence: Synthetic oligonucleotide
uccaauacaggaauauugu

SEQ ID NO: 366145 - RNA, 19 nt, Artificial Sequence
  Description of Artificial Sequence: Synthetic oligonucleotide
gauaauggcauccaguucu

SEQ ID NO: 366146 - RNA, 19 nt, Artificial Sequence
  Description of Artificial Sequence: Synthetic oligonucleotide
aaucugucggcucacagaa

SEQ ID NO: 366147 - RNA, 19 nt, Artificial Sequence
  Description of Artificial Sequence: Synthetic oligonucleotide
aguggaauaugcuggauca

SEQ ID NO: 366148 - RNA, 19 nt, Artificial Sequence
  Description of Artificial Sequence: Synthetic oligonucleotide
uguacugccuggcaaacug

SEQ ID NO: 366149 - RNA, 19 nt, Artificial Sequence
  Description of Artificial Sequence: Synthetic oligonucleotide
uucaagacaaugugaaugu

SEQ ID NO: 366150 - RNA, 19 nt, Artificial Sequence
  Description of Artificial Sequence: Synthetic oligonucleotide
auuaucuaaagacucuagu

SEQ ID NO: 366151 - RNA, 19 nt, Artificial Sequence
  Description of Artificial Sequence: Synthetic oligonucleotide
agagacgggcaucaagucc

SEQ ID NO: 366152 - RNA, 19 nt, Artificial Sequence
  Description of Artificial Sequence: Synthetic oligonucleotide
gacuuaguggaauaugcug

SEQ ID NO: 366153 - RNA, 19 nt, Artificial Sequence
  Description of Artificial Sequence: Synthetic oligonucleotide
ucuccuuaugcucaaauua

SEQ ID NO: 366154 - RNA, 19 nt, Artificial Sequence
  Description of Artificial Sequence: Synthetic oligonucleotide
ucacccguagacuuagugg

SEQ ID NO: 366155 - RNA, 19 nt, Artificial Sequence
  Description of Artificial Sequence: Synthetic oligonucleotide
uaucgaugagauuggacag

SEQ ID NO: 366156 - RNA, 19 nt, Artificial Sequence
  Description of Artificial Sequence: Synthetic oligonucleotide
aucugaauuucaucgauca

SEQ ID NO: 366157 - RNA, 19 nt, Artificial Sequence
  Description of Artificial Sequence: Synthetic oligonucleotide
gcuaccaggauuuugcacg

SEQ ID NO: 366158 - RNA, 19 nt, Artificial Sequence
  Description of Artificial Sequence: Synthetic oligonucleotide
agcucuauucaaaaucucc

SEQ ID NO: 366159 - RNA, 19 nt, Artificial Sequence
  Description of Artificial Sequence: Synthetic oligonucleotide
uguguacagaagcucagug

SEQ ID NO: 366160 - RNA, 19 nt, Artificial Sequence
  Description of Artificial Sequence: Synthetic oligonucleotide
uccagauucaaaagcuugc

SEQ ID NO: 366161 - RNA, 19 nt, Artificial Sequence
  Description of Artificial Sequence: Synthetic oligonucleotide
uuccugacaaaugugacug

SEQ ID NO: 366162 - RNA, 19 nt, Artificial Sequence
  Description of Artificial Sequence: Synthetic oligonucleotide
aucuaaagacucuagugca

SEQ ID NO: 366163 - RNA, 19 nt, Artificial Sequence
  Description of Artificial Sequence: Synthetic oligonucleotide
acauaccucacccguagac

SEQ ID NO: 366164 - RNA, 19 nt, Artificial Sequence
  Description of Artificial Sequence: Synthetic oligonucleotide
ucaacuugugcaaagucua

SEQ ID NO: 366165 - RNA, 19 nt, Artificial Sequence
  Description of Artificial Sequence: Synthetic oligonucleotide
aauuucuaaagcugaugaa

SEQ ID NO: 366166 - RNA, 19 nt, Artificial Sequence
  Description of Artificial Sequence: Synthetic oligonucleotide
aauacuaucuuccgucgua

SEQ ID NO: 366167 - RNA, 19 nt, Artificial Sequence
  Description of Artificial Sequence: Synthetic oligonucleotide
aaaagcuugcgugacucag

SEQ ID NO: 366168 - RNA, 19 nt, Artificial Sequence
  Description of Artificial Sequence: Synthetic oligonucleotide
ugcaugguaagucuuccca

SEQ ID NO: 366169 - RNA, 19 nt, Artificial Sequence
  Description of Artificial Sequence: Synthetic oligonucleotide
aaggaguuguaacacugca

SEQ ID NO: 366170 - RNA, 19 nt, Artificial Sequence
  Description of Artificial Sequence: Synthetic oligonucleotide
uccuuaugcucaaauuaag

SEQ ID NO: 366171 - RNA, 19 nt, Artificial Sequence
  Description of Artificial Sequence: Synthetic oligonucleotide
uuugcacggaucacugggg

SEQ ID NO: 366172 - RNA, 19 nt, Artificial Sequence
  Description of Artificial Sequence: Synthetic oligonucleotide
uugccuaaugguaaacucu

SEQ ID NO: 366173 - RNA, 19 nt, Artificial Sequence
  Description of Artificial Sequence: Synthetic oligonucleotide
agccucaacuguuugccgc

SEQ ID NO: 366174 - RNA, 19 nt, Artificial Sequence
  Description of Artificial Sequence: Synthetic oligonucleotide
cauccagagaaugagacug

SEQ ID NO: 366175 - RNA, 19 nt, Artificial Sequence
  Description of Artificial Sequence: Synthetic oligonucleotide
ugauguaccggcguaacca

SEQ ID NO: 366176 - RNA, 19 nt, Artificial Sequence
  Description of Artificial Sequence: Synthetic oligonucleotide
uucuaaagcugaugaaagc

SEQ ID NO: 366177 - RNA, 19 nt, Artificial Sequence
  Description of Artificial Sequence: Synthetic oligonucleotide
gacaaaauacugcccauca

SEQ ID NO: 366178 - RNA, 19 nt, Artificial Sequence
  Description of Artificial Sequence: Synthetic oligonucleotide
caaauuaagucccaugcca

SEQ ID NO: 366179 - RNA, 19 nt, Artificial Sequence
  Description of Artificial Sequence: Synthetic oligonucleotide
gguaaggacaucgaggccg

SEQ ID NO: 366180 - RNA, 19 nt, Artificial Sequence
  Description of Artificial Sequence: Synthetic oligonucleotide
uaauauucuuagguggaag

SEQ ID NO: 366181 - RNA, 19 nt, Artificial Sequence
  Description of Artificial Sequence: Synthetic oligonucleotide
gggaacauaucuaugaacc

SEQ ID NO: 366182 - RNA, 19 nt, Artificial Sequence
  Description of Artificial Sequence: Synthetic oligonucleotide
ucuaaucaucugaauuuca

SEQ ID NO: 366183 - RNA, 19 nt, Artificial Sequence
  Description of Artificial Sequence: Synthetic oligonucleotide
cuugcuaaagcagacgaug

SEQ ID NO: 366184 - RNA, 19 nt, Artificial Sequence
  Description of Artificial Sequence: Synthetic oligonucleotide
cauaucuaugaaccgguag

SEQ ID NO: 366185 - RNA, 19 nt, Artificial Sequence
  Description of Artificial Sequence: Synthetic oligonucleotide
cuugcuugagcaaguuugg

SEQ ID NO: 366186 - RNA, 19 nt, Artificial Sequence
  Description of Artificial Sequence: Synthetic oligonucleotide
uugggugguauccucaagu

SEQ ID NO: 366187 - RNA, 19 nt, Artificial Sequence
  Description of Artificial Sequence: Synthetic oligonucleotide
uaaggaguuguaacacugc

SEQ ID NO: 366188 - RNA, 19 nt, Artificial Sequence
  Description of Artificial Sequence: Synthetic oligonucleotide
uauuugugaaccucuacuu

SEQ ID NO: 366189 - RNA, 19 nt, Artificial Sequence
  Description of Artificial Sequence: Synthetic oligonucleotide
guagcuaccaggauuuugc

SEQ ID NO: 366190 - RNA, 19 nt, Artificial Sequence
  Description of Artificial Sequence: Synthetic oligonucleotide
ucgaugagauuggacagcg

SEQ ID NO: 366191 - RNA, 19 nt, Artificial Sequence
  Description of Artificial Sequence: Synthetic oligonucleotide
gugacugguugccuaaugg

SEQ ID NO: 366192 - RNA, 19 nt, Artificial Sequence
  Description of Artificial Sequence: Synthetic oligonucleotide
gcuugagcaaguuuggucc

SEQ ID NO: 366193 - RNA, 19 nt, Artificial Sequence
  Description of Artificial Sequence: Synthetic oligonucleotide
ucauaaggaguuguaacac

SEQ ID NO: 366194 - RNA, 19 nt, Artificial Sequence
  Description of Artificial Sequence: Synthetic oligonucleotide
ucaucugaauuucaucgau

SEQ ID NO: 366195 - RNA, 19 nt, Artificial Sequence
  Description of Artificial Sequence: Synthetic oligonucleotide
ucaaaaucuccuucaguaa

SEQ ID NO: 366196 - RNA, 19 nt, Artificial Sequence
  Description of Artificial Sequence: Synthetic oligonucleotide
gaaccgguagcucagccac

SEQ ID NO: 366197 - RNA, 19 nt, Artificial Sequence
  Description of Artificial Sequence: Synthetic oligonucleotide
ugccuaaugguaaacucuc

SEQ ID NO: 366198 - RNA, 19 nt, Artificial Sequence
  Description of Artificial Sequence: Synthetic oligonucleotide
gaucacagccacuucauaa

SEQ ID NO: 366199 - RNA, 19 nt, Artificial Sequence
  Description of Artificial Sequence: Synthetic oligonucleotide
auauuguuggcaugucuca

SEQ ID NO: 366200 - RNA, 19 nt, Artificial Sequence
  Description of Artificial Sequence: Synthetic oligonucleotide
uccagauuuggcugacagg

SEQ ID NO: 366201 - RNA, 19 nt, Artificial Sequence
  Description of Artificial Sequence: Synthetic oligonucleotide
ggaacauaucuaugaaccg

SEQ ID NO: 366202 - RNA, 19 nt, Artificial Sequence
  Description of Artificial Sequence: Synthetic oligonucleotide
aaugugacugguugccuaa

SEQ ID NO: 366203 - RNA, 19 nt, Artificial Sequence
  Description of Artificial Sequence: Synthetic oligonucleotide
agggaacgcguccuggagc

SEQ ID NO: 366204 - RNA, 19 nt, Artificial Sequence
  Description of Artificial Sequence: Synthetic oligonucleotide
acacauaccucacccguag

SEQ ID NO: 366205 - RNA, 19 nt, Artificial Sequence
  Description of Artificial Sequence: Synthetic oligonucleotide
agcuaccaggauuuugcac

SEQ ID NO: 366206 - RNA, 19 nt, Artificial Sequence
  Description of Artificial Sequence: Synthetic oligonucleotide
aaaugugacugguugccua

SEQ ID NO: 366207 - RNA, 19 nt, Artificial Sequence
  Description of Artificial Sequence: Synthetic oligonucleotide
gaaccugccggcucugccg

SEQ ID NO: 366208 - RNA, 19 nt, Artificial Sequence
  Description of Artificial Sequence: Synthetic oligonucleotide
aaauuaagucccaugccaa

SEQ ID NO: 366209 - RNA, 19 nt, Artificial Sequence
  Description of Artificial Sequence: Synthetic oligonucleotide
ggaguuguaacacugcaca

SEQ ID NO: 366210 - RNA, 19 nt, Artificial Sequence
  Description of Artificial Sequence: Synthetic oligonucleotide
ucaaaagcuugcgugacuc

SEQ ID NO: 366211 - RNA, 19 nt, Artificial Sequence
  Description of Artificial Sequence: Synthetic oligonucleotide
ugcaugauccagcacggaa

SEQ ID NO: 366212 - RNA, 19 nt, Artificial Sequence
  Description of Artificial Sequence: Synthetic oligonucleotide
gcagaugucauucaagaca

SEQ ID NO: 366213 - RNA, 19 nt, Artificial Sequence
  Description of Artificial Sequence: Synthetic oligonucleotide
ucuaaagacucuagugcau

SEQ ID NO: 366214 - RNA, 19 nt, Artificial Sequence
  Description of Artificial Sequence: Synthetic oligonucleotide
uguucggggcuuuggagcc

SEQ ID NO: 366215 - RNA, 19 nt, Artificial Sequence
  Description of Artificial Sequence: Synthetic oligonucleotide
aaugagacugcaugaugua

SEQ ID NO: 366216 - RNA, 19 nt, Artificial Sequence
  Description of Artificial Sequence: Synthetic oligonucleotide
ggaauacuaucuuccgucg

SEQ ID NO: 366217 - RNA, 19 nt, Artificial Sequence
  Description of Artificial Sequence: Synthetic oligonucleotide
agcaaacauuucaaucugc

SEQ ID NO: 366218 - RNA, 19 nt, Artificial Sequence
  Description of Artificial Sequence: Synthetic oligonucleotide
uaucuaugaaccgguagcu

SEQ ID NO: 366219 - RNA, 19 nt, Artificial Sequence
  Description of Artificial Sequence: Synthetic oligonucleotide
cuaucuuccgucguauggc

SEQ ID NO: 366220 - RNA, 19 nt, Artificial Sequence
  Description of Artificial Sequence: Synthetic oligonucleotide
guaacagugaugagcagac

SEQ ID NO: 366221 - RNA, 19 nt, Artificial Sequence
  Description of Artificial Sequence: Synthetic oligonucleotide
uuuggagccgccagaggca

SEQ ID NO: 366222 - RNA, 19 nt, Artificial Sequence
  Description of Artificial Sequence: Synthetic oligonucleotide
auuuugcacggaucacugg

SEQ ID NO: 366223 - RNA, 19 nt, Artificial Sequence
  Description of Artificial Sequence: Synthetic oligonucleotide
guugccuaaugguaaacuc

SEQ ID NO: 366224 - RNA, 19 nt, Artificial Sequence
  Description of Artificial Sequence: Synthetic oligonucleotide
gacacaccgagguaaggac

SEQ ID NO: 366225 - RNA, 19 nt, Artificial Sequence
  Description of Artificial Sequence: Synthetic oligonucleotide
aucaacuugugcaaagucu

SEQ ID NO: 366226 - RNA, 19 nt, Artificial Sequence
  Description of Artificial Sequence: Synthetic oligonucleotide
agggagaugguaagcaaac

SEQ ID NO: 366227 - RNA, 19 nt, Artificial Sequence
  Description of Artificial Sequence: Synthetic oligonucleotide
cucgguacauuguugugac

SEQ ID NO: 366228 - RNA, 19 nt, Artificial Sequence
  Description of Artificial Sequence: Synthetic oligonucleotide
agcaaguuuggucccaggu

SEQ ID NO: 366229 - RNA, 19 nt, Artificial Sequence
  Description of Artificial Sequence: Synthetic oligonucleotide
ugcuugagcaaguuugguc

SEQ ID NO: 366230 - RNA, 19 nt, Artificial Sequence
  Description of Artificial Sequence: Synthetic oligonucleotide
agucugggaacauaucuau

SEQ ID NO: 366231 - RNA, 19 nt, Artificial Sequence
  Description of Artificial Sequence: Synthetic oligonucleotide
guauuugugaaccucuacu

SEQ ID NO: 366232 - RNA, 19 nt, Artificial Sequence
  Description of Artificial Sequence: Synthetic oligonucleotide
ugugacugguugccuaaug

SEQ ID NO: 366233 - RNA, 19 nt, Artificial Sequence
  Description of Artificial Sequence: Synthetic oligonucleotide
aagcuugcgugacucagaa

SEQ ID NO: 366234 - RNA, 19 nt, Artificial Sequence
  Description of Artificial Sequence: Synthetic oligonucleotide
uucuuagguggaagcaaug

SEQ ID NO: 366235 - RNA, 19 nt, Artificial Sequence
  Description of Artificial Sequence: Synthetic oligonucleotide
ugcugugucagccacucuu

SEQ ID NO: 366236 - RNA, 19 nt, Artificial Sequence
  Description of Artificial Sequence: Synthetic oligonucleotide
cuuggauaauggcauccag

SEQ ID NO: 366237 - RNA, 19 nt, Artificial Sequence
  Description of Artificial Sequence: Synthetic oligonucleotide
cagaugucauucaagacaa

SEQ ID NO: 366238 - RNA, 19 nt, Artificial Sequence
  Description of Artificial Sequence: Synthetic oligonucleotide
cacaggguacaccagcagc

SEQ ID NO: 366239 - RNA, 19 nt, Artificial Sequence
  Description of Artificial Sequence: Synthetic oligonucleotide
guaaccaugcaaaggucag

SEQ ID NO: 366240 - RNA, 19 nt, Artificial Sequence
  Description of Artificial Sequence: Synthetic oligonucleotide
uuacggagaucuuccuugc

SEQ ID NO: 366241 - RNA, 19 nt, Artificial Sequence
  Description of Artificial Sequence: Synthetic oligonucleotide
auauucuuagguggaagca

SEQ ID NO: 366242 - RNA, 19 nt, Artificial Sequence
  Description of Artificial Sequence: Synthetic oligonucleotide
auuucaucgaucacagcca

SEQ ID NO: 366243 - RNA, 19 nt, Artificial Sequence
  Description of Artificial Sequence: Synthetic oligonucleotide
ugaaccgguagcucagcca

SEQ ID NO: 366244 - RNA, 19 nt, Artificial Sequence
  Description of Artificial Sequence: Synthetic oligonucleotide
cuugagcaaguuugguccc

SEQ ID NO: 366245 - RNA, 19 nt, Artificial Sequence
  Description of Artificial Sequence: Synthetic oligonucleotide
guguucggggcuuuggagc

SEQ ID NO: 366246 - RNA, 19 nt, Artificial Sequence
  Description of Artificial Sequence: Synthetic oligonucleotide
uaaccaugcaaaggucagg

SEQ ID NO: 366247 - RNA, 19 nt, Artificial Sequence
  Description of Artificial Sequence: Synthetic oligonucleotide
gaccucucccucuuugaag

SEQ ID NO: 366248 - RNA, 19 nt, Artificial Sequence
  Description of Artificial Sequence: Synthetic oligonucleotide
uuggacagcguugucucag

SEQ ID NO: 366249 - RNA, 19 nt, Artificial Sequence
  Description of Artificial Sequence: Synthetic oligonucleotide
aagucucuaaucaucugaa

SEQ ID NO: 366250 - RNA, 19 nt, Artificial Sequence
  Description of Artificial Sequence: Synthetic oligonucleotide
agauuggacagcguugucu

SEQ ID NO: 366251 - RNA, 19 nt, Artificial Sequence
  Description of Artificial Sequence: Synthetic oligonucleotide
aaauaucgaugagauugga

SEQ ID NO: 366252 - RNA, 19 nt, Artificial Sequence
  Description of Artificial Sequence: Synthetic oligonucleotide
gaaugagacugcaugaugu

SEQ ID NO: 366253 - RNA, 19 nt, Artificial Sequence
  Description of Artificial Sequence: Synthetic oligonucleotide
guagacuuaguggaauaug

SEQ ID NO: 366254 - RNA, 19 nt, Artificial Sequence
  Description of Artificial Sequence: Synthetic oligonucleotide
ccgaaucucaaucugucgg

SEQ ID NO: 366255 - RNA, 19 nt, Artificial Sequence
  Description of Artificial Sequence: Synthetic oligonucleotide
cuuuuggugccacgugucc

SEQ ID NO: 366256 - RNA, 19 nt, Artificial Sequence
  Description of Artificial Sequence: Synthetic oligonucleotide
ggugguauccucaagucac

SEQ ID NO: 366257 - RNA, 19 nt, Artificial Sequence
  Description of Artificial Sequence: Synthetic oligonucleotide
agaccggcugccuguauag

SEQ ID NO: 366258 - RNA, 19 nt, Artificial Sequence
  Description of Artificial Sequence: Synthetic oligonucleotide
gauccagcacggaaauggg

SEQ ID NO: 366259 - RNA, 19 nt, Artificial Sequence
  Description of Artificial Sequence: Synthetic oligonucleotide
uaucuuccgucguauggcu

SEQ ID NO: 366260 - RNA, 19 nt, Artificial Sequence
  Description of Artificial Sequence: Synthetic oligonucleotide
ugaaccugccggcucugcc

SEQ ID NO: 366261 - RNA, 19 nt, Artificial Sequence
  Description of Artificial Sequence: Synthetic oligonucleotide
ugcagugaggaguccuugc

SEQ ID NO: 366262 - RNA, 19 nt, Artificial Sequence
  Description of Artificial Sequence: Synthetic oligonucleotide
ucuugcuaaagcagacgau

SEQ ID NO: 366263 - RNA, 19 nt, Artificial Sequence
  Description of Artificial Sequence: Synthetic oligonucleotide
ucaguuuggugauguugug

SEQ ID NO: 366264 - RNA, 19 nt, Artificial Sequence
  Description of Artificial Sequence: Synthetic oligonucleotide
caccaucuuggauaauggc

SEQ ID NO: 366265 - RNA, 19 nt, Artificial Sequence
  Description of Artificial Sequence: Synthetic oligonucleotide
cacccguagacuuagugga

SEQ ID NO: 366266 - RNA, 19 nt, Artificial Sequence
  Description of Artificial Sequence: Synthetic oligonucleotide
uccugacaaaugugacugg

SEQ ID NO: 366267 - RNA, 19 nt, Artificial Sequence
  Description of Artificial Sequence: Synthetic oligonucleotide
guugggugaagaccggcug

SEQ ID NO: 366268 - RNA, 19 nt, Artificial Sequence
  Description of Artificial Sequence: Synthetic oligonucleotide
agugcagaacacauaccuc

SEQ ID NO: 366269 - RNA, 19 nt, Artificial Sequence
  Description of Artificial Sequence: Synthetic oligonucleotide
agugaugagcagacaaaag

SEQ ID NO: 366270 - RNA, 19 nt, Artificial Sequence
  Description of Artificial Sequence: Synthetic oligonucleotide
uaccaguugggugguaucc

SEQ ID NO: 366271 - RNA, 19 nt, Artificial Sequence
  Description of Artificial Sequence: Synthetic oligonucleotide
aagaucucgugugccagca

SEQ ID NO: 366272 - RNA, 19 nt, Artificial Sequence
  Description of Artificial Sequence: Synthetic oligonucleotide
gggaaaagaccccaccgag

SEQ ID NO: 366273 - RNA, 19 nt, Artificial Sequence
  Description of Artificial Sequence: Synthetic oligonucleotide
ccaugcaaaggucaggggc

SEQ ID NO: 366274 - RNA, 19 nt, Artificial Sequence
  Description of Artificial Sequence: Synthetic oligonucleotide
cucuaaucaucugaauuuc

SEQ ID NO: 366275 - RNA, 19 nt, Artificial Sequence
  Description of Artificial Sequence: Synthetic oligonucleotide
gaacaaggacguguucggg

SEQ ID NO: 366276 - RNA, 19 nt, Artificial Sequence
  Description of Artificial Sequence: Synthetic oligonucleotide
agccuuucguauuugugaa

SEQ ID NO: 366277 - RNA, 19 nt, Artificial Sequence
  Description of Artificial Sequence: Synthetic oligonucleotide
cuccuuaugcucaaauuaa

SEQ ID NO: 366278 - RNA, 19 nt, Artificial Sequence
  Description of Artificial Sequence: Synthetic oligonucleotide
aguccccgaaucucaaucu

SEQ ID NO: 366279 - RNA, 19 nt, Artificial Sequence
  Description of Artificial Sequence: Synthetic oligonucleotide
accaugcaaaggucagggg

SEQ ID NO: 366280 - RNA, 19 nt, Artificial Sequence
  Description of Artificial Sequence: Synthetic oligonucleotide
uggacagcguugucucagg

SEQ ID NO: 366281 - RNA, 19 nt, Artificial Sequence
  Description of Artificial Sequence: Synthetic oligonucleotide
ucgaucacagccacuucau

SEQ ID NO: 366282 - RNA, 19 nt, Artificial Sequence
  Description of Artificial Sequence: Synthetic oligonucleotide
ucccucuuugaagugugag

SEQ ID NO: 366283 - RNA, 19 nt, Artificial Sequence
  Description of Artificial Sequence: Synthetic oligonucleotide
auuuacggagaucuuccuu

SEQ ID NO: 366284 - RNA, 19 nt, Artificial Sequence
  Description of Artificial Sequence: Synthetic oligonucleotide
uuguccagaggccgaguga

SEQ ID NO: 366285 - RNA, 19 nt, Artificial Sequence
  Description of Artificial Sequence: Synthetic oligonucleotide
caccgagguaaggacaucg

SEQ ID NO: 366286 - RNA, 19 nt, Artificial Sequence
  Description of Artificial Sequence: Synthetic oligonucleotide
uugcuccacucuuuaaggu

SEQ ID NO: 366287 - RNA, 19 nt, Artificial Sequence
  Description of Artificial Sequence: Synthetic oligonucleotide
agauuaucuaaagacucua

SEQ ID NO: 366288 - RNA, 19 nt, Artificial Sequence
  Description of Artificial Sequence: Synthetic oligonucleotide
aucuaugaaccgguagcuc

SEQ ID NO: 366289 - RNA, 19 nt, Artificial Sequence
  Description of Artificial Sequence: Synthetic oligonucleotide
ugggugguauccucaaguc

SEQ ID NO: 366290 - RNA, 19 nt, Artificial Sequence
  Description of Artificial Sequence: Synthetic oligonucleotide
acggagaucuuccuugcau

SEQ ID NO: 366291 - RNA, 19 nt, Artificial Sequence
  Description of Artificial Sequence: Synthetic oligonucleotide
cgagguaaggacaucgagg

SEQ ID NO: 366292 - RNA, 19 nt, Artificial Sequence
  Description of Artificial Sequence: Synthetic oligonucleotide
ccuuucguauuugugaacc

SEQ ID NO: 366293 - RNA, 19 nt, Artificial Sequence
  Description of Artificial Sequence: Synthetic oligonucleotide
augagauuggacagcguug

SEQ ID NO: 366294 - RNA, 19 nt, Artificial Sequence
  Description of Artificial Sequence: Synthetic oligonucleotide
ugccuguauaggauccaca

SEQ ID NO: 366295 - RNA, 19 nt, Artificial Sequence
  Description of Artificial Sequence: Synthetic oligonucleotide
cuggaucaacucugcagag

SEQ ID NO: 366296 - RNA, 19 nt, Artificial Sequence
  Description of Artificial Sequence: Synthetic oligonucleotide
caauugcaucuguagcuac

SEQ ID NO: 366297 - RNA, 19 nt, Artificial Sequence
  Description of Artificial Sequence: Synthetic oligonucleotide
cucacccguagacuuagug

SEQ ID NO: 366298 - RNA, 19 nt, Artificial Sequence
  Description of Artificial Sequence: Synthetic oligonucleotide
uacuaucuuccgucguaug

SEQ ID NO: 366299 - RNA, 19 nt, Artificial Sequence
  Description of Artificial Sequence: Synthetic oligonucleotide
gacucuagugcaugaucca

SEQ ID NO: 366300 - RNA, 19 nt, Artificial Sequence
  Description of Artificial Sequence: Synthetic oligonucleotide
aaagcuugcgugacucaga

SEQ ID NO: 366301 - RNA, 19 nt, Artificial Sequence
  Description of Artificial Sequence: Synthetic oligonucleotide
ugagcaaguuuggucccag

SEQ ID NO: 366302 - RNA, 19 nt, Artificial Sequence
  Description of Artificial Sequence: Synthetic oligonucleotide
agguuccugacaaauguga

SEQ ID NO: 366303 - RNA, 19 nt, Artificial Sequence
  Description of Artificial Sequence: Synthetic oligonucleotide
uccgucguauggcucuggc

SEQ ID NO: 366304 - RNA, 19 nt, Artificial Sequence
  Description of Artificial Sequence: Synthetic oligonucleotide
ggaaaagaccccaccgagg

SEQ ID NO: 366305 - RNA, 19 nt, Artificial Sequence
  Description of Artificial Sequence: Synthetic oligonucleotide
uguuggcaugucucaagaa

SEQ ID NO: 366306 - RNA, 19 nt, Artificial Sequence
  Description of Artificial Sequence: Synthetic oligonucleotide
agaccucgaacaagguugg

SEQ ID NO: 366307 - RNA, 19 nt, Artificial Sequence
  Description of Artificial Sequence: Synthetic oligonucleotide
caucauggacagcuucaag

SEQ ID NO: 366308 - RNA, 19 nt, Artificial Sequence
  Description of Artificial Sequence: Synthetic oligonucleotide
caguccccgaaucucaauc

SEQ ID NO: 366309 - RNA, 19 nt, Artificial Sequence
  Description of Artificial Sequence: Synthetic oligonucleotide
cuugauguaccggcguaac

SEQ ID NO: 366310 - RNA, 19 nt, Artificial Sequence
  Description of Artificial Sequence: Synthetic oligonucleotide
aggggcucauuccugcugu

SEQ ID NO: 366311 - RNA, 19 nt, Artificial Sequence
  Description of Artificial Sequence: Synthetic oligonucleotide
aggcgcgaagggcagagca

SEQ ID NO: 366312 - RNA, 19 nt, Artificial Sequence
  Description of Artificial Sequence: Synthetic oligonucleotide
aagcuugguggaagagacg

SEQ ID NO: 366313 - RNA, 19 nt, Artificial Sequence
  Description of Artificial Sequence: Synthetic oligonucleotide
uugcgugacucagaaauuu

SEQ ID NO: 366314 - RNA, 19 nt, Artificial Sequence
  Description of Artificial Sequence: Synthetic oligonucleotide
gacguguucggggcuuugg

SEQ ID NO: 366315 - RNA, 19 nt, Artificial Sequence
  Description of Artificial Sequence: Synthetic oligonucleotide
ugaguggcucugcagcuuu

SEQ ID NO: 366316 - RNA, 19 nt, Artificial Sequence
  Description of Artificial Sequence: Synthetic oligonucleotide
gggaacgcguccuggagcc

SEQ ID NO: 366317 - RNA, 19 nt, Artificial Sequence
  Description of Artificial Sequence: Synthetic oligonucleotide
caugcaaaggucaggggcu

SEQ ID NO: 366318 - RNA, 19 nt, Artificial Sequence
  Description of Artificial Sequence: Synthetic oligonucleotide
gauuccaguccccgaaucu

SEQ ID NO: 366319 - RNA, 19 nt, Artificial Sequence
  Description of Artificial Sequence: Synthetic oligonucleotide
guaagucuucccacuguug

SEQ ID NO: 366320 - RNA, 19 nt, Artificial Sequence
  Description of Artificial Sequence: Synthetic oligonucleotide
auacugcccaucaacuugu

SEQ ID NO: 366321 - RNA, 19 nt, Artificial Sequence
  Description of Artificial Sequence: Synthetic oligonucleotide
ugguauccucaagucacug

SEQ ID NO: 366322 - RNA, 19 nt, Artificial Sequence
  Description of Artificial Sequence: Synthetic oligonucleotide
ugaugaaagcuugguggaa

SEQ ID NO: 366323 - RNA, 19 nt, Artificial Sequence
  Description of Artificial Sequence: Synthetic oligonucleotide
ggcuuuauaagggaguaaa

SEQ ID NO: 366324 - RNA, 19 nt, Artificial Sequence
  Description of Artificial Sequence: Synthetic oligonucleotide
uauccucaagucacugauu

SEQ ID NO: 366325 - RNA, 19 nt, Artificial Sequence
  Description of Artificial Sequence: Synthetic oligonucleotide
auuccaauacaggaauauu

SEQ ID NO: 366326 - RNA, 19 nt, Artificial Sequence
  Description of Artificial Sequence: Synthetic oligonucleotide
ugggaggcugccauauaua

SEQ ID NO: 366327 - RNA, 19 nt, Artificial Sequence
  Description of Artificial Sequence: Synthetic oligonucleotide
agcagauuccaguccccga

SEQ ID NO: 366328 - RNA, 19 nt, Artificial Sequence
  Description of Artificial Sequence: Synthetic oligonucleotide
guuccugacaaaugugacu

SEQ ID NO: 366329 - RNA, 19 nt, Artificial Sequence
  Description of Artificial Sequence: Synthetic oligonucleotide
ugucggcucacagaauaaa

SEQ ID NO: 366330 - RNA, 19 nt, Artificial Sequence
  Description of Artificial Sequence: Synthetic oligonucleotide
ggagucugggaacauaucu

SEQ ID NO: 366331 - RNA, 19 nt, Artificial Sequence
  Description of Artificial Sequence: Synthetic oligonucleotide
uggagucugggaacauauc

SEQ ID NO: 366332 - RNA, 19 nt, Artificial Sequence
  Description of Artificial Sequence: Synthetic oligonucleotide
gauuuggcugacagguauc

SEQ ID NO: 366333 - RNA, 19 nt, Artificial Sequence
  Description of Artificial Sequence: Synthetic oligonucleotide
gaacgcguccuggagcccc

SEQ ID NO: 366334 - RNA, 19 nt, Artificial Sequence
  Description of Artificial Sequence: Synthetic oligonucleotide
auacuaucuuccgucguau

SEQ ID NO: 366335 - RNA, 19 nt, Artificial Sequence
  Description of Artificial Sequence: Synthetic oligonucleotide
cagcgguugggugaagacc

SEQ ID NO: 366336 - RNA, 19 nt, Artificial Sequence
  Description of Artificial Sequence: Synthetic oligonucleotide
cucgugugccagcaguuuc

SEQ ID NO: 366337 - RNA, 19 nt, Artificial Sequence
  Description of Artificial Sequence: Synthetic oligonucleotide
cucagggagaugguaagca

SEQ ID NO: 366338 - RNA, 19 nt, Artificial Sequence
  Description of Artificial Sequence: Synthetic oligonucleotide
caggccgaagauuaucuaa

SEQ ID NO: 366339 - RNA, 19 nt, Artificial Sequence
  Description of Artificial Sequence: Synthetic oligonucleotide
acguguucggggcuuugga

SEQ ID NO: 366340 - RNA, 19 nt, Artificial Sequence
  Description of Artificial Sequence: Synthetic oligonucleotide
cccucuuugaagugugagc

SEQ ID NO: 366341 - RNA, 19 nt, Artificial Sequence
  Description of Artificial Sequence: Synthetic oligonucleotide
cagcucuauucaaaaucuc

SEQ ID NO: 366342 - RNA, 19 nt, Artificial Sequence
  Description of Artificial Sequence: Synthetic oligonucleotide
cagcagauucuccacacaa

SEQ ID NO: 366343 - RNA, 19 nt, Artificial Sequence
  Description of Artificial Sequence: Synthetic oligonucleotide
cagcagauuccaguccccg

SEQ ID NO: 366344 - RNA, 19 nt, Artificial Sequence
  Description of Artificial Sequence: Synthetic oligonucleotide
uugagcaaguuugguccca

SEQ ID NO: 366345 - RNA, 19 nt, Artificial Sequence
  Description of Artificial Sequence: Synthetic oligonucleotide
accggcguaaccaugcaaa

SEQ ID NO: 366346 - RNA, 19 nt, Artificial Sequence
  Description of Artificial Sequence: Synthetic oligonucleotide
aacacauaccucacccgua

SEQ ID NO: 366347 - RNA, 19 nt, Artificial Sequence
  Description of Artificial Sequence: Synthetic oligonucleotide
gauuuacggagaucuuccu

SEQ ID NO: 366348 - RNA, 19 nt, Artificial Sequence
  Description of Artificial Sequence: Synthetic oligonucleotide
gagucugggaacauaucua

SEQ ID NO: 366349 - RNA, 19 nt, Artificial Sequence
  Description of Artificial Sequence: Synthetic oligonucleotide
uuaguggaauaugcuggau

SEQ ID NO: 366350 - RNA, 19 nt, Artificial Sequence
  Description of Artificial Sequence: Synthetic oligonucleotide
cagggagaugguaagcaaa

SEQ ID NO: 366351 - RNA, 19 nt, Artificial Sequence
  Description of Artificial Sequence: Synthetic oligonucleotide
acaguacaagagacauggg

SEQ ID NO: 366352 - RNA, 19 nt, Artificial Sequence
  Description of Artificial Sequence: Synthetic oligonucleotide
ucgguacauuguugugacc

SEQ ID NO: 366353 - RNA, 19 nt, Artificial Sequence
  Description of Artificial Sequence: Synthetic oligonucleotide
ccuguauaggauccacagc

SEQ ID NO: 366354 - RNA, 19 nt, Artificial Sequence
  Description of Artificial Sequence: Synthetic oligonucleotide
cgaaucucaaucugucggc

SEQ ID NO: 366355 - RNA, 19 nt, Artificial Sequence
  Description of Artificial Sequence: Synthetic oligonucleotide
cugggaacauaucuaugaa

SEQ ID NO: 366356 - RNA, 19 nt, Artificial Sequence
  Description of Artificial Sequence: Synthetic oligonucleotide
caugguaagucuucccacu

SEQ ID NO: 366357 - RNA, 19 nt, Artificial Sequence
  Description of Artificial Sequence: Synthetic oligonucleotide
uugcuugagcaaguuuggu

SEQ ID NO: 366358 - RNA, 19 nt, Artificial Sequence
  Description of Artificial Sequence: Synthetic oligonucleotide
aggccgaagauuaucuaaa

SEQ ID NO: 366359 - RNA, 19 nt, Artificial Sequence
  Description of Artificial Sequence: Synthetic oligonucleotide
gcuucaagauccaugaggu

SEQ ID NO: 366360 - RNA, 19 nt, Artificial Sequence
  Description of Artificial Sequence: Synthetic oligonucleotide
gucguauggcucuggcuuc

SEQ ID NO: 366361 - RNA, 19 nt, Artificial Sequence
  Description of Artificial Sequence: Synthetic oligonucleotide
uaccggcguaaccaugcaa

SEQ ID NO: 366362 - RNA, 19 nt, Artificial Sequence
  Description of Artificial Sequence: Synthetic oligonucleotide
aggacacaccgagguaagg

SEQ ID NO: 366363 - RNA, 19 nt, Artificial Sequence
  Description of Artificial Sequence: Synthetic oligonucleotide
uggggucauuaaacuuucu

SEQ ID NO: 366364 - RNA, 19 nt, Artificial Sequence
  Description of Artificial Sequence: Synthetic oligonucleotide
cccgaaucucaaucugucg

SEQ ID NO: 366365 - RNA, 19 nt, Artificial Sequence
  Description of Artificial Sequence: Synthetic oligonucleotide
acacaccgagguaaggaca

SEQ ID NO: 366366 - RNA, 19 nt, Artificial Sequence
  Description of Artificial Sequence: Synthetic oligonucleotide
guaccaguugggugguauc

SEQ ID NO: 366367 - RNA, 19 nt, Artificial Sequence
  Description of Artificial Sequence: Synthetic oligonucleotide
ggacagcguugucucaggg

SEQ ID NO: 366368 - RNA, 19 nt, Artificial Sequence
  Description of Artificial Sequence: Synthetic oligonucleotide
aggucaauagcagcagauu

SEQ ID NO: 366369 - RNA, 19 nt, Artificial Sequence
  Description of Artificial Sequence: Synthetic oligonucleotide
gagaaugagacugcaugau

SEQ ID NO: 366370 - RNA, 19 nt, Artificial Sequence
  Description of Artificial Sequence: Synthetic oligonucleotide
gauguaccggcguaaccau

SEQ ID NO: 366371 - RNA, 19 nt, Artificial Sequence
  Description of Artificial Sequence: Synthetic oligonucleotide
agcucggcgcccacgucgc

SEQ ID NO: 366372 - RNA, 19 nt, Artificial Sequence
  Description of Artificial Sequence: Synthetic oligonucleotide
ugccgcucuucaccuguca

SEQ ID NO: 366373 - RNA, 19 nt, Artificial Sequence
  Description of Artificial Sequence: Synthetic oligonucleotide
caaaagcuugcgugacuca

SEQ ID NO: 366374 - RNA, 19 nt, Artificial Sequence
  Description of Artificial Sequence: Synthetic oligonucleotide
aguccauagucagcacuca

SEQ ID NO: 366375 - RNA, 19 nt, Artificial Sequence
  Description of Artificial Sequence: Synthetic oligonucleotide
ugguugccuaaugguaaac

SEQ ID NO: 366376 - RNA, 19 nt, Artificial Sequence
  Description of Artificial Sequence: Synthetic oligonucleotide
ugucagcggcacgaacaag

SEQ ID NO: 366377 - RNA, 19 nt, Artificial Sequence
  Description of Artificial Sequence: Synthetic oligonucleotide
aacgcguccuggagccccg

SEQ ID NO: 366378 - RNA, 19 nt, Artificial Sequence
  Description of Artificial Sequence: Synthetic oligonucleotide
uaccucacccguagacuua

SEQ ID NO: 366379 - RNA, 19 nt, Artificial Sequence
  Description of Artificial Sequence: Synthetic oligonucleotide
gggaggcugccauauauaa

SEQ ID NO: 366380 - RNA, 19 nt, Artificial Sequence
  Description of Artificial Sequence: Synthetic oligonucleotide
gagauuggacagcguuguc

SEQ ID NO: 366381 - RNA, 19 nt, Artificial Sequence
  Description of Artificial Sequence: Synthetic oligonucleotide
cacuucauaaggaguugua

SEQ ID NO: 366382 - RNA, 19 nt, Artificial Sequence
  Description of Artificial Sequence: Synthetic oligonucleotide
cauuccaauacaggaauau

SEQ ID NO: 366383 - RNA, 19 nt, Artificial Sequence
  Description of Artificial Sequence: Synthetic oligonucleotide
ucguauggcucuggcuucu

SEQ ID NO: 366384 - RNA, 19 nt, Artificial Sequence
  Description of Artificial Sequence: Synthetic oligonucleotide
cugccuguauaggauccac

SEQ ID NO: 366385 - RNA, 19 nt, Artificial Sequence
  Description of Artificial Sequence: Synthetic oligonucleotide
aaggacguguucggggcuu

SEQ ID NO: 366386 - RNA, 19 nt, Artificial Sequence
  Description of Artificial Sequence: Synthetic oligonucleotide
ccgagguaaggacaucgag

SEQ ID NO: 366387 - RNA, 19 nt, Artificial Sequence
  Description of Artificial Sequence: Synthetic oligonucleotide
gaccggcugccuguauagg

SEQ ID NO: 366388 - RNA, 19 nt, Artificial Sequence
  Description of Artificial Sequence: Synthetic oligonucleotide
cguaaccaugcaaagguca

SEQ ID NO: 366389 - RNA, 19 nt, Artificial Sequence
  Description of Artificial Sequence: Synthetic oligonucleotide
guuugccgcucuucaccug

SEQ ID NO: 366390 - RNA, 19 nt, Artificial Sequence
  Description of Artificial Sequence: Synthetic oligonucleotide
agacugcaugauguaauuu

SEQ ID NO: 366391 - RNA, 19 nt, Artificial Sequence
  Description of Artificial Sequence: Synthetic oligonucleotide
ugcucagcgguugggugaa

SEQ ID NO: 366392 - RNA, 19 nt, Artificial Sequence
  Description of Artificial Sequence: Synthetic oligonucleotide
gugaagaccggcugccugu

SEQ ID NO: 366393 - RNA, 19 nt, Artificial Sequence
  Description of Artificial Sequence: Synthetic oligonucleotide
ccagauuuggcugacaggu

SEQ ID NO: 366394 - RNA, 19 nt, Artificial Sequence
  Description of Artificial Sequence: Synthetic oligonucleotide
aaccuaggucagagcuggg

SEQ ID NO: 366395 - RNA, 19 nt, Artificial Sequence
  Description of Artificial Sequence: Synthetic oligonucleotide
cugguugccuaaugguaaa

SEQ ID NO: 366396 - RNA, 19 nt, Artificial Sequence
  Description of Artificial Sequence: Synthetic oligonucleotide
cagcauuacucuucucaaa

SEQ ID NO: 366397 - RNA, 19 nt, Artificial Sequence
  Description of Artificial Sequence: Synthetic oligonucleotide
cacgaacaaggacguguuc

SEQ ID NO: 366398 - RNA, 19 nt, Artificial Sequence
  Description of Artificial Sequence: Synthetic oligonucleotide
aagauccaugaggucuuua

SEQ ID NO: 366399 - RNA, 19 nt, Artificial Sequence
  Description of Artificial Sequence: Synthetic oligonucleotide
uuccgucguauggcucugg

SEQ ID NO: 366400 - RNA, 19 nt, Artificial Sequence
  Description of Artificial Sequence: Synthetic oligonucleotide
caucgaucacagccacuuc

SEQ ID NO: 366401 - RNA, 19 nt, Artificial Sequence
  Description of Artificial Sequence: Synthetic oligonucleotide
gcacuuuuggugccacgug

SEQ ID NO: 366402 - RNA, 19 nt, Artificial Sequence
  Description of Artificial Sequence: Synthetic oligonucleotide
gcgcgaagggcagagcagg

SEQ ID NO: 366403 - RNA, 19 nt, Artificial Sequence
  Description of Artificial Sequence: Synthetic oligonucleotide
ucucgugugccagcaguuu

SEQ ID NO: 366404 - RNA, 19 nt, Artificial Sequence
  Description of Artificial Sequence: Synthetic oligonucleotide
ggauuuugcacggaucacu

SEQ ID NO: 366405 - RNA, 19 nt, Artificial Sequence
  Description of Artificial Sequence: Synthetic oligonucleotide
cagcggcacgaacaaggac

SEQ ID NO: 366406 - RNA, 19 nt, Artificial Sequence
  Description of Artificial Sequence: Synthetic oligonucleotide
guacauuguugugaccucu

SEQ ID NO: 366407 - RNA, 19 nt, Artificial Sequence
  Description of Artificial Sequence: Synthetic oligonucleotide
accgagguaaggacaucga

SEQ ID NO: 366408 - RNA, 19 nt, Artificial Sequence
  Description of Artificial Sequence: Synthetic oligonucleotide
acaccgagguaaggacauc

SEQ ID NO: 366409 - RNA, 19 nt, Artificial Sequence
  Description of Artificial Sequence: Synthetic oligonucleotide
ugaagaccggcugccugua

SEQ ID NO: 366410 - RNA, 19 nt, Artificial Sequence
  Description of Artificial Sequence: Synthetic oligonucleotide
ggcacgaacaaggacgugu

SEQ ID NO: 366411 - RNA, 19 nt, Artificial Sequence
  Description of Artificial Sequence: Synthetic oligonucleotide
ggaauauuguuggcauguc

SEQ ID NO: 366412 - RNA, 19 nt, Artificial Sequence
  Description of Artificial Sequence: Synthetic oligonucleotide
ccaagucacaggguacacc

SEQ ID NO: 366413 - RNA, 19 nt, Artificial Sequence
  Description of Artificial Sequence: Synthetic oligonucleotide
cacaccgagguaaggacau

SEQ ID NO: 366414 - RNA, 19 nt, Artificial Sequence
  Description of Artificial Sequence: Synthetic oligonucleotide
ggaggcugccauauauaac

SEQ ID NO: 366415 - RNA, 19 nt, Artificial Sequence
  Description of Artificial Sequence: Synthetic oligonucleotide
guuggagucugggaacaua

SEQ ID NO: 366416 - RNA, 19 nt, Artificial Sequence
  Description of Artificial Sequence: Synthetic oligonucleotide
cguguucggggcuuuggag

SEQ ID NO: 366417 - RNA, 19 nt, Artificial Sequence
  Description of Artificial Sequence: Synthetic oligonucleotide
ccggcguaaccaugcaaag

SEQ ID NO: 366418 - RNA, 19 nt, Artificial Sequence
  Description of Artificial Sequence: Synthetic oligonucleotide
gcuuuauaagggaguaaaa

SEQ ID NO: 366419 - RNA, 19 nt, Artificial Sequence
  Description of Artificial Sequence: Synthetic oligonucleotide
uugccgcucuucaccuguc

SEQ ID NO: 366420 - RNA, 19 nt, Artificial Sequence
  Description of Artificial Sequence: Synthetic oligonucleotide
aaccgguagcucagccaca

SEQ ID NO: 366421 - RNA, 19 nt, Artificial Sequence
  Description of Artificial Sequence: Synthetic oligonucleotide
gccuaaugguaaacucucc

SEQ ID NO: 366422 - RNA, 19 nt, Artificial Sequence
  Description of Artificial Sequence: Synthetic oligonucleotide
ccucgaacaagguuggagu

SEQ ID NO: 366423 - RNA, 19 nt, Artificial Sequence
  Description of Artificial Sequence: Synthetic oligonucleotide
gccuuucguauuugugaac

SEQ ID NO: 366424 - RNA, 19 nt, Artificial Sequence
  Description of Artificial Sequence: Synthetic oligonucleotide
guaccggcguaaccaugca

SEQ ID NO: 366425 - RNA, 19 nt, Artificial Sequence
  Description of Artificial Sequence: Synthetic oligonucleotide
cucagcgguugggugaaga

SEQ ID NO: 366426 - RNA, 19 nt, Artificial Sequence
  Description of Artificial Sequence: Synthetic oligonucleotide
cuuccgucguauggcucug

SEQ ID NO: 366427 - RNA, 19 nt, Artificial Sequence
  Description of Artificial Sequence: Synthetic oligonucleotide
cugaaccugccggcucugc

SEQ ID NO: 366428 - RNA, 19 nt, Artificial Sequence
  Description of Artificial Sequence: Synthetic oligonucleotide
agcuugcgugacucagaaa

SEQ ID NO: 366429 - RNA, 19 nt, Artificial Sequence
  Description of Artificial Sequence: Synthetic oligonucleotide
accgaggcgcgaagggcag

SEQ ID NO: 366430 - RNA, 19 nt, Artificial Sequence
  Description of Artificial Sequence: Synthetic oligonucleotide
cacauaccucacccguaga

SEQ ID NO: 366431 - RNA, 19 nt, Artificial Sequence
  Description of Artificial Sequence: Synthetic oligonucleotide
gguugccuaaugguaaacu

SEQ ID NO: 366432 - RNA, 19 nt, Artificial Sequence
  Description of Artificial Sequence: Synthetic oligonucleotide
cugacaaaugugacugguu

SEQ ID NO: 366433 - RNA, 19 nt, Artificial Sequence
  Description of Artificial Sequence: Synthetic oligonucleotide
guugugaccucucccucuu

SEQ ID NO: 366434 - RNA, 19 nt, Artificial Sequence
  Description of Artificial Sequence: Synthetic oligonucleotide
ggcgcgaagggcagagcag

SEQ ID NO: 366435 - RNA, 19 nt, Artificial Sequence
  Description of Artificial Sequence: Synthetic oligonucleotide
ccacucuuuaagguuccug

SEQ ID NO: 366436 - RNA, 19 nt, Artificial Sequence
  Description of Artificial Sequence: Synthetic oligonucleotide
gucggcucacagaauaaau

SEQ ID NO: 366437 - RNA, 19 nt, Artificial Sequence
  Description of Artificial Sequence: Synthetic oligonucleotide
augugacugguugccuaau

SEQ ID NO: 366438 - RNA, 19 nt, Artificial Sequence
  Description of Artificial Sequence: Synthetic oligonucleotide
gcuguacugccuggcaaac

SEQ ID NO: 366439 - RNA, 19 nt, Artificial Sequence
  Description of Artificial Sequence: Synthetic oligonucleotide
guccagaggccgagugagc

SEQ ID NO: 366440 - RNA, 19 nt, Artificial Sequence
  Description of Artificial Sequence: Synthetic oligonucleotide
cccacgucgccgucggcgc

SEQ ID NO: 366441 - RNA, 19 nt, Artificial Sequence
  Description of Artificial Sequence: Synthetic oligonucleotide
guccuagcagcgcucuggu

SEQ ID NO: 366442 - RNA, 19 nt, Artificial Sequence
  Description of Artificial Sequence: Synthetic oligonucleotide
gcagagaacuuaaaaucau

SEQ ID NO: 366443 - RNA, 19 nt, Artificial Sequence
  Description of Artificial Sequence: Synthetic oligonucleotide
caaaugugacugguugccu

SEQ ID NO: 366444 - RNA, 19 nt, Artificial Sequence
  Description of Artificial Sequence: Synthetic oligonucleotide
gaggcgcgaagggcagagc

SEQ ID NO: 366445 - RNA, 19 nt, Artificial Sequence
  Description of Artificial Sequence: Synthetic oligonucleotide
guccucucgguacauuguu

SEQ ID NO: 366446 - RNA, 19 nt, Artificial Sequence
  Description of Artificial Sequence: Synthetic oligonucleotide
guuuccccucagccucaac

SEQ ID NO: 366447 - RNA, 19 nt, Artificial Sequence
  Description of Artificial Sequence: Synthetic oligonucleotide
acccguagacuuaguggaa

SEQ ID NO: 366448 - RNA, 19 nt, Artificial Sequence
  Description of Artificial Sequence: Synthetic oligonucleotide
agaggccgagugagcucgg

SEQ ID NO: 366449 - RNA, 19 nt, Artificial Sequence
  Description of Artificial Sequence: Synthetic oligonucleotide
cggcguaaccaugcaaagg

SEQ ID NO: 366450 - RNA, 19 nt, Artificial Sequence
  Description of Artificial Sequence: Synthetic oligonucleotide
gcgugacucagaaauuuua

SEQ ID NO: 366451 - RNA, 19 nt, Artificial Sequence
  Description of Artificial Sequence: Synthetic oligonucleotide
gggcucauuccugcuguac

SEQ ID NO: 366452 - RNA, 19 nt, Artificial Sequence
  Description of Artificial Sequence: Synthetic oligonucleotide
gcguaaccaugcaaagguc

SEQ ID NO: 366453 - RNA, 19 nt, Artificial Sequence
  Description of Artificial Sequence: Synthetic oligonucleotide
gaccccaccgaggcgcgaa

SEQ ID NO: 366454 - RNA, 19 nt, Artificial Sequence
  Description of Artificial Sequence: Synthetic oligonucleotide
gguggugauuggcucuagu

SEQ ID NO: 366455 - RNA, 19 nt, Artificial Sequence
  Description of Artificial Sequence: Synthetic oligonucleotide
ccuggcaaacuguaacagu

SEQ ID NO: 366456 - RNA, 19 nt, Artificial Sequence
  Description of Artificial Sequence: Synthetic oligonucleotide
gccucaacuguuugccgcu

SEQ ID NO: 366457 - RNA, 19 nt, Artificial Sequence
  Description of Artificial Sequence: Synthetic oligonucleotide
cgguacauuguugugaccu

SEQ ID NO: 366458 - RNA, 19 nt, Artificial Sequence
  Description of Artificial Sequence: Synthetic oligonucleotide
caaggacguguucggggcu

SEQ ID NO: 366459 - RNA, 19 nt, Artificial Sequence
  Description of Artificial Sequence: Synthetic oligonucleotide
cccaggccgaagauuaucu

SEQ ID NO: 366460 - RNA, 19 nt, Artificial Sequence
  Description of Artificial Sequence: Synthetic oligonucleotide
gggguaagccuuucguauu

SEQ ID NO: 366461 - RNA, 19 nt, Artificial Sequence
  Description of Artificial Sequence: Synthetic oligonucleotide
gggccugaguggaauacua

SEQ ID NO: 366462 - RNA, 19 nt, Artificial Sequence
  Description of Artificial Sequence: Synthetic oligonucleotide
ccugacaaaugugacuggu

SEQ ID NO: 366463 - RNA, 19 nt, Artificial Sequence
  Description of Artificial Sequence: Synthetic oligonucleotide
gcauuccaauacaggaaua

SEQ ID NO: 366464 - RNA, 19 nt, Artificial Sequence
  Description of Artificial Sequence: Synthetic oligonucleotide
ccguagacuuaguggaaua

SEQ ID NO: 366465 - RNA, 19 nt, Artificial Sequence
  Description of Artificial Sequence: Synthetic oligonucleotide
gggcuuuauaagggaguaa

SEQ ID NO: 366466 - RNA, 19 nt, Artificial Sequence
  Description of Artificial Sequence: Synthetic oligonucleotide
cgucguauggcucuggcuu

SEQ ID NO: 366467 - RNA, 19 nt, Artificial Sequence
  Description of Artificial Sequence: Synthetic oligonucleotide
ccgggacccagccccgagc

SEQ ID NO: 366468 - RNA, 19 nt, Artificial Sequence
  Description of Artificial Sequence: Synthetic oligonucleotide
aggacguguucggggcuuu

SEQ ID NO: 366469 - RNA, 19 nt, Artificial Sequence
  Description of Artificial Sequence: Synthetic oligonucleotide
ccgguagcucagccacagg

SEQ ID NO: 366470 - RNA, 19 nt, Artificial Sequence
  Description of Artificial Sequence: Synthetic oligonucleotide
gcugaaccugccggcucug

SEQ ID NO: 366471 - RNA, 19 nt, Artificial Sequence
  Description of Artificial Sequence: Synthetic oligonucleotide
cuguacugccuggcaaacu

SEQ ID NO: 366472 - RNA, 19 nt, Artificial Sequence
  Description of Artificial Sequence: Synthetic oligonucleotide
ggaacgcguccuggagccc

SEQ ID NO: 366473 - RNA, 19 nt, Artificial Sequence
  Description of Artificial Sequence: Synthetic oligonucleotide
cgaggcgcgaagggcagag

SEQ ID NO: 366474 - RNA, 19 nt, Artificial Sequence
  Description of Artificial Sequence: Synthetic oligonucleotide
ggacguguucggggcuuug

SEQ ID NO: 366475 - RNA, 19 nt, Artificial Sequence
  Description of Artificial Sequence: Synthetic oligonucleotide
ccaggccgaagauuaucua

SEQ ID NO: 366476 - RNA, 19 nt, Artificial Sequence
  Description of Artificial Sequence: Synthetic oligonucleotide
ccccaccgaggcgcgaagg

SEQ ID NO: 366477 - RNA, 19 nt, Artificial Sequence
  Description of Artificial Sequence: Synthetic oligonucleotide
ccacuucauaaggaguugu

SEQ ID NO: 366478 - RNA, 19 nt, Artificial Sequence
  Description of Artificial Sequence: Synthetic oligonucleotide
cgguugggugaagaccggc

SEQ ID NO: 366479 - RNA, 19 nt, Artificial Sequence
  Description of Artificial Sequence: Synthetic oligonucleotide
gcccaucaacuugugcaaa

SEQ ID NO: 366480 - RNA, 19 nt, Artificial Sequence
  Description of Artificial Sequence: Synthetic oligonucleotide
gcacgaacaaggacguguu

SEQ ID NO: 366481 - RNA, 19 nt, Artificial Sequence
  Description of Artificial Sequence: Synthetic oligonucleotide
ccggcugccuguauaggau

SEQ ID NO: 366482 - RNA, 19 nt, Artificial Sequence
  Description of Artificial Sequence: Synthetic oligonucleotide
cggaucacuggggucauua

SEQ ID NO: 366483 - RNA, 19 nt, Artificial Sequence
  Description of Artificial Sequence: Synthetic oligonucleotide
gcguugucucagggagaug

SEQ ID NO: 366484 - RNA, 19 nt, Artificial Sequence
  Description of Artificial Sequence: Synthetic oligonucleotide
ccccgccgggagccgagcc

SEQ ID NO: 366485 - RNA, 19 nt, Artificial Sequence
  Description of Artificial Sequence: Synthetic oligonucleotide
acggaucacuggggucauu

SEQ ID NO: 366486 - RNA, 19 nt, Artificial Sequence
  Description of Artificial Sequence: Synthetic oligonucleotide
cguagacuuaguggaauau

SEQ ID NO: 366487 - RNA, 19 nt, Artificial Sequence
  Description of Artificial Sequence: Synthetic oligonucleotide
cggagaucuuccuugcauu

SEQ ID NO: 366488 - RNA, 19 nt, Artificial Sequence
  Description of Artificial Sequence: Synthetic oligonucleotide
cugcugugucagccacucu

SEQ ID NO: 366489 - RNA, 19 nt, Artificial Sequence
  Description of Artificial Sequence: Synthetic oligonucleotide
gguuggagucugggaacau

SEQ ID NO: 366490 - RNA, 19 nt, Artificial Sequence
  Description of Artificial Sequence: Synthetic oligonucleotide
cccguagacuuaguggaau

SEQ ID NO: 366491 - RNA, 19 nt, Artificial Sequence
  Description of Artificial Sequence: Synthetic oligonucleotide
cggcucugccggcaaucug

SEQ ID NO: 366492 - RNA, 19 nt, Artificial Sequence
  Description of Artificial Sequence: Synthetic oligonucleotide
gcucagcgguugggugaag

SEQ ID NO: 366493 - RNA, 19 nt, Artificial Sequence
  Description of Artificial Sequence: Synthetic oligonucleotide
gcgcucugguccaggccca

SEQ ID NO: 366494 - RNA, 19 nt, Artificial Sequence
  Description of Artificial Sequence: Synthetic oligonucleotide
cacggaucacuggggucau

SEQ ID NO: 366495 - RNA, 19 nt, Artificial Sequence
  Description of Artificial Sequence: Synthetic oligonucleotide
cuguagcuaccaggauuuu

SEQ ID NO: 366496 - RNA, 19 nt, Artificial Sequence
  Description of Artificial Sequence: Synthetic oligonucleotide
ccggcucugccggcaaucu

SEQ ID NO: 366497 - RNA, 19 nt, Artificial Sequence
  Description of Artificial Sequence: Synthetic oligonucleotide
ccucacccguagacuuagu

SEQ ID NO: 366498 - RNA, 19 nt, Artificial Sequence
  Description of Artificial Sequence: Synthetic oligonucleotide
ccgaggcgcgaagggcaga

SEQ ID NO: 366499 - RNA, 19 nt, Artificial Sequence
  Description of Artificial Sequence: Synthetic oligonucleotide
cgccgggagccgagcccac

SEQ ID NO: 366500 - RNA, 19 nt, Artificial Sequence
  Description of Artificial Sequence: Synthetic oligonucleotide
ccacgucgccgucggcgcu

SEQ ID NO: 366501 - RNA, 19 nt, Artificial Sequence
  Description of Artificial Sequence: Synthetic oligonucleotide
ccgucggcgcugggacccu

SEQ ID NO: 366502 - RNA, 19 nt, Artificial Sequence
  Description of Artificial Sequence: Synthetic oligonucleotide
aacguuuaaacuaaaaccc

SEQ ID NO: 366503 - RNA, 19 nt, Artificial Sequence
  Description of Artificial Sequence: Synthetic oligonucleotide
aauguucaauaacugagcc

SEQ ID NO: 366504 - RNA, 19 nt, Artificial Sequence
  Description of Artificial Sequence: Synthetic oligonucleotide
ugaaauaacacgaagcccc

SEQ ID NO: 366505 - RNA, 19 nt, Artificial Sequence
  Description of Artificial Sequence: Synthetic oligonucleotide
ucuauuaccauaaacugag

SEQ ID NO: 366506 - RNA, 19 nt, Artificial Sequence
  Description of Artificial Sequence: Synthetic oligonucleotide
aauugagcuuuucaaaugg

SEQ ID NO: 366507 - RNA, 19 nt, Artificial Sequence
  Description of Artificial Sequence: Synthetic oligonucleotide
uuagaaacgguuaucacca

SEQ ID NO: 366508 - RNA, 19 nt, Artificial Sequence
  Description of Artificial Sequence: Synthetic oligonucleotide
acugcugaaccucagacgc

SEQ ID NO: 366509 - RNA, 19 nt, Artificial Sequence
  Description of Artificial Sequence: Synthetic oligonucleotide
uuuagaaacgguuaucacc

SEQ ID NO: 366510 - RNA, 19 nt, Artificial Sequence
  Description of Artificial Sequence: Synthetic oligonucleotide
gacaguaugaguguaaggg

SEQ ID NO: 366511 - RNA, 19 nt, Artificial Sequence
  Description of Artificial Sequence: Synthetic oligonucleotide
aaaacggggcucaagaacc

SEQ ID NO: 366512 - RNA, 19 nt, Artificial Sequence
  Description of Artificial Sequence: Synthetic oligonucleotide
aagaccauuagaaaacggc

SEQ ID NO: 366513 - RNA, 19 nt, Artificial Sequence
  Description of Artificial Sequence: Synthetic oligonucleotide
aaacauauuccucuccguc

SEQ ID NO: 366514 - RNA, 19 nt, Artificial Sequence
  Description of Artificial Sequence: Synthetic oligonucleotide
uacgguaaugccaacagug

SEQ ID NO: 366515 - RNA, 19 nt, Artificial Sequence
  Description of Artificial Sequence: Synthetic oligonucleotide
acaaacauauuccucuccg

SEQ ID NO: 366516 - RNA, 19 nt, Artificial Sequence
  Description of Artificial Sequence: Synthetic oligonucleotide
aaauugagcuuuucaaaug

SEQ ID NO: 366517 - RNA, 19 nt, Artificial Sequence
  Description of Artificial Sequence: Synthetic oligonucleotide
auuaccauaaacugagcug

SEQ ID NO: 366518 - RNA, 19 nt, Artificial Sequence
  Description of Artificial Sequence: Synthetic oligonucleotide
uuuaaucaacguuuaaacu

SEQ ID NO: 366519 - RNA, 19 nt, Artificial Sequence
  Description of Artificial Sequence: Synthetic oligonucleotide
agcaaucaaaccaugaacg

SEQ ID NO: 366520 - RNA, 19 nt, Artificial Sequence
  Description of Artificial Sequence: Synthetic oligonucleotide
auuaaaacggggcucaaga

SEQ ID NO: 366521 - RNA, 19 nt, Artificial Sequence
  Description of Artificial Sequence: Synthetic oligonucleotide
uuaccauaaacugagcugc

SEQ ID NO: 366522 - RNA, 19 nt, Artificial Sequence
  Description of Artificial Sequence: Synthetic oligonucleotide
aacgguuaucaccaaaucu

SEQ ID NO: 366523 - RNA, 19 nt, Artificial Sequence
  Description of Artificial Sequence: Synthetic oligonucleotide
uuacguguaaccccaaaug

SEQ ID NO: 366524 - RNA, 19 nt, Artificial Sequence
  Description of Artificial Sequence: Synthetic oligonucleotide
cuugcgaugaagugaaugc

SEQ ID NO: 366525 - RNA, 19 nt, Artificial Sequence
  Description of Artificial Sequence: Synthetic oligonucleotide
uuuaacaugugugugagau

SEQ ID NO: 366526 - RNA, 19 nt, Artificial Sequence
  Description of Artificial Sequence: Synthetic oligonucleotide
uuucauacgguaaugccaa

SEQ ID NO: 366527 - RNA, 19 nt, Artificial Sequence
  Description of Artificial Sequence: Synthetic oligonucleotide
acagccgucaguuuuaacu

SEQ ID NO: 366528 - RNA, 19 nt, Artificial Sequence
  Description of Artificial Sequence: Synthetic oligonucleotide
ugagcaauaugcuacugga

SEQ ID NO: 366529 - RNA, 19 nt, Artificial Sequence
  Description of Artificial Sequence: Synthetic oligonucleotide
aauauagcaaucaaaccau

SEQ ID NO: 366530 - RNA, 19 nt, Artificial Sequence
  Description of Artificial Sequence: Synthetic oligonucleotide
ucaauugacuuuauuugcu

SEQ ID NO: 366531 - RNA, 19 nt, Artificial Sequence
  Description of Artificial Sequence: Synthetic oligonucleotide
aaucaaaccaugaacggga

SEQ ID NO: 366532 - RNA, 19 nt, Artificial Sequence
  Description of Artificial Sequence: Synthetic oligonucleotide
ucuaaaccccuucugggag

SEQ ID NO: 366533 - RNA, 19 nt, Artificial Sequence
  Description of Artificial Sequence: Synthetic oligonucleotide
ucauacugaagucuuucgc

SEQ ID NO: 366534 - RNA, 19 nt, Artificial Sequence
  Description of Artificial Sequence: Synthetic oligonucleotide
uaauggugcauuuagcaaa

SEQ ID NO: 366535 - RNA, 19 nt, Artificial Sequence
  Description of Artificial Sequence: Synthetic oligonucleotide
uaaaacggggcucaagaac

SEQ ID NO: 366536 - RNA, 19 nt, Artificial Sequence
  Description of Artificial Sequence: Synthetic oligonucleotide
aaugcauaaccugucaccu

SEQ ID NO: 366537 - RNA, 19 nt, Artificial Sequence
  Description of Artificial Sequence: Synthetic oligonucleotide
ucuuguuacguguaacccc

SEQ ID NO: 366538 - RNA, 19 nt, Artificial Sequence
  Description of Artificial Sequence: Synthetic oligonucleotide
gaugccuucggaaaacgcg

SEQ ID NO: 366539 - RNA, 19 nt, Artificial Sequence
  Description of Artificial Sequence: Synthetic oligonucleotide
cacauaacaggaauacugc

SEQ ID NO: 366540 - RNA, 19 nt, Artificial Sequence
  Description of Artificial Sequence: Synthetic oligonucleotide
ugacugaaauaacacgaag

SEQ ID NO: 366541 - RNA, 19 nt, Artificial Sequence
  Description of Artificial Sequence: Synthetic oligonucleotide
uacguguaaccccaaauga

SEQ ID NO: 366542 - RNA, 19 nt, Artificial Sequence
  Description of Artificial Sequence: Synthetic oligonucleotide
uuaucaccaaaucuauuac

SEQ ID NO: 366543 - RNA, 19 nt, Artificial Sequence
  Description of Artificial Sequence: Synthetic oligonucleotide
augagcaauaugcuacugg

SEQ ID NO: 366544 - RNA, 19 nt, Artificial Sequence
  Description of Artificial Sequence: Synthetic oligonucleotide
aggauuuccaucccgucuc

SEQ ID NO: 366545 - RNA, 19 nt, Artificial Sequence
  Description of Artificial Sequence: Synthetic oligonucleotide
aaagacgucaguucgucuu

SEQ ID NO: 366546 - RNA, 19 nt, Artificial Sequence
  Description of Artificial Sequence: Synthetic oligonucleotide
auaaccugucaccugucac

SEQ ID NO: 366547 - RNA, 19 nt, Artificial Sequence
  Description of Artificial Sequence: Synthetic oligonucleotide
aggaagaccauuagaaaac

SEQ ID NO: 366548 - RNA, 19 nt, Artificial Sequence
  Description of Artificial Sequence: Synthetic oligonucleotide
uggauggcccuuuugauac

SEQ ID NO: 366549 - RNA, 19 nt, Artificial Sequence
  Description of Artificial Sequence: Synthetic oligonucleotide
acagacgcauguccaagcc

SEQ ID NO: 366550 - RNA, 19 nt, Artificial Sequence
  Description of Artificial Sequence: Synthetic oligonucleotide
uuuaaagacgucaguucgu

SEQ ID NO: 366551 - RNA, 19 nt, Artificial Sequence
  Description of Artificial Sequence: Synthetic oligonucleotide
ggaauguucaauaacugag

SEQ ID NO: 366552 - RNA, 19 nt, Artificial Sequence
  Description of Artificial Sequence: Synthetic oligonucleotide
aaacgcgccuaucugucuc

SEQ ID NO: 366553 - RNA, 19 nt, Artificial Sequence
  Description of Artificial Sequence: Synthetic oligonucleotide
ugaucucuuguauuagccc

SEQ ID NO: 366554 - RNA, 19 nt, Artificial Sequence
  Description of Artificial Sequence: Synthetic oligonucleotide
uguauuagccccuccugug

SEQ ID NO: 366555 - RNA, 19 nt, Artificial Sequence
  Description of Artificial Sequence: Synthetic oligonucleotide
cauacgguaaugccaacag

SEQ ID NO: 366556 - RNA, 19 nt, Artificial Sequence
  Description of Artificial Sequence: Synthetic oligonucleotide
aauaagacagucagaggca

SEQ ID NO: 366557 - RNA, 19 nt, Artificial Sequence
  Description of Artificial Sequence: Synthetic oligonucleotide
aguagcuguuagcaguacg

SEQ ID NO: 366558 - RNA, 19 nt, Artificial Sequence
  Description of Artificial Sequence: Synthetic oligonucleotide
cauucgaccguccacccgg

SEQ ID NO: 366559 - RNA, 19 nt, Artificial Sequence
  Description of Artificial Sequence: Synthetic oligonucleotide
ugcauacaaauacuuuugu

SEQ ID NO: 366560 - RNA, 19 nt, Artificial Sequence
  Description of Artificial Sequence: Synthetic oligonucleotide
auacugaagucuuucgcug

SEQ ID NO: 366561 - RNA, 19 nt, Artificial Sequence
  Description of Artificial Sequence: Synthetic oligonucleotide
caaucaaaccaugaacggg

SEQ ID NO: 366562 - RNA, 19 nt, Artificial Sequence
  Description of Artificial Sequence: Synthetic oligonucleotide
ucuggucaaacguuggagu

SEQ ID NO: 366563 - RNA, 19 nt, Artificial Sequence
  Description of Artificial Sequence: Synthetic oligonucleotide
uacguagucugguaacucc

SEQ ID NO: 366564 - RNA, 19 nt, Artificial Sequence
  Description of Artificial Sequence: Synthetic oligonucleotide
ucggaaaacgcgccuaucu

SEQ ID NO: 366565 - RNA, 19 nt, Artificial Sequence
  Description of Artificial Sequence: Synthetic oligonucleotide
aacgggagcaucugcugag

SEQ ID NO: 366566 - RNA, 19 nt, Artificial Sequence
  Description of Artificial Sequence: Synthetic oligonucleotide
accauuagaaaacggccug

SEQ ID NO: 366567 - RNA, 19 nt, Artificial Sequence
  Description of Artificial Sequence: Synthetic oligonucleotide
uuguauuagccccuccugu

SEQ ID NO: 366568 - RNA, 19 nt, Artificial Sequence
  Description of Artificial Sequence: Synthetic oligonucleotide
ucgaaguuauugauccuca

SEQ ID NO: 366569 - RNA, 19 nt, Artificial Sequence
  Description of Artificial Sequence: Synthetic oligonucleotide
ucguccacagucauguagu

SEQ ID NO: 366570 - RNA, 19 nt, Artificial Sequence
  Description of Artificial Sequence: Synthetic oligonucleotide
ucuugcgaugaagugaaug

SEQ ID NO: 366571 - RNA, 19 nt, Artificial Sequence
  Description of Artificial Sequence: Synthetic oligonucleotide
accucagacgcggugacgc

SEQ ID NO: 366572 - RNA, 19 nt, Artificial Sequence
  Description of Artificial Sequence: Synthetic oligonucleotide
cuuguuacguguaacccca

SEQ ID NO: 366573 - RNA, 19 nt, Artificial Sequence
  Description of Artificial Sequence: Synthetic oligonucleotide
cugaaauaacacgaagccc

SEQ ID NO: 366574 - RNA, 19 nt, Artificial Sequence
  Description of Artificial Sequence: Synthetic oligonucleotide
ucaccugucacaugaacua

SEQ ID NO: 366575 - RNA, 19 nt, Artificial Sequence
  Description of Artificial Sequence: Synthetic oligonucleotide
ucccugacugaaauaacac

SEQ ID NO: 366576 - RNA, 19 nt, Artificial Sequence
  Description of Artificial Sequence: Synthetic oligonucleotide
ucgaggaagaagccaauau

SEQ ID NO: 366577 - RNA, 19 nt, Artificial Sequence
  Description of Artificial Sequence: Synthetic oligonucleotide
acauuuagaaacgguuauc

SEQ ID NO: 366578 - RNA, 19 nt, Artificial Sequence
  Description of Artificial Sequence: Synthetic oligonucleotide
caaaccaugaacgggagca

SEQ ID NO: 366579 - RNA, 19 nt, Artificial Sequence
  Description of Artificial Sequence: Synthetic oligonucleotide
uuaaaacggggcucaagaa

SEQ ID NO: 366580 - RNA, 19 nt, Artificial Sequence
  Description of Artificial Sequence: Synthetic oligonucleotide
uccuugugucacaaaauaa

SEQ ID NO: 366581 - RNA, 19 nt, Artificial Sequence
  Description of Artificial Sequence: Synthetic oligonucleotide
augccuucggaaaacgcgc

SEQ ID NO: 366582 - RNA, 19 nt, Artificial Sequence
  Description of Artificial Sequence: Synthetic oligonucleotide
agguccauuggacaaacau

SEQ ID NO: 366583 - RNA, 19 nt, Artificial Sequence
  Description of Artificial Sequence: Synthetic oligonucleotide
acgguaaugccaacagugc

SEQ ID NO: 366584 - RNA, 19 nt, Artificial Sequence
  Description of Artificial Sequence: Synthetic oligonucleotide
guuauugauccucaggacu

SEQ ID NO: 366585 - RNA, 19 nt, Artificial Sequence
  Description of Artificial Sequence: Synthetic oligonucleotide
auguucaauaacugagcca

SEQ ID NO: 366586 - RNA, 19 nt, Artificial Sequence
  Description of Artificial Sequence: Synthetic oligonucleotide
ugcuugaugccucucgauc

SEQ ID NO: 366587 - RNA, 19 nt, Artificial Sequence
  Description of Artificial Sequence: Synthetic oligonucleotide
gagcacauaacaggaauac

SEQ ID NO: 366588 - RNA, 19 nt, Artificial Sequence
  Description of Artificial Sequence: Synthetic oligonucleotide
ucaaacguuggagucuuca

SEQ ID NO: 366589 - RNA, 19 nt, Artificial Sequence
  Description of Artificial Sequence: Synthetic oligonucleotide
uccuuaguuccauguaaug

SEQ ID NO: 366590 - RNA, 19 nt, Artificial Sequence
  Description of Artificial Sequence: Synthetic oligonucleotide
caguaggucguccacaguc

SEQ ID NO: 366591 - RNA, 19 nt, Artificial Sequence
  Description of Artificial Sequence: Synthetic oligonucleotide
ugcuuucauacgguaaugc

SEQ ID NO: 366592 - RNA, 19 nt, Artificial Sequence
  Description of Artificial Sequence: Synthetic oligonucleotide
uuaaagacgucaguucguc

SEQ ID NO: 366593 - RNA, 19 nt, Artificial Sequence
  Description of Artificial Sequence: Synthetic oligonucleotide
ucgucuuuaguugacuuaa

SEQ ID NO: 366594 - RNA, 19 nt, Artificial Sequence
  Description of Artificial Sequence: Synthetic oligonucleotide
uaaaaccccaaucgaggaa

SEQ ID NO: 366595 - RNA, 19 nt, Artificial Sequence
  Description of Artificial Sequence: Synthetic oligonucleotide
ucuaaccgauccaagucau

SEQ ID NO: 366596 - RNA, 19 nt, Artificial Sequence
  Description of Artificial Sequence: Synthetic oligonucleotide
ucaaaccaugaacgggagc

SEQ ID NO: 366597 - RNA, 19 nt, Artificial Sequence
  Description of Artificial Sequence: Synthetic oligonucleotide
uuaagauccuugugucaca

SEQ ID NO: 366598 - RNA, 19 nt, Artificial Sequence
  Description of Artificial Sequence: Synthetic oligonucleotide
ucggugauugguccacugc

SEQ ID NO: 366599 - RNA, 19 nt, Artificial Sequence
  Description of Artificial Sequence: Synthetic oligonucleotide
cucaggacuuggauggccc

SEQ ID NO: 366600 - RNA, 19 nt, Artificial Sequence
  Description of Artificial Sequence: Synthetic oligonucleotide
ggucuuguuacguguaacc

SEQ ID NO: 366601 - RNA, 19 nt, Artificial Sequence
  Description of Artificial Sequence: Synthetic oligonucleotide
caauaugcuacuggacagg

SEQ ID NO: 366602 - RNA, 19 nt, Artificial Sequence
  Description of Artificial Sequence: Synthetic oligonucleotide
cacaguuggucuuguuacg

SEQ ID NO: 366603 - RNA, 19 nt, Artificial Sequence
  Description of Artificial Sequence: Synthetic oligonucleotide
aaaacgcgccuaucugucu

SEQ ID NO: 366604 - RNA, 19 nt, Artificial Sequence
  Description of Artificial Sequence: Synthetic oligonucleotide
aacaugucgucuuccuuua

SEQ ID NO: 366605 - RNA, 19 nt, Artificial Sequence
  Description of Artificial Sequence: Synthetic oligonucleotide
gugcauacaaauacuuuug

SEQ ID NO: 366606 - RNA, 19 nt, Artificial Sequence
  Description of Artificial Sequence: Synthetic oligonucleotide
ucucugugcucuucaagac

SEQ ID NO: 366607 - RNA, 19 nt, Artificial Sequence
  Description of Artificial Sequence: Synthetic oligonucleotide
acaugagcaauaugcuacu

SEQ ID NO: 366608 - RNA, 19 nt, Artificial Sequence
  Description of Artificial Sequence: Synthetic oligonucleotide
acgguuaucaccaaaucua

SEQ ID NO: 366609 - RNA, 19 nt, Artificial Sequence
  Description of Artificial Sequence: Synthetic oligonucleotide
guaugaguguaagggacag

SEQ ID NO: 366610 - RNA, 19 nt, Artificial Sequence
  Description of Artificial Sequence: Synthetic oligonucleotide
ucaucagauggccgccucc

SEQ ID NO: 366611 - RNA, 19 nt, Artificial Sequence
  Description of Artificial Sequence: Synthetic oligonucleotide
ccauuggacaaacauauuc

SEQ ID NO: 366612 - RNA, 19 nt, Artificial Sequence
  Description of Artificial Sequence: Synthetic oligonucleotide
cuggucaaacguuggaguc

SEQ ID NO: 366613 - RNA, 19 nt, Artificial Sequence
  Description of Artificial Sequence: Synthetic oligonucleotide
cuaaaccccuucugggagc

SEQ ID NO: 366614 - RNA, 19 nt, Artificial Sequence
  Description of Artificial Sequence: Synthetic oligonucleotide
gacguuggaacaaccagca

SEQ ID NO: 366615 - RNA, 19 nt, Artificial Sequence
  Description of Artificial Sequence: Synthetic oligonucleotide
uacugaagucuuucgcugu

SEQ ID NO: 366616 - RNA, 19 nt, Artificial Sequence
  Description of Artificial Sequence: Synthetic oligonucleotide
ucaacagccgucaguuuua

SEQ ID NO: 366617 - RNA, 19 nt, Artificial Sequence
  Description of Artificial Sequence: Synthetic oligonucleotide
uaccauaaacugagcugcc

SEQ ID NO: 366618 - RNA, 19 nt, Artificial Sequence
  Description of Artificial Sequence: Synthetic oligonucleotide
cucgaaguuauugauccuc

SEQ ID NO: 366619 - RNA, 19 nt, Artificial Sequence
  Description of Artificial Sequence: Synthetic oligonucleotide
ccccaaucgaggaagaagc

SEQ ID NO: 366620 - RNA, 19 nt, Artificial Sequence
  Description of Artificial Sequence: Synthetic oligonucleotide
gcuuucauacgguaaugcc

SEQ ID NO: 366621 - RNA, 19 nt, Artificial Sequence
  Description of Artificial Sequence: Synthetic oligonucleotide
uauuagccccuccuguguc

SEQ ID NO: 366622 - RNA, 19 nt, Artificial Sequence
  Description of Artificial Sequence: Synthetic oligonucleotide
uguccuuauaaagaauauu

SEQ ID NO: 366623 - RNA, 19 nt, Artificial Sequence
  Description of Artificial Sequence: Synthetic oligonucleotide
caugaacgggagcaucugc

SEQ ID NO: 366624 - RNA, 19 nt, Artificial Sequence
  Description of Artificial Sequence: Synthetic oligonucleotide
uauuuggaucccugacuga

SEQ ID NO: 366625 - RNA, 19 nt, Artificial Sequence
  Description of Artificial Sequence: Synthetic oligonucleotide
cauacugaagucuuucgcu

SEQ ID NO: 366626 - RNA, 19 nt, Artificial Sequence
  Description of Artificial Sequence: Synthetic oligonucleotide
gaaaacgcgccuaucuguc

SEQ ID NO: 366627 - RNA, 19 nt, Artificial Sequence
  Description of Artificial Sequence: Synthetic oligonucleotide
cucuggucaaacguuggag

SEQ ID NO: 366628 - RNA, 19 nt, Artificial Sequence
  Description of Artificial Sequence: Synthetic oligonucleotide
gggcucaagaaccaugagc

SEQ ID NO: 366629 - RNA, 19 nt, Artificial Sequence
  Description of Artificial Sequence: Synthetic oligonucleotide
aagacgucaguucgucuuu

SEQ ID NO: 366630 - RNA, 19 nt, Artificial Sequence
  Description of Artificial Sequence: Synthetic oligonucleotide
uaaagacgucaguucgucu

SEQ ID NO: 366631 - RNA, 19 nt, Artificial Sequence
  Description of Artificial Sequence: Synthetic oligonucleotide
uguuacguguaaccccaaa

SEQ ID NO: 366632 - RNA, 19 nt, Artificial Sequence
  Description of Artificial Sequence: Synthetic oligonucleotide
caguacguagucugguaac

SEQ ID NO: 366633 - RNA, 19 nt, Artificial Sequence
  Description of Artificial Sequence: Synthetic oligonucleotide
auacgguaaugccaacagu

SEQ ID NO: 366634 - RNA, 19 nt, Artificial Sequence
  Description of Artificial Sequence: Synthetic oligonucleotide
uugcgaugaagugaaugcu

SEQ ID NO: 366635 - RNA, 19 nt, Artificial Sequence
  Description of Artificial Sequence: Synthetic oligonucleotide
accccaaucgaggaagaag

SEQ ID NO: 366636 - RNA, 19 nt, Artificial Sequence
  Description of Artificial Sequence: Synthetic oligonucleotide
uuuugauacugagguggug

SEQ ID NO: 366637 - RNA, 19 nt, Artificial Sequence
  Description of Artificial Sequence: Synthetic oligonucleotide
aguugcuaaaggucaguuu

SEQ ID NO: 366638 - RNA, 19 nt, Artificial Sequence
  Description of Artificial Sequence: Synthetic oligonucleotide
caucagauggccgccuccg

SEQ ID NO: 366639 - RNA, 19 nt, Artificial Sequence
  Description of Artificial Sequence: Synthetic oligonucleotide
aguaugaguguaagggaca

SEQ ID NO: 366640 - RNA, 19 nt, Artificial Sequence
  Description of Artificial Sequence: Synthetic oligonucleotide
cauuaaaacggggcucaag

SEQ ID NO: 366641 - RNA, 19 nt, Artificial Sequence
  Description of Artificial Sequence: Synthetic oligonucleotide
ugccuucggaaaacgcgcc

SEQ ID NO: 366642 - RNA, 19 nt, Artificial Sequence
  Description of Artificial Sequence: Synthetic oligonucleotide
aaguugcuaaaggucaguu

SEQ ID NO: 366643 - RNA, 19 nt, Artificial Sequence
  Description of Artificial Sequence: Synthetic oligonucleotide
uggucaaacguuggagucu

SEQ ID NO: 366644 - RNA, 19 nt, Artificial Sequence
  Description of Artificial Sequence: Synthetic oligonucleotide
aacgcgccuaucugucuca

SEQ ID NO: 366645 - RNA, 19 nt, Artificial Sequence
  Description of Artificial Sequence: Synthetic oligonucleotide
ugcguagcaagguuuuauu

SEQ ID NO: 366646 - RNA, 19 nt, Artificial Sequence
  Description of Artificial Sequence: Synthetic oligonucleotide
cccugacugaaauaacacg

SEQ ID NO: 366647 - RNA, 19 nt, Artificial Sequence
  Description of Artificial Sequence: Synthetic oligonucleotide
cacauuaaaacggggcuca

SEQ ID NO: 366648 - RNA, 19 nt, Artificial Sequence
  Description of Artificial Sequence: Synthetic oligonucleotide
guguaagggacaguggaca

SEQ ID NO: 366649 - RNA, 19 nt, Artificial Sequence
  Description of Artificial Sequence: Synthetic oligonucleotide
gaaacgguuaucaccaaau

SEQ ID NO: 366650 - RNA, 19 nt, Artificial Sequence
  Description of Artificial Sequence: Synthetic oligonucleotide
cuuuggcaguagcuguuag

SEQ ID NO: 366651 - RNA, 19 nt, Artificial Sequence
  Description of Artificial Sequence: Synthetic oligonucleotide
acaguuggucuuguuacgu

SEQ ID NO: 366652 - RNA, 19 nt, Artificial Sequence
  Description of Artificial Sequence: Synthetic oligonucleotide
auauagcaaucaaaccaug

SEQ ID NO: 366653 - RNA, 19 nt, Artificial Sequence
  Description of Artificial Sequence: Synthetic oligonucleotide
augcauaaccugucaccug

SEQ ID NO: 366654 - RNA, 19 nt, Artificial Sequence
  Description of Artificial Sequence: Synthetic oligonucleotide
gugauugguccacugcuga

SEQ ID NO: 366655 - RNA, 19 nt, Artificial Sequence
  Description of Artificial Sequence: Synthetic oligonucleotide
gagcaauaugcuacuggac

SEQ ID NO: 366656 - RNA, 19 nt, Artificial Sequence
  Description of Artificial Sequence: Synthetic oligonucleotide
acgucaguucgucuuuagu

SEQ ID NO: 366657 - RNA, 19 nt, Artificial Sequence
  Description of Artificial Sequence: Synthetic oligonucleotide
gaaccucagacgcggugac

SEQ ID NO: 366658 - RNA, 19 nt, Artificial Sequence
  Description of Artificial Sequence: Synthetic oligonucleotide
agcacauaacaggaauacu

SEQ ID NO: 366659 - RNA, 19 nt, Artificial Sequence
  Description of Artificial Sequence: Synthetic oligonucleotide
aucaaaccaugaacgggag

SEQ ID NO: 366660 - RNA, 19 nt, Artificial Sequence
  Description of Artificial Sequence: Synthetic oligonucleotide
aaccucagacgcggugacg

SEQ ID NO: 366661 - RNA, 19 nt, Artificial Sequence
  Description of Artificial Sequence: Synthetic oligonucleotide
gcucuaaccgauccaaguc

SEQ ID NO: 366662 - RNA, 19 nt, Artificial Sequence
  Description of Artificial Sequence: Synthetic oligonucleotide
aguucgucuuuaguugacu

SEQ ID NO: 366663 - RNA, 19 nt, Artificial Sequence
  Description of Artificial Sequence: Synthetic oligonucleotide
guuacguguaaccccaaau

SEQ ID NO: 366664 - RNA, 19 nt, Artificial Sequence
  Description of Artificial Sequence: Synthetic oligonucleotide
gcguagcaagguuuuauug

SEQ ID NO: 366665 - RNA, 19 nt, Artificial Sequence
  Description of Artificial Sequence: Synthetic oligonucleotide
aguaggucguccacaguca

SEQ ID NO: 366666 - RNA, 19 nt, Artificial Sequence
  Description of Artificial Sequence: Synthetic oligonucleotide
gcaaugcauaaccugucac

SEQ ID NO: 366667 - RNA, 19 nt, Artificial Sequence
  Description of Artificial Sequence: Synthetic oligonucleotide
cugaagucuuucgcugucc

SEQ ID NO: 366668 - RNA, 19 nt, Artificial Sequence
  Description of Artificial Sequence: Synthetic oligonucleotide
cacugaucucuuguauuag

SEQ ID NO: 366669 - RNA, 19 nt, Artificial Sequence
  Description of Artificial Sequence: Synthetic oligonucleotide
cauuagaaaacggccugca

SEQ ID NO: 366670 - RNA, 19 nt, Artificial Sequence
  Description of Artificial Sequence: Synthetic oligonucleotide
uugaugccucucgaucaag

SEQ ID NO: 366671 - RNA, 19 nt, Artificial Sequence
  Description of Artificial Sequence: Synthetic oligonucleotide
ggguggaauguucaauaac

SEQ ID NO: 366672 - RNA, 19 nt, Artificial Sequence
  Description of Artificial Sequence: Synthetic oligonucleotide
accauaaacugagcugccu

SEQ ID NO: 366673 - RNA, 19 nt, Artificial Sequence
  Description of Artificial Sequence: Synthetic oligonucleotide
agacaguaggucguccaca

SEQ ID NO: 366674 - RNA, 19 nt, Artificial Sequence
  Description of Artificial Sequence: Synthetic oligonucleotide
cuaaccgauccaagucauc

SEQ ID NO: 366675 - RNA, 19 nt, Artificial Sequence
  Description of Artificial Sequence: Synthetic oligonucleotide
uagcaguacguagucuggu

SEQ ID NO: 366676 - RNA, 19 nt, Artificial Sequence
  Description of Artificial Sequence: Synthetic oligonucleotide
cucggugauugguccacug

SEQ ID NO: 366677 - RNA, 19 nt, Artificial Sequence
  Description of Artificial Sequence: Synthetic oligonucleotide
uaugaguguaagggacagu

SEQ ID NO: 366678 - RNA, 19 nt, Artificial Sequence
  Description of Artificial Sequence: Synthetic oligonucleotide
gguccuacucaggagcucc

SEQ ID NO: 366679 - RNA, 19 nt, Artificial Sequence
  Description of Artificial Sequence: Synthetic oligonucleotide
aaacggggcucaagaacca

SEQ ID NO: 366680 - RNA, 19 nt, Artificial Sequence
  Description of Artificial Sequence: Synthetic oligonucleotide
cuuccgagggagcagacgu

SEQ ID NO: 366681 - RNA, 19 nt, Artificial Sequence
  Description of Artificial Sequence: Synthetic oligonucleotide
gauggccgccuccgaaggc

SEQ ID NO: 366682 - RNA, 19 nt, Artificial Sequence
  Description of Artificial Sequence: Synthetic oligonucleotide
caugagcaauaugcuacug

SEQ ID NO: 366683 - RNA, 19 nt, Artificial Sequence
  Description of Artificial Sequence: Synthetic oligonucleotide
gcuacuccccgacaccugc

SEQ ID NO: 366684 - RNA, 19 nt, Artificial Sequence
  Description of Artificial Sequence: Synthetic oligonucleotide
gccucagaguauuuggauc

SEQ ID NO: 366685 - RNA, 19 nt, Artificial Sequence
  Description of Artificial Sequence: Synthetic oligonucleotide
guuguuacauuguccuuau

SEQ ID NO: 366686 - RNA, 19 nt, Artificial Sequence
  Description of Artificial Sequence: Synthetic oligonucleotide
uucagaucccagggccugc

SEQ ID NO: 366687 - RNA, 19 nt, Artificial Sequence
  Description of Artificial Sequence: Synthetic oligonucleotide
cucaagaaccaugagcccu

SEQ ID NO: 366688 - RNA, 19 nt, Artificial Sequence
  Description of Artificial Sequence: Synthetic oligonucleotide
ggaaaacgcgccuaucugu

SEQ ID NO: 366689 - RNA, 19 nt, Artificial Sequence
  Description of Artificial Sequence: Synthetic oligonucleotide
ccgcagauucccaaaguug

SEQ ID NO: 366690 - RNA, 19 nt, Artificial Sequence
  Description of Artificial Sequence: Synthetic oligonucleotide
gacgcggugacgccguucu

SEQ ID NO: 366691 - RNA, 19 nt, Artificial Sequence
  Description of Artificial Sequence: Synthetic oligonucleotide
guacguagucugguaacuc

SEQ ID NO: 366692 - RNA, 19 nt, Artificial Sequence
  Description of Artificial Sequence: Synthetic oligonucleotide
guauuagccccuccugugu

SEQ ID NO: 366693 - RNA, 19 nt, Artificial Sequence
  Description of Artificial Sequence: Synthetic oligonucleotide
cuugaugccucucgaucaa

SEQ ID NO: 366694 - RNA, 19 nt, Artificial Sequence
  Description of Artificial Sequence: Synthetic oligonucleotide
cucaucagauggccgccuc

SEQ ID NO: 366695 - RNA, 19 nt, Artificial Sequence
  Description of Artificial Sequence: Synthetic oligonucleotide
uuguuacguguaaccccaa

SEQ ID NO: 366696 - RNA, 19 nt, Artificial Sequence
  Description of Artificial Sequence: Synthetic oligonucleotide
uucggaaaacgcgccuauc

SEQ ID NO: 366697 - RNA, 19 nt, Artificial Sequence
  Description of Artificial Sequence: Synthetic oligonucleotide
aaccccaaucgaggaagaa

SEQ ID NO: 366698 - RNA, 19 nt, Artificial Sequence
  Description of Artificial Sequence: Synthetic oligonucleotide
acgcauguccaagccaggu

SEQ ID NO: 366699 - RNA, 19 nt, Artificial Sequence
  Description of Artificial Sequence: Synthetic oligonucleotide
cucaacagccgucaguuuu

SEQ ID NO: 366700 - RNA, 19 nt, Artificial Sequence
  Description of Artificial Sequence: Synthetic oligonucleotide
gcaguacguagucugguaa

SEQ ID NO: 366701 - RNA, 19 nt, Artificial Sequence
  Description of Artificial Sequence: Synthetic oligonucleotide
aucgaggaagaagccaaua

SEQ ID NO: 366702 - RNA, 19 nt, Artificial Sequence
  Description of Artificial Sequence: Synthetic oligonucleotide
uuguuacauuguccuuaua

SEQ ID NO: 366703 - RNA, 19 nt, Artificial Sequence
  Description of Artificial Sequence: Synthetic oligonucleotide
aacggggcucaagaaccau

SEQ ID NO: 366704 - RNA, 19 nt, Artificial Sequence
  Description of Artificial Sequence: Synthetic oligonucleotide
cguucucaucagauggccg

SEQ ID NO: 366705 - RNA, 19 nt, Artificial Sequence
  Description of Artificial Sequence: Synthetic oligonucleotide
ucucaacagccgucaguuu

SEQ ID NO: 366706 - RNA, 19 nt, Artificial Sequence
  Description of Artificial Sequence: Synthetic oligonucleotide
gccuaucugucucacuguc

SEQ ID NO: 366707 - RNA, 19 nt, Artificial Sequence
  Description of Artificial Sequence: Synthetic oligonucleotide
uuccgagggagcagacguu

SEQ ID NO: 366708 - RNA, 19 nt, Artificial Sequence
  Description of Artificial Sequence: Synthetic oligonucleotide
aaacggccugcagccucag

SEQ ID NO: 366709 - RNA, 19 nt, Artificial Sequence
  Description of Artificial Sequence: Synthetic oligonucleotide
gguaacuccauggcaucuc

SEQ ID NO: 366710 - RNA, 19 nt, Artificial Sequence
  Description of Artificial Sequence: Synthetic oligonucleotide
gacgccguucucaucagau

SEQ ID NO: 366711 - RNA, 19 nt, Artificial Sequence
  Description of Artificial Sequence: Synthetic oligonucleotide
agacgcggugacgccguuc

SEQ ID NO: 366712 - RNA, 19 nt, Artificial Sequence
  Description of Artificial Sequence: Synthetic oligonucleotide
acauuaaaacggggcucaa

SEQ ID NO: 366713 - RNA, 19 nt, Artificial Sequence
  Description of Artificial Sequence: Synthetic oligonucleotide
gucuuucgcuguccauuuc

SEQ ID NO: 366714 - RNA, 19 nt, Artificial Sequence
  Description of Artificial Sequence: Synthetic oligonucleotide
gggagcgggcagcaaaauc

SEQ ID NO: 366715 - RNA, 19 nt, Artificial Sequence
  Description of Artificial Sequence: Synthetic oligonucleotide
cagccgucaguuuuaacuu

SEQ ID NO: 366716 - RNA, 19 nt, Artificial Sequence
  Description of Artificial Sequence: Synthetic oligonucleotide
cggaaaacgcgccuaucug

SEQ ID NO: 366717 - RNA, 19 nt, Artificial Sequence
  Description of Artificial Sequence: Synthetic oligonucleotide
gccguucucaucagauggc

SEQ ID NO: 366718 - RNA, 19 nt, Artificial Sequence
  Description of Artificial Sequence: Synthetic oligonucleotide
gagguccuacucaggagcu

SEQ ID NO: 366719 - RNA, 19 nt, Artificial Sequence
  Description of Artificial Sequence: Synthetic oligonucleotide
acccggccuucaucaaacu

SEQ ID NO: 366720 - RNA, 19 nt, Artificial Sequence
  Description of Artificial Sequence: Synthetic oligonucleotide
cucgaucaaggauuuccau

SEQ ID NO: 366721 - RNA, 19 nt, Artificial Sequence
  Description of Artificial Sequence: Synthetic oligonucleotide
ccauaaacugagcugccua

SEQ ID NO: 366722 - RNA, 19 nt, Artificial Sequence
  Description of Artificial Sequence: Synthetic oligonucleotide
gugacccaguugaaaucca

SEQ ID NO: 366723 - RNA, 19 nt, Artificial Sequence
  Description of Artificial Sequence: Synthetic oligonucleotide
gugagauuguugaugccuu

SEQ ID NO: 366724 - RNA, 19 nt, Artificial Sequence
  Description of Artificial Sequence: Synthetic oligonucleotide
agcuacuccccgacaccug

SEQ ID NO: 366725 - RNA, 19 nt, Artificial Sequence
  Description of Artificial Sequence: Synthetic oligonucleotide
cgucuuuaguugacuuaag

SEQ ID NO: 366726 - RNA, 19 nt, Artificial Sequence
  Description of Artificial Sequence: Synthetic oligonucleotide
guaggucguccacagucau

SEQ ID NO: 366727 - RNA, 19 nt, Artificial Sequence
  Description of Artificial Sequence: Synthetic oligonucleotide
gggaggccaauaucaucca

SEQ ID NO: 366728 - RNA, 19 nt, Artificial Sequence
  Description of Artificial Sequence: Synthetic oligonucleotide
gcaguuuggcucgaaguua

SEQ ID NO: 366729 - RNA, 19 nt, Artificial Sequence
  Description of Artificial Sequence: Synthetic oligonucleotide
agacgucaguucgucuuua

SEQ ID NO: 366730 - RNA, 19 nt, Artificial Sequence
  Description of Artificial Sequence: Synthetic oligonucleotide
caucccgucuccuuucguu

SEQ ID NO: 366731 - RNA, 19 nt, Artificial Sequence
  Description of Artificial Sequence: Synthetic oligonucleotide
ccccucaguugacaguaug

SEQ ID NO: 366732 - RNA, 19 nt, Artificial Sequence
  Description of Artificial Sequence: Synthetic oligonucleotide
cuucggaaaacgcgccuau

SEQ ID NO: 366733 - RNA, 19 nt, Artificial Sequence
  Description of Artificial Sequence: Synthetic oligonucleotide
gagccauaguuuccacauu

SEQ ID NO: 366734 - RNA, 19 nt, Artificial Sequence
  Description of Artificial Sequence: Synthetic oligonucleotide
caacagccgucaguuuuaa

SEQ ID NO: 366735 - RNA, 19 nt, Artificial Sequence
  Description of Artificial Sequence: Synthetic oligonucleotide
gucugcguagcaagguuuu

SEQ ID NO: 366736 - RNA, 19 nt, Artificial Sequence
  Description of Artificial Sequence: Synthetic oligonucleotide
agccaggucuaaaccccuu

SEQ ID NO: 366737 - RNA, 19 nt, Artificial Sequence
  Description of Artificial Sequence: Synthetic oligonucleotide
gguuaucaccaaaucuauu

SEQ ID NO: 366738 - RNA, 19 nt, Artificial Sequence
  Description of Artificial Sequence: Synthetic oligonucleotide
gaccguccacccggccuuc

SEQ ID NO: 366739 - RNA, 19 nt, Artificial Sequence
  Description of Artificial Sequence: Synthetic oligonucleotide
gccuucggaaaacgcgccu

SEQ ID NO: 366740 - RNA, 19 nt, Artificial Sequence
  Description of Artificial Sequence: Synthetic oligonucleotide
ccuucggaaaacgcgccua

SEQ ID NO: 366741 - RNA, 19 nt, Artificial Sequence
  Description of Artificial Sequence: Synthetic oligonucleotide
cgagggagcagacguugga

SEQ ID NO: 366742 - RNA, 19 nt, Artificial Sequence
  Description of Artificial Sequence: Synthetic oligonucleotide
cgguuaucaccaaaucuau

SEQ ID NO: 366743 - RNA, 19 nt, Artificial Sequence
  Description of Artificial Sequence: Synthetic oligonucleotide
gcgcucaguuucucucugu

SEQ ID NO: 366744 - RNA, 19 nt, Artificial Sequence
  Description of Artificial Sequence: Synthetic oligonucleotide
gcugaaccucagacgcggu

SEQ ID NO: 366745 - RNA, 19 nt, Artificial Sequence
  Description of Artificial Sequence: Synthetic oligonucleotide
cagacgcggugacgccguu

SEQ ID NO: 366746 - RNA, 19 nt, Artificial Sequence
  Description of Artificial Sequence: Synthetic oligonucleotide
agugguacgaacuggaggc

SEQ ID NO: 366747 - RNA, 19 nt, Artificial Sequence
  Description of Artificial Sequence: Synthetic oligonucleotide
aaagaugucaguacggcgc

SEQ ID NO: 366748 - RNA, 19 nt, Artificial Sequence
  Description of Artificial Sequence: Synthetic oligonucleotide
uaagcuacucucaauaucc

SEQ ID NO: 366749 - RNA, 19 nt, Artificial Sequence
  Description of Artificial Sequence: Synthetic oligonucleotide
aaacuugcaagguuguagg

SEQ ID NO: 366750 - RNA, 19 nt, Artificial Sequence
  Description of Artificial Sequence: Synthetic oligonucleotide
uguccuuaauaccaaaagg

SEQ ID NO: 366751 - RNA, 19 nt, Artificial Sequence
  Description of Artificial Sequence: Synthetic oligonucleotide
aacucgcugaccuuguggc

SEQ ID NO: 366752 - RNA, 19 nt, Artificial Sequence
  Description of Artificial Sequence: Synthetic oligonucleotide
auuucauugggcuugcuag

SEQ ID NO: 366753 - RNA, 19 nt, Artificial Sequence
  Description of Artificial Sequence: Synthetic oligonucleotide
aagcccaauacgcaugugc

SEQ ID NO: 366754 - RNA, 19 nt, Artificial Sequence
  Description of Artificial Sequence: Synthetic oligonucleotide
cuucacuacauccaggucg

SEQ ID NO: 366755 - RNA, 19 nt, Artificial Sequence
  Description of Artificial Sequence: Synthetic oligonucleotide
cauaauaggaggugcagcg

SEQ ID NO: 366756 - RNA, 19 nt, Artificial Sequence
  Description of Artificial Sequence: Synthetic oligonucleotide
uacucgauagcacaccugg

SEQ ID NO: 366757 - RNA, 19 nt, Artificial Sequence
  Description of Artificial Sequence: Synthetic oligonucleotide
caagauauucaucaggagc

SEQ ID NO: 366758 - RNA, 19 nt, Artificial Sequence
  Description of Artificial Sequence: Synthetic oligonucleotide
uaaaagaagagguccaaug

SEQ ID NO: 366759 - RNA, 19 nt, Artificial Sequence
  Description of Artificial Sequence: Synthetic oligonucleotide
aaacugagcugucagcuuc

SEQ ID NO: 366760 - RNA, 19 nt, Artificial Sequence
  Description of Artificial Sequence: Synthetic oligonucleotide
ucgcaaauaagccuuuggg

SEQ ID NO: 366761 - RNA, 19 nt, Artificial Sequence
  Description of Artificial Sequence: Synthetic oligonucleotide
auacaagauauucaucagg

SEQ ID NO: 366762 - RNA, 19 nt, Artificial Sequence
  Description of Artificial Sequence: Synthetic oligonucleotide
auucacuugcauuccaccc

SEQ ID NO: 366763 - RNA, 19 nt, Artificial Sequence
  Description of Artificial Sequence: Synthetic oligonucleotide
ucgaagaagcccaauacgc

SEQ ID NO: 366764 - RNA, 19 nt, Artificial Sequence
  Description of Artificial Sequence: Synthetic oligonucleotide
agucuacagaggcauaugc

SEQ ID NO: 366765 - RNA, 19 nt, Artificial Sequence
  Description of Artificial Sequence: Synthetic oligonucleotide
uacuugaguauccuggucc

SEQ ID NO: 366766 - RNA, 19 nt, Artificial Sequence
  Description of Artificial Sequence: Synthetic oligonucleotide
guccuuaauaccaaaaggg

SEQ ID NO: 366767 - RNA, 19 nt, Artificial Sequence
  Description of Artificial Sequence: Synthetic oligonucleotide
uugcauuccacccagcccc

SEQ ID NO: 366768 - RNA, 19 nt, Artificial Sequence
  Description of Artificial Sequence: Synthetic oligonucleotide
uaauaggaggugcagcggg

SEQ ID NO: 366769 - RNA, 19 nt, Artificial Sequence
  Description of Artificial Sequence: Synthetic oligonucleotide
caugccauguccuuaauac

SEQ ID NO: 366770 - RNA, 19 nt, Artificial Sequence
  Description of Artificial Sequence: Synthetic oligonucleotide
ugaaugugagucaggacag

SEQ ID NO: 366771 - RNA, 19 nt, Artificial Sequence
  Description of Artificial Sequence: Synthetic oligonucleotide
aauacgcaugugcucuugc

SEQ ID NO: 366772 - RNA, 19 nt, Artificial Sequence
  Description of Artificial Sequence: Synthetic oligonucleotide
gaaguaauugaagaggcug

SEQ ID NO: 366773 - RNA, 19 nt, Artificial Sequence
  Description of Artificial Sequence: Synthetic oligonucleotide
caaauaagccuuugggugg

SEQ ID NO: 366774 - RNA, 19 nt, Artificial Sequence
  Description of Artificial Sequence: Synthetic oligonucleotide
uaauugaagaggcugugcu

SEQ ID NO: 366775 - RNA, 19 nt, Artificial Sequence
  Description of Artificial Sequence: Synthetic oligonucleotide
ggaacuguuaacuccaagg

SEQ ID NO: 366776 - RNA, 19 nt, Artificial Sequence
  Description of Artificial Sequence: Synthetic oligonucleotide
uaaacuugcaagguuguag

SEQ ID NO: 366777 - RNA, 19 nt, Artificial Sequence
  Description of Artificial Sequence: Synthetic oligonucleotide
aaacucgcugaccuugugg

SEQ ID NO: 366778 - RNA, 19 nt, Artificial Sequence
  Description of Artificial Sequence: Synthetic oligonucleotide
uggugguaaaagaagaggu

SEQ ID NO: 366779 - RNA, 19 nt, Artificial Sequence
  Description of Artificial Sequence: Synthetic oligonucleotide
caacgguucaucuauggcc

SEQ ID NO: 366780 - RNA, 19 nt, Artificial Sequence
  Description of Artificial Sequence: Synthetic oligonucleotide
aggucgaaggcugagaugg

SEQ ID NO: 366781 - RNA, 19 nt, Artificial Sequence
  Description of Artificial Sequence: Synthetic oligonucleotide
aagccagggaguuggaauc

SEQ ID NO: 366782 - RNA, 19 nt, Artificial Sequence
  Description of Artificial Sequence: Synthetic oligonucleotide
uucgcaaauaagccuuugg

SEQ ID NO: 366783 - RNA, 19 nt, Artificial Sequence
  Description of Artificial Sequence: Synthetic oligonucleotide
uuaacuccaaggagugugg

SEQ ID NO: 366784 - RNA, 19 nt, Artificial Sequence
  Description of Artificial Sequence: Synthetic oligonucleotide
aauauccagaccuggugca

SEQ ID NO: 366785 - RNA, 19 nt, Artificial Sequence
  Description of Artificial Sequence: Synthetic oligonucleotide
aaggaguguggaucaaagg

SEQ ID NO: 366786 - RNA, 19 nt, Artificial Sequence
  Description of Artificial Sequence: Synthetic oligonucleotide
acaacgguucaucuauggc

SEQ ID NO: 366787 - RNA, 19 nt, Artificial Sequence
  Description of Artificial Sequence: Synthetic oligonucleotide
cuugcuagggccaauuuuc

SEQ ID NO: 366788 - RNA, 19 nt, Artificial Sequence
  Description of Artificial Sequence: Synthetic oligonucleotide
ucuugucacagccucagcu

SEQ ID NO: 366789 - RNA, 19 nt, Artificial Sequence
  Description of Artificial Sequence: Synthetic oligonucleotide
uacaacagugguacgaacu

SEQ ID NO: 366790 - RNA, 19 nt, Artificial Sequence
  Description of Artificial Sequence: Synthetic oligonucleotide
uuuggguggaaucaagauc

SEQ ID NO: 366791 - RNA, 19 nt, Artificial Sequence
  Description of Artificial Sequence: Synthetic oligonucleotide
ucgauagcacaccuggucc

SEQ ID NO: 366792 - RNA, 19 nt, Artificial Sequence
  Description of Artificial Sequence: Synthetic oligonucleotide
ugacagguaccgcagauac

SEQ ID NO: 366793 - RNA, 19 nt, Artificial Sequence
  Description of Artificial Sequence: Synthetic oligonucleotide
gacacuggacccuuguucc

SEQ ID NO: 366794 - RNA, 19 nt, Artificial Sequence
  Description of Artificial Sequence: Synthetic oligonucleotide
uuaagcuacucucaauauc

SEQ ID NO: 366795 - RNA, 19 nt, Artificial Sequence
  Description of Artificial Sequence: Synthetic oligonucleotide
ugguacuauggucucuugg

SEQ ID NO: 366796 - RNA, 19 nt, Artificial Sequence
  Description of Artificial Sequence: Synthetic oligonucleotide
gaugauggguggcaugggg

SEQ ID NO: 366797 - RNA, 19 nt, Artificial Sequence
  Description of Artificial Sequence: Synthetic oligonucleotide
caaacugguaguuucgcug

SEQ ID NO: 366798 - RNA, 19 nt, Artificial Sequence
  Description of Artificial Sequence: Synthetic oligonucleotide
cuugcaagguuguaggaug

SEQ ID NO: 366799 - RNA, 19 nt, Artificial Sequence
  Description of Artificial Sequence: Synthetic oligonucleotide
gaggcauaugcccugacac

SEQ ID NO: 366800 - RNA, 19 nt, Artificial Sequence
  Description of Artificial Sequence: Synthetic oligonucleotide
uuugccuuauggauggccu

SEQ ID NO: 366801 - RNA, 19 nt, Artificial Sequence
  Description of Artificial Sequence: Synthetic oligonucleotide
uguaauggccaucccaagu

SEQ ID NO: 366802 - RNA, 19 nt, Artificial Sequence
  Description of Artificial Sequence: Synthetic oligonucleotide
uucugucuuauccugcaug

SEQ ID NO: 366803 - RNA, 19 nt, Artificial Sequence
  Description of Artificial Sequence: Synthetic oligonucleotide
agaaacuggcguccauucc

SEQ ID NO: 366804 - RNA, 19 nt, Artificial Sequence
  Description of Artificial Sequence: Synthetic oligonucleotide
uauggauggccucaaucug

SEQ ID NO: 366805 - RNA, 19 nt, Artificial Sequence
  Description of Artificial Sequence: Synthetic oligonucleotide
accacguugauccuaggug

SEQ ID NO: 366806 - RNA, 19 nt, Artificial Sequence
  Description of Artificial Sequence: Synthetic oligonucleotide
gugguaaaagaagaggucc

SEQ ID NO: 366807 - RNA, 19 nt, Artificial Sequence
  Description of Artificial Sequence: Synthetic oligonucleotide
uucacuugcauuccaccca

SEQ ID NO: 366808 - RNA, 19 nt, Artificial Sequence
  Description of Artificial Sequence: Synthetic oligonucleotide
gucaguacggcgcucagcc

SEQ ID NO: 366809 - RNA, 19 nt, Artificial Sequence
  Description of Artificial Sequence: Synthetic oligonucleotide
uucacuacauccaggucga

SEQ ID NO: 366810 - RNA, 19 nt, Artificial Sequence
  Description of Artificial Sequence: Synthetic oligonucleotide
gauggagcgaucccgcugc

SEQ ID NO: 366811 - RNA, 19 nt, Artificial Sequence
  Description of Artificial Sequence: Synthetic oligonucleotide
ugguaaaagaagaggucca

SEQ ID NO: 366812 - RNA, 19 nt, Artificial Sequence
  Description of Artificial Sequence: Synthetic oligonucleotide
aauuucauugggcuugcua

SEQ ID NO: 366813 - RNA, 19 nt, Artificial Sequence
  Description of Artificial Sequence: Synthetic oligonucleotide
acaacagugguacgaacug

SEQ ID NO: 366814 - RNA, 19 nt, Artificial Sequence
  Description of Artificial Sequence: Synthetic oligonucleotide
aaguggaugacagcaccac

SEQ ID NO: 366815 - RNA, 19 nt, Artificial Sequence
  Description of Artificial Sequence: Synthetic oligonucleotide
aggcagucggacuacagag

SEQ ID NO: 366816 - RNA, 19 nt, Artificial Sequence
  Description of Artificial Sequence: Synthetic oligonucleotide
cuacucucaauauccagac

SEQ ID NO: 366817 - RNA, 19 nt, Artificial Sequence
  Description of Artificial Sequence: Synthetic oligonucleotide
guugauccuaggugcaugg

SEQ ID NO: 366818 - RNA, 19 nt, Artificial Sequence
  Description of Artificial Sequence: Synthetic oligonucleotide
aggcauaugcccugacacc

SEQ ID NO: 366819 - RNA, 19 nt, Artificial Sequence
  Description of Artificial Sequence: Synthetic oligonucleotide
uaccgcagauacaacagug

SEQ ID NO: 366820 - RNA, 19 nt, Artificial Sequence
  Description of Artificial Sequence: Synthetic oligonucleotide
cuugcauuuugcuggcagg

SEQ ID NO: 366821 - RNA, 19 nt, Artificial Sequence
  Description of Artificial Sequence: Synthetic oligonucleotide
uguuucuucuaccccaaaa

SEQ ID NO: 366822 - RNA, 19 nt, Artificial Sequence
  Description of Artificial Sequence: Synthetic oligonucleotide
acuccaaggaguguggauc

SEQ ID NO: 366823 - RNA, 19 nt, Artificial Sequence
  Description of Artificial Sequence: Synthetic oligonucleotide
aucuauggccaccaaaggu

SEQ ID NO: 366824 - RNA, 19 nt, Artificial Sequence
  Description of Artificial Sequence: Synthetic oligonucleotide
cuuaauaccaaaagggagu

SEQ ID NO: 366825 - RNA, 19 nt, Artificial Sequence
  Description of Artificial Sequence: Synthetic oligonucleotide
ucucaauauccagaccugg

SEQ ID NO: 366826 - RNA, 19 nt, Artificial Sequence
  Description of Artificial Sequence: Synthetic oligonucleotide
uuuaagcuacucucaauau

SEQ ID NO: 366827 - RNA, 19 nt, Artificial Sequence
  Description of Artificial Sequence: Synthetic oligonucleotide
ucacuuuccccaaaacgcu

SEQ ID NO: 366828 - RNA, 19 nt, Artificial Sequence
  Description of Artificial Sequence: Synthetic oligonucleotide
ugaaguaauugaagaggcu

SEQ ID NO: 366829 - RNA, 19 nt, Artificial Sequence
  Description of Artificial Sequence: Synthetic oligonucleotide
acaugggauucaccaaggc

SEQ ID NO: 366830 - RNA, 19 nt, Artificial Sequence
  Description of Artificial Sequence: Synthetic oligonucleotide
ucuguggucaaugagccuc

SEQ ID NO: 366831 - RNA, 19 nt, Artificial Sequence
  Description of Artificial Sequence: Synthetic oligonucleotide
caaggaguguggaucaaag

SEQ ID NO: 366832 - RNA, 19 nt, Artificial Sequence
  Description of Artificial Sequence: Synthetic oligonucleotide
ucgcacaaugacuuggucu

SEQ ID NO: 366833 - RNA, 19 nt, Artificial Sequence
  Description of Artificial Sequence: Synthetic oligonucleotide
aaguaauugaagaggcugu

SEQ ID NO: 366834 - RNA, 19 nt, Artificial Sequence
  Description of Artificial Sequence: Synthetic oligonucleotide
gaaacaacgguucaucuau

SEQ ID NO: 366835 - RNA, 19 nt, Artificial Sequence
  Description of Artificial Sequence: Synthetic oligonucleotide
ucuucuuaccaauggcugu

SEQ ID NO: 366836 - RNA, 19 nt, Artificial Sequence
  Description of Artificial Sequence: Synthetic oligonucleotide
aacgguucaucuauggcca

SEQ ID NO: 366837 - RNA, 19 nt, Artificial Sequence
  Description of Artificial Sequence: Synthetic oligonucleotide
acggcgcucagccaacugc

SEQ ID NO: 366838 - RNA, 19 nt, Artificial Sequence
  Description of Artificial Sequence: Synthetic oligonucleotide
uccauuccuggccacaaac

SEQ ID NO: 366839 - RNA, 19 nt, Artificial Sequence
  Description of Artificial Sequence: Synthetic oligonucleotide
cauucacuugcauuccacc

SEQ ID NO: 366840 - RNA, 19 nt, Artificial Sequence
  Description of Artificial Sequence: Synthetic oligonucleotide
aagaugucaguacggcgcu

SEQ ID NO: 366841 - RNA, 19 nt, Artificial Sequence
  Description of Artificial Sequence: Synthetic oligonucleotide
aauacacgggcugugccug

SEQ ID NO: 366842 - RNA, 19 nt, Artificial Sequence
  Description of Artificial Sequence: Synthetic oligonucleotide
auacaacagugguacgaac

SEQ ID NO: 366843 - RNA, 19 nt, Artificial Sequence
  Description of Artificial Sequence: Synthetic oligonucleotide
cuuucgcacaaugacuugg

SEQ ID NO: 366844 - RNA, 19 nt, Artificial Sequence
  Description of Artificial Sequence: Synthetic oligonucleotide
guuucuuagauggaggcuc

SEQ ID NO: 366845 - RNA, 19 nt, Artificial Sequence
  Description of Artificial Sequence: Synthetic oligonucleotide
gauccuaggugcauggaug

SEQ ID NO: 366846 - RNA, 19 nt, Artificial Sequence
  Description of Artificial Sequence: Synthetic oligonucleotide
ccuuaauaccaaaagggag

SEQ ID NO: 366847 - RNA, 19 nt, Artificial Sequence
  Description of Artificial Sequence: Synthetic oligonucleotide
ugagccuccagugaaugug

SEQ ID NO: 366848 - RNA, 19 nt, Artificial Sequence
  Description of Artificial Sequence: Synthetic oligonucleotide
ucuuccauaggaggugggg

SEQ ID NO: 366849 - RNA, 19 nt, Artificial Sequence
  Description of Artificial Sequence: Synthetic oligonucleotide
cuuuaagcuacucucaaua

SEQ ID NO: 366850 - RNA, 19 nt, Artificial Sequence
  Description of Artificial Sequence: Synthetic oligonucleotide
guaauggccaucccaaguc

SEQ ID NO: 366851 - RNA, 19 nt, Artificial Sequence
  Description of Artificial Sequence: Synthetic oligonucleotide
uuucugauguccugaggga

SEQ ID NO: 366852 - RNA, 19 nt, Artificial Sequence
  Description of Artificial Sequence: Synthetic oligonucleotide
aauggccaucccaagucac

SEQ ID NO: 366853 - RNA, 19 nt, Artificial Sequence
  Description of Artificial Sequence: Synthetic oligonucleotide
aaugagccuccagugaaug

SEQ ID NO: 366854 - RNA, 19 nt, Artificial Sequence
  Description of Artificial Sequence: Synthetic oligonucleotide
uuucuuagauggaggcuca

SEQ ID NO: 366855 - RNA, 19 nt, Artificial Sequence
  Description of Artificial Sequence: Synthetic oligonucleotide
cuguuaacuccaaggagug

SEQ ID NO: 366856 - RNA, 19 nt, Artificial Sequence
  Description of Artificial Sequence: Synthetic oligonucleotide
cagugguacgaacuggagg

SEQ ID NO: 366857 - RNA, 19 nt, Artificial Sequence
  Description of Artificial Sequence: Synthetic oligonucleotide
gcagauacaacagugguac

SEQ ID NO: 366858 - RNA, 19 nt, Artificial Sequence
  Description of Artificial Sequence: Synthetic oligonucleotide
uauucaucaggagcaggag

SEQ ID NO: 366859 - RNA, 19 nt, Artificial Sequence
  Description of Artificial Sequence: Synthetic oligonucleotide
acagguaccgcagauacaa

SEQ ID NO: 366860 - RNA, 19 nt, Artificial Sequence
  Description of Artificial Sequence: Synthetic oligonucleotide
ugcauguuggguaccugca

SEQ ID NO: 366861 - RNA, 19 nt, Artificial Sequence
  Description of Artificial Sequence: Synthetic oligonucleotide
ugcuuuaagcuacucucaa

SEQ ID NO: 366862 - RNA, 19 nt, Artificial Sequence
  Description of Artificial Sequence: Synthetic oligonucleotide
uuaauaccaaaagggagua

SEQ ID NO: 366863 - RNA, 19 nt, Artificial Sequence
  Description of Artificial Sequence: Synthetic oligonucleotide
ucaaacugguaguuucgcu

SEQ ID NO: 366864 - RNA, 19 nt, Artificial Sequence
  Description of Artificial Sequence: Synthetic oligonucleotide
ugccauaauaggaggugca

SEQ ID NO: 366865 - RNA, 19 nt, Artificial Sequence
  Description of Artificial Sequence: Synthetic oligonucleotide
agguaccgcagauacaaca

SEQ ID NO: 366866 - RNA, 19 nt, Artificial Sequence
  Description of Artificial Sequence: Synthetic oligonucleotide
ugauccuaggugcauggau

SEQ ID NO: 366867 - RNA, 19 nt, Artificial Sequence
  Description of Artificial Sequence: Synthetic oligonucleotide
ugggaucauagccuuucgc

SEQ ID NO: 366868 - RNA, 19 nt, Artificial Sequence
  Description of Artificial Sequence: Synthetic oligonucleotide
uggaucaaagggcccauuc

SEQ ID NO: 366869 - RNA, 19 nt, Artificial Sequence
  Description of Artificial Sequence: Synthetic oligonucleotide
aacuugcaagguuguagga

SEQ ID NO: 366870 - RNA, 19 nt, Artificial Sequence
  Description of Artificial Sequence: Synthetic oligonucleotide
auaauaggaggugcagcgg

SEQ ID NO: 366871 - RNA, 19 nt, Artificial Sequence
  Description of Artificial Sequence: Synthetic oligonucleotide
uacuauggucucuuggauc

SEQ ID NO: 366872 - RNA, 19 nt, Artificial Sequence
  Description of Artificial Sequence: Synthetic oligonucleotide
uuucgcacaaugacuuggu

SEQ ID NO: 366873 - RNA, 19 nt, Artificial Sequence
  Description of Artificial Sequence: Synthetic oligonucleotide
ggcggagaaagucaaacug

SEQ ID NO: 366874 - RNA, 19 nt, Artificial Sequence
  Description of Artificial Sequence: Synthetic oligonucleotide
caucuauggccaccaaagg

SEQ ID NO: 366875 - RNA, 19 nt, Artificial Sequence
  Description of Artificial Sequence: Synthetic oligonucleotide
auucuacucgauagcacac

SEQ ID NO: 366876 - RNA, 19 nt, Artificial Sequence
  Description of Artificial Sequence: Synthetic oligonucleotide
ucauccauguccuguacuu

SEQ ID NO: 366877 - RNA, 19 nt, Artificial Sequence
  Description of Artificial Sequence: Synthetic oligonucleotide
ggacaugggauucaccaag

SEQ ID NO: 366878 - RNA, 19 nt, Artificial Sequence
  Description of Artificial Sequence: Synthetic oligonucleotide
aggaaacaacgguucaucu

SEQ ID NO: 366879 - RNA, 19 nt, Artificial Sequence
  Description of Artificial Sequence: Synthetic oligonucleotide
gguacuauggucucuugga

SEQ ID NO: 366880 - RNA, 19 nt, Artificial Sequence
  Description of Artificial Sequence: Synthetic oligonucleotide
uggugcauaaaaccucauc

SEQ ID NO: 366881 - RNA, 19 nt, Artificial Sequence
  Description of Artificial Sequence: Synthetic oligonucleotide
cucgauagcacaccugguc

SEQ ID NO: 366882 - RNA, 19 nt, Artificial Sequence
  Description of Artificial Sequence: Synthetic oligonucleotide
gaaacuggcguccauuccu

SEQ ID NO: 366883 - RNA, 19 nt, Artificial Sequence
  Description of Artificial Sequence: Synthetic oligonucleotide
aagaagcccaauacgcaug

SEQ ID NO: 366884 - RNA, 19 nt, Artificial Sequence
  Description of Artificial Sequence: Synthetic oligonucleotide
agaagcccaauacgcaugu

SEQ ID NO: 366885 - RNA, 19 nt, Artificial Sequence
  Description of Artificial Sequence: Synthetic oligonucleotide
ccaaaagaugucaguacgg

SEQ ID NO: 366886 - RNA, 19 nt, Artificial Sequence
  Description of Artificial Sequence: Synthetic oligonucleotide
aucuucuuaccaauggcug

SEQ ID NO: 366887 - RNA, 19 nt, Artificial Sequence
  Description of Artificial Sequence: Synthetic oligonucleotide
cuuagaagcuuugggauca

SEQ ID NO: 366888 - RNA, 19 nt, Artificial Sequence
  Description of Artificial Sequence: Synthetic oligonucleotide
ugacuuggucuggaguugg

SEQ ID NO: 366889 - RNA, 19 nt, Artificial Sequence
  Description of Artificial Sequence: Synthetic oligonucleotide
caugccuguggcuucauga

SEQ ID NO: 366890 - RNA, 19 nt, Artificial Sequence
  Description of Artificial Sequence: Synthetic oligonucleotide
guaauugaagaggcugugc

SEQ ID NO: 366891 - RNA, 19 nt, Artificial Sequence
  Description of Artificial Sequence: Synthetic oligonucleotide
uugcaagguuguaggaugu

SEQ ID NO: 366892 - RNA, 19 nt, Artificial Sequence
  Description of Artificial Sequence: Synthetic oligonucleotide
ugguacgaacuggaggcgg

SEQ ID NO: 366893 - RNA, 19 nt, Artificial Sequence
  Description of Artificial Sequence: Synthetic oligonucleotide
aacuucucggggauuucag

SEQ ID NO: 366894 - RNA, 19 nt, Artificial Sequence
  Description of Artificial Sequence: Synthetic oligonucleotide
auccuaggugcauggauga

SEQ ID NO: 366895 - RNA, 19 nt, Artificial Sequence
  Description of Artificial Sequence: Synthetic oligonucleotide
ugggcggagaaagucaaac

SEQ ID NO: 366896 - RNA, 19 nt, Artificial Sequence
  Description of Artificial Sequence: Synthetic oligonucleotide
uucucggggauuucagccu

SEQ ID NO: 366897 - RNA, 19 nt, Artificial Sequence
  Description of Artificial Sequence: Synthetic oligonucleotide
gggaauuucauugggcuug

SEQ ID NO: 366898 - RNA, 19 nt, Artificial Sequence
  Description of Artificial Sequence: Synthetic oligonucleotide
gaccuuguggcgguaguag

SEQ ID NO: 366899 - RNA, 19 nt, Artificial Sequence
  Description of Artificial Sequence: Synthetic oligonucleotide
cucgcugaccuuguggcgg

SEQ ID NO: 366900 - RNA, 19 nt, Artificial Sequence
  Description of Artificial Sequence: Synthetic oligonucleotide
cagaaacuggcguccauuc

SEQ ID NO: 366901 - RNA, 19 nt, Artificial Sequence
  Description of Artificial Sequence: Synthetic oligonucleotide
ugggcgaggugccauaaua

SEQ ID NO: 366902 - RNA, 19 nt, Artificial Sequence
  Description of Artificial Sequence: Synthetic oligonucleotide
ugggucagaaacuggcguc

SEQ ID NO: 366903 - RNA, 19 nt, Artificial Sequence
  Description of Artificial Sequence: Synthetic oligonucleotide
ggucgaagaagcccaauac

SEQ ID NO: 366904 - RNA, 19 nt, Artificial Sequence
  Description of Artificial Sequence: Synthetic oligonucleotide
uuugguacuauggucucuu

SEQ ID NO: 366905 - RNA, 19 nt, Artificial Sequence
  Description of Artificial Sequence: Synthetic oligonucleotide
aacuggaggcggcaucgca

SEQ ID NO: 366906 - RNA, 19 nt, Artificial Sequence
  Description of Artificial Sequence: Synthetic oligonucleotide
ggaguauuuggacauggga

SEQ ID NO: 366907 - RNA, 19 nt, Artificial Sequence
  Description of Artificial Sequence: Synthetic oligonucleotide
ggcgaggugccauaauagg

SEQ ID NO: 366908 - RNA, 19 nt, Artificial Sequence
  Description of Artificial Sequence: Synthetic oligonucleotide
  modified_base (19)..(19): a, c, u, g, unknown or other
aacugguaguuucgcugcn

SEQ ID NO: 366909 - RNA, 19 nt, Artificial Sequence
  Description of Artificial Sequence: Synthetic oligonucleotide
accgcagauacaacagugg

SEQ ID NO: 366910 - RNA, 19 nt, Artificial Sequence
  Description of Artificial Sequence: Synthetic oligonucleotide
uaaacucgcugaccuugug

SEQ ID NO: 366911 - RNA, 19 nt, Artificial Sequence
  Description of Artificial Sequence: Synthetic oligonucleotide
cuuugccuuauggauggcc

SEQ ID NO: 366912 - RNA, 19 nt, Artificial Sequence
  Description of Artificial Sequence: Synthetic oligonucleotide
ugagccuuccccuccuuaa

SEQ ID NO: 366913 - RNA, 19 nt, Artificial Sequence
  Description of Artificial Sequence: Synthetic oligonucleotide
cugccuguaauggccaucc

SEQ ID NO: 366914 - RNA, 19 nt, Artificial Sequence
  Description of Artificial Sequence: Synthetic oligonucleotide
cuggaggcggcaucgcagg

SEQ ID NO: 366915 - RNA, 19 nt, Artificial Sequence
  Description of Artificial Sequence: Synthetic oligonucleotide
uugcuagggccaauuuucu

SEQ ID NO: 366916 - RNA, 19 nt, Artificial Sequence
  Description of Artificial Sequence: Synthetic oligonucleotide
caucuuccauaggaggugg

SEQ ID NO: 366917 - RNA, 19 nt, Artificial Sequence
  Description of Artificial Sequence: Synthetic oligonucleotide
ucuuaccaauggcuguuuc

SEQ ID NO: 366918 - RNA, 19 nt, Artificial Sequence
  Description of Artificial Sequence: Synthetic oligonucleotide
gaggcaugggugucuccgg

SEQ ID NO: 366919 - RNA, 19 nt, Artificial Sequence
  Description of Artificial Sequence: Synthetic oligonucleotide
  modified_base (18)..(18): a, c, u, g, unknown or other
acugguaguuucgcugcnc

SEQ ID NO: 366920 - RNA, 19 nt, Artificial Sequence
  Description of Artificial Sequence: Synthetic oligonucleotide
ggucugccagucuacagag

SEQ ID NO: 366921 - RNA, 19 nt, Artificial Sequence
  Description of Artificial Sequence: Synthetic oligonucleotide
ccacguugauccuaggugc

SEQ ID NO: 366922 - RNA, 19 nt, Artificial Sequence
  Description of Artificial Sequence: Synthetic oligonucleotide
ggagcgaucccgcugcucc

SEQ ID NO: 366923 - RNA, 19 nt, Artificial Sequence
  Description of Artificial Sequence: Synthetic oligonucleotide
acgaacuggaggcggcauc

SEQ ID NO: 366924 - RNA, 19 nt, Artificial Sequence
  Description of Artificial Sequence: Synthetic oligonucleotide
auacgcaugugcucuugca

SEQ ID NO: 366925 - RNA, 19 nt, Artificial Sequence
  Description of Artificial Sequence: Synthetic oligonucleotide
accuggugcauaaaaccuc

SEQ ID NO: 366926 - RNA, 19 nt, Artificial Sequence
  Description of Artificial Sequence: Synthetic oligonucleotide
ggaauccuugaugaaaaug

SEQ ID NO: 366927 - RNA, 19 nt, Artificial Sequence
  Description of Artificial Sequence: Synthetic oligonucleotide
gacucaaccuccaucucca

SEQ ID NO: 366928 - RNA, 19 nt, Artificial Sequence
  Description of Artificial Sequence: Synthetic oligonucleotide
uuagauggaggcucaucuu

SEQ ID NO: 366929 - RNA, 19 nt, Artificial Sequence
  Description of Artificial Sequence: Synthetic oligonucleotide
gaagaagcccaauacgcau

SEQ ID NO: 366930 - RNA, 19 nt, Artificial Sequence
  Description of Artificial Sequence: Synthetic oligonucleotide
gguaccgcagauacaacag

SEQ ID NO: 366931 - RNA, 19 nt, Artificial Sequence
  Description of Artificial Sequence: Synthetic oligonucleotide
aaacuggcguccauuccug

SEQ ID NO: 366932 - RNA, 19 nt, Artificial Sequence
  Description of Artificial Sequence: Synthetic oligonucleotide
aagaccagcccuugcccau

SEQ ID NO: 366933 - RNA, 19 nt, Artificial Sequence
  Description of Artificial Sequence: Synthetic oligonucleotide
ucucggggauuucagccuc

SEQ ID NO: 366934 - RNA, 19 nt, Artificial Sequence
  Description of Artificial Sequence: Synthetic oligonucleotide
auagccuuucgcacaauga

SEQ ID NO: 366935 - RNA, 19 nt, Artificial Sequence
  Description of Artificial Sequence: Synthetic oligonucleotide
cagauacaacagugguacg

SEQ ID NO: 366936 - RNA, 19 nt, Artificial Sequence
  Description of Artificial Sequence: Synthetic oligonucleotide
gaguauccugguccaguug

SEQ ID NO: 366937 - RNA, 19 nt, Artificial Sequence
  Description of Artificial Sequence: Synthetic oligonucleotide
accaaggcuuucugauguc

SEQ ID NO: 366938 - RNA, 19 nt, Artificial Sequence
  Description of Artificial Sequence: Synthetic oligonucleotide
guggaggcacuuucugucc

SEQ ID NO: 366939 - RNA, 19 nt, Artificial Sequence
  Description of Artificial Sequence: Synthetic oligonucleotide
ucgucagacucaaccucca

SEQ ID NO: 366940 - RNA, 19 nt, Artificial Sequence
  Description of Artificial Sequence: Synthetic oligonucleotide
ugccagucuacagaggcau

SEQ ID NO: 366941 - RNA, 19 nt, Artificial Sequence
  Description of Artificial Sequence: Synthetic oligonucleotide
ugggaauauugguggcuga

SEQ ID NO: 366942 - RNA, 19 nt, Artificial Sequence
  Description of Artificial Sequence: Synthetic oligonucleotide
cacuacauccaggucgaag

SEQ ID NO: 366943 - RNA, 19 nt, Artificial Sequence
  Description of Artificial Sequence: Synthetic oligonucleotide
uggacccuuguuccugcgc

SEQ ID NO: 366944 - RNA, 19 nt, Artificial Sequence
  Description of Artificial Sequence: Synthetic oligonucleotide
uucgcacaaugacuugguc

SEQ ID NO: 366945 - RNA, 19 nt, Artificial Sequence
  Description of Artificial Sequence: Synthetic oligonucleotide
ucuuagauggaggcucauc

SEQ ID NO: 366946 - RNA, 19 nt, Artificial Sequence
  Description of Artificial Sequence: Synthetic oligonucleotide
cuacucgauagcacaccug

SEQ ID NO: 366947 - RNA, 19 nt, Artificial Sequence
  Description of Artificial Sequence: Synthetic oligonucleotide
gguaccacguugauccuag

SEQ ID NO: 366948 - RNA, 19 nt, Artificial Sequence
  Description of Artificial Sequence: Synthetic oligonucleotide
agaccuggucugugagugg

SEQ ID NO: 366949 - RNA, 19 nt, Artificial Sequence
  Description of Artificial Sequence: Synthetic oligonucleotide
ggaauauugguggcugaag

SEQ ID NO: 366950 - RNA, 19 nt, Artificial Sequence
  Description of Artificial Sequence: Synthetic oligonucleotide
uuaaacuugcaagguugua

SEQ ID NO: 366951 - RNA, 19 nt, Artificial Sequence
  Description of Artificial Sequence: Synthetic oligonucleotide
guaucucuucacuacuucu

SEQ ID NO: 366952 - RNA, 19 nt, Artificial Sequence
  Description of Artificial Sequence: Synthetic oligonucleotide
cgaggugccauaauaggag

SEQ ID NO: 366953 - RNA, 19 nt, Artificial Sequence
  Description of Artificial Sequence: Synthetic oligonucleotide
uugguacuauggucucuug

SEQ ID NO: 366954 - RNA, 19 nt, Artificial Sequence
  Description of Artificial Sequence: Synthetic oligonucleotide
gguaucucuucacuacuuc

SEQ ID NO: 366955 - RNA, 19 nt, Artificial Sequence
  Description of Artificial Sequence: Synthetic oligonucleotide
cacuuuccccaaaacgcuc

SEQ ID NO: 366956 - RNA, 19 nt, Artificial Sequence
  Description of Artificial Sequence: Synthetic oligonucleotide
gacccuuguuccugcgcag

SEQ ID NO: 366957 - RNA, 19 nt, Artificial Sequence
  Description of Artificial Sequence: Synthetic oligonucleotide
ggugccauaauaggaggug

SEQ ID NO: 366958 - RNA, 19 nt, Artificial Sequence
  Description of Artificial Sequence: Synthetic oligonucleotide
acgguucaucuauggccac

SEQ ID NO: 366959 - RNA, 19 nt, Artificial Sequence
  Description of Artificial Sequence: Synthetic oligonucleotide
uguuucccugcaggcaugc

SEQ ID NO: 366960 - RNA, 19 nt, Artificial Sequence
  Description of Artificial Sequence: Synthetic oligonucleotide
ggccauguuguaguaagcc

SEQ ID NO: 366961 - RNA, 19 nt, Artificial Sequence
  Description of Artificial Sequence: Synthetic oligonucleotide
uauccugguccaguuggga

SEQ ID NO: 366962 - RNA, 19 nt, Artificial Sequence
  Description of Artificial Sequence: Synthetic oligonucleotide
augacuuggucuggaguug

SEQ ID NO: 366963 - RNA, 19 nt, Artificial Sequence
  Description of Artificial Sequence: Synthetic oligonucleotide
uggcguccauuccuggcca

SEQ ID NO: 366964 - RNA, 19 nt, Artificial Sequence
  Description of Artificial Sequence: Synthetic oligonucleotide
uggaauccuugaugaaaau

SEQ ID NO: 366965 - RNA, 19 nt, Artificial Sequence
  Description of Artificial Sequence: Synthetic oligonucleotide
uccuguacuugaguauccu

SEQ ID NO: 366966 - RNA, 19 nt, Artificial Sequence
  Description of Artificial Sequence: Synthetic oligonucleotide
uguuaacuccaaggagugu

SEQ ID NO: 366967 - RNA, 19 nt, Artificial Sequence
  Description of Artificial Sequence: Synthetic oligonucleotide
uaggugcauggaugauggg

SEQ ID NO: 366968 - RNA, 19 nt, Artificial Sequence
  Description of Artificial Sequence: Synthetic oligonucleotide
gcuacucucaauauccaga

SEQ ID NO: 366969 - RNA, 19 nt, Artificial Sequence
  Description of Artificial Sequence: Synthetic oligonucleotide
ggaucaaagggcccauuca

SEQ ID NO: 366970 - RNA, 19 nt, Artificial Sequence
  Description of Artificial Sequence: Synthetic oligonucleotide
guauccugguccaguuggg

SEQ ID NO: 366971 - RNA, 19 nt, Artificial Sequence
  Description of Artificial Sequence: Synthetic oligonucleotide
  modified_base (16)..(16): a, c, u, g, unknown or other
ugguaguuucgcugcncuu

SEQ ID NO: 366972 - RNA, 19 nt, Artificial Sequence
  Description of Artificial Sequence: Synthetic oligonucleotide
agccuuucgcacaaugacu

SEQ ID NO: 366973 - RNA, 19 nt, Artificial Sequence
  Description of Artificial Sequence: Synthetic oligonucleotide
ugucaguacggcgcucagc

SEQ ID NO: 366974 - RNA, 19 nt, Artificial Sequence
  Description of Artificial Sequence: Synthetic oligonucleotide
ugcaagguuguaggaugug

SEQ ID NO: 366975 - RNA, 19 nt, Artificial Sequence
  Description of Artificial Sequence: Synthetic oligonucleotide
gcguccuuugguacuaugg

SEQ ID NO: 366976 - RNA, 19 nt, Artificial Sequence
  Description of Artificial Sequence: Synthetic oligonucleotide
ggggauacaagauauucau

SEQ ID NO: 366977 - RNA, 19 nt, Artificial Sequence
  Description of Artificial Sequence: Synthetic oligonucleotide
auccagaccuggugcauaa

SEQ ID NO: 366978 - RNA, 19 nt, Artificial Sequence
  Description of Artificial Sequence: Synthetic oligonucleotide
aguacggcgcucagccaac

SEQ ID NO: 366979 - RNA, 19 nt, Artificial Sequence
  Description of Artificial Sequence: Synthetic oligonucleotide
acagugguacgaacuggag

SEQ ID NO: 366980 - RNA, 19 nt, Artificial Sequence
  Description of Artificial Sequence: Synthetic oligonucleotide
agggccaauuuucuccuua

SEQ ID NO: 366981 - RNA, 19 nt, Artificial Sequence
  Description of Artificial Sequence: Synthetic oligonucleotide
caugggauucaccaaggcu

SEQ ID NO: 366982 - RNA, 19 nt, Artificial Sequence
  Description of Artificial Sequence: Synthetic oligonucleotide
gcccauucagcuuccauuc

SEQ ID NO: 366983 - RNA, 19 nt, Artificial Sequence
  Description of Artificial Sequence: Synthetic oligonucleotide
guggucaaugagccuccag

SEQ ID NO: 366984 - RNA, 19 nt, Artificial Sequence
  Description of Artificial Sequence: Synthetic oligonucleotide
agccaacugcuuuaagcua

SEQ ID NO: 366985 - RNA, 19 nt, Artificial Sequence
  Description of Artificial Sequence: Synthetic oligonucleotide
cugugggcggagaaaguca

SEQ ID NO: 366986 - RNA, 19 nt, Artificial Sequence
  Description of Artificial Sequence: Synthetic oligonucleotide
augucaguacggcgcucag

SEQ ID NO: 366987 - RNA, 19 nt, Artificial Sequence
  Description of Artificial Sequence: Synthetic oligonucleotide
ggcauaugcccugacacca

SEQ ID NO: 366988 - RNA, 19 nt, Artificial Sequence
  Description of Artificial Sequence: Synthetic oligonucleotide
ccugagggaaacaaauaca

SEQ ID NO: 366989 - RNA, 19 nt, Artificial Sequence
  Description of Artificial Sequence: Synthetic oligonucleotide
ggaaacaacgguucaucua

SEQ ID NO: 366990 - RNA, 19 nt, Artificial Sequence
  Description of Artificial Sequence: Synthetic oligonucleotide
cauccauguccuguacuug

SEQ ID NO: 366991 - RNA, 19 nt, Artificial Sequence
  Description of Artificial Sequence: Synthetic oligonucleotide
uggguaccugcacuuugau

SEQ ID NO: 366992 - RNA, 19 nt, Artificial Sequence
  Description of Artificial Sequence: Synthetic oligonucleotide
gugguacgaacuggaggcg

SEQ ID NO: 366993 - RNA, 19 nt, Artificial Sequence
  Description of Artificial Sequence: Synthetic oligonucleotide
agcccaacuguagguaucu

SEQ ID NO: 366994 - RNA, 19 nt, Artificial Sequence
  Description of Artificial Sequence: Synthetic oligonucleotide
uacggcgcucagccaacug

SEQ ID NO: 366995 - RNA, 19 nt, Artificial Sequence
  Description of Artificial Sequence: Synthetic oligonucleotide
ucaguacggcgcucagcca

SEQ ID NO: 366996 - RNA, 19 nt, Artificial Sequence
  Description of Artificial Sequence: Synthetic oligonucleotide
cuugaguauccugguccag

SEQ ID NO: 366997 - RNA, 19 nt, Artificial Sequence
  Description of Artificial Sequence: Synthetic oligonucleotide
gagugaagaccagcccuug

SEQ ID NO: 366998 - RNA, 19 nt, Artificial Sequence
  Description of Artificial Sequence: Synthetic oligonucleotide
uugauccuaggugcaugga

SEQ ID NO: 366999 - RNA, 19 nt, Artificial Sequence
  Description of Artificial Sequence: Synthetic oligonucleotide
guguacaggaggcauuggu

SEQ ID NO: 367000 - RNA, 19 nt, Artificial Sequence
  Description of Artificial Sequence: Synthetic oligonucleotide
cuucgcaaauaagccuuug

SEQ ID NO: 367001 - RNA, 19 nt, Artificial Sequence
  Description of Artificial Sequence: Synthetic oligonucleotide
gccauaauaggaggugcag

SEQ ID NO: 367002 - RNA, 19 nt, Artificial Sequence
  Description of Artificial Sequence: Synthetic oligonucleotide
ggauggagcgaucccgcug

SEQ ID NO: 367003 - RNA, 19 nt, Artificial Sequence
  Description of Artificial Sequence: Synthetic oligonucleotide
uauccagaccuggugcaua

SEQ ID NO: 367004 - RNA, 19 nt, Artificial Sequence
  Description of Artificial Sequence: Synthetic oligonucleotide
uguggaucaaagggcccau

SEQ ID NO: 367005 - RNA, 19 nt, Artificial Sequence
  Description of Artificial Sequence: Synthetic oligonucleotide
cacguugauccuaggugca

SEQ ID NO: 367006 - RNA, 19 nt, Artificial Sequence
  Description of Artificial Sequence: Synthetic oligonucleotide
cauguuggguaccugcacu

SEQ ID NO: 367007 - RNA, 19 nt, Artificial Sequence
  Description of Artificial Sequence: Synthetic oligonucleotide
caccaaggcuuucugaugu

SEQ ID NO: 367008 - RNA, 19 nt, Artificial Sequence
  Description of Artificial Sequence: Synthetic oligonucleotide
ugccuguaauggccauccc

SEQ ID NO: 367009 - RNA, 19 nt, Artificial Sequence
  Description of Artificial Sequence: Synthetic oligonucleotide
caauacgcaugugcucuug

SEQ ID NO: 367010 - RNA, 19 nt, Artificial Sequence
  Description of Artificial Sequence: Synthetic oligonucleotide
guugaguggcuugcugcug

SEQ ID NO: 367011 - RNA, 19 nt, Artificial Sequence
  Description of Artificial Sequence: Synthetic oligonucleotide
cagucuacagaggcauaug

SEQ ID NO: 367012 - RNA, 19 nt, Artificial Sequence
  Description of Artificial Sequence: Synthetic oligonucleotide
cuggacccuuguuccugcg

SEQ ID NO: 367013 - RNA, 19 nt, Artificial Sequence
  Description of Artificial Sequence: Synthetic oligonucleotide
accugcacuuugauggaca

SEQ ID NO: 367014 - RNA, 19 nt, Artificial Sequence
  Description of Artificial Sequence: Synthetic oligonucleotide
caguacggcgcucagccaa

SEQ ID NO: 367015 - RNA, 19 nt, Artificial Sequence
  Description of Artificial Sequence: Synthetic oligonucleotide
ggcuuagaagcuuugggau

SEQ ID NO: 367016 - RNA, 19 nt, Artificial Sequence
  Description of Artificial Sequence: Synthetic oligonucleotide
caucgcagguggccggggc

SEQ ID NO: 367017 - RNA, 19 nt, Artificial Sequence
  Description of Artificial Sequence: Synthetic oligonucleotide
ggguguacaggaggcauug

SEQ ID NO: 367018 - RNA, 19 nt, Artificial Sequence
  Description of Artificial Sequence: Synthetic oligonucleotide
  modified_base (14)..(14): a, c, u, g, unknown or other
guaguuucgcugcncuuuu

SEQ ID NO: 367019 - RNA, 19 nt, Artificial Sequence
  Description of Artificial Sequence: Synthetic oligonucleotide
uacacgggcugugccugag

SEQ ID NO: 367020 - RNA, 19 nt, Artificial Sequence
  Description of Artificial Sequence: Synthetic oligonucleotide
ggaaacaaauacacgggcu

SEQ ID NO: 367021 - RNA, 19 nt, Artificial Sequence
  Description of Artificial Sequence: Synthetic oligonucleotide
gguucaucuauggccacca

SEQ ID NO: 367022 - RNA, 19 nt, Artificial Sequence
  Description of Artificial Sequence: Synthetic oligonucleotide
gggcgaggugccauaauag

SEQ ID NO: 367023 - RNA, 19 nt, Artificial Sequence
  Description of Artificial Sequence: Synthetic oligonucleotide
ggguaccugcacuuugaug

SEQ ID NO: 367024 - RNA, 19 nt, Artificial Sequence
  Description of Artificial Sequence: Synthetic oligonucleotide
uaccugcacuuugauggac

SEQ ID NO: 367025 - RNA, 19 nt, Artificial Sequence
  Description of Artificial Sequence: Synthetic oligonucleotide
ugccgccucucuccuugag

SEQ ID NO: 367026 - RNA, 19 nt, Artificial Sequence
  Description of Artificial Sequence: Synthetic oligonucleotide
ccuggugcauaaaaccuca

SEQ ID NO: 367027 - RNA, 19 nt, Artificial Sequence
  Description of Artificial Sequence: Synthetic oligonucleotide
gguaaaagaagagguccaa

SEQ ID NO: 367028 - RNA, 19 nt, Artificial Sequence
  Description of Artificial Sequence: Synthetic oligonucleotide
ccagugaaugugagucagg

SEQ ID NO: 367029 - RNA, 19 nt, Artificial Sequence
  Description of Artificial Sequence: Synthetic oligonucleotide
agaugucaguacggcgcuc

SEQ ID NO: 367030 - RNA, 19 nt, Artificial Sequence
  Description of Artificial Sequence: Synthetic oligonucleotide
ugaccuuguggcgguagua

SEQ ID NO: 367031 - RNA, 19 nt, Artificial Sequence
  Description of Artificial Sequence: Synthetic oligonucleotide
guacuauggucucuuggau

SEQ ID NO: 367032 - RNA, 19 nt, Artificial Sequence
  Description of Artificial Sequence: Synthetic oligonucleotide
ucgcugaccuuguggcggu

SEQ ID NO: 367033 - RNA, 19 nt, Artificial Sequence
  Description of Artificial Sequence: Synthetic oligonucleotide
ccuaggugcauggaugaug

SEQ ID NO: 367034 - RNA, 19 nt, Artificial Sequence
  Description of Artificial Sequence: Synthetic oligonucleotide
cggggcacugaugugaugg

SEQ ID NO: 367035 - RNA, 19 nt, Artificial Sequence
  Description of Artificial Sequence: Synthetic oligonucleotide
gguccaaugcaggagccca

SEQ ID NO: 367036 - RNA, 19 nt, Artificial Sequence
  Description of Artificial Sequence: Synthetic oligonucleotide
gauggacacuggacccuug

SEQ ID NO: 367037 - RNA, 19 nt, Artificial Sequence
  Description of Artificial Sequence: Synthetic oligonucleotide
auauccagaccuggugcau

SEQ ID NO: 367038 - RNA, 19 nt, Artificial Sequence
  Description of Artificial Sequence: Synthetic oligonucleotide
ggccucuugucacagccuc

SEQ ID NO: 367039 - RNA, 19 nt, Artificial Sequence
  Description of Artificial Sequence: Synthetic oligonucleotide
cagguaccgcagauacaac

SEQ ID NO: 367040 - RNA, 19 nt, Artificial Sequence
  Description of Artificial Sequence: Synthetic oligonucleotide
ggcuguuggcacaaucaug

SEQ ID NO: 367041 - RNA, 19 nt, Artificial Sequence
  Description of Artificial Sequence: Synthetic oligonucleotide
gggguggaggcacuuucug

SEQ ID NO: 367042 - RNA, 19 nt, Artificial Sequence
  Description of Artificial Sequence: Synthetic oligonucleotide
auaagccuuuggguggaau

SEQ ID NO: 367043 - RNA, 19 nt, Artificial Sequence
  Description of Artificial Sequence: Synthetic oligonucleotide
cuguagguaucucuucacu

SEQ ID NO: 367044 - RNA, 19 nt, Artificial Sequence
  Description of Artificial Sequence: Synthetic oligonucleotide
caaggcuuucugauguccu

SEQ ID NO: 367045 - RNA, 19 nt, Artificial Sequence
  Description of Artificial Sequence: Synthetic oligonucleotide
uguggucaaugagccucca

SEQ ID NO: 367046 - RNA, 19 nt, Artificial Sequence
  Description of Artificial Sequence: Synthetic oligonucleotide
uggaggcggcaucgcaggu

SEQ ID NO: 367047 - RNA, 19 nt, Artificial Sequence
  Description of Artificial Sequence: Synthetic oligonucleotide
gaacuggaggcggcaucgc

SEQ ID NO: 367048 - RNA, 19 nt, Artificial Sequence
  Description of Artificial Sequence: Synthetic oligonucleotide
uggaggcaugggugucucc

SEQ ID NO: 367049 - RNA, 19 nt, Artificial Sequence
  Description of Artificial Sequence: Synthetic oligonucleotide
cugggucagaaacuggcgu

SEQ ID NO: 367050 - RNA, 19 nt, Artificial Sequence
  Description of Artificial Sequence: Synthetic oligonucleotide
gacagguaccgcagauaca

SEQ ID NO: 367051 - RNA, 19 nt, Artificial Sequence
  Description of Artificial Sequence: Synthetic oligonucleotide
auacacgggcugugccuga

SEQ ID NO: 367052 - RNA, 19 nt, Artificial Sequence
  Description of Artificial Sequence: Synthetic oligonucleotide
agcgaucccgcugcuccag

SEQ ID NO: 367053 - RNA, 19 nt, Artificial Sequence
  Description of Artificial Sequence: Synthetic oligonucleotide
uggguggaaucaagaucuu

SEQ ID NO: 367054 - RNA, 19 nt, Artificial Sequence
  Description of Artificial Sequence: Synthetic oligonucleotide
gggauacaagauauucauc

SEQ ID NO: 367055 - RNA, 19 nt, Artificial Sequence
  Description of Artificial Sequence: Synthetic oligonucleotide
ggguggaaucaagaucuug

SEQ ID NO: 367056 - RNA, 19 nt, Artificial Sequence
  Description of Artificial Sequence: Synthetic oligonucleotide
ccuuugguacuauggucuc

SEQ ID NO: 367057 - RNA, 19 nt, Artificial Sequence
  Description of Artificial Sequence: Synthetic oligonucleotide
acucgauagcacaccuggu

SEQ ID NO: 367058 - RNA, 19 nt, Artificial Sequence
  Description of Artificial Sequence: Synthetic oligonucleotide
  modified_base (17)..(17): a, c, u, g, unknown or other
cugguaguuucgcugcncu

SEQ ID NO: 367059 - RNA, 19 nt, Artificial Sequence
  Description of Artificial Sequence: Synthetic oligonucleotide
uggaggcagucggacuaca

SEQ ID NO: 367060 - RNA, 19 nt, Artificial Sequence
  Description of Artificial Sequence: Synthetic oligonucleotide
gccggggcaugacagguac

SEQ ID NO: 367061 - RNA, 19 nt, Artificial Sequence
  Description of Artificial Sequence: Synthetic oligonucleotide
gagcgaucccgcugcucca

SEQ ID NO: 367062 - RNA, 19 nt, Artificial Sequence
  Description of Artificial Sequence: Synthetic oligonucleotide
cgaagaagcccaauacgca

SEQ ID NO: 367063 - RNA, 19 nt, Artificial Sequence
  Description of Artificial Sequence: Synthetic oligonucleotide
gcacaaugacuuggucugg

SEQ ID NO: 367064 - RNA, 19 nt, Artificial Sequence
  Description of Artificial Sequence: Synthetic oligonucleotide
cggggcaugacagguaccg

SEQ ID NO: 367065 - RNA, 19 nt, Artificial Sequence
  Description of Artificial Sequence: Synthetic oligonucleotide
cuggaggcagucggacuac

SEQ ID NO: 367066 - RNA, 19 nt, Artificial Sequence
  Description of Artificial Sequence: Synthetic oligonucleotide
guaagccagggaguuggaa

SEQ ID NO: 367067 - RNA, 19 nt, Artificial Sequence
  Description of Artificial Sequence: Synthetic oligonucleotide
uccuaggugcauggaugau

SEQ ID NO: 367068 - RNA, 19 nt, Artificial Sequence
  Description of Artificial Sequence: Synthetic oligonucleotide
cuuauccugcauguugggu

SEQ ID NO: 367069 - RNA, 19 nt, Artificial Sequence
  Description of Artificial Sequence: Synthetic oligonucleotide
gggagucagcaaugaacuc

SEQ ID NO: 367070 - RNA, 19 nt, Artificial Sequence
  Description of Artificial Sequence: Synthetic oligonucleotide
gcggcaucgcagguggccg

SEQ ID NO: 367071 - RNA, 19 nt, Artificial Sequence
  Description of Artificial Sequence: Synthetic oligonucleotide
ccuuucgcacaaugacuug

SEQ ID NO: 367072 - RNA, 19 nt, Artificial Sequence
  Description of Artificial Sequence: Synthetic oligonucleotide
gcuucacuacauccagguc

SEQ ID NO: 367073 - RNA, 19 nt, Artificial Sequence
  Description of Artificial Sequence: Synthetic oligonucleotide
guacgaacuggaggcggca

SEQ ID NO: 367074 - RNA, 19 nt, Artificial Sequence
  Description of Artificial Sequence: Synthetic oligonucleotide
cccauucuacucgauagca

SEQ ID NO: 367075 - RNA, 19 nt, Artificial Sequence
  Description of Artificial Sequence: Synthetic oligonucleotide
aguaagccagggaguugga

SEQ ID NO: 367076 - RNA, 19 nt, Artificial Sequence
  Description of Artificial Sequence: Synthetic oligonucleotide
ggcguccuuugguacuaug

SEQ ID NO: 367077 - RNA, 19 nt, Artificial Sequence
  Description of Artificial Sequence: Synthetic oligonucleotide
guucaucuauggccaccaa

SEQ ID NO: 367078 - RNA, 19 nt, Artificial Sequence
  Description of Artificial Sequence: Synthetic oligonucleotide
  modified_base (15)..(15): a, c, u, g, unknown or other
gguaguuucgcugcncuuu

SEQ ID NO: 367079 - RNA, 19 nt, Artificial Sequence
  Description of Artificial Sequence: Synthetic oligonucleotide
cgcaaauaagccuuugggu

SEQ ID NO: 367080 - RNA, 19 nt, Artificial Sequence
  Description of Artificial Sequence: Synthetic oligonucleotide
gaccuuggggauggcagcu

SEQ ID NO: 367081 - RNA, 19 nt, Artificial Sequence
  Description of Artificial Sequence: Synthetic oligonucleotide
ggaggcggcaucgcaggug

SEQ ID NO: 367082 - RNA, 19 nt, Artificial Sequence
  Description of Artificial Sequence: Synthetic oligonucleotide
gccaaguggaugacagcac

SEQ ID NO: 367083 - RNA, 19 nt, Artificial Sequence
  Description of Artificial Sequence: Synthetic oligonucleotide
ccagaccuggugcauaaaa

SEQ ID NO: 367084 - RNA, 19 nt, Artificial Sequence
  Description of Artificial Sequence: Synthetic oligonucleotide
ggcaucgcagguggccggg

SEQ ID NO: 367085 - RNA, 19 nt, Artificial Sequence
  Description of Artificial Sequence: Synthetic oligonucleotide
gcccauucacuugcauucc

SEQ ID NO: 367086 - RNA, 19 nt, Artificial Sequence
  Description of Artificial Sequence: Synthetic oligonucleotide
gcuuuaagcuacucucaau

SEQ ID NO: 367087 - RNA, 19 nt, Artificial Sequence
  Description of Artificial Sequence: Synthetic oligonucleotide
acuaggcccuuugccuuau

SEQ ID NO: 367088 - RNA, 19 nt, Artificial Sequence
  Description of Artificial Sequence: Synthetic oligonucleotide
cacgggcugugccugaggu

SEQ ID NO: 367089 - RNA, 19 nt, Artificial Sequence
  Description of Artificial Sequence: Synthetic oligonucleotide
gggcggagaaagucaaacu

SEQ ID NO: 367090 - RNA, 19 nt, Artificial Sequence
  Description of Artificial Sequence: Synthetic oligonucleotide
agguggccggggcacugau

SEQ ID NO: 367091 - RNA, 19 nt, Artificial Sequence
  Description of Artificial Sequence: Synthetic oligonucleotide
cacuaggcccuuugccuua

SEQ ID NO: 367092 - RNA, 19 nt, Artificial Sequence
  Description of Artificial Sequence: Synthetic oligonucleotide
ccuugcccauucagcuucc

SEQ ID NO: 367093 - RNA, 19 nt, Artificial Sequence
  Description of Artificial Sequence: Synthetic oligonucleotide
ccuggaggcagucggacua

SEQ ID NO: 367094 - RNA, 19 nt, Artificial Sequence
  Description of Artificial Sequence: Synthetic oligonucleotide
cuuugguacuauggucucu

SEQ ID NO: 367095 - RNA, 19 nt, Artificial Sequence
  Description of Artificial Sequence: Synthetic oligonucleotide
gaggcauggguaccacguu

SEQ ID NO: 367096 - RNA, 19 nt, Artificial Sequence
  Description of Artificial Sequence: Synthetic oligonucleotide
cccaaaacgcuccuggaau

SEQ ID NO: 367097 - RNA, 19 nt, Artificial Sequence
  Description of Artificial Sequence: Synthetic oligonucleotide
ggucagaaacuggcgucca

SEQ ID NO: 367098 - RNA, 19 nt, Artificial Sequence
  Description of Artificial Sequence: Synthetic oligonucleotide
cguugauccuaggugcaug

SEQ ID NO: 367099 - RNA, 19 nt, Artificial Sequence
  Description of Artificial Sequence: Synthetic oligonucleotide
ggggaauuucauugggcuu

SEQ ID NO: 367100 - RNA, 19 nt, Artificial Sequence
  Description of Artificial Sequence: Synthetic oligonucleotide
ggcuguccucagucuugag

SEQ ID NO: 367101 - RNA, 19 nt, Artificial Sequence
  Description of Artificial Sequence: Synthetic oligonucleotide
ggggcaugacagguaccgc

SEQ ID NO: 367102 - RNA, 19 nt, Artificial Sequence
  Description of Artificial Sequence: Synthetic oligonucleotide
cugaccuuguggcgguagu

SEQ ID NO: 367103 - RNA, 19 nt, Artificial Sequence
  Description of Artificial Sequence: Synthetic oligonucleotide
cgauagcacaccuggucca

SEQ ID NO: 367104 - RNA, 19 nt, Artificial Sequence
  Description of Artificial Sequence: Synthetic oligonucleotide
gccuuucgcacaaugacuu

SEQ ID NO: 367105 - RNA, 19 nt, Artificial Sequence
  Description of Artificial Sequence: Synthetic oligonucleotide
guccaaugcaggagcccaa

SEQ ID NO: 367106 - RNA, 19 nt, Artificial Sequence
  Description of Artificial Sequence: Synthetic oligonucleotide
ggguccgggccaugcugcc

SEQ ID NO: 367107 - RNA, 19 nt, Artificial Sequence
  Description of Artificial Sequence: Synthetic oligonucleotide
agaccagcccuugcccauu

SEQ ID NO: 367108 - RNA, 19 nt, Artificial Sequence
  Description of Artificial Sequence: Synthetic oligonucleotide
ccccaaaacgcuccuggaa

SEQ ID NO: 367109 - RNA, 19 nt, Artificial Sequence
  Description of Artificial Sequence: Synthetic oligonucleotide
cgcagauacaacaguggua

SEQ ID NO: 367110 - RNA, 19 nt, Artificial Sequence
  Description of Artificial Sequence: Synthetic oligonucleotide
ccgcagauacaacaguggu

SEQ ID NO: 367111 - RNA, 19 nt, Artificial Sequence
  Description of Artificial Sequence: Synthetic oligonucleotide
ccaauggcuguuucuucua

SEQ ID NO: 367112 - RNA, 19 nt, Artificial Sequence
  Description of Artificial Sequence: Synthetic oligonucleotide
cuugcccauucagcuucca

SEQ ID NO: 367113 - RNA, 19 nt, Artificial Sequence
  Description of Artificial Sequence: Synthetic oligonucleotide
gccaucccaagucaccuuu

SEQ ID NO: 367114 - RNA, 19 nt, Artificial Sequence
  Description of Artificial Sequence: Synthetic oligonucleotide
ccaugccauguccuuaaua

SEQ ID NO: 367115 - RNA, 19 nt, Artificial Sequence
  Description of Artificial Sequence: Synthetic oligonucleotide
gcaucgcagguggccgggg

SEQ ID NO: 367116 - RNA, 19 nt, Artificial Sequence
  Description of Artificial Sequence: Synthetic oligonucleotide
gcacuaggcccuuugccuu

SEQ ID NO: 367117 - RNA, 19 nt, Artificial Sequence
  Description of Artificial Sequence: Synthetic oligonucleotide
ccggggcaugacagguacc

SEQ ID NO: 367118 - RNA, 19 nt, Artificial Sequence
  Description of Artificial Sequence: Synthetic oligonucleotide
cacugagccuggaggcagu

SEQ ID NO: 367119 - RNA, 19 nt, Artificial Sequence
  Description of Artificial Sequence: Synthetic oligonucleotide
ccaaggaguguggaucaaa

SEQ ID NO: 367120 - RNA, 19 nt, Artificial Sequence
  Description of Artificial Sequence: Synthetic oligonucleotide
gugggcggagaaagucaaa

SEQ ID NO: 367121 - RNA, 19 nt, Artificial Sequence
  Description of Artificial Sequence: Synthetic oligonucleotide
cugcacuuugauggacacu

SEQ ID NO: 367122 - RNA, 19 nt, Artificial Sequence
  Description of Artificial Sequence: Synthetic oligonucleotide
ggugcugagcugggaauau

SEQ ID NO: 367123 - RNA, 19 nt, Artificial Sequence
  Description of Artificial Sequence: Synthetic oligonucleotide
uggcggcugcuggggaauu

SEQ ID NO: 367124 - RNA, 19 nt, Artificial Sequence
  Description of Artificial Sequence: Synthetic oligonucleotide
gugggcgaggugccauaau

SEQ ID NO: 367125 - RNA, 19 nt, Artificial Sequence
  Description of Artificial Sequence: Synthetic oligonucleotide
ggggcguccuuugguacua

SEQ ID NO: 367126 - RNA, 19 nt, Artificial Sequence
  Description of Artificial Sequence: Synthetic oligonucleotide
gcauggguaccacguugau

SEQ ID NO: 367127 - RNA, 19 nt, Artificial Sequence
  Description of Artificial Sequence: Synthetic oligonucleotide
guacggcgcucagccaacu

SEQ ID NO: 367128 - RNA, 19 nt, Artificial Sequence
  Description of Artificial Sequence: Synthetic oligonucleotide
gcauaugcccugacaccau

SEQ ID NO: 367129 - RNA, 19 nt, Artificial Sequence
  Description of Artificial Sequence: Synthetic oligonucleotide
gggguguacaggaggcauu

SEQ ID NO: 367130 - RNA, 19 nt, Artificial Sequence
  Description of Artificial Sequence: Synthetic oligonucleotide
gcuucgcaaauaagccuuu

SEQ ID NO: 367131 - RNA, 19 nt, Artificial Sequence
  Description of Artificial Sequence: Synthetic oligonucleotide
gccagucuacagaggcaua

SEQ ID NO: 367132 - RNA, 19 nt, Artificial Sequence
  Description of Artificial Sequence: Synthetic oligonucleotide
ccaauacgcaugugcucuu

SEQ ID NO: 367133 - RNA, 19 nt, Artificial Sequence
  Description of Artificial Sequence: Synthetic oligonucleotide
gcaugugcucuugcauuuu

SEQ ID NO: 367134 - RNA, 19 nt, Artificial Sequence
  Description of Artificial Sequence: Synthetic oligonucleotide
ggccggggcaugacaggua

SEQ ID NO: 367135 - RNA, 19 nt, Artificial Sequence
  Description of Artificial Sequence: Synthetic oligonucleotide
gccggggcacugaugugau

SEQ ID NO: 367136 - RNA, 19 nt, Artificial Sequence
  Description of Artificial Sequence: Synthetic oligonucleotide
ggcggcugcuggggaauuu

SEQ ID NO: 367137 - RNA, 19 nt, Artificial Sequence
  Description of Artificial Sequence: Synthetic oligonucleotide
gggcguccuuugguacuau

SEQ ID NO: 367138 - RNA, 19 nt, Artificial Sequence
  Description of Artificial Sequence: Synthetic oligonucleotide
gccccauucuuggccucuu

SEQ ID NO: 367139 - RNA, 19 nt, Artificial Sequence
  Description of Artificial Sequence: Synthetic oligonucleotide
cggggauuucagccucuuu

SEQ ID NO: 367140 - RNA, 19 nt, Artificial Sequence
  Description of Artificial Sequence: Synthetic oligonucleotide
ccgggccaugcugccugua

SEQ ID NO: 367141 - RNA, 19 nt, Artificial Sequence
  Description of Artificial Sequence: Synthetic oligonucleotide
ugaguauccaugaugauca

SEQ ID NO: 367142 - RNA, 19 nt, Artificial Sequence
  Description of Artificial Sequence: Synthetic oligonucleotide
augacgaugggauaugccc

SEQ ID NO: 367143 - RNA, 19 nt, Artificial Sequence
  Description of Artificial Sequence: Synthetic oligonucleotide
ucaacacgcagaaaggugg

SEQ ID NO: 367144 - RNA, 19 nt, Artificial Sequence
  Description of Artificial Sequence: Synthetic oligonucleotide
gaguccuuagaccacaugg

SEQ ID NO: 367145 - RNA, 19 nt, Artificial Sequence
  Description of Artificial Sequence: Synthetic oligonucleotide
uauacuccuggucacaucc

SEQ ID NO: 367146 - RNA, 19 nt, Artificial Sequence
  Description of Artificial Sequence: Synthetic oligonucleotide
acaaaguauaguuguggcc

SEQ ID NO: 367147 - RNA, 19 nt, Artificial Sequence
  Description of Artificial Sequence: Synthetic oligonucleotide
uggauaugcaguuccaacg

SEQ ID NO: 367148 - RNA, 19 nt, Artificial Sequence
  Description of Artificial Sequence: Synthetic oligonucleotide
cacaugaugacacagcgcc

SEQ ID NO: 367149 - RNA, 19 nt, Artificial Sequence
  Description of Artificial Sequence: Synthetic oligonucleotide
aagcacgucauagauaggg

SEQ ID NO: 367150 - RNA, 19 nt, Artificial Sequence
  Description of Artificial Sequence: Synthetic oligonucleotide
ucauaagacaguucgauau

SEQ ID NO: 367151 - RNA, 19 nt, Artificial Sequence
  Description of Artificial Sequence: Synthetic oligonucleotide
ucauagauaggguagucca

SEQ ID NO: 367152 - RNA, 19 nt, Artificial Sequence
  Description of Artificial Sequence: Synthetic oligonucleotide
gauuggaauguucucauac

SEQ ID NO: 367153 - RNA, 19 nt, Artificial Sequence
  Description of Artificial Sequence: Synthetic oligonucleotide
ugugcaacguuugauaugc

SEQ ID NO: 367154 - RNA, 19 nt, Artificial Sequence
  Description of Artificial Sequence: Synthetic oligonucleotide
aaaguauaguuguggccac

SEQ ID NO: 367155 - RNA, 19 nt, Artificial Sequence
  Description of Artificial Sequence: Synthetic oligonucleotide
uguggaucauugaacuugg

SEQ ID NO: 367156 - RNA, 19 nt, Artificial Sequence
  Description of Artificial Sequence: Synthetic oligonucleotide
aguuuauguaauaguaggc

SEQ ID NO: 367157 - RNA, 19 nt, Artificial Sequence
  Description of Artificial Sequence: Synthetic oligonucleotide
ucagauaagaguccuuaga

SEQ ID NO: 367158 - RNA, 19 nt, Artificial Sequence
  Description of Artificial Sequence: Synthetic oligonucleotide
aaugcgaaugggccgcucg

SEQ ID NO: 367159 - RNA, 19 nt, Artificial Sequence
  Description of Artificial Sequence: Synthetic oligonucleotide
agugccacaaugcgaaugg

SEQ ID NO: 367160 - RNA, 19 nt, Artificial Sequence
  Description of Artificial Sequence: Synthetic oligonucleotide
acagaagcgggcuacaucu

SEQ ID NO: 367161 - RNA, 19 nt, Artificial Sequence
  Description of Artificial Sequence: Synthetic oligonucleotide
uguucucauacucugccgc

SEQ ID NO: 367162 - RNA, 19 nt, Artificial Sequence
  Description of Artificial Sequence: Synthetic oligonucleotide
uuucggauggcccuggcca

SEQ ID NO: 367163 - RNA, 19 nt, Artificial Sequence
  Description of Artificial Sequence: Synthetic oligonucleotide
gaagauggaucucauccag

SEQ ID NO: 367164 - RNA, 19 nt, Artificial Sequence
  Description of Artificial Sequence: Synthetic oligonucleotide
uauaguuguggccaccugu

SEQ ID NO: 367165 - RNA, 19 nt, Artificial Sequence
  Description of Artificial Sequence: Synthetic oligonucleotide
aaaugacgaugggauaugc

SEQ ID NO: 367166 - RNA, 19 nt, Artificial Sequence
  Description of Artificial Sequence: Synthetic oligonucleotide
aaaacgaugacaggcuucu

SEQ ID NO: 367167 - RNA, 19 nt, Artificial Sequence
  Description of Artificial Sequence: Synthetic oligonucleotide
ucggauugccuuacuaagg

SEQ ID NO: 367168 - RNA, 19 nt, Artificial Sequence
  Description of Artificial Sequence: Synthetic oligonucleotide
aaugacgaugggauaugcc

SEQ ID NO: 367169 - RNA, 19 nt, Artificial Sequence
  Description of Artificial Sequence: Synthetic oligonucleotide
uggaucauugaacuuggga

SEQ ID NO: 367170 - RNA, 19 nt, Artificial Sequence
  Description of Artificial Sequence: Synthetic oligonucleotide
cagauaagaguccuuagac

SEQ ID NO: 367171 - RNA, 19 nt, Artificial Sequence
  Description of Artificial Sequence: Synthetic oligonucleotide
caaaugagacucuaccggc

SEQ ID NO: 367172 - RNA, 19 nt, Artificial Sequence
  Description of Artificial Sequence: Synthetic oligonucleotide
agcuaagugccacaaugcg

SEQ ID NO: 367173 - RNA, 19 nt, Artificial Sequence
  Description of Artificial Sequence: Synthetic oligonucleotide
ucgauauucggguagcggu

SEQ ID NO: 367174 - RNA, 19 nt, Artificial Sequence
  Description of Artificial Sequence: Synthetic oligonucleotide
ucaauaaguccucgaaccu

SEQ ID NO: 367175 - RNA, 19 nt, Artificial Sequence
  Description of Artificial Sequence: Synthetic oligonucleotide
ugcaguuccaacgguacgg

SEQ ID NO: 367176 - RNA, 19 nt, Artificial Sequence
  Description of Artificial Sequence: Synthetic oligonucleotide
auaagacaguucgauauuc

SEQ ID NO: 367177 - RNA, 19 nt, Artificial Sequence
  Description of Artificial Sequence: Synthetic oligonucleotide
uugauaugcucugagguga

SEQ ID NO: 367178 - RNA, 19 nt, Artificial Sequence
  Description of Artificial Sequence: Synthetic oligonucleotide
agauguaucgcauccggga

SEQ ID NO: 367179 - RNA, 19 nt, Artificial Sequence
  Description of Artificial Sequence: Synthetic oligonucleotide
aguuccaacgguacggggc

SEQ ID NO: 367180 - RNA, 19 nt, Artificial Sequence
  Description of Artificial Sequence: Synthetic oligonucleotide
ugacccaccaucugaagca

SEQ ID NO: 367181 - RNA, 19 nt, Artificial Sequence
  Description of Artificial Sequence: Synthetic oligonucleotide
ucggguagcgguuacagaa

SEQ ID NO: 367182 - RNA, 19 nt, Artificial Sequence
  Description of Artificial Sequence: Synthetic oligonucleotide
cacgucauagauaggguag

SEQ ID NO: 367183 - RNA, 19 nt, Artificial Sequence
  Description of Artificial Sequence: Synthetic oligonucleotide
uguguauggcugauguuga

SEQ ID NO: 367184 - RNA, 19 nt, Artificial Sequence
  Description of Artificial Sequence: Synthetic oligonucleotide
ugagcgugcugucacuuag

SEQ ID NO: 367185 - RNA, 19 nt, Artificial Sequence
  Description of Artificial Sequence: Synthetic oligonucleotide
caaaguauaguuguggcca

SEQ ID NO: 367186 - RNA, 19 nt, Artificial Sequence
  Description of Artificial Sequence: Synthetic oligonucleotide
accuggauagccccugagc

SEQ ID NO: 367187 - RNA, 19 nt, Artificial Sequence
  Description of Artificial Sequence: Synthetic oligonucleotide
ugguacacgggcuuggcca

SEQ ID NO: 367188 - RNA, 19 nt, Artificial Sequence
  Description of Artificial Sequence: Synthetic oligonucleotide
ucgaaccuugguuuuagca

SEQ ID NO: 367189 - RNA, 19 nt, Artificial Sequence
  Description of Artificial Sequence: Synthetic oligonucleotide
guagcgguuacagaagcgg

SEQ ID NO: 367190 - RNA, 19 nt, Artificial Sequence
  Description of Artificial Sequence: Synthetic oligonucleotide
guacugaguauccaugaug

SEQ ID NO: 367191 - RNA, 19 nt, Artificial Sequence
  Description of Artificial Sequence: Synthetic oligonucleotide
gucggauugccuuacuaag

SEQ ID NO: 367192 - RNA, 19 nt, Artificial Sequence
  Description of Artificial Sequence: Synthetic oligonucleotide
gaugggauaugcccugaag

SEQ ID NO: 367193 - RNA, 19 nt, Artificial Sequence
  Description of Artificial Sequence: Synthetic oligonucleotide
uuuuagagccuugacacau

SEQ ID NO: 367194 - RNA, 19 nt, Artificial Sequence
  Description of Artificial Sequence: Synthetic oligonucleotide
agcaucacucaugaaguac

SEQ ID NO: 367195 - RNA, 19 nt, Artificial Sequence
  Description of Artificial Sequence: Synthetic oligonucleotide
ugcguuccguucuucaucc

SEQ ID NO: 367196 - RNA, 19 nt, Artificial Sequence
  Description of Artificial Sequence: Synthetic oligonucleotide
uagcgguuacagaagcggg

SEQ ID NO: 367197 - RNA, 19 nt, Artificial Sequence
  Description of Artificial Sequence: Synthetic oligonucleotide
uaguacugaguauccauga

SEQ ID NO: 367198 - RNA, 19 nt, Artificial Sequence
  Description of Artificial Sequence: Synthetic oligonucleotide
guuccaacgguacggggcg

SEQ ID NO: 367199 - RNA, 19 nt, Artificial Sequence
  Description of Artificial Sequence: Synthetic oligonucleotide
uucgauauucggguagcgg

SEQ ID NO: 367200 - RNA, 19 nt, Artificial Sequence
  Description of Artificial Sequence: Synthetic oligonucleotide
aaugagacucuaccggcaa

SEQ ID NO: 367201 - RNA, 19 nt, Artificial Sequence
  Description of Artificial Sequence: Synthetic oligonucleotide
aaguauaguuguggccacc

SEQ ID NO: 367202 - RNA, 19 nt, Artificial Sequence
  Description of Artificial Sequence: Synthetic oligonucleotide
gauugccuuacuaaggauc

SEQ ID NO: 367203 - RNA, 19 nt, Artificial Sequence
  Description of Artificial Sequence: Synthetic oligonucleotide
uguacaugccucagauuca

SEQ ID NO: 367204 - RNA, 19 nt, Artificial Sequence
  Description of Artificial Sequence: Synthetic oligonucleotide
agccuugacacaugaugac

SEQ ID NO: 367205 - RNA, 19 nt, Artificial Sequence
  Description of Artificial Sequence: Synthetic oligonucleotide
agacucuaccggcaauggc

SEQ ID NO: 367206 - RNA, 19 nt, Artificial Sequence
  Description of Artificial Sequence: Synthetic oligonucleotide
cuugcgagugaauagaugu

SEQ ID NO: 367207 - RNA, 19 nt, Artificial Sequence
  Description of Artificial Sequence: Synthetic oligonucleotide
acaaaugacgaugggauau

SEQ ID NO: 367208 - RNA, 19 nt, Artificial Sequence
  Description of Artificial Sequence: Synthetic oligonucleotide
cauguaaguagcccacccc

SEQ ID NO: 367209 - RNA, 19 nt, Artificial Sequence
  Description of Artificial Sequence: Synthetic oligonucleotide
ugaauagaugucccacuuc

SEQ ID NO: 367210 - RNA, 19 nt, Artificial Sequence
  Description of Artificial Sequence: Synthetic oligonucleotide
caaugagucggacaucuuc

SEQ ID NO: 367211 - RNA, 19 nt, Artificial Sequence
  Description of Artificial Sequence: Synthetic oligonucleotide
uacucugccgcguuggaaa

SEQ ID NO: 367212 - RNA, 19 nt, Artificial Sequence
  Description of Artificial Sequence: Synthetic oligonucleotide
auugccuuacuaaggaucu

SEQ ID NO: 367213 - RNA, 19 nt, Artificial Sequence
  Description of Artificial Sequence: Synthetic oligonucleotide
ugcaacguuugauaugcuc

SEQ ID NO: 367214 - RNA, 19 nt, Artificial Sequence
  Description of Artificial Sequence: Synthetic oligonucleotide
uucauaagacaguucgaua

SEQ ID NO: 367215 - RNA, 19 nt, Artificial Sequence
  Description of Artificial Sequence: Synthetic oligonucleotide
gugucauccggcgauacag

SEQ ID NO: 367216 - RNA, 19 nt, Artificial Sequence
  Description of Artificial Sequence: Synthetic oligonucleotide
auagacagcaggcgagucu

SEQ ID NO: 367217 - RNA, 19 nt, Artificial Sequence
  Description of Artificial Sequence: Synthetic oligonucleotide
agucggauugccuuacuaa

SEQ ID NO: 367218 - RNA, 19 nt, Artificial Sequence
  Description of Artificial Sequence: Synthetic oligonucleotide
ugcaauaacagggccugug

SEQ ID NO: 367219 - RNA, 19 nt, Artificial Sequence
  Description of Artificial Sequence: Synthetic oligonucleotide
auaagaguccuuagaccac

SEQ ID NO: 367220 - RNA, 19 nt, Artificial Sequence
  Description of Artificial Sequence: Synthetic oligonucleotide
aagugccacaaugcgaaug

SEQ ID NO: 367221 - RNA, 19 nt, Artificial Sequence
  Description of Artificial Sequence: Synthetic oligonucleotide
caguagguugucuucauga

SEQ ID NO: 367222 - RNA, 19 nt, Artificial Sequence
  Description of Artificial Sequence: Synthetic oligonucleotide
gagguaguccacagcaucc

SEQ ID NO: 367223 - RNA, 19 nt, Artificial Sequence
  Description of Artificial Sequence: Synthetic oligonucleotide
gaagcagugcguuccguuc

SEQ ID NO: 367224 - RNA, 19 nt, Artificial Sequence
  Description of Artificial Sequence: Synthetic oligonucleotide
agcgguuacagaagcgggc

SEQ ID NO: 367225 - RNA, 19 nt, Artificial Sequence
  Description of Artificial Sequence: Synthetic oligonucleotide
aaaugagacucuaccggca

SEQ ID NO: 367226 - RNA, 19 nt, Artificial Sequence
  Description of Artificial Sequence: Synthetic oligonucleotide
auauucggguagcgguuac

SEQ ID NO: 367227 - RNA, 19 nt, Artificial Sequence
  Description of Artificial Sequence: Synthetic oligonucleotide
cugcauacgggacagguga

SEQ ID NO: 367228 - RNA, 19 nt, Artificial Sequence
  Description of Artificial Sequence: Synthetic oligonucleotide
gucauagauaggguagucc

SEQ ID NO: 367229 - RNA, 19 nt, Artificial Sequence
  Description of Artificial Sequence: Synthetic oligonucleotide
ugccauuguaguacugagu

SEQ ID NO: 367230 - RNA, 19 nt, Artificial Sequence
  Description of Artificial Sequence: Synthetic oligonucleotide
caguucgauauucggguag

SEQ ID NO: 367231 - RNA, 19 nt, Artificial Sequence
  Description of Artificial Sequence: Synthetic oligonucleotide
gauguaucgcauccgggaa

SEQ ID NO: 367232 - RNA, 19 nt, Artificial Sequence
  Description of Artificial Sequence: Synthetic oligonucleotide
ugccgcguuggaaauaauc

SEQ ID NO: 367233 - RNA, 19 nt, Artificial Sequence
  Description of Artificial Sequence: Synthetic oligonucleotide
auucggguagcgguuacag

SEQ ID NO: 367234 - RNA, 19 nt, Artificial Sequence
  Description of Artificial Sequence: Synthetic oligonucleotide
uccggcgauacagaaaggu

SEQ ID NO: 367235 - RNA, 19 nt, Artificial Sequence
  Description of Artificial Sequence: Synthetic oligonucleotide
auaugcucugaggugaagu

SEQ ID NO: 367236 - RNA, 19 nt, Artificial Sequence
  Description of Artificial Sequence: Synthetic oligonucleotide
aacgguacggggcgcacau

SEQ ID NO: 367237 - RNA, 19 nt, Artificial Sequence
  Description of Artificial Sequence: Synthetic oligonucleotide
ggucagacaaaugacgaug

SEQ ID NO: 367238 - RNA, 19 nt, Artificial Sequence
  Description of Artificial Sequence: Synthetic oligonucleotide
aguacugaguauccaugau

SEQ ID NO: 367239 - RNA, 19 nt, Artificial Sequence
  Description of Artificial Sequence: Synthetic oligonucleotide
cacugagaccaaugagucg

SEQ ID NO: 367240 - RNA, 19 nt, Artificial Sequence
  Description of Artificial Sequence: Synthetic oligonucleotide
auaacagggccugugacuu

SEQ ID NO: 367241 - RNA, 19 nt, Artificial Sequence
  Description of Artificial Sequence: Synthetic oligonucleotide
gaucacuagaugagcagca

SEQ ID NO: 367242 - RNA, 19 nt, Artificial Sequence
  Description of Artificial Sequence: Synthetic oligonucleotide
aguauaguuguggccaccu

SEQ ID NO: 367243 - RNA, 19 nt, Artificial Sequence
  Description of Artificial Sequence: Synthetic oligonucleotide
uguuuggugauagcauggu

SEQ ID NO: 367244 - RNA, 19 nt, Artificial Sequence
  Description of Artificial Sequence: Synthetic oligonucleotide
ugugucauccggcgauaca

SEQ ID NO: 367245 - RNA, 19 nt, Artificial Sequence
  Description of Artificial Sequence: Synthetic oligonucleotide
ugucauccggcgauacaga

SEQ ID NO: 367246 - RNA, 19 nt, Artificial Sequence
  Description of Artificial Sequence: Synthetic oligonucleotide
ccuuagaccacauggcuug

SEQ ID NO: 367247 - RNA, 19 nt, Artificial Sequence
  Description of Artificial Sequence: Synthetic oligonucleotide
uccaggacgacgagccgca

SEQ ID NO: 367248 - RNA, 19 nt, Artificial Sequence
  Description of Artificial Sequence: Synthetic oligonucleotide
ucccuuaucugugcaacgu

SEQ ID NO: 367249 - RNA, 19 nt, Artificial Sequence
  Description of Artificial Sequence: Synthetic oligonucleotide
ucauccggcgauacagaaa

SEQ ID NO: 367250 - RNA, 19 nt, Artificial Sequence
  Description of Artificial Sequence: Synthetic oligonucleotide
gacucuaccggcaauggcu

SEQ ID NO: 367251 - RNA, 19 nt, Artificial Sequence
  Description of Artificial Sequence: Synthetic oligonucleotide
cauaguuggggaggguagc

SEQ ID NO: 367252 - RNA, 19 nt, Artificial Sequence
  Description of Artificial Sequence: Synthetic oligonucleotide
aggagauguaucgcauccg

SEQ ID NO: 367253 - RNA, 19 nt, Artificial Sequence
  Description of Artificial Sequence: Synthetic oligonucleotide
cugugcaacguuugauaug

SEQ ID NO: 367254 - RNA, 19 nt, Artificial Sequence
  Description of Artificial Sequence: Synthetic oligonucleotide
ucugccgcguuggaaauaa

SEQ ID NO: 367255 - RNA, 19 nt, Artificial Sequence
  Description of Artificial Sequence: Synthetic oligonucleotide
acucuaccggcaauggcuc

SEQ ID NO: 367256 - RNA, 19 nt, Artificial Sequence
  Description of Artificial Sequence: Synthetic oligonucleotide
auaggguaguccacauagg

SEQ ID NO: 367257 - RNA, 19 nt, Artificial Sequence
  Description of Artificial Sequence: Synthetic oligonucleotide
uggucagacaaaugacgau

SEQ ID NO: 367258 - RNA, 19 nt, Artificial Sequence
  Description of Artificial Sequence: Synthetic oligonucleotide
guguaguuuauguaauagu

SEQ ID NO: 367259 - RNA, 19 nt, Artificial Sequence
  Description of Artificial Sequence: Synthetic oligonucleotide
gaaugggccgcucgaucug

SEQ ID NO: 367260 - RNA, 19 nt, Artificial Sequence
  Description of Artificial Sequence: Synthetic oligonucleotide
uuauacuccuggucacauc

SEQ ID NO: 367261 - RNA, 19 nt, Artificial Sequence
  Description of Artificial Sequence: Synthetic oligonucleotide
caggcgagucuguguaugg

SEQ ID NO: 367262 - RNA, 19 nt, Artificial Sequence
  Description of Artificial Sequence: Synthetic oligonucleotide
gggacgguuggcaugaccc

SEQ ID NO: 367263 - RNA, 19 nt, Artificial Sequence
  Description of Artificial Sequence: Synthetic oligonucleotide
gacgacgagccgcaccagc

SEQ ID NO: 367264 - RNA, 19 nt, Artificial Sequence
  Description of Artificial Sequence: Synthetic oligonucleotide
caaaugacgaugggauaug

SEQ ID NO: 367265 - RNA, 19 nt, Artificial Sequence
  Description of Artificial Sequence: Synthetic oligonucleotide
aaguagcccaccccauuua

SEQ ID NO: 367266 - RNA, 19 nt, Artificial Sequence
  Description of Artificial Sequence: Synthetic oligonucleotide
uaucgcauccgggaacaga

SEQ ID NO: 367267 - RNA, 19 nt, Artificial Sequence
  Description of Artificial Sequence: Synthetic oligonucleotide
ugagccaacuggcgcagua

SEQ ID NO: 367268 - RNA, 19 nt, Artificial Sequence
  Description of Artificial Sequence: Synthetic oligonucleotide
agugcguuccguucuucau

SEQ ID NO: 367269 - RNA, 19 nt, Artificial Sequence
  Description of Artificial Sequence: Synthetic oligonucleotide
guucgauauucggguagcg

SEQ ID NO: 367270 - RNA, 19 nt, Artificial Sequence
  Description of Artificial Sequence: Synthetic oligonucleotide
acauuaggguggaaguuga

SEQ ID NO: 367271 - RNA, 19 nt, Artificial Sequence
  Description of Artificial Sequence: Synthetic oligonucleotide
guauaguuguggccaccug

SEQ ID NO: 367272 - RNA, 19 nt, Artificial Sequence
  Description of Artificial Sequence: Synthetic oligonucleotide
cggcgauacagaaaggucc

SEQ ID NO: 367273 - RNA, 19 nt, Artificial Sequence
  Description of Artificial Sequence: Synthetic oligonucleotide
acacgcagaaagguggcca

SEQ ID NO: 367274 - RNA, 19 nt, Artificial Sequence
  Description of Artificial Sequence: Synthetic oligonucleotide
cacgggcuuggccauagac

SEQ ID NO: 367275 - RNA, 19 nt, Artificial Sequence
  Description of Artificial Sequence: Synthetic oligonucleotide
acuucauaagacaguucga

SEQ ID NO: 367276 - RNA, 19 nt, Artificial Sequence
  Description of Artificial Sequence: Synthetic oligonucleotide
caguuccaacgguacgggg

SEQ ID NO: 367277 - RNA, 19 nt, Artificial Sequence
  Description of Artificial Sequence: Synthetic oligonucleotide
cguuugauaugcucugagg

SEQ ID NO: 367278 - RNA, 19 nt, Artificial Sequence
  Description of Artificial Sequence: Synthetic oligonucleotide
ccggcaauggcucauauaa

SEQ ID NO: 367279 - RNA, 19 nt, Artificial Sequence
  Description of Artificial Sequence: Synthetic oligonucleotide
ggcaugacccaccaucuga

SEQ ID NO: 367280 - RNA, 19 nt, Artificial Sequence
  Description of Artificial Sequence: Synthetic oligonucleotide
acgucauagauaggguagu

SEQ ID NO: 367281 - RNA, 19 nt, Artificial Sequence
  Description of Artificial Sequence: Synthetic oligonucleotide
cucgaaccuugguuuuagc

SEQ ID NO: 367282 - RNA, 19 nt, Artificial Sequence
  Description of Artificial Sequence: Synthetic oligonucleotide
acaguucgauauucgggua

SEQ ID NO: 367283 - RNA, 19 nt, Artificial Sequence
  Description of Artificial Sequence: Synthetic oligonucleotide
cacguuucugugggaagag

SEQ ID NO: 367284 - RNA, 19 nt, Artificial Sequence
  Description of Artificial Sequence: Synthetic oligonucleotide
agguagugagaaugucuau

SEQ ID NO: 367285 - RNA, 19 nt, Artificial Sequence
  Description of Artificial Sequence: Synthetic oligonucleotide
gcaauaacagggccuguga

SEQ ID NO: 367286 - RNA, 19 nt, Artificial Sequence
  Description of Artificial Sequence: Synthetic oligonucleotide
augcgaaugggccgcucga

SEQ ID NO: 367287 - RNA, 19 nt, Artificial Sequence
  Description of Artificial Sequence: Synthetic oligonucleotide
cauguagaagauggaucuc

SEQ ID NO: 367288 - RNA, 19 nt, Artificial Sequence
  Description of Artificial Sequence: Synthetic oligonucleotide
gauauucggguagcgguua

SEQ ID NO: 367289 - RNA, 19 nt, Artificial Sequence
  Description of Artificial Sequence: Synthetic oligonucleotide
ucuaccggcaauggcucau

SEQ ID NO: 367290 - RNA, 19 nt, Artificial Sequence
  Description of Artificial Sequence: Synthetic oligonucleotide
acggggcgcacauuagggu

SEQ ID NO: 367291 - RNA, 19 nt, Artificial Sequence
  Description of Artificial Sequence: Synthetic oligonucleotide
gagucggauugccuuacua

SEQ ID NO: 367292 - RNA, 19 nt, Artificial Sequence
  Description of Artificial Sequence: Synthetic oligonucleotide
caugguacacgggcuuggc

SEQ ID NO: 367293 - RNA, 19 nt, Artificial Sequence
  Description of Artificial Sequence: Synthetic oligonucleotide
gucauccggcgauacagaa

SEQ ID NO: 367294 - RNA, 19 nt, Artificial Sequence
  Description of Artificial Sequence: Synthetic oligonucleotide
agcacgucauagauagggu

SEQ ID NO: 367295 - RNA, 19 nt, Artificial Sequence
  Description of Artificial Sequence: Synthetic oligonucleotide
cccauuuaacaguguuucc

SEQ ID NO: 367296 - RNA, 19 nt, Artificial Sequence
  Description of Artificial Sequence: Synthetic oligonucleotide
gauagccccugagcugaag

SEQ ID NO: 367297 - RNA, 19 nt, Artificial Sequence
  Description of Artificial Sequence: Synthetic oligonucleotide
cugaggugaaguguggcaa

SEQ ID NO: 367298 - RNA, 19 nt, Artificial Sequence
  Description of Artificial Sequence: Synthetic oligonucleotide
gugaauagaugucccacuu

SEQ ID NO: 367299 - RNA, 19 nt, Artificial Sequence
  Description of Artificial Sequence: Synthetic oligonucleotide
guacagugcaagaaccucu

SEQ ID NO: 367300 - RNA, 19 nt, Artificial Sequence
  Description of Artificial Sequence: Synthetic oligonucleotide
gcaguuccaacgguacggg

SEQ ID NO: 367301 - RNA, 19 nt, Artificial Sequence
  Description of Artificial Sequence: Synthetic oligonucleotide
gcacugagaccaaugaguc

SEQ ID NO: 367302 - RNA, 19 nt, Artificial Sequence
  Description of Artificial Sequence: Synthetic oligonucleotide
gcaacguuugauaugcucu

SEQ ID NO: 367303 - RNA, 19 nt, Artificial Sequence
  Description of Artificial Sequence: Synthetic oligonucleotide
uccaacgguacggggcgca

SEQ ID NO: 367304 - RNA, 19 nt, Artificial Sequence
  Description of Artificial Sequence: Synthetic oligonucleotide
gcuaagugccacaaugcga

SEQ ID NO: 367305 - RNA, 19 nt, Artificial Sequence
  Description of Artificial Sequence: Synthetic oligonucleotide
cugaagcacgucauagaua

SEQ ID NO: 367306 - RNA, 19 nt, Artificial Sequence
  Description of Artificial Sequence: Synthetic oligonucleotide
agcccuggauaugcaguuc

SEQ ID NO: 367307 - RNA, 19 nt, Artificial Sequence
  Description of Artificial Sequence: Synthetic oligonucleotide
gcgagugaauagauguccc

SEQ ID NO: 367308 - RNA, 19 nt, Artificial Sequence
  Description of Artificial Sequence: Synthetic oligonucleotide
ggcgauacagaaaggucca

SEQ ID NO: 367309 - RNA, 19 nt, Artificial Sequence
  Description of Artificial Sequence: Synthetic oligonucleotide
ggggcgcacauuagggugg

SEQ ID NO: 367310 - RNA, 19 nt, Artificial Sequence
  Description of Artificial Sequence: Synthetic oligonucleotide
gcuucuaagacaggaccuc

SEQ ID NO: 367311 - RNA, 19 nt, Artificial Sequence
  Description of Artificial Sequence: Synthetic oligonucleotide
cgcguuggaaauaaucuca

SEQ ID NO: 367312 - RNA, 19 nt, Artificial Sequence
  Description of Artificial Sequence: Synthetic oligonucleotide
ccuugcgagugaauagaug

SEQ ID NO: 367313 - RNA, 19 nt, Artificial Sequence
  Description of Artificial Sequence: Synthetic oligonucleotide
ccgcguuggaaauaaucuc

SEQ ID NO: 367314 - RNA, 19 nt, Artificial Sequence
  Description of Artificial Sequence: Synthetic oligonucleotide
accggcaauggcucauaua

SEQ ID NO: 367315 - RNA, 19 nt, Artificial Sequence
  Description of Artificial Sequence: Synthetic oligonucleotide
cauaagacaguucgauauu

SEQ ID NO: 367316 - RNA, 19 nt, Artificial Sequence
  Description of Artificial Sequence: Synthetic oligonucleotide
ugcgaaugggccgcucgau

SEQ ID NO: 367317 - RNA, 19 nt, Artificial Sequence
  Description of Artificial Sequence: Synthetic oligonucleotide
ccggcgauacagaaagguc

SEQ ID NO: 367318 - RNA, 19 nt, Artificial Sequence
  Description of Artificial Sequence: Synthetic oligonucleotide
gcacgucauagauagggua

SEQ ID NO: 367319 - RNA, 19 nt, Artificial Sequence
  Description of Artificial Sequence: Synthetic oligonucleotide
cugugucauccggcgauac

SEQ ID NO: 367320 - RNA, 19 nt, Artificial Sequence
  Description of Artificial Sequence: Synthetic oligonucleotide
cugagaccaaugagucgga

SEQ ID NO: 367321 - RNA, 19 nt, Artificial Sequence
  Description of Artificial Sequence: Synthetic oligonucleotide
agcagugcguuccguucuu

SEQ ID NO: 367322 - RNA, 19 nt, Artificial Sequence
  Description of Artificial Sequence: Synthetic oligonucleotide
uugccuuacuaaggaucuc

SEQ ID NO: 367323 - RNA, 19 nt, Artificial Sequence
  Description of Artificial Sequence: Synthetic oligonucleotide
cauacucugccgcguugga

SEQ ID NO: 367324 - RNA, 19 nt, Artificial Sequence
  Description of Artificial Sequence: Synthetic oligonucleotide
gaccaaugagucggacauc

SEQ ID NO: 367325 - RNA, 19 nt, Artificial Sequence
  Description of Artificial Sequence: Synthetic oligonucleotide
cagugguccaaaugagacu

SEQ ID NO: 367326 - RNA, 19 nt, Artificial Sequence
  Description of Artificial Sequence: Synthetic oligonucleotide
gguacggggcgcacauuag

SEQ ID NO: 367327 - RNA, 19 nt, Artificial Sequence
  Description of Artificial Sequence: Synthetic oligonucleotide
acgagccgcaccagcuggg

SEQ ID NO: 367328 - RNA, 19 nt, Artificial Sequence
  Description of Artificial Sequence: Synthetic oligonucleotide
gccgcguuggaaauaaucu

SEQ ID NO: 367329 - RNA, 19 nt, Artificial Sequence
  Description of Artificial Sequence: Synthetic oligonucleotide
gguagugagaaugucuauu

SEQ ID NO: 367330 - RNA, 19 nt, Artificial Sequence
  Description of Artificial Sequence: Synthetic oligonucleotide
uuccaacgguacggggcgc

SEQ ID NO: 367331 - RNA, 19 nt, Artificial Sequence
  Description of Artificial Sequence: Synthetic oligonucleotide
guaucgcauccgggaacag

SEQ ID NO: 367332 - RNA, 19 nt, Artificial Sequence
  Description of Artificial Sequence: Synthetic oligonucleotide
ggggacgguuggcaugacc

SEQ ID NO: 367333 - RNA, 19 nt, Artificial Sequence
  Description of Artificial Sequence: Synthetic oligonucleotide
cucugccguuggaugucug

SEQ ID NO: 367334 - RNA, 19 nt, Artificial Sequence
  Description of Artificial Sequence: Synthetic oligonucleotide
acgaugggauaugcccuga

SEQ ID NO: 367335 - RNA, 19 nt, Artificial Sequence
  Description of Artificial Sequence: Synthetic oligonucleotide
cacuuggacugcuccaggu

SEQ ID NO: 367336 - RNA, 19 nt, Artificial Sequence
  Description of Artificial Sequence: Synthetic oligonucleotide
cggauugccuuacuaagga

SEQ ID NO: 367337 - RNA, 19 nt, Artificial Sequence
  Description of Artificial Sequence: Synthetic oligonucleotide
acaaugcgaaugggccgcu

SEQ ID NO: 367338 - RNA, 19 nt, Artificial Sequence
  Description of Artificial Sequence: Synthetic oligonucleotide
ccaaccauugcuagagagu

SEQ ID NO: 367339 - RNA, 19 nt, Artificial Sequence
  Description of Artificial Sequence: Synthetic oligonucleotide
gcccuugcgagugaauaga

SEQ ID NO: 367340 - RNA, 19 nt, Artificial Sequence
  Description of Artificial Sequence: Synthetic oligonucleotide
gcgaaugggccgcucgauc

SEQ ID NO: 367341 - RNA, 19 nt, Artificial Sequence
  Description of Artificial Sequence: Synthetic oligonucleotide
gaggcgggucugcuuccga

SEQ ID NO: 367342 - RNA, 19 nt, Artificial Sequence
  Description of Artificial Sequence: Synthetic oligonucleotide
gggucagccuuuugaugga

SEQ ID NO: 367343 - RNA, 19 nt, Artificial Sequence
  Description of Artificial Sequence: Synthetic oligonucleotide
cgcccuugcgagugaauag

SEQ ID NO: 367344 - RNA, 19 nt, Artificial Sequence
  Description of Artificial Sequence: Synthetic oligonucleotide
gcguuggaaauaaucucaa

SEQ ID NO: 367345 - RNA, 19 nt, Artificial Sequence
  Description of Artificial Sequence: Synthetic oligonucleotide
acacgggcuuggccauaga

SEQ ID NO: 367346 - RNA, 19 nt, Artificial Sequence
  Description of Artificial Sequence: Synthetic oligonucleotide
caacgguacggggcgcaca

SEQ ID NO: 367347 - RNA, 19 nt, Artificial Sequence
  Description of Artificial Sequence: Synthetic oligonucleotide
guccucgaaccuugguuuu

SEQ ID NO: 367348 - RNA, 19 nt, Artificial Sequence
  Description of Artificial Sequence: Synthetic oligonucleotide
cgucauagauaggguaguc

SEQ ID NO: 367349 - RNA, 19 nt, Artificial Sequence
  Description of Artificial Sequence: Synthetic oligonucleotide
gccuuacuaaggaucuccu

SEQ ID NO: 367350 - RNA, 19 nt, Artificial Sequence
  Description of Artificial Sequence: Synthetic oligonucleotide
cugcggaugcugucuuuau

SEQ ID NO: 367351 - RNA, 19 nt, Artificial Sequence
  Description of Artificial Sequence: Synthetic oligonucleotide
cuaccggcaauggcucaua

SEQ ID NO: 367352 - RNA, 19 nt, Artificial Sequence
  Description of Artificial Sequence: Synthetic oligonucleotide
cgcuccccgcccuugcgag

SEQ ID NO: 367353 - RNA, 19 nt, Artificial Sequence
  Description of Artificial Sequence: Synthetic oligonucleotide
ggacgacgagccgcaccag

SEQ ID NO: 367354 - RNA, 19 nt, Artificial Sequence
  Description of Artificial Sequence: Synthetic oligonucleotide
cgcucgaucugggaggaga

SEQ ID NO: 367355 - RNA, 19 nt, Artificial Sequence
  Description of Artificial Sequence: Synthetic oligonucleotide
cagcaaucaugcccagauu

SEQ ID NO: 367356 - RNA, 19 nt, Artificial Sequence
  Description of Artificial Sequence: Synthetic oligonucleotide
cugaagcagugcguuccgu

SEQ ID NO: 367357 - RNA, 19 nt, Artificial Sequence
  Description of Artificial Sequence: Synthetic oligonucleotide
ccaacgguacggggcgcac

SEQ ID NO: 367358 - RNA, 19 nt, Artificial Sequence
  Description of Artificial Sequence: Synthetic oligonucleotide
gugcaauaacagggccugu

SEQ ID NO: 367359 - RNA, 19 nt, Artificial Sequence
  Description of Artificial Sequence: Synthetic oligonucleotide
cucugccgcguuggaaaua

SEQ ID NO: 367360 - RNA, 19 nt, Artificial Sequence
  Description of Artificial Sequence: Synthetic oligonucleotide
gcgcuccccgcccuugcga

SEQ ID NO: 367361 - RNA, 19 nt, Artificial Sequence
  Description of Artificial Sequence: Synthetic oligonucleotide
gggcgcacauuagggugga

SEQ ID NO: 367362 - RNA, 19 nt, Artificial Sequence
  Description of Artificial Sequence: Synthetic oligonucleotide
gugcaacguuugauaugcu

SEQ ID NO: 367363 - RNA, 19 nt, Artificial Sequence
  Description of Artificial Sequence: Synthetic oligonucleotide
acgguacggggcgcacauu

SEQ ID NO: 367364 - RNA, 19 nt, Artificial Sequence
  Description of Artificial Sequence: Synthetic oligonucleotide
cgauauucggguagcgguu

SEQ ID NO: 367365 - RNA, 19 nt, Artificial Sequence
  Description of Artificial Sequence: Synthetic oligonucleotide
ccgcccuugcgagugaaua

SEQ ID NO: 367366 - RNA, 19 nt, Artificial Sequence
  Description of Artificial Sequence: Synthetic oligonucleotide
cccuugcgagugaauagau

SEQ ID NO: 367367 - RNA, 19 nt, Artificial Sequence
  Description of Artificial Sequence: Synthetic oligonucleotide
cgguuggcaugacccacca

SEQ ID NO: 367368 - RNA, 19 nt, Artificial Sequence
  Description of Artificial Sequence: Synthetic oligonucleotide
cacugcggaugcugucuuu

SEQ ID NO: 367369 - RNA, 19 nt, Artificial Sequence
  Description of Artificial Sequence: Synthetic oligonucleotide
cccuuaucugugcaacguu

SEQ ID NO: 367370 - RNA, 19 nt, Artificial Sequence
  Description of Artificial Sequence: Synthetic oligonucleotide
cugccgcguuggaaauaau

SEQ ID NO: 367371 - RNA, 19 nt, Artificial Sequence
  Description of Artificial Sequence: Synthetic oligonucleotide
gcuccccgcccuugcgagu

SEQ ID NO: 367372 - RNA, 19 nt, Artificial Sequence
  Description of Artificial Sequence: Synthetic oligonucleotide
ggcgcacauuaggguggaa

SEQ ID NO: 367373 - RNA, 19 nt, Artificial Sequence
  Description of Artificial Sequence: Synthetic oligonucleotide
cccgcccuugcgagugaau

SEQ ID NO: 367374 - RNA, 19 nt, Artificial Sequence
  Description of Artificial Sequence: Synthetic oligonucleotide
uuuaacaaccuuaauaccc

SEQ ID NO: 367375 - RNA, 19 nt, Artificial Sequence
  Description of Artificial Sequence: Synthetic oligonucleotide
agaauuacuagggagagcc

SEQ ID NO: 367376 - RNA, 19 nt, Artificial Sequence
  Description of Artificial Sequence: Synthetic oligonucleotide
auaugaaucaaacccagac

SEQ ID NO: 367377 - RNA, 19 nt, Artificial Sequence
  Description of Artificial Sequence: Synthetic oligonucleotide
aaccuuaauacccaauaac

SEQ ID NO: 367378 - RNA, 19 nt, Artificial Sequence
  Description of Artificial Sequence: Synthetic oligonucleotide
gaacaaauaacauuuagca

SEQ ID NO: 367379 - RNA, 19 nt, Artificial Sequence
  Description of Artificial Sequence: Synthetic oligonucleotide
guguauauaucccugaugg

SEQ ID NO: 367380 - RNA, 19 nt, Artificial Sequence
  Description of Artificial Sequence: Synthetic oligonucleotide
agauauuuuagguuggcgg

SEQ ID NO: 367381 - RNA, 19 nt, Artificial Sequence
  Description of Artificial Sequence: Synthetic oligonucleotide
ugaacaaauaacauuuagc

SEQ ID NO: 367382 - RNA, 19 nt, Artificial Sequence
  Description of Artificial Sequence: Synthetic oligonucleotide
aaaaguacgcugguuaggc

SEQ ID NO: 367383 - RNA, 19 nt, Artificial Sequence
  Description of Artificial Sequence: Synthetic oligonucleotide
aagauagguaacgaggacc

SEQ ID NO: 367384 - RNA, 19 nt, Artificial Sequence
  Description of Artificial Sequence: Synthetic oligonucleotide
aauaacgcaucguuagaac

SEQ ID NO: 367385 - RNA, 19 nt, Artificial Sequence
  Description of Artificial Sequence: Synthetic oligonucleotide
aaagaugcaggccauuauc

SEQ ID NO: 367386 - RNA, 19 nt, Artificial Sequence
  Description of Artificial Sequence: Synthetic oligonucleotide
augguauuagcacaguuac

SEQ ID NO: 367387 - RNA, 19 nt, Artificial Sequence
  Description of Artificial Sequence: Synthetic oligonucleotide
auaacgcaucguuagaacc

SEQ ID NO: 367388 - RNA, 19 nt, Artificial Sequence
  Description of Artificial Sequence: Synthetic oligonucleotide
uuuaaugcagcucucgcug

SEQ ID NO: 367389 - RNA, 19 nt, Artificial Sequence
  Description of Artificial Sequence: Synthetic oligonucleotide
uagaauaacgcaucguuag

SEQ ID NO: 367390 - RNA, 19 nt, Artificial Sequence
  Description of Artificial Sequence: Synthetic oligonucleotide
aaguacgcugguuaggcac

SEQ ID NO: 367391 - RNA, 19 nt, Artificial Sequence
  Description of Artificial Sequence: Synthetic oligonucleotide
ucuaaguaaccauuaacug

SEQ ID NO: 367392 - RNA, 19 nt, Artificial Sequence
  Description of Artificial Sequence: Synthetic oligonucleotide
uacccaauaacuuauuugu

SEQ ID NO: 367393 - RNA, 19 nt, Artificial Sequence
  Description of Artificial Sequence: Synthetic oligonucleotide
uuugccaauguucugugcc

SEQ ID NO: 367394 - RNA, 19 nt, Artificial Sequence
  Description of Artificial Sequence: Synthetic oligonucleotide
uuaaguguuuccaugggcu

SEQ ID NO: 367395 - RNA, 19 nt, Artificial Sequence
  Description of Artificial Sequence: Synthetic oligonucleotide
aaaauaacgcugugguaag

SEQ ID NO: 367396 - RNA, 19 nt, Artificial Sequence
  Description of Artificial Sequence: Synthetic oligonucleotide
ggaaagauauuuuagguug

SEQ ID NO: 367397 - RNA, 19 nt, Artificial Sequence
  Description of Artificial Sequence: Synthetic oligonucleotide
aguaagauuaagaacaugu

SEQ ID NO: 367398 - RNA, 19 nt, Artificial Sequence
  Description of Artificial Sequence: Synthetic oligonucleotide
caagcguuauuauaaaagc

SEQ ID NO: 367399 - RNA, 19 nt, Artificial Sequence
  Description of Artificial Sequence: Synthetic oligonucleotide
acuuuaaugcagcucucgc

SEQ ID NO: 367400 - RNA, 19 nt, Artificial Sequence
  Description of Artificial Sequence: Synthetic oligonucleotide
uaaccugauaaguagcugc

SEQ ID NO: 367401 - RNA, 19 nt, Artificial Sequence
  Description of Artificial Sequence: Synthetic oligonucleotide
uuaggcauguacacuauug

SEQ ID NO: 367402 - RNA, 19 nt, Artificial Sequence
  Description of Artificial Sequence: Synthetic oligonucleotide
uggccuaauaccaugcucc

SEQ ID NO: 367403 - RNA, 19 nt, Artificial Sequence
  Description of Artificial Sequence: Synthetic oligonucleotide
ugcacuuaguuguaggucc

SEQ ID NO: 367404 - RNA, 19 nt, Artificial Sequence
  Description of Artificial Sequence: Synthetic oligonucleotide
uuagcaauuuucuguauga

SEQ ID NO: 367405 - RNA, 19 nt, Artificial Sequence
  Description of Artificial Sequence: Synthetic oligonucleotide
auagaguaaauuauuagug

SEQ ID NO: 367406 - RNA, 19 nt, Artificial Sequence
  Description of Artificial Sequence: Synthetic oligonucleotide
uuauauuauauuuguuugu

SEQ ID NO: 367407 - RNA, 19 nt, Artificial Sequence
  Description of Artificial Sequence: Synthetic oligonucleotide
auaacuuauaguuuguauu

SEQ ID NO: 367408 - RNA, 19 nt, Artificial Sequence
  Description of Artificial Sequence: Synthetic oligonucleotide
uuuauguaacugaacaaau

SEQ ID NO: 367409 - RNA, 19 nt, Artificial Sequence
  Description of Artificial Sequence: Synthetic oligonucleotide
caucguuagaaccaaacug

SEQ ID NO: 367410 - RNA, 19 nt, Artificial Sequence
  Description of Artificial Sequence: Synthetic oligonucleotide
uauuaguguauauaucccu

SEQ ID NO: 367411 - RNA, 19 nt, Artificial Sequence
  Description of Artificial Sequence: Synthetic oligonucleotide
agauagguaacgaggaccc

SEQ ID NO: 367412 - RNA, 19 nt, Artificial Sequence
  Description of Artificial Sequence: Synthetic oligonucleotide
auugagaguacaugcgcac

SEQ ID NO: 367413 - RNA, 19 nt, Artificial Sequence
  Description of Artificial Sequence: Synthetic oligonucleotide
aaggguaccuaccuugcag

SEQ ID NO: 367414 - RNA, 19 nt, Artificial Sequence
  Description of Artificial Sequence: Synthetic oligonucleotide
acacuuacugucuuuguag

SEQ ID NO: 367415 - RNA, 19 nt, Artificial Sequence
  Description of Artificial Sequence: Synthetic oligonucleotide
ucuaaacuauacauucagc

SEQ ID NO: 367416 - RNA, 19 nt, Artificial Sequence
  Description of Artificial Sequence: Synthetic oligonucleotide
aaauggcauucagaaaacc

SEQ ID NO: 367417 - RNA, 19 nt, Artificial Sequence
  Description of Artificial Sequence: Synthetic oligonucleotide
uucaauagguaauucugca

SEQ ID NO: 367418 - RNA, 19 nt, Artificial Sequence
  Description of Artificial Sequence: Synthetic oligonucleotide
aaaguccuagaauaacgca

SEQ ID NO: 367419 - RNA, 19 nt, Artificial Sequence
  Description of Artificial Sequence: Synthetic oligonucleotide
auacccaauaacuuauuug

SEQ ID NO: 367420 - RNA, 19 nt, Artificial Sequence
  Description of Artificial Sequence: Synthetic oligonucleotide
uacaugcgcacuaacaaga

SEQ ID NO: 367421 - RNA, 19 nt, Artificial Sequence
  Description of Artificial Sequence: Synthetic oligonucleotide
ucaucgauggugcaauagc

SEQ ID NO: 367422 - RNA, 19 nt, Artificial Sequence
  Description of Artificial Sequence: Synthetic oligonucleotide
ugagccaaauaucaaucug

SEQ ID NO: 367423 - RNA, 19 nt, Artificial Sequence
  Description of Artificial Sequence: Synthetic oligonucleotide
aagauauuuuagguuggcg

SEQ ID NO: 367424 - RNA, 19 nt, Artificial Sequence
  Description of Artificial Sequence: Synthetic oligonucleotide
uagguuuguaucuauuaca

SEQ ID NO: 367425 - RNA, 19 nt, Artificial Sequence
  Description of Artificial Sequence: Synthetic oligonucleotide
uauugagaguacaugcgca

SEQ ID NO: 367426 - RNA, 19 nt, Artificial Sequence
  Description of Artificial Sequence: Synthetic oligonucleotide
aucuaaguaaccauuaacu

SEQ ID NO: 367427 - RNA, 19 nt, Artificial Sequence
  Description of Artificial Sequence: Synthetic oligonucleotide
uauauaucccugauggaau

SEQ ID NO: 367428 - RNA, 19 nt, Artificial Sequence
  Description of Artificial Sequence: Synthetic oligonucleotide
ugggaucauaaccauauaa

SEQ ID NO: 367429 - RNA, 19 nt, Artificial Sequence
  Description of Artificial Sequence: Synthetic oligonucleotide
cuuccaacuucaaauaguc

SEQ ID NO: 367430 - RNA, 19 nt, Artificial Sequence
  Description of Artificial Sequence: Synthetic oligonucleotide
ucaacgucaguguuauaag

SEQ ID NO: 367431 - RNA, 19 nt, Artificial Sequence
  Description of Artificial Sequence: Synthetic oligonucleotide
aauagcuuuaaaacacucu

SEQ ID NO: 367432 - RNA, 19 nt, Artificial Sequence
  Description of Artificial Sequence: Synthetic oligonucleotide
ucagaauuacuagggagag

SEQ ID NO: 367433 - RNA, 19 nt, Artificial Sequence
  Description of Artificial Sequence: Synthetic oligonucleotide
uuauaguuuguauucucaa

SEQ ID NO: 367434 - RNA, 19 nt, Artificial Sequence
  Description of Artificial Sequence: Synthetic oligonucleotide
uuauguaacugaacaaaua

SEQ ID NO: 367435 - RNA, 19 nt, Artificial Sequence
  Description of Artificial Sequence: Synthetic oligonucleotide
ugugccuaacuuuaaugca

SEQ ID NO: 367436 - RNA, 19 nt, Artificial Sequence
  Description of Artificial Sequence: Synthetic oligonucleotide
agaucuagguugcacuuag

SEQ ID NO: 367437 - RNA, 19 nt, Artificial Sequence
  Description of Artificial Sequence: Synthetic oligonucleotide
agaguaaauuauuagugua

SEQ ID NO: 367438 - RNA, 19 nt, Artificial Sequence
  Description of Artificial Sequence: Synthetic oligonucleotide
caaucuaggcuacaagccc

SEQ ID NO: 367439 - RNA, 19 nt, Artificial Sequence
  Description of Artificial Sequence: Synthetic oligonucleotide
acuuacugucuuuguagac

SEQ ID NO: 367440 - RNA, 19 nt, Artificial Sequence
  Description of Artificial Sequence: Synthetic oligonucleotide
aauucccaaggaaagauau

SEQ ID NO: 367441 - RNA, 19 nt, Artificial Sequence
  Description of Artificial Sequence: Synthetic oligonucleotide
auaaguagcugcaucuagg

SEQ ID NO: 367442 - RNA, 19 nt, Artificial Sequence
  Description of Artificial Sequence: Synthetic oligonucleotide
uuugagucaacuccauuua

SEQ ID NO: 367443 - RNA, 19 nt, Artificial Sequence
  Description of Artificial Sequence: Synthetic oligonucleotide
auaugacacaaucuaggcu

SEQ ID NO: 367444 - RNA, 19 nt, Artificial Sequence
  Description of Artificial Sequence: Synthetic oligonucleotide
aguagaucugccuugcaaa

SEQ ID NO: 367445 - RNA, 19 nt, Artificial Sequence
  Description of Artificial Sequence: Synthetic oligonucleotide
acacauuccauauuaguua

SEQ ID NO: 367446 - RNA, 19 nt, Artificial Sequence
  Description of Artificial Sequence: Synthetic oligonucleotide
ugguaucacucugucaucg

SEQ ID NO: 367447 - RNA, 19 nt, Artificial Sequence
  Description of Artificial Sequence: Synthetic oligonucleotide
accuuaauacccaauaacu

SEQ ID NO: 367448 - RNA, 19 nt, Artificial Sequence
  Description of Artificial Sequence: Synthetic oligonucleotide
aacuuccggcuugaaaagc

SEQ ID NO: 367449 - RNA, 19 nt, Artificial Sequence
  Description of Artificial Sequence: Synthetic oligonucleotide
acugguacacaccuaauuu

SEQ ID NO: 367450 - RNA, 19 nt, Artificial Sequence
  Description of Artificial Sequence: Synthetic oligonucleotide
uguagaagauagguaacga

SEQ ID NO: 367451 - RNA, 19 nt, Artificial Sequence
  Description of Artificial Sequence: Synthetic oligonucleotide
auauuuuagguuggcggac

SEQ ID NO: 367452 - RNA, 19 nt, Artificial Sequence
  Description of Artificial Sequence: Synthetic oligonucleotide
aggcauguacacuauugag

SEQ ID NO: 367453 - RNA, 19 nt, Artificial Sequence
  Description of Artificial Sequence: Synthetic oligonucleotide
agcaagcuuaaguguuucc

SEQ ID NO: 367454 - RNA, 19 nt, Artificial Sequence
  Description of Artificial Sequence: Synthetic oligonucleotide
ugcuauuacaaggauggcu

SEQ ID NO: 367455 - RNA, 19 nt, Artificial Sequence
  Description of Artificial Sequence: Synthetic oligonucleotide
uagaucuaaguaaccauua

SEQ ID NO: 367456 - RNA, 19 nt, Artificial Sequence
  Description of Artificial Sequence: Synthetic oligonucleotide
auaccaugcuccaaauggc

SEQ ID NO: 367457 - RNA, 19 nt, Artificial Sequence
  Description of Artificial Sequence: Synthetic oligonucleotide
cuguagaagauagguaacg

SEQ ID NO: 367458 - RNA, 19 nt, Artificial Sequence
  Description of Artificial Sequence: Synthetic oligonucleotide
uuagaaccaaacugguagu

SEQ ID NO: 367459 - RNA, 19 nt, Artificial Sequence
  Description of Artificial Sequence: Synthetic oligonucleotide
uaacuuccggcuugaaaag

SEQ ID NO: 367460 - RNA, 19 nt, Artificial Sequence
  Description of Artificial Sequence: Synthetic oligonucleotide
ccaagcguuauuauaaaag

SEQ ID NO: 367461 - RNA, 19 nt, Artificial Sequence
  Description of Artificial Sequence: Synthetic oligonucleotide
aggaaagauauuuuagguu

SEQ ID NO: 367462 - RNA, 19 nt, Artificial Sequence
  Description of Artificial Sequence: Synthetic oligonucleotide
ugccuaacuuuaaugcagc

SEQ ID NO: 367463 - RNA, 19 nt, Artificial Sequence
  Description of Artificial Sequence: Synthetic oligonucleotide
uuauauucaauagguaauu

SEQ ID NO: 367464 - RNA, 19 nt, Artificial Sequence
  Description of Artificial Sequence: Synthetic oligonucleotide
ucccaguacacuaaauuua

SEQ ID NO: 367465 - RNA, 19 nt, Artificial Sequence
  Description of Artificial Sequence: Synthetic oligonucleotide
auagguaacgaggacccuc

SEQ ID NO: 367466 - RNA, 19 nt, Artificial Sequence
  Description of Artificial Sequence: Synthetic oligonucleotide
guacaugcgcacuaacaag

SEQ ID NO: 367467 - RNA, 19 nt, Artificial Sequence
  Description of Artificial Sequence: Synthetic oligonucleotide
gacuugguuaggcauguac

SEQ ID NO: 367468 - RNA, 19 nt, Artificial Sequence
  Description of Artificial Sequence: Synthetic oligonucleotide
uucccaguacacuaaauuu

SEQ ID NO: 367469 - RNA, 19 nt, Artificial Sequence
  Description of Artificial Sequence: Synthetic oligonucleotide
aucagaauuacuagggaga

SEQ ID NO: 367470 - RNA, 19 nt, Artificial Sequence
  Description of Artificial Sequence: Synthetic oligonucleotide
ucaauagguaauucugcau

SEQ ID NO: 367471 - RNA, 19 nt, Artificial Sequence
  Description of Artificial Sequence: Synthetic oligonucleotide
aguccuagaauaacgcauc

SEQ ID NO: 367472 - RNA, 19 nt, Artificial Sequence
  Description of Artificial Sequence: Synthetic oligonucleotide
cuaaguaaccauuaacugu

SEQ ID NO: 367473 - RNA, 19 nt, Artificial Sequence
  Description of Artificial Sequence: Synthetic oligonucleotide
ugguuaggcauguacacua

SEQ ID NO: 367474 - RNA, 19 nt, Artificial Sequence
  Description of Artificial Sequence: Synthetic oligonucleotide
agaguacaugcgcacuaac

SEQ ID NO: 367475 - RNA, 19 nt, Artificial Sequence
  Description of Artificial Sequence: Synthetic oligonucleotide
gggaucauaaccauauaag

SEQ ID NO: 367476 - RNA, 19 nt, Artificial Sequence
  Description of Artificial Sequence: Synthetic oligonucleotide
acuacacuuacugucuuug

SEQ ID NO: 367477 - RNA, 19 nt, Artificial Sequence
  Description of Artificial Sequence: Synthetic oligonucleotide
aaucuaggcuacaagccca

SEQ ID NO: 367478 - RNA, 19 nt, Artificial Sequence
  Description of Artificial Sequence: Synthetic oligonucleotide
cuauuacaaggauggcucc

SEQ ID NO: 367479 - RNA, 19 nt, Artificial Sequence
  Description of Artificial Sequence: Synthetic oligonucleotide
uucaguccaaagcugcuau

SEQ ID NO: 367480 - RNA, 19 nt, Artificial Sequence
  Description of Artificial Sequence: Synthetic oligonucleotide
aacgucaguguuauaagaa

SEQ ID NO: 367481 - RNA, 19 nt, Artificial Sequence
  Description of Artificial Sequence: Synthetic oligonucleotide
uggugcgucaagcucuuug

SEQ ID NO: 367482 - RNA, 19 nt, Artificial Sequence
  Description of Artificial Sequence: Synthetic oligonucleotide
agaaaaguagcugcuauua

SEQ ID NO: 367483 - RNA, 19 nt, Artificial Sequence
  Description of Artificial Sequence: Synthetic oligonucleotide
aauaacgcugugguaagua

SEQ ID NO: 367484 - RNA, 19 nt, Artificial Sequence
  Description of Artificial Sequence: Synthetic oligonucleotide
agaauaacgcaucguuaga

SEQ ID NO: 367485 - RNA, 19 nt, Artificial Sequence
  Description of Artificial Sequence: Synthetic oligonucleotide
aaaguacgcugguuaggca

SEQ ID NO: 367486 - RNA, 19 nt, Artificial Sequence
  Description of Artificial Sequence: Synthetic oligonucleotide
uauaucccugauggaauag

SEQ ID NO: 367487 - RNA, 19 nt, Artificial Sequence
  Description of Artificial Sequence: Synthetic oligonucleotide
cauaacaguccaaguuagc

SEQ ID NO: 367488 - RNA, 19 nt, Artificial Sequence
  Description of Artificial Sequence: Synthetic oligonucleotide
ugccuugcaaacauuggua

SEQ ID NO: 367489 - RNA, 19 nt, Artificial Sequence
  Description of Artificial Sequence: Synthetic oligonucleotide
ugguuaggcacaaaaucuu

SEQ ID NO: 367490 - RNA, 19 nt, Artificial Sequence
  Description of Artificial Sequence: Synthetic oligonucleotide
uaguguauauaucccugau

SEQ ID NO: 367491 - RNA, 19 nt, Artificial Sequence
  Description of Artificial Sequence: Synthetic oligonucleotide
caacugauauguaaccuga

SEQ ID NO: 367492 - RNA, 19 nt, Artificial Sequence
  Description of Artificial Sequence: Synthetic oligonucleotide
ucgguagaucuaaguaacc

SEQ ID NO: 367493 - RNA, 19 nt, Artificial Sequence
  Description of Artificial Sequence: Synthetic oligonucleotide
uauuuuagguuggcggaca

SEQ ID NO: 367494 - RNA, 19 nt, Artificial Sequence
  Description of Artificial Sequence: Synthetic oligonucleotide
guccuagaauaacgcaucg

SEQ ID NO: 367495 - RNA, 19 nt, Artificial Sequence
  Description of Artificial Sequence: Synthetic oligonucleotide
ugcauuugugugcucucac

SEQ ID NO: 367496 - RNA, 19 nt, Artificial Sequence
  Description of Artificial Sequence: Synthetic oligonucleotide
uguacacuauugagaguac

SEQ ID NO: 367497 - RNA, 19 nt, Artificial Sequence
  Description of Artificial Sequence: Synthetic oligonucleotide
accaagcauagacacagaa

SEQ ID NO: 367498 - RNA, 19 nt, Artificial Sequence
  Description of Artificial Sequence: Synthetic oligonucleotide
uguagguccuaggccauag

SEQ ID NO: 367499 - RNA, 19 nt, Artificial Sequence
  Description of Artificial Sequence: Synthetic oligonucleotide
ugguauuagcacaguuaca

SEQ ID NO: 367500 - RNA, 19 nt, Artificial Sequence
  Description of Artificial Sequence: Synthetic oligonucleotide
ugguggccuaauaccaugc

SEQ ID NO: 367501 - RNA, 19 nt, Artificial Sequence
  Description of Artificial Sequence: Synthetic oligonucleotide
gucgguagaucuaaguaac

SEQ ID NO: 367502 - RNA, 19 nt, Artificial Sequence
  Description of Artificial Sequence: Synthetic oligonucleotide
gaauaacgcaucguuagaa

SEQ ID NO: 367503 - RNA, 19 nt, Artificial Sequence
  Description of Artificial Sequence: Synthetic oligonucleotide
uccaagcguuauuauaaaa

SEQ ID NO: 367504 - RNA, 19 nt, Artificial Sequence
  Description of Artificial Sequence: Synthetic oligonucleotide
aauacuuuugugagccaaa

SEQ ID NO: 367505 - RNA, 19 nt, Artificial Sequence
  Description of Artificial Sequence: Synthetic oligonucleotide
gcuauuacaaggauggcuc

SEQ ID NO: 367506 - RNA, 19 nt, Artificial Sequence
  Description of Artificial Sequence: Synthetic oligonucleotide
uacuagggagagccacugg

SEQ ID NO: 367507 - RNA, 19 nt, Artificial Sequence
  Description of Artificial Sequence: Synthetic oligonucleotide
aaccugauaaguagcugca

SEQ ID NO: 367508 - RNA, 19 nt, Artificial Sequence
  Description of Artificial Sequence: Synthetic oligonucleotide
acuugguuaggcauguaca

SEQ ID NO: 367509 - RNA, 19 nt, Artificial Sequence
  Description of Artificial Sequence: Synthetic oligonucleotide
uuacuagggagagccacug

SEQ ID NO: 367510 - RNA, 19 nt, Artificial Sequence
  Description of Artificial Sequence: Synthetic oligonucleotide
acgucaguguuauaagaaa

SEQ ID NO: 367511 - RNA, 19 nt, Artificial Sequence
  Description of Artificial Sequence: Synthetic oligonucleotide
guaacgaggacccuccucu

SEQ ID NO: 367512 - RNA, 19 nt, Artificial Sequence
  Description of Artificial Sequence: Synthetic oligonucleotide
agcaacuccugccaucaga

SEQ ID NO: 367513 - RNA, 19 nt, Artificial Sequence
  Description of Artificial Sequence: Synthetic oligonucleotide
auaacgcugugguaaguau

SEQ ID NO: 367514 - RNA, 19 nt, Artificial Sequence
  Description of Artificial Sequence: Synthetic oligonucleotide
acugugaauccacauggua

SEQ ID NO: 367515 - RNA, 19 nt, Artificial Sequence
  Description of Artificial Sequence: Synthetic oligonucleotide
ugauaagaguaaguagauc

SEQ ID NO: 367516 - RNA, 19 nt, Artificial Sequence
  Description of Artificial Sequence: Synthetic oligonucleotide
cacauagaguaaauuauua

SEQ ID NO: 367517 - RNA, 19 nt, Artificial Sequence
  Description of Artificial Sequence: Synthetic oligonucleotide
agguuuguaucuauuacaa

SEQ ID NO: 367518 - RNA, 19 nt, Artificial Sequence
  Description of Artificial Sequence: Synthetic oligonucleotide
aggguaccuaccuugcagu

SEQ ID NO: 367519 - RNA, 19 nt, Artificial Sequence
  Description of Artificial Sequence: Synthetic oligonucleotide
auauaucccugauggaaua

SEQ ID NO: 367520 - RNA, 19 nt, Artificial Sequence
  Description of Artificial Sequence: Synthetic oligonucleotide
aaaccugguaucacucugu

SEQ ID NO: 367521 - RNA, 19 nt, Artificial Sequence
  Description of Artificial Sequence: Synthetic oligonucleotide
auuuagcaaucuuuugcuu

SEQ ID NO: 367522 - RNA, 19 nt, Artificial Sequence
  Description of Artificial Sequence: Synthetic oligonucleotide
cuagaauaacgcaucguua

SEQ ID NO: 367523 - RNA, 19 nt, Artificial Sequence
  Description of Artificial Sequence: Synthetic oligonucleotide
uacuuuugugagccaaaua

SEQ ID NO: 367524 - RNA, 19 nt, Artificial Sequence
  Description of Artificial Sequence: Synthetic oligonucleotide
aguaaccauuaacugugaa

SEQ ID NO: 367525 - RNA, 19 nt, Artificial Sequence
  Description of Artificial Sequence: Synthetic oligonucleotide
uaacuuuaaugcagcucuc

SEQ ID NO: 367526 - RNA, 19 nt, Artificial Sequence
  Description of Artificial Sequence: Synthetic oligonucleotide
ggcugcacgacaccgggcg

SEQ ID NO: 367527 - RNA, 19 nt, Artificial Sequence
  Description of Artificial Sequence: Synthetic oligonucleotide
ggugcgucaagcucuuugc

SEQ ID NO: 367528 - RNA, 19 nt, Artificial Sequence
  Description of Artificial Sequence: Synthetic oligonucleotide
acucgguucaguguucuca

SEQ ID NO: 367529 - RNA, 19 nt, Artificial Sequence
  Description of Artificial Sequence: Synthetic oligonucleotide
aaauaacgcugugguaagu

SEQ ID NO: 367530 - RNA, 19 nt, Artificial Sequence
  Description of Artificial Sequence: Synthetic oligonucleotide
uuagguuggcggacauugu

SEQ ID NO: 367531 - RNA, 19 nt, Artificial Sequence
  Description of Artificial Sequence: Synthetic oligonucleotide
augacacaaucuaggcuac

SEQ ID NO: 367532 - RNA, 19 nt, Artificial Sequence
  Description of Artificial Sequence: Synthetic oligonucleotide
uugcacuuaguuguagguc

SEQ ID NO: 367533 - RNA, 19 nt, Artificial Sequence
  Description of Artificial Sequence: Synthetic oligonucleotide
gucaucgauggugcaauag

SEQ ID NO: 367534 - RNA, 19 nt, Artificial Sequence
  Description of Artificial Sequence: Synthetic oligonucleotide
caacgucaguguuauaaga

SEQ ID NO: 367535 - RNA, 19 nt, Artificial Sequence
  Description of Artificial Sequence: Synthetic oligonucleotide
uaacaaccuuaauacccaa

SEQ ID NO: 367536 - RNA, 19 nt, Artificial Sequence
  Description of Artificial Sequence: Synthetic oligonucleotide
uugagaguacaugcgcacu

SEQ ID NO: 367537 - RNA, 19 nt, Artificial Sequence
  Description of Artificial Sequence: Synthetic oligonucleotide
ggucgguagaucuaaguaa

SEQ ID NO: 367538 - RNA, 19 nt, Artificial Sequence
  Description of Artificial Sequence: Synthetic oligonucleotide
aacaaccuuaauacccaau

SEQ ID NO: 367539 - RNA, 19 nt, Artificial Sequence
  Description of Artificial Sequence: Synthetic oligonucleotide
uccuagaauaacgcaucgu

SEQ ID NO: 367540 - RNA, 19 nt, Artificial Sequence
  Description of Artificial Sequence: Synthetic oligonucleotide
auuuuagguuggcggacau

SEQ ID NO: 367541 - RNA, 19 nt, Artificial Sequence
  Description of Artificial Sequence: Synthetic oligonucleotide
aacugugaauccacauggu

SEQ ID NO: 367542 - RNA, 19 nt, Artificial Sequence
  Description of Artificial Sequence: Synthetic oligonucleotide
auacuuuugugagccaaau

SEQ ID NO: 367543 - RNA, 19 nt, Artificial Sequence
  Description of Artificial Sequence: Synthetic oligonucleotide
acuuccggcuugaaaagca

SEQ ID NO: 367544 - RNA, 19 nt, Artificial Sequence
  Description of Artificial Sequence: Synthetic oligonucleotide
agaugcaggccauuaucuu

SEQ ID NO: 367545 - RNA, 19 nt, Artificial Sequence
  Description of Artificial Sequence: Synthetic oligonucleotide
agaguaagauuaagaacau

SEQ ID NO: 367546 - RNA, 19 nt, Artificial Sequence
  Description of Artificial Sequence: Synthetic oligonucleotide
aagaucuagguugcacuua

SEQ ID NO: 367547 - RNA, 19 nt, Artificial Sequence
  Description of Artificial Sequence: Synthetic oligonucleotide
gacaggggucgguagaucu

SEQ ID NO: 367548 - RNA, 19 nt, Artificial Sequence
  Description of Artificial Sequence: Synthetic oligonucleotide
gcaaccaaaaccugcaggu

SEQ ID NO: 367549 - RNA, 19 nt, Artificial Sequence
  Description of Artificial Sequence: Synthetic oligonucleotide
gcauucaguccaaagcugc

SEQ ID NO: 367550 - RNA, 19 nt, Artificial Sequence
  Description of Artificial Sequence: Synthetic oligonucleotide
caugcgcacuaacaagauc

SEQ ID NO: 367551 - RNA, 19 nt, Artificial Sequence
  Description of Artificial Sequence: Synthetic oligonucleotide
cagaauuacuagggagagc

SEQ ID NO: 367552 - RNA, 19 nt, Artificial Sequence
  Description of Artificial Sequence: Synthetic oligonucleotide
aacugauauguaaccugau

SEQ ID NO: 367553 - RNA, 19 nt, Artificial Sequence
  Description of Artificial Sequence: Synthetic oligonucleotide
gugcgucaagcucuuugcc

SEQ ID NO: 367554 - RNA, 19 nt, Artificial Sequence
  Description of Artificial Sequence: Synthetic oligonucleotide
uagguugcacuuaguugua

SEQ ID NO: 367555 - RNA, 19 nt, Artificial Sequence
  Description of Artificial Sequence: Synthetic oligonucleotide
gugagccaaauaucaaucu

SEQ ID NO: 367556 - RNA, 19 nt, Artificial Sequence
  Description of Artificial Sequence: Synthetic oligonucleotide
uagcaagcuuaaguguuuc

SEQ ID NO: 367557 - RNA, 19 nt, Artificial Sequence
  Description of Artificial Sequence: Synthetic oligonucleotide
aucuuauauucaauaggua

SEQ ID NO: 367558 - RNA, 19 nt, Artificial Sequence
  Description of Artificial Sequence: Synthetic oligonucleotide
cuauacauucagcccagua

SEQ ID NO: 367559 - RNA, 19 nt, Artificial Sequence
  Description of Artificial Sequence: Synthetic oligonucleotide
uuccggcuugaaaagcauu

SEQ ID NO: 367560 - RNA, 19 nt, Artificial Sequence
  Description of Artificial Sequence: Synthetic oligonucleotide
cugguaucacucugucauc

SEQ ID NO: 367561 - RNA, 19 nt, Artificial Sequence
  Description of Artificial Sequence: Synthetic oligonucleotide
guuaagacaggggucggua

SEQ ID NO: 367562 - RNA, 19 nt, Artificial Sequence
  Description of Artificial Sequence: Synthetic oligonucleotide
aguacgcugguuaggcaca

SEQ ID NO: 367563 - RNA, 19 nt, Artificial Sequence
  Description of Artificial Sequence: Synthetic oligonucleotide
aggacccuccucuuuuaaa

SEQ ID NO: 367564 - RNA, 19 nt, Artificial Sequence
  Description of Artificial Sequence: Synthetic oligonucleotide
ccaaggguaccuaccuugc

SEQ ID NO: 367565 - RNA, 19 nt, Artificial Sequence
  Description of Artificial Sequence: Synthetic oligonucleotide
gguuaggcacaaaaucuuc

SEQ ID NO: 367566 - RNA, 19 nt, Artificial Sequence
  Description of Artificial Sequence: Synthetic oligonucleotide
caagaucauaacaguccaa

SEQ ID NO: 367567 - RNA, 19 nt, Artificial Sequence
  Description of Artificial Sequence: Synthetic oligonucleotide
acacuacacuuacugucuu

SEQ ID NO: 367568 - RNA, 19 nt, Artificial Sequence
  Description of Artificial Sequence: Synthetic oligonucleotide
auuuguccgccgugcggcu

SEQ ID NO: 367569 - RNA, 19 nt, Artificial Sequence
  Description of Artificial Sequence: Synthetic oligonucleotide
caagcuuaaguguuuccau

SEQ ID NO: 367570 - RNA, 19 nt, Artificial Sequence
  Description of Artificial Sequence: Synthetic oligonucleotide
ugcucucacaaaggcugca

SEQ ID NO: 367571 - RNA, 19 nt, Artificial Sequence
  Description of Artificial Sequence: Synthetic oligonucleotide
ccugguaucacucugucau

SEQ ID NO: 367572 - RNA, 19 nt, Artificial Sequence
  Description of Artificial Sequence: Synthetic oligonucleotide
cuugcuggugcgucaagcu

SEQ ID NO: 367573 - RNA, 19 nt, Artificial Sequence
  Description of Artificial Sequence: Synthetic oligonucleotide
ccauaguuugaaugcugug

SEQ ID NO: 367574 - RNA, 19 nt, Artificial Sequence
  Description of Artificial Sequence: Synthetic oligonucleotide
uuuuagguuggcggacauu

SEQ ID NO: 367575 - RNA, 19 nt, Artificial Sequence
  Description of Artificial Sequence: Synthetic oligonucleotide
cugccuugcaaacauuggu

SEQ ID NO: 367576 - RNA, 19 nt, Artificial Sequence
  Description of Artificial Sequence: Synthetic oligonucleotide
gguaacgaggacccuccuc

SEQ ID NO: 367577 - RNA, 19 nt, Artificial Sequence
  Description of Artificial Sequence: Synthetic oligonucleotide
cgcaucguuagaaccaaac

SEQ ID NO: 367578 - RNA, 19 nt, Artificial Sequence
  Description of Artificial Sequence: Synthetic oligonucleotide
gcauuugugugcucucaca

SEQ ID NO: 367579 - RNA, 19 nt, Artificial Sequence
  Description of Artificial Sequence: Synthetic oligonucleotide
ugucaucgauggugcaaua

SEQ ID NO: 367580 - RNA, 19 nt, Artificial Sequence
  Description of Artificial Sequence: Synthetic oligonucleotide
guaucacucugucaucgau

SEQ ID NO: 367581 - RNA, 19 nt, Artificial Sequence
  Description of Artificial Sequence: Synthetic oligonucleotide
gcaucguuagaaccaaacu

SEQ ID NO: 367582 - RNA, 19 nt, Artificial Sequence
  Description of Artificial Sequence: Synthetic oligonucleotide
agcugcuaugcugcaccag

SEQ ID NO: 367583 - RNA, 19 nt, Artificial Sequence
  Description of Artificial Sequence: Synthetic oligonucleotide
gguaucacucugucaucga

SEQ ID NO: 367584 - RNA, 19 nt, Artificial Sequence
  Description of Artificial Sequence: Synthetic oligonucleotide
gcgucaagcucuuugccaa

SEQ ID NO: 367585 - RNA, 19 nt, Artificial Sequence
  Description of Artificial Sequence: Synthetic oligonucleotide
caagaucuagguugcacuu

SEQ ID NO: 367586 - RNA, 19 nt, Artificial Sequence
  Description of Artificial Sequence: Synthetic oligonucleotide
cauucaguccaaagcugcu

SEQ ID NO: 367587 - RNA, 19 nt, Artificial Sequence
  Description of Artificial Sequence: Synthetic oligonucleotide
acccaauaacuuauuugua

SEQ ID NO: 367588 - RNA, 19 nt, Artificial Sequence
  Description of Artificial Sequence: Synthetic oligonucleotide
agguuggcggacauuguuu

SEQ ID NO: 367589 - RNA, 19 nt, Artificial Sequence
  Description of Artificial Sequence: Synthetic oligonucleotide
gcuugcuggugcgucaagc

SEQ ID NO: 367590 - RNA, 19 nt, Artificial Sequence
  Description of Artificial Sequence: Synthetic oligonucleotide
caaggguaccuaccuugca

SEQ ID NO: 367591 - RNA, 19 nt, Artificial Sequence
  Description of Artificial Sequence: Synthetic oligonucleotide
gccacauagaguaaauuau

SEQ ID NO: 367592 - RNA, 19 nt, Artificial Sequence
  Description of Artificial Sequence: Synthetic oligonucleotide
ccuagaauaacgcaucguu

SEQ ID NO: 367593 - RNA, 19 nt, Artificial Sequence
  Description of Artificial Sequence: Synthetic oligonucleotide
accugauaaguagcugcau

SEQ ID NO: 367594 - RNA, 19 nt, Artificial Sequence
  Description of Artificial Sequence: Synthetic oligonucleotide
caguacucgguucaguguu

SEQ ID NO: 367595 - RNA, 19 nt, Artificial Sequence
  Description of Artificial Sequence: Synthetic oligonucleotide
cuacacuuacugucuuugu

SEQ ID NO: 367596 - RNA, 19 nt, Artificial Sequence
  Description of Artificial Sequence: Synthetic oligonucleotide
cauucagcccaguaacauu

SEQ ID NO: 367597 - RNA, 19 nt, Artificial Sequence
  Description of Artificial Sequence: Synthetic oligonucleotide
ggguuaagacaggggucgg

SEQ ID NO: 367598 - RNA, 19 nt, Artificial Sequence
  Description of Artificial Sequence: Synthetic oligonucleotide
uuuguccgccgugcggcuc

SEQ ID NO: 367599 - RNA, 19 nt, Artificial Sequence
  Description of Artificial Sequence: Synthetic oligonucleotide
guaguacuuuugagucaac

SEQ ID NO: 367600 - RNA, 19 nt, Artificial Sequence
  Description of Artificial Sequence: Synthetic oligonucleotide
guuaggcauguacacuauu

SEQ ID NO: 367601 - RNA, 19 nt, Artificial Sequence
  Description of Artificial Sequence: Synthetic oligonucleotide
gauagguaacgaggacccu

SEQ ID NO: 367602 - RNA, 19 nt, Artificial Sequence
  Description of Artificial Sequence: Synthetic oligonucleotide
gguuugggaucauaaccau

SEQ ID NO: 367603 - RNA, 19 nt, Artificial Sequence
  Description of Artificial Sequence: Synthetic oligonucleotide
cuccguggcccggaccgcc

SEQ ID NO: 367604 - RNA, 19 nt, Artificial Sequence
  Description of Artificial Sequence: Synthetic oligonucleotide
accuaccuugcaguucuua

SEQ ID NO: 367605 - RNA, 19 nt, Artificial Sequence
  Description of Artificial Sequence: Synthetic oligonucleotide
ucuaggcuacaagcccauu

SEQ ID NO: 367606 - RNA, 19 nt, Artificial Sequence
  Description of Artificial Sequence: Synthetic oligonucleotide
cuuccggcuugaaaagcau

SEQ ID NO: 367607 - RNA, 19 nt, Artificial Sequence
  Description of Artificial Sequence: Synthetic oligonucleotide
acgacaccgggcgccccag

SEQ ID NO: 367608 - RNA, 19 nt, Artificial Sequence
  Description of Artificial Sequence: Synthetic oligonucleotide
cgguagaucuaaguaacca

SEQ ID NO: 367609 - RNA, 19 nt, Artificial Sequence
  Description of Artificial Sequence: Synthetic oligonucleotide
uacgcugguuaggcacaaa

SEQ ID NO: 367610 - RNA, 19 nt, Artificial Sequence
  Description of Artificial Sequence: Synthetic oligonucleotide
gaucuagguugcacuuagu

SEQ ID NO: 367611 - RNA, 19 nt, Artificial Sequence
  Description of Artificial Sequence: Synthetic oligonucleotide
gguggccuaauaccaugcu

SEQ ID NO: 367612 - RNA, 19 nt, Artificial Sequence
  Description of Artificial Sequence: Synthetic oligonucleotide
cacuacacuuacugucuuu

SEQ ID NO: 367613 - RNA, 19 nt, Artificial Sequence
  Description of Artificial Sequence: Synthetic oligonucleotide
ccggcuugaaaagcauuca

SEQ ID NO: 367614 - RNA, 19 nt, Artificial Sequence
  Description of Artificial Sequence: Synthetic oligonucleotide
acgcaucguuagaaccaaa

SEQ ID NO: 367615 - RNA, 19 nt, Artificial Sequence
  Description of Artificial Sequence: Synthetic oligonucleotide
gcacuuaguuguagguccu

SEQ ID NO: 367616 - RNA, 19 nt, Artificial Sequence
  Description of Artificial Sequence: Synthetic oligonucleotide
ggguaccuaccuugcaguu

SEQ ID NO: 367617 - RNA, 19 nt, Artificial Sequence
  Description of Artificial Sequence: Synthetic oligonucleotide
gccccgggcugcacgacac

SEQ ID NO: 367618 - RNA, 19 nt, Artificial Sequence
  Description of Artificial Sequence: Synthetic oligonucleotide
gcgcacuaacaagaucaua

SEQ ID NO: 367619 - RNA, 19 nt, Artificial Sequence
  Description of Artificial Sequence: Synthetic oligonucleotide
ggacuugguuaggcaugua

SEQ ID NO: 367620 - RNA, 19 nt, Artificial Sequence
  Description of Artificial Sequence: Synthetic oligonucleotide
cgccgucuccguggcccgg

SEQ ID NO: 367621 - RNA, 19 nt, Artificial Sequence
  Description of Artificial Sequence: Synthetic oligonucleotide
ccgcguccgcugacccgca

SEQ ID NO: 367622 - RNA, 19 nt, Artificial Sequence
  Description of Artificial Sequence: Synthetic oligonucleotide
cuggugcgucaagcucuuu

SEQ ID NO: 367623 - RNA, 19 nt, Artificial Sequence
  Description of Artificial Sequence: Synthetic oligonucleotide
gaagaaaccguacaaaacg

SEQ ID NO: 367624 - RNA, 19 nt, Artificial Sequence
  Description of Artificial Sequence: Synthetic oligonucleotide
ucuauguugaaucuaauca

SEQ ID NO: 367625 - RNA, 19 nt, Artificial Sequence
  Description of Artificial Sequence: Synthetic oligonucleotide
gauaugaugggucagaaca

SEQ ID NO: 367626 - RNA, 19 nt, Artificial Sequence
  Description of Artificial Sequence: Synthetic oligonucleotide
uauucacuaaagaacuucg

SEQ ID NO: 367627 - RNA, 19 nt, Artificial Sequence
  Description of Artificial Sequence: Synthetic oligonucleotide
cauauuagcgauuuccucc

SEQ ID NO: 367628 - RNA, 19 nt, Artificial Sequence
  Description of Artificial Sequence: Synthetic oligonucleotide
ugauucucgacacagguca

SEQ ID NO: 367629 - RNA, 19 nt, Artificial Sequence
  Description of Artificial Sequence: Synthetic oligonucleotide
aaguaguauagguggacac

SEQ ID NO: 367630 - RNA, 19 nt, Artificial Sequence
  Description of Artificial Sequence: Synthetic oligonucleotide
aaugaaugaacaaguacuc

SEQ ID NO: 367631 - RNA, 19 nt, Artificial Sequence
  Description of Artificial Sequence: Synthetic oligonucleotide
aaagcauaaaucgauccag

SEQ ID NO: 367632 - RNA, 19 nt, Artificial Sequence
  Description of Artificial Sequence: Synthetic oligonucleotide
uuaagcauugaugguaucg

SEQ ID NO: 367633 - RNA, 19 nt, Artificial Sequence
  Description of Artificial Sequence: Synthetic oligonucleotide
uguccuaagugucaggcag

SEQ ID NO: 367634 - RNA, 19 nt, Artificial Sequence
  Description of Artificial Sequence: Synthetic oligonucleotide
uaaacagcuccuaucaaug

SEQ ID NO: 367635 - RNA, 19 nt, Artificial Sequence
  Description of Artificial Sequence: Synthetic oligonucleotide
ugcugauucugaacgaugg

SEQ ID NO: 367636 - RNA, 19 nt, Artificial Sequence
  Description of Artificial Sequence: Synthetic oligonucleotide
aaaugaauuguguagucua

SEQ ID NO: 367637 - RNA, 19 nt, Artificial Sequence
  Description of Artificial Sequence: Synthetic oligonucleotide
cuaggcuaagucucgaugg

SEQ ID NO: 367638 - RNA, 19 nt, Artificial Sequence
  Description of Artificial Sequence: Synthetic oligonucleotide
uugucugaaggaaacuagg

SEQ ID NO: 367639 - RNA, 19 nt, Artificial Sequence
  Description of Artificial Sequence: Synthetic oligonucleotide
ugauuaauccuugaaggag

SEQ ID NO: 367640 - RNA, 19 nt, Artificial Sequence
  Description of Artificial Sequence: Synthetic oligonucleotide
gaaaccguacaaaacgugg

SEQ ID NO: 367641 - RNA, 19 nt, Artificial Sequence
  Description of Artificial Sequence: Synthetic oligonucleotide
caaagugaacgauaauugg

SEQ ID NO: 367642 - RNA, 19 nt, Artificial Sequence
  Description of Artificial Sequence: Synthetic oligonucleotide
augguaucggauaugaugg

SEQ ID NO: 367643 - RNA, 19 nt, Artificial Sequence
  Description of Artificial Sequence: Synthetic oligonucleotide
uuaggcaaguaaaugcacc

SEQ ID NO: 367644 - RNA, 19 nt, Artificial Sequence
  Description of Artificial Sequence: Synthetic oligonucleotide
uccugcauaacucaacugu

SEQ ID NO: 367645 - RNA, 19 nt, Artificial Sequence
  Description of Artificial Sequence: Synthetic oligonucleotide
cuauguugaaucuaaucac

SEQ ID NO: 367646 - RNA, 19 nt, Artificial Sequence
  Description of Artificial Sequence: Synthetic oligonucleotide
aaaccguacaaaacguggc

SEQ ID NO: 367647 - RNA, 19 nt, Artificial Sequence
  Description of Artificial Sequence: Synthetic oligonucleotide
uaagcguccaaauaacugu

SEQ ID NO: 367648 - RNA, 19 nt, Artificial Sequence
  Description of Artificial Sequence: Synthetic oligonucleotide
caucauugcaugcugacag

SEQ ID NO: 367649 - RNA, 19 nt, Artificial Sequence
  Description of Artificial Sequence: Synthetic oligonucleotide
agaguaagcguccaaauaa

SEQ ID NO: 367650 - RNA, 19 nt, Artificial Sequence
  Description of Artificial Sequence: Synthetic oligonucleotide
uuucaaugggcacacuuca

SEQ ID NO: 367651 - RNA, 19 nt, Artificial Sequence
  Description of Artificial Sequence: Synthetic oligonucleotide
aaaguauauccuaucaacu

SEQ ID NO: 367652 - RNA, 19 nt, Artificial Sequence
  Description of Artificial Sequence: Synthetic oligonucleotide
ucgaauuccacaguuagac

SEQ ID NO: 367653 - RNA, 19 nt, Artificial Sequence
  Description of Artificial Sequence: Synthetic oligonucleotide
aaagugaacgauaauugga

SEQ ID NO: 367654 - RNA, 19 nt, Artificial Sequence
  Description of Artificial Sequence: Synthetic oligonucleotide
aaguauauccuaucaacuu

SEQ ID NO: 367655 - RNA, 19 nt, Artificial Sequence
  Description of Artificial Sequence: Synthetic oligonucleotide
acaguuauuaggcaaguaa

SEQ ID NO: 367656 - RNA, 19 nt, Artificial Sequence
  Description of Artificial Sequence: Synthetic oligonucleotide
acgaaugccaguuuuccag

SEQ ID NO: 367657 - RNA, 19 nt, Artificial Sequence
  Description of Artificial Sequence: Synthetic oligonucleotide
ugucugaaggaaacuaggc

SEQ ID NO: 367658 - RNA, 19 nt, Artificial Sequence
  Description of Artificial Sequence: Synthetic oligonucleotide
uucuguuauucacuaaaga

SEQ ID NO: 367659 - RNA, 19 nt, Artificial Sequence
  Description of Artificial Sequence: Synthetic oligonucleotide
ugaaucuaaucacuuuaca

SEQ ID NO: 367660 - RNA, 19 nt, Artificial Sequence
  Description of Artificial Sequence: Synthetic oligonucleotide
agaauuccuggcgugaucg

SEQ ID NO: 367661 - RNA, 19 nt, Artificial Sequence
  Description of Artificial Sequence: Synthetic oligonucleotide
uugaaucuaaucacuuuac

SEQ ID NO: 367662 - RNA, 19 nt, Artificial Sequence
  Description of Artificial Sequence: Synthetic oligonucleotide
acaacguuaaguguccuuc

SEQ ID NO: 367663 - RNA, 19 nt, Artificial Sequence
  Description of Artificial Sequence: Synthetic oligonucleotide
gaaaccguggacagcaggg

SEQ ID NO: 367664 - RNA, 19 nt, Artificial Sequence
  Description of Artificial Sequence: Synthetic oligonucleotide
guuauuaggcaaguaaaug

SEQ ID NO: 367665 - RNA, 19 nt, Artificial Sequence
  Description of Artificial Sequence: Synthetic oligonucleotide
uuguacaagggaauaucug

SEQ ID NO: 367666 - RNA, 19 nt, Artificial Sequence
  Description of Artificial Sequence: Synthetic oligonucleotide
guggcaugaagugaaaccg

SEQ ID NO: 367667 - RNA, 19 nt, Artificial Sequence
  Description of Artificial Sequence: Synthetic oligonucleotide
ugaaaccguggacagcagg

SEQ ID NO: 367668 - RNA, 19 nt, Artificial Sequence
  Description of Artificial Sequence: Synthetic oligonucleotide
augauuaauccuugaagga

SEQ ID NO: 367669 - RNA, 19 nt, Artificial Sequence
  Description of Artificial Sequence: Synthetic oligonucleotide
caaaacguggcaugaagug

SEQ ID NO: 367670 - RNA, 19 nt, Artificial Sequence
  Description of Artificial Sequence: Synthetic oligonucleotide
agcaucauugcaugcugac

SEQ ID NO: 367671 - RNA, 19 nt, Artificial Sequence
  Description of Artificial Sequence: Synthetic oligonucleotide
uguagucuauguugaaucu

SEQ ID NO: 367672 - RNA, 19 nt, Artificial Sequence
  Description of Artificial Sequence: Synthetic oligonucleotide
aaguuucaauaaguugucg

SEQ ID NO: 367673 - RNA, 19 nt, Artificial Sequence
  Description of Artificial Sequence: Synthetic oligonucleotide
auauuagcgauuuccuccu

SEQ ID NO: 367674 - RNA, 19 nt, Artificial Sequence
  Description of Artificial Sequence: Synthetic oligonucleotide
aaaacguggcaugaaguga

SEQ ID NO: 367675 - RNA, 19 nt, Artificial Sequence
  Description of Artificial Sequence: Synthetic oligonucleotide
aaccguacaaaacguggca

SEQ ID NO: 367676 - RNA, 19 nt, Artificial Sequence
  Description of Artificial Sequence: Synthetic oligonucleotide
agugaaaccguggacagca

SEQ ID NO: 367677 - RNA, 19 nt, Artificial Sequence
  Description of Artificial Sequence: Synthetic oligonucleotide
ugcuagaagucgaacguga

SEQ ID NO: 367678 - RNA, 19 nt, Artificial Sequence
  Description of Artificial Sequence: Synthetic oligonucleotide
aauuccuggcgugaucggg

SEQ ID NO: 367679 - RNA, 19 nt, Artificial Sequence
  Description of Artificial Sequence: Synthetic oligonucleotide
ucgccuagaaauuccauuc

SEQ ID NO: 367680 - RNA, 19 nt, Artificial Sequence
  Description of Artificial Sequence: Synthetic oligonucleotide
aggaguuggaucaucuugg

SEQ ID NO: 367681 - RNA, 19 nt, Artificial Sequence
  Description of Artificial Sequence: Synthetic oligonucleotide
acuaggcuaagucucgaug

SEQ ID NO: 367682 - RNA, 19 nt, Artificial Sequence
  Description of Artificial Sequence: Synthetic oligonucleotide
caaugaaccgcuucugaug

SEQ ID NO: 367683 - RNA, 19 nt, Artificial Sequence
  Description of Artificial Sequence: Synthetic oligonucleotide
ucagguaccaaagcuuugc

SEQ ID NO: 367684 - RNA, 19 nt, Artificial Sequence
  Description of Artificial Sequence: Synthetic oligonucleotide
uaaagaguaagcguccaaa

SEQ ID NO: 367685 - RNA, 19 nt, Artificial Sequence
  Description of Artificial Sequence: Synthetic oligonucleotide
uaucggauaugauggguca

SEQ ID NO: 367686 - RNA, 19 nt, Artificial Sequence
  Description of Artificial Sequence: Synthetic oligonucleotide
guguagucuauguugaauc

SEQ ID NO: 367687 - RNA, 19 nt, Artificial Sequence
  Description of Artificial Sequence: Synthetic oligonucleotide
guugaaucuaaucacuuua

SEQ ID NO: 367688 - RNA, 19 nt, Artificial Sequence
  Description of Artificial Sequence: Synthetic oligonucleotide
gauuccagucauauaauuc

SEQ ID NO: 367689 - RNA, 19 nt, Artificial Sequence
  Description of Artificial Sequence: Synthetic oligonucleotide
aagaaaccguacaaaacgu

SEQ ID NO: 367690 - RNA, 19 nt, Artificial Sequence
  Description of Artificial Sequence: Synthetic oligonucleotide
auuaggcaaguaaaugcac

SEQ ID NO: 367691 - RNA, 19 nt, Artificial Sequence
  Description of Artificial Sequence: Synthetic oligonucleotide
uuugcuaggagguggcgaa

SEQ ID NO: 367692 - RNA, 19 nt, Artificial Sequence
  Description of Artificial Sequence: Synthetic oligonucleotide
aacgaaugccaguuuucca

SEQ ID NO: 367693 - RNA, 19 nt, Artificial Sequence
  Description of Artificial Sequence: Synthetic oligonucleotide
uuccagucauauaauucca

SEQ ID NO: 367694 - RNA, 19 nt, Artificial Sequence
  Description of Artificial Sequence: Synthetic oligonucleotide
ucaaugaaccgcuucugau

SEQ ID NO: 367695 - RNA, 19 nt, Artificial Sequence
  Description of Artificial Sequence: Synthetic oligonucleotide
cuaucaacuuguccaagug

SEQ ID NO: 367696 - RNA, 19 nt, Artificial Sequence
  Description of Artificial Sequence: Synthetic oligonucleotide
ucuuguacaagggaauauc

SEQ ID NO: 367697 - RNA, 19 nt, Artificial Sequence
  Description of Artificial Sequence: Synthetic oligonucleotide
acaguauagguucuagcau

SEQ ID NO: 367698 - RNA, 19 nt, Artificial Sequence
  Description of Artificial Sequence: Synthetic oligonucleotide
guaagcguccaaauaacug

SEQ ID NO: 367699 - RNA, 19 nt, Artificial Sequence
  Description of Artificial Sequence: Synthetic oligonucleotide
cugcauaacucaacugugc

SEQ ID NO: 367700 - RNA, 19 nt, Artificial Sequence
  Description of Artificial Sequence: Synthetic oligonucleotide
aacgauaauuggaaaagua

SEQ ID NO: 367701 - RNA, 19 nt, Artificial Sequence
  Description of Artificial Sequence: Synthetic oligonucleotide
uuucaauaaguugucgguc

SEQ ID NO: 367702 - RNA, 19 nt, Artificial Sequence
  Description of Artificial Sequence: Synthetic oligonucleotide
ucaaugcggacagagcuug

SEQ ID NO: 367703 - RNA, 19 nt, Artificial Sequence
  Description of Artificial Sequence: Synthetic oligonucleotide
ccaaagugaacgauaauug

SEQ ID NO: 367704 - RNA, 19 nt, Artificial Sequence
  Description of Artificial Sequence: Synthetic oligonucleotide
ugcauuaagcauugauggu

SEQ ID NO: 367705 - RNA, 19 nt, Artificial Sequence
  Description of Artificial Sequence: Synthetic oligonucleotide
aauugcucacgauccaguu

SEQ ID NO: 367706 - RNA, 19 nt, Artificial Sequence
  Description of Artificial Sequence: Synthetic oligonucleotide
uuaaagaguaagcguccaa

SEQ ID NO: 367707 - RNA, 19 nt, Artificial Sequence
  Description of Artificial Sequence: Synthetic oligonucleotide
cuguauuuccguucaauga

SEQ ID NO: 367708 - RNA, 19 nt, Artificial Sequence
  Description of Artificial Sequence: Synthetic oligonucleotide
uccguauuugggcugucga

SEQ ID NO: 367709 - RNA, 19 nt, Artificial Sequence
  Description of Artificial Sequence: Synthetic oligonucleotide
agaacuucguaacaacguu

SEQ ID NO: 367710 - RNA, 19 nt, Artificial Sequence
  Description of Artificial Sequence: Synthetic oligonucleotide
gguugaauugcucacgauc

SEQ ID NO: 367711 - RNA, 19 nt, Artificial Sequence
  Description of Artificial Sequence: Synthetic oligonucleotide
uguagaacuggagaaguuu

SEQ ID NO: 367712 - RNA, 19 nt, Artificial Sequence
  Description of Artificial Sequence: Synthetic oligonucleotide
auugcucacgauccaguug

SEQ ID NO: 367713 - RNA, 19 nt, Artificial Sequence
  Description of Artificial Sequence: Synthetic oligonucleotide
aacguuaaguguccuucau

SEQ ID NO: 367714 - RNA, 19 nt, Artificial Sequence
  Description of Artificial Sequence: Synthetic oligonucleotide
guugucggucuguauuugg

SEQ ID NO: 367715 - RNA, 19 nt, Artificial Sequence
  Description of Artificial Sequence: Synthetic oligonucleotide
auuaagcauugaugguauc

SEQ ID NO: 367716 - RNA, 19 nt, Artificial Sequence
  Description of Artificial Sequence: Synthetic oligonucleotide
aaacguggcaugaagugaa

SEQ ID NO: 367717 - RNA, 19 nt, Artificial Sequence
  Description of Artificial Sequence: Synthetic oligonucleotide
gugaacgauaauuggaaaa

SEQ ID NO: 367718 - RNA, 19 nt, Artificial Sequence
  Description of Artificial Sequence: Synthetic oligonucleotide
ugguaucggauaugauggg

SEQ ID NO: 367719 - RNA, 19 nt, Artificial Sequence
  Description of Artificial Sequence: Synthetic oligonucleotide
ugaaccgcuucugaugagc

SEQ ID NO: 367720 - RNA, 19 nt, Artificial Sequence
  Description of Artificial Sequence: Synthetic oligonucleotide
acgauaauuggaaaaguaa

SEQ ID NO: 367721 - RNA, 19 nt, Artificial Sequence
  Description of Artificial Sequence: Synthetic oligonucleotide
agacuaggaaacaaguagu

SEQ ID NO: 367722 - RNA, 19 nt, Artificial Sequence
  Description of Artificial Sequence: Synthetic oligonucleotide
ucguaacaacguuaagugu

SEQ ID NO: 367723 - RNA, 19 nt, Artificial Sequence
  Description of Artificial Sequence: Synthetic oligonucleotide
ccuaucaaugcuucaaaac

SEQ ID NO: 367724 - RNA, 19 nt, Artificial Sequence
  Description of Artificial Sequence: Synthetic oligonucleotide
aguaguauagguggacacu

SEQ ID NO: 367725 - RNA, 19 nt, Artificial Sequence
  Description of Artificial Sequence: Synthetic oligonucleotide
uccgguagguugccaagcc

SEQ ID NO: 367726 - RNA, 19 nt, Artificial Sequence
  Description of Artificial Sequence: Synthetic oligonucleotide
augcucuugcuagaagucg

SEQ ID NO: 367727 - RNA, 19 nt, Artificial Sequence
  Description of Artificial Sequence: Synthetic oligonucleotide
uguguagucuauguugaau

SEQ ID NO: 367728 - RNA, 19 nt, Artificial Sequence
  Description of Artificial Sequence: Synthetic oligonucleotide
uuauggagucgccuagaaa

SEQ ID NO: 367729 - RNA, 19 nt, Artificial Sequence
  Description of Artificial Sequence: Synthetic oligonucleotide
ugggucuccugcauaacuc

SEQ ID NO: 367730 - RNA, 19 nt, Artificial Sequence
  Description of Artificial Sequence: Synthetic oligonucleotide
uauauccuaucaacuuguc

SEQ ID NO: 367731 - RNA, 19 nt, Artificial Sequence
  Description of Artificial Sequence: Synthetic oligonucleotide
cguaacaacguuaaguguc

SEQ ID NO: 367732 - RNA, 19 nt, Artificial Sequence
  Description of Artificial Sequence: Synthetic oligonucleotide
gauuaauccuugaaggagu

SEQ ID NO: 367733 - RNA, 19 nt, Artificial Sequence
  Description of Artificial Sequence: Synthetic oligonucleotide
uaagucucgaugggcagca

SEQ ID NO: 367734 - RNA, 19 nt, Artificial Sequence
  Description of Artificial Sequence: Synthetic oligonucleotide
auuaaagaguaagcgucca

SEQ ID NO: 367735 - RNA, 19 nt, Artificial Sequence
  Description of Artificial Sequence: Synthetic oligonucleotide
aagguccgggucauuaaag

SEQ ID NO: 367736 - RNA, 19 nt, Artificial Sequence
  Description of Artificial Sequence: Synthetic oligonucleotide
aggguugaauugcucacga

SEQ ID NO: 367737 - RNA, 19 nt, Artificial Sequence
  Description of Artificial Sequence: Synthetic oligonucleotide
auuauggagucgccuagaa

SEQ ID NO: 367738 - RNA, 19 nt, Artificial Sequence
  Description of Artificial Sequence: Synthetic oligonucleotide
gaguaagcguccaaauaac

SEQ ID NO: 367739 - RNA, 19 nt, Artificial Sequence
  Description of Artificial Sequence: Synthetic oligonucleotide
acgauggcaguccgguagg

SEQ ID NO: 367740 - RNA, 19 nt, Artificial Sequence
  Description of Artificial Sequence: Synthetic oligonucleotide
ucggucuguauuuggcucu

SEQ ID NO: 367741 - RNA, 19 nt, Artificial Sequence
  Description of Artificial Sequence: Synthetic oligonucleotide
aggcuaagucucgaugggc

SEQ ID NO: 367742 - RNA, 19 nt, Artificial Sequence
  Description of Artificial Sequence: Synthetic oligonucleotide
aucagaacgaaugccaguu

SEQ ID NO: 367743 - RNA, 19 nt, Artificial Sequence
  Description of Artificial Sequence: Synthetic oligonucleotide
acaguuacuucucgucgca

SEQ ID NO: 367744 - RNA, 19 nt, Artificial Sequence
  Description of Artificial Sequence: Synthetic oligonucleotide
uauuugcuaggagguggcg

SEQ ID NO: 367745 - RNA, 19 nt, Artificial Sequence
  Description of Artificial Sequence: Synthetic oligonucleotide
uucucgucgcaucguauuc

SEQ ID NO: 367746 - RNA, 19 nt, Artificial Sequence
  Description of Artificial Sequence: Synthetic oligonucleotide
ugcuaccuuggcuugaguu

SEQ ID NO: 367747 - RNA, 19 nt, Artificial Sequence
  Description of Artificial Sequence: Synthetic oligonucleotide
gcguaucccaaagugaacg

SEQ ID NO: 367748 - RNA, 19 nt, Artificial Sequence
  Description of Artificial Sequence: Synthetic oligonucleotide
guagaacuggagaaguuuc

SEQ ID NO: 367749 - RNA, 19 nt, Artificial Sequence
  Description of Artificial Sequence: Synthetic oligonucleotide
uggaucaucuuggccgagg

SEQ ID NO: 367750 - RNA, 19 nt, Artificial Sequence
  Description of Artificial Sequence: Synthetic oligonucleotide
aacuaggcuaagucucgau

SEQ ID NO: 367751 - RNA, 19 nt, Artificial Sequence
  Description of Artificial Sequence: Synthetic oligonucleotide
agaaaccguacaaaacgug

SEQ ID NO: 367752 - RNA, 19 nt, Artificial Sequence
  Description of Artificial Sequence: Synthetic oligonucleotide
uccaauccugguucaaaau

SEQ ID NO: 367753 - RNA, 19 nt, Artificial Sequence
  Description of Artificial Sequence: Synthetic oligonucleotide
uugcuagaagucgaacgug

SEQ ID NO: 367754 - RNA, 19 nt, Artificial Sequence
  Description of Artificial Sequence: Synthetic oligonucleotide
ucaacuuguccaagugcau

SEQ ID NO: 367755 - RNA, 19 nt, Artificial Sequence
  Description of Artificial Sequence: Synthetic oligonucleotide
uggagcauauuagcgauuu

SEQ ID NO: 367756 - RNA, 19 nt, Artificial Sequence
  Description of Artificial Sequence: Synthetic oligonucleotide
cacuggagcauauuagcga

SEQ ID NO: 367757 - RNA, 19 nt, Artificial Sequence
  Description of Artificial Sequence: Synthetic oligonucleotide
ucugcuaccuuggcuugag

SEQ ID NO: 367758 - RNA, 19 nt, Artificial Sequence
  Description of Artificial Sequence: Synthetic oligonucleotide
ucacgauccaguugaucaa

SEQ ID NO: 367759 - RNA, 19 nt, Artificial Sequence
  Description of Artificial Sequence: Synthetic oligonucleotide
ugcggacagagcuugguuu

SEQ ID NO: 367760 - RNA, 19 nt, Artificial Sequence
  Description of Artificial Sequence: Synthetic oligonucleotide
acuaggaaacaaguaguau

SEQ ID NO: 367761 - RNA, 19 nt, Artificial Sequence
  Description of Artificial Sequence: Synthetic oligonucleotide
ucuugucuguauuuccguu

SEQ ID NO: 367762 - RNA, 19 nt, Artificial Sequence
  Description of Artificial Sequence: Synthetic oligonucleotide
cuaagucucgaugggcagc

SEQ ID NO: 367763 - RNA, 19 nt, Artificial Sequence
  Description of Artificial Sequence: Synthetic oligonucleotide
caauuggccauugcaugcc

SEQ ID NO: 367764 - RNA, 19 nt, Artificial Sequence
  Description of Artificial Sequence: Synthetic oligonucleotide
cauuaugauuaauccuuga

SEQ ID NO: 367765 - RNA, 19 nt, Artificial Sequence
  Description of Artificial Sequence: Synthetic oligonucleotide
aguccgguagguugccaag

SEQ ID NO: 367766 - RNA, 19 nt, Artificial Sequence
  Description of Artificial Sequence: Synthetic oligonucleotide
guaucggauaugauggguc

SEQ ID NO: 367767 - RNA, 19 nt, Artificial Sequence
  Description of Artificial Sequence: Synthetic oligonucleotide
cuugcuagaagucgaacgu

SEQ ID NO: 367768 - RNA, 19 nt, Artificial Sequence
  Description of Artificial Sequence: Synthetic oligonucleotide
guauuuccguucaaugaac

SEQ ID NO: 367769 - RNA, 19 nt, Artificial Sequence
  Description of Artificial Sequence: Synthetic oligonucleotide
gaaccgcuucugaugagcc

SEQ ID NO: 367770 - RNA, 19 nt, Artificial Sequence
  Description of Artificial Sequence: Synthetic oligonucleotide
aguaagcguccaaauaacu

SEQ ID NO: 367771 - RNA, 19 nt, Artificial Sequence
  Description of Artificial Sequence: Synthetic oligonucleotide
ggaagaaaccguacaaaac

SEQ ID NO: 367772 - RNA, 19 nt, Artificial Sequence
  Description of Artificial Sequence: Synthetic oligonucleotide
ggaaaguauauccuaucaa

SEQ ID NO: 367773 - RNA, 19 nt, Artificial Sequence
  Description of Artificial Sequence: Synthetic oligonucleotide
ugaucgggauucaucccaa

SEQ ID NO: 367774 - RNA, 19 nt, Artificial Sequence
  Description of Artificial Sequence: Synthetic oligonucleotide
aaacuaggcuaagucucga

SEQ ID NO: 367775 - RNA, 19 nt, Artificial Sequence
  Description of Artificial Sequence: Synthetic oligonucleotide
ugguuucgugccaggguug

SEQ ID NO: 367776 - RNA, 19 nt, Artificial Sequence
  Description of Artificial Sequence: Synthetic oligonucleotide
ugucuccguauuugggcug

SEQ ID NO: 367777 - RNA, 19 nt, Artificial Sequence
  Description of Artificial Sequence: Synthetic oligonucleotide
auaaguugucggucuguau

SEQ ID NO: 367778 - RNA, 19 nt, Artificial Sequence
  Description of Artificial Sequence: Synthetic oligonucleotide
aagucgaacgugaguaaaa

SEQ ID NO: 367779 - RNA, 19 nt, Artificial Sequence
  Description of Artificial Sequence: Synthetic oligonucleotide
cccacuggagcauauuagc

SEQ ID NO: 367780 - RNA, 19 nt, Artificial Sequence
  Description of Artificial Sequence: Synthetic oligonucleotide
cucgaugggcagcagucac

SEQ ID NO: 367781 - RNA, 19 nt, Artificial Sequence
  Description of Artificial Sequence: Synthetic oligonucleotide
auucacuaaagaacuucgu

SEQ ID NO: 367782 - RNA, 19 nt, Artificial Sequence
  Description of Artificial Sequence: Synthetic oligonucleotide
gaacuuuccugucuccgua

SEQ ID NO: 367783 - RNA, 19 nt, Artificial Sequence
  Description of Artificial Sequence: Synthetic oligonucleotide
uucgugccaggguugguaa

SEQ ID NO: 367784 - RNA, 19 nt, Artificial Sequence
  Description of Artificial Sequence: Synthetic oligonucleotide
acaacggucuuggaaagua

SEQ ID NO: 367785 - RNA, 19 nt, Artificial Sequence
  Description of Artificial Sequence: Synthetic oligonucleotide
gcauuauggagucgccuag

SEQ ID NO: 367786 - RNA, 19 nt, Artificial Sequence
  Description of Artificial Sequence: Synthetic oligonucleotide
gauucucgacacaggucag

SEQ ID NO: 367787 - RNA, 19 nt, Artificial Sequence
  Description of Artificial Sequence: Synthetic oligonucleotide
ccugcauaacucaacugug

SEQ ID NO: 367788 - RNA, 19 nt, Artificial Sequence
  Description of Artificial Sequence: Synthetic oligonucleotide
gaagucgaacgugaguaaa

SEQ ID NO: 367789 - RNA, 19 nt, Artificial Sequence
  Description of Artificial Sequence: Synthetic oligonucleotide
caaguaguauagguggaca

SEQ ID NO: 367790 - RNA, 19 nt, Artificial Sequence
  Description of Artificial Sequence: Synthetic oligonucleotide
ucucgucgcaucguauucu

SEQ ID NO: 367791 - RNA, 19 nt, Artificial Sequence
  Description of Artificial Sequence: Synthetic oligonucleotide
ggaucaucuuggccgaggc

SEQ ID NO: 367792 - RNA, 19 nt, Artificial Sequence
  Description of Artificial Sequence: Synthetic oligonucleotide
ucagaacgaaugccaguuu

SEQ ID NO: 367793 - RNA, 19 nt, Artificial Sequence
  Description of Artificial Sequence: Synthetic oligonucleotide
uggagucgccuagaaauuc

SEQ ID NO: 367794 - RNA, 19 nt, Artificial Sequence
  Description of Artificial Sequence: Synthetic oligonucleotide
gaacuucguaacaacguua

SEQ ID NO: 367795 - RNA, 19 nt, Artificial Sequence
  Description of Artificial Sequence: Synthetic oligonucleotide
aucggauaugaugggucag

SEQ ID NO: 367796 - RNA, 19 nt, Artificial Sequence
  Description of Artificial Sequence: Synthetic oligonucleotide
uccaaguaaacagcuccua

SEQ ID NO: 367797 - RNA, 19 nt, Artificial Sequence
  Description of Artificial Sequence: Synthetic oligonucleotide
uggggucguuccaauccug

SEQ ID NO: 367798 - RNA, 19 nt, Artificial Sequence
  Description of Artificial Sequence: Synthetic oligonucleotide
cauuaagcauugaugguau

SEQ ID NO: 367799 - RNA, 19 nt, Artificial Sequence
  Description of Artificial Sequence: Synthetic oligonucleotide
gcuaagucucgaugggcag

SEQ ID NO: 367800 - RNA, 19 nt, Artificial Sequence
  Description of Artificial Sequence: Synthetic oligonucleotide
caacguuaaguguccuuca

SEQ ID NO: 367801 - RNA, 19 nt, Artificial Sequence
  Description of Artificial Sequence: Synthetic oligonucleotide
auguugaaucuaaucacuu

SEQ ID NO: 367802 - RNA, 19 nt, Artificial Sequence
  Description of Artificial Sequence: Synthetic oligonucleotide
aguugucggucuguauuug

SEQ ID NO: 367803 - RNA, 19 nt, Artificial Sequence
  Description of Artificial Sequence: Synthetic oligonucleotide
uauuagcgauuuccuccuc

SEQ ID NO: 367804 - RNA, 19 nt, Artificial Sequence
  Description of Artificial Sequence: Synthetic oligonucleotide
auuaggguguuaauuccuu

SEQ ID NO: 367805 - RNA, 19 nt, Artificial Sequence
  Description of Artificial Sequence: Synthetic oligonucleotide
augaaccgcuucugaugag

SEQ ID NO: 367806 - RNA, 19 nt, Artificial Sequence
  Description of Artificial Sequence: Synthetic oligonucleotide
ggcaugaagugaaaccgug

SEQ ID NO: 367807 - RNA, 19 nt, Artificial Sequence
  Description of Artificial Sequence: Synthetic oligonucleotide
gcugauucugaacgauggc

SEQ ID NO: 367808 - RNA, 19 nt, Artificial Sequence
  Description of Artificial Sequence: Synthetic oligonucleotide
ggauaugaugggucagaac

SEQ ID NO: 367809 - RNA, 19 nt, Artificial Sequence
  Description of Artificial Sequence: Synthetic oligonucleotide
caaugcggacagagcuugg

SEQ ID NO: 367810 - RNA, 19 nt, Artificial Sequence
  Description of Artificial Sequence: Synthetic oligonucleotide
accguacaaaacguggcau

SEQ ID NO: 367811 - RNA, 19 nt, Artificial Sequence
  Description of Artificial Sequence: Synthetic oligonucleotide
gcauuaagcauugauggua

SEQ ID NO: 367812 - RNA, 19 nt, Artificial Sequence
  Description of Artificial Sequence: Synthetic oligonucleotide
cuccguauuugggcugucg

SEQ ID NO: 367813 - RNA, 19 nt, Artificial Sequence
  Description of Artificial Sequence: Synthetic oligonucleotide
auuccuggcgugaucggga

SEQ ID NO: 367814 - RNA, 19 nt, Artificial Sequence
  Description of Artificial Sequence: Synthetic oligonucleotide
ucccaaagugaacgauaau

SEQ ID NO: 367815 - RNA, 19 nt, Artificial Sequence
  Description of Artificial Sequence: Synthetic oligonucleotide
gguuucgugccaggguugg

SEQ ID NO: 367816 - RNA, 19 nt, Artificial Sequence
  Description of Artificial Sequence: Synthetic oligonucleotide
gcauugaugguaucggaua

SEQ ID NO: 367817 - RNA, 19 nt, Artificial Sequence
  Description of Artificial Sequence: Synthetic oligonucleotide
ggagucgccuagaaauucc

SEQ ID NO: 367818 - RNA, 19 nt, Artificial Sequence
  Description of Artificial Sequence: Synthetic oligonucleotide
gaauugcucacgauccagu

SEQ ID NO: 367819 - RNA, 19 nt, Artificial Sequence
  Description of Artificial Sequence: Synthetic oligonucleotide
guccuaagugucaggcagc

SEQ ID NO: 367820 - RNA, 19 nt, Artificial Sequence
  Description of Artificial Sequence: Synthetic oligonucleotide
gcuacuuagcuccacaguu

SEQ ID NO: 367821 - RNA, 19 nt, Artificial Sequence
  Description of Artificial Sequence: Synthetic oligonucleotide
gagucgccuagaaauucca

SEQ ID NO: 367822 - RNA, 19 nt, Artificial Sequence
  Description of Artificial Sequence: Synthetic oligonucleotide
augccggaggucugauucu

SEQ ID NO: 367823 - RNA, 19 nt, Artificial Sequence
  Description of Artificial Sequence: Synthetic oligonucleotide
cauugcaugccggaggucu

SEQ ID NO: 367824 - RNA, 19 nt, Artificial Sequence
  Description of Artificial Sequence: Synthetic oligonucleotide
cuggcuacuuagcuccaca

SEQ ID NO: 367825 - RNA, 19 nt, Artificial Sequence
  Description of Artificial Sequence: Synthetic oligonucleotide
gcuugguuucgugccaggg

SEQ ID NO: 367826 - RNA, 19 nt, Artificial Sequence
  Description of Artificial Sequence: Synthetic oligonucleotide
aggcgugacauaauauuua

SEQ ID NO: 367827 - RNA, 19 nt, Artificial Sequence
  Description of Artificial Sequence: Synthetic oligonucleotide
ggcuaagucucgaugggca

SEQ ID NO: 367828 - RNA, 19 nt, Artificial Sequence
  Description of Artificial Sequence: Synthetic oligonucleotide
gucgaauuccacaguuaga

SEQ ID NO: 367829 - RNA, 19 nt, Artificial Sequence
  Description of Artificial Sequence: Synthetic oligonucleotide
augcggacagagcuugguu

SEQ ID NO: 367830 - RNA, 19 nt, Artificial Sequence
  Description of Artificial Sequence: Synthetic oligonucleotide
uuccuggcgugaucgggau

SEQ ID NO: 367831 - RNA, 19 nt, Artificial Sequence
  Description of Artificial Sequence: Synthetic oligonucleotide
auugcaugccggaggucug

SEQ ID NO: 367832 - RNA, 19 nt, Artificial Sequence
  Description of Artificial Sequence: Synthetic oligonucleotide
gccaggguugguaacaauc

SEQ ID NO: 367833 - RNA, 19 nt, Artificial Sequence
  Description of Artificial Sequence: Synthetic oligonucleotide
guccgguagguugccaagc

SEQ ID NO: 367834 - RNA, 19 nt, Artificial Sequence
  Description of Artificial Sequence: Synthetic oligonucleotide
guuccaauccugguucaaa

SEQ ID NO: 367835 - RNA, 19 nt, Artificial Sequence
  Description of Artificial Sequence: Synthetic oligonucleotide
uugcaugccggaggucuga

SEQ ID NO: 367836 - RNA, 19 nt, Artificial Sequence
  Description of Artificial Sequence: Synthetic oligonucleotide
cuugguuucgugccagggu

SEQ ID NO: 367837 - RNA, 19 nt, Artificial Sequence
  Description of Artificial Sequence: Synthetic oligonucleotide
cauuauggagucgccuaga

SEQ ID NO: 367838 - RNA, 19 nt, Artificial Sequence
  Description of Artificial Sequence: Synthetic oligonucleotide
gagucuuguacaagggaau

SEQ ID NO: 367839 - RNA, 19 nt, Artificial Sequence
  Description of Artificial Sequence: Synthetic oligonucleotide
gucgccuagaaauuccauu

SEQ ID NO: 367840 - RNA, 19 nt, Artificial Sequence
  Description of Artificial Sequence: Synthetic oligonucleotide
cugucuccguauuugggcu

SEQ ID NO: 367841 - RNA, 19 nt, Artificial Sequence
  Description of Artificial Sequence: Synthetic oligonucleotide
auuacuccaauggccucuu

SEQ ID NO: 367842 - RNA, 19 nt, Artificial Sequence
  Description of Artificial Sequence: Synthetic oligonucleotide
cagagaauuccuggcguga

SEQ ID NO: 367843 - RNA, 19 nt, Artificial Sequence
  Description of Artificial Sequence: Synthetic oligonucleotide
ugguaacaaucaugccuuu

SEQ ID NO: 367844 - RNA, 19 nt, Artificial Sequence
  Description of Artificial Sequence: Synthetic oligonucleotide
uuacgucuucagccucauc

SEQ ID NO: 367845 - RNA, 19 nt, Artificial Sequence
  Description of Artificial Sequence: Synthetic oligonucleotide
ccuagaaauuccauucucu

SEQ ID NO: 367846 - RNA, 19 nt, Artificial Sequence
  Description of Artificial Sequence: Synthetic oligonucleotide
ccuggcgugaucgggauuc

SEQ ID NO: 367847 - RNA, 19 nt, Artificial Sequence
  Description of Artificial Sequence: Synthetic oligonucleotide
cugucgaauuccacaguua

SEQ ID NO: 367848 - RNA, 19 nt, Artificial Sequence
  Description of Artificial Sequence: Synthetic oligonucleotide
uccguucaaugaaccgcuu

SEQ ID NO: 367849 - RNA, 19 nt, Artificial Sequence
  Description of Artificial Sequence: Synthetic oligonucleotide
gaucgggauucaucccaaa

SEQ ID NO: 367850 - RNA, 19 nt, Artificial Sequence
  Description of Artificial Sequence: Synthetic oligonucleotide
accuuucauuaugauuaau

SEQ ID NO: 367851 - RNA, 19 nt, Artificial Sequence
  Description of Artificial Sequence: Synthetic oligonucleotide
ggcgugacauaauauuuau

SEQ ID NO: 367852 - RNA, 19 nt, Artificial Sequence
  Description of Artificial Sequence: Synthetic oligonucleotide
caucuggggaaaguuauau

SEQ ID NO: 367853 - RNA, 19 nt, Artificial Sequence
  Description of Artificial Sequence: Synthetic oligonucleotide
ugcucacgauccaguugau

SEQ ID NO: 367854 - RNA, 19 nt, Artificial Sequence
  Description of Artificial Sequence: Synthetic oligonucleotide
ggagaggauaauggagcca

SEQ ID NO: 367855 - RNA, 19 nt, Artificial Sequence
  Description of Artificial Sequence: Synthetic oligonucleotide
cuucucgucgcaucguauu

SEQ ID NO: 367856 - RNA, 19 nt, Artificial Sequence
  Description of Artificial Sequence: Synthetic oligonucleotide
ccacucaagcuccucccac

SEQ ID NO: 367857 - RNA, 19 nt, Artificial Sequence
  Description of Artificial Sequence: Synthetic oligonucleotide
gucuuguacaagggaauau

SEQ ID NO: 367858 - RNA, 19 nt, Artificial Sequence
  Description of Artificial Sequence: Synthetic oligonucleotide
cacucaagcuccucccacu

SEQ ID NO: 367859 - RNA, 19 nt, Artificial Sequence
  Description of Artificial Sequence: Synthetic oligonucleotide
ccguucaaugaaccgcuuc

SEQ ID NO: 367860 - RNA, 19 nt, Artificial Sequence
  Description of Artificial Sequence: Synthetic oligonucleotide
gcgauuuccuccucaggua

SEQ ID NO: 367861 - RNA, 19 nt, Artificial Sequence
  Description of Artificial Sequence: Synthetic oligonucleotide
ccuuuaagauuccagucau

SEQ ID NO: 367862 - RNA, 19 nt, Artificial Sequence
  Description of Artificial Sequence: Synthetic oligonucleotide
gguggcgaaguuucacaua

SEQ ID NO: 367863 - RNA, 19 nt, Artificial Sequence
  Description of Artificial Sequence: Synthetic oligonucleotide
cacaguuauuaggcaagua

SEQ ID NO: 367864 - RNA, 19 nt, Artificial Sequence
  Description of Artificial Sequence: Synthetic oligonucleotide
ggauggccccacugucugc

SEQ ID NO: 367865 - RNA, 19 nt, Artificial Sequence
  Description of Artificial Sequence: Synthetic oligonucleotide
uccuggcgugaucgggauu

SEQ ID NO: 367866 - RNA, 19 nt, Artificial Sequence
  Description of Artificial Sequence: Synthetic oligonucleotide
cugcaccgcagcagguaga

SEQ ID NO: 367867 - RNA, 19 nt, Artificial Sequence
  Description of Artificial Sequence: Synthetic oligonucleotide
cugcauuauggagucgccu

SEQ ID NO: 367868 - RNA, 19 nt, Artificial Sequence
  Description of Artificial Sequence: Synthetic oligonucleotide
cgaauuccacaguuagaca

SEQ ID NO: 367869 - RNA, 19 nt, Artificial Sequence
  Description of Artificial Sequence: Synthetic oligonucleotide
cuagggucaggugguuaaa

SEQ ID NO: 367870 - RNA, 19 nt, Artificial Sequence
  Description of Artificial Sequence: Synthetic oligonucleotide
uggcgugaucgggauucau

SEQ ID NO: 367871 - RNA, 19 nt, Artificial Sequence
  Description of Artificial Sequence: Synthetic oligonucleotide
ucuccguauuugggcuguc

SEQ ID NO: 367872 - RNA, 19 nt, Artificial Sequence
  Description of Artificial Sequence: Synthetic oligonucleotide
ccguauuugggcugucgaa

SEQ ID NO: 367873 - RNA, 19 nt, Artificial Sequence
  Description of Artificial Sequence: Synthetic oligonucleotide
cuaggagguggcgaaguuu

SEQ ID NO: 367874 - RNA, 19 nt, Artificial Sequence
  Description of Artificial Sequence: Synthetic oligonucleotide
cucaacugugcagggcgua

SEQ ID NO: 367875 - RNA, 19 nt, Artificial Sequence
  Description of Artificial Sequence: Synthetic oligonucleotide
cucgucgcaucguauucuu

SEQ ID NO: 367876 - RNA, 19 nt, Artificial Sequence
  Description of Artificial Sequence: Synthetic oligonucleotide
guagguugccaagccuccu

SEQ ID NO: 367877 - RNA, 19 nt, Artificial Sequence
  Description of Artificial Sequence: Synthetic oligonucleotide
ggcaguccgguagguugcc

SEQ ID NO: 367878 - RNA, 19 nt, Artificial Sequence
  Description of Artificial Sequence: Synthetic oligonucleotide
cuggcgugaucgggauuca

SEQ ID NO: 367879 - RNA, 19 nt, Artificial Sequence
  Description of Artificial Sequence: Synthetic oligonucleotide
ccguauuuucuggagcgcu

SEQ ID NO: 367880 - RNA, 19 nt, Artificial Sequence
  Description of Artificial Sequence: Synthetic oligonucleotide
guuucgugccaggguuggu

SEQ ID NO: 367881 - RNA, 19 nt, Artificial Sequence
  Description of Artificial Sequence: Synthetic oligonucleotide
caguuacuucucgucgcau

SEQ ID NO: 367882 - RNA, 19 nt, Artificial Sequence
  Description of Artificial Sequence: Synthetic oligonucleotide
ccaaaaggucugccagugu

SEQ ID NO: 367883 - RNA, 19 nt, Artificial Sequence
  Description of Artificial Sequence: Synthetic oligonucleotide
cugcuaccuuggcuugagu

SEQ ID NO: 367884 - RNA, 19 nt, Artificial Sequence
  Description of Artificial Sequence: Synthetic oligonucleotide
ccgaggcgugacauaauau

SEQ ID NO: 367885 - RNA, 19 nt, Artificial Sequence
  Description of Artificial Sequence: Synthetic oligonucleotide
gcgugacauaauauuuauu

SEQ ID NO: 367886 - RNA, 19 nt, Artificial Sequence
  Description of Artificial Sequence: Synthetic oligonucleotide
ccauugcaugccggagguc

SEQ ID NO: 367887 - RNA, 19 nt, Artificial Sequence
  Description of Artificial Sequence: Synthetic oligonucleotide
ccgguagguugccaagccu

SEQ ID NO: 367888 - RNA, 19 nt, Artificial Sequence
  Description of Artificial Sequence: Synthetic oligonucleotide
uguuaaucagcuaagggag

SEQ ID NO: 367889 - RNA, 19 nt, Artificial Sequence
  Description of Artificial Sequence: Synthetic oligonucleotide
uguacuugugcuaaaauug

SEQ ID NO: 367890 - RNA, 19 nt, Artificial Sequence
  Description of Artificial Sequence: Synthetic oligonucleotide
uguaacauuaggcugagac

SEQ ID NO: 367891 - RNA, 19 nt, Artificial Sequence
  Description of Artificial Sequence: Synthetic oligonucleotide
uuaauugaauuucucaaug

SEQ ID NO: 367892 - RNA, 19 nt, Artificial Sequence
  Description of Artificial Sequence: Synthetic oligonucleotide
aagaaggcacaauaccugc

SEQ ID NO: 367893 - RNA, 19 nt, Artificial Sequence
  Description of Artificial Sequence: Synthetic oligonucleotide
acuuacuucacccuuaaca

SEQ ID NO: 367894 - RNA, 19 nt, Artificial Sequence
  Description of Artificial Sequence: Synthetic oligonucleotide
ucuuccaauccuuagcagg

SEQ ID NO: 367895 - RNA, 19 nt, Artificial Sequence
  Description of Artificial Sequence: Synthetic oligonucleotide
uuauacugcgcucuagccg

SEQ ID NO: 367896 - RNA, 19 nt, Artificial Sequence
  Description of Artificial Sequence: Synthetic oligonucleotide
gagucaauuugucagcugg

SEQ ID NO: 367897 - RNA, 19 nt, Artificial Sequence
  Description of Artificial Sequence: Synthetic oligonucleotide
gaauuuugcugccaaaacc

SEQ ID NO: 367898 - RNA, 19 nt, Artificial Sequence
  Description of Artificial Sequence: Synthetic oligonucleotide
gaugggaucacuguggucc

SEQ ID NO: 367899 - RNA, 19 nt, Artificial Sequence
  Description of Artificial Sequence: Synthetic oligonucleotide
aaggccauguaacauuagg

SEQ ID NO: 367900 - RNA, 19 nt, Artificial Sequence
  Description of Artificial Sequence: Synthetic oligonucleotide
aaugcguuguacuugugcu

SEQ ID NO: 367901 - RNA, 19 nt, Artificial Sequence
  Description of Artificial Sequence: Synthetic oligonucleotide
uugggagucaauuugucag

SEQ ID NO: 367902 - RNA, 19 nt, Artificial Sequence
  Description of Artificial Sequence: Synthetic oligonucleotide
uaauugacccgccacaggc

SEQ ID NO: 367903 - RNA, 19 nt, Artificial Sequence
  Description of Artificial Sequence: Synthetic oligonucleotide
ucaagugguaucacgaucu

SEQ ID NO: 367904 - RNA, 19 nt, Artificial Sequence
  Description of Artificial Sequence: Synthetic oligonucleotide
gucacuucuaguuccaagg

SEQ ID NO: 367905 - RNA, 19 nt, Artificial Sequence
  Description of Artificial Sequence: Synthetic oligonucleotide
aguugcuuaauugacccgc

SEQ ID NO: 367906 - RNA, 19 nt, Artificial Sequence
  Description of Artificial Sequence: Synthetic oligonucleotide
guaacauuaggcugagacg

SEQ ID NO: 367907 - RNA, 19 nt, Artificial Sequence
  Description of Artificial Sequence: Synthetic oligonucleotide
cuucaugugacucucuagc

SEQ ID NO: 367908 - RNA, 19 nt, Artificial Sequence
  Description of Artificial Sequence: Synthetic oligonucleotide
agagauauucucuuucaug

SEQ ID NO: 367909 - RNA, 19 nt, Artificial Sequence
  Description of Artificial Sequence: Synthetic oligonucleotide
auugacuccugcaagcugc

SEQ ID NO: 367910 - RNA, 19 nt, Artificial Sequence
  Description of Artificial Sequence: Synthetic oligonucleotide
agcagcugaacgcauggcc

SEQ ID NO: 367911 - RNA, 19 nt, Artificial Sequence
  Description of Artificial Sequence: Synthetic oligonucleotide
aacaaugcguuguacuugu

SEQ ID NO: 367912 - RNA, 19 nt, Artificial Sequence
  Description of Artificial Sequence: Synthetic oligonucleotide
ucuugguugugccauagcu

SEQ ID NO: 367913 - RNA, 19 nt, Artificial Sequence
  Description of Artificial Sequence: Synthetic oligonucleotide
uuagagauauucucuuuca

SEQ ID NO: 367914 - RNA, 19 nt, Artificial Sequence
  Description of Artificial Sequence: Synthetic oligonucleotide
uuucaucccuuauacugcg

SEQ ID NO: 367915 - RNA, 19 nt, Artificial Sequence
  Description of Artificial Sequence: Synthetic oligonucleotide
acaaucaguagaccaccgc

SEQ ID NO: 367916 - RNA, 19 nt, Artificial Sequence
  Description of Artificial Sequence: Synthetic oligonucleotide
gauuugaguagcuuagaga

SEQ ID NO: 367917 - RNA, 19 nt, Artificial Sequence
  Description of Artificial Sequence: Synthetic oligonucleotide
cagggcacguucuacaugg

SEQ ID NO: 367918 - RNA, 19 nt, Artificial Sequence
  Description of Artificial Sequence: Synthetic oligonucleotide
auauucucuuucaugcugc

SEQ ID NO: 367919 - RNA, 19 nt, Artificial Sequence
  Description of Artificial Sequence: Synthetic oligonucleotide
uuaauugacccgccacagg

SEQ ID NO: 367920 - RNA, 19 nt, Artificial Sequence
  Description of Artificial Sequence: Synthetic oligonucleotide
ugguaucacgaucuugggg

SEQ ID NO: 367921 - RNA, 19 nt, Artificial Sequence
  Description of Artificial Sequence: Synthetic oligonucleotide
ugugugcccagccuaaagc

SEQ ID NO: 367922 - RNA, 19 nt, Artificial Sequence
  Description of Artificial Sequence: Synthetic oligonucleotide
ugaagugugcugaccaagc

SEQ ID NO: 367923 - RNA, 19 nt, Artificial Sequence
  Description of Artificial Sequence: Synthetic oligonucleotide
cuuauacugcgcucuagcc

SEQ ID NO: 367924 - RNA, 19 nt, Artificial Sequence
  Description of Artificial Sequence: Synthetic oligonucleotide
ugcuaaaauugacuccugc

SEQ ID NO: 367925 - RNA, 19 nt, Artificial Sequence
  Description of Artificial Sequence: Synthetic oligonucleotide
uaccacaaucaguagacca

SEQ ID NO: 367926 - RNA, 19 nt, Artificial Sequence
  Description of Artificial Sequence: Synthetic oligonucleotide
uagcuuagagauauucucu

SEQ ID NO: 367927 - RNA, 19 nt, Artificial Sequence
  Description of Artificial Sequence: Synthetic oligonucleotide
ggaguaggaauuuugcugc

SEQ ID NO: 367928 - RNA, 19 nt, Artificial Sequence
  Description of Artificial Sequence: Synthetic oligonucleotide
uuggcaaccguccuggguc

SEQ ID NO: 367929 - RNA, 19 nt, Artificial Sequence
  Description of Artificial Sequence: Synthetic oligonucleotide
uucaacucaagugguauca

SEQ ID NO: 367930 - RNA, 19 nt, Artificial Sequence
  Description of Artificial Sequence: Synthetic oligonucleotide
aaauccaaggauagugcag

SEQ ID NO: 367931 - RNA, 19 nt, Artificial Sequence
  Description of Artificial Sequence: Synthetic oligonucleotide
uggauuagggaaaggagua

SEQ ID NO: 367932 - RNA, 19 nt, Artificial Sequence
  Description of Artificial Sequence: Synthetic oligonucleotide
caaauagcugagcuugagg

SEQ ID NO: 367933 - RNA, 19 nt, Artificial Sequence
  Description of Artificial Sequence: Synthetic oligonucleotide
acacacauacagcaccagg

SEQ ID NO: 367934 - RNA, 19 nt, Artificial Sequence
  Description of Artificial Sequence: Synthetic oligonucleotide
agagguuccacuucuugca

SEQ ID NO: 367935 - RNA, 19 nt, Artificial Sequence
  Description of Artificial Sequence: Synthetic oligonucleotide
uggaacauagccuggcaac

SEQ ID NO: 367936 - RNA, 19 nt, Artificial Sequence
  Description of Artificial Sequence: Synthetic oligonucleotide
aggccauguaacauuaggc

SEQ ID NO: 367937 - RNA, 19 nt, Artificial Sequence
  Description of Artificial Sequence: Synthetic oligonucleotide
auucaacucaagugguauc

SEQ ID NO: 367938 - RNA, 19 nt, Artificial Sequence
  Description of Artificial Sequence: Synthetic oligonucleotide
cauuaggcugagacgacgg

SEQ ID NO: 367939 - RNA, 19 nt, Artificial Sequence
  Description of Artificial Sequence: Synthetic oligonucleotide
ggaguugcuuaauugaccc

SEQ ID NO: 367940 - RNA, 19 nt, Artificial Sequence
  Description of Artificial Sequence: Synthetic oligonucleotide
ucccuugggagucaauuug

SEQ ID NO: 367941 - RNA, 19 nt, Artificial Sequence
  Description of Artificial Sequence: Synthetic oligonucleotide
agugaugggaucacugugg

SEQ ID NO: 367942 - RNA, 19 nt, Artificial Sequence
  Description of Artificial Sequence: Synthetic oligonucleotide
gaagacaaugccugggaca

SEQ ID NO: 367943 - RNA, 19 nt, Artificial Sequence
  Description of Artificial Sequence: Synthetic oligonucleotide
aucaguagaccaccgcuag

SEQ ID NO: 367944 - RNA, 19 nt, Artificial Sequence
  Description of Artificial Sequence: Synthetic oligonucleotide
ugcugguuaccacaaucag

SEQ ID NO: 367945 - RNA, 19 nt, Artificial Sequence
  Description of Artificial Sequence: Synthetic oligonucleotide
agacaguaaguguagugcu

SEQ ID NO: 367946 - RNA, 19 nt, Artificial Sequence
  Description of Artificial Sequence: Synthetic oligonucleotide
guuugggugaaguccgagg

SEQ ID NO: 367947 - RNA, 19 nt, Artificial Sequence
  Description of Artificial Sequence: Synthetic oligonucleotide
ucgagugaugggaucacug

SEQ ID NO: 367948 - RNA, 19 nt, Artificial Sequence
  Description of Artificial Sequence: Synthetic oligonucleotide
cuaaaauugacuccugcaa

SEQ ID NO: 367949 - RNA, 19 nt, Artificial Sequence
  Description of Artificial Sequence: Synthetic oligonucleotide
ugcuuaauugacccgccac

SEQ ID NO: 367950 - RNA, 19 nt, Artificial Sequence
  Description of Artificial Sequence: Synthetic oligonucleotide
gguguugcaccucagcccg

SEQ ID NO: 367951 - RNA, 19 nt, Artificial Sequence
  Description of Artificial Sequence: Synthetic oligonucleotide
aaauugacuccugcaagcu

SEQ ID NO: 367952 - RNA, 19 nt, Artificial Sequence
  Description of Artificial Sequence: Synthetic oligonucleotide
auugacccgccacaggcuc

SEQ ID NO: 367953 - RNA, 19 nt, Artificial Sequence
  Description of Artificial Sequence: Synthetic oligonucleotide
agcuaagggaggcuagggg

SEQ ID NO: 367954 - RNA, 19 nt, Artificial Sequence
  Description of Artificial Sequence: Synthetic oligonucleotide
caacucaagugguaucacg

SEQ ID NO: 367955 - RNA, 19 nt, Artificial Sequence
  Description of Artificial Sequence: Synthetic oligonucleotide
ugccaagagaguugugcgg

SEQ ID NO: 367956 - RNA, 19 nt, Artificial Sequence
  Description of Artificial Sequence: Synthetic oligonucleotide
uaggcugagacgacgggca

SEQ ID NO: 367957 - RNA, 19 nt, Artificial Sequence
  Description of Artificial Sequence: Synthetic oligonucleotide
auagcugagcuugagguca

SEQ ID NO: 367958 - RNA, 19 nt, Artificial Sequence
  Description of Artificial Sequence: Synthetic oligonucleotide
caaugcguuguacuugugc

SEQ ID NO: 367959 - RNA, 19 nt, Artificial Sequence
  Description of Artificial Sequence: Synthetic oligonucleotide
auggaguugcuuaauugac

SEQ ID NO: 367960 - RNA, 19 nt, Artificial Sequence
  Description of Artificial Sequence: Synthetic oligonucleotide
gaacgcauggccugcauga

SEQ ID NO: 367961 - RNA, 19 nt, Artificial Sequence
  Description of Artificial Sequence: Synthetic oligonucleotide
ucacuucuaguuccaaggu

SEQ ID NO: 367962 - RNA, 19 nt, Artificial Sequence
  Description of Artificial Sequence: Synthetic oligonucleotide
gauuaaugcuggccagucc

SEQ ID NO: 367963 - RNA, 19 nt, Artificial Sequence
  Description of Artificial Sequence: Synthetic oligonucleotide
caaggcugcuuccaguagg

SEQ ID NO: 367964 - RNA, 19 nt, Artificial Sequence
  Description of Artificial Sequence: Synthetic oligonucleotide
agauuaaugcuggccaguc

SEQ ID NO: 367965 - RNA, 19 nt, Artificial Sequence
  Description of Artificial Sequence: Synthetic oligonucleotide
aauuugucagcugggccug

SEQ ID NO: 367966 - RNA, 19 nt, Artificial Sequence
  Description of Artificial Sequence: Synthetic oligonucleotide
auuaggcugagacgacggg

SEQ ID NO: 367967 - RNA, 19 nt, Artificial Sequence
  Description of Artificial Sequence: Synthetic oligonucleotide
aaccguccugggucaaggc

SEQ ID NO: 367968 - RNA, 19 nt, Artificial Sequence
  Description of Artificial Sequence: Synthetic oligonucleotide
cuaggccaagcugagagcc

SEQ ID NO: 367969 - RNA, 19 nt, Artificial Sequence
  Description of Artificial Sequence: Synthetic oligonucleotide
caaaagcuggcaauaccac

SEQ ID NO: 367970 - RNA, 19 nt, Artificial Sequence
  Description of Artificial Sequence: Synthetic oligonucleotide
agaucagcggcugucagug

SEQ ID NO: 367971 - RNA, 19 nt, Artificial Sequence
  Description of Artificial Sequence: Synthetic oligonucleotide
uugaggucacuucuaguuc

SEQ ID NO: 367972 - RNA, 19 nt, Artificial Sequence
  Description of Artificial Sequence: Synthetic oligonucleotide
cuugguugugccauagcuc

SEQ ID NO: 367973 - RNA, 19 nt, Artificial Sequence
  Description of Artificial Sequence: Synthetic oligonucleotide
uucuugcaaauccaaggau

SEQ ID NO: 367974 - RNA, 19 nt, Artificial Sequence
  Description of Artificial Sequence: Synthetic oligonucleotide
ggauuugaguagcuuagag

SEQ ID NO: 367975 - RNA, 19 nt, Artificial Sequence
  Description of Artificial Sequence: Synthetic oligonucleotide
ugggagucaauuugucagc

SEQ ID NO: 367976 - RNA, 19 nt, Artificial Sequence
  Description of Artificial Sequence: Synthetic oligonucleotide
gaguugcuuaauugacccg

SEQ ID NO: 367977 - RNA, 19 nt, Artificial Sequence
  Description of Artificial Sequence: Synthetic oligonucleotide
aacauuaggcugagacgac

SEQ ID NO: 367978 - RNA, 19 nt, Artificial Sequence
  Description of Artificial Sequence: Synthetic oligonucleotide
ugugagacgggaucccaca

SEQ ID NO: 367979 - RNA, 19 nt, Artificial Sequence
  Description of Artificial Sequence: Synthetic oligonucleotide
ucacgugccuuccugcucu

SEQ ID NO: 367980 - RNA, 19 nt, Artificial Sequence
  Description of Artificial Sequence: Synthetic oligonucleotide
cacaauaccugcccugggc

SEQ ID NO: 367981 - RNA, 19 nt, Artificial Sequence
  Description of Artificial Sequence: Synthetic oligonucleotide
ugaacgcauggccugcaug

SEQ ID NO: 367982 - RNA, 19 nt, Artificial Sequence
  Description of Artificial Sequence: Synthetic oligonucleotide
uguucacgugccuuccugc

SEQ ID NO: 367983 - RNA, 19 nt, Artificial Sequence
  Description of Artificial Sequence: Synthetic oligonucleotide
uuaggcugagacgacgggc

SEQ ID NO: 367984 - RNA, 19 nt, Artificial Sequence
  Description of Artificial Sequence: Synthetic oligonucleotide
ugagacgggaucccacagc

SEQ ID NO: 367985 - RNA, 19 nt, Artificial Sequence
  Description of Artificial Sequence: Synthetic oligonucleotide
aucacaucaggggaacggg

SEQ ID NO: 367986 - RNA, 19 nt, Artificial Sequence
  Description of Artificial Sequence: Synthetic oligonucleotide
acuaguggacuugacuguc

SEQ ID NO: 367987 - RNA, 19 nt, Artificial Sequence
  Description of Artificial Sequence: Synthetic oligonucleotide
ucccuccaaaacacuagag

SEQ ID NO: 367988 - RNA, 19 nt, Artificial Sequence
  Description of Artificial Sequence: Synthetic oligonucleotide
agauccaaauuagagguaa

SEQ ID NO: 367989 - RNA, 19 nt, Artificial Sequence
  Description of Artificial Sequence: Synthetic oligonucleotide
uagaccaccgcuaguguau

SEQ ID NO: 367990 - RNA, 19 nt, Artificial Sequence
  Description of Artificial Sequence: Synthetic oligonucleotide
ugcauuggucccuguaaug

SEQ ID NO: 367991 - RNA, 19 nt, Artificial Sequence
  Description of Artificial Sequence: Synthetic oligonucleotide
agaaggcacaauaccugcc

SEQ ID NO: 367992 - RNA, 19 nt, Artificial Sequence
  Description of Artificial Sequence: Synthetic oligonucleotide
gaacgggugcgacugggag

SEQ ID NO: 367993 - RNA, 19 nt, Artificial Sequence
  Description of Artificial Sequence: Synthetic oligonucleotide
cuaccuggugcucugugag

SEQ ID NO: 367994 - RNA, 19 nt, Artificial Sequence
  Description of Artificial Sequence: Synthetic oligonucleotide
ggcaauaccacacucugga

SEQ ID NO: 367995 - RNA, 19 nt, Artificial Sequence
  Description of Artificial Sequence: Synthetic oligonucleotide
cacaaucaguagaccaccg

SEQ ID NO: 367996 - RNA, 19 nt, Artificial Sequence
  Description of Artificial Sequence: Synthetic oligonucleotide
ugauuucaucccuuauacu

SEQ ID NO: 367997 - RNA, 19 nt, Artificial Sequence
  Description of Artificial Sequence: Synthetic oligonucleotide
acauuaggcugagacgacg

SEQ ID NO: 367998 - RNA, 19 nt, Artificial Sequence
  Description of Artificial Sequence: Synthetic oligonucleotide
caauccuuagcaggcagcc

SEQ ID NO: 367999 - RNA, 19 nt, Artificial Sequence
  Description of Artificial Sequence: Synthetic oligonucleotide
uuugguagccauggaguug

SEQ ID NO: 368000 - RNA, 19 nt, Artificial Sequence
  Description of Artificial Sequence: Synthetic oligonucleotide
aguacaggcugggauagug

SEQ ID NO: 368001 - RNA, 19 nt, Artificial Sequence
  Description of Artificial Sequence: Synthetic oligonucleotide
agcuggcaauaccacacuc

SEQ ID NO: 368002 - RNA, 19 nt, Artificial Sequence
  Description of Artificial Sequence: Synthetic oligonucleotide
uucaggcauggcaggaccc

SEQ ID NO: 368003 - RNA, 19 nt, Artificial Sequence
  Description of Artificial Sequence: Synthetic oligonucleotide
ugugcggaucagcuugcag

SEQ ID NO: 368004 - RNA, 19 nt, Artificial Sequence
  Description of Artificial Sequence: Synthetic oligonucleotide
aacgggugcgacugggaga

SEQ ID NO: 368005 - RNA, 19 nt, Artificial Sequence
  Description of Artificial Sequence: Synthetic oligonucleotide
ugagacgacgggcagcuuu

SEQ ID NO: 368006 - RNA, 19 nt, Artificial Sequence
  Description of Artificial Sequence: Synthetic oligonucleotide
aguccgaggagaucccuug

SEQ ID NO: 368007 - RNA, 19 nt, Artificial Sequence
  Description of Artificial Sequence: Synthetic oligonucleotide
augccaucucuguuaauca

SEQ ID NO: 368008 - RNA, 19 nt, Artificial Sequence
  Description of Artificial Sequence: Synthetic oligonucleotide
uaaguuugguagccaugga

SEQ ID NO: 368009 - RNA, 19 nt, Artificial Sequence
  Description of Artificial Sequence: Synthetic oligonucleotide
ucgagcaauggcaucuguc

SEQ ID NO: 368010 - RNA, 19 nt, Artificial Sequence
  Description of Artificial Sequence: Synthetic oligonucleotide
gacccaagaaggcacaaua

SEQ ID NO: 368011 - RNA, 19 nt, Artificial Sequence
  Description of Artificial Sequence: Synthetic oligonucleotide
cucaagugguaucacgauc

SEQ ID NO: 368012 - RNA, 19 nt, Artificial Sequence
  Description of Artificial Sequence: Synthetic oligonucleotide
ggaauuuugcugccaaaac

SEQ ID NO: 368013 - RNA, 19 nt, Artificial Sequence
  Description of Artificial Sequence: Synthetic oligonucleotide
ggcugcuuccaguaggagg

SEQ ID NO: 368014 - RNA, 19 nt, Artificial Sequence
  Description of Artificial Sequence: Synthetic oligonucleotide
cauuggucccuguaaugug

SEQ ID NO: 368015 - RNA, 19 nt, Artificial Sequence
  Description of Artificial Sequence: Synthetic oligonucleotide
ugcuagacacaguggcugc

SEQ ID NO: 368016 - RNA, 19 nt, Artificial Sequence
  Description of Artificial Sequence: Synthetic oligonucleotide
uccaaauagcugagcuuga

SEQ ID NO: 368017 - RNA, 19 nt, Artificial Sequence
  Description of Artificial Sequence: Synthetic oligonucleotide
gcuaaaauugacuccugca

SEQ ID NO: 368018 - RNA, 19 nt, Artificial Sequence
  Description of Artificial Sequence: Synthetic oligonucleotide
caguagaccaccgcuagug

SEQ ID NO: 368019 - RNA, 19 nt, Artificial Sequence
  Description of Artificial Sequence: Synthetic oligonucleotide
gacuugacugucaggguug

SEQ ID NO: 368020 - RNA, 19 nt, Artificial Sequence
  Description of Artificial Sequence: Synthetic oligonucleotide
aagugguaucacgaucuug

SEQ ID NO: 368021 - RNA, 19 nt, Artificial Sequence
  Description of Artificial Sequence: Synthetic oligonucleotide
uggccuguugcuccuuaag

SEQ ID NO: 368022 - RNA, 19 nt, Artificial Sequence
  Description of Artificial Sequence: Synthetic oligonucleotide
acguucuacauggucagug

SEQ ID NO: 368023 - RNA, 19 nt, Artificial Sequence
  Description of Artificial Sequence: Synthetic oligonucleotide
agucuuuaauugaauuucu

SEQ ID NO: 368024 - RNA, 19 nt, Artificial Sequence
  Description of Artificial Sequence: Synthetic oligonucleotide
gugguaucacgaucuuggg

SEQ ID NO: 368025 - RNA, 19 nt, Artificial Sequence
  Description of Artificial Sequence: Synthetic oligonucleotide
uugcuuaauugacccgcca

SEQ ID NO: 368026 - RNA, 19 nt, Artificial Sequence
  Description of Artificial Sequence: Synthetic oligonucleotide
ugcuggaaggccugauuga

SEQ ID NO: 368027 - RNA, 19 nt, Artificial Sequence
  Description of Artificial Sequence: Synthetic oligonucleotide
acauggacuggccuucagu

SEQ ID NO: 368028 - RNA, 19 nt, Artificial Sequence
  Description of Artificial Sequence: Synthetic oligonucleotide
gccuguugcuccuuaagag

SEQ ID NO: 368029 - RNA, 19 nt, Artificial Sequence
  Description of Artificial Sequence: Synthetic oligonucleotide
acgggugcgacugggagag

SEQ ID NO: 368030 - RNA, 19 nt, Artificial Sequence
  Description of Artificial Sequence: Synthetic oligonucleotide
caauuugucagcugggccu

SEQ ID NO: 368031 - RNA, 19 nt, Artificial Sequence
  Description of Artificial Sequence: Synthetic oligonucleotide
aaucaguagaccaccgcua

SEQ ID NO: 368032 - RNA, 19 nt, Artificial Sequence
  Description of Artificial Sequence: Synthetic oligonucleotide
guucaugccgagucuccag

SEQ ID NO: 368033 - RNA, 19 nt, Artificial Sequence
  Description of Artificial Sequence: Synthetic oligonucleotide
aggaguacaggcugggaua

SEQ ID NO: 368034 - RNA, 19 nt, Artificial Sequence
  Description of Artificial Sequence: Synthetic oligonucleotide
cuggauuagggaaaggagu

SEQ ID NO: 368035 - RNA, 19 nt, Artificial Sequence
  Description of Artificial Sequence: Synthetic oligonucleotide
cuucacccuuaacaaugcg

SEQ ID NO: 368036 - RNA, 19 nt, Artificial Sequence
  Description of Artificial Sequence: Synthetic oligonucleotide
uccgaggagaucccuuggu

SEQ ID NO: 368037 - RNA, 19 nt, Artificial Sequence
  Description of Artificial Sequence: Synthetic oligonucleotide
aaauucaacucaaguggua

SEQ ID NO: 368038 - RNA, 19 nt, Artificial Sequence
  Description of Artificial Sequence: Synthetic oligonucleotide
ugguuaccacaaucaguag

SEQ ID NO: 368039 - RNA, 19 nt, Artificial Sequence
  Description of Artificial Sequence: Synthetic oligonucleotide
cugcuagacacaguggcug

SEQ ID NO: 368040 - RNA, 19 nt, Artificial Sequence
  Description of Artificial Sequence: Synthetic oligonucleotide
cugaagugugcugaccaag

SEQ ID NO: 368041 - RNA, 19 nt, Artificial Sequence
  Description of Artificial Sequence: Synthetic oligonucleotide
uuaccacaaucaguagacc

SEQ ID NO: 368042 - RNA, 19 nt, Artificial Sequence
  Description of Artificial Sequence: Synthetic oligonucleotide
aguagaccaccgcuagugu

SEQ ID NO: 368043 - RNA, 19 nt, Artificial Sequence
  Description of Artificial Sequence: Synthetic oligonucleotide
gauugagguggcccugcug

SEQ ID NO: 368044 - RNA, 19 nt, Artificial Sequence
  Description of Artificial Sequence: Synthetic oligonucleotide
uguugggccuggcagucaa

SEQ ID NO: 368045 - RNA, 19 nt, Artificial Sequence
  Description of Artificial Sequence: Synthetic oligonucleotide
cugcugguuaccacaauca

SEQ ID NO: 368046 - RNA, 19 nt, Artificial Sequence
  Description of Artificial Sequence: Synthetic oligonucleotide
gcugccagauuaaugcugg

SEQ ID NO: 368047 - RNA, 19 nt, Artificial Sequence
  Description of Artificial Sequence: Synthetic oligonucleotide
auccaaauuagagguaaaa

SEQ ID NO: 368048 - RNA, 19 nt, Artificial Sequence
  Description of Artificial Sequence: Synthetic oligonucleotide
ggaucccacagcugaaucc

SEQ ID NO: 368049 - RNA, 19 nt, Artificial Sequence
  Description of Artificial Sequence: Synthetic oligonucleotide
uucaucccuuauacugcgc

SEQ ID NO: 368050 - RNA, 19 nt, Artificial Sequence
  Description of Artificial Sequence: Synthetic oligonucleotide
cagcaguagauaccugccc

SEQ ID NO: 368051 - RNA, 19 nt, Artificial Sequence
  Description of Artificial Sequence: Synthetic oligonucleotide
ucaguagaccaccgcuagu

SEQ ID NO: 368052 - RNA, 19 nt, Artificial Sequence
  Description of Artificial Sequence: Synthetic oligonucleotide
aauugacccgccacaggcu

SEQ ID NO: 368053 - RNA, 19 nt, Artificial Sequence
  Description of Artificial Sequence: Synthetic oligonucleotide
caccucagcccgaacacug

SEQ ID NO: 368054 - RNA, 19 nt, Artificial Sequence
  Description of Artificial Sequence: Synthetic oligonucleotide
aucccuuauacugcgcucu

SEQ ID NO: 368055 - RNA, 19 nt, Artificial Sequence
  Description of Artificial Sequence: Synthetic oligonucleotide
ucucuuucaugcugccuuc

SEQ ID NO: 368056 - RNA, 19 nt, Artificial Sequence
  Description of Artificial Sequence: Synthetic oligonucleotide
ccuuauacugcgcucuagc

SEQ ID NO: 368057 - RNA, 19 nt, Artificial Sequence
  Description of Artificial Sequence: Synthetic oligonucleotide
uccuuagcaggcagccgug

SEQ ID NO: 368058 - RNA, 19 nt, Artificial Sequence
  Description of Artificial Sequence: Synthetic oligonucleotide
ucaacucaagugguaucac

SEQ ID NO: 368059 - RNA, 19 nt, Artificial Sequence
  Description of Artificial Sequence: Synthetic oligonucleotide
ugaggccauacugucuggc

SEQ ID NO: 368060 - RNA, 19 nt, Artificial Sequence
  Description of Artificial Sequence: Synthetic oligonucleotide
caccgcuaguguauccucc

SEQ ID NO: 368061 - RNA, 19 nt, Artificial Sequence
  Description of Artificial Sequence: Synthetic oligonucleotide
gucgcaaggccauguaaca

SEQ ID NO: 368062 - RNA, 19 nt, Artificial Sequence
  Description of Artificial Sequence: Synthetic oligonucleotide
guugcuuaauugacccgcc

SEQ ID NO: 368063 - RNA, 19 nt, Artificial Sequence
  Description of Artificial Sequence: Synthetic oligonucleotide
gggauaguggacagggcgg

SEQ ID NO: 368064 - RNA, 19 nt, Artificial Sequence
  Description of Artificial Sequence: Synthetic oligonucleotide
gagacgggaucccacagcu

SEQ ID NO: 368065 - RNA, 19 nt, Artificial Sequence
  Description of Artificial Sequence: Synthetic oligonucleotide
ccauguaacauuaggcuga

SEQ ID NO: 368066 - RNA, 19 nt, Artificial Sequence
  Description of Artificial Sequence: Synthetic oligonucleotide
acuugacugucaggguugg

SEQ ID NO: 368067 - RNA, 19 nt, Artificial Sequence
  Description of Artificial Sequence: Synthetic oligonucleotide
ggcacaauaccugcccugg

SEQ ID NO: 368068 - RNA, 19 nt, Artificial Sequence
  Description of Artificial Sequence: Synthetic oligonucleotide
gggccgaggagacaguaag

SEQ ID NO: 368069 - RNA, 19 nt, Artificial Sequence
  Description of Artificial Sequence: Synthetic oligonucleotide
gcuuaauugacccgccaca

SEQ ID NO: 368070 - RNA, 19 nt, Artificial Sequence
  Description of Artificial Sequence: Synthetic oligonucleotide
gugagacgggaucccacag

SEQ ID NO: 368071 - RNA, 19 nt, Artificial Sequence
  Description of Artificial Sequence: Synthetic oligonucleotide
caaucaguagaccaccgcu

SEQ ID NO: 368072 - RNA, 19 nt, Artificial Sequence
  Description of Artificial Sequence: Synthetic oligonucleotide
gagacgacgggcagcuuug

SEQ ID NO: 368073 - RNA, 19 nt, Artificial Sequence
  Description of Artificial Sequence: Synthetic oligonucleotide
cuguucacgugccuuccug

SEQ ID NO: 368074 - RNA, 19 nt, Artificial Sequence
  Description of Artificial Sequence: Synthetic oligonucleotide
acacuuacuucacccuuaa

SEQ ID NO: 368075 - RNA, 19 nt, Artificial Sequence
  Description of Artificial Sequence: Synthetic oligonucleotide
uucacgugccuuccugcuc

SEQ ID NO: 368076 - RNA, 19 nt, Artificial Sequence
  Description of Artificial Sequence: Synthetic oligonucleotide
caucaggggaacgggugcg

SEQ ID NO: 368077 - RNA, 19 nt, Artificial Sequence
  Description of Artificial Sequence: Synthetic oligonucleotide
aguuugggugaaguccgag

SEQ ID NO: 368078 - RNA, 19 nt, Artificial Sequence
  Description of Artificial Sequence: Synthetic oligonucleotide
uucuggcgcaccugggcca

SEQ ID NO: 368079 - RNA, 19 nt, Artificial Sequence
  Description of Artificial Sequence: Synthetic oligonucleotide
ugucuggcucaaugaggcc

SEQ ID NO: 368080 - RNA, 19 nt, Artificial Sequence
  Description of Artificial Sequence: Synthetic oligonucleotide
uggucucgagugaugggau

SEQ ID NO: 368081 - RNA, 19 nt, Artificial Sequence
  Description of Artificial Sequence: Synthetic oligonucleotide
cacccuuaacaaugcguug

SEQ ID NO: 368082 - RNA, 19 nt, Artificial Sequence
  Description of Artificial Sequence: Synthetic oligonucleotide
aagccacgggacaaggccu

SEQ ID NO: 368083 - RNA, 19 nt, Artificial Sequence
  Description of Artificial Sequence: Synthetic oligonucleotide
caaccguccugggucaagg

SEQ ID NO: 368084 - RNA, 19 nt, Artificial Sequence
  Description of Artificial Sequence: Synthetic oligonucleotide
gacauggacuggccuucag

SEQ ID NO: 368085 - RNA, 19 nt, Artificial Sequence
  Description of Artificial Sequence: Synthetic oligonucleotide
gcaguagauaccugcccag

SEQ ID NO: 368086 - RNA, 19 nt, Artificial Sequence
  Description of Artificial Sequence: Synthetic oligonucleotide
caucguggucacuuugcuc

SEQ ID NO: 368087 - RNA, 19 nt, Artificial Sequence
  Description of Artificial Sequence: Synthetic oligonucleotide
gaacauagccuggcaacuc

SEQ ID NO: 368088 - RNA, 19 nt, Artificial Sequence
  Description of Artificial Sequence: Synthetic oligonucleotide
uugacccgccacaggcucc

SEQ ID NO: 368089 - RNA, 19 nt, Artificial Sequence
  Description of Artificial Sequence: Synthetic oligonucleotide
cugugugcccagccuaaag

SEQ ID NO: 368090 - RNA, 19 nt, Artificial Sequence
  Description of Artificial Sequence: Synthetic oligonucleotide
ccaaaagucuuuaauugaa

SEQ ID NO: 368091 - RNA, 19 nt, Artificial Sequence
  Description of Artificial Sequence: Synthetic oligonucleotide
gaaccgucuucuugauuuc

SEQ ID NO: 368092 - RNA, 19 nt, Artificial Sequence
  Description of Artificial Sequence: Synthetic oligonucleotide
agccuaacccugcugguua

SEQ ID NO: 368093 - RNA, 19 nt, Artificial Sequence
  Description of Artificial Sequence: Synthetic oligonucleotide
cagcugaacgcauggccug

SEQ ID NO: 368094 - RNA, 19 nt, Artificial Sequence
  Description of Artificial Sequence: Synthetic oligonucleotide
cugugagacgggaucccac

SEQ ID NO: 368095 - RNA, 19 nt, Artificial Sequence
  Description of Artificial Sequence: Synthetic oligonucleotide
cuugccugggccgaggaga

SEQ ID NO: 368096 - RNA, 19 nt, Artificial Sequence
  Description of Artificial Sequence: Synthetic oligonucleotide
aagccccgaagcugggcca

SEQ ID NO: 368097 - RNA, 19 nt, Artificial Sequence
  Description of Artificial Sequence: Synthetic oligonucleotide
guggucucgagugauggga

SEQ ID NO: 368098 - RNA, 19 nt, Artificial Sequence
  Description of Artificial Sequence: Synthetic oligonucleotide
ggccauguaacauuaggcu

SEQ ID NO: 368099 - RNA, 19 nt, Artificial Sequence
  Description of Artificial Sequence: Synthetic oligonucleotide
acugcuagacacaguggcu

SEQ ID NO: 368100 - RNA, 19 nt, Artificial Sequence
  Description of Artificial Sequence: Synthetic oligonucleotide
cagcuaagggaggcuaggg

SEQ ID NO: 368101 - RNA, 19 nt, Artificial Sequence
  Description of Artificial Sequence: Synthetic oligonucleotide
aggcuagcaaccucaucau

SEQ ID NO: 368102 - RNA, 19 nt, Artificial Sequence
  Description of Artificial Sequence: Synthetic oligonucleotide
aagauccaaauuagaggua

SEQ ID NO: 368103 - RNA, 19 nt, Artificial Sequence
  Description of Artificial Sequence: Synthetic oligonucleotide
agcccauguggucucgagu

SEQ ID NO: 368104 - RNA, 19 nt, Artificial Sequence
  Description of Artificial Sequence: Synthetic oligonucleotide
gguugugccauagcucugc

SEQ ID NO: 368105 - RNA, 19 nt, Artificial Sequence
  Description of Artificial Sequence: Synthetic oligonucleotide
ggucaugcuucaggcaugg

SEQ ID NO: 368106 - RNA, 19 nt, Artificial Sequence
  Description of Artificial Sequence: Synthetic oligonucleotide
uggcacucugaagugugcu

SEQ ID NO: 368107 - RNA, 19 nt, Artificial Sequence
  Description of Artificial Sequence: Synthetic oligonucleotide
acgggacaaggccucagau

SEQ ID NO: 368108 - RNA, 19 nt, Artificial Sequence
  Description of Artificial Sequence: Synthetic oligonucleotide
accaccgcuaguguauccu

SEQ ID NO: 368109 - RNA, 19 nt, Artificial Sequence
  Description of Artificial Sequence: Synthetic oligonucleotide
cuaguggacuugacuguca

SEQ ID NO: 368110 - RNA, 19 nt, Artificial Sequence
  Description of Artificial Sequence: Synthetic oligonucleotide
ugugcugaccaagccccga

SEQ ID NO: 368111 - RNA, 19 nt, Artificial Sequence
  Description of Artificial Sequence: Synthetic oligonucleotide
guagaccaccgcuagugua

SEQ ID NO: 368112 - RNA, 19 nt, Artificial Sequence
  Description of Artificial Sequence: Synthetic oligonucleotide
agaccaccgcuaguguauc

SEQ ID NO: 368113 - RNA, 19 nt, Artificial Sequence
  Description of Artificial Sequence: Synthetic oligonucleotide
gaccaccgcuaguguaucc

SEQ ID NO: 368114 - RNA, 19 nt, Artificial Sequence
  Description of Artificial Sequence: Synthetic oligonucleotide
cucccuccaaaacacuaga

SEQ ID NO: 368115 - RNA, 19 nt, Artificial Sequence
  Description of Artificial Sequence: Synthetic oligonucleotide
gcuaagggaggcuaggggu

SEQ ID NO: 368116 - RNA, 19 nt, Artificial Sequence
  Description of Artificial Sequence: Synthetic oligonucleotide
gaagcaaggcuagcaaccu

SEQ ID NO: 368117 - RNA, 19 nt, Artificial Sequence
  Description of Artificial Sequence: Synthetic oligonucleotide
uggucccuguaaugugucu

SEQ ID NO: 368118 - RNA, 19 nt, Artificial Sequence
  Description of Artificial Sequence: Synthetic oligonucleotide
ugggccgaggagacaguaa

SEQ ID NO: 368119 - RNA, 19 nt, Artificial Sequence
  Description of Artificial Sequence: Synthetic oligonucleotide
gaucagcggcugucagugc

SEQ ID NO: 368120 - RNA, 19 nt, Artificial Sequence
  Description of Artificial Sequence: Synthetic oligonucleotide
ccucccuccaaaacacuag

SEQ ID NO: 368121 - RNA, 19 nt, Artificial Sequence
  Description of Artificial Sequence: Synthetic oligonucleotide
cuagcaaccucaucaucgu

SEQ ID NO: 368122 - RNA, 19 nt, Artificial Sequence
  Description of Artificial Sequence: Synthetic oligonucleotide
uugcuccuuaagagccaca

SEQ ID NO: 368123 - RNA, 19 nt, Artificial Sequence
  Description of Artificial Sequence: Synthetic oligonucleotide
gauccaaauuagagguaaa

SEQ ID NO: 368124 - RNA, 19 nt, Artificial Sequence
  Description of Artificial Sequence: Synthetic oligonucleotide
agacgacgggcagcuuugc

SEQ ID NO: 368125 - RNA, 19 nt, Artificial Sequence
  Description of Artificial Sequence: Synthetic oligonucleotide
uguugcaccucagcccgaa

SEQ ID NO: 368126 - RNA, 19 nt, Artificial Sequence
  Description of Artificial Sequence: Synthetic oligonucleotide
cuuagcaggcagccgugga

SEQ ID NO: 368127 - RNA, 19 nt, Artificial Sequence
  Description of Artificial Sequence: Synthetic oligonucleotide
ugaguagcuuagagauauu

SEQ ID NO: 368128 - RNA, 19 nt, Artificial Sequence
  Description of Artificial Sequence: Synthetic oligonucleotide
gaggccugggcagguaaac

SEQ ID NO: 368129 - RNA, 19 nt, Artificial Sequence
  Description of Artificial Sequence: Synthetic oligonucleotide
gagaucagcggcugucagu

SEQ ID NO: 368130 - RNA, 19 nt, Artificial Sequence
  Description of Artificial Sequence: Synthetic oligonucleotide
gugccauagcucugccagc

SEQ ID NO: 368131 - RNA, 19 nt, Artificial Sequence
  Description of Artificial Sequence: Synthetic oligonucleotide
ggccuguugcuccuuaaga

SEQ ID NO: 368132 - RNA, 19 nt, Artificial Sequence
  Description of Artificial Sequence: Synthetic oligonucleotide
ggauuagggaaaggaguac

SEQ ID NO: 368133 - RNA, 19 nt, Artificial Sequence
  Description of Artificial Sequence: Synthetic oligonucleotide
cuaacccugcugguuacca

SEQ ID NO: 368134 - RNA, 19 nt, Artificial Sequence
  Description of Artificial Sequence: Synthetic oligonucleotide
acauggucagugacagugu

SEQ ID NO: 368135 - RNA, 19 nt, Artificial Sequence
  Description of Artificial Sequence: Synthetic oligonucleotide
auacugcgcucuagccgcc

SEQ ID NO: 368136 - RNA, 19 nt, Artificial Sequence
  Description of Artificial Sequence: Synthetic oligonucleotide
cuagccgcccagccacagc

SEQ ID NO: 368137 - RNA, 19 nt, Artificial Sequence
  Description of Artificial Sequence: Synthetic oligonucleotide
cacuuacuucacccuuaac

SEQ ID NO: 368138 - RNA, 19 nt, Artificial Sequence
  Description of Artificial Sequence: Synthetic oligonucleotide
ccaaauagcugagcuugag

SEQ ID NO: 368139 - RNA, 19 nt, Artificial Sequence
  Description of Artificial Sequence: Synthetic oligonucleotide
aaguccgaggagaucccuu

SEQ ID NO: 368140 - RNA, 19 nt, Artificial Sequence
  Description of Artificial Sequence: Synthetic oligonucleotide
ccagagguuccacuucuug

SEQ ID NO: 368141 - RNA, 19 nt, Artificial Sequence
  Description of Artificial Sequence: Synthetic oligonucleotide
ggccugauugagguggccc

SEQ ID NO: 368142 - RNA, 19 nt, Artificial Sequence
  Description of Artificial Sequence: Synthetic oligonucleotide
aggugcaucacagccucuu

SEQ ID NO: 368143 - RNA, 19 nt, Artificial Sequence
  Description of Artificial Sequence: Synthetic oligonucleotide
guuggcaaccguccugggu

SEQ ID NO: 368144 - RNA, 19 nt, Artificial Sequence
  Description of Artificial Sequence: Synthetic oligonucleotide
agugcccguuccagucgcc

SEQ ID NO: 368145 - RNA, 19 nt, Artificial Sequence
  Description of Artificial Sequence: Synthetic oligonucleotide
gggaacgggugcgacuggg

SEQ ID NO: 368146 - RNA, 19 nt, Artificial Sequence
  Description of Artificial Sequence: Synthetic oligonucleotide
gggugcgacugggagaggc

SEQ ID NO: 368147 - RNA, 19 nt, Artificial Sequence
  Description of Artificial Sequence: Synthetic oligonucleotide
cagcacuaguggacuugac

SEQ ID NO: 368148 - RNA, 19 nt, Artificial Sequence
  Description of Artificial Sequence: Synthetic oligonucleotide
ugccagcagcugaacgcau

SEQ ID NO: 368149 - RNA, 19 nt, Artificial Sequence
  Description of Artificial Sequence: Synthetic oligonucleotide
ggugcaucacagccucuuc

SEQ ID NO: 368150 - RNA, 19 nt, Artificial Sequence
  Description of Artificial Sequence: Synthetic oligonucleotide
aggggucgcaaggccaugu

SEQ ID NO: 368151 - RNA, 19 nt, Artificial Sequence
  Description of Artificial Sequence: Synthetic oligonucleotide
guagcagcucuucuugguu

SEQ ID NO: 368152 - RNA, 19 nt, Artificial Sequence
  Description of Artificial Sequence: Synthetic oligonucleotide
cugcgcucuagccgcccag

SEQ ID NO: 368153 - RNA, 19 nt, Artificial Sequence
  Description of Artificial Sequence: Synthetic oligonucleotide
uacugcgcucuagccgccc

SEQ ID NO: 368154 - RNA, 19 nt, Artificial Sequence
  Description of Artificial Sequence: Synthetic oligonucleotide
gcauuggucccuguaaugu

SEQ ID NO: 368155 - RNA, 19 nt, Artificial Sequence
  Description of Artificial Sequence: Synthetic oligonucleotide
cacgggacaaggccucaga

SEQ ID NO: 368156 - RNA, 19 nt, Artificial Sequence
  Description of Artificial Sequence: Synthetic oligonucleotide
gaguuugggugaaguccga

SEQ ID NO: 368157 - RNA, 19 nt, Artificial Sequence
  Description of Artificial Sequence: Synthetic oligonucleotide
gcagccguggaguaggaau

SEQ ID NO: 368158 - RNA, 19 nt, Artificial Sequence
  Description of Artificial Sequence: Synthetic oligonucleotide
ggucucgagugaugggauc

SEQ ID NO: 368159 - RNA, 19 nt, Artificial Sequence
  Description of Artificial Sequence: Synthetic oligonucleotide
acaaugcguuguacuugug

SEQ ID NO: 368160 - RNA, 19 nt, Artificial Sequence
  Description of Artificial Sequence: Synthetic oligonucleotide
gagcuugaggucacuucua

SEQ ID NO: 368161 - RNA, 19 nt, Artificial Sequence
  Description of Artificial Sequence: Synthetic oligonucleotide
ccgaggagaucccuugguc

SEQ ID NO: 368162 - RNA, 19 nt, Artificial Sequence
  Description of Artificial Sequence: Synthetic oligonucleotide
uaggggucgcaaggccaug

SEQ ID NO: 368163 - RNA, 19 nt, Artificial Sequence
  Description of Artificial Sequence: Synthetic oligonucleotide
cuaggggucgcaaggccau

SEQ ID NO: 368164 - RNA, 19 nt, Artificial Sequence
  Description of Artificial Sequence: Synthetic oligonucleotide
gcugguuaccacaaucagu

SEQ ID NO: 368165 - RNA, 19 nt, Artificial Sequence
  Description of Artificial Sequence: Synthetic oligonucleotide
gaaguccgaggagaucccu

SEQ ID NO: 368166 - RNA, 19 nt, Artificial Sequence
  Description of Artificial Sequence: Synthetic oligonucleotide
gcaaggccauguaacauua

SEQ ID NO: 368167 - RNA, 19 nt, Artificial Sequence
  Description of Artificial Sequence: Synthetic oligonucleotide
gggucaugcuucaggcaug

SEQ ID NO: 368168 - RNA, 19 nt, Artificial Sequence
  Description of Artificial Sequence: Synthetic oligonucleotide
gaggaaccgucuucuugau

SEQ ID NO: 368169 - RNA, 19 nt, Artificial Sequence
  Description of Artificial Sequence: Synthetic oligonucleotide
gauaccugcccaggucccu

SEQ ID NO: 368170 - RNA, 19 nt, Artificial Sequence
  Description of Artificial Sequence: Synthetic oligonucleotide
cguucuacauggucaguga

SEQ ID NO: 368171 - RNA, 19 nt, Artificial Sequence
  Description of Artificial Sequence: Synthetic oligonucleotide
agccguggaguaggaauuu

SEQ ID NO: 368172 - RNA, 19 nt, Artificial Sequence
  Description of Artificial Sequence: Synthetic oligonucleotide
gacagggcggcugcccaaa

SEQ ID NO: 368173 - RNA, 19 nt, Artificial Sequence
  Description of Artificial Sequence: Synthetic oligonucleotide
auaccugcccaggucccuu

SEQ ID NO: 368174 - RNA, 19 nt, Artificial Sequence
  Description of Artificial Sequence: Synthetic oligonucleotide
ccuuagcaggcagccgugg

SEQ ID NO: 368175 - RNA, 19 nt, Artificial Sequence
  Description of Artificial Sequence: Synthetic oligonucleotide
auguaacauuaggcugaga

SEQ ID NO: 368176 - RNA, 19 nt, Artificial Sequence
  Description of Artificial Sequence: Synthetic oligonucleotide
gccuaacccugcugguuac

SEQ ID NO: 368177 - RNA, 19 nt, Artificial Sequence
  Description of Artificial Sequence: Synthetic oligonucleotide
gggucgcaaggccauguaa

SEQ ID NO: 368178 - RNA, 19 nt, Artificial Sequence
  Description of Artificial Sequence: Synthetic oligonucleotide
gcuggcaauaccacacucu

SEQ ID NO: 368179 - RNA, 19 nt, Artificial Sequence
  Description of Artificial Sequence: Synthetic oligonucleotide
ccuaaagcugucauugauu

SEQ ID NO: 368180 - RNA, 19 nt, Artificial Sequence
  Description of Artificial Sequence: Synthetic oligonucleotide
ggggaacgggugcgacugg

SEQ ID NO: 368181 - RNA, 19 nt, Artificial Sequence
  Description of Artificial Sequence: Synthetic oligonucleotide
ccgcuaguguauccucccc

SEQ ID NO: 368182 - RNA, 19 nt, Artificial Sequence
  Description of Artificial Sequence: Synthetic oligonucleotide
acagggcggcugcccaaaa

SEQ ID NO: 368183 - RNA, 19 nt, Artificial Sequence
  Description of Artificial Sequence: Synthetic oligonucleotide
ccaccgcuaguguauccuc

SEQ ID NO: 368184 - RNA, 19 nt, Artificial Sequence
  Description of Artificial Sequence: Synthetic oligonucleotide
cccuagcuuccuguucacg

SEQ ID NO: 368185 - RNA, 19 nt, Artificial Sequence
  Description of Artificial Sequence: Synthetic oligonucleotide
gcaaccguccugggucaag

SEQ ID NO: 368186 - RNA, 19 nt, Artificial Sequence
  Description of Artificial Sequence: Synthetic oligonucleotide
ccuaacccugcugguuacc

SEQ ID NO: 368187 - RNA, 19 nt, Artificial Sequence
  Description of Artificial Sequence: Synthetic oligonucleotide
gcagucaaggugggcagaa

SEQ ID NO: 368188 - RNA, 19 nt, Artificial Sequence
  Description of Artificial Sequence: Synthetic oligonucleotide
gugcgacugggagaggccu

SEQ ID NO: 368189 - RNA, 19 nt, Artificial Sequence
  Description of Artificial Sequence: Synthetic oligonucleotide
acgggaucccacagcugaa

SEQ ID NO: 368190 - RNA, 19 nt, Artificial Sequence
  Description of Artificial Sequence: Synthetic oligonucleotide
cuucgagggcuugccugca

SEQ ID NO: 368191 - RNA, 19 nt, Artificial Sequence
  Description of Artificial Sequence: Synthetic oligonucleotide
ggaacgggugcgacuggga

SEQ ID NO: 368192 - RNA, 19 nt, Artificial Sequence
  Description of Artificial Sequence: Synthetic oligonucleotide
cgaggagaucccuuggucu

SEQ ID NO: 368193 - RNA, 19 nt, Artificial Sequence
  Description of Artificial Sequence: Synthetic oligonucleotide
gguugagaucagcggcugu

SEQ ID NO: 368194 - RNA, 19 nt, Artificial Sequence
  Description of Artificial Sequence: Synthetic oligonucleotide
caagugguaucacgaucuu

SEQ ID NO: 368195 - RNA, 19 nt, Artificial Sequence
  Description of Artificial Sequence: Synthetic oligonucleotide
cugggccgaggagacagua

SEQ ID NO: 368196 - RNA, 19 nt, Artificial Sequence
  Description of Artificial Sequence: Synthetic oligonucleotide
gcugcucgagcaauggcau

SEQ ID NO: 368197 - RNA, 19 nt, Artificial Sequence
  Description of Artificial Sequence: Synthetic oligonucleotide
ggguagccccagagguucc

SEQ ID NO: 368198 - RNA, 19 nt, Artificial Sequence
  Description of Artificial Sequence: Synthetic oligonucleotide
gcguuguacuugugcuaaa

SEQ ID NO: 368199 - RNA, 19 nt, Artificial Sequence
  Description of Artificial Sequence: Synthetic oligonucleotide
ggggucgcaaggccaugua

SEQ ID NO: 368200 - RNA, 19 nt, Artificial Sequence
  Description of Artificial Sequence: Synthetic oligonucleotide
ccguuccagucgccgcugc

SEQ ID NO: 368201 - RNA, 19 nt, Artificial Sequence
  Description of Artificial Sequence: Synthetic oligonucleotide
gggguaguuacugcccgau

SEQ ID NO: 368202 - RNA, 19 nt, Artificial Sequence
  Description of Artificial Sequence: Synthetic oligonucleotide
ccacgggacaaggccucag

SEQ ID NO: 368203 - RNA, 19 nt, Artificial Sequence
  Description of Artificial Sequence: Synthetic oligonucleotide
gagccaagcucagggccuu

SEQ ID NO: 368204 - RNA, 19 nt, Artificial Sequence
  Description of Artificial Sequence: Synthetic oligonucleotide
gggugaaguccgaggagau

SEQ ID NO: 368205 - RNA, 19 nt, Artificial Sequence
  Description of Artificial Sequence: Synthetic oligonucleotide
cacguucuacauggucagu

SEQ ID NO: 368206 - RNA, 19 nt, Artificial Sequence
  Description of Artificial Sequence: Synthetic oligonucleotide
ggacccaagaaggcacaau

SEQ ID NO: 368207 - RNA, 19 nt, Artificial Sequence
  Description of Artificial Sequence: Synthetic oligonucleotide
ggccgaggagacaguaagu

SEQ ID NO: 368208 - RNA, 19 nt, Artificial Sequence
  Description of Artificial Sequence: Synthetic oligonucleotide
cgcaaggccauguaacauu

SEQ ID NO: 368209 - RNA, 19 nt, Artificial Sequence
  Description of Artificial Sequence: Synthetic oligonucleotide
cagccuaacccugcugguu

SEQ ID NO: 368210 - RNA, 19 nt, Artificial Sequence
  Description of Artificial Sequence: Synthetic oligonucleotide
ccaagagaguugugcggau

SEQ ID NO: 368211 - RNA, 19 nt, Artificial Sequence
  Description of Artificial Sequence: Synthetic oligonucleotide
gcggaucagcuugcaggaa

SEQ ID NO: 368212 - RNA, 19 nt, Artificial Sequence
  Description of Artificial Sequence: Synthetic oligonucleotide
ccacggucucacacacaua

SEQ ID NO: 368213 - RNA, 19 nt, Artificial Sequence
  Description of Artificial Sequence: Synthetic oligonucleotide
gccguggaguaggaauuuu

SEQ ID NO: 368214 - RNA, 19 nt, Artificial Sequence
  Description of Artificial Sequence: Synthetic oligonucleotide
cugagacgacgggcagcuu

SEQ ID NO: 368215 - RNA, 19 nt, Artificial Sequence
  Description of Artificial Sequence: Synthetic oligonucleotide
ccgccccguugcugccccu

SEQ ID NO: 368216 - RNA, 19 nt, Artificial Sequence
  Description of Artificial Sequence: Synthetic oligonucleotide
aacgauuuuccacagaagg

SEQ ID NO: 368217 - RNA, 19 nt, Artificial Sequence
  Description of Artificial Sequence: Synthetic oligonucleotide
aagcuaaucacuccuaagg

SEQ ID NO: 368218 - RNA, 19 nt, Artificial Sequence
  Description of Artificial Sequence: Synthetic oligonucleotide
uguacuugcagaugcaagg

SEQ ID NO: 368219 - RNA, 19 nt, Artificial Sequence
  Description of Artificial Sequence: Synthetic oligonucleotide
auugggaagagcugaaggc

SEQ ID NO: 368220 - RNA, 19 nt, Artificial Sequence
  Description of Artificial Sequence: Synthetic oligonucleotide
agcucuuacacucagguag

SEQ ID NO: 368221 - RNA, 19 nt, Artificial Sequence
  Description of Artificial Sequence: Synthetic oligonucleotide
acuucuaaggcacugugac

SEQ ID NO: 368222 - RNA, 19 nt, Artificial Sequence
  Description of Artificial Sequence: Synthetic oligonucleotide
uuuauuggggacaugacuc

SEQ ID NO: 368223 - RNA, 19 nt, Artificial Sequence
  Description of Artificial Sequence: Synthetic oligonucleotide
acuugagugagccagacug

SEQ ID NO: 368224 - RNA, 19 nt, Artificial Sequence
  Description of Artificial Sequence: Synthetic oligonucleotide
ucuacagggccccugauag

SEQ ID NO: 368225 - RNA, 19 nt, Artificial Sequence
  Description of Artificial Sequence: Synthetic oligonucleotide
aagcuuacuaagcuaauca

SEQ ID NO: 368226 - RNA, 19 nt, Artificial Sequence
  Description of Artificial Sequence: Synthetic oligonucleotide
acuguguaaagcucuggcc

SEQ ID NO: 368227 - RNA, 19 nt, Artificial Sequence
  Description of Artificial Sequence: Synthetic oligonucleotide
ugauacuugagugagccag

SEQ ID NO: 368228 - RNA, 19 nt, Artificial Sequence
  Description of Artificial Sequence: Synthetic oligonucleotide
ugguucuuaaggaaccagg

SEQ ID NO: 368229 - RNA, 19 nt, Artificial Sequence
  Description of Artificial Sequence: Synthetic oligonucleotide
aacuaccucuagcacuucc

SEQ ID NO: 368230 - RNA, 19 nt, Artificial Sequence
  Description of Artificial Sequence: Synthetic oligonucleotide
agcuaaucacuccuaaggg

SEQ ID NO: 368231 - RNA, 19 nt, Artificial Sequence
  Description of Artificial Sequence: Synthetic oligonucleotide
uuggcuuagcuccugacug

SEQ ID NO: 368232 - RNA, 19 nt, Artificial Sequence
  Description of Artificial Sequence: Synthetic oligonucleotide
accucuagcacuuccccgc

SEQ ID NO: 368233 - RNA, 19 nt, Artificial Sequence
  Description of Artificial Sequence: Synthetic oligonucleotide
ucaggugaugugccgagcg

SEQ ID NO: 368234 - RNA, 19 nt, Artificial Sequence
  Description of Artificial Sequence: Synthetic oligonucleotide
uagccuaagaggcucgggg

SEQ ID NO: 368235 - RNA, 19 nt, Artificial Sequence
  Description of Artificial Sequence: Synthetic oligonucleotide
accauugggucguacuucc

SEQ ID NO: 368236 - RNA, 19 nt, Artificial Sequence
  Description of Artificial Sequence: Synthetic oligonucleotide
uacuaagcuaaucacuccu

SEQ ID NO: 368237 - RNA, 19 nt, Artificial Sequence
  Description of Artificial Sequence: Synthetic oligonucleotide
ucuaguggagggcugggag

SEQ ID NO: 368238 - RNA, 19 nt, Artificial Sequence
  Description of Artificial Sequence: Synthetic oligonucleotide
augcaugaucaaaagaagc

SEQ ID NO: 368239 - RNA, 19 nt, Artificial Sequence
  Description of Artificial Sequence: Synthetic oligonucleotide
uccucuaccagcccuagga

SEQ ID NO: 368240 - RNA, 19 nt, Artificial Sequence
  Description of Artificial Sequence: Synthetic oligonucleotide
uuguccugaccccucaccg

SEQ ID NO: 368241 - RNA, 19 nt, Artificial Sequence
  Description of Artificial Sequence: Synthetic oligonucleotide
auuguccugaccccucacc

SEQ ID NO: 368242 - RNA, 19 nt, Artificial Sequence
  Description of Artificial Sequence: Synthetic oligonucleotide
aagaugcacuuucagguga

SEQ ID NO: 368243 - RNA, 19 nt, Artificial Sequence
  Description of Artificial Sequence: Synthetic oligonucleotide
ggcaacggaacucaggugg

SEQ ID NO: 368244 - RNA, 19 nt, Artificial Sequence
  Description of Artificial Sequence: Synthetic oligonucleotide
ugaggugcgaaacuugccu

SEQ ID NO: 368245 - RNA, 19 nt, Artificial Sequence
  Description of Artificial Sequence: Synthetic oligonucleotide
uacccaacuaccucuagca

SEQ ID NO: 368246 - RNA, 19 nt, Artificial Sequence
  Description of Artificial Sequence: Synthetic oligonucleotide
uaagcuaaucacuccuaag

SEQ ID NO: 368247 - RNA, 19 nt, Artificial Sequence
  Description of Artificial Sequence: Synthetic oligonucleotide
cuggguaccugcauagucg

SEQ ID NO: 368248 - RNA, 19 nt, Artificial Sequence
  Description of Artificial Sequence: Synthetic oligonucleotide
ugccgcucgaagaaggccg

SEQ ID NO: 368249 - RNA, 19 nt, Artificial Sequence
  Description of Artificial Sequence: Synthetic oligonucleotide
ucaagggcggcguugaagu

SEQ ID NO: 368250 - RNA, 19 nt, Artificial Sequence
  Description of Artificial Sequence: Synthetic oligonucleotide
ucaagacaccuguuuauug

SEQ ID NO: 368251 - RNA, 19 nt, Artificial Sequence
  Description of Artificial Sequence: Synthetic oligonucleotide
agcacuuccccgcuccugc

SEQ ID NO: 368252 - RNA, 19 nt, Artificial Sequence
  Description of Artificial Sequence: Synthetic oligonucleotide
acuggguaccugcauaguc

SEQ ID NO: 368253 - RNA, 19 nt, Artificial Sequence
  Description of Artificial Sequence: Synthetic oligonucleotide
gaucuagacagcccggggc

SEQ ID NO: 368254 - RNA, 19 nt, Artificial Sequence
  Description of Artificial Sequence: Synthetic oligonucleotide
aacggaacucagguggcgc

SEQ ID NO: 368255 - RNA, 19 nt, Artificial Sequence
  Description of Artificial Sequence: Synthetic oligonucleotide
caugugacccuugagaaac

SEQ ID NO: 368256 - RNA, 19 nt, Artificial Sequence
  Description of Artificial Sequence: Synthetic oligonucleotide
ucuagcacuuccccgcucc

SEQ ID NO: 368257 - RNA, 19 nt, Artificial Sequence
  Description of Artificial Sequence: Synthetic oligonucleotide
aauaaacucucaugccuau

SEQ ID NO: 368258 - RNA, 19 nt, Artificial Sequence
  Description of Artificial Sequence: Synthetic oligonucleotide
uuacuaagcuaaucacucc

SEQ ID NO: 368259 - RNA, 19 nt, Artificial Sequence
  Description of Artificial Sequence: Synthetic oligonucleotide
agcggaacgauuuuccaca

SEQ ID NO: 368260 - RNA, 19 nt, Artificial Sequence
  Description of Artificial Sequence: Synthetic oligonucleotide
ucaacgggaacacauccuc

SEQ ID NO: 368261 - RNA, 19 nt, Artificial Sequence
  Description of Artificial Sequence: Synthetic oligonucleotide
aaggcagcgggcggaaucc

SEQ ID NO: 368262 - RNA, 19 nt, Artificial Sequence
  Description of Artificial Sequence: Synthetic oligonucleotide
gugguguacuugcagaugc

SEQ ID NO: 368263 - RNA, 19 nt, Artificial Sequence
  Description of Artificial Sequence: Synthetic oligonucleotide
ugcacuuucaggugaugug

SEQ ID NO: 368264 - RNA, 19 nt, Artificial Sequence
  Description of Artificial Sequence: Synthetic oligonucleotide
ugugcuugcgcaugugacc

SEQ ID NO: 368265 - RNA, 19 nt, Artificial Sequence
  Description of Artificial Sequence: Synthetic oligonucleotide
gaagccuugugcuugcgca

SEQ ID NO: 368266 - RNA, 19 nt, Artificial Sequence
  Description of Artificial Sequence: Synthetic oligonucleotide
agaagccuugugcuugcgc

SEQ ID NO: 368267 - RNA, 19 nt, Artificial Sequence
  Description of Artificial Sequence: Synthetic oligonucleotide
uguuuauuggggacaugac

SEQ ID NO: 368268 - RNA, 19 nt, Artificial Sequence
  Description of Artificial Sequence: Synthetic oligonucleotide
guucuuaaggaaccagggc

SEQ ID NO: 368269 - RNA, 19 nt, Artificial Sequence
  Description of Artificial Sequence: Synthetic oligonucleotide
uguguaaagcucuggccac

SEQ ID NO: 368270 - RNA, 19 nt, Artificial Sequence
  Description of Artificial Sequence: Synthetic oligonucleotide
cuugagugagccagacugg

SEQ ID NO: 368271 - RNA, 19 nt, Artificial Sequence
  Description of Artificial Sequence: Synthetic oligonucleotide
gcuagaaggguacagugcc

SEQ ID NO: 368272 - RNA, 19 nt, Artificial Sequence
  Description of Artificial Sequence: Synthetic oligonucleotide
uauggaccagcagaaacug

SEQ ID NO: 368273 - RNA, 19 nt, Artificial Sequence
  Description of Artificial Sequence: Synthetic oligonucleotide
ugcauagucgcagugugga

SEQ ID NO: 368274 - RNA, 19 nt, Artificial Sequence
  Description of Artificial Sequence: Synthetic oligonucleotide
ucuucuaguggagggcugg

SEQ ID NO: 368275 - RNA, 19 nt, Artificial Sequence
  Description of Artificial Sequence: Synthetic oligonucleotide
cucccuaccguucuugccc

SEQ ID NO: 368276 - RNA, 19 nt, Artificial Sequence
  Description of Artificial Sequence: Synthetic oligonucleotide
agacuggguaccugcauag

SEQ ID NO: 368277 - RNA, 19 nt, Artificial Sequence
  Description of Artificial Sequence: Synthetic oligonucleotide
uuauuggggacaugacucu

SEQ ID NO: 368278 - RNA, 19 nt, Artificial Sequence
  Description of Artificial Sequence: Synthetic oligonucleotide
aggugcaaagccaggaugg

SEQ ID NO: 368279 - RNA, 19 nt, Artificial Sequence
  Description of Artificial Sequence: Synthetic oligonucleotide
guguucggagaugugagcg

SEQ ID NO: 368280 - RNA, 19 nt, Artificial Sequence
  Description of Artificial Sequence: Synthetic oligonucleotide
aggaccccguucuuugacc

SEQ ID NO: 368281 - RNA, 19 nt, Artificial Sequence
  Description of Artificial Sequence: Synthetic oligonucleotide
agaucuagacagcccgggg

SEQ ID NO: 368282 - RNA, 19 nt, Artificial Sequence
  Description of Artificial Sequence: Synthetic oligonucleotide
ugauggugcucggacauag

SEQ ID NO: 368283 - RNA, 19 nt, Artificial Sequence
  Description of Artificial Sequence: Synthetic oligonucleotide
cauugggucguacuucccc

SEQ ID NO: 368284 - RNA, 19 nt, Artificial Sequence
  Description of Artificial Sequence: Synthetic oligonucleotide
aggcagacgaggaaggaac

SEQ ID NO: 368285 - RNA, 19 nt, Artificial Sequence
  Description of Artificial Sequence: Synthetic oligonucleotide
agagugcccagcgaccugc

SEQ ID NO: 368286 - RNA, 19 nt, Artificial Sequence
  Description of Artificial Sequence: Synthetic oligonucleotide
uguacggugucgccuggcc

SEQ ID NO: 368287 - RNA, 19 nt, Artificial Sequence
  Description of Artificial Sequence: Synthetic oligonucleotide
ggugcucggacauagggug

SEQ ID NO: 368288 - RNA, 19 nt, Artificial Sequence
  Description of Artificial Sequence: Synthetic oligonucleotide
agcaacgucuacagggccc

SEQ ID NO: 368289 - RNA, 19 nt, Artificial Sequence
  Description of Artificial Sequence: Synthetic oligonucleotide
uguucggagaugugagcgc

SEQ ID NO: 368290 - RNA, 19 nt, Artificial Sequence
  Description of Artificial Sequence: Synthetic oligonucleotide
uguccugaccccucaccgg

SEQ ID NO: 368291 - RNA, 19 nt, Artificial Sequence
  Description of Artificial Sequence: Synthetic oligonucleotide
ugcgggguaagcuuacuaa

SEQ ID NO: 368292 - RNA, 19 nt, Artificial Sequence
  Description of Artificial Sequence: Synthetic oligonucleotide
uggguaccugcauagucgc

SEQ ID NO: 368293 - RNA, 19 nt, Artificial Sequence
  Description of Artificial Sequence: Synthetic oligonucleotide
uguguucggagaugugagc

SEQ ID NO: 368294 - RNA, 19 nt, Artificial Sequence
  Description of Artificial Sequence: Synthetic oligonucleotide
cuacccaacuaccucuagc

SEQ ID NO: 368295 - RNA, 19 nt, Artificial Sequence
  Description of Artificial Sequence: Synthetic oligonucleotide
uaagcuuacuaagcuaauc

SEQ ID NO: 368296 - RNA, 19 nt, Artificial Sequence
  Description of Artificial Sequence: Synthetic oligonucleotide
ucggacauaggguggagau

SEQ ID NO: 368297 - RNA, 19 nt, Artificial Sequence
  Description of Artificial Sequence: Synthetic oligonucleotide
ugauagggcuagaagggua

SEQ ID NO: 368298 - RNA, 19 nt, Artificial Sequence
  Description of Artificial Sequence: Synthetic oligonucleotide
auacuugagugagccagac

SEQ ID NO: 368299 - RNA, 19 nt, Artificial Sequence
  Description of Artificial Sequence: Synthetic oligonucleotide
ggacaugacucuucaacag

SEQ ID NO: 368300 - RNA, 19 nt, Artificial Sequence
  Description of Artificial Sequence: Synthetic oligonucleotide
ggaacgauuuuccacagaa

SEQ ID NO: 368301 - RNA, 19 nt, Artificial Sequence
  Description of Artificial Sequence: Synthetic oligonucleotide
ugcucuacccaacuaccuc

SEQ ID NO: 368302 - RNA, 19 nt, Artificial Sequence
  Description of Artificial Sequence: Synthetic oligonucleotide
cacuuucaggugaugugcc

SEQ ID NO: 368303 - RNA, 19 nt, Artificial Sequence
  Description of Artificial Sequence: Synthetic oligonucleotide
agggguucggccucaccac

SEQ ID NO: 368304 - RNA, 19 nt, Artificial Sequence
  Description of Artificial Sequence: Synthetic oligonucleotide
acccaacuaccucuagcac

SEQ ID NO: 368305 - RNA, 19 nt, Artificial Sequence
  Description of Artificial Sequence: Synthetic oligonucleotide
uguacucgaagaugcacuu

SEQ ID NO: 368306 - RNA, 19 nt, Artificial Sequence
  Description of Artificial Sequence: Synthetic oligonucleotide
agcccuaggaccccguucu

SEQ ID NO: 368307 - RNA, 19 nt, Artificial Sequence
  Description of Artificial Sequence: Synthetic oligonucleotide
ugccuauggaccagcagaa

SEQ ID NO: 368308 - RNA, 19 nt, Artificial Sequence
  Description of Artificial Sequence: Synthetic oligonucleotide
auaugcagguggcguuccc

SEQ ID NO: 368309 - RNA, 19 nt, Artificial Sequence
  Description of Artificial Sequence: Synthetic oligonucleotide
ucuacccaacuaccucuag

SEQ ID NO: 368310 - RNA, 19 nt, Artificial Sequence
  Description of Artificial Sequence: Synthetic oligonucleotide
ucaccauugggucguacuu

SEQ ID NO: 368311 - RNA, 19 nt, Artificial Sequence
  Description of Artificial Sequence: Synthetic oligonucleotide
auagucgcaguguggacau

SEQ ID NO: 368312 - RNA, 19 nt, Artificial Sequence
  Description of Artificial Sequence: Synthetic oligonucleotide
gcaacaggcgugcagcagg

SEQ ID NO: 368313 - RNA, 19 nt, Artificial Sequence
  Description of Artificial Sequence: Synthetic oligonucleotide
uagcaacgucuacagggcc

SEQ ID NO: 368314 - RNA, 19 nt, Artificial Sequence
  Description of Artificial Sequence: Synthetic oligonucleotide
ugugagcgcagcagagccc

SEQ ID NO: 368315 - RNA, 19 nt, Artificial Sequence
  Description of Artificial Sequence: Synthetic oligonucleotide
gauguaucagcccggggcu

SEQ ID NO: 368316 - RNA, 19 nt, Artificial Sequence
  Description of Artificial Sequence: Synthetic oligonucleotide
cuacggcaggugcagauug

SEQ ID NO: 368317 - RNA, 19 nt, Artificial Sequence
  Description of Artificial Sequence: Synthetic oligonucleotide
auacgggucccacacugcu

SEQ ID NO: 368318 - RNA, 19 nt, Artificial Sequence
  Description of Artificial Sequence: Synthetic oligonucleotide
caggcucaugucaggaggc

SEQ ID NO: 368319 - RNA, 19 nt, Artificial Sequence
  Description of Artificial Sequence: Synthetic oligonucleotide
gagugagccagacugggua

SEQ ID NO: 368320 - RNA, 19 nt, Artificial Sequence
  Description of Artificial Sequence: Synthetic oligonucleotide
caacaggcgugcagcaggg

SEQ ID NO: 368321 - RNA, 19 nt, Artificial Sequence
  Description of Artificial Sequence: Synthetic oligonucleotide
ggauacgggucccacacug

SEQ ID NO: 368322 - RNA, 19 nt, Artificial Sequence
  Description of Artificial Sequence: Synthetic oligonucleotide
uccgcugaggugcgaaacu

SEQ ID NO: 368323 - RNA, 19 nt, Artificial Sequence
  Description of Artificial Sequence: Synthetic oligonucleotide
agcaggcucaugucaggag

SEQ ID NO: 368324 - RNA, 19 nt, Artificial Sequence
  Description of Artificial Sequence: Synthetic oligonucleotide
cugcauagucgcagugugg

SEQ ID NO: 368325 - RNA, 19 nt, Artificial Sequence
  Description of Artificial Sequence: Synthetic oligonucleotide
guguacuugcagaugcaag

SEQ ID NO: 368326 - RNA, 19 nt, Artificial Sequence
  Description of Artificial Sequence: Synthetic oligonucleotide
gguaccugcauagucgcag

SEQ ID NO: 368327 - RNA, 19 nt, Artificial Sequence
  Description of Artificial Sequence: Synthetic oligonucleotide
agcggugaagggccacccc

SEQ ID NO: 368328 - RNA, 19 nt, Artificial Sequence
  Description of Artificial Sequence: Synthetic oligonucleotide
uccucaacgggaacacauc

SEQ ID NO: 368329 - RNA, 19 nt, Artificial Sequence
  Description of Artificial Sequence: Synthetic oligonucleotide
ugacaggaaucguaccaaa

SEQ ID NO: 368330 - RNA, 19 nt, Artificial Sequence
  Description of Artificial Sequence: Synthetic oligonucleotide
uagggcuagaaggguacag

SEQ ID NO: 368331 - RNA, 19 nt, Artificial Sequence
  Description of Artificial Sequence: Synthetic oligonucleotide
ugccucaagacaccuguuu

SEQ ID NO: 368332 - RNA, 19 nt, Artificial Sequence
  Description of Artificial Sequence: Synthetic oligonucleotide
ugucgccuggcccgauugg

SEQ ID NO: 368333 - RNA, 19 nt, Artificial Sequence
  Description of Artificial Sequence: Synthetic oligonucleotide
cuucacguagcagggcgcg

SEQ ID NO: 368334 - RNA, 19 nt, Artificial Sequence
  Description of Artificial Sequence: Synthetic oligonucleotide
cuggugugcaccuucaugu

SEQ ID NO: 368335 - RNA, 19 nt, Artificial Sequence
  Description of Artificial Sequence: Synthetic oligonucleotide
uugggucguacuuccccag

SEQ ID NO: 368336 - RNA, 19 nt, Artificial Sequence
  Description of Artificial Sequence: Synthetic oligonucleotide
ucuuacacucagguagccu

SEQ ID NO: 368337 - RNA, 19 nt, Artificial Sequence
  Description of Artificial Sequence: Synthetic oligonucleotide
uggagccaaaacugcacaa

SEQ ID NO: 368338 - RNA, 19 nt, Artificial Sequence
  Description of Artificial Sequence: Synthetic oligonucleotide
ugguguacuugcagaugca

SEQ ID NO: 368339 - RNA, 19 nt, Artificial Sequence
  Description of Artificial Sequence: Synthetic oligonucleotide
uucggagaugugagcgcag

SEQ ID NO: 368340 - RNA, 19 nt, Artificial Sequence
  Description of Artificial Sequence: Synthetic oligonucleotide
uaggaccccguucuuugac

SEQ ID NO: 368341 - RNA, 19 nt, Artificial Sequence
  Description of Artificial Sequence: Synthetic oligonucleotide
ugagugagccagacugggu

SEQ ID NO: 368342 - RNA, 19 nt, Artificial Sequence
  Description of Artificial Sequence: Synthetic oligonucleotide
cuauggaccagcagaaacu

SEQ ID NO: 368343 - RNA, 19 nt, Artificial Sequence
  Description of Artificial Sequence: Synthetic oligonucleotide
uguaucagcccggggcugc

SEQ ID NO: 368344 - RNA, 19 nt, Artificial Sequence
  Description of Artificial Sequence: Synthetic oligonucleotide
uacuugagugagccagacu

SEQ ID NO: 368345 - RNA, 19 nt, Artificial Sequence
  Description of Artificial Sequence: Synthetic oligonucleotide
uucggaucgggccccucca

SEQ ID NO: 368346 - RNA, 19 nt, Artificial Sequence
  Description of Artificial Sequence: Synthetic oligonucleotide
aggaaccugagggcgcgcc

SEQ ID NO: 368347 - RNA, 19 nt, Artificial Sequence
  Description of Artificial Sequence: Synthetic oligonucleotide
cauagucgcaguguggaca

SEQ ID NO: 368348 - RNA, 19 nt, Artificial Sequence
  Description of Artificial Sequence: Synthetic oligonucleotide
cuaagcuaaucacuccuaa

SEQ ID NO: 368349 - RNA, 19 nt, Artificial Sequence
  Description of Artificial Sequence: Synthetic oligonucleotide
agggcggcguugaaguagc

SEQ ID NO: 368350 - RNA, 19 nt, Artificial Sequence
  Description of Artificial Sequence: Synthetic oligonucleotide
ucggcacccucaccauugg

SEQ ID NO: 368351 - RNA, 19 nt, Artificial Sequence
  Description of Artificial Sequence: Synthetic oligonucleotide
aacaggcgugcagcagggc

SEQ ID NO: 368352 - RNA, 19 nt, Artificial Sequence
  Description of Artificial Sequence: Synthetic oligonucleotide
ucccuaccguucuugcccc

SEQ ID NO: 368353 - RNA, 19 nt, Artificial Sequence
  Description of Artificial Sequence: Synthetic oligonucleotide
ugggucguacuuccccagc

SEQ ID NO: 368354 - RNA, 19 nt, Artificial Sequence
  Description of Artificial Sequence: Synthetic oligonucleotide
auaaacucucaugccuaug

SEQ ID NO: 368355 - RNA, 19 nt, Artificial Sequence
  Description of Artificial Sequence: Synthetic oligonucleotide
uccgguggcaaaggggcag

SEQ ID NO: 368356 - RNA, 19 nt, Artificial Sequence
  Description of Artificial Sequence: Synthetic oligonucleotide
gauacuugagugagccaga

SEQ ID NO: 368357 - RNA, 19 nt, Artificial Sequence
  Description of Artificial Sequence: Synthetic oligonucleotide
gugcccagcgaccugcccc

SEQ ID NO: 368358 - RNA, 19 nt, Artificial Sequence
  Description of Artificial Sequence: Synthetic oligonucleotide
gauacgggucccacacugc

SEQ ID NO: 368359 - RNA, 19 nt, Artificial Sequence
  Description of Artificial Sequence: Synthetic oligonucleotide
gaaccugagggcgcgccag

SEQ ID NO: 368360 - RNA, 19 nt, Artificial Sequence
  Description of Artificial Sequence: Synthetic oligonucleotide
ucggagaugugagcgcagc

SEQ ID NO: 368361 - RNA, 19 nt, Artificial Sequence
  Description of Artificial Sequence: Synthetic oligonucleotide
gaagaaggccggguacuug

SEQ ID NO: 368362 - RNA, 19 nt, Artificial Sequence
  Description of Artificial Sequence: Synthetic oligonucleotide
gcgggguaagcuuacuaag

SEQ ID NO: 368363 - RNA, 19 nt, Artificial Sequence
  Description of Artificial Sequence: Synthetic oligonucleotide
uggcaacggaacucaggug

SEQ ID NO: 368364 - RNA, 19 nt, Artificial Sequence
  Description of Artificial Sequence: Synthetic oligonucleotide
aacgucuacagggccccug

SEQ ID NO: 368365 - RNA, 19 nt, Artificial Sequence
  Description of Artificial Sequence: Synthetic oligonucleotide
cuaaggcacugugacuccc

SEQ ID NO: 368366 - RNA, 19 nt, Artificial Sequence
  Description of Artificial Sequence: Synthetic oligonucleotide
aggugauacuugagugagc

SEQ ID NO: 368367 - RNA, 19 nt, Artificial Sequence
  Description of Artificial Sequence: Synthetic oligonucleotide
gacgaggaaggaaccugag

SEQ ID NO: 368368 - RNA, 19 nt, Artificial Sequence
  Description of Artificial Sequence: Synthetic oligonucleotide
aggauaugcagguggcguu

SEQ ID NO: 368369 - RNA, 19 nt, Artificial Sequence
  Description of Artificial Sequence: Synthetic oligonucleotide
cuacagggccccugauagg

SEQ ID NO: 368370 - RNA, 19 nt, Artificial Sequence
  Description of Artificial Sequence: Synthetic oligonucleotide
ugugccgagcggaacgauu

SEQ ID NO: 368371 - RNA, 19 nt, Artificial Sequence
  Description of Artificial Sequence: Synthetic oligonucleotide
gacagguccagggguucgg

SEQ ID NO: 368372 - RNA, 19 nt, Artificial Sequence
  Description of Artificial Sequence: Synthetic oligonucleotide
cagggguucggccucacca

SEQ ID NO: 368373 - RNA, 19 nt, Artificial Sequence
  Description of Artificial Sequence: Synthetic oligonucleotide
uacgggacccugcuccggu

SEQ ID NO: 368374 - RNA, 19 nt, Artificial Sequence
  Description of Artificial Sequence: Synthetic oligonucleotide
caccucugccacuucuaag

SEQ ID NO: 368375 - RNA, 19 nt, Artificial Sequence
  Description of Artificial Sequence: Synthetic oligonucleotide
cuggcaacggaacucaggu

SEQ ID NO: 368376 - RNA, 19 nt, Artificial Sequence
  Description of Artificial Sequence: Synthetic oligonucleotide
acggaacucagguggcgca

SEQ ID NO: 368377 - RNA, 19 nt, Artificial Sequence
  Description of Artificial Sequence: Synthetic oligonucleotide
ggaugacaggaaucguacc

SEQ ID NO: 368378 - RNA, 19 nt, Artificial Sequence
  Description of Artificial Sequence: Synthetic oligonucleotide
ggagauguaucagcccggg

SEQ ID NO: 368379 - RNA, 19 nt, Artificial Sequence
  Description of Artificial Sequence: Synthetic oligonucleotide
gggaugacaggaaucguac

SEQ ID NO: 368380 - RNA, 19 nt, Artificial Sequence
  Description of Artificial Sequence: Synthetic oligonucleotide
gguguguucggagauguga

SEQ ID NO: 368381 - RNA, 19 nt, Artificial Sequence
  Description of Artificial Sequence: Synthetic oligonucleotide
gaucgggccccuccaacca

SEQ ID NO: 368382 - RNA, 19 nt, Artificial Sequence
  Description of Artificial Sequence: Synthetic oligonucleotide
cuuuaccucuugguccacc

SEQ ID NO: 368383 - RNA, 19 nt, Artificial Sequence
  Description of Artificial Sequence: Synthetic oligonucleotide
agcccgacggcuguggugu

SEQ ID NO: 368384 - RNA, 19 nt, Artificial Sequence
  Description of Artificial Sequence: Synthetic oligonucleotide
guacggugucgccuggccc

SEQ ID NO: 368385 - RNA, 19 nt, Artificial Sequence
  Description of Artificial Sequence: Synthetic oligonucleotide
acgucuacagggccccuga

SEQ ID NO: 368386 - RNA, 19 nt, Artificial Sequence
  Description of Artificial Sequence: Synthetic oligonucleotide
gucggcacccucaccauug

SEQ ID NO: 368387 - RNA, 19 nt, Artificial Sequence
  Description of Artificial Sequence: Synthetic oligonucleotide
acggcaggugcagauuguc

SEQ ID NO: 368388 - RNA, 19 nt, Artificial Sequence
  Description of Artificial Sequence: Synthetic oligonucleotide
cugccggcggccccgagcc

SEQ ID NO: 368389 - RNA, 19 nt, Artificial Sequence
  Description of Artificial Sequence: Synthetic oligonucleotide
uacggcaggugcagauugu

SEQ ID NO: 368390 - RNA, 19 nt, Artificial Sequence
  Description of Artificial Sequence: Synthetic oligonucleotide
cguagggacagguccaggg

SEQ ID NO: 368391 - RNA, 19 nt, Artificial Sequence
  Description of Artificial Sequence: Synthetic oligonucleotide
aggugaugugccgagcgga

SEQ ID NO: 368392 - RNA, 19 nt, Artificial Sequence
  Description of Artificial Sequence: Synthetic oligonucleotide
cuuucaggugaugugccga

SEQ ID NO: 368393 - RNA, 19 nt, Artificial Sequence
  Description of Artificial Sequence: Synthetic oligonucleotide
guagagccgaggccccggg

SEQ ID NO: 368394 - RNA, 19 nt, Artificial Sequence
  Description of Artificial Sequence: Synthetic oligonucleotide
acguagcagggcgcguucc

SEQ ID NO: 368395 - RNA, 19 nt, Artificial Sequence
  Description of Artificial Sequence: Synthetic oligonucleotide
agggcuucguggacgcucg

SEQ ID NO: 368396 - RNA, 19 nt, Artificial Sequence
  Description of Artificial Sequence: Synthetic oligonucleotide
uucuaguggagggcuggga

SEQ ID NO: 368397 - RNA, 19 nt, Artificial Sequence
  Description of Artificial Sequence: Synthetic oligonucleotide
uucaggugaugugccgagc

SEQ ID NO: 368398 - RNA, 19 nt, Artificial Sequence
  Description of Artificial Sequence: Synthetic oligonucleotide
auagcuucguccagcucca

SEQ ID NO: 368399 - RNA, 19 nt, Artificial Sequence
  Description of Artificial Sequence: Synthetic oligonucleotide
ggaccccguucuuugaccc

SEQ ID NO: 368400 - RNA, 19 nt, Artificial Sequence
  Description of Artificial Sequence: Synthetic oligonucleotide
cacggcccgcuucggaucg

SEQ ID NO: 368401 - RNA, 19 nt, Artificial Sequence
  Description of Artificial Sequence: Synthetic oligonucleotide
ggccucuccagaucuagac

SEQ ID NO: 368402 - RNA, 19 nt, Artificial Sequence
  Description of Artificial Sequence: Synthetic oligonucleotide
cucuuacacucagguagcc

SEQ ID NO: 368403 - RNA, 19 nt, Artificial Sequence
  Description of Artificial Sequence: Synthetic oligonucleotide
ucgccuggcccgauuggga

SEQ ID NO: 368404 - RNA, 19 nt, Artificial Sequence
  Description of Artificial Sequence: Synthetic oligonucleotide
ggaucgggccccuccaacc

SEQ ID NO: 368405 - RNA, 19 nt, Artificial Sequence
  Description of Artificial Sequence: Synthetic oligonucleotide
cuugggugccuguaggucu

SEQ ID NO: 368406 - RNA, 19 nt, Artificial Sequence
  Description of Artificial Sequence: Synthetic oligonucleotide
gucgccuggcccgauuggg

SEQ ID NO: 368407 - RNA, 19 nt, Artificial Sequence
  Description of Artificial Sequence: Synthetic oligonucleotide
aguaggagugcagggccca

SEQ ID NO: 368408 - RNA, 19 nt, Artificial Sequence
  Description of Artificial Sequence: Synthetic oligonucleotide
ggugcagauuguccugacc

SEQ ID NO: 368409 - RNA, 19 nt, Artificial Sequence
  Description of Artificial Sequence: Synthetic oligonucleotide
ccuaggaccccguucuuug

SEQ ID NO: 368410 - RNA, 19 nt, Artificial Sequence
  Description of Artificial Sequence: Synthetic oligonucleotide
aggugcgaaacuugccuuu

SEQ ID NO: 368411 - RNA, 19 nt, Artificial Sequence
  Description of Artificial Sequence: Synthetic oligonucleotide
agcaacaggcgugcagcag

SEQ ID NO: 368412 - RNA, 19 nt, Artificial Sequence
  Description of Artificial Sequence: Synthetic oligonucleotide
gugcgaaacuugccuuugc

SEQ ID NO: 368413 - RNA, 19 nt, Artificial Sequence
  Description of Artificial Sequence: Synthetic oligonucleotide
uacgggucccacacugcuc

SEQ ID NO: 368414 - RNA, 19 nt, Artificial Sequence
  Description of Artificial Sequence: Synthetic oligonucleotide
ggacauaggguggagaugu

SEQ ID NO: 368415 - RNA, 19 nt, Artificial Sequence
  Description of Artificial Sequence: Synthetic oligonucleotide
gcugcucuacccaacuacc

SEQ ID NO: 368416 - RNA, 19 nt, Artificial Sequence
  Description of Artificial Sequence: Synthetic oligonucleotide
aggacuguguaaagcucug

SEQ ID NO: 368417 - RNA, 19 nt, Artificial Sequence
  Description of Artificial Sequence: Synthetic oligonucleotide
gacgcugaaggugauacuu

SEQ ID NO: 368418 - RNA, 19 nt, Artificial Sequence
  Description of Artificial Sequence: Synthetic oligonucleotide
uggcucgcaggugcaaagc

SEQ ID NO: 368419 - RNA, 19 nt, Artificial Sequence
  Description of Artificial Sequence: Synthetic oligonucleotide
uuaccucuugguccaccuu

SEQ ID NO: 368420 - RNA, 19 nt, Artificial Sequence
  Description of Artificial Sequence: Synthetic oligonucleotide
ccgagcggaacgauuuucc

SEQ ID NO: 368421 - RNA, 19 nt, Artificial Sequence
  Description of Artificial Sequence: Synthetic oligonucleotide
ccagaucuagacagcccgg

SEQ ID NO: 368422 - RNA, 19 nt, Artificial Sequence
  Description of Artificial Sequence: Synthetic oligonucleotide
uauuggggacaugacucuu

SEQ ID NO: 368423 - RNA, 19 nt, Artificial Sequence
  Description of Artificial Sequence: Synthetic oligonucleotide
caccauugggucguacuuc

SEQ ID NO: 368424 - RNA, 19 nt, Artificial Sequence
  Description of Artificial Sequence: Synthetic oligonucleotide
ggcucgcaggugcaaagcc

SEQ ID NO: 368425 - RNA, 19 nt, Artificial Sequence
  Description of Artificial Sequence: Synthetic oligonucleotide
uccugcgggguaagcuuac

SEQ ID NO: 368426 - RNA, 19 nt, Artificial Sequence
  Description of Artificial Sequence: Synthetic oligonucleotide
agguagccuaagaggcucg

SEQ ID NO: 368427 - RNA, 19 nt, Artificial Sequence
  Description of Artificial Sequence: Synthetic oligonucleotide
cgggguaagcuuacuaagc

SEQ ID NO: 368428 - RNA, 19 nt, Artificial Sequence
  Description of Artificial Sequence: Synthetic oligonucleotide
agcgggcggaauccuccuc

SEQ ID NO: 368429 - RNA, 19 nt, Artificial Sequence
  Description of Artificial Sequence: Synthetic oligonucleotide
agcagcgaccacacacggg

SEQ ID NO: 368430 - RNA, 19 nt, Artificial Sequence
  Description of Artificial Sequence: Synthetic oligonucleotide
gggguaagcuuacuaagcu

SEQ ID NO: 368431 - RNA, 19 nt, Artificial Sequence
  Description of Artificial Sequence: Synthetic oligonucleotide
aguagccgccagagggcgc

SEQ ID NO: 368432 - RNA, 19 nt, Artificial Sequence
  Description of Artificial Sequence: Synthetic oligonucleotide
aggagucggggcaggguuc

SEQ ID NO: 368433 - RNA, 19 nt, Artificial Sequence
  Description of Artificial Sequence: Synthetic oligonucleotide
gugcucggacauagggugg

SEQ ID NO: 368434 - RNA, 19 nt, Artificial Sequence
  Description of Artificial Sequence: Synthetic oligonucleotide
gcucuuacacucagguagc

SEQ ID NO: 368435 - RNA, 19 nt, Artificial Sequence
  Description of Artificial Sequence: Synthetic oligonucleotide
agguggcguucccucuccg

SEQ ID NO: 368436 - RNA, 19 nt, Artificial Sequence
  Description of Artificial Sequence: Synthetic oligonucleotide
ggccgucagacuguggugc

SEQ ID NO: 368437 - RNA, 19 nt, Artificial Sequence
  Description of Artificial Sequence: Synthetic oligonucleotide
auagggcuagaaggguaca

SEQ ID NO: 368438 - RNA, 19 nt, Artificial Sequence
  Description of Artificial Sequence: Synthetic oligonucleotide
uagcacuuccccgcuccug

SEQ ID NO: 368439 - RNA, 19 nt, Artificial Sequence
  Description of Artificial Sequence: Synthetic oligonucleotide
cugacugcggcugcaguga

SEQ ID NO: 368440 - RNA, 19 nt, Artificial Sequence
  Description of Artificial Sequence: Synthetic oligonucleotide
gcaacgucuacagggcccc

SEQ ID NO: 368441 - RNA, 19 nt, Artificial Sequence
  Description of Artificial Sequence: Synthetic oligonucleotide
cuccgcugaggugcgaaac

SEQ ID NO: 368442 - RNA, 19 nt, Artificial Sequence
  Description of Artificial Sequence: Synthetic oligonucleotide
cuccucaacgggaacacau

SEQ ID NO: 368443 - RNA, 19 nt, Artificial Sequence
  Description of Artificial Sequence: Synthetic oligonucleotide
caccucucccguugcgcag

SEQ ID NO: 368444 - RNA, 19 nt, Artificial Sequence
  Description of Artificial Sequence: Synthetic oligonucleotide
ggugcgaaacuugccuuug

SEQ ID NO: 368445 - RNA, 19 nt, Artificial Sequence
  Description of Artificial Sequence: Synthetic oligonucleotide
cauccucuaccagcccuag

SEQ ID NO: 368446 - RNA, 19 nt, Artificial Sequence
  Description of Artificial Sequence: Synthetic oligonucleotide
ggagucggggcaggguucg

SEQ ID NO: 368447 - RNA, 19 nt, Artificial Sequence
  Description of Artificial Sequence: Synthetic oligonucleotide
gcaugaucaaaagaagccu

SEQ ID NO: 368448 - RNA, 19 nt, Artificial Sequence
  Description of Artificial Sequence: Synthetic oligonucleotide
gccggguacuugcagugcc

SEQ ID NO: 368449 - RNA, 19 nt, Artificial Sequence
  Description of Artificial Sequence: Synthetic oligonucleotide
gugccgcucgaagaaggcc

SEQ ID NO: 368450 - RNA, 19 nt, Artificial Sequence
  Description of Artificial Sequence: Synthetic oligonucleotide
agaugcacuuucaggugau

SEQ ID NO: 368451 - RNA, 19 nt, Artificial Sequence
  Description of Artificial Sequence: Synthetic oligonucleotide
ggggcaugcaugaucaaaa

SEQ ID NO: 368452 - RNA, 19 nt, Artificial Sequence
  Description of Artificial Sequence: Synthetic oligonucleotide
caccuguuuauuggggaca

SEQ ID NO: 368453 - RNA, 19 nt, Artificial Sequence
  Description of Artificial Sequence: Synthetic oligonucleotide
auguaucagcccggggcug

SEQ ID NO: 368454 - RNA, 19 nt, Artificial Sequence
  Description of Artificial Sequence: Synthetic oligonucleotide
gcggaacgauuuuccacag

SEQ ID NO: 368455 - RNA, 19 nt, Artificial Sequence
  Description of Artificial Sequence: Synthetic oligonucleotide
ucggaucgggccccuccaa

SEQ ID NO: 368456 - RNA, 19 nt, Artificial Sequence
  Description of Artificial Sequence: Synthetic oligonucleotide
gcucgggcugguguguucg

SEQ ID NO: 368457 - RNA, 19 nt, Artificial Sequence
  Description of Artificial Sequence: Synthetic oligonucleotide
gcgggcggaauccuccucc

SEQ ID NO: 368458 - RNA, 19 nt, Artificial Sequence
  Description of Artificial Sequence: Synthetic oligonucleotide
uggcugcucuacccaacua

SEQ ID NO: 368459 - RNA, 19 nt, Artificial Sequence
  Description of Artificial Sequence: Synthetic oligonucleotide
ggguaagcuuacuaagcua

SEQ ID NO: 368460 - RNA, 19 nt, Artificial Sequence
  Description of Artificial Sequence: Synthetic oligonucleotide
ugcuugcgcaugugacccu

SEQ ID NO: 368461 - RNA, 19 nt, Artificial Sequence
  Description of Artificial Sequence: Synthetic oligonucleotide
cagggcgcguuccuccaac

SEQ ID NO: 368462 - RNA, 19 nt, Artificial Sequence
  Description of Artificial Sequence: Synthetic oligonucleotide
cccgcuucggaucgggccc

SEQ ID NO: 368463 - RNA, 19 nt, Artificial Sequence
  Description of Artificial Sequence: Synthetic oligonucleotide
acucuucaacagggaugac

SEQ ID NO: 368464 - RNA, 19 nt, Artificial Sequence
  Description of Artificial Sequence: Synthetic oligonucleotide
ggcagacgaggaaggaacc

SEQ ID NO: 368465 - RNA, 19 nt, Artificial Sequence
  Description of Artificial Sequence: Synthetic oligonucleotide
gguagagccgaggccccgg

SEQ ID NO: 368466 - RNA, 19 nt, Artificial Sequence
  Description of Artificial Sequence: Synthetic oligonucleotide
cagcccuaggaccccguuc

SEQ ID NO: 368467 - RNA, 19 nt, Artificial Sequence
  Description of Artificial Sequence: Synthetic oligonucleotide
gaggugcgaaacuugccuu

SEQ ID NO: 368468 - RNA, 19 nt, Artificial Sequence
  Description of Artificial Sequence: Synthetic oligonucleotide
ggguggguacugcuugccc

SEQ ID NO: 368469 - RNA, 19 nt, Artificial Sequence
  Description of Artificial Sequence: Synthetic oligonucleotide
cacguagcagggcgcguuc

SEQ ID NO: 368470 - RNA, 19 nt, Artificial Sequence
  Description of Artificial Sequence: Synthetic oligonucleotide
cuacgggacccugcuccgg

SEQ ID NO: 368471 - RNA, 19 nt, Artificial Sequence
  Description of Artificial Sequence: Synthetic oligonucleotide
ggcucccuaccguucuugc

SEQ ID NO: 368472 - RNA, 19 nt, Artificial Sequence
  Description of Artificial Sequence: Synthetic oligonucleotide
uucacguagcagggcgcgu

SEQ ID NO: 368473 - RNA, 19 nt, Artificial Sequence
  Description of Artificial Sequence: Synthetic oligonucleotide
gugaugugccgagcggaac

SEQ ID NO: 368474 - RNA, 19 nt, Artificial Sequence
  Description of Artificial Sequence: Synthetic oligonucleotide
cuuccuacgggacccugcu

SEQ ID NO: 368475 - RNA, 19 nt, Artificial Sequence
  Description of Artificial Sequence: Synthetic oligonucleotide
gcaacggaacucagguggc

SEQ ID NO: 368476 - RNA, 19 nt, Artificial Sequence
  Description of Artificial Sequence: Synthetic oligonucleotide
ugccgagcggaacgauuuu

SEQ ID NO: 368477 - RNA, 19 nt, Artificial Sequence
  Description of Artificial Sequence: Synthetic oligonucleotide
cccuugagaaaccaggacu

SEQ ID NO: 368478 - RNA, 19 nt, Artificial Sequence
  Description of Artificial Sequence: Synthetic oligonucleotide
aggcucaagggcggcguug

SEQ ID NO: 368479 - RNA, 19 nt, Artificial Sequence
  Description of Artificial Sequence: Synthetic oligonucleotide
aggcucaugucaggaggcu

SEQ ID NO: 368480 - RNA, 19 nt, Artificial Sequence
  Description of Artificial Sequence: Synthetic oligonucleotide
cugcccguagggacagguc

SEQ ID NO: 368481 - RNA, 19 nt, Artificial Sequence
  Description of Artificial Sequence: Synthetic oligonucleotide
uggcccgauugggaagagc

SEQ ID NO: 368482 - RNA, 19 nt, Artificial Sequence
  Description of Artificial Sequence: Synthetic oligonucleotide
guaccugcauagucgcagu

SEQ ID NO: 368483 - RNA, 19 nt, Artificial Sequence
  Description of Artificial Sequence: Synthetic oligonucleotide
guugcgcaggguccuccca

SEQ ID NO: 368484 - RNA, 19 nt, Artificial Sequence
  Description of Artificial Sequence: Synthetic oligonucleotide
acgggacccugcuccggug

SEQ ID NO: 368485 - RNA, 19 nt, Artificial Sequence
  Description of Artificial Sequence: Synthetic oligonucleotide
gguucgccucauguucagg

SEQ ID NO: 368486 - RNA, 19 nt, Artificial Sequence
  Description of Artificial Sequence: Synthetic oligonucleotide
cucuacccaacuaccucua

SEQ ID NO: 368487 - RNA, 19 nt, Artificial Sequence
  Description of Artificial Sequence: Synthetic oligonucleotide
gcagcgggcggaauccucc

SEQ ID NO: 368488 - RNA, 19 nt, Artificial Sequence
  Description of Artificial Sequence: Synthetic oligonucleotide
caagaccggccucuccaga

SEQ ID NO: 368489 - RNA, 19 nt, Artificial Sequence
  Description of Artificial Sequence: Synthetic oligonucleotide
caacgggaacacauccucu

SEQ ID NO: 368490 - RNA, 19 nt, Artificial Sequence
  Description of Artificial Sequence: Synthetic oligonucleotide
gcacuuccccgcuccugcg

SEQ ID NO: 368491 - RNA, 19 nt, Artificial Sequence
  Description of Artificial Sequence: Synthetic oligonucleotide
gggcacgcaaaggacccag

SEQ ID NO: 368492 - RNA, 19 nt, Artificial Sequence
  Description of Artificial Sequence: Synthetic oligonucleotide
cugaccccucaccggggug

SEQ ID NO: 368493 - RNA, 19 nt, Artificial Sequence
  Description of Artificial Sequence: Synthetic oligonucleotide
cugcucuacccaacuaccu

SEQ ID NO: 368494 - RNA, 19 nt, Artificial Sequence
  Description of Artificial Sequence: Synthetic oligonucleotide
ggcccgauugggaagagcu

SEQ ID NO: 368495 - RNA, 19 nt, Artificial Sequence
  Description of Artificial Sequence: Synthetic oligonucleotide
cucggacauaggguggaga

SEQ ID NO: 368496 - RNA, 19 nt, Artificial Sequence
  Description of Artificial Sequence: Synthetic oligonucleotide
cuucguggacgcucgggcu

SEQ ID NO: 368497 - RNA, 19 nt, Artificial Sequence
  Description of Artificial Sequence: Synthetic oligonucleotide
gcuucacguagcagggcgc

SEQ ID NO: 368498 - RNA, 19 nt, Artificial Sequence
  Description of Artificial Sequence: Synthetic oligonucleotide
gggccgucagacuguggug

SEQ ID NO: 368499 - RNA, 19 nt, Artificial Sequence
  Description of Artificial Sequence: Synthetic oligonucleotide
gcuuccuacgggacccugc

SEQ ID NO: 368500 - RNA, 19 nt, Artificial Sequence
  Description of Artificial Sequence: Synthetic oligonucleotide
auaagccagcaggcucaug

SEQ ID NO: 368501 - RNA, 19 nt, Artificial Sequence
  Description of Artificial Sequence: Synthetic oligonucleotide
uuccccgcuccugcggggu

SEQ ID NO: 368502 - RNA, 19 nt, Artificial Sequence
  Description of Artificial Sequence: Synthetic oligonucleotide
cccgauugggaagagcuga

SEQ ID NO: 368503 - RNA, 19 nt, Artificial Sequence
  Description of Artificial Sequence: Synthetic oligonucleotide
cugauagggcuagaagggu

SEQ ID NO: 368504 - RNA, 19 nt, Artificial Sequence
  Description of Artificial Sequence: Synthetic oligonucleotide
cagggucggcacccucacc

SEQ ID NO: 368505 - RNA, 19 nt, Artificial Sequence
  Description of Artificial Sequence: Synthetic oligonucleotide
gggccccuacggcaggugc

SEQ ID NO: 368506 - RNA, 19 nt, Artificial Sequence
  Description of Artificial Sequence: Synthetic oligonucleotide
ccauugggucguacuuccc

SEQ ID NO: 368507 - RNA, 19 nt, Artificial Sequence
  Description of Artificial Sequence: Synthetic oligonucleotide
cugcgggguaagcuuacua

SEQ ID NO: 368508 - RNA, 19 nt, Artificial Sequence
  Description of Artificial Sequence: Synthetic oligonucleotide
ggaaccugagggcgcgcca

SEQ ID NO: 368509 - RNA, 19 nt, Artificial Sequence
  Description of Artificial Sequence: Synthetic oligonucleotide
gccgcucgaagaaggccgg

SEQ ID NO: 368510 - RNA, 19 nt, Artificial Sequence
  Description of Artificial Sequence: Synthetic oligonucleotide
cuccgguggcaaaggggca

SEQ ID NO: 368511 - RNA, 19 nt, Artificial Sequence
  Description of Artificial Sequence: Synthetic oligonucleotide
gcucgcaggugcaaagcca

SEQ ID NO: 368512 - RNA, 19 nt, Artificial Sequence
  Description of Artificial Sequence: Synthetic oligonucleotide
cgcgccaggcccucugugg

SEQ ID NO: 368513 - RNA, 19 nt, Artificial Sequence
  Description of Artificial Sequence: Synthetic oligonucleotide
guagccgccagagggcgcu

SEQ ID NO: 368514 - RNA, 19 nt, Artificial Sequence
  Description of Artificial Sequence: Synthetic oligonucleotide
gcacgcaaaggacccagcu

SEQ ID NO: 368515 - RNA, 19 nt, Artificial Sequence
  Description of Artificial Sequence: Synthetic oligonucleotide
gcucucgguggugacgcug

SEQ ID NO: 368516 - RNA, 19 nt, Artificial Sequence
  Description of Artificial Sequence: Synthetic oligonucleotide
gaccccguucuuugacccu

SEQ ID NO: 368517 - RNA, 19 nt, Artificial Sequence
  Description of Artificial Sequence: Synthetic oligonucleotide
cccgcugcgcugcacgaug

SEQ ID NO: 368518 - RNA, 19 nt, Artificial Sequence
  Description of Artificial Sequence: Synthetic oligonucleotide
gggucguacuuccccagcu

SEQ ID NO: 368519 - RNA, 19 nt, Artificial Sequence
  Description of Artificial Sequence: Synthetic oligonucleotide
gccccuacggcaggugcag

SEQ ID NO: 368520 - RNA, 19 nt, Artificial Sequence
  Description of Artificial Sequence: Synthetic oligonucleotide
gacuggguaccugcauagu

SEQ ID NO: 368521 - RNA, 19 nt, Artificial Sequence
  Description of Artificial Sequence: Synthetic oligonucleotide
gcgcucggaggccccgugg

SEQ ID NO: 368522 - RNA, 19 nt, Artificial Sequence
  Description of Artificial Sequence: Synthetic oligonucleotide
gcucggaggccccgugggc

SEQ ID NO: 368523 - RNA, 19 nt, Artificial Sequence
  Description of Artificial Sequence: Synthetic oligonucleotide
gagggcgcucggaggcccc

SEQ ID NO: 368524 - RNA, 19 nt, Artificial Sequence
  Description of Artificial Sequence: Synthetic oligonucleotide
cugacccggcuuccaccuc

SEQ ID NO: 368525 - RNA, 19 nt, Artificial Sequence
  Description of Artificial Sequence: Synthetic oligonucleotide
ggcacgcaaaggacccagc

SEQ ID NO: 368526 - RNA, 19 nt, Artificial Sequence
  Description of Artificial Sequence: Synthetic oligonucleotide
ccaccucucccguugcgca

SEQ ID NO: 368527 - RNA, 19 nt, Artificial Sequence
  Description of Artificial Sequence: Synthetic oligonucleotide
cucuccgcugaggugcgaa

SEQ ID NO: 368528 - RNA, 19 nt, Artificial Sequence
  Description of Artificial Sequence: Synthetic oligonucleotide
gccgagcggaacgauuuuc

SEQ ID NO: 368529 - RNA, 19 nt, Artificial Sequence
  Description of Artificial Sequence: Synthetic oligonucleotide
ggaccugcacugcuccucu

SEQ ID NO: 368530 - RNA, 19 nt, Artificial Sequence
  Description of Artificial Sequence: Synthetic oligonucleotide
cuggcccgauugggaagag

SEQ ID NO: 368531 - RNA, 19 nt, Artificial Sequence
  Description of Artificial Sequence: Synthetic oligonucleotide
caagggcggcguugaagua

SEQ ID NO: 368532 - RNA, 19 nt, Artificial Sequence
  Description of Artificial Sequence: Synthetic oligonucleotide
gcccgauugggaagagcug

SEQ ID NO: 368533 - RNA, 19 nt, Artificial Sequence
  Description of Artificial Sequence: Synthetic oligonucleotide
ccucaagacaccuguuuau

SEQ ID NO: 368534 - RNA, 19 nt, Artificial Sequence
  Description of Artificial Sequence: Synthetic oligonucleotide
cccucuccgcugaggugcg

SEQ ID NO: 368535 - RNA, 19 nt, Artificial Sequence
  Description of Artificial Sequence: Synthetic oligonucleotide
gggcucccuaccguucuug

SEQ ID NO: 368536 - RNA, 19 nt, Artificial Sequence
  Description of Artificial Sequence: Synthetic oligonucleotide
gagucggggcaggguucgc

SEQ ID NO: 368537 - RNA, 19 nt, Artificial Sequence
  Description of Artificial Sequence: Synthetic oligonucleotide
ggccggguacuugcagugc

SEQ ID NO: 368538 - RNA, 19 nt, Artificial Sequence
  Description of Artificial Sequence: Synthetic oligonucleotide
cguugcgcaggguccuccc

SEQ ID NO: 368539 - RNA, 19 nt, Artificial Sequence
  Description of Artificial Sequence: Synthetic oligonucleotide
aggcagcgggcggaauccu

SEQ ID NO: 368540 - RNA, 19 nt, Artificial Sequence
  Description of Artificial Sequence: Synthetic oligonucleotide
cuagcacuuccccgcuccu

SEQ ID NO: 368541 - RNA, 19 nt, Artificial Sequence
  Description of Artificial Sequence: Synthetic oligonucleotide
cgccagagggcgcucggag

SEQ ID NO: 368542 - RNA, 19 nt, Artificial Sequence
  Description of Artificial Sequence: Synthetic oligonucleotide
gggcuucguggacgcucgg

SEQ ID NO: 368543 - RNA, 19 nt, Artificial Sequence
  Description of Artificial Sequence: Synthetic oligonucleotide
ccucucccguugcgcaggg

SEQ ID NO: 368544 - RNA, 19 nt, Artificial Sequence
  Description of Artificial Sequence: Synthetic oligonucleotide
guggacgcucgggcuggug

SEQ ID NO: 368545 - RNA, 19 nt, Artificial Sequence
  Description of Artificial Sequence: Synthetic oligonucleotide
ccacggcccgcuucggauc

SEQ ID NO: 368546 - RNA, 19 nt, Artificial Sequence
  Description of Artificial Sequence: Synthetic oligonucleotide
ccgauugggaagagcugaa

SEQ ID NO: 368547 - RNA, 19 nt, Artificial Sequence
  Description of Artificial Sequence: Synthetic oligonucleotide
gcagacgaggaaggaaccu

SEQ ID NO: 368548 - RNA, 19 nt, Artificial Sequence
  Description of Artificial Sequence: Synthetic oligonucleotide
gcccguagggacaggucca

SEQ ID NO: 368549 - RNA, 19 nt, Artificial Sequence
  Description of Artificial Sequence: Synthetic oligonucleotide
cucggcgcucagcuggggu

SEQ ID NO: 368550 - RNA, 19 nt, Artificial Sequence
  Description of Artificial Sequence: Synthetic oligonucleotide
ggcuuccuacgggacccug

SEQ ID NO: 368551 - RNA, 19 nt, Artificial Sequence
  Description of Artificial Sequence: Synthetic oligonucleotide
ccagggguucggccucacc

SEQ ID NO: 368552 - RNA, 19 nt, Artificial Sequence
  Description of Artificial Sequence: Synthetic oligonucleotide
cugauggugcucggacaua

SEQ ID NO: 368553 - RNA, 19 nt, Artificial Sequence
  Description of Artificial Sequence: Synthetic oligonucleotide
cggacauaggguggagaug

SEQ ID NO: 368554 - RNA, 19 nt, Artificial Sequence
  Description of Artificial Sequence: Synthetic oligonucleotide
ccugacccggcuuccaccu

SEQ ID NO: 368555 - RNA, 19 nt, Artificial Sequence
  Description of Artificial Sequence: Synthetic oligonucleotide
ggccccuacggcaggugca

SEQ ID NO: 368556 - RNA, 19 nt, Artificial Sequence
  Description of Artificial Sequence: Synthetic oligonucleotide
ccaaccagcagcccauuuu

SEQ ID NO: 368557 - RNA, 19 nt, Artificial Sequence
  Description of Artificial Sequence: Synthetic oligonucleotide
ccgucagacuguggugcag

SEQ ID NO: 368558 - RNA, 19 nt, Artificial Sequence
  Description of Artificial Sequence: Synthetic oligonucleotide
ggugacgcugaaggugaua

SEQ ID NO: 368559 - RNA, 19 nt, Artificial Sequence
  Description of Artificial Sequence: Synthetic oligonucleotide
gcgcgccaggcccucugug

SEQ ID NO: 368560 - RNA, 19 nt, Artificial Sequence
  Description of Artificial Sequence: Synthetic oligonucleotide
ggcagcgggcggaauccuc

SEQ ID NO: 368561 - RNA, 19 nt, Artificial Sequence
  Description of Artificial Sequence: Synthetic oligonucleotide
agggccccugauagggcua

SEQ ID NO: 368562 - RNA, 19 nt, Artificial Sequence
  Description of Artificial Sequence: Synthetic oligonucleotide
ccguugcgcaggguccucc

SEQ ID NO: 368563 - RNA, 19 nt, Artificial Sequence
  Description of Artificial Sequence: Synthetic oligonucleotide
ggguaccugcauagucgca

SEQ ID NO: 368564 - RNA, 19 nt, Artificial Sequence
  Description of Artificial Sequence: Synthetic oligonucleotide
cugcgcccgcggggaaggg

SEQ ID NO: 368565 - RNA, 19 nt, Artificial Sequence
  Description of Artificial Sequence: Synthetic oligonucleotide
acgcucgggcugguguguu

SEQ ID NO: 368566 - RNA, 19 nt, Artificial Sequence
  Description of Artificial Sequence: Synthetic oligonucleotide
cagcgggcggaauccuccu

SEQ ID NO: 368567 - RNA, 19 nt, Artificial Sequence
  Description of Artificial Sequence: Synthetic oligonucleotide
ccucugcucucggugguga

SEQ ID NO: 368568 - RNA, 19 nt, Artificial Sequence
  Description of Artificial Sequence: Synthetic oligonucleotide
cggagaugugagcgcagca

SEQ ID NO: 368569 - RNA, 19 nt, Artificial Sequence
  Description of Artificial Sequence: Synthetic oligonucleotide
ggggcacgcaaaggaccca

SEQ ID NO: 368570 - RNA, 19 nt, Artificial Sequence
  Description of Artificial Sequence: Synthetic oligonucleotide
cggaacgauuuuccacaga

SEQ ID NO: 368571 - RNA, 19 nt, Artificial Sequence
  Description of Artificial Sequence: Synthetic oligonucleotide
cccgacggcugugguguac

SEQ ID NO: 368572 - RNA, 19 nt, Artificial Sequence
  Description of Artificial Sequence: Synthetic oligonucleotide
cgugggccgucagacugug

SEQ ID NO: 368573 - RNA, 19 nt, Artificial Sequence
  Description of Artificial Sequence: Synthetic oligonucleotide
cccuacggcaggugcagau

SEQ ID NO: 368574 - RNA, 19 nt, Artificial Sequence
  Description of Artificial Sequence: Synthetic oligonucleotide
cgccuggcccgauugggaa

SEQ ID NO: 368575 - RNA, 19 nt, Artificial Sequence
  Description of Artificial Sequence: Synthetic oligonucleotide
ccucuagcacuuccccgcu

SEQ ID NO: 368576 - RNA, 19 nt, Artificial Sequence
  Description of Artificial Sequence: Synthetic oligonucleotide
ggugucgccuggcccgauu

SEQ ID NO: 368577 - RNA, 19 nt, Artificial Sequence
  Description of Artificial Sequence: Synthetic oligonucleotide
cgggcggaauccuccucca

SEQ ID NO: 368578 - RNA, 19 nt, Artificial Sequence
  Description of Artificial Sequence: Synthetic oligonucleotide
cacacggggcaugcaugau

SEQ ID NO: 368579 - RNA, 19 nt, Artificial Sequence
  Description of Artificial Sequence: Synthetic oligonucleotide
ccugaccccucaccggggu

SEQ ID NO: 368580 - RNA, 19 nt, Artificial Sequence
  Description of Artificial Sequence: Synthetic oligonucleotide
ccugcccguagggacaggu

SEQ ID NO: 368581 - RNA, 19 nt, Artificial Sequence
  Description of Artificial Sequence: Synthetic oligonucleotide
caggcucaagggcggcguu

SEQ ID NO: 368582 - RNA, 19 nt, Artificial Sequence
  Description of Artificial Sequence: Synthetic oligonucleotide
gccccacggcccgcuucgg

SEQ ID NO: 368583 - RNA, 19 nt, Artificial Sequence
  Description of Artificial Sequence: Synthetic oligonucleotide
cgcucgggcugguguguuc

SEQ ID NO: 368584 - RNA, 19 nt, Artificial Sequence
  Description of Artificial Sequence: Synthetic oligonucleotide
gggcggaauccuccuccau

SEQ ID NO: 368585 - RNA, 19 nt, Artificial Sequence
  Description of Artificial Sequence: Synthetic oligonucleotide
caacgucuacagggccccu

SEQ ID NO: 368586 - RNA, 19 nt, Artificial Sequence
  Description of Artificial Sequence: Synthetic oligonucleotide
ccgacggcugugguguacu

SEQ ID NO: 368587 - RNA, 19 nt, Artificial Sequence
  Description of Artificial Sequence: Synthetic oligonucleotide
ccgugggccgucagacugu

SEQ ID NO: 368588 - RNA, 19 nt, Artificial Sequence
  Description of Artificial Sequence: Synthetic oligonucleotide
cccguugcgcaggguccuc

SEQ ID NO: 368589 - RNA, 19 nt, Artificial Sequence
  Description of Artificial Sequence: Synthetic oligonucleotide
ccuacggcaggugcagauu

SEQ ID NO: 368590 - RNA, 19 nt, Artificial Sequence
  Description of Artificial Sequence: Synthetic oligonucleotide
ccgcugaggugcgaaacuu

SEQ ID NO: 368591 - RNA, 19 nt, Artificial Sequence
  Description of Artificial Sequence: Synthetic oligonucleotide
ggggcucccuaccguucuu

SEQ ID NO: 368592 - RNA, 19 nt, Artificial Sequence
  Description of Artificial Sequence: Synthetic oligonucleotide
ccgccagagggcgcucgga

SEQ ID NO: 368593 - RNA, 19 nt, Artificial Sequence
  Description of Artificial Sequence: Synthetic oligonucleotide
cccuaggaccccguucuuu

SEQ ID NO: 368594 - RNA, 19 nt, Artificial Sequence
  Description of Artificial Sequence: Synthetic oligonucleotide
ccugcgggguaagcuuacu

SEQ ID NO: 368595 - RNA, 19 nt, Artificial Sequence
  Description of Artificial Sequence: Synthetic oligonucleotide
ccccuacggcaggugcaga

SEQ ID NO: 368596 - RNA, 19 nt, Artificial Sequence
  Description of Artificial Sequence: Synthetic oligonucleotide
gcccgacggcuguggugua

SEQ ID NO: 368597 - RNA, 19 nt, Artificial Sequence
  Description of Artificial Sequence: Synthetic oligonucleotide
ccagcccuaggaccccguu

SEQ ID NO: 368598 - RNA, 19 nt, Artificial Sequence
  Description of Artificial Sequence: Synthetic oligonucleotide
ccucuccgcugaggugcga

SEQ ID NO: 368599 - RNA, 19 nt, Artificial Sequence
  Description of Artificial Sequence: Synthetic oligonucleotide
gggcgcucggaggccccgu

SEQ ID NO: 368600 - RNA, 19 nt, Artificial Sequence
  Description of Artificial Sequence: Synthetic oligonucleotide
aaacaaguaaaauacagug

SEQ ID NO: 368601 - RNA, 19 nt, Artificial Sequence
  Description of Artificial Sequence: Synthetic oligonucleotide
agaugcauaagauacaguc

SEQ ID NO: 368602 - RNA, 19 nt, Artificial Sequence
  Description of Artificial Sequence: Synthetic oligonucleotide
aauacagagaugcauaaga

SEQ ID NO: 368603 - RNA, 19 nt, Artificial Sequence
  Description of Artificial Sequence: Synthetic oligonucleotide
uaagauacaguccaugccc

SEQ ID NO: 368604 - RNA, 19 nt, Artificial Sequence
  Description of Artificial Sequence: Synthetic oligonucleotide
acagagaugcauaagauac

SEQ ID NO: 368605 - RNA, 19 nt, Artificial Sequence
  Description of Artificial Sequence: Synthetic oligonucleotide
aauucauucauucaacauu

SEQ ID NO: 368606 - RNA, 19 nt, Artificial Sequence
  Description of Artificial Sequence: Synthetic oligonucleotide
uuaggaauggcucugucug

SEQ ID NO: 368607 - RNA, 19 nt, Artificial Sequence
  Description of Artificial Sequence: Synthetic oligonucleotide
uguagugccaggcaauggg

SEQ ID NO: 368608 - RNA, 19 nt, Artificial Sequence
  Description of Artificial Sequence: Synthetic oligonucleotide
aaggcucugacauacgaag

SEQ ID NO: 368609 - RNA, 19 nt, Artificial Sequence
  Description of Artificial Sequence: Synthetic oligonucleotide
ugugucuuuggccugaggc

SEQ ID NO: 368610 - RNA, 19 nt, Artificial Sequence
  Description of Artificial Sequence: Synthetic oligonucleotide
ucuaauacgguguccagug

SEQ ID NO: 368611 - RNA, 19 nt, Artificial Sequence
  Description of Artificial Sequence: Synthetic oligonucleotide
aggaauggguuguaggugc

SEQ ID NO: 368612 - RNA, 19 nt, Artificial Sequence
  Description of Artificial Sequence: Synthetic oligonucleotide
cuugcugugccuucgaagg

SEQ ID NO: 368613 - RNA, 19 nt, Artificial Sequence
  Description of Artificial Sequence: Synthetic oligonucleotide
uagaguaucagucacccaa

SEQ ID NO: 368614 - RNA, 19 nt, Artificial Sequence
  Description of Artificial Sequence: Synthetic oligonucleotide
uuggcgaccacuuaaccag

SEQ ID NO: 368615 - RNA, 19 nt, Artificial Sequence
  Description of Artificial Sequence: Synthetic oligonucleotide
augcauaagauacagucca

SEQ ID NO: 368616 - RNA, 19 nt, Artificial Sequence
  Description of Artificial Sequence: Synthetic oligonucleotide
uauacaggcuauaccaggc

SEQ ID NO: 368617 - RNA, 19 nt, Artificial Sequence
  Description of Artificial Sequence: Synthetic oligonucleotide
auauaggcguuagacaggc

SEQ ID NO: 368618 - RNA, 19 nt, Artificial Sequence
  Description of Artificial Sequence: Synthetic oligonucleotide
cugggagaggcuaauauag

SEQ ID NO: 368619 - RNA, 19 nt, Artificial Sequence
  Description of Artificial Sequence: Synthetic oligonucleotide
uagaguggguuccaaaggc

SEQ ID NO: 368620 - RNA, 19 nt, Artificial Sequence
  Description of Artificial Sequence: Synthetic oligonucleotide
aauacgguguccagugagc

SEQ ID NO: 368621 - RNA, 19 nt, Artificial Sequence
  Description of Artificial Sequence: Synthetic oligonucleotide
uuucaugggguucuugccc

SEQ ID NO: 368622 - RNA, 19 nt, Artificial Sequence
  Description of Artificial Sequence: Synthetic oligonucleotide
ugcauauucguguccaggc

SEQ ID NO: 368623 - RNA, 19 nt, Artificial Sequence
  Description of Artificial Sequence: Synthetic oligonucleotide
uuaaggauucacagucuag

SEQ ID NO: 368624 - RNA, 19 nt, Artificial Sequence
  Description of Artificial Sequence: Synthetic oligonucleotide
guauacaggcuauaccagg

SEQ ID NO: 368625 - RNA, 19 nt, Artificial Sequence
  Description of Artificial Sequence: Synthetic oligonucleotide
ugcccuuaaggauucacag

SEQ ID NO: 368626 - RNA, 19 nt, Artificial Sequence
  Description of Artificial Sequence: Synthetic oligonucleotide
cacgagagaagcauuuacg

SEQ ID NO: 368627 - RNA, 19 nt, Artificial Sequence
  Description of Artificial Sequence: Synthetic oligonucleotide
gaacagacuagccugguca

SEQ ID NO: 368628 - RNA, 19 nt, Artificial Sequence
  Description of Artificial Sequence: Synthetic oligonucleotide
agucuggugguauugcuag

SEQ ID NO: 368629 - RNA, 19 nt, Artificial Sequence
  Description of Artificial Sequence: Synthetic oligonucleotide
aauggcaaccaaguuaacu

SEQ ID NO: 368630 - RNA, 19 nt, Artificial Sequence
  Description of Artificial Sequence: Synthetic oligonucleotide
acauacgaagcguggcucc

SEQ ID NO: 368631 - RNA, 19 nt, Artificial Sequence
  Description of Artificial Sequence: Synthetic oligonucleotide
aauauaggcguuagacagg

SEQ ID NO: 368632 - RNA, 19 nt, Artificial Sequence
  Description of Artificial Sequence: Synthetic oligonucleotide
aacagacuagccuggucag

SEQ ID NO: 368633 - RNA, 19 nt, Artificial Sequence
  Description of Artificial Sequence: Synthetic oligonucleotide
agaaggguaaggcaaacau

SEQ ID NO: 368634 - RNA, 19 nt, Artificial Sequence
  Description of Artificial Sequence: Synthetic oligonucleotide
aaauacagugugaugggug

SEQ ID NO: 368635 - RNA, 19 nt, Artificial Sequence
  Description of Artificial Sequence: Synthetic oligonucleotide
gaagagguacccaagccag

SEQ ID NO: 368636 - RNA, 19 nt, Artificial Sequence
  Description of Artificial Sequence: Synthetic oligonucleotide
cuuggaggaucauuagagg

SEQ ID NO: 368637 - RNA, 19 nt, Artificial Sequence
  Description of Artificial Sequence: Synthetic oligonucleotide
acgagagaagcauuuacga

SEQ ID NO: 368638 - RNA, 19 nt, Artificial Sequence
  Description of Artificial Sequence: Synthetic oligonucleotide
ucagugcucuauuuucccg

SEQ ID NO: 368639 - RNA, 19 nt, Artificial Sequence
  Description of Artificial Sequence: Synthetic oligonucleotide
cuagaguggguuccaaagg

SEQ ID NO: 368640 - RNA, 19 nt, Artificial Sequence
  Description of Artificial Sequence: Synthetic oligonucleotide
aaggcuaacuagucuggug

SEQ ID NO: 368641 - RNA, 19 nt, Artificial Sequence
  Description of Artificial Sequence: Synthetic oligonucleotide
uaggcgcggaaauacagag

SEQ ID NO: 368642 - RNA, 19 nt, Artificial Sequence
  Description of Artificial Sequence: Synthetic oligonucleotide
uuggguguucuuaggaaug

SEQ ID NO: 368643 - RNA, 19 nt, Artificial Sequence
  Description of Artificial Sequence: Synthetic oligonucleotide
cuaauauaggcguuagaca

SEQ ID NO: 368644 - RNA, 19 nt, Artificial Sequence
  Description of Artificial Sequence: Synthetic oligonucleotide
aagauuccuuggcaaucgg

SEQ ID NO: 368645 - RNA, 19 nt, Artificial Sequence
  Description of Artificial Sequence: Synthetic oligonucleotide
guaucaugucuucagggug

SEQ ID NO: 368646 - RNA, 19 nt, Artificial Sequence
  Description of Artificial Sequence: Synthetic oligonucleotide
ugugcauguccuucagccg

SEQ ID NO: 368647 - RNA, 19 nt, Artificial Sequence
  Description of Artificial Sequence: Synthetic oligonucleotide
ugggagaggcuaauauagg

SEQ ID NO: 368648 - RNA, 19 nt, Artificial Sequence
  Description of Artificial Sequence: Synthetic oligonucleotide
auuggcgaccacuuaacca

SEQ ID NO: 368649 - RNA, 19 nt, Artificial Sequence
  Description of Artificial Sequence: Synthetic oligonucleotide
aucugaagccguccuacac

SEQ ID NO: 368650 - RNA, 19 nt, Artificial Sequence
  Description of Artificial Sequence: Synthetic oligonucleotide
auaggcguuagacaggcaa

SEQ ID NO: 368651 - RNA, 19 nt, Artificial Sequence
  Description of Artificial Sequence: Synthetic oligonucleotide
gcuaauauaggcguuagac

SEQ ID NO: 368652 - RNA, 19 nt, Artificial Sequence
  Description of Artificial Sequence: Synthetic oligonucleotide
ugggauagcgauuccgagc

SEQ ID NO: 368653 - RNA, 19 nt, Artificial Sequence
  Description of Artificial Sequence: Synthetic oligonucleotide
aauggccuuugggauagcg

SEQ ID NO: 368654 - RNA, 19 nt, Artificial Sequence
  Description of Artificial Sequence: Synthetic oligonucleotide
aguuaacucuuuccuuuuc

SEQ ID NO: 368655 - RNA, 19 nt, Artificial Sequence
  Description of Artificial Sequence: Synthetic oligonucleotide
ugacauacgaagcguggcu

SEQ ID NO: 368656 - RNA, 19 nt, Artificial Sequence
  Description of Artificial Sequence: Synthetic oligonucleotide
uauugcuagaguggguucc

SEQ ID NO: 368657 - RNA, 19 nt, Artificial Sequence
  Description of Artificial Sequence: Synthetic oligonucleotide
uauuggcgaccacuuaacc

SEQ ID NO: 368658 - RNA, 19 nt, Artificial Sequence
  Description of Artificial Sequence: Synthetic oligonucleotide
ugcucuauuuucccggggu

SEQ ID NO: 368659 - RNA, 19 nt, Artificial Sequence
  Description of Artificial Sequence: Synthetic oligonucleotide
agucuagagacgucccagg

SEQ ID NO: 368660 - RNA, 19 nt, Artificial Sequence
  Description of Artificial Sequence: Synthetic oligonucleotide
uuacgaggugcagagguag

SEQ ID NO: 368661 - RNA, 19 nt, Artificial Sequence
  Description of Artificial Sequence: Synthetic oligonucleotide
auuagagggcgcugcacag

SEQ ID NO: 368662 - RNA, 19 nt, Artificial Sequence
  Description of Artificial Sequence: Synthetic oligonucleotide
gaggcguucucacuguggc

SEQ ID NO: 368663 - RNA, 19 nt, Artificial Sequence
  Description of Artificial Sequence: Synthetic oligonucleotide
uacagagaugcauaagaua

SEQ ID NO: 368664 - RNA, 19 nt, Artificial Sequence
  Description of Artificial Sequence: Synthetic oligonucleotide
uugagacagggauuggcca

SEQ ID NO: 368665 - RNA, 19 nt, Artificial Sequence
  Description of Artificial Sequence: Synthetic oligonucleotide
cagucuagaaggguaaggc

SEQ ID NO: 368666 - RNA, 19 nt, Artificial Sequence
  Description of Artificial Sequence: Synthetic oligonucleotide
gggauagcgauuccgagcc

SEQ ID NO: 368667 - RNA, 19 nt, Artificial Sequence
  Description of Artificial Sequence: Synthetic oligonucleotide
agucuagaaggguaaggca

SEQ ID NO: 368668 - RNA, 19 nt, Artificial Sequence
  Description of Artificial Sequence: Synthetic oligonucleotide
cagguucggguauacaggc

SEQ ID NO: 368669 - RNA, 19 nt, Artificial Sequence
  Description of Artificial Sequence: Synthetic oligonucleotide
ggcuauaccaggcuagucc

SEQ ID NO: 368670 - RNA, 19 nt, Artificial Sequence
  Description of Artificial Sequence: Synthetic oligonucleotide
gcauuuacgaggugcagag

SEQ ID NO: 368671 - RNA, 19 nt, Artificial Sequence
  Description of Artificial Sequence: Synthetic oligonucleotide
gcuagaguggguuccaaag

SEQ ID NO: 368672 - RNA, 19 nt, Artificial Sequence
  Description of Artificial Sequence: Synthetic oligonucleotide
ugucgguagaagagguacc

SEQ ID NO: 368673 - RNA, 19 nt, Artificial Sequence
  Description of Artificial Sequence: Synthetic oligonucleotide
gaagccguccuacacugac

SEQ ID NO: 368674 - RNA, 19 nt, Artificial Sequence
  Description of Artificial Sequence: Synthetic oligonucleotide
ugaguuuuggaauggccuu

SEQ ID NO: 368675 - RNA, 19 nt, Artificial Sequence
  Description of Artificial Sequence: Synthetic oligonucleotide
aucacgguuuccuccacug

SEQ ID NO: 368676 - RNA, 19 nt, Artificial Sequence
  Description of Artificial Sequence: Synthetic oligonucleotide
agugguggguggcuucccc

SEQ ID NO: 368677 - RNA, 19 nt, Artificial Sequence
  Description of Artificial Sequence: Synthetic oligonucleotide
cuauuggcgaccacuuaac

SEQ ID NO: 368678 - RNA, 19 nt, Artificial Sequence
  Description of Artificial Sequence: Synthetic oligonucleotide
ucaacaaccagaggcguuc

SEQ ID NO: 368679 - RNA, 19 nt, Artificial Sequence
  Description of Artificial Sequence: Synthetic oligonucleotide
aauggguuguaggugcgcu

SEQ ID NO: 368680 - RNA, 19 nt, Artificial Sequence
  Description of Artificial Sequence: Synthetic oligonucleotide
gauuccgagcccuccgaag

SEQ ID NO: 368681 - RNA, 19 nt, Artificial Sequence
  Description of Artificial Sequence: Synthetic oligonucleotide
aacuagucuggugguauug

SEQ ID NO: 368682 - RNA, 19 nt, Artificial Sequence
  Description of Artificial Sequence: Synthetic oligonucleotide
ucacagucuagaaggguaa

SEQ ID NO: 368683 - RNA, 19 nt, Artificial Sequence
  Description of Artificial Sequence: Synthetic oligonucleotide
ggugguauugcuagagugg

SEQ ID NO: 368684 - RNA, 19 nt, Artificial Sequence
  Description of Artificial Sequence: Synthetic oligonucleotide
uggguguucuuaggaaugg

SEQ ID NO: 368685 - RNA, 19 nt, Artificial Sequence
  Description of Artificial Sequence: Synthetic oligonucleotide
aacaaccagaggcguucuc

SEQ ID NO: 368686 - RNA, 19 nt, Artificial Sequence
  Description of Artificial Sequence: Synthetic oligonucleotide
gggaaggcuaacuagucug

SEQ ID NO: 368687 - RNA, 19 nt, Artificial Sequence
  Description of Artificial Sequence: Synthetic oligonucleotide
augagcgaaggcacgaagg

SEQ ID NO: 368688 - RNA, 19 nt, Artificial Sequence
  Description of Artificial Sequence: Synthetic oligonucleotide
gaccacuuaaccaggcacc

SEQ ID NO: 368689 - RNA, 19 nt, Artificial Sequence
  Description of Artificial Sequence: Synthetic oligonucleotide
cuccaacaacccuggaugg

SEQ ID NO: 368690 - RNA, 19 nt, Artificial Sequence
  Description of Artificial Sequence: Synthetic oligonucleotide
aggaccuuuguagggcucc

SEQ ID NO: 368691 - RNA, 19 nt, Artificial Sequence
  Description of Artificial Sequence: Synthetic oligonucleotide
cugaagccguccuacacug

SEQ ID NO: 368692 - RNA, 19 nt, Artificial Sequence
  Description of Artificial Sequence: Synthetic oligonucleotide
gagucuagagacgucccag

SEQ ID NO: 368693 - RNA, 19 nt, Artificial Sequence
  Description of Artificial Sequence: Synthetic oligonucleotide
gaagcauuuacgaggugca

SEQ ID NO: 368694 - RNA, 19 nt, Artificial Sequence
  Description of Artificial Sequence: Synthetic oligonucleotide
cuagugaugagaggauggc

SEQ ID NO: 368695 - RNA, 19 nt, Artificial Sequence
  Description of Artificial Sequence: Synthetic oligonucleotide
gacgcgggcauuucuggcc

SEQ ID NO: 368696 - RNA, 19 nt, Artificial Sequence
  Description of Artificial Sequence: Synthetic oligonucleotide
acgaggugcagagguagcc

SEQ ID NO: 368697 - RNA, 19 nt, Artificial Sequence
  Description of Artificial Sequence: Synthetic oligonucleotide
ggaggaucauuagagggcg

SEQ ID NO: 368698 - RNA, 19 nt, Artificial Sequence
  Description of Artificial Sequence: Synthetic oligonucleotide
ucgacagucccugugccgc

SEQ ID NO: 368699 - RNA, 19 nt, Artificial Sequence
  Description of Artificial Sequence: Synthetic oligonucleotide
gcuauaccaggcuaguccc

SEQ ID NO: 368700 - RNA, 19 nt, Artificial Sequence
  Description of Artificial Sequence: Synthetic oligonucleotide
ggugcuagugaugagagga

SEQ ID NO: 368701 - RNA, 19 nt, Artificial Sequence
  Description of Artificial Sequence: Synthetic oligonucleotide
ucccauacacucgacaguc

SEQ ID NO: 368702 - RNA, 19 nt, Artificial Sequence
  Description of Artificial Sequence: Synthetic oligonucleotide
gagaucacgguuuccucca

SEQ ID NO: 368703 - RNA, 19 nt, Artificial Sequence
  Description of Artificial Sequence: Synthetic oligonucleotide
ugcugucgguagaagaggu

SEQ ID NO: 368704 - RNA, 19 nt, Artificial Sequence
  Description of Artificial Sequence: Synthetic oligonucleotide
acgcgggcauuucuggccc

SEQ ID NO: 368705 - RNA, 19 nt, Artificial Sequence
  Description of Artificial Sequence: Synthetic oligonucleotide
acuuaaccaggcaccacac

SEQ ID NO: 368706 - RNA, 19 nt, Artificial Sequence
  Description of Artificial Sequence: Synthetic oligonucleotide
aggcauuccagcugaagaa

SEQ ID NO: 368707 - RNA, 19 nt, Artificial Sequence
  Description of Artificial Sequence: Synthetic oligonucleotide
auauucguguccaggccac

SEQ ID NO: 368708 - RNA, 19 nt, Artificial Sequence
  Description of Artificial Sequence: Synthetic oligonucleotide
uggggcuuagaguaucagu

SEQ ID NO: 368709 - RNA, 19 nt, Artificial Sequence
  Description of Artificial Sequence: Synthetic oligonucleotide
ucgaagguccuuccacagc

SEQ ID NO: 368710 - RNA, 19 nt, Artificial Sequence
  Description of Artificial Sequence: Synthetic oligonucleotide
agcgauuccgagcccuccg

SEQ ID NO: 368711 - RNA, 19 nt, Artificial Sequence
  Description of Artificial Sequence: Synthetic oligonucleotide
uacgaagcguggcuccugc

SEQ ID NO: 368712 - RNA, 19 nt, Artificial Sequence
  Description of Artificial Sequence: Synthetic oligonucleotide
ugucuuagcagggugggua

SEQ ID NO: 368713 - RNA, 19 nt, Artificial Sequence
  Description of Artificial Sequence: Synthetic oligonucleotide
uggguuguaggugcgcucc

SEQ ID NO: 368714 - RNA, 19 nt, Artificial Sequence
  Description of Artificial Sequence: Synthetic oligonucleotide
cauauucguguccaggcca

SEQ ID NO: 368715 - RNA, 19 nt, Artificial Sequence
  Description of Artificial Sequence: Synthetic oligonucleotide
agccguccuacacugacca

SEQ ID NO: 368716 - RNA, 19 nt, Artificial Sequence
  Description of Artificial Sequence: Synthetic oligonucleotide
agaugugcauggcgagugg

SEQ ID NO: 368717 - RNA, 19 nt, Artificial Sequence
  Description of Artificial Sequence: Synthetic oligonucleotide
cacgguuuccuccacugug

SEQ ID NO: 368718 - RNA, 19 nt, Artificial Sequence
  Description of Artificial Sequence: Synthetic oligonucleotide
aggacgcgggcauuucugg

SEQ ID NO: 368719 - RNA, 19 nt, Artificial Sequence
  Description of Artificial Sequence: Synthetic oligonucleotide
acaacccuggaugggaaag

SEQ ID NO: 368720 - RNA, 19 nt, Artificial Sequence
  Description of Artificial Sequence: Synthetic oligonucleotide
cccuuaaggauucacaguc

SEQ ID NO: 368721 - RNA, 19 nt, Artificial Sequence
  Description of Artificial Sequence: Synthetic oligonucleotide
uggguacuccaccucgagc

SEQ ID NO: 368722 - RNA, 19 nt, Artificial Sequence
  Description of Artificial Sequence: Synthetic oligonucleotide
uggcgaguggcucuguauc

SEQ ID NO: 368723 - RNA, 19 nt, Artificial Sequence
  Description of Artificial Sequence: Synthetic oligonucleotide
ugcuagugaugagaggaug

SEQ ID NO: 368724 - RNA, 19 nt, Artificial Sequence
  Description of Artificial Sequence: Synthetic oligonucleotide
uaggcguuagacaggcaaa

SEQ ID NO: 368725 - RNA, 19 nt, Artificial Sequence
  Description of Artificial Sequence: Synthetic oligonucleotide
gcuagugaugagaggaugg

SEQ ID NO: 368726 - RNA, 19 nt, Artificial Sequence
  Description of Artificial Sequence: Synthetic oligonucleotide
uucguguccaggccacagc

SEQ ID NO: 368727 - RNA, 19 nt, Artificial Sequence
  Description of Artificial Sequence: Synthetic oligonucleotide
cuuuguagggcuccccauc

SEQ ID NO: 368728 - RNA, 19 nt, Artificial Sequence
  Description of Artificial Sequence: Synthetic oligonucleotide
uccaccacgccugcaaagc

SEQ ID NO: 368729 - RNA, 19 nt, Artificial Sequence
  Description of Artificial Sequence: Synthetic oligonucleotide
auacaggcuauaccaggcu

SEQ ID NO: 368730 - RNA, 19 nt, Artificial Sequence
  Description of Artificial Sequence: Synthetic oligonucleotide
agcauuuacgaggugcaga

SEQ ID NO: 368731 - RNA, 19 nt, Artificial Sequence
  Description of Artificial Sequence: Synthetic oligonucleotide
cacucgacagucccugugc

SEQ ID NO: 368732 - RNA, 19 nt, Artificial Sequence
  Description of Artificial Sequence: Synthetic oligonucleotide
cugacauacgaagcguggc

SEQ ID NO: 368733 - RNA, 19 nt, Artificial Sequence
  Description of Artificial Sequence: Synthetic oligonucleotide
caugagcgaaggcacgaag

SEQ ID NO: 368734 - RNA, 19 nt, Artificial Sequence
  Description of Artificial Sequence: Synthetic oligonucleotide
cacuuaaccaggcaccaca

SEQ ID NO: 368735 - RNA, 19 nt, Artificial Sequence
  Description of Artificial Sequence: Synthetic oligonucleotide
uuagaguaucagucaccca

SEQ ID NO: 368736 - RNA, 19 nt, Artificial Sequence
  Description of Artificial Sequence: Synthetic oligonucleotide
aagcauuuacgaggugcag

SEQ ID NO: 368737 - RNA, 19 nt, Artificial Sequence
  Description of Artificial Sequence: Synthetic oligonucleotide
aggcguucucacuguggcc

SEQ ID NO: 368738 - RNA, 19 nt, Artificial Sequence
  Description of Artificial Sequence: Synthetic oligonucleotide
gucgguagaagagguaccc

SEQ ID NO: 368739 - RNA, 19 nt, Artificial Sequence
  Description of Artificial Sequence: Synthetic oligonucleotide
acuguggucccagugcuug

SEQ ID NO: 368740 - RNA, 19 nt, Artificial Sequence
  Description of Artificial Sequence: Synthetic oligonucleotide
agacgucccaggugcugcc

SEQ ID NO: 368741 - RNA, 19 nt, Artificial Sequence
  Description of Artificial Sequence: Synthetic oligonucleotide
gucuagaaggguaaggcaa

SEQ ID NO: 368742 - RNA, 19 nt, Artificial Sequence
  Description of Artificial Sequence: Synthetic oligonucleotide
ugcucugguccuguucugg

SEQ ID NO: 368743 - RNA, 19 nt, Artificial Sequence
  Description of Artificial Sequence: Synthetic oligonucleotide
uagaccagauggccuugag

SEQ ID NO: 368744 - RNA, 19 nt, Artificial Sequence
  Description of Artificial Sequence: Synthetic oligonucleotide
uggcgaccacuuaaccagg

SEQ ID NO: 368745 - RNA, 19 nt, Artificial Sequence
  Description of Artificial Sequence: Synthetic oligonucleotide
gaugugcauggcgaguggc

SEQ ID NO: 368746 - RNA, 19 nt, Artificial Sequence
  Description of Artificial Sequence: Synthetic oligonucleotide
cagagucuagagacguccc

SEQ ID NO: 368747 - RNA, 19 nt, Artificial Sequence
  Description of Artificial Sequence: Synthetic oligonucleotide
ugcauaagauacaguccau

SEQ ID NO: 368748 - RNA, 19 nt, Artificial Sequence
  Description of Artificial Sequence: Synthetic oligonucleotide
aaccagaggcguucucacu

SEQ ID NO: 368749 - RNA, 19 nt, Artificial Sequence
  Description of Artificial Sequence: Synthetic oligonucleotide
ucggguauacaggcuauac

SEQ ID NO: 368750 - RNA, 19 nt, Artificial Sequence
  Description of Artificial Sequence: Synthetic oligonucleotide
uacgaggugcagagguagc

SEQ ID NO: 368751 - RNA, 19 nt, Artificial Sequence
  Description of Artificial Sequence: Synthetic oligonucleotide
cugaguuuuggaauggccu

SEQ ID NO: 368752 - RNA, 19 nt, Artificial Sequence
  Description of Artificial Sequence: Synthetic oligonucleotide
uccaugcccuuaaggauuc

SEQ ID NO: 368753 - RNA, 19 nt, Artificial Sequence
  Description of Artificial Sequence: Synthetic oligonucleotide
auacagagaugcauaagau

SEQ ID NO: 368754 - RNA, 19 nt, Artificial Sequence
  Description of Artificial Sequence: Synthetic oligonucleotide
cgcggaaauacagagaugc

SEQ ID NO: 368755 - RNA, 19 nt, Artificial Sequence
  Description of Artificial Sequence: Synthetic oligonucleotide
gugaugggugccacgagag

SEQ ID NO: 368756 - RNA, 19 nt, Artificial Sequence
  Description of Artificial Sequence: Synthetic oligonucleotide
aacaacccuggaugggaaa

SEQ ID NO: 368757 - RNA, 19 nt, Artificial Sequence
  Description of Artificial Sequence: Synthetic oligonucleotide
caaccagaggcguucucac

SEQ ID NO: 368758 - RNA, 19 nt, Artificial Sequence
  Description of Artificial Sequence: Synthetic oligonucleotide
ccagguucggguauacagg

SEQ ID NO: 368759 - RNA, 19 nt, Artificial Sequence
  Description of Artificial Sequence: Synthetic oligonucleotide
cucgacagucccugugccg

SEQ ID NO: 368760 - RNA, 19 nt, Artificial Sequence
  Description of Artificial Sequence: Synthetic oligonucleotide
ugcuaggcgcggaaauaca

SEQ ID NO: 368761 - RNA, 19 nt, Artificial Sequence
  Description of Artificial Sequence: Synthetic oligonucleotide
acgguuuccuccacugugg

SEQ ID NO: 368762 - RNA, 19 nt, Artificial Sequence
  Description of Artificial Sequence: Synthetic oligonucleotide
gguauacaggcuauaccag

SEQ ID NO: 368763 - RNA, 19 nt, Artificial Sequence
  Description of Artificial Sequence: Synthetic oligonucleotide
gacauacgaagcguggcuc

SEQ ID NO: 368764 - RNA, 19 nt, Artificial Sequence
  Description of Artificial Sequence: Synthetic oligonucleotide
ugaugggugccacgagaga

SEQ ID NO: 368765 - RNA, 19 nt, Artificial Sequence
  Description of Artificial Sequence: Synthetic oligonucleotide
acacucgacagucccugug

SEQ ID NO: 368766 - RNA, 19 nt, Artificial Sequence
  Description of Artificial Sequence: Synthetic oligonucleotide
aggcguuagacaggcaaag

SEQ ID NO: 368767 - RNA, 19 nt, Artificial Sequence
  Description of Artificial Sequence: Synthetic oligonucleotide
agagguacccaagccaggu

SEQ ID NO: 368768 - RNA, 19 nt, Artificial Sequence
  Description of Artificial Sequence: Synthetic oligonucleotide
cuucgaagguccuuccaca

SEQ ID NO: 368769 - RNA, 19 nt, Artificial Sequence
  Description of Artificial Sequence: Synthetic oligonucleotide
agaucacgguuuccuccac

SEQ ID NO: 368770 - RNA, 19 nt, Artificial Sequence
  Description of Artificial Sequence: Synthetic oligonucleotide
cagaugugcauggcgagug

SEQ ID NO: 368771 - RNA, 19 nt, Artificial Sequence
  Description of Artificial Sequence: Synthetic oligonucleotide
ccugcuaacccagagugcc

SEQ ID NO: 368772 - RNA, 19 nt, Artificial Sequence
  Description of Artificial Sequence: Synthetic oligonucleotide
ggcuuagaguaucagucac

SEQ ID NO: 368773 - RNA, 19 nt, Artificial Sequence
  Description of Artificial Sequence: Synthetic oligonucleotide
agcguggcuccugcuaacc

SEQ ID NO: 368774 - RNA, 19 nt, Artificial Sequence
  Description of Artificial Sequence: Synthetic oligonucleotide
ucuauccaucagaggauuu

SEQ ID NO: 368775 - RNA, 19 nt, Artificial Sequence
  Description of Artificial Sequence: Synthetic oligonucleotide
cugcugucgguagaagagg

SEQ ID NO: 368776 - RNA, 19 nt, Artificial Sequence
  Description of Artificial Sequence: Synthetic oligonucleotide
guggagaacagacuagccu

SEQ ID NO: 368777 - RNA, 19 nt, Artificial Sequence
  Description of Artificial Sequence: Synthetic oligonucleotide
gagacgucccaggugcugc

SEQ ID NO: 368778 - RNA, 19 nt, Artificial Sequence
  Description of Artificial Sequence: Synthetic oligonucleotide
uuagagggcgcugcacagc

SEQ ID NO: 368779 - RNA, 19 nt, Artificial Sequence
  Description of Artificial Sequence: Synthetic oligonucleotide
cuugaguauggccaggggu

SEQ ID NO: 368780 - RNA, 19 nt, Artificial Sequence
  Description of Artificial Sequence: Synthetic oligonucleotide
aggcuagucccacagcuuu

SEQ ID NO: 368781 - RNA, 19 nt, Artificial Sequence
  Description of Artificial Sequence: Synthetic oligonucleotide
ccugagaccagaguggcag

SEQ ID NO: 368782 - RNA, 19 nt, Artificial Sequence
  Description of Artificial Sequence: Synthetic oligonucleotide
caaguuaacucuuuccuuu

SEQ ID NO: 368783 - RNA, 19 nt, Artificial Sequence
  Description of Artificial Sequence: Synthetic oligonucleotide
ugagaccagaguggcagac

SEQ ID NO: 368784 - RNA, 19 nt, Artificial Sequence
  Description of Artificial Sequence: Synthetic oligonucleotide
gcagagucuagagacgucc

SEQ ID NO: 368785 - RNA, 19 nt, Artificial Sequence
  Description of Artificial Sequence: Synthetic oligonucleotide
gccagaugagaagagaaac

SEQ ID NO: 368786 - RNA, 19 nt, Artificial Sequence
  Description of Artificial Sequence: Synthetic oligonucleotide
ggcguucucacuguggccc

SEQ ID NO: 368787 - RNA, 19 nt, Artificial Sequence
  Description of Artificial Sequence: Synthetic oligonucleotide
guaggggauaccauccuga

SEQ ID NO: 368788 - RNA, 19 nt, Artificial Sequence
  Description of Artificial Sequence: Synthetic oligonucleotide
auucguguccaggccacag

SEQ ID NO: 368789 - RNA, 19 nt, Artificial Sequence
  Description of Artificial Sequence: Synthetic oligonucleotide
ucacgguuuccuccacugu

SEQ ID NO: 368790 - RNA, 19 nt, Artificial Sequence
  Description of Artificial Sequence: Synthetic oligonucleotide
ggcucuguaucccagcauc

SEQ ID NO: 368791 - RNA, 19 nt, Artificial Sequence
  Description of Artificial Sequence: Synthetic oligonucleotide
guauugcuagaguggguuc

SEQ ID NO: 368792 - RNA, 19 nt, Artificial Sequence
  Description of Artificial Sequence: Synthetic oligonucleotide
uacccaagccagguucggg

SEQ ID NO: 368793 - RNA, 19 nt, Artificial Sequence
  Description of Artificial Sequence: Synthetic oligonucleotide
ugcuagaguggguuccaaa

SEQ ID NO: 368794 - RNA, 19 nt, Artificial Sequence
  Description of Artificial Sequence: Synthetic oligonucleotide
ggaaggaccuuuguagggc

SEQ ID NO: 368795 - RNA, 19 nt, Artificial Sequence
  Description of Artificial Sequence: Synthetic oligonucleotide
aguagccaucgucacuggu

SEQ ID NO: 368796 - RNA, 19 nt, Artificial Sequence
  Description of Artificial Sequence: Synthetic oligonucleotide
aaggaccuuuguagggcuc

SEQ ID NO: 368797 - RNA, 19 nt, Artificial Sequence
  Description of Artificial Sequence: Synthetic oligonucleotide
aggcuaauauaggcguuag

SEQ ID NO: 368798 - RNA, 19 nt, Artificial Sequence
  Description of Artificial Sequence: Synthetic oligonucleotide
ucacuccauugaagaggcg

SEQ ID NO: 368799 - RNA, 19 nt, Artificial Sequence
  Description of Artificial Sequence: Synthetic oligonucleotide
gaucugaagccguccuaca

SEQ ID NO: 368800 - RNA, 19 nt, Artificial Sequence
  Description of Artificial Sequence: Synthetic oligonucleotide
ggcaccacaccuuguauca

SEQ ID NO: 368801 - RNA, 19 nt, Artificial Sequence
  Description of Artificial Sequence: Synthetic oligonucleotide
cagagaugcauaagauaca

SEQ ID NO: 368802 - RNA, 19 nt, Artificial Sequence
  Description of Artificial Sequence: Synthetic oligonucleotide
ggguaaggcaaacauguaa

SEQ ID NO: 368803 - RNA, 19 nt, Artificial Sequence
  Description of Artificial Sequence: Synthetic oligonucleotide
auacgguguccagugagcu

SEQ ID NO: 368804 - RNA, 19 nt, Artificial Sequence
  Description of Artificial Sequence: Synthetic oligonucleotide
gcauauucguguccaggcc

SEQ ID NO: 368805 - RNA, 19 nt, Artificial Sequence
  Description of Artificial Sequence: Synthetic oligonucleotide
ucuuagcaggguggguaag

SEQ ID NO: 368806 - RNA, 19 nt, Artificial Sequence
  Description of Artificial Sequence: Synthetic oligonucleotide
gcguuagacaggcaaagga

SEQ ID NO: 368807 - RNA, 19 nt, Artificial Sequence
  Description of Artificial Sequence: Synthetic oligonucleotide
uuguugagacagggauugg

SEQ ID NO: 368808 - RNA, 19 nt, Artificial Sequence
  Description of Artificial Sequence: Synthetic oligonucleotide
ggcggggaaggcuaacuag

SEQ ID NO: 368809 - RNA, 19 nt, Artificial Sequence
  Description of Artificial Sequence: Synthetic oligonucleotide
gaauggguuguaggugcgc

SEQ ID NO: 368810 - RNA, 19 nt, Artificial Sequence
  Description of Artificial Sequence: Synthetic oligonucleotide
gcaaucggggaccuugccc

SEQ ID NO: 368811 - RNA, 19 nt, Artificial Sequence
  Description of Artificial Sequence: Synthetic oligonucleotide
guaagguggggcuuagagu

SEQ ID NO: 368812 - RNA, 19 nt, Artificial Sequence
  Description of Artificial Sequence: Synthetic oligonucleotide
cuaggcgcggaaauacaga

SEQ ID NO: 368813 - RNA, 19 nt, Artificial Sequence
  Description of Artificial Sequence: Synthetic oligonucleotide
cauuuacgaggugcagagg

SEQ ID NO: 368814 - RNA, 19 nt, Artificial Sequence
  Description of Artificial Sequence: Synthetic oligonucleotide
gguacccaagccagguucg

SEQ ID NO: 368815 - RNA, 19 nt, Artificial Sequence
  Description of Artificial Sequence: Synthetic oligonucleotide
gcaacugcgugugucgggg

SEQ ID NO: 368816 - RNA, 19 nt, Artificial Sequence
  Description of Artificial Sequence: Synthetic oligonucleotide
uaacuagucuggugguauu

SEQ ID NO: 368817 - RNA, 19 nt, Artificial Sequence
  Description of Artificial Sequence: Synthetic oligonucleotide
caugcccuuaaggauucac

SEQ ID NO: 368818 - RNA, 19 nt, Artificial Sequence
  Description of Artificial Sequence: Synthetic oligonucleotide
agugccugcucaacaacca

SEQ ID NO: 368819 - RNA, 19 nt, Artificial Sequence
  Description of Artificial Sequence: Synthetic oligonucleotide
auugcuagaguggguucca

SEQ ID NO: 368820 - RNA, 19 nt, Artificial Sequence
  Description of Artificial Sequence: Synthetic oligonucleotide
uauaggcguuagacaggca

SEQ ID NO: 368821 - RNA, 19 nt, Artificial Sequence
  Description of Artificial Sequence: Synthetic oligonucleotide
guacuccaccucgagcggg

SEQ ID NO: 368822 - RNA, 19 nt, Artificial Sequence
  Description of Artificial Sequence: Synthetic oligonucleotide
ggucuaauacgguguccag

SEQ ID NO: 368823 - RNA, 19 nt, Artificial Sequence
  Description of Artificial Sequence: Synthetic oligonucleotide
ggaucugaagccguccuac

SEQ ID NO: 368824 - RNA, 19 nt, Artificial Sequence
  Description of Artificial Sequence: Synthetic oligonucleotide
acagaugugcauggcgagu

SEQ ID NO: 368825 - RNA, 19 nt, Artificial Sequence
  Description of Artificial Sequence: Synthetic oligonucleotide
gauagcgauuccgagcccu

SEQ ID NO: 368826 - RNA, 19 nt, Artificial Sequence
  Description of Artificial Sequence: Synthetic oligonucleotide
gugcuaggcgcggaaauac

SEQ ID NO: 368827 - RNA, 19 nt, Artificial Sequence
  Description of Artificial Sequence: Synthetic oligonucleotide
augcccuuaaggauucaca

SEQ ID NO: 368828 - RNA, 19 nt, Artificial Sequence
  Description of Artificial Sequence: Synthetic oligonucleotide
auagcgauuccgagcccuc

SEQ ID NO: 368829 - RNA, 19 nt, Artificial Sequence
  Description of Artificial Sequence: Synthetic oligonucleotide
gaggcuaauauaggcguua

SEQ ID NO: 368830 - RNA, 19 nt, Artificial Sequence
  Description of Artificial Sequence: Synthetic oligonucleotide
gaccagaguggcagacccg

SEQ ID NO: 368831 - RNA, 19 nt, Artificial Sequence
  Description of Artificial Sequence: Synthetic oligonucleotide
ggcgaguggcucuguaucc

SEQ ID NO: 368832 - RNA, 19 nt, Artificial Sequence
  Description of Artificial Sequence: Synthetic oligonucleotide
gacagucccugugccgccg

SEQ ID NO: 368833 - RNA, 19 nt, Artificial Sequence
  Description of Artificial Sequence: Synthetic oligonucleotide
aggcuauaccaggcuaguc

SEQ ID NO: 368834 - RNA, 19 nt, Artificial Sequence
  Description of Artificial Sequence: Synthetic oligonucleotide
agaguaucagucacccaau

SEQ ID NO: 368835 - RNA, 19 nt, Artificial Sequence
  Description of Artificial Sequence: Synthetic oligonucleotide
cuccuugcacuccggugag

SEQ ID NO: 368836 - RNA, 19 nt, Artificial Sequence
  Description of Artificial Sequence: Synthetic oligonucleotide
cuuggguguucuuaggaau

SEQ ID NO: 368837 - RNA, 19 nt, Artificial Sequence
  Description of Artificial Sequence: Synthetic oligonucleotide
gcuaggcgcggaaauacag

SEQ ID NO: 368838 - RNA, 19 nt, Artificial Sequence
  Description of Artificial Sequence: Synthetic oligonucleotide
ugcgcuccauccguugucu

SEQ ID NO: 368839 - RNA, 19 nt, Artificial Sequence
  Description of Artificial Sequence: Synthetic oligonucleotide
gguucggguauacaggcua

SEQ ID NO: 368840 - RNA, 19 nt, Artificial Sequence
  Description of Artificial Sequence: Synthetic oligonucleotide
agcgccguagcagcuacca

SEQ ID NO: 368841 - RNA, 19 nt, Artificial Sequence
  Description of Artificial Sequence: Synthetic oligonucleotide
ggcgcggaaauacagagau

SEQ ID NO: 368842 - RNA, 19 nt, Artificial Sequence
  Description of Artificial Sequence: Synthetic oligonucleotide
caaugguagccugcacagc

SEQ ID NO: 368843 - RNA, 19 nt, Artificial Sequence
  Description of Artificial Sequence: Synthetic oligonucleotide
uagagacgucccaggugcu

SEQ ID NO: 368844 - RNA, 19 nt, Artificial Sequence
  Description of Artificial Sequence: Synthetic oligonucleotide
ggcguuagacaggcaaagg

SEQ ID NO: 368845 - RNA, 19 nt, Artificial Sequence
  Description of Artificial Sequence: Synthetic oligonucleotide
auaccaggcuagucccaca

SEQ ID NO: 368846 - RNA, 19 nt, Artificial Sequence
  Description of Artificial Sequence: Synthetic oligonucleotide
ggcaacugcgugugucggg

SEQ ID NO: 368847 - RNA, 19 nt, Artificial Sequence
  Description of Artificial Sequence: Synthetic oligonucleotide
gguggagaacagacuagcc

SEQ ID NO: 368848 - RNA, 19 nt, Artificial Sequence
  Description of Artificial Sequence: Synthetic oligonucleotide
cacccaaugucuggcugcc

SEQ ID NO: 368849 - RNA, 19 nt, Artificial Sequence
  Description of Artificial Sequence: Synthetic oligonucleotide
ccacgagagaagcauuuac

SEQ ID NO: 368850 - RNA, 19 nt, Artificial Sequence
  Description of Artificial Sequence: Synthetic oligonucleotide
uggcugccccuauuggcga

SEQ ID NO: 368851 - RNA, 19 nt, Artificial Sequence
  Description of Artificial Sequence: Synthetic oligonucleotide
ggaauggguuguaggugcg

SEQ ID NO: 368852 - RNA, 19 nt, Artificial Sequence
  Description of Artificial Sequence: Synthetic oligonucleotide
guacccaagccagguucgg

SEQ ID NO: 368853 - RNA, 19 nt, Artificial Sequence
  Description of Artificial Sequence: Synthetic oligonucleotide
cuaauacgguguccaguga

SEQ ID NO: 368854 - RNA, 19 nt, Artificial Sequence
  Description of Artificial Sequence: Synthetic oligonucleotide
agagacgucccaggugcug

SEQ ID NO: 368855 - RNA, 19 nt, Artificial Sequence
  Description of Artificial Sequence: Synthetic oligonucleotide
gcacgaaggcaacugcgug

SEQ ID NO: 368856 - RNA, 19 nt, Artificial Sequence
  Description of Artificial Sequence: Synthetic oligonucleotide
ucaugggguucuugccccu

SEQ ID NO: 368857 - RNA, 19 nt, Artificial Sequence
  Description of Artificial Sequence: Synthetic oligonucleotide
gcugccuuggcggcggugg

SEQ ID NO: 368858 - RNA, 19 nt, Artificial Sequence
  Description of Artificial Sequence: Synthetic oligonucleotide
gaggaucauuagagggcgc

SEQ ID NO: 368859 - RNA, 19 nt, Artificial Sequence
  Description of Artificial Sequence: Synthetic oligonucleotide
ugugagugguggguggcuu

SEQ ID NO: 368860 - RNA, 19 nt, Artificial Sequence
  Description of Artificial Sequence: Synthetic oligonucleotide
ccuauuggcgaccacuuaa

SEQ ID NO: 368861 - RNA, 19 nt, Artificial Sequence
  Description of Artificial Sequence: Synthetic oligonucleotide
uauucguguccaggccaca

SEQ ID NO: 368862 - RNA, 19 nt, Artificial Sequence
  Description of Artificial Sequence: Synthetic oligonucleotide
ggugcgcuccucucccagg

SEQ ID NO: 368863 - RNA, 19 nt, Artificial Sequence
  Description of Artificial Sequence: Synthetic oligonucleotide
auacgaagcguggcuccug

SEQ ID NO: 368864 - RNA, 19 nt, Artificial Sequence
  Description of Artificial Sequence: Synthetic oligonucleotide
ggauggcgaggugugagug

SEQ ID NO: 368865 - RNA, 19 nt, Artificial Sequence
  Description of Artificial Sequence: Synthetic oligonucleotide
cgaccacuuaaccaggcac

SEQ ID NO: 368866 - RNA, 19 nt, Artificial Sequence
  Description of Artificial Sequence: Synthetic oligonucleotide
cuaacuagucuggugguau

SEQ ID NO: 368867 - RNA, 19 nt, Artificial Sequence
  Description of Artificial Sequence: Synthetic oligonucleotide
gucuagagacgucccaggu

SEQ ID NO: 368868 - RNA, 19 nt, Artificial Sequence
  Description of Artificial Sequence: Synthetic oligonucleotide
gccuuguuagcuguggcuc

SEQ ID NO: 368869 - RNA, 19 nt, Artificial Sequence
  Description of Artificial Sequence: Synthetic oligonucleotide
cacgaaggcaacugcgugu

SEQ ID NO: 368870 - RNA, 19 nt, Artificial Sequence
  Description of Artificial Sequence: Synthetic oligonucleotide
acagacuagccuggucagu

SEQ ID NO: 368871 - RNA, 19 nt, Artificial Sequence
  Description of Artificial Sequence: Synthetic oligonucleotide
cggguauacaggcuauacc

SEQ ID NO: 368872 - RNA, 19 nt, Artificial Sequence
  Description of Artificial Sequence: Synthetic oligonucleotide
gaucacgguuuccuccacu

SEQ ID NO: 368873 - RNA, 19 nt, Artificial Sequence
  Description of Artificial Sequence: Synthetic oligonucleotide
gaaggcuaacuagucuggu

SEQ ID NO: 368874 - RNA, 19 nt, Artificial Sequence
  Description of Artificial Sequence: Synthetic oligonucleotide
uucggguauacaggcuaua

SEQ ID NO: 368875 - RNA, 19 nt, Artificial Sequence
  Description of Artificial Sequence: Synthetic oligonucleotide
cucgagcggggugggaggc

SEQ ID NO: 368876 - RNA, 19 nt, Artificial Sequence
  Description of Artificial Sequence: Synthetic oligonucleotide
gcagacccgggacagaugu

SEQ ID NO: 368877 - RNA, 19 nt, Artificial Sequence
  Description of Artificial Sequence: Synthetic oligonucleotide
ggacgcgggcauuucuggc

SEQ ID NO: 368878 - RNA, 19 nt, Artificial Sequence
  Description of Artificial Sequence: Synthetic oligonucleotide
gguguucuuaggaauggcu

SEQ ID NO: 368879 - RNA, 19 nt, Artificial Sequence
  Description of Artificial Sequence: Synthetic oligonucleotide
ggcuccaagugggagugug

SEQ ID NO: 368880 - RNA, 19 nt, Artificial Sequence
  Description of Artificial Sequence: Synthetic oligonucleotide
gcuaacccagagugccugc

SEQ ID NO: 368881 - RNA, 19 nt, Artificial Sequence
  Description of Artificial Sequence: Synthetic oligonucleotide
agaggcuaauauaggcguu

SEQ ID NO: 368882 - RNA, 19 nt, Artificial Sequence
  Description of Artificial Sequence: Synthetic oligonucleotide
ccgggaguagccaucguca

SEQ ID NO: 368883 - RNA, 19 nt, Artificial Sequence
  Description of Artificial Sequence: Synthetic oligonucleotide
ccaggucuaauacgguguc

SEQ ID NO: 368884 - RNA, 19 nt, Artificial Sequence
  Description of Artificial Sequence: Synthetic oligonucleotide
ggcuaauauaggcguuaga

SEQ ID NO: 368885 - RNA, 19 nt, Artificial Sequence
  Description of Artificial Sequence: Synthetic oligonucleotide
augucuuagcagggugggu

SEQ ID NO: 368886 - RNA, 19 nt, Artificial Sequence
  Description of Artificial Sequence: Synthetic oligonucleotide
ggcaaucggggaccuugcc

SEQ ID NO: 368887 - RNA, 19 nt, Artificial Sequence
  Description of Artificial Sequence: Synthetic oligonucleotide
gcccucuauccaucagagg

SEQ ID NO: 368888 - RNA, 19 nt, Artificial Sequence
  Description of Artificial Sequence: Synthetic oligonucleotide
gcgaggugugagugguggg

SEQ ID NO: 368889 - RNA, 19 nt, Artificial Sequence
  Description of Artificial Sequence: Synthetic oligonucleotide
ugggguucuugccccucuu

SEQ ID NO: 368890 - RNA, 19 nt, Artificial Sequence
  Description of Artificial Sequence: Synthetic oligonucleotide
cugagaccagaguggcaga

SEQ ID NO: 368891 - RNA, 19 nt, Artificial Sequence
  Description of Artificial Sequence: Synthetic oligonucleotide
aggcggggcugaguuuugg

SEQ ID NO: 368892 - RNA, 19 nt, Artificial Sequence
  Description of Artificial Sequence: Synthetic oligonucleotide
uugcuagaguggguuccaa

SEQ ID NO: 368893 - RNA, 19 nt, Artificial Sequence
  Description of Artificial Sequence: Synthetic oligonucleotide
agccaucgucacuggugga

SEQ ID NO: 368894 - RNA, 19 nt, Artificial Sequence
  Description of Artificial Sequence: Synthetic oligonucleotide
cucccauacacucgacagu

SEQ ID NO: 368895 - RNA, 19 nt, Artificial Sequence
  Description of Artificial Sequence: Synthetic oligonucleotide
ucggggaccuugcccucua

SEQ ID NO: 368896 - RNA, 19 nt, Artificial Sequence
  Description of Artificial Sequence: Synthetic oligonucleotide
agguucggguauacaggcu

SEQ ID NO: 368897 - RNA, 19 nt, Artificial Sequence
  Description of Artificial Sequence: Synthetic oligonucleotide
ggauagcgauuccgagccc

SEQ ID NO: 368898 - RNA, 19 nt, Artificial Sequence
  Description of Artificial Sequence: Synthetic oligonucleotide
aggcgcggaaauacagaga

SEQ ID NO: 368899 - RNA, 19 nt, Artificial Sequence
  Description of Artificial Sequence: Synthetic oligonucleotide
ggcccgggaguagccaucg

SEQ ID NO: 368900 - RNA, 19 nt, Artificial Sequence
  Description of Artificial Sequence: Synthetic oligonucleotide
gggaugggaagcaccuuca

SEQ ID NO: 368901 - RNA, 19 nt, Artificial Sequence
  Description of Artificial Sequence: Synthetic oligonucleotide
gcguggcuccugcuaaccc

SEQ ID NO: 368902 - RNA, 19 nt, Artificial Sequence
  Description of Artificial Sequence: Synthetic oligonucleotide
cagggcuccaagugggagu

SEQ ID NO: 368903 - RNA, 19 nt, Artificial Sequence
  Description of Artificial Sequence: Synthetic oligonucleotide
ggcgaccacuuaaccaggc

SEQ ID NO: 368904 - RNA, 19 nt, Artificial Sequence
  Description of Artificial Sequence: Synthetic oligonucleotide
ccuggaugggaaaggugga

SEQ ID NO: 368905 - RNA, 19 nt, Artificial Sequence
  Description of Artificial Sequence: Synthetic oligonucleotide
ggccagaugagaagagaaa

SEQ ID NO: 368906 - RNA, 19 nt, Artificial Sequence
  Description of Artificial Sequence: Synthetic oligonucleotide
gcgaccacuuaaccaggca

SEQ ID NO: 368907 - RNA, 19 nt, Artificial Sequence
  Description of Artificial Sequence: Synthetic oligonucleotide
aggcaccgugcuaggcgcg

SEQ ID NO: 368908 - RNA, 19 nt, Artificial Sequence
  Description of Artificial Sequence: Synthetic oligonucleotide
ggcuaacuagucugguggu

SEQ ID NO: 368909 - RNA, 19 nt, Artificial Sequence
  Description of Artificial Sequence: Synthetic oligonucleotide
ugccccuauuggcgaccac

SEQ ID NO: 368910 - RNA, 19 nt, Artificial Sequence
  Description of Artificial Sequence: Synthetic oligonucleotide
gcggggcugaguuuuggaa

SEQ ID NO: 368911 - RNA, 19 nt, Artificial Sequence
  Description of Artificial Sequence: Synthetic oligonucleotide
cagucccugugccgccggc

SEQ ID NO: 368912 - RNA, 19 nt, Artificial Sequence
  Description of Artificial Sequence: Synthetic oligonucleotide
gaggcggggcugaguuuug

SEQ ID NO: 368913 - RNA, 19 nt, Artificial Sequence
  Description of Artificial Sequence: Synthetic oligonucleotide
cagcgccguagcagcuacc

SEQ ID NO: 368914 - RNA, 19 nt, Artificial Sequence
  Description of Artificial Sequence: Synthetic oligonucleotide
ccguccuacacugaccaca

SEQ ID NO: 368915 - RNA, 19 nt, Artificial Sequence
  Description of Artificial Sequence: Synthetic oligonucleotide
accugagaccagaguggca

SEQ ID NO: 368916 - RNA, 19 nt, Artificial Sequence
  Description of Artificial Sequence: Synthetic oligonucleotide
ccgagcccuccgaagcugc

SEQ ID NO: 368917 - RNA, 19 nt, Artificial Sequence
  Description of Artificial Sequence: Synthetic oligonucleotide
gaaggagcgggaaggcauu

SEQ ID NO: 368918 - RNA, 19 nt, Artificial Sequence
  Description of Artificial Sequence: Synthetic oligonucleotide
cccaggucuaauacggugu

SEQ ID NO: 368919 - RNA, 19 nt, Artificial Sequence
  Description of Artificial Sequence: Synthetic oligonucleotide
gguggggcuuagaguauca

SEQ ID NO: 368920 - RNA, 19 nt, Artificial Sequence
  Description of Artificial Sequence: Synthetic oligonucleotide
gcggaaauacagagaugca

SEQ ID NO: 368921 - RNA, 19 nt, Artificial Sequence
  Description of Artificial Sequence: Synthetic oligonucleotide
ggcggggcugaguuuugga

SEQ ID NO: 368922 - RNA, 19 nt, Artificial Sequence
  Description of Artificial Sequence: Synthetic oligonucleotide
cauacgaagcguggcuccu

SEQ ID NO: 368923 - RNA, 19 nt, Artificial Sequence
  Description of Artificial Sequence: Synthetic oligonucleotide
gcgauuccgagcccuccga

SEQ ID NO: 368924 - RNA, 19 nt, Artificial Sequence
  Description of Artificial Sequence: Synthetic oligonucleotide
gagguacccaagccagguu

SEQ ID NO: 368925 - RNA, 19 nt, Artificial Sequence
  Description of Artificial Sequence: Synthetic oligonucleotide
cuaacccagagugccugcu

SEQ ID NO: 368926 - RNA, 19 nt, Artificial Sequence
  Description of Artificial Sequence: Synthetic oligonucleotide
ccaaguuaacucuuuccuu

SEQ ID NO: 368927 - RNA, 19 nt, Artificial Sequence
  Description of Artificial Sequence: Synthetic oligonucleotide
cuuccccucuguggggaca

SEQ ID NO: 368928 - RNA, 19 nt, Artificial Sequence
  Description of Artificial Sequence: Synthetic oligonucleotide
gcuaacuagucugguggua

SEQ ID NO: 368929 - RNA, 19 nt, Artificial Sequence
  Description of Artificial Sequence: Synthetic oligonucleotide
guucggguauacaggcuau

SEQ ID NO: 368930 - RNA, 19 nt, Artificial Sequence
  Description of Artificial Sequence: Synthetic oligonucleotide
cccggaucugaagccgucc

SEQ ID NO: 368931 - RNA, 19 nt, Artificial Sequence
  Description of Artificial Sequence: Synthetic oligonucleotide
cugcuaacccagagugccu

SEQ ID NO: 368932 - RNA, 19 nt, Artificial Sequence
  Description of Artificial Sequence: Synthetic oligonucleotide
ggcacgaaggcaacugcgu

SEQ ID NO: 368933 - RNA, 19 nt, Artificial Sequence
  Description of Artificial Sequence: Synthetic oligonucleotide
gcugccccuauuggcgacc

SEQ ID NO: 368934 - RNA, 19 nt, Artificial Sequence
  Description of Artificial Sequence: Synthetic oligonucleotide
ggcuagucccacagcuuuc

SEQ ID NO: 368935 - RNA, 19 nt, Artificial Sequence
  Description of Artificial Sequence: Synthetic oligonucleotide
cacagcccaagggaaggcu

SEQ ID NO: 368936 - RNA, 19 nt, Artificial Sequence
  Description of Artificial Sequence: Synthetic oligonucleotide
gcgcggaaauacagagaug

SEQ ID NO: 368937 - RNA, 19 nt, Artificial Sequence
  Description of Artificial Sequence: Synthetic oligonucleotide
gccccuauuggcgaccacu

SEQ ID NO: 368938 - RNA, 19 nt, Artificial Sequence
  Description of Artificial Sequence: Synthetic oligonucleotide
cugccccuauuggcgacca

SEQ ID NO: 368939 - RNA, 19 nt, Artificial Sequence
  Description of Artificial Sequence: Synthetic oligonucleotide
caccgugcuaggcgcggaa

SEQ ID NO: 368940 - RNA, 19 nt, Artificial Sequence
  Description of Artificial Sequence: Synthetic oligonucleotide
cucucccgagccagauucu

SEQ ID NO: 368941 - RNA, 19 nt, Artificial Sequence
  Description of Artificial Sequence: Synthetic oligonucleotide
gccguccuacacugaccac

SEQ ID NO: 368942 - RNA, 19 nt, Artificial Sequence
  Description of Artificial Sequence: Synthetic oligonucleotide
cggaaauacagagaugcau

SEQ ID NO: 368943 - RNA, 19 nt, Artificial Sequence
  Description of Artificial Sequence: Synthetic oligonucleotide
gcgccguagcagcuaccac

SEQ ID NO: 368944 - RNA, 19 nt, Artificial Sequence
  Description of Artificial Sequence: Synthetic oligonucleotide
cgacagucccugugccgcc

SEQ ID NO: 368945 - RNA, 19 nt, Artificial Sequence
  Description of Artificial Sequence: Synthetic oligonucleotide
cuagucccacagcuuucau

SEQ ID NO: 368946 - RNA, 19 nt, Artificial Sequence
  Description of Artificial Sequence: Synthetic oligonucleotide
gacgucccaggugcugccu

SEQ ID NO: 368947 - RNA, 19 nt, Artificial Sequence
  Description of Artificial Sequence: Synthetic oligonucleotide
gccacgagagaagcauuua

SEQ ID NO: 368948 - RNA, 19 nt, Artificial Sequence
  Description of Artificial Sequence: Synthetic oligonucleotide
gcugucgguagaagaggua

SEQ ID NO: 368949 - RNA, 19 nt, Artificial Sequence
  Description of Artificial Sequence: Synthetic oligonucleotide
cgaagcguggcuccugcua

SEQ ID NO: 368950 - RNA, 19 nt, Artificial Sequence
  Description of Artificial Sequence: Synthetic oligonucleotide
ggcgucuuggaggaucauu

SEQ ID NO: 368951 - RNA, 19 nt, Artificial Sequence
  Description of Artificial Sequence: Synthetic oligonucleotide
gcgcuccauccguugucuc

SEQ ID NO: 368952 - RNA, 19 nt, Artificial Sequence
  Description of Artificial Sequence: Synthetic oligonucleotide
ccggaucugaagccguccu

SEQ ID NO: 368953 - RNA, 19 nt, Artificial Sequence
  Description of Artificial Sequence: Synthetic oligonucleotide
cugccuuggcggcgguggu

SEQ ID NO: 368954 - RNA, 19 nt, Artificial Sequence
  Description of Artificial Sequence: Synthetic oligonucleotide
cgcgggcauuucuggcccc

SEQ ID NO: 368955 - RNA, 19 nt, Artificial Sequence
  Description of Artificial Sequence: Synthetic oligonucleotide
gggcucccauacacucgac

SEQ ID NO: 368956 - RNA, 19 nt, Artificial Sequence
  Description of Artificial Sequence: Synthetic oligonucleotide
cgauuccgagcccuccgaa

SEQ ID NO: 368957 - RNA, 19 nt, Artificial Sequence
  Description of Artificial Sequence: Synthetic oligonucleotide
gcuugugggugcagagaau

SEQ ID NO: 368958 - RNA, 19 nt, Artificial Sequence
  Description of Artificial Sequence: Synthetic oligonucleotide
ggccuuugggauagcgauu

SEQ ID NO: 368959 - RNA, 19 nt, Artificial Sequence
  Description of Artificial Sequence: Synthetic oligonucleotide
ggccugggagaggcuaaua

SEQ ID NO: 368960 - RNA, 19 nt, Artificial Sequence
  Description of Artificial Sequence: Synthetic oligonucleotide
ccgugcuaggcgcggaaau

SEQ ID NO: 368961 - RNA, 19 nt, Artificial Sequence
  Description of Artificial Sequence: Synthetic oligonucleotide
cggaucugaagccguccua

SEQ ID NO: 368962 - RNA, 19 nt, Artificial Sequence
  Description of Artificial Sequence: Synthetic oligonucleotide
cuuggcaaucggggaccuu

SEQ ID NO: 368963 - RNA, 19 nt, Artificial Sequence
  Description of Artificial Sequence: Synthetic oligonucleotide
cuaccaccgccgccauguu

SEQ ID NO: 368964 - RNA, 19 nt, Artificial Sequence
  Description of Artificial Sequence: Synthetic oligonucleotide
ccccucuuucuggggaugu

SEQ ID NO: 368965 - RNA, 19 nt, Artificial Sequence
  Description of Artificial Sequence: Synthetic oligonucleotide
ccuuggcaaucggggaccu

SEQ ID NO: 368966 - RNA, 19 nt, Artificial Sequence
  Description of Artificial Sequence: Synthetic oligonucleotide
cgggguuccagggcuccaa

SEQ ID NO: 368967 - RNA, 19 nt, Artificial Sequence
  Description of Artificial Sequence: Synthetic oligonucleotide
ccgggguuccagggcucca

SEQ ID NO: 368968 - RNA, 19 nt, Artificial Sequence
  Description of Artificial Sequence: Synthetic oligonucleotide
gcccgggaguagccaucgu

SEQ ID NO: 368969 - RNA, 19 nt, Artificial Sequence
  Description of Artificial Sequence: Synthetic oligonucleotide
cgccggcugagaucacggu

SEQ ID NO: 368970 - RNA, 19 nt, Artificial Sequence
  Description of Artificial Sequence: Synthetic oligonucleotide
gggcgucuuggaggaucau

SEQ ID NO: 368971 - RNA, 19 nt, Artificial Sequence
  Description of Artificial Sequence: Synthetic oligonucleotide
cgccugcaaagcccagguu

SEQ ID NO: 368972 - RNA, 19 nt, Artificial Sequence
  Description of Artificial Sequence: Synthetic oligonucleotide
aauucgacauagcagaacc

SEQ ID NO: 368973 - RNA, 19 nt, Artificial Sequence
  Description of Artificial Sequence: Synthetic oligonucleotide
agauagauauagcaaagcc

SEQ ID NO: 368974 - RNA, 19 nt, Artificial Sequence
  Description of Artificial Sequence: Synthetic oligonucleotide
uuggagauggauuagauca

SEQ ID NO: 368975 - RNA, 19 nt, Artificial Sequence
  Description of Artificial Sequence: Synthetic oligonucleotide
gauuagaucaucugaaagc

SEQ ID NO: 368976 - RNA, 19 nt, Artificial Sequence
  Description of Artificial Sequence: Synthetic oligonucleotide
cauucuuacagucagcugg

SEQ ID NO: 368977 - RNA, 19 nt, Artificial Sequence
  Description of Artificial Sequence: Synthetic oligonucleotide
uagcuaauaagcaagcugc

SEQ ID NO: 368978 - RNA, 19 nt, Artificial Sequence
  Description of Artificial Sequence: Synthetic oligonucleotide
uuugauuacaaccacgcaa

SEQ ID NO: 368979 - RNA, 19 nt, Artificial Sequence
  Description of Artificial Sequence: Synthetic oligonucleotide
uguaaagagagaaagcaaa

SEQ ID NO: 368980 - RNA, 19 nt, Artificial Sequence
  Description of Artificial Sequence: Synthetic oligonucleotide
aaccuaagcucauucuugc

SEQ ID NO: 368981 - RNA, 19 nt, Artificial Sequence
  Description of Artificial Sequence: Synthetic oligonucleotide
caucugaucagauaaagug

SEQ ID NO: 368982 - RNA, 19 nt, Artificial Sequence
  Description of Artificial Sequence: Synthetic oligonucleotide
ugugcaucugaucagauaa

SEQ ID NO: 368983 - RNA, 19 nt, Artificial Sequence
  Description of Artificial Sequence: Synthetic oligonucleotide
auugccgagaccuugcaac

SEQ ID NO: 368984 - RNA, 19 nt, Artificial Sequence
  Description of Artificial Sequence: Synthetic oligonucleotide
aacuggaacagauggggac

SEQ ID NO: 368985 - RNA, 19 nt, Artificial Sequence
  Description of Artificial Sequence: Synthetic oligonucleotide
ugguucuuaucucagaagc

SEQ ID NO: 368986 - RNA, 19 nt, Artificial Sequence
  Description of Artificial Sequence: Synthetic oligonucleotide
aaagccaagaauguacuag

SEQ ID NO: 368987 - RNA, 19 nt, Artificial Sequence
  Description of Artificial Sequence: Synthetic oligonucleotide
uuaagagcgagcaggagca

SEQ ID NO: 368988 - RNA, 19 nt, Artificial Sequence
  Description of Artificial Sequence: Synthetic oligonucleotide
cugacaugcacucacaagc

SEQ ID NO: 368989 - RNA, 19 nt, Artificial Sequence
  Description of Artificial Sequence: Synthetic oligonucleotide
uuguuaacagcugacaugc

SEQ ID NO: 368990 - RNA, 19 nt, Artificial Sequence
  Description of Artificial Sequence: Synthetic oligonucleotide
uccgagaauaagcagagga

SEQ ID NO: 368991 - RNA, 19 nt, Artificial Sequence
  Description of Artificial Sequence: Synthetic oligonucleotide
cagauaaagugccagaccc

SEQ ID NO: 368992 - RNA, 19 nt, Artificial Sequence
  Description of Artificial Sequence: Synthetic oligonucleotide
gaagcugcuagcuaauaag

SEQ ID NO: 368993 - RNA, 19 nt, Artificial Sequence
  Description of Artificial Sequence: Synthetic oligonucleotide
aaagugccagacccuaggc

SEQ ID NO: 368994 - RNA, 19 nt, Artificial Sequence
  Description of Artificial Sequence: Synthetic oligonucleotide
acuccguaugcugagaucc

SEQ ID NO: 368995 - RNA, 19 nt, Artificial Sequence
  Description of Artificial Sequence: Synthetic oligonucleotide
uaaagugccagacccuagg

SEQ ID NO: 368996 - RNA, 19 nt, Artificial Sequence
  Description of Artificial Sequence: Synthetic oligonucleotide
acaggcacuagauagauau

SEQ ID NO: 368997 - RNA, 19 nt, Artificial Sequence
  Description of Artificial Sequence: Synthetic oligonucleotide
aaugagcuugcacuugguc

SEQ ID NO: 368998 - RNA, 19 nt, Artificial Sequence
  Description of Artificial Sequence: Synthetic oligonucleotide
aagauagcaucuaugucac

SEQ ID NO: 368999 - RNA, 19 nt, Artificial Sequence
  Description of Artificial Sequence: Synthetic oligonucleotide
uugcacuuggucuuaagag

SEQ ID NO: 369000 - RNA, 19 nt, Artificial Sequence
  Description of Artificial Sequence: Synthetic oligonucleotide
uuaacagcugacaugcacu

SEQ ID NO: 369001 - RNA, 19 nt, Artificial Sequence
  Description of Artificial Sequence: Synthetic oligonucleotide
ugaacuguguuaaaaggaa

SEQ ID NO: 369002 - RNA, 19 nt, Artificial Sequence
  Description of Artificial Sequence: Synthetic oligonucleotide
uuuuccgcauuggagaugg

SEQ ID NO: 369003 - RNA, 19 nt, Artificial Sequence
  Description of Artificial Sequence: Synthetic oligonucleotide
gaauguguuaaguguuugg

SEQ ID NO: 369004 - RNA, 19 nt, Artificial Sequence
  Description of Artificial Sequence: Synthetic oligonucleotide
aauguccacacgaagugac

SEQ ID NO: 369005 - RNA, 19 nt, Artificial Sequence
  Description of Artificial Sequence: Synthetic oligonucleotide
agccugauccccuugcucc

SEQ ID NO: 369006 - RNA, 19 nt, Artificial Sequence
  Description of Artificial Sequence: Synthetic oligonucleotide
ucuagagguuuccagacac

SEQ ID NO: 369007 - RNA, 19 nt, Artificial Sequence
  Description of Artificial Sequence: Synthetic oligonucleotide
gauggauuagaucaucuga

SEQ ID NO: 369008 - RNA, 19 nt, Artificial Sequence
  Description of Artificial Sequence: Synthetic oligonucleotide
uugauuacaaccacgcaau

SEQ ID NO: 369009 - RNA, 19 nt, Artificial Sequence
  Description of Artificial Sequence: Synthetic oligonucleotide
uguguuaaguguuuggaau

SEQ ID NO: 369010 - RNA, 19 nt, Artificial Sequence
  Description of Artificial Sequence: Synthetic oligonucleotide
aguucuguaaauugccgag

SEQ ID NO: 369011 - RNA, 19 nt, Artificial Sequence
  Description of Artificial Sequence: Synthetic oligonucleotide
ucuuaaguuagguauuggu

SEQ ID NO: 369012 - RNA, 19 nt, Artificial Sequence
  Description of Artificial Sequence: Synthetic oligonucleotide
aagcugcuagcuaauaagc

SEQ ID NO: 369013 - RNA, 19 nt, Artificial Sequence
  Description of Artificial Sequence: Synthetic oligonucleotide
uuagguauugguguuacac

SEQ ID NO: 369014 - RNA, 19 nt, Artificial Sequence
  Description of Artificial Sequence: Synthetic oligonucleotide
cuagauagauauagcaaag

SEQ ID NO: 369015 - RNA, 19 nt, Artificial Sequence
  Description of Artificial Sequence: Synthetic oligonucleotide
aaguccauguuggagccgc

SEQ ID NO: 369016 - RNA, 19 nt, Artificial Sequence
  Description of Artificial Sequence: Synthetic oligonucleotide
aaauucgacauagcagaac

SEQ ID NO: 369017 - RNA, 19 nt, Artificial Sequence
  Description of Artificial Sequence: Synthetic oligonucleotide
cuagaaaccacuuguuaac

SEQ ID NO: 369018 - RNA, 19 nt, Artificial Sequence
  Description of Artificial Sequence: Synthetic oligonucleotide
ucuaguggcuggcugaccc

SEQ ID NO: 369019 - RNA, 19 nt, Artificial Sequence
  Description of Artificial Sequence: Synthetic oligonucleotide
ugcacuuggucuuaagagc

SEQ ID NO: 369020 - RNA, 19 nt, Artificial Sequence
  Description of Artificial Sequence: Synthetic oligonucleotide
acuagaaaccacuuguuaa

SEQ ID NO: 369021 - RNA, 19 nt, Artificial Sequence
  Description of Artificial Sequence: Synthetic oligonucleotide
gauagauauagcaaagcca

SEQ ID NO: 369022 - RNA, 19 nt, Artificial Sequence
  Description of Artificial Sequence: Synthetic oligonucleotide
auagauauagcaaagccaa

SEQ ID NO: 369023 - RNA, 19 nt, Artificial Sequence
  Description of Artificial Sequence: Synthetic oligonucleotide
ucguagguaucgaaguccg

SEQ ID NO: 369024 - RNA, 19 nt, Artificial Sequence
  Description of Artificial Sequence: Synthetic oligonucleotide
aaguccgccauuuugccgu

SEQ ID NO: 369025 - RNA, 19 nt, Artificial Sequence
  Description of Artificial Sequence: Synthetic oligonucleotide
gaacucgacaugcagguug

SEQ ID NO: 369026 - RNA, 19 nt, Artificial Sequence
  Description of Artificial Sequence: Synthetic oligonucleotide
uccgcuguaaggaggacag

SEQ ID NO: 369027 - RNA, 19 nt, Artificial Sequence
  Description of Artificial Sequence: Synthetic oligonucleotide
ucacuguuugacaggagcc

SEQ ID NO: 369028 - RNA, 19 nt, Artificial Sequence
  Description of Artificial Sequence: Synthetic oligonucleotide
cuuguuaacagcugacaug

SEQ ID NO: 369029 - RNA, 19 nt, Artificial Sequence
  Description of Artificial Sequence: Synthetic oligonucleotide
uaaauugccgagaccuugc

SEQ ID NO: 369030 - RNA, 19 nt, Artificial Sequence
  Description of Artificial Sequence: Synthetic oligonucleotide
ugauagguccccaaacaca

SEQ ID NO: 369031 - RNA, 19 nt, Artificial Sequence
  Description of Artificial Sequence: Synthetic oligonucleotide
aagcuaaaagcaaagccug

SEQ ID NO: 369032 - RNA, 19 nt, Artificial Sequence
  Description of Artificial Sequence: Synthetic oligonucleotide
accucuagauucucgagag

SEQ ID NO: 369033 - RNA, 19 nt, Artificial Sequence
  Description of Artificial Sequence: Synthetic oligonucleotide
cuugcaacaaagacaauca

SEQ ID NO: 369034 - RNA, 19 nt, Artificial Sequence
  Description of Artificial Sequence: Synthetic oligonucleotide
aaagcgacuccccauugga

SEQ ID NO: 369035 - RNA, 19 nt, Artificial Sequence
  Description of Artificial Sequence: Synthetic oligonucleotide
agcagaacccuuuaaauuu

SEQ ID NO: 369036 - RNA, 19 nt, Artificial Sequence
  Description of Artificial Sequence: Synthetic oligonucleotide
gagaaagcaaagaaagaug

SEQ ID NO: 369037 - RNA, 19 nt, Artificial Sequence
  Description of Artificial Sequence: Synthetic oligonucleotide
uaaagauagcaucuauguc

SEQ ID NO: 369038 - RNA, 19 nt, Artificial Sequence
  Description of Artificial Sequence: Synthetic oligonucleotide
ugaucagauaaagugccag

SEQ ID NO: 369039 - RNA, 19 nt, Artificial Sequence
  Description of Artificial Sequence: Synthetic oligonucleotide
uaugucacccugaacugug

SEQ ID NO: 369040 - RNA, 19 nt, Artificial Sequence
  Description of Artificial Sequence: Synthetic oligonucleotide
agugcaagcacagcugccc

SEQ ID NO: 369041 - RNA, 19 nt, Artificial Sequence
  Description of Artificial Sequence: Synthetic oligonucleotide
ugugcuaagcaccccggag

SEQ ID NO: 369042 - RNA, 19 nt, Artificial Sequence
  Description of Artificial Sequence: Synthetic oligonucleotide
uggauaccaagucaccacc

SEQ ID NO: 369043 - RNA, 19 nt, Artificial Sequence
  Description of Artificial Sequence: Synthetic oligonucleotide
ugaccggucacccaagagu

SEQ ID NO: 369044 - RNA, 19 nt, Artificial Sequence
  Description of Artificial Sequence: Synthetic oligonucleotide
auagcagaacccuuuaaau

SEQ ID NO: 369045 - RNA, 19 nt, Artificial Sequence
  Description of Artificial Sequence: Synthetic oligonucleotide
gauuacaaccacgcaaugc

SEQ ID NO: 369046 - RNA, 19 nt, Artificial Sequence
  Description of Artificial Sequence: Synthetic oligonucleotide
agcaaggugccuccaauuc

SEQ ID NO: 369047 - RNA, 19 nt, Artificial Sequence
  Description of Artificial Sequence: Synthetic oligonucleotide
ugguguuacacaaaugguu

SEQ ID NO: 369048 - RNA, 19 nt, Artificial Sequence
  Description of Artificial Sequence: Synthetic oligonucleotide
agcgacuccccauuggagg

SEQ ID NO: 369049 - RNA, 19 nt, Artificial Sequence
  Description of Artificial Sequence: Synthetic oligonucleotide
uccuacguaagcuguguag

SEQ ID NO: 369050 - RNA, 19 nt, Artificial Sequence
  Description of Artificial Sequence: Synthetic oligonucleotide
aagugagugcucaacacug

SEQ ID NO: 369051 - RNA, 19 nt, Artificial Sequence
  Description of Artificial Sequence: Synthetic oligonucleotide
uguggguucucugaagucc

SEQ ID NO: 369052 - RNA, 19 nt, Artificial Sequence
  Description of Artificial Sequence: Synthetic oligonucleotide
uuugaaagcaaggugccuc

SEQ ID NO: 369053 - RNA, 19 nt, Artificial Sequence
  Description of Artificial Sequence: Synthetic oligonucleotide
acagacgcagugcaagcac

SEQ ID NO: 369054 - RNA, 19 nt, Artificial Sequence
  Description of Artificial Sequence: Synthetic oligonucleotide
ugcaucugaucagauaaag

SEQ ID NO: 369055 - RNA, 19 nt, Artificial Sequence
  Description of Artificial Sequence: Synthetic oligonucleotide
ggauuagaucaucugaaag

SEQ ID NO: 369056 - RNA, 19 nt, Artificial Sequence
  Description of Artificial Sequence: Synthetic oligonucleotide
ugauggacgugccuguucu

SEQ ID NO: 369057 - RNA, 19 nt, Artificial Sequence
  Description of Artificial Sequence: Synthetic oligonucleotide
auuuugccgucuccgcucc

SEQ ID NO: 369058 - RNA, 19 nt, Artificial Sequence
  Description of Artificial Sequence: Synthetic oligonucleotide
uugguguuacacaaauggu

SEQ ID NO: 369059 - RNA, 19 nt, Artificial Sequence
  Description of Artificial Sequence: Synthetic oligonucleotide
ggucuuaagagcgagcagg

SEQ ID NO: 369060 - RNA, 19 nt, Artificial Sequence
  Description of Artificial Sequence: Synthetic oligonucleotide
agcaacacagaacucgaca

SEQ ID NO: 369061 - RNA, 19 nt, Artificial Sequence
  Description of Artificial Sequence: Synthetic oligonucleotide
aggcacuagauagauauag

SEQ ID NO: 369062 - RNA, 19 nt, Artificial Sequence
  Description of Artificial Sequence: Synthetic oligonucleotide
agauggauuagaucaucug

SEQ ID NO: 369063 - RNA, 19 nt, Artificial Sequence
  Description of Artificial Sequence: Synthetic oligonucleotide
ucuguaaauugccgagacc

SEQ ID NO: 369064 - RNA, 19 nt, Artificial Sequence
  Description of Artificial Sequence: Synthetic oligonucleotide
uagguauugguguuacaca

SEQ ID NO: 369065 - RNA, 19 nt, Artificial Sequence
  Description of Artificial Sequence: Synthetic oligonucleotide
agcggauugagcugcagug

SEQ ID NO: 369066 - RNA, 19 nt, Artificial Sequence
  Description of Artificial Sequence: Synthetic oligonucleotide
gaaagcgacuccccauugg

SEQ ID NO: 369067 - RNA, 19 nt, Artificial Sequence
  Description of Artificial Sequence: Synthetic oligonucleotide
aaagagcgcacagacgcag

SEQ ID NO: 369068 - RNA, 19 nt, Artificial Sequence
  Description of Artificial Sequence: Synthetic oligonucleotide
aguuagguauugguguuac

SEQ ID NO: 369069 - RNA, 19 nt, Artificial Sequence
  Description of Artificial Sequence: Synthetic oligonucleotide
caucaaauucgacauagca

SEQ ID NO: 369070 - RNA, 19 nt, Artificial Sequence
  Description of Artificial Sequence: Synthetic oligonucleotide
caagucuagagguuuccag

SEQ ID NO: 369071 - RNA, 19 nt, Artificial Sequence
  Description of Artificial Sequence: Synthetic oligonucleotide
agaguugaagucaucucgg

SEQ ID NO: 369072 - RNA, 19 nt, Artificial Sequence
  Description of Artificial Sequence: Synthetic oligonucleotide
ugcucaacacugucugugg

SEQ ID NO: 369073 - RNA, 19 nt, Artificial Sequence
  Description of Artificial Sequence: Synthetic oligonucleotide
gucuuuuccgcauuggaga

SEQ ID NO: 369074 - RNA, 19 nt, Artificial Sequence
  Description of Artificial Sequence: Synthetic oligonucleotide
uucaagcuaaaagcaaagc

SEQ ID NO: 369075 - RNA, 19 nt, Artificial Sequence
  Description of Artificial Sequence: Synthetic oligonucleotide
cuacguaagcuguguaggg

SEQ ID NO: 369076 - RNA, 19 nt, Artificial Sequence
  Description of Artificial Sequence: Synthetic oligonucleotide
aagccugauccccuugcuc

SEQ ID NO: 369077 - RNA, 19 nt, Artificial Sequence
  Description of Artificial Sequence: Synthetic oligonucleotide
uacguaagcuguguagggg

SEQ ID NO: 369078 - RNA, 19 nt, Artificial Sequence
  Description of Artificial Sequence: Synthetic oligonucleotide
agguauugguguuacacaa

SEQ ID NO: 369079 - RNA, 19 nt, Artificial Sequence
  Description of Artificial Sequence: Synthetic oligonucleotide
gaauggggccugcagggcg

SEQ ID NO: 369080 - RNA, 19 nt, Artificial Sequence
  Description of Artificial Sequence: Synthetic oligonucleotide
guagguaucgaaguccgcc

SEQ ID NO: 369081 - RNA, 19 nt, Artificial Sequence
  Description of Artificial Sequence: Synthetic oligonucleotide
guaggggagggccaucucg

SEQ ID NO: 369082 - RNA, 19 nt, Artificial Sequence
  Description of Artificial Sequence: Synthetic oligonucleotide
aagucaucucgggaauccc

SEQ ID NO: 369083 - RNA, 19 nt, Artificial Sequence
  Description of Artificial Sequence: Synthetic oligonucleotide
cugaacuguguuaaaagga

SEQ ID NO: 369084 - RNA, 19 nt, Artificial Sequence
  Description of Artificial Sequence: Synthetic oligonucleotide
uucgacauagcagaacccu

SEQ ID NO: 369085 - RNA, 19 nt, Artificial Sequence
  Description of Artificial Sequence: Synthetic oligonucleotide
ugagugcucaacacugucu

SEQ ID NO: 369086 - RNA, 19 nt, Artificial Sequence
  Description of Artificial Sequence: Synthetic oligonucleotide
gacaggagccuacugugcc

SEQ ID NO: 369087 - RNA, 19 nt, Artificial Sequence
  Description of Artificial Sequence: Synthetic oligonucleotide
ugucuuaaguuagguauug

SEQ ID NO: 369088 - RNA, 19 nt, Artificial Sequence
  Description of Artificial Sequence: Synthetic oligonucleotide
gaagucaucucgggaaucc

SEQ ID NO: 369089 - RNA, 19 nt, Artificial Sequence
  Description of Artificial Sequence: Synthetic oligonucleotide
guacugagggucucaacag

SEQ ID NO: 369090 - RNA, 19 nt, Artificial Sequence
  Description of Artificial Sequence: Synthetic oligonucleotide
agugugauggacgugccug

SEQ ID NO: 369091 - RNA, 19 nt, Artificial Sequence
  Description of Artificial Sequence: Synthetic oligonucleotide
gaagcuccgagaauaagca

SEQ ID NO: 369092 - RNA, 19 nt, Artificial Sequence
  Description of Artificial Sequence: Synthetic oligonucleotide
auguacuagaaaccacuug

SEQ ID NO: 369093 - RNA, 19 nt, Artificial Sequence
  Description of Artificial Sequence: Synthetic oligonucleotide
auagaacugaauguguuaa

SEQ ID NO: 369094 - RNA, 19 nt, Artificial Sequence
  Description of Artificial Sequence: Synthetic oligonucleotide
guaggaagcggauugagcu

SEQ ID NO: 369095 - RNA, 19 nt, Artificial Sequence
  Description of Artificial Sequence: Synthetic oligonucleotide
ugcuaagcaccccggagca

SEQ ID NO: 369096 - RNA, 19 nt, Artificial Sequence
  Description of Artificial Sequence: Synthetic oligonucleotide
auauccauagacucacuuu

SEQ ID NO: 369097 - RNA, 19 nt, Artificial Sequence
  Description of Artificial Sequence: Synthetic oligonucleotide
ugaauguguuaaguguuug

SEQ ID NO: 369098 - RNA, 19 nt, Artificial Sequence
  Description of Artificial Sequence: Synthetic oligonucleotide
ucgggaaucccauccaccu

SEQ ID NO: 369099 - RNA, 19 nt, Artificial Sequence
  Description of Artificial Sequence: Synthetic oligonucleotide
ucgucguagguaucgaagu

SEQ ID NO: 369100 - RNA, 19 nt, Artificial Sequence
  Description of Artificial Sequence: Synthetic oligonucleotide
uguuacguaagguucucuu

SEQ ID NO: 369101 - RNA, 19 nt, Artificial Sequence
  Description of Artificial Sequence: Synthetic oligonucleotide
cuggauaccaagucaccac

SEQ ID NO: 369102 - RNA, 19 nt, Artificial Sequence
  Description of Artificial Sequence: Synthetic oligonucleotide
uagcagaacccuuuaaauu

SEQ ID NO: 369103 - RNA, 19 nt, Artificial Sequence
  Description of Artificial Sequence: Synthetic oligonucleotide
guaaauugccgagaccuug

SEQ ID NO: 369104 - RNA, 19 nt, Artificial Sequence
  Description of Artificial Sequence: Synthetic oligonucleotide
aagcggauugagcugcagu

SEQ ID NO: 369105 - RNA, 19 nt, Artificial Sequence
  Description of Artificial Sequence: Synthetic oligonucleotide
ugauuacaaccacgcaaug

SEQ ID NO: 369106 - RNA, 19 nt, Artificial Sequence
  Description of Artificial Sequence: Synthetic oligonucleotide
agguuuaagcugcagccgu

SEQ ID NO: 369107 - RNA, 19 nt, Artificial Sequence
  Description of Artificial Sequence: Synthetic oligonucleotide
agcaagucuagagguuucc

SEQ ID NO: 369108 - RNA, 19 nt, Artificial Sequence
  Description of Artificial Sequence: Synthetic oligonucleotide
uagguaucgaaguccgcca

SEQ ID NO: 369109 - RNA, 19 nt, Artificial Sequence
  Description of Artificial Sequence: Synthetic oligonucleotide
aaauugccgagaccuugca

SEQ ID NO: 369110 - RNA, 19 nt, Artificial Sequence
  Description of Artificial Sequence: Synthetic oligonucleotide
agccgcacacuccguaugc

SEQ ID NO: 369111 - RNA, 19 nt, Artificial Sequence
  Description of Artificial Sequence: Synthetic oligonucleotide
cacacuaugugggaaggag

SEQ ID NO: 369112 - RNA, 19 nt, Artificial Sequence
  Description of Artificial Sequence: Synthetic oligonucleotide
uccccuugcucccaaguga

SEQ ID NO: 369113 - RNA, 19 nt, Artificial Sequence
  Description of Artificial Sequence: Synthetic oligonucleotide
uagaaaccacuuguuaaca

SEQ ID NO: 369114 - RNA, 19 nt, Artificial Sequence
  Description of Artificial Sequence: Synthetic oligonucleotide
ucugucaucggguccgccu

SEQ ID NO: 369115 - RNA, 19 nt, Artificial Sequence
  Description of Artificial Sequence: Synthetic oligonucleotide
auucgacauagcagaaccc

SEQ ID NO: 369116 - RNA, 19 nt, Artificial Sequence
  Description of Artificial Sequence: Synthetic oligonucleotide
ucucgaaagcgacucccca

SEQ ID NO: 369117 - RNA, 19 nt, Artificial Sequence
  Description of Artificial Sequence: Synthetic oligonucleotide
gugauagguccccaaacac

SEQ ID NO: 369118 - RNA, 19 nt, Artificial Sequence
  Description of Artificial Sequence: Synthetic oligonucleotide
acgaagugaccggucaccc

SEQ ID NO: 369119 - RNA, 19 nt, Artificial Sequence
  Description of Artificial Sequence: Synthetic oligonucleotide
cacuagauagauauagcaa

SEQ ID NO: 369120 - RNA, 19 nt, Artificial Sequence
  Description of Artificial Sequence: Synthetic oligonucleotide
ucuuuuccgcauuggagau

SEQ ID NO: 369121 - RNA, 19 nt, Artificial Sequence
  Description of Artificial Sequence: Synthetic oligonucleotide
gugcuaagcaccccggagc

SEQ ID NO: 369122 - RNA, 19 nt, Artificial Sequence
  Description of Artificial Sequence: Synthetic oligonucleotide
ugacaggagccuacugugc

SEQ ID NO: 369123 - RNA, 19 nt, Artificial Sequence
  Description of Artificial Sequence: Synthetic oligonucleotide
acacgaagugaccggucac

SEQ ID NO: 369124 - RNA, 19 nt, Artificial Sequence
  Description of Artificial Sequence: Synthetic oligonucleotide
ucugcaugcccaucucagc

SEQ ID NO: 369125 - RNA, 19 nt, Artificial Sequence
  Description of Artificial Sequence: Synthetic oligonucleotide
uuagaucaucugaaagcau

SEQ ID NO: 369126 - RNA, 19 nt, Artificial Sequence
  Description of Artificial Sequence: Synthetic oligonucleotide
gaccggucacccaagagug

SEQ ID NO: 369127 - RNA, 19 nt, Artificial Sequence
  Description of Artificial Sequence: Synthetic oligonucleotide
cauuuugccgucuccgcuc

SEQ ID NO: 369128 - RNA, 19 nt, Artificial Sequence
  Description of Artificial Sequence: Synthetic oligonucleotide
aauguacuagaaaccacuu

SEQ ID NO: 369129 - RNA, 19 nt, Artificial Sequence
  Description of Artificial Sequence: Synthetic oligonucleotide
gcacuagauagauauagca

SEQ ID NO: 369130 - RNA, 19 nt, Artificial Sequence
  Description of Artificial Sequence: Synthetic oligonucleotide
cugaguugggguuggcuac

SEQ ID NO: 369131 - RNA, 19 nt, Artificial Sequence
  Description of Artificial Sequence: Synthetic oligonucleotide
cuagagguuuccagacacc

SEQ ID NO: 369132 - RNA, 19 nt, Artificial Sequence
  Description of Artificial Sequence: Synthetic oligonucleotide
aauugccgagaccuugcaa

SEQ ID NO: 369133 - RNA, 19 nt, Artificial Sequence
  Description of Artificial Sequence: Synthetic oligonucleotide
cuguaaauugccgagaccu

SEQ ID NO: 369134 - RNA, 19 nt, Artificial Sequence
  Description of Artificial Sequence: Synthetic oligonucleotide
agguccugcucgccggucc

SEQ ID NO: 369135 - RNA, 19 nt, Artificial Sequence
  Description of Artificial Sequence: Synthetic oligonucleotide
caucucgaaagcgacuccc

SEQ ID NO: 369136 - RNA, 19 nt, Artificial Sequence
  Description of Artificial Sequence: Synthetic oligonucleotide
aucgucguagguaucgaag

SEQ ID NO: 369137 - RNA, 19 nt, Artificial Sequence
  Description of Artificial Sequence: Synthetic oligonucleotide
uguaaauugccgagaccuu

SEQ ID NO: 369138 - RNA, 19 nt, Artificial Sequence
  Description of Artificial Sequence: Synthetic oligonucleotide
cauguuggagccgcguagg

SEQ ID NO: 369139 - RNA, 19 nt, Artificial Sequence
  Description of Artificial Sequence: Synthetic oligonucleotide
aucacaagccaagggguag

SEQ ID NO: 369140 - RNA, 19 nt, Artificial Sequence
  Description of Artificial Sequence: Synthetic oligonucleotide
uggcacgcaggucaccacc

SEQ ID NO: 369141 - RNA, 19 nt, Artificial Sequence
  Description of Artificial Sequence: Synthetic oligonucleotide
agugcaccgucguacguca

SEQ ID NO: 369142 - RNA, 19 nt, Artificial Sequence
  Description of Artificial Sequence: Synthetic oligonucleotide
uuuccuacguaagcugugu

SEQ ID NO: 369143 - RNA, 19 nt, Artificial Sequence
  Description of Artificial Sequence: Synthetic oligonucleotide
aucucgaaagcgacucccc

SEQ ID NO: 369144 - RNA, 19 nt, Artificial Sequence
  Description of Artificial Sequence: Synthetic oligonucleotide
ucccaaccuaagcucauuc

SEQ ID NO: 369145 - RNA, 19 nt, Artificial Sequence
  Description of Artificial Sequence: Synthetic oligonucleotide
uuacagucagcugggcgcc

SEQ ID NO: 369146 - RNA, 19 nt, Artificial Sequence
  Description of Artificial Sequence: Synthetic oligonucleotide
cgagguuuaagcugcagcc

SEQ ID NO: 369147 - RNA, 19 nt, Artificial Sequence
  Description of Artificial Sequence: Synthetic oligonucleotide
ucgaaagcgacuccccauu

SEQ ID NO: 369148 - RNA, 19 nt, Artificial Sequence
  Description of Artificial Sequence: Synthetic oligonucleotide
acugaauguguuaaguguu

SEQ ID NO: 369149 - RNA, 19 nt, Artificial Sequence
  Description of Artificial Sequence: Synthetic oligonucleotide
uguucacucacagcuguuc

SEQ ID NO: 369150 - RNA, 19 nt, Artificial Sequence
  Description of Artificial Sequence: Synthetic oligonucleotide
uucacucacagcuguucaa

SEQ ID NO: 369151 - RNA, 19 nt, Artificial Sequence
  Description of Artificial Sequence: Synthetic oligonucleotide
uugccgagaccuugcaaca

SEQ ID NO: 369152 - RNA, 19 nt, Artificial Sequence
  Description of Artificial Sequence: Synthetic oligonucleotide
gucuuaaguuagguauugg

SEQ ID NO: 369153 - RNA, 19 nt, Artificial Sequence
  Description of Artificial Sequence: Synthetic oligonucleotide
agagcgagcaggagcaaag

SEQ ID NO: 369154 - RNA, 19 nt, Artificial Sequence
  Description of Artificial Sequence: Synthetic oligonucleotide
ggugauagguccccaaaca

SEQ ID NO: 369155 - RNA, 19 nt, Artificial Sequence
  Description of Artificial Sequence: Synthetic oligonucleotide
agagcgcacagacgcagug

SEQ ID NO: 369156 - RNA, 19 nt, Artificial Sequence
  Description of Artificial Sequence: Synthetic oligonucleotide
cugugccugaacaggcugc

SEQ ID NO: 369157 - RNA, 19 nt, Artificial Sequence
  Description of Artificial Sequence: Synthetic oligonucleotide
uccuaaggcucuaguggcu

SEQ ID NO: 369158 - RNA, 19 nt, Artificial Sequence
  Description of Artificial Sequence: Synthetic oligonucleotide
ugcaccgucguacgucaga

SEQ ID NO: 369159 - RNA, 19 nt, Artificial Sequence
  Description of Artificial Sequence: Synthetic oligonucleotide
acgcaaugcaugucugucu

SEQ ID NO: 369160 - RNA, 19 nt, Artificial Sequence
  Description of Artificial Sequence: Synthetic oligonucleotide
cauuggagguccugcucgc

SEQ ID NO: 369161 - RNA, 19 nt, Artificial Sequence
  Description of Artificial Sequence: Synthetic oligonucleotide
ucgacauagcagaacccuu

SEQ ID NO: 369162 - RNA, 19 nt, Artificial Sequence
  Description of Artificial Sequence: Synthetic oligonucleotide
ggugccaaaucauuuucca

SEQ ID NO: 369163 - RNA, 19 nt, Artificial Sequence
  Description of Artificial Sequence: Synthetic oligonucleotide
agccgcguaggggagggcc

SEQ ID NO: 369164 - RNA, 19 nt, Artificial Sequence
  Description of Artificial Sequence: Synthetic oligonucleotide
gacccuaggccuugagcug

SEQ ID NO: 369165 - RNA, 19 nt, Artificial Sequence
  Description of Artificial Sequence: Synthetic oligonucleotide
aaccacuuguuaacagcug

SEQ ID NO: 369166 - RNA, 19 nt, Artificial Sequence
  Description of Artificial Sequence: Synthetic oligonucleotide
uguuugacaggagccuacu

SEQ ID NO: 369167 - RNA, 19 nt, Artificial Sequence
  Description of Artificial Sequence: Synthetic oligonucleotide
ccuacugugccugaacagg

SEQ ID NO: 369168 - RNA, 19 nt, Artificial Sequence
  Description of Artificial Sequence: Synthetic oligonucleotide
cacgaagugaccggucacc

SEQ ID NO: 369169 - RNA, 19 nt, Artificial Sequence
  Description of Artificial Sequence: Synthetic oligonucleotide
uagccgcacacuccguaug

SEQ ID NO: 369170 - RNA, 19 nt, Artificial Sequence
  Description of Artificial Sequence: Synthetic oligonucleotide
cuuugauuacaaccacgca

SEQ ID NO: 369171 - RNA, 19 nt, Artificial Sequence
  Description of Artificial Sequence: Synthetic oligonucleotide
uaaggcucuaguggcuggc

SEQ ID NO: 369172 - RNA, 19 nt, Artificial Sequence
  Description of Artificial Sequence: Synthetic oligonucleotide
ggaagagcagggaaugagc

SEQ ID NO: 369173 - RNA, 19 nt, Artificial Sequence
  Description of Artificial Sequence: Synthetic oligonucleotide
acaagggaaagagcgcaca

SEQ ID NO: 369174 - RNA, 19 nt, Artificial Sequence
  Description of Artificial Sequence: Synthetic oligonucleotide
auuuccuacguaagcugug

SEQ ID NO: 369175 - RNA, 19 nt, Artificial Sequence
  Description of Artificial Sequence: Synthetic oligonucleotide
auaaagugccagacccuag

SEQ ID NO: 369176 - RNA, 19 nt, Artificial Sequence
  Description of Artificial Sequence: Synthetic oligonucleotide
uccgccuuuccugaaucca

SEQ ID NO: 369177 - RNA, 19 nt, Artificial Sequence
  Description of Artificial Sequence: Synthetic oligonucleotide
ccgagaauaagcagaggac

SEQ ID NO: 369178 - RNA, 19 nt, Artificial Sequence
  Description of Artificial Sequence: Synthetic oligonucleotide
gauuuccuacguaagcugu

SEQ ID NO: 369179 - RNA, 19 nt, Artificial Sequence
  Description of Artificial Sequence: Synthetic oligonucleotide
agugcucaacacugucugu

SEQ ID NO: 369180 - RNA, 19 nt, Artificial Sequence
  Description of Artificial Sequence: Synthetic oligonucleotide
gagucuaccucaucaaauu

SEQ ID NO: 369181 - RNA, 19 nt, Artificial Sequence
  Description of Artificial Sequence: Synthetic oligonucleotide
ccuaagcucauucuugcuc

SEQ ID NO: 369182 - RNA, 19 nt, Artificial Sequence
  Description of Artificial Sequence: Synthetic oligonucleotide
agggagucuaccucaucaa

SEQ ID NO: 369183 - RNA, 19 nt, Artificial Sequence
  Description of Artificial Sequence: Synthetic oligonucleotide
agauaaagugccagacccu

SEQ ID NO: 369184 - RNA, 19 nt, Artificial Sequence
  Description of Artificial Sequence: Synthetic oligonucleotide
acacuccguaugcugagau

SEQ ID NO: 369185 - RNA, 19 nt, Artificial Sequence
  Description of Artificial Sequence: Synthetic oligonucleotide
accuaagcucauucuugcu

SEQ ID NO: 369186 - RNA, 19 nt, Artificial Sequence
  Description of Artificial Sequence: Synthetic oligonucleotide
acgcaggucaccaccagug

SEQ ID NO: 369187 - RNA, 19 nt, Artificial Sequence
  Description of Artificial Sequence: Synthetic oligonucleotide
uuggagccgcguaggggag

SEQ ID NO: 369188 - RNA, 19 nt, Artificial Sequence
  Description of Artificial Sequence: Synthetic oligonucleotide
caccucuagauucucgaga

SEQ ID NO: 369189 - RNA, 19 nt, Artificial Sequence
  Description of Artificial Sequence: Synthetic oligonucleotide
aaguuagguauugguguua

SEQ ID NO: 369190 - RNA, 19 nt, Artificial Sequence
  Description of Artificial Sequence: Synthetic oligonucleotide
cacgcaaugcaugucuguc

SEQ ID NO: 369191 - RNA, 19 nt, Artificial Sequence
  Description of Artificial Sequence: Synthetic oligonucleotide
gauugagcugcagugggcu

SEQ ID NO: 369192 - RNA, 19 nt, Artificial Sequence
  Description of Artificial Sequence: Synthetic oligonucleotide
gugaccggucacccaagag

SEQ ID NO: 369193 - RNA, 19 nt, Artificial Sequence
  Description of Artificial Sequence: Synthetic oligonucleotide
ucacccaagagugcaccgu

SEQ ID NO: 369194 - RNA, 19 nt, Artificial Sequence
  Description of Artificial Sequence: Synthetic oligonucleotide
ccaagugagugcucaacac

SEQ ID NO: 369195 - RNA, 19 nt, Artificial Sequence
  Description of Artificial Sequence: Synthetic oligonucleotide
gcccaucucagcuggauac

SEQ ID NO: 369196 - RNA, 19 nt, Artificial Sequence
  Description of Artificial Sequence: Synthetic oligonucleotide
gaucgucguagguaucgaa

SEQ ID NO: 369197 - RNA, 19 nt, Artificial Sequence
  Description of Artificial Sequence: Synthetic oligonucleotide
ggcacuagauagauauagc

SEQ ID NO: 369198 - RNA, 19 nt, Artificial Sequence
  Description of Artificial Sequence: Synthetic oligonucleotide
caaauucgacauagcagaa

SEQ ID NO: 369199 - RNA, 19 nt, Artificial Sequence
  Description of Artificial Sequence: Synthetic oligonucleotide
agcugcuguaggcccgauc

SEQ ID NO: 369200 - RNA, 19 nt, Artificial Sequence
  Description of Artificial Sequence: Synthetic oligonucleotide
agcuaauaagcaagcugca

SEQ ID NO: 369201 - RNA, 19 nt, Artificial Sequence
  Description of Artificial Sequence: Synthetic oligonucleotide
cuaagcaccccggagcaga

SEQ ID NO: 369202 - RNA, 19 nt, Artificial Sequence
  Description of Artificial Sequence: Synthetic oligonucleotide
ugucacccugaacuguguu

SEQ ID NO: 369203 - RNA, 19 nt, Artificial Sequence
  Description of Artificial Sequence: Synthetic oligonucleotide
agugaccggucacccaaga

SEQ ID NO: 369204 - RNA, 19 nt, Artificial Sequence
  Description of Artificial Sequence: Synthetic oligonucleotide
uuccuacguaagcugugua

SEQ ID NO: 369205 - RNA, 19 nt, Artificial Sequence
  Description of Artificial Sequence: Synthetic oligonucleotide
uccgccauuuugccgucuc

SEQ ID NO: 369206 - RNA, 19 nt, Artificial Sequence
  Description of Artificial Sequence: Synthetic oligonucleotide
gcgacuggcugccacuagg

SEQ ID NO: 369207 - RNA, 19 nt, Artificial Sequence
  Description of Artificial Sequence: Synthetic oligonucleotide
gcuccgagaauaagcagag

SEQ ID NO: 369208 - RNA, 19 nt, Artificial Sequence
  Description of Artificial Sequence: Synthetic oligonucleotide
ccgagguuuaagcugcagc

SEQ ID NO: 369209 - RNA, 19 nt, Artificial Sequence
  Description of Artificial Sequence: Synthetic oligonucleotide
gcagccguggucucugugc

SEQ ID NO: 369210 - RNA, 19 nt, Artificial Sequence
  Description of Artificial Sequence: Synthetic oligonucleotide
uugccgucuccgcuccuug

SEQ ID NO: 369211 - RNA, 19 nt, Artificial Sequence
  Description of Artificial Sequence: Synthetic oligonucleotide
agguaucgaaguccgccau

SEQ ID NO: 369212 - RNA, 19 nt, Artificial Sequence
  Description of Artificial Sequence: Synthetic oligonucleotide
agacgcagugcaagcacag

SEQ ID NO: 369213 - RNA, 19 nt, Artificial Sequence
  Description of Artificial Sequence: Synthetic oligonucleotide
gucuagagguuuccagaca

SEQ ID NO: 369214 - RNA, 19 nt, Artificial Sequence
  Description of Artificial Sequence: Synthetic oligonucleotide
ucguacgucagagccuccu

SEQ ID NO: 369215 - RNA, 19 nt, Artificial Sequence
  Description of Artificial Sequence: Synthetic oligonucleotide
gagauggauuagaucaucu

SEQ ID NO: 369216 - RNA, 19 nt, Artificial Sequence
  Description of Artificial Sequence: Synthetic oligonucleotide
gaaagagcgcacagacgca

SEQ ID NO: 369217 - RNA, 19 nt, Artificial Sequence
  Description of Artificial Sequence: Synthetic oligonucleotide
caagugagugcucaacacu

SEQ ID NO: 369218 - RNA, 19 nt, Artificial Sequence
  Description of Artificial Sequence: Synthetic oligonucleotide
cacuuguuaacagcugaca

SEQ ID NO: 369219 - RNA, 19 nt, Artificial Sequence
  Description of Artificial Sequence: Synthetic oligonucleotide
gagugcaccgucguacguc

SEQ ID NO: 369220 - RNA, 19 nt, Artificial Sequence
  Description of Artificial Sequence: Synthetic oligonucleotide
uccgagguuuaagcugcag

SEQ ID NO: 369221 - RNA, 19 nt, Artificial Sequence
  Description of Artificial Sequence: Synthetic oligonucleotide
gcuaauaagcaagcugcac

SEQ ID NO: 369222 - RNA, 19 nt, Artificial Sequence
  Description of Artificial Sequence: Synthetic oligonucleotide
gucugucuuaaguuaggua

SEQ ID NO: 369223 - RNA, 19 nt, Artificial Sequence
  Description of Artificial Sequence: Synthetic oligonucleotide
agcuaaaagcaaagccuga

SEQ ID NO: 369224 - RNA, 19 nt, Artificial Sequence
  Description of Artificial Sequence: Synthetic oligonucleotide
cacccaagagugcaccguc

SEQ ID NO: 369225 - RNA, 19 nt, Artificial Sequence
  Description of Artificial Sequence: Synthetic oligonucleotide
ggaagcugcuagcuaauaa

SEQ ID NO: 369226 - RNA, 19 nt, Artificial Sequence
  Description of Artificial Sequence: Synthetic oligonucleotide
aagugaccggucacccaag

SEQ ID NO: 369227 - RNA, 19 nt, Artificial Sequence
  Description of Artificial Sequence: Synthetic oligonucleotide
ugggcgcccagcaguguga

SEQ ID NO: 369228 - RNA, 19 nt, Artificial Sequence
  Description of Artificial Sequence: Synthetic oligonucleotide
cagcaagucuagagguuuc

SEQ ID NO: 369229 - RNA, 19 nt, Artificial Sequence
  Description of Artificial Sequence: Synthetic oligonucleotide
agagugcaccgucguacgu

SEQ ID NO: 369230 - RNA, 19 nt, Artificial Sequence
  Description of Artificial Sequence: Synthetic oligonucleotide
acuguuugacaggagccua

SEQ ID NO: 369231 - RNA, 19 nt, Artificial Sequence
  Description of Artificial Sequence: Synthetic oligonucleotide
acccugaacuguguuaaaa

SEQ ID NO: 369232 - RNA, 19 nt, Artificial Sequence
  Description of Artificial Sequence: Synthetic oligonucleotide
acccaagagugcaccgucg

SEQ ID NO: 369233 - RNA, 19 nt, Artificial Sequence
  Description of Artificial Sequence: Synthetic oligonucleotide
guuagguauugguguuaca

SEQ ID NO: 369234 - RNA, 19 nt, Artificial Sequence
  Description of Artificial Sequence: Synthetic oligonucleotide
gacgcagugcaagcacagc

SEQ ID NO: 369235 - RNA, 19 nt, Artificial Sequence
  Description of Artificial Sequence: Synthetic oligonucleotide
guuacguaagguucucuuu

SEQ ID NO: 369236 - RNA, 19 nt, Artificial Sequence
  Description of Artificial Sequence: Synthetic oligonucleotide
cuucgggacccauggccac

SEQ ID NO: 369237 - RNA, 19 nt, Artificial Sequence
  Description of Artificial Sequence: Synthetic oligonucleotide
gguucuuaucucagaagca

SEQ ID NO: 369238 - RNA, 19 nt, Artificial Sequence
  Description of Artificial Sequence: Synthetic oligonucleotide
agugagugcucaacacugu

SEQ ID NO: 369239 - RNA, 19 nt, Artificial Sequence
  Description of Artificial Sequence: Synthetic oligonucleotide
gcagaacccuuuaaauuug

SEQ ID NO: 369240 - RNA, 19 nt, Artificial Sequence
  Description of Artificial Sequence: Synthetic oligonucleotide
cagacgcagugcaagcaca

SEQ ID NO: 369241 - RNA, 19 nt, Artificial Sequence
  Description of Artificial Sequence: Synthetic oligonucleotide
cacuccguaugcugagauc

SEQ ID NO: 369242 - RNA, 19 nt, Artificial Sequence
  Description of Artificial Sequence: Synthetic oligonucleotide
caucccuguagccagaguu

SEQ ID NO: 369243 - RNA, 19 nt, Artificial Sequence
  Description of Artificial Sequence: Synthetic oligonucleotide
guaugcugagauccuuaaa

SEQ ID NO: 369244 - RNA, 19 nt, Artificial Sequence
  Description of Artificial Sequence: Synthetic oligonucleotide
agagguuuccagacaccca

SEQ ID NO: 369245 - RNA, 19 nt, Artificial Sequence
  Description of Artificial Sequence: Synthetic oligonucleotide
accggucacccaagagugc

SEQ ID NO: 369246 - RNA, 19 nt, Artificial Sequence
  Description of Artificial Sequence: Synthetic oligonucleotide
caccccggagcagacagac

SEQ ID NO: 369247 - RNA, 19 nt, Artificial Sequence
  Description of Artificial Sequence: Synthetic oligonucleotide
ugaggggcguugccacugu

SEQ ID NO: 369248 - RNA, 19 nt, Artificial Sequence
  Description of Artificial Sequence: Synthetic oligonucleotide
ugccccacaggaggcagca

SEQ ID NO: 369249 - RNA, 19 nt, Artificial Sequence
  Description of Artificial Sequence: Synthetic oligonucleotide
ucgccgguccccagggcga

SEQ ID NO: 369250 - RNA, 19 nt, Artificial Sequence
  Description of Artificial Sequence: Synthetic oligonucleotide
gcaugucugucuuaaguua

SEQ ID NO: 369251 - RNA, 19 nt, Artificial Sequence
  Description of Artificial Sequence: Synthetic oligonucleotide
ucguuccucuucugugggu

SEQ ID NO: 369252 - RNA, 19 nt, Artificial Sequence
  Description of Artificial Sequence: Synthetic oligonucleotide
gcggauugagcugcagugg

SEQ ID NO: 369253 - RNA, 19 nt, Artificial Sequence
  Description of Artificial Sequence: Synthetic oligonucleotide
gccuggccacacuaugugg

SEQ ID NO: 369254 - RNA, 19 nt, Artificial Sequence
  Description of Artificial Sequence: Synthetic oligonucleotide
ccgaucgucguagguaucg

SEQ ID NO: 369255 - RNA, 19 nt, Artificial Sequence
  Description of Artificial Sequence: Synthetic oligonucleotide
cugggcgcccagcagugug

SEQ ID NO: 369256 - RNA, 19 nt, Artificial Sequence
  Description of Artificial Sequence: Synthetic oligonucleotide
cggauugagcugcaguggg

SEQ ID NO: 369257 - RNA, 19 nt, Artificial Sequence
  Description of Artificial Sequence: Synthetic oligonucleotide
ccgagaccuugcaacaaag

SEQ ID NO: 369258 - RNA, 19 nt, Artificial Sequence
  Description of Artificial Sequence: Synthetic oligonucleotide
ccaagggguaggcuggcag

SEQ ID NO: 369259 - RNA, 19 nt, Artificial Sequence
  Description of Artificial Sequence: Synthetic oligonucleotide
gcacagacgcagugcaagc

SEQ ID NO: 369260 - RNA, 19 nt, Artificial Sequence
  Description of Artificial Sequence: Synthetic oligonucleotide
cuaaccgcuccaacuggaa

SEQ ID NO: 369261 - RNA, 19 nt, Artificial Sequence
  Description of Artificial Sequence: Synthetic oligonucleotide
gccaucucgaaagcgacuc

SEQ ID NO: 369262 - RNA, 19 nt, Artificial Sequence
  Description of Artificial Sequence: Synthetic oligonucleotide
gauccccuugcucccaagu

SEQ ID NO: 369263 - RNA, 19 nt, Artificial Sequence
  Description of Artificial Sequence: Synthetic oligonucleotide
uggagccgcguaggggagg

SEQ ID NO: 369264 - RNA, 19 nt, Artificial Sequence
  Description of Artificial Sequence: Synthetic oligonucleotide
caagcucuguguuuccgcu

SEQ ID NO: 369265 - RNA, 19 nt, Artificial Sequence
  Description of Artificial Sequence: Synthetic oligonucleotide
ggucacccaagagugcacc

SEQ ID NO: 369266 - RNA, 19 nt, Artificial Sequence
  Description of Artificial Sequence: Synthetic oligonucleotide
ccccuugcucccaagugag

SEQ ID NO: 369267 - RNA, 19 nt, Artificial Sequence
  Description of Artificial Sequence: Synthetic oligonucleotide
uggguucucugaaguccau

SEQ ID NO: 369268 - RNA, 19 nt, Artificial Sequence
  Description of Artificial Sequence: Synthetic oligonucleotide
caccgucguacgucagagc

SEQ ID NO: 369269 - RNA, 19 nt, Artificial Sequence
  Description of Artificial Sequence: Synthetic oligonucleotide
gguuuaagcugcagccgug

SEQ ID NO: 369270 - RNA, 19 nt, Artificial Sequence
  Description of Artificial Sequence: Synthetic oligonucleotide
ugccgucuccgcuccuuga

SEQ ID NO: 369271 - RNA, 19 nt, Artificial Sequence
  Description of Artificial Sequence: Synthetic oligonucleotide
uccguaugcugagauccuu

SEQ ID NO: 369272 - RNA, 19 nt, Artificial Sequence
  Description of Artificial Sequence: Synthetic oligonucleotide
ccccuaaccgcuccaacug

SEQ ID NO: 369273 - RNA, 19 nt, Artificial Sequence
  Description of Artificial Sequence: Synthetic oligonucleotide
agauuccccugcacccuuc

SEQ ID NO: 369274 - RNA, 19 nt, Artificial Sequence
  Description of Artificial Sequence: Synthetic oligonucleotide
ugucaucggguccgccuuu

SEQ ID NO: 369275 - RNA, 19 nt, Artificial Sequence
  Description of Artificial Sequence: Synthetic oligonucleotide
cugugcaucugaucagaua

SEQ ID NO: 369276 - RNA, 19 nt, Artificial Sequence
  Description of Artificial Sequence: Synthetic oligonucleotide
gcuugcacuuggucuuaag

SEQ ID NO: 369277 - RNA, 19 nt, Artificial Sequence
  Description of Artificial Sequence: Synthetic oligonucleotide
ugugauggacgugccuguu

SEQ ID NO: 369278 - RNA, 19 nt, Artificial Sequence
  Description of Artificial Sequence: Synthetic oligonucleotide
ggauugagcugcagugggc

SEQ ID NO: 369279 - RNA, 19 nt, Artificial Sequence
  Description of Artificial Sequence: Synthetic oligonucleotide
cccuaaccgcuccaacugg

SEQ ID NO: 369280 - RNA, 19 nt, Artificial Sequence
  Description of Artificial Sequence: Synthetic oligonucleotide
cacagacgcagugcaagca

SEQ ID NO: 369281 - RNA, 19 nt, Artificial Sequence
  Description of Artificial Sequence: Synthetic oligonucleotide
cuggcacgcaggucaccac

SEQ ID NO: 369282 - RNA, 19 nt, Artificial Sequence
  Description of Artificial Sequence: Synthetic oligonucleotide
ggagccgcguaggggaggg

SEQ ID NO: 369283 - RNA, 19 nt, Artificial Sequence
  Description of Artificial Sequence: Synthetic oligonucleotide
cucuaguggcuggcugacc

SEQ ID NO: 369284 - RNA, 19 nt, Artificial Sequence
  Description of Artificial Sequence: Synthetic oligonucleotide
guaucgaaguccgccauuu

SEQ ID NO: 369285 - RNA, 19 nt, Artificial Sequence
  Description of Artificial Sequence: Synthetic oligonucleotide
aggagccuacugugccuga

SEQ ID NO: 369286 - RNA, 19 nt, Artificial Sequence
  Description of Artificial Sequence: Synthetic oligonucleotide
gugugauggacgugccugu

SEQ ID NO: 369287 - RNA, 19 nt, Artificial Sequence
  Description of Artificial Sequence: Synthetic oligonucleotide
caaccacgcaaugcauguc

SEQ ID NO: 369288 - RNA, 19 nt, Artificial Sequence
  Description of Artificial Sequence: Synthetic oligonucleotide
cucgaaagcgacuccccau

SEQ ID NO: 369289 - RNA, 19 nt, Artificial Sequence
  Description of Artificial Sequence: Synthetic oligonucleotide
ccaucucgaaagcgacucc

SEQ ID NO: 369290 - RNA, 19 nt, Artificial Sequence
  Description of Artificial Sequence: Synthetic oligonucleotide
gcaaggugccuccaauucu

SEQ ID NO: 369291 - RNA, 19 nt, Artificial Sequence
  Description of Artificial Sequence: Synthetic oligonucleotide
guacuagaaaccacuuguu

SEQ ID NO: 369292 - RNA, 19 nt, Artificial Sequence
  Description of Artificial Sequence: Synthetic oligonucleotide
ggucucaacagcugugcau

SEQ ID NO: 369293 - RNA, 19 nt, Artificial Sequence
  Description of Artificial Sequence: Synthetic oligonucleotide
agcacgccuggggcauggc

SEQ ID NO: 369294 - RNA, 19 nt, Artificial Sequence
  Description of Artificial Sequence: Synthetic oligonucleotide
cagcacgccuggggcaugg

SEQ ID NO: 369295 - RNA, 19 nt, Artificial Sequence
  Description of Artificial Sequence: Synthetic oligonucleotide
gugcaucugaucagauaaa

SEQ ID NO: 369296 - RNA, 19 nt, Artificial Sequence
  Description of Artificial Sequence: Synthetic oligonucleotide
ccgcauuggagauggauua

SEQ ID NO: 369297 - RNA, 19 nt, Artificial Sequence
  Description of Artificial Sequence: Synthetic oligonucleotide
gcuucgggacccauggcca

SEQ ID NO: 369298 - RNA, 19 nt, Artificial Sequence
  Description of Artificial Sequence: Synthetic oligonucleotide
ccuaaccgcuccaacugga

SEQ ID NO: 369299 - RNA, 19 nt, Artificial Sequence
  Description of Artificial Sequence: Synthetic oligonucleotide
gaggggcguugccacuguc

SEQ ID NO: 369300 - RNA, 19 nt, Artificial Sequence
  Description of Artificial Sequence: Synthetic oligonucleotide
ccgcacacuccguaugcug

SEQ ID NO: 369301 - RNA, 19 nt, Artificial Sequence
  Description of Artificial Sequence: Synthetic oligonucleotide
cuagccgcacacuccguau

SEQ ID NO: 369302 - RNA, 19 nt, Artificial Sequence
  Description of Artificial Sequence: Synthetic oligonucleotide
ggcgacuggcugccacuag

SEQ ID NO: 369303 - RNA, 19 nt, Artificial Sequence
  Description of Artificial Sequence: Synthetic oligonucleotide
gccgagaccuugcaacaaa

SEQ ID NO: 369304 - RNA, 19 nt, Artificial Sequence
  Description of Artificial Sequence: Synthetic oligonucleotide
cgucguagguaucgaaguc

SEQ ID NO: 369305 - RNA, 19 nt, Artificial Sequence
  Description of Artificial Sequence: Synthetic oligonucleotide
gucaucggguccgccuuuc

SEQ ID NO: 369306 - RNA, 19 nt, Artificial Sequence
  Description of Artificial Sequence: Synthetic oligonucleotide
cgucguacgucagagccuc

SEQ ID NO: 369307 - RNA, 19 nt, Artificial Sequence
  Description of Artificial Sequence: Synthetic oligonucleotide
cguagguaucgaaguccgc

SEQ ID NO: 369308 - RNA, 19 nt, Artificial Sequence
  Description of Artificial Sequence: Synthetic oligonucleotide
cacacuccguaugcugaga

SEQ ID NO: 369309 - RNA, 19 nt, Artificial Sequence
  Description of Artificial Sequence: Synthetic oligonucleotide
gguuggcuacuugguugag

SEQ ID NO: 369310 - RNA, 19 nt, Artificial Sequence
  Description of Artificial Sequence: Synthetic oligonucleotide
caccucagcccaccuucca

SEQ ID NO: 369311 - RNA, 19 nt, Artificial Sequence
  Description of Artificial Sequence: Synthetic oligonucleotide
cgaaagcgacuccccauug

SEQ ID NO: 369312 - RNA, 19 nt, Artificial Sequence
  Description of Artificial Sequence: Synthetic oligonucleotide
cuccguaugcugagauccu

SEQ ID NO: 369313 - RNA, 19 nt, Artificial Sequence
  Description of Artificial Sequence: Synthetic oligonucleotide
gcuaagcaccccggagcag

SEQ ID NO: 369314 - RNA, 19 nt, Artificial Sequence
  Description of Artificial Sequence: Synthetic oligonucleotide
cuguaggcccgaucgucgu

SEQ ID NO: 369315 - RNA, 19 nt, Artificial Sequence
  Description of Artificial Sequence: Synthetic oligonucleotide
cagcagugugauggacgug

SEQ ID NO: 369316 - RNA, 19 nt, Artificial Sequence
  Description of Artificial Sequence: Synthetic oligonucleotide
agcuugcacuuggucuuaa

SEQ ID NO: 369317 - RNA, 19 nt, Artificial Sequence
  Description of Artificial Sequence: Synthetic oligonucleotide
ccacacgaagugaccgguc

SEQ ID NO: 369318 - RNA, 19 nt, Artificial Sequence
  Description of Artificial Sequence: Synthetic oligonucleotide
cguaugcugagauccuuaa

SEQ ID NO: 369319 - RNA, 19 nt, Artificial Sequence
  Description of Artificial Sequence: Synthetic oligonucleotide
cagccguggucucugugcu

SEQ ID NO: 369320 - RNA, 19 nt, Artificial Sequence
  Description of Artificial Sequence: Synthetic oligonucleotide
ccgccauuuugccgucucc

SEQ ID NO: 369321 - RNA, 19 nt, Artificial Sequence
  Description of Artificial Sequence: Synthetic oligonucleotide
ggcccgaucgucguaggua

SEQ ID NO: 369322 - RNA, 19 nt, Artificial Sequence
  Description of Artificial Sequence: Synthetic oligonucleotide
cugucaucggguccgccuu

SEQ ID NO: 369323 - RNA, 19 nt, Artificial Sequence
  Description of Artificial Sequence: Synthetic oligonucleotide
gcaccucagcccaccuucc

SEQ ID NO: 369324 - RNA, 19 nt, Artificial Sequence
  Description of Artificial Sequence: Synthetic oligonucleotide
gcaaugcaugucugucuua

SEQ ID NO: 369325 - RNA, 19 nt, Artificial Sequence
  Description of Artificial Sequence: Synthetic oligonucleotide
ccggucacccaagagugca

SEQ ID NO: 369326 - RNA, 19 nt, Artificial Sequence
  Description of Artificial Sequence: Synthetic oligonucleotide
ggacuuggugccaaaucau

SEQ ID NO: 369327 - RNA, 19 nt, Artificial Sequence
  Description of Artificial Sequence: Synthetic oligonucleotide
gucguacgucagagccucc

SEQ ID NO: 369328 - RNA, 19 nt, Artificial Sequence
  Description of Artificial Sequence: Synthetic oligonucleotide
gcccgaucgucguagguau

SEQ ID NO: 369329 - RNA, 19 nt, Artificial Sequence
  Description of Artificial Sequence: Synthetic oligonucleotide
gugcaccgucguacgucag

SEQ ID NO: 369330 - RNA, 19 nt, Artificial Sequence
  Description of Artificial Sequence: Synthetic oligonucleotide
cccaaccuaagcucauucu

SEQ ID NO: 369331 - RNA, 19 nt, Artificial Sequence
  Description of Artificial Sequence: Synthetic oligonucleotide
gguaucgaaguccgccauu

SEQ ID NO: 369332 - RNA, 19 nt, Artificial Sequence
  Description of Artificial Sequence: Synthetic oligonucleotide
ccauuuugccgucuccgcu

SEQ ID NO: 369333 - RNA, 19 nt, Artificial Sequence
  Description of Artificial Sequence: Synthetic oligonucleotide
ggucaccaccagugcagaa

SEQ ID NO: 369334 - RNA, 19 nt, Artificial Sequence
  Description of Artificial Sequence: Synthetic oligonucleotide
guccauguuggagccgcgu

SEQ ID NO: 369335 - RNA, 19 nt, Artificial Sequence
  Description of Artificial Sequence: Synthetic oligonucleotide
ccgccuuuccugaauccaa

SEQ ID NO: 369336 - RNA, 19 nt, Artificial Sequence
  Description of Artificial Sequence: Synthetic oligonucleotide
ggagccuacugugccugaa

SEQ ID NO: 369337 - RNA, 19 nt, Artificial Sequence
  Description of Artificial Sequence: Synthetic oligonucleotide
gagccgcguaggggagggc

SEQ ID NO: 369338 - RNA, 19 nt, Artificial Sequence
  Description of Artificial Sequence: Synthetic oligonucleotide
cucugacuagccgcacacu

SEQ ID NO: 369339 - RNA, 19 nt, Artificial Sequence
  Description of Artificial Sequence: Synthetic oligonucleotide
gacuagccgcacacuccgu

SEQ ID NO: 369340 - RNA, 19 nt, Artificial Sequence
  Description of Artificial Sequence: Synthetic oligonucleotide
cccgaucgucguagguauc

SEQ ID NO: 369341 - RNA, 19 nt, Artificial Sequence
  Description of Artificial Sequence: Synthetic oligonucleotide
cccaagagugcaccgucgu

SEQ ID NO: 369342 - RNA, 19 nt, Artificial Sequence
  Description of Artificial Sequence: Synthetic oligonucleotide
cccuaccccuaagaaguca

SEQ ID NO: 369343 - RNA, 19 nt, Artificial Sequence
  Description of Artificial Sequence: Synthetic oligonucleotide
gaguugggguuggcuacuu

SEQ ID NO: 369344 - RNA, 19 nt, Artificial Sequence
  Description of Artificial Sequence: Synthetic oligonucleotide
ccacgcaaugcaugucugu

SEQ ID NO: 369345 - RNA, 19 nt, Artificial Sequence
  Description of Artificial Sequence: Synthetic oligonucleotide
gccgcguaggggagggcca

SEQ ID NO: 369346 - RNA, 19 nt, Artificial Sequence
  Description of Artificial Sequence: Synthetic oligonucleotide
cguaggggagggccaucuc

SEQ ID NO: 369347 - RNA, 19 nt, Artificial Sequence
  Description of Artificial Sequence: Synthetic oligonucleotide
gcguaggggagggccaucu

SEQ ID NO: 369348 - RNA, 19 nt, Artificial Sequence
  Description of Artificial Sequence: Synthetic oligonucleotide
ggcgggaauggggccugca

SEQ ID NO: 369349 - RNA, 19 nt, Artificial Sequence
  Description of Artificial Sequence: Synthetic oligonucleotide
cgcaaugcaugucugucuu

SEQ ID NO: 369350 - RNA, 19 nt, Artificial Sequence
  Description of Artificial Sequence: Synthetic oligonucleotide
gcugugcaucugaucagau

SEQ ID NO: 369351 - RNA, 19 nt, Artificial Sequence
  Description of Artificial Sequence: Synthetic oligonucleotide
ccgucguacgucagagccu

SEQ ID NO: 369352 - RNA, 19 nt, Artificial Sequence
  Description of Artificial Sequence: Synthetic oligonucleotide
gugccagacccuaggccuu

SEQ ID NO: 369353 - RNA, 19 nt, Artificial Sequence
  Description of Artificial Sequence: Synthetic oligonucleotide
cgaucgucguagguaucga

SEQ ID NO: 369354 - RNA, 19 nt, Artificial Sequence
  Description of Artificial Sequence: Synthetic oligonucleotide
ccccgaagauggcugaguu

SEQ ID NO: 369355 - RNA, 19 nt, Artificial Sequence
  Description of Artificial Sequence: Synthetic oligonucleotide
gccgcacacuccguaugcu

SEQ ID NO: 369356 - RNA, 19 nt, Artificial Sequence
  Description of Artificial Sequence: Synthetic oligonucleotide
cgacuccccauuggagguc

SEQ ID NO: 369357 - RNA, 19 nt, Artificial Sequence
  Description of Artificial Sequence: Synthetic oligonucleotide
gcgcacagacgcagugcaa

SEQ ID NO: 369358 - RNA, 19 nt, Artificial Sequence
  Description of Artificial Sequence: Synthetic oligonucleotide
ccaggcgggaauggggccu

SEQ ID NO: 369359 - RNA, 19 nt, Artificial Sequence
  Description of Artificial Sequence: Synthetic oligonucleotide
cguacgucagagccuccuu

SEQ ID NO: 369360 - RNA, 19 nt, Artificial Sequence
  Description of Artificial Sequence: Synthetic oligonucleotide
cgcguaggggagggccauc

SEQ ID NO: 369361 - RNA, 19 nt, Artificial Sequence
  Description of Artificial Sequence: Synthetic oligonucleotide
ccgcuguaaggaggacagu

SEQ ID NO: 369362 - RNA, 19 nt, Artificial Sequence
  Description of Artificial Sequence: Synthetic oligonucleotide
ccgcguaggggagggccau

SEQ ID NO: 369363 - RNA, 19 nt, Artificial Sequence
  Description of Artificial Sequence: Synthetic oligonucleotide
aguagguuaucuuuggucc

SEQ ID NO: 369364 - RNA, 19 nt, Artificial Sequence
  Description of Artificial Sequence: Synthetic oligonucleotide
ugaaguuacagcaacacac

SEQ ID NO: 369365 - RNA, 19 nt, Artificial Sequence
  Description of Artificial Sequence: Synthetic oligonucleotide
aucacaucggaacaaaccc

SEQ ID NO: 369366 - RNA, 19 nt, Artificial Sequence
  Description of Artificial Sequence: Synthetic oligonucleotide
uuagguauuugccagagcu

SEQ ID NO: 369367 - RNA, 19 nt, Artificial Sequence
  Description of Artificial Sequence: Synthetic oligonucleotide
aaauacaaguuuccuuggg

SEQ ID NO: 369368 - RNA, 19 nt, Artificial Sequence
  Description of Artificial Sequence: Synthetic oligonucleotide
guuacagcaacacaccggg

SEQ ID NO: 369369 - RNA, 19 nt, Artificial Sequence
  Description of Artificial Sequence: Synthetic oligonucleotide
agugaaucagaagaggggc

SEQ ID NO: 369370 - RNA, 19 nt, Artificial Sequence
  Description of Artificial Sequence: Synthetic oligonucleotide
uuaucuuugguccacgcac

SEQ ID NO: 369371 - RNA, 19 nt, Artificial Sequence
  Description of Artificial Sequence: Synthetic oligonucleotide
gaucacgucacugacacgg

SEQ ID NO: 369372 - RNA, 19 nt, Artificial Sequence
  Description of Artificial Sequence: Synthetic oligonucleotide
aaugccagaguacggacag

SEQ ID NO: 369373 - RNA, 19 nt, Artificial Sequence
  Description of Artificial Sequence: Synthetic oligonucleotide
agauacuauaugcuccucc

SEQ ID NO: 369374 - RNA, 19 nt, Artificial Sequence
  Description of Artificial Sequence: Synthetic oligonucleotide
gaagaaauguuguagaucu

SEQ ID NO: 369375 - RNA, 19 nt, Artificial Sequence
  Description of Artificial Sequence: Synthetic oligonucleotide
uuaggauucuuuaugucca

SEQ ID NO: 369376 - RNA, 19 nt, Artificial Sequence
  Description of Artificial Sequence: Synthetic oligonucleotide
ugcacaguauggaagaaug

SEQ ID NO: 369377 - RNA, 19 nt, Artificial Sequence
  Description of Artificial Sequence: Synthetic oligonucleotide
ugagugauugcuacugggg

SEQ ID NO: 369378 - RNA, 19 nt, Artificial Sequence
  Description of Artificial Sequence: Synthetic oligonucleotide
ugugccgaguaccagauca

SEQ ID NO: 369379 - RNA, 19 nt, Artificial Sequence
  Description of Artificial Sequence: Synthetic oligonucleotide
cagcuuaacaucucuaucc

SEQ ID NO: 369380 - RNA, 19 nt, Artificial Sequence
  Description of Artificial Sequence: Synthetic oligonucleotide
acaaagaacgaaugugccg

SEQ ID NO: 369381 - RNA, 19 nt, Artificial Sequence
  Description of Artificial Sequence: Synthetic oligonucleotide
uucauuaugaugagagacu

SEQ ID NO: 369382 - RNA, 19 nt, Artificial Sequence
  Description of Artificial Sequence: Synthetic oligonucleotide
uguaguaauuccacguucu

SEQ ID NO: 369383 - RNA, 19 nt, Artificial Sequence
  Description of Artificial Sequence: Synthetic oligonucleotide
ucuagguuuguuugcauca

SEQ ID NO: 369384 - RNA, 19 nt, Artificial Sequence
  Description of Artificial Sequence: Synthetic oligonucleotide
caucauuagagcaggagac

SEQ ID NO: 369385 - RNA, 19 nt, Artificial Sequence
  Description of Artificial Sequence: Synthetic oligonucleotide
ugaaucagagugcacagau

SEQ ID NO: 369386 - RNA, 19 nt, Artificial Sequence
  Description of Artificial Sequence: Synthetic oligonucleotide
guacccaacagccaccugg

SEQ ID NO: 369387 - RNA, 19 nt, Artificial Sequence
  Description of Artificial Sequence: Synthetic oligonucleotide
guauuuggcacaccaagag

SEQ ID NO: 369388 - RNA, 19 nt, Artificial Sequence
  Description of Artificial Sequence: Synthetic oligonucleotide
aguauuagcuccccaagcu

SEQ ID NO: 369389 - RNA, 19 nt, Artificial Sequence
  Description of Artificial Sequence: Synthetic oligonucleotide
aaguagccaguccaagcac

SEQ ID NO: 369390 - RNA, 19 nt, Artificial Sequence
  Description of Artificial Sequence: Synthetic oligonucleotide
auaguauuagcuccccaag

SEQ ID NO: 369391 - RNA, 19 nt, Artificial Sequence
  Description of Artificial Sequence: Synthetic oligonucleotide
uuccuuagguauuugccag

SEQ ID NO: 369392 - RNA, 19 nt, Artificial Sequence
  Description of Artificial Sequence: Synthetic oligonucleotide
acucgcuucaugugaagac

SEQ ID NO: 369393 - RNA, 19 nt, Artificial Sequence
  Description of Artificial Sequence: Synthetic oligonucleotide
acagcuuaacaucucuauc

SEQ ID NO: 369394 - RNA, 19 nt, Artificial Sequence
  Description of Artificial Sequence: Synthetic oligonucleotide
ugucaagacucccaagucu

SEQ ID NO: 369395 - RNA, 19 nt, Artificial Sequence
  Description of Artificial Sequence: Synthetic oligonucleotide
ugugauccgaaccuccggc

SEQ ID NO: 369396 - RNA, 19 nt, Artificial Sequence
  Description of Artificial Sequence: Synthetic oligonucleotide
ugguccaucacaucggaac

SEQ ID NO: 369397 - RNA, 19 nt, Artificial Sequence
  Description of Artificial Sequence: Synthetic oligonucleotide
cuucgaagcagucaccagc

SEQ ID NO: 369398 - RNA, 19 nt, Artificial Sequence
  Description of Artificial Sequence: Synthetic oligonucleotide
gaaguagccaguccaagca

SEQ ID NO: 369399 - RNA, 19 nt, Artificial Sequence
  Description of Artificial Sequence: Synthetic oligonucleotide
gagugaaucagaagagggg

SEQ ID NO: 369400 - RNA, 19 nt, Artificial Sequence
  Description of Artificial Sequence: Synthetic oligonucleotide
uucgaagcagucaccagca

SEQ ID NO: 369401 - RNA, 19 nt, Artificial Sequence
  Description of Artificial Sequence: Synthetic oligonucleotide
ucggaacaaacccaacagc

SEQ ID NO: 369402 - RNA, 19 nt, Artificial Sequence
  Description of Artificial Sequence: Synthetic oligonucleotide
accagaucacgucacugac

SEQ ID NO: 369403 - RNA, 19 nt, Artificial Sequence
  Description of Artificial Sequence: Synthetic oligonucleotide
cagaucacgucacugacac

SEQ ID NO: 369404 - RNA, 19 nt, Artificial Sequence
  Description of Artificial Sequence: Synthetic oligonucleotide
gacucuggaucccagaguc

SEQ ID NO: 369405 - RNA, 19 nt, Artificial Sequence
  Description of Artificial Sequence: Synthetic oligonucleotide
agggaauagagagagcguc

SEQ ID NO: 369406 - RNA, 19 nt, Artificial Sequence
  Description of Artificial Sequence: Synthetic oligonucleotide
acagauacuauaugcuccu

SEQ ID NO: 369407 - RNA, 19 nt, Artificial Sequence
  Description of Artificial Sequence: Synthetic oligonucleotide
acuaagaacaaagaacgaa

SEQ ID NO: 369408 - RNA, 19 nt, Artificial Sequence
  Description of Artificial Sequence: Synthetic oligonucleotide
ucccaagauagaaaauaca

SEQ ID NO: 369409 - RNA, 19 nt, Artificial Sequence
  Description of Artificial Sequence: Synthetic oligonucleotide
aaagaacgaaugugccgag

SEQ ID NO: 369410 - RNA, 19 nt, Artificial Sequence
  Description of Artificial Sequence: Synthetic oligonucleotide
guagaauaugccgugcucc

SEQ ID NO: 369411 - RNA, 19 nt, Artificial Sequence
  Description of Artificial Sequence: Synthetic oligonucleotide
ucauuagagcaggagacca

SEQ ID NO: 369412 - RNA, 19 nt, Artificial Sequence
  Description of Artificial Sequence: Synthetic oligonucleotide
cugagugauugcuacuggg

SEQ ID NO: 369413 - RNA, 19 nt, Artificial Sequence
  Description of Artificial Sequence: Synthetic oligonucleotide
caucucuauccuucgaagc

SEQ ID NO: 369414 - RNA, 19 nt, Artificial Sequence
  Description of Artificial Sequence: Synthetic oligonucleotide
uggacguugacccuuccaa

SEQ ID NO: 369415 - RNA, 19 nt, Artificial Sequence
  Description of Artificial Sequence: Synthetic oligonucleotide
guagaucuuaaugccaucc

SEQ ID NO: 369416 - RNA, 19 nt, Artificial Sequence
  Description of Artificial Sequence: Synthetic oligonucleotide
cacggugacaggaagugag

SEQ ID NO: 369417 - RNA, 19 nt, Artificial Sequence
  Description of Artificial Sequence: Synthetic oligonucleotide
aauagagagagcguccuuu

SEQ ID NO: 369418 - RNA, 19 nt, Artificial Sequence
  Description of Artificial Sequence: Synthetic oligonucleotide
aacugaccaaguugcuguc

SEQ ID NO: 369419 - RNA, 19 nt, Artificial Sequence
  Description of Artificial Sequence: Synthetic oligonucleotide
uuuagcacuugacguugag

SEQ ID NO: 369420 - RNA, 19 nt, Artificial Sequence
  Description of Artificial Sequence: Synthetic oligonucleotide
uggugucgggacaacagcc

SEQ ID NO: 369421 - RNA, 19 nt, Artificial Sequence
  Description of Artificial Sequence: Synthetic oligonucleotide
agggaaagucuucugccuc

SEQ ID NO: 369422 - RNA, 19 nt, Artificial Sequence
  Description of Artificial Sequence: Synthetic oligonucleotide
cuacuggggacccauuagg

SEQ ID NO: 369423 - RNA, 19 nt, Artificial Sequence
  Description of Artificial Sequence: Synthetic oligonucleotide
uccagaccugucaagacuc

SEQ ID NO: 369424 - RNA, 19 nt, Artificial Sequence
  Description of Artificial Sequence: Synthetic oligonucleotide
agagugcacagauggaucu

SEQ ID NO: 369425 - RNA, 19 nt, Artificial Sequence
  Description of Artificial Sequence: Synthetic oligonucleotide
agccguguagccucuugcc

SEQ ID NO: 369426 - RNA, 19 nt, Artificial Sequence
  Description of Artificial Sequence: Synthetic oligonucleotide
gaagacugggauuucugga

SEQ ID NO: 369427 - RNA, 19 nt, Artificial Sequence
  Description of Artificial Sequence: Synthetic oligonucleotide
aguuacagcaacacaccgg

SEQ ID NO: 369428 - RNA, 19 nt, Artificial Sequence
  Description of Artificial Sequence: Synthetic oligonucleotide
ucuacaauccauucuccuu

SEQ ID NO: 369429 - RNA, 19 nt, Artificial Sequence
  Description of Artificial Sequence: Synthetic oligonucleotide
gcucacagauacuauaugc

SEQ ID NO: 369430 - RNA, 19 nt, Artificial Sequence
  Description of Artificial Sequence: Synthetic oligonucleotide
cuuugaucauccagccacg

SEQ ID NO: 369431 - RNA, 19 nt, Artificial Sequence
  Description of Artificial Sequence: Synthetic oligonucleotide
agcuuaacaucucuauccu

SEQ ID NO: 369432 - RNA, 19 nt, Artificial Sequence
  Description of Artificial Sequence: Synthetic oligonucleotide
ugacguugagucuccuggg

SEQ ID NO: 369433 - RNA, 19 nt, Artificial Sequence
  Description of Artificial Sequence: Synthetic oligonucleotide
accauagucgcacugugaa

SEQ ID NO: 369434 - RNA, 19 nt, Artificial Sequence
  Description of Artificial Sequence: Synthetic oligonucleotide
uaccagaucacgucacuga

SEQ ID NO: 369435 - RNA, 19 nt, Artificial Sequence
  Description of Artificial Sequence: Synthetic oligonucleotide
caacaguuccacuugccac

SEQ ID NO: 369436 - RNA, 19 nt, Artificial Sequence
  Description of Artificial Sequence: Synthetic oligonucleotide
ucgcacugugaaauccucg

SEQ ID NO: 369437 - RNA, 19 nt, Artificial Sequence
  Description of Artificial Sequence: Synthetic oligonucleotide
caugcaggaaucugaauca

SEQ ID NO: 369438 - RNA, 19 nt, Artificial Sequence
  Description of Artificial Sequence: Synthetic oligonucleotide
caguagguuaucuuugguc

SEQ ID NO: 369439 - RNA, 19 nt, Artificial Sequence
  Description of Artificial Sequence: Synthetic oligonucleotide
agaguacggacagaggcuc

SEQ ID NO: 369440 - RNA, 19 nt, Artificial Sequence
  Description of Artificial Sequence: Synthetic oligonucleotide
uugguccacgcacagccag

SEQ ID NO: 369441 - RNA, 19 nt, Artificial Sequence
  Description of Artificial Sequence: Synthetic oligonucleotide
gacuagugcggacacugcc

SEQ ID NO: 369442 - RNA, 19 nt, Artificial Sequence
  Description of Artificial Sequence: Synthetic oligonucleotide
caaagaacgaaugugccga

SEQ ID NO: 369443 - RNA, 19 nt, Artificial Sequence
  Description of Artificial Sequence: Synthetic oligonucleotide
ccaagauagaaaauacaag

SEQ ID NO: 369444 - RNA, 19 nt, Artificial Sequence
  Description of Artificial Sequence: Synthetic oligonucleotide
auagagagagcguccuuug

SEQ ID NO: 369445 - RNA, 19 nt, Artificial Sequence
  Description of Artificial Sequence: Synthetic oligonucleotide
gaaugugccgaguaccaga

SEQ ID NO: 369446 - RNA, 19 nt, Artificial Sequence
  Description of Artificial Sequence: Synthetic oligonucleotide
gagggugcguauuuggcac

SEQ ID NO: 369447 - RNA, 19 nt, Artificial Sequence
  Description of Artificial Sequence: Synthetic oligonucleotide
uguugucuacaauccauuc

SEQ ID NO: 369448 - RNA, 19 nt, Artificial Sequence
  Description of Artificial Sequence: Synthetic oligonucleotide
uagaauaugccgugcuccu

SEQ ID NO: 369449 - RNA, 19 nt, Artificial Sequence
  Description of Artificial Sequence: Synthetic oligonucleotide
cuggugcacaguauggaag

SEQ ID NO: 369450 - RNA, 19 nt, Artificial Sequence
  Description of Artificial Sequence: Synthetic oligonucleotide
acauuuagcacuugacguu

SEQ ID NO: 369451 - RNA, 19 nt, Artificial Sequence
  Description of Artificial Sequence: Synthetic oligonucleotide
auagucgcacugugaaauc

SEQ ID NO: 369452 - RNA, 19 nt, Artificial Sequence
  Description of Artificial Sequence: Synthetic oligonucleotide
agcauuccgucagaggugg

SEQ ID NO: 369453 - RNA, 19 nt, Artificial Sequence
  Description of Artificial Sequence: Synthetic oligonucleotide
uucuagguuuguuugcauc

SEQ ID NO: 369454 - RNA, 19 nt, Artificial Sequence
  Description of Artificial Sequence: Synthetic oligonucleotide
gaacugaccaaguugcugu

SEQ ID NO: 369455 - RNA, 19 nt, Artificial Sequence
  Description of Artificial Sequence: Synthetic oligonucleotide
cagacacugccagagaacc

SEQ ID NO: 369456 - RNA, 19 nt, Artificial Sequence
  Description of Artificial Sequence: Synthetic oligonucleotide
gaaugugauccgaaccucc

SEQ ID NO: 369457 - RNA, 19 nt, Artificial Sequence
  Description of Artificial Sequence: Synthetic oligonucleotide
agaccaguagguuaucuuu

SEQ ID NO: 369458 - RNA, 19 nt, Artificial Sequence
  Description of Artificial Sequence: Synthetic oligonucleotide
acggcaagcuucaagguag

SEQ ID NO: 369459 - RNA, 19 nt, Artificial Sequence
  Description of Artificial Sequence: Synthetic oligonucleotide
uacuggggacccauuagga

SEQ ID NO: 369460 - RNA, 19 nt, Artificial Sequence
  Description of Artificial Sequence: Synthetic oligonucleotide
uucaaagucccgucccggc

SEQ ID NO: 369461 - RNA, 19 nt, Artificial Sequence
  Description of Artificial Sequence: Synthetic oligonucleotide
ugugaaauccucggaggca

SEQ ID NO: 369462 - RNA, 19 nt, Artificial Sequence
  Description of Artificial Sequence: Synthetic oligonucleotide
gacuuugaguccaucugcc

SEQ ID NO: 369463 - RNA, 19 nt, Artificial Sequence
  Description of Artificial Sequence: Synthetic oligonucleotide
uacccaacagccaccuggc

SEQ ID NO: 369464 - RNA, 19 nt, Artificial Sequence
  Description of Artificial Sequence: Synthetic oligonucleotide
ugccacauuuagcacuuga

SEQ ID NO: 369465 - RNA, 19 nt, Artificial Sequence
  Description of Artificial Sequence: Synthetic oligonucleotide
cauuuagcacuugacguug

SEQ ID NO: 369466 - RNA, 19 nt, Artificial Sequence
  Description of Artificial Sequence: Synthetic oligonucleotide
ugcaggaaucugaaucaga

SEQ ID NO: 369467 - RNA, 19 nt, Artificial Sequence
  Description of Artificial Sequence: Synthetic oligonucleotide
agaacgaaugugccgagua

SEQ ID NO: 369468 - RNA, 19 nt, Artificial Sequence
  Description of Artificial Sequence: Synthetic oligonucleotide
ucaccaaaacgcugggacu

SEQ ID NO: 369469 - RNA, 19 nt, Artificial Sequence
  Description of Artificial Sequence: Synthetic oligonucleotide
acaacagggaaagucuucu

SEQ ID NO: 369470 - RNA, 19 nt, Artificial Sequence
  Description of Artificial Sequence: Synthetic oligonucleotide
acguugacccuuccaacag

SEQ ID NO: 369471 - RNA, 19 nt, Artificial Sequence
  Description of Artificial Sequence: Synthetic oligonucleotide
cccgcaguggccaaaaugc

SEQ ID NO: 369472 - RNA, 19 nt, Artificial Sequence
  Description of Artificial Sequence: Synthetic oligonucleotide
augugauccgaaccuccgg

SEQ ID NO: 369473 - RNA, 19 nt, Artificial Sequence
  Description of Artificial Sequence: Synthetic oligonucleotide
auuccgucagagguggcac

SEQ ID NO: 369474 - RNA, 19 nt, Artificial Sequence
  Description of Artificial Sequence: Synthetic oligonucleotide
agcacaacagggaaagucu

SEQ ID NO: 369475 - RNA, 19 nt, Artificial Sequence
  Description of Artificial Sequence: Synthetic oligonucleotide
gagagagcguccuuugauc

SEQ ID NO: 369476 - RNA, 19 nt, Artificial Sequence
  Description of Artificial Sequence: Synthetic oligonucleotide
agagagagcguccuuugau

SEQ ID NO: 369477 - RNA, 19 nt, Artificial Sequence
  Description of Artificial Sequence: Synthetic oligonucleotide
ggagacugaguuuuaggug

SEQ ID NO: 369478 - RNA, 19 nt, Artificial Sequence
  Description of Artificial Sequence: Synthetic oligonucleotide
cuccccaagcuucauuugc

SEQ ID NO: 369479 - RNA, 19 nt, Artificial Sequence
  Description of Artificial Sequence: Synthetic oligonucleotide
uccuaguuccuugaugacu

SEQ ID NO: 369480 - RNA, 19 nt, Artificial Sequence
  Description of Artificial Sequence: Synthetic oligonucleotide
acugagcccaagugaaucu

SEQ ID NO: 369481 - RNA, 19 nt, Artificial Sequence
  Description of Artificial Sequence: Synthetic oligonucleotide
uccagucacggugacagga

SEQ ID NO: 369482 - RNA, 19 nt, Artificial Sequence
  Description of Artificial Sequence: Synthetic oligonucleotide
cuugaugacuuugagucca

SEQ ID NO: 369483 - RNA, 19 nt, Artificial Sequence
  Description of Artificial Sequence: Synthetic oligonucleotide
gcguauuuggcacaccaag

SEQ ID NO: 369484 - RNA, 19 nt, Artificial Sequence
  Description of Artificial Sequence: Synthetic oligonucleotide
caguccaaccgucacugcc

SEQ ID NO: 369485 - RNA, 19 nt, Artificial Sequence
  Description of Artificial Sequence: Synthetic oligonucleotide
aaauccucggaggcagaag

SEQ ID NO: 369486 - RNA, 19 nt, Artificial Sequence
  Description of Artificial Sequence: Synthetic oligonucleotide
ucacgucacugacacggcc

SEQ ID NO: 369487 - RNA, 19 nt, Artificial Sequence
  Description of Artificial Sequence: Synthetic oligonucleotide
uuuguggcuccauccaguc

SEQ ID NO: 369488 - RNA, 19 nt, Artificial Sequence
  Description of Artificial Sequence: Synthetic oligonucleotide
aacucgcuucaugugaaga

SEQ ID NO: 369489 - RNA, 19 nt, Artificial Sequence
  Description of Artificial Sequence: Synthetic oligonucleotide
agguagaauaugccgugcu

SEQ ID NO: 369490 - RNA, 19 nt, Artificial Sequence
  Description of Artificial Sequence: Synthetic oligonucleotide
cagacuagugcggacacug

SEQ ID NO: 369491 - RNA, 19 nt, Artificial Sequence
  Description of Artificial Sequence: Synthetic oligonucleotide
cacagcauuccgucagagg

SEQ ID NO: 369492 - RNA, 19 nt, Artificial Sequence
  Description of Artificial Sequence: Synthetic oligonucleotide
ggaaguagccaguccaagc

SEQ ID NO: 369493 - RNA, 19 nt, Artificial Sequence
  Description of Artificial Sequence: Synthetic oligonucleotide
gaccaguagguuaucuuug

SEQ ID NO: 369494 - RNA, 19 nt, Artificial Sequence
  Description of Artificial Sequence: Synthetic oligonucleotide
gaaauguuguagaucuuaa

SEQ ID NO: 369495 - RNA, 19 nt, Artificial Sequence
  Description of Artificial Sequence: Synthetic oligonucleotide
guuaucuuugguccacgca

SEQ ID NO: 369496 - RNA, 19 nt, Artificial Sequence
  Description of Artificial Sequence: Synthetic oligonucleotide
uagucgcacugugaaaucc

SEQ ID NO: 369497 - RNA, 19 nt, Artificial Sequence
  Description of Artificial Sequence: Synthetic oligonucleotide
uccugaguacugcauuuuc

SEQ ID NO: 369498 - RNA, 19 nt, Artificial Sequence
  Description of Artificial Sequence: Synthetic oligonucleotide
uuugaucauccagccacgc

SEQ ID NO: 369499 - RNA, 19 nt, Artificial Sequence
  Description of Artificial Sequence: Synthetic oligonucleotide
gccuuuaaaugucuaggcc

SEQ ID NO: 369500 - RNA, 19 nt, Artificial Sequence
  Description of Artificial Sequence: Synthetic oligonucleotide
ugccgaguaccagaucacg

SEQ ID NO: 369501 - RNA, 19 nt, Artificial Sequence
  Description of Artificial Sequence: Synthetic oligonucleotide
aaugugccgaguaccagau

SEQ ID NO: 369502 - RNA, 19 nt, Artificial Sequence
  Description of Artificial Sequence: Synthetic oligonucleotide
guuccacgcagcucacugg

SEQ ID NO: 369503 - RNA, 19 nt, Artificial Sequence
  Description of Artificial Sequence: Synthetic oligonucleotide
uuagcacuugacguugagu

SEQ ID NO: 369504 - RNA, 19 nt, Artificial Sequence
  Description of Artificial Sequence: Synthetic oligonucleotide
aguaccagaucacgucacu

SEQ ID NO: 369505 - RNA, 19 nt, Artificial Sequence
  Description of Artificial Sequence: Synthetic oligonucleotide
agggagugaaucagaagag

SEQ ID NO: 369506 - RNA, 19 nt, Artificial Sequence
  Description of Artificial Sequence: Synthetic oligonucleotide
gaggaaagaggccagccgu

SEQ ID NO: 369507 - RNA, 19 nt, Artificial Sequence
  Description of Artificial Sequence: Synthetic oligonucleotide
ugggcgggacuccaggaca

SEQ ID NO: 369508 - RNA, 19 nt, Artificial Sequence
  Description of Artificial Sequence: Synthetic oligonucleotide
cacguucucuuucauuaug

SEQ ID NO: 369509 - RNA, 19 nt, Artificial Sequence
  Description of Artificial Sequence: Synthetic oligonucleotide
aaagucccgucccggcuca

SEQ ID NO: 369510 - RNA, 19 nt, Artificial Sequence
  Description of Artificial Sequence: Synthetic oligonucleotide
acggacagaggcucccggg

SEQ ID NO: 369511 - RNA, 19 nt, Artificial Sequence
  Description of Artificial Sequence: Synthetic oligonucleotide
cuagugcggacacugccac

SEQ ID NO: 369512 - RNA, 19 nt, Artificial Sequence
  Description of Artificial Sequence: Synthetic oligonucleotide
cagagugcacagauggauc

SEQ ID NO: 369513 - RNA, 19 nt, Artificial Sequence
  Description of Artificial Sequence: Synthetic oligonucleotide
gucacggugacaggaagug

SEQ ID NO: 369514 - RNA, 19 nt, Artificial Sequence
  Description of Artificial Sequence: Synthetic oligonucleotide
uggcagaacucgcuucaug

SEQ ID NO: 369515 - RNA, 19 nt, Artificial Sequence
  Description of Artificial Sequence: Synthetic oligonucleotide
cuuagguauuugccagagc

SEQ ID NO: 369516 - RNA, 19 nt, Artificial Sequence
  Description of Artificial Sequence: Synthetic oligonucleotide
gacccauuaggauucuuua

SEQ ID NO: 369517 - RNA, 19 nt, Artificial Sequence
  Description of Artificial Sequence: Synthetic oligonucleotide
ugagccagacuagugcgga

SEQ ID NO: 369518 - RNA, 19 nt, Artificial Sequence
  Description of Artificial Sequence: Synthetic oligonucleotide
ugaguacugcauuuucauu

SEQ ID NO: 369519 - RNA, 19 nt, Artificial Sequence
  Description of Artificial Sequence: Synthetic oligonucleotide
cagaacucgcuucauguga

SEQ ID NO: 369520 - RNA, 19 nt, Artificial Sequence
  Description of Artificial Sequence: Synthetic oligonucleotide
gaacucgcuucaugugaag

SEQ ID NO: 369521 - RNA, 19 nt, Artificial Sequence
  Description of Artificial Sequence: Synthetic oligonucleotide
ugcguauuuggcacaccaa

SEQ ID NO: 369522 - RNA, 19 nt, Artificial Sequence
  Description of Artificial Sequence: Synthetic oligonucleotide
gcacuucuagguuuguuug

SEQ ID NO: 369523 - RNA, 19 nt, Artificial Sequence
  Description of Artificial Sequence: Synthetic oligonucleotide
uuugguccacgcacagcca

SEQ ID NO: 369524 - RNA, 19 nt, Artificial Sequence
  Description of Artificial Sequence: Synthetic oligonucleotide
guagguuaucuuuggucca

SEQ ID NO: 369525 - RNA, 19 nt, Artificial Sequence
  Description of Artificial Sequence: Synthetic oligonucleotide
gugcguauuuggcacacca

SEQ ID NO: 369526 - RNA, 19 nt, Artificial Sequence
  Description of Artificial Sequence: Synthetic oligonucleotide
guaguaauuccacguucuc

SEQ ID NO: 369527 - RNA, 19 nt, Artificial Sequence
  Description of Artificial Sequence: Synthetic oligonucleotide
cguccuuugaucauccagc

SEQ ID NO: 369528 - RNA, 19 nt, Artificial Sequence
  Description of Artificial Sequence: Synthetic oligonucleotide
uagguuaucuuugguccac

SEQ ID NO: 369529 - RNA, 19 nt, Artificial Sequence
  Description of Artificial Sequence: Synthetic oligonucleotide
ugcuacuggggacccauua

SEQ ID NO: 369530 - RNA, 19 nt, Artificial Sequence
  Description of Artificial Sequence: Synthetic oligonucleotide
gguuccacgcagcucacug

SEQ ID NO: 369531 - RNA, 19 nt, Artificial Sequence
  Description of Artificial Sequence: Synthetic oligonucleotide
gauuccgaucccugcccgc

SEQ ID NO: 369532 - RNA, 19 nt, Artificial Sequence
  Description of Artificial Sequence: Synthetic oligonucleotide
acacaccgggcccucaugu

SEQ ID NO: 369533 - RNA, 19 nt, Artificial Sequence
  Description of Artificial Sequence: Synthetic oligonucleotide
aagaacgaaugugccgagu

SEQ ID NO: 369534 - RNA, 19 nt, Artificial Sequence
  Description of Artificial Sequence: Synthetic oligonucleotide
gacguugagucuccuggga

SEQ ID NO: 369535 - RNA, 19 nt, Artificial Sequence
  Description of Artificial Sequence: Synthetic oligonucleotide
ugaaauccucggaggcaga

SEQ ID NO: 369536 - RNA, 19 nt, Artificial Sequence
  Description of Artificial Sequence: Synthetic oligonucleotide
aggaagcacauggagggcu

SEQ ID NO: 369537 - RNA, 19 nt, Artificial Sequence
  Description of Artificial Sequence: Synthetic oligonucleotide
ccaccaucuggguugagag

SEQ ID NO: 369538 - RNA, 19 nt, Artificial Sequence
  Description of Artificial Sequence: Synthetic oligonucleotide
agacuagugcggacacugc

SEQ ID NO: 369539 - RNA, 19 nt, Artificial Sequence
  Description of Artificial Sequence: Synthetic oligonucleotide
cagcauuccgucagaggug

SEQ ID NO: 369540 - RNA, 19 nt, Artificial Sequence
  Description of Artificial Sequence: Synthetic oligonucleotide
cugaaugccagaguacgga

SEQ ID NO: 369541 - RNA, 19 nt, Artificial Sequence
  Description of Artificial Sequence: Synthetic oligonucleotide
ugagcccaagugaaucuuu

SEQ ID NO: 369542 - RNA, 19 nt, Artificial Sequence
  Description of Artificial Sequence: Synthetic oligonucleotide
acuagugcggacacugcca

SEQ ID NO: 369543 - RNA, 19 nt, Artificial Sequence
  Description of Artificial Sequence: Synthetic oligonucleotide
auggaagaaugugauccga

SEQ ID NO: 369544 - RNA, 19 nt, Artificial Sequence
  Description of Artificial Sequence: Synthetic oligonucleotide
gcuacuggggacccauuag

SEQ ID NO: 369545 - RNA, 19 nt, Artificial Sequence
  Description of Artificial Sequence: Synthetic oligonucleotide
aucacgucacugacacggc

SEQ ID NO: 369546 - RNA, 19 nt, Artificial Sequence
  Description of Artificial Sequence: Synthetic oligonucleotide
agagucgggccccagccaa

SEQ ID NO: 369547 - RNA, 19 nt, Artificial Sequence
  Description of Artificial Sequence: Synthetic oligonucleotide
gguagaauaugccgugcuc

SEQ ID NO: 369548 - RNA, 19 nt, Artificial Sequence
  Description of Artificial Sequence: Synthetic oligonucleotide
caccaucuggguugagagc

SEQ ID NO: 369549 - RNA, 19 nt, Artificial Sequence
  Description of Artificial Sequence: Synthetic oligonucleotide
gauccgaaccuccggcaga

SEQ ID NO: 369550 - RNA, 19 nt, Artificial Sequence
  Description of Artificial Sequence: Synthetic oligonucleotide
gaccaaguugcuguccuga

SEQ ID NO: 369551 - RNA, 19 nt, Artificial Sequence
  Description of Artificial Sequence: Synthetic oligonucleotide
cagagagugcaggcgacag

SEQ ID NO: 369552 - RNA, 19 nt, Artificial Sequence
  Description of Artificial Sequence: Synthetic oligonucleotide
gcguccuuugaucauccag

SEQ ID NO: 369553 - RNA, 19 nt, Artificial Sequence
  Description of Artificial Sequence: Synthetic oligonucleotide
agagagugcaggcgacaga

SEQ ID NO: 369554 - RNA, 19 nt, Artificial Sequence
  Description of Artificial Sequence: Synthetic oligonucleotide
gaguaccagaucacgucac

SEQ ID NO: 369555 - RNA, 19 nt, Artificial Sequence
  Description of Artificial Sequence: Synthetic oligonucleotide
gaccugucaagacucccaa

SEQ ID NO: 369556 - RNA, 19 nt, Artificial Sequence
  Description of Artificial Sequence: Synthetic oligonucleotide
acaucggaacaaacccaac

SEQ ID NO: 369557 - RNA, 19 nt, Artificial Sequence
  Description of Artificial Sequence: Synthetic oligonucleotide
uuucuggacguugacccuu

SEQ ID NO: 369558 - RNA, 19 nt, Artificial Sequence
  Description of Artificial Sequence: Synthetic oligonucleotide
acgaaugugccgaguacca

SEQ ID NO: 369559 - RNA, 19 nt, Artificial Sequence
  Description of Artificial Sequence: Synthetic oligonucleotide
uuccgaucccugcccgcag

SEQ ID NO: 369560 - RNA, 19 nt, Artificial Sequence
  Description of Artificial Sequence: Synthetic oligonucleotide
cugauggguccugugugag

SEQ ID NO: 369561 - RNA, 19 nt, Artificial Sequence
  Description of Artificial Sequence: Synthetic oligonucleotide
cauagucgcacugugaaau

SEQ ID NO: 369562 - RNA, 19 nt, Artificial Sequence
  Description of Artificial Sequence: Synthetic oligonucleotide
ucuggacguugacccuucc

SEQ ID NO: 369563 - RNA, 19 nt, Artificial Sequence
  Description of Artificial Sequence: Synthetic oligonucleotide
gggaauagagagagcgucc

SEQ ID NO: 369564 - RNA, 19 nt, Artificial Sequence
  Description of Artificial Sequence: Synthetic oligonucleotide
agaacucgcuucaugugaa

SEQ ID NO: 369565 - RNA, 19 nt, Artificial Sequence
  Description of Artificial Sequence: Synthetic oligonucleotide
caguauggaagaaugugau

SEQ ID NO: 369566 - RNA, 19 nt, Artificial Sequence
  Description of Artificial Sequence: Synthetic oligonucleotide
gugucgggacaacagccac

SEQ ID NO: 369567 - RNA, 19 nt, Artificial Sequence
  Description of Artificial Sequence: Synthetic oligonucleotide
uuccgucagagguggcaca

SEQ ID NO: 369568 - RNA, 19 nt, Artificial Sequence
  Description of Artificial Sequence: Synthetic oligonucleotide
guacacccaggcuucaucu

SEQ ID NO: 369569 - RNA, 19 nt, Artificial Sequence
  Description of Artificial Sequence: Synthetic oligonucleotide
ggaccauagucgcacugug

SEQ ID NO: 369570 - RNA, 19 nt, Artificial Sequence
  Description of Artificial Sequence: Synthetic oligonucleotide
agccagacuagugcggaca

SEQ ID NO: 369571 - RNA, 19 nt, Artificial Sequence
  Description of Artificial Sequence: Synthetic oligonucleotide
cugaguacugcauuuucau

SEQ ID NO: 369572 - RNA, 19 nt, Artificial Sequence
  Description of Artificial Sequence: Synthetic oligonucleotide
ggagggugcguauuuggca

SEQ ID NO: 369573 - RNA, 19 nt, Artificial Sequence
  Description of Artificial Sequence: Synthetic oligonucleotide
cacacuuucaaagucccgu

SEQ ID NO: 369574 - RNA, 19 nt, Artificial Sequence
  Description of Artificial Sequence: Synthetic oligonucleotide
cugaagaaauguuguagau

SEQ ID NO: 369575 - RNA, 19 nt, Artificial Sequence
  Description of Artificial Sequence: Synthetic oligonucleotide
ggcagaacucgcuucaugu

SEQ ID NO: 369576 - RNA, 19 nt, Artificial Sequence
  Description of Artificial Sequence: Synthetic oligonucleotide
gaaccuccggcagaucaca

SEQ ID NO: 369577 - RNA, 19 nt, Artificial Sequence
  Description of Artificial Sequence: Synthetic oligonucleotide
ucccggcucacagauacua

SEQ ID NO: 369578 - RNA, 19 nt, Artificial Sequence
  Description of Artificial Sequence: Synthetic oligonucleotide
auuccgaucccugcccgca

SEQ ID NO: 369579 - RNA, 19 nt, Artificial Sequence
  Description of Artificial Sequence: Synthetic oligonucleotide
gaaauccucggaggcagaa

SEQ ID NO: 369580 - RNA, 19 nt, Artificial Sequence
  Description of Artificial Sequence: Synthetic oligonucleotide
ggcuccuaguuccuugaug

SEQ ID NO: 369581 - RNA, 19 nt, Artificial Sequence
  Description of Artificial Sequence: Synthetic oligonucleotide
ccguguagccucuugccag

SEQ ID NO: 369582 - RNA, 19 nt, Artificial Sequence
  Description of Artificial Sequence: Synthetic oligonucleotide
gugauccgaaccuccggca

SEQ ID NO: 369583 - RNA, 19 nt, Artificial Sequence
  Description of Artificial Sequence: Synthetic oligonucleotide
augugccgaguaccagauc

SEQ ID NO: 369584 - RNA, 19 nt, Artificial Sequence
  Description of Artificial Sequence: Synthetic oligonucleotide
uccgaucccugcccgcagu

SEQ ID NO: 369585 - RNA, 19 nt, Artificial Sequence
  Description of Artificial Sequence: Synthetic oligonucleotide
ccugagugauugcuacugg

SEQ ID NO: 369586 - RNA, 19 nt, Artificial Sequence
  Description of Artificial Sequence: Synthetic oligonucleotide
ugacacggccuggagccug

SEQ ID NO: 369587 - RNA, 19 nt, Artificial Sequence
  Description of Artificial Sequence: Synthetic oligonucleotide
aagaaauguuguagaucuu

SEQ ID NO: 369588 - RNA, 19 nt, Artificial Sequence
  Description of Artificial Sequence: Synthetic oligonucleotide
acacucagccaagcuccac

SEQ ID NO: 369589 - RNA, 19 nt, Artificial Sequence
  Description of Artificial Sequence: Synthetic oligonucleotide
aaccuccggcagaucacag

SEQ ID NO: 369590 - RNA, 19 nt, Artificial Sequence
  Description of Artificial Sequence: Synthetic oligonucleotide
agggugcguauuuggcaca

SEQ ID NO: 369591 - RNA, 19 nt, Artificial Sequence
  Description of Artificial Sequence: Synthetic oligonucleotide
ccgaguaccagaucacguc

SEQ ID NO: 369592 - RNA, 19 nt, Artificial Sequence
  Description of Artificial Sequence: Synthetic oligonucleotide
cauguccccggaguucagc

SEQ ID NO: 369593 - RNA, 19 nt, Artificial Sequence
  Description of Artificial Sequence: Synthetic oligonucleotide
ucgaagcagucaccagcaa

SEQ ID NO: 369594 - RNA, 19 nt, Artificial Sequence
  Description of Artificial Sequence: Synthetic oligonucleotide
cuggcugauggguccugug

SEQ ID NO: 369595 - RNA, 19 nt, Artificial Sequence
  Description of Artificial Sequence: Synthetic oligonucleotide
cauuccgucagagguggca

SEQ ID NO: 369596 - RNA, 19 nt, Artificial Sequence
  Description of Artificial Sequence: Synthetic oligonucleotide
gaguacggacagaggcucc

SEQ ID NO: 369597 - RNA, 19 nt, Artificial Sequence
  Description of Artificial Sequence: Synthetic oligonucleotide
ccgucuauccugccuacag

SEQ ID NO: 369598 - RNA, 19 nt, Artificial Sequence
  Description of Artificial Sequence: Synthetic oligonucleotide
auuuagcacuugacguuga

SEQ ID NO: 369599 - RNA, 19 nt, Artificial Sequence
  Description of Artificial Sequence: Synthetic oligonucleotide
cagaguacggacagaggcu

SEQ ID NO: 369600 - RNA, 19 nt, Artificial Sequence
  Description of Artificial Sequence: Synthetic oligonucleotide
ugucccuggagggugcgua

SEQ ID NO: 369601 - RNA, 19 nt, Artificial Sequence
  Description of Artificial Sequence: Synthetic oligonucleotide
uccccggaguucagcacaa

SEQ ID NO: 369602 - RNA, 19 nt, Artificial Sequence
  Description of Artificial Sequence: Synthetic oligonucleotide
gcuguuaucugaggucagc

SEQ ID NO: 369603 - RNA, 19 nt, Artificial Sequence
  Description of Artificial Sequence: Synthetic oligonucleotide
ccugaguacugcauuuuca

SEQ ID NO: 369604 - RNA, 19 nt, Artificial Sequence
  Description of Artificial Sequence: Synthetic oligonucleotide
gagccagacuagugcggac

SEQ ID NO: 369605 - RNA, 19 nt, Artificial Sequence
  Description of Artificial Sequence: Synthetic oligonucleotide
agcaacacaccgggcccuc

SEQ ID NO: 369606 - RNA, 19 nt, Artificial Sequence
  Description of Artificial Sequence: Synthetic oligonucleotide
agcuguuaucugaggucag

SEQ ID NO: 369607 - RNA, 19 nt, Artificial Sequence
  Description of Artificial Sequence: Synthetic oligonucleotide
cacggcaagcuucaaggua

SEQ ID NO: 369608 - RNA, 19 nt, Artificial Sequence
  Description of Artificial Sequence: Synthetic oligonucleotide
gcccgcaguggccaaaaug

SEQ ID NO: 369609 - RNA, 19 nt, Artificial Sequence
  Description of Artificial Sequence: Synthetic oligonucleotide
aggagaccaguagguuauc

SEQ ID NO: 369610 - RNA, 19 nt, Artificial Sequence
  Description of Artificial Sequence: Synthetic oligonucleotide
cugccuacagccacagacu

SEQ ID NO: 369611 - RNA, 19 nt, Artificial Sequence
  Description of Artificial Sequence: Synthetic oligonucleotide
cgucccggcucacagauac

SEQ ID NO: 369612 - RNA, 19 nt, Artificial Sequence
  Description of Artificial Sequence: Synthetic oligonucleotide
cacaccgggcccucauguc

SEQ ID NO: 369613 - RNA, 19 nt, Artificial Sequence
  Description of Artificial Sequence: Synthetic oligonucleotide
cuggacguugacccuucca

SEQ ID NO: 369614 - RNA, 19 nt, Artificial Sequence
  Description of Artificial Sequence: Synthetic oligonucleotide
auccgaaccuccggcagau

SEQ ID NO: 369615 - RNA, 19 nt, Artificial Sequence
  Description of Artificial Sequence: Synthetic oligonucleotide
agaggggaugccacaacuu

SEQ ID NO: 369616 - RNA, 19 nt, Artificial Sequence
  Description of Artificial Sequence: Synthetic oligonucleotide
agcguccuuugaucaucca

SEQ ID NO: 369617 - RNA, 19 nt, Artificial Sequence
  Description of Artificial Sequence: Synthetic oligonucleotide
ccuucgaagcagucaccag

SEQ ID NO: 369618 - RNA, 19 nt, Artificial Sequence
  Description of Artificial Sequence: Synthetic oligonucleotide
cguguagccucuugccagg

SEQ ID NO: 369619 - RNA, 19 nt, Artificial Sequence
  Description of Artificial Sequence: Synthetic oligonucleotide
cagauacuauaugcuccuc

SEQ ID NO: 369620 - RNA, 19 nt, Artificial Sequence
  Description of Artificial Sequence: Synthetic oligonucleotide
cucgcuucaugugaagacu

SEQ ID NO: 369621 - RNA, 19 nt, Artificial Sequence
  Description of Artificial Sequence: Synthetic oligonucleotide
gcauacugggucucuccca

SEQ ID NO: 369622 - RNA, 19 nt, Artificial Sequence
  Description of Artificial Sequence: Synthetic oligonucleotide
gccagacuagugcggacac

SEQ ID NO: 369623 - RNA, 19 nt, Artificial Sequence
  Description of Artificial Sequence: Synthetic oligonucleotide
ggaauagagagagcguccu

SEQ ID NO: 369624 - RNA, 19 nt, Artificial Sequence
  Description of Artificial Sequence: Synthetic oligonucleotide
uccaaccgucacugccaga

SEQ ID NO: 369625 - RNA, 19 nt, Artificial Sequence
  Description of Artificial Sequence: Synthetic oligonucleotide
cucuauccuucgaagcagu

SEQ ID NO: 369626 - RNA, 19 nt, Artificial Sequence
  Description of Artificial Sequence: Synthetic oligonucleotide
gacucagguuuggccugag

SEQ ID NO: 369627 - RNA, 19 nt, Artificial Sequence
  Description of Artificial Sequence: Synthetic oligonucleotide
ggacugagccagacuagug

SEQ ID NO: 369628 - RNA, 19 nt, Artificial Sequence
  Description of Artificial Sequence: Synthetic oligonucleotide
cuaggcccugaccagcucu

SEQ ID NO: 369629 - RNA, 19 nt, Artificial Sequence
  Description of Artificial Sequence: Synthetic oligonucleotide
ggugucgggacaacagcca

SEQ ID NO: 369630 - RNA, 19 nt, Artificial Sequence
  Description of Artificial Sequence: Synthetic oligonucleotide
gaauagagagagcguccuu

SEQ ID NO: 369631 - RNA, 19 nt, Artificial Sequence
  Description of Artificial Sequence: Synthetic oligonucleotide
gccagaguacggacagagg

SEQ ID NO: 369632 - RNA, 19 nt, Artificial Sequence
  Description of Artificial Sequence: Synthetic oligonucleotide
aagucccgucccggcucac

SEQ ID NO: 369633 - RNA, 19 nt, Artificial Sequence
  Description of Artificial Sequence: Synthetic oligonucleotide
cacucgcugacauuuucau

SEQ ID NO: 369634 - RNA, 19 nt, Artificial Sequence
  Description of Artificial Sequence: Synthetic oligonucleotide
gccguguagccucuugcca

SEQ ID NO: 369635 - RNA, 19 nt, Artificial Sequence
  Description of Artificial Sequence: Synthetic oligonucleotide
gauugcuacuggggaccca

SEQ ID NO: 369636 - RNA, 19 nt, Artificial Sequence
  Description of Artificial Sequence: Synthetic oligonucleotide
caucagggcugaaguuaca

SEQ ID NO: 369637 - RNA, 19 nt, Artificial Sequence
  Description of Artificial Sequence: Synthetic oligonucleotide
ccgaaccuccggcagauca

SEQ ID NO: 369638 - RNA, 19 nt, Artificial Sequence
  Description of Artificial Sequence: Synthetic oligonucleotide
gccacucgcugacauuuuc

SEQ ID NO: 369639 - RNA, 19 nt, Artificial Sequence
  Description of Artificial Sequence: Synthetic oligonucleotide
agagcuguacagagcuguu

SEQ ID NO: 369640 - RNA, 19 nt, Artificial Sequence
  Description of Artificial Sequence: Synthetic oligonucleotide
cagagguggcacacagaaa

SEQ ID NO: 369641 - RNA, 19 nt, Artificial Sequence
  Description of Artificial Sequence: Synthetic oligonucleotide
cgaguaccagaucacguca

SEQ ID NO: 369642 - RNA, 19 nt, Artificial Sequence
  Description of Artificial Sequence: Synthetic oligonucleotide
aggaagugagggagugaau

SEQ ID NO: 369643 - RNA, 19 nt, Artificial Sequence
  Description of Artificial Sequence: Synthetic oligonucleotide
cugguccaucacaucggaa

SEQ ID NO: 369644 - RNA, 19 nt, Artificial Sequence
  Description of Artificial Sequence: Synthetic oligonucleotide
ccacucgcugacauuuuca

SEQ ID NO: 369645 - RNA, 19 nt, Artificial Sequence
  Description of Artificial Sequence: Synthetic oligonucleotide
ccacgcacagccagugauc

SEQ ID NO: 369646 - RNA, 19 nt, Artificial Sequence
  Description of Artificial Sequence: Synthetic oligonucleotide
gcugugacugagcccaagu

SEQ ID NO: 369647 - RNA, 19 nt, Artificial Sequence
  Description of Artificial Sequence: Synthetic oligonucleotide
cgaaccuccggcagaucac

SEQ ID NO: 369648 - RNA, 19 nt, Artificial Sequence
  Description of Artificial Sequence: Synthetic oligonucleotide
gguacccaacagccaccug

SEQ ID NO: 369649 - RNA, 19 nt, Artificial Sequence
  Description of Artificial Sequence: Synthetic oligonucleotide
cccggaguucagcacaaca

SEQ ID NO: 369650 - RNA, 19 nt, Artificial Sequence
  Description of Artificial Sequence: Synthetic oligonucleotide
gguggcacacagaaaugcu

SEQ ID NO: 369651 - RNA, 19 nt, Artificial Sequence
  Description of Artificial Sequence: Synthetic oligonucleotide
guccacgcacagccaguga

SEQ ID NO: 369652 - RNA, 19 nt, Artificial Sequence
  Description of Artificial Sequence: Synthetic oligonucleotide
cagguuuggccugagugau

SEQ ID NO: 369653 - RNA, 19 nt, Artificial Sequence
  Description of Artificial Sequence: Synthetic oligonucleotide
gccaccaucuggguugaga

SEQ ID NO: 369654 - RNA, 19 nt, Artificial Sequence
  Description of Artificial Sequence: Synthetic oligonucleotide
ugcccgcaguggccaaaau

SEQ ID NO: 369655 - RNA, 19 nt, Artificial Sequence
  Description of Artificial Sequence: Synthetic oligonucleotide
gggugcguauuuggcacac

SEQ ID NO: 369656 - RNA, 19 nt, Artificial Sequence
  Description of Artificial Sequence: Synthetic oligonucleotide
ccaaaacgcugggacugag

SEQ ID NO: 369657 - RNA, 19 nt, Artificial Sequence
  Description of Artificial Sequence: Synthetic oligonucleotide
agguagagucgggccccag

SEQ ID NO: 369658 - RNA, 19 nt, Artificial Sequence
  Description of Artificial Sequence: Synthetic oligonucleotide
gagcccaagugaaucuuuu

SEQ ID NO: 369659 - RNA, 19 nt, Artificial Sequence
  Description of Artificial Sequence: Synthetic oligonucleotide
gcuuccugccauaguauua

SEQ ID NO: 369660 - RNA, 19 nt, Artificial Sequence
  Description of Artificial Sequence: Synthetic oligonucleotide
ccuggagggugcguauuug

SEQ ID NO: 369661 - RNA, 19 nt, Artificial Sequence
  Description of Artificial Sequence: Synthetic oligonucleotide
agaguuccuuggggaagua

SEQ ID NO: 369662 - RNA, 19 nt, Artificial Sequence
  Description of Artificial Sequence: Synthetic oligonucleotide
ggcccugaccagcucucca

SEQ ID NO: 369663 - RNA, 19 nt, Artificial Sequence
  Description of Artificial Sequence: Synthetic oligonucleotide
ggacccauuaggauucuuu

SEQ ID NO: 369664 - RNA, 19 nt, Artificial Sequence
  Description of Artificial Sequence: Synthetic oligonucleotide
cgaaugugccgaguaccag

SEQ ID NO: 369665 - RNA, 19 nt, Artificial Sequence
  Description of Artificial Sequence: Synthetic oligonucleotide
gccacgcaaggauccaucu

SEQ ID NO: 369666 - RNA, 19 nt, Artificial Sequence
  Description of Artificial Sequence: Synthetic oligonucleotide
ccggcucacagauacuaua

SEQ ID NO: 369667 - RNA, 19 nt, Artificial Sequence
  Description of Artificial Sequence: Synthetic oligonucleotide
gggacugagccagacuagu

SEQ ID NO: 369668 - RNA, 19 nt, Artificial Sequence
  Description of Artificial Sequence: Synthetic oligonucleotide
gguauuugccagagcugua

SEQ ID NO: 369669 - RNA, 19 nt, Artificial Sequence
  Description of Artificial Sequence: Synthetic oligonucleotide
gccccgucuauccugccua

SEQ ID NO: 369670 - RNA, 19 nt, Artificial Sequence
  Description of Artificial Sequence: Synthetic oligonucleotide
ggagaccaguagguuaucu

SEQ ID NO: 369671 - RNA, 19 nt, Artificial Sequence
  Description of Artificial Sequence: Synthetic oligonucleotide
uccgaaccuccggcagauc

SEQ ID NO: 369672 - RNA, 19 nt, Artificial Sequence
  Description of Artificial Sequence: Synthetic oligonucleotide
ccuccggcagaucacagau

SEQ ID NO: 369673 - RNA, 19 nt, Artificial Sequence
  Description of Artificial Sequence: Synthetic oligonucleotide
gcucacugguccaucacau

SEQ ID NO: 369674 - RNA, 19 nt, Artificial Sequence
  Description of Artificial Sequence: Synthetic oligonucleotide
ccgaucccugcccgcagug

SEQ ID NO: 369675 - RNA, 19 nt, Artificial Sequence
  Description of Artificial Sequence: Synthetic oligonucleotide
agguuuggccugagugauu

SEQ ID NO: 369676 - RNA, 19 nt, Artificial Sequence
  Description of Artificial Sequence: Synthetic oligonucleotide
gccgaguaccagaucacgu

SEQ ID NO: 369677 - RNA, 19 nt, Artificial Sequence
  Description of Artificial Sequence: Synthetic oligonucleotide
gacacggccuggagccugu

SEQ ID NO: 369678 - RNA, 19 nt, Artificial Sequence
  Description of Artificial Sequence: Synthetic oligonucleotide
ccccgucuauccugccuac

SEQ ID NO: 369679 - RNA, 19 nt, Artificial Sequence
  Description of Artificial Sequence: Synthetic oligonucleotide
caguugccuguggcuacca

SEQ ID NO: 369680 - RNA, 19 nt, Artificial Sequence
  Description of Artificial Sequence: Synthetic oligonucleotide
ccaguagguuaucuuuggu

SEQ ID NO: 369681 - RNA, 19 nt, Artificial Sequence
  Description of Artificial Sequence: Synthetic oligonucleotide
cugcccgcaguggccaaaa

SEQ ID NO: 369682 - RNA, 19 nt, Artificial Sequence
  Description of Artificial Sequence: Synthetic oligonucleotide
caucccagcagaggagauu

SEQ ID NO: 369683 - RNA, 19 nt, Artificial Sequence
  Description of Artificial Sequence: Synthetic oligonucleotide
gccgugcuccuugcuggug

SEQ ID NO: 369684 - RNA, 19 nt, Artificial Sequence
  Description of Artificial Sequence: Synthetic oligonucleotide
gcauuccgucagagguggc

SEQ ID NO: 369685 - RNA, 19 nt, Artificial Sequence
  Description of Artificial Sequence: Synthetic oligonucleotide
ccggcagaucacagaugga

SEQ ID NO: 369686 - RNA, 19 nt, Artificial Sequence
  Description of Artificial Sequence: Synthetic oligonucleotide
gcgggacuccaggacagcu

SEQ ID NO: 369687 - RNA, 19 nt, Artificial Sequence
  Description of Artificial Sequence: Synthetic oligonucleotide
ccgcaguggccaaaaugcu

SEQ ID NO: 369688 - RNA, 19 nt, Artificial Sequence
  Description of Artificial Sequence: Synthetic oligonucleotide
ccacguucucuuucauuau

SEQ ID NO: 369689 - RNA, 19 nt, Artificial Sequence
  Description of Artificial Sequence: Synthetic oligonucleotide
gucccggcucacagauacu

SEQ ID NO: 369690 - RNA, 19 nt, Artificial Sequence
  Description of Artificial Sequence: Synthetic oligonucleotide
ccccggaguucagcacaac

SEQ ID NO: 369691 - RNA, 19 nt, Artificial Sequence
  Description of Artificial Sequence: Synthetic oligonucleotide
ccacgcaaggauccaucuu

SEQ ID NO: 369692 - RNA, 19 nt, Artificial Sequence
  Description of Artificial Sequence: Synthetic oligonucleotide
cucccacggcaagcuucaa

SEQ ID NO: 369693 - RNA, 19 nt, Artificial Sequence
  Description of Artificial Sequence: Synthetic oligonucleotide
ccagacuagugcggacacu

SEQ ID NO: 369694 - RNA, 19 nt, Artificial Sequence
  Description of Artificial Sequence: Synthetic oligonucleotide
cccggggcuccuaguuccu

SEQ ID NO: 369695 - RNA, 19 nt, Artificial Sequence
  Description of Artificial Sequence: Synthetic oligonucleotide
ccgucccggcucacagaua

SEQ ID NO: 369696 - RNA, 19 nt, Artificial Sequence
  Description of Artificial Sequence: Synthetic oligonucleotide
uguagcaacacuuuuaggc

SEQ ID NO: 369697 - RNA, 19 nt, Artificial Sequence
  Description of Artificial Sequence: Synthetic oligonucleotide
aaagaguauaaacaccggg

SEQ ID NO: 369698 - RNA, 19 nt, Artificial Sequence
  Description of Artificial Sequence: Synthetic oligonucleotide
uuaggcauuaaacaguaag

SEQ ID NO: 369699 - RNA, 19 nt, Artificial Sequence
  Description of Artificial Sequence: Synthetic oligonucleotide
ucauaaaucaaacaacgcu

SEQ ID NO: 369700 - RNA, 19 nt, Artificial Sequence
  Description of Artificial Sequence: Synthetic oligonucleotide
aacacuuuuaggcauuucu

SEQ ID NO: 369701 - RNA, 19 nt, Artificial Sequence
  Description of Artificial Sequence: Synthetic oligonucleotide
aauaucauuucuucagcug

SEQ ID NO: 369702 - RNA, 19 nt, Artificial Sequence
  Description of Artificial Sequence: Synthetic oligonucleotide
cugucaauuaaauaggcac

SEQ ID NO: 369703 - RNA, 19 nt, Artificial Sequence
  Description of Artificial Sequence: Synthetic oligonucleotide
ugauuaacagaucaaucca

SEQ ID NO: 369704 - RNA, 19 nt, Artificial Sequence
  Description of Artificial Sequence: Synthetic oligonucleotide
ugacaggccauuauaagag

SEQ ID NO: 369705 - RNA, 19 nt, Artificial Sequence
  Description of Artificial Sequence: Synthetic oligonucleotide
ugucaauuaaauaggcacc

SEQ ID NO: 369706 - RNA, 19 nt, Artificial Sequence
  Description of Artificial Sequence: Synthetic oligonucleotide
agcaccaaggaccuugucc

SEQ ID NO: 369707 - RNA, 19 nt, Artificial Sequence
  Description of Artificial Sequence: Synthetic oligonucleotide
aguauaaauauccccuuag

SEQ ID NO: 369708 - RNA, 19 nt, Artificial Sequence
  Description of Artificial Sequence: Synthetic oligonucleotide
uaggcauuaaacaguaagc

SEQ ID NO: 369709 - RNA, 19 nt, Artificial Sequence
  Description of Artificial Sequence: Synthetic oligonucleotide
gagacgacuggcuugacag

SEQ ID NO: 369710 - RNA, 19 nt, Artificial Sequence
  Description of Artificial Sequence: Synthetic oligonucleotide
uuccuuaaaugauuaacag

SEQ ID NO: 369711 - RNA, 19 nt, Artificial Sequence
  Description of Artificial Sequence: Synthetic oligonucleotide
cauuauaagagccuggcuc

SEQ ID NO: 369712 - RNA, 19 nt, Artificial Sequence
  Description of Artificial Sequence: Synthetic oligonucleotide
guagugauaauguggaggc

SEQ ID NO: 369713 - RNA, 19 nt, Artificial Sequence
  Description of Artificial Sequence: Synthetic oligonucleotide
aguagugauaauguggagg

SEQ ID NO: 369714 - RNA, 19 nt, Artificial Sequence
  Description of Artificial Sequence: Synthetic oligonucleotide
aagcugauaaaauacggau

SEQ ID NO: 369715 - RNA, 19 nt, Artificial Sequence
  Description of Artificial Sequence: Synthetic oligonucleotide
uccccuuagaauuuuagug

SEQ ID NO: 369716 - RNA, 19 nt, Artificial Sequence
  Description of Artificial Sequence: Synthetic oligonucleotide
aaccuuagcagcuccaaug

SEQ ID NO: 369717 - RNA, 19 nt, Artificial Sequence
  Description of Artificial Sequence: Synthetic oligonucleotide
cagaccuuaggaaaggacg

SEQ ID NO: 369718 - RNA, 19 nt, Artificial Sequence
  Description of Artificial Sequence: Synthetic oligonucleotide
ucucaaacacuccagaaau

SEQ ID NO: 369719 - RNA, 19 nt, Artificial Sequence
  Description of Artificial Sequence: Synthetic oligonucleotide
uuaggaaaggacgagguca

SEQ ID NO: 369720 - RNA, 19 nt, Artificial Sequence
  Description of Artificial Sequence: Synthetic oligonucleotide
ucggaaagaacagugaggc

SEQ ID NO: 369721 - RNA, 19 nt, Artificial Sequence
  Description of Artificial Sequence: Synthetic oligonucleotide
auuauaagagccuggcucu

SEQ ID NO: 369722 - RNA, 19 nt, Artificial Sequence
  Description of Artificial Sequence: Synthetic oligonucleotide
ugauuuuauccuuuacaag

SEQ ID NO: 369723 - RNA, 19 nt, Artificial Sequence
  Description of Artificial Sequence: Synthetic oligonucleotide
uauuagugaggugauauug

SEQ ID NO: 369724 - RNA, 19 nt, Artificial Sequence
  Description of Artificial Sequence: Synthetic oligonucleotide
uaaaauacggauaccuaaa

SEQ ID NO: 369725 - RNA, 19 nt, Artificial Sequence
  Description of Artificial Sequence: Synthetic oligonucleotide
gaguauaaacaccgggugg

SEQ ID NO: 369726 - RNA, 19 nt, Artificial Sequence
  Description of Artificial Sequence: Synthetic oligonucleotide
aaaugauuaacagaucaau

SEQ ID NO: 369727 - RNA, 19 nt, Artificial Sequence
  Description of Artificial Sequence: Synthetic oligonucleotide
acagcggccucccugaccc

SEQ ID NO: 369728 - RNA, 19 nt, Artificial Sequence
  Description of Artificial Sequence: Synthetic oligonucleotide
cuaucuacugucaagguca

SEQ ID NO: 369729 - RNA, 19 nt, Artificial Sequence
  Description of Artificial Sequence: Synthetic oligonucleotide
ugcauaguuauacaaggaa

SEQ ID NO: 369730 - RNA, 19 nt, Artificial Sequence
  Description of Artificial Sequence: Synthetic oligonucleotide
aguuauacaaggaaaugag

SEQ ID NO: 369731 - RNA, 19 nt, Artificial Sequence
  Description of Artificial Sequence: Synthetic oligonucleotide
ucaguuauuggcagaggag

SEQ ID NO: 369732 - RNA, 19 nt, Artificial Sequence
  Description of Artificial Sequence: Synthetic oligonucleotide
agaguauaaacaccgggug

SEQ ID NO: 369733 - RNA, 19 nt, Artificial Sequence
  Description of Artificial Sequence: Synthetic oligonucleotide
accaaucaugccuggaggc

SEQ ID NO: 369734 - RNA, 19 nt, Artificial Sequence
  Description of Artificial Sequence: Synthetic oligonucleotide
ugucugaacgcauucauaa

SEQ ID NO: 369735 - RNA, 19 nt, Artificial Sequence
  Description of Artificial Sequence: Synthetic oligonucleotide
ucaaccagugaugagcagg

SEQ ID NO: 369736 - RNA, 19 nt, Artificial Sequence
  Description of Artificial Sequence: Synthetic oligonucleotide
aggucaagagaaaucaacc

SEQ ID NO: 369737 - RNA, 19 nt, Artificial Sequence
  Description of Artificial Sequence: Synthetic oligonucleotide
uauuuacuauuuucagggg

SEQ ID NO: 369738 - RNA, 19 nt, Artificial Sequence
  Description of Artificial Sequence: Synthetic oligonucleotide
uggagaacuugauuaauca

SEQ ID NO: 369739 - RNA, 19 nt, Artificial Sequence
  Description of Artificial Sequence: Synthetic oligonucleotide
uucaguacagguccaaagu

SEQ ID NO: 369740 - RNA, 19 nt, Artificial Sequence
  Description of Artificial Sequence: Synthetic oligonucleotide
gaaggagacauguuugcgc

SEQ ID NO: 369741 - RNA, 19 nt, Artificial Sequence
  Description of Artificial Sequence: Synthetic oligonucleotide
ucugaacgcauucauaaau

SEQ ID NO: 369742 - RNA, 19 nt, Artificial Sequence
  Description of Artificial Sequence: Synthetic oligonucleotide
ucagccgaggucaagagaa

SEQ ID NO: 369743 - RNA, 19 nt, Artificial Sequence
  Description of Artificial Sequence: Synthetic oligonucleotide
uuaaauaggcacccguuuc

SEQ ID NO: 369744 - RNA, 19 nt, Artificial Sequence
  Description of Artificial Sequence: Synthetic oligonucleotide
aguaagcugauaaaauacg

SEQ ID NO: 369745 - RNA, 19 nt, Artificial Sequence
  Description of Artificial Sequence: Synthetic oligonucleotide
caguacacgguacacaugc

SEQ ID NO: 369746 - RNA, 19 nt, Artificial Sequence
  Description of Artificial Sequence: Synthetic oligonucleotide
uccuuaaaugauuaacaga

SEQ ID NO: 369747 - RNA, 19 nt, Artificial Sequence
  Description of Artificial Sequence: Synthetic oligonucleotide
aggauccacacccagaucu

SEQ ID NO: 369748 - RNA, 19 nt, Artificial Sequence
  Description of Artificial Sequence: Synthetic oligonucleotide
aagaguauaaacaccgggu

SEQ ID NO: 369749 - RNA, 19 nt, Artificial Sequence
  Description of Artificial Sequence: Synthetic oligonucleotide
cuaggcaagaaguuuccgg

SEQ ID NO: 369750 - RNA, 19 nt, Artificial Sequence
  Description of Artificial Sequence: Synthetic oligonucleotide
uaaauaggcacccguuuca

SEQ ID NO: 369751 - RNA, 19 nt, Artificial Sequence
  Description of Artificial Sequence: Synthetic oligonucleotide
aaaauacggauaccuaaaa

SEQ ID NO: 369752 - RNA, 19 nt, Artificial Sequence
  Description of Artificial Sequence: Synthetic oligonucleotide
cuagagaaaugaucaaaag

SEQ ID NO: 369753 - RNA, 19 nt, Artificial Sequence
  Description of Artificial Sequence: Synthetic oligonucleotide
ugucaagugaacagagccc

SEQ ID NO: 369754 - RNA, 19 nt, Artificial Sequence
  Description of Artificial Sequence: Synthetic oligonucleotide
agugaggugauauuguaaa

SEQ ID NO: 369755 - RNA, 19 nt, Artificial Sequence
  Description of Artificial Sequence: Synthetic oligonucleotide
agggguauaguccagggga

SEQ ID NO: 369756 - RNA, 19 nt, Artificial Sequence
  Description of Artificial Sequence: Synthetic oligonucleotide
gaaguagugauaaugugga

SEQ ID NO: 369757 - RNA, 19 nt, Artificial Sequence
  Description of Artificial Sequence: Synthetic oligonucleotide
aaacacuccagaaauacaa

SEQ ID NO: 369758 - RNA, 19 nt, Artificial Sequence
  Description of Artificial Sequence: Synthetic oligonucleotide
acucggaaagaacagugag

SEQ ID NO: 369759 - RNA, 19 nt, Artificial Sequence
  Description of Artificial Sequence: Synthetic oligonucleotide
aagggguauaguccagggg

SEQ ID NO: 369760 - RNA, 19 nt, Artificial Sequence
  Description of Artificial Sequence: Synthetic oligonucleotide
ugaacgcauucauaaauac

SEQ ID NO: 369761 - RNA, 19 nt, Artificial Sequence
  Description of Artificial Sequence: Synthetic oligonucleotide
aucaguuauuggcagagga

SEQ ID NO: 369762 - RNA, 19 nt, Artificial Sequence
  Description of Artificial Sequence: Synthetic oligonucleotide
aagccuaucuacugucaag

SEQ ID NO: 369763 - RNA, 19 nt, Artificial Sequence
  Description of Artificial Sequence: Synthetic oligonucleotide
aaugagagccagugagaag

SEQ ID NO: 369764 - RNA, 19 nt, Artificial Sequence
  Description of Artificial Sequence: Synthetic oligonucleotide
uguagcaccaaggaccuug

SEQ ID NO: 369765 - RNA, 19 nt, Artificial Sequence
  Description of Artificial Sequence: Synthetic oligonucleotide
auuggacaggaguuacggc

SEQ ID NO: 369766 - RNA, 19 nt, Artificial Sequence
  Description of Artificial Sequence: Synthetic oligonucleotide
ugcucaaacuuccagccgu

SEQ ID NO: 369767 - RNA, 19 nt, Artificial Sequence
  Description of Artificial Sequence: Synthetic oligonucleotide
cucggaaagaacagugagg

SEQ ID NO: 369768 - RNA, 19 nt, Artificial Sequence
  Description of Artificial Sequence: Synthetic oligonucleotide
ucaaguaguucaguacagg

SEQ ID NO: 369769 - RNA, 19 nt, Artificial Sequence
  Description of Artificial Sequence: Synthetic oligonucleotide
uauccccuuagaauuuuag

SEQ ID NO: 369770 - RNA, 19 nt, Artificial Sequence
  Description of Artificial Sequence: Synthetic oligonucleotide
ucaauuaaauaggcacccg

SEQ ID NO: 369771 - RNA, 19 nt, Artificial Sequence
  Description of Artificial Sequence: Synthetic oligonucleotide
aaaugagagccagugagaa

SEQ ID NO: 369772 - RNA, 19 nt, Artificial Sequence
  Description of Artificial Sequence: Synthetic oligonucleotide
uuaaucaguuauuggcaga

SEQ ID NO: 369773 - RNA, 19 nt, Artificial Sequence
  Description of Artificial Sequence: Synthetic oligonucleotide
acuuggacacgccacuggg

SEQ ID NO: 369774 - RNA, 19 nt, Artificial Sequence
  Description of Artificial Sequence: Synthetic oligonucleotide
uuaacagaucaauccaaaa

SEQ ID NO: 369775 - RNA, 19 nt, Artificial Sequence
  Description of Artificial Sequence: Synthetic oligonucleotide
auaaccagcuuuccauguc

SEQ ID NO: 369776 - RNA, 19 nt, Artificial Sequence
  Description of Artificial Sequence: Synthetic oligonucleotide
cauuggacaggaguuacgg

SEQ ID NO: 369777 - RNA, 19 nt, Artificial Sequence
  Description of Artificial Sequence: Synthetic oligonucleotide
aguauaaacaccggguggu

SEQ ID NO: 369778 - RNA, 19 nt, Artificial Sequence
  Description of Artificial Sequence: Synthetic oligonucleotide
caugcccuaagccacagug

SEQ ID NO: 369779 - RNA, 19 nt, Artificial Sequence
  Description of Artificial Sequence: Synthetic oligonucleotide
cugucaaggucauaaauca

SEQ ID NO: 369780 - RNA, 19 nt, Artificial Sequence
  Description of Artificial Sequence: Synthetic oligonucleotide
aacaacgcuaaguguccag

SEQ ID NO: 369781 - RNA, 19 nt, Artificial Sequence
  Description of Artificial Sequence: Synthetic oligonucleotide
cucgcagugauucuccgcc

SEQ ID NO: 369782 - RNA, 19 nt, Artificial Sequence
  Description of Artificial Sequence: Synthetic oligonucleotide
aagacuucgggucccggca

SEQ ID NO: 369783 - RNA, 19 nt, Artificial Sequence
  Description of Artificial Sequence: Synthetic oligonucleotide
agccuaucuacugucaagg

SEQ ID NO: 369784 - RNA, 19 nt, Artificial Sequence
  Description of Artificial Sequence: Synthetic oligonucleotide
ugcccuaagccacagugca

SEQ ID NO: 369785 - RNA, 19 nt, Artificial Sequence
  Description of Artificial Sequence: Synthetic oligonucleotide
guuaauaaccagcuuucca

SEQ ID NO: 369786 - RNA, 19 nt, Artificial Sequence
  Description of Artificial Sequence: Synthetic oligonucleotide
gacgaggucaguccuagac

SEQ ID NO: 369787 - RNA, 19 nt, Artificial Sequence
  Description of Artificial Sequence: Synthetic oligonucleotide
uuagaauuuuagugaauua

SEQ ID NO: 369788 - RNA, 19 nt, Artificial Sequence
  Description of Artificial Sequence: Synthetic oligonucleotide
cacugguugugccauacgg

SEQ ID NO: 369789 - RNA, 19 nt, Artificial Sequence
  Description of Artificial Sequence: Synthetic oligonucleotide
acaacgcuaaguguccagc

SEQ ID NO: 369790 - RNA, 19 nt, Artificial Sequence
  Description of Artificial Sequence: Synthetic oligonucleotide
acgaggucaguccuagacg

SEQ ID NO: 369791 - RNA, 19 nt, Artificial Sequence
  Description of Artificial Sequence: Synthetic oligonucleotide
acauccuugagccccgcuc

SEQ ID NO: 369792 - RNA, 19 nt, Artificial Sequence
  Description of Artificial Sequence: Synthetic oligonucleotide
acuauuuucaggggaaacu

SEQ ID NO: 369793 - RNA, 19 nt, Artificial Sequence
  Description of Artificial Sequence: Synthetic oligonucleotide
acgcuaaguguccagccac

SEQ ID NO: 369794 - RNA, 19 nt, Artificial Sequence
  Description of Artificial Sequence: Synthetic oligonucleotide
aacgcuaaguguccagcca

SEQ ID NO: 369795 - RNA, 19 nt, Artificial Sequence
  Description of Artificial Sequence: Synthetic oligonucleotide
acccguuucauccuugucu

SEQ ID NO: 369796 - RNA, 19 nt, Artificial Sequence
  Description of Artificial Sequence: Synthetic oligonucleotide
uuucucacucggcucacug

SEQ ID NO: 369797 - RNA, 19 nt, Artificial Sequence
  Description of Artificial Sequence: Synthetic oligonucleotide
uguggagacgacuggcuug

SEQ ID NO: 369798 - RNA, 19 nt, Artificial Sequence
  Description of Artificial Sequence: Synthetic oligonucleotide
aucaaacaacgcuaagugu

SEQ ID NO: 369799 - RNA, 19 nt, Artificial Sequence
  Description of Artificial Sequence: Synthetic oligonucleotide
aggcauuaaacaguaagcu

SEQ ID NO: 369800 - RNA, 19 nt, Artificial Sequence
  Description of Artificial Sequence: Synthetic oligonucleotide
aaguuuguggcccgcuaca

SEQ ID NO: 369801 - RNA, 19 nt, Artificial Sequence
  Description of Artificial Sequence: Synthetic oligonucleotide
gaggucaagagaaaucaac

SEQ ID NO: 369802 - RNA, 19 nt, Artificial Sequence
  Description of Artificial Sequence: Synthetic oligonucleotide
ggaaacuuaggcauuaaac

SEQ ID NO: 369803 - RNA, 19 nt, Artificial Sequence
  Description of Artificial Sequence: Synthetic oligonucleotide
agcagagccacugauuaag

SEQ ID NO: 369804 - RNA, 19 nt, Artificial Sequence
  Description of Artificial Sequence: Synthetic oligonucleotide
auggcgguucacuuuaucu

SEQ ID NO: 369805 - RNA, 19 nt, Artificial Sequence
  Description of Artificial Sequence: Synthetic oligonucleotide
acaacagaccuuaggaaag

SEQ ID NO: 369806 - RNA, 19 nt, Artificial Sequence
  Description of Artificial Sequence: Synthetic oligonucleotide
aaucaguuauuggcagagg

SEQ ID NO: 369807 - RNA, 19 nt, Artificial Sequence
  Description of Artificial Sequence: Synthetic oligonucleotide
uccccuaaccagcugagaa

SEQ ID NO: 369808 - RNA, 19 nt, Artificial Sequence
  Description of Artificial Sequence: Synthetic oligonucleotide
agucacggcggucaguuug

SEQ ID NO: 369809 - RNA, 19 nt, Artificial Sequence
  Description of Artificial Sequence: Synthetic oligonucleotide
ugaagggguauaguccagg

SEQ ID NO: 369810 - RNA, 19 nt, Artificial Sequence
  Description of Artificial Sequence: Synthetic oligonucleotide
auccaaaauguagcaacac

SEQ ID NO: 369811 - RNA, 19 nt, Artificial Sequence
  Description of Artificial Sequence: Synthetic oligonucleotide
gucaagagaaaucaaccaa

SEQ ID NO: 369812 - RNA, 19 nt, Artificial Sequence
  Description of Artificial Sequence: Synthetic oligonucleotide
guauaaauauccccuuaga

SEQ ID NO: 369813 - RNA, 19 nt, Artificial Sequence
  Description of Artificial Sequence: Synthetic oligonucleotide
gaagccucagccgagguca

SEQ ID NO: 369814 - RNA, 19 nt, Artificial Sequence
  Description of Artificial Sequence: Synthetic oligonucleotide
acggcggucaguuugcaca

SEQ ID NO: 369815 - RNA, 19 nt, Artificial Sequence
  Description of Artificial Sequence: Synthetic oligonucleotide
cauaugaggcaaaacaucu

SEQ ID NO: 369816 - RNA, 19 nt, Artificial Sequence
  Description of Artificial Sequence: Synthetic oligonucleotide
uuagugaggugauauugua

SEQ ID NO: 369817 - RNA, 19 nt, Artificial Sequence
  Description of Artificial Sequence: Synthetic oligonucleotide
acagaucaauccaaaaugu

SEQ ID NO: 369818 - RNA, 19 nt, Artificial Sequence
  Description of Artificial Sequence: Synthetic oligonucleotide
ucugagucuaggucggggu

SEQ ID NO: 369819 - RNA, 19 nt, Artificial Sequence
  Description of Artificial Sequence: Synthetic oligonucleotide
ggcauuaaacaguaagcug

SEQ ID NO: 369820 - RNA, 19 nt, Artificial Sequence
  Description of Artificial Sequence: Synthetic oligonucleotide
uggucuauccacacuuuaa

SEQ ID NO: 369821 - RNA, 19 nt, Artificial Sequence
  Description of Artificial Sequence: Synthetic oligonucleotide
gucauaaaucaaacaacgc

SEQ ID NO: 369822 - RNA, 19 nt, Artificial Sequence
  Description of Artificial Sequence: Synthetic oligonucleotide
ugucucaaguaguucagua

SEQ ID NO: 369823 - RNA, 19 nt, Artificial Sequence
  Description of Artificial Sequence: Synthetic oligonucleotide
ggagaacuugauuaaucag

SEQ ID NO: 369824 - RNA, 19 nt, Artificial Sequence
  Description of Artificial Sequence: Synthetic oligonucleotide
agaguauuucccauggcca

SEQ ID NO: 369825 - RNA, 19 nt, Artificial Sequence
  Description of Artificial Sequence: Synthetic oligonucleotide
accuuagcagcuccaaugu

SEQ ID NO: 369826 - RNA, 19 nt, Artificial Sequence
  Description of Artificial Sequence: Synthetic oligonucleotide
acgcuggagaacuugauua

SEQ ID NO: 369827 - RNA, 19 nt, Artificial Sequence
  Description of Artificial Sequence: Synthetic oligonucleotide
guguugugcagcuccuugg

SEQ ID NO: 369828 - RNA, 19 nt, Artificial Sequence
  Description of Artificial Sequence: Synthetic oligonucleotide
auguuugcgcuguaaacau

SEQ ID NO: 369829 - RNA, 19 nt, Artificial Sequence
  Description of Artificial Sequence: Synthetic oligonucleotide
gauuaacagaucaauccaa

SEQ ID NO: 369830 - RNA, 19 nt, Artificial Sequence
  Description of Artificial Sequence: Synthetic oligonucleotide
uugagccccgcucuugcag

SEQ ID NO: 369831 - RNA, 19 nt, Artificial Sequence
  Description of Artificial Sequence: Synthetic oligonucleotide
cuaaguguccagccacucc

SEQ ID NO: 369832 - RNA, 19 nt, Artificial Sequence
  Description of Artificial Sequence: Synthetic oligonucleotide
agacgacuggcuugacagc

SEQ ID NO: 369833 - RNA, 19 nt, Artificial Sequence
  Description of Artificial Sequence: Synthetic oligonucleotide
cauguuugcgcuguaaaca

SEQ ID NO: 369834 - RNA, 19 nt, Artificial Sequence
  Description of Artificial Sequence: Synthetic oligonucleotide
uccuagacgcuggagaacu

SEQ ID NO: 369835 - RNA, 19 nt, Artificial Sequence
  Description of Artificial Sequence: Synthetic oligonucleotide
gacaggccauuauaagagc

SEQ ID NO: 369836 - RNA, 19 nt, Artificial Sequence
  Description of Artificial Sequence: Synthetic oligonucleotide
agaagccucagccgagguc

SEQ ID NO: 369837 - RNA, 19 nt, Artificial Sequence
  Description of Artificial Sequence: Synthetic oligonucleotide
auuagugaggugauauugu

SEQ ID NO: 369838 - RNA, 19 nt, Artificial Sequence
  Description of Artificial Sequence: Synthetic oligonucleotide
ugauuaagccaaacauuua

SEQ ID NO: 369839 - RNA, 19 nt, Artificial Sequence
  Description of Artificial Sequence: Synthetic oligonucleotide
guuauuggcagaggagaag

SEQ ID NO: 369840 - RNA, 19 nt, Artificial Sequence
  Description of Artificial Sequence: Synthetic oligonucleotide
aaguccucuugccuggaaa

SEQ ID NO: 369841 - RNA, 19 nt, Artificial Sequence
  Description of Artificial Sequence: Synthetic oligonucleotide
acugguugugccauacggg

SEQ ID NO: 369842 - RNA, 19 nt, Artificial Sequence
  Description of Artificial Sequence: Synthetic oligonucleotide
aacaguguuagaggcucug

SEQ ID NO: 369843 - RNA, 19 nt, Artificial Sequence
  Description of Artificial Sequence: Synthetic oligonucleotide
uuauuagugaggugauauu

SEQ ID NO: 369844 - RNA, 19 nt, Artificial Sequence
  Description of Artificial Sequence: Synthetic oligonucleotide
cuuggacacgccacugggg

SEQ ID NO: 369845 - RNA, 19 nt, Artificial Sequence
  Description of Artificial Sequence: Synthetic oligonucleotide
aggaaagacuucggguccc

SEQ ID NO: 369846 - RNA, 19 nt, Artificial Sequence
  Description of Artificial Sequence: Synthetic oligonucleotide
ugagucuaggucggggucc

SEQ ID NO: 369847 - RNA, 19 nt, Artificial Sequence
  Description of Artificial Sequence: Synthetic oligonucleotide
uacuccucacauccuugag

SEQ ID NO: 369848 - RNA, 19 nt, Artificial Sequence
  Description of Artificial Sequence: Synthetic oligonucleotide
aucaaccaaucaugccugg

SEQ ID NO: 369849 - RNA, 19 nt, Artificial Sequence
  Description of Artificial Sequence: Synthetic oligonucleotide
ugaugauucugggccaagc

SEQ ID NO: 369850 - RNA, 19 nt, Artificial Sequence
  Description of Artificial Sequence: Synthetic oligonucleotide
gucaagugaacagagccca

SEQ ID NO: 369851 - RNA, 19 nt, Artificial Sequence
  Description of Artificial Sequence: Synthetic oligonucleotide
guaggugccgccgacguug

SEQ ID NO: 369852 - RNA, 19 nt, Artificial Sequence
  Description of Artificial Sequence: Synthetic oligonucleotide
ggucaagagaaaucaacca

SEQ ID NO: 369853 - RNA, 19 nt, Artificial Sequence
  Description of Artificial Sequence: Synthetic oligonucleotide
agguacccaugcccuaagc

SEQ ID NO: 369854 - RNA, 19 nt, Artificial Sequence
  Description of Artificial Sequence: Synthetic oligonucleotide
cuuaggaaaggacgagguc

SEQ ID NO: 369855 - RNA, 19 nt, Artificial Sequence
  Description of Artificial Sequence: Synthetic oligonucleotide
gucucaaacacuccagaaa

SEQ ID NO: 369856 - RNA, 19 nt, Artificial Sequence
  Description of Artificial Sequence: Synthetic oligonucleotide
gaaaugagagccagugaga

SEQ ID NO: 369857 - RNA, 19 nt, Artificial Sequence
  Description of Artificial Sequence: Synthetic oligonucleotide
caaacuuccagccgucuga

SEQ ID NO: 369858 - RNA, 19 nt, Artificial Sequence
  Description of Artificial Sequence: Synthetic oligonucleotide
agcuuuccaugucucaagu

SEQ ID NO: 369859 - RNA, 19 nt, Artificial Sequence
  Description of Artificial Sequence: Synthetic oligonucleotide
cacaagccuaucuacuguc

SEQ ID NO: 369860 - RNA, 19 nt, Artificial Sequence
  Description of Artificial Sequence: Synthetic oligonucleotide
caaguuuguggcccgcuac

SEQ ID NO: 369861 - RNA, 19 nt, Artificial Sequence
  Description of Artificial Sequence: Synthetic oligonucleotide
uugcagacuguguguagca

SEQ ID NO: 369862 - RNA, 19 nt, Artificial Sequence
  Description of Artificial Sequence: Synthetic oligonucleotide
gaaguaggugccgccgacg

SEQ ID NO: 369863 - RNA, 19 nt, Artificial Sequence
  Description of Artificial Sequence: Synthetic oligonucleotide
auacgggguguugugcagc

SEQ ID NO: 369864 - RNA, 19 nt, Artificial Sequence
  Description of Artificial Sequence: Synthetic oligonucleotide
gguacccaugcccuaagcc

SEQ ID NO: 369865 - RNA, 19 nt, Artificial Sequence
  Description of Artificial Sequence: Synthetic oligonucleotide
aagcgguacaggaaagacu

SEQ ID NO: 369866 - RNA, 19 nt, Artificial Sequence
  Description of Artificial Sequence: Synthetic oligonucleotide
agacuucgggucccggcac

SEQ ID NO: 369867 - RNA, 19 nt, Artificial Sequence
  Description of Artificial Sequence: Synthetic oligonucleotide
acacgguacacaugcuuca

SEQ ID NO: 369868 - RNA, 19 nt, Artificial Sequence
  Description of Artificial Sequence: Synthetic oligonucleotide
uugucugaacgcauucaua

SEQ ID NO: 369869 - RNA, 19 nt, Artificial Sequence
  Description of Artificial Sequence: Synthetic oligonucleotide
ugcagguugugcagucuca

SEQ ID NO: 369870 - RNA, 19 nt, Artificial Sequence
  Description of Artificial Sequence: Synthetic oligonucleotide
caguuauuggcagaggaga

SEQ ID NO: 369871 - RNA, 19 nt, Artificial Sequence
  Description of Artificial Sequence: Synthetic oligonucleotide
agaccuuaggaaaggacga

SEQ ID NO: 369872 - RNA, 19 nt, Artificial Sequence
  Description of Artificial Sequence: Synthetic oligonucleotide
aaauauccccuuagaauuu

SEQ ID NO: 369873 - RNA, 19 nt, Artificial Sequence
  Description of Artificial Sequence: Synthetic oligonucleotide
auuuuauccuuuacaaguu

SEQ ID NO: 369874 - RNA, 19 nt, Artificial Sequence
  Description of Artificial Sequence: Synthetic oligonucleotide
gugauaauguggaggcugc

SEQ ID NO: 369875 - RNA, 19 nt, Artificial Sequence
  Description of Artificial Sequence: Synthetic oligonucleotide
gauucuccgccaugauccc

SEQ ID NO: 369876 - RNA, 19 nt, Artificial Sequence
  Description of Artificial Sequence: Synthetic oligonucleotide
caagcgguacaggaaagac

SEQ ID NO: 369877 - RNA, 19 nt, Artificial Sequence
  Description of Artificial Sequence: Synthetic oligonucleotide
uccgccuggcacaagcggu

SEQ ID NO: 369878 - RNA, 19 nt, Artificial Sequence
  Description of Artificial Sequence: Synthetic oligonucleotide
gcaagaaguuuccggaagc

SEQ ID NO: 369879 - RNA, 19 nt, Artificial Sequence
  Description of Artificial Sequence: Synthetic oligonucleotide
aauauccccuuagaauuuu

SEQ ID NO: 369880 - RNA, 19 nt, Artificial Sequence
  Description of Artificial Sequence: Synthetic oligonucleotide
gguugugccauacggggug

SEQ ID NO: 369881 - RNA, 19 nt, Artificial Sequence
  Description of Artificial Sequence: Synthetic oligonucleotide
cacuuggacacgccacugg

SEQ ID NO: 369882 - RNA, 19 nt, Artificial Sequence
  Description of Artificial Sequence: Synthetic oligonucleotide
uuauaagagccuggcucug

SEQ ID NO: 369883 - RNA, 19 nt, Artificial Sequence
  Description of Artificial Sequence: Synthetic oligonucleotide
gcugacaggccauuauaag

SEQ ID NO: 369884 - RNA, 19 nt, Artificial Sequence
  Description of Artificial Sequence: Synthetic oligonucleotide
gugccgccgacguugagcc

SEQ ID NO: 369885 - RNA, 19 nt, Artificial Sequence
  Description of Artificial Sequence: Synthetic oligonucleotide
uuugcgcuguaaacauccu

SEQ ID NO: 369886 - RNA, 19 nt, Artificial Sequence
  Description of Artificial Sequence: Synthetic oligonucleotide
uauaagagccuggcucuga

SEQ ID NO: 369887 - RNA, 19 nt, Artificial Sequence
  Description of Artificial Sequence: Synthetic oligonucleotide
ugguugugccauacggggu

SEQ ID NO: 369888 - RNA, 19 nt, Artificial Sequence
  Description of Artificial Sequence: Synthetic oligonucleotide
gucuauccacacuuuaaaa

SEQ ID NO: 369889 - RNA, 19 nt, Artificial Sequence
  Description of Artificial Sequence: Synthetic oligonucleotide
cauacgggguguugugcag

SEQ ID NO: 369890 - RNA, 19 nt, Artificial Sequence
  Description of Artificial Sequence: Synthetic oligonucleotide
aacaugaccuggaguguca

SEQ ID NO: 369891 - RNA, 19 nt, Artificial Sequence
  Description of Artificial Sequence: Synthetic oligonucleotide
ucuaggucgggguccgccu

SEQ ID NO: 369892 - RNA, 19 nt, Artificial Sequence
  Description of Artificial Sequence: Synthetic oligonucleotide
auaagagccuggcucugaa

SEQ ID NO: 369893 - RNA, 19 nt, Artificial Sequence
  Description of Artificial Sequence: Synthetic oligonucleotide
uagcagcucgcagugauuc

SEQ ID NO: 369894 - RNA, 19 nt, Artificial Sequence
  Description of Artificial Sequence: Synthetic oligonucleotide
ucaaccaaucaugccugga

SEQ ID NO: 369895 - RNA, 19 nt, Artificial Sequence
  Description of Artificial Sequence: Synthetic oligonucleotide
cugaacgcauucauaaaua

SEQ ID NO: 369896 - RNA, 19 nt, Artificial Sequence
  Description of Artificial Sequence: Synthetic oligonucleotide
cuagacgcuggagaacuug

SEQ ID NO: 369897 - RNA, 19 nt, Artificial Sequence
  Description of Artificial Sequence: Synthetic oligonucleotide
cauccccuaaccagcugag

SEQ ID NO: 369898 - RNA, 19 nt, Artificial Sequence
  Description of Artificial Sequence: Synthetic oligonucleotide
ggcacaacaaaggcacugg

SEQ ID NO: 369899 - RNA, 19 nt, Artificial Sequence
  Description of Artificial Sequence: Synthetic oligonucleotide
ugccauacgggguguugug

SEQ ID NO: 369900 - RNA, 19 nt, Artificial Sequence
  Description of Artificial Sequence: Synthetic oligonucleotide
ugcagaaucuuggcuuucu

SEQ ID NO: 369901 - RNA, 19 nt, Artificial Sequence
  Description of Artificial Sequence: Synthetic oligonucleotide
agcucgcagugauucuccg

SEQ ID NO: 369902 - RNA, 19 nt, Artificial Sequence
  Description of Artificial Sequence: Synthetic oligonucleotide
gguguugugcagcuccuug

SEQ ID NO: 369903 - RNA, 19 nt, Artificial Sequence
  Description of Artificial Sequence: Synthetic oligonucleotide
aggcacaacaaaggcacug

SEQ ID NO: 369904 - RNA, 19 nt, Artificial Sequence
  Description of Artificial Sequence: Synthetic oligonucleotide
gcucugaagggguauaguc

SEQ ID NO: 369905 - RNA, 19 nt, Artificial Sequence
  Description of Artificial Sequence: Synthetic oligonucleotide
cugccaaaccagcucuagc

SEQ ID NO: 369906 - RNA, 19 nt, Artificial Sequence
  Description of Artificial Sequence: Synthetic oligonucleotide
aggacgaggucaguccuag

SEQ ID NO: 369907 - RNA, 19 nt, Artificial Sequence
  Description of Artificial Sequence: Synthetic oligonucleotide
cccagaaguagugauaaug

SEQ ID NO: 369908 - RNA, 19 nt, Artificial Sequence
  Description of Artificial Sequence: Synthetic oligonucleotide
acuacagcggcggcacagg

SEQ ID NO: 369909 - RNA, 19 nt, Artificial Sequence
  Description of Artificial Sequence: Synthetic oligonucleotide
gugagaaggagacauguuu

SEQ ID NO: 369910 - RNA, 19 nt, Artificial Sequence
  Description of Artificial Sequence: Synthetic oligonucleotide
aguacuccucacauccuug

SEQ ID NO: 369911 - RNA, 19 nt, Artificial Sequence
  Description of Artificial Sequence: Synthetic oligonucleotide
caccggguggucuauccac

SEQ ID NO: 369912 - RNA, 19 nt, Artificial Sequence
  Description of Artificial Sequence: Synthetic oligonucleotide
ccgacguugagccggaccc

SEQ ID NO: 369913 - RNA, 19 nt, Artificial Sequence
  Description of Artificial Sequence: Synthetic oligonucleotide
ccucccugacccaaggacg

SEQ ID NO: 369914 - RNA, 19 nt, Artificial Sequence
  Description of Artificial Sequence: Synthetic oligonucleotide
aguuauuggcagaggagaa

SEQ ID NO: 369915 - RNA, 19 nt, Artificial Sequence
  Description of Artificial Sequence: Synthetic oligonucleotide
uacauccccuaaccagcug

SEQ ID NO: 369916 - RNA, 19 nt, Artificial Sequence
  Description of Artificial Sequence: Synthetic oligonucleotide
ccucuugccuggaaaauac

SEQ ID NO: 369917 - RNA, 19 nt, Artificial Sequence
  Description of Artificial Sequence: Synthetic oligonucleotide
cagcucgcagugauucucc

SEQ ID NO: 369918 - RNA, 19 nt, Artificial Sequence
  Description of Artificial Sequence: Synthetic oligonucleotide
cugggccaagcugacaggc

SEQ ID NO: 369919 - RNA, 19 nt, Artificial Sequence
  Description of Artificial Sequence: Synthetic oligonucleotide
uacgggguguugugcagcu

SEQ ID NO: 369920 - RNA, 19 nt, Artificial Sequence
  Description of Artificial Sequence: Synthetic oligonucleotide
guacuccucacauccuuga

SEQ ID NO: 369921 - RNA, 19 nt, Artificial Sequence
  Description of Artificial Sequence: Synthetic oligonucleotide
gauaauguggaggcugccu

SEQ ID NO: 369922 - RNA, 19 nt, Artificial Sequence
  Description of Artificial Sequence: Synthetic oligonucleotide
uugaugauucugggccaag

SEQ ID NO: 369923 - RNA, 19 nt, Artificial Sequence
  Description of Artificial Sequence: Synthetic oligonucleotide
ccuaucuacugucaagguc

SEQ ID NO: 369924 - RNA, 19 nt, Artificial Sequence
  Description of Artificial Sequence: Synthetic oligonucleotide
aaacaccggguggucuauc

SEQ ID NO: 369925 - RNA, 19 nt, Artificial Sequence
  Description of Artificial Sequence: Synthetic oligonucleotide
gagcccaugcagguugugc

SEQ ID NO: 369926 - RNA, 19 nt, Artificial Sequence
  Description of Artificial Sequence: Synthetic oligonucleotide
ccugacccaaggacgaggg

SEQ ID NO: 369927 - RNA, 19 nt, Artificial Sequence
  Description of Artificial Sequence: Synthetic oligonucleotide
uuguggcccgcuacauccc

SEQ ID NO: 369928 - RNA, 19 nt, Artificial Sequence
  Description of Artificial Sequence: Synthetic oligonucleotide
cugagucuaggucgggguc

SEQ ID NO: 369929 - RNA, 19 nt, Artificial Sequence
  Description of Artificial Sequence: Synthetic oligonucleotide
gaacagagcccaugcaggu

SEQ ID NO: 369930 - RNA, 19 nt, Artificial Sequence
  Description of Artificial Sequence: Synthetic oligonucleotide
gaguuacggcagcugcccc

SEQ ID NO: 369931 - RNA, 19 nt, Artificial Sequence
  Description of Artificial Sequence: Synthetic oligonucleotide
ggaguuacggcagcugccc

SEQ ID NO: 369932 - RNA, 19 nt, Artificial Sequence
  Description of Artificial Sequence: Synthetic oligonucleotide
ucccacggagcacucggaa

SEQ ID NO: 369933 - RNA, 19 nt, Artificial Sequence
  Description of Artificial Sequence: Synthetic oligonucleotide
ccccuuagaauuuuaguga

SEQ ID NO: 369934 - RNA, 19 nt, Artificial Sequence
  Description of Artificial Sequence: Synthetic oligonucleotide
agcuccaaugucaugucaa

SEQ ID NO: 369935 - RNA, 19 nt, Artificial Sequence
  Description of Artificial Sequence: Synthetic oligonucleotide
aggagacauguuugcgcug

SEQ ID NO: 369936 - RNA, 19 nt, Artificial Sequence
  Description of Artificial Sequence: Synthetic oligonucleotide
guuuccggaagcauuugaa

SEQ ID NO: 369937 - RNA, 19 nt, Artificial Sequence
  Description of Artificial Sequence: Synthetic oligonucleotide
ccucacauccuugagcccc

SEQ ID NO: 369938 - RNA, 19 nt, Artificial Sequence
  Description of Artificial Sequence: Synthetic oligonucleotide
cuaaccagcugagaaaggu

SEQ ID NO: 369939 - RNA, 19 nt, Artificial Sequence
  Description of Artificial Sequence: Synthetic oligonucleotide
cccguuucauccuugucug

SEQ ID NO: 369940 - RNA, 19 nt, Artificial Sequence
  Description of Artificial Sequence: Synthetic oligonucleotide
aucuuggggaaaagaauau

SEQ ID NO: 369941 - RNA, 19 nt, Artificial Sequence
  Description of Artificial Sequence: Synthetic oligonucleotide
cccgcuacauccccuaacc

SEQ ID NO: 369942 - RNA, 19 nt, Artificial Sequence
  Description of Artificial Sequence: Synthetic oligonucleotide
gacccacuuggacacgcca

SEQ ID NO: 369943 - RNA, 19 nt, Artificial Sequence
  Description of Artificial Sequence: Synthetic oligonucleotide
cacuacagcggcggcacag

SEQ ID NO: 369944 - RNA, 19 nt, Artificial Sequence
  Description of Artificial Sequence: Synthetic oligonucleotide
guuuguggcccgcuacauc

SEQ ID NO: 369945 - RNA, 19 nt, Artificial Sequence
  Description of Artificial Sequence: Synthetic oligonucleotide
cuacagcggcggcacaggc

SEQ ID NO: 369946 - RNA, 19 nt, Artificial Sequence
  Description of Artificial Sequence: Synthetic oligonucleotide
cccuaaccagcugagaaag

SEQ ID NO: 369947 - RNA, 19 nt, Artificial Sequence
  Description of Artificial Sequence: Synthetic oligonucleotide
acgcauucauaaauacaca

SEQ ID NO: 369948 - RNA, 19 nt, Artificial Sequence
  Description of Artificial Sequence: Synthetic oligonucleotide
ggcuuucucacucggcuca

SEQ ID NO: 369949 - RNA, 19 nt, Artificial Sequence
  Description of Artificial Sequence: Synthetic oligonucleotide
acaagccuaucuacuguca

SEQ ID NO: 369950 - RNA, 19 nt, Artificial Sequence
  Description of Artificial Sequence: Synthetic oligonucleotide
acaguguuagaggcucuga

SEQ ID NO: 369951 - RNA, 19 nt, Artificial Sequence
  Description of Artificial Sequence: Synthetic oligonucleotide
cucccugacccaaggacga

SEQ ID NO: 369952 - RNA, 19 nt, Artificial Sequence
  Description of Artificial Sequence: Synthetic oligonucleotide
guucaacaugaccuggagu

SEQ ID NO: 369953 - RNA, 19 nt, Artificial Sequence
  Description of Artificial Sequence: Synthetic oligonucleotide
ucgcagugauucuccgcca

SEQ ID NO: 369954 - RNA, 19 nt, Artificial Sequence
  Description of Artificial Sequence: Synthetic oligonucleotide
gacguugagccggacccac

SEQ ID NO: 369955 - RNA, 19 nt, Artificial Sequence
  Description of Artificial Sequence: Synthetic oligonucleotide
gacgacuggcuugacagcu

SEQ ID NO: 369956 - RNA, 19 nt, Artificial Sequence
  Description of Artificial Sequence: Synthetic oligonucleotide
acaccggguggucuaucca

SEQ ID NO: 369957 - RNA, 19 nt, Artificial Sequence
  Description of Artificial Sequence: Synthetic oligonucleotide
caagccuaucuacugucaa

SEQ ID NO: 369958 - RNA, 19 nt, Artificial Sequence
  Description of Artificial Sequence: Synthetic oligonucleotide
gauguuuugcugucucguu

SEQ ID NO: 369959 - RNA, 19 nt, Artificial Sequence
  Description of Artificial Sequence: Synthetic oligonucleotide
ggacacgccacuggggcgg

SEQ ID NO: 369960 - RNA, 19 nt, Artificial Sequence
  Description of Artificial Sequence: Synthetic oligonucleotide
guauaaacaccgggugguc

SEQ ID NO: 369961 - RNA, 19 nt, Artificial Sequence
  Description of Artificial Sequence: Synthetic oligonucleotide
auaugaggcaaaacaucua

SEQ ID NO: 369962 - RNA, 19 nt, Artificial Sequence
  Description of Artificial Sequence: Synthetic oligonucleotide
gcacaagcgguacaggaaa

SEQ ID NO: 369963 - RNA, 19 nt, Artificial Sequence
  Description of Artificial Sequence: Synthetic oligonucleotide
cucugcgaggucuuuguua

SEQ ID NO: 369964 - RNA, 19 nt, Artificial Sequence
  Description of Artificial Sequence: Synthetic oligonucleotide
ccggaagcauuugaaacag

SEQ ID NO: 369965 - RNA, 19 nt, Artificial Sequence
  Description of Artificial Sequence: Synthetic oligonucleotide
gucacggcggucaguuugc

SEQ ID NO: 369966 - RNA, 19 nt, Artificial Sequence
  Description of Artificial Sequence: Synthetic oligonucleotide
guggagacgacuggcuuga

SEQ ID NO: 369967 - RNA, 19 nt, Artificial Sequence
  Description of Artificial Sequence: Synthetic oligonucleotide
gucuaggucgggguccgcc

SEQ ID NO: 369968 - RNA, 19 nt, Artificial Sequence
  Description of Artificial Sequence: Synthetic oligonucleotide
ccaaaauguagcaacacuu

SEQ ID NO: 369969 - RNA, 19 nt, Artificial Sequence
  Description of Artificial Sequence: Synthetic oligonucleotide
uaaacaccggguggucuau

SEQ ID NO: 369970 - RNA, 19 nt, Artificial Sequence
  Description of Artificial Sequence: Synthetic oligonucleotide
auuaaacaguaagcugaua

SEQ ID NO: 369971 - RNA, 19 nt, Artificial Sequence
  Description of Artificial Sequence: Synthetic oligonucleotide
aguuuguggcccgcuacau

SEQ ID NO: 369972 - RNA, 19 nt, Artificial Sequence
  Description of Artificial Sequence: Synthetic oligonucleotide
cuggcacaagcgguacagg

SEQ ID NO: 369973 - RNA, 19 nt, Artificial Sequence
  Description of Artificial Sequence: Synthetic oligonucleotide
cagguacccaugcccuaag

SEQ ID NO: 369974 - RNA, 19 nt, Artificial Sequence
  Description of Artificial Sequence: Synthetic oligonucleotide
cacgguacacaugcuucac

SEQ ID NO: 369975 - RNA, 19 nt, Artificial Sequence
  Description of Artificial Sequence: Synthetic oligonucleotide
gggguauaguccaggggag

SEQ ID NO: 369976 - RNA, 19 nt, Artificial Sequence
  Description of Artificial Sequence: Synthetic oligonucleotide
cacagcggccucccugacc

SEQ ID NO: 369977 - RNA, 19 nt, Artificial Sequence
  Description of Artificial Sequence: Synthetic oligonucleotide
gccucccugacccaaggac

SEQ ID NO: 369978 - RNA, 19 nt, Artificial Sequence
  Description of Artificial Sequence: Synthetic oligonucleotide
guggucuauccacacuuua

SEQ ID NO: 369979 - RNA, 19 nt, Artificial Sequence
  Description of Artificial Sequence: Synthetic oligonucleotide
cacaugcuucacuggcauc

SEQ ID NO: 369980 - RNA, 19 nt, Artificial Sequence
  Description of Artificial Sequence: Synthetic oligonucleotide
agcucccuugggaagccag

SEQ ID NO: 369981 - RNA, 19 nt, Artificial Sequence
  Description of Artificial Sequence: Synthetic oligonucleotide
uaggugccgccgacguuga

SEQ ID NO: 369982 - RNA, 19 nt, Artificial Sequence
  Description of Artificial Sequence: Synthetic oligonucleotide
gcgguucacuuuaucuugg

SEQ ID NO: 369983 - RNA, 19 nt, Artificial Sequence
  Description of Artificial Sequence: Synthetic oligonucleotide
agugagaaggagacauguu

SEQ ID NO: 369984 - RNA, 19 nt, Artificial Sequence
  Description of Artificial Sequence: Synthetic oligonucleotide
ggaaagacuucgggucccg

SEQ ID NO: 369985 - RNA, 19 nt, Artificial Sequence
  Description of Artificial Sequence: Synthetic oligonucleotide
ggugccgccgacguugagc

SEQ ID NO: 369986 - RNA, 19 nt, Artificial Sequence
  Description of Artificial Sequence: Synthetic oligonucleotide
gcgguagcagcucgcagug

SEQ ID NO: 369987 - RNA, 19 nt, Artificial Sequence
  Description of Artificial Sequence: Synthetic oligonucleotide
gacgcuggagaacuugauu

SEQ ID NO: 369988 - RNA, 19 nt, Artificial Sequence
  Description of Artificial Sequence: Synthetic oligonucleotide
ucgggucccggcacagcgu

SEQ ID NO: 369989 - RNA, 19 nt, Artificial Sequence
  Description of Artificial Sequence: Synthetic oligonucleotide
gacuucgggucccggcaca

SEQ ID NO: 369990 - RNA, 19 nt, Artificial Sequence
  Description of Artificial Sequence: Synthetic oligonucleotide
ggccuaggcaagaaguuuc

SEQ ID NO: 369991 - RNA, 19 nt, Artificial Sequence
  Description of Artificial Sequence: Synthetic oligonucleotide
agccgaggucaagagaaau

SEQ ID NO: 369992 - RNA, 19 nt, Artificial Sequence
  Description of Artificial Sequence: Synthetic oligonucleotide
gggccaagcugacaggcca

SEQ ID NO: 369993 - RNA, 19 nt, Artificial Sequence
  Description of Artificial Sequence: Synthetic oligonucleotide
gaaccuuagcagcuccaau

SEQ ID NO: 369994 - RNA, 19 nt, Artificial Sequence
  Description of Artificial Sequence: Synthetic oligonucleotide
cagugagaaggagacaugu

SEQ ID NO: 369995 - RNA, 19 nt, Artificial Sequence
  Description of Artificial Sequence: Synthetic oligonucleotide
agcaacacuuuuaggcauu

SEQ ID NO: 369996 - RNA, 19 nt, Artificial Sequence
  Description of Artificial Sequence: Synthetic oligonucleotide
ggagacgacuggcuugaca

SEQ ID NO: 369997 - RNA, 19 nt, Artificial Sequence
  Description of Artificial Sequence: Synthetic oligonucleotide
cuugaugauucugggccaa

SEQ ID NO: 369998 - RNA, 19 nt, Artificial Sequence
  Description of Artificial Sequence: Synthetic oligonucleotide
aaggacgaggucaguccua

SEQ ID NO: 369999 - RNA, 19 nt, Artificial Sequence
  Description of Artificial Sequence: Synthetic oligonucleotide
cacggcggucaguuugcac

SEQ ID NO: 370000 - RNA, 19 nt, Artificial Sequence
  Description of Artificial Sequence: Synthetic oligonucleotide
cgggguguugugcagcucc

SEQ ID NO: 370001 - RNA, 19 nt, Artificial Sequence
  Description of Artificial Sequence: Synthetic oligonucleotide
gagcagguacccaugcccu

SEQ ID NO: 370002 - RNA, 19 nt, Artificial Sequence
  Description of Artificial Sequence: Synthetic oligonucleotide
aggaaccuuagcagcucca

SEQ ID NO: 370003 - RNA, 19 nt, Artificial Sequence
  Description of Artificial Sequence: Synthetic oligonucleotide
ccuaggcaagaaguuuccg

SEQ ID NO: 370004 - RNA, 19 nt, Artificial Sequence
  Description of Artificial Sequence: Synthetic oligonucleotide
agcagguacccaugcccua

SEQ ID NO: 370005 - RNA, 19 nt, Artificial Sequence
  Description of Artificial Sequence: Synthetic oligonucleotide
gggccaaguuuguggcccg

SEQ ID NO: 370006 - RNA, 19 nt, Artificial Sequence
  Description of Artificial Sequence: Synthetic oligonucleotide
aguaggugccgccgacguu

SEQ ID NO: 370007 - RNA, 19 nt, Artificial Sequence
  Description of Artificial Sequence: Synthetic oligonucleotide
gguagcagcucgcagugau

SEQ ID NO: 370008 - RNA, 19 nt, Artificial Sequence
  Description of Artificial Sequence: Synthetic oligonucleotide
guccuagacgcuggagaac

SEQ ID NO: 370009 - RNA, 19 nt, Artificial Sequence
  Description of Artificial Sequence: Synthetic oligonucleotide
cuugagccccgcucuugca

SEQ ID NO: 370010 - RNA, 19 nt, Artificial Sequence
  Description of Artificial Sequence: Synthetic oligonucleotide
aggugcccagaaguaguga

SEQ ID NO: 370011 - RNA, 19 nt, Artificial Sequence
  Description of Artificial Sequence: Synthetic oligonucleotide
gccgacguugagccggacc

SEQ ID NO: 370012 - RNA, 19 nt, Artificial Sequence
  Description of Artificial Sequence: Synthetic oligonucleotide
ggcgguagcagcucgcagu

SEQ ID NO: 370013 - RNA, 19 nt, Artificial Sequence
  Description of Artificial Sequence: Synthetic oligonucleotide
gccuuugucagaagccuca

SEQ ID NO: 370014 - RNA, 19 nt, Artificial Sequence
  Description of Artificial Sequence: Synthetic oligonucleotide
accggguggucuauccaca

SEQ ID NO: 370015 - RNA, 19 nt, Artificial Sequence
  Description of Artificial Sequence: Synthetic oligonucleotide
guacagguccaaaguaggu

SEQ ID NO: 370016 - RNA, 19 nt, Artificial Sequence
  Description of Artificial Sequence: Synthetic oligonucleotide
ccuuaggaaaggacgaggu

SEQ ID NO: 370017 - RNA, 19 nt, Artificial Sequence
  Description of Artificial Sequence: Synthetic oligonucleotide
acggagcacucggaaagaa

SEQ ID NO: 370018 - RNA, 19 nt, Artificial Sequence
  Description of Artificial Sequence: Synthetic oligonucleotide
ccauacgggguguugugca

SEQ ID NO: 370019 - RNA, 19 nt, Artificial Sequence
  Description of Artificial Sequence: Synthetic oligonucleotide
gguauaguccaggggaggu

SEQ ID NO: 370020 - RNA, 19 nt, Artificial Sequence
  Description of Artificial Sequence: Synthetic oligonucleotide
gccgaggucaagagaaauc

SEQ ID NO: 370021 - RNA, 19 nt, Artificial Sequence
  Description of Artificial Sequence: Synthetic oligonucleotide
gccacugauuaagccaaac

SEQ ID NO: 370022 - RNA, 19 nt, Artificial Sequence
  Description of Artificial Sequence: Synthetic oligonucleotide
agacgcuggagaacuugau

SEQ ID NO: 370023 - RNA, 19 nt, Artificial Sequence
  Description of Artificial Sequence: Synthetic oligonucleotide
gccauacgggguguugugc

SEQ ID NO: 370024 - RNA, 19 nt, Artificial Sequence
  Description of Artificial Sequence: Synthetic oligonucleotide
ggcacaagcgguacaggaa

SEQ ID NO: 370025 - RNA, 19 nt, Artificial Sequence
  Description of Artificial Sequence: Synthetic oligonucleotide
auccccuaaccagcugaga

SEQ ID NO: 370026 - RNA, 19 nt, Artificial Sequence
  Description of Artificial Sequence: Synthetic oligonucleotide
cuucgggucccggcacagc

SEQ ID NO: 370027 - RNA, 19 nt, Artificial Sequence
  Description of Artificial Sequence: Synthetic oligonucleotide
ggcgguguggcagggcgcc

SEQ ID NO: 370028 - RNA, 19 nt, Artificial Sequence
  Description of Artificial Sequence: Synthetic oligonucleotide
agccagugagaaggagaca

SEQ ID NO: 370029 - RNA, 19 nt, Artificial Sequence
  Description of Artificial Sequence: Synthetic oligonucleotide
ucacggcggucaguuugca

SEQ ID NO: 370030 - RNA, 19 nt, Artificial Sequence
  Description of Artificial Sequence: Synthetic oligonucleotide
cccuguggagacgacuggc

SEQ ID NO: 370031 - RNA, 19 nt, Artificial Sequence
  Description of Artificial Sequence: Synthetic oligonucleotide
cucggagccggcgguagca

SEQ ID NO: 370032 - RNA, 19 nt, Artificial Sequence
  Description of Artificial Sequence: Synthetic oligonucleotide
gcuaaguguccagccacuc

SEQ ID NO: 370033 - RNA, 19 nt, Artificial Sequence
  Description of Artificial Sequence: Synthetic oligonucleotide
aggggucaagaagcacaca

SEQ ID NO: 370034 - RNA, 19 nt, Artificial Sequence
  Description of Artificial Sequence: Synthetic oligonucleotide
gcaguacacgguacacaug

SEQ ID NO: 370035 - RNA, 19 nt, Artificial Sequence
  Description of Artificial Sequence: Synthetic oligonucleotide
acgggguguugugcagcuc

SEQ ID NO: 370036 - RNA, 19 nt, Artificial Sequence
  Description of Artificial Sequence: Synthetic oligonucleotide
cugccucccuguggagacg

SEQ ID NO: 370037 - RNA, 19 nt, Artificial Sequence
  Description of Artificial Sequence: Synthetic oligonucleotide
gagccccgcucuugcagaa

SEQ ID NO: 370038 - RNA, 19 nt, Artificial Sequence
  Description of Artificial Sequence: Synthetic oligonucleotide
gcgcuguaaacauccugaa

SEQ ID NO: 370039 - RNA, 19 nt, Artificial Sequence
  Description of Artificial Sequence: Synthetic oligonucleotide
aggccgcucggagccggcg

SEQ ID NO: 370040 - RNA, 19 nt, Artificial Sequence
  Description of Artificial Sequence: Synthetic oligonucleotide
gcccgcuacauccccuaac

SEQ ID NO: 370041 - RNA, 19 nt, Artificial Sequence
  Description of Artificial Sequence: Synthetic oligonucleotide
caaaguccucuugccugga

SEQ ID NO: 370042 - RNA, 19 nt, Artificial Sequence
  Description of Artificial Sequence: Synthetic oligonucleotide
ccggguggucuauccacac

SEQ ID NO: 370043 - RNA, 19 nt, Artificial Sequence
  Description of Artificial Sequence: Synthetic oligonucleotide
aggugccgccgacguugag

SEQ ID NO: 370044 - RNA, 19 nt, Artificial Sequence
  Description of Artificial Sequence: Synthetic oligonucleotide
agcggccucccugacccaa

SEQ ID NO: 370045 - RNA, 19 nt, Artificial Sequence
  Description of Artificial Sequence: Synthetic oligonucleotide
ccagcacuacagcggcggc

SEQ ID NO: 370046 - RNA, 19 nt, Artificial Sequence
  Description of Artificial Sequence: Synthetic oligonucleotide
ggcacccguuucauccuug

SEQ ID NO: 370047 - RNA, 19 nt, Artificial Sequence
  Description of Artificial Sequence: Synthetic oligonucleotide
uugugccauacgggguguu

SEQ ID NO: 370048 - RNA, 19 nt, Artificial Sequence
  Description of Artificial Sequence: Synthetic oligonucleotide
cggcggucaguuugcacag

SEQ ID NO: 370049 - RNA, 19 nt, Artificial Sequence
  Description of Artificial Sequence: Synthetic oligonucleotide
gccuaucuacugucaaggu

SEQ ID NO: 370050 - RNA, 19 nt, Artificial Sequence
  Description of Artificial Sequence: Synthetic oligonucleotide
uggagacgacuggcuugac

SEQ ID NO: 370051 - RNA, 19 nt, Artificial Sequence
  Description of Artificial Sequence: Synthetic oligonucleotide
acguugagccggacccacu

SEQ ID NO: 370052 - RNA, 19 nt, Artificial Sequence
  Description of Artificial Sequence: Synthetic oligonucleotide
ccauuauaagagccuggcu

SEQ ID NO: 370053 - RNA, 19 nt, Artificial Sequence
  Description of Artificial Sequence: Synthetic oligonucleotide
caggcacaacaaaggcacu

SEQ ID NO: 370054 - RNA, 19 nt, Artificial Sequence
  Description of Artificial Sequence: Synthetic oligonucleotide
gcagucacggcggucaguu

SEQ ID NO: 370055 - RNA, 19 nt, Artificial Sequence
  Description of Artificial Sequence: Synthetic oligonucleotide
ggggaaacuuaggcauuaa

SEQ ID NO: 370056 - RNA, 19 nt, Artificial Sequence
  Description of Artificial Sequence: Synthetic oligonucleotide
ggcggucaguuugcacagc

SEQ ID NO: 370057 - RNA, 19 nt, Artificial Sequence
  Description of Artificial Sequence: Synthetic oligonucleotide
cgaggucaagagaaaucaa

SEQ ID NO: 370058 - RNA, 19 nt, Artificial Sequence
  Description of Artificial Sequence: Synthetic oligonucleotide
ccccacaagccuaucuacu

SEQ ID NO: 370059 - RNA, 19 nt, Artificial Sequence
  Description of Artificial Sequence: Synthetic oligonucleotide
ggcucugaagggguauagu

SEQ ID NO: 370060 - RNA, 19 nt, Artificial Sequence
  Description of Artificial Sequence: Synthetic oligonucleotide
ccgcuacauccccuaacca

SEQ ID NO: 370061 - RNA, 19 nt, Artificial Sequence
  Description of Artificial Sequence: Synthetic oligonucleotide
agccccgcucuugcagaau

SEQ ID NO: 370062 - RNA, 19 nt, Artificial Sequence
  Description of Artificial Sequence: Synthetic oligonucleotide
cacgccacuggggcggugu

SEQ ID NO: 370063 - RNA, 19 nt, Artificial Sequence
  Description of Artificial Sequence: Synthetic oligonucleotide
ccguuucauccuugucuga

SEQ ID NO: 370064 - RNA, 19 nt, Artificial Sequence
  Description of Artificial Sequence: Synthetic oligonucleotide
gggcgguguggcagggcgc

SEQ ID NO: 370065 - RNA, 19 nt, Artificial Sequence
  Description of Artificial Sequence: Synthetic oligonucleotide
gggccuaggcaagaaguuu

SEQ ID NO: 370066 - RNA, 19 nt, Artificial Sequence
  Description of Artificial Sequence: Synthetic oligonucleotide
gguggucuauccacacuuu

SEQ ID NO: 370067 - RNA, 19 nt, Artificial Sequence
  Description of Artificial Sequence: Synthetic oligonucleotide
acacgccacuggggcggug

SEQ ID NO: 370068 - RNA, 19 nt, Artificial Sequence
  Description of Artificial Sequence: Synthetic oligonucleotide
gacacgccacuggggcggu

SEQ ID NO: 370069 - RNA, 19 nt, Artificial Sequence
  Description of Artificial Sequence: Synthetic oligonucleotide
ggcccgcuacauccccuaa

SEQ ID NO: 370070 - RNA, 19 nt, Artificial Sequence
  Description of Artificial Sequence: Synthetic oligonucleotide
ccaagcugacaggccauua

SEQ ID NO: 370071 - RNA, 19 nt, Artificial Sequence
  Description of Artificial Sequence: Synthetic oligonucleotide
cugcgaggucuuuguuaau

SEQ ID NO: 370072 - RNA, 19 nt, Artificial Sequence
  Description of Artificial Sequence: Synthetic oligonucleotide
ccggacccacuuggacacg

SEQ ID NO: 370073 - RNA, 19 nt, Artificial Sequence
  Description of Artificial Sequence: Synthetic oligonucleotide
cagcggccucccugaccca

SEQ ID NO: 370074 - RNA, 19 nt, Artificial Sequence
  Description of Artificial Sequence: Synthetic oligonucleotide
ccaaggacgagggccuggu

SEQ ID NO: 370075 - RNA, 19 nt, Artificial Sequence
  Description of Artificial Sequence: Synthetic oligonucleotide
cgcucggagccggcgguag

SEQ ID NO: 370076 - RNA, 19 nt, Artificial Sequence
  Description of Artificial Sequence: Synthetic oligonucleotide
cgcuaaguguccagccacu

SEQ ID NO: 370077 - RNA, 19 nt, Artificial Sequence
  Description of Artificial Sequence: Synthetic oligonucleotide
cgccuggcacaagcgguac

SEQ ID NO: 370078 - RNA, 19 nt, Artificial Sequence
  Description of Artificial Sequence: Synthetic oligonucleotide
cagucacggcggucaguuu

SEQ ID NO: 370079 - RNA, 19 nt, Artificial Sequence
  Description of Artificial Sequence: Synthetic oligonucleotide
gggguccgccuggcacaag

SEQ ID NO: 370080 - RNA, 19 nt, Artificial Sequence
  Description of Artificial Sequence: Synthetic oligonucleotide
cgacguugagccggaccca

SEQ ID NO: 370081 - RNA, 19 nt, Artificial Sequence
  Description of Artificial Sequence: Synthetic oligonucleotide
ccgccgacguugagccgga

SEQ ID NO: 370082 - RNA, 19 nt, Artificial Sequence
  Description of Artificial Sequence: Synthetic oligonucleotide
gccaagcugacaggccauu

SEQ ID NO: 370083 - RNA, 19 nt, Artificial Sequence
  Description of Artificial Sequence: Synthetic oligonucleotide
ccgccccgaggccgcucgg

SEQ ID NO: 370084 - RNA, 19 nt, Artificial Sequence
  Description of Artificial Sequence: Synthetic oligonucleotide
cgccccgaggccgcucgga

SEQ ID NO: 370085 - RNA, 19 nt, Artificial Sequence
  Description of Artificial Sequence: Synthetic oligonucleotide
ccgcucggagccggcggua

SEQ ID NO: 370086 - RNA, 19 nt, Artificial Sequence
  Description of Artificial Sequence: Synthetic oligonucleotide
cgccgacguugagccggac

SEQ ID NO: 370087 - RNA, 19 nt, Artificial Sequence
  Description of Artificial Sequence: Synthetic oligonucleotide
aauuaaaugauuccuacca

SEQ ID NO: 370088 - RNA, 19 nt, Artificial Sequence
  Description of Artificial Sequence: Synthetic oligonucleotide
auaacaaucucucaucgcc

SEQ ID NO: 370089 - RNA, 19 nt, Artificial Sequence
  Description of Artificial Sequence: Synthetic oligonucleotide
ugaugaauagaccugauug

SEQ ID NO: 370090 - RNA, 19 nt, Artificial Sequence
  Description of Artificial Sequence: Synthetic oligonucleotide
agaacuaugaucugggcac

SEQ ID NO: 370091 - RNA, 19 nt, Artificial Sequence
  Description of Artificial Sequence: Synthetic oligonucleotide
cuuuaaaccuaaauuagcg

SEQ ID NO: 370092 - RNA, 19 nt, Artificial Sequence
  Description of Artificial Sequence: Synthetic oligonucleotide
aaauugugcacauacugag

SEQ ID NO: 370093 - RNA, 19 nt, Artificial Sequence
  Description of Artificial Sequence: Synthetic oligonucleotide
aaaccggcugcucauaacc

SEQ ID NO: 370094 - RNA, 19 nt, Artificial Sequence
  Description of Artificial Sequence: Synthetic oligonucleotide
ucuaguguaguuaauacaa

SEQ ID NO: 370095 - RNA, 19 nt, Artificial Sequence
  Description of Artificial Sequence: Synthetic oligonucleotide
aagaggacgggaucuagcc

SEQ ID NO: 370096 - RNA, 19 nt, Artificial Sequence
  Description of Artificial Sequence: Synthetic oligonucleotide
uccauauuaaacuguuucg

SEQ ID NO: 370097 - RNA, 19 nt, Artificial Sequence
  Description of Artificial Sequence: Synthetic oligonucleotide
aaauuagcguaguaguaag

SEQ ID NO: 370098 - RNA, 19 nt, Artificial Sequence
  Description of Artificial Sequence: Synthetic oligonucleotide
uuagaguuaucccagaaau

SEQ ID NO: 370099 - RNA, 19 nt, Artificial Sequence
  Description of Artificial Sequence: Synthetic oligonucleotide
accgcagugaauuuggagg

SEQ ID NO: 370100 - RNA, 19 nt, Artificial Sequence
  Description of Artificial Sequence: Synthetic oligonucleotide
cucacaauuggccaguugg

SEQ ID NO: 370101 - RNA, 19 nt, Artificial Sequence
  Description of Artificial Sequence: Synthetic oligonucleotide
uguacuuccugagaggagg

SEQ ID NO: 370102 - RNA, 19 nt, Artificial Sequence
  Description of Artificial Sequence: Synthetic oligonucleotide
ucguuuguccacuuggagg

SEQ ID NO: 370103 - RNA, 19 nt, Artificial Sequence
  Description of Artificial Sequence: Synthetic oligonucleotide
guuaauacaaucuucucaa

SEQ ID NO: 370104 - RNA, 19 nt, Artificial Sequence
  Description of Artificial Sequence: Synthetic oligonucleotide
ugguccuuaaagaggacgg

SEQ ID NO: 370105 - RNA, 19 nt, Artificial Sequence
  Description of Artificial Sequence: Synthetic oligonucleotide
agugcuaggauuuuauccu

SEQ ID NO: 370106 - RNA, 19 nt, Artificial Sequence
  Description of Artificial Sequence: Synthetic oligonucleotide
auuagcguaguaguaaggg

SEQ ID NO: 370107 - RNA, 19 nt, Artificial Sequence
  Description of Artificial Sequence: Synthetic oligonucleotide
uuuaaaccuaaauuagcgu

SEQ ID NO: 370108 - RNA, 19 nt, Artificial Sequence
  Description of Artificial Sequence: Synthetic oligonucleotide
caauuaaucacuucggaga

SEQ ID NO: 370109 - RNA, 19 nt, Artificial Sequence
  Description of Artificial Sequence: Synthetic oligonucleotide
uaacaaucucucaucgccg

SEQ ID NO: 370110 - RNA, 19 nt, Artificial Sequence
  Description of Artificial Sequence: Synthetic oligonucleotide
aaugauuccuaccauuguu

SEQ ID NO: 370111 - RNA, 19 nt, Artificial Sequence
  Description of Artificial Sequence: Synthetic oligonucleotide
aguccuaucuucuucccuc

SEQ ID NO: 370112 - RNA, 19 nt, Artificial Sequence
  Description of Artificial Sequence: Synthetic oligonucleotide
cacggugaaggcaaaaucc

SEQ ID NO: 370113 - RNA, 19 nt, Artificial Sequence
  Description of Artificial Sequence: Synthetic oligonucleotide
auaaguggagacucugcac

SEQ ID NO: 370114 - RNA, 19 nt, Artificial Sequence
  Description of Artificial Sequence: Synthetic oligonucleotide
aaucuucucaacugaagaa

SEQ ID NO: 370115 - RNA, 19 nt, Artificial Sequence
  Description of Artificial Sequence: Synthetic oligonucleotide
gugauaauauuugugguag

SEQ ID NO: 370116 - RNA, 19 nt, Artificial Sequence
  Description of Artificial Sequence: Synthetic oligonucleotide
uuaaacuguacacaaccua

SEQ ID NO: 370117 - RNA, 19 nt, Artificial Sequence
  Description of Artificial Sequence: Synthetic oligonucleotide
ugugcuugaauauucuguc

SEQ ID NO: 370118 - RNA, 19 nt, Artificial Sequence
  Description of Artificial Sequence: Synthetic oligonucleotide
aguaguaagggaagucucc

SEQ ID NO: 370119 - RNA, 19 nt, Artificial Sequence
  Description of Artificial Sequence: Synthetic oligonucleotide
uaaauuagcguaguaguaa

SEQ ID NO: 370120 - RNA, 19 nt, Artificial Sequence
  Description of Artificial Sequence: Synthetic oligonucleotide
uuuaaaccugcauagcaau

SEQ ID NO: 370121 - RNA, 19 nt, Artificial Sequence
  Description of Artificial Sequence: Synthetic oligonucleotide
aaaugauuccuaccauugu

SEQ ID NO: 370122 - RNA, 19 nt, Artificial Sequence
  Description of Artificial Sequence: Synthetic oligonucleotide
ucucuaguguaguuaauac

SEQ ID NO: 370123 - RNA, 19 nt, Artificial Sequence
  Description of Artificial Sequence: Synthetic oligonucleotide
uuauccugaugaauagacc

SEQ ID NO: 370124 - RNA, 19 nt, Artificial Sequence
  Description of Artificial Sequence: Synthetic oligonucleotide
cauuucccgauaaucauac

SEQ ID NO: 370125 - RNA, 19 nt, Artificial Sequence
  Description of Artificial Sequence: Synthetic oligonucleotide
uucccgauaaucauacuuc

SEQ ID NO: 370126 - RNA, 19 nt, Artificial Sequence
  Description of Artificial Sequence: Synthetic oligonucleotide
agugccggaauauaaauua

SEQ ID NO: 370127 - RNA, 19 nt, Artificial Sequence
  Description of Artificial Sequence: Synthetic oligonucleotide
uccgugaugauauugucau

SEQ ID NO: 370128 - RNA, 19 nt, Artificial Sequence
  Description of Artificial Sequence: Synthetic oligonucleotide
cacaaccuagucaugagac

SEQ ID NO: 370129 - RNA, 19 nt, Artificial Sequence
  Description of Artificial Sequence: Synthetic oligonucleotide
uagcguaguaguaagggaa

SEQ ID NO: 370130 - RNA, 19 nt, Artificial Sequence
  Description of Artificial Sequence: Synthetic oligonucleotide
uuucccgauaaucauacuu

SEQ ID NO: 370131 - RNA, 19 nt, Artificial Sequence
  Description of Artificial Sequence: Synthetic oligonucleotide
cucucaucgccgaugacgg

SEQ ID NO: 370132 - RNA, 19 nt, Artificial Sequence
  Description of Artificial Sequence: Synthetic oligonucleotide
uugguuccaauuaaucacu

SEQ ID NO: 370133 - RNA, 19 nt, Artificial Sequence
  Description of Artificial Sequence: Synthetic oligonucleotide
aacaaucucucaucgccga

SEQ ID NO: 370134 - RNA, 19 nt, Artificial Sequence
  Description of Artificial Sequence: Synthetic oligonucleotide
agugauaauauuuguggua

SEQ ID NO: 370135 - RNA, 19 nt, Artificial Sequence
  Description of Artificial Sequence: Synthetic oligonucleotide
acacggugaaggcaaaauc

SEQ ID NO: 370136 - RNA, 19 nt, Artificial Sequence
  Description of Artificial Sequence: Synthetic oligonucleotide
agugguugaaaggacagug

SEQ ID NO: 370137 - RNA, 19 nt, Artificial Sequence
  Description of Artificial Sequence: Synthetic oligonucleotide
uuagcguaguaguaaggga

SEQ ID NO: 370138 - RNA, 19 nt, Artificial Sequence
  Description of Artificial Sequence: Synthetic oligonucleotide
ucggagaauggcaacuccc

SEQ ID NO: 370139 - RNA, 19 nt, Artificial Sequence
  Description of Artificial Sequence: Synthetic oligonucleotide
agcacgaacaauccuccag

SEQ ID NO: 370140 - RNA, 19 nt, Artificial Sequence
  Description of Artificial Sequence: Synthetic oligonucleotide
uuuugguaacuuucggcga

SEQ ID NO: 370141 - RNA, 19 nt, Artificial Sequence
  Description of Artificial Sequence: Synthetic oligonucleotide
cucaggacaaagaggcacg

SEQ ID NO: 370142 - RNA, 19 nt, Artificial Sequence
  Description of Artificial Sequence: Synthetic oligonucleotide
cuagccucaucugagagug

SEQ ID NO: 370143 - RNA, 19 nt, Artificial Sequence
  Description of Artificial Sequence: Synthetic oligonucleotide
cagaaaguggcauugugca

SEQ ID NO: 370144 - RNA, 19 nt, Artificial Sequence
  Description of Artificial Sequence: Synthetic oligonucleotide
acgggaucuagccucaucu

SEQ ID NO: 370145 - RNA, 19 nt, Artificial Sequence
  Description of Artificial Sequence: Synthetic oligonucleotide
uggaucucaaauugugcac

SEQ ID NO: 370146 - RNA, 19 nt, Artificial Sequence
  Description of Artificial Sequence: Synthetic oligonucleotide
aguucuucauuuuggucgu

SEQ ID NO: 370147 - RNA, 19 nt, Artificial Sequence
  Description of Artificial Sequence: Synthetic oligonucleotide
uuaauacaaucuucucaac

SEQ ID NO: 370148 - RNA, 19 nt, Artificial Sequence
  Description of Artificial Sequence: Synthetic oligonucleotide
ucggaaguuuucaguacug

SEQ ID NO: 370149 - RNA, 19 nt, Artificial Sequence
  Description of Artificial Sequence: Synthetic oligonucleotide
aaagccguucaaugucucu

SEQ ID NO: 370150 - RNA, 19 nt, Artificial Sequence
  Description of Artificial Sequence: Synthetic oligonucleotide
caaccuagucaugagacac

SEQ ID NO: 370151 - RNA, 19 nt, Artificial Sequence
  Description of Artificial Sequence: Synthetic oligonucleotide
aaaccuaaauuagcguagu

SEQ ID NO: 370152 - RNA, 19 nt, Artificial Sequence
  Description of Artificial Sequence: Synthetic oligonucleotide
uucaugagaauguccucac

SEQ ID NO: 370153 - RNA, 19 nt, Artificial Sequence
  Description of Artificial Sequence: Synthetic oligonucleotide
caugauauaaggcauuccu

SEQ ID NO: 370154 - RNA, 19 nt, Artificial Sequence
  Description of Artificial Sequence: Synthetic oligonucleotide
acugaggugauaacugguc

SEQ ID NO: 370155 - RNA, 19 nt, Artificial Sequence
  Description of Artificial Sequence: Synthetic oligonucleotide
gaagucucccagguaagag

SEQ ID NO: 370156 - RNA, 19 nt, Artificial Sequence
  Description of Artificial Sequence: Synthetic oligonucleotide
ugccggaauauaaauuaaa

SEQ ID NO: 370157 - RNA, 19 nt, Artificial Sequence
  Description of Artificial Sequence: Synthetic oligonucleotide
acgagaagcuucaacacug

SEQ ID NO: 370158 - RNA, 19 nt, Artificial Sequence
  Description of Artificial Sequence: Synthetic oligonucleotide
aaaccccacguccucggug

SEQ ID NO: 370159 - RNA, 19 nt, Artificial Sequence
  Description of Artificial Sequence: Synthetic oligonucleotide
gaccgcagugaauuuggag

SEQ ID NO: 370160 - RNA, 19 nt, Artificial Sequence
  Description of Artificial Sequence: Synthetic oligonucleotide
gaugaccgcagugaauuug

SEQ ID NO: 370161 - RNA, 19 nt, Artificial Sequence
  Description of Artificial Sequence: Synthetic oligonucleotide
uuucgugauaugugcuuga

SEQ ID NO: 370162 - RNA, 19 nt, Artificial Sequence
  Description of Artificial Sequence: Synthetic oligonucleotide
uaaagaggacgggaucuag

SEQ ID NO: 370163 - RNA, 19 nt, Artificial Sequence
  Description of Artificial Sequence: Synthetic oligonucleotide
gcacgaacaauccuccagg

SEQ ID NO: 370164 - RNA, 19 nt, Artificial Sequence
  Description of Artificial Sequence: Synthetic oligonucleotide
guaguaagggaagucuccc

SEQ ID NO: 370165 - RNA, 19 nt, Artificial Sequence
  Description of Artificial Sequence: Synthetic oligonucleotide
guuccauaaguggagacuc

SEQ ID NO: 370166 - RNA, 19 nt, Artificial Sequence
  Description of Artificial Sequence: Synthetic oligonucleotide
cucuaguguaguuaauaca

SEQ ID NO: 370167 - RNA, 19 nt, Artificial Sequence
  Description of Artificial Sequence: Synthetic oligonucleotide
cacguagacuuugaagucc

SEQ ID NO: 370168 - RNA, 19 nt, Artificial Sequence
  Description of Artificial Sequence: Synthetic oligonucleotide
gucucugucuaaaguaucc

SEQ ID NO: 370169 - RNA, 19 nt, Artificial Sequence
  Description of Artificial Sequence: Synthetic oligonucleotide
augaccgcagugaauuugg

SEQ ID NO: 370170 - RNA, 19 nt, Artificial Sequence
  Description of Artificial Sequence: Synthetic oligonucleotide
aucacuucggagaauggca

SEQ ID NO: 370171 - RNA, 19 nt, Artificial Sequence
  Description of Artificial Sequence: Synthetic oligonucleotide
gugauaacuggucucuguc

SEQ ID NO: 370172 - RNA, 19 nt, Artificial Sequence
  Description of Artificial Sequence: Synthetic oligonucleotide
agcuugguuccaauuaauc

SEQ ID NO: 370173 - RNA, 19 nt, Artificial Sequence
  Description of Artificial Sequence: Synthetic oligonucleotide
guagaaggaaucuguaaua

SEQ ID NO: 370174 - RNA, 19 nt, Artificial Sequence
  Description of Artificial Sequence: Synthetic oligonucleotide
ggagaccugguccuuaaag

SEQ ID NO: 370175 - RNA, 19 nt, Artificial Sequence
  Description of Artificial Sequence: Synthetic oligonucleotide
acaaccuagucaugagaca

SEQ ID NO: 370176 - RNA, 19 nt, Artificial Sequence
  Description of Artificial Sequence: Synthetic oligonucleotide
ugggaucccucaaagccgu

SEQ ID NO: 370177 - RNA, 19 nt, Artificial Sequence
  Description of Artificial Sequence: Synthetic oligonucleotide
gcuagaauguuuugguaac

SEQ ID NO: 370178 - RNA, 19 nt, Artificial Sequence
  Description of Artificial Sequence: Synthetic oligonucleotide
gucguuuguccacuuggag

SEQ ID NO: 370179 - RNA, 19 nt, Artificial Sequence
  Description of Artificial Sequence: Synthetic oligonucleotide
accuagucaugagacacag

SEQ ID NO: 370180 - RNA, 19 nt, Artificial Sequence
  Description of Artificial Sequence: Synthetic oligonucleotide
ggcaaacguguucauacag

SEQ ID NO: 370181 - RNA, 19 nt, Artificial Sequence
  Description of Artificial Sequence: Synthetic oligonucleotide
acguagacuuugaaguccg

SEQ ID NO: 370182 - RNA, 19 nt, Artificial Sequence
  Description of Artificial Sequence: Synthetic oligonucleotide
aagggcgaaaucgaagcaa

SEQ ID NO: 370183 - RNA, 19 nt, Artificial Sequence
  Description of Artificial Sequence: Synthetic oligonucleotide
ccugcgaccacgaggaacc

SEQ ID NO: 370184 - RNA, 19 nt, Artificial Sequence
  Description of Artificial Sequence: Synthetic oligonucleotide
guuuaaaccugcauagcaa

SEQ ID NO: 370185 - RNA, 19 nt, Artificial Sequence
  Description of Artificial Sequence: Synthetic oligonucleotide
agcauggaugaccgcagug

SEQ ID NO: 370186 - RNA, 19 nt, Artificial Sequence
  Description of Artificial Sequence: Synthetic oligonucleotide
ugcugucuaagugcuagga

SEQ ID NO: 370187 - RNA, 19 nt, Artificial Sequence
  Description of Artificial Sequence: Synthetic oligonucleotide
augaauagaccugauugua

SEQ ID NO: 370188 - RNA, 19 nt, Artificial Sequence
  Description of Artificial Sequence: Synthetic oligonucleotide
aaccuaaauuagcguagua

SEQ ID NO: 370189 - RNA, 19 nt, Artificial Sequence
  Description of Artificial Sequence: Synthetic oligonucleotide
ugacccuaucccugucagg

SEQ ID NO: 370190 - RNA, 19 nt, Artificial Sequence
  Description of Artificial Sequence: Synthetic oligonucleotide
uggcaaacguguucauaca

SEQ ID NO: 370191 - RNA, 19 nt, Artificial Sequence
  Description of Artificial Sequence: Synthetic oligonucleotide
agcguaguaguaagggaag

SEQ ID NO: 370192 - RNA, 19 nt, Artificial Sequence
  Description of Artificial Sequence: Synthetic oligonucleotide
gaaaccggcugcucauaac

SEQ ID NO: 370193 - RNA, 19 nt, Artificial Sequence
  Description of Artificial Sequence: Synthetic oligonucleotide
agggcgaaaucgaagcaag

SEQ ID NO: 370194 - RNA, 19 nt, Artificial Sequence
  Description of Artificial Sequence: Synthetic oligonucleotide
ccgauaaucauacuucuca

SEQ ID NO: 370195 - RNA, 19 nt, Artificial Sequence
  Description of Artificial Sequence: Synthetic oligonucleotide
ucgugauaugugcuugaau

SEQ ID NO: 370196 - RNA, 19 nt, Artificial Sequence
  Description of Artificial Sequence: Synthetic oligonucleotide
agguguauccccaccgcuc

SEQ ID NO: 370197 - RNA, 19 nt, Artificial Sequence
  Description of Artificial Sequence: Synthetic oligonucleotide
ggaucuagccucaucugag

SEQ ID NO: 370198 - RNA, 19 nt, Artificial Sequence
  Description of Artificial Sequence: Synthetic oligonucleotide
aaucgaagcaagacuccau

SEQ ID NO: 370199 - RNA, 19 nt, Artificial Sequence
  Description of Artificial Sequence: Synthetic oligonucleotide
agaaccuggagcccucgau

SEQ ID NO: 370200 - RNA, 19 nt, Artificial Sequence
  Description of Artificial Sequence: Synthetic oligonucleotide
guagucguuuguccacuug

SEQ ID NO: 370201 - RNA, 19 nt, Artificial Sequence
  Description of Artificial Sequence: Synthetic oligonucleotide
aaggacguccuccccguua

SEQ ID NO: 370202 - RNA, 19 nt, Artificial Sequence
  Description of Artificial Sequence: Synthetic oligonucleotide
guggaucagcggcauguag

SEQ ID NO: 370203 - RNA, 19 nt, Artificial Sequence
  Description of Artificial Sequence: Synthetic oligonucleotide
aaccuagucaugagacaca

SEQ ID NO: 370204 - RNA, 19 nt, Artificial Sequence
  Description of Artificial Sequence: Synthetic oligonucleotide
aagugccggaauauaaauu

SEQ ID NO: 370205 - RNA, 19 nt, Artificial Sequence
  Description of Artificial Sequence: Synthetic oligonucleotide
ccgcagugaauuuggaggg

SEQ ID NO: 370206 - RNA, 19 nt, Artificial Sequence
  Description of Artificial Sequence: Synthetic oligonucleotide
ucugcaccgggaagagaga

SEQ ID NO: 370207 - RNA, 19 nt, Artificial Sequence
  Description of Artificial Sequence: Synthetic oligonucleotide
cgaagcaagacuccaugcg

SEQ ID NO: 370208 - RNA, 19 nt, Artificial Sequence
  Description of Artificial Sequence: Synthetic oligonucleotide
uccucgguguagucaggcc

SEQ ID NO: 370209 - RNA, 19 nt, Artificial Sequence
  Description of Artificial Sequence: Synthetic oligonucleotide
acagucuggcuccaucgau

SEQ ID NO: 370210 - RNA, 19 nt, Artificial Sequence
  Description of Artificial Sequence: Synthetic oligonucleotide
ggcgaaaucgaagcaagac

SEQ ID NO: 370211 - RNA, 19 nt, Artificial Sequence
  Description of Artificial Sequence: Synthetic oligonucleotide
acgaacaauccuccaggau

SEQ ID NO: 370212 - RNA, 19 nt, Artificial Sequence
  Description of Artificial Sequence: Synthetic oligonucleotide
ugguuccaauuaaucacuu

SEQ ID NO: 370213 - RNA, 19 nt, Artificial Sequence
  Description of Artificial Sequence: Synthetic oligonucleotide
cugcugucuaagugcuagg

SEQ ID NO: 370214 - RNA, 19 nt, Artificial Sequence
  Description of Artificial Sequence: Synthetic oligonucleotide
ccauaaguggagacucugc

SEQ ID NO: 370215 - RNA, 19 nt, Artificial Sequence
  Description of Artificial Sequence: Synthetic oligonucleotide
uacuccguguugucucugu

SEQ ID NO: 370216 - RNA, 19 nt, Artificial Sequence
  Description of Artificial Sequence: Synthetic oligonucleotide
uccuaccauuguuccauaa

SEQ ID NO: 370217 - RNA, 19 nt, Artificial Sequence
  Description of Artificial Sequence: Synthetic oligonucleotide
uucgugauaugugcuugaa

SEQ ID NO: 370218 - RNA, 19 nt, Artificial Sequence
  Description of Artificial Sequence: Synthetic oligonucleotide
ggcuccaucgaugagcuga

SEQ ID NO: 370219 - RNA, 19 nt, Artificial Sequence
  Description of Artificial Sequence: Synthetic oligonucleotide
ugaccgcagugaauuugga

SEQ ID NO: 370220 - RNA, 19 nt, Artificial Sequence
  Description of Artificial Sequence: Synthetic oligonucleotide
aggacguccuccccguuau

SEQ ID NO: 370221 - RNA, 19 nt, Artificial Sequence
  Description of Artificial Sequence: Synthetic oligonucleotide
gcggcauguagccaaacca

SEQ ID NO: 370222 - RNA, 19 nt, Artificial Sequence
  Description of Artificial Sequence: Synthetic oligonucleotide
gaauaccagcauguacuuc

SEQ ID NO: 370223 - RNA, 19 nt, Artificial Sequence
  Description of Artificial Sequence: Synthetic oligonucleotide
gaaggacccaagccugcga

SEQ ID NO: 370224 - RNA, 19 nt, Artificial Sequence
  Description of Artificial Sequence: Synthetic oligonucleotide
gaguggaucagcggcaugu

SEQ ID NO: 370225 - RNA, 19 nt, Artificial Sequence
  Description of Artificial Sequence: Synthetic oligonucleotide
ggucggaaguuuucaguac

SEQ ID NO: 370226 - RNA, 19 nt, Artificial Sequence
  Description of Artificial Sequence: Synthetic oligonucleotide
gguuccaauuaaucacuuc

SEQ ID NO: 370227 - RNA, 19 nt, Artificial Sequence
  Description of Artificial Sequence: Synthetic oligonucleotide
guagaaccuggagcccucg

SEQ ID NO: 370228 - RNA, 19 nt, Artificial Sequence
  Description of Artificial Sequence: Synthetic oligonucleotide
ggcaacucccauccauugc

SEQ ID NO: 370229 - RNA, 19 nt, Artificial Sequence
  Description of Artificial Sequence: Synthetic oligonucleotide
uucuugcaagggcgaaauc

SEQ ID NO: 370230 - RNA, 19 nt, Artificial Sequence
  Description of Artificial Sequence: Synthetic oligonucleotide
cacgaacaauccuccagga

SEQ ID NO: 370231 - RNA, 19 nt, Artificial Sequence
  Description of Artificial Sequence: Synthetic oligonucleotide
gacgggaucuagccucauc

SEQ ID NO: 370232 - RNA, 19 nt, Artificial Sequence
  Description of Artificial Sequence: Synthetic oligonucleotide
agaccugauuguagaagga

SEQ ID NO: 370233 - RNA, 19 nt, Artificial Sequence
  Description of Artificial Sequence: Synthetic oligonucleotide
ucucaucgccgaugacggc

SEQ ID NO: 370234 - RNA, 19 nt, Artificial Sequence
  Description of Artificial Sequence: Synthetic oligonucleotide
ugcgaccacgaggaaccag

SEQ ID NO: 370235 - RNA, 19 nt, Artificial Sequence
  Description of Artificial Sequence: Synthetic oligonucleotide
gcgaaaucgaagcaagacu

SEQ ID NO: 370236 - RNA, 19 nt, Artificial Sequence
  Description of Artificial Sequence: Synthetic oligonucleotide
guacagguagugauaauau

SEQ ID NO: 370237 - RNA, 19 nt, Artificial Sequence
  Description of Artificial Sequence: Synthetic oligonucleotide
caagggcgaaaucgaagca

SEQ ID NO: 370238 - RNA, 19 nt, Artificial Sequence
  Description of Artificial Sequence: Synthetic oligonucleotide
cugcugcggguacacguag

SEQ ID NO: 370239 - RNA, 19 nt, Artificial Sequence
  Description of Artificial Sequence: Synthetic oligonucleotide
aguagucguuuguccacuu

SEQ ID NO: 370240 - RNA, 19 nt, Artificial Sequence
  Description of Artificial Sequence: Synthetic oligonucleotide
gccggaauauaaauuaaaa

SEQ ID NO: 370241 - RNA, 19 nt, Artificial Sequence
  Description of Artificial Sequence: Synthetic oligonucleotide
cucgguguagucaggccaa

SEQ ID NO: 370242 - RNA, 19 nt, Artificial Sequence
  Description of Artificial Sequence: Synthetic oligonucleotide
gaagcacgggaagucuguc

SEQ ID NO: 370243 - RNA, 19 nt, Artificial Sequence
  Description of Artificial Sequence: Synthetic oligonucleotide
gcaacucccauccauugcu

SEQ ID NO: 370244 - RNA, 19 nt, Artificial Sequence
  Description of Artificial Sequence: Synthetic oligonucleotide
cacgagaagcuucaacacu

SEQ ID NO: 370245 - RNA, 19 nt, Artificial Sequence
  Description of Artificial Sequence: Synthetic oligonucleotide
uggagaccugguccuuaaa

SEQ ID NO: 370246 - RNA, 19 nt, Artificial Sequence
  Description of Artificial Sequence: Synthetic oligonucleotide
aggugauaacuggucucug

SEQ ID NO: 370247 - RNA, 19 nt, Artificial Sequence
  Description of Artificial Sequence: Synthetic oligonucleotide
gagcacgaacaauccucca

SEQ ID NO: 370248 - RNA, 19 nt, Artificial Sequence
  Description of Artificial Sequence: Synthetic oligonucleotide
ucgguguagucaggccaag

SEQ ID NO: 370249 - RNA, 19 nt, Artificial Sequence
  Description of Artificial Sequence: Synthetic oligonucleotide
uguauccccaccgcuccuu

SEQ ID NO: 370250 - RNA, 19 nt, Artificial Sequence
  Description of Artificial Sequence: Synthetic oligonucleotide
ugguaacuuucggcgauuu

SEQ ID NO: 370251 - RNA, 19 nt, Artificial Sequence
  Description of Artificial Sequence: Synthetic oligonucleotide
cacgaggaaccagacagaa

SEQ ID NO: 370252 - RNA, 19 nt, Artificial Sequence
  Description of Artificial Sequence: Synthetic oligonucleotide
ggugauaacuggucucugu

SEQ ID NO: 370253 - RNA, 19 nt, Artificial Sequence
  Description of Artificial Sequence: Synthetic oligonucleotide
ucacagcgagaguccuugu

SEQ ID NO: 370254 - RNA, 19 nt, Artificial Sequence
  Description of Artificial Sequence: Synthetic oligonucleotide
cgagaagcuucaacacugg

SEQ ID NO: 370255 - RNA, 19 nt, Artificial Sequence
  Description of Artificial Sequence: Synthetic oligonucleotide
ccuggccgaugucaaaccc

SEQ ID NO: 370256 - RNA, 19 nt, Artificial Sequence
  Description of Artificial Sequence: Synthetic oligonucleotide
cgcuccuuagaguuauccc

SEQ ID NO: 370257 - RNA, 19 nt, Artificial Sequence
  Description of Artificial Sequence: Synthetic oligonucleotide
uugguaacuuucggcgauu

SEQ ID NO: 370258 - RNA, 19 nt, Artificial Sequence
  Description of Artificial Sequence: Synthetic oligonucleotide
caaagaggcacgccuggcu

SEQ ID NO: 370259 - RNA, 19 nt, Artificial Sequence
  Description of Artificial Sequence: Synthetic oligonucleotide
uccccguuauggacaugau

SEQ ID NO: 370260 - RNA, 19 nt, Artificial Sequence
  Description of Artificial Sequence: Synthetic oligonucleotide
aggccaagugccggaauau

SEQ ID NO: 370261 - RNA, 19 nt, Artificial Sequence
  Description of Artificial Sequence: Synthetic oligonucleotide
cucccagguaagaggaaua

SEQ ID NO: 370262 - RNA, 19 nt, Artificial Sequence
  Description of Artificial Sequence: Synthetic oligonucleotide
gccgcuagaauguuuuggu

SEQ ID NO: 370263 - RNA, 19 nt, Artificial Sequence
  Description of Artificial Sequence: Synthetic oligonucleotide
gugccggaauauaaauuaa

SEQ ID NO: 370264 - RNA, 19 nt, Artificial Sequence
  Description of Artificial Sequence: Synthetic oligonucleotide
aucucaaauugugcacaua

SEQ ID NO: 370265 - RNA, 19 nt, Artificial Sequence
  Description of Artificial Sequence: Synthetic oligonucleotide
guccgagguguagaaccug

SEQ ID NO: 370266 - RNA, 19 nt, Artificial Sequence
  Description of Artificial Sequence: Synthetic oligonucleotide
cugaugaauagaccugauu

SEQ ID NO: 370267 - RNA, 19 nt, Artificial Sequence
  Description of Artificial Sequence: Synthetic oligonucleotide
uguccacuuggagguguau

SEQ ID NO: 370268 - RNA, 19 nt, Artificial Sequence
  Description of Artificial Sequence: Synthetic oligonucleotide
gcacuuuggaucucaaauu

SEQ ID NO: 370269 - RNA, 19 nt, Artificial Sequence
  Description of Artificial Sequence: Synthetic oligonucleotide
aguggaucagcggcaugua

SEQ ID NO: 370270 - RNA, 19 nt, Artificial Sequence
  Description of Artificial Sequence: Synthetic oligonucleotide
cagcgagaguccuugugcu

SEQ ID NO: 370271 - RNA, 19 nt, Artificial Sequence
  Description of Artificial Sequence: Synthetic oligonucleotide
ccgcuccuuagaguuaucc

SEQ ID NO: 370272 - RNA, 19 nt, Artificial Sequence
  Description of Artificial Sequence: Synthetic oligonucleotide
aucgccuggccgaugucaa

SEQ ID NO: 370273 - RNA, 19 nt, Artificial Sequence
  Description of Artificial Sequence: Synthetic oligonucleotide
ucgccuggccgaugucaaa

SEQ ID NO: 370274 - RNA, 19 nt, Artificial Sequence
  Description of Artificial Sequence: Synthetic oligonucleotide
guauccccaccgcuccuua

SEQ ID NO: 370275 - RNA, 19 nt, Artificial Sequence
  Description of Artificial Sequence: Synthetic oligonucleotide
ccucacaauuggccaguug

SEQ ID NO: 370276 - RNA, 19 nt, Artificial Sequence
  Description of Artificial Sequence: Synthetic oligonucleotide
gcugucuaagugcuaggau

SEQ ID NO: 370277 - RNA, 19 nt, Artificial Sequence
  Description of Artificial Sequence: Synthetic oligonucleotide
cacacggugaaggcaaaau

SEQ ID NO: 370278 - RNA, 19 nt, Artificial Sequence
  Description of Artificial Sequence: Synthetic oligonucleotide
gagaguggaucagcggcau

SEQ ID NO: 370279 - RNA, 19 nt, Artificial Sequence
  Description of Artificial Sequence: Synthetic oligonucleotide
gccugcgaccacgaggaac

SEQ ID NO: 370280 - RNA, 19 nt, Artificial Sequence
  Description of Artificial Sequence: Synthetic oligonucleotide
cagcuugguuccaauuaau

SEQ ID NO: 370281 - RNA, 19 nt, Artificial Sequence
  Description of Artificial Sequence: Synthetic oligonucleotide
accgcuccuuagaguuauc

SEQ ID NO: 370282 - RNA, 19 nt, Artificial Sequence
  Description of Artificial Sequence: Synthetic oligonucleotide
ccacgaggaaccagacaga

SEQ ID NO: 370283 - RNA, 19 nt, Artificial Sequence
  Description of Artificial Sequence: Synthetic oligonucleotide
cccaccgcuccuuagaguu

SEQ ID NO: 370284 - RNA, 19 nt, Artificial Sequence
  Description of Artificial Sequence: Synthetic oligonucleotide
ggacaugauauaaggcauu

SEQ ID NO: 370285 - RNA, 19 nt, Artificial Sequence
  Description of Artificial Sequence: Synthetic oligonucleotide
ccguuauggacaugauaua

SEQ ID NO: 370286 - RNA, 19 nt, Artificial Sequence
  Description of Artificial Sequence: Synthetic oligonucleotide
ccauccauugcugagcauu

SEQ ID NO: 370287 - RNA, 19 nt, Artificial Sequence
  Description of Artificial Sequence: Synthetic oligonucleotide
ccuuagaaaagaggggaau

SEQ ID NO: 370288 - RNA, 19 nt, Artificial Sequence
  Description of Artificial Sequence: Synthetic oligonucleotide
gcgugcaggguaccccaca

SEQ ID NO: 370289 - RNA, 19 nt, Artificial Sequence
  Description of Artificial Sequence: Synthetic oligonucleotide
gguccgagguguagaaccu

SEQ ID NO: 370290 - RNA, 19 nt, Artificial Sequence
  Description of Artificial Sequence: Synthetic oligonucleotide
gguaacuuucggcgauuuu

SEQ ID NO: 370291 - RNA, 19 nt, Artificial Sequence
  Description of Artificial Sequence: Synthetic oligonucleotide
gggguccgagguguagaac

SEQ ID NO: 370292 - RNA, 19 nt, Artificial Sequence
  Description of Artificial Sequence: Synthetic oligonucleotide
ccgcuagaauguuuuggua

SEQ ID NO: 370293 - RNA, 19 nt, Artificial Sequence
  Description of Artificial Sequence: Synthetic oligonucleotide
cgccuggccgaugucaaac

SEQ ID NO: 370294 - RNA, 19 nt, Artificial Sequence
  Description of Artificial Sequence: Synthetic oligonucleotide
caaaccccacguccucggu

SEQ ID NO: 370295 - RNA, 19 nt, Artificial Sequence
  Description of Artificial Sequence: Synthetic oligonucleotide
caccgcuccuuagaguuau

SEQ ID NO: 370296 - RNA, 19 nt, Artificial Sequence
  Description of Artificial Sequence: Synthetic oligonucleotide
gcguaguaguaagggaagu

SEQ ID NO: 370297 - RNA, 19 nt, Artificial Sequence
  Description of Artificial Sequence: Synthetic oligonucleotide
ccccguuauggacaugaua

SEQ ID NO: 370298 - RNA, 19 nt, Artificial Sequence
  Description of Artificial Sequence: Synthetic oligonucleotide
cacgggaagucugucccau

SEQ ID NO: 370299 - RNA, 19 nt, Artificial Sequence
  Description of Artificial Sequence: Synthetic oligonucleotide
ggccaagugccggaauaua

SEQ ID NO: 370300 - RNA, 19 nt, Artificial Sequence
  Description of Artificial Sequence: Synthetic oligonucleotide
gaaggacguccuccccguu

SEQ ID NO: 370301 - RNA, 19 nt, Artificial Sequence
  Description of Artificial Sequence: Synthetic oligonucleotide
ccguucaaugucucuguau

SEQ ID NO: 370302 - RNA, 19 nt, Artificial Sequence
  Description of Artificial Sequence: Synthetic oligonucleotide
cagccgaguucuucauuuu

SEQ ID NO: 370303 - RNA, 19 nt, Artificial Sequence
  Description of Artificial Sequence: Synthetic oligonucleotide
ggaugaccgcagugaauuu

SEQ ID NO: 370304 - RNA, 19 nt, Artificial Sequence
  Description of Artificial Sequence: Synthetic oligonucleotide
ccgggaagagagagcagcu

SEQ ID NO: 370305 - RNA, 19 nt, Artificial Sequence
  Description of Artificial Sequence: Synthetic oligonucleotide
ccguguugucucugucaca

SEQ ID NO: 370306 - RNA, 19 nt, Artificial Sequence
  Description of Artificial Sequence: Synthetic oligonucleotide
cugcgaccacgaggaacca

SEQ ID NO: 370307 - RNA, 19 nt, Artificial Sequence
  Description of Artificial Sequence: Synthetic oligonucleotide
ccgugaugauauugucaua

SEQ ID NO: 370308 - RNA, 19 nt, Artificial Sequence
  Description of Artificial Sequence: Synthetic oligonucleotide
cccagguaagaggaauacu

SEQ ID NO: 370309 - RNA, 19 nt, Artificial Sequence
  Description of Artificial Sequence: Synthetic oligonucleotide
ccaccgcuccuuagaguua

SEQ ID NO: 370310 - RNA, 19 nt, Artificial Sequence
  Description of Artificial Sequence: Synthetic oligonucleotide
ccucgauggccgcuagaau

SEQ ID NO: 370311 - RNA, 19 nt, Artificial Sequence
  Description of Artificial Sequence: Synthetic oligonucleotide
cgguguagucaggccaagu

SEQ ID NO: 370312 - RNA, 19 nt, Artificial Sequence
  Description of Artificial Sequence: Synthetic oligonucleotide
aagaccauagcacacucgg

SEQ ID NO: 370313 - RNA, 19 nt, Artificial Sequence
  Description of Artificial Sequence: Synthetic oligonucleotide
  modified_base (3)..(3): a, c, u, g, unknown or other
agngucaaugaguaggcgc

SEQ ID NO: 370314 - RNA, 19 nt, Artificial Sequence
  Description of Artificial Sequence: Synthetic oligonucleotide
augaguaccaguccgcugc

SEQ ID NO: 370315 - RNA, 19 nt, Artificial Sequence
  Description of Artificial Sequence: Synthetic oligonucleotide
aaauguauagauaaccugu

SEQ ID NO: 370316 - RNA, 19 nt, Artificial Sequence
  Description of Artificial Sequence: Synthetic oligonucleotide
ugaaauguauagauaaccu

SEQ ID NO: 370317 - RNA, 19 nt, Artificial Sequence
  Description of Artificial Sequence: Synthetic oligonucleotide
auacuuucggaucuucugc

SEQ ID NO: 370318 - RNA, 19 nt, Artificial Sequence
  Description of Artificial Sequence: Synthetic oligonucleotide
ucuaucauccaacauuuga

SEQ ID NO: 370319 - RNA, 19 nt, Artificial Sequence
  Description of Artificial Sequence: Synthetic oligonucleotide
  modified_base (6)..(6): a, c, u, g, unknown or other
ugcagngucaaugaguagg

SEQ ID NO: 370320 - RNA, 19 nt, Artificial Sequence
  Description of Artificial Sequence: Synthetic oligonucleotide
ucuuuuaggauccgcaucu

SEQ ID NO: 370321 - RNA, 19 nt, Artificial Sequence
  Description of Artificial Sequence: Synthetic oligonucleotide
aauggauuccaauggguug

SEQ ID NO: 370322 - RNA, 19 nt, Artificial Sequence
  Description of Artificial Sequence: Synthetic oligonucleotide
uccggguacuuccagaugg

SEQ ID NO: 370323 - RNA, 19 nt, Artificial Sequence
  Description of Artificial Sequence: Synthetic oligonucleotide
uguauagauaaccugugau

SEQ ID NO: 370324 - RNA, 19 nt, Artificial Sequence
  Description of Artificial Sequence: Synthetic oligonucleotide
uugauuaggauuccaacaa

SEQ ID NO: 370325 - RNA, 19 nt, Artificial Sequence
  Description of Artificial Sequence: Synthetic oligonucleotide
aacacaucggagccagccc

SEQ ID NO: 370326 - RNA, 19 nt, Artificial Sequence
  Description of Artificial Sequence: Synthetic oligonucleotide
gacgcuaaggucauggagg

SEQ ID NO: 370327 - RNA, 19 nt, Artificial Sequence
  Description of Artificial Sequence: Synthetic oligonucleotide
cauaaucauguagacaucg

SEQ ID NO: 370328 - RNA, 19 nt, Artificial Sequence
  Description of Artificial Sequence: Synthetic oligonucleotide
gugaaugaguaccaguccg

SEQ ID NO: 370329 - RNA, 19 nt, Artificial Sequence
  Description of Artificial Sequence: Synthetic oligonucleotide
ucagaaucuaucauccaac

SEQ ID NO: 370330 - RNA, 19 nt, Artificial Sequence
  Description of Artificial Sequence: Synthetic oligonucleotide
ugcgggagaauucugacac

SEQ ID NO: 370331 - RNA, 19 nt, Artificial Sequence
  Description of Artificial Sequence: Synthetic oligonucleotide
uacgcauuguauacuuucg

SEQ ID NO: 370332 - RNA, 19 nt, Artificial Sequence
  Description of Artificial Sequence: Synthetic oligonucleotide
uucagaaucuaucauccaa

SEQ ID NO: 370333 - RNA, 19 nt, Artificial Sequence
  Description of Artificial Sequence: Synthetic oligonucleotide
guugcgaugauggacgucg

SEQ ID NO: 370334 - RNA, 19 nt, Artificial Sequence
  Description of Artificial Sequence: Synthetic oligonucleotide
gauuaggauuccaacaacc

SEQ ID NO: 370335 - RNA, 19 nt, Artificial Sequence
  Description of Artificial Sequence: Synthetic oligonucleotide
gagaauucguccccgaaug

SEQ ID NO: 370336 - RNA, 19 nt, Artificial Sequence
  Description of Artificial Sequence: Synthetic oligonucleotide
auacggagaacccacacca

SEQ ID NO: 370337 - RNA, 19 nt, Artificial Sequence
  Description of Artificial Sequence: Synthetic oligonucleotide
gaagacgcuaaggucaugg

SEQ ID NO: 370338 - RNA, 19 nt, Artificial Sequence
  Description of Artificial Sequence: Synthetic oligonucleotide
uuaggauuccaacaaccac

SEQ ID NO: 370339 - RNA, 19 nt, Artificial Sequence
  Description of Artificial Sequence: Synthetic oligonucleotide
gaccauagcacacucgggc

SEQ ID NO: 370340 - RNA, 19 nt, Artificial Sequence
  Description of Artificial Sequence: Synthetic oligonucleotide
acucuugaccagcacauuc

SEQ ID NO: 370341 - RNA, 19 nt, Artificial Sequence
  Description of Artificial Sequence: Synthetic oligonucleotide
aauguauagauaaccugug

SEQ ID NO: 370342 - RNA, 19 nt, Artificial Sequence
  Description of Artificial Sequence: Synthetic oligonucleotide
acacaucggagccagcccc

SEQ ID NO: 370343 - RNA, 19 nt, Artificial Sequence
  Description of Artificial Sequence: Synthetic oligonucleotide
uuagcucagucucuuuuag

SEQ ID NO: 370344 - RNA, 19 nt, Artificial Sequence
  Description of Artificial Sequence: Synthetic oligonucleotide
caucauggagaauucgucc

SEQ ID NO: 370345 - RNA, 19 nt, Artificial Sequence
  Description of Artificial Sequence: Synthetic oligonucleotide
uucaggggagcaaugccgg

SEQ ID NO: 370346 - RNA, 19 nt, Artificial Sequence
  Description of Artificial Sequence: Synthetic oligonucleotide
ucgggcgacauucagaauc

SEQ ID NO: 370347 - RNA, 19 nt, Artificial Sequence
  Description of Artificial Sequence: Synthetic oligonucleotide
ugaacacaccaguugagca

SEQ ID NO: 370348 - RNA, 19 nt, Artificial Sequence
  Description of Artificial Sequence: Synthetic oligonucleotide
gaacacaccaguugagcag

SEQ ID NO: 370349 - RNA, 19 nt, Artificial Sequence
  Description of Artificial Sequence: Synthetic oligonucleotide
gauuccaauggguugggac

SEQ ID NO: 370350 - RNA, 19 nt, Artificial Sequence
  Description of Artificial Sequence: Synthetic oligonucleotide
aagucagguaucucccggg

SEQ ID NO: 370351 - RNA, 19 nt, Artificial Sequence
  Description of Artificial Sequence: Synthetic oligonucleotide
cauuguauacuuucggauc

SEQ ID NO: 370352 - RNA, 19 nt, Artificial Sequence
  Description of Artificial Sequence: Synthetic oligonucleotide
aauguggccucacacgggu

SEQ ID NO: 370353 - RNA, 19 nt, Artificial Sequence
  Description of Artificial Sequence: Synthetic oligonucleotide
cuucaggggagcaaugccg

SEQ ID NO: 370354 - RNA, 19 nt, Artificial Sequence
  Description of Artificial Sequence: Synthetic oligonucleotide
ugaaugaguaccaguccgc

SEQ ID NO: 370355 - RNA, 19 nt, Artificial Sequence
  Description of Artificial Sequence: Synthetic oligonucleotide
guauagauaaccugugauc

SEQ ID NO: 370356 - RNA, 19 nt, Artificial Sequence
  Description of Artificial Sequence: Synthetic oligonucleotide
agcucagucucuuuuagga

SEQ ID NO: 370357 - RNA, 19 nt, Artificial Sequence
  Description of Artificial Sequence: Synthetic oligonucleotide
uaaucauguagacaucgau

SEQ ID NO: 370358 - RNA, 19 nt, Artificial Sequence
  Description of Artificial Sequence: Synthetic oligonucleotide
acggagaacccacaccagc

SEQ ID NO: 370359 - RNA, 19 nt, Artificial Sequence
  Description of Artificial Sequence: Synthetic oligonucleotide
acgcuaaggucauggaggc

SEQ ID NO: 370360 - RNA, 19 nt, Artificial Sequence
  Description of Artificial Sequence: Synthetic oligonucleotide
  modified_base (2)..(2): a, c, u, g, unknown or other
gngucaaugaguaggcgcc

SEQ ID NO: 370361 - RNA, 19 nt, Artificial Sequence
  Description of Artificial Sequence: Synthetic oligonucleotide
uccccgaaugacucgaagg

SEQ ID NO: 370362 - RNA, 19 nt, Artificial Sequence
  Description of Artificial Sequence: Synthetic oligonucleotide
guugcggugaaugaguacc

SEQ ID NO: 370363 - RNA, 19 nt, Artificial Sequence
  Description of Artificial Sequence: Synthetic oligonucleotide
uuuguuagcuuuaggggau

SEQ ID NO: 370364 - RNA, 19 nt, Artificial Sequence
  Description of Artificial Sequence: Synthetic oligonucleotide
uuaggauccgcaucugagc

SEQ ID NO: 370365 - RNA, 19 nt, Artificial Sequence
  Description of Artificial Sequence: Synthetic oligonucleotide
agugccgaaagcuccggac

SEQ ID NO: 370366 - RNA, 19 nt, Artificial Sequence
  Description of Artificial Sequence: Synthetic oligonucleotide
ucgauagugcagauuggag

SEQ ID NO: 370367 - RNA, 19 nt, Artificial Sequence
  Description of Artificial Sequence: Synthetic oligonucleotide
auagauaaccugugaucuc

SEQ ID NO: 370368 - RNA, 19 nt, Artificial Sequence
  Description of Artificial Sequence: Synthetic oligonucleotide
acucugaugggugaaccgc

SEQ ID NO: 370369 - RNA, 19 nt, Artificial Sequence
  Description of Artificial Sequence: Synthetic oligonucleotide
aagcgucuuugacaacccc

SEQ ID NO: 370370 - RNA, 19 nt, Artificial Sequence
  Description of Artificial Sequence: Synthetic oligonucleotide
auggauuccaauggguugg

SEQ ID NO: 370371 - RNA, 19 nt, Artificial Sequence
  Description of Artificial Sequence: Synthetic oligonucleotide
gaaagcuccggacccaagc

SEQ ID NO: 370372 - RNA, 19 nt, Artificial Sequence
  Description of Artificial Sequence: Synthetic oligonucleotide
ccaucugggauccagaugc

SEQ ID NO: 370373 - RNA, 19 nt, Artificial Sequence
  Description of Artificial Sequence: Synthetic oligonucleotide
uaacgugggauccucgcug

SEQ ID NO: 370374 - RNA, 19 nt, Artificial Sequence
  Description of Artificial Sequence: Synthetic oligonucleotide
acauacggagaacccacac

SEQ ID NO: 370375 - RNA, 19 nt, Artificial Sequence
  Description of Artificial Sequence: Synthetic oligonucleotide
aggauuccaacaaccaccc

SEQ ID NO: 370376 - RNA, 19 nt, Artificial Sequence
  Description of Artificial Sequence: Synthetic oligonucleotide
agcaacguagccgucaguc

SEQ ID NO: 370377 - RNA, 19 nt, Artificial Sequence
  Description of Artificial Sequence: Synthetic oligonucleotide
acacggguacauccaagcc

SEQ ID NO: 370378 - RNA, 19 nt, Artificial Sequence
  Description of Artificial Sequence: Synthetic oligonucleotide
ucugaugggugaaccgccg

SEQ ID NO: 370379 - RNA, 19 nt, Artificial Sequence
  Description of Artificial Sequence: Synthetic oligonucleotide
ucccuucaaagguacuugg

SEQ ID NO: 370380 - RNA, 19 nt, Artificial Sequence
  Description of Artificial Sequence: Synthetic oligonucleotide
uacuuucggaucuucugcc

SEQ ID NO: 370381 - RNA, 19 nt, Artificial Sequence
  Description of Artificial Sequence: Synthetic oligonucleotide
cugguucacauauucgggc

SEQ ID NO: 370382 - RNA, 19 nt, Artificial Sequence
  Description of Artificial Sequence: Synthetic oligonucleotide
guagccgucagucucggug

SEQ ID NO: 370383 - RNA, 19 nt, Artificial Sequence
  Description of Artificial Sequence: Synthetic oligonucleotide
uguagacaucgauagugca

SEQ ID NO: 370384 - RNA, 19 nt, Artificial Sequence
  Description of Artificial Sequence: Synthetic oligonucleotide
cacaccauagcuccacacg

SEQ ID NO: 370385 - RNA, 19 nt, Artificial Sequence
  Description of Artificial Sequence: Synthetic oligonucleotide
acgcauuguauacuuucgg

SEQ ID NO: 370386 - RNA, 19 nt, Artificial Sequence
  Description of Artificial Sequence: Synthetic oligonucleotide
gucuuucuagaguagcacc

SEQ ID NO: 370387 - RNA, 19 nt, Artificial Sequence
  Description of Artificial Sequence: Synthetic oligonucleotide
cuacgcauuguauacuuuc

SEQ ID NO: 370388 - RNA, 19 nt, Artificial Sequence
  Description of Artificial Sequence: Synthetic oligonucleotide
aaucucgggcgacauucag

SEQ ID NO: 370389 - RNA, 19 nt, Artificial Sequence
  Description of Artificial Sequence: Synthetic oligonucleotide
cacggguacauccaagccc

SEQ ID NO: 370390 - RNA, 19 nt, Artificial Sequence
  Description of Artificial Sequence: Synthetic oligonucleotide
uaggggucccuucaaaggu

SEQ ID NO: 370391 - RNA, 19 nt, Artificial Sequence
  Description of Artificial Sequence: Synthetic oligonucleotide
aaguacucgggguuuucca

SEQ ID NO: 370392 - RNA, 19 nt, Artificial Sequence
  Description of Artificial Sequence: Synthetic oligonucleotide
ggaggcgggacacauacgg

SEQ ID NO: 370393 - RNA, 19 nt, Artificial Sequence
  Description of Artificial Sequence: Synthetic oligonucleotide
cuccaauggguccuggucc

SEQ ID NO: 370394 - RNA, 19 nt, Artificial Sequence
  Description of Artificial Sequence: Synthetic oligonucleotide
cacauucuccccaucuggg

SEQ ID NO: 370395 - RNA, 19 nt, Artificial Sequence
  Description of Artificial Sequence: Synthetic oligonucleotide
acacauacggagaacccac

SEQ ID NO: 370396 - RNA, 19 nt, Artificial Sequence
  Description of Artificial Sequence: Synthetic oligonucleotide
  modified_base (15)..(15): a, c, u, g, unknown or other
aaagcagagacgggnguug

SEQ ID NO: 370397 - RNA, 19 nt, Artificial Sequence
  Description of Artificial Sequence: Synthetic oligonucleotide
cauacggagaacccacacc

SEQ ID NO: 370398 - RNA, 19 nt, Artificial Sequence
  Description of Artificial Sequence: Synthetic oligonucleotide
uccgcauccggguacuucc

SEQ ID NO: 370399 - RNA, 19 nt, Artificial Sequence
  Description of Artificial Sequence: Synthetic oligonucleotide
gaugggugaaccgccgucg

SEQ ID NO: 370400 - RNA, 19 nt, Artificial Sequence
  Description of Artificial Sequence: Synthetic oligonucleotide
augaguaggcgccaucaug

SEQ ID NO: 370401 - RNA, 19 nt, Artificial Sequence
  Description of Artificial Sequence: Synthetic oligonucleotide
cacacggguacauccaagc

SEQ ID NO: 370402 - RNA, 19 nt, Artificial Sequence
  Description of Artificial Sequence: Synthetic oligonucleotide
aauucguccccgaaugacu

SEQ ID NO: 370403 - RNA, 19 nt, Artificial Sequence
  Description of Artificial Sequence: Synthetic oligonucleotide
auaagguuuggccccaaaa

SEQ ID NO: 370404 - RNA, 19 nt, Artificial Sequence
  Description of Artificial Sequence: Synthetic oligonucleotide
uguaccgcuguagagggcu

SEQ ID NO: 370405 - RNA, 19 nt, Artificial Sequence
  Description of Artificial Sequence: Synthetic oligonucleotide
  modified_base (8)..(8): a, c, u, g, unknown or other
cuugcagngucaaugagua

SEQ ID NO: 370406 - RNA, 19 nt, Artificial Sequence
  Description of Artificial Sequence: Synthetic oligonucleotide
auguauagauaaccuguga

SEQ ID NO: 370407 - RNA, 19 nt, Artificial Sequence
  Description of Artificial Sequence: Synthetic oligonucleotide
ugguucacauauucgggcu

SEQ ID NO: 370408 - RNA, 19 nt, Artificial Sequence
  Description of Artificial Sequence: Synthetic oligonucleotide
auuaggauuccaacaacca

SEQ ID NO: 370409 - RNA, 19 nt, Artificial Sequence
  Description of Artificial Sequence: Synthetic oligonucleotide
uuuaggggauguguuuucc

SEQ ID NO: 370410 - RNA, 19 nt, Artificial Sequence
  Description of Artificial Sequence: Synthetic oligonucleotide
ucuuccgcauccaccaggu

SEQ ID NO: 370411 - RNA, 19 nt, Artificial Sequence
  Description of Artificial Sequence: Synthetic oligonucleotide
gaaggcgggagaagggugg

SEQ ID NO: 370412 - RNA, 19 nt, Artificial Sequence
  Description of Artificial Sequence: Synthetic oligonucleotide
ugccgaaagcuccggaccc

SEQ ID NO: 370413 - RNA, 19 nt, Artificial Sequence
  Description of Artificial Sequence: Synthetic oligonucleotide
uccaacaaccaccccuaug

SEQ ID NO: 370414 - RNA, 19 nt, Artificial Sequence
  Description of Artificial Sequence: Synthetic oligonucleotide
accccuaugaccaggaaca

SEQ ID NO: 370415 - RNA, 19 nt, Artificial Sequence
  Description of Artificial Sequence: Synthetic oligonucleotide
acauuugaccauaaucaug

SEQ ID NO: 370416 - RNA, 19 nt, Artificial Sequence
  Description of Artificial Sequence: Synthetic oligonucleotide
aaauguggccucacacggg

SEQ ID NO: 370417 - RNA, 19 nt, Artificial Sequence
  Description of Artificial Sequence: Synthetic oligonucleotide
ucgaagaauggauuccaau

SEQ ID NO: 370418 - RNA, 19 nt, Artificial Sequence
  Description of Artificial Sequence: Synthetic oligonucleotide
guucacauauucgggcugg

SEQ ID NO: 370419 - RNA, 19 nt, Artificial Sequence
  Description of Artificial Sequence: Synthetic oligonucleotide
agaaucuaucauccaacau

SEQ ID NO: 370420 - RNA, 19 nt, Artificial Sequence
  Description of Artificial Sequence: Synthetic oligonucleotide
agucacaccauagcuccac

SEQ ID NO: 370421 - RNA, 19 nt, Artificial Sequence
  Description of Artificial Sequence: Synthetic oligonucleotide
uuguagugggcaagguaca

SEQ ID NO: 370422 - RNA, 19 nt, Artificial Sequence
  Description of Artificial Sequence: Synthetic oligonucleotide
ucgggcacaggacuugcug

SEQ ID NO: 370423 - RNA, 19 nt, Artificial Sequence
  Description of Artificial Sequence: Synthetic oligonucleotide
aagacgcuaaggucaugga

SEQ ID NO: 370424 - RNA, 19 nt, Artificial Sequence
  Description of Artificial Sequence: Synthetic oligonucleotide
cucugaugggugaaccgcc

SEQ ID NO: 370425 - RNA, 19 nt, Artificial Sequence
  Description of Artificial Sequence: Synthetic oligonucleotide
ucacacggguacauccaag

SEQ ID NO: 370426 - RNA, 19 nt, Artificial Sequence
  Description of Artificial Sequence: Synthetic oligonucleotide
aguaggcgccaucauggag

SEQ ID NO: 370427 - RNA, 19 nt, Artificial Sequence
  Description of Artificial Sequence: Synthetic oligonucleotide
aacgugggauccucgcugu

SEQ ID NO: 370428 - RNA, 19 nt, Artificial Sequence
  Description of Artificial Sequence: Synthetic oligonucleotide
accaucaaacacaucggag

SEQ ID NO: 370429 - RNA, 19 nt, Artificial Sequence
  Description of Artificial Sequence: Synthetic oligonucleotide
cugaacacaccaguugagc

SEQ ID NO: 370430 - RNA, 19 nt, Artificial Sequence
  Description of Artificial Sequence: Synthetic oligonucleotide
gaauucguccccgaaugac

SEQ ID NO: 370431 - RNA, 19 nt, Artificial Sequence
  Description of Artificial Sequence: Synthetic oligonucleotide
cuugggucuuucuagagua

SEQ ID NO: 370432 - RNA, 19 nt, Artificial Sequence
  Description of Artificial Sequence: Synthetic oligonucleotide
aagcccaaguacucagggu

SEQ ID NO: 370433 - RNA, 19 nt, Artificial Sequence
  Description of Artificial Sequence: Synthetic oligonucleotide
gugcacgagccguacaucc

SEQ ID NO: 370434 - RNA, 19 nt, Artificial Sequence
  Description of Artificial Sequence: Synthetic oligonucleotide
gacaaccccauucuuccca

SEQ ID NO: 370435 - RNA, 19 nt, Artificial Sequence
  Description of Artificial Sequence: Synthetic oligonucleotide
cgauagugcagauuggagg

SEQ ID NO: 370436 - RNA, 19 nt, Artificial Sequence
  Description of Artificial Sequence: Synthetic oligonucleotide
cgaagaauggauuccaaug

SEQ ID NO: 370437 - RNA, 19 nt, Artificial Sequence
  Description of Artificial Sequence: Synthetic oligonucleotide
acaaccccauucuucccag

SEQ ID NO: 370438 - RNA, 19 nt, Artificial Sequence
  Description of Artificial Sequence: Synthetic oligonucleotide
auucguccccgaaugacuc

SEQ ID NO: 370439 - RNA, 19 nt, Artificial Sequence
  Description of Artificial Sequence: Synthetic oligonucleotide
agcuccggacccaagcacc

SEQ ID NO: 370440 - RNA, 19 nt, Artificial Sequence
  Description of Artificial Sequence: Synthetic oligonucleotide
caacguagccgucagucuc

SEQ ID NO: 370441 - RNA, 19 nt, Artificial Sequence
  Description of Artificial Sequence: Synthetic oligonucleotide
  modified_base (7)..(7): a, c, u, g, unknown or other
uugcagngucaaugaguag

SEQ ID NO: 370442 - RNA, 19 nt, Artificial Sequence
  Description of Artificial Sequence: Synthetic oligonucleotide
caguaauagagguugucaa

SEQ ID NO: 370443 - RNA, 19 nt, Artificial Sequence
  Description of Artificial Sequence: Synthetic oligonucleotide
ugggauccucgcuguaccg

SEQ ID NO: 370444 - RNA, 19 nt, Artificial Sequence
  Description of Artificial Sequence: Synthetic oligonucleotide
caggggagcaacguagccg

SEQ ID NO: 370445 - RNA, 19 nt, Artificial Sequence
  Description of Artificial Sequence: Synthetic oligonucleotide
uucguccccgaaugacucg

SEQ ID NO: 370446 - RNA, 19 nt, Artificial Sequence
  Description of Artificial Sequence: Synthetic oligonucleotide
ugaaccgccgucgaagaau

SEQ ID NO: 370447 - RNA, 19 nt, Artificial Sequence
  Description of Artificial Sequence: Synthetic oligonucleotide
aacgcagccccaaccagug

SEQ ID NO: 370448 - RNA, 19 nt, Artificial Sequence
  Description of Artificial Sequence: Synthetic oligonucleotide
ugccaagaccauagcacac

SEQ ID NO: 370449 - RNA, 19 nt, Artificial Sequence
  Description of Artificial Sequence: Synthetic oligonucleotide
ugaugggugaaccgccguc

SEQ ID NO: 370450 - RNA, 19 nt, Artificial Sequence
  Description of Artificial Sequence: Synthetic oligonucleotide
agaauucguccccgaauga

SEQ ID NO: 370451 - RNA, 19 nt, Artificial Sequence
  Description of Artificial Sequence: Synthetic oligonucleotide
guaggcgccaucauggaga

SEQ ID NO: 370452 - RNA, 19 nt, Artificial Sequence
  Description of Artificial Sequence: Synthetic oligonucleotide
ccaacaaccaccccuauga

SEQ ID NO: 370453 - RNA, 19 nt, Artificial Sequence
  Description of Artificial Sequence: Synthetic oligonucleotide
auggacgucgcugggcugg

SEQ ID NO: 370454 - RNA, 19 nt, Artificial Sequence
  Description of Artificial Sequence: Synthetic oligonucleotide
ggagcaaugccggaggcag

SEQ ID NO: 370455 - RNA, 19 nt, Artificial Sequence
  Description of Artificial Sequence: Synthetic oligonucleotide
ccguacauccuccagguag

SEQ ID NO: 370456 - RNA, 19 nt, Artificial Sequence
  Description of Artificial Sequence: Synthetic oligonucleotide
gugccgaaagcuccggacc

SEQ ID NO: 370457 - RNA, 19 nt, Artificial Sequence
  Description of Artificial Sequence: Synthetic oligonucleotide
acggcuggcauaugcccuc

SEQ ID NO: 370458 - RNA, 19 nt, Artificial Sequence
  Description of Artificial Sequence: Synthetic oligonucleotide
caccccuaugaccaggaac

SEQ ID NO: 370459 - RNA, 19 nt, Artificial Sequence
  Description of Artificial Sequence: Synthetic oligonucleotide
  modified_base (6)..(6): a, c, u, g, unknown or other
acgggnguugcggugaaug

SEQ ID NO: 370460 - RNA, 19 nt, Artificial Sequence
  Description of Artificial Sequence: Synthetic oligonucleotide
uggaagacgcuaaggucau

SEQ ID NO: 370461 - RNA, 19 nt, Artificial Sequence
  Description of Artificial Sequence: Synthetic oligonucleotide
ugaggcaagcguucucccu

SEQ ID NO: 370462 - RNA, 19 nt, Artificial Sequence
  Description of Artificial Sequence: Synthetic oligonucleotide
gugggauccucgcuguacc

SEQ ID NO: 370463 - RNA, 19 nt, Artificial Sequence
  Description of Artificial Sequence: Synthetic oligonucleotide
ucgcuguaccgcuguagag

SEQ ID NO: 370464 - RNA, 19 nt, Artificial Sequence
  Description of Artificial Sequence: Synthetic oligonucleotide
acggguacauccaagccca

SEQ ID NO: 370465 - RNA, 19 nt, Artificial Sequence
  Description of Artificial Sequence: Synthetic oligonucleotide
gaaccgccgucgaagaaug

SEQ ID NO: 370466 - RNA, 19 nt, Artificial Sequence
  Description of Artificial Sequence: Synthetic oligonucleotide
ggaaucucgggcgacauuc

SEQ ID NO: 370467 - RNA, 19 nt, Artificial Sequence
  Description of Artificial Sequence: Synthetic oligonucleotide
uucacauauucgggcuggg

SEQ ID NO: 370468 - RNA, 19 nt, Artificial Sequence
  Description of Artificial Sequence: Synthetic oligonucleotide
auacccaccacgguugcga

SEQ ID NO: 370469 - RNA, 19 nt, Artificial Sequence
  Description of Artificial Sequence: Synthetic oligonucleotide
gugaacgcagccccaacca

SEQ ID NO: 370470 - RNA, 19 nt, Artificial Sequence
  Description of Artificial Sequence: Synthetic oligonucleotide
gcugguucacauauucggg

SEQ ID NO: 370471 - RNA, 19 nt, Artificial Sequence
  Description of Artificial Sequence: Synthetic oligonucleotide
cacgguugcgaugauggac

SEQ ID NO: 370472 - RNA, 19 nt, Artificial Sequence
  Description of Artificial Sequence: Synthetic oligonucleotide
ugcacgagccguacauccu

SEQ ID NO: 370473 - RNA, 19 nt, Artificial Sequence
  Description of Artificial Sequence: Synthetic oligonucleotide
augcgggagaauucugaca

SEQ ID NO: 370474 - RNA, 19 nt, Artificial Sequence
  Description of Artificial Sequence: Synthetic oligonucleotide
auaugcccuccgcauccgg

SEQ ID NO: 370475 - RNA, 19 nt, Artificial Sequence
  Description of Artificial Sequence: Synthetic oligonucleotide
aggcaagcguucucccuuc

SEQ ID NO: 370476 - RNA, 19 nt, Artificial Sequence
  Description of Artificial Sequence: Synthetic oligonucleotide
  modified_base (4)..(4): a, c, u, g, unknown or other
cagngucaaugaguaggcg

SEQ ID NO: 370477 - RNA, 19 nt, Artificial Sequence
  Description of Artificial Sequence: Synthetic oligonucleotide
uccggacccaagcaccuuc

SEQ ID NO: 370478 - RNA, 19 nt, Artificial Sequence
  Description of Artificial Sequence: Synthetic oligonucleotide
ugucagcucgccuccucca

SEQ ID NO: 370479 - RNA, 19 nt, Artificial Sequence
  Description of Artificial Sequence: Synthetic oligonucleotide
ugcgaugauggacgucgcu

SEQ ID NO: 370480 - RNA, 19 nt, Artificial Sequence
  Description of Artificial Sequence: Synthetic oligonucleotide
ccgaaugacucgaagguuc

SEQ ID NO: 370481 - RNA, 19 nt, Artificial Sequence
  Description of Artificial Sequence: Synthetic oligonucleotide
cugaggcaagcguucuccc

SEQ ID NO: 370482 - RNA, 19 nt, Artificial Sequence
  Description of Artificial Sequence: Synthetic oligonucleotide
gucccuucaaagguacuug

SEQ ID NO: 370483 - RNA, 19 nt, Artificial Sequence
  Description of Artificial Sequence: Synthetic oligonucleotide
caggaacaacaggauaccc

SEQ ID NO: 370484 - RNA, 19 nt, Artificial Sequence
  Description of Artificial Sequence: Synthetic oligonucleotide
  modified_base (12)..(12): a, c, u, g, unknown or other
gcagagacgggnguugcgg

SEQ ID NO: 370485 - RNA, 19 nt, Artificial Sequence
  Description of Artificial Sequence: Synthetic oligonucleotide
cacgagccguacauccucc

SEQ ID NO: 370486 - RNA, 19 nt, Artificial Sequence
  Description of Artificial Sequence: Synthetic oligonucleotide
agaccauagcacacucggg

SEQ ID NO: 370487 - RNA, 19 nt, Artificial Sequence
  Description of Artificial Sequence: Synthetic oligonucleotide
gaugcucugcggcccuuug

SEQ ID NO: 370488 - RNA, 19 nt, Artificial Sequence
  Description of Artificial Sequence: Synthetic oligonucleotide
ugggacacggcuggcauau

SEQ ID NO: 370489 - RNA, 19 nt, Artificial Sequence
  Description of Artificial Sequence: Synthetic oligonucleotide
gauacccaccacgguugcg

SEQ ID NO: 370490 - RNA, 19 nt, Artificial Sequence
  Description of Artificial Sequence: Synthetic oligonucleotide
  modified_base (5)..(5): a, c, u, g, unknown or other
gcagngucaaugaguaggc

SEQ ID NO: 370491 - RNA, 19 nt, Artificial Sequence
  Description of Artificial Sequence: Synthetic oligonucleotide
ucccaguaauagagguugu

SEQ ID NO: 370492 - RNA, 19 nt, Artificial Sequence
  Description of Artificial Sequence: Synthetic oligonucleotide
caccaucaaacacaucgga

SEQ ID NO: 370493 - RNA, 19 nt, Artificial Sequence
  Description of Artificial Sequence: Synthetic oligonucleotide
  modified_base (4)..(4): a, c, u, g, unknown or other
gggnguugcggugaaugag

SEQ ID NO: 370494 - RNA, 19 nt, Artificial Sequence
  Description of Artificial Sequence: Synthetic oligonucleotide
gccucacacggguacaucc

SEQ ID NO: 370495 - RNA, 19 nt, Artificial Sequence
  Description of Artificial Sequence: Synthetic oligonucleotide
ggagcaacguagccgucag

SEQ ID NO: 370496 - RNA, 19 nt, Artificial Sequence
  Description of Artificial Sequence: Synthetic oligonucleotide
uuguuagcuuuaggggaug

SEQ ID NO: 370497 - RNA, 19 nt, Artificial Sequence
  Description of Artificial Sequence: Synthetic oligonucleotide
augccggaggcaggguucc

SEQ ID NO: 370498 - RNA, 19 nt, Artificial Sequence
  Description of Artificial Sequence: Synthetic oligonucleotide
ggacacggcuggcauaugc

SEQ ID NO: 370499 - RNA, 19 nt, Artificial Sequence
  Description of Artificial Sequence: Synthetic oligonucleotide
gguacauccaagcccaagu

SEQ ID NO: 370500 - RNA, 19 nt, Artificial Sequence
  Description of Artificial Sequence: Synthetic oligonucleotide
uugcgaugauggacgucgc

SEQ ID NO: 370501 - RNA, 19 nt, Artificial Sequence
  Description of Artificial Sequence: Synthetic oligonucleotide
caucugggauccagaugcc

SEQ ID NO: 370502 - RNA, 19 nt, Artificial Sequence
  Description of Artificial Sequence: Synthetic oligonucleotide
ggugcaguugaugggacac

SEQ ID NO: 370503 - RNA, 19 nt, Artificial Sequence
  Description of Artificial Sequence: Synthetic oligonucleotide
ggacccaagcaccuucacc

SEQ ID NO: 370504 - RNA, 19 nt, Artificial Sequence
  Description of Artificial Sequence: Synthetic oligonucleotide
guacauccaagcccaagua

SEQ ID NO: 370505 - RNA, 19 nt, Artificial Sequence
  Description of Artificial Sequence: Synthetic oligonucleotide
gaauggauuccaauggguu

SEQ ID NO: 370506 - RNA, 19 nt, Artificial Sequence
  Description of Artificial Sequence: Synthetic oligonucleotide
ugcggcccuuugcuaaccc

SEQ ID NO: 370507 - RNA, 19 nt, Artificial Sequence
  Description of Artificial Sequence: Synthetic oligonucleotide
cucgcuguaccgcuguaga

SEQ ID NO: 370508 - RNA, 19 nt, Artificial Sequence
  Description of Artificial Sequence: Synthetic oligonucleotide
ucccucgccaugcgggaga

SEQ ID NO: 370509 - RNA, 19 nt, Artificial Sequence
  Description of Artificial Sequence: Synthetic oligonucleotide
gaaugacucgaagguucug

SEQ ID NO: 370510 - RNA, 19 nt, Artificial Sequence
  Description of Artificial Sequence: Synthetic oligonucleotide
caacucccggaaucucggg

SEQ ID NO: 370511 - RNA, 19 nt, Artificial Sequence
  Description of Artificial Sequence: Synthetic oligonucleotide
agagaugcucugcggcccu

SEQ ID NO: 370512 - RNA, 19 nt, Artificial Sequence
  Description of Artificial Sequence: Synthetic oligonucleotide
cuggcauaugcccuccgca

SEQ ID NO: 370513 - RNA, 19 nt, Artificial Sequence
  Description of Artificial Sequence: Synthetic oligonucleotide
gauggacgucgcugggcug

SEQ ID NO: 370514 - RNA, 19 nt, Artificial Sequence
  Description of Artificial Sequence: Synthetic oligonucleotide
  modified_base (10)..(10): a, c, u, g, unknown or other
gccuugcagngucaaugag

SEQ ID NO: 370515 - RNA, 19 nt, Artificial Sequence
  Description of Artificial Sequence: Synthetic oligonucleotide
  modified_base (9)..(9): a, c, u, g, unknown or other
gagacgggnguugcgguga

SEQ ID NO: 370516 - RNA, 19 nt, Artificial Sequence
  Description of Artificial Sequence: Synthetic oligonucleotide
ggugcuaaguacucggggu

SEQ ID NO: 370517 - RNA, 19 nt, Artificial Sequence
  Description of Artificial Sequence: Synthetic oligonucleotide
caaagguacuugguggaga

SEQ ID NO: 370518 - RNA, 19 nt, Artificial Sequence
  Description of Artificial Sequence: Synthetic oligonucleotide
gguaaaagguacuguccaa

SEQ ID NO: 370519 - RNA, 19 nt, Artificial Sequence
  Description of Artificial Sequence: Synthetic oligonucleotide
gacgucgcugggcuggcuc

SEQ ID NO: 370520 - RNA, 19 nt, Artificial Sequence
  Description of Artificial Sequence: Synthetic oligonucleotide
auagugcagauuggaggcu

SEQ ID NO: 370521 - RNA, 19 nt, Artificial Sequence
  Description of Artificial Sequence: Synthetic oligonucleotide
gaggcugaggcaagcguuc

SEQ ID NO: 370522 - RNA, 19 nt, Artificial Sequence
  Description of Artificial Sequence: Synthetic oligonucleotide
auccggguacuuccagaug

SEQ ID NO: 370523 - RNA, 19 nt, Artificial Sequence
  Description of Artificial Sequence: Synthetic oligonucleotide
gggugaaccgccgucgaag

SEQ ID NO: 370524 - RNA, 19 nt, Artificial Sequence
  Description of Artificial Sequence: Synthetic oligonucleotide
gaguccuuguagugggcaa

SEQ ID NO: 370525 - RNA, 19 nt, Artificial Sequence
  Description of Artificial Sequence: Synthetic oligonucleotide
gcuggacgggcccaagucc

SEQ ID NO: 370526 - RNA, 19 nt, Artificial Sequence
  Description of Artificial Sequence: Synthetic oligonucleotide
accgccgucgaagaaugga

SEQ ID NO: 370527 - RNA, 19 nt, Artificial Sequence
  Description of Artificial Sequence: Synthetic oligonucleotide
gaaugaguaccaguccgcu

SEQ ID NO: 370528 - RNA, 19 nt, Artificial Sequence
  Description of Artificial Sequence: Synthetic oligonucleotide
gguuuggccccaaaaguca

SEQ ID NO: 370529 - RNA, 19 nt, Artificial Sequence
  Description of Artificial Sequence: Synthetic oligonucleotide
cagguaucucccgggcugg

SEQ ID NO: 370530 - RNA, 19 nt, Artificial Sequence
  Description of Artificial Sequence: Synthetic oligonucleotide
gaguaggcgccaucaugga

SEQ ID NO: 370531 - RNA, 19 nt, Artificial Sequence
  Description of Artificial Sequence: Synthetic oligonucleotide
cauaugcccuccgcauccg

SEQ ID NO: 370532 - RNA, 19 nt, Artificial Sequence
  Description of Artificial Sequence: Synthetic oligonucleotide
ggauccgcaucugagccug

SEQ ID NO: 370533 - RNA, 19 nt, Artificial Sequence
  Description of Artificial Sequence: Synthetic oligonucleotide
ugugcacgagccguacauc

SEQ ID NO: 370534 - RNA, 19 nt, Artificial Sequence
  Description of Artificial Sequence: Synthetic oligonucleotide
ccccuuggcaaucugaaca

SEQ ID NO: 370535 - RNA, 19 nt, Artificial Sequence
  Description of Artificial Sequence: Synthetic oligonucleotide
ggcgaccucgauguucucg

SEQ ID NO: 370536 - RNA, 19 nt, Artificial Sequence
  Description of Artificial Sequence: Synthetic oligonucleotide
gccgucgaagaauggauuc

SEQ ID NO: 370537 - RNA, 19 nt, Artificial Sequence
  Description of Artificial Sequence: Synthetic oligonucleotide
gcauuguauacuuucggau

SEQ ID NO: 370538 - RNA, 19 nt, Artificial Sequence
  Description of Artificial Sequence: Synthetic oligonucleotide
ugggugaaccgccgucgaa

SEQ ID NO: 370539 - RNA, 19 nt, Artificial Sequence
  Description of Artificial Sequence: Synthetic oligonucleotide
ccaagcccaaguacucagg

SEQ ID NO: 370540 - RNA, 19 nt, Artificial Sequence
  Description of Artificial Sequence: Synthetic oligonucleotide
ggauguguuuucccucaac

SEQ ID NO: 370541 - RNA, 19 nt, Artificial Sequence
  Description of Artificial Sequence: Synthetic oligonucleotide
gaacgguaaaagguacugu

SEQ ID NO: 370542 - RNA, 19 nt, Artificial Sequence
  Description of Artificial Sequence: Synthetic oligonucleotide
uguggaugucaggcagaug

SEQ ID NO: 370543 - RNA, 19 nt, Artificial Sequence
  Description of Artificial Sequence: Synthetic oligonucleotide
caauggguccuggucccag

SEQ ID NO: 370544 - RNA, 19 nt, Artificial Sequence
  Description of Artificial Sequence: Synthetic oligonucleotide
auagggcaugagcuguguu

SEQ ID NO: 370545 - RNA, 19 nt, Artificial Sequence
  Description of Artificial Sequence: Synthetic oligonucleotide
cgacauucagaaucuauca

SEQ ID NO: 370546 - RNA, 19 nt, Artificial Sequence
  Description of Artificial Sequence: Synthetic oligonucleotide
  modified_base (11)..(11): a, c, u, g, unknown or other
ggccuugcagngucaauga

SEQ ID NO: 370547 - RNA, 19 nt, Artificial Sequence
  Description of Artificial Sequence: Synthetic oligonucleotide
cucggacaugguccagaag

SEQ ID NO: 370548 - RNA, 19 nt, Artificial Sequence
  Description of Artificial Sequence: Synthetic oligonucleotide
gaaucucgggcgacauuca

SEQ ID NO: 370549 - RNA, 19 nt, Artificial Sequence
  Description of Artificial Sequence: Synthetic oligonucleotide
acgucgcugggcuggcucu

SEQ ID NO: 370550 - RNA, 19 nt, Artificial Sequence
  Description of Artificial Sequence: Synthetic oligonucleotide
gcagggguaacgugggauc

SEQ ID NO: 370551 - RNA, 19 nt, Artificial Sequence
  Description of Artificial Sequence: Synthetic oligonucleotide
gcuggcauaugcccuccgc

SEQ ID NO: 370552 - RNA, 19 nt, Artificial Sequence
  Description of Artificial Sequence: Synthetic oligonucleotide
ggugaaccgccgucgaaga

SEQ ID NO: 370553 - RNA, 19 nt, Artificial Sequence
  Description of Artificial Sequence: Synthetic oligonucleotide
agccuacgcauuguauacu

SEQ ID NO: 370554 - RNA, 19 nt, Artificial Sequence
  Description of Artificial Sequence: Synthetic oligonucleotide
cuguaccgcuguagagggc

SEQ ID NO: 370555 - RNA, 19 nt, Artificial Sequence
  Description of Artificial Sequence: Synthetic oligonucleotide
cauggcuccgcugggcguc

SEQ ID NO: 370556 - RNA, 19 nt, Artificial Sequence
  Description of Artificial Sequence: Synthetic oligonucleotide
acgagccguacauccucca

SEQ ID NO: 370557 - RNA, 19 nt, Artificial Sequence
  Description of Artificial Sequence: Synthetic oligonucleotide
aaccgccgucgaagaaugg

SEQ ID NO: 370558 - RNA, 19 nt, Artificial Sequence
  Description of Artificial Sequence: Synthetic oligonucleotide
cagugaacgcagccccaac

SEQ ID NO: 370559 - RNA, 19 nt, Artificial Sequence
  Description of Artificial Sequence: Synthetic oligonucleotide
  modified_base (2)..(2): a, c, u, g, unknown or other
gnguugcggugaaugagua

SEQ ID NO: 370560 - RNA, 19 nt, Artificial Sequence
  Description of Artificial Sequence: Synthetic oligonucleotide
ccauaaucauguagacauc

SEQ ID NO: 370561 - RNA, 19 nt, Artificial Sequence
  Description of Artificial Sequence: Synthetic oligonucleotide
uaccgcuguagagggcuga

SEQ ID NO: 370562 - RNA, 19 nt, Artificial Sequence
  Description of Artificial Sequence: Synthetic oligonucleotide
caggcgaccucgauguucu

SEQ ID NO: 370563 - RNA, 19 nt, Artificial Sequence
  Description of Artificial Sequence: Synthetic oligonucleotide
agugcagauuggaggcuga

SEQ ID NO: 370564 - RNA, 19 nt, Artificial Sequence
  Description of Artificial Sequence: Synthetic oligonucleotide
ggauacccaccacgguugc

SEQ ID NO: 370565 - RNA, 19 nt, Artificial Sequence
  Description of Artificial Sequence: Synthetic oligonucleotide
agcucccgcagugaacgca

SEQ ID NO: 370566 - RNA, 19 nt, Artificial Sequence
  Description of Artificial Sequence: Synthetic oligonucleotide
guccaaggggcuggacggg

SEQ ID NO: 370567 - RNA, 19 nt, Artificial Sequence
  Description of Artificial Sequence: Synthetic oligonucleotide
cucacacggguacauccaa

SEQ ID NO: 370568 - RNA, 19 nt, Artificial Sequence
  Description of Artificial Sequence: Synthetic oligonucleotide
uacccaccacgguugcgau

SEQ ID NO: 370569 - RNA, 19 nt, Artificial Sequence
  Description of Artificial Sequence: Synthetic oligonucleotide
cagucucuuuuaggauccg

SEQ ID NO: 370570 - RNA, 19 nt, Artificial Sequence
  Description of Artificial Sequence: Synthetic oligonucleotide
ggagaauucguccccgaau

SEQ ID NO: 370571 - RNA, 19 nt, Artificial Sequence
  Description of Artificial Sequence: Synthetic oligonucleotide
gaguaccaguccgcugccc

SEQ ID NO: 370572 - RNA, 19 nt, Artificial Sequence
  Description of Artificial Sequence: Synthetic oligonucleotide
caggauacccaccacgguu

SEQ ID NO: 370573 - RNA, 19 nt, Artificial Sequence
  Description of Artificial Sequence: Synthetic oligonucleotide
caccaguugagcagguccu

SEQ ID NO: 370574 - RNA, 19 nt, Artificial Sequence
  Description of Artificial Sequence: Synthetic oligonucleotide
ggcuggacgggcccaaguc

SEQ ID NO: 370575 - RNA, 19 nt, Artificial Sequence
  Description of Artificial Sequence: Synthetic oligonucleotide
acccaccacgguugcgaug

SEQ ID NO: 370576 - RNA, 19 nt, Artificial Sequence
  Description of Artificial Sequence: Synthetic oligonucleotide
ggguacauccaagcccaag

SEQ ID NO: 370577 - RNA, 19 nt, Artificial Sequence
  Description of Artificial Sequence: Synthetic oligonucleotide
cacuggugauggcccuugc

SEQ ID NO: 370578 - RNA, 19 nt, Artificial Sequence
  Description of Artificial Sequence: Synthetic oligonucleotide
ccgucgaagaauggauucc

SEQ ID NO: 370579 - RNA, 19 nt, Artificial Sequence
  Description of Artificial Sequence: Synthetic oligonucleotide
gaggcgggacacauacgga

SEQ ID NO: 370580 - RNA, 19 nt, Artificial Sequence
  Description of Artificial Sequence: Synthetic oligonucleotide
cauccggguacuuccagau

SEQ ID NO: 370581 - RNA, 19 nt, Artificial Sequence
  Description of Artificial Sequence: Synthetic oligonucleotide
agguaucucccgggcuggg

SEQ ID NO: 370582 - RNA, 19 nt, Artificial Sequence
  Description of Artificial Sequence: Synthetic oligonucleotide
cgcauuguauacuuucgga

SEQ ID NO: 370583 - RNA, 19 nt, Artificial Sequence
  Description of Artificial Sequence: Synthetic oligonucleotide
ccuugccccucgcaggugc

SEQ ID NO: 370584 - RNA, 19 nt, Artificial Sequence
  Description of Artificial Sequence: Synthetic oligonucleotide
  modified_base (3)..(3): a, c, u, g, unknown or other
ggnguugcggugaaugagu

SEQ ID NO: 370585 - RNA, 19 nt, Artificial Sequence
  Description of Artificial Sequence: Synthetic oligonucleotide
gggauccucgcuguaccgc

SEQ ID NO: 370586 - RNA, 19 nt, Artificial Sequence
  Description of Artificial Sequence: Synthetic oligonucleotide
  modified_base (9)..(9): a, c, u, g, unknown or other
ccuugcagngucaaugagu

SEQ ID NO: 370587 - RNA, 19 nt, Artificial Sequence
  Description of Artificial Sequence: Synthetic oligonucleotide
ggaguccuuguagugggca

SEQ ID NO: 370588 - RNA, 19 nt, Artificial Sequence
  Description of Artificial Sequence: Synthetic oligonucleotide
gugaacgguaaaagguacu

SEQ ID NO: 370589 - RNA, 19 nt, Artificial Sequence
  Description of Artificial Sequence: Synthetic oligonucleotide
gggcauguaggagaggucu

SEQ ID NO: 370590 - RNA, 19 nt, Artificial Sequence
  Description of Artificial Sequence: Synthetic oligonucleotide
gucagguaucucccgggcu

SEQ ID NO: 370591 - RNA, 19 nt, Artificial Sequence
  Description of Artificial Sequence: Synthetic oligonucleotide
ccaugcgggagaauucuga

SEQ ID NO: 370592 - RNA, 19 nt, Artificial Sequence
  Description of Artificial Sequence: Synthetic oligonucleotide
uaaggucauggaggcuguc

SEQ ID NO: 370593 - RNA, 19 nt, Artificial Sequence
  Description of Artificial Sequence: Synthetic oligonucleotide
agagagagucuugggucuu

SEQ ID NO: 370594 - RNA, 19 nt, Artificial Sequence
  Description of Artificial Sequence: Synthetic oligonucleotide
gccccaaccaguggauucc

SEQ ID NO: 370595 - RNA, 19 nt, Artificial Sequence
  Description of Artificial Sequence: Synthetic oligonucleotide
ggguaacgugggauccucg

SEQ ID NO: 370596 - RNA, 19 nt, Artificial Sequence
  Description of Artificial Sequence: Synthetic oligonucleotide
  modified_base (8)..(8): a, c, u, g, unknown or other
agacgggnguugcggugaa

SEQ ID NO: 370597 - RNA, 19 nt, Artificial Sequence
  Description of Artificial Sequence: Synthetic oligonucleotide
ccauagggcaugagcugug

SEQ ID NO: 370598 - RNA, 19 nt, Artificial Sequence
  Description of Artificial Sequence: Synthetic oligonucleotide
ggggucccucgccaugcgg

SEQ ID NO: 370599 - RNA, 19 nt, Artificial Sequence
  Description of Artificial Sequence: Synthetic oligonucleotide
ccccauucccaguucacca

SEQ ID NO: 370600 - RNA, 19 nt, Artificial Sequence
  Description of Artificial Sequence: Synthetic oligonucleotide
caucggagccagccccuuc

SEQ ID NO: 370601 - RNA, 19 nt, Artificial Sequence
  Description of Artificial Sequence: Synthetic oligonucleotide
uggacgucgcugggcuggc

SEQ ID NO: 370602 - RNA, 19 nt, Artificial Sequence
  Description of Artificial Sequence: Synthetic oligonucleotide
gggagcaacguagccguca

SEQ ID NO: 370603 - RNA, 19 nt, Artificial Sequence
  Description of Artificial Sequence: Synthetic oligonucleotide
gggcaugagcuguguuacc

SEQ ID NO: 370604 - RNA, 19 nt, Artificial Sequence
  Description of Artificial Sequence: Synthetic oligonucleotide
ggcgucagcggcuccacua

SEQ ID NO: 370605 - RNA, 19 nt, Artificial Sequence
  Description of Artificial Sequence: Synthetic oligonucleotide
cacggcuggcauaugcccu

SEQ ID NO: 370606 - RNA, 19 nt, Artificial Sequence
  Description of Artificial Sequence: Synthetic oligonucleotide
gcaguugaugggacacggc

SEQ ID NO: 370607 - RNA, 19 nt, Artificial Sequence
  Description of Artificial Sequence: Synthetic oligonucleotide
gcggcccuuugcuaacccc

SEQ ID NO: 370608 - RNA, 19 nt, Artificial Sequence
  Description of Artificial Sequence: Synthetic oligonucleotide
guaccgcuguagagggcug

SEQ ID NO: 370609 - RNA, 19 nt, Artificial Sequence
  Description of Artificial Sequence: Synthetic oligonucleotide
aggcgaccucgauguucuc

SEQ ID NO: 370610 - RNA, 19 nt, Artificial Sequence
  Description of Artificial Sequence: Synthetic oligonucleotide
cgagggagccaguggagac

SEQ ID NO: 370611 - RNA, 19 nt, Artificial Sequence
  Description of Artificial Sequence: Synthetic oligonucleotide
  modified_base (11)..(11): a, c, u, g, unknown or other
cagagacgggnguugcggu

SEQ ID NO: 370612 - RNA, 19 nt, Artificial Sequence
  Description of Artificial Sequence: Synthetic oligonucleotide
cuuccgcauccaccagguc

SEQ ID NO: 370613 - RNA, 19 nt, Artificial Sequence
  Description of Artificial Sequence: Synthetic oligonucleotide
ucccggaaucucgggcgac

SEQ ID NO: 370614 - RNA, 19 nt, Artificial Sequence
  Description of Artificial Sequence: Synthetic oligonucleotide
cugcggcccuuugcuaacc

SEQ ID NO: 370615 - RNA, 19 nt, Artificial Sequence
  Description of Artificial Sequence: Synthetic oligonucleotide
cucccggaaucucgggcga

SEQ ID NO: 370616 - RNA, 19 nt, Artificial Sequence
  Description of Artificial Sequence: Synthetic oligonucleotide
cagaaggcgggagaagggu

SEQ ID NO: 370617 - RNA, 19 nt, Artificial Sequence
  Description of Artificial Sequence: Synthetic oligonucleotide
ccucacacggguacaucca

SEQ ID NO: 370618 - RNA, 19 nt, Artificial Sequence
  Description of Artificial Sequence: Synthetic oligonucleotide
gucccucgccaugcgggag

SEQ ID NO: 370619 - RNA, 19 nt, Artificial Sequence
  Description of Artificial Sequence: Synthetic oligonucleotide
ggcgggacacauacggaga

SEQ ID NO: 370620 - RNA, 19 nt, Artificial Sequence
  Description of Artificial Sequence: Synthetic oligonucleotide
guagcaccagaaggccgca

SEQ ID NO: 370621 - RNA, 19 nt, Artificial Sequence
  Description of Artificial Sequence: Synthetic oligonucleotide
acacucgggcacaggacuu

SEQ ID NO: 370622 - RNA, 19 nt, Artificial Sequence
  Description of Artificial Sequence: Synthetic oligonucleotide
gcaacguagccgucagucu

SEQ ID NO: 370623 - RNA, 19 nt, Artificial Sequence
  Description of Artificial Sequence: Synthetic oligonucleotide
ucccggugccuggggcagg

SEQ ID NO: 370624 - RNA, 19 nt, Artificial Sequence
  Description of Artificial Sequence: Synthetic oligonucleotide
guuuggccccaaaagucau

SEQ ID NO: 370625 - RNA, 19 nt, Artificial Sequence
  Description of Artificial Sequence: Synthetic oligonucleotide
gggguaacgugggauccuc

SEQ ID NO: 370626 - RNA, 19 nt, Artificial Sequence
  Description of Artificial Sequence: Synthetic oligonucleotide
gcggugaaugaguaccagu

SEQ ID NO: 370627 - RNA, 19 nt, Artificial Sequence
  Description of Artificial Sequence: Synthetic oligonucleotide
cagugccgaaagcuccgga

SEQ ID NO: 370628 - RNA, 19 nt, Artificial Sequence
  Description of Artificial Sequence: Synthetic oligonucleotide
cuccacacgucacucugau

SEQ ID NO: 370629 - RNA, 19 nt, Artificial Sequence
  Description of Artificial Sequence: Synthetic oligonucleotide
acgggcccaaguccucauu

SEQ ID NO: 370630 - RNA, 19 nt, Artificial Sequence
  Description of Artificial Sequence: Synthetic oligonucleotide
ccucgcuguaccgcuguag

SEQ ID NO: 370631 - RNA, 19 nt, Artificial Sequence
  Description of Artificial Sequence: Synthetic oligonucleotide
ggcuccacuagcucaguuu

SEQ ID NO: 370632 - RNA, 19 nt, Artificial Sequence
  Description of Artificial Sequence: Synthetic oligonucleotide
ccccgaaugacucgaaggu

SEQ ID NO: 370633 - RNA, 19 nt, Artificial Sequence
  Description of Artificial Sequence: Synthetic oligonucleotide
gcucagucucuuuuaggau

SEQ ID NO: 370634 - RNA, 19 nt, Artificial Sequence
  Description of Artificial Sequence: Synthetic oligonucleotide
cucggugggcagggguaac

SEQ ID NO: 370635 - RNA, 19 nt, Artificial Sequence
  Description of Artificial Sequence: Synthetic oligonucleotide
cacaccacuggggcagcga

SEQ ID NO: 370636 - RNA, 19 nt, Artificial Sequence
  Description of Artificial Sequence: Synthetic oligonucleotide
cacaucggagccagccccu

SEQ ID NO: 370637 - RNA, 19 nt, Artificial Sequence
  Description of Artificial Sequence: Synthetic oligonucleotide
gccauagggcaugagcugu

SEQ ID NO: 370638 - RNA, 19 nt, Artificial Sequence
  Description of Artificial Sequence: Synthetic oligonucleotide
cauagggcaugagcugugu

SEQ ID NO: 370639 - RNA, 19 nt, Artificial Sequence
  Description of Artificial Sequence: Synthetic oligonucleotide
gcucccggugccuggggca

SEQ ID NO: 370640 - RNA, 19 nt, Artificial Sequence
  Description of Artificial Sequence: Synthetic oligonucleotide
ggcgacauucagaaucuau

SEQ ID NO: 370641 - RNA, 19 nt, Artificial Sequence
  Description of Artificial Sequence: Synthetic oligonucleotide
gccaugcgggagaauucug

SEQ ID NO: 370642 - RNA, 19 nt, Artificial Sequence
  Description of Artificial Sequence: Synthetic oligonucleotide
gucaaugaguaggcgccau

SEQ ID NO: 370643 - RNA, 19 nt, Artificial Sequence
  Description of Artificial Sequence: Synthetic oligonucleotide
gguaucucccgggcuggga

SEQ ID NO: 370644 - RNA, 19 nt, Artificial Sequence
  Description of Artificial Sequence: Synthetic oligonucleotide
acgugggauccucgcugua

SEQ ID NO: 370645 - RNA, 19 nt, Artificial Sequence
  Description of Artificial Sequence: Synthetic oligonucleotide
ggucccuucaaagguacuu

SEQ ID NO: 370646 - RNA, 19 nt, Artificial Sequence
  Description of Artificial Sequence: Synthetic oligonucleotide
ugccggaggcaggguuccc

SEQ ID NO: 370647 - RNA, 19 nt, Artificial Sequence
  Description of Artificial Sequence: Synthetic oligonucleotide
cgucgaagaauggauucca

SEQ ID NO: 370648 - RNA, 19 nt, Artificial Sequence
  Description of Artificial Sequence: Synthetic oligonucleotide
ggaagacgcuaaggucaug

SEQ ID NO: 370649 - RNA, 19 nt, Artificial Sequence
  Description of Artificial Sequence: Synthetic oligonucleotide
acaucggagccagccccuu

SEQ ID NO: 370650 - RNA, 19 nt, Artificial Sequence
  Description of Artificial Sequence: Synthetic oligonucleotide
gguugcgaugauggacguc

SEQ ID NO: 370651 - RNA, 19 nt, Artificial Sequence
  Description of Artificial Sequence: Synthetic oligonucleotide
gggaucccaucauaagguu

SEQ ID NO: 370652 - RNA, 19 nt, Artificial Sequence
  Description of Artificial Sequence: Synthetic oligonucleotide
auggcuccgcugggcguca

SEQ ID NO: 370653 - RNA, 19 nt, Artificial Sequence
  Description of Artificial Sequence: Synthetic oligonucleotide
ggaucccaucauaagguuu

SEQ ID NO: 370654 - RNA, 19 nt, Artificial Sequence
  Description of Artificial Sequence: Synthetic oligonucleotide
gacucuugaccagcacauu

SEQ ID NO: 370655 - RNA, 19 nt, Artificial Sequence
  Description of Artificial Sequence: Synthetic oligonucleotide
ccgcuguagagggcugagg

SEQ ID NO: 370656 - RNA, 19 nt, Artificial Sequence
  Description of Artificial Sequence: Synthetic oligonucleotide
gcucauccccuuggcaauc

SEQ ID NO: 370657 - RNA, 19 nt, Artificial Sequence
  Description of Artificial Sequence: Synthetic oligonucleotide
ccgucagucucggugggca

SEQ ID NO: 370658 - RNA, 19 nt, Artificial Sequence
  Description of Artificial Sequence: Synthetic oligonucleotide
gguugggcauggcuccgcu

SEQ ID NO: 370659 - RNA, 19 nt, Artificial Sequence
  Description of Artificial Sequence: Synthetic oligonucleotide
  modified_base (5)..(5): a, c, u, g, unknown or other
cgggnguugcggugaauga

SEQ ID NO: 370660 - RNA, 19 nt, Artificial Sequence
  Description of Artificial Sequence: Synthetic oligonucleotide
ccccaaccaguggauuccc

SEQ ID NO: 370661 - RNA, 19 nt, Artificial Sequence
  Description of Artificial Sequence: Synthetic oligonucleotide
ggcuccgcugggcgucagc

SEQ ID NO: 370662 - RNA, 19 nt, Artificial Sequence
  Description of Artificial Sequence: Synthetic oligonucleotide
gcgccaucauggagaauuc

SEQ ID NO: 370663 - RNA, 19 nt, Artificial Sequence
  Description of Artificial Sequence: Synthetic oligonucleotide
ggugccuccggugggcugu

SEQ ID NO: 370664 - RNA, 19 nt, Artificial Sequence
  Description of Artificial Sequence: Synthetic oligonucleotide
gccguaggggucccuucaa

SEQ ID NO: 370665 - RNA, 19 nt, Artificial Sequence
  Description of Artificial Sequence: Synthetic oligonucleotide
gccgaaagcuccggaccca

SEQ ID NO: 370666 - RNA, 19 nt, Artificial Sequence
  Description of Artificial Sequence: Synthetic oligonucleotide
ggucccaguaauagagguu

SEQ ID NO: 370667 - RNA, 19 nt, Artificial Sequence
  Description of Artificial Sequence: Synthetic oligonucleotide
ccgcaccucuggcugguuc

SEQ ID NO: 370668 - RNA, 19 nt, Artificial Sequence
  Description of Artificial Sequence: Synthetic oligonucleotide
ccugugcacgagccguaca

SEQ ID NO: 370669 - RNA, 19 nt, Artificial Sequence
  Description of Artificial Sequence: Synthetic oligonucleotide
cccugugcacgagccguac

SEQ ID NO: 370670 - RNA, 19 nt, Artificial Sequence
  Description of Artificial Sequence: Synthetic oligonucleotide
  modified_base (7)..(7): a, c, u, g, unknown or other
gacgggnguugcggugaau

SEQ ID NO: 370671 - RNA, 19 nt, Artificial Sequence
  Description of Artificial Sequence: Synthetic oligonucleotide
cgggcgacauucagaaucu

SEQ ID NO: 370672 - RNA, 19 nt, Artificial Sequence
  Description of Artificial Sequence: Synthetic oligonucleotide
ggcaagcguucucccuucu

SEQ ID NO: 370673 - RNA, 19 nt, Artificial Sequence
  Description of Artificial Sequence: Synthetic oligonucleotide
ccgccgucgaagaauggau

SEQ ID NO: 370674 - RNA, 19 nt, Artificial Sequence
  Description of Artificial Sequence: Synthetic oligonucleotide
ccguaggggucccuucaaa

SEQ ID NO: 370675 - RNA, 19 nt, Artificial Sequence
  Description of Artificial Sequence: Synthetic oligonucleotide
gucgcugggcuggcucucu

SEQ ID NO: 370676 - RNA, 19 nt, Artificial Sequence
  Description of Artificial Sequence: Synthetic oligonucleotide
gcuccggacccaagcaccu

SEQ ID NO: 370677 - RNA, 19 nt, Artificial Sequence
  Description of Artificial Sequence: Synthetic oligonucleotide
ccuacgcauuguauacuuu

SEQ ID NO: 370678 - RNA, 19 nt, Artificial Sequence
  Description of Artificial Sequence: Synthetic oligonucleotide
cucgggcgacauucagaau

SEQ ID NO: 370679 - RNA, 19 nt, Artificial Sequence
  Description of Artificial Sequence: Synthetic oligonucleotide
ccgcauccggguacuucca

SEQ ID NO: 370680 - RNA, 19 nt, Artificial Sequence
  Description of Artificial Sequence: Synthetic oligonucleotide
gggacacggcuggcauaug

SEQ ID NO: 370681 - RNA, 19 nt, Artificial Sequence
  Description of Artificial Sequence: Synthetic oligonucleotide
cccggaaucucgggcgaca

SEQ ID NO: 370682 - RNA, 19 nt, Artificial Sequence
  Description of Artificial Sequence: Synthetic oligonucleotide
ccgaaagcuccggacccaa

SEQ ID NO: 370683 - RNA, 19 nt, Artificial Sequence
  Description of Artificial Sequence: Synthetic oligonucleotide
ccgcuccaauggguccugg

SEQ ID NO: 370684 - RNA, 19 nt, Artificial Sequence
  Description of Artificial Sequence: Synthetic oligonucleotide
ggggagcaacguagccguc

SEQ ID NO: 370685 - RNA, 19 nt, Artificial Sequence
  Description of Artificial Sequence: Synthetic oligonucleotide
gggcgacauucagaaucua

SEQ ID NO: 370686 - RNA, 19 nt, Artificial Sequence
  Description of Artificial Sequence: Synthetic oligonucleotide
cccgaaugacucgaagguu

SEQ ID NO: 370687 - RNA, 19 nt, Artificial Sequence
  Description of Artificial Sequence: Synthetic oligonucleotide
gggucccuucaaagguacu

SEQ ID NO: 370688 - RNA, 19 nt, Artificial Sequence
  Description of Artificial Sequence: Synthetic oligonucleotide
cgccaugcgggagaauucu

SEQ ID NO: 370689 - RNA, 19 nt, Artificial Sequence
  Description of Artificial Sequence: Synthetic oligonucleotide
cccuugccccucgcaggug

SEQ ID NO: 370690 - RNA, 19 nt, Artificial Sequence
  Description of Artificial Sequence: Synthetic oligonucleotide
cgucgcugggcuggcucuc

SEQ ID NO: 370691 - RNA, 19 nt, Artificial Sequence
  Description of Artificial Sequence: Synthetic oligonucleotide
cgccgucgaagaauggauu

SEQ ID NO: 370692 - RNA, 19 nt, Artificial Sequence
  Description of Artificial Sequence: Synthetic oligonucleotide
cuccggacccaagcaccuu

SEQ ID NO: 370693 - RNA, 19 nt, Artificial Sequence
  Description of Artificial Sequence: Synthetic oligonucleotide
cccucgccaugcgggagaa

SEQ ID NO: 370694 - RNA, 19 nt, Artificial Sequence
  Description of Artificial Sequence: Synthetic oligonucleotide
ccggaaucucgggcgacau

SEQ ID NO: 370695 - RNA, 19 nt, Artificial Sequence
  Description of Artificial Sequence: Synthetic oligonucleotide
cgguugcgaugauggacgu

SEQ ID NO: 370696 - RNA, 19 nt, Artificial Sequence
  Description of Artificial Sequence: Synthetic oligonucleotide
ccaauggguugggacucuu

SEQ ID NO: 370697 - RNA, 19 nt, Artificial Sequence
  Description of Artificial Sequence: Synthetic oligonucleotide
cggguacauccaagcccaa

SEQ ID NO: 370698 - RNA, 19 nt, Artificial Sequence
  Description of Artificial Sequence: Synthetic oligonucleotide
cccuccgcauccggguacu

SEQ ID NO: 370699 - RNA, 19 nt, Artificial Sequence
  Description of Artificial Sequence: Synthetic oligonucleotide
ggacgucgcugggcuggcu

SEQ ID NO: 370700 - RNA, 19 nt, Artificial Sequence
  Description of Artificial Sequence: Synthetic oligonucleotide
ccccucgcaggugcuccau

SEQ ID NO: 370701 - RNA, 19 nt, Artificial Sequence
  Description of Artificial Sequence: Synthetic oligonucleotide
gccgcaccucuggcugguu

SEQ ID NO: 370702 - RNA, 19 nt, Artificial Sequence
  Description of Artificial Sequence: Synthetic oligonucleotide
ccucgccaugcgggagaau

SEQ ID NO: 370703 - RNA, 19 nt, Artificial Sequence
  Description of Artificial Sequence: Synthetic oligonucleotide
  modified_base (1)..(1): a, c, u, g, unknown or other
nguugcggugaaugaguac

SEQ ID NO: 370704 - RNA, 19 nt, Artificial Sequence
  Description of Artificial Sequence: Synthetic oligonucleotide
  modified_base (1)..(1): a, c, u, g, unknown or other
ngucaaugaguaggcgcca

SEQ ID NO: 370705 - RNA, 19 nt, Artificial Sequence
  Description of Artificial Sequence: Synthetic oligonucleotide
acuacuguuugauagaccc

SEQ ID NO: 370706 - RNA, 19 nt, Artificial Sequence
  Description of Artificial Sequence: Synthetic oligonucleotide
ugaucuuugaaccacauga

SEQ ID NO: 370707 - RNA, 19 nt, Artificial Sequence
  Description of Artificial Sequence: Synthetic oligonucleotide
ucuguauauaauaucaucc

SEQ ID NO: 370708 - RNA, 19 nt, Artificial Sequence
  Description of Artificial Sequence: Synthetic oligonucleotide
ucauuauagaaccugaaca

SEQ ID NO: 370709 - RNA, 19 nt, Artificial Sequence
  Description of Artificial Sequence: Synthetic oligonucleotide
agcagagugaacuauaggg

SEQ ID NO: 370710 - RNA, 19 nt, Artificial Sequence
  Description of Artificial Sequence: Synthetic oligonucleotide
uauucuaugcuuaaacaag

SEQ ID NO: 370711 - RNA, 19 nt, Artificial Sequence
  Description of Artificial Sequence: Synthetic oligonucleotide
uuaacuugaaauaguauca

SEQ ID NO: 370712 - RNA, 19 nt, Artificial Sequence
  Description of Artificial Sequence: Synthetic oligonucleotide
uuaccuuauaacuuuagag

SEQ ID NO: 370713 - RNA, 19 nt, Artificial Sequence
  Description of Artificial Sequence: Synthetic oligonucleotide
uguuacugaaacuaaaaug

SEQ ID NO: 370714 - RNA, 19 nt, Artificial Sequence
  Description of Artificial Sequence: Synthetic oligonucleotide
acuuauucuaugcuuaaac

SEQ ID NO: 370715 - RNA, 19 nt, Artificial Sequence
  Description of Artificial Sequence: Synthetic oligonucleotide
ugugacuacuguuugauag

SEQ ID NO: 370716 - RNA, 19 nt, Artificial Sequence
  Description of Artificial Sequence: Synthetic oligonucleotide
uuaaaucauuccaauauca

SEQ ID NO: 370717 - RNA, 19 nt, Artificial Sequence
  Description of Artificial Sequence: Synthetic oligonucleotide
caugcuuacaccuuguacc

SEQ ID NO: 370718 - RNA, 19 nt, Artificial Sequence
  Description of Artificial Sequence: Synthetic oligonucleotide
aacacgauguauaaaguac

SEQ ID NO: 370719 - RNA, 19 nt, Artificial Sequence
  Description of Artificial Sequence: Synthetic oligonucleotide
ucauaaaggagcaaagcca

SEQ ID NO: 370720 - RNA, 19 nt, Artificial Sequence
  Description of Artificial Sequence: Synthetic oligonucleotide
auuagcaaccagcaguggc

SEQ ID NO: 370721 - RNA, 19 nt, Artificial Sequence
  Description of Artificial Sequence: Synthetic oligonucleotide
aaaccuaugggcaucugcc

SEQ ID NO: 370722 - RNA, 19 nt, Artificial Sequence
  Description of Artificial Sequence: Synthetic oligonucleotide
aauuguaaauacguugcac

SEQ ID NO: 370723 - RNA, 19 nt, Artificial Sequence
  Description of Artificial Sequence: Synthetic oligonucleotide
uguacaacacuuacaaacc

SEQ ID NO: 370724 - RNA, 19 nt, Artificial Sequence
  Description of Artificial Sequence: Synthetic oligonucleotide
uuaaucugcggacaaagug

SEQ ID NO: 370725 - RNA, 19 nt, Artificial Sequence
  Description of Artificial Sequence: Synthetic oligonucleotide
aacuauagggugccgggcc

SEQ ID NO: 370726 - RNA, 19 nt, Artificial Sequence
  Description of Artificial Sequence: Synthetic oligonucleotide
uuaggcuuaaauugguagg

SEQ ID NO: 370727 - RNA, 19 nt, Artificial Sequence
  Description of Artificial Sequence: Synthetic oligonucleotide
aauccuuaacuugaaauag

SEQ ID NO: 370728 - RNA, 19 nt, Artificial Sequence
  Description of Artificial Sequence: Synthetic oligonucleotide
uaccuuauaacuuuagaga

SEQ ID NO: 370729 - RNA, 19 nt, Artificial Sequence
  Description of Artificial Sequence: Synthetic oligonucleotide
aauucuuaaagaguuauaa

SEQ ID NO: 370730 - RNA, 19 nt, Artificial Sequence
  Description of Artificial Sequence: Synthetic oligonucleotide
uacguugcacucuacaacg

SEQ ID NO: 370731 - RNA, 19 nt, Artificial Sequence
  Description of Artificial Sequence: Synthetic oligonucleotide
aaagugaucucugcaagac

SEQ ID NO: 370732 - RNA, 19 nt, Artificial Sequence
  Description of Artificial Sequence: Synthetic oligonucleotide
uuguuuucgagcaaaguga

SEQ ID NO: 370733 - RNA, 19 nt, Artificial Sequence
  Description of Artificial Sequence: Synthetic oligonucleotide
aaacucuaggaguacaaug

SEQ ID NO: 370734 - RNA, 19 nt, Artificial Sequence
  Description of Artificial Sequence: Synthetic oligonucleotide
uacaacgcaaacuagacau

SEQ ID NO: 370735 - RNA, 19 nt, Artificial Sequence
  Description of Artificial Sequence: Synthetic oligonucleotide
ugauuagauaaguaauuag

SEQ ID NO: 370736 - RNA, 19 nt, Artificial Sequence
  Description of Artificial Sequence: Synthetic oligonucleotide
uccaguuuauuucauaccu

SEQ ID NO: 370737 - RNA, 19 nt, Artificial Sequence
  Description of Artificial Sequence: Synthetic oligonucleotide
acaagcaucccuugggacc

SEQ ID NO: 370738 - RNA, 19 nt, Artificial Sequence
  Description of Artificial Sequence: Synthetic oligonucleotide
uaauuuaccauucaacauu

SEQ ID NO: 370739 - RNA, 19 nt, Artificial Sequence
  Description of Artificial Sequence: Synthetic oligonucleotide
ggaaacacgauguauaaag

SEQ ID NO: 370740 - RNA, 19 nt, Artificial Sequence
  Description of Artificial Sequence: Synthetic oligonucleotide
uuauucuaugcuuaaacaa

SEQ ID NO: 370741 - RNA, 19 nt, Artificial Sequence
  Description of Artificial Sequence: Synthetic oligonucleotide
aggaauguacaacacuuac

SEQ ID NO: 370742 - RNA, 19 nt, Artificial Sequence
  Description of Artificial Sequence: Synthetic oligonucleotide
uuaguuaugacuucccaaa

SEQ ID NO: 370743 - RNA, 19 nt, Artificial Sequence
  Description of Artificial Sequence: Synthetic oligonucleotide
auagacuccuguuagcauc

SEQ ID NO: 370744 - RNA, 19 nt, Artificial Sequence
  Description of Artificial Sequence: Synthetic oligonucleotide
ucaguuaucuccaucaguu

SEQ ID NO: 370745 - RNA, 19 nt, Artificial Sequence
  Description of Artificial Sequence: Synthetic oligonucleotide
uguguugucgaggauaucc

SEQ ID NO: 370746 - RNA, 19 nt, Artificial Sequence
  Description of Artificial Sequence: Synthetic oligonucleotide
ugauaauuaggcuuaaauu

SEQ ID NO: 370747 - RNA, 19 nt, Artificial Sequence
  Description of Artificial Sequence: Synthetic oligonucleotide
acagguaacaccaaugauc

SEQ ID NO: 370748 - RNA, 19 nt, Artificial Sequence
  Description of Artificial Sequence: Synthetic oligonucleotide
uuacuaaacacaguggcug

SEQ ID NO: 370749 - RNA, 19 nt, Artificial Sequence
  Description of Artificial Sequence: Synthetic oligonucleotide
aagauuucgcuuuaauuaa

SEQ ID NO: 370750 - RNA, 19 nt, Artificial Sequence
  Description of Artificial Sequence: Synthetic oligonucleotide
uucgcuuuaauuaacuuuu

SEQ ID NO: 370751 - RNA, 19 nt, Artificial Sequence
  Description of Artificial Sequence: Synthetic oligonucleotide
ugcuuaaacaagcaccuca

SEQ ID NO: 370752 - RNA, 19 nt, Artificial Sequence
  Description of Artificial Sequence: Synthetic oligonucleotide
aacuuuagagaacauuuaa

SEQ ID NO: 370753 - RNA, 19 nt, Artificial Sequence
  Description of Artificial Sequence: Synthetic oligonucleotide
ucuuuaaacuuauucuaug

SEQ ID NO: 370754 - RNA, 19 nt, Artificial Sequence
  Description of Artificial Sequence: Synthetic oligonucleotide
aacuuuugauaagccaugc

SEQ ID NO: 370755 - RNA, 19 nt, Artificial Sequence
  Description of Artificial Sequence: Synthetic oligonucleotide
aaguuacaaguuaaucugc

SEQ ID NO: 370756 - RNA, 19 nt, Artificial Sequence
  Description of Artificial Sequence: Synthetic oligonucleotide
uauaauucuagcugggcuc

SEQ ID NO: 370757 - RNA, 19 nt, Artificial Sequence
  Description of Artificial Sequence: Synthetic oligonucleotide
auuaagauaacagguaaca

SEQ ID NO: 370758 - RNA, 19 nt, Artificial Sequence
  Description of Artificial Sequence: Synthetic oligonucleotide
uauaaguagacaacaggaa

SEQ ID NO: 370759 - RNA, 19 nt, Artificial Sequence
  Description of Artificial Sequence: Synthetic oligonucleotide
ugaacuauagggugccggg

SEQ ID NO: 370760 - RNA, 19 nt, Artificial Sequence
  Description of Artificial Sequence: Synthetic oligonucleotide
auccggaugaaaucgguac

SEQ ID NO: 370761 - RNA, 19 nt, Artificial Sequence
  Description of Artificial Sequence: Synthetic oligonucleotide
uguacacaacuuuugauaa

SEQ ID NO: 370762 - RNA, 19 nt, Artificial Sequence
  Description of Artificial Sequence: Synthetic oligonucleotide
uuauucuuaggaauguaaa

SEQ ID NO: 370763 - RNA, 19 nt, Artificial Sequence
  Description of Artificial Sequence: Synthetic oligonucleotide
ucuugaacaauaucaaaau

SEQ ID NO: 370764 - RNA, 19 nt, Artificial Sequence
  Description of Artificial Sequence: Synthetic oligonucleotide
ucuacaacgcaaacuagac

SEQ ID NO: 370765 - RNA, 19 nt, Artificial Sequence
  Description of Artificial Sequence: Synthetic oligonucleotide
aaauacguugcacucuaca

SEQ ID NO: 370766 - RNA, 19 nt, Artificial Sequence
  Description of Artificial Sequence: Synthetic oligonucleotide
uuaaacuuauucuaugcuu

SEQ ID NO: 370767 - RNA, 19 nt, Artificial Sequence
  Description of Artificial Sequence: Synthetic oligonucleotide
cucgguacuuucauaaagg

SEQ ID NO: 370768 - RNA, 19 nt, Artificial Sequence
  Description of Artificial Sequence: Synthetic oligonucleotide
ucuuugcuuaaaaucaggu

SEQ ID NO: 370769 - RNA, 19 nt, Artificial Sequence
  Description of Artificial Sequence: Synthetic oligonucleotide
acaugcuuacaccuuguac

SEQ ID NO: 370770 - RNA, 19 nt, Artificial Sequence
  Description of Artificial Sequence: Synthetic oligonucleotide
agaguuauaaguagacaac

SEQ ID NO: 370771 - RNA, 19 nt, Artificial Sequence
  Description of Artificial Sequence: Synthetic oligonucleotide
ucuaugcuuaaacaagcac

SEQ ID NO: 370772 - RNA, 19 nt, Artificial Sequence
  Description of Artificial Sequence: Synthetic oligonucleotide
uauugacaugcuuacaccu

SEQ ID NO: 370773 - RNA, 19 nt, Artificial Sequence
  Description of Artificial Sequence: Synthetic oligonucleotide
uauagguuaaggcagcauu

SEQ ID NO: 370774 - RNA, 19 nt, Artificial Sequence
  Description of Artificial Sequence: Synthetic oligonucleotide
guuacuacaauugugacua

SEQ ID NO: 370775 - RNA, 19 nt, Artificial Sequence
  Description of Artificial Sequence: Synthetic oligonucleotide
aaaaucccucgucaacuuc

SEQ ID NO: 370776 - RNA, 19 nt, Artificial Sequence
  Description of Artificial Sequence: Synthetic oligonucleotide
aacacuuacaaaccuguua

SEQ ID NO: 370777 - RNA, 19 nt, Artificial Sequence
  Description of Artificial Sequence: Synthetic oligonucleotide
gaaaucgguacccugcuac

SEQ ID NO: 370778 - RNA, 19 nt, Artificial Sequence
  Description of Artificial Sequence: Synthetic oligonucleotide
aaacacgauguauaaagua

SEQ ID NO: 370779 - RNA, 19 nt, Artificial Sequence
  Description of Artificial Sequence: Synthetic oligonucleotide
auuuaugccagauaauguu

SEQ ID NO: 370780 - RNA, 19 nt, Artificial Sequence
  Description of Artificial Sequence: Synthetic oligonucleotide
cuuaaauugguagguaagc

SEQ ID NO: 370781 - RNA, 19 nt, Artificial Sequence
  Description of Artificial Sequence: Synthetic oligonucleotide
accuuauaacuuuagagaa

SEQ ID NO: 370782 - RNA, 19 nt, Artificial Sequence
  Description of Artificial Sequence: Synthetic oligonucleotide
uucuuaggaauguaaacuc

SEQ ID NO: 370783 - RNA, 19 nt, Artificial Sequence
  Description of Artificial Sequence: Synthetic oligonucleotide
aguuaucuccaucaguucu

SEQ ID NO: 370784 - RNA, 19 nt, Artificial Sequence
  Description of Artificial Sequence: Synthetic oligonucleotide
aacucuaggaguacaauga

SEQ ID NO: 370785 - RNA, 19 nt, Artificial Sequence
  Description of Artificial Sequence: Synthetic oligonucleotide
ugucuaguuaccuuauaac

SEQ ID NO: 370786 - RNA, 19 nt, Artificial Sequence
  Description of Artificial Sequence: Synthetic oligonucleotide
ucaagguucucgcucuggg

SEQ ID NO: 370787 - RNA, 19 nt, Artificial Sequence
  Description of Artificial Sequence: Synthetic oligonucleotide
aauacugcucauaacuaug

SEQ ID NO: 370788 - RNA, 19 nt, Artificial Sequence
  Description of Artificial Sequence: Synthetic oligonucleotide
ugaauccggaugaaaucgg

SEQ ID NO: 370789 - RNA, 19 nt, Artificial Sequence
  Description of Artificial Sequence: Synthetic oligonucleotide
uuaaauugguagguaagca

SEQ ID NO: 370790 - RNA, 19 nt, Artificial Sequence
  Description of Artificial Sequence: Synthetic oligonucleotide
aaacuagacauuuucccuu

SEQ ID NO: 370791 - RNA, 19 nt, Artificial Sequence
  Description of Artificial Sequence: Synthetic oligonucleotide
auaaguaauuagcacucug

SEQ ID NO: 370792 - RNA, 19 nt, Artificial Sequence
  Description of Artificial Sequence: Synthetic oligonucleotide
agagagaagcucaagguuc

SEQ ID NO: 370793 - RNA, 19 nt, Artificial Sequence
  Description of Artificial Sequence: Synthetic oligonucleotide
uuuucugauguguugucga

SEQ ID NO: 370794 - RNA, 19 nt, Artificial Sequence
  Description of Artificial Sequence: Synthetic oligonucleotide
uuccuuacuagauuucaug

SEQ ID NO: 370795 - RNA, 19 nt, Artificial Sequence
  Description of Artificial Sequence: Synthetic oligonucleotide
acgcaaacuagacauuuuc

SEQ ID NO: 370796 - RNA, 19 nt, Artificial Sequence
  Description of Artificial Sequence: Synthetic oligonucleotide
auggagaauguuuauacaa

SEQ ID NO: 370797 - RNA, 19 nt, Artificial Sequence
  Description of Artificial Sequence: Synthetic oligonucleotide
ugaccucuuauugacaugc

SEQ ID NO: 370798 - RNA, 19 nt, Artificial Sequence
  Description of Artificial Sequence: Synthetic oligonucleotide
ggacuuacuaaacacagug

SEQ ID NO: 370799 - RNA, 19 nt, Artificial Sequence
  Description of Artificial Sequence: Synthetic oligonucleotide
uuugauagacccgacuggc

SEQ ID NO: 370800 - RNA, 19 nt, Artificial Sequence
  Description of Artificial Sequence: Synthetic oligonucleotide
cauaagauuacuauuaaau

SEQ ID NO: 370801 - RNA, 19 nt, Artificial Sequence
  Description of Artificial Sequence: Synthetic oligonucleotide
uaaauugguagguaagcau

SEQ ID NO: 370802 - RNA, 19 nt, Artificial Sequence
  Description of Artificial Sequence: Synthetic oligonucleotide
gaauguaaacucuaggagu

SEQ ID NO: 370803 - RNA, 19 nt, Artificial Sequence
  Description of Artificial Sequence: Synthetic oligonucleotide
uuagccaaaccuuggcugc

SEQ ID NO: 370804 - RNA, 19 nt, Artificial Sequence
  Description of Artificial Sequence: Synthetic oligonucleotide
aacaccaaugaucuuugaa

SEQ ID NO: 370805 - RNA, 19 nt, Artificial Sequence
  Description of Artificial Sequence: Synthetic oligonucleotide
acucgguacuuucauaaag

SEQ ID NO: 370806 - RNA, 19 nt, Artificial Sequence
  Description of Artificial Sequence: Synthetic oligonucleotide
aauguaaacucuaggagua

SEQ ID NO: 370807 - RNA, 19 nt, Artificial Sequence
  Description of Artificial Sequence: Synthetic oligonucleotide
gauagacccgacuggcugg

SEQ ID NO: 370808 - RNA, 19 nt, Artificial Sequence
  Description of Artificial Sequence: Synthetic oligonucleotide
uaauuaggcuuaaauuggu

SEQ ID NO: 370809 - RNA, 19 nt, Artificial Sequence
  Description of Artificial Sequence: Synthetic oligonucleotide
aguuaaucugcggacaaag

SEQ ID NO: 370810 - RNA, 19 nt, Artificial Sequence
  Description of Artificial Sequence: Synthetic oligonucleotide
agagugaacuauagggugc

SEQ ID NO: 370811 - RNA, 19 nt, Artificial Sequence
  Description of Artificial Sequence: Synthetic oligonucleotide
acgauguauaaaguacugc

SEQ ID NO: 370812 - RNA, 19 nt, Artificial Sequence
  Description of Artificial Sequence: Synthetic oligonucleotide
uuacuagauuucauggcac

SEQ ID NO: 370813 - RNA, 19 nt, Artificial Sequence
  Description of Artificial Sequence: Synthetic oligonucleotide
uggagaauguuuauacaaa

SEQ ID NO: 370814 - RNA, 19 nt, Artificial Sequence
  Description of Artificial Sequence: Synthetic oligonucleotide
ugggauagugcacucucag

SEQ ID NO: 370815 - RNA, 19 nt, Artificial Sequence
  Description of Artificial Sequence: Synthetic oligonucleotide
aaguaguauaaaauaauuu

SEQ ID NO: 370816 - RNA, 19 nt, Artificial Sequence
  Description of Artificial Sequence: Synthetic oligonucleotide
uuuaugccagauaauguuu

SEQ ID NO: 370817 - RNA, 19 nt, Artificial Sequence
  Description of Artificial Sequence: Synthetic oligonucleotide
uuaugccagauaauguuuc

SEQ ID NO: 370818 - RNA, 19 nt, Artificial Sequence
  Description of Artificial Sequence: Synthetic oligonucleotide
acuauagggugccgggccc

SEQ ID NO: 370819 - RNA, 19 nt, Artificial Sequence
  Description of Artificial Sequence: Synthetic oligonucleotide
uuguaaauacguugcacuc

SEQ ID NO: 370820 - RNA, 19 nt, Artificial Sequence
  Description of Artificial Sequence: Synthetic oligonucleotide
gaccuuguuaaaaugccag

SEQ ID NO: 370821 - RNA, 19 nt, Artificial Sequence
  Description of Artificial Sequence: Synthetic oligonucleotide
gacuuacuaaacacagugg

SEQ ID NO: 370822 - RNA, 19 nt, Artificial Sequence
  Description of Artificial Sequence: Synthetic oligonucleotide
uagauuucauggcaccaug

SEQ ID NO: 370823 - RNA, 19 nt, Artificial Sequence
  Description of Artificial Sequence: Synthetic oligonucleotide
ucuuagccaaaccuuggcu

SEQ ID NO: 370824 - RNA, 19 nt, Artificial Sequence
  Description of Artificial Sequence: Synthetic oligonucleotide
cagagugaacuauagggug

SEQ ID NO: 370825 - RNA, 19 nt, Artificial Sequence
  Description of Artificial Sequence: Synthetic oligonucleotide
uuucauuauagaaccugaa

SEQ ID NO: 370826 - RNA, 19 nt, Artificial Sequence
  Description of Artificial Sequence: Synthetic oligonucleotide
ucaauuuuacugucuaguu

SEQ ID NO: 370827 - RNA, 19 nt, Artificial Sequence
  Description of Artificial Sequence: Synthetic oligonucleotide
gcaaacuagacauuuuccc

SEQ ID NO: 370828 - RNA, 19 nt, Artificial Sequence
  Description of Artificial Sequence: Synthetic oligonucleotide
uacuguuugauagacccga

SEQ ID NO: 370829 - RNA, 19 nt, Artificial Sequence
  Description of Artificial Sequence: Synthetic oligonucleotide
uacuagauuucauggcacc

SEQ ID NO: 370830 - RNA, 19 nt, Artificial Sequence
  Description of Artificial Sequence: Synthetic oligonucleotide
ugugaccucuuauugacau

SEQ ID NO: 370831 - RNA, 19 nt, Artificial Sequence
  Description of Artificial Sequence: Synthetic oligonucleotide
uguuuucgagcaaagugau

SEQ ID NO: 370832 - RNA, 19 nt, Artificial Sequence
  Description of Artificial Sequence: Synthetic oligonucleotide
aaaucagaguaaaucauuu

SEQ ID NO: 370833 - RNA, 19 nt, Artificial Sequence
  Description of Artificial Sequence: Synthetic oligonucleotide
aguuauaaguagacaacag

SEQ ID NO: 370834 - RNA, 19 nt, Artificial Sequence
  Description of Artificial Sequence: Synthetic oligonucleotide
uugauuagauaaguaauua

SEQ ID NO: 370835 - RNA, 19 nt, Artificial Sequence
  Description of Artificial Sequence: Synthetic oligonucleotide
uuucugauguguugucgag

SEQ ID NO: 370836 - RNA, 19 nt, Artificial Sequence
  Description of Artificial Sequence: Synthetic oligonucleotide
uguaaauacguugcacucu

SEQ ID NO: 370837 - RNA, 19 nt, Artificial Sequence
  Description of Artificial Sequence: Synthetic oligonucleotide
uuacugucuaguuaccuua

SEQ ID NO: 370838 - RNA, 19 nt, Artificial Sequence
  Description of Artificial Sequence: Synthetic oligonucleotide
aacagguaacaccaaugau

SEQ ID NO: 370839 - RNA, 19 nt, Artificial Sequence
  Description of Artificial Sequence: Synthetic oligonucleotide
cauuuaagccaacaguuca

SEQ ID NO: 370840 - RNA, 19 nt, Artificial Sequence
  Description of Artificial Sequence: Synthetic oligonucleotide
aguaauuagcacucugaaa

SEQ ID NO: 370841 - RNA, 19 nt, Artificial Sequence
  Description of Artificial Sequence: Synthetic oligonucleotide
uuuacugucuaguuaccuu

SEQ ID NO: 370842 - RNA, 19 nt, Artificial Sequence
  Description of Artificial Sequence: Synthetic oligonucleotide
ucgguacuuucauaaagga

SEQ ID NO: 370843 - RNA, 19 nt, Artificial Sequence
  Description of Artificial Sequence: Synthetic oligonucleotide
acaugaguaucaaaggucu

SEQ ID NO: 370844 - RNA, 19 nt, Artificial Sequence
  Description of Artificial Sequence: Synthetic oligonucleotide
ccugcuugauacuucaugg

SEQ ID NO: 370845 - RNA, 19 nt, Artificial Sequence
  Description of Artificial Sequence: Synthetic oligonucleotide
acuacaauugugacuacug

SEQ ID NO: 370846 - RNA, 19 nt, Artificial Sequence
  Description of Artificial Sequence: Synthetic oligonucleotide
ucugccccuaaaauuguga

SEQ ID NO: 370847 - RNA, 19 nt, Artificial Sequence
  Description of Artificial Sequence: Synthetic oligonucleotide
uccggaugaaaucgguacc

SEQ ID NO: 370848 - RNA, 19 nt, Artificial Sequence
  Description of Artificial Sequence: Synthetic oligonucleotide
cucaacuugccuaaugaca

SEQ ID NO: 370849 - RNA, 19 nt, Artificial Sequence
  Description of Artificial Sequence: Synthetic oligonucleotide
aaaucgguacccugcuacu

SEQ ID NO: 370850 - RNA, 19 nt, Artificial Sequence
  Description of Artificial Sequence: Synthetic oligonucleotide
ucuagcugggcucuguaua

SEQ ID NO: 370851 - RNA, 19 nt, Artificial Sequence
  Description of Artificial Sequence: Synthetic oligonucleotide
accucaacuugccuaauga

SEQ ID NO: 370852 - RNA, 19 nt, Artificial Sequence
  Description of Artificial Sequence: Synthetic oligonucleotide
acauuuaagccaacaguuc

SEQ ID NO: 370853 - RNA, 19 nt, Artificial Sequence
  Description of Artificial Sequence: Synthetic oligonucleotide
aguagacaacaggaaauuc

SEQ ID NO: 370854 - RNA, 19 nt, Artificial Sequence
  Description of Artificial Sequence: Synthetic oligonucleotide
caacuuuugauaagccaug

SEQ ID NO: 370855 - RNA, 19 nt, Artificial Sequence
  Description of Artificial Sequence: Synthetic oligonucleotide
aucccaaucucucauuuau

SEQ ID NO: 370856 - RNA, 19 nt, Artificial Sequence
  Description of Artificial Sequence: Synthetic oligonucleotide
aguuaugacuucccaaaau

SEQ ID NO: 370857 - RNA, 19 nt, Artificial Sequence
  Description of Artificial Sequence: Synthetic oligonucleotide
ucgaggauauccacagaca

SEQ ID NO: 370858 - RNA, 19 nt, Artificial Sequence
  Description of Artificial Sequence: Synthetic oligonucleotide
ucgagcaaagugaucucug

SEQ ID NO: 370859 - RNA, 19 nt, Artificial Sequence
  Description of Artificial Sequence: Synthetic oligonucleotide
uaggcuuaaauugguaggu

SEQ ID NO: 370860 - RNA, 19 nt, Artificial Sequence
  Description of Artificial Sequence: Synthetic oligonucleotide
aagugaucucugcaagacu

SEQ ID NO: 370861 - RNA, 19 nt, Artificial Sequence
  Description of Artificial Sequence: Synthetic oligonucleotide
acauaagauuacuauuaaa

SEQ ID NO: 370862 - RNA, 19 nt, Artificial Sequence
  Description of Artificial Sequence: Synthetic oligonucleotide
aggcaaaauagacuccugu

SEQ ID NO: 370863 - RNA, 19 nt, Artificial Sequence
  Description of Artificial Sequence: Synthetic oligonucleotide
uggcucuggauauaauucu

SEQ ID NO: 370864 - RNA, 19 nt, Artificial Sequence
  Description of Artificial Sequence: Synthetic oligonucleotide
uugguagguaagcauuuaa

SEQ ID NO: 370865 - RNA, 19 nt, Artificial Sequence
  Description of Artificial Sequence: Synthetic oligonucleotide
uuuuacugucuaguuaccu

SEQ ID NO: 370866 - RNA, 19 nt, Artificial Sequence
  Description of Artificial Sequence: Synthetic oligonucleotide
uuaucccaaucucucauuu

SEQ ID NO: 370867 - RNA, 19 nt, Artificial Sequence
  Description of Artificial Sequence: Synthetic oligonucleotide
cacgauguauaaaguacug

SEQ ID NO: 370868 - RNA, 19 nt, Artificial Sequence
  Description of Artificial Sequence: Synthetic oligonucleotide
auagguuaaggcagcauug

SEQ ID NO: 370869 - RNA, 19 nt, Artificial Sequence
  Description of Artificial Sequence: Synthetic oligonucleotide
acacaacuuuugauaagcc

SEQ ID NO: 370870 - RNA, 19 nt, Artificial Sequence
  Description of Artificial Sequence: Synthetic oligonucleotide
ucgucaacuucaguuaucu

SEQ ID NO: 370871 - RNA, 19 nt, Artificial Sequence
  Description of Artificial Sequence: Synthetic oligonucleotide
accuuuguauuuucugaug

SEQ ID NO: 370872 - RNA, 19 nt, Artificial Sequence
  Description of Artificial Sequence: Synthetic oligonucleotide
uagacuccuguuagcaucu

SEQ ID NO: 370873 - RNA, 19 nt, Artificial Sequence
  Description of Artificial Sequence: Synthetic oligonucleotide
augcuuacaccuuguaccu

SEQ ID NO: 370874 - RNA, 19 nt, Artificial Sequence
  Description of Artificial Sequence: Synthetic oligonucleotide
accaaugaucuuugaacca

SEQ ID NO: 370875 - RNA, 19 nt, Artificial Sequence
  Description of Artificial Sequence: Synthetic oligonucleotide
uaucaauacugcucauaac

SEQ ID NO: 370876 - RNA, 19 nt, Artificial Sequence
  Description of Artificial Sequence: Synthetic oligonucleotide
cuggguuuguuuucgagca

SEQ ID NO: 370877 - RNA, 19 nt, Artificial Sequence
  Description of Artificial Sequence: Synthetic oligonucleotide
guauaaaguacugcauaug

SEQ ID NO: 370878 - RNA, 19 nt, Artificial Sequence
  Description of Artificial Sequence: Synthetic oligonucleotide
gacgccacugaccuguuca

SEQ ID NO: 370879 - RNA, 19 nt, Artificial Sequence
  Description of Artificial Sequence: Synthetic oligonucleotide
uuauugcauuagcaaccag

SEQ ID NO: 370880 - RNA, 19 nt, Artificial Sequence
  Description of Artificial Sequence: Synthetic oligonucleotide
agauuucgcuuuaauuaac

SEQ ID NO: 370881 - RNA, 19 nt, Artificial Sequence
  Description of Artificial Sequence: Synthetic oligonucleotide
ugacacguaagugagcuuu

SEQ ID NO: 370882 - RNA, 19 nt, Artificial Sequence
  Description of Artificial Sequence: Synthetic oligonucleotide
auugugacuacuguuugau

SEQ ID NO: 370883 - RNA, 19 nt, Artificial Sequence
  Description of Artificial Sequence: Synthetic oligonucleotide
uaguuaugacuucccaaaa

SEQ ID NO: 370884 - RNA, 19 nt, Artificial Sequence
  Description of Artificial Sequence: Synthetic oligonucleotide
agugcacucucagucagag

SEQ ID NO: 370885 - RNA, 19 nt, Artificial Sequence
  Description of Artificial Sequence: Synthetic oligonucleotide
gugaacuauagggugccgg

SEQ ID NO: 370886 - RNA, 19 nt, Artificial Sequence
  Description of Artificial Sequence: Synthetic oligonucleotide
ugacuacuguuugauagac

SEQ ID NO: 370887 - RNA, 19 nt, Artificial Sequence
  Description of Artificial Sequence: Synthetic oligonucleotide
accauaucucaauuguaaa

SEQ ID NO: 370888 - RNA, 19 nt, Artificial Sequence
  Description of Artificial Sequence: Synthetic oligonucleotide
agacaaaugcacacaagca

SEQ ID NO: 370889 - RNA, 19 nt, Artificial Sequence
  Description of Artificial Sequence: Synthetic oligonucleotide
cauuauagaaccugaacau

SEQ ID NO: 370890 - RNA, 19 nt, Artificial Sequence
  Description of Artificial Sequence: Synthetic oligonucleotide
uguugucgaggauauccac

SEQ ID NO: 370891 - RNA, 19 nt, Artificial Sequence
  Description of Artificial Sequence: Synthetic oligonucleotide
acguaagugagcuuuucuu

SEQ ID NO: 370892 - RNA, 19 nt, Artificial Sequence
  Description of Artificial Sequence: Synthetic oligonucleotide
augaucuuugaaccacaug

SEQ ID NO: 370893 - RNA, 19 nt, Artificial Sequence
  Description of Artificial Sequence: Synthetic oligonucleotide
auaauucuagcugggcucu

SEQ ID NO: 370894 - RNA, 19 nt, Artificial Sequence
  Description of Artificial Sequence: Synthetic oligonucleotide
guaacaccaaugaucuuug

SEQ ID NO: 370895 - RNA, 19 nt, Artificial Sequence
  Description of Artificial Sequence: Synthetic oligonucleotide
aaccuguuacugugcuguc

SEQ ID NO: 370896 - RNA, 19 nt, Artificial Sequence
  Description of Artificial Sequence: Synthetic oligonucleotide
gacugcgugggacugggac

SEQ ID NO: 370897 - RNA, 19 nt, Artificial Sequence
  Description of Artificial Sequence: Synthetic oligonucleotide
cagguaacaccaaugaucu

SEQ ID NO: 370898 - RNA, 19 nt, Artificial Sequence
  Description of Artificial Sequence: Synthetic oligonucleotide
guaaauacguugcacucua

SEQ ID NO: 370899 - RNA, 19 nt, Artificial Sequence
  Description of Artificial Sequence: Synthetic oligonucleotide
aacucgagacacaggcuuc

SEQ ID NO: 370900 - RNA, 19 nt, Artificial Sequence
  Description of Artificial Sequence: Synthetic oligonucleotide
acaaguuaaucugcggaca

SEQ ID NO: 370901 - RNA, 19 nt, Artificial Sequence
  Description of Artificial Sequence: Synthetic oligonucleotide
uaggucugccccuaaaauu

SEQ ID NO: 370902 - RNA, 19 nt, Artificial Sequence
  Description of Artificial Sequence: Synthetic oligonucleotide
cuuaaacaagcaccucaac

SEQ ID NO: 370903 - RNA, 19 nt, Artificial Sequence
  Description of Artificial Sequence: Synthetic oligonucleotide
ucccaaucucucauuuaug

SEQ ID NO: 370904 - RNA, 19 nt, Artificial Sequence
  Description of Artificial Sequence: Synthetic oligonucleotide
gagugaacuauagggugcc

SEQ ID NO: 370905 - RNA, 19 nt, Artificial Sequence
  Description of Artificial Sequence: Synthetic oligonucleotide
aaaccccucaggucuuuga

SEQ ID NO: 370906 - RNA, 19 nt, Artificial Sequence
  Description of Artificial Sequence: Synthetic oligonucleotide
aauugguagguaagcauuu

SEQ ID NO: 370907 - RNA, 19 nt, Artificial Sequence
  Description of Artificial Sequence: Synthetic oligonucleotide
aaaggagcaaagccaucuu

SEQ ID NO: 370908 - RNA, 19 nt, Artificial Sequence
  Description of Artificial Sequence: Synthetic oligonucleotide
gucuuagccaaaccuuggc

SEQ ID NO: 370909 - RNA, 19 nt, Artificial Sequence
  Description of Artificial Sequence: Synthetic oligonucleotide
acaccuuguaccuuccuua

SEQ ID NO: 370910 - RNA, 19 nt, Artificial Sequence
  Description of Artificial Sequence: Synthetic oligonucleotide
auuucgcuuuaauuaacuu

SEQ ID NO: 370911 - RNA, 19 nt, Artificial Sequence
  Description of Artificial Sequence: Synthetic oligonucleotide
ugcuacuuacaccuuugua

SEQ ID NO: 370912 - RNA, 19 nt, Artificial Sequence
  Description of Artificial Sequence: Synthetic oligonucleotide
uacuacaauugugacuacu

SEQ ID NO: 370913 - RNA, 19 nt, Artificial Sequence
  Description of Artificial Sequence: Synthetic oligonucleotide
acacgauguauaaaguacu

SEQ ID NO: 370914 - RNA, 19 nt, Artificial Sequence
  Description of Artificial Sequence: Synthetic oligonucleotide
uaaaaucccucgucaacuu

SEQ ID NO: 370915 - RNA, 19 nt, Artificial Sequence
  Description of Artificial Sequence: Synthetic oligonucleotide
uaacuccauacuucagaga

SEQ ID NO: 370916 - RNA, 19 nt, Artificial Sequence
  Description of Artificial Sequence: Synthetic oligonucleotide
uacaccuuguaccuuccuu

SEQ ID NO: 370917 - RNA, 19 nt, Artificial Sequence
  Description of Artificial Sequence: Synthetic oligonucleotide
uuuaauaggucugccccua

SEQ ID NO: 370918 - RNA, 19 nt, Artificial Sequence
  Description of Artificial Sequence: Synthetic oligonucleotide
ggcucuguauauaauauca

SEQ ID NO: 370919 - RNA, 19 nt, Artificial Sequence
  Description of Artificial Sequence: Synthetic oligonucleotide
ucuuauugacaugcuuaca

SEQ ID NO: 370920 - RNA, 19 nt, Artificial Sequence
  Description of Artificial Sequence: Synthetic oligonucleotide
accugugaccucuuauuga

SEQ ID NO: 370921 - RNA, 19 nt, Artificial Sequence
  Description of Artificial Sequence: Synthetic oligonucleotide
aaugaucuuugaaccacau

SEQ ID NO: 370922 - RNA, 19 nt, Artificial Sequence
  Description of Artificial Sequence: Synthetic oligonucleotide
uaauaggucugccccuaaa

SEQ ID NO: 370923 - RNA, 19 nt, Artificial Sequence
  Description of Artificial Sequence: Synthetic oligonucleotide
ccuuacuagauuucauggc

SEQ ID NO: 370924 - RNA, 19 nt, Artificial Sequence
  Description of Artificial Sequence: Synthetic oligonucleotide
agucuuagccaaaccuugg

SEQ ID NO: 370925 - RNA, 19 nt, Artificial Sequence
  Description of Artificial Sequence: Synthetic oligonucleotide
aaccccucaggucuuugau

SEQ ID NO: 370926 - RNA, 19 nt, Artificial Sequence
  Description of Artificial Sequence: Synthetic oligonucleotide
gcuacuuacaccuuuguau

SEQ ID NO: 370927 - RNA, 19 nt, Artificial Sequence
  Description of Artificial Sequence: Synthetic oligonucleotide
uaaauacguugcacucuac

SEQ ID NO: 370928 - RNA, 19 nt, Artificial Sequence
  Description of Artificial Sequence: Synthetic oligonucleotide
gugacuacuguuugauaga

SEQ ID NO: 370929 - RNA, 19 nt, Artificial Sequence
  Description of Artificial Sequence: Synthetic oligonucleotide
cagcagagugaacuauagg

SEQ ID NO: 370930 - RNA, 19 nt, Artificial Sequence
  Description of Artificial Sequence: Synthetic oligonucleotide
aaaccauaucucaauugua

SEQ ID NO: 370931 - RNA, 19 nt, Artificial Sequence
  Description of Artificial Sequence: Synthetic oligonucleotide
auuaucccaaucucucauu

SEQ ID NO: 370932 - RNA, 19 nt, Artificial Sequence
  Description of Artificial Sequence: Synthetic oligonucleotide
uucccuacacuugucuugu

SEQ ID NO: 370933 - RNA, 19 nt, Artificial Sequence
  Description of Artificial Sequence: Synthetic oligonucleotide
auacugcucauaacuaugu

SEQ ID NO: 370934 - RNA, 19 nt, Artificial Sequence
  Description of Artificial Sequence: Synthetic oligonucleotide
gccacugaccuguucaaag

SEQ ID NO: 370935 - RNA, 19 nt, Artificial Sequence
  Description of Artificial Sequence: Synthetic oligonucleotide
gaacuauagggugccgggc

SEQ ID NO: 370936 - RNA, 19 nt, Artificial Sequence
  Description of Artificial Sequence: Synthetic oligonucleotide
aaucccucgucaacuucag

SEQ ID NO: 370937 - RNA, 19 nt, Artificial Sequence
  Description of Artificial Sequence: Synthetic oligonucleotide
guauaaggcaaaauagacu

SEQ ID NO: 370938 - RNA, 19 nt, Artificial Sequence
  Description of Artificial Sequence: Synthetic oligonucleotide
ccugugaccucuuauugac

SEQ ID NO: 370939 - RNA, 19 nt, Artificial Sequence
  Description of Artificial Sequence: Synthetic oligonucleotide
cauuuaugccagauaaugu

SEQ ID NO: 370940 - RNA, 19 nt, Artificial Sequence
  Description of Artificial Sequence: Synthetic oligonucleotide
uuaauaggucugccccuaa

SEQ ID NO: 370941 - RNA, 19 nt, Artificial Sequence
  Description of Artificial Sequence: Synthetic oligonucleotide
gcucaguccuuucugacac

SEQ ID NO: 370942 - RNA, 19 nt, Artificial Sequence
  Description of Artificial Sequence: Synthetic oligonucleotide
cuaguuaccuuauaacuuu

SEQ ID NO: 370943 - RNA, 19 nt, Artificial Sequence
  Description of Artificial Sequence: Synthetic oligonucleotide
cuuugaaccacaugaguau

SEQ ID NO: 370944 - RNA, 19 nt, Artificial Sequence
  Description of Artificial Sequence: Synthetic oligonucleotide
auaaaggagcaaagccauc

SEQ ID NO: 370945 - RNA, 19 nt, Artificial Sequence
  Description of Artificial Sequence: Synthetic oligonucleotide
ucucucauuuaugccagau

SEQ ID NO: 370946 - RNA, 19 nt, Artificial Sequence
  Description of Artificial Sequence: Synthetic oligonucleotide
aaggaauguacaacacuua

SEQ ID NO: 370947 - RNA, 19 nt, Artificial Sequence
  Description of Artificial Sequence: Synthetic oligonucleotide
ucgguacccugcuacuuac

SEQ ID NO: 370948 - RNA, 19 nt, Artificial Sequence
  Description of Artificial Sequence: Synthetic oligonucleotide
gauuucgcuuuaauuaacu

SEQ ID NO: 370949 - RNA, 19 nt, Artificial Sequence
  Description of Artificial Sequence: Synthetic oligonucleotide
gaacucgagacacaggcuu

SEQ ID NO: 370950 - RNA, 19 nt, Artificial Sequence
  Description of Artificial Sequence: Synthetic oligonucleotide
acuguuugauagacccgac

SEQ ID NO: 370951 - RNA, 19 nt, Artificial Sequence
  Description of Artificial Sequence: Synthetic oligonucleotide
uccccugcaguuucucucu

SEQ ID NO: 370952 - RNA, 19 nt, Artificial Sequence
  Description of Artificial Sequence: Synthetic oligonucleotide
cgauguauaaaguacugca

SEQ ID NO: 370953 - RNA, 19 nt, Artificial Sequence
  Description of Artificial Sequence: Synthetic oligonucleotide
uaucccaaucucucauuua

SEQ ID NO: 370954 - RNA, 19 nt, Artificial Sequence
  Description of Artificial Sequence: Synthetic oligonucleotide
aaguuaaucugcggacaaa

SEQ ID NO: 370955 - RNA, 19 nt, Artificial Sequence
  Description of Artificial Sequence: Synthetic oligonucleotide
cugacggcaggagagggac

SEQ ID NO: 370956 - RNA, 19 nt, Artificial Sequence
  Description of Artificial Sequence: Synthetic oligonucleotide
cuacaacgcaaacuagaca

SEQ ID NO: 370957 - RNA, 19 nt, Artificial Sequence
  Description of Artificial Sequence: Synthetic oligonucleotide
acuagacauuuucccuuca

SEQ ID NO: 370958 - RNA, 19 nt, Artificial Sequence
  Description of Artificial Sequence: Synthetic oligonucleotide
ggacucgguacuuucauaa

SEQ ID NO: 370959 - RNA, 19 nt, Artificial Sequence
  Description of Artificial Sequence: Synthetic oligonucleotide
accucuuauugacaugcuu

SEQ ID NO: 370960 - RNA, 19 nt, Artificial Sequence
  Description of Artificial Sequence: Synthetic oligonucleotide
caguuaucuccaucaguuc

SEQ ID NO: 370961 - RNA, 19 nt, Artificial Sequence
  Description of Artificial Sequence: Synthetic oligonucleotide
gagagagaagcucaagguu

SEQ ID NO: 370962 - RNA, 19 nt, Artificial Sequence
  Description of Artificial Sequence: Synthetic oligonucleotide
ugucgaggauauccacaga

SEQ ID NO: 370963 - RNA, 19 nt, Artificial Sequence
  Description of Artificial Sequence: Synthetic oligonucleotide
aguuuauuucauaccuuaa

SEQ ID NO: 370964 - RNA, 19 nt, Artificial Sequence
  Description of Artificial Sequence: Synthetic oligonucleotide
agauuucauggcaccauga

SEQ ID NO: 370965 - RNA, 19 nt, Artificial Sequence
  Description of Artificial Sequence: Synthetic oligonucleotide
aaaaccccucaggucuuug

SEQ ID NO: 370966 - RNA, 19 nt, Artificial Sequence
  Description of Artificial Sequence: Synthetic oligonucleotide
caaguuaaucugcggacaa

SEQ ID NO: 370967 - RNA, 19 nt, Artificial Sequence
  Description of Artificial Sequence: Synthetic oligonucleotide
guaaacucuaggaguacaa

SEQ ID NO: 370968 - RNA, 19 nt, Artificial Sequence
  Description of Artificial Sequence: Synthetic oligonucleotide
gcuuacaccuuguaccuuc

SEQ ID NO: 370969 - RNA, 19 nt, Artificial Sequence
  Description of Artificial Sequence: Synthetic oligonucleotide
uucuagcugggcucuguau

SEQ ID NO: 370970 - RNA, 19 nt, Artificial Sequence
  Description of Artificial Sequence: Synthetic oligonucleotide
aauccggaugaaaucggua

SEQ ID NO: 370971 - RNA, 19 nt, Artificial Sequence
  Description of Artificial Sequence: Synthetic oligonucleotide
agagaaacacugggcauau

SEQ ID NO: 370972 - RNA, 19 nt, Artificial Sequence
  Description of Artificial Sequence: Synthetic oligonucleotide
ggagccuucagaacucgag

SEQ ID NO: 370973 - RNA, 19 nt, Artificial Sequence
  Description of Artificial Sequence: Synthetic oligonucleotide
cacuugucuuguuacuaca

SEQ ID NO: 370974 - RNA, 19 nt, Artificial Sequence
  Description of Artificial Sequence: Synthetic oligonucleotide
agugaacuauagggugccg

SEQ ID NO: 370975 - RNA, 19 nt, Artificial Sequence
  Description of Artificial Sequence: Synthetic oligonucleotide
aucgguacccugcuacuua

SEQ ID NO: 370976 - RNA, 19 nt, Artificial Sequence
  Description of Artificial Sequence: Synthetic oligonucleotide
ccaaugaucuuugaaccac

SEQ ID NO: 370977 - RNA, 19 nt, Artificial Sequence
  Description of Artificial Sequence: Synthetic oligonucleotide
cuacuuacaccuuuguauu

SEQ ID NO: 370978 - RNA, 19 nt, Artificial Sequence
  Description of Artificial Sequence: Synthetic oligonucleotide
aaucgguacccugcuacuu

SEQ ID NO: 370979 - RNA, 19 nt, Artificial Sequence
  Description of Artificial Sequence: Synthetic oligonucleotide
gugaccucuuauugacaug

SEQ ID NO: 370980 - RNA, 19 nt, Artificial Sequence
  Description of Artificial Sequence: Synthetic oligonucleotide
cauuagcaaccagcagugg

SEQ ID NO: 370981 - RNA, 19 nt, Artificial Sequence
  Description of Artificial Sequence: Synthetic oligonucleotide
cguaagugagcuuuucuuc

SEQ ID NO: 370982 - RNA, 19 nt, Artificial Sequence
  Description of Artificial Sequence: Synthetic oligonucleotide
uuacuacaauugugacuac

SEQ ID NO: 370983 - RNA, 19 nt, Artificial Sequence
  Description of Artificial Sequence: Synthetic oligonucleotide
acugcauauggagaauguu

SEQ ID NO: 370984 - RNA, 19 nt, Artificial Sequence
  Description of Artificial Sequence: Synthetic oligonucleotide
uugugacuacuguuugaua

SEQ ID NO: 370985 - RNA, 19 nt, Artificial Sequence
  Description of Artificial Sequence: Synthetic oligonucleotide
uggguuuguuuucgagcaa

SEQ ID NO: 370986 - RNA, 19 nt, Artificial Sequence
  Description of Artificial Sequence: Synthetic oligonucleotide
auauagguuaaggcagcau

SEQ ID NO: 370987 - RNA, 19 nt, Artificial Sequence
  Description of Artificial Sequence: Synthetic oligonucleotide
auugacaugcuuacaccuu

SEQ ID NO: 370988 - RNA, 19 nt, Artificial Sequence
  Description of Artificial Sequence: Synthetic oligonucleotide
ucccgaccgucucugguuc

SEQ ID NO: 370989 - RNA, 19 nt, Artificial Sequence
  Description of Artificial Sequence: Synthetic oligonucleotide
aucaaaggucuugaacaau

SEQ ID NO: 370990 - RNA, 19 nt, Artificial Sequence
  Description of Artificial Sequence: Synthetic oligonucleotide
cuugggaccuuguuaaaau

SEQ ID NO: 370991 - RNA, 19 nt, Artificial Sequence
  Description of Artificial Sequence: Synthetic oligonucleotide
gacucgguacuuucauaaa

SEQ ID NO: 370992 - RNA, 19 nt, Artificial Sequence
  Description of Artificial Sequence: Synthetic oligonucleotide
cuacaauugugacuacugu

SEQ ID NO: 370993 - RNA, 19 nt, Artificial Sequence
  Description of Artificial Sequence: Synthetic oligonucleotide
acuacucauaggagaaaau

SEQ ID NO: 370994 - RNA, 19 nt, Artificial Sequence
  Description of Artificial Sequence: Synthetic oligonucleotide
agcuaugugcacaauccuu

SEQ ID NO: 370995 - RNA, 19 nt, Artificial Sequence
  Description of Artificial Sequence: Synthetic oligonucleotide
aggacuuacuaaacacagu

SEQ ID NO: 370996 - RNA, 19 nt, Artificial Sequence
  Description of Artificial Sequence: Synthetic oligonucleotide
ugcggacaaagugaugcua

SEQ ID NO: 370997 - RNA, 19 nt, Artificial Sequence
  Description of Artificial Sequence: Synthetic oligonucleotide
agaacucgagacacaggcu

SEQ ID NO: 370998 - RNA, 19 nt, Artificial Sequence
  Description of Artificial Sequence: Synthetic oligonucleotide
uauagggugccgggcccag

SEQ ID NO: 370999 - RNA, 19 nt, Artificial Sequence
  Description of Artificial Sequence: Synthetic oligonucleotide
ccucaacuugccuaaugac

SEQ ID NO: 371000 - RNA, 19 nt, Artificial Sequence
  Description of Artificial Sequence: Synthetic oligonucleotide
gaagcucaagguucucgcu

SEQ ID NO: 371001 - RNA, 19 nt, Artificial Sequence
  Description of Artificial Sequence: Synthetic oligonucleotide
cacuacucauaggagaaaa

SEQ ID NO: 371002 - RNA, 19 nt, Artificial Sequence
  Description of Artificial Sequence: Synthetic oligonucleotide
uaagccaugcugggauagu

SEQ ID NO: 371003 - RNA, 19 nt, Artificial Sequence
  Description of Artificial Sequence: Synthetic oligonucleotide
gugauugaagagaaacacu

SEQ ID NO: 371004 - RNA, 19 nt, Artificial Sequence
  Description of Artificial Sequence: Synthetic oligonucleotide
auucuagcugggcucugua

SEQ ID NO: 371005 - RNA, 19 nt, Artificial Sequence
  Description of Artificial Sequence: Synthetic oligonucleotide
cagccucacuacucauagg

SEQ ID NO: 371006 - RNA, 19 nt, Artificial Sequence
  Description of Artificial Sequence: Synthetic oligonucleotide
aggaaacacgauguauaaa

SEQ ID NO: 371007 - RNA, 19 nt, Artificial Sequence
  Description of Artificial Sequence: Synthetic oligonucleotide
ccucacuacucauaggaga

SEQ ID NO: 371008 - RNA, 19 nt, Artificial Sequence
  Description of Artificial Sequence: Synthetic oligonucleotide
gacaugcuuacaccuugua

SEQ ID NO: 371009 - RNA, 19 nt, Artificial Sequence
  Description of Artificial Sequence: Synthetic oligonucleotide
cauuaucccaaucucucau

SEQ ID NO: 371010 - RNA, 19 nt, Artificial Sequence
  Description of Artificial Sequence: Synthetic oligonucleotide
cgguacuuucauaaaggag

SEQ ID NO: 371011 - RNA, 19 nt, Artificial Sequence
  Description of Artificial Sequence: Synthetic oligonucleotide
cuucagaacucgagacaca

SEQ ID NO: 371012 - RNA, 19 nt, Artificial Sequence
  Description of Artificial Sequence: Synthetic oligonucleotide
uacuuucauaaaggagcaa

SEQ ID NO: 371013 - RNA, 19 nt, Artificial Sequence
  Description of Artificial Sequence: Synthetic oligonucleotide
accuguuacugugcuguca

SEQ ID NO: 371014 - RNA, 19 nt, Artificial Sequence
  Description of Artificial Sequence: Synthetic oligonucleotide
cuagacgcagcccuggaau

SEQ ID NO: 371015 - RNA, 19 nt, Artificial Sequence
  Description of Artificial Sequence: Synthetic oligonucleotide
aggacucgguacuuucaua

SEQ ID NO: 371016 - RNA, 19 nt, Artificial Sequence
  Description of Artificial Sequence: Synthetic oligonucleotide
cugggauagugcacucuca

SEQ ID NO: 371017 - RNA, 19 nt, Artificial Sequence
  Description of Artificial Sequence: Synthetic oligonucleotide
cgagcaaagugaucucugc

SEQ ID NO: 371018 - RNA, 19 nt, Artificial Sequence
  Description of Artificial Sequence: Synthetic oligonucleotide
gcuuaaacaagcaccucaa

SEQ ID NO: 371019 - RNA, 19 nt, Artificial Sequence
  Description of Artificial Sequence: Synthetic oligonucleotide
gcuaugugcacaauccuua

SEQ ID NO: 371020 - RNA, 19 nt, Artificial Sequence
  Description of Artificial Sequence: Synthetic oligonucleotide
gaggacucgguacuuucau

SEQ ID NO: 371021 - RNA, 19 nt, Artificial Sequence
  Description of Artificial Sequence: Synthetic oligonucleotide
ugacggcaggagagggacu

SEQ ID NO: 371022 - RNA, 19 nt, Artificial Sequence
  Description of Artificial Sequence: Synthetic oligonucleotide
guuaaucugcggacaaagu

SEQ ID NO: 371023 - RNA, 19 nt, Artificial Sequence
  Description of Artificial Sequence: Synthetic oligonucleotide
gaauccggaugaaaucggu

SEQ ID NO: 371024 - RNA, 19 nt, Artificial Sequence
  Description of Artificial Sequence: Synthetic oligonucleotide
gggucagucucuucagaga

SEQ ID NO: 371025 - RNA, 19 nt, Artificial Sequence
  Description of Artificial Sequence: Synthetic oligonucleotide
agguuucauuauagaaccu

SEQ ID NO: 371026 - RNA, 19 nt, Artificial Sequence
  Description of Artificial Sequence: Synthetic oligonucleotide
cugugaccucuuauugaca

SEQ ID NO: 371027 - RNA, 19 nt, Artificial Sequence
  Description of Artificial Sequence: Synthetic oligonucleotide
ccuuuguauuuucugaugu

SEQ ID NO: 371028 - RNA, 19 nt, Artificial Sequence
  Description of Artificial Sequence: Synthetic oligonucleotide
ggaccuuguuaaaaugcca

SEQ ID NO: 371029 - RNA, 19 nt, Artificial Sequence
  Description of Artificial Sequence: Synthetic oligonucleotide
gggacugcgugggacuggg

SEQ ID NO: 371030 - RNA, 19 nt, Artificial Sequence
  Description of Artificial Sequence: Synthetic oligonucleotide
cuuccuuacuagauuucau

SEQ ID NO: 371031 - RNA, 19 nt, Artificial Sequence
  Description of Artificial Sequence: Synthetic oligonucleotide
aggcuuaaauugguaggua

SEQ ID NO: 371032 - RNA, 19 nt, Artificial Sequence
  Description of Artificial Sequence: Synthetic oligonucleotide
cuggugcuagacgcagccc

SEQ ID NO: 371033 - RNA, 19 nt, Artificial Sequence
  Description of Artificial Sequence: Synthetic oligonucleotide
gcacucugaaacugucuuc

SEQ ID NO: 371034 - RNA, 19 nt, Artificial Sequence
  Description of Artificial Sequence: Synthetic oligonucleotide
gcagagugaacuauagggu

SEQ ID NO: 371035 - RNA, 19 nt, Artificial Sequence
  Description of Artificial Sequence: Synthetic oligonucleotide
cuguuugauagacccgacu

SEQ ID NO: 371036 - RNA, 19 nt, Artificial Sequence
  Description of Artificial Sequence: Synthetic oligonucleotide
cacguaagugagcuuuucu

SEQ ID NO: 371037 - RNA, 19 nt, Artificial Sequence
  Description of Artificial Sequence: Synthetic oligonucleotide
uggagacuacaagcagaaa

SEQ ID NO: 371038 - RNA, 19 nt, Artificial Sequence
  Description of Artificial Sequence: Synthetic oligonucleotide
acaacgcaaacuagacauu

SEQ ID NO: 371039 - RNA, 19 nt, Artificial Sequence
  Description of Artificial Sequence: Synthetic oligonucleotide
cuagauuucauggcaccau

SEQ ID NO: 371040 - RNA, 19 nt, Artificial Sequence
  Description of Artificial Sequence: Synthetic oligonucleotide
gccucacuacucauaggag

SEQ ID NO: 371041 - RNA, 19 nt, Artificial Sequence
  Description of Artificial Sequence: Synthetic oligonucleotide
caagcaucccuugggaccu

SEQ ID NO: 371042 - RNA, 19 nt, Artificial Sequence
  Description of Artificial Sequence: Synthetic oligonucleotide
cuagacauuuucccuucau

SEQ ID NO: 371043 - RNA, 19 nt, Artificial Sequence
  Description of Artificial Sequence: Synthetic oligonucleotide
caggcaugaggacucggua

SEQ ID NO: 371044 - RNA, 19 nt, Artificial Sequence
  Description of Artificial Sequence: Synthetic oligonucleotide
gacgcagcccuggaauaaa

SEQ ID NO: 371045 - RNA, 19 nt, Artificial Sequence
  Description of Artificial Sequence: Synthetic oligonucleotide
ugcuuacaccuuguaccuu

SEQ ID NO: 371046 - RNA, 19 nt, Artificial Sequence
  Description of Artificial Sequence: Synthetic oligonucleotide
caacgcaaacuagacauuu

SEQ ID NO: 371047 - RNA, 19 nt, Artificial Sequence
  Description of Artificial Sequence: Synthetic oligonucleotide
gcggacaaagugaugcuaa

SEQ ID NO: 371048 - RNA, 19 nt, Artificial Sequence
  Description of Artificial Sequence: Synthetic oligonucleotide
uggcaccaugaggcaauga

SEQ ID NO: 371049 - RNA, 19 nt, Artificial Sequence
  Description of Artificial Sequence: Synthetic oligonucleotide
cuauagggugccgggccca

SEQ ID NO: 371050 - RNA, 19 nt, Artificial Sequence
  Description of Artificial Sequence: Synthetic oligonucleotide
caugaguaucaaaggucuu

SEQ ID NO: 371051 - RNA, 19 nt, Artificial Sequence
  Description of Artificial Sequence: Synthetic oligonucleotide
ccgggcccaguuuugugug

SEQ ID NO: 371052 - RNA, 19 nt, Artificial Sequence
  Description of Artificial Sequence: Synthetic oligonucleotide
cugggacgccacugaccug

SEQ ID NO: 371053 - RNA, 19 nt, Artificial Sequence
  Description of Artificial Sequence: Synthetic oligonucleotide
caagcaccucaacuugccu

SEQ ID NO: 371054 - RNA, 19 nt, Artificial Sequence
  Description of Artificial Sequence: Synthetic oligonucleotide
uagacccgacuggcuggug

SEQ ID NO: 371055 - RNA, 19 nt, Artificial Sequence
  Description of Artificial Sequence: Synthetic oligonucleotide
cugcuacuuacaccuuugu

SEQ ID NO: 371056 - RNA, 19 nt, Artificial Sequence
  Description of Artificial Sequence: Synthetic oligonucleotide
gcuagaucccauucuccau

SEQ ID NO: 371057 - RNA, 19 nt, Artificial Sequence
  Description of Artificial Sequence: Synthetic oligonucleotide
gaccucuuauugacaugcu

SEQ ID NO: 371058 - RNA, 19 nt, Artificial Sequence
  Description of Artificial Sequence: Synthetic oligonucleotide
caacuugccuaaugacaau

SEQ ID NO: 371059 - RNA, 19 nt, Artificial Sequence
  Description of Artificial Sequence: Synthetic oligonucleotide
ucccuacacuugucuuguu

SEQ ID NO: 371060 - RNA, 19 nt, Artificial Sequence
  Description of Artificial Sequence: Synthetic oligonucleotide
acgcagcccuggaauaaaa

SEQ ID NO: 371061 - RNA, 19 nt, Artificial Sequence
  Description of Artificial Sequence: Synthetic oligonucleotide
ggugccgggcccaguuuug

SEQ ID NO: 371062 - RNA, 19 nt, Artificial Sequence
  Description of Artificial Sequence: Synthetic oligonucleotide
ugcgugggacugggacgcc

SEQ ID NO: 371063 - RNA, 19 nt, Artificial Sequence
  Description of Artificial Sequence: Synthetic oligonucleotide
gcucuguauauaauaucau

SEQ ID NO: 371064 - RNA, 19 nt, Artificial Sequence
  Description of Artificial Sequence: Synthetic oligonucleotide
ccuugggaccuuguuaaaa

SEQ ID NO: 371065 - RNA, 19 nt, Artificial Sequence
  Description of Artificial Sequence: Synthetic oligonucleotide
caguccuuucugacacgua

SEQ ID NO: 371066 - RNA, 19 nt, Artificial Sequence
  Description of Artificial Sequence: Synthetic oligonucleotide
cccuacacuugucuuguua

SEQ ID NO: 371067 - RNA, 19 nt, Artificial Sequence
  Description of Artificial Sequence: Synthetic oligonucleotide
cccgacuggcuggugcuag

SEQ ID NO: 371068 - RNA, 19 nt, Artificial Sequence
  Description of Artificial Sequence: Synthetic oligonucleotide
cgucaacuucaguuaucuc

SEQ ID NO: 371069 - RNA, 19 nt, Artificial Sequence
  Description of Artificial Sequence: Synthetic oligonucleotide
caccaugaauccggaugaa

SEQ ID NO: 371070 - RNA, 19 nt, Artificial Sequence
  Description of Artificial Sequence: Synthetic oligonucleotide
caagacuccccugcaguuu

SEQ ID NO: 371071 - RNA, 19 nt, Artificial Sequence
  Description of Artificial Sequence: Synthetic oligonucleotide
gaccugcuugauacuucau

SEQ ID NO: 371072 - RNA, 19 nt, Artificial Sequence
  Description of Artificial Sequence: Synthetic oligonucleotide
ggcuuccugccaggaccag

SEQ ID NO: 371073 - RNA, 19 nt, Artificial Sequence
  Description of Artificial Sequence: Synthetic oligonucleotide
cucgagacacaggcuuccu

SEQ ID NO: 371074 - RNA, 19 nt, Artificial Sequence
  Description of Artificial Sequence: Synthetic oligonucleotide
gguucucgcucugggcucu

SEQ ID NO: 371075 - RNA, 19 nt, Artificial Sequence
  Description of Artificial Sequence: Synthetic oligonucleotide
ccauuguauaaggcaaaau

SEQ ID NO: 371076 - RNA, 19 nt, Artificial Sequence
  Description of Artificial Sequence: Synthetic oligonucleotide
acccugcuacuuacaccuu

SEQ ID NO: 371077 - RNA, 19 nt, Artificial Sequence
  Description of Artificial Sequence: Synthetic oligonucleotide
ccccuaaaauugugaaguu

SEQ ID NO: 371078 - RNA, 19 nt, Artificial Sequence
  Description of Artificial Sequence: Synthetic oligonucleotide
ccucccgaccgucucuggu

SEQ ID NO: 371079 - RNA, 19 nt, Artificial Sequence
  Description of Artificial Sequence: Synthetic oligonucleotide
cgaccgucucugguucuuc

SEQ ID NO: 371080 - RNA, 19 nt, Artificial Sequence
  Description of Artificial Sequence: Synthetic oligonucleotide
cccgaccgucucugguucu

SEQ ID NO: 371081 - RNA, 19 nt, Artificial Sequence
  Description of Artificial Sequence: Synthetic oligonucleotide
ccgaccgucucugguucuu

SEQ ID NO: 371082 - RNA, 19 nt, Artificial Sequence
  Description of Artificial Sequence: Synthetic oligonucleotide
gggacgccacugaccuguu

SEQ ID NO: 371083 - RNA, 19 nt, Artificial Sequence
  Description of Artificial Sequence: Synthetic oligonucleotide
agugaugucacugagaaac

SEQ ID NO: 371084 - RNA, 19 nt, Artificial Sequence
  Description of Artificial Sequence: Synthetic oligonucleotide
acuuaaauaaacccagccc

SEQ ID NO: 371085 - RNA, 19 nt, Artificial Sequence
  Description of Artificial Sequence: Synthetic oligonucleotide
agugcaaccacacacuccc

SEQ ID NO: 371086 - RNA, 19 nt, Artificial Sequence
  Description of Artificial Sequence: Synthetic oligonucleotide
aaacuuaauuuauugaaga

SEQ ID NO: 371087 - RNA, 19 nt, Artificial Sequence
  Description of Artificial Sequence: Synthetic oligonucleotide
aaacauugguguuaguggg

SEQ ID NO: 371088 - RNA, 19 nt, Artificial Sequence
  Description of Artificial Sequence: Synthetic oligonucleotide
cucgauaucagccagaaug

SEQ ID NO: 371089 - RNA, 19 nt, Artificial Sequence
  Description of Artificial Sequence: Synthetic oligonucleotide
acugaaucgaaggaaaacc

SEQ ID NO: 371090 - RNA, 19 nt, Artificial Sequence
  Description of Artificial Sequence: Synthetic oligonucleotide
uaaucuaccucgcugagug

SEQ ID NO: 371091 - RNA, 19 nt, Artificial Sequence
  Description of Artificial Sequence: Synthetic oligonucleotide
uuugagugcaaccacacac

SEQ ID NO: 371092 - RNA, 19 nt, Artificial Sequence
  Description of Artificial Sequence: Synthetic oligonucleotide
acucguguguuucaggucc

SEQ ID NO: 371093 - RNA, 19 nt, Artificial Sequence
  Description of Artificial Sequence: Synthetic oligonucleotide
uagaauagaacucaaugaa

SEQ ID NO: 371094 - RNA, 19 nt, Artificial Sequence
  Description of Artificial Sequence: Synthetic oligonucleotide
ucgauaucagccagaaugg

SEQ ID NO: 371095 - RNA, 19 nt, Artificial Sequence
  Description of Artificial Sequence: Synthetic oligonucleotide
auaaaauuaaugugcccuc

SEQ ID NO: 371096 - RNA, 19 nt, Artificial Sequence
  Description of Artificial Sequence: Synthetic oligonucleotide
ucucuuaucacuugcuaag

SEQ ID NO: 371097 - RNA, 19 nt, Artificial Sequence
  Description of Artificial Sequence: Synthetic oligonucleotide
aggagcguaaucuaccucg

SEQ ID NO: 371098 - RNA, 19 nt, Artificial Sequence
  Description of Artificial Sequence: Synthetic oligonucleotide
auagaauccggucacacca

SEQ ID NO: 371099 - RNA, 19 nt, Artificial Sequence
  Description of Artificial Sequence: Synthetic oligonucleotide
uaccacgggacacugaagg

SEQ ID NO: 371100 - RNA, 19 nt, Artificial Sequence
  Description of Artificial Sequence: Synthetic oligonucleotide
ugcucaauccaaauaaaac

SEQ ID NO: 371101 - RNA, 19 nt, Artificial Sequence
  Description of Artificial Sequence: Synthetic oligonucleotide
ucgaaggaaaaccuugugc

SEQ ID NO: 371102 - RNA, 19 nt, Artificial Sequence
  Description of Artificial Sequence: Synthetic oligonucleotide
gguagaauagaacucaaug

SEQ ID NO: 371103 - RNA, 19 nt, Artificial Sequence
  Description of Artificial Sequence: Synthetic oligonucleotide
aauuccaaggggcugggga

SEQ ID NO: 371104 - RNA, 19 nt, Artificial Sequence
  Description of Artificial Sequence: Synthetic oligonucleotide
guagaauagaacucaauga

SEQ ID NO: 371105 - RNA, 19 nt, Artificial Sequence
  Description of Artificial Sequence: Synthetic oligonucleotide
ugagcaucauucucgaagc

SEQ ID NO: 371106 - RNA, 19 nt, Artificial Sequence
  Description of Artificial Sequence: Synthetic oligonucleotide
gauguacccgcuuuuguag

SEQ ID NO: 371107 - RNA, 19 nt, Artificial Sequence
  Description of Artificial Sequence: Synthetic oligonucleotide
gaauagaacucaaugaaga

SEQ ID NO: 371108 - RNA, 19 nt, Artificial Sequence
  Description of Artificial Sequence: Synthetic oligonucleotide
uguaauuuauuaaggugau

SEQ ID NO: 371109 - RNA, 19 nt, Artificial Sequence
  Description of Artificial Sequence: Synthetic oligonucleotide
uuauuaaggugauuuugcu

SEQ ID NO: 371110 - RNA, 19 nt, Artificial Sequence
  Description of Artificial Sequence: Synthetic oligonucleotide
uggaccacgggccucaccc

SEQ ID NO: 371111 - RNA, 19 nt, Artificial Sequence
  Description of Artificial Sequence: Synthetic oligonucleotide
ugguccgaaccccaguugg

SEQ ID NO: 371112 - RNA, 19 nt, Artificial Sequence
  Description of Artificial Sequence: Synthetic oligonucleotide
cuugcuaagcugcagggug

SEQ ID NO: 371113 - RNA, 19 nt, Artificial Sequence
  Description of Artificial Sequence: Synthetic oligonucleotide
cucucuccuacuaauguag

SEQ ID NO: 371114 - RNA, 19 nt, Artificial Sequence
  Description of Artificial Sequence: Synthetic oligonucleotide
uauuaaggugauuuugcuc

SEQ ID NO: 371115 - RNA, 19 nt, Artificial Sequence
  Description of Artificial Sequence: Synthetic oligonucleotide
aggaguugcaaggaggaac

SEQ ID NO: 371116 - RNA, 19 nt, Artificial Sequence
  Description of Artificial Sequence: Synthetic oligonucleotide
aagaaggucaagaacugcu

SEQ ID NO: 371117 - RNA, 19 nt, Artificial Sequence
  Description of Artificial Sequence: Synthetic oligonucleotide
auaggaauugcagaugaug

SEQ ID NO: 371118 - RNA, 19 nt, Artificial Sequence
  Description of Artificial Sequence: Synthetic oligonucleotide
cauaugugucccuggagcc

SEQ ID NO: 371119 - RNA, 19 nt, Artificial Sequence
  Description of Artificial Sequence: Synthetic oligonucleotide
aagcgguucugguuccgcc

SEQ ID NO: 371120 - RNA, 19 nt, Artificial Sequence
  Description of Artificial Sequence: Synthetic oligonucleotide
ucuuaucacuugcuaagcu

SEQ ID NO: 371121 - RNA, 19 nt, Artificial Sequence
  Description of Artificial Sequence: Synthetic oligonucleotide
agaauagaacucaaugaag

SEQ ID NO: 371122 - RNA, 19 nt, Artificial Sequence
  Description of Artificial Sequence: Synthetic oligonucleotide
ggaauugcagaugaugugg

SEQ ID NO: 371123 - RNA, 19 nt, Artificial Sequence
  Description of Artificial Sequence: Synthetic oligonucleotide
agugcaaccauaggaauug

SEQ ID NO: 371124 - RNA, 19 nt, Artificial Sequence
  Description of Artificial Sequence: Synthetic oligonucleotide
cucauagcguuccaagccg

SEQ ID NO: 371125 - RNA, 19 nt, Artificial Sequence
  Description of Artificial Sequence: Synthetic oligonucleotide
aacucguguguuucagguc

SEQ ID NO: 371126 - RNA, 19 nt, Artificial Sequence
  Description of Artificial Sequence: Synthetic oligonucleotide
uguggaaguuggcuugcgg

SEQ ID NO: 371127 - RNA, 19 nt, Artificial Sequence
  Description of Artificial Sequence: Synthetic oligonucleotide
cuucauggaaccacggaug

SEQ ID NO: 371128 - RNA, 19 nt, Artificial Sequence
  Description of Artificial Sequence: Synthetic oligonucleotide
gaauugcagaugauguggg

SEQ ID NO: 371129 - RNA, 19 nt, Artificial Sequence
  Description of Artificial Sequence: Synthetic oligonucleotide
caaacaacuuggacagugg

SEQ ID NO: 371130 - RNA, 19 nt, Artificial Sequence
  Description of Artificial Sequence: Synthetic oligonucleotide
gauaaaggauccaggcuag

SEQ ID NO: 371131 - RNA, 19 nt, Artificial Sequence
  Description of Artificial Sequence: Synthetic oligonucleotide
agucggaaggcccucgggg

SEQ ID NO: 371132 - RNA, 19 nt, Artificial Sequence
  Description of Artificial Sequence: Synthetic oligonucleotide
agcguaaucuaccucgcug

SEQ ID NO: 371133 - RNA, 19 nt, Artificial Sequence
  Description of Artificial Sequence: Synthetic oligonucleotide
auguacccgcuuuuguagc

SEQ ID NO: 371134 - RNA, 19 nt, Artificial Sequence
  Description of Artificial Sequence: Synthetic oligonucleotide
uugagugcaaccacacacu

SEQ ID NO: 371135 - RNA, 19 nt, Artificial Sequence
  Description of Artificial Sequence: Synthetic oligonucleotide
gagggaaguggaaacauug

SEQ ID NO: 371136 - RNA, 19 nt, Artificial Sequence
  Description of Artificial Sequence: Synthetic oligonucleotide
ucugaugcggggugguggg

SEQ ID NO: 371137 - RNA, 19 nt, Artificial Sequence
  Description of Artificial Sequence: Synthetic oligonucleotide
uugcucaauccaaauaaaa

SEQ ID NO: 371138 - RNA, 19 nt, Artificial Sequence
  Description of Artificial Sequence: Synthetic oligonucleotide
guguguuucagguccgagg

SEQ ID NO: 371139 - RNA, 19 nt, Artificial Sequence
  Description of Artificial Sequence: Synthetic oligonucleotide
ugcaaggaggaacucgugu

SEQ ID NO: 371140 - RNA, 19 nt, Artificial Sequence
  Description of Artificial Sequence: Synthetic oligonucleotide
aacauugguguuagugggg

SEQ ID NO: 371141 - RNA, 19 nt, Artificial Sequence
  Description of Artificial Sequence: Synthetic oligonucleotide
uuaagcgugggcaguuggc

SEQ ID NO: 371142 - RNA, 19 nt, Artificial Sequence
  Description of Artificial Sequence: Synthetic oligonucleotide
uaagcgugggcaguuggcg

SEQ ID NO: 371143 - RNA, 19 nt, Artificial Sequence
  Description of Artificial Sequence: Synthetic oligonucleotide
caagcagguagaauagaac

SEQ ID NO: 371144 - RNA, 19 nt, Artificial Sequence
  Description of Artificial Sequence: Synthetic oligonucleotide
ucauagagccgcucacggg

SEQ ID NO: 371145 - RNA, 19 nt, Artificial Sequence
  Description of Artificial Sequence: Synthetic oligonucleotide
guggaaguuggcuugcggc

SEQ ID NO: 371146 - RNA, 19 nt, Artificial Sequence
  Description of Artificial Sequence: Synthetic oligonucleotide
ugacgaugucaucagugca

SEQ ID NO: 371147 - RNA, 19 nt, Artificial Sequence
  Description of Artificial Sequence: Synthetic oligonucleotide
aguccgguggcgcccaagc

SEQ ID NO: 371148 - RNA, 19 nt, Artificial Sequence
  Description of Artificial Sequence: Synthetic oligonucleotide
aguguuuuggccaucugca

SEQ ID NO: 371149 - RNA, 19 nt, Artificial Sequence
  Description of Artificial Sequence: Synthetic oligonucleotide
aaccuugugcuucucucgu

SEQ ID NO: 371150 - RNA, 19 nt, Artificial Sequence
  Description of Artificial Sequence: Synthetic oligonucleotide
aaucgaaggaaaaccuugu

SEQ ID NO: 371151 - RNA, 19 nt, Artificial Sequence
  Description of Artificial Sequence: Synthetic oligonucleotide
gauaucuccuccucacuga

SEQ ID NO: 371152 - RNA, 19 nt, Artificial Sequence
  Description of Artificial Sequence: Synthetic oligonucleotide
aguacuggcaggugaggug

SEQ ID NO: 371153 - RNA, 19 nt, Artificial Sequence
  Description of Artificial Sequence: Synthetic oligonucleotide
gaagacaucaagccagcaa

SEQ ID NO: 371154 - RNA, 19 nt, Artificial Sequence
  Description of Artificial Sequence: Synthetic oligonucleotide
cacuugcuaagcugcaggg

SEQ ID NO: 371155 - RNA, 19 nt, Artificial Sequence
  Description of Artificial Sequence: Synthetic oligonucleotide
gauuugagugcaaccacac

SEQ ID NO: 371156 - RNA, 19 nt, Artificial Sequence
  Description of Artificial Sequence: Synthetic oligonucleotide
gucuaagcgguucugguuc

SEQ ID NO: 371157 - RNA, 19 nt, Artificial Sequence
  Description of Artificial Sequence: Synthetic oligonucleotide
gcauaugugucccuggagc

SEQ ID NO: 371158 - RNA, 19 nt, Artificial Sequence
  Description of Artificial Sequence: Synthetic oligonucleotide
auuuccggaggacgucccc

SEQ ID NO: 371159 - RNA, 19 nt, Artificial Sequence
  Description of Artificial Sequence: Synthetic oligonucleotide
uggaaccccuuccaggaca

SEQ ID NO: 371160 - RNA, 19 nt, Artificial Sequence
  Description of Artificial Sequence: Synthetic oligonucleotide
cuccaaaacccacacagca

SEQ ID NO: 371161 - RNA, 19 nt, Artificial Sequence
  Description of Artificial Sequence: Synthetic oligonucleotide
ugagugcaaccacacacuc

SEQ ID NO: 371162 - RNA, 19 nt, Artificial Sequence
  Description of Artificial Sequence: Synthetic oligonucleotide
uguagcucggcagccaucu

SEQ ID NO: 371163 - RNA, 19 nt, Artificial Sequence
  Description of Artificial Sequence: Synthetic oligonucleotide
aaugugcccucccucucca

SEQ ID NO: 371164 - RNA, 19 nt, Artificial Sequence
  Description of Artificial Sequence: Synthetic oligonucleotide
aaccucaaaaugucccaaa

SEQ ID NO: 371165 - RNA, 19 nt, Artificial Sequence
  Description of Artificial Sequence: Synthetic oligonucleotide
uaucacuugcuaagcugca

SEQ ID NO: 371166 - RNA, 19 nt, Artificial Sequence
  Description of Artificial Sequence: Synthetic oligonucleotide
agcgguucugguuccgccg

SEQ ID NO: 371167 - RNA, 19 nt, Artificial Sequence
  Description of Artificial Sequence: Synthetic oligonucleotide
caaccauaggaauugcaga

SEQ ID NO: 371168 - RNA, 19 nt, Artificial Sequence
  Description of Artificial Sequence: Synthetic oligonucleotide
ucuaagcgguucugguucc

SEQ ID NO: 371169 - RNA, 19 nt, Artificial Sequence
  Description of Artificial Sequence: Synthetic oligonucleotide
uccuacuaauguaguucag

SEQ ID NO: 371170 - RNA, 19 nt, Artificial Sequence
  Description of Artificial Sequence: Synthetic oligonucleotide
ucauagcguuccaagccga

SEQ ID NO: 371171 - RNA, 19 nt, Artificial Sequence
  Description of Artificial Sequence: Synthetic oligonucleotide
cucacgggugcccaggcgc

SEQ ID NO: 371172 - RNA, 19 nt, Artificial Sequence
  Description of Artificial Sequence: Synthetic oligonucleotide
aggacguccccagaguagg

SEQ ID NO: 371173 - RNA, 19 nt, Artificial Sequence
  Description of Artificial Sequence: Synthetic oligonucleotide
gguacucgauaucagccag

SEQ ID NO: 371174 - RNA, 19 nt, Artificial Sequence
  Description of Artificial Sequence: Synthetic oligonucleotide
auagucggaaggcccucgg

SEQ ID NO: 371175 - RNA, 19 nt, Artificial Sequence
  Description of Artificial Sequence: Synthetic oligonucleotide
ucauggauuugagugcaac

SEQ ID NO: 371176 - RNA, 19 nt, Artificial Sequence
  Description of Artificial Sequence: Synthetic oligonucleotide
cuccuacuaauguaguuca

SEQ ID NO: 371177 - RNA, 19 nt, Artificial Sequence
  Description of Artificial Sequence: Synthetic oligonucleotide
aagauggcugaguccggca

SEQ ID NO: 371178 - RNA, 19 nt, Artificial Sequence
  Description of Artificial Sequence: Synthetic oligonucleotide
ugaggugagauggcaauuc

SEQ ID NO: 371179 - RNA, 19 nt, Artificial Sequence
  Description of Artificial Sequence: Synthetic oligonucleotide
aguacugagcaagaucggu

SEQ ID NO: 371180 - RNA, 19 nt, Artificial Sequence
  Description of Artificial Sequence: Synthetic oligonucleotide
ucucuccuacuaauguagu

SEQ ID NO: 371181 - RNA, 19 nt, Artificial Sequence
  Description of Artificial Sequence: Synthetic oligonucleotide
ucggucauccccacuugca

SEQ ID NO: 371182 - RNA, 19 nt, Artificial Sequence
  Description of Artificial Sequence: Synthetic oligonucleotide
uagucggaaggcccucggg

SEQ ID NO: 371183 - RNA, 19 nt, Artificial Sequence
  Description of Artificial Sequence: Synthetic oligonucleotide
cucacugaaucgaaggaaa

SEQ ID NO: 371184 - RNA, 19 nt, Artificial Sequence
  Description of Artificial Sequence: Synthetic oligonucleotide
cucuuaucacuugcuaagc

SEQ ID NO: 371185 - RNA, 19 nt, Artificial Sequence
  Description of Artificial Sequence: Synthetic oligonucleotide
gaacucguguguuucaggu

SEQ ID NO: 371186 - RNA, 19 nt, Artificial Sequence
  Description of Artificial Sequence: Synthetic oligonucleotide
aggggucggccauagucgg

SEQ ID NO: 371187 - RNA, 19 nt, Artificial Sequence
  Description of Artificial Sequence: Synthetic oligonucleotide
gaugggauaaacuggcauu

SEQ ID NO: 371188 - RNA, 19 nt, Artificial Sequence
  Description of Artificial Sequence: Synthetic oligonucleotide
auugguccgaaccccaguu

SEQ ID NO: 371189 - RNA, 19 nt, Artificial Sequence
  Description of Artificial Sequence: Synthetic oligonucleotide
ucggggaggcugcaauucc

SEQ ID NO: 371190 - RNA, 19 nt, Artificial Sequence
  Description of Artificial Sequence: Synthetic oligonucleotide
gucggccauagucggaagg

SEQ ID NO: 371191 - RNA, 19 nt, Artificial Sequence
  Description of Artificial Sequence: Synthetic oligonucleotide
caaacucaauguaggccug

SEQ ID NO: 371192 - RNA, 19 nt, Artificial Sequence
  Description of Artificial Sequence: Synthetic oligonucleotide
uccgagugcccaagauggg

SEQ ID NO: 371193 - RNA, 19 nt, Artificial Sequence
  Description of Artificial Sequence: Synthetic oligonucleotide
uacucgauaucagccagaa

SEQ ID NO: 371194 - RNA, 19 nt, Artificial Sequence
  Description of Artificial Sequence: Synthetic oligonucleotide
ucgcuggugacgaugucau

SEQ ID NO: 371195 - RNA, 19 nt, Artificial Sequence
  Description of Artificial Sequence: Synthetic oligonucleotide
guaggaguugcaaggagga

SEQ ID NO: 371196 - RNA, 19 nt, Artificial Sequence
  Description of Artificial Sequence: Synthetic oligonucleotide
uguuaguggggaccaggau

SEQ ID NO: 371197 - RNA, 19 nt, Artificial Sequence
  Description of Artificial Sequence: Synthetic oligonucleotide
accucgcugaguguuuugg

SEQ ID NO: 371198 - RNA, 19 nt, Artificial Sequence
  Description of Artificial Sequence: Synthetic oligonucleotide
ugaaggagccuugcuuuug

SEQ ID NO: 371199 - RNA, 19 nt, Artificial Sequence
  Description of Artificial Sequence: Synthetic oligonucleotide
aaucuaccucgcugagugu

SEQ ID NO: 371200 - RNA, 19 nt, Artificial Sequence
  Description of Artificial Sequence: Synthetic oligonucleotide
uuggcuugcggcucccaga

SEQ ID NO: 371201 - RNA, 19 nt, Artificial Sequence
  Description of Artificial Sequence: Synthetic oligonucleotide
auagccauccauggacuug

SEQ ID NO: 371202 - RNA, 19 nt, Artificial Sequence
  Description of Artificial Sequence: Synthetic oligonucleotide
ggacuugacugugagcagg

SEQ ID NO: 371203 - RNA, 19 nt, Artificial Sequence
  Description of Artificial Sequence: Synthetic oligonucleotide
gacgaugucaucagugcaa

SEQ ID NO: 371204 - RNA, 19 nt, Artificial Sequence
  Description of Artificial Sequence: Synthetic oligonucleotide
auaaaggauccaggcuagg

SEQ ID NO: 371205 - RNA, 19 nt, Artificial Sequence
  Description of Artificial Sequence: Synthetic oligonucleotide
ucuguggaaguuggcuugc

SEQ ID NO: 371206 - RNA, 19 nt, Artificial Sequence
  Description of Artificial Sequence: Synthetic oligonucleotide
acccgcaccuucauggaac

SEQ ID NO: 371207 - RNA, 19 nt, Artificial Sequence
  Description of Artificial Sequence: Synthetic oligonucleotide
ggaaagauaucuccuccuc

SEQ ID NO: 371208 - RNA, 19 nt, Artificial Sequence
  Description of Artificial Sequence: Synthetic oligonucleotide
uugcaaggaggaacucgug

SEQ ID NO: 371209 - RNA, 19 nt, Artificial Sequence
  Description of Artificial Sequence: Synthetic oligonucleotide
gaauggucgcuggugacga

SEQ ID NO: 371210 - RNA, 19 nt, Artificial Sequence
  Description of Artificial Sequence: Synthetic oligonucleotide
aagaucggucauccccacu

SEQ ID NO: 371211 - RNA, 19 nt, Artificial Sequence
  Description of Artificial Sequence: Synthetic oligonucleotide
ggaacucguguguuucagg

SEQ ID NO: 371212 - RNA, 19 nt, Artificial Sequence
  Description of Artificial Sequence: Synthetic oligonucleotide
ggucaagaacugcugggcc

SEQ ID NO: 371213 - RNA, 19 nt, Artificial Sequence
  Description of Artificial Sequence: Synthetic oligonucleotide
agagcccuuucuuggagau

SEQ ID NO: 371214 - RNA, 19 nt, Artificial Sequence
  Description of Artificial Sequence: Synthetic oligonucleotide
uuauggccgagguccugcc

SEQ ID NO: 371215 - RNA, 19 nt, Artificial Sequence
  Description of Artificial Sequence: Synthetic oligonucleotide
ucugguuccgccggguagu

SEQ ID NO: 371216 - RNA, 19 nt, Artificial Sequence
  Description of Artificial Sequence: Synthetic oligonucleotide
cucguguguuucagguccg

SEQ ID NO: 371217 - RNA, 19 nt, Artificial Sequence
  Description of Artificial Sequence: Synthetic oligonucleotide
uggcuugcggcucccagau

SEQ ID NO: 371218 - RNA, 19 nt, Artificial Sequence
  Description of Artificial Sequence: Synthetic oligonucleotide
uuccggaggacguccccag

SEQ ID NO: 371219 - RNA, 19 nt, Artificial Sequence
  Description of Artificial Sequence: Synthetic oligonucleotide
aggaacucguguguuucag

SEQ ID NO: 371220 - RNA, 19 nt, Artificial Sequence
  Description of Artificial Sequence: Synthetic oligonucleotide
acgaggaguccgguggcgc

SEQ ID NO: 371221 - RNA, 19 nt, Artificial Sequence
  Description of Artificial Sequence: Synthetic oligonucleotide
augggauaaacuggcauuu

SEQ ID NO: 371222 - RNA, 19 nt, Artificial Sequence
  Description of Artificial Sequence: Synthetic oligonucleotide
gagugcaaccacacacucc

SEQ ID NO: 371223 - RNA, 19 nt, Artificial Sequence
  Description of Artificial Sequence: Synthetic oligonucleotide
ccagcaaccuuuccgagug

SEQ ID NO: 371224 - RNA, 19 nt, Artificial Sequence
  Description of Artificial Sequence: Synthetic oligonucleotide
gaggacguccccagaguag

SEQ ID NO: 371225 - RNA, 19 nt, Artificial Sequence
  Description of Artificial Sequence: Synthetic oligonucleotide
ucccagaucuguguuccug

SEQ ID NO: 371226 - RNA, 19 nt, Artificial Sequence
  Description of Artificial Sequence: Synthetic oligonucleotide
guacugagcaagaucgguc

SEQ ID NO: 371227 - RNA, 19 nt, Artificial Sequence
  Description of Artificial Sequence: Synthetic oligonucleotide
cauagagccgcucacgggu

SEQ ID NO: 371228 - RNA, 19 nt, Artificial Sequence
  Description of Artificial Sequence: Synthetic oligonucleotide
cauagucggaaggcccucg

SEQ ID NO: 371229 - RNA, 19 nt, Artificial Sequence
  Description of Artificial Sequence: Synthetic oligonucleotide
uuuccggaggacgucccca

SEQ ID NO: 371230 - RNA, 19 nt, Artificial Sequence
  Description of Artificial Sequence: Synthetic oligonucleotide
cacggagccucuguggaag

SEQ ID NO: 371231 - RNA, 19 nt, Artificial Sequence
  Description of Artificial Sequence: Synthetic oligonucleotide
ggcugcaauuccaaggggc

SEQ ID NO: 371232 - RNA, 19 nt, Artificial Sequence
  Description of Artificial Sequence: Synthetic oligonucleotide
accacgggacacugaagga

SEQ ID NO: 371233 - RNA, 19 nt, Artificial Sequence
  Description of Artificial Sequence: Synthetic oligonucleotide
gcgcuugugagcaggaucc

SEQ ID NO: 371234 - RNA, 19 nt, Artificial Sequence
  Description of Artificial Sequence: Synthetic oligonucleotide
cauugguguuaguggggac

SEQ ID NO: 371235 - RNA, 19 nt, Artificial Sequence
  Description of Artificial Sequence: Synthetic oligonucleotide
guugcaaggaggaacucgu

SEQ ID NO: 371236 - RNA, 19 nt, Artificial Sequence
  Description of Artificial Sequence: Synthetic oligonucleotide
cuaccacgggacacugaag

SEQ ID NO: 371237 - RNA, 19 nt, Artificial Sequence
  Description of Artificial Sequence: Synthetic oligonucleotide
gcguaaucuaccucgcuga

SEQ ID NO: 371238 - RNA, 19 nt, Artificial Sequence
  Description of Artificial Sequence: Synthetic oligonucleotide
ggucgucccagccauugug

SEQ ID NO: 371239 - RNA, 19 nt, Artificial Sequence
  Description of Artificial Sequence: Synthetic oligonucleotide
caaacucucuccuacuaau

SEQ ID NO: 371240 - RNA, 19 nt, Artificial Sequence
  Description of Artificial Sequence: Synthetic oligonucleotide
gacuugacugugagcagga

SEQ ID NO: 371241 - RNA, 19 nt, Artificial Sequence
  Description of Artificial Sequence: Synthetic oligonucleotide
cuguguuccuggcuaccac

SEQ ID NO: 371242 - RNA, 19 nt, Artificial Sequence
  Description of Artificial Sequence: Synthetic oligonucleotide
caagaucggucauccccac

SEQ ID NO: 371243 - RNA, 19 nt, Artificial Sequence
  Description of Artificial Sequence: Synthetic oligonucleotide
cccaggagcguaaucuacc

SEQ ID NO: 371244 - RNA, 19 nt, Artificial Sequence
  Description of Artificial Sequence: Synthetic oligonucleotide
uccuucauuuccggaggac

SEQ ID NO: 371245 - RNA, 19 nt, Artificial Sequence
  Description of Artificial Sequence: Synthetic oligonucleotide
auuuuauggccgagguccu

SEQ ID NO: 371246 - RNA, 19 nt, Artificial Sequence
  Description of Artificial Sequence: Synthetic oligonucleotide
guuggcgggaggaccacug

SEQ ID NO: 371247 - RNA, 19 nt, Artificial Sequence
  Description of Artificial Sequence: Synthetic oligonucleotide
gggaaguaacuccaaccuc

SEQ ID NO: 371248 - RNA, 19 nt, Artificial Sequence
  Description of Artificial Sequence: Synthetic oligonucleotide
cguuccaagccgauggccc

SEQ ID NO: 371249 - RNA, 19 nt, Artificial Sequence
  Description of Artificial Sequence: Synthetic oligonucleotide
gagugccgagcguccaggc

SEQ ID NO: 371250 - RNA, 19 nt, Artificial Sequence
  Description of Artificial Sequence: Synthetic oligonucleotide
cugagcaagaucggucauc

SEQ ID NO: 371251 - RNA, 19 nt, Artificial Sequence
  Description of Artificial Sequence: Synthetic oligonucleotide
acggugggacaagaagguc

SEQ ID NO: 371252 - RNA, 19 nt, Artificial Sequence
  Description of Artificial Sequence: Synthetic oligonucleotide
caucucuuaucacuugcua

SEQ ID NO: 371253 - RNA, 19 nt, Artificial Sequence
  Description of Artificial Sequence: Synthetic oligonucleotide
ggauuugagugcaaccaca

SEQ ID NO: 371254 - RNA, 19 nt, Artificial Sequence
  Description of Artificial Sequence: Synthetic oligonucleotide
cacauugguccgaacccca

SEQ ID NO: 371255 - RNA, 19 nt, Artificial Sequence
  Description of Artificial Sequence: Synthetic oligonucleotide
caaccuuuccgagugccca

SEQ ID NO: 371256 - RNA, 19 nt, Artificial Sequence
  Description of Artificial Sequence: Synthetic oligonucleotide
ggauguacccgcuuuugua

SEQ ID NO: 371257 - RNA, 19 nt, Artificial Sequence
  Description of Artificial Sequence: Synthetic oligonucleotide
cuaagcgguucugguuccg

SEQ ID NO: 371258 - RNA, 19 nt, Artificial Sequence
  Description of Artificial Sequence: Synthetic oligonucleotide
aauggucgcuggugacgau

SEQ ID NO: 371259 - RNA, 19 nt, Artificial Sequence
  Description of Artificial Sequence: Synthetic oligonucleotide
ccuggagccccgcucauag

SEQ ID NO: 371260 - RNA, 19 nt, Artificial Sequence
  Description of Artificial Sequence: Synthetic oligonucleotide
cuggggaggagugccgagc

SEQ ID NO: 371261 - RNA, 19 nt, Artificial Sequence
  Description of Artificial Sequence: Synthetic oligonucleotide
cuugcggcucccagaucug

SEQ ID NO: 371262 - RNA, 19 nt, Artificial Sequence
  Description of Artificial Sequence: Synthetic oligonucleotide
agguagaauagaacucaau

SEQ ID NO: 371263 - RNA, 19 nt, Artificial Sequence
  Description of Artificial Sequence: Synthetic oligonucleotide
uucaaacaacuuggacagu

SEQ ID NO: 371264 - RNA, 19 nt, Artificial Sequence
  Description of Artificial Sequence: Synthetic oligonucleotide
caggucgucccagccauug

SEQ ID NO: 371265 - RNA, 19 nt, Artificial Sequence
  Description of Artificial Sequence: Synthetic oligonucleotide
gaggaguccgguggcgccc

SEQ ID NO: 371266 - RNA, 19 nt, Artificial Sequence
  Description of Artificial Sequence: Synthetic oligonucleotide
uccgaaccccaguuggcuu

SEQ ID NO: 371267 - RNA, 19 nt, Artificial Sequence
  Description of Artificial Sequence: Synthetic oligonucleotide
ggcauuuuauggccgaggu

SEQ ID NO: 371268 - RNA, 19 nt, Artificial Sequence
  Description of Artificial Sequence: Synthetic oligonucleotide
gccgugcugccaaucaugg

SEQ ID NO: 371269 - RNA, 19 nt, Artificial Sequence
  Description of Artificial Sequence: Synthetic oligonucleotide
cucggggaggcugcaauuc

SEQ ID NO: 371270 - RNA, 19 nt, Artificial Sequence
  Description of Artificial Sequence: Synthetic oligonucleotide
cuccugcacgaggaguccg

SEQ ID NO: 371271 - RNA, 19 nt, Artificial Sequence
  Description of Artificial Sequence: Synthetic oligonucleotide
gauggcugaguccggcagu

SEQ ID NO: 371272 - RNA, 19 nt, Artificial Sequence
  Description of Artificial Sequence: Synthetic oligonucleotide
guaggccuggucugagguc

SEQ ID NO: 371273 - RNA, 19 nt, Artificial Sequence
  Description of Artificial Sequence: Synthetic oligonucleotide
gcaagaucggucaucccca

SEQ ID NO: 371274 - RNA, 19 nt, Artificial Sequence
  Description of Artificial Sequence: Synthetic oligonucleotide
gcuugcggcucccagaucu

SEQ ID NO: 371275 - RNA, 19 nt, Artificial Sequence
  Description of Artificial Sequence: Synthetic oligonucleotide
uccggaggacguccccaga

SEQ ID NO: 371276 - RNA, 19 nt, Artificial Sequence
  Description of Artificial Sequence: Synthetic oligonucleotide
ugggauaaacuggcauuuu

SEQ ID NO: 371277 - RNA, 19 nt, Artificial Sequence
  Description of Artificial Sequence: Synthetic oligonucleotide
aggucuuagagagcccuuu

SEQ ID NO: 371278 - RNA, 19 nt, Artificial Sequence
  Description of Artificial Sequence: Synthetic oligonucleotide
cuuggugcggcuggcuguc

SEQ ID NO: 371279 - RNA, 19 nt, Artificial Sequence
  Description of Artificial Sequence: Synthetic oligonucleotide
guacuuugaggaaauugau

SEQ ID NO: 371280 - RNA, 19 nt, Artificial Sequence
  Description of Artificial Sequence: Synthetic oligonucleotide
gcauuuuauggccgagguc

SEQ ID NO: 371281 - RNA, 19 nt, Artificial Sequence
  Description of Artificial Sequence: Synthetic oligonucleotide
ggcaguuggcgggaggacc

SEQ ID NO: 371282 - RNA, 19 nt, Artificial Sequence
  Description of Artificial Sequence: Synthetic oligonucleotide
ccaagcauaugugucccug

SEQ ID NO: 371283 - RNA, 19 nt, Artificial Sequence
  Description of Artificial Sequence: Synthetic oligonucleotide
ugcuugugccaagcauaug

SEQ ID NO: 371284 - RNA, 19 nt, Artificial Sequence
  Description of Artificial Sequence: Synthetic oligonucleotide
ggagcguaaucuaccucgc

SEQ ID NO: 371285 - RNA, 19 nt, Artificial Sequence
  Description of Artificial Sequence: Synthetic oligonucleotide
acucgauaucagccagaau

SEQ ID NO: 371286 - RNA, 19 nt, Artificial Sequence
  Description of Artificial Sequence: Synthetic oligonucleotide
ggauaaacuggcauuuuau

SEQ ID NO: 371287 - RNA, 19 nt, Artificial Sequence
  Description of Artificial Sequence: Synthetic oligonucleotide
aggucgucccagccauugu

SEQ ID NO: 371288 - RNA, 19 nt, Artificial Sequence
  Description of Artificial Sequence: Synthetic oligonucleotide
guguuucagguccgaggga

SEQ ID NO: 371289 - RNA, 19 nt, Artificial Sequence
  Description of Artificial Sequence: Synthetic oligonucleotide
guacucgauaucagccaga

SEQ ID NO: 371290 - RNA, 19 nt, Artificial Sequence
  Description of Artificial Sequence: Synthetic oligonucleotide
caaccucaaaaugucccaa

SEQ ID NO: 371291 - RNA, 19 nt, Artificial Sequence
  Description of Artificial Sequence: Synthetic oligonucleotide
ccucgcugaguguuuuggc

SEQ ID NO: 371292 - RNA, 19 nt, Artificial Sequence
  Description of Artificial Sequence: Synthetic oligonucleotide
ggcacggagccuccucugc

SEQ ID NO: 371293 - RNA, 19 nt, Artificial Sequence
  Description of Artificial Sequence: Synthetic oligonucleotide
ccucauccgaugagcuucc

SEQ ID NO: 371294 - RNA, 19 nt, Artificial Sequence
  Description of Artificial Sequence: Synthetic oligonucleotide
acggagccucuguggaagu

SEQ ID NO: 371295 - RNA, 19 nt, Artificial Sequence
  Description of Artificial Sequence: Synthetic oligonucleotide
uccaagccgauggcccgca

SEQ ID NO: 371296 - RNA, 19 nt, Artificial Sequence
  Description of Artificial Sequence: Synthetic oligonucleotide
ggagccccgcucauagcgg

SEQ ID NO: 371297 - RNA, 19 nt, Artificial Sequence
  Description of Artificial Sequence: Synthetic oligonucleotide
ccgaugagcuucccucucc

SEQ ID NO: 371298 - RNA, 19 nt, Artificial Sequence
  Description of Artificial Sequence: Synthetic oligonucleotide
guaaucuaccucgcugagu

SEQ ID NO: 371299 - RNA, 19 nt, Artificial Sequence
  Description of Artificial Sequence: Synthetic oligonucleotide
cguaaucuaccucgcugag

SEQ ID NO: 371300 - RNA, 19 nt, Artificial Sequence
  Description of Artificial Sequence: Synthetic oligonucleotide
gcaggcacugugauggcca

SEQ ID NO: 371301 - RNA, 19 nt, Artificial Sequence
  Description of Artificial Sequence: Synthetic oligonucleotide
gguccacccugaguagggg

SEQ ID NO: 371302 - RNA, 19 nt, Artificial Sequence
  Description of Artificial Sequence: Synthetic oligonucleotide
gagcguaaucuaccucgcu

SEQ ID NO: 371303 - RNA, 19 nt, Artificial Sequence
  Description of Artificial Sequence: Synthetic oligonucleotide
ccggaggacguccccagag

SEQ ID NO: 371304 - RNA, 19 nt, Artificial Sequence
  Description of Artificial Sequence: Synthetic oligonucleotide
cagguccgagggagggaag

SEQ ID NO: 371305 - RNA, 19 nt, Artificial Sequence
  Description of Artificial Sequence: Synthetic oligonucleotide
cgauaucagccagaauggg

SEQ ID NO: 371306 - RNA, 19 nt, Artificial Sequence
  Description of Artificial Sequence: Synthetic oligonucleotide
cagugcaaccauaggaauu

SEQ ID NO: 371307 - RNA, 19 nt, Artificial Sequence
  Description of Artificial Sequence: Synthetic oligonucleotide
ggccgugcugccaaucaug

SEQ ID NO: 371308 - RNA, 19 nt, Artificial Sequence
  Description of Artificial Sequence: Synthetic oligonucleotide
cccgcaccuucauggaacc

SEQ ID NO: 371309 - RNA, 19 nt, Artificial Sequence
  Description of Artificial Sequence: Synthetic oligonucleotide
gguccgaaccccaguuggc

SEQ ID NO: 371310 - RNA, 19 nt, Artificial Sequence
  Description of Artificial Sequence: Synthetic oligonucleotide
ccucccuaggggccgcucg

SEQ ID NO: 371311 - RNA, 19 nt, Artificial Sequence
  Description of Artificial Sequence: Synthetic oligonucleotide
aguuggcgggaggaccacu

SEQ ID NO: 371312 - RNA, 19 nt, Artificial Sequence
  Description of Artificial Sequence: Synthetic oligonucleotide
gaguccgguggcgcccaag

SEQ ID NO: 371313 - RNA, 19 nt, Artificial Sequence
  Description of Artificial Sequence: Synthetic oligonucleotide
gcacgaggaguccgguggc

SEQ ID NO: 371314 - RNA, 19 nt, Artificial Sequence
  Description of Artificial Sequence: Synthetic oligonucleotide
ccgaaccccaguuggcuuc

SEQ ID NO: 371315 - RNA, 19 nt, Artificial Sequence
  Description of Artificial Sequence: Synthetic oligonucleotide
gcugccaaucauggauuug

SEQ ID NO: 371316 - RNA, 19 nt, Artificial Sequence
  Description of Artificial Sequence: Synthetic oligonucleotide
gcaguuggcgggaggacca

SEQ ID NO: 371317 - RNA, 19 nt, Artificial Sequence
  Description of Artificial Sequence: Synthetic oligonucleotide
gguggcgcccaagcugggg

SEQ ID NO: 371318 - RNA, 19 nt, Artificial Sequence
  Description of Artificial Sequence: Synthetic oligonucleotide
cugucucauccuuaucaau

SEQ ID NO: 371319 - RNA, 19 nt, Artificial Sequence
  Description of Artificial Sequence: Synthetic oligonucleotide
ggucggccauagucggaag

SEQ ID NO: 371320 - RNA, 19 nt, Artificial Sequence
  Description of Artificial Sequence: Synthetic oligonucleotide
uuccgccggguagucuucu

SEQ ID NO: 371321 - RNA, 19 nt, Artificial Sequence
  Description of Artificial Sequence: Synthetic oligonucleotide
cucauccgaugagcuuccc

SEQ ID NO: 371322 - RNA, 19 nt, Artificial Sequence
  Description of Artificial Sequence: Synthetic oligonucleotide
gguccgagggagggaagug

SEQ ID NO: 371323 - RNA, 19 nt, Artificial Sequence
  Description of Artificial Sequence: Synthetic oligonucleotide
caguuggcuucugcuugug

SEQ ID NO: 371324 - RNA, 19 nt, Artificial Sequence
  Description of Artificial Sequence: Synthetic oligonucleotide
cauugguccgaaccccagu

SEQ ID NO: 371325 - RNA, 19 nt, Artificial Sequence
  Description of Artificial Sequence: Synthetic oligonucleotide
ggaccacgggccucacccc

SEQ ID NO: 371326 - RNA, 19 nt, Artificial Sequence
  Description of Artificial Sequence: Synthetic oligonucleotide
uccgccggguagucuucuc

SEQ ID NO: 371327 - RNA, 19 nt, Artificial Sequence
  Description of Artificial Sequence: Synthetic oligonucleotide
gagccccgcucauagcggu

SEQ ID NO: 371328 - RNA, 19 nt, Artificial Sequence
  Description of Artificial Sequence: Synthetic oligonucleotide
gcugcaauuccaaggggcu

SEQ ID NO: 371329 - RNA, 19 nt, Artificial Sequence
  Description of Artificial Sequence: Synthetic oligonucleotide
guacucuuccaagcaggua

SEQ ID NO: 371330 - RNA, 19 nt, Artificial Sequence
  Description of Artificial Sequence: Synthetic oligonucleotide
gugcaaccacacacucccc

SEQ ID NO: 371331 - RNA, 19 nt, Artificial Sequence
  Description of Artificial Sequence: Synthetic oligonucleotide
gggaaaucuggaggaggca

SEQ ID NO: 371332 - RNA, 19 nt, Artificial Sequence
  Description of Artificial Sequence: Synthetic oligonucleotide
ccucacugaaucgaaggaa

SEQ ID NO: 371333 - RNA, 19 nt, Artificial Sequence
  Description of Artificial Sequence: Synthetic oligonucleotide
cccgcuuuuguagcucggc

SEQ ID NO: 371334 - RNA, 19 nt, Artificial Sequence
  Description of Artificial Sequence: Synthetic oligonucleotide
guccgaaccccaguuggcu

SEQ ID NO: 371335 - RNA, 19 nt, Artificial Sequence
  Description of Artificial Sequence: Synthetic oligonucleotide
acgggugcccaggcgcucu

SEQ ID NO: 371336 - RNA, 19 nt, Artificial Sequence
  Description of Artificial Sequence: Synthetic oligonucleotide
cauagcguuccaagccgau

SEQ ID NO: 371337 - RNA, 19 nt, Artificial Sequence
  Description of Artificial Sequence: Synthetic oligonucleotide
gcccuccucauagcguucc

SEQ ID NO: 371338 - RNA, 19 nt, Artificial Sequence
  Description of Artificial Sequence: Synthetic oligonucleotide
cggguagucuucucauuuc

SEQ ID NO: 371339 - RNA, 19 nt, Artificial Sequence
  Description of Artificial Sequence: Synthetic oligonucleotide
ccuggucugaggucuuaga

SEQ ID NO: 371340 - RNA, 19 nt, Artificial Sequence
  Description of Artificial Sequence: Synthetic oligonucleotide
gaacuuggugcggcuggcu

SEQ ID NO: 371341 - RNA, 19 nt, Artificial Sequence
  Description of Artificial Sequence: Synthetic oligonucleotide
gggucggccauagucggaa

SEQ ID NO: 371342 - RNA, 19 nt, Artificial Sequence
  Description of Artificial Sequence: Synthetic oligonucleotide
caguuggcgggaggaccac

SEQ ID NO: 371343 - RNA, 19 nt, Artificial Sequence
  Description of Artificial Sequence: Synthetic oligonucleotide
cugguuccgccggguaguc

SEQ ID NO: 371344 - RNA, 19 nt, Artificial Sequence
  Description of Artificial Sequence: Synthetic oligonucleotide
cacccgcaccuucauggaa

SEQ ID NO: 371345 - RNA, 19 nt, Artificial Sequence
  Description of Artificial Sequence: Synthetic oligonucleotide
ggcccaggagcguaaucua

SEQ ID NO: 371346 - RNA, 19 nt, Artificial Sequence
  Description of Artificial Sequence: Synthetic oligonucleotide
guuccgccggguagucuuc

SEQ ID NO: 371347 - RNA, 19 nt, Artificial Sequence
  Description of Artificial Sequence: Synthetic oligonucleotide
gcacccgcaccuucaugga

SEQ ID NO: 371348 - RNA, 19 nt, Artificial Sequence
  Description of Artificial Sequence: Synthetic oligonucleotide
ccaggagcguaaucuaccu

SEQ ID NO: 371349 - RNA, 19 nt, Artificial Sequence
  Description of Artificial Sequence: Synthetic oligonucleotide
cuuuuggcuccugucucau

SEQ ID NO: 371350 - RNA, 19 nt, Artificial Sequence
  Description of Artificial Sequence: Synthetic oligonucleotide
guaggggcucaaacucucu

SEQ ID NO: 371351 - RNA, 19 nt, Artificial Sequence
  Description of Artificial Sequence: Synthetic oligonucleotide
uccucccuaggggccgcuc

SEQ ID NO: 371352 - RNA, 19 nt, Artificial Sequence
  Description of Artificial Sequence: Synthetic oligonucleotide
ggcgcccaagcuggggagc

SEQ ID NO: 371353 - RNA, 19 nt, Artificial Sequence
  Description of Artificial Sequence: Synthetic oligonucleotide
ugcgggcacggagccuccu

SEQ ID NO: 371354 - RNA, 19 nt, Artificial Sequence
  Description of Artificial Sequence: Synthetic oligonucleotide
ggcgcucugugggcacccg

SEQ ID NO: 371355 - RNA, 19 nt, Artificial Sequence
  Description of Artificial Sequence: Synthetic oligonucleotide
gcgggaggaccacuguacu

SEQ ID NO: 371356 - RNA, 19 nt, Artificial Sequence
  Description of Artificial Sequence: Synthetic oligonucleotide
ccauagucggaaggcccuc

SEQ ID NO: 371357 - RNA, 19 nt, Artificial Sequence
  Description of Artificial Sequence: Synthetic oligonucleotide
ccgcuucggccccugacca

SEQ ID NO: 371358 - RNA, 19 nt, Artificial Sequence
  Description of Artificial Sequence: Synthetic oligonucleotide
gggcaguuggcgggaggac

SEQ ID NO: 371359 - RNA, 19 nt, Artificial Sequence
  Description of Artificial Sequence: Synthetic oligonucleotide
gcuucggccccugaccacu

SEQ ID NO: 371360 - RNA, 19 nt, Artificial Sequence
  Description of Artificial Sequence: Synthetic oligonucleotide
cacgggugcccaggcgcuc

SEQ ID NO: 371361 - RNA, 19 nt, Artificial Sequence
  Description of Artificial Sequence: Synthetic oligonucleotide
cugaugcggggugguggga

SEQ ID NO: 371362 - RNA, 19 nt, Artificial Sequence
  Description of Artificial Sequence: Synthetic oligonucleotide
ccgcucacgggugcccagg

SEQ ID NO: 371363 - RNA, 19 nt, Artificial Sequence
  Description of Artificial Sequence: Synthetic oligonucleotide
ggacguccccagaguagga

SEQ ID NO: 371364 - RNA, 19 nt, Artificial Sequence
  Description of Artificial Sequence: Synthetic oligonucleotide
ccggguagucuucucauuu

SEQ ID NO: 371365 - RNA, 19 nt, Artificial Sequence
  Description of Artificial Sequence: Synthetic oligonucleotide
cucccagaucuguguuccu

SEQ ID NO: 371366 - RNA, 19 nt, Artificial Sequence
  Description of Artificial Sequence: Synthetic oligonucleotide
ccacccugaguaggggcuc

SEQ ID NO: 371367 - RNA, 19 nt, Artificial Sequence
  Description of Artificial Sequence: Synthetic oligonucleotide
cuaccucgcugaguguuuu

SEQ ID NO: 371368 - RNA, 19 nt, Artificial Sequence
  Description of Artificial Sequence: Synthetic oligonucleotide
ccgagcguccaggcccagg

SEQ ID NO: 371369 - RNA, 19 nt, Artificial Sequence
  Description of Artificial Sequence: Synthetic oligonucleotide
ccaagccgauggcccgcag

SEQ ID NO: 371370 - RNA, 19 nt, Artificial Sequence
  Description of Artificial Sequence: Synthetic oligonucleotide
ggcuugcggcucccagauc

SEQ ID NO: 371371 - RNA, 19 nt, Artificial Sequence
  Description of Artificial Sequence: Synthetic oligonucleotide
ggcuuaagcgugggcaguu

SEQ ID NO: 371372 - RNA, 19 nt, Artificial Sequence
  Description of Artificial Sequence: Synthetic oligonucleotide
ccgugcugccaaucaugga

SEQ ID NO: 371373 - RNA, 19 nt, Artificial Sequence
  Description of Artificial Sequence: Synthetic oligonucleotide
agccccgcucauagcggua

SEQ ID NO: 371374 - RNA, 19 nt, Artificial Sequence
  Description of Artificial Sequence: Synthetic oligonucleotide
ccacggauguugccugucu

SEQ ID NO: 371375 - RNA, 19 nt, Artificial Sequence
  Description of Artificial Sequence: Synthetic oligonucleotide
gggccgugcugccaaucau

SEQ ID NO: 371376 - RNA, 19 nt, Artificial Sequence
  Description of Artificial Sequence: Synthetic oligonucleotide
cgcuucggccccugaccac

SEQ ID NO: 371377 - RNA, 19 nt, Artificial Sequence
  Description of Artificial Sequence: Synthetic oligonucleotide
gguggaccacgggccucac

SEQ ID NO: 371378 - RNA, 19 nt, Artificial Sequence
  Description of Artificial Sequence: Synthetic oligonucleotide
guggccugggaugggccuu

SEQ ID NO: 371379 - RNA, 19 nt, Artificial Sequence
  Description of Artificial Sequence: Synthetic oligonucleotide
gccggguagucuucucauu

SEQ ID NO: 371380 - RNA, 19 nt, Artificial Sequence
  Description of Artificial Sequence: Synthetic oligonucleotide
ccucuccacggugggacaa

SEQ ID NO: 371381 - RNA, 19 nt, Artificial Sequence
  Description of Artificial Sequence: Synthetic oligonucleotide
gccccugaccacuggcauu

SEQ ID NO: 371382 - RNA, 19 nt, Artificial Sequence
  Description of Artificial Sequence: Synthetic oligonucleotide
gcccgcccugcgggcacgg

SEQ ID NO: 371383 - RNA, 19 nt, Artificial Sequence
  Description of Artificial Sequence: Synthetic oligonucleotide
cggaggacguccccagagu

SEQ ID NO: 371384 - RNA, 19 nt, Artificial Sequence
  Description of Artificial Sequence: Synthetic oligonucleotide
ccucggggaggcugcaauu

SEQ ID NO: 371385 - RNA, 19 nt, Artificial Sequence
  Description of Artificial Sequence: Synthetic oligonucleotide
gccgagcguccaggcccag

SEQ ID NO: 371386 - RNA, 19 nt, Artificial Sequence
  Description of Artificial Sequence: Synthetic oligonucleotide
cgaaccccaguuggcuucu

SEQ ID NO: 371387 - RNA, 19 nt, Artificial Sequence
  Description of Artificial Sequence: Synthetic oligonucleotide
uggaguaacaaacauauac

SEQ ID NO: 371388 - RNA, 19 nt, Artificial Sequence
  Description of Artificial Sequence: Synthetic oligonucleotide
agaaauacccuguuaaaac

SEQ ID NO: 371389 - RNA, 19 nt, Artificial Sequence
  Description of Artificial Sequence: Synthetic oligonucleotide
acggaugggaaauugaacc

SEQ ID NO: 371390 - RNA, 19 nt, Artificial Sequence
  Description of Artificial Sequence: Synthetic oligonucleotide
acggcaaugauacaaaagg

SEQ ID NO: 371391 - RNA, 19 nt, Artificial Sequence
  Description of Artificial Sequence: Synthetic oligonucleotide
uggaguaacagccaagagg

SEQ ID NO: 371392 - RNA, 19 nt, Artificial Sequence
  Description of Artificial Sequence: Synthetic oligonucleotide
uuaugaacaaucagcagag

SEQ ID NO: 371393 - RNA, 19 nt, Artificial Sequence
  Description of Artificial Sequence: Synthetic oligonucleotide
agauuuaugacuuuccuga

SEQ ID NO: 371394 - RNA, 19 nt, Artificial Sequence
  Description of Artificial Sequence: Synthetic oligonucleotide
uagauaagaacucuacugc

SEQ ID NO: 371395 - RNA, 19 nt, Artificial Sequence
  Description of Artificial Sequence: Synthetic oligonucleotide
cacaggauacuuuugaggg

SEQ ID NO: 371396 - RNA, 19 nt, Artificial Sequence
  Description of Artificial Sequence: Synthetic oligonucleotide
uguuaaaacuucauguugu

SEQ ID NO: 371397 - RNA, 19 nt, Artificial Sequence
  Description of Artificial Sequence: Synthetic oligonucleotide
gagaacugcagccaguugg

SEQ ID NO: 371398 - RNA, 19 nt, Artificial Sequence
  Description of Artificial Sequence: Synthetic oligonucleotide
ucaaucaagugcuggaccg

SEQ ID NO: 371399 - RNA, 19 nt, Artificial Sequence
  Description of Artificial Sequence: Synthetic oligonucleotide
ugucuugggagaaauaccc

SEQ ID NO: 371400 - RNA, 19 nt, Artificial Sequence
  Description of Artificial Sequence: Synthetic oligonucleotide
uuuccuacgagugacaggc

SEQ ID NO: 371401 - RNA, 19 nt, Artificial Sequence
  Description of Artificial Sequence: Synthetic oligonucleotide
ucauuugaggcaaugucag

SEQ ID NO: 371402 - RNA, 19 nt, Artificial Sequence
  Description of Artificial Sequence: Synthetic oligonucleotide
ugugaguaagucuaagcag

SEQ ID NO: 371403 - RNA, 19 nt, Artificial Sequence
  Description of Artificial Sequence: Synthetic oligonucleotide
aucucuaugacagagcauc

SEQ ID NO: 371404 - RNA, 19 nt, Artificial Sequence
  Description of Artificial Sequence: Synthetic oligonucleotide
accacgguuccccagagcc

SEQ ID NO: 371405 - RNA, 19 nt, Artificial Sequence
  Description of Artificial Sequence: Synthetic oligonucleotide
aaugcuuagcucuuuaaua

SEQ ID NO: 371406 - RNA, 19 nt, Artificial Sequence
  Description of Artificial Sequence: Synthetic oligonucleotide
uguacaagauucucaaggc

SEQ ID NO: 371407 - RNA, 19 nt, Artificial Sequence
  Description of Artificial Sequence: Synthetic oligonucleotide
aaagcaauuugcaucagug

SEQ ID NO: 371408 - RNA, 19 nt, Artificial Sequence
  Description of Artificial Sequence: Synthetic oligonucleotide
ugagauaaggccagguuug

SEQ ID NO: 371409 - RNA, 19 nt, Artificial Sequence
  Description of Artificial Sequence: Synthetic oligonucleotide
ucugaaucggagaacauuc

SEQ ID NO: 371410 - RNA, 19 nt, Artificial Sequence
  Description of Artificial Sequence: Synthetic oligonucleotide
auuagccaggauuuugggc

SEQ ID NO: 371411 - RNA, 19 nt, Artificial Sequence
  Description of Artificial Sequence: Synthetic oligonucleotide
agcaguauagacacaaagc

SEQ ID NO: 371412 - RNA, 19 nt, Artificial Sequence
  Description of Artificial Sequence: Synthetic oligonucleotide
agugaaucugguuuccaac

SEQ ID NO: 371413 - RNA, 19 nt, Artificial Sequence
  Description of Artificial Sequence: Synthetic oligonucleotide
uacuuaaccaaucugcuua

SEQ ID NO: 371414 - RNA, 19 nt, Artificial Sequence
  Description of Artificial Sequence: Synthetic oligonucleotide
aguaucagggagcugcugg

SEQ ID NO: 371415 - RNA, 19 nt, Artificial Sequence
  Description of Artificial Sequence: Synthetic oligonucleotide
aaugguuaagcagcuguac

SEQ ID NO: 371416 - RNA, 19 nt, Artificial Sequence
  Description of Artificial Sequence: Synthetic oligonucleotide
uugauaaucggcaguacac

SEQ ID NO: 371417 - RNA, 19 nt, Artificial Sequence
  Description of Artificial Sequence: Synthetic oligonucleotide
uuaaccaaucugcuuaaca

SEQ ID NO: 371418 - RNA, 19 nt, Artificial Sequence
  Description of Artificial Sequence: Synthetic oligonucleotide
ugaauuacucccuugcagu

SEQ ID NO: 371419 - RNA, 19 nt, Artificial Sequence
  Description of Artificial Sequence: Synthetic oligonucleotide
ugaucaguuugauaaucgg

SEQ ID NO: 371420 - RNA, 19 nt, Artificial Sequence
  Description of Artificial Sequence: Synthetic oligonucleotide
agaacauucucuuugcuau

SEQ ID NO: 371421 - RNA, 19 nt, Artificial Sequence
  Description of Artificial Sequence: Synthetic oligonucleotide
uucugaauuacucccuugc

SEQ ID NO: 371422 - RNA, 19 nt, Artificial Sequence
  Description of Artificial Sequence: Synthetic oligonucleotide
aauuugcaucagugaaucc

SEQ ID NO: 371423 - RNA, 19 nt, Artificial Sequence
  Description of Artificial Sequence: Synthetic oligonucleotide
ugggaaauugaaccauucg

SEQ ID NO: 371424 - RNA, 19 nt, Artificial Sequence
  Description of Artificial Sequence: Synthetic oligonucleotide
aaggcaucggaauuacaag

SEQ ID NO: 371425 - RNA, 19 nt, Artificial Sequence
  Description of Artificial Sequence: Synthetic oligonucleotide
uguugcaaugcauuugcag

SEQ ID NO: 371426 - RNA, 19 nt, Artificial Sequence
  Description of Artificial Sequence: Synthetic oligonucleotide
aauugaaccauucgagcaa

SEQ ID NO: 371427 - RNA, 19 nt, Artificial Sequence
  Description of Artificial Sequence: Synthetic oligonucleotide
cuuagcucuuuaauaaagc

SEQ ID NO: 371428 - RNA, 19 nt, Artificial Sequence
  Description of Artificial Sequence: Synthetic oligonucleotide
acauaaaaccaucugcuga

SEQ ID NO: 371429 - RNA, 19 nt, Artificial Sequence
  Description of Artificial Sequence: Synthetic oligonucleotide
cauuaagucgcucugaaga

SEQ ID NO: 371430 - RNA, 19 nt, Artificial Sequence
  Description of Artificial Sequence: Synthetic oligonucleotide
agcaucgcagaucaaauug

SEQ ID NO: 371431 - RNA, 19 nt, Artificial Sequence
  Description of Artificial Sequence: Synthetic oligonucleotide
uacaagauucucaaggcau

SEQ ID NO: 371432 - RNA, 19 nt, Artificial Sequence
  Description of Artificial Sequence: Synthetic oligonucleotide
aacucuacugcaccaaggu

SEQ ID NO: 371433 - RNA, 19 nt, Artificial Sequence
  Description of Artificial Sequence: Synthetic oligonucleotide
aaagcaugcgucugcgcuc

SEQ ID NO: 371434 - RNA, 19 nt, Artificial Sequence
  Description of Artificial Sequence: Synthetic oligonucleotide
gaaucugguuuccaacugg

SEQ ID NO: 371435 - RNA, 19 nt, Artificial Sequence
  Description of Artificial Sequence: Synthetic oligonucleotide
aggcaucggaauuacaagg

SEQ ID NO: 371436 - RNA, 19 nt, Artificial Sequence
  Description of Artificial Sequence: Synthetic oligonucleotide
ugaacaaucagcagaggua

SEQ ID NO: 371437 - RNA, 19 nt, Artificial Sequence
  Description of Artificial Sequence: Synthetic oligonucleotide
aagugcuguaggaaguugc

SEQ ID NO: 371438 - RNA, 19 nt, Artificial Sequence
  Description of Artificial Sequence: Synthetic oligonucleotide
aguagaguaccucauggcu

SEQ ID NO: 371439 - RNA, 19 nt, Artificial Sequence
  Description of Artificial Sequence: Synthetic oligonucleotide
auacuuuugagggucgcgc

SEQ ID NO: 371440 - RNA, 19 nt, Artificial Sequence
  Description of Artificial Sequence: Synthetic oligonucleotide
ucgcagaucaaauugugcu

SEQ ID NO: 371441 - RNA, 19 nt, Artificial Sequence
  Description of Artificial Sequence: Synthetic oligonucleotide
aaauugugcucgaucuugc

SEQ ID NO: 371442 - RNA, 19 nt, Artificial Sequence
  Description of Artificial Sequence: Synthetic oligonucleotide
accauuguuucugaggugg

SEQ ID NO: 371443 - RNA, 19 nt, Artificial Sequence
  Description of Artificial Sequence: Synthetic oligonucleotide
gauaaucggcaguacacug

SEQ ID NO: 371444 - RNA, 19 nt, Artificial Sequence
  Description of Artificial Sequence: Synthetic oligonucleotide
ucuaugacagagcauccac

SEQ ID NO: 371445 - RNA, 19 nt, Artificial Sequence
  Description of Artificial Sequence: Synthetic oligonucleotide
ucgagucacaaacugguca

SEQ ID NO: 371446 - RNA, 19 nt, Artificial Sequence
  Description of Artificial Sequence: Synthetic oligonucleotide
acauauacugcuugugcag

SEQ ID NO: 371447 - RNA, 19 nt, Artificial Sequence
  Description of Artificial Sequence: Synthetic oligonucleotide
auugugcucgaucuugcac

SEQ ID NO: 371448 - RNA, 19 nt, Artificial Sequence
  Description of Artificial Sequence: Synthetic oligonucleotide
ugaccaacaaagagaacug

SEQ ID NO: 371449 - RNA, 19 nt, Artificial Sequence
  Description of Artificial Sequence: Synthetic oligonucleotide
uuaauaaagccauccuccu

SEQ ID NO: 371450 - RNA, 19 nt, Artificial Sequence
  Description of Artificial Sequence: Synthetic oligonucleotide
acaucucuaugacagagca

SEQ ID NO: 371451 - RNA, 19 nt, Artificial Sequence
  Description of Artificial Sequence: Synthetic oligonucleotide
ucaauaguggucagugcug

SEQ ID NO: 371452 - RNA, 19 nt, Artificial Sequence
  Description of Artificial Sequence: Synthetic oligonucleotide
cuuagaagcugcaugauaa

SEQ ID NO: 371453 - RNA, 19 nt, Artificial Sequence
  Description of Artificial Sequence: Synthetic oligonucleotide
uaagagcccaaagugaagc

SEQ ID NO: 371454 - RNA, 19 nt, Artificial Sequence
  Description of Artificial Sequence: Synthetic oligonucleotide
aagaagugaagccaauguu

SEQ ID NO: 371455 - RNA, 19 nt, Artificial Sequence
  Description of Artificial Sequence: Synthetic oligonucleotide
uccaucaagaaugccauca

SEQ ID NO: 371456 - RNA, 19 nt, Artificial Sequence
  Description of Artificial Sequence: Synthetic oligonucleotide
uugcuauggaauaugcuuc

SEQ ID NO: 371457 - RNA, 19 nt, Artificial Sequence
  Description of Artificial Sequence: Synthetic oligonucleotide
ugaguaagucuaagcagcc

SEQ ID NO: 371458 - RNA, 19 nt, Artificial Sequence
  Description of Artificial Sequence: Synthetic oligonucleotide
agauaagaacucuacugca

SEQ ID NO: 371459 - RNA, 19 nt, Artificial Sequence
  Description of Artificial Sequence: Synthetic oligonucleotide
auuugcaucagugaauccu

SEQ ID NO: 371460 - RNA, 19 nt, Artificial Sequence
  Description of Artificial Sequence: Synthetic oligonucleotide
ucgaucuugcacaggauac

SEQ ID NO: 371461 - RNA, 19 nt, Artificial Sequence
  Description of Artificial Sequence: Synthetic oligonucleotide
aguaacagccaagagguug

SEQ ID NO: 371462 - RNA, 19 nt, Artificial Sequence
  Description of Artificial Sequence: Synthetic oligonucleotide
uccuccgccaaaaggacag

SEQ ID NO: 371463 - RNA, 19 nt, Artificial Sequence
  Description of Artificial Sequence: Synthetic oligonucleotide
cugaaucaggucagcaucg

SEQ ID NO: 371464 - RNA, 19 nt, Artificial Sequence
  Description of Artificial Sequence: Synthetic oligonucleotide
agagguauguaagggcugc

SEQ ID NO: 371465 - RNA, 19 nt, Artificial Sequence
  Description of Artificial Sequence: Synthetic oligonucleotide
aaucggagaacauucucuu

SEQ ID NO: 371466 - RNA, 19 nt, Artificial Sequence
  Description of Artificial Sequence: Synthetic oligonucleotide
acggagcuuagauaagaac

SEQ ID NO: 371467 - RNA, 19 nt, Artificial Sequence
  Description of Artificial Sequence: Synthetic oligonucleotide
caaccuuuccugaaucagg

SEQ ID NO: 371468 - RNA, 19 nt, Artificial Sequence
  Description of Artificial Sequence: Synthetic oligonucleotide
aguacuacacagaagcucu

SEQ ID NO: 371469 - RNA, 19 nt, Artificial Sequence
  Description of Artificial Sequence: Synthetic oligonucleotide
uucauuaagucgcucugaa

SEQ ID NO: 371470 - RNA, 19 nt, Artificial Sequence
  Description of Artificial Sequence: Synthetic oligonucleotide
ucgcucugaagauuuauga

SEQ ID NO: 371471 - RNA, 19 nt, Artificial Sequence
  Description of Artificial Sequence: Synthetic oligonucleotide
gaauguucaccacgguucc

SEQ ID NO: 371472 - RNA, 19 nt, Artificial Sequence
  Description of Artificial Sequence: Synthetic oligonucleotide
uguauuugcucaucucugu

SEQ ID NO: 371473 - RNA, 19 nt, Artificial Sequence
  Description of Artificial Sequence: Synthetic oligonucleotide
aagaaacauaaaaccaucu

SEQ ID NO: 371474 - RNA, 19 nt, Artificial Sequence
  Description of Artificial Sequence: Synthetic oligonucleotide
ucacauagaaacggcaaug

SEQ ID NO: 371475 - RNA, 19 nt, Artificial Sequence
  Description of Artificial Sequence: Synthetic oligonucleotide
agugacaucaaugcauuug

SEQ ID NO: 371476 - RNA, 19 nt, Artificial Sequence
  Description of Artificial Sequence: Synthetic oligonucleotide
gaucaaauugugcucgauc

SEQ ID NO: 371477 - RNA, 19 nt, Artificial Sequence
  Description of Artificial Sequence: Synthetic oligonucleotide
agucacaaacuggucacgc

SEQ ID NO: 371478 - RNA, 19 nt, Artificial Sequence
  Description of Artificial Sequence: Synthetic oligonucleotide
caagacgugcuucaagagc

SEQ ID NO: 371479 - RNA, 19 nt, Artificial Sequence
  Description of Artificial Sequence: Synthetic oligonucleotide
auuugaccaacaaagagaa

SEQ ID NO: 371480 - RNA, 19 nt, Artificial Sequence
  Description of Artificial Sequence: Synthetic oligonucleotide
ugauaaagacaauuccuua

SEQ ID NO: 371481 - RNA, 19 nt, Artificial Sequence
  Description of Artificial Sequence: Synthetic oligonucleotide
aacggcaaugauacaaaag

SEQ ID NO: 371482 - RNA, 19 nt, Artificial Sequence
  Description of Artificial Sequence: Synthetic oligonucleotide
uauagacacaaagcaacug

SEQ ID NO: 371483 - RNA, 19 nt, Artificial Sequence
  Description of Artificial Sequence: Synthetic oligonucleotide
ucggcaguacacugaauag

SEQ ID NO: 371484 - RNA, 19 nt, Artificial Sequence
  Description of Artificial Sequence: Synthetic oligonucleotide
acaauuccuuagaagcugc

SEQ ID NO: 371485 - RNA, 19 nt, Artificial Sequence
  Description of Artificial Sequence: Synthetic oligonucleotide
agaaacggcaaugauacaa

SEQ ID NO: 371486 - RNA, 19 nt, Artificial Sequence
  Description of Artificial Sequence: Synthetic oligonucleotide
gcuuaacaaggucagaacc

SEQ ID NO: 371487 - RNA, 19 nt, Artificial Sequence
  Description of Artificial Sequence: Synthetic oligonucleotide
ugugacaauucaauuugau

SEQ ID NO: 371488 - RNA, 19 nt, Artificial Sequence
  Description of Artificial Sequence: Synthetic oligonucleotide
caggacaccugacugagag

SEQ ID NO: 371489 - RNA, 19 nt, Artificial Sequence
  Description of Artificial Sequence: Synthetic oligonucleotide
ucccuugcagucaugagau

SEQ ID NO: 371490 - RNA, 19 nt, Artificial Sequence
  Description of Artificial Sequence: Synthetic oligonucleotide
gauacuuuugagggucgcg

SEQ ID NO: 371491 - RNA, 19 nt, Artificial Sequence
  Description of Artificial Sequence: Synthetic oligonucleotide
agaagcaagcuucaggaua

SEQ ID NO: 371492 - RNA, 19 nt, Artificial Sequence
  Description of Artificial Sequence: Synthetic oligonucleotide
ugugcggugauaugcuuca

SEQ ID NO: 371493 - RNA, 19 nt, Artificial Sequence
  Description of Artificial Sequence: Synthetic oligonucleotide
ucauuaagucgcucugaag

SEQ ID NO: 371494 - RNA, 19 nt, Artificial Sequence
  Description of Artificial Sequence: Synthetic oligonucleotide
gaguagaguaccucauggc

SEQ ID NO: 371495 - RNA, 19 nt, Artificial Sequence
  Description of Artificial Sequence: Synthetic oligonucleotide
ugaaucggagaacauucuc

SEQ ID NO: 371496 - RNA, 19 nt, Artificial Sequence
  Description of Artificial Sequence: Synthetic oligonucleotide
uaagucgcucugaagauuu

SEQ ID NO: 371497 - RNA, 19 nt, Artificial Sequence
  Description of Artificial Sequence: Synthetic oligonucleotide
ucacgcaugguuucgggga

SEQ ID NO: 371498 - RNA, 19 nt, Artificial Sequence
  Description of Artificial Sequence: Synthetic oligonucleotide
ucuaagcagccauccagcc

SEQ ID NO: 371499 - RNA, 19 nt, Artificial Sequence
  Description of Artificial Sequence: Synthetic oligonucleotide
gcaaugauacaaaagggcc

SEQ ID NO: 371500 - RNA, 19 nt, Artificial Sequence
  Description of Artificial Sequence: Synthetic oligonucleotide
auuaagucgcucugaagau

SEQ ID NO: 371501 - RNA, 19 nt, Artificial Sequence
  Description of Artificial Sequence: Synthetic oligonucleotide
agccaguuggaaaauuagc

SEQ ID NO: 371502 - RNA, 19 nt, Artificial Sequence
  Description of Artificial Sequence: Synthetic oligonucleotide
uuguccauaauuugaccaa

SEQ ID NO: 371503 - RNA, 19 nt, Artificial Sequence
  Description of Artificial Sequence: Synthetic oligonucleotide
agaacucuacugcaccaag

SEQ ID NO: 371504 - RNA, 19 nt, Artificial Sequence
  Description of Artificial Sequence: Synthetic oligonucleotide
uaaucggcaguacacugaa

SEQ ID NO: 371505 - RNA, 19 nt, Artificial Sequence
  Description of Artificial Sequence: Synthetic oligonucleotide
agugaagccaauguuggga

SEQ ID NO: 371506 - RNA, 19 nt, Artificial Sequence
  Description of Artificial Sequence: Synthetic oligonucleotide
uuggaguaacagccaagag

SEQ ID NO: 371507 - RNA, 19 nt, Artificial Sequence
  Description of Artificial Sequence: Synthetic oligonucleotide
ugguuccacauguggacgg

SEQ ID NO: 371508 - RNA, 19 nt, Artificial Sequence
  Description of Artificial Sequence: Synthetic oligonucleotide
aguaccucauggcucagga

SEQ ID NO: 371509 - RNA, 19 nt, Artificial Sequence
  Description of Artificial Sequence: Synthetic oligonucleotide
ucagcaucgcagaucaaau

SEQ ID NO: 371510 - RNA, 19 nt, Artificial Sequence
  Description of Artificial Sequence: Synthetic oligonucleotide
cauuagccaggauuuuggg

SEQ ID NO: 371511 - RNA, 19 nt, Artificial Sequence
  Description of Artificial Sequence: Synthetic oligonucleotide
aucggcaguacacugaaua

SEQ ID NO: 371512 - RNA, 19 nt, Artificial Sequence
  Description of Artificial Sequence: Synthetic oligonucleotide
aauugugcucgaucuugca

SEQ ID NO: 371513 - RNA, 19 nt, Artificial Sequence
  Description of Artificial Sequence: Synthetic oligonucleotide
ucucuaugacagagcaucc

SEQ ID NO: 371514 - RNA, 19 nt, Artificial Sequence
  Description of Artificial Sequence: Synthetic oligonucleotide
acuuuugagggucgcgcuc

SEQ ID NO: 371515 - RNA, 19 nt, Artificial Sequence
  Description of Artificial Sequence: Synthetic oligonucleotide
ucgagcaaauggagaaaag

SEQ ID NO: 371516 - RNA, 19 nt, Artificial Sequence
  Description of Artificial Sequence: Synthetic oligonucleotide
uccuacgagugacaggcca

SEQ ID NO: 371517 - RNA, 19 nt, Artificial Sequence
  Description of Artificial Sequence: Synthetic oligonucleotide
uuagcaggacugaagcaaa

SEQ ID NO: 371518 - RNA, 19 nt, Artificial Sequence
  Description of Artificial Sequence: Synthetic oligonucleotide
guggacggagcuuagauaa

SEQ ID NO: 371519 - RNA, 19 nt, Artificial Sequence
  Description of Artificial Sequence: Synthetic oligonucleotide
cauucgagcaaauggagaa

SEQ ID NO: 371520 - RNA, 19 nt, Artificial Sequence
  Description of Artificial Sequence: Synthetic oligonucleotide
ugcgucugcgcucuucugc

SEQ ID NO: 371521 - RNA, 19 nt, Artificial Sequence
  Description of Artificial Sequence: Synthetic oligonucleotide
ggcaaugauacaaaagggc

SEQ ID NO: 371522 - RNA, 19 nt, Artificial Sequence
  Description of Artificial Sequence: Synthetic oligonucleotide
ugauaaucggcaguacacu

SEQ ID NO: 371523 - RNA, 19 nt, Artificial Sequence
  Description of Artificial Sequence: Synthetic oligonucleotide
gaacucuacugcaccaagg

SEQ ID NO: 371524 - RNA, 19 nt, Artificial Sequence
  Description of Artificial Sequence: Synthetic oligonucleotide
aaacggcaaugauacaaaa

SEQ ID NO: 371525 - RNA, 19 nt, Artificial Sequence
  Description of Artificial Sequence: Synthetic oligonucleotide
aauuacucccuugcaguca

SEQ ID NO: 371526 - RNA, 19 nt, Artificial Sequence
  Description of Artificial Sequence: Synthetic oligonucleotide
acccuguuaaaacuucaug

SEQ ID NO: 371527 - RNA, 19 nt, Artificial Sequence
  Description of Artificial Sequence: Synthetic oligonucleotide
uacacaguaucagggagcu

SEQ ID NO: 371528 - RNA, 19 nt, Artificial Sequence
  Description of Artificial Sequence: Synthetic oligonucleotide
gaccucgagucacaaacug

SEQ ID NO: 371529 - RNA, 19 nt, Artificial Sequence
  Description of Artificial Sequence: Synthetic oligonucleotide
ucauagcacugaagaauug

SEQ ID NO: 371530 - RNA, 19 nt, Artificial Sequence
  Description of Artificial Sequence: Synthetic oligonucleotide
aucggaauuacaaggagau

SEQ ID NO: 371531 - RNA, 19 nt, Artificial Sequence
  Description of Artificial Sequence: Synthetic oligonucleotide
guauuugcucaucucugug

SEQ ID NO: 371532 - RNA, 19 nt, Artificial Sequence
  Description of Artificial Sequence: Synthetic oligonucleotide
ugccaucaaucucagccug

SEQ ID NO: 371533 - RNA, 19 nt, Artificial Sequence
  Description of Artificial Sequence: Synthetic oligonucleotide
uuguaaauaagagcccaaa

SEQ ID NO: 371534 - RNA, 19 nt, Artificial Sequence
  Description of Artificial Sequence: Synthetic oligonucleotide
guuggcucacauagaaacg

SEQ ID NO: 371535 - RNA, 19 nt, Artificial Sequence
  Description of Artificial Sequence: Synthetic oligonucleotide
caguugugcggugauaugc

SEQ ID NO: 371536 - RNA, 19 nt, Artificial Sequence
  Description of Artificial Sequence: Synthetic oligonucleotide
ugacaucaaugcauuugca

SEQ ID NO: 371537 - RNA, 19 nt, Artificial Sequence
  Description of Artificial Sequence: Synthetic oligonucleotide
cauuugaggcaaugucagg

SEQ ID NO: 371538 - RNA, 19 nt, Artificial Sequence
  Description of Artificial Sequence: Synthetic oligonucleotide
gcggugauaugcuucaucc

SEQ ID NO: 371539 - RNA, 19 nt, Artificial Sequence
  Description of Artificial Sequence: Synthetic oligonucleotide
uaugaacaaucagcagagg

SEQ ID NO: 371540 - RNA, 19 nt, Artificial Sequence
  Description of Artificial Sequence: Synthetic oligonucleotide
uccgccaaaaggacagaca

SEQ ID NO: 371541 - RNA, 19 nt, Artificial Sequence
  Description of Artificial Sequence: Synthetic oligonucleotide
uucgagcaaauggagaaaa

SEQ ID NO: 371542 - RNA, 19 nt, Artificial Sequence
  Description of Artificial Sequence: Synthetic oligonucleotide
aaucaagugcuggaccgcu

SEQ ID NO: 371543 - RNA, 19 nt, Artificial Sequence
  Description of Artificial Sequence: Synthetic oligonucleotide
auccgcuccaugcaguucu

SEQ ID NO: 371544 - RNA, 19 nt, Artificial Sequence
  Description of Artificial Sequence: Synthetic oligonucleotide
cugaagauuuaugacuuuc

SEQ ID NO: 371545 - RNA, 19 nt, Artificial Sequence
  Description of Artificial Sequence: Synthetic oligonucleotide
ugcauugcugguuccacau

SEQ ID NO: 371546 - RNA, 19 nt, Artificial Sequence
  Description of Artificial Sequence: Synthetic oligonucleotide
aguuugauaaucggcagua

SEQ ID NO: 371547 - RNA, 19 nt, Artificial Sequence
  Description of Artificial Sequence: Synthetic oligonucleotide
gagguuggcucacauagaa

SEQ ID NO: 371548 - RNA, 19 nt, Artificial Sequence
  Description of Artificial Sequence: Synthetic oligonucleotide
guuuuccuacgagugacag

SEQ ID NO: 371549 - RNA, 19 nt, Artificial Sequence
  Description of Artificial Sequence: Synthetic oligonucleotide
caucgcagaucaaauugug

SEQ ID NO: 371550 - RNA, 19 nt, Artificial Sequence
  Description of Artificial Sequence: Synthetic oligonucleotide
uacugcaccaaggucaauc

SEQ ID NO: 371551 - RNA, 19 nt, Artificial Sequence
  Description of Artificial Sequence: Synthetic oligonucleotide
auuacucccuugcagucau

SEQ ID NO: 371552 - RNA, 19 nt, Artificial Sequence
  Description of Artificial Sequence: Synthetic oligonucleotide
ccaguuggaaaauuagcag

SEQ ID NO: 371553 - RNA, 19 nt, Artificial Sequence
  Description of Artificial Sequence: Synthetic oligonucleotide
uccugaaucaggucagcau

SEQ ID NO: 371554 - RNA, 19 nt, Artificial Sequence
  Description of Artificial Sequence: Synthetic oligonucleotide
gauacuuaaccaaucugcu

SEQ ID NO: 371555 - RNA, 19 nt, Artificial Sequence
  Description of Artificial Sequence: Synthetic oligonucleotide
cuuuugagggucgcgcucc

SEQ ID NO: 371556 - RNA, 19 nt, Artificial Sequence
  Description of Artificial Sequence: Synthetic oligonucleotide
uguccauaauuugaccaac

SEQ ID NO: 371557 - RNA, 19 nt, Artificial Sequence
  Description of Artificial Sequence: Synthetic oligonucleotide
agcucucaaagcaugcguc

SEQ ID NO: 371558 - RNA, 19 nt, Artificial Sequence
  Description of Artificial Sequence: Synthetic oligonucleotide
uagcacugaagaauuguuu

SEQ ID NO: 371559 - RNA, 19 nt, Artificial Sequence
  Description of Artificial Sequence: Synthetic oligonucleotide
uuguugugacaauucaauu

SEQ ID NO: 371560 - RNA, 19 nt, Artificial Sequence
  Description of Artificial Sequence: Synthetic oligonucleotide
augggaaauugaaccauuc

SEQ ID NO: 371561 - RNA, 19 nt, Artificial Sequence
  Description of Artificial Sequence: Synthetic oligonucleotide
gaaugggcacaagacgugc

SEQ ID NO: 371562 - RNA, 19 nt, Artificial Sequence
  Description of Artificial Sequence: Synthetic oligonucleotide
gucacgcaugguuucgggg

SEQ ID NO: 371563 - RNA, 19 nt, Artificial Sequence
  Description of Artificial Sequence: Synthetic oligonucleotide
caggauacuuuugaggguc

SEQ ID NO: 371564 - RNA, 19 nt, Artificial Sequence
  Description of Artificial Sequence: Synthetic oligonucleotide
caucggaauuacaaggaga

SEQ ID NO: 371565 - RNA, 19 nt, Artificial Sequence
  Description of Artificial Sequence: Synthetic oligonucleotide
gaagcugcaugauaaugcu

SEQ ID NO: 371566 - RNA, 19 nt, Artificial Sequence
  Description of Artificial Sequence: Synthetic oligonucleotide
uacuuuugagggucgcgcu

SEQ ID NO: 371567 - RNA, 19 nt, Artificial Sequence
  Description of Artificial Sequence: Synthetic oligonucleotide
uugugcggugauaugcuuc

SEQ ID NO: 371568 - RNA, 19 nt, Artificial Sequence
  Description of Artificial Sequence: Synthetic oligonucleotide
auguggacggagcuuagau

SEQ ID NO: 371569 - RNA, 19 nt, Artificial Sequence
  Description of Artificial Sequence: Synthetic oligonucleotide
augaggucgcacuggucuc

SEQ ID NO: 371570 - RNA, 19 nt, Artificial Sequence
  Description of Artificial Sequence: Synthetic oligonucleotide
aagagaacugcagccaguu

SEQ ID NO: 371571 - RNA, 19 nt, Artificial Sequence
  Description of Artificial Sequence: Synthetic oligonucleotide
gggagaaauacccuguuaa

SEQ ID NO: 371572 - RNA, 19 nt, Artificial Sequence
  Description of Artificial Sequence: Synthetic oligonucleotide
auacuuaaccaaucugcuu

SEQ ID NO: 371573 - RNA, 19 nt, Artificial Sequence
  Description of Artificial Sequence: Synthetic oligonucleotide
ugaccucgagucacaaacu

SEQ ID NO: 371574 - RNA, 19 nt, Artificial Sequence
  Description of Artificial Sequence: Synthetic oligonucleotide
acuuaaccaaucugcuuaa

SEQ ID NO: 371575 - RNA, 19 nt, Artificial Sequence
  Description of Artificial Sequence: Synthetic oligonucleotide
aguuggaaaauuagcagua

SEQ ID NO: 371576 - RNA, 19 nt, Artificial Sequence
  Description of Artificial Sequence: Synthetic oligonucleotide
agucaugaggucgcacugg

SEQ ID NO: 371577 - RNA, 19 nt, Artificial Sequence
  Description of Artificial Sequence: Synthetic oligonucleotide
uguugacggcagcagcggc

SEQ ID NO: 371578 - RNA, 19 nt, Artificial Sequence
  Description of Artificial Sequence: Synthetic oligonucleotide
aggucgccaccauuguuuc

SEQ ID NO: 371579 - RNA, 19 nt, Artificial Sequence
  Description of Artificial Sequence: Synthetic oligonucleotide
uacccuguuaaaacuucau

SEQ ID NO: 371580 - RNA, 19 nt, Artificial Sequence
  Description of Artificial Sequence: Synthetic oligonucleotide
aucccagggaagugaaucu

SEQ ID NO: 371581 - RNA, 19 nt, Artificial Sequence
  Description of Artificial Sequence: Synthetic oligonucleotide
gacagcgacgagucaugag

SEQ ID NO: 371582 - RNA, 19 nt, Artificial Sequence
  Description of Artificial Sequence: Synthetic oligonucleotide
ucaguugugcggugauaug

SEQ ID NO: 371583 - RNA, 19 nt, Artificial Sequence
  Description of Artificial Sequence: Synthetic oligonucleotide
gagacgccucuuuucuucc

SEQ ID NO: 371584 - RNA, 19 nt, Artificial Sequence
  Description of Artificial Sequence: Synthetic oligonucleotide
ugcggugauaugcuucauc

SEQ ID NO: 371585 - RNA, 19 nt, Artificial Sequence
  Description of Artificial Sequence: Synthetic oligonucleotide
cuuccuccgccaaaaggac

SEQ ID NO: 371586 - RNA, 19 nt, Artificial Sequence
  Description of Artificial Sequence: Synthetic oligonucleotide
auacucagggcaggacacc

SEQ ID NO: 371587 - RNA, 19 nt, Artificial Sequence
  Description of Artificial Sequence: Synthetic oligonucleotide
uguggacggagcuuagaua

SEQ ID NO: 371588 - RNA, 19 nt, Artificial Sequence
  Description of Artificial Sequence: Synthetic oligonucleotide
ucauugggacggaugggaa

SEQ ID NO: 371589 - RNA, 19 nt, Artificial Sequence
  Description of Artificial Sequence: Synthetic oligonucleotide
gaaacggcaaugauacaaa

SEQ ID NO: 371590 - RNA, 19 nt, Artificial Sequence
  Description of Artificial Sequence: Synthetic oligonucleotide
uuugaccaacaaagagaac

SEQ ID NO: 371591 - RNA, 19 nt, Artificial Sequence
  Description of Artificial Sequence: Synthetic oligonucleotide
gacggaugggaaauugaac

SEQ ID NO: 371592 - RNA, 19 nt, Artificial Sequence
  Description of Artificial Sequence: Synthetic oligonucleotide
uggacggagcuuagauaag

SEQ ID NO: 371593 - RNA, 19 nt, Artificial Sequence
  Description of Artificial Sequence: Synthetic oligonucleotide
gaaucggagaacauucucu

SEQ ID NO: 371594 - RNA, 19 nt, Artificial Sequence
  Description of Artificial Sequence: Synthetic oligonucleotide
cauacugcauucugauuga

SEQ ID NO: 371595 - RNA, 19 nt, Artificial Sequence
  Description of Artificial Sequence: Synthetic oligonucleotide
auaaucggcaguacacuga

SEQ ID NO: 371596 - RNA, 19 nt, Artificial Sequence
  Description of Artificial Sequence: Synthetic oligonucleotide
auugggacggaugggaaau

SEQ ID NO: 371597 - RNA, 19 nt, Artificial Sequence
  Description of Artificial Sequence: Synthetic oligonucleotide
ugaaucaggucagcaucgc

SEQ ID NO: 371598 - RNA, 19 nt, Artificial Sequence
  Description of Artificial Sequence: Synthetic oligonucleotide
ccucaggaucauuugaggc

SEQ ID NO: 371599 - RNA, 19 nt, Artificial Sequence
  Description of Artificial Sequence: Synthetic oligonucleotide
cugacugagaguuccugga

SEQ ID NO: 371600 - RNA, 19 nt, Artificial Sequence
  Description of Artificial Sequence: Synthetic oligonucleotide
uacucccuugcagucauga

SEQ ID NO: 371601 - RNA, 19 nt, Artificial Sequence
  Description of Artificial Sequence: Synthetic oligonucleotide
ugggagaaauacccuguua

SEQ ID NO: 371602 - RNA, 19 nt, Artificial Sequence
  Description of Artificial Sequence: Synthetic oligonucleotide
ugguuuccaacuggcacug

SEQ ID NO: 371603 - RNA, 19 nt, Artificial Sequence
  Description of Artificial Sequence: Synthetic oligonucleotide
ggaccuggcaugcauuugc

SEQ ID NO: 371604 - RNA, 19 nt, Artificial Sequence
  Description of Artificial Sequence: Synthetic oligonucleotide
ccgccaaaaggacagacag

SEQ ID NO: 371605 - RNA, 19 nt, Artificial Sequence
  Description of Artificial Sequence: Synthetic oligonucleotide
agcgacgagucaugagguc

SEQ ID NO: 371606 - RNA, 19 nt, Artificial Sequence
  Description of Artificial Sequence: Synthetic oligonucleotide
accucgagucacaaacugg

SEQ ID NO: 371607 - RNA, 19 nt, Artificial Sequence
  Description of Artificial Sequence: Synthetic oligonucleotide
uucggggaggaaguguuga

SEQ ID NO: 371608 - RNA, 19 nt, Artificial Sequence
  Description of Artificial Sequence: Synthetic oligonucleotide
caaugauacaaaagggccu

SEQ ID NO: 371609 - RNA, 19 nt, Artificial Sequence
  Description of Artificial Sequence: Synthetic oligonucleotide
ggugguguucucugcaggc

SEQ ID NO: 371610 - RNA, 19 nt, Artificial Sequence
  Description of Artificial Sequence: Synthetic oligonucleotide
gaaucaggucagcaucgca

SEQ ID NO: 371611 - RNA, 19 nt, Artificial Sequence
  Description of Artificial Sequence: Synthetic oligonucleotide
aucugcugaaugguggugu

SEQ ID NO: 371612 - RNA, 19 nt, Artificial Sequence
  Description of Artificial Sequence: Synthetic oligonucleotide
uuuugagggucgcgcuccc

SEQ ID NO: 371613 - RNA, 19 nt, Artificial Sequence
  Description of Artificial Sequence: Synthetic oligonucleotide
cauggcucaggaaugguua

SEQ ID NO: 371614 - RNA, 19 nt, Artificial Sequence
  Description of Artificial Sequence: Synthetic oligonucleotide
guuguugugacaauucaau

SEQ ID NO: 371615 - RNA, 19 nt, Artificial Sequence
  Description of Artificial Sequence: Synthetic oligonucleotide
cagagguauguaagggcug

SEQ ID NO: 371616 - RNA, 19 nt, Artificial Sequence
  Description of Artificial Sequence: Synthetic oligonucleotide
cggaauuacaaggagauuc

SEQ ID NO: 371617 - RNA, 19 nt, Artificial Sequence
  Description of Artificial Sequence: Synthetic oligonucleotide
ggagcuuagauaagaacuc

SEQ ID NO: 371618 - RNA, 19 nt, Artificial Sequence
  Description of Artificial Sequence: Synthetic oligonucleotide
gcaucggaauuacaaggag

SEQ ID NO: 371619 - RNA, 19 nt, Artificial Sequence
  Description of Artificial Sequence: Synthetic oligonucleotide
agagaacugcagccaguug

SEQ ID NO: 371620 - RNA, 19 nt, Artificial Sequence
  Description of Artificial Sequence: Synthetic oligonucleotide
auuguuucauuaagucgcu

SEQ ID NO: 371621 - RNA, 19 nt, Artificial Sequence
  Description of Artificial Sequence: Synthetic oligonucleotide
gaaagagagguuggcucac

SEQ ID NO: 371622 - RNA, 19 nt, Artificial Sequence
  Description of Artificial Sequence: Synthetic oligonucleotide
gccaguuggaaaauuagca

SEQ ID NO: 371623 - RNA, 19 nt, Artificial Sequence
  Description of Artificial Sequence: Synthetic oligonucleotide
aagcaugcgucugcgcucu

SEQ ID NO: 371624 - RNA, 19 nt, Artificial Sequence
  Description of Artificial Sequence: Synthetic oligonucleotide
ggauuuuccuucauagcac

SEQ ID NO: 371625 - RNA, 19 nt, Artificial Sequence
  Description of Artificial Sequence: Synthetic oligonucleotide
ggaaugguuaagcagcugu

SEQ ID NO: 371626 - RNA, 19 nt, Artificial Sequence
  Description of Artificial Sequence: Synthetic oligonucleotide
ucugaagauuuaugacuuu

SEQ ID NO: 371627 - RNA, 19 nt, Artificial Sequence
  Description of Artificial Sequence: Synthetic oligonucleotide
ugggacggaugggaaauug

SEQ ID NO: 371628 - RNA, 19 nt, Artificial Sequence
  Description of Artificial Sequence: Synthetic oligonucleotide
gcucugaagauuuaugacu

SEQ ID NO: 371629 - RNA, 19 nt, Artificial Sequence
  Description of Artificial Sequence: Synthetic oligonucleotide
gcagguuuuccuacgagug

SEQ ID NO: 371630 - RNA, 19 nt, Artificial Sequence
  Description of Artificial Sequence: Synthetic oligonucleotide
uuaagucgcucugaagauu

SEQ ID NO: 371631 - RNA, 19 nt, Artificial Sequence
  Description of Artificial Sequence: Synthetic oligonucleotide
guuugccaaggccgcacag

SEQ ID NO: 371632 - RNA, 19 nt, Artificial Sequence
  Description of Artificial Sequence: Synthetic oligonucleotide
gucgcucugaagauuuaug

SEQ ID NO: 371633 - RNA, 19 nt, Artificial Sequence
  Description of Artificial Sequence: Synthetic oligonucleotide
uugacggcagcagcggcug

SEQ ID NO: 371634 - RNA, 19 nt, Artificial Sequence
  Description of Artificial Sequence: Synthetic oligonucleotide
agaaugggcacaagacgug

SEQ ID NO: 371635 - RNA, 19 nt, Artificial Sequence
  Description of Artificial Sequence: Synthetic oligonucleotide
aguugugcggugauaugcu

SEQ ID NO: 371636 - RNA, 19 nt, Artificial Sequence
  Description of Artificial Sequence: Synthetic oligonucleotide
gacgugcuucaagagcugc

SEQ ID NO: 371637 - RNA, 19 nt, Artificial Sequence
  Description of Artificial Sequence: Synthetic oligonucleotide
caaucaagugcuggaccgc

SEQ ID NO: 371638 - RNA, 19 nt, Artificial Sequence
  Description of Artificial Sequence: Synthetic oligonucleotide
ccaccagaaauauucugac

SEQ ID NO: 371639 - RNA, 19 nt, Artificial Sequence
  Description of Artificial Sequence: Synthetic oligonucleotide
auagcacugaagaauuguu

SEQ ID NO: 371640 - RNA, 19 nt, Artificial Sequence
  Description of Artificial Sequence: Synthetic oligonucleotide
caaagcaugcgucugcgcu

SEQ ID NO: 371641 - RNA, 19 nt, Artificial Sequence
  Description of Artificial Sequence: Synthetic oligonucleotide
gcgacgagucaugaggucg

SEQ ID NO: 371642 - RNA, 19 nt, Artificial Sequence
  Description of Artificial Sequence: Synthetic oligonucleotide
ccaagagguugucuaaaag

SEQ ID NO: 371643 - RNA, 19 nt, Artificial Sequence
  Description of Artificial Sequence: Synthetic oligonucleotide
cagcuguacaagauucuca

SEQ ID NO: 371644 - RNA, 19 nt, Artificial Sequence
  Description of Artificial Sequence: Synthetic oligonucleotide
guguugacggcagcagcgg

SEQ ID NO: 371645 - RNA, 19 nt, Artificial Sequence
  Description of Artificial Sequence: Synthetic oligonucleotide
aggagauucugaagaauaa

SEQ ID NO: 371646 - RNA, 19 nt, Artificial Sequence
  Description of Artificial Sequence: Synthetic oligonucleotide
augguuucggggaggaagu

SEQ ID NO: 371647 - RNA, 19 nt, Artificial Sequence
  Description of Artificial Sequence: Synthetic oligonucleotide
cggcaaugauacaaaaggg

SEQ ID NO: 371648 - RNA, 19 nt, Artificial Sequence
  Description of Artificial Sequence: Synthetic oligonucleotide
uagaaacggcaaugauaca

SEQ ID NO: 371649 - RNA, 19 nt, Artificial Sequence
  Description of Artificial Sequence: Synthetic oligonucleotide
augcuuguauuugcucauc

SEQ ID NO: 371650 - RNA, 19 nt, Artificial Sequence
  Description of Artificial Sequence: Synthetic oligonucleotide
ggagacgccucuuuucuuc

SEQ ID NO: 371651 - RNA, 19 nt, Artificial Sequence
  Description of Artificial Sequence: Synthetic oligonucleotide
ggagaaauacccuguuaaa

SEQ ID NO: 371652 - RNA, 19 nt, Artificial Sequence
  Description of Artificial Sequence: Synthetic oligonucleotide
gacggcagcagcggcuggg

SEQ ID NO: 371653 - RNA, 19 nt, Artificial Sequence
  Description of Artificial Sequence: Synthetic oligonucleotide
cauugcugguuccacaugu

SEQ ID NO: 371654 - RNA, 19 nt, Artificial Sequence
  Description of Artificial Sequence: Synthetic oligonucleotide
ugggagugccccugugggc

SEQ ID NO: 371655 - RNA, 19 nt, Artificial Sequence
  Description of Artificial Sequence: Synthetic oligonucleotide
acgagugacaggccagaau

SEQ ID NO: 371656 - RNA, 19 nt, Artificial Sequence
  Description of Artificial Sequence: Synthetic oligonucleotide
cucgaucuugcacaggaua

SEQ ID NO: 371657 - RNA, 19 nt, Artificial Sequence
  Description of Artificial Sequence: Synthetic oligonucleotide
cucgagucacaaacugguc

SEQ ID NO: 371658 - RNA, 19 nt, Artificial Sequence
  Description of Artificial Sequence: Synthetic oligonucleotide
cuugugcaggggagcagac

SEQ ID NO: 371659 - RNA, 19 nt, Artificial Sequence
  Description of Artificial Sequence: Synthetic oligonucleotide
acaguacuacacagaagcu

SEQ ID NO: 371660 - RNA, 19 nt, Artificial Sequence
  Description of Artificial Sequence: Synthetic oligonucleotide
gucaugagauaaggccagg

SEQ ID NO: 371661 - RNA, 19 nt, Artificial Sequence
  Description of Artificial Sequence: Synthetic oligonucleotide
ucggggaggaaguguugac

SEQ ID NO: 371662 - RNA, 19 nt, Artificial Sequence
  Description of Artificial Sequence: Synthetic oligonucleotide
caccagaaauauucugaca

SEQ ID NO: 371663 - RNA, 19 nt, Artificial Sequence
  Description of Artificial Sequence: Synthetic oligonucleotide
ggucacgcaugguuucggg

SEQ ID NO: 371664 - RNA, 19 nt, Artificial Sequence
  Description of Artificial Sequence: Synthetic oligonucleotide
accucauggcucaggaaug

SEQ ID NO: 371665 - RNA, 19 nt, Artificial Sequence
  Description of Artificial Sequence: Synthetic oligonucleotide
uuccuacgagugacaggcc

SEQ ID NO: 371666 - RNA, 19 nt, Artificial Sequence
  Description of Artificial Sequence: Synthetic oligonucleotide
acaagauucucaaggcauu

SEQ ID NO: 371667 - RNA, 19 nt, Artificial Sequence
  Description of Artificial Sequence: Synthetic oligonucleotide
gguggaaagagagguuggc

SEQ ID NO: 371668 - RNA, 19 nt, Artificial Sequence
  Description of Artificial Sequence: Synthetic oligonucleotide
gcugggagugccccugugg

SEQ ID NO: 371669 - RNA, 19 nt, Artificial Sequence
  Description of Artificial Sequence: Synthetic oligonucleotide
uugaaccauucgagcaaau

SEQ ID NO: 371670 - RNA, 19 nt, Artificial Sequence
  Description of Artificial Sequence: Synthetic oligonucleotide
cuuaaccaaucugcuuaac

SEQ ID NO: 371671 - RNA, 19 nt, Artificial Sequence
  Description of Artificial Sequence: Synthetic oligonucleotide
ucugcgcucuucugcugac

SEQ ID NO: 371672 - RNA, 19 nt, Artificial Sequence
  Description of Artificial Sequence: Synthetic oligonucleotide
gcacaagacgugcuucaag

SEQ ID NO: 371673 - RNA, 19 nt, Artificial Sequence
  Description of Artificial Sequence: Synthetic oligonucleotide
auucgagcaaauggagaaa

SEQ ID NO: 371674 - RNA, 19 nt, Artificial Sequence
  Description of Artificial Sequence: Synthetic oligonucleotide
guauagacacaaagcaacu

SEQ ID NO: 371675 - RNA, 19 nt, Artificial Sequence
  Description of Artificial Sequence: Synthetic oligonucleotide
agggucgcgcucccugauc

SEQ ID NO: 371676 - RNA, 19 nt, Artificial Sequence
  Description of Artificial Sequence: Synthetic oligonucleotide
ugauaaugcuuagcucuuu

SEQ ID NO: 371677 - RNA, 19 nt, Artificial Sequence
  Description of Artificial Sequence: Synthetic oligonucleotide
augggcacaagacgugcuu

SEQ ID NO: 371678 - RNA, 19 nt, Artificial Sequence
  Description of Artificial Sequence: Synthetic oligonucleotide
ugggcacaagacgugcuuc

SEQ ID NO: 371679 - RNA, 19 nt, Artificial Sequence
  Description of Artificial Sequence: Synthetic oligonucleotide
ccuacgagugacaggccag

SEQ ID NO: 371680 - RNA, 19 nt, Artificial Sequence
  Description of Artificial Sequence: Synthetic oligonucleotide
ucuaugagauuggggcuuu

SEQ ID NO: 371681 - RNA, 19 nt, Artificial Sequence
  Description of Artificial Sequence: Synthetic oligonucleotide
caauuccuuagaagcugca

SEQ ID NO: 371682 - RNA, 19 nt, Artificial Sequence
  Description of Artificial Sequence: Synthetic oligonucleotide
uccuuagaagcugcaugau

SEQ ID NO: 371683 - RNA, 19 nt, Artificial Sequence
  Description of Artificial Sequence: Synthetic oligonucleotide
gagcuuagauaagaacucu

SEQ ID NO: 371684 - RNA, 19 nt, Artificial Sequence
  Description of Artificial Sequence: Synthetic oligonucleotide
gacggagcuuagauaagaa

SEQ ID NO: 371685 - RNA, 19 nt, Artificial Sequence
  Description of Artificial Sequence: Synthetic oligonucleotide
ugggcaguuugaacagauu

SEQ ID NO: 371686 - RNA, 19 nt, Artificial Sequence
  Description of Artificial Sequence: Synthetic oligonucleotide
ggaaguguugacggcagca

SEQ ID NO: 371687 - RNA, 19 nt, Artificial Sequence
  Description of Artificial Sequence: Synthetic oligonucleotide
ggcaucggaauuacaagga

SEQ ID NO: 371688 - RNA, 19 nt, Artificial Sequence
  Description of Artificial Sequence: Synthetic oligonucleotide
cauugggacggaugggaaa

SEQ ID NO: 371689 - RNA, 19 nt, Artificial Sequence
  Description of Artificial Sequence: Synthetic oligonucleotide
cuccgccaaaaggacagac

SEQ ID NO: 371690 - RNA, 19 nt, Artificial Sequence
  Description of Artificial Sequence: Synthetic oligonucleotide
ucccaaucccagggaagug

SEQ ID NO: 371691 - RNA, 19 nt, Artificial Sequence
  Description of Artificial Sequence: Synthetic oligonucleotide
agguagccagaaggguaac

SEQ ID NO: 371692 - RNA, 19 nt, Artificial Sequence
  Description of Artificial Sequence: Synthetic oligonucleotide
uuacucccuugcagucaug

SEQ ID NO: 371693 - RNA, 19 nt, Artificial Sequence
  Description of Artificial Sequence: Synthetic oligonucleotide
ugguuucggggaggaagug

SEQ ID NO: 371694 - RNA, 19 nt, Artificial Sequence
  Description of Artificial Sequence: Synthetic oligonucleotide
ggggauacuuaaccaaucu

SEQ ID NO: 371695 - RNA, 19 nt, Artificial Sequence
  Description of Artificial Sequence: Synthetic oligonucleotide
cugcauugcugguuccaca

SEQ ID NO: 371696 - RNA, 19 nt, Artificial Sequence
  Description of Artificial Sequence: Synthetic oligonucleotide
agguucaguugugcgguga

SEQ ID NO: 371697 - RNA, 19 nt, Artificial Sequence
  Description of Artificial Sequence: Synthetic oligonucleotide
cggagaacauucucuuugc

SEQ ID NO: 371698 - RNA, 19 nt, Artificial Sequence
  Description of Artificial Sequence: Synthetic oligonucleotide
cacgguuccccagagccca

SEQ ID NO: 371699 - RNA, 19 nt, Artificial Sequence
  Description of Artificial Sequence: Synthetic oligonucleotide
cggagcuuagauaagaacu

SEQ ID NO: 371700 - RNA, 19 nt, Artificial Sequence
  Description of Artificial Sequence: Synthetic oligonucleotide
ucggaauuacaaggagauu

SEQ ID NO: 371701 - RNA, 19 nt, Artificial Sequence
  Description of Artificial Sequence: Synthetic oligonucleotide
uacgagugacaggccagaa

SEQ ID NO: 371702 - RNA, 19 nt, Artificial Sequence
  Description of Artificial Sequence: Synthetic oligonucleotide
gguuugaaagaaacauaaa

SEQ ID NO: 371703 - RNA, 19 nt, Artificial Sequence
  Description of Artificial Sequence: Synthetic oligonucleotide
caguuugauaaucggcagu

SEQ ID NO: 371704 - RNA, 19 nt, Artificial Sequence
  Description of Artificial Sequence: Synthetic oligonucleotide
ggcagguuuuccuacgagu

SEQ ID NO: 371705 - RNA, 19 nt, Artificial Sequence
  Description of Artificial Sequence: Synthetic oligonucleotide
ggauacuuuugagggucgc

SEQ ID NO: 371706 - RNA, 19 nt, Artificial Sequence
  Description of Artificial Sequence: Synthetic oligonucleotide
gggcagguuuuccuacgag

SEQ ID NO: 371707 - RNA, 19 nt, Artificial Sequence
  Description of Artificial Sequence: Synthetic oligonucleotide
acgcaugguuucggggagg

SEQ ID NO: 371708 - RNA, 19 nt, Artificial Sequence
  Description of Artificial Sequence: Synthetic oligonucleotide
ggacggagcuuagauaaga

SEQ ID NO: 371709 - RNA, 19 nt, Artificial Sequence
  Description of Artificial Sequence: Synthetic oligonucleotide
agacagcgacgagucauga

SEQ ID NO: 371710 - RNA, 19 nt, Artificial Sequence
  Description of Artificial Sequence: Synthetic oligonucleotide
ugacuuuccugagcuccau

SEQ ID NO: 371711 - RNA, 19 nt, Artificial Sequence
  Description of Artificial Sequence: Synthetic oligonucleotide
ggacggaugggaaauugaa

SEQ ID NO: 371712 - RNA, 19 nt, Artificial Sequence
  Description of Artificial Sequence: Synthetic oligonucleotide
gugguguucucugcaggca

SEQ ID NO: 371713 - RNA, 19 nt, Artificial Sequence
  Description of Artificial Sequence: Synthetic oligonucleotide
cuucaucuacucuucuuuu

SEQ ID NO: 371714 - RNA, 19 nt, Artificial Sequence
  Description of Artificial Sequence: Synthetic oligonucleotide
acauguggacggagcuuag

SEQ ID NO: 371715 - RNA, 19 nt, Artificial Sequence
  Description of Artificial Sequence: Synthetic oligonucleotide
aaggccgcacagccagcuu

SEQ ID NO: 371716 - RNA, 19 nt, Artificial Sequence
  Description of Artificial Sequence: Synthetic oligonucleotide
gggcacaagacgugcuuca

SEQ ID NO: 371717 - RNA, 19 nt, Artificial Sequence
  Description of Artificial Sequence: Synthetic oligonucleotide
cuacgagugacaggccaga

SEQ ID NO: 371718 - RNA, 19 nt, Artificial Sequence
  Description of Artificial Sequence: Synthetic oligonucleotide
auacugcauucugauugau

SEQ ID NO: 371719 - RNA, 19 nt, Artificial Sequence
  Description of Artificial Sequence: Synthetic oligonucleotide
agacgugcuucaagagcug

SEQ ID NO: 371720 - RNA, 19 nt, Artificial Sequence
  Description of Artificial Sequence: Synthetic oligonucleotide
cagccaagagguugucuaa

SEQ ID NO: 371721 - RNA, 19 nt, Artificial Sequence
  Description of Artificial Sequence: Synthetic oligonucleotide
aaucggcaguacacugaau

SEQ ID NO: 371722 - RNA, 19 nt, Artificial Sequence
  Description of Artificial Sequence: Synthetic oligonucleotide
cgacgagucaugaggucgc

SEQ ID NO: 371723 - RNA, 19 nt, Artificial Sequence
  Description of Artificial Sequence: Synthetic oligonucleotide
caccacgguuccccagagc

SEQ ID NO: 371724 - RNA, 19 nt, Artificial Sequence
  Description of Artificial Sequence: Synthetic oligonucleotide
ccucgagucacaaacuggu

SEQ ID NO: 371725 - RNA, 19 nt, Artificial Sequence
  Description of Artificial Sequence: Synthetic oligonucleotide
ggaucauuugaggcaaugu

SEQ ID NO: 371726 - RNA, 19 nt, Artificial Sequence
  Description of Artificial Sequence: Synthetic oligonucleotide
gcuugugcaggggagcaga

SEQ ID NO: 371727 - RNA, 19 nt, Artificial Sequence
  Description of Artificial Sequence: Synthetic oligonucleotide
cagcgacgagucaugaggu

SEQ ID NO: 371728 - RNA, 19 nt, Artificial Sequence
  Description of Artificial Sequence: Synthetic oligonucleotide
ggcgcaccauacugcauuc

SEQ ID NO: 371729 - RNA, 19 nt, Artificial Sequence
  Description of Artificial Sequence: Synthetic oligonucleotide
cauguggacggagcuuaga

SEQ ID NO: 371730 - RNA, 19 nt, Artificial Sequence
  Description of Artificial Sequence: Synthetic oligonucleotide
cugcucuuaugcuuguauu

SEQ ID NO: 371731 - RNA, 19 nt, Artificial Sequence
  Description of Artificial Sequence: Synthetic oligonucleotide
ccacgguuccccagagccc

SEQ ID NO: 371732 - RNA, 19 nt, Artificial Sequence
  Description of Artificial Sequence: Synthetic oligonucleotide
cugagaguuccuggauaca

SEQ ID NO: 371733 - RNA, 19 nt, Artificial Sequence
  Description of Artificial Sequence: Synthetic oligonucleotide
gcugcucuuaugcuuguau

SEQ ID NO: 371734 - RNA, 19 nt, Artificial Sequence
  Description of Artificial Sequence: Synthetic oligonucleotide
ggagugccccugugggcag

SEQ ID NO: 371735 - RNA, 19 nt, Artificial Sequence
  Description of Artificial Sequence: Synthetic oligonucleotide
aagucgcucugaagauuua

SEQ ID NO: 371736 - RNA, 19 nt, Artificial Sequence
  Description of Artificial Sequence: Synthetic oligonucleotide
gcagccaguuggaaaauua

SEQ ID NO: 371737 - RNA, 19 nt, Artificial Sequence
  Description of Artificial Sequence: Synthetic oligonucleotide
gggacggaugggaaauuga

SEQ ID NO: 371738 - RNA, 19 nt, Artificial Sequence
  Description of Artificial Sequence: Synthetic oligonucleotide
ccugcauugcugguuccac

SEQ ID NO: 371739 - RNA, 19 nt, Artificial Sequence
  Description of Artificial Sequence: Synthetic oligonucleotide
ccuuagaagcugcaugaua

SEQ ID NO: 371740 - RNA, 19 nt, Artificial Sequence
  Description of Artificial Sequence: Synthetic oligonucleotide
gcacuggucucgcuucaca

SEQ ID NO: 371741 - RNA, 19 nt, Artificial Sequence
  Description of Artificial Sequence: Synthetic oligonucleotide
gcaucgcagaucaaauugu

SEQ ID NO: 371742 - RNA, 19 nt, Artificial Sequence
  Description of Artificial Sequence: Synthetic oligonucleotide
guugugcggugauaugcuu

SEQ ID NO: 371743 - RNA, 19 nt, Artificial Sequence
  Description of Artificial Sequence: Synthetic oligonucleotide
caucucuaugacagagcau

SEQ ID NO: 371744 - RNA, 19 nt, Artificial Sequence
  Description of Artificial Sequence: Synthetic oligonucleotide
ccaaucugcuuaacaaggu

SEQ ID NO: 371745 - RNA, 19 nt, Artificial Sequence
  Description of Artificial Sequence: Synthetic oligonucleotide
aggucgcacuggucucgcu

SEQ ID NO: 371746 - RNA, 19 nt, Artificial Sequence
  Description of Artificial Sequence: Synthetic oligonucleotide
gagguauguaagggcugcu

SEQ ID NO: 371747 - RNA, 19 nt, Artificial Sequence
  Description of Artificial Sequence: Synthetic oligonucleotide
gcagacagcgacgagucau

SEQ ID NO: 371748 - RNA, 19 nt, Artificial Sequence
  Description of Artificial Sequence: Synthetic oligonucleotide
guacuacacagaagcucua

SEQ ID NO: 371749 - RNA, 19 nt, Artificial Sequence
  Description of Artificial Sequence: Synthetic oligonucleotide
acgguuccccagagcccac

SEQ ID NO: 371750 - RNA, 19 nt, Artificial Sequence
  Description of Artificial Sequence: Synthetic oligonucleotide
cccaaucccagggaaguga

SEQ ID NO: 371751 - RNA, 19 nt, Artificial Sequence
  Description of Artificial Sequence: Synthetic oligonucleotide
cagcaucgcagaucaaauu

SEQ ID NO: 371752 - RNA, 19 nt, Artificial Sequence
  Description of Artificial Sequence: Synthetic oligonucleotide
gguuucggggaggaagugu

SEQ ID NO: 371753 - RNA, 19 nt, Artificial Sequence
  Description of Artificial Sequence: Synthetic oligonucleotide
gcgucugcgcucuucugcu

SEQ ID NO: 371754 - RNA, 19 nt, Artificial Sequence
  Description of Artificial Sequence: Synthetic oligonucleotide
ccagguucaguugugcggu

SEQ ID NO: 371755 - RNA, 19 nt, Artificial Sequence
  Description of Artificial Sequence: Synthetic oligonucleotide
gcauuugcucuguccuugu

SEQ ID NO: 371756 - RNA, 19 nt, Artificial Sequence
  Description of Artificial Sequence: Synthetic oligonucleotide
caaggccgcacagccagcu

SEQ ID NO: 371757 - RNA, 19 nt, Artificial Sequence
  Description of Artificial Sequence: Synthetic oligonucleotide
ggcacaagacgugcuucaa

SEQ ID NO: 371758 - RNA, 19 nt, Artificial Sequence
  Description of Artificial Sequence: Synthetic oligonucleotide
cccggcgcaccauacugca

SEQ ID NO: 371759 - RNA, 19 nt, Artificial Sequence
  Description of Artificial Sequence: Synthetic oligonucleotide
gagggucgcgcucccugau

SEQ ID NO: 371760 - RNA, 19 nt, Artificial Sequence
  Description of Artificial Sequence: Synthetic oligonucleotide
gccugcauugcugguucca

SEQ ID NO: 371761 - RNA, 19 nt, Artificial Sequence
  Description of Artificial Sequence: Synthetic oligonucleotide
agugccccugugggcaguu

SEQ ID NO: 371762 - RNA, 19 nt, Artificial Sequence
  Description of Artificial Sequence: Synthetic oligonucleotide
caccugacugagaguuccu

SEQ ID NO: 371763 - RNA, 19 nt, Artificial Sequence
  Description of Artificial Sequence: Synthetic oligonucleotide
ggucgcgcucccugaucuc

SEQ ID NO: 371764 - RNA, 19 nt, Artificial Sequence
  Description of Artificial Sequence: Synthetic oligonucleotide
cugcgcucuucugcugaca

SEQ ID NO: 371765 - RNA, 19 nt, Artificial Sequence
  Description of Artificial Sequence: Synthetic oligonucleotide
gaguaacagccaagagguu

SEQ ID NO: 371766 - RNA, 19 nt, Artificial Sequence
  Description of Artificial Sequence: Synthetic oligonucleotide
ggggcccugccaaguauaa

SEQ ID NO: 371767 - RNA, 19 nt, Artificial Sequence
  Description of Artificial Sequence: Synthetic oligonucleotide
gcuauggaauaugcuucau

SEQ ID NO: 371768 - RNA, 19 nt, Artificial Sequence
  Description of Artificial Sequence: Synthetic oligonucleotide
cgcgcucccugaucuccgc

SEQ ID NO: 371769 - RNA, 19 nt, Artificial Sequence
  Description of Artificial Sequence: Synthetic oligonucleotide
gcaggacaccugacugaga

SEQ ID NO: 371770 - RNA, 19 nt, Artificial Sequence
  Description of Artificial Sequence: Synthetic oligonucleotide
cgcaugguuucggggagga

SEQ ID NO: 371771 - RNA, 19 nt, Artificial Sequence
  Description of Artificial Sequence: Synthetic oligonucleotide
ggucagcaucgcagaucaa

SEQ ID NO: 371772 - RNA, 19 nt, Artificial Sequence
  Description of Artificial Sequence: Synthetic oligonucleotide
gugcggugauaugcuucau

SEQ ID NO: 371773 - RNA, 19 nt, Artificial Sequence
  Description of Artificial Sequence: Synthetic oligonucleotide
cccuugcagucaugagaua

SEQ ID NO: 371774 - RNA, 19 nt, Artificial Sequence
  Description of Artificial Sequence: Synthetic oligonucleotide
gcgcaccauacugcauucu

SEQ ID NO: 371775 - RNA, 19 nt, Artificial Sequence
  Description of Artificial Sequence: Synthetic oligonucleotide
ccggcgcaccauacugcau

SEQ ID NO: 371776 - RNA, 19 nt, Artificial Sequence
  Description of Artificial Sequence: Synthetic oligonucleotide
ccaauccucugggcauuuu

SEQ ID NO: 371777 - RNA, 19 nt, Artificial Sequence
  Description of Artificial Sequence: Synthetic oligonucleotide
aauauaacccaauaggaac

SEQ ID NO: 371778 - RNA, 19 nt, Artificial Sequence
  Description of Artificial Sequence: Synthetic oligonucleotide
gaugauacaagcuuuacag

SEQ ID NO: 371779 - RNA, 19 nt, Artificial Sequence
  Description of Artificial Sequence: Synthetic oligonucleotide
uguacuuuaaucccaaggg

SEQ ID NO: 371780 - RNA, 19 nt, Artificial Sequence
  Description of Artificial Sequence: Synthetic oligonucleotide
ugaaccuucauuccaagcg

SEQ ID NO: 371781 - RNA, 19 nt, Artificial Sequence
  Description of Artificial Sequence: Synthetic oligonucleotide
uaagugaccacauuauugg

SEQ ID NO: 371782 - RNA, 19 nt, Artificial Sequence
  Description of Artificial Sequence: Synthetic oligonucleotide
aaaccauucaggaaaagac

SEQ ID NO: 371783 - RNA, 19 nt, Artificial Sequence
  Description of Artificial Sequence: Synthetic oligonucleotide
uauuauaagguaauuaaau

SEQ ID NO: 371784 - RNA, 19 nt, Artificial Sequence
  Description of Artificial Sequence: Synthetic oligonucleotide
acuagaugcaucuuacagc

SEQ ID NO: 371785 - RNA, 19 nt, Artificial Sequence
  Description of Artificial Sequence: Synthetic oligonucleotide
uuguacuuuaaucccaagg

SEQ ID NO: 371786 - RNA, 19 nt, Artificial Sequence
  Description of Artificial Sequence: Synthetic oligonucleotide
auaauuacuacuagauucc

SEQ ID NO: 371787 - RNA, 19 nt, Artificial Sequence
  Description of Artificial Sequence: Synthetic oligonucleotide
aacacuuaacaguucaucu

SEQ ID NO: 371788 - RNA, 19 nt, Artificial Sequence
  Description of Artificial Sequence: Synthetic oligonucleotide
aaauuuagccaaaugcgac

SEQ ID NO: 371789 - RNA, 19 nt, Artificial Sequence
  Description of Artificial Sequence: Synthetic oligonucleotide
aaauagaguggacaguucu

SEQ ID NO: 371790 - RNA, 19 nt, Artificial Sequence
  Description of Artificial Sequence: Synthetic oligonucleotide
ucuaaauacaauaggccac

SEQ ID NO: 371791 - RNA, 19 nt, Artificial Sequence
  Description of Artificial Sequence: Synthetic oligonucleotide
ugcgauauaacucucuuaa

SEQ ID NO: 371792 - RNA, 19 nt, Artificial Sequence
  Description of Artificial Sequence: Synthetic oligonucleotide
aucuuuaugucuaaucacc

SEQ ID NO: 371793 - RNA, 19 nt, Artificial Sequence
  Description of Artificial Sequence: Synthetic oligonucleotide
aaaagacuagaaaagcauc

SEQ ID NO: 371794 - RNA, 19 nt, Artificial Sequence
  Description of Artificial Sequence: Synthetic oligonucleotide
uguucagugagauuucacc

SEQ ID NO: 371795 - RNA, 19 nt, Artificial Sequence
  Description of Artificial Sequence: Synthetic oligonucleotide
cauguguuuacauguaucc

SEQ ID NO: 371796 - RNA, 19 nt, Artificial Sequence
  Description of Artificial Sequence: Synthetic oligonucleotide
acaaguguaagcauggccg

SEQ ID NO: 371797 - RNA, 19 nt, Artificial Sequence
  Description of Artificial Sequence: Synthetic oligonucleotide
uuuaugucuaaucaccuau

SEQ ID NO: 371798 - RNA, 19 nt, Artificial Sequence
  Description of Artificial Sequence: Synthetic oligonucleotide
uguaacgugaauuggcagc

SEQ ID NO: 371799 - RNA, 19 nt, Artificial Sequence
  Description of Artificial Sequence: Synthetic oligonucleotide
cauaaaauaacagcagacc

SEQ ID NO: 371800 - RNA, 19 nt, Artificial Sequence
  Description of Artificial Sequence: Synthetic oligonucleotide
agugagauuucaccaaacg

SEQ ID NO: 371801 - RNA, 19 nt, Artificial Sequence
  Description of Artificial Sequence: Synthetic oligonucleotide
uuuugaacaucagugaaca

SEQ ID NO: 371802 - RNA, 19 nt, Artificial Sequence
  Description of Artificial Sequence: Synthetic oligonucleotide
uacauuuguaccuaucgga

SEQ ID NO: 371803 - RNA, 19 nt, Artificial Sequence
  Description of Artificial Sequence: Synthetic oligonucleotide
auacauaagauuugguugu

SEQ ID NO: 371804 - RNA, 19 nt, Artificial Sequence
  Description of Artificial Sequence: Synthetic oligonucleotide
acuucuaacacucagcauu

SEQ ID NO: 371805 - RNA, 19 nt, Artificial Sequence
  Description of Artificial Sequence: Synthetic oligonucleotide
aaaauuuagccaaaugcga

SEQ ID NO: 371806 - RNA, 19 nt, Artificial Sequence
  Description of Artificial Sequence: Synthetic oligonucleotide
aaauggagauucaaaguuc

SEQ ID NO: 371807 - RNA, 19 nt, Artificial Sequence
  Description of Artificial Sequence: Synthetic oligonucleotide
uacuacuagauucccauga

SEQ ID NO: 371808 - RNA, 19 nt, Artificial Sequence
  Description of Artificial Sequence: Synthetic oligonucleotide
agcauacaaugucugagac

SEQ ID NO: 371809 - RNA, 19 nt, Artificial Sequence
  Description of Artificial Sequence: Synthetic oligonucleotide
cauuauguaguuagcaaug

SEQ ID NO: 371810 - RNA, 19 nt, Artificial Sequence
  Description of Artificial Sequence: Synthetic oligonucleotide
cuauuauuccuguucagug

SEQ ID NO: 371811 - RNA, 19 nt, Artificial Sequence
  Description of Artificial Sequence: Synthetic oligonucleotide
aauuaagaacaauccuuca

SEQ ID NO: 371812 - RNA, 19 nt, Artificial Sequence
  Description of Artificial Sequence: Synthetic oligonucleotide
uacuguaacgugaauuggc

SEQ ID NO: 371813 - RNA, 19 nt, Artificial Sequence
  Description of Artificial Sequence: Synthetic oligonucleotide
aaacuaguuagaaaccuug

SEQ ID NO: 371814 - RNA, 19 nt, Artificial Sequence
  Description of Artificial Sequence: Synthetic oligonucleotide
cacuuaacaagucagucug

SEQ ID NO: 371815 - RNA, 19 nt, Artificial Sequence
  Description of Artificial Sequence: Synthetic oligonucleotide
uuaucaaggcgcuccauug

SEQ ID NO: 371816 - RNA, 19 nt, Artificial Sequence
  Description of Artificial Sequence: Synthetic oligonucleotide
uuacauguaucccugguua

SEQ ID NO: 371817 - RNA, 19 nt, Artificial Sequence
  Description of Artificial Sequence: Synthetic oligonucleotide
uaagguaaccaucuagaaa

SEQ ID NO: 371818 - RNA, 19 nt, Artificial Sequence
  Description of Artificial Sequence: Synthetic oligonucleotide
cucuauuggacauuccgag

SEQ ID NO: 371819 - RNA, 19 nt, Artificial Sequence
  Description of Artificial Sequence: Synthetic oligonucleotide
ucuuuaugucuaaucaccu

SEQ ID NO: 371820 - RNA, 19 nt, Artificial Sequence
  Description of Artificial Sequence: Synthetic oligonucleotide
auugugaacguucuuugca

SEQ ID NO: 371821 - RNA, 19 nt, Artificial Sequence
  Description of Artificial Sequence: Synthetic oligonucleotide
guaccuaucggacuuuucc

SEQ ID NO: 371822 - RNA, 19 nt, Artificial Sequence
  Description of Artificial Sequence: Synthetic oligonucleotide
gacuagauugcauaucuga

SEQ ID NO: 371823 - RNA, 19 nt, Artificial Sequence
  Description of Artificial Sequence: Synthetic oligonucleotide
aacgacaugaacagcaaca

SEQ ID NO: 371824 - RNA, 19 nt, Artificial Sequence
  Description of Artificial Sequence: Synthetic oligonucleotide
cuagcaugcgauauaacuc

SEQ ID NO: 371825 - RNA, 19 nt, Artificial Sequence
  Description of Artificial Sequence: Synthetic oligonucleotide
uguuauuauaagguaauua

SEQ ID NO: 371826 - RNA, 19 nt, Artificial Sequence
  Description of Artificial Sequence: Synthetic oligonucleotide
acuagauucccaugaaaca

SEQ ID NO: 371827 - RNA, 19 nt, Artificial Sequence
  Description of Artificial Sequence: Synthetic oligonucleotide
uaacccaauaggaacugug

SEQ ID NO: 371828 - RNA, 19 nt, Artificial Sequence
  Description of Artificial Sequence: Synthetic oligonucleotide
uagcaugcgauauaacucu

SEQ ID NO: 371829 - RNA, 19 nt, Artificial Sequence
  Description of Artificial Sequence: Synthetic oligonucleotide
uuugucaagcuacuaugac

SEQ ID NO: 371830 - RNA, 19 nt, Artificial Sequence
  Description of Artificial Sequence: Synthetic oligonucleotide
gauguuguuagcuauugcu

SEQ ID NO: 371831 - RNA, 19 nt, Artificial Sequence
  Description of Artificial Sequence: Synthetic oligonucleotide
gauacuagaugcaucuuac

SEQ ID NO: 371832 - RNA, 19 nt, Artificial Sequence
  Description of Artificial Sequence: Synthetic oligonucleotide
uagaaaucuagcauacaau

SEQ ID NO: 371833 - RNA, 19 nt, Artificial Sequence
  Description of Artificial Sequence: Synthetic oligonucleotide
aguuuugucaagcuacuau

SEQ ID NO: 371834 - RNA, 19 nt, Artificial Sequence
  Description of Artificial Sequence: Synthetic oligonucleotide
agauugugaacguucuuug

SEQ ID NO: 371835 - RNA, 19 nt, Artificial Sequence
  Description of Artificial Sequence: Synthetic oligonucleotide
gguaaaaucaauagcuugc

SEQ ID NO: 371836 - RNA, 19 nt, Artificial Sequence
  Description of Artificial Sequence: Synthetic oligonucleotide
ugauacuagaugcaucuua

SEQ ID NO: 371837 - RNA, 19 nt, Artificial Sequence
  Description of Artificial Sequence: Synthetic oligonucleotide
uuaggauacucacuuuuaa

SEQ ID NO: 371838 - RNA, 19 nt, Artificial Sequence
  Description of Artificial Sequence: Synthetic oligonucleotide
ucuaaucaccuauuucucu

SEQ ID NO: 371839 - RNA, 19 nt, Artificial Sequence
  Description of Artificial Sequence: Synthetic oligonucleotide
auugcguggccgcaagggc

SEQ ID NO: 371840 - RNA, 19 nt, Artificial Sequence
  Description of Artificial Sequence: Synthetic oligonucleotide
cauuccaagcgacauacac

SEQ ID NO: 371841 - RNA, 19 nt, Artificial Sequence
  Description of Artificial Sequence: Synthetic oligonucleotide
ugacuuacggaacaucuua

SEQ ID NO: 371842 - RNA, 19 nt, Artificial Sequence
  Description of Artificial Sequence: Synthetic oligonucleotide
gcaaacucagacaagauug

SEQ ID NO: 371843 - RNA, 19 nt, Artificial Sequence
  Description of Artificial Sequence: Synthetic oligonucleotide
aucaaggcgcuccauugcg

SEQ ID NO: 371844 - RNA, 19 nt, Artificial Sequence
  Description of Artificial Sequence: Synthetic oligonucleotide
gauugugaacguucuuugc

SEQ ID NO: 371845 - RNA, 19 nt, Artificial Sequence
  Description of Artificial Sequence: Synthetic oligonucleotide
uaaguauugauggguagcu

SEQ ID NO: 371846 - RNA, 19 nt, Artificial Sequence
  Description of Artificial Sequence: Synthetic oligonucleotide
cuuaacaguucaucucuag

SEQ ID NO: 371847 - RNA, 19 nt, Artificial Sequence
  Description of Artificial Sequence: Synthetic oligonucleotide
aacaauccuucaauaauca

SEQ ID NO: 371848 - RNA, 19 nt, Artificial Sequence
  Description of Artificial Sequence: Synthetic oligonucleotide
gcuacuguaacgugaauug

SEQ ID NO: 371849 - RNA, 19 nt, Artificial Sequence
  Description of Artificial Sequence: Synthetic oligonucleotide
gacccuuauauuuaggaua

SEQ ID NO: 371850 - RNA, 19 nt, Artificial Sequence
  Description of Artificial Sequence: Synthetic oligonucleotide
aauaggccaccuacuaagg

SEQ ID NO: 371851 - RNA, 19 nt, Artificial Sequence
  Description of Artificial Sequence: Synthetic oligonucleotide
uuuacauguaucccugguu

SEQ ID NO: 371852 - RNA, 19 nt, Artificial Sequence
  Description of Artificial Sequence: Synthetic oligonucleotide
agcuauugcuauuauuccu

SEQ ID NO: 371853 - RNA, 19 nt, Artificial Sequence
  Description of Artificial Sequence: Synthetic oligonucleotide
aacucagacaagauuguga

SEQ ID NO: 371854 - RNA, 19 nt, Artificial Sequence
  Description of Artificial Sequence: Synthetic oligonucleotide
uguuuacauguaucccugg

SEQ ID NO: 371855 - RNA, 19 nt, Artificial Sequence
  Description of Artificial Sequence: Synthetic oligonucleotide
caaguguaagcauggccgg

SEQ ID NO: 371856 - RNA, 19 nt, Artificial Sequence
  Description of Artificial Sequence: Synthetic oligonucleotide
guaaguauugauggguagc

SEQ ID NO: 371857 - RNA, 19 nt, Artificial Sequence
  Description of Artificial Sequence: Synthetic oligonucleotide
ucccuaaagaaaccucagc

SEQ ID NO: 371858 - RNA, 19 nt, Artificial Sequence
  Description of Artificial Sequence: Synthetic oligonucleotide
accuauuucucuauucuag

SEQ ID NO: 371859 - RNA, 19 nt, Artificial Sequence
  Description of Artificial Sequence: Synthetic oligonucleotide
uaucggacuuuuccaaaug

SEQ ID NO: 371860 - RNA, 19 nt, Artificial Sequence
  Description of Artificial Sequence: Synthetic oligonucleotide
uacaauaggccaccuacua

SEQ ID NO: 371861 - RNA, 19 nt, Artificial Sequence
  Description of Artificial Sequence: Synthetic oligonucleotide
auggccggcagcgauaugg

SEQ ID NO: 371862 - RNA, 19 nt, Artificial Sequence
  Description of Artificial Sequence: Synthetic oligonucleotide
uaccauuauguaguuagca

SEQ ID NO: 371863 - RNA, 19 nt, Artificial Sequence
  Description of Artificial Sequence: Synthetic oligonucleotide
uuguuacaauaaauggggu

SEQ ID NO: 371864 - RNA, 19 nt, Artificial Sequence
  Description of Artificial Sequence: Synthetic oligonucleotide
auauaacccaauaggaacu

SEQ ID NO: 371865 - RNA, 19 nt, Artificial Sequence
  Description of Artificial Sequence: Synthetic oligonucleotide
gacacuggugacuaaaacu

SEQ ID NO: 371866 - RNA, 19 nt, Artificial Sequence
  Description of Artificial Sequence: Synthetic oligonucleotide
auugacaucaagggacauc

SEQ ID NO: 371867 - RNA, 19 nt, Artificial Sequence
  Description of Artificial Sequence: Synthetic oligonucleotide
guaucccugguuaaaauac

SEQ ID NO: 371868 - RNA, 19 nt, Artificial Sequence
  Description of Artificial Sequence: Synthetic oligonucleotide
uuucaagcuauacucccua

SEQ ID NO: 371869 - RNA, 19 nt, Artificial Sequence
  Description of Artificial Sequence: Synthetic oligonucleotide
auauguacuuugugcaaga

SEQ ID NO: 371870 - RNA, 19 nt, Artificial Sequence
  Description of Artificial Sequence: Synthetic oligonucleotide
uauaacccaauaggaacug

SEQ ID NO: 371871 - RNA, 19 nt, Artificial Sequence
  Description of Artificial Sequence: Synthetic oligonucleotide
agcaagugacacuggugac

SEQ ID NO: 371872 - RNA, 19 nt, Artificial Sequence
  Description of Artificial Sequence: Synthetic oligonucleotide
uugugaacguucuuugcaa

SEQ ID NO: 371873 - RNA, 19 nt, Artificial Sequence
  Description of Artificial Sequence: Synthetic oligonucleotide
uugaaccuucauuccaagc

SEQ ID NO: 371874 - RNA, 19 nt, Artificial Sequence
  Description of Artificial Sequence: Synthetic oligonucleotide
ggcuaagaaaugcaggccc

SEQ ID NO: 371875 - RNA, 19 nt, Artificial Sequence
  Description of Artificial Sequence: Synthetic oligonucleotide
guaacgugaauuggcagcc

SEQ ID NO: 371876 - RNA, 19 nt, Artificial Sequence
  Description of Artificial Sequence: Synthetic oligonucleotide
aaacucagacaagauugug

SEQ ID NO: 371877 - RNA, 19 nt, Artificial Sequence
  Description of Artificial Sequence: Synthetic oligonucleotide
ucuguaacauguucacuau

SEQ ID NO: 371878 - RNA, 19 nt, Artificial Sequence
  Description of Artificial Sequence: Synthetic oligonucleotide
ucacaggcuacgauacuga

SEQ ID NO: 371879 - RNA, 19 nt, Artificial Sequence
  Description of Artificial Sequence: Synthetic oligonucleotide
ucaagcuauacucccuaau

SEQ ID NO: 371880 - RNA, 19 nt, Artificial Sequence
  Description of Artificial Sequence: Synthetic oligonucleotide
agcgccgcuuuaucaaggc

SEQ ID NO: 371881 - RNA, 19 nt, Artificial Sequence
  Description of Artificial Sequence: Synthetic oligonucleotide
cucuguaacauguucacua

SEQ ID NO: 371882 - RNA, 19 nt, Artificial Sequence
  Description of Artificial Sequence: Synthetic oligonucleotide
caggcuacgauacugaaua

SEQ ID NO: 371883 - RNA, 19 nt, Artificial Sequence
  Description of Artificial Sequence: Synthetic oligonucleotide
ucauaggguaaguauugau

SEQ ID NO: 371884 - RNA, 19 nt, Artificial Sequence
  Description of Artificial Sequence: Synthetic oligonucleotide
aacgugaauuggcagccau

SEQ ID NO: 371885 - RNA, 19 nt, Artificial Sequence
  Description of Artificial Sequence: Synthetic oligonucleotide
uuacuacuagauucccaug

SEQ ID NO: 371886 - RNA, 19 nt, Artificial Sequence
  Description of Artificial Sequence: Synthetic oligonucleotide
uuuuccuagcaugcgauau

SEQ ID NO: 371887 - RNA, 19 nt, Artificial Sequence
  Description of Artificial Sequence: Synthetic oligonucleotide
uuagccaaaugcgacugac

SEQ ID NO: 371888 - RNA, 19 nt, Artificial Sequence
  Description of Artificial Sequence: Synthetic oligonucleotide
aacuaguuagaaaccuuga

SEQ ID NO: 371889 - RNA, 19 nt, Artificial Sequence
  Description of Artificial Sequence: Synthetic oligonucleotide
aacaagugguaaauuaaua

SEQ ID NO: 371890 - RNA, 19 nt, Artificial Sequence
  Description of Artificial Sequence: Synthetic oligonucleotide
gaaugcuacuguaacguga

SEQ ID NO: 371891 - RNA, 19 nt, Artificial Sequence
  Description of Artificial Sequence: Synthetic oligonucleotide
auaaaugggguaaaaucaa

SEQ ID NO: 371892 - RNA, 19 nt, Artificial Sequence
  Description of Artificial Sequence: Synthetic oligonucleotide
agacccuuauauuuaggau

SEQ ID NO: 371893 - RNA, 19 nt, Artificial Sequence
  Description of Artificial Sequence: Synthetic oligonucleotide
caauaugacuuacggaaca

SEQ ID NO: 371894 - RNA, 19 nt, Artificial Sequence
  Description of Artificial Sequence: Synthetic oligonucleotide
aagcuacuaugacuuuucu

SEQ ID NO: 371895 - RNA, 19 nt, Artificial Sequence
  Description of Artificial Sequence: Synthetic oligonucleotide
cuacuguaacgugaauugg

SEQ ID NO: 371896 - RNA, 19 nt, Artificial Sequence
  Description of Artificial Sequence: Synthetic oligonucleotide
aggguaaguauugaugggu

SEQ ID NO: 371897 - RNA, 19 nt, Artificial Sequence
  Description of Artificial Sequence: Synthetic oligonucleotide
cuguaacgugaauuggcag

SEQ ID NO: 371898 - RNA, 19 nt, Artificial Sequence
  Description of Artificial Sequence: Synthetic oligonucleotide
cuuacggaacaucuuaaaa

SEQ ID NO: 371899 - RNA, 19 nt, Artificial Sequence
  Description of Artificial Sequence: Synthetic oligonucleotide
ggguuaaacuauucauagg

SEQ ID NO: 371900 - RNA, 19 nt, Artificial Sequence
  Description of Artificial Sequence: Synthetic oligonucleotide
aacuauucauaggguaagu

SEQ ID NO: 371901 - RNA, 19 nt, Artificial Sequence
  Description of Artificial Sequence: Synthetic oligonucleotide
auuacaaaccagaaugcua

SEQ ID NO: 371902 - RNA, 19 nt, Artificial Sequence
  Description of Artificial Sequence: Synthetic oligonucleotide
ucagcgccgcuuuaucaag

SEQ ID NO: 371903 - RNA, 19 nt, Artificial Sequence
  Description of Artificial Sequence: Synthetic oligonucleotide
cuaugcaaacucagacaag

SEQ ID NO: 371904 - RNA, 19 nt, Artificial Sequence
  Description of Artificial Sequence: Synthetic oligonucleotide
ugugaacguucuuugcaaa

SEQ ID NO: 371905 - RNA, 19 nt, Artificial Sequence
  Description of Artificial Sequence: Synthetic oligonucleotide
ugcuacuguaacgugaauu

SEQ ID NO: 371906 - RNA, 19 nt, Artificial Sequence
  Description of Artificial Sequence: Synthetic oligonucleotide
acuguaacgugaauuggca

SEQ ID NO: 371907 - RNA, 19 nt, Artificial Sequence
  Description of Artificial Sequence: Synthetic oligonucleotide
gaacgacaugaacagcaac

SEQ ID NO: 371908 - RNA, 19 nt, Artificial Sequence
  Description of Artificial Sequence: Synthetic oligonucleotide
acaauaggccaccuacuaa

SEQ ID NO: 371909 - RNA, 19 nt, Artificial Sequence
  Description of Artificial Sequence: Synthetic oligonucleotide
acuuacggaacaucuuaaa

SEQ ID NO: 371910 - RNA, 19 nt, Artificial Sequence
  Description of Artificial Sequence: Synthetic oligonucleotide
uacauguaucccugguuaa

SEQ ID NO: 371911 - RNA, 19 nt, Artificial Sequence
  Description of Artificial Sequence: Synthetic oligonucleotide
gaagacuagauugcauauc

SEQ ID NO: 371912 - RNA, 19 nt, Artificial Sequence
  Description of Artificial Sequence: Synthetic oligonucleotide
aguccaccggugaaaaggg

SEQ ID NO: 371913 - RNA, 19 nt, Artificial Sequence
  Description of Artificial Sequence: Synthetic oligonucleotide
augaaugauacuagaugca

SEQ ID NO: 371914 - RNA, 19 nt, Artificial Sequence
  Description of Artificial Sequence: Synthetic oligonucleotide
ugggacuacauguguuuac

SEQ ID NO: 371915 - RNA, 19 nt, Artificial Sequence
  Description of Artificial Sequence: Synthetic oligonucleotide
ugccugguauuuuccagga

SEQ ID NO: 371916 - RNA, 19 nt, Artificial Sequence
  Description of Artificial Sequence: Synthetic oligonucleotide
aauagaguggacaguucua

SEQ ID NO: 371917 - RNA, 19 nt, Artificial Sequence
  Description of Artificial Sequence: Synthetic oligonucleotide
uauugauggguagcuuccc

SEQ ID NO: 371918 - RNA, 19 nt, Artificial Sequence
  Description of Artificial Sequence: Synthetic oligonucleotide
cuauucauaggguaaguau

SEQ ID NO: 371919 - RNA, 19 nt, Artificial Sequence
  Description of Artificial Sequence: Synthetic oligonucleotide
agggacaucucuguaacau

SEQ ID NO: 371920 - RNA, 19 nt, Artificial Sequence
  Description of Artificial Sequence: Synthetic oligonucleotide
gugagauuucaccaaacgu

SEQ ID NO: 371921 - RNA, 19 nt, Artificial Sequence
  Description of Artificial Sequence: Synthetic oligonucleotide
ccaauaggaacugugauca

SEQ ID NO: 371922 - RNA, 19 nt, Artificial Sequence
  Description of Artificial Sequence: Synthetic oligonucleotide
cugcaucgcguucagcgcc

SEQ ID NO: 371923 - RNA, 19 nt, Artificial Sequence
  Description of Artificial Sequence: Synthetic oligonucleotide
aggcuacgauacugaauac

SEQ ID NO: 371924 - RNA, 19 nt, Artificial Sequence
  Description of Artificial Sequence: Synthetic oligonucleotide
ggugaaaagggaaguuuag

SEQ ID NO: 371925 - RNA, 19 nt, Artificial Sequence
  Description of Artificial Sequence: Synthetic oligonucleotide
acucccuaauugagaauac

SEQ ID NO: 371926 - RNA, 19 nt, Artificial Sequence
  Description of Artificial Sequence: Synthetic oligonucleotide
ucaaggcgcuccauugcgu

SEQ ID NO: 371927 - RNA, 19 nt, Artificial Sequence
  Description of Artificial Sequence: Synthetic oligonucleotide
cagcgauauggagagauuc

SEQ ID NO: 371928 - RNA, 19 nt, Artificial Sequence
  Description of Artificial Sequence: Synthetic oligonucleotide
uucaagcuauacucccuaa

SEQ ID NO: 371929 - RNA, 19 nt, Artificial Sequence
  Description of Artificial Sequence: Synthetic oligonucleotide
caaggcgcuccauugcgug

SEQ ID NO: 371930 - RNA, 19 nt, Artificial Sequence
  Description of Artificial Sequence: Synthetic oligonucleotide
uguaccuaucggacuuuuc

SEQ ID NO: 371931 - RNA, 19 nt, Artificial Sequence
  Description of Artificial Sequence: Synthetic oligonucleotide
acuauucauaggguaagua

SEQ ID NO: 371932 - RNA, 19 nt, Artificial Sequence
  Description of Artificial Sequence: Synthetic oligonucleotide
cagucgugccacagcauag

SEQ ID NO: 371933 - RNA, 19 nt, Artificial Sequence
  Description of Artificial Sequence: Synthetic oligonucleotide
ucauuccaagcgacauaca

SEQ ID NO: 371934 - RNA, 19 nt, Artificial Sequence
  Description of Artificial Sequence: Synthetic oligonucleotide
ggcaaauugcuauacauuu

SEQ ID NO: 371935 - RNA, 19 nt, Artificial Sequence
  Description of Artificial Sequence: Synthetic oligonucleotide
auacaauaggccaccuacu

SEQ ID NO: 371936 - RNA, 19 nt, Artificial Sequence
  Description of Artificial Sequence: Synthetic oligonucleotide
cuuuaugucuaaucaccua

SEQ ID NO: 371937 - RNA, 19 nt, Artificial Sequence
  Description of Artificial Sequence: Synthetic oligonucleotide
agcuugcacuuacauuuca

SEQ ID NO: 371938 - RNA, 19 nt, Artificial Sequence
  Description of Artificial Sequence: Synthetic oligonucleotide
agcgauauggagagauucu

SEQ ID NO: 371939 - RNA, 19 nt, Artificial Sequence
  Description of Artificial Sequence: Synthetic oligonucleotide
guuuacauguaucccuggu

SEQ ID NO: 371940 - RNA, 19 nt, Artificial Sequence
  Description of Artificial Sequence: Synthetic oligonucleotide
guucagcgccgcuuuauca

SEQ ID NO: 371941 - RNA, 19 nt, Artificial Sequence
  Description of Artificial Sequence: Synthetic oligonucleotide
cccaauaggaacugugauc

SEQ ID NO: 371942 - RNA, 19 nt, Artificial Sequence
  Description of Artificial Sequence: Synthetic oligonucleotide
acacccaauuauucugaau

SEQ ID NO: 371943 - RNA, 19 nt, Artificial Sequence
  Description of Artificial Sequence: Synthetic oligonucleotide
augcgauauaacucucuua

SEQ ID NO: 371944 - RNA, 19 nt, Artificial Sequence
  Description of Artificial Sequence: Synthetic oligonucleotide
aaguuuugucaagcuacua

SEQ ID NO: 371945 - RNA, 19 nt, Artificial Sequence
  Description of Artificial Sequence: Synthetic oligonucleotide
cagcgccgcuuuaucaagg

SEQ ID NO: 371946 - RNA, 19 nt, Artificial Sequence
  Description of Artificial Sequence: Synthetic oligonucleotide
acauuauugggagggucaa

SEQ ID NO: 371947 - RNA, 19 nt, Artificial Sequence
  Description of Artificial Sequence: Synthetic oligonucleotide
gacuuacggaacaucuuaa

SEQ ID NO: 371948 - RNA, 19 nt, Artificial Sequence
  Description of Artificial Sequence: Synthetic oligonucleotide
auaacccaauaggaacugu

SEQ ID NO: 371949 - RNA, 19 nt, Artificial Sequence
  Description of Artificial Sequence: Synthetic oligonucleotide
agcaugcgauauaacucuc

SEQ ID NO: 371950 - RNA, 19 nt, Artificial Sequence
  Description of Artificial Sequence: Synthetic oligonucleotide
agauugcauaucugacaau

SEQ ID NO: 371951 - RNA, 19 nt, Artificial Sequence
  Description of Artificial Sequence: Synthetic oligonucleotide
agacuagauugcauaucug

SEQ ID NO: 371952 - RNA, 19 nt, Artificial Sequence
  Description of Artificial Sequence: Synthetic oligonucleotide
cauuccgagggcaccuuca

SEQ ID NO: 371953 - RNA, 19 nt, Artificial Sequence
  Description of Artificial Sequence: Synthetic oligonucleotide
uggccggcagcgauaugga

SEQ ID NO: 371954 - RNA, 19 nt, Artificial Sequence
  Description of Artificial Sequence: Synthetic oligonucleotide
cauguaucccugguuaaaa

SEQ ID NO: 371955 - RNA, 19 nt, Artificial Sequence
  Description of Artificial Sequence: Synthetic oligonucleotide
caucacuuaacaagucagu

SEQ ID NO: 371956 - RNA, 19 nt, Artificial Sequence
  Description of Artificial Sequence: Synthetic oligonucleotide
cgccgcuuuaucaaggcgc

SEQ ID NO: 371957 - RNA, 19 nt, Artificial Sequence
  Description of Artificial Sequence: Synthetic oligonucleotide
gcacuuacauuucaagcua

SEQ ID NO: 371958 - RNA, 19 nt, Artificial Sequence
  Description of Artificial Sequence: Synthetic oligonucleotide
gcugcaucgcguucagcgc

SEQ ID NO: 371959 - RNA, 19 nt, Artificial Sequence
  Description of Artificial Sequence: Synthetic oligonucleotide
cuucgcgccacugucuuga

SEQ ID NO: 371960 - RNA, 19 nt, Artificial Sequence
  Description of Artificial Sequence: Synthetic oligonucleotide
gcgauauaacucucuuaac

SEQ ID NO: 371961 - RNA, 19 nt, Artificial Sequence
  Description of Artificial Sequence: Synthetic oligonucleotide
gugcagauguuguuagcua

SEQ ID NO: 371962 - RNA, 19 nt, Artificial Sequence
  Description of Artificial Sequence: Synthetic oligonucleotide
ggcuacgauacugaauaca

SEQ ID NO: 371963 - RNA, 19 nt, Artificial Sequence
  Description of Artificial Sequence: Synthetic oligonucleotide
ggaagacuagauugcauau

SEQ ID NO: 371964 - RNA, 19 nt, Artificial Sequence
  Description of Artificial Sequence: Synthetic oligonucleotide
ucgcguucagcgccgcuuu

SEQ ID NO: 371965 - RNA, 19 nt, Artificial Sequence
  Description of Artificial Sequence: Synthetic oligonucleotide
agacaagauugugaacguu

SEQ ID NO: 371966 - RNA, 19 nt, Artificial Sequence
  Description of Artificial Sequence: Synthetic oligonucleotide
gcuauuauuccuguucagu

SEQ ID NO: 371967 - RNA, 19 nt, Artificial Sequence
  Description of Artificial Sequence: Synthetic oligonucleotide
ggacaucucuguaacaugu

SEQ ID NO: 371968 - RNA, 19 nt, Artificial Sequence
  Description of Artificial Sequence: Synthetic oligonucleotide
ucgcgccacugucuugaac

SEQ ID NO: 371969 - RNA, 19 nt, Artificial Sequence
  Description of Artificial Sequence: Synthetic oligonucleotide
ccauuauguaguuagcaau

SEQ ID NO: 371970 - RNA, 19 nt, Artificial Sequence
  Description of Artificial Sequence: Synthetic oligonucleotide
caugcgauauaacucucuu

SEQ ID NO: 371971 - RNA, 19 nt, Artificial Sequence
  Description of Artificial Sequence: Synthetic oligonucleotide
gcgacugacuccuuaagau

SEQ ID NO: 371972 - RNA, 19 nt, Artificial Sequence
  Description of Artificial Sequence: Synthetic oligonucleotide
accggugaaaagggaaguu

SEQ ID NO: 371973 - RNA, 19 nt, Artificial Sequence
  Description of Artificial Sequence: Synthetic oligonucleotide
ccaccuacuaagguaacca

SEQ ID NO: 371974 - RNA, 19 nt, Artificial Sequence
  Description of Artificial Sequence: Synthetic oligonucleotide
guacuuugugcaagaggaa

SEQ ID NO: 371975 - RNA, 19 nt, Artificial Sequence
  Description of Artificial Sequence: Synthetic oligonucleotide
gccaccuacuaagguaacc

SEQ ID NO: 371976 - RNA, 19 nt, Artificial Sequence
  Description of Artificial Sequence: Synthetic oligonucleotide
augcuacuguaacgugaau

SEQ ID NO: 371977 - RNA, 19 nt, Artificial Sequence
  Description of Artificial Sequence: Synthetic oligonucleotide
cauguucacuaugcaaacu

SEQ ID NO: 371978 - RNA, 19 nt, Artificial Sequence
  Description of Artificial Sequence: Synthetic oligonucleotide
cuugaggguugaagcuaaa

SEQ ID NO: 371979 - RNA, 19 nt, Artificial Sequence
  Description of Artificial Sequence: Synthetic oligonucleotide
ggcagcgauauggagagau

SEQ ID NO: 371980 - RNA, 19 nt, Artificial Sequence
  Description of Artificial Sequence: Synthetic oligonucleotide
ccuaucggacuuuuccaaa

SEQ ID NO: 371981 - RNA, 19 nt, Artificial Sequence
  Description of Artificial Sequence: Synthetic oligonucleotide
acgugaauuggcagccauu

SEQ ID NO: 371982 - RNA, 19 nt, Artificial Sequence
  Description of Artificial Sequence: Synthetic oligonucleotide
uucgcgccacugucuugaa

SEQ ID NO: 371983 - RNA, 19 nt, Artificial Sequence
  Description of Artificial Sequence: Synthetic oligonucleotide
ggccggcagcgauauggag

SEQ ID NO: 371984 - RNA, 19 nt, Artificial Sequence
  Description of Artificial Sequence: Synthetic oligonucleotide
ccagucgugccacagcaua

SEQ ID NO: 371985 - RNA, 19 nt, Artificial Sequence
  Description of Artificial Sequence: Synthetic oligonucleotide
gggucaaaauuuagccaaa

SEQ ID NO: 371986 - RNA, 19 nt, Artificial Sequence
  Description of Artificial Sequence: Synthetic oligonucleotide
caagauugugaacguucuu

SEQ ID NO: 371987 - RNA, 19 nt, Artificial Sequence
  Description of Artificial Sequence: Synthetic oligonucleotide
guccaccggugaaaaggga

SEQ ID NO: 371988 - RNA, 19 nt, Artificial Sequence
  Description of Artificial Sequence: Synthetic oligonucleotide
caccggugaaaagggaagu

SEQ ID NO: 371989 - RNA, 19 nt, Artificial Sequence
  Description of Artificial Sequence: Synthetic oligonucleotide
cguucagcgccgcuuuauc

SEQ ID NO: 371990 - RNA, 19 nt, Artificial Sequence
  Description of Artificial Sequence: Synthetic oligonucleotide
gcaugcgauauaacucucu

SEQ ID NO: 371991 - RNA, 19 nt, Artificial Sequence
  Description of Artificial Sequence: Synthetic oligonucleotide
gccgcuuuaucaaggcgcu

SEQ ID NO: 371992 - RNA, 19 nt, Artificial Sequence
  Description of Artificial Sequence: Synthetic oligonucleotide
ccuucgcgccacugucuug

SEQ ID NO: 371993 - RNA, 19 nt, Artificial Sequence
  Description of Artificial Sequence: Synthetic oligonucleotide
cauugacaucaagggacau

SEQ ID NO: 371994 - RNA, 19 nt, Artificial Sequence
  Description of Artificial Sequence: Synthetic oligonucleotide
ccgagggcaccuucaaaua

SEQ ID NO: 371995 - RNA, 19 nt, Artificial Sequence
  Description of Artificial Sequence: Synthetic oligonucleotide
cgugaauuggcagccauuu

SEQ ID NO: 371996 - RNA, 19 nt, Artificial Sequence
  Description of Artificial Sequence: Synthetic oligonucleotide
ccuguaccauuauguaguu

SEQ ID NO: 371997 - RNA, 19 nt, Artificial Sequence
  Description of Artificial Sequence: Synthetic oligonucleotide
ccggugaaaagggaaguuu

SEQ ID NO: 371998 - RNA, 19 nt, Artificial Sequence
  Description of Artificial Sequence: Synthetic oligonucleotide
gcagcgauauggagagauu

SEQ ID NO: 371999 - RNA, 19 nt, Artificial Sequence
  Description of Artificial Sequence: Synthetic oligonucleotide
ccgcuuuaucaaggcgcuc

SEQ ID NO: 372000 - RNA, 19 nt, Artificial Sequence
  Description of Artificial Sequence: Synthetic oligonucleotide
gcguucagcgccgcuuuau

SEQ ID NO: 372001 - RNA, 19 nt, Artificial Sequence
  Description of Artificial Sequence: Synthetic oligonucleotide
cccuuauauuuaggauacu

SEQ ID NO: 372002 - RNA, 19 nt, Artificial Sequence
  Description of Artificial Sequence: Synthetic oligonucleotide
cccagucgugccacagcau

SEQ ID NO: 372003 - RNA, 19 nt, Artificial Sequence
  Description of Artificial Sequence: Synthetic oligonucleotide
cgcguucagcgccgcuuua

SEQ ID NO: 372004 - RNA, 19 nt, Artificial Sequence
  Description of Artificial Sequence: Synthetic oligonucleotide
acauagaugauccaaacac

SEQ ID NO: 372005 - RNA, 19 nt, Artificial Sequence
  Description of Artificial Sequence: Synthetic oligonucleotide
aaaucauagccccacauag

SEQ ID NO: 372006 - RNA, 19 nt, Artificial Sequence
  Description of Artificial Sequence: Synthetic oligonucleotide
aauaagauguagaugugcc

SEQ ID NO: 372007 - RNA, 19 nt, Artificial Sequence
  Description of Artificial Sequence: Synthetic oligonucleotide
aaauaagauguagaugugc

SEQ ID NO: 372008 - RNA, 19 nt, Artificial Sequence
  Description of Artificial Sequence: Synthetic oligonucleotide
aaugaaaacaccccuaaau

SEQ ID NO: 372009 - RNA, 19 nt, Artificial Sequence
  Description of Artificial Sequence: Synthetic oligonucleotide
ucaaaggcgaucuaucugg

SEQ ID NO: 372010 - RNA, 19 nt, Artificial Sequence
  Description of Artificial Sequence: Synthetic oligonucleotide
cuaaauccaacacauauag

SEQ ID NO: 372011 - RNA, 19 nt, Artificial Sequence
  Description of Artificial Sequence: Synthetic oligonucleotide
uugaauugaaucuacaguc

SEQ ID NO: 372012 - RNA, 19 nt, Artificial Sequence
  Description of Artificial Sequence: Synthetic oligonucleotide
aacuccuaaucauccaacc

SEQ ID NO: 372013 - RNA, 19 nt, Artificial Sequence
  Description of Artificial Sequence: Synthetic oligonucleotide
acuuacuccaagucaaagc

SEQ ID NO: 372014 - RNA, 19 nt, Artificial Sequence
  Description of Artificial Sequence: Synthetic oligonucleotide
gauuggcaaauucacaggg

SEQ ID NO: 372015 - RNA, 19 nt, Artificial Sequence
  Description of Artificial Sequence: Synthetic oligonucleotide
ugaaucuacagucaccuca

SEQ ID NO: 372016 - RNA, 19 nt, Artificial Sequence
  Description of Artificial Sequence: Synthetic oligonucleotide
aaucaagacgcugaauggc

SEQ ID NO: 372017 - RNA, 19 nt, Artificial Sequence
  Description of Artificial Sequence: Synthetic oligonucleotide
guagaugugccauaugugg

SEQ ID NO: 372018 - RNA, 19 nt, Artificial Sequence
  Description of Artificial Sequence: Synthetic oligonucleotide
ugccugaacucuuagaccg

SEQ ID NO: 372019 - RNA, 19 nt, Artificial Sequence
  Description of Artificial Sequence: Synthetic oligonucleotide
uaugccguuaaacaaaccu

SEQ ID NO: 372020 - RNA, 19 nt, Artificial Sequence
  Description of Artificial Sequence: Synthetic oligonucleotide
uucguuacggccuugccgg

SEQ ID NO: 372021 - RNA, 19 nt, Artificial Sequence
  Description of Artificial Sequence: Synthetic oligonucleotide
uuaagugcagcaaaucuga

SEQ ID NO: 372022 - RNA, 19 nt, Artificial Sequence
  Description of Artificial Sequence: Synthetic oligonucleotide
aagaacuuacuccaaguca

SEQ ID NO: 372023 - RNA, 19 nt, Artificial Sequence
  Description of Artificial Sequence: Synthetic oligonucleotide
uaauuaaggucacuuaacu

SEQ ID NO: 372024 - RNA, 19 nt, Artificial Sequence
  Description of Artificial Sequence: Synthetic oligonucleotide
uuagcaaagaccauuguuu

SEQ ID NO: 372025 - RNA, 19 nt, Artificial Sequence
  Description of Artificial Sequence: Synthetic oligonucleotide
ucacaaguauuuaagacaa

SEQ ID NO: 372026 - RNA, 19 nt, Artificial Sequence
  Description of Artificial Sequence: Synthetic oligonucleotide
uuaauuaaggucacuuaac

SEQ ID NO: 372027 - RNA, 19 nt, Artificial Sequence
  Description of Artificial Sequence: Synthetic oligonucleotide
uuaaguaccuguuucggcu

SEQ ID NO: 372028 - RNA, 19 nt, Artificial Sequence
  Description of Artificial Sequence: Synthetic oligonucleotide
ucaaagaacuuacuccaag

SEQ ID NO: 372029 - RNA, 19 nt, Artificial Sequence
  Description of Artificial Sequence: Synthetic oligonucleotide
uuugguggauccaaguuug

SEQ ID NO: 372030 - RNA, 19 nt, Artificial Sequence
  Description of Artificial Sequence: Synthetic oligonucleotide
uguaacuaauacuggagca

SEQ ID NO: 372031 - RNA, 19 nt, Artificial Sequence
  Description of Artificial Sequence: Synthetic oligonucleotide
acagcuuacagaguauucc

SEQ ID NO: 372032 - RNA, 19 nt, Artificial Sequence
  Description of Artificial Sequence: Synthetic oligonucleotide
aagguauucaaagaaacaa

SEQ ID NO: 372033 - RNA, 19 nt, Artificial Sequence
  Description of Artificial Sequence: Synthetic oligonucleotide
agucgaguugguuucaagg

SEQ ID NO: 372034 - RNA, 19 nt, Artificial Sequence
  Description of Artificial Sequence: Synthetic oligonucleotide
uucaugucccuaaauaaga

SEQ ID NO: 372035 - RNA, 19 nt, Artificial Sequence
  Description of Artificial Sequence: Synthetic oligonucleotide
uucacgccgacacuaauag

SEQ ID NO: 372036 - RNA, 19 nt, Artificial Sequence
  Description of Artificial Sequence: Synthetic oligonucleotide
uugacaggaauccagucga

SEQ ID NO: 372037 - RNA, 19 nt, Artificial Sequence
  Description of Artificial Sequence: Synthetic oligonucleotide
uuaacuucaggcagcauuc

SEQ ID NO: 372038 - RNA, 19 nt, Artificial Sequence
  Description of Artificial Sequence: Synthetic oligonucleotide
cagguuugguuuuauaugc

SEQ ID NO: 372039 - RNA, 19 nt, Artificial Sequence
  Description of Artificial Sequence: Synthetic oligonucleotide
aguuacuggacucgaaguc

SEQ ID NO: 372040 - RNA, 19 nt, Artificial Sequence
  Description of Artificial Sequence: Synthetic oligonucleotide
ugaauugaaucuacaguca

SEQ ID NO: 372041 - RNA, 19 nt, Artificial Sequence
  Description of Artificial Sequence: Synthetic oligonucleotide
cuaauacuggagcaggagg

SEQ ID NO: 372042 - RNA, 19 nt, Artificial Sequence
  Description of Artificial Sequence: Synthetic oligonucleotide
uuagcuguggucuaauuau

SEQ ID NO: 372043 - RNA, 19 nt, Artificial Sequence
  Description of Artificial Sequence: Synthetic oligonucleotide
aaucuuaugcagaaguugu

SEQ ID NO: 372044 - RNA, 19 nt, Artificial Sequence
  Description of Artificial Sequence: Synthetic oligonucleotide
ugaacauaaagauguuuga

SEQ ID NO: 372045 - RNA, 19 nt, Artificial Sequence
  Description of Artificial Sequence: Synthetic oligonucleotide
uccuaaucauccaaccucc

SEQ ID NO: 372046 - RNA, 19 nt, Artificial Sequence
  Description of Artificial Sequence: Synthetic oligonucleotide
ugcagagcaacuauggaaa

SEQ ID NO: 372047 - RNA, 19 nt, Artificial Sequence
  Description of Artificial Sequence: Synthetic oligonucleotide
gaaggcuuagcaaagacca

SEQ ID NO: 372048 - RNA, 19 nt, Artificial Sequence
  Description of Artificial Sequence: Synthetic oligonucleotide
gauuagaggaggcuugagc

SEQ ID NO: 372049 - RNA, 19 nt, Artificial Sequence
  Description of Artificial Sequence: Synthetic oligonucleotide
uuuuggugcccaaauaagu

SEQ ID NO: 372050 - RNA, 19 nt, Artificial Sequence
  Description of Artificial Sequence: Synthetic oligonucleotide
uaaucuuaugcagaaguug

SEQ ID NO: 372051 - RNA, 19 nt, Artificial Sequence
  Description of Artificial Sequence: Synthetic oligonucleotide
uuuaaguaccuguuucggc

SEQ ID NO: 372052 - RNA, 19 nt, Artificial Sequence
  Description of Artificial Sequence: Synthetic oligonucleotide
uguagaugugccauaugug

SEQ ID NO: 372053 - RNA, 19 nt, Artificial Sequence
  Description of Artificial Sequence: Synthetic oligonucleotide
ucaguuuaaccaagaaucu

SEQ ID NO: 372054 - RNA, 19 nt, Artificial Sequence
  Description of Artificial Sequence: Synthetic oligonucleotide
uguauauuucugguggucc

SEQ ID NO: 372055 - RNA, 19 nt, Artificial Sequence
  Description of Artificial Sequence: Synthetic oligonucleotide
uccauagugcaacagggac

SEQ ID NO: 372056 - RNA, 19 nt, Artificial Sequence
  Description of Artificial Sequence: Synthetic oligonucleotide
ugaaaugaccacuggcugc

SEQ ID NO: 372057 - RNA, 19 nt, Artificial Sequence
  Description of Artificial Sequence: Synthetic oligonucleotide
guuugaaaugaccacuggc

SEQ ID NO: 372058 - RNA, 19 nt, Artificial Sequence
  Description of Artificial Sequence: Synthetic oligonucleotide
guuacaccugauuagagga

SEQ ID NO: 372059 - RNA, 19 nt, Artificial Sequence
  Description of Artificial Sequence: Synthetic oligonucleotide
uacguuaagggaaguaugu

SEQ ID NO: 372060 - RNA, 19 nt, Artificial Sequence
  Description of Artificial Sequence: Synthetic oligonucleotide
acacuaauagcuguaaucu

SEQ ID NO: 372061 - RNA, 19 nt, Artificial Sequence
  Description of Artificial Sequence: Synthetic oligonucleotide
caauaugcugucaaagaac

SEQ ID NO: 372062 - RNA, 19 nt, Artificial Sequence
  Description of Artificial Sequence: Synthetic oligonucleotide
acaguuacuggacucgaag

SEQ ID NO: 372063 - RNA, 19 nt, Artificial Sequence
  Description of Artificial Sequence: Synthetic oligonucleotide
ucuuuuacagcagaucaga

SEQ ID NO: 372064 - RNA, 19 nt, Artificial Sequence
  Description of Artificial Sequence: Synthetic oligonucleotide
cauagccccacauagauga

SEQ ID NO: 372065 - RNA, 19 nt, Artificial Sequence
  Description of Artificial Sequence: Synthetic oligonucleotide
uuaucaaaggcgaucuauc

SEQ ID NO: 372066 - RNA, 19 nt, Artificial Sequence
  Description of Artificial Sequence: Synthetic oligonucleotide
aguucuuacacugccgaac

SEQ ID NO: 372067 - RNA, 19 nt, Artificial Sequence
  Description of Artificial Sequence: Synthetic oligonucleotide
acaauaugcugucaaagaa

SEQ ID NO: 372068 - RNA, 19 nt, Artificial Sequence
  Description of Artificial Sequence: Synthetic oligonucleotide
uuauaugcagagcaacuau

SEQ ID NO: 372069 - RNA, 19 nt, Artificial Sequence
  Description of Artificial Sequence: Synthetic oligonucleotide
uuauaaaucauagccccac

SEQ ID NO: 372070 - RNA, 19 nt, Artificial Sequence
  Description of Artificial Sequence: Synthetic oligonucleotide
uacggauuggcaaauucac

SEQ ID NO: 372071 - RNA, 19 nt, Artificial Sequence
  Description of Artificial Sequence: Synthetic oligonucleotide
gguuucaagguucacgccg

SEQ ID NO: 372072 - RNA, 19 nt, Artificial Sequence
  Description of Artificial Sequence: Synthetic oligonucleotide
ucuuacuacuucaaagcuc

SEQ ID NO: 372073 - RNA, 19 nt, Artificial Sequence
  Description of Artificial Sequence: Synthetic oligonucleotide
uauauacaccacuaggcau

SEQ ID NO: 372074 - RNA, 19 nt, Artificial Sequence
  Description of Artificial Sequence: Synthetic oligonucleotide
cagaauucggaggugaggg

SEQ ID NO: 372075 - RNA, 19 nt, Artificial Sequence
  Description of Artificial Sequence: Synthetic oligonucleotide
uucugauuuucaagcacag

SEQ ID NO: 372076 - RNA, 19 nt, Artificial Sequence
  Description of Artificial Sequence: Synthetic oligonucleotide
ucccuaaauaagauguaga

SEQ ID NO: 372077 - RNA, 19 nt, Artificial Sequence
  Description of Artificial Sequence: Synthetic oligonucleotide
uuccaaugccuuauucagg

SEQ ID NO: 372078 - RNA, 19 nt, Artificial Sequence
  Description of Artificial Sequence: Synthetic oligonucleotide
ucauccuucguuacggccu

SEQ ID NO: 372079 - RNA, 19 nt, Artificial Sequence
  Description of Artificial Sequence: Synthetic oligonucleotide
cuugcgaaggcucaguauc

SEQ ID NO: 372080 - RNA, 19 nt, Artificial Sequence
  Description of Artificial Sequence: Synthetic oligonucleotide
ucuaauuaucuuggaaggc

SEQ ID NO: 372081 - RNA, 19 nt, Artificial Sequence
  Description of Artificial Sequence: Synthetic oligonucleotide
gguugaauugaaucuacag

SEQ ID NO: 372082 - RNA, 19 nt, Artificial Sequence
  Description of Artificial Sequence: Synthetic oligonucleotide
uaucugguuccaccuacgg

SEQ ID NO: 372083 - RNA, 19 nt, Artificial Sequence
  Description of Artificial Sequence: Synthetic oligonucleotide
uuccaguacaguaugccgu

SEQ ID NO: 372084 - RNA, 19 nt, Artificial Sequence
  Description of Artificial Sequence: Synthetic oligonucleotide
cauagugcaacagggacag

SEQ ID NO: 372085 - RNA, 19 nt, Artificial Sequence
  Description of Artificial Sequence: Synthetic oligonucleotide
uucacaucugucuucguuc

SEQ ID NO: 372086 - RNA, 19 nt, Artificial Sequence
  Description of Artificial Sequence: Synthetic oligonucleotide
auaugcagagcaacuaugg

SEQ ID NO: 372087 - RNA, 19 nt, Artificial Sequence
  Description of Artificial Sequence: Synthetic oligonucleotide
agacaaugaaaacaccccu

SEQ ID NO: 372088 - RNA, 19 nt, Artificial Sequence
  Description of Artificial Sequence: Synthetic oligonucleotide
uacaccacuaggcauugcu

SEQ ID NO: 372089 - RNA, 19 nt, Artificial Sequence
  Description of Artificial Sequence: Synthetic oligonucleotide
aggcgaucuaucugguucc

SEQ ID NO: 372090 - RNA, 19 nt, Artificial Sequence
  Description of Artificial Sequence: Synthetic oligonucleotide
auucaggcuauuucaccac

SEQ ID NO: 372091 - RNA, 19 nt, Artificial Sequence
  Description of Artificial Sequence: Synthetic oligonucleotide
ugaacucuuagaccgcugu

SEQ ID NO: 372092 - RNA, 19 nt, Artificial Sequence
  Description of Artificial Sequence: Synthetic oligonucleotide
ucuuaugcagaaguuguga

SEQ ID NO: 372093 - RNA, 19 nt, Artificial Sequence
  Description of Artificial Sequence: Synthetic oligonucleotide
uuccguuacaccugauuag

SEQ ID NO: 372094 - RNA, 19 nt, Artificial Sequence
  Description of Artificial Sequence: Synthetic oligonucleotide
uuagaggaggcuugagcag

SEQ ID NO: 372095 - RNA, 19 nt, Artificial Sequence
  Description of Artificial Sequence: Synthetic oligonucleotide
cuucguuacggccuugccg

SEQ ID NO: 372096 - RNA, 19 nt, Artificial Sequence
  Description of Artificial Sequence: Synthetic oligonucleotide
ggaagucuaauauagccac

SEQ ID NO: 372097 - RNA, 19 nt, Artificial Sequence
  Description of Artificial Sequence: Synthetic oligonucleotide
aacacugcugaaucuaauu

SEQ ID NO: 372098 - RNA, 19 nt, Artificial Sequence
  Description of Artificial Sequence: Synthetic oligonucleotide
uuacagcagaucagaaccc

SEQ ID NO: 372099 - RNA, 19 nt, Artificial Sequence
  Description of Artificial Sequence: Synthetic oligonucleotide
guagucaaccuugcgaagg

SEQ ID NO: 372100 - RNA, 19 nt, Artificial Sequence
  Description of Artificial Sequence: Synthetic oligonucleotide
uugugauccacaugaaauc

SEQ ID NO: 372101 - RNA, 19 nt, Artificial Sequence
  Description of Artificial Sequence: Synthetic oligonucleotide
aagcaaggccuuaaugugg

SEQ ID NO: 372102 - RNA, 19 nt, Artificial Sequence
  Description of Artificial Sequence: Synthetic oligonucleotide
aacuuacuccaagucaaag

SEQ ID NO: 372103 - RNA, 19 nt, Artificial Sequence
  Description of Artificial Sequence: Synthetic oligonucleotide
guucuuacacugccgaacc

SEQ ID NO: 372104 - RNA, 19 nt, Artificial Sequence
  Description of Artificial Sequence: Synthetic oligonucleotide
acacaauaugcugucaaag

SEQ ID NO: 372105 - RNA, 19 nt, Artificial Sequence
  Description of Artificial Sequence: Synthetic oligonucleotide
uaaccccaaacagaauucg

SEQ ID NO: 372106 - RNA, 19 nt, Artificial Sequence
  Description of Artificial Sequence: Synthetic oligonucleotide
cuccuaaucauccaaccuc

SEQ ID NO: 372107 - RNA, 19 nt, Artificial Sequence
  Description of Artificial Sequence: Synthetic oligonucleotide
uguggcguuuuccuuguug

SEQ ID NO: 372108 - RNA, 19 nt, Artificial Sequence
  Description of Artificial Sequence: Synthetic oligonucleotide
gacuuuucuacuccacuac

SEQ ID NO: 372109 - RNA, 19 nt, Artificial Sequence
  Description of Artificial Sequence: Synthetic oligonucleotide
uugguugaauugaaucuac

SEQ ID NO: 372110 - RNA, 19 nt, Artificial Sequence
  Description of Artificial Sequence: Synthetic oligonucleotide
ugaagacuuuucuacucca

SEQ ID NO: 372111 - RNA, 19 nt, Artificial Sequence
  Description of Artificial Sequence: Synthetic oligonucleotide
gguaaaagcauacguuaag

SEQ ID NO: 372112 - RNA, 19 nt, Artificial Sequence
  Description of Artificial Sequence: Synthetic oligonucleotide
uggaacagaacaagcacua

SEQ ID NO: 372113 - RNA, 19 nt, Artificial Sequence
  Description of Artificial Sequence: Synthetic oligonucleotide
auuugguggauccaaguuu

SEQ ID NO: 372114 - RNA, 19 nt, Artificial Sequence
  Description of Artificial Sequence: Synthetic oligonucleotide
ucaaccuugcgaaggcuca

SEQ ID NO: 372115 - RNA, 19 nt, Artificial Sequence
  Description of Artificial Sequence: Synthetic oligonucleotide
uuuugaaaccuccucccua

SEQ ID NO: 372116 - RNA, 19 nt, Artificial Sequence
  Description of Artificial Sequence: Synthetic oligonucleotide
auaaaucauagccccacau

SEQ ID NO: 372117 - RNA, 19 nt, Artificial Sequence
  Description of Artificial Sequence: Synthetic oligonucleotide
aacugugugucacuguaua

SEQ ID NO: 372118 - RNA, 19 nt, Artificial Sequence
  Description of Artificial Sequence: Synthetic oligonucleotide
aggaauccagucgaguugg

SEQ ID NO: 372119 - RNA, 19 nt, Artificial Sequence
  Description of Artificial Sequence: Synthetic oligonucleotide
agguauucaaagaaacaag

SEQ ID NO: 372120 - RNA, 19 nt, Artificial Sequence
  Description of Artificial Sequence: Synthetic oligonucleotide
ugagggguaaaagcauacg

SEQ ID NO: 372121 - RNA, 19 nt, Artificial Sequence
  Description of Artificial Sequence: Synthetic oligonucleotide
uccaccuacggauuggcaa

SEQ ID NO: 372122 - RNA, 19 nt, Artificial Sequence
  Description of Artificial Sequence: Synthetic oligonucleotide
cuaaccccaaacagaauuc

SEQ ID NO: 372123 - RNA, 19 nt, Artificial Sequence
  Description of Artificial Sequence: Synthetic oligonucleotide
agggacaguuacuggacuc

SEQ ID NO: 372124 - RNA, 19 nt, Artificial Sequence
  Description of Artificial Sequence: Synthetic oligonucleotide
agaacuuacuccaagucaa

SEQ ID NO: 372125 - RNA, 19 nt, Artificial Sequence
  Description of Artificial Sequence: Synthetic oligonucleotide
ucuuuaucccuaagggaaa

SEQ ID NO: 372126 - RNA, 19 nt, Artificial Sequence
  Description of Artificial Sequence: Synthetic oligonucleotide
ucaaggugugagauuauuu

SEQ ID NO: 372127 - RNA, 19 nt, Artificial Sequence
  Description of Artificial Sequence: Synthetic oligonucleotide
uguuucggcucucuacgug

SEQ ID NO: 372128 - RNA, 19 nt, Artificial Sequence
  Description of Artificial Sequence: Synthetic oligonucleotide
agcaacuauggaaacacug

SEQ ID NO: 372129 - RNA, 19 nt, Artificial Sequence
  Description of Artificial Sequence: Synthetic oligonucleotide
ugaaaccuccucccuaccu

SEQ ID NO: 372130 - RNA, 19 nt, Artificial Sequence
  Description of Artificial Sequence: Synthetic oligonucleotide
ucaugucccuaaauaagau

SEQ ID NO: 372131 - RNA, 19 nt, Artificial Sequence
  Description of Artificial Sequence: Synthetic oligonucleotide
ucuaauucacaaguauuua

SEQ ID NO: 372132 - RNA, 19 nt, Artificial Sequence
  Description of Artificial Sequence: Synthetic oligonucleotide
aagcauacguuaagggaag

SEQ ID NO: 372133 - RNA, 19 nt, Artificial Sequence
  Description of Artificial Sequence: Synthetic oligonucleotide
acuccuaaucauccaaccu

SEQ ID NO: 372134 - RNA, 19 nt, Artificial Sequence
  Description of Artificial Sequence: Synthetic oligonucleotide
aggaggccuauauacacca

SEQ ID NO: 372135 - RNA, 19 nt, Artificial Sequence
  Description of Artificial Sequence: Synthetic oligonucleotide
aguauguggcucaaggugu

SEQ ID NO: 372136 - RNA, 19 nt, Artificial Sequence
  Description of Artificial Sequence: Synthetic oligonucleotide
gguuugguuuuauaugcag

SEQ ID NO: 372137 - RNA, 19 nt, Artificial Sequence
  Description of Artificial Sequence: Synthetic oligonucleotide
aguuuaagggccugguuuu

SEQ ID NO: 372138 - RNA, 19 nt, Artificial Sequence
  Description of Artificial Sequence: Synthetic oligonucleotide
agaaguugugauccacaug

SEQ ID NO: 372139 - RNA, 19 nt, Artificial Sequence
  Description of Artificial Sequence: Synthetic oligonucleotide
aaccccaaacagaauucgg

SEQ ID NO: 372140 - RNA, 19 nt, Artificial Sequence
  Description of Artificial Sequence: Synthetic oligonucleotide
acuaggcauugcuggcucc

SEQ ID NO: 372141 - RNA, 19 nt, Artificial Sequence
  Description of Artificial Sequence: Synthetic oligonucleotide
uguacuggagcuguuuuau

SEQ ID NO: 372142 - RNA, 19 nt, Artificial Sequence
  Description of Artificial Sequence: Synthetic oligonucleotide
acuaauagcuguaaucuua

SEQ ID NO: 372143 - RNA, 19 nt, Artificial Sequence
  Description of Artificial Sequence: Synthetic oligonucleotide
uccguuacaccugauuaga

SEQ ID NO: 372144 - RNA, 19 nt, Artificial Sequence
  Description of Artificial Sequence: Synthetic oligonucleotide
ggauggaucagaucaugcc

SEQ ID NO: 372145 - RNA, 19 nt, Artificial Sequence
  Description of Artificial Sequence: Synthetic oligonucleotide
cuuacacugccgaaccaug

SEQ ID NO: 372146 - RNA, 19 nt, Artificial Sequence
  Description of Artificial Sequence: Synthetic oligonucleotide
ugcccaaauaagucuucag

SEQ ID NO: 372147 - RNA, 19 nt, Artificial Sequence
  Description of Artificial Sequence: Synthetic oligonucleotide
augccugagaacccaaaga

SEQ ID NO: 372148 - RNA, 19 nt, Artificial Sequence
  Description of Artificial Sequence: Synthetic oligonucleotide
cuaucugguuccaccuacg

SEQ ID NO: 372149 - RNA, 19 nt, Artificial Sequence
  Description of Artificial Sequence: Synthetic oligonucleotide
gaaaugaccacuggcugca

SEQ ID NO: 372150 - RNA, 19 nt, Artificial Sequence
  Description of Artificial Sequence: Synthetic oligonucleotide
agacuuuucuacuccacua

SEQ ID NO: 372151 - RNA, 19 nt, Artificial Sequence
  Description of Artificial Sequence: Synthetic oligonucleotide
aguugugauccacaugaaa

SEQ ID NO: 372152 - RNA, 19 nt, Artificial Sequence
  Description of Artificial Sequence: Synthetic oligonucleotide
ugaaguuuaagggccuggu

SEQ ID NO: 372153 - RNA, 19 nt, Artificial Sequence
  Description of Artificial Sequence: Synthetic oligonucleotide
auacguuaagggaaguaug

SEQ ID NO: 372154 - RNA, 19 nt, Artificial Sequence
  Description of Artificial Sequence: Synthetic oligonucleotide
cuacggauuggcaaauuca

SEQ ID NO: 372155 - RNA, 19 nt, Artificial Sequence
  Description of Artificial Sequence: Synthetic oligonucleotide
cagacuuccgcugucgccc

SEQ ID NO: 372156 - RNA, 19 nt, Artificial Sequence
  Description of Artificial Sequence: Synthetic oligonucleotide
aacuuccauagugcaacag

SEQ ID NO: 372157 - RNA, 19 nt, Artificial Sequence
  Description of Artificial Sequence: Synthetic oligonucleotide
uuagaccgcuguaaucaac

SEQ ID NO: 372158 - RNA, 19 nt, Artificial Sequence
  Description of Artificial Sequence: Synthetic oligonucleotide
gaugggaacugugugucac

SEQ ID NO: 372159 - RNA, 19 nt, Artificial Sequence
  Description of Artificial Sequence: Synthetic oligonucleotide
aggaagucuaauauagcca

SEQ ID NO: 372160 - RNA, 19 nt, Artificial Sequence
  Description of Artificial Sequence: Synthetic oligonucleotide
cguuaagggaaguaugugg

SEQ ID NO: 372161 - RNA, 19 nt, Artificial Sequence
  Description of Artificial Sequence: Synthetic oligonucleotide
guuccguuacaccugauua

SEQ ID NO: 372162 - RNA, 19 nt, Artificial Sequence
  Description of Artificial Sequence: Synthetic oligonucleotide
aaucauagccccacauaga

SEQ ID NO: 372163 - RNA, 19 nt, Artificial Sequence
  Description of Artificial Sequence: Synthetic oligonucleotide
ucgaguugguuucaagguu

SEQ ID NO: 372164 - RNA, 19 nt, Artificial Sequence
  Description of Artificial Sequence: Synthetic oligonucleotide
acagguuaauuaaggucac

SEQ ID NO: 372165 - RNA, 19 nt, Artificial Sequence
  Description of Artificial Sequence: Synthetic oligonucleotide
cacugcugaaucuaauuca

SEQ ID NO: 372166 - RNA, 19 nt, Artificial Sequence
  Description of Artificial Sequence: Synthetic oligonucleotide
gauguagaugugccauaug

SEQ ID NO: 372167 - RNA, 19 nt, Artificial Sequence
  Description of Artificial Sequence: Synthetic oligonucleotide
cacaauuaagugcagcaaa

SEQ ID NO: 372168 - RNA, 19 nt, Artificial Sequence
  Description of Artificial Sequence: Synthetic oligonucleotide
uggcaugcagucuggucag

SEQ ID NO: 372169 - RNA, 19 nt, Artificial Sequence
  Description of Artificial Sequence: Synthetic oligonucleotide
uugcgaaggcucaguaucu

SEQ ID NO: 372170 - RNA, 19 nt, Artificial Sequence
  Description of Artificial Sequence: Synthetic oligonucleotide
aucagaucaugccaacuuu

SEQ ID NO: 372171 - RNA, 19 nt, Artificial Sequence
  Description of Artificial Sequence: Synthetic oligonucleotide
ggucacuuaacucuucauc

SEQ ID NO: 372172 - RNA, 19 nt, Artificial Sequence
  Description of Artificial Sequence: Synthetic oligonucleotide
guuacggccuugccggcgg

SEQ ID NO: 372173 - RNA, 19 nt, Artificial Sequence
  Description of Artificial Sequence: Synthetic oligonucleotide
uauacaccacuaggcauug

SEQ ID NO: 372174 - RNA, 19 nt, Artificial Sequence
  Description of Artificial Sequence: Synthetic oligonucleotide
cauauguggucauuuaacu

SEQ ID NO: 372175 - RNA, 19 nt, Artificial Sequence
  Description of Artificial Sequence: Synthetic oligonucleotide
agguuaauuaaggucacuu

SEQ ID NO: 372176 - RNA, 19 nt, Artificial Sequence
  Description of Artificial Sequence: Synthetic oligonucleotide
gagggguaaaagcauacgu

SEQ ID NO: 372177 - RNA, 19 nt, Artificial Sequence
  Description of Artificial Sequence: Synthetic oligonucleotide
auccaaguuugguugaauu

SEQ ID NO: 372178 - RNA, 19 nt, Artificial Sequence
  Description of Artificial Sequence: Synthetic oligonucleotide
guacaguaugccguuaaac

SEQ ID NO: 372179 - RNA, 19 nt, Artificial Sequence
  Description of Artificial Sequence: Synthetic oligonucleotide
uguggucauuuaacuucag

SEQ ID NO: 372180 - RNA, 19 nt, Artificial Sequence
  Description of Artificial Sequence: Synthetic oligonucleotide
auauacaccacuaggcauu

SEQ ID NO: 372181 - RNA, 19 nt, Artificial Sequence
  Description of Artificial Sequence: Synthetic oligonucleotide
ggcguuuuccuuguugugg

SEQ ID NO: 372182 - RNA, 19 nt, Artificial Sequence
  Description of Artificial Sequence: Synthetic oligonucleotide
ucuacgugcuuggcagugg

SEQ ID NO: 372183 - RNA, 19 nt, Artificial Sequence
  Description of Artificial Sequence: Synthetic oligonucleotide
gaaguauguggcucaaggu

SEQ ID NO: 372184 - RNA, 19 nt, Artificial Sequence
  Description of Artificial Sequence: Synthetic oligonucleotide
caacacauauagagaucag

SEQ ID NO: 372185 - RNA, 19 nt, Artificial Sequence
  Description of Artificial Sequence: Synthetic oligonucleotide
uuacuggacucgaagucuu

SEQ ID NO: 372186 - RNA, 19 nt, Artificial Sequence
  Description of Artificial Sequence: Synthetic oligonucleotide
uucuuacacugccgaacca

SEQ ID NO: 372187 - RNA, 19 nt, Artificial Sequence
  Description of Artificial Sequence: Synthetic oligonucleotide
cacgccgacacuaauagcu

SEQ ID NO: 372188 - RNA, 19 nt, Artificial Sequence
  Description of Artificial Sequence: Synthetic oligonucleotide
uauugcccagaauggcaug

SEQ ID NO: 372189 - RNA, 19 nt, Artificial Sequence
  Description of Artificial Sequence: Synthetic oligonucleotide
ugguuucaagguucacgcc

SEQ ID NO: 372190 - RNA, 19 nt, Artificial Sequence
  Description of Artificial Sequence: Synthetic oligonucleotide
ugccgaaccaugccugaga

SEQ ID NO: 372191 - RNA, 19 nt, Artificial Sequence
  Description of Artificial Sequence: Synthetic oligonucleotide
cacauagaugauccaaaca

SEQ ID NO: 372192 - RNA, 19 nt, Artificial Sequence
  Description of Artificial Sequence: Synthetic oligonucleotide
aucaagacgcugaauggcu

SEQ ID NO: 372193 - RNA, 19 nt, Artificial Sequence
  Description of Artificial Sequence: Synthetic oligonucleotide
auucaauguuaauguuaca

SEQ ID NO: 372194 - RNA, 19 nt, Artificial Sequence
  Description of Artificial Sequence: Synthetic oligonucleotide
aguacaguaugccguuaaa

SEQ ID NO: 372195 - RNA, 19 nt, Artificial Sequence
  Description of Artificial Sequence: Synthetic oligonucleotide
aguuccguuacaccugauu

SEQ ID NO: 372196 - RNA, 19 nt, Artificial Sequence
  Description of Artificial Sequence: Synthetic oligonucleotide
acacugccgaaccaugccu

SEQ ID NO: 372197 - RNA, 19 nt, Artificial Sequence
  Description of Artificial Sequence: Synthetic oligonucleotide
cuuuaucccuaagggaaac

SEQ ID NO: 372198 - RNA, 19 nt, Artificial Sequence
  Description of Artificial Sequence: Synthetic oligonucleotide
cuaggcauugcuggcuccg

SEQ ID NO: 372199 - RNA, 19 nt, Artificial Sequence
  Description of Artificial Sequence: Synthetic oligonucleotide
uagcuguggucuaauuauc

SEQ ID NO: 372200 - RNA, 19 nt, Artificial Sequence
  Description of Artificial Sequence: Synthetic oligonucleotide
ugggaacugugugucacug

SEQ ID NO: 372201 - RNA, 19 nt, Artificial Sequence
  Description of Artificial Sequence: Synthetic oligonucleotide
agcuguaaucuuaugcaga

SEQ ID NO: 372202 - RNA, 19 nt, Artificial Sequence
  Description of Artificial Sequence: Synthetic oligonucleotide
accccuaaauccaacacau

SEQ ID NO: 372203 - RNA, 19 nt, Artificial Sequence
  Description of Artificial Sequence: Synthetic oligonucleotide
gaucagaucaugccaacuu

SEQ ID NO: 372204 - RNA, 19 nt, Artificial Sequence
  Description of Artificial Sequence: Synthetic oligonucleotide
aaccaugccugagaaccca

SEQ ID NO: 372205 - RNA, 19 nt, Artificial Sequence
  Description of Artificial Sequence: Synthetic oligonucleotide
uuguacuggagcuguuuua

SEQ ID NO: 372206 - RNA, 19 nt, Artificial Sequence
  Description of Artificial Sequence: Synthetic oligonucleotide
caguuuaaccaagaaucuc

SEQ ID NO: 372207 - RNA, 19 nt, Artificial Sequence
  Description of Artificial Sequence: Synthetic oligonucleotide
uggcaccggagccuaagcu

SEQ ID NO: 372208 - RNA, 19 nt, Artificial Sequence
  Description of Artificial Sequence: Synthetic oligonucleotide
ucccuaagggaaacucuaa

SEQ ID NO: 372209 - RNA, 19 nt, Artificial Sequence
  Description of Artificial Sequence: Synthetic oligonucleotide
gaugugccauaugugguca

SEQ ID NO: 372210 - RNA, 19 nt, Artificial Sequence
  Description of Artificial Sequence: Synthetic oligonucleotide
cugucgcccgaccugacac

SEQ ID NO: 372211 - RNA, 19 nt, Artificial Sequence
  Description of Artificial Sequence: Synthetic oligonucleotide
guugugacucuugaacuuc

SEQ ID NO: 372212 - RNA, 19 nt, Artificial Sequence
  Description of Artificial Sequence: Synthetic oligonucleotide
aaaggcgaucuaucugguu

SEQ ID NO: 372213 - RNA, 19 nt, Artificial Sequence
  Description of Artificial Sequence: Synthetic oligonucleotide
acguuaagggaaguaugug

SEQ ID NO: 372214 - RNA, 19 nt, Artificial Sequence
  Description of Artificial Sequence: Synthetic oligonucleotide
ugcauugccugaacucuua

SEQ ID NO: 372215 - RNA, 19 nt, Artificial Sequence
  Description of Artificial Sequence: Synthetic oligonucleotide
gaccgcuguaaucaaccuc

SEQ ID NO: 372216 - RNA, 19 nt, Artificial Sequence
  Description of Artificial Sequence: Synthetic oligonucleotide
acccagacaguguauuaaa

SEQ ID NO: 372217 - RNA, 19 nt, Artificial Sequence
  Description of Artificial Sequence: Synthetic oligonucleotide
gucgaguugguuucaaggu

SEQ ID NO: 372218 - RNA, 19 nt, Artificial Sequence
  Description of Artificial Sequence: Synthetic oligonucleotide
gaggccuauauacaccacu

SEQ ID NO: 372219 - RNA, 19 nt, Artificial Sequence
  Description of Artificial Sequence: Synthetic oligonucleotide
cuuauuugcauugccugaa

SEQ ID NO: 372220 - RNA, 19 nt, Artificial Sequence
  Description of Artificial Sequence: Synthetic oligonucleotide
accccaaacagaauucgga

SEQ ID NO: 372221 - RNA, 19 nt, Artificial Sequence
  Description of Artificial Sequence: Synthetic oligonucleotide
ggcuuugacaggaauccag

SEQ ID NO: 372222 - RNA, 19 nt, Artificial Sequence
  Description of Artificial Sequence: Synthetic oligonucleotide
ugguuagccuggccccagg

SEQ ID NO: 372223 - RNA, 19 nt, Artificial Sequence
  Description of Artificial Sequence: Synthetic oligonucleotide
gggacaguuacuggacucg

SEQ ID NO: 372224 - RNA, 19 nt, Artificial Sequence
  Description of Artificial Sequence: Synthetic oligonucleotide
gaaccaugccugagaaccc

SEQ ID NO: 372225 - RNA, 19 nt, Artificial Sequence
  Description of Artificial Sequence: Synthetic oligonucleotide
uggcguuuuccuuguugug

SEQ ID NO: 372226 - RNA, 19 nt, Artificial Sequence
  Description of Artificial Sequence: Synthetic oligonucleotide
uccuacacugcugcacuca

SEQ ID NO: 372227 - RNA, 19 nt, Artificial Sequence
  Description of Artificial Sequence: Synthetic oligonucleotide
uuucaagguucacgccgac

SEQ ID NO: 372228 - RNA, 19 nt, Artificial Sequence
  Description of Artificial Sequence: Synthetic oligonucleotide
aucuuaugcagaaguugug

SEQ ID NO: 372229 - RNA, 19 nt, Artificial Sequence
  Description of Artificial Sequence: Synthetic oligonucleotide
uugaaucuacagucaccuc

SEQ ID NO: 372230 - RNA, 19 nt, Artificial Sequence
  Description of Artificial Sequence: Synthetic oligonucleotide
acgugcuuggcaguggacu

SEQ ID NO: 372231 - RNA, 19 nt, Artificial Sequence
  Description of Artificial Sequence: Synthetic oligonucleotide
agggguaaaagcauacguu

SEQ ID NO: 372232 - RNA, 19 nt, Artificial Sequence
  Description of Artificial Sequence: Synthetic oligonucleotide
ugccauauguggucauuua

SEQ ID NO: 372233 - RNA, 19 nt, Artificial Sequence
  Description of Artificial Sequence: Synthetic oligonucleotide
caaugccuuauucaggcua

SEQ ID NO: 372234 - RNA, 19 nt, Artificial Sequence
  Description of Artificial Sequence: Synthetic oligonucleotide
caccccuaaauccaacaca

SEQ ID NO: 372235 - RNA, 19 nt, Artificial Sequence
  Description of Artificial Sequence: Synthetic oligonucleotide
agggcauuucacaauucca

SEQ ID NO: 372236 - RNA, 19 nt, Artificial Sequence
  Description of Artificial Sequence: Synthetic oligonucleotide
agcuguggucuaauuaucu

SEQ ID NO: 372237 - RNA, 19 nt, Artificial Sequence
  Description of Artificial Sequence: Synthetic oligonucleotide
agaccgcuguaaucaaccu

SEQ ID NO: 372238 - RNA, 19 nt, Artificial Sequence
  Description of Artificial Sequence: Synthetic oligonucleotide
gauuauuuguuaagguuuu

SEQ ID NO: 372239 - RNA, 19 nt, Artificial Sequence
  Description of Artificial Sequence: Synthetic oligonucleotide
ccacccauuccccauuugg

SEQ ID NO: 372240 - RNA, 19 nt, Artificial Sequence
  Description of Artificial Sequence: Synthetic oligonucleotide
uccggaguuucuguaacua

SEQ ID NO: 372241 - RNA, 19 nt, Artificial Sequence
  Description of Artificial Sequence: Synthetic oligonucleotide
uucaagguucacgccgaca

SEQ ID NO: 372242 - RNA, 19 nt, Artificial Sequence
  Description of Artificial Sequence: Synthetic oligonucleotide
gguagucaaccuugcgaag

SEQ ID NO: 372243 - RNA, 19 nt, Artificial Sequence
  Description of Artificial Sequence: Synthetic oligonucleotide
uuccaccuacggauuggca

SEQ ID NO: 372244 - RNA, 19 nt, Artificial Sequence
  Description of Artificial Sequence: Synthetic oligonucleotide
guuucaagguucacgccga

SEQ ID NO: 372245 - RNA, 19 nt, Artificial Sequence
  Description of Artificial Sequence: Synthetic oligonucleotide
agaccauuguuuaacugua

SEQ ID NO: 372246 - RNA, 19 nt, Artificial Sequence
  Description of Artificial Sequence: Synthetic oligonucleotide
ugcgaaggcucaguaucug

SEQ ID NO: 372247 - RNA, 19 nt, Artificial Sequence
  Description of Artificial Sequence: Synthetic oligonucleotide
uccuucguuacggccuugc

SEQ ID NO: 372248 - RNA, 19 nt, Artificial Sequence
  Description of Artificial Sequence: Synthetic oligonucleotide
cacacaauaugcugucaaa

SEQ ID NO: 372249 - RNA, 19 nt, Artificial Sequence
  Description of Artificial Sequence: Synthetic oligonucleotide
cauugccugaacucuuaga

SEQ ID NO: 372250 - RNA, 19 nt, Artificial Sequence
  Description of Artificial Sequence: Synthetic oligonucleotide
gcuguaaucaaccucuuuu

SEQ ID NO: 372251 - RNA, 19 nt, Artificial Sequence
  Description of Artificial Sequence: Synthetic oligonucleotide
ccacauagaugauccaaac

SEQ ID NO: 372252 - RNA, 19 nt, Artificial Sequence
  Description of Artificial Sequence: Synthetic oligonucleotide
ugucgcccgaccugacacc

SEQ ID NO: 372253 - RNA, 19 nt, Artificial Sequence
  Description of Artificial Sequence: Synthetic oligonucleotide
aggugugagauuauuuguu

SEQ ID NO: 372254 - RNA, 19 nt, Artificial Sequence
  Description of Artificial Sequence: Synthetic oligonucleotide
ccucauacuaacacuaaaa

SEQ ID NO: 372255 - RNA, 19 nt, Artificial Sequence
  Description of Artificial Sequence: Synthetic oligonucleotide
cauacguuaagggaaguau

SEQ ID NO: 372256 - RNA, 19 nt, Artificial Sequence
  Description of Artificial Sequence: Synthetic oligonucleotide
gacgcugaauggcuguucu

SEQ ID NO: 372257 - RNA, 19 nt, Artificial Sequence
  Description of Artificial Sequence: Synthetic oligonucleotide
aaccuugcgaaggcucagu

SEQ ID NO: 372258 - RNA, 19 nt, Artificial Sequence
  Description of Artificial Sequence: Synthetic oligonucleotide
gcagaucagaacccagaug

SEQ ID NO: 372259 - RNA, 19 nt, Artificial Sequence
  Description of Artificial Sequence: Synthetic oligonucleotide
ggugugagauuauuuguua

SEQ ID NO: 372260 - RNA, 19 nt, Artificial Sequence
  Description of Artificial Sequence: Synthetic oligonucleotide
aauucggaggugaggggua

SEQ ID NO: 372261 - RNA, 19 nt, Artificial Sequence
  Description of Artificial Sequence: Synthetic oligonucleotide
gucuucguucacuucuuaa

SEQ ID NO: 372262 - RNA, 19 nt, Artificial Sequence
  Description of Artificial Sequence: Synthetic oligonucleotide
ugucuucguucacuucuua

SEQ ID NO: 372263 - RNA, 19 nt, Artificial Sequence
  Description of Artificial Sequence: Synthetic oligonucleotide
gucaaccuugcgaaggcuc

SEQ ID NO: 372264 - RNA, 19 nt, Artificial Sequence
  Description of Artificial Sequence: Synthetic oligonucleotide
aggccuuaauguggaacag

SEQ ID NO: 372265 - RNA, 19 nt, Artificial Sequence
  Description of Artificial Sequence: Synthetic oligonucleotide
acaccacuaggcauugcug

SEQ ID NO: 372266 - RNA, 19 nt, Artificial Sequence
  Description of Artificial Sequence: Synthetic oligonucleotide
gucgcccgaccugacaccg

SEQ ID NO: 372267 - RNA, 19 nt, Artificial Sequence
  Description of Artificial Sequence: Synthetic oligonucleotide
uuccgcugucgcccgaccu

SEQ ID NO: 372268 - RNA, 19 nt, Artificial Sequence
  Description of Artificial Sequence: Synthetic oligonucleotide
gaaucuacagucaccucau

SEQ ID NO: 372269 - RNA, 19 nt, Artificial Sequence
  Description of Artificial Sequence: Synthetic oligonucleotide
gaacucuuagaccgcugua

SEQ ID NO: 372270 - RNA, 19 nt, Artificial Sequence
  Description of Artificial Sequence: Synthetic oligonucleotide
aucccuaagggaaacucua

SEQ ID NO: 372271 - RNA, 19 nt, Artificial Sequence
  Description of Artificial Sequence: Synthetic oligonucleotide
uacgugcuuggcaguggac

SEQ ID NO: 372272 - RNA, 19 nt, Artificial Sequence
  Description of Artificial Sequence: Synthetic oligonucleotide
aagucaaagcaaggccuua

SEQ ID NO: 372273 - RNA, 19 nt, Artificial Sequence
  Description of Artificial Sequence: Synthetic oligonucleotide
auacaccacuaggcauugc

SEQ ID NO: 372274 - RNA, 19 nt, Artificial Sequence
  Description of Artificial Sequence: Synthetic oligonucleotide
acuuccgcugucgcccgac

SEQ ID NO: 372275 - RNA, 19 nt, Artificial Sequence
  Description of Artificial Sequence: Synthetic oligonucleotide
uuacggccuugccggcggg

SEQ ID NO: 372276 - RNA, 19 nt, Artificial Sequence
  Description of Artificial Sequence: Synthetic oligonucleotide
acggauuggcaaauucaca

SEQ ID NO: 372277 - RNA, 19 nt, Artificial Sequence
  Description of Artificial Sequence: Synthetic oligonucleotide
gguuccaccuacggauugg

SEQ ID NO: 372278 - RNA, 19 nt, Artificial Sequence
  Description of Artificial Sequence: Synthetic oligonucleotide
ucggaggugagggguaaaa

SEQ ID NO: 372279 - RNA, 19 nt, Artificial Sequence
  Description of Artificial Sequence: Synthetic oligonucleotide
ggcaccggagccuaagcuc

SEQ ID NO: 372280 - RNA, 19 nt, Artificial Sequence
  Description of Artificial Sequence: Synthetic oligonucleotide
cuuagaccgcuguaaucaa

SEQ ID NO: 372281 - RNA, 19 nt, Artificial Sequence
  Description of Artificial Sequence: Synthetic oligonucleotide
ccuacggauuggcaaauuc

SEQ ID NO: 372282 - RNA, 19 nt, Artificial Sequence
  Description of Artificial Sequence: Synthetic oligonucleotide
ugacaccggagccgaggcu

SEQ ID NO: 372283 - RNA, 19 nt, Artificial Sequence
  Description of Artificial Sequence: Synthetic oligonucleotide
caguuacuggacucgaagu

SEQ ID NO: 372284 - RNA, 19 nt, Artificial Sequence
  Description of Artificial Sequence: Synthetic oligonucleotide
ccguuaaacaaaccucuuc

SEQ ID NO: 372285 - RNA, 19 nt, Artificial Sequence
  Description of Artificial Sequence: Synthetic oligonucleotide
ugugccauauguggucauu

SEQ ID NO: 372286 - RNA, 19 nt, Artificial Sequence
  Description of Artificial Sequence: Synthetic oligonucleotide
gaacccagauggcugacuu

SEQ ID NO: 372287 - RNA, 19 nt, Artificial Sequence
  Description of Artificial Sequence: Synthetic oligonucleotide
gguccuuguggcguuuucc

SEQ ID NO: 372288 - RNA, 19 nt, Artificial Sequence
  Description of Artificial Sequence: Synthetic oligonucleotide
cuacgugcuuggcagugga

SEQ ID NO: 372289 - RNA, 19 nt, Artificial Sequence
  Description of Artificial Sequence: Synthetic oligonucleotide
gcauugccugaacucuuag

SEQ ID NO: 372290 - RNA, 19 nt, Artificial Sequence
  Description of Artificial Sequence: Synthetic oligonucleotide
ugguccuuguggcguuuuc

SEQ ID NO: 372291 - RNA, 19 nt, Artificial Sequence
  Description of Artificial Sequence: Synthetic oligonucleotide
gcccaaauaagucuucagu

SEQ ID NO: 372292 - RNA, 19 nt, Artificial Sequence
  Description of Artificial Sequence: Synthetic oligonucleotide
caguacaguaugccguuaa

SEQ ID NO: 372293 - RNA, 19 nt, Artificial Sequence
  Description of Artificial Sequence: Synthetic oligonucleotide
agucaaccuugcgaaggcu

SEQ ID NO: 372294 - RNA, 19 nt, Artificial Sequence
  Description of Artificial Sequence: Synthetic oligonucleotide
accuugcgaaggcucagua

SEQ ID NO: 372295 - RNA, 19 nt, Artificial Sequence
  Description of Artificial Sequence: Synthetic oligonucleotide
ccuaaucauccaaccuccc

SEQ ID NO: 372296 - RNA, 19 nt, Artificial Sequence
  Description of Artificial Sequence: Synthetic oligonucleotide
ccauagugcaacagggaca

SEQ ID NO: 372297 - RNA, 19 nt, Artificial Sequence
  Description of Artificial Sequence: Synthetic oligonucleotide
cugauuagaggaggcuuga

SEQ ID NO: 372298 - RNA, 19 nt, Artificial Sequence
  Description of Artificial Sequence: Synthetic oligonucleotide
gcaccggagccuaagcucc

SEQ ID NO: 372299 - RNA, 19 nt, Artificial Sequence
  Description of Artificial Sequence: Synthetic oligonucleotide
caaccuugcgaaggcucag

SEQ ID NO: 372300 - RNA, 19 nt, Artificial Sequence
  Description of Artificial Sequence: Synthetic oligonucleotide
uccuuaggguggggcacag

SEQ ID NO: 372301 - RNA, 19 nt, Artificial Sequence
  Description of Artificial Sequence: Synthetic oligonucleotide
ucgcccgaccugacaccgg

SEQ ID NO: 372302 - RNA, 19 nt, Artificial Sequence
  Description of Artificial Sequence: Synthetic oligonucleotide
ggaccugaagacuuuucua

SEQ ID NO: 372303 - RNA, 19 nt, Artificial Sequence
  Description of Artificial Sequence: Synthetic oligonucleotide
cacaucugucuucguucac

SEQ ID NO: 372304 - RNA, 19 nt, Artificial Sequence
  Description of Artificial Sequence: Synthetic oligonucleotide
guaaucuuaugcagaaguu

SEQ ID NO: 372305 - RNA, 19 nt, Artificial Sequence
  Description of Artificial Sequence: Synthetic oligonucleotide
acgccgacacuaauagcug

SEQ ID NO: 372306 - RNA, 19 nt, Artificial Sequence
  Description of Artificial Sequence: Synthetic oligonucleotide
ucguuacggccuugccggc

SEQ ID NO: 372307 - RNA, 19 nt, Artificial Sequence
  Description of Artificial Sequence: Synthetic oligonucleotide
gcuccggaguuucuguaac

SEQ ID NO: 372308 - RNA, 19 nt, Artificial Sequence
  Description of Artificial Sequence: Synthetic oligonucleotide
guucacgccgacacuaaua

SEQ ID NO: 372309 - RNA, 19 nt, Artificial Sequence
  Description of Artificial Sequence: Synthetic oligonucleotide
agcauacguuaagggaagu

SEQ ID NO: 372310 - RNA, 19 nt, Artificial Sequence
  Description of Artificial Sequence: Synthetic oligonucleotide
gguggauccaaguuugguu

SEQ ID NO: 372311 - RNA, 19 nt, Artificial Sequence
  Description of Artificial Sequence: Synthetic oligonucleotide
ccguuacaccugauuagag

SEQ ID NO: 372312 - RNA, 19 nt, Artificial Sequence
  Description of Artificial Sequence: Synthetic oligonucleotide
gggaccugaagacuuuucu

SEQ ID NO: 372313 - RNA, 19 nt, Artificial Sequence
  Description of Artificial Sequence: Synthetic oligonucleotide
ugguuagcuguggucuaau

SEQ ID NO: 372314 - RNA, 19 nt, Artificial Sequence
  Description of Artificial Sequence: Synthetic oligonucleotide
cccuaaauaagauguagau

SEQ ID NO: 372315 - RNA, 19 nt, Artificial Sequence
  Description of Artificial Sequence: Synthetic oligonucleotide
cuuccgcugucgcccgacc

SEQ ID NO: 372316 - RNA, 19 nt, Artificial Sequence
  Description of Artificial Sequence: Synthetic oligonucleotide
uggcuguacuucugauuuu

SEQ ID NO: 372317 - RNA, 19 nt, Artificial Sequence
  Description of Artificial Sequence: Synthetic oligonucleotide
gcaguuccguuacaccuga

SEQ ID NO: 372318 - RNA, 19 nt, Artificial Sequence
  Description of Artificial Sequence: Synthetic oligonucleotide
caccggagccuaagcuccc

SEQ ID NO: 372319 - RNA, 19 nt, Artificial Sequence
  Description of Artificial Sequence: Synthetic oligonucleotide
ccgaccugacaccggagcc

SEQ ID NO: 372320 - RNA, 19 nt, Artificial Sequence
  Description of Artificial Sequence: Synthetic oligonucleotide
cacccagacaguguauuaa

SEQ ID NO: 372321 - RNA, 19 nt, Artificial Sequence
  Description of Artificial Sequence: Synthetic oligonucleotide
cacuuaacucuucaucuuu

SEQ ID NO: 372322 - RNA, 19 nt, Artificial Sequence
  Description of Artificial Sequence: Synthetic oligonucleotide
cuuguggcguuuuccuugu

SEQ ID NO: 372323 - RNA, 19 nt, Artificial Sequence
  Description of Artificial Sequence: Synthetic oligonucleotide
augugccauauguggucau

SEQ ID NO: 372324 - RNA, 19 nt, Artificial Sequence
  Description of Artificial Sequence: Synthetic oligonucleotide
cuuguacuggagcuguuuu

SEQ ID NO: 372325 - RNA, 19 nt, Artificial Sequence
  Description of Artificial Sequence: Synthetic oligonucleotide
cuguugauccaggaaucaa

SEQ ID NO: 372326 - RNA, 19 nt, Artificial Sequence
  Description of Artificial Sequence: Synthetic oligonucleotide
gucaaagcaaggccuuaau

SEQ ID NO: 372327 - RNA, 19 nt, Artificial Sequence
  Description of Artificial Sequence: Synthetic oligonucleotide
ggcauuucacaauuccaau

SEQ ID NO: 372328 - RNA, 19 nt, Artificial Sequence
  Description of Artificial Sequence: Synthetic oligonucleotide
cccgaccugacaccggagc

SEQ ID NO: 372329 - RNA, 19 nt, Artificial Sequence
  Description of Artificial Sequence: Synthetic oligonucleotide
ccacaugaaauccacaauu

SEQ ID NO: 372330 - RNA, 19 nt, Artificial Sequence
  Description of Artificial Sequence: Synthetic oligonucleotide
auaugcugucaaagaacuu

SEQ ID NO: 372331 - RNA, 19 nt, Artificial Sequence
  Description of Artificial Sequence: Synthetic oligonucleotide
gugguuagccuggccccag

SEQ ID NO: 372332 - RNA, 19 nt, Artificial Sequence
  Description of Artificial Sequence: Synthetic oligonucleotide
gccgucgccagaccuggcc

SEQ ID NO: 372333 - RNA, 19 nt, Artificial Sequence
  Description of Artificial Sequence: Synthetic oligonucleotide
cacuaauagcuguaaucuu

SEQ ID NO: 372334 - RNA, 19 nt, Artificial Sequence
  Description of Artificial Sequence: Synthetic oligonucleotide
guggcucaaggugugagau

SEQ ID NO: 372335 - RNA, 19 nt, Artificial Sequence
  Description of Artificial Sequence: Synthetic oligonucleotide
gccgaaccaugccugagaa

SEQ ID NO: 372336 - RNA, 19 nt, Artificial Sequence
  Description of Artificial Sequence: Synthetic oligonucleotide
ccuucguuacggccuugcc

SEQ ID NO: 372337 - RNA, 19 nt, Artificial Sequence
  Description of Artificial Sequence: Synthetic oligonucleotide
caaaggcgaucuaucuggu

SEQ ID NO: 372338 - RNA, 19 nt, Artificial Sequence
  Description of Artificial Sequence: Synthetic oligonucleotide
gguuagccuggccccagga

SEQ ID NO: 372339 - RNA, 19 nt, Artificial Sequence
  Description of Artificial Sequence: Synthetic oligonucleotide
ggugagggguaaaagcaua

SEQ ID NO: 372340 - RNA, 19 nt, Artificial Sequence
  Description of Artificial Sequence: Synthetic oligonucleotide
gauccaaguuugguugaau

SEQ ID NO: 372341 - RNA, 19 nt, Artificial Sequence
  Description of Artificial Sequence: Synthetic oligonucleotide
agggaaguauguggcucaa

SEQ ID NO: 372342 - RNA, 19 nt, Artificial Sequence
  Description of Artificial Sequence: Synthetic oligonucleotide
gucgcccgaccuggcaccg

SEQ ID NO: 372343 - RNA, 19 nt, Artificial Sequence
  Description of Artificial Sequence: Synthetic oligonucleotide
auccaggaaucaagacgcu

SEQ ID NO: 372344 - RNA, 19 nt, Artificial Sequence
  Description of Artificial Sequence: Synthetic oligonucleotide
ccaccuacggauuggcaaa

SEQ ID NO: 372345 - RNA, 19 nt, Artificial Sequence
  Description of Artificial Sequence: Synthetic oligonucleotide
ucgccagaccuggccccgg

SEQ ID NO: 372346 - RNA, 19 nt, Artificial Sequence
  Description of Artificial Sequence: Synthetic oligonucleotide
ggcucaguaucugaacaua

SEQ ID NO: 372347 - RNA, 19 nt, Artificial Sequence
  Description of Artificial Sequence: Synthetic oligonucleotide
ccgucgccagaccuggccc

SEQ ID NO: 372348 - RNA, 19 nt, Artificial Sequence
  Description of Artificial Sequence: Synthetic oligonucleotide
cuugccggcggggcccgag

SEQ ID NO: 372349 - RNA, 19 nt, Artificial Sequence
  Description of Artificial Sequence: Synthetic oligonucleotide
agguucacgccgacacuaa

SEQ ID NO: 372350 - RNA, 19 nt, Artificial Sequence
  Description of Artificial Sequence: Synthetic oligonucleotide
ucccgccgucgcccgaccu

SEQ ID NO: 372351 - RNA, 19 nt, Artificial Sequence
  Description of Artificial Sequence: Synthetic oligonucleotide
cgaccugacaccggagccg

SEQ ID NO: 372352 - RNA, 19 nt, Artificial Sequence
  Description of Artificial Sequence: Synthetic oligonucleotide
cccgaccuggcaccggagc

SEQ ID NO: 372353 - RNA, 19 nt, Artificial Sequence
  Description of Artificial Sequence: Synthetic oligonucleotide
ccggagcccagacuuccgc

SEQ ID NO: 372354 - RNA, 19 nt, Artificial Sequence
  Description of Artificial Sequence: Synthetic oligonucleotide
cuccggaguuucuguaacu

SEQ ID NO: 372355 - RNA, 19 nt, Artificial Sequence
  Description of Artificial Sequence: Synthetic oligonucleotide
gcauacguuaagggaagua

SEQ ID NO: 372356 - RNA, 19 nt, Artificial Sequence
  Description of Artificial Sequence: Synthetic oligonucleotide
ccacaauuaagugcagcaa

SEQ ID NO: 372357 - RNA, 19 nt, Artificial Sequence
  Description of Artificial Sequence: Synthetic oligonucleotide
gcuguggucuaauuaucuu

SEQ ID NO: 372358 - RNA, 19 nt, Artificial Sequence
  Description of Artificial Sequence: Synthetic oligonucleotide
uuguggcguuuuccuuguu

SEQ ID NO: 372359 - RNA, 19 nt, Artificial Sequence
  Description of Artificial Sequence: Synthetic oligonucleotide
ucgcccgaccuggcaccgg

SEQ ID NO: 372360 - RNA, 19 nt, Artificial Sequence
  Description of Artificial Sequence: Synthetic oligonucleotide
auagccccacauagaugau

SEQ ID NO: 372361 - RNA, 19 nt, Artificial Sequence
  Description of Artificial Sequence: Synthetic oligonucleotide
cucaaggugugagauuauu

SEQ ID NO: 372362 - RNA, 19 nt, Artificial Sequence
  Description of Artificial Sequence: Synthetic oligonucleotide
accuacggauuggcaaauu

SEQ ID NO: 372363 - RNA, 19 nt, Artificial Sequence
  Description of Artificial Sequence: Synthetic oligonucleotide
ccggaguuucuguaacuaa

SEQ ID NO: 372364 - RNA, 19 nt, Artificial Sequence
  Description of Artificial Sequence: Synthetic oligonucleotide
gugccauauguggucauuu

SEQ ID NO: 372365 - RNA, 19 nt, Artificial Sequence
  Description of Artificial Sequence: Synthetic oligonucleotide
gacuuccgcugucgcccga

SEQ ID NO: 372366 - RNA, 19 nt, Artificial Sequence
  Description of Artificial Sequence: Synthetic oligonucleotide
gcugucgcccgaccugaca

SEQ ID NO: 372367 - RNA, 19 nt, Artificial Sequence
  Description of Artificial Sequence: Synthetic oligonucleotide
cccggagcccagacuuccg

SEQ ID NO: 372368 - RNA, 19 nt, Artificial Sequence
  Description of Artificial Sequence: Synthetic oligonucleotide
caccugauuagaggaggcu

SEQ ID NO: 372369 - RNA, 19 nt, Artificial Sequence
  Description of Artificial Sequence: Synthetic oligonucleotide
ccgucgcccgaccuggcac

SEQ ID NO: 372370 - RNA, 19 nt, Artificial Sequence
  Description of Artificial Sequence: Synthetic oligonucleotide
auccuucguuacggccuug

SEQ ID NO: 372371 - RNA, 19 nt, Artificial Sequence
  Description of Artificial Sequence: Synthetic oligonucleotide
cagguuaauuaaggucacu

SEQ ID NO: 372372 - RNA, 19 nt, Artificial Sequence
  Description of Artificial Sequence: Synthetic oligonucleotide
auggugcaauggacagccu

SEQ ID NO: 372373 - RNA, 19 nt, Artificial Sequence
  Description of Artificial Sequence: Synthetic oligonucleotide
cauccuucguuacggccuu

SEQ ID NO: 372374 - RNA, 19 nt, Artificial Sequence
  Description of Artificial Sequence: Synthetic oligonucleotide
gcgaucuaucugguuccac

SEQ ID NO: 372375 - RNA, 19 nt, Artificial Sequence
  Description of Artificial Sequence: Synthetic oligonucleotide
cguuacggccuugccggcg

SEQ ID NO: 372376 - RNA, 19 nt, Artificial Sequence
  Description of Artificial Sequence: Synthetic oligonucleotide
ggcgaucuaucugguucca

SEQ ID NO: 372377 - RNA, 19 nt, Artificial Sequence
  Description of Artificial Sequence: Synthetic oligonucleotide
gguucacgccgacacuaau

SEQ ID NO: 372378 - RNA, 19 nt, Artificial Sequence
  Description of Artificial Sequence: Synthetic oligonucleotide
ccuuaggguggggcacagg

SEQ ID NO: 372379 - RNA, 19 nt, Artificial Sequence
  Description of Artificial Sequence: Synthetic oligonucleotide
ccucgaggucccgccgucg

SEQ ID NO: 372380 - RNA, 19 nt, Artificial Sequence
  Description of Artificial Sequence: Synthetic oligonucleotide
gucgcccggccucgagguc

SEQ ID NO: 372381 - RNA, 19 nt, Artificial Sequence
  Description of Artificial Sequence: Synthetic oligonucleotide
cccuaagggaaacucuaau

SEQ ID NO: 372382 - RNA, 19 nt, Artificial Sequence
  Description of Artificial Sequence: Synthetic oligonucleotide
ccuugcgaaggcucaguau

SEQ ID NO: 372383 - RNA, 19 nt, Artificial Sequence
  Description of Artificial Sequence: Synthetic oligonucleotide
cccuacaccucccuggcuu

SEQ ID NO: 372384 - RNA, 19 nt, Artificial Sequence
  Description of Artificial Sequence: Synthetic oligonucleotide
gccgucgcccgaccuggca

SEQ ID NO: 372385 - RNA, 19 nt, Artificial Sequence
  Description of Artificial Sequence: Synthetic oligonucleotide
caccuacggauuggcaaau

SEQ ID NO: 372386 - RNA, 19 nt, Artificial Sequence
  Description of Artificial Sequence: Synthetic oligonucleotide
ccccuaaauccaacacaua

SEQ ID NO: 372387 - RNA, 19 nt, Artificial Sequence
  Description of Artificial Sequence: Synthetic oligonucleotide
gcccgaccugacaccggag

SEQ ID NO: 372388 - RNA, 19 nt, Artificial Sequence
  Description of Artificial Sequence: Synthetic oligonucleotide
gccguuaaacaaaccucuu

SEQ ID NO: 372389 - RNA, 19 nt, Artificial Sequence
  Description of Artificial Sequence: Synthetic oligonucleotide
cauuccccauuugguggau

SEQ ID NO: 372390 - RNA, 19 nt, Artificial Sequence
  Description of Artificial Sequence: Synthetic oligonucleotide
cgcccgaccugacaccgga

SEQ ID NO: 372391 - RNA, 19 nt, Artificial Sequence
  Description of Artificial Sequence: Synthetic oligonucleotide
ggaauccagucgaguuggu

SEQ ID NO: 372392 - RNA, 19 nt, Artificial Sequence
  Description of Artificial Sequence: Synthetic oligonucleotide
ccagucgaguugguuucaa

SEQ ID NO: 372393 - RNA, 19 nt, Artificial Sequence
  Description of Artificial Sequence: Synthetic oligonucleotide
ccgcugucgcccgaccuga

SEQ ID NO: 372394 - RNA, 19 nt, Artificial Sequence
  Description of Artificial Sequence: Synthetic oligonucleotide
caguuccguuacaccugau

SEQ ID NO: 372395 - RNA, 19 nt, Artificial Sequence
  Description of Artificial Sequence: Synthetic oligonucleotide
cgccgacacuaauagcugu

SEQ ID NO: 372396 - RNA, 19 nt, Artificial Sequence
  Description of Artificial Sequence: Synthetic oligonucleotide
ccaguacaguaugccguua

SEQ ID NO: 372397 - RNA, 19 nt, Artificial Sequence
  Description of Artificial Sequence: Synthetic oligonucleotide
gcucaaggugugagauuau

SEQ ID NO: 372398 - RNA, 19 nt, Artificial Sequence
  Description of Artificial Sequence: Synthetic oligonucleotide
cgccgucgccagaccuggc

SEQ ID NO: 372399 - RNA, 19 nt, Artificial Sequence
  Description of Artificial Sequence: Synthetic oligonucleotide
ccgcuguaaucaaccucuu

SEQ ID NO: 372400 - RNA, 19 nt, Artificial Sequence
  Description of Artificial Sequence: Synthetic oligonucleotide
aauacaauguacacgacag

SEQ ID NO: 372401 - RNA, 19 nt, Artificial Sequence
  Description of Artificial Sequence: Synthetic oligonucleotide
ucaauuggaaauuuccuag

SEQ ID NO: 372402 - RNA, 19 nt, Artificial Sequence
  Description of Artificial Sequence: Synthetic oligonucleotide
uuugcuacuuccauugagg

SEQ ID NO: 372403 - RNA, 19 nt, Artificial Sequence
  Description of Artificial Sequence: Synthetic oligonucleotide
ugaccgauaguaaugauca

SEQ ID NO: 372404 - RNA, 19 nt, Artificial Sequence
  Description of Artificial Sequence: Synthetic oligonucleotide
auacacaauggacugaccg

SEQ ID NO: 372405 - RNA, 19 nt, Artificial Sequence
  Description of Artificial Sequence: Synthetic oligonucleotide
auuuccuagcacuuuacac

SEQ ID NO: 372406 - RNA, 19 nt, Artificial Sequence
  Description of Artificial Sequence: Synthetic oligonucleotide
uagguaguaacacaggcca

SEQ ID NO: 372407 - RNA, 19 nt, Artificial Sequence
  Description of Artificial Sequence: Synthetic oligonucleotide
aaguaggacaauuaagcca

SEQ ID NO: 372408 - RNA, 19 nt, Artificial Sequence
  Description of Artificial Sequence: Synthetic oligonucleotide
aagcaugagaaccaugcag

SEQ ID NO: 372409 - RNA, 19 nt, Artificial Sequence
  Description of Artificial Sequence: Synthetic oligonucleotide
agcagguugccacugaagc

SEQ ID NO: 372410 - RNA, 19 nt, Artificial Sequence
  Description of Artificial Sequence: Synthetic oligonucleotide
gauagguaguaacacaggc

SEQ ID NO: 372411 - RNA, 19 nt, Artificial Sequence
  Description of Artificial Sequence: Synthetic oligonucleotide
guuagggagauucuggcgg

SEQ ID NO: 372412 - RNA, 19 nt, Artificial Sequence
  Description of Artificial Sequence: Synthetic oligonucleotide
auuaacugucccuugacug

SEQ ID NO: 372413 - RNA, 19 nt, Artificial Sequence
  Description of Artificial Sequence: Synthetic oligonucleotide
aaaccacagccuuguaucc

SEQ ID NO: 372414 - RNA, 19 nt, Artificial Sequence
  Description of Artificial Sequence: Synthetic oligonucleotide
agugcaaggguuuaaauaa

SEQ ID NO: 372415 - RNA, 19 nt, Artificial Sequence
  Description of Artificial Sequence: Synthetic oligonucleotide
gagucccuaagauaggugg

SEQ ID NO: 372416 - RNA, 19 nt, Artificial Sequence
  Description of Artificial Sequence: Synthetic oligonucleotide
acaaucgguuaccacaccc

SEQ ID NO: 372417 - RNA, 19 nt, Artificial Sequence
  Description of Artificial Sequence: Synthetic oligonucleotide
uaacgagccgacuugauug

SEQ ID NO: 372418 - RNA, 19 nt, Artificial Sequence
  Description of Artificial Sequence: Synthetic oligonucleotide
gauuggaagguccacucgg

SEQ ID NO: 372419 - RNA, 19 nt, Artificial Sequence
  Description of Artificial Sequence: Synthetic oligonucleotide
cuuggcaccagcuaagagc

SEQ ID NO: 372420 - RNA, 19 nt, Artificial Sequence
  Description of Artificial Sequence: Synthetic oligonucleotide
auaagcacgggcugggccc

SEQ ID NO: 372421 - RNA, 19 nt, Artificial Sequence
  Description of Artificial Sequence: Synthetic oligonucleotide
agccaaaugauuccggagg

SEQ ID NO: 372422 - RNA, 19 nt, Artificial Sequence
  Description of Artificial Sequence: Synthetic oligonucleotide
uuccauugaggugagaagg

SEQ ID NO: 372423 - RNA, 19 nt, Artificial Sequence
  Description of Artificial Sequence: Synthetic oligonucleotide
aguaggacaauuaagccag

SEQ ID NO: 372424 - RNA, 19 nt, Artificial Sequence
  Description of Artificial Sequence: Synthetic oligonucleotide
agcaacaaagagcugaaug

SEQ ID NO: 372425 - RNA, 19 nt, Artificial Sequence
  Description of Artificial Sequence: Synthetic oligonucleotide
gaaccggaaacuucaaucc

SEQ ID NO: 372426 - RNA, 19 nt, Artificial Sequence
  Description of Artificial Sequence: Synthetic oligonucleotide
caggaaaucugccaggacg

SEQ ID NO: 372427 - RNA, 19 nt, Artificial Sequence
  Description of Artificial Sequence: Synthetic oligonucleotide
aagaucucgaaguacuggu

SEQ ID NO: 372428 - RNA, 19 nt, Artificial Sequence
  Description of Artificial Sequence: Synthetic oligonucleotide
uacuaggcccaguugaugg

SEQ ID NO: 372429 - RNA, 19 nt, Artificial Sequence
  Description of Artificial Sequence: Synthetic oligonucleotide
ugagcugacaauuucuacu

SEQ ID NO: 372430 - RNA, 19 nt, Artificial Sequence
  Description of Artificial Sequence: Synthetic oligonucleotide
gagauagguaguaacacag

SEQ ID NO: 372431 - RNA, 19 nt, Artificial Sequence
  Description of Artificial Sequence: Synthetic oligonucleotide
ucuagugggaaccugggaa

SEQ ID NO: 372432 - RNA, 19 nt, Artificial Sequence
  Description of Artificial Sequence: Synthetic oligonucleotide
aauagcacccaggaaaucu

SEQ ID NO: 372433 - RNA, 19 nt, Artificial Sequence
  Description of Artificial Sequence: Synthetic oligonucleotide
aaucgguuaccacacccuc

SEQ ID NO: 372434 - RNA, 19 nt, Artificial Sequence
  Description of Artificial Sequence: Synthetic oligonucleotide
uuccggaggagauagguag

SEQ ID NO: 372435 - RNA, 19 nt, Artificial Sequence
  Description of Artificial Sequence: Synthetic oligonucleotide
ucauguaccauggaggucu

SEQ ID NO: 372436 - RNA, 19 nt, Artificial Sequence
  Description of Artificial Sequence: Synthetic oligonucleotide
aaaauuacauuggauacuu

SEQ ID NO: 372437 - RNA, 19 nt, Artificial Sequence
  Description of Artificial Sequence: Synthetic oligonucleotide
uuaacugucccuugacugc

SEQ ID NO: 372438 - RNA, 19 nt, Artificial Sequence
  Description of Artificial Sequence: Synthetic oligonucleotide
agcaagggucccuaggagc

SEQ ID NO: 372439 - RNA, 19 nt, Artificial Sequence
  Description of Artificial Sequence: Synthetic oligonucleotide
gaucucgaaguacugguag

SEQ ID NO: 372440 - RNA, 19 nt, Artificial Sequence
  Description of Artificial Sequence: Synthetic oligonucleotide
auagguaguaacacaggcc

SEQ ID NO: 372441 - RNA, 19 nt, Artificial Sequence
  Description of Artificial Sequence: Synthetic oligonucleotide
uuaucuuggcaccagcuaa

SEQ ID NO: 372442 - RNA, 19 nt, Artificial Sequence
  Description of Artificial Sequence: Synthetic oligonucleotide
ugacauagagguuggacac

SEQ ID NO: 372443 - RNA, 19 nt, Artificial Sequence
  Description of Artificial Sequence: Synthetic oligonucleotide
  modified_base (3)..(3): a, c, u, g, unknown or other
acngugguggggcugaaag

SEQ ID NO: 372444 - RNA, 19 nt, Artificial Sequence
  Description of Artificial Sequence: Synthetic oligonucleotide
auacaauguacacgacagc

SEQ ID NO: 372445 - RNA, 19 nt, Artificial Sequence
  Description of Artificial Sequence: Synthetic oligonucleotide
ucuaguuugugcuuccuuc

SEQ ID NO: 372446 - RNA, 19 nt, Artificial Sequence
  Description of Artificial Sequence: Synthetic oligonucleotide
uuucuagugggaaccuggg

SEQ ID NO: 372447 - RNA, 19 nt, Artificial Sequence
  Description of Artificial Sequence: Synthetic oligonucleotide
auaguaaugaucaugccaa

SEQ ID NO: 372448 - RNA, 19 nt, Artificial Sequence
  Description of Artificial Sequence: Synthetic oligonucleotide
ucgaauuccaucccucggc

SEQ ID NO: 372449 - RNA, 19 nt, Artificial Sequence
  Description of Artificial Sequence: Synthetic oligonucleotide
caucacauacacaauggac

SEQ ID NO: 372450 - RNA, 19 nt, Artificial Sequence
  Description of Artificial Sequence: Synthetic oligonucleotide
cuaaccagcagguugccac

SEQ ID NO: 372451 - RNA, 19 nt, Artificial Sequence
  Description of Artificial Sequence: Synthetic oligonucleotide
aacaaucgguuaccacacc

SEQ ID NO: 372452 - RNA, 19 nt, Artificial Sequence
  Description of Artificial Sequence: Synthetic oligonucleotide
auagguguuguacuggccu

SEQ ID NO: 372453 - RNA, 19 nt, Artificial Sequence
  Description of Artificial Sequence: Synthetic oligonucleotide
gagagcucggucuuuuggg

SEQ ID NO: 372454 - RNA, 19 nt, Artificial Sequence
  Description of Artificial Sequence: Synthetic oligonucleotide
ugauuggaagguccacucg

SEQ ID NO: 372455 - RNA, 19 nt, Artificial Sequence
  Description of Artificial Sequence: Synthetic oligonucleotide
uauugguagcaaugaaaag

SEQ ID NO: 372456 - RNA, 19 nt, Artificial Sequence
  Description of Artificial Sequence: Synthetic oligonucleotide
acggagagggccccaaugc

SEQ ID NO: 372457 - RNA, 19 nt, Artificial Sequence
  Description of Artificial Sequence: Synthetic oligonucleotide
ucuuaaggugagcugacaa

SEQ ID NO: 372458 - RNA, 19 nt, Artificial Sequence
  Description of Artificial Sequence: Synthetic oligonucleotide
gauccaauagcacccagga

SEQ ID NO: 372459 - RNA, 19 nt, Artificial Sequence
  Description of Artificial Sequence: Synthetic oligonucleotide
ccuugugugaacaacuugg

SEQ ID NO: 372460 - RNA, 19 nt, Artificial Sequence
  Description of Artificial Sequence: Synthetic oligonucleotide
aggagauagguaguaacac

SEQ ID NO: 372461 - RNA, 19 nt, Artificial Sequence
  Description of Artificial Sequence: Synthetic oligonucleotide
agauucuggcgguagaaug

SEQ ID NO: 372462 - RNA, 19 nt, Artificial Sequence
  Description of Artificial Sequence: Synthetic oligonucleotide
caugauaaggccagaggug

SEQ ID NO: 372463 - RNA, 19 nt, Artificial Sequence
  Description of Artificial Sequence: Synthetic oligonucleotide
aaaagucccuaugccacgg

SEQ ID NO: 372464 - RNA, 19 nt, Artificial Sequence
  Description of Artificial Sequence: Synthetic oligonucleotide
gagcucauccaaaaguagg

SEQ ID NO: 372465 - RNA, 19 nt, Artificial Sequence
  Description of Artificial Sequence: Synthetic oligonucleotide
uacauuggauacuugggaa

SEQ ID NO: 372466 - RNA, 19 nt, Artificial Sequence
  Description of Artificial Sequence: Synthetic oligonucleotide
caauuggaaauuuccuagc

SEQ ID NO: 372467 - RNA, 19 nt, Artificial Sequence
  Description of Artificial Sequence: Synthetic oligonucleotide
augguaagagcauccuuuc

SEQ ID NO: 372468 - RNA, 19 nt, Artificial Sequence
  Description of Artificial Sequence: Synthetic oligonucleotide
ugugcggguggccagcagg

SEQ ID NO: 372469 - RNA, 19 nt, Artificial Sequence
  Description of Artificial Sequence: Synthetic oligonucleotide
uacacaauggacugaccga

SEQ ID NO: 372470 - RNA, 19 nt, Artificial Sequence
  Description of Artificial Sequence: Synthetic oligonucleotide
ggaacaaucgguuaccaca

SEQ ID NO: 372471 - RNA, 19 nt, Artificial Sequence
  Description of Artificial Sequence: Synthetic oligonucleotide
uagcauacuccaaugguaa

SEQ ID NO: 372472 - RNA, 19 nt, Artificial Sequence
  Description of Artificial Sequence: Synthetic oligonucleotide
uuuugggcuccguugaaga

SEQ ID NO: 372473 - RNA, 19 nt, Artificial Sequence
  Description of Artificial Sequence: Synthetic oligonucleotide
aacuggauaagcacgggcu

SEQ ID NO: 372474 - RNA, 19 nt, Artificial Sequence
  Description of Artificial Sequence: Synthetic oligonucleotide
gauaagcacgggcugggcc

SEQ ID NO: 372475 - RNA, 19 nt, Artificial Sequence
  Description of Artificial Sequence: Synthetic oligonucleotide
ucgguuaccacacccucug

SEQ ID NO: 372476 - RNA, 19 nt, Artificial Sequence
  Description of Artificial Sequence: Synthetic oligonucleotide
ugucagcuaacaauucacu

SEQ ID NO: 372477 - RNA, 19 nt, Artificial Sequence
  Description of Artificial Sequence: Synthetic oligonucleotide
gaugacauagagguuggac

SEQ ID NO: 372478 - RNA, 19 nt, Artificial Sequence
  Description of Artificial Sequence: Synthetic oligonucleotide
ccgauaguaaugaucaugc

SEQ ID NO: 372479 - RNA, 19 nt, Artificial Sequence
  Description of Artificial Sequence: Synthetic oligonucleotide
aagggcucggaccuugucu

SEQ ID NO: 372480 - RNA, 19 nt, Artificial Sequence
  Description of Artificial Sequence: Synthetic oligonucleotide
gagaagacccuguggacug

SEQ ID NO: 372481 - RNA, 19 nt, Artificial Sequence
  Description of Artificial Sequence: Synthetic oligonucleotide
aggaaaucugccaggacgg

SEQ ID NO: 372482 - RNA, 19 nt, Artificial Sequence
  Description of Artificial Sequence: Synthetic oligonucleotide
uguacuggccucgguaacg

SEQ ID NO: 372483 - RNA, 19 nt, Artificial Sequence
  Description of Artificial Sequence: Synthetic oligonucleotide
agagcucggucuuuugggg

SEQ ID NO: 372484 - RNA, 19 nt, Artificial Sequence
  Description of Artificial Sequence: Synthetic oligonucleotide
gauggcaccuucgaauucc

SEQ ID NO: 372485 - RNA, 19 nt, Artificial Sequence
  Description of Artificial Sequence: Synthetic oligonucleotide
ugagccaaaugauuccgga

SEQ ID NO: 372486 - RNA, 19 nt, Artificial Sequence
  Description of Artificial Sequence: Synthetic oligonucleotide
acugaagcgugcugacagc

SEQ ID NO: 372487 - RNA, 19 nt, Artificial Sequence
  Description of Artificial Sequence: Synthetic oligonucleotide
guauccuuucugcaggagc

SEQ ID NO: 372488 - RNA, 19 nt, Artificial Sequence
  Description of Artificial Sequence: Synthetic oligonucleotide
aaccggaaacuucaaucca

SEQ ID NO: 372489 - RNA, 19 nt, Artificial Sequence
  Description of Artificial Sequence: Synthetic oligonucleotide
ucaauuaucuuggcaccag

SEQ ID NO: 372490 - RNA, 19 nt, Artificial Sequence
  Description of Artificial Sequence: Synthetic oligonucleotide
cuuugcaacgucuuuggca

SEQ ID NO: 372491 - RNA, 19 nt, Artificial Sequence
  Description of Artificial Sequence: Synthetic oligonucleotide
uguuguacuggccucggua

SEQ ID NO: 372492 - RNA, 19 nt, Artificial Sequence
  Description of Artificial Sequence: Synthetic oligonucleotide
agguggcuaccacaggagc

SEQ ID NO: 372493 - RNA, 19 nt, Artificial Sequence
  Description of Artificial Sequence: Synthetic oligonucleotide
aggaucccagcaugaauac

SEQ ID NO: 372494 - RNA, 19 nt, Artificial Sequence
  Description of Artificial Sequence: Synthetic oligonucleotide
auucuggcgguagaaugcc

SEQ ID NO: 372495 - RNA, 19 nt, Artificial Sequence
  Description of Artificial Sequence: Synthetic oligonucleotide
cugaccgauaguaaugauc

SEQ ID NO: 372496 - RNA, 19 nt, Artificial Sequence
  Description of Artificial Sequence: Synthetic oligonucleotide
uugauuggaagguccacuc

SEQ ID NO: 372497 - RNA, 19 nt, Artificial Sequence
  Description of Artificial Sequence: Synthetic oligonucleotide
uuaaggugagcugacaauu

SEQ ID NO: 372498 - RNA, 19 nt, Artificial Sequence
  Description of Artificial Sequence: Synthetic oligonucleotide
cuuccauugaggugagaag

SEQ ID NO: 372499 - RNA, 19 nt, Artificial Sequence
  Description of Artificial Sequence: Synthetic oligonucleotide
acacaauggucucacagau

SEQ ID NO: 372500 - RNA, 19 nt, Artificial Sequence
  Description of Artificial Sequence: Synthetic oligonucleotide
ucgguaacgagccgacuug

SEQ ID NO: 372501 - RNA, 19 nt, Artificial Sequence
  Description of Artificial Sequence: Synthetic oligonucleotide
ucucacagauauugguagc

SEQ ID NO: 372502 - RNA, 19 nt, Artificial Sequence
  Description of Artificial Sequence: Synthetic oligonucleotide
uggauacuugggaacaauc

SEQ ID NO: 372503 - RNA, 19 nt, Artificial Sequence
  Description of Artificial Sequence: Synthetic oligonucleotide
cuccguugaagagagcucg

SEQ ID NO: 372504 - RNA, 19 nt, Artificial Sequence
  Description of Artificial Sequence: Synthetic oligonucleotide
accgauaguaaugaucaug

SEQ ID NO: 372505 - RNA, 19 nt, Artificial Sequence
  Description of Artificial Sequence: Synthetic oligonucleotide
aggcuaaccagcagguugc

SEQ ID NO: 372506 - RNA, 19 nt, Artificial Sequence
  Description of Artificial Sequence: Synthetic oligonucleotide
gaacaaucgguuaccacac

SEQ ID NO: 372507 - RNA, 19 nt, Artificial Sequence
  Description of Artificial Sequence: Synthetic oligonucleotide
uggacugaccgauaguaau

SEQ ID NO: 372508 - RNA, 19 nt, Artificial Sequence
  Description of Artificial Sequence: Synthetic oligonucleotide
gcuacuuccauugagguga

SEQ ID NO: 372509 - RNA, 19 nt, Artificial Sequence
  Description of Artificial Sequence: Synthetic oligonucleotide
ucuacuugcucugacugaa

SEQ ID NO: 372510 - RNA, 19 nt, Artificial Sequence
  Description of Artificial Sequence: Synthetic oligonucleotide
caaugaaaagggagaugcc

SEQ ID NO: 372511 - RNA, 19 nt, Artificial Sequence
  Description of Artificial Sequence: Synthetic oligonucleotide
ucaugccaaacaacuuuug

SEQ ID NO: 372512 - RNA, 19 nt, Artificial Sequence
  Description of Artificial Sequence: Synthetic oligonucleotide
ugcugaccuguauaggggc

SEQ ID NO: 372513 - RNA, 19 nt, Artificial Sequence
  Description of Artificial Sequence: Synthetic oligonucleotide
ugacaaagaucucgaagua

SEQ ID NO: 372514 - RNA, 19 nt, Artificial Sequence
  Description of Artificial Sequence: Synthetic oligonucleotide
ucacccugguccaugggca

SEQ ID NO: 372515 - RNA, 19 nt, Artificial Sequence
  Description of Artificial Sequence: Synthetic oligonucleotide
uggaaauuuccuagcacuu

SEQ ID NO: 372516 - RNA, 19 nt, Artificial Sequence
  Description of Artificial Sequence: Synthetic oligonucleotide
caugccggucaucacauac

SEQ ID NO: 372517 - RNA, 19 nt, Artificial Sequence
  Description of Artificial Sequence: Synthetic oligonucleotide
cacugagccaaaugauucc

SEQ ID NO: 372518 - RNA, 19 nt, Artificial Sequence
  Description of Artificial Sequence: Synthetic oligonucleotide
cuaagauaggugggaagcc

SEQ ID NO: 372519 - RNA, 19 nt, Artificial Sequence
  Description of Artificial Sequence: Synthetic oligonucleotide
uggcugucagcuaacaauu

SEQ ID NO: 372520 - RNA, 19 nt, Artificial Sequence
  Description of Artificial Sequence: Synthetic oligonucleotide
aaaugauuccggaggagau

SEQ ID NO: 372521 - RNA, 19 nt, Artificial Sequence
  Description of Artificial Sequence: Synthetic oligonucleotide
cuuccuucaaccagggcca

SEQ ID NO: 372522 - RNA, 19 nt, Artificial Sequence
  Description of Artificial Sequence: Synthetic oligonucleotide
gacccuugcagcugccagg

SEQ ID NO: 372523 - RNA, 19 nt, Artificial Sequence
  Description of Artificial Sequence: Synthetic oligonucleotide
uaagccauuuuggugucca

SEQ ID NO: 372524 - RNA, 19 nt, Artificial Sequence
  Description of Artificial Sequence: Synthetic oligonucleotide
caacuggauaagcacgggc

SEQ ID NO: 372525 - RNA, 19 nt, Artificial Sequence
  Description of Artificial Sequence: Synthetic oligonucleotide
agauauugguagcaaugaa

SEQ ID NO: 372526 - RNA, 19 nt, Artificial Sequence
  Description of Artificial Sequence: Synthetic oligonucleotide
agauagguaguaacacagg

SEQ ID NO: 372527 - RNA, 19 nt, Artificial Sequence
  Description of Artificial Sequence: Synthetic oligonucleotide
aagccguauccuuucugca

SEQ ID NO: 372528 - RNA, 19 nt, Artificial Sequence
  Description of Artificial Sequence: Synthetic oligonucleotide
ugccggucaucacauacac

SEQ ID NO: 372529 - RNA, 19 nt, Artificial Sequence
  Description of Artificial Sequence: Synthetic oligonucleotide
uguacacgacagcauggac

SEQ ID NO: 372530 - RNA, 19 nt, Artificial Sequence
  Description of Artificial Sequence: Synthetic oligonucleotide
ugccacgguagcauacucc

SEQ ID NO: 372531 - RNA, 19 nt, Artificial Sequence
  Description of Artificial Sequence: Synthetic oligonucleotide
uucuacuugcucugacuga

SEQ ID NO: 372532 - RNA, 19 nt, Artificial Sequence
  Description of Artificial Sequence: Synthetic oligonucleotide
uacuugggaacaaucgguu

SEQ ID NO: 372533 - RNA, 19 nt, Artificial Sequence
  Description of Artificial Sequence: Synthetic oligonucleotide
auacuugggaacaaucggu

SEQ ID NO: 372534 - RNA, 19 nt, Artificial Sequence
  Description of Artificial Sequence: Synthetic oligonucleotide
ucuggcgguagaaugccuc

SEQ ID NO: 372535 - RNA, 19 nt, Artificial Sequence
  Description of Artificial Sequence: Synthetic oligonucleotide
aggacaauuaagccagcaa

SEQ ID NO: 372536 - RNA, 19 nt, Artificial Sequence
  Description of Artificial Sequence: Synthetic oligonucleotide
cagaagaaccggaaacuuc

SEQ ID NO: 372537 - RNA, 19 nt, Artificial Sequence
  Description of Artificial Sequence: Synthetic oligonucleotide
cagaacccaagccguaucc

SEQ ID NO: 372538 - RNA, 19 nt, Artificial Sequence
  Description of Artificial Sequence: Synthetic oligonucleotide
acaauuaagccagcaacaa

SEQ ID NO: 372539 - RNA, 19 nt, Artificial Sequence
  Description of Artificial Sequence: Synthetic oligonucleotide
agcauacuccaaugguaag

SEQ ID NO: 372540 - RNA, 19 nt, Artificial Sequence
  Description of Artificial Sequence: Synthetic oligonucleotide
uuagggagauucuggcggu

SEQ ID NO: 372541 - RNA, 19 nt, Artificial Sequence
  Description of Artificial Sequence: Synthetic oligonucleotide
uauaggggcaagugauuaa

SEQ ID NO: 372542 - RNA, 19 nt, Artificial Sequence
  Description of Artificial Sequence: Synthetic oligonucleotide
uucuagugggaaccuggga

SEQ ID NO: 372543 - RNA, 19 nt, Artificial Sequence
  Description of Artificial Sequence: Synthetic oligonucleotide
ccuaagauaggugggaagc

SEQ ID NO: 372544 - RNA, 19 nt, Artificial Sequence
  Description of Artificial Sequence: Synthetic oligonucleotide
aguugggacccuugcagcu

SEQ ID NO: 372545 - RNA, 19 nt, Artificial Sequence
  Description of Artificial Sequence: Synthetic oligonucleotide
guacacgacagcauggaca

SEQ ID NO: 372546 - RNA, 19 nt, Artificial Sequence
  Description of Artificial Sequence: Synthetic oligonucleotide
gacggagagggccccaaug

SEQ ID NO: 372547 - RNA, 19 nt, Artificial Sequence
  Description of Artificial Sequence: Synthetic oligonucleotide
ugguagcaaugaaaaggga

SEQ ID NO: 372548 - RNA, 19 nt, Artificial Sequence
  Description of Artificial Sequence: Synthetic oligonucleotide
cucaggacugggucuagac

SEQ ID NO: 372549 - RNA, 19 nt, Artificial Sequence
  Description of Artificial Sequence: Synthetic oligonucleotide
uguccgaccaggugcccag

SEQ ID NO: 372550 - RNA, 19 nt, Artificial Sequence
  Description of Artificial Sequence: Synthetic oligonucleotide
cacccacuaacacugacca

SEQ ID NO: 372551 - RNA, 19 nt, Artificial Sequence
  Description of Artificial Sequence: Synthetic oligonucleotide
gauuaacugucccuugacu

SEQ ID NO: 372552 - RNA, 19 nt, Artificial Sequence
  Description of Artificial Sequence: Synthetic oligonucleotide
uaggggcaagugauuaacu

SEQ ID NO: 372553 - RNA, 19 nt, Artificial Sequence
  Description of Artificial Sequence: Synthetic oligonucleotide
ugauuccggaggagauagg

SEQ ID NO: 372554 - RNA, 19 nt, Artificial Sequence
  Description of Artificial Sequence: Synthetic oligonucleotide
gauagguguuguacuggcc

SEQ ID NO: 372555 - RNA, 19 nt, Artificial Sequence
  Description of Artificial Sequence: Synthetic oligonucleotide
ugauaaggccagaggugac

SEQ ID NO: 372556 - RNA, 19 nt, Artificial Sequence
  Description of Artificial Sequence: Synthetic oligonucleotide
gacugaccgauaguaauga

SEQ ID NO: 372557 - RNA, 19 nt, Artificial Sequence
  Description of Artificial Sequence: Synthetic oligonucleotide
gaagcuguggagucccuaa

SEQ ID NO: 372558 - RNA, 19 nt, Artificial Sequence
  Description of Artificial Sequence: Synthetic oligonucleotide
agcucggucuuuuggggug

SEQ ID NO: 372559 - RNA, 19 nt, Artificial Sequence
  Description of Artificial Sequence: Synthetic oligonucleotide
cuaugccacgguagcauac

SEQ ID NO: 372560 - RNA, 19 nt, Artificial Sequence
  Description of Artificial Sequence: Synthetic oligonucleotide
ggagauagguaguaacaca

SEQ ID NO: 372561 - RNA, 19 nt, Artificial Sequence
  Description of Artificial Sequence: Synthetic oligonucleotide
agagcugaauggugaucag

SEQ ID NO: 372562 - RNA, 19 nt, Artificial Sequence
  Description of Artificial Sequence: Synthetic oligonucleotide
  modified_base (9)..(9): a, c, u, g, unknown or other
guguugacngugguggggc

SEQ ID NO: 372563 - RNA, 19 nt, Artificial Sequence
  Description of Artificial Sequence: Synthetic oligonucleotide
auaaggcucagaagagaag

SEQ ID NO: 372564 - RNA, 19 nt, Artificial Sequence
  Description of Artificial Sequence: Synthetic oligonucleotide
agcuguggagucccuaaga

SEQ ID NO: 372565 - RNA, 19 nt, Artificial Sequence
  Description of Artificial Sequence: Synthetic oligonucleotide
gccguauccuuucugcagg

SEQ ID NO: 372566 - RNA, 19 nt, Artificial Sequence
  Description of Artificial Sequence: Synthetic oligonucleotide
acacaauggacugaccgau

SEQ ID NO: 372567 - RNA, 19 nt, Artificial Sequence
  Description of Artificial Sequence: Synthetic oligonucleotide
gagcugaauggugaucagc

SEQ ID NO: 372568 - RNA, 19 nt, Artificial Sequence
  Description of Artificial Sequence: Synthetic oligonucleotide
gauaggugggaagcccugc

SEQ ID NO: 372569 - RNA, 19 nt, Artificial Sequence
  Description of Artificial Sequence: Synthetic oligonucleotide
gucccuaugccacgguagc

SEQ ID NO: 372570 - RNA, 19 nt, Artificial Sequence
  Description of Artificial Sequence: Synthetic oligonucleotide
uaugccacgguagcauacu

SEQ ID NO: 372571 - RNA, 19 nt, Artificial Sequence
  Description of Artificial Sequence: Synthetic oligonucleotide
  modified_base (6)..(6): a, c, u, g, unknown or other
uugacngugguggggcuga

SEQ ID NO: 372572 - RNA, 19 nt, Artificial Sequence
  Description of Artificial Sequence: Synthetic oligonucleotide
accuucgaauuccaucccu

SEQ ID NO: 372573 - RNA, 19 nt, Artificial Sequence
  Description of Artificial Sequence: Synthetic oligonucleotide
  modified_base (2)..(2): a, c, u, g, unknown or other
cngugguggggcugaaagc

SEQ ID NO: 372574 - RNA, 19 nt, Artificial Sequence
  Description of Artificial Sequence: Synthetic oligonucleotide
auggugaucagcaggcaga

SEQ ID NO: 372575 - RNA, 19 nt, Artificial Sequence
  Description of Artificial Sequence: Synthetic oligonucleotide
agguguuguacuggccucg

SEQ ID NO: 372576 - RNA, 19 nt, Artificial Sequence
  Description of Artificial Sequence: Synthetic oligonucleotide
agucccuaugccacgguag

SEQ ID NO: 372577 - RNA, 19 nt, Artificial Sequence
  Description of Artificial Sequence: Synthetic oligonucleotide
ucggaccuugucugugcgg

SEQ ID NO: 372578 - RNA, 19 nt, Artificial Sequence
  Description of Artificial Sequence: Synthetic oligonucleotide
aaggguccccguacaugcc

SEQ ID NO: 372579 - RNA, 19 nt, Artificial Sequence
  Description of Artificial Sequence: Synthetic oligonucleotide
cuuuugggcuccguugaag

SEQ ID NO: 372580 - RNA, 19 nt, Artificial Sequence
  Description of Artificial Sequence: Synthetic oligonucleotide
gcuaagagcugcaugauaa

SEQ ID NO: 372581 - RNA, 19 nt, Artificial Sequence
  Description of Artificial Sequence: Synthetic oligonucleotide
augccacgguagcauacuc

SEQ ID NO: 372582 - RNA, 19 nt, Artificial Sequence
  Description of Artificial Sequence: Synthetic oligonucleotide
aagucccuaugccacggua

SEQ ID NO: 372583 - RNA, 19 nt, Artificial Sequence
  Description of Artificial Sequence: Synthetic oligonucleotide
uagguguuguacuggccuc

SEQ ID NO: 372584 - RNA, 19 nt, Artificial Sequence
  Description of Artificial Sequence: Synthetic oligonucleotide
ggcuacuaggcccaguuga

SEQ ID NO: 372585 - RNA, 19 nt, Artificial Sequence
  Description of Artificial Sequence: Synthetic oligonucleotide
uaguaaugaucaugccaaa

SEQ ID NO: 372586 - RNA, 19 nt, Artificial Sequence
  Description of Artificial Sequence: Synthetic oligonucleotide
guagcauacuccaauggua

SEQ ID NO: 372587 - RNA, 19 nt, Artificial Sequence
  Description of Artificial Sequence: Synthetic oligonucleotide
gcaugauaaggccagaggu

SEQ ID NO: 372588 - RNA, 19 nt, Artificial Sequence
  Description of Artificial Sequence: Synthetic oligonucleotide
ccacacaauggucucacag

SEQ ID NO: 372589 - RNA, 19 nt, Artificial Sequence
  Description of Artificial Sequence: Synthetic oligonucleotide
guuaagccauuuugguguc

SEQ ID NO: 372590 - RNA, 19 nt, Artificial Sequence
  Description of Artificial Sequence: Synthetic oligonucleotide
aagcgugcugacagcaucu

SEQ ID NO: 372591 - RNA, 19 nt, Artificial Sequence
  Description of Artificial Sequence: Synthetic oligonucleotide
uguccccaacuucaauuau

SEQ ID NO: 372592 - RNA, 19 nt, Artificial Sequence
  Description of Artificial Sequence: Synthetic oligonucleotide
gugaacaacuuggacccug

SEQ ID NO: 372593 - RNA, 19 nt, Artificial Sequence
  Description of Artificial Sequence: Synthetic oligonucleotide
auguacacgacagcaugga

SEQ ID NO: 372594 - RNA, 19 nt, Artificial Sequence
  Description of Artificial Sequence: Synthetic oligonucleotide
aggcauuugcuacuuccau

SEQ ID NO: 372595 - RNA, 19 nt, Artificial Sequence
  Description of Artificial Sequence: Synthetic oligonucleotide
cuagugggaaccugggaaa

SEQ ID NO: 372596 - RNA, 19 nt, Artificial Sequence
  Description of Artificial Sequence: Synthetic oligonucleotide
ugcaacgucuuuggcagaa

SEQ ID NO: 372597 - RNA, 19 nt, Artificial Sequence
  Description of Artificial Sequence: Synthetic oligonucleotide
agcacccaucuccgaaggg

SEQ ID NO: 372598 - RNA, 19 nt, Artificial Sequence
  Description of Artificial Sequence: Synthetic oligonucleotide
cucggaccuugucugugcg

SEQ ID NO: 372599 - RNA, 19 nt, Artificial Sequence
  Description of Artificial Sequence: Synthetic oligonucleotide
cuguauaggggcaagugau

SEQ ID NO: 372600 - RNA, 19 nt, Artificial Sequence
  Description of Artificial Sequence: Synthetic oligonucleotide
  modified_base (7)..(7): a, c, u, g, unknown or other
guugacngugguggggcug

SEQ ID NO: 372601 - RNA, 19 nt, Artificial Sequence
  Description of Artificial Sequence: Synthetic oligonucleotide
ggcaccuucgaauuccauc

SEQ ID NO: 372602 - RNA, 19 nt, Artificial Sequence
  Description of Artificial Sequence: Synthetic oligonucleotide
ugaccuguauaggggcaag

SEQ ID NO: 372603 - RNA, 19 nt, Artificial Sequence
  Description of Artificial Sequence: Synthetic oligonucleotide
gugcccagcaggcuaacca

SEQ ID NO: 372604 - RNA, 19 nt, Artificial Sequence
  Description of Artificial Sequence: Synthetic oligonucleotide
uuaagccauuuuggugucc

SEQ ID NO: 372605 - RNA, 19 nt, Artificial Sequence
  Description of Artificial Sequence: Synthetic oligonucleotide
caauuaagccagcaacaaa

SEQ ID NO: 372606 - RNA, 19 nt, Artificial Sequence
  Description of Artificial Sequence: Synthetic oligonucleotide
  modified_base (8)..(8): a, c, u, g, unknown or other
uguugacngugguggggcu

SEQ ID NO: 372607 - RNA, 19 nt, Artificial Sequence
  Description of Artificial Sequence: Synthetic oligonucleotide
agcuaagagcugcaugaua

SEQ ID NO: 372608 - RNA, 19 nt, Artificial Sequence
  Description of Artificial Sequence: Synthetic oligonucleotide
agacaucuaguuugugcuu

SEQ ID NO: 372609 - RNA, 19 nt, Artificial Sequence
  Description of Artificial Sequence: Synthetic oligonucleotide
cagcaagggucccuaggag

SEQ ID NO: 372610 - RNA, 19 nt, Artificial Sequence
  Description of Artificial Sequence: Synthetic oligonucleotide
gggauagguguuguacugg

SEQ ID NO: 372611 - RNA, 19 nt, Artificial Sequence
  Description of Artificial Sequence: Synthetic oligonucleotide
aucaugccaaacaacuuuu

SEQ ID NO: 372612 - RNA, 19 nt, Artificial Sequence
  Description of Artificial Sequence: Synthetic oligonucleotide
agggagauucuggcgguag

SEQ ID NO: 372613 - RNA, 19 nt, Artificial Sequence
  Description of Artificial Sequence: Synthetic oligonucleotide
agguuggacaccagagcag

SEQ ID NO: 372614 - RNA, 19 nt, Artificial Sequence
  Description of Artificial Sequence: Synthetic oligonucleotide
guuccagauccaauagcac

SEQ ID NO: 372615 - RNA, 19 nt, Artificial Sequence
  Description of Artificial Sequence: Synthetic oligonucleotide
caacgucuuuggcagaaga

SEQ ID NO: 372616 - RNA, 19 nt, Artificial Sequence
  Description of Artificial Sequence: Synthetic oligonucleotide
gcaccgagaagugcaaggg

SEQ ID NO: 372617 - RNA, 19 nt, Artificial Sequence
  Description of Artificial Sequence: Synthetic oligonucleotide
auuggaagguccacucgga

SEQ ID NO: 372618 - RNA, 19 nt, Artificial Sequence
  Description of Artificial Sequence: Synthetic oligonucleotide
ggacugaccgauaguaaug

SEQ ID NO: 372619 - RNA, 19 nt, Artificial Sequence
  Description of Artificial Sequence: Synthetic oligonucleotide
guauaggggcaagugauua

SEQ ID NO: 372620 - RNA, 19 nt, Artificial Sequence
  Description of Artificial Sequence: Synthetic oligonucleotide
gagaaccaugcagacaucu

SEQ ID NO: 372621 - RNA, 19 nt, Artificial Sequence
  Description of Artificial Sequence: Synthetic oligonucleotide
agaacccaagccguauccu

SEQ ID NO: 372622 - RNA, 19 nt, Artificial Sequence
  Description of Artificial Sequence: Synthetic oligonucleotide
uccgaccaggugcccagca

SEQ ID NO: 372623 - RNA, 19 nt, Artificial Sequence
  Description of Artificial Sequence: Synthetic oligonucleotide
cuuaaggugagcugacaau

SEQ ID NO: 372624 - RNA, 19 nt, Artificial Sequence
  Description of Artificial Sequence: Synthetic oligonucleotide
caccuucgaauuccauccc

SEQ ID NO: 372625 - RNA, 19 nt, Artificial Sequence
  Description of Artificial Sequence: Synthetic oligonucleotide
gggcaagugauuaacuguc

SEQ ID NO: 372626 - RNA, 19 nt, Artificial Sequence
  Description of Artificial Sequence: Synthetic oligonucleotide
ugagaaccaugcagacauc

SEQ ID NO: 372627 - RNA, 19 nt, Artificial Sequence
  Description of Artificial Sequence: Synthetic oligonucleotide
auccaauagcacccaggaa

SEQ ID NO: 372628 - RNA, 19 nt, Artificial Sequence
  Description of Artificial Sequence: Synthetic oligonucleotide
ucccuaagauaggugggaa

SEQ ID NO: 372629 - RNA, 19 nt, Artificial Sequence
  Description of Artificial Sequence: Synthetic oligonucleotide
uucuggcgguagaaugccu

SEQ ID NO: 372630 - RNA, 19 nt, Artificial Sequence
  Description of Artificial Sequence: Synthetic oligonucleotide
cuccgaaggguccccguac

SEQ ID NO: 372631 - RNA, 19 nt, Artificial Sequence
  Description of Artificial Sequence: Synthetic oligonucleotide
gccauuugcuggcaaguac

SEQ ID NO: 372632 - RNA, 19 nt, Artificial Sequence
  Description of Artificial Sequence: Synthetic oligonucleotide
aggcuacuaggcccaguug

SEQ ID NO: 372633 - RNA, 19 nt, Artificial Sequence
  Description of Artificial Sequence: Synthetic oligonucleotide
augccagaacccaagccgu

SEQ ID NO: 372634 - RNA, 19 nt, Artificial Sequence
  Description of Artificial Sequence: Synthetic oligonucleotide
aucugugagaugacauaga

SEQ ID NO: 372635 - RNA, 19 nt, Artificial Sequence
  Description of Artificial Sequence: Synthetic oligonucleotide
ggacccuugcagcugccag

SEQ ID NO: 372636 - RNA, 19 nt, Artificial Sequence
  Description of Artificial Sequence: Synthetic oligonucleotide
guaccgguugagcucaugu

SEQ ID NO: 372637 - RNA, 19 nt, Artificial Sequence
  Description of Artificial Sequence: Synthetic oligonucleotide
gccaaaugauuccggagga

SEQ ID NO: 372638 - RNA, 19 nt, Artificial Sequence
  Description of Artificial Sequence: Synthetic oligonucleotide
guccccaacuucaauuauc

SEQ ID NO: 372639 - RNA, 19 nt, Artificial Sequence
  Description of Artificial Sequence: Synthetic oligonucleotide
ccuaggagcccugagucag

SEQ ID NO: 372640 - RNA, 19 nt, Artificial Sequence
  Description of Artificial Sequence: Synthetic oligonucleotide
ugcagacaucuaguuugug

SEQ ID NO: 372641 - RNA, 19 nt, Artificial Sequence
  Description of Artificial Sequence: Synthetic oligonucleotide
gcauacuccaaugguaaga

SEQ ID NO: 372642 - RNA, 19 nt, Artificial Sequence
  Description of Artificial Sequence: Synthetic oligonucleotide
aucgguuaccacacccucu

SEQ ID NO: 372643 - RNA, 19 nt, Artificial Sequence
  Description of Artificial Sequence: Synthetic oligonucleotide
gggaacaaucgguuaccac

SEQ ID NO: 372644 - RNA, 19 nt, Artificial Sequence
  Description of Artificial Sequence: Synthetic oligonucleotide
ucccuaugccacgguagca

SEQ ID NO: 372645 - RNA, 19 nt, Artificial Sequence
  Description of Artificial Sequence: Synthetic oligonucleotide
cugaagcgugcugacagca

SEQ ID NO: 372646 - RNA, 19 nt, Artificial Sequence
  Description of Artificial Sequence: Synthetic oligonucleotide
cccuaagauaggugggaag

SEQ ID NO: 372647 - RNA, 19 nt, Artificial Sequence
  Description of Artificial Sequence: Synthetic oligonucleotide
caaucgguuaccacacccu

SEQ ID NO: 372648 - RNA, 19 nt, Artificial Sequence
  Description of Artificial Sequence: Synthetic oligonucleotide
gaauggugaucagcaggca

SEQ ID NO: 372649 - RNA, 19 nt, Artificial Sequence
  Description of Artificial Sequence: Synthetic oligonucleotide
augagguuagggagauucu

SEQ ID NO: 372650 - RNA, 19 nt, Artificial Sequence
  Description of Artificial Sequence: Synthetic oligonucleotide
ggaaacuucaauccauguu

SEQ ID NO: 372651 - RNA, 19 nt, Artificial Sequence
  Description of Artificial Sequence: Synthetic oligonucleotide
gguuggacaccagagcaga

SEQ ID NO: 372652 - RNA, 19 nt, Artificial Sequence
  Description of Artificial Sequence: Synthetic oligonucleotide
ccggaaacuucaauccaug

SEQ ID NO: 372653 - RNA, 19 nt, Artificial Sequence
  Description of Artificial Sequence: Synthetic oligonucleotide
augccggucaucacauaca

SEQ ID NO: 372654 - RNA, 19 nt, Artificial Sequence
  Description of Artificial Sequence: Synthetic oligonucleotide
ccuguauaggggcaaguga

SEQ ID NO: 372655 - RNA, 19 nt, Artificial Sequence
  Description of Artificial Sequence: Synthetic oligonucleotide
gguguuguacuggccucgg

SEQ ID NO: 372656 - RNA, 19 nt, Artificial Sequence
  Description of Artificial Sequence: Synthetic oligonucleotide
ucugggccgugggcaaggg

SEQ ID NO: 372657 - RNA, 19 nt, Artificial Sequence
  Description of Artificial Sequence: Synthetic oligonucleotide
gaagaaccggaaacuucaa

SEQ ID NO: 372658 - RNA, 19 nt, Artificial Sequence
  Description of Artificial Sequence: Synthetic oligonucleotide
uugcaacgucuuuggcaga

SEQ ID NO: 372659 - RNA, 19 nt, Artificial Sequence
  Description of Artificial Sequence: Synthetic oligonucleotide
cagguugccacugaagcgu

SEQ ID NO: 372660 - RNA, 19 nt, Artificial Sequence
  Description of Artificial Sequence: Synthetic oligonucleotide
  modified_base (18)..(18): a, c, u, g, unknown or other
ccucggccaguguugacng

SEQ ID NO: 372661 - RNA, 19 nt, Artificial Sequence
  Description of Artificial Sequence: Synthetic oligonucleotide
caucuccgaaggguccccg

SEQ ID NO: 372662 - RNA, 19 nt, Artificial Sequence
  Description of Artificial Sequence: Synthetic oligonucleotide
guaacgagccgacuugauu

SEQ ID NO: 372663 - RNA, 19 nt, Artificial Sequence
  Description of Artificial Sequence: Synthetic oligonucleotide
caugugauauggugugagu

SEQ ID NO: 372664 - RNA, 19 nt, Artificial Sequence
  Description of Artificial Sequence: Synthetic oligonucleotide
gcuaacaauucacuucuau

SEQ ID NO: 372665 - RNA, 19 nt, Artificial Sequence
  Description of Artificial Sequence: Synthetic oligonucleotide
cccacucacccacuaacac

SEQ ID NO: 372666 - RNA, 19 nt, Artificial Sequence
  Description of Artificial Sequence: Synthetic oligonucleotide
agaucucgaaguacuggua

SEQ ID NO: 372667 - RNA, 19 nt, Artificial Sequence
  Description of Artificial Sequence: Synthetic oligonucleotide
auggacugaccgauaguaa

SEQ ID NO: 372668 - RNA, 19 nt, Artificial Sequence
  Description of Artificial Sequence: Synthetic oligonucleotide
gcggcuguggggauguacc

SEQ ID NO: 372669 - RNA, 19 nt, Artificial Sequence
  Description of Artificial Sequence: Synthetic oligonucleotide
cgguagcauacuccaaugg

SEQ ID NO: 372670 - RNA, 19 nt, Artificial Sequence
  Description of Artificial Sequence: Synthetic oligonucleotide
gguguccccaacuucaauu

SEQ ID NO: 372671 - RNA, 19 nt, Artificial Sequence
  Description of Artificial Sequence: Synthetic oligonucleotide
gcucggaccuugucugugc

SEQ ID NO: 372672 - RNA, 19 nt, Artificial Sequence
  Description of Artificial Sequence: Synthetic oligonucleotide
ggucccuaggagcccugag

SEQ ID NO: 372673 - RNA, 19 nt, Artificial Sequence
  Description of Artificial Sequence: Synthetic oligonucleotide
cucgguaacgagccgacuu

SEQ ID NO: 372674 - RNA, 19 nt, Artificial Sequence
  Description of Artificial Sequence: Synthetic oligonucleotide
agguugccacugaagcgug

SEQ ID NO: 372675 - RNA, 19 nt, Artificial Sequence
  Description of Artificial Sequence: Synthetic oligonucleotide
uggcgguagaaugccucuc

SEQ ID NO: 372676 - RNA, 19 nt, Artificial Sequence
  Description of Artificial Sequence: Synthetic oligonucleotide
gagauucuggcgguagaau

SEQ ID NO: 372677 - RNA, 19 nt, Artificial Sequence
  Description of Artificial Sequence: Synthetic oligonucleotide
gggaaccugggaaaggcaa

SEQ ID NO: 372678 - RNA, 19 nt, Artificial Sequence
  Description of Artificial Sequence: Synthetic oligonucleotide
ccaacuggauaagcacggg

SEQ ID NO: 372679 - RNA, 19 nt, Artificial Sequence
  Description of Artificial Sequence: Synthetic oligonucleotide
cuacuugcucugacugaaa

SEQ ID NO: 372680 - RNA, 19 nt, Artificial Sequence
  Description of Artificial Sequence: Synthetic oligonucleotide
cacaauggacugaccgaua

SEQ ID NO: 372681 - RNA, 19 nt, Artificial Sequence
  Description of Artificial Sequence: Synthetic oligonucleotide
caagggaucugguccugcu

SEQ ID NO: 372682 - RNA, 19 nt, Artificial Sequence
  Description of Artificial Sequence: Synthetic oligonucleotide
cuggcgguagaaugccucu

SEQ ID NO: 372683 - RNA, 19 nt, Artificial Sequence
  Description of Artificial Sequence: Synthetic oligonucleotide
ccagaacccaagccguauc

SEQ ID NO: 372684 - RNA, 19 nt, Artificial Sequence
  Description of Artificial Sequence: Synthetic oligonucleotide
acgagccgacuugauugga

SEQ ID NO: 372685 - RNA, 19 nt, Artificial Sequence
  Description of Artificial Sequence: Synthetic oligonucleotide
acaggcuacuaggcccagu

SEQ ID NO: 372686 - RNA, 19 nt, Artificial Sequence
  Description of Artificial Sequence: Synthetic oligonucleotide
  modified_base (4)..(4): a, c, u, g, unknown or other
gacngugguggggcugaaa

SEQ ID NO: 372687 - RNA, 19 nt, Artificial Sequence
  Description of Artificial Sequence: Synthetic oligonucleotide
cuccuugugugaacaacuu

SEQ ID NO: 372688 - RNA, 19 nt, Artificial Sequence
  Description of Artificial Sequence: Synthetic oligonucleotide
gaccgauaguaaugaucau

SEQ ID NO: 372689 - RNA, 19 nt, Artificial Sequence
  Description of Artificial Sequence: Synthetic oligonucleotide
uacuuccauugaggugaga

SEQ ID NO: 372690 - RNA, 19 nt, Artificial Sequence
  Description of Artificial Sequence: Synthetic oligonucleotide
gcgguagaaugccucucga

SEQ ID NO: 372691 - RNA, 19 nt, Artificial Sequence
  Description of Artificial Sequence: Synthetic oligonucleotide
gcaacgucuuuggcagaag

SEQ ID NO: 372692 - RNA, 19 nt, Artificial Sequence
  Description of Artificial Sequence: Synthetic oligonucleotide
caggcaccgagaagugcaa

SEQ ID NO: 372693 - RNA, 19 nt, Artificial Sequence
  Description of Artificial Sequence: Synthetic oligonucleotide
guguccgaccaggugccca

SEQ ID NO: 372694 - RNA, 19 nt, Artificial Sequence
  Description of Artificial Sequence: Synthetic oligonucleotide
caccgagaagugcaagggu

SEQ ID NO: 372695 - RNA, 19 nt, Artificial Sequence
  Description of Artificial Sequence: Synthetic oligonucleotide
cacccucuggcugucagcu

SEQ ID NO: 372696 - RNA, 19 nt, Artificial Sequence
  Description of Artificial Sequence: Synthetic oligonucleotide
gcaagggaucugguccugc

SEQ ID NO: 372697 - RNA, 19 nt, Artificial Sequence
  Description of Artificial Sequence: Synthetic oligonucleotide
cugugcggguggccagcag

SEQ ID NO: 372698 - RNA, 19 nt, Artificial Sequence
  Description of Artificial Sequence: Synthetic oligonucleotide
ggaaaucugccaggacgga

SEQ ID NO: 372699 - RNA, 19 nt, Artificial Sequence
  Description of Artificial Sequence: Synthetic oligonucleotide
gccgacuugauuggaaggu

SEQ ID NO: 372700 - RNA, 19 nt, Artificial Sequence
  Description of Artificial Sequence: Synthetic oligonucleotide
ccgacuugauuggaagguc

SEQ ID NO: 372701 - RNA, 19 nt, Artificial Sequence
  Description of Artificial Sequence: Synthetic oligonucleotide
acucacccacuaacacuga

SEQ ID NO: 372702 - RNA, 19 nt, Artificial Sequence
  Description of Artificial Sequence: Synthetic oligonucleotide
cugccauuugcuggcaagu

SEQ ID NO: 372703 - RNA, 19 nt, Artificial Sequence
  Description of Artificial Sequence: Synthetic oligonucleotide
cacaggcuacuaggcccag

SEQ ID NO: 372704 - RNA, 19 nt, Artificial Sequence
  Description of Artificial Sequence: Synthetic oligonucleotide
aggacggagagggccccaa

SEQ ID NO: 372705 - RNA, 19 nt, Artificial Sequence
  Description of Artificial Sequence: Synthetic oligonucleotide
agcuaacaauucacuucua

SEQ ID NO: 372706 - RNA, 19 nt, Artificial Sequence
  Description of Artificial Sequence: Synthetic oligonucleotide
ggccucgguaacgagccga

SEQ ID NO: 372707 - RNA, 19 nt, Artificial Sequence
  Description of Artificial Sequence: Synthetic oligonucleotide
cccucuggcugucagcuaa

SEQ ID NO: 372708 - RNA, 19 nt, Artificial Sequence
  Description of Artificial Sequence: Synthetic oligonucleotide
ggcuaaccagcagguugcc

SEQ ID NO: 372709 - RNA, 19 nt, Artificial Sequence
  Description of Artificial Sequence: Synthetic oligonucleotide
  modified_base (5)..(5): a, c, u, g, unknown or other
ugacngugguggggcugaa

SEQ ID NO: 372710 - RNA, 19 nt, Artificial Sequence
  Description of Artificial Sequence: Synthetic oligonucleotide
cacuaacacugaccaucaa

SEQ ID NO: 372711 - RNA, 19 nt, Artificial Sequence
  Description of Artificial Sequence: Synthetic oligonucleotide
ggggcaguugggacccuug

SEQ ID NO: 372712 - RNA, 19 nt, Artificial Sequence
  Description of Artificial Sequence: Synthetic oligonucleotide
cauccaaaaguaggacaau

SEQ ID NO: 372713 - RNA, 19 nt, Artificial Sequence
  Description of Artificial Sequence: Synthetic oligonucleotide
guccccguacaugccgguc

SEQ ID NO: 372714 - RNA, 19 nt, Artificial Sequence
  Description of Artificial Sequence: Synthetic oligonucleotide
ccccagaugauguguccga

SEQ ID NO: 372715 - RNA, 19 nt, Artificial Sequence
  Description of Artificial Sequence: Synthetic oligonucleotide
ggcaagggaucugguccug

SEQ ID NO: 372716 - RNA, 19 nt, Artificial Sequence
  Description of Artificial Sequence: Synthetic oligonucleotide
gcuaaccagcagguugcca

SEQ ID NO: 372717 - RNA, 19 nt, Artificial Sequence
  Description of Artificial Sequence: Synthetic oligonucleotide
gccucgguaacgagccgac

SEQ ID NO: 372718 - RNA, 19 nt, Artificial Sequence
  Description of Artificial Sequence: Synthetic oligonucleotide
guguuguacuggccucggu

SEQ ID NO: 372719 - RNA, 19 nt, Artificial Sequence
  Description of Artificial Sequence: Synthetic oligonucleotide
ccaucuccgaagggucccc

SEQ ID NO: 372720 - RNA, 19 nt, Artificial Sequence
  Description of Artificial Sequence: Synthetic oligonucleotide
cguauccuuucugcaggag

SEQ ID NO: 372721 - RNA, 19 nt, Artificial Sequence
  Description of Artificial Sequence: Synthetic oligonucleotide
guccgaccaggugcccagc

SEQ ID NO: 372722 - RNA, 19 nt, Artificial Sequence
  Description of Artificial Sequence: Synthetic oligonucleotide
gggucuagacaaggccaca

SEQ ID NO: 372723 - RNA, 19 nt, Artificial Sequence
  Description of Artificial Sequence: Synthetic oligonucleotide
gugcggguggccagcaggu

SEQ ID NO: 372724 - RNA, 19 nt, Artificial Sequence
  Description of Artificial Sequence: Synthetic oligonucleotide
ccguauccuuucugcagga

SEQ ID NO: 372725 - RNA, 19 nt, Artificial Sequence
  Description of Artificial Sequence: Synthetic oligonucleotide
cugggccgugggcaaggga

SEQ ID NO: 372726 - RNA, 19 nt, Artificial Sequence
  Description of Artificial Sequence: Synthetic oligonucleotide
gcuacuaggcccaguugau

SEQ ID NO: 372727 - RNA, 19 nt, Artificial Sequence
  Description of Artificial Sequence: Synthetic oligonucleotide
ccaugcagacaucuaguuu

SEQ ID NO: 372728 - RNA, 19 nt, Artificial Sequence
  Description of Artificial Sequence: Synthetic oligonucleotide
cgguagaaugccucucgaa

SEQ ID NO: 372729 - RNA, 19 nt, Artificial Sequence
  Description of Artificial Sequence: Synthetic oligonucleotide
gggacccuugcagcugcca

SEQ ID NO: 372730 - RNA, 19 nt, Artificial Sequence
  Description of Artificial Sequence: Synthetic oligonucleotide
guaucucaguuaagccauu

SEQ ID NO: 372731 - RNA, 19 nt, Artificial Sequence
  Description of Artificial Sequence: Synthetic oligonucleotide
gguaacgagccgacuugau

SEQ ID NO: 372732 - RNA, 19 nt, Artificial Sequence
  Description of Artificial Sequence: Synthetic oligonucleotide
cggaaacuucaauccaugu

SEQ ID NO: 372733 - RNA, 19 nt, Artificial Sequence
  Description of Artificial Sequence: Synthetic oligonucleotide
ccauuuugguguccacagu

SEQ ID NO: 372734 - RNA, 19 nt, Artificial Sequence
  Description of Artificial Sequence: Synthetic oligonucleotide
cuaccacaggagcucccuu

SEQ ID NO: 372735 - RNA, 19 nt, Artificial Sequence
  Description of Artificial Sequence: Synthetic oligonucleotide
ccgagaagugcaaggguuu

SEQ ID NO: 372736 - RNA, 19 nt, Artificial Sequence
  Description of Artificial Sequence: Synthetic oligonucleotide
  modified_base (17)..(17): a, c, u, g, unknown or other
cucggccaguguugacngu

SEQ ID NO: 372737 - RNA, 19 nt, Artificial Sequence
  Description of Artificial Sequence: Synthetic oligonucleotide
ccggaggagauagguagua

SEQ ID NO: 372738 - RNA, 19 nt, Artificial Sequence
  Description of Artificial Sequence: Synthetic oligonucleotide
ggguguccccaacuucaau

SEQ ID NO: 372739 - RNA, 19 nt, Artificial Sequence
  Description of Artificial Sequence: Synthetic oligonucleotide
gggucccuaggagcccuga

SEQ ID NO: 372740 - RNA, 19 nt, Artificial Sequence
  Description of Artificial Sequence: Synthetic oligonucleotide
gguccccguacaugccggu

SEQ ID NO: 372741 - RNA, 19 nt, Artificial Sequence
  Description of Artificial Sequence: Synthetic oligonucleotide
cccuaugccacgguagcau

SEQ ID NO: 372742 - RNA, 19 nt, Artificial Sequence
  Description of Artificial Sequence: Synthetic oligonucleotide
cgguaacgagccgacuuga

SEQ ID NO: 372743 - RNA, 19 nt, Artificial Sequence
  Description of Artificial Sequence: Synthetic oligonucleotide
caccagcuaagagcugcau

SEQ ID NO: 372744 - RNA, 19 nt, Artificial Sequence
  Description of Artificial Sequence: Synthetic oligonucleotide
ggacggagagggccccaau

SEQ ID NO: 372745 - RNA, 19 nt, Artificial Sequence
  Description of Artificial Sequence: Synthetic oligonucleotide
cccguacaugccggucauc

SEQ ID NO: 372746 - RNA, 19 nt, Artificial Sequence
  Description of Artificial Sequence: Synthetic oligonucleotide
ccgaaggguccccguacau

SEQ ID NO: 372747 - RNA, 19 nt, Artificial Sequence
  Description of Artificial Sequence: Synthetic oligonucleotide
ccucgguaacgagccgacu

SEQ ID NO: 372748 - RNA, 19 nt, Artificial Sequence
  Description of Artificial Sequence: Synthetic oligonucleotide
ccacacccucuggcuguca

SEQ ID NO: 372749 - RNA, 19 nt, Artificial Sequence
  Description of Artificial Sequence: Synthetic oligonucleotide
  modified_base (1)..(1): a, c, u, g, unknown or other
ngugguggggcugaaagcc

SEQ ID NO: 372750 - RNA, 19 nt, Artificial Sequence
  Description of Artificial Sequence: Synthetic oligonucleotide
gauuccacgacucuggucc

SEQ ID NO: 372751 - RNA, 19 nt, Artificial Sequence
  Description of Artificial Sequence: Synthetic oligonucleotide
uccgauaaaggccaguagg

SEQ ID NO: 372752 - RNA, 19 nt, Artificial Sequence
  Description of Artificial Sequence: Synthetic oligonucleotide
gauaauguacaaaggaggg

SEQ ID NO: 372753 - RNA, 19 nt, Artificial Sequence
  Description of Artificial Sequence: Synthetic oligonucleotide
agccaaauggaucuuuucc

SEQ ID NO: 372754 - RNA, 19 nt, Artificial Sequence
  Description of Artificial Sequence: Synthetic oligonucleotide
augaauugcgcacaggcuc

SEQ ID NO: 372755 - RNA, 19 nt, Artificial Sequence
  Description of Artificial Sequence: Synthetic oligonucleotide
aucgcuucccuucaagucc

SEQ ID NO: 372756 - RNA, 19 nt, Artificial Sequence
  Description of Artificial Sequence: Synthetic oligonucleotide
agauaauguacaaaggagg

SEQ ID NO: 372757 - RNA, 19 nt, Artificial Sequence
  Description of Artificial Sequence: Synthetic oligonucleotide
aaucgcuucccuucaaguc

SEQ ID NO: 372758 - RNA, 19 nt, Artificial Sequence
  Description of Artificial Sequence: Synthetic oligonucleotide
agaauggcggcacuaaggg

SEQ ID NO: 372759 - RNA, 19 nt, Artificial Sequence
  Description of Artificial Sequence: Synthetic oligonucleotide
aucguagucguguuggucg

SEQ ID NO: 372760 - RNA, 19 nt, Artificial Sequence
  Description of Artificial Sequence: Synthetic oligonucleotide
gauagggugcaguaggcgg

SEQ ID NO: 372761 - RNA, 19 nt, Artificial Sequence
  Description of Artificial Sequence: Synthetic oligonucleotide
cuuaguuaccacaaaguug

SEQ ID NO: 372762 - RNA, 19 nt, Artificial Sequence
  Description of Artificial Sequence: Synthetic oligonucleotide
gaagaaagacuuuccagug

SEQ ID NO: 372763 - RNA, 19 nt, Artificial Sequence
  Description of Artificial Sequence: Synthetic oligonucleotide
uuuggagugucccuguccc

SEQ ID NO: 372764 - RNA, 19 nt, Artificial Sequence
  Description of Artificial Sequence: Synthetic oligonucleotide
uguguuuguagugaggggc

SEQ ID NO: 372765 - RNA, 19 nt, Artificial Sequence
  Description of Artificial Sequence: Synthetic oligonucleotide
cuuguguuuguagugaggg

SEQ ID NO: 372766 - RNA, 19 nt, Artificial Sequence
  Description of Artificial Sequence: Synthetic oligonucleotide
aaugcugauuccacgacuc

SEQ ID NO: 372767 - RNA, 19 nt, Artificial Sequence
  Description of Artificial Sequence: Synthetic oligonucleotide
gagacauccagagauaaug

SEQ ID NO: 372768 - RNA, 19 nt, Artificial Sequence
  Description of Artificial Sequence: Synthetic oligonucleotide
aucuuuuccgaacagggca

SEQ ID NO: 372769 - RNA, 19 nt, Artificial Sequence
  Description of Artificial Sequence: Synthetic oligonucleotide
auuuggagugucccugucc

SEQ ID NO: 372770 - RNA, 19 nt, Artificial Sequence
  Description of Artificial Sequence: Synthetic oligonucleotide
cauguaccgaauaaauggc

SEQ ID NO: 372771 - RNA, 19 nt, Artificial Sequence
  Description of Artificial Sequence: Synthetic oligonucleotide
uggcgugagagcuugcucg

SEQ ID NO: 372772 - RNA, 19 nt, Artificial Sequence
  Description of Artificial Sequence: Synthetic oligonucleotide
uuccgaacagggcacaaag

SEQ ID NO: 372773 - RNA, 19 nt, Artificial Sequence
  Description of Artificial Sequence: Synthetic oligonucleotide
ucagaagccacacuaucgu

SEQ ID NO: 372774 - RNA, 19 nt, Artificial Sequence
  Description of Artificial Sequence: Synthetic oligonucleotide
uauggcgacuuccuucugg

SEQ ID NO: 372775 - RNA, 19 nt, Artificial Sequence
  Description of Artificial Sequence: Synthetic oligonucleotide
uccggauccgauaaaggcc

SEQ ID NO: 372776 - RNA, 19 nt, Artificial Sequence
  Description of Artificial Sequence: Synthetic oligonucleotide
uuccggauccgauaaaggc

SEQ ID NO: 372777 - RNA, 19 nt, Artificial Sequence
  Description of Artificial Sequence: Synthetic oligonucleotide
uucgucagaagccacacua

SEQ ID NO: 372778 - RNA, 19 nt, Artificial Sequence
  Description of Artificial Sequence: Synthetic oligonucleotide
gaugggugcuuccagcggg

SEQ ID NO: 372779 - RNA, 19 nt, Artificial Sequence
  Description of Artificial Sequence: Synthetic oligonucleotide
ucuuccggcauucacucug

SEQ ID NO: 372780 - RNA, 19 nt, Artificial Sequence
  Description of Artificial Sequence: Synthetic oligonucleotide
ugaauugcgcacaggcucc

SEQ ID NO: 372781 - RNA, 19 nt, Artificial Sequence
  Description of Artificial Sequence: Synthetic oligonucleotide
aaguggaggguccccacuc

SEQ ID NO: 372782 - RNA, 19 nt, Artificial Sequence
  Description of Artificial Sequence: Synthetic oligonucleotide
acuuaguuaccacaaaguu

SEQ ID NO: 372783 - RNA, 19 nt, Artificial Sequence
  Description of Artificial Sequence: Synthetic oligonucleotide
ucauaggcgcauuggauca

SEQ ID NO: 372784 - RNA, 19 nt, Artificial Sequence
  Description of Artificial Sequence: Synthetic oligonucleotide
uguaccgaauaaauggcau

SEQ ID NO: 372785 - RNA, 19 nt, Artificial Sequence
  Description of Artificial Sequence: Synthetic oligonucleotide
uuaagcagccgcaaugaau

SEQ ID NO: 372786 - RNA, 19 nt, Artificial Sequence
  Description of Artificial Sequence: Synthetic oligonucleotide
gcuauguacagggugaugg

SEQ ID NO: 372787 - RNA, 19 nt, Artificial Sequence
  Description of Artificial Sequence: Synthetic oligonucleotide
uaccgaauaaauggcauca

SEQ ID NO: 372788 - RNA, 19 nt, Artificial Sequence
  Description of Artificial Sequence: Synthetic oligonucleotide
cuaggaaucgcuucccuuc

SEQ ID NO: 372789 - RNA, 19 nt, Artificial Sequence
  Description of Artificial Sequence: Synthetic oligonucleotide
gacagcucgagguugucug

SEQ ID NO: 372790 - RNA, 19 nt, Artificial Sequence
  Description of Artificial Sequence: Synthetic oligonucleotide
uuggcaugaaagagcagca

SEQ ID NO: 372791 - RNA, 19 nt, Artificial Sequence
  Description of Artificial Sequence: Synthetic oligonucleotide
gccaaauggaucuuuuccg

SEQ ID NO: 372792 - RNA, 19 nt, Artificial Sequence
  Description of Artificial Sequence: Synthetic oligonucleotide
uuguguuuguagugagggg

SEQ ID NO: 372793 - RNA, 19 nt, Artificial Sequence
  Description of Artificial Sequence: Synthetic oligonucleotide
uggaucuuuuccgaacagg

SEQ ID NO: 372794 - RNA, 19 nt, Artificial Sequence
  Description of Artificial Sequence: Synthetic oligonucleotide
ucacucugcagccgguagg

SEQ ID NO: 372795 - RNA, 19 nt, Artificial Sequence
  Description of Artificial Sequence: Synthetic oligonucleotide
cagcacacuucccauaggg

SEQ ID NO: 372796 - RNA, 19 nt, Artificial Sequence
  Description of Artificial Sequence: Synthetic oligonucleotide
ggaucuuuuccgaacaggg

SEQ ID NO: 372797 - RNA, 19 nt, Artificial Sequence
  Description of Artificial Sequence: Synthetic oligonucleotide
uucucauggucacuuauuu

SEQ ID NO: 372798 - RNA, 19 nt, Artificial Sequence
  Description of Artificial Sequence: Synthetic oligonucleotide
aggggcucaguucuaccgc

SEQ ID NO: 372799 - RNA, 19 nt, Artificial Sequence
  Description of Artificial Sequence: Synthetic oligonucleotide
uguggguaagggcagggaa

SEQ ID NO: 372800 - RNA, 19 nt, Artificial Sequence
  Description of Artificial Sequence: Synthetic oligonucleotide
aguagggacauguaccgaa

SEQ ID NO: 372801 - RNA, 19 nt, Artificial Sequence
  Description of Artificial Sequence: Synthetic oligonucleotide
aguuuguggaucucccucu

SEQ ID NO: 372802 - RNA, 19 nt, Artificial Sequence
  Description of Artificial Sequence: Synthetic oligonucleotide
aguucuaccgccaccagcu

SEQ ID NO: 372803 - RNA, 19 nt, Artificial Sequence
  Description of Artificial Sequence: Synthetic oligonucleotide
uaggcgcuggcauuaagca

SEQ ID NO: 372804 - RNA, 19 nt, Artificial Sequence
  Description of Artificial Sequence: Synthetic oligonucleotide
guagguguuggcccugacg

SEQ ID NO: 372805 - RNA, 19 nt, Artificial Sequence
  Description of Artificial Sequence: Synthetic oligonucleotide
cauccagagauaauguaca

SEQ ID NO: 372806 - RNA, 19 nt, Artificial Sequence
  Description of Artificial Sequence: Synthetic oligonucleotide
cacuaagggcacuugugcc

SEQ ID NO: 372807 - RNA, 19 nt, Artificial Sequence
  Description of Artificial Sequence: Synthetic oligonucleotide
acaaguaggagcagcaacu

SEQ ID NO: 372808 - RNA, 19 nt, Artificial Sequence
  Description of Artificial Sequence: Synthetic oligonucleotide
auaccagaggagaauggcg

SEQ ID NO: 372809 - RNA, 19 nt, Artificial Sequence
  Description of Artificial Sequence: Synthetic oligonucleotide
uacccaccaccacagguag

SEQ ID NO: 372810 - RNA, 19 nt, Artificial Sequence
  Description of Artificial Sequence: Synthetic oligonucleotide
cuggcacacacguuggggc

SEQ ID NO: 372811 - RNA, 19 nt, Artificial Sequence
  Description of Artificial Sequence: Synthetic oligonucleotide
uggauaccagaggagaaug

SEQ ID NO: 372812 - RNA, 19 nt, Artificial Sequence
  Description of Artificial Sequence: Synthetic oligonucleotide
gaugccccugcucagcccc

SEQ ID NO: 372813 - RNA, 19 nt, Artificial Sequence
  Description of Artificial Sequence: Synthetic oligonucleotide
uacguguucugcccguuca

SEQ ID NO: 372814 - RNA, 19 nt, Artificial Sequence
  Description of Artificial Sequence: Synthetic oligonucleotide
uggguacguguucugcccg

SEQ ID NO: 372815 - RNA, 19 nt, Artificial Sequence
  Description of Artificial Sequence: Synthetic oligonucleotide
cuuccagcgggccccaugg

SEQ ID NO: 372816 - RNA, 19 nt, Artificial Sequence
  Description of Artificial Sequence: Synthetic oligonucleotide
agcagccgcaaugaauugc

SEQ ID NO: 372817 - RNA, 19 nt, Artificial Sequence
  Description of Artificial Sequence: Synthetic oligonucleotide
uggaccacagcugguaacc

SEQ ID NO: 372818 - RNA, 19 nt, Artificial Sequence
  Description of Artificial Sequence: Synthetic oligonucleotide
ucgagguugucuguggggc

SEQ ID NO: 372819 - RNA, 19 nt, Artificial Sequence
  Description of Artificial Sequence: Synthetic oligonucleotide
gaucuuuuccgaacagggc

SEQ ID NO: 372820 - RNA, 19 nt, Artificial Sequence
  Description of Artificial Sequence: Synthetic oligonucleotide
cacgucuugacagcuaccc

SEQ ID NO: 372821 - RNA, 19 nt, Artificial Sequence
  Description of Artificial Sequence: Synthetic oligonucleotide
ugucauguuugaacuccug

SEQ ID NO: 372822 - RNA, 19 nt, Artificial Sequence
  Description of Artificial Sequence: Synthetic oligonucleotide
uccgaacagggcacaaagc

SEQ ID NO: 372823 - RNA, 19 nt, Artificial Sequence
  Description of Artificial Sequence: Synthetic oligonucleotide
ucguauggcgacuuccuuc

SEQ ID NO: 372824 - RNA, 19 nt, Artificial Sequence
  Description of Artificial Sequence: Synthetic oligonucleotide
ugacacacgucuugacagc

SEQ ID NO: 372825 - RNA, 19 nt, Artificial Sequence
  Description of Artificial Sequence: Synthetic oligonucleotide
uccggagcucaucacucag

SEQ ID NO: 372826 - RNA, 19 nt, Artificial Sequence
  Description of Artificial Sequence: Synthetic oligonucleotide
auccgauaaaggccaguag

SEQ ID NO: 372827 - RNA, 19 nt, Artificial Sequence
  Description of Artificial Sequence: Synthetic oligonucleotide
caccagggcaccuggauac

SEQ ID NO: 372828 - RNA, 19 nt, Artificial Sequence
  Description of Artificial Sequence: Synthetic oligonucleotide
auaggcgcauuggaucacc

SEQ ID NO: 372829 - RNA, 19 nt, Artificial Sequence
  Description of Artificial Sequence: Synthetic oligonucleotide
ggcgcauuggaucaccugc

SEQ ID NO: 372830 - RNA, 19 nt, Artificial Sequence
  Description of Artificial Sequence: Synthetic oligonucleotide
cauugcaguugcaggcacg

SEQ ID NO: 372831 - RNA, 19 nt, Artificial Sequence
  Description of Artificial Sequence: Synthetic oligonucleotide
uagggaugcuauguacagg

SEQ ID NO: 372832 - RNA, 19 nt, Artificial Sequence
  Description of Artificial Sequence: Synthetic oligonucleotide
auggaucuuuuccgaacag

SEQ ID NO: 372833 - RNA, 19 nt, Artificial Sequence
  Description of Artificial Sequence: Synthetic oligonucleotide
uucuaccgccaccagcuga

SEQ ID NO: 372834 - RNA, 19 nt, Artificial Sequence
  Description of Artificial Sequence: Synthetic oligonucleotide
gcauuaagcagccgcaaug

SEQ ID NO: 372835 - RNA, 19 nt, Artificial Sequence
  Description of Artificial Sequence: Synthetic oligonucleotide
agggacauguaccgaauaa

SEQ ID NO: 372836 - RNA, 19 nt, Artificial Sequence
  Description of Artificial Sequence: Synthetic oligonucleotide
acgacagcaguggagagga

SEQ ID NO: 372837 - RNA, 19 nt, Artificial Sequence
  Description of Artificial Sequence: Synthetic oligonucleotide
cacacgucuugacagcuac

SEQ ID NO: 372838 - RNA, 19 nt, Artificial Sequence
  Description of Artificial Sequence: Synthetic oligonucleotide
agguguuggcccugacggc

SEQ ID NO: 372839 - RNA, 19 nt, Artificial Sequence
  Description of Artificial Sequence: Synthetic oligonucleotide
ucuugacagcuacccacca

SEQ ID NO: 372840 - RNA, 19 nt, Artificial Sequence
  Description of Artificial Sequence: Synthetic oligonucleotide
gggcuaaacuggcucaugg

SEQ ID NO: 372841 - RNA, 19 nt, Artificial Sequence
  Description of Artificial Sequence: Synthetic oligonucleotide
agcuugcucguauggcgac

SEQ ID NO: 372842 - RNA, 19 nt, Artificial Sequence
  Description of Artificial Sequence: Synthetic oligonucleotide
agcacgacagcaguggaga

SEQ ID NO: 372843 - RNA, 19 nt, Artificial Sequence
  Description of Artificial Sequence: Synthetic oligonucleotide
uccgacaggucugaggagu

SEQ ID NO: 372844 - RNA, 19 nt, Artificial Sequence
  Description of Artificial Sequence: Synthetic oligonucleotide
guaccgaauaaauggcauc

SEQ ID NO: 372845 - RNA, 19 nt, Artificial Sequence
  Description of Artificial Sequence: Synthetic oligonucleotide
acacguuggggccugugcu

SEQ ID NO: 372846 - RNA, 19 nt, Artificial Sequence
  Description of Artificial Sequence: Synthetic oligonucleotide
caggugcaccuccaaaggg

SEQ ID NO: 372847 - RNA, 19 nt, Artificial Sequence
  Description of Artificial Sequence: Synthetic oligonucleotide
agccgcaaugaauugcgca

SEQ ID NO: 372848 - RNA, 19 nt, Artificial Sequence
  Description of Artificial Sequence: Synthetic oligonucleotide
uaguuaccacaaaguuggg

SEQ ID NO: 372849 - RNA, 19 nt, Artificial Sequence
  Description of Artificial Sequence: Synthetic oligonucleotide
uucuggagagcacgacagc

SEQ ID NO: 372850 - RNA, 19 nt, Artificial Sequence
  Description of Artificial Sequence: Synthetic oligonucleotide
aaggugguuggggagaaua

SEQ ID NO: 372851 - RNA, 19 nt, Artificial Sequence
  Description of Artificial Sequence: Synthetic oligonucleotide
ugcccguucauugggaagu

SEQ ID NO: 372852 - RNA, 19 nt, Artificial Sequence
  Description of Artificial Sequence: Synthetic oligonucleotide
guaggcgcuggcauuaagc

SEQ ID NO: 372853 - RNA, 19 nt, Artificial Sequence
  Description of Artificial Sequence: Synthetic oligonucleotide
gcgacuuccuucuggagag

SEQ ID NO: 372854 - RNA, 19 nt, Artificial Sequence
  Description of Artificial Sequence: Synthetic oligonucleotide
cugcuguugaccugcauga

SEQ ID NO: 372855 - RNA, 19 nt, Artificial Sequence
  Description of Artificial Sequence: Synthetic oligonucleotide
ucuaggaaucgcuucccuu

SEQ ID NO: 372856 - RNA, 19 nt, Artificial Sequence
  Description of Artificial Sequence: Synthetic oligonucleotide
ggcuaaacuggcucauggg

SEQ ID NO: 372857 - RNA, 19 nt, Artificial Sequence
  Description of Artificial Sequence: Synthetic oligonucleotide
ugcucguauggcgacuucc

SEQ ID NO: 372858 - RNA, 19 nt, Artificial Sequence
  Description of Artificial Sequence: Synthetic oligonucleotide
gucguguuggucguccagg

SEQ ID NO: 372859 - RNA, 19 nt, Artificial Sequence
  Description of Artificial Sequence: Synthetic oligonucleotide
ucaguucuaccgccaccag

SEQ ID NO: 372860 - RNA, 19 nt, Artificial Sequence
  Description of Artificial Sequence: Synthetic oligonucleotide
uguacagggugaugggcau

SEQ ID NO: 372861 - RNA, 19 nt, Artificial Sequence
  Description of Artificial Sequence: Synthetic oligonucleotide
gcacuaagggcacuugugc

SEQ ID NO: 372862 - RNA, 19 nt, Artificial Sequence
  Description of Artificial Sequence: Synthetic oligonucleotide
ucuugagagggugggcacc

SEQ ID NO: 372863 - RNA, 19 nt, Artificial Sequence
  Description of Artificial Sequence: Synthetic oligonucleotide
gggccauuuggcaugaaag

SEQ ID NO: 372864 - RNA, 19 nt, Artificial Sequence
  Description of Artificial Sequence: Synthetic oligonucleotide
ugcugucaaugccuugcca

SEQ ID NO: 372865 - RNA, 19 nt, Artificial Sequence
  Description of Artificial Sequence: Synthetic oligonucleotide
agucguguuggucguccag

SEQ ID NO: 372866 - RNA, 19 nt, Artificial Sequence
  Description of Artificial Sequence: Synthetic oligonucleotide
auacauggagaaggccugg

SEQ ID NO: 372867 - RNA, 19 nt, Artificial Sequence
  Description of Artificial Sequence: Synthetic oligonucleotide
agcacacuucccauagggg

SEQ ID NO: 372868 - RNA, 19 nt, Artificial Sequence
  Description of Artificial Sequence: Synthetic oligonucleotide
caguucuaccgccaccagc

SEQ ID NO: 372869 - RNA, 19 nt, Artificial Sequence
  Description of Artificial Sequence: Synthetic oligonucleotide
ggcgcuggcauuaagcagc

SEQ ID NO: 372870 - RNA, 19 nt, Artificial Sequence
  Description of Artificial Sequence: Synthetic oligonucleotide
guuugaacuccugggcugc

SEQ ID NO: 372871 - RNA, 19 nt, Artificial Sequence
  Description of Artificial Sequence: Synthetic oligonucleotide
uccgaguggcgccugugcu

SEQ ID NO: 372872 - RNA, 19 nt, Artificial Sequence
  Description of Artificial Sequence: Synthetic oligonucleotide
agcucccauggccagugag

SEQ ID NO: 372873 - RNA, 19 nt, Artificial Sequence
  Description of Artificial Sequence: Synthetic oligonucleotide
aggcgcuggcauuaagcag

SEQ ID NO: 372874 - RNA, 19 nt, Artificial Sequence
  Description of Artificial Sequence: Synthetic oligonucleotide
cuagggcuaaacuggcuca

SEQ ID NO: 372875 - RNA, 19 nt, Artificial Sequence
  Description of Artificial Sequence: Synthetic oligonucleotide
guuuguggaucucccucug

SEQ ID NO: 372876 - RNA, 19 nt, Artificial Sequence
  Description of Artificial Sequence: Synthetic oligonucleotide
gaaucgcuucccuucaagu

SEQ ID NO: 372877 - RNA, 19 nt, Artificial Sequence
  Description of Artificial Sequence: Synthetic oligonucleotide
cuuccggcauucacucugc

SEQ ID NO: 372878 - RNA, 19 nt, Artificial Sequence
  Description of Artificial Sequence: Synthetic oligonucleotide
uccugucaccucacauucc

SEQ ID NO: 372879 - RNA, 19 nt, Artificial Sequence
  Description of Artificial Sequence: Synthetic oligonucleotide
ggaaucgcuucccuucaag

SEQ ID NO: 372880 - RNA, 19 nt, Artificial Sequence
  Description of Artificial Sequence: Synthetic oligonucleotide
gauccgauaaaggccagua

SEQ ID NO: 372881 - RNA, 19 nt, Artificial Sequence
  Description of Artificial Sequence: Synthetic oligonucleotide
gccaguagggacauguacc

SEQ ID NO: 372882 - RNA, 19 nt, Artificial Sequence
  Description of Artificial Sequence: Synthetic oligonucleotide
gguuguuccgaguggcgcc

SEQ ID NO: 372883 - RNA, 19 nt, Artificial Sequence
  Description of Artificial Sequence: Synthetic oligonucleotide
gguggguuagugucuggag

SEQ ID NO: 372884 - RNA, 19 nt, Artificial Sequence
  Description of Artificial Sequence: Synthetic oligonucleotide
caguaggcggagcugcccc

SEQ ID NO: 372885 - RNA, 19 nt, Artificial Sequence
  Description of Artificial Sequence: Synthetic oligonucleotide
gcagccgcaaugaauugcg

SEQ ID NO: 372886 - RNA, 19 nt, Artificial Sequence
  Description of Artificial Sequence: Synthetic oligonucleotide
cgcagggacacuuaguuac

SEQ ID NO: 372887 - RNA, 19 nt, Artificial Sequence
  Description of Artificial Sequence: Synthetic oligonucleotide
auguaccgaauaaauggca

SEQ ID NO: 372888 - RNA, 19 nt, Artificial Sequence
  Description of Artificial Sequence: Synthetic oligonucleotide
uucugcccguucauuggga

SEQ ID NO: 372889 - RNA, 19 nt, Artificial Sequence
  Description of Artificial Sequence: Synthetic oligonucleotide
gcacacuucccauagggga

SEQ ID NO: 372890 - RNA, 19 nt, Artificial Sequence
  Description of Artificial Sequence: Synthetic oligonucleotide
acgcccgagggucuagguc

SEQ ID NO: 372891 - RNA, 19 nt, Artificial Sequence
  Description of Artificial Sequence: Synthetic oligonucleotide
ucguagucguguuggucgu

SEQ ID NO: 372892 - RNA, 19 nt, Artificial Sequence
  Description of Artificial Sequence: Synthetic oligonucleotide
agagcacgacagcagugga

SEQ ID NO: 372893 - RNA, 19 nt, Artificial Sequence
  Description of Artificial Sequence: Synthetic oligonucleotide
gcgaugggugcuuccagcg

SEQ ID NO: 372894 - RNA, 19 nt, Artificial Sequence
  Description of Artificial Sequence: Synthetic oligonucleotide
guaggugcagguagugaug

SEQ ID NO: 372895 - RNA, 19 nt, Artificial Sequence
  Description of Artificial Sequence: Synthetic oligonucleotide
gagcacgacagcaguggag

SEQ ID NO: 372896 - RNA, 19 nt, Artificial Sequence
  Description of Artificial Sequence: Synthetic oligonucleotide
cugugcguggggacgcccg

SEQ ID NO: 372897 - RNA, 19 nt, Artificial Sequence
  Description of Artificial Sequence: Synthetic oligonucleotide
cugccgaagcugcagguuc

SEQ ID NO: 372898 - RNA, 19 nt, Artificial Sequence
  Description of Artificial Sequence: Synthetic oligonucleotide
cuagcacgguuguuccgag

SEQ ID NO: 372899 - RNA, 19 nt, Artificial Sequence
  Description of Artificial Sequence: Synthetic oligonucleotide
agguuagggagaggggcuc

SEQ ID NO: 372900 - RNA, 19 nt, Artificial Sequence
  Description of Artificial Sequence: Synthetic oligonucleotide
aguggcgccugugcugggc

SEQ ID NO: 372901 - RNA, 19 nt, Artificial Sequence
  Description of Artificial Sequence: Synthetic oligonucleotide
cacacuaucguagucgugu

SEQ ID NO: 372902 - RNA, 19 nt, Artificial Sequence
  Description of Artificial Sequence: Synthetic oligonucleotide
cagcucuaggaaucgcuuc

SEQ ID NO: 372903 - RNA, 19 nt, Artificial Sequence
  Description of Artificial Sequence: Synthetic oligonucleotide
auagggugcaguaggcgga

SEQ ID NO: 372904 - RNA, 19 nt, Artificial Sequence
  Description of Artificial Sequence: Synthetic oligonucleotide
ggcgacuuccuucuggaga

SEQ ID NO: 372905 - RNA, 19 nt, Artificial Sequence
  Description of Artificial Sequence: Synthetic oligonucleotide
aggugguuggggagaauag

SEQ ID NO: 372906 - RNA, 19 nt, Artificial Sequence
  Description of Artificial Sequence: Synthetic oligonucleotide
acacgucuugacagcuacc

SEQ ID NO: 372907 - RNA, 19 nt, Artificial Sequence
  Description of Artificial Sequence: Synthetic oligonucleotide
cacuaucguagucguguug

SEQ ID NO: 372908 - RNA, 19 nt, Artificial Sequence
  Description of Artificial Sequence: Synthetic oligonucleotide
uuuccgaacagggcacaaa

SEQ ID NO: 372909 - RNA, 19 nt, Artificial Sequence
  Description of Artificial Sequence: Synthetic oligonucleotide
uagggugcaguaggcggag

SEQ ID NO: 372910 - RNA, 19 nt, Artificial Sequence
  Description of Artificial Sequence: Synthetic oligonucleotide
cugcccguucauugggaag

SEQ ID NO: 372911 - RNA, 19 nt, Artificial Sequence
  Description of Artificial Sequence: Synthetic oligonucleotide
cuacccaccaccacaggua

SEQ ID NO: 372912 - RNA, 19 nt, Artificial Sequence
  Description of Artificial Sequence: Synthetic oligonucleotide
acagcucgagguugucugu

SEQ ID NO: 372913 - RNA, 19 nt, Artificial Sequence
  Description of Artificial Sequence: Synthetic oligonucleotide
ugugcguggggacgcccga

SEQ ID NO: 372914 - RNA, 19 nt, Artificial Sequence
  Description of Artificial Sequence: Synthetic oligonucleotide
aacggcacugccgcucaca

SEQ ID NO: 372915 - RNA, 19 nt, Artificial Sequence
  Description of Artificial Sequence: Synthetic oligonucleotide
ccgcaauaguuccugaaug

SEQ ID NO: 372916 - RNA, 19 nt, Artificial Sequence
  Description of Artificial Sequence: Synthetic oligonucleotide
guguuuguagugaggggca

SEQ ID NO: 372917 - RNA, 19 nt, Artificial Sequence
  Description of Artificial Sequence: Synthetic oligonucleotide
ggccaguagggacauguac

SEQ ID NO: 372918 - RNA, 19 nt, Artificial Sequence
  Description of Artificial Sequence: Synthetic oligonucleotide
ggucguccaggucacuuug

SEQ ID NO: 372919 - RNA, 19 nt, Artificial Sequence
  Description of Artificial Sequence: Synthetic oligonucleotide
ggcacuaagggcacuugug

SEQ ID NO: 372920 - RNA, 19 nt, Artificial Sequence
  Description of Artificial Sequence: Synthetic oligonucleotide
uggcgacuuccuucuggag

SEQ ID NO: 372921 - RNA, 19 nt, Artificial Sequence
  Description of Artificial Sequence: Synthetic oligonucleotide
cgaauaaauggcaucaucu

SEQ ID NO: 372922 - RNA, 19 nt, Artificial Sequence
  Description of Artificial Sequence: Synthetic oligonucleotide
uggcaugaaagagcagcaa

SEQ ID NO: 372923 - RNA, 19 nt, Artificial Sequence
  Description of Artificial Sequence: Synthetic oligonucleotide
gagcuugcucguauggcga

SEQ ID NO: 372924 - RNA, 19 nt, Artificial Sequence
  Description of Artificial Sequence: Synthetic oligonucleotide
ugggugcugucaaugccuu

SEQ ID NO: 372925 - RNA, 19 nt, Artificial Sequence
  Description of Artificial Sequence: Synthetic oligonucleotide
ccaaauggaucuuuuccga

SEQ ID NO: 372926 - RNA, 19 nt, Artificial Sequence
  Description of Artificial Sequence: Synthetic oligonucleotide
cacguuggggccugugcuc

SEQ ID NO: 372927 - RNA, 19 nt, Artificial Sequence
  Description of Artificial Sequence: Synthetic oligonucleotide
ucaaaaggguagggaugcu

SEQ ID NO: 372928 - RNA, 19 nt, Artificial Sequence
  Description of Artificial Sequence: Synthetic oligonucleotide
uagucguguuggucgucca

SEQ ID NO: 372929 - RNA, 19 nt, Artificial Sequence
  Description of Artificial Sequence: Synthetic oligonucleotide
uguuccgaguggcgccugu

SEQ ID NO: 372930 - RNA, 19 nt, Artificial Sequence
  Description of Artificial Sequence: Synthetic oligonucleotide
ucggagguggccagagcuu

SEQ ID NO: 372931 - RNA, 19 nt, Artificial Sequence
  Description of Artificial Sequence: Synthetic oligonucleotide
ccgaauaaauggcaucauc

SEQ ID NO: 372932 - RNA, 19 nt, Artificial Sequence
  Description of Artificial Sequence: Synthetic oligonucleotide
cugucuuccggcauucacu

SEQ ID NO: 372933 - RNA, 19 nt, Artificial Sequence
  Description of Artificial Sequence: Synthetic oligonucleotide
uggucguccaggucacuuu

SEQ ID NO: 372934 - RNA, 19 nt, Artificial Sequence
  Description of Artificial Sequence: Synthetic oligonucleotide
ccuuccggauccgauaaag

SEQ ID NO: 372935 - RNA, 19 nt, Artificial Sequence
  Description of Artificial Sequence: Synthetic oligonucleotide
auuuggcaugaaagagcag

SEQ ID NO: 372936 - RNA, 19 nt, Artificial Sequence
  Description of Artificial Sequence: Synthetic oligonucleotide
uuccggcauucacucugca

SEQ ID NO: 372937 - RNA, 19 nt, Artificial Sequence
  Description of Artificial Sequence: Synthetic oligonucleotide
uuagggagaggggcucagu

SEQ ID NO: 372938 - RNA, 19 nt, Artificial Sequence
  Description of Artificial Sequence: Synthetic oligonucleotide
acggcacugccgcucacau

SEQ ID NO: 372939 - RNA, 19 nt, Artificial Sequence
  Description of Artificial Sequence: Synthetic oligonucleotide
accgaauaaauggcaucau

SEQ ID NO: 372940 - RNA, 19 nt, Artificial Sequence
  Description of Artificial Sequence: Synthetic oligonucleotide
cagccgcaaugaauugcgc

SEQ ID NO: 372941 - RNA, 19 nt, Artificial Sequence
  Description of Artificial Sequence: Synthetic oligonucleotide
ccggauccgauaaaggcca

SEQ ID NO: 372942 - RNA, 19 nt, Artificial Sequence
  Description of Artificial Sequence: Synthetic oligonucleotide
cuugagagggugggcacca

SEQ ID NO: 372943 - RNA, 19 nt, Artificial Sequence
  Description of Artificial Sequence: Synthetic oligonucleotide
ucugugcguggggacgccc

SEQ ID NO: 372944 - RNA, 19 nt, Artificial Sequence
  Description of Artificial Sequence: Synthetic oligonucleotide
guucuaccgccaccagcug

SEQ ID NO: 372945 - RNA, 19 nt, Artificial Sequence
  Description of Artificial Sequence: Synthetic oligonucleotide
ccaaugcugauuccacgac

SEQ ID NO: 372946 - RNA, 19 nt, Artificial Sequence
  Description of Artificial Sequence: Synthetic oligonucleotide
cugcccgcaauaguuccug

SEQ ID NO: 372947 - RNA, 19 nt, Artificial Sequence
  Description of Artificial Sequence: Synthetic oligonucleotide
gcccggcucauacauggag

SEQ ID NO: 372948 - RNA, 19 nt, Artificial Sequence
  Description of Artificial Sequence: Synthetic oligonucleotide
guacguguucugcccguuc

SEQ ID NO: 372949 - RNA, 19 nt, Artificial Sequence
  Description of Artificial Sequence: Synthetic oligonucleotide
acguguucugcccguucau

SEQ ID NO: 372950 - RNA, 19 nt, Artificial Sequence
  Description of Artificial Sequence: Synthetic oligonucleotide
gacacacgucuugacagcu

SEQ ID NO: 372951 - RNA, 19 nt, Artificial Sequence
  Description of Artificial Sequence: Synthetic oligonucleotide
agggcuaaacuggcucaug

SEQ ID NO: 372952 - RNA, 19 nt, Artificial Sequence
  Description of Artificial Sequence: Synthetic oligonucleotide
ggcauucacucugcagccg

SEQ ID NO: 372953 - RNA, 19 nt, Artificial Sequence
  Description of Artificial Sequence: Synthetic oligonucleotide
ugcccgcaauaguuccuga

SEQ ID NO: 372954 - RNA, 19 nt, Artificial Sequence
  Description of Artificial Sequence: Synthetic oligonucleotide
uagcacgguuguuccgagu

SEQ ID NO: 372955 - RNA, 19 nt, Artificial Sequence
  Description of Artificial Sequence: Synthetic oligonucleotide
acguuggggccugugcucu

SEQ ID NO: 372956 - RNA, 19 nt, Artificial Sequence
  Description of Artificial Sequence: Synthetic oligonucleotide
cauaggcgcauuggaucac

SEQ ID NO: 372957 - RNA, 19 nt, Artificial Sequence
  Description of Artificial Sequence: Synthetic oligonucleotide
gggacauguaccgaauaaa

SEQ ID NO: 372958 - RNA, 19 nt, Artificial Sequence
  Description of Artificial Sequence: Synthetic oligonucleotide
gagguuagggagaggggcu

SEQ ID NO: 372959 - RNA, 19 nt, Artificial Sequence
  Description of Artificial Sequence: Synthetic oligonucleotide
caaaaggguagggaugcua

SEQ ID NO: 372960 - RNA, 19 nt, Artificial Sequence
  Description of Artificial Sequence: Synthetic oligonucleotide
gguaggcgcuggcauuaag

SEQ ID NO: 372961 - RNA, 19 nt, Artificial Sequence
  Description of Artificial Sequence: Synthetic oligonucleotide
cacgcagggacacuuaguu

SEQ ID NO: 372962 - RNA, 19 nt, Artificial Sequence
  Description of Artificial Sequence: Synthetic oligonucleotide
uugcucguauggcgacuuc

SEQ ID NO: 372963 - RNA, 19 nt, Artificial Sequence
  Description of Artificial Sequence: Synthetic oligonucleotide
cacacuucccauaggggau

SEQ ID NO: 372964 - RNA, 19 nt, Artificial Sequence
  Description of Artificial Sequence: Synthetic oligonucleotide
ccggagcucaucacucagg

SEQ ID NO: 372965 - RNA, 19 nt, Artificial Sequence
  Description of Artificial Sequence: Synthetic oligonucleotide
gaauugcgcacaggcucca

SEQ ID NO: 372966 - RNA, 19 nt, Artificial Sequence
  Description of Artificial Sequence: Synthetic oligonucleotide
ggccaggucucuggaacgg

SEQ ID NO: 372967 - RNA, 19 nt, Artificial Sequence
  Description of Artificial Sequence: Synthetic oligonucleotide
ggacauguaccgaauaaau

SEQ ID NO: 372968 - RNA, 19 nt, Artificial Sequence
  Description of Artificial Sequence: Synthetic oligonucleotide
cagcucgagguugucugug

SEQ ID NO: 372969 - RNA, 19 nt, Artificial Sequence
  Description of Artificial Sequence: Synthetic oligonucleotide
cagcgggccccauggguac

SEQ ID NO: 372970 - RNA, 19 nt, Artificial Sequence
  Description of Artificial Sequence: Synthetic oligonucleotide
guacagggugaugggcaug

SEQ ID NO: 372971 - RNA, 19 nt, Artificial Sequence
  Description of Artificial Sequence: Synthetic oligonucleotide
guauggcgacuuccuucug

SEQ ID NO: 372972 - RNA, 19 nt, Artificial Sequence
  Description of Artificial Sequence: Synthetic oligonucleotide
gccccauuuggaguguccc

SEQ ID NO: 372973 - RNA, 19 nt, Artificial Sequence
  Description of Artificial Sequence: Synthetic oligonucleotide
cggcauucacucugcagcc

SEQ ID NO: 372974 - RNA, 19 nt, Artificial Sequence
  Description of Artificial Sequence: Synthetic oligonucleotide
gcagggacacuuaguuacc

SEQ ID NO: 372975 - RNA, 19 nt, Artificial Sequence
  Description of Artificial Sequence: Synthetic oligonucleotide
gaguggcgccugugcuggg

SEQ ID NO: 372976 - RNA, 19 nt, Artificial Sequence
  Description of Artificial Sequence: Synthetic oligonucleotide
agagcccggcucauacaug

SEQ ID NO: 372977 - RNA, 19 nt, Artificial Sequence
  Description of Artificial Sequence: Synthetic oligonucleotide
gcuacccaccaccacaggu

SEQ ID NO: 372978 - RNA, 19 nt, Artificial Sequence
  Description of Artificial Sequence: Synthetic oligonucleotide
ugcucuaggcaggggccau

SEQ ID NO: 372979 - RNA, 19 nt, Artificial Sequence
  Description of Artificial Sequence: Synthetic oligonucleotide
ggucccaggguguggguaa

SEQ ID NO: 372980 - RNA, 19 nt, Artificial Sequence
  Description of Artificial Sequence: Synthetic oligonucleotide
ggaccacagcugguaaccc

SEQ ID NO: 372981 - RNA, 19 nt, Artificial Sequence
  Description of Artificial Sequence: Synthetic oligonucleotide
cagagcccggcucauacau

SEQ ID NO: 372982 - RNA, 19 nt, Artificial Sequence
  Description of Artificial Sequence: Synthetic oligonucleotide
acacacguuggggccugug

SEQ ID NO: 372983 - RNA, 19 nt, Artificial Sequence
  Description of Artificial Sequence: Synthetic oligonucleotide
ccaaguggaggguccccac

SEQ ID NO: 372984 - RNA, 19 nt, Artificial Sequence
  Description of Artificial Sequence: Synthetic oligonucleotide
gcuuccagcgggccccaug

SEQ ID NO: 372985 - RNA, 19 nt, Artificial Sequence
  Description of Artificial Sequence: Synthetic oligonucleotide
gccacacuaucguagucgu

SEQ ID NO: 372986 - RNA, 19 nt, Artificial Sequence
  Description of Artificial Sequence: Synthetic oligonucleotide
gccuugcagagguuaggga

SEQ ID NO: 372987 - RNA, 19 nt, Artificial Sequence
  Description of Artificial Sequence: Synthetic oligonucleotide
cucccauggccagugaggu

SEQ ID NO: 372988 - RNA, 19 nt, Artificial Sequence
  Description of Artificial Sequence: Synthetic oligonucleotide
guuguuccgaguggcgccu

SEQ ID NO: 372989 - RNA, 19 nt, Artificial Sequence
  Description of Artificial Sequence: Synthetic oligonucleotide
cuggagccguguggugagg

SEQ ID NO: 372990 - RNA, 19 nt, Artificial Sequence
  Description of Artificial Sequence: Synthetic oligonucleotide
cuuuggcucugugcagaca

SEQ ID NO: 372991 - RNA, 19 nt, Artificial Sequence
  Description of Artificial Sequence: Synthetic oligonucleotide
agcgggccccauggguacg

SEQ ID NO: 372992 - RNA, 19 nt, Artificial Sequence
  Description of Artificial Sequence: Synthetic oligonucleotide
uggcgccugugcugggcaa

SEQ ID NO: 372993 - RNA, 19 nt, Artificial Sequence
  Description of Artificial Sequence: Synthetic oligonucleotide
caguagggacauguaccga

SEQ ID NO: 372994 - RNA, 19 nt, Artificial Sequence
  Description of Artificial Sequence: Synthetic oligonucleotide
ggugaugggcauggaaugu

SEQ ID NO: 372995 - RNA, 19 nt, Artificial Sequence
  Description of Artificial Sequence: Synthetic oligonucleotide
cauggcgugagagcuugcu

SEQ ID NO: 372996 - RNA, 19 nt, Artificial Sequence
  Description of Artificial Sequence: Synthetic oligonucleotide
ggcauuaagcagccgcaau

SEQ ID NO: 372997 - RNA, 19 nt, Artificial Sequence
  Description of Artificial Sequence: Synthetic oligonucleotide
cauucacucugcagccggu

SEQ ID NO: 372998 - RNA, 19 nt, Artificial Sequence
  Description of Artificial Sequence: Synthetic oligonucleotide
gugcguggggacgcccgag

SEQ ID NO: 372999 - RNA, 19 nt, Artificial Sequence
  Description of Artificial Sequence: Synthetic oligonucleotide
gacgcccgagggucuaggu

SEQ ID NO: 373000 - RNA, 19 nt, Artificial Sequence
  Description of Artificial Sequence: Synthetic oligonucleotide
cccauggguacguguucug

SEQ ID NO: 373001 - RNA, 19 nt, Artificial Sequence
  Description of Artificial Sequence: Synthetic oligonucleotide
acacacgucuugacagcua

SEQ ID NO: 373002 - RNA, 19 nt, Artificial Sequence
  Description of Artificial Sequence: Synthetic oligonucleotide
ugcuccuagcacgguuguu

SEQ ID NO: 373003 - RNA, 19 nt, Artificial Sequence
  Description of Artificial Sequence: Synthetic oligonucleotide
cguauggcgacuuccuucu

SEQ ID NO: 373004 - RNA, 19 nt, Artificial Sequence
  Description of Artificial Sequence: Synthetic oligonucleotide
ccacacuaucguagucgug

SEQ ID NO: 373005 - RNA, 19 nt, Artificial Sequence
  Description of Artificial Sequence: Synthetic oligonucleotide
cuucgucagaagccacacu

SEQ ID NO: 373006 - RNA, 19 nt, Artificial Sequence
  Description of Artificial Sequence: Synthetic oligonucleotide
gcccugacggcugccgaag

SEQ ID NO: 373007 - RNA, 19 nt, Artificial Sequence
  Description of Artificial Sequence: Synthetic oligonucleotide
gcccgcaauaguuccugaa

SEQ ID NO: 373008 - RNA, 19 nt, Artificial Sequence
  Description of Artificial Sequence: Synthetic oligonucleotide
cgauaaaggccaguaggga

SEQ ID NO: 373009 - RNA, 19 nt, Artificial Sequence
  Description of Artificial Sequence: Synthetic oligonucleotide
cacuugugccaguggcucu

SEQ ID NO: 373010 - RNA, 19 nt, Artificial Sequence
  Description of Artificial Sequence: Synthetic oligonucleotide
gucaaugccuugccaccuu

SEQ ID NO: 373011 - RNA, 19 nt, Artificial Sequence
  Description of Artificial Sequence: Synthetic oligonucleotide
ggcgugagagcuugcucgu

SEQ ID NO: 373012 - RNA, 19 nt, Artificial Sequence
  Description of Artificial Sequence: Synthetic oligonucleotide
gcgcuggcauuaagcagcc

SEQ ID NO: 373013 - RNA, 19 nt, Artificial Sequence
  Description of Artificial Sequence: Synthetic oligonucleotide
ggcucgguccccaggugca

SEQ ID NO: 373014 - RNA, 19 nt, Artificial Sequence
  Description of Artificial Sequence: Synthetic oligonucleotide
gccccauggguacguguuc

SEQ ID NO: 373015 - RNA, 19 nt, Artificial Sequence
  Description of Artificial Sequence: Synthetic oligonucleotide
cuugcucguauggcgacuu

SEQ ID NO: 373016 - RNA, 19 nt, Artificial Sequence
  Description of Artificial Sequence: Synthetic oligonucleotide
ucccugcgaugggugcuuc

SEQ ID NO: 373017 - RNA, 19 nt, Artificial Sequence
  Description of Artificial Sequence: Synthetic oligonucleotide
cccugcgaugggugcuucc

SEQ ID NO: 373018 - RNA, 19 nt, Artificial Sequence
  Description of Artificial Sequence: Synthetic oligonucleotide
gcucguauggcgacuuccu

SEQ ID NO: 373019 - RNA, 19 nt, Artificial Sequence
  Description of Artificial Sequence: Synthetic oligonucleotide
ccuugagacuccuguacau

SEQ ID NO: 373020 - RNA, 19 nt, Artificial Sequence
  Description of Artificial Sequence: Synthetic oligonucleotide
cucguauggcgacuuccuu

SEQ ID NO: 373021 - RNA, 19 nt, Artificial Sequence
  Description of Artificial Sequence: Synthetic oligonucleotide
agcccggcucauacaugga

SEQ ID NO: 373022 - RNA, 19 nt, Artificial Sequence
  Description of Artificial Sequence: Synthetic oligonucleotide
gcacacacguuggggccug

SEQ ID NO: 373023 - RNA, 19 nt, Artificial Sequence
  Description of Artificial Sequence: Synthetic oligonucleotide
gcggcacuaagggcacuug

SEQ ID NO: 373024 - RNA, 19 nt, Artificial Sequence
  Description of Artificial Sequence: Synthetic oligonucleotide
ccagcgggccccaugggua

SEQ ID NO: 373025 - RNA, 19 nt, Artificial Sequence
  Description of Artificial Sequence: Synthetic oligonucleotide
gcggucccugcgaugggug

SEQ ID NO: 373026 - RNA, 19 nt, Artificial Sequence
  Description of Artificial Sequence: Synthetic oligonucleotide
cccgcaauaguuccugaau

SEQ ID NO: 373027 - RNA, 19 nt, Artificial Sequence
  Description of Artificial Sequence: Synthetic oligonucleotide
ggguacguguucugcccgu

SEQ ID NO: 373028 - RNA, 19 nt, Artificial Sequence
  Description of Artificial Sequence: Synthetic oligonucleotide
ggccuggcggucccugcga

SEQ ID NO: 373029 - RNA, 19 nt, Artificial Sequence
  Description of Artificial Sequence: Synthetic oligonucleotide
cgcccgagggucuaggucu

SEQ ID NO: 373030 - RNA, 19 nt, Artificial Sequence
  Description of Artificial Sequence: Synthetic oligonucleotide
ggauccgauaaaggccagu

SEQ ID NO: 373031 - RNA, 19 nt, Artificial Sequence
  Description of Artificial Sequence: Synthetic oligonucleotide
gcgcauuggaucaccugcu

SEQ ID NO: 373032 - RNA, 19 nt, Artificial Sequence
  Description of Artificial Sequence: Synthetic oligonucleotide
cggauccgauaaaggccag

SEQ ID NO: 373033 - RNA, 19 nt, Artificial Sequence
  Description of Artificial Sequence: Synthetic oligonucleotide
aggcacgcagggacacuua

SEQ ID NO: 373034 - RNA, 19 nt, Artificial Sequence
  Description of Artificial Sequence: Synthetic oligonucleotide
gggacgcccgagggucuag

SEQ ID NO: 373035 - RNA, 19 nt, Artificial Sequence
  Description of Artificial Sequence: Synthetic oligonucleotide
gcucgguccccaggugcac

SEQ ID NO: 373036 - RNA, 19 nt, Artificial Sequence
  Description of Artificial Sequence: Synthetic oligonucleotide
ggccccauggguacguguu

SEQ ID NO: 373037 - RNA, 19 nt, Artificial Sequence
  Description of Artificial Sequence: Synthetic oligonucleotide
gcuugcucguauggcgacu

SEQ ID NO: 373038 - RNA, 19 nt, Artificial Sequence
  Description of Artificial Sequence: Synthetic oligonucleotide
cgugagagcuugcucguau

SEQ ID NO: 373039 - RNA, 19 nt, Artificial Sequence
  Description of Artificial Sequence: Synthetic oligonucleotide
cccgagggucuaggucucc

SEQ ID NO: 373040 - RNA, 19 nt, Artificial Sequence
  Description of Artificial Sequence: Synthetic oligonucleotide
ggcggucccugcgaugggu

SEQ ID NO: 373041 - RNA, 19 nt, Artificial Sequence
  Description of Artificial Sequence: Synthetic oligonucleotide
ccgguaggcgcuggcauua

SEQ ID NO: 373042 - RNA, 19 nt, Artificial Sequence
  Description of Artificial Sequence: Synthetic oligonucleotide
gucccugcgaugggugcuu

SEQ ID NO: 373043 - RNA, 19 nt, Artificial Sequence
  Description of Artificial Sequence: Synthetic oligonucleotide
gcugccgaagcugcagguu

SEQ ID NO: 373044 - RNA, 19 nt, Artificial Sequence
  Description of Artificial Sequence: Synthetic oligonucleotide
ccccauggguacguguucu

SEQ ID NO: 373045 - RNA, 19 nt, Artificial Sequence
  Description of Artificial Sequence: Synthetic oligonucleotide
gcaagggcuccuggucugu

SEQ ID NO: 373046 - RNA, 19 nt, Artificial Sequence
  Description of Artificial Sequence: Synthetic oligonucleotide
gcgugagagcuugcucgua

SEQ ID NO: 373047 - RNA, 19 nt, Artificial Sequence
  Description of Artificial Sequence: Synthetic oligonucleotide
cggcacuaagggcacuugu

SEQ ID NO: 373048 - RNA, 19 nt, Artificial Sequence
  Description of Artificial Sequence: Synthetic oligonucleotide
ccgagggucuaggucuccu

SEQ ID NO: 373049 - RNA, 19 nt, Artificial Sequence
  Description of Artificial Sequence: Synthetic oligonucleotide
cacacacguuggggccugu

SEQ ID NO: 373050 - RNA, 19 nt, Artificial Sequence
  Description of Artificial Sequence: Synthetic oligonucleotide
gcgggccccauggguacgu

SEQ ID NO: 373051 - RNA, 19 nt, Artificial Sequence
  Description of Artificial Sequence: Synthetic oligonucleotide
cgagggucuaggucuccuu

SEQ ID NO: 373052 - RNA, 19 nt, Artificial Sequence
  Description of Artificial Sequence: Synthetic oligonucleotide
cguguucugcccguucauu

SEQ ID NO: 373053 - RNA, 19 nt, Artificial Sequence
  Description of Artificial Sequence: Synthetic oligonucleotide
cgguaggcgcuggcauuaa

SEQ ID NO: 373054 - RNA, 19 nt, Artificial Sequence
  Description of Artificial Sequence: Synthetic oligonucleotide
ccguguggugaggcucggu

SEQ ID NO: 373055 - RNA, 19 nt, Artificial Sequence
  Description of Artificial Sequence: Synthetic oligonucleotide
agacauuuaaauuaggugc

SEQ ID NO: 373056 - RNA, 19 nt, Artificial Sequence
  Description of Artificial Sequence: Synthetic oligonucleotide
  modified_base (12)..(12): a, c, u, g, unknown or other
aacuauggaaunuaaacac

SEQ ID NO: 373057 - RNA, 19 nt, Artificial Sequence
  Description of Artificial Sequence: Synthetic oligonucleotide
  modified_base (4)..(4): a, c, u, g, unknown or other
aaunuaaacacacaacaca

SEQ ID NO: 373058 - RNA, 19 nt, Artificial Sequence
  Description of Artificial Sequence: Synthetic oligonucleotide
agaauugugucuuuguggc

SEQ ID NO: 373059 - RNA, 19 nt, Artificial Sequence
  Description of Artificial Sequence: Synthetic oligonucleotide
uguauuacaagcuuuguac

SEQ ID NO: 373060 - RNA, 19 nt, Artificial Sequence
  Description of Artificial Sequence: Synthetic oligonucleotide
aauuaggugcuguaucacc

SEQ ID NO: 373061 - RNA, 19 nt, Artificial Sequence
  Description of Artificial Sequence: Synthetic oligonucleotide
gaccaauugauguauaagg

SEQ ID NO: 373062 - RNA, 19 nt, Artificial Sequence
  Description of Artificial Sequence: Synthetic oligonucleotide
aacaauuagaagucuagug

SEQ ID NO: 373063 - RNA, 19 nt, Artificial Sequence
  Description of Artificial Sequence: Synthetic oligonucleotide
aacagagucacccuuacca

SEQ ID NO: 373064 - RNA, 19 nt, Artificial Sequence
  Description of Artificial Sequence: Synthetic oligonucleotide
aguaaaggcacaaugaacg

SEQ ID NO: 373065 - RNA, 19 nt, Artificial Sequence
  Description of Artificial Sequence: Synthetic oligonucleotide
ugaguaauggcagacaggg

SEQ ID NO: 373066 - RNA, 19 nt, Artificial Sequence
  Description of Artificial Sequence: Synthetic oligonucleotide
ucucuauacacuuugauaa

SEQ ID NO: 373067 - RNA, 19 nt, Artificial Sequence
  Description of Artificial Sequence: Synthetic oligonucleotide
aaugcuuagagucuagggu

SEQ ID NO: 373068 - RNA, 19 nt, Artificial Sequence
  Description of Artificial Sequence: Synthetic oligonucleotide
uaucgaaguacuuuggucc

SEQ ID NO: 373069 - RNA, 19 nt, Artificial Sequence
  Description of Artificial Sequence: Synthetic oligonucleotide
ugguccaggagauaaaugg

SEQ ID NO: 373070 - RNA, 19 nt, Artificial Sequence
  Description of Artificial Sequence: Synthetic oligonucleotide
aauuauaguggccucccuc

SEQ ID NO: 373071 - RNA, 19 nt, Artificial Sequence
  Description of Artificial Sequence: Synthetic oligonucleotide
aguugaguggaaccgaacc

SEQ ID NO: 373072 - RNA, 19 nt, Artificial Sequence
  Description of Artificial Sequence: Synthetic oligonucleotide
cacuagauuagaaaggucc

SEQ ID NO: 373073 - RNA, 19 nt, Artificial Sequence
  Description of Artificial Sequence: Synthetic oligonucleotide
  modified_base (16)..(16): a, c, u, g, unknown or other
uuaaucacuucucugnaaa

SEQ ID NO: 373074 - RNA, 19 nt, Artificial Sequence
  Description of Artificial Sequence: Synthetic oligonucleotide
ugcuguaucaccaacaaua

SEQ ID NO: 373075 - RNA, 19 nt, Artificial Sequence
  Description of Artificial Sequence: Synthetic oligonucleotide
auaacaaggcaccuuuccc

SEQ ID NO: 373076 - RNA, 19 nt, Artificial Sequence
  Description of Artificial Sequence: Synthetic oligonucleotide
uccuauuaggggaaaaucc

SEQ ID NO: 373077 - RNA, 19 nt, Artificial Sequence
  Description of Artificial Sequence: Synthetic oligonucleotide
ucuauggccacuuccgucg

SEQ ID NO: 373078 - RNA, 19 nt, Artificial Sequence
  Description of Artificial Sequence: Synthetic oligonucleotide
ucuagugacaucuaaucac

SEQ ID NO: 373079 - RNA, 19 nt, Artificial Sequence
  Description of Artificial Sequence: Synthetic oligonucleotide
  modified_base (7)..(7): a, c, u, g, unknown or other
uggaaunuaaacacacaac

SEQ ID NO: 373080 - RNA, 19 nt, Artificial Sequence
  Description of Artificial Sequence: Synthetic oligonucleotide
gaucaggagaauuaaaaca

SEQ ID NO: 373081 - RNA, 19 nt, Artificial Sequence
  Description of Artificial Sequence: Synthetic oligonucleotide
ucuuugauucaguaagggg

SEQ ID NO: 373082 - RNA, 19 nt, Artificial Sequence
  Description of Artificial Sequence: Synthetic oligonucleotide
agucuagugacaucuaauc

SEQ ID NO: 373083 - RNA, 19 nt, Artificial Sequence
  Description of Artificial Sequence: Synthetic oligonucleotide
guuaaaugguuguuguugg

SEQ ID NO: 373084 - RNA, 19 nt, Artificial Sequence
  Description of Artificial Sequence: Synthetic oligonucleotide
cuaguguuuccuauuaggg

SEQ ID NO: 373085 - RNA, 19 nt, Artificial Sequence
  Description of Artificial Sequence: Synthetic oligonucleotide
caguauagugcuaucaggg

SEQ ID NO: 373086 - RNA, 19 nt, Artificial Sequence
  Description of Artificial Sequence: Synthetic oligonucleotide
uauagugcuaucaggggcc

SEQ ID NO: 373087 - RNA, 19 nt, Artificial Sequence
  Description of Artificial Sequence: Synthetic oligonucleotide
auucccuaaauuugggugg

SEQ ID NO: 373088 - RNA, 19 nt, Artificial Sequence
  Description of Artificial Sequence: Synthetic oligonucleotide
acgacauuaaucccaguac

SEQ ID NO: 373089 - RNA, 19 nt, Artificial Sequence
  Description of Artificial Sequence: Synthetic oligonucleotide
aauaucgaaguacuuuggu

SEQ ID NO: 373090 - RNA, 19 nt, Artificial Sequence
  Description of Artificial Sequence: Synthetic oligonucleotide
auaucgaaguacuuugguc

SEQ ID NO: 373091 - RNA, 19 nt, Artificial Sequence
  Description of Artificial Sequence: Synthetic oligonucleotide
  modified_base (6)..(6): a, c, u, g, unknown or other
ggaaunuaaacacacaaca

SEQ ID NO: 373092 - RNA, 19 nt, Artificial Sequence
  Description of Artificial Sequence: Synthetic oligonucleotide
auauacacgguaauaaauc

SEQ ID NO: 373093 - RNA, 19 nt, Artificial Sequence
  Description of Artificial Sequence: Synthetic oligonucleotide
  modified_base (17)..(17): a, c, u, g, unknown or other
uacacgguaauaaaucngu

SEQ ID NO: 373094 - RNA, 19 nt, Artificial Sequence
  Description of Artificial Sequence: Synthetic oligonucleotide
aguuaagcccaccuucacc

SEQ ID NO: 373095 - RNA, 19 nt, Artificial Sequence
  Description of Artificial Sequence: Synthetic oligonucleotide
uuugauaacauuguacaaa

SEQ ID NO: 373096 - RNA, 19 nt, Artificial Sequence
  Description of Artificial Sequence: Synthetic oligonucleotide
aaagacuggccacuugguc

SEQ ID NO: 373097 - RNA, 19 nt, Artificial Sequence
  Description of Artificial Sequence: Synthetic oligonucleotide
agaaagaagggcccuagag

SEQ ID NO: 373098 - RNA, 19 nt, Artificial Sequence
  Description of Artificial Sequence: Synthetic oligonucleotide
uguacgacauuaaucccag

SEQ ID NO: 373099 - RNA, 19 nt, Artificial Sequence
  Description of Artificial Sequence: Synthetic oligonucleotide
uugauaacauuguacaaaa

SEQ ID NO: 373100 - RNA, 19 nt, Artificial Sequence
  Description of Artificial Sequence: Synthetic oligonucleotide
gaacgaacaguggugaugg

SEQ ID NO: 373101 - RNA, 19 nt, Artificial Sequence
  Description of Artificial Sequence: Synthetic oligonucleotide
acaguauagugcuaucagg

SEQ ID NO: 373102 - RNA, 19 nt, Artificial Sequence
  Description of Artificial Sequence: Synthetic oligonucleotide
aguggaaccgaacccuucc

SEQ ID NO: 373103 - RNA, 19 nt, Artificial Sequence
  Description of Artificial Sequence: Synthetic oligonucleotide
  modified_base (14)..(14): a, c, u, g, unknown or other
acgguaauaaaucnguuuu

SEQ ID NO: 373104 - RNA, 19 nt, Artificial Sequence
  Description of Artificial Sequence: Synthetic oligonucleotide
uguagcacaucuauuuaca

SEQ ID NO: 373105 - RNA, 19 nt, Artificial Sequence
  Description of Artificial Sequence: Synthetic oligonucleotide
aguauagugcuaucagggg

SEQ ID NO: 373106 - RNA, 19 nt, Artificial Sequence
  Description of Artificial Sequence: Synthetic oligonucleotide
ucaguaaggggaaaucucu

SEQ ID NO: 373107 - RNA, 19 nt, Artificial Sequence
  Description of Artificial Sequence: Synthetic oligonucleotide
ugcucggugguucugaccc

SEQ ID NO: 373108 - RNA, 19 nt, Artificial Sequence
  Description of Artificial Sequence: Synthetic oligonucleotide
  modified_base (8)..(8): a, c, u, g, unknown or other
auggaaunuaaacacacaa

SEQ ID NO: 373109 - RNA, 19 nt, Artificial Sequence
  Description of Artificial Sequence: Synthetic oligonucleotide
cauagauggagcugggccg

SEQ ID NO: 373110 - RNA, 19 nt, Artificial Sequence
  Description of Artificial Sequence: Synthetic oligonucleotide
ucaguuaaaugguuguugu

SEQ ID NO: 373111 - RNA, 19 nt, Artificial Sequence
  Description of Artificial Sequence: Synthetic oligonucleotide
aauauacacgguaauaaau

SEQ ID NO: 373112 - RNA, 19 nt, Artificial Sequence
  Description of Artificial Sequence: Synthetic oligonucleotide
acuagauuagaaagguccc

SEQ ID NO: 373113 - RNA, 19 nt, Artificial Sequence
  Description of Artificial Sequence: Synthetic oligonucleotide
aguguacgacauuaauccc

SEQ ID NO: 373114 - RNA, 19 nt, Artificial Sequence
  Description of Artificial Sequence: Synthetic oligonucleotide
  modified_base (9)..(9): a, c, u, g, unknown or other
uauggaaunuaaacacaca

SEQ ID NO: 373115 - RNA, 19 nt, Artificial Sequence
  Description of Artificial Sequence: Synthetic oligonucleotide
  modified_base (5)..(5): a, c, u, g, unknown or other
gaaunuaaacacacaacac

SEQ ID NO: 373116 - RNA, 19 nt, Artificial Sequence
  Description of Artificial Sequence: Synthetic oligonucleotide
aaauuaggugcuguaucac

SEQ ID NO: 373117 - RNA, 19 nt, Artificial Sequence
  Description of Artificial Sequence: Synthetic oligonucleotide
ucuaaucacugccuguccc

SEQ ID NO: 373118 - RNA, 19 nt, Artificial Sequence
  Description of Artificial Sequence: Synthetic oligonucleotide
cuauguuccacuagauuag

SEQ ID NO: 373119 - RNA, 19 nt, Artificial Sequence
  Description of Artificial Sequence: Synthetic oligonucleotide
cauucccuaaauuugggug

SEQ ID NO: 373120 - RNA, 19 nt, Artificial Sequence
  Description of Artificial Sequence: Synthetic oligonucleotide
  modified_base (5)..(5): a, c, u, g, unknown or other
ucugnaaaccccucccugc

SEQ ID NO: 373121 - RNA, 19 nt, Artificial Sequence
  Description of Artificial Sequence: Synthetic oligonucleotide
uuaaaugguuguuguuggg

SEQ ID NO: 373122 - RNA, 19 nt, Artificial Sequence
  Description of Artificial Sequence: Synthetic oligonucleotide
aucaacucccauuuagaag

SEQ ID NO: 373123 - RNA, 19 nt, Artificial Sequence
  Description of Artificial Sequence: Synthetic oligonucleotide
cauaacaaggcaccuuucc

SEQ ID NO: 373124 - RNA, 19 nt, Artificial Sequence
  Description of Artificial Sequence: Synthetic oligonucleotide
cauugcaaaaucagaggcc

SEQ ID NO: 373125 - RNA, 19 nt, Artificial Sequence
  Description of Artificial Sequence: Synthetic oligonucleotide
aaguuaagcccaccuucac

SEQ ID NO: 373126 - RNA, 19 nt, Artificial Sequence
  Description of Artificial Sequence: Synthetic oligonucleotide
agacuggccacuugguccc

SEQ ID NO: 373127 - RNA, 19 nt, Artificial Sequence
  Description of Artificial Sequence: Synthetic oligonucleotide
uauuaggggaaaaucccac

SEQ ID NO: 373128 - RNA, 19 nt, Artificial Sequence
  Description of Artificial Sequence: Synthetic oligonucleotide
ggaauaucgaaguacuuug

SEQ ID NO: 373129 - RNA, 19 nt, Artificial Sequence
  Description of Artificial Sequence: Synthetic oligonucleotide
guauagugcuaucaggggc

SEQ ID NO: 373130 - RNA, 19 nt, Artificial Sequence
  Description of Artificial Sequence: Synthetic oligonucleotide
uacgacauuaaucccagua

SEQ ID NO: 373131 - RNA, 19 nt, Artificial Sequence
  Description of Artificial Sequence: Synthetic oligonucleotide
uguuuaagaaaugagucuu

SEQ ID NO: 373132 - RNA, 19 nt, Artificial Sequence
  Description of Artificial Sequence: Synthetic oligonucleotide
ggugcaaggccucugacgg

SEQ ID NO: 373133 - RNA, 19 nt, Artificial Sequence
  Description of Artificial Sequence: Synthetic oligonucleotide
auuuggguggcuuaacaga

SEQ ID NO: 373134 - RNA, 19 nt, Artificial Sequence
  Description of Artificial Sequence: Synthetic oligonucleotide
  modified_base (8)..(8): a, c, u, g, unknown or other
uucucugnaaaccccuccc

SEQ ID NO: 373135 - RNA, 19 nt, Artificial Sequence
  Description of Artificial Sequence: Synthetic oligonucleotide
auaaauggcagaggguaac

SEQ ID NO: 373136 - RNA, 19 nt, Artificial Sequence
  Description of Artificial Sequence: Synthetic oligonucleotide
  modified_base (2)..(2): a, c, u, g, unknown or other
unuaaacacacaacacauc

SEQ ID NO: 373137 - RNA, 19 nt, Artificial Sequence
  Description of Artificial Sequence: Synthetic oligonucleotide
  modified_base (3)..(3): a, c, u, g, unknown or other
aunuaaacacacaacacau

SEQ ID NO: 373138 - RNA, 19 nt, Artificial Sequence
  Description of Artificial Sequence: Synthetic oligonucleotide
uggcuuaacagagucaccc

SEQ ID NO: 373139 - RNA, 19 nt, Artificial Sequence
  Description of Artificial Sequence: Synthetic oligonucleotide
guuaagcccaccuucacca

SEQ ID NO: 373140 - RNA, 19 nt, Artificial Sequence
  Description of Artificial Sequence: Synthetic oligonucleotide
uucaguaaggggaaaucuc

SEQ ID NO: 373141 - RNA, 19 nt, Artificial Sequence
  Description of Artificial Sequence: Synthetic oligonucleotide
gauuagaaaggucccuaug

SEQ ID NO: 373142 - RNA, 19 nt, Artificial Sequence
  Description of Artificial Sequence: Synthetic oligonucleotide
aaaugguuguuguuggguu

SEQ ID NO: 373143 - RNA, 19 nt, Artificial Sequence
  Description of Artificial Sequence: Synthetic oligonucleotide
uuagccuauguuccacuag

SEQ ID NO: 373144 - RNA, 19 nt, Artificial Sequence
  Description of Artificial Sequence: Synthetic oligonucleotide
ugauaacauuguacaaaag

SEQ ID NO: 373145 - RNA, 19 nt, Artificial Sequence
  Description of Artificial Sequence: Synthetic oligonucleotide
aaugagucuuaaaagcaga

SEQ ID NO: 373146 - RNA, 19 nt, Artificial Sequence
  Description of Artificial Sequence: Synthetic oligonucleotide
aacuaggggacugaaguca

SEQ ID NO: 373147 - RNA, 19 nt, Artificial Sequence
  Description of Artificial Sequence: Synthetic oligonucleotide
gaguccauucaccauaaca

SEQ ID NO: 373148 - RNA, 19 nt, Artificial Sequence
  Description of Artificial Sequence: Synthetic oligonucleotide
agcagaauuauaguggccu

SEQ ID NO: 373149 - RNA, 19 nt, Artificial Sequence
  Description of Artificial Sequence: Synthetic oligonucleotide
accauuucggaccaugggu

SEQ ID NO: 373150 - RNA, 19 nt, Artificial Sequence
  Description of Artificial Sequence: Synthetic oligonucleotide
uccacuagauuagaaaggu

SEQ ID NO: 373151 - RNA, 19 nt, Artificial Sequence
  Description of Artificial Sequence: Synthetic oligonucleotide
accuggaauaucgaaguac

SEQ ID NO: 373152 - RNA, 19 nt, Artificial Sequence
  Description of Artificial Sequence: Synthetic oligonucleotide
uucugacccaugcauucgg

SEQ ID NO: 373153 - RNA, 19 nt, Artificial Sequence
  Description of Artificial Sequence: Synthetic oligonucleotide
guugaguggaaccgaaccc

SEQ ID NO: 373154 - RNA, 19 nt, Artificial Sequence
  Description of Artificial Sequence: Synthetic oligonucleotide
uaugaaccgggugugguag

SEQ ID NO: 373155 - RNA, 19 nt, Artificial Sequence
  Description of Artificial Sequence: Synthetic oligonucleotide
caauugauguauaaggcaa

SEQ ID NO: 373156 - RNA, 19 nt, Artificial Sequence
  Description of Artificial Sequence: Synthetic oligonucleotide
gaucugauauucacagggg

SEQ ID NO: 373157 - RNA, 19 nt, Artificial Sequence
  Description of Artificial Sequence: Synthetic oligonucleotide
cauucgguaaggugguggg

SEQ ID NO: 373158 - RNA, 19 nt, Artificial Sequence
  Description of Artificial Sequence: Synthetic oligonucleotide
uuugcagcugacuguaggu

SEQ ID NO: 373159 - RNA, 19 nt, Artificial Sequence
  Description of Artificial Sequence: Synthetic oligonucleotide
caagggaaauuuucagugc

SEQ ID NO: 373160 - RNA, 19 nt, Artificial Sequence
  Description of Artificial Sequence: Synthetic oligonucleotide
  modified_base (4)..(4): a, c, u, g, unknown or other
ugcncuugcagcccgccca

SEQ ID NO: 373161 - RNA, 19 nt, Artificial Sequence
  Description of Artificial Sequence: Synthetic oligonucleotide
  modified_base (7)..(7): a, c, u, g, unknown or other
ucucugnaaaccccucccu

SEQ ID NO: 373162 - RNA, 19 nt, Artificial Sequence
  Description of Artificial Sequence: Synthetic oligonucleotide
cuuuguggcagcucaggag

SEQ ID NO: 373163 - RNA, 19 nt, Artificial Sequence
  Description of Artificial Sequence: Synthetic oligonucleotide
uuugagacccuguugccaa

SEQ ID NO: 373164 - RNA, 19 nt, Artificial Sequence
  Description of Artificial Sequence: Synthetic oligonucleotide
uacuaguguuuccuauuag

SEQ ID NO: 373165 - RNA, 19 nt, Artificial Sequence
  Description of Artificial Sequence: Synthetic oligonucleotide
  modified_base (8)..(8): a, c, u, g, unknown or other
ucagugcncuugcagcccg

SEQ ID NO: 373166 - RNA, 19 nt, Artificial Sequence
  Description of Artificial Sequence: Synthetic oligonucleotide
acaccaaccuccuaaacua

SEQ ID NO: 373167 - RNA, 19 nt, Artificial Sequence
  Description of Artificial Sequence: Synthetic oligonucleotide
cuaucaggggccucugacg

SEQ ID NO: 373168 - RNA, 19 nt, Artificial Sequence
  Description of Artificial Sequence: Synthetic oligonucleotide
uaaaugguuguuguugggu

SEQ ID NO: 373169 - RNA, 19 nt, Artificial Sequence
  Description of Artificial Sequence: Synthetic oligonucleotide
ggugaguaauggcagacag

SEQ ID NO: 373170 - RNA, 19 nt, Artificial Sequence
  Description of Artificial Sequence: Synthetic oligonucleotide
agcccgcccaccuuaaaac

SEQ ID NO: 373171 - RNA, 19 nt, Artificial Sequence
  Description of Artificial Sequence: Synthetic oligonucleotide
ugccacacucccauaagca

SEQ ID NO: 373172 - RNA, 19 nt, Artificial Sequence
  Description of Artificial Sequence: Synthetic oligonucleotide
ucaacgugagaccacccaa

SEQ ID NO: 373173 - RNA, 19 nt, Artificial Sequence
  Description of Artificial Sequence: Synthetic oligonucleotide
ccuauuaggggaaaauccc

SEQ ID NO: 373174 - RNA, 19 nt, Artificial Sequence
  Description of Artificial Sequence: Synthetic oligonucleotide
uggggaacgaacaguggug

SEQ ID NO: 373175 - RNA, 19 nt, Artificial Sequence
  Description of Artificial Sequence: Synthetic oligonucleotide
aagcagaauuauaguggcc

SEQ ID NO: 373176 - RNA, 19 nt, Artificial Sequence
  Description of Artificial Sequence: Synthetic oligonucleotide
caaaaguacccuuccucag

SEQ ID NO: 373177 - RNA, 19 nt, Artificial Sequence
  Description of Artificial Sequence: Synthetic oligonucleotide
gaaaucuaacacaaguaaa

SEQ ID NO: 373178 - RNA, 19 nt, Artificial Sequence
  Description of Artificial Sequence: Synthetic oligonucleotide
uagagucuaggguugggga

SEQ ID NO: 373179 - RNA, 19 nt, Artificial Sequence
  Description of Artificial Sequence: Synthetic oligonucleotide
guagguuuggguuuccaga

SEQ ID NO: 373180 - RNA, 19 nt, Artificial Sequence
  Description of Artificial Sequence: Synthetic oligonucleotide
caggagauaaauggcagag

SEQ ID NO: 373181 - RNA, 19 nt, Artificial Sequence
  Description of Artificial Sequence: Synthetic oligonucleotide
uaaaccaaguuaagcccac

SEQ ID NO: 373182 - RNA, 19 nt, Artificial Sequence
  Description of Artificial Sequence: Synthetic oligonucleotide
gaaagaauccaaucaccaa

SEQ ID NO: 373183 - RNA, 19 nt, Artificial Sequence
  Description of Artificial Sequence: Synthetic oligonucleotide
aacacaaguaaaggcacaa

SEQ ID NO: 373184 - RNA, 19 nt, Artificial Sequence
  Description of Artificial Sequence: Synthetic oligonucleotide
uggaauaucgaaguacuuu

SEQ ID NO: 373185 - RNA, 19 nt, Artificial Sequence
  Description of Artificial Sequence: Synthetic oligonucleotide
agaccgaccacacaguaua

SEQ ID NO: 373186 - RNA, 19 nt, Artificial Sequence
  Description of Artificial Sequence: Synthetic oligonucleotide
acauccaucagcugggaua

SEQ ID NO: 373187 - RNA, 19 nt, Artificial Sequence
  Description of Artificial Sequence: Synthetic oligonucleotide
auuaggggaaaaucccaca

SEQ ID NO: 373188 - RNA, 19 nt, Artificial Sequence
  Description of Artificial Sequence: Synthetic oligonucleotide
ucugacgcccuacacucca

SEQ ID NO: 373189 - RNA, 19 nt, Artificial Sequence
  Description of Artificial Sequence: Synthetic oligonucleotide
  modified_base (2)..(2): a, c, u, g, unknown or other
gnaaaccccucccugcuuc

SEQ ID NO: 373190 - RNA, 19 nt, Artificial Sequence
  Description of Artificial Sequence: Synthetic oligonucleotide
cauccaucagcugggauag

SEQ ID NO: 373191 - RNA, 19 nt, Artificial Sequence
  Description of Artificial Sequence: Synthetic oligonucleotide
  modified_base (18)..(18): a, c, u, g, unknown or other
auacacgguaauaaaucng

SEQ ID NO: 373192 - RNA, 19 nt, Artificial Sequence
  Description of Artificial Sequence: Synthetic oligonucleotide
uauaguggccucccucucu

SEQ ID NO: 373193 - RNA, 19 nt, Artificial Sequence
  Description of Artificial Sequence: Synthetic oligonucleotide
aaccgaacccuuccuucag

SEQ ID NO: 373194 - RNA, 19 nt, Artificial Sequence
  Description of Artificial Sequence: Synthetic oligonucleotide
  modified_base (9)..(9): a, c, u, g, unknown or other
cuucucugnaaaccccucc

SEQ ID NO: 373195 - RNA, 19 nt, Artificial Sequence
  Description of Artificial Sequence: Synthetic oligonucleotide
gacccaugcauucgguaag

SEQ ID NO: 373196 - RNA, 19 nt, Artificial Sequence
  Description of Artificial Sequence: Synthetic oligonucleotide
aggcugugaaaaugguagg

SEQ ID NO: 373197 - RNA, 19 nt, Artificial Sequence
  Description of Artificial Sequence: Synthetic oligonucleotide
auuaggugcuguaucacca

SEQ ID NO: 373198 - RNA, 19 nt, Artificial Sequence
  Description of Artificial Sequence: Synthetic oligonucleotide
aucgaaguacuuuggucca

SEQ ID NO: 373199 - RNA, 19 nt, Artificial Sequence
  Description of Artificial Sequence: Synthetic oligonucleotide
uuuccuauuaggggaaaau

SEQ ID NO: 373200 - RNA, 19 nt, Artificial Sequence
  Description of Artificial Sequence: Synthetic oligonucleotide
cugcuucacaaaaguaccc

SEQ ID NO: 373201 - RNA, 19 nt, Artificial Sequence
  Description of Artificial Sequence: Synthetic oligonucleotide
  modified_base (11)..(11): a, c, u, g, unknown or other
acuauggaaunuaaacaca

SEQ ID NO: 373202 - RNA, 19 nt, Artificial Sequence
  Description of Artificial Sequence: Synthetic oligonucleotide
aauugauguauaaggcaaa

SEQ ID NO: 373203 - RNA, 19 nt, Artificial Sequence
  Description of Artificial Sequence: Synthetic oligonucleotide
cuauuaggggaaaauccca

SEQ ID NO: 373204 - RNA, 19 nt, Artificial Sequence
  Description of Artificial Sequence: Synthetic oligonucleotide
caucccuggcaccauuucg

SEQ ID NO: 373205 - RNA, 19 nt, Artificial Sequence
  Description of Artificial Sequence: Synthetic oligonucleotide
uggugacuagagaaaggga

SEQ ID NO: 373206 - RNA, 19 nt, Artificial Sequence
  Description of Artificial Sequence: Synthetic oligonucleotide
ugauuugcagcugacugua

SEQ ID NO: 373207 - RNA, 19 nt, Artificial Sequence
  Description of Artificial Sequence: Synthetic oligonucleotide
agcugcgguaaauccacag

SEQ ID NO: 373208 - RNA, 19 nt, Artificial Sequence
  Description of Artificial Sequence: Synthetic oligonucleotide
  modified_base (15)..(15): a, c, u, g, unknown or other
cuaaacuauggaaunuaaa

SEQ ID NO: 373209 - RNA, 19 nt, Artificial Sequence
  Description of Artificial Sequence: Synthetic oligonucleotide
agcuuuguacaacaucaaa

SEQ ID NO: 373210 - RNA, 19 nt, Artificial Sequence
  Description of Artificial Sequence: Synthetic oligonucleotide
ugcgguaaauccacaggaa

SEQ ID NO: 373211 - RNA, 19 nt, Artificial Sequence
  Description of Artificial Sequence: Synthetic oligonucleotide
aggagauaaauggcagagg

SEQ ID NO: 373212 - RNA, 19 nt, Artificial Sequence
  Description of Artificial Sequence: Synthetic oligonucleotide
gaacuaggggacugaaguc

SEQ ID NO: 373213 - RNA, 19 nt, Artificial Sequence
  Description of Artificial Sequence: Synthetic oligonucleotide
aagccucaacgugagacca

SEQ ID NO: 373214 - RNA, 19 nt, Artificial Sequence
  Description of Artificial Sequence: Synthetic oligonucleotide
aagucuagugacaucuaau

SEQ ID NO: 373215 - RNA, 19 nt, Artificial Sequence
  Description of Artificial Sequence: Synthetic oligonucleotide
aggguaacacccaauaaau

SEQ ID NO: 373216 - RNA, 19 nt, Artificial Sequence
  Description of Artificial Sequence: Synthetic oligonucleotide
caaguuaagcccaccuuca

SEQ ID NO: 373217 - RNA, 19 nt, Artificial Sequence
  Description of Artificial Sequence: Synthetic oligonucleotide
ccaaccuccuaaacuaugg

SEQ ID NO: 373218 - RNA, 19 nt, Artificial Sequence
  Description of Artificial Sequence: Synthetic oligonucleotide
  modified_base (6)..(6): a, c, u, g, unknown or other
cucugnaaaccccucccug

SEQ ID NO: 373219 - RNA, 19 nt, Artificial Sequence
  Description of Artificial Sequence: Synthetic oligonucleotide
caccauuucggaccauggg

SEQ ID NO: 373220 - RNA, 19 nt, Artificial Sequence
  Description of Artificial Sequence: Synthetic oligonucleotide
auuggguaccccaggcggc

SEQ ID NO: 373221 - RNA, 19 nt, Artificial Sequence
  Description of Artificial Sequence: Synthetic oligonucleotide
uuagaagucuagugacauc

SEQ ID NO: 373222 - RNA, 19 nt, Artificial Sequence
  Description of Artificial Sequence: Synthetic oligonucleotide
caagugaucaggagaauua

SEQ ID NO: 373223 - RNA, 19 nt, Artificial Sequence
  Description of Artificial Sequence: Synthetic oligonucleotide
augcacagauccuuagccu

SEQ ID NO: 373224 - RNA, 19 nt, Artificial Sequence
  Description of Artificial Sequence: Synthetic oligonucleotide
guaggacaguaagaaacag

SEQ ID NO: 373225 - RNA, 19 nt, Artificial Sequence
  Description of Artificial Sequence: Synthetic oligonucleotide
ucucuauggccacuuccgu

SEQ ID NO: 373226 - RNA, 19 nt, Artificial Sequence
  Description of Artificial Sequence: Synthetic oligonucleotide
acuaggggacugaagucac

SEQ ID NO: 373227 - RNA, 19 nt, Artificial Sequence
  Description of Artificial Sequence: Synthetic oligonucleotide
uggaggaucacagucccau

SEQ ID NO: 373228 - RNA, 19 nt, Artificial Sequence
  Description of Artificial Sequence: Synthetic oligonucleotide
uuaagcccaccuucaccag

SEQ ID NO: 373229 - RNA, 19 nt, Artificial Sequence
  Description of Artificial Sequence: Synthetic oligonucleotide
guaacacccaauaaauaaa

SEQ ID NO: 373230 - RNA, 19 nt, Artificial Sequence
  Description of Artificial Sequence: Synthetic oligonucleotide
gguggcuuaacagagucac

SEQ ID NO: 373231 - RNA, 19 nt, Artificial Sequence
  Description of Artificial Sequence: Synthetic oligonucleotide
cuacacuccacccacccca

SEQ ID NO: 373232 - RNA, 19 nt, Artificial Sequence
  Description of Artificial Sequence: Synthetic oligonucleotide
acacaguauagugcuauca

SEQ ID NO: 373233 - RNA, 19 nt, Artificial Sequence
  Description of Artificial Sequence: Synthetic oligonucleotide
ugauucaguaaggggaaau

SEQ ID NO: 373234 - RNA, 19 nt, Artificial Sequence
  Description of Artificial Sequence: Synthetic oligonucleotide
acaaggcaccuuucccugg

SEQ ID NO: 373235 - RNA, 19 nt, Artificial Sequence
  Description of Artificial Sequence: Synthetic oligonucleotide
gugaguaauggcagacagg

SEQ ID NO: 373236 - RNA, 19 nt, Artificial Sequence
  Description of Artificial Sequence: Synthetic oligonucleotide
aggaccaauugauguauaa

SEQ ID NO: 373237 - RNA, 19 nt, Artificial Sequence
  Description of Artificial Sequence: Synthetic oligonucleotide
gacccuguugccaacagaa

SEQ ID NO: 373238 - RNA, 19 nt, Artificial Sequence
  Description of Artificial Sequence: Synthetic oligonucleotide
cugcgguaaauccacagga

SEQ ID NO: 373239 - RNA, 19 nt, Artificial Sequence
  Description of Artificial Sequence: Synthetic oligonucleotide
uugagggcccauuggguac

SEQ ID NO: 373240 - RNA, 19 nt, Artificial Sequence
  Description of Artificial Sequence: Synthetic oligonucleotide
agaggguaacacccaauaa

SEQ ID NO: 373241 - RNA, 19 nt, Artificial Sequence
  Description of Artificial Sequence: Synthetic oligonucleotide
uaaauuuggguggcuuaac

SEQ ID NO: 373242 - RNA, 19 nt, Artificial Sequence
  Description of Artificial Sequence: Synthetic oligonucleotide
uucccuaaauuuggguggc

SEQ ID NO: 373243 - RNA, 19 nt, Artificial Sequence
  Description of Artificial Sequence: Synthetic oligonucleotide
gcugcgguaaauccacagg

SEQ ID NO: 373244 - RNA, 19 nt, Artificial Sequence
  Description of Artificial Sequence: Synthetic oligonucleotide
guguacgacauuaauccca

SEQ ID NO: 373245 - RNA, 19 nt, Artificial Sequence
  Description of Artificial Sequence: Synthetic oligonucleotide
auuuggguuucaccuggca

SEQ ID NO: 373246 - RNA, 19 nt, Artificial Sequence
  Description of Artificial Sequence: Synthetic oligonucleotide
aaacccugucuuaaucacu

SEQ ID NO: 373247 - RNA, 19 nt, Artificial Sequence
  Description of Artificial Sequence: Synthetic oligonucleotide
ucacugccugucccaagag

SEQ ID NO: 373248 - RNA, 19 nt, Artificial Sequence
  Description of Artificial Sequence: Synthetic oligonucleotide
acccugcccaacaugaguc

SEQ ID NO: 373249 - RNA, 19 nt, Artificial Sequence
  Description of Artificial Sequence: Synthetic oligonucleotide
gaacguggaguugagugga

SEQ ID NO: 373250 - RNA, 19 nt, Artificial Sequence
  Description of Artificial Sequence: Synthetic oligonucleotide
  modified_base (6)..(6): a, c, u, g, unknown or other
agugcncuugcagcccgcc

SEQ ID NO: 373251 - RNA, 19 nt, Artificial Sequence
  Description of Artificial Sequence: Synthetic oligonucleotide
  modified_base (9)..(9): a, c, u, g, unknown or other
uucagugcncuugcagccc

SEQ ID NO: 373252 - RNA, 19 nt, Artificial Sequence
  Description of Artificial Sequence: Synthetic oligonucleotide
uuauaguggccucccucuc

SEQ ID NO: 373253 - RNA, 19 nt, Artificial Sequence
  Description of Artificial Sequence: Synthetic oligonucleotide
caucaacucccauuuagaa

SEQ ID NO: 373254 - RNA, 19 nt, Artificial Sequence
  Description of Artificial Sequence: Synthetic oligonucleotide
gacgcccuacacuccaccc

SEQ ID NO: 373255 - RNA, 19 nt, Artificial Sequence
  Description of Artificial Sequence: Synthetic oligonucleotide
ccaaguuaagcccaccuuc

SEQ ID NO: 373256 - RNA, 19 nt, Artificial Sequence
  Description of Artificial Sequence: Synthetic oligonucleotide
ucugacccaugcauucggu

SEQ ID NO: 373257 - RNA, 19 nt, Artificial Sequence
  Description of Artificial Sequence: Synthetic oligonucleotide
gucuuuguggcagcucagg

SEQ ID NO: 373258 - RNA, 19 nt, Artificial Sequence
  Description of Artificial Sequence: Synthetic oligonucleotide
ggaccaauugauguauaag

SEQ ID NO: 373259 - RNA, 19 nt, Artificial Sequence
  Description of Artificial Sequence: Synthetic oligonucleotide
gccgggacuacauagagaa

SEQ ID NO: 373260 - RNA, 19 nt, Artificial Sequence
  Description of Artificial Sequence: Synthetic oligonucleotide
cugaagagaccacauucca

SEQ ID NO: 373261 - RNA, 19 nt, Artificial Sequence
  Description of Artificial Sequence: Synthetic oligonucleotide
cuuaacagagucacccuua

SEQ ID NO: 373262 - RNA, 19 nt, Artificial Sequence
  Description of Artificial Sequence: Synthetic oligonucleotide
gaggaucacagucccaucu

SEQ ID NO: 373263 - RNA, 19 nt, Artificial Sequence
  Description of Artificial Sequence: Synthetic oligonucleotide
gaguaauggcagacagggg

SEQ ID NO: 373264 - RNA, 19 nt, Artificial Sequence
  Description of Artificial Sequence: Synthetic oligonucleotide
acagugaauuccuggcgau

SEQ ID NO: 373265 - RNA, 19 nt, Artificial Sequence
  Description of Artificial Sequence: Synthetic oligonucleotide
accaaguuaagcccaccuu

SEQ ID NO: 373266 - RNA, 19 nt, Artificial Sequence
  Description of Artificial Sequence: Synthetic oligonucleotide
ggugugguaguguacgaca

SEQ ID NO: 373267 - RNA, 19 nt, Artificial Sequence
  Description of Artificial Sequence: Synthetic oligonucleotide
acauaccccaacccugagu

SEQ ID NO: 373268 - RNA, 19 nt, Artificial Sequence
  Description of Artificial Sequence: Synthetic oligonucleotide
cuacuaggagggucucggg

SEQ ID NO: 373269 - RNA, 19 nt, Artificial Sequence
  Description of Artificial Sequence: Synthetic oligonucleotide
ugguaguguacgacauuaa

SEQ ID NO: 373270 - RNA, 19 nt, Artificial Sequence
  Description of Artificial Sequence: Synthetic oligonucleotide
uggaguugaguggaaccga

SEQ ID NO: 373271 - RNA, 19 nt, Artificial Sequence
  Description of Artificial Sequence: Synthetic oligonucleotide
aggcacaaugaacguggag

SEQ ID NO: 373272 - RNA, 19 nt, Artificial Sequence
  Description of Artificial Sequence: Synthetic oligonucleotide
cuggcgguaaggcgguggg

SEQ ID NO: 373273 - RNA, 19 nt, Artificial Sequence
  Description of Artificial Sequence: Synthetic oligonucleotide
aaccgggugugguagugua

SEQ ID NO: 373274 - RNA, 19 nt, Artificial Sequence
  Description of Artificial Sequence: Synthetic oligonucleotide
cugaguugcucuguagcac

SEQ ID NO: 373275 - RNA, 19 nt, Artificial Sequence
  Description of Artificial Sequence: Synthetic oligonucleotide
gauagcccuagcugcucac

SEQ ID NO: 373276 - RNA, 19 nt, Artificial Sequence
  Description of Artificial Sequence: Synthetic oligonucleotide
gaacaauuagaagucuagu

SEQ ID NO: 373277 - RNA, 19 nt, Artificial Sequence
  Description of Artificial Sequence: Synthetic oligonucleotide
acagauccuuagccuaugu

SEQ ID NO: 373278 - RNA, 19 nt, Artificial Sequence
  Description of Artificial Sequence: Synthetic oligonucleotide
cuguauuacaagcuuugua

SEQ ID NO: 373279 - RNA, 19 nt, Artificial Sequence
  Description of Artificial Sequence: Synthetic oligonucleotide
agucuaggguuggggaacg

SEQ ID NO: 373280 - RNA, 19 nt, Artificial Sequence
  Description of Artificial Sequence: Synthetic oligonucleotide
gucccuaugaaccgggugu

SEQ ID NO: 373281 - RNA, 19 nt, Artificial Sequence
  Description of Artificial Sequence: Synthetic oligonucleotide
ugcauagauggagcugggc

SEQ ID NO: 373282 - RNA, 19 nt, Artificial Sequence
  Description of Artificial Sequence: Synthetic oligonucleotide
gguuucaccuggcaucaug

SEQ ID NO: 373283 - RNA, 19 nt, Artificial Sequence
  Description of Artificial Sequence: Synthetic oligonucleotide
ugugguaguguacgacauu

SEQ ID NO: 373284 - RNA, 19 nt, Artificial Sequence
  Description of Artificial Sequence: Synthetic oligonucleotide
gagaugcauagauggagcu

SEQ ID NO: 373285 - RNA, 19 nt, Artificial Sequence
  Description of Artificial Sequence: Synthetic oligonucleotide
auucgguaagguggugggg

SEQ ID NO: 373286 - RNA, 19 nt, Artificial Sequence
  Description of Artificial Sequence: Synthetic oligonucleotide
cuaaauuuggguggcuuaa

SEQ ID NO: 373287 - RNA, 19 nt, Artificial Sequence
  Description of Artificial Sequence: Synthetic oligonucleotide
ugaaccgggugugguagug

SEQ ID NO: 373288 - RNA, 19 nt, Artificial Sequence
  Description of Artificial Sequence: Synthetic oligonucleotide
acguggaguugaguggaac

SEQ ID NO: 373289 - RNA, 19 nt, Artificial Sequence
  Description of Artificial Sequence: Synthetic oligonucleotide
ggaacgaacaguggugaug

SEQ ID NO: 373290 - RNA, 19 nt, Artificial Sequence
  Description of Artificial Sequence: Synthetic oligonucleotide
gccuaggcugugaaaaugg

SEQ ID NO: 373291 - RNA, 19 nt, Artificial Sequence
  Description of Artificial Sequence: Synthetic oligonucleotide
ucgaaguacuuugguccag

SEQ ID NO: 373292 - RNA, 19 nt, Artificial Sequence
  Description of Artificial Sequence: Synthetic oligonucleotide
cacaucuauuuacagugaa

SEQ ID NO: 373293 - RNA, 19 nt, Artificial Sequence
  Description of Artificial Sequence: Synthetic oligonucleotide
ugacucauuaguggggcuu

SEQ ID NO: 373294 - RNA, 19 nt, Artificial Sequence
  Description of Artificial Sequence: Synthetic oligonucleotide
ccuacuaggagggucucgg

SEQ ID NO: 373295 - RNA, 19 nt, Artificial Sequence
  Description of Artificial Sequence: Synthetic oligonucleotide
ucccuaugaaccgggugug

SEQ ID NO: 373296 - RNA, 19 nt, Artificial Sequence
  Description of Artificial Sequence: Synthetic oligonucleotide
  modified_base (3)..(3): a, c, u, g, unknown or other
ugnaaaccccucccugcuu

SEQ ID NO: 373297 - RNA, 19 nt, Artificial Sequence
  Description of Artificial Sequence: Synthetic oligonucleotide
gcaucuagcucauugcaaa

SEQ ID NO: 373298 - RNA, 19 nt, Artificial Sequence
  Description of Artificial Sequence: Synthetic oligonucleotide
acccaugcauucgguaagg

SEQ ID NO: 373299 - RNA, 19 nt, Artificial Sequence
  Description of Artificial Sequence: Synthetic oligonucleotide
cuuggucccgaucugauau

SEQ ID NO: 373300 - RNA, 19 nt, Artificial Sequence
  Description of Artificial Sequence: Synthetic oligonucleotide
gcauucgguaagguggugg

SEQ ID NO: 373301 - RNA, 19 nt, Artificial Sequence
  Description of Artificial Sequence: Synthetic oligonucleotide
cuacuaguguuuccuauua

SEQ ID NO: 373302 - RNA, 19 nt, Artificial Sequence
  Description of Artificial Sequence: Synthetic oligonucleotide
ccuuaaaaccuguauuaca

SEQ ID NO: 373303 - RNA, 19 nt, Artificial Sequence
  Description of Artificial Sequence: Synthetic oligonucleotide
augagucuuaaaagcagaa

SEQ ID NO: 373304 - RNA, 19 nt, Artificial Sequence
  Description of Artificial Sequence: Synthetic oligonucleotide
cacaccaaccuccuaaacu

SEQ ID NO: 373305 - RNA, 19 nt, Artificial Sequence
  Description of Artificial Sequence: Synthetic oligonucleotide
cucaacgugagaccaccca

SEQ ID NO: 373306 - RNA, 19 nt, Artificial Sequence
  Description of Artificial Sequence: Synthetic oligonucleotide
acagaccgaccacacagua

SEQ ID NO: 373307 - RNA, 19 nt, Artificial Sequence
  Description of Artificial Sequence: Synthetic oligonucleotide
cagccuacagauuguuuca

SEQ ID NO: 373308 - RNA, 19 nt, Artificial Sequence
  Description of Artificial Sequence: Synthetic oligonucleotide
auaguggccucccucucuu

SEQ ID NO: 373309 - RNA, 19 nt, Artificial Sequence
  Description of Artificial Sequence: Synthetic oligonucleotide
aacccugaguugcucugua

SEQ ID NO: 373310 - RNA, 19 nt, Artificial Sequence
  Description of Artificial Sequence: Synthetic oligonucleotide
ucccucucauucccuaaau

SEQ ID NO: 373311 - RNA, 19 nt, Artificial Sequence
  Description of Artificial Sequence: Synthetic oligonucleotide
gguccaggagauaaauggc

SEQ ID NO: 373312 - RNA, 19 nt, Artificial Sequence
  Description of Artificial Sequence: Synthetic oligonucleotide
gauuuggguuucaccuggc

SEQ ID NO: 373313 - RNA, 19 nt, Artificial Sequence
  Description of Artificial Sequence: Synthetic oligonucleotide
cuugagggcccauugggua

SEQ ID NO: 373314 - RNA, 19 nt, Artificial Sequence
  Description of Artificial Sequence: Synthetic oligonucleotide
gugacuagagaaagggaaa

SEQ ID NO: 373315 - RNA, 19 nt, Artificial Sequence
  Description of Artificial Sequence: Synthetic oligonucleotide
  modified_base (16)..(16): a, c, u, g, unknown or other
ccuaaacuauggaaunuaa

SEQ ID NO: 373316 - RNA, 19 nt, Artificial Sequence
  Description of Artificial Sequence: Synthetic oligonucleotide
aguugcucuguagcacauc

SEQ ID NO: 373317 - RNA, 19 nt, Artificial Sequence
  Description of Artificial Sequence: Synthetic oligonucleotide
ccucugacgcccuacacuc

SEQ ID NO: 373318 - RNA, 19 nt, Artificial Sequence
  Description of Artificial Sequence: Synthetic oligonucleotide
cuaggcugugaaaauggua

SEQ ID NO: 373319 - RNA, 19 nt, Artificial Sequence
  Description of Artificial Sequence: Synthetic oligonucleotide
cauaccccaacccugaguu

SEQ ID NO: 373320 - RNA, 19 nt, Artificial Sequence
  Description of Artificial Sequence: Synthetic oligonucleotide
aggaucacagucccaucuu

SEQ ID NO: 373321 - RNA, 19 nt, Artificial Sequence
  Description of Artificial Sequence: Synthetic oligonucleotide
ggugcuguaucaccaacaa

SEQ ID NO: 373322 - RNA, 19 nt, Artificial Sequence
  Description of Artificial Sequence: Synthetic oligonucleotide
ugcuaucaggggccucuga

SEQ ID NO: 373323 - RNA, 19 nt, Artificial Sequence
  Description of Artificial Sequence: Synthetic oligonucleotide
agcacagaccgaccacaca

SEQ ID NO: 373324 - RNA, 19 nt, Artificial Sequence
  Description of Artificial Sequence: Synthetic oligonucleotide
accaaccuccuaaacuaug

SEQ ID NO: 373325 - RNA, 19 nt, Artificial Sequence
  Description of Artificial Sequence: Synthetic oligonucleotide
cacccaaucuuccacugaa

SEQ ID NO: 373326 - RNA, 19 nt, Artificial Sequence
  Description of Artificial Sequence: Synthetic oligonucleotide
auaccccaacccugaguug

SEQ ID NO: 373327 - RNA, 19 nt, Artificial Sequence
  Description of Artificial Sequence: Synthetic oligonucleotide
acgcccuacacuccaccca

SEQ ID NO: 373328 - RNA, 19 nt, Artificial Sequence
  Description of Artificial Sequence: Synthetic oligonucleotide
gcguccuugaggguggagg

SEQ ID NO: 373329 - RNA, 19 nt, Artificial Sequence
  Description of Artificial Sequence: Synthetic oligonucleotide
cguggaguugaguggaacc

SEQ ID NO: 373330 - RNA, 19 nt, Artificial Sequence
  Description of Artificial Sequence: Synthetic oligonucleotide
gugguucugacccaugcau

SEQ ID NO: 373331 - RNA, 19 nt, Artificial Sequence
  Description of Artificial Sequence: Synthetic oligonucleotide
gaguugaguggaaccgaac

SEQ ID NO: 373332 - RNA, 19 nt, Artificial Sequence
  Description of Artificial Sequence: Synthetic oligonucleotide
caaccuccuaaacuaugga

SEQ ID NO: 373333 - RNA, 19 nt, Artificial Sequence
  Description of Artificial Sequence: Synthetic oligonucleotide
cuuagccuauguuccacua

SEQ ID NO: 373334 - RNA, 19 nt, Artificial Sequence
  Description of Artificial Sequence: Synthetic oligonucleotide
ccaugcauucgguaaggug

SEQ ID NO: 373335 - RNA, 19 nt, Artificial Sequence
  Description of Artificial Sequence: Synthetic oligonucleotide
accgaacccuuccuucagu

SEQ ID NO: 373336 - RNA, 19 nt, Artificial Sequence
  Description of Artificial Sequence: Synthetic oligonucleotide
cucugacgcccuacacucc

SEQ ID NO: 373337 - RNA, 19 nt, Artificial Sequence
  Description of Artificial Sequence: Synthetic oligonucleotide
augcauucgguaagguggu

SEQ ID NO: 373338 - RNA, 19 nt, Artificial Sequence
  Description of Artificial Sequence: Synthetic oligonucleotide
cagguuuggugacuagaga

SEQ ID NO: 373339 - RNA, 19 nt, Artificial Sequence
  Description of Artificial Sequence: Synthetic oligonucleotide
gaccgaccacacaguauag

SEQ ID NO: 373340 - RNA, 19 nt, Artificial Sequence
  Description of Artificial Sequence: Synthetic oligonucleotide
ggucccuaugaaccgggug

SEQ ID NO: 373341 - RNA, 19 nt, Artificial Sequence
  Description of Artificial Sequence: Synthetic oligonucleotide
cauuuaaauuaggugcugu

SEQ ID NO: 373342 - RNA, 19 nt, Artificial Sequence
  Description of Artificial Sequence: Synthetic oligonucleotide
guacccuuccucagcaguc

SEQ ID NO: 373343 - RNA, 19 nt, Artificial Sequence
  Description of Artificial Sequence: Synthetic oligonucleotide
  modified_base (15)..(15): a, c, u, g, unknown or other
cacgguaauaaaucnguuu

SEQ ID NO: 373344 - RNA, 19 nt, Artificial Sequence
  Description of Artificial Sequence: Synthetic oligonucleotide
ucggugguucugacccaug

SEQ ID NO: 373345 - RNA, 19 nt, Artificial Sequence
  Description of Artificial Sequence: Synthetic oligonucleotide
  modified_base (7)..(7): a, c, u, g, unknown or other
cagugcncuugcagcccgc

SEQ ID NO: 373346 - RNA, 19 nt, Artificial Sequence
  Description of Artificial Sequence: Synthetic oligonucleotide
gcaccauuucggaccaugg

SEQ ID NO: 373347 - RNA, 19 nt, Artificial Sequence
  Description of Artificial Sequence: Synthetic oligonucleotide
auagugcuaucaggggccu

SEQ ID NO: 373348 - RNA, 19 nt, Artificial Sequence
  Description of Artificial Sequence: Synthetic oligonucleotide
cacaauuggccuaggcugu

SEQ ID NO: 373349 - RNA, 19 nt, Artificial Sequence
  Description of Artificial Sequence: Synthetic oligonucleotide
auccaaucaccaaguccag

SEQ ID NO: 373350 - RNA, 19 nt, Artificial Sequence
  Description of Artificial Sequence: Synthetic oligonucleotide
uagcugcgguaaauccaca

SEQ ID NO: 373351 - RNA, 19 nt, Artificial Sequence
  Description of Artificial Sequence: Synthetic oligonucleotide
accgaccacacaguauagu

SEQ ID NO: 373352 - RNA, 19 nt, Artificial Sequence
  Description of Artificial Sequence: Synthetic oligonucleotide
augaaccgggugugguagu

SEQ ID NO: 373353 - RNA, 19 nt, Artificial Sequence
  Description of Artificial Sequence: Synthetic oligonucleotide
auuguacaaaaggcaucaa

SEQ ID NO: 373354 - RNA, 19 nt, Artificial Sequence
  Description of Artificial Sequence: Synthetic oligonucleotide
  modified_base (4)..(4): a, c, u, g, unknown or other
cugnaaaccccucccugcu

SEQ ID NO: 373355 - RNA, 19 nt, Artificial Sequence
  Description of Artificial Sequence: Synthetic oligonucleotide
gcuuagagucuaggguugg

SEQ ID NO: 373356 - RNA, 19 nt, Artificial Sequence
  Description of Artificial Sequence: Synthetic oligonucleotide
cugccugucccaagaguca

SEQ ID NO: 373357 - RNA, 19 nt, Artificial Sequence
  Description of Artificial Sequence: Synthetic oligonucleotide
  modified_base (5)..(5): a, c, u, g, unknown or other
gugcncuugcagcccgccc

SEQ ID NO: 373358 - RNA, 19 nt, Artificial Sequence
  Description of Artificial Sequence: Synthetic oligonucleotide
agccucaacgugagaccac

SEQ ID NO: 373359 - RNA, 19 nt, Artificial Sequence
  Description of Artificial Sequence: Synthetic oligonucleotide
agagcccgacagaaagaag

SEQ ID NO: 373360 - RNA, 19 nt, Artificial Sequence
  Description of Artificial Sequence: Synthetic oligonucleotide
ccuggaauaucgaaguacu

SEQ ID NO: 373361 - RNA, 19 nt, Artificial Sequence
  Description of Artificial Sequence: Synthetic oligonucleotide
ccugaguugcucuguagca

SEQ ID NO: 373362 - RNA, 19 nt, Artificial Sequence
  Description of Artificial Sequence: Synthetic oligonucleotide
caguaaggggaaaucucua

SEQ ID NO: 373363 - RNA, 19 nt, Artificial Sequence
  Description of Artificial Sequence: Synthetic oligonucleotide
cagagcccgacagaaagaa

SEQ ID NO: 373364 - RNA, 19 nt, Artificial Sequence
  Description of Artificial Sequence: Synthetic oligonucleotide
uggcgguaaggcggugggg

SEQ ID NO: 373365 - RNA, 19 nt, Artificial Sequence
  Description of Artificial Sequence: Synthetic oligonucleotide
ggcaccauuucggaccaug

SEQ ID NO: 373366 - RNA, 19 nt, Artificial Sequence
  Description of Artificial Sequence: Synthetic oligonucleotide
uuggucccgaucugauauu

SEQ ID NO: 373367 - RNA, 19 nt, Artificial Sequence
  Description of Artificial Sequence: Synthetic oligonucleotide
guuuccuauuaggggaaaa

SEQ ID NO: 373368 - RNA, 19 nt, Artificial Sequence
  Description of Artificial Sequence: Synthetic oligonucleotide
ugcauucgguaagguggug

SEQ ID NO: 373369 - RNA, 19 nt, Artificial Sequence
  Description of Artificial Sequence: Synthetic oligonucleotide
cuggcaccauuucggacca

SEQ ID NO: 373370 - RNA, 19 nt, Artificial Sequence
  Description of Artificial Sequence: Synthetic oligonucleotide
  modified_base (16)..(16): a, c, u, g, unknown or other
ggaaauuuucagugcncuu

SEQ ID NO: 373371 - RNA, 19 nt, Artificial Sequence
  Description of Artificial Sequence: Synthetic oligonucleotide
cagaaagaagggcccuaga

SEQ ID NO: 373372 - RNA, 19 nt, Artificial Sequence
  Description of Artificial Sequence: Synthetic oligonucleotide
ggggaaaucucuauacacu

SEQ ID NO: 373373 - RNA, 19 nt, Artificial Sequence
  Description of Artificial Sequence: Synthetic oligonucleotide
guggccuguuacucaacaa

SEQ ID NO: 373374 - RNA, 19 nt, Artificial Sequence
  Description of Artificial Sequence: Synthetic oligonucleotide
caggcggcuggcgguaagg

SEQ ID NO: 373375 - RNA, 19 nt, Artificial Sequence
  Description of Artificial Sequence: Synthetic oligonucleotide
cuguaucaccaacaauaua

SEQ ID NO: 373376 - RNA, 19 nt, Artificial Sequence
  Description of Artificial Sequence: Synthetic oligonucleotide
gccucaacgugagaccacc

SEQ ID NO: 373377 - RNA, 19 nt, Artificial Sequence
  Description of Artificial Sequence: Synthetic oligonucleotide
  modified_base (17)..(17): a, c, u, g, unknown or other
gggaaauuuucagugcncu

SEQ ID NO: 373378 - RNA, 19 nt, Artificial Sequence
  Description of Artificial Sequence: Synthetic oligonucleotide
ggccuguuacucaacaaaa

SEQ ID NO: 373379 - RNA, 19 nt, Artificial Sequence
  Description of Artificial Sequence: Synthetic oligonucleotide
ccaacccugaguugcucug

SEQ ID NO: 373380 - RNA, 19 nt, Artificial Sequence
  Description of Artificial Sequence: Synthetic oligonucleotide
ccacuagauuagaaagguc

SEQ ID NO: 373381 - RNA, 19 nt, Artificial Sequence
  Description of Artificial Sequence: Synthetic oligonucleotide
gcccgcccaccuuaaaacc

SEQ ID NO: 373382 - RNA, 19 nt, Artificial Sequence
  Description of Artificial Sequence: Synthetic oligonucleotide
cacccuuaccacagaacua

SEQ ID NO: 373383 - RNA, 19 nt, Artificial Sequence
  Description of Artificial Sequence: Synthetic oligonucleotide
ucccuaaauuuggguggcu

SEQ ID NO: 373384 - RNA, 19 nt, Artificial Sequence
  Description of Artificial Sequence: Synthetic oligonucleotide
ccuaaauuuggguggcuua

SEQ ID NO: 373385 - RNA, 19 nt, Artificial Sequence
  Description of Artificial Sequence: Synthetic oligonucleotide
ccuacacuccacccacccc

SEQ ID NO: 373386 - RNA, 19 nt, Artificial Sequence
  Description of Artificial Sequence: Synthetic oligonucleotide
cgaaguacuuugguccagg

SEQ ID NO: 373387 - RNA, 19 nt, Artificial Sequence
  Description of Artificial Sequence: Synthetic oligonucleotide
agaagucuagugacaucua

SEQ ID NO: 373388 - RNA, 19 nt, Artificial Sequence
  Description of Artificial Sequence: Synthetic oligonucleotide
ccccuuggugaguaauggc

SEQ ID NO: 373389 - RNA, 19 nt, Artificial Sequence
  Description of Artificial Sequence: Synthetic oligonucleotide
ccauaacaaggcaccuuuc

SEQ ID NO: 373390 - RNA, 19 nt, Artificial Sequence
  Description of Artificial Sequence: Synthetic oligonucleotide
ccaccccagagcccgacag

SEQ ID NO: 373391 - RNA, 19 nt, Artificial Sequence
  Description of Artificial Sequence: Synthetic oligonucleotide
caacgugagaccacccaau

SEQ ID NO: 373392 - RNA, 19 nt, Artificial Sequence
  Description of Artificial Sequence: Synthetic oligonucleotide
agccgggacuacauagaga

SEQ ID NO: 373393 - RNA, 19 nt, Artificial Sequence
  Description of Artificial Sequence: Synthetic oligonucleotide
ggcccauuggguaccccag

SEQ ID NO: 373394 - RNA, 19 nt, Artificial Sequence
  Description of Artificial Sequence: Synthetic oligonucleotide
ggaguugaguggaaccgaa

SEQ ID NO: 373395 - RNA, 19 nt, Artificial Sequence
  Description of Artificial Sequence: Synthetic oligonucleotide
cagcccgcccaccuuaaaa

SEQ ID NO: 373396 - RNA, 19 nt, Artificial Sequence
  Description of Artificial Sequence: Synthetic oligonucleotide
  modified_base (3)..(3): a, c, u, g, unknown or other
gcncuugcagcccgcccac

SEQ ID NO: 373397 - RNA, 19 nt, Artificial Sequence
  Description of Artificial Sequence: Synthetic oligonucleotide
cacagaccgaccacacagu

SEQ ID NO: 373398 - RNA, 19 nt, Artificial Sequence
  Description of Artificial Sequence: Synthetic oligonucleotide
gcccaggugucuuccuaug

SEQ ID NO: 373399 - RNA, 19 nt, Artificial Sequence
  Description of Artificial Sequence: Synthetic oligonucleotide
ggcuuaacagagucacccu

SEQ ID NO: 373400 - RNA, 19 nt, Artificial Sequence
  Description of Artificial Sequence: Synthetic oligonucleotide
gcuuaacagagucacccuu

SEQ ID NO: 373401 - RNA, 19 nt, Artificial Sequence
  Description of Artificial Sequence: Synthetic oligonucleotide
gcacaucuauuuacaguga

SEQ ID NO: 373402 - RNA, 19 nt, Artificial Sequence
  Description of Artificial Sequence: Synthetic oligonucleotide
caggaccaauugauguaua

SEQ ID NO: 373403 - RNA, 19 nt, Artificial Sequence
  Description of Artificial Sequence: Synthetic oligonucleotide
gcuguaucaccaacaauau

SEQ ID NO: 373404 - RNA, 19 nt, Artificial Sequence
  Description of Artificial Sequence: Synthetic oligonucleotide
agcacucagccuacagauu

SEQ ID NO: 373405 - RNA, 19 nt, Artificial Sequence
  Description of Artificial Sequence: Synthetic oligonucleotide
gugugguaguguacgacau

SEQ ID NO: 373406 - RNA, 19 nt, Artificial Sequence
  Description of Artificial Sequence: Synthetic oligonucleotide
cacucagccuacagauugu

SEQ ID NO: 373407 - RNA, 19 nt, Artificial Sequence
  Description of Artificial Sequence: Synthetic oligonucleotide
gccucugacgcccuacacu

SEQ ID NO: 373408 - RNA, 19 nt, Artificial Sequence
  Description of Artificial Sequence: Synthetic oligonucleotide
gugcuaucaggggccucug

SEQ ID NO: 373409 - RNA, 19 nt, Artificial Sequence
  Description of Artificial Sequence: Synthetic oligonucleotide
ccacaccaaccuccuaaac

SEQ ID NO: 373410 - RNA, 19 nt, Artificial Sequence
  Description of Artificial Sequence: Synthetic oligonucleotide
ccaccuuaaaaccuguauu

SEQ ID NO: 373411 - RNA, 19 nt, Artificial Sequence
  Description of Artificial Sequence: Synthetic oligonucleotide
cugacucauuaguggggcu

SEQ ID NO: 373412 - RNA, 19 nt, Artificial Sequence
  Description of Artificial Sequence: Synthetic oligonucleotide
ggccucugacgcccuacac

SEQ ID NO: 373413 - RNA, 19 nt, Artificial Sequence
  Description of Artificial Sequence: Synthetic oligonucleotide
  modified_base (2)..(2): a, c, u, g, unknown or other
cncuugcagcccgcccacc

SEQ ID NO: 373414 - RNA, 19 nt, Artificial Sequence
  Description of Artificial Sequence: Synthetic oligonucleotide
gaaccgggugugguagugu

SEQ ID NO: 373415 - RNA, 19 nt, Artificial Sequence
  Description of Artificial Sequence: Synthetic oligonucleotide
cagauccuuagccuauguu

SEQ ID NO: 373416 - RNA, 19 nt, Artificial Sequence
  Description of Artificial Sequence: Synthetic oligonucleotide
caccccagagcccgacaga

SEQ ID NO: 373417 - RNA, 19 nt, Artificial Sequence
  Description of Artificial Sequence: Synthetic oligonucleotide
aggucccuaugaaccgggu

SEQ ID NO: 373418 - RNA, 19 nt, Artificial Sequence
  Description of Artificial Sequence: Synthetic oligonucleotide
cccuggcaccauuucggac

SEQ ID NO: 373419 - RNA, 19 nt, Artificial Sequence
  Description of Artificial Sequence: Synthetic oligonucleotide
ggaaaucucuauacacuuu

SEQ ID NO: 373420 - RNA, 19 nt, Artificial Sequence
  Description of Artificial Sequence: Synthetic oligonucleotide
cucagccuacagauuguuu

SEQ ID NO: 373421 - RNA, 19 nt, Artificial Sequence
  Description of Artificial Sequence: Synthetic oligonucleotide
cuggcuagcagggcuugcu

SEQ ID NO: 373422 - RNA, 19 nt, Artificial Sequence
  Description of Artificial Sequence: Synthetic oligonucleotide
cggaccaugggugguggag

SEQ ID NO: 373423 - RNA, 19 nt, Artificial Sequence
  Description of Artificial Sequence: Synthetic oligonucleotide
guacgacauuaaucccagu

SEQ ID NO: 373424 - RNA, 19 nt, Artificial Sequence
  Description of Artificial Sequence: Synthetic oligonucleotide
caacccugaguugcucugu

SEQ ID NO: 373425 - RNA, 19 nt, Artificial Sequence
  Description of Artificial Sequence: Synthetic oligonucleotide
gcucggugguucugaccca

SEQ ID NO: 373426 - RNA, 19 nt, Artificial Sequence
  Description of Artificial Sequence: Synthetic oligonucleotide
ggacagccgggacuacaua

SEQ ID NO: 373427 - RNA, 19 nt, Artificial Sequence
  Description of Artificial Sequence: Synthetic oligonucleotide
cccgcccaccuuaaaaccu

SEQ ID NO: 373428 - RNA, 19 nt, Artificial Sequence
  Description of Artificial Sequence: Synthetic oligonucleotide
cucggugguucugacccau

SEQ ID NO: 373429 - RNA, 19 nt, Artificial Sequence
  Description of Artificial Sequence: Synthetic oligonucleotide
cccaacccugaguugcucu

SEQ ID NO: 373430 - RNA, 19 nt, Artificial Sequence
  Description of Artificial Sequence: Synthetic oligonucleotide
gcccuacacuccacccacc

SEQ ID NO: 373431 - RNA, 19 nt, Artificial Sequence
  Description of Artificial Sequence: Synthetic oligonucleotide
cugacgggcccaggugucu

SEQ ID NO: 373432 - RNA, 19 nt, Artificial Sequence
  Description of Artificial Sequence: Synthetic oligonucleotide
uggcaccauuucggaccau

SEQ ID NO: 373433 - RNA, 19 nt, Artificial Sequence
  Description of Artificial Sequence: Synthetic oligonucleotide
cacccaccccagagcccga

SEQ ID NO: 373434 - RNA, 19 nt, Artificial Sequence
  Description of Artificial Sequence: Synthetic oligonucleotide
ccgaacccuuccuucaguu

SEQ ID NO: 373435 - RNA, 19 nt, Artificial Sequence
  Description of Artificial Sequence: Synthetic oligonucleotide
ccgggacuacauagagaaa

SEQ ID NO: 373436 - RNA, 19 nt, Artificial Sequence
  Description of Artificial Sequence: Synthetic oligonucleotide
cgggugugguaguguacga

SEQ ID NO: 373437 - RNA, 19 nt, Artificial Sequence
  Description of Artificial Sequence: Synthetic oligonucleotide
cccuaaauuuggguggcuu

SEQ ID NO: 373438 - RNA, 19 nt, Artificial Sequence
  Description of Artificial Sequence: Synthetic oligonucleotide
ggcuggcgguaaggcggug

SEQ ID NO: 373439 - RNA, 19 nt, Artificial Sequence
  Description of Artificial Sequence: Synthetic oligonucleotide
gaggggcaucuagcucauu

SEQ ID NO: 373440 - RNA, 19 nt, Artificial Sequence
  Description of Artificial Sequence: Synthetic oligonucleotide
cccuagcugcucacacaau

SEQ ID NO: 373441 - RNA, 19 nt, Artificial Sequence
  Description of Artificial Sequence: Synthetic oligonucleotide
gcuccccuacuaggagggu

SEQ ID NO: 373442 - RNA, 19 nt, Artificial Sequence
  Description of Artificial Sequence: Synthetic oligonucleotide
cggcuggcgguaaggcggu

SEQ ID NO: 373443 - RNA, 19 nt, Artificial Sequence
  Description of Artificial Sequence: Synthetic oligonucleotide
auuauauauauauauaucc

SEQ ID NO: 373444 - RNA, 19 nt, Artificial Sequence
  Description of Artificial Sequence: Synthetic oligonucleotide
auauauauauauccuaacc

SEQ ID NO: 373445 - RNA, 19 nt, Artificial Sequence
  Description of Artificial Sequence: Synthetic oligonucleotide
aguccaauggguuaaaccc

SEQ ID NO: 373446 - RNA, 19 nt, Artificial Sequence
  Description of Artificial Sequence: Synthetic oligonucleotide
auauauauuauauauauau

SEQ ID NO: 373447 - RNA, 19 nt, Artificial Sequence
  Description of Artificial Sequence: Synthetic oligonucleotide
acuagaaugaauguaaugg

SEQ ID NO: 373448 - RNA, 19 nt, Artificial Sequence
  Description of Artificial Sequence: Synthetic oligonucleotide
aaugcauuauaauuugguc

SEQ ID NO: 373449 - RNA, 19 nt, Artificial Sequence
  Description of Artificial Sequence: Synthetic oligonucleotide
ugagguuuaaguccaaugg

SEQ ID NO: 373450 - RNA, 19 nt, Artificial Sequence
  Description of Artificial Sequence: Synthetic oligonucleotide
auauauauauauuauauau

SEQ ID NO: 373451 - RNA, 19 nt, Artificial Sequence
  Description of Artificial Sequence: Synthetic oligonucleotide
aaaggguuaaauccccugc

SEQ ID NO: 373452 - RNA, 19 nt, Artificial Sequence
  Description of Artificial Sequence: Synthetic oligonucleotide
uauaauguuacauuccagc

SEQ ID NO: 373453 - RNA, 19 nt, Artificial Sequence
  Description of Artificial Sequence: Synthetic oligonucleotide
auauauauauuauauauau

SEQ ID NO: 373454 - RNA, 19 nt, Artificial Sequence
  Description of Artificial Sequence: Synthetic oligonucleotide
auauauuauauauauauau

SEQ ID NO: 373455 - RNA, 19 nt, Artificial Sequence
  Description of Artificial Sequence: Synthetic oligonucleotide
aaguccaauggguuaaacc

SEQ ID NO: 373456 - RNA, 19 nt, Artificial Sequence
  Description of Artificial Sequence: Synthetic oligonucleotide
aaagaguugcacuacaagu

SEQ ID NO: 373457 - RNA, 19 nt, Artificial Sequence
  Description of Artificial Sequence: Synthetic oligonucleotide
uuauauauauauauauccu

SEQ ID NO: 373458 - RNA, 19 nt, Artificial Sequence
  Description of Artificial Sequence: Synthetic oligonucleotide
auauuauauauauauauau

SEQ ID NO: 373459 - RNA, 19 nt, Artificial Sequence
  Description of Artificial Sequence: Synthetic oligonucleotide
guacguaauguucagaggg

SEQ ID NO: 373460 - RNA, 19 nt, Artificial Sequence
  Description of Artificial Sequence: Synthetic oligonucleotide
gaaacgacaucuaaggagg

SEQ ID NO: 373461 - RNA, 19 nt, Artificial Sequence
  Description of Artificial Sequence: Synthetic oligonucleotide
uaaaacuacccgaugacgc

SEQ ID NO: 373462 - RNA, 19 nt, Artificial Sequence
  Description of Artificial Sequence: Synthetic oligonucleotide
uauuauauauauauauauc

SEQ ID NO: 373463 - RNA, 19 nt, Artificial Sequence
  Description of Artificial Sequence: Synthetic oligonucleotide
aaggguuaaauccccugcc

SEQ ID NO: 373464 - RNA, 19 nt, Artificial Sequence
  Description of Artificial Sequence: Synthetic oligonucleotide
uauauuauauauauauaua

SEQ ID NO: 373465 - RNA, 19 nt, Artificial Sequence
  Description of Artificial Sequence: Synthetic oligonucleotide
cuagaaugaauguaauggg

SEQ ID NO: 373466 - RNA, 19 nt, Artificial Sequence
  Description of Artificial Sequence: Synthetic oligonucleotide
uucuagucaucacuuaagg

SEQ ID NO: 373467 - RNA, 19 nt, Artificial Sequence
  Description of Artificial Sequence: Synthetic oligonucleotide
uauauauauauauauuaua

SEQ ID NO: 373468 - RNA, 19 nt, Artificial Sequence
  Description of Artificial Sequence: Synthetic oligonucleotide
uauauauauauuauauaua

SEQ ID NO: 373469 - RNA, 19 nt, Artificial Sequence
  Description of Artificial Sequence: Synthetic oligonucleotide
uguaguagggcuuccaaug

SEQ ID NO: 373470 - RNA, 19 nt, Artificial Sequence
  Description of Artificial Sequence: Synthetic oligonucleotide
uauauauauauauauccua

SEQ ID NO: 373471 - RNA, 19 nt, Artificial Sequence
  Description of Artificial Sequence: Synthetic oligonucleotide
aaguccaauauucuaacau

SEQ ID NO: 373472 - RNA, 19 nt, Artificial Sequence
  Description of Artificial Sequence: Synthetic oligonucleotide
aucauagcuaaauuuacca

SEQ ID NO: 373473 - RNA, 19 nt, Artificial Sequence
  Description of Artificial Sequence: Synthetic oligonucleotide
auuuucguccuccuugcgc

SEQ ID NO: 373474 - RNA, 19 nt, Artificial Sequence
  Description of Artificial Sequence: Synthetic oligonucleotide
uauauauuauauauauaua

SEQ ID NO: 373475 - RNA, 19 nt, Artificial Sequence
  Description of Artificial Sequence: Synthetic oligonucleotide
uauauauauauauuauaua

SEQ ID NO: 373476 - RNA, 19 nt, Artificial Sequence
  Description of Artificial Sequence: Synthetic oligonucleotide
auauauauauauauuauau

SEQ ID NO: 373477 - RNA, 19 nt, Artificial Sequence
  Description of Artificial Sequence: Synthetic oligonucleotide
uuucuagucaucacuuaag

SEQ ID NO: 373478 - RNA, 19 nt, Artificial Sequence
  Description of Artificial Sequence: Synthetic oligonucleotide
cuaaggguuaaaacuaccc

SEQ ID NO: 373479 - RNA, 19 nt, Artificial Sequence
  Description of Artificial Sequence: Synthetic oligonucleotide
uauauauauauauccuaac

SEQ ID NO: 373480 - RNA, 19 nt, Artificial Sequence
  Description of Artificial Sequence: Synthetic oligonucleotide
aauuacuugcacauuaaga

SEQ ID NO: 373481 - RNA, 19 nt, Artificial Sequence
  Description of Artificial Sequence: Synthetic oligonucleotide
uuaaacccagccccuaagg

SEQ ID NO: 373482 - RNA, 19 nt, Artificial Sequence
  Description of Artificial Sequence: Synthetic oligonucleotide
aaagcacuuaaguauugga

SEQ ID NO: 373483 - RNA, 19 nt, Artificial Sequence
  Description of Artificial Sequence: Synthetic oligonucleotide
uaaacccagccccuaaggg

SEQ ID NO: 373484 - RNA, 19 nt, Artificial Sequence
  Description of Artificial Sequence: Synthetic oligonucleotide
aguccaauauucuaacaug

SEQ ID NO: 373485 - RNA, 19 nt, Artificial Sequence
  Description of Artificial Sequence: Synthetic oligonucleotide
uuaauagagaaaagcacuu

SEQ ID NO: 373486 - RNA, 19 nt, Artificial Sequence
  Description of Artificial Sequence: Synthetic oligonucleotide
ucaccaguuacuauuuaca

SEQ ID NO: 373487 - RNA, 19 nt, Artificial Sequence
  Description of Artificial Sequence: Synthetic oligonucleotide
uauauccuaaccugugcag

SEQ ID NO: 373488 - RNA, 19 nt, Artificial Sequence
  Description of Artificial Sequence: Synthetic oligonucleotide
uucaaucgcaacuuggagu

SEQ ID NO: 373489 - RNA, 19 nt, Artificial Sequence
  Description of Artificial Sequence: Synthetic oligonucleotide
aaaacuacccgaugacgcu

SEQ ID NO: 373490 - RNA, 19 nt, Artificial Sequence
  Description of Artificial Sequence: Synthetic oligonucleotide
ucacuuagccauuucaagu

SEQ ID NO: 373491 - RNA, 19 nt, Artificial Sequence
  Description of Artificial Sequence: Synthetic oligonucleotide
uccgcugucuuauauacac

SEQ ID NO: 373492 - RNA, 19 nt, Artificial Sequence
  Description of Artificial Sequence: Synthetic oligonucleotide
uauauauauuauauauaua

SEQ ID NO: 373493 - RNA, 19 nt, Artificial Sequence
  Description of Artificial Sequence: Synthetic oligonucleotide
aucacuuagccauuucaag

SEQ ID NO: 373494 - RNA, 19 nt, Artificial Sequence
  Description of Artificial Sequence: Synthetic oligonucleotide
aaguguaucucuugcuugu

SEQ ID NO: 373495 - RNA, 19 nt, Artificial Sequence
  Description of Artificial Sequence: Synthetic oligonucleotide
acgggugucgcuccaaccc

SEQ ID NO: 373496 - RNA, 19 nt, Artificial Sequence
  Description of Artificial Sequence: Synthetic oligonucleotide
uuacauuccagcacuguaa

SEQ ID NO: 373497 - RNA, 19 nt, Artificial Sequence
  Description of Artificial Sequence: Synthetic oligonucleotide
auauccuaaccugugcagc

SEQ ID NO: 373498 - RNA, 19 nt, Artificial Sequence
  Description of Artificial Sequence: Synthetic oligonucleotide
aagaaacgacaucuaagga

SEQ ID NO: 373499 - RNA, 19 nt, Artificial Sequence
  Description of Artificial Sequence: Synthetic oligonucleotide
ucaaucgcaacuuggaguu

SEQ ID NO: 373500 - RNA, 19 nt, Artificial Sequence
  Description of Artificial Sequence: Synthetic oligonucleotide
guagaggccgguuuugagg

SEQ ID NO: 373501 - RNA, 19 nt, Artificial Sequence
  Description of Artificial Sequence: Synthetic oligonucleotide
uccaauggguuaaacccag

SEQ ID NO: 373502 - RNA, 19 nt, Artificial Sequence
  Description of Artificial Sequence: Synthetic oligonucleotide
guuaaaacuacccgaugac

SEQ ID NO: 373503 - RNA, 19 nt, Artificial Sequence
  Description of Artificial Sequence: Synthetic oligonucleotide
ucuagucaucacuuaagga

SEQ ID NO: 373504 - RNA, 19 nt, Artificial Sequence
  Description of Artificial Sequence: Synthetic oligonucleotide
uguuauagggugcgaccgg

SEQ ID NO: 373505 - RNA, 19 nt, Artificial Sequence
  Description of Artificial Sequence: Synthetic oligonucleotide
auauauauauauauauuau

SEQ ID NO: 373506 - RNA, 19 nt, Artificial Sequence
  Description of Artificial Sequence: Synthetic oligonucleotide
auauauauauauauccuaa

SEQ ID NO: 373507 - RNA, 19 nt, Artificial Sequence
  Description of Artificial Sequence: Synthetic oligonucleotide
gugucgucggauuuggcgg

SEQ ID NO: 373508 - RNA, 19 nt, Artificial Sequence
  Description of Artificial Sequence: Synthetic oligonucleotide
acuacaaguguaucucuug

SEQ ID NO: 373509 - RNA, 19 nt, Artificial Sequence
  Description of Artificial Sequence: Synthetic oligonucleotide
cuacaaguguaucucuugc

SEQ ID NO: 373510 - RNA, 19 nt, Artificial Sequence
  Description of Artificial Sequence: Synthetic oligonucleotide
ucuuggaugggcgucuccg

SEQ ID NO: 373511 - RNA, 19 nt, Artificial Sequence
  Description of Artificial Sequence: Synthetic oligonucleotide
aauaaaggguuaagugcuc

SEQ ID NO: 373512 - RNA, 19 nt, Artificial Sequence
  Description of Artificial Sequence: Synthetic oligonucleotide
ugacaagaguggcucagcc

SEQ ID NO: 373513 - RNA, 19 nt, Artificial Sequence
  Description of Artificial Sequence: Synthetic oligonucleotide
uuaagugcucacacgcgug

SEQ ID NO: 373514 - RNA, 19 nt, Artificial Sequence
  Description of Artificial Sequence: Synthetic oligonucleotide
gaugacgcugccuccgagg

SEQ ID NO: 373515 - RNA, 19 nt, Artificial Sequence
  Description of Artificial Sequence: Synthetic oligonucleotide
aggguuaaauccccugccg

SEQ ID NO: 373516 - RNA, 19 nt, Artificial Sequence
  Description of Artificial Sequence: Synthetic oligonucleotide
agcguuucuagucaucacu

SEQ ID NO: 373517 - RNA, 19 nt, Artificial Sequence
  Description of Artificial Sequence: Synthetic oligonucleotide
uuuucugucuagucgccga

SEQ ID NO: 373518 - RNA, 19 nt, Artificial Sequence
  Description of Artificial Sequence: Synthetic oligonucleotide
acuaagaaagcaaguucac

SEQ ID NO: 373519 - RNA, 19 nt, Artificial Sequence
  Description of Artificial Sequence: Synthetic oligonucleotide
agugcucacacgcguggcc

SEQ ID NO: 373520 - RNA, 19 nt, Artificial Sequence
  Description of Artificial Sequence: Synthetic oligonucleotide
aucgguugccccuccaccg

SEQ ID NO: 373521 - RNA, 19 nt, Artificial Sequence
  Description of Artificial Sequence: Synthetic oligonucleotide
ucugucuagucgccgaacu

SEQ ID NO: 373522 - RNA, 19 nt, Artificial Sequence
  Description of Artificial Sequence: Synthetic oligonucleotide
acuuaaguauuggacaaca

SEQ ID NO: 373523 - RNA, 19 nt, Artificial Sequence
  Description of Artificial Sequence: Synthetic oligonucleotide
gguuaaaacuacccgauga

SEQ ID NO: 373524 - RNA, 19 nt, Artificial Sequence
  Description of Artificial Sequence: Synthetic oligonucleotide
ggugucgucggauuuggcg

SEQ ID NO: 373525 - RNA, 19 nt, Artificial Sequence
  Description of Artificial Sequence: Synthetic oligonucleotide
uauccuaaccugugcagcu

SEQ ID NO: 373526 - RNA, 19 nt, Artificial Sequence
  Description of Artificial Sequence: Synthetic oligonucleotide
ugcacuacaaguguaucuc

SEQ ID NO: 373527 - RNA, 19 nt, Artificial Sequence
  Description of Artificial Sequence: Synthetic oligonucleotide
uugcacuacaaguguaucu

SEQ ID NO: 373528 - RNA, 19 nt, Artificial Sequence
  Description of Artificial Sequence: Synthetic oligonucleotide
agucaauaaaggguuaagu

SEQ ID NO: 373529 - RNA, 19 nt, Artificial Sequence
  Description of Artificial Sequence: Synthetic oligonucleotide
agcgugguaccguucguac

SEQ ID NO: 373530 - RNA, 19 nt, Artificial Sequence
  Description of Artificial Sequence: Synthetic oligonucleotide
guguuauagggugcgaccg

SEQ ID NO: 373531 - RNA, 19 nt, Artificial Sequence
  Description of Artificial Sequence: Synthetic oligonucleotide
uauuuucguccuccuugcg

SEQ ID NO: 373532 - RNA, 19 nt, Artificial Sequence
  Description of Artificial Sequence: Synthetic oligonucleotide
aacuacccgaugacgcugc

SEQ ID NO: 373533 - RNA, 19 nt, Artificial Sequence
  Description of Artificial Sequence: Synthetic oligonucleotide
ucguacgucuccgagaagu

SEQ ID NO: 373534 - RNA, 19 nt, Artificial Sequence
  Description of Artificial Sequence: Synthetic oligonucleotide
cuugucgcccguuuccagg

SEQ ID NO: 373535 - RNA, 19 nt, Artificial Sequence
  Description of Artificial Sequence: Synthetic oligonucleotide
uccgauguuucuucuugcc

SEQ ID NO: 373536 - RNA, 19 nt, Artificial Sequence
  Description of Artificial Sequence: Synthetic oligonucleotide
guggccaacuagcaggucc

SEQ ID NO: 373537 - RNA, 19 nt, Artificial Sequence
  Description of Artificial Sequence: Synthetic oligonucleotide
gucgacgccacccagccgc

SEQ ID NO: 373538 - RNA, 19 nt, Artificial Sequence
  Description of Artificial Sequence: Synthetic oligonucleotide
ggguuaagugcucacacgc

SEQ ID NO: 373539 - RNA, 19 nt, Artificial Sequence
  Description of Artificial Sequence: Synthetic oligonucleotide
uacccgaugacgcugccuc

SEQ ID NO: 373540 - RNA, 19 nt, Artificial Sequence
  Description of Artificial Sequence: Synthetic oligonucleotide
uuggcgaacaucucagcuc

SEQ ID NO: 373541 - RNA, 19 nt, Artificial Sequence
  Description of Artificial Sequence: Synthetic oligonucleotide
aaugccgcuucuucuugga

SEQ ID NO: 373542 - RNA, 19 nt, Artificial Sequence
  Description of Artificial Sequence: Synthetic oligonucleotide
agucgccgaacuuggaaag

SEQ ID NO: 373543 - RNA, 19 nt, Artificial Sequence
  Description of Artificial Sequence: Synthetic oligonucleotide
aguaacccaggccgggccg

SEQ ID NO: 373544 - RNA, 19 nt, Artificial Sequence
  Description of Artificial Sequence: Synthetic oligonucleotide
aaacuacccgaugacgcug

SEQ ID NO: 373545 - RNA, 19 nt, Artificial Sequence
  Description of Artificial Sequence: Synthetic oligonucleotide
ucgccgaacuuggaaagcg

SEQ ID NO: 373546 - RNA, 19 nt, Artificial Sequence
  Description of Artificial Sequence: Synthetic oligonucleotide
ucagcucgaacccgcgaag

SEQ ID NO: 373547 - RNA, 19 nt, Artificial Sequence
  Description of Artificial Sequence: Synthetic oligonucleotide
gaacccgcgaagcucgcag

SEQ ID NO: 373548 - RNA, 19 nt, Artificial Sequence
  Description of Artificial Sequence: Synthetic oligonucleotide
aggggccgaauccacaaag

SEQ ID NO: 373549 - RNA, 19 nt, Artificial Sequence
  Description of Artificial Sequence: Synthetic oligonucleotide
acacgcguggccaacuagc

SEQ ID NO: 373550 - RNA, 19 nt, Artificial Sequence
  Description of Artificial Sequence: Synthetic oligonucleotide
aaucgcaacuuggaguuaa

SEQ ID NO: 373551 - RNA, 19 nt, Artificial Sequence
  Description of Artificial Sequence: Synthetic oligonucleotide
agcucgauucuggacaguc

SEQ ID NO: 373552 - RNA, 19 nt, Artificial Sequence
  Description of Artificial Sequence: Synthetic oligonucleotide
gguguuauagggugcgacc

SEQ ID NO: 373553 - RNA, 19 nt, Artificial Sequence
  Description of Artificial Sequence: Synthetic oligonucleotide
aacccgcgaagcucgcagg

SEQ ID NO: 373554 - RNA, 19 nt, Artificial Sequence
  Description of Artificial Sequence: Synthetic oligonucleotide
uagucgccgaacuuggaaa

SEQ ID NO: 373555 - RNA, 19 nt, Artificial Sequence
  Description of Artificial Sequence: Synthetic oligonucleotide
uuguaguagggcuuccaau

SEQ ID NO: 373556 - RNA, 19 nt, Artificial Sequence
  Description of Artificial Sequence: Synthetic oligonucleotide
aguucguucucggucagca

SEQ ID NO: 373557 - RNA, 19 nt, Artificial Sequence
  Description of Artificial Sequence: Synthetic oligonucleotide
guucguacgucuccgagaa

SEQ ID NO: 373558 - RNA, 19 nt, Artificial Sequence
  Description of Artificial Sequence: Synthetic oligonucleotide
guuuaaguccaauggguua

SEQ ID NO: 373559 - RNA, 19 nt, Artificial Sequence
  Description of Artificial Sequence: Synthetic oligonucleotide
aagguccgcugucuuauau

SEQ ID NO: 373560 - RNA, 19 nt, Artificial Sequence
  Description of Artificial Sequence: Synthetic oligonucleotide
uccuaaccugugcagcugu

SEQ ID NO: 373561 - RNA, 19 nt, Artificial Sequence
  Description of Artificial Sequence: Synthetic oligonucleotide
ccguacguaauguucagag

SEQ ID NO: 373562 - RNA, 19 nt, Artificial Sequence
  Description of Artificial Sequence: Synthetic oligonucleotide
uugucgcccguuuccaggc

SEQ ID NO: 373563 - RNA, 19 nt, Artificial Sequence
  Description of Artificial Sequence: Synthetic oligonucleotide
uccuuggaucacuuagcca

SEQ ID NO: 373564 - RNA, 19 nt, Artificial Sequence
  Description of Artificial Sequence: Synthetic oligonucleotide
ucgcuccaacccaagcucc

SEQ ID NO: 373565 - RNA, 19 nt, Artificial Sequence
  Description of Artificial Sequence: Synthetic oligonucleotide
caaugccgcuucuucuugg

SEQ ID NO: 373566 - RNA, 19 nt, Artificial Sequence
  Description of Artificial Sequence: Synthetic oligonucleotide
uaccguucguacgucuccg

SEQ ID NO: 373567 - RNA, 19 nt, Artificial Sequence
  Description of Artificial Sequence: Synthetic oligonucleotide
uuauagggugcgaccggcu

SEQ ID NO: 373568 - RNA, 19 nt, Artificial Sequence
  Description of Artificial Sequence: Synthetic oligonucleotide
gguugagaauagcugcugc

SEQ ID NO: 373569 - RNA, 19 nt, Artificial Sequence
  Description of Artificial Sequence: Synthetic oligonucleotide
caggacaagggacucugac

SEQ ID NO: 373570 - RNA, 19 nt, Artificial Sequence
  Description of Artificial Sequence: Synthetic oligonucleotide
gcaccuguauaguugcuag

SEQ ID NO: 373571 - RNA, 19 nt, Artificial Sequence
  Description of Artificial Sequence: Synthetic oligonucleotide
caucgguugccccuccacc

SEQ ID NO: 373572 - RNA, 19 nt, Artificial Sequence
  Description of Artificial Sequence: Synthetic oligonucleotide
guaccguucguacgucucc

SEQ ID NO: 373573 - RNA, 19 nt, Artificial Sequence
  Description of Artificial Sequence: Synthetic oligonucleotide
agaguggcucagccauggc

SEQ ID NO: 373574 - RNA, 19 nt, Artificial Sequence
  Description of Artificial Sequence: Synthetic oligonucleotide
gcuaguuugaggcuggugu

SEQ ID NO: 373575 - RNA, 19 nt, Artificial Sequence
  Description of Artificial Sequence: Synthetic oligonucleotide
uccaccgacggggagguac

SEQ ID NO: 373576 - RNA, 19 nt, Artificial Sequence
  Description of Artificial Sequence: Synthetic oligonucleotide
cugcuaaguccuuggauca

SEQ ID NO: 373577 - RNA, 19 nt, Artificial Sequence
  Description of Artificial Sequence: Synthetic oligonucleotide
guuaagugcucacacgcgu

SEQ ID NO: 373578 - RNA, 19 nt, Artificial Sequence
  Description of Artificial Sequence: Synthetic oligonucleotide
aacgacaucuaaggaggaa

SEQ ID NO: 373579 - RNA, 19 nt, Artificial Sequence
  Description of Artificial Sequence: Synthetic oligonucleotide
gguuaagugcucacacgcg

SEQ ID NO: 373580 - RNA, 19 nt, Artificial Sequence
  Description of Artificial Sequence: Synthetic oligonucleotide
ucggauuuggcggcugccc

SEQ ID NO: 373581 - RNA, 19 nt, Artificial Sequence
  Description of Artificial Sequence: Synthetic oligonucleotide
ccuaaggguuaaaacuacc

SEQ ID NO: 373582 - RNA, 19 nt, Artificial Sequence
  Description of Artificial Sequence: Synthetic oligonucleotide
gacggggagguaccgccag

SEQ ID NO: 373583 - RNA, 19 nt, Artificial Sequence
  Description of Artificial Sequence: Synthetic oligonucleotide
aacucgcugccguccccuc

SEQ ID NO: 373584 - RNA, 19 nt, Artificial Sequence
  Description of Artificial Sequence: Synthetic oligonucleotide
uaaguccaauggguuaaac

SEQ ID NO: 373585 - RNA, 19 nt, Artificial Sequence
  Description of Artificial Sequence: Synthetic oligonucleotide
aguugcacuacaaguguau

SEQ ID NO: 373586 - RNA, 19 nt, Artificial Sequence
  Description of Artificial Sequence: Synthetic oligonucleotide
uucuuggaugggcgucucc

SEQ ID NO: 373587 - RNA, 19 nt, Artificial Sequence
  Description of Artificial Sequence: Synthetic oligonucleotide
aaacgacaucuaaggagga

SEQ ID NO: 373588 - RNA, 19 nt, Artificial Sequence
  Description of Artificial Sequence: Synthetic oligonucleotide
guacgucuccgagaagucc

SEQ ID NO: 373589 - RNA, 19 nt, Artificial Sequence
  Description of Artificial Sequence: Synthetic oligonucleotide
caccguacguaauguucag

SEQ ID NO: 373590 - RNA, 19 nt, Artificial Sequence
  Description of Artificial Sequence: Synthetic oligonucleotide
gcacuuaaguauuggacaa

SEQ ID NO: 373591 - RNA, 19 nt, Artificial Sequence
  Description of Artificial Sequence: Synthetic oligonucleotide
agguaccgccaguggauag

SEQ ID NO: 373592 - RNA, 19 nt, Artificial Sequence
  Description of Artificial Sequence: Synthetic oligonucleotide
ucgguugccccuccaccga

SEQ ID NO: 373593 - RNA, 19 nt, Artificial Sequence
  Description of Artificial Sequence: Synthetic oligonucleotide
ugcggggacgcucucgauu

SEQ ID NO: 373594 - RNA, 19 nt, Artificial Sequence
  Description of Artificial Sequence: Synthetic oligonucleotide
ucgcaacuuggaguuaagu

SEQ ID NO: 373595 - RNA, 19 nt, Artificial Sequence
  Description of Artificial Sequence: Synthetic oligonucleotide
gcuuaguagaguccucuuc

SEQ ID NO: 373596 - RNA, 19 nt, Artificial Sequence
  Description of Artificial Sequence: Synthetic oligonucleotide
ggacaagggacucugacau

SEQ ID NO: 373597 - RNA, 19 nt, Artificial Sequence
  Description of Artificial Sequence: Synthetic oligonucleotide
guugcacuacaaguguauc

SEQ ID NO: 373598 - RNA, 19 nt, Artificial Sequence
  Description of Artificial Sequence: Synthetic oligonucleotide
cacgggugucgcuccaacc

SEQ ID NO: 373599 - RNA, 19 nt, Artificial Sequence
  Description of Artificial Sequence: Synthetic oligonucleotide
uagggugcgaccggcuggc

SEQ ID NO: 373600 - RNA, 19 nt, Artificial Sequence
  Description of Artificial Sequence: Synthetic oligonucleotide
gguaccgccaguggauagg

SEQ ID NO: 373601 - RNA, 19 nt, Artificial Sequence
  Description of Artificial Sequence: Synthetic oligonucleotide
gcaggcaccguacguaaug

SEQ ID NO: 373602 - RNA, 19 nt, Artificial Sequence
  Description of Artificial Sequence: Synthetic oligonucleotide
uucguacgucuccgagaag

SEQ ID NO: 373603 - RNA, 19 nt, Artificial Sequence
  Description of Artificial Sequence: Synthetic oligonucleotide
cguacguaauguucagagg

SEQ ID NO: 373604 - RNA, 19 nt, Artificial Sequence
  Description of Artificial Sequence: Synthetic oligonucleotide
ggguuaaaacuacccgaug

SEQ ID NO: 373605 - RNA, 19 nt, Artificial Sequence
  Description of Artificial Sequence: Synthetic oligonucleotide
ugguaccguucguacgucu

SEQ ID NO: 373606 - RNA, 19 nt, Artificial Sequence
  Description of Artificial Sequence: Synthetic oligonucleotide
gacaagggacucugacauc

SEQ ID NO: 373607 - RNA, 19 nt, Artificial Sequence
  Description of Artificial Sequence: Synthetic oligonucleotide
cacacgcguggccaacuag

SEQ ID NO: 373608 - RNA, 19 nt, Artificial Sequence
  Description of Artificial Sequence: Synthetic oligonucleotide
gaggccgguuuugagguca

SEQ ID NO: 373609 - RNA, 19 nt, Artificial Sequence
  Description of Artificial Sequence: Synthetic oligonucleotide
ucgcccguuuccaggcagc

SEQ ID NO: 373610 - RNA, 19 nt, Artificial Sequence
  Description of Artificial Sequence: Synthetic oligonucleotide
aaagguccgcugucuuaua

SEQ ID NO: 373611 - RNA, 19 nt, Artificial Sequence
  Description of Artificial Sequence: Synthetic oligonucleotide
gaacuuggaaagcggcgcu

SEQ ID NO: 373612 - RNA, 19 nt, Artificial Sequence
  Description of Artificial Sequence: Synthetic oligonucleotide
uccgggucaugacccggca

SEQ ID NO: 373613 - RNA, 19 nt, Artificial Sequence
  Description of Artificial Sequence: Synthetic oligonucleotide
agcccuuagccgaggacag

SEQ ID NO: 373614 - RNA, 19 nt, Artificial Sequence
  Description of Artificial Sequence: Synthetic oligonucleotide
gugucgcuccaacccaagc

SEQ ID NO: 373615 - RNA, 19 nt, Artificial Sequence
  Description of Artificial Sequence: Synthetic oligonucleotide
guaacccaggccgggccgg

SEQ ID NO: 373616 - RNA, 19 nt, Artificial Sequence
  Description of Artificial Sequence: Synthetic oligonucleotide
gucaucacuuaaggacugc

SEQ ID NO: 373617 - RNA, 19 nt, Artificial Sequence
  Description of Artificial Sequence: Synthetic oligonucleotide
cagcguuucuagucaucac

SEQ ID NO: 373618 - RNA, 19 nt, Artificial Sequence
  Description of Artificial Sequence: Synthetic oligonucleotide
gacugcggggacgcucucg

SEQ ID NO: 373619 - RNA, 19 nt, Artificial Sequence
  Description of Artificial Sequence: Synthetic oligonucleotide
gccgaggacaggcaaacuc

SEQ ID NO: 373620 - RNA, 19 nt, Artificial Sequence
  Description of Artificial Sequence: Synthetic oligonucleotide
agcggcaggcaccguacgu

SEQ ID NO: 373621 - RNA, 19 nt, Artificial Sequence
  Description of Artificial Sequence: Synthetic oligonucleotide
acgcucucgauugccaccu

SEQ ID NO: 373622 - RNA, 19 nt, Artificial Sequence
  Description of Artificial Sequence: Synthetic oligonucleotide
cuucggccgggaauuucug

SEQ ID NO: 373623 - RNA, 19 nt, Artificial Sequence
  Description of Artificial Sequence: Synthetic oligonucleotide
gacggcagcccgacugcgg

SEQ ID NO: 373624 - RNA, 19 nt, Artificial Sequence
  Description of Artificial Sequence: Synthetic oligonucleotide
ggauuuggcggcugcccgc

SEQ ID NO: 373625 - RNA, 19 nt, Artificial Sequence
  Description of Artificial Sequence: Synthetic oligonucleotide
ggcaccguacguaauguuc

SEQ ID NO: 373626 - RNA, 19 nt, Artificial Sequence
  Description of Artificial Sequence: Synthetic oligonucleotide
cccuaaggguuaaaacuac

SEQ ID NO: 373627 - RNA, 19 nt, Artificial Sequence
  Description of Artificial Sequence: Synthetic oligonucleotide
agcaccuguauaguugcua

SEQ ID NO: 373628 - RNA, 19 nt, Artificial Sequence
  Description of Artificial Sequence: Synthetic oligonucleotide
gcgugguaccguucguacg

SEQ ID NO: 373629 - RNA, 19 nt, Artificial Sequence
  Description of Artificial Sequence: Synthetic oligonucleotide
ucgcgcgucgacgccaccc

SEQ ID NO: 373630 - RNA, 19 nt, Artificial Sequence
  Description of Artificial Sequence: Synthetic oligonucleotide
gaauuucuguagugacgcu

SEQ ID NO: 373631 - RNA, 19 nt, Artificial Sequence
  Description of Artificial Sequence: Synthetic oligonucleotide
uucacgccuccccgccgag

SEQ ID NO: 373632 - RNA, 19 nt, Artificial Sequence
  Description of Artificial Sequence: Synthetic oligonucleotide
ucacacgcguggccaacua

SEQ ID NO: 373633 - RNA, 19 nt, Artificial Sequence
  Description of Artificial Sequence: Synthetic oligonucleotide
ggggccgaauccacaaagg

SEQ ID NO: 373634 - RNA, 19 nt, Artificial Sequence
  Description of Artificial Sequence: Synthetic oligonucleotide
ugucgcccguuuccaggca

SEQ ID NO: 373635 - RNA, 19 nt, Artificial Sequence
  Description of Artificial Sequence: Synthetic oligonucleotide
gggccggagcccuuagccg

SEQ ID NO: 373636 - RNA, 19 nt, Artificial Sequence
  Description of Artificial Sequence: Synthetic oligonucleotide
ggggcggucagaguucugc

SEQ ID NO: 373637 - RNA, 19 nt, Artificial Sequence
  Description of Artificial Sequence: Synthetic oligonucleotide
cacgcguggccaacuagca

SEQ ID NO: 373638 - RNA, 19 nt, Artificial Sequence
  Description of Artificial Sequence: Synthetic oligonucleotide
uucuccccguucuggcccu

SEQ ID NO: 373639 - RNA, 19 nt, Artificial Sequence
  Description of Artificial Sequence: Synthetic oligonucleotide
aucgcaacuuggaguuaag

SEQ ID NO: 373640 - RNA, 19 nt, Artificial Sequence
  Description of Artificial Sequence: Synthetic oligonucleotide
cgggaauuucuguagugac

SEQ ID NO: 373641 - RNA, 19 nt, Artificial Sequence
  Description of Artificial Sequence: Synthetic oligonucleotide
ccgagcgcucccacgaagg

SEQ ID NO: 373642 - RNA, 19 nt, Artificial Sequence
  Description of Artificial Sequence: Synthetic oligonucleotide
accguacguaauguucaga

SEQ ID NO: 373643 - RNA, 19 nt, Artificial Sequence
  Description of Artificial Sequence: Synthetic oligonucleotide
gaguugcacuacaagugua

SEQ ID NO: 373644 - RNA, 19 nt, Artificial Sequence
  Description of Artificial Sequence: Synthetic oligonucleotide
gcaccguacguaauguuca

SEQ ID NO: 373645 - RNA, 19 nt, Artificial Sequence
  Description of Artificial Sequence: Synthetic oligonucleotide
uccccguucuggcccuugu

SEQ ID NO: 373646 - RNA, 19 nt, Artificial Sequence
  Description of Artificial Sequence: Synthetic oligonucleotide
accguucguacgucuccga

SEQ ID NO: 373647 - RNA, 19 nt, Artificial Sequence
  Description of Artificial Sequence: Synthetic oligonucleotide
gucggauuuggcggcugcc

SEQ ID NO: 373648 - RNA, 19 nt, Artificial Sequence
  Description of Artificial Sequence: Synthetic oligonucleotide
gguuaaacccagccccuaa

SEQ ID NO: 373649 - RNA, 19 nt, Artificial Sequence
  Description of Artificial Sequence: Synthetic oligonucleotide
cucucgauugccaccuacu

SEQ ID NO: 373650 - RNA, 19 nt, Artificial Sequence
  Description of Artificial Sequence: Synthetic oligonucleotide
aagucccgcugcagaaacu

SEQ ID NO: 373651 - RNA, 19 nt, Artificial Sequence
  Description of Artificial Sequence: Synthetic oligonucleotide
gcgucgacgccacccagcc

SEQ ID NO: 373652 - RNA, 19 nt, Artificial Sequence
  Description of Artificial Sequence: Synthetic oligonucleotide
gacaucgguugccccucca

SEQ ID NO: 373653 - RNA, 19 nt, Artificial Sequence
  Description of Artificial Sequence: Synthetic oligonucleotide
cuaguuugaggcugguguu

SEQ ID NO: 373654 - RNA, 19 nt, Artificial Sequence
  Description of Artificial Sequence: Synthetic oligonucleotide
guggauagguucuccccgu

SEQ ID NO: 373655 - RNA, 19 nt, Artificial Sequence
  Description of Artificial Sequence: Synthetic oligonucleotide
aguguaucucuugcuugua

SEQ ID NO: 373656 - RNA, 19 nt, Artificial Sequence
  Description of Artificial Sequence: Synthetic oligonucleotide
agggacucugacaucgguu

SEQ ID NO: 373657 - RNA, 19 nt, Artificial Sequence
  Description of Artificial Sequence: Synthetic oligonucleotide
caacccaagcucccaguaa

SEQ ID NO: 373658 - RNA, 19 nt, Artificial Sequence
  Description of Artificial Sequence: Synthetic oligonucleotide
ccccuaaggguuaaaacua

SEQ ID NO: 373659 - RNA, 19 nt, Artificial Sequence
  Description of Artificial Sequence: Synthetic oligonucleotide
cuucacgccuccccgccga

SEQ ID NO: 373660 - RNA, 19 nt, Artificial Sequence
  Description of Artificial Sequence: Synthetic oligonucleotide
agcuccgcuuaaggagggg

SEQ ID NO: 373661 - RNA, 19 nt, Artificial Sequence
  Description of Artificial Sequence: Synthetic oligonucleotide
gugcucacacgcguggcca

SEQ ID NO: 373662 - RNA, 19 nt, Artificial Sequence
  Description of Artificial Sequence: Synthetic oligonucleotide
cagcggcaggcaccguacg

SEQ ID NO: 373663 - RNA, 19 nt, Artificial Sequence
  Description of Artificial Sequence: Synthetic oligonucleotide
acucgcgcgucgacgccac

SEQ ID NO: 373664 - RNA, 19 nt, Artificial Sequence
  Description of Artificial Sequence: Synthetic oligonucleotide
ggccggagcccuuagccga

SEQ ID NO: 373665 - RNA, 19 nt, Artificial Sequence
  Description of Artificial Sequence: Synthetic oligonucleotide
gggacggcagcccgacugc

SEQ ID NO: 373666 - RNA, 19 nt, Artificial Sequence
  Description of Artificial Sequence: Synthetic oligonucleotide
aggcaccguacguaauguu

SEQ ID NO: 373667 - RNA, 19 nt, Artificial Sequence
  Description of Artificial Sequence: Synthetic oligonucleotide
gguaccguucguacgucuc

SEQ ID NO: 373668 - RNA, 19 nt, Artificial Sequence
  Description of Artificial Sequence: Synthetic oligonucleotide
ccgcuugggguagaggccg

SEQ ID NO: 373669 - RNA, 19 nt, Artificial Sequence
  Description of Artificial Sequence: Synthetic oligonucleotide
uggcccuugucgcccguuu

SEQ ID NO: 373670 - RNA, 19 nt, Artificial Sequence
  Description of Artificial Sequence: Synthetic oligonucleotide
uugcuaguuugaggcuggu

SEQ ID NO: 373671 - RNA, 19 nt, Artificial Sequence
  Description of Artificial Sequence: Synthetic oligonucleotide
gauuuggcggcugcccgcu

SEQ ID NO: 373672 - RNA, 19 nt, Artificial Sequence
  Description of Artificial Sequence: Synthetic oligonucleotide
ggagcccuuagccgaggac

SEQ ID NO: 373673 - RNA, 19 nt, Artificial Sequence
  Description of Artificial Sequence: Synthetic oligonucleotide
cgaacaucucagcucgaac

SEQ ID NO: 373674 - RNA, 19 nt, Artificial Sequence
  Description of Artificial Sequence: Synthetic oligonucleotide
cuggagguucucggcgcgc

SEQ ID NO: 373675 - RNA, 19 nt, Artificial Sequence
  Description of Artificial Sequence: Synthetic oligonucleotide
gaggggccgaauccacaaa

SEQ ID NO: 373676 - RNA, 19 nt, Artificial Sequence
  Description of Artificial Sequence: Synthetic oligonucleotide
cucuggcucgaugcuccgc

SEQ ID NO: 373677 - RNA, 19 nt, Artificial Sequence
  Description of Artificial Sequence: Synthetic oligonucleotide
gcuucacgccuccccgccg

SEQ ID NO: 373678 - RNA, 19 nt, Artificial Sequence
  Description of Artificial Sequence: Synthetic oligonucleotide
caguucguucucggucagc

SEQ ID NO: 373679 - RNA, 19 nt, Artificial Sequence
  Description of Artificial Sequence: Synthetic oligonucleotide
ccguucguacgucuccgag

SEQ ID NO: 373680 - RNA, 19 nt, Artificial Sequence
  Description of Artificial Sequence: Synthetic oligonucleotide
gguuuaaguccaauggguu

SEQ ID NO: 373681 - RNA, 19 nt, Artificial Sequence
  Description of Artificial Sequence: Synthetic oligonucleotide
gucuccgagaagucccgcu

SEQ ID NO: 373682 - RNA, 19 nt, Artificial Sequence
  Description of Artificial Sequence: Synthetic oligonucleotide
gggugcgaccggcuggccc

SEQ ID NO: 373683 - RNA, 19 nt, Artificial Sequence
  Description of Artificial Sequence: Synthetic oligonucleotide
ccaccgacggggagguacc

SEQ ID NO: 373684 - RNA, 19 nt, Artificial Sequence
  Description of Artificial Sequence: Synthetic oligonucleotide
cccgaugacgcugccuccg

SEQ ID NO: 373685 - RNA, 19 nt, Artificial Sequence
  Description of Artificial Sequence: Synthetic oligonucleotide
gggcacccguuccucugcg

SEQ ID NO: 373686 - RNA, 19 nt, Artificial Sequence
  Description of Artificial Sequence: Synthetic oligonucleotide
ggugucgcuccaacccaag

SEQ ID NO: 373687 - RNA, 19 nt, Artificial Sequence
  Description of Artificial Sequence: Synthetic oligonucleotide
ucacgccuccccgccgagc

SEQ ID NO: 373688 - RNA, 19 nt, Artificial Sequence
  Description of Artificial Sequence: Synthetic oligonucleotide
ccuugucgcccguuuccag

SEQ ID NO: 373689 - RNA, 19 nt, Artificial Sequence
  Description of Artificial Sequence: Synthetic oligonucleotide
cgcacucgcgcgucgacgc

SEQ ID NO: 373690 - RNA, 19 nt, Artificial Sequence
  Description of Artificial Sequence: Synthetic oligonucleotide
uaacccaggccgggccgga

SEQ ID NO: 373691 - RNA, 19 nt, Artificial Sequence
  Description of Artificial Sequence: Synthetic oligonucleotide
cccuccaccgacggggagg

SEQ ID NO: 373692 - RNA, 19 nt, Artificial Sequence
  Description of Artificial Sequence: Synthetic oligonucleotide
ggccgaauccacaaagggu

SEQ ID NO: 373693 - RNA, 19 nt, Artificial Sequence
  Description of Artificial Sequence: Synthetic oligonucleotide
gugguaccguucguacguc

SEQ ID NO: 373694 - RNA, 19 nt, Artificial Sequence
  Description of Artificial Sequence: Synthetic oligonucleotide
cguacgucuccgagaaguc

SEQ ID NO: 373695 - RNA, 19 nt, Artificial Sequence
  Description of Artificial Sequence: Synthetic oligonucleotide
ccuaaccugugcagcuguc

SEQ ID NO: 373696 - RNA, 19 nt, Artificial Sequence
  Description of Artificial Sequence: Synthetic oligonucleotide
guccucuucggccgggaau

SEQ ID NO: 373697 - RNA, 19 nt, Artificial Sequence
  Description of Artificial Sequence: Synthetic oligonucleotide
aggccgguuuugaggucag

SEQ ID NO: 373698 - RNA, 19 nt, Artificial Sequence
  Description of Artificial Sequence: Synthetic oligonucleotide
gccuccgaggggccgaauc

SEQ ID NO: 373699 - RNA, 19 nt, Artificial Sequence
  Description of Artificial Sequence: Synthetic oligonucleotide
guaccgccaguggauaggu

SEQ ID NO: 373700 - RNA, 19 nt, Artificial Sequence
  Description of Artificial Sequence: Synthetic oligonucleotide
agccgaggacaggcaaacu

SEQ ID NO: 373701 - RNA, 19 nt, Artificial Sequence
  Description of Artificial Sequence: Synthetic oligonucleotide
cgggacggcagcccgacug

SEQ ID NO: 373702 - RNA, 19 nt, Artificial Sequence
  Description of Artificial Sequence: Synthetic oligonucleotide
gcuaaguccuuggaucacu

SEQ ID NO: 373703 - RNA, 19 nt, Artificial Sequence
  Description of Artificial Sequence: Synthetic oligonucleotide
caucgcuggugucgucgga

SEQ ID NO: 373704 - RNA, 19 nt, Artificial Sequence
  Description of Artificial Sequence: Synthetic oligonucleotide
caggcaccguacguaaugu

SEQ ID NO: 373705 - RNA, 19 nt, Artificial Sequence
  Description of Artificial Sequence: Synthetic oligonucleotide
gcgaacaucucagcucgaa

SEQ ID NO: 373706 - RNA, 19 nt, Artificial Sequence
  Description of Artificial Sequence: Synthetic oligonucleotide
cucucagcgugguaccguu

SEQ ID NO: 373707 - RNA, 19 nt, Artificial Sequence
  Description of Artificial Sequence: Synthetic oligonucleotide
cacucgcgcgucgacgcca

SEQ ID NO: 373708 - RNA, 19 nt, Artificial Sequence
  Description of Artificial Sequence: Synthetic oligonucleotide
cugucuagucgccgaacuu

SEQ ID NO: 373709 - RNA, 19 nt, Artificial Sequence
  Description of Artificial Sequence: Synthetic oligonucleotide
gucucagauuuggccaccu

SEQ ID NO: 373710 - RNA, 19 nt, Artificial Sequence
  Description of Artificial Sequence: Synthetic oligonucleotide
ccgggucaugacccggcag

SEQ ID NO: 373711 - RNA, 19 nt, Artificial Sequence
  Description of Artificial Sequence: Synthetic oligonucleotide
cugcccgcuugggguagag

SEQ ID NO: 373712 - RNA, 19 nt, Artificial Sequence
  Description of Artificial Sequence: Synthetic oligonucleotide
cgugguaccguucguacgu

SEQ ID NO: 373713 - RNA, 19 nt, Artificial Sequence
  Description of Artificial Sequence: Synthetic oligonucleotide
ccacgggugucgcuccaac

SEQ ID NO: 373714 - RNA, 19 nt, Artificial Sequence
  Description of Artificial Sequence: Synthetic oligonucleotide
cgcgucgacgccacccagc

SEQ ID NO: 373715 - RNA, 19 nt, Artificial Sequence
  Description of Artificial Sequence: Synthetic oligonucleotide
cgucggauuuggcggcugc

SEQ ID NO: 373716 - RNA, 19 nt, Artificial Sequence
  Description of Artificial Sequence: Synthetic oligonucleotide
gcacucgcgcgucgacgcc

SEQ ID NO: 373717 - RNA, 19 nt, Artificial Sequence
  Description of Artificial Sequence: Synthetic oligonucleotide
ggccgggaauuucuguagu

SEQ ID NO: 373718 - RNA, 19 nt, Artificial Sequence
  Description of Artificial Sequence: Synthetic oligonucleotide
ccgcugucuuauauacaca

SEQ ID NO: 373719 - RNA, 19 nt, Artificial Sequence
  Description of Artificial Sequence: Synthetic oligonucleotide
cucgcgcgucgacgccacc

SEQ ID NO: 373720 - RNA, 19 nt, Artificial Sequence
  Description of Artificial Sequence: Synthetic oligonucleotide
ggcuuaguagaguccucuu

SEQ ID NO: 373721 - RNA, 19 nt, Artificial Sequence
  Description of Artificial Sequence: Synthetic oligonucleotide
gccggagcccuuagccgag

SEQ ID NO: 373722 - RNA, 19 nt, Artificial Sequence
  Description of Artificial Sequence: Synthetic oligonucleotide
cgaugacgcugccuccgag

SEQ ID NO: 373723 - RNA, 19 nt, Artificial Sequence
  Description of Artificial Sequence: Synthetic oligonucleotide
ccgaauccacaaaggguua

SEQ ID NO: 373724 - RNA, 19 nt, Artificial Sequence
  Description of Artificial Sequence: Synthetic oligonucleotide
gcgcgucgacgccacccag

SEQ ID NO: 373725 - RNA, 19 nt, Artificial Sequence
  Description of Artificial Sequence: Synthetic oligonucleotide
caaucgcaacuuggaguua

SEQ ID NO: 373726 - RNA, 19 nt, Artificial Sequence
  Description of Artificial Sequence: Synthetic oligonucleotide
gcgaagcucgcaggcucug

SEQ ID NO: 373727 - RNA, 19 nt, Artificial Sequence
  Description of Artificial Sequence: Synthetic oligonucleotide
cgaggggccgaauccacaa

SEQ ID NO: 373728 - RNA, 19 nt, Artificial Sequence
  Description of Artificial Sequence: Synthetic oligonucleotide
ggguuaaacccagccccua

SEQ ID NO: 373729 - RNA, 19 nt, Artificial Sequence
  Description of Artificial Sequence: Synthetic oligonucleotide
gcggcaggcaccguacgua

SEQ ID NO: 373730 - RNA, 19 nt, Artificial Sequence
  Description of Artificial Sequence: Synthetic oligonucleotide
gggugucgcuccaacccaa

SEQ ID NO: 373731 - RNA, 19 nt, Artificial Sequence
  Description of Artificial Sequence: Synthetic oligonucleotide
ccgccaguggauagguucu

SEQ ID NO: 373732 - RNA, 19 nt, Artificial Sequence
  Description of Artificial Sequence: Synthetic oligonucleotide
gucgucggauuuggcggcu

SEQ ID NO: 373733 - RNA, 19 nt, Artificial Sequence
  Description of Artificial Sequence: Synthetic oligonucleotide
cgucgacgccacccagccg

SEQ ID NO: 373734 - RNA, 19 nt, Artificial Sequence
  Description of Artificial Sequence: Synthetic oligonucleotide
ccacgaaggaggaguuggu

SEQ ID NO: 373735 - RNA, 19 nt, Artificial Sequence
  Description of Artificial Sequence: Synthetic oligonucleotide
ccgaugacgcugccuccga

SEQ ID NO: 373736 - RNA, 19 nt, Artificial Sequence
  Description of Artificial Sequence: Synthetic oligonucleotide
ggcgaacaucucagcucga

SEQ ID NO: 373737 - RNA, 19 nt, Artificial Sequence
  Description of Artificial Sequence: Synthetic oligonucleotide
ccggagcccuuagccgagg

SEQ ID NO: 373738 - RNA, 19 nt, Artificial Sequence
  Description of Artificial Sequence: Synthetic oligonucleotide
ucuccccguucuggcccuu

SEQ ID NO: 373739 - RNA, 19 nt, Artificial Sequence
  Description of Artificial Sequence: Synthetic oligonucleotide
cggcaggcaccguacguaa

SEQ ID NO: 373740 - RNA, 19 nt, Artificial Sequence
  Description of Artificial Sequence: Synthetic oligonucleotide
cggggacgcucucgauugc

SEQ ID NO: 373741 - RNA, 19 nt, Artificial Sequence
  Description of Artificial Sequence: Synthetic oligonucleotide
cgacggggagguaccgcca

SEQ ID NO: 373742 - RNA, 19 nt, Artificial Sequence
  Description of Artificial Sequence: Synthetic oligonucleotide
cgcgcgucgacgccaccca

SEQ ID NO: 373743 - RNA, 19 nt, Artificial Sequence
  Description of Artificial Sequence: Synthetic oligonucleotide
ccgcuuaaggaggggauuu

SEQ ID NO: 373744 - RNA, 19 nt, Artificial Sequence
  Description of Artificial Sequence: Synthetic oligonucleotide
cugcggggacgcucucgau

SEQ ID NO: 373745 - RNA, 19 nt, Artificial Sequence
  Description of Artificial Sequence: Synthetic oligonucleotide
ccuccaccgacggggaggu

SEQ ID NO: 373746 - RNA, 19 nt, Artificial Sequence
  Description of Artificial Sequence: Synthetic oligonucleotide
cagcucgauucuggacagu

SEQ ID NO: 373747 - RNA, 19 nt, Artificial Sequence
  Description of Artificial Sequence: Synthetic oligonucleotide
ggcaggcaccguacguaau

SEQ ID NO: 373748 - RNA, 19 nt, Artificial Sequence
  Description of Artificial Sequence: Synthetic oligonucleotide
gcugcccgcuugggguaga

SEQ ID NO: 373749 - RNA, 19 nt, Artificial Sequence
  Description of Artificial Sequence: Synthetic oligonucleotide
ccuugcgcgagaggcacuu

SEQ ID NO: 373750 - RNA, 19 nt, Artificial Sequence
  Description of Artificial Sequence: Synthetic oligonucleotide
ccccgccgagcgcucccac

SEQ ID NO: 373751 - RNA, 19 nt, Artificial Sequence
  Description of Artificial Sequence: Synthetic oligonucleotide
gggagcggcuggagcuuua

SEQ ID NO: 373752 - RNA, 19 nt, Artificial Sequence
  Description of Artificial Sequence: Synthetic oligonucleotide
cgaacccgcgaagcucgca

SEQ ID NO: 373753 - RNA, 19 nt, Artificial Sequence
  Description of Artificial Sequence: Synthetic oligonucleotide
cccgcgaagcucgcaggcu

SEQ ID NO: 373754 - RNA, 19 nt, Artificial Sequence
  Description of Artificial Sequence: Synthetic oligonucleotide
cgacugcggggacgcucuc

SEQ ID NO: 373755 - RNA, 19 nt, Artificial Sequence
  Description of Artificial Sequence: Synthetic oligonucleotide
cuccaccgacggggaggua

SEQ ID NO: 373756 - RNA, 19 nt, Artificial Sequence
  Description of Artificial Sequence: Synthetic oligonucleotide
cgcuuaaggaggggauuuu

SEQ ID NO: 373757 - RNA, 19 nt, Artificial Sequence
  Description of Artificial Sequence: Synthetic oligonucleotide
ucuguuacaaaauuaaggg

SEQ ID NO: 373758 - RNA, 19 nt, Artificial Sequence
  Description of Artificial Sequence: Synthetic oligonucleotide
aaauguuaagcguagcugg

SEQ ID NO: 373759 - RNA, 19 nt, Artificial Sequence
  Description of Artificial Sequence: Synthetic oligonucleotide
aaucccaugacaaugaugg

SEQ ID NO: 373760 - RNA, 19 nt, Artificial Sequence
  Description of Artificial Sequence: Synthetic oligonucleotide
acgauuagaagugagaccc

SEQ ID NO: 373761 - RNA, 19 nt, Artificial Sequence
  Description of Artificial Sequence: Synthetic oligonucleotide
aaacaaggaacauaugcag

SEQ ID NO: 373762 - RNA, 19 nt, Artificial Sequence
  Description of Artificial Sequence: Synthetic oligonucleotide
aacgauuagaagugagacc

SEQ ID NO: 373763 - RNA, 19 nt, Artificial Sequence
  Description of Artificial Sequence: Synthetic oligonucleotide
uguaaagcgcucaaugugg

SEQ ID NO: 373764 - RNA, 19 nt, Artificial Sequence
  Description of Artificial Sequence: Synthetic oligonucleotide
aauuaagggugucccaacc

SEQ ID NO: 373765 - RNA, 19 nt, Artificial Sequence
  Description of Artificial Sequence: Synthetic oligonucleotide
uuugucaggauguagauaa

SEQ ID NO: 373766 - RNA, 19 nt, Artificial Sequence
  Description of Artificial Sequence: Synthetic oligonucleotide
uucuuuuacagcaugcugc

SEQ ID NO: 373767 - RNA, 19 nt, Artificial Sequence
  Description of Artificial Sequence: Synthetic oligonucleotide
cuaaggaagaauuuugagc

SEQ ID NO: 373768 - RNA, 19 nt, Artificial Sequence
  Description of Artificial Sequence: Synthetic oligonucleotide
agugacaacccauaggagg

SEQ ID NO: 373769 - RNA, 19 nt, Artificial Sequence
  Description of Artificial Sequence: Synthetic oligonucleotide
auuccuaauaaagaguggc

SEQ ID NO: 373770 - RNA, 19 nt, Artificial Sequence
  Description of Artificial Sequence: Synthetic oligonucleotide
caauugaacaauaaagcag

SEQ ID NO: 373771 - RNA, 19 nt, Artificial Sequence
  Description of Artificial Sequence: Synthetic oligonucleotide
gaauucaggaaugagggcg

SEQ ID NO: 373772 - RNA, 19 nt, Artificial Sequence
  Description of Artificial Sequence: Synthetic oligonucleotide
ucuaaaauguuaagcguag

SEQ ID NO: 373773 - RNA, 19 nt, Artificial Sequence
  Description of Artificial Sequence: Synthetic oligonucleotide
agacgaagaucccugagcc

SEQ ID NO: 373774 - RNA, 19 nt, Artificial Sequence
  Description of Artificial Sequence: Synthetic oligonucleotide
uuucccauaucccacgagg

SEQ ID NO: 373775 - RNA, 19 nt, Artificial Sequence
  Description of Artificial Sequence: Synthetic oligonucleotide
uagauaagugccauggugc

SEQ ID NO: 373776 - RNA, 19 nt, Artificial Sequence
  Description of Artificial Sequence: Synthetic oligonucleotide
uauauucuuugcuugaaca

SEQ ID NO: 373777 - RNA, 19 nt, Artificial Sequence
  Description of Artificial Sequence: Synthetic oligonucleotide
ugucaguuaaauaaagccu

SEQ ID NO: 373778 - RNA, 19 nt, Artificial Sequence
  Description of Artificial Sequence: Synthetic oligonucleotide
aacgaaaucaaucccuugu

SEQ ID NO: 373779 - RNA, 19 nt, Artificial Sequence
  Description of Artificial Sequence: Synthetic oligonucleotide
aagauuucccaugaaagag

SEQ ID NO: 373780 - RNA, 19 nt, Artificial Sequence
  Description of Artificial Sequence: Synthetic oligonucleotide
agauaagugucacaauugg

SEQ ID NO: 373781 - RNA, 19 nt, Artificial Sequence
  Description of Artificial Sequence: Synthetic oligonucleotide
agauggaugcguuuaggcc

SEQ ID NO: 373782 - RNA, 19 nt, Artificial Sequence
  Description of Artificial Sequence: Synthetic oligonucleotide
aaaauguuaagcguagcug

SEQ ID NO: 373783 - RNA, 19 nt, Artificial Sequence
  Description of Artificial Sequence: Synthetic oligonucleotide
cauggcuucagcuaggaag

SEQ ID NO: 373784 - RNA, 19 nt, Artificial Sequence
  Description of Artificial Sequence: Synthetic oligonucleotide
aaaacaaggaacauaugca

SEQ ID NO: 373785 - RNA, 19 nt, Artificial Sequence
  Description of Artificial Sequence: Synthetic oligonucleotide
aaauuaagggugucccaac

SEQ ID NO: 373786 - RNA, 19 nt, Artificial Sequence
  Description of Artificial Sequence: Synthetic oligonucleotide
cauagaaaucccaauggcc

SEQ ID NO: 373787 - RNA, 19 nt, Artificial Sequence
  Description of Artificial Sequence: Synthetic oligonucleotide
uccccuuacagaauguggg

SEQ ID NO: 373788 - RNA, 19 nt, Artificial Sequence
  Description of Artificial Sequence: Synthetic oligonucleotide
agaaggguuagguaacugg

SEQ ID NO: 373789 - RNA, 19 nt, Artificial Sequence
  Description of Artificial Sequence: Synthetic oligonucleotide
aaacaaucagugacaaccc

SEQ ID NO: 373790 - RNA, 19 nt, Artificial Sequence
  Description of Artificial Sequence: Synthetic oligonucleotide
cagguaaauacccaugacg

SEQ ID NO: 373791 - RNA, 19 nt, Artificial Sequence
  Description of Artificial Sequence: Synthetic oligonucleotide
uguccaaccacagacaagc

SEQ ID NO: 373792 - RNA, 19 nt, Artificial Sequence
  Description of Artificial Sequence: Synthetic oligonucleotide
aaucccuugucccaaccuc

SEQ ID NO: 373793 - RNA, 19 nt, Artificial Sequence
  Description of Artificial Sequence: Synthetic oligonucleotide
uuucaggcuucuaaaauca

SEQ ID NO: 373794 - RNA, 19 nt, Artificial Sequence
  Description of Artificial Sequence: Synthetic oligonucleotide
uagauaagugucacaauug

SEQ ID NO: 373795 - RNA, 19 nt, Artificial Sequence
  Description of Artificial Sequence: Synthetic oligonucleotide
aauguuaagcguagcuggc

SEQ ID NO: 373796 - RNA, 19 nt, Artificial Sequence
  Description of Artificial Sequence: Synthetic oligonucleotide
agagaauugauggugucac

SEQ ID NO: 373797 - RNA, 19 nt, Artificial Sequence
  Description of Artificial Sequence: Synthetic oligonucleotide
aacgagaucccaaggauuc

SEQ ID NO: 373798 - RNA, 19 nt, Artificial Sequence
  Description of Artificial Sequence: Synthetic oligonucleotide
aagcuauauucuuugcuug

SEQ ID NO: 373799 - RNA, 19 nt, Artificial Sequence
  Description of Artificial Sequence: Synthetic oligonucleotide
  modified_base (9)..(9): a, c, u, g, unknown or other
cuugggganaagaugguag

SEQ ID NO: 373800 - RNA, 19 nt, Artificial Sequence
  Description of Artificial Sequence: Synthetic oligonucleotide
cagcuuaccaaugagagag

SEQ ID NO: 373801 - RNA, 19 nt, Artificial Sequence
  Description of Artificial Sequence: Synthetic oligonucleotide
uuaccaaugagagagcacu

SEQ ID NO: 373802 - RNA, 19 nt, Artificial Sequence
  Description of Artificial Sequence: Synthetic oligonucleotide
ugagggcgcacauugaucc

SEQ ID NO: 373803 - RNA, 19 nt, Artificial Sequence
  Description of Artificial Sequence: Synthetic oligonucleotide
acgugaaugugucuuguac

SEQ ID NO: 373804 - RNA, 19 nt, Artificial Sequence
  Description of Artificial Sequence: Synthetic oligonucleotide
guagauaagugccauggug

SEQ ID NO: 373805 - RNA, 19 nt, Artificial Sequence
  Description of Artificial Sequence: Synthetic oligonucleotide
  modified_base (8)..(8): a, c, u, g, unknown or other
uugggganaagaugguagg

SEQ ID NO: 373806 - RNA, 19 nt, Artificial Sequence
  Description of Artificial Sequence: Synthetic oligonucleotide
ucaacgauuagaagugaga

SEQ ID NO: 373807 - RNA, 19 nt, Artificial Sequence
  Description of Artificial Sequence: Synthetic oligonucleotide
augacguagacagggaccc

SEQ ID NO: 373808 - RNA, 19 nt, Artificial Sequence
  Description of Artificial Sequence: Synthetic oligonucleotide
uuuucccuaaggaagaauu

SEQ ID NO: 373809 - RNA, 19 nt, Artificial Sequence
  Description of Artificial Sequence: Synthetic oligonucleotide
uuaagggugucccaaccug

SEQ ID NO: 373810 - RNA, 19 nt, Artificial Sequence
  Description of Artificial Sequence: Synthetic oligonucleotide
uuccuaauaaagaguggcc

SEQ ID NO: 373811 - RNA, 19 nt, Artificial Sequence
  Description of Artificial Sequence: Synthetic oligonucleotide
uguuaagcguagcuggccc

SEQ ID NO: 373812 - RNA, 19 nt, Artificial Sequence
  Description of Artificial Sequence: Synthetic oligonucleotide
agauuccugguuuaagaag

SEQ ID NO: 373813 - RNA, 19 nt, Artificial Sequence
  Description of Artificial Sequence: Synthetic oligonucleotide
agugccacgaccuuggcau

SEQ ID NO: 373814 - RNA, 19 nt, Artificial Sequence
  Description of Artificial Sequence: Synthetic oligonucleotide
auagaaaucccaauggcca

SEQ ID NO: 373815 - RNA, 19 nt, Artificial Sequence
  Description of Artificial Sequence: Synthetic oligonucleotide
agcagagauacucccacuc

SEQ ID NO: 373816 - RNA, 19 nt, Artificial Sequence
  Description of Artificial Sequence: Synthetic oligonucleotide
caggauguagauaaguguc

SEQ ID NO: 373817 - RNA, 19 nt, Artificial Sequence
  Description of Artificial Sequence: Synthetic oligonucleotide
uucaugcuacccaacaaac

SEQ ID NO: 373818 - RNA, 19 nt, Artificial Sequence
  Description of Artificial Sequence: Synthetic oligonucleotide
cacaguuuaacaaauccca

SEQ ID NO: 373819 - RNA, 19 nt, Artificial Sequence
  Description of Artificial Sequence: Synthetic oligonucleotide
aucaagcuauauucuuugc

SEQ ID NO: 373820 - RNA, 19 nt, Artificial Sequence
  Description of Artificial Sequence: Synthetic oligonucleotide
agauuucccaugaaagagc

SEQ ID NO: 373821 - RNA, 19 nt, Artificial Sequence
  Description of Artificial Sequence: Synthetic oligonucleotide
  modified_base (5)..(5): a, c, u, g, unknown or other
ggganaagaugguaggugg

SEQ ID NO: 373822 - RNA, 19 nt, Artificial Sequence
  Description of Artificial Sequence: Synthetic oligonucleotide
agugcuaaaaugaucugag

SEQ ID NO: 373823 - RNA, 19 nt, Artificial Sequence
  Description of Artificial Sequence: Synthetic oligonucleotide
ugcguuuaggccccaaagc

SEQ ID NO: 373824 - RNA, 19 nt, Artificial Sequence
  Description of Artificial Sequence: Synthetic oligonucleotide
acgaaaucaaucccuuguc

SEQ ID NO: 373825 - RNA, 19 nt, Artificial Sequence
  Description of Artificial Sequence: Synthetic oligonucleotide
gacgagguagauaagugcc

SEQ ID NO: 373826 - RNA, 19 nt, Artificial Sequence
  Description of Artificial Sequence: Synthetic oligonucleotide
cugaguaagagaagagggc

SEQ ID NO: 373827 - RNA, 19 nt, Artificial Sequence
  Description of Artificial Sequence: Synthetic oligonucleotide
cuaauaaagaguggccucc

SEQ ID NO: 373828 - RNA, 19 nt, Artificial Sequence
  Description of Artificial Sequence: Synthetic oligonucleotide
aacaaagggcacccacaac

SEQ ID NO: 373829 - RNA, 19 nt, Artificial Sequence
  Description of Artificial Sequence: Synthetic oligonucleotide
uuggcauacgugaaugugu

SEQ ID NO: 373830 - RNA, 19 nt, Artificial Sequence
  Description of Artificial Sequence: Synthetic oligonucleotide
agguguaaagcgcucaaug

SEQ ID NO: 373831 - RNA, 19 nt, Artificial Sequence
  Description of Artificial Sequence: Synthetic oligonucleotide
ucuuuuacagcaugcugcu

SEQ ID NO: 373832 - RNA, 19 nt, Artificial Sequence
  Description of Artificial Sequence: Synthetic oligonucleotide
  modified_base (2)..(2): a, c, u, g, unknown or other
anaagaugguaggugggug

SEQ ID NO: 373833 - RNA, 19 nt, Artificial Sequence
  Description of Artificial Sequence: Synthetic oligonucleotide
auggggauaguccagcuga

SEQ ID NO: 373834 - RNA, 19 nt, Artificial Sequence
  Description of Artificial Sequence: Synthetic oligonucleotide
ucuggguuaaucuggugac

SEQ ID NO: 373835 - RNA, 19 nt, Artificial Sequence
  Description of Artificial Sequence: Synthetic oligonucleotide
ucuuucacgacgagguaga

SEQ ID NO: 373836 - RNA, 19 nt, Artificial Sequence
  Description of Artificial Sequence: Synthetic oligonucleotide
gagacgaagaucccugagc

SEQ ID NO: 373837 - RNA, 19 nt, Artificial Sequence
  Description of Artificial Sequence: Synthetic oligonucleotide
aaugagggcgcacauugau

SEQ ID NO: 373838 - RNA, 19 nt, Artificial Sequence
  Description of Artificial Sequence: Synthetic oligonucleotide
aaacgaaaucaaucccuug

SEQ ID NO: 373839 - RNA, 19 nt, Artificial Sequence
  Description of Artificial Sequence: Synthetic oligonucleotide
caugacguagacagggacc

SEQ ID NO: 373840 - RNA, 19 nt, Artificial Sequence
  Description of Artificial Sequence: Synthetic oligonucleotide
aauggggauaguccagcug

SEQ ID NO: 373841 - RNA, 19 nt, Artificial Sequence
  Description of Artificial Sequence: Synthetic oligonucleotide
aacggcaauggggauaguc

SEQ ID NO: 373842 - RNA, 19 nt, Artificial Sequence
  Description of Artificial Sequence: Synthetic oligonucleotide
auaaagaguggccuccgug

SEQ ID NO: 373843 - RNA, 19 nt, Artificial Sequence
  Description of Artificial Sequence: Synthetic oligonucleotide
aagcgcucaauguggauca

SEQ ID NO: 373844 - RNA, 19 nt, Artificial Sequence
  Description of Artificial Sequence: Synthetic oligonucleotide
aucccaaugccaaugagag

SEQ ID NO: 373845 - RNA, 19 nt, Artificial Sequence
  Description of Artificial Sequence: Synthetic oligonucleotide
uuaaggauuuuggccauag

SEQ ID NO: 373846 - RNA, 19 nt, Artificial Sequence
  Description of Artificial Sequence: Synthetic oligonucleotide
aacaaucagugacaaccca

SEQ ID NO: 373847 - RNA, 19 nt, Artificial Sequence
  Description of Artificial Sequence: Synthetic oligonucleotide
ugcuacccaacaaacaaaa

SEQ ID NO: 373848 - RNA, 19 nt, Artificial Sequence
  Description of Artificial Sequence: Synthetic oligonucleotide
guguaaagcgcucaaugug

SEQ ID NO: 373849 - RNA, 19 nt, Artificial Sequence
  Description of Artificial Sequence: Synthetic oligonucleotide
uuggcgaaagugauggcga

SEQ ID NO: 373850 - RNA, 19 nt, Artificial Sequence
  Description of Artificial Sequence: Synthetic oligonucleotide
cacaacagagaagaguccg

SEQ ID NO: 373851 - RNA, 19 nt, Artificial Sequence
  Description of Artificial Sequence: Synthetic oligonucleotide
uccuaauaaagaguggccu

SEQ ID NO: 373852 - RNA, 19 nt, Artificial Sequence
  Description of Artificial Sequence: Synthetic oligonucleotide
gauaagugucacaauuggc

SEQ ID NO: 373853 - RNA, 19 nt, Artificial Sequence
  Description of Artificial Sequence: Synthetic oligonucleotide
aagaguccgccaguggccc

SEQ ID NO: 373854 - RNA, 19 nt, Artificial Sequence
  Description of Artificial Sequence: Synthetic oligonucleotide
auauucuuugcuugaacau

SEQ ID NO: 373855 - RNA, 19 nt, Artificial Sequence
  Description of Artificial Sequence: Synthetic oligonucleotide
caacgauuagaagugagac

SEQ ID NO: 373856 - RNA, 19 nt, Artificial Sequence
  Description of Artificial Sequence: Synthetic oligonucleotide
acggcaauggggauagucc

SEQ ID NO: 373857 - RNA, 19 nt, Artificial Sequence
  Description of Artificial Sequence: Synthetic oligonucleotide
ugaaugugucuuguacucg

SEQ ID NO: 373858 - RNA, 19 nt, Artificial Sequence
  Description of Artificial Sequence: Synthetic oligonucleotide
guuuaggccccaaagcagg

SEQ ID NO: 373859 - RNA, 19 nt, Artificial Sequence
  Description of Artificial Sequence: Synthetic oligonucleotide
ucaugcuacccaacaaaca

SEQ ID NO: 373860 - RNA, 19 nt, Artificial Sequence
  Description of Artificial Sequence: Synthetic oligonucleotide
gaagaauuuugagccacag

SEQ ID NO: 373861 - RNA, 19 nt, Artificial Sequence
  Description of Artificial Sequence: Synthetic oligonucleotide
caauguggaucauggacag

SEQ ID NO: 373862 - RNA, 19 nt, Artificial Sequence
  Description of Artificial Sequence: Synthetic oligonucleotide
aagugagacccaccaauga

SEQ ID NO: 373863 - RNA, 19 nt, Artificial Sequence
  Description of Artificial Sequence: Synthetic oligonucleotide
uaagugucacaauuggcau

SEQ ID NO: 373864 - RNA, 19 nt, Artificial Sequence
  Description of Artificial Sequence: Synthetic oligonucleotide
uggguuaaucuggugacag

SEQ ID NO: 373865 - RNA, 19 nt, Artificial Sequence
  Description of Artificial Sequence: Synthetic oligonucleotide
auaugcaggcagcagcaag

SEQ ID NO: 373866 - RNA, 19 nt, Artificial Sequence
  Description of Artificial Sequence: Synthetic oligonucleotide
ugagacgaagaucccugag

SEQ ID NO: 373867 - RNA, 19 nt, Artificial Sequence
  Description of Artificial Sequence: Synthetic oligonucleotide
ucaucaagcuauauucuuu

SEQ ID NO: 373868 - RNA, 19 nt, Artificial Sequence
  Description of Artificial Sequence: Synthetic oligonucleotide
uaauaaagaguggccuccg

SEQ ID NO: 373869 - RNA, 19 nt, Artificial Sequence
  Description of Artificial Sequence: Synthetic oligonucleotide
agucaguuuucuuuccucu

SEQ ID NO: 373870 - RNA, 19 nt, Artificial Sequence
  Description of Artificial Sequence: Synthetic oligonucleotide
aauaaagaguggccuccgu

SEQ ID NO: 373871 - RNA, 19 nt, Artificial Sequence
  Description of Artificial Sequence: Synthetic oligonucleotide
aggaacauaugcaguacac

SEQ ID NO: 373872 - RNA, 19 nt, Artificial Sequence
  Description of Artificial Sequence: Synthetic oligonucleotide
ugaaagagccccacuguaa

SEQ ID NO: 373873 - RNA, 19 nt, Artificial Sequence
  Description of Artificial Sequence: Synthetic oligonucleotide
auuaagggugucccaaccu

SEQ ID NO: 373874 - RNA, 19 nt, Artificial Sequence
  Description of Artificial Sequence: Synthetic oligonucleotide
aacaaggaacauaugcagu

SEQ ID NO: 373875 - RNA, 19 nt, Artificial Sequence
  Description of Artificial Sequence: Synthetic oligonucleotide
ugucuuguacucgugugcc

SEQ ID NO: 373876 - RNA, 19 nt, Artificial Sequence
  Description of Artificial Sequence: Synthetic oligonucleotide
ucccaugacaaugauggca

SEQ ID NO: 373877 - RNA, 19 nt, Artificial Sequence
  Description of Artificial Sequence: Synthetic oligonucleotide
cucaacgauuagaagugag

SEQ ID NO: 373878 - RNA, 19 nt, Artificial Sequence
  Description of Artificial Sequence: Synthetic oligonucleotide
agagauacucccacucagc

SEQ ID NO: 373879 - RNA, 19 nt, Artificial Sequence
  Description of Artificial Sequence: Synthetic oligonucleotide
augcguuuaggccccaaag

SEQ ID NO: 373880 - RNA, 19 nt, Artificial Sequence
  Description of Artificial Sequence: Synthetic oligonucleotide
uccaugguaagugauuccu

SEQ ID NO: 373881 - RNA, 19 nt, Artificial Sequence
  Description of Artificial Sequence: Synthetic oligonucleotide
uguucaugcuacccaacaa

SEQ ID NO: 373882 - RNA, 19 nt, Artificial Sequence
  Description of Artificial Sequence: Synthetic oligonucleotide
auguuaagcguagcuggcc

SEQ ID NO: 373883 - RNA, 19 nt, Artificial Sequence
  Description of Artificial Sequence: Synthetic oligonucleotide
uguaaagauuccugguuua

SEQ ID NO: 373884 - RNA, 19 nt, Artificial Sequence
  Description of Artificial Sequence: Synthetic oligonucleotide
acucuggcagguaaauacc

SEQ ID NO: 373885 - RNA, 19 nt, Artificial Sequence
  Description of Artificial Sequence: Synthetic oligonucleotide
gauaguccagcugaacaug

SEQ ID NO: 373886 - RNA, 19 nt, Artificial Sequence
  Description of Artificial Sequence: Synthetic oligonucleotide
gugaaugugucuuguacuc

SEQ ID NO: 373887 - RNA, 19 nt, Artificial Sequence
  Description of Artificial Sequence: Synthetic oligonucleotide
uccuagucaguuuucuuuc

SEQ ID NO: 373888 - RNA, 19 nt, Artificial Sequence
  Description of Artificial Sequence: Synthetic oligonucleotide
uaagggugucccaaccuga

SEQ ID NO: 373889 - RNA, 19 nt, Artificial Sequence
  Description of Artificial Sequence: Synthetic oligonucleotide
aaacaucuuucacgacgag

SEQ ID NO: 373890 - RNA, 19 nt, Artificial Sequence
  Description of Artificial Sequence: Synthetic oligonucleotide
aaaacgaaaucaaucccuu

SEQ ID NO: 373891 - RNA, 19 nt, Artificial Sequence
  Description of Artificial Sequence: Synthetic oligonucleotide
acaacagagaagaguccgc

SEQ ID NO: 373892 - RNA, 19 nt, Artificial Sequence
  Description of Artificial Sequence: Synthetic oligonucleotide
uuccagcgaagguagagcu

SEQ ID NO: 373893 - RNA, 19 nt, Artificial Sequence
  Description of Artificial Sequence: Synthetic oligonucleotide
agugagacccaccaaugaa

SEQ ID NO: 373894 - RNA, 19 nt, Artificial Sequence
  Description of Artificial Sequence: Synthetic oligonucleotide
cucuaaaauguuaagcgua

SEQ ID NO: 373895 - RNA, 19 nt, Artificial Sequence
  Description of Artificial Sequence: Synthetic oligonucleotide
auaggaggcaguguaucuc

SEQ ID NO: 373896 - RNA, 19 nt, Artificial Sequence
  Description of Artificial Sequence: Synthetic oligonucleotide
ggucugaucaguaucuucc

SEQ ID NO: 373897 - RNA, 19 nt, Artificial Sequence
  Description of Artificial Sequence: Synthetic oligonucleotide
caugcccugacccugaaga

SEQ ID NO: 373898 - RNA, 19 nt, Artificial Sequence
  Description of Artificial Sequence: Synthetic oligonucleotide
aggucgaggccugucaggc

SEQ ID NO: 373899 - RNA, 19 nt, Artificial Sequence
  Description of Artificial Sequence: Synthetic oligonucleotide
gauuagaagugagacccac

SEQ ID NO: 373900 - RNA, 19 nt, Artificial Sequence
  Description of Artificial Sequence: Synthetic oligonucleotide
uggcauacgugaauguguc

SEQ ID NO: 373901 - RNA, 19 nt, Artificial Sequence
  Description of Artificial Sequence: Synthetic oligonucleotide
ggcccaaacaaucagugac

SEQ ID NO: 373902 - RNA, 19 nt, Artificial Sequence
  Description of Artificial Sequence: Synthetic oligonucleotide
gaaagagccccacuguaaa

SEQ ID NO: 373903 - RNA, 19 nt, Artificial Sequence
  Description of Artificial Sequence: Synthetic oligonucleotide
uugaucccaugucaguuaa

SEQ ID NO: 373904 - RNA, 19 nt, Artificial Sequence
  Description of Artificial Sequence: Synthetic oligonucleotide
aauacccaugacguagaca

SEQ ID NO: 373905 - RNA, 19 nt, Artificial Sequence
  Description of Artificial Sequence: Synthetic oligonucleotide
cacacuguacacaacgaga

SEQ ID NO: 373906 - RNA, 19 nt, Artificial Sequence
  Description of Artificial Sequence: Synthetic oligonucleotide
augccaaaugucuggucag

SEQ ID NO: 373907 - RNA, 19 nt, Artificial Sequence
  Description of Artificial Sequence: Synthetic oligonucleotide
guagauaagugucacaauu

SEQ ID NO: 373908 - RNA, 19 nt, Artificial Sequence
  Description of Artificial Sequence: Synthetic oligonucleotide
gugagacccaccaaugaag

SEQ ID NO: 373909 - RNA, 19 nt, Artificial Sequence
  Description of Artificial Sequence: Synthetic oligonucleotide
guuuaacaaaucccaugac

SEQ ID NO: 373910 - RNA, 19 nt, Artificial Sequence
  Description of Artificial Sequence: Synthetic oligonucleotide
gaggcaaucuaguauccaa

SEQ ID NO: 373911 - RNA, 19 nt, Artificial Sequence
  Description of Artificial Sequence: Synthetic oligonucleotide
agauacucccacucagcug

SEQ ID NO: 373912 - RNA, 19 nt, Artificial Sequence
  Description of Artificial Sequence: Synthetic oligonucleotide
aaccugaguaagagaagag

SEQ ID NO: 373913 - RNA, 19 nt, Artificial Sequence
  Description of Artificial Sequence: Synthetic oligonucleotide
acucgugugccccacuuga

SEQ ID NO: 373914 - RNA, 19 nt, Artificial Sequence
  Description of Artificial Sequence: Synthetic oligonucleotide
ucacgagagcccacgaaaa

SEQ ID NO: 373915 - RNA, 19 nt, Artificial Sequence
  Description of Artificial Sequence: Synthetic oligonucleotide
gagagguacagccaccaaa

SEQ ID NO: 373916 - RNA, 19 nt, Artificial Sequence
  Description of Artificial Sequence: Synthetic oligonucleotide
cuuggcauacgugaaugug

SEQ ID NO: 373917 - RNA, 19 nt, Artificial Sequence
  Description of Artificial Sequence: Synthetic oligonucleotide
cuuuaugagccagaagcuc

SEQ ID NO: 373918 - RNA, 19 nt, Artificial Sequence
  Description of Artificial Sequence: Synthetic oligonucleotide
aucacaaguggggaaggag

SEQ ID NO: 373919 - RNA, 19 nt, Artificial Sequence
  Description of Artificial Sequence: Synthetic oligonucleotide
caacauucagacccacgag

SEQ ID NO: 373920 - RNA, 19 nt, Artificial Sequence
  Description of Artificial Sequence: Synthetic oligonucleotide
ugucccaaccugaguaaga

SEQ ID NO: 373921 - RNA, 19 nt, Artificial Sequence
  Description of Artificial Sequence: Synthetic oligonucleotide
aguaagagaagagggcaga

SEQ ID NO: 373922 - RNA, 19 nt, Artificial Sequence
  Description of Artificial Sequence: Synthetic oligonucleotide
auggaugcguuuaggcccc

SEQ ID NO: 373923 - RNA, 19 nt, Artificial Sequence
  Description of Artificial Sequence: Synthetic oligonucleotide
ccuaaggaagaauuuugag

SEQ ID NO: 373924 - RNA, 19 nt, Artificial Sequence
  Description of Artificial Sequence: Synthetic oligonucleotide
aacaaccuugaugaagcaa

SEQ ID NO: 373925 - RNA, 19 nt, Artificial Sequence
  Description of Artificial Sequence: Synthetic oligonucleotide
  modified_base (4)..(4): a, c, u, g, unknown or other
gganaagaugguagguggg

SEQ ID NO: 373926 - RNA, 19 nt, Artificial Sequence
  Description of Artificial Sequence: Synthetic oligonucleotide
aggcacagguguaaagcgc

SEQ ID NO: 373927 - RNA, 19 nt, Artificial Sequence
  Description of Artificial Sequence: Synthetic oligonucleotide
ugggcucaacgauuagaag

SEQ ID NO: 373928 - RNA, 19 nt, Artificial Sequence
  Description of Artificial Sequence: Synthetic oligonucleotide
uggugcaauugaacaauaa

SEQ ID NO: 373929 - RNA, 19 nt, Artificial Sequence
  Description of Artificial Sequence: Synthetic oligonucleotide
agucgaucuuccucucauc

SEQ ID NO: 373930 - RNA, 19 nt, Artificial Sequence
  Description of Artificial Sequence: Synthetic oligonucleotide
  modified_base (7)..(7): a, c, u, g, unknown or other
ugggganaagaugguaggu

SEQ ID NO: 373931 - RNA, 19 nt, Artificial Sequence
  Description of Artificial Sequence: Synthetic oligonucleotide
auugaucccaugucaguua

SEQ ID NO: 373932 - RNA, 19 nt, Artificial Sequence
  Description of Artificial Sequence: Synthetic oligonucleotide
guuaagcguagcuggcccc

SEQ ID NO: 373933 - RNA, 19 nt, Artificial Sequence
  Description of Artificial Sequence: Synthetic oligonucleotide
aagaguggccuccgugacu

SEQ ID NO: 373934 - RNA, 19 nt, Artificial Sequence
  Description of Artificial Sequence: Synthetic oligonucleotide
gaaugugucuuguacucgu

SEQ ID NO: 373935 - RNA, 19 nt, Artificial Sequence
  Description of Artificial Sequence: Synthetic oligonucleotide
augugucuuguacucgugu

SEQ ID NO: 373936 - RNA, 19 nt, Artificial Sequence
  Description of Artificial Sequence: Synthetic oligonucleotide
agagguacagccaccaaaa

SEQ ID NO: 373937 - RNA, 19 nt, Artificial Sequence
  Description of Artificial Sequence: Synthetic oligonucleotide
ggugcaauugaacaauaaa

SEQ ID NO: 373938 - RNA, 19 nt, Artificial Sequence
  Description of Artificial Sequence: Synthetic oligonucleotide
aaccuugaugaagcaaaga

SEQ ID NO: 373939 - RNA, 19 nt, Artificial Sequence
  Description of Artificial Sequence: Synthetic oligonucleotide
caaaauuaaggguguccca

SEQ ID NO: 373940 - RNA, 19 nt, Artificial Sequence
  Description of Artificial Sequence: Synthetic oligonucleotide
acguuugucaggauguaga

SEQ ID NO: 373941 - RNA, 19 nt, Artificial Sequence
  Description of Artificial Sequence: Synthetic oligonucleotide
cacaacgagaucccaagga

SEQ ID NO: 373942 - RNA, 19 nt, Artificial Sequence
  Description of Artificial Sequence: Synthetic oligonucleotide
aaugugucuuguacucgug

SEQ ID NO: 373943 - RNA, 19 nt, Artificial Sequence
  Description of Artificial Sequence: Synthetic oligonucleotide
acgaagaucccugagccaa

SEQ ID NO: 373944 - RNA, 19 nt, Artificial Sequence
  Description of Artificial Sequence: Synthetic oligonucleotide
uaaggauuuuggccauagu

SEQ ID NO: 373945 - RNA, 19 nt, Artificial Sequence
  Description of Artificial Sequence: Synthetic oligonucleotide
aggaggcaaucuaguaucc

SEQ ID NO: 373946 - RNA, 19 nt, Artificial Sequence
  Description of Artificial Sequence: Synthetic oligonucleotide
agguagagcuguccaacca

SEQ ID NO: 373947 - RNA, 19 nt, Artificial Sequence
  Description of Artificial Sequence: Synthetic oligonucleotide
gcgaugauggccugacugg

SEQ ID NO: 373948 - RNA, 19 nt, Artificial Sequence
  Description of Artificial Sequence: Synthetic oligonucleotide
cacgagggcuuucaugccc

SEQ ID NO: 373949 - RNA, 19 nt, Artificial Sequence
  Description of Artificial Sequence: Synthetic oligonucleotide
uucccuaaggaagaauuuu

SEQ ID NO: 373950 - RNA, 19 nt, Artificial Sequence
  Description of Artificial Sequence: Synthetic oligonucleotide
gaauuuugagccacagaaa

SEQ ID NO: 373951 - RNA, 19 nt, Artificial Sequence
  Description of Artificial Sequence: Synthetic oligonucleotide
aggccucuaaaauguuaag

SEQ ID NO: 373952 - RNA, 19 nt, Artificial Sequence
  Description of Artificial Sequence: Synthetic oligonucleotide
uccagcgaagguagagcug

SEQ ID NO: 373953 - RNA, 19 nt, Artificial Sequence
  Description of Artificial Sequence: Synthetic oligonucleotide
ggcucaacgauuagaagug

SEQ ID NO: 373954 - RNA, 19 nt, Artificial Sequence
  Description of Artificial Sequence: Synthetic oligonucleotide
cuuucaugcccugacccug

SEQ ID NO: 373955 - RNA, 19 nt, Artificial Sequence
  Description of Artificial Sequence: Synthetic oligonucleotide
ccccacuugacauaggcac

SEQ ID NO: 373956 - RNA, 19 nt, Artificial Sequence
  Description of Artificial Sequence: Synthetic oligonucleotide
cucaaggagauaggcacac

SEQ ID NO: 373957 - RNA, 19 nt, Artificial Sequence
  Description of Artificial Sequence: Synthetic oligonucleotide
gagauacucccacucagcu

SEQ ID NO: 373958 - RNA, 19 nt, Artificial Sequence
  Description of Artificial Sequence: Synthetic oligonucleotide
gagguggcccucacgagag

SEQ ID NO: 373959 - RNA, 19 nt, Artificial Sequence
  Description of Artificial Sequence: Synthetic oligonucleotide
ccaugucaguuaaauaaag

SEQ ID NO: 373960 - RNA, 19 nt, Artificial Sequence
  Description of Artificial Sequence: Synthetic oligonucleotide
guagagggcaagagagagg

SEQ ID NO: 373961 - RNA, 19 nt, Artificial Sequence
  Description of Artificial Sequence: Synthetic oligonucleotide
acgagaucccaaggauucc

SEQ ID NO: 373962 - RNA, 19 nt, Artificial Sequence
  Description of Artificial Sequence: Synthetic oligonucleotide
uacucgugugccccacuug

SEQ ID NO: 373963 - RNA, 19 nt, Artificial Sequence
  Description of Artificial Sequence: Synthetic oligonucleotide
caaucccaaugccaaugag

SEQ ID NO: 373964 - RNA, 19 nt, Artificial Sequence
  Description of Artificial Sequence: Synthetic oligonucleotide
aggauguagauaaguguca

SEQ ID NO: 373965 - RNA, 19 nt, Artificial Sequence
  Description of Artificial Sequence: Synthetic oligonucleotide
ggccucuaaaauguuaagc

SEQ ID NO: 373966 - RNA, 19 nt, Artificial Sequence
  Description of Artificial Sequence: Synthetic oligonucleotide
ccuaauaaagaguggccuc

SEQ ID NO: 373967 - RNA, 19 nt, Artificial Sequence
  Description of Artificial Sequence: Synthetic oligonucleotide
uuaagcguagcuggccccu

SEQ ID NO: 373968 - RNA, 19 nt, Artificial Sequence
  Description of Artificial Sequence: Synthetic oligonucleotide
cgcucaauguggaucaugg

SEQ ID NO: 373969 - RNA, 19 nt, Artificial Sequence
  Description of Artificial Sequence: Synthetic oligonucleotide
gcaaucuaguauccaaaac

SEQ ID NO: 373970 - RNA, 19 nt, Artificial Sequence
  Description of Artificial Sequence: Synthetic oligonucleotide
uucccaugaaagagcccca

SEQ ID NO: 373971 - RNA, 19 nt, Artificial Sequence
  Description of Artificial Sequence: Synthetic oligonucleotide
  modified_base (3)..(3): a, c, u, g, unknown or other
ganaagaugguaggugggu

SEQ ID NO: 373972 - RNA, 19 nt, Artificial Sequence
  Description of Artificial Sequence: Synthetic oligonucleotide
ggcagguaaauacccauga

SEQ ID NO: 373973 - RNA, 19 nt, Artificial Sequence
  Description of Artificial Sequence: Synthetic oligonucleotide
ucagaaggguuagguaacu

SEQ ID NO: 373974 - RNA, 19 nt, Artificial Sequence
  Description of Artificial Sequence: Synthetic oligonucleotide
acgacgagguagauaagug

SEQ ID NO: 373975 - RNA, 19 nt, Artificial Sequence
  Description of Artificial Sequence: Synthetic oligonucleotide
ggugagacgaagaucccug

SEQ ID NO: 373976 - RNA, 19 nt, Artificial Sequence
  Description of Artificial Sequence: Synthetic oligonucleotide
cuugggugagacgaagauc

SEQ ID NO: 373977 - RNA, 19 nt, Artificial Sequence
  Description of Artificial Sequence: Synthetic oligonucleotide
caagcuauauucuuugcuu

SEQ ID NO: 373978 - RNA, 19 nt, Artificial Sequence
  Description of Artificial Sequence: Synthetic oligonucleotide
cuguccaaccacagacaag

SEQ ID NO: 373979 - RNA, 19 nt, Artificial Sequence
  Description of Artificial Sequence: Synthetic oligonucleotide
  modified_base (6)..(6): a, c, u, g, unknown or other
gggganaagaugguaggug

SEQ ID NO: 373980 - RNA, 19 nt, Artificial Sequence
  Description of Artificial Sequence: Synthetic oligonucleotide
agcuuaccaaugagagagc

SEQ ID NO: 373981 - RNA, 19 nt, Artificial Sequence
  Description of Artificial Sequence: Synthetic oligonucleotide
uggcacaguuuaacaaauc

SEQ ID NO: 373982 - RNA, 19 nt, Artificial Sequence
  Description of Artificial Sequence: Synthetic oligonucleotide
cucacgagagcccacgaaa

SEQ ID NO: 373983 - RNA, 19 nt, Artificial Sequence
  Description of Artificial Sequence: Synthetic oligonucleotide
gucaguuaaauaaagccuu

SEQ ID NO: 373984 - RNA, 19 nt, Artificial Sequence
  Description of Artificial Sequence: Synthetic oligonucleotide
gggcucaacgauuagaagu

SEQ ID NO: 373985 - RNA, 19 nt, Artificial Sequence
  Description of Artificial Sequence: Synthetic oligonucleotide
gcguuuaggccccaaagca

SEQ ID NO: 373986 - RNA, 19 nt, Artificial Sequence
  Description of Artificial Sequence: Synthetic oligonucleotide
uuuggccauagugcuaaaa

SEQ ID NO: 373987 - RNA, 19 nt, Artificial Sequence
  Description of Artificial Sequence: Synthetic oligonucleotide
gucgaggccugucaggcuc

SEQ ID NO: 373988 - RNA, 19 nt, Artificial Sequence
  Description of Artificial Sequence: Synthetic oligonucleotide
caacccauaggaggcagug

SEQ ID NO: 373989 - RNA, 19 nt, Artificial Sequence
  Description of Artificial Sequence: Synthetic oligonucleotide
ucccaaccugaguaagaga

SEQ ID NO: 373990 - RNA, 19 nt, Artificial Sequence
  Description of Artificial Sequence: Synthetic oligonucleotide
agcuaggaaggaggcaauc

SEQ ID NO: 373991 - RNA, 19 nt, Artificial Sequence
  Description of Artificial Sequence: Synthetic oligonucleotide
agcaaagauggaugcguuu

SEQ ID NO: 373992 - RNA, 19 nt, Artificial Sequence
  Description of Artificial Sequence: Synthetic oligonucleotide
auacgugaaugugucuugu

SEQ ID NO: 373993 - RNA, 19 nt, Artificial Sequence
  Description of Artificial Sequence: Synthetic oligonucleotide
gaugcguuuaggccccaaa

SEQ ID NO: 373994 - RNA, 19 nt, Artificial Sequence
  Description of Artificial Sequence: Synthetic oligonucleotide
cuugucccaaccuccccuc

SEQ ID NO: 373995 - RNA, 19 nt, Artificial Sequence
  Description of Artificial Sequence: Synthetic oligonucleotide
ggauuuuggccauagugcu

SEQ ID NO: 373996 - RNA, 19 nt, Artificial Sequence
  Description of Artificial Sequence: Synthetic oligonucleotide
cuaggaaggaggcaaucua

SEQ ID NO: 373997 - RNA, 19 nt, Artificial Sequence
  Description of Artificial Sequence: Synthetic oligonucleotide
augcaguacacgaugggaa

SEQ ID NO: 373998 - RNA, 19 nt, Artificial Sequence
  Description of Artificial Sequence: Synthetic oligonucleotide
cauucagaaggguuaggua

SEQ ID NO: 373999 - RNA, 19 nt, Artificial Sequence
  Description of Artificial Sequence: Synthetic oligonucleotide
gagcuaacaucuucuuuua

SEQ ID NO: 374000 - RNA, 19 nt, Artificial Sequence
  Description of Artificial Sequence: Synthetic oligonucleotide
ugacccugaagagucgauc

SEQ ID NO: 374001 - RNA, 19 nt, Artificial Sequence
  Description of Artificial Sequence: Synthetic oligonucleotide
gcaacggcaauggggauag

SEQ ID NO: 374002 - RNA, 19 nt, Artificial Sequence
  Description of Artificial Sequence: Synthetic oligonucleotide
cacguuugucaggauguag

SEQ ID NO: 374003 - RNA, 19 nt, Artificial Sequence
  Description of Artificial Sequence: Synthetic oligonucleotide
gacgaagaucccugagcca

SEQ ID NO: 374004 - RNA, 19 nt, Artificial Sequence
  Description of Artificial Sequence: Synthetic oligonucleotide
gaucccaugucaguuaaau

SEQ ID NO: 374005 - RNA, 19 nt, Artificial Sequence
  Description of Artificial Sequence: Synthetic oligonucleotide
guacuuggucagaugaaga

SEQ ID NO: 374006 - RNA, 19 nt, Artificial Sequence
  Description of Artificial Sequence: Synthetic oligonucleotide
cccaaccugaguaagagaa

SEQ ID NO: 374007 - RNA, 19 nt, Artificial Sequence
  Description of Artificial Sequence: Synthetic oligonucleotide
gcaagagagagguuuccca

SEQ ID NO: 374008 - RNA, 19 nt, Artificial Sequence
  Description of Artificial Sequence: Synthetic oligonucleotide
gguguaaagcgcucaaugu

SEQ ID NO: 374009 - RNA, 19 nt, Artificial Sequence
  Description of Artificial Sequence: Synthetic oligonucleotide
uguacucgugugccccacu

SEQ ID NO: 374010 - RNA, 19 nt, Artificial Sequence
  Description of Artificial Sequence: Synthetic oligonucleotide
gguuaaucuggugacagua

SEQ ID NO: 374011 - RNA, 19 nt, Artificial Sequence
  Description of Artificial Sequence: Synthetic oligonucleotide
uacgugaaugugucuugua

SEQ ID NO: 374012 - RNA, 19 nt, Artificial Sequence
  Description of Artificial Sequence: Synthetic oligonucleotide
ggcaaucuaguauccaaaa

SEQ ID NO: 374013 - RNA, 19 nt, Artificial Sequence
  Description of Artificial Sequence: Synthetic oligonucleotide
cacgaccuuggcauacgug

SEQ ID NO: 374014 - RNA, 19 nt, Artificial Sequence
  Description of Artificial Sequence: Synthetic oligonucleotide
uuucacgacgagguagaua

SEQ ID NO: 374015 - RNA, 19 nt, Artificial Sequence
  Description of Artificial Sequence: Synthetic oligonucleotide
aaccuccccucccacugaa

SEQ ID NO: 374016 - RNA, 19 nt, Artificial Sequence
  Description of Artificial Sequence: Synthetic oligonucleotide
uggggauaguccagcugaa

SEQ ID NO: 374017 - RNA, 19 nt, Artificial Sequence
  Description of Artificial Sequence: Synthetic oligonucleotide
cacacccuugggugagacg

SEQ ID NO: 374018 - RNA, 19 nt, Artificial Sequence
  Description of Artificial Sequence: Synthetic oligonucleotide
caugaaagagccccacugu

SEQ ID NO: 374019 - RNA, 19 nt, Artificial Sequence
  Description of Artificial Sequence: Synthetic oligonucleotide
cauaucccacgaggaaccc

SEQ ID NO: 374020 - RNA, 19 nt, Artificial Sequence
  Description of Artificial Sequence: Synthetic oligonucleotide
gaucacaaguggggaagga

SEQ ID NO: 374021 - RNA, 19 nt, Artificial Sequence
  Description of Artificial Sequence: Synthetic oligonucleotide
gcagaguagagggcaagag

SEQ ID NO: 374022 - RNA, 19 nt, Artificial Sequence
  Description of Artificial Sequence: Synthetic oligonucleotide
ggaucacaaguggggaagg

SEQ ID NO: 374023 - RNA, 19 nt, Artificial Sequence
  Description of Artificial Sequence: Synthetic oligonucleotide
ggagugauauuccucuugu

SEQ ID NO: 374024 - RNA, 19 nt, Artificial Sequence
  Description of Artificial Sequence: Synthetic oligonucleotide
gugucccaaccugaguaag

SEQ ID NO: 374025 - RNA, 19 nt, Artificial Sequence
  Description of Artificial Sequence: Synthetic oligonucleotide
acgagguagauaagugcca

SEQ ID NO: 374026 - RNA, 19 nt, Artificial Sequence
  Description of Artificial Sequence: Synthetic oligonucleotide
cgacgagguagauaagugc

SEQ ID NO: 374027 - RNA, 19 nt, Artificial Sequence
  Description of Artificial Sequence: Synthetic oligonucleotide
gagucgaucuuccucucau

SEQ ID NO: 374028 - RNA, 19 nt, Artificial Sequence
  Description of Artificial Sequence: Synthetic oligonucleotide
aggcaaucuaguauccaaa

SEQ ID NO: 374029 - RNA, 19 nt, Artificial Sequence
  Description of Artificial Sequence: Synthetic oligonucleotide
caggcucuuuccagcgaag

SEQ ID NO: 374030 - RNA, 19 nt, Artificial Sequence
  Description of Artificial Sequence: Synthetic oligonucleotide
agguggcccucacgagagc

SEQ ID NO: 374031 - RNA, 19 nt, Artificial Sequence
  Description of Artificial Sequence: Synthetic oligonucleotide
uggcgaaagugauggcgau

SEQ ID NO: 374032 - RNA, 19 nt, Artificial Sequence
  Description of Artificial Sequence: Synthetic oligonucleotide
ggaaaacaucuuucacgac

SEQ ID NO: 374033 - RNA, 19 nt, Artificial Sequence
  Description of Artificial Sequence: Synthetic oligonucleotide
cauaggaggcaguguaucu

SEQ ID NO: 374034 - RNA, 19 nt, Artificial Sequence
  Description of Artificial Sequence: Synthetic oligonucleotide
cucgugugccccacuugac

SEQ ID NO: 374035 - RNA, 19 nt, Artificial Sequence
  Description of Artificial Sequence: Synthetic oligonucleotide
ucgaggccugucaggcucu

SEQ ID NO: 374036 - RNA, 19 nt, Artificial Sequence
  Description of Artificial Sequence: Synthetic oligonucleotide
cagaaggguuagguaacug

SEQ ID NO: 374037 - RNA, 19 nt, Artificial Sequence
  Description of Artificial Sequence: Synthetic oligonucleotide
cuguaaagauuccugguuu

SEQ ID NO: 374038 - RNA, 19 nt, Artificial Sequence
  Description of Artificial Sequence: Synthetic oligonucleotide
ugauggcaaugagugccac

SEQ ID NO: 374039 - RNA, 19 nt, Artificial Sequence
  Description of Artificial Sequence: Synthetic oligonucleotide
gguaaauacccaugacgua

SEQ ID NO: 374040 - RNA, 19 nt, Artificial Sequence
  Description of Artificial Sequence: Synthetic oligonucleotide
guacacaacgagaucccaa

SEQ ID NO: 374041 - RNA, 19 nt, Artificial Sequence
  Description of Artificial Sequence: Synthetic oligonucleotide
auaucccacgaggaacccu

SEQ ID NO: 374042 - RNA, 19 nt, Artificial Sequence
  Description of Artificial Sequence: Synthetic oligonucleotide
cuccuagucaguuuucuuu

SEQ ID NO: 374043 - RNA, 19 nt, Artificial Sequence
  Description of Artificial Sequence: Synthetic oligonucleotide
cccuuacagaaugugggcc

SEQ ID NO: 374044 - RNA, 19 nt, Artificial Sequence
  Description of Artificial Sequence: Synthetic oligonucleotide
agguucgggagguggcccu

SEQ ID NO: 374045 - RNA, 19 nt, Artificial Sequence
  Description of Artificial Sequence: Synthetic oligonucleotide
uggccccugacuuggugau

SEQ ID NO: 374046 - RNA, 19 nt, Artificial Sequence
  Description of Artificial Sequence: Synthetic oligonucleotide
ccaugacguagacagggac

SEQ ID NO: 374047 - RNA, 19 nt, Artificial Sequence
  Description of Artificial Sequence: Synthetic oligonucleotide
ccuuacagaaugugggcca

SEQ ID NO: 374048 - RNA, 19 nt, Artificial Sequence
  Description of Artificial Sequence: Synthetic oligonucleotide
gaaugagggcgcacauuga

SEQ ID NO: 374049 - RNA, 19 nt, Artificial Sequence
  Description of Artificial Sequence: Synthetic oligonucleotide
gagaauugauggugucacu

SEQ ID NO: 374050 - RNA, 19 nt, Artificial Sequence
  Description of Artificial Sequence: Synthetic oligonucleotide
gcgaagguagagcugucca

SEQ ID NO: 374051 - RNA, 19 nt, Artificial Sequence
  Description of Artificial Sequence: Synthetic oligonucleotide
ggcacaguucacaaauguc

SEQ ID NO: 374052 - RNA, 19 nt, Artificial Sequence
  Description of Artificial Sequence: Synthetic oligonucleotide
ggauaguccagcugaacau

SEQ ID NO: 374053 - RNA, 19 nt, Artificial Sequence
  Description of Artificial Sequence: Synthetic oligonucleotide
guaggugggugugggacuc

SEQ ID NO: 374054 - RNA, 19 nt, Artificial Sequence
  Description of Artificial Sequence: Synthetic oligonucleotide
agcaacggcaauggggaua

SEQ ID NO: 374055 - RNA, 19 nt, Artificial Sequence
  Description of Artificial Sequence: Synthetic oligonucleotide
gcaaagauggaugcguuua

SEQ ID NO: 374056 - RNA, 19 nt, Artificial Sequence
  Description of Artificial Sequence: Synthetic oligonucleotide
uucaugcccugacccugaa

SEQ ID NO: 374057 - RNA, 19 nt, Artificial Sequence
  Description of Artificial Sequence: Synthetic oligonucleotide
guuugucaggauguagaua

SEQ ID NO: 374058 - RNA, 19 nt, Artificial Sequence
  Description of Artificial Sequence: Synthetic oligonucleotide
ugacguagacagggacccc

SEQ ID NO: 374059 - RNA, 19 nt, Artificial Sequence
  Description of Artificial Sequence: Synthetic oligonucleotide
gguggcccucacgagagcc

SEQ ID NO: 374060 - RNA, 19 nt, Artificial Sequence
  Description of Artificial Sequence: Synthetic oligonucleotide
uuguacucgugugccccac

SEQ ID NO: 374061 - RNA, 19 nt, Artificial Sequence
  Description of Artificial Sequence: Synthetic oligonucleotide
uggcuccuagucaguuuuc

SEQ ID NO: 374062 - RNA, 19 nt, Artificial Sequence
  Description of Artificial Sequence: Synthetic oligonucleotide
gauggcgaugauggccuga

SEQ ID NO: 374063 - RNA, 19 nt, Artificial Sequence
  Description of Artificial Sequence: Synthetic oligonucleotide
caagcucagucaagacgca

SEQ ID NO: 374064 - RNA, 19 nt, Artificial Sequence
  Description of Artificial Sequence: Synthetic oligonucleotide
uccucucaucaagcuauau

SEQ ID NO: 374065 - RNA, 19 nt, Artificial Sequence
  Description of Artificial Sequence: Synthetic oligonucleotide
cacgacgagguagauaagu

SEQ ID NO: 374066 - RNA, 19 nt, Artificial Sequence
  Description of Artificial Sequence: Synthetic oligonucleotide
ccucuaaaauguuaagcgu

SEQ ID NO: 374067 - RNA, 19 nt, Artificial Sequence
  Description of Artificial Sequence: Synthetic oligonucleotide
ggugucccaaccugaguaa

SEQ ID NO: 374068 - RNA, 19 nt, Artificial Sequence
  Description of Artificial Sequence: Synthetic oligonucleotide
ggaagaauuuugagccaca

SEQ ID NO: 374069 - RNA, 19 nt, Artificial Sequence
  Description of Artificial Sequence: Synthetic oligonucleotide
aggaacccucaaaggcauc

SEQ ID NO: 374070 - RNA, 19 nt, Artificial Sequence
  Description of Artificial Sequence: Synthetic oligonucleotide
ccauaggaggcaguguauc

SEQ ID NO: 374071 - RNA, 19 nt, Artificial Sequence
  Description of Artificial Sequence: Synthetic oligonucleotide
acggcaggccacauaugga

SEQ ID NO: 374072 - RNA, 19 nt, Artificial Sequence
  Description of Artificial Sequence: Synthetic oligonucleotide
gguagauaagugccauggu

SEQ ID NO: 374073 - RNA, 19 nt, Artificial Sequence
  Description of Artificial Sequence: Synthetic oligonucleotide
caaucccuugucccaaccu

SEQ ID NO: 374074 - RNA, 19 nt, Artificial Sequence
  Description of Artificial Sequence: Synthetic oligonucleotide
gcagggagugauauuccuc

SEQ ID NO: 374075 - RNA, 19 nt, Artificial Sequence
  Description of Artificial Sequence: Synthetic oligonucleotide
gaacccucaaaggcauccu

SEQ ID NO: 374076 - RNA, 19 nt, Artificial Sequence
  Description of Artificial Sequence: Synthetic oligonucleotide
ggcacagguguaaagcgcu

SEQ ID NO: 374077 - RNA, 19 nt, Artificial Sequence
  Description of Artificial Sequence: Synthetic oligonucleotide
gggacacaauauuuucccu

SEQ ID NO: 374078 - RNA, 19 nt, Artificial Sequence
  Description of Artificial Sequence: Synthetic oligonucleotide
gcgcacauugaucccaugu

SEQ ID NO: 374079 - RNA, 19 nt, Artificial Sequence
  Description of Artificial Sequence: Synthetic oligonucleotide
gcccucacgagagcccacg

SEQ ID NO: 374080 - RNA, 19 nt, Artificial Sequence
  Description of Artificial Sequence: Synthetic oligonucleotide
ggcagggagugauauuccu

SEQ ID NO: 374081 - RNA, 19 nt, Artificial Sequence
  Description of Artificial Sequence: Synthetic oligonucleotide
ccgccaguggcccaaacaa

SEQ ID NO: 374082 - RNA, 19 nt, Artificial Sequence
  Description of Artificial Sequence: Synthetic oligonucleotide
cccugaguccccuuacaga

SEQ ID NO: 374083 - RNA, 19 nt, Artificial Sequence
  Description of Artificial Sequence: Synthetic oligonucleotide
caccuccuugcuuaaggau

SEQ ID NO: 374084 - RNA, 19 nt, Artificial Sequence
  Description of Artificial Sequence: Synthetic oligonucleotide
guacucgugugccccacuu

SEQ ID NO: 374085 - RNA, 19 nt, Artificial Sequence
  Description of Artificial Sequence: Synthetic oligonucleotide
caaccuccccucccacuga

SEQ ID NO: 374086 - RNA, 19 nt, Artificial Sequence
  Description of Artificial Sequence: Synthetic oligonucleotide
cccugacccugaagagucg

SEQ ID NO: 374087 - RNA, 19 nt, Artificial Sequence
  Description of Artificial Sequence: Synthetic oligonucleotide
gcucaacgauuagaaguga

SEQ ID NO: 374088 - RNA, 19 nt, Artificial Sequence
  Description of Artificial Sequence: Synthetic oligonucleotide
gucagacaggcagcaccuc

SEQ ID NO: 374089 - RNA, 19 nt, Artificial Sequence
  Description of Artificial Sequence: Synthetic oligonucleotide
cccaaacaaucagugacaa

SEQ ID NO: 374090 - RNA, 19 nt, Artificial Sequence
  Description of Artificial Sequence: Synthetic oligonucleotide
uccgugacucuggcaggua

SEQ ID NO: 374091 - RNA, 19 nt, Artificial Sequence
  Description of Artificial Sequence: Synthetic oligonucleotide
ggguuaaucuggugacagu

SEQ ID NO: 374092 - RNA, 19 nt, Artificial Sequence
  Description of Artificial Sequence: Synthetic oligonucleotide
cccugacuuggugauggug

SEQ ID NO: 374093 - RNA, 19 nt, Artificial Sequence
  Description of Artificial Sequence: Synthetic oligonucleotide
ggcgcacauugaucccaug

SEQ ID NO: 374094 - RNA, 19 nt, Artificial Sequence
  Description of Artificial Sequence: Synthetic oligonucleotide
ggcccugaguccccuuaca

SEQ ID NO: 374095 - RNA, 19 nt, Artificial Sequence
  Description of Artificial Sequence: Synthetic oligonucleotide
gugccccacuugacauagg

SEQ ID NO: 374096 - RNA, 19 nt, Artificial Sequence
  Description of Artificial Sequence: Synthetic oligonucleotide
cacccuugggugagacgaa

SEQ ID NO: 374097 - RNA, 19 nt, Artificial Sequence
  Description of Artificial Sequence: Synthetic oligonucleotide
cccaugacguagacaggga

SEQ ID NO: 374098 - RNA, 19 nt, Artificial Sequence
  Description of Artificial Sequence: Synthetic oligonucleotide
gccacauauggaggaucac

SEQ ID NO: 374099 - RNA, 19 nt, Artificial Sequence
  Description of Artificial Sequence: Synthetic oligonucleotide
gcuucuggguuaaucuggu

SEQ ID NO: 374100 - RNA, 19 nt, Artificial Sequence
  Description of Artificial Sequence: Synthetic oligonucleotide
ggcauacgugaaugugucu

SEQ ID NO: 374101 - RNA, 19 nt, Artificial Sequence
  Description of Artificial Sequence: Synthetic oligonucleotide
uggaugcguuuaggcccca

SEQ ID NO: 374102 - RNA, 19 nt, Artificial Sequence
  Description of Artificial Sequence: Synthetic oligonucleotide
ggagacggcaggccacaua

SEQ ID NO: 374103 - RNA, 19 nt, Artificial Sequence
  Description of Artificial Sequence: Synthetic oligonucleotide
guccgccaguggcccaaac

SEQ ID NO: 374104 - RNA, 19 nt, Artificial Sequence
  Description of Artificial Sequence: Synthetic oligonucleotide
gggugagacgaagaucccu

SEQ ID NO: 374105 - RNA, 19 nt, Artificial Sequence
  Description of Artificial Sequence: Synthetic oligonucleotide
cugacccugaagagucgau

SEQ ID NO: 374106 - RNA, 19 nt, Artificial Sequence
  Description of Artificial Sequence: Synthetic oligonucleotide
ccucucaucaagcuauauu

SEQ ID NO: 374107 - RNA, 19 nt, Artificial Sequence
  Description of Artificial Sequence: Synthetic oligonucleotide
ggguuagguaacuggucuu

SEQ ID NO: 374108 - RNA, 19 nt, Artificial Sequence
  Description of Artificial Sequence: Synthetic oligonucleotide
agcgcucaauguggaucau

SEQ ID NO: 374109 - RNA, 19 nt, Artificial Sequence
  Description of Artificial Sequence: Synthetic oligonucleotide
cgauuagaagugagaccca

SEQ ID NO: 374110 - RNA, 19 nt, Artificial Sequence
  Description of Artificial Sequence: Synthetic oligonucleotide
ccugacccugaagagucga

SEQ ID NO: 374111 - RNA, 19 nt, Artificial Sequence
  Description of Artificial Sequence: Synthetic oligonucleotide
gugccacgaccuuggcaua

SEQ ID NO: 374112 - RNA, 19 nt, Artificial Sequence
  Description of Artificial Sequence: Synthetic oligonucleotide
cccacucagcuguaguagu

SEQ ID NO: 374113 - RNA, 19 nt, Artificial Sequence
  Description of Artificial Sequence: Synthetic oligonucleotide
gacccacgagggcuuucau

SEQ ID NO: 374114 - RNA, 19 nt, Artificial Sequence
  Description of Artificial Sequence: Synthetic oligonucleotide
ccgugacucuggcagguaa

SEQ ID NO: 374115 - RNA, 19 nt, Artificial Sequence
  Description of Artificial Sequence: Synthetic oligonucleotide
auacucccacucagcugua

SEQ ID NO: 374116 - RNA, 19 nt, Artificial Sequence
  Description of Artificial Sequence: Synthetic oligonucleotide
cuuucacgacgagguagau

SEQ ID NO: 374117 - RNA, 19 nt, Artificial Sequence
  Description of Artificial Sequence: Synthetic oligonucleotide
aguccgccaguggcccaaa

SEQ ID NO: 374118 - RNA, 19 nt, Artificial Sequence
  Description of Artificial Sequence: Synthetic oligonucleotide
cccaugaaagagccccacu

SEQ ID NO: 374119 - RNA, 19 nt, Artificial Sequence
  Description of Artificial Sequence: Synthetic oligonucleotide
ccugacuggugggcucaac

SEQ ID NO: 374120 - RNA, 19 nt, Artificial Sequence
  Description of Artificial Sequence: Synthetic oligonucleotide
ggaugcguuuaggccccaa

SEQ ID NO: 374121 - RNA, 19 nt, Artificial Sequence
  Description of Artificial Sequence: Synthetic oligonucleotide
ccacgaccuuggcauacgu

SEQ ID NO: 374122 - RNA, 19 nt, Artificial Sequence
  Description of Artificial Sequence: Synthetic oligonucleotide
ggccaagggcaaauuucuu

SEQ ID NO: 374123 - RNA, 19 nt, Artificial Sequence
  Description of Artificial Sequence: Synthetic oligonucleotide
ccccugacuuggugauggu

SEQ ID NO: 374124 - RNA, 19 nt, Artificial Sequence
  Description of Artificial Sequence: Synthetic oligonucleotide
caacggcaauggggauagu

SEQ ID NO: 374125 - RNA, 19 nt, Artificial Sequence
  Description of Artificial Sequence: Synthetic oligonucleotide
ucuaaugacauccagagcu

SEQ ID NO: 374126 - RNA, 19 nt, Artificial Sequence
  Description of Artificial Sequence: Synthetic oligonucleotide
aauuaauucacgaucaaag

SEQ ID NO: 374127 - RNA, 19 nt, Artificial Sequence
  Description of Artificial Sequence: Synthetic oligonucleotide
uaauucacgaucaaagucc

SEQ ID NO: 374128 - RNA, 19 nt, Artificial Sequence
  Description of Artificial Sequence: Synthetic oligonucleotide
aacaagagcgcccaaacuc

SEQ ID NO: 374129 - RNA, 19 nt, Artificial Sequence
  Description of Artificial Sequence: Synthetic oligonucleotide
aauuauucagccuauuccu

SEQ ID NO: 374130 - RNA, 19 nt, Artificial Sequence
  Description of Artificial Sequence: Synthetic oligonucleotide
ugaauaauguauucugagg

SEQ ID NO: 374131 - RNA, 19 nt, Artificial Sequence
  Description of Artificial Sequence: Synthetic oligonucleotide
aaagcuucgugacuaacuc

SEQ ID NO: 374132 - RNA, 19 nt, Artificial Sequence
  Description of Artificial Sequence: Synthetic oligonucleotide
aaaagcgauaaacucuggg

SEQ ID NO: 374133 - RNA, 19 nt, Artificial Sequence
  Description of Artificial Sequence: Synthetic oligonucleotide
aaggaugcagcauaucggg

SEQ ID NO: 374134 - RNA, 19 nt, Artificial Sequence
  Description of Artificial Sequence: Synthetic oligonucleotide
aaggugcgaauucuuaacc

SEQ ID NO: 374135 - RNA, 19 nt, Artificial Sequence
  Description of Artificial Sequence: Synthetic oligonucleotide
aauaguucuaguaaagaug

SEQ ID NO: 374136 - RNA, 19 nt, Artificial Sequence
  Description of Artificial Sequence: Synthetic oligonucleotide
uuuguaagcuugaauaaug

SEQ ID NO: 374137 - RNA, 19 nt, Artificial Sequence
  Description of Artificial Sequence: Synthetic oligonucleotide
uuauacagagccaugccag

SEQ ID NO: 374138 - RNA, 19 nt, Artificial Sequence
  Description of Artificial Sequence: Synthetic oligonucleotide
aaagcgauaaacucuggga

SEQ ID NO: 374139 - RNA, 19 nt, Artificial Sequence
  Description of Artificial Sequence: Synthetic oligonucleotide
uauccguuccuguauaucg

SEQ ID NO: 374140 - RNA, 19 nt, Artificial Sequence
  Description of Artificial Sequence: Synthetic oligonucleotide
aguagauucgaacaagcag

SEQ ID NO: 374141 - RNA, 19 nt, Artificial Sequence
  Description of Artificial Sequence: Synthetic oligonucleotide
ugcaugauuaagcucauca

SEQ ID NO: 374142 - RNA, 19 nt, Artificial Sequence
  Description of Artificial Sequence: Synthetic oligonucleotide
agugagugcagguaacugc

SEQ ID NO: 374143 - RNA, 19 nt, Artificial Sequence
  Description of Artificial Sequence: Synthetic oligonucleotide
ucuaguaaagauguaagac

SEQ ID NO: 374144 - RNA, 19 nt, Artificial Sequence
  Description of Artificial Sequence: Synthetic oligonucleotide
aguggagagaauuauucag

SEQ ID NO: 374145 - RNA, 19 nt, Artificial Sequence
  Description of Artificial Sequence: Synthetic oligonucleotide
aguuacaggacugggaggc

SEQ ID NO: 374146 - RNA, 19 nt, Artificial Sequence
  Description of Artificial Sequence: Synthetic oligonucleotide
cuaaaagcgauaaacucug

SEQ ID NO: 374147 - RNA, 19 nt, Artificial Sequence
  Description of Artificial Sequence: Synthetic oligonucleotide
uguaagacuauuuucuauc

SEQ ID NO: 374148 - RNA, 19 nt, Artificial Sequence
  Description of Artificial Sequence: Synthetic oligonucleotide
cuguauaucgacuguaccc

SEQ ID NO: 374149 - RNA, 19 nt, Artificial Sequence
  Description of Artificial Sequence: Synthetic oligonucleotide
auuuguauggucgcaagac

SEQ ID NO: 374150 - RNA, 19 nt, Artificial Sequence
  Description of Artificial Sequence: Synthetic oligonucleotide
uaagacuauuuucuauccg

SEQ ID NO: 374151 - RNA, 19 nt, Artificial Sequence
  Description of Artificial Sequence: Synthetic oligonucleotide
auaagucagauagaacugc

SEQ ID NO: 374152 - RNA, 19 nt, Artificial Sequence
  Description of Artificial Sequence: Synthetic oligonucleotide
aaaugcaccguauuuguaa

SEQ ID NO: 374153 - RNA, 19 nt, Artificial Sequence
  Description of Artificial Sequence: Synthetic oligonucleotide
guagauucgaacaagcagc

SEQ ID NO: 374154 - RNA, 19 nt, Artificial Sequence
  Description of Artificial Sequence: Synthetic oligonucleotide
aucaagcucauacacauca

SEQ ID NO: 374155 - RNA, 19 nt, Artificial Sequence
  Description of Artificial Sequence: Synthetic oligonucleotide
agcauaucgggucagaaga

SEQ ID NO: 374156 - RNA, 19 nt, Artificial Sequence
  Description of Artificial Sequence: Synthetic oligonucleotide
cauacugacccaaggaugc

SEQ ID NO: 374157 - RNA, 19 nt, Artificial Sequence
  Description of Artificial Sequence: Synthetic oligonucleotide
auuaagcucaucacggacc

SEQ ID NO: 374158 - RNA, 19 nt, Artificial Sequence
  Description of Artificial Sequence: Synthetic oligonucleotide
uauagauugcaugauuaag

SEQ ID NO: 374159 - RNA, 19 nt, Artificial Sequence
  Description of Artificial Sequence: Synthetic oligonucleotide
uguaacuucuaagaguuca

SEQ ID NO: 374160 - RNA, 19 nt, Artificial Sequence
  Description of Artificial Sequence: Synthetic oligonucleotide
acagaaucgaauaagucag

SEQ ID NO: 374161 - RNA, 19 nt, Artificial Sequence
  Description of Artificial Sequence: Synthetic oligonucleotide
cagaagauagccaauggug

SEQ ID NO: 374162 - RNA, 19 nt, Artificial Sequence
  Description of Artificial Sequence: Synthetic oligonucleotide
guaaagauccaccacuggc

SEQ ID NO: 374163 - RNA, 19 nt, Artificial Sequence
  Description of Artificial Sequence: Synthetic oligonucleotide
aagcuucgugacuaacucc

SEQ ID NO: 374164 - RNA, 19 nt, Artificial Sequence
  Description of Artificial Sequence: Synthetic oligonucleotide
aagcuugaauaauguauuc

SEQ ID NO: 374165 - RNA, 19 nt, Artificial Sequence
  Description of Artificial Sequence: Synthetic oligonucleotide
aaaugcacccagcaugcag

SEQ ID NO: 374166 - RNA, 19 nt, Artificial Sequence
  Description of Artificial Sequence: Synthetic oligonucleotide
ucuaacagcauccguucag

SEQ ID NO: 374167 - RNA, 19 nt, Artificial Sequence
  Description of Artificial Sequence: Synthetic oligonucleotide
acuugugcaaaguggagag

SEQ ID NO: 374168 - RNA, 19 nt, Artificial Sequence
  Description of Artificial Sequence: Synthetic oligonucleotide
gugagagugauacuccucg

SEQ ID NO: 374169 - RNA, 19 nt, Artificial Sequence
  Description of Artificial Sequence: Synthetic oligonucleotide
aagauagccaauggugucg

SEQ ID NO: 374170 - RNA, 19 nt, Artificial Sequence
  Description of Artificial Sequence: Synthetic oligonucleotide
aguggaaaaccugagugcg

SEQ ID NO: 374171 - RNA, 19 nt, Artificial Sequence
  Description of Artificial Sequence: Synthetic oligonucleotide
aagggcguugcacucuggc

SEQ ID NO: 374172 - RNA, 19 nt, Artificial Sequence
  Description of Artificial Sequence: Synthetic oligonucleotide
cuuaacaucaacucucuga

SEQ ID NO: 374173 - RNA, 19 nt, Artificial Sequence
  Description of Artificial Sequence: Synthetic oligonucleotide
auaguucuaguaaagaugu

SEQ ID NO: 374174 - RNA, 19 nt, Artificial Sequence
  Description of Artificial Sequence: Synthetic oligonucleotide
aagcgauaaacucugggau

SEQ ID NO: 374175 - RNA, 19 nt, Artificial Sequence
  Description of Artificial Sequence: Synthetic oligonucleotide
gauacccaaaggaugacag

SEQ ID NO: 374176 - RNA, 19 nt, Artificial Sequence
  Description of Artificial Sequence: Synthetic oligonucleotide
uuacacgugcugaagacac

SEQ ID NO: 374177 - RNA, 19 nt, Artificial Sequence
  Description of Artificial Sequence: Synthetic oligonucleotide
ucuguaucagucgaaagac

SEQ ID NO: 374178 - RNA, 19 nt, Artificial Sequence
  Description of Artificial Sequence: Synthetic oligonucleotide
uuaauaguucuaguaaaga

SEQ ID NO: 374179 - RNA, 19 nt, Artificial Sequence
  Description of Artificial Sequence: Synthetic oligonucleotide
uguggguuaauccuucuuc

SEQ ID NO: 374180 - RNA, 19 nt, Artificial Sequence
  Description of Artificial Sequence: Synthetic oligonucleotide
uucuaguaaagauguaaga

SEQ ID NO: 374181 - RNA, 19 nt, Artificial Sequence
  Description of Artificial Sequence: Synthetic oligonucleotide
ucauauaauaaaaguucaa

SEQ ID NO: 374182 - RNA, 19 nt, Artificial Sequence
  Description of Artificial Sequence: Synthetic oligonucleotide
uguauaucgacuguacccu

SEQ ID NO: 374183 - RNA, 19 nt, Artificial Sequence
  Description of Artificial Sequence: Synthetic oligonucleotide
uuguauggucgcaagacac

SEQ ID NO: 374184 - RNA, 19 nt, Artificial Sequence
  Description of Artificial Sequence: Synthetic oligonucleotide
auagccaauggugucgugc

SEQ ID NO: 374185 - RNA, 19 nt, Artificial Sequence
  Description of Artificial Sequence: Synthetic oligonucleotide
caaacgaagaaugucaauc

SEQ ID NO: 374186 - RNA, 19 nt, Artificial Sequence
  Description of Artificial Sequence: Synthetic oligonucleotide
caaggaugcagcauaucgg

SEQ ID NO: 374187 - RNA, 19 nt, Artificial Sequence
  Description of Artificial Sequence: Synthetic oligonucleotide
ugguaucaagcucauacac

SEQ ID NO: 374188 - RNA, 19 nt, Artificial Sequence
  Description of Artificial Sequence: Synthetic oligonucleotide
caaggagaguuucuuaugc

SEQ ID NO: 374189 - RNA, 19 nt, Artificial Sequence
  Description of Artificial Sequence: Synthetic oligonucleotide
aaguuacaggacugggagg

SEQ ID NO: 374190 - RNA, 19 nt, Artificial Sequence
  Description of Artificial Sequence: Synthetic oligonucleotide
uugaacugagcauucgaug

SEQ ID NO: 374191 - RNA, 19 nt, Artificial Sequence
  Description of Artificial Sequence: Synthetic oligonucleotide
aucgggucagaagauagcc

SEQ ID NO: 374192 - RNA, 19 nt, Artificial Sequence
  Description of Artificial Sequence: Synthetic oligonucleotide
ucgaauaagucagauagaa

SEQ ID NO: 374193 - RNA, 19 nt, Artificial Sequence
  Description of Artificial Sequence: Synthetic oligonucleotide
aaaauuaauucacgaucaa

SEQ ID NO: 374194 - RNA, 19 nt, Artificial Sequence
  Description of Artificial Sequence: Synthetic oligonucleotide
gacaagaugaaaggagcgg

SEQ ID NO: 374195 - RNA, 19 nt, Artificial Sequence
  Description of Artificial Sequence: Synthetic oligonucleotide
agugcgaaguuacaggacu

SEQ ID NO: 374196 - RNA, 19 nt, Artificial Sequence
  Description of Artificial Sequence: Synthetic oligonucleotide
uaugcuuggcgucaaggcu

SEQ ID NO: 374197 - RNA, 19 nt, Artificial Sequence
  Description of Artificial Sequence: Synthetic oligonucleotide
uuguaagcuugaauaaugu

SEQ ID NO: 374198 - RNA, 19 nt, Artificial Sequence
  Description of Artificial Sequence: Synthetic oligonucleotide
ucgacuguacccucuaagc

SEQ ID NO: 374199 - RNA, 19 nt, Artificial Sequence
  Description of Artificial Sequence: Synthetic oligonucleotide
ucgugacuaacuccggccg

SEQ ID NO: 374200 - RNA, 19 nt, Artificial Sequence
  Description of Artificial Sequence: Synthetic oligonucleotide
ugcggauauagauugcaug

SEQ ID NO: 374201 - RNA, 19 nt, Artificial Sequence
  Description of Artificial Sequence: Synthetic oligonucleotide
gauuaagcucaucacggac

SEQ ID NO: 374202 - RNA, 19 nt, Artificial Sequence
  Description of Artificial Sequence: Synthetic oligonucleotide
aaauuaauucacgaucaaa

SEQ ID NO: 374203 - RNA, 19 nt, Artificial Sequence
  Description of Artificial Sequence: Synthetic oligonucleotide
acuucuagcuguuggagga

SEQ ID NO: 374204 - RNA, 19 nt, Artificial Sequence
  Description of Artificial Sequence: Synthetic oligonucleotide
gaguggaaaaccugagugc

SEQ ID NO: 374205 - RNA, 19 nt, Artificial Sequence
  Description of Artificial Sequence: Synthetic oligonucleotide
cugagugcgaaguuacagg

SEQ ID NO: 374206 - RNA, 19 nt, Artificial Sequence
  Description of Artificial Sequence: Synthetic oligonucleotide
ucgaaagacagaaucgaau

SEQ ID NO: 374207 - RNA, 19 nt, Artificial Sequence
  Description of Artificial Sequence: Synthetic oligonucleotide
uccuaauuucccucuaaug

SEQ ID NO: 374208 - RNA, 19 nt, Artificial Sequence
  Description of Artificial Sequence: Synthetic oligonucleotide
acaagagcgcccaaacucc

SEQ ID NO: 374209 - RNA, 19 nt, Artificial Sequence
  Description of Artificial Sequence: Synthetic oligonucleotide
agcguuaaggugcgaauuc

SEQ ID NO: 374210 - RNA, 19 nt, Artificial Sequence
  Description of Artificial Sequence: Synthetic oligonucleotide
uaucagucgaaagacagaa

SEQ ID NO: 374211 - RNA, 19 nt, Artificial Sequence
  Description of Artificial Sequence: Synthetic oligonucleotide
uucuuuguggucucaaguc

SEQ ID NO: 374212 - RNA, 19 nt, Artificial Sequence
  Description of Artificial Sequence: Synthetic oligonucleotide
uguauucugagguaucuuu

SEQ ID NO: 374213 - RNA, 19 nt, Artificial Sequence
  Description of Artificial Sequence: Synthetic oligonucleotide
ggaguggaaaaccugagug

SEQ ID NO: 374214 - RNA, 19 nt, Artificial Sequence
  Description of Artificial Sequence: Synthetic oligonucleotide
gauuugauacuuucugcca

SEQ ID NO: 374215 - RNA, 19 nt, Artificial Sequence
  Description of Artificial Sequence: Synthetic oligonucleotide
cucgugcggauauagauug

SEQ ID NO: 374216 - RNA, 19 nt, Artificial Sequence
  Description of Artificial Sequence: Synthetic oligonucleotide
aagacucggaaguccacug

SEQ ID NO: 374217 - RNA, 19 nt, Artificial Sequence
  Description of Artificial Sequence: Synthetic oligonucleotide
uagauucgaacaagcagca

SEQ ID NO: 374218 - RNA, 19 nt, Artificial Sequence
  Description of Artificial Sequence: Synthetic oligonucleotide
uaaggugcgaauucuuaac

SEQ ID NO: 374219 - RNA, 19 nt, Artificial Sequence
  Description of Artificial Sequence: Synthetic oligonucleotide
uuaaggugcgaauucuuaa

SEQ ID NO: 374220 - RNA, 19 nt, Artificial Sequence
  Description of Artificial Sequence: Synthetic oligonucleotide
uucgugacuaacuccggcc

SEQ ID NO: 374221 - RNA, 19 nt, Artificial Sequence
  Description of Artificial Sequence: Synthetic oligonucleotide
aaacaagagcgcccaaacu

SEQ ID NO: 374222 - RNA, 19 nt, Artificial Sequence
  Description of Artificial Sequence: Synthetic oligonucleotide
agcuucgugacuaacuccg

SEQ ID NO: 374223 - RNA, 19 nt, Artificial Sequence
  Description of Artificial Sequence: Synthetic oligonucleotide
ucauacuuucuuaaauuuu

SEQ ID NO: 374224 - RNA, 19 nt, Artificial Sequence
  Description of Artificial Sequence: Synthetic oligonucleotide
uggcguaggccaaugaaga

SEQ ID NO: 374225 - RNA, 19 nt, Artificial Sequence
  Description of Artificial Sequence: Synthetic oligonucleotide
cuuuacacgugcugaagac

SEQ ID NO: 374226 - RNA, 19 nt, Artificial Sequence
  Description of Artificial Sequence: Synthetic oligonucleotide
ucacguuaccaucuguaac

SEQ ID NO: 374227 - RNA, 19 nt, Artificial Sequence
  Description of Artificial Sequence: Synthetic oligonucleotide
uaaaagcgauaaacucugg

SEQ ID NO: 374228 - RNA, 19 nt, Artificial Sequence
  Description of Artificial Sequence: Synthetic oligonucleotide
auuugauacuuucugccaa

SEQ ID NO: 374229 - RNA, 19 nt, Artificial Sequence
  Description of Artificial Sequence: Synthetic oligonucleotide
agauagaacugccagucau

SEQ ID NO: 374230 - RNA, 19 nt, Artificial Sequence
  Description of Artificial Sequence: Synthetic oligonucleotide
uuauucagccuauuccuaa

SEQ ID NO: 374231 - RNA, 19 nt, Artificial Sequence
  Description of Artificial Sequence: Synthetic oligonucleotide
cgaauucuuaaccacaugg

SEQ ID NO: 374232 - RNA, 19 nt, Artificial Sequence
  Description of Artificial Sequence: Synthetic oligonucleotide
auggucgcaagacacucuc

SEQ ID NO: 374233 - RNA, 19 nt, Artificial Sequence
  Description of Artificial Sequence: Synthetic oligonucleotide
caccguauuuguaagcuug

SEQ ID NO: 374234 - RNA, 19 nt, Artificial Sequence
  Description of Artificial Sequence: Synthetic oligonucleotide
uguacauagccaugcauuu

SEQ ID NO: 374235 - RNA, 19 nt, Artificial Sequence
  Description of Artificial Sequence: Synthetic oligonucleotide
aucgacuguacccucuaag

SEQ ID NO: 374236 - RNA, 19 nt, Artificial Sequence
  Description of Artificial Sequence: Synthetic oligonucleotide
aaccacauggucuccuccu

SEQ ID NO: 374237 - RNA, 19 nt, Artificial Sequence
  Description of Artificial Sequence: Synthetic oligonucleotide
gauucauugauuugauacu

SEQ ID NO: 374238 - RNA, 19 nt, Artificial Sequence
  Description of Artificial Sequence: Synthetic oligonucleotide
uguauggucgcaagacacu

SEQ ID NO: 374239 - RNA, 19 nt, Artificial Sequence
  Description of Artificial Sequence: Synthetic oligonucleotide
uauaucgacuguacccucu

SEQ ID NO: 374240 - RNA, 19 nt, Artificial Sequence
  Description of Artificial Sequence: Synthetic oligonucleotide
ucggagaacugcaacucug

SEQ ID NO: 374241 - RNA, 19 nt, Artificial Sequence
  Description of Artificial Sequence: Synthetic oligonucleotide
cuaguaaagauguaagacu

SEQ ID NO: 374242 - RNA, 19 nt, Artificial Sequence
  Description of Artificial Sequence: Synthetic oligonucleotide
gaagauagccaaugguguc

SEQ ID NO: 374243 - RNA, 19 nt, Artificial Sequence
  Description of Artificial Sequence: Synthetic oligonucleotide
guggguuaauccuucuucc

SEQ ID NO: 374244 - RNA, 19 nt, Artificial Sequence
  Description of Artificial Sequence: Synthetic oligonucleotide
ugucaauccgggaggacac

SEQ ID NO: 374245 - RNA, 19 nt, Artificial Sequence
  Description of Artificial Sequence: Synthetic oligonucleotide
ugcaguagauucgaacaag

SEQ ID NO: 374246 - RNA, 19 nt, Artificial Sequence
  Description of Artificial Sequence: Synthetic oligonucleotide
cuggcguaggccaaugaag

SEQ ID NO: 374247 - RNA, 19 nt, Artificial Sequence
  Description of Artificial Sequence: Synthetic oligonucleotide
gagcaaacgaagaauguca

SEQ ID NO: 374248 - RNA, 19 nt, Artificial Sequence
  Description of Artificial Sequence: Synthetic oligonucleotide
agcgcccaaacuccagucc

SEQ ID NO: 374249 - RNA, 19 nt, Artificial Sequence
  Description of Artificial Sequence: Synthetic oligonucleotide
cucgcuauugggaacuuuc

SEQ ID NO: 374250 - RNA, 19 nt, Artificial Sequence
  Description of Artificial Sequence: Synthetic oligonucleotide
ugcgaauucuuaaccacau

SEQ ID NO: 374251 - RNA, 19 nt, Artificial Sequence
  Description of Artificial Sequence: Synthetic oligonucleotide
ggaccaaaaguaguaaggg

SEQ ID NO: 374252 - RNA, 19 nt, Artificial Sequence
  Description of Artificial Sequence: Synthetic oligonucleotide
acggaccaaaaguaguaag

SEQ ID NO: 374253 - RNA, 19 nt, Artificial Sequence
  Description of Artificial Sequence: Synthetic oligonucleotide
cacuucuagcuguuggagg

SEQ ID NO: 374254 - RNA, 19 nt, Artificial Sequence
  Description of Artificial Sequence: Synthetic oligonucleotide
ugcgcacuugugcaaagug

SEQ ID NO: 374255 - RNA, 19 nt, Artificial Sequence
  Description of Artificial Sequence: Synthetic oligonucleotide
uggugugucgucuucugcu

SEQ ID NO: 374256 - RNA, 19 nt, Artificial Sequence
  Description of Artificial Sequence: Synthetic oligonucleotide
uaauguauucugagguauc

SEQ ID NO: 374257 - RNA, 19 nt, Artificial Sequence
  Description of Artificial Sequence: Synthetic oligonucleotide
agggcguugcacucuggcc

SEQ ID NO: 374258 - RNA, 19 nt, Artificial Sequence
  Description of Artificial Sequence: Synthetic oligonucleotide
aauucacgaucaaaguccu

SEQ ID NO: 374259 - RNA, 19 nt, Artificial Sequence
  Description of Artificial Sequence: Synthetic oligonucleotide
aucucgugcggauauagau

SEQ ID NO: 374260 - RNA, 19 nt, Artificial Sequence
  Description of Artificial Sequence: Synthetic oligonucleotide
ucuggcguaggccaaugaa

SEQ ID NO: 374261 - RNA, 19 nt, Artificial Sequence
  Description of Artificial Sequence: Synthetic oligonucleotide
augcaccguauuuguaagc

SEQ ID NO: 374262 - RNA, 19 nt, Artificial Sequence
  Description of Artificial Sequence: Synthetic oligonucleotide
caucacggaccaaaaguag

SEQ ID NO: 374263 - RNA, 19 nt, Artificial Sequence
  Description of Artificial Sequence: Synthetic oligonucleotide
ucaccuuuacacgugcuga

SEQ ID NO: 374264 - RNA, 19 nt, Artificial Sequence
  Description of Artificial Sequence: Synthetic oligonucleotide
gauucgaacaagcagcaau

SEQ ID NO: 374265 - RNA, 19 nt, Artificial Sequence
  Description of Artificial Sequence: Synthetic oligonucleotide
agacagaaucgaauaaguc

SEQ ID NO: 374266 - RNA, 19 nt, Artificial Sequence
  Description of Artificial Sequence: Synthetic oligonucleotide
uaucgggucagaagauagc

SEQ ID NO: 374267 - RNA, 19 nt, Artificial Sequence
  Description of Artificial Sequence: Synthetic oligonucleotide
uuuacacgugcugaagaca

SEQ ID NO: 374268 - RNA, 19 nt, Artificial Sequence
  Description of Artificial Sequence: Synthetic oligonucleotide
acaagaugaaaggagcgga

SEQ ID NO: 374269 - RNA, 19 nt, Artificial Sequence
  Description of Artificial Sequence: Synthetic oligonucleotide
ugcgaaguuacaggacugg

SEQ ID NO: 374270 - RNA, 19 nt, Artificial Sequence
  Description of Artificial Sequence: Synthetic oligonucleotide
gaguaaagauccaccacug

SEQ ID NO: 374271 - RNA, 19 nt, Artificial Sequence
  Description of Artificial Sequence: Synthetic oligonucleotide
auaucgggucagaagauag

SEQ ID NO: 374272 - RNA, 19 nt, Artificial Sequence
  Description of Artificial Sequence: Synthetic oligonucleotide
cuuguacucgcccacucug

SEQ ID NO: 374273 - RNA, 19 nt, Artificial Sequence
  Description of Artificial Sequence: Synthetic oligonucleotide
uucacguuaccaucuguaa

SEQ ID NO: 374274 - RNA, 19 nt, Artificial Sequence
  Description of Artificial Sequence: Synthetic oligonucleotide
ucaucucgugcggauauag

SEQ ID NO: 374275 - RNA, 19 nt, Artificial Sequence
  Description of Artificial Sequence: Synthetic oligonucleotide
agucgaaagacagaaucga

SEQ ID NO: 374276 - RNA, 19 nt, Artificial Sequence
  Description of Artificial Sequence: Synthetic oligonucleotide
ugcaccguauuuguaagcu

SEQ ID NO: 374277 - RNA, 19 nt, Artificial Sequence
  Description of Artificial Sequence: Synthetic oligonucleotide
guggagagaauuauucagc

SEQ ID NO: 374278 - RNA, 19 nt, Artificial Sequence
  Description of Artificial Sequence: Synthetic oligonucleotide
ucucucaaaucuucccaug

SEQ ID NO: 374279 - RNA, 19 nt, Artificial Sequence
  Description of Artificial Sequence: Synthetic oligonucleotide
ucacggaccaaaaguagua

SEQ ID NO: 374280 - RNA, 19 nt, Artificial Sequence
  Description of Artificial Sequence: Synthetic oligonucleotide
cuggauacccaaaggauga

SEQ ID NO: 374281 - RNA, 19 nt, Artificial Sequence
  Description of Artificial Sequence: Synthetic oligonucleotide
caagaugaaaggagcggac

SEQ ID NO: 374282 - RNA, 19 nt, Artificial Sequence
  Description of Artificial Sequence: Synthetic oligonucleotide
cagcaauuugaacugagca

SEQ ID NO: 374283 - RNA, 19 nt, Artificial Sequence
  Description of Artificial Sequence: Synthetic oligonucleotide
uauuccuaaaagcgauaaa

SEQ ID NO: 374284 - RNA, 19 nt, Artificial Sequence
  Description of Artificial Sequence: Synthetic oligonucleotide
cuuuggaucccagcuaaag

SEQ ID NO: 374285 - RNA, 19 nt, Artificial Sequence
  Description of Artificial Sequence: Synthetic oligonucleotide
ucuagcuguuggaggagca

SEQ ID NO: 374286 - RNA, 19 nt, Artificial Sequence
  Description of Artificial Sequence: Synthetic oligonucleotide
ugguuggaguggaaaaccu

SEQ ID NO: 374287 - RNA, 19 nt, Artificial Sequence
  Description of Artificial Sequence: Synthetic oligonucleotide
ucuuguacucgcccacucu

SEQ ID NO: 374288 - RNA, 19 nt, Artificial Sequence
  Description of Artificial Sequence: Synthetic oligonucleotide
uggguuaauccuucuucca

SEQ ID NO: 374289 - RNA, 19 nt, Artificial Sequence
  Description of Artificial Sequence: Synthetic oligonucleotide
gacuaacuccggccgaugc

SEQ ID NO: 374290 - RNA, 19 nt, Artificial Sequence
  Description of Artificial Sequence: Synthetic oligonucleotide
guaagcuugaauaauguau

SEQ ID NO: 374291 - RNA, 19 nt, Artificial Sequence
  Description of Artificial Sequence: Synthetic oligonucleotide
gaugaaaggagcggaccug

SEQ ID NO: 374292 - RNA, 19 nt, Artificial Sequence
  Description of Artificial Sequence: Synthetic oligonucleotide
caauuugaacugagcauuc

SEQ ID NO: 374293 - RNA, 19 nt, Artificial Sequence
  Description of Artificial Sequence: Synthetic oligonucleotide
ucccucuaaugacauccag

SEQ ID NO: 374294 - RNA, 19 nt, Artificial Sequence
  Description of Artificial Sequence: Synthetic oligonucleotide
uacuccucgcuauugggaa

SEQ ID NO: 374295 - RNA, 19 nt, Artificial Sequence
  Description of Artificial Sequence: Synthetic oligonucleotide
uauucagccuauuccuaaa

SEQ ID NO: 374296 - RNA, 19 nt, Artificial Sequence
  Description of Artificial Sequence: Synthetic oligonucleotide
cagcauaucgggucagaag

SEQ ID NO: 374297 - RNA, 19 nt, Artificial Sequence
  Description of Artificial Sequence: Synthetic oligonucleotide
ugagagugauacuccucgc

SEQ ID NO: 374298 - RNA, 19 nt, Artificial Sequence
  Description of Artificial Sequence: Synthetic oligonucleotide
cuggaguaaagauccacca

SEQ ID NO: 374299 - RNA, 19 nt, Artificial Sequence
  Description of Artificial Sequence: Synthetic oligonucleotide
guuggaguggaaaaccuga

SEQ ID NO: 374300 - RNA, 19 nt, Artificial Sequence
  Description of Artificial Sequence: Synthetic oligonucleotide
uggaaaaccugagugcgaa

SEQ ID NO: 374301 - RNA, 19 nt, Artificial Sequence
  Description of Artificial Sequence: Synthetic oligonucleotide
uaagacucggaaguccacu

SEQ ID NO: 374302 - RNA, 19 nt, Artificial Sequence
  Description of Artificial Sequence: Synthetic oligonucleotide
ucucgugcggauauagauu

SEQ ID NO: 374303 - RNA, 19 nt, Artificial Sequence
  Description of Artificial Sequence: Synthetic oligonucleotide
cuucgugacuaacuccggc

SEQ ID NO: 374304 - RNA, 19 nt, Artificial Sequence
  Description of Artificial Sequence: Synthetic oligonucleotide
ggguuaauccuucuuccag

SEQ ID NO: 374305 - RNA, 19 nt, Artificial Sequence
  Description of Artificial Sequence: Synthetic oligonucleotide
cacuggcucaaaugcaccc

SEQ ID NO: 374306 - RNA, 19 nt, Artificial Sequence
  Description of Artificial Sequence: Synthetic oligonucleotide
aacuccggccgaugcaucu

SEQ ID NO: 374307 - RNA, 19 nt, Artificial Sequence
  Description of Artificial Sequence: Synthetic oligonucleotide
uauggucgcaagacacucu

SEQ ID NO: 374308 - RNA, 19 nt, Artificial Sequence
  Description of Artificial Sequence: Synthetic oligonucleotide
augucaauccgggaggaca

SEQ ID NO: 374309 - RNA, 19 nt, Artificial Sequence
  Description of Artificial Sequence: Synthetic oligonucleotide
ucgcuauugggaacuuucu

SEQ ID NO: 374310 - RNA, 19 nt, Artificial Sequence
  Description of Artificial Sequence: Synthetic oligonucleotide
gaggugagagugauacucc

SEQ ID NO: 374311 - RNA, 19 nt, Artificial Sequence
  Description of Artificial Sequence: Synthetic oligonucleotide
agaaucgaauaagucagau

SEQ ID NO: 374312 - RNA, 19 nt, Artificial Sequence
  Description of Artificial Sequence: Synthetic oligonucleotide
cucuaaugacauccagagc

SEQ ID NO: 374313 - RNA, 19 nt, Artificial Sequence
  Description of Artificial Sequence: Synthetic oligonucleotide
acuccucgcuauugggaac

SEQ ID NO: 374314 - RNA, 19 nt, Artificial Sequence
  Description of Artificial Sequence: Synthetic oligonucleotide
uucccgacucugaaucuca

SEQ ID NO: 374315 - RNA, 19 nt, Artificial Sequence
  Description of Artificial Sequence: Synthetic oligonucleotide
cucggaaguccacugauga

SEQ ID NO: 374316 - RNA, 19 nt, Artificial Sequence
  Description of Artificial Sequence: Synthetic oligonucleotide
acuaacuccggccgaugca

SEQ ID NO: 374317 - RNA, 19 nt, Artificial Sequence
  Description of Artificial Sequence: Synthetic oligonucleotide
ggugcgaauucuuaaccac

SEQ ID NO: 374318 - RNA, 19 nt, Artificial Sequence
  Description of Artificial Sequence: Synthetic oligonucleotide
agcacauggacagcaagga

SEQ ID NO: 374319 - RNA, 19 nt, Artificial Sequence
  Description of Artificial Sequence: Synthetic oligonucleotide
ugcaucuccccgguagagg

SEQ ID NO: 374320 - RNA, 19 nt, Artificial Sequence
  Description of Artificial Sequence: Synthetic oligonucleotide
aagacaccuuuuaauaguu

SEQ ID NO: 374321 - RNA, 19 nt, Artificial Sequence
  Description of Artificial Sequence: Synthetic oligonucleotide
augcaguagauucgaacaa

SEQ ID NO: 374322 - RNA, 19 nt, Artificial Sequence
  Description of Artificial Sequence: Synthetic oligonucleotide
ucagcguuaaggugcgaau

SEQ ID NO: 374323 - RNA, 19 nt, Artificial Sequence
  Description of Artificial Sequence: Synthetic oligonucleotide
cacguuaccaucuguaacu

SEQ ID NO: 374324 - RNA, 19 nt, Artificial Sequence
  Description of Artificial Sequence: Synthetic oligonucleotide
guacccucuaagccacugg

SEQ ID NO: 374325 - RNA, 19 nt, Artificial Sequence
  Description of Artificial Sequence: Synthetic oligonucleotide
gucgucuucugcuggagca

SEQ ID NO: 374326 - RNA, 19 nt, Artificial Sequence
  Description of Artificial Sequence: Synthetic oligonucleotide
gaaaaccugagugcgaagu

SEQ ID NO: 374327 - RNA, 19 nt, Artificial Sequence
  Description of Artificial Sequence: Synthetic oligonucleotide
cuuaugcucuucagaaaca

SEQ ID NO: 374328 - RNA, 19 nt, Artificial Sequence
  Description of Artificial Sequence: Synthetic oligonucleotide
caauaaaucgcuuccccgu

SEQ ID NO: 374329 - RNA, 19 nt, Artificial Sequence
  Description of Artificial Sequence: Synthetic oligonucleotide
agacaguaauagucggaga

SEQ ID NO: 374330 - RNA, 19 nt, Artificial Sequence
  Description of Artificial Sequence: Synthetic oligonucleotide
uucuuguacucgcccacuc

SEQ ID NO: 374331 - RNA, 19 nt, Artificial Sequence
  Description of Artificial Sequence: Synthetic oligonucleotide
auggugucgugcuggauau

SEQ ID NO: 374332 - RNA, 19 nt, Artificial Sequence
  Description of Artificial Sequence: Synthetic oligonucleotide
aggugagagugauacuccu

SEQ ID NO: 374333 - RNA, 19 nt, Artificial Sequence
  Description of Artificial Sequence: Synthetic oligonucleotide
aauagucggagaacugcaa

SEQ ID NO: 374334 - RNA, 19 nt, Artificial Sequence
  Description of Artificial Sequence: Synthetic oligonucleotide
ugucgugcuggauaugcuu

SEQ ID NO: 374335 - RNA, 19 nt, Artificial Sequence
  Description of Artificial Sequence: Synthetic oligonucleotide
uacacgugcugaagacacc

SEQ ID NO: 374336 - RNA, 19 nt, Artificial Sequence
  Description of Artificial Sequence: Synthetic oligonucleotide
cggaccaaaaguaguaagg

SEQ ID NO: 374337 - RNA, 19 nt, Artificial Sequence
  Description of Artificial Sequence: Synthetic oligonucleotide
agccgccucauaaagcuuc

SEQ ID NO: 374338 - RNA, 19 nt, Artificial Sequence
  Description of Artificial Sequence: Synthetic oligonucleotide
gacccaaggaugcagcaua

SEQ ID NO: 374339 - RNA, 19 nt, Artificial Sequence
  Description of Artificial Sequence: Synthetic oligonucleotide
cugguaucaagcucauaca

SEQ ID NO: 374340 - RNA, 19 nt, Artificial Sequence
  Description of Artificial Sequence: Synthetic oligonucleotide
guauucugagguaucuuuc

SEQ ID NO: 374341 - RNA, 19 nt, Artificial Sequence
  Description of Artificial Sequence: Synthetic oligonucleotide
gaugcaucuccccgguaga

SEQ ID NO: 374342 - RNA, 19 nt, Artificial Sequence
  Description of Artificial Sequence: Synthetic oligonucleotide
aucacggaccaaaaguagu

SEQ ID NO: 374343 - RNA, 19 nt, Artificial Sequence
  Description of Artificial Sequence: Synthetic oligonucleotide
acacgugcugaagacaccu

SEQ ID NO: 374344 - RNA, 19 nt, Artificial Sequence
  Description of Artificial Sequence: Synthetic oligonucleotide
auucgaacaagcagcaauu

SEQ ID NO: 374345 - RNA, 19 nt, Artificial Sequence
  Description of Artificial Sequence: Synthetic oligonucleotide
augaugugguacaagccga

SEQ ID NO: 374346 - RNA, 19 nt, Artificial Sequence
  Description of Artificial Sequence: Synthetic oligonucleotide
acaaucuuauacagagcca

SEQ ID NO: 374347 - RNA, 19 nt, Artificial Sequence
  Description of Artificial Sequence: Synthetic oligonucleotide
ucaauccgggaggacacac

SEQ ID NO: 374348 - RNA, 19 nt, Artificial Sequence
  Description of Artificial Sequence: Synthetic oligonucleotide
uccucuguaucagucgaaa

SEQ ID NO: 374349 - RNA, 19 nt, Artificial Sequence
  Description of Artificial Sequence: Synthetic oligonucleotide
agugauacuccucgcuauu

SEQ ID NO: 374350 - RNA, 19 nt, Artificial Sequence
  Description of Artificial Sequence: Synthetic oligonucleotide
ucggaggucuucucugagu

SEQ ID NO: 374351 - RNA, 19 nt, Artificial Sequence
  Description of Artificial Sequence: Synthetic oligonucleotide
agugcgcacuugugcaaag

SEQ ID NO: 374352 - RNA, 19 nt, Artificial Sequence
  Description of Artificial Sequence: Synthetic oligonucleotide
ggugucgugcuggauaugc

SEQ ID NO: 374353 - RNA, 19 nt, Artificial Sequence
  Description of Artificial Sequence: Synthetic oligonucleotide
uggcucaaaugcacccagc

SEQ ID NO: 374354 - RNA, 19 nt, Artificial Sequence
  Description of Artificial Sequence: Synthetic oligonucleotide
accuuuacacgugcugaag

SEQ ID NO: 374355 - RNA, 19 nt, Artificial Sequence
  Description of Artificial Sequence: Synthetic oligonucleotide
guauggucgcaagacacuc

SEQ ID NO: 374356 - RNA, 19 nt, Artificial Sequence
  Description of Artificial Sequence: Synthetic oligonucleotide
gcguaggccaaugaagagg

SEQ ID NO: 374357 - RNA, 19 nt, Artificial Sequence
  Description of Artificial Sequence: Synthetic oligonucleotide
aacugccagucaucugagu

SEQ ID NO: 374358 - RNA, 19 nt, Artificial Sequence
  Description of Artificial Sequence: Synthetic oligonucleotide
ccuaaaagcgauaaacucu

SEQ ID NO: 374359 - RNA, 19 nt, Artificial Sequence
  Description of Artificial Sequence: Synthetic oligonucleotide
uuucccgacucugaaucuc

SEQ ID NO: 374360 - RNA, 19 nt, Artificial Sequence
  Description of Artificial Sequence: Synthetic oligonucleotide
ggagcaaacgaagaauguc

SEQ ID NO: 374361 - RNA, 19 nt, Artificial Sequence
  Description of Artificial Sequence: Synthetic oligonucleotide
gcaguagauucgaacaagc

SEQ ID NO: 374362 - RNA, 19 nt, Artificial Sequence
  Description of Artificial Sequence: Synthetic oligonucleotide
ggaagggauacugaauuuc

SEQ ID NO: 374363 - RNA, 19 nt, Artificial Sequence
  Description of Artificial Sequence: Synthetic oligonucleotide
ucagugcgcacuugugcaa

SEQ ID NO: 374364 - RNA, 19 nt, Artificial Sequence
  Description of Artificial Sequence: Synthetic oligonucleotide
gggaucuucucaaaugcac

SEQ ID NO: 374365 - RNA, 19 nt, Artificial Sequence
  Description of Artificial Sequence: Synthetic oligonucleotide
guauaucgacuguacccuc

SEQ ID NO: 374366 - RNA, 19 nt, Artificial Sequence
  Description of Artificial Sequence: Synthetic oligonucleotide
gcaaccagagcugaagaac

SEQ ID NO: 374367 - RNA, 19 nt, Artificial Sequence
  Description of Artificial Sequence: Synthetic oligonucleotide
acgugcugaagacaccuuu

SEQ ID NO: 374368 - RNA, 19 nt, Artificial Sequence
  Description of Artificial Sequence: Synthetic oligonucleotide
gcauucgaugggcuguggg

SEQ ID NO: 374369 - RNA, 19 nt, Artificial Sequence
  Description of Artificial Sequence: Synthetic oligonucleotide
gguaucaagcucauacaca

SEQ ID NO: 374370 - RNA, 19 nt, Artificial Sequence
  Description of Artificial Sequence: Synthetic oligonucleotide
uaucgacuguacccucuaa

SEQ ID NO: 374371 - RNA, 19 nt, Artificial Sequence
  Description of Artificial Sequence: Synthetic oligonucleotide
auaucgacuguacccucua

SEQ ID NO: 374372 - RNA, 19 nt, Artificial Sequence
  Description of Artificial Sequence: Synthetic oligonucleotide
ucgugcggauauagauugc

SEQ ID NO: 374373 - RNA, 19 nt, Artificial Sequence
  Description of Artificial Sequence: Synthetic oligonucleotide
agcaaacgaagaaugucaa

SEQ ID NO: 374374 - RNA, 19 nt, Artificial Sequence
  Description of Artificial Sequence: Synthetic oligonucleotide
auucgaugggcuguggguu

SEQ ID NO: 374375 - RNA, 19 nt, Artificial Sequence
  Description of Artificial Sequence: Synthetic oligonucleotide
gguucauacuuucuuaaau

SEQ ID NO: 374376 - RNA, 19 nt, Artificial Sequence
  Description of Artificial Sequence: Synthetic oligonucleotide
cuaccauccucucugccaa

SEQ ID NO: 374377 - RNA, 19 nt, Artificial Sequence
  Description of Artificial Sequence: Synthetic oligonucleotide
auuauucagccuauuccua

SEQ ID NO: 374378 - RNA, 19 nt, Artificial Sequence
  Description of Artificial Sequence: Synthetic oligonucleotide
ggugugucgucuucugcug

SEQ ID NO: 374379 - RNA, 19 nt, Artificial Sequence
  Description of Artificial Sequence: Synthetic oligonucleotide
uggucgcaagacacucuca

SEQ ID NO: 374380 - RNA, 19 nt, Artificial Sequence
  Description of Artificial Sequence: Synthetic oligonucleotide
cacuugugcaaaguggaga

SEQ ID NO: 374381 - RNA, 19 nt, Artificial Sequence
  Description of Artificial Sequence: Synthetic oligonucleotide
caaucuuauacagagccau

SEQ ID NO: 374382 - RNA, 19 nt, Artificial Sequence
  Description of Artificial Sequence: Synthetic oligonucleotide
cuauccguuccuguauauc

SEQ ID NO: 374383 - RNA, 19 nt, Artificial Sequence
  Description of Artificial Sequence: Synthetic oligonucleotide
gauagccaauggugucgug

SEQ ID NO: 374384 - RNA, 19 nt, Artificial Sequence
  Description of Artificial Sequence: Synthetic oligonucleotide
cguuccuguauaucgacug

SEQ ID NO: 374385 - RNA, 19 nt, Artificial Sequence
  Description of Artificial Sequence: Synthetic oligonucleotide
gucagauagaacugccagu

SEQ ID NO: 374386 - RNA, 19 nt, Artificial Sequence
  Description of Artificial Sequence: Synthetic oligonucleotide
gugcgaauucuuaaccaca

SEQ ID NO: 374387 - RNA, 19 nt, Artificial Sequence
  Description of Artificial Sequence: Synthetic oligonucleotide
gagugcgaaguuacaggac

SEQ ID NO: 374388 - RNA, 19 nt, Artificial Sequence
  Description of Artificial Sequence: Synthetic oligonucleotide
uggguaagacucggaaguc

SEQ ID NO: 374389 - RNA, 19 nt, Artificial Sequence
  Description of Artificial Sequence: Synthetic oligonucleotide
cauucucggaggucuucuc

SEQ ID NO: 374390 - RNA, 19 nt, Artificial Sequence
  Description of Artificial Sequence: Synthetic oligonucleotide
caagcuaguugauauguuu

SEQ ID NO: 374391 - RNA, 19 nt, Artificial Sequence
  Description of Artificial Sequence: Synthetic oligonucleotide
aaagggcguugcacucugg

SEQ ID NO: 374392 - RNA, 19 nt, Artificial Sequence
  Description of Artificial Sequence: Synthetic oligonucleotide
ggcguaggccaaugaagag

SEQ ID NO: 374393 - RNA, 19 nt, Artificial Sequence
  Description of Artificial Sequence: Synthetic oligonucleotide
cuguaacuucuaagaguuc

SEQ ID NO: 374394 - RNA, 19 nt, Artificial Sequence
  Description of Artificial Sequence: Synthetic oligonucleotide
gggcucggaugucagcugg

SEQ ID NO: 374395 - RNA, 19 nt, Artificial Sequence
  Description of Artificial Sequence: Synthetic oligonucleotide
cagaaucgaauaagucaga

SEQ ID NO: 374396 - RNA, 19 nt, Artificial Sequence
  Description of Artificial Sequence: Synthetic oligonucleotide
ccaaggagaguuucuuaug

SEQ ID NO: 374397 - RNA, 19 nt, Artificial Sequence
  Description of Artificial Sequence: Synthetic oligonucleotide
gguuggaguggaaaaccug

SEQ ID NO: 374398 - RNA, 19 nt, Artificial Sequence
  Description of Artificial Sequence: Synthetic oligonucleotide
cuggauaugcuuggcguca

SEQ ID NO: 374399 - RNA, 19 nt, Artificial Sequence
  Description of Artificial Sequence: Synthetic oligonucleotide
ggaaaaccugagugcgaag

SEQ ID NO: 374400 - RNA, 19 nt, Artificial Sequence
  Description of Artificial Sequence: Synthetic oligonucleotide
caguaauagucggagaacu

SEQ ID NO: 374401 - RNA, 19 nt, Artificial Sequence
  Description of Artificial Sequence: Synthetic oligonucleotide
gagugauacuccucgcuau

SEQ ID NO: 374402 - RNA, 19 nt, Artificial Sequence
  Description of Artificial Sequence: Synthetic oligonucleotide
cauucgaugggcugugggu

SEQ ID NO: 374403 - RNA, 19 nt, Artificial Sequence
  Description of Artificial Sequence: Synthetic oligonucleotide
ugacuaacuccggccgaug

SEQ ID NO: 374404 - RNA, 19 nt, Artificial Sequence
  Description of Artificial Sequence: Synthetic oligonucleotide
cuccggccgaugcaucucc

SEQ ID NO: 374405 - RNA, 19 nt, Artificial Sequence
  Description of Artificial Sequence: Synthetic oligonucleotide
gcgaaguuacaggacuggg

SEQ ID NO: 374406 - RNA, 19 nt, Artificial Sequence
  Description of Artificial Sequence: Synthetic oligonucleotide
gagcggaccuggcacugac

SEQ ID NO: 374407 - RNA, 19 nt, Artificial Sequence
  Description of Artificial Sequence: Synthetic oligonucleotide
augcaucuccccgguagag

SEQ ID NO: 374408 - RNA, 19 nt, Artificial Sequence
  Description of Artificial Sequence: Synthetic oligonucleotide
acaccuuuuaauaguucua

SEQ ID NO: 374409 - RNA, 19 nt, Artificial Sequence
  Description of Artificial Sequence: Synthetic oligonucleotide
gcagcaauuugaacugagc

SEQ ID NO: 374410 - RNA, 19 nt, Artificial Sequence
  Description of Artificial Sequence: Synthetic oligonucleotide
cgaauaagucagauagaac

SEQ ID NO: 374411 - RNA, 19 nt, Artificial Sequence
  Description of Artificial Sequence: Synthetic oligonucleotide
guaagacucggaaguccac

SEQ ID NO: 374412 - RNA, 19 nt, Artificial Sequence
  Description of Artificial Sequence: Synthetic oligonucleotide
gucgaaagacagaaucgaa

SEQ ID NO: 374413 - RNA, 19 nt, Artificial Sequence
  Description of Artificial Sequence: Synthetic oligonucleotide
gaugagccucagcguuaag

SEQ ID NO: 374414 - RNA, 19 nt, Artificial Sequence
  Description of Artificial Sequence: Synthetic oligonucleotide
gugagugcagguaacugcu

SEQ ID NO: 374415 - RNA, 19 nt, Artificial Sequence
  Description of Artificial Sequence: Synthetic oligonucleotide
uaacuccggccgaugcauc

SEQ ID NO: 374416 - RNA, 19 nt, Artificial Sequence
  Description of Artificial Sequence: Synthetic oligonucleotide
ggacaaucuuauacagagc

SEQ ID NO: 374417 - RNA, 19 nt, Artificial Sequence
  Description of Artificial Sequence: Synthetic oligonucleotide
ccucuguaucagucgaaag

SEQ ID NO: 374418 - RNA, 19 nt, Artificial Sequence
  Description of Artificial Sequence: Synthetic oligonucleotide
cgaugcaucuccccgguag

SEQ ID NO: 374419 - RNA, 19 nt, Artificial Sequence
  Description of Artificial Sequence: Synthetic oligonucleotide
caucucgugcggauauaga

SEQ ID NO: 374420 - RNA, 19 nt, Artificial Sequence
  Description of Artificial Sequence: Synthetic oligonucleotide
auguauucugagguaucuu

SEQ ID NO: 374421 - RNA, 19 nt, Artificial Sequence
  Description of Artificial Sequence: Synthetic oligonucleotide
guacuuccccaagcguucc

SEQ ID NO: 374422 - RNA, 19 nt, Artificial Sequence
  Description of Artificial Sequence: Synthetic oligonucleotide
guuccuguauaucgacugu

SEQ ID NO: 374423 - RNA, 19 nt, Artificial Sequence
  Description of Artificial Sequence: Synthetic oligonucleotide
auccguucagugcgcacuu

SEQ ID NO: 374424 - RNA, 19 nt, Artificial Sequence
  Description of Artificial Sequence: Synthetic oligonucleotide
gcgaauucuuaaccacaug

SEQ ID NO: 374425 - RNA, 19 nt, Artificial Sequence
  Description of Artificial Sequence: Synthetic oligonucleotide
uggauaugcuuggcgucaa

SEQ ID NO: 374426 - RNA, 19 nt, Artificial Sequence
  Description of Artificial Sequence: Synthetic oligonucleotide
agcauucgaugggcugugg

SEQ ID NO: 374427 - RNA, 19 nt, Artificial Sequence
  Description of Artificial Sequence: Synthetic oligonucleotide
caccuuuacacgugcugaa

SEQ ID NO: 374428 - RNA, 19 nt, Artificial Sequence
  Description of Artificial Sequence: Synthetic oligonucleotide
uccccgguagaggaugguc

SEQ ID NO: 374429 - RNA, 19 nt, Artificial Sequence
  Description of Artificial Sequence: Synthetic oligonucleotide
cucagcguuaaggugcgaa

SEQ ID NO: 374430 - RNA, 19 nt, Artificial Sequence
  Description of Artificial Sequence: Synthetic oligonucleotide
ucgucuucugcuggagcau

SEQ ID NO: 374431 - RNA, 19 nt, Artificial Sequence
  Description of Artificial Sequence: Synthetic oligonucleotide
cagauucauugauuugaua

SEQ ID NO: 374432 - RNA, 19 nt, Artificial Sequence
  Description of Artificial Sequence: Synthetic oligonucleotide
ggagagaauuauucagccu

SEQ ID NO: 374433 - RNA, 19 nt, Artificial Sequence
  Description of Artificial Sequence: Synthetic oligonucleotide
cauaucgggucagaagaua

SEQ ID NO: 374434 - RNA, 19 nt, Artificial Sequence
  Description of Artificial Sequence: Synthetic oligonucleotide
ggauacccaaaggaugaca

SEQ ID NO: 374435 - RNA, 19 nt, Artificial Sequence
  Description of Artificial Sequence: Synthetic oligonucleotide
gcccaaggaagggauacug

SEQ ID NO: 374436 - RNA, 19 nt, Artificial Sequence
  Description of Artificial Sequence: Synthetic oligonucleotide
acguuaccaucuguaacuu

SEQ ID NO: 374437 - RNA, 19 nt, Artificial Sequence
  Description of Artificial Sequence: Synthetic oligonucleotide
ccacuucuagcuguuggag

SEQ ID NO: 374438 - RNA, 19 nt, Artificial Sequence
  Description of Artificial Sequence: Synthetic oligonucleotide
ucgcccacucuggcguagg

SEQ ID NO: 374439 - RNA, 19 nt, Artificial Sequence
  Description of Artificial Sequence: Synthetic oligonucleotide
guggaaaaccugagugcga

SEQ ID NO: 374440 - RNA, 19 nt, Artificial Sequence
  Description of Artificial Sequence: Synthetic oligonucleotide
agauucgaacaagcagcaa

SEQ ID NO: 374441 - RNA, 19 nt, Artificial Sequence
  Description of Artificial Sequence: Synthetic oligonucleotide
gcgauaaacucugggaucu

SEQ ID NO: 374442 - RNA, 19 nt, Artificial Sequence
  Description of Artificial Sequence: Synthetic oligonucleotide
uccguucagugcgcacuug

SEQ ID NO: 374443 - RNA, 19 nt, Artificial Sequence
  Description of Artificial Sequence: Synthetic oligonucleotide
uucaucucgugcggauaua

SEQ ID NO: 374444 - RNA, 19 nt, Artificial Sequence
  Description of Artificial Sequence: Synthetic oligonucleotide
cauagccaugcauuuguuu

SEQ ID NO: 374445 - RNA, 19 nt, Artificial Sequence
  Description of Artificial Sequence: Synthetic oligonucleotide
uccccgucuccacggccac

SEQ ID NO: 374446 - RNA, 19 nt, Artificial Sequence
  Description of Artificial Sequence: Synthetic oligonucleotide
gcuucgugacuaacuccgg

SEQ ID NO: 374447 - RNA, 19 nt, Artificial Sequence
  Description of Artificial Sequence: Synthetic oligonucleotide
cacggaccaaaaguaguaa

SEQ ID NO: 374448 - RNA, 19 nt, Artificial Sequence
  Description of Artificial Sequence: Synthetic oligonucleotide
agcauccguucagugcgca

SEQ ID NO: 374449 - RNA, 19 nt, Artificial Sequence
  Description of Artificial Sequence: Synthetic oligonucleotide
gcgcccaaacuccagucca

SEQ ID NO: 374450 - RNA, 19 nt, Artificial Sequence
  Description of Artificial Sequence: Synthetic oligonucleotide
ccuuaacaucaacucucug

SEQ ID NO: 374451 - RNA, 19 nt, Artificial Sequence
  Description of Artificial Sequence: Synthetic oligonucleotide
cauccguucagugcgcacu

SEQ ID NO: 374452 - RNA, 19 nt, Artificial Sequence
  Description of Artificial Sequence: Synthetic oligonucleotide
cuagcuguuggaggagcaa

SEQ ID NO: 374453 - RNA, 19 nt, Artificial Sequence
  Description of Artificial Sequence: Synthetic oligonucleotide
cacugaugagccucagcgu

SEQ ID NO: 374454 - RNA, 19 nt, Artificial Sequence
  Description of Artificial Sequence: Synthetic oligonucleotide
cuaacuccggccgaugcau

SEQ ID NO: 374455 - RNA, 19 nt, Artificial Sequence
  Description of Artificial Sequence: Synthetic oligonucleotide
cgccucauaaagcuucgug

SEQ ID NO: 374456 - RNA, 19 nt, Artificial Sequence
  Description of Artificial Sequence: Synthetic oligonucleotide
gugccaaggugaaggcuuc

SEQ ID NO: 374457 - RNA, 19 nt, Artificial Sequence
  Description of Artificial Sequence: Synthetic oligonucleotide
gcuaguugauauguuugcu

SEQ ID NO: 374458 - RNA, 19 nt, Artificial Sequence
  Description of Artificial Sequence: Synthetic oligonucleotide
gccgccucauaaagcuucg

SEQ ID NO: 374459 - RNA, 19 nt, Artificial Sequence
  Description of Artificial Sequence: Synthetic oligonucleotide
uggugucgugcuggauaug

SEQ ID NO: 374460 - RNA, 19 nt, Artificial Sequence
  Description of Artificial Sequence: Synthetic oligonucleotide
gagaauuauucagccuauu

SEQ ID NO: 374461 - RNA, 19 nt, Artificial Sequence
  Description of Artificial Sequence: Synthetic oligonucleotide
cguucagugcgcacuugug

SEQ ID NO: 374462 - RNA, 19 nt, Artificial Sequence
  Description of Artificial Sequence: Synthetic oligonucleotide
cguaggccaaugaagaggu

SEQ ID NO: 374463 - RNA, 19 nt, Artificial Sequence
  Description of Artificial Sequence: Synthetic oligonucleotide
cucuggcguaggccaauga

SEQ ID NO: 374464 - RNA, 19 nt, Artificial Sequence
  Description of Artificial Sequence: Synthetic oligonucleotide
gccuauuccuaaaagcgau

SEQ ID NO: 374465 - RNA, 19 nt, Artificial Sequence
  Description of Artificial Sequence: Synthetic oligonucleotide
cucgcccacucuggcguag

SEQ ID NO: 374466 - RNA, 19 nt, Artificial Sequence
  Description of Artificial Sequence: Synthetic oligonucleotide
acggucuggaaagggcguu

SEQ ID NO: 374467 - RNA, 19 nt, Artificial Sequence
  Description of Artificial Sequence: Synthetic oligonucleotide
cggccgaugcaucuccccg

SEQ ID NO: 374468 - RNA, 19 nt, Artificial Sequence
  Description of Artificial Sequence: Synthetic oligonucleotide
ccuauuccuaaaagcgaua

SEQ ID NO: 374469 - RNA, 19 nt, Artificial Sequence
  Description of Artificial Sequence: Synthetic oligonucleotide
gugacuaacuccggccgau

SEQ ID NO: 374470 - RNA, 19 nt, Artificial Sequence
  Description of Artificial Sequence: Synthetic oligonucleotide
ccggccgaugcaucucccc

SEQ ID NO: 374471 - RNA, 19 nt, Artificial Sequence
  Description of Artificial Sequence: Synthetic oligonucleotide
cagugcgcacuugugcaaa

SEQ ID NO: 374472 - RNA, 19 nt, Artificial Sequence
  Description of Artificial Sequence: Synthetic oligonucleotide
auucacgaucaaaguccuu

SEQ ID NO: 374473 - RNA, 19 nt, Artificial Sequence
  Description of Artificial Sequence: Synthetic oligonucleotide
ggcgucaaggcuggaguaa

SEQ ID NO: 374474 - RNA, 19 nt, Artificial Sequence
  Description of Artificial Sequence: Synthetic oligonucleotide
ggcucggaugucagcuggc

SEQ ID NO: 374475 - RNA, 19 nt, Artificial Sequence
  Description of Artificial Sequence: Synthetic oligonucleotide
uccucgcuauugggaacuu

SEQ ID NO: 374476 - RNA, 19 nt, Artificial Sequence
  Description of Artificial Sequence: Synthetic oligonucleotide
cgugcggauauagauugca

SEQ ID NO: 374477 - RNA, 19 nt, Artificial Sequence
  Description of Artificial Sequence: Synthetic oligonucleotide
cccaagcguuccaggauca

SEQ ID NO: 374478 - RNA, 19 nt, Artificial Sequence
  Description of Artificial Sequence: Synthetic oligonucleotide
gugcggauauagauugcau

SEQ ID NO: 374479 - RNA, 19 nt, Artificial Sequence
  Description of Artificial Sequence: Synthetic oligonucleotide
ggaaagggcguugcacucu

SEQ ID NO: 374480 - RNA, 19 nt, Artificial Sequence
  Description of Artificial Sequence: Synthetic oligonucleotide
gcguuaaggugcgaauucu

SEQ ID NO: 374481 - RNA, 19 nt, Artificial Sequence
  Description of Artificial Sequence: Synthetic oligonucleotide
cagcguuaaggugcgaauu

SEQ ID NO: 374482 - RNA, 19 nt, Artificial Sequence
  Description of Artificial Sequence: Synthetic oligonucleotide
auccgggaggacacaccau

SEQ ID NO: 374483 - RNA, 19 nt, Artificial Sequence
  Description of Artificial Sequence: Synthetic oligonucleotide
caggcccaaggaagggaua

SEQ ID NO: 374484 - RNA, 19 nt, Artificial Sequence
  Description of Artificial Sequence: Synthetic oligonucleotide
gcgucaaggcuggaguaaa

SEQ ID NO: 374485 - RNA, 19 nt, Artificial Sequence
  Description of Artificial Sequence: Synthetic oligonucleotide
gugucgugcuggauaugcu

SEQ ID NO: 374486 - RNA, 19 nt, Artificial Sequence
  Description of Artificial Sequence: Synthetic oligonucleotide
gugcgcacuugugcaaagu

SEQ ID NO: 374487 - RNA, 19 nt, Artificial Sequence
  Description of Artificial Sequence: Synthetic oligonucleotide
cgugacuaacuccggccga

SEQ ID NO: 374488 - RNA, 19 nt, Artificial Sequence
  Description of Artificial Sequence: Synthetic oligonucleotide
gcauaucgggucagaagau

SEQ ID NO: 374489 - RNA, 19 nt, Artificial Sequence
  Description of Artificial Sequence: Synthetic oligonucleotide
gcaccguauuuguaagcuu

SEQ ID NO: 374490 - RNA, 19 nt, Artificial Sequence
  Description of Artificial Sequence: Synthetic oligonucleotide
ccuuuggaucccagcuaaa

SEQ ID NO: 374491 - RNA, 19 nt, Artificial Sequence
  Description of Artificial Sequence: Synthetic oligonucleotide
cacgugcugaagacaccuu

SEQ ID NO: 374492 - RNA, 19 nt, Artificial Sequence
  Description of Artificial Sequence: Synthetic oligonucleotide
ccaagcuaguugauauguu

SEQ ID NO: 374493 - RNA, 19 nt, Artificial Sequence
  Description of Artificial Sequence: Synthetic oligonucleotide
ccguuccuguauaucgacu

SEQ ID NO: 374494 - RNA, 19 nt, Artificial Sequence
  Description of Artificial Sequence: Synthetic oligonucleotide
ccguucagugcgcacuugu

SEQ ID NO: 374495 - RNA, 19 nt, Artificial Sequence
  Description of Artificial Sequence: Synthetic oligonucleotide
cggucuggaaagggcguug

SEQ ID NO: 374496 - RNA, 19 nt, Artificial Sequence
  Description of Artificial Sequence: Synthetic oligonucleotide
cguuaaggugcgaauucuu

SEQ ID NO: 374497 - RNA, 19 nt, Artificial Sequence
  Description of Artificial Sequence: Synthetic oligonucleotide
ggcccaaggaagggauacu

SEQ ID NO: 374498 - RNA, 19 nt, Artificial Sequence
  Description of Artificial Sequence: Synthetic oligonucleotide
ccgucuccacggccacuuc

SEQ ID NO: 374499 - RNA, 19 nt, Artificial Sequence
  Description of Artificial Sequence: Synthetic oligonucleotide
cuccccgguagaggauggu

SEQ ID NO: 374500 - RNA, 19 nt, Artificial Sequence
  Description of Artificial Sequence: Synthetic oligonucleotide
ccgaugcaucuccccggua

SEQ ID NO: 374501 - RNA, 19 nt, Artificial Sequence
  Description of Artificial Sequence: Synthetic oligonucleotide
ccaagcguuccaggaucau

SEQ ID NO: 374502 - RNA, 19 nt, Artificial Sequence
  Description of Artificial Sequence: Synthetic oligonucleotide
ccucgcuauugggaacuuu

SEQ ID NO: 374503 - RNA, 19 nt, Artificial Sequence
  Description of Artificial Sequence: Synthetic oligonucleotide
ccgccucauaaagcuucgu

SEQ ID NO: 374504 - RNA, 19 nt, Artificial Sequence
  Description of Artificial Sequence: Synthetic oligonucleotide
acacagauagaauaggugg

SEQ ID NO: 374505 - RNA, 19 nt, Artificial Sequence
  Description of Artificial Sequence: Synthetic oligonucleotide
cauaaugagaacuugcuug

SEQ ID NO: 374506 - RNA, 19 nt, Artificial Sequence
  Description of Artificial Sequence: Synthetic oligonucleotide
uggaagcucgguuagaagg

SEQ ID NO: 374507 - RNA, 19 nt, Artificial Sequence
  Description of Artificial Sequence: Synthetic oligonucleotide
uguguaguacuccagauuc

SEQ ID NO: 374508 - RNA, 19 nt, Artificial Sequence
  Description of Artificial Sequence: Synthetic oligonucleotide
gauaaggaguggcagauug

SEQ ID NO: 374509 - RNA, 19 nt, Artificial Sequence
  Description of Artificial Sequence: Synthetic oligonucleotide
cugauaguaggccuuaugg

SEQ ID NO: 374510 - RNA, 19 nt, Artificial Sequence
  Description of Artificial Sequence: Synthetic oligonucleotide
cuguauguggcgaauacgg

SEQ ID NO: 374511 - RNA, 19 nt, Artificial Sequence
  Description of Artificial Sequence: Synthetic oligonucleotide
aaagagauuugagagguca

SEQ ID NO: 374512 - RNA, 19 nt, Artificial Sequence
  Description of Artificial Sequence: Synthetic oligonucleotide
uagaauagguggcauuggg

SEQ ID NO: 374513 - RNA, 19 nt, Artificial Sequence
  Description of Artificial Sequence: Synthetic oligonucleotide
aaugagaacuugcuugugu

SEQ ID NO: 374514 - RNA, 19 nt, Artificial Sequence
  Description of Artificial Sequence: Synthetic oligonucleotide
guuaccagcacauggcagg

SEQ ID NO: 374515 - RNA, 19 nt, Artificial Sequence
  Description of Artificial Sequence: Synthetic oligonucleotide
uaguacuccagauuccagg

SEQ ID NO: 374516 - RNA, 19 nt, Artificial Sequence
  Description of Artificial Sequence: Synthetic oligonucleotide
aacggggcgugauuggagc

SEQ ID NO: 374517 - RNA, 19 nt, Artificial Sequence
  Description of Artificial Sequence: Synthetic oligonucleotide
agggguuucgggcagcugc

SEQ ID NO: 374518 - RNA, 19 nt, Artificial Sequence
  Description of Artificial Sequence: Synthetic oligonucleotide
ugcauaaugagaacuugcu

SEQ ID NO: 374519 - RNA, 19 nt, Artificial Sequence
  Description of Artificial Sequence: Synthetic oligonucleotide
aaagucucauuggagaucu

SEQ ID NO: 374520 - RNA, 19 nt, Artificial Sequence
  Description of Artificial Sequence: Synthetic oligonucleotide
cauguuaccagcacauggc

SEQ ID NO: 374521 - RNA, 19 nt, Artificial Sequence
  Description of Artificial Sequence: Synthetic oligonucleotide
ugugaggccacgaaggccu

SEQ ID NO: 374522 - RNA, 19 nt, Artificial Sequence
  Description of Artificial Sequence: Synthetic oligonucleotide
aaaucugcauaauccagau

SEQ ID NO: 374523 - RNA, 19 nt, Artificial Sequence
  Description of Artificial Sequence: Synthetic oligonucleotide
caaauaacgcugcagcccc

SEQ ID NO: 374524 - RNA, 19 nt, Artificial Sequence
  Description of Artificial Sequence: Synthetic oligonucleotide
caguacagaccaaugaagc

SEQ ID NO: 374525 - RNA, 19 nt, Artificial Sequence
  Description of Artificial Sequence: Synthetic oligonucleotide
auggcuauaauaguucauc

SEQ ID NO: 374526 - RNA, 19 nt, Artificial Sequence
  Description of Artificial Sequence: Synthetic oligonucleotide
aaugcggguguuaccagcc

SEQ ID NO: 374527 - RNA, 19 nt, Artificial Sequence
  Description of Artificial Sequence: Synthetic oligonucleotide
cugcaaauaacgcugcagc

SEQ ID NO: 374528 - RNA, 19 nt, Artificial Sequence
  Description of Artificial Sequence: Synthetic oligonucleotide
gguguuaccagccagccgc

SEQ ID NO: 374529 - RNA, 19 nt, Artificial Sequence
  Description of Artificial Sequence: Synthetic oligonucleotide
ucggccagcauucuuaggu

SEQ ID NO: 374530 - RNA, 19 nt, Artificial Sequence
  Description of Artificial Sequence: Synthetic oligonucleotide
uauguggcgaauacgguuc

SEQ ID NO: 374531 - RNA, 19 nt, Artificial Sequence
  Description of Artificial Sequence: Synthetic oligonucleotide
uuuucuuacaaaaggccuu

SEQ ID NO: 374532 - RNA, 19 nt, Artificial Sequence
  Description of Artificial Sequence: Synthetic oligonucleotide
ugcccugcaaauaacgcug

SEQ ID NO: 374533 - RNA, 19 nt, Artificial Sequence
  Description of Artificial Sequence: Synthetic oligonucleotide
aggguggcgaccgaaagcc

SEQ ID NO: 374534 - RNA, 19 nt, Artificial Sequence
  Description of Artificial Sequence: Synthetic oligonucleotide
cauagugucuuccccaccc

SEQ ID NO: 374535 - RNA, 19 nt, Artificial Sequence
  Description of Artificial Sequence: Synthetic oligonucleotide
ugcaaauaacgcugcagcc

SEQ ID NO: 374536 - RNA, 19 nt, Artificial Sequence
  Description of Artificial Sequence: Synthetic oligonucleotide
gauaguaggccuuauggua

SEQ ID NO: 374537 - RNA, 19 nt, Artificial Sequence
  Description of Artificial Sequence: Synthetic oligonucleotide
ugauaguaggccuuauggu

SEQ ID NO: 374538 - RNA, 19 nt, Artificial Sequence
  Description of Artificial Sequence: Synthetic oligonucleotide
uggacucccugauaguagg

SEQ ID NO: 374539 - RNA, 19 nt, Artificial Sequence
  Description of Artificial Sequence: Synthetic oligonucleotide
aaucugcauaauccagauc

SEQ ID NO: 374540 - RNA, 19 nt, Artificial Sequence
  Description of Artificial Sequence: Synthetic oligonucleotide
uaaggggcaccucacauuc

SEQ ID NO: 374541 - RNA, 19 nt, Artificial Sequence
  Description of Artificial Sequence: Synthetic oligonucleotide
uguuaccagcacauggcag

SEQ ID NO: 374542 - RNA, 19 nt, Artificial Sequence
  Description of Artificial Sequence: Synthetic oligonucleotide
ucggaaagucucauuggag

SEQ ID NO: 374543 - RNA, 19 nt, Artificial Sequence
  Description of Artificial Sequence: Synthetic oligonucleotide
uaaggaguggcagauugcc

SEQ ID NO: 374544 - RNA, 19 nt, Artificial Sequence
  Description of Artificial Sequence: Synthetic oligonucleotide
cagauugcccucacgagcc

SEQ ID NO: 374545 - RNA, 19 nt, Artificial Sequence
  Description of Artificial Sequence: Synthetic oligonucleotide
uugccuuagagcuuggcuc

SEQ ID NO: 374546 - RNA, 19 nt, Artificial Sequence
  Description of Artificial Sequence: Synthetic oligonucleotide
uggcagauugcccucacga

SEQ ID NO: 374547 - RNA, 19 nt, Artificial Sequence
  Description of Artificial Sequence: Synthetic oligonucleotide
uuuguccugagcuguaacu

SEQ ID NO: 374548 - RNA, 19 nt, Artificial Sequence
  Description of Artificial Sequence: Synthetic oligonucleotide
cuuaggugggaagugacag

SEQ ID NO: 374549 - RNA, 19 nt, Artificial Sequence
  Description of Artificial Sequence: Synthetic oligonucleotide
aggucaagcagcaguaggc

SEQ ID NO: 374550 - RNA, 19 nt, Artificial Sequence
  Description of Artificial Sequence: Synthetic oligonucleotide
uccaauucuugcagggcag

SEQ ID NO: 374551 - RNA, 19 nt, Artificial Sequence
  Description of Artificial Sequence: Synthetic oligonucleotide
ugggauauuguuguagcug

SEQ ID NO: 374552 - RNA, 19 nt, Artificial Sequence
  Description of Artificial Sequence: Synthetic oligonucleotide
acuguuguccgaccccgcc

SEQ ID NO: 374553 - RNA, 19 nt, Artificial Sequence
  Description of Artificial Sequence: Synthetic oligonucleotide
uacagaccaaugaagcccu

SEQ ID NO: 374554 - RNA, 19 nt, Artificial Sequence
  Description of Artificial Sequence: Synthetic oligonucleotide
uuacugagguuaaccagug

SEQ ID NO: 374555 - RNA, 19 nt, Artificial Sequence
  Description of Artificial Sequence: Synthetic oligonucleotide
uauaugggcaaugcgggug

SEQ ID NO: 374556 - RNA, 19 nt, Artificial Sequence
  Description of Artificial Sequence: Synthetic oligonucleotide
uguguacucugcaagugaa

SEQ ID NO: 374557 - RNA, 19 nt, Artificial Sequence
  Description of Artificial Sequence: Synthetic oligonucleotide
aacuugcuuguguggcagc

SEQ ID NO: 374558 - RNA, 19 nt, Artificial Sequence
  Description of Artificial Sequence: Synthetic oligonucleotide
uggagguuucgcaagcggc

SEQ ID NO: 374559 - RNA, 19 nt, Artificial Sequence
  Description of Artificial Sequence: Synthetic oligonucleotide
uggcucaaugcugagaggc

SEQ ID NO: 374560 - RNA, 19 nt, Artificial Sequence
  Description of Artificial Sequence: Synthetic oligonucleotide
aagagauuugagaggucac

SEQ ID NO: 374561 - RNA, 19 nt, Artificial Sequence
  Description of Artificial Sequence: Synthetic oligonucleotide
aaaagccccucauccagcu

SEQ ID NO: 374562 - RNA, 19 nt, Artificial Sequence
  Description of Artificial Sequence: Synthetic oligonucleotide
caucaauagucuuacaaaa

SEQ ID NO: 374563 - RNA, 19 nt, Artificial Sequence
  Description of Artificial Sequence: Synthetic oligonucleotide
uaacuguuguccgaccccg

SEQ ID NO: 374564 - RNA, 19 nt, Artificial Sequence
  Description of Artificial Sequence: Synthetic oligonucleotide
auaguaggccuuaugguag

SEQ ID NO: 374565 - RNA, 19 nt, Artificial Sequence
  Description of Artificial Sequence: Synthetic oligonucleotide
acagcgugucuccucaggg

SEQ ID NO: 374566 - RNA, 19 nt, Artificial Sequence
  Description of Artificial Sequence: Synthetic oligonucleotide
aacgggaaacaucuuuuau

SEQ ID NO: 374567 - RNA, 19 nt, Artificial Sequence
  Description of Artificial Sequence: Synthetic oligonucleotide
agaccaaugaagcccucag

SEQ ID NO: 374568 - RNA, 19 nt, Artificial Sequence
  Description of Artificial Sequence: Synthetic oligonucleotide
ugccuuagagcuuggcucc

SEQ ID NO: 374569 - RNA, 19 nt, Artificial Sequence
  Description of Artificial Sequence: Synthetic oligonucleotide
aauucuugcagggcaguca

SEQ ID NO: 374570 - RNA, 19 nt, Artificial Sequence
  Description of Artificial Sequence: Synthetic oligonucleotide
aggaguggcagauugcccu

SEQ ID NO: 374571 - RNA, 19 nt, Artificial Sequence
  Description of Artificial Sequence: Synthetic oligonucleotide
uggcuauaauaguucaucu

SEQ ID NO: 374572 - RNA, 19 nt, Artificial Sequence
  Description of Artificial Sequence: Synthetic oligonucleotide
ucgguuagaaggugaaagu

SEQ ID NO: 374573 - RNA, 19 nt, Artificial Sequence
  Description of Artificial Sequence: Synthetic oligonucleotide
agguuacugagguuaacca

SEQ ID NO: 374574 - RNA, 19 nt, Artificial Sequence
  Description of Artificial Sequence: Synthetic oligonucleotide
gacucgguggcuugggaag

SEQ ID NO: 374575 - RNA, 19 nt, Artificial Sequence
  Description of Artificial Sequence: Synthetic oligonucleotide
cugauggcuauaauaguuc

SEQ ID NO: 374576 - RNA, 19 nt, Artificial Sequence
  Description of Artificial Sequence: Synthetic oligonucleotide
acaguacagaccaaugaag

SEQ ID NO: 374577 - RNA, 19 nt, Artificial Sequence
  Description of Artificial Sequence: Synthetic oligonucleotide
gagauuugagaggucacug

SEQ ID NO: 374578 - RNA, 19 nt, Artificial Sequence
  Description of Artificial Sequence: Synthetic oligonucleotide
ucuuaggugggaagugaca

SEQ ID NO: 374579 - RNA, 19 nt, Artificial Sequence
  Description of Artificial Sequence: Synthetic oligonucleotide
ccguauaugggcaaugcgg

SEQ ID NO: 374580 - RNA, 19 nt, Artificial Sequence
  Description of Artificial Sequence: Synthetic oligonucleotide
uuggacauacugauggcua

SEQ ID NO: 374581 - RNA, 19 nt, Artificial Sequence
  Description of Artificial Sequence: Synthetic oligonucleotide
uccucaggccguauauggg

SEQ ID NO: 374582 - RNA, 19 nt, Artificial Sequence
  Description of Artificial Sequence: Synthetic oligonucleotide
uauuguuguagcugagguc

SEQ ID NO: 374583 - RNA, 19 nt, Artificial Sequence
  Description of Artificial Sequence: Synthetic oligonucleotide
ucugcauaauccagaucca

SEQ ID NO: 374584 - RNA, 19 nt, Artificial Sequence
  Description of Artificial Sequence: Synthetic oligonucleotide
uguauguggcgaauacggu

SEQ ID NO: 374585 - RNA, 19 nt, Artificial Sequence
  Description of Artificial Sequence: Synthetic oligonucleotide
uucuuaggugggaagugac

SEQ ID NO: 374586 - RNA, 19 nt, Artificial Sequence
  Description of Artificial Sequence: Synthetic oligonucleotide
uguuguccgaccccgccgc

SEQ ID NO: 374587 - RNA, 19 nt, Artificial Sequence
  Description of Artificial Sequence: Synthetic oligonucleotide
gguuacugagguuaaccag

SEQ ID NO: 374588 - RNA, 19 nt, Artificial Sequence
  Description of Artificial Sequence: Synthetic oligonucleotide
caccaugcauguaugugcc

SEQ ID NO: 374589 - RNA, 19 nt, Artificial Sequence
  Description of Artificial Sequence: Synthetic oligonucleotide
auaaggaguggcagauugc

SEQ ID NO: 374590 - RNA, 19 nt, Artificial Sequence
  Description of Artificial Sequence: Synthetic oligonucleotide
auagaauagguggcauugg

SEQ ID NO: 374591 - RNA, 19 nt, Artificial Sequence
  Description of Artificial Sequence: Synthetic oligonucleotide
aacuugccuauccauguua

SEQ ID NO: 374592 - RNA, 19 nt, Artificial Sequence
  Description of Artificial Sequence: Synthetic oligonucleotide
cagguuacugagguuaacc

SEQ ID NO: 374593 - RNA, 19 nt, Artificial Sequence
  Description of Artificial Sequence: Synthetic oligonucleotide
guaguagugacugggcagc

SEQ ID NO: 374594 - RNA, 19 nt, Artificial Sequence
  Description of Artificial Sequence: Synthetic oligonucleotide
uuucuuacaaaaggccuuc

SEQ ID NO: 374595 - RNA, 19 nt, Artificial Sequence
  Description of Artificial Sequence: Synthetic oligonucleotide
acgggaaacaucuuuuaua

SEQ ID NO: 374596 - RNA, 19 nt, Artificial Sequence
  Description of Artificial Sequence: Synthetic oligonucleotide
ccugaguagcccauaaggg

SEQ ID NO: 374597 - RNA, 19 nt, Artificial Sequence
  Description of Artificial Sequence: Synthetic oligonucleotide
gcgaauacgguucuugccc

SEQ ID NO: 374598 - RNA, 19 nt, Artificial Sequence
  Description of Artificial Sequence: Synthetic oligonucleotide
cuuagcagggagaggcccc

SEQ ID NO: 374599 - RNA, 19 nt, Artificial Sequence
  Description of Artificial Sequence: Synthetic oligonucleotide
aggugcgauaaggaguggc

SEQ ID NO: 374600 - RNA, 19 nt, Artificial Sequence
  Description of Artificial Sequence: Synthetic oligonucleotide
gugauuggagcggacagcc

SEQ ID NO: 374601 - RNA, 19 nt, Artificial Sequence
  Description of Artificial Sequence: Synthetic oligonucleotide
aguguguaguacuccagau

SEQ ID NO: 374602 - RNA, 19 nt, Artificial Sequence
  Description of Artificial Sequence: Synthetic oligonucleotide
guuucgggcagcugcuagg

SEQ ID NO: 374603 - RNA, 19 nt, Artificial Sequence
  Description of Artificial Sequence: Synthetic oligonucleotide
ccauguuaccagcacaugg

SEQ ID NO: 374604 - RNA, 19 nt, Artificial Sequence
  Description of Artificial Sequence: Synthetic oligonucleotide
uaucucuccuggcuuagau

SEQ ID NO: 374605 - RNA, 19 nt, Artificial Sequence
  Description of Artificial Sequence: Synthetic oligonucleotide
cuauccauguuaccagcac

SEQ ID NO: 374606 - RNA, 19 nt, Artificial Sequence
  Description of Artificial Sequence: Synthetic oligonucleotide
auguuaccagcacauggca

SEQ ID NO: 374607 - RNA, 19 nt, Artificial Sequence
  Description of Artificial Sequence: Synthetic oligonucleotide
uugggaagcccaacuugcc

SEQ ID NO: 374608 - RNA, 19 nt, Artificial Sequence
  Description of Artificial Sequence: Synthetic oligonucleotide
uggcgaauacgguucuugc

SEQ ID NO: 374609 - RNA, 19 nt, Artificial Sequence
  Description of Artificial Sequence: Synthetic oligonucleotide
cagcucaaggggcacaagc

SEQ ID NO: 374610 - RNA, 19 nt, Artificial Sequence
  Description of Artificial Sequence: Synthetic oligonucleotide
uaacggggcgugauuggag

SEQ ID NO: 374611 - RNA, 19 nt, Artificial Sequence
  Description of Artificial Sequence: Synthetic oligonucleotide
ugcggguguuaccagccag

SEQ ID NO: 374612 - RNA, 19 nt, Artificial Sequence
  Description of Artificial Sequence: Synthetic oligonucleotide
gugcauaaugagaacuugc

SEQ ID NO: 374613 - RNA, 19 nt, Artificial Sequence
  Description of Artificial Sequence: Synthetic oligonucleotide
cguauaugggcaaugcggg

SEQ ID NO: 374614 - RNA, 19 nt, Artificial Sequence
  Description of Artificial Sequence: Synthetic oligonucleotide
augguagguacuguggcug

SEQ ID NO: 374615 - RNA, 19 nt, Artificial Sequence
  Description of Artificial Sequence: Synthetic oligonucleotide
uggguaguuggcucuguga

SEQ ID NO: 374616 - RNA, 19 nt, Artificial Sequence
  Description of Artificial Sequence: Synthetic oligonucleotide
ucgggcagcugcuaggagu

SEQ ID NO: 374617 - RNA, 19 nt, Artificial Sequence
  Description of Artificial Sequence: Synthetic oligonucleotide
agagauuugagaggucacu

SEQ ID NO: 374618 - RNA, 19 nt, Artificial Sequence
  Description of Artificial Sequence: Synthetic oligonucleotide
accaugcauguaugugccc

SEQ ID NO: 374619 - RNA, 19 nt, Artificial Sequence
  Description of Artificial Sequence: Synthetic oligonucleotide
caaugcggguguuaccagc

SEQ ID NO: 374620 - RNA, 19 nt, Artificial Sequence
  Description of Artificial Sequence: Synthetic oligonucleotide
ugggaagcccaacuugccu

SEQ ID NO: 374621 - RNA, 19 nt, Artificial Sequence
  Description of Artificial Sequence: Synthetic oligonucleotide
ucuaguuccaggggcccag

SEQ ID NO: 374622 - RNA, 19 nt, Artificial Sequence
  Description of Artificial Sequence: Synthetic oligonucleotide
gaauacgguucuugcccag

SEQ ID NO: 374623 - RNA, 19 nt, Artificial Sequence
  Description of Artificial Sequence: Synthetic oligonucleotide
ucuggggccuuccuuuacu

SEQ ID NO: 374624 - RNA, 19 nt, Artificial Sequence
  Description of Artificial Sequence: Synthetic oligonucleotide
gaaagucucauuggagauc

SEQ ID NO: 374625 - RNA, 19 nt, Artificial Sequence
  Description of Artificial Sequence: Synthetic oligonucleotide
uguaccguguugcccugca

SEQ ID NO: 374626 - RNA, 19 nt, Artificial Sequence
  Description of Artificial Sequence: Synthetic oligonucleotide
gaggguggcgaccgaaagc

SEQ ID NO: 374627 - RNA, 19 nt, Artificial Sequence
  Description of Artificial Sequence: Synthetic oligonucleotide
acaacauggcucucacgca

SEQ ID NO: 374628 - RNA, 19 nt, Artificial Sequence
  Description of Artificial Sequence: Synthetic oligonucleotide
cacaguaggcugcuccugc

SEQ ID NO: 374629 - RNA, 19 nt, Artificial Sequence
  Description of Artificial Sequence: Synthetic oligonucleotide
aggugaaaguguggacucc

SEQ ID NO: 374630 - RNA, 19 nt, Artificial Sequence
  Description of Artificial Sequence: Synthetic oligonucleotide
gcaaauaacgcugcagccc

SEQ ID NO: 374631 - RNA, 19 nt, Artificial Sequence
  Description of Artificial Sequence: Synthetic oligonucleotide
uguggacucccugauagua

SEQ ID NO: 374632 - RNA, 19 nt, Artificial Sequence
  Description of Artificial Sequence: Synthetic oligonucleotide
uccuggcuuagauguagug

SEQ ID NO: 374633 - RNA, 19 nt, Artificial Sequence
  Description of Artificial Sequence: Synthetic oligonucleotide
cuggcuuagauguagugcu

SEQ ID NO: 374634 - RNA, 19 nt, Artificial Sequence
  Description of Artificial Sequence: Synthetic oligonucleotide
gccucggaaagucucauug

SEQ ID NO: 374635 - RNA, 19 nt, Artificial Sequence
  Description of Artificial Sequence: Synthetic oligonucleotide
agggcagucagaccagcca

SEQ ID NO: 374636 - RNA, 19 nt, Artificial Sequence
  Description of Artificial Sequence: Synthetic oligonucleotide
cauucuuaggugggaagug

SEQ ID NO: 374637 - RNA, 19 nt, Artificial Sequence
  Description of Artificial Sequence: Synthetic oligonucleotide
ugcccuuuguccugagcug

SEQ ID NO: 374638 - RNA, 19 nt, Artificial Sequence
  Description of Artificial Sequence: Synthetic oligonucleotide
agaauagguggcauugggu

SEQ ID NO: 374639 - RNA, 19 nt, Artificial Sequence
  Description of Artificial Sequence: Synthetic oligonucleotide
uuccuuuacuggucaccag

SEQ ID NO: 374640 - RNA, 19 nt, Artificial Sequence
  Description of Artificial Sequence: Synthetic oligonucleotide
cuuuguccugagcuguaac

SEQ ID NO: 374641 - RNA, 19 nt, Artificial Sequence
  Description of Artificial Sequence: Synthetic oligonucleotide
cagcaaccgaagcucauug

SEQ ID NO: 374642 - RNA, 19 nt, Artificial Sequence
  Description of Artificial Sequence: Synthetic oligonucleotide
caguaggcggggcaagugc

SEQ ID NO: 374643 - RNA, 19 nt, Artificial Sequence
  Description of Artificial Sequence: Synthetic oligonucleotide
aacuguuguccgaccccgc

SEQ ID NO: 374644 - RNA, 19 nt, Artificial Sequence
  Description of Artificial Sequence: Synthetic oligonucleotide
cuguuguccgaccccgccg

SEQ ID NO: 374645 - RNA, 19 nt, Artificial Sequence
  Description of Artificial Sequence: Synthetic oligonucleotide
cacagcuagaaggacagca

SEQ ID NO: 374646 - RNA, 19 nt, Artificial Sequence
  Description of Artificial Sequence: Synthetic oligonucleotide
ugggcaaugcggguguuac

SEQ ID NO: 374647 - RNA, 19 nt, Artificial Sequence
  Description of Artificial Sequence: Synthetic oligonucleotide
aggacucucacaguacaga

SEQ ID NO: 374648 - RNA, 19 nt, Artificial Sequence
  Description of Artificial Sequence: Synthetic oligonucleotide
aaagccccucauccagcug

SEQ ID NO: 374649 - RNA, 19 nt, Artificial Sequence
  Description of Artificial Sequence: Synthetic oligonucleotide
caggacucucacaguacag

SEQ ID NO: 374650 - RNA, 19 nt, Artificial Sequence
  Description of Artificial Sequence: Synthetic oligonucleotide
gaagcucgguuagaaggug

SEQ ID NO: 374651 - RNA, 19 nt, Artificial Sequence
  Description of Artificial Sequence: Synthetic oligonucleotide
gguaacggggcgugauugg

SEQ ID NO: 374652 - RNA, 19 nt, Artificial Sequence
  Description of Artificial Sequence: Synthetic oligonucleotide
gcgaccgaaagccuggccc

SEQ ID NO: 374653 - RNA, 19 nt, Artificial Sequence
  Description of Artificial Sequence: Synthetic oligonucleotide
gaggcguucaaggcgucgc

SEQ ID NO: 374654 - RNA, 19 nt, Artificial Sequence
  Description of Artificial Sequence: Synthetic oligonucleotide
gacauacugauggcuauaa

SEQ ID NO: 374655 - RNA, 19 nt, Artificial Sequence
  Description of Artificial Sequence: Synthetic oligonucleotide
ggcgaauacgguucuugcc

SEQ ID NO: 374656 - RNA, 19 nt, Artificial Sequence
  Description of Artificial Sequence: Synthetic oligonucleotide
ccuuaugguagguacugug

SEQ ID NO: 374657 - RNA, 19 nt, Artificial Sequence
  Description of Artificial Sequence: Synthetic oligonucleotide
acgagccuggguaacgggg

SEQ ID NO: 374658 - RNA, 19 nt, Artificial Sequence
  Description of Artificial Sequence: Synthetic oligonucleotide
agcaaccgaagcucauugu

SEQ ID NO: 374659 - RNA, 19 nt, Artificial Sequence
  Description of Artificial Sequence: Synthetic oligonucleotide
cuuccuuuacuggucacca

SEQ ID NO: 374660 - RNA, 19 nt, Artificial Sequence
  Description of Artificial Sequence: Synthetic oligonucleotide
cuguaacuguuguccgacc

SEQ ID NO: 374661 - RNA, 19 nt, Artificial Sequence
  Description of Artificial Sequence: Synthetic oligonucleotide
acggggcgugauuggagcg

SEQ ID NO: 374662 - RNA, 19 nt, Artificial Sequence
  Description of Artificial Sequence: Synthetic oligonucleotide
agacucgguggcuugggaa

SEQ ID NO: 374663 - RNA, 19 nt, Artificial Sequence
  Description of Artificial Sequence: Synthetic oligonucleotide
gucgcaggcggggaaagag

SEQ ID NO: 374664 - RNA, 19 nt, Artificial Sequence
  Description of Artificial Sequence: Synthetic oligonucleotide
guggcgaauacgguucuug

SEQ ID NO: 374665 - RNA, 19 nt, Artificial Sequence
  Description of Artificial Sequence: Synthetic oligonucleotide
gcuguauguggcgaauacg

SEQ ID NO: 374666 - RNA, 19 nt, Artificial Sequence
  Description of Artificial Sequence: Synthetic oligonucleotide
gugacagcgugucuccuca

SEQ ID NO: 374667 - RNA, 19 nt, Artificial Sequence
  Description of Artificial Sequence: Synthetic oligonucleotide
guaguacuccagauuccag

SEQ ID NO: 374668 - RNA, 19 nt, Artificial Sequence
  Description of Artificial Sequence: Synthetic oligonucleotide
agcucaaggggcacaagca

SEQ ID NO: 374669 - RNA, 19 nt, Artificial Sequence
  Description of Artificial Sequence: Synthetic oligonucleotide
gccguauaugggcaaugcg

SEQ ID NO: 374670 - RNA, 19 nt, Artificial Sequence
  Description of Artificial Sequence: Synthetic oligonucleotide
gcaaccgaagcucauuguc

SEQ ID NO: 374671 - RNA, 19 nt, Artificial Sequence
  Description of Artificial Sequence: Synthetic oligonucleotide
gacagggccuccccaacuc

SEQ ID NO: 374672 - RNA, 19 nt, Artificial Sequence
  Description of Artificial Sequence: Synthetic oligonucleotide
ggagcggacagccugggga

SEQ ID NO: 374673 - RNA, 19 nt, Artificial Sequence
  Description of Artificial Sequence: Synthetic oligonucleotide
ccucaggccguauaugggc

SEQ ID NO: 374674 - RNA, 19 nt, Artificial Sequence
  Description of Artificial Sequence: Synthetic oligonucleotide
uucuuacaaaaggccuuca

SEQ ID NO: 374675 - RNA, 19 nt, Artificial Sequence
  Description of Artificial Sequence: Synthetic oligonucleotide
uggggugcauaaugagaac

SEQ ID NO: 374676 - RNA, 19 nt, Artificial Sequence
  Description of Artificial Sequence: Synthetic oligonucleotide
agcccaacuugccuaucca

SEQ ID NO: 374677 - RNA, 19 nt, Artificial Sequence
  Description of Artificial Sequence: Synthetic oligonucleotide
acgcacccaaggcccaaac

SEQ ID NO: 374678 - RNA, 19 nt, Artificial Sequence
  Description of Artificial Sequence: Synthetic oligonucleotide
uggagcggacagccugggg

SEQ ID NO: 374679 - RNA, 19 nt, Artificial Sequence
  Description of Artificial Sequence: Synthetic oligonucleotide
cacagccauagugucuucc

SEQ ID NO: 374680 - RNA, 19 nt, Artificial Sequence
  Description of Artificial Sequence: Synthetic oligonucleotide
gguggcauugggucgcagc

SEQ ID NO: 374681 - RNA, 19 nt, Artificial Sequence
  Description of Artificial Sequence: Synthetic oligonucleotide
accauucaggcagguggac

SEQ ID NO: 374682 - RNA, 19 nt, Artificial Sequence
  Description of Artificial Sequence: Synthetic oligonucleotide
acauacugauggcuauaau

SEQ ID NO: 374683 - RNA, 19 nt, Artificial Sequence
  Description of Artificial Sequence: Synthetic oligonucleotide
gcgugugaggccacgaagg

SEQ ID NO: 374684 - RNA, 19 nt, Artificial Sequence
  Description of Artificial Sequence: Synthetic oligonucleotide
ggagguuucgcaagcggcc

SEQ ID NO: 374685 - RNA, 19 nt, Artificial Sequence
  Description of Artificial Sequence: Synthetic oligonucleotide
aagcucgguuagaagguga

SEQ ID NO: 374686 - RNA, 19 nt, Artificial Sequence
  Description of Artificial Sequence: Synthetic oligonucleotide
ccuggcuuagauguagugc

SEQ ID NO: 374687 - RNA, 19 nt, Artificial Sequence
  Description of Artificial Sequence: Synthetic oligonucleotide
cacgagccuggguaacggg

SEQ ID NO: 374688 - RNA, 19 nt, Artificial Sequence
  Description of Artificial Sequence: Synthetic oligonucleotide
gugguaguagugacugggc

SEQ ID NO: 374689 - RNA, 19 nt, Artificial Sequence
  Description of Artificial Sequence: Synthetic oligonucleotide
caaggcgucgcaggccucg

SEQ ID NO: 374690 - RNA, 19 nt, Artificial Sequence
  Description of Artificial Sequence: Synthetic oligonucleotide
ggcaaugcggguguuacca

SEQ ID NO: 374691 - RNA, 19 nt, Artificial Sequence
  Description of Artificial Sequence: Synthetic oligonucleotide
gcgugauuggagcggacag

SEQ ID NO: 374692 - RNA, 19 nt, Artificial Sequence
  Description of Artificial Sequence: Synthetic oligonucleotide
ggcuguauguggcgaauac

SEQ ID NO: 374693 - RNA, 19 nt, Artificial Sequence
  Description of Artificial Sequence: Synthetic oligonucleotide
caaugccuccacauuggca

SEQ ID NO: 374694 - RNA, 19 nt, Artificial Sequence
  Description of Artificial Sequence: Synthetic oligonucleotide
cuggggccuuccuuuacug

SEQ ID NO: 374695 - RNA, 19 nt, Artificial Sequence
  Description of Artificial Sequence: Synthetic oligonucleotide
aguaggcggggcaagugca

SEQ ID NO: 374696 - RNA, 19 nt, Artificial Sequence
  Description of Artificial Sequence: Synthetic oligonucleotide
aucccuugccucacaggac

SEQ ID NO: 374697 - RNA, 19 nt, Artificial Sequence
  Description of Artificial Sequence: Synthetic oligonucleotide
guauguggcgaauacgguu

SEQ ID NO: 374698 - RNA, 19 nt, Artificial Sequence
  Description of Artificial Sequence: Synthetic oligonucleotide
ugguauggagcugggcuuc

SEQ ID NO: 374699 - RNA, 19 nt, Artificial Sequence
  Description of Artificial Sequence: Synthetic oligonucleotide
cccaacuugccuauccaug

SEQ ID NO: 374700 - RNA, 19 nt, Artificial Sequence
  Description of Artificial Sequence: Synthetic oligonucleotide
cucaggccguauaugggca

SEQ ID NO: 374701 - RNA, 19 nt, Artificial Sequence
  Description of Artificial Sequence: Synthetic oligonucleotide
ucaggccguauaugggcaa

SEQ ID NO: 374702 - RNA, 19 nt, Artificial Sequence
  Description of Artificial Sequence: Synthetic oligonucleotide
gagcagucggccagcauuc

SEQ ID NO: 374703 - RNA, 19 nt, Artificial Sequence
  Description of Artificial Sequence: Synthetic oligonucleotide
auguggcgaauacgguucu

SEQ ID NO: 374704 - RNA, 19 nt, Artificial Sequence
  Description of Artificial Sequence: Synthetic oligonucleotide
cuccucaccuucagguauc

SEQ ID NO: 374705 - RNA, 19 nt, Artificial Sequence
  Description of Artificial Sequence: Synthetic oligonucleotide
ugacagcgugucuccucag

SEQ ID NO: 374706 - RNA, 19 nt, Artificial Sequence
  Description of Artificial Sequence: Synthetic oligonucleotide
accagacucgguggcuugg

SEQ ID NO: 374707 - RNA, 19 nt, Artificial Sequence
  Description of Artificial Sequence: Synthetic oligonucleotide
agguuaaccaguggcugaa

SEQ ID NO: 374708 - RNA, 19 nt, Artificial Sequence
  Description of Artificial Sequence: Synthetic oligonucleotide
uguuaccagccagccgcag

SEQ ID NO: 374709 - RNA, 19 nt, Artificial Sequence
  Description of Artificial Sequence: Synthetic oligonucleotide
gcagccguaaggucaccag

SEQ ID NO: 374710 - RNA, 19 nt, Artificial Sequence
  Description of Artificial Sequence: Synthetic oligonucleotide
ggucauggagguuucgcaa

SEQ ID NO: 374711 - RNA, 19 nt, Artificial Sequence
  Description of Artificial Sequence: Synthetic oligonucleotide
cagugggcgccuguauugg

SEQ ID NO: 374712 - RNA, 19 nt, Artificial Sequence
  Description of Artificial Sequence: Synthetic oligonucleotide
gccuauccauguuaccagc

SEQ ID NO: 374713 - RNA, 19 nt, Artificial Sequence
  Description of Artificial Sequence: Synthetic oligonucleotide
uccucaccuucagguaucc

SEQ ID NO: 374714 - RNA, 19 nt, Artificial Sequence
  Description of Artificial Sequence: Synthetic oligonucleotide
gccguaaggucaccagccg

SEQ ID NO: 374715 - RNA, 19 nt, Artificial Sequence
  Description of Artificial Sequence: Synthetic oligonucleotide
ggccaguacaacauggcuc

SEQ ID NO: 374716 - RNA, 19 nt, Artificial Sequence
  Description of Artificial Sequence: Synthetic oligonucleotide
guagaggcguucaaggcgu

SEQ ID NO: 374717 - RNA, 19 nt, Artificial Sequence
  Description of Artificial Sequence: Synthetic oligonucleotide
ggccuuaugguagguacug

SEQ ID NO: 374718 - RNA, 19 nt, Artificial Sequence
  Description of Artificial Sequence: Synthetic oligonucleotide
cauucaggaccaccugaca

SEQ ID NO: 374719 - RNA, 19 nt, Artificial Sequence
  Description of Artificial Sequence: Synthetic oligonucleotide
ccucuguugccuuagagcu

SEQ ID NO: 374720 - RNA, 19 nt, Artificial Sequence
  Description of Artificial Sequence: Synthetic oligonucleotide
uggguaacggggcgugauu

SEQ ID NO: 374721 - RNA, 19 nt, Artificial Sequence
  Description of Artificial Sequence: Synthetic oligonucleotide
agacagugggcgccuguau

SEQ ID NO: 374722 - RNA, 19 nt, Artificial Sequence
  Description of Artificial Sequence: Synthetic oligonucleotide
ugcggagcuguaccguguu

SEQ ID NO: 374723 - RNA, 19 nt, Artificial Sequence
  Description of Artificial Sequence: Synthetic oligonucleotide
ggguguuaccagccagccg

SEQ ID NO: 374724 - RNA, 19 nt, Artificial Sequence
  Description of Artificial Sequence: Synthetic oligonucleotide
guaacggggcgugauugga

SEQ ID NO: 374725 - RNA, 19 nt, Artificial Sequence
  Description of Artificial Sequence: Synthetic oligonucleotide
cgggaaacaucuuuuauaa

SEQ ID NO: 374726 - RNA, 19 nt, Artificial Sequence
  Description of Artificial Sequence: Synthetic oligonucleotide
ggcggggcaagugcaaggg

SEQ ID NO: 374727 - RNA, 19 nt, Artificial Sequence
  Description of Artificial Sequence: Synthetic oligonucleotide
cugcuaggagucgcaggcg

SEQ ID NO: 374728 - RNA, 19 nt, Artificial Sequence
  Description of Artificial Sequence: Synthetic oligonucleotide
ggguaacggggcgugauug

SEQ ID NO: 374729 - RNA, 19 nt, Artificial Sequence
  Description of Artificial Sequence: Synthetic oligonucleotide
cauaaggggcaccucacau

SEQ ID NO: 374730 - RNA, 19 nt, Artificial Sequence
  Description of Artificial Sequence: Synthetic oligonucleotide
agauugcccucacgagccu

SEQ ID NO: 374731 - RNA, 19 nt, Artificial Sequence
  Description of Artificial Sequence: Synthetic oligonucleotide
ucgcaggccucggaaaguc

SEQ ID NO: 374732 - RNA, 19 nt, Artificial Sequence
  Description of Artificial Sequence: Synthetic oligonucleotide
cggaaagucucauuggaga

SEQ ID NO: 374733 - RNA, 19 nt, Artificial Sequence
  Description of Artificial Sequence: Synthetic oligonucleotide
caugguugguggggcagug

SEQ ID NO: 374734 - RNA, 19 nt, Artificial Sequence
  Description of Artificial Sequence: Synthetic oligonucleotide
guauaugggcaaugcgggu

SEQ ID NO: 374735 - RNA, 19 nt, Artificial Sequence
  Description of Artificial Sequence: Synthetic oligonucleotide
caugcaguuuguuggcagu

SEQ ID NO: 374736 - RNA, 19 nt, Artificial Sequence
  Description of Artificial Sequence: Synthetic oligonucleotide
gcccauaaggggcaccuca

SEQ ID NO: 374737 - RNA, 19 nt, Artificial Sequence
  Description of Artificial Sequence: Synthetic oligonucleotide
cuguaucucuccuggcuua

SEQ ID NO: 374738 - RNA, 19 nt, Artificial Sequence
  Description of Artificial Sequence: Synthetic oligonucleotide
gcaaugcggguguuaccag

SEQ ID NO: 374739 - RNA, 19 nt, Artificial Sequence
  Description of Artificial Sequence: Synthetic oligonucleotide
augcggguguuaccagcca

SEQ ID NO: 374740 - RNA, 19 nt, Artificial Sequence
  Description of Artificial Sequence: Synthetic oligonucleotide
caccugacagggccucccc

SEQ ID NO: 374741 - RNA, 19 nt, Artificial Sequence
  Description of Artificial Sequence: Synthetic oligonucleotide
gcugcggagcuguaccgug

SEQ ID NO: 374742 - RNA, 19 nt, Artificial Sequence
  Description of Artificial Sequence: Synthetic oligonucleotide
ggccguauaugggcaaugc

SEQ ID NO: 374743 - RNA, 19 nt, Artificial Sequence
  Description of Artificial Sequence: Synthetic oligonucleotide
aggccguauaugggcaaug

SEQ ID NO: 374744 - RNA, 19 nt, Artificial Sequence
  Description of Artificial Sequence: Synthetic oligonucleotide
agcucgguuagaaggugaa

SEQ ID NO: 374745 - RNA, 19 nt, Artificial Sequence
  Description of Artificial Sequence: Synthetic oligonucleotide
ccuggggugcauaaugaga

SEQ ID NO: 374746 - RNA, 19 nt, Artificial Sequence
  Description of Artificial Sequence: Synthetic oligonucleotide
cccacacgcagggaggugg

SEQ ID NO: 374747 - RNA, 19 nt, Artificial Sequence
  Description of Artificial Sequence: Synthetic oligonucleotide
cccauaaggggcaccucac

SEQ ID NO: 374748 - RNA, 19 nt, Artificial Sequence
  Description of Artificial Sequence: Synthetic oligonucleotide
uaguuccaggggcccaguu

SEQ ID NO: 374749 - RNA, 19 nt, Artificial Sequence
  Description of Artificial Sequence: Synthetic oligonucleotide
guguguaguacuccagauu

SEQ ID NO: 374750 - RNA, 19 nt, Artificial Sequence
  Description of Artificial Sequence: Synthetic oligonucleotide
ccguaaggucaccagccgc

SEQ ID NO: 374751 - RNA, 19 nt, Artificial Sequence
  Description of Artificial Sequence: Synthetic oligonucleotide
ccccaacucccucuguugc

SEQ ID NO: 374752 - RNA, 19 nt, Artificial Sequence
  Description of Artificial Sequence: Synthetic oligonucleotide
ugcccucacgagccugggu

SEQ ID NO: 374753 - RNA, 19 nt, Artificial Sequence
  Description of Artificial Sequence: Synthetic oligonucleotide
gccagccaaccucaaugcc

SEQ ID NO: 374754 - RNA, 19 nt, Artificial Sequence
  Description of Artificial Sequence: Synthetic oligonucleotide
gacagugggcgccuguauu

SEQ ID NO: 374755 - RNA, 19 nt, Artificial Sequence
  Description of Artificial Sequence: Synthetic oligonucleotide
gcggggaaagagauuugag

SEQ ID NO: 374756 - RNA, 19 nt, Artificial Sequence
  Description of Artificial Sequence: Synthetic oligonucleotide
ccuugucacugaguuuugg

SEQ ID NO: 374757 - RNA, 19 nt, Artificial Sequence
  Description of Artificial Sequence: Synthetic oligonucleotide
agcccauaaggggcaccuc

SEQ ID NO: 374758 - RNA, 19 nt, Artificial Sequence
  Description of Artificial Sequence: Synthetic oligonucleotide
cgaccgaaagccuggcccc

SEQ ID NO: 374759 - RNA, 19 nt, Artificial Sequence
  Description of Artificial Sequence: Synthetic oligonucleotide
uuguccgaccccgccgcac

SEQ ID NO: 374760 - RNA, 19 nt, Artificial Sequence
  Description of Artificial Sequence: Synthetic oligonucleotide
ggcggggaaagagauuuga

SEQ ID NO: 374761 - RNA, 19 nt, Artificial Sequence
  Description of Artificial Sequence: Synthetic oligonucleotide
cagcugcuaggagucgcag

SEQ ID NO: 374762 - RNA, 19 nt, Artificial Sequence
  Description of Artificial Sequence: Synthetic oligonucleotide
ccaacuugccuauccaugu

SEQ ID NO: 374763 - RNA, 19 nt, Artificial Sequence
  Description of Artificial Sequence: Synthetic oligonucleotide
uugcuccuacacggcaggu

SEQ ID NO: 374764 - RNA, 19 nt, Artificial Sequence
  Description of Artificial Sequence: Synthetic oligonucleotide
gucccaccugcccuuuguc

SEQ ID NO: 374765 - RNA, 19 nt, Artificial Sequence
  Description of Artificial Sequence: Synthetic oligonucleotide
ggaagcucgguuagaaggu

SEQ ID NO: 374766 - RNA, 19 nt, Artificial Sequence
  Description of Artificial Sequence: Synthetic oligonucleotide
accucacauucaggaccac

SEQ ID NO: 374767 - RNA, 19 nt, Artificial Sequence
  Description of Artificial Sequence: Synthetic oligonucleotide
guggacgcugggcaguccu

SEQ ID NO: 374768 - RNA, 19 nt, Artificial Sequence
  Description of Artificial Sequence: Synthetic oligonucleotide
gggcaaugcggguguuacc

SEQ ID NO: 374769 - RNA, 19 nt, Artificial Sequence
  Description of Artificial Sequence: Synthetic oligonucleotide
ggcgugauuggagcggaca

SEQ ID NO: 374770 - RNA, 19 nt, Artificial Sequence
  Description of Artificial Sequence: Synthetic oligonucleotide
cagggcuggccaguacaac

SEQ ID NO: 374771 - RNA, 19 nt, Artificial Sequence
  Description of Artificial Sequence: Synthetic oligonucleotide
ggacucccugauaguaggc

SEQ ID NO: 374772 - RNA, 19 nt, Artificial Sequence
  Description of Artificial Sequence: Synthetic oligonucleotide
gccgcacacaguaggcugc

SEQ ID NO: 374773 - RNA, 19 nt, Artificial Sequence
  Description of Artificial Sequence: Synthetic oligonucleotide
cacgaaggccuuggaucac

SEQ ID NO: 374774 - RNA, 19 nt, Artificial Sequence
  Description of Artificial Sequence: Synthetic oligonucleotide
cuguaccguguugcccugc

SEQ ID NO: 374775 - RNA, 19 nt, Artificial Sequence
  Description of Artificial Sequence: Synthetic oligonucleotide
cuucaucccuugccucaca

SEQ ID NO: 374776 - RNA, 19 nt, Artificial Sequence
  Description of Artificial Sequence: Synthetic oligonucleotide
guuucgcaagcggccaaaa

SEQ ID NO: 374777 - RNA, 19 nt, Artificial Sequence
  Description of Artificial Sequence: Synthetic oligonucleotide
uguggcgaauacgguucuu

SEQ ID NO: 374778 - RNA, 19 nt, Artificial Sequence
  Description of Artificial Sequence: Synthetic oligonucleotide
guaucucuccuggcuuaga

SEQ ID NO: 374779 - RNA, 19 nt, Artificial Sequence
  Description of Artificial Sequence: Synthetic oligonucleotide
cucacaccccaggauugca

SEQ ID NO: 374780 - RNA, 19 nt, Artificial Sequence
  Description of Artificial Sequence: Synthetic oligonucleotide
agucgcaggcggggaaaga

SEQ ID NO: 374781 - RNA, 19 nt, Artificial Sequence
  Description of Artificial Sequence: Synthetic oligonucleotide
cgugauuggagcggacagc

SEQ ID NO: 374782 - RNA, 19 nt, Artificial Sequence
  Description of Artificial Sequence: Synthetic oligonucleotide
cagacucgguggcuuggga

SEQ ID NO: 374783 - RNA, 19 nt, Artificial Sequence
  Description of Artificial Sequence: Synthetic oligonucleotide
cacuggcucaaugcugaga

SEQ ID NO: 374784 - RNA, 19 nt, Artificial Sequence
  Description of Artificial Sequence: Synthetic oligonucleotide
ggcgaccgaaagccuggcc

SEQ ID NO: 374785 - RNA, 19 nt, Artificial Sequence
  Description of Artificial Sequence: Synthetic oligonucleotide
uccgaccccgccgcacaca

SEQ ID NO: 374786 - RNA, 19 nt, Artificial Sequence
  Description of Artificial Sequence: Synthetic oligonucleotide
gcaguaggcggggcaagug

SEQ ID NO: 374787 - RNA, 19 nt, Artificial Sequence
  Description of Artificial Sequence: Synthetic oligonucleotide
cgucgcaggccucggaaag

SEQ ID NO: 374788 - RNA, 19 nt, Artificial Sequence
  Description of Artificial Sequence: Synthetic oligonucleotide
caggugcgauaaggagugg

SEQ ID NO: 374789 - RNA, 19 nt, Artificial Sequence
  Description of Artificial Sequence: Synthetic oligonucleotide
aggcuguauguggcgaaua

SEQ ID NO: 374790 - RNA, 19 nt, Artificial Sequence
  Description of Artificial Sequence: Synthetic oligonucleotide
ucacgcacccaaggcccaa

SEQ ID NO: 374791 - RNA, 19 nt, Artificial Sequence
  Description of Artificial Sequence: Synthetic oligonucleotide
gcucacaccccaggauugc

SEQ ID NO: 374792 - RNA, 19 nt, Artificial Sequence
  Description of Artificial Sequence: Synthetic oligonucleotide
cucuaguuccaggggccca

SEQ ID NO: 374793 - RNA, 19 nt, Artificial Sequence
  Description of Artificial Sequence: Synthetic oligonucleotide
agcagucggccagcauucu

SEQ ID NO: 374794 - RNA, 19 nt, Artificial Sequence
  Description of Artificial Sequence: Synthetic oligonucleotide
ccucuaguuccaggggccc

SEQ ID NO: 374795 - RNA, 19 nt, Artificial Sequence
  Description of Artificial Sequence: Synthetic oligonucleotide
guguuaccagccagccgca

SEQ ID NO: 374796 - RNA, 19 nt, Artificial Sequence
  Description of Artificial Sequence: Synthetic oligonucleotide
cgaauacgguucuugccca

SEQ ID NO: 374797 - RNA, 19 nt, Artificial Sequence
  Description of Artificial Sequence: Synthetic oligonucleotide
ggcgucgcaggccucggaa

SEQ ID NO: 374798 - RNA, 19 nt, Artificial Sequence
  Description of Artificial Sequence: Synthetic oligonucleotide
ccagacucgguggcuuggg

SEQ ID NO: 374799 - RNA, 19 nt, Artificial Sequence
  Description of Artificial Sequence: Synthetic oligonucleotide
gcccugcaaauaacgcugc

SEQ ID NO: 374800 - RNA, 19 nt, Artificial Sequence
  Description of Artificial Sequence: Synthetic oligonucleotide
guaccguguugcccugcaa

SEQ ID NO: 374801 - RNA, 19 nt, Artificial Sequence
  Description of Artificial Sequence: Synthetic oligonucleotide
aggcggggaaagagauuug

SEQ ID NO: 374802 - RNA, 19 nt, Artificial Sequence
  Description of Artificial Sequence: Synthetic oligonucleotide
guuguccgaccccgccgca

SEQ ID NO: 374803 - RNA, 19 nt, Artificial Sequence
  Description of Artificial Sequence: Synthetic oligonucleotide
ccaagggugugacacagau

SEQ ID NO: 374804 - RNA, 19 nt, Artificial Sequence
  Description of Artificial Sequence: Synthetic oligonucleotide
guaggcggggcaagugcaa

SEQ ID NO: 374805 - RNA, 19 nt, Artificial Sequence
  Description of Artificial Sequence: Synthetic oligonucleotide
agcggacagccuggggagu

SEQ ID NO: 374806 - RNA, 19 nt, Artificial Sequence
  Description of Artificial Sequence: Synthetic oligonucleotide
gcgauaaggaguggcagau

SEQ ID NO: 374807 - RNA, 19 nt, Artificial Sequence
  Description of Artificial Sequence: Synthetic oligonucleotide
cguaaggucaccagccgcu

SEQ ID NO: 374808 - RNA, 19 nt, Artificial Sequence
  Description of Artificial Sequence: Synthetic oligonucleotide
gcggagcuguaccguguug

SEQ ID NO: 374809 - RNA, 19 nt, Artificial Sequence
  Description of Artificial Sequence: Synthetic oligonucleotide
ggccuuggaguaucuggua

SEQ ID NO: 374810 - RNA, 19 nt, Artificial Sequence
  Description of Artificial Sequence: Synthetic oligonucleotide
cacucccgguggugucuug

SEQ ID NO: 374811 - RNA, 19 nt, Artificial Sequence
  Description of Artificial Sequence: Synthetic oligonucleotide
gucaccagacucgguggcu

SEQ ID NO: 374812 - RNA, 19 nt, Artificial Sequence
  Description of Artificial Sequence: Synthetic oligonucleotide
cugcggagcuguaccgugu

SEQ ID NO: 374813 - RNA, 19 nt, Artificial Sequence
  Description of Artificial Sequence: Synthetic oligonucleotide
auaguucaucugggcugua

SEQ ID NO: 374814 - RNA, 19 nt, Artificial Sequence
  Description of Artificial Sequence: Synthetic oligonucleotide
ggggcgugauuggagcgga

SEQ ID NO: 374815 - RNA, 19 nt, Artificial Sequence
  Description of Artificial Sequence: Synthetic oligonucleotide
caggcgugugaggccacga

SEQ ID NO: 374816 - RNA, 19 nt, Artificial Sequence
  Description of Artificial Sequence: Synthetic oligonucleotide
cacggcagguaccaccauu

SEQ ID NO: 374817 - RNA, 19 nt, Artificial Sequence
  Description of Artificial Sequence: Synthetic oligonucleotide
gguuaaccaguggcugaaa

SEQ ID NO: 374818 - RNA, 19 nt, Artificial Sequence
  Description of Artificial Sequence: Synthetic oligonucleotide
gucgcaggccucggaaagu

SEQ ID NO: 374819 - RNA, 19 nt, Artificial Sequence
  Description of Artificial Sequence: Synthetic oligonucleotide
guaaggucaccagccgcuu

SEQ ID NO: 374820 - RNA, 19 nt, Artificial Sequence
  Description of Artificial Sequence: Synthetic oligonucleotide
gcccaacuugccuauccau

SEQ ID NO: 374821 - RNA, 19 nt, Artificial Sequence
  Description of Artificial Sequence: Synthetic oligonucleotide
gguggacgcugggcagucc

SEQ ID NO: 374822 - RNA, 19 nt, Artificial Sequence
  Description of Artificial Sequence: Synthetic oligonucleotide
cuggguaacggggcgugau

SEQ ID NO: 374823 - RNA, 19 nt, Artificial Sequence
  Description of Artificial Sequence: Synthetic oligonucleotide
gcgucgcaggccucggaaa

SEQ ID NO: 374824 - RNA, 19 nt, Artificial Sequence
  Description of Artificial Sequence: Synthetic oligonucleotide
gcucgguuagaaggugaaa

SEQ ID NO: 374825 - RNA, 19 nt, Artificial Sequence
  Description of Artificial Sequence: Synthetic oligonucleotide
cacgcacccaaggcccaaa

SEQ ID NO: 374826 - RNA, 19 nt, Artificial Sequence
  Description of Artificial Sequence: Synthetic oligonucleotide
cugugaggcugggccaugu

SEQ ID NO: 374827 - RNA, 19 nt, Artificial Sequence
  Description of Artificial Sequence: Synthetic oligonucleotide
caggcuguauguggcgaau

SEQ ID NO: 374828 - RNA, 19 nt, Artificial Sequence
  Description of Artificial Sequence: Synthetic oligonucleotide
gccuuagagcuuggcucca

SEQ ID NO: 374829 - RNA, 19 nt, Artificial Sequence
  Description of Artificial Sequence: Synthetic oligonucleotide
ccuuuguccugagcuguaa

SEQ ID NO: 374830 - RNA, 19 nt, Artificial Sequence
  Description of Artificial Sequence: Synthetic oligonucleotide
ggcaggcuagugaucuggu

SEQ ID NO: 374831 - RNA, 19 nt, Artificial Sequence
  Description of Artificial Sequence: Synthetic oligonucleotide
cuaguuccaggggcccagu

SEQ ID NO: 374832 - RNA, 19 nt, Artificial Sequence
  Description of Artificial Sequence: Synthetic oligonucleotide
gccuuaugguagguacugu

SEQ ID NO: 374833 - RNA, 19 nt, Artificial Sequence
  Description of Artificial Sequence: Synthetic oligonucleotide
caggccguauaugggcaau

SEQ ID NO: 374834 - RNA, 19 nt, Artificial Sequence
  Description of Artificial Sequence: Synthetic oligonucleotide
gggcgccuguauuggacau

SEQ ID NO: 374835 - RNA, 19 nt, Artificial Sequence
  Description of Artificial Sequence: Synthetic oligonucleotide
ccgcaggcgugugaggcca

SEQ ID NO: 374836 - RNA, 19 nt, Artificial Sequence
  Description of Artificial Sequence: Synthetic oligonucleotide
ggcgccuguauuggacaua

SEQ ID NO: 374837 - RNA, 19 nt, Artificial Sequence
  Description of Artificial Sequence: Synthetic oligonucleotide
ggcugcggagcuguaccgu

SEQ ID NO: 374838 - RNA, 19 nt, Artificial Sequence
  Description of Artificial Sequence: Synthetic oligonucleotide
gggcgugauuggagcggac

SEQ ID NO: 374839 - RNA, 19 nt, Artificial Sequence
  Description of Artificial Sequence: Synthetic oligonucleotide
caaaggcaccaggcuguau

SEQ ID NO: 374840 - RNA, 19 nt, Artificial Sequence
  Description of Artificial Sequence: Synthetic oligonucleotide
ccccacacgcagggaggug

SEQ ID NO: 374841 - RNA, 19 nt, Artificial Sequence
  Description of Artificial Sequence: Synthetic oligonucleotide
gccccacacgcagggaggu

SEQ ID NO: 374842 - RNA, 19 nt, Artificial Sequence
  Description of Artificial Sequence: Synthetic oligonucleotide
ggguggcgaccgaaagccu

SEQ ID NO: 374843 - RNA, 19 nt, Artificial Sequence
  Description of Artificial Sequence: Synthetic oligonucleotide
cgcaggccucggaaagucu

SEQ ID NO: 374844 - RNA, 19 nt, Artificial Sequence
  Description of Artificial Sequence: Synthetic oligonucleotide
ccgcacacaguaggcugcu

SEQ ID NO: 374845 - RNA, 19 nt, Artificial Sequence
  Description of Artificial Sequence: Synthetic oligonucleotide
cgccuguauuggacauacu

SEQ ID NO: 374846 - RNA, 19 nt, Artificial Sequence
  Description of Artificial Sequence: Synthetic oligonucleotide
uauacaauucuccugacac

SEQ ID NO: 374847 - RNA, 19 nt, Artificial Sequence
  Description of Artificial Sequence: Synthetic oligonucleotide
aauacugagagcuugcuau

SEQ ID NO: 374848 - RNA, 19 nt, Artificial Sequence
  Description of Artificial Sequence: Synthetic oligonucleotide
uuugcaacaaagcucuggg

SEQ ID NO: 374849 - RNA, 19 nt, Artificial Sequence
  Description of Artificial Sequence: Synthetic oligonucleotide
ucgaucgaaauacugagag

SEQ ID NO: 374850 - RNA, 19 nt, Artificial Sequence
  Description of Artificial Sequence: Synthetic oligonucleotide
aauagcaggguucaagcug

SEQ ID NO: 374851 - RNA, 19 nt, Artificial Sequence
  Description of Artificial Sequence: Synthetic oligonucleotide
aauaguggaagggauuccc

SEQ ID NO: 374852 - RNA, 19 nt, Artificial Sequence
  Description of Artificial Sequence: Synthetic oligonucleotide
aguaccgucagguagaacu

SEQ ID NO: 374853 - RNA, 19 nt, Artificial Sequence
  Description of Artificial Sequence: Synthetic oligonucleotide
aagaccuugacccaucuca

SEQ ID NO: 374854 - RNA, 19 nt, Artificial Sequence
  Description of Artificial Sequence: Synthetic oligonucleotide
uauacuccgagagagaucc

SEQ ID NO: 374855 - RNA, 19 nt, Artificial Sequence
  Description of Artificial Sequence: Synthetic oligonucleotide
acagcgaugguacaguugg

SEQ ID NO: 374856 - RNA, 19 nt, Artificial Sequence
  Description of Artificial Sequence: Synthetic oligonucleotide
uuccauuauacuccgagag

SEQ ID NO: 374857 - RNA, 19 nt, Artificial Sequence
  Description of Artificial Sequence: Synthetic oligonucleotide
ugaaccaucaguguacacg

SEQ ID NO: 374858 - RNA, 19 nt, Artificial Sequence
  Description of Artificial Sequence: Synthetic oligonucleotide
aaguugaacaccuccagcu

SEQ ID NO: 374859 - RNA, 19 nt, Artificial Sequence
  Description of Artificial Sequence: Synthetic oligonucleotide
uuucgaucgaaauacugag

SEQ ID NO: 374860 - RNA, 19 nt, Artificial Sequence
  Description of Artificial Sequence: Synthetic oligonucleotide
auuacuacuaggaauaucu

SEQ ID NO: 374861 - RNA, 19 nt, Artificial Sequence
  Description of Artificial Sequence: Synthetic oligonucleotide
uguguaggcauccaugacc

SEQ ID NO: 374862 - RNA, 19 nt, Artificial Sequence
  Description of Artificial Sequence: Synthetic oligonucleotide
ugcauuaucaccgccaugc

SEQ ID NO: 374863 - RNA, 19 nt, Artificial Sequence
  Description of Artificial Sequence: Synthetic oligonucleotide
uguccaauaucaauagcag

SEQ ID NO: 374864 - RNA, 19 nt, Artificial Sequence
  Description of Artificial Sequence: Synthetic oligonucleotide
uccauuacgauaucugugc

SEQ ID NO: 374865 - RNA, 19 nt, Artificial Sequence
  Description of Artificial Sequence: Synthetic oligonucleotide
auucuuaugauccccuguc

SEQ ID NO: 374866 - RNA, 19 nt, Artificial Sequence
  Description of Artificial Sequence: Synthetic oligonucleotide
ugucaagcaaucaauuucu

SEQ ID NO: 374867 - RNA, 19 nt, Artificial Sequence
  Description of Artificial Sequence: Synthetic oligonucleotide
ucugcaauuagcauccccu

SEQ ID NO: 374868 - RNA, 19 nt, Artificial Sequence
  Description of Artificial Sequence: Synthetic oligonucleotide
auacucugaacucaauggg

SEQ ID NO: 374869 - RNA, 19 nt, Artificial Sequence
  Description of Artificial Sequence: Synthetic oligonucleotide
uauauucccagucuucaug

SEQ ID NO: 374870 - RNA, 19 nt, Artificial Sequence
  Description of Artificial Sequence: Synthetic oligonucleotide
ugggauuauacacaguccu

SEQ ID NO: 374871 - RNA, 19 nt, Artificial Sequence
  Description of Artificial Sequence: Synthetic oligonucleotide
ugaggaagcaacaaacccu

SEQ ID NO: 374872 - RNA, 19 nt, Artificial Sequence
  Description of Artificial Sequence: Synthetic oligonucleotide
ugaacugguccacacaagc

SEQ ID NO: 374873 - RNA, 19 nt, Artificial Sequence
  Description of Artificial Sequence: Synthetic oligonucleotide
cuuguaugcagccaaggcc

SEQ ID NO: 374874 - RNA, 19 nt, Artificial Sequence
  Description of Artificial Sequence: Synthetic oligonucleotide
agcucguuccauuauacuc

SEQ ID NO: 374875 - RNA, 19 nt, Artificial Sequence
  Description of Artificial Sequence: Synthetic oligonucleotide
acaguuggucuccagauag

SEQ ID NO: 374876 - RNA, 19 nt, Artificial Sequence
  Description of Artificial Sequence: Synthetic oligonucleotide
auuagcauccccugaggac

SEQ ID NO: 374877 - RNA, 19 nt, Artificial Sequence
  Description of Artificial Sequence: Synthetic oligonucleotide
auacaauucuccugacacc

SEQ ID NO: 374878 - RNA, 19 nt, Artificial Sequence
  Description of Artificial Sequence: Synthetic oligonucleotide
uucacucggacuacaaucc

SEQ ID NO: 374879 - RNA, 19 nt, Artificial Sequence
  Description of Artificial Sequence: Synthetic oligonucleotide
guagcagacaaacucacug

SEQ ID NO: 374880 - RNA, 19 nt, Artificial Sequence
  Description of Artificial Sequence: Synthetic oligonucleotide
cuucuuucgaucgaaauac

SEQ ID NO: 374881 - RNA, 19 nt, Artificial Sequence
  Description of Artificial Sequence: Synthetic oligonucleotide
ucugguugaagugagucag

SEQ ID NO: 374882 - RNA, 19 nt, Artificial Sequence
  Description of Artificial Sequence: Synthetic oligonucleotide
cucauaucugggaaugucg

SEQ ID NO: 374883 - RNA, 19 nt, Artificial Sequence
  Description of Artificial Sequence: Synthetic oligonucleotide
ucuauggacgugaucuuag

SEQ ID NO: 374884 - RNA, 19 nt, Artificial Sequence
  Description of Artificial Sequence: Synthetic oligonucleotide
aagauugggugucuuauaa

SEQ ID NO: 374885 - RNA, 19 nt, Artificial Sequence
  Description of Artificial Sequence: Synthetic oligonucleotide
uguuuagcuggaaaagcug

SEQ ID NO: 374886 - RNA, 19 nt, Artificial Sequence
  Description of Artificial Sequence: Synthetic oligonucleotide
aaauaguggaagggauucc

SEQ ID NO: 374887 - RNA, 19 nt, Artificial Sequence
  Description of Artificial Sequence: Synthetic oligonucleotide
aaucaauuucuacuucgga

SEQ ID NO: 374888 - RNA, 19 nt, Artificial Sequence
  Description of Artificial Sequence: Synthetic oligonucleotide
uuuccgaugcuccagugac

SEQ ID NO: 374889 - RNA, 19 nt, Artificial Sequence
  Description of Artificial Sequence: Synthetic oligonucleotide
aaaauccaguagcagacaa

SEQ ID NO: 374890 - RNA, 19 nt, Artificial Sequence
  Description of Artificial Sequence: Synthetic oligonucleotide
agcagggauacucugaacu

SEQ ID NO: 374891 - RNA, 19 nt, Artificial Sequence
  Description of Artificial Sequence: Synthetic oligonucleotide
uuagcauccccugaggacc

SEQ ID NO: 374892 - RNA, 19 nt, Artificial Sequence
  Description of Artificial Sequence: Synthetic oligonucleotide
guuuacaguuuuccgaugc

SEQ ID NO: 374893 - RNA, 19 nt, Artificial Sequence
  Description of Artificial Sequence: Synthetic oligonucleotide
uugguugggauuauacaca

SEQ ID NO: 374894 - RNA, 19 nt, Artificial Sequence
  Description of Artificial Sequence: Synthetic oligonucleotide
aagcaaucaauuucuacuu

SEQ ID NO: 374895 - RNA, 19 nt, Artificial Sequence
  Description of Artificial Sequence: Synthetic oligonucleotide
acaggucacagccaccucg

SEQ ID NO: 374896 - RNA, 19 nt, Artificial Sequence
  Description of Artificial Sequence: Synthetic oligonucleotide
uuacagucauccucaauug

SEQ ID NO: 374897 - RNA, 19 nt, Artificial Sequence
  Description of Artificial Sequence: Synthetic oligonucleotide
ucuagcaugcagcguacag

SEQ ID NO: 374898 - RNA, 19 nt, Artificial Sequence
  Description of Artificial Sequence: Synthetic oligonucleotide
cuggacguuagcuggaggg

SEQ ID NO: 374899 - RNA, 19 nt, Artificial Sequence
  Description of Artificial Sequence: Synthetic oligonucleotide
uuaugauccccugucaagc

SEQ ID NO: 374900 - RNA, 19 nt, Artificial Sequence
  Description of Artificial Sequence: Synthetic oligonucleotide
uuggggaucuuauaggcgu

SEQ ID NO: 374901 - RNA, 19 nt, Artificial Sequence
  Description of Artificial Sequence: Synthetic oligonucleotide
cuucacucggacuacaauc

SEQ ID NO: 374902 - RNA, 19 nt, Artificial Sequence
  Description of Artificial Sequence: Synthetic oligonucleotide
gucgucgcaauacacagcc

SEQ ID NO: 374903 - RNA, 19 nt, Artificial Sequence
  Description of Artificial Sequence: Synthetic oligonucleotide
aauaugaccuggcaagcuu

SEQ ID NO: 374904 - RNA, 19 nt, Artificial Sequence
  Description of Artificial Sequence: Synthetic oligonucleotide
uuaccacacacauucucag

SEQ ID NO: 374905 - RNA, 19 nt, Artificial Sequence
  Description of Artificial Sequence: Synthetic oligonucleotide
ucauaucugggaaugucgu

SEQ ID NO: 374906 - RNA, 19 nt, Artificial Sequence
  Description of Artificial Sequence: Synthetic oligonucleotide
gaagcaacaaacccuggca

SEQ ID NO: 374907 - RNA, 19 nt, Artificial Sequence
  Description of Artificial Sequence: Synthetic oligonucleotide
gcaaucaauuucuacuucg

SEQ ID NO: 374908 - RNA, 19 nt, Artificial Sequence
  Description of Artificial Sequence: Synthetic oligonucleotide
aguuucauuacuacuagga

SEQ ID NO: 374909 - RNA, 19 nt, Artificial Sequence
  Description of Artificial Sequence: Synthetic oligonucleotide
augucgucgcaauacacag

SEQ ID NO: 374910 - RNA, 19 nt, Artificial Sequence
  Description of Artificial Sequence: Synthetic oligonucleotide
agaaaagccuuucuugaga

SEQ ID NO: 374911 - RNA, 19 nt, Artificial Sequence
  Description of Artificial Sequence: Synthetic oligonucleotide
uugggauuauacacagucc

SEQ ID NO: 374912 - RNA, 19 nt, Artificial Sequence
  Description of Artificial Sequence: Synthetic oligonucleotide
gaucgaaauacugagagcu

SEQ ID NO: 374913 - RNA, 19 nt, Artificial Sequence
  Description of Artificial Sequence: Synthetic oligonucleotide
uggggaugcugccaaaugc

SEQ ID NO: 374914 - RNA, 19 nt, Artificial Sequence
  Description of Artificial Sequence: Synthetic oligonucleotide
cugucaagcaaucaauuuc

SEQ ID NO: 374915 - RNA, 19 nt, Artificial Sequence
  Description of Artificial Sequence: Synthetic oligonucleotide
auuacgauaucugugcgga

SEQ ID NO: 374916 - RNA, 19 nt, Artificial Sequence
  Description of Artificial Sequence: Synthetic oligonucleotide
guccaauaucaauagcagg

SEQ ID NO: 374917 - RNA, 19 nt, Artificial Sequence
  Description of Artificial Sequence: Synthetic oligonucleotide
cauuacgauaucugugcgg

SEQ ID NO: 374918 - RNA, 19 nt, Artificial Sequence
  Description of Artificial Sequence: Synthetic oligonucleotide
acaguguuagugcuggucu

SEQ ID NO: 374919 - RNA, 19 nt, Artificial Sequence
  Description of Artificial Sequence: Synthetic oligonucleotide
uggucuuacaaauccuccc

SEQ ID NO: 374920 - RNA, 19 nt, Artificial Sequence
  Description of Artificial Sequence: Synthetic oligonucleotide
aggguuuacaguuuuccga

SEQ ID NO: 374921 - RNA, 19 nt, Artificial Sequence
  Description of Artificial Sequence: Synthetic oligonucleotide
uggggauuuucagagcucg

SEQ ID NO: 374922 - RNA, 19 nt, Artificial Sequence
  Description of Artificial Sequence: Synthetic oligonucleotide
uggacgugaucuuagcaug

SEQ ID NO: 374923 - RNA, 19 nt, Artificial Sequence
  Description of Artificial Sequence: Synthetic oligonucleotide
cuuucgaucgaaauacuga

SEQ ID NO: 374924 - RNA, 19 nt, Artificial Sequence
  Description of Artificial Sequence: Synthetic oligonucleotide
ucgaaauacugagagcuug

SEQ ID NO: 374925 - RNA, 19 nt, Artificial Sequence
  Description of Artificial Sequence: Synthetic oligonucleotide
auuucuacuucggagcaag

SEQ ID NO: 374926 - RNA, 19 nt, Artificial Sequence
  Description of Artificial Sequence: Synthetic oligonucleotide
ucagacugauccuuuggca

SEQ ID NO: 374927 - RNA, 19 nt, Artificial Sequence
  Description of Artificial Sequence: Synthetic oligonucleotide
cuucauaggugccaguuuc

SEQ ID NO: 374928 - RNA, 19 nt, Artificial Sequence
  Description of Artificial Sequence: Synthetic oligonucleotide
ugaaucuuggaggugggga

SEQ ID NO: 374929 - RNA, 19 nt, Artificial Sequence
  Description of Artificial Sequence: Synthetic oligonucleotide
uccagccuuuucaauauga

SEQ ID NO: 374930 - RNA, 19 nt, Artificial Sequence
  Description of Artificial Sequence: Synthetic oligonucleotide
accuguccaauaucaauag

SEQ ID NO: 374931 - RNA, 19 nt, Artificial Sequence
  Description of Artificial Sequence: Synthetic oligonucleotide
uggaguaccgucagguaga

SEQ ID NO: 374932 - RNA, 19 nt, Artificial Sequence
  Description of Artificial Sequence: Synthetic oligonucleotide
uaggcguuguccaugugga

SEQ ID NO: 374933 - RNA, 19 nt, Artificial Sequence
  Description of Artificial Sequence: Synthetic oligonucleotide
gauagacgaagccaggaaa

SEQ ID NO: 374934 - RNA, 19 nt, Artificial Sequence
  Description of Artificial Sequence: Synthetic oligonucleotide
cuuagcaugggcccgggug

SEQ ID NO: 374935 - RNA, 19 nt, Artificial Sequence
  Description of Artificial Sequence: Synthetic oligonucleotide
uuuuccgaugcuccaguga

SEQ ID NO: 374936 - RNA, 19 nt, Artificial Sequence
  Description of Artificial Sequence: Synthetic oligonucleotide
auaucaauagcaggguuca

SEQ ID NO: 374937 - RNA, 19 nt, Artificial Sequence
  Description of Artificial Sequence: Synthetic oligonucleotide
guguucugcaauuagcauc

SEQ ID NO: 374938 - RNA, 19 nt, Artificial Sequence
  Description of Artificial Sequence: Synthetic oligonucleotide
acgugaucuuagcaugggc

SEQ ID NO: 374939 - RNA, 19 nt, Artificial Sequence
  Description of Artificial Sequence: Synthetic oligonucleotide
cuggaguaccgucagguag

SEQ ID NO: 374940 - RNA, 19 nt, Artificial Sequence
  Description of Artificial Sequence: Synthetic oligonucleotide
gaaccaacauccauuacga

SEQ ID NO: 374941 - RNA, 19 nt, Artificial Sequence
  Description of Artificial Sequence: Synthetic oligonucleotide
uguuuugcauuaucaccgc

SEQ ID NO: 374942 - RNA, 19 nt, Artificial Sequence
  Description of Artificial Sequence: Synthetic oligonucleotide
cuugacccaucucaguacc

SEQ ID NO: 374943 - RNA, 19 nt, Artificial Sequence
  Description of Artificial Sequence: Synthetic oligonucleotide
cagacugauccuuuggcac

SEQ ID NO: 374944 - RNA, 19 nt, Artificial Sequence
  Description of Artificial Sequence: Synthetic oligonucleotide
ucacucggacuacaauccg

SEQ ID NO: 374945 - RNA, 19 nt, Artificial Sequence
  Description of Artificial Sequence: Synthetic oligonucleotide
aagauagacgaagccagga

SEQ ID NO: 374946 - RNA, 19 nt, Artificial Sequence
  Description of Artificial Sequence: Synthetic oligonucleotide
aucacggucuagcaugcag

SEQ ID NO: 374947 - RNA, 19 nt, Artificial Sequence
  Description of Artificial Sequence: Synthetic oligonucleotide
auggacgugaucuuagcau

SEQ ID NO: 374948 - RNA, 19 nt, Artificial Sequence
  Description of Artificial Sequence: Synthetic oligonucleotide
cuagcaugcagcguacagg

SEQ ID NO: 374949 - RNA, 19 nt, Artificial Sequence
  Description of Artificial Sequence: Synthetic oligonucleotide
gauucccggaauuugucuc

SEQ ID NO: 374950 - RNA, 19 nt, Artificial Sequence
  Description of Artificial Sequence: Synthetic oligonucleotide
ucaauaugaccuggcaagc

SEQ ID NO: 374951 - RNA, 19 nt, Artificial Sequence
  Description of Artificial Sequence: Synthetic oligonucleotide
uucgaucgaaauacugaga

SEQ ID NO: 374952 - RNA, 19 nt, Artificial Sequence
  Description of Artificial Sequence: Synthetic oligonucleotide
uauuccaaacuugguuggg

SEQ ID NO: 374953 - RNA, 19 nt, Artificial Sequence
  Description of Artificial Sequence: Synthetic oligonucleotide
uacgauaucugugcggaga

SEQ ID NO: 374954 - RNA, 19 nt, Artificial Sequence
  Description of Artificial Sequence: Synthetic oligonucleotide
uuauaggcguuguccaugu

SEQ ID NO: 374955 - RNA, 19 nt, Artificial Sequence
  Description of Artificial Sequence: Synthetic oligonucleotide
gaagauagacgaagccagg

SEQ ID NO: 374956 - RNA, 19 nt, Artificial Sequence
  Description of Artificial Sequence: Synthetic oligonucleotide
ucggacuacaauccgguua

SEQ ID NO: 374957 - RNA, 19 nt, Artificial Sequence
  Description of Artificial Sequence: Synthetic oligonucleotide
cccauaacugaaauagugg

SEQ ID NO: 374958 - RNA, 19 nt, Artificial Sequence
  Description of Artificial Sequence: Synthetic oligonucleotide
ugucuuguaugcagccaag

SEQ ID NO: 374959 - RNA, 19 nt, Artificial Sequence
  Description of Artificial Sequence: Synthetic oligonucleotide
gcaugcagcguacagggcg

SEQ ID NO: 374960 - RNA, 19 nt, Artificial Sequence
  Description of Artificial Sequence: Synthetic oligonucleotide
acagucacggagcagggau

SEQ ID NO: 374961 - RNA, 19 nt, Artificial Sequence
  Description of Artificial Sequence: Synthetic oligonucleotide
ucguucucauaucugggaa

SEQ ID NO: 374962 - RNA, 19 nt, Artificial Sequence
  Description of Artificial Sequence: Synthetic oligonucleotide
uaugauccccugucaagca

SEQ ID NO: 374963 - RNA, 19 nt, Artificial Sequence
  Description of Artificial Sequence: Synthetic oligonucleotide
uucauaggugccaguuuca

SEQ ID NO: 374964 - RNA, 19 nt, Artificial Sequence
  Description of Artificial Sequence: Synthetic oligonucleotide
acaagcauuccggaucuuc

SEQ ID NO: 374965 - RNA, 19 nt, Artificial Sequence
  Description of Artificial Sequence: Synthetic oligonucleotide
agagcucguuccauuauac

SEQ ID NO: 374966 - RNA, 19 nt, Artificial Sequence
  Description of Artificial Sequence: Synthetic oligonucleotide
acacaagcauuccggaucu

SEQ ID NO: 374967 - RNA, 19 nt, Artificial Sequence
  Description of Artificial Sequence: Synthetic oligonucleotide
aaccuguccaauaucaaua

SEQ ID NO: 374968 - RNA, 19 nt, Artificial Sequence
  Description of Artificial Sequence: Synthetic oligonucleotide
caugcagcguacagggcgg

SEQ ID NO: 374969 - RNA, 19 nt, Artificial Sequence
  Description of Artificial Sequence: Synthetic oligonucleotide
ggauacucugaacucaaug

SEQ ID NO: 374970 - RNA, 19 nt, Artificial Sequence
  Description of Artificial Sequence: Synthetic oligonucleotide
uguagccaagauugggugu

SEQ ID NO: 374971 - RNA, 19 nt, Artificial Sequence
  Description of Artificial Sequence: Synthetic oligonucleotide
cacggucuagcaugcagcg

SEQ ID NO: 374972 - RNA, 19 nt, Artificial Sequence
  Description of Artificial Sequence: Synthetic oligonucleotide
uaucugggaaugucgucgc

SEQ ID NO: 374973 - RNA, 19 nt, Artificial Sequence
  Description of Artificial Sequence: Synthetic oligonucleotide
gaaccaucaguguacacgu

SEQ ID NO: 374974 - RNA, 19 nt, Artificial Sequence
  Description of Artificial Sequence: Synthetic oligonucleotide
guucugugugcccacgaag

SEQ ID NO: 374975 - RNA, 19 nt, Artificial Sequence
  Description of Artificial Sequence: Synthetic oligonucleotide
uccguaccuccucugcagg

SEQ ID NO: 374976 - RNA, 19 nt, Artificial Sequence
  Description of Artificial Sequence: Synthetic oligonucleotide
aagagcucguuccauuaua

SEQ ID NO: 374977 - RNA, 19 nt, Artificial Sequence
  Description of Artificial Sequence: Synthetic oligonucleotide
cacucggacuacaauccgg

SEQ ID NO: 374978 - RNA, 19 nt, Artificial Sequence
  Description of Artificial Sequence: Synthetic oligonucleotide
gugucuauggacgugaucu

SEQ ID NO: 374979 - RNA, 19 nt, Artificial Sequence
  Description of Artificial Sequence: Synthetic oligonucleotide
auaugaccuggcaagcuuc

SEQ ID NO: 374980 - RNA, 19 nt, Artificial Sequence
  Description of Artificial Sequence: Synthetic oligonucleotide
uagacgaagccaggaaaag

SEQ ID NO: 374981 - RNA, 19 nt, Artificial Sequence
  Description of Artificial Sequence: Synthetic oligonucleotide
uaaacagccuggccauuga

SEQ ID NO: 374982 - RNA, 19 nt, Artificial Sequence
  Description of Artificial Sequence: Synthetic oligonucleotide
agucacggagcagggauac

SEQ ID NO: 374983 - RNA, 19 nt, Artificial Sequence
  Description of Artificial Sequence: Synthetic oligonucleotide
agcaagccaccccauaacu

SEQ ID NO: 374984 - RNA, 19 nt, Artificial Sequence
  Description of Artificial Sequence: Synthetic oligonucleotide
ugcacuuguguaggcaucc

SEQ ID NO: 374985 - RNA, 19 nt, Artificial Sequence
  Description of Artificial Sequence: Synthetic oligonucleotide
uccacacaagcauuccgga

SEQ ID NO: 374986 - RNA, 19 nt, Artificial Sequence
  Description of Artificial Sequence: Synthetic oligonucleotide
gguaucuuguaggugcugg

SEQ ID NO: 374987 - RNA, 19 nt, Artificial Sequence
  Description of Artificial Sequence: Synthetic oligonucleotide
uucaagcuggaaccaacau

SEQ ID NO: 374988 - RNA, 19 nt, Artificial Sequence
  Description of Artificial Sequence: Synthetic oligonucleotide
cuauggacgugaucuuagc

SEQ ID NO: 374989 - RNA, 19 nt, Artificial Sequence
  Description of Artificial Sequence: Synthetic oligonucleotide
agcacugaaccaucagugu

SEQ ID NO: 374990 - RNA, 19 nt, Artificial Sequence
  Description of Artificial Sequence: Synthetic oligonucleotide
ccauuauacuccgagagag

SEQ ID NO: 374991 - RNA, 19 nt, Artificial Sequence
  Description of Artificial Sequence: Synthetic oligonucleotide
gaagugucuauggacguga

SEQ ID NO: 374992 - RNA, 19 nt, Artificial Sequence
  Description of Artificial Sequence: Synthetic oligonucleotide
ucccugguucagaaaagga

SEQ ID NO: 374993 - RNA, 19 nt, Artificial Sequence
  Description of Artificial Sequence: Synthetic oligonucleotide
ugcggagauucuuaugauc

SEQ ID NO: 374994 - RNA, 19 nt, Artificial Sequence
  Description of Artificial Sequence: Synthetic oligonucleotide
ugcuccgggucucuuuucc

SEQ ID NO: 374995 - RNA, 19 nt, Artificial Sequence
  Description of Artificial Sequence: Synthetic oligonucleotide
ugacccaucucaguacccc

SEQ ID NO: 374996 - RNA, 19 nt, Artificial Sequence
  Description of Artificial Sequence: Synthetic oligonucleotide
agugccccgaauguugggg

SEQ ID NO: 374997 - RNA, 19 nt, Artificial Sequence
  Description of Artificial Sequence: Synthetic oligonucleotide
gcggagauucuuaugaucc

SEQ ID NO: 374998 - RNA, 19 nt, Artificial Sequence
  Description of Artificial Sequence: Synthetic oligonucleotide
cacuauauucccagucuuc

SEQ ID NO: 374999 - RNA, 19 nt, Artificial Sequence
  Description of Artificial Sequence: Synthetic oligonucleotide
ugucgucgcaauacacagc

SEQ ID NO: 375000 - RNA, 19 nt, Artificial Sequence
  Description of Artificial Sequence: Synthetic oligonucleotide
caguagcagacaaacucac

SEQ ID NO: 375001 - RNA, 19 nt, Artificial Sequence
  Description of Artificial Sequence: Synthetic oligonucleotide
gacgugaucuuagcauggg

SEQ ID NO: 375002 - RNA, 19 nt, Artificial Sequence
  Description of Artificial Sequence: Synthetic oligonucleotide
uccgaugcuccagugacac

SEQ ID NO: 375003 - RNA, 19 nt, Artificial Sequence
  Description of Artificial Sequence: Synthetic oligonucleotide
auucccggaauuugucuca

SEQ ID NO: 375004 - RNA, 19 nt, Artificial Sequence
  Description of Artificial Sequence: Synthetic oligonucleotide
guuuugcauuaucaccgcc

SEQ ID NO: 375005 - RNA, 19 nt, Artificial Sequence
  Description of Artificial Sequence: Synthetic oligonucleotide
ugaagugucuauggacgug

SEQ ID NO: 375006 - RNA, 19 nt, Artificial Sequence
  Description of Artificial Sequence: Synthetic oligonucleotide
uucuuucgaucgaaauacu

SEQ ID NO: 375007 - RNA, 19 nt, Artificial Sequence
  Description of Artificial Sequence: Synthetic oligonucleotide
ccuuuugggacagcgaugg

SEQ ID NO: 375008 - RNA, 19 nt, Artificial Sequence
  Description of Artificial Sequence: Synthetic oligonucleotide
auccgguuaucuggaacgc

SEQ ID NO: 375009 - RNA, 19 nt, Artificial Sequence
  Description of Artificial Sequence: Synthetic oligonucleotide
uuacuacuaggaauaucuu

SEQ ID NO: 375010 - RNA, 19 nt, Artificial Sequence
  Description of Artificial Sequence: Synthetic oligonucleotide
caauccgguuaucuggaac

SEQ ID NO: 375011 - RNA, 19 nt, Artificial Sequence
  Description of Artificial Sequence: Synthetic oligonucleotide
cucgccuuuugggacagcg

SEQ ID NO: 375012 - RNA, 19 nt, Artificial Sequence
  Description of Artificial Sequence: Synthetic oligonucleotide
agcucgacuggccaccuga

SEQ ID NO: 375013 - RNA, 19 nt, Artificial Sequence
  Description of Artificial Sequence: Synthetic oligonucleotide
cugcaauuagcauccccug

SEQ ID NO: 375014 - RNA, 19 nt, Artificial Sequence
  Description of Artificial Sequence: Synthetic oligonucleotide
guuccauuauacuccgaga

SEQ ID NO: 375015 - RNA, 19 nt, Artificial Sequence
  Description of Artificial Sequence: Synthetic oligonucleotide
uuacgauaucugugcggag

SEQ ID NO: 375016 - RNA, 19 nt, Artificial Sequence
  Description of Artificial Sequence: Synthetic oligonucleotide
acgaguaugcaggcucccc

SEQ ID NO: 375017 - RNA, 19 nt, Artificial Sequence
  Description of Artificial Sequence: Synthetic oligonucleotide
guuaucuggaacgcccagc

SEQ ID NO: 375018 - RNA, 19 nt, Artificial Sequence
  Description of Artificial Sequence: Synthetic oligonucleotide
uuaucaccgccaugcugag

SEQ ID NO: 375019 - RNA, 19 nt, Artificial Sequence
  Description of Artificial Sequence: Synthetic oligonucleotide
uccuccguaccuccucugc

SEQ ID NO: 375020 - RNA, 19 nt, Artificial Sequence
  Description of Artificial Sequence: Synthetic oligonucleotide
uugacccaucucaguaccc

SEQ ID NO: 375021 - RNA, 19 nt, Artificial Sequence
  Description of Artificial Sequence: Synthetic oligonucleotide
gccaaccuuguauuuagcc

SEQ ID NO: 375022 - RNA, 19 nt, Artificial Sequence
  Description of Artificial Sequence: Synthetic oligonucleotide
ucacggagcagggauacuc

SEQ ID NO: 375023 - RNA, 19 nt, Artificial Sequence
  Description of Artificial Sequence: Synthetic oligonucleotide
gacguuagcuggagggucc

SEQ ID NO: 375024 - RNA, 19 nt, Artificial Sequence
  Description of Artificial Sequence: Synthetic oligonucleotide
gagcaagccaccccauaac

SEQ ID NO: 375025 - RNA, 19 nt, Artificial Sequence
  Description of Artificial Sequence: Synthetic oligonucleotide
acgauaucugugcggagau

SEQ ID NO: 375026 - RNA, 19 nt, Artificial Sequence
  Description of Artificial Sequence: Synthetic oligonucleotide
uugcaacaaagcucugggu

SEQ ID NO: 375027 - RNA, 19 nt, Artificial Sequence
  Description of Artificial Sequence: Synthetic oligonucleotide
cuccguaccuccucugcag

SEQ ID NO: 375028 - RNA, 19 nt, Artificial Sequence
  Description of Artificial Sequence: Synthetic oligonucleotide
aguaugcaggcuccccuca

SEQ ID NO: 375029 - RNA, 19 nt, Artificial Sequence
  Description of Artificial Sequence: Synthetic oligonucleotide
gcaggguucaagcuggaac

SEQ ID NO: 375030 - RNA, 19 nt, Artificial Sequence
  Description of Artificial Sequence: Synthetic oligonucleotide
ccggaauuugucucaaagc

SEQ ID NO: 375031 - RNA, 19 nt, Artificial Sequence
  Description of Artificial Sequence: Synthetic oligonucleotide
aaagccucggaaggcugug

SEQ ID NO: 375032 - RNA, 19 nt, Artificial Sequence
  Description of Artificial Sequence: Synthetic oligonucleotide
augacccagucuucccagg

SEQ ID NO: 375033 - RNA, 19 nt, Artificial Sequence
  Description of Artificial Sequence: Synthetic oligonucleotide
caaaugccccuucaaccug

SEQ ID NO: 375034 - RNA, 19 nt, Artificial Sequence
  Description of Artificial Sequence: Synthetic oligonucleotide
aaccaacauccauuacgau

SEQ ID NO: 375035 - RNA, 19 nt, Artificial Sequence
  Description of Artificial Sequence: Synthetic oligonucleotide
guagccaagauuggguguc

SEQ ID NO: 375036 - RNA, 19 nt, Artificial Sequence
  Description of Artificial Sequence: Synthetic oligonucleotide
gaguaugcaggcuccccuc

SEQ ID NO: 375037 - RNA, 19 nt, Artificial Sequence
  Description of Artificial Sequence: Synthetic oligonucleotide
gaacugguccacacaagca

SEQ ID NO: 375038 - RNA, 19 nt, Artificial Sequence
  Description of Artificial Sequence: Synthetic oligonucleotide
caucaguguacacguggac

SEQ ID NO: 375039 - RNA, 19 nt, Artificial Sequence
  Description of Artificial Sequence: Synthetic oligonucleotide
cauuauacuccgagagaga

SEQ ID NO: 375040 - RNA, 19 nt, Artificial Sequence
  Description of Artificial Sequence: Synthetic oligonucleotide
ggaguagugcagcuccucc

SEQ ID NO: 375041 - RNA, 19 nt, Artificial Sequence
  Description of Artificial Sequence: Synthetic oligonucleotide
cuucggagcaagccacccc

SEQ ID NO: 375042 - RNA, 19 nt, Artificial Sequence
  Description of Artificial Sequence: Synthetic oligonucleotide
ucgagcugcccggauagca

SEQ ID NO: 375043 - RNA, 19 nt, Artificial Sequence
  Description of Artificial Sequence: Synthetic oligonucleotide
caccugaaccaucuuugug

SEQ ID NO: 375044 - RNA, 19 nt, Artificial Sequence
  Description of Artificial Sequence: Synthetic oligonucleotide
uacuccgagagagauccuc

SEQ ID NO: 375045 - RNA, 19 nt, Artificial Sequence
  Description of Artificial Sequence: Synthetic oligonucleotide
ccggauagcauccuugaug

SEQ ID NO: 375046 - RNA, 19 nt, Artificial Sequence
  Description of Artificial Sequence: Synthetic oligonucleotide
gaaucuuggagguggggau

SEQ ID NO: 375047 - RNA, 19 nt, Artificial Sequence
  Description of Artificial Sequence: Synthetic oligonucleotide
cguuccauuauacuccgag

SEQ ID NO: 375048 - RNA, 19 nt, Artificial Sequence
  Description of Artificial Sequence: Synthetic oligonucleotide
acaauucuccugacaccac

SEQ ID NO: 375049 - RNA, 19 nt, Artificial Sequence
  Description of Artificial Sequence: Synthetic oligonucleotide
cccggaauuugucucaaag

SEQ ID NO: 375050 - RNA, 19 nt, Artificial Sequence
  Description of Artificial Sequence: Synthetic oligonucleotide
cauccauuacgauaucugu

SEQ ID NO: 375051 - RNA, 19 nt, Artificial Sequence
  Description of Artificial Sequence: Synthetic oligonucleotide
uggaaccaacauccauuac

SEQ ID NO: 375052 - RNA, 19 nt, Artificial Sequence
  Description of Artificial Sequence: Synthetic oligonucleotide
uuccgaugcuccagugaca

SEQ ID NO: 375053 - RNA, 19 nt, Artificial Sequence
  Description of Artificial Sequence: Synthetic oligonucleotide
augccccuucaaccugucc

SEQ ID NO: 375054 - RNA, 19 nt, Artificial Sequence
  Description of Artificial Sequence: Synthetic oligonucleotide
gacagcucguucucauauc

SEQ ID NO: 375055 - RNA, 19 nt, Artificial Sequence
  Description of Artificial Sequence: Synthetic oligonucleotide
uggacguuagcuggagggu

SEQ ID NO: 375056 - RNA, 19 nt, Artificial Sequence
  Description of Artificial Sequence: Synthetic oligonucleotide
acucggacuacaauccggu

SEQ ID NO: 375057 - RNA, 19 nt, Artificial Sequence
  Description of Artificial Sequence: Synthetic oligonucleotide
guaugcaggcuccccucag

SEQ ID NO: 375058 - RNA, 19 nt, Artificial Sequence
  Description of Artificial Sequence: Synthetic oligonucleotide
cugucuuguaugcagccaa

SEQ ID NO: 375059 - RNA, 19 nt, Artificial Sequence
  Description of Artificial Sequence: Synthetic oligonucleotide
ucgccuuuugggacagcga

SEQ ID NO: 375060 - RNA, 19 nt, Artificial Sequence
  Description of Artificial Sequence: Synthetic oligonucleotide
uccgguuaucuggaacgcc

SEQ ID NO: 375061 - RNA, 19 nt, Artificial Sequence
  Description of Artificial Sequence: Synthetic oligonucleotide
acggagcagggauacucug

SEQ ID NO: 375062 - RNA, 19 nt, Artificial Sequence
  Description of Artificial Sequence: Synthetic oligonucleotide
aacagccuggccauugaua

SEQ ID NO: 375063 - RNA, 19 nt, Artificial Sequence
  Description of Artificial Sequence: Synthetic oligonucleotide
aaugccccuucaaccuguc

SEQ ID NO: 375064 - RNA, 19 nt, Artificial Sequence
  Description of Artificial Sequence: Synthetic oligonucleotide
ugguacaguuggucuccag

SEQ ID NO: 375065 - RNA, 19 nt, Artificial Sequence
  Description of Artificial Sequence: Synthetic oligonucleotide
cugacaccacauugucagc

SEQ ID NO: 375066 - RNA, 19 nt, Artificial Sequence
  Description of Artificial Sequence: Synthetic oligonucleotide
cugaaauaguggaagggau

SEQ ID NO: 375067 - RNA, 19 nt, Artificial Sequence
  Description of Artificial Sequence: Synthetic oligonucleotide
uuccaacaauucuccuugu

SEQ ID NO: 375068 - RNA, 19 nt, Artificial Sequence
  Description of Artificial Sequence: Synthetic oligonucleotide
augauccccugucaagcaa

SEQ ID NO: 375069 - RNA, 19 nt, Artificial Sequence
  Description of Artificial Sequence: Synthetic oligonucleotide
gccauugauaucagcacug

SEQ ID NO: 375070 - RNA, 19 nt, Artificial Sequence
  Description of Artificial Sequence: Synthetic oligonucleotide
ggaaugucgucgcaauaca

SEQ ID NO: 375071 - RNA, 19 nt, Artificial Sequence
  Description of Artificial Sequence: Synthetic oligonucleotide
ccaaccuuguauuuagcca

SEQ ID NO: 375072 - RNA, 19 nt, Artificial Sequence
  Description of Artificial Sequence: Synthetic oligonucleotide
ccauuacgauaucugugcg

SEQ ID NO: 375073 - RNA, 19 nt, Artificial Sequence
  Description of Artificial Sequence: Synthetic oligonucleotide
caguguuagugcuggucuc

SEQ ID NO: 375074 - RNA, 19 nt, Artificial Sequence
  Description of Artificial Sequence: Synthetic oligonucleotide
gguuaucuggaacgcccag

SEQ ID NO: 375075 - RNA, 19 nt, Artificial Sequence
  Description of Artificial Sequence: Synthetic oligonucleotide
ugggaaugucgucgcaaua

SEQ ID NO: 375076 - RNA, 19 nt, Artificial Sequence
  Description of Artificial Sequence: Synthetic oligonucleotide
gagggugcgccggaacucc

SEQ ID NO: 375077 - RNA, 19 nt, Artificial Sequence
  Description of Artificial Sequence: Synthetic oligonucleotide
agccaaccuuguauuuagc

SEQ ID NO: 375078 - RNA, 19 nt, Artificial Sequence
  Description of Artificial Sequence: Synthetic oligonucleotide
ggacgugaucuuagcaugg

SEQ ID NO: 375079 - RNA, 19 nt, Artificial Sequence
  Description of Artificial Sequence: Synthetic oligonucleotide
cgaaauacugagagcuugc

SEQ ID NO: 375080 - RNA, 19 nt, Artificial Sequence
  Description of Artificial Sequence: Synthetic oligonucleotide
aguagcagacaaacucacu

SEQ ID NO: 375081 - RNA, 19 nt, Artificial Sequence
  Description of Artificial Sequence: Synthetic oligonucleotide
ugagaucgccuuucucaau

SEQ ID NO: 375082 - RNA, 19 nt, Artificial Sequence
  Description of Artificial Sequence: Synthetic oligonucleotide
gguuuacaguuuuccgaug

SEQ ID NO: 375083 - RNA, 19 nt, Artificial Sequence
  Description of Artificial Sequence: Synthetic oligonucleotide
gagaucgccuuucucaauu

SEQ ID NO: 375084 - RNA, 19 nt, Artificial Sequence
  Description of Artificial Sequence: Synthetic oligonucleotide
gaaauacugagagcuugcu

SEQ ID NO: 375085 - RNA, 19 nt, Artificial Sequence
  Description of Artificial Sequence: Synthetic oligonucleotide
gaguggcagggcuguuuag

SEQ ID NO: 375086 - RNA, 19 nt, Artificial Sequence
  Description of Artificial Sequence: Synthetic oligonucleotide
gugaacugguccacacaag

SEQ ID NO: 375087 - RNA, 19 nt, Artificial Sequence
  Description of Artificial Sequence: Synthetic oligonucleotide
cuccgggucucuuuuccuc

SEQ ID NO: 375088 - RNA, 19 nt, Artificial Sequence
  Description of Artificial Sequence: Synthetic oligonucleotide
cagagcucgacuggccacc

SEQ ID NO: 375089 - RNA, 19 nt, Artificial Sequence
  Description of Artificial Sequence: Synthetic oligonucleotide
cugugcggagauucuuaug

SEQ ID NO: 375090 - RNA, 19 nt, Artificial Sequence
  Description of Artificial Sequence: Synthetic oligonucleotide
ucgcaauacacagccuguc

SEQ ID NO: 375091 - RNA, 19 nt, Artificial Sequence
  Description of Artificial Sequence: Synthetic oligonucleotide
gccaccaauauacaauucu

SEQ ID NO: 375092 - RNA, 19 nt, Artificial Sequence
  Description of Artificial Sequence: Synthetic oligonucleotide
caagcauuccggaucuucu

SEQ ID NO: 375093 - RNA, 19 nt, Artificial Sequence
  Description of Artificial Sequence: Synthetic oligonucleotide
aggugccaguuucauuacu

SEQ ID NO: 375094 - RNA, 19 nt, Artificial Sequence
  Description of Artificial Sequence: Synthetic oligonucleotide
cagcucguucucauaucug

SEQ ID NO: 375095 - RNA, 19 nt, Artificial Sequence
  Description of Artificial Sequence: Synthetic oligonucleotide
auaucugugcggagauucu

SEQ ID NO: 375096 - RNA, 19 nt, Artificial Sequence
  Description of Artificial Sequence: Synthetic oligonucleotide
ccucagacugauccuuugg

SEQ ID NO: 375097 - RNA, 19 nt, Artificial Sequence
  Description of Artificial Sequence: Synthetic oligonucleotide
ccauaaaaggaguuguucu

SEQ ID NO: 375098 - RNA, 19 nt, Artificial Sequence
  Description of Artificial Sequence: Synthetic oligonucleotide
uaucugugcggagauucuu

SEQ ID NO: 375099 - RNA, 19 nt, Artificial Sequence
  Description of Artificial Sequence: Synthetic oligonucleotide
cuggccaccaauauacaau

SEQ ID NO: 375100 - RNA, 19 nt, Artificial Sequence
  Description of Artificial Sequence: Synthetic oligonucleotide
gagcagggauacucugaac

SEQ ID NO: 375101 - RNA, 19 nt, Artificial Sequence
  Description of Artificial Sequence: Synthetic oligonucleotide
agaucgccuuucucaauuu

SEQ ID NO: 375102 - RNA, 19 nt, Artificial Sequence
  Description of Artificial Sequence: Synthetic oligonucleotide
ggagcaagccaccccauaa

SEQ ID NO: 375103 - RNA, 19 nt, Artificial Sequence
  Description of Artificial Sequence: Synthetic oligonucleotide
uccggaguggcagggcugu

SEQ ID NO: 375104 - RNA, 19 nt, Artificial Sequence
  Description of Artificial Sequence: Synthetic oligonucleotide
agggcggccugucuuguau

SEQ ID NO: 375105 - RNA, 19 nt, Artificial Sequence
  Description of Artificial Sequence: Synthetic oligonucleotide
ggugggguccagcuuacca

SEQ ID NO: 375106 - RNA, 19 nt, Artificial Sequence
  Description of Artificial Sequence: Synthetic oligonucleotide
uggggaucuuauaggcguu

SEQ ID NO: 375107 - RNA, 19 nt, Artificial Sequence
  Description of Artificial Sequence: Synthetic oligonucleotide
aggccacggcuguggacac

SEQ ID NO: 375108 - RNA, 19 nt, Artificial Sequence
  Description of Artificial Sequence: Synthetic oligonucleotide
caccgccaugcugagcucg

SEQ ID NO: 375109 - RNA, 19 nt, Artificial Sequence
  Description of Artificial Sequence: Synthetic oligonucleotide
cgucgcaauacacagccug

SEQ ID NO: 375110 - RNA, 19 nt, Artificial Sequence
  Description of Artificial Sequence: Synthetic oligonucleotide
agggauacucugaacucaa

SEQ ID NO: 375111 - RNA, 19 nt, Artificial Sequence
  Description of Artificial Sequence: Synthetic oligonucleotide
ugaaugguuccagccuuuu

SEQ ID NO: 375112 - RNA, 19 nt, Artificial Sequence
  Description of Artificial Sequence: Synthetic oligonucleotide
ucgucgcaauacacagccu

SEQ ID NO: 375113 - RNA, 19 nt, Artificial Sequence
  Description of Artificial Sequence: Synthetic oligonucleotide
cucgacuggccaccugaac

SEQ ID NO: 375114 - RNA, 19 nt, Artificial Sequence
  Description of Artificial Sequence: Synthetic oligonucleotide
ccuguccaauaucaauagc

SEQ ID NO: 375115 - RNA, 19 nt, Artificial Sequence
  Description of Artificial Sequence: Synthetic oligonucleotide
gagggcagauuggucuuac

SEQ ID NO: 375116 - RNA, 19 nt, Artificial Sequence
  Description of Artificial Sequence: Synthetic oligonucleotide
ucguuccauuauacuccga

SEQ ID NO: 375117 - RNA, 19 nt, Artificial Sequence
  Description of Artificial Sequence: Synthetic oligonucleotide
accuuguauuuagccagga

SEQ ID NO: 375118 - RNA, 19 nt, Artificial Sequence
  Description of Artificial Sequence: Synthetic oligonucleotide
ggguuuacaguuuuccgau

SEQ ID NO: 375119 - RNA, 19 nt, Artificial Sequence
  Description of Artificial Sequence: Synthetic oligonucleotide
cagugccccgaauguuggg

SEQ ID NO: 375120 - RNA, 19 nt, Artificial Sequence
  Description of Artificial Sequence: Synthetic oligonucleotide
augcagcguacagggcggc

SEQ ID NO: 375121 - RNA, 19 nt, Artificial Sequence
  Description of Artificial Sequence: Synthetic oligonucleotide
aagccaccccauaacugaa

SEQ ID NO: 375122 - RNA, 19 nt, Artificial Sequence
  Description of Artificial Sequence: Synthetic oligonucleotide
gagcucguuccauuauacu

SEQ ID NO: 375123 - RNA, 19 nt, Artificial Sequence
  Description of Artificial Sequence: Synthetic oligonucleotide
gggauuauacacaguccuc

SEQ ID NO: 375124 - RNA, 19 nt, Artificial Sequence
  Description of Artificial Sequence: Synthetic oligonucleotide
gcuggacguuagcuggagg

SEQ ID NO: 375125 - RNA, 19 nt, Artificial Sequence
  Description of Artificial Sequence: Synthetic oligonucleotide
ccacgaguaugcaggcucc

SEQ ID NO: 375126 - RNA, 19 nt, Artificial Sequence
  Description of Artificial Sequence: Synthetic oligonucleotide
gggugucuuauaaaaucca

SEQ ID NO: 375127 - RNA, 19 nt, Artificial Sequence
  Description of Artificial Sequence: Synthetic oligonucleotide
acguggaccagggcaccuc

SEQ ID NO: 375128 - RNA, 19 nt, Artificial Sequence
  Description of Artificial Sequence: Synthetic oligonucleotide
ggcggccugucuuguaugc

SEQ ID NO: 375129 - RNA, 19 nt, Artificial Sequence
  Description of Artificial Sequence: Synthetic oligonucleotide
cuccggaguggcagggcug

SEQ ID NO: 375130 - RNA, 19 nt, Artificial Sequence
  Description of Artificial Sequence: Synthetic oligonucleotide
gccacuauauucccagucu

SEQ ID NO: 375131 - RNA, 19 nt, Artificial Sequence
  Description of Artificial Sequence: Synthetic oligonucleotide
agggcagauuggucuuaca

SEQ ID NO: 375132 - RNA, 19 nt, Artificial Sequence
  Description of Artificial Sequence: Synthetic oligonucleotide
ggggaugcugccaaaugca

SEQ ID NO: 375133 - RNA, 19 nt, Artificial Sequence
  Description of Artificial Sequence: Synthetic oligonucleotide
gcacugaaccaucagugua

SEQ ID NO: 375134 - RNA, 19 nt, Artificial Sequence
  Description of Artificial Sequence: Synthetic oligonucleotide
aucgaaauacugagagcuu

SEQ ID NO: 375135 - RNA, 19 nt, Artificial Sequence
  Description of Artificial Sequence: Synthetic oligonucleotide
cacgaguaugcaggcuccc

SEQ ID NO: 375136 - RNA, 19 nt, Artificial Sequence
  Description of Artificial Sequence: Synthetic oligonucleotide
ugccccgaauguuggggau

SEQ ID NO: 375137 - RNA, 19 nt, Artificial Sequence
  Description of Artificial Sequence: Synthetic oligonucleotide
aagccucggaaggcugugu

SEQ ID NO: 375138 - RNA, 19 nt, Artificial Sequence
  Description of Artificial Sequence: Synthetic oligonucleotide
agccucggaaggcuguguu

SEQ ID NO: 375139 - RNA, 19 nt, Artificial Sequence
  Description of Artificial Sequence: Synthetic oligonucleotide
agguaucuuguaggugcug

SEQ ID NO: 375140 - RNA, 19 nt, Artificial Sequence
  Description of Artificial Sequence: Synthetic oligonucleotide
uucuccggaguggcagggc

SEQ ID NO: 375141 - RNA, 19 nt, Artificial Sequence
  Description of Artificial Sequence: Synthetic oligonucleotide
uucccggaauuugucucaa

SEQ ID NO: 375142 - RNA, 19 nt, Artificial Sequence
  Description of Artificial Sequence: Synthetic oligonucleotide
gugccccgaauguugggga

SEQ ID NO: 375143 - RNA, 19 nt, Artificial Sequence
  Description of Artificial Sequence: Synthetic oligonucleotide
caguuggucuccagauaga

SEQ ID NO: 375144 - RNA, 19 nt, Artificial Sequence
  Description of Artificial Sequence: Synthetic oligonucleotide
ugcagcguacagggcggcc

SEQ ID NO: 375145 - RNA, 19 nt, Artificial Sequence
  Description of Artificial Sequence: Synthetic oligonucleotide
gcagacaaacucacugcac

SEQ ID NO: 375146 - RNA, 19 nt, Artificial Sequence
  Description of Artificial Sequence: Synthetic oligonucleotide
caugcgucagcagcacuga

SEQ ID NO: 375147 - RNA, 19 nt, Artificial Sequence
  Description of Artificial Sequence: Synthetic oligonucleotide
ggugccaguuucauuacua

SEQ ID NO: 375148 - RNA, 19 nt, Artificial Sequence
  Description of Artificial Sequence: Synthetic oligonucleotide
gaccuugacccaucucagu

SEQ ID NO: 375149 - RNA, 19 nt, Artificial Sequence
  Description of Artificial Sequence: Synthetic oligonucleotide
ggcguuguccauguggaaa

SEQ ID NO: 375150 - RNA, 19 nt, Artificial Sequence
  Description of Artificial Sequence: Synthetic oligonucleotide
cggagauucuuaugauccc

SEQ ID NO: 375151 - RNA, 19 nt, Artificial Sequence
  Description of Artificial Sequence: Synthetic oligonucleotide
ggauucccggaauuugucu

SEQ ID NO: 375152 - RNA, 19 nt, Artificial Sequence
  Description of Artificial Sequence: Synthetic oligonucleotide
auccccugucaagcaauca

SEQ ID NO: 375153 - RNA, 19 nt, Artificial Sequence
  Description of Artificial Sequence: Synthetic oligonucleotide
ggacguuagcuggaggguc

SEQ ID NO: 375154 - RNA, 19 nt, Artificial Sequence
  Description of Artificial Sequence: Synthetic oligonucleotide
uagcaugggcccgggugcu

SEQ ID NO: 375155 - RNA, 19 nt, Artificial Sequence
  Description of Artificial Sequence: Synthetic oligonucleotide
ucccggaauuugucucaaa

SEQ ID NO: 375156 - RNA, 19 nt, Artificial Sequence
  Description of Artificial Sequence: Synthetic oligonucleotide
gaucgccuuucucaauuuu

SEQ ID NO: 375157 - RNA, 19 nt, Artificial Sequence
  Description of Artificial Sequence: Synthetic oligonucleotide
guaggugcuggggccacga

SEQ ID NO: 375158 - RNA, 19 nt, Artificial Sequence
  Description of Artificial Sequence: Synthetic oligonucleotide
gcucauccaguguucugca

SEQ ID NO: 375159 - RNA, 19 nt, Artificial Sequence
  Description of Artificial Sequence: Synthetic oligonucleotide
guggggauuuucagagcuc

SEQ ID NO: 375160 - RNA, 19 nt, Artificial Sequence
  Description of Artificial Sequence: Synthetic oligonucleotide
gucgcaauacacagccugu

SEQ ID NO: 375161 - RNA, 19 nt, Artificial Sequence
  Description of Artificial Sequence: Synthetic oligonucleotide
augcgucagcagcacugaa

SEQ ID NO: 375162 - RNA, 19 nt, Artificial Sequence
  Description of Artificial Sequence: Synthetic oligonucleotide
caccaguuaucagcauguc

SEQ ID NO: 375163 - RNA, 19 nt, Artificial Sequence
  Description of Artificial Sequence: Synthetic oligonucleotide
aggcguuguccauguggaa

SEQ ID NO: 375164 - RNA, 19 nt, Artificial Sequence
  Description of Artificial Sequence: Synthetic oligonucleotide
acguuagcuggaggguccu

SEQ ID NO: 375165 - RNA, 19 nt, Artificial Sequence
  Description of Artificial Sequence: Synthetic oligonucleotide
ccggaacuccaccauacca

SEQ ID NO: 375166 - RNA, 19 nt, Artificial Sequence
  Description of Artificial Sequence: Synthetic oligonucleotide
agagcucgacuggccaccu

SEQ ID NO: 375167 - RNA, 19 nt, Artificial Sequence
  Description of Artificial Sequence: Synthetic oligonucleotide
gagcucgacuggccaccug

SEQ ID NO: 375168 - RNA, 19 nt, Artificial Sequence
  Description of Artificial Sequence: Synthetic oligonucleotide
cucugaacucaauggggau

SEQ ID NO: 375169 - RNA, 19 nt, Artificial Sequence
  Description of Artificial Sequence: Synthetic oligonucleotide
cugggaaugucgucgcaau

SEQ ID NO: 375170 - RNA, 19 nt, Artificial Sequence
  Description of Artificial Sequence: Synthetic oligonucleotide
acggucuagcaugcagcgu

SEQ ID NO: 375171 - RNA, 19 nt, Artificial Sequence
  Description of Artificial Sequence: Synthetic oligonucleotide
gucaagcaaucaauuucua

SEQ ID NO: 375172 - RNA, 19 nt, Artificial Sequence
  Description of Artificial Sequence: Synthetic oligonucleotide
cacggagcagggauacucu

SEQ ID NO: 375173 - RNA, 19 nt, Artificial Sequence
  Description of Artificial Sequence: Synthetic oligonucleotide
gggccauaaaaggaguugu

SEQ ID NO: 375174 - RNA, 19 nt, Artificial Sequence
  Description of Artificial Sequence: Synthetic oligonucleotide
gccuuuugggacagcgaug

SEQ ID NO: 375175 - RNA, 19 nt, Artificial Sequence
  Description of Artificial Sequence: Synthetic oligonucleotide
ccgaggccugcauuucagc

SEQ ID NO: 375176 - RNA, 19 nt, Artificial Sequence
  Description of Artificial Sequence: Synthetic oligonucleotide
cucgagcugcccggauagc

SEQ ID NO: 375177 - RNA, 19 nt, Artificial Sequence
  Description of Artificial Sequence: Synthetic oligonucleotide
cagucacggagcagggaua

SEQ ID NO: 375178 - RNA, 19 nt, Artificial Sequence
  Description of Artificial Sequence: Synthetic oligonucleotide
gaguaccgucagguagaac

SEQ ID NO: 375179 - RNA, 19 nt, Artificial Sequence
  Description of Artificial Sequence: Synthetic oligonucleotide
gccaagauugggugucuua

SEQ ID NO: 375180 - RNA, 19 nt, Artificial Sequence
  Description of Artificial Sequence: Synthetic oligonucleotide
cgccggaacuccaccauac

SEQ ID NO: 375181 - RNA, 19 nt, Artificial Sequence
  Description of Artificial Sequence: Synthetic oligonucleotide
ccuuguauuuagccaggaa

SEQ ID NO: 375182 - RNA, 19 nt, Artificial Sequence
  Description of Artificial Sequence: Synthetic oligonucleotide
gugcuccgggucucuuuuc

SEQ ID NO: 375183 - RNA, 19 nt, Artificial Sequence
  Description of Artificial Sequence: Synthetic oligonucleotide
agccaagauugggugucuu

SEQ ID NO: 375184 - RNA, 19 nt, Artificial Sequence
  Description of Artificial Sequence: Synthetic oligonucleotide
guaccgucagguagaacuu

SEQ ID NO: 375185 - RNA, 19 nt, Artificial Sequence
  Description of Artificial Sequence: Synthetic oligonucleotide
agcguacagggcggccugu

SEQ ID NO: 375186 - RNA, 19 nt, Artificial Sequence
  Description of Artificial Sequence: Synthetic oligonucleotide
cggucuagcaugcagcgua

SEQ ID NO: 375187 - RNA, 19 nt, Artificial Sequence
  Description of Artificial Sequence: Synthetic oligonucleotide
gucccgaggccugcauuuc

SEQ ID NO: 375188 - RNA, 19 nt, Artificial Sequence
  Description of Artificial Sequence: Synthetic oligonucleotide
caaaggugggguccagcuu

SEQ ID NO: 375189 - RNA, 19 nt, Artificial Sequence
  Description of Artificial Sequence: Synthetic oligonucleotide
auacuccgagagagauccu

SEQ ID NO: 375190 - RNA, 19 nt, Artificial Sequence
  Description of Artificial Sequence: Synthetic oligonucleotide
gcauuaucaccgccaugcu

SEQ ID NO: 375191 - RNA, 19 nt, Artificial Sequence
  Description of Artificial Sequence: Synthetic oligonucleotide
ggaguaccgucagguagaa

SEQ ID NO: 375192 - RNA, 19 nt, Artificial Sequence
  Description of Artificial Sequence: Synthetic oligonucleotide
cuuuugggacagcgauggu

SEQ ID NO: 375193 - RNA, 19 nt, Artificial Sequence
  Description of Artificial Sequence: Synthetic oligonucleotide
ccgaauguuggggaucuua

SEQ ID NO: 375194 - RNA, 19 nt, Artificial Sequence
  Description of Artificial Sequence: Synthetic oligonucleotide
ccaucucgccugccucgcc

SEQ ID NO: 375195 - RNA, 19 nt, Artificial Sequence
  Description of Artificial Sequence: Synthetic oligonucleotide
gccccgaauguuggggauc

SEQ ID NO: 375196 - RNA, 19 nt, Artificial Sequence
  Description of Artificial Sequence: Synthetic oligonucleotide
cucggacuacaauccgguu

SEQ ID NO: 375197 - RNA, 19 nt, Artificial Sequence
  Description of Artificial Sequence: Synthetic oligonucleotide
gcagcguacagggcggccu

SEQ ID NO: 375198 - RNA, 19 nt, Artificial Sequence
  Description of Artificial Sequence: Synthetic oligonucleotide
ggccauaaaaggaguuguu

SEQ ID NO: 375199 - RNA, 19 nt, Artificial Sequence
  Description of Artificial Sequence: Synthetic oligonucleotide
cgaguaugcaggcuccccu

SEQ ID NO: 375200 - RNA, 19 nt, Artificial Sequence
  Description of Artificial Sequence: Synthetic oligonucleotide
cauaaacagccuggccauu

SEQ ID NO: 375201 - RNA, 19 nt, Artificial Sequence
  Description of Artificial Sequence: Synthetic oligonucleotide
gcgccggaacuccaccaua

SEQ ID NO: 375202 - RNA, 19 nt, Artificial Sequence
  Description of Artificial Sequence: Synthetic oligonucleotide
gucacggagcagggauacu

SEQ ID NO: 375203 - RNA, 19 nt, Artificial Sequence
  Description of Artificial Sequence: Synthetic oligonucleotide
cagggcggccugucuugua

SEQ ID NO: 375204 - RNA, 19 nt, Artificial Sequence
  Description of Artificial Sequence: Synthetic oligonucleotide
cacguggaccagggcaccu

SEQ ID NO: 375205 - RNA, 19 nt, Artificial Sequence
  Description of Artificial Sequence: Synthetic oligonucleotide
cccucacagaccaggguuu

SEQ ID NO: 375206 - RNA, 19 nt, Artificial Sequence
  Description of Artificial Sequence: Synthetic oligonucleotide
gggauacucugaacucaau

SEQ ID NO: 375207 - RNA, 19 nt, Artificial Sequence
  Description of Artificial Sequence: Synthetic oligonucleotide
ccccgaauguuggggaucu

SEQ ID NO: 375208 - RNA, 19 nt, Artificial Sequence
  Description of Artificial Sequence: Synthetic oligonucleotide
ccgccaugcugagcucgag

SEQ ID NO: 375209 - RNA, 19 nt, Artificial Sequence
  Description of Artificial Sequence: Synthetic oligonucleotide
gccggcccaccauguccuc

SEQ ID NO: 375210 - RNA, 19 nt, Artificial Sequence
  Description of Artificial Sequence: Synthetic oligonucleotide
cgagcugcccggauagcau

SEQ ID NO: 375211 - RNA, 19 nt, Artificial Sequence
  Description of Artificial Sequence: Synthetic oligonucleotide
cccaugcgucagcagcacu

SEQ ID NO: 375212 - RNA, 19 nt, Artificial Sequence
  Description of Artificial Sequence: Synthetic oligonucleotide
cacaagcauuccggaucuu

SEQ ID NO: 375213 - RNA, 19 nt, Artificial Sequence
  Description of Artificial Sequence: Synthetic oligonucleotide
cgauaucugugcggagauu

SEQ ID NO: 375214 - RNA, 19 nt, Artificial Sequence
  Description of Artificial Sequence: Synthetic oligonucleotide
cguuagcuggaggguccuu

SEQ ID NO: 375215 - RNA, 19 nt, Artificial Sequence
  Description of Artificial Sequence: Synthetic oligonucleotide
cccgaauguuggggaucuu

SEQ ID NO: 375216 - RNA, 19 nt, Artificial Sequence
  Description of Artificial Sequence: Synthetic oligonucleotide
ccggaguggcagggcuguu

SEQ ID NO: 375217 - RNA, 19 nt, Artificial Sequence
  Description of Artificial Sequence: Synthetic oligonucleotide
agaguuauuaauuuguuag

SEQ ID NO: 375218 - RNA, 19 nt, Artificial Sequence
  Description of Artificial Sequence: Synthetic oligonucleotide
uuuacuauucacagcaagg

SEQ ID NO: 375219 - RNA, 19 nt, Artificial Sequence
  Description of Artificial Sequence: Synthetic oligonucleotide
uuaguauuagcuuuggagc

SEQ ID NO: 375220 - RNA, 19 nt, Artificial Sequence
  Description of Artificial Sequence: Synthetic oligonucleotide
agauuaucaaacuuggauc

SEQ ID NO: 375221 - RNA, 19 nt, Artificial Sequence
  Description of Artificial Sequence: Synthetic oligonucleotide
gauuucgguauacaaaucg

SEQ ID NO: 375222 - RNA, 19 nt, Artificial Sequence
  Description of Artificial Sequence: Synthetic oligonucleotide
uccgacacaagauacaacg

SEQ ID NO: 375223 - RNA, 19 nt, Artificial Sequence
  Description of Artificial Sequence: Synthetic oligonucleotide
cuuaguauuagcuuuggag

SEQ ID NO: 375224 - RNA, 19 nt, Artificial Sequence
  Description of Artificial Sequence: Synthetic oligonucleotide
ucagauaacuuucugagcu

SEQ ID NO: 375225 - RNA, 19 nt, Artificial Sequence
  Description of Artificial Sequence: Synthetic oligonucleotide
gauuaucaaacuuggaucc

SEQ ID NO: 375226 - RNA, 19 nt, Artificial Sequence
  Description of Artificial Sequence: Synthetic oligonucleotide
aagauuaucaaacuuggau

SEQ ID NO: 375227 - RNA, 19 nt, Artificial Sequence
  Description of Artificial Sequence: Synthetic oligonucleotide
aaaggauuucuacugaaug

SEQ ID NO: 375228 - RNA, 19 nt, Artificial Sequence
  Description of Artificial Sequence: Synthetic oligonucleotide
uacuaaguguuucaguugg

SEQ ID NO: 375229 - RNA, 19 nt, Artificial Sequence
  Description of Artificial Sequence: Synthetic oligonucleotide
ugugcaaguaaccugaagu

SEQ ID NO: 375230 - RNA, 19 nt, Artificial Sequence
  Description of Artificial Sequence: Synthetic oligonucleotide
aagguuaagaaacaucgcu

SEQ ID NO: 375231 - RNA, 19 nt, Artificial Sequence
  Description of Artificial Sequence: Synthetic oligonucleotide
aaaauuaagggugaguaga

SEQ ID NO: 375232 - RNA, 19 nt, Artificial Sequence
  Description of Artificial Sequence: Synthetic oligonucleotide
uaauuuguuagccaacuca

SEQ ID NO: 375233 - RNA, 19 nt, Artificial Sequence
  Description of Artificial Sequence: Synthetic oligonucleotide
aauacugagcuuuggagcu

SEQ ID NO: 375234 - RNA, 19 nt, Artificial Sequence
  Description of Artificial Sequence: Synthetic oligonucleotide
aauuuguuagccaacucac

SEQ ID NO: 375235 - RNA, 19 nt, Artificial Sequence
  Description of Artificial Sequence: Synthetic oligonucleotide
auuaagggugaguagaauc

SEQ ID NO: 375236 - RNA, 19 nt, Artificial Sequence
  Description of Artificial Sequence: Synthetic oligonucleotide
aauaucauccuucccaggu

SEQ ID NO: 375237 - RNA, 19 nt, Artificial Sequence
  Description of Artificial Sequence: Synthetic oligonucleotide
uuagagagaaagaucaaga

SEQ ID NO: 375238 - RNA, 19 nt, Artificial Sequence
  Description of Artificial Sequence: Synthetic oligonucleotide
cuugcauuaucuuuguuag

SEQ ID NO: 375239 - RNA, 19 nt, Artificial Sequence
  Description of Artificial Sequence: Synthetic oligonucleotide
auaccgaucagauauuguc

SEQ ID NO: 375240 - RNA, 19 nt, Artificial Sequence
  Description of Artificial Sequence: Synthetic oligonucleotide
agcauuaaagccugcacac

SEQ ID NO: 375241 - RNA, 19 nt, Artificial Sequence
  Description of Artificial Sequence: Synthetic oligonucleotide
ucgguauacaaaucgaucc

SEQ ID NO: 375242 - RNA, 19 nt, Artificial Sequence
  Description of Artificial Sequence: Synthetic oligonucleotide
aauggcggcaucugugugc

SEQ ID NO: 375243 - RNA, 19 nt, Artificial Sequence
  Description of Artificial Sequence: Synthetic oligonucleotide
ugagaauaaggauaugccc

SEQ ID NO: 375244 - RNA, 19 nt, Artificial Sequence
  Description of Artificial Sequence: Synthetic oligonucleotide
uguauaauaccgaucagau

SEQ ID NO: 375245 - RNA, 19 nt, Artificial Sequence
  Description of Artificial Sequence: Synthetic oligonucleotide
auacaaguccgaaagaagc

SEQ ID NO: 375246 - RNA, 19 nt, Artificial Sequence
  Description of Artificial Sequence: Synthetic oligonucleotide
uuauuaauuuguuagccaa

SEQ ID NO: 375247 - RNA, 19 nt, Artificial Sequence
  Description of Artificial Sequence: Synthetic oligonucleotide
aaaaugguuggauagcaaa

SEQ ID NO: 375248 - RNA, 19 nt, Artificial Sequence
  Description of Artificial Sequence: Synthetic oligonucleotide
uccuaaagaaacuucguca

SEQ ID NO: 375249 - RNA, 19 nt, Artificial Sequence
  Description of Artificial Sequence: Synthetic oligonucleotide
uuaagggugaguagaaucu

SEQ ID NO: 375250 - RNA, 19 nt, Artificial Sequence
  Description of Artificial Sequence: Synthetic oligonucleotide
gaauguauggaauuagaga

SEQ ID NO: 375251 - RNA, 19 nt, Artificial Sequence
  Description of Artificial Sequence: Synthetic oligonucleotide
uaaaauuccccucaaggau

SEQ ID NO: 375252 - RNA, 19 nt, Artificial Sequence
  Description of Artificial Sequence: Synthetic oligonucleotide
uacaaaucgauccaagaau

SEQ ID NO: 375253 - RNA, 19 nt, Artificial Sequence
  Description of Artificial Sequence: Synthetic oligonucleotide
ucaaggauagucuuggcaa

SEQ ID NO: 375254 - RNA, 19 nt, Artificial Sequence
  Description of Artificial Sequence: Synthetic oligonucleotide
aacaacagcaacuuucuua

SEQ ID NO: 375255 - RNA, 19 nt, Artificial Sequence
  Description of Artificial Sequence: Synthetic oligonucleotide
guagacaagguuaagaaac

SEQ ID NO: 375256 - RNA, 19 nt, Artificial Sequence
  Description of Artificial Sequence: Synthetic oligonucleotide
caacagauggccaaacucc

SEQ ID NO: 375257 - RNA, 19 nt, Artificial Sequence
  Description of Artificial Sequence: Synthetic oligonucleotide
uuucauauugggaugcuuc

SEQ ID NO: 375258 - RNA, 19 nt, Artificial Sequence
  Description of Artificial Sequence: Synthetic oligonucleotide
uacaacgcuccacagauga

SEQ ID NO: 375259 - RNA, 19 nt, Artificial Sequence
  Description of Artificial Sequence: Synthetic oligonucleotide
aguaaccugaaguaaccuc

SEQ ID NO: 375260 - RNA, 19 nt, Artificial Sequence
  Description of Artificial Sequence: Synthetic oligonucleotide
ucucauuagugugaaaucc

SEQ ID NO: 375261 - RNA, 19 nt, Artificial Sequence
  Description of Artificial Sequence: Synthetic oligonucleotide
aacaucgcuugcuucgaac

SEQ ID NO: 375262 - RNA, 19 nt, Artificial Sequence
  Description of Artificial Sequence: Synthetic oligonucleotide
aacacuucuaacagguggg

SEQ ID NO: 375263 - RNA, 19 nt, Artificial Sequence
  Description of Artificial Sequence: Synthetic oligonucleotide
uugaugauacuuuucacau

SEQ ID NO: 375264 - RNA, 19 nt, Artificial Sequence
  Description of Artificial Sequence: Synthetic oligonucleotide
uggauuucgguauacaaau

SEQ ID NO: 375265 - RNA, 19 nt, Artificial Sequence
  Description of Artificial Sequence: Synthetic oligonucleotide
aaagccugcacacuaguau

SEQ ID NO: 375266 - RNA, 19 nt, Artificial Sequence
  Description of Artificial Sequence: Synthetic oligonucleotide
ucaauauuaucuucacucu

SEQ ID NO: 375267 - RNA, 19 nt, Artificial Sequence
  Description of Artificial Sequence: Synthetic oligonucleotide
uagcauuaaagccugcaca

SEQ ID NO: 375268 - RNA, 19 nt, Artificial Sequence
  Description of Artificial Sequence: Synthetic oligonucleotide
agcaaggcuacggacaucc

SEQ ID NO: 375269 - RNA, 19 nt, Artificial Sequence
  Description of Artificial Sequence: Synthetic oligonucleotide
uguauagugcuguauaaua

SEQ ID NO: 375270 - RNA, 19 nt, Artificial Sequence
  Description of Artificial Sequence: Synthetic oligonucleotide
uguuguguagccaaucauc

SEQ ID NO: 375271 - RNA, 19 nt, Artificial Sequence
  Description of Artificial Sequence: Synthetic oligonucleotide
auaaggauaugcccuguuc

SEQ ID NO: 375272 - RNA, 19 nt, Artificial Sequence
  Description of Artificial Sequence: Synthetic oligonucleotide
agauaacuuucugagcucc

SEQ ID NO: 375273 - RNA, 19 nt, Artificial Sequence
  Description of Artificial Sequence: Synthetic oligonucleotide
acuuccuaaagaaacuucg

SEQ ID NO: 375274 - RNA, 19 nt, Artificial Sequence
  Description of Artificial Sequence: Synthetic oligonucleotide
guuggagcgaaagagaagc

SEQ ID NO: 375275 - RNA, 19 nt, Artificial Sequence
  Description of Artificial Sequence: Synthetic oligonucleotide
ugauacuuuucacaucucu

SEQ ID NO: 375276 - RNA, 19 nt, Artificial Sequence
  Description of Artificial Sequence: Synthetic oligonucleotide
ugucuguugagaauucaug

SEQ ID NO: 375277 - RNA, 19 nt, Artificial Sequence
  Description of Artificial Sequence: Synthetic oligonucleotide
ucauuagugugaaauccug

SEQ ID NO: 375278 - RNA, 19 nt, Artificial Sequence
  Description of Artificial Sequence: Synthetic oligonucleotide
ugagaauucaugacuugga

SEQ ID NO: 375279 - RNA, 19 nt, Artificial Sequence
  Description of Artificial Sequence: Synthetic oligonucleotide
acuaguauuaaaauuuaca

SEQ ID NO: 375280 - RNA, 19 nt, Artificial Sequence
  Description of Artificial Sequence: Synthetic oligonucleotide
acucuuuacuauucacagc

SEQ ID NO: 375281 - RNA, 19 nt, Artificial Sequence
  Description of Artificial Sequence: Synthetic oligonucleotide
uggaauuagagagaaagau

SEQ ID NO: 375282 - RNA, 19 nt, Artificial Sequence
  Description of Artificial Sequence: Synthetic oligonucleotide
ucuacugaauggaucauau

SEQ ID NO: 375283 - RNA, 19 nt, Artificial Sequence
  Description of Artificial Sequence: Synthetic oligonucleotide
acaaaucgauccaagaauc

SEQ ID NO: 375284 - RNA, 19 nt, Artificial Sequence
  Description of Artificial Sequence: Synthetic oligonucleotide
acuccuguuaaaauggcac

SEQ ID NO: 375285 - RNA, 19 nt, Artificial Sequence
  Description of Artificial Sequence: Synthetic oligonucleotide
cuuaucacagagaagcuca

SEQ ID NO: 375286 - RNA, 19 nt, Artificial Sequence
  Description of Artificial Sequence: Synthetic oligonucleotide
auacaaaucgauccaagaa

SEQ ID NO: 375287 - RNA, 19 nt, Artificial Sequence
  Description of Artificial Sequence: Synthetic oligonucleotide
agcaaauugcauaauacug

SEQ ID NO: 375288 - RNA, 19 nt, Artificial Sequence
  Description of Artificial Sequence: Synthetic oligonucleotide
uucgaacaugccaucaacc

SEQ ID NO: 375289 - RNA, 19 nt, Artificial Sequence
  Description of Artificial Sequence: Synthetic oligonucleotide
uauuaauuuguuagccaac

SEQ ID NO: 375290 - RNA, 19 nt, Artificial Sequence
  Description of Artificial Sequence: Synthetic oligonucleotide
uucauauugggaugcuucc

SEQ ID NO: 375291 - RNA, 19 nt, Artificial Sequence
  Description of Artificial Sequence: Synthetic oligonucleotide
uaguauuagcuuuggagcu

SEQ ID NO: 375292 - RNA, 19 nt, Artificial Sequence
  Description of Artificial Sequence: Synthetic oligonucleotide
ucgucugacacauccauga

SEQ ID NO: 375293 - RNA, 19 nt, Artificial Sequence
  Description of Artificial Sequence: Synthetic oligonucleotide
gaaacgacccagcaaaauc

SEQ ID NO: 375294 - RNA, 19 nt, Artificial Sequence
  Description of Artificial Sequence: Synthetic oligonucleotide
cuuuacuauucacagcaag

SEQ ID NO: 375295 - RNA, 19 nt, Artificial Sequence
  Description of Artificial Sequence: Synthetic oligonucleotide
gauacaaguccgaaagaag

SEQ ID NO: 375296 - RNA, 19 nt, Artificial Sequence
  Description of Artificial Sequence: Synthetic oligonucleotide
caaguaaccugaaguaacc

SEQ ID NO: 375297 - RNA, 19 nt, Artificial Sequence
  Description of Artificial Sequence: Synthetic oligonucleotide
cuugaaacgacccagcaaa

SEQ ID NO: 375298 - RNA, 19 nt, Artificial Sequence
  Description of Artificial Sequence: Synthetic oligonucleotide
uguucguaauaccacagua

SEQ ID NO: 375299 - RNA, 19 nt, Artificial Sequence
  Description of Artificial Sequence: Synthetic oligonucleotide
aguuaucaaagcuuuuccu

SEQ ID NO: 375300 - RNA, 19 nt, Artificial Sequence
  Description of Artificial Sequence: Synthetic oligonucleotide
cagcauuuuguuucuauag

SEQ ID NO: 375301 - RNA, 19 nt, Artificial Sequence
  Description of Artificial Sequence: Synthetic oligonucleotide
gacuuaaaguuucuaggac

SEQ ID NO: 375302 - RNA, 19 nt, Artificial Sequence
  Description of Artificial Sequence: Synthetic oligonucleotide
uucgguauacaaaucgauc

SEQ ID NO: 375303 - RNA, 19 nt, Artificial Sequence
  Description of Artificial Sequence: Synthetic oligonucleotide
uuuagugguuaccaaggaa

SEQ ID NO: 375304 - RNA, 19 nt, Artificial Sequence
  Description of Artificial Sequence: Synthetic oligonucleotide
aaucgauccaagaaucuca

SEQ ID NO: 375305 - RNA, 19 nt, Artificial Sequence
  Description of Artificial Sequence: Synthetic oligonucleotide
aaauuccgcuacuaagugu

SEQ ID NO: 375306 - RNA, 19 nt, Artificial Sequence
  Description of Artificial Sequence: Synthetic oligonucleotide
auagugcuguauaauaccg

SEQ ID NO: 375307 - RNA, 19 nt, Artificial Sequence
  Description of Artificial Sequence: Synthetic oligonucleotide
uuccuaaagaaacuucguc

SEQ ID NO: 375308 - RNA, 19 nt, Artificial Sequence
  Description of Artificial Sequence: Synthetic oligonucleotide
aaacgacccagcaaaauca

SEQ ID NO: 375309 - RNA, 19 nt, Artificial Sequence
  Description of Artificial Sequence: Synthetic oligonucleotide
aauauuaucuucacucuuu

SEQ ID NO: 375310 - RNA, 19 nt, Artificial Sequence
  Description of Artificial Sequence: Synthetic oligonucleotide
auuaucaaacuuggauccc

SEQ ID NO: 375311 - RNA, 19 nt, Artificial Sequence
  Description of Artificial Sequence: Synthetic oligonucleotide
uuuuagugguuaccaagga

SEQ ID NO: 375312 - RNA, 19 nt, Artificial Sequence
  Description of Artificial Sequence: Synthetic oligonucleotide
uguuagccaacucacuuuc

SEQ ID NO: 375313 - RNA, 19 nt, Artificial Sequence
  Description of Artificial Sequence: Synthetic oligonucleotide
ucgggcuuaucacagagaa

SEQ ID NO: 375314 - RNA, 19 nt, Artificial Sequence
  Description of Artificial Sequence: Synthetic oligonucleotide
ugcucagauaacuuucuga

SEQ ID NO: 375315 - RNA, 19 nt, Artificial Sequence
  Description of Artificial Sequence: Synthetic oligonucleotide
cauauugggaugcuuccgc

SEQ ID NO: 375316 - RNA, 19 nt, Artificial Sequence
  Description of Artificial Sequence: Synthetic oligonucleotide
caccuaucugagaauaagg

SEQ ID NO: 375317 - RNA, 19 nt, Artificial Sequence
  Description of Artificial Sequence: Synthetic oligonucleotide
uucuguauagugcuguaua

SEQ ID NO: 375318 - RNA, 19 nt, Artificial Sequence
  Description of Artificial Sequence: Synthetic oligonucleotide
ugaguagaaucuuaauuua

SEQ ID NO: 375319 - RNA, 19 nt, Artificial Sequence
  Description of Artificial Sequence: Synthetic oligonucleotide
guuaccaaggaaucgugac

SEQ ID NO: 375320 - RNA, 19 nt, Artificial Sequence
  Description of Artificial Sequence: Synthetic oligonucleotide
uguagcuuuggauuucggu

SEQ ID NO: 375321 - RNA, 19 nt, Artificial Sequence
  Description of Artificial Sequence: Synthetic oligonucleotide
uuaccaaggaaucgugacu

SEQ ID NO: 375322 - RNA, 19 nt, Artificial Sequence
  Description of Artificial Sequence: Synthetic oligonucleotide
cggaugaucaucuaguugg

SEQ ID NO: 375323 - RNA, 19 nt, Artificial Sequence
  Description of Artificial Sequence: Synthetic oligonucleotide
ugucaaagugcacccagga

SEQ ID NO: 375324 - RNA, 19 nt, Artificial Sequence
  Description of Artificial Sequence: Synthetic oligonucleotide
uccgcaguaacacuucuaa

SEQ ID NO: 375325 - RNA, 19 nt, Artificial Sequence
  Description of Artificial Sequence: Synthetic oligonucleotide
aauaaaguguccaccugcu

SEQ ID NO: 375326 - RNA, 19 nt, Artificial Sequence
  Description of Artificial Sequence: Synthetic oligonucleotide
ccaagauuaucaaacuugg

SEQ ID NO: 375327 - RNA, 19 nt, Artificial Sequence
  Description of Artificial Sequence: Synthetic oligonucleotide
ucaccuaucugagaauaag

SEQ ID NO: 375328 - RNA, 19 nt, Artificial Sequence
  Description of Artificial Sequence: Synthetic oligonucleotide
uuucgguauacaaaucgau

SEQ ID NO: 375329 - RNA, 19 nt, Artificial Sequence
  Description of Artificial Sequence: Synthetic oligonucleotide
aaacuuggaucccauguuu

SEQ ID NO: 375330 - RNA, 19 nt, Artificial Sequence
  Description of Artificial Sequence: Synthetic oligonucleotide
gauacaacgcuccacagau

SEQ ID NO: 375331 - RNA, 19 nt, Artificial Sequence
  Description of Artificial Sequence: Synthetic oligonucleotide
guuaagaaacaucgcuugc

SEQ ID NO: 375332 - RNA, 19 nt, Artificial Sequence
  Description of Artificial Sequence: Synthetic oligonucleotide
aauuccgcuacuaaguguu

SEQ ID NO: 375333 - RNA, 19 nt, Artificial Sequence
  Description of Artificial Sequence: Synthetic oligonucleotide
uccguuuucagagacuugu

SEQ ID NO: 375334 - RNA, 19 nt, Artificial Sequence
  Description of Artificial Sequence: Synthetic oligonucleotide
uucacagcaaggcuacgga

SEQ ID NO: 375335 - RNA, 19 nt, Artificial Sequence
  Description of Artificial Sequence: Synthetic oligonucleotide
acaaauuccgcuacuaagu

SEQ ID NO: 375336 - RNA, 19 nt, Artificial Sequence
  Description of Artificial Sequence: Synthetic oligonucleotide
uaccgaucagauauugucu

SEQ ID NO: 375337 - RNA, 19 nt, Artificial Sequence
  Description of Artificial Sequence: Synthetic oligonucleotide
agugcuguauaauaccgau

SEQ ID NO: 375338 - RNA, 19 nt, Artificial Sequence
  Description of Artificial Sequence: Synthetic oligonucleotide
uuaauuuguuagccaacuc

SEQ ID NO: 375339 - RNA, 19 nt, Artificial Sequence
  Description of Artificial Sequence: Synthetic oligonucleotide
accgaucagauauugucug

SEQ ID NO: 375340 - RNA, 19 nt, Artificial Sequence
  Description of Artificial Sequence: Synthetic oligonucleotide
uuucguggcgauuuuguuc

SEQ ID NO: 375341 - RNA, 19 nt, Artificial Sequence
  Description of Artificial Sequence: Synthetic oligonucleotide
ucauauugggaugcuuccg

SEQ ID NO: 375342 - RNA, 19 nt, Artificial Sequence
  Description of Artificial Sequence: Synthetic oligonucleotide
uucguugcguuucuguuuc

SEQ ID NO: 375343 - RNA, 19 nt, Artificial Sequence
  Description of Artificial Sequence: Synthetic oligonucleotide
aaggcuacggacauccucu

SEQ ID NO: 375344 - RNA, 19 nt, Artificial Sequence
  Description of Artificial Sequence: Synthetic oligonucleotide
caagguuaagaaacaucgc

SEQ ID NO: 375345 - RNA, 19 nt, Artificial Sequence
  Description of Artificial Sequence: Synthetic oligonucleotide
gauuuccgacacaagauac

SEQ ID NO: 375346 - RNA, 19 nt, Artificial Sequence
  Description of Artificial Sequence: Synthetic oligonucleotide
agugguuaccaaggaaucg

SEQ ID NO: 375347 - RNA, 19 nt, Artificial Sequence
  Description of Artificial Sequence: Synthetic oligonucleotide
cuucuaacaggugggaagc

SEQ ID NO: 375348 - RNA, 19 nt, Artificial Sequence
  Description of Artificial Sequence: Synthetic oligonucleotide
ugguuuugcuuuaaggauu

SEQ ID NO: 375349 - RNA, 19 nt, Artificial Sequence
  Description of Artificial Sequence: Synthetic oligonucleotide
cauucauacuuccuaaaga

SEQ ID NO: 375350 - RNA, 19 nt, Artificial Sequence
  Description of Artificial Sequence: Synthetic oligonucleotide
auucacagcaaggcuacgg

SEQ ID NO: 375351 - RNA, 19 nt, Artificial Sequence
  Description of Artificial Sequence: Synthetic oligonucleotide
cucagauaacuuucugagc

SEQ ID NO: 375352 - RNA, 19 nt, Artificial Sequence
  Description of Artificial Sequence: Synthetic oligonucleotide
uguccguauuuucuuugcc

SEQ ID NO: 375353 - RNA, 19 nt, Artificial Sequence
  Description of Artificial Sequence: Synthetic oligonucleotide
uaauaccgaucagauauug

SEQ ID NO: 375354 - RNA, 19 nt, Artificial Sequence
  Description of Artificial Sequence: Synthetic oligonucleotide
aacccuggauccaacaucu

SEQ ID NO: 375355 - RNA, 19 nt, Artificial Sequence
  Description of Artificial Sequence: Synthetic oligonucleotide
gagaauaaggauaugcccu

SEQ ID NO: 375356 - RNA, 19 nt, Artificial Sequence
  Description of Artificial Sequence: Synthetic oligonucleotide
guauagugcuguauaauac

SEQ ID NO: 375357 - RNA, 19 nt, Artificial Sequence
  Description of Artificial Sequence: Synthetic oligonucleotide
ugguguucguaauaccaca

SEQ ID NO: 375358 - RNA, 19 nt, Artificial Sequence
  Description of Artificial Sequence: Synthetic oligonucleotide
aauaaggauaugcccuguu

SEQ ID NO: 375359 - RNA, 19 nt, Artificial Sequence
  Description of Artificial Sequence: Synthetic oligonucleotide
ucuuaguauuagcuuugga

SEQ ID NO: 375360 - RNA, 19 nt, Artificial Sequence
  Description of Artificial Sequence: Synthetic oligonucleotide
uuuuaacugcuugccaccc

SEQ ID NO: 375361 - RNA, 19 nt, Artificial Sequence
  Description of Artificial Sequence: Synthetic oligonucleotide
guagcauuaaagccugcac

SEQ ID NO: 375362 - RNA, 19 nt, Artificial Sequence
  Description of Artificial Sequence: Synthetic oligonucleotide
ugaauggcggcaucugugu

SEQ ID NO: 375363 - RNA, 19 nt, Artificial Sequence
  Description of Artificial Sequence: Synthetic oligonucleotide
aacacgacguccguuuuca

SEQ ID NO: 375364 - RNA, 19 nt, Artificial Sequence
  Description of Artificial Sequence: Synthetic oligonucleotide
aaaauuccccucaaggaua

SEQ ID NO: 375365 - RNA, 19 nt, Artificial Sequence
  Description of Artificial Sequence: Synthetic oligonucleotide
aaugcucagauaacuuucu

SEQ ID NO: 375366 - RNA, 19 nt, Artificial Sequence
  Description of Artificial Sequence: Synthetic oligonucleotide
aguaaccucuucacaaagg

SEQ ID NO: 375367 - RNA, 19 nt, Artificial Sequence
  Description of Artificial Sequence: Synthetic oligonucleotide
uucuuaguauuagcuuugg

SEQ ID NO: 375368 - RNA, 19 nt, Artificial Sequence
  Description of Artificial Sequence: Synthetic oligonucleotide
agauacaacgcuccacaga

SEQ ID NO: 375369 - RNA, 19 nt, Artificial Sequence
  Description of Artificial Sequence: Synthetic oligonucleotide
caccugcauaagaagagcc

SEQ ID NO: 375370 - RNA, 19 nt, Artificial Sequence
  Description of Artificial Sequence: Synthetic oligonucleotide
cacuaguauuaaaauuuac

SEQ ID NO: 375371 - RNA, 19 nt, Artificial Sequence
  Description of Artificial Sequence: Synthetic oligonucleotide
gugaguagaaucuuaauuu

SEQ ID NO: 375372 - RNA, 19 nt, Artificial Sequence
  Description of Artificial Sequence: Synthetic oligonucleotide
ggaauguauggaauuagag

SEQ ID NO: 375373 - RNA, 19 nt, Artificial Sequence
  Description of Artificial Sequence: Synthetic oligonucleotide
aaauuaagggugaguagaa

SEQ ID NO: 375374 - RNA, 19 nt, Artificial Sequence
  Description of Artificial Sequence: Synthetic oligonucleotide
aggcuggaguuaucaaagc

SEQ ID NO: 375375 - RNA, 19 nt, Artificial Sequence
  Description of Artificial Sequence: Synthetic oligonucleotide
acaucgcuugcuucgaaca

SEQ ID NO: 375376 - RNA, 19 nt, Artificial Sequence
  Description of Artificial Sequence: Synthetic oligonucleotide
uuagccaacucacuuucuu

SEQ ID NO: 375377 - RNA, 19 nt, Artificial Sequence
  Description of Artificial Sequence: Synthetic oligonucleotide
uuuccgacacaagauacaa

SEQ ID NO: 375378 - RNA, 19 nt, Artificial Sequence
  Description of Artificial Sequence: Synthetic oligonucleotide
uccgcuacuaaguguuuca

SEQ ID NO: 375379 - RNA, 19 nt, Artificial Sequence
  Description of Artificial Sequence: Synthetic oligonucleotide
uccuugaaacgacccagca

SEQ ID NO: 375380 - RNA, 19 nt, Artificial Sequence
  Description of Artificial Sequence: Synthetic oligonucleotide
cuuauaauaccuguagaaa

SEQ ID NO: 375381 - RNA, 19 nt, Artificial Sequence
  Description of Artificial Sequence: Synthetic oligonucleotide
aagccugcacacuaguauu

SEQ ID NO: 375382 - RNA, 19 nt, Artificial Sequence
  Description of Artificial Sequence: Synthetic oligonucleotide
gagaauucaugacuuggaa

SEQ ID NO: 375383 - RNA, 19 nt, Artificial Sequence
  Description of Artificial Sequence: Synthetic oligonucleotide
auugggaugcuuccgcagu

SEQ ID NO: 375384 - RNA, 19 nt, Artificial Sequence
  Description of Artificial Sequence: Synthetic oligonucleotide
aacaugcaacacuuugaau

SEQ ID NO: 375385 - RNA, 19 nt, Artificial Sequence
  Description of Artificial Sequence: Synthetic oligonucleotide
gcaguuaucaucuucaaau

SEQ ID NO: 375386 - RNA, 19 nt, Artificial Sequence
  Description of Artificial Sequence: Synthetic oligonucleotide
cuaaguguuucaguuggug

SEQ ID NO: 375387 - RNA, 19 nt, Artificial Sequence
  Description of Artificial Sequence: Synthetic oligonucleotide
uauugucuguugagaauuc

SEQ ID NO: 375388 - RNA, 19 nt, Artificial Sequence
  Description of Artificial Sequence: Synthetic oligonucleotide
gccaagauuaucaaacuug

SEQ ID NO: 375389 - RNA, 19 nt, Artificial Sequence
  Description of Artificial Sequence: Synthetic oligonucleotide
ugcaaguaaccugaaguaa

SEQ ID NO: 375390 - RNA, 19 nt, Artificial Sequence
  Description of Artificial Sequence: Synthetic oligonucleotide
uccguauuuucuuugccuu

SEQ ID NO: 375391 - RNA, 19 nt, Artificial Sequence
  Description of Artificial Sequence: Synthetic oligonucleotide
uucgucugacacauccaug

SEQ ID NO: 375392 - RNA, 19 nt, Artificial Sequence
  Description of Artificial Sequence: Synthetic oligonucleotide
accuaucugagaauaagga

SEQ ID NO: 375393 - RNA, 19 nt, Artificial Sequence
  Description of Artificial Sequence: Synthetic oligonucleotide
aauaccgaucagauauugu

SEQ ID NO: 375394 - RNA, 19 nt, Artificial Sequence
  Description of Artificial Sequence: Synthetic oligonucleotide
gucgucaccuaucugagaa

SEQ ID NO: 375395 - RNA, 19 nt, Artificial Sequence
  Description of Artificial Sequence: Synthetic oligonucleotide
cuguauaauaccgaucaga

SEQ ID NO: 375396 - RNA, 19 nt, Artificial Sequence
  Description of Artificial Sequence: Synthetic oligonucleotide
ugaugauacuuuucacauc

SEQ ID NO: 375397 - RNA, 19 nt, Artificial Sequence
  Description of Artificial Sequence: Synthetic oligonucleotide
aauuaagggugaguagaau

SEQ ID NO: 375398 - RNA, 19 nt, Artificial Sequence
  Description of Artificial Sequence: Synthetic oligonucleotide
ggaaucgugacuuaaaguu

SEQ ID NO: 375399 - RNA, 19 nt, Artificial Sequence
  Description of Artificial Sequence: Synthetic oligonucleotide
caauaucauccuucccagg

SEQ ID NO: 375400 - RNA, 19 nt, Artificial Sequence
  Description of Artificial Sequence: Synthetic oligonucleotide
acagaugaauggcggcauc

SEQ ID NO: 375401 - RNA, 19 nt, Artificial Sequence
  Description of Artificial Sequence: Synthetic oligonucleotide
uuggagcgaaagagaagcc

SEQ ID NO: 375402 - RNA, 19 nt, Artificial Sequence
  Description of Artificial Sequence: Synthetic oligonucleotide
guagccaaucaucacgcuc

SEQ ID NO: 375403 - RNA, 19 nt, Artificial Sequence
  Description of Artificial Sequence: Synthetic oligonucleotide
aguauuagcuuuggagcug

SEQ ID NO: 375404 - RNA, 19 nt, Artificial Sequence
  Description of Artificial Sequence: Synthetic oligonucleotide
auauugggaugcuuccgca

SEQ ID NO: 375405 - RNA, 19 nt, Artificial Sequence
  Description of Artificial Sequence: Synthetic oligonucleotide
auuucgguauacaaaucga

SEQ ID NO: 375406 - RNA, 19 nt, Artificial Sequence
  Description of Artificial Sequence: Synthetic oligonucleotide
uuguuagccaacucacuuu

SEQ ID NO: 375407 - RNA, 19 nt, Artificial Sequence
  Description of Artificial Sequence: Synthetic oligonucleotide
uucacccggcgcaacacga

SEQ ID NO: 375408 - RNA, 19 nt, Artificial Sequence
  Description of Artificial Sequence: Synthetic oligonucleotide
ucuucguugcguuucuguu

SEQ ID NO: 375409 - RNA, 19 nt, Artificial Sequence
  Description of Artificial Sequence: Synthetic oligonucleotide
uugcauuaucuuuguuagc

SEQ ID NO: 375410 - RNA, 19 nt, Artificial Sequence
  Description of Artificial Sequence: Synthetic oligonucleotide
gacguccguuuucagagac

SEQ ID NO: 375411 - RNA, 19 nt, Artificial Sequence
  Description of Artificial Sequence: Synthetic oligonucleotide
uggagcgaaagagaagccu

SEQ ID NO: 375412 - RNA, 19 nt, Artificial Sequence
  Description of Artificial Sequence: Synthetic oligonucleotide
acgcuccacagaugaaugg

SEQ ID NO: 375413 - RNA, 19 nt, Artificial Sequence
  Description of Artificial Sequence: Synthetic oligonucleotide
aucugugugcaaguaaccu

SEQ ID NO: 375414 - RNA, 19 nt, Artificial Sequence
  Description of Artificial Sequence: Synthetic oligonucleotide
cuugcuucgaacaugccau

SEQ ID NO: 375415 - RNA, 19 nt, Artificial Sequence
  Description of Artificial Sequence: Synthetic oligonucleotide
accaccugcauaagaagag

SEQ ID NO: 375416 - RNA, 19 nt, Artificial Sequence
  Description of Artificial Sequence: Synthetic oligonucleotide
caacuuucuuauaauaccu

SEQ ID NO: 375417 - RNA, 19 nt, Artificial Sequence
  Description of Artificial Sequence: Synthetic oligonucleotide
gccuuuuccauccucgggc

SEQ ID NO: 375418 - RNA, 19 nt, Artificial Sequence
  Description of Artificial Sequence: Synthetic oligonucleotide
gcaaauugcauaauacuga

SEQ ID NO: 375419 - RNA, 19 nt, Artificial Sequence
  Description of Artificial Sequence: Synthetic oligonucleotide
guagucaccgugucuucug

SEQ ID NO: 375420 - RNA, 19 nt, Artificial Sequence
  Description of Artificial Sequence: Synthetic oligonucleotide
ggaacucuuuacuauucac

SEQ ID NO: 375421 - RNA, 19 nt, Artificial Sequence
  Description of Artificial Sequence: Synthetic oligonucleotide
agcaguuaucaucuucaaa

SEQ ID NO: 375422 - RNA, 19 nt, Artificial Sequence
  Description of Artificial Sequence: Synthetic oligonucleotide
gugggaagcuuucguggcg

SEQ ID NO: 375423 - RNA, 19 nt, Artificial Sequence
  Description of Artificial Sequence: Synthetic oligonucleotide
uuaucacagagaagcucau

SEQ ID NO: 375424 - RNA, 19 nt, Artificial Sequence
  Description of Artificial Sequence: Synthetic oligonucleotide
agcgaaagagaagccuuuc

SEQ ID NO: 375425 - RNA, 19 nt, Artificial Sequence
  Description of Artificial Sequence: Synthetic oligonucleotide
uucuugauacaaguccgaa

SEQ ID NO: 375426 - RNA, 19 nt, Artificial Sequence
  Description of Artificial Sequence: Synthetic oligonucleotide
caguugguguucguaauac

SEQ ID NO: 375427 - RNA, 19 nt, Artificial Sequence
  Description of Artificial Sequence: Synthetic oligonucleotide
acugaauggaucauauguu

SEQ ID NO: 375428 - RNA, 19 nt, Artificial Sequence
  Description of Artificial Sequence: Synthetic oligonucleotide
auggaauuagagagaaaga

SEQ ID NO: 375429 - RNA, 19 nt, Artificial Sequence
  Description of Artificial Sequence: Synthetic oligonucleotide
uugaaacgacccagcaaaa

SEQ ID NO: 375430 - RNA, 19 nt, Artificial Sequence
  Description of Artificial Sequence: Synthetic oligonucleotide
caacaugcaacacuuugaa

SEQ ID NO: 375431 - RNA, 19 nt, Artificial Sequence
  Description of Artificial Sequence: Synthetic oligonucleotide
ucggguuuuagugguuacc

SEQ ID NO: 375432 - RNA, 19 nt, Artificial Sequence
  Description of Artificial Sequence: Synthetic oligonucleotide
aaguccgaaagaagcaaaa

SEQ ID NO: 375433 - RNA, 19 nt, Artificial Sequence
  Description of Artificial Sequence: Synthetic oligonucleotide
agcuuuggagcugacuuca

SEQ ID NO: 375434 - RNA, 19 nt, Artificial Sequence
  Description of Artificial Sequence: Synthetic oligonucleotide
uccccugaauacugaauaa

SEQ ID NO: 375435 - RNA, 19 nt, Artificial Sequence
  Description of Artificial Sequence: Synthetic oligonucleotide
cacaguaugagucuucuau

SEQ ID NO: 375436 - RNA, 19 nt, Artificial Sequence
  Description of Artificial Sequence: Synthetic oligonucleotide
aucacaacgcuguccguau

SEQ ID NO: 375437 - RNA, 19 nt, Artificial Sequence
  Description of Artificial Sequence: Synthetic oligonucleotide
caaggcuacggacauccuc

SEQ ID NO: 375438 - RNA, 19 nt, Artificial Sequence
  Description of Artificial Sequence: Synthetic oligonucleotide
aggauuuccgacacaagau

SEQ ID NO: 375439 - RNA, 19 nt, Artificial Sequence
  Description of Artificial Sequence: Synthetic oligonucleotide
uuccgacacaagauacaac

SEQ ID NO: 375440 - RNA, 19 nt, Artificial Sequence
  Description of Artificial Sequence: Synthetic oligonucleotide
aucaacccuggauccaaca

SEQ ID NO: 375441 - RNA, 19 nt, Artificial Sequence
  Description of Artificial Sequence: Synthetic oligonucleotide
ggauaugcccuguucacuc

SEQ ID NO: 375442 - RNA, 19 nt, Artificial Sequence
  Description of Artificial Sequence: Synthetic oligonucleotide
uguagucaccgugucuucu

SEQ ID NO: 375443 - RNA, 19 nt, Artificial Sequence
  Description of Artificial Sequence: Synthetic oligonucleotide
gugcaaguaaccugaagua

SEQ ID NO: 375444 - RNA, 19 nt, Artificial Sequence
  Description of Artificial Sequence: Synthetic oligonucleotide
ugaaacgacccagcaaaau

SEQ ID NO: 375445 - RNA, 19 nt, Artificial Sequence
  Description of Artificial Sequence: Synthetic oligonucleotide
uuuuccauccucgggcuua

SEQ ID NO: 375446 - RNA, 19 nt, Artificial Sequence
  Description of Artificial Sequence: Synthetic oligonucleotide
acaaguccgaaagaagcaa

SEQ ID NO: 375447 - RNA, 19 nt, Artificial Sequence
  Description of Artificial Sequence: Synthetic oligonucleotide
gcaaguaaccugaaguaac

SEQ ID NO: 375448 - RNA, 19 nt, Artificial Sequence
  Description of Artificial Sequence: Synthetic oligonucleotide
cacuacucccugaaucuuc

SEQ ID NO: 375449 - RNA, 19 nt, Artificial Sequence
  Description of Artificial Sequence: Synthetic oligonucleotide
auuuccgacacaagauaca

SEQ ID NO: 375450 - RNA, 19 nt, Artificial Sequence
  Description of Artificial Sequence: Synthetic oligonucleotide
agguuaagaaacaucgcuu

SEQ ID NO: 375451 - RNA, 19 nt, Artificial Sequence
  Description of Artificial Sequence: Synthetic oligonucleotide
aaaauggcacugagcauuu

SEQ ID NO: 375452 - RNA, 19 nt, Artificial Sequence
  Description of Artificial Sequence: Synthetic oligonucleotide
uucuacugaauggaucaua

SEQ ID NO: 375453 - RNA, 19 nt, Artificial Sequence
  Description of Artificial Sequence: Synthetic oligonucleotide
aucgcuugcuucgaacaug

SEQ ID NO: 375454 - RNA, 19 nt, Artificial Sequence
  Description of Artificial Sequence: Synthetic oligonucleotide
auuuguuagccaacucacu

SEQ ID NO: 375455 - RNA, 19 nt, Artificial Sequence
  Description of Artificial Sequence: Synthetic oligonucleotide
cuacggacauccucuauaa

SEQ ID NO: 375456 - RNA, 19 nt, Artificial Sequence
  Description of Artificial Sequence: Synthetic oligonucleotide
gguguucguaauaccacag

SEQ ID NO: 375457 - RNA, 19 nt, Artificial Sequence
  Description of Artificial Sequence: Synthetic oligonucleotide
aaagugcacccaggaagca

SEQ ID NO: 375458 - RNA, 19 nt, Artificial Sequence
  Description of Artificial Sequence: Synthetic oligonucleotide
cugugcuccuugaaacgac

SEQ ID NO: 375459 - RNA, 19 nt, Artificial Sequence
  Description of Artificial Sequence: Synthetic oligonucleotide
guauaauaccgaucagaua

SEQ ID NO: 375460 - RNA, 19 nt, Artificial Sequence
  Description of Artificial Sequence: Synthetic oligonucleotide
ggugaguagaaucuuaauu

SEQ ID NO: 375461 - RNA, 19 nt, Artificial Sequence
  Description of Artificial Sequence: Synthetic oligonucleotide
ucaaggucaccaagcucau

SEQ ID NO: 375462 - RNA, 19 nt, Artificial Sequence
  Description of Artificial Sequence: Synthetic oligonucleotide
ugcuaucuucaucuucguu

SEQ ID NO: 375463 - RNA, 19 nt, Artificial Sequence
  Description of Artificial Sequence: Synthetic oligonucleotide
caguaugagucuucuaucu

SEQ ID NO: 375464 - RNA, 19 nt, Artificial Sequence
  Description of Artificial Sequence: Synthetic oligonucleotide
gcuacuaaguguuucaguu

SEQ ID NO: 375465 - RNA, 19 nt, Artificial Sequence
  Description of Artificial Sequence: Synthetic oligonucleotide
cugguuuugcuuuaaggau

SEQ ID NO: 375466 - RNA, 19 nt, Artificial Sequence
  Description of Artificial Sequence: Synthetic oligonucleotide
aggauaugcccuguucacu

SEQ ID NO: 375467 - RNA, 19 nt, Artificial Sequence
  Description of Artificial Sequence: Synthetic oligonucleotide
gaagcuuucguggcgauuu

SEQ ID NO: 375468 - RNA, 19 nt, Artificial Sequence
  Description of Artificial Sequence: Synthetic oligonucleotide
aacgacccagcaaaaucaa

SEQ ID NO: 375469 - RNA, 19 nt, Artificial Sequence
  Description of Artificial Sequence: Synthetic oligonucleotide
acacuaguauuaaaauuua

SEQ ID NO: 375470 - RNA, 19 nt, Artificial Sequence
  Description of Artificial Sequence: Synthetic oligonucleotide
cauccucgggcuuaucaca

SEQ ID NO: 375471 - RNA, 19 nt, Artificial Sequence
  Description of Artificial Sequence: Synthetic oligonucleotide
aagggugaguagaaucuua

SEQ ID NO: 375472 - RNA, 19 nt, Artificial Sequence
  Description of Artificial Sequence: Synthetic oligonucleotide
ugucgucaccuaucugaga

SEQ ID NO: 375473 - RNA, 19 nt, Artificial Sequence
  Description of Artificial Sequence: Synthetic oligonucleotide
uaagggugaguagaaucuu

SEQ ID NO: 375474 - RNA, 19 nt, Artificial Sequence
  Description of Artificial Sequence: Synthetic oligonucleotide
cucggguuuuagugguuac

SEQ ID NO: 375475 - RNA, 19 nt, Artificial Sequence
  Description of Artificial Sequence: Synthetic oligonucleotide
caaggauagucuuggcaaa

SEQ ID NO: 375476 - RNA, 19 nt, Artificial Sequence
  Description of Artificial Sequence: Synthetic oligonucleotide
caaguccgaaagaagcaaa

SEQ ID NO: 375477 - RNA, 19 nt, Artificial Sequence
  Description of Artificial Sequence: Synthetic oligonucleotide
cacccggcgcaacacgacg

SEQ ID NO: 375478 - RNA, 19 nt, Artificial Sequence
  Description of Artificial Sequence: Synthetic oligonucleotide
uacggacauccucuauaaa

SEQ ID NO: 375479 - RNA, 19 nt, Artificial Sequence
  Description of Artificial Sequence: Synthetic oligonucleotide
uuucuacugaauggaucau

SEQ ID NO: 375480 - RNA, 19 nt, Artificial Sequence
  Description of Artificial Sequence: Synthetic oligonucleotide
gcuguauaauaccgaucag

SEQ ID NO: 375481 - RNA, 19 nt, Artificial Sequence
  Description of Artificial Sequence: Synthetic oligonucleotide
auccucgggcuuaucacag

SEQ ID NO: 375482 - RNA, 19 nt, Artificial Sequence
  Description of Artificial Sequence: Synthetic oligonucleotide
uuccgcaguaacacuucua

SEQ ID NO: 375483 - RNA, 19 nt, Artificial Sequence
  Description of Artificial Sequence: Synthetic oligonucleotide
guugccgcuggaccaacuc

SEQ ID NO: 375484 - RNA, 19 nt, Artificial Sequence
  Description of Artificial Sequence: Synthetic oligonucleotide
gcauaauacugagcuuugg

SEQ ID NO: 375485 - RNA, 19 nt, Artificial Sequence
  Description of Artificial Sequence: Synthetic oligonucleotide
cauuagugugaaauccugu

SEQ ID NO: 375486 - RNA, 19 nt, Artificial Sequence
  Description of Artificial Sequence: Synthetic oligonucleotide
uuccgcuacuaaguguuuc

SEQ ID NO: 375487 - RNA, 19 nt, Artificial Sequence
  Description of Artificial Sequence: Synthetic oligonucleotide
cugaauggaucauauguuu

SEQ ID NO: 375488 - RNA, 19 nt, Artificial Sequence
  Description of Artificial Sequence: Synthetic oligonucleotide
cacgacguccguuuucaga

SEQ ID NO: 375489 - RNA, 19 nt, Artificial Sequence
  Description of Artificial Sequence: Synthetic oligonucleotide
agucuggaauguauggaau

SEQ ID NO: 375490 - RNA, 19 nt, Artificial Sequence
  Description of Artificial Sequence: Synthetic oligonucleotide
agggugaguagaaucuuaa

SEQ ID NO: 375491 - RNA, 19 nt, Artificial Sequence
  Description of Artificial Sequence: Synthetic oligonucleotide
ucacccggcgcaacacgac

SEQ ID NO: 375492 - RNA, 19 nt, Artificial Sequence
  Description of Artificial Sequence: Synthetic oligonucleotide
aucgauccaagaaucucau

SEQ ID NO: 375493 - RNA, 19 nt, Artificial Sequence
  Description of Artificial Sequence: Synthetic oligonucleotide
acacuucuaacagguggga

SEQ ID NO: 375494 - RNA, 19 nt, Artificial Sequence
  Description of Artificial Sequence: Synthetic oligonucleotide
ccgacacaagauacaacgc

SEQ ID NO: 375495 - RNA, 19 nt, Artificial Sequence
  Description of Artificial Sequence: Synthetic oligonucleotide
gugguuaccaaggaaucgu

SEQ ID NO: 375496 - RNA, 19 nt, Artificial Sequence
  Description of Artificial Sequence: Synthetic oligonucleotide
ugccccgacuuccuuuauc

SEQ ID NO: 375497 - RNA, 19 nt, Artificial Sequence
  Description of Artificial Sequence: Synthetic oligonucleotide
uguugccgcuggaccaacu

SEQ ID NO: 375498 - RNA, 19 nt, Artificial Sequence
  Description of Artificial Sequence: Synthetic oligonucleotide
caacacgacguccguuuuc

SEQ ID NO: 375499 - RNA, 19 nt, Artificial Sequence
  Description of Artificial Sequence: Synthetic oligonucleotide
gaaucgugacuuaaaguuu

SEQ ID NO: 375500 - RNA, 19 nt, Artificial Sequence
  Description of Artificial Sequence: Synthetic oligonucleotide
ucgucaccuaucugagaau

SEQ ID NO: 375501 - RNA, 19 nt, Artificial Sequence
  Description of Artificial Sequence: Synthetic oligonucleotide
auaauaccgaucagauauu

SEQ ID NO: 375502 - RNA, 19 nt, Artificial Sequence
  Description of Artificial Sequence: Synthetic oligonucleotide
cucuguuguguagccaauc

SEQ ID NO: 375503 - RNA, 19 nt, Artificial Sequence
  Description of Artificial Sequence: Synthetic oligonucleotide
agcuuucguggcgauuuug

SEQ ID NO: 375504 - RNA, 19 nt, Artificial Sequence
  Description of Artificial Sequence: Synthetic oligonucleotide
ggcggcaucugugugcaag

SEQ ID NO: 375505 - RNA, 19 nt, Artificial Sequence
  Description of Artificial Sequence: Synthetic oligonucleotide
cuguucacuccuguuaaaa

SEQ ID NO: 375506 - RNA, 19 nt, Artificial Sequence
  Description of Artificial Sequence: Synthetic oligonucleotide
aagcuuucguggcgauuuu

SEQ ID NO: 375507 - RNA, 19 nt, Artificial Sequence
  Description of Artificial Sequence: Synthetic oligonucleotide
cuccuguuaaaauggcacu

SEQ ID NO: 375508 - RNA, 19 nt, Artificial Sequence
  Description of Artificial Sequence: Synthetic oligonucleotide
ccauccucgggcuuaucac

SEQ ID NO: 375509 - RNA, 19 nt, Artificial Sequence
  Description of Artificial Sequence: Synthetic oligonucleotide
uccucgggcuuaucacaga

SEQ ID NO: 375510 - RNA, 19 nt, Artificial Sequence
  Description of Artificial Sequence: Synthetic oligonucleotide
acuaaguguuucaguuggu

SEQ ID NO: 375511 - RNA, 19 nt, Artificial Sequence
  Description of Artificial Sequence: Synthetic oligonucleotide
gcuacggacauccucuaua

SEQ ID NO: 375512 - RNA, 19 nt, Artificial Sequence
  Description of Artificial Sequence: Synthetic oligonucleotide
ucgugacuuaaaguuucua

SEQ ID NO: 375513 - RNA, 19 nt, Artificial Sequence
  Description of Artificial Sequence: Synthetic oligonucleotide
ucacuacucccugaaucuu

SEQ ID NO: 375514 - RNA, 19 nt, Artificial Sequence
  Description of Artificial Sequence: Synthetic oligonucleotide
acacaacuccuuucauauu

SEQ ID NO: 375515 - RNA, 19 nt, Artificial Sequence
  Description of Artificial Sequence: Synthetic oligonucleotide
ccaacucacuuucuucaug

SEQ ID NO: 375516 - RNA, 19 nt, Artificial Sequence
  Description of Artificial Sequence: Synthetic oligonucleotide
agcggguccccugaauacu

SEQ ID NO: 375517 - RNA, 19 nt, Artificial Sequence
  Description of Artificial Sequence: Synthetic oligonucleotide
acacgacguccguuuucag

SEQ ID NO: 375518 - RNA, 19 nt, Artificial Sequence
  Description of Artificial Sequence: Synthetic oligonucleotide
guguucguaauaccacagu

SEQ ID NO: 375519 - RNA, 19 nt, Artificial Sequence
  Description of Artificial Sequence: Synthetic oligonucleotide
ucgauccaagaaucucauu

SEQ ID NO: 375520 - RNA, 19 nt, Artificial Sequence
  Description of Artificial Sequence: Synthetic oligonucleotide
gucuggaauguauggaauu

SEQ ID NO: 375521 - RNA, 19 nt, Artificial Sequence
  Description of Artificial Sequence: Synthetic oligonucleotide
ggaccugcacaaauuccgc

SEQ ID NO: 375522 - RNA, 19 nt, Artificial Sequence
  Description of Artificial Sequence: Synthetic oligonucleotide
gaauaaggauaugcccugu

SEQ ID NO: 375523 - RNA, 19 nt, Artificial Sequence
  Description of Artificial Sequence: Synthetic oligonucleotide
gguuaccaaggaaucguga

SEQ ID NO: 375524 - RNA, 19 nt, Artificial Sequence
  Description of Artificial Sequence: Synthetic oligonucleotide
auacaacgcuccacagaug

SEQ ID NO: 375525 - RNA, 19 nt, Artificial Sequence
  Description of Artificial Sequence: Synthetic oligonucleotide
gaucaucuaguuggcuucu

SEQ ID NO: 375526 - RNA, 19 nt, Artificial Sequence
  Description of Artificial Sequence: Synthetic oligonucleotide
gcacacuaguauuaaaauu

SEQ ID NO: 375527 - RNA, 19 nt, Artificial Sequence
  Description of Artificial Sequence: Synthetic oligonucleotide
cauggcguucaugccaaga

SEQ ID NO: 375528 - RNA, 19 nt, Artificial Sequence
  Description of Artificial Sequence: Synthetic oligonucleotide
ccaccugcauaagaagagc

SEQ ID NO: 375529 - RNA, 19 nt, Artificial Sequence
  Description of Artificial Sequence: Synthetic oligonucleotide
ccuuguugccgcuggacca

SEQ ID NO: 375530 - RNA, 19 nt, Artificial Sequence
  Description of Artificial Sequence: Synthetic oligonucleotide
gcuucgaacaugccaucaa

SEQ ID NO: 375531 - RNA, 19 nt, Artificial Sequence
  Description of Artificial Sequence: Synthetic oligonucleotide
ggagcugacuucaucaaau

SEQ ID NO: 375532 - RNA, 19 nt, Artificial Sequence
  Description of Artificial Sequence: Synthetic oligonucleotide
gucaccuaucugagaauaa

SEQ ID NO: 375533 - RNA, 19 nt, Artificial Sequence
  Description of Artificial Sequence: Synthetic oligonucleotide
cuucguugcguuucuguuu

SEQ ID NO: 375534 - RNA, 19 nt, Artificial Sequence
  Description of Artificial Sequence: Synthetic oligonucleotide
ggguuuuagugguuaccaa

SEQ ID NO: 375535 - RNA, 19 nt, Artificial Sequence
  Description of Artificial Sequence: Synthetic oligonucleotide
cuuguugccgcuggaccaa

SEQ ID NO: 375536 - RNA, 19 nt, Artificial Sequence
  Description of Artificial Sequence: Synthetic oligonucleotide
guccguuuucagagacuug

SEQ ID NO: 375537 - RNA, 19 nt, Artificial Sequence
  Description of Artificial Sequence: Synthetic oligonucleotide
cuguuguguagccaaucau

SEQ ID NO: 375538 - RNA, 19 nt, Artificial Sequence
  Description of Artificial Sequence: Synthetic oligonucleotide
gugaaauccuguagcgggu

SEQ ID NO: 375539 - RNA, 19 nt, Artificial Sequence
  Description of Artificial Sequence: Synthetic oligonucleotide
ccgcaguaacacuucuaac

SEQ ID NO: 375540 - RNA, 19 nt, Artificial Sequence
  Description of Artificial Sequence: Synthetic oligonucleotide
cuacucccugaaucuucca

SEQ ID NO: 375541 - RNA, 19 nt, Artificial Sequence
  Description of Artificial Sequence: Synthetic oligonucleotide
gccccgacuuccuuuaucu

SEQ ID NO: 375542 - RNA, 19 nt, Artificial Sequence
  Description of Artificial Sequence: Synthetic oligonucleotide
ccuugaaacgacccagcaa

SEQ ID NO: 375543 - RNA, 19 nt, Artificial Sequence
  Description of Artificial Sequence: Synthetic oligonucleotide
aggcuacggacauccucua

SEQ ID NO: 375544 - RNA, 19 nt, Artificial Sequence
  Description of Artificial Sequence: Synthetic oligonucleotide
cgguauacaaaucgaucca

SEQ ID NO: 375545 - RNA, 19 nt, Artificial Sequence
  Description of Artificial Sequence: Synthetic oligonucleotide
cuuucguggcgauuuuguu

SEQ ID NO: 375546 - RNA, 19 nt, Artificial Sequence
  Description of Artificial Sequence: Synthetic oligonucleotide
cggcgcaacacgacguccg

SEQ ID NO: 375547 - RNA, 19 nt, Artificial Sequence
  Description of Artificial Sequence: Synthetic oligonucleotide
acguccguuuucagagacu

SEQ ID NO: 375548 - RNA, 19 nt, Artificial Sequence
  Description of Artificial Sequence: Synthetic oligonucleotide
ccugcucccucacuuuguc

SEQ ID NO: 375549 - RNA, 19 nt, Artificial Sequence
  Description of Artificial Sequence: Synthetic oligonucleotide
ggagcgaaagagaagccuu

SEQ ID NO: 375550 - RNA, 19 nt, Artificial Sequence
  Description of Artificial Sequence: Synthetic oligonucleotide
ccgcuacuaaguguuucag

SEQ ID NO: 375551 - RNA, 19 nt, Artificial Sequence
  Description of Artificial Sequence: Synthetic oligonucleotide
caucgcuugcuucgaacau

SEQ ID NO: 375552 - RNA, 19 nt, Artificial Sequence
  Description of Artificial Sequence: Synthetic oligonucleotide
cacaacgcuguccguauuu

SEQ ID NO: 375553 - RNA, 19 nt, Artificial Sequence
  Description of Artificial Sequence: Synthetic oligonucleotide
gcuuucguggcgauuuugu

SEQ ID NO: 375554 - RNA, 19 nt, Artificial Sequence
  Description of Artificial Sequence: Synthetic oligonucleotide
cgacacaagauacaacgcu

SEQ ID NO: 375555 - RNA, 19 nt, Artificial Sequence
  Description of Artificial Sequence: Synthetic oligonucleotide
cuuucauauugggaugcuu

SEQ ID NO: 375556 - RNA, 19 nt, Artificial Sequence
  Description of Artificial Sequence: Synthetic oligonucleotide
gcggguccccugaauacug

SEQ ID NO: 375557 - RNA, 19 nt, Artificial Sequence
  Description of Artificial Sequence: Synthetic oligonucleotide
cggguuuuagugguuacca

SEQ ID NO: 375558 - RNA, 19 nt, Artificial Sequence
  Description of Artificial Sequence: Synthetic oligonucleotide
auuccgcuacuaaguguuu

SEQ ID NO: 375559 - RNA, 19 nt, Artificial Sequence
  Description of Artificial Sequence: Synthetic oligonucleotide
cgggcuuaucacagagaag

SEQ ID NO: 375560 - RNA, 19 nt, Artificial Sequence
  Description of Artificial Sequence: Synthetic oligonucleotide
ccacuugagcuguuugaaa

SEQ ID NO: 375561 - RNA, 19 nt, Artificial Sequence
  Description of Artificial Sequence: Synthetic oligonucleotide
caugggagaggaccauuuu

SEQ ID NO: 375562 - RNA, 19 nt, Artificial Sequence
  Description of Artificial Sequence: Synthetic oligonucleotide
ccugcacacuaguauuaaa

SEQ ID NO: 375563 - RNA, 19 nt, Artificial Sequence
  Description of Artificial Sequence: Synthetic oligonucleotide
ccuucacccggcgcaacac

SEQ ID NO: 375564 - RNA, 19 nt, Artificial Sequence
  Description of Artificial Sequence: Synthetic oligonucleotide
gcauuaaagccugcacacu

SEQ ID NO: 375565 - RNA, 19 nt, Artificial Sequence
  Description of Artificial Sequence: Synthetic oligonucleotide
ccucacuuugucgucaccu

SEQ ID NO: 375566 - RNA, 19 nt, Artificial Sequence
  Description of Artificial Sequence: Synthetic oligonucleotide
cccucacuuugucgucacc

SEQ ID NO: 375567 - RNA, 19 nt, Artificial Sequence
  Description of Artificial Sequence: Synthetic oligonucleotide
gcggcaucugugugcaagu

SEQ ID NO: 375568 - RNA, 19 nt, Artificial Sequence
  Description of Artificial Sequence: Synthetic oligonucleotide
ccggcgcaacacgacgucc

SEQ ID NO: 375569 - RNA, 19 nt, Artificial Sequence
  Description of Artificial Sequence: Synthetic oligonucleotide
cuucaugggagaggaccau

SEQ ID NO: 375570 - RNA, 19 nt, Artificial Sequence
  Description of Artificial Sequence: Synthetic oligonucleotide
ccuguucacuccuguuaaa

SEQ ID NO: 375571 - RNA, 19 nt, Artificial Sequence
  Description of Artificial Sequence: Synthetic oligonucleotide
ccugcauaagaagagccuu

SEQ ID NO: 375572 - RNA, 19 nt, Artificial Sequence
  Description of Artificial Sequence: Synthetic oligonucleotide
ccguuuucagagacuugua

SEQ ID NO: 375573 - RNA, 19 nt, Artificial Sequence
  Description of Artificial Sequence: Synthetic oligonucleotide
ccgaucagauauugucugu

SEQ ID NO: 375574 - RNA, 19 nt, Artificial Sequence
  Description of Artificial Sequence: Synthetic oligonucleotide
cccggcgcaacacgacguc

SEQ ID NO: 375575 - RNA, 19 nt, Artificial Sequence
  Description of Artificial Sequence: Synthetic oligonucleotide
uggcggcaucugugugcaa

SEQ ID NO: 375576 - RNA, 19 nt, Artificial Sequence
  Description of Artificial Sequence: Synthetic oligonucleotide
ggcgcaacacgacguccgu

SEQ ID NO: 375577 - RNA, 19 nt, Artificial Sequence
  Description of Artificial Sequence: Synthetic oligonucleotide
cgcuugcuucgaacaugcc

SEQ ID NO: 375578 - RNA, 19 nt, Artificial Sequence
  Description of Artificial Sequence: Synthetic oligonucleotide
ugccacccuucagguuguc

SEQ ID NO: 375579 - RNA, 19 nt, Artificial Sequence
  Description of Artificial Sequence: Synthetic oligonucleotide
cccuggauccaacaucuuu

SEQ ID NO: 375580 - RNA, 19 nt, Artificial Sequence
  Description of Artificial Sequence: Synthetic oligonucleotide
cgcuacuaaguguuucagu

SEQ ID NO: 375581 - RNA, 19 nt, Artificial Sequence
  Description of Artificial Sequence: Synthetic oligonucleotide
ggcuacggacauccucuau

SEQ ID NO: 375582 - RNA, 19 nt, Artificial Sequence
  Description of Artificial Sequence: Synthetic oligonucleotide
cgcaacacgacguccguuu

SEQ ID NO: 375583 - RNA, 19 nt, Artificial Sequence
  Description of Artificial Sequence: Synthetic oligonucleotide
gcaucacaacgcuguccgu

SEQ ID NO: 375584 - RNA, 19 nt, Artificial Sequence
  Description of Artificial Sequence: Synthetic oligonucleotide
cgucugacacauccaugaa

SEQ ID NO: 375585 - RNA, 19 nt, Artificial Sequence
  Description of Artificial Sequence: Synthetic oligonucleotide
gggaagcuuucguggcgau

SEQ ID NO: 375586 - RNA, 19 nt, Artificial Sequence
  Description of Artificial Sequence: Synthetic oligonucleotide
ccuuucauauugggaugcu

SEQ ID NO: 375587 - RNA, 19 nt, Artificial Sequence
  Description of Artificial Sequence: Synthetic oligonucleotide
cgacguccguuuucagaga

SEQ ID NO: 375588 - RNA, 19 nt, Artificial Sequence
  Description of Artificial Sequence: Synthetic oligonucleotide
cgugucuucugccccgacu

SEQ ID NO: 375589 - RNA, 19 nt, Artificial Sequence
  Description of Artificial Sequence: Synthetic oligonucleotide
ggaagcuuucguggcgauu

SEQ ID NO: 375590 - RNA, 19 nt, Artificial Sequence
  Description of Artificial Sequence: Synthetic oligonucleotide
ccgugucuucugccccgac

SEQ ID NO: 375591 - RNA, 19 nt, Artificial Sequence
  Description of Artificial Sequence: Synthetic oligonucleotide
cugccccgacuuccuuuau

SEQ ID NO: 375592 - RNA, 19 nt, Artificial Sequence
  Description of Artificial Sequence: Synthetic oligonucleotide
gcgcaacacgacguccguu

SEQ ID NO: 375593 - RNA, 19 nt, Artificial Sequence
  Description of Artificial Sequence: Synthetic oligonucleotide
auuacuagguuuuauaucc

SEQ ID NO: 375594 - RNA, 19 nt, Artificial Sequence
  Description of Artificial Sequence: Synthetic oligonucleotide
uacaguauuaccaagauca

SEQ ID NO: 375595 - RNA, 19 nt, Artificial Sequence
  Description of Artificial Sequence: Synthetic oligonucleotide
aaacaaaugagccuuuccc

SEQ ID NO: 375596 - RNA, 19 nt, Artificial Sequence
  Description of Artificial Sequence: Synthetic oligonucleotide
aacaaugauuguuuaaugc

SEQ ID NO: 375597 - RNA, 19 nt, Artificial Sequence
  Description of Artificial Sequence: Synthetic oligonucleotide
uuauacuacauuaauacag

SEQ ID NO: 375598 - RNA, 19 nt, Artificial Sequence
  Description of Artificial Sequence: Synthetic oligonucleotide
gaaauagcgaaccacaugg

SEQ ID NO: 375599 - RNA, 19 nt, Artificial Sequence
  Description of Artificial Sequence: Synthetic oligonucleotide
uccuacaugaaacagacgg

SEQ ID NO: 375600 - RNA, 19 nt, Artificial Sequence
  Description of Artificial Sequence: Synthetic oligonucleotide
aaccuuguuagucaaaugg

SEQ ID NO: 375601 - RNA, 19 nt, Artificial Sequence
  Description of Artificial Sequence: Synthetic oligonucleotide
aaacauaagacugacacag

SEQ ID NO: 375602 - RNA, 19 nt, Artificial Sequence
  Description of Artificial Sequence: Synthetic oligonucleotide
ucaacuguaauucacauaa

SEQ ID NO: 375603 - RNA, 19 nt, Artificial Sequence
  Description of Artificial Sequence: Synthetic oligonucleotide
auagacuaaccauacaacc

SEQ ID NO: 375604 - RNA, 19 nt, Artificial Sequence
  Description of Artificial Sequence: Synthetic oligonucleotide
aacaagauaccuuucauca

SEQ ID NO: 375605 - RNA, 19 nt, Artificial Sequence
  Description of Artificial Sequence: Synthetic oligonucleotide
aaaccaguaauaauuauac

SEQ ID NO: 375606 - RNA, 19 nt, Artificial Sequence
  Description of Artificial Sequence: Synthetic oligonucleotide
auaugaaccaaacacauug

SEQ ID NO: 375607 - RNA, 19 nt, Artificial Sequence
  Description of Artificial Sequence: Synthetic oligonucleotide
auauucauucuguauaagc

SEQ ID NO: 375608 - RNA, 19 nt, Artificial Sequence
  Description of Artificial Sequence: Synthetic oligonucleotide
aggaaacuaaaauagcagc

SEQ ID NO: 375609 - RNA, 19 nt, Artificial Sequence
  Description of Artificial Sequence: Synthetic oligonucleotide
uuguaauucuuuuagcagg

SEQ ID NO: 375610 - RNA, 19 nt, Artificial Sequence
  Description of Artificial Sequence: Synthetic oligonucleotide
uaugaaaauauuacuaggu

SEQ ID NO: 375611 - RNA, 19 nt, Artificial Sequence
  Description of Artificial Sequence: Synthetic oligonucleotide
cuagaaaucgacuaucacc

SEQ ID NO: 375612 - RNA, 19 nt, Artificial Sequence
  Description of Artificial Sequence: Synthetic oligonucleotide
uagaaaucgacuaucaccu

SEQ ID NO: 375613 - RNA, 19 nt, Artificial Sequence
  Description of Artificial Sequence: Synthetic oligonucleotide
aauccgagguaaucgaccc

SEQ ID NO: 375614 - RNA, 19 nt, Artificial Sequence
  Description of Artificial Sequence: Synthetic oligonucleotide
gaaauucaguuucauaccg

SEQ ID NO: 375615 - RNA, 19 nt, Artificial Sequence
  Description of Artificial Sequence: Synthetic oligonucleotide
aaacuacugauaccaaugg

SEQ ID NO: 375616 - RNA, 19 nt, Artificial Sequence
  Description of Artificial Sequence: Synthetic oligonucleotide
ucgacuaucaccuucuuca

SEQ ID NO: 375617 - RNA, 19 nt, Artificial Sequence
  Description of Artificial Sequence: Synthetic oligonucleotide
aacuuuagcugccaucugg

SEQ ID NO: 375618 - RNA, 19 nt, Artificial Sequence
  Description of Artificial Sequence: Synthetic oligonucleotide
ugaaucauuaaauaugcuc

SEQ ID NO: 375619 - RNA, 19 nt, Artificial Sequence
  Description of Artificial Sequence: Synthetic oligonucleotide
aauggcuaaucacagauaa

SEQ ID NO: 375620 - RNA, 19 nt, Artificial Sequence
  Description of Artificial Sequence: Synthetic oligonucleotide
uaguaaggcugacagagcg

SEQ ID NO: 375621 - RNA, 19 nt, Artificial Sequence
  Description of Artificial Sequence: Synthetic oligonucleotide
aauucaguuucauaccgug

SEQ ID NO: 375622 - RNA, 19 nt, Artificial Sequence
  Description of Artificial Sequence: Synthetic oligonucleotide
gauaccuuucaucacacug

SEQ ID NO: 375623 - RNA, 19 nt, Artificial Sequence
  Description of Artificial Sequence: Synthetic oligonucleotide
aagcauucugcucaucaac

SEQ ID NO: 375624 - RNA, 19 nt, Artificial Sequence
  Description of Artificial Sequence: Synthetic oligonucleotide
cauauggucaucuucugcc

SEQ ID NO: 375625 - RNA, 19 nt, Artificial Sequence
  Description of Artificial Sequence: Synthetic oligonucleotide
cauacaaccaaguacagga

SEQ ID NO: 375626 - RNA, 19 nt, Artificial Sequence
  Description of Artificial Sequence: Synthetic oligonucleotide
aaaacuacugauaccaaug

SEQ ID NO: 375627 - RNA, 19 nt, Artificial Sequence
  Description of Artificial Sequence: Synthetic oligonucleotide
uguaaaacuuggaauaguc

SEQ ID NO: 375628 - RNA, 19 nt, Artificial Sequence
  Description of Artificial Sequence: Synthetic oligonucleotide
ugcacuagcuucaaagucc

SEQ ID NO: 375629 - RNA, 19 nt, Artificial Sequence
  Description of Artificial Sequence: Synthetic oligonucleotide
ucuagaugcagacagcaac

SEQ ID NO: 375630 - RNA, 19 nt, Artificial Sequence
  Description of Artificial Sequence: Synthetic oligonucleotide
acuacugauaccaauggac

SEQ ID NO: 375631 - RNA, 19 nt, Artificial Sequence
  Description of Artificial Sequence: Synthetic oligonucleotide
aaggcuuccacagaaugac

SEQ ID NO: 375632 - RNA, 19 nt, Artificial Sequence
  Description of Artificial Sequence: Synthetic oligonucleotide
ugagcaguucaguauauag

SEQ ID NO: 375633 - RNA, 19 nt, Artificial Sequence
  Description of Artificial Sequence: Synthetic oligonucleotide
guuaauaggaaaacaaaug

SEQ ID NO: 375634 - RNA, 19 nt, Artificial Sequence
  Description of Artificial Sequence: Synthetic oligonucleotide
agcuauguacaguauuacc

SEQ ID NO: 375635 - RNA, 19 nt, Artificial Sequence
  Description of Artificial Sequence: Synthetic oligonucleotide
acuacauuaauacagcauu

SEQ ID NO: 375636 - RNA, 19 nt, Artificial Sequence
  Description of Artificial Sequence: Synthetic oligonucleotide
uucagaccaacguuaauag

SEQ ID NO: 375637 - RNA, 19 nt, Artificial Sequence
  Description of Artificial Sequence: Synthetic oligonucleotide
ucaacucauaaucacuggc

SEQ ID NO: 375638 - RNA, 19 nt, Artificial Sequence
  Description of Artificial Sequence: Synthetic oligonucleotide
uuuugaucgcuuaauggca

SEQ ID NO: 375639 - RNA, 19 nt, Artificial Sequence
  Description of Artificial Sequence: Synthetic oligonucleotide
accaguaauaauuauacua

SEQ ID NO: 375640 - RNA, 19 nt, Artificial Sequence
  Description of Artificial Sequence: Synthetic oligonucleotide
aaugauuguuuaaugcuag

SEQ ID NO: 375641 - RNA, 19 nt, Artificial Sequence
  Description of Artificial Sequence: Synthetic oligonucleotide
uagucagaagucauucugg

SEQ ID NO: 375642 - RNA, 19 nt, Artificial Sequence
  Description of Artificial Sequence: Synthetic oligonucleotide
uuucaguuaauuguaauuc

SEQ ID NO: 375643 - RNA, 19 nt, Artificial Sequence
  Description of Artificial Sequence: Synthetic oligonucleotide
uagacuaaccauacaacca

SEQ ID NO: 375644 - RNA, 19 nt, Artificial Sequence
  Description of Artificial Sequence: Synthetic oligonucleotide
ucauauugcuuucaguuaa

SEQ ID NO: 375645 - RNA, 19 nt, Artificial Sequence
  Description of Artificial Sequence: Synthetic oligonucleotide
ugauaagcagcacaccacc

SEQ ID NO: 375646 - RNA, 19 nt, Artificial Sequence
  Description of Artificial Sequence: Synthetic oligonucleotide
aauagcgaaccacauggga

SEQ ID NO: 375647 - RNA, 19 nt, Artificial Sequence
  Description of Artificial Sequence: Synthetic oligonucleotide
uuaagguuaagcacagagu

SEQ ID NO: 375648 - RNA, 19 nt, Artificial Sequence
  Description of Artificial Sequence: Synthetic oligonucleotide
gagggcaacaucuauuagc

SEQ ID NO: 375649 - RNA, 19 nt, Artificial Sequence
  Description of Artificial Sequence: Synthetic oligonucleotide
ucauuugcuagaaaucgac

SEQ ID NO: 375650 - RNA, 19 nt, Artificial Sequence
  Description of Artificial Sequence: Synthetic oligonucleotide
uggcauuucaaacagcuau

SEQ ID NO: 375651 - RNA, 19 nt, Artificial Sequence
  Description of Artificial Sequence: Synthetic oligonucleotide
uguaauucuuuuagcaggu

SEQ ID NO: 375652 - RNA, 19 nt, Artificial Sequence
  Description of Artificial Sequence: Synthetic oligonucleotide
uuaaugcuaguuuuacagc

SEQ ID NO: 375653 - RNA, 19 nt, Artificial Sequence
  Description of Artificial Sequence: Synthetic oligonucleotide
uggauauccagucaucuuc

SEQ ID NO: 375654 - RNA, 19 nt, Artificial Sequence
  Description of Artificial Sequence: Synthetic oligonucleotide
agaauauaccucucaacug

SEQ ID NO: 375655 - RNA, 19 nt, Artificial Sequence
  Description of Artificial Sequence: Synthetic oligonucleotide
auaccuuucaucacacugc

SEQ ID NO: 375656 - RNA, 19 nt, Artificial Sequence
  Description of Artificial Sequence: Synthetic oligonucleotide
ugagguucgagauaugaaa

SEQ ID NO: 375657 - RNA, 19 nt, Artificial Sequence
  Description of Artificial Sequence: Synthetic oligonucleotide
uucuauucguaacugcucu

SEQ ID NO: 375658 - RNA, 19 nt, Artificial Sequence
  Description of Artificial Sequence: Synthetic oligonucleotide
ugguuaacccugcaaaggc

SEQ ID NO: 375659 - RNA, 19 nt, Artificial Sequence
  Description of Artificial Sequence: Synthetic oligonucleotide
augggaaugcuguccaagc

SEQ ID NO: 375660 - RNA, 19 nt, Artificial Sequence
  Description of Artificial Sequence: Synthetic oligonucleotide
aguccuaaaaggcauuuca

SEQ ID NO: 375661 - RNA, 19 nt, Artificial Sequence
  Description of Artificial Sequence: Synthetic oligonucleotide
uucggaugaaucauuaaau

SEQ ID NO: 375662 - RNA, 19 nt, Artificial Sequence
  Description of Artificial Sequence: Synthetic oligonucleotide
ucgagauaugaaaauauua

SEQ ID NO: 375663 - RNA, 19 nt, Artificial Sequence
  Description of Artificial Sequence: Synthetic oligonucleotide
ucgcuuaauggcauaaaug

SEQ ID NO: 375664 - RNA, 19 nt, Artificial Sequence
  Description of Artificial Sequence: Synthetic oligonucleotide
aacguuaauaggaaaacaa

SEQ ID NO: 375665 - RNA, 19 nt, Artificial Sequence
  Description of Artificial Sequence: Synthetic oligonucleotide
uguauaagcauauggucau

SEQ ID NO: 375666 - RNA, 19 nt, Artificial Sequence
  Description of Artificial Sequence: Synthetic oligonucleotide
uucguaacugcucugcacu

SEQ ID NO: 375667 - RNA, 19 nt, Artificial Sequence
  Description of Artificial Sequence: Synthetic oligonucleotide
uuucaaugcacuagcuuca

SEQ ID NO: 375668 - RNA, 19 nt, Artificial Sequence
  Description of Artificial Sequence: Synthetic oligonucleotide
guucuauuacucugggugg

SEQ ID NO: 375669 - RNA, 19 nt, Artificial Sequence
  Description of Artificial Sequence: Synthetic oligonucleotide
agaucaccuauuuuaaaca

SEQ ID NO: 375670 - RNA, 19 nt, Artificial Sequence
  Description of Artificial Sequence: Synthetic oligonucleotide
ccugacauaaccaagucag

SEQ ID NO: 375671 - RNA, 19 nt, Artificial Sequence
  Description of Artificial Sequence: Synthetic oligonucleotide
agucgagaaguucuauuac

SEQ ID NO: 375672 - RNA, 19 nt, Artificial Sequence
  Description of Artificial Sequence: Synthetic oligonucleotide
uaagcauauggucaucuuc

SEQ ID NO: 375673 - RNA, 19 nt, Artificial Sequence
  Description of Artificial Sequence: Synthetic oligonucleotide
auuacaauauucauucugu

SEQ ID NO: 375674 - RNA, 19 nt, Artificial Sequence
  Description of Artificial Sequence: Synthetic oligonucleotide
uuugcuagaaaucgacuau

SEQ ID NO: 375675 - RNA, 19 nt, Artificial Sequence
  Description of Artificial Sequence: Synthetic oligonucleotide
auugaguguauguaucuca

SEQ ID NO: 375676 - RNA, 19 nt, Artificial Sequence
  Description of Artificial Sequence: Synthetic oligonucleotide
aagucgagaaguucuauua

SEQ ID NO: 375677 - RNA, 19 nt, Artificial Sequence
  Description of Artificial Sequence: Synthetic oligonucleotide
gauaccaauggacaaagua

SEQ ID NO: 375678 - RNA, 19 nt, Artificial Sequence
  Description of Artificial Sequence: Synthetic oligonucleotide
guaauugcaaagcggauuc

SEQ ID NO: 375679 - RNA, 19 nt, Artificial Sequence
  Description of Artificial Sequence: Synthetic oligonucleotide
ugcaaagcggauucuagca

SEQ ID NO: 375680 - RNA, 19 nt, Artificial Sequence
  Description of Artificial Sequence: Synthetic oligonucleotide
gauuucaugccauuggucu

SEQ ID NO: 375681 - RNA, 19 nt, Artificial Sequence
  Description of Artificial Sequence: Synthetic oligonucleotide
auucguaacugcucugcac

SEQ ID NO: 375682 - RNA, 19 nt, Artificial Sequence
  Description of Artificial Sequence: Synthetic oligonucleotide
uggcuaaucacagauaaaa

SEQ ID NO: 375683 - RNA, 19 nt, Artificial Sequence
  Description of Artificial Sequence: Synthetic oligonucleotide
acuuguggacuagagauuc

SEQ ID NO: 375684 - RNA, 19 nt, Artificial Sequence
  Description of Artificial Sequence: Synthetic oligonucleotide
acagacgggaagaugagac

SEQ ID NO: 375685 - RNA, 19 nt, Artificial Sequence
  Description of Artificial Sequence: Synthetic oligonucleotide
augggucguaacaagauac

SEQ ID NO: 375686 - RNA, 19 nt, Artificial Sequence
  Description of Artificial Sequence: Synthetic oligonucleotide
auuugcuagaaaucgacua

SEQ ID NO: 375687 - RNA, 19 nt, Artificial Sequence
  Description of Artificial Sequence: Synthetic oligonucleotide
uaugaaccaaacacauuga

SEQ ID NO: 375688 - RNA, 19 nt, Artificial Sequence
  Description of Artificial Sequence: Synthetic oligonucleotide
gaacauccaacagugacug

SEQ ID NO: 375689 - RNA, 19 nt, Artificial Sequence
  Description of Artificial Sequence: Synthetic oligonucleotide
uuagcucuacuucaguaaa

SEQ ID NO: 375690 - RNA, 19 nt, Artificial Sequence
  Description of Artificial Sequence: Synthetic oligonucleotide
ugcacacgagccuaaagug

SEQ ID NO: 375691 - RNA, 19 nt, Artificial Sequence
  Description of Artificial Sequence: Synthetic oligonucleotide
auaccgugacuucauauug

SEQ ID NO: 375692 - RNA, 19 nt, Artificial Sequence
  Description of Artificial Sequence: Synthetic oligonucleotide
ucaauucuauucguaacug

SEQ ID NO: 375693 - RNA, 19 nt, Artificial Sequence
  Description of Artificial Sequence: Synthetic oligonucleotide
cuugacaggaggaaacaug

SEQ ID NO: 375694 - RNA, 19 nt, Artificial Sequence
  Description of Artificial Sequence: Synthetic oligonucleotide
aagauaccuuucaucacac

SEQ ID NO: 375695 - RNA, 19 nt, Artificial Sequence
  Description of Artificial Sequence: Synthetic oligonucleotide
gaauauaccucucaacugu

SEQ ID NO: 375696 - RNA, 19 nt, Artificial Sequence
  Description of Artificial Sequence: Synthetic oligonucleotide
uacauuaauacagcauuca

SEQ ID NO: 375697 - RNA, 19 nt, Artificial Sequence
  Description of Artificial Sequence: Synthetic oligonucleotide
agaggaaacuaaaauagca

SEQ ID NO: 375698 - RNA, 19 nt, Artificial Sequence
  Description of Artificial Sequence: Synthetic oligonucleotide
accuuguuagucaaauggc

SEQ ID NO: 375699 - RNA, 19 nt, Artificial Sequence
  Description of Artificial Sequence: Synthetic oligonucleotide
aaaguacuuguggaauccg

SEQ ID NO: 375700 - RNA, 19 nt, Artificial Sequence
  Description of Artificial Sequence: Synthetic oligonucleotide
uuucagaccaacguuaaua

SEQ ID NO: 375701 - RNA, 19 nt, Artificial Sequence
  Description of Artificial Sequence: Synthetic oligonucleotide
uuguuagucaaauggcuaa

SEQ ID NO: 375702 - RNA, 19 nt, Artificial Sequence
  Description of Artificial Sequence: Synthetic oligonucleotide
uguuuaaugcuaguuuuac

SEQ ID NO: 375703 - RNA, 19 nt, Artificial Sequence
  Description of Artificial Sequence: Synthetic oligonucleotide
ucgagaaguucuauuacuc

SEQ ID NO: 375704 - RNA, 19 nt, Artificial Sequence
  Description of Artificial Sequence: Synthetic oligonucleotide
aaaccuuguuagucaaaug

SEQ ID NO: 375705 - RNA, 19 nt, Artificial Sequence
  Description of Artificial Sequence: Synthetic oligonucleotide
aacuacugauaccaaugga

SEQ ID NO: 375706 - RNA, 19 nt, Artificial Sequence
  Description of Artificial Sequence: Synthetic oligonucleotide
accguccugagaaugaagc

SEQ ID NO: 375707 - RNA, 19 nt, Artificial Sequence
  Description of Artificial Sequence: Synthetic oligonucleotide
ucagaccaacguuaauagg

SEQ ID NO: 375708 - RNA, 19 nt, Artificial Sequence
  Description of Artificial Sequence: Synthetic oligonucleotide
aguucaguauauaguaagg

SEQ ID NO: 375709 - RNA, 19 nt, Artificial Sequence
  Description of Artificial Sequence: Synthetic oligonucleotide
ucucacuuauagcaucagc

SEQ ID NO: 375710 - RNA, 19 nt, Artificial Sequence
  Description of Artificial Sequence: Synthetic oligonucleotide
guacuuguggaauccgagg

SEQ ID NO: 375711 - RNA, 19 nt, Artificial Sequence
  Description of Artificial Sequence: Synthetic oligonucleotide
aacugggcgaaacauuuaa

SEQ ID NO: 375712 - RNA, 19 nt, Artificial Sequence
  Description of Artificial Sequence: Synthetic oligonucleotide
agaaugaccaucccauggu

SEQ ID NO: 375713 - RNA, 19 nt, Artificial Sequence
  Description of Artificial Sequence: Synthetic oligonucleotide
gaguccuuucuaugggucg

SEQ ID NO: 375714 - RNA, 19 nt, Artificial Sequence
  Description of Artificial Sequence: Synthetic oligonucleotide
augacugugagagcaagag

SEQ ID NO: 375715 - RNA, 19 nt, Artificial Sequence
  Description of Artificial Sequence: Synthetic oligonucleotide
aaagccuauuaacaacaau

SEQ ID NO: 375716 - RNA, 19 nt, Artificial Sequence
  Description of Artificial Sequence: Synthetic oligonucleotide
gacuagagauucuugucac

SEQ ID NO: 375717 - RNA, 19 nt, Artificial Sequence
  Description of Artificial Sequence: Synthetic oligonucleotide
cuuucuaugggucguaaca

SEQ ID NO: 375718 - RNA, 19 nt, Artificial Sequence
  Description of Artificial Sequence: Synthetic oligonucleotide
guucaguauauaguaaggc

SEQ ID NO: 375719 - RNA, 19 nt, Artificial Sequence
  Description of Artificial Sequence: Synthetic oligonucleotide
uauaagcauauggucaucu

SEQ ID NO: 375720 - RNA, 19 nt, Artificial Sequence
  Description of Artificial Sequence: Synthetic oligonucleotide
guggaauccgagguaaucg

SEQ ID NO: 375721 - RNA, 19 nt, Artificial Sequence
  Description of Artificial Sequence: Synthetic oligonucleotide
caugcagagaaauagcgaa

SEQ ID NO: 375722 - RNA, 19 nt, Artificial Sequence
  Description of Artificial Sequence: Synthetic oligonucleotide
cuacauuaauacagcauuc

SEQ ID NO: 375723 - RNA, 19 nt, Artificial Sequence
  Description of Artificial Sequence: Synthetic oligonucleotide
ucauucuguauaagcauau

SEQ ID NO: 375724 - RNA, 19 nt, Artificial Sequence
  Description of Artificial Sequence: Synthetic oligonucleotide
aaauauuacuagguuuuau

SEQ ID NO: 375725 - RNA, 19 nt, Artificial Sequence
  Description of Artificial Sequence: Synthetic oligonucleotide
agagugcccguucuucagc

SEQ ID NO: 375726 - RNA, 19 nt, Artificial Sequence
  Description of Artificial Sequence: Synthetic oligonucleotide
uguggacuagagauucuug

SEQ ID NO: 375727 - RNA, 19 nt, Artificial Sequence
  Description of Artificial Sequence: Synthetic oligonucleotide
ucggaugaaucauuaaaua

SEQ ID NO: 375728 - RNA, 19 nt, Artificial Sequence
  Description of Artificial Sequence: Synthetic oligonucleotide
uucauauugcuuucaguua

SEQ ID NO: 375729 - RNA, 19 nt, Artificial Sequence
  Description of Artificial Sequence: Synthetic oligonucleotide
uucuguaguucucacuuau

SEQ ID NO: 375730 - RNA, 19 nt, Artificial Sequence
  Description of Artificial Sequence: Synthetic oligonucleotide
ugacauaaccaagucagaa

SEQ ID NO: 375731 - RNA, 19 nt, Artificial Sequence
  Description of Artificial Sequence: Synthetic oligonucleotide
aaauagcgaaccacauggg

SEQ ID NO: 375732 - RNA, 19 nt, Artificial Sequence
  Description of Artificial Sequence: Synthetic oligonucleotide
gacagagcgguucauuuuc

SEQ ID NO: 375733 - RNA, 19 nt, Artificial Sequence
  Description of Artificial Sequence: Synthetic oligonucleotide
ucgggauugagguucgaga

SEQ ID NO: 375734 - RNA, 19 nt, Artificial Sequence
  Description of Artificial Sequence: Synthetic oligonucleotide
aauacaccagucaauguua

SEQ ID NO: 375735 - RNA, 19 nt, Artificial Sequence
  Description of Artificial Sequence: Synthetic oligonucleotide
cgagauaugaaaauauuac

SEQ ID NO: 375736 - RNA, 19 nt, Artificial Sequence
  Description of Artificial Sequence: Synthetic oligonucleotide
uuugaucgcuuaauggcau

SEQ ID NO: 375737 - RNA, 19 nt, Artificial Sequence
  Description of Artificial Sequence: Synthetic oligonucleotide
uauucguaacugcucugca

SEQ ID NO: 375738 - RNA, 19 nt, Artificial Sequence
  Description of Artificial Sequence: Synthetic oligonucleotide
gaauccgagguaaucgacc

SEQ ID NO: 375739 - RNA, 19 nt, Artificial Sequence
  Description of Artificial Sequence: Synthetic oligonucleotide
aucgacuaucaccuucuuc

SEQ ID NO: 375740 - RNA, 19 nt, Artificial Sequence
  Description of Artificial Sequence: Synthetic oligonucleotide
cugaguaguacugagucuc

SEQ ID NO: 375741 - RNA, 19 nt, Artificial Sequence
  Description of Artificial Sequence: Synthetic oligonucleotide
ugggucguaacaagauacc

SEQ ID NO: 375742 - RNA, 19 nt, Artificial Sequence
  Description of Artificial Sequence: Synthetic oligonucleotide
guauguaucucaagccccg

SEQ ID NO: 375743 - RNA, 19 nt, Artificial Sequence
  Description of Artificial Sequence: Synthetic oligonucleotide
uaccgugacuucauauugc

SEQ ID NO: 375744 - RNA, 19 nt, Artificial Sequence
  Description of Artificial Sequence: Synthetic oligonucleotide
uggaauccgagguaaucga

SEQ ID NO: 375745 - RNA, 19 nt, Artificial Sequence
  Description of Artificial Sequence: Synthetic oligonucleotide
cuauucguaacugcucugc

SEQ ID NO: 375746 - RNA, 19 nt, Artificial Sequence
  Description of Artificial Sequence: Synthetic oligonucleotide
uaugacugugagagcaaga

SEQ ID NO: 375747 - RNA, 19 nt, Artificial Sequence
  Description of Artificial Sequence: Synthetic oligonucleotide
auugagguucgagauauga

SEQ ID NO: 375748 - RNA, 19 nt, Artificial Sequence
  Description of Artificial Sequence: Synthetic oligonucleotide
uaccucucaacuguaauuc

SEQ ID NO: 375749 - RNA, 19 nt, Artificial Sequence
  Description of Artificial Sequence: Synthetic oligonucleotide
cauucaauucuauucguaa

SEQ ID NO: 375750 - RNA, 19 nt, Artificial Sequence
  Description of Artificial Sequence: Synthetic oligonucleotide
uuguuuaaugcuaguuuua

SEQ ID NO: 375751 - RNA, 19 nt, Artificial Sequence
  Description of Artificial Sequence: Synthetic oligonucleotide
aaucgacccugccugauuu

SEQ ID NO: 375752 - RNA, 19 nt, Artificial Sequence
  Description of Artificial Sequence: Synthetic oligonucleotide
ugcaacagugaaugauaag

SEQ ID NO: 375753 - RNA, 19 nt, Artificial Sequence
  Description of Artificial Sequence: Synthetic oligonucleotide
aucgcuuaauggcauaaau

SEQ ID NO: 375754 - RNA, 19 nt, Artificial Sequence
  Description of Artificial Sequence: Synthetic oligonucleotide
caagucaaacagacaagug

SEQ ID NO: 375755 - RNA, 19 nt, Artificial Sequence
  Description of Artificial Sequence: Synthetic oligonucleotide
ucucaacuguaauucacau

SEQ ID NO: 375756 - RNA, 19 nt, Artificial Sequence
  Description of Artificial Sequence: Synthetic oligonucleotide
caguauauaguaaggcuga

SEQ ID NO: 375757 - RNA, 19 nt, Artificial Sequence
  Description of Artificial Sequence: Synthetic oligonucleotide
uuucuaugggucguaacaa

SEQ ID NO: 375758 - RNA, 19 nt, Artificial Sequence
  Description of Artificial Sequence: Synthetic oligonucleotide
uuagccaaaccuuguuagu

SEQ ID NO: 375759 - RNA, 19 nt, Artificial Sequence
  Description of Artificial Sequence: Synthetic oligonucleotide
uacugauaccaauggacaa

SEQ ID NO: 375760 - RNA, 19 nt, Artificial Sequence
  Description of Artificial Sequence: Synthetic oligonucleotide
ucuauucguaacugcucug

SEQ ID NO: 375761 - RNA, 19 nt, Artificial Sequence
  Description of Artificial Sequence: Synthetic oligonucleotide
uggacuagagauucuuguc

SEQ ID NO: 375762 - RNA, 19 nt, Artificial Sequence
  Description of Artificial Sequence: Synthetic oligonucleotide
uuacaauauucauucugua

SEQ ID NO: 375763 - RNA, 19 nt, Artificial Sequence
  Description of Artificial Sequence: Synthetic oligonucleotide
aacucccaccauuacaaua

SEQ ID NO: 375764 - RNA, 19 nt, Artificial Sequence
  Description of Artificial Sequence: Synthetic oligonucleotide
aguauauaguaaggcugac

SEQ ID NO: 375765 - RNA, 19 nt, Artificial Sequence
  Description of Artificial Sequence: Synthetic oligonucleotide
cugauaccaauggacaaag

SEQ ID NO: 375766 - RNA, 19 nt, Artificial Sequence
  Description of Artificial Sequence: Synthetic oligonucleotide
uaugggucguaacaagaua

SEQ ID NO: 375767 - RNA, 19 nt, Artificial Sequence
  Description of Artificial Sequence: Synthetic oligonucleotide
auccaucuagccucuucac

SEQ ID NO: 375768 - RNA, 19 nt, Artificial Sequence
  Description of Artificial Sequence: Synthetic oligonucleotide
aguacuuguggaauccgag

SEQ ID NO: 375769 - RNA, 19 nt, Artificial Sequence
  Description of Artificial Sequence: Synthetic oligonucleotide
auaguaaggcugacagagc

SEQ ID NO: 375770 - RNA, 19 nt, Artificial Sequence
  Description of Artificial Sequence: Synthetic oligonucleotide
auugcaaagcggauucuag

SEQ ID NO: 375771 - RNA, 19 nt, Artificial Sequence
  Description of Artificial Sequence: Synthetic oligonucleotide
agccuauuaacaacaauga

SEQ ID NO: 375772 - RNA, 19 nt, Artificial Sequence
  Description of Artificial Sequence: Synthetic oligonucleotide
caauaagucgagaaguucu

SEQ ID NO: 375773 - RNA, 19 nt, Artificial Sequence
  Description of Artificial Sequence: Synthetic oligonucleotide
ugauuguuuaaugcuaguu

SEQ ID NO: 375774 - RNA, 19 nt, Artificial Sequence
  Description of Artificial Sequence: Synthetic oligonucleotide
cuucggaugaaucauuaaa

SEQ ID NO: 375775 - RNA, 19 nt, Artificial Sequence
  Description of Artificial Sequence: Synthetic oligonucleotide
uccgagguaaucgacccug

SEQ ID NO: 375776 - RNA, 19 nt, Artificial Sequence
  Description of Artificial Sequence: Synthetic oligonucleotide
uagagauucuugucacaug

SEQ ID NO: 375777 - RNA, 19 nt, Artificial Sequence
  Description of Artificial Sequence: Synthetic oligonucleotide
ucauaccgugacuucauau

SEQ ID NO: 375778 - RNA, 19 nt, Artificial Sequence
  Description of Artificial Sequence: Synthetic oligonucleotide
uaagucgagaaguucuauu

SEQ ID NO: 375779 - RNA, 19 nt, Artificial Sequence
  Description of Artificial Sequence: Synthetic oligonucleotide
agagacagcauucgggauu

SEQ ID NO: 375780 - RNA, 19 nt, Artificial Sequence
  Description of Artificial Sequence: Synthetic oligonucleotide
uaauucacauaaguccuaa

SEQ ID NO: 375781 - RNA, 19 nt, Artificial Sequence
  Description of Artificial Sequence: Synthetic oligonucleotide
uauuacucuggguggugga

SEQ ID NO: 375782 - RNA, 19 nt, Artificial Sequence
  Description of Artificial Sequence: Synthetic oligonucleotide
accugacauaaccaaguca

SEQ ID NO: 375783 - RNA, 19 nt, Artificial Sequence
  Description of Artificial Sequence: Synthetic oligonucleotide
uugaguccuuucuaugggu

SEQ ID NO: 375784 - RNA, 19 nt, Artificial Sequence
  Description of Artificial Sequence: Synthetic oligonucleotide
ggugguuaacccugcaaag

SEQ ID NO: 375785 - RNA, 19 nt, Artificial Sequence
  Description of Artificial Sequence: Synthetic oligonucleotide
auaccucucaacuguaauu

SEQ ID NO: 375786 - RNA, 19 nt, Artificial Sequence
  Description of Artificial Sequence: Synthetic oligonucleotide
aaagcggauucuagcagug

SEQ ID NO: 375787 - RNA, 19 nt, Artificial Sequence
  Description of Artificial Sequence: Synthetic oligonucleotide
aaacagacgggaagaugag

SEQ ID NO: 375788 - RNA, 19 nt, Artificial Sequence
  Description of Artificial Sequence: Synthetic oligonucleotide
accgugacuucauauugcu

SEQ ID NO: 375789 - RNA, 19 nt, Artificial Sequence
  Description of Artificial Sequence: Synthetic oligonucleotide
aauaagucgagaaguucua

SEQ ID NO: 375790 - RNA, 19 nt, Artificial Sequence
  Description of Artificial Sequence: Synthetic oligonucleotide
cccaugcagagaaauagcg

SEQ ID NO: 375791 - RNA, 19 nt, Artificial Sequence
  Description of Artificial Sequence: Synthetic oligonucleotide
auacaaccaaguacaggac

SEQ ID NO: 375792 - RNA, 19 nt, Artificial Sequence
  Description of Artificial Sequence: Synthetic oligonucleotide
caugaaacagacgggaaga

SEQ ID NO: 375793 - RNA, 19 nt, Artificial Sequence
  Description of Artificial Sequence: Synthetic oligonucleotide
uacuagguuuuauauccau

SEQ ID NO: 375794 - RNA, 19 nt, Artificial Sequence
  Description of Artificial Sequence: Synthetic oligonucleotide
uucuucaacuuguggacua

SEQ ID NO: 375795 - RNA, 19 nt, Artificial Sequence
  Description of Artificial Sequence: Synthetic oligonucleotide
ggaaacuaaaauagcagca

SEQ ID NO: 375796 - RNA, 19 nt, Artificial Sequence
  Description of Artificial Sequence: Synthetic oligonucleotide
auccgauccgugaagagug

SEQ ID NO: 375797 - RNA, 19 nt, Artificial Sequence
  Description of Artificial Sequence: Synthetic oligonucleotide
acuagcuucaaaguccaaa

SEQ ID NO: 375798 - RNA, 19 nt, Artificial Sequence
  Description of Artificial Sequence: Synthetic oligonucleotide
ugaguaguacugagucucu

SEQ ID NO: 375799 - RNA, 19 nt, Artificial Sequence
  Description of Artificial Sequence: Synthetic oligonucleotide
acgagccuaaagugcuccc

SEQ ID NO: 375800 - RNA, 19 nt, Artificial Sequence
  Description of Artificial Sequence: Synthetic oligonucleotide
uauguaucucaagccccgg

SEQ ID NO: 375801 - RNA, 19 nt, Artificial Sequence
  Description of Artificial Sequence: Synthetic oligonucleotide
aguuggauauacaaguaua

SEQ ID NO: 375802 - RNA, 19 nt, Artificial Sequence
  Description of Artificial Sequence: Synthetic oligonucleotide
augauuguuuaaugcuagu

SEQ ID NO: 375803 - RNA, 19 nt, Artificial Sequence
  Description of Artificial Sequence: Synthetic oligonucleotide
ccuacaugaaacagacggg

SEQ ID NO: 375804 - RNA, 19 nt, Artificial Sequence
  Description of Artificial Sequence: Synthetic oligonucleotide
gaugugagcaguucaguau

SEQ ID NO: 375805 - RNA, 19 nt, Artificial Sequence
  Description of Artificial Sequence: Synthetic oligonucleotide
acuagagauucuugucaca

SEQ ID NO: 375806 - RNA, 19 nt, Artificial Sequence
  Description of Artificial Sequence: Synthetic oligonucleotide
uagccaaaccuuguuaguc

SEQ ID NO: 375807 - RNA, 19 nt, Artificial Sequence
  Description of Artificial Sequence: Synthetic oligonucleotide
accaacguuaauaggaaaa

SEQ ID NO: 375808 - RNA, 19 nt, Artificial Sequence
  Description of Artificial Sequence: Synthetic oligonucleotide
uucuagaugcagacagcaa

SEQ ID NO: 375809 - RNA, 19 nt, Artificial Sequence
  Description of Artificial Sequence: Synthetic oligonucleotide
uuauauccauaugaaccaa

SEQ ID NO: 375810 - RNA, 19 nt, Artificial Sequence
  Description of Artificial Sequence: Synthetic oligonucleotide
cacgacaccguccugagaa

SEQ ID NO: 375811 - RNA, 19 nt, Artificial Sequence
  Description of Artificial Sequence: Synthetic oligonucleotide
uuacucugggugguggacc

SEQ ID NO: 375812 - RNA, 19 nt, Artificial Sequence
  Description of Artificial Sequence: Synthetic oligonucleotide
agguucgagauaugaaaau

SEQ ID NO: 375813 - RNA, 19 nt, Artificial Sequence
  Description of Artificial Sequence: Synthetic oligonucleotide
ggacuagagauucuuguca

SEQ ID NO: 375814 - RNA, 19 nt, Artificial Sequence
  Description of Artificial Sequence: Synthetic oligonucleotide
aaguacuuguggaauccga

SEQ ID NO: 375815 - RNA, 19 nt, Artificial Sequence
  Description of Artificial Sequence: Synthetic oligonucleotide
uucuauuacucuggguggu

SEQ ID NO: 375816 - RNA, 19 nt, Artificial Sequence
  Description of Artificial Sequence: Synthetic oligonucleotide
auagcgaaccacaugggaa

SEQ ID NO: 375817 - RNA, 19 nt, Artificial Sequence
  Description of Artificial Sequence: Synthetic oligonucleotide
cauucgggauugagguucg

SEQ ID NO: 375818 - RNA, 19 nt, Artificial Sequence
  Description of Artificial Sequence: Synthetic oligonucleotide
agcggauucuagcagugau

SEQ ID NO: 375819 - RNA, 19 nt, Artificial Sequence
  Description of Artificial Sequence: Synthetic oligonucleotide
aguaaggcugacagagcgg

SEQ ID NO: 375820 - RNA, 19 nt, Artificial Sequence
  Description of Artificial Sequence: Synthetic oligonucleotide
uucgggauugagguucgag

SEQ ID NO: 375821 - RNA, 19 nt, Artificial Sequence
  Description of Artificial Sequence: Synthetic oligonucleotide
cuaaccauacaaccaagua

SEQ ID NO: 375822 - RNA, 19 nt, Artificial Sequence
  Description of Artificial Sequence: Synthetic oligonucleotide
gacauaaccaagucagaau

SEQ ID NO: 375823 - RNA, 19 nt, Artificial Sequence
  Description of Artificial Sequence: Synthetic oligonucleotide
acguuaauaggaaaacaaa

SEQ ID NO: 375824 - RNA, 19 nt, Artificial Sequence
  Description of Artificial Sequence: Synthetic oligonucleotide
ucccaccauuacaauauuc

SEQ ID NO: 375825 - RNA, 19 nt, Artificial Sequence
  Description of Artificial Sequence: Synthetic oligonucleotide
aacagacgggaagaugaga

SEQ ID NO: 375826 - RNA, 19 nt, Artificial Sequence
  Description of Artificial Sequence: Synthetic oligonucleotide
gacaggaggaaacauguuu

SEQ ID NO: 375827 - RNA, 19 nt, Artificial Sequence
  Description of Artificial Sequence: Synthetic oligonucleotide
uuauagcaucagccaaacu

SEQ ID NO: 375828 - RNA, 19 nt, Artificial Sequence
  Description of Artificial Sequence: Synthetic oligonucleotide
cuuucugcaaaagagaauu

SEQ ID NO: 375829 - RNA, 19 nt, Artificial Sequence
  Description of Artificial Sequence: Synthetic oligonucleotide
aauauaccucucaacugua

SEQ ID NO: 375830 - RNA, 19 nt, Artificial Sequence
  Description of Artificial Sequence: Synthetic oligonucleotide
acugaaugcuucaccagca

SEQ ID NO: 375831 - RNA, 19 nt, Artificial Sequence
  Description of Artificial Sequence: Synthetic oligonucleotide
gagguucgagauaugaaaa

SEQ ID NO: 375832 - RNA, 19 nt, Artificial Sequence
  Description of Artificial Sequence: Synthetic oligonucleotide
ccuaguggccauccgaucc

SEQ ID NO: 375833 - RNA, 19 nt, Artificial Sequence
  Description of Artificial Sequence: Synthetic oligonucleotide
acuuauagcaucagccaaa

SEQ ID NO: 375834 - RNA, 19 nt, Artificial Sequence
  Description of Artificial Sequence: Synthetic oligonucleotide
agcacagagugacuuuuaa

SEQ ID NO: 375835 - RNA, 19 nt, Artificial Sequence
  Description of Artificial Sequence: Synthetic oligonucleotide
uguuagucaaauggcuaau

SEQ ID NO: 375836 - RNA, 19 nt, Artificial Sequence
  Description of Artificial Sequence: Synthetic oligonucleotide
agaggauguuugcaguaaa

SEQ ID NO: 375837 - RNA, 19 nt, Artificial Sequence
  Description of Artificial Sequence: Synthetic oligonucleotide
gucguaacaagauaccuuu

SEQ ID NO: 375838 - RNA, 19 nt, Artificial Sequence
  Description of Artificial Sequence: Synthetic oligonucleotide
auaagcauauggucaucuu

SEQ ID NO: 375839 - RNA, 19 nt, Artificial Sequence
  Description of Artificial Sequence: Synthetic oligonucleotide
gaaugcuguccaagcacag

SEQ ID NO: 375840 - RNA, 19 nt, Artificial Sequence
  Description of Artificial Sequence: Synthetic oligonucleotide
ugaucgcuuaauggcauaa

SEQ ID NO: 375841 - RNA, 19 nt, Artificial Sequence
  Description of Artificial Sequence: Synthetic oligonucleotide
aaguaauugcaaagcggau

SEQ ID NO: 375842 - RNA, 19 nt, Artificial Sequence
  Description of Artificial Sequence: Synthetic oligonucleotide
acugcaacagugaaugaua

SEQ ID NO: 375843 - RNA, 19 nt, Artificial Sequence
  Description of Artificial Sequence: Synthetic oligonucleotide
gugcccguucuucagcugc

SEQ ID NO: 375844 - RNA, 19 nt, Artificial Sequence
  Description of Artificial Sequence: Synthetic oligonucleotide
ucguaacaagauaccuuuc

SEQ ID NO: 375845 - RNA, 19 nt, Artificial Sequence
  Description of Artificial Sequence: Synthetic oligonucleotide
gcaaagcggauucuagcag

SEQ ID NO: 375846 - RNA, 19 nt, Artificial Sequence
  Description of Artificial Sequence: Synthetic oligonucleotide
accagucaauguuaauaaa

SEQ ID NO: 375847 - RNA, 19 nt, Artificial Sequence
  Description of Artificial Sequence: Synthetic oligonucleotide
accuaguggccauccgauc

SEQ ID NO: 375848 - RNA, 19 nt, Artificial Sequence
  Description of Artificial Sequence: Synthetic oligonucleotide
cauaagacugacacaggua

SEQ ID NO: 375849 - RNA, 19 nt, Artificial Sequence
  Description of Artificial Sequence: Synthetic oligonucleotide
guuagucaaauggcuaauc

SEQ ID NO: 375850 - RNA, 19 nt, Artificial Sequence
  Description of Artificial Sequence: Synthetic oligonucleotide
cauugaguguauguaucuc

SEQ ID NO: 375851 - RNA, 19 nt, Artificial Sequence
  Description of Artificial Sequence: Synthetic oligonucleotide
accucucaacuguaauuca

SEQ ID NO: 375852 - RNA, 19 nt, Artificial Sequence
  Description of Artificial Sequence: Synthetic oligonucleotide
augucuucggaugaaucau

SEQ ID NO: 375853 - RNA, 19 nt, Artificial Sequence
  Description of Artificial Sequence: Synthetic oligonucleotide
ucaaugcacuagcuucaaa

SEQ ID NO: 375854 - RNA, 19 nt, Artificial Sequence
  Description of Artificial Sequence: Synthetic oligonucleotide
cauucuguauaagcauaug

SEQ ID NO: 375855 - RNA, 19 nt, Artificial Sequence
  Description of Artificial Sequence: Synthetic oligonucleotide
gucgagaaguucuauuacu

SEQ ID NO: 375856 - RNA, 19 nt, Artificial Sequence
  Description of Artificial Sequence: Synthetic oligonucleotide
guggacuagagauucuugu

SEQ ID NO: 375857 - RNA, 19 nt, Artificial Sequence
  Description of Artificial Sequence: Synthetic oligonucleotide
cacuuauagcaucagccaa

SEQ ID NO: 375858 - RNA, 19 nt, Artificial Sequence
  Description of Artificial Sequence: Synthetic oligonucleotide
cccaccauuacaauauuca

SEQ ID NO: 375859 - RNA, 19 nt, Artificial Sequence
  Description of Artificial Sequence: Synthetic oligonucleotide
ugccacgacaccguccuga

SEQ ID NO: 375860 - RNA, 19 nt, Artificial Sequence
  Description of Artificial Sequence: Synthetic oligonucleotide
caacguuaauaggaaaaca

SEQ ID NO: 375861 - RNA, 19 nt, Artificial Sequence
  Description of Artificial Sequence: Synthetic oligonucleotide
guaacaagauaccuuucau

SEQ ID NO: 375862 - RNA, 19 nt, Artificial Sequence
  Description of Artificial Sequence: Synthetic oligonucleotide
uccgauccgugaagagugc

SEQ ID NO: 375863 - RNA, 19 nt, Artificial Sequence
  Description of Artificial Sequence: Synthetic oligonucleotide
uucauaccgugacuucaua

SEQ ID NO: 375864 - RNA, 19 nt, Artificial Sequence
  Description of Artificial Sequence: Synthetic oligonucleotide
cacgagccuaaagugcucc

SEQ ID NO: 375865 - RNA, 19 nt, Artificial Sequence
  Description of Artificial Sequence: Synthetic oligonucleotide
gaguaguacugagucucug

SEQ ID NO: 375866 - RNA, 19 nt, Artificial Sequence
  Description of Artificial Sequence: Synthetic oligonucleotide
agauaccuuucaucacacu

SEQ ID NO: 375867 - RNA, 19 nt, Artificial Sequence
  Description of Artificial Sequence: Synthetic oligonucleotide
aucgacccugccugauuuc

SEQ ID NO: 375868 - RNA, 19 nt, Artificial Sequence
  Description of Artificial Sequence: Synthetic oligonucleotide
agacaagugcaaauguuuu

SEQ ID NO: 375869 - RNA, 19 nt, Artificial Sequence
  Description of Artificial Sequence: Synthetic oligonucleotide
caucaacagagccagccaa

SEQ ID NO: 375870 - RNA, 19 nt, Artificial Sequence
  Description of Artificial Sequence: Synthetic oligonucleotide
ucgacccugccugauuuca

SEQ ID NO: 375871 - RNA, 19 nt, Artificial Sequence
  Description of Artificial Sequence: Synthetic oligonucleotide
uaaucgacccugccugauu

SEQ ID NO: 375872 - RNA, 19 nt, Artificial Sequence
  Description of Artificial Sequence: Synthetic oligonucleotide
ccaacguuaauaggaaaac

SEQ ID NO: 375873 - RNA, 19 nt, Artificial Sequence
  Description of Artificial Sequence: Synthetic oligonucleotide
ugcuuucgggagauggcua

SEQ ID NO: 375874 - RNA, 19 nt, Artificial Sequence
  Description of Artificial Sequence: Synthetic oligonucleotide
aaucgacuaucaccuucuu

SEQ ID NO: 375875 - RNA, 19 nt, Artificial Sequence
  Description of Artificial Sequence: Synthetic oligonucleotide
auaagucgagaaguucuau

SEQ ID NO: 375876 - RNA, 19 nt, Artificial Sequence
  Description of Artificial Sequence: Synthetic oligonucleotide
guucgagauaugaaaauau

SEQ ID NO: 375877 - RNA, 19 nt, Artificial Sequence
  Description of Artificial Sequence: Synthetic oligonucleotide
guauuaccaagaucaauuu

SEQ ID NO: 375878 - RNA, 19 nt, Artificial Sequence
  Description of Artificial Sequence: Synthetic oligonucleotide
uucaaugcacuagcuucaa

SEQ ID NO: 375879 - RNA, 19 nt, Artificial Sequence
  Description of Artificial Sequence: Synthetic oligonucleotide
gaccaacguuaauaggaaa

SEQ ID NO: 375880 - RNA, 19 nt, Artificial Sequence
  Description of Artificial Sequence: Synthetic oligonucleotide
gcagcuacauauuucacau

SEQ ID NO: 375881 - RNA, 19 nt, Artificial Sequence
  Description of Artificial Sequence: Synthetic oligonucleotide
agaaacugggcgaaacauu

SEQ ID NO: 375882 - RNA, 19 nt, Artificial Sequence
  Description of Artificial Sequence: Synthetic oligonucleotide
gacaccguccugagaauga

SEQ ID NO: 375883 - RNA, 19 nt, Artificial Sequence
  Description of Artificial Sequence: Synthetic oligonucleotide
acuagguuuuauauccaua

SEQ ID NO: 375884 - RNA, 19 nt, Artificial Sequence
  Description of Artificial Sequence: Synthetic oligonucleotide
ggcuauaguucucuuguaa

SEQ ID NO: 375885 - RNA, 19 nt, Artificial Sequence
  Description of Artificial Sequence: Synthetic oligonucleotide
uugaucgcuuaauggcaua

SEQ ID NO: 375886 - RNA, 19 nt, Artificial Sequence
  Description of Artificial Sequence: Synthetic oligonucleotide
gcauucgggauugagguuc

SEQ ID NO: 375887 - RNA, 19 nt, Artificial Sequence
  Description of Artificial Sequence: Synthetic oligonucleotide
ggaugaaucauaacuuuua

SEQ ID NO: 375888 - RNA, 19 nt, Artificial Sequence
  Description of Artificial Sequence: Synthetic oligonucleotide
caaagcggauucuagcagu

SEQ ID NO: 375889 - RNA, 19 nt, Artificial Sequence
  Description of Artificial Sequence: Synthetic oligonucleotide
cugacauaaccaagucaga

SEQ ID NO: 375890 - RNA, 19 nt, Artificial Sequence
  Description of Artificial Sequence: Synthetic oligonucleotide
acggugguuaacccugcaa

SEQ ID NO: 375891 - RNA, 19 nt, Artificial Sequence
  Description of Artificial Sequence: Synthetic oligonucleotide
cauaugacugugagagcaa

SEQ ID NO: 375892 - RNA, 19 nt, Artificial Sequence
  Description of Artificial Sequence: Synthetic oligonucleotide
cucaacuguaauucacaua

SEQ ID NO: 375893 - RNA, 19 nt, Artificial Sequence
  Description of Artificial Sequence: Synthetic oligonucleotide
cauuugcuagaaaucgacu

SEQ ID NO: 375894 - RNA, 19 nt, Artificial Sequence
  Description of Artificial Sequence: Synthetic oligonucleotide
caccguccugagaaugaag

SEQ ID NO: 375895 - RNA, 19 nt, Artificial Sequence
  Description of Artificial Sequence: Synthetic oligonucleotide
aagcggauucuagcaguga

SEQ ID NO: 375896 - RNA, 19 nt, Artificial Sequence
  Description of Artificial Sequence: Synthetic oligonucleotide
guaaggcugacagagcggu

SEQ ID NO: 375897 - RNA, 19 nt, Artificial Sequence
  Description of Artificial Sequence: Synthetic oligonucleotide
ccggccaacuugcaaaagc

SEQ ID NO: 375898 - RNA, 19 nt, Artificial Sequence
  Description of Artificial Sequence: Synthetic oligonucleotide
ucucaagccccggccaacu

SEQ ID NO: 375899 - RNA, 19 nt, Artificial Sequence
  Description of Artificial Sequence: Synthetic oligonucleotide
caacuuuagcugccaucug

SEQ ID NO: 375900 - RNA, 19 nt, Artificial Sequence
  Description of Artificial Sequence: Synthetic oligonucleotide
auucuagcagugauuucaa

SEQ ID NO: 375901 - RNA, 19 nt, Artificial Sequence
  Description of Artificial Sequence: Synthetic oligonucleotide
cagcaagaggaaacuaaaa

SEQ ID NO: 375902 - RNA, 19 nt, Artificial Sequence
  Description of Artificial Sequence: Synthetic oligonucleotide
ggagggcaacaucuauuag

SEQ ID NO: 375903 - RNA, 19 nt, Artificial Sequence
  Description of Artificial Sequence: Synthetic oligonucleotide
gguucgagauaugaaaaua

SEQ ID NO: 375904 - RNA, 19 nt, Artificial Sequence
  Description of Artificial Sequence: Synthetic oligonucleotide
cuaugggucguaacaagau

SEQ ID NO: 375905 - RNA, 19 nt, Artificial Sequence
  Description of Artificial Sequence: Synthetic oligonucleotide
cuagagauucuugucacau

SEQ ID NO: 375906 - RNA, 19 nt, Artificial Sequence
  Description of Artificial Sequence: Synthetic oligonucleotide
gaccaucccauggugcaca

SEQ ID NO: 375907 - RNA, 19 nt, Artificial Sequence
  Description of Artificial Sequence: Synthetic oligonucleotide
acaguauuaccaagaucaa

SEQ ID NO: 375908 - RNA, 19 nt, Artificial Sequence
  Description of Artificial Sequence: Synthetic oligonucleotide
auauaccucucaacuguaa

SEQ ID NO: 375909 - RNA, 19 nt, Artificial Sequence
  Description of Artificial Sequence: Synthetic oligonucleotide
ggaccuaguggccauccga

SEQ ID NO: 375910 - RNA, 19 nt, Artificial Sequence
  Description of Artificial Sequence: Synthetic oligonucleotide
auccgagguaaucgacccu

SEQ ID NO: 375911 - RNA, 19 nt, Artificial Sequence
  Description of Artificial Sequence: Synthetic oligonucleotide
gagaaauagcgaaccacau

SEQ ID NO: 375912 - RNA, 19 nt, Artificial Sequence
  Description of Artificial Sequence: Synthetic oligonucleotide
auacaccagucaauguuaa

SEQ ID NO: 375913 - RNA, 19 nt, Artificial Sequence
  Description of Artificial Sequence: Synthetic oligonucleotide
cguaacaagauaccuuuca

SEQ ID NO: 375914 - RNA, 19 nt, Artificial Sequence
  Description of Artificial Sequence: Synthetic oligonucleotide
uccuuucuaugggucguaa

SEQ ID NO: 375915 - RNA, 19 nt, Artificial Sequence
  Description of Artificial Sequence: Synthetic oligonucleotide
guaauucacauaaguccua

SEQ ID NO: 375916 - RNA, 19 nt, Artificial Sequence
  Description of Artificial Sequence: Synthetic oligonucleotide
aucaacagagccagccaau

SEQ ID NO: 375917 - RNA, 19 nt, Artificial Sequence
  Description of Artificial Sequence: Synthetic oligonucleotide
ugaccaucccauggugcac

SEQ ID NO: 375918 - RNA, 19 nt, Artificial Sequence
  Description of Artificial Sequence: Synthetic oligonucleotide
guauaagcauauggucauc

SEQ ID NO: 375919 - RNA, 19 nt, Artificial Sequence
  Description of Artificial Sequence: Synthetic oligonucleotide
gaucgcuuaauggcauaaa

SEQ ID NO: 375920 - RNA, 19 nt, Artificial Sequence
  Description of Artificial Sequence: Synthetic oligonucleotide
ggccaacuugcaaaagcag

SEQ ID NO: 375921 - RNA, 19 nt, Artificial Sequence
  Description of Artificial Sequence: Synthetic oligonucleotide
ggauugagguucgagauau

SEQ ID NO: 375922 - RNA, 19 nt, Artificial Sequence
  Description of Artificial Sequence: Synthetic oligonucleotide
caaccuagcuuccucuugu

SEQ ID NO: 375923 - RNA, 19 nt, Artificial Sequence
  Description of Artificial Sequence: Synthetic oligonucleotide
uccgugaagagugcccguu

SEQ ID NO: 375924 - RNA, 19 nt, Artificial Sequence
  Description of Artificial Sequence: Synthetic oligonucleotide
gagugcccguucuucagcu

SEQ ID NO: 375925 - RNA, 19 nt, Artificial Sequence
  Description of Artificial Sequence: Synthetic oligonucleotide
caacuccugggaaaguacu

SEQ ID NO: 375926 - RNA, 19 nt, Artificial Sequence
  Description of Artificial Sequence: Synthetic oligonucleotide
ggaacauccaacagugacu

SEQ ID NO: 375927 - RNA, 19 nt, Artificial Sequence
  Description of Artificial Sequence: Synthetic oligonucleotide
ggaauccgagguaaucgac

SEQ ID NO: 375928 - RNA, 19 nt, Artificial Sequence
  Description of Artificial Sequence: Synthetic oligonucleotide
gcagugauuucaaccuagc

SEQ ID NO: 375929 - RNA, 19 nt, Artificial Sequence
  Description of Artificial Sequence: Synthetic oligonucleotide
cguuaauaggaaaacaaau

SEQ ID NO: 375930 - RNA, 19 nt, Artificial Sequence
  Description of Artificial Sequence: Synthetic oligonucleotide
cucugucaacuccugggaa

SEQ ID NO: 375931 - RNA, 19 nt, Artificial Sequence
  Description of Artificial Sequence: Synthetic oligonucleotide
ccuuucuaugggucguaac

SEQ ID NO: 375932 - RNA, 19 nt, Artificial Sequence
  Description of Artificial Sequence: Synthetic oligonucleotide
gucuucggaugaaucauua

SEQ ID NO: 375933 - RNA, 19 nt, Artificial Sequence
  Description of Artificial Sequence: Synthetic oligonucleotide
gcacagcaugagcauagac

SEQ ID NO: 375934 - RNA, 19 nt, Artificial Sequence
  Description of Artificial Sequence: Synthetic oligonucleotide
cuucaguaaaguagcucau

SEQ ID NO: 375935 - RNA, 19 nt, Artificial Sequence
  Description of Artificial Sequence: Synthetic oligonucleotide
cauggugcacacgagccua

SEQ ID NO: 375936 - RNA, 19 nt, Artificial Sequence
  Description of Artificial Sequence: Synthetic oligonucleotide
cagugauuucaaccuagcu

SEQ ID NO: 375937 - RNA, 19 nt, Artificial Sequence
  Description of Artificial Sequence: Synthetic oligonucleotide
cgauccgugaagagugccc

SEQ ID NO: 375938 - RNA, 19 nt, Artificial Sequence
  Description of Artificial Sequence: Synthetic oligonucleotide
cccuugaguccuuucuaug

SEQ ID NO: 375939 - RNA, 19 nt, Artificial Sequence
  Description of Artificial Sequence: Synthetic oligonucleotide
cauauugcuuucaguuaau

SEQ ID NO: 375940 - RNA, 19 nt, Artificial Sequence
  Description of Artificial Sequence: Synthetic oligonucleotide
cauccgauccgugaagagu

SEQ ID NO: 375941 - RNA, 19 nt, Artificial Sequence
  Description of Artificial Sequence: Synthetic oligonucleotide
ccaacuugcaaaagcagau

SEQ ID NO: 375942 - RNA, 19 nt, Artificial Sequence
  Description of Artificial Sequence: Synthetic oligonucleotide
gaccuaguggccauccgau

SEQ ID NO: 375943 - RNA, 19 nt, Artificial Sequence
  Description of Artificial Sequence: Synthetic oligonucleotide
gcacuagcuucaaagucca

SEQ ID NO: 375944 - RNA, 19 nt, Artificial Sequence
  Description of Artificial Sequence: Synthetic oligonucleotide
ccauccgauccgugaagag

SEQ ID NO: 375945 - RNA, 19 nt, Artificial Sequence
  Description of Artificial Sequence: Synthetic oligonucleotide
cacugcaacagugaaugau

SEQ ID NO: 375946 - RNA, 19 nt, Artificial Sequence
  Description of Artificial Sequence: Synthetic oligonucleotide
gccaaacucccaccauuac

SEQ ID NO: 375947 - RNA, 19 nt, Artificial Sequence
  Description of Artificial Sequence: Synthetic oligonucleotide
ggaaaacuacugauaccaa

SEQ ID NO: 375948 - RNA, 19 nt, Artificial Sequence
  Description of Artificial Sequence: Synthetic oligonucleotide
gccuauuaacaacaaugau

SEQ ID NO: 375949 - RNA, 19 nt, Artificial Sequence
  Description of Artificial Sequence: Synthetic oligonucleotide
cauaaucacuggcuuccau

SEQ ID NO: 375950 - RNA, 19 nt, Artificial Sequence
  Description of Artificial Sequence: Synthetic oligonucleotide
gccccggccaacuugcaaa

SEQ ID NO: 375951 - RNA, 19 nt, Artificial Sequence
  Description of Artificial Sequence: Synthetic oligonucleotide
gguuaacccugcaaaggcu

SEQ ID NO: 375952 - RNA, 19 nt, Artificial Sequence
  Description of Artificial Sequence: Synthetic oligonucleotide
cgagguaaucgacccugcc

SEQ ID NO: 375953 - RNA, 19 nt, Artificial Sequence
  Description of Artificial Sequence: Synthetic oligonucleotide
cggaugaaucauuaaauau

SEQ ID NO: 375954 - RNA, 19 nt, Artificial Sequence
  Description of Artificial Sequence: Synthetic oligonucleotide
gugagcaguucaguauaua

SEQ ID NO: 375955 - RNA, 19 nt, Artificial Sequence
  Description of Artificial Sequence: Synthetic oligonucleotide
gggucguaacaagauaccu

SEQ ID NO: 375956 - RNA, 19 nt, Artificial Sequence
  Description of Artificial Sequence: Synthetic oligonucleotide
cugccugauuucaugccau

SEQ ID NO: 375957 - RNA, 19 nt, Artificial Sequence
  Description of Artificial Sequence: Synthetic oligonucleotide
ggcuaaucacagauaaaau

SEQ ID NO: 375958 - RNA, 19 nt, Artificial Sequence
  Description of Artificial Sequence: Synthetic oligonucleotide
ggucguaacaagauaccuu

SEQ ID NO: 375959 - RNA, 19 nt, Artificial Sequence
  Description of Artificial Sequence: Synthetic oligonucleotide
ccguccugagaaugaagca

SEQ ID NO: 375960 - RNA, 19 nt, Artificial Sequence
  Description of Artificial Sequence: Synthetic oligonucleotide
cagccaaacucccaccauu

SEQ ID NO: 375961 - RNA, 19 nt, Artificial Sequence
  Description of Artificial Sequence: Synthetic oligonucleotide
cggugguuaacccugcaaa

SEQ ID NO: 375962 - RNA, 19 nt, Artificial Sequence
  Description of Artificial Sequence: Synthetic oligonucleotide
ccgauccgugaagagugcc

SEQ ID NO: 375963 - RNA, 19 nt, Artificial Sequence
  Description of Artificial Sequence: Synthetic oligonucleotide
auucgggauugagguucga

SEQ ID NO: 375964 - RNA, 19 nt, Artificial Sequence
  Description of Artificial Sequence: Synthetic oligonucleotide
cccguucuucagcugcaac

SEQ ID NO: 375965 - RNA, 19 nt, Artificial Sequence
  Description of Artificial Sequence: Synthetic oligonucleotide
auggugcacacgagccuaa

SEQ ID NO: 375966 - RNA, 19 nt, Artificial Sequence
  Description of Artificial Sequence: Synthetic oligonucleotide
guaaucgacccugccugau

SEQ ID NO: 375967 - RNA, 19 nt, Artificial Sequence
  Description of Artificial Sequence: Synthetic oligonucleotide
ccgugaagagugcccguuc

SEQ ID NO: 375968 - RNA, 19 nt, Artificial Sequence
  Description of Artificial Sequence: Synthetic oligonucleotide
cacuagcuucaaaguccaa

SEQ ID NO: 375969 - RNA, 19 nt, Artificial Sequence
  Description of Artificial Sequence: Synthetic oligonucleotide
cagauccuuuagcucuacu

SEQ ID NO: 375970 - RNA, 19 nt, Artificial Sequence
  Description of Artificial Sequence: Synthetic oligonucleotide
gguuaagcacagagugacu

SEQ ID NO: 375971 - RNA, 19 nt, Artificial Sequence
  Description of Artificial Sequence: Synthetic oligonucleotide
cugccacgacaccguccug

SEQ ID NO: 375972 - RNA, 19 nt, Artificial Sequence
  Description of Artificial Sequence: Synthetic oligonucleotide
cgacaccguccugagaaug

SEQ ID NO: 375973 - RNA, 19 nt, Artificial Sequence
  Description of Artificial Sequence: Synthetic oligonucleotide
gcucccaguuggauauaca

SEQ ID NO: 375974 - RNA, 19 nt, Artificial Sequence
  Description of Artificial Sequence: Synthetic oligonucleotide
cccuuuucggagggcaaca

SEQ ID NO: 375975 - RNA, 19 nt, Artificial Sequence
  Description of Artificial Sequence: Synthetic oligonucleotide
cgagccuaaagugcuccca

SEQ ID NO: 375976 - RNA, 19 nt, Artificial Sequence
  Description of Artificial Sequence: Synthetic oligonucleotide
cggauucuagcagugauuu

SEQ ID NO: 375977 - RNA, 19 nt, Artificial Sequence
  Description of Artificial Sequence: Synthetic oligonucleotide
cccggccaacuugcaaaag

SEQ ID NO: 375978 - RNA, 19 nt, Artificial Sequence
  Description of Artificial Sequence: Synthetic oligonucleotide
gcggauucuagcagugauu

SEQ ID NO: 375979 - RNA, 19 nt, Artificial Sequence
  Description of Artificial Sequence: Synthetic oligonucleotide
ccccggccaacuugcaaaa

SEQ ID NO: 375980 - RNA, 19 nt, Artificial Sequence
  Description of Artificial Sequence: Synthetic oligonucleotide
ggcaaggcuuccacagaau

SEQ ID NO: 375981 - RNA, 19 nt, Artificial Sequence
  Description of Artificial Sequence: Synthetic oligonucleotide
cucaagccccggccaacuu

SEQ ID NO: 375982 - RNA, 19 nt, Artificial Sequence
  Description of Artificial Sequence: Synthetic oligonucleotide
guaaagcccuugaguccuu

SEQ ID NO: 375983 - RNA, 19 nt, Artificial Sequence
  Description of Artificial Sequence: Synthetic oligonucleotide
uuuacuagugcacuggugg

SEQ ID NO: 375984 - RNA, 19 nt, Artificial Sequence
  Description of Artificial Sequence: Synthetic oligonucleotide
aguucaaggacucaucugc

SEQ ID NO: 375985 - RNA, 19 nt, Artificial Sequence
  Description of Artificial Sequence: Synthetic oligonucleotide
uaauaauacucuuggagcg

SEQ ID NO: 375986 - RNA, 19 nt, Artificial Sequence
  Description of Artificial Sequence: Synthetic oligonucleotide
gacuacaucagcgagacgg

SEQ ID NO: 375987 - RNA, 19 nt, Artificial Sequence
  Description of Artificial Sequence: Synthetic oligonucleotide
agaaaugaggcccugggac

SEQ ID NO: 375988 - RNA, 19 nt, Artificial Sequence
  Description of Artificial Sequence: Synthetic oligonucleotide
auaguaauacccuugguca

SEQ ID NO: 375989 - RNA, 19 nt, Artificial Sequence
  Description of Artificial Sequence: Synthetic oligonucleotide
aagaauugccagcagcaac

SEQ ID NO: 375990 - RNA, 19 nt, Artificial Sequence
  Description of Artificial Sequence: Synthetic oligonucleotide
cauauaguaucaaaauagg

SEQ ID NO: 375991 - RNA, 19 nt, Artificial Sequence
  Description of Artificial Sequence: Synthetic oligonucleotide
agguccuucaucuagcugg

SEQ ID NO: 375992 - RNA, 19 nt, Artificial Sequence
  Description of Artificial Sequence: Synthetic oligonucleotide
ugccucguaaccaagacag

SEQ ID NO: 375993 - RNA, 19 nt, Artificial Sequence
  Description of Artificial Sequence: Synthetic oligonucleotide
agcuucuaggauuuguucc

SEQ ID NO: 375994 - RNA, 19 nt, Artificial Sequence
  Description of Artificial Sequence: Synthetic oligonucleotide
aagcuagucggccauaguc

SEQ ID NO: 375995 - RNA, 19 nt, Artificial Sequence
  Description of Artificial Sequence: Synthetic oligonucleotide
acagcaauagccuuggcug

SEQ ID NO: 375996 - RNA, 19 nt, Artificial Sequence
  Description of Artificial Sequence: Synthetic oligonucleotide
guaaucuacaaacgaaccg

SEQ ID NO: 375997 - RNA, 19 nt, Artificial Sequence
  Description of Artificial Sequence: Synthetic oligonucleotide
ucuggggaacagaagaccg

SEQ ID NO: 375998 - RNA, 19 nt, Artificial Sequence
  Description of Artificial Sequence: Synthetic oligonucleotide
agauuugguuaccaucucc

SEQ ID NO: 375999 - RNA, 19 nt, Artificial Sequence
  Description of Artificial Sequence: Synthetic oligonucleotide
ucuacaaacgaaccgucug

SEQ ID NO: 376000 - RNA, 19 nt, Artificial Sequence
  Description of Artificial Sequence: Synthetic oligonucleotide
aaucuucagggguagaggu

SEQ ID NO: 376001 - RNA, 19 nt, Artificial Sequence
  Description of Artificial Sequence: Synthetic oligonucleotide
uaaccauuggcacauuccc

SEQ ID NO: 376002 - RNA, 19 nt, Artificial Sequence
  Description of Artificial Sequence: Synthetic oligonucleotide
agcacgucggcucagauug

SEQ ID NO: 376003 - RNA, 19 nt, Artificial Sequence
  Description of Artificial Sequence: Synthetic oligonucleotide
uuagcugaggaaaugaguu

SEQ ID NO: 376004 - RNA, 19 nt, Artificial Sequence
  Description of Artificial Sequence: Synthetic oligonucleotide
uaaccaagacagaacagcc

SEQ ID NO: 376005 - RNA, 19 nt, Artificial Sequence
  Description of Artificial Sequence: Synthetic oligonucleotide
ucguaaccaagacagaaca

SEQ ID NO: 376006 - RNA, 19 nt, Artificial Sequence
  Description of Artificial Sequence: Synthetic oligonucleotide
cauaguaauacccuugguc

SEQ ID NO: 376007 - RNA, 19 nt, Artificial Sequence
  Description of Artificial Sequence: Synthetic oligonucleotide
ugguaaucuacaaacgaac

SEQ ID NO: 376008 - RNA, 19 nt, Artificial Sequence
  Description of Artificial Sequence: Synthetic oligonucleotide
auaaucugggcaaugcccc

SEQ ID NO: 376009 - RNA, 19 nt, Artificial Sequence
  Description of Artificial Sequence: Synthetic oligonucleotide
gauaaucugggcaaugccc

SEQ ID NO: 376010 - RNA, 19 nt, Artificial Sequence
  Description of Artificial Sequence: Synthetic oligonucleotide
ugacguaugugcucugugg

SEQ ID NO: 376011 - RNA, 19 nt, Artificial Sequence
  Description of Artificial Sequence: Synthetic oligonucleotide
uaauacucugggaagggac

SEQ ID NO: 376012 - RNA, 19 nt, Artificial Sequence
  Description of Artificial Sequence: Synthetic oligonucleotide
agcagcguuaauaauacuc

SEQ ID NO: 376013 - RNA, 19 nt, Artificial Sequence
  Description of Artificial Sequence: Synthetic oligonucleotide
agcguuaauacucugggaa

SEQ ID NO: 376014 - RNA, 19 nt, Artificial Sequence
  Description of Artificial Sequence: Synthetic oligonucleotide
aaacgaaccgucuggcuca

SEQ ID NO: 376015 - RNA, 19 nt, Artificial Sequence
  Description of Artificial Sequence: Synthetic oligonucleotide
ugaguguccugucaauugc

SEQ ID NO: 376016 - RNA, 19 nt, Artificial Sequence
  Description of Artificial Sequence: Synthetic oligonucleotide
guaaccaagacagaacagc

SEQ ID NO: 376017 - RNA, 19 nt, Artificial Sequence
  Description of Artificial Sequence: Synthetic oligonucleotide
guugucgucaggucgggcg

SEQ ID NO: 376018 - RNA, 19 nt, Artificial Sequence
  Description of Artificial Sequence: Synthetic oligonucleotide
gaaaucuucagggguagag

SEQ ID NO: 376019 - RNA, 19 nt, Artificial Sequence
  Description of Artificial Sequence: Synthetic oligonucleotide
cuacaaacgaaccgucugg

SEQ ID NO: 376020 - RNA, 19 nt, Artificial Sequence
  Description of Artificial Sequence: Synthetic oligonucleotide
ugggucugcauuaaauaga

SEQ ID NO: 376021 - RNA, 19 nt, Artificial Sequence
  Description of Artificial Sequence: Synthetic oligonucleotide
acagcagcguuaauaauac

SEQ ID NO: 376022 - RNA, 19 nt, Artificial Sequence
  Description of Artificial Sequence: Synthetic oligonucleotide
ugcaauagcacgucggcuc

SEQ ID NO: 376023 - RNA, 19 nt, Artificial Sequence
  Description of Artificial Sequence: Synthetic oligonucleotide
uguacucggugcuugauau

SEQ ID NO: 376024 - RNA, 19 nt, Artificial Sequence
  Description of Artificial Sequence: Synthetic oligonucleotide
ugguguuagauuugguuac

SEQ ID NO: 376025 - RNA, 19 nt, Artificial Sequence
  Description of Artificial Sequence: Synthetic oligonucleotide
ugguuguuugguaaucuac

SEQ ID NO: 376026 - RNA, 19 nt, Artificial Sequence
  Description of Artificial Sequence: Synthetic oligonucleotide
aauaauacucuuggagcgu

SEQ ID NO: 376027 - RNA, 19 nt, Artificial Sequence
  Description of Artificial Sequence: Synthetic oligonucleotide
uugacuacaucagcgagac

SEQ ID NO: 376028 - RNA, 19 nt, Artificial Sequence
  Description of Artificial Sequence: Synthetic oligonucleotide
acccauagguccuucaucu

SEQ ID NO: 376029 - RNA, 19 nt, Artificial Sequence
  Description of Artificial Sequence: Synthetic oligonucleotide
ggagcguuaauacucuggg

SEQ ID NO: 376030 - RNA, 19 nt, Artificial Sequence
  Description of Artificial Sequence: Synthetic oligonucleotide
guuacgacugcagagcacc

SEQ ID NO: 376031 - RNA, 19 nt, Artificial Sequence
  Description of Artificial Sequence: Synthetic oligonucleotide
ucggugcuugauaugagca

SEQ ID NO: 376032 - RNA, 19 nt, Artificial Sequence
  Description of Artificial Sequence: Synthetic oligonucleotide
gaugaguugagcugaugca

SEQ ID NO: 376033 - RNA, 19 nt, Artificial Sequence
  Description of Artificial Sequence: Synthetic oligonucleotide
ugccauaguaauacccuug

SEQ ID NO: 376034 - RNA, 19 nt, Artificial Sequence
  Description of Artificial Sequence: Synthetic oligonucleotide
ucggguuacgacugcagag

SEQ ID NO: 376035 - RNA, 19 nt, Artificial Sequence
  Description of Artificial Sequence: Synthetic oligonucleotide
cauagguccuucaucuagc

SEQ ID NO: 376036 - RNA, 19 nt, Artificial Sequence
  Description of Artificial Sequence: Synthetic oligonucleotide
guuaauacucugggaaggg

SEQ ID NO: 376037 - RNA, 19 nt, Artificial Sequence
  Description of Artificial Sequence: Synthetic oligonucleotide
agcauaucugcaauagcac

SEQ ID NO: 376038 - RNA, 19 nt, Artificial Sequence
  Description of Artificial Sequence: Synthetic oligonucleotide
gguacgaaggcacuuggag

SEQ ID NO: 376039 - RNA, 19 nt, Artificial Sequence
  Description of Artificial Sequence: Synthetic oligonucleotide
aucuagcugguugauggcc

SEQ ID NO: 376040 - RNA, 19 nt, Artificial Sequence
  Description of Artificial Sequence: Synthetic oligonucleotide
auauaguaucaaaauagga

SEQ ID NO: 376041 - RNA, 19 nt, Artificial Sequence
  Description of Artificial Sequence: Synthetic oligonucleotide
accaagacagaacagccau

SEQ ID NO: 376042 - RNA, 19 nt, Artificial Sequence
  Description of Artificial Sequence: Synthetic oligonucleotide
ugauaugagcaccuaucuc

SEQ ID NO: 376043 - RNA, 19 nt, Artificial Sequence
  Description of Artificial Sequence: Synthetic oligonucleotide
augaguugagcugaugcag

SEQ ID NO: 376044 - RNA, 19 nt, Artificial Sequence
  Description of Artificial Sequence: Synthetic oligonucleotide
gcauaucugcaauagcacg

SEQ ID NO: 376045 - RNA, 19 nt, Artificial Sequence
  Description of Artificial Sequence: Synthetic oligonucleotide
uuacuagugcacugguggc

SEQ ID NO: 376046 - RNA, 19 nt, Artificial Sequence
  Description of Artificial Sequence: Synthetic oligonucleotide
ucagcgagacggguaaugg

SEQ ID NO: 376047 - RNA, 19 nt, Artificial Sequence
  Description of Artificial Sequence: Synthetic oligonucleotide
caaacgaaccgucuggcuc

SEQ ID NO: 376048 - RNA, 19 nt, Artificial Sequence
  Description of Artificial Sequence: Synthetic oligonucleotide
uccagguaaccauuggcac

SEQ ID NO: 376049 - RNA, 19 nt, Artificial Sequence
  Description of Artificial Sequence: Synthetic oligonucleotide
ucguccagugcauuggcug

SEQ ID NO: 376050 - RNA, 19 nt, Artificial Sequence
  Description of Artificial Sequence: Synthetic oligonucleotide
uacucggugcuugauauga

SEQ ID NO: 376051 - RNA, 19 nt, Artificial Sequence
  Description of Artificial Sequence: Synthetic oligonucleotide
uugaucagcuuugaccuug

SEQ ID NO: 376052 - RNA, 19 nt, Artificial Sequence
  Description of Artificial Sequence: Synthetic oligonucleotide
aaccauuggcacauucccg

SEQ ID NO: 376053 - RNA, 19 nt, Artificial Sequence
  Description of Artificial Sequence: Synthetic oligonucleotide
auaucugcaauagcacguc

SEQ ID NO: 376054 - RNA, 19 nt, Artificial Sequence
  Description of Artificial Sequence: Synthetic oligonucleotide
cacauucccggccauagug

SEQ ID NO: 376055 - RNA, 19 nt, Artificial Sequence
  Description of Artificial Sequence: Synthetic oligonucleotide
gaagccguuucauugccuc

SEQ ID NO: 376056 - RNA, 19 nt, Artificial Sequence
  Description of Artificial Sequence: Synthetic oligonucleotide
uggucauucggaugaaauc

SEQ ID NO: 376057 - RNA, 19 nt, Artificial Sequence
  Description of Artificial Sequence: Synthetic oligonucleotide
agagcaccugccucguaac

SEQ ID NO: 376058 - RNA, 19 nt, Artificial Sequence
  Description of Artificial Sequence: Synthetic oligonucleotide
caaaguucaaggacucauc

SEQ ID NO: 376059 - RNA, 19 nt, Artificial Sequence
  Description of Artificial Sequence: Synthetic oligonucleotide
ggacuuggcagcuucuagg

SEQ ID NO: 376060 - RNA, 19 nt, Artificial Sequence
  Description of Artificial Sequence: Synthetic oligonucleotide
aguagcacgugguccagca

SEQ ID NO: 376061 - RNA, 19 nt, Artificial Sequence
  Description of Artificial Sequence: Synthetic oligonucleotide
ucauucggaugaaaucuuc

SEQ ID NO: 376062 - RNA, 19 nt, Artificial Sequence
  Description of Artificial Sequence: Synthetic oligonucleotide
gguaaucuacaaacgaacc

SEQ ID NO: 376063 - RNA, 19 nt, Artificial Sequence
  Description of Artificial Sequence: Synthetic oligonucleotide
gcuucauugaggguugucg

SEQ ID NO: 376064 - RNA, 19 nt, Artificial Sequence
  Description of Artificial Sequence: Synthetic oligonucleotide
uacaaacgaaccgucuggc

SEQ ID NO: 376065 - RNA, 19 nt, Artificial Sequence
  Description of Artificial Sequence: Synthetic oligonucleotide
cuuugaccuugcaagcuac

SEQ ID NO: 376066 - RNA, 19 nt, Artificial Sequence
  Description of Artificial Sequence: Synthetic oligonucleotide
uuaauacucugggaaggga

SEQ ID NO: 376067 - RNA, 19 nt, Artificial Sequence
  Description of Artificial Sequence: Synthetic oligonucleotide
acauucccggccauagugc

SEQ ID NO: 376068 - RNA, 19 nt, Artificial Sequence
  Description of Artificial Sequence: Synthetic oligonucleotide
cucggugcuugauaugagc

SEQ ID NO: 376069 - RNA, 19 nt, Artificial Sequence
  Description of Artificial Sequence: Synthetic oligonucleotide
uccaucguccagugcauug

SEQ ID NO: 376070 - RNA, 19 nt, Artificial Sequence
  Description of Artificial Sequence: Synthetic oligonucleotide
ucuaggauuuguuccucaa

SEQ ID NO: 376071 - RNA, 19 nt, Artificial Sequence
  Description of Artificial Sequence: Synthetic oligonucleotide
agcuugacuacaucagcga

SEQ ID NO: 376072 - RNA, 19 nt, Artificial Sequence
  Description of Artificial Sequence: Synthetic oligonucleotide
aggguacgaaggcacuugg

SEQ ID NO: 376073 - RNA, 19 nt, Artificial Sequence
  Description of Artificial Sequence: Synthetic oligonucleotide
aauacucuuggagcguuaa

SEQ ID NO: 376074 - RNA, 19 nt, Artificial Sequence
  Description of Artificial Sequence: Synthetic oligonucleotide
agcaccuaucucuucauuu

SEQ ID NO: 376075 - RNA, 19 nt, Artificial Sequence
  Description of Artificial Sequence: Synthetic oligonucleotide
cuugacuacaucagcgaga

SEQ ID NO: 376076 - RNA, 19 nt, Artificial Sequence
  Description of Artificial Sequence: Synthetic oligonucleotide
ugagguacagcagcguuaa

SEQ ID NO: 376077 - RNA, 19 nt, Artificial Sequence
  Description of Artificial Sequence: Synthetic oligonucleotide
ggcagguucaaauugaggu

SEQ ID NO: 376078 - RNA, 19 nt, Artificial Sequence
  Description of Artificial Sequence: Synthetic oligonucleotide
cugguguuagauuugguua

SEQ ID NO: 376079 - RNA, 19 nt, Artificial Sequence
  Description of Artificial Sequence: Synthetic oligonucleotide
uauuggagcaugaccuuuu

SEQ ID NO: 376080 - RNA, 19 nt, Artificial Sequence
  Description of Artificial Sequence: Synthetic oligonucleotide
acaucagcgagacggguaa

SEQ ID NO: 376081 - RNA, 19 nt, Artificial Sequence
  Description of Artificial Sequence: Synthetic oligonucleotide
uaguaauacccuuggucau

SEQ ID NO: 376082 - RNA, 19 nt, Artificial Sequence
  Description of Artificial Sequence: Synthetic oligonucleotide
ucuuccugugcugcgauaa

SEQ ID NO: 376083 - RNA, 19 nt, Artificial Sequence
  Description of Artificial Sequence: Synthetic oligonucleotide
gucaguagcacguggucca

SEQ ID NO: 376084 - RNA, 19 nt, Artificial Sequence
  Description of Artificial Sequence: Synthetic oligonucleotide
cuuaggggcccuaggguac

SEQ ID NO: 376085 - RNA, 19 nt, Artificial Sequence
  Description of Artificial Sequence: Synthetic oligonucleotide
cagcugguuggcgagaggg

SEQ ID NO: 376086 - RNA, 19 nt, Artificial Sequence
  Description of Artificial Sequence: Synthetic oligonucleotide
auagguccuucaucuagcu

SEQ ID NO: 376087 - RNA, 19 nt, Artificial Sequence
  Description of Artificial Sequence: Synthetic oligonucleotide
uacaucagcgagacgggua

SEQ ID NO: 376088 - RNA, 19 nt, Artificial Sequence
  Description of Artificial Sequence: Synthetic oligonucleotide
acuuaggggcccuagggua

SEQ ID NO: 376089 - RNA, 19 nt, Artificial Sequence
  Description of Artificial Sequence: Synthetic oligonucleotide
gaagcggcuggcagggugg

SEQ ID NO: 376090 - RNA, 19 nt, Artificial Sequence
  Description of Artificial Sequence: Synthetic oligonucleotide
cacacagauuguugguggc

SEQ ID NO: 376091 - RNA, 19 nt, Artificial Sequence
  Description of Artificial Sequence: Synthetic oligonucleotide
gaguucuugagcugccaca

SEQ ID NO: 376092 - RNA, 19 nt, Artificial Sequence
  Description of Artificial Sequence: Synthetic oligonucleotide
agcgagacggguaauggug

SEQ ID NO: 376093 - RNA, 19 nt, Artificial Sequence
  Description of Artificial Sequence: Synthetic oligonucleotide
uugucgucaggucgggcga

SEQ ID NO: 376094 - RNA, 19 nt, Artificial Sequence
  Description of Artificial Sequence: Synthetic oligonucleotide
acuacaucagcgagacggg

SEQ ID NO: 376095 - RNA, 19 nt, Artificial Sequence
  Description of Artificial Sequence: Synthetic oligonucleotide
cuggcagguucaaauugag

SEQ ID NO: 376096 - RNA, 19 nt, Artificial Sequence
  Description of Artificial Sequence: Synthetic oligonucleotide
aaccgucuggcucacccau

SEQ ID NO: 376097 - RNA, 19 nt, Artificial Sequence
  Description of Artificial Sequence: Synthetic oligonucleotide
agcaugaccuuuuggguuu

SEQ ID NO: 376098 - RNA, 19 nt, Artificial Sequence
  Description of Artificial Sequence: Synthetic oligonucleotide
gauuugguuaccaucuccu

SEQ ID NO: 376099 - RNA, 19 nt, Artificial Sequence
  Description of Artificial Sequence: Synthetic oligonucleotide
ucccuagugcucaucucga

SEQ ID NO: 376100 - RNA, 19 nt, Artificial Sequence
  Description of Artificial Sequence: Synthetic oligonucleotide
acaaacgaaccgucuggcu

SEQ ID NO: 376101 - RNA, 19 nt, Artificial Sequence
  Description of Artificial Sequence: Synthetic oligonucleotide
cuggggaacagaagaccgc

SEQ ID NO: 376102 - RNA, 19 nt, Artificial Sequence
  Description of Artificial Sequence: Synthetic oligonucleotide
acucucguuccuuccgaag

SEQ ID NO: 376103 - RNA, 19 nt, Artificial Sequence
  Description of Artificial Sequence: Synthetic oligonucleotide
cauaucugcaauagcacgu

SEQ ID NO: 376104 - RNA, 19 nt, Artificial Sequence
  Description of Artificial Sequence: Synthetic oligonucleotide
ccaagcuugacuacaucag

SEQ ID NO: 376105 - RNA, 19 nt, Artificial Sequence
  Description of Artificial Sequence: Synthetic oligonucleotide
uccauagguagcuggggua

SEQ ID NO: 376106 - RNA, 19 nt, Artificial Sequence
  Description of Artificial Sequence: Synthetic oligonucleotide
ggccauagugcagagcucg

SEQ ID NO: 376107 - RNA, 19 nt, Artificial Sequence
  Description of Artificial Sequence: Synthetic oligonucleotide
accaugccaccaacgaccc

SEQ ID NO: 376108 - RNA, 19 nt, Artificial Sequence
  Description of Artificial Sequence: Synthetic oligonucleotide
ucacccauagguccuucau

SEQ ID NO: 376109 - RNA, 19 nt, Artificial Sequence
  Description of Artificial Sequence: Synthetic oligonucleotide
agggcuugcagugggacug

SEQ ID NO: 376110 - RNA, 19 nt, Artificial Sequence
  Description of Artificial Sequence: Synthetic oligonucleotide
ggguaggccauauaguauc

SEQ ID NO: 376111 - RNA, 19 nt, Artificial Sequence
  Description of Artificial Sequence: Synthetic oligonucleotide
gcguuaauacucugggaag

SEQ ID NO: 376112 - RNA, 19 nt, Artificial Sequence
  Description of Artificial Sequence: Synthetic oligonucleotide
caucuagcugguugauggc

SEQ ID NO: 376113 - RNA, 19 nt, Artificial Sequence
  Description of Artificial Sequence: Synthetic oligonucleotide
uuggcgagagggcccagcu

SEQ ID NO: 376114 - RNA, 19 nt, Artificial Sequence
  Description of Artificial Sequence: Synthetic oligonucleotide
aauagcacgucggcucaga

SEQ ID NO: 376115 - RNA, 19 nt, Artificial Sequence
  Description of Artificial Sequence: Synthetic oligonucleotide
guaugugcucugugguugc

SEQ ID NO: 376116 - RNA, 19 nt, Artificial Sequence
  Description of Artificial Sequence: Synthetic oligonucleotide
ugaagccguuucauugccu

SEQ ID NO: 376117 - RNA, 19 nt, Artificial Sequence
  Description of Artificial Sequence: Synthetic oligonucleotide
agucacugagccagccacc

SEQ ID NO: 376118 - RNA, 19 nt, Artificial Sequence
  Description of Artificial Sequence: Synthetic oligonucleotide
cuagugcucaucucgaagu

SEQ ID NO: 376119 - RNA, 19 nt, Artificial Sequence
  Description of Artificial Sequence: Synthetic oligonucleotide
agcuagucggccauaguca

SEQ ID NO: 376120 - RNA, 19 nt, Artificial Sequence
  Description of Artificial Sequence: Synthetic oligonucleotide
aucacucggguuacgacug

SEQ ID NO: 376121 - RNA, 19 nt, Artificial Sequence
  Description of Artificial Sequence: Synthetic oligonucleotide
cauugaggguugucgucag

SEQ ID NO: 376122 - RNA, 19 nt, Artificial Sequence
  Description of Artificial Sequence: Synthetic oligonucleotide
cagcuucuaggauuuguuc

SEQ ID NO: 376123 - RNA, 19 nt, Artificial Sequence
  Description of Artificial Sequence: Synthetic oligonucleotide
caagcccgaagcauaucug

SEQ ID NO: 376124 - RNA, 19 nt, Artificial Sequence
  Description of Artificial Sequence: Synthetic oligonucleotide
gcugcugcgauggacuugg

SEQ ID NO: 376125 - RNA, 19 nt, Artificial Sequence
  Description of Artificial Sequence: Synthetic oligonucleotide
aacucucguuccuuccgaa

SEQ ID NO: 376126 - RNA, 19 nt, Artificial Sequence
  Description of Artificial Sequence: Synthetic oligonucleotide
guucaaggacucaucugcc

SEQ ID NO: 376127 - RNA, 19 nt, Artificial Sequence
  Description of Artificial Sequence: Synthetic oligonucleotide
ugcgauaaucugggcaaug

SEQ ID NO: 376128 - RNA, 19 nt, Artificial Sequence
  Description of Artificial Sequence: Synthetic oligonucleotide
cuggguggaaggcugcuuc

SEQ ID NO: 376129 - RNA, 19 nt, Artificial Sequence
  Description of Artificial Sequence: Synthetic oligonucleotide
gguuguuugguaaucuaca

SEQ ID NO: 376130 - RNA, 19 nt, Artificial Sequence
  Description of Artificial Sequence: Synthetic oligonucleotide
auugccucagagucuugau

SEQ ID NO: 376131 - RNA, 19 nt, Artificial Sequence
  Description of Artificial Sequence: Synthetic oligonucleotide
ccauagguccuucaucuag

SEQ ID NO: 376132 - RNA, 19 nt, Artificial Sequence
  Description of Artificial Sequence: Synthetic oligonucleotide
agacggguaaugguggcca

SEQ ID NO: 376133 - RNA, 19 nt, Artificial Sequence
  Description of Artificial Sequence: Synthetic oligonucleotide
uuggagcguuaauacucug

SEQ ID NO: 376134 - RNA, 19 nt, Artificial Sequence
  Description of Artificial Sequence: Synthetic oligonucleotide
ugccucuagggcccgugug

SEQ ID NO: 376135 - RNA, 19 nt, Artificial Sequence
  Description of Artificial Sequence: Synthetic oligonucleotide
cugacguaugugcucugug

SEQ ID NO: 376136 - RNA, 19 nt, Artificial Sequence
  Description of Artificial Sequence: Synthetic oligonucleotide
agaccgccagcuccugacg

SEQ ID NO: 376137 - RNA, 19 nt, Artificial Sequence
  Description of Artificial Sequence: Synthetic oligonucleotide
gcugcgauaaucugggcaa

SEQ ID NO: 376138 - RNA, 19 nt, Artificial Sequence
  Description of Artificial Sequence: Synthetic oligonucleotide
gagcguuaauacucuggga

SEQ ID NO: 376139 - RNA, 19 nt, Artificial Sequence
  Description of Artificial Sequence: Synthetic oligonucleotide
uuacgacugcagagcaccu

SEQ ID NO: 376140 - RNA, 19 nt, Artificial Sequence
  Description of Artificial Sequence: Synthetic oligonucleotide
uguccaucguccagugcau

SEQ ID NO: 376141 - RNA, 19 nt, Artificial Sequence
  Description of Artificial Sequence: Synthetic oligonucleotide
aacgaaccgucuggcucac

SEQ ID NO: 376142 - RNA, 19 nt, Artificial Sequence
  Description of Artificial Sequence: Synthetic oligonucleotide
auaauacucuuggagcguu

SEQ ID NO: 376143 - RNA, 19 nt, Artificial Sequence
  Description of Artificial Sequence: Synthetic oligonucleotide
gccuucguugcacugauga

SEQ ID NO: 376144 - RNA, 19 nt, Artificial Sequence
  Description of Artificial Sequence: Synthetic oligonucleotide
uguuccuuucauggccuca

SEQ ID NO: 376145 - RNA, 19 nt, Artificial Sequence
  Description of Artificial Sequence: Synthetic oligonucleotide
aucagcgagacggguaaug

SEQ ID NO: 376146 - RNA, 19 nt, Artificial Sequence
  Description of Artificial Sequence: Synthetic oligonucleotide
uaauacucuuggagcguua

SEQ ID NO: 376147 - RNA, 19 nt, Artificial Sequence
  Description of Artificial Sequence: Synthetic oligonucleotide
gacaucacucggguuacga

SEQ ID NO: 376148 - RNA, 19 nt, Artificial Sequence
  Description of Artificial Sequence: Synthetic oligonucleotide
cuagcugguugauggccug

SEQ ID NO: 376149 - RNA, 19 nt, Artificial Sequence
  Description of Artificial Sequence: Synthetic oligonucleotide
ggaugaaaucuucaggggu

SEQ ID NO: 376150 - RNA, 19 nt, Artificial Sequence
  Description of Artificial Sequence: Synthetic oligonucleotide
uagucacuggucagcuggu

SEQ ID NO: 376151 - RNA, 19 nt, Artificial Sequence
  Description of Artificial Sequence: Synthetic oligonucleotide
ggucauucggaugaaaucu

SEQ ID NO: 376152 - RNA, 19 nt, Artificial Sequence
  Description of Artificial Sequence: Synthetic oligonucleotide
guacgaaggcacuuggagu

SEQ ID NO: 376153 - RNA, 19 nt, Artificial Sequence
  Description of Artificial Sequence: Synthetic oligonucleotide
gagacggguaaugguggcc

SEQ ID NO: 376154 - RNA, 19 nt, Artificial Sequence
  Description of Artificial Sequence: Synthetic oligonucleotide
aucaccuuuauuggagcau

SEQ ID NO: 376155 - RNA, 19 nt, Artificial Sequence
  Description of Artificial Sequence: Synthetic oligonucleotide
cguuaauacucugggaagg

SEQ ID NO: 376156 - RNA, 19 nt, Artificial Sequence
  Description of Artificial Sequence: Synthetic oligonucleotide
agcaccaccugaguuucug

SEQ ID NO: 376157 - RNA, 19 nt, Artificial Sequence
  Description of Artificial Sequence: Synthetic oligonucleotide
caucacucggguuacgacu

SEQ ID NO: 376158 - RNA, 19 nt, Artificial Sequence
  Description of Artificial Sequence: Synthetic oligonucleotide
cauagguagcugggguagg

SEQ ID NO: 376159 - RNA, 19 nt, Artificial Sequence
  Description of Artificial Sequence: Synthetic oligonucleotide
ugcgggcagcagaaaugag

SEQ ID NO: 376160 - RNA, 19 nt, Artificial Sequence
  Description of Artificial Sequence: Synthetic oligonucleotide
ggucaguagcacguggucc

SEQ ID NO: 376161 - RNA, 19 nt, Artificial Sequence
  Description of Artificial Sequence: Synthetic oligonucleotide
acccuuggucauucggaug

SEQ ID NO: 376162 - RNA, 19 nt, Artificial Sequence
  Description of Artificial Sequence: Synthetic oligonucleotide
acacagauuguugguggcu

SEQ ID NO: 376163 - RNA, 19 nt, Artificial Sequence
  Description of Artificial Sequence: Synthetic oligonucleotide
ccuagugcucaucucgaag

SEQ ID NO: 376164 - RNA, 19 nt, Artificial Sequence
  Description of Artificial Sequence: Synthetic oligonucleotide
cuucauugaggguugucgu

SEQ ID NO: 376165 - RNA, 19 nt, Artificial Sequence
  Description of Artificial Sequence: Synthetic oligonucleotide
ucacucggguuacgacugc

SEQ ID NO: 376166 - RNA, 19 nt, Artificial Sequence
  Description of Artificial Sequence: Synthetic oligonucleotide
cacaccgcagggucauccc

SEQ ID NO: 376167 - RNA, 19 nt, Artificial Sequence
  Description of Artificial Sequence: Synthetic oligonucleotide
uuaggggagugcugggguu

SEQ ID NO: 376168 - RNA, 19 nt, Artificial Sequence
  Description of Artificial Sequence: Synthetic oligonucleotide
ugcgauggacuuggcagcu

SEQ ID NO: 376169 - RNA, 19 nt, Artificial Sequence
  Description of Artificial Sequence: Synthetic oligonucleotide
gcuagucggccauagucac

SEQ ID NO: 376170 - RNA, 19 nt, Artificial Sequence
  Description of Artificial Sequence: Synthetic oligonucleotide
ccguguagacaucacucgg

SEQ ID NO: 376171 - RNA, 19 nt, Artificial Sequence
  Description of Artificial Sequence: Synthetic oligonucleotide
auacucuuggagcguuaau

SEQ ID NO: 376172 - RNA, 19 nt, Artificial Sequence
  Description of Artificial Sequence: Synthetic oligonucleotide
ggcacauucccggccauag

SEQ ID NO: 376173 - RNA, 19 nt, Artificial Sequence
  Description of Artificial Sequence: Synthetic oligonucleotide
uaugugcucugugguugcc

SEQ ID NO: 376174 - RNA, 19 nt, Artificial Sequence
  Description of Artificial Sequence: Synthetic oligonucleotide
aggucgggcgagcugugca

SEQ ID NO: 376175 - RNA, 19 nt, Artificial Sequence
  Description of Artificial Sequence: Synthetic oligonucleotide
gcgauaaucugggcaaugc

SEQ ID NO: 376176 - RNA, 19 nt, Artificial Sequence
  Description of Artificial Sequence: Synthetic oligonucleotide
ggcuccuaggagcucauuc

SEQ ID NO: 376177 - RNA, 19 nt, Artificial Sequence
  Description of Artificial Sequence: Synthetic oligonucleotide
cgaagcauaucugcaauag

SEQ ID NO: 376178 - RNA, 19 nt, Artificial Sequence
  Description of Artificial Sequence: Synthetic oligonucleotide
gguguuagauuugguuacc

SEQ ID NO: 376179 - RNA, 19 nt, Artificial Sequence
  Description of Artificial Sequence: Synthetic oligonucleotide
gaaccgucuggcucaccca

SEQ ID NO: 376180 - RNA, 19 nt, Artificial Sequence
  Description of Artificial Sequence: Synthetic oligonucleotide
guagcacgugguccagcag

SEQ ID NO: 376181 - RNA, 19 nt, Artificial Sequence
  Description of Artificial Sequence: Synthetic oligonucleotide
caccaugguuguuugguaa

SEQ ID NO: 376182 - RNA, 19 nt, Artificial Sequence
  Description of Artificial Sequence: Synthetic oligonucleotide
cuucccuagugcucaucuc

SEQ ID NO: 376183 - RNA, 19 nt, Artificial Sequence
  Description of Artificial Sequence: Synthetic oligonucleotide
guacucggugcuugauaug

SEQ ID NO: 376184 - RNA, 19 nt, Artificial Sequence
  Description of Artificial Sequence: Synthetic oligonucleotide
guguagacaucacucgggu

SEQ ID NO: 376185 - RNA, 19 nt, Artificial Sequence
  Description of Artificial Sequence: Synthetic oligonucleotide
uccuggcuagcauggcccu

SEQ ID NO: 376186 - RNA, 19 nt, Artificial Sequence
  Description of Artificial Sequence: Synthetic oligonucleotide
auagcacgucggcucagau

SEQ ID NO: 376187 - RNA, 19 nt, Artificial Sequence
  Description of Artificial Sequence: Synthetic oligonucleotide
caccuuuccuugagccacc

SEQ ID NO: 376188 - RNA, 19 nt, Artificial Sequence
  Description of Artificial Sequence: Synthetic oligonucleotide
ggcccuaggguacgaaggc

SEQ ID NO: 376189 - RNA, 19 nt, Artificial Sequence
  Description of Artificial Sequence: Synthetic oligonucleotide
gggcccuaggguacgaagg

SEQ ID NO: 376190 - RNA, 19 nt, Artificial Sequence
  Description of Artificial Sequence: Synthetic oligonucleotide
augaccuuuuggguuuaca

SEQ ID NO: 376191 - RNA, 19 nt, Artificial Sequence
  Description of Artificial Sequence: Synthetic oligonucleotide
cucggguuacgacugcaga

SEQ ID NO: 376192 - RNA, 19 nt, Artificial Sequence
  Description of Artificial Sequence: Synthetic oligonucleotide
acucggguuacgacugcag

SEQ ID NO: 376193 - RNA, 19 nt, Artificial Sequence
  Description of Artificial Sequence: Synthetic oligonucleotide
uagcacgucggcucagauu

SEQ ID NO: 376194 - RNA, 19 nt, Artificial Sequence
  Description of Artificial Sequence: Synthetic oligonucleotide
aacgaccccugcagcacug

SEQ ID NO: 376195 - RNA, 19 nt, Artificial Sequence
  Description of Artificial Sequence: Synthetic oligonucleotide
ucaggucgggcgagcugug

SEQ ID NO: 376196 - RNA, 19 nt, Artificial Sequence
  Description of Artificial Sequence: Synthetic oligonucleotide
uaccugcuuagcugaggaa

SEQ ID NO: 376197 - RNA, 19 nt, Artificial Sequence
  Description of Artificial Sequence: Synthetic oligonucleotide
ucuagggcccgugugccuu

SEQ ID NO: 376198 - RNA, 19 nt, Artificial Sequence
  Description of Artificial Sequence: Synthetic oligonucleotide
gcgagacggguaauggugg

SEQ ID NO: 376199 - RNA, 19 nt, Artificial Sequence
  Description of Artificial Sequence: Synthetic oligonucleotide
cagagcaccugccucguaa

SEQ ID NO: 376200 - RNA, 19 nt, Artificial Sequence
  Description of Artificial Sequence: Synthetic oligonucleotide
ugguggccaccgaggacug

SEQ ID NO: 376201 - RNA, 19 nt, Artificial Sequence
  Description of Artificial Sequence: Synthetic oligonucleotide
ucauugccucagagucuug

SEQ ID NO: 376202 - RNA, 19 nt, Artificial Sequence
  Description of Artificial Sequence: Synthetic oligonucleotide
cguaaccaagacagaacag

SEQ ID NO: 376203 - RNA, 19 nt, Artificial Sequence
  Description of Artificial Sequence: Synthetic oligonucleotide
gccaccgaggacugggcag

SEQ ID NO: 376204 - RNA, 19 nt, Artificial Sequence
  Description of Artificial Sequence: Synthetic oligonucleotide
cugccucguaaccaagaca

SEQ ID NO: 376205 - RNA, 19 nt, Artificial Sequence
  Description of Artificial Sequence: Synthetic oligonucleotide
cagagcucgaagccgcaca

SEQ ID NO: 376206 - RNA, 19 nt, Artificial Sequence
  Description of Artificial Sequence: Synthetic oligonucleotide
cgaaccgucuggcucaccc

SEQ ID NO: 376207 - RNA, 19 nt, Artificial Sequence
  Description of Artificial Sequence: Synthetic oligonucleotide
ggagcaugaccuuuugggu

SEQ ID NO: 376208 - RNA, 19 nt, Artificial Sequence
  Description of Artificial Sequence: Synthetic oligonucleotide
cuccuguacucggugcuug

SEQ ID NO: 376209 - RNA, 19 nt, Artificial Sequence
  Description of Artificial Sequence: Synthetic oligonucleotide
ccuucguugcacugaugag

SEQ ID NO: 376210 - RNA, 19 nt, Artificial Sequence
  Description of Artificial Sequence: Synthetic oligonucleotide
ccaccuuuccuugagccac

SEQ ID NO: 376211 - RNA, 19 nt, Artificial Sequence
  Description of Artificial Sequence: Synthetic oligonucleotide
uggcgcccaccuuuccuug

SEQ ID NO: 376212 - RNA, 19 nt, Artificial Sequence
  Description of Artificial Sequence: Synthetic oligonucleotide
gcagcguuaauaauacucu

SEQ ID NO: 376213 - RNA, 19 nt, Artificial Sequence
  Description of Artificial Sequence: Synthetic oligonucleotide
gcaauagcacgucggcuca

SEQ ID NO: 376214 - RNA, 19 nt, Artificial Sequence
  Description of Artificial Sequence: Synthetic oligonucleotide
acucggugcuugauaugag

SEQ ID NO: 376215 - RNA, 19 nt, Artificial Sequence
  Description of Artificial Sequence: Synthetic oligonucleotide
ggggcccuaggguacgaag

SEQ ID NO: 376216 - RNA, 19 nt, Artificial Sequence
  Description of Artificial Sequence: Synthetic oligonucleotide
uccugacguaugugcucug

SEQ ID NO: 376217 - RNA, 19 nt, Artificial Sequence
  Description of Artificial Sequence: Synthetic oligonucleotide
gcaagcccgaagcauaucu

SEQ ID NO: 376218 - RNA, 19 nt, Artificial Sequence
  Description of Artificial Sequence: Synthetic oligonucleotide
gcuaccugcuuagcugagg

SEQ ID NO: 376219 - RNA, 19 nt, Artificial Sequence
  Description of Artificial Sequence: Synthetic oligonucleotide
ugcuugauaugagcaccua

SEQ ID NO: 376220 - RNA, 19 nt, Artificial Sequence
  Description of Artificial Sequence: Synthetic oligonucleotide
ggcgagagggcccagcucu

SEQ ID NO: 376221 - RNA, 19 nt, Artificial Sequence
  Description of Artificial Sequence: Synthetic oligonucleotide
ggguuacgacugcagagca

SEQ ID NO: 376222 - RNA, 19 nt, Artificial Sequence
  Description of Artificial Sequence: Synthetic oligonucleotide
caaguugucugaggcccuc

SEQ ID NO: 376223 - RNA, 19 nt, Artificial Sequence
  Description of Artificial Sequence: Synthetic oligonucleotide
guugccucuagggcccgug

SEQ ID NO: 376224 - RNA, 19 nt, Artificial Sequence
  Description of Artificial Sequence: Synthetic oligonucleotide
ccugccucguaaccaagac

SEQ ID NO: 376225 - RNA, 19 nt, Artificial Sequence
  Description of Artificial Sequence: Synthetic oligonucleotide
caccaugcgggcagcagaa

SEQ ID NO: 376226 - RNA, 19 nt, Artificial Sequence
  Description of Artificial Sequence: Synthetic oligonucleotide
uggcgagagggcccagcuc

SEQ ID NO: 376227 - RNA, 19 nt, Artificial Sequence
  Description of Artificial Sequence: Synthetic oligonucleotide
guuggcgagagggcccagc

SEQ ID NO: 376228 - RNA, 19 nt, Artificial Sequence
  Description of Artificial Sequence: Synthetic oligonucleotide
gaagcuagucggccauagu

SEQ ID NO: 376229 - RNA, 19 nt, Artificial Sequence
  Description of Artificial Sequence: Synthetic oligonucleotide
gucggcucagauuggcugu

SEQ ID NO: 376230 - RNA, 19 nt, Artificial Sequence
  Description of Artificial Sequence: Synthetic oligonucleotide
cuguacucggugcuugaua

SEQ ID NO: 376231 - RNA, 19 nt, Artificial Sequence
  Description of Artificial Sequence: Synthetic oligonucleotide
acccgcuuugaguguccug

SEQ ID NO: 376232 - RNA, 19 nt, Artificial Sequence
  Description of Artificial Sequence: Synthetic oligonucleotide
gcuccuaggagcucauucu

SEQ ID NO: 376233 - RNA, 19 nt, Artificial Sequence
  Description of Artificial Sequence: Synthetic oligonucleotide
aggcacuuaggggcccuag

SEQ ID NO: 376234 - RNA, 19 nt, Artificial Sequence
  Description of Artificial Sequence: Synthetic oligonucleotide
gucaggucgggcgagcugu

SEQ ID NO: 376235 - RNA, 19 nt, Artificial Sequence
  Description of Artificial Sequence: Synthetic oligonucleotide
ccguuucauugccucagag

SEQ ID NO: 376236 - RNA, 19 nt, Artificial Sequence
  Description of Artificial Sequence: Synthetic oligonucleotide
gggucaguagcacgugguc

SEQ ID NO: 376237 - RNA, 19 nt, Artificial Sequence
  Description of Artificial Sequence: Synthetic oligonucleotide
ugccacaccgcagggucau

SEQ ID NO: 376238 - RNA, 19 nt, Artificial Sequence
  Description of Artificial Sequence: Synthetic oligonucleotide
ucgucaggucgggcgagcu

SEQ ID NO: 376239 - RNA, 19 nt, Artificial Sequence
  Description of Artificial Sequence: Synthetic oligonucleotide
accugccucguaaccaaga

SEQ ID NO: 376240 - RNA, 19 nt, Artificial Sequence
  Description of Artificial Sequence: Synthetic oligonucleotide
cuuugaguguccugucaau

SEQ ID NO: 376241 - RNA, 19 nt, Artificial Sequence
  Description of Artificial Sequence: Synthetic oligonucleotide
cugcauugaucagcaccac

SEQ ID NO: 376242 - RNA, 19 nt, Artificial Sequence
  Description of Artificial Sequence: Synthetic oligonucleotide
gcgagcugugcaauagggc

SEQ ID NO: 376243 - RNA, 19 nt, Artificial Sequence
  Description of Artificial Sequence: Synthetic oligonucleotide
cacuuaggggcccuagggu

SEQ ID NO: 376244 - RNA, 19 nt, Artificial Sequence
  Description of Artificial Sequence: Synthetic oligonucleotide
agggcccgugugccuuugg

SEQ ID NO: 376245 - RNA, 19 nt, Artificial Sequence
  Description of Artificial Sequence: Synthetic oligonucleotide
cggguuacgacugcagagc

SEQ ID NO: 376246 - RNA, 19 nt, Artificial Sequence
  Description of Artificial Sequence: Synthetic oligonucleotide
agcuaccugcuuagcugag

SEQ ID NO: 376247 - RNA, 19 nt, Artificial Sequence
  Description of Artificial Sequence: Synthetic oligonucleotide
ucgggcgagcugugcaaua

SEQ ID NO: 376248 - RNA, 19 nt, Artificial Sequence
  Description of Artificial Sequence: Synthetic oligonucleotide
guaggccauauaguaucaa

SEQ ID NO: 376249 - RNA, 19 nt, Artificial Sequence
  Description of Artificial Sequence: Synthetic oligonucleotide
ugcaagcccgaagcauauc

SEQ ID NO: 376250 - RNA, 19 nt, Artificial Sequence
  Description of Artificial Sequence: Synthetic oligonucleotide
cggguaaugguggccaccg

SEQ ID NO: 376251 - RNA, 19 nt, Artificial Sequence
  Description of Artificial Sequence: Synthetic oligonucleotide
gaccgccagcuccugacgu

SEQ ID NO: 376252 - RNA, 19 nt, Artificial Sequence
  Description of Artificial Sequence: Synthetic oligonucleotide
gguuacgacugcagagcac

SEQ ID NO: 376253 - RNA, 19 nt, Artificial Sequence
  Description of Artificial Sequence: Synthetic oligonucleotide
gucggccauagucacuggu

SEQ ID NO: 376254 - RNA, 19 nt, Artificial Sequence
  Description of Artificial Sequence: Synthetic oligonucleotide
cuuggucauucggaugaaa

SEQ ID NO: 376255 - RNA, 19 nt, Artificial Sequence
  Description of Artificial Sequence: Synthetic oligonucleotide
acgaaccgucuggcucacc

SEQ ID NO: 376256 - RNA, 19 nt, Artificial Sequence
  Description of Artificial Sequence: Synthetic oligonucleotide
cagcguuaauaauacucuu

SEQ ID NO: 376257 - RNA, 19 nt, Artificial Sequence
  Description of Artificial Sequence: Synthetic oligonucleotide
ccaugguuguuugguaauc

SEQ ID NO: 376258 - RNA, 19 nt, Artificial Sequence
  Description of Artificial Sequence: Synthetic oligonucleotide
gcaccuaucucuucauuuu

SEQ ID NO: 376259 - RNA, 19 nt, Artificial Sequence
  Description of Artificial Sequence: Synthetic oligonucleotide
ccacaccgcagggucaucc

SEQ ID NO: 376260 - RNA, 19 nt, Artificial Sequence
  Description of Artificial Sequence: Synthetic oligonucleotide
guccagugcauuggcugga

SEQ ID NO: 376261 - RNA, 19 nt, Artificial Sequence
  Description of Artificial Sequence: Synthetic oligonucleotide
ccaacgaccccugcagcac

SEQ ID NO: 376262 - RNA, 19 nt, Artificial Sequence
  Description of Artificial Sequence: Synthetic oligonucleotide
cgagacggguaaugguggc

SEQ ID NO: 376263 - RNA, 19 nt, Artificial Sequence
  Description of Artificial Sequence: Synthetic oligonucleotide
gcgcccaccuuuccuugag

SEQ ID NO: 376264 - RNA, 19 nt, Artificial Sequence
  Description of Artificial Sequence: Synthetic oligonucleotide
gucauucggaugaaaucuu

SEQ ID NO: 376265 - RNA, 19 nt, Artificial Sequence
  Description of Artificial Sequence: Synthetic oligonucleotide
caccugaguuucugggucu

SEQ ID NO: 376266 - RNA, 19 nt, Artificial Sequence
  Description of Artificial Sequence: Synthetic oligonucleotide
cagcgagacggguaauggu

SEQ ID NO: 376267 - RNA, 19 nt, Artificial Sequence
  Description of Artificial Sequence: Synthetic oligonucleotide
ggguugucgucaggucggg

SEQ ID NO: 376268 - RNA, 19 nt, Artificial Sequence
  Description of Artificial Sequence: Synthetic oligonucleotide
cacucggguuacgacugca

SEQ ID NO: 376269 - RNA, 19 nt, Artificial Sequence
  Description of Artificial Sequence: Synthetic oligonucleotide
cugcaauagcacgucggcu

SEQ ID NO: 376270 - RNA, 19 nt, Artificial Sequence
  Description of Artificial Sequence: Synthetic oligonucleotide
uaggggcccuaggguacga

SEQ ID NO: 376271 - RNA, 19 nt, Artificial Sequence
  Description of Artificial Sequence: Synthetic oligonucleotide
cugcugcgauggacuuggc

SEQ ID NO: 376272 - RNA, 19 nt, Artificial Sequence
  Description of Artificial Sequence: Synthetic oligonucleotide
cuacaucagcgagacgggu

SEQ ID NO: 376273 - RNA, 19 nt, Artificial Sequence
  Description of Artificial Sequence: Synthetic oligonucleotide
gguugucgucaggucgggc

SEQ ID NO: 376274 - RNA, 19 nt, Artificial Sequence
  Description of Artificial Sequence: Synthetic oligonucleotide
cacugucuugagcaaugau

SEQ ID NO: 376275 - RNA, 19 nt, Artificial Sequence
  Description of Artificial Sequence: Synthetic oligonucleotide
ggcuagcauggcccugaac

SEQ ID NO: 376276 - RNA, 19 nt, Artificial Sequence
  Description of Artificial Sequence: Synthetic oligonucleotide
cguuucauugccucagagu

SEQ ID NO: 376277 - RNA, 19 nt, Artificial Sequence
  Description of Artificial Sequence: Synthetic oligonucleotide
gccguuucauugccucaga

SEQ ID NO: 376278 - RNA, 19 nt, Artificial Sequence
  Description of Artificial Sequence: Synthetic oligonucleotide
ggguacgaaggcacuugga

SEQ ID NO: 376279 - RNA, 19 nt, Artificial Sequence
  Description of Artificial Sequence: Synthetic oligonucleotide
ccacccgcuuugagugucc

SEQ ID NO: 376280 - RNA, 19 nt, Artificial Sequence
  Description of Artificial Sequence: Synthetic oligonucleotide
cggccauagucacugguca

SEQ ID NO: 376281 - RNA, 19 nt, Artificial Sequence
  Description of Artificial Sequence: Synthetic oligonucleotide
caacgaccccugcagcacu

SEQ ID NO: 376282 - RNA, 19 nt, Artificial Sequence
  Description of Artificial Sequence: Synthetic oligonucleotide
uggcugccucacacagauu

SEQ ID NO: 376283 - RNA, 19 nt, Artificial Sequence
  Description of Artificial Sequence: Synthetic oligonucleotide
cuaggguacgaaggcacuu

SEQ ID NO: 376284 - RNA, 19 nt, Artificial Sequence
  Description of Artificial Sequence: Synthetic oligonucleotide
cccgcuuugaguguccugu

SEQ ID NO: 376285 - RNA, 19 nt, Artificial Sequence
  Description of Artificial Sequence: Synthetic oligonucleotide
ccugggugauagaguccac

SEQ ID NO: 376286 - RNA, 19 nt, Artificial Sequence
  Description of Artificial Sequence: Synthetic oligonucleotide
gcucagucacugagccagc

SEQ ID NO: 376287 - RNA, 19 nt, Artificial Sequence
  Description of Artificial Sequence: Synthetic oligonucleotide
cagcagcguuaauaauacu

SEQ ID NO: 376288 - RNA, 19 nt, Artificial Sequence
  Description of Artificial Sequence: Synthetic oligonucleotide
ggcgcccaccuuuccuuga

SEQ ID NO: 376289 - RNA, 19 nt, Artificial Sequence
  Description of Artificial Sequence: Synthetic oligonucleotide
cuuccugugcugcgauaau

SEQ ID NO: 376290 - RNA, 19 nt, Artificial Sequence
  Description of Artificial Sequence: Synthetic oligonucleotide
gcccuaggguacgaaggca

SEQ ID NO: 376291 - RNA, 19 nt, Artificial Sequence
  Description of Artificial Sequence: Synthetic oligonucleotide
cgggcgagcugugcaauag

SEQ ID NO: 376292 - RNA, 19 nt, Artificial Sequence
  Description of Artificial Sequence: Synthetic oligonucleotide
gccacccgcuuugaguguc

SEQ ID NO: 376293 - RNA, 19 nt, Artificial Sequence
  Description of Artificial Sequence: Synthetic oligonucleotide
gggguaggccauauaguau

SEQ ID NO: 376294 - RNA, 19 nt, Artificial Sequence
  Description of Artificial Sequence: Synthetic oligonucleotide
ccuaggguacgaaggcacu

SEQ ID NO: 376295 - RNA, 19 nt, Artificial Sequence
  Description of Artificial Sequence: Synthetic oligonucleotide
gccauagugcagagcucga

SEQ ID NO: 376296 - RNA, 19 nt, Artificial Sequence
  Description of Artificial Sequence: Synthetic oligonucleotide
ccauaguaauacccuuggu

SEQ ID NO: 376297 - RNA, 19 nt, Artificial Sequence
  Description of Artificial Sequence: Synthetic oligonucleotide
accgucuggcucacccaua

SEQ ID NO: 376298 - RNA, 19 nt, Artificial Sequence
  Description of Artificial Sequence: Synthetic oligonucleotide
agguaaccauuggcacauu

SEQ ID NO: 376299 - RNA, 19 nt, Artificial Sequence
  Description of Artificial Sequence: Synthetic oligonucleotide
ccauagugcagagcucgaa

SEQ ID NO: 376300 - RNA, 19 nt, Artificial Sequence
  Description of Artificial Sequence: Synthetic oligonucleotide
gccucguaaccaagacaga

SEQ ID NO: 376301 - RNA, 19 nt, Artificial Sequence
  Description of Artificial Sequence: Synthetic oligonucleotide
cccuagugcucaucucgaa

SEQ ID NO: 376302 - RNA, 19 nt, Artificial Sequence
  Description of Artificial Sequence: Synthetic oligonucleotide
cccauagguccuucaucua

SEQ ID NO: 376303 - RNA, 19 nt, Artificial Sequence
  Description of Artificial Sequence: Synthetic oligonucleotide
cugcgauaaucugggcaau

SEQ ID NO: 376304 - RNA, 19 nt, Artificial Sequence
  Description of Artificial Sequence: Synthetic oligonucleotide
guccaucguccagugcauu

SEQ ID NO: 376305 - RNA, 19 nt, Artificial Sequence
  Description of Artificial Sequence: Synthetic oligonucleotide
cacccgcuuugaguguccu

SEQ ID NO: 376306 - RNA, 19 nt, Artificial Sequence
  Description of Artificial Sequence: Synthetic oligonucleotide
cugcuucauugaggguugu

SEQ ID NO: 376307 - RNA, 19 nt, Artificial Sequence
  Description of Artificial Sequence: Synthetic oligonucleotide
caggcacuuaggggcccua

SEQ ID NO: 376308 - RNA, 19 nt, Artificial Sequence
  Description of Artificial Sequence: Synthetic oligonucleotide
caucagcgagacggguaau

SEQ ID NO: 376309 - RNA, 19 nt, Artificial Sequence
  Description of Artificial Sequence: Synthetic oligonucleotide
ccuguacucggugcuugau

SEQ ID NO: 376310 - RNA, 19 nt, Artificial Sequence
  Description of Artificial Sequence: Synthetic oligonucleotide
ccggaggcccuggcagguu

SEQ ID NO: 376311 - RNA, 19 nt, Artificial Sequence
  Description of Artificial Sequence: Synthetic oligonucleotide
cggcuccuaggagcucauu

SEQ ID NO: 376312 - RNA, 19 nt, Artificial Sequence
  Description of Artificial Sequence: Synthetic oligonucleotide
uauaguacguauauugucg

SEQ ID NO: 376313 - RNA, 19 nt, Artificial Sequence
  Description of Artificial Sequence: Synthetic oligonucleotide
uuuacguacugcuaaaucg

SEQ ID NO: 376314 - RNA, 19 nt, Artificial Sequence
  Description of Artificial Sequence: Synthetic oligonucleotide
uaauagaggacuucgaagg

SEQ ID NO: 376315 - RNA, 19 nt, Artificial Sequence
  Description of Artificial Sequence: Synthetic oligonucleotide
auuuauaguacguauauug

SEQ ID NO: 376316 - RNA, 19 nt, Artificial Sequence
  Description of Artificial Sequence: Synthetic oligonucleotide
aaaucuaccagucugggga

SEQ ID NO: 376317 - RNA, 19 nt, Artificial Sequence
  Description of Artificial Sequence: Synthetic oligonucleotide
aauuauaccgggaugcucc

SEQ ID NO: 376318 - RNA, 19 nt, Artificial Sequence
  Description of Artificial Sequence: Synthetic oligonucleotide
aaagugugacuuuggaucc

SEQ ID NO: 376319 - RNA, 19 nt, Artificial Sequence
  Description of Artificial Sequence: Synthetic oligonucleotide
aaaucguaaacacugagaa

SEQ ID NO: 376320 - RNA, 19 nt, Artificial Sequence
  Description of Artificial Sequence: Synthetic oligonucleotide
ugaaucacgaguuauggcc

SEQ ID NO: 376321 - RNA, 19 nt, Artificial Sequence
  Description of Artificial Sequence: Synthetic oligonucleotide
ucuauuaauucucuugucc

SEQ ID NO: 376322 - RNA, 19 nt, Artificial Sequence
  Description of Artificial Sequence: Synthetic oligonucleotide
ugcuaaaucguaaacacug

SEQ ID NO: 376323 - RNA, 19 nt, Artificial Sequence
  Description of Artificial Sequence: Synthetic oligonucleotide
acugcuaaaucguaaacac

SEQ ID NO: 376324 - RNA, 19 nt, Artificial Sequence
  Description of Artificial Sequence: Synthetic oligonucleotide
ugaauuaacgcucuauuaa

SEQ ID NO: 376325 - RNA, 19 nt, Artificial Sequence
  Description of Artificial Sequence: Synthetic oligonucleotide
auuaacgcucuauuaauuc

SEQ ID NO: 376326 - RNA, 19 nt, Artificial Sequence
  Description of Artificial Sequence: Synthetic oligonucleotide
uuauggccgaguuucaucg

SEQ ID NO: 376327 - RNA, 19 nt, Artificial Sequence
  Description of Artificial Sequence: Synthetic oligonucleotide
uaugcaucggcccucaucu

SEQ ID NO: 376328 - RNA, 19 nt, Artificial Sequence
  Description of Artificial Sequence: Synthetic oligonucleotide
ucgccucucauguagaugg

SEQ ID NO: 376329 - RNA, 19 nt, Artificial Sequence
  Description of Artificial Sequence: Synthetic oligonucleotide
cugaccaaaaguaucacug

SEQ ID NO: 376330 - RNA, 19 nt, Artificial Sequence
  Description of Artificial Sequence: Synthetic oligonucleotide
ucaugaguccuuaugcugc

SEQ ID NO: 376331 - RNA, 19 nt, Artificial Sequence
  Description of Artificial Sequence: Synthetic oligonucleotide
ucucccguaaggcacaaag

SEQ ID NO: 376332 - RNA, 19 nt, Artificial Sequence
  Description of Artificial Sequence: Synthetic oligonucleotide
gauauuaacgcuuuacgua

SEQ ID NO: 376333 - RNA, 19 nt, Artificial Sequence
  Description of Artificial Sequence: Synthetic oligonucleotide
gaaguuuaugcaucggccc

SEQ ID NO: 376334 - RNA, 19 nt, Artificial Sequence
  Description of Artificial Sequence: Synthetic oligonucleotide
cacgcuaacauaauuuggc

SEQ ID NO: 376335 - RNA, 19 nt, Artificial Sequence
  Description of Artificial Sequence: Synthetic oligonucleotide
uuuucaugcaaagagaguu

SEQ ID NO: 376336 - RNA, 19 nt, Artificial Sequence
  Description of Artificial Sequence: Synthetic oligonucleotide
ucugcucacgcuaacauaa

SEQ ID NO: 376337 - RNA, 19 nt, Artificial Sequence
  Description of Artificial Sequence: Synthetic oligonucleotide
ugcaaauuagcauuccgcu

SEQ ID NO: 376338 - RNA, 19 nt, Artificial Sequence
  Description of Artificial Sequence: Synthetic oligonucleotide
auauugucgaugcuucccg

SEQ ID NO: 376339 - RNA, 19 nt, Artificial Sequence
  Description of Artificial Sequence: Synthetic oligonucleotide
auugcugcgaucccguuag

SEQ ID NO: 376340 - RNA, 19 nt, Artificial Sequence
  Description of Artificial Sequence: Synthetic oligonucleotide
uaugcugcacgccaggucu

SEQ ID NO: 376341 - RNA, 19 nt, Artificial Sequence
  Description of Artificial Sequence: Synthetic oligonucleotide
uucaagcuagagaauaugu

SEQ ID NO: 376342 - RNA, 19 nt, Artificial Sequence
  Description of Artificial Sequence: Synthetic oligonucleotide
uuauaguacguauauuguc

SEQ ID NO: 376343 - RNA, 19 nt, Artificial Sequence
  Description of Artificial Sequence: Synthetic oligonucleotide
augaaucacgaguuauggc

SEQ ID NO: 376344 - RNA, 19 nt, Artificial Sequence
  Description of Artificial Sequence: Synthetic oligonucleotide
aaucuaccagucuggggac

SEQ ID NO: 376345 - RNA, 19 nt, Artificial Sequence
  Description of Artificial Sequence: Synthetic oligonucleotide
ucuagucagaaaucucccg

SEQ ID NO: 376346 - RNA, 19 nt, Artificial Sequence
  Description of Artificial Sequence: Synthetic oligonucleotide
uuacguacugcuaaaucgu

SEQ ID NO: 376347 - RNA, 19 nt, Artificial Sequence
  Description of Artificial Sequence: Synthetic oligonucleotide
ucgaccaccauaauaggac

SEQ ID NO: 376348 - RNA, 19 nt, Artificial Sequence
  Description of Artificial Sequence: Synthetic oligonucleotide
guacguauauugucgaugc

SEQ ID NO: 376349 - RNA, 19 nt, Artificial Sequence
  Description of Artificial Sequence: Synthetic oligonucleotide
aaccguagcaugcaaauua

SEQ ID NO: 376350 - RNA, 19 nt, Artificial Sequence
  Description of Artificial Sequence: Synthetic oligonucleotide
ucaugaaucacgaguuaug

SEQ ID NO: 376351 - RNA, 19 nt, Artificial Sequence
  Description of Artificial Sequence: Synthetic oligonucleotide
uuaauuggcguguaccacu

SEQ ID NO: 376352 - RNA, 19 nt, Artificial Sequence
  Description of Artificial Sequence: Synthetic oligonucleotide
ucgaauauccauuucgcau

SEQ ID NO: 376353 - RNA, 19 nt, Artificial Sequence
  Description of Artificial Sequence: Synthetic oligonucleotide
uuaaagaucuugagacagc

SEQ ID NO: 376354 - RNA, 19 nt, Artificial Sequence
  Description of Artificial Sequence: Synthetic oligonucleotide
cuaacauaauuuggcaucg

SEQ ID NO: 376355 - RNA, 19 nt, Artificial Sequence
  Description of Artificial Sequence: Synthetic oligonucleotide
aaguuuaugcaucggcccu

SEQ ID NO: 376356 - RNA, 19 nt, Artificial Sequence
  Description of Artificial Sequence: Synthetic oligonucleotide
caugaaucacgaguuaugg

SEQ ID NO: 376357 - RNA, 19 nt, Artificial Sequence
  Description of Artificial Sequence: Synthetic oligonucleotide
cauugucuauaccaguucc

SEQ ID NO: 376358 - RNA, 19 nt, Artificial Sequence
  Description of Artificial Sequence: Synthetic oligonucleotide
aucucgucuacauuuuguc

SEQ ID NO: 376359 - RNA, 19 nt, Artificial Sequence
  Description of Artificial Sequence: Synthetic oligonucleotide
uucuagucagaaaucuccc

SEQ ID NO: 376360 - RNA, 19 nt, Artificial Sequence
  Description of Artificial Sequence: Synthetic oligonucleotide
cuaaaucguaaacacugag

SEQ ID NO: 376361 - RNA, 19 nt, Artificial Sequence
  Description of Artificial Sequence: Synthetic oligonucleotide
uguuaaagaucuugagaca

SEQ ID NO: 376362 - RNA, 19 nt, Artificial Sequence
  Description of Artificial Sequence: Synthetic oligonucleotide
cuagagaauaugugugugc

SEQ ID NO: 376363 - RNA, 19 nt, Artificial Sequence
  Description of Artificial Sequence: Synthetic oligonucleotide
aaagagaguugcuggcuug

SEQ ID NO: 376364 - RNA, 19 nt, Artificial Sequence
  Description of Artificial Sequence: Synthetic oligonucleotide
aguaauagaggacuucgaa

SEQ ID NO: 376365 - RNA, 19 nt, Artificial Sequence
  Description of Artificial Sequence: Synthetic oligonucleotide
gguaauuauaccgggaugc

SEQ ID NO: 376366 - RNA, 19 nt, Artificial Sequence
  Description of Artificial Sequence: Synthetic oligonucleotide
aacuaaagggcaaaauccu

SEQ ID NO: 376367 - RNA, 19 nt, Artificial Sequence
  Description of Artificial Sequence: Synthetic oligonucleotide
gaaucacgaguuauggccg

SEQ ID NO: 376368 - RNA, 19 nt, Artificial Sequence
  Description of Artificial Sequence: Synthetic oligonucleotide
aguuucaucgccucucaug

SEQ ID NO: 376369 - RNA, 19 nt, Artificial Sequence
  Description of Artificial Sequence: Synthetic oligonucleotide
ugcguaaggcuucuuggag

SEQ ID NO: 376370 - RNA, 19 nt, Artificial Sequence
  Description of Artificial Sequence: Synthetic oligonucleotide
ucguugaugugacacgaug

SEQ ID NO: 376371 - RNA, 19 nt, Artificial Sequence
  Description of Artificial Sequence: Synthetic oligonucleotide
uacauuuugucaugcgugu

SEQ ID NO: 376372 - RNA, 19 nt, Artificial Sequence
  Description of Artificial Sequence: Synthetic oligonucleotide
uaaaccguagcaugcaaau

SEQ ID NO: 376373 - RNA, 19 nt, Artificial Sequence
  Description of Artificial Sequence: Synthetic oligonucleotide
uggguaauuauaccgggau

SEQ ID NO: 376374 - RNA, 19 nt, Artificial Sequence
  Description of Artificial Sequence: Synthetic oligonucleotide
auugucuauaccaguuccc

SEQ ID NO: 376375 - RNA, 19 nt, Artificial Sequence
  Description of Artificial Sequence: Synthetic oligonucleotide
agugacuagaucaucugag

SEQ ID NO: 376376 - RNA, 19 nt, Artificial Sequence
  Description of Artificial Sequence: Synthetic oligonucleotide
aguacguauauugucgaug

SEQ ID NO: 376377 - RNA, 19 nt, Artificial Sequence
  Description of Artificial Sequence: Synthetic oligonucleotide
uuuauugauggggaacucu

SEQ ID NO: 376378 - RNA, 19 nt, Artificial Sequence
  Description of Artificial Sequence: Synthetic oligonucleotide
ucugaaguacaguaucgaa

SEQ ID NO: 376379 - RNA, 19 nt, Artificial Sequence
  Description of Artificial Sequence: Synthetic oligonucleotide
aaucguaaacacugagaaa

SEQ ID NO: 376380 - RNA, 19 nt, Artificial Sequence
  Description of Artificial Sequence: Synthetic oligonucleotide
uuugucaugcgugugcacu

SEQ ID NO: 376381 - RNA, 19 nt, Artificial Sequence
  Description of Artificial Sequence: Synthetic oligonucleotide
uuaauucucuugucccgag

SEQ ID NO: 376382 - RNA, 19 nt, Artificial Sequence
  Description of Artificial Sequence: Synthetic oligonucleotide
guaacaugcauacaguggu

SEQ ID NO: 376383 - RNA, 19 nt, Artificial Sequence
  Description of Artificial Sequence: Synthetic oligonucleotide
ccacuuuacagcaaagggg

SEQ ID NO: 376384 - RNA, 19 nt, Artificial Sequence
  Description of Artificial Sequence: Synthetic oligonucleotide
auuaacgcuuuacguacug

SEQ ID NO: 376385 - RNA, 19 nt, Artificial Sequence
  Description of Artificial Sequence: Synthetic oligonucleotide
acgauggugauauuucuaa

SEQ ID NO: 376386 - RNA, 19 nt, Artificial Sequence
  Description of Artificial Sequence: Synthetic oligonucleotide
aguaucgaaagugacuaga

SEQ ID NO: 376387 - RNA, 19 nt, Artificial Sequence
  Description of Artificial Sequence: Synthetic oligonucleotide
acaguaucgaaagugacua

SEQ ID NO: 376388 - RNA, 19 nt, Artificial Sequence
  Description of Artificial Sequence: Synthetic oligonucleotide
uuacagauauuaacgcuuu

SEQ ID NO: 376389 - RNA, 19 nt, Artificial Sequence
  Description of Artificial Sequence: Synthetic oligonucleotide
cuuuacguacugcuaaauc

SEQ ID NO: 376390 - RNA, 19 nt, Artificial Sequence
  Description of Artificial Sequence: Synthetic oligonucleotide
auaaaauguucgccuucuc

SEQ ID NO: 376391 - RNA, 19 nt, Artificial Sequence
  Description of Artificial Sequence: Synthetic oligonucleotide
acucccuuauuuguuuagc

SEQ ID NO: 376392 - RNA, 19 nt, Artificial Sequence
  Description of Artificial Sequence: Synthetic oligonucleotide
aggacacccggucauacug

SEQ ID NO: 376393 - RNA, 19 nt, Artificial Sequence
  Description of Artificial Sequence: Synthetic oligonucleotide
uugucuauaccaguuccca

SEQ ID NO: 376394 - RNA, 19 nt, Artificial Sequence
  Description of Artificial Sequence: Synthetic oligonucleotide
uauaccgggaugcuccaaa

SEQ ID NO: 376395 - RNA, 19 nt, Artificial Sequence
  Description of Artificial Sequence: Synthetic oligonucleotide
uuaugcaucggcccucauc

SEQ ID NO: 376396 - RNA, 19 nt, Artificial Sequence
  Description of Artificial Sequence: Synthetic oligonucleotide
ugugcacucacaugcccgc

SEQ ID NO: 376397 - RNA, 19 nt, Artificial Sequence
  Description of Artificial Sequence: Synthetic oligonucleotide
uauuaacgcuuuacguacu

SEQ ID NO: 376398 - RNA, 19 nt, Artificial Sequence
  Description of Artificial Sequence: Synthetic oligonucleotide
gcguguaccacuuugucug

SEQ ID NO: 376399 - RNA, 19 nt, Artificial Sequence
  Description of Artificial Sequence: Synthetic oligonucleotide
uguugaauuaacgcucuau

SEQ ID NO: 376400 - RNA, 19 nt, Artificial Sequence
  Description of Artificial Sequence: Synthetic oligonucleotide
aaucacgaguuauggccga

SEQ ID NO: 376401 - RNA, 19 nt, Artificial Sequence
  Description of Artificial Sequence: Synthetic oligonucleotide
acucacaugcccgccaaac

SEQ ID NO: 376402 - RNA, 19 nt, Artificial Sequence
  Description of Artificial Sequence: Synthetic oligonucleotide
gucuacauuuugucaugcg

SEQ ID NO: 376403 - RNA, 19 nt, Artificial Sequence
  Description of Artificial Sequence: Synthetic oligonucleotide
gacgggugucucuucuucg

SEQ ID NO: 376404 - RNA, 19 nt, Artificial Sequence
  Description of Artificial Sequence: Synthetic oligonucleotide
gagacuugaacgaaaggaa

SEQ ID NO: 376405 - RNA, 19 nt, Artificial Sequence
  Description of Artificial Sequence: Synthetic oligonucleotide
acgcuaacauaauuuggca

SEQ ID NO: 376406 - RNA, 19 nt, Artificial Sequence
  Description of Artificial Sequence: Synthetic oligonucleotide
ugcuguugccuuuaauuau

SEQ ID NO: 376407 - RNA, 19 nt, Artificial Sequence
  Description of Artificial Sequence: Synthetic oligonucleotide
caaauuagcauuccgcugu

SEQ ID NO: 376408 - RNA, 19 nt, Artificial Sequence
  Description of Artificial Sequence: Synthetic oligonucleotide
augcccgccaaacauaaaa

SEQ ID NO: 376409 - RNA, 19 nt, Artificial Sequence
  Description of Artificial Sequence: Synthetic oligonucleotide
uccuuaugcugcacgccag

SEQ ID NO: 376410 - RNA, 19 nt, Artificial Sequence
  Description of Artificial Sequence: Synthetic oligonucleotide
acgggugucucuucuucgg

SEQ ID NO: 376411 - RNA, 19 nt, Artificial Sequence
  Description of Artificial Sequence: Synthetic oligonucleotide
uugauaagccuuugugcuc

SEQ ID NO: 376412 - RNA, 19 nt, Artificial Sequence
  Description of Artificial Sequence: Synthetic oligonucleotide
cuuaauuggcguguaccac

SEQ ID NO: 376413 - RNA, 19 nt, Artificial Sequence
  Description of Artificial Sequence: Synthetic oligonucleotide
acacugaccaaaaguauca

SEQ ID NO: 376414 - RNA, 19 nt, Artificial Sequence
  Description of Artificial Sequence: Synthetic oligonucleotide
cauuucgcaucugaaguac

SEQ ID NO: 376415 - RNA, 19 nt, Artificial Sequence
  Description of Artificial Sequence: Synthetic oligonucleotide
auacagugguaggucauuc

SEQ ID NO: 376416 - RNA, 19 nt, Artificial Sequence
  Description of Artificial Sequence: Synthetic oligonucleotide
agugcauccagacgacccu

SEQ ID NO: 376417 - RNA, 19 nt, Artificial Sequence
  Description of Artificial Sequence: Synthetic oligonucleotide
uuaacgcuuuacguacugc

SEQ ID NO: 376418 - RNA, 19 nt, Artificial Sequence
  Description of Artificial Sequence: Synthetic oligonucleotide
gacuucgaaggcuuuagcu

SEQ ID NO: 376419 - RNA, 19 nt, Artificial Sequence
  Description of Artificial Sequence: Synthetic oligonucleotide
guuauggccgaguuucauc

SEQ ID NO: 376420 - RNA, 19 nt, Artificial Sequence
  Description of Artificial Sequence: Synthetic oligonucleotide
aaguaauagaggacuucga

SEQ ID NO: 376421 - RNA, 19 nt, Artificial Sequence
  Description of Artificial Sequence: Synthetic oligonucleotide
acaaccaaggcgcggugcu

SEQ ID NO: 376422 - RNA, 19 nt, Artificial Sequence
  Description of Artificial Sequence: Synthetic oligonucleotide
gaaucacaaccaaggcgcg

SEQ ID NO: 376423 - RNA, 19 nt, Artificial Sequence
  Description of Artificial Sequence: Synthetic oligonucleotide
aaauuagcauuccgcugua

SEQ ID NO: 376424 - RNA, 19 nt, Artificial Sequence
  Description of Artificial Sequence: Synthetic oligonucleotide
uaauuauaccgggaugcuc

SEQ ID NO: 376425 - RNA, 19 nt, Artificial Sequence
  Description of Artificial Sequence: Synthetic oligonucleotide
acgcuuuacguacugcuaa

SEQ ID NO: 376426 - RNA, 19 nt, Artificial Sequence
  Description of Artificial Sequence: Synthetic oligonucleotide
uauugucgaugcuucccga

SEQ ID NO: 376427 - RNA, 19 nt, Artificial Sequence
  Description of Artificial Sequence: Synthetic oligonucleotide
aaggacacccggucauacu

SEQ ID NO: 376428 - RNA, 19 nt, Artificial Sequence
  Description of Artificial Sequence: Synthetic oligonucleotide
uuugggucgagguggucuc

SEQ ID NO: 376429 - RNA, 19 nt, Artificial Sequence
  Description of Artificial Sequence: Synthetic oligonucleotide
uaauuggcguguaccacuu

SEQ ID NO: 376430 - RNA, 19 nt, Artificial Sequence
  Description of Artificial Sequence: Synthetic oligonucleotide
aauguucgccuucucccuu

SEQ ID NO: 376431 - RNA, 19 nt, Artificial Sequence
  Description of Artificial Sequence: Synthetic oligonucleotide
auguucgccuucucccuuc

SEQ ID NO: 376432 - RNA, 19 nt, Artificial Sequence
  Description of Artificial Sequence: Synthetic oligonucleotide
gucgaauauccauuucgca

SEQ ID NO: 376433 - RNA, 19 nt, Artificial Sequence
  Description of Artificial Sequence: Synthetic oligonucleotide
aucacaaccaaggcgcggu

SEQ ID NO: 376434 - RNA, 19 nt, Artificial Sequence
  Description of Artificial Sequence: Synthetic oligonucleotide
uagaucaucugagcuauuu

SEQ ID NO: 376435 - RNA, 19 nt, Artificial Sequence
  Description of Artificial Sequence: Synthetic oligonucleotide
auuauaccgggaugcucca

SEQ ID NO: 376436 - RNA, 19 nt, Artificial Sequence
  Description of Artificial Sequence: Synthetic oligonucleotide
aaaucucccguaaggcaca

SEQ ID NO: 376437 - RNA, 19 nt, Artificial Sequence
  Description of Artificial Sequence: Synthetic oligonucleotide
acgacccuuaauuggcgug

SEQ ID NO: 376438 - RNA, 19 nt, Artificial Sequence
  Description of Artificial Sequence: Synthetic oligonucleotide
aucugaaguacaguaucga

SEQ ID NO: 376439 - RNA, 19 nt, Artificial Sequence
  Description of Artificial Sequence: Synthetic oligonucleotide
cuugcuguugccuuuaauu

SEQ ID NO: 376440 - RNA, 19 nt, Artificial Sequence
  Description of Artificial Sequence: Synthetic oligonucleotide
uuuaucuccccagccggac

SEQ ID NO: 376441 - RNA, 19 nt, Artificial Sequence
  Description of Artificial Sequence: Synthetic oligonucleotide
cacccggucauacugcuuc

SEQ ID NO: 376442 - RNA, 19 nt, Artificial Sequence
  Description of Artificial Sequence: Synthetic oligonucleotide
ugcccgccaaacauaaaau

SEQ ID NO: 376443 - RNA, 19 nt, Artificial Sequence
  Description of Artificial Sequence: Synthetic oligonucleotide
acguauauugucgaugcuu

SEQ ID NO: 376444 - RNA, 19 nt, Artificial Sequence
  Description of Artificial Sequence: Synthetic oligonucleotide
ucuugucccgagugcauaa

SEQ ID NO: 376445 - RNA, 19 nt, Artificial Sequence
  Description of Artificial Sequence: Synthetic oligonucleotide
gcaucguugaugugacacg

SEQ ID NO: 376446 - RNA, 19 nt, Artificial Sequence
  Description of Artificial Sequence: Synthetic oligonucleotide
uacguauauugucgaugcu

SEQ ID NO: 376447 - RNA, 19 nt, Artificial Sequence
  Description of Artificial Sequence: Synthetic oligonucleotide
acccuuaauuggcguguac

SEQ ID NO: 376448 - RNA, 19 nt, Artificial Sequence
  Description of Artificial Sequence: Synthetic oligonucleotide
guugaauuaacgcucuauu

SEQ ID NO: 376449 - RNA, 19 nt, Artificial Sequence
  Description of Artificial Sequence: Synthetic oligonucleotide
acaucccacugacccggcc

SEQ ID NO: 376450 - RNA, 19 nt, Artificial Sequence
  Description of Artificial Sequence: Synthetic oligonucleotide
cguugaugugacacgaugg

SEQ ID NO: 376451 - RNA, 19 nt, Artificial Sequence
  Description of Artificial Sequence: Synthetic oligonucleotide
uuguuuagccuggaaggaa

SEQ ID NO: 376452 - RNA, 19 nt, Artificial Sequence
  Description of Artificial Sequence: Synthetic oligonucleotide
gaccaccauaauaggacgc

SEQ ID NO: 376453 - RNA, 19 nt, Artificial Sequence
  Description of Artificial Sequence: Synthetic oligonucleotide
gaggauccuugauaaccac

SEQ ID NO: 376454 - RNA, 19 nt, Artificial Sequence
  Description of Artificial Sequence: Synthetic oligonucleotide
guugaugugacacgauggu

SEQ ID NO: 376455 - RNA, 19 nt, Artificial Sequence
  Description of Artificial Sequence: Synthetic oligonucleotide
uguagcugugacuguuaaa

SEQ ID NO: 376456 - RNA, 19 nt, Artificial Sequence
  Description of Artificial Sequence: Synthetic oligonucleotide
ugcgaucccguuagaacau

SEQ ID NO: 376457 - RNA, 19 nt, Artificial Sequence
  Description of Artificial Sequence: Synthetic oligonucleotide
guacaguaucgaaagugac

SEQ ID NO: 376458 - RNA, 19 nt, Artificial Sequence
  Description of Artificial Sequence: Synthetic oligonucleotide
cucgaccaccauaauagga

SEQ ID NO: 376459 - RNA, 19 nt, Artificial Sequence
  Description of Artificial Sequence: Synthetic oligonucleotide
uucugcucacgcuaacaua

SEQ ID NO: 376460 - RNA, 19 nt, Artificial Sequence
  Description of Artificial Sequence: Synthetic oligonucleotide
ugcucacgcuaacauaauu

SEQ ID NO: 376461 - RNA, 19 nt, Artificial Sequence
  Description of Artificial Sequence: Synthetic oligonucleotide
uauggccgaguuucaucgc

SEQ ID NO: 376462 - RNA, 19 nt, Artificial Sequence
  Description of Artificial Sequence: Synthetic oligonucleotide
cacaaaccuggacacugac

SEQ ID NO: 376463 - RNA, 19 nt, Artificial Sequence
  Description of Artificial Sequence: Synthetic oligonucleotide
cuagagcggaagcuuggug

SEQ ID NO: 376464 - RNA, 19 nt, Artificial Sequence
  Description of Artificial Sequence: Synthetic oligonucleotide
ggcaucguugaugugacac

SEQ ID NO: 376465 - RNA, 19 nt, Artificial Sequence
  Description of Artificial Sequence: Synthetic oligonucleotide
uacagauauuaacgcuuua

SEQ ID NO: 376466 - RNA, 19 nt, Artificial Sequence
  Description of Artificial Sequence: Synthetic oligonucleotide
uguucgccuucucccuucc

SEQ ID NO: 376467 - RNA, 19 nt, Artificial Sequence
  Description of Artificial Sequence: Synthetic oligonucleotide
caguaucgaaagugacuag

SEQ ID NO: 376468 - RNA, 19 nt, Artificial Sequence
  Description of Artificial Sequence: Synthetic oligonucleotide
ggguaauuauaccgggaug

SEQ ID NO: 376469 - RNA, 19 nt, Artificial Sequence
  Description of Artificial Sequence: Synthetic oligonucleotide
uaguacguauauugucgau

SEQ ID NO: 376470 - RNA, 19 nt, Artificial Sequence
  Description of Artificial Sequence: Synthetic oligonucleotide
cguauauugucgaugcuuc

SEQ ID NO: 376471 - RNA, 19 nt, Artificial Sequence
  Description of Artificial Sequence: Synthetic oligonucleotide
ccucucauguagauggcag

SEQ ID NO: 376472 - RNA, 19 nt, Artificial Sequence
  Description of Artificial Sequence: Synthetic oligonucleotide
aacccuagagcggaagcuu

SEQ ID NO: 376473 - RNA, 19 nt, Artificial Sequence
  Description of Artificial Sequence: Synthetic oligonucleotide
uaccuugaggcaucucguc

SEQ ID NO: 376474 - RNA, 19 nt, Artificial Sequence
  Description of Artificial Sequence: Synthetic oligonucleotide
uucgaaggcuuuagcuauc

SEQ ID NO: 376475 - RNA, 19 nt, Artificial Sequence
  Description of Artificial Sequence: Synthetic oligonucleotide
acauuuugucaugcgugug

SEQ ID NO: 376476 - RNA, 19 nt, Artificial Sequence
  Description of Artificial Sequence: Synthetic oligonucleotide
acaaacaccuagguguguu

SEQ ID NO: 376477 - RNA, 19 nt, Artificial Sequence
  Description of Artificial Sequence: Synthetic oligonucleotide
aaaccguagcaugcaaauu

SEQ ID NO: 376478 - RNA, 19 nt, Artificial Sequence
  Description of Artificial Sequence: Synthetic oligonucleotide
aaggugucuuggaaaacua

SEQ ID NO: 376479 - RNA, 19 nt, Artificial Sequence
  Description of Artificial Sequence: Synthetic oligonucleotide
gcugcgaucccguuagaac

SEQ ID NO: 376480 - RNA, 19 nt, Artificial Sequence
  Description of Artificial Sequence: Synthetic oligonucleotide
gugcguaaggcuucuugga

SEQ ID NO: 376481 - RNA, 19 nt, Artificial Sequence
  Description of Artificial Sequence: Synthetic oligonucleotide
ucuaccagucuggggacaa

SEQ ID NO: 376482 - RNA, 19 nt, Artificial Sequence
  Description of Artificial Sequence: Synthetic oligonucleotide
agcucugcauaaaccguag

SEQ ID NO: 376483 - RNA, 19 nt, Artificial Sequence
  Description of Artificial Sequence: Synthetic oligonucleotide
caucguugaugugacacga

SEQ ID NO: 376484 - RNA, 19 nt, Artificial Sequence
  Description of Artificial Sequence: Synthetic oligonucleotide
uuuagccuggaaggaaauu

SEQ ID NO: 376485 - RNA, 19 nt, Artificial Sequence
  Description of Artificial Sequence: Synthetic oligonucleotide
aauuagcauuccgcuguau

SEQ ID NO: 376486 - RNA, 19 nt, Artificial Sequence
  Description of Artificial Sequence: Synthetic oligonucleotide
cauaaaauguucgccuucu

SEQ ID NO: 376487 - RNA, 19 nt, Artificial Sequence
  Description of Artificial Sequence: Synthetic oligonucleotide
cccuuaauuggcguguacc

SEQ ID NO: 376488 - RNA, 19 nt, Artificial Sequence
  Description of Artificial Sequence: Synthetic oligonucleotide
ccuuaauuggcguguacca

SEQ ID NO: 376489 - RNA, 19 nt, Artificial Sequence
  Description of Artificial Sequence: Synthetic oligonucleotide
auaccgggaugcuccaaau

SEQ ID NO: 376490 - RNA, 19 nt, Artificial Sequence
  Description of Artificial Sequence: Synthetic oligonucleotide
gcccgccaaacauaaaaug

SEQ ID NO: 376491 - RNA, 19 nt, Artificial Sequence
  Description of Artificial Sequence: Synthetic oligonucleotide
augauugcugcgaucccgu

SEQ ID NO: 376492 - RNA, 19 nt, Artificial Sequence
  Description of Artificial Sequence: Synthetic oligonucleotide
cauaaaccguagcaugcaa

SEQ ID NO: 376493 - RNA, 19 nt, Artificial Sequence
  Description of Artificial Sequence: Synthetic oligonucleotide
cuuuaucuccccagccgga

SEQ ID NO: 376494 - RNA, 19 nt, Artificial Sequence
  Description of Artificial Sequence: Synthetic oligonucleotide
auggcgccccuccugauuu

SEQ ID NO: 376495 - RNA, 19 nt, Artificial Sequence
  Description of Artificial Sequence: Synthetic oligonucleotide
aucgccucucauguagaug

SEQ ID NO: 376496 - RNA, 19 nt, Artificial Sequence
  Description of Artificial Sequence: Synthetic oligonucleotide
cacaaccaaggcgcggugc

SEQ ID NO: 376497 - RNA, 19 nt, Artificial Sequence
  Description of Artificial Sequence: Synthetic oligonucleotide
aguuauggccgaguuucau

SEQ ID NO: 376498 - RNA, 19 nt, Artificial Sequence
  Description of Artificial Sequence: Synthetic oligonucleotide
cacugaccaaaaguaucac

SEQ ID NO: 376499 - RNA, 19 nt, Artificial Sequence
  Description of Artificial Sequence: Synthetic oligonucleotide
ugcugcgaucccguuagaa

SEQ ID NO: 376500 - RNA, 19 nt, Artificial Sequence
  Description of Artificial Sequence: Synthetic oligonucleotide
ggaggauccuugauaacca

SEQ ID NO: 376501 - RNA, 19 nt, Artificial Sequence
  Description of Artificial Sequence: Synthetic oligonucleotide
uugggucgagguggucucg

SEQ ID NO: 376502 - RNA, 19 nt, Artificial Sequence
  Description of Artificial Sequence: Synthetic oligonucleotide
agcagacuucccaucauua

SEQ ID NO: 376503 - RNA, 19 nt, Artificial Sequence
  Description of Artificial Sequence: Synthetic oligonucleotide
aucacgaguuauggccgag

SEQ ID NO: 376504 - RNA, 19 nt, Artificial Sequence
  Description of Artificial Sequence: Synthetic oligonucleotide
acaugcccgccaaacauaa

SEQ ID NO: 376505 - RNA, 19 nt, Artificial Sequence
  Description of Artificial Sequence: Synthetic oligonucleotide
ggacuucgaaggcuuuagc

SEQ ID NO: 376506 - RNA, 19 nt, Artificial Sequence
  Description of Artificial Sequence: Synthetic oligonucleotide
cacgauggugauauuucua

SEQ ID NO: 376507 - RNA, 19 nt, Artificial Sequence
  Description of Artificial Sequence: Synthetic oligonucleotide
guaauuauaccgggaugcu

SEQ ID NO: 376508 - RNA, 19 nt, Artificial Sequence
  Description of Artificial Sequence: Synthetic oligonucleotide
guuugggucgagguggucu

SEQ ID NO: 376509 - RNA, 19 nt, Artificial Sequence
  Description of Artificial Sequence: Synthetic oligonucleotide
guggguaauuauaccggga

SEQ ID NO: 376510 - RNA, 19 nt, Artificial Sequence
  Description of Artificial Sequence: Synthetic oligonucleotide
aaggcgcggugcuucucaa

SEQ ID NO: 376511 - RNA, 19 nt, Artificial Sequence
  Description of Artificial Sequence: Synthetic oligonucleotide
cugcuaaaucguaaacacu

SEQ ID NO: 376512 - RNA, 19 nt, Artificial Sequence
  Description of Artificial Sequence: Synthetic oligonucleotide
gcuaaaucguaaacacuga

SEQ ID NO: 376513 - RNA, 19 nt, Artificial Sequence
  Description of Artificial Sequence: Synthetic oligonucleotide
ccucgaccaccauaauagg

SEQ ID NO: 376514 - RNA, 19 nt, Artificial Sequence
  Description of Artificial Sequence: Synthetic oligonucleotide
guaucgaaagugacuagau

SEQ ID NO: 376515 - RNA, 19 nt, Artificial Sequence
  Description of Artificial Sequence: Synthetic oligonucleotide
caccguguuucugcucacg

SEQ ID NO: 376516 - RNA, 19 nt, Artificial Sequence
  Description of Artificial Sequence: Synthetic oligonucleotide
aggugucuuggaaaacuaa

SEQ ID NO: 376517 - RNA, 19 nt, Artificial Sequence
  Description of Artificial Sequence: Synthetic oligonucleotide
ccgggaugcuccaaaucgc

SEQ ID NO: 376518 - RNA, 19 nt, Artificial Sequence
  Description of Artificial Sequence: Synthetic oligonucleotide
gacacccggucauacugcu

SEQ ID NO: 376519 - RNA, 19 nt, Artificial Sequence
  Description of Artificial Sequence: Synthetic oligonucleotide
ggacgggugucucuucuuc

SEQ ID NO: 376520 - RNA, 19 nt, Artificial Sequence
  Description of Artificial Sequence: Synthetic oligonucleotide
uuauaccgggaugcuccaa

SEQ ID NO: 376521 - RNA, 19 nt, Artificial Sequence
  Description of Artificial Sequence: Synthetic oligonucleotide
cccguuagaacauucugua

SEQ ID NO: 376522 - RNA, 19 nt, Artificial Sequence
  Description of Artificial Sequence: Synthetic oligonucleotide
ugucaugcgugugcacuuu

SEQ ID NO: 376523 - RNA, 19 nt, Artificial Sequence
  Description of Artificial Sequence: Synthetic oligonucleotide
ggcaaaauccugcuugcau

SEQ ID NO: 376524 - RNA, 19 nt, Artificial Sequence
  Description of Artificial Sequence: Synthetic oligonucleotide
gaguuauggccgaguuuca

SEQ ID NO: 376525 - RNA, 19 nt, Artificial Sequence
  Description of Artificial Sequence: Synthetic oligonucleotide
ugauugcugcgaucccguu

SEQ ID NO: 376526 - RNA, 19 nt, Artificial Sequence
  Description of Artificial Sequence: Synthetic oligonucleotide
ugacccggccacuggucau

SEQ ID NO: 376527 - RNA, 19 nt, Artificial Sequence
  Description of Artificial Sequence: Synthetic oligonucleotide
uggcaucguugaugugaca

SEQ ID NO: 376528 - RNA, 19 nt, Artificial Sequence
  Description of Artificial Sequence: Synthetic oligonucleotide
ggcguguaccacuuugucu

SEQ ID NO: 376529 - RNA, 19 nt, Artificial Sequence
  Description of Artificial Sequence: Synthetic oligonucleotide
cuaccagucuggggacaag

SEQ ID NO: 376530 - RNA, 19 nt, Artificial Sequence
  Description of Artificial Sequence: Synthetic oligonucleotide
ccuagguguguuuacagau

SEQ ID NO: 376531 - RNA, 19 nt, Artificial Sequence
  Description of Artificial Sequence: Synthetic oligonucleotide
agcggaagcuugguggcua

SEQ ID NO: 376532 - RNA, 19 nt, Artificial Sequence
  Description of Artificial Sequence: Synthetic oligonucleotide
cccguaaggcacaaaguaa

SEQ ID NO: 376533 - RNA, 19 nt, Artificial Sequence
  Description of Artificial Sequence: Synthetic oligonucleotide
ggacacccggucauacugc

SEQ ID NO: 376534 - RNA, 19 nt, Artificial Sequence
  Description of Artificial Sequence: Synthetic oligonucleotide
cuuugguuggaggcggucu

SEQ ID NO: 376535 - RNA, 19 nt, Artificial Sequence
  Description of Artificial Sequence: Synthetic oligonucleotide
ggcgcggugcuucucaaua

SEQ ID NO: 376536 - RNA, 19 nt, Artificial Sequence
  Description of Artificial Sequence: Synthetic oligonucleotide
ggaaguguaugaaaauguu

SEQ ID NO: 376537 - RNA, 19 nt, Artificial Sequence
  Description of Artificial Sequence: Synthetic oligonucleotide
aucguugaugugacacgau

SEQ ID NO: 376538 - RNA, 19 nt, Artificial Sequence
  Description of Artificial Sequence: Synthetic oligonucleotide
uugcugcgaucccguuaga

SEQ ID NO: 376539 - RNA, 19 nt, Artificial Sequence
  Description of Artificial Sequence: Synthetic oligonucleotide
ccgagugcauaaugaaaga

SEQ ID NO: 376540 - RNA, 19 nt, Artificial Sequence
  Description of Artificial Sequence: Synthetic oligonucleotide
ggcuacugcuuccuuaaau

SEQ ID NO: 376541 - RNA, 19 nt, Artificial Sequence
  Description of Artificial Sequence: Synthetic oligonucleotide
agccggaccuccauucuuu

SEQ ID NO: 376542 - RNA, 19 nt, Artificial Sequence
  Description of Artificial Sequence: Synthetic oligonucleotide
ccguaaggcacaaaguaau

SEQ ID NO: 376543 - RNA, 19 nt, Artificial Sequence
  Description of Artificial Sequence: Synthetic oligonucleotide
ccauuucgcaucugaagua

SEQ ID NO: 376544 - RNA, 19 nt, Artificial Sequence
  Description of Artificial Sequence: Synthetic oligonucleotide
cuuaugcugcacgccaggu

SEQ ID NO: 376545 - RNA, 19 nt, Artificial Sequence
  Description of Artificial Sequence: Synthetic oligonucleotide
gagcccuuggagacuugaa

SEQ ID NO: 376546 - RNA, 19 nt, Artificial Sequence
  Description of Artificial Sequence: Synthetic oligonucleotide
cacuuugucugaggggucu

SEQ ID NO: 376547 - RNA, 19 nt, Artificial Sequence
  Description of Artificial Sequence: Synthetic oligonucleotide
gauggcgccccuccugauu

SEQ ID NO: 376548 - RNA, 19 nt, Artificial Sequence
  Description of Artificial Sequence: Synthetic oligonucleotide
gcgcggugcuucucaauac

SEQ ID NO: 376549 - RNA, 19 nt, Artificial Sequence
  Description of Artificial Sequence: Synthetic oligonucleotide
gacccuuaauuggcgugua

SEQ ID NO: 376550 - RNA, 19 nt, Artificial Sequence
  Description of Artificial Sequence: Synthetic oligonucleotide
ggccgaguuucaucgccuc

SEQ ID NO: 376551 - RNA, 19 nt, Artificial Sequence
  Description of Artificial Sequence: Synthetic oligonucleotide
aggcggucuuccuguugaa

SEQ ID NO: 376552 - RNA, 19 nt, Artificial Sequence
  Description of Artificial Sequence: Synthetic oligonucleotide
cggaccuccauucuuuuaa

SEQ ID NO: 376553 - RNA, 19 nt, Artificial Sequence
  Description of Artificial Sequence: Synthetic oligonucleotide
cacgaguuauggccgaguu

SEQ ID NO: 376554 - RNA, 19 nt, Artificial Sequence
  Description of Artificial Sequence: Synthetic oligonucleotide
cuguugaauuaacgcucua

SEQ ID NO: 376555 - RNA, 19 nt, Artificial Sequence
  Description of Artificial Sequence: Synthetic oligonucleotide
cucuugucccgagugcaua

SEQ ID NO: 376556 - RNA, 19 nt, Artificial Sequence
  Description of Artificial Sequence: Synthetic oligonucleotide
guucgccuucucccuucca

SEQ ID NO: 376557 - RNA, 19 nt, Artificial Sequence
  Description of Artificial Sequence: Synthetic oligonucleotide
cgaucccguuagaacauuc

SEQ ID NO: 376558 - RNA, 19 nt, Artificial Sequence
  Description of Artificial Sequence: Synthetic oligonucleotide
ugugugcguaaggcuucuu

SEQ ID NO: 376559 - RNA, 19 nt, Artificial Sequence
  Description of Artificial Sequence: Synthetic oligonucleotide
cuucccgauggcgccccuc

SEQ ID NO: 376560 - RNA, 19 nt, Artificial Sequence
  Description of Artificial Sequence: Synthetic oligonucleotide
caugcccgccaaacauaaa

SEQ ID NO: 376561 - RNA, 19 nt, Artificial Sequence
  Description of Artificial Sequence: Synthetic oligonucleotide
caucgccucucauguagau

SEQ ID NO: 376562 - RNA, 19 nt, Artificial Sequence
  Description of Artificial Sequence: Synthetic oligonucleotide
ccuccugauuuuaauuuau

SEQ ID NO: 376563 - RNA, 19 nt, Artificial Sequence
  Description of Artificial Sequence: Synthetic oligonucleotide
cccgauggcgccccuccug

SEQ ID NO: 376564 - RNA, 19 nt, Artificial Sequence
  Description of Artificial Sequence: Synthetic oligonucleotide
gcugcacgccaggucuuug

SEQ ID NO: 376565 - RNA, 19 nt, Artificial Sequence
  Description of Artificial Sequence: Synthetic oligonucleotide
ccccuccugauuuuaauuu

SEQ ID NO: 376566 - RNA, 19 nt, Artificial Sequence
  Description of Artificial Sequence: Synthetic oligonucleotide
cugcucacgcuaacauaau

SEQ ID NO: 376567 - RNA, 19 nt, Artificial Sequence
  Description of Artificial Sequence: Synthetic oligonucleotide
gcuuuacguacugcuaaau

SEQ ID NO: 376568 - RNA, 19 nt, Artificial Sequence
  Description of Artificial Sequence: Synthetic oligonucleotide
cgcuaacauaauuuggcau

SEQ ID NO: 376569 - RNA, 19 nt, Artificial Sequence
  Description of Artificial Sequence: Synthetic oligonucleotide
uggcgccccuccugauuuu

SEQ ID NO: 376570 - RNA, 19 nt, Artificial Sequence
  Description of Artificial Sequence: Synthetic oligonucleotide
cuugucccgagugcauaau

SEQ ID NO: 376571 - RNA, 19 nt, Artificial Sequence
  Description of Artificial Sequence: Synthetic oligonucleotide
gcuugcuguugccuuuaau

SEQ ID NO: 376572 - RNA, 19 nt, Artificial Sequence
  Description of Artificial Sequence: Synthetic oligonucleotide
cuagaucaucugagcuauu

SEQ ID NO: 376573 - RNA, 19 nt, Artificial Sequence
  Description of Artificial Sequence: Synthetic oligonucleotide
cguguaccacuuugucuga

SEQ ID NO: 376574 - RNA, 19 nt, Artificial Sequence
  Description of Artificial Sequence: Synthetic oligonucleotide
gguuugggucgaggugguc

SEQ ID NO: 376575 - RNA, 19 nt, Artificial Sequence
  Description of Artificial Sequence: Synthetic oligonucleotide
caggcgcgcuuugucaggu

SEQ ID NO: 376576 - RNA, 19 nt, Artificial Sequence
  Description of Artificial Sequence: Synthetic oligonucleotide
cgggaugcuccaaaucgcu

SEQ ID NO: 376577 - RNA, 19 nt, Artificial Sequence
  Description of Artificial Sequence: Synthetic oligonucleotide
gggaugcuccaaaucgcuu

SEQ ID NO: 376578 - RNA, 19 nt, Artificial Sequence
  Description of Artificial Sequence: Synthetic oligonucleotide
ccuagagcggaagcuuggu

SEQ ID NO: 376579 - RNA, 19 nt, Artificial Sequence
  Description of Artificial Sequence: Synthetic oligonucleotide
ggcggucuuccuguugaau

SEQ ID NO: 376580 - RNA, 19 nt, Artificial Sequence
  Description of Artificial Sequence: Synthetic oligonucleotide
gggacgggugucucuucuu

SEQ ID NO: 376581 - RNA, 19 nt, Artificial Sequence
  Description of Artificial Sequence: Synthetic oligonucleotide
cgacccuuaauuggcgugu

SEQ ID NO: 376582 - RNA, 19 nt, Artificial Sequence
  Description of Artificial Sequence: Synthetic oligonucleotide
ccgcaaggcugguagguuu

SEQ ID NO: 376583 - RNA, 19 nt, Artificial Sequence
  Description of Artificial Sequence: Synthetic oligonucleotide
caaccaaggcgcggugcuu

SEQ ID NO: 376584 - RNA, 19 nt, Artificial Sequence
  Description of Artificial Sequence: Synthetic oligonucleotide
gccggaccuccauucuuuu

SEQ ID NO: 376585 - RNA, 19 nt, Artificial Sequence
  Description of Artificial Sequence: Synthetic oligonucleotide
gccgcaaggcugguagguu

SEQ ID NO: 376586 - RNA, 19 nt, Artificial Sequence
  Description of Artificial Sequence: Synthetic oligonucleotide
gcgaucccguuagaacauu

SEQ ID NO: 376587 - RNA, 19 nt, Artificial Sequence
  Description of Artificial Sequence: Synthetic oligonucleotide
aauacgauaucauuauuuc

SEQ ID NO: 376588 - RNA, 19 nt, Artificial Sequence
  Description of Artificial Sequence: Synthetic oligonucleotide
ugaucuaucagcuagagau

SEQ ID NO: 376589 - RNA, 19 nt, Artificial Sequence
  Description of Artificial Sequence: Synthetic oligonucleotide
uuaaaaucguuccaguaag

SEQ ID NO: 376590 - RNA, 19 nt, Artificial Sequence
  Description of Artificial Sequence: Synthetic oligonucleotide
aaagguacguacuacgcag

SEQ ID NO: 376591 - RNA, 19 nt, Artificial Sequence
  Description of Artificial Sequence: Synthetic oligonucleotide
aaaagagccguguaagauc

SEQ ID NO: 376592 - RNA, 19 nt, Artificial Sequence
  Description of Artificial Sequence: Synthetic oligonucleotide
gaacauuucaacucuguag

SEQ ID NO: 376593 - RNA, 19 nt, Artificial Sequence
  Description of Artificial Sequence: Synthetic oligonucleotide
uuuagcuguauauacaccu

SEQ ID NO: 376594 - RNA, 19 nt, Artificial Sequence
  Description of Artificial Sequence: Synthetic oligonucleotide
ugaaacucgagguuugggg

SEQ ID NO: 376595 - RNA, 19 nt, Artificial Sequence
  Description of Artificial Sequence: Synthetic oligonucleotide
uuagcauuuacucaacuau

SEQ ID NO: 376596 - RNA, 19 nt, Artificial Sequence
  Description of Artificial Sequence: Synthetic oligonucleotide
aagcaaguugaauacucac

SEQ ID NO: 376597 - RNA, 19 nt, Artificial Sequence
  Description of Artificial Sequence: Synthetic oligonucleotide
aaaauugcucaaauuuagc

SEQ ID NO: 376598 - RNA, 19 nt, Artificial Sequence
  Description of Artificial Sequence: Synthetic oligonucleotide
uugaauacucacuugaaaa

SEQ ID NO: 376599 - RNA, 19 nt, Artificial Sequence
  Description of Artificial Sequence: Synthetic oligonucleotide
aacagugggcauuacaacu

SEQ ID NO: 376600 - RNA, 19 nt, Artificial Sequence
  Description of Artificial Sequence: Synthetic oligonucleotide
aauugcugagcagagcucg

SEQ ID NO: 376601 - RNA, 19 nt, Artificial Sequence
  Description of Artificial Sequence: Synthetic oligonucleotide
acuuuugaacacugggugc

SEQ ID NO: 376602 - RNA, 19 nt, Artificial Sequence
  Description of Artificial Sequence: Synthetic oligonucleotide
auaaauacgauaucauuau

SEQ ID NO: 376603 - RNA, 19 nt, Artificial Sequence
  Description of Artificial Sequence: Synthetic oligonucleotide
auuacaacucccuauggcu

SEQ ID NO: 376604 - RNA, 19 nt, Artificial Sequence
  Description of Artificial Sequence: Synthetic oligonucleotide
gaaggcuuagaugaggagg

SEQ ID NO: 376605 - RNA, 19 nt, Artificial Sequence
  Description of Artificial Sequence: Synthetic oligonucleotide
auccccuacauccauggcc

SEQ ID NO: 376606 - RNA, 19 nt, Artificial Sequence
  Description of Artificial Sequence: Synthetic oligonucleotide
caggucauccccuacaucc

SEQ ID NO: 376607 - RNA, 19 nt, Artificial Sequence
  Description of Artificial Sequence: Synthetic oligonucleotide
uacgauaucauuauuucuu

SEQ ID NO: 376608 - RNA, 19 nt, Artificial Sequence
  Description of Artificial Sequence: Synthetic oligonucleotide
uuuaaccagccauacaucu

SEQ ID NO: 376609 - RNA, 19 nt, Artificial Sequence
  Description of Artificial Sequence: Synthetic oligonucleotide
uaauacuggacuuggcucc

SEQ ID NO: 376610 - RNA, 19 nt, Artificial Sequence
  Description of Artificial Sequence: Synthetic oligonucleotide
ucuacaugugaucuaucag

SEQ ID NO: 376611 - RNA, 19 nt, Artificial Sequence
  Description of Artificial Sequence: Synthetic oligonucleotide
auacuggacuaacucaggc

SEQ ID NO: 376612 - RNA, 19 nt, Artificial Sequence
  Description of Artificial Sequence: Synthetic oligonucleotide
cauuuacucaacuauccag

SEQ ID NO: 376613 - RNA, 19 nt, Artificial Sequence
  Description of Artificial Sequence: Synthetic oligonucleotide
uuagggaaaucccacuagc

SEQ ID NO: 376614 - RNA, 19 nt, Artificial Sequence
  Description of Artificial Sequence: Synthetic oligonucleotide
guacguacuacgcagcagg

SEQ ID NO: 376615 - RNA, 19 nt, Artificial Sequence
  Description of Artificial Sequence: Synthetic oligonucleotide
uaaaccuccaacuguauau

SEQ ID NO: 376616 - RNA, 19 nt, Artificial Sequence
  Description of Artificial Sequence: Synthetic oligonucleotide
agggaaaucccacuagcac

SEQ ID NO: 376617 - RNA, 19 nt, Artificial Sequence
  Description of Artificial Sequence: Synthetic oligonucleotide
ugguuguugggcaugaacu

SEQ ID NO: 376618 - RNA, 19 nt, Artificial Sequence
  Description of Artificial Sequence: Synthetic oligonucleotide
uagguguauaauauuuacc

SEQ ID NO: 376619 - RNA, 19 nt, Artificial Sequence
  Description of Artificial Sequence: Synthetic oligonucleotide
aaccuuaaaaucguuccag

SEQ ID NO: 376620 - RNA, 19 nt, Artificial Sequence
  Description of Artificial Sequence: Synthetic oligonucleotide
gagacuacccaggaaaggg

SEQ ID NO: 376621 - RNA, 19 nt, Artificial Sequence
  Description of Artificial Sequence: Synthetic oligonucleotide
uugucaauccccuacccug

SEQ ID NO: 376622 - RNA, 19 nt, Artificial Sequence
  Description of Artificial Sequence: Synthetic oligonucleotide
aggaacaugggcuuuguca

SEQ ID NO: 376623 - RNA, 19 nt, Artificial Sequence
  Description of Artificial Sequence: Synthetic oligonucleotide
uguacacacaguauuuccu

SEQ ID NO: 376624 - RNA, 19 nt, Artificial Sequence
  Description of Artificial Sequence: Synthetic oligonucleotide
ugaccaaggacccauccca

SEQ ID NO: 376625 - RNA, 19 nt, Artificial Sequence
  Description of Artificial Sequence: Synthetic oligonucleotide
aaauacgauaucauuauuu

SEQ ID NO: 376626 - RNA, 19 nt, Artificial Sequence
  Description of Artificial Sequence: Synthetic oligonucleotide
agucucaguaauaaaauug

SEQ ID NO: 376627 - RNA, 19 nt, Artificial Sequence
  Description of Artificial Sequence: Synthetic oligonucleotide
caauccccuacccugagcg

SEQ ID NO: 376628 - RNA, 19 nt, Artificial Sequence
  Description of Artificial Sequence: Synthetic oligonucleotide
ucaaauuccugcccuacuc

SEQ ID NO: 376629 - RNA, 19 nt, Artificial Sequence
  Description of Artificial Sequence: Synthetic oligonucleotide
aacgcuugugguaaauggg

SEQ ID NO: 376630 - RNA, 19 nt, Artificial Sequence
  Description of Artificial Sequence: Synthetic oligonucleotide
cauuacaacucccuauggc

SEQ ID NO: 376631 - RNA, 19 nt, Artificial Sequence
  Description of Artificial Sequence: Synthetic oligonucleotide
acuaauggaagacacuuua

SEQ ID NO: 376632 - RNA, 19 nt, Artificial Sequence
  Description of Artificial Sequence: Synthetic oligonucleotide
aaagagccguguaagaucu

SEQ ID NO: 376633 - RNA, 19 nt, Artificial Sequence
  Description of Artificial Sequence: Synthetic oligonucleotide
uccgaguccguauacaggu

SEQ ID NO: 376634 - RNA, 19 nt, Artificial Sequence
  Description of Artificial Sequence: Synthetic oligonucleotide
ugaaggugaccaaggaccc

SEQ ID NO: 376635 - RNA, 19 nt, Artificial Sequence
  Description of Artificial Sequence: Synthetic oligonucleotide
aaauuccugcccuacuccu

SEQ ID NO: 376636 - RNA, 19 nt, Artificial Sequence
  Description of Artificial Sequence: Synthetic oligonucleotide
uggauggcgggucaucagg

SEQ ID NO: 376637 - RNA, 19 nt, Artificial Sequence
  Description of Artificial Sequence: Synthetic oligonucleotide
auugaguggagcuggcaag

SEQ ID NO: 376638 - RNA, 19 nt, Artificial Sequence
  Description of Artificial Sequence: Synthetic oligonucleotide
aaacucgagguuuggggug

SEQ ID NO: 376639 - RNA, 19 nt, Artificial Sequence
  Description of Artificial Sequence: Synthetic oligonucleotide
uggggugcgagguucaugc

SEQ ID NO: 376640 - RNA, 19 nt, Artificial Sequence
  Description of Artificial Sequence: Synthetic oligonucleotide
acucccuauggcuaaagug

SEQ ID NO: 376641 - RNA, 19 nt, Artificial Sequence
  Description of Artificial Sequence: Synthetic oligonucleotide
uuaccauagggaagggcag

SEQ ID NO: 376642 - RNA, 19 nt, Artificial Sequence
  Description of Artificial Sequence: Synthetic oligonucleotide
gggaaaucccacuagcacg

SEQ ID NO: 376643 - RNA, 19 nt, Artificial Sequence
  Description of Artificial Sequence: Synthetic oligonucleotide
uccugaguggaaagguacg

SEQ ID NO: 376644 - RNA, 19 nt, Artificial Sequence
  Description of Artificial Sequence: Synthetic oligonucleotide
aaauugaaacacaaagcaa

SEQ ID NO: 376645 - RNA, 19 nt, Artificial Sequence
  Description of Artificial Sequence: Synthetic oligonucleotide
acuggacuaacucaggcaa

SEQ ID NO: 376646 - RNA, 19 nt, Artificial Sequence
  Description of Artificial Sequence: Synthetic oligonucleotide
ugugcaaacgaggagggac

SEQ ID NO: 376647 - RNA, 19 nt, Artificial Sequence
  Description of Artificial Sequence: Synthetic oligonucleotide
aagccggcuuuucaguggg

SEQ ID NO: 376648 - RNA, 19 nt, Artificial Sequence
  Description of Artificial Sequence: Synthetic oligonucleotide
caguucacaaggaagugac

SEQ ID NO: 376649 - RNA, 19 nt, Artificial Sequence
  Description of Artificial Sequence: Synthetic oligonucleotide
aacucgagguuuggggugc

SEQ ID NO: 376650 - RNA, 19 nt, Artificial Sequence
  Description of Artificial Sequence: Synthetic oligonucleotide
gagaccgagacagagcugc

SEQ ID NO: 376651 - RNA, 19 nt, Artificial Sequence
  Description of Artificial Sequence: Synthetic oligonucleotide
uccccuacauccauggcca

SEQ ID NO: 376652 - RNA, 19 nt, Artificial Sequence
  Description of Artificial Sequence: Synthetic oligonucleotide
auacgauaucauuauuucu

SEQ ID NO: 376653 - RNA, 19 nt, Artificial Sequence
  Description of Artificial Sequence: Synthetic oligonucleotide
aaaucccacuagcacggag

SEQ ID NO: 376654 - RNA, 19 nt, Artificial Sequence
  Description of Artificial Sequence: Synthetic oligonucleotide
gagacagagacccucuuga

SEQ ID NO: 376655 - RNA, 19 nt, Artificial Sequence
  Description of Artificial Sequence: Synthetic oligonucleotide
auuuacucaacuauccaga

SEQ ID NO: 376656 - RNA, 19 nt, Artificial Sequence
  Description of Artificial Sequence: Synthetic oligonucleotide
cuuagggaaaucccacuag

SEQ ID NO: 376657 - RNA, 19 nt, Artificial Sequence
  Description of Artificial Sequence: Synthetic oligonucleotide
uggagacuacccaggaaag

SEQ ID NO: 376658 - RNA, 19 nt, Artificial Sequence
  Description of Artificial Sequence: Synthetic oligonucleotide
uagggaaaucccacuagca

SEQ ID NO: 376659 - RNA, 19 nt, Artificial Sequence
  Description of Artificial Sequence: Synthetic oligonucleotide
cauucagcuaauacuggac

SEQ ID NO: 376660 - RNA, 19 nt, Artificial Sequence
  Description of Artificial Sequence: Synthetic oligonucleotide
cuuucuuagggaaauccca

SEQ ID NO: 376661 - RNA, 19 nt, Artificial Sequence
  Description of Artificial Sequence: Synthetic oligonucleotide
ucagcuaauacuggacuug

SEQ ID NO: 376662 - RNA, 19 nt, Artificial Sequence
  Description of Artificial Sequence: Synthetic oligonucleotide
ucaagccugcgccauagcu

SEQ ID NO: 376663 - RNA, 19 nt, Artificial Sequence
  Description of Artificial Sequence: Synthetic oligonucleotide
gaaagguacguacuacgca

SEQ ID NO: 376664 - RNA, 19 nt, Artificial Sequence
  Description of Artificial Sequence: Synthetic oligonucleotide
ucuuagggaaaucccacua

SEQ ID NO: 376665 - RNA, 19 nt, Artificial Sequence
  Description of Artificial Sequence: Synthetic oligonucleotide
cuuagaugaggagggaacc

SEQ ID NO: 376666 - RNA, 19 nt, Artificial Sequence
  Description of Artificial Sequence: Synthetic oligonucleotide
aaaaucguuccaguaagua

SEQ ID NO: 376667 - RNA, 19 nt, Artificial Sequence
  Description of Artificial Sequence: Synthetic oligonucleotide
cuuugaguguacagguggc

SEQ ID NO: 376668 - RNA, 19 nt, Artificial Sequence
  Description of Artificial Sequence: Synthetic oligonucleotide
uauacagguccacaucauc

SEQ ID NO: 376669 - RNA, 19 nt, Artificial Sequence
  Description of Artificial Sequence: Synthetic oligonucleotide
uagcaaguggagacuaccc

SEQ ID NO: 376670 - RNA, 19 nt, Artificial Sequence
  Description of Artificial Sequence: Synthetic oligonucleotide
aagguacguacuacgcagc

SEQ ID NO: 376671 - RNA, 19 nt, Artificial Sequence
  Description of Artificial Sequence: Synthetic oligonucleotide
uuuacucaacuauccagau

SEQ ID NO: 376672 - RNA, 19 nt, Artificial Sequence
  Description of Artificial Sequence: Synthetic oligonucleotide
uaaaaucguuccaguaagu

SEQ ID NO: 376673 - RNA, 19 nt, Artificial Sequence
  Description of Artificial Sequence: Synthetic oligonucleotide
cauacuggacuaacucagg

SEQ ID NO: 376674 - RNA, 19 nt, Artificial Sequence
  Description of Artificial Sequence: Synthetic oligonucleotide
ggacuuguaguugagcugg

SEQ ID NO: 376675 - RNA, 19 nt, Artificial Sequence
  Description of Artificial Sequence: Synthetic oligonucleotide
guuccgaguccguauacag

SEQ ID NO: 376676 - RNA, 19 nt, Artificial Sequence
  Description of Artificial Sequence: Synthetic oligonucleotide
cauagggaagggcagcagc

SEQ ID NO: 376677 - RNA, 19 nt, Artificial Sequence
  Description of Artificial Sequence: Synthetic oligonucleotide
gacuaacucaggcaaccug

SEQ ID NO: 376678 - RNA, 19 nt, Artificial Sequence
  Description of Artificial Sequence: Synthetic oligonucleotide
agaugugagggcugagguc

SEQ ID NO: 376679 - RNA, 19 nt, Artificial Sequence
  Description of Artificial Sequence: Synthetic oligonucleotide
uaaaguguguugccaguuc

SEQ ID NO: 376680 - RNA, 19 nt, Artificial Sequence
  Description of Artificial Sequence: Synthetic oligonucleotide
aaggaacaugggcuuuguc

SEQ ID NO: 376681 - RNA, 19 nt, Artificial Sequence
  Description of Artificial Sequence: Synthetic oligonucleotide
agcacggagaucccaaaca

SEQ ID NO: 376682 - RNA, 19 nt, Artificial Sequence
  Description of Artificial Sequence: Synthetic oligonucleotide
cacccuagcaaguggagac

SEQ ID NO: 376683 - RNA, 19 nt, Artificial Sequence
  Description of Artificial Sequence: Synthetic oligonucleotide
uucaaauuccugcccuacu

SEQ ID NO: 376684 - RNA, 19 nt, Artificial Sequence
  Description of Artificial Sequence: Synthetic oligonucleotide
ggaaaucccacuagcacgg

SEQ ID NO: 376685 - RNA, 19 nt, Artificial Sequence
  Description of Artificial Sequence: Synthetic oligonucleotide
cccacuagcacggagaucc

SEQ ID NO: 376686 - RNA, 19 nt, Artificial Sequence
  Description of Artificial Sequence: Synthetic oligonucleotide
ugucaauccccuacccuga

SEQ ID NO: 376687 - RNA, 19 nt, Artificial Sequence
  Description of Artificial Sequence: Synthetic oligonucleotide
agcaaacuggaauggaaaa

SEQ ID NO: 376688 - RNA, 19 nt, Artificial Sequence
  Description of Artificial Sequence: Synthetic oligonucleotide
uuagcuguauauacaccua

SEQ ID NO: 376689 - RNA, 19 nt, Artificial Sequence
  Description of Artificial Sequence: Synthetic oligonucleotide
caaguugaauacucacuug

SEQ ID NO: 376690 - RNA, 19 nt, Artificial Sequence
  Description of Artificial Sequence: Synthetic oligonucleotide
agagacagagacccucuug

SEQ ID NO: 376691 - RNA, 19 nt, Artificial Sequence
  Description of Artificial Sequence: Synthetic oligonucleotide
guggagacuacccaggaaa

SEQ ID NO: 376692 - RNA, 19 nt, Artificial Sequence
  Description of Artificial Sequence: Synthetic oligonucleotide
aggccuuacugggaaaggc

SEQ ID NO: 376693 - RNA, 19 nt, Artificial Sequence
  Description of Artificial Sequence: Synthetic oligonucleotide
ucgcaggauacuuuugaac

SEQ ID NO: 376694 - RNA, 19 nt, Artificial Sequence
  Description of Artificial Sequence: Synthetic oligonucleotide
uaaauacgauaucauuauu

SEQ ID NO: 376695 - RNA, 19 nt, Artificial Sequence
  Description of Artificial Sequence: Synthetic oligonucleotide
agcaaguggagacuaccca

SEQ ID NO: 376696 - RNA, 19 nt, Artificial Sequence
  Description of Artificial Sequence: Synthetic oligonucleotide
cuagcaaguggagacuacc

SEQ ID NO: 376697 - RNA, 19 nt, Artificial Sequence
  Description of Artificial Sequence: Synthetic oligonucleotide
acgaggagggacaucaguc

SEQ ID NO: 376698 - RNA, 19 nt, Artificial Sequence
  Description of Artificial Sequence: Synthetic oligonucleotide
accuaucuacaugugaucu

SEQ ID NO: 376699 - RNA, 19 nt, Artificial Sequence
  Description of Artificial Sequence: Synthetic oligonucleotide
gcuagagauacaaaagagc

SEQ ID NO: 376700 - RNA, 19 nt, Artificial Sequence
  Description of Artificial Sequence: Synthetic oligonucleotide
aacucccuauggcuaaagu

SEQ ID NO: 376701 - RNA, 19 nt, Artificial Sequence
  Description of Artificial Sequence: Synthetic oligonucleotide
acuaaaggacccagggcac

SEQ ID NO: 376702 - RNA, 19 nt, Artificial Sequence
  Description of Artificial Sequence: Synthetic oligonucleotide
agauacaaaagagccgugu

SEQ ID NO: 376703 - RNA, 19 nt, Artificial Sequence
  Description of Artificial Sequence: Synthetic oligonucleotide
accuuaaaaucguuccagu

SEQ ID NO: 376704 - RNA, 19 nt, Artificial Sequence
  Description of Artificial Sequence: Synthetic oligonucleotide
ggcaccgagaccgagacag

SEQ ID NO: 376705 - RNA, 19 nt, Artificial Sequence
  Description of Artificial Sequence: Synthetic oligonucleotide
uccguauacagguccacau

SEQ ID NO: 376706 - RNA, 19 nt, Artificial Sequence
  Description of Artificial Sequence: Synthetic oligonucleotide
uagguauggagagucccag

SEQ ID NO: 376707 - RNA, 19 nt, Artificial Sequence
  Description of Artificial Sequence: Synthetic oligonucleotide
cagccauacaucuggucgc

SEQ ID NO: 376708 - RNA, 19 nt, Artificial Sequence
  Description of Artificial Sequence: Synthetic oligonucleotide
caagccugcgccauagcug

SEQ ID NO: 376709 - RNA, 19 nt, Artificial Sequence
  Description of Artificial Sequence: Synthetic oligonucleotide
cuuggaggccgaaggacag

SEQ ID NO: 376710 - RNA, 19 nt, Artificial Sequence
  Description of Artificial Sequence: Synthetic oligonucleotide
uagucucaguaauaaaauu

SEQ ID NO: 376711 - RNA, 19 nt, Artificial Sequence
  Description of Artificial Sequence: Synthetic oligonucleotide
uucagcuaauacuggacuu

SEQ ID NO: 376712 - RNA, 19 nt, Artificial Sequence
  Description of Artificial Sequence: Synthetic oligonucleotide
gaaacucgagguuuggggu

SEQ ID NO: 376713 - RNA, 19 nt, Artificial Sequence
  Description of Artificial Sequence: Synthetic oligonucleotide
uacguacuacgcagcaggc

SEQ ID NO: 376714 - RNA, 19 nt, Artificial Sequence
  Description of Artificial Sequence: Synthetic oligonucleotide
acugcguggacuuguaguu

SEQ ID NO: 376715 - RNA, 19 nt, Artificial Sequence
  Description of Artificial Sequence: Synthetic oligonucleotide
uccuuguaucaggagagca

SEQ ID NO: 376716 - RNA, 19 nt, Artificial Sequence
  Description of Artificial Sequence: Synthetic oligonucleotide
gcaaguggagacuacccag

SEQ ID NO: 376717 - RNA, 19 nt, Artificial Sequence
  Description of Artificial Sequence: Synthetic oligonucleotide
augaaacucgagguuuggg

SEQ ID NO: 376718 - RNA, 19 nt, Artificial Sequence
  Description of Artificial Sequence: Synthetic oligonucleotide
uuugaguguacagguggca

SEQ ID NO: 376719 - RNA, 19 nt, Artificial Sequence
  Description of Artificial Sequence: Synthetic oligonucleotide
ugccuagggauccuuguau

SEQ ID NO: 376720 - RNA, 19 nt, Artificial Sequence
  Description of Artificial Sequence: Synthetic oligonucleotide
uggucgcagagcauccugc

SEQ ID NO: 376721 - RNA, 19 nt, Artificial Sequence
  Description of Artificial Sequence: Synthetic oligonucleotide
acgauaucauuauuucuuu

SEQ ID NO: 376722 - RNA, 19 nt, Artificial Sequence
  Description of Artificial Sequence: Synthetic oligonucleotide
ggcaccuuuauaaauacga

SEQ ID NO: 376723 - RNA, 19 nt, Artificial Sequence
  Description of Artificial Sequence: Synthetic oligonucleotide
caucauccugaguggaaag

SEQ ID NO: 376724 - RNA, 19 nt, Artificial Sequence
  Description of Artificial Sequence: Synthetic oligonucleotide
ucugccuagggauccuugu

SEQ ID NO: 376725 - RNA, 19 nt, Artificial Sequence
  Description of Artificial Sequence: Synthetic oligonucleotide
ucgugcacacuggagguag

SEQ ID NO: 376726 - RNA, 19 nt, Artificial Sequence
  Description of Artificial Sequence: Synthetic oligonucleotide
ggauccuuguaucaggaga

SEQ ID NO: 376727 - RNA, 19 nt, Artificial Sequence
  Description of Artificial Sequence: Synthetic oligonucleotide
agcaaguugaauacucacu

SEQ ID NO: 376728 - RNA, 19 nt, Artificial Sequence
  Description of Artificial Sequence: Synthetic oligonucleotide
cuacgcagcaggccaaggc

SEQ ID NO: 376729 - RNA, 19 nt, Artificial Sequence
  Description of Artificial Sequence: Synthetic oligonucleotide
cucccuauggcuaaagugu

SEQ ID NO: 376730 - RNA, 19 nt, Artificial Sequence
  Description of Artificial Sequence: Synthetic oligonucleotide
uguugccaguucacaagga

SEQ ID NO: 376731 - RNA, 19 nt, Artificial Sequence
  Description of Artificial Sequence: Synthetic oligonucleotide
acaccuaucuacaugugau

SEQ ID NO: 376732 - RNA, 19 nt, Artificial Sequence
  Description of Artificial Sequence: Synthetic oligonucleotide
acguacuacgcagcaggcc

SEQ ID NO: 376733 - RNA, 19 nt, Artificial Sequence
  Description of Artificial Sequence: Synthetic oligonucleotide
cagcuaauacuggacuugg

SEQ ID NO: 376734 - RNA, 19 nt, Artificial Sequence
  Description of Artificial Sequence: Synthetic oligonucleotide
aggggauaucugccuaggg

SEQ ID NO: 376735 - RNA, 19 nt, Artificial Sequence
  Description of Artificial Sequence: Synthetic oligonucleotide
ugcccagggaagcuagucu

SEQ ID NO: 376736 - RNA, 19 nt, Artificial Sequence
  Description of Artificial Sequence: Synthetic oligonucleotide
cuauggcuaaaguguguug

SEQ ID NO: 376737 - RNA, 19 nt, Artificial Sequence
  Description of Artificial Sequence: Synthetic oligonucleotide
ucaauccccuacccugagc

SEQ ID NO: 376738 - RNA, 19 nt, Artificial Sequence
  Description of Artificial Sequence: Synthetic oligonucleotide
uugaguggagcuggcaaga

SEQ ID NO: 376739 - RNA, 19 nt, Artificial Sequence
  Description of Artificial Sequence: Synthetic oligonucleotide
gaggggauaucugccuagg

SEQ ID NO: 376740 - RNA, 19 nt, Artificial Sequence
  Description of Artificial Sequence: Synthetic oligonucleotide
aauuccugcccuacuccug

SEQ ID NO: 376741 - RNA, 19 nt, Artificial Sequence
  Description of Artificial Sequence: Synthetic oligonucleotide
agaaggaacaugggcuuug

SEQ ID NO: 376742 - RNA, 19 nt, Artificial Sequence
  Description of Artificial Sequence: Synthetic oligonucleotide
ccaacuguauauacaguac

SEQ ID NO: 376743 - RNA, 19 nt, Artificial Sequence
  Description of Artificial Sequence: Synthetic oligonucleotide
uagcacggagaucccaaac

SEQ ID NO: 376744 - RNA, 19 nt, Artificial Sequence
  Description of Artificial Sequence: Synthetic oligonucleotide
caucaacaguucugaagug

SEQ ID NO: 376745 - RNA, 19 nt, Artificial Sequence
  Description of Artificial Sequence: Synthetic oligonucleotide
cuuacugggaaaggcgcug

SEQ ID NO: 376746 - RNA, 19 nt, Artificial Sequence
  Description of Artificial Sequence: Synthetic oligonucleotide
acaugagaaggaacauggg

SEQ ID NO: 376747 - RNA, 19 nt, Artificial Sequence
  Description of Artificial Sequence: Synthetic oligonucleotide
agguagguguauaauauuu

SEQ ID NO: 376748 - RNA, 19 nt, Artificial Sequence
  Description of Artificial Sequence: Synthetic oligonucleotide
agugggcauuacaacuccc

SEQ ID NO: 376749 - RNA, 19 nt, Artificial Sequence
  Description of Artificial Sequence: Synthetic oligonucleotide
ccuuguaucaggagagcag

SEQ ID NO: 376750 - RNA, 19 nt, Artificial Sequence
  Description of Artificial Sequence: Synthetic oligonucleotide
gaucgaggcccugagucug

SEQ ID NO: 376751 - RNA, 19 nt, Artificial Sequence
  Description of Artificial Sequence: Synthetic oligonucleotide
ccguguaagaucugaaaac

SEQ ID NO: 376752 - RNA, 19 nt, Artificial Sequence
  Description of Artificial Sequence: Synthetic oligonucleotide
ucgagguuuggggugcgag

SEQ ID NO: 376753 - RNA, 19 nt, Artificial Sequence
  Description of Artificial Sequence: Synthetic oligonucleotide
agucaagccugcgccauag

SEQ ID NO: 376754 - RNA, 19 nt, Artificial Sequence
  Description of Artificial Sequence: Synthetic oligonucleotide
ccgaaggacagccaaguag

SEQ ID NO: 376755 - RNA, 19 nt, Artificial Sequence
  Description of Artificial Sequence: Synthetic oligonucleotide
agguacguacuacgcagca

SEQ ID NO: 376756 - RNA, 19 nt, Artificial Sequence
  Description of Artificial Sequence: Synthetic oligonucleotide
ggcuuugucaauccccuac

SEQ ID NO: 376757 - RNA, 19 nt, Artificial Sequence
  Description of Artificial Sequence: Synthetic oligonucleotide
gcacggagaucccaaacag

SEQ ID NO: 376758 - RNA, 19 nt, Artificial Sequence
  Description of Artificial Sequence: Synthetic oligonucleotide
cuaaaggacccagggcacc

SEQ ID NO: 376759 - RNA, 19 nt, Artificial Sequence
  Description of Artificial Sequence: Synthetic oligonucleotide
ugugguaaauggggugggc

SEQ ID NO: 376760 - RNA, 19 nt, Artificial Sequence
  Description of Artificial Sequence: Synthetic oligonucleotide
uggccucuaucuugagucc

SEQ ID NO: 376761 - RNA, 19 nt, Artificial Sequence
  Description of Artificial Sequence: Synthetic oligonucleotide
gauggauggcgggucauca

SEQ ID NO: 376762 - RNA, 19 nt, Artificial Sequence
  Description of Artificial Sequence: Synthetic oligonucleotide
auggauggcgggucaucag

SEQ ID NO: 376763 - RNA, 19 nt, Artificial Sequence
  Description of Artificial Sequence: Synthetic oligonucleotide
uaaaggacccagggcaccu

SEQ ID NO: 376764 - RNA, 19 nt, Artificial Sequence
  Description of Artificial Sequence: Synthetic oligonucleotide
agagccguguaagaucuga

SEQ ID NO: 376765 - RNA, 19 nt, Artificial Sequence
  Description of Artificial Sequence: Synthetic oligonucleotide
aacuaauggaagacacuuu

SEQ ID NO: 376766 - RNA, 19 nt, Artificial Sequence
  Description of Artificial Sequence: Synthetic oligonucleotide
gaaaggguaugagcacccc

SEQ ID NO: 376767 - RNA, 19 nt, Artificial Sequence
  Description of Artificial Sequence: Synthetic oligonucleotide
uggggccuuaucuguacac

SEQ ID NO: 376768 - RNA, 19 nt, Artificial Sequence
  Description of Artificial Sequence: Synthetic oligonucleotide
gcuuugucaauccccuacc

SEQ ID NO: 376769 - RNA, 19 nt, Artificial Sequence
  Description of Artificial Sequence: Synthetic oligonucleotide
uggagcaaacuggaaugga

SEQ ID NO: 376770 - RNA, 19 nt, Artificial Sequence
  Description of Artificial Sequence: Synthetic oligonucleotide
caccuaucuacaugugauc

SEQ ID NO: 376771 - RNA, 19 nt, Artificial Sequence
  Description of Artificial Sequence: Synthetic oligonucleotide
cuagagcucucaggggugg

SEQ ID NO: 376772 - RNA, 19 nt, Artificial Sequence
  Description of Artificial Sequence: Synthetic oligonucleotide
aguccguauacagguccac

SEQ ID NO: 376773 - RNA, 19 nt, Artificial Sequence
  Description of Artificial Sequence: Synthetic oligonucleotide
cuggacuaacucaggcaac

SEQ ID NO: 376774 - RNA, 19 nt, Artificial Sequence
  Description of Artificial Sequence: Synthetic oligonucleotide
caggcaccgagaccgagac

SEQ ID NO: 376775 - RNA, 19 nt, Artificial Sequence
  Description of Artificial Sequence: Synthetic oligonucleotide
ggggauaucugccuaggga

SEQ ID NO: 376776 - RNA, 19 nt, Artificial Sequence
  Description of Artificial Sequence: Synthetic oligonucleotide
ccucuugacaggaccaagc

SEQ ID NO: 376777 - RNA, 19 nt, Artificial Sequence
  Description of Artificial Sequence: Synthetic oligonucleotide
ccgcuuggaagacuaaagg

SEQ ID NO: 376778 - RNA, 19 nt, Artificial Sequence
  Description of Artificial Sequence: Synthetic oligonucleotide
guauggagagucccagaga

SEQ ID NO: 376779 - RNA, 19 nt, Artificial Sequence
  Description of Artificial Sequence: Synthetic oligonucleotide
uggcagccgaucgaggccc

SEQ ID NO: 376780 - RNA, 19 nt, Artificial Sequence
  Description of Artificial Sequence: Synthetic oligonucleotide
aggggucguagugguaggc

SEQ ID NO: 376781 - RNA, 19 nt, Artificial Sequence
  Description of Artificial Sequence: Synthetic oligonucleotide
agggaaccccaccugaauu

SEQ ID NO: 376782 - RNA, 19 nt, Artificial Sequence
  Description of Artificial Sequence: Synthetic oligonucleotide
cccucgugcacacuggagg

SEQ ID NO: 376783 - RNA, 19 nt, Artificial Sequence
  Description of Artificial Sequence: Synthetic oligonucleotide
aguggagacuacccaggaa

SEQ ID NO: 376784 - RNA, 19 nt, Artificial Sequence
  Description of Artificial Sequence: Synthetic oligonucleotide
ggaaggcuuagaugaggag

SEQ ID NO: 376785 - RNA, 19 nt, Artificial Sequence
  Description of Artificial Sequence: Synthetic oligonucleotide
ggagacuacccaggaaagg

SEQ ID NO: 376786 - RNA, 19 nt, Artificial Sequence
  Description of Artificial Sequence: Synthetic oligonucleotide
acccgguuacagaagccac

SEQ ID NO: 376787 - RNA, 19 nt, Artificial Sequence
  Description of Artificial Sequence: Synthetic oligonucleotide
gaaggacagccaaguagac

SEQ ID NO: 376788 - RNA, 19 nt, Artificial Sequence
  Description of Artificial Sequence: Synthetic oligonucleotide
cugcgccauagcugaaugc

SEQ ID NO: 376789 - RNA, 19 nt, Artificial Sequence
  Description of Artificial Sequence: Synthetic oligonucleotide
ggaggggauaucugccuag

SEQ ID NO: 376790 - RNA, 19 nt, Artificial Sequence
  Description of Artificial Sequence: Synthetic oligonucleotide
gcauucagcuaauacugga

SEQ ID NO: 376791 - RNA, 19 nt, Artificial Sequence
  Description of Artificial Sequence: Synthetic oligonucleotide
gcuuagaugaggagggaac

SEQ ID NO: 376792 - RNA, 19 nt, Artificial Sequence
  Description of Artificial Sequence: Synthetic oligonucleotide
gucaauccccuacccugag

SEQ ID NO: 376793 - RNA, 19 nt, Artificial Sequence
  Description of Artificial Sequence: Synthetic oligonucleotide
gccguguaagaucugaaaa

SEQ ID NO: 376794 - RNA, 19 nt, Artificial Sequence
  Description of Artificial Sequence: Synthetic oligonucleotide
aaacgaggagggacaucag

SEQ ID NO: 376795 - RNA, 19 nt, Artificial Sequence
  Description of Artificial Sequence: Synthetic oligonucleotide
acucaacuauccagaucac

SEQ ID NO: 376796 - RNA, 19 nt, Artificial Sequence
  Description of Artificial Sequence: Synthetic oligonucleotide
uugcucaaauuuagcugua

SEQ ID NO: 376797 - RNA, 19 nt, Artificial Sequence
  Description of Artificial Sequence: Synthetic oligonucleotide
cgcaggauacuuuugaaca

SEQ ID NO: 376798 - RNA, 19 nt, Artificial Sequence
  Description of Artificial Sequence: Synthetic oligonucleotide
gaaccccaccugaauuucc

SEQ ID NO: 376799 - RNA, 19 nt, Artificial Sequence
  Description of Artificial Sequence: Synthetic oligonucleotide
acuagagcucucaggggug

SEQ ID NO: 376800 - RNA, 19 nt, Artificial Sequence
  Description of Artificial Sequence: Synthetic oligonucleotide
agguauggagagucccaga

SEQ ID NO: 376801 - RNA, 19 nt, Artificial Sequence
  Description of Artificial Sequence: Synthetic oligonucleotide
ggaaaggguaugagcaccc

SEQ ID NO: 376802 - RNA, 19 nt, Artificial Sequence
  Description of Artificial Sequence: Synthetic oligonucleotide
cuaucuugagucccugcaa

SEQ ID NO: 376803 - RNA, 19 nt, Artificial Sequence
  Description of Artificial Sequence: Synthetic oligonucleotide
gugguaaauggggugggca

SEQ ID NO: 376804 - RNA, 19 nt, Artificial Sequence
  Description of Artificial Sequence: Synthetic oligonucleotide
gggucguagugguaggcgc

SEQ ID NO: 376805 - RNA, 19 nt, Artificial Sequence
  Description of Artificial Sequence: Synthetic oligonucleotide
aggcaaccuggccucuauc

SEQ ID NO: 376806 - RNA, 19 nt, Artificial Sequence
  Description of Artificial Sequence: Synthetic oligonucleotide
cuggucgcagagcauccug

SEQ ID NO: 376807 - RNA, 19 nt, Artificial Sequence
  Description of Artificial Sequence: Synthetic oligonucleotide
caccgagaccgagacagag

SEQ ID NO: 376808 - RNA, 19 nt, Artificial Sequence
  Description of Artificial Sequence: Synthetic oligonucleotide
gaucuaucagcuagagaua

SEQ ID NO: 376809 - RNA, 19 nt, Artificial Sequence
  Description of Artificial Sequence: Synthetic oligonucleotide
gugaucuaucagcuagaga

SEQ ID NO: 376810 - RNA, 19 nt, Artificial Sequence
  Description of Artificial Sequence: Synthetic oligonucleotide
uacuacgcagcaggccaag

SEQ ID NO: 376811 - RNA, 19 nt, Artificial Sequence
  Description of Artificial Sequence: Synthetic oligonucleotide
cccgcuuggaagacuaaag

SEQ ID NO: 376812 - RNA, 19 nt, Artificial Sequence
  Description of Artificial Sequence: Synthetic oligonucleotide
agacuacccaggaaagggu

SEQ ID NO: 376813 - RNA, 19 nt, Artificial Sequence
  Description of Artificial Sequence: Synthetic oligonucleotide
cuccuggugagcauuugaa

SEQ ID NO: 376814 - RNA, 19 nt, Artificial Sequence
  Description of Artificial Sequence: Synthetic oligonucleotide
agccgaucgaggcccugag

SEQ ID NO: 376815 - RNA, 19 nt, Artificial Sequence
  Description of Artificial Sequence: Synthetic oligonucleotide
caggggucguagugguagg

SEQ ID NO: 376816 - RNA, 19 nt, Artificial Sequence
  Description of Artificial Sequence: Synthetic oligonucleotide
gcaaguugaauacucacuu

SEQ ID NO: 376817 - RNA, 19 nt, Artificial Sequence
  Description of Artificial Sequence: Synthetic oligonucleotide
ggauggcgggucaucaggg

SEQ ID NO: 376818 - RNA, 19 nt, Artificial Sequence
  Description of Artificial Sequence: Synthetic oligonucleotide
aggcgagccaucagagagg

SEQ ID NO: 376819 - RNA, 19 nt, Artificial Sequence
  Description of Artificial Sequence: Synthetic oligonucleotide
ccgaucgaggcccugaguc

SEQ ID NO: 376820 - RNA, 19 nt, Artificial Sequence
  Description of Artificial Sequence: Synthetic oligonucleotide
caucccaguccaagccggc

SEQ ID NO: 376821 - RNA, 19 nt, Artificial Sequence
  Description of Artificial Sequence: Synthetic oligonucleotide
aucguuccaguaaguagga

SEQ ID NO: 376822 - RNA, 19 nt, Artificial Sequence
  Description of Artificial Sequence: Synthetic oligonucleotide
agggauccuuguaucagga

SEQ ID NO: 376823 - RNA, 19 nt, Artificial Sequence
  Description of Artificial Sequence: Synthetic oligonucleotide
gucgcaggauacuuuugaa

SEQ ID NO: 376824 - RNA, 19 nt, Artificial Sequence
  Description of Artificial Sequence: Synthetic oligonucleotide
ccaaguagacugucacagc

SEQ ID NO: 376825 - RNA, 19 nt, Artificial Sequence
  Description of Artificial Sequence: Synthetic oligonucleotide
cuuguuguggaguccacuu

SEQ ID NO: 376826 - RNA, 19 nt, Artificial Sequence
  Description of Artificial Sequence: Synthetic oligonucleotide
gugcaaacgaggagggaca

SEQ ID NO: 376827 - RNA, 19 nt, Artificial Sequence
  Description of Artificial Sequence: Synthetic oligonucleotide
gguucggccagucaagccu

SEQ ID NO: 376828 - RNA, 19 nt, Artificial Sequence
  Description of Artificial Sequence: Synthetic oligonucleotide
ggucgcagagcauccugcc

SEQ ID NO: 376829 - RNA, 19 nt, Artificial Sequence
  Description of Artificial Sequence: Synthetic oligonucleotide
acacaagaugggagaacug

SEQ ID NO: 376830 - RNA, 19 nt, Artificial Sequence
  Description of Artificial Sequence: Synthetic oligonucleotide
gguacguacuacgcagcag

SEQ ID NO: 376831 - RNA, 19 nt, Artificial Sequence
  Description of Artificial Sequence: Synthetic oligonucleotide
ugcaaacgaggagggacau

SEQ ID NO: 376832 - RNA, 19 nt, Artificial Sequence
  Description of Artificial Sequence: Synthetic oligonucleotide
cuugagucccugcaauucu

SEQ ID NO: 376833 - RNA, 19 nt, Artificial Sequence
  Description of Artificial Sequence: Synthetic oligonucleotide
gacuacccaggaaagggua

SEQ ID NO: 376834 - RNA, 19 nt, Artificial Sequence
  Description of Artificial Sequence: Synthetic oligonucleotide
gccuuacugggaaaggcgc

SEQ ID NO: 376835 - RNA, 19 nt, Artificial Sequence
  Description of Artificial Sequence: Synthetic oligonucleotide
uccugguggaaagcauacu

SEQ ID NO: 376836 - RNA, 19 nt, Artificial Sequence
  Description of Artificial Sequence: Synthetic oligonucleotide
ggccuuaucuguacacaag

SEQ ID NO: 376837 - RNA, 19 nt, Artificial Sequence
  Description of Artificial Sequence: Synthetic oligonucleotide
cagaugugagggcugaggu

SEQ ID NO: 376838 - RNA, 19 nt, Artificial Sequence
  Description of Artificial Sequence: Synthetic oligonucleotide
ggaagcuagucucaguaau

SEQ ID NO: 376839 - RNA, 19 nt, Artificial Sequence
  Description of Artificial Sequence: Synthetic oligonucleotide
uggcaggagggcucauuuc

SEQ ID NO: 376840 - RNA, 19 nt, Artificial Sequence
  Description of Artificial Sequence: Synthetic oligonucleotide
cagucuuguuguggagucc

SEQ ID NO: 376841 - RNA, 19 nt, Artificial Sequence
  Description of Artificial Sequence: Synthetic oligonucleotide
ucuggucgcagagcauccu

SEQ ID NO: 376842 - RNA, 19 nt, Artificial Sequence
  Description of Artificial Sequence: Synthetic oligonucleotide
aguucacaaggaagugaca

SEQ ID NO: 376843 - RNA, 19 nt, Artificial Sequence
  Description of Artificial Sequence: Synthetic oligonucleotide
gagguagguguauaauauu

SEQ ID NO: 376844 - RNA, 19 nt, Artificial Sequence
  Description of Artificial Sequence: Synthetic oligonucleotide
ggggucguagugguaggcg

SEQ ID NO: 376845 - RNA, 19 nt, Artificial Sequence
  Description of Artificial Sequence: Synthetic oligonucleotide
gguagguguauaauauuua

SEQ ID NO: 376846 - RNA, 19 nt, Artificial Sequence
  Description of Artificial Sequence: Synthetic oligonucleotide
ggcgagccaucagagaggc

SEQ ID NO: 376847 - RNA, 19 nt, Artificial Sequence
  Description of Artificial Sequence: Synthetic oligonucleotide
acuacccaggaaaggguau

SEQ ID NO: 376848 - RNA, 19 nt, Artificial Sequence
  Description of Artificial Sequence: Synthetic oligonucleotide
ugcgagguucaugcccagc

SEQ ID NO: 376849 - RNA, 19 nt, Artificial Sequence
  Description of Artificial Sequence: Synthetic oligonucleotide
caacucccuauggcuaaag

SEQ ID NO: 376850 - RNA, 19 nt, Artificial Sequence
  Description of Artificial Sequence: Synthetic oligonucleotide
ugaguggagcuggcaagau

SEQ ID NO: 376851 - RNA, 19 nt, Artificial Sequence
  Description of Artificial Sequence: Synthetic oligonucleotide
cugcguggacuuguaguug

SEQ ID NO: 376852 - RNA, 19 nt, Artificial Sequence
  Description of Artificial Sequence: Synthetic oligonucleotide
cacccgguuacagaagcca

SEQ ID NO: 376853 - RNA, 19 nt, Artificial Sequence
  Description of Artificial Sequence: Synthetic oligonucleotide
gaaggugaccaaggaccca

SEQ ID NO: 376854 - RNA, 19 nt, Artificial Sequence
  Description of Artificial Sequence: Synthetic oligonucleotide
ccggcuuuucagugggagg

SEQ ID NO: 376855 - RNA, 19 nt, Artificial Sequence
  Description of Artificial Sequence: Synthetic oligonucleotide
ccgguuacagaagccacag

SEQ ID NO: 376856 - RNA, 19 nt, Artificial Sequence
  Description of Artificial Sequence: Synthetic oligonucleotide
ccaagccggcuuuucagug

SEQ ID NO: 376857 - RNA, 19 nt, Artificial Sequence
  Description of Artificial Sequence: Synthetic oligonucleotide
aggucauccccuacaucca

SEQ ID NO: 376858 - RNA, 19 nt, Artificial Sequence
  Description of Artificial Sequence: Synthetic oligonucleotide
ccgcauaggcgccccaugg

SEQ ID NO: 376859 - RNA, 19 nt, Artificial Sequence
  Description of Artificial Sequence: Synthetic oligonucleotide
ggcgccaaggcaggcgucg

SEQ ID NO: 376860 - RNA, 19 nt, Artificial Sequence
  Description of Artificial Sequence: Synthetic oligonucleotide
acccuagcaaguggagacu

SEQ ID NO: 376861 - RNA, 19 nt, Artificial Sequence
  Description of Artificial Sequence: Synthetic oligonucleotide
guccguauacagguccaca

SEQ ID NO: 376862 - RNA, 19 nt, Artificial Sequence
  Description of Artificial Sequence: Synthetic oligonucleotide
cggagaucccaaacagugg

SEQ ID NO: 376863 - RNA, 19 nt, Artificial Sequence
  Description of Artificial Sequence: Synthetic oligonucleotide
cgagguuuggggugcgagg

SEQ ID NO: 376864 - RNA, 19 nt, Artificial Sequence
  Description of Artificial Sequence: Synthetic oligonucleotide
gggccuuaucuguacacaa

SEQ ID NO: 376865 - RNA, 19 nt, Artificial Sequence
  Description of Artificial Sequence: Synthetic oligonucleotide
ggcaaccuggccucuaucu

SEQ ID NO: 376866 - RNA, 19 nt, Artificial Sequence
  Description of Artificial Sequence: Synthetic oligonucleotide
cgcuuggaagacuaaagga

SEQ ID NO: 376867 - RNA, 19 nt, Artificial Sequence
  Description of Artificial Sequence: Synthetic oligonucleotide
gccuagggauccuuguauc

SEQ ID NO: 376868 - RNA, 19 nt, Artificial Sequence
  Description of Artificial Sequence: Synthetic oligonucleotide
ccuagggauccuuguauca

SEQ ID NO: 376869 - RNA, 19 nt, Artificial Sequence
  Description of Artificial Sequence: Synthetic oligonucleotide
agggguagguauggagagu

SEQ ID NO: 376870 - RNA, 19 nt, Artificial Sequence
  Description of Artificial Sequence: Synthetic oligonucleotide
ggccucuaucuugaguccc

SEQ ID NO: 376871 - RNA, 19 nt, Artificial Sequence
  Description of Artificial Sequence: Synthetic oligonucleotide
cugcccagggaagcuaguc

SEQ ID NO: 376872 - RNA, 19 nt, Artificial Sequence
  Description of Artificial Sequence: Synthetic oligonucleotide
gccggcuuuucagugggag

SEQ ID NO: 376873 - RNA, 19 nt, Artificial Sequence
  Description of Artificial Sequence: Synthetic oligonucleotide
aagagccguguaagaucug

SEQ ID NO: 376874 - RNA, 19 nt, Artificial Sequence
  Description of Artificial Sequence: Synthetic oligonucleotide
ccuagcaaguggagacuac

SEQ ID NO: 376875 - RNA, 19 nt, Artificial Sequence
  Description of Artificial Sequence: Synthetic oligonucleotide
gaacaugggcuuugucaau

SEQ ID NO: 376876 - RNA, 19 nt, Artificial Sequence
  Description of Artificial Sequence: Synthetic oligonucleotide
ucguuccaguaaguaggaa

SEQ ID NO: 376877 - RNA, 19 nt, Artificial Sequence
  Description of Artificial Sequence: Synthetic oligonucleotide
gucguagugguaggcgcca

SEQ ID NO: 376878 - RNA, 19 nt, Artificial Sequence
  Description of Artificial Sequence: Synthetic oligonucleotide
ccccuuugacacuggucgg

SEQ ID NO: 376879 - RNA, 19 nt, Artificial Sequence
  Description of Artificial Sequence: Synthetic oligonucleotide
gcuaaaguguguugccagu

SEQ ID NO: 376880 - RNA, 19 nt, Artificial Sequence
  Description of Artificial Sequence: Synthetic oligonucleotide
guuuggggugcgagguuca

SEQ ID NO: 376881 - RNA, 19 nt, Artificial Sequence
  Description of Artificial Sequence: Synthetic oligonucleotide
uaucugccuagggauccuu

SEQ ID NO: 376882 - RNA, 19 nt, Artificial Sequence
  Description of Artificial Sequence: Synthetic oligonucleotide
gguauggcaggagggcuca

SEQ ID NO: 376883 - RNA, 19 nt, Artificial Sequence
  Description of Artificial Sequence: Synthetic oligonucleotide
gguuccgaguccguauaca

SEQ ID NO: 376884 - RNA, 19 nt, Artificial Sequence
  Description of Artificial Sequence: Synthetic oligonucleotide
gugcgagguucaugcccag

SEQ ID NO: 376885 - RNA, 19 nt, Artificial Sequence
  Description of Artificial Sequence: Synthetic oligonucleotide
accccgcuagccccucgug

SEQ ID NO: 376886 - RNA, 19 nt, Artificial Sequence
  Description of Artificial Sequence: Synthetic oligonucleotide
acaacucccuauggcuaaa

SEQ ID NO: 376887 - RNA, 19 nt, Artificial Sequence
  Description of Artificial Sequence: Synthetic oligonucleotide
ggggugaacgcuuguggua

SEQ ID NO: 376888 - RNA, 19 nt, Artificial Sequence
  Description of Artificial Sequence: Synthetic oligonucleotide
cuaaaguguguugccaguu

SEQ ID NO: 376889 - RNA, 19 nt, Artificial Sequence
  Description of Artificial Sequence: Synthetic oligonucleotide
ggggccuuaucuguacaca

SEQ ID NO: 376890 - RNA, 19 nt, Artificial Sequence
  Description of Artificial Sequence: Synthetic oligonucleotide
ucaggcaaccuggccucua

SEQ ID NO: 376891 - RNA, 19 nt, Artificial Sequence
  Description of Artificial Sequence: Synthetic oligonucleotide
ggguuccgaguccguauac

SEQ ID NO: 376892 - RNA, 19 nt, Artificial Sequence
  Description of Artificial Sequence: Synthetic oligonucleotide
gucgcagagcauccugccu

SEQ ID NO: 376893 - RNA, 19 nt, Artificial Sequence
  Description of Artificial Sequence: Synthetic oligonucleotide
ucguagugguaggcgccaa

SEQ ID NO: 376894 - RNA, 19 nt, Artificial Sequence
  Description of Artificial Sequence: Synthetic oligonucleotide
cacuagcacggagauccca

SEQ ID NO: 376895 - RNA, 19 nt, Artificial Sequence
  Description of Artificial Sequence: Synthetic oligonucleotide
ccuaucuacaugugaucua

SEQ ID NO: 376896 - RNA, 19 nt, Artificial Sequence
  Description of Artificial Sequence: Synthetic oligonucleotide
ucccacuagcacggagauc

SEQ ID NO: 376897 - RNA, 19 nt, Artificial Sequence
  Description of Artificial Sequence: Synthetic oligonucleotide
cacauacuucucccgcaua

SEQ ID NO: 376898 - RNA, 19 nt, Artificial Sequence
  Description of Artificial Sequence: Synthetic oligonucleotide
aggcaccgagaccgagaca

SEQ ID NO: 376899 - RNA, 19 nt, Artificial Sequence
  Description of Artificial Sequence: Synthetic oligonucleotide
gcuagccccucgugcacac

SEQ ID NO: 376900 - RNA, 19 nt, Artificial Sequence
  Description of Artificial Sequence: Synthetic oligonucleotide
ccaagccaggucaguggug

SEQ ID NO: 376901 - RNA, 19 nt, Artificial Sequence
  Description of Artificial Sequence: Synthetic oligonucleotide
cugguauggcaggagggcu

SEQ ID NO: 376902 - RNA, 19 nt, Artificial Sequence
  Description of Artificial Sequence: Synthetic oligonucleotide
gugugcaaacgaggaggga

SEQ ID NO: 376903 - RNA, 19 nt, Artificial Sequence
  Description of Artificial Sequence: Synthetic oligonucleotide
cccgguuacagaagccaca

SEQ ID NO: 376904 - RNA, 19 nt, Artificial Sequence
  Description of Artificial Sequence: Synthetic oligonucleotide
gcucgccacuccuggugag

SEQ ID NO: 376905 - RNA, 19 nt, Artificial Sequence
  Description of Artificial Sequence: Synthetic oligonucleotide
ggggugcgagguucaugcc

SEQ ID NO: 376906 - RNA, 19 nt, Artificial Sequence
  Description of Artificial Sequence: Synthetic oligonucleotide
acccugagcgaggcucuca

SEQ ID NO: 376907 - RNA, 19 nt, Artificial Sequence
  Description of Artificial Sequence: Synthetic oligonucleotide
ccccgcuagccccucgugc

SEQ ID NO: 376908 - RNA, 19 nt, Artificial Sequence
  Description of Artificial Sequence: Synthetic oligonucleotide
cccgcuagccccucgugca

SEQ ID NO: 376909 - RNA, 19 nt, Artificial Sequence
  Description of Artificial Sequence: Synthetic oligonucleotide
gggaggggauaucugccua

SEQ ID NO: 376910 - RNA, 19 nt, Artificial Sequence
  Description of Artificial Sequence: Synthetic oligonucleotide
gaugggcggaugaucucau

SEQ ID NO: 376911 - RNA, 19 nt, Artificial Sequence
  Description of Artificial Sequence: Synthetic oligonucleotide
caugagcagaggccuuacu

SEQ ID NO: 376912 - RNA, 19 nt, Artificial Sequence
  Description of Artificial Sequence: Synthetic oligonucleotide
agcaccccgcuagccccuc

SEQ ID NO: 376913 - RNA, 19 nt, Artificial Sequence
  Description of Artificial Sequence: Synthetic oligonucleotide
gcuccccagaaaggaaaac

SEQ ID NO: 376914 - RNA, 19 nt, Artificial Sequence
  Description of Artificial Sequence: Synthetic oligonucleotide
ggggaggggauaucugccu

SEQ ID NO: 376915 - RNA, 19 nt, Artificial Sequence
  Description of Artificial Sequence: Synthetic oligonucleotide
gcaccuuuauaaauacgau

SEQ ID NO: 376916 - RNA, 19 nt, Artificial Sequence
  Description of Artificial Sequence: Synthetic oligonucleotide
ccccucgugcacacuggag

SEQ ID NO: 376917 - RNA, 19 nt, Artificial Sequence
  Description of Artificial Sequence: Synthetic oligonucleotide
cauccugccuccgguaggu

SEQ ID NO: 376918 - RNA, 19 nt, Artificial Sequence
  Description of Artificial Sequence: Synthetic oligonucleotide
gacuuguaguugagcuggu

SEQ ID NO: 376919 - RNA, 19 nt, Artificial Sequence
  Description of Artificial Sequence: Synthetic oligonucleotide
ggcgucgcaggauacuuuu

SEQ ID NO: 376920 - RNA, 19 nt, Artificial Sequence
  Description of Artificial Sequence: Synthetic oligonucleotide
aggcgccaaggcaggcguc

SEQ ID NO: 376921 - RNA, 19 nt, Artificial Sequence
  Description of Artificial Sequence: Synthetic oligonucleotide
gcguggacuuguaguugag

SEQ ID NO: 376922 - RNA, 19 nt, Artificial Sequence
  Description of Artificial Sequence: Synthetic oligonucleotide
ccgaguccguauacagguc

SEQ ID NO: 376923 - RNA, 19 nt, Artificial Sequence
  Description of Artificial Sequence: Synthetic oligonucleotide
cagccgaucgaggcccuga

SEQ ID NO: 376924 - RNA, 19 nt, Artificial Sequence
  Description of Artificial Sequence: Synthetic oligonucleotide
gcaggcaccgagaccgaga

SEQ ID NO: 376925 - RNA, 19 nt, Artificial Sequence
  Description of Artificial Sequence: Synthetic oligonucleotide
ggccgaaggacagccaagu

SEQ ID NO: 376926 - RNA, 19 nt, Artificial Sequence
  Description of Artificial Sequence: Synthetic oligonucleotide
ccuuacugggaaaggcgcu

SEQ ID NO: 376927 - RNA, 19 nt, Artificial Sequence
  Description of Artificial Sequence: Synthetic oligonucleotide
cccgcauaggcgccccaug

SEQ ID NO: 376928 - RNA, 19 nt, Artificial Sequence
  Description of Artificial Sequence: Synthetic oligonucleotide
aggcgucgcaggauacuuu

SEQ ID NO: 376929 - RNA, 19 nt, Artificial Sequence
  Description of Artificial Sequence: Synthetic oligonucleotide
gcaaacgaggagggacauc

SEQ ID NO: 376930 - RNA, 19 nt, Artificial Sequence
  Description of Artificial Sequence: Synthetic oligonucleotide
ggcgggucaucagggcuac

SEQ ID NO: 376931 - RNA, 19 nt, Artificial Sequence
  Description of Artificial Sequence: Synthetic oligonucleotide
uggcacccacccgguuaca

SEQ ID NO: 376932 - RNA, 19 nt, Artificial Sequence
  Description of Artificial Sequence: Synthetic oligonucleotide
gcgucgcaggauacuuuug

SEQ ID NO: 376933 - RNA, 19 nt, Artificial Sequence
  Description of Artificial Sequence: Synthetic oligonucleotide
ggacuaacucaggcaaccu

SEQ ID NO: 376934 - RNA, 19 nt, Artificial Sequence
  Description of Artificial Sequence: Synthetic oligonucleotide
cagucaagccugcgccaua

SEQ ID NO: 376935 - RNA, 19 nt, Artificial Sequence
  Description of Artificial Sequence: Synthetic oligonucleotide
gccccucgugcacacugga

SEQ ID NO: 376936 - RNA, 19 nt, Artificial Sequence
  Description of Artificial Sequence: Synthetic oligonucleotide
cugcaggacaggccacagu

SEQ ID NO: 376937 - RNA, 19 nt, Artificial Sequence
  Description of Artificial Sequence: Synthetic oligonucleotide
caggcaaccuggccucuau

SEQ ID NO: 376938 - RNA, 19 nt, Artificial Sequence
  Description of Artificial Sequence: Synthetic oligonucleotide
ccugaguggaaagguacgu

SEQ ID NO: 376939 - RNA, 19 nt, Artificial Sequence
  Description of Artificial Sequence: Synthetic oligonucleotide
ccuauggcuaaaguguguu

SEQ ID NO: 376940 - RNA, 19 nt, Artificial Sequence
  Description of Artificial Sequence: Synthetic oligonucleotide
ccccuacauccauggccag

SEQ ID NO: 376941 - RNA, 19 nt, Artificial Sequence
  Description of Artificial Sequence: Synthetic oligonucleotide
cucgagguuuggggugcga

SEQ ID NO: 376942 - RNA, 19 nt, Artificial Sequence
  Description of Artificial Sequence: Synthetic oligonucleotide
gcaccccgcuagccccucg

SEQ ID NO: 376943 - RNA, 19 nt, Artificial Sequence
  Description of Artificial Sequence: Synthetic oligonucleotide
agcaggggucguaguggua

SEQ ID NO: 376944 - RNA, 19 nt, Artificial Sequence
  Description of Artificial Sequence: Synthetic oligonucleotide
ccccuacccugagcgaggc

SEQ ID NO: 376945 - RNA, 19 nt, Artificial Sequence
  Description of Artificial Sequence: Synthetic oligonucleotide
caggcgucgcaggauacuu

SEQ ID NO: 376946 - RNA, 19 nt, Artificial Sequence
  Description of Artificial Sequence: Synthetic oligonucleotide
ccgcuagccccucgugcac

SEQ ID NO: 376947 - RNA, 19 nt, Artificial Sequence
  Description of Artificial Sequence: Synthetic oligonucleotide
cccuagcaaguggagacua

SEQ ID NO: 376948 - RNA, 19 nt, Artificial Sequence
  Description of Artificial Sequence: Synthetic oligonucleotide
ccuccgguagguggcccug

SEQ ID NO: 376949 - RNA, 19 nt, Artificial Sequence
  Description of Artificial Sequence: Synthetic oligonucleotide
gccaucagagaggcuggua

SEQ ID NO: 376950 - RNA, 19 nt, Artificial Sequence
  Description of Artificial Sequence: Synthetic oligonucleotide
gcgccaaggcaggcgucgc

SEQ ID NO: 376951 - RNA, 19 nt, Artificial Sequence
  Description of Artificial Sequence: Synthetic oligonucleotide
caccccgcuagccccucgu

SEQ ID NO: 376952 - RNA, 19 nt, Artificial Sequence
  Description of Artificial Sequence: Synthetic oligonucleotide
ccccgcuuggaagacuaaa

SEQ ID NO: 376953 - RNA, 19 nt, Artificial Sequence
  Description of Artificial Sequence: Synthetic oligonucleotide
gcagccgaucgaggcccug

SEQ ID NO: 376954 - RNA, 19 nt, Artificial Sequence
  Description of Artificial Sequence: Synthetic oligonucleotide
gcaggcgucgcaggauacu

SEQ ID NO: 376955 - RNA, 19 nt, Artificial Sequence
  Description of Artificial Sequence: Synthetic oligonucleotide
gcaccgagaccgagacaga

SEQ ID NO: 376956 - RNA, 19 nt, Artificial Sequence
  Description of Artificial Sequence: Synthetic oligonucleotide
gccgaucgaggcccugagu

SEQ ID NO: 376957 - RNA, 19 nt, Artificial Sequence
  Description of Artificial Sequence: Synthetic oligonucleotide
gcgaggcucucagcuccac

SEQ ID NO: 376958 - RNA, 19 nt, Artificial Sequence
  Description of Artificial Sequence: Synthetic oligonucleotide
agccugcgccauagcugaa

SEQ ID NO: 376959 - RNA, 19 nt, Artificial Sequence
  Description of Artificial Sequence: Synthetic oligonucleotide
cuagccccucgugcacacu

SEQ ID NO: 376960 - RNA, 19 nt, Artificial Sequence
  Description of Artificial Sequence: Synthetic oligonucleotide
gccugcgccauagcugaau

SEQ ID NO: 376961 - RNA, 19 nt, Artificial Sequence
  Description of Artificial Sequence: Synthetic oligonucleotide
guauggcaggagggcucau

SEQ ID NO: 376962 - RNA, 19 nt, Artificial Sequence
  Description of Artificial Sequence: Synthetic oligonucleotide
gcgggucaucagggcuacc

SEQ ID NO: 376963 - RNA, 19 nt, Artificial Sequence
  Description of Artificial Sequence: Synthetic oligonucleotide
cgcuagccccucgugcaca

SEQ ID NO: 376964 - RNA, 19 nt, Artificial Sequence
  Description of Artificial Sequence: Synthetic oligonucleotide
ccgguagguggcccugggu

SEQ ID NO: 376965 - RNA, 19 nt, Artificial Sequence
  Description of Artificial Sequence: Synthetic oligonucleotide
ggggugggccaggcaucaa

SEQ ID NO: 376966 - RNA, 19 nt, Artificial Sequence
  Description of Artificial Sequence: Synthetic oligonucleotide
gcgagccaucagagaggcu

SEQ ID NO: 376967 - RNA, 19 nt, Artificial Sequence
  Description of Artificial Sequence: Synthetic oligonucleotide
ccaguccaagccggcuuuu

SEQ ID NO: 376968 - RNA, 19 nt, Artificial Sequence
  Description of Artificial Sequence: Synthetic oligonucleotide
aaaaguuuucucuugaggg

SEQ ID NO: 376969 - RNA, 19 nt, Artificial Sequence
  Description of Artificial Sequence: Synthetic oligonucleotide
aaaaugugcacuuuguaca

SEQ ID NO: 376970 - RNA, 19 nt, Artificial Sequence
  Description of Artificial Sequence: Synthetic oligonucleotide
ugugccgagaaacugaagg

SEQ ID NO: 376971 - RNA, 19 nt, Artificial Sequence
  Description of Artificial Sequence: Synthetic oligonucleotide
aacguguguccuuugaagc

SEQ ID NO: 376972 - RNA, 19 nt, Artificial Sequence
  Description of Artificial Sequence: Synthetic oligonucleotide
uuaguuuugauaucauggg

SEQ ID NO: 376973 - RNA, 19 nt, Artificial Sequence
  Description of Artificial Sequence: Synthetic oligonucleotide
ucuacgagaaauuccacag

SEQ ID NO: 376974 - RNA, 19 nt, Artificial Sequence
  Description of Artificial Sequence: Synthetic oligonucleotide
ucacauuuaguuucgaccc

SEQ ID NO: 376975 - RNA, 19 nt, Artificial Sequence
  Description of Artificial Sequence: Synthetic oligonucleotide
agagcucccacuuagccgc

SEQ ID NO: 376976 - RNA, 19 nt, Artificial Sequence
  Description of Artificial Sequence: Synthetic oligonucleotide
aacguugacagacaauaag

SEQ ID NO: 376977 - RNA, 19 nt, Artificial Sequence
  Description of Artificial Sequence: Synthetic oligonucleotide
cauguaacuuuauugagag

SEQ ID NO: 376978 - RNA, 19 nt, Artificial Sequence
  Description of Artificial Sequence: Synthetic oligonucleotide
uguuguguguaacaccucg

SEQ ID NO: 376979 - RNA, 19 nt, Artificial Sequence
  Description of Artificial Sequence: Synthetic oligonucleotide
uuugacacuaggaaauccc

SEQ ID NO: 376980 - RNA, 19 nt, Artificial Sequence
  Description of Artificial Sequence: Synthetic oligonucleotide
gagacuucgggacagcacg

SEQ ID NO: 376981 - RNA, 19 nt, Artificial Sequence
  Description of Artificial Sequence: Synthetic oligonucleotide
uccuguaugcgcuugaaca

SEQ ID NO: 376982 - RNA, 19 nt, Artificial Sequence
  Description of Artificial Sequence: Synthetic oligonucleotide
ucuaaaaccaucccugguc

SEQ ID NO: 376983 - RNA, 19 nt, Artificial Sequence
  Description of Artificial Sequence: Synthetic oligonucleotide
ucgucauguaacuuuauug

SEQ ID NO: 376984 - RNA, 19 nt, Artificial Sequence
  Description of Artificial Sequence: Synthetic oligonucleotide
augaguaucagguccaaug

SEQ ID NO: 376985 - RNA, 19 nt, Artificial Sequence
  Description of Artificial Sequence: Synthetic oligonucleotide
agcaacacgaaucauuucu

SEQ ID NO: 376986 - RNA, 19 nt, Artificial Sequence
  Description of Artificial Sequence: Synthetic oligonucleotide
cuugcaaguucuaaugacc

SEQ ID NO: 376987 - RNA, 19 nt, Artificial Sequence
  Description of Artificial Sequence: Synthetic oligonucleotide
ucugcuaccaugucuccgg

SEQ ID NO: 376988 - RNA, 19 nt, Artificial Sequence
  Description of Artificial Sequence: Synthetic oligonucleotide
uugcaaguucuaaugaccc

SEQ ID NO: 376989 - RNA, 19 nt, Artificial Sequence
  Description of Artificial Sequence: Synthetic oligonucleotide
agaugguaagccaaaagac

SEQ ID NO: 376990 - RNA, 19 nt, Artificial Sequence
  Description of Artificial Sequence: Synthetic oligonucleotide
gauaucacuucccggcugg

SEQ ID NO: 376991 - RNA, 19 nt, Artificial Sequence
  Description of Artificial Sequence: Synthetic oligonucleotide
uucuauaugacgaggguua

SEQ ID NO: 376992 - RNA, 19 nt, Artificial Sequence
  Description of Artificial Sequence: Synthetic oligonucleotide
ucggaucacguaauuaucc

SEQ ID NO: 376993 - RNA, 19 nt, Artificial Sequence
  Description of Artificial Sequence: Synthetic oligonucleotide
gaugcuauggccaauaacu

SEQ ID NO: 376994 - RNA, 19 nt, Artificial Sequence
  Description of Artificial Sequence: Synthetic oligonucleotide
uugauuaucaccucacgua

SEQ ID NO: 376995 - RNA, 19 nt, Artificial Sequence
  Description of Artificial Sequence: Synthetic oligonucleotide
agaggaauacugcacagcu

SEQ ID NO: 376996 - RNA, 19 nt, Artificial Sequence
  Description of Artificial Sequence: Synthetic oligonucleotide
ucuguguuaacgugugucc

SEQ ID NO: 376997 - RNA, 19 nt, Artificial Sequence
  Description of Artificial Sequence: Synthetic oligonucleotide
uaugcgcuugaacaaacug

SEQ ID NO: 376998 - RNA, 19 nt, Artificial Sequence
  Description of Artificial Sequence: Synthetic oligonucleotide
ucaacguugacagacaaua

SEQ ID NO: 376999 - RNA, 19 nt, Artificial Sequence
  Description of Artificial Sequence: Synthetic oligonucleotide
aacaccucggaucacguaa

SEQ ID NO: 377000 - RNA, 19 nt, Artificial Sequence
  Description of Artificial Sequence: Synthetic oligonucleotide
gugaggaauaaauacgaug

SEQ ID NO: 377001 - RNA, 19 nt, Artificial Sequence
  Description of Artificial Sequence: Synthetic oligonucleotide
uuggcuaauaguuugcuuu

SEQ ID NO: 377002 - RNA, 19 nt, Artificial Sequence
  Description of Artificial Sequence: Synthetic oligonucleotide
acguguguccuuugaagcc

SEQ ID NO: 377003 - RNA, 19 nt, Artificial Sequence
  Description of Artificial Sequence: Synthetic oligonucleotide
ucuggaucgagcauucccu

SEQ ID NO: 377004 - RNA, 19 nt, Artificial Sequence
  Description of Artificial Sequence: Synthetic oligonucleotide
cucuucgucaucccaagcg

SEQ ID NO: 377005 - RNA, 19 nt, Artificial Sequence
  Description of Artificial Sequence: Synthetic oligonucleotide
acguugacagacaauaagg

SEQ ID NO: 377006 - RNA, 19 nt, Artificial Sequence
  Description of Artificial Sequence: Synthetic oligonucleotide
aacccgacauucaacugcc

SEQ ID NO: 377007 - RNA, 19 nt, Artificial Sequence
  Description of Artificial Sequence: Synthetic oligonucleotide
ucuugcaaguucuaaugac

SEQ ID NO: 377008 - RNA, 19 nt, Artificial Sequence
  Description of Artificial Sequence: Synthetic oligonucleotide
ugagggucauaucccauag

SEQ ID NO: 377009 - RNA, 19 nt, Artificial Sequence
  Description of Artificial Sequence: Synthetic oligonucleotide
uggauuucuauaugacgag

SEQ ID NO: 377010 - RNA, 19 nt, Artificial Sequence
  Description of Artificial Sequence: Synthetic oligonucleotide
ucugcggcaaguuugguua

SEQ ID NO: 377011 - RNA, 19 nt, Artificial Sequence
  Description of Artificial Sequence: Synthetic oligonucleotide
ugacacuaggaaaucccag

SEQ ID NO: 377012 - RNA, 19 nt, Artificial Sequence
  Description of Artificial Sequence: Synthetic oligonucleotide
cacguaauuauccagugca

SEQ ID NO: 377013 - RNA, 19 nt, Artificial Sequence
  Description of Artificial Sequence: Synthetic oligonucleotide
uuaucagcuaaaaccugga

SEQ ID NO: 377014 - RNA, 19 nt, Artificial Sequence
  Description of Artificial Sequence: Synthetic oligonucleotide
gcugauaucacuucccggc

SEQ ID NO: 377015 - RNA, 19 nt, Artificial Sequence
  Description of Artificial Sequence: Synthetic oligonucleotide
auuucuauaugacgagggu

SEQ ID NO: 377016 - RNA, 19 nt, Artificial Sequence
  Description of Artificial Sequence: Synthetic oligonucleotide
uucacaaagcguguguuga

SEQ ID NO: 377017 - RNA, 19 nt, Artificial Sequence
  Description of Artificial Sequence: Synthetic oligonucleotide
augcugauaucacuucccg

SEQ ID NO: 377018 - RNA, 19 nt, Artificial Sequence
  Description of Artificial Sequence: Synthetic oligonucleotide
ucacguaauuauccagugc

SEQ ID NO: 377019 - RNA, 19 nt, Artificial Sequence
  Description of Artificial Sequence: Synthetic oligonucleotide
uaugacgaggguuaucaau

SEQ ID NO: 377020 - RNA, 19 nt, Artificial Sequence
  Description of Artificial Sequence: Synthetic oligonucleotide
aucacguaauuauccagug

SEQ ID NO: 377021 - RNA, 19 nt, Artificial Sequence
  Description of Artificial Sequence: Synthetic oligonucleotide
agaaugacugaaaggcucg

SEQ ID NO: 377022 - RNA, 19 nt, Artificial Sequence
  Description of Artificial Sequence: Synthetic oligonucleotide
ucauaucccauagaacuga

SEQ ID NO: 377023 - RNA, 19 nt, Artificial Sequence
  Description of Artificial Sequence: Synthetic oligonucleotide
ucccaauagaugguaagcc

SEQ ID NO: 377024 - RNA, 19 nt, Artificial Sequence
  Description of Artificial Sequence: Synthetic oligonucleotide
cauaaacccgacauucaac

SEQ ID NO: 377025 - RNA, 19 nt, Artificial Sequence
  Description of Artificial Sequence: Synthetic oligonucleotide
gagucuacgagaaauucca

SEQ ID NO: 377026 - RNA, 19 nt, Artificial Sequence
  Description of Artificial Sequence: Synthetic oligonucleotide
uuaacguguguccuuugaa

SEQ ID NO: 377027 - RNA, 19 nt, Artificial Sequence
  Description of Artificial Sequence: Synthetic oligonucleotide
ggucauaucccauagaacu

SEQ ID NO: 377028 - RNA, 19 nt, Artificial Sequence
  Description of Artificial Sequence: Synthetic oligonucleotide
uguugauauccccuuucac

SEQ ID NO: 377029 - RNA, 19 nt, Artificial Sequence
  Description of Artificial Sequence: Synthetic oligonucleotide
gagcgcagaacacugcuug

SEQ ID NO: 377030 - RNA, 19 nt, Artificial Sequence
  Description of Artificial Sequence: Synthetic oligonucleotide
gugaauguggacccacugc

SEQ ID NO: 377031 - RNA, 19 nt, Artificial Sequence
  Description of Artificial Sequence: Synthetic oligonucleotide
ucacuucccggcuggaugc

SEQ ID NO: 377032 - RNA, 19 nt, Artificial Sequence
  Description of Artificial Sequence: Synthetic oligonucleotide
ucuaacaacuggcacucuu

SEQ ID NO: 377033 - RNA, 19 nt, Artificial Sequence
  Description of Artificial Sequence: Synthetic oligonucleotide
ugcucggcgagucucguga

SEQ ID NO: 377034 - RNA, 19 nt, Artificial Sequence
  Description of Artificial Sequence: Synthetic oligonucleotide
uaguuucgacccaucaacu

SEQ ID NO: 377035 - RNA, 19 nt, Artificial Sequence
  Description of Artificial Sequence: Synthetic oligonucleotide
caguagucuaucaucacca

SEQ ID NO: 377036 - RNA, 19 nt, Artificial Sequence
  Description of Artificial Sequence: Synthetic oligonucleotide
cacgacagugugaucuucg

SEQ ID NO: 377037 - RNA, 19 nt, Artificial Sequence
  Description of Artificial Sequence: Synthetic oligonucleotide
ugugcucguaacugggaug

SEQ ID NO: 377038 - RNA, 19 nt, Artificial Sequence
  Description of Artificial Sequence: Synthetic oligonucleotide
uguguguaacaccucggau

SEQ ID NO: 377039 - RNA, 19 nt, Artificial Sequence
  Description of Artificial Sequence: Synthetic oligonucleotide
uaaacccgacauucaacug

SEQ ID NO: 377040 - RNA, 19 nt, Artificial Sequence
  Description of Artificial Sequence: Synthetic oligonucleotide
uuucuauaugacgaggguu

SEQ ID NO: 377041 - RNA, 19 nt, Artificial Sequence
  Description of Artificial Sequence: Synthetic oligonucleotide
ugaaaggcucggaauacuu

SEQ ID NO: 377042 - RNA, 19 nt, Artificial Sequence
  Description of Artificial Sequence: Synthetic oligonucleotide
ugagguagcuuugacuggu

SEQ ID NO: 377043 - RNA, 19 nt, Artificial Sequence
  Description of Artificial Sequence: Synthetic oligonucleotide
caacacgaaucauuucuug

SEQ ID NO: 377044 - RNA, 19 nt, Artificial Sequence
  Description of Artificial Sequence: Synthetic oligonucleotide
cagcauaaacccgacauuc

SEQ ID NO: 377045 - RNA, 19 nt, Artificial Sequence
  Description of Artificial Sequence: Synthetic oligonucleotide
ucagcauaaacccgacauu

SEQ ID NO: 377046 - RNA, 19 nt, Artificial Sequence
  Description of Artificial Sequence: Synthetic oligonucleotide
aacgggaacuggcgucaac

SEQ ID NO: 377047 - RNA, 19 nt, Artificial Sequence
  Description of Artificial Sequence: Synthetic oligonucleotide
ugacugaaaggcucggaau

SEQ ID NO: 377048 - RNA, 19 nt, Artificial Sequence
  Description of Artificial Sequence: Synthetic oligonucleotide
augccacaaacaaugauga

SEQ ID NO: 377049 - RNA, 19 nt, Artificial Sequence
  Description of Artificial Sequence: Synthetic oligonucleotide
gucuacgagaaauuccaca

SEQ ID NO: 377050 - RNA, 19 nt, Artificial Sequence
  Description of Artificial Sequence: Synthetic oligonucleotide
cucucacucuguguuaacg

SEQ ID NO: 377051 - RNA, 19 nt, Artificial Sequence
  Description of Artificial Sequence: Synthetic oligonucleotide
uggcuaauaguuugcuuuc

SEQ ID NO: 377052 - RNA, 19 nt, Artificial Sequence
  Description of Artificial Sequence: Synthetic oligonucleotide
acagacaauaagggugagg

SEQ ID NO: 377053 - RNA, 19 nt, Artificial Sequence
  Description of Artificial Sequence: Synthetic oligonucleotide
guugauuaucaccucacgu

SEQ ID NO: 377054 - RNA, 19 nt, Artificial Sequence
  Description of Artificial Sequence: Synthetic oligonucleotide
guucuaacaacuggcacuc

SEQ ID NO: 377055 - RNA, 19 nt, Artificial Sequence
  Description of Artificial Sequence: Synthetic oligonucleotide
aaguucuaaugacccuaca

SEQ ID NO: 377056 - RNA, 19 nt, Artificial Sequence
  Description of Artificial Sequence: Synthetic oligonucleotide
ggaucacguaauuauccag

SEQ ID NO: 377057 - RNA, 19 nt, Artificial Sequence
  Description of Artificial Sequence: Synthetic oligonucleotide
uccgggguugacagaaaug

SEQ ID NO: 377058 - RNA, 19 nt, Artificial Sequence
  Description of Artificial Sequence: Synthetic oligonucleotide
ugaggggaauauccacuug

SEQ ID NO: 377059 - RNA, 19 nt, Artificial Sequence
  Description of Artificial Sequence: Synthetic oligonucleotide
uccucugcgugccaucaac

SEQ ID NO: 377060 - RNA, 19 nt, Artificial Sequence
  Description of Artificial Sequence: Synthetic oligonucleotide
ugccgagaaacugaaggcu

SEQ ID NO: 377061 - RNA, 19 nt, Artificial Sequence
  Description of Artificial Sequence: Synthetic oligonucleotide
ggauuucuauaugacgagg

SEQ ID NO: 377062 - RNA, 19 nt, Artificial Sequence
  Description of Artificial Sequence: Synthetic oligonucleotide
augguaagccaaaagacuu

SEQ ID NO: 377063 - RNA, 19 nt, Artificial Sequence
  Description of Artificial Sequence: Synthetic oligonucleotide
cucaagcaugaauuuguuc

SEQ ID NO: 377064 - RNA, 19 nt, Artificial Sequence
  Description of Artificial Sequence: Synthetic oligonucleotide
cguugacagacaauaaggg

SEQ ID NO: 377065 - RNA, 19 nt, Artificial Sequence
  Description of Artificial Sequence: Synthetic oligonucleotide
gucauaucccauagaacug

SEQ ID NO: 377066 - RNA, 19 nt, Artificial Sequence
  Description of Artificial Sequence: Synthetic oligonucleotide
ugucuuaauuggcuuccau

SEQ ID NO: 377067 - RNA, 19 nt, Artificial Sequence
  Description of Artificial Sequence: Synthetic oligonucleotide
guugacagacaauaagggu

SEQ ID NO: 377068 - RNA, 19 nt, Artificial Sequence
  Description of Artificial Sequence: Synthetic oligonucleotide
cucggaucacguaauuauc

SEQ ID NO: 377069 - RNA, 19 nt, Artificial Sequence
  Description of Artificial Sequence: Synthetic oligonucleotide
guuaacguguguccuuuga

SEQ ID NO: 377070 - RNA, 19 nt, Artificial Sequence
  Description of Artificial Sequence: Synthetic oligonucleotide
ggauguuguguguaacacc

SEQ ID NO: 377071 - RNA, 19 nt, Artificial Sequence
  Description of Artificial Sequence: Synthetic oligonucleotide
acgagaaauuccacaguuc

SEQ ID NO: 377072 - RNA, 19 nt, Artificial Sequence
  Description of Artificial Sequence: Synthetic oligonucleotide
aggccgguaaugcauucug

SEQ ID NO: 377073 - RNA, 19 nt, Artificial Sequence
  Description of Artificial Sequence: Synthetic oligonucleotide
uagcaaugggauguugugu

SEQ ID NO: 377074 - RNA, 19 nt, Artificial Sequence
  Description of Artificial Sequence: Synthetic oligonucleotide
gaucacguaauuauccagu

SEQ ID NO: 377075 - RNA, 19 nt, Artificial Sequence
  Description of Artificial Sequence: Synthetic oligonucleotide
ugacgaggguuaucaauaa

SEQ ID NO: 377076 - RNA, 19 nt, Artificial Sequence
  Description of Artificial Sequence: Synthetic oligonucleotide
gcguguguugauuaucacc

SEQ ID NO: 377077 - RNA, 19 nt, Artificial Sequence
  Description of Artificial Sequence: Synthetic oligonucleotide
aguuucgacccaucaacuu

SEQ ID NO: 377078 - RNA, 19 nt, Artificial Sequence
  Description of Artificial Sequence: Synthetic oligonucleotide
ucgagcauucccuuucauu

SEQ ID NO: 377079 - RNA, 19 nt, Artificial Sequence
  Description of Artificial Sequence: Synthetic oligonucleotide
gaaaggcucggaauacuuc

SEQ ID NO: 377080 - RNA, 19 nt, Artificial Sequence
  Description of Artificial Sequence: Synthetic oligonucleotide
augacgaggguuaucaaua

SEQ ID NO: 377081 - RNA, 19 nt, Artificial Sequence
  Description of Artificial Sequence: Synthetic oligonucleotide
cucagcauaaacccgacau

SEQ ID NO: 377082 - RNA, 19 nt, Artificial Sequence
  Description of Artificial Sequence: Synthetic oligonucleotide
ggagucuacgagaaauucc

SEQ ID NO: 377083 - RNA, 19 nt, Artificial Sequence
  Description of Artificial Sequence: Synthetic oligonucleotide
uguacacugugccgagaaa

SEQ ID NO: 377084 - RNA, 19 nt, Artificial Sequence
  Description of Artificial Sequence: Synthetic oligonucleotide
ugugucgguucuugguacu

SEQ ID NO: 377085 - RNA, 19 nt, Artificial Sequence
  Description of Artificial Sequence: Synthetic oligonucleotide
gauaucauggggucauaau

SEQ ID NO: 377086 - RNA, 19 nt, Artificial Sequence
  Description of Artificial Sequence: Synthetic oligonucleotide
cauacccuggguguacagc

SEQ ID NO: 377087 - RNA, 19 nt, Artificial Sequence
  Description of Artificial Sequence: Synthetic oligonucleotide
acguaauuauccagugcag

SEQ ID NO: 377088 - RNA, 19 nt, Artificial Sequence
  Description of Artificial Sequence: Synthetic oligonucleotide
guguugauauccccuuuca

SEQ ID NO: 377089 - RNA, 19 nt, Artificial Sequence
  Description of Artificial Sequence: Synthetic oligonucleotide
ugggagucuacgagaaauu

SEQ ID NO: 377090 - RNA, 19 nt, Artificial Sequence
  Description of Artificial Sequence: Synthetic oligonucleotide
agucuacgagaaauuccac

SEQ ID NO: 377091 - RNA, 19 nt, Artificial Sequence
  Description of Artificial Sequence: Synthetic oligonucleotide
ucccuuucauuaagccaca

SEQ ID NO: 377092 - RNA, 19 nt, Artificial Sequence
  Description of Artificial Sequence: Synthetic oligonucleotide
uggcgucaacaucacugug

SEQ ID NO: 377093 - RNA, 19 nt, Artificial Sequence
  Description of Artificial Sequence: Synthetic oligonucleotide
ucuauaugacgaggguuau

SEQ ID NO: 377094 - RNA, 19 nt, Artificial Sequence
  Description of Artificial Sequence: Synthetic oligonucleotide
uucugcggcaaguuugguu

SEQ ID NO: 377095 - RNA, 19 nt, Artificial Sequence
  Description of Artificial Sequence: Synthetic oligonucleotide
gguaacccuuagcaacacg

SEQ ID NO: 377096 - RNA, 19 nt, Artificial Sequence
  Description of Artificial Sequence: Synthetic oligonucleotide
acgacagugugaucuucgu

SEQ ID NO: 377097 - RNA, 19 nt, Artificial Sequence
  Description of Artificial Sequence: Synthetic oligonucleotide
gaucgagcauucccuuuca

SEQ ID NO: 377098 - RNA, 19 nt, Artificial Sequence
  Description of Artificial Sequence: Synthetic oligonucleotide
ggucacauuuaguuucgac

SEQ ID NO: 377099 - RNA, 19 nt, Artificial Sequence
  Description of Artificial Sequence: Synthetic oligonucleotide
gcccugguugucuuaauug

SEQ ID NO: 377100 - RNA, 19 nt, Artificial Sequence
  Description of Artificial Sequence: Synthetic oligonucleotide
cgucauguaacuuuauuga

SEQ ID NO: 377101 - RNA, 19 nt, Artificial Sequence
  Description of Artificial Sequence: Synthetic oligonucleotide
aggguaacccuuagcaaca

SEQ ID NO: 377102 - RNA, 19 nt, Artificial Sequence
  Description of Artificial Sequence: Synthetic oligonucleotide
ccgacauucaacugcccag

SEQ ID NO: 377103 - RNA, 19 nt, Artificial Sequence
  Description of Artificial Sequence: Synthetic oligonucleotide
aacuggcgucaacaucacu

SEQ ID NO: 377104 - RNA, 19 nt, Artificial Sequence
  Description of Artificial Sequence: Synthetic oligonucleotide
agcauaaacccgacauuca

SEQ ID NO: 377105 - RNA, 19 nt, Artificial Sequence
  Description of Artificial Sequence: Synthetic oligonucleotide
ggaucgagcauucccuuuc

SEQ ID NO: 377106 - RNA, 19 nt, Artificial Sequence
  Description of Artificial Sequence: Synthetic oligonucleotide
gacuucgggacagcacgag

SEQ ID NO: 377107 - RNA, 19 nt, Artificial Sequence
  Description of Artificial Sequence: Synthetic oligonucleotide
ugcgugccaucaacguuga

SEQ ID NO: 377108 - RNA, 19 nt, Artificial Sequence
  Description of Artificial Sequence: Synthetic oligonucleotide
uucgacccaucaacuucca

SEQ ID NO: 377109 - RNA, 19 nt, Artificial Sequence
  Description of Artificial Sequence: Synthetic oligonucleotide
gggauguuguguguaacac

SEQ ID NO: 377110 - RNA, 19 nt, Artificial Sequence
  Description of Artificial Sequence: Synthetic oligonucleotide
aagcgaugcgcaugccuuu

SEQ ID NO: 377111 - RNA, 19 nt, Artificial Sequence
  Description of Artificial Sequence: Synthetic oligonucleotide
auaugacgaggguuaucaa

SEQ ID NO: 377112 - RNA, 19 nt, Artificial Sequence
  Description of Artificial Sequence: Synthetic oligonucleotide
agcgcagaacacugcuugu

SEQ ID NO: 377113 - RNA, 19 nt, Artificial Sequence
  Description of Artificial Sequence: Synthetic oligonucleotide
augcaccgauuucaccuug

SEQ ID NO: 377114 - RNA, 19 nt, Artificial Sequence
  Description of Artificial Sequence: Synthetic oligonucleotide
cacauuuaguuucgaccca

SEQ ID NO: 377115 - RNA, 19 nt, Artificial Sequence
  Description of Artificial Sequence: Synthetic oligonucleotide
ucucucacucuguguuaac

SEQ ID NO: 377116 - RNA, 19 nt, Artificial Sequence
  Description of Artificial Sequence: Synthetic oligonucleotide
caucccuggucucuucguc

SEQ ID NO: 377117 - RNA, 19 nt, Artificial Sequence
  Description of Artificial Sequence: Synthetic oligonucleotide
uuaucaccucacguagcaa

SEQ ID NO: 377118 - RNA, 19 nt, Artificial Sequence
  Description of Artificial Sequence: Synthetic oligonucleotide
cugcuaccaugucuccggg

SEQ ID NO: 377119 - RNA, 19 nt, Artificial Sequence
  Description of Artificial Sequence: Synthetic oligonucleotide
cuauaugacgaggguuauc

SEQ ID NO: 377120 - RNA, 19 nt, Artificial Sequence
  Description of Artificial Sequence: Synthetic oligonucleotide
gagggucauaucccauaga

SEQ ID NO: 377121 - RNA, 19 nt, Artificial Sequence
  Description of Artificial Sequence: Synthetic oligonucleotide
uggaucgagcauucccuuu

SEQ ID NO: 377122 - RNA, 19 nt, Artificial Sequence
  Description of Artificial Sequence: Synthetic oligonucleotide
gguucuugguacugagaca

SEQ ID NO: 377123 - RNA, 19 nt, Artificial Sequence
  Description of Artificial Sequence: Synthetic oligonucleotide
gcgcaugccuuucccaccg

SEQ ID NO: 377124 - RNA, 19 nt, Artificial Sequence
  Description of Artificial Sequence: Synthetic oligonucleotide
caauaagggugaggccagg

SEQ ID NO: 377125 - RNA, 19 nt, Artificial Sequence
  Description of Artificial Sequence: Synthetic oligonucleotide
guguguugauuaucaccuc

SEQ ID NO: 377126 - RNA, 19 nt, Artificial Sequence
  Description of Artificial Sequence: Synthetic oligonucleotide
cgccauuuucacgugaacg

SEQ ID NO: 377127 - RNA, 19 nt, Artificial Sequence
  Description of Artificial Sequence: Synthetic oligonucleotide
caacguugacagacaauaa

SEQ ID NO: 377128 - RNA, 19 nt, Artificial Sequence
  Description of Artificial Sequence: Synthetic oligonucleotide
cccaauagaugguaagcca

SEQ ID NO: 377129 - RNA, 19 nt, Artificial Sequence
  Description of Artificial Sequence: Synthetic oligonucleotide
accucacguagcaauggga

SEQ ID NO: 377130 - RNA, 19 nt, Artificial Sequence
  Description of Artificial Sequence: Synthetic oligonucleotide
ggcgucaacaucacuguga

SEQ ID NO: 377131 - RNA, 19 nt, Artificial Sequence
  Description of Artificial Sequence: Synthetic oligonucleotide
gagguagcuuugacuggug

SEQ ID NO: 377132 - RNA, 19 nt, Artificial Sequence
  Description of Artificial Sequence: Synthetic oligonucleotide
agucucccaauagauggua

SEQ ID NO: 377133 - RNA, 19 nt, Artificial Sequence
  Description of Artificial Sequence: Synthetic oligonucleotide
gggagucuacgagaaauuc

SEQ ID NO: 377134 - RNA, 19 nt, Artificial Sequence
  Description of Artificial Sequence: Synthetic oligonucleotide
cugugccgagaaacugaag

SEQ ID NO: 377135 - RNA, 19 nt, Artificial Sequence
  Description of Artificial Sequence: Synthetic oligonucleotide
gucuccgggguugacagaa

SEQ ID NO: 377136 - RNA, 19 nt, Artificial Sequence
  Description of Artificial Sequence: Synthetic oligonucleotide
gcuaccaugucuccggggu

SEQ ID NO: 377137 - RNA, 19 nt, Artificial Sequence
  Description of Artificial Sequence: Synthetic oligonucleotide
uugcucggcgagucucgug

SEQ ID NO: 377138 - RNA, 19 nt, Artificial Sequence
  Description of Artificial Sequence: Synthetic oligonucleotide
cgagcauucccuuucauua

SEQ ID NO: 377139 - RNA, 19 nt, Artificial Sequence
  Description of Artificial Sequence: Synthetic oligonucleotide
aucgagcauucccuuucau

SEQ ID NO: 377140 - RNA, 19 nt, Artificial Sequence
  Description of Artificial Sequence: Synthetic oligonucleotide
agcuuuagccaaagccaca

SEQ ID NO: 377141 - RNA, 19 nt, Artificial Sequence
  Description of Artificial Sequence: Synthetic oligonucleotide
uuugcccucuuggcuaaua

SEQ ID NO: 377142 - RNA, 19 nt, Artificial Sequence
  Description of Artificial Sequence: Synthetic oligonucleotide
gcgucaacaucacugugaa

SEQ ID NO: 377143 - RNA, 19 nt, Artificial Sequence
  Description of Artificial Sequence: Synthetic oligonucleotide
gggucauaucccauagaac

SEQ ID NO: 377144 - RNA, 19 nt, Artificial Sequence
  Description of Artificial Sequence: Synthetic oligonucleotide
gaauagacuggagcacgcu

SEQ ID NO: 377145 - RNA, 19 nt, Artificial Sequence
  Description of Artificial Sequence: Synthetic oligonucleotide
caagcgaugcgcaugccuu

SEQ ID NO: 377146 - RNA, 19 nt, Artificial Sequence
  Description of Artificial Sequence: Synthetic oligonucleotide
uccacguacuggucacauu

SEQ ID NO: 377147 - RNA, 19 nt, Artificial Sequence
  Description of Artificial Sequence: Synthetic oligonucleotide
accucggaucacguaauua

SEQ ID NO: 377148 - RNA, 19 nt, Artificial Sequence
  Description of Artificial Sequence: Synthetic oligonucleotide
cgaaucauuucuuggacua

SEQ ID NO: 377149 - RNA, 19 nt, Artificial Sequence
  Description of Artificial Sequence: Synthetic oligonucleotide
acguagcaaugggauguug

SEQ ID NO: 377150 - RNA, 19 nt, Artificial Sequence
  Description of Artificial Sequence: Synthetic oligonucleotide
ccgguaaugcauucuguga

SEQ ID NO: 377151 - RNA, 19 nt, Artificial Sequence
  Description of Artificial Sequence: Synthetic oligonucleotide
gagucucgugauccagaaa

SEQ ID NO: 377152 - RNA, 19 nt, Artificial Sequence
  Description of Artificial Sequence: Synthetic oligonucleotide
cuguagaaccugccacaca

SEQ ID NO: 377153 - RNA, 19 nt, Artificial Sequence
  Description of Artificial Sequence: Synthetic oligonucleotide
ugcucguaacugggaugcc

SEQ ID NO: 377154 - RNA, 19 nt, Artificial Sequence
  Description of Artificial Sequence: Synthetic oligonucleotide
gccgagaaacugaaggcuc

SEQ ID NO: 377155 - RNA, 19 nt, Artificial Sequence
  Description of Artificial Sequence: Synthetic oligonucleotide
acccgacauucaacugccc

SEQ ID NO: 377156 - RNA, 19 nt, Artificial Sequence
  Description of Artificial Sequence: Synthetic oligonucleotide
ugcggcaaguuugguuaaa

SEQ ID NO: 377157 - RNA, 19 nt, Artificial Sequence
  Description of Artificial Sequence: Synthetic oligonucleotide
cucggcgagucucgugauc

SEQ ID NO: 377158 - RNA, 19 nt, Artificial Sequence
  Description of Artificial Sequence: Synthetic oligonucleotide
cuugugccugagaggguaa

SEQ ID NO: 377159 - RNA, 19 nt, Artificial Sequence
  Description of Artificial Sequence: Synthetic oligonucleotide
cgacauucaacugcccagc

SEQ ID NO: 377160 - RNA, 19 nt, Artificial Sequence
  Description of Artificial Sequence: Synthetic oligonucleotide
ccgagaaacugaaggcuca

SEQ ID NO: 377161 - RNA, 19 nt, Artificial Sequence
  Description of Artificial Sequence: Synthetic oligonucleotide
cuucgucaucccaagcgau

SEQ ID NO: 377162 - RNA, 19 nt, Artificial Sequence
  Description of Artificial Sequence: Synthetic oligonucleotide
gcgcagaacacugcuugug

SEQ ID NO: 377163 - RNA, 19 nt, Artificial Sequence
  Description of Artificial Sequence: Synthetic oligonucleotide
ccaucaacguugacagaca

SEQ ID NO: 377164 - RNA, 19 nt, Artificial Sequence
  Description of Artificial Sequence: Synthetic oligonucleotide
cccgacauucaacugccca

SEQ ID NO: 377165 - RNA, 19 nt, Artificial Sequence
  Description of Artificial Sequence: Synthetic oligonucleotide
gacuaaguccaggccggua

SEQ ID NO: 377166 - RNA, 19 nt, Artificial Sequence
  Description of Artificial Sequence: Synthetic oligonucleotide
cucaaccuggagucuugua

SEQ ID NO: 377167 - RNA, 19 nt, Artificial Sequence
  Description of Artificial Sequence: Synthetic oligonucleotide
guaugcgcuugaacaaacu

SEQ ID NO: 377168 - RNA, 19 nt, Artificial Sequence
  Description of Artificial Sequence: Synthetic oligonucleotide
cucggacaccagguagaug

SEQ ID NO: 377169 - RNA, 19 nt, Artificial Sequence
  Description of Artificial Sequence: Synthetic oligonucleotide
cacugucaacucggacacc

SEQ ID NO: 377170 - RNA, 19 nt, Artificial Sequence
  Description of Artificial Sequence: Synthetic oligonucleotide
cgucaucccaagcgaugcg

SEQ ID NO: 377171 - RNA, 19 nt, Artificial Sequence
  Description of Artificial Sequence: Synthetic oligonucleotide
cugcggcaaguuugguuaa

SEQ ID NO: 377172 - RNA, 19 nt, Artificial Sequence
  Description of Artificial Sequence: Synthetic oligonucleotide
ggguaacccuuagcaacac

SEQ ID NO: 377173 - RNA, 19 nt, Artificial Sequence
  Description of Artificial Sequence: Synthetic oligonucleotide
cuggaucgagcauucccuu

SEQ ID NO: 377174 - RNA, 19 nt, Artificial Sequence
  Description of Artificial Sequence: Synthetic oligonucleotide
ccggcuggaugccacuguc

SEQ ID NO: 377175 - RNA, 19 nt, Artificial Sequence
  Description of Artificial Sequence: Synthetic oligonucleotide
cuccgggguugacagaaau

SEQ ID NO: 377176 - RNA, 19 nt, Artificial Sequence
  Description of Artificial Sequence: Synthetic oligonucleotide
gaacgggaacuggcgucaa

SEQ ID NO: 377177 - RNA, 19 nt, Artificial Sequence
  Description of Artificial Sequence: Synthetic oligonucleotide
ggcuaauaguuugcuuucu

SEQ ID NO: 377178 - RNA, 19 nt, Artificial Sequence
  Description of Artificial Sequence: Synthetic oligonucleotide
caucccaagcgaugcgcau

SEQ ID NO: 377179 - RNA, 19 nt, Artificial Sequence
  Description of Artificial Sequence: Synthetic oligonucleotide
gcgagucucgugauccaga

SEQ ID NO: 377180 - RNA, 19 nt, Artificial Sequence
  Description of Artificial Sequence: Synthetic oligonucleotide
ccgccauuuucacgugaac

SEQ ID NO: 377181 - RNA, 19 nt, Artificial Sequence
  Description of Artificial Sequence: Synthetic oligonucleotide
guccucugcgugccaucaa

SEQ ID NO: 377182 - RNA, 19 nt, Artificial Sequence
  Description of Artificial Sequence: Synthetic oligonucleotide
cgaggguuaucaauaaauu

SEQ ID NO: 377183 - RNA, 19 nt, Artificial Sequence
  Description of Artificial Sequence: Synthetic oligonucleotide
gcaacacgaaucauuucuu

SEQ ID NO: 377184 - RNA, 19 nt, Artificial Sequence
  Description of Artificial Sequence: Synthetic oligonucleotide
caugaguaucagguccaau

SEQ ID NO: 377185 - RNA, 19 nt, Artificial Sequence
  Description of Artificial Sequence: Synthetic oligonucleotide
ccaagcgaugcgcaugccu

SEQ ID NO: 377186 - RNA, 19 nt, Artificial Sequence
  Description of Artificial Sequence: Synthetic oligonucleotide
gugcucaaccuggagucuu

SEQ ID NO: 377187 - RNA, 19 nt, Artificial Sequence
  Description of Artificial Sequence: Synthetic oligonucleotide
ccacgacagugugaucuuc

SEQ ID NO: 377188 - RNA, 19 nt, Artificial Sequence
  Description of Artificial Sequence: Synthetic oligonucleotide
guucugcggcaaguuuggu

SEQ ID NO: 377189 - RNA, 19 nt, Artificial Sequence
  Description of Artificial Sequence: Synthetic oligonucleotide
ccacuuagccgcaucuguu

SEQ ID NO: 377190 - RNA, 19 nt, Artificial Sequence
  Description of Artificial Sequence: Synthetic oligonucleotide
gcuucucgagacagacacu

SEQ ID NO: 377191 - RNA, 19 nt, Artificial Sequence
  Description of Artificial Sequence: Synthetic oligonucleotide
caccucggaucacguaauu

SEQ ID NO: 377192 - RNA, 19 nt, Artificial Sequence
  Description of Artificial Sequence: Synthetic oligonucleotide
cacguagcaaugggauguu

SEQ ID NO: 377193 - RNA, 19 nt, Artificial Sequence
  Description of Artificial Sequence: Synthetic oligonucleotide
gcucaaccuggagucuugu

SEQ ID NO: 377194 - RNA, 19 nt, Artificial Sequence
  Description of Artificial Sequence: Synthetic oligonucleotide
ggagcgcagaacacugcuu

SEQ ID NO: 377195 - RNA, 19 nt, Artificial Sequence
  Description of Artificial Sequence: Synthetic oligonucleotide
cgcaugccuuucccaccgc

SEQ ID NO: 377196 - RNA, 19 nt, Artificial Sequence
  Description of Artificial Sequence: Synthetic oligonucleotide
ggacuaaguccaggccggu

SEQ ID NO: 377197 - RNA, 19 nt, Artificial Sequence
  Description of Artificial Sequence: Synthetic oligonucleotide
gcgugccaucaacguugac

SEQ ID NO: 377198 - RNA, 19 nt, Artificial Sequence
  Description of Artificial Sequence: Synthetic oligonucleotide
gcucggcgagucucgugau

SEQ ID NO: 377199 - RNA, 19 nt, Artificial Sequence
  Description of Artificial Sequence: Synthetic oligonucleotide
ccuuagcaacacgaaucau

SEQ ID NO: 377200 - RNA, 19 nt, Artificial Sequence
  Description of Artificial Sequence: Synthetic oligonucleotide
aagauauuagaacccaggc

SEQ ID NO: 377201 - RNA, 19 nt, Artificial Sequence
  Description of Artificial Sequence: Synthetic oligonucleotide
aucugcaagauucauaucg

SEQ ID NO: 377202 - RNA, 19 nt, Artificial Sequence
  Description of Artificial Sequence: Synthetic oligonucleotide
aagaaauugggcugggcgc

SEQ ID NO: 377203 - RNA, 19 nt, Artificial Sequence
  Description of Artificial Sequence: Synthetic oligonucleotide
gauauuagaacccaggcca

SEQ ID NO: 377204 - RNA, 19 nt, Artificial Sequence
  Description of Artificial Sequence: Synthetic oligonucleotide
aaugcuucggaaucgcugg

SEQ ID NO: 377205 - RNA, 19 nt, Artificial Sequence
  Description of Artificial Sequence: Synthetic oligonucleotide
agauauuagaacccaggcc

SEQ ID NO: 377206 - RNA, 19 nt, Artificial Sequence
  Description of Artificial Sequence: Synthetic oligonucleotide
ugagcugucgaacaugacg

SEQ ID NO: 377207 - RNA, 19 nt, Artificial Sequence
  Description of Artificial Sequence: Synthetic oligonucleotide
uuugaaacgcuuuaagggc

SEQ ID NO: 377208 - RNA, 19 nt, Artificial Sequence
  Description of Artificial Sequence: Synthetic oligonucleotide
agauucauaucguggaagc

SEQ ID NO: 377209 - RNA, 19 nt, Artificial Sequence
  Description of Artificial Sequence: Synthetic oligonucleotide
auaucguggaagcucagcc

SEQ ID NO: 377210 - RNA, 19 nt, Artificial Sequence
  Description of Artificial Sequence: Synthetic oligonucleotide
gauugguaagcccaggagg

SEQ ID NO: 377211 - RNA, 19 nt, Artificial Sequence
  Description of Artificial Sequence: Synthetic oligonucleotide
ugcaagauucauaucgugg

SEQ ID NO: 377212 - RNA, 19 nt, Artificial Sequence
  Description of Artificial Sequence: Synthetic oligonucleotide
aaaucccauuuccaguugc

SEQ ID NO: 377213 - RNA, 19 nt, Artificial Sequence
  Description of Artificial Sequence: Synthetic oligonucleotide
aaagacgcuuaucagaaga

SEQ ID NO: 377214 - RNA, 19 nt, Artificial Sequence
  Description of Artificial Sequence: Synthetic oligonucleotide
auaaugaccuauaaccucc

SEQ ID NO: 377215 - RNA, 19 nt, Artificial Sequence
  Description of Artificial Sequence: Synthetic oligonucleotide
ugagaaaacaucugccagg

SEQ ID NO: 377216 - RNA, 19 nt, Artificial Sequence
  Description of Artificial Sequence: Synthetic oligonucleotide
aauagacaggacccgcagc

SEQ ID NO: 377217 - RNA, 19 nt, Artificial Sequence
  Description of Artificial Sequence: Synthetic oligonucleotide
uccagugauacccaggagc

SEQ ID NO: 377218 - RNA, 19 nt, Artificial Sequence
  Description of Artificial Sequence: Synthetic oligonucleotide
acgagugguagguacagcc

SEQ ID NO: 377219 - RNA, 19 nt, Artificial Sequence
  Description of Artificial Sequence: Synthetic oligonucleotide
auagguuauauucuuugag

SEQ ID NO: 377220 - RNA, 19 nt, Artificial Sequence
  Description of Artificial Sequence: Synthetic oligonucleotide
guagaguugcccuucauag

SEQ ID NO: 377221 - RNA, 19 nt, Artificial Sequence
  Description of Artificial Sequence: Synthetic oligonucleotide
aauaaggacccuucaucuc

SEQ ID NO: 377222 - RNA, 19 nt, Artificial Sequence
  Description of Artificial Sequence: Synthetic oligonucleotide
aaagaaacggggauucugg

SEQ ID NO: 377223 - RNA, 19 nt, Artificial Sequence
  Description of Artificial Sequence: Synthetic oligonucleotide
aagagcaccucacucugac

SEQ ID NO: 377224 - RNA, 19 nt, Artificial Sequence
  Description of Artificial Sequence: Synthetic oligonucleotide
ugauguuugcccaaaauuu

SEQ ID NO: 377225 - RNA, 19 nt, Artificial Sequence
  Description of Artificial Sequence: Synthetic oligonucleotide
ugagguaugggccccauca

SEQ ID NO: 377226 - RNA, 19 nt, Artificial Sequence
  Description of Artificial Sequence: Synthetic oligonucleotide
gaagauaaugaccuauaac

SEQ ID NO: 377227 - RNA, 19 nt, Artificial Sequence
  Description of Artificial Sequence: Synthetic oligonucleotide
uggaacagugaacagcucc

SEQ ID NO: 377228 - RNA, 19 nt, Artificial Sequence
  Description of Artificial Sequence: Synthetic oligonucleotide
ugaccuauaaccuccuggc

SEQ ID NO: 377229 - RNA, 19 nt, Artificial Sequence
  Description of Artificial Sequence: Synthetic oligonucleotide
agguuauauucuuugagug

SEQ ID NO: 377230 - RNA, 19 nt, Artificial Sequence
  Description of Artificial Sequence: Synthetic oligonucleotide
agauagguuauauucuuug

SEQ ID NO: 377231 - RNA, 19 nt, Artificial Sequence
  Description of Artificial Sequence: Synthetic oligonucleotide
augaccuauaaccuccugg

SEQ ID NO: 377232 - RNA, 19 nt, Artificial Sequence
  Description of Artificial Sequence: Synthetic oligonucleotide
gauaaugaccuauaaccuc

SEQ ID NO: 377233 - RNA, 19 nt, Artificial Sequence
  Description of Artificial Sequence: Synthetic oligonucleotide
gagccuagcaauaaggacc

SEQ ID NO: 377234 - RNA, 19 nt, Artificial Sequence
  Description of Artificial Sequence: Synthetic oligonucleotide
uagguuauauucuuugagu

SEQ ID NO: 377235 - RNA, 19 nt, Artificial Sequence
  Description of Artificial Sequence: Synthetic oligonucleotide
acacgaauagacaggaccc

SEQ ID NO: 377236 - RNA, 19 nt, Artificial Sequence
  Description of Artificial Sequence: Synthetic oligonucleotide
uucauaucguggaagcuca

SEQ ID NO: 377237 - RNA, 19 nt, Artificial Sequence
  Description of Artificial Sequence: Synthetic oligonucleotide
aagaaacggggauucuggg

SEQ ID NO: 377238 - RNA, 19 nt, Artificial Sequence
  Description of Artificial Sequence: Synthetic oligonucleotide
gagcugucgaacaugacgg

SEQ ID NO: 377239 - RNA, 19 nt, Artificial Sequence
  Description of Artificial Sequence: Synthetic oligonucleotide
ugaggauaaggaugaaaag

SEQ ID NO: 377240 - RNA, 19 nt, Artificial Sequence
  Description of Artificial Sequence: Synthetic oligonucleotide
auucauaucguggaagcuc

SEQ ID NO: 377241 - RNA, 19 nt, Artificial Sequence
  Description of Artificial Sequence: Synthetic oligonucleotide
uugauguuugcccaaaauu

SEQ ID NO: 377242 - RNA, 19 nt, Artificial Sequence
  Description of Artificial Sequence: Synthetic oligonucleotide
gcuucaaccacaaaggcgg

SEQ ID NO: 377243 - RNA, 19 nt, Artificial Sequence
  Description of Artificial Sequence: Synthetic oligonucleotide
ucguuugaaacgcuuuaag

SEQ ID NO: 377244 - RNA, 19 nt, Artificial Sequence
  Description of Artificial Sequence: Synthetic oligonucleotide
aacccgaggccuucaaaac

SEQ ID NO: 377245 - RNA, 19 nt, Artificial Sequence
  Description of Artificial Sequence: Synthetic oligonucleotide
auaaggacccuucaucucu

SEQ ID NO: 377246 - RNA, 19 nt, Artificial Sequence
  Description of Artificial Sequence: Synthetic oligonucleotide
auugguaagcccaggaggg

SEQ ID NO: 377247 - RNA, 19 nt, Artificial Sequence
  Description of Artificial Sequence: Synthetic oligonucleotide
uucggaaucgcugggaugc

SEQ ID NO: 377248 - RNA, 19 nt, Artificial Sequence
  Description of Artificial Sequence: Synthetic oligonucleotide
ugcgguuuggcucagccac

SEQ ID NO: 377249 - RNA, 19 nt, Artificial Sequence
  Description of Artificial Sequence: Synthetic oligonucleotide
ugagaaacgcugaucacaa

SEQ ID NO: 377250 - RNA, 19 nt, Artificial Sequence
  Description of Artificial Sequence: Synthetic oligonucleotide
cucuugaagggucaaauuc

SEQ ID NO: 377251 - RNA, 19 nt, Artificial Sequence
  Description of Artificial Sequence: Synthetic oligonucleotide
uuuggcucagccacuagcu

SEQ ID NO: 377252 - RNA, 19 nt, Artificial Sequence
  Description of Artificial Sequence: Synthetic oligonucleotide
guggaaaucccauuuccag

SEQ ID NO: 377253 - RNA, 19 nt, Artificial Sequence
  Description of Artificial Sequence: Synthetic oligonucleotide
uugaaacgcuuuaagggcu

SEQ ID NO: 377254 - RNA, 19 nt, Artificial Sequence
  Description of Artificial Sequence: Synthetic oligonucleotide
aagagggcggacguguuac

SEQ ID NO: 377255 - RNA, 19 nt, Artificial Sequence
  Description of Artificial Sequence: Synthetic oligonucleotide
uggagaguggaacagugaa

SEQ ID NO: 377256 - RNA, 19 nt, Artificial Sequence
  Description of Artificial Sequence: Synthetic oligonucleotide
cugagaaaacaucugccag

SEQ ID NO: 377257 - RNA, 19 nt, Artificial Sequence
  Description of Artificial Sequence: Synthetic oligonucleotide
ucugcaagauucauaucgu

SEQ ID NO: 377258 - RNA, 19 nt, Artificial Sequence
  Description of Artificial Sequence: Synthetic oligonucleotide
ggcggaagauauuagaacc

SEQ ID NO: 377259 - RNA, 19 nt, Artificial Sequence
  Description of Artificial Sequence: Synthetic oligonucleotide
ugaagggucaaauucugua

SEQ ID NO: 377260 - RNA, 19 nt, Artificial Sequence
  Description of Artificial Sequence: Synthetic oligonucleotide
aagacgcuuaucagaagac

SEQ ID NO: 377261 - RNA, 19 nt, Artificial Sequence
  Description of Artificial Sequence: Synthetic oligonucleotide
aaaugcuucggaaucgcug

SEQ ID NO: 377262 - RNA, 19 nt, Artificial Sequence
  Description of Artificial Sequence: Synthetic oligonucleotide
agauugguaagcccaggag

SEQ ID NO: 377263 - RNA, 19 nt, Artificial Sequence
  Description of Artificial Sequence: Synthetic oligonucleotide
accuauaaccuccuggccu

SEQ ID NO: 377264 - RNA, 19 nt, Artificial Sequence
  Description of Artificial Sequence: Synthetic oligonucleotide
gaauagacaggacccgcag

SEQ ID NO: 377265 - RNA, 19 nt, Artificial Sequence
  Description of Artificial Sequence: Synthetic oligonucleotide
agccucuaaacucagcugu

SEQ ID NO: 377266 - RNA, 19 nt, Artificial Sequence
  Description of Artificial Sequence: Synthetic oligonucleotide
aaaagggcugacucaggca

SEQ ID NO: 377267 - RNA, 19 nt, Artificial Sequence
  Description of Artificial Sequence: Synthetic oligonucleotide
acaucgcucugcugcaucc

SEQ ID NO: 377268 - RNA, 19 nt, Artificial Sequence
  Description of Artificial Sequence: Synthetic oligonucleotide
ugggauccgauccauccag

SEQ ID NO: 377269 - RNA, 19 nt, Artificial Sequence
  Description of Artificial Sequence: Synthetic oligonucleotide
ugagccuagcaauaaggac

SEQ ID NO: 377270 - RNA, 19 nt, Artificial Sequence
  Description of Artificial Sequence: Synthetic oligonucleotide
aacucagcugugggaaugc

SEQ ID NO: 377271 - RNA, 19 nt, Artificial Sequence
  Description of Artificial Sequence: Synthetic oligonucleotide
agccuagcaauaaggaccc

SEQ ID NO: 377272 - RNA, 19 nt, Artificial Sequence
  Description of Artificial Sequence: Synthetic oligonucleotide
uguuacacgagugguaggu

SEQ ID NO: 377273 - RNA, 19 nt, Artificial Sequence
  Description of Artificial Sequence: Synthetic oligonucleotide
uuacacgagugguagguac

SEQ ID NO: 377274 - RNA, 19 nt, Artificial Sequence
  Description of Artificial Sequence: Synthetic oligonucleotide
guggucaacacgaauagac

SEQ ID NO: 377275 - RNA, 19 nt, Artificial Sequence
  Description of Artificial Sequence: Synthetic oligonucleotide
uggugaaugagcugaugca

SEQ ID NO: 377276 - RNA, 19 nt, Artificial Sequence
  Description of Artificial Sequence: Synthetic oligonucleotide
uggguggucaacacgaaua

SEQ ID NO: 377277 - RNA, 19 nt, Artificial Sequence
  Description of Artificial Sequence: Synthetic oligonucleotide
aagguggaaaugcuucgga

SEQ ID NO: 377278 - RNA, 19 nt, Artificial Sequence
  Description of Artificial Sequence: Synthetic oligonucleotide
gucaacacgaauagacagg

SEQ ID NO: 377279 - RNA, 19 nt, Artificial Sequence
  Description of Artificial Sequence: Synthetic oligonucleotide
gaguggaacagugaacagc

SEQ ID NO: 377280 - RNA, 19 nt, Artificial Sequence
  Description of Artificial Sequence: Synthetic oligonucleotide
cugucgaacaugacgggag

SEQ ID NO: 377281 - RNA, 19 nt, Artificial Sequence
  Description of Artificial Sequence: Synthetic oligonucleotide
ggcaaggcaagcuaccagg

SEQ ID NO: 377282 - RNA, 19 nt, Artificial Sequence
  Description of Artificial Sequence: Synthetic oligonucleotide
gacgcuuaucagaagacac

SEQ ID NO: 377283 - RNA, 19 nt, Artificial Sequence
  Description of Artificial Sequence: Synthetic oligonucleotide
uguuucucuaaagccuggg

SEQ ID NO: 377284 - RNA, 19 nt, Artificial Sequence
  Description of Artificial Sequence: Synthetic oligonucleotide
acgaauagacaggacccgc

SEQ ID NO: 377285 - RNA, 19 nt, Artificial Sequence
  Description of Artificial Sequence: Synthetic oligonucleotide
gucgcuaaccacauggcag

SEQ ID NO: 377286 - RNA, 19 nt, Artificial Sequence
  Description of Artificial Sequence: Synthetic oligonucleotide
gauccgauccauccagagc

SEQ ID NO: 377287 - RNA, 19 nt, Artificial Sequence
  Description of Artificial Sequence: Synthetic oligonucleotide
uagucgaaggcccuucagu

SEQ ID NO: 377288 - RNA, 19 nt, Artificial Sequence
  Description of Artificial Sequence: Synthetic oligonucleotide
gauggugagcugucgaaca

SEQ ID NO: 377289 - RNA, 19 nt, Artificial Sequence
  Description of Artificial Sequence: Synthetic oligonucleotide
uacagcgacacuuggcuaa

SEQ ID NO: 377290 - RNA, 19 nt, Artificial Sequence
  Description of Artificial Sequence: Synthetic oligonucleotide
aaugaccuauaaccuccug

SEQ ID NO: 377291 - RNA, 19 nt, Artificial Sequence
  Description of Artificial Sequence: Synthetic oligonucleotide
ugucgaacaugacgggagc

SEQ ID NO: 377292 - RNA, 19 nt, Artificial Sequence
  Description of Artificial Sequence: Synthetic oligonucleotide
guuuggcucagccacuagc

SEQ ID NO: 377293 - RNA, 19 nt, Artificial Sequence
  Description of Artificial Sequence: Synthetic oligonucleotide
aggguuaucccucuggcuu

SEQ ID NO: 377294 - RNA, 19 nt, Artificial Sequence
  Description of Artificial Sequence: Synthetic oligonucleotide
ucuaaagccugggagccug

SEQ ID NO: 377295 - RNA, 19 nt, Artificial Sequence
  Description of Artificial Sequence: Synthetic oligonucleotide
gauugcuucccuugcugug

SEQ ID NO: 377296 - RNA, 19 nt, Artificial Sequence
  Description of Artificial Sequence: Synthetic oligonucleotide
acaaagacgcuuaucagaa

SEQ ID NO: 377297 - RNA, 19 nt, Artificial Sequence
  Description of Artificial Sequence: Synthetic oligonucleotide
ugcugcagagaacccgagg

SEQ ID NO: 377298 - RNA, 19 nt, Artificial Sequence
  Description of Artificial Sequence: Synthetic oligonucleotide
ugcccaaaauuuauuuuau

SEQ ID NO: 377299 - RNA, 19 nt, Artificial Sequence
  Description of Artificial Sequence: Synthetic oligonucleotide
aaacggggauucugggcag

SEQ ID NO: 377300 - RNA, 19 nt, Artificial Sequence
  Description of Artificial Sequence: Synthetic oligonucleotide
cuauguuucucuaaagccu

SEQ ID NO: 377301 - RNA, 19 nt, Artificial Sequence
  Description of Artificial Sequence: Synthetic oligonucleotide
uaucguggaagcucagccu

SEQ ID NO: 377302 - RNA, 19 nt, Artificial Sequence
  Description of Artificial Sequence: Synthetic oligonucleotide
auauugcagauggugagcu

SEQ ID NO: 377303 - RNA, 19 nt, Artificial Sequence
  Description of Artificial Sequence: Synthetic oligonucleotide
ggcacagugucacagcugc

SEQ ID NO: 377304 - RNA, 19 nt, Artificial Sequence
  Description of Artificial Sequence: Synthetic oligonucleotide
ugacuucacucuuccuccg

SEQ ID NO: 377305 - RNA, 19 nt, Artificial Sequence
  Description of Artificial Sequence: Synthetic oligonucleotide
ggaugaaaagggcugacuc

SEQ ID NO: 377306 - RNA, 19 nt, Artificial Sequence
  Description of Artificial Sequence: Synthetic oligonucleotide
gaacccgaggccuucaaaa

SEQ ID NO: 377307 - RNA, 19 nt, Artificial Sequence
  Description of Artificial Sequence: Synthetic oligonucleotide
uucucaccagccacaauaa

SEQ ID NO: 377308 - RNA, 19 nt, Artificial Sequence
  Description of Artificial Sequence: Synthetic oligonucleotide
ugguacggcaggguuaucc

SEQ ID NO: 377309 - RNA, 19 nt, Artificial Sequence
  Description of Artificial Sequence: Synthetic oligonucleotide
ugcucuaggcaguuuucug

SEQ ID NO: 377310 - RNA, 19 nt, Artificial Sequence
  Description of Artificial Sequence: Synthetic oligonucleotide
ugcugcucguuugaaacgc

SEQ ID NO: 377311 - RNA, 19 nt, Artificial Sequence
  Description of Artificial Sequence: Synthetic oligonucleotide
gcaagauucauaucgugga

SEQ ID NO: 377312 - RNA, 19 nt, Artificial Sequence
  Description of Artificial Sequence: Synthetic oligonucleotide
agcauauugcagaugguga

SEQ ID NO: 377313 - RNA, 19 nt, Artificial Sequence
  Description of Artificial Sequence: Synthetic oligonucleotide
cagcauauugcagauggug

SEQ ID NO: 377314 - RNA, 19 nt, Artificial Sequence
  Description of Artificial Sequence: Synthetic oligonucleotide
aacuccaggaugggcagug

SEQ ID NO: 377315 - RNA, 19 nt, Artificial Sequence
  Description of Artificial Sequence: Synthetic oligonucleotide
agucgcuaaccacauggca

SEQ ID NO: 377316 - RNA, 19 nt, Artificial Sequence
  Description of Artificial Sequence: Synthetic oligonucleotide
augacgggagcugugcagg

SEQ ID NO: 377317 - RNA, 19 nt, Artificial Sequence
  Description of Artificial Sequence: Synthetic oligonucleotide
caguggugaaaacagguca

SEQ ID NO: 377318 - RNA, 19 nt, Artificial Sequence
  Description of Artificial Sequence: Synthetic oligonucleotide
uggugaaaacaggucacug

SEQ ID NO: 377319 - RNA, 19 nt, Artificial Sequence
  Description of Artificial Sequence: Synthetic oligonucleotide
aaacgcuuuaagggcuuag

SEQ ID NO: 377320 - RNA, 19 nt, Artificial Sequence
  Description of Artificial Sequence: Synthetic oligonucleotide
caugacgggagcugugcag

SEQ ID NO: 377321 - RNA, 19 nt, Artificial Sequence
  Description of Artificial Sequence: Synthetic oligonucleotide
gaccuauaaccuccuggcc

SEQ ID NO: 377322 - RNA, 19 nt, Artificial Sequence
  Description of Artificial Sequence: Synthetic oligonucleotide
ucgagaacccugcgguuug

SEQ ID NO: 377323 - RNA, 19 nt, Artificial Sequence
  Description of Artificial Sequence: Synthetic oligonucleotide
aggcguaggugaccaaagg

SEQ ID NO: 377324 - RNA, 19 nt, Artificial Sequence
  Description of Artificial Sequence: Synthetic oligonucleotide
cuuugaguguuugcaacac

SEQ ID NO: 377325 - RNA, 19 nt, Artificial Sequence
  Description of Artificial Sequence: Synthetic oligonucleotide
agggcggacguguuacacg

SEQ ID NO: 377326 - RNA, 19 nt, Artificial Sequence
  Description of Artificial Sequence: Synthetic oligonucleotide
ucgaacaugacgggagcug

SEQ ID NO: 377327 - RNA, 19 nt, Artificial Sequence
  Description of Artificial Sequence: Synthetic oligonucleotide
aaaggcggcaaggcaagcu

SEQ ID NO: 377328 - RNA, 19 nt, Artificial Sequence
  Description of Artificial Sequence: Synthetic oligonucleotide
agaacccaggccauuguag

SEQ ID NO: 377329 - RNA, 19 nt, Artificial Sequence
  Description of Artificial Sequence: Synthetic oligonucleotide
gauguuugcccaaaauuua

SEQ ID NO: 377330 - RNA, 19 nt, Artificial Sequence
  Description of Artificial Sequence: Synthetic oligonucleotide
gugagaaacgcugaucaca

SEQ ID NO: 377331 - RNA, 19 nt, Artificial Sequence
  Description of Artificial Sequence: Synthetic oligonucleotide
agaaauugggcugggcgcu

SEQ ID NO: 377332 - RNA, 19 nt, Artificial Sequence
  Description of Artificial Sequence: Synthetic oligonucleotide
cugggcgcuucucaaacag

SEQ ID NO: 377333 - RNA, 19 nt, Artificial Sequence
  Description of Artificial Sequence: Synthetic oligonucleotide
aaggcggcaaggcaagcua

SEQ ID NO: 377334 - RNA, 19 nt, Artificial Sequence
  Description of Artificial Sequence: Synthetic oligonucleotide
gaggaugaauccucugaga

SEQ ID NO: 377335 - RNA, 19 nt, Artificial Sequence
  Description of Artificial Sequence: Synthetic oligonucleotide
gguacugaguaaguggccc

SEQ ID NO: 377336 - RNA, 19 nt, Artificial Sequence
  Description of Artificial Sequence: Synthetic oligonucleotide
cugcaagauucauaucgug

SEQ ID NO: 377337 - RNA, 19 nt, Artificial Sequence
  Description of Artificial Sequence: Synthetic oligonucleotide
uggacguuccuauguuucu

SEQ ID NO: 377338 - RNA, 19 nt, Artificial Sequence
  Description of Artificial Sequence: Synthetic oligonucleotide
uacggcaggguuaucccuc

SEQ ID NO: 377339 - RNA, 19 nt, Artificial Sequence
  Description of Artificial Sequence: Synthetic oligonucleotide
cacgaauagacaggacccg

SEQ ID NO: 377340 - RNA, 19 nt, Artificial Sequence
  Description of Artificial Sequence: Synthetic oligonucleotide
cauaucguggaagcucagc

SEQ ID NO: 377341 - RNA, 19 nt, Artificial Sequence
  Description of Artificial Sequence: Synthetic oligonucleotide
guaaguggcccaaagccuc

SEQ ID NO: 377342 - RNA, 19 nt, Artificial Sequence
  Description of Artificial Sequence: Synthetic oligonucleotide
ucucuugaagggucaaauu

SEQ ID NO: 377343 - RNA, 19 nt, Artificial Sequence
  Description of Artificial Sequence: Synthetic oligonucleotide
uuaucccucuggcuugggu

SEQ ID NO: 377344 - RNA, 19 nt, Artificial Sequence
  Description of Artificial Sequence: Synthetic oligonucleotide
aucucuugaagggucaaau

SEQ ID NO: 377345 - RNA, 19 nt, Artificial Sequence
  Description of Artificial Sequence: Synthetic oligonucleotide
aaucccauuuccaguugcu

SEQ ID NO: 377346 - RNA, 19 nt, Artificial Sequence
  Description of Artificial Sequence: Synthetic oligonucleotide
agaagacacaucaaugguu

SEQ ID NO: 377347 - RNA, 19 nt, Artificial Sequence
  Description of Artificial Sequence: Synthetic oligonucleotide
ggcguaggugaccaaaggc

SEQ ID NO: 377348 - RNA, 19 nt, Artificial Sequence
  Description of Artificial Sequence: Synthetic oligonucleotide
cagugcaagggaagauggg

SEQ ID NO: 377349 - RNA, 19 nt, Artificial Sequence
  Description of Artificial Sequence: Synthetic oligonucleotide
guagucgaaggcccuucag

SEQ ID NO: 377350 - RNA, 19 nt, Artificial Sequence
  Description of Artificial Sequence: Synthetic oligonucleotide
caaagacgcuuaucagaag

SEQ ID NO: 377351 - RNA, 19 nt, Artificial Sequence
  Description of Artificial Sequence: Synthetic oligonucleotide
ugaaacgcuuuaagggcuu

SEQ ID NO: 377352 - RNA, 19 nt, Artificial Sequence
  Description of Artificial Sequence: Synthetic oligonucleotide
ugcucguuugaaacgcuuu

SEQ ID NO: 377353 - RNA, 19 nt, Artificial Sequence
  Description of Artificial Sequence: Synthetic oligonucleotide
acccgaggccuucaaaaca

SEQ ID NO: 377354 - RNA, 19 nt, Artificial Sequence
  Description of Artificial Sequence: Synthetic oligonucleotide
uuuccauagugaagauaau

SEQ ID NO: 377355 - RNA, 19 nt, Artificial Sequence
  Description of Artificial Sequence: Synthetic oligonucleotide
aggccauuguaggaaagug

SEQ ID NO: 377356 - RNA, 19 nt, Artificial Sequence
  Description of Artificial Sequence: Synthetic oligonucleotide
acagauugguaagcccagg

SEQ ID NO: 377357 - RNA, 19 nt, Artificial Sequence
  Description of Artificial Sequence: Synthetic oligonucleotide
uagaacccaggccauugua

SEQ ID NO: 377358 - RNA, 19 nt, Artificial Sequence
  Description of Artificial Sequence: Synthetic oligonucleotide
aacuugccagggucucgag

SEQ ID NO: 377359 - RNA, 19 nt, Artificial Sequence
  Description of Artificial Sequence: Synthetic oligonucleotide
agacgcuuaucagaagaca

SEQ ID NO: 377360 - RNA, 19 nt, Artificial Sequence
  Description of Artificial Sequence: Synthetic oligonucleotide
cugcaucccgccgaggccg

SEQ ID NO: 377361 - RNA, 19 nt, Artificial Sequence
  Description of Artificial Sequence: Synthetic oligonucleotide
gauggggcccgaccucggg

SEQ ID NO: 377362 - RNA, 19 nt, Artificial Sequence
  Description of Artificial Sequence: Synthetic oligonucleotide
gguacggcaggguuauccc

SEQ ID NO: 377363 - RNA, 19 nt, Artificial Sequence
  Description of Artificial Sequence: Synthetic oligonucleotide
ccuauaaccuccuggccug

SEQ ID NO: 377364 - RNA, 19 nt, Artificial Sequence
  Description of Artificial Sequence: Synthetic oligonucleotide
gagucaacuccaggauggg

SEQ ID NO: 377365 - RNA, 19 nt, Artificial Sequence
  Description of Artificial Sequence: Synthetic oligonucleotide
gagguaugggccccaucac

SEQ ID NO: 377366 - RNA, 19 nt, Artificial Sequence
  Description of Artificial Sequence: Synthetic oligonucleotide
uccagcugacagagagaag

SEQ ID NO: 377367 - RNA, 19 nt, Artificial Sequence
  Description of Artificial Sequence: Synthetic oligonucleotide
ugccaaaagccagcgcuca

SEQ ID NO: 377368 - RNA, 19 nt, Artificial Sequence
  Description of Artificial Sequence: Synthetic oligonucleotide
gagucgcuaaccacauggc

SEQ ID NO: 377369 - RNA, 19 nt, Artificial Sequence
  Description of Artificial Sequence: Synthetic oligonucleotide
uucaaccacaaaggcggca

SEQ ID NO: 377370 - RNA, 19 nt, Artificial Sequence
  Description of Artificial Sequence: Synthetic oligonucleotide
acagcgacacuuggcuaac

SEQ ID NO: 377371 - RNA, 19 nt, Artificial Sequence
  Description of Artificial Sequence: Synthetic oligonucleotide
aaagccugggagccugcuu

SEQ ID NO: 377372 - RNA, 19 nt, Artificial Sequence
  Description of Artificial Sequence: Synthetic oligonucleotide
caucacauggugcugacau

SEQ ID NO: 377373 - RNA, 19 nt, Artificial Sequence
  Description of Artificial Sequence: Synthetic oligonucleotide
aggaaaguguaaggcucuc

SEQ ID NO: 377374 - RNA, 19 nt, Artificial Sequence
  Description of Artificial Sequence: Synthetic oligonucleotide
gugagccuagcaauaagga

SEQ ID NO: 377375 - RNA, 19 nt, Artificial Sequence
  Description of Artificial Sequence: Synthetic oligonucleotide
ugggcgcuucucaaacaga

SEQ ID NO: 377376 - RNA, 19 nt, Artificial Sequence
  Description of Artificial Sequence: Synthetic oligonucleotide
cagauugguaagcccagga

SEQ ID NO: 377377 - RNA, 19 nt, Artificial Sequence
  Description of Artificial Sequence: Synthetic oligonucleotide
cugccaaaagccagcgcuc

SEQ ID NO: 377378 - RNA, 19 nt, Artificial Sequence
  Description of Artificial Sequence: Synthetic oligonucleotide
gaggugagaaacgcugauc

SEQ ID NO: 377379 - RNA, 19 nt, Artificial Sequence
  Description of Artificial Sequence: Synthetic oligonucleotide
guggacguuccuauguuuc

SEQ ID NO: 377380 - RNA, 19 nt, Artificial Sequence
  Description of Artificial Sequence: Synthetic oligonucleotide
acgcuuaucagaagacaca

SEQ ID NO: 377381 - RNA, 19 nt, Artificial Sequence
  Description of Artificial Sequence: Synthetic oligonucleotide
uggcacgagucaacuccag

SEQ ID NO: 377382 - RNA, 19 nt, Artificial Sequence
  Description of Artificial Sequence: Synthetic oligonucleotide
caagauucauaucguggaa

SEQ ID NO: 377383 - RNA, 19 nt, Artificial Sequence
  Description of Artificial Sequence: Synthetic oligonucleotide
agggccaacaggccagcgu

SEQ ID NO: 377384 - RNA, 19 nt, Artificial Sequence
  Description of Artificial Sequence: Synthetic oligonucleotide
ggaaaugcuucggaaucgc

SEQ ID NO: 377385 - RNA, 19 nt, Artificial Sequence
  Description of Artificial Sequence: Synthetic oligonucleotide
ggcuuggguggucaacacg

SEQ ID NO: 377386 - RNA, 19 nt, Artificial Sequence
  Description of Artificial Sequence: Synthetic oligonucleotide
gggacugaggccugggaac

SEQ ID NO: 377387 - RNA, 19 nt, Artificial Sequence
  Description of Artificial Sequence: Synthetic oligonucleotide
guggcggaacuugagggug

SEQ ID NO: 377388 - RNA, 19 nt, Artificial Sequence
  Description of Artificial Sequence: Synthetic oligonucleotide
cccgaggccuucaaaacag

SEQ ID NO: 377389 - RNA, 19 nt, Artificial Sequence
  Description of Artificial Sequence: Synthetic oligonucleotide
gacguuccuauguuucucu

SEQ ID NO: 377390 - RNA, 19 nt, Artificial Sequence
  Description of Artificial Sequence: Synthetic oligonucleotide
cagccuuuucagagauagg

SEQ ID NO: 377391 - RNA, 19 nt, Artificial Sequence
  Description of Artificial Sequence: Synthetic oligonucleotide
gcggaagauauuagaaccc

SEQ ID NO: 377392 - RNA, 19 nt, Artificial Sequence
  Description of Artificial Sequence: Synthetic oligonucleotide
caauggcacgagucaacuc

SEQ ID NO: 377393 - RNA, 19 nt, Artificial Sequence
  Description of Artificial Sequence: Synthetic oligonucleotide
uggcggaacuugagggugu

SEQ ID NO: 377394 - RNA, 19 nt, Artificial Sequence
  Description of Artificial Sequence: Synthetic oligonucleotide
ggagccgccggauugcuuc

SEQ ID NO: 377395 - RNA, 19 nt, Artificial Sequence
  Description of Artificial Sequence: Synthetic oligonucleotide
uugguaagcccaggaggga

SEQ ID NO: 377396 - RNA, 19 nt, Artificial Sequence
  Description of Artificial Sequence: Synthetic oligonucleotide
gggaugagucccaugaguc

SEQ ID NO: 377397 - RNA, 19 nt, Artificial Sequence
  Description of Artificial Sequence: Synthetic oligonucleotide
cagugacugcugagcagcc

SEQ ID NO: 377398 - RNA, 19 nt, Artificial Sequence
  Description of Artificial Sequence: Synthetic oligonucleotide
agaacccgaggccuucaaa

SEQ ID NO: 377399 - RNA, 19 nt, Artificial Sequence
  Description of Artificial Sequence: Synthetic oligonucleotide
gacguguuacacgaguggu

SEQ ID NO: 377400 - RNA, 19 nt, Artificial Sequence
  Description of Artificial Sequence: Synthetic oligonucleotide
caaccacaaaggcggcaag

SEQ ID NO: 377401 - RNA, 19 nt, Artificial Sequence
  Description of Artificial Sequence: Synthetic oligonucleotide
ggugagaaacgcugaucac

SEQ ID NO: 377402 - RNA, 19 nt, Artificial Sequence
  Description of Artificial Sequence: Synthetic oligonucleotide
ggguuaucccucuggcuug

SEQ ID NO: 377403 - RNA, 19 nt, Artificial Sequence
  Description of Artificial Sequence: Synthetic oligonucleotide
aggcggcaaggcaagcuac

SEQ ID NO: 377404 - RNA, 19 nt, Artificial Sequence
  Description of Artificial Sequence: Synthetic oligonucleotide
uuaggcugugaggcugagc

SEQ ID NO: 377405 - RNA, 19 nt, Artificial Sequence
  Description of Artificial Sequence: Synthetic oligonucleotide
cuauaaccuccuggccugg

SEQ ID NO: 377406 - RNA, 19 nt, Artificial Sequence
  Description of Artificial Sequence: Synthetic oligonucleotide
ggaaaguguaaggcucucc

SEQ ID NO: 377407 - RNA, 19 nt, Artificial Sequence
  Description of Artificial Sequence: Synthetic oligonucleotide
gcaggcggaagauauuaga

SEQ ID NO: 377408 - RNA, 19 nt, Artificial Sequence
  Description of Artificial Sequence: Synthetic oligonucleotide
cccaauuauguggcuaggg

SEQ ID NO: 377409 - RNA, 19 nt, Artificial Sequence
  Description of Artificial Sequence: Synthetic oligonucleotide
uucccaggguacugaguaa

SEQ ID NO: 377410 - RNA, 19 nt, Artificial Sequence
  Description of Artificial Sequence: Synthetic oligonucleotide
agcugucgcagugacugcu

SEQ ID NO: 377411 - RNA, 19 nt, Artificial Sequence
  Description of Artificial Sequence: Synthetic oligonucleotide
cagauggugagcugucgaa

SEQ ID NO: 377412 - RNA, 19 nt, Artificial Sequence
  Description of Artificial Sequence: Synthetic oligonucleotide
ugggauggggcccgaccuc

SEQ ID NO: 377413 - RNA, 19 nt, Artificial Sequence
  Description of Artificial Sequence: Synthetic oligonucleotide
gacgggagcugugcaggag

SEQ ID NO: 377414 - RNA, 19 nt, Artificial Sequence
  Description of Artificial Sequence: Synthetic oligonucleotide
gagggcggacguguuacac

SEQ ID NO: 377415 - RNA, 19 nt, Artificial Sequence
  Description of Artificial Sequence: Synthetic oligonucleotide
gagaacccugcgguuuggc

SEQ ID NO: 377416 - RNA, 19 nt, Artificial Sequence
  Description of Artificial Sequence: Synthetic oligonucleotide
gcauucucugguacggcag

SEQ ID NO: 377417 - RNA, 19 nt, Artificial Sequence
  Description of Artificial Sequence: Synthetic oligonucleotide
gaagagggcggacguguua

SEQ ID NO: 377418 - RNA, 19 nt, Artificial Sequence
  Description of Artificial Sequence: Synthetic oligonucleotide
ggagaguggaacagugaac

SEQ ID NO: 377419 - RNA, 19 nt, Artificial Sequence
  Description of Artificial Sequence: Synthetic oligonucleotide
ucucgagaacccugcgguu

SEQ ID NO: 377420 - RNA, 19 nt, Artificial Sequence
  Description of Artificial Sequence: Synthetic oligonucleotide
gccauuguaggaaagugua

SEQ ID NO: 377421 - RNA, 19 nt, Artificial Sequence
  Description of Artificial Sequence: Synthetic oligonucleotide
ccugcgguuuggcucagcc

SEQ ID NO: 377422 - RNA, 19 nt, Artificial Sequence
  Description of Artificial Sequence: Synthetic oligonucleotide
gaacagugaacagcuccaa

SEQ ID NO: 377423 - RNA, 19 nt, Artificial Sequence
  Description of Artificial Sequence: Synthetic oligonucleotide
aggcaagcuaccagggccu

SEQ ID NO: 377424 - RNA, 19 nt, Artificial Sequence
  Description of Artificial Sequence: Synthetic oligonucleotide
gggcggacguguuacacga

SEQ ID NO: 377425 - RNA, 19 nt, Artificial Sequence
  Description of Artificial Sequence: Synthetic oligonucleotide
gugcaagggaagaugggaa

SEQ ID NO: 377426 - RNA, 19 nt, Artificial Sequence
  Description of Artificial Sequence: Synthetic oligonucleotide
ggcgguucccugguagucg

SEQ ID NO: 377427 - RNA, 19 nt, Artificial Sequence
  Description of Artificial Sequence: Synthetic oligonucleotide
gguuaucccucuggcuugg

SEQ ID NO: 377428 - RNA, 19 nt, Artificial Sequence
  Description of Artificial Sequence: Synthetic oligonucleotide
cucguuugaaacgcuuuaa

SEQ ID NO: 377429 - RNA, 19 nt, Artificial Sequence
  Description of Artificial Sequence: Synthetic oligonucleotide
gagccgccggauugcuucc

SEQ ID NO: 377430 - RNA, 19 nt, Artificial Sequence
  Description of Artificial Sequence: Synthetic oligonucleotide
cccugcaagcugaugguac

SEQ ID NO: 377431 - RNA, 19 nt, Artificial Sequence
  Description of Artificial Sequence: Synthetic oligonucleotide
caucgcucugcugcauccc

SEQ ID NO: 377432 - RNA, 19 nt, Artificial Sequence
  Description of Artificial Sequence: Synthetic oligonucleotide
cugcugcagagaacccgag

SEQ ID NO: 377433 - RNA, 19 nt, Artificial Sequence
  Description of Artificial Sequence: Synthetic oligonucleotide
ggcugggcgcuucucaaac

SEQ ID NO: 377434 - RNA, 19 nt, Artificial Sequence
  Description of Artificial Sequence: Synthetic oligonucleotide
acguuccuauguuucucua

SEQ ID NO: 377435 - RNA, 19 nt, Artificial Sequence
  Description of Artificial Sequence: Synthetic oligonucleotide
gagaaacgcugaucacaaa

SEQ ID NO: 377436 - RNA, 19 nt, Artificial Sequence
  Description of Artificial Sequence: Synthetic oligonucleotide
agagggcggacguguuaca

SEQ ID NO: 377437 - RNA, 19 nt, Artificial Sequence
  Description of Artificial Sequence: Synthetic oligonucleotide
ucgcugggaugccuccagu

SEQ ID NO: 377438 - RNA, 19 nt, Artificial Sequence
  Description of Artificial Sequence: Synthetic oligonucleotide
cgaacaauggcacgaguca

SEQ ID NO: 377439 - RNA, 19 nt, Artificial Sequence
  Description of Artificial Sequence: Synthetic oligonucleotide
cccaugagucgcuaaccac

SEQ ID NO: 377440 - RNA, 19 nt, Artificial Sequence
  Description of Artificial Sequence: Synthetic oligonucleotide
gacaaucugcaagauucau

SEQ ID NO: 377441 - RNA, 19 nt, Artificial Sequence
  Description of Artificial Sequence: Synthetic oligonucleotide
ucggaaucgcugggaugcc

SEQ ID NO: 377442 - RNA, 19 nt, Artificial Sequence
  Description of Artificial Sequence: Synthetic oligonucleotide
ccauuagugcugcagcaca

SEQ ID NO: 377443 - RNA, 19 nt, Artificial Sequence
  Description of Artificial Sequence: Synthetic oligonucleotide
caugagucgcuaaccacau

SEQ ID NO: 377444 - RNA, 19 nt, Artificial Sequence
  Description of Artificial Sequence: Synthetic oligonucleotide
gcgugagccuagcaauaag

SEQ ID NO: 377445 - RNA, 19 nt, Artificial Sequence
  Description of Artificial Sequence: Synthetic oligonucleotide
gaaaugcuucggaaucgcu

SEQ ID NO: 377446 - RNA, 19 nt, Artificial Sequence
  Description of Artificial Sequence: Synthetic oligonucleotide
cucugguacggcaggguua

SEQ ID NO: 377447 - RNA, 19 nt, Artificial Sequence
  Description of Artificial Sequence: Synthetic oligonucleotide
ggaagaggcguaggugacc

SEQ ID NO: 377448 - RNA, 19 nt, Artificial Sequence
  Description of Artificial Sequence: Synthetic oligonucleotide
agcgcucauggugaggaua

SEQ ID NO: 377449 - RNA, 19 nt, Artificial Sequence
  Description of Artificial Sequence: Synthetic oligonucleotide
gccggauugcuucccuugc

SEQ ID NO: 377450 - RNA, 19 nt, Artificial Sequence
  Description of Artificial Sequence: Synthetic oligonucleotide
gagcccguuuggaugaugu

SEQ ID NO: 377451 - RNA, 19 nt, Artificial Sequence
  Description of Artificial Sequence: Synthetic oligonucleotide
agcguuccccaggcgguuc

SEQ ID NO: 377452 - RNA, 19 nt, Artificial Sequence
  Description of Artificial Sequence: Synthetic oligonucleotide
guuaucccucuggcuuggg

SEQ ID NO: 377453 - RNA, 19 nt, Artificial Sequence
  Description of Artificial Sequence: Synthetic oligonucleotide
gcugcaucccgccgaggcc

SEQ ID NO: 377454 - RNA, 19 nt, Artificial Sequence
  Description of Artificial Sequence: Synthetic oligonucleotide
gcucgaacaauggcacgag

SEQ ID NO: 377455 - RNA, 19 nt, Artificial Sequence
  Description of Artificial Sequence: Synthetic oligonucleotide
guacagcgacacuuggcua

SEQ ID NO: 377456 - RNA, 19 nt, Artificial Sequence
  Description of Artificial Sequence: Synthetic oligonucleotide
gguagucgaaggcccuuca

SEQ ID NO: 377457 - RNA, 19 nt, Artificial Sequence
  Description of Artificial Sequence: Synthetic oligonucleotide
gguuuggcucagccacuag

SEQ ID NO: 377458 - RNA, 19 nt, Artificial Sequence
  Description of Artificial Sequence: Synthetic oligonucleotide
gcucuccagugauacccag

SEQ ID NO: 377459 - RNA, 19 nt, Artificial Sequence
  Description of Artificial Sequence: Synthetic oligonucleotide
agagaacccgaggccuuca

SEQ ID NO: 377460 - RNA, 19 nt, Artificial Sequence
  Description of Artificial Sequence: Synthetic oligonucleotide
acacaagcccaaaguccug

SEQ ID NO: 377461 - RNA, 19 nt, Artificial Sequence
  Description of Artificial Sequence: Synthetic oligonucleotide
cagggguaggaggcuuucc

SEQ ID NO: 377462 - RNA, 19 nt, Artificial Sequence
  Description of Artificial Sequence: Synthetic oligonucleotide
acguguuacacgaguggua

SEQ ID NO: 377463 - RNA, 19 nt, Artificial Sequence
  Description of Artificial Sequence: Synthetic oligonucleotide
gcucguuugaaacgcuuua

SEQ ID NO: 377464 - RNA, 19 nt, Artificial Sequence
  Description of Artificial Sequence: Synthetic oligonucleotide
ccaggguacugaguaagug

SEQ ID NO: 377465 - RNA, 19 nt, Artificial Sequence
  Description of Artificial Sequence: Synthetic oligonucleotide
caucccgccgaggccggcg

SEQ ID NO: 377466 - RNA, 19 nt, Artificial Sequence
  Description of Artificial Sequence: Synthetic oligonucleotide
ggaaucgcugggaugccuc

SEQ ID NO: 377467 - RNA, 19 nt, Artificial Sequence
  Description of Artificial Sequence: Synthetic oligonucleotide
agccgccggauugcuuccc

SEQ ID NO: 377468 - RNA, 19 nt, Artificial Sequence
  Description of Artificial Sequence: Synthetic oligonucleotide
ugcuucccuugcugugacu

SEQ ID NO: 377469 - RNA, 19 nt, Artificial Sequence
  Description of Artificial Sequence: Synthetic oligonucleotide
cauuagugcugcagcacau

SEQ ID NO: 377470 - RNA, 19 nt, Artificial Sequence
  Description of Artificial Sequence: Synthetic oligonucleotide
cugcgguuuggcucagcca

SEQ ID NO: 377471 - RNA, 19 nt, Artificial Sequence
  Description of Artificial Sequence: Synthetic oligonucleotide
gcguaggugaccaaaggcu

SEQ ID NO: 377472 - RNA, 19 nt, Artificial Sequence
  Description of Artificial Sequence: Synthetic oligonucleotide
cagcaggcggaagauauua

SEQ ID NO: 377473 - RNA, 19 nt, Artificial Sequence
  Description of Artificial Sequence: Synthetic oligonucleotide
gaggccggcgugagccuag

SEQ ID NO: 377474 - RNA, 19 nt, Artificial Sequence
  Description of Artificial Sequence: Synthetic oligonucleotide
ggauugcuucccuugcugu

SEQ ID NO: 377475 - RNA, 19 nt, Artificial Sequence
  Description of Artificial Sequence: Synthetic oligonucleotide
gaaacgcuuuaagggcuua

SEQ ID NO: 377476 - RNA, 19 nt, Artificial Sequence
  Description of Artificial Sequence: Synthetic oligonucleotide
ggacguuccuauguuucuc

SEQ ID NO: 377477 - RNA, 19 nt, Artificial Sequence
  Description of Artificial Sequence: Synthetic oligonucleotide
gcugucgaacaugacggga

SEQ ID NO: 377478 - RNA, 19 nt, Artificial Sequence
  Description of Artificial Sequence: Synthetic oligonucleotide
ccaggccauuguaggaaag

SEQ ID NO: 377479 - RNA, 19 nt, Artificial Sequence
  Description of Artificial Sequence: Synthetic oligonucleotide
guacggcaggguuaucccu

SEQ ID NO: 377480 - RNA, 19 nt, Artificial Sequence
  Description of Artificial Sequence: Synthetic oligonucleotide
cugggauggggcccgaccu

SEQ ID NO: 377481 - RNA, 19 nt, Artificial Sequence
  Description of Artificial Sequence: Synthetic oligonucleotide
cguggaaaucccauuucca

SEQ ID NO: 377482 - RNA, 19 nt, Artificial Sequence
  Description of Artificial Sequence: Synthetic oligonucleotide
guggugaaaacaggucacu

SEQ ID NO: 377483 - RNA, 19 nt, Artificial Sequence
  Description of Artificial Sequence: Synthetic oligonucleotide
gugagguaugggccccauc

SEQ ID NO: 377484 - RNA, 19 nt, Artificial Sequence
  Description of Artificial Sequence: Synthetic oligonucleotide
ggcggcaaggcaagcuacc

SEQ ID NO: 377485 - RNA, 19 nt, Artificial Sequence
  Description of Artificial Sequence: Synthetic oligonucleotide
aucccgccgaggccggcgu

SEQ ID NO: 377486 - RNA, 19 nt, Artificial Sequence
  Description of Artificial Sequence: Synthetic oligonucleotide
ccauuguaggaaaguguaa

SEQ ID NO: 377487 - RNA, 19 nt, Artificial Sequence
  Description of Artificial Sequence: Synthetic oligonucleotide
cggauugcuucccuugcug

SEQ ID NO: 377488 - RNA, 19 nt, Artificial Sequence
  Description of Artificial Sequence: Synthetic oligonucleotide
augggccccaucacauggu

SEQ ID NO: 377489 - RNA, 19 nt, Artificial Sequence
  Description of Artificial Sequence: Synthetic oligonucleotide
cgaauagacaggacccgca

SEQ ID NO: 377490 - RNA, 19 nt, Artificial Sequence
  Description of Artificial Sequence: Synthetic oligonucleotide
gccggcgugagccuagcaa

SEQ ID NO: 377491 - RNA, 19 nt, Artificial Sequence
  Description of Artificial Sequence: Synthetic oligonucleotide
gguaugggccccaucacau

SEQ ID NO: 377492 - RNA, 19 nt, Artificial Sequence
  Description of Artificial Sequence: Synthetic oligonucleotide
caccucacucugacaaucu

SEQ ID NO: 377493 - RNA, 19 nt, Artificial Sequence
  Description of Artificial Sequence: Synthetic oligonucleotide
cagcgccauggugaaugag

SEQ ID NO: 377494 - RNA, 19 nt, Artificial Sequence
  Description of Artificial Sequence: Synthetic oligonucleotide
cagggccaacaggccagcg

SEQ ID NO: 377495 - RNA, 19 nt, Artificial Sequence
  Description of Artificial Sequence: Synthetic oligonucleotide
guaaggcucuccagugaua

SEQ ID NO: 377496 - RNA, 19 nt, Artificial Sequence
  Description of Artificial Sequence: Synthetic oligonucleotide
caggccauuguaggaaagu

SEQ ID NO: 377497 - RNA, 19 nt, Artificial Sequence
  Description of Artificial Sequence: Synthetic oligonucleotide
cucgaacaauggcacgagu

SEQ ID NO: 377498 - RNA, 19 nt, Artificial Sequence
  Description of Artificial Sequence: Synthetic oligonucleotide
ccaacaggccagcguuccc

SEQ ID NO: 377499 - RNA, 19 nt, Artificial Sequence
  Description of Artificial Sequence: Synthetic oligonucleotide
gcgguucccugguagucga

SEQ ID NO: 377500 - RNA, 19 nt, Artificial Sequence
  Description of Artificial Sequence: Synthetic oligonucleotide
gcugggcgcuucucaaaca

SEQ ID NO: 377501 - RNA, 19 nt, Artificial Sequence
  Description of Artificial Sequence: Synthetic oligonucleotide
gacgggugcgggcaccuuu

SEQ ID NO: 377502 - RNA, 19 nt, Artificial Sequence
  Description of Artificial Sequence: Synthetic oligonucleotide
ccccaauuauguggcuagg

SEQ ID NO: 377503 - RNA, 19 nt, Artificial Sequence
  Description of Artificial Sequence: Synthetic oligonucleotide
ggcggaacuugagggugug

SEQ ID NO: 377504 - RNA, 19 nt, Artificial Sequence
  Description of Artificial Sequence: Synthetic oligonucleotide
gcguuccccaggcgguucc

SEQ ID NO: 377505 - RNA, 19 nt, Artificial Sequence
  Description of Artificial Sequence: Synthetic oligonucleotide
ggcgugagccuagcaauaa

SEQ ID NO: 377506 - RNA, 19 nt, Artificial Sequence
  Description of Artificial Sequence: Synthetic oligonucleotide
gcuucggaaucgcugggau

SEQ ID NO: 377507 - RNA, 19 nt, Artificial Sequence
  Description of Artificial Sequence: Synthetic oligonucleotide
cgccggauugcuucccuug

SEQ ID NO: 377508 - RNA, 19 nt, Artificial Sequence
  Description of Artificial Sequence: Synthetic oligonucleotide
cucgagaacccugcgguuu

SEQ ID NO: 377509 - RNA, 19 nt, Artificial Sequence
  Description of Artificial Sequence: Synthetic oligonucleotide
cguuccuauguuucucuaa

SEQ ID NO: 377510 - RNA, 19 nt, Artificial Sequence
  Description of Artificial Sequence: Synthetic oligonucleotide
ggcucuccagugauaccca

SEQ ID NO: 377511 - RNA, 19 nt, Artificial Sequence
  Description of Artificial Sequence: Synthetic oligonucleotide
cugcucguuugaaacgcuu

SEQ ID NO: 377512 - RNA, 19 nt, Artificial Sequence
  Description of Artificial Sequence: Synthetic oligonucleotide
caggcgguucccugguagu

SEQ ID NO: 377513 - RNA, 19 nt, Artificial Sequence
  Description of Artificial Sequence: Synthetic oligonucleotide
agcccggagccgccggauu

SEQ ID NO: 377514 - RNA, 19 nt, Artificial Sequence
  Description of Artificial Sequence: Synthetic oligonucleotide
gaccucgggaaggcuucaa

SEQ ID NO: 377515 - RNA, 19 nt, Artificial Sequence
  Description of Artificial Sequence: Synthetic oligonucleotide
gcgccauggugaaugagcu

SEQ ID NO: 377516 - RNA, 19 nt, Artificial Sequence
  Description of Artificial Sequence: Synthetic oligonucleotide
ggcggacguguuacacgag

SEQ ID NO: 377517 - RNA, 19 nt, Artificial Sequence
  Description of Artificial Sequence: Synthetic oligonucleotide
gggauccgauccauccaga

SEQ ID NO: 377518 - RNA, 19 nt, Artificial Sequence
  Description of Artificial Sequence: Synthetic oligonucleotide
ccucguggaaaucccauuu

SEQ ID NO: 377519 - RNA, 19 nt, Artificial Sequence
  Description of Artificial Sequence: Synthetic oligonucleotide
gcagggguaggaggcuuuc

SEQ ID NO: 377520 - RNA, 19 nt, Artificial Sequence
  Description of Artificial Sequence: Synthetic oligonucleotide
ccugacgggugcgggcacc

SEQ ID NO: 377521 - RNA, 19 nt, Artificial Sequence
  Description of Artificial Sequence: Synthetic oligonucleotide
cucuaaagccugggagccu

SEQ ID NO: 377522 - RNA, 19 nt, Artificial Sequence
  Description of Artificial Sequence: Synthetic oligonucleotide
gcuaaccacauggcaggua

SEQ ID NO: 377523 - RNA, 19 nt, Artificial Sequence
  Description of Artificial Sequence: Synthetic oligonucleotide
ggccugggaacagauuggu

SEQ ID NO: 377524 - RNA, 19 nt, Artificial Sequence
  Description of Artificial Sequence: Synthetic oligonucleotide
gcccuucaguguagaguug

SEQ ID NO: 377525 - RNA, 19 nt, Artificial Sequence
  Description of Artificial Sequence: Synthetic oligonucleotide
cccggagccgccggauugc

SEQ ID NO: 377526 - RNA, 19 nt, Artificial Sequence
  Description of Artificial Sequence: Synthetic oligonucleotide
gggcugggcgcuucucaaa

SEQ ID NO: 377527 - RNA, 19 nt, Artificial Sequence
  Description of Artificial Sequence: Synthetic oligonucleotide
ccgaggccuucaaaacaga

SEQ ID NO: 377528 - RNA, 19 nt, Artificial Sequence
  Description of Artificial Sequence: Synthetic oligonucleotide
ccggcgugagccuagcaau

SEQ ID NO: 377529 - RNA, 19 nt, Artificial Sequence
  Description of Artificial Sequence: Synthetic oligonucleotide
cgagaacccugcgguuugg

SEQ ID NO: 377530 - RNA, 19 nt, Artificial Sequence
  Description of Artificial Sequence: Synthetic oligonucleotide
ccagcguuccccaggcggu

SEQ ID NO: 377531 - RNA, 19 nt, Artificial Sequence
  Description of Artificial Sequence: Synthetic oligonucleotide
ccuagcaauaaggacccuu

SEQ ID NO: 377532 - RNA, 19 nt, Artificial Sequence
  Description of Artificial Sequence: Synthetic oligonucleotide
cccaggguacugaguaagu

SEQ ID NO: 377533 - RNA, 19 nt, Artificial Sequence
  Description of Artificial Sequence: Synthetic oligonucleotide
ccaucacauggugcugaca

SEQ ID NO: 377534 - RNA, 19 nt, Artificial Sequence
  Description of Artificial Sequence: Synthetic oligonucleotide
cugguagucgaaggcccuu

SEQ ID NO: 377535 - RNA, 19 nt, Artificial Sequence
  Description of Artificial Sequence: Synthetic oligonucleotide
cccugacgggugcgggcac

SEQ ID NO: 377536 - RNA, 19 nt, Artificial Sequence
  Description of Artificial Sequence: Synthetic oligonucleotide
ccggauugcuucccuugcu

SEQ ID NO: 377537 - RNA, 19 nt, Artificial Sequence
  Description of Artificial Sequence: Synthetic oligonucleotide
ggccggcgugagccuagca

SEQ ID NO: 377538 - RNA, 19 nt, Artificial Sequence
  Description of Artificial Sequence: Synthetic oligonucleotide
cagcgcucauggugaggau

SEQ ID NO: 377539 - RNA, 19 nt, Artificial Sequence
  Description of Artificial Sequence: Synthetic oligonucleotide
cccgaccucgggaaggcuu

SEQ ID NO: 377540 - RNA, 19 nt, Artificial Sequence
  Description of Artificial Sequence: Synthetic oligonucleotide
ccaggaguacagcgacacu

SEQ ID NO: 377541 - RNA, 19 nt, Artificial Sequence
  Description of Artificial Sequence: Synthetic oligonucleotide
gcgguuuggcucagccacu

SEQ ID NO: 377542 - RNA, 19 nt, Artificial Sequence
  Description of Artificial Sequence: Synthetic oligonucleotide
cggcgugagccuagcaaua

SEQ ID NO: 377543 - RNA, 19 nt, Artificial Sequence
  Description of Artificial Sequence: Synthetic oligonucleotide
ccccugcaagcugauggua

SEQ ID NO: 377544 - RNA, 19 nt, Artificial Sequence
  Description of Artificial Sequence: Synthetic oligonucleotide
cagcguuccccaggcgguu

SEQ ID NO: 377545 - RNA, 19 nt, Artificial Sequence
  Description of Artificial Sequence: Synthetic oligonucleotide
gccuagcaauaaggacccu

SEQ ID NO: 377546 - RNA, 19 nt, Artificial Sequence
  Description of Artificial Sequence: Synthetic oligonucleotide
cggaaucgcugggaugccu

SEQ ID NO: 377547 - RNA, 19 nt, Artificial Sequence
  Description of Artificial Sequence: Synthetic oligonucleotide
cgcuaaccacauggcaggu

SEQ ID NO: 377548 - RNA, 19 nt, Artificial Sequence
  Description of Artificial Sequence: Synthetic oligonucleotide
ccgccggauugcuucccuu

SEQ ID NO: 377549 - RNA, 19 nt, Artificial Sequence
  Description of Artificial Sequence: Synthetic oligonucleotide
gcccgaccucgggaaggcu

SEQ ID NO: 377550 - RNA, 19 nt, Artificial Sequence
  Description of Artificial Sequence: Synthetic oligonucleotide
ccggagccgccggauugcu

SEQ ID NO: 377551 - RNA, 19 nt, Artificial Sequence
  Description of Artificial Sequence: Synthetic oligonucleotide
cggagccgccggauugcuu

SEQ ID NO: 377552 - RNA, 19 nt, Artificial Sequence
  Description of Artificial Sequence: Synthetic oligonucleotide
uaauguaugacccaaggug

SEQ ID NO: 377553 - RNA, 19 nt, Artificial Sequence
  Description of Artificial Sequence: Synthetic oligonucleotide
aaaucaaccucauugaaga

SEQ ID NO: 377554 - RNA, 19 nt, Artificial Sequence
  Description of Artificial Sequence: Synthetic oligonucleotide
gaaauuguagucauaauag

SEQ ID NO: 377555 - RNA, 19 nt, Artificial Sequence
  Description of Artificial Sequence: Synthetic oligonucleotide
aguuaaugaaauuguaguc

SEQ ID NO: 377556 - RNA, 19 nt, Artificial Sequence
  Description of Artificial Sequence: Synthetic oligonucleotide
aauaccuuuucugagagga

SEQ ID NO: 377557 - RNA, 19 nt, Artificial Sequence
  Description of Artificial Sequence: Synthetic oligonucleotide
auugcgagagcacuuacuc

SEQ ID NO: 377558 - RNA, 19 nt, Artificial Sequence
  Description of Artificial Sequence: Synthetic oligonucleotide
gguucagugagucugaaag

SEQ ID NO: 377559 - RNA, 19 nt, Artificial Sequence
  Description of Artificial Sequence: Synthetic oligonucleotide
acgaauaguggguagcugg

SEQ ID NO: 377560 - RNA, 19 nt, Artificial Sequence
  Description of Artificial Sequence: Synthetic oligonucleotide
ugaguguucacgcauuuga

SEQ ID NO: 377561 - RNA, 19 nt, Artificial Sequence
  Description of Artificial Sequence: Synthetic oligonucleotide
aaaagguaggagucccugg

SEQ ID NO: 377562 - RNA, 19 nt, Artificial Sequence
  Description of Artificial Sequence: Synthetic oligonucleotide
uagauacucauuuauguaa

SEQ ID NO: 377563 - RNA, 19 nt, Artificial Sequence
  Description of Artificial Sequence: Synthetic oligonucleotide
cuugcuacuguuauuauga

SEQ ID NO: 377564 - RNA, 19 nt, Artificial Sequence
  Description of Artificial Sequence: Synthetic oligonucleotide
cacgcauuugaccagacgc

SEQ ID NO: 377565 - RNA, 19 nt, Artificial Sequence
  Description of Artificial Sequence: Synthetic oligonucleotide
uguacaucccuuguggcgg

SEQ ID NO: 377566 - RNA, 19 nt, Artificial Sequence
  Description of Artificial Sequence: Synthetic oligonucleotide
acuguuauuaugagucucc

SEQ ID NO: 377567 - RNA, 19 nt, Artificial Sequence
  Description of Artificial Sequence: Synthetic oligonucleotide
uaggguacgaggagcaggg

SEQ ID NO: 377568 - RNA, 19 nt, Artificial Sequence
  Description of Artificial Sequence: Synthetic oligonucleotide
aauagcguugcugaugcug

SEQ ID NO: 377569 - RNA, 19 nt, Artificial Sequence
  Description of Artificial Sequence: Synthetic oligonucleotide
uauuaugagucuccugagc

SEQ ID NO: 377570 - RNA, 19 nt, Artificial Sequence
  Description of Artificial Sequence: Synthetic oligonucleotide
uccaccacaauugcgagag

SEQ ID NO: 377571 - RNA, 19 nt, Artificial Sequence
  Description of Artificial Sequence: Synthetic oligonucleotide
gagcauaucuuccucagac

SEQ ID NO: 377572 - RNA, 19 nt, Artificial Sequence
  Description of Artificial Sequence: Synthetic oligonucleotide
ucaacgagcucacaguccu

SEQ ID NO: 377573 - RNA, 19 nt, Artificial Sequence
  Description of Artificial Sequence: Synthetic oligonucleotide
ugcgagagcacuuacucca

SEQ ID NO: 377574 - RNA, 19 nt, Artificial Sequence
  Description of Artificial Sequence: Synthetic oligonucleotide
cacuaguaacucaucaggg

SEQ ID NO: 377575 - RNA, 19 nt, Artificial Sequence
  Description of Artificial Sequence: Synthetic oligonucleotide
aaauaccuuuucugagagg

SEQ ID NO: 377576 - RNA, 19 nt, Artificial Sequence
  Description of Artificial Sequence: Synthetic oligonucleotide
gaaugcaguccucaucccg

SEQ ID NO: 377577 - RNA, 19 nt, Artificial Sequence
  Description of Artificial Sequence: Synthetic oligonucleotide
agcacugaccccaaggccc

SEQ ID NO: 377578 - RNA, 19 nt, Artificial Sequence
  Description of Artificial Sequence: Synthetic oligonucleotide
ugaaggacaggcgaucccg

SEQ ID NO: 377579 - RNA, 19 nt, Artificial Sequence
  Description of Artificial Sequence: Synthetic oligonucleotide
cuaagugaagggcuagggg

SEQ ID NO: 377580 - RNA, 19 nt, Artificial Sequence
  Description of Artificial Sequence: Synthetic oligonucleotide
aaucaaccucauugaagag

SEQ ID NO: 377581 - RNA, 19 nt, Artificial Sequence
  Description of Artificial Sequence: Synthetic oligonucleotide
aggguuagugggcuguggc

SEQ ID NO: 377582 - RNA, 19 nt, Artificial Sequence
  Description of Artificial Sequence: Synthetic oligonucleotide
acuaguaacucaucagggu

SEQ ID NO: 377583 - RNA, 19 nt, Artificial Sequence
  Description of Artificial Sequence: Synthetic oligonucleotide
uauagccucgggaagggac

SEQ ID NO: 377584 - RNA, 19 nt, Artificial Sequence
  Description of Artificial Sequence: Synthetic oligonucleotide
uuaggguacgaggagcagg

SEQ ID NO: 377585 - RNA, 19 nt, Artificial Sequence
  Description of Artificial Sequence: Synthetic oligonucleotide
uuuucggguucugugaacc

SEQ ID NO: 377586 - RNA, 19 nt, Artificial Sequence
  Description of Artificial Sequence: Synthetic oligonucleotide
gagguauaccagcugagac

SEQ ID NO: 377587 - RNA, 19 nt, Artificial Sequence
  Description of Artificial Sequence: Synthetic oligonucleotide
ucugugaacccaguccugg

SEQ ID NO: 377588 - RNA, 19 nt, Artificial Sequence
  Description of Artificial Sequence: Synthetic oligonucleotide
gacaccgaggcugaguggg

SEQ ID NO: 377589 - RNA, 19 nt, Artificial Sequence
  Description of Artificial Sequence: Synthetic oligonucleotide
aaccccgucuuccuuaacu

SEQ ID NO: 377590 - RNA, 19 nt, Artificial Sequence
  Description of Artificial Sequence: Synthetic oligonucleotide
cuguacaucccuuguggcg

SEQ ID NO: 377591 - RNA, 19 nt, Artificial Sequence
  Description of Artificial Sequence: Synthetic oligonucleotide
aaaccugucugaguguuca

SEQ ID NO: 377592 - RNA, 19 nt, Artificial Sequence
  Description of Artificial Sequence: Synthetic oligonucleotide
uguuauuaugagucuccug

SEQ ID NO: 377593 - RNA, 19 nt, Artificial Sequence
  Description of Artificial Sequence: Synthetic oligonucleotide
agguauaccagcugagaca

SEQ ID NO: 377594 - RNA, 19 nt, Artificial Sequence
  Description of Artificial Sequence: Synthetic oligonucleotide
gucucgcagaagcugaagg

SEQ ID NO: 377595 - RNA, 19 nt, Artificial Sequence
  Description of Artificial Sequence: Synthetic oligonucleotide
acaagguuccuggcaaugc

SEQ ID NO: 377596 - RNA, 19 nt, Artificial Sequence
  Description of Artificial Sequence: Synthetic oligonucleotide
agcacgaauaguggguagc

SEQ ID NO: 377597 - RNA, 19 nt, Artificial Sequence
  Description of Artificial Sequence: Synthetic oligonucleotide
ggaccaaccucccugaacc

SEQ ID NO: 377598 - RNA, 19 nt, Artificial Sequence
  Description of Artificial Sequence: Synthetic oligonucleotide
ucucgcagaagcugaagga

SEQ ID NO: 377599 - RNA, 19 nt, Artificial Sequence
  Description of Artificial Sequence: Synthetic oligonucleotide
caguggaucuguaggagag

SEQ ID NO: 377600 - RNA, 19 nt, Artificial Sequence
  Description of Artificial Sequence: Synthetic oligonucleotide
aguagacgcagugucucgc

SEQ ID NO: 377601 - RNA, 19 nt, Artificial Sequence
  Description of Artificial Sequence: Synthetic oligonucleotide
ggaggugccgccucuaugg

SEQ ID NO: 377602 - RNA, 19 nt, Artificial Sequence
  Description of Artificial Sequence: Synthetic oligonucleotide
ucacgcauuugaccagacg

SEQ ID NO: 377603 - RNA, 19 nt, Artificial Sequence
  Description of Artificial Sequence: Synthetic oligonucleotide
ugggccacugcucacuaug

SEQ ID NO: 377604 - RNA, 19 nt, Artificial Sequence
  Description of Artificial Sequence: Synthetic oligonucleotide
gaaaagguaggagucccug

SEQ ID NO: 377605 - RNA, 19 nt, Artificial Sequence
  Description of Artificial Sequence: Synthetic oligonucleotide
accauuaggguacgaggag

SEQ ID NO: 377606 - RNA, 19 nt, Artificial Sequence
  Description of Artificial Sequence: Synthetic oligonucleotide
ucugugcccgucauguaca

SEQ ID NO: 377607 - RNA, 19 nt, Artificial Sequence
  Description of Artificial Sequence: Synthetic oligonucleotide
agcccuacgcugcguaugc

SEQ ID NO: 377608 - RNA, 19 nt, Artificial Sequence
  Description of Artificial Sequence: Synthetic oligonucleotide
gugagucugaaaguuaaug

SEQ ID NO: 377609 - RNA, 19 nt, Artificial Sequence
  Description of Artificial Sequence: Synthetic oligonucleotide
gugggauaaaaucaaccuc

SEQ ID NO: 377610 - RNA, 19 nt, Artificial Sequence
  Description of Artificial Sequence: Synthetic oligonucleotide
acgcauuugaccagacgcc

SEQ ID NO: 377611 - RNA, 19 nt, Artificial Sequence
  Description of Artificial Sequence: Synthetic oligonucleotide
ugguaauguaugacccaag

SEQ ID NO: 377612 - RNA, 19 nt, Artificial Sequence
  Description of Artificial Sequence: Synthetic oligonucleotide
uguucacgcauuugaccag

SEQ ID NO: 377613 - RNA, 19 nt, Artificial Sequence
  Description of Artificial Sequence: Synthetic oligonucleotide
ugcuacuguuauuaugagu

SEQ ID NO: 377614 - RNA, 19 nt, Artificial Sequence
  Description of Artificial Sequence: Synthetic oligonucleotide
gacaagaaauuggccaaag

SEQ ID NO: 377615 - RNA, 19 nt, Artificial Sequence
  Description of Artificial Sequence: Synthetic oligonucleotide
uucagugagucugaaaguu

SEQ ID NO: 377616 - RNA, 19 nt, Artificial Sequence
  Description of Artificial Sequence: Synthetic oligonucleotide
uguaugacccaaggugucc

SEQ ID NO: 377617 - RNA, 19 nt, Artificial Sequence
  Description of Artificial Sequence: Synthetic oligonucleotide
uacuuagaucagucggugc

SEQ ID NO: 377618 - RNA, 19 nt, Artificial Sequence
  Description of Artificial Sequence: Synthetic oligonucleotide
augagcgacagcacugagc

SEQ ID NO: 377619 - RNA, 19 nt, Artificial Sequence
  Description of Artificial Sequence: Synthetic oligonucleotide
ugcaguaggcacuggagua

SEQ ID NO: 377620 - RNA, 19 nt, Artificial Sequence
  Description of Artificial Sequence: Synthetic oligonucleotide
auccuggcuaagugaaggg

SEQ ID NO: 377621 - RNA, 19 nt, Artificial Sequence
  Description of Artificial Sequence: Synthetic oligonucleotide
ugaaaagguaggagucccu

SEQ ID NO: 377622 - RNA, 19 nt, Artificial Sequence
  Description of Artificial Sequence: Synthetic oligonucleotide
agaccauggaguggguggc

SEQ ID NO: 377623 - RNA, 19 nt, Artificial Sequence
  Description of Artificial Sequence: Synthetic oligonucleotide
uggcuauccuggcuaagug

SEQ ID NO: 377624 - RNA, 19 nt, Artificial Sequence
  Description of Artificial Sequence: Synthetic oligonucleotide
cucaacgagcucacagucc

SEQ ID NO: 377625 - RNA, 19 nt, Artificial Sequence
  Description of Artificial Sequence: Synthetic oligonucleotide
uugcuacuguuauuaugag

SEQ ID NO: 377626 - RNA, 19 nt, Artificial Sequence
  Description of Artificial Sequence: Synthetic oligonucleotide
accccgucuuccuuaacuc

SEQ ID NO: 377627 - RNA, 19 nt, Artificial Sequence
  Description of Artificial Sequence: Synthetic oligonucleotide
ugucgggaccaugagaaac

SEQ ID NO: 377628 - RNA, 19 nt, Artificial Sequence
  Description of Artificial Sequence: Synthetic oligonucleotide
guagauacucauuuaugua

SEQ ID NO: 377629 - RNA, 19 nt, Artificial Sequence
  Description of Artificial Sequence: Synthetic oligonucleotide
aauugcgagagcacuuacu

SEQ ID NO: 377630 - RNA, 19 nt, Artificial Sequence
  Description of Artificial Sequence: Synthetic oligonucleotide
gcaccauuaggguacgagg

SEQ ID NO: 377631 - RNA, 19 nt, Artificial Sequence
  Description of Artificial Sequence: Synthetic oligonucleotide
cugauggagggugaagggg

SEQ ID NO: 377632 - RNA, 19 nt, Artificial Sequence
  Description of Artificial Sequence: Synthetic oligonucleotide
uugcgagagcacuuacucc

SEQ ID NO: 377633 - RNA, 19 nt, Artificial Sequence
  Description of Artificial Sequence: Synthetic oligonucleotide
gguagauacucauuuaugu

SEQ ID NO: 377634 - RNA, 19 nt, Artificial Sequence
  Description of Artificial Sequence: Synthetic oligonucleotide
uucagcgucucgccacccg

SEQ ID NO: 377635 - RNA, 19 nt, Artificial Sequence
  Description of Artificial Sequence: Synthetic oligonucleotide
agugaagggcuaggggacc

SEQ ID NO: 377636 - RNA, 19 nt, Artificial Sequence
  Description of Artificial Sequence: Synthetic oligonucleotide
agcaccauuaggguacgag

SEQ ID NO: 377637 - RNA, 19 nt, Artificial Sequence
  Description of Artificial Sequence: Synthetic oligonucleotide
agcauaucuuccucagaca

SEQ ID NO: 377638 - RNA, 19 nt, Artificial Sequence
  Description of Artificial Sequence: Synthetic oligonucleotide
aguuuucggguucugugaa

SEQ ID NO: 377639 - RNA, 19 nt, Artificial Sequence
  Description of Artificial Sequence: Synthetic oligonucleotide
gaccagacgccgcugaaca

SEQ ID NO: 377640 - RNA, 19 nt, Artificial Sequence
  Description of Artificial Sequence: Synthetic oligonucleotide
uacuguuauuaugagucuc

SEQ ID NO: 377641 - RNA, 19 nt, Artificial Sequence
  Description of Artificial Sequence: Synthetic oligonucleotide
acacacuguacaucccuug

SEQ ID NO: 377642 - RNA, 19 nt, Artificial Sequence
  Description of Artificial Sequence: Synthetic oligonucleotide
caggcgaucccgcucacag

SEQ ID NO: 377643 - RNA, 19 nt, Artificial Sequence
  Description of Artificial Sequence: Synthetic oligonucleotide
ucucgccacccgcuuauag

SEQ ID NO: 377644 - RNA, 19 nt, Artificial Sequence
  Description of Artificial Sequence: Synthetic oligonucleotide
cucgccacccgcuuauagc

SEQ ID NO: 377645 - RNA, 19 nt, Artificial Sequence
  Description of Artificial Sequence: Synthetic oligonucleotide
ucagcgucucgccacccgc

SEQ ID NO: 377646 - RNA, 19 nt, Artificial Sequence
  Description of Artificial Sequence: Synthetic oligonucleotide
cccucuaacacugaguccc

SEQ ID NO: 377647 - RNA, 19 nt, Artificial Sequence
  Description of Artificial Sequence: Synthetic oligonucleotide
guggaucuguaggagagcc

SEQ ID NO: 377648 - RNA, 19 nt, Artificial Sequence
  Description of Artificial Sequence: Synthetic oligonucleotide
uagacgcagugucucgcag

SEQ ID NO: 377649 - RNA, 19 nt, Artificial Sequence
  Description of Artificial Sequence: Synthetic oligonucleotide
caccauuaggguacgagga

SEQ ID NO: 377650 - RNA, 19 nt, Artificial Sequence
  Description of Artificial Sequence: Synthetic oligonucleotide
gaaaggccgcaauggccgg

SEQ ID NO: 377651 - RNA, 19 nt, Artificial Sequence
  Description of Artificial Sequence: Synthetic oligonucleotide
gacgccgcugaacaccacc

SEQ ID NO: 377652 - RNA, 19 nt, Artificial Sequence
  Description of Artificial Sequence: Synthetic oligonucleotide
cuacgcugcguaugcagag

SEQ ID NO: 377653 - RNA, 19 nt, Artificial Sequence
  Description of Artificial Sequence: Synthetic oligonucleotide
ugguggcucaacgagcuca

SEQ ID NO: 377654 - RNA, 19 nt, Artificial Sequence
  Description of Artificial Sequence: Synthetic oligonucleotide
uuucggguucugugaaccc

SEQ ID NO: 377655 - RNA, 19 nt, Artificial Sequence
  Description of Artificial Sequence: Synthetic oligonucleotide
gucuaggcaacaacacagg

SEQ ID NO: 377656 - RNA, 19 nt, Artificial Sequence
  Description of Artificial Sequence: Synthetic oligonucleotide
cuacuuagaucagucggug

SEQ ID NO: 377657 - RNA, 19 nt, Artificial Sequence
  Description of Artificial Sequence: Synthetic oligonucleotide
caucccuuguggcggaacc

SEQ ID NO: 377658 - RNA, 19 nt, Artificial Sequence
  Description of Artificial Sequence: Synthetic oligonucleotide
gcuagaaggaaugcagucc

SEQ ID NO: 377659 - RNA, 19 nt, Artificial Sequence
  Description of Artificial Sequence: Synthetic oligonucleotide
acgggugcucauccagccc

SEQ ID NO: 377660 - RNA, 19 nt, Artificial Sequence
  Description of Artificial Sequence: Synthetic oligonucleotide
guucugugaacccaguccu

SEQ ID NO: 377661 - RNA, 19 nt, Artificial Sequence
  Description of Artificial Sequence: Synthetic oligonucleotide
cugcguaugcagagcacag

SEQ ID NO: 377662 - RNA, 19 nt, Artificial Sequence
  Description of Artificial Sequence: Synthetic oligonucleotide
aauggcuauccuggcuaag

SEQ ID NO: 377663 - RNA, 19 nt, Artificial Sequence
  Description of Artificial Sequence: Synthetic oligonucleotide
cuuccgccaaaccugucug

SEQ ID NO: 377664 - RNA, 19 nt, Artificial Sequence
  Description of Artificial Sequence: Synthetic oligonucleotide
aacuugaguggugcugaug

SEQ ID NO: 377665 - RNA, 19 nt, Artificial Sequence
  Description of Artificial Sequence: Synthetic oligonucleotide
ucccagaugccugguacag

SEQ ID NO: 377666 - RNA, 19 nt, Artificial Sequence
  Description of Artificial Sequence: Synthetic oligonucleotide
auagcguugcugaugcuga

SEQ ID NO: 377667 - RNA, 19 nt, Artificial Sequence
  Description of Artificial Sequence: Synthetic oligonucleotide
gggcugguaauguaugacc

SEQ ID NO: 377668 - RNA, 19 nt, Artificial Sequence
  Description of Artificial Sequence: Synthetic oligonucleotide
caguagacgcagugucucg

SEQ ID NO: 377669 - RNA, 19 nt, Artificial Sequence
  Description of Artificial Sequence: Synthetic oligonucleotide
accaugucgggaccaugag

SEQ ID NO: 377670 - RNA, 19 nt, Artificial Sequence
  Description of Artificial Sequence: Synthetic oligonucleotide
auguaugacccaagguguc

SEQ ID NO: 377671 - RNA, 19 nt, Artificial Sequence
  Description of Artificial Sequence: Synthetic oligonucleotide
uucaggguuagugggcugu

SEQ ID NO: 377672 - RNA, 19 nt, Artificial Sequence
  Description of Artificial Sequence: Synthetic oligonucleotide
guaauguaugacccaaggu

SEQ ID NO: 377673 - RNA, 19 nt, Artificial Sequence
  Description of Artificial Sequence: Synthetic oligonucleotide
uggaucuguaggagagcca

SEQ ID NO: 377674 - RNA, 19 nt, Artificial Sequence
  Description of Artificial Sequence: Synthetic oligonucleotide
uguccucuguucagcgucu

SEQ ID NO: 377675 - RNA, 19 nt, Artificial Sequence
  Description of Artificial Sequence: Synthetic oligonucleotide
cagagcacaguccggcgag

SEQ ID NO: 377676 - RNA, 19 nt, Artificial Sequence
  Description of Artificial Sequence: Synthetic oligonucleotide
gcuaagugaagggcuaggg

SEQ ID NO: 377677 - RNA, 19 nt, Artificial Sequence
  Description of Artificial Sequence: Synthetic oligonucleotide
cacgggugcucauccagcc

SEQ ID NO: 377678 - RNA, 19 nt, Artificial Sequence
  Description of Artificial Sequence: Synthetic oligonucleotide
gaguguucacgcauuugac

SEQ ID NO: 377679 - RNA, 19 nt, Artificial Sequence
  Description of Artificial Sequence: Synthetic oligonucleotide
aaacuugaguggugcugau

SEQ ID NO: 377680 - RNA, 19 nt, Artificial Sequence
  Description of Artificial Sequence: Synthetic oligonucleotide
ugcccgucauguacacggg

SEQ ID NO: 377681 - RNA, 19 nt, Artificial Sequence
  Description of Artificial Sequence: Synthetic oligonucleotide
caguccugguguugaaaag

SEQ ID NO: 377682 - RNA, 19 nt, Artificial Sequence
  Description of Artificial Sequence: Synthetic oligonucleotide
aggcgaucccgcucacagc

SEQ ID NO: 377683 - RNA, 19 nt, Artificial Sequence
  Description of Artificial Sequence: Synthetic oligonucleotide
ugagcacgaauagugggua

SEQ ID NO: 377684 - RNA, 19 nt, Artificial Sequence
  Description of Artificial Sequence: Synthetic oligonucleotide
agacgcugcuguucaccac

SEQ ID NO: 377685 - RNA, 19 nt, Artificial Sequence
  Description of Artificial Sequence: Synthetic oligonucleotide
ggcugguaauguaugaccc

SEQ ID NO: 377686 - RNA, 19 nt, Artificial Sequence
  Description of Artificial Sequence: Synthetic oligonucleotide
cucaggugacaaugucggg

SEQ ID NO: 377687 - RNA, 19 nt, Artificial Sequence
  Description of Artificial Sequence: Synthetic oligonucleotide
gccggugugggauaaaauc

SEQ ID NO: 377688 - RNA, 19 nt, Artificial Sequence
  Description of Artificial Sequence: Synthetic oligonucleotide
uccuuaacuccaggagucc

SEQ ID NO: 377689 - RNA, 19 nt, Artificial Sequence
  Description of Artificial Sequence: Synthetic oligonucleotide
acacgggugcucauccagc

SEQ ID NO: 377690 - RNA, 19 nt, Artificial Sequence
  Description of Artificial Sequence: Synthetic oligonucleotide
gguauaccagcugagacaa

SEQ ID NO: 377691 - RNA, 19 nt, Artificial Sequence
  Description of Artificial Sequence: Synthetic oligonucleotide
auguacacgggugcucauc

SEQ ID NO: 377692 - RNA, 19 nt, Artificial Sequence
  Description of Artificial Sequence: Synthetic oligonucleotide
gacgcagugucucgcagaa

SEQ ID NO: 377693 - RNA, 19 nt, Artificial Sequence
  Description of Artificial Sequence: Synthetic oligonucleotide
auggcuauccuggcuaagu

SEQ ID NO: 377694 - RNA, 19 nt, Artificial Sequence
  Description of Artificial Sequence: Synthetic oligonucleotide
gugguggaacacuggcucc

SEQ ID NO: 377695 - RNA, 19 nt, Artificial Sequence
  Description of Artificial Sequence: Synthetic oligonucleotide
auuaggguacgaggagcag

SEQ ID NO: 377696 - RNA, 19 nt, Artificial Sequence
  Description of Artificial Sequence: Synthetic oligonucleotide
caugcgccaggcagcacag

SEQ ID NO: 377697 - RNA, 19 nt, Artificial Sequence
  Description of Artificial Sequence: Synthetic oligonucleotide
agacgcagugucucgcaga

SEQ ID NO: 377698 - RNA, 19 nt, Artificial Sequence
  Description of Artificial Sequence: Synthetic oligonucleotide
uucacgcauuugaccagac

SEQ ID NO: 377699 - RNA, 19 nt, Artificial Sequence
  Description of Artificial Sequence: Synthetic oligonucleotide
caauugcgagagcacuuac

SEQ ID NO: 377700 - RNA, 19 nt, Artificial Sequence
  Description of Artificial Sequence: Synthetic oligonucleotide
gguaggcccaggcuggcag

SEQ ID NO: 377701 - RNA, 19 nt, Artificial Sequence
  Description of Artificial Sequence: Synthetic oligonucleotide
ugaaccccgucuuccuuaa

SEQ ID NO: 377702 - RNA, 19 nt, Artificial Sequence
  Description of Artificial Sequence: Synthetic oligonucleotide
gaaggacaggcgaucccgc

SEQ ID NO: 377703 - RNA, 19 nt, Artificial Sequence
  Description of Artificial Sequence: Synthetic oligonucleotide
gauagggauuugggcgggg

SEQ ID NO: 377704 - RNA, 19 nt, Artificial Sequence
  Description of Artificial Sequence: Synthetic oligonucleotide
uacgcugcguaugcagagc

SEQ ID NO: 377705 - RNA, 19 nt, Artificial Sequence
  Description of Artificial Sequence: Synthetic oligonucleotide
acaugagcgacagcacuga

SEQ ID NO: 377706 - RNA, 19 nt, Artificial Sequence
  Description of Artificial Sequence: Synthetic oligonucleotide
gaauaguggguagcuggca

SEQ ID NO: 377707 - RNA, 19 nt, Artificial Sequence
  Description of Artificial Sequence: Synthetic oligonucleotide
gcggcuagaaggaaugcag

SEQ ID NO: 377708 - RNA, 19 nt, Artificial Sequence
  Description of Artificial Sequence: Synthetic oligonucleotide
cuuguggcggaaccuccac

SEQ ID NO: 377709 - RNA, 19 nt, Artificial Sequence
  Description of Artificial Sequence: Synthetic oligonucleotide
acaauugcgagagcacuua

SEQ ID NO: 377710 - RNA, 19 nt, Artificial Sequence
  Description of Artificial Sequence: Synthetic oligonucleotide
caccaugucgggaccauga

SEQ ID NO: 377711 - RNA, 19 nt, Artificial Sequence
  Description of Artificial Sequence: Synthetic oligonucleotide
gaauggcuauccuggcuaa

SEQ ID NO: 377712 - RNA, 19 nt, Artificial Sequence
  Description of Artificial Sequence: Synthetic oligonucleotide
gaucccgcucacagcgugg

SEQ ID NO: 377713 - RNA, 19 nt, Artificial Sequence
  Description of Artificial Sequence: Synthetic oligonucleotide
cugucagaccauggagugg

SEQ ID NO: 377714 - RNA, 19 nt, Artificial Sequence
  Description of Artificial Sequence: Synthetic oligonucleotide
ugugcccgucauguacacg

SEQ ID NO: 377715 - RNA, 19 nt, Artificial Sequence
  Description of Artificial Sequence: Synthetic oligonucleotide
gcguaugcagagcacaguc

SEQ ID NO: 377716 - RNA, 19 nt, Artificial Sequence
  Description of Artificial Sequence: Synthetic oligonucleotide
caugagcgacagcacugag

SEQ ID NO: 377717 - RNA, 19 nt, Artificial Sequence
  Description of Artificial Sequence: Synthetic oligonucleotide
ugcguaugcagagcacagu

SEQ ID NO: 377718 - RNA, 19 nt, Artificial Sequence
  Description of Artificial Sequence: Synthetic oligonucleotide
ugacccaagguguccucau

SEQ ID NO: 377719 - RNA, 19 nt, Artificial Sequence
  Description of Artificial Sequence: Synthetic oligonucleotide
ugaccagacgccgcugaac

SEQ ID NO: 377720 - RNA, 19 nt, Artificial Sequence
  Description of Artificial Sequence: Synthetic oligonucleotide
guagacgcagugucucgca

SEQ ID NO: 377721 - RNA, 19 nt, Artificial Sequence
  Description of Artificial Sequence: Synthetic oligonucleotide
guaggagagccauccucca

SEQ ID NO: 377722 - RNA, 19 nt, Artificial Sequence
  Description of Artificial Sequence: Synthetic oligonucleotide
uggccggaggucccgugug

SEQ ID NO: 377723 - RNA, 19 nt, Artificial Sequence
  Description of Artificial Sequence: Synthetic oligonucleotide
caaaccugucugaguguuc

SEQ ID NO: 377724 - RNA, 19 nt, Artificial Sequence
  Description of Artificial Sequence: Synthetic oligonucleotide
acaucccuuguggcggaac

SEQ ID NO: 377725 - RNA, 19 nt, Artificial Sequence
  Description of Artificial Sequence: Synthetic oligonucleotide
ggcaacaacacagggcuca

SEQ ID NO: 377726 - RNA, 19 nt, Artificial Sequence
  Description of Artificial Sequence: Synthetic oligonucleotide
gcucaacgagcucacaguc

SEQ ID NO: 377727 - RNA, 19 nt, Artificial Sequence
  Description of Artificial Sequence: Synthetic oligonucleotide
ucaggguuagugggcugug

SEQ ID NO: 377728 - RNA, 19 nt, Artificial Sequence
  Description of Artificial Sequence: Synthetic oligonucleotide
acgaggagcagggcuccac

SEQ ID NO: 377729 - RNA, 19 nt, Artificial Sequence
  Description of Artificial Sequence: Synthetic oligonucleotide
agacaagaaauuggccaaa

SEQ ID NO: 377730 - RNA, 19 nt, Artificial Sequence
  Description of Artificial Sequence: Synthetic oligonucleotide
cacuuacuccaguugccca

SEQ ID NO: 377731 - RNA, 19 nt, Artificial Sequence
  Description of Artificial Sequence: Synthetic oligonucleotide
agguccgcaggaucgggaa

SEQ ID NO: 377732 - RNA, 19 nt, Artificial Sequence
  Description of Artificial Sequence: Synthetic oligonucleotide
cugaguguucacgcauuug

SEQ ID NO: 377733 - RNA, 19 nt, Artificial Sequence
  Description of Artificial Sequence: Synthetic oligonucleotide
acccgcuuauagccucggg

SEQ ID NO: 377734 - RNA, 19 nt, Artificial Sequence
  Description of Artificial Sequence: Synthetic oligonucleotide
ccauuaggguacgaggagc

SEQ ID NO: 377735 - RNA, 19 nt, Artificial Sequence
  Description of Artificial Sequence: Synthetic oligonucleotide
cuggcaaugccacaguuuu

SEQ ID NO: 377736 - RNA, 19 nt, Artificial Sequence
  Description of Artificial Sequence: Synthetic oligonucleotide
cacgaauaguggguagcug

SEQ ID NO: 377737 - RNA, 19 nt, Artificial Sequence
  Description of Artificial Sequence: Synthetic oligonucleotide
ccucagaacacucucucca

SEQ ID NO: 377738 - RNA, 19 nt, Artificial Sequence
  Description of Artificial Sequence: Synthetic oligonucleotide
ccggugugggauaaaauca

SEQ ID NO: 377739 - RNA, 19 nt, Artificial Sequence
  Description of Artificial Sequence: Synthetic oligonucleotide
cgaauaguggguagcuggc

SEQ ID NO: 377740 - RNA, 19 nt, Artificial Sequence
  Description of Artificial Sequence: Synthetic oligonucleotide
ucccuuguggcggaaccuc

SEQ ID NO: 377741 - RNA, 19 nt, Artificial Sequence
  Description of Artificial Sequence: Synthetic oligonucleotide
auggccggaggucccgugu

SEQ ID NO: 377742 - RNA, 19 nt, Artificial Sequence
  Description of Artificial Sequence: Synthetic oligonucleotide
guucacgcauuugaccaga

SEQ ID NO: 377743 - RNA, 19 nt, Artificial Sequence
  Description of Artificial Sequence: Synthetic oligonucleotide
uuagugggcuguggcuggc

SEQ ID NO: 377744 - RNA, 19 nt, Artificial Sequence
  Description of Artificial Sequence: Synthetic oligonucleotide
gaagggcguggggucagcc

SEQ ID NO: 377745 - RNA, 19 nt, Artificial Sequence
  Description of Artificial Sequence: Synthetic oligonucleotide
cuaugcuucaggucacccu

SEQ ID NO: 377746 - RNA, 19 nt, Artificial Sequence
  Description of Artificial Sequence: Synthetic oligonucleotide
gcuauccuggcuaagugaa

SEQ ID NO: 377747 - RNA, 19 nt, Artificial Sequence
  Description of Artificial Sequence: Synthetic oligonucleotide
aggguacgaggagcagggc

SEQ ID NO: 377748 - RNA, 19 nt, Artificial Sequence
  Description of Artificial Sequence: Synthetic oligonucleotide
cugcagcgcaccagccucc

SEQ ID NO: 377749 - RNA, 19 nt, Artificial Sequence
  Description of Artificial Sequence: Synthetic oligonucleotide
caggguuagugggcugugg

SEQ ID NO: 377750 - RNA, 19 nt, Artificial Sequence
  Description of Artificial Sequence: Synthetic oligonucleotide
cccgucauguacacgggug

SEQ ID NO: 377751 - RNA, 19 nt, Artificial Sequence
  Description of Artificial Sequence: Synthetic oligonucleotide
guccgcaggaucgggaaca

SEQ ID NO: 377752 - RNA, 19 nt, Artificial Sequence
  Description of Artificial Sequence: Synthetic oligonucleotide
cacuaugcuucaggucacc

SEQ ID NO: 377753 - RNA, 19 nt, Artificial Sequence
  Description of Artificial Sequence: Synthetic oligonucleotide
ucccggccagagcugcagc

SEQ ID NO: 377754 - RNA, 19 nt, Artificial Sequence
  Description of Artificial Sequence: Synthetic oligonucleotide
gagcccaacuucagggguc

SEQ ID NO: 377755 - RNA, 19 nt, Artificial Sequence
  Description of Artificial Sequence: Synthetic oligonucleotide
ggucucagcgacuccucac

SEQ ID NO: 377756 - RNA, 19 nt, Artificial Sequence
  Description of Artificial Sequence: Synthetic oligonucleotide
gucauguacacgggugcuc

SEQ ID NO: 377757 - RNA, 19 nt, Artificial Sequence
  Description of Artificial Sequence: Synthetic oligonucleotide
cugugcccgucauguacac

SEQ ID NO: 377758 - RNA, 19 nt, Artificial Sequence
  Description of Artificial Sequence: Synthetic oligonucleotide
cccgcucacagcguggugg

SEQ ID NO: 377759 - RNA, 19 nt, Artificial Sequence
  Description of Artificial Sequence: Synthetic oligonucleotide
gggaccaaccucccugaac

SEQ ID NO: 377760 - RNA, 19 nt, Artificial Sequence
  Description of Artificial Sequence: Synthetic oligonucleotide
gcucacuaugcuucagguc

SEQ ID NO: 377761 - RNA, 19 nt, Artificial Sequence
  Description of Artificial Sequence: Synthetic oligonucleotide
cccuacgcugcguaugcag

SEQ ID NO: 377762 - RNA, 19 nt, Artificial Sequence
  Description of Artificial Sequence: Synthetic oligonucleotide
gcugcguaugcagagcaca

SEQ ID NO: 377763 - RNA, 19 nt, Artificial Sequence
  Description of Artificial Sequence: Synthetic oligonucleotide
ccauggaguggguggcugg

SEQ ID NO: 377764 - RNA, 19 nt, Artificial Sequence
  Description of Artificial Sequence: Synthetic oligonucleotide
aucccuuguggcggaaccu

SEQ ID NO: 377765 - RNA, 19 nt, Artificial Sequence
  Description of Artificial Sequence: Synthetic oligonucleotide
cuucuuccgccaaaccugu

SEQ ID NO: 377766 - RNA, 19 nt, Artificial Sequence
  Description of Artificial Sequence: Synthetic oligonucleotide
caguugcccaugcgccagg

SEQ ID NO: 377767 - RNA, 19 nt, Artificial Sequence
  Description of Artificial Sequence: Synthetic oligonucleotide
ggggucugcucuaagaaua

SEQ ID NO: 377768 - RNA, 19 nt, Artificial Sequence
  Description of Artificial Sequence: Synthetic oligonucleotide
augucgggaccaugagaaa

SEQ ID NO: 377769 - RNA, 19 nt, Artificial Sequence
  Description of Artificial Sequence: Synthetic oligonucleotide
cgcauuugaccagacgccg

SEQ ID NO: 377770 - RNA, 19 nt, Artificial Sequence
  Description of Artificial Sequence: Synthetic oligonucleotide
ggggcggcuagaaggaaug

SEQ ID NO: 377771 - RNA, 19 nt, Artificial Sequence
  Description of Artificial Sequence: Synthetic oligonucleotide
guacaucccuuguggcgga

SEQ ID NO: 377772 - RNA, 19 nt, Artificial Sequence
  Description of Artificial Sequence: Synthetic oligonucleotide
uucuuccgccaaaccuguc

SEQ ID NO: 377773 - RNA, 19 nt, Artificial Sequence
  Description of Artificial Sequence: Synthetic oligonucleotide
ucgggaccaugagaaacuu

SEQ ID NO: 377774 - RNA, 19 nt, Artificial Sequence
  Description of Artificial Sequence: Synthetic oligonucleotide
gucgggaccaugagaaacu

SEQ ID NO: 377775 - RNA, 19 nt, Artificial Sequence
  Description of Artificial Sequence: Synthetic oligonucleotide
cagcccuacgcugcguaug

SEQ ID NO: 377776 - RNA, 19 nt, Artificial Sequence
  Description of Artificial Sequence: Synthetic oligonucleotide
gcauuugaccagacgccgc

SEQ ID NO: 377777 - RNA, 19 nt, Artificial Sequence
  Description of Artificial Sequence: Synthetic oligonucleotide
gcuacuuagaucagucggu

SEQ ID NO: 377778 - RNA, 19 nt, Artificial Sequence
  Description of Artificial Sequence: Synthetic oligonucleotide
guaugacccaagguguccu

SEQ ID NO: 377779 - RNA, 19 nt, Artificial Sequence
  Description of Artificial Sequence: Synthetic oligonucleotide
ggcucaacgagcucacagu

SEQ ID NO: 377780 - RNA, 19 nt, Artificial Sequence
  Description of Artificial Sequence: Synthetic oligonucleotide
ucccgcucacagcguggug

SEQ ID NO: 377781 - RNA, 19 nt, Artificial Sequence
  Description of Artificial Sequence: Synthetic oligonucleotide
ugacaaugucgggcuggcu

SEQ ID NO: 377782 - RNA, 19 nt, Artificial Sequence
  Description of Artificial Sequence: Synthetic oligonucleotide
caacgagcucacaguccuc

SEQ ID NO: 377783 - RNA, 19 nt, Artificial Sequence
  Description of Artificial Sequence: Synthetic oligonucleotide
aucagucggugcugucaaa

SEQ ID NO: 377784 - RNA, 19 nt, Artificial Sequence
  Description of Artificial Sequence: Synthetic oligonucleotide
aucccgcucacagcguggu

SEQ ID NO: 377785 - RNA, 19 nt, Artificial Sequence
  Description of Artificial Sequence: Synthetic oligonucleotide
ggaucuguaggagagccau

SEQ ID NO: 377786 - RNA, 19 nt, Artificial Sequence
  Description of Artificial Sequence: Synthetic oligonucleotide
cagcgugguggcucaacga

SEQ ID NO: 377787 - RNA, 19 nt, Artificial Sequence
  Description of Artificial Sequence: Synthetic oligonucleotide
guauaccagcugagacaag

SEQ ID NO: 377788 - RNA, 19 nt, Artificial Sequence
  Description of Artificial Sequence: Synthetic oligonucleotide
cacaauugcgagagcacuu

SEQ ID NO: 377789 - RNA, 19 nt, Artificial Sequence
  Description of Artificial Sequence: Synthetic oligonucleotide
ccgcuuauagccucgggaa

SEQ ID NO: 377790 - RNA, 19 nt, Artificial Sequence
  Description of Artificial Sequence: Synthetic oligonucleotide
cccgcuuauagccucggga

SEQ ID NO: 377791 - RNA, 19 nt, Artificial Sequence
  Description of Artificial Sequence: Synthetic oligonucleotide
gggucugcucuaagaauac

SEQ ID NO: 377792 - RNA, 19 nt, Artificial Sequence
  Description of Artificial Sequence: Synthetic oligonucleotide
cuguuauuaugagucuccu

SEQ ID NO: 377793 - RNA, 19 nt, Artificial Sequence
  Description of Artificial Sequence: Synthetic oligonucleotide
caguggccaugggaggaag

SEQ ID NO: 377794 - RNA, 19 nt, Artificial Sequence
  Description of Artificial Sequence: Synthetic oligonucleotide
gugccgccucuaugguggg

SEQ ID NO: 377795 - RNA, 19 nt, Artificial Sequence
  Description of Artificial Sequence: Synthetic oligonucleotide
gaaccccgucuuccuuaac

SEQ ID NO: 377796 - RNA, 19 nt, Artificial Sequence
  Description of Artificial Sequence: Synthetic oligonucleotide
ccuacgcugcguaugcaga

SEQ ID NO: 377797 - RNA, 19 nt, Artificial Sequence
  Description of Artificial Sequence: Synthetic oligonucleotide
ggcggcuagaaggaaugca

SEQ ID NO: 377798 - RNA, 19 nt, Artificial Sequence
  Description of Artificial Sequence: Synthetic oligonucleotide
guggacccggcuccagguc

SEQ ID NO: 377799 - RNA, 19 nt, Artificial Sequence
  Description of Artificial Sequence: Synthetic oligonucleotide
cgcuuauagccucgggaag

SEQ ID NO: 377800 - RNA, 19 nt, Artificial Sequence
  Description of Artificial Sequence: Synthetic oligonucleotide
ggaggucccgugugucuac

SEQ ID NO: 377801 - RNA, 19 nt, Artificial Sequence
  Description of Artificial Sequence: Synthetic oligonucleotide
caucaauagcguugcugau

SEQ ID NO: 377802 - RNA, 19 nt, Artificial Sequence
  Description of Artificial Sequence: Synthetic oligonucleotide
cggccgugagcucucaggc

SEQ ID NO: 377803 - RNA, 19 nt, Artificial Sequence
  Description of Artificial Sequence: Synthetic oligonucleotide
gcucacagcgugguggcuc

SEQ ID NO: 377804 - RNA, 19 nt, Artificial Sequence
  Description of Artificial Sequence: Synthetic oligonucleotide
ggcggaaccuccaccacaa

SEQ ID NO: 377805 - RNA, 19 nt, Artificial Sequence
  Description of Artificial Sequence: Synthetic oligonucleotide
gccacccgcuuauagccuc

SEQ ID NO: 377806 - RNA, 19 nt, Artificial Sequence
  Description of Artificial Sequence: Synthetic oligonucleotide
agccggugugggauaaaau

SEQ ID NO: 377807 - RNA, 19 nt, Artificial Sequence
  Description of Artificial Sequence: Synthetic oligonucleotide
gcgagagcacuuacuccag

SEQ ID NO: 377808 - RNA, 19 nt, Artificial Sequence
  Description of Artificial Sequence: Synthetic oligonucleotide
gcgugguggcucaacgagc

SEQ ID NO: 377809 - RNA, 19 nt, Artificial Sequence
  Description of Artificial Sequence: Synthetic oligonucleotide
acaggcgaucccgcucaca

SEQ ID NO: 377810 - RNA, 19 nt, Artificial Sequence
  Description of Artificial Sequence: Synthetic oligonucleotide
ggguagcuggcagcggccc

SEQ ID NO: 377811 - RNA, 19 nt, Artificial Sequence
  Description of Artificial Sequence: Synthetic oligonucleotide
cugugaacccaguccuggu

SEQ ID NO: 377812 - RNA, 19 nt, Artificial Sequence
  Description of Artificial Sequence: Synthetic oligonucleotide
ugccgccucuauggugggc

SEQ ID NO: 377813 - RNA, 19 nt, Artificial Sequence
  Description of Artificial Sequence: Synthetic oligonucleotide
uagcaccauuaggguacga

SEQ ID NO: 377814 - RNA, 19 nt, Artificial Sequence
  Description of Artificial Sequence: Synthetic oligonucleotide
ggguucagugagucugaaa

SEQ ID NO: 377815 - RNA, 19 nt, Artificial Sequence
  Description of Artificial Sequence: Synthetic oligonucleotide
cagccggugugggauaaaa

SEQ ID NO: 377816 - RNA, 19 nt, Artificial Sequence
  Description of Artificial Sequence: Synthetic oligonucleotide
agacgccgcugaacaccac

SEQ ID NO: 377817 - RNA, 19 nt, Artificial Sequence
  Description of Artificial Sequence: Synthetic oligonucleotide
cagggucccuucaggguua

SEQ ID NO: 377818 - RNA, 19 nt, Artificial Sequence
  Description of Artificial Sequence: Synthetic oligonucleotide
gcacgaauaguggguagcu

SEQ ID NO: 377819 - RNA, 19 nt, Artificial Sequence
  Description of Artificial Sequence: Synthetic oligonucleotide
gggcggcuagaaggaaugc

SEQ ID NO: 377820 - RNA, 19 nt, Artificial Sequence
  Description of Artificial Sequence: Synthetic oligonucleotide
cgaucccgcucacagcgug

SEQ ID NO: 377821 - RNA, 19 nt, Artificial Sequence
  Description of Artificial Sequence: Synthetic oligonucleotide
guccucuguucagcgucuc

SEQ ID NO: 377822 - RNA, 19 nt, Artificial Sequence
  Description of Artificial Sequence: Synthetic oligonucleotide
gguggggaauggcuauccu

SEQ ID NO: 377823 - RNA, 19 nt, Artificial Sequence
  Description of Artificial Sequence: Synthetic oligonucleotide
gguggggcgcugaggucug

SEQ ID NO: 377824 - RNA, 19 nt, Artificial Sequence
  Description of Artificial Sequence: Synthetic oligonucleotide
cauguacacgggugcucau

SEQ ID NO: 377825 - RNA, 19 nt, Artificial Sequence
  Description of Artificial Sequence: Synthetic oligonucleotide
gcaguaggcacuggaguau

SEQ ID NO: 377826 - RNA, 19 nt, Artificial Sequence
  Description of Artificial Sequence: Synthetic oligonucleotide
gguggcgcccagaccacaa

SEQ ID NO: 377827 - RNA, 19 nt, Artificial Sequence
  Description of Artificial Sequence: Synthetic oligonucleotide
cagcgucucgccacccgcu

SEQ ID NO: 377828 - RNA, 19 nt, Artificial Sequence
  Description of Artificial Sequence: Synthetic oligonucleotide
acacggccgugagcucuca

SEQ ID NO: 377829 - RNA, 19 nt, Artificial Sequence
  Description of Artificial Sequence: Synthetic oligonucleotide
cgcugcguaugcagagcac

SEQ ID NO: 377830 - RNA, 19 nt, Artificial Sequence
  Description of Artificial Sequence: Synthetic oligonucleotide
gcccaugcgccaggcagca

SEQ ID NO: 377831 - RNA, 19 nt, Artificial Sequence
  Description of Artificial Sequence: Synthetic oligonucleotide
ccaccaugucgggaccaug

SEQ ID NO: 377832 - RNA, 19 nt, Artificial Sequence
  Description of Artificial Sequence: Synthetic oligonucleotide
ggcguggggucagccggug

SEQ ID NO: 377833 - RNA, 19 nt, Artificial Sequence
  Description of Artificial Sequence: Synthetic oligonucleotide
gccggaggucccguguguc

SEQ ID NO: 377834 - RNA, 19 nt, Artificial Sequence
  Description of Artificial Sequence: Synthetic oligonucleotide
gggguucagugagucugaa

SEQ ID NO: 377835 - RNA, 19 nt, Artificial Sequence
  Description of Artificial Sequence: Synthetic oligonucleotide
gcccgucauguacacgggu

SEQ ID NO: 377836 - RNA, 19 nt, Artificial Sequence
  Description of Artificial Sequence: Synthetic oligonucleotide
ggucacccucuaacacuga

SEQ ID NO: 377837 - RNA, 19 nt, Artificial Sequence
  Description of Artificial Sequence: Synthetic oligonucleotide
ggggaccaaccucccugaa

SEQ ID NO: 377838 - RNA, 19 nt, Artificial Sequence
  Description of Artificial Sequence: Synthetic oligonucleotide
agcugccggguggguggcu

SEQ ID NO: 377839 - RNA, 19 nt, Artificial Sequence
  Description of Artificial Sequence: Synthetic oligonucleotide
ggaugggguuagcaccauu

SEQ ID NO: 377840 - RNA, 19 nt, Artificial Sequence
  Description of Artificial Sequence: Synthetic oligonucleotide
caauggccggaggucccgu

SEQ ID NO: 377841 - RNA, 19 nt, Artificial Sequence
  Description of Artificial Sequence: Synthetic oligonucleotide
gcgucucgccacccgcuua

SEQ ID NO: 377842 - RNA, 19 nt, Artificial Sequence
  Description of Artificial Sequence: Synthetic oligonucleotide
gucucgccacccgcuuaua

SEQ ID NO: 377843 - RNA, 19 nt, Artificial Sequence
  Description of Artificial Sequence: Synthetic oligonucleotide
ccgccucuauggugggcca

SEQ ID NO: 377844 - RNA, 19 nt, Artificial Sequence
  Description of Artificial Sequence: Synthetic oligonucleotide
ccgccaaaccugucugagu

SEQ ID NO: 377845 - RNA, 19 nt, Artificial Sequence
  Description of Artificial Sequence: Synthetic oligonucleotide
ggacccggcuccagguccu

SEQ ID NO: 377846 - RNA, 19 nt, Artificial Sequence
  Description of Artificial Sequence: Synthetic oligonucleotide
ccggaggucccgugugucu

SEQ ID NO: 377847 - RNA, 19 nt, Artificial Sequence
  Description of Artificial Sequence: Synthetic oligonucleotide
gcccuacgcugcguaugca

SEQ ID NO: 377848 - RNA, 19 nt, Artificial Sequence
  Description of Artificial Sequence: Synthetic oligonucleotide
cgucauguacacgggugcu

SEQ ID NO: 377849 - RNA, 19 nt, Artificial Sequence
  Description of Artificial Sequence: Synthetic oligonucleotide
cgccucuauggugggccac

SEQ ID NO: 377850 - RNA, 19 nt, Artificial Sequence
  Description of Artificial Sequence: Synthetic oligonucleotide
ccggguggguggcuuggua

SEQ ID NO: 377851 - RNA, 19 nt, Artificial Sequence
  Description of Artificial Sequence: Synthetic oligonucleotide
ccagcccuacgcugcguau

SEQ ID NO: 377852 - RNA, 19 nt, Artificial Sequence
  Description of Artificial Sequence: Synthetic oligonucleotide
cggaggucccgugugucua

SEQ ID NO: 377853 - RNA, 19 nt, Artificial Sequence
  Description of Artificial Sequence: Synthetic oligonucleotide
cgucucgccacccgcuuau

SEQ ID NO: 377854 - RNA, 19 nt, Artificial Sequence
  Description of Artificial Sequence: Synthetic oligonucleotide
ggcccggguggacccggcu

SEQ ID NO: 377855 - RNA, 19 nt, Artificial Sequence
  Description of Artificial Sequence: Synthetic oligonucleotide
gcggaaccuccaccacaau

SEQ ID NO: 377856 - RNA, 19 nt, Artificial Sequence
  Description of Artificial Sequence: Synthetic oligonucleotide
gggcguggggucagccggu

SEQ ID NO: 377857 - RNA, 19 nt, Artificial Sequence
  Description of Artificial Sequence: Synthetic oligonucleotide
ccggguggacccggcucca

SEQ ID NO: 377858 - RNA, 19 nt, Artificial Sequence
  Description of Artificial Sequence: Synthetic oligonucleotide
gccggguggguggcuuggu

SEQ ID NO: 377859 - RNA, 19 nt, Artificial Sequence
  Description of Artificial Sequence: Synthetic oligonucleotide
gggucccuucaggguuagu

SEQ ID NO: 377860 - RNA, 19 nt, Artificial Sequence
  Description of Artificial Sequence: Synthetic oligonucleotide
uucuuguuagccaaguugg

SEQ ID NO: 377861 - RNA, 19 nt, Artificial Sequence
  Description of Artificial Sequence: Synthetic oligonucleotide
ugaaagaagacgaucuggg

SEQ ID NO: 377862 - RNA, 19 nt, Artificial Sequence
  Description of Artificial Sequence: Synthetic oligonucleotide
uuuuaugaaagguuuauuc

SEQ ID NO: 377863 - RNA, 19 nt, Artificial Sequence
  Description of Artificial Sequence: Synthetic oligonucleotide
auggauggcggccagaccc

SEQ ID NO: 377864 - RNA, 19 nt, Artificial Sequence
  Description of Artificial Sequence: Synthetic oligonucleotide
acuuauauguguugaugcc

SEQ ID NO: 377865 - RNA, 19 nt, Artificial Sequence
  Description of Artificial Sequence: Synthetic oligonucleotide
uuuaucugcaaguagcuac

SEQ ID NO: 377866 - RNA, 19 nt, Artificial Sequence
  Description of Artificial Sequence: Synthetic oligonucleotide
aacacuauuggcccagggg

SEQ ID NO: 377867 - RNA, 19 nt, Artificial Sequence
  Description of Artificial Sequence: Synthetic oligonucleotide
uugauugaaugcaugacug

SEQ ID NO: 377868 - RNA, 19 nt, Artificial Sequence
  Description of Artificial Sequence: Synthetic oligonucleotide
auagccaccagacacaaug

SEQ ID NO: 377869 - RNA, 19 nt, Artificial Sequence
  Description of Artificial Sequence: Synthetic oligonucleotide
uuaugaaagguuuauuccu

SEQ ID NO: 377870 - RNA, 19 nt, Artificial Sequence
  Description of Artificial Sequence: Synthetic oligonucleotide
auaaaguucagguuugacu

SEQ ID NO: 377871 - RNA, 19 nt, Artificial Sequence
  Description of Artificial Sequence: Synthetic oligonucleotide
uuauucacugauauuuccc

SEQ ID NO: 377872 - RNA, 19 nt, Artificial Sequence
  Description of Artificial Sequence: Synthetic oligonucleotide
auuccuagugcucgaaccc

SEQ ID NO: 377873 - RNA, 19 nt, Artificial Sequence
  Description of Artificial Sequence: Synthetic oligonucleotide
uuuucuaccggguuuauua

SEQ ID NO: 377874 - RNA, 19 nt, Artificial Sequence
  Description of Artificial Sequence: Synthetic oligonucleotide
aagcccgaaaguaaguggc

SEQ ID NO: 377875 - RNA, 19 nt, Artificial Sequence
  Description of Artificial Sequence: Synthetic oligonucleotide
uauuccuagugcucgaacc

SEQ ID NO: 377876 - RNA, 19 nt, Artificial Sequence
  Description of Artificial Sequence: Synthetic oligonucleotide
uucacagccccuaguagcg

SEQ ID NO: 377877 - RNA, 19 nt, Artificial Sequence
  Description of Artificial Sequence: Synthetic oligonucleotide
aauucuuacucagacuuca

SEQ ID NO: 377878 - RNA, 19 nt, Artificial Sequence
  Description of Artificial Sequence: Synthetic oligonucleotide
aaguaaguggcaaaggaca

SEQ ID NO: 377879 - RNA, 19 nt, Artificial Sequence
  Description of Artificial Sequence: Synthetic oligonucleotide
cuuagagccaagcaagggc

SEQ ID NO: 377880 - RNA, 19 nt, Artificial Sequence
  Description of Artificial Sequence: Synthetic oligonucleotide
ucuaagucuguccgguagg

SEQ ID NO: 377881 - RNA, 19 nt, Artificial Sequence
  Description of Artificial Sequence: Synthetic oligonucleotide
ucucaagucgaccacgugu

SEQ ID NO: 377882 - RNA, 19 nt, Artificial Sequence
  Description of Artificial Sequence: Synthetic oligonucleotide
uuguauuguaguugccugg

SEQ ID NO: 377883 - RNA, 19 nt, Artificial Sequence
  Description of Artificial Sequence: Synthetic oligonucleotide
uucccuaggaucccguccg

SEQ ID NO: 377884 - RNA, 19 nt, Artificial Sequence
  Description of Artificial Sequence: Synthetic oligonucleotide
acgaugucaaacuucucuc

SEQ ID NO: 377885 - RNA, 19 nt, Artificial Sequence
  Description of Artificial Sequence: Synthetic oligonucleotide
aagauaaaggacagggcag

SEQ ID NO: 377886 - RNA, 19 nt, Artificial Sequence
  Description of Artificial Sequence: Synthetic oligonucleotide
ugauauuuccccagggccu

SEQ ID NO: 377887 - RNA, 19 nt, Artificial Sequence
  Description of Artificial Sequence: Synthetic oligonucleotide
ucuaccggguuuauuagcu

SEQ ID NO: 377888 - RNA, 19 nt, Artificial Sequence
  Description of Artificial Sequence: Synthetic oligonucleotide
uguauccuagcauuucuca

SEQ ID NO: 377889 - RNA, 19 nt, Artificial Sequence
  Description of Artificial Sequence: Synthetic oligonucleotide
gcuaguuucauugagguug

SEQ ID NO: 377890 - RNA, 19 nt, Artificial Sequence
  Description of Artificial Sequence: Synthetic oligonucleotide
acacuauuggcccagggga

SEQ ID NO: 377891 - RNA, 19 nt, Artificial Sequence
  Description of Artificial Sequence: Synthetic oligonucleotide
gacgaucugggaaugaugc

SEQ ID NO: 377892 - RNA, 19 nt, Artificial Sequence
  Description of Artificial Sequence: Synthetic oligonucleotide
guuacuugucucuaucccc

SEQ ID NO: 377893 - RNA, 19 nt, Artificial Sequence
  Description of Artificial Sequence: Synthetic oligonucleotide
uguccgguaggcaucauac

SEQ ID NO: 377894 - RNA, 19 nt, Artificial Sequence
  Description of Artificial Sequence: Synthetic oligonucleotide
aaugaugcccaguggccag

SEQ ID NO: 377895 - RNA, 19 nt, Artificial Sequence
  Description of Artificial Sequence: Synthetic oligonucleotide
cuggcaaauaaaagcacgc

SEQ ID NO: 377896 - RNA, 19 nt, Artificial Sequence
  Description of Artificial Sequence: Synthetic oligonucleotide
ugucaaacuucucuccggc

SEQ ID NO: 377897 - RNA, 19 nt, Artificial Sequence
  Description of Artificial Sequence: Synthetic oligonucleotide
acuaaaguguugcuggagu

SEQ ID NO: 377898 - RNA, 19 nt, Artificial Sequence
  Description of Artificial Sequence: Synthetic oligonucleotide
acauuggccuuuucuaccg

SEQ ID NO: 377899 - RNA, 19 nt, Artificial Sequence
  Description of Artificial Sequence: Synthetic oligonucleotide
uuucuugacgaugucaaac

SEQ ID NO: 377900 - RNA, 19 nt, Artificial Sequence
  Description of Artificial Sequence: Synthetic oligonucleotide
ucucauuguauuguaguug

SEQ ID NO: 377901 - RNA, 19 nt, Artificial Sequence
  Description of Artificial Sequence: Synthetic oligonucleotide
uucuuacucagacuucaug

SEQ ID NO: 377902 - RNA, 19 nt, Artificial Sequence
  Description of Artificial Sequence: Synthetic oligonucleotide
uaugaaagguuuauuccua

SEQ ID NO: 377903 - RNA, 19 nt, Artificial Sequence
  Description of Artificial Sequence: Synthetic oligonucleotide
acaaagaaguucacagccc

SEQ ID NO: 377904 - RNA, 19 nt, Artificial Sequence
  Description of Artificial Sequence: Synthetic oligonucleotide
ucucgaugggucuggaaag

SEQ ID NO: 377905 - RNA, 19 nt, Artificial Sequence
  Description of Artificial Sequence: Synthetic oligonucleotide
cuaguuucauugagguugg

SEQ ID NO: 377906 - RNA, 19 nt, Artificial Sequence
  Description of Artificial Sequence: Synthetic oligonucleotide
uguuugugcaucaccuuga

SEQ ID NO: 377907 - RNA, 19 nt, Artificial Sequence
  Description of Artificial Sequence: Synthetic oligonucleotide
aagucuguccgguaggcau

SEQ ID NO: 377908 - RNA, 19 nt, Artificial Sequence
  Description of Artificial Sequence: Synthetic oligonucleotide
uuucuaccggguuuauuag

SEQ ID NO: 377909 - RNA, 19 nt, Artificial Sequence
  Description of Artificial Sequence: Synthetic oligonucleotide
guucacagccccuaguagc

SEQ ID NO: 377910 - RNA, 19 nt, Artificial Sequence
  Description of Artificial Sequence: Synthetic oligonucleotide
agcacaauucagcugggug

SEQ ID NO: 377911 - RNA, 19 nt, Artificial Sequence
  Description of Artificial Sequence: Synthetic oligonucleotide
aucacuaucccuaucccag

SEQ ID NO: 377912 - RNA, 19 nt, Artificial Sequence
  Description of Artificial Sequence: Synthetic oligonucleotide
gaugccccucauuaggugc

SEQ ID NO: 377913 - RNA, 19 nt, Artificial Sequence
  Description of Artificial Sequence: Synthetic oligonucleotide
cauuauagccaaauuccuc

SEQ ID NO: 377914 - RNA, 19 nt, Artificial Sequence
  Description of Artificial Sequence: Synthetic oligonucleotide
augcuagagacaaagaagu

SEQ ID NO: 377915 - RNA, 19 nt, Artificial Sequence
  Description of Artificial Sequence: Synthetic oligonucleotide
aucccggggaccuaggcuc

SEQ ID NO: 377916 - RNA, 19 nt, Artificial Sequence
  Description of Artificial Sequence: Synthetic oligonucleotide
uccgguaggcaucauacuc

SEQ ID NO: 377917 - RNA, 19 nt, Artificial Sequence
  Description of Artificial Sequence: Synthetic oligonucleotide
acacuuucauacuugcgcu

SEQ ID NO: 377918 - RNA, 19 nt, Artificial Sequence
  Description of Artificial Sequence: Synthetic oligonucleotide
uccgcuuugugaaggagcu

SEQ ID NO: 377919 - RNA, 19 nt, Artificial Sequence
  Description of Artificial Sequence: Synthetic oligonucleotide
uuugugcacuuauaugugu

SEQ ID NO: 377920 - RNA, 19 nt, Artificial Sequence
  Description of Artificial Sequence: Synthetic oligonucleotide
caagcccgaaaguaagugg

SEQ ID NO: 377921 - RNA, 19 nt, Artificial Sequence
  Description of Artificial Sequence: Synthetic oligonucleotide
gaugccccauuucuugacg

SEQ ID NO: 377922 - RNA, 19 nt, Artificial Sequence
  Description of Artificial Sequence: Synthetic oligonucleotide
agucuaagcuagaugcccc

SEQ ID NO: 377923 - RNA, 19 nt, Artificial Sequence
  Description of Artificial Sequence: Synthetic oligonucleotide
uugggaucuccauuguggc

SEQ ID NO: 377924 - RNA, 19 nt, Artificial Sequence
  Description of Artificial Sequence: Synthetic oligonucleotide
ucauggcuagggaagguac

SEQ ID NO: 377925 - RNA, 19 nt, Artificial Sequence
  Description of Artificial Sequence: Synthetic oligonucleotide
gaccagguuuuauucacug

SEQ ID NO: 377926 - RNA, 19 nt, Artificial Sequence
  Description of Artificial Sequence: Synthetic oligonucleotide
aauuggaggcaacacuauu

SEQ ID NO: 377927 - RNA, 19 nt, Artificial Sequence
  Description of Artificial Sequence: Synthetic oligonucleotide
ugucauagccuuuggcugu

SEQ ID NO: 377928 - RNA, 19 nt, Artificial Sequence
  Description of Artificial Sequence: Synthetic oligonucleotide
uuuucagaccacaguagua

SEQ ID NO: 377929 - RNA, 19 nt, Artificial Sequence
  Description of Artificial Sequence: Synthetic oligonucleotide
cuacaggcccuuuucagac

SEQ ID NO: 377930 - RNA, 19 nt, Artificial Sequence
  Description of Artificial Sequence: Synthetic oligonucleotide
auugcauccuguauccuag

SEQ ID NO: 377931 - RNA, 19 nt, Artificial Sequence
  Description of Artificial Sequence: Synthetic oligonucleotide
ugauugaaugcaugacugu

SEQ ID NO: 377932 - RNA, 19 nt, Artificial Sequence
  Description of Artificial Sequence: Synthetic oligonucleotide
cucaagucgaccacguguc

SEQ ID NO: 377933 - RNA, 19 nt, Artificial Sequence
  Description of Artificial Sequence: Synthetic oligonucleotide
uguauuguaguugccuggu

SEQ ID NO: 377934 - RNA, 19 nt, Artificial Sequence
  Description of Artificial Sequence: Synthetic oligonucleotide
cuguuugugcaucaccuug

SEQ ID NO: 377935 - RNA, 19 nt, Artificial Sequence
  Description of Artificial Sequence: Synthetic oligonucleotide
uaguaugggcaaaacuggu

SEQ ID NO: 377936 - RNA, 19 nt, Artificial Sequence
  Description of Artificial Sequence: Synthetic oligonucleotide
uuggcuguggagugaaaga

SEQ ID NO: 377937 - RNA, 19 nt, Artificial Sequence
  Description of Artificial Sequence: Synthetic oligonucleotide
uauccuagcauuucucauu

SEQ ID NO: 377938 - RNA, 19 nt, Artificial Sequence
  Description of Artificial Sequence: Synthetic oligonucleotide
agaugcagggccauaaaug

SEQ ID NO: 377939 - RNA, 19 nt, Artificial Sequence
  Description of Artificial Sequence: Synthetic oligonucleotide
ugaaagguuuauuccuagu

SEQ ID NO: 377940 - RNA, 19 nt, Artificial Sequence
  Description of Artificial Sequence: Synthetic oligonucleotide
aagucgaccacgugucccu

SEQ ID NO: 377941 - RNA, 19 nt, Artificial Sequence
  Description of Artificial Sequence: Synthetic oligonucleotide
acuauuggcccaggggagc

SEQ ID NO: 377942 - RNA, 19 nt, Artificial Sequence
  Description of Artificial Sequence: Synthetic oligonucleotide
caugcuuagagccaagcaa

SEQ ID NO: 377943 - RNA, 19 nt, Artificial Sequence
  Description of Artificial Sequence: Synthetic oligonucleotide
cuucgucucacgcagcaac

SEQ ID NO: 377944 - RNA, 19 nt, Artificial Sequence
  Description of Artificial Sequence: Synthetic oligonucleotide
ugcgucucugcauuauagc

SEQ ID NO: 377945 - RNA, 19 nt, Artificial Sequence
  Description of Artificial Sequence: Synthetic oligonucleotide
uugaugcuagagacaaaga

SEQ ID NO: 377946 - RNA, 19 nt, Artificial Sequence
  Description of Artificial Sequence: Synthetic oligonucleotide
uucuaccggguuuauuagc

SEQ ID NO: 377947 - RNA, 19 nt, Artificial Sequence
  Description of Artificial Sequence: Synthetic oligonucleotide
ugcaaguagcuaccucucc

SEQ ID NO: 377948 - RNA, 19 nt, Artificial Sequence
  Description of Artificial Sequence: Synthetic oligonucleotide
ggaggcaacacuauuggcc

SEQ ID NO: 377949 - RNA, 19 nt, Artificial Sequence
  Description of Artificial Sequence: Synthetic oligonucleotide
cuuucauacuugcgcuucg

SEQ ID NO: 377950 - RNA, 19 nt, Artificial Sequence
  Description of Artificial Sequence: Synthetic oligonucleotide
gguuacuugucucuauccc

SEQ ID NO: 377951 - RNA, 19 nt, Artificial Sequence
  Description of Artificial Sequence: Synthetic oligonucleotide
caggguucaugcuuagagc

SEQ ID NO: 377952 - RNA, 19 nt, Artificial Sequence
  Description of Artificial Sequence: Synthetic oligonucleotide
gcaaguagcuaccucuccg

SEQ ID NO: 377953 - RNA, 19 nt, Artificial Sequence
  Description of Artificial Sequence: Synthetic oligonucleotide
uagaugccccucauuaggu

SEQ ID NO: 377954 - RNA, 19 nt, Artificial Sequence
  Description of Artificial Sequence: Synthetic oligonucleotide
ucgcgaucuuagcagcagg

SEQ ID NO: 377955 - RNA, 19 nt, Artificial Sequence
  Description of Artificial Sequence: Synthetic oligonucleotide
guaguugccugguuacuug

SEQ ID NO: 377956 - RNA, 19 nt, Artificial Sequence
  Description of Artificial Sequence: Synthetic oligonucleotide
uucucuccggcgaugcccc

SEQ ID NO: 377957 - RNA, 19 nt, Artificial Sequence
  Description of Artificial Sequence: Synthetic oligonucleotide
gaccccagccagaaaaggg

SEQ ID NO: 377958 - RNA, 19 nt, Artificial Sequence
  Description of Artificial Sequence: Synthetic oligonucleotide
uguggggaugaguccauca

SEQ ID NO: 377959 - RNA, 19 nt, Artificial Sequence
  Description of Artificial Sequence: Synthetic oligonucleotide
cagucuaagcuagaugccc

SEQ ID NO: 377960 - RNA, 19 nt, Artificial Sequence
  Description of Artificial Sequence: Synthetic oligonucleotide
uggaguuuucuugugacuu

SEQ ID NO: 377961 - RNA, 19 nt, Artificial Sequence
  Description of Artificial Sequence: Synthetic oligonucleotide
cacugauauuuccccaggg

SEQ ID NO: 377962 - RNA, 19 nt, Artificial Sequence
  Description of Artificial Sequence: Synthetic oligonucleotide
gucaaacuucucuccggcg

SEQ ID NO: 377963 - RNA, 19 nt, Artificial Sequence
  Description of Artificial Sequence: Synthetic oligonucleotide
agugcucgaacccagucuu

SEQ ID NO: 377964 - RNA, 19 nt, Artificial Sequence
  Description of Artificial Sequence: Synthetic oligonucleotide
aucugcaaguagcuaccuc

SEQ ID NO: 377965 - RNA, 19 nt, Artificial Sequence
  Description of Artificial Sequence: Synthetic oligonucleotide
uggcaaauaaaagcacgca

SEQ ID NO: 377966 - RNA, 19 nt, Artificial Sequence
  Description of Artificial Sequence: Synthetic oligonucleotide
agguuugacuucaacagga

SEQ ID NO: 377967 - RNA, 19 nt, Artificial Sequence
  Description of Artificial Sequence: Synthetic oligonucleotide
cacgcaguaaacaucagcu

SEQ ID NO: 377968 - RNA, 19 nt, Artificial Sequence
  Description of Artificial Sequence: Synthetic oligonucleotide
cuucccuaggaucccgucc

SEQ ID NO: 377969 - RNA, 19 nt, Artificial Sequence
  Description of Artificial Sequence: Synthetic oligonucleotide
aguagcgucuccccauucu

SEQ ID NO: 377970 - RNA, 19 nt, Artificial Sequence
  Description of Artificial Sequence: Synthetic oligonucleotide
gaccacaguaguaugggca

SEQ ID NO: 377971 - RNA, 19 nt, Artificial Sequence
  Description of Artificial Sequence: Synthetic oligonucleotide
ggugucagaccccagccag

SEQ ID NO: 377972 - RNA, 19 nt, Artificial Sequence
  Description of Artificial Sequence: Synthetic oligonucleotide
acggcaggaguggugaaac

SEQ ID NO: 377973 - RNA, 19 nt, Artificial Sequence
  Description of Artificial Sequence: Synthetic oligonucleotide
gaccucggguuccaguucc

SEQ ID NO: 377974 - RNA, 19 nt, Artificial Sequence
  Description of Artificial Sequence: Synthetic oligonucleotide
cuugcgcuucgucucacgc

SEQ ID NO: 377975 - RNA, 19 nt, Artificial Sequence
  Description of Artificial Sequence: Synthetic oligonucleotide
gagcagugcagguuacggc

SEQ ID NO: 377976 - RNA, 19 nt, Artificial Sequence
  Description of Artificial Sequence: Synthetic oligonucleotide
cacuauuggcccaggggag

SEQ ID NO: 377977 - RNA, 19 nt, Artificial Sequence
  Description of Artificial Sequence: Synthetic oligonucleotide
aguccuaccucuugccaca

SEQ ID NO: 377978 - RNA, 19 nt, Artificial Sequence
  Description of Artificial Sequence: Synthetic oligonucleotide
ucaagucgaccacgugucc

SEQ ID NO: 377979 - RNA, 19 nt, Artificial Sequence
  Description of Artificial Sequence: Synthetic oligonucleotide
uccccuagugcaugcuggg

SEQ ID NO: 377980 - RNA, 19 nt, Artificial Sequence
  Description of Artificial Sequence: Synthetic oligonucleotide
uucgucucacgcagcaacu

SEQ ID NO: 377981 - RNA, 19 nt, Artificial Sequence
  Description of Artificial Sequence: Synthetic oligonucleotide
uauauguguugaugcccca

SEQ ID NO: 377982 - RNA, 19 nt, Artificial Sequence
  Description of Artificial Sequence: Synthetic oligonucleotide
uaagcuagaugccccucau

SEQ ID NO: 377983 - RNA, 19 nt, Artificial Sequence
  Description of Artificial Sequence: Synthetic oligonucleotide
uaugggcaaaacugguguc

SEQ ID NO: 377984 - RNA, 19 nt, Artificial Sequence
  Description of Artificial Sequence: Synthetic oligonucleotide
aagaaguucacagccccua

SEQ ID NO: 377985 - RNA, 19 nt, Artificial Sequence
  Description of Artificial Sequence: Synthetic oligonucleotide
agcuugauagccacaucuc

SEQ ID NO: 377986 - RNA, 19 nt, Artificial Sequence
  Description of Artificial Sequence: Synthetic oligonucleotide
agguuuauuccuagugcuc

SEQ ID NO: 377987 - RNA, 19 nt, Artificial Sequence
  Description of Artificial Sequence: Synthetic oligonucleotide
uggaggcaacacuauuggc

SEQ ID NO: 377988 - RNA, 19 nt, Artificial Sequence
  Description of Artificial Sequence: Synthetic oligonucleotide
ugcucgaacccagucuucc

SEQ ID NO: 377989 - RNA, 19 nt, Artificial Sequence
  Description of Artificial Sequence: Synthetic oligonucleotide
ucccgucgcgaucuuagca

SEQ ID NO: 377990 - RNA, 19 nt, Artificial Sequence
  Description of Artificial Sequence: Synthetic oligonucleotide
caaaguaggcggacaccgc

SEQ ID NO: 377991 - RNA, 19 nt, Artificial Sequence
  Description of Artificial Sequence: Synthetic oligonucleotide
gacccuguggggaugaguc

SEQ ID NO: 377992 - RNA, 19 nt, Artificial Sequence
  Description of Artificial Sequence: Synthetic oligonucleotide
ucggccaaaucucucugau

SEQ ID NO: 377993 - RNA, 19 nt, Artificial Sequence
  Description of Artificial Sequence: Synthetic oligonucleotide
uuggccuuuucuaccgggu

SEQ ID NO: 377994 - RNA, 19 nt, Artificial Sequence
  Description of Artificial Sequence: Synthetic oligonucleotide
ucccuaucccagucuaagc

SEQ ID NO: 377995 - RNA, 19 nt, Artificial Sequence
  Description of Artificial Sequence: Synthetic oligonucleotide
agcugcuuuuaugaaaggu

SEQ ID NO: 377996 - RNA, 19 nt, Artificial Sequence
  Description of Artificial Sequence: Synthetic oligonucleotide
uccucuaagucuguccggu

SEQ ID NO: 377997 - RNA, 19 nt, Artificial Sequence
  Description of Artificial Sequence: Synthetic oligonucleotide
uagcgucuccccauucuug

SEQ ID NO: 377998 - RNA, 19 nt, Artificial Sequence
  Description of Artificial Sequence: Synthetic oligonucleotide
gaaugaugcccaguggcca

SEQ ID NO: 377999 - RNA, 19 nt, Artificial Sequence
  Description of Artificial Sequence: Synthetic oligonucleotide
gcgucucugcauuauagcc

SEQ ID NO: 378000 - RNA, 19 nt, Artificial Sequence
  Description of Artificial Sequence: Synthetic oligonucleotide
guguugaugcuagagacaa

SEQ ID NO: 378001 - RNA, 19 nt, Artificial Sequence
  Description of Artificial Sequence: Synthetic oligonucleotide
cuguauccuagcauuucuc

SEQ ID NO: 378002 - RNA, 19 nt, Artificial Sequence
  Description of Artificial Sequence: Synthetic oligonucleotide
ugaugccccauuucuugac

SEQ ID NO: 378003 - RNA, 19 nt, Artificial Sequence
  Description of Artificial Sequence: Synthetic oligonucleotide
cagguuacggcaggagugg

SEQ ID NO: 378004 - RNA, 19 nt, Artificial Sequence
  Description of Artificial Sequence: Synthetic oligonucleotide
uuuauuccuagugcucgaa

SEQ ID NO: 378005 - RNA, 19 nt, Artificial Sequence
  Description of Artificial Sequence: Synthetic oligonucleotide
guuacggcaggagugguga

SEQ ID NO: 378006 - RNA, 19 nt, Artificial Sequence
  Description of Artificial Sequence: Synthetic oligonucleotide
caguguguugaugcuagag

SEQ ID NO: 378007 - RNA, 19 nt, Artificial Sequence
  Description of Artificial Sequence: Synthetic oligonucleotide
uaguugccugguuacuugu

SEQ ID NO: 378008 - RNA, 19 nt, Artificial Sequence
  Description of Artificial Sequence: Synthetic oligonucleotide
agaugccccucauuaggug

SEQ ID NO: 378009 - RNA, 19 nt, Artificial Sequence
  Description of Artificial Sequence: Synthetic oligonucleotide
aggaucccguccgucaugg

SEQ ID NO: 378010 - RNA, 19 nt, Artificial Sequence
  Description of Artificial Sequence: Synthetic oligonucleotide
cucgaacccagucuuccug

SEQ ID NO: 378011 - RNA, 19 nt, Artificial Sequence
  Description of Artificial Sequence: Synthetic oligonucleotide
ucgaccacgugucccugca

SEQ ID NO: 378012 - RNA, 19 nt, Artificial Sequence
  Description of Artificial Sequence: Synthetic oligonucleotide
caacacuauuggcccaggg

SEQ ID NO: 378013 - RNA, 19 nt, Artificial Sequence
  Description of Artificial Sequence: Synthetic oligonucleotide
caagucgaccacguguccc

SEQ ID NO: 378014 - RNA, 19 nt, Artificial Sequence
  Description of Artificial Sequence: Synthetic oligonucleotide
ugaccaguguguugaugcu

SEQ ID NO: 378015 - RNA, 19 nt, Artificial Sequence
  Description of Artificial Sequence: Synthetic oligonucleotide
guucccgucgcgaucuuag

SEQ ID NO: 378016 - RNA, 19 nt, Artificial Sequence
  Description of Artificial Sequence: Synthetic oligonucleotide
ggcacucucaagucgacca

SEQ ID NO: 378017 - RNA, 19 nt, Artificial Sequence
  Description of Artificial Sequence: Synthetic oligonucleotide
cacucucaagucgaccacg

SEQ ID NO: 378018 - RNA, 19 nt, Artificial Sequence
  Description of Artificial Sequence: Synthetic oligonucleotide
agaccccagccagaaaagg

SEQ ID NO: 378019 - RNA, 19 nt, Artificial Sequence
  Description of Artificial Sequence: Synthetic oligonucleotide
ucacuaucccuaucccagu

SEQ ID NO: 378020 - RNA, 19 nt, Artificial Sequence
  Description of Artificial Sequence: Synthetic oligonucleotide
cagggccuaaggcaguggc

SEQ ID NO: 378021 - RNA, 19 nt, Artificial Sequence
  Description of Artificial Sequence: Synthetic oligonucleotide
gacaccgcguuguggaaga

SEQ ID NO: 378022 - RNA, 19 nt, Artificial Sequence
  Description of Artificial Sequence: Synthetic oligonucleotide
uugcgcuucgucucacgca

SEQ ID NO: 378023 - RNA, 19 nt, Artificial Sequence
  Description of Artificial Sequence: Synthetic oligonucleotide
auuugucucgaugggucug

SEQ ID NO: 378024 - RNA, 19 nt, Artificial Sequence
  Description of Artificial Sequence: Synthetic oligonucleotide
auacuugcgcuucgucuca

SEQ ID NO: 378025 - RNA, 19 nt, Artificial Sequence
  Description of Artificial Sequence: Synthetic oligonucleotide
cacgugucccugcaucccg

SEQ ID NO: 378026 - RNA, 19 nt, Artificial Sequence
  Description of Artificial Sequence: Synthetic oligonucleotide
ccaagcaagggccacuaag

SEQ ID NO: 378027 - RNA, 19 nt, Artificial Sequence
  Description of Artificial Sequence: Synthetic oligonucleotide
ugaggugcugugagaugga

SEQ ID NO: 378028 - RNA, 19 nt, Artificial Sequence
  Description of Artificial Sequence: Synthetic oligonucleotide
cuaagcuagaugccccuca

SEQ ID NO: 378029 - RNA, 19 nt, Artificial Sequence
  Description of Artificial Sequence: Synthetic oligonucleotide
uugccugguuacuugucuc

SEQ ID NO: 378030 - RNA, 19 nt, Artificial Sequence
  Description of Artificial Sequence: Synthetic oligonucleotide
guuaguucccuuuguccaa

SEQ ID NO: 378031 - RNA, 19 nt, Artificial Sequence
  Description of Artificial Sequence: Synthetic oligonucleotide
aaacuucucuccggcgaug

SEQ ID NO: 378032 - RNA, 19 nt, Artificial Sequence
  Description of Artificial Sequence: Synthetic oligonucleotide
ugggaucuccauuguggcu

SEQ ID NO: 378033 - RNA, 19 nt, Artificial Sequence
  Description of Artificial Sequence: Synthetic oligonucleotide
guguugaugccccauuucu

SEQ ID NO: 378034 - RNA, 19 nt, Artificial Sequence
  Description of Artificial Sequence: Synthetic oligonucleotide
uccggcgaugccccgggcc

SEQ ID NO: 378035 - RNA, 19 nt, Artificial Sequence
  Description of Artificial Sequence: Synthetic oligonucleotide
ggaaugaugcccaguggcc

SEQ ID NO: 378036 - RNA, 19 nt, Artificial Sequence
  Description of Artificial Sequence: Synthetic oligonucleotide
caauucagcugggugggug

SEQ ID NO: 378037 - RNA, 19 nt, Artificial Sequence
  Description of Artificial Sequence: Synthetic oligonucleotide
cauuggccuuuucuaccgg

SEQ ID NO: 378038 - RNA, 19 nt, Artificial Sequence
  Description of Artificial Sequence: Synthetic oligonucleotide
ucgaugggucuggaaagug

SEQ ID NO: 378039 - RNA, 19 nt, Artificial Sequence
  Description of Artificial Sequence: Synthetic oligonucleotide
uaggcggacaccgcguugu

SEQ ID NO: 378040 - RNA, 19 nt, Artificial Sequence
  Description of Artificial Sequence: Synthetic oligonucleotide
aguagcuaccucuccgcuu

SEQ ID NO: 378041 - RNA, 19 nt, Artificial Sequence
  Description of Artificial Sequence: Synthetic oligonucleotide
cuaccucuccgcuuuguga

SEQ ID NO: 378042 - RNA, 19 nt, Artificial Sequence
  Description of Artificial Sequence: Synthetic oligonucleotide
ucuccgcuuugugaaggag

SEQ ID NO: 378043 - RNA, 19 nt, Artificial Sequence
  Description of Artificial Sequence: Synthetic oligonucleotide
cauugcauccuguauccua

SEQ ID NO: 378044 - RNA, 19 nt, Artificial Sequence
  Description of Artificial Sequence: Synthetic oligonucleotide
ucccaagagcuggggauag

SEQ ID NO: 378045 - RNA, 19 nt, Artificial Sequence
  Description of Artificial Sequence: Synthetic oligonucleotide
cccaucgucuucaggaagc

SEQ ID NO: 378046 - RNA, 19 nt, Artificial Sequence
  Description of Artificial Sequence: Synthetic oligonucleotide
uccuguauccuagcauuuc

SEQ ID NO: 378047 - RNA, 19 nt, Artificial Sequence
  Description of Artificial Sequence: Synthetic oligonucleotide
ggaauuggaggcaacacua

SEQ ID NO: 378048 - RNA, 19 nt, Artificial Sequence
  Description of Artificial Sequence: Synthetic oligonucleotide
agccccuaguagcgucucc

SEQ ID NO: 378049 - RNA, 19 nt, Artificial Sequence
  Description of Artificial Sequence: Synthetic oligonucleotide
gaucccguccgucauggcu

SEQ ID NO: 378050 - RNA, 19 nt, Artificial Sequence
  Description of Artificial Sequence: Synthetic oligonucleotide
cucacgcagcaacucaauc

SEQ ID NO: 378051 - RNA, 19 nt, Artificial Sequence
  Description of Artificial Sequence: Synthetic oligonucleotide
cugcaacaggcuguagagg

SEQ ID NO: 378052 - RNA, 19 nt, Artificial Sequence
  Description of Artificial Sequence: Synthetic oligonucleotide
gcuuagagccaagcaaggg

SEQ ID NO: 378053 - RNA, 19 nt, Artificial Sequence
  Description of Artificial Sequence: Synthetic oligonucleotide
cugggcacucucaagucga

SEQ ID NO: 378054 - RNA, 19 nt, Artificial Sequence
  Description of Artificial Sequence: Synthetic oligonucleotide
cauuguauuguaguugccu

SEQ ID NO: 378055 - RNA, 19 nt, Artificial Sequence
  Description of Artificial Sequence: Synthetic oligonucleotide
aggugaggugcugugagau

SEQ ID NO: 378056 - RNA, 19 nt, Artificial Sequence
  Description of Artificial Sequence: Synthetic oligonucleotide
acgcagcaacucaaucugc

SEQ ID NO: 378057 - RNA, 19 nt, Artificial Sequence
  Description of Artificial Sequence: Synthetic oligonucleotide
ugcuaguuucauugagguu

SEQ ID NO: 378058 - RNA, 19 nt, Artificial Sequence
  Description of Artificial Sequence: Synthetic oligonucleotide
ccgaaaguaaguggcaaag

SEQ ID NO: 378059 - RNA, 19 nt, Artificial Sequence
  Description of Artificial Sequence: Synthetic oligonucleotide
aaguaggcggacaccgcgu

SEQ ID NO: 378060 - RNA, 19 nt, Artificial Sequence
  Description of Artificial Sequence: Synthetic oligonucleotide
cacuaucccuaucccaguc

SEQ ID NO: 378061 - RNA, 19 nt, Artificial Sequence
  Description of Artificial Sequence: Synthetic oligonucleotide
gauauuuccccagggccua

SEQ ID NO: 378062 - RNA, 19 nt, Artificial Sequence
  Description of Artificial Sequence: Synthetic oligonucleotide
acgcaguaaacaucagcuu

SEQ ID NO: 378063 - RNA, 19 nt, Artificial Sequence
  Description of Artificial Sequence: Synthetic oligonucleotide
aagcuagaugccccucauu

SEQ ID NO: 378064 - RNA, 19 nt, Artificial Sequence
  Description of Artificial Sequence: Synthetic oligonucleotide
guaaguggcaaaggacauc

SEQ ID NO: 378065 - RNA, 19 nt, Artificial Sequence
  Description of Artificial Sequence: Synthetic oligonucleotide
ugacuucaacaggagcagu

SEQ ID NO: 378066 - RNA, 19 nt, Artificial Sequence
  Description of Artificial Sequence: Synthetic oligonucleotide
ccagucuaagcuagaugcc

SEQ ID NO: 378067 - RNA, 19 nt, Artificial Sequence
  Description of Artificial Sequence: Synthetic oligonucleotide
uuccaguucccgucgcgau

SEQ ID NO: 378068 - RNA, 19 nt, Artificial Sequence
  Description of Artificial Sequence: Synthetic oligonucleotide
cauccuguauccuagcauu

SEQ ID NO: 378069 - RNA, 19 nt, Artificial Sequence
  Description of Artificial Sequence: Synthetic oligonucleotide
gguuccaguucccgucgcg

SEQ ID NO: 378070 - RNA, 19 nt, Artificial Sequence
  Description of Artificial Sequence: Synthetic oligonucleotide
uucccgucgcgaucuuagc

SEQ ID NO: 378071 - RNA, 19 nt, Artificial Sequence
  Description of Artificial Sequence: Synthetic oligonucleotide
guuagccaaguugggccag

SEQ ID NO: 378072 - RNA, 19 nt, Artificial Sequence
  Description of Artificial Sequence: Synthetic oligonucleotide
uccuaccucuugccacacc

SEQ ID NO: 378073 - RNA, 19 nt, Artificial Sequence
  Description of Artificial Sequence: Synthetic oligonucleotide
agggaagguacuggaguca

SEQ ID NO: 378074 - RNA, 19 nt, Artificial Sequence
  Description of Artificial Sequence: Synthetic oligonucleotide
cccgucgcgaucuuagcag

SEQ ID NO: 378075 - RNA, 19 nt, Artificial Sequence
  Description of Artificial Sequence: Synthetic oligonucleotide
ucccguccgucauggcuag

SEQ ID NO: 378076 - RNA, 19 nt, Artificial Sequence
  Description of Artificial Sequence: Synthetic oligonucleotide
accggguuuauuagcuucu

SEQ ID NO: 378077 - RNA, 19 nt, Artificial Sequence
  Description of Artificial Sequence: Synthetic oligonucleotide
ugggcacucucaagucgac

SEQ ID NO: 378078 - RNA, 19 nt, Artificial Sequence
  Description of Artificial Sequence: Synthetic oligonucleotide
agcccaucgucuucaggaa

SEQ ID NO: 378079 - RNA, 19 nt, Artificial Sequence
  Description of Artificial Sequence: Synthetic oligonucleotide
aguaggcggacaccgcguu

SEQ ID NO: 378080 - RNA, 19 nt, Artificial Sequence
  Description of Artificial Sequence: Synthetic oligonucleotide
uggaggccgcagcuugaug

SEQ ID NO: 378081 - RNA, 19 nt, Artificial Sequence
  Description of Artificial Sequence: Synthetic oligonucleotide
gggccuaaggcaguggcug

SEQ ID NO: 378082 - RNA, 19 nt, Artificial Sequence
  Description of Artificial Sequence: Synthetic oligonucleotide
uaguagcgucuccccauuc

SEQ ID NO: 378083 - RNA, 19 nt, Artificial Sequence
  Description of Artificial Sequence: Synthetic oligonucleotide
gggcucuaagcacaauuca

SEQ ID NO: 378084 - RNA, 19 nt, Artificial Sequence
  Description of Artificial Sequence: Synthetic oligonucleotide
uagugcaugcugggucugc

SEQ ID NO: 378085 - RNA, 19 nt, Artificial Sequence
  Description of Artificial Sequence: Synthetic oligonucleotide
ugggccuacaggcccuuuu

SEQ ID NO: 378086 - RNA, 19 nt, Artificial Sequence
  Description of Artificial Sequence: Synthetic oligonucleotide
agugcaugcugggucugca

SEQ ID NO: 378087 - RNA, 19 nt, Artificial Sequence
  Description of Artificial Sequence: Synthetic oligonucleotide
cucucaagucgaccacgug

SEQ ID NO: 378088 - RNA, 19 nt, Artificial Sequence
  Description of Artificial Sequence: Synthetic oligonucleotide
accuaggcucagcuccucu

SEQ ID NO: 378089 - RNA, 19 nt, Artificial Sequence
  Description of Artificial Sequence: Synthetic oligonucleotide
ggccuaaggcaguggcugg

SEQ ID NO: 378090 - RNA, 19 nt, Artificial Sequence
  Description of Artificial Sequence: Synthetic oligonucleotide
gcuagggaagguacuggag

SEQ ID NO: 378091 - RNA, 19 nt, Artificial Sequence
  Description of Artificial Sequence: Synthetic oligonucleotide
gggaugaguccaucaccag

SEQ ID NO: 378092 - RNA, 19 nt, Artificial Sequence
  Description of Artificial Sequence: Synthetic oligonucleotide
guccgucauggcuagggaa

SEQ ID NO: 378093 - RNA, 19 nt, Artificial Sequence
  Description of Artificial Sequence: Synthetic oligonucleotide
ggugaggugcugugagaug

SEQ ID NO: 378094 - RNA, 19 nt, Artificial Sequence
  Description of Artificial Sequence: Synthetic oligonucleotide
ucauugagguuggguccug

SEQ ID NO: 378095 - RNA, 19 nt, Artificial Sequence
  Description of Artificial Sequence: Synthetic oligonucleotide
uauuggcccaggggagccc

SEQ ID NO: 378096 - RNA, 19 nt, Artificial Sequence
  Description of Artificial Sequence: Synthetic oligonucleotide
uucugcgucucugcauuau

SEQ ID NO: 378097 - RNA, 19 nt, Artificial Sequence
  Description of Artificial Sequence: Synthetic oligonucleotide
gucgaccacgugucccugc

SEQ ID NO: 378098 - RNA, 19 nt, Artificial Sequence
  Description of Artificial Sequence: Synthetic oligonucleotide
auaggccugaggagugaug

SEQ ID NO: 378099 - RNA, 19 nt, Artificial Sequence
  Description of Artificial Sequence: Synthetic oligonucleotide
ccaagcccgaaaguaagug

SEQ ID NO: 378100 - RNA, 19 nt, Artificial Sequence
  Description of Artificial Sequence: Synthetic oligonucleotide
guagaggugggcugucagu

SEQ ID NO: 378101 - RNA, 19 nt, Artificial Sequence
  Description of Artificial Sequence: Synthetic oligonucleotide
ccaaagauuaaaaguccua

SEQ ID NO: 378102 - RNA, 19 nt, Artificial Sequence
  Description of Artificial Sequence: Synthetic oligonucleotide
cuaagcuacccagagguuu

SEQ ID NO: 378103 - RNA, 19 nt, Artificial Sequence
  Description of Artificial Sequence: Synthetic oligonucleotide
uuacggcaggaguggugaa

SEQ ID NO: 378104 - RNA, 19 nt, Artificial Sequence
  Description of Artificial Sequence: Synthetic oligonucleotide
gguucaugcuuagagccaa

SEQ ID NO: 378105 - RNA, 19 nt, Artificial Sequence
  Description of Artificial Sequence: Synthetic oligonucleotide
auucuuacucagacuucau

SEQ ID NO: 378106 - RNA, 19 nt, Artificial Sequence
  Description of Artificial Sequence: Synthetic oligonucleotide
gucuaagcuagaugccccu

SEQ ID NO: 378107 - RNA, 19 nt, Artificial Sequence
  Description of Artificial Sequence: Synthetic oligonucleotide
uagcuaccucuccgcuuug

SEQ ID NO: 378108 - RNA, 19 nt, Artificial Sequence
  Description of Artificial Sequence: Synthetic oligonucleotide
cccuagugcaugcuggguc

SEQ ID NO: 378109 - RNA, 19 nt, Artificial Sequence
  Description of Artificial Sequence: Synthetic oligonucleotide
aucccguccgucauggcua

SEQ ID NO: 378110 - RNA, 19 nt, Artificial Sequence
  Description of Artificial Sequence: Synthetic oligonucleotide
gaauuggaggcaacacuau

SEQ ID NO: 378111 - RNA, 19 nt, Artificial Sequence
  Description of Artificial Sequence: Synthetic oligonucleotide
accucggguuccaguuccc

SEQ ID NO: 378112 - RNA, 19 nt, Artificial Sequence
  Description of Artificial Sequence: Synthetic oligonucleotide
gcccaucgucuucaggaag

SEQ ID NO: 378113 - RNA, 19 nt, Artificial Sequence
  Description of Artificial Sequence: Synthetic oligonucleotide
cauggcuagggaagguacu

SEQ ID NO: 378114 - RNA, 19 nt, Artificial Sequence
  Description of Artificial Sequence: Synthetic oligonucleotide
guuugacagucaugagugu

SEQ ID NO: 378115 - RNA, 19 nt, Artificial Sequence
  Description of Artificial Sequence: Synthetic oligonucleotide
gggagccucggccaaaucu

SEQ ID NO: 378116 - RNA, 19 nt, Artificial Sequence
  Description of Artificial Sequence: Synthetic oligonucleotide
ccuaggaucccguccguca

SEQ ID NO: 378117 - RNA, 19 nt, Artificial Sequence
  Description of Artificial Sequence: Synthetic oligonucleotide
gguuacggcaggaguggug

SEQ ID NO: 378118 - RNA, 19 nt, Artificial Sequence
  Description of Artificial Sequence: Synthetic oligonucleotide
cucuccgcuuugugaagga

SEQ ID NO: 378119 - RNA, 19 nt, Artificial Sequence
  Description of Artificial Sequence: Synthetic oligonucleotide
gcauuauagccaaauuccu

SEQ ID NO: 378120 - RNA, 19 nt, Artificial Sequence
  Description of Artificial Sequence: Synthetic oligonucleotide
gcacucucaagucgaccac

SEQ ID NO: 378121 - RNA, 19 nt, Artificial Sequence
  Description of Artificial Sequence: Synthetic oligonucleotide
ccguccgucauggcuaggg

SEQ ID NO: 378122 - RNA, 19 nt, Artificial Sequence
  Description of Artificial Sequence: Synthetic oligonucleotide
gggccauaaauggggcucc

SEQ ID NO: 378123 - RNA, 19 nt, Artificial Sequence
  Description of Artificial Sequence: Synthetic oligonucleotide
gaguggugaaacugccuuu

SEQ ID NO: 378124 - RNA, 19 nt, Artificial Sequence
  Description of Artificial Sequence: Synthetic oligonucleotide
acaauucagcugggugggu

SEQ ID NO: 378125 - RNA, 19 nt, Artificial Sequence
  Description of Artificial Sequence: Synthetic oligonucleotide
ccgucgcgaucuuagcagc

SEQ ID NO: 378126 - RNA, 19 nt, Artificial Sequence
  Description of Artificial Sequence: Synthetic oligonucleotide
gccccuaguagcgucuccc

SEQ ID NO: 378127 - RNA, 19 nt, Artificial Sequence
  Description of Artificial Sequence: Synthetic oligonucleotide
auccuguauccuagcauuu

SEQ ID NO: 378128 - RNA, 19 nt, Artificial Sequence
  Description of Artificial Sequence: Synthetic oligonucleotide
agcagggaccagguuuuau

SEQ ID NO: 378129 - RNA, 19 nt, Artificial Sequence
  Description of Artificial Sequence: Synthetic oligonucleotide
agucgaccacgugucccug

SEQ ID NO: 378130 - RNA, 19 nt, Artificial Sequence
  Description of Artificial Sequence: Synthetic oligonucleotide
ccccucauuaggugcuccc

SEQ ID NO: 378131 - RNA, 19 nt, Artificial Sequence
  Description of Artificial Sequence: Synthetic oligonucleotide
guagcgucuccccauucuu

SEQ ID NO: 378132 - RNA, 19 nt, Artificial Sequence
  Description of Artificial Sequence: Synthetic oligonucleotide
agguuacggcaggaguggu

SEQ ID NO: 378133 - RNA, 19 nt, Artificial Sequence
  Description of Artificial Sequence: Synthetic oligonucleotide
agcuaccucuccgcuuugu

SEQ ID NO: 378134 - RNA, 19 nt, Artificial Sequence
  Description of Artificial Sequence: Synthetic oligonucleotide
gcaacacuauuggcccagg

SEQ ID NO: 378135 - RNA, 19 nt, Artificial Sequence
  Description of Artificial Sequence: Synthetic oligonucleotide
gauaggccugaggagugau

SEQ ID NO: 378136 - RNA, 19 nt, Artificial Sequence
  Description of Artificial Sequence: Synthetic oligonucleotide
aggcggacaccgcguugug

SEQ ID NO: 378137 - RNA, 19 nt, Artificial Sequence
  Description of Artificial Sequence: Synthetic oligonucleotide
cgcuuugugaaggagcuca

SEQ ID NO: 378138 - RNA, 19 nt, Artificial Sequence
  Description of Artificial Sequence: Synthetic oligonucleotide
ccccuaguagcgucucccc

SEQ ID NO: 378139 - RNA, 19 nt, Artificial Sequence
  Description of Artificial Sequence: Synthetic oligonucleotide
ccuaucccagucuaagcua

SEQ ID NO: 378140 - RNA, 19 nt, Artificial Sequence
  Description of Artificial Sequence: Synthetic oligonucleotide
ggcggacaccgcguugugg

SEQ ID NO: 378141 - RNA, 19 nt, Artificial Sequence
  Description of Artificial Sequence: Synthetic oligonucleotide
gccauaaauggggcucccc

SEQ ID NO: 378142 - RNA, 19 nt, Artificial Sequence
  Description of Artificial Sequence: Synthetic oligonucleotide
gaccgcgcggggaccucgg

SEQ ID NO: 378143 - RNA, 19 nt, Artificial Sequence
  Description of Artificial Sequence: Synthetic oligonucleotide
gggcacaucccaagagcug

SEQ ID NO: 378144 - RNA, 19 nt, Artificial Sequence
  Description of Artificial Sequence: Synthetic oligonucleotide
gcauccuguauccuagcau

SEQ ID NO: 378145 - RNA, 19 nt, Artificial Sequence
  Description of Artificial Sequence: Synthetic oligonucleotide
caucccggggaccuaggcu

SEQ ID NO: 378146 - RNA, 19 nt, Artificial Sequence
  Description of Artificial Sequence: Synthetic oligonucleotide
guccgguaggcaucauacu

SEQ ID NO: 378147 - RNA, 19 nt, Artificial Sequence
  Description of Artificial Sequence: Synthetic oligonucleotide
gggcacucucaagucgacc

SEQ ID NO: 378148 - RNA, 19 nt, Artificial Sequence
  Description of Artificial Sequence: Synthetic oligonucleotide
cucccauugcauccuguau

SEQ ID NO: 378149 - RNA, 19 nt, Artificial Sequence
  Description of Artificial Sequence: Synthetic oligonucleotide
cggguuccaguucccgucg

SEQ ID NO: 378150 - RNA, 19 nt, Artificial Sequence
  Description of Artificial Sequence: Synthetic oligonucleotide
cccgaaaguaaguggcaaa

SEQ ID NO: 378151 - RNA, 19 nt, Artificial Sequence
  Description of Artificial Sequence: Synthetic oligonucleotide
cuucugcgucucugcauua

SEQ ID NO: 378152 - RNA, 19 nt, Artificial Sequence
  Description of Artificial Sequence: Synthetic oligonucleotide
cucgaugggucuggaaagu

SEQ ID NO: 378153 - RNA, 19 nt, Artificial Sequence
  Description of Artificial Sequence: Synthetic oligonucleotide
guccuaccucuugccacac

SEQ ID NO: 378154 - RNA, 19 nt, Artificial Sequence
  Description of Artificial Sequence: Synthetic oligonucleotide
aguucccgucgcgaucuua

SEQ ID NO: 378155 - RNA, 19 nt, Artificial Sequence
  Description of Artificial Sequence: Synthetic oligonucleotide
ggauugggaucuccauugu

SEQ ID NO: 378156 - RNA, 19 nt, Artificial Sequence
  Description of Artificial Sequence: Synthetic oligonucleotide
ccucggguuccaguucccg

SEQ ID NO: 378157 - RNA, 19 nt, Artificial Sequence
  Description of Artificial Sequence: Synthetic oligonucleotide
cuccccgcagcuucucaua

SEQ ID NO: 378158 - RNA, 19 nt, Artificial Sequence
  Description of Artificial Sequence: Synthetic oligonucleotide
ggccauaaauggggcuccc

SEQ ID NO: 378159 - RNA, 19 nt, Artificial Sequence
  Description of Artificial Sequence: Synthetic oligonucleotide
gagccaagcaagggccacu

SEQ ID NO: 378160 - RNA, 19 nt, Artificial Sequence
  Description of Artificial Sequence: Synthetic oligonucleotide
cuaguagcgucuccccauu

SEQ ID NO: 378161 - RNA, 19 nt, Artificial Sequence
  Description of Artificial Sequence: Synthetic oligonucleotide
gugcucgaacccagucuuc

SEQ ID NO: 378162 - RNA, 19 nt, Artificial Sequence
  Description of Artificial Sequence: Synthetic oligonucleotide
ggauaggccugaggaguga

SEQ ID NO: 378163 - RNA, 19 nt, Artificial Sequence
  Description of Artificial Sequence: Synthetic oligonucleotide
gcccgaaaguaaguggcaa

SEQ ID NO: 378164 - RNA, 19 nt, Artificial Sequence
  Description of Artificial Sequence: Synthetic oligonucleotide
ccucuagccaggaaggcuu

SEQ ID NO: 378165 - RNA, 19 nt, Artificial Sequence
  Description of Artificial Sequence: Synthetic oligonucleotide
ccuaguagcgucuccccau

SEQ ID NO: 378166 - RNA, 19 nt, Artificial Sequence
  Description of Artificial Sequence: Synthetic oligonucleotide
ggccggaccgcgcggggac

SEQ ID NO: 378167 - RNA, 19 nt, Artificial Sequence
  Description of Artificial Sequence: Synthetic oligonucleotide
cuaccggguuuauuagcuu

SEQ ID NO: 378168 - RNA, 19 nt, Artificial Sequence
  Description of Artificial Sequence: Synthetic oligonucleotide
ggaucccguccgucauggc

SEQ ID NO: 378169 - RNA, 19 nt, Artificial Sequence
  Description of Artificial Sequence: Synthetic oligonucleotide
ccgcguuguggaagagcag

SEQ ID NO: 378170 - RNA, 19 nt, Artificial Sequence
  Description of Artificial Sequence: Synthetic oligonucleotide
cuccggcgaugccccgggc

SEQ ID NO: 378171 - RNA, 19 nt, Artificial Sequence
  Description of Artificial Sequence: Synthetic oligonucleotide
gggccgggccacucuuccc

SEQ ID NO: 378172 - RNA, 19 nt, Artificial Sequence
  Description of Artificial Sequence: Synthetic oligonucleotide
gccccucauuaggugcucc

SEQ ID NO: 378173 - RNA, 19 nt, Artificial Sequence
  Description of Artificial Sequence: Synthetic oligonucleotide
cccucauuaggugcuccca

SEQ ID NO: 378174 - RNA, 19 nt, Artificial Sequence
  Description of Artificial Sequence: Synthetic oligonucleotide
ugccccgcccaguguccuu

SEQ ID NO: 378175 - RNA, 19 nt, Artificial Sequence
  Description of Artificial Sequence: Synthetic oligonucleotide
ccggcgaugccccgggcca

SEQ ID NO: 378176 - RNA, 19 nt, Artificial Sequence
  Description of Artificial Sequence: Synthetic oligonucleotide
ggggaccucggguuccagu

SEQ ID NO: 378177 - RNA, 19 nt, Artificial Sequence
  Description of Artificial Sequence: Synthetic oligonucleotide
cgucgcgaucuuagcagca

SEQ ID NO: 378178 - RNA, 19 nt, Artificial Sequence
  Description of Artificial Sequence: Synthetic oligonucleotide
cccuaggaucccguccguc

SEQ ID NO: 378179 - RNA, 19 nt, Artificial Sequence
  Description of Artificial Sequence: Synthetic oligonucleotide
ccuagugcucgaacccagu

SEQ ID NO: 378180 - RNA, 19 nt, Artificial Sequence
  Description of Artificial Sequence: Synthetic oligonucleotide
ccuucuuguuagccaaguu

SEQ ID NO: 378181 - RNA, 19 nt, Artificial Sequence
  Description of Artificial Sequence: Synthetic oligonucleotide
gccccgcccaguguccuuc

SEQ ID NO: 378182 - RNA, 19 nt, Artificial Sequence
  Description of Artificial Sequence: Synthetic oligonucleotide
ccgcuuugugaaggagcuc

SEQ ID NO: 378183 - RNA, 19 nt, Artificial Sequence
  Description of Artificial Sequence: Synthetic oligonucleotide
cgcggggaccucggguucc

SEQ ID NO: 378184 - RNA, 19 nt, Artificial Sequence
  Description of Artificial Sequence: Synthetic oligonucleotide
gccggaccgcgcggggacc

SEQ ID NO: 378185 - RNA, 19 nt, Artificial Sequence
  Description of Artificial Sequence: Synthetic oligonucleotide
gggccggaccgcgcgggga

SEQ ID NO: 378186 - RNA, 19 nt, Artificial Sequence
  Description of Artificial Sequence: Synthetic oligonucleotide
cccguccgucauggcuagg

SEQ ID NO: 378187 - RNA, 19 nt, Artificial Sequence
  Description of Artificial Sequence: Synthetic oligonucleotide
ccauugcauccuguauccu

SEQ ID NO: 378188 - RNA, 19 nt, Artificial Sequence
  Description of Artificial Sequence: Synthetic oligonucleotide
ccugaagcucuggggacuu

SEQ ID NO: 378189 - RNA, 19 nt, Artificial Sequence
  Description of Artificial Sequence: Synthetic oligonucleotide
cgggagccucggccaaauc

SEQ ID NO: 378190 - RNA, 19 nt, Artificial Sequence
  Description of Artificial Sequence: Synthetic oligonucleotide
ccccgcagcuucucauauu

SEQ ID NO: 378191 - RNA, 19 nt, Artificial Sequence
  Description of Artificial Sequence: Synthetic oligonucleotide
cugggccuacaggcccuuu

SEQ ID NO: 378192 - RNA, 19 nt, Artificial Sequence
  Description of Artificial Sequence: Synthetic oligonucleotide
ccgggagccucggccaaau

SEQ ID NO: 378193 - RNA, 19 nt, Artificial Sequence
  Description of Artificial Sequence: Synthetic oligonucleotide
ccccgcccaguguccuucu

SEQ ID NO: 378194 - RNA, 19 nt, Artificial Sequence
  Description of Artificial Sequence: Synthetic oligonucleotide
ccggaccgcgcggggaccu

SEQ ID NO: 378195 - RNA, 19 nt, Artificial Sequence
  Description of Artificial Sequence: Synthetic oligonucleotide
cggaccgcgcggggaccuc

SEQ ID NO: 378196 - RNA, 19 nt, Artificial Sequence
  Description of Artificial Sequence: Synthetic oligonucleotide
cgaccacgugucccugcau

SEQ ID NO: 378197 - RNA, 19 nt, Artificial Sequence
  Description of Artificial Sequence: Synthetic oligonucleotide
cccgcccaguguccuucuu

SEQ ID NO: 378198 - RNA, 19 nt, Artificial Sequence
  Description of Artificial Sequence: Synthetic oligonucleotide
guaaauaggagcuuuaugc

SEQ ID NO: 378199 - RNA, 19 nt, Artificial Sequence
  Description of Artificial Sequence: Synthetic oligonucleotide
ucuacaguaacucagcagc

SEQ ID NO: 378200 - RNA, 19 nt, Artificial Sequence
  Description of Artificial Sequence: Synthetic oligonucleotide
uguacauuacuuuugagac

SEQ ID NO: 378201 - RNA, 19 nt, Artificial Sequence
  Description of Artificial Sequence: Synthetic oligonucleotide
uauauauuggggaguaagg

SEQ ID NO: 378202 - RNA, 19 nt, Artificial Sequence
  Description of Artificial Sequence: Synthetic oligonucleotide
guaucacuaacccugagcg

SEQ ID NO: 378203 - RNA, 19 nt, Artificial Sequence
  Description of Artificial Sequence: Synthetic oligonucleotide
uaacaugccuaacugaagg

SEQ ID NO: 378204 - RNA, 19 nt, Artificial Sequence
  Description of Artificial Sequence: Synthetic oligonucleotide
aagaaguauauauugggga

SEQ ID NO: 378205 - RNA, 19 nt, Artificial Sequence
  Description of Artificial Sequence: Synthetic oligonucleotide
aacuuaggagcauuucacc

SEQ ID NO: 378206 - RNA, 19 nt, Artificial Sequence
  Description of Artificial Sequence: Synthetic oligonucleotide
agagugaucacguggaagg

SEQ ID NO: 378207 - RNA, 19 nt, Artificial Sequence
  Description of Artificial Sequence: Synthetic oligonucleotide
gaggcgaggaauuagaccc

SEQ ID NO: 378208 - RNA, 19 nt, Artificial Sequence
  Description of Artificial Sequence: Synthetic oligonucleotide
acuaccuaacaucauggcc

SEQ ID NO: 378209 - RNA, 19 nt, Artificial Sequence
  Description of Artificial Sequence: Synthetic oligonucleotide
acgaaagggaaacaaacac

SEQ ID NO: 378210 - RNA, 19 nt, Artificial Sequence
  Description of Artificial Sequence: Synthetic oligonucleotide
gacgagauaagccagugag

SEQ ID NO: 378211 - RNA, 19 nt, Artificial Sequence
  Description of Artificial Sequence: Synthetic oligonucleotide
ugagcauaacaaaagagac

SEQ ID NO: 378212 - RNA, 19 nt, Artificial Sequence
  Description of Artificial Sequence: Synthetic oligonucleotide
ugguaaaugauauugugcu

SEQ ID NO: 378213 - RNA, 19 nt, Artificial Sequence
  Description of Artificial Sequence: Synthetic oligonucleotide
uuuaacaugccuaacugaa

SEQ ID NO: 378214 - RNA, 19 nt, Artificial Sequence
  Description of Artificial Sequence: Synthetic oligonucleotide
agaaguauauauuggggag

SEQ ID NO: 378215 - RNA, 19 nt, Artificial Sequence
  Description of Artificial Sequence: Synthetic oligonucleotide
agcuaagcuacucacgagc

SEQ ID NO: 378216 - RNA, 19 nt, Artificial Sequence
  Description of Artificial Sequence: Synthetic oligonucleotide
augauuaauucuuauugag

SEQ ID NO: 378217 - RNA, 19 nt, Artificial Sequence
  Description of Artificial Sequence: Synthetic oligonucleotide
aaggcaugaacaccucugc

SEQ ID NO: 378218 - RNA, 19 nt, Artificial Sequence
  Description of Artificial Sequence: Synthetic oligonucleotide
aauauuucguccuauuguu

SEQ ID NO: 378219 - RNA, 19 nt, Artificial Sequence
  Description of Artificial Sequence: Synthetic oligonucleotide
agauaagccagugaguuac

SEQ ID NO: 378220 - RNA, 19 nt, Artificial Sequence
  Description of Artificial Sequence: Synthetic oligonucleotide
uucaaauaacuaaugggga

SEQ ID NO: 378221 - RNA, 19 nt, Artificial Sequence
  Description of Artificial Sequence: Synthetic oligonucleotide
caagaaguauauauugggg

SEQ ID NO: 378222 - RNA, 19 nt, Artificial Sequence
  Description of Artificial Sequence: Synthetic oligonucleotide
ugauuaauucuuauugaga

SEQ ID NO: 378223 - RNA, 19 nt, Artificial Sequence
  Description of Artificial Sequence: Synthetic oligonucleotide
ucucagagugaucacgugg

SEQ ID NO: 378224 - RNA, 19 nt, Artificial Sequence
  Description of Artificial Sequence: Synthetic oligonucleotide
guaaaugauauugugcuag

SEQ ID NO: 378225 - RNA, 19 nt, Artificial Sequence
  Description of Artificial Sequence: Synthetic oligonucleotide
agaacgagcaaucaucucu

SEQ ID NO: 378226 - RNA, 19 nt, Artificial Sequence
  Description of Artificial Sequence: Synthetic oligonucleotide
agaaaagaguugguaaugc

SEQ ID NO: 378227 - RNA, 19 nt, Artificial Sequence
  Description of Artificial Sequence: Synthetic oligonucleotide
ucagguuguaucacuaacc

SEQ ID NO: 378228 - RNA, 19 nt, Artificial Sequence
  Description of Artificial Sequence: Synthetic oligonucleotide
uauggaaaugucacugucc

SEQ ID NO: 378229 - RNA, 19 nt, Artificial Sequence
  Description of Artificial Sequence: Synthetic oligonucleotide
aaagagaccaggaagcuga

SEQ ID NO: 378230 - RNA, 19 nt, Artificial Sequence
  Description of Artificial Sequence: Synthetic oligonucleotide
acuuucacguacaugagcg

SEQ ID NO: 378231 - RNA, 19 nt, Artificial Sequence
  Description of Artificial Sequence: Synthetic oligonucleotide
ugggcaauauccuaggaac

SEQ ID NO: 378232 - RNA, 19 nt, Artificial Sequence
  Description of Artificial Sequence: Synthetic oligonucleotide
uuucccaagauuaaaugau

SEQ ID NO: 378233 - RNA, 19 nt, Artificial Sequence
  Description of Artificial Sequence: Synthetic oligonucleotide
uaaaugauauugugcuagg

SEQ ID NO: 378234 - RNA, 19 nt, Artificial Sequence
  Description of Artificial Sequence: Synthetic oligonucleotide
ugcagauaauauugaauag

SEQ ID NO: 378235 - RNA, 19 nt, Artificial Sequence
  Description of Artificial Sequence: Synthetic oligonucleotide
gaagcguauaggcaauggg

SEQ ID NO: 378236 - RNA, 19 nt, Artificial Sequence
  Description of Artificial Sequence: Synthetic oligonucleotide
uuuuaacaugccuaacuga

SEQ ID NO: 378237 - RNA, 19 nt, Artificial Sequence
  Description of Artificial Sequence: Synthetic oligonucleotide
uuuaugcuugaguugaaaa

SEQ ID NO: 378238 - RNA, 19 nt, Artificial Sequence
  Description of Artificial Sequence: Synthetic oligonucleotide
gaaaugaugucaccuagga

SEQ ID NO: 378239 - RNA, 19 nt, Artificial Sequence
  Description of Artificial Sequence: Synthetic oligonucleotide
uccacauuaccagauaaug

SEQ ID NO: 378240 - RNA, 19 nt, Artificial Sequence
  Description of Artificial Sequence: Synthetic oligonucleotide
auuaacauacucaggucac

SEQ ID NO: 378241 - RNA, 19 nt, Artificial Sequence
  Description of Artificial Sequence: Synthetic oligonucleotide
guauugacgagauaagcca

SEQ ID NO: 378242 - RNA, 19 nt, Artificial Sequence
  Description of Artificial Sequence: Synthetic oligonucleotide
guauauauuggggaguaag

SEQ ID NO: 378243 - RNA, 19 nt, Artificial Sequence
  Description of Artificial Sequence: Synthetic oligonucleotide
acuaauggggaauaccagu

SEQ ID NO: 378244 - RNA, 19 nt, Artificial Sequence
  Description of Artificial Sequence: Synthetic oligonucleotide
uuaugcuugaguugaaaau

SEQ ID NO: 378245 - RNA, 19 nt, Artificial Sequence
  Description of Artificial Sequence: Synthetic oligonucleotide
uuucaagcuaagcuacuca

SEQ ID NO: 378246 - RNA, 19 nt, Artificial Sequence
  Description of Artificial Sequence: Synthetic oligonucleotide
gacucgaucaacaugacaa

SEQ ID NO: 378247 - RNA, 19 nt, Artificial Sequence
  Description of Artificial Sequence: Synthetic oligonucleotide
agguauugacgagauaagc

SEQ ID NO: 378248 - RNA, 19 nt, Artificial Sequence
  Description of Artificial Sequence: Synthetic oligonucleotide
cagguuguaucacuaaccc

SEQ ID NO: 378249 - RNA, 19 nt, Artificial Sequence
  Description of Artificial Sequence: Synthetic oligonucleotide
aaaauccuacgaugccuuc

SEQ ID NO: 378250 - RNA, 19 nt, Artificial Sequence
  Description of Artificial Sequence: Synthetic oligonucleotide
agauacuaacuccucaggu

SEQ ID NO: 378251 - RNA, 19 nt, Artificial Sequence
  Description of Artificial Sequence: Synthetic oligonucleotide
uucagguuguaucacuaac

SEQ ID NO: 378252 - RNA, 19 nt, Artificial Sequence
  Description of Artificial Sequence: Synthetic oligonucleotide
uagguauugacgagauaag

SEQ ID NO: 378253 - RNA, 19 nt, Artificial Sequence
  Description of Artificial Sequence: Synthetic oligonucleotide
acugccauaagauuagaua

SEQ ID NO: 378254 - RNA, 19 nt, Artificial Sequence
  Description of Artificial Sequence: Synthetic oligonucleotide
acuuaggagcauuucaccu

SEQ ID NO: 378255 - RNA, 19 nt, Artificial Sequence
  Description of Artificial Sequence: Synthetic oligonucleotide
uucuaguguagcagaaggc

SEQ ID NO: 378256 - RNA, 19 nt, Artificial Sequence
  Description of Artificial Sequence: Synthetic oligonucleotide
caacuuaggagcauuucac

SEQ ID NO: 378257 - RNA, 19 nt, Artificial Sequence
  Description of Artificial Sequence: Synthetic oligonucleotide
ccaagaaguauauauuggg

SEQ ID NO: 378258 - RNA, 19 nt, Artificial Sequence
  Description of Artificial Sequence: Synthetic oligonucleotide
acucgaucaacaugacaac

SEQ ID NO: 378259 - RNA, 19 nt, Artificial Sequence
  Description of Artificial Sequence: Synthetic oligonucleotide
cuuaggagcauuucaccug

SEQ ID NO: 378260 - RNA, 19 nt, Artificial Sequence
  Description of Artificial Sequence: Synthetic oligonucleotide
aucuacaguaacucagcag

SEQ ID NO: 378261 - RNA, 19 nt, Artificial Sequence
  Description of Artificial Sequence: Synthetic oligonucleotide
agcguauaggcaaugggac

SEQ ID NO: 378262 - RNA, 19 nt, Artificial Sequence
  Description of Artificial Sequence: Synthetic oligonucleotide
aacaugccuaacugaaggu

SEQ ID NO: 378263 - RNA, 19 nt, Artificial Sequence
  Description of Artificial Sequence: Synthetic oligonucleotide
aauaccagugguaaaugau

SEQ ID NO: 378264 - RNA, 19 nt, Artificial Sequence
  Description of Artificial Sequence: Synthetic oligonucleotide
ugacuuucuagcaucuauc

SEQ ID NO: 378265 - RNA, 19 nt, Artificial Sequence
  Description of Artificial Sequence: Synthetic oligonucleotide
uccacaggggaccuuccgg

SEQ ID NO: 378266 - RNA, 19 nt, Artificial Sequence
  Description of Artificial Sequence: Synthetic oligonucleotide
aagcguauaggcaauggga

SEQ ID NO: 378267 - RNA, 19 nt, Artificial Sequence
  Description of Artificial Sequence: Synthetic oligonucleotide
uuaagccugugaacaaccc

SEQ ID NO: 378268 - RNA, 19 nt, Artificial Sequence
  Description of Artificial Sequence: Synthetic oligonucleotide
uaucacuaacccugagcgg

SEQ ID NO: 378269 - RNA, 19 nt, Artificial Sequence
  Description of Artificial Sequence: Synthetic oligonucleotide
aguuaagccugugaacaac

SEQ ID NO: 378270 - RNA, 19 nt, Artificial Sequence
  Description of Artificial Sequence: Synthetic oligonucleotide
agcaaucuauccaagaagu

SEQ ID NO: 378271 - RNA, 19 nt, Artificial Sequence
  Description of Artificial Sequence: Synthetic oligonucleotide
aacgagcaaucaucucucg

SEQ ID NO: 378272 - RNA, 19 nt, Artificial Sequence
  Description of Artificial Sequence: Synthetic oligonucleotide
aagaguugguaaugcaaaa

SEQ ID NO: 378273 - RNA, 19 nt, Artificial Sequence
  Description of Artificial Sequence: Synthetic oligonucleotide
gagcauaacaaaagagacc

SEQ ID NO: 378274 - RNA, 19 nt, Artificial Sequence
  Description of Artificial Sequence: Synthetic oligonucleotide
gguauugacgagauaagcc

SEQ ID NO: 378275 - RNA, 19 nt, Artificial Sequence
  Description of Artificial Sequence: Synthetic oligonucleotide
cagcaaucuauccaagaag

SEQ ID NO: 378276 - RNA, 19 nt, Artificial Sequence
  Description of Artificial Sequence: Synthetic oligonucleotide
uccuacgaugccuucuucc

SEQ ID NO: 378277 - RNA, 19 nt, Artificial Sequence
  Description of Artificial Sequence: Synthetic oligonucleotide
accguagugaagacggacc

SEQ ID NO: 378278 - RNA, 19 nt, Artificial Sequence
  Description of Artificial Sequence: Synthetic oligonucleotide
cagauacuaacuccucagg

SEQ ID NO: 378279 - RNA, 19 nt, Artificial Sequence
  Description of Artificial Sequence: Synthetic oligonucleotide
uacaugagcggcugggaca

SEQ ID NO: 378280 - RNA, 19 nt, Artificial Sequence
  Description of Artificial Sequence: Synthetic oligonucleotide
cuaacugaagguaugacau

SEQ ID NO: 378281 - RNA, 19 nt, Artificial Sequence
  Description of Artificial Sequence: Synthetic oligonucleotide
uaccagauaaugaguuaca

SEQ ID NO: 378282 - RNA, 19 nt, Artificial Sequence
  Description of Artificial Sequence: Synthetic oligonucleotide
caacccacgcuucccaucg

SEQ ID NO: 378283 - RNA, 19 nt, Artificial Sequence
  Description of Artificial Sequence: Synthetic oligonucleotide
aaguauauauuggggagua

SEQ ID NO: 378284 - RNA, 19 nt, Artificial Sequence
  Description of Artificial Sequence: Synthetic oligonucleotide
accugcuuguuccuuuagg

SEQ ID NO: 378285 - RNA, 19 nt, Artificial Sequence
  Description of Artificial Sequence: Synthetic oligonucleotide
ucuucuaguguagcagaag

SEQ ID NO: 378286 - RNA, 19 nt, Artificial Sequence
  Description of Artificial Sequence: Synthetic oligonucleotide
aaaagcgcgccacacugua

SEQ ID NO: 378287 - RNA, 19 nt, Artificial Sequence
  Description of Artificial Sequence: Synthetic oligonucleotide
guuaagccugugaacaacc

SEQ ID NO: 378288 - RNA, 19 nt, Artificial Sequence
  Description of Artificial Sequence: Synthetic oligonucleotide
agaagcguauaggcaaugg

SEQ ID NO: 378289 - RNA, 19 nt, Artificial Sequence
  Description of Artificial Sequence: Synthetic oligonucleotide
cuuucacguacaugagcgg

SEQ ID NO: 378290 - RNA, 19 nt, Artificial Sequence
  Description of Artificial Sequence: Synthetic oligonucleotide
agauacaagcacaaaggga

SEQ ID NO: 378291 - RNA, 19 nt, Artificial Sequence
  Description of Artificial Sequence: Synthetic oligonucleotide
agcacuuagggcuacuguu

SEQ ID NO: 378292 - RNA, 19 nt, Artificial Sequence
  Description of Artificial Sequence: Synthetic oligonucleotide
uaaccugagacucgaucaa

SEQ ID NO: 378293 - RNA, 19 nt, Artificial Sequence
  Description of Artificial Sequence: Synthetic oligonucleotide
uuuauuugacaaagcccua

SEQ ID NO: 378294 - RNA, 19 nt, Artificial Sequence
  Description of Artificial Sequence: Synthetic oligonucleotide
cauugauagaagucuaaaa

SEQ ID NO: 378295 - RNA, 19 nt, Artificial Sequence
  Description of Artificial Sequence: Synthetic oligonucleotide
ugaacaacccacgcuuccc

SEQ ID NO: 378296 - RNA, 19 nt, Artificial Sequence
  Description of Artificial Sequence: Synthetic oligonucleotide
uggggaauaccagugguaa

SEQ ID NO: 378297 - RNA, 19 nt, Artificial Sequence
  Description of Artificial Sequence: Synthetic oligonucleotide
uuaacauacucaggucaca

SEQ ID NO: 378298 - RNA, 19 nt, Artificial Sequence
  Description of Artificial Sequence: Synthetic oligonucleotide
caguaacucagcagcacug

SEQ ID NO: 378299 - RNA, 19 nt, Artificial Sequence
  Description of Artificial Sequence: Synthetic oligonucleotide
uucccaagauuaaaugauu

SEQ ID NO: 378300 - RNA, 19 nt, Artificial Sequence
  Description of Artificial Sequence: Synthetic oligonucleotide
cuacgaugccuucuucccg

SEQ ID NO: 378301 - RNA, 19 nt, Artificial Sequence
  Description of Artificial Sequence: Synthetic oligonucleotide
ugacgagauaagccaguga

SEQ ID NO: 378302 - RNA, 19 nt, Artificial Sequence
  Description of Artificial Sequence: Synthetic oligonucleotide
ugugaacaacccacgcuuc

SEQ ID NO: 378303 - RNA, 19 nt, Artificial Sequence
  Description of Artificial Sequence: Synthetic oligonucleotide
gauacuaacuccucagguu

SEQ ID NO: 378304 - RNA, 19 nt, Artificial Sequence
  Description of Artificial Sequence: Synthetic oligonucleotide
cuacucacgagcuucaggu

SEQ ID NO: 378305 - RNA, 19 nt, Artificial Sequence
  Description of Artificial Sequence: Synthetic oligonucleotide
agaaggcaugaacaccucu

SEQ ID NO: 378306 - RNA, 19 nt, Artificial Sequence
  Description of Artificial Sequence: Synthetic oligonucleotide
guacauuacuuuugagaca

SEQ ID NO: 378307 - RNA, 19 nt, Artificial Sequence
  Description of Artificial Sequence: Synthetic oligonucleotide
ccuagaucaucuuuacuug

SEQ ID NO: 378308 - RNA, 19 nt, Artificial Sequence
  Description of Artificial Sequence: Synthetic oligonucleotide
ugccgcauugauagaaguc

SEQ ID NO: 378309 - RNA, 19 nt, Artificial Sequence
  Description of Artificial Sequence: Synthetic oligonucleotide
aagcgcgccacacuguaua

SEQ ID NO: 378310 - RNA, 19 nt, Artificial Sequence
  Description of Artificial Sequence: Synthetic oligonucleotide
gagugaucacguggaaggg

SEQ ID NO: 378311 - RNA, 19 nt, Artificial Sequence
  Description of Artificial Sequence: Synthetic oligonucleotide
agguuguaucacuaacccu

SEQ ID NO: 378312 - RNA, 19 nt, Artificial Sequence
  Description of Artificial Sequence: Synthetic oligonucleotide
guaaugaggguagcagcag

SEQ ID NO: 378313 - RNA, 19 nt, Artificial Sequence
  Description of Artificial Sequence: Synthetic oligonucleotide
uuguaguaugcaccagcaa

SEQ ID NO: 378314 - RNA, 19 nt, Artificial Sequence
  Description of Artificial Sequence: Synthetic oligonucleotide
uuguuggaggaagaggcuc

SEQ ID NO: 378315 - RNA, 19 nt, Artificial Sequence
  Description of Artificial Sequence: Synthetic oligonucleotide
cuuagacucucugccaaug

SEQ ID NO: 378316 - RNA, 19 nt, Artificial Sequence
  Description of Artificial Sequence: Synthetic oligonucleotide
augugcugagcauaacaaa

SEQ ID NO: 378317 - RNA, 19 nt, Artificial Sequence
  Description of Artificial Sequence: Synthetic oligonucleotide
uaacucggucgaaggagga

SEQ ID NO: 378318 - RNA, 19 nt, Artificial Sequence
  Description of Artificial Sequence: Synthetic oligonucleotide
agggauguguaaugagggu

SEQ ID NO: 378319 - RNA, 19 nt, Artificial Sequence
  Description of Artificial Sequence: Synthetic oligonucleotide
gggagaaaagaguugguaa

SEQ ID NO: 378320 - RNA, 19 nt, Artificial Sequence
  Description of Artificial Sequence: Synthetic oligonucleotide
acucggucgaaggaggaug

SEQ ID NO: 378321 - RNA, 19 nt, Artificial Sequence
  Description of Artificial Sequence: Synthetic oligonucleotide
gauguguaaugaggguagc

SEQ ID NO: 378322 - RNA, 19 nt, Artificial Sequence
  Description of Artificial Sequence: Synthetic oligonucleotide
ugcuugaguugaaaauuuu

SEQ ID NO: 378323 - RNA, 19 nt, Artificial Sequence
  Description of Artificial Sequence: Synthetic oligonucleotide
ugaucacguggaagggaug

SEQ ID NO: 378324 - RNA, 19 nt, Artificial Sequence
  Description of Artificial Sequence: Synthetic oligonucleotide
ucgaguugucucuuugaua

SEQ ID NO: 378325 - RNA, 19 nt, Artificial Sequence
  Description of Artificial Sequence: Synthetic oligonucleotide
agagccacaaggaaaugau

SEQ ID NO: 378326 - RNA, 19 nt, Artificial Sequence
  Description of Artificial Sequence: Synthetic oligonucleotide
gaacaacccacgcuuccca

SEQ ID NO: 378327 - RNA, 19 nt, Artificial Sequence
  Description of Artificial Sequence: Synthetic oligonucleotide
auauuucguccuauuguug

SEQ ID NO: 378328 - RNA, 19 nt, Artificial Sequence
  Description of Artificial Sequence: Synthetic oligonucleotide
ugccuaacugaagguauga

SEQ ID NO: 378329 - RNA, 19 nt, Artificial Sequence
  Description of Artificial Sequence: Synthetic oligonucleotide
acgagcaaucaucucucga

SEQ ID NO: 378330 - RNA, 19 nt, Artificial Sequence
  Description of Artificial Sequence: Synthetic oligonucleotide
ugagcacuuagggcuacug

SEQ ID NO: 378331 - RNA, 19 nt, Artificial Sequence
  Description of Artificial Sequence: Synthetic oligonucleotide
ccuacgaugccuucuuccc

SEQ ID NO: 378332 - RNA, 19 nt, Artificial Sequence
  Description of Artificial Sequence: Synthetic oligonucleotide
ucacguacaugagcggcug

SEQ ID NO: 378333 - RNA, 19 nt, Artificial Sequence
  Description of Artificial Sequence: Synthetic oligonucleotide
augggaccguagugaagac

SEQ ID NO: 378334 - RNA, 19 nt, Artificial Sequence
  Description of Artificial Sequence: Synthetic oligonucleotide
aucucagagugaucacgug

SEQ ID NO: 378335 - RNA, 19 nt, Artificial Sequence
  Description of Artificial Sequence: Synthetic oligonucleotide
ugagcacuuucacguacau

SEQ ID NO: 378336 - RNA, 19 nt, Artificial Sequence
  Description of Artificial Sequence: Synthetic oligonucleotide
aggaggcgaggaauuagac

SEQ ID NO: 378337 - RNA, 19 nt, Artificial Sequence
  Description of Artificial Sequence: Synthetic oligonucleotide
gcuacucacgagcuucagg

SEQ ID NO: 378338 - RNA, 19 nt, Artificial Sequence
  Description of Artificial Sequence: Synthetic oligonucleotide
aggcaugaacaccucugca

SEQ ID NO: 378339 - RNA, 19 nt, Artificial Sequence
  Description of Artificial Sequence: Synthetic oligonucleotide
agugaucacguggaaggga

SEQ ID NO: 378340 - RNA, 19 nt, Artificial Sequence
  Description of Artificial Sequence: Synthetic oligonucleotide
gaccguagugaagacggac

SEQ ID NO: 378341 - RNA, 19 nt, Artificial Sequence
  Description of Artificial Sequence: Synthetic oligonucleotide
cguauaggcaaugggaccg

SEQ ID NO: 378342 - RNA, 19 nt, Artificial Sequence
  Description of Artificial Sequence: Synthetic oligonucleotide
ccuaacugaagguaugaca

SEQ ID NO: 378343 - RNA, 19 nt, Artificial Sequence
  Description of Artificial Sequence: Synthetic oligonucleotide
ucggcucauauuucccgcu

SEQ ID NO: 378344 - RNA, 19 nt, Artificial Sequence
  Description of Artificial Sequence: Synthetic oligonucleotide
gaguuaagccugugaacaa

SEQ ID NO: 378345 - RNA, 19 nt, Artificial Sequence
  Description of Artificial Sequence: Synthetic oligonucleotide
auugacgagauaagccagu

SEQ ID NO: 378346 - RNA, 19 nt, Artificial Sequence
  Description of Artificial Sequence: Synthetic oligonucleotide
ugugacagcuugggaauaa

SEQ ID NO: 378347 - RNA, 19 nt, Artificial Sequence
  Description of Artificial Sequence: Synthetic oligonucleotide
auccuacgaugccuucuuc

SEQ ID NO: 378348 - RNA, 19 nt, Artificial Sequence
  Description of Artificial Sequence: Synthetic oligonucleotide
caagcgacacagccgguuc

SEQ ID NO: 378349 - RNA, 19 nt, Artificial Sequence
  Description of Artificial Sequence: Synthetic oligonucleotide
uucucaacuuaggagcauu

SEQ ID NO: 378350 - RNA, 19 nt, Artificial Sequence
  Description of Artificial Sequence: Synthetic oligonucleotide
ccugagcgggagaagaccc

SEQ ID NO: 378351 - RNA, 19 nt, Artificial Sequence
  Description of Artificial Sequence: Synthetic oligonucleotide
acaugccuaacugaaggua

SEQ ID NO: 378352 - RNA, 19 nt, Artificial Sequence
  Description of Artificial Sequence: Synthetic oligonucleotide
agcgcgccacacuguauag

SEQ ID NO: 378353 - RNA, 19 nt, Artificial Sequence
  Description of Artificial Sequence: Synthetic oligonucleotide
acacagccgguuccagauc

SEQ ID NO: 378354 - RNA, 19 nt, Artificial Sequence
  Description of Artificial Sequence: Synthetic oligonucleotide
agcccacaauacuuagacu

SEQ ID NO: 378355 - RNA, 19 nt, Artificial Sequence
  Description of Artificial Sequence: Synthetic oligonucleotide
cccauaauucugugcauug

SEQ ID NO: 378356 - RNA, 19 nt, Artificial Sequence
  Description of Artificial Sequence: Synthetic oligonucleotide
cacagccgguuccagauca

SEQ ID NO: 378357 - RNA, 19 nt, Artificial Sequence
  Description of Artificial Sequence: Synthetic oligonucleotide
gcguauaggcaaugggacc

SEQ ID NO: 378358 - RNA, 19 nt, Artificial Sequence
  Description of Artificial Sequence: Synthetic oligonucleotide
cauugggacuauggaaaug

SEQ ID NO: 378359 - RNA, 19 nt, Artificial Sequence
  Description of Artificial Sequence: Synthetic oligonucleotide
gcuacuguuaugcugcagu

SEQ ID NO: 378360 - RNA, 19 nt, Artificial Sequence
  Description of Artificial Sequence: Synthetic oligonucleotide
cugcaguaacgaaagggaa

SEQ ID NO: 378361 - RNA, 19 nt, Artificial Sequence
  Description of Artificial Sequence: Synthetic oligonucleotide
auggcacccgcggacggac

SEQ ID NO: 378362 - RNA, 19 nt, Artificial Sequence
  Description of Artificial Sequence: Synthetic oligonucleotide
ugacuggccgcguccgcca

SEQ ID NO: 378363 - RNA, 19 nt, Artificial Sequence
  Description of Artificial Sequence: Synthetic oligonucleotide
accagugguaaaugauauu

SEQ ID NO: 378364 - RNA, 19 nt, Artificial Sequence
  Description of Artificial Sequence: Synthetic oligonucleotide
caugccuaacugaagguau

SEQ ID NO: 378365 - RNA, 19 nt, Artificial Sequence
  Description of Artificial Sequence: Synthetic oligonucleotide
ccacauuaccagauaauga

SEQ ID NO: 378366 - RNA, 19 nt, Artificial Sequence
  Description of Artificial Sequence: Synthetic oligonucleotide
aacucggucgaaggaggau

SEQ ID NO: 378367 - RNA, 19 nt, Artificial Sequence
  Description of Artificial Sequence: Synthetic oligonucleotide
aguaugcaccagcaaucua

SEQ ID NO: 378368 - RNA, 19 nt, Artificial Sequence
  Description of Artificial Sequence: Synthetic oligonucleotide
acgagauaagccagugagu

SEQ ID NO: 378369 - RNA, 19 nt, Artificial Sequence
  Description of Artificial Sequence: Synthetic oligonucleotide
augccuaacugaagguaug

SEQ ID NO: 378370 - RNA, 19 nt, Artificial Sequence
  Description of Artificial Sequence: Synthetic oligonucleotide
cuuaggagcagaagcguau

SEQ ID NO: 378371 - RNA, 19 nt, Artificial Sequence
  Description of Artificial Sequence: Synthetic oligonucleotide
cuucagguuguaucacuaa

SEQ ID NO: 378372 - RNA, 19 nt, Artificial Sequence
  Description of Artificial Sequence: Synthetic oligonucleotide
cuacuguuaugcugcagua

SEQ ID NO: 378373 - RNA, 19 nt, Artificial Sequence
  Description of Artificial Sequence: Synthetic oligonucleotide
cucggucgaaggaggauga

SEQ ID NO: 378374 - RNA, 19 nt, Artificial Sequence
  Description of Artificial Sequence: Synthetic oligonucleotide
gagcaccugacuggccgcg

SEQ ID NO: 378375 - RNA, 19 nt, Artificial Sequence
  Description of Artificial Sequence: Synthetic oligonucleotide
cugugaacaacccacgcuu

SEQ ID NO: 378376 - RNA, 19 nt, Artificial Sequence
  Description of Artificial Sequence: Synthetic oligonucleotide
cuccugguaaugcuguaaa

SEQ ID NO: 378377 - RNA, 19 nt, Artificial Sequence
  Description of Artificial Sequence: Synthetic oligonucleotide
gguaaaugauauugugcua

SEQ ID NO: 378378 - RNA, 19 nt, Artificial Sequence
  Description of Artificial Sequence: Synthetic oligonucleotide
cacguacaugagcggcugg

SEQ ID NO: 378379 - RNA, 19 nt, Artificial Sequence
  Description of Artificial Sequence: Synthetic oligonucleotide
cucuucuaguguagcagaa

SEQ ID NO: 378380 - RNA, 19 nt, Artificial Sequence
  Description of Artificial Sequence: Synthetic oligonucleotide
guuugucgcacuccuggua

SEQ ID NO: 378381 - RNA, 19 nt, Artificial Sequence
  Description of Artificial Sequence: Synthetic oligonucleotide
ugacugccauaagauuaga

SEQ ID NO: 378382 - RNA, 19 nt, Artificial Sequence
  Description of Artificial Sequence: Synthetic oligonucleotide
cccgaacacagucuuggag

SEQ ID NO: 378383 - RNA, 19 nt, Artificial Sequence
  Description of Artificial Sequence: Synthetic oligonucleotide
gagcacuuagggcuacugu

SEQ ID NO: 378384 - RNA, 19 nt, Artificial Sequence
  Description of Artificial Sequence: Synthetic oligonucleotide
cgaucaacaugacaaccug

SEQ ID NO: 378385 - RNA, 19 nt, Artificial Sequence
  Description of Artificial Sequence: Synthetic oligonucleotide
uggcacccgcggacggacg

SEQ ID NO: 378386 - RNA, 19 nt, Artificial Sequence
  Description of Artificial Sequence: Synthetic oligonucleotide
uugucgcacuccugguaau

SEQ ID NO: 378387 - RNA, 19 nt, Artificial Sequence
  Description of Artificial Sequence: Synthetic oligonucleotide
cagaagcguauaggcaaug

SEQ ID NO: 378388 - RNA, 19 nt, Artificial Sequence
  Description of Artificial Sequence: Synthetic oligonucleotide
aacccacgcuucccaucga

SEQ ID NO: 378389 - RNA, 19 nt, Artificial Sequence
  Description of Artificial Sequence: Synthetic oligonucleotide
gcaugcucacacuaccuaa

SEQ ID NO: 378390 - RNA, 19 nt, Artificial Sequence
  Description of Artificial Sequence: Synthetic oligonucleotide
gcauugauagaagucuaaa

SEQ ID NO: 378391 - RNA, 19 nt, Artificial Sequence
  Description of Artificial Sequence: Synthetic oligonucleotide
agcgacacagccgguucca

SEQ ID NO: 378392 - RNA, 19 nt, Artificial Sequence
  Description of Artificial Sequence: Synthetic oligonucleotide
gcaaugggaccguagugaa

SEQ ID NO: 378393 - RNA, 19 nt, Artificial Sequence
  Description of Artificial Sequence: Synthetic oligonucleotide
agcuacucacgagcuucag

SEQ ID NO: 378394 - RNA, 19 nt, Artificial Sequence
  Description of Artificial Sequence: Synthetic oligonucleotide
acccacgcuucccaucgau

SEQ ID NO: 378395 - RNA, 19 nt, Artificial Sequence
  Description of Artificial Sequence: Synthetic oligonucleotide
gccgcauugauagaagucu

SEQ ID NO: 378396 - RNA, 19 nt, Artificial Sequence
  Description of Artificial Sequence: Synthetic oligonucleotide
aaagcgcgccacacuguau

SEQ ID NO: 378397 - RNA, 19 nt, Artificial Sequence
  Description of Artificial Sequence: Synthetic oligonucleotide
ggacuuugauccacauuac

SEQ ID NO: 378398 - RNA, 19 nt, Artificial Sequence
  Description of Artificial Sequence: Synthetic oligonucleotide
gugaucacguggaagggau

SEQ ID NO: 378399 - RNA, 19 nt, Artificial Sequence
  Description of Artificial Sequence: Synthetic oligonucleotide
cacguggaagggaugugua

SEQ ID NO: 378400 - RNA, 19 nt, Artificial Sequence
  Description of Artificial Sequence: Synthetic oligonucleotide
cucgaguugucucuuugau

SEQ ID NO: 378401 - RNA, 19 nt, Artificial Sequence
  Description of Artificial Sequence: Synthetic oligonucleotide
ggcaaaguaccagugaauu

SEQ ID NO: 378402 - RNA, 19 nt, Artificial Sequence
  Description of Artificial Sequence: Synthetic oligonucleotide
cacuguccagugcauaggu

SEQ ID NO: 378403 - RNA, 19 nt, Artificial Sequence
  Description of Artificial Sequence: Synthetic oligonucleotide
ggcgaggaauuagacccgc

SEQ ID NO: 378404 - RNA, 19 nt, Artificial Sequence
  Description of Artificial Sequence: Synthetic oligonucleotide
gauggcacccgcggacgga

SEQ ID NO: 378405 - RNA, 19 nt, Artificial Sequence
  Description of Artificial Sequence: Synthetic oligonucleotide
ggacuauggaaaugucacu

SEQ ID NO: 378406 - RNA, 19 nt, Artificial Sequence
  Description of Artificial Sequence: Synthetic oligonucleotide
cauagguauugacgagaua

SEQ ID NO: 378407 - RNA, 19 nt, Artificial Sequence
  Description of Artificial Sequence: Synthetic oligonucleotide
cuuugauaacucggucgaa

SEQ ID NO: 378408 - RNA, 19 nt, Artificial Sequence
  Description of Artificial Sequence: Synthetic oligonucleotide
aucucucgaguugucucuu

SEQ ID NO: 378409 - RNA, 19 nt, Artificial Sequence
  Description of Artificial Sequence: Synthetic oligonucleotide
gccuaacugaagguaugac

SEQ ID NO: 378410 - RNA, 19 nt, Artificial Sequence
  Description of Artificial Sequence: Synthetic oligonucleotide
cugccgcauugauagaagu

SEQ ID NO: 378411 - RNA, 19 nt, Artificial Sequence
  Description of Artificial Sequence: Synthetic oligonucleotide
ggaaaucaagagcuucuuu

SEQ ID NO: 378412 - RNA, 19 nt, Artificial Sequence
  Description of Artificial Sequence: Synthetic oligonucleotide
cacuuaggagcagaagcgu

SEQ ID NO: 378413 - RNA, 19 nt, Artificial Sequence
  Description of Artificial Sequence: Synthetic oligonucleotide
gcuaagcuacucacgagcu

SEQ ID NO: 378414 - RNA, 19 nt, Artificial Sequence
  Description of Artificial Sequence: Synthetic oligonucleotide
cacuuagggcuacuguuau

SEQ ID NO: 378415 - RNA, 19 nt, Artificial Sequence
  Description of Artificial Sequence: Synthetic oligonucleotide
cccgcggacggacggacag

SEQ ID NO: 378416 - RNA, 19 nt, Artificial Sequence
  Description of Artificial Sequence: Synthetic oligonucleotide
cuaagcuacucacgagcuu

SEQ ID NO: 378417 - RNA, 19 nt, Artificial Sequence
  Description of Artificial Sequence: Synthetic oligonucleotide
ccaaggacucccgaacaca

SEQ ID NO: 378418 - RNA, 19 nt, Artificial Sequence
  Description of Artificial Sequence: Synthetic oligonucleotide
cguguggacuuugauccac

SEQ ID NO: 378419 - RNA, 19 nt, Artificial Sequence
  Description of Artificial Sequence: Synthetic oligonucleotide
cgagauaagccagugaguu

SEQ ID NO: 378420 - RNA, 19 nt, Artificial Sequence
  Description of Artificial Sequence: Synthetic oligonucleotide
gcaccugacuggccgcguc

SEQ ID NO: 378421 - RNA, 19 nt, Artificial Sequence
  Description of Artificial Sequence: Synthetic oligonucleotide
ccgcauugauagaagucua

SEQ ID NO: 378422 - RNA, 19 nt, Artificial Sequence
  Description of Artificial Sequence: Synthetic oligonucleotide
accaagcgacacagccggu

SEQ ID NO: 378423 - RNA, 19 nt, Artificial Sequence
  Description of Artificial Sequence: Synthetic oligonucleotide
gggcgccggcuucacuagc

SEQ ID NO: 378424 - RNA, 19 nt, Artificial Sequence
  Description of Artificial Sequence: Synthetic oligonucleotide
gcagaagcguauaggcaau

SEQ ID NO: 378425 - RNA, 19 nt, Artificial Sequence
  Description of Artificial Sequence: Synthetic oligonucleotide
gcgaggaauuagacccgca

SEQ ID NO: 378426 - RNA, 19 nt, Artificial Sequence
  Description of Artificial Sequence: Synthetic oligonucleotide
acccgcggacggacggaca

SEQ ID NO: 378427 - RNA, 19 nt, Artificial Sequence
  Description of Artificial Sequence: Synthetic oligonucleotide
gacuggccgcguccgccau

SEQ ID NO: 378428 - RNA, 19 nt, Artificial Sequence
  Description of Artificial Sequence: Synthetic oligonucleotide
gggagguagacuggugguu

SEQ ID NO: 378429 - RNA, 19 nt, Artificial Sequence
  Description of Artificial Sequence: Synthetic oligonucleotide
ccaagcgacacagccgguu

SEQ ID NO: 378430 - RNA, 19 nt, Artificial Sequence
  Description of Artificial Sequence: Synthetic oligonucleotide
aaagauacaacucagacua

SEQ ID NO: 378431 - RNA, 19 nt, Artificial Sequence
  Description of Artificial Sequence: Synthetic oligonucleotide
aagaaugagccacagacac

SEQ ID NO: 378432 - RNA, 19 nt, Artificial Sequence
  Description of Artificial Sequence: Synthetic oligonucleotide
aacgcuagcacagucaugc

SEQ ID NO: 378433 - RNA, 19 nt, Artificial Sequence
  Description of Artificial Sequence: Synthetic oligonucleotide
uugagaaacggcuauaucc

SEQ ID NO: 378434 - RNA, 19 nt, Artificial Sequence
  Description of Artificial Sequence: Synthetic oligonucleotide
uguucugcggcauuaaagg

SEQ ID NO: 378435 - RNA, 19 nt, Artificial Sequence
  Description of Artificial Sequence: Synthetic oligonucleotide
uguguguuuauuuacaagu

SEQ ID NO: 378436 - RNA, 19 nt, Artificial Sequence
  Description of Artificial Sequence: Synthetic oligonucleotide
uauauucauagguaaaacc

SEQ ID NO: 378437 - RNA, 19 nt, Artificial Sequence
  Description of Artificial Sequence: Synthetic oligonucleotide
gaaauagccauauauuuac

SEQ ID NO: 378438 - RNA, 19 nt, Artificial Sequence
  Description of Artificial Sequence: Synthetic oligonucleotide
aaaggcgcaacucuaaucu

SEQ ID NO: 378439 - RNA, 19 nt, Artificial Sequence
  Description of Artificial Sequence: Synthetic oligonucleotide
uacuaaaucucaagaaccg

SEQ ID NO: 378440 - RNA, 19 nt, Artificial Sequence
  Description of Artificial Sequence: Synthetic oligonucleotide
aauccauuauaaucuuuac

SEQ ID NO: 378441 - RNA, 19 nt, Artificial Sequence
  Description of Artificial Sequence: Synthetic oligonucleotide
cuagacuuggcucugaccc

SEQ ID NO: 378442 - RNA, 19 nt, Artificial Sequence
  Description of Artificial Sequence: Synthetic oligonucleotide
cuaaauauaucuacucuag

SEQ ID NO: 378443 - RNA, 19 nt, Artificial Sequence
  Description of Artificial Sequence: Synthetic oligonucleotide
gagaggguuauauucauag

SEQ ID NO: 378444 - RNA, 19 nt, Artificial Sequence
  Description of Artificial Sequence: Synthetic oligonucleotide
cucaagaaccguaaaauag

SEQ ID NO: 378445 - RNA, 19 nt, Artificial Sequence
  Description of Artificial Sequence: Synthetic oligonucleotide
ugcuuuacaauccuugccc

SEQ ID NO: 378446 - RNA, 19 nt, Artificial Sequence
  Description of Artificial Sequence: Synthetic oligonucleotide
aauaaugggaacaugcacu

SEQ ID NO: 378447 - RNA, 19 nt, Artificial Sequence
  Description of Artificial Sequence: Synthetic oligonucleotide
uguauauauguacaggguc

SEQ ID NO: 378448 - RNA, 19 nt, Artificial Sequence
  Description of Artificial Sequence: Synthetic oligonucleotide
acucaagcuauaucuaagc

SEQ ID NO: 378449 - RNA, 19 nt, Artificial Sequence
  Description of Artificial Sequence: Synthetic oligonucleotide
agauggauggcucuugaac

SEQ ID NO: 378450 - RNA, 19 nt, Artificial Sequence
  Description of Artificial Sequence: Synthetic oligonucleotide
acucagaccauccaaauga

SEQ ID NO: 378451 - RNA, 19 nt, Artificial Sequence
  Description of Artificial Sequence: Synthetic oligonucleotide
agaaccguaaaauaggaaa

SEQ ID NO: 378452 - RNA, 19 nt, Artificial Sequence
  Description of Artificial Sequence: Synthetic oligonucleotide
uguagcaccgaugugagcc

SEQ ID NO: 378453 - RNA, 19 nt, Artificial Sequence
  Description of Artificial Sequence: Synthetic oligonucleotide
aaugcugugucucuuggga

SEQ ID NO: 378454 - RNA, 19 nt, Artificial Sequence
  Description of Artificial Sequence: Synthetic oligonucleotide
aguaccaggaguguuaggg

SEQ ID NO: 378455 - RNA, 19 nt, Artificial Sequence
  Description of Artificial Sequence: Synthetic oligonucleotide
guuuucuucggucuguggg

SEQ ID NO: 378456 - RNA, 19 nt, Artificial Sequence
  Description of Artificial Sequence: Synthetic oligonucleotide
ucuagcuuguguagcaccg

SEQ ID NO: 378457 - RNA, 19 nt, Artificial Sequence
  Description of Artificial Sequence: Synthetic oligonucleotide
auaaugggaacaugcacuc

SEQ ID NO: 378458 - RNA, 19 nt, Artificial Sequence
  Description of Artificial Sequence: Synthetic oligonucleotide
ucgaaaagauacaacucag

SEQ ID NO: 378459 - RNA, 19 nt, Artificial Sequence
  Description of Artificial Sequence: Synthetic oligonucleotide
gaggauaguggguuggugg

SEQ ID NO: 378460 - RNA, 19 nt, Artificial Sequence
  Description of Artificial Sequence: Synthetic oligonucleotide
aagacuuuaggggaaacug

SEQ ID NO: 378461 - RNA, 19 nt, Artificial Sequence
  Description of Artificial Sequence: Synthetic oligonucleotide
gaaacugaggcucccaccc

SEQ ID NO: 378462 - RNA, 19 nt, Artificial Sequence
  Description of Artificial Sequence: Synthetic oligonucleotide
auggcugaguauuaucggc

SEQ ID NO: 378463 - RNA, 19 nt, Artificial Sequence
  Description of Artificial Sequence: Synthetic oligonucleotide
ucauagguaaaaccccagg

SEQ ID NO: 378464 - RNA, 19 nt, Artificial Sequence
  Description of Artificial Sequence: Synthetic oligonucleotide
gaguguuagggccagacug

SEQ ID NO: 378465 - RNA, 19 nt, Artificial Sequence
  Description of Artificial Sequence: Synthetic oligonucleotide
uccauuagaaauguguucu

SEQ ID NO: 378466 - RNA, 19 nt, Artificial Sequence
  Description of Artificial Sequence: Synthetic oligonucleotide
uaaaaccccaggcaacagg

SEQ ID NO: 378467 - RNA, 19 nt, Artificial Sequence
  Description of Artificial Sequence: Synthetic oligonucleotide
ucucucuaaauauaucuac

SEQ ID NO: 378468 - RNA, 19 nt, Artificial Sequence
  Description of Artificial Sequence: Synthetic oligonucleotide
aaucucaagaaccguaaaa

SEQ ID NO: 378469 - RNA, 19 nt, Artificial Sequence
  Description of Artificial Sequence: Synthetic oligonucleotide
cauagguaaaaccccaggc

SEQ ID NO: 378470 - RNA, 19 nt, Artificial Sequence
  Description of Artificial Sequence: Synthetic oligonucleotide
ucuacucuagcuuguguag

SEQ ID NO: 378471 - RNA, 19 nt, Artificial Sequence
  Description of Artificial Sequence: Synthetic oligonucleotide
aagcccuaggcacagaggu

SEQ ID NO: 378472 - RNA, 19 nt, Artificial Sequence
  Description of Artificial Sequence: Synthetic oligonucleotide
guacuaaaucucaagaacc

SEQ ID NO: 378473 - RNA, 19 nt, Artificial Sequence
  Description of Artificial Sequence: Synthetic oligonucleotide
auagguaaaaccccaggca

SEQ ID NO: 378474 - RNA, 19 nt, Artificial Sequence
  Description of Artificial Sequence: Synthetic oligonucleotide
uugucugucacucgcaagu

SEQ ID NO: 378475 - RNA, 19 nt, Artificial Sequence
  Description of Artificial Sequence: Synthetic oligonucleotide
gauggcugaguauuaucgg

SEQ ID NO: 378476 - RNA, 19 nt, Artificial Sequence
  Description of Artificial Sequence: Synthetic oligonucleotide
auagccauauauuuacaca

SEQ ID NO: 378477 - RNA, 19 nt, Artificial Sequence
  Description of Artificial Sequence: Synthetic oligonucleotide
cuauaucuaagcugaagug

SEQ ID NO: 378478 - RNA, 19 nt, Artificial Sequence
  Description of Artificial Sequence: Synthetic oligonucleotide
gauggauggcucuugaaca

SEQ ID NO: 378479 - RNA, 19 nt, Artificial Sequence
  Description of Artificial Sequence: Synthetic oligonucleotide
ugcaaacugguccagcccc

SEQ ID NO: 378480 - RNA, 19 nt, Artificial Sequence
  Description of Artificial Sequence: Synthetic oligonucleotide
aagcaguacccagaugucc

SEQ ID NO: 378481 - RNA, 19 nt, Artificial Sequence
  Description of Artificial Sequence: Synthetic oligonucleotide
ucccuugaaaagcaguacc

SEQ ID NO: 378482 - RNA, 19 nt, Artificial Sequence
  Description of Artificial Sequence: Synthetic oligonucleotide
aaccuaaaggcgcaacucu

SEQ ID NO: 378483 - RNA, 19 nt, Artificial Sequence
  Description of Artificial Sequence: Synthetic oligonucleotide
guauuaucggcucugccgc

SEQ ID NO: 378484 - RNA, 19 nt, Artificial Sequence
  Description of Artificial Sequence: Synthetic oligonucleotide
ucagacuaaacgcuagcac

SEQ ID NO: 378485 - RNA, 19 nt, Artificial Sequence
  Description of Artificial Sequence: Synthetic oligonucleotide
uagguaaaaccccaggcaa

SEQ ID NO: 378486 - RNA, 19 nt, Artificial Sequence
  Description of Artificial Sequence: Synthetic oligonucleotide
aggaaauagccauauauuu

SEQ ID NO: 378487 - RNA, 19 nt, Artificial Sequence
  Description of Artificial Sequence: Synthetic oligonucleotide
ugagccaccagauccaaac

SEQ ID NO: 378488 - RNA, 19 nt, Artificial Sequence
  Description of Artificial Sequence: Synthetic oligonucleotide
uguguagcaccgaugugag

SEQ ID NO: 378489 - RNA, 19 nt, Artificial Sequence
  Description of Artificial Sequence: Synthetic oligonucleotide
aauaucuuucucucucuaa

SEQ ID NO: 378490 - RNA, 19 nt, Artificial Sequence
  Description of Artificial Sequence: Synthetic oligonucleotide
ugugccugggauucaaugc

SEQ ID NO: 378491 - RNA, 19 nt, Artificial Sequence
  Description of Artificial Sequence: Synthetic oligonucleotide
ucaaguaacuguacagcac

SEQ ID NO: 378492 - RNA, 19 nt, Artificial Sequence
  Description of Artificial Sequence: Synthetic oligonucleotide
ucuuuacaacacuugcaag

SEQ ID NO: 378493 - RNA, 19 nt, Artificial Sequence
  Description of Artificial Sequence: Synthetic oligonucleotide
ucugcggcauuaaaggaca

SEQ ID NO: 378494 - RNA, 19 nt, Artificial Sequence
  Description of Artificial Sequence: Synthetic oligonucleotide
acuaaacgcuagcacaguc

SEQ ID NO: 378495 - RNA, 19 nt, Artificial Sequence
  Description of Artificial Sequence: Synthetic oligonucleotide
cuuguuguggggaaaggug

SEQ ID NO: 378496 - RNA, 19 nt, Artificial Sequence
  Description of Artificial Sequence: Synthetic oligonucleotide
aaguucgaaaagauacaac

SEQ ID NO: 378497 - RNA, 19 nt, Artificial Sequence
  Description of Artificial Sequence: Synthetic oligonucleotide
agcaggauuucuuguuccc

SEQ ID NO: 378498 - RNA, 19 nt, Artificial Sequence
  Description of Artificial Sequence: Synthetic oligonucleotide
ucgaccuccagucccuugg

SEQ ID NO: 378499 - RNA, 19 nt, Artificial Sequence
  Description of Artificial Sequence: Synthetic oligonucleotide
uucugcggcauuaaaggac

SEQ ID NO: 378500 - RNA, 19 nt, Artificial Sequence
  Description of Artificial Sequence: Synthetic oligonucleotide
uauuuacacaucugauggc

SEQ ID NO: 378501 - RNA, 19 nt, Artificial Sequence
  Description of Artificial Sequence: Synthetic oligonucleotide
cuaggauuacagagggugg

SEQ ID NO: 378502 - RNA, 19 nt, Artificial Sequence
  Description of Artificial Sequence: Synthetic oligonucleotide
uaaacgcuagcacagucau

SEQ ID NO: 378503 - RNA, 19 nt, Artificial Sequence
  Description of Artificial Sequence: Synthetic oligonucleotide
uaaagggaguguucugcgg

SEQ ID NO: 378504 - RNA, 19 nt, Artificial Sequence
  Description of Artificial Sequence: Synthetic oligonucleotide
uuuacacaucugauggcug

SEQ ID NO: 378505 - RNA, 19 nt, Artificial Sequence
  Description of Artificial Sequence: Synthetic oligonucleotide
gacuuuaggggaaacugag

SEQ ID NO: 378506 - RNA, 19 nt, Artificial Sequence
  Description of Artificial Sequence: Synthetic oligonucleotide
agcaucuaccacccagugc

SEQ ID NO: 378507 - RNA, 19 nt, Artificial Sequence
  Description of Artificial Sequence: Synthetic oligonucleotide
agaggguuauauucauagg

SEQ ID NO: 378508 - RNA, 19 nt, Artificial Sequence
  Description of Artificial Sequence: Synthetic oligonucleotide
uuacacaucugauggcuga

SEQ ID NO: 378509 - RNA, 19 nt, Artificial Sequence
  Description of Artificial Sequence: Synthetic oligonucleotide
uuugccuagcuguugucug

SEQ ID NO: 378510 - RNA, 19 nt, Artificial Sequence
  Description of Artificial Sequence: Synthetic oligonucleotide
gaggguuauauucauaggu

SEQ ID NO: 378511 - RNA, 19 nt, Artificial Sequence
  Description of Artificial Sequence: Synthetic oligonucleotide
accguaaaauaggaaauag

SEQ ID NO: 378512 - RNA, 19 nt, Artificial Sequence
  Description of Artificial Sequence: Synthetic oligonucleotide
agcaguacccagauguccc

SEQ ID NO: 378513 - RNA, 19 nt, Artificial Sequence
  Description of Artificial Sequence: Synthetic oligonucleotide
uuaggggaaacugaggcuc

SEQ ID NO: 378514 - RNA, 19 nt, Artificial Sequence
  Description of Artificial Sequence: Synthetic oligonucleotide
uugccaagcagcaaauauc

SEQ ID NO: 378515 - RNA, 19 nt, Artificial Sequence
  Description of Artificial Sequence: Synthetic oligonucleotide
guaaaauaggaaauagcca

SEQ ID NO: 378516 - RNA, 19 nt, Artificial Sequence
  Description of Artificial Sequence: Synthetic oligonucleotide
cuaaucaugggcuucaccu

SEQ ID NO: 378517 - RNA, 19 nt, Artificial Sequence
  Description of Artificial Sequence: Synthetic oligonucleotide
uuuaggggaaacugaggcu

SEQ ID NO: 378518 - RNA, 19 nt, Artificial Sequence
  Description of Artificial Sequence: Synthetic oligonucleotide
uaucuaagcugaaguggag

SEQ ID NO: 378519 - RNA, 19 nt, Artificial Sequence
  Description of Artificial Sequence: Synthetic oligonucleotide
gcagcaaauauccaugggc

SEQ ID NO: 378520 - RNA, 19 nt, Artificial Sequence
  Description of Artificial Sequence: Synthetic oligonucleotide
uacucagaccauccaaaug

SEQ ID NO: 378521 - RNA, 19 nt, Artificial Sequence
  Description of Artificial Sequence: Synthetic oligonucleotide
uggucuacucagaccaucc

SEQ ID NO: 378522 - RNA, 19 nt, Artificial Sequence
  Description of Artificial Sequence: Synthetic oligonucleotide
accgaugugagccaccaga

SEQ ID NO: 378523 - RNA, 19 nt, Artificial Sequence
  Description of Artificial Sequence: Synthetic oligonucleotide
acaauccuugccccagggc

SEQ ID NO: 378524 - RNA, 19 nt, Artificial Sequence
  Description of Artificial Sequence: Synthetic oligonucleotide
auauguacaggguccauua

SEQ ID NO: 378525 - RNA, 19 nt, Artificial Sequence
  Description of Artificial Sequence: Synthetic oligonucleotide
cuuaauguguguuuauuua

SEQ ID NO: 378526 - RNA, 19 nt, Artificial Sequence
  Description of Artificial Sequence: Synthetic oligonucleotide
aauggccgaggccuggucu

SEQ ID NO: 378527 - RNA, 19 nt, Artificial Sequence
  Description of Artificial Sequence: Synthetic oligonucleotide
aaaucucaagaaccguaaa

SEQ ID NO: 378528 - RNA, 19 nt, Artificial Sequence
  Description of Artificial Sequence: Synthetic oligonucleotide
aguuuaaucucuccuuaau

SEQ ID NO: 378529 - RNA, 19 nt, Artificial Sequence
  Description of Artificial Sequence: Synthetic oligonucleotide
gacgccaggaacugcaaac

SEQ ID NO: 378530 - RNA, 19 nt, Artificial Sequence
  Description of Artificial Sequence: Synthetic oligonucleotide
auaucuaagcugaagugga

SEQ ID NO: 378531 - RNA, 19 nt, Artificial Sequence
  Description of Artificial Sequence: Synthetic oligonucleotide
ucacucgcaagugaggucu

SEQ ID NO: 378532 - RNA, 19 nt, Artificial Sequence
  Description of Artificial Sequence: Synthetic oligonucleotide
agacuaaacgcuagcacag

SEQ ID NO: 378533 - RNA, 19 nt, Artificial Sequence
  Description of Artificial Sequence: Synthetic oligonucleotide
cucuguaccgaaguugggg

SEQ ID NO: 378534 - RNA, 19 nt, Artificial Sequence
  Description of Artificial Sequence: Synthetic oligonucleotide
uaaaggcgcaacucuaauc

SEQ ID NO: 378535 - RNA, 19 nt, Artificial Sequence
  Description of Artificial Sequence: Synthetic oligonucleotide
agaggccaccucuuuuccc

SEQ ID NO: 378536 - RNA, 19 nt, Artificial Sequence
  Description of Artificial Sequence: Synthetic oligonucleotide
uguaucaacagagguugcu

SEQ ID NO: 378537 - RNA, 19 nt, Artificial Sequence
  Description of Artificial Sequence: Synthetic oligonucleotide
cuauauccaggcuggcuag

SEQ ID NO: 378538 - RNA, 19 nt, Artificial Sequence
  Description of Artificial Sequence: Synthetic oligonucleotide
gagaaacggcuauauccag

SEQ ID NO: 378539 - RNA, 19 nt, Artificial Sequence
  Description of Artificial Sequence: Synthetic oligonucleotide
aagguggacacagcucgac

SEQ ID NO: 378540 - RNA, 19 nt, Artificial Sequence
  Description of Artificial Sequence: Synthetic oligonucleotide
aucagcccaaagaaugagc

SEQ ID NO: 378541 - RNA, 19 nt, Artificial Sequence
  Description of Artificial Sequence: Synthetic oligonucleotide
acggcaggauggcaguacc

SEQ ID NO: 378542 - RNA, 19 nt, Artificial Sequence
  Description of Artificial Sequence: Synthetic oligonucleotide
uauccuccggagcuccacg

SEQ ID NO: 378543 - RNA, 19 nt, Artificial Sequence
  Description of Artificial Sequence: Synthetic oligonucleotide
uucuaucugaagcccacau

SEQ ID NO: 378544 - RNA, 19 nt, Artificial Sequence
  Description of Artificial Sequence: Synthetic oligonucleotide
ucccucaaguaacuguaca

SEQ ID NO: 378545 - RNA, 19 nt, Artificial Sequence
  Description of Artificial Sequence: Synthetic oligonucleotide
uuagggccagacuggcugg

SEQ ID NO: 378546 - RNA, 19 nt, Artificial Sequence
  Description of Artificial Sequence: Synthetic oligonucleotide
aucuacucuagcuugugua

SEQ ID NO: 378547 - RNA, 19 nt, Artificial Sequence
  Description of Artificial Sequence: Synthetic oligonucleotide
ccccauagcaaccuaaagg

SEQ ID NO: 378548 - RNA, 19 nt, Artificial Sequence
  Description of Artificial Sequence: Synthetic oligonucleotide
cuaaaucucaagaaccgua

SEQ ID NO: 378549 - RNA, 19 nt, Artificial Sequence
  Description of Artificial Sequence: Synthetic oligonucleotide
aguuagcugucccuuaaaa

SEQ ID NO: 378550 - RNA, 19 nt, Artificial Sequence
  Description of Artificial Sequence: Synthetic oligonucleotide
auggcucuugaacaccaag

SEQ ID NO: 378551 - RNA, 19 nt, Artificial Sequence
  Description of Artificial Sequence: Synthetic oligonucleotide
uaucuacucuagcuugugu

SEQ ID NO: 378552 - RNA, 19 nt, Artificial Sequence
  Description of Artificial Sequence: Synthetic oligonucleotide
agaaugagccacagacacc

SEQ ID NO: 378553 - RNA, 19 nt, Artificial Sequence
  Description of Artificial Sequence: Synthetic oligonucleotide
guaacuguacagcacccca

SEQ ID NO: 378554 - RNA, 19 nt, Artificial Sequence
  Description of Artificial Sequence: Synthetic oligonucleotide
uucuaucucggccccucag

SEQ ID NO: 378555 - RNA, 19 nt, Artificial Sequence
  Description of Artificial Sequence: Synthetic oligonucleotide
agcuauaucuaagcugaag

SEQ ID NO: 378556 - RNA, 19 nt, Artificial Sequence
  Description of Artificial Sequence: Synthetic oligonucleotide
gcggggaauaaauaauggg

SEQ ID NO: 378557 - RNA, 19 nt, Artificial Sequence
  Description of Artificial Sequence: Synthetic oligonucleotide
aaggcgcaacucuaaucug

SEQ ID NO: 378558 - RNA, 19 nt, Artificial Sequence
  Description of Artificial Sequence: Synthetic oligonucleotide
cuaaacgcuagcacaguca

SEQ ID NO: 378559 - RNA, 19 nt, Artificial Sequence
  Description of Artificial Sequence: Synthetic oligonucleotide
ggcaacaggggcuauugag

SEQ ID NO: 378560 - RNA, 19 nt, Artificial Sequence
  Description of Artificial Sequence: Synthetic oligonucleotide
acggcuauauccaggcugg

SEQ ID NO: 378561 - RNA, 19 nt, Artificial Sequence
  Description of Artificial Sequence: Synthetic oligonucleotide
uaguuuaaucucuccuuaa

SEQ ID NO: 378562 - RNA, 19 nt, Artificial Sequence
  Description of Artificial Sequence: Synthetic oligonucleotide
uuacaacacuugcaaguuc

SEQ ID NO: 378563 - RNA, 19 nt, Artificial Sequence
  Description of Artificial Sequence: Synthetic oligonucleotide
ggccuaggauuacagaggg

SEQ ID NO: 378564 - RNA, 19 nt, Artificial Sequence
  Description of Artificial Sequence: Synthetic oligonucleotide
aaccguaaaauaggaaaua

SEQ ID NO: 378565 - RNA, 19 nt, Artificial Sequence
  Description of Artificial Sequence: Synthetic oligonucleotide
acagcuaaucaugggcuuc

SEQ ID NO: 378566 - RNA, 19 nt, Artificial Sequence
  Description of Artificial Sequence: Synthetic oligonucleotide
aacagagguugcuggccug

SEQ ID NO: 378567 - RNA, 19 nt, Artificial Sequence
  Description of Artificial Sequence: Synthetic oligonucleotide
agguaaaaccccaggcaac

SEQ ID NO: 378568 - RNA, 19 nt, Artificial Sequence
  Description of Artificial Sequence: Synthetic oligonucleotide
caacucuaaucugaccucc

SEQ ID NO: 378569 - RNA, 19 nt, Artificial Sequence
  Description of Artificial Sequence: Synthetic oligonucleotide
acuaaaucucaagaaccgu

SEQ ID NO: 378570 - RNA, 19 nt, Artificial Sequence
  Description of Artificial Sequence: Synthetic oligonucleotide
ggucuggccuucuaucucg

SEQ ID NO: 378571 - RNA, 19 nt, Artificial Sequence
  Description of Artificial Sequence: Synthetic oligonucleotide
agaccauccaaaugaccgu

SEQ ID NO: 378572 - RNA, 19 nt, Artificial Sequence
  Description of Artificial Sequence: Synthetic oligonucleotide
ugaguauuaucggcucugc

SEQ ID NO: 378573 - RNA, 19 nt, Artificial Sequence
  Description of Artificial Sequence: Synthetic oligonucleotide
uagacuuggcucugacccc

SEQ ID NO: 378574 - RNA, 19 nt, Artificial Sequence
  Description of Artificial Sequence: Synthetic oligonucleotide
acaggguccauuagaaaug

SEQ ID NO: 378575 - RNA, 19 nt, Artificial Sequence
  Description of Artificial Sequence: Synthetic oligonucleotide
auauccaggcuggcuagac

SEQ ID NO: 378576 - RNA, 19 nt, Artificial Sequence
  Description of Artificial Sequence: Synthetic oligonucleotide
gcaagugaggucugcagcc

SEQ ID NO: 378577 - RNA, 19 nt, Artificial Sequence
  Description of Artificial Sequence: Synthetic oligonucleotide
ccagaugucccacuguggg

SEQ ID NO: 378578 - RNA, 19 nt, Artificial Sequence
  Description of Artificial Sequence: Synthetic oligonucleotide
uggcucauuuugcccagcc

SEQ ID NO: 378579 - RNA, 19 nt, Artificial Sequence
  Description of Artificial Sequence: Synthetic oligonucleotide
ccguaaaauaggaaauagc

SEQ ID NO: 378580 - RNA, 19 nt, Artificial Sequence
  Description of Artificial Sequence: Synthetic oligonucleotide
uauauguacaggguccauu

SEQ ID NO: 378581 - RNA, 19 nt, Artificial Sequence
  Description of Artificial Sequence: Synthetic oligonucleotide
gguacuggaguagaggcug

SEQ ID NO: 378582 - RNA, 19 nt, Artificial Sequence
  Description of Artificial Sequence: Synthetic oligonucleotide
gcuauaucuaagcugaagu

SEQ ID NO: 378583 - RNA, 19 nt, Artificial Sequence
  Description of Artificial Sequence: Synthetic oligonucleotide
aaacugaggcucccaccca

SEQ ID NO: 378584 - RNA, 19 nt, Artificial Sequence
  Description of Artificial Sequence: Synthetic oligonucleotide
gagggguuugccuagcugu

SEQ ID NO: 378585 - RNA, 19 nt, Artificial Sequence
  Description of Artificial Sequence: Synthetic oligonucleotide
agauacaacucagacuaaa

SEQ ID NO: 378586 - RNA, 19 nt, Artificial Sequence
  Description of Artificial Sequence: Synthetic oligonucleotide
cugucacucgcaagugagg

SEQ ID NO: 378587 - RNA, 19 nt, Artificial Sequence
  Description of Artificial Sequence: Synthetic oligonucleotide
uguugcuuguuguggggaa

SEQ ID NO: 378588 - RNA, 19 nt, Artificial Sequence
  Description of Artificial Sequence: Synthetic oligonucleotide
cuacucuagcuuguguagc

SEQ ID NO: 378589 - RNA, 19 nt, Artificial Sequence
  Description of Artificial Sequence: Synthetic oligonucleotide
aggggcuauugagaaacgg

SEQ ID NO: 378590 - RNA, 19 nt, Artificial Sequence
  Description of Artificial Sequence: Synthetic oligonucleotide
gcuggaguaguguuuggcc

SEQ ID NO: 378591 - RNA, 19 nt, Artificial Sequence
  Description of Artificial Sequence: Synthetic oligonucleotide
ugaaucugaggguggugaa

SEQ ID NO: 378592 - RNA, 19 nt, Artificial Sequence
  Description of Artificial Sequence: Synthetic oligonucleotide
ggacaagcagaugucagag

SEQ ID NO: 378593 - RNA, 19 nt, Artificial Sequence
  Description of Artificial Sequence: Synthetic oligonucleotide
cugaguauuaucggcucug

SEQ ID NO: 378594 - RNA, 19 nt, Artificial Sequence
  Description of Artificial Sequence: Synthetic oligonucleotide
cuggaguaguguuuggcca

SEQ ID NO: 378595 - RNA, 19 nt, Artificial Sequence
  Description of Artificial Sequence: Synthetic oligonucleotide
ugucucuugggaacacauc

SEQ ID NO: 378596 - RNA, 19 nt, Artificial Sequence
  Description of Artificial Sequence: Synthetic oligonucleotide
ugugcgugguccaggcaga

SEQ ID NO: 378597 - RNA, 19 nt, Artificial Sequence
  Description of Artificial Sequence: Synthetic oligonucleotide
agcaaccuaaaggcgcaac

SEQ ID NO: 378598 - RNA, 19 nt, Artificial Sequence
  Description of Artificial Sequence: Synthetic oligonucleotide
gagcaucuaccacccagug

SEQ ID NO: 378599 - RNA, 19 nt, Artificial Sequence
  Description of Artificial Sequence: Synthetic oligonucleotide
acucuagcuuguguagcac

SEQ ID NO: 378600 - RNA, 19 nt, Artificial Sequence
  Description of Artificial Sequence: Synthetic oligonucleotide
auagcaaccuaaaggcgca

SEQ ID NO: 378601 - RNA, 19 nt, Artificial Sequence
  Description of Artificial Sequence: Synthetic oligonucleotide
cugauggcugaguauuauc

SEQ ID NO: 378602 - RNA, 19 nt, Artificial Sequence
  Description of Artificial Sequence: Synthetic oligonucleotide
auccuccggagcuccacgg

SEQ ID NO: 378603 - RNA, 19 nt, Artificial Sequence
  Description of Artificial Sequence: Synthetic oligonucleotide
agacuuuaggggaaacuga

SEQ ID NO: 378604 - RNA, 19 nt, Artificial Sequence
  Description of Artificial Sequence: Synthetic oligonucleotide
gugaaucugagggugguga

SEQ ID NO: 378605 - RNA, 19 nt, Artificial Sequence
  Description of Artificial Sequence: Synthetic oligonucleotide
agcgguuuucuucggucug

SEQ ID NO: 378606 - RNA, 19 nt, Artificial Sequence
  Description of Artificial Sequence: Synthetic oligonucleotide
auaucuacucuagcuugug

SEQ ID NO: 378607 - RNA, 19 nt, Artificial Sequence
  Description of Artificial Sequence: Synthetic oligonucleotide
guacccagaugucccacug

SEQ ID NO: 378608 - RNA, 19 nt, Artificial Sequence
  Description of Artificial Sequence: Synthetic oligonucleotide
ggguuauauucauagguaa

SEQ ID NO: 378609 - RNA, 19 nt, Artificial Sequence
  Description of Artificial Sequence: Synthetic oligonucleotide
uagcuuguguagcaccgau

SEQ ID NO: 378610 - RNA, 19 nt, Artificial Sequence
  Description of Artificial Sequence: Synthetic oligonucleotide
agggaggauaguggguugg

SEQ ID NO: 378611 - RNA, 19 nt, Artificial Sequence
  Description of Artificial Sequence: Synthetic oligonucleotide
aguacccagaugucccacu

SEQ ID NO: 378612 - RNA, 19 nt, Artificial Sequence
  Description of Artificial Sequence: Synthetic oligonucleotide
uugggccuaggauuacaga

SEQ ID NO: 378613 - RNA, 19 nt, Artificial Sequence
  Description of Artificial Sequence: Synthetic oligonucleotide
aggguuauauucauaggua

SEQ ID NO: 378614 - RNA, 19 nt, Artificial Sequence
  Description of Artificial Sequence: Synthetic oligonucleotide
cagagagggguuugccuag

SEQ ID NO: 378615 - RNA, 19 nt, Artificial Sequence
  Description of Artificial Sequence: Synthetic oligonucleotide
aggcggggaauaaauaaug

SEQ ID NO: 378616 - RNA, 19 nt, Artificial Sequence
  Description of Artificial Sequence: Synthetic oligonucleotide
ugucagagcccagucugug

SEQ ID NO: 378617 - RNA, 19 nt, Artificial Sequence
  Description of Artificial Sequence: Synthetic oligonucleotide
gaaggauguggcacuccag

SEQ ID NO: 378618 - RNA, 19 nt, Artificial Sequence
  Description of Artificial Sequence: Synthetic oligonucleotide
ggcggggaauaaauaaugg

SEQ ID NO: 378619 - RNA, 19 nt, Artificial Sequence
  Description of Artificial Sequence: Synthetic oligonucleotide
caaguucgaaaagauacaa

SEQ ID NO: 378620 - RNA, 19 nt, Artificial Sequence
  Description of Artificial Sequence: Synthetic oligonucleotide
ggugccacagagauggaug

SEQ ID NO: 378621 - RNA, 19 nt, Artificial Sequence
  Description of Artificial Sequence: Synthetic oligonucleotide
accuccuugggccuaggau

SEQ ID NO: 378622 - RNA, 19 nt, Artificial Sequence
  Description of Artificial Sequence: Synthetic oligonucleotide
agaggccacaucagauggc

SEQ ID NO: 378623 - RNA, 19 nt, Artificial Sequence
  Description of Artificial Sequence: Synthetic oligonucleotide
ugcggcauuaaaggacagc

SEQ ID NO: 378624 - RNA, 19 nt, Artificial Sequence
  Description of Artificial Sequence: Synthetic oligonucleotide
uugccuagcuguugucugu

SEQ ID NO: 378625 - RNA, 19 nt, Artificial Sequence
  Description of Artificial Sequence: Synthetic oligonucleotide
gaaccguaaaauaggaaau

SEQ ID NO: 378626 - RNA, 19 nt, Artificial Sequence
  Description of Artificial Sequence: Synthetic oligonucleotide
guucugcggcauuaaagga

SEQ ID NO: 378627 - RNA, 19 nt, Artificial Sequence
  Description of Artificial Sequence: Synthetic oligonucleotide
cccucaaguaacuguacag

SEQ ID NO: 378628 - RNA, 19 nt, Artificial Sequence
  Description of Artificial Sequence: Synthetic oligonucleotide
auuacagaggguggcccug

SEQ ID NO: 378629 - RNA, 19 nt, Artificial Sequence
  Description of Artificial Sequence: Synthetic oligonucleotide
uauuaucggcucugccgcu

SEQ ID NO: 378630 - RNA, 19 nt, Artificial Sequence
  Description of Artificial Sequence: Synthetic oligonucleotide
agagagggguuugccuagc

SEQ ID NO: 378631 - RNA, 19 nt, Artificial Sequence
  Description of Artificial Sequence: Synthetic oligonucleotide
gucuacucagaccauccaa

SEQ ID NO: 378632 - RNA, 19 nt, Artificial Sequence
  Description of Artificial Sequence: Synthetic oligonucleotide
aacucuaaucugaccucca

SEQ ID NO: 378633 - RNA, 19 nt, Artificial Sequence
  Description of Artificial Sequence: Synthetic oligonucleotide
gucccuugauaaccauggg

SEQ ID NO: 378634 - RNA, 19 nt, Artificial Sequence
  Description of Artificial Sequence: Synthetic oligonucleotide
caacaggggcuauugagaa

SEQ ID NO: 378635 - RNA, 19 nt, Artificial Sequence
  Description of Artificial Sequence: Synthetic oligonucleotide
cacuugcaaguucgaaaag

SEQ ID NO: 378636 - RNA, 19 nt, Artificial Sequence
  Description of Artificial Sequence: Synthetic oligonucleotide
ucggcucugccgcuuccag

SEQ ID NO: 378637 - RNA, 19 nt, Artificial Sequence
  Description of Artificial Sequence: Synthetic oligonucleotide
uuucuucggucugugggaa

SEQ ID NO: 378638 - RNA, 19 nt, Artificial Sequence
  Description of Artificial Sequence: Synthetic oligonucleotide
gaagugcccugccccuagg

SEQ ID NO: 378639 - RNA, 19 nt, Artificial Sequence
  Description of Artificial Sequence: Synthetic oligonucleotide
ggggcuauugagaaacggc

SEQ ID NO: 378640 - RNA, 19 nt, Artificial Sequence
  Description of Artificial Sequence: Synthetic oligonucleotide
uucuucggucugugggaag

SEQ ID NO: 378641 - RNA, 19 nt, Artificial Sequence
  Description of Artificial Sequence: Synthetic oligonucleotide
gguuuucuucggucugugg

SEQ ID NO: 378642 - RNA, 19 nt, Artificial Sequence
  Description of Artificial Sequence: Synthetic oligonucleotide
cuuguguagcaccgaugug

SEQ ID NO: 378643 - RNA, 19 nt, Artificial Sequence
  Description of Artificial Sequence: Synthetic oligonucleotide
gcuauauccaggcuggcua

SEQ ID NO: 378644 - RNA, 19 nt, Artificial Sequence
  Description of Artificial Sequence: Synthetic oligonucleotide
gucugugcgugguccaggc

SEQ ID NO: 378645 - RNA, 19 nt, Artificial Sequence
  Description of Artificial Sequence: Synthetic oligonucleotide
ugcuauccuccggagcucc

SEQ ID NO: 378646 - RNA, 19 nt, Artificial Sequence
  Description of Artificial Sequence: Synthetic oligonucleotide
uacccagaugucccacugu

SEQ ID NO: 378647 - RNA, 19 nt, Artificial Sequence
  Description of Artificial Sequence: Synthetic oligonucleotide
gucugcuauccuccggagc

SEQ ID NO: 378648 - RNA, 19 nt, Artificial Sequence
  Description of Artificial Sequence: Synthetic oligonucleotide
acucgcaagugaggucugc

SEQ ID NO: 378649 - RNA, 19 nt, Artificial Sequence
  Description of Artificial Sequence: Synthetic oligonucleotide
ggaaauagccauauauuua

SEQ ID NO: 378650 - RNA, 19 nt, Artificial Sequence
  Description of Artificial Sequence: Synthetic oligonucleotide
gauuacagaggguggcccu

SEQ ID NO: 378651 - RNA, 19 nt, Artificial Sequence
  Description of Artificial Sequence: Synthetic oligonucleotide
cucagacuaaacgcuagca

SEQ ID NO: 378652 - RNA, 19 nt, Artificial Sequence
  Description of Artificial Sequence: Synthetic oligonucleotide
gguaaaaccccaggcaaca

SEQ ID NO: 378653 - RNA, 19 nt, Artificial Sequence
  Description of Artificial Sequence: Synthetic oligonucleotide
uuaucggcucugccgcuuc

SEQ ID NO: 378654 - RNA, 19 nt, Artificial Sequence
  Description of Artificial Sequence: Synthetic oligonucleotide
auggacguggggugugcug

SEQ ID NO: 378655 - RNA, 19 nt, Artificial Sequence
  Description of Artificial Sequence: Synthetic oligonucleotide
uauauccaggcuggcuaga

SEQ ID NO: 378656 - RNA, 19 nt, Artificial Sequence
  Description of Artificial Sequence: Synthetic oligonucleotide
acagucaugcagguccaca

SEQ ID NO: 378657 - RNA, 19 nt, Artificial Sequence
  Description of Artificial Sequence: Synthetic oligonucleotide
uaaugggaacaugcacucu

SEQ ID NO: 378658 - RNA, 19 nt, Artificial Sequence
  Description of Artificial Sequence: Synthetic oligonucleotide
ggauucaaugcugugucuc

SEQ ID NO: 378659 - RNA, 19 nt, Artificial Sequence
  Description of Artificial Sequence: Synthetic oligonucleotide
uuggccgcgcagagcacgc

SEQ ID NO: 378660 - RNA, 19 nt, Artificial Sequence
  Description of Artificial Sequence: Synthetic oligonucleotide
cagccccuuguccuggugc

SEQ ID NO: 378661 - RNA, 19 nt, Artificial Sequence
  Description of Artificial Sequence: Synthetic oligonucleotide
cucuugggaacacaucaaa

SEQ ID NO: 378662 - RNA, 19 nt, Artificial Sequence
  Description of Artificial Sequence: Synthetic oligonucleotide
accgguagcuugggcagcg

SEQ ID NO: 378663 - RNA, 19 nt, Artificial Sequence
  Description of Artificial Sequence: Synthetic oligonucleotide
aaacgcuagcacagucaug

SEQ ID NO: 378664 - RNA, 19 nt, Artificial Sequence
  Description of Artificial Sequence: Synthetic oligonucleotide
uaucggcucugccgcuucc

SEQ ID NO: 378665 - RNA, 19 nt, Artificial Sequence
  Description of Artificial Sequence: Synthetic oligonucleotide
gaacugcaaacugguccag

SEQ ID NO: 378666 - RNA, 19 nt, Artificial Sequence
  Description of Artificial Sequence: Synthetic oligonucleotide
gcuaaucaugggcuucacc

SEQ ID NO: 378667 - RNA, 19 nt, Artificial Sequence
  Description of Artificial Sequence: Synthetic oligonucleotide
gagcccagucugugcgugg

SEQ ID NO: 378668 - RNA, 19 nt, Artificial Sequence
  Description of Artificial Sequence: Synthetic oligonucleotide
ggauuacagaggguggccc

SEQ ID NO: 378669 - RNA, 19 nt, Artificial Sequence
  Description of Artificial Sequence: Synthetic oligonucleotide
gguuauauucauagguaaa

SEQ ID NO: 378670 - RNA, 19 nt, Artificial Sequence
  Description of Artificial Sequence: Synthetic oligonucleotide
agcacgggguacuggagua

SEQ ID NO: 378671 - RNA, 19 nt, Artificial Sequence
  Description of Artificial Sequence: Synthetic oligonucleotide
guggcccugagcaucuacc

SEQ ID NO: 378672 - RNA, 19 nt, Artificial Sequence
  Description of Artificial Sequence: Synthetic oligonucleotide
cccucuguaucaacagagg

SEQ ID NO: 378673 - RNA, 19 nt, Artificial Sequence
  Description of Artificial Sequence: Synthetic oligonucleotide
gcuagacuuggcucugacc

SEQ ID NO: 378674 - RNA, 19 nt, Artificial Sequence
  Description of Artificial Sequence: Synthetic oligonucleotide
gcaacucuaaucugaccuc

SEQ ID NO: 378675 - RNA, 19 nt, Artificial Sequence
  Description of Artificial Sequence: Synthetic oligonucleotide
aggcgcaacucuaaucuga

SEQ ID NO: 378676 - RNA, 19 nt, Artificial Sequence
  Description of Artificial Sequence: Synthetic oligonucleotide
guacuggaguagaggcugg

SEQ ID NO: 378677 - RNA, 19 nt, Artificial Sequence
  Description of Artificial Sequence: Synthetic oligonucleotide
uccagccuuggccgcgcag

SEQ ID NO: 378678 - RNA, 19 nt, Artificial Sequence
  Description of Artificial Sequence: Synthetic oligonucleotide
uaccgaaguuggggcaccg

SEQ ID NO: 378679 - RNA, 19 nt, Artificial Sequence
  Description of Artificial Sequence: Synthetic oligonucleotide
gggauggucugcuauccuc

SEQ ID NO: 378680 - RNA, 19 nt, Artificial Sequence
  Description of Artificial Sequence: Synthetic oligonucleotide
cucuguaucaacagagguu

SEQ ID NO: 378681 - RNA, 19 nt, Artificial Sequence
  Description of Artificial Sequence: Synthetic oligonucleotide
acgccaggaacugcaaacu

SEQ ID NO: 378682 - RNA, 19 nt, Artificial Sequence
  Description of Artificial Sequence: Synthetic oligonucleotide
agcaccgaugugagccacc

SEQ ID NO: 378683 - RNA, 19 nt, Artificial Sequence
  Description of Artificial Sequence: Synthetic oligonucleotide
ccuugcaccugccccauag

SEQ ID NO: 378684 - RNA, 19 nt, Artificial Sequence
  Description of Artificial Sequence: Synthetic oligonucleotide
guagcaccgaugugagcca

SEQ ID NO: 378685 - RNA, 19 nt, Artificial Sequence
  Description of Artificial Sequence: Synthetic oligonucleotide
cccggaggcucccagaggc

SEQ ID NO: 378686 - RNA, 19 nt, Artificial Sequence
  Description of Artificial Sequence: Synthetic oligonucleotide
gggagguagggccucuccc

SEQ ID NO: 378687 - RNA, 19 nt, Artificial Sequence
  Description of Artificial Sequence: Synthetic oligonucleotide
aggacacugcugagaugcc

SEQ ID NO: 378688 - RNA, 19 nt, Artificial Sequence
  Description of Artificial Sequence: Synthetic oligonucleotide
caguaccaggaguguuagg

SEQ ID NO: 378689 - RNA, 19 nt, Artificial Sequence
  Description of Artificial Sequence: Synthetic oligonucleotide
gagcccuuugcagggugcc

SEQ ID NO: 378690 - RNA, 19 nt, Artificial Sequence
  Description of Artificial Sequence: Synthetic oligonucleotide
cuggagacgccaggaacug

SEQ ID NO: 378691 - RNA, 19 nt, Artificial Sequence
  Description of Artificial Sequence: Synthetic oligonucleotide
gcaaguucgaaaagauaca

SEQ ID NO: 378692 - RNA, 19 nt, Artificial Sequence
  Description of Artificial Sequence: Synthetic oligonucleotide
acgcggugaaucugagggu

SEQ ID NO: 378693 - RNA, 19 nt, Artificial Sequence
  Description of Artificial Sequence: Synthetic oligonucleotide
ggccccucuguaucaacag

SEQ ID NO: 378694 - RNA, 19 nt, Artificial Sequence
  Description of Artificial Sequence: Synthetic oligonucleotide
agcuuguguagcaccgaug

SEQ ID NO: 378695 - RNA, 19 nt, Artificial Sequence
  Description of Artificial Sequence: Synthetic oligonucleotide
agacgccaggaacugcaaa

SEQ ID NO: 378696 - RNA, 19 nt, Artificial Sequence
  Description of Artificial Sequence: Synthetic oligonucleotide
ggcucauuuugcccagccc

SEQ ID NO: 378697 - RNA, 19 nt, Artificial Sequence
  Description of Artificial Sequence: Synthetic oligonucleotide
acagagguugcuggccugu

SEQ ID NO: 378698 - RNA, 19 nt, Artificial Sequence
  Description of Artificial Sequence: Synthetic oligonucleotide
gcaacaggggcuauugaga

SEQ ID NO: 378699 - RNA, 19 nt, Artificial Sequence
  Description of Artificial Sequence: Synthetic oligonucleotide
auauauguacaggguccau

SEQ ID NO: 378700 - RNA, 19 nt, Artificial Sequence
  Description of Artificial Sequence: Synthetic oligonucleotide
cccugagcaucuaccaccc

SEQ ID NO: 378701 - RNA, 19 nt, Artificial Sequence
  Description of Artificial Sequence: Synthetic oligonucleotide
acaacacuugcaaguucga

SEQ ID NO: 378702 - RNA, 19 nt, Artificial Sequence
  Description of Artificial Sequence: Synthetic oligonucleotide
gcuauugagaaacggcuau

SEQ ID NO: 378703 - RNA, 19 nt, Artificial Sequence
  Description of Artificial Sequence: Synthetic oligonucleotide
guacagcaccccacugggg

SEQ ID NO: 378704 - RNA, 19 nt, Artificial Sequence
  Description of Artificial Sequence: Synthetic oligonucleotide
caccugccccauagcaacc

SEQ ID NO: 378705 - RNA, 19 nt, Artificial Sequence
  Description of Artificial Sequence: Synthetic oligonucleotide
aucuaccacccagugcacu

SEQ ID NO: 378706 - RNA, 19 nt, Artificial Sequence
  Description of Artificial Sequence: Synthetic oligonucleotide
cugcggcauuaaaggacag

SEQ ID NO: 378707 - RNA, 19 nt, Artificial Sequence
  Description of Artificial Sequence: Synthetic oligonucleotide
accuaaaggcgcaacucua

SEQ ID NO: 378708 - RNA, 19 nt, Artificial Sequence
  Description of Artificial Sequence: Synthetic oligonucleotide
ugccuagcuguugucuguc

SEQ ID NO: 378709 - RNA, 19 nt, Artificial Sequence
  Description of Artificial Sequence: Synthetic oligonucleotide
gcagcgguuuucuucgguc

SEQ ID NO: 378710 - RNA, 19 nt, Artificial Sequence
  Description of Artificial Sequence: Synthetic oligonucleotide
cugaauugccuuccugugu

SEQ ID NO: 378711 - RNA, 19 nt, Artificial Sequence
  Description of Artificial Sequence: Synthetic oligonucleotide
gacguggggugugcugucc

SEQ ID NO: 378712 - RNA, 19 nt, Artificial Sequence
  Description of Artificial Sequence: Synthetic oligonucleotide
cuccuugggccuaggauua

SEQ ID NO: 378713 - RNA, 19 nt, Artificial Sequence
  Description of Artificial Sequence: Synthetic oligonucleotide
acaaggcuagcagcccaug

SEQ ID NO: 378714 - RNA, 19 nt, Artificial Sequence
  Description of Artificial Sequence: Synthetic oligonucleotide
cccguaucagcccaaagaa

SEQ ID NO: 378715 - RNA, 19 nt, Artificial Sequence
  Description of Artificial Sequence: Synthetic oligonucleotide
cgcaagugaggucugcagc

SEQ ID NO: 378716 - RNA, 19 nt, Artificial Sequence
  Description of Artificial Sequence: Synthetic oligonucleotide
guuugccuagcuguugucu

SEQ ID NO: 378717 - RNA, 19 nt, Artificial Sequence
  Description of Artificial Sequence: Synthetic oligonucleotide
gacagcuaaucaugggcuu

SEQ ID NO: 378718 - RNA, 19 nt, Artificial Sequence
  Description of Artificial Sequence: Synthetic oligonucleotide
gcuucuaucugaagcccac

SEQ ID NO: 378719 - RNA, 19 nt, Artificial Sequence
  Description of Artificial Sequence: Synthetic oligonucleotide
acaucagauggcagcucca

SEQ ID NO: 378720 - RNA, 19 nt, Artificial Sequence
  Description of Artificial Sequence: Synthetic oligonucleotide
gaggcggggaauaaauaau

SEQ ID NO: 378721 - RNA, 19 nt, Artificial Sequence
  Description of Artificial Sequence: Synthetic oligonucleotide
uggucgggccccucuguau

SEQ ID NO: 378722 - RNA, 19 nt, Artificial Sequence
  Description of Artificial Sequence: Synthetic oligonucleotide
guaccgaaguuggggcacc

SEQ ID NO: 378723 - RNA, 19 nt, Artificial Sequence
  Description of Artificial Sequence: Synthetic oligonucleotide
cagcuaaucaugggcuuca

SEQ ID NO: 378724 - RNA, 19 nt, Artificial Sequence
  Description of Artificial Sequence: Synthetic oligonucleotide
cagccuuggccgcgcagag

SEQ ID NO: 378725 - RNA, 19 nt, Artificial Sequence
  Description of Artificial Sequence: Synthetic oligonucleotide
aagcuauaucuaagcugaa

SEQ ID NO: 378726 - RNA, 19 nt, Artificial Sequence
  Description of Artificial Sequence: Synthetic oligonucleotide
cucgaccuccagucccuug

SEQ ID NO: 378727 - RNA, 19 nt, Artificial Sequence
  Description of Artificial Sequence: Synthetic oligonucleotide
gaauugccuuccugugucu

SEQ ID NO: 378728 - RNA, 19 nt, Artificial Sequence
  Description of Artificial Sequence: Synthetic oligonucleotide
auuaucggcucugccgcuu

SEQ ID NO: 378729 - RNA, 19 nt, Artificial Sequence
  Description of Artificial Sequence: Synthetic oligonucleotide
ggaggauaguggguuggug

SEQ ID NO: 378730 - RNA, 19 nt, Artificial Sequence
  Description of Artificial Sequence: Synthetic oligonucleotide
ugcgugguccaggcagagc

SEQ ID NO: 378731 - RNA, 19 nt, Artificial Sequence
  Description of Artificial Sequence: Synthetic oligonucleotide
cuauugagaaacggcuaua

SEQ ID NO: 378732 - RNA, 19 nt, Artificial Sequence
  Description of Artificial Sequence: Synthetic oligonucleotide
cacuccagccuuggccgcg

SEQ ID NO: 378733 - RNA, 19 nt, Artificial Sequence
  Description of Artificial Sequence: Synthetic oligonucleotide
gggcuauugagaaacggcu

SEQ ID NO: 378734 - RNA, 19 nt, Artificial Sequence
  Description of Artificial Sequence: Synthetic oligonucleotide
ccccguaucagcccaaaga

SEQ ID NO: 378735 - RNA, 19 nt, Artificial Sequence
  Description of Artificial Sequence: Synthetic oligonucleotide
ggcgcaacucuaaucugac

SEQ ID NO: 378736 - RNA, 19 nt, Artificial Sequence
  Description of Artificial Sequence: Synthetic oligonucleotide
gcuagcagcccauggacgu

SEQ ID NO: 378737 - RNA, 19 nt, Artificial Sequence
  Description of Artificial Sequence: Synthetic oligonucleotide
cuaaaggcgcaacucuaau

SEQ ID NO: 378738 - RNA, 19 nt, Artificial Sequence
  Description of Artificial Sequence: Synthetic oligonucleotide
acgcuagcacagucaugca

SEQ ID NO: 378739 - RNA, 19 nt, Artificial Sequence
  Description of Artificial Sequence: Synthetic oligonucleotide
gguggugaagcacggggua

SEQ ID NO: 378740 - RNA, 19 nt, Artificial Sequence
  Description of Artificial Sequence: Synthetic oligonucleotide
gcgugguccaggcagagcu

SEQ ID NO: 378741 - RNA, 19 nt, Artificial Sequence
  Description of Artificial Sequence: Synthetic oligonucleotide
ggauggcucuugaacacca

SEQ ID NO: 378742 - RNA, 19 nt, Artificial Sequence
  Description of Artificial Sequence: Synthetic oligonucleotide
acgggguacuggaguagag

SEQ ID NO: 378743 - RNA, 19 nt, Artificial Sequence
  Description of Artificial Sequence: Synthetic oligonucleotide
cuucuaucugaagcccaca

SEQ ID NO: 378744 - RNA, 19 nt, Artificial Sequence
  Description of Artificial Sequence: Synthetic oligonucleotide
uggcccacggcaggauggc

SEQ ID NO: 378745 - RNA, 19 nt, Artificial Sequence
  Description of Artificial Sequence: Synthetic oligonucleotide
ggacagcuaaucaugggcu

SEQ ID NO: 378746 - RNA, 19 nt, Artificial Sequence
  Description of Artificial Sequence: Synthetic oligonucleotide
cacucgcaagugaggucug

SEQ ID NO: 378747 - RNA, 19 nt, Artificial Sequence
  Description of Artificial Sequence: Synthetic oligonucleotide
ccuugaaaagcaguaccca

SEQ ID NO: 378748 - RNA, 19 nt, Artificial Sequence
  Description of Artificial Sequence: Synthetic oligonucleotide
cuaaucugaccuccacccu

SEQ ID NO: 378749 - RNA, 19 nt, Artificial Sequence
  Description of Artificial Sequence: Synthetic oligonucleotide
ggcuagacuuggcucugac

SEQ ID NO: 378750 - RNA, 19 nt, Artificial Sequence
  Description of Artificial Sequence: Synthetic oligonucleotide
caacacuugcaaguucgaa

SEQ ID NO: 378751 - RNA, 19 nt, Artificial Sequence
  Description of Artificial Sequence: Synthetic oligonucleotide
ggugaaucugaggguggug

SEQ ID NO: 378752 - RNA, 19 nt, Artificial Sequence
  Description of Artificial Sequence: Synthetic oligonucleotide
caggaggcggggaauaaau

SEQ ID NO: 378753 - RNA, 19 nt, Artificial Sequence
  Description of Artificial Sequence: Synthetic oligonucleotide
cucgcaagugaggucugca

SEQ ID NO: 378754 - RNA, 19 nt, Artificial Sequence
  Description of Artificial Sequence: Synthetic oligonucleotide
gacuaaacgcuagcacagu

SEQ ID NO: 378755 - RNA, 19 nt, Artificial Sequence
  Description of Artificial Sequence: Synthetic oligonucleotide
ggggagguagggccucucc

SEQ ID NO: 378756 - RNA, 19 nt, Artificial Sequence
  Description of Artificial Sequence: Synthetic oligonucleotide
agcacgcggugaaucugag

SEQ ID NO: 378757 - RNA, 19 nt, Artificial Sequence
  Description of Artificial Sequence: Synthetic oligonucleotide
gauggcucuugaacaccaa

SEQ ID NO: 378758 - RNA, 19 nt, Artificial Sequence
  Description of Artificial Sequence: Synthetic oligonucleotide
uagcacagucaugcagguc

SEQ ID NO: 378759 - RNA, 19 nt, Artificial Sequence
  Description of Artificial Sequence: Synthetic oligonucleotide
gggucuggccuucuaucuc

SEQ ID NO: 378760 - RNA, 19 nt, Artificial Sequence
  Description of Artificial Sequence: Synthetic oligonucleotide
gaguguucugcggcauuaa

SEQ ID NO: 378761 - RNA, 19 nt, Artificial Sequence
  Description of Artificial Sequence: Synthetic oligonucleotide
gcggugaaucugagggugg

SEQ ID NO: 378762 - RNA, 19 nt, Artificial Sequence
  Description of Artificial Sequence: Synthetic oligonucleotide
cagagcacgcggugaaucu

SEQ ID NO: 378763 - RNA, 19 nt, Artificial Sequence
  Description of Artificial Sequence: Synthetic oligonucleotide
gguuugccuagcuguuguc

SEQ ID NO: 378764 - RNA, 19 nt, Artificial Sequence
  Description of Artificial Sequence: Synthetic oligonucleotide
gguggcccugagcaucuac

SEQ ID NO: 378765 - RNA, 19 nt, Artificial Sequence
  Description of Artificial Sequence: Synthetic oligonucleotide
gcgcaacucuaaucugacc

SEQ ID NO: 378766 - RNA, 19 nt, Artificial Sequence
  Description of Artificial Sequence: Synthetic oligonucleotide
uggcuagacuuggcucuga

SEQ ID NO: 378767 - RNA, 19 nt, Artificial Sequence
  Description of Artificial Sequence: Synthetic oligonucleotide
caccgaugugagccaccag

SEQ ID NO: 378768 - RNA, 19 nt, Artificial Sequence
  Description of Artificial Sequence: Synthetic oligonucleotide
uagcaaccuaaaggcgcaa

SEQ ID NO: 378769 - RNA, 19 nt, Artificial Sequence
  Description of Artificial Sequence: Synthetic oligonucleotide
agggccagacuggcuggag

SEQ ID NO: 378770 - RNA, 19 nt, Artificial Sequence
  Description of Artificial Sequence: Synthetic oligonucleotide
cagcgguuuucuucggucu

SEQ ID NO: 378771 - RNA, 19 nt, Artificial Sequence
  Description of Artificial Sequence: Synthetic oligonucleotide
gcaguacccagauguccca

SEQ ID NO: 378772 - RNA, 19 nt, Artificial Sequence
  Description of Artificial Sequence: Synthetic oligonucleotide
gagagggguuugccuagcu

SEQ ID NO: 378773 - RNA, 19 nt, Artificial Sequence
  Description of Artificial Sequence: Synthetic oligonucleotide
ggcuucuaucugaagccca

SEQ ID NO: 378774 - RNA, 19 nt, Artificial Sequence
  Description of Artificial Sequence: Synthetic oligonucleotide
ggcaguaccaggaguguua

SEQ ID NO: 378775 - RNA, 19 nt, Artificial Sequence
  Description of Artificial Sequence: Synthetic oligonucleotide
cuccucccucaaguaacug

SEQ ID NO: 378776 - RNA, 19 nt, Artificial Sequence
  Description of Artificial Sequence: Synthetic oligonucleotide
ggcuauugagaaacggcua

SEQ ID NO: 378777 - RNA, 19 nt, Artificial Sequence
  Description of Artificial Sequence: Synthetic oligonucleotide
cacgggguacuggaguaga

SEQ ID NO: 378778 - RNA, 19 nt, Artificial Sequence
  Description of Artificial Sequence: Synthetic oligonucleotide
aggguggcccugagcaucu

SEQ ID NO: 378779 - RNA, 19 nt, Artificial Sequence
  Description of Artificial Sequence: Synthetic oligonucleotide
accauccaaaugaccguuu

SEQ ID NO: 378780 - RNA, 19 nt, Artificial Sequence
  Description of Artificial Sequence: Synthetic oligonucleotide
caccaaggacaagcagaug

SEQ ID NO: 378781 - RNA, 19 nt, Artificial Sequence
  Description of Artificial Sequence: Synthetic oligonucleotide
cagagguugcuggccugug

SEQ ID NO: 378782 - RNA, 19 nt, Artificial Sequence
  Description of Artificial Sequence: Synthetic oligonucleotide
agggaguguucugcggcau

SEQ ID NO: 378783 - RNA, 19 nt, Artificial Sequence
  Description of Artificial Sequence: Synthetic oligonucleotide
cacagucaugcagguccac

SEQ ID NO: 378784 - RNA, 19 nt, Artificial Sequence
  Description of Artificial Sequence: Synthetic oligonucleotide
ccucuguaucaacagaggu

SEQ ID NO: 378785 - RNA, 19 nt, Artificial Sequence
  Description of Artificial Sequence: Synthetic oligonucleotide
agggguuugccuagcuguu

SEQ ID NO: 378786 - RNA, 19 nt, Artificial Sequence
  Description of Artificial Sequence: Synthetic oligonucleotide
gcuggcccacggcaggaug

SEQ ID NO: 378787 - RNA, 19 nt, Artificial Sequence
  Description of Artificial Sequence: Synthetic oligonucleotide
caccgguagcuugggcagc

SEQ ID NO: 378788 - RNA, 19 nt, Artificial Sequence
  Description of Artificial Sequence: Synthetic oligonucleotide
cugcuauccuccggagcuc

SEQ ID NO: 378789 - RNA, 19 nt, Artificial Sequence
  Description of Artificial Sequence: Synthetic oligonucleotide
gcagcccauggacgugggg

SEQ ID NO: 378790 - RNA, 19 nt, Artificial Sequence
  Description of Artificial Sequence: Synthetic oligonucleotide
ggaguguucugcggcauua

SEQ ID NO: 378791 - RNA, 19 nt, Artificial Sequence
  Description of Artificial Sequence: Synthetic oligonucleotide
cgcggugaaucugagggug

SEQ ID NO: 378792 - RNA, 19 nt, Artificial Sequence
  Description of Artificial Sequence: Synthetic oligonucleotide
gggcagcaagcccuaggca

SEQ ID NO: 378793 - RNA, 19 nt, Artificial Sequence
  Description of Artificial Sequence: Synthetic oligonucleotide
gcaccgaugugagccacca

SEQ ID NO: 378794 - RNA, 19 nt, Artificial Sequence
  Description of Artificial Sequence: Synthetic oligonucleotide
guggucgggccccucugua

SEQ ID NO: 378795 - RNA, 19 nt, Artificial Sequence
  Description of Artificial Sequence: Synthetic oligonucleotide
gggauucaaugcugugucu

SEQ ID NO: 378796 - RNA, 19 nt, Artificial Sequence
  Description of Artificial Sequence: Synthetic oligonucleotide
cccuaggcacagagguggc

SEQ ID NO: 378797 - RNA, 19 nt, Artificial Sequence
  Description of Artificial Sequence: Synthetic oligonucleotide
ccuggguaucucaccucuc

SEQ ID NO: 378798 - RNA, 19 nt, Artificial Sequence
  Description of Artificial Sequence: Synthetic oligonucleotide
ggcuauauccaggcuggcu

SEQ ID NO: 378799 - RNA, 19 nt, Artificial Sequence
  Description of Artificial Sequence: Synthetic oligonucleotide
ggacguggggugugcuguc

SEQ ID NO: 378800 - RNA, 19 nt, Artificial Sequence
  Description of Artificial Sequence: Synthetic oligonucleotide
ggggaaacugaggcuccca

SEQ ID NO: 378801 - RNA, 19 nt, Artificial Sequence
  Description of Artificial Sequence: Synthetic oligonucleotide
cugggccugcccacaguua

SEQ ID NO: 378802 - RNA, 19 nt, Artificial Sequence
  Description of Artificial Sequence: Synthetic oligonucleotide
ccauggacguggggugugc

SEQ ID NO: 378803 - RNA, 19 nt, Artificial Sequence
  Description of Artificial Sequence: Synthetic oligonucleotide
gcgcagagcacgcggugaa

SEQ ID NO: 378804 - RNA, 19 nt, Artificial Sequence
  Description of Artificial Sequence: Synthetic oligonucleotide
gcccuggguaucucaccuc

SEQ ID NO: 378805 - RNA, 19 nt, Artificial Sequence
  Description of Artificial Sequence: Synthetic oligonucleotide
ggguggugaagcacggggu

SEQ ID NO: 378806 - RNA, 19 nt, Artificial Sequence
  Description of Artificial Sequence: Synthetic oligonucleotide
cccuggguaucucaccucu

SEQ ID NO: 378807 - RNA, 19 nt, Artificial Sequence
  Description of Artificial Sequence: Synthetic oligonucleotide
ccgaugugagccaccagau

SEQ ID NO: 378808 - RNA, 19 nt, Artificial Sequence
  Description of Artificial Sequence: Synthetic oligonucleotide
gguggucgggccccucugu

SEQ ID NO: 378809 - RNA, 19 nt, Artificial Sequence
  Description of Artificial Sequence: Synthetic oligonucleotide
cauggacguggggugugcu

SEQ ID NO: 378810 - RNA, 19 nt, Artificial Sequence
  Description of Artificial Sequence: Synthetic oligonucleotide
ccguaucagcccaaagaau

SEQ ID NO: 378811 - RNA, 19 nt, Artificial Sequence
  Description of Artificial Sequence: Synthetic oligonucleotide
gccccuuguccuggugccc

SEQ ID NO: 378812 - RNA, 19 nt, Artificial Sequence
  Description of Artificial Sequence: Synthetic oligonucleotide
ccauccaaaugaccguuuu

SEQ ID NO: 378813 - RNA, 19 nt, Artificial Sequence
  Description of Artificial Sequence: Synthetic oligonucleotide
ccgcgcagagcacgcggug

SEQ ID NO: 378814 - RNA, 19 nt, Artificial Sequence
  Description of Artificial Sequence: Synthetic oligonucleotide
ccgaggccuggucuacuca

SEQ ID NO: 378815 - RNA, 19 nt, Artificial Sequence
  Description of Artificial Sequence: Synthetic oligonucleotide
gcuauccuccggagcucca

SEQ ID NO: 378816 - RNA, 19 nt, Artificial Sequence
  Description of Artificial Sequence: Synthetic oligonucleotide
ccgguagcuugggcagcgg

SEQ ID NO: 378817 - RNA, 19 nt, Artificial Sequence
  Description of Artificial Sequence: Synthetic oligonucleotide
ggugcccaggucccuugau

SEQ ID NO: 378818 - RNA, 19 nt, Artificial Sequence
  Description of Artificial Sequence: Synthetic oligonucleotide
ccuccauaggaggggaggu

SEQ ID NO: 378819 - RNA, 19 nt, Artificial Sequence
  Description of Artificial Sequence: Synthetic oligonucleotide
cggcaggauggcaguacca

SEQ ID NO: 378820 - RNA, 19 nt, Artificial Sequence
  Description of Artificial Sequence: Synthetic oligonucleotide
ccggaggcucccagaggca

SEQ ID NO: 378821 - RNA, 19 nt, Artificial Sequence
  Description of Artificial Sequence: Synthetic oligonucleotide
cacagcccggaggcaucaa

SEQ ID NO: 378822 - RNA, 19 nt, Artificial Sequence
  Description of Artificial Sequence: Synthetic oligonucleotide
cggcuauauccaggcuggc

SEQ ID NO: 378823 - RNA, 19 nt, Artificial Sequence
  Description of Artificial Sequence: Synthetic oligonucleotide
cgcgcagagcacgcgguga

SEQ ID NO: 378824 - RNA, 19 nt, Artificial Sequence
  Description of Artificial Sequence: Synthetic oligonucleotide
cgguagcuugggcagcggu

SEQ ID NO: 378825 - RNA, 19 nt, Artificial Sequence
  Description of Artificial Sequence: Synthetic oligonucleotide
cggugaaucugaggguggu

SEQ ID NO: 378826 - RNA, 19 nt, Artificial Sequence
  Description of Artificial Sequence: Synthetic oligonucleotide
ggguggcccugagcaucua

SEQ ID NO: 378827 - RNA, 19 nt, Artificial Sequence
  Description of Artificial Sequence: Synthetic oligonucleotide
cgcagagcacgcggugaau

SEQ ID NO: 378828 - RNA, 19 nt, Artificial Sequence
  Description of Artificial Sequence: Synthetic oligonucleotide
caagauuauauuuugagag

SEQ ID NO: 378829 - RNA, 19 nt, Artificial Sequence
  Description of Artificial Sequence: Synthetic oligonucleotide
aaccagaauggguugaucc

SEQ ID NO: 378830 - RNA, 19 nt, Artificial Sequence
  Description of Artificial Sequence: Synthetic oligonucleotide
uuaaaaucgguguaaagcc

SEQ ID NO: 378831 - RNA, 19 nt, Artificial Sequence
  Description of Artificial Sequence: Synthetic oligonucleotide
ucgacuuccuuuaauaucg

SEQ ID NO: 378832 - RNA, 19 nt, Artificial Sequence
  Description of Artificial Sequence: Synthetic oligonucleotide
uuuacguccaaacucauca

SEQ ID NO: 378833 - RNA, 19 nt, Artificial Sequence
  Description of Artificial Sequence: Synthetic oligonucleotide
ugaacuaugauuuagucuu

SEQ ID NO: 378834 - RNA, 19 nt, Artificial Sequence
  Description of Artificial Sequence: Synthetic oligonucleotide
acgaucgagacuuugagcg

SEQ ID NO: 378835 - RNA, 19 nt, Artificial Sequence
  Description of Artificial Sequence: Synthetic oligonucleotide
agauguagcacuucugacc

SEQ ID NO: 378836 - RNA, 19 nt, Artificial Sequence
  Description of Artificial Sequence: Synthetic oligonucleotide
auucgcacuaaauaagccc

SEQ ID NO: 378837 - RNA, 19 nt, Artificial Sequence
  Description of Artificial Sequence: Synthetic oligonucleotide
aagaacucgaguaagaucu

SEQ ID NO: 378838 - RNA, 19 nt, Artificial Sequence
  Description of Artificial Sequence: Synthetic oligonucleotide
ugaaguaagauggauaacc

SEQ ID NO: 378839 - RNA, 19 nt, Artificial Sequence
  Description of Artificial Sequence: Synthetic oligonucleotide
aauuguauacuuaccuugc

SEQ ID NO: 378840 - RNA, 19 nt, Artificial Sequence
  Description of Artificial Sequence: Synthetic oligonucleotide
uugaacgggaaccagaaug

SEQ ID NO: 378841 - RNA, 19 nt, Artificial Sequence
  Description of Artificial Sequence: Synthetic oligonucleotide
aaggcuaacacgucggauc

SEQ ID NO: 378842 - RNA, 19 nt, Artificial Sequence
  Description of Artificial Sequence: Synthetic oligonucleotide
uauauuuugagagaucagc

SEQ ID NO: 378843 - RNA, 19 nt, Artificial Sequence
  Description of Artificial Sequence: Synthetic oligonucleotide
cuuucgagaagucugaggc

SEQ ID NO: 378844 - RNA, 19 nt, Artificial Sequence
  Description of Artificial Sequence: Synthetic oligonucleotide
aacaaacgaaggcuaacac

SEQ ID NO: 378845 - RNA, 19 nt, Artificial Sequence
  Description of Artificial Sequence: Synthetic oligonucleotide
auuuugagagaucagcauc

SEQ ID NO: 378846 - RNA, 19 nt, Artificial Sequence
  Description of Artificial Sequence: Synthetic oligonucleotide
ugguuguaaauaaugaaca

SEQ ID NO: 378847 - RNA, 19 nt, Artificial Sequence
  Description of Artificial Sequence: Synthetic oligonucleotide
uugauuucgaaccacggga

SEQ ID NO: 378848 - RNA, 19 nt, Artificial Sequence
  Description of Artificial Sequence: Synthetic oligonucleotide
aauggguugauccggaaga

SEQ ID NO: 378849 - RNA, 19 nt, Artificial Sequence
  Description of Artificial Sequence: Synthetic oligonucleotide
ucuacuagcagauguagca

SEQ ID NO: 378850 - RNA, 19 nt, Artificial Sequence
  Description of Artificial Sequence: Synthetic oligonucleotide
ugaacgggaaccagaaugg

SEQ ID NO: 378851 - RNA, 19 nt, Artificial Sequence
  Description of Artificial Sequence: Synthetic oligonucleotide
agaaaagucgacuuucgag

SEQ ID NO: 378852 - RNA, 19 nt, Artificial Sequence
  Description of Artificial Sequence: Synthetic oligonucleotide
aggucaauuguauacuuac

SEQ ID NO: 378853 - RNA, 19 nt, Artificial Sequence
  Description of Artificial Sequence: Synthetic oligonucleotide
ucuugcauuaaaaucggug

SEQ ID NO: 378854 - RNA, 19 nt, Artificial Sequence
  Description of Artificial Sequence: Synthetic oligonucleotide
ucuagcuuagcauacuuug

SEQ ID NO: 378855 - RNA, 19 nt, Artificial Sequence
  Description of Artificial Sequence: Synthetic oligonucleotide
uuuacuuauuuaaaccgca

SEQ ID NO: 378856 - RNA, 19 nt, Artificial Sequence
  Description of Artificial Sequence: Synthetic oligonucleotide
uaaaaucgguguaaagccg

SEQ ID NO: 378857 - RNA, 19 nt, Artificial Sequence
  Description of Artificial Sequence: Synthetic oligonucleotide
uuuagaucaguugagguga

SEQ ID NO: 378858 - RNA, 19 nt, Artificial Sequence
  Description of Artificial Sequence: Synthetic oligonucleotide
aucgauuacagcuuguucu

SEQ ID NO: 378859 - RNA, 19 nt, Artificial Sequence
  Description of Artificial Sequence: Synthetic oligonucleotide
acaaacgaaggcuaacacg

SEQ ID NO: 378860 - RNA, 19 nt, Artificial Sequence
  Description of Artificial Sequence: Synthetic oligonucleotide
agcucaauuaaaccaaauc

SEQ ID NO: 378861 - RNA, 19 nt, Artificial Sequence
  Description of Artificial Sequence: Synthetic oligonucleotide
acuaaauaagccccggcuc

SEQ ID NO: 378862 - RNA, 19 nt, Artificial Sequence
  Description of Artificial Sequence: Synthetic oligonucleotide
aagaucucgagugagacga

SEQ ID NO: 378863 - RNA, 19 nt, Artificial Sequence
  Description of Artificial Sequence: Synthetic oligonucleotide
aacacgucggaucuagaag

SEQ ID NO: 378864 - RNA, 19 nt, Artificial Sequence
  Description of Artificial Sequence: Synthetic oligonucleotide
uuguauuugccuaguacag

SEQ ID NO: 378865 - RNA, 19 nt, Artificial Sequence
  Description of Artificial Sequence: Synthetic oligonucleotide
ucgacuuucgagaagucug

SEQ ID NO: 378866 - RNA, 19 nt, Artificial Sequence
  Description of Artificial Sequence: Synthetic oligonucleotide
uggagagacuguuaaagag

SEQ ID NO: 378867 - RNA, 19 nt, Artificial Sequence
  Description of Artificial Sequence: Synthetic oligonucleotide
ucauucgcacuaaauaagc

SEQ ID NO: 378868 - RNA, 19 nt, Artificial Sequence
  Description of Artificial Sequence: Synthetic oligonucleotide
acaucaugcagacauaaga

SEQ ID NO: 378869 - RNA, 19 nt, Artificial Sequence
  Description of Artificial Sequence: Synthetic oligonucleotide
caauuguauacuuaccuug

SEQ ID NO: 378870 - RNA, 19 nt, Artificial Sequence
  Description of Artificial Sequence: Synthetic oligonucleotide
auacuuuggaguguuacac

SEQ ID NO: 378871 - RNA, 19 nt, Artificial Sequence
  Description of Artificial Sequence: Synthetic oligonucleotide
ucuugauuucgaaccacgg

SEQ ID NO: 378872 - RNA, 19 nt, Artificial Sequence
  Description of Artificial Sequence: Synthetic oligonucleotide
uuuaaaccgcagcaaauac

SEQ ID NO: 378873 - RNA, 19 nt, Artificial Sequence
  Description of Artificial Sequence: Synthetic oligonucleotide
aagccgauaagagagauaa

SEQ ID NO: 378874 - RNA, 19 nt, Artificial Sequence
  Description of Artificial Sequence: Synthetic oligonucleotide
gacauaaccagguugacua

SEQ ID NO: 378875 - RNA, 19 nt, Artificial Sequence
  Description of Artificial Sequence: Synthetic oligonucleotide
uuacuuauuuaaaccgcag

SEQ ID NO: 378876 - RNA, 19 nt, Artificial Sequence
  Description of Artificial Sequence: Synthetic oligonucleotide
caaccuacaguaaaugcag

SEQ ID NO: 378877 - RNA, 19 nt, Artificial Sequence
  Description of Artificial Sequence: Synthetic oligonucleotide
uuauauuuugagagaucag

SEQ ID NO: 378878 - RNA, 19 nt, Artificial Sequence
  Description of Artificial Sequence: Synthetic oligonucleotide
cuuguauuugccuaguaca

SEQ ID NO: 378879 - RNA, 19 nt, Artificial Sequence
  Description of Artificial Sequence: Synthetic oligonucleotide
uauuacgaaaauauuucua

SEQ ID NO: 378880 - RNA, 19 nt, Artificial Sequence
  Description of Artificial Sequence: Synthetic oligonucleotide
uggaugucaaguaaccaga

SEQ ID NO: 378881 - RNA, 19 nt, Artificial Sequence
  Description of Artificial Sequence: Synthetic oligonucleotide
aguaaccagauuuuaauuu

SEQ ID NO: 378882 - RNA, 19 nt, Artificial Sequence
  Description of Artificial Sequence: Synthetic oligonucleotide
agucauucgcacuaaauaa

SEQ ID NO: 378883 - RNA, 19 nt, Artificial Sequence
  Description of Artificial Sequence: Synthetic oligonucleotide
cuugauuucgaaccacggg

SEQ ID NO: 378884 - RNA, 19 nt, Artificial Sequence
  Description of Artificial Sequence: Synthetic oligonucleotide
gaaauaagucgacaucaug

SEQ ID NO: 378885 - RNA, 19 nt, Artificial Sequence
  Description of Artificial Sequence: Synthetic oligonucleotide
ucuuuagaucaguugaggu

SEQ ID NO: 378886 - RNA, 19 nt, Artificial Sequence
  Description of Artificial Sequence: Synthetic oligonucleotide
uuaaaccgcagcaaauacu

SEQ ID NO: 378887 - RNA, 19 nt, Artificial Sequence
  Description of Artificial Sequence: Synthetic oligonucleotide
ucaugcagacauaagaauu

SEQ ID NO: 378888 - RNA, 19 nt, Artificial Sequence
  Description of Artificial Sequence: Synthetic oligonucleotide
ucuauuagcuaaauuuaua

SEQ ID NO: 378889 - RNA, 19 nt, Artificial Sequence
  Description of Artificial Sequence: Synthetic oligonucleotide
auaaugauucuaaggcacc

SEQ ID NO: 378890 - RNA, 19 nt, Artificial Sequence
  Description of Artificial Sequence: Synthetic oligonucleotide
aacgcaauuuacuuucaau

SEQ ID NO: 378891 - RNA, 19 nt, Artificial Sequence
  Description of Artificial Sequence: Synthetic oligonucleotide
augauucuaaggcacccuc

SEQ ID NO: 378892 - RNA, 19 nt, Artificial Sequence
  Description of Artificial Sequence: Synthetic oligonucleotide
cuagcuuagcauacuuugg

SEQ ID NO: 378893 - RNA, 19 nt, Artificial Sequence
  Description of Artificial Sequence: Synthetic oligonucleotide
uagcuuagcauacuuugga

SEQ ID NO: 378894 - RNA, 19 nt, Artificial Sequence
  Description of Artificial Sequence: Synthetic oligonucleotide
aaguaaccagauuuuaauu

SEQ ID NO: 378895 - RNA, 19 nt, Artificial Sequence
  Description of Artificial Sequence: Synthetic oligonucleotide
ugugaacuaugauuuaguc

SEQ ID NO: 378896 - RNA, 19 nt, Artificial Sequence
  Description of Artificial Sequence: Synthetic oligonucleotide
gaagaucucgagugagacg

SEQ ID NO: 378897 - RNA, 19 nt, Artificial Sequence
  Description of Artificial Sequence: Synthetic oligonucleotide
acuuucgagaagucugagg

SEQ ID NO: 378898 - RNA, 19 nt, Artificial Sequence
  Description of Artificial Sequence: Synthetic oligonucleotide
auagacauuuugaaguaag

SEQ ID NO: 378899 - RNA, 19 nt, Artificial Sequence
  Description of Artificial Sequence: Synthetic oligonucleotide
uauuuugagagaucagcau

SEQ ID NO: 378900 - RNA, 19 nt, Artificial Sequence
  Description of Artificial Sequence: Synthetic oligonucleotide
ucgagugagacgaucgaga

SEQ ID NO: 378901 - RNA, 19 nt, Artificial Sequence
  Description of Artificial Sequence: Synthetic oligonucleotide
acacgucggaucuagaaga

SEQ ID NO: 378902 - RNA, 19 nt, Artificial Sequence
  Description of Artificial Sequence: Synthetic oligonucleotide
auaagucgacaucaugcag

SEQ ID NO: 378903 - RNA, 19 nt, Artificial Sequence
  Description of Artificial Sequence: Synthetic oligonucleotide
gaauggguugauccggaag

SEQ ID NO: 378904 - RNA, 19 nt, Artificial Sequence
  Description of Artificial Sequence: Synthetic oligonucleotide
acgcaauuuacuuucaauu

SEQ ID NO: 378905 - RNA, 19 nt, Artificial Sequence
  Description of Artificial Sequence: Synthetic oligonucleotide
uauacuuaccuugcuuugc

SEQ ID NO: 378906 - RNA, 19 nt, Artificial Sequence
  Description of Artificial Sequence: Synthetic oligonucleotide
aaaaucgguguaaagccga

SEQ ID NO: 378907 - RNA, 19 nt, Artificial Sequence
  Description of Artificial Sequence: Synthetic oligonucleotide
gaagaacucgaguaagauc

SEQ ID NO: 378908 - RNA, 19 nt, Artificial Sequence
  Description of Artificial Sequence: Synthetic oligonucleotide
agacgaucgagacuuugag

SEQ ID NO: 378909 - RNA, 19 nt, Artificial Sequence
  Description of Artificial Sequence: Synthetic oligonucleotide
ggaauguucucucgaaccg

SEQ ID NO: 378910 - RNA, 19 nt, Artificial Sequence
  Description of Artificial Sequence: Synthetic oligonucleotide
gacgcggaaauucuuggug

SEQ ID NO: 378911 - RNA, 19 nt, Artificial Sequence
  Description of Artificial Sequence: Synthetic oligonucleotide
cauucgcacuaaauaagcc

SEQ ID NO: 378912 - RNA, 19 nt, Artificial Sequence
  Description of Artificial Sequence: Synthetic oligonucleotide
uaauaucgaugcaggacca

SEQ ID NO: 378913 - RNA, 19 nt, Artificial Sequence
  Description of Artificial Sequence: Synthetic oligonucleotide
aucgguguaaagccgauaa

SEQ ID NO: 378914 - RNA, 19 nt, Artificial Sequence
  Description of Artificial Sequence: Synthetic oligonucleotide
aucuuuagaucaguugagg

SEQ ID NO: 378915 - RNA, 19 nt, Artificial Sequence
  Description of Artificial Sequence: Synthetic oligonucleotide
agcuaaauuuauaaucuug

SEQ ID NO: 378916 - RNA, 19 nt, Artificial Sequence
  Description of Artificial Sequence: Synthetic oligonucleotide
ugaagaucucgagugagac

SEQ ID NO: 378917 - RNA, 19 nt, Artificial Sequence
  Description of Artificial Sequence: Synthetic oligonucleotide
aauauccucuugcauuaaa

SEQ ID NO: 378918 - RNA, 19 nt, Artificial Sequence
  Description of Artificial Sequence: Synthetic oligonucleotide
ucucgaaccggagugagac

SEQ ID NO: 378919 - RNA, 19 nt, Artificial Sequence
  Description of Artificial Sequence: Synthetic oligonucleotide
uaaugauucuaaggcaccc

SEQ ID NO: 378920 - RNA, 19 nt, Artificial Sequence
  Description of Artificial Sequence: Synthetic oligonucleotide
uugccugugaacuaugauu

SEQ ID NO: 378921 - RNA, 19 nt, Artificial Sequence
  Description of Artificial Sequence: Synthetic oligonucleotide
gauccagucgccgucacug

SEQ ID NO: 378922 - RNA, 19 nt, Artificial Sequence
  Description of Artificial Sequence: Synthetic oligonucleotide
guucucucgaaccggagug

SEQ ID NO: 378923 - RNA, 19 nt, Artificial Sequence
  Description of Artificial Sequence: Synthetic oligonucleotide
ucggaucuagaagaucugg

SEQ ID NO: 378924 - RNA, 19 nt, Artificial Sequence
  Description of Artificial Sequence: Synthetic oligonucleotide
uguauuugccuaguacagc

SEQ ID NO: 378925 - RNA, 19 nt, Artificial Sequence
  Description of Artificial Sequence: Synthetic oligonucleotide
uguuaaagagaaaccuuuu

SEQ ID NO: 378926 - RNA, 19 nt, Artificial Sequence
  Description of Artificial Sequence: Synthetic oligonucleotide
auaucgaugcaggaccaac

SEQ ID NO: 378927 - RNA, 19 nt, Artificial Sequence
  Description of Artificial Sequence: Synthetic oligonucleotide
aucuacuaaacaucuuaga

SEQ ID NO: 378928 - RNA, 19 nt, Artificial Sequence
  Description of Artificial Sequence: Synthetic oligonucleotide
ucuauauacucaacauuuu

SEQ ID NO: 378929 - RNA, 19 nt, Artificial Sequence
  Description of Artificial Sequence: Synthetic oligonucleotide
uuuaucuggggaacaguau

SEQ ID NO: 378930 - RNA, 19 nt, Artificial Sequence
  Description of Artificial Sequence: Synthetic oligonucleotide
aaccuacaguaaaugcagc

SEQ ID NO: 378931 - RNA, 19 nt, Artificial Sequence
  Description of Artificial Sequence: Synthetic oligonucleotide
auuugccuaguacagccca

SEQ ID NO: 378932 - RNA, 19 nt, Artificial Sequence
  Description of Artificial Sequence: Synthetic oligonucleotide
aacugguagcaaaugguug

SEQ ID NO: 378933 - RNA, 19 nt, Artificial Sequence
  Description of Artificial Sequence: Synthetic oligonucleotide
gucauucgcacuaaauaag

SEQ ID NO: 378934 - RNA, 19 nt, Artificial Sequence
  Description of Artificial Sequence: Synthetic oligonucleotide
gacgaucgagacuuugagc

SEQ ID NO: 378935 - RNA, 19 nt, Artificial Sequence
  Description of Artificial Sequence: Synthetic oligonucleotide
ucgcacuaaauaagccccg

SEQ ID NO: 378936 - RNA, 19 nt, Artificial Sequence
  Description of Artificial Sequence: Synthetic oligonucleotide
aucaugcagacauaagaau

SEQ ID NO: 378937 - RNA, 19 nt, Artificial Sequence
  Description of Artificial Sequence: Synthetic oligonucleotide
aagcacaagaacaaacgaa

SEQ ID NO: 378938 - RNA, 19 nt, Artificial Sequence
  Description of Artificial Sequence: Synthetic oligonucleotide
acauuacugcaaguuuugc

SEQ ID NO: 378939 - RNA, 19 nt, Artificial Sequence
  Description of Artificial Sequence: Synthetic oligonucleotide
uaacacgucggaucuagaa

SEQ ID NO: 378940 - RNA, 19 nt, Artificial Sequence
  Description of Artificial Sequence: Synthetic oligonucleotide
ugauuucgaaccacgggau

SEQ ID NO: 378941 - RNA, 19 nt, Artificial Sequence
  Description of Artificial Sequence: Synthetic oligonucleotide
ucgauuacagcuuguucuc

SEQ ID NO: 378942 - RNA, 19 nt, Artificial Sequence
  Description of Artificial Sequence: Synthetic oligonucleotide
auacuuaccuugcuuugcu

SEQ ID NO: 378943 - RNA, 19 nt, Artificial Sequence
  Description of Artificial Sequence: Synthetic oligonucleotide
aucuaucuacuaaacaucu

SEQ ID NO: 378944 - RNA, 19 nt, Artificial Sequence
  Description of Artificial Sequence: Synthetic oligonucleotide
auuguauacuuaccuugcu

SEQ ID NO: 378945 - RNA, 19 nt, Artificial Sequence
  Description of Artificial Sequence: Synthetic oligonucleotide
caucaugcagacauaagaa

SEQ ID NO: 378946 - RNA, 19 nt, Artificial Sequence
  Description of Artificial Sequence: Synthetic oligonucleotide
uacuuuggaguguuacaca

SEQ ID NO: 378947 - RNA, 19 nt, Artificial Sequence
  Description of Artificial Sequence: Synthetic oligonucleotide
aucuugauuucgaaccacg

SEQ ID NO: 378948 - RNA, 19 nt, Artificial Sequence
  Description of Artificial Sequence: Synthetic oligonucleotide
aagagagauaaugauucua

SEQ ID NO: 378949 - RNA, 19 nt, Artificial Sequence
  Description of Artificial Sequence: Synthetic oligonucleotide
gucgccgucacugacgcgg

SEQ ID NO: 378950 - RNA, 19 nt, Artificial Sequence
  Description of Artificial Sequence: Synthetic oligonucleotide
gucgacaucaugcagacau

SEQ ID NO: 378951 - RNA, 19 nt, Artificial Sequence
  Description of Artificial Sequence: Synthetic oligonucleotide
gguguaaagccgauaagag

SEQ ID NO: 378952 - RNA, 19 nt, Artificial Sequence
  Description of Artificial Sequence: Synthetic oligonucleotide
uuuucaggugaggaaagaa

SEQ ID NO: 378953 - RNA, 19 nt, Artificial Sequence
  Description of Artificial Sequence: Synthetic oligonucleotide
ucgguguaaagccgauaag

SEQ ID NO: 378954 - RNA, 19 nt, Artificial Sequence
  Description of Artificial Sequence: Synthetic oligonucleotide
gcaucaagauuauauuuug

SEQ ID NO: 378955 - RNA, 19 nt, Artificial Sequence
  Description of Artificial Sequence: Synthetic oligonucleotide
gccgauaagagagauaaug

SEQ ID NO: 378956 - RNA, 19 nt, Artificial Sequence
  Description of Artificial Sequence: Synthetic oligonucleotide
ugcuaauauccucuugcau

SEQ ID NO: 378957 - RNA, 19 nt, Artificial Sequence
  Description of Artificial Sequence: Synthetic oligonucleotide
aucucgagugagacgaucg

SEQ ID NO: 378958 - RNA, 19 nt, Artificial Sequence
  Description of Artificial Sequence: Synthetic oligonucleotide
ucgaaccggagugagaccu

SEQ ID NO: 378959 - RNA, 19 nt, Artificial Sequence
  Description of Artificial Sequence: Synthetic oligonucleotide
uucugcaauugcuaauauc

SEQ ID NO: 378960 - RNA, 19 nt, Artificial Sequence
  Description of Artificial Sequence: Synthetic oligonucleotide
cuagaucgacuccucuucc

SEQ ID NO: 378961 - RNA, 19 nt, Artificial Sequence
  Description of Artificial Sequence: Synthetic oligonucleotide
aggcuaacacgucggaucu

SEQ ID NO: 378962 - RNA, 19 nt, Artificial Sequence
  Description of Artificial Sequence: Synthetic oligonucleotide
gucacugacgcggaaauuc

SEQ ID NO: 378963 - RNA, 19 nt, Artificial Sequence
  Description of Artificial Sequence: Synthetic oligonucleotide
gaagacgaccuguggugcc

SEQ ID NO: 378964 - RNA, 19 nt, Artificial Sequence
  Description of Artificial Sequence: Synthetic oligonucleotide
uacguccaaacucaucaua

SEQ ID NO: 378965 - RNA, 19 nt, Artificial Sequence
  Description of Artificial Sequence: Synthetic oligonucleotide
ucucgagugagacgaucga

SEQ ID NO: 378966 - RNA, 19 nt, Artificial Sequence
  Description of Artificial Sequence: Synthetic oligonucleotide
gaucgagacuuugagcgac

SEQ ID NO: 378967 - RNA, 19 nt, Artificial Sequence
  Description of Artificial Sequence: Synthetic oligonucleotide
aaacgaaggcuaacacguc

SEQ ID NO: 378968 - RNA, 19 nt, Artificial Sequence
  Description of Artificial Sequence: Synthetic oligonucleotide
uucuagcuuagcauacuuu

SEQ ID NO: 378969 - RNA, 19 nt, Artificial Sequence
  Description of Artificial Sequence: Synthetic oligonucleotide
agaacaaaauggaugucaa

SEQ ID NO: 378970 - RNA, 19 nt, Artificial Sequence
  Description of Artificial Sequence: Synthetic oligonucleotide
gugaacuaugauuuagucu

SEQ ID NO: 378971 - RNA, 19 nt, Artificial Sequence
  Description of Artificial Sequence: Synthetic oligonucleotide
agcuuauacuuagacagau

SEQ ID NO: 378972 - RNA, 19 nt, Artificial Sequence
  Description of Artificial Sequence: Synthetic oligonucleotide
caucguggacgccagcagc

SEQ ID NO: 378973 - RNA, 19 nt, Artificial Sequence
  Description of Artificial Sequence: Synthetic oligonucleotide
gauuucgaaccacgggauc

SEQ ID NO: 378974 - RNA, 19 nt, Artificial Sequence
  Description of Artificial Sequence: Synthetic oligonucleotide
uggcccaauucacauuacu

SEQ ID NO: 378975 - RNA, 19 nt, Artificial Sequence
  Description of Artificial Sequence: Synthetic oligonucleotide
aacgggaaccagaaugggu

SEQ ID NO: 378976 - RNA, 19 nt, Artificial Sequence
  Description of Artificial Sequence: Synthetic oligonucleotide
cggagugagaccuugacug

SEQ ID NO: 378977 - RNA, 19 nt, Artificial Sequence
  Description of Artificial Sequence: Synthetic oligonucleotide
ggaccaacugccuuucccc

SEQ ID NO: 378978 - RNA, 19 nt, Artificial Sequence
  Description of Artificial Sequence: Synthetic oligonucleotide
gagcgacuccgucuauugg

SEQ ID NO: 378979 - RNA, 19 nt, Artificial Sequence
  Description of Artificial Sequence: Synthetic oligonucleotide
guaagaguucgugugcaac

SEQ ID NO: 378980 - RNA, 19 nt, Artificial Sequence
  Description of Artificial Sequence: Synthetic oligonucleotide
gaucuugauuucgaaccac

SEQ ID NO: 378981 - RNA, 19 nt, Artificial Sequence
  Description of Artificial Sequence: Synthetic oligonucleotide
guuacacuccgaucuucug

SEQ ID NO: 378982 - RNA, 19 nt, Artificial Sequence
  Description of Artificial Sequence: Synthetic oligonucleotide
cagucauucgcacuaaaua

SEQ ID NO: 378983 - RNA, 19 nt, Artificial Sequence
  Description of Artificial Sequence: Synthetic oligonucleotide
ugagacgaucgagacuuug

SEQ ID NO: 378984 - RNA, 19 nt, Artificial Sequence
  Description of Artificial Sequence: Synthetic oligonucleotide
uagaucgacuccucuuccu

SEQ ID NO: 378985 - RNA, 19 nt, Artificial Sequence
  Description of Artificial Sequence: Synthetic oligonucleotide
ucucucgaaccggagugag

SEQ ID NO: 378986 - RNA, 19 nt, Artificial Sequence
  Description of Artificial Sequence: Synthetic oligonucleotide
acugacgcggaaauucuug

SEQ ID NO: 378987 - RNA, 19 nt, Artificial Sequence
  Description of Artificial Sequence: Synthetic oligonucleotide
agcuucgugaacgggaccu

SEQ ID NO: 378988 - RNA, 19 nt, Artificial Sequence
  Description of Artificial Sequence: Synthetic oligonucleotide
gaguucgugugcaaccuac

SEQ ID NO: 378989 - RNA, 19 nt, Artificial Sequence
  Description of Artificial Sequence: Synthetic oligonucleotide
cuacuagcagauguagcac

SEQ ID NO: 378990 - RNA, 19 nt, Artificial Sequence
  Description of Artificial Sequence: Synthetic oligonucleotide
uuugccuaguacagcccaa

SEQ ID NO: 378991 - RNA, 19 nt, Artificial Sequence
  Description of Artificial Sequence: Synthetic oligonucleotide
cuaaauaagccccggcucu

SEQ ID NO: 378992 - RNA, 19 nt, Artificial Sequence
  Description of Artificial Sequence: Synthetic oligonucleotide
gaccuguggugccuuucgg

SEQ ID NO: 378993 - RNA, 19 nt, Artificial Sequence
  Description of Artificial Sequence: Synthetic oligonucleotide
uugccuaguacagcccaag

SEQ ID NO: 378994 - RNA, 19 nt, Artificial Sequence
  Description of Artificial Sequence: Synthetic oligonucleotide
uucaugcacuguauuuaau

SEQ ID NO: 378995 - RNA, 19 nt, Artificial Sequence
  Description of Artificial Sequence: Synthetic oligonucleotide
gagcauuuaucuggggaac

SEQ ID NO: 378996 - RNA, 19 nt, Artificial Sequence
  Description of Artificial Sequence: Synthetic oligonucleotide
ugacgcggaaauucuuggu

SEQ ID NO: 378997 - RNA, 19 nt, Artificial Sequence
  Description of Artificial Sequence: Synthetic oligonucleotide
agcgugaugaagaucucga

SEQ ID NO: 378998 - RNA, 19 nt, Artificial Sequence
  Description of Artificial Sequence: Synthetic oligonucleotide
gaguaagaguucgugugca

SEQ ID NO: 378999 - RNA, 19 nt, Artificial Sequence
  Description of Artificial Sequence: Synthetic oligonucleotide
auauccucuugcauuaaaa

SEQ ID NO: 379000 - RNA, 19 nt, Artificial Sequence
  Description of Artificial Sequence: Synthetic oligonucleotide
gauagacauuuugaaguaa

SEQ ID NO: 379001 - RNA, 19 nt, Artificial Sequence
  Description of Artificial Sequence: Synthetic oligonucleotide
auacgauauuuuguuuuca

SEQ ID NO: 379002 - RNA, 19 nt, Artificial Sequence
  Description of Artificial Sequence: Synthetic oligonucleotide
gcaaccuacaguaaaugca

SEQ ID NO: 379003 - RNA, 19 nt, Artificial Sequence
  Description of Artificial Sequence: Synthetic oligonucleotide
uucgaaccacgggaucugg

SEQ ID NO: 379004 - RNA, 19 nt, Artificial Sequence
  Description of Artificial Sequence: Synthetic oligonucleotide
uuacguccaaacucaucau

SEQ ID NO: 379005 - RNA, 19 nt, Artificial Sequence
  Description of Artificial Sequence: Synthetic oligonucleotide
cuucaugcacuguauuuaa

SEQ ID NO: 379006 - RNA, 19 nt, Artificial Sequence
  Description of Artificial Sequence: Synthetic oligonucleotide
cucgagugagacgaucgag

SEQ ID NO: 379007 - RNA, 19 nt, Artificial Sequence
  Description of Artificial Sequence: Synthetic oligonucleotide
gagacgaucgagacuuuga

SEQ ID NO: 379008 - RNA, 19 nt, Artificial Sequence
  Description of Artificial Sequence: Synthetic oligonucleotide
ugccuaguacagcccaagu

SEQ ID NO: 379009 - RNA, 19 nt, Artificial Sequence
  Description of Artificial Sequence: Synthetic oligonucleotide
aguaagaguucgugugcaa

SEQ ID NO: 379010 - RNA, 19 nt, Artificial Sequence
  Description of Artificial Sequence: Synthetic oligonucleotide
gcuaaauuuauaaucuugu

SEQ ID NO: 379011 - RNA, 19 nt, Artificial Sequence
  Description of Artificial Sequence: Synthetic oligonucleotide
aguacagcccaaguuuuaa

SEQ ID NO: 379012 - RNA, 19 nt, Artificial Sequence
  Description of Artificial Sequence: Synthetic oligonucleotide
aauaucgaugcaggaccaa

SEQ ID NO: 379013 - RNA, 19 nt, Artificial Sequence
  Description of Artificial Sequence: Synthetic oligonucleotide
aauucuugguggacaucgu

SEQ ID NO: 379014 - RNA, 19 nt, Artificial Sequence
  Description of Artificial Sequence: Synthetic oligonucleotide
agaaauaagucgacaucau

SEQ ID NO: 379015 - RNA, 19 nt, Artificial Sequence
  Description of Artificial Sequence: Synthetic oligonucleotide
gacuuucgagaagucugag

SEQ ID NO: 379016 - RNA, 19 nt, Artificial Sequence
  Description of Artificial Sequence: Synthetic oligonucleotide
cuucgugaacgggaccugg

SEQ ID NO: 379017 - RNA, 19 nt, Artificial Sequence
  Description of Artificial Sequence: Synthetic oligonucleotide
ucgggugaccgugaucuug

SEQ ID NO: 379018 - RNA, 19 nt, Artificial Sequence
  Description of Artificial Sequence: Synthetic oligonucleotide
gcuaacacgucggaucuag

SEQ ID NO: 379019 - RNA, 19 nt, Artificial Sequence
  Description of Artificial Sequence: Synthetic oligonucleotide
agcauuuaucuggggaaca

SEQ ID NO: 379020 - RNA, 19 nt, Artificial Sequence
  Description of Artificial Sequence: Synthetic oligonucleotide
cacuaaauaagccccggcu

SEQ ID NO: 379021 - RNA, 19 nt, Artificial Sequence
  Description of Artificial Sequence: Synthetic oligonucleotide
accgcagcaaauacuaaaa

SEQ ID NO: 379022 - RNA, 19 nt, Artificial Sequence
  Description of Artificial Sequence: Synthetic oligonucleotide
ggucaauuguauacuuacc

SEQ ID NO: 379023 - RNA, 19 nt, Artificial Sequence
  Description of Artificial Sequence: Synthetic oligonucleotide
ggcccaauucacauuacug

SEQ ID NO: 379024 - RNA, 19 nt, Artificial Sequence
  Description of Artificial Sequence: Synthetic oligonucleotide
gaaccggagugagaccuug

SEQ ID NO: 379025 - RNA, 19 nt, Artificial Sequence
  Description of Artificial Sequence: Synthetic oligonucleotide
cucuauuagcuaaauuuau

SEQ ID NO: 379026 - RNA, 19 nt, Artificial Sequence
  Description of Artificial Sequence: Synthetic oligonucleotide
gaugagcgugaugaagauc

SEQ ID NO: 379027 - RNA, 19 nt, Artificial Sequence
  Description of Artificial Sequence: Synthetic oligonucleotide
augaagaucucgagugaga

SEQ ID NO: 379028 - RNA, 19 nt, Artificial Sequence
  Description of Artificial Sequence: Synthetic oligonucleotide
agggcagauccagucgccg

SEQ ID NO: 379029 - RNA, 19 nt, Artificial Sequence
  Description of Artificial Sequence: Synthetic oligonucleotide
cuaguacagcucaauuaaa

SEQ ID NO: 379030 - RNA, 19 nt, Artificial Sequence
  Description of Artificial Sequence: Synthetic oligonucleotide
acgggaucuggaauguucu

SEQ ID NO: 379031 - RNA, 19 nt, Artificial Sequence
  Description of Artificial Sequence: Synthetic oligonucleotide
aaaucgguguaaagccgau

SEQ ID NO: 379032 - RNA, 19 nt, Artificial Sequence
  Description of Artificial Sequence: Synthetic oligonucleotide
auuugccugugaacuauga

SEQ ID NO: 379033 - RNA, 19 nt, Artificial Sequence
  Description of Artificial Sequence: Synthetic oligonucleotide
uaaauaagccccggcucuu

SEQ ID NO: 379034 - RNA, 19 nt, Artificial Sequence
  Description of Artificial Sequence: Synthetic oligonucleotide
agcagauguagcacuucug

SEQ ID NO: 379035 - RNA, 19 nt, Artificial Sequence
  Description of Artificial Sequence: Synthetic oligonucleotide
cucgaaccggagugagacc

SEQ ID NO: 379036 - RNA, 19 nt, Artificial Sequence
  Description of Artificial Sequence: Synthetic oligonucleotide
aaagccgauaagagagaua

SEQ ID NO: 379037 - RNA, 19 nt, Artificial Sequence
  Description of Artificial Sequence: Synthetic oligonucleotide
acgucggaucuagaagauc

SEQ ID NO: 379038 - RNA, 19 nt, Artificial Sequence
  Description of Artificial Sequence: Synthetic oligonucleotide
agaauggguugauccggaa

SEQ ID NO: 379039 - RNA, 19 nt, Artificial Sequence
  Description of Artificial Sequence: Synthetic oligonucleotide
guaaagccgauaagagaga

SEQ ID NO: 379040 - RNA, 19 nt, Artificial Sequence
  Description of Artificial Sequence: Synthetic oligonucleotide
auaugaacaugaacuggua

SEQ ID NO: 379041 - RNA, 19 nt, Artificial Sequence
  Description of Artificial Sequence: Synthetic oligonucleotide
cagaauggguugauccgga

SEQ ID NO: 379042 - RNA, 19 nt, Artificial Sequence
  Description of Artificial Sequence: Synthetic oligonucleotide
gcacuaaauaagccccggc

SEQ ID NO: 379043 - RNA, 19 nt, Artificial Sequence
  Description of Artificial Sequence: Synthetic oligonucleotide
guugacuacuucucccaua

SEQ ID NO: 379044 - RNA, 19 nt, Artificial Sequence
  Description of Artificial Sequence: Synthetic oligonucleotide
aucguggacgccagcagca

SEQ ID NO: 379045 - RNA, 19 nt, Artificial Sequence
  Description of Artificial Sequence: Synthetic oligonucleotide
gagcuucgugaacgggacc

SEQ ID NO: 379046 - RNA, 19 nt, Artificial Sequence
  Description of Artificial Sequence: Synthetic oligonucleotide
cuuaccuugcuuugcugcu

SEQ ID NO: 379047 - RNA, 19 nt, Artificial Sequence
  Description of Artificial Sequence: Synthetic oligonucleotide
gucaaguaaccagauuuua

SEQ ID NO: 379048 - RNA, 19 nt, Artificial Sequence
  Description of Artificial Sequence: Synthetic oligonucleotide
aaucgguguaaagccgaua

SEQ ID NO: 379049 - RNA, 19 nt, Artificial Sequence
  Description of Artificial Sequence: Synthetic oligonucleotide
aggucuagaucgacuccuc

SEQ ID NO: 379050 - RNA, 19 nt, Artificial Sequence
  Description of Artificial Sequence: Synthetic oligonucleotide
guacagcccaaguuuuaaa

SEQ ID NO: 379051 - RNA, 19 nt, Artificial Sequence
  Description of Artificial Sequence: Synthetic oligonucleotide
agauccagucgccgucacu

SEQ ID NO: 379052 - RNA, 19 nt, Artificial Sequence
  Description of Artificial Sequence: Synthetic oligonucleotide
cuuucgggugaccgugauc

SEQ ID NO: 379053 - RNA, 19 nt, Artificial Sequence
  Description of Artificial Sequence: Synthetic oligonucleotide
agaguucgugugcaaccua

SEQ ID NO: 379054 - RNA, 19 nt, Artificial Sequence
  Description of Artificial Sequence: Synthetic oligonucleotide
ccuuaugaaaugaacuagu

SEQ ID NO: 379055 - RNA, 19 nt, Artificial Sequence
  Description of Artificial Sequence: Synthetic oligonucleotide
aguucgugugcaaccuaca

SEQ ID NO: 379056 - RNA, 19 nt, Artificial Sequence
  Description of Artificial Sequence: Synthetic oligonucleotide
ccgcagcaaauacuaaaag

SEQ ID NO: 379057 - RNA, 19 nt, Artificial Sequence
  Description of Artificial Sequence: Synthetic oligonucleotide
cgagugagacgaucgagac

SEQ ID NO: 379058 - RNA, 19 nt, Artificial Sequence
  Description of Artificial Sequence: Synthetic oligonucleotide
ggauaaccuguuccuucug

SEQ ID NO: 379059 - RNA, 19 nt, Artificial Sequence
  Description of Artificial Sequence: Synthetic oligonucleotide
uccgucuauuggcuuucuu

SEQ ID NO: 379060 - RNA, 19 nt, Artificial Sequence
  Description of Artificial Sequence: Synthetic oligonucleotide
aggcaaauguucacuuaaa

SEQ ID NO: 379061 - RNA, 19 nt, Artificial Sequence
  Description of Artificial Sequence: Synthetic oligonucleotide
cuaacacgucggaucuaga

SEQ ID NO: 379062 - RNA, 19 nt, Artificial Sequence
  Description of Artificial Sequence: Synthetic oligonucleotide
augaacuaguacagcucaa

SEQ ID NO: 379063 - RNA, 19 nt, Artificial Sequence
  Description of Artificial Sequence: Synthetic oligonucleotide
ccuaguacagcccaaguuu

SEQ ID NO: 379064 - RNA, 19 nt, Artificial Sequence
  Description of Artificial Sequence: Synthetic oligonucleotide
gacuccgucuauuggcuuu

SEQ ID NO: 379065 - RNA, 19 nt, Artificial Sequence
  Description of Artificial Sequence: Synthetic oligonucleotide
caagagaguaagaguucgu

SEQ ID NO: 379066 - RNA, 19 nt, Artificial Sequence
  Description of Artificial Sequence: Synthetic oligonucleotide
gaaggcuaacacgucggau

SEQ ID NO: 379067 - RNA, 19 nt, Artificial Sequence
  Description of Artificial Sequence: Synthetic oligonucleotide
caauuugccugugaacuau

SEQ ID NO: 379068 - RNA, 19 nt, Artificial Sequence
  Description of Artificial Sequence: Synthetic oligonucleotide
caggaccaacugccuuucc

SEQ ID NO: 379069 - RNA, 19 nt, Artificial Sequence
  Description of Artificial Sequence: Synthetic oligonucleotide
cucucgaaccggagugaga

SEQ ID NO: 379070 - RNA, 19 nt, Artificial Sequence
  Description of Artificial Sequence: Synthetic oligonucleotide
cgucggaucuagaagaucu

SEQ ID NO: 379071 - RNA, 19 nt, Artificial Sequence
  Description of Artificial Sequence: Synthetic oligonucleotide
ugccagucauucgcacuaa

SEQ ID NO: 379072 - RNA, 19 nt, Artificial Sequence
  Description of Artificial Sequence: Synthetic oligonucleotide
agaacucgaguaagaucuu

SEQ ID NO: 379073 - RNA, 19 nt, Artificial Sequence
  Description of Artificial Sequence: Synthetic oligonucleotide
cgauaagagagauaaugau

SEQ ID NO: 379074 - RNA, 19 nt, Artificial Sequence
  Description of Artificial Sequence: Synthetic oligonucleotide
uucgggugaccgugaucuu

SEQ ID NO: 379075 - RNA, 19 nt, Artificial Sequence
  Description of Artificial Sequence: Synthetic oligonucleotide
guauggcuuaaaacgcaau

SEQ ID NO: 379076 - RNA, 19 nt, Artificial Sequence
  Description of Artificial Sequence: Synthetic oligonucleotide
ggucuagaucgacuccucu

SEQ ID NO: 379077 - RNA, 19 nt, Artificial Sequence
  Description of Artificial Sequence: Synthetic oligonucleotide
gccuaguacagcccaaguu

SEQ ID NO: 379078 - RNA, 19 nt, Artificial Sequence
  Description of Artificial Sequence: Synthetic oligonucleotide
gcuucgugaacgggaccug

SEQ ID NO: 379079 - RNA, 19 nt, Artificial Sequence
  Description of Artificial Sequence: Synthetic oligonucleotide
cuugaacgggaaccagaau

SEQ ID NO: 379080 - RNA, 19 nt, Artificial Sequence
  Description of Artificial Sequence: Synthetic oligonucleotide
cacgucggaucuagaagau

SEQ ID NO: 379081 - RNA, 19 nt, Artificial Sequence
  Description of Artificial Sequence: Synthetic oligonucleotide
agaucucgagugagacgau

SEQ ID NO: 379082 - RNA, 19 nt, Artificial Sequence
  Description of Artificial Sequence: Synthetic oligonucleotide
agccgauaagagagauaau

SEQ ID NO: 379083 - RNA, 19 nt, Artificial Sequence
  Description of Artificial Sequence: Synthetic oligonucleotide
gcaggaccaacugccuuuc

SEQ ID NO: 379084 - RNA, 19 nt, Artificial Sequence
  Description of Artificial Sequence: Synthetic oligonucleotide
ccgucuauuggcuuucuuu

SEQ ID NO: 379085 - RNA, 19 nt, Artificial Sequence
  Description of Artificial Sequence: Synthetic oligonucleotide
ggaugucaaguaaccagau

SEQ ID NO: 379086 - RNA, 19 nt, Artificial Sequence
  Description of Artificial Sequence: Synthetic oligonucleotide
guagcacuucugaccaaau

SEQ ID NO: 379087 - RNA, 19 nt, Artificial Sequence
  Description of Artificial Sequence: Synthetic oligonucleotide
gccagcgucuuuccuauuu

SEQ ID NO: 379088 - RNA, 19 nt, Artificial Sequence
  Description of Artificial Sequence: Synthetic oligonucleotide
gcgacuccgucuauuggcu

SEQ ID NO: 379089 - RNA, 19 nt, Artificial Sequence
  Description of Artificial Sequence: Synthetic oligonucleotide
ccgucacugacgcggaaau

SEQ ID NO: 379090 - RNA, 19 nt, Artificial Sequence
  Description of Artificial Sequence: Synthetic oligonucleotide
ggcuaacacgucggaucua

SEQ ID NO: 379091 - RNA, 19 nt, Artificial Sequence
  Description of Artificial Sequence: Synthetic oligonucleotide
cuccgucuauuggcuuucu

SEQ ID NO: 379092 - RNA, 19 nt, Artificial Sequence
  Description of Artificial Sequence: Synthetic oligonucleotide
ccuuucgggugaccgugau

SEQ ID NO: 379093 - RNA, 19 nt, Artificial Sequence
  Description of Artificial Sequence: Synthetic oligonucleotide
cgaaccggagugagaccuu

SEQ ID NO: 379094 - RNA, 19 nt, Artificial Sequence
  Description of Artificial Sequence: Synthetic oligonucleotide
ccacgggaucuggaauguu

SEQ ID NO: 379095 - RNA, 19 nt, Artificial Sequence
  Description of Artificial Sequence: Synthetic oligonucleotide
aauguuaagucauuucugc

SEQ ID NO: 379096 - RNA, 19 nt, Artificial Sequence
  Description of Artificial Sequence: Synthetic oligonucleotide
aauauuggcgcauaauugg

SEQ ID NO: 379097 - RNA, 19 nt, Artificial Sequence
  Description of Artificial Sequence: Synthetic oligonucleotide
ugauaugccauucaaauac

SEQ ID NO: 379098 - RNA, 19 nt, Artificial Sequence
  Description of Artificial Sequence: Synthetic oligonucleotide
auuuuaguucuccugaucg

SEQ ID NO: 379099 - RNA, 19 nt, Artificial Sequence
  Description of Artificial Sequence: Synthetic oligonucleotide
accuuaaucgccuugaauc

SEQ ID NO: 379100 - RNA, 19 nt, Artificial Sequence
  Description of Artificial Sequence: Synthetic oligonucleotide
uuaagaaucaucugaagcu

SEQ ID NO: 379101 - RNA, 19 nt, Artificial Sequence
  Description of Artificial Sequence: Synthetic oligonucleotide
aaggcggcgaccuauuucc

SEQ ID NO: 379102 - RNA, 19 nt, Artificial Sequence
  Description of Artificial Sequence: Synthetic oligonucleotide
aaaacgaaccuuaaucgcc

SEQ ID NO: 379103 - RNA, 19 nt, Artificial Sequence
  Description of Artificial Sequence: Synthetic oligonucleotide
agguauuugagcugaaacc

SEQ ID NO: 379104 - RNA, 19 nt, Artificial Sequence
  Description of Artificial Sequence: Synthetic oligonucleotide
uccauaacaaucacuaugc

SEQ ID NO: 379105 - RNA, 19 nt, Artificial Sequence
  Description of Artificial Sequence: Synthetic oligonucleotide
aaaguugccauauauccca

SEQ ID NO: 379106 - RNA, 19 nt, Artificial Sequence
  Description of Artificial Sequence: Synthetic oligonucleotide
agaauaagaauggacgucc

SEQ ID NO: 379107 - RNA, 19 nt, Artificial Sequence
  Description of Artificial Sequence: Synthetic oligonucleotide
aauucuaauguaaccagac

SEQ ID NO: 379108 - RNA, 19 nt, Artificial Sequence
  Description of Artificial Sequence: Synthetic oligonucleotide
uuauccuggagaaggaacg

SEQ ID NO: 379109 - RNA, 19 nt, Artificial Sequence
  Description of Artificial Sequence: Synthetic oligonucleotide
uccgaaauuaugaugguug

SEQ ID NO: 379110 - RNA, 19 nt, Artificial Sequence
  Description of Artificial Sequence: Synthetic oligonucleotide
acauaaucuggcuucaggg

SEQ ID NO: 379111 - RNA, 19 nt, Artificial Sequence
  Description of Artificial Sequence: Synthetic oligonucleotide
auuucaauuacacgacccg

SEQ ID NO: 379112 - RNA, 19 nt, Artificial Sequence
  Description of Artificial Sequence: Synthetic oligonucleotide
ugacacaucauuaucugca

SEQ ID NO: 379113 - RNA, 19 nt, Artificial Sequence
  Description of Artificial Sequence: Synthetic oligonucleotide
aaugcuagcgaagcuaggg

SEQ ID NO: 379114 - RNA, 19 nt, Artificial Sequence
  Description of Artificial Sequence: Synthetic oligonucleotide
cagaauaauuacuugcuag

SEQ ID NO: 379115 - RNA, 19 nt, Artificial Sequence
  Description of Artificial Sequence: Synthetic oligonucleotide
cuagcuagauuacaguucc

SEQ ID NO: 379116 - RNA, 19 nt, Artificial Sequence
  Description of Artificial Sequence: Synthetic oligonucleotide
uuuguuaagagcacacagu

SEQ ID NO: 379117 - RNA, 19 nt, Artificial Sequence
  Description of Artificial Sequence: Synthetic oligonucleotide
ugcauguuacuguugauca

SEQ ID NO: 379118 - RNA, 19 nt, Artificial Sequence
  Description of Artificial Sequence: Synthetic oligonucleotide
ugguuuggcaaaacgaacc

SEQ ID NO: 379119 - RNA, 19 nt, Artificial Sequence
  Description of Artificial Sequence: Synthetic oligonucleotide
aguuuguagaguuuguccu

SEQ ID NO: 379120 - RNA, 19 nt, Artificial Sequence
  Description of Artificial Sequence: Synthetic oligonucleotide
gcaaaacgaaccuuaaucg

SEQ ID NO: 379121 - RNA, 19 nt, Artificial Sequence
  Description of Artificial Sequence: Synthetic oligonucleotide
auuggcgcauaauugggcg

SEQ ID NO: 379122 - RNA, 19 nt, Artificial Sequence
  Description of Artificial Sequence: Synthetic oligonucleotide
uauaaguuccuucccagaa

SEQ ID NO: 379123 - RNA, 19 nt, Artificial Sequence
  Description of Artificial Sequence: Synthetic oligonucleotide
acaacaucuauucugccga

SEQ ID NO: 379124 - RNA, 19 nt, Artificial Sequence
  Description of Artificial Sequence: Synthetic oligonucleotide
aaaggugcacaauccaugu

SEQ ID NO: 379125 - RNA, 19 nt, Artificial Sequence
  Description of Artificial Sequence: Synthetic oligonucleotide
caaaacgaaccuuaaucgc

SEQ ID NO: 379126 - RNA, 19 nt, Artificial Sequence
  Description of Artificial Sequence: Synthetic oligonucleotide
gaauauuggcgcauaauug

SEQ ID NO: 379127 - RNA, 19 nt, Artificial Sequence
  Description of Artificial Sequence: Synthetic oligonucleotide
aauccauguaauaugggcu

SEQ ID NO: 379128 - RNA, 19 nt, Artificial Sequence
  Description of Artificial Sequence: Synthetic oligonucleotide
guagaugucgaaugacugg

SEQ ID NO: 379129 - RNA, 19 nt, Artificial Sequence
  Description of Artificial Sequence: Synthetic oligonucleotide
ugaugguuguaucagcaga

SEQ ID NO: 379130 - RNA, 19 nt, Artificial Sequence
  Description of Artificial Sequence: Synthetic oligonucleotide
ucaauuacacgacccguug

SEQ ID NO: 379131 - RNA, 19 nt, Artificial Sequence
  Description of Artificial Sequence: Synthetic oligonucleotide
gaaaauccgaaacuuaucu

SEQ ID NO: 379132 - RNA, 19 nt, Artificial Sequence
  Description of Artificial Sequence: Synthetic oligonucleotide
cacaacaucuauucugccg

SEQ ID NO: 379133 - RNA, 19 nt, Artificial Sequence
  Description of Artificial Sequence: Synthetic oligonucleotide
aauuacacgacccguugau

SEQ ID NO: 379134 - RNA, 19 nt, Artificial Sequence
  Description of Artificial Sequence: Synthetic oligonucleotide
uuaaucgccuugaaucuug

SEQ ID NO: 379135 - RNA, 19 nt, Artificial Sequence
  Description of Artificial Sequence: Synthetic oligonucleotide
cauauaaguuccuucccag

SEQ ID NO: 379136 - RNA, 19 nt, Artificial Sequence
  Description of Artificial Sequence: Synthetic oligonucleotide
uccgaaacuuaucugaaau

SEQ ID NO: 379137 - RNA, 19 nt, Artificial Sequence
  Description of Artificial Sequence: Synthetic oligonucleotide
ugacaagcguuaaaguggc

SEQ ID NO: 379138 - RNA, 19 nt, Artificial Sequence
  Description of Artificial Sequence: Synthetic oligonucleotide
auaaucuggcuucagggcu

SEQ ID NO: 379139 - RNA, 19 nt, Artificial Sequence
  Description of Artificial Sequence: Synthetic oligonucleotide
auacauaauacucuccaau

SEQ ID NO: 379140 - RNA, 19 nt, Artificial Sequence
  Description of Artificial Sequence: Synthetic oligonucleotide
ugaggcgguacaaagcagc

SEQ ID NO: 379141 - RNA, 19 nt, Artificial Sequence
  Description of Artificial Sequence: Synthetic oligonucleotide
uuagaagguauuugagcug

SEQ ID NO: 379142 - RNA, 19 nt, Artificial Sequence
  Description of Artificial Sequence: Synthetic oligonucleotide
acauacuaacauuauuaca

SEQ ID NO: 379143 - RNA, 19 nt, Artificial Sequence
  Description of Artificial Sequence: Synthetic oligonucleotide
acugauuauagcauauaag

SEQ ID NO: 379144 - RNA, 19 nt, Artificial Sequence
  Description of Artificial Sequence: Synthetic oligonucleotide
uuuugacaagcguuaaagu

SEQ ID NO: 379145 - RNA, 19 nt, Artificial Sequence
  Description of Artificial Sequence: Synthetic oligonucleotide
aucgccuugaaucuugaca

SEQ ID NO: 379146 - RNA, 19 nt, Artificial Sequence
  Description of Artificial Sequence: Synthetic oligonucleotide
agaucuaugaacagaauaa

SEQ ID NO: 379147 - RNA, 19 nt, Artificial Sequence
  Description of Artificial Sequence: Synthetic oligonucleotide
cuuauccuggagaaggaac

SEQ ID NO: 379148 - RNA, 19 nt, Artificial Sequence
  Description of Artificial Sequence: Synthetic oligonucleotide
cuaauguaaccagacuugg

SEQ ID NO: 379149 - RNA, 19 nt, Artificial Sequence
  Description of Artificial Sequence: Synthetic oligonucleotide
uuaugaugguuguaucagc

SEQ ID NO: 379150 - RNA, 19 nt, Artificial Sequence
  Description of Artificial Sequence: Synthetic oligonucleotide
caccucauguccaaugucc

SEQ ID NO: 379151 - RNA, 19 nt, Artificial Sequence
  Description of Artificial Sequence: Synthetic oligonucleotide
ggcaaaacgaaccuuaauc

SEQ ID NO: 379152 - RNA, 19 nt, Artificial Sequence
  Description of Artificial Sequence: Synthetic oligonucleotide
cuagggucgauguguaagg

SEQ ID NO: 379153 - RNA, 19 nt, Artificial Sequence
  Description of Artificial Sequence: Synthetic oligonucleotide
cuuagaagguauuugagcu

SEQ ID NO: 379154 - RNA, 19 nt, Artificial Sequence
  Description of Artificial Sequence: Synthetic oligonucleotide
uucaucacuuauccuggag

SEQ ID NO: 379155 - RNA, 19 nt, Artificial Sequence
  Description of Artificial Sequence: Synthetic oligonucleotide
uauuggcgcauaauugggc

SEQ ID NO: 379156 - RNA, 19 nt, Artificial Sequence
  Description of Artificial Sequence: Synthetic oligonucleotide
aauuugccugaccaaaguu

SEQ ID NO: 379157 - RNA, 19 nt, Artificial Sequence
  Description of Artificial Sequence: Synthetic oligonucleotide
caaaggugcacaauccaug

SEQ ID NO: 379158 - RNA, 19 nt, Artificial Sequence
  Description of Artificial Sequence: Synthetic oligonucleotide
aauaagaauggacguccau

SEQ ID NO: 379159 - RNA, 19 nt, Artificial Sequence
  Description of Artificial Sequence: Synthetic oligonucleotide
aauugccagaguauugcag

SEQ ID NO: 379160 - RNA, 19 nt, Artificial Sequence
  Description of Artificial Sequence: Synthetic oligonucleotide
acacugguuuggcaaaacg

SEQ ID NO: 379161 - RNA, 19 nt, Artificial Sequence
  Description of Artificial Sequence: Synthetic oligonucleotide
gauaacuccaaaggugggc

SEQ ID NO: 379162 - RNA, 19 nt, Artificial Sequence
  Description of Artificial Sequence: Synthetic oligonucleotide
auggacguccauaacaauc

SEQ ID NO: 379163 - RNA, 19 nt, Artificial Sequence
  Description of Artificial Sequence: Synthetic oligonucleotide
uugacacaucauuaucugc

SEQ ID NO: 379164 - RNA, 19 nt, Artificial Sequence
  Description of Artificial Sequence: Synthetic oligonucleotide
ggcggagaauauuuaaugg

SEQ ID NO: 379165 - RNA, 19 nt, Artificial Sequence
  Description of Artificial Sequence: Synthetic oligonucleotide
auuccguauaugaagaaga

SEQ ID NO: 379166 - RNA, 19 nt, Artificial Sequence
  Description of Artificial Sequence: Synthetic oligonucleotide
aaacagagaacugauuaua

SEQ ID NO: 379167 - RNA, 19 nt, Artificial Sequence
  Description of Artificial Sequence: Synthetic oligonucleotide
cugacguccguuuuccacc

SEQ ID NO: 379168 - RNA, 19 nt, Artificial Sequence
  Description of Artificial Sequence: Synthetic oligonucleotide
aaucgccuugaaucuugac

SEQ ID NO: 379169 - RNA, 19 nt, Artificial Sequence
  Description of Artificial Sequence: Synthetic oligonucleotide
auucuaauguaaccagacu

SEQ ID NO: 379170 - RNA, 19 nt, Artificial Sequence
  Description of Artificial Sequence: Synthetic oligonucleotide
agcaugauguucccucggg

SEQ ID NO: 379171 - RNA, 19 nt, Artificial Sequence
  Description of Artificial Sequence: Synthetic oligonucleotide
aggugcacaauccauguaa

SEQ ID NO: 379172 - RNA, 19 nt, Artificial Sequence
  Description of Artificial Sequence: Synthetic oligonucleotide
uagauuacaguuccuugua

SEQ ID NO: 379173 - RNA, 19 nt, Artificial Sequence
  Description of Artificial Sequence: Synthetic oligonucleotide
auguguaagggauuccagu

SEQ ID NO: 379174 - RNA, 19 nt, Artificial Sequence
  Description of Artificial Sequence: Synthetic oligonucleotide
agucuuuaagaaucaucug

SEQ ID NO: 379175 - RNA, 19 nt, Artificial Sequence
  Description of Artificial Sequence: Synthetic oligonucleotide
auguccuuaaggcggcgac

SEQ ID NO: 379176 - RNA, 19 nt, Artificial Sequence
  Description of Artificial Sequence: Synthetic oligonucleotide
aagagccccgcaaaugaac

SEQ ID NO: 379177 - RNA, 19 nt, Artificial Sequence
  Description of Artificial Sequence: Synthetic oligonucleotide
aauuacuugcuagcuagau

SEQ ID NO: 379178 - RNA, 19 nt, Artificial Sequence
  Description of Artificial Sequence: Synthetic oligonucleotide
ugucgaaugacugguguga

SEQ ID NO: 379179 - RNA, 19 nt, Artificial Sequence
  Description of Artificial Sequence: Synthetic oligonucleotide
uucaauuacacgacccguu

SEQ ID NO: 379180 - RNA, 19 nt, Artificial Sequence
  Description of Artificial Sequence: Synthetic oligonucleotide
caucuauucugccgaaagc

SEQ ID NO: 379181 - RNA, 19 nt, Artificial Sequence
  Description of Artificial Sequence: Synthetic oligonucleotide
auauuggcgcauaauuggg

SEQ ID NO: 379182 - RNA, 19 nt, Artificial Sequence
  Description of Artificial Sequence: Synthetic oligonucleotide
uuucaauuacacgacccgu

SEQ ID NO: 379183 - RNA, 19 nt, Artificial Sequence
  Description of Artificial Sequence: Synthetic oligonucleotide
auauaaguuccuucccaga

SEQ ID NO: 379184 - RNA, 19 nt, Artificial Sequence
  Description of Artificial Sequence: Synthetic oligonucleotide
cacaagaucuacauaugca

SEQ ID NO: 379185 - RNA, 19 nt, Artificial Sequence
  Description of Artificial Sequence: Synthetic oligonucleotide
acaagagcacucugaagcu

SEQ ID NO: 379186 - RNA, 19 nt, Artificial Sequence
  Description of Artificial Sequence: Synthetic oligonucleotide
agugguuuauacaacucca

SEQ ID NO: 379187 - RNA, 19 nt, Artificial Sequence
  Description of Artificial Sequence: Synthetic oligonucleotide
cuugauacacuucuccaga

SEQ ID NO: 379188 - RNA, 19 nt, Artificial Sequence
  Description of Artificial Sequence: Synthetic oligonucleotide
uuggcgcauaauugggcgg

SEQ ID NO: 379189 - RNA, 19 nt, Artificial Sequence
  Description of Artificial Sequence: Synthetic oligonucleotide
cugguuuggcaaaacgaac

SEQ ID NO: 379190 - RNA, 19 nt, Artificial Sequence
  Description of Artificial Sequence: Synthetic oligonucleotide
cugaaucuaucuuauguaa

SEQ ID NO: 379191 - RNA, 19 nt, Artificial Sequence
  Description of Artificial Sequence: Synthetic oligonucleotide
uuauuaagauacagaucua

SEQ ID NO: 379192 - RNA, 19 nt, Artificial Sequence
  Description of Artificial Sequence: Synthetic oligonucleotide
ccguauaugaagaagaaaa

SEQ ID NO: 379193 - RNA, 19 nt, Artificial Sequence
  Description of Artificial Sequence: Synthetic oligonucleotide
acagaauaauuacuugcua

SEQ ID NO: 379194 - RNA, 19 nt, Artificial Sequence
  Description of Artificial Sequence: Synthetic oligonucleotide
augucgaaugacuggugug

SEQ ID NO: 379195 - RNA, 19 nt, Artificial Sequence
  Description of Artificial Sequence: Synthetic oligonucleotide
gaauggacguccauaacaa

SEQ ID NO: 379196 - RNA, 19 nt, Artificial Sequence
  Description of Artificial Sequence: Synthetic oligonucleotide
ugcuagcgaagcuaggguc

SEQ ID NO: 379197 - RNA, 19 nt, Artificial Sequence
  Description of Artificial Sequence: Synthetic oligonucleotide
cauaauugggcggagaaua

SEQ ID NO: 379198 - RNA, 19 nt, Artificial Sequence
  Description of Artificial Sequence: Synthetic oligonucleotide
ugccucgggagucacgggc

SEQ ID NO: 379199 - RNA, 19 nt, Artificial Sequence
  Description of Artificial Sequence: Synthetic oligonucleotide
aauggacguccauaacaau

SEQ ID NO: 379200 - RNA, 19 nt, Artificial Sequence
  Description of Artificial Sequence: Synthetic oligonucleotide
ggauucuugacugaagcac

SEQ ID NO: 379201 - RNA, 19 nt, Artificial Sequence
  Description of Artificial Sequence: Synthetic oligonucleotide
agaucuacauaugcauuug

SEQ ID NO: 379202 - RNA, 19 nt, Artificial Sequence
  Description of Artificial Sequence: Synthetic oligonucleotide
caaguauugcuccccauga

SEQ ID NO: 379203 - RNA, 19 nt, Artificial Sequence
  Description of Artificial Sequence: Synthetic oligonucleotide
uaaggcggcgaccuauuuc

SEQ ID NO: 379204 - RNA, 19 nt, Artificial Sequence
  Description of Artificial Sequence: Synthetic oligonucleotide
cauccuuagaagguauuug

SEQ ID NO: 379205 - RNA, 19 nt, Artificial Sequence
  Description of Artificial Sequence: Synthetic oligonucleotide
aggaagugguuuauacaac

SEQ ID NO: 379206 - RNA, 19 nt, Artificial Sequence
  Description of Artificial Sequence: Synthetic oligonucleotide
uacacgacccguugauucu

SEQ ID NO: 379207 - RNA, 19 nt, Artificial Sequence
  Description of Artificial Sequence: Synthetic oligonucleotide
gcuagauuacaguuccuug

SEQ ID NO: 379208 - RNA, 19 nt, Artificial Sequence
  Description of Artificial Sequence: Synthetic oligonucleotide
cagaauaagaauggacguc

SEQ ID NO: 379209 - RNA, 19 nt, Artificial Sequence
  Description of Artificial Sequence: Synthetic oligonucleotide
uugggcggagaauauuuaa

SEQ ID NO: 379210 - RNA, 19 nt, Artificial Sequence
  Description of Artificial Sequence: Synthetic oligonucleotide
uagggucgauguguaaggg

SEQ ID NO: 379211 - RNA, 19 nt, Artificial Sequence
  Description of Artificial Sequence: Synthetic oligonucleotide
cauaugcauuugaaaugac

SEQ ID NO: 379212 - RNA, 19 nt, Artificial Sequence
  Description of Artificial Sequence: Synthetic oligonucleotide
uccguauaugaagaagaaa

SEQ ID NO: 379213 - RNA, 19 nt, Artificial Sequence
  Description of Artificial Sequence: Synthetic oligonucleotide
ugccgaaagcauccagggc

SEQ ID NO: 379214 - RNA, 19 nt, Artificial Sequence
  Description of Artificial Sequence: Synthetic oligonucleotide
guauugcuccccaugaaga

SEQ ID NO: 379215 - RNA, 19 nt, Artificial Sequence
  Description of Artificial Sequence: Synthetic oligonucleotide
uaaucgccuugaaucuuga

SEQ ID NO: 379216 - RNA, 19 nt, Artificial Sequence
  Description of Artificial Sequence: Synthetic oligonucleotide
augcuagcgaagcuagggu

SEQ ID NO: 379217 - RNA, 19 nt, Artificial Sequence
  Description of Artificial Sequence: Synthetic oligonucleotide
uggauacacugguuuggca

SEQ ID NO: 379218 - RNA, 19 nt, Artificial Sequence
  Description of Artificial Sequence: Synthetic oligonucleotide
cuucauaugaucccaugcu

SEQ ID NO: 379219 - RNA, 19 nt, Artificial Sequence
  Description of Artificial Sequence: Synthetic oligonucleotide
acaagcguuaaaguggcuu

SEQ ID NO: 379220 - RNA, 19 nt, Artificial Sequence
  Description of Artificial Sequence: Synthetic oligonucleotide
agaauauuuaaugguucua

SEQ ID NO: 379221 - RNA, 19 nt, Artificial Sequence
  Description of Artificial Sequence: Synthetic oligonucleotide
acgagcaaauccugaugug

SEQ ID NO: 379222 - RNA, 19 nt, Artificial Sequence
  Description of Artificial Sequence: Synthetic oligonucleotide
ccaagggcauacauaauac

SEQ ID NO: 379223 - RNA, 19 nt, Artificial Sequence
  Description of Artificial Sequence: Synthetic oligonucleotide
ucgcagcacuguaauuugc

SEQ ID NO: 379224 - RNA, 19 nt, Artificial Sequence
  Description of Artificial Sequence: Synthetic oligonucleotide
ucguuuugguacagcuaca

SEQ ID NO: 379225 - RNA, 19 nt, Artificial Sequence
  Description of Artificial Sequence: Synthetic oligonucleotide
uggcaaaacgaaccuuaau

SEQ ID NO: 379226 - RNA, 19 nt, Artificial Sequence
  Description of Artificial Sequence: Synthetic oligonucleotide
aaucacuaugccagauccu

SEQ ID NO: 379227 - RNA, 19 nt, Artificial Sequence
  Description of Artificial Sequence: Synthetic oligonucleotide
ggagaauauuuaaugguuc

SEQ ID NO: 379228 - RNA, 19 nt, Artificial Sequence
  Description of Artificial Sequence: Synthetic oligonucleotide
uguaucagcagagccuuuu

SEQ ID NO: 379229 - RNA, 19 nt, Artificial Sequence
  Description of Artificial Sequence: Synthetic oligonucleotide
caaugcuagcgaagcuagg

SEQ ID NO: 379230 - RNA, 19 nt, Artificial Sequence
  Description of Artificial Sequence: Synthetic oligonucleotide
ugacguccguuuuccacca

SEQ ID NO: 379231 - RNA, 19 nt, Artificial Sequence
  Description of Artificial Sequence: Synthetic oligonucleotide
cuggauacacugguuuggc

SEQ ID NO: 379232 - RNA, 19 nt, Artificial Sequence
  Description of Artificial Sequence: Synthetic oligonucleotide
cuaugccagauccuuuauc

SEQ ID NO: 379233 - RNA, 19 nt, Artificial Sequence
  Description of Artificial Sequence: Synthetic oligonucleotide
aucuaugaacagaauaauu

SEQ ID NO: 379234 - RNA, 19 nt, Artificial Sequence
  Description of Artificial Sequence: Synthetic oligonucleotide
gcuagcgaagcuagggucg

SEQ ID NO: 379235 - RNA, 19 nt, Artificial Sequence
  Description of Artificial Sequence: Synthetic oligonucleotide
uguccuuaaggcggcgacc

SEQ ID NO: 379236 - RNA, 19 nt, Artificial Sequence
  Description of Artificial Sequence: Synthetic oligonucleotide
agggucgauguguaaggga

SEQ ID NO: 379237 - RNA, 19 nt, Artificial Sequence
  Description of Artificial Sequence: Synthetic oligonucleotide
cauccgugacccagcauug

SEQ ID NO: 379238 - RNA, 19 nt, Artificial Sequence
  Description of Artificial Sequence: Synthetic oligonucleotide
gcuagggucgauguguaag

SEQ ID NO: 379239 - RNA, 19 nt, Artificial Sequence
  Description of Artificial Sequence: Synthetic oligonucleotide
gcugaggcgguacaaagca

SEQ ID NO: 379240 - RNA, 19 nt, Artificial Sequence
  Description of Artificial Sequence: Synthetic oligonucleotide
gucgauguguaagggauuc

SEQ ID NO: 379241 - RNA, 19 nt, Artificial Sequence
  Description of Artificial Sequence: Synthetic oligonucleotide
gaauaagaauggacgucca

SEQ ID NO: 379242 - RNA, 19 nt, Artificial Sequence
  Description of Artificial Sequence: Synthetic oligonucleotide
cagaacacccaucuucgca

SEQ ID NO: 379243 - RNA, 19 nt, Artificial Sequence
  Description of Artificial Sequence: Synthetic oligonucleotide
gugauaugccauucaaaua

SEQ ID NO: 379244 - RNA, 19 nt, Artificial Sequence
  Description of Artificial Sequence: Synthetic oligonucleotide
gcaaugcuagcgaagcuag

SEQ ID NO: 379245 - RNA, 19 nt, Artificial Sequence
  Description of Artificial Sequence: Synthetic oligonucleotide
uggcgcauaauugggcgga

SEQ ID NO: 379246 - RNA, 19 nt, Artificial Sequence
  Description of Artificial Sequence: Synthetic oligonucleotide
ccaauuccguauaugaaga

SEQ ID NO: 379247 - RNA, 19 nt, Artificial Sequence
  Description of Artificial Sequence: Synthetic oligonucleotide
cugaggcgguacaaagcag

SEQ ID NO: 379248 - RNA, 19 nt, Artificial Sequence
  Description of Artificial Sequence: Synthetic oligonucleotide
gaucuaugaacagaauaau

SEQ ID NO: 379249 - RNA, 19 nt, Artificial Sequence
  Description of Artificial Sequence: Synthetic oligonucleotide
acuaugccagauccuuuau

SEQ ID NO: 379250 - RNA, 19 nt, Artificial Sequence
  Description of Artificial Sequence: Synthetic oligonucleotide
gacccguugauucuugaau

SEQ ID NO: 379251 - RNA, 19 nt, Artificial Sequence
  Description of Artificial Sequence: Synthetic oligonucleotide
gggcauacauaauacucuc

SEQ ID NO: 379252 - RNA, 19 nt, Artificial Sequence
  Description of Artificial Sequence: Synthetic oligonucleotide
cccaaauacaagagcacuc

SEQ ID NO: 379253 - RNA, 19 nt, Artificial Sequence
  Description of Artificial Sequence: Synthetic oligonucleotide
caauugccagaguauugca

SEQ ID NO: 379254 - RNA, 19 nt, Artificial Sequence
  Description of Artificial Sequence: Synthetic oligonucleotide
ucgauguguaagggauucc

SEQ ID NO: 379255 - RNA, 19 nt, Artificial Sequence
  Description of Artificial Sequence: Synthetic oligonucleotide
caauuacacgacccguuga

SEQ ID NO: 379256 - RNA, 19 nt, Artificial Sequence
  Description of Artificial Sequence: Synthetic oligonucleotide
gccgaaagcauccagggcu

SEQ ID NO: 379257 - RNA, 19 nt, Artificial Sequence
  Description of Artificial Sequence: Synthetic oligonucleotide
agcgaagcuagggucgaug

SEQ ID NO: 379258 - RNA, 19 nt, Artificial Sequence
  Description of Artificial Sequence: Synthetic oligonucleotide
uaauugggcggagaauauu

SEQ ID NO: 379259 - RNA, 19 nt, Artificial Sequence
  Description of Artificial Sequence: Synthetic oligonucleotide
uacacugguuuggcaaaac

SEQ ID NO: 379260 - RNA, 19 nt, Artificial Sequence
  Description of Artificial Sequence: Synthetic oligonucleotide
aagcguuaaaguggcuuuu

SEQ ID NO: 379261 - RNA, 19 nt, Artificial Sequence
  Description of Artificial Sequence: Synthetic oligonucleotide
uuaaggcggcgaccuauuu

SEQ ID NO: 379262 - RNA, 19 nt, Artificial Sequence
  Description of Artificial Sequence: Synthetic oligonucleotide
cauguaauaugggcuucuc

SEQ ID NO: 379263 - RNA, 19 nt, Artificial Sequence
  Description of Artificial Sequence: Synthetic oligonucleotide
gauguaggcacaagaucua

SEQ ID NO: 379264 - RNA, 19 nt, Artificial Sequence
  Description of Artificial Sequence: Synthetic oligonucleotide
agaguauugcagaggccca

SEQ ID NO: 379265 - RNA, 19 nt, Artificial Sequence
  Description of Artificial Sequence: Synthetic oligonucleotide
gcaugauguucccucgggc

SEQ ID NO: 379266 - RNA, 19 nt, Artificial Sequence
  Description of Artificial Sequence: Synthetic oligonucleotide
ccgaaacuuaucugaaauc

SEQ ID NO: 379267 - RNA, 19 nt, Artificial Sequence
  Description of Artificial Sequence: Synthetic oligonucleotide
ggcauacauaauacucucc

SEQ ID NO: 379268 - RNA, 19 nt, Artificial Sequence
  Description of Artificial Sequence: Synthetic oligonucleotide
ucaugucaaugguccacuu

SEQ ID NO: 379269 - RNA, 19 nt, Artificial Sequence
  Description of Artificial Sequence: Synthetic oligonucleotide
auccgugacccagcauugg

SEQ ID NO: 379270 - RNA, 19 nt, Artificial Sequence
  Description of Artificial Sequence: Synthetic oligonucleotide
auccgaaauuaugaugguu

SEQ ID NO: 379271 - RNA, 19 nt, Artificial Sequence
  Description of Artificial Sequence: Synthetic oligonucleotide
gcacgagcaaauccugaug

SEQ ID NO: 379272 - RNA, 19 nt, Artificial Sequence
  Description of Artificial Sequence: Synthetic oligonucleotide
cguugauucuugaaugguc

SEQ ID NO: 379273 - RNA, 19 nt, Artificial Sequence
  Description of Artificial Sequence: Synthetic oligonucleotide
gucugacaacagcuccaag

SEQ ID NO: 379274 - RNA, 19 nt, Artificial Sequence
  Description of Artificial Sequence: Synthetic oligonucleotide
ugcccgggucacuuggaaa

SEQ ID NO: 379275 - RNA, 19 nt, Artificial Sequence
  Description of Artificial Sequence: Synthetic oligonucleotide
gcauguuacuguugaucac

SEQ ID NO: 379276 - RNA, 19 nt, Artificial Sequence
  Description of Artificial Sequence: Synthetic oligonucleotide
ccgugacccagcauugggg

SEQ ID NO: 379277 - RNA, 19 nt, Artificial Sequence
  Description of Artificial Sequence: Synthetic oligonucleotide
cacgacccguugauucuug

SEQ ID NO: 379278 - RNA, 19 nt, Artificial Sequence
  Description of Artificial Sequence: Synthetic oligonucleotide
aggaacggucccucaggau

SEQ ID NO: 379279 - RNA, 19 nt, Artificial Sequence
  Description of Artificial Sequence: Synthetic oligonucleotide
caagcguuaaaguggcuuu

SEQ ID NO: 379280 - RNA, 19 nt, Artificial Sequence
  Description of Artificial Sequence: Synthetic oligonucleotide
acgacccguugauucuuga

SEQ ID NO: 379281 - RNA, 19 nt, Artificial Sequence
  Description of Artificial Sequence: Synthetic oligonucleotide
acagaucuaugaacagaau

SEQ ID NO: 379282 - RNA, 19 nt, Artificial Sequence
  Description of Artificial Sequence: Synthetic oligonucleotide
agcguuaaaguggcuuuua

SEQ ID NO: 379283 - RNA, 19 nt, Artificial Sequence
  Description of Artificial Sequence: Synthetic oligonucleotide
ggaacggucccucaggauu

SEQ ID NO: 379284 - RNA, 19 nt, Artificial Sequence
  Description of Artificial Sequence: Synthetic oligonucleotide
auguuacuguugaucacuu

SEQ ID NO: 379285 - RNA, 19 nt, Artificial Sequence
  Description of Artificial Sequence: Synthetic oligonucleotide
ggcggcgaccuauuucccc

SEQ ID NO: 379286 - RNA, 19 nt, Artificial Sequence
  Description of Artificial Sequence: Synthetic oligonucleotide
cagcacgagcaaauccuga

SEQ ID NO: 379287 - RNA, 19 nt, Artificial Sequence
  Description of Artificial Sequence: Synthetic oligonucleotide
ucgggccaucagucugccg

SEQ ID NO: 379288 - RNA, 19 nt, Artificial Sequence
  Description of Artificial Sequence: Synthetic oligonucleotide
ccuuaaucgccuugaaucu

SEQ ID NO: 379289 - RNA, 19 nt, Artificial Sequence
  Description of Artificial Sequence: Synthetic oligonucleotide
caacaucuauucugccgaa

SEQ ID NO: 379290 - RNA, 19 nt, Artificial Sequence
  Description of Artificial Sequence: Synthetic oligonucleotide
aggcgguacaaagcagccu

SEQ ID NO: 379291 - RNA, 19 nt, Artificial Sequence
  Description of Artificial Sequence: Synthetic oligonucleotide
uccuuaaggcggcgaccua

SEQ ID NO: 379292 - RNA, 19 nt, Artificial Sequence
  Description of Artificial Sequence: Synthetic oligonucleotide
cuagcgaagcuagggucga

SEQ ID NO: 379293 - RNA, 19 nt, Artificial Sequence
  Description of Artificial Sequence: Synthetic oligonucleotide
aggcggcgaccuauuuccc

SEQ ID NO: 379294 - RNA, 19 nt, Artificial Sequence
  Description of Artificial Sequence: Synthetic oligonucleotide
gcggcgaccuauuucccca

SEQ ID NO: 379295 - RNA, 19 nt, Artificial Sequence
  Description of Artificial Sequence: Synthetic oligonucleotide
cauccgaaauuaugauggu

SEQ ID NO: 379296 - RNA, 19 nt, Artificial Sequence
  Description of Artificial Sequence: Synthetic oligonucleotide
cucgggccaucagucugcc

SEQ ID NO: 379297 - RNA, 19 nt, Artificial Sequence
  Description of Artificial Sequence: Synthetic oligonucleotide
gggucgauguguaagggau

SEQ ID NO: 379298 - RNA, 19 nt, Artificial Sequence
  Description of Artificial Sequence: Synthetic oligonucleotide
cuuaaggcggcgaccuauu

SEQ ID NO: 379299 - RNA, 19 nt, Artificial Sequence
  Description of Artificial Sequence: Synthetic oligonucleotide
ccaccucauguccaauguc

SEQ ID NO: 379300 - RNA, 19 nt, Artificial Sequence
  Description of Artificial Sequence: Synthetic oligonucleotide
ccgaaauuaugaugguugu

SEQ ID NO: 379301 - RNA, 19 nt, Artificial Sequence
  Description of Artificial Sequence: Synthetic oligonucleotide
gcgggucaagcuugcccag

SEQ ID NO: 379302 - RNA, 19 nt, Artificial Sequence
  Description of Artificial Sequence: Synthetic oligonucleotide
gcgaagcuagggucgaugu

SEQ ID NO: 379303 - RNA, 19 nt, Artificial Sequence
  Description of Artificial Sequence: Synthetic oligonucleotide
cuuaaucgccuugaaucuu

SEQ ID NO: 379304 - RNA, 19 nt, Artificial Sequence
  Description of Artificial Sequence: Synthetic oligonucleotide
ccaaaggugcacaauccau

SEQ ID NO: 379305 - RNA, 19 nt, Artificial Sequence
  Description of Artificial Sequence: Synthetic oligonucleotide
ggucguuuugguacagcua

SEQ ID NO: 379306 - RNA, 19 nt, Artificial Sequence
  Description of Artificial Sequence: Synthetic oligonucleotide
cgcauaauugggcggagaa

SEQ ID NO: 379307 - RNA, 19 nt, Artificial Sequence
  Description of Artificial Sequence: Synthetic oligonucleotide
ggcgcauaauugggcggag

SEQ ID NO: 379308 - RNA, 19 nt, Artificial Sequence
  Description of Artificial Sequence: Synthetic oligonucleotide
cgaagcuagggucgaugug

SEQ ID NO: 379309 - RNA, 19 nt, Artificial Sequence
  Description of Artificial Sequence: Synthetic oligonucleotide
cucuuggaccuugguuuga

SEQ ID NO: 379310 - RNA, 19 nt, Artificial Sequence
  Description of Artificial Sequence: Synthetic oligonucleotide
ggggucguuuugguacagc

SEQ ID NO: 379311 - RNA, 19 nt, Artificial Sequence
  Description of Artificial Sequence: Synthetic oligonucleotide
cggagaauauuuaaugguu

SEQ ID NO: 379312 - RNA, 19 nt, Artificial Sequence
  Description of Artificial Sequence: Synthetic oligonucleotide
ggugcacaauccauguaau

SEQ ID NO: 379313 - RNA, 19 nt, Artificial Sequence
  Description of Artificial Sequence: Synthetic oligonucleotide
uagcgaagcuagggucgau

SEQ ID NO: 379314 - RNA, 19 nt, Artificial Sequence
  Description of Artificial Sequence: Synthetic oligonucleotide
gcccuucagagcuuggcau

SEQ ID NO: 379315 - RNA, 19 nt, Artificial Sequence
  Description of Artificial Sequence: Synthetic oligonucleotide
cacgggcugauuccucugu

SEQ ID NO: 379316 - RNA, 19 nt, Artificial Sequence
  Description of Artificial Sequence: Synthetic oligonucleotide
cagcaaugcuagcgaagcu

SEQ ID NO: 379317 - RNA, 19 nt, Artificial Sequence
  Description of Artificial Sequence: Synthetic oligonucleotide
ccucauccgaaauuaugau

SEQ ID NO: 379318 - RNA, 19 nt, Artificial Sequence
  Description of Artificial Sequence: Synthetic oligonucleotide
gacaagcguuaaaguggcu

SEQ ID NO: 379319 - RNA, 19 nt, Artificial Sequence
  Description of Artificial Sequence: Synthetic oligonucleotide
cucgggagucacgggcuga

SEQ ID NO: 379320 - RNA, 19 nt, Artificial Sequence
  Description of Artificial Sequence: Synthetic oligonucleotide
gcauaauugggcggagaau

SEQ ID NO: 379321 - RNA, 19 nt, Artificial Sequence
  Description of Artificial Sequence: Synthetic oligonucleotide
gcgaccuauuuccccaaau

SEQ ID NO: 379322 - RNA, 19 nt, Artificial Sequence
  Description of Artificial Sequence: Synthetic oligonucleotide
ggcgaccuauuuccccaaa

SEQ ID NO: 379323 - RNA, 19 nt, Artificial Sequence
  Description of Artificial Sequence: Synthetic oligonucleotide
gcgcauaauugggcggaga

SEQ ID NO: 379324 - RNA, 19 nt, Artificial Sequence
  Description of Artificial Sequence: Synthetic oligonucleotide
ccguugauucuugaauggu

SEQ ID NO: 379325 - RNA, 19 nt, Artificial Sequence
  Description of Artificial Sequence: Synthetic oligonucleotide
ccuuaaggcggcgaccuau

SEQ ID NO: 379326 - RNA, 19 nt, Artificial Sequence
  Description of Artificial Sequence: Synthetic oligonucleotide
cgacccguugauucuugaa

SEQ ID NO: 379327 - RNA, 19 nt, Artificial Sequence
  Description of Artificial Sequence: Synthetic oligonucleotide
ggucgauguguaagggauu

SEQ ID NO: 379328 - RNA, 19 nt, Artificial Sequence
  Description of Artificial Sequence: Synthetic oligonucleotide
cccgggucacuuggaaaga

SEQ ID NO: 379329 - RNA, 19 nt, Artificial Sequence
  Description of Artificial Sequence: Synthetic oligonucleotide
cguccauaacaaucacuau

SEQ ID NO: 379330 - RNA, 19 nt, Artificial Sequence
  Description of Artificial Sequence: Synthetic oligonucleotide
cggcgaccuauuuccccaa

SEQ ID NO: 379331 - RNA, 19 nt, Artificial Sequence
  Description of Artificial Sequence: Synthetic oligonucleotide
aaaccguucaaccagaggc

SEQ ID NO: 379332 - RNA, 19 nt, Artificial Sequence
  Description of Artificial Sequence: Synthetic oligonucleotide
ugaaaguuaagucacaaac

SEQ ID NO: 379333 - RNA, 19 nt, Artificial Sequence
  Description of Artificial Sequence: Synthetic oligonucleotide
agauuuaaugccuuggaac

SEQ ID NO: 379334 - RNA, 19 nt, Artificial Sequence
  Description of Artificial Sequence: Synthetic oligonucleotide
aaacacacaagauguaggg

SEQ ID NO: 379335 - RNA, 19 nt, Artificial Sequence
  Description of Artificial Sequence: Synthetic oligonucleotide
uacagaguaagucaggacc

SEQ ID NO: 379336 - RNA, 19 nt, Artificial Sequence
  Description of Artificial Sequence: Synthetic oligonucleotide
aaauagagcgcucugcuug

SEQ ID NO: 379337 - RNA, 19 nt, Artificial Sequence
  Description of Artificial Sequence: Synthetic oligonucleotide
agcaaaaggucucaaaccg

SEQ ID NO: 379338 - RNA, 19 nt, Artificial Sequence
  Description of Artificial Sequence: Synthetic oligonucleotide
agaaccagcaacaaguacc

SEQ ID NO: 379339 - RNA, 19 nt, Artificial Sequence
  Description of Artificial Sequence: Synthetic oligonucleotide
augggagucauuugcaucc

SEQ ID NO: 379340 - RNA, 19 nt, Artificial Sequence
  Description of Artificial Sequence: Synthetic oligonucleotide
uguuauaggcacaguagcg

SEQ ID NO: 379341 - RNA, 19 nt, Artificial Sequence
  Description of Artificial Sequence: Synthetic oligonucleotide
uguuaaaagccucaauggc

SEQ ID NO: 379342 - RNA, 19 nt, Artificial Sequence
  Description of Artificial Sequence: Synthetic oligonucleotide
uuaaaguugaguguuuucc

SEQ ID NO: 379343 - RNA, 19 nt, Artificial Sequence
  Description of Artificial Sequence: Synthetic oligonucleotide
auagagccggaucaggucc

SEQ ID NO: 379344 - RNA, 19 nt, Artificial Sequence
  Description of Artificial Sequence: Synthetic oligonucleotide
uaaaguugaguguuuuccg

SEQ ID NO: 379345 - RNA, 19 nt, Artificial Sequence
  Description of Artificial Sequence: Synthetic oligonucleotide
uauuucagaacccugucgu

SEQ ID NO: 379346 - RNA, 19 nt, Artificial Sequence
  Description of Artificial Sequence: Synthetic oligonucleotide
augaguguaacauaguuaa

SEQ ID NO: 379347 - RNA, 19 nt, Artificial Sequence
  Description of Artificial Sequence: Synthetic oligonucleotide
gacgauagcggcuucauug

SEQ ID NO: 379348 - RNA, 19 nt, Artificial Sequence
  Description of Artificial Sequence: Synthetic oligonucleotide
aacguuugcugucaucuuc

SEQ ID NO: 379349 - RNA, 19 nt, Artificial Sequence
  Description of Artificial Sequence: Synthetic oligonucleotide
ugagcauggacucgaacag

SEQ ID NO: 379350 - RNA, 19 nt, Artificial Sequence
  Description of Artificial Sequence: Synthetic oligonucleotide
cagaaugauaucauagagc

SEQ ID NO: 379351 - RNA, 19 nt, Artificial Sequence
  Description of Artificial Sequence: Synthetic oligonucleotide
acacaagcgcuccaguucc

SEQ ID NO: 379352 - RNA, 19 nt, Artificial Sequence
  Description of Artificial Sequence: Synthetic oligonucleotide
gucggcauauuucagaacc

SEQ ID NO: 379353 - RNA, 19 nt, Artificial Sequence
  Description of Artificial Sequence: Synthetic oligonucleotide
uccuuaauaaucugaagaa

SEQ ID NO: 379354 - RNA, 19 nt, Artificial Sequence
  Description of Artificial Sequence: Synthetic oligonucleotide
agcgcaacauuccugagag

SEQ ID NO: 379355 - RNA, 19 nt, Artificial Sequence
  Description of Artificial Sequence: Synthetic oligonucleotide
gcaagcuucucguagaucg

SEQ ID NO: 379356 - RNA, 19 nt, Artificial Sequence
  Description of Artificial Sequence: Synthetic oligonucleotide
agcacgagggcuucgcucc

SEQ ID NO: 379357 - RNA, 19 nt, Artificial Sequence
  Description of Artificial Sequence: Synthetic oligonucleotide
ugaccgaaagugaucagcc

SEQ ID NO: 379358 - RNA, 19 nt, Artificial Sequence
  Description of Artificial Sequence: Synthetic oligonucleotide
ucguagaucguuuugcacu

SEQ ID NO: 379359 - RNA, 19 nt, Artificial Sequence
  Description of Artificial Sequence: Synthetic oligonucleotide
aagauccucacccugucga

SEQ ID NO: 379360 - RNA, 19 nt, Artificial Sequence
  Description of Artificial Sequence: Synthetic oligonucleotide
ggugaaagcgcuuucgggg

SEQ ID NO: 379361 - RNA, 19 nt, Artificial Sequence
  Description of Artificial Sequence: Synthetic oligonucleotide
guugcucucacacaagcgc

SEQ ID NO: 379362 - RNA, 19 nt, Artificial Sequence
  Description of Artificial Sequence: Synthetic oligonucleotide
gauuuaaugccuuggaacu

SEQ ID NO: 379363 - RNA, 19 nt, Artificial Sequence
  Description of Artificial Sequence: Synthetic oligonucleotide
auuagauaccuuccccgac

SEQ ID NO: 379364 - RNA, 19 nt, Artificial Sequence
  Description of Artificial Sequence: Synthetic oligonucleotide
guuauaggcacaguagcgg

SEQ ID NO: 379365 - RNA, 19 nt, Artificial Sequence
  Description of Artificial Sequence: Synthetic oligonucleotide
acccugucgaucuucacgg

SEQ ID NO: 379366 - RNA, 19 nt, Artificial Sequence
  Description of Artificial Sequence: Synthetic oligonucleotide
uaagaagauccucacccug

SEQ ID NO: 379367 - RNA, 19 nt, Artificial Sequence
  Description of Artificial Sequence: Synthetic oligonucleotide
guuucaucguucaugagug

SEQ ID NO: 379368 - RNA, 19 nt, Artificial Sequence
  Description of Artificial Sequence: Synthetic oligonucleotide
uuagauaccuuccccgacu

SEQ ID NO: 379369 - RNA, 19 nt, Artificial Sequence
  Description of Artificial Sequence: Synthetic oligonucleotide
guuucagccacugacaaac

SEQ ID NO: 379370 - RNA, 19 nt, Artificial Sequence
  Description of Artificial Sequence: Synthetic oligonucleotide
uuagccaugcucucauucc

SEQ ID NO: 379371 - RNA, 19 nt, Artificial Sequence
  Description of Artificial Sequence: Synthetic oligonucleotide
ucaaccagaggcuuauugu

SEQ ID NO: 379372 - RNA, 19 nt, Artificial Sequence
  Description of Artificial Sequence: Synthetic oligonucleotide
cuggagauuagauaccuuc

SEQ ID NO: 379373 - RNA, 19 nt, Artificial Sequence
  Description of Artificial Sequence: Synthetic oligonucleotide
ugugaggccacucuugguc

SEQ ID NO: 379374 - RNA, 19 nt, Artificial Sequence
  Description of Artificial Sequence: Synthetic oligonucleotide
uccccgaacucucugcugg

SEQ ID NO: 379375 - RNA, 19 nt, Artificial Sequence
  Description of Artificial Sequence: Synthetic oligonucleotide
uugauguauccugugaggc

SEQ ID NO: 379376 - RNA, 19 nt, Artificial Sequence
  Description of Artificial Sequence: Synthetic oligonucleotide
acaauacagaguaagucag

SEQ ID NO: 379377 - RNA, 19 nt, Artificial Sequence
  Description of Artificial Sequence: Synthetic oligonucleotide
uguuugagcugcauggcgu

SEQ ID NO: 379378 - RNA, 19 nt, Artificial Sequence
  Description of Artificial Sequence: Synthetic oligonucleotide
ugggacuccuuaauaaucu

SEQ ID NO: 379379 - RNA, 19 nt, Artificial Sequence
  Description of Artificial Sequence: Synthetic oligonucleotide
gauagcggcuucauugucg

SEQ ID NO: 379380 - RNA, 19 nt, Artificial Sequence
  Description of Artificial Sequence: Synthetic oligonucleotide
auagcggcuucauugucgg

SEQ ID NO: 379381 - RNA, 19 nt, Artificial Sequence
  Description of Artificial Sequence: Synthetic oligonucleotide
gaggacacaugacaaacac

SEQ ID NO: 379382 - RNA, 19 nt, Artificial Sequence
  Description of Artificial Sequence: Synthetic oligonucleotide
aagucuccgugccguaagc

SEQ ID NO: 379383 - RNA, 19 nt, Artificial Sequence
  Description of Artificial Sequence: Synthetic oligonucleotide
uuauaggcacaguagcgga

SEQ ID NO: 379384 - RNA, 19 nt, Artificial Sequence
  Description of Artificial Sequence: Synthetic oligonucleotide
uucaaagcgcaacauuccu

SEQ ID NO: 379385 - RNA, 19 nt, Artificial Sequence
  Description of Artificial Sequence: Synthetic oligonucleotide
gaagaaucuccaaacucag

SEQ ID NO: 379386 - RNA, 19 nt, Artificial Sequence
  Description of Artificial Sequence: Synthetic oligonucleotide
gaauuugugucuguucccc

SEQ ID NO: 379387 - RNA, 19 nt, Artificial Sequence
  Description of Artificial Sequence: Synthetic oligonucleotide
ucgaucuucacgggaaccg

SEQ ID NO: 379388 - RNA, 19 nt, Artificial Sequence
  Description of Artificial Sequence: Synthetic oligonucleotide
aauagagcgcucugcuugu

SEQ ID NO: 379389 - RNA, 19 nt, Artificial Sequence
  Description of Artificial Sequence: Synthetic oligonucleotide
ugauguauccugugaggcc

SEQ ID NO: 379390 - RNA, 19 nt, Artificial Sequence
  Description of Artificial Sequence: Synthetic oligonucleotide
aggcuuauugucuuugacu

SEQ ID NO: 379391 - RNA, 19 nt, Artificial Sequence
  Description of Artificial Sequence: Synthetic oligonucleotide
gaaagccugguguggaacc

SEQ ID NO: 379392 - RNA, 19 nt, Artificial Sequence
  Description of Artificial Sequence: Synthetic oligonucleotide
gauaccuuccccgacucgc

SEQ ID NO: 379393 - RNA, 19 nt, Artificial Sequence
  Description of Artificial Sequence: Synthetic oligonucleotide
acagccgcuccuuuguuuc

SEQ ID NO: 379394 - RNA, 19 nt, Artificial Sequence
  Description of Artificial Sequence: Synthetic oligonucleotide
uugcacuuguuaaaagccu

SEQ ID NO: 379395 - RNA, 19 nt, Artificial Sequence
  Description of Artificial Sequence: Synthetic oligonucleotide
agaacccugucguacagca

SEQ ID NO: 379396 - RNA, 19 nt, Artificial Sequence
  Description of Artificial Sequence: Synthetic oligonucleotide
uagugaccgaaagugauca

SEQ ID NO: 379397 - RNA, 19 nt, Artificial Sequence
  Description of Artificial Sequence: Synthetic oligonucleotide
ucaucguucaugaguguaa

SEQ ID NO: 379398 - RNA, 19 nt, Artificial Sequence
  Description of Artificial Sequence: Synthetic oligonucleotide
aagcgcaacauuccugaga

SEQ ID NO: 379399 - RNA, 19 nt, Artificial Sequence
  Description of Artificial Sequence: Synthetic oligonucleotide
ucucauuccgccugauggc

SEQ ID NO: 379400 - RNA, 19 nt, Artificial Sequence
  Description of Artificial Sequence: Synthetic oligonucleotide
uccucaaggggugggaagg

SEQ ID NO: 379401 - RNA, 19 nt, Artificial Sequence
  Description of Artificial Sequence: Synthetic oligonucleotide
uuagugaccgaaagugauc

SEQ ID NO: 379402 - RNA, 19 nt, Artificial Sequence
  Description of Artificial Sequence: Synthetic oligonucleotide
gcuuacaagagccaggaca

SEQ ID NO: 379403 - RNA, 19 nt, Artificial Sequence
  Description of Artificial Sequence: Synthetic oligonucleotide
gaaugauaucauagagccg

SEQ ID NO: 379404 - RNA, 19 nt, Artificial Sequence
  Description of Artificial Sequence: Synthetic oligonucleotide
caugacaaacacucccaag

SEQ ID NO: 379405 - RNA, 19 nt, Artificial Sequence
  Description of Artificial Sequence: Synthetic oligonucleotide
uuucagaacccugucguac

SEQ ID NO: 379406 - RNA, 19 nt, Artificial Sequence
  Description of Artificial Sequence: Synthetic oligonucleotide
gaugggagucauuugcauc

SEQ ID NO: 379407 - RNA, 19 nt, Artificial Sequence
  Description of Artificial Sequence: Synthetic oligonucleotide
cuuauugucuuugacuuga

SEQ ID NO: 379408 - RNA, 19 nt, Artificial Sequence
  Description of Artificial Sequence: Synthetic oligonucleotide
uccggagacgucuuugucu

SEQ ID NO: 379409 - RNA, 19 nt, Artificial Sequence
  Description of Artificial Sequence: Synthetic oligonucleotide
ucaaaccguucaaccagag

SEQ ID NO: 379410 - RNA, 19 nt, Artificial Sequence
  Description of Artificial Sequence: Synthetic oligonucleotide
uucagaacccugucguaca

SEQ ID NO: 379411 - RNA, 19 nt, Artificial Sequence
  Description of Artificial Sequence: Synthetic oligonucleotide
ucucguagaucguuuugca

SEQ ID NO: 379412 - RNA, 19 nt, Artificial Sequence
  Description of Artificial Sequence: Synthetic oligonucleotide
ggacacaugacaaacacuc

SEQ ID NO: 379413 - RNA, 19 nt, Artificial Sequence
  Description of Artificial Sequence: Synthetic oligonucleotide
ucggcauauuucagaaccc

SEQ ID NO: 379414 - RNA, 19 nt, Artificial Sequence
  Description of Artificial Sequence: Synthetic oligonucleotide
aaagcgcaacauuccugag

SEQ ID NO: 379415 - RNA, 19 nt, Artificial Sequence
  Description of Artificial Sequence: Synthetic oligonucleotide
cuguuugagcugcauggcg

SEQ ID NO: 379416 - RNA, 19 nt, Artificial Sequence
  Description of Artificial Sequence: Synthetic oligonucleotide
ucuucuaagccaggaagcu

SEQ ID NO: 379417 - RNA, 19 nt, Artificial Sequence
  Description of Artificial Sequence: Synthetic oligonucleotide
gauguagggacgcagggcu

SEQ ID NO: 379418 - RNA, 19 nt, Artificial Sequence
  Description of Artificial Sequence: Synthetic oligonucleotide
caccuguaagcuuugaaca

SEQ ID NO: 379419 - RNA, 19 nt, Artificial Sequence
  Description of Artificial Sequence: Synthetic oligonucleotide
cacccugucgaucuucacg

SEQ ID NO: 379420 - RNA, 19 nt, Artificial Sequence
  Description of Artificial Sequence: Synthetic oligonucleotide
ucagaacccugucguacag

SEQ ID NO: 379421 - RNA, 19 nt, Artificial Sequence
  Description of Artificial Sequence: Synthetic oligonucleotide
caaggguauaaucucucug

SEQ ID NO: 379422 - RNA, 19 nt, Artificial Sequence
  Description of Artificial Sequence: Synthetic oligonucleotide
uagaucguuuugcacuugu

SEQ ID NO: 379423 - RNA, 19 nt, Artificial Sequence
  Description of Artificial Sequence: Synthetic oligonucleotide
uucacgggaaccguccucc

SEQ ID NO: 379424 - RNA, 19 nt, Artificial Sequence
  Description of Artificial Sequence: Synthetic oligonucleotide
accgaaagugaucagccau

SEQ ID NO: 379425 - RNA, 19 nt, Artificial Sequence
  Description of Artificial Sequence: Synthetic oligonucleotide
gaucguuuugcacuuguua

SEQ ID NO: 379426 - RNA, 19 nt, Artificial Sequence
  Description of Artificial Sequence: Synthetic oligonucleotide
ucucgacacucgcugagca

SEQ ID NO: 379427 - RNA, 19 nt, Artificial Sequence
  Description of Artificial Sequence: Synthetic oligonucleotide
gugaaagcgcuuucggggc

SEQ ID NO: 379428 - RNA, 19 nt, Artificial Sequence
  Description of Artificial Sequence: Synthetic oligonucleotide
acaguagccccuguaccgc

SEQ ID NO: 379429 - RNA, 19 nt, Artificial Sequence
  Description of Artificial Sequence: Synthetic oligonucleotide
uucaugaguguaacauagu

SEQ ID NO: 379430 - RNA, 19 nt, Artificial Sequence
  Description of Artificial Sequence: Synthetic oligonucleotide
aaguaccuguuaucaguca

SEQ ID NO: 379431 - RNA, 19 nt, Artificial Sequence
  Description of Artificial Sequence: Synthetic oligonucleotide
ucgacacucgcugagcaug

SEQ ID NO: 379432 - RNA, 19 nt, Artificial Sequence
  Description of Artificial Sequence: Synthetic oligonucleotide
gacgucuuugucuucugga

SEQ ID NO: 379433 - RNA, 19 nt, Artificial Sequence
  Description of Artificial Sequence: Synthetic oligonucleotide
cuggccuucgauccggcgg

SEQ ID NO: 379434 - RNA, 19 nt, Artificial Sequence
  Description of Artificial Sequence: Synthetic oligonucleotide
cacggcuuugcgcaggcgg

SEQ ID NO: 379435 - RNA, 19 nt, Artificial Sequence
  Description of Artificial Sequence: Synthetic oligonucleotide
uacuggagauuagauaccu

SEQ ID NO: 379436 - RNA, 19 nt, Artificial Sequence
  Description of Artificial Sequence: Synthetic oligonucleotide
auuagugaccgaaagugau

SEQ ID NO: 379437 - RNA, 19 nt, Artificial Sequence
  Description of Artificial Sequence: Synthetic oligonucleotide
ugugaacgcacuggcaagc

SEQ ID NO: 379438 - RNA, 19 nt, Artificial Sequence
  Description of Artificial Sequence: Synthetic oligonucleotide
ucguuuugcacuuguuaaa

SEQ ID NO: 379439 - RNA, 19 nt, Artificial Sequence
  Description of Artificial Sequence: Synthetic oligonucleotide
ggucucaaaccguucaacc

SEQ ID NO: 379440 - RNA, 19 nt, Artificial Sequence
  Description of Artificial Sequence: Synthetic oligonucleotide
aaggcuugcaagggauggg

SEQ ID NO: 379441 - RNA, 19 nt, Artificial Sequence
  Description of Artificial Sequence: Synthetic oligonucleotide
caaaccguucaaccagagg

SEQ ID NO: 379442 - RNA, 19 nt, Artificial Sequence
  Description of Artificial Sequence: Synthetic oligonucleotide
caaacucaggcuguccccg

SEQ ID NO: 379443 - RNA, 19 nt, Artificial Sequence
  Description of Artificial Sequence: Synthetic oligonucleotide
ucgucggcauauuucagaa

SEQ ID NO: 379444 - RNA, 19 nt, Artificial Sequence
  Description of Artificial Sequence: Synthetic oligonucleotide
gucucaaaccguucaacca

SEQ ID NO: 379445 - RNA, 19 nt, Artificial Sequence
  Description of Artificial Sequence: Synthetic oligonucleotide
uggcuuacaagagccagga

SEQ ID NO: 379446 - RNA, 19 nt, Artificial Sequence
  Description of Artificial Sequence: Synthetic oligonucleotide
aagugaucagccauggcuu

SEQ ID NO: 379447 - RNA, 19 nt, Artificial Sequence
  Description of Artificial Sequence: Synthetic oligonucleotide
uaccuguuaucagucagga

SEQ ID NO: 379448 - RNA, 19 nt, Artificial Sequence
  Description of Artificial Sequence: Synthetic oligonucleotide
cuucgcuccacuucuucac

SEQ ID NO: 379449 - RNA, 19 nt, Artificial Sequence
  Description of Artificial Sequence: Synthetic oligonucleotide
agaccuagauuuaaugccu

SEQ ID NO: 379450 - RNA, 19 nt, Artificial Sequence
  Description of Artificial Sequence: Synthetic oligonucleotide
cacugacaaacuucaggag

SEQ ID NO: 379451 - RNA, 19 nt, Artificial Sequence
  Description of Artificial Sequence: Synthetic oligonucleotide
acagaguaagucaggaccu

SEQ ID NO: 379452 - RNA, 19 nt, Artificial Sequence
  Description of Artificial Sequence: Synthetic oligonucleotide
ucgauccggcggaagggcg

SEQ ID NO: 379453 - RNA, 19 nt, Artificial Sequence
  Description of Artificial Sequence: Synthetic oligonucleotide
agggcgucucgacacucgc

SEQ ID NO: 379454 - RNA, 19 nt, Artificial Sequence
  Description of Artificial Sequence: Synthetic oligonucleotide
acgauagcggcuucauugu

SEQ ID NO: 379455 - RNA, 19 nt, Artificial Sequence
  Description of Artificial Sequence: Synthetic oligonucleotide
cacgcgguugcucucacac

SEQ ID NO: 379456 - RNA, 19 nt, Artificial Sequence
  Description of Artificial Sequence: Synthetic oligonucleotide
cucacuugagugaugagcu

SEQ ID NO: 379457 - RNA, 19 nt, Artificial Sequence
  Description of Artificial Sequence: Synthetic oligonucleotide
ccugaauccaaagaugccc

SEQ ID NO: 379458 - RNA, 19 nt, Artificial Sequence
  Description of Artificial Sequence: Synthetic oligonucleotide
uagggcgucucgacacucg

SEQ ID NO: 379459 - RNA, 19 nt, Artificial Sequence
  Description of Artificial Sequence: Synthetic oligonucleotide
accuagauuuaaugccuug

SEQ ID NO: 379460 - RNA, 19 nt, Artificial Sequence
  Description of Artificial Sequence: Synthetic oligonucleotide
guaaggcugaccguaacuc

SEQ ID NO: 379461 - RNA, 19 nt, Artificial Sequence
  Description of Artificial Sequence: Synthetic oligonucleotide
cauuagugaccgaaaguga

SEQ ID NO: 379462 - RNA, 19 nt, Artificial Sequence
  Description of Artificial Sequence: Synthetic oligonucleotide
uauaggcacaguagcggau

SEQ ID NO: 379463 - RNA, 19 nt, Artificial Sequence
  Description of Artificial Sequence: Synthetic oligonucleotide
caggccuuuagccaugcuc

SEQ ID NO: 379464 - RNA, 19 nt, Artificial Sequence
  Description of Artificial Sequence: Synthetic oligonucleotide
gaacgcacuggcaagcuuc

SEQ ID NO: 379465 - RNA, 19 nt, Artificial Sequence
  Description of Artificial Sequence: Synthetic oligonucleotide
gcuuuggaagcucacagca

SEQ ID NO: 379466 - RNA, 19 nt, Artificial Sequence
  Description of Artificial Sequence: Synthetic oligonucleotide
cucuguccucuucuaagcc

SEQ ID NO: 379467 - RNA, 19 nt, Artificial Sequence
  Description of Artificial Sequence: Synthetic oligonucleotide
cuagcuuggucuuggcauc

SEQ ID NO: 379468 - RNA, 19 nt, Artificial Sequence
  Description of Artificial Sequence: Synthetic oligonucleotide
cucguagaucguuuugcac

SEQ ID NO: 379469 - RNA, 19 nt, Artificial Sequence
  Description of Artificial Sequence: Synthetic oligonucleotide
uagauaccuuccccgacuc

SEQ ID NO: 379470 - RNA, 19 nt, Artificial Sequence
  Description of Artificial Sequence: Synthetic oligonucleotide
aaccguucaaccagaggcu

SEQ ID NO: 379471 - RNA, 19 nt, Artificial Sequence
  Description of Artificial Sequence: Synthetic oligonucleotide
aggccuuuagccaugcucu

SEQ ID NO: 379472 - RNA, 19 nt, Artificial Sequence
  Description of Artificial Sequence: Synthetic oligonucleotide
agucuccgugccguaagcc

SEQ ID NO: 379473 - RNA, 19 nt, Artificial Sequence
  Description of Artificial Sequence: Synthetic oligonucleotide
cuuucggggcucaguauug

SEQ ID NO: 379474 - RNA, 19 nt, Artificial Sequence
  Description of Artificial Sequence: Synthetic oligonucleotide
ugaguguaacauaguuaaa

SEQ ID NO: 379475 - RNA, 19 nt, Artificial Sequence
  Description of Artificial Sequence: Synthetic oligonucleotide
uggccuucgauccggcgga

SEQ ID NO: 379476 - RNA, 19 nt, Artificial Sequence
  Description of Artificial Sequence: Synthetic oligonucleotide
ugcccuugauguauccugu

SEQ ID NO: 379477 - RNA, 19 nt, Artificial Sequence
  Description of Artificial Sequence: Synthetic oligonucleotide
ggaaagugcacgaggcugg

SEQ ID NO: 379478 - RNA, 19 nt, Artificial Sequence
  Description of Artificial Sequence: Synthetic oligonucleotide
cacgaggcuggcuugcuug

SEQ ID NO: 379479 - RNA, 19 nt, Artificial Sequence
  Description of Artificial Sequence: Synthetic oligonucleotide
acaugacaaacacucccaa

SEQ ID NO: 379480 - RNA, 19 nt, Artificial Sequence
  Description of Artificial Sequence: Synthetic oligonucleotide
agauaccuuccccgacucg

SEQ ID NO: 379481 - RNA, 19 nt, Artificial Sequence
  Description of Artificial Sequence: Synthetic oligonucleotide
ucuaagccaggaagcugca

SEQ ID NO: 379482 - RNA, 19 nt, Artificial Sequence
  Description of Artificial Sequence: Synthetic oligonucleotide
cucaguauuggcuuccugu

SEQ ID NO: 379483 - RNA, 19 nt, Artificial Sequence
  Description of Artificial Sequence: Synthetic oligonucleotide
uccccgacucgccaucaag

SEQ ID NO: 379484 - RNA, 19 nt, Artificial Sequence
  Description of Artificial Sequence: Synthetic oligonucleotide
ccuagauuuaaugccuugg

SEQ ID NO: 379485 - RNA, 19 nt, Artificial Sequence
  Description of Artificial Sequence: Synthetic oligonucleotide
ucauuccgccugauggcug

SEQ ID NO: 379486 - RNA, 19 nt, Artificial Sequence
  Description of Artificial Sequence: Synthetic oligonucleotide
ucuucugguuguugcugca

SEQ ID NO: 379487 - RNA, 19 nt, Artificial Sequence
  Description of Artificial Sequence: Synthetic oligonucleotide
ugauagcugacuggucccc

SEQ ID NO: 379488 - RNA, 19 nt, Artificial Sequence
  Description of Artificial Sequence: Synthetic oligonucleotide
cuuguacagcacugccugc

SEQ ID NO: 379489 - RNA, 19 nt, Artificial Sequence
  Description of Artificial Sequence: Synthetic oligonucleotide
auaccuuccccgacucgcc

SEQ ID NO: 379490 - RNA, 19 nt, Artificial Sequence
  Description of Artificial Sequence: Synthetic oligonucleotide
uguuucagccacugacaaa

SEQ ID NO: 379491 - RNA, 19 nt, Artificial Sequence
  Description of Artificial Sequence: Synthetic oligonucleotide
cuaugaaaguuaagucaca

SEQ ID NO: 379492 - RNA, 19 nt, Artificial Sequence
  Description of Artificial Sequence: Synthetic oligonucleotide
aacagccgcuccuuuguuu

SEQ ID NO: 379493 - RNA, 19 nt, Artificial Sequence
  Description of Artificial Sequence: Synthetic oligonucleotide
ucuucacgggaaccguccu

SEQ ID NO: 379494 - RNA, 19 nt, Artificial Sequence
  Description of Artificial Sequence: Synthetic oligonucleotide
gucggccaguccuaguaag

SEQ ID NO: 379495 - RNA, 19 nt, Artificial Sequence
  Description of Artificial Sequence: Synthetic oligonucleotide
uccggcacugcguccuccg

SEQ ID NO: 379496 - RNA, 19 nt, Artificial Sequence
  Description of Artificial Sequence: Synthetic oligonucleotide
uucgauccggcggaagggc

SEQ ID NO: 379497 - RNA, 19 nt, Artificial Sequence
  Description of Artificial Sequence: Synthetic oligonucleotide
ccugguuagcuccugaauc

SEQ ID NO: 379498 - RNA, 19 nt, Artificial Sequence
  Description of Artificial Sequence: Synthetic oligonucleotide
uggcguagcuccaggcucu

SEQ ID NO: 379499 - RNA, 19 nt, Artificial Sequence
  Description of Artificial Sequence: Synthetic oligonucleotide
uuucaucguucaugagugu

SEQ ID NO: 379500 - RNA, 19 nt, Artificial Sequence
  Description of Artificial Sequence: Synthetic oligonucleotide
uucucagcgaggagccccu

SEQ ID NO: 379501 - RNA, 19 nt, Artificial Sequence
  Description of Artificial Sequence: Synthetic oligonucleotide
guagccccuguaccgcugg

SEQ ID NO: 379502 - RNA, 19 nt, Artificial Sequence
  Description of Artificial Sequence: Synthetic oligonucleotide
ucauugucggccaguccua

SEQ ID NO: 379503 - RNA, 19 nt, Artificial Sequence
  Description of Artificial Sequence: Synthetic oligonucleotide
cauaggacugagcaaugaa

SEQ ID NO: 379504 - RNA, 19 nt, Artificial Sequence
  Description of Artificial Sequence: Synthetic oligonucleotide
auuucagaacccugucgua

SEQ ID NO: 379505 - RNA, 19 nt, Artificial Sequence
  Description of Artificial Sequence: Synthetic oligonucleotide
cucgucggcauauuucaga

SEQ ID NO: 379506 - RNA, 19 nt, Artificial Sequence
  Description of Artificial Sequence: Synthetic oligonucleotide
cuguccccgaacucucugc

SEQ ID NO: 379507 - RNA, 19 nt, Artificial Sequence
  Description of Artificial Sequence: Synthetic oligonucleotide
ugucggccaguccuaguaa

SEQ ID NO: 379508 - RNA, 19 nt, Artificial Sequence
  Description of Artificial Sequence: Synthetic oligonucleotide
aggguccaagcaaaagguc

SEQ ID NO: 379509 - RNA, 19 nt, Artificial Sequence
  Description of Artificial Sequence: Synthetic oligonucleotide
accagaggcuuauugucuu

SEQ ID NO: 379510 - RNA, 19 nt, Artificial Sequence
  Description of Artificial Sequence: Synthetic oligonucleotide
gguugcucucacacaagcg

SEQ ID NO: 379511 - RNA, 19 nt, Artificial Sequence
  Description of Artificial Sequence: Synthetic oligonucleotide
gaccgaaagugaucagcca

SEQ ID NO: 379512 - RNA, 19 nt, Artificial Sequence
  Description of Artificial Sequence: Synthetic oligonucleotide
gagacgucuuugucuucug

SEQ ID NO: 379513 - RNA, 19 nt, Artificial Sequence
  Description of Artificial Sequence: Synthetic oligonucleotide
uguuuuccggagacgucuu

SEQ ID NO: 379514 - RNA, 19 nt, Artificial Sequence
  Description of Artificial Sequence: Synthetic oligonucleotide
cauuccugagagguaagca

SEQ ID NO: 379515 - RNA, 19 nt, Artificial Sequence
  Description of Artificial Sequence: Synthetic oligonucleotide
uuccggagacgucuuuguc

SEQ ID NO: 379516 - RNA, 19 nt, Artificial Sequence
  Description of Artificial Sequence: Synthetic oligonucleotide
ccuucgauccggcggaagg

SEQ ID NO: 379517 - RNA, 19 nt, Artificial Sequence
  Description of Artificial Sequence: Synthetic oligonucleotide
acguuugcugucaucuucu

SEQ ID NO: 379518 - RNA, 19 nt, Artificial Sequence
  Description of Artificial Sequence: Synthetic oligonucleotide
cugucgaucuucacgggaa

SEQ ID NO: 379519 - RNA, 19 nt, Artificial Sequence
  Description of Artificial Sequence: Synthetic oligonucleotide
gucuccgugccguaagcca

SEQ ID NO: 379520 - RNA, 19 nt, Artificial Sequence
  Description of Artificial Sequence: Synthetic oligonucleotide
gaccucgucggcauauuuc

SEQ ID NO: 379521 - RNA, 19 nt, Artificial Sequence
  Description of Artificial Sequence: Synthetic oligonucleotide
gcuuauugucuuugacuug

SEQ ID NO: 379522 - RNA, 19 nt, Artificial Sequence
  Description of Artificial Sequence: Synthetic oligonucleotide
ugaacgcacuggcaagcuu

SEQ ID NO: 379523 - RNA, 19 nt, Artificial Sequence
  Description of Artificial Sequence: Synthetic oligonucleotide
guccacacgcugcuuguac

SEQ ID NO: 379524 - RNA, 19 nt, Artificial Sequence
  Description of Artificial Sequence: Synthetic oligonucleotide
ccugucguacagcacgagg

SEQ ID NO: 379525 - RNA, 19 nt, Artificial Sequence
  Description of Artificial Sequence: Synthetic oligonucleotide
uccggcggaagggcguucg

SEQ ID NO: 379526 - RNA, 19 nt, Artificial Sequence
  Description of Artificial Sequence: Synthetic oligonucleotide
agauccucacccugucgau

SEQ ID NO: 379527 - RNA, 19 nt, Artificial Sequence
  Description of Artificial Sequence: Synthetic oligonucleotide
aggacacaugacaaacacu

SEQ ID NO: 379528 - RNA, 19 nt, Artificial Sequence
  Description of Artificial Sequence: Synthetic oligonucleotide
cucaaggggugggaaggcc

SEQ ID NO: 379529 - RNA, 19 nt, Artificial Sequence
  Description of Artificial Sequence: Synthetic oligonucleotide
gcugaccguaacucugggg

SEQ ID NO: 379530 - RNA, 19 nt, Artificial Sequence
  Description of Artificial Sequence: Synthetic oligonucleotide
cuucacggcuuugcgcagg

SEQ ID NO: 379531 - RNA, 19 nt, Artificial Sequence
  Description of Artificial Sequence: Synthetic oligonucleotide
ugaccucgucggcauauuu

SEQ ID NO: 379532 - RNA, 19 nt, Artificial Sequence
  Description of Artificial Sequence: Synthetic oligonucleotide
cucgcugagcauggacucg

SEQ ID NO: 379533 - RNA, 19 nt, Artificial Sequence
  Description of Artificial Sequence: Synthetic oligonucleotide
gcguucguucucuuuauuc

SEQ ID NO: 379534 - RNA, 19 nt, Artificial Sequence
  Description of Artificial Sequence: Synthetic oligonucleotide
ugacagcuugauguagguc

SEQ ID NO: 379535 - RNA, 19 nt, Artificial Sequence
  Description of Artificial Sequence: Synthetic oligonucleotide
agucaggagcuccucgguu

SEQ ID NO: 379536 - RNA, 19 nt, Artificial Sequence
  Description of Artificial Sequence: Synthetic oligonucleotide
auugucggccaguccuagu

SEQ ID NO: 379537 - RNA, 19 nt, Artificial Sequence
  Description of Artificial Sequence: Synthetic oligonucleotide
uaccucacucaugguagcu

SEQ ID NO: 379538 - RNA, 19 nt, Artificial Sequence
  Description of Artificial Sequence: Synthetic oligonucleotide
ccgcacagcuuguagggcg

SEQ ID NO: 379539 - RNA, 19 nt, Artificial Sequence
  Description of Artificial Sequence: Synthetic oligonucleotide
gaucagccauggcuuacaa

SEQ ID NO: 379540 - RNA, 19 nt, Artificial Sequence
  Description of Artificial Sequence: Synthetic oligonucleotide
gauccucacccugucgauc

SEQ ID NO: 379541 - RNA, 19 nt, Artificial Sequence
  Description of Artificial Sequence: Synthetic oligonucleotide
guuugagcugcauggcgua

SEQ ID NO: 379542 - RNA, 19 nt, Artificial Sequence
  Description of Artificial Sequence: Synthetic oligonucleotide
auggacucgaacagccgcu

SEQ ID NO: 379543 - RNA, 19 nt, Artificial Sequence
  Description of Artificial Sequence: Synthetic oligonucleotide
agaacacauuagugaccga

SEQ ID NO: 379544 - RNA, 19 nt, Artificial Sequence
  Description of Artificial Sequence: Synthetic oligonucleotide
ccccgacucgccaucaagg

SEQ ID NO: 379545 - RNA, 19 nt, Artificial Sequence
  Description of Artificial Sequence: Synthetic oligonucleotide
cauugucggccaguccuag

SEQ ID NO: 379546 - RNA, 19 nt, Artificial Sequence
  Description of Artificial Sequence: Synthetic oligonucleotide
cuucacgggaaccguccuc

SEQ ID NO: 379547 - RNA, 19 nt, Artificial Sequence
  Description of Artificial Sequence: Synthetic oligonucleotide
cccgacucgccaucaaggg

SEQ ID NO: 379548 - RNA, 19 nt, Artificial Sequence
  Description of Artificial Sequence: Synthetic oligonucleotide
uguuaucagucaggagcuc

SEQ ID NO: 379549 - RNA, 19 nt, Artificial Sequence
  Description of Artificial Sequence: Synthetic oligonucleotide
cucugugaacgcacuggca

SEQ ID NO: 379550 - RNA, 19 nt, Artificial Sequence
  Description of Artificial Sequence: Synthetic oligonucleotide
cacacgcugcuuguacagc

SEQ ID NO: 379551 - RNA, 19 nt, Artificial Sequence
  Description of Artificial Sequence: Synthetic oligonucleotide
cacugcguccuccgccucc

SEQ ID NO: 379552 - RNA, 19 nt, Artificial Sequence
  Description of Artificial Sequence: Synthetic oligonucleotide
gccaugcucucauuccgcc

SEQ ID NO: 379553 - RNA, 19 nt, Artificial Sequence
  Description of Artificial Sequence: Synthetic oligonucleotide
ucgccaucaaggguauaau

SEQ ID NO: 379554 - RNA, 19 nt, Artificial Sequence
  Description of Artificial Sequence: Synthetic oligonucleotide
gggacagagagaccccgac

SEQ ID NO: 379555 - RNA, 19 nt, Artificial Sequence
  Description of Artificial Sequence: Synthetic oligonucleotide
caguuccgccagauucugc

SEQ ID NO: 379556 - RNA, 19 nt, Artificial Sequence
  Description of Artificial Sequence: Synthetic oligonucleotide
gucucgacacucgcugagc

SEQ ID NO: 379557 - RNA, 19 nt, Artificial Sequence
  Description of Artificial Sequence: Synthetic oligonucleotide
ugcccauguuucagccacu

SEQ ID NO: 379558 - RNA, 19 nt, Artificial Sequence
  Description of Artificial Sequence: Synthetic oligonucleotide
ucacccugucgaucuucac

SEQ ID NO: 379559 - RNA, 19 nt, Artificial Sequence
  Description of Artificial Sequence: Synthetic oligonucleotide
uggacucgaacagccgcuc

SEQ ID NO: 379560 - RNA, 19 nt, Artificial Sequence
  Description of Artificial Sequence: Synthetic oligonucleotide
uccgugccguaagccaugc

SEQ ID NO: 379561 - RNA, 19 nt, Artificial Sequence
  Description of Artificial Sequence: Synthetic oligonucleotide
ggcuugcuuggugacgagg

SEQ ID NO: 379562 - RNA, 19 nt, Artificial Sequence
  Description of Artificial Sequence: Synthetic oligonucleotide
guagaucguuuugcacuug

SEQ ID NO: 379563 - RNA, 19 nt, Artificial Sequence
  Description of Artificial Sequence: Synthetic oligonucleotide
cugucucacaauacagagu

SEQ ID NO: 379564 - RNA, 19 nt, Artificial Sequence
  Description of Artificial Sequence: Synthetic oligonucleotide
ccucgguuacuuucuuccc

SEQ ID NO: 379565 - RNA, 19 nt, Artificial Sequence
  Description of Artificial Sequence: Synthetic oligonucleotide
gugaucagccauggcuuac

SEQ ID NO: 379566 - RNA, 19 nt, Artificial Sequence
  Description of Artificial Sequence: Synthetic oligonucleotide
accguucaaccagaggcuu

SEQ ID NO: 379567 - RNA, 19 nt, Artificial Sequence
  Description of Artificial Sequence: Synthetic oligonucleotide
caggcgggacagcagguga

SEQ ID NO: 379568 - RNA, 19 nt, Artificial Sequence
  Description of Artificial Sequence: Synthetic oligonucleotide
gugacgagggaagggucca

SEQ ID NO: 379569 - RNA, 19 nt, Artificial Sequence
  Description of Artificial Sequence: Synthetic oligonucleotide
ggacucgaacagccgcucc

SEQ ID NO: 379570 - RNA, 19 nt, Artificial Sequence
  Description of Artificial Sequence: Synthetic oligonucleotide
uagcggcuucauugucggc

SEQ ID NO: 379571 - RNA, 19 nt, Artificial Sequence
  Description of Artificial Sequence: Synthetic oligonucleotide
auguagggacgcagggcug

SEQ ID NO: 379572 - RNA, 19 nt, Artificial Sequence
  Description of Artificial Sequence: Synthetic oligonucleotide
aguagccccuguaccgcug

SEQ ID NO: 379573 - RNA, 19 nt, Artificial Sequence
  Description of Artificial Sequence: Synthetic oligonucleotide
auccacgcgguugcucuca

SEQ ID NO: 379574 - RNA, 19 nt, Artificial Sequence
  Description of Artificial Sequence: Synthetic oligonucleotide
guagggacgcagggcugag

SEQ ID NO: 379575 - RNA, 19 nt, Artificial Sequence
  Description of Artificial Sequence: Synthetic oligonucleotide
gggagaacguuugcuguca

SEQ ID NO: 379576 - RNA, 19 nt, Artificial Sequence
  Description of Artificial Sequence: Synthetic oligonucleotide
agaucguuuugcacuuguu

SEQ ID NO: 379577 - RNA, 19 nt, Artificial Sequence
  Description of Artificial Sequence: Synthetic oligonucleotide
cauccacgcgguugcucuc

SEQ ID NO: 379578 - RNA, 19 nt, Artificial Sequence
  Description of Artificial Sequence: Synthetic oligonucleotide
ugaucgggcuugagcucuu

SEQ ID NO: 379579 - RNA, 19 nt, Artificial Sequence
  Description of Artificial Sequence: Synthetic oligonucleotide
gcuggccuucgauccggcg

SEQ ID NO: 379580 - RNA, 19 nt, Artificial Sequence
  Description of Artificial Sequence: Synthetic oligonucleotide
cuggaagucuccgugccgu

SEQ ID NO: 379581 - RNA, 19 nt, Artificial Sequence
  Description of Artificial Sequence: Synthetic oligonucleotide
cauuccgccugauggcugu

SEQ ID NO: 379582 - RNA, 19 nt, Artificial Sequence
  Description of Artificial Sequence: Synthetic oligonucleotide
guagggcgucucgacacuc

SEQ ID NO: 379583 - RNA, 19 nt, Artificial Sequence
  Description of Artificial Sequence: Synthetic oligonucleotide
gcuucacggcuuugcgcag

SEQ ID NO: 379584 - RNA, 19 nt, Artificial Sequence
  Description of Artificial Sequence: Synthetic oligonucleotide
gcauccacgcgguugcucu

SEQ ID NO: 379585 - RNA, 19 nt, Artificial Sequence
  Description of Artificial Sequence: Synthetic oligonucleotide
ugacgagggaaggguccaa

SEQ ID NO: 379586 - RNA, 19 nt, Artificial Sequence
  Description of Artificial Sequence: Synthetic oligonucleotide
cugaucgggcuugagcucu

SEQ ID NO: 379587 - RNA, 19 nt, Artificial Sequence
  Description of Artificial Sequence: Synthetic oligonucleotide
acccugucguacagcacga

SEQ ID NO: 379588 - RNA, 19 nt, Artificial Sequence
  Description of Artificial Sequence: Synthetic oligonucleotide
agccucuagcuuggucuug

SEQ ID NO: 379589 - RNA, 19 nt, Artificial Sequence
  Description of Artificial Sequence: Synthetic oligonucleotide
gcaguuccgccagauucug

SEQ ID NO: 379590 - RNA, 19 nt, Artificial Sequence
  Description of Artificial Sequence: Synthetic oligonucleotide
gcugggacuccuuaauaau

SEQ ID NO: 379591 - RNA, 19 nt, Artificial Sequence
  Description of Artificial Sequence: Synthetic oligonucleotide
cccuguaccgcuggaaguc

SEQ ID NO: 379592 - RNA, 19 nt, Artificial Sequence
  Description of Artificial Sequence: Synthetic oligonucleotide
ugcaagggaugggcuggaa

SEQ ID NO: 379593 - RNA, 19 nt, Artificial Sequence
  Description of Artificial Sequence: Synthetic oligonucleotide
ccugucgaucuucacggga

SEQ ID NO: 379594 - RNA, 19 nt, Artificial Sequence
  Description of Artificial Sequence: Synthetic oligonucleotide
ccucgucggcauauuucag

SEQ ID NO: 379595 - RNA, 19 nt, Artificial Sequence
  Description of Artificial Sequence: Synthetic oligonucleotide
cuggacgauagcggcuuca

SEQ ID NO: 379596 - RNA, 19 nt, Artificial Sequence
  Description of Artificial Sequence: Synthetic oligonucleotide
gucguacagcacgagggcu

SEQ ID NO: 379597 - RNA, 19 nt, Artificial Sequence
  Description of Artificial Sequence: Synthetic oligonucleotide
ccacucuaccucacucaug

SEQ ID NO: 379598 - RNA, 19 nt, Artificial Sequence
  Description of Artificial Sequence: Synthetic oligonucleotide
cgacucgccaucaagggua

SEQ ID NO: 379599 - RNA, 19 nt, Artificial Sequence
  Description of Artificial Sequence: Synthetic oligonucleotide
cgucucgacacucgcugag

SEQ ID NO: 379600 - RNA, 19 nt, Artificial Sequence
  Description of Artificial Sequence: Synthetic oligonucleotide
gaccuagauuuaaugccuu

SEQ ID NO: 379601 - RNA, 19 nt, Artificial Sequence
  Description of Artificial Sequence: Synthetic oligonucleotide
gaucgggcuugagcucuuc

SEQ ID NO: 379602 - RNA, 19 nt, Artificial Sequence
  Description of Artificial Sequence: Synthetic oligonucleotide
cccugucgaucuucacggg

SEQ ID NO: 379603 - RNA, 19 nt, Artificial Sequence
  Description of Artificial Sequence: Synthetic oligonucleotide
cgcaacauuccugagaggu

SEQ ID NO: 379604 - RNA, 19 nt, Artificial Sequence
  Description of Artificial Sequence: Synthetic oligonucleotide
ggaccucccugccccugag

SEQ ID NO: 379605 - RNA, 19 nt, Artificial Sequence
  Description of Artificial Sequence: Synthetic oligonucleotide
ggccugggagaacguuugc

SEQ ID NO: 379606 - RNA, 19 nt, Artificial Sequence
  Description of Artificial Sequence: Synthetic oligonucleotide
cuccggcacugcguccucc

SEQ ID NO: 379607 - RNA, 19 nt, Artificial Sequence
  Description of Artificial Sequence: Synthetic oligonucleotide
ccucaaggggugggaaggc

SEQ ID NO: 379608 - RNA, 19 nt, Artificial Sequence
  Description of Artificial Sequence: Synthetic oligonucleotide
cacgagggcuucgcuccac

SEQ ID NO: 379609 - RNA, 19 nt, Artificial Sequence
  Description of Artificial Sequence: Synthetic oligonucleotide
gugaacgcacuggcaagcu

SEQ ID NO: 379610 - RNA, 19 nt, Artificial Sequence
  Description of Artificial Sequence: Synthetic oligonucleotide
auagagcgcucugcuuguu

SEQ ID NO: 379611 - RNA, 19 nt, Artificial Sequence
  Description of Artificial Sequence: Synthetic oligonucleotide
auccggcggaagggcguuc

SEQ ID NO: 379612 - RNA, 19 nt, Artificial Sequence
  Description of Artificial Sequence: Synthetic oligonucleotide
gcgguugcucucacacaag

SEQ ID NO: 379613 - RNA, 19 nt, Artificial Sequence
  Description of Artificial Sequence: Synthetic oligonucleotide
cuuccccgacucgccauca

SEQ ID NO: 379614 - RNA, 19 nt, Artificial Sequence
  Description of Artificial Sequence: Synthetic oligonucleotide
ccccgacucagcccagaag

SEQ ID NO: 379615 - RNA, 19 nt, Artificial Sequence
  Description of Artificial Sequence: Synthetic oligonucleotide
ccccgaacucucugcuggc

SEQ ID NO: 379616 - RNA, 19 nt, Artificial Sequence
  Description of Artificial Sequence: Synthetic oligonucleotide
cccgaacucucugcuggcc

SEQ ID NO: 379617 - RNA, 19 nt, Artificial Sequence
  Description of Artificial Sequence: Synthetic oligonucleotide
ggcuuugcgcaggcgggac

SEQ ID NO: 379618 - RNA, 19 nt, Artificial Sequence
  Description of Artificial Sequence: Synthetic oligonucleotide
cgucggcauauuucagaac

SEQ ID NO: 379619 - RNA, 19 nt, Artificial Sequence
  Description of Artificial Sequence: Synthetic oligonucleotide
guuuuccggagacgucuuu

SEQ ID NO: 379620 - RNA, 19 nt, Artificial Sequence
  Description of Artificial Sequence: Synthetic oligonucleotide
gaccccgacucagcccaga

SEQ ID NO: 379621 - RNA, 19 nt, Artificial Sequence
  Description of Artificial Sequence: Synthetic oligonucleotide
cucgacacucgcugagcau

SEQ ID NO: 379622 - RNA, 19 nt, Artificial Sequence
  Description of Artificial Sequence: Synthetic oligonucleotide
gcgucucgacacucgcuga

SEQ ID NO: 379623 - RNA, 19 nt, Artificial Sequence
  Description of Artificial Sequence: Synthetic oligonucleotide
caguagccccuguaccgcu

SEQ ID NO: 379624 - RNA, 19 nt, Artificial Sequence
  Description of Artificial Sequence: Synthetic oligonucleotide
ccuuccccgacucgccauc

SEQ ID NO: 379625 - RNA, 19 nt, Artificial Sequence
  Description of Artificial Sequence: Synthetic oligonucleotide
gacucgccaucaaggguau

SEQ ID NO: 379626 - RNA, 19 nt, Artificial Sequence
  Description of Artificial Sequence: Synthetic oligonucleotide
ccgccugauggcuguugac

SEQ ID NO: 379627 - RNA, 19 nt, Artificial Sequence
  Description of Artificial Sequence: Synthetic oligonucleotide
cgauagcggcuucauuguc

SEQ ID NO: 379628 - RNA, 19 nt, Artificial Sequence
  Description of Artificial Sequence: Synthetic oligonucleotide
agaccccgacucagcccag

SEQ ID NO: 379629 - RNA, 19 nt, Artificial Sequence
  Description of Artificial Sequence: Synthetic oligonucleotide
ccccaauguuauaggcaca

SEQ ID NO: 379630 - RNA, 19 nt, Artificial Sequence
  Description of Artificial Sequence: Synthetic oligonucleotide
gaagggcguucguucucuu

SEQ ID NO: 379631 - RNA, 19 nt, Artificial Sequence
  Description of Artificial Sequence: Synthetic oligonucleotide
gccugguuagcuccugaau

SEQ ID NO: 379632 - RNA, 19 nt, Artificial Sequence
  Description of Artificial Sequence: Synthetic oligonucleotide
gggguaaggcugaccguaa

SEQ ID NO: 379633 - RNA, 19 nt, Artificial Sequence
  Description of Artificial Sequence: Synthetic oligonucleotide
gccuucgauccggcggaag

SEQ ID NO: 379634 - RNA, 19 nt, Artificial Sequence
  Description of Artificial Sequence: Synthetic oligonucleotide
ccucacccugucgaucuuc

SEQ ID NO: 379635 - RNA, 19 nt, Artificial Sequence
  Description of Artificial Sequence: Synthetic oligonucleotide
cacaagcgcuccaguuccu

SEQ ID NO: 379636 - RNA, 19 nt, Artificial Sequence
  Description of Artificial Sequence: Synthetic oligonucleotide
cgccugauggcuguugaca

SEQ ID NO: 379637 - RNA, 19 nt, Artificial Sequence
  Description of Artificial Sequence: Synthetic oligonucleotide
cccauguuucagccacuga

SEQ ID NO: 379638 - RNA, 19 nt, Artificial Sequence
  Description of Artificial Sequence: Synthetic oligonucleotide
ggagaacguuugcugucau

SEQ ID NO: 379639 - RNA, 19 nt, Artificial Sequence
  Description of Artificial Sequence: Synthetic oligonucleotide
ccggagacgucuuugucuu

SEQ ID NO: 379640 - RNA, 19 nt, Artificial Sequence
  Description of Artificial Sequence: Synthetic oligonucleotide
gauccggcggaagggcguu

SEQ ID NO: 379641 - RNA, 19 nt, Artificial Sequence
  Description of Artificial Sequence: Synthetic oligonucleotide
gaggagggcucugcuugau

SEQ ID NO: 379642 - RNA, 19 nt, Artificial Sequence
  Description of Artificial Sequence: Synthetic oligonucleotide
ggugcugagcucugcccuu

SEQ ID NO: 379643 - RNA, 19 nt, Artificial Sequence
  Description of Artificial Sequence: Synthetic oligonucleotide
cguagaucguuuugcacuu

SEQ ID NO: 379644 - RNA, 19 nt, Artificial Sequence
  Description of Artificial Sequence: Synthetic oligonucleotide
ggcgggacagcaggugaaa

SEQ ID NO: 379645 - RNA, 19 nt, Artificial Sequence
  Description of Artificial Sequence: Synthetic oligonucleotide
cccugucguacagcacgag

SEQ ID NO: 379646 - RNA, 19 nt, Artificial Sequence
  Description of Artificial Sequence: Synthetic oligonucleotide
gcacgagggcuucgcucca

SEQ ID NO: 379647 - RNA, 19 nt, Artificial Sequence
  Description of Artificial Sequence: Synthetic oligonucleotide
ccuggacgauagcggcuuc

SEQ ID NO: 379648 - RNA, 19 nt, Artificial Sequence
  Description of Artificial Sequence: Synthetic oligonucleotide
ccguucaaccagaggcuua

SEQ ID NO: 379649 - RNA, 19 nt, Artificial Sequence
  Description of Artificial Sequence: Synthetic oligonucleotide
ggacgauagcggcuucauu

SEQ ID NO: 379650 - RNA, 19 nt, Artificial Sequence
  Description of Artificial Sequence: Synthetic oligonucleotide
acucgccaucaaggguaua

SEQ ID NO: 379651 - RNA, 19 nt, Artificial Sequence
  Description of Artificial Sequence: Synthetic oligonucleotide
ccgacucgccaucaagggu

SEQ ID NO: 379652 - RNA, 19 nt, Artificial Sequence
  Description of Artificial Sequence: Synthetic oligonucleotide
ggcguagcuccaggcucuc

SEQ ID NO: 379653 - RNA, 19 nt, Artificial Sequence
  Description of Artificial Sequence: Synthetic oligonucleotide
cugcuugaugggagucauu

SEQ ID NO: 379654 - RNA, 19 nt, Artificial Sequence
  Description of Artificial Sequence: Synthetic oligonucleotide
gccuggacgauagcggcuu

SEQ ID NO: 379655 - RNA, 19 nt, Artificial Sequence
  Description of Artificial Sequence: Synthetic oligonucleotide
guucaaccagaggcuuauu

SEQ ID NO: 379656 - RNA, 19 nt, Artificial Sequence
  Description of Artificial Sequence: Synthetic oligonucleotide
gcacugcguccuccgccuc

SEQ ID NO: 379657 - RNA, 19 nt, Artificial Sequence
  Description of Artificial Sequence: Synthetic oligonucleotide
cggccaguccuaguaagaa

SEQ ID NO: 379658 - RNA, 19 nt, Artificial Sequence
  Description of Artificial Sequence: Synthetic oligonucleotide
ccgacucagcccagaagau

SEQ ID NO: 379659 - RNA, 19 nt, Artificial Sequence
  Description of Artificial Sequence: Synthetic oligonucleotide
ggcccgagucugagugauc

SEQ ID NO: 379660 - RNA, 19 nt, Artificial Sequence
  Description of Artificial Sequence: Synthetic oligonucleotide
gcuccucgguuacuuucuu

SEQ ID NO: 379661 - RNA, 19 nt, Artificial Sequence
  Description of Artificial Sequence: Synthetic oligonucleotide
gggcgucucgacacucgcu

SEQ ID NO: 379662 - RNA, 19 nt, Artificial Sequence
  Description of Artificial Sequence: Synthetic oligonucleotide
cugaccucgucggcauauu

SEQ ID NO: 379663 - RNA, 19 nt, Artificial Sequence
  Description of Artificial Sequence: Synthetic oligonucleotide
gcaggccuuuagccaugcu

SEQ ID NO: 379664 - RNA, 19 nt, Artificial Sequence
  Description of Artificial Sequence: Synthetic oligonucleotide
ggccuucgauccggcggaa

SEQ ID NO: 379665 - RNA, 19 nt, Artificial Sequence
  Description of Artificial Sequence: Synthetic oligonucleotide
gcguagcuccaggcucucu

SEQ ID NO: 379666 - RNA, 19 nt, Artificial Sequence
  Description of Artificial Sequence: Synthetic oligonucleotide
cguccacacgcugcuugua

SEQ ID NO: 379667 - RNA, 19 nt, Artificial Sequence
  Description of Artificial Sequence: Synthetic oligonucleotide
ccggcggaagggcguucgu

SEQ ID NO: 379668 - RNA, 19 nt, Artificial Sequence
  Description of Artificial Sequence: Synthetic oligonucleotide
ccgugccguaagccaugcu

SEQ ID NO: 379669 - RNA, 19 nt, Artificial Sequence
  Description of Artificial Sequence: Synthetic oligonucleotide
cggcaugcuucacggcuuu

SEQ ID NO: 379670 - RNA, 19 nt, Artificial Sequence
  Description of Artificial Sequence: Synthetic oligonucleotide
cggcggaagggcguucguu

SEQ ID NO: 379671 - RNA, 19 nt, Artificial Sequence
  Description of Artificial Sequence: Synthetic oligonucleotide
aauaauccaguccaccacg

SEQ ID NO: 379672 - RNA, 19 nt, Artificial Sequence
  Description of Artificial Sequence: Synthetic oligonucleotide
ucuccgucaacccacaggg

SEQ ID NO: 379673 - RNA, 19 nt, Artificial Sequence
  Description of Artificial Sequence: Synthetic oligonucleotide
uaguacaagacgaagacgu

SEQ ID NO: 379674 - RNA, 19 nt, Artificial Sequence
  Description of Artificial Sequence: Synthetic oligonucleotide
ucgaaagacaaucagugug

SEQ ID NO: 379675 - RNA, 19 nt, Artificial Sequence
  Description of Artificial Sequence: Synthetic oligonucleotide
aaucgaaagacaaucagug

SEQ ID NO: 379676 - RNA, 19 nt, Artificial Sequence
  Description of Artificial Sequence: Synthetic oligonucleotide
augauuugaaauucuggac

SEQ ID NO: 379677 - RNA, 19 nt, Artificial Sequence
  Description of Artificial Sequence: Synthetic oligonucleotide
aauaccugccaauuguuca

SEQ ID NO: 379678 - RNA, 19 nt, Artificial Sequence
  Description of Artificial Sequence: Synthetic oligonucleotide
aagacgaagacguagucaa

SEQ ID NO: 379679 - RNA, 19 nt, Artificial Sequence
  Description of Artificial Sequence: Synthetic oligonucleotide
uaaucuagcugcucgaagc

SEQ ID NO: 379680 - RNA, 19 nt, Artificial Sequence
  Description of Artificial Sequence: Synthetic oligonucleotide
aguaauaccugccaauugu

SEQ ID NO: 379681 - RNA, 19 nt, Artificial Sequence
  Description of Artificial Sequence: Synthetic oligonucleotide
ucagaaacaaacuuccuau

SEQ ID NO: 379682 - RNA, 19 nt, Artificial Sequence
  Description of Artificial Sequence: Synthetic oligonucleotide
aacaacgaggucuguagag

SEQ ID NO: 379683 - RNA, 19 nt, Artificial Sequence
  Description of Artificial Sequence: Synthetic oligonucleotide
ugauccagaugacagagga

SEQ ID NO: 379684 - RNA, 19 nt, Artificial Sequence
  Description of Artificial Sequence: Synthetic oligonucleotide
uacaccauugaccacgggc

SEQ ID NO: 379685 - RNA, 19 nt, Artificial Sequence
  Description of Artificial Sequence: Synthetic oligonucleotide
auagcuauuggcuucacau

SEQ ID NO: 379686 - RNA, 19 nt, Artificial Sequence
  Description of Artificial Sequence: Synthetic oligonucleotide
gguaaagccacaaugagcc

SEQ ID NO: 379687 - RNA, 19 nt, Artificial Sequence
  Description of Artificial Sequence: Synthetic oligonucleotide
agcgguagcgcacaucugc

SEQ ID NO: 379688 - RNA, 19 nt, Artificial Sequence
  Description of Artificial Sequence: Synthetic oligonucleotide
gaagacguagucaagaauc

SEQ ID NO: 379689 - RNA, 19 nt, Artificial Sequence
  Description of Artificial Sequence: Synthetic oligonucleotide
aacacguugccacaguaga

SEQ ID NO: 379690 - RNA, 19 nt, Artificial Sequence
  Description of Artificial Sequence: Synthetic oligonucleotide
agguuugaguaauaccagc

SEQ ID NO: 379691 - RNA, 19 nt, Artificial Sequence
  Description of Artificial Sequence: Synthetic oligonucleotide
acagguuugaguaauacca

SEQ ID NO: 379692 - RNA, 19 nt, Artificial Sequence
  Description of Artificial Sequence: Synthetic oligonucleotide
accguaacacuucaggguc

SEQ ID NO: 379693 - RNA, 19 nt, Artificial Sequence
  Description of Artificial Sequence: Synthetic oligonucleotide
uagucaagaaucuccagga

SEQ ID NO: 379694 - RNA, 19 nt, Artificial Sequence
  Description of Artificial Sequence: Synthetic oligonucleotide
agguugaucccaaugaugg

SEQ ID NO: 379695 - RNA, 19 nt, Artificial Sequence
  Description of Artificial Sequence: Synthetic oligonucleotide
aagccaucgaacacguugc

SEQ ID NO: 379696 - RNA, 19 nt, Artificial Sequence
  Description of Artificial Sequence: Synthetic oligonucleotide
agaagggacggagugaucg

SEQ ID NO: 379697 - RNA, 19 nt, Artificial Sequence
  Description of Artificial Sequence: Synthetic oligonucleotide
cuuggguucacaaaggcca

SEQ ID NO: 379698 - RNA, 19 nt, Artificial Sequence
  Description of Artificial Sequence: Synthetic oligonucleotide
ugucaugucccacagugac

SEQ ID NO: 379699 - RNA, 19 nt, Artificial Sequence
  Description of Artificial Sequence: Synthetic oligonucleotide
agcuauuggcuucacauug

SEQ ID NO: 379700 - RNA, 19 nt, Artificial Sequence
  Description of Artificial Sequence: Synthetic oligonucleotide
accaccguaacacuucagg

SEQ ID NO: 379701 - RNA, 19 nt, Artificial Sequence
  Description of Artificial Sequence: Synthetic oligonucleotide
ucggugacuacuacuaagc

SEQ ID NO: 379702 - RNA, 19 nt, Artificial Sequence
  Description of Artificial Sequence: Synthetic oligonucleotide
agauagacaagaaguuucc

SEQ ID NO: 379703 - RNA, 19 nt, Artificial Sequence
  Description of Artificial Sequence: Synthetic oligonucleotide
gauuaugaagaagagggca

SEQ ID NO: 379704 - RNA, 19 nt, Artificial Sequence
  Description of Artificial Sequence: Synthetic oligonucleotide
ugggaacuccacaaaagcc

SEQ ID NO: 379705 - RNA, 19 nt, Artificial Sequence
  Description of Artificial Sequence: Synthetic oligonucleotide
ugaaguacucgcaggaagu

SEQ ID NO: 379706 - RNA, 19 nt, Artificial Sequence
  Description of Artificial Sequence: Synthetic oligonucleotide
ugacuguagaugauggcug

SEQ ID NO: 379707 - RNA, 19 nt, Artificial Sequence
  Description of Artificial Sequence: Synthetic oligonucleotide
guugaucccaaugauggcg

SEQ ID NO: 379708 - RNA, 19 nt, Artificial Sequence
  Description of Artificial Sequence: Synthetic oligonucleotide
guugguacagguuugagua

SEQ ID NO: 379709 - RNA, 19 nt, Artificial Sequence
  Description of Artificial Sequence: Synthetic oligonucleotide
cugaguagcgcugauaggc

SEQ ID NO: 379710 - RNA, 19 nt, Artificial Sequence
  Description of Artificial Sequence: Synthetic oligonucleotide
auaccugccaauuguucac

SEQ ID NO: 379711 - RNA, 19 nt, Artificial Sequence
  Description of Artificial Sequence: Synthetic oligonucleotide
cuuggaauagguugauccc

SEQ ID NO: 379712 - RNA, 19 nt, Artificial Sequence
  Description of Artificial Sequence: Synthetic oligonucleotide
uaccccaacugccucaggg

SEQ ID NO: 379713 - RNA, 19 nt, Artificial Sequence
  Description of Artificial Sequence: Synthetic oligonucleotide
uugacuacccaucugccaa

SEQ ID NO: 379714 - RNA, 19 nt, Artificial Sequence
  Description of Artificial Sequence: Synthetic oligonucleotide
ggaccaguaaucuagcugc

SEQ ID NO: 379715 - RNA, 19 nt, Artificial Sequence
  Description of Artificial Sequence: Synthetic oligonucleotide
uugaccacgggccugagua

SEQ ID NO: 379716 - RNA, 19 nt, Artificial Sequence
  Description of Artificial Sequence: Synthetic oligonucleotide
aaacuuccuaucaagguga

SEQ ID NO: 379717 - RNA, 19 nt, Artificial Sequence
  Description of Artificial Sequence: Synthetic oligonucleotide
uaggaauguaccuucugca

SEQ ID NO: 379718 - RNA, 19 nt, Artificial Sequence
  Description of Artificial Sequence: Synthetic oligonucleotide
uuaaggucccugcaaaauc

SEQ ID NO: 379719 - RNA, 19 nt, Artificial Sequence
  Description of Artificial Sequence: Synthetic oligonucleotide
acaaucaguguguucacca

SEQ ID NO: 379720 - RNA, 19 nt, Artificial Sequence
  Description of Artificial Sequence: Synthetic oligonucleotide
caauggacggccuccauag

SEQ ID NO: 379721 - RNA, 19 nt, Artificial Sequence
  Description of Artificial Sequence: Synthetic oligonucleotide
uccauacugaguuuggcaa

SEQ ID NO: 379722 - RNA, 19 nt, Artificial Sequence
  Description of Artificial Sequence: Synthetic oligonucleotide
uacaagacgaagacguagu

SEQ ID NO: 379723 - RNA, 19 nt, Artificial Sequence
  Description of Artificial Sequence: Synthetic oligonucleotide
uccgucaacccacagggug

SEQ ID NO: 379724 - RNA, 19 nt, Artificial Sequence
  Description of Artificial Sequence: Synthetic oligonucleotide
aaucgguauaucaccagag

SEQ ID NO: 379725 - RNA, 19 nt, Artificial Sequence
  Description of Artificial Sequence: Synthetic oligonucleotide
caggauuuaccccaacugc

SEQ ID NO: 379726 - RNA, 19 nt, Artificial Sequence
  Description of Artificial Sequence: Synthetic oligonucleotide
aacuuccgggaucccaucg

SEQ ID NO: 379727 - RNA, 19 nt, Artificial Sequence
  Description of Artificial Sequence: Synthetic oligonucleotide
ucuccuuagcaacucuugc

SEQ ID NO: 379728 - RNA, 19 nt, Artificial Sequence
  Description of Artificial Sequence: Synthetic oligonucleotide
aggaucaagaaaaugguga

SEQ ID NO: 379729 - RNA, 19 nt, Artificial Sequence
  Description of Artificial Sequence: Synthetic oligonucleotide
uagguugaucccaaugaug

SEQ ID NO: 379730 - RNA, 19 nt, Artificial Sequence
  Description of Artificial Sequence: Synthetic oligonucleotide
agauuaugaagaagagggc

SEQ ID NO: 379731 - RNA, 19 nt, Artificial Sequence
  Description of Artificial Sequence: Synthetic oligonucleotide
caaugaagaccacagcuug

SEQ ID NO: 379732 - RNA, 19 nt, Artificial Sequence
  Description of Artificial Sequence: Synthetic oligonucleotide
uccgggaucccaucggugg

SEQ ID NO: 379733 - RNA, 19 nt, Artificial Sequence
  Description of Artificial Sequence: Synthetic oligonucleotide
  modified_base (5)..(5): a, c, u, g, unknown or other
ugcunuggacgcaaggacu

SEQ ID NO: 379734 - RNA, 19 nt, Artificial Sequence
  Description of Artificial Sequence: Synthetic oligonucleotide
ucuggcuauaugcaggaau

SEQ ID NO: 379735 - RNA, 19 nt, Artificial Sequence
  Description of Artificial Sequence: Synthetic oligonucleotide
uugaucacacccuugucaa

SEQ ID NO: 379736 - RNA, 19 nt, Artificial Sequence
  Description of Artificial Sequence: Synthetic oligonucleotide
ucgguauaucaccagagua

SEQ ID NO: 379737 - RNA, 19 nt, Artificial Sequence
  Description of Artificial Sequence: Synthetic oligonucleotide
uuccauacugaguuuggca

SEQ ID NO: 379738 - RNA, 19 nt, Artificial Sequence
  Description of Artificial Sequence: Synthetic oligonucleotide
uggcaaucgguauaucacc

SEQ ID NO: 379739 - RNA, 19 nt, Artificial Sequence
  Description of Artificial Sequence: Synthetic oligonucleotide
agagcgaugagguucccca

SEQ ID NO: 379740 - RNA, 19 nt, Artificial Sequence
  Description of Artificial Sequence: Synthetic oligonucleotide
cuacccaucugccaaggcc

SEQ ID NO: 379741 - RNA, 19 nt, Artificial Sequence
  Description of Artificial Sequence: Synthetic oligonucleotide
uguugacuacccaucugcc

SEQ ID NO: 379742 - RNA, 19 nt, Artificial Sequence
  Description of Artificial Sequence: Synthetic oligonucleotide
auaagcuguggguaacaag

SEQ ID NO: 379743 - RNA, 19 nt, Artificial Sequence
  Description of Artificial Sequence: Synthetic oligonucleotide
uccauaggaauguaccuuc

SEQ ID NO: 379744 - RNA, 19 nt, Artificial Sequence
  Description of Artificial Sequence: Synthetic oligonucleotide
gacacgcaggaaucgaaag

SEQ ID NO: 379745 - RNA, 19 nt, Artificial Sequence
  Description of Artificial Sequence: Synthetic oligonucleotide
uacugaguuuggcaaucgg

SEQ ID NO: 379746 - RNA, 19 nt, Artificial Sequence
  Description of Artificial Sequence: Synthetic oligonucleotide
gguaguacaagacgaagac

SEQ ID NO: 379747 - RNA, 19 nt, Artificial Sequence
  Description of Artificial Sequence: Synthetic oligonucleotide
ggaaucgaaagacaaucag

SEQ ID NO: 379748 - RNA, 19 nt, Artificial Sequence
  Description of Artificial Sequence: Synthetic oligonucleotide
guagccgcggaacugacug

SEQ ID NO: 379749 - RNA, 19 nt, Artificial Sequence
  Description of Artificial Sequence: Synthetic oligonucleotide
acugcugagcuguuaucgg

SEQ ID NO: 379750 - RNA, 19 nt, Artificial Sequence
  Description of Artificial Sequence: Synthetic oligonucleotide
gaguggucuguuccaagcg

SEQ ID NO: 379751 - RNA, 19 nt, Artificial Sequence
  Description of Artificial Sequence: Synthetic oligonucleotide
auggagcgguaauuuaugg

SEQ ID NO: 379752 - RNA, 19 nt, Artificial Sequence
  Description of Artificial Sequence: Synthetic oligonucleotide
ggaacaacgaggucuguag

SEQ ID NO: 379753 - RNA, 19 nt, Artificial Sequence
  Description of Artificial Sequence: Synthetic oligonucleotide
cugccaauuguucaccacc

SEQ ID NO: 379754 - RNA, 19 nt, Artificial Sequence
  Description of Artificial Sequence: Synthetic oligonucleotide
cuccuuagcaacucuugcc

SEQ ID NO: 379755 - RNA, 19 nt, Artificial Sequence
  Description of Artificial Sequence: Synthetic oligonucleotide
aagggacggagugaucggc

SEQ ID NO: 379756 - RNA, 19 nt, Artificial Sequence
  Description of Artificial Sequence: Synthetic oligonucleotide
gguuugaguaauaccagcg

SEQ ID NO: 379757 - RNA, 19 nt, Artificial Sequence
  Description of Artificial Sequence: Synthetic oligonucleotide
auaccagcgguaaagccac

SEQ ID NO: 379758 - RNA, 19 nt, Artificial Sequence
  Description of Artificial Sequence: Synthetic oligonucleotide
gaugcagcaccagaacggg

SEQ ID NO: 379759 - RNA, 19 nt, Artificial Sequence
  Description of Artificial Sequence: Synthetic oligonucleotide
cuugcuuggucucuaucag

SEQ ID NO: 379760 - RNA, 19 nt, Artificial Sequence
  Description of Artificial Sequence: Synthetic oligonucleotide
ugggcuuuaaggucccugc

SEQ ID NO: 379761 - RNA, 19 nt, Artificial Sequence
  Description of Artificial Sequence: Synthetic oligonucleotide
ggugacuacuacuaagcag

SEQ ID NO: 379762 - RNA, 19 nt, Artificial Sequence
  Description of Artificial Sequence: Synthetic oligonucleotide
uggagcgguaauuuauggc

SEQ ID NO: 379763 - RNA, 19 nt, Artificial Sequence
  Description of Artificial Sequence: Synthetic oligonucleotide
caggaaucgaaagacaauc

SEQ ID NO: 379764 - RNA, 19 nt, Artificial Sequence
  Description of Artificial Sequence: Synthetic oligonucleotide
guaguacaagacgaagacg

SEQ ID NO: 379765 - RNA, 19 nt, Artificial Sequence
  Description of Artificial Sequence: Synthetic oligonucleotide
ugugaaugaugaugggaac

SEQ ID NO: 379766 - RNA, 19 nt, Artificial Sequence
  Description of Artificial Sequence: Synthetic oligonucleotide
ugagcuguuaucgggugcc

SEQ ID NO: 379767 - RNA, 19 nt, Artificial Sequence
  Description of Artificial Sequence: Synthetic oligonucleotide
guaaucuagcugcucgaag

SEQ ID NO: 379768 - RNA, 19 nt, Artificial Sequence
  Description of Artificial Sequence: Synthetic oligonucleotide
caccauagcacaaaauaca

SEQ ID NO: 379769 - RNA, 19 nt, Artificial Sequence
  Description of Artificial Sequence: Synthetic oligonucleotide
aacgccucgauggucuccg

SEQ ID NO: 379770 - RNA, 19 nt, Artificial Sequence
  Description of Artificial Sequence: Synthetic oligonucleotide
guuaucgggugccaggcug

SEQ ID NO: 379771 - RNA, 19 nt, Artificial Sequence
  Description of Artificial Sequence: Synthetic oligonucleotide
ucgcaggaaguucucagga

SEQ ID NO: 379772 - RNA, 19 nt, Artificial Sequence
  Description of Artificial Sequence: Synthetic oligonucleotide
guaacaagggagcugaggu

SEQ ID NO: 379773 - RNA, 19 nt, Artificial Sequence
  Description of Artificial Sequence: Synthetic oligonucleotide
ugaguaauaccagcgguaa

SEQ ID NO: 379774 - RNA, 19 nt, Artificial Sequence
  Description of Artificial Sequence: Synthetic oligonucleotide
ugcugguuaccauagcuau

SEQ ID NO: 379775 - RNA, 19 nt, Artificial Sequence
  Description of Artificial Sequence: Synthetic oligonucleotide
uacuacuaagcagccacag

SEQ ID NO: 379776 - RNA, 19 nt, Artificial Sequence
  Description of Artificial Sequence: Synthetic oligonucleotide
aacugcuuaggcuuccaua

SEQ ID NO: 379777 - RNA, 19 nt, Artificial Sequence
  Description of Artificial Sequence: Synthetic oligonucleotide
cagguuugaguaauaccag

SEQ ID NO: 379778 - RNA, 19 nt, Artificial Sequence
  Description of Artificial Sequence: Synthetic oligonucleotide
ugcucggugacuacuacua

SEQ ID NO: 379779 - RNA, 19 nt, Artificial Sequence
  Description of Artificial Sequence: Synthetic oligonucleotide
cacugcugagcuguuaucg

SEQ ID NO: 379780 - RNA, 19 nt, Artificial Sequence
  Description of Artificial Sequence: Synthetic oligonucleotide
gaagggacggagugaucgg

SEQ ID NO: 379781 - RNA, 19 nt, Artificial Sequence
  Description of Artificial Sequence: Synthetic oligonucleotide
aauggacggccuccauagg

SEQ ID NO: 379782 - RNA, 19 nt, Artificial Sequence
  Description of Artificial Sequence: Synthetic oligonucleotide
agcgguaauuuauggcauc

SEQ ID NO: 379783 - RNA, 19 nt, Artificial Sequence
  Description of Artificial Sequence: Synthetic oligonucleotide
gauggagcgguaauuuaug

SEQ ID NO: 379784 - RNA, 19 nt, Artificial Sequence
  Description of Artificial Sequence: Synthetic oligonucleotide
ugacuacuacuaagcagcc

SEQ ID NO: 379785 - RNA, 19 nt, Artificial Sequence
  Description of Artificial Sequence: Synthetic oligonucleotide
uuaucgggugccaggcugc

SEQ ID NO: 379786 - RNA, 19 nt, Artificial Sequence
  Description of Artificial Sequence: Synthetic oligonucleotide
aagacguagucaagaaucu

SEQ ID NO: 379787 - RNA, 19 nt, Artificial Sequence
  Description of Artificial Sequence: Synthetic oligonucleotide
uggucuguuccaagcgccg

SEQ ID NO: 379788 - RNA, 19 nt, Artificial Sequence
  Description of Artificial Sequence: Synthetic oligonucleotide
aucgaaagacaaucagugu

SEQ ID NO: 379789 - RNA, 19 nt, Artificial Sequence
  Description of Artificial Sequence: Synthetic oligonucleotide
uccaguaauaccugccaau

SEQ ID NO: 379790 - RNA, 19 nt, Artificial Sequence
  Description of Artificial Sequence: Synthetic oligonucleotide
caggaucaagaaaauggug

SEQ ID NO: 379791 - RNA, 19 nt, Artificial Sequence
  Description of Artificial Sequence: Synthetic oligonucleotide
aguaugucaccaccaagau

SEQ ID NO: 379792 - RNA, 19 nt, Artificial Sequence
  Description of Artificial Sequence: Synthetic oligonucleotide
ccaguaaucuagcugcucg

SEQ ID NO: 379793 - RNA, 19 nt, Artificial Sequence
  Description of Artificial Sequence: Synthetic oligonucleotide
ugaguagcgcugauaggcu

SEQ ID NO: 379794 - RNA, 19 nt, Artificial Sequence
  Description of Artificial Sequence: Synthetic oligonucleotide
guuaccauagcuauuggcu

SEQ ID NO: 379795 - RNA, 19 nt, Artificial Sequence
  Description of Artificial Sequence: Synthetic oligonucleotide
aucgguauaucaccagagu

SEQ ID NO: 379796 - RNA, 19 nt, Artificial Sequence
  Description of Artificial Sequence: Synthetic oligonucleotide
cucgcaggaaguucucagg

SEQ ID NO: 379797 - RNA, 19 nt, Artificial Sequence
  Description of Artificial Sequence: Synthetic oligonucleotide
uggaauagguugaucccaa

SEQ ID NO: 379798 - RNA, 19 nt, Artificial Sequence
  Description of Artificial Sequence: Synthetic oligonucleotide
uaucaccagaguagaaauc

SEQ ID NO: 379799 - RNA, 19 nt, Artificial Sequence
  Description of Artificial Sequence: Synthetic oligonucleotide
acuuccgggaucccaucgg

SEQ ID NO: 379800 - RNA, 19 nt, Artificial Sequence
  Description of Artificial Sequence: Synthetic oligonucleotide
cagcgguaaagccacaaug

SEQ ID NO: 379801 - RNA, 19 nt, Artificial Sequence
  Description of Artificial Sequence: Synthetic oligonucleotide
cugcugagcuguuaucggg

SEQ ID NO: 379802 - RNA, 19 nt, Artificial Sequence
  Description of Artificial Sequence: Synthetic oligonucleotide
aagcucagcacucguuggu

SEQ ID NO: 379803 - RNA, 19 nt, Artificial Sequence
  Description of Artificial Sequence: Synthetic oligonucleotide
cagguucuccuguaacugg

SEQ ID NO: 379804 - RNA, 19 nt, Artificial Sequence
  Description of Artificial Sequence: Synthetic oligonucleotide
ucaaaguuguuggaccagu

SEQ ID NO: 379805 - RNA, 19 nt, Artificial Sequence
  Description of Artificial Sequence: Synthetic oligonucleotide
uaucaaggugaagauuaug

SEQ ID NO: 379806 - RNA, 19 nt, Artificial Sequence
  Description of Artificial Sequence: Synthetic oligonucleotide
auuaugaagaagagggcau

SEQ ID NO: 379807 - RNA, 19 nt, Artificial Sequence
  Description of Artificial Sequence: Synthetic oligonucleotide
ugcugagcuguuaucgggu

SEQ ID NO: 379808 - RNA, 19 nt, Artificial Sequence
  Description of Artificial Sequence: Synthetic oligonucleotide
gauaggcuuccaguaauac

SEQ ID NO: 379809 - RNA, 19 nt, Artificial Sequence
  Description of Artificial Sequence: Synthetic oligonucleotide
auuuaccccaacugccuca

SEQ ID NO: 379810 - RNA, 19 nt, Artificial Sequence
  Description of Artificial Sequence: Synthetic oligonucleotide
caugcggugguagauggag

SEQ ID NO: 379811 - RNA, 19 nt, Artificial Sequence
  Description of Artificial Sequence: Synthetic oligonucleotide
gaaugaugaugggaacucc

SEQ ID NO: 379812 - RNA, 19 nt, Artificial Sequence
  Description of Artificial Sequence: Synthetic oligonucleotide
acacgcaggaaucgaaaga

SEQ ID NO: 379813 - RNA, 19 nt, Artificial Sequence
  Description of Artificial Sequence: Synthetic oligonucleotide
ugcuuauaacuuccgggau

SEQ ID NO: 379814 - RNA, 19 nt, Artificial Sequence
  Description of Artificial Sequence: Synthetic oligonucleotide
ucacguuccacagugugau

SEQ ID NO: 379815 - RNA, 19 nt, Artificial Sequence
  Description of Artificial Sequence: Synthetic oligonucleotide
ucuaugcagagcuccugac

SEQ ID NO: 379816 - RNA, 19 nt, Artificial Sequence
  Description of Artificial Sequence: Synthetic oligonucleotide
uuuaccccaacugccucag

SEQ ID NO: 379817 - RNA, 19 nt, Artificial Sequence
  Description of Artificial Sequence: Synthetic oligonucleotide
acuacuaagcagccacagu

SEQ ID NO: 379818 - RNA, 19 nt, Artificial Sequence
  Description of Artificial Sequence: Synthetic oligonucleotide
auggacggccuccauagga

SEQ ID NO: 379819 - RNA, 19 nt, Artificial Sequence
  Description of Artificial Sequence: Synthetic oligonucleotide
gagugaucggcgcacccgc

SEQ ID NO: 379820 - RNA, 19 nt, Artificial Sequence
  Description of Artificial Sequence: Synthetic oligonucleotide
gguuaccauagcuauuggc

SEQ ID NO: 379821 - RNA, 19 nt, Artificial Sequence
  Description of Artificial Sequence: Synthetic oligonucleotide
gguucuggcuauaugcagg

SEQ ID NO: 379822 - RNA, 19 nt, Artificial Sequence
  Description of Artificial Sequence: Synthetic oligonucleotide
ugacacgcaggaaucgaaa

SEQ ID NO: 379823 - RNA, 19 nt, Artificial Sequence
  Description of Artificial Sequence: Synthetic oligonucleotide
cauaggaauguaccuucug

SEQ ID NO: 379824 - RNA, 19 nt, Artificial Sequence
  Description of Artificial Sequence: Synthetic oligonucleotide
acagacggcacgugcucgg

SEQ ID NO: 379825 - RNA, 19 nt, Artificial Sequence
  Description of Artificial Sequence: Synthetic oligonucleotide
  modified_base (2)..(2): a, c, u, g, unknown or other
unuggacgcaaggacuuca

SEQ ID NO: 379826 - RNA, 19 nt, Artificial Sequence
  Description of Artificial Sequence: Synthetic oligonucleotide
gaaucgaaagacaaucagu

SEQ ID NO: 379827 - RNA, 19 nt, Artificial Sequence
  Description of Artificial Sequence: Synthetic oligonucleotide
gauuuaccccaacugccuc

SEQ ID NO: 379828 - RNA, 19 nt, Artificial Sequence
  Description of Artificial Sequence: Synthetic oligonucleotide
ugacuacccaucugccaag

SEQ ID NO: 379829 - RNA, 19 nt, Artificial Sequence
  Description of Artificial Sequence: Synthetic oligonucleotide
accgccucggucccugccc

SEQ ID NO: 379830 - RNA, 19 nt, Artificial Sequence
  Description of Artificial Sequence: Synthetic oligonucleotide
acugaguuuggcaaucggu

SEQ ID NO: 379831 - RNA, 19 nt, Artificial Sequence
  Description of Artificial Sequence: Synthetic oligonucleotide
cccgguucuggcuauaugc

SEQ ID NO: 379832 - RNA, 19 nt, Artificial Sequence
  Description of Artificial Sequence: Synthetic oligonucleotide
caguaauaccugccaauug

SEQ ID NO: 379833 - RNA, 19 nt, Artificial Sequence
  Description of Artificial Sequence: Synthetic oligonucleotide
cacguugccacaguagaac

SEQ ID NO: 379834 - RNA, 19 nt, Artificial Sequence
  Description of Artificial Sequence: Synthetic oligonucleotide
uaauccaguccaccacgga

SEQ ID NO: 379835 - RNA, 19 nt, Artificial Sequence
  Description of Artificial Sequence: Synthetic oligonucleotide
cugaguuuggcaaucggua

SEQ ID NO: 379836 - RNA, 19 nt, Artificial Sequence
  Description of Artificial Sequence: Synthetic oligonucleotide
auacugaguuuggcaaucg

SEQ ID NO: 379837 - RNA, 19 nt, Artificial Sequence
  Description of Artificial Sequence: Synthetic oligonucleotide
gguaacaagggagcugagg

SEQ ID NO: 379838 - RNA, 19 nt, Artificial Sequence
  Description of Artificial Sequence: Synthetic oligonucleotide
uggacggccuccauaggaa

SEQ ID NO: 379839 - RNA, 19 nt, Artificial Sequence
  Description of Artificial Sequence: Synthetic oligonucleotide
ucccagagcgaugagguuc

SEQ ID NO: 379840 - RNA, 19 nt, Artificial Sequence
  Description of Artificial Sequence: Synthetic oligonucleotide
ccuaucaaggugaagauua

SEQ ID NO: 379841 - RNA, 19 nt, Artificial Sequence
  Description of Artificial Sequence: Synthetic oligonucleotide
gaacaacgaggucuguaga

SEQ ID NO: 379842 - RNA, 19 nt, Artificial Sequence
  Description of Artificial Sequence: Synthetic oligonucleotide
cuuccaguaauaccugcca

SEQ ID NO: 379843 - RNA, 19 nt, Artificial Sequence
  Description of Artificial Sequence: Synthetic oligonucleotide
aguuuugaguccagcacca

SEQ ID NO: 379844 - RNA, 19 nt, Artificial Sequence
  Description of Artificial Sequence: Synthetic oligonucleotide
gaagagggcauaggcccgg

SEQ ID NO: 379845 - RNA, 19 nt, Artificial Sequence
  Description of Artificial Sequence: Synthetic oligonucleotide
acguugccacaguagaaca

SEQ ID NO: 379846 - RNA, 19 nt, Artificial Sequence
  Description of Artificial Sequence: Synthetic oligonucleotide
cauuggggaugacacgcag

SEQ ID NO: 379847 - RNA, 19 nt, Artificial Sequence
  Description of Artificial Sequence: Synthetic oligonucleotide
uagcaacucuugccaaagc

SEQ ID NO: 379848 - RNA, 19 nt, Artificial Sequence
  Description of Artificial Sequence: Synthetic oligonucleotide
acaacgaggucuguagaga

SEQ ID NO: 379849 - RNA, 19 nt, Artificial Sequence
  Description of Artificial Sequence: Synthetic oligonucleotide
cuguuaucgggugccaggc

SEQ ID NO: 379850 - RNA, 19 nt, Artificial Sequence
  Description of Artificial Sequence: Synthetic oligonucleotide
cgguauaucaccagaguag

SEQ ID NO: 379851 - RNA, 19 nt, Artificial Sequence
  Description of Artificial Sequence: Synthetic oligonucleotide
guugacuacccaucugcca

SEQ ID NO: 379852 - RNA, 19 nt, Artificial Sequence
  Description of Artificial Sequence: Synthetic oligonucleotide
auucuggcagugaccaccg

SEQ ID NO: 379853 - RNA, 19 nt, Artificial Sequence
  Description of Artificial Sequence: Synthetic oligonucleotide
agcuguggguaacaaggga

SEQ ID NO: 379854 - RNA, 19 nt, Artificial Sequence
  Description of Artificial Sequence: Synthetic oligonucleotide
ugcucgaagcuuccacaca

SEQ ID NO: 379855 - RNA, 19 nt, Artificial Sequence
  Description of Artificial Sequence: Synthetic oligonucleotide
gcuguggguaacaagggag

SEQ ID NO: 379856 - RNA, 19 nt, Artificial Sequence
  Description of Artificial Sequence: Synthetic oligonucleotide
caaucgguauaucaccaga

SEQ ID NO: 379857 - RNA, 19 nt, Artificial Sequence
  Description of Artificial Sequence: Synthetic oligonucleotide
uggucuaugcagagcuccu

SEQ ID NO: 379858 - RNA, 19 nt, Artificial Sequence
  Description of Artificial Sequence: Synthetic oligonucleotide
guaugucaccaccaagauc

SEQ ID NO: 379859 - RNA, 19 nt, Artificial Sequence
  Description of Artificial Sequence: Synthetic oligonucleotide
ucccugaacaugagcucca

SEQ ID NO: 379860 - RNA, 19 nt, Artificial Sequence
  Description of Artificial Sequence: Synthetic oligonucleotide
gguauaucaccagaguaga

SEQ ID NO: 379861 - RNA, 19 nt, Artificial Sequence
  Description of Artificial Sequence: Synthetic oligonucleotide
gaaguuucccagagcgaug

SEQ ID NO: 379862 - RNA, 19 nt, Artificial Sequence
  Description of Artificial Sequence: Synthetic oligonucleotide
gaaucaucacaaucagggu

SEQ ID NO: 379863 - RNA, 19 nt, Artificial Sequence
  Description of Artificial Sequence: Synthetic oligonucleotide
aggaaucgaaagacaauca

SEQ ID NO: 379864 - RNA, 19 nt, Artificial Sequence
  Description of Artificial Sequence: Synthetic oligonucleotide
uguuaucgggugccaggcu

SEQ ID NO: 379865 - RNA, 19 nt, Artificial Sequence
  Description of Artificial Sequence: Synthetic oligonucleotide
caucgguggacaaaguucu

SEQ ID NO: 379866 - RNA, 19 nt, Artificial Sequence
  Description of Artificial Sequence: Synthetic oligonucleotide
ucugaaguacucgcaggaa

SEQ ID NO: 379867 - RNA, 19 nt, Artificial Sequence
  Description of Artificial Sequence: Synthetic oligonucleotide
acuucaucgaagaguuucu

SEQ ID NO: 379868 - RNA, 19 nt, Artificial Sequence
  Description of Artificial Sequence: Synthetic oligonucleotide
gacuacccaucugccaagg

SEQ ID NO: 379869 - RNA, 19 nt, Artificial Sequence
  Description of Artificial Sequence: Synthetic oligonucleotide
caagcgccgucuuuucuug

SEQ ID NO: 379870 - RNA, 19 nt, Artificial Sequence
  Description of Artificial Sequence: Synthetic oligonucleotide
uggcuauaugcaggaauca

SEQ ID NO: 379871 - RNA, 19 nt, Artificial Sequence
  Description of Artificial Sequence: Synthetic oligonucleotide
gacggcacgugcucgguga

SEQ ID NO: 379872 - RNA, 19 nt, Artificial Sequence
  Description of Artificial Sequence: Synthetic oligonucleotide
aguuggguuuucugaagua

SEQ ID NO: 379873 - RNA, 19 nt, Artificial Sequence
  Description of Artificial Sequence: Synthetic oligonucleotide
uugguacagguuugaguaa

SEQ ID NO: 379874 - RNA, 19 nt, Artificial Sequence
  Description of Artificial Sequence: Synthetic oligonucleotide
gcuuauaacuuccgggauc

SEQ ID NO: 379875 - RNA, 19 nt, Artificial Sequence
  Description of Artificial Sequence: Synthetic oligonucleotide
accaguaaucuagcugcuc

SEQ ID NO: 379876 - RNA, 19 nt, Artificial Sequence
  Description of Artificial Sequence: Synthetic oligonucleotide
guagaugauggcugucaga

SEQ ID NO: 379877 - RNA, 19 nt, Artificial Sequence
  Description of Artificial Sequence: Synthetic oligonucleotide
cugaguggucuguuccaag

SEQ ID NO: 379878 - RNA, 19 nt, Artificial Sequence
  Description of Artificial Sequence: Synthetic oligonucleotide
gcucgaagcuuccacacac

SEQ ID NO: 379879 - RNA, 19 nt, Artificial Sequence
  Description of Artificial Sequence: Synthetic oligonucleotide
uuccgggaucccaucggug

SEQ ID NO: 379880 - RNA, 19 nt, Artificial Sequence
  Description of Artificial Sequence: Synthetic oligonucleotide
gagcgaugagguuccccag

SEQ ID NO: 379881 - RNA, 19 nt, Artificial Sequence
  Description of Artificial Sequence: Synthetic oligonucleotide
auguaccuucugcaugaug

SEQ ID NO: 379882 - RNA, 19 nt, Artificial Sequence
  Description of Artificial Sequence: Synthetic oligonucleotide
aacgaggucuguagagacu

SEQ ID NO: 379883 - RNA, 19 nt, Artificial Sequence
  Description of Artificial Sequence: Synthetic oligonucleotide
ccaagaucccaccaaauga

SEQ ID NO: 379884 - RNA, 19 nt, Artificial Sequence
  Description of Artificial Sequence: Synthetic oligonucleotide
ccaucgguggacaaaguuc

SEQ ID NO: 379885 - RNA, 19 nt, Artificial Sequence
  Description of Artificial Sequence: Synthetic oligonucleotide
cuuagcaacucuugccaaa

SEQ ID NO: 379886 - RNA, 19 nt, Artificial Sequence
  Description of Artificial Sequence: Synthetic oligonucleotide
aguaaucuagcugcucgaa

SEQ ID NO: 379887 - RNA, 19 nt, Artificial Sequence
  Description of Artificial Sequence: Synthetic oligonucleotide
guggucuguuccaagcgcc

SEQ ID NO: 379888 - RNA, 19 nt, Artificial Sequence
  Description of Artificial Sequence: Synthetic oligonucleotide
gagccaaacugcuuaggcu

SEQ ID NO: 379889 - RNA, 19 nt, Artificial Sequence
  Description of Artificial Sequence: Synthetic oligonucleotide
cagccacaguccuuguccc

SEQ ID NO: 379890 - RNA, 19 nt, Artificial Sequence
  Description of Artificial Sequence: Synthetic oligonucleotide
gcuauuggcuucacauugg

SEQ ID NO: 379891 - RNA, 19 nt, Artificial Sequence
  Description of Artificial Sequence: Synthetic oligonucleotide
cugcaaaaucacucccuuc

SEQ ID NO: 379892 - RNA, 19 nt, Artificial Sequence
  Description of Artificial Sequence: Synthetic oligonucleotide
agccgugucaugucccaca

SEQ ID NO: 379893 - RNA, 19 nt, Artificial Sequence
  Description of Artificial Sequence: Synthetic oligonucleotide
caucagguagccgcggaac

SEQ ID NO: 379894 - RNA, 19 nt, Artificial Sequence
  Description of Artificial Sequence: Synthetic oligonucleotide
caccacggacacaaccagc

SEQ ID NO: 379895 - RNA, 19 nt, Artificial Sequence
  Description of Artificial Sequence: Synthetic oligonucleotide
gcaaucgguauaucaccag

SEQ ID NO: 379896 - RNA, 19 nt, Artificial Sequence
  Description of Artificial Sequence: Synthetic oligonucleotide
gagcugcuuauaacuuccg

SEQ ID NO: 379897 - RNA, 19 nt, Artificial Sequence
  Description of Artificial Sequence: Synthetic oligonucleotide
accagccgugucauguccc

SEQ ID NO: 379898 - RNA, 19 nt, Artificial Sequence
  Description of Artificial Sequence: Synthetic oligonucleotide
gauccagaugacagaggac

SEQ ID NO: 379899 - RNA, 19 nt, Artificial Sequence
  Description of Artificial Sequence: Synthetic oligonucleotide
caagaucccaccaaaugau

SEQ ID NO: 379900 - RNA, 19 nt, Artificial Sequence
  Description of Artificial Sequence: Synthetic oligonucleotide
gcuauaugcaggaaucauc

SEQ ID NO: 379901 - RNA, 19 nt, Artificial Sequence
  Description of Artificial Sequence: Synthetic oligonucleotide
ucguugguacagguuugag

SEQ ID NO: 379902 - RNA, 19 nt, Artificial Sequence
  Description of Artificial Sequence: Synthetic oligonucleotide
acgaggucuguagagacuu

SEQ ID NO: 379903 - RNA, 19 nt, Artificial Sequence
  Description of Artificial Sequence: Synthetic oligonucleotide
gaucccaaugauggcgaac

SEQ ID NO: 379904 - RNA, 19 nt, Artificial Sequence
  Description of Artificial Sequence: Synthetic oligonucleotide
ucucaggauuuaccccaac

SEQ ID NO: 379905 - RNA, 19 nt, Artificial Sequence
  Description of Artificial Sequence: Synthetic oligonucleotide
cugacuguagaugauggcu

SEQ ID NO: 379906 - RNA, 19 nt, Artificial Sequence
  Description of Artificial Sequence: Synthetic oligonucleotide
gguugaucccaaugauggc

SEQ ID NO: 379907 - RNA, 19 nt, Artificial Sequence
  Description of Artificial Sequence: Synthetic oligonucleotide
augauggcgaacacauagu

SEQ ID NO: 379908 - RNA, 19 nt, Artificial Sequence
  Description of Artificial Sequence: Synthetic oligonucleotide
uuaccccaacugccucagg

SEQ ID NO: 379909 - RNA, 19 nt, Artificial Sequence
  Description of Artificial Sequence: Synthetic oligonucleotide
gugaucggcgcacccgcag

SEQ ID NO: 379910 - RNA, 19 nt, Artificial Sequence
  Description of Artificial Sequence: Synthetic oligonucleotide
aaguaggacaggagccaca

SEQ ID NO: 379911 - RNA, 19 nt, Artificial Sequence
  Description of Artificial Sequence: Synthetic oligonucleotide
ccaauuguucaccaccauc

SEQ ID NO: 379912 - RNA, 19 nt, Artificial Sequence
  Description of Artificial Sequence: Synthetic oligonucleotide
agcgcacaucugcaguucu

SEQ ID NO: 379913 - RNA, 19 nt, Artificial Sequence
  Description of Artificial Sequence: Synthetic oligonucleotide
ucggcgcacccgcaggggc

SEQ ID NO: 379914 - RNA, 19 nt, Artificial Sequence
  Description of Artificial Sequence: Synthetic oligonucleotide
aucacguuccacaguguga

SEQ ID NO: 379915 - RNA, 19 nt, Artificial Sequence
  Description of Artificial Sequence: Synthetic oligonucleotide
auacaccauugaccacggg

SEQ ID NO: 379916 - RNA, 19 nt, Artificial Sequence
  Description of Artificial Sequence: Synthetic oligonucleotide
gacggccuccauaggaaug

SEQ ID NO: 379917 - RNA, 19 nt, Artificial Sequence
  Description of Artificial Sequence: Synthetic oligonucleotide
caguaaucuagcugcucga

SEQ ID NO: 379918 - RNA, 19 nt, Artificial Sequence
  Description of Artificial Sequence: Synthetic oligonucleotide
gacggagugaucggcgcac

SEQ ID NO: 379919 - RNA, 19 nt, Artificial Sequence
  Description of Artificial Sequence: Synthetic oligonucleotide
uccuaucaaggugaagauu

SEQ ID NO: 379920 - RNA, 19 nt, Artificial Sequence
  Description of Artificial Sequence: Synthetic oligonucleotide
cagauaagcuguggguaac

SEQ ID NO: 379921 - RNA, 19 nt, Artificial Sequence
  Description of Artificial Sequence: Synthetic oligonucleotide
aagaucccaccaaaugauu

SEQ ID NO: 379922 - RNA, 19 nt, Artificial Sequence
  Description of Artificial Sequence: Synthetic oligonucleotide
ggagugaucggcgcacccg

SEQ ID NO: 379923 - RNA, 19 nt, Artificial Sequence
  Description of Artificial Sequence: Synthetic oligonucleotide
  modified_base (13)..(13): a, c, u, g, unknown or other
gccagaccugcunuggacg

SEQ ID NO: 379924 - RNA, 19 nt, Artificial Sequence
  Description of Artificial Sequence: Synthetic oligonucleotide
cacagauaagcugugggua

SEQ ID NO: 379925 - RNA, 19 nt, Artificial Sequence
  Description of Artificial Sequence: Synthetic oligonucleotide
cacagacggcacgugcucg

SEQ ID NO: 379926 - RNA, 19 nt, Artificial Sequence
  Description of Artificial Sequence: Synthetic oligonucleotide
ccgucaacccacagggugg

SEQ ID NO: 379927 - RNA, 19 nt, Artificial Sequence
  Description of Artificial Sequence: Synthetic oligonucleotide
caccagccgugucaugucc

SEQ ID NO: 379928 - RNA, 19 nt, Artificial Sequence
  Description of Artificial Sequence: Synthetic oligonucleotide
gaguaauaccagcgguaaa

SEQ ID NO: 379929 - RNA, 19 nt, Artificial Sequence
  Description of Artificial Sequence: Synthetic oligonucleotide
auccaugcggugguagaug

SEQ ID NO: 379930 - RNA, 19 nt, Artificial Sequence
  Description of Artificial Sequence: Synthetic oligonucleotide
acggcacgugcucggugac

SEQ ID NO: 379931 - RNA, 19 nt, Artificial Sequence
  Description of Artificial Sequence: Synthetic oligonucleotide
cucuguccugccaccccgg

SEQ ID NO: 379932 - RNA, 19 nt, Artificial Sequence
  Description of Artificial Sequence: Synthetic oligonucleotide
cacagauagacaagaaguu

SEQ ID NO: 379933 - RNA, 19 nt, Artificial Sequence
  Description of Artificial Sequence: Synthetic oligonucleotide
uggcagugaccaccguaac

SEQ ID NO: 379934 - RNA, 19 nt, Artificial Sequence
  Description of Artificial Sequence: Synthetic oligonucleotide
auugaccacgggccugagu

SEQ ID NO: 379935 - RNA, 19 nt, Artificial Sequence
  Description of Artificial Sequence: Synthetic oligonucleotide
gugaccaccguaacacuuc

SEQ ID NO: 379936 - RNA, 19 nt, Artificial Sequence
  Description of Artificial Sequence: Synthetic oligonucleotide
uggacgcaaggacuucaua

SEQ ID NO: 379937 - RNA, 19 nt, Artificial Sequence
  Description of Artificial Sequence: Synthetic oligonucleotide
guaacuggggcugccccac

SEQ ID NO: 379938 - RNA, 19 nt, Artificial Sequence
  Description of Artificial Sequence: Synthetic oligonucleotide
ugccaaggccacagacggc

SEQ ID NO: 379939 - RNA, 19 nt, Artificial Sequence
  Description of Artificial Sequence: Synthetic oligonucleotide
uggucuccgucaacccaca

SEQ ID NO: 379940 - RNA, 19 nt, Artificial Sequence
  Description of Artificial Sequence: Synthetic oligonucleotide
ugaucccaaugauggcgaa

SEQ ID NO: 379941 - RNA, 19 nt, Artificial Sequence
  Description of Artificial Sequence: Synthetic oligonucleotide
aucacacccuugucaacuu

SEQ ID NO: 379942 - RNA, 19 nt, Artificial Sequence
  Description of Artificial Sequence: Synthetic oligonucleotide
caucgaacacguugccaca

SEQ ID NO: 379943 - RNA, 19 nt, Artificial Sequence
  Description of Artificial Sequence: Synthetic oligonucleotide
uaacuggggcugccccacc

SEQ ID NO: 379944 - RNA, 19 nt, Artificial Sequence
  Description of Artificial Sequence: Synthetic oligonucleotide
agacgaagacguagucaag

SEQ ID NO: 379945 - RNA, 19 nt, Artificial Sequence
  Description of Artificial Sequence: Synthetic oligonucleotide
gcugagcuguuaucgggug

SEQ ID NO: 379946 - RNA, 19 nt, Artificial Sequence
  Description of Artificial Sequence: Synthetic oligonucleotide
cacucguugguacagguuu

SEQ ID NO: 379947 - RNA, 19 nt, Artificial Sequence
  Description of Artificial Sequence: Synthetic oligonucleotide
agacggcacgugcucggug

SEQ ID NO: 379948 - RNA, 19 nt, Artificial Sequence
  Description of Artificial Sequence: Synthetic oligonucleotide
accacgggccugaguagcg

SEQ ID NO: 379949 - RNA, 19 nt, Artificial Sequence
  Description of Artificial Sequence: Synthetic oligonucleotide
ggcaaucgguauaucacca

SEQ ID NO: 379950 - RNA, 19 nt, Artificial Sequence
  Description of Artificial Sequence: Synthetic oligonucleotide
augacacgcaggaaucgaa

SEQ ID NO: 379951 - RNA, 19 nt, Artificial Sequence
  Description of Artificial Sequence: Synthetic oligonucleotide
ggcuuuaaggucccugcaa

SEQ ID NO: 379952 - RNA, 19 nt, Artificial Sequence
  Description of Artificial Sequence: Synthetic oligonucleotide
  modified_base (3)..(3): a, c, u, g, unknown or other
cunuggacgcaaggacuuc

SEQ ID NO: 379953 - RNA, 19 nt, Artificial Sequence
  Description of Artificial Sequence: Synthetic oligonucleotide
cagagcgaugagguucccc

SEQ ID NO: 379954 - RNA, 19 nt, Artificial Sequence
  Description of Artificial Sequence: Synthetic oligonucleotide
gggacggagugaucggcgc

SEQ ID NO: 379955 - RNA, 19 nt, Artificial Sequence
  Description of Artificial Sequence: Synthetic oligonucleotide
agccacaguccuuguccca

SEQ ID NO: 379956 - RNA, 19 nt, Artificial Sequence
  Description of Artificial Sequence: Synthetic oligonucleotide
gccgugucaugucccacag

SEQ ID NO: 379957 - RNA, 19 nt, Artificial Sequence
  Description of Artificial Sequence: Synthetic oligonucleotide
acauuggggaugacacgca

SEQ ID NO: 379958 - RNA, 19 nt, Artificial Sequence
  Description of Artificial Sequence: Synthetic oligonucleotide
gaccaccguaacacuucag

SEQ ID NO: 379959 - RNA, 19 nt, Artificial Sequence
  Description of Artificial Sequence: Synthetic oligonucleotide
uagcgcacaucugcaguuc

SEQ ID NO: 379960 - RNA, 19 nt, Artificial Sequence
  Description of Artificial Sequence: Synthetic oligonucleotide
guauaucaccagaguagaa

SEQ ID NO: 379961 - RNA, 19 nt, Artificial Sequence
  Description of Artificial Sequence: Synthetic oligonucleotide
uagccgcggaacugacugu

SEQ ID NO: 379962 - RNA, 19 nt, Artificial Sequence
  Description of Artificial Sequence: Synthetic oligonucleotide
ccaggaucaagaaaauggu

SEQ ID NO: 379963 - RNA, 19 nt, Artificial Sequence
  Description of Artificial Sequence: Synthetic oligonucleotide
gugcugguuaccauagcua

SEQ ID NO: 379964 - RNA, 19 nt, Artificial Sequence
  Description of Artificial Sequence: Synthetic oligonucleotide
gguagcgcacaucugcagu

SEQ ID NO: 379965 - RNA, 19 nt, Artificial Sequence
  Description of Artificial Sequence: Synthetic oligonucleotide
cccgacacuggccauucug

SEQ ID NO: 379966 - RNA, 19 nt, Artificial Sequence
  Description of Artificial Sequence: Synthetic oligonucleotide
  modified_base (9)..(9): a, c, u, g, unknown or other
gaccugcunuggacgcaag

SEQ ID NO: 379967 - RNA, 19 nt, Artificial Sequence
  Description of Artificial Sequence: Synthetic oligonucleotide
guagcgcacaucugcaguu

SEQ ID NO: 379968 - RNA, 19 nt, Artificial Sequence
  Description of Artificial Sequence: Synthetic oligonucleotide
gccggaacaacgaggucug

SEQ ID NO: 379969 - RNA, 19 nt, Artificial Sequence
  Description of Artificial Sequence: Synthetic oligonucleotide
gaacgggccuggccaccgc

SEQ ID NO: 379970 - RNA, 19 nt, Artificial Sequence
  Description of Artificial Sequence: Synthetic oligonucleotide
uucuggcuauaugcaggaa

SEQ ID NO: 379971 - RNA, 19 nt, Artificial Sequence
  Description of Artificial Sequence: Synthetic oligonucleotide
cucguugguacagguuuga

SEQ ID NO: 379972 - RNA, 19 nt, Artificial Sequence
  Description of Artificial Sequence: Synthetic oligonucleotide
caguguugacuacccaucu

SEQ ID NO: 379973 - RNA, 19 nt, Artificial Sequence
  Description of Artificial Sequence: Synthetic oligonucleotide
cacguuccacagugugauc

SEQ ID NO: 379974 - RNA, 19 nt, Artificial Sequence
  Description of Artificial Sequence: Synthetic oligonucleotide
gaguagcgcugauaggcuu

SEQ ID NO: 379975 - RNA, 19 nt, Artificial Sequence
  Description of Artificial Sequence: Synthetic oligonucleotide
cauaggccgcucgggcccc

SEQ ID NO: 379976 - RNA, 19 nt, Artificial Sequence
  Description of Artificial Sequence: Synthetic oligonucleotide
uaggcccgguucuggcuau

SEQ ID NO: 379977 - RNA, 19 nt, Artificial Sequence
  Description of Artificial Sequence: Synthetic oligonucleotide
gugcucggugacuacuacu

SEQ ID NO: 379978 - RNA, 19 nt, Artificial Sequence
  Description of Artificial Sequence: Synthetic oligonucleotide
agccgcggaacugacugua

SEQ ID NO: 379979 - RNA, 19 nt, Artificial Sequence
  Description of Artificial Sequence: Synthetic oligonucleotide
ccgguucuggcuauaugca

SEQ ID NO: 379980 - RNA, 19 nt, Artificial Sequence
  Description of Artificial Sequence: Synthetic oligonucleotide
gcggugguagauggagcgg

SEQ ID NO: 379981 - RNA, 19 nt, Artificial Sequence
  Description of Artificial Sequence: Synthetic oligonucleotide
guaacacuucagggucuuc

SEQ ID NO: 379982 - RNA, 19 nt, Artificial Sequence
  Description of Artificial Sequence: Synthetic oligonucleotide
guacucgcaggaaguucuc

SEQ ID NO: 379983 - RNA, 19 nt, Artificial Sequence
  Description of Artificial Sequence: Synthetic oligonucleotide
agugaucggcgcacccgca

SEQ ID NO: 379984 - RNA, 19 nt, Artificial Sequence
  Description of Artificial Sequence: Synthetic oligonucleotide
cuuccgggaucccaucggu

SEQ ID NO: 379985 - RNA, 19 nt, Artificial Sequence
  Description of Artificial Sequence: Synthetic oligonucleotide
cucgaagcuuccacacacu

SEQ ID NO: 379986 - RNA, 19 nt, Artificial Sequence
  Description of Artificial Sequence: Synthetic oligonucleotide
gaccaguaaucuagcugcu

SEQ ID NO: 379987 - RNA, 19 nt, Artificial Sequence
  Description of Artificial Sequence: Synthetic oligonucleotide
ccagaacgggccuggccac

SEQ ID NO: 379988 - RNA, 19 nt, Artificial Sequence
  Description of Artificial Sequence: Synthetic oligonucleotide
ggauuuuguccaguugggu

SEQ ID NO: 379989 - RNA, 19 nt, Artificial Sequence
  Description of Artificial Sequence: Synthetic oligonucleotide
gccagcaauggacggccuc

SEQ ID NO: 379990 - RNA, 19 nt, Artificial Sequence
  Description of Artificial Sequence: Synthetic oligonucleotide
  modified_base (4)..(4): a, c, u, g, unknown or other
gcunuggacgcaaggacuu

SEQ ID NO: 379991 - RNA, 19 nt, Artificial Sequence
  Description of Artificial Sequence: Synthetic oligonucleotide
ccuuagcaacucuugccaa

SEQ ID NO: 379992 - RNA, 19 nt, Artificial Sequence
  Description of Artificial Sequence: Synthetic oligonucleotide
acgugcucggugacuacua

SEQ ID NO: 379993 - RNA, 19 nt, Artificial Sequence
  Description of Artificial Sequence: Synthetic oligonucleotide
ccacagacggcacgugcuc

SEQ ID NO: 379994 - RNA, 19 nt, Artificial Sequence
  Description of Artificial Sequence: Synthetic oligonucleotide
cugcuuaggcuuccauacu

SEQ ID NO: 379995 - RNA, 19 nt, Artificial Sequence
  Description of Artificial Sequence: Synthetic oligonucleotide
gcccgguucuggcuauaug

SEQ ID NO: 379996 - RNA, 19 nt, Artificial Sequence
  Description of Artificial Sequence: Synthetic oligonucleotide
ggcacgugcucggugacua

SEQ ID NO: 379997 - RNA, 19 nt, Artificial Sequence
  Description of Artificial Sequence: Synthetic oligonucleotide
cagugaccaccguaacacu

SEQ ID NO: 379998 - RNA, 19 nt, Artificial Sequence
  Description of Artificial Sequence: Synthetic oligonucleotide
cgccgccggaacaacgagg

SEQ ID NO: 379999 - RNA, 19 nt, Artificial Sequence
  Description of Artificial Sequence: Synthetic oligonucleotide
ggaauagguugaucccaau

SEQ ID NO: 380000 - RNA, 19 nt, Artificial Sequence
  Description of Artificial Sequence: Synthetic oligonucleotide
gcgguagcgcacaucugca

SEQ ID NO: 380001 - RNA, 19 nt, Artificial Sequence
  Description of Artificial Sequence: Synthetic oligonucleotide
cgguagcgcacaucugcag

SEQ ID NO: 380002 - RNA, 19 nt, Artificial Sequence
  Description of Artificial Sequence: Synthetic oligonucleotide
cacgggccugaguagcgcu

SEQ ID NO: 380003 - RNA, 19 nt, Artificial Sequence
  Description of Artificial Sequence: Synthetic oligonucleotide
cgugcucggugacuacuac

SEQ ID NO: 380004 - RNA, 19 nt, Artificial Sequence
  Description of Artificial Sequence: Synthetic oligonucleotide
gccgccggaacaacgaggu

SEQ ID NO: 380005 - RNA, 19 nt, Artificial Sequence
  Description of Artificial Sequence: Synthetic oligonucleotide
gccgcggaacugacuguag

SEQ ID NO: 380006 - RNA, 19 nt, Artificial Sequence
  Description of Artificial Sequence: Synthetic oligonucleotide
acgccucgauggucuccgu

SEQ ID NO: 380007 - RNA, 19 nt, Artificial Sequence
  Description of Artificial Sequence: Synthetic oligonucleotide
ccauaggaauguaccuucu

SEQ ID NO: 380008 - RNA, 19 nt, Artificial Sequence
  Description of Artificial Sequence: Synthetic oligonucleotide
ccugcaaaaucacucccuu

SEQ ID NO: 380009 - RNA, 19 nt, Artificial Sequence
  Description of Artificial Sequence: Synthetic oligonucleotide
caccccggcugggaggaca

SEQ ID NO: 380010 - RNA, 19 nt, Artificial Sequence
  Description of Artificial Sequence: Synthetic oligonucleotide
agccagcaauggacggccu

SEQ ID NO: 380011 - RNA, 19 nt, Artificial Sequence
  Description of Artificial Sequence: Synthetic oligonucleotide
ccauacugaguuuggcaau

SEQ ID NO: 380012 - RNA, 19 nt, Artificial Sequence
  Description of Artificial Sequence: Synthetic oligonucleotide
cggagugaucggcgcaccc

SEQ ID NO: 380013 - RNA, 19 nt, Artificial Sequence
  Description of Artificial Sequence: Synthetic oligonucleotide
ccaguaauaccugccaauu

SEQ ID NO: 380014 - RNA, 19 nt, Artificial Sequence
  Description of Artificial Sequence: Synthetic oligonucleotide
ccgcggaacugacuguaga

SEQ ID NO: 380015 - RNA, 19 nt, Artificial Sequence
  Description of Artificial Sequence: Synthetic oligonucleotide
gugcaggcuuggguucaca

SEQ ID NO: 380016 - RNA, 19 nt, Artificial Sequence
  Description of Artificial Sequence: Synthetic oligonucleotide
ccacgggccugaguagcgc

SEQ ID NO: 380017 - RNA, 19 nt, Artificial Sequence
  Description of Artificial Sequence: Synthetic oligonucleotide
ggacggccuccauaggaau

SEQ ID NO: 380018 - RNA, 19 nt, Artificial Sequence
  Description of Artificial Sequence: Synthetic oligonucleotide
gccaauuguucaccaccau

SEQ ID NO: 380019 - RNA, 19 nt, Artificial Sequence
  Description of Artificial Sequence: Synthetic oligonucleotide
ccugaguggucuguuccaa

SEQ ID NO: 380020 - RNA, 19 nt, Artificial Sequence
  Description of Artificial Sequence: Synthetic oligonucleotide
cgccggaacaacgaggucu

SEQ ID NO: 380021 - RNA, 19 nt, Artificial Sequence
  Description of Artificial Sequence: Synthetic oligonucleotide
ccaugcggugguagaugga

SEQ ID NO: 380022 - RNA, 19 nt, Artificial Sequence
  Description of Artificial Sequence: Synthetic oligonucleotide
ccauagcuauuggcuucac

SEQ ID NO: 380023 - RNA, 19 nt, Artificial Sequence
  Description of Artificial Sequence: Synthetic oligonucleotide
gcaccagaacgggccuggc

SEQ ID NO: 380024 - RNA, 19 nt, Artificial Sequence
  Description of Artificial Sequence: Synthetic oligonucleotide
cccaucgguggacaaaguu

SEQ ID NO: 380025 - RNA, 19 nt, Artificial Sequence
  Description of Artificial Sequence: Synthetic oligonucleotide
ccguaacacuucagggucu

SEQ ID NO: 380026 - RNA, 19 nt, Artificial Sequence
  Description of Artificial Sequence: Synthetic oligonucleotide
ggccugaguagcgcugaua

SEQ ID NO: 380027 - RNA, 19 nt, Artificial Sequence
  Description of Artificial Sequence: Synthetic oligonucleotide
gcugguuaccauagcuauu

SEQ ID NO: 380028 - RNA, 19 nt, Artificial Sequence
  Description of Artificial Sequence: Synthetic oligonucleotide
ccagagcgaugagguuccc

SEQ ID NO: 380029 - RNA, 19 nt, Artificial Sequence
  Description of Artificial Sequence: Synthetic oligonucleotide
ccgcaggggcuccucacaa

SEQ ID NO: 380030 - RNA, 19 nt, Artificial Sequence
  Description of Artificial Sequence: Synthetic oligonucleotide
cagacggcacgugcucggu

SEQ ID NO: 380031 - RNA, 19 nt, Artificial Sequence
  Description of Artificial Sequence: Synthetic oligonucleotide
cggaacaacgaggucugua

SEQ ID NO: 380032 - RNA, 19 nt, Artificial Sequence
  Description of Artificial Sequence: Synthetic oligonucleotide
ccgccggaacaacgagguc

SEQ ID NO: 380033 - RNA, 19 nt, Artificial Sequence
  Description of Artificial Sequence: Synthetic oligonucleotide
gcacucguugguacagguu

SEQ ID NO: 380034 - RNA, 19 nt, Artificial Sequence
  Description of Artificial Sequence: Synthetic oligonucleotide
gcgccgucuuuucuugcuu

SEQ ID NO: 380035 - RNA, 19 nt, Artificial Sequence
  Description of Artificial Sequence: Synthetic oligonucleotide
ccccagccgccgccggaac

SEQ ID NO: 380036 - RNA, 19 nt, Artificial Sequence
  Description of Artificial Sequence: Synthetic oligonucleotide
guagccccgcaggcccagu

SEQ ID NO: 380037 - RNA, 19 nt, Artificial Sequence
  Description of Artificial Sequence: Synthetic oligonucleotide
cguaacacuucagggucuu

SEQ ID NO: 380038 - RNA, 19 nt, Artificial Sequence
  Description of Artificial Sequence: Synthetic oligonucleotide
ccgugucaugucccacagu

SEQ ID NO: 380039 - RNA, 19 nt, Artificial Sequence
  Description of Artificial Sequence: Synthetic oligonucleotide
cgguaauuuauggcaucuu

SEQ ID NO: 380040 - RNA, 19 nt, Artificial Sequence
  Description of Artificial Sequence: Synthetic oligonucleotide
ccggaacaacgaggucugu

SEQ ID NO: 380041 - RNA, 19 nt, Artificial Sequence
  Description of Artificial Sequence: Synthetic oligonucleotide
cggcacgugcucggugacu

SEQ ID NO: 380042 - RNA, 19 nt, Artificial Sequence
  Description of Artificial Sequence: Synthetic oligonucleotide
  modified_base (1)..(1): a, c, u, g, unknown or other
nuggacgcaaggacuucau

SEQ ID NO: 380043 - RNA, 19 nt, Artificial Sequence
  Description of Artificial Sequence: Synthetic oligonucleotide
aacacauccgaucaugacc

SEQ ID NO: 380044 - RNA, 19 nt, Artificial Sequence
  Description of Artificial Sequence: Synthetic oligonucleotide
aaagaaugcucccauauag

SEQ ID NO: 380045 - RNA, 19 nt, Artificial Sequence
  Description of Artificial Sequence: Synthetic oligonucleotide
uauacugccaauaauucag

SEQ ID NO: 380046 - RNA, 19 nt, Artificial Sequence
  Description of Artificial Sequence: Synthetic oligonucleotide
ugaacaaacgcuaacaauc

SEQ ID NO: 380047 - RNA, 19 nt, Artificial Sequence
  Description of Artificial Sequence: Synthetic oligonucleotide
cuuacuuggagauauggcg

SEQ ID NO: 380048 - RNA, 19 nt, Artificial Sequence
  Description of Artificial Sequence: Synthetic oligonucleotide
uuuuaaacacauccgauca

SEQ ID NO: 380049 - RNA, 19 nt, Artificial Sequence
  Description of Artificial Sequence: Synthetic oligonucleotide
aaugcucccauauagaauu

SEQ ID NO: 380050 - RNA, 19 nt, Artificial Sequence
  Description of Artificial Sequence: Synthetic oligonucleotide
ugcauaaucaacaggaguc

SEQ ID NO: 380051 - RNA, 19 nt, Artificial Sequence
  Description of Artificial Sequence: Synthetic oligonucleotide
uaaggcaaugguuaaauca

SEQ ID NO: 380052 - RNA, 19 nt, Artificial Sequence
  Description of Artificial Sequence: Synthetic oligonucleotide
aguacucgaggauugaccg

SEQ ID NO: 380053 - RNA, 19 nt, Artificial Sequence
  Description of Artificial Sequence: Synthetic oligonucleotide
aaggcaaugguuaaaucac

SEQ ID NO: 380054 - RNA, 19 nt, Artificial Sequence
  Description of Artificial Sequence: Synthetic oligonucleotide
accauuguuauacaagguc

SEQ ID NO: 380055 - RNA, 19 nt, Artificial Sequence
  Description of Artificial Sequence: Synthetic oligonucleotide
uguuugaagcuucugccgg

SEQ ID NO: 380056 - RNA, 19 nt, Artificial Sequence
  Description of Artificial Sequence: Synthetic oligonucleotide
gaucuguucagucuuccgg

SEQ ID NO: 380057 - RNA, 19 nt, Artificial Sequence
  Description of Artificial Sequence: Synthetic oligonucleotide
gauauggcguccuagacuc

SEQ ID NO: 380058 - RNA, 19 nt, Artificial Sequence
  Description of Artificial Sequence: Synthetic oligonucleotide
auuaucuugugaccgggac

SEQ ID NO: 380059 - RNA, 19 nt, Artificial Sequence
  Description of Artificial Sequence: Synthetic oligonucleotide
aggauggaaaaguuuuagc

SEQ ID NO: 380060 - RNA, 19 nt, Artificial Sequence
  Description of Artificial Sequence: Synthetic oligonucleotide
cuuuuaaaggacgaguggc

SEQ ID NO: 380061 - RNA, 19 nt, Artificial Sequence
  Description of Artificial Sequence: Synthetic oligonucleotide
cuuuuaaacacauccgauc

SEQ ID NO: 380062 - RNA, 19 nt, Artificial Sequence
  Description of Artificial Sequence: Synthetic oligonucleotide
uaaguugcaaacaggcaca

SEQ ID NO: 380063 - RNA, 19 nt, Artificial Sequence
  Description of Artificial Sequence: Synthetic oligonucleotide
aaugguuaaaucacaguca

SEQ ID NO: 380064 - RNA, 19 nt, Artificial Sequence
  Description of Artificial Sequence: Synthetic oligonucleotide
uuuuaaaggacgaguggcu

SEQ ID NO: 380065 - RNA, 19 nt, Artificial Sequence
  Description of Artificial Sequence: Synthetic oligonucleotide
gacgucaguaaccggaggg

SEQ ID NO: 380066 - RNA, 19 nt, Artificial Sequence
  Description of Artificial Sequence: Synthetic oligonucleotide
cuggcaaugagccaucacc

SEQ ID NO: 380067 - RNA, 19 nt, Artificial Sequence
  Description of Artificial Sequence: Synthetic oligonucleotide
uuacuuggagauauggcgu

SEQ ID NO: 380068 - RNA, 19 nt, Artificial Sequence
  Description of Artificial Sequence: Synthetic oligonucleotide
acacucgucacauauaaaa

SEQ ID NO: 380069 - RNA, 19 nt, Artificial Sequence
  Description of Artificial Sequence: Synthetic oligonucleotide
ugaccuaagcgcuugguga

SEQ ID NO: 380070 - RNA, 19 nt, Artificial Sequence
  Description of Artificial Sequence: Synthetic oligonucleotide
uguuauacaaggucucaac

SEQ ID NO: 380071 - RNA, 19 nt, Artificial Sequence
  Description of Artificial Sequence: Synthetic oligonucleotide
cauauacugccaauaauuc

SEQ ID NO: 380072 - RNA, 19 nt, Artificial Sequence
  Description of Artificial Sequence: Synthetic oligonucleotide
acucauaauagacgcgggg

SEQ ID NO: 380073 - RNA, 19 nt, Artificial Sequence
  Description of Artificial Sequence: Synthetic oligonucleotide
uuuggaggcgacauggagu

SEQ ID NO: 380074 - RNA, 19 nt, Artificial Sequence
  Description of Artificial Sequence: Synthetic oligonucleotide
cugucugcuauuuguaggg

SEQ ID NO: 380075 - RNA, 19 nt, Artificial Sequence
  Description of Artificial Sequence: Synthetic oligonucleotide
uccgguuugacacuguguc

SEQ ID NO: 380076 - RNA, 19 nt, Artificial Sequence
  Description of Artificial Sequence: Synthetic oligonucleotide
ugcuuuggaggcgacaugg

SEQ ID NO: 380077 - RNA, 19 nt, Artificial Sequence
  Description of Artificial Sequence: Synthetic oligonucleotide
uuccccuauuuacugaugc

SEQ ID NO: 380078 - RNA, 19 nt, Artificial Sequence
  Description of Artificial Sequence: Synthetic oligonucleotide
agcguagcaaacucguggg

SEQ ID NO: 380079 - RNA, 19 nt, Artificial Sequence
  Description of Artificial Sequence: Synthetic oligonucleotide
auagaauuagcaccauugu

SEQ ID NO: 380080 - RNA, 19 nt, Artificial Sequence
  Description of Artificial Sequence: Synthetic oligonucleotide
uuacugaccguucucagua

SEQ ID NO: 380081 - RNA, 19 nt, Artificial Sequence
  Description of Artificial Sequence: Synthetic oligonucleotide
auauacugccaauaauuca

SEQ ID NO: 380082 - RNA, 19 nt, Artificial Sequence
  Description of Artificial Sequence: Synthetic oligonucleotide
ucgaggauugaccggaaga

SEQ ID NO: 380083 - RNA, 19 nt, Artificial Sequence
  Description of Artificial Sequence: Synthetic oligonucleotide
aggauugaccggaagaagg

SEQ ID NO: 380084 - RNA, 19 nt, Artificial Sequence
  Description of Artificial Sequence: Synthetic oligonucleotide
ucauaauagacgcgggguc

SEQ ID NO: 380085 - RNA, 19 nt, Artificial Sequence
  Description of Artificial Sequence: Synthetic oligonucleotide
agaauuagcaccauuguua

SEQ ID NO: 380086 - RNA, 19 nt, Artificial Sequence
  Description of Artificial Sequence: Synthetic oligonucleotide
aacaaacgcuaacaaucug

SEQ ID NO: 380087 - RNA, 19 nt, Artificial Sequence
  Description of Artificial Sequence: Synthetic oligonucleotide
agcuaauuucugucugccc

SEQ ID NO: 380088 - RNA, 19 nt, Artificial Sequence
  Description of Artificial Sequence: Synthetic oligonucleotide
uccacucauaauagacgcg

SEQ ID NO: 380089 - RNA, 19 nt, Artificial Sequence
  Description of Artificial Sequence: Synthetic oligonucleotide
auggccggcgcuuuuaaag

SEQ ID NO: 380090 - RNA, 19 nt, Artificial Sequence
  Description of Artificial Sequence: Synthetic oligonucleotide
aguaaccggagggaagucc

SEQ ID NO: 380091 - RNA, 19 nt, Artificial Sequence
  Description of Artificial Sequence: Synthetic oligonucleotide
agauauggcguccuagacu

SEQ ID NO: 380092 - RNA, 19 nt, Artificial Sequence
  Description of Artificial Sequence: Synthetic oligonucleotide
cagcguagcaaacucgugg

SEQ ID NO: 380093 - RNA, 19 nt, Artificial Sequence
  Description of Artificial Sequence: Synthetic oligonucleotide
uugugaccgggacagagga

SEQ ID NO: 380094 - RNA, 19 nt, Artificial Sequence
  Description of Artificial Sequence: Synthetic oligonucleotide
cacucgucacauauaaaag

SEQ ID NO: 380095 - RNA, 19 nt, Artificial Sequence
  Description of Artificial Sequence: Synthetic oligonucleotide
uagaauuagcaccauuguu

SEQ ID NO: 380096 - RNA, 19 nt, Artificial Sequence
  Description of Artificial Sequence: Synthetic oligonucleotide
cagccuguaaaaucugucc

SEQ ID NO: 380097 - RNA, 19 nt, Artificial Sequence
  Description of Artificial Sequence: Synthetic oligonucleotide
uuaaaacccuuuacucucu

SEQ ID NO: 380098 - RNA, 19 nt, Artificial Sequence
  Description of Artificial Sequence: Synthetic oligonucleotide
auccgaucaugaccuaagc

SEQ ID NO: 380099 - RNA, 19 nt, Artificial Sequence
  Description of Artificial Sequence: Synthetic oligonucleotide
uguacacugcaacacucgu

SEQ ID NO: 380100 - RNA, 19 nt, Artificial Sequence
  Description of Artificial Sequence: Synthetic oligonucleotide
aaaacccuuuacucucucu

SEQ ID NO: 380101 - RNA, 19 nt, Artificial Sequence
  Description of Artificial Sequence: Synthetic oligonucleotide
cuugaauucucacacugga

SEQ ID NO: 380102 - RNA, 19 nt, Artificial Sequence
  Description of Artificial Sequence: Synthetic oligonucleotide
gguuaaaucacagucaaaa

SEQ ID NO: 380103 - RNA, 19 nt, Artificial Sequence
  Description of Artificial Sequence: Synthetic oligonucleotide
uuuaaacacauccgaucau

SEQ ID NO: 380104 - RNA, 19 nt, Artificial Sequence
  Description of Artificial Sequence: Synthetic oligonucleotide
aagaugccuuacuuggaga

SEQ ID NO: 380105 - RNA, 19 nt, Artificial Sequence
  Description of Artificial Sequence: Synthetic oligonucleotide
aguggcucgaagugucugg

SEQ ID NO: 380106 - RNA, 19 nt, Artificial Sequence
  Description of Artificial Sequence: Synthetic oligonucleotide
aauagacgcgggguccagc

SEQ ID NO: 380107 - RNA, 19 nt, Artificial Sequence
  Description of Artificial Sequence: Synthetic oligonucleotide
ucugcuauuuguagggauu

SEQ ID NO: 380108 - RNA, 19 nt, Artificial Sequence
  Description of Artificial Sequence: Synthetic oligonucleotide
cuugugaccgggacagagg

SEQ ID NO: 380109 - RNA, 19 nt, Artificial Sequence
  Description of Artificial Sequence: Synthetic oligonucleotide
acaaacgcuaacaaucuga

SEQ ID NO: 380110 - RNA, 19 nt, Artificial Sequence
  Description of Artificial Sequence: Synthetic oligonucleotide
ucguacuguaucuccacga

SEQ ID NO: 380111 - RNA, 19 nt, Artificial Sequence
  Description of Artificial Sequence: Synthetic oligonucleotide
uggccggcgcuuuuaaagg

SEQ ID NO: 380112 - RNA, 19 nt, Artificial Sequence
  Description of Artificial Sequence: Synthetic oligonucleotide
uggacgucaguaaccggag

SEQ ID NO: 380113 - RNA, 19 nt, Artificial Sequence
  Description of Artificial Sequence: Synthetic oligonucleotide
ggagguacgguuuacugac

SEQ ID NO: 380114 - RNA, 19 nt, Artificial Sequence
  Description of Artificial Sequence: Synthetic oligonucleotide
uucguguugaggaguacuc

SEQ ID NO: 380115 - RNA, 19 nt, Artificial Sequence
  Description of Artificial Sequence: Synthetic oligonucleotide
cauccgaucaugaccuaag

SEQ ID NO: 380116 - RNA, 19 nt, Artificial Sequence
  Description of Artificial Sequence: Synthetic oligonucleotide
augaccuaagcgcuuggug

SEQ ID NO: 380117 - RNA, 19 nt, Artificial Sequence
  Description of Artificial Sequence: Synthetic oligonucleotide
ucucuguuaccgagggugc

SEQ ID NO: 380118 - RNA, 19 nt, Artificial Sequence
  Description of Artificial Sequence: Synthetic oligonucleotide
ucccacuagagucuugcgu

SEQ ID NO: 380119 - RNA, 19 nt, Artificial Sequence
  Description of Artificial Sequence: Synthetic oligonucleotide
cuuuggaggcgacauggag

SEQ ID NO: 380120 - RNA, 19 nt, Artificial Sequence
  Description of Artificial Sequence: Synthetic oligonucleotide
gaguacucgaggauugacc

SEQ ID NO: 380121 - RNA, 19 nt, Artificial Sequence
  Description of Artificial Sequence: Synthetic oligonucleotide
gagauauggcguccuagac

SEQ ID NO: 380122 - RNA, 19 nt, Artificial Sequence
  Description of Artificial Sequence: Synthetic oligonucleotide
ucguguugaggaguacucg

SEQ ID NO: 380123 - RNA, 19 nt, Artificial Sequence
  Description of Artificial Sequence: Synthetic oligonucleotide
uuaccgagggugcuguggu

SEQ ID NO: 380124 - RNA, 19 nt, Artificial Sequence
  Description of Artificial Sequence: Synthetic oligonucleotide
aaguuccccuauuuacuga

SEQ ID NO: 380125 - RNA, 19 nt, Artificial Sequence
  Description of Artificial Sequence: Synthetic oligonucleotide
uuucguguugaggaguacu

SEQ ID NO: 380126 - RNA, 19 nt, Artificial Sequence
  Description of Artificial Sequence: Synthetic oligonucleotide
cuuuacucucucuuaagaa

SEQ ID NO: 380127 - RNA, 19 nt, Artificial Sequence
  Description of Artificial Sequence: Synthetic oligonucleotide
ugaccagcguagcaaacuc

SEQ ID NO: 380128 - RNA, 19 nt, Artificial Sequence
  Description of Artificial Sequence: Synthetic oligonucleotide
guuuuagccaugggcagag

SEQ ID NO: 380129 - RNA, 19 nt, Artificial Sequence
  Description of Artificial Sequence: Synthetic oligonucleotide
cucaccgugucagacuugg

SEQ ID NO: 380130 - RNA, 19 nt, Artificial Sequence
  Description of Artificial Sequence: Synthetic oligonucleotide
cacucauaauagacgcggg

SEQ ID NO: 380131 - RNA, 19 nt, Artificial Sequence
  Description of Artificial Sequence: Synthetic oligonucleotide
ucgugggcauuaaaccgag

SEQ ID NO: 380132 - RNA, 19 nt, Artificial Sequence
  Description of Artificial Sequence: Synthetic oligonucleotide
gcaaacggugaacaaacgc

SEQ ID NO: 380133 - RNA, 19 nt, Artificial Sequence
  Description of Artificial Sequence: Synthetic oligonucleotide
ggcuugaauucucacacug

SEQ ID NO: 380134 - RNA, 19 nt, Artificial Sequence
  Description of Artificial Sequence: Synthetic oligonucleotide
cacuggacgucaguaaccg

SEQ ID NO: 380135 - RNA, 19 nt, Artificial Sequence
  Description of Artificial Sequence: Synthetic oligonucleotide
aguuccccuauuuacugau

SEQ ID NO: 380136 - RNA, 19 nt, Artificial Sequence
  Description of Artificial Sequence: Synthetic oligonucleotide
ugggcauuaaaccgagcua

SEQ ID NO: 380137 - RNA, 19 nt, Artificial Sequence
  Description of Artificial Sequence: Synthetic oligonucleotide
caguaugaguucaacauua

SEQ ID NO: 380138 - RNA, 19 nt, Artificial Sequence
  Description of Artificial Sequence: Synthetic oligonucleotide
uugaggaguacucgaggau

SEQ ID NO: 380139 - RNA, 19 nt, Artificial Sequence
  Description of Artificial Sequence: Synthetic oligonucleotide
guuaccgagggugcugugg

SEQ ID NO: 380140 - RNA, 19 nt, Artificial Sequence
  Description of Artificial Sequence: Synthetic oligonucleotide
ucgaugaccagcguagcaa

SEQ ID NO: 380141 - RNA, 19 nt, Artificial Sequence
  Description of Artificial Sequence: Synthetic oligonucleotide
ggauuauaaagugcugucc

SEQ ID NO: 380142 - RNA, 19 nt, Artificial Sequence
  Description of Artificial Sequence: Synthetic oligonucleotide
auagacgcgggguccagca

SEQ ID NO: 380143 - RNA, 19 nt, Artificial Sequence
  Description of Artificial Sequence: Synthetic oligonucleotide
ucucgguaacagcaacaug

SEQ ID NO: 380144 - RNA, 19 nt, Artificial Sequence
  Description of Artificial Sequence: Synthetic oligonucleotide
ugguuugcguggcaagcca

SEQ ID NO: 380145 - RNA, 19 nt, Artificial Sequence
  Description of Artificial Sequence: Synthetic oligonucleotide
agguacgguuuacugaccu

SEQ ID NO: 380146 - RNA, 19 nt, Artificial Sequence
  Description of Artificial Sequence: Synthetic oligonucleotide
acgcuaacaaucugauacu

SEQ ID NO: 380147 - RNA, 19 nt, Artificial Sequence
  Description of Artificial Sequence: Synthetic oligonucleotide
uuauccuguggauuagcuu

SEQ ID NO: 380148 - RNA, 19 nt, Artificial Sequence
  Description of Artificial Sequence: Synthetic oligonucleotide
aguccucaccgugucagac

SEQ ID NO: 380149 - RNA, 19 nt, Artificial Sequence
  Description of Artificial Sequence: Synthetic oligonucleotide
gaggaguacucgaggauug

SEQ ID NO: 380150 - RNA, 19 nt, Artificial Sequence
  Description of Artificial Sequence: Synthetic oligonucleotide
cugguuucguguugaggag

SEQ ID NO: 380151 - RNA, 19 nt, Artificial Sequence
  Description of Artificial Sequence: Synthetic oligonucleotide
guacucgaggauugaccgg

SEQ ID NO: 380152 - RNA, 19 nt, Artificial Sequence
  Description of Artificial Sequence: Synthetic oligonucleotide
ccauauagaauuagcacca

SEQ ID NO: 380153 - RNA, 19 nt, Artificial Sequence
  Description of Artificial Sequence: Synthetic oligonucleotide
ucuguuaccgagggugcug

SEQ ID NO: 380154 - RNA, 19 nt, Artificial Sequence
  Description of Artificial Sequence: Synthetic oligonucleotide
ugaggaguacucgaggauu

SEQ ID NO: 380155 - RNA, 19 nt, Artificial Sequence
  Description of Artificial Sequence: Synthetic oligonucleotide
uuccgguuugacacugugu

SEQ ID NO: 380156 - RNA, 19 nt, Artificial Sequence
  Description of Artificial Sequence: Synthetic oligonucleotide
uccucaccgugucagacuu

SEQ ID NO: 380157 - RNA, 19 nt, Artificial Sequence
  Description of Artificial Sequence: Synthetic oligonucleotide
accgugucagacuuggguu

SEQ ID NO: 380158 - RNA, 19 nt, Artificial Sequence
  Description of Artificial Sequence: Synthetic oligonucleotide
gggaauauaacugucgugu

SEQ ID NO: 380159 - RNA, 19 nt, Artificial Sequence
  Description of Artificial Sequence: Synthetic oligonucleotide
cuuuauccuguggauuagc

SEQ ID NO: 380160 - RNA, 19 nt, Artificial Sequence
  Description of Artificial Sequence: Synthetic oligonucleotide
ccuuacuuggagauauggc

SEQ ID NO: 380161 - RNA, 19 nt, Artificial Sequence
  Description of Artificial Sequence: Synthetic oligonucleotide
gaagucucguccuggccuc

SEQ ID NO: 380162 - RNA, 19 nt, Artificial Sequence
  Description of Artificial Sequence: Synthetic oligonucleotide
augccuuacuuggagauau

SEQ ID NO: 380163 - RNA, 19 nt, Artificial Sequence
  Description of Artificial Sequence: Synthetic oligonucleotide
uucucaguaugaguucaac

SEQ ID NO: 380164 - RNA, 19 nt, Artificial Sequence
  Description of Artificial Sequence: Synthetic oligonucleotide
agccgcuucgacauggcuc

SEQ ID NO: 380165 - RNA, 19 nt, Artificial Sequence
  Description of Artificial Sequence: Synthetic oligonucleotide
ucuggcaaugagccaucac

SEQ ID NO: 380166 - RNA, 19 nt, Artificial Sequence
  Description of Artificial Sequence: Synthetic oligonucleotide
gugggcauuaaaccgagcu

SEQ ID NO: 380167 - RNA, 19 nt, Artificial Sequence
  Description of Artificial Sequence: Synthetic oligonucleotide
cucagggcgguuagcuucc

SEQ ID NO: 380168 - RNA, 19 nt, Artificial Sequence
  Description of Artificial Sequence: Synthetic oligonucleotide
uuauugggguguacuuuau

SEQ ID NO: 380169 - RNA, 19 nt, Artificial Sequence
  Description of Artificial Sequence: Synthetic oligonucleotide
ugguuaaaucacagucaaa

SEQ ID NO: 380170 - RNA, 19 nt, Artificial Sequence
  Description of Artificial Sequence: Synthetic oligonucleotide
acgaguggcucgaaguguc

SEQ ID NO: 380171 - RNA, 19 nt, Artificial Sequence
  Description of Artificial Sequence: Synthetic oligonucleotide
auagggagguacgguuuac

SEQ ID NO: 380172 - RNA, 19 nt, Artificial Sequence
  Description of Artificial Sequence: Synthetic oligonucleotide
auaauagacgcggggucca

SEQ ID NO: 380173 - RNA, 19 nt, Artificial Sequence
  Description of Artificial Sequence: Synthetic oligonucleotide
gucaguaaccggagggaag

SEQ ID NO: 380174 - RNA, 19 nt, Artificial Sequence
  Description of Artificial Sequence: Synthetic oligonucleotide
gcuaauuucugucugcccu

SEQ ID NO: 380175 - RNA, 19 nt, Artificial Sequence
  Description of Artificial Sequence: Synthetic oligonucleotide
agagucuugcgugccuggg

SEQ ID NO: 380176 - RNA, 19 nt, Artificial Sequence
  Description of Artificial Sequence: Synthetic oligonucleotide
ugaccgggacagaggacug

SEQ ID NO: 380177 - RNA, 19 nt, Artificial Sequence
  Description of Artificial Sequence: Synthetic oligonucleotide
uauucucucugagcaggga

SEQ ID NO: 380178 - RNA, 19 nt, Artificial Sequence
  Description of Artificial Sequence: Synthetic oligonucleotide
gccuuacuuggagauaugg

SEQ ID NO: 380179 - RNA, 19 nt, Artificial Sequence
  Description of Artificial Sequence: Synthetic oligonucleotide
uauaacugucguguuuguu

SEQ ID NO: 380180 - RNA, 19 nt, Artificial Sequence
  Description of Artificial Sequence: Synthetic oligonucleotide
cacaaauaaggcaaugguu

SEQ ID NO: 380181 - RNA, 19 nt, Artificial Sequence
  Description of Artificial Sequence: Synthetic oligonucleotide
cauacuccuuugccgcccc

SEQ ID NO: 380182 - RNA, 19 nt, Artificial Sequence
  Description of Artificial Sequence: Synthetic oligonucleotide
ucggcgcacacgucgcugc

SEQ ID NO: 380183 - RNA, 19 nt, Artificial Sequence
  Description of Artificial Sequence: Synthetic oligonucleotide
ugucugcuauuuguaggga

SEQ ID NO: 380184 - RNA, 19 nt, Artificial Sequence
  Description of Artificial Sequence: Synthetic oligonucleotide
aggagucuucccacuagag

SEQ ID NO: 380185 - RNA, 19 nt, Artificial Sequence
  Description of Artificial Sequence: Synthetic oligonucleotide
ccuauuuacugaugcccag

SEQ ID NO: 380186 - RNA, 19 nt, Artificial Sequence
  Description of Artificial Sequence: Synthetic oligonucleotide
ugccuuacuuggagauaug

SEQ ID NO: 380187 - RNA, 19 nt, Artificial Sequence
  Description of Artificial Sequence: Synthetic oligonucleotide
gggcaaacggugaacaaac

SEQ ID NO: 380188 - RNA, 19 nt, Artificial Sequence
  Description of Artificial Sequence: Synthetic oligonucleotide
ugcugguuacugaccguuc

SEQ ID NO: 380189 - RNA, 19 nt, Artificial Sequence
  Description of Artificial Sequence: Synthetic oligonucleotide
gcuaacaaucugauacuug

SEQ ID NO: 380190 - RNA, 19 nt, Artificial Sequence
  Description of Artificial Sequence: Synthetic oligonucleotide
uaauagacgcgggguccag

SEQ ID NO: 380191 - RNA, 19 nt, Artificial Sequence
  Description of Artificial Sequence: Synthetic oligonucleotide
ugucgaugaccagcguagc

SEQ ID NO: 380192 - RNA, 19 nt, Artificial Sequence
  Description of Artificial Sequence: Synthetic oligonucleotide
uuugccgccccuuccgguu

SEQ ID NO: 380193 - RNA, 19 nt, Artificial Sequence
  Description of Artificial Sequence: Synthetic oligonucleotide
cucgaggauugaccggaag

SEQ ID NO: 380194 - RNA, 19 nt, Artificial Sequence
  Description of Artificial Sequence: Synthetic oligonucleotide
ccccuauuuacugaugccc

SEQ ID NO: 380195 - RNA, 19 nt, Artificial Sequence
  Description of Artificial Sequence: Synthetic oligonucleotide
aguaugaguucaacauuau

SEQ ID NO: 380196 - RNA, 19 nt, Artificial Sequence
  Description of Artificial Sequence: Synthetic oligonucleotide
ggcuuucagugcuaugcug

SEQ ID NO: 380197 - RNA, 19 nt, Artificial Sequence
  Description of Artificial Sequence: Synthetic oligonucleotide
acgucaguaaccggaggga

SEQ ID NO: 380198 - RNA, 19 nt, Artificial Sequence
  Description of Artificial Sequence: Synthetic oligonucleotide
cucauaauagacgcggggu

SEQ ID NO: 380199 - RNA, 19 nt, Artificial Sequence
  Description of Artificial Sequence: Synthetic oligonucleotide
gauccggcccgcugcaguc

SEQ ID NO: 380200 - RNA, 19 nt, Artificial Sequence
  Description of Artificial Sequence: Synthetic oligonucleotide
gucgaugaccagcguagca

SEQ ID NO: 380201 - RNA, 19 nt, Artificial Sequence
  Description of Artificial Sequence: Synthetic oligonucleotide
cauaggccuacugccccgg

SEQ ID NO: 380202 - RNA, 19 nt, Artificial Sequence
  Description of Artificial Sequence: Synthetic oligonucleotide
aacacucgucacauauaaa

SEQ ID NO: 380203 - RNA, 19 nt, Artificial Sequence
  Description of Artificial Sequence: Synthetic oligonucleotide
ugccgggaaccccgcgacg

SEQ ID NO: 380204 - RNA, 19 nt, Artificial Sequence
  Description of Artificial Sequence: Synthetic oligonucleotide
cagggaauauaacugucgu

SEQ ID NO: 380205 - RNA, 19 nt, Artificial Sequence
  Description of Artificial Sequence: Synthetic oligonucleotide
aggggacgacgguugucuc

SEQ ID NO: 380206 - RNA, 19 nt, Artificial Sequence
  Description of Artificial Sequence: Synthetic oligonucleotide
auauggcguccuagacucc

SEQ ID NO: 380207 - RNA, 19 nt, Artificial Sequence
  Description of Artificial Sequence: Synthetic oligonucleotide
uguuaccgagggugcugug

SEQ ID NO: 380208 - RNA, 19 nt, Artificial Sequence
  Description of Artificial Sequence: Synthetic oligonucleotide
ugcuauuuguagggauuau

SEQ ID NO: 380209 - RNA, 19 nt, Artificial Sequence
  Description of Artificial Sequence: Synthetic oligonucleotide
uacugaccguucucaguau

SEQ ID NO: 380210 - RNA, 19 nt, Artificial Sequence
  Description of Artificial Sequence: Synthetic oligonucleotide
gaggcgacauggaguggag

SEQ ID NO: 380211 - RNA, 19 nt, Artificial Sequence
  Description of Artificial Sequence: Synthetic oligonucleotide
ggacgucaguaaccggagg

SEQ ID NO: 380212 - RNA, 19 nt, Artificial Sequence
  Description of Artificial Sequence: Synthetic oligonucleotide
guagcaaacucgugggcau

SEQ ID NO: 380213 - RNA, 19 nt, Artificial Sequence
  Description of Artificial Sequence: Synthetic oligonucleotide
cuaagcgcuuggugacaac

SEQ ID NO: 380214 - RNA, 19 nt, Artificial Sequence
  Description of Artificial Sequence: Synthetic oligonucleotide
ugucgucgucacggcaggg

SEQ ID NO: 380215 - RNA, 19 nt, Artificial Sequence
  Description of Artificial Sequence: Synthetic oligonucleotide
gugaccgggacagaggacu

SEQ ID NO: 380216 - RNA, 19 nt, Artificial Sequence
  Description of Artificial Sequence: Synthetic oligonucleotide
cgagcuaauuucugucugc

SEQ ID NO: 380217 - RNA, 19 nt, Artificial Sequence
  Description of Artificial Sequence: Synthetic oligonucleotide
ccggcgcuuuuaaaggacg

SEQ ID NO: 380218 - RNA, 19 nt, Artificial Sequence
  Description of Artificial Sequence: Synthetic oligonucleotide
agauggccggcgcuuuuaa

SEQ ID NO: 380219 - RNA, 19 nt, Artificial Sequence
  Description of Artificial Sequence: Synthetic oligonucleotide
acacgucgcugcuccggag

SEQ ID NO: 380220 - RNA, 19 nt, Artificial Sequence
  Description of Artificial Sequence: Synthetic oligonucleotide
ccacuagagucuugcgugc

SEQ ID NO: 380221 - RNA, 19 nt, Artificial Sequence
  Description of Artificial Sequence: Synthetic oligonucleotide
uggcguccuagacuccgau

SEQ ID NO: 380222 - RNA, 19 nt, Artificial Sequence
  Description of Artificial Sequence: Synthetic oligonucleotide
gaagaaggggacgacgguu

SEQ ID NO: 380223 - RNA, 19 nt, Artificial Sequence
  Description of Artificial Sequence: Synthetic oligonucleotide
gcuaaguugcaaacaggca

SEQ ID NO: 380224 - RNA, 19 nt, Artificial Sequence
  Description of Artificial Sequence: Synthetic oligonucleotide
guaaccggagggaaguccu

SEQ ID NO: 380225 - RNA, 19 nt, Artificial Sequence
  Description of Artificial Sequence: Synthetic oligonucleotide
gguuugcguggcaagccag

SEQ ID NO: 380226 - RNA, 19 nt, Artificial Sequence
  Description of Artificial Sequence: Synthetic oligonucleotide
gcguccuagacuccgaugu

SEQ ID NO: 380227 - RNA, 19 nt, Artificial Sequence
  Description of Artificial Sequence: Synthetic oligonucleotide
cuuuccgucuuccacucau

SEQ ID NO: 380228 - RNA, 19 nt, Artificial Sequence
  Description of Artificial Sequence: Synthetic oligonucleotide
cuagacuccgauguacacu

SEQ ID NO: 380229 - RNA, 19 nt, Artificial Sequence
  Description of Artificial Sequence: Synthetic oligonucleotide
ggaggcgacauggagugga

SEQ ID NO: 380230 - RNA, 19 nt, Artificial Sequence
  Description of Artificial Sequence: Synthetic oligonucleotide
gaaccccgcgacggcagag

SEQ ID NO: 380231 - RNA, 19 nt, Artificial Sequence
  Description of Artificial Sequence: Synthetic oligonucleotide
gauggccggcgcuuuuaaa

SEQ ID NO: 380232 - RNA, 19 nt, Artificial Sequence
  Description of Artificial Sequence: Synthetic oligonucleotide
uggaggcgacauggagugg

SEQ ID NO: 380233 - RNA, 19 nt, Artificial Sequence
  Description of Artificial Sequence: Synthetic oligonucleotide
gaccgggacagaggacugc

SEQ ID NO: 380234 - RNA, 19 nt, Artificial Sequence
  Description of Artificial Sequence: Synthetic oligonucleotide
cugcuauuuguagggauua

SEQ ID NO: 380235 - RNA, 19 nt, Artificial Sequence
  Description of Artificial Sequence: Synthetic oligonucleotide
gacgaguggcucgaagugu

SEQ ID NO: 380236 - RNA, 19 nt, Artificial Sequence
  Description of Artificial Sequence: Synthetic oligonucleotide
ccaucucgguaacagcaac

SEQ ID NO: 380237 - RNA, 19 nt, Artificial Sequence
  Description of Artificial Sequence: Synthetic oligonucleotide
accgagggugcugugguuu

SEQ ID NO: 380238 - RNA, 19 nt, Artificial Sequence
  Description of Artificial Sequence: Synthetic oligonucleotide
gccgggaaccccgcgacgg

SEQ ID NO: 380239 - RNA, 19 nt, Artificial Sequence
  Description of Artificial Sequence: Synthetic oligonucleotide
guuucguguugaggaguac

SEQ ID NO: 380240 - RNA, 19 nt, Artificial Sequence
  Description of Artificial Sequence: Synthetic oligonucleotide
cgacgguugucucuguuac

SEQ ID NO: 380241 - RNA, 19 nt, Artificial Sequence
  Description of Artificial Sequence: Synthetic oligonucleotide
agucuguaccugacaggca

SEQ ID NO: 380242 - RNA, 19 nt, Artificial Sequence
  Description of Artificial Sequence: Synthetic oligonucleotide
ggauuagcuuuccgucuuc

SEQ ID NO: 380243 - RNA, 19 nt, Artificial Sequence
  Description of Artificial Sequence: Synthetic oligonucleotide
ggcguccuagacuccgaug

SEQ ID NO: 380244 - RNA, 19 nt, Artificial Sequence
  Description of Artificial Sequence: Synthetic oligonucleotide
agucggcgcacacgucgcu

SEQ ID NO: 380245 - RNA, 19 nt, Artificial Sequence
  Description of Artificial Sequence: Synthetic oligonucleotide
gcguagcaaacucgugggc

SEQ ID NO: 380246 - RNA, 19 nt, Artificial Sequence
  Description of Artificial Sequence: Synthetic oligonucleotide
cacgaggcgcuccgccagc

SEQ ID NO: 380247 - RNA, 19 nt, Artificial Sequence
  Description of Artificial Sequence: Synthetic oligonucleotide
gcauaaucaacaggagucu

SEQ ID NO: 380248 - RNA, 19 nt, Artificial Sequence
  Description of Artificial Sequence: Synthetic oligonucleotide
cagggcgguuagcuucccc

SEQ ID NO: 380249 - RNA, 19 nt, Artificial Sequence
  Description of Artificial Sequence: Synthetic oligonucleotide
ugccgccccuuccgguuug

SEQ ID NO: 380250 - RNA, 19 nt, Artificial Sequence
  Description of Artificial Sequence: Synthetic oligonucleotide
auacuccuuugccgccccu

SEQ ID NO: 380251 - RNA, 19 nt, Artificial Sequence
  Description of Artificial Sequence: Synthetic oligonucleotide
ccuuuuaaacacauccgau

SEQ ID NO: 380252 - RNA, 19 nt, Artificial Sequence
  Description of Artificial Sequence: Synthetic oligonucleotide
aggccaugguguguguuua

SEQ ID NO: 380253 - RNA, 19 nt, Artificial Sequence
  Description of Artificial Sequence: Synthetic oligonucleotide
cagguucccuguucucaca

SEQ ID NO: 380254 - RNA, 19 nt, Artificial Sequence
  Description of Artificial Sequence: Synthetic oligonucleotide
uugccgccccuuccgguuu

SEQ ID NO: 380255 - RNA, 19 nt, Artificial Sequence
  Description of Artificial Sequence: Synthetic oligonucleotide
ccuuugccgccccuuccgg

SEQ ID NO: 380256 - RNA, 19 nt, Artificial Sequence
  Description of Artificial Sequence: Synthetic oligonucleotide
ccagcguagcaaacucgug

SEQ ID NO: 380257 - RNA, 19 nt, Artificial Sequence
  Description of Artificial Sequence: Synthetic oligonucleotide
caccuugccacaccauacu

SEQ ID NO: 380258 - RNA, 19 nt, Artificial Sequence
  Description of Artificial Sequence: Synthetic oligonucleotide
gucgucacggcagggcaaa

SEQ ID NO: 380259 - RNA, 19 nt, Artificial Sequence
  Description of Artificial Sequence: Synthetic oligonucleotide
ucagggcgguuagcuuccc

SEQ ID NO: 380260 - RNA, 19 nt, Artificial Sequence
  Description of Artificial Sequence: Synthetic oligonucleotide
ggccggcgcuuuuaaagga

SEQ ID NO: 380261 - RNA, 19 nt, Artificial Sequence
  Description of Artificial Sequence: Synthetic oligonucleotide
gaucaugaccuaagcgcuu

SEQ ID NO: 380262 - RNA, 19 nt, Artificial Sequence
  Description of Artificial Sequence: Synthetic oligonucleotide
cgaucaugaccuaagcgcu

SEQ ID NO: 380263 - RNA, 19 nt, Artificial Sequence
  Description of Artificial Sequence: Synthetic oligonucleotide
ccacgaggcgcuccgccag

SEQ ID NO: 380264 - RNA, 19 nt, Artificial Sequence
  Description of Artificial Sequence: Synthetic oligonucleotide
gggaaccccgcgacggcag

SEQ ID NO: 380265 - RNA, 19 nt, Artificial Sequence
  Description of Artificial Sequence: Synthetic oligonucleotide
cucgaagugucuggguagu

SEQ ID NO: 380266 - RNA, 19 nt, Artificial Sequence
  Description of Artificial Sequence: Synthetic oligonucleotide
auggcguccuagacuccga

SEQ ID NO: 380267 - RNA, 19 nt, Artificial Sequence
  Description of Artificial Sequence: Synthetic oligonucleotide
aggauccggcccgcugcag

SEQ ID NO: 380268 - RNA, 19 nt, Artificial Sequence
  Description of Artificial Sequence: Synthetic oligonucleotide
caugaccuaagcgcuuggu

SEQ ID NO: 380269 - RNA, 19 nt, Artificial Sequence
  Description of Artificial Sequence: Synthetic oligonucleotide
gccggcgcuuuuaaaggac

SEQ ID NO: 380270 - RNA, 19 nt, Artificial Sequence
  Description of Artificial Sequence: Synthetic oligonucleotide
gacgacgguugucucuguu

SEQ ID NO: 380271 - RNA, 19 nt, Artificial Sequence
  Description of Artificial Sequence: Synthetic oligonucleotide
ggaaggguugaagucucgu

SEQ ID NO: 380272 - RNA, 19 nt, Artificial Sequence
  Description of Artificial Sequence: Synthetic oligonucleotide
cgucacggcagggcaaacg

SEQ ID NO: 380273 - RNA, 19 nt, Artificial Sequence
  Description of Artificial Sequence: Synthetic oligonucleotide
cuguuaccgagggugcugu

SEQ ID NO: 380274 - RNA, 19 nt, Artificial Sequence
  Description of Artificial Sequence: Synthetic oligonucleotide
ucgucacggcagggcaaac

SEQ ID NO: 380275 - RNA, 19 nt, Artificial Sequence
  Description of Artificial Sequence: Synthetic oligonucleotide
acgaggcgcuccgccagcu

SEQ ID NO: 380276 - RNA, 19 nt, Artificial Sequence
  Description of Artificial Sequence: Synthetic oligonucleotide
cggagccgcuucgacaugg

SEQ ID NO: 380277 - RNA, 19 nt, Artificial Sequence
  Description of Artificial Sequence: Synthetic oligonucleotide
cgaagugucuggguaguca

SEQ ID NO: 380278 - RNA, 19 nt, Artificial Sequence
  Description of Artificial Sequence: Synthetic oligonucleotide
cagucagcucguacuguau

SEQ ID NO: 380279 - RNA, 19 nt, Artificial Sequence
  Description of Artificial Sequence: Synthetic oligonucleotide
ggggacgacgguugucucu

SEQ ID NO: 380280 - RNA, 19 nt, Artificial Sequence
  Description of Artificial Sequence: Synthetic oligonucleotide
cccuuccgguuugacacug

SEQ ID NO: 380281 - RNA, 19 nt, Artificial Sequence
  Description of Artificial Sequence: Synthetic oligonucleotide
cucuguuaccgagggugcu

SEQ ID NO: 380282 - RNA, 19 nt, Artificial Sequence
  Description of Artificial Sequence: Synthetic oligonucleotide
ggaaccccgcgacggcaga

SEQ ID NO: 380283 - RNA, 19 nt, Artificial Sequence
  Description of Artificial Sequence: Synthetic oligonucleotide
ggauccggcccgcugcagu

SEQ ID NO: 380284 - RNA, 19 nt, Artificial Sequence
  Description of Artificial Sequence: Synthetic oligonucleotide
cagauggccggcgcuuuua

SEQ ID NO: 380285 - RNA, 19 nt, Artificial Sequence
  Description of Artificial Sequence: Synthetic oligonucleotide
gccaugggcagagaguuuu

SEQ ID NO: 380286 - RNA, 19 nt, Artificial Sequence
  Description of Artificial Sequence: Synthetic oligonucleotide
cacauccgaucaugaccua

SEQ ID NO: 380287 - RNA, 19 nt, Artificial Sequence
  Description of Artificial Sequence: Synthetic oligonucleotide
acgcgggguccagcaaaga

SEQ ID NO: 380288 - RNA, 19 nt, Artificial Sequence
  Description of Artificial Sequence: Synthetic oligonucleotide
gcgggguccagcaaagaau

SEQ ID NO: 380289 - RNA, 19 nt, Artificial Sequence
  Description of Artificial Sequence: Synthetic oligonucleotide
cccauagggagguacgguu

SEQ ID NO: 380290 - RNA, 19 nt, Artificial Sequence
  Description of Artificial Sequence: Synthetic oligonucleotide
ccuaagcgcuuggugacaa

SEQ ID NO: 380291 - RNA, 19 nt, Artificial Sequence
  Description of Artificial Sequence: Synthetic oligonucleotide
ccgguaggcacuggacguc

SEQ ID NO: 380292 - RNA, 19 nt, Artificial Sequence
  Description of Artificial Sequence: Synthetic oligonucleotide
ccauagggagguacgguuu

SEQ ID NO: 380293 - RNA, 19 nt, Artificial Sequence
  Description of Artificial Sequence: Synthetic oligonucleotide
gcguggcaagccagacugc

SEQ ID NO: 380294 - RNA, 19 nt, Artificial Sequence
  Description of Artificial Sequence: Synthetic oligonucleotide
cggcgcuuuuaaaggacga

SEQ ID NO: 380295 - RNA, 19 nt, Artificial Sequence
  Description of Artificial Sequence: Synthetic oligonucleotide
cgcgggguccagcaaagaa

SEQ ID NO: 380296 - RNA, 19 nt, Artificial Sequence
  Description of Artificial Sequence: Synthetic oligonucleotide
cgucaguaaccggagggaa

SEQ ID NO: 380297 - RNA, 19 nt, Artificial Sequence
  Description of Artificial Sequence: Synthetic oligonucleotide
ccgugucagacuuggguuu

SEQ ID NO: 380298 - RNA, 19 nt, Artificial Sequence
  Description of Artificial Sequence: Synthetic oligonucleotide
cgucgucacggcagggcaa

SEQ ID NO: 380299 - RNA, 19 nt, Artificial Sequence
  Description of Artificial Sequence: Synthetic oligonucleotide
ccggagccgcuucgacaug

SEQ ID NO: 380300 - RNA, 19 nt, Artificial Sequence
  Description of Artificial Sequence: Synthetic oligonucleotide
cguccuagacuccgaugua

SEQ ID NO: 380301 - RNA, 19 nt, Artificial Sequence
  Description of Artificial Sequence: Synthetic oligonucleotide
ccgcuucgacauggcuccc

SEQ ID NO: 380302 - RNA, 19 nt, Artificial Sequence
  Description of Artificial Sequence: Synthetic oligonucleotide
cgaguggcucgaagugucu

SEQ ID NO: 380303 - RNA, 19 nt, Artificial Sequence
  Description of Artificial Sequence: Synthetic oligonucleotide
ccccuuccgguuugacacu

SEQ ID NO: 380304 - RNA, 19 nt, Artificial Sequence
  Description of Artificial Sequence: Synthetic oligonucleotide
cgggaaccccgcgacggca

SEQ ID NO: 380305 - RNA, 19 nt, Artificial Sequence
  Description of Artificial Sequence: Synthetic oligonucleotide
gccgccccuuccgguuuga

SEQ ID NO: 380306 - RNA, 19 nt, Artificial Sequence
  Description of Artificial Sequence: Synthetic oligonucleotide
ugagcuguuaacaacaugg

SEQ ID NO: 380307 - RNA, 19 nt, Artificial Sequence
  Description of Artificial Sequence: Synthetic oligonucleotide
acuguugacaggcagagcc

SEQ ID NO: 380308 - RNA, 19 nt, Artificial Sequence
  Description of Artificial Sequence: Synthetic oligonucleotide
uaauuuauagaauauccag

SEQ ID NO: 380309 - RNA, 19 nt, Artificial Sequence
  Description of Artificial Sequence: Synthetic oligonucleotide
uacacuauugcucauucgg

SEQ ID NO: 380310 - RNA, 19 nt, Artificial Sequence
  Description of Artificial Sequence: Synthetic oligonucleotide
uuauagucgaacuggagag

SEQ ID NO: 380311 - RNA, 19 nt, Artificial Sequence
  Description of Artificial Sequence: Synthetic oligonucleotide
gacuagacagaucauagag

SEQ ID NO: 380312 - RNA, 19 nt, Artificial Sequence
  Description of Artificial Sequence: Synthetic oligonucleotide
uugcuauagagguagaaag

SEQ ID NO: 380313 - RNA, 19 nt, Artificial Sequence
  Description of Artificial Sequence: Synthetic oligonucleotide
aacaccccuagcuauaguc

SEQ ID NO: 380314 - RNA, 19 nt, Artificial Sequence
  Description of Artificial Sequence: Synthetic oligonucleotide
aucgcuaggagaaacagcc

SEQ ID NO: 380315 - RNA, 19 nt, Artificial Sequence
  Description of Artificial Sequence: Synthetic oligonucleotide
aauaucuaucaagugggac

SEQ ID NO: 380316 - RNA, 19 nt, Artificial Sequence
  Description of Artificial Sequence: Synthetic oligonucleotide
uguacguucgccccgcucg

SEQ ID NO: 380317 - RNA, 19 nt, Artificial Sequence
  Description of Artificial Sequence: Synthetic oligonucleotide
aacuugucuaucccuugcc

SEQ ID NO: 380318 - RNA, 19 nt, Artificial Sequence
  Description of Artificial Sequence: Synthetic oligonucleotide
gaaacugugcuaauguggg

SEQ ID NO: 380319 - RNA, 19 nt, Artificial Sequence
  Description of Artificial Sequence: Synthetic oligonucleotide
auaucuaucaagugggacu

SEQ ID NO: 380320 - RNA, 19 nt, Artificial Sequence
  Description of Artificial Sequence: Synthetic oligonucleotide
gacccugaauccuugaagg

SEQ ID NO: 380321 - RNA, 19 nt, Artificial Sequence
  Description of Artificial Sequence: Synthetic oligonucleotide
uuuugcacagucaagccac

SEQ ID NO: 380322 - RNA, 19 nt, Artificial Sequence
  Description of Artificial Sequence: Synthetic oligonucleotide
ucgguuucaagagucaucg

SEQ ID NO: 380323 - RNA, 19 nt, Artificial Sequence
  Description of Artificial Sequence: Synthetic oligonucleotide
agcucauccaaauaaauau

SEQ ID NO: 380324 - RNA, 19 nt, Artificial Sequence
  Description of Artificial Sequence: Synthetic oligonucleotide
ugcucauucgguuucaaga

SEQ ID NO: 380325 - RNA, 19 nt, Artificial Sequence
  Description of Artificial Sequence: Synthetic oligonucleotide
gagcuauuuucccugaugc

SEQ ID NO: 380326 - RNA, 19 nt, Artificial Sequence
  Description of Artificial Sequence: Synthetic oligonucleotide
ucguccuguacccacaugc

SEQ ID NO: 380327 - RNA, 19 nt, Artificial Sequence
  Description of Artificial Sequence: Synthetic oligonucleotide
agccguuuccuuuuauugc

SEQ ID NO: 380328 - RNA, 19 nt, Artificial Sequence
  Description of Artificial Sequence: Synthetic oligonucleotide
ucacacguagaaaagcuac

SEQ ID NO: 380329 - RNA, 19 nt, Artificial Sequence
  Description of Artificial Sequence: Synthetic oligonucleotide
aaacugugcuaaugugggc

SEQ ID NO: 380330 - RNA, 19 nt, Artificial Sequence
  Description of Artificial Sequence: Synthetic oligonucleotide
ugggacuucacuccaucgg

SEQ ID NO: 380331 - RNA, 19 nt, Artificial Sequence
  Description of Artificial Sequence: Synthetic oligonucleotide
agccguaacuugucuaucc

SEQ ID NO: 380332 - RNA, 19 nt, Artificial Sequence
  Description of Artificial Sequence: Synthetic oligonucleotide
uaagaagugggugucaaac

SEQ ID NO: 380333 - RNA, 19 nt, Artificial Sequence
  Description of Artificial Sequence: Synthetic oligonucleotide
ugugcuuggggcaugguaa

SEQ ID NO: 380334 - RNA, 19 nt, Artificial Sequence
  Description of Artificial Sequence: Synthetic oligonucleotide
uuucaagagucaucgcuag

SEQ ID NO: 380335 - RNA, 19 nt, Artificial Sequence
  Description of Artificial Sequence: Synthetic oligonucleotide
ugacccugaauccuugaag

SEQ ID NO: 380336 - RNA, 19 nt, Artificial Sequence
  Description of Artificial Sequence: Synthetic oligonucleotide
agaacaggggcuuugguaa

SEQ ID NO: 380337 - RNA, 19 nt, Artificial Sequence
  Description of Artificial Sequence: Synthetic oligonucleotide
ugaaugaauagguguugag

SEQ ID NO: 380338 - RNA, 19 nt, Artificial Sequence
  Description of Artificial Sequence: Synthetic oligonucleotide
ugggaaacugugcuaaugu

SEQ ID NO: 380339 - RNA, 19 nt, Artificial Sequence
  Description of Artificial Sequence: Synthetic oligonucleotide
acguagaaaagcuacacua

SEQ ID NO: 380340 - RNA, 19 nt, Artificial Sequence
  Description of Artificial Sequence: Synthetic oligonucleotide
cuagcuauagucuguacca

SEQ ID NO: 380341 - RNA, 19 nt, Artificial Sequence
  Description of Artificial Sequence: Synthetic oligonucleotide
auagcugauacaggagugc

SEQ ID NO: 380342 - RNA, 19 nt, Artificial Sequence
  Description of Artificial Sequence: Synthetic oligonucleotide
ugaucagucugcagagccg

SEQ ID NO: 380343 - RNA, 19 nt, Artificial Sequence
  Description of Artificial Sequence: Synthetic oligonucleotide
ucauucgguuucaagaguc

SEQ ID NO: 380344 - RNA, 19 nt, Artificial Sequence
  Description of Artificial Sequence: Synthetic oligonucleotide
ugauacaggagugcuggcg

SEQ ID NO: 380345 - RNA, 19 nt, Artificial Sequence
  Description of Artificial Sequence: Synthetic oligonucleotide
uaucaagugggacuucacu

SEQ ID NO: 380346 - RNA, 19 nt, Artificial Sequence
  Description of Artificial Sequence: Synthetic oligonucleotide
uccaguauaaaagcagucu

SEQ ID NO: 380347 - RNA, 19 nt, Artificial Sequence
  Description of Artificial Sequence: Synthetic oligonucleotide
cugaucagucugcagagcc

SEQ ID NO: 380348 - RNA, 19 nt, Artificial Sequence
  Description of Artificial Sequence: Synthetic oligonucleotide
gcuguuaacaacauggaug

SEQ ID NO: 380349 - RNA, 19 nt, Artificial Sequence
  Description of Artificial Sequence: Synthetic oligonucleotide
ggguguuauauucaucugg

SEQ ID NO: 380350 - RNA, 19 nt, Artificial Sequence
  Description of Artificial Sequence: Synthetic oligonucleotide
ucuuguguacguucgcccc

SEQ ID NO: 380351 - RNA, 19 nt, Artificial Sequence
  Description of Artificial Sequence: Synthetic oligonucleotide
gaggguguuauauucaucu

SEQ ID NO: 380352 - RNA, 19 nt, Artificial Sequence
  Description of Artificial Sequence: Synthetic oligonucleotide
acacguagaaaagcuacac

SEQ ID NO: 380353 - RNA, 19 nt, Artificial Sequence
  Description of Artificial Sequence: Synthetic oligonucleotide
ucgauucaugguuugccag

SEQ ID NO: 380354 - RNA, 19 nt, Artificial Sequence
  Description of Artificial Sequence: Synthetic oligonucleotide
aaaacaccccuagcuauag

SEQ ID NO: 380355 - RNA, 19 nt, Artificial Sequence
  Description of Artificial Sequence: Synthetic oligonucleotide
uucuuguguacguucgccc

SEQ ID NO: 380356 - RNA, 19 nt, Artificial Sequence
  Description of Artificial Sequence: Synthetic oligonucleotide
caucuuugaggcauucccc

SEQ ID NO: 380357 - RNA, 19 nt, Artificial Sequence
  Description of Artificial Sequence: Synthetic oligonucleotide
uuugacuagacagaucaua

SEQ ID NO: 380358 - RNA, 19 nt, Artificial Sequence
  Description of Artificial Sequence: Synthetic oligonucleotide
augugggugugaugggugc

SEQ ID NO: 380359 - RNA, 19 nt, Artificial Sequence
  Description of Artificial Sequence: Synthetic oligonucleotide
uucaagagucaucgcuagg

SEQ ID NO: 380360 - RNA, 19 nt, Artificial Sequence
  Description of Artificial Sequence: Synthetic oligonucleotide
ugcuggacuccaaaacucc

SEQ ID NO: 380361 - RNA, 19 nt, Artificial Sequence
  Description of Artificial Sequence: Synthetic oligonucleotide
cucaccaaaacugaguuga

SEQ ID NO: 380362 - RNA, 19 nt, Artificial Sequence
  Description of Artificial Sequence: Synthetic oligonucleotide
uccuaaauucugcagucau

SEQ ID NO: 380363 - RNA, 19 nt, Artificial Sequence
  Description of Artificial Sequence: Synthetic oligonucleotide
ugcuaaugugggcagcagc

SEQ ID NO: 380364 - RNA, 19 nt, Artificial Sequence
  Description of Artificial Sequence: Synthetic oligonucleotide
acagccuuauagucgaacu

SEQ ID NO: 380365 - RNA, 19 nt, Artificial Sequence
  Description of Artificial Sequence: Synthetic oligonucleotide
cauagcugauacaggagug

SEQ ID NO: 380366 - RNA, 19 nt, Artificial Sequence
  Description of Artificial Sequence: Synthetic oligonucleotide
ucugaaugaauagguguug

SEQ ID NO: 380367 - RNA, 19 nt, Artificial Sequence
  Description of Artificial Sequence: Synthetic oligonucleotide
uccugugucgcucugcguc

SEQ ID NO: 380368 - RNA, 19 nt, Artificial Sequence
  Description of Artificial Sequence: Synthetic oligonucleotide
agugugugguccuuagucu

SEQ ID NO: 380369 - RNA, 19 nt, Artificial Sequence
  Description of Artificial Sequence: Synthetic oligonucleotide
aggcauuccgcuugagaac

SEQ ID NO: 380370 - RNA, 19 nt, Artificial Sequence
  Description of Artificial Sequence: Synthetic oligonucleotide
ucucgauucaugguuugcc

SEQ ID NO: 380371 - RNA, 19 nt, Artificial Sequence
  Description of Artificial Sequence: Synthetic oligonucleotide
ucuaucaagugggacuuca

SEQ ID NO: 380372 - RNA, 19 nt, Artificial Sequence
  Description of Artificial Sequence: Synthetic oligonucleotide
gagaacuucaaaggacugc

SEQ ID NO: 380373 - RNA, 19 nt, Artificial Sequence
  Description of Artificial Sequence: Synthetic oligonucleotide
gauguucgcuaguucuucc

SEQ ID NO: 380374 - RNA, 19 nt, Artificial Sequence
  Description of Artificial Sequence: Synthetic oligonucleotide
ugacuagacagaucauaga

SEQ ID NO: 380375 - RNA, 19 nt, Artificial Sequence
  Description of Artificial Sequence: Synthetic oligonucleotide
augaauagguguugagccu

SEQ ID NO: 380376 - RNA, 19 nt, Artificial Sequence
  Description of Artificial Sequence: Synthetic oligonucleotide
ugggccugagcugacaugc

SEQ ID NO: 380377 - RNA, 19 nt, Artificial Sequence
  Description of Artificial Sequence: Synthetic oligonucleotide
aggggcucguccuguaccc

SEQ ID NO: 380378 - RNA, 19 nt, Artificial Sequence
  Description of Artificial Sequence: Synthetic oligonucleotide
gagguaaagggguagauuu

SEQ ID NO: 380379 - RNA, 19 nt, Artificial Sequence
  Description of Artificial Sequence: Synthetic oligonucleotide
uaucccuugccacucucga

SEQ ID NO: 380380 - RNA, 19 nt, Artificial Sequence
  Description of Artificial Sequence: Synthetic oligonucleotide
ugugugguccuuagucuug

SEQ ID NO: 380381 - RNA, 19 nt, Artificial Sequence
  Description of Artificial Sequence: Synthetic oligonucleotide
uggugcuggacuccaaaac

SEQ ID NO: 380382 - RNA, 19 nt, Artificial Sequence
  Description of Artificial Sequence: Synthetic oligonucleotide
agucaucgcuaggagaaac

SEQ ID NO: 380383 - RNA, 19 nt, Artificial Sequence
  Description of Artificial Sequence: Synthetic oligonucleotide
agagucaucgcuaggagaa

SEQ ID NO: 380384 - RNA, 19 nt, Artificial Sequence
  Description of Artificial Sequence: Synthetic oligonucleotide
cucgcgcugagauacugcc

SEQ ID NO: 380385 - RNA, 19 nt, Artificial Sequence
  Description of Artificial Sequence: Synthetic oligonucleotide
uccgccaagagcucccuug

SEQ ID NO: 380386 - RNA, 19 nt, Artificial Sequence
  Description of Artificial Sequence: Synthetic oligonucleotide
cuugagguucugauccgcc

SEQ ID NO: 380387 - RNA, 19 nt, Artificial Sequence
  Description of Artificial Sequence: Synthetic oligonucleotide
acuauugcucauucgguuu

SEQ ID NO: 380388 - RNA, 19 nt, Artificial Sequence
  Description of Artificial Sequence: Synthetic oligonucleotide
cuuguguacguucgccccg

SEQ ID NO: 380389 - RNA, 19 nt, Artificial Sequence
  Description of Artificial Sequence: Synthetic oligonucleotide
uuugccagaaggucugaau

SEQ ID NO: 380390 - RNA, 19 nt, Artificial Sequence
  Description of Artificial Sequence: Synthetic oligonucleotide
aggccaagacugcuggacg

SEQ ID NO: 380391 - RNA, 19 nt, Artificial Sequence
  Description of Artificial Sequence: Synthetic oligonucleotide
guaacuugucuaucccuug

SEQ ID NO: 380392 - RNA, 19 nt, Artificial Sequence
  Description of Artificial Sequence: Synthetic oligonucleotide
agccgucucuuucucugcc

SEQ ID NO: 380393 - RNA, 19 nt, Artificial Sequence
  Description of Artificial Sequence: Synthetic oligonucleotide
uuggcgugguggcugguag

SEQ ID NO: 380394 - RNA, 19 nt, Artificial Sequence
  Description of Artificial Sequence: Synthetic oligonucleotide
agacugaucuacaaugacu

SEQ ID NO: 380395 - RNA, 19 nt, Artificial Sequence
  Description of Artificial Sequence: Synthetic oligonucleotide
uggucacacguagaaaagc

SEQ ID NO: 380396 - RNA, 19 nt, Artificial Sequence
  Description of Artificial Sequence: Synthetic oligonucleotide
ccuagcuauagucuguacc

SEQ ID NO: 380397 - RNA, 19 nt, Artificial Sequence
  Description of Artificial Sequence: Synthetic oligonucleotide
agggguagauuuccagauc

SEQ ID NO: 380398 - RNA, 19 nt, Artificial Sequence
  Description of Artificial Sequence: Synthetic oligonucleotide
gggacuucacuccaucggg

SEQ ID NO: 380399 - RNA, 19 nt, Artificial Sequence
  Description of Artificial Sequence: Synthetic oligonucleotide
ucacacaugccugucugug

SEQ ID NO: 380400 - RNA, 19 nt, Artificial Sequence
  Description of Artificial Sequence: Synthetic oligonucleotide
aagugggugucaaacuuca

SEQ ID NO: 380401 - RNA, 19 nt, Artificial Sequence
  Description of Artificial Sequence: Synthetic oligonucleotide
agcaauucugcagaaugga

SEQ ID NO: 380402 - RNA, 19 nt, Artificial Sequence
  Description of Artificial Sequence: Synthetic oligonucleotide
agucgaacuggagagguga

SEQ ID NO: 380403 - RNA, 19 nt, Artificial Sequence
  Description of Artificial Sequence: Synthetic oligonucleotide
agcuauagucuguaccagu

SEQ ID NO: 380404 - RNA, 19 nt, Artificial Sequence
  Description of Artificial Sequence: Synthetic oligonucleotide
uugagguucugauccgcca

SEQ ID NO: 380405 - RNA, 19 nt, Artificial Sequence
  Description of Artificial Sequence: Synthetic oligonucleotide
guuaacaacauggaugagu

SEQ ID NO: 380406 - RNA, 19 nt, Artificial Sequence
  Description of Artificial Sequence: Synthetic oligonucleotide
acguucgccccgcucgucc

SEQ ID NO: 380407 - RNA, 19 nt, Artificial Sequence
  Description of Artificial Sequence: Synthetic oligonucleotide
ugauccgccaagagcuccc

SEQ ID NO: 380408 - RNA, 19 nt, Artificial Sequence
  Description of Artificial Sequence: Synthetic oligonucleotide
augguaacagcgucugggu

SEQ ID NO: 380409 - RNA, 19 nt, Artificial Sequence
  Description of Artificial Sequence: Synthetic oligonucleotide
ccaagagucgaucagcaac

SEQ ID NO: 380410 - RNA, 19 nt, Artificial Sequence
  Description of Artificial Sequence: Synthetic oligonucleotide
uugggaaaugauguucgcu

SEQ ID NO: 380411 - RNA, 19 nt, Artificial Sequence
  Description of Artificial Sequence: Synthetic oligonucleotide
agucaagccaccacuguug

SEQ ID NO: 380412 - RNA, 19 nt, Artificial Sequence
  Description of Artificial Sequence: Synthetic oligonucleotide
aggugccugccuuuugcac

SEQ ID NO: 380413 - RNA, 19 nt, Artificial Sequence
  Description of Artificial Sequence: Synthetic oligonucleotide
auuuucccugaugccagac

SEQ ID NO: 380414 - RNA, 19 nt, Artificial Sequence
  Description of Artificial Sequence: Synthetic oligonucleotide
caugugggugugaugggug

SEQ ID NO: 380415 - RNA, 19 nt, Artificial Sequence
  Description of Artificial Sequence: Synthetic oligonucleotide
aggguguuauauucaucug

SEQ ID NO: 380416 - RNA, 19 nt, Artificial Sequence
  Description of Artificial Sequence: Synthetic oligonucleotide
uuuugacuagacagaucau

SEQ ID NO: 380417 - RNA, 19 nt, Artificial Sequence
  Description of Artificial Sequence: Synthetic oligonucleotide
aagggacucuggcucucag

SEQ ID NO: 380418 - RNA, 19 nt, Artificial Sequence
  Description of Artificial Sequence: Synthetic oligonucleotide
gcuaaugugggcagcagcc

SEQ ID NO: 380419 - RNA, 19 nt, Artificial Sequence
  Description of Artificial Sequence: Synthetic oligonucleotide
uccgguugaagggaggggu

SEQ ID NO: 380420 - RNA, 19 nt, Artificial Sequence
  Description of Artificial Sequence: Synthetic oligonucleotide
guugggaaaugauguucgc

SEQ ID NO: 380421 - RNA, 19 nt, Artificial Sequence
  Description of Artificial Sequence: Synthetic oligonucleotide
uagcuauagucuguaccag

SEQ ID NO: 380422 - RNA, 19 nt, Artificial Sequence
  Description of Artificial Sequence: Synthetic oligonucleotide
accgacugcuuuucacagg

SEQ ID NO: 380423 - RNA, 19 nt, Artificial Sequence
  Description of Artificial Sequence: Synthetic oligonucleotide
ugaguugggaaaugauguu

SEQ ID NO: 380424 - RNA, 19 nt, Artificial Sequence
  Description of Artificial Sequence: Synthetic oligonucleotide
ugcgcggucgcggacaccc

SEQ ID NO: 380425 - RNA, 19 nt, Artificial Sequence
  Description of Artificial Sequence: Synthetic oligonucleotide
ugcguccucgcgcugagau

SEQ ID NO: 380426 - RNA, 19 nt, Artificial Sequence
  Description of Artificial Sequence: Synthetic oligonucleotide
aaaacugaguugagcacua

SEQ ID NO: 380427 - RNA, 19 nt, Artificial Sequence
  Description of Artificial Sequence: Synthetic oligonucleotide
uugguaagaaguggguguc

SEQ ID NO: 380428 - RNA, 19 nt, Artificial Sequence
  Description of Artificial Sequence: Synthetic oligonucleotide
uauugcaugugggugugau

SEQ ID NO: 380429 - RNA, 19 nt, Artificial Sequence
  Description of Artificial Sequence: Synthetic oligonucleotide
cagccuuauagucgaacug

SEQ ID NO: 380430 - RNA, 19 nt, Artificial Sequence
  Description of Artificial Sequence: Synthetic oligonucleotide
caccgacugcuuuucacag

SEQ ID NO: 380431 - RNA, 19 nt, Artificial Sequence
  Description of Artificial Sequence: Synthetic oligonucleotide
gguguuauauucaucugga

SEQ ID NO: 380432 - RNA, 19 nt, Artificial Sequence
  Description of Artificial Sequence: Synthetic oligonucleotide
aaacuccguugugacaucu

SEQ ID NO: 380433 - RNA, 19 nt, Artificial Sequence
  Description of Artificial Sequence: Synthetic oligonucleotide
cuaucaagugggacuucac

SEQ ID NO: 380434 - RNA, 19 nt, Artificial Sequence
  Description of Artificial Sequence: Synthetic oligonucleotide
ugauguucgcuaguucuuc

SEQ ID NO: 380435 - RNA, 19 nt, Artificial Sequence
  Description of Artificial Sequence: Synthetic oligonucleotide
uuccuaaauucugcaguca

SEQ ID NO: 380436 - RNA, 19 nt, Artificial Sequence
  Description of Artificial Sequence: Synthetic oligonucleotide
guguuauauucaucuggac

SEQ ID NO: 380437 - RNA, 19 nt, Artificial Sequence
  Description of Artificial Sequence: Synthetic oligonucleotide
ccugaauccuugaaggcug

SEQ ID NO: 380438 - RNA, 19 nt, Artificial Sequence
  Description of Artificial Sequence: Synthetic oligonucleotide
auguucgcuaguucuuccu

SEQ ID NO: 380439 - RNA, 19 nt, Artificial Sequence
  Description of Artificial Sequence: Synthetic oligonucleotide
gguuucaagagucaucgcu

SEQ ID NO: 380440 - RNA, 19 nt, Artificial Sequence
  Description of Artificial Sequence: Synthetic oligonucleotide
gccuuuugcacagucaagc

SEQ ID NO: 380441 - RNA, 19 nt, Artificial Sequence
  Description of Artificial Sequence: Synthetic oligonucleotide
ucagccguuuccuuuuauu

SEQ ID NO: 380442 - RNA, 19 nt, Artificial Sequence
  Description of Artificial Sequence: Synthetic oligonucleotide
gccgcuuccgguugaaggg

SEQ ID NO: 380443 - RNA, 19 nt, Artificial Sequence
  Description of Artificial Sequence: Synthetic oligonucleotide
gacugaucuacaaugacuu

SEQ ID NO: 380444 - RNA, 19 nt, Artificial Sequence
  Description of Artificial Sequence: Synthetic oligonucleotide
uagucgaacuggagaggug

SEQ ID NO: 380445 - RNA, 19 nt, Artificial Sequence
  Description of Artificial Sequence: Synthetic oligonucleotide
aaacaccccuagcuauagu

SEQ ID NO: 380446 - RNA, 19 nt, Artificial Sequence
  Description of Artificial Sequence: Synthetic oligonucleotide
cagaagaagucugcagccc

SEQ ID NO: 380447 - RNA, 19 nt, Artificial Sequence
  Description of Artificial Sequence: Synthetic oligonucleotide
uggacgcugucuucuuuug

SEQ ID NO: 380448 - RNA, 19 nt, Artificial Sequence
  Description of Artificial Sequence: Synthetic oligonucleotide
gcuggaggguguuauauuc

SEQ ID NO: 380449 - RNA, 19 nt, Artificial Sequence
  Description of Artificial Sequence: Synthetic oligonucleotide
ugagguaaagggguagauu

SEQ ID NO: 380450 - RNA, 19 nt, Artificial Sequence
  Description of Artificial Sequence: Synthetic oligonucleotide
ucgaacuggagaggugacc

SEQ ID NO: 380451 - RNA, 19 nt, Artificial Sequence
  Description of Artificial Sequence: Synthetic oligonucleotide
uugagcacuauggccuuca

SEQ ID NO: 380452 - RNA, 19 nt, Artificial Sequence
  Description of Artificial Sequence: Synthetic oligonucleotide
guuucaagagucaucgcua

SEQ ID NO: 380453 - RNA, 19 nt, Artificial Sequence
  Description of Artificial Sequence: Synthetic oligonucleotide
auagucuguaccagugugu

SEQ ID NO: 380454 - RNA, 19 nt, Artificial Sequence
  Description of Artificial Sequence: Synthetic oligonucleotide
gggaaacugugcuaaugug

SEQ ID NO: 380455 - RNA, 19 nt, Artificial Sequence
  Description of Artificial Sequence: Synthetic oligonucleotide
uguuaacaacauggaugag

SEQ ID NO: 380456 - RNA, 19 nt, Artificial Sequence
  Description of Artificial Sequence: Synthetic oligonucleotide
uucgcuaguucuuccugua

SEQ ID NO: 380457 - RNA, 19 nt, Artificial Sequence
  Description of Artificial Sequence: Synthetic oligonucleotide
agucuuuaaaagggacucu

SEQ ID NO: 380458 - RNA, 19 nt, Artificial Sequence
  Description of Artificial Sequence: Synthetic oligonucleotide
aggauacucuugucugucu

SEQ ID NO: 380459 - RNA, 19 nt, Artificial Sequence
  Description of Artificial Sequence: Synthetic oligonucleotide
ucgcggacacccuucucgc

SEQ ID NO: 380460 - RNA, 19 nt, Artificial Sequence
  Description of Artificial Sequence: Synthetic oligonucleotide
gcuaggagaaacagccacg

SEQ ID NO: 380461 - RNA, 19 nt, Artificial Sequence
  Description of Artificial Sequence: Synthetic oligonucleotide
acauauccuccugagguaa

SEQ ID NO: 380462 - RNA, 19 nt, Artificial Sequence
  Description of Artificial Sequence: Synthetic oligonucleotide
gacauauccuccugaggua

SEQ ID NO: 380463 - RNA, 19 nt, Artificial Sequence
  Description of Artificial Sequence: Synthetic oligonucleotide
auagaggccaagacugcug

SEQ ID NO: 380464 - RNA, 19 nt, Artificial Sequence
  Description of Artificial Sequence: Synthetic oligonucleotide
uuccgguugaagggagggg

SEQ ID NO: 380465 - RNA, 19 nt, Artificial Sequence
  Description of Artificial Sequence: Synthetic oligonucleotide
gauucaugguuugccagaa

SEQ ID NO: 380466 - RNA, 19 nt, Artificial Sequence
  Description of Artificial Sequence: Synthetic oligonucleotide
uauugcucauucgguuuca

SEQ ID NO: 380467 - RNA, 19 nt, Artificial Sequence
  Description of Artificial Sequence: Synthetic oligonucleotide
gguucugauccgccaagag

SEQ ID NO: 380468 - RNA, 19 nt, Artificial Sequence
  Description of Artificial Sequence: Synthetic oligonucleotide
cugggaaacugugcuaaug

SEQ ID NO: 380469 - RNA, 19 nt, Artificial Sequence
  Description of Artificial Sequence: Synthetic oligonucleotide
cacacguagaaaagcuaca

SEQ ID NO: 380470 - RNA, 19 nt, Artificial Sequence
  Description of Artificial Sequence: Synthetic oligonucleotide
ucgcuaggagaaacagcca

SEQ ID NO: 380471 - RNA, 19 nt, Artificial Sequence
  Description of Artificial Sequence: Synthetic oligonucleotide
gcuaguucuuccuguagca

SEQ ID NO: 380472 - RNA, 19 nt, Artificial Sequence
  Description of Artificial Sequence: Synthetic oligonucleotide
agccucaaggacagagugg

SEQ ID NO: 380473 - RNA, 19 nt, Artificial Sequence
  Description of Artificial Sequence: Synthetic oligonucleotide
guacuuguccagccguaac

SEQ ID NO: 380474 - RNA, 19 nt, Artificial Sequence
  Description of Artificial Sequence: Synthetic oligonucleotide
uccucuguugucagugguu

SEQ ID NO: 380475 - RNA, 19 nt, Artificial Sequence
  Description of Artificial Sequence: Synthetic oligonucleotide
uuuucugggcucggacacc

SEQ ID NO: 380476 - RNA, 19 nt, Artificial Sequence
  Description of Artificial Sequence: Synthetic oligonucleotide
agccccgaguuuccguuuc

SEQ ID NO: 380477 - RNA, 19 nt, Artificial Sequence
  Description of Artificial Sequence: Synthetic oligonucleotide
gagcuguuaacaacaugga

SEQ ID NO: 380478 - RNA, 19 nt, Artificial Sequence
  Description of Artificial Sequence: Synthetic oligonucleotide
cugaaugaauagguguuga

SEQ ID NO: 380479 - RNA, 19 nt, Artificial Sequence
  Description of Artificial Sequence: Synthetic oligonucleotide
uagcuucauagcugauaca

SEQ ID NO: 380480 - RNA, 19 nt, Artificial Sequence
  Description of Artificial Sequence: Synthetic oligonucleotide
uccagccguaacuugucua

SEQ ID NO: 380481 - RNA, 19 nt, Artificial Sequence
  Description of Artificial Sequence: Synthetic oligonucleotide
uuguguacguucgccccgc

SEQ ID NO: 380482 - RNA, 19 nt, Artificial Sequence
  Description of Artificial Sequence: Synthetic oligonucleotide
cauucgguuucaagaguca

SEQ ID NO: 380483 - RNA, 19 nt, Artificial Sequence
  Description of Artificial Sequence: Synthetic oligonucleotide
gaaaugauguucgcuaguu

SEQ ID NO: 380484 - RNA, 19 nt, Artificial Sequence
  Description of Artificial Sequence: Synthetic oligonucleotide
ggcucagagcuauuuuccc

SEQ ID NO: 380485 - RNA, 19 nt, Artificial Sequence
  Description of Artificial Sequence: Synthetic oligonucleotide
gccaacaacuccaucuuug

SEQ ID NO: 380486 - RNA, 19 nt, Artificial Sequence
  Description of Artificial Sequence: Synthetic oligonucleotide
cucucgauucaugguuugc

SEQ ID NO: 380487 - RNA, 19 nt, Artificial Sequence
  Description of Artificial Sequence: Synthetic oligonucleotide
agagccccgaguuuccguu

SEQ ID NO: 380488 - RNA, 19 nt, Artificial Sequence
  Description of Artificial Sequence: Synthetic oligonucleotide
ucucaccgacugcuuuuca

SEQ ID NO: 380489 - RNA, 19 nt, Artificial Sequence
  Description of Artificial Sequence: Synthetic oligonucleotide
cugauccgccaagagcucc

SEQ ID NO: 380490 - RNA, 19 nt, Artificial Sequence
  Description of Artificial Sequence: Synthetic oligonucleotide
aacuccguugugacaucug

SEQ ID NO: 380491 - RNA, 19 nt, Artificial Sequence
  Description of Artificial Sequence: Synthetic oligonucleotide
gcugagauacugccgcagc

SEQ ID NO: 380492 - RNA, 19 nt, Artificial Sequence
  Description of Artificial Sequence: Synthetic oligonucleotide
ggcuauuuccaagagucga

SEQ ID NO: 380493 - RNA, 19 nt, Artificial Sequence
  Description of Artificial Sequence: Synthetic oligonucleotide
acaccccuagcuauagucu

SEQ ID NO: 380494 - RNA, 19 nt, Artificial Sequence
  Description of Artificial Sequence: Synthetic oligonucleotide
uggagaggugacccugaau

SEQ ID NO: 380495 - RNA, 19 nt, Artificial Sequence
  Description of Artificial Sequence: Synthetic oligonucleotide
gccguaacuugucuauccc

SEQ ID NO: 380496 - RNA, 19 nt, Artificial Sequence
  Description of Artificial Sequence: Synthetic oligonucleotide
caagugggacuucacucca

SEQ ID NO: 380497 - RNA, 19 nt, Artificial Sequence
  Description of Artificial Sequence: Synthetic oligonucleotide
ggccaagacugcuggacgc

SEQ ID NO: 380498 - RNA, 19 nt, Artificial Sequence
  Description of Artificial Sequence: Synthetic oligonucleotide
ggugcuggacuccaaaacu

SEQ ID NO: 380499 - RNA, 19 nt, Artificial Sequence
  Description of Artificial Sequence: Synthetic oligonucleotide
uucucaccgacugcuuuuc

SEQ ID NO: 380500 - RNA, 19 nt, Artificial Sequence
  Description of Artificial Sequence: Synthetic oligonucleotide
ggcaugguaacagcgucug

SEQ ID NO: 380501 - RNA, 19 nt, Artificial Sequence
  Description of Artificial Sequence: Synthetic oligonucleotide
aagcuacacuauugcucau

SEQ ID NO: 380502 - RNA, 19 nt, Artificial Sequence
  Description of Artificial Sequence: Synthetic oligonucleotide
gugcuuggggcaugguaac

SEQ ID NO: 380503 - RNA, 19 nt, Artificial Sequence
  Description of Artificial Sequence: Synthetic oligonucleotide
aucuaucaagugggacuuc

SEQ ID NO: 380504 - RNA, 19 nt, Artificial Sequence
  Description of Artificial Sequence: Synthetic oligonucleotide
auggaucaauuaacuugag

SEQ ID NO: 380505 - RNA, 19 nt, Artificial Sequence
  Description of Artificial Sequence: Synthetic oligonucleotide
agcuggaggguguuauauu

SEQ ID NO: 380506 - RNA, 19 nt, Artificial Sequence
  Description of Artificial Sequence: Synthetic oligonucleotide
cauuccgcuugagaacuuc

SEQ ID NO: 380507 - RNA, 19 nt, Artificial Sequence
  Description of Artificial Sequence: Synthetic oligonucleotide
uggcgugguggcugguagc

SEQ ID NO: 380508 - RNA, 19 nt, Artificial Sequence
  Description of Artificial Sequence: Synthetic oligonucleotide
gucaucgcuaggagaaaca

SEQ ID NO: 380509 - RNA, 19 nt, Artificial Sequence
  Description of Artificial Sequence: Synthetic oligonucleotide
aaccuccugugucgcucug

SEQ ID NO: 380510 - RNA, 19 nt, Artificial Sequence
  Description of Artificial Sequence: Synthetic oligonucleotide
auuccgcuugagaacuuca

SEQ ID NO: 380511 - RNA, 19 nt, Artificial Sequence
  Description of Artificial Sequence: Synthetic oligonucleotide
uccucgcgcugagauacug

SEQ ID NO: 380512 - RNA, 19 nt, Artificial Sequence
  Description of Artificial Sequence: Synthetic oligonucleotide
aaacugaguugagcacuau

SEQ ID NO: 380513 - RNA, 19 nt, Artificial Sequence
  Description of Artificial Sequence: Synthetic oligonucleotide
agaaugggccugagcugac

SEQ ID NO: 380514 - RNA, 19 nt, Artificial Sequence
  Description of Artificial Sequence: Synthetic oligonucleotide
cugcuggucacacguagaa

SEQ ID NO: 380515 - RNA, 19 nt, Artificial Sequence
  Description of Artificial Sequence: Synthetic oligonucleotide
guucgcuaguucuuccugu

SEQ ID NO: 380516 - RNA, 19 nt, Artificial Sequence
  Description of Artificial Sequence: Synthetic oligonucleotide
gugucgcucugcguccucg

SEQ ID NO: 380517 - RNA, 19 nt, Artificial Sequence
  Description of Artificial Sequence: Synthetic oligonucleotide
agcggaaagcucauccaaa

SEQ ID NO: 380518 - RNA, 19 nt, Artificial Sequence
  Description of Artificial Sequence: Synthetic oligonucleotide
cgcuaguucuuccuguagc

SEQ ID NO: 380519 - RNA, 19 nt, Artificial Sequence
  Description of Artificial Sequence: Synthetic oligonucleotide
gggaggggugcucuucaag

SEQ ID NO: 380520 - RNA, 19 nt, Artificial Sequence
  Description of Artificial Sequence: Synthetic oligonucleotide
uuauugcauguggguguga

SEQ ID NO: 380521 - RNA, 19 nt, Artificial Sequence
  Description of Artificial Sequence: Synthetic oligonucleotide
aucccuugccacucucgau

SEQ ID NO: 380522 - RNA, 19 nt, Artificial Sequence
  Description of Artificial Sequence: Synthetic oligonucleotide
cacguagaaaagcuacacu

SEQ ID NO: 380523 - RNA, 19 nt, Artificial Sequence
  Description of Artificial Sequence: Synthetic oligonucleotide
cuauagucuguaccagugu

SEQ ID NO: 380524 - RNA, 19 nt, Artificial Sequence
  Description of Artificial Sequence: Synthetic oligonucleotide
gcggacacccuucucgcug

SEQ ID NO: 380525 - RNA, 19 nt, Artificial Sequence
  Description of Artificial Sequence: Synthetic oligonucleotide
agcuacacuauugcucauu

SEQ ID NO: 380526 - RNA, 19 nt, Artificial Sequence
  Description of Artificial Sequence: Synthetic oligonucleotide
aucgggagacuggcucucg

SEQ ID NO: 380527 - RNA, 19 nt, Artificial Sequence
  Description of Artificial Sequence: Synthetic oligonucleotide
aggcccagucacacaugcc

SEQ ID NO: 380528 - RNA, 19 nt, Artificial Sequence
  Description of Artificial Sequence: Synthetic oligonucleotide
cagcggaaagcucauccaa

SEQ ID NO: 380529 - RNA, 19 nt, Artificial Sequence
  Description of Artificial Sequence: Synthetic oligonucleotide
cugugcuaaugugggcagc

SEQ ID NO: 380530 - RNA, 19 nt, Artificial Sequence
  Description of Artificial Sequence: Synthetic oligonucleotide
uuuggcgugguggcuggua

SEQ ID NO: 380531 - RNA, 19 nt, Artificial Sequence
  Description of Artificial Sequence: Synthetic oligonucleotide
gugcuaaugugggcagcag

SEQ ID NO: 380532 - RNA, 19 nt, Artificial Sequence
  Description of Artificial Sequence: Synthetic oligonucleotide
uguguacguucgccccgcu

SEQ ID NO: 380533 - RNA, 19 nt, Artificial Sequence
  Description of Artificial Sequence: Synthetic oligonucleotide
ucucagccguuuccuuuua

SEQ ID NO: 380534 - RNA, 19 nt, Artificial Sequence
  Description of Artificial Sequence: Synthetic oligonucleotide
ggcccuccugaaaagacac

SEQ ID NO: 380535 - RNA, 19 nt, Artificial Sequence
  Description of Artificial Sequence: Synthetic oligonucleotide
guacccacaugcaguagaa

SEQ ID NO: 380536 - RNA, 19 nt, Artificial Sequence
  Description of Artificial Sequence: Synthetic oligonucleotide
uuggggucuucagcacgcc

SEQ ID NO: 380537 - RNA, 19 nt, Artificial Sequence
  Description of Artificial Sequence: Synthetic oligonucleotide
caccccucaccuguccacc

SEQ ID NO: 380538 - RNA, 19 nt, Artificial Sequence
  Description of Artificial Sequence: Synthetic oligonucleotide
gucacacguagaaaagcua

SEQ ID NO: 380539 - RNA, 19 nt, Artificial Sequence
  Description of Artificial Sequence: Synthetic oligonucleotide
gcaugguaacagcgucugg

SEQ ID NO: 380540 - RNA, 19 nt, Artificial Sequence
  Description of Artificial Sequence: Synthetic oligonucleotide
ggucacacguagaaaagcu

SEQ ID NO: 380541 - RNA, 19 nt, Artificial Sequence
  Description of Artificial Sequence: Synthetic oligonucleotide
gaagaguccuuuccauauu

SEQ ID NO: 380542 - RNA, 19 nt, Artificial Sequence
  Description of Artificial Sequence: Synthetic oligonucleotide
cucacugcgcggucgcgga

SEQ ID NO: 380543 - RNA, 19 nt, Artificial Sequence
  Description of Artificial Sequence: Synthetic oligonucleotide
cacuauugcucauucgguu

SEQ ID NO: 380544 - RNA, 19 nt, Artificial Sequence
  Description of Artificial Sequence: Synthetic oligonucleotide
gaaugggccugagcugaca

SEQ ID NO: 380545 - RNA, 19 nt, Artificial Sequence
  Description of Artificial Sequence: Synthetic oligonucleotide
ggggucugccucugggcag

SEQ ID NO: 380546 - RNA, 19 nt, Artificial Sequence
  Description of Artificial Sequence: Synthetic oligonucleotide
auugcucauucgguuucaa

SEQ ID NO: 380547 - RNA, 19 nt, Artificial Sequence
  Description of Artificial Sequence: Synthetic oligonucleotide
ccgucucuuucucugccgc

SEQ ID NO: 380548 - RNA, 19 nt, Artificial Sequence
  Description of Artificial Sequence: Synthetic oligonucleotide
accccuagcuauagucugu

SEQ ID NO: 380549 - RNA, 19 nt, Artificial Sequence
  Description of Artificial Sequence: Synthetic oligonucleotide
ggcauuccgcuugagaacu

SEQ ID NO: 380550 - RNA, 19 nt, Artificial Sequence
  Description of Artificial Sequence: Synthetic oligonucleotide
gugugugguccuuagucuu

SEQ ID NO: 380551 - RNA, 19 nt, Artificial Sequence
  Description of Artificial Sequence: Synthetic oligonucleotide
guguacguucgccccgcuc

SEQ ID NO: 380552 - RNA, 19 nt, Artificial Sequence
  Description of Artificial Sequence: Synthetic oligonucleotide
guaacagcgucuggguccu

SEQ ID NO: 380553 - RNA, 19 nt, Artificial Sequence
  Description of Artificial Sequence: Synthetic oligonucleotide
cguccucgcgcugagauac

SEQ ID NO: 380554 - RNA, 19 nt, Artificial Sequence
  Description of Artificial Sequence: Synthetic oligonucleotide
caucgggagacuggcucuc

SEQ ID NO: 380555 - RNA, 19 nt, Artificial Sequence
  Description of Artificial Sequence: Synthetic oligonucleotide
gcagucuuuaaaagggacu

SEQ ID NO: 380556 - RNA, 19 nt, Artificial Sequence
  Description of Artificial Sequence: Synthetic oligonucleotide
uucgccccgcucguccucu

SEQ ID NO: 380557 - RNA, 19 nt, Artificial Sequence
  Description of Artificial Sequence: Synthetic oligonucleotide
ccucgcgcugagauacugc

SEQ ID NO: 380558 - RNA, 19 nt, Artificial Sequence
  Description of Artificial Sequence: Synthetic oligonucleotide
ccguugugacaucugcuuc

SEQ ID NO: 380559 - RNA, 19 nt, Artificial Sequence
  Description of Artificial Sequence: Synthetic oligonucleotide
cagccguaacuugucuauc

SEQ ID NO: 380560 - RNA, 19 nt, Artificial Sequence
  Description of Artificial Sequence: Synthetic oligonucleotide
ccgccaagagcucccuugc

SEQ ID NO: 380561 - RNA, 19 nt, Artificial Sequence
  Description of Artificial Sequence: Synthetic oligonucleotide
caagacugcuggacgcugu

SEQ ID NO: 380562 - RNA, 19 nt, Artificial Sequence
  Description of Artificial Sequence: Synthetic oligonucleotide
ggacuucacuccaucggga

SEQ ID NO: 380563 - RNA, 19 nt, Artificial Sequence
  Description of Artificial Sequence: Synthetic oligonucleotide
ccgguugaagggaggggug

SEQ ID NO: 380564 - RNA, 19 nt, Artificial Sequence
  Description of Artificial Sequence: Synthetic oligonucleotide
cggacacccuucucgcugg

SEQ ID NO: 380565 - RNA, 19 nt, Artificial Sequence
  Description of Artificial Sequence: Synthetic oligonucleotide
ggauacucuugucugucuu

SEQ ID NO: 380566 - RNA, 19 nt, Artificial Sequence
  Description of Artificial Sequence: Synthetic oligonucleotide
cagucaagccaccacuguu

SEQ ID NO: 380567 - RNA, 19 nt, Artificial Sequence
  Description of Artificial Sequence: Synthetic oligonucleotide
gcggaaagcucauccaaau

SEQ ID NO: 380568 - RNA, 19 nt, Artificial Sequence
  Description of Artificial Sequence: Synthetic oligonucleotide
gcuauuuccaagagucgau

SEQ ID NO: 380569 - RNA, 19 nt, Artificial Sequence
  Description of Artificial Sequence: Synthetic oligonucleotide
ccaagacugcuggacgcug

SEQ ID NO: 380570 - RNA, 19 nt, Artificial Sequence
  Description of Artificial Sequence: Synthetic oligonucleotide
uacguucgccccgcucguc

SEQ ID NO: 380571 - RNA, 19 nt, Artificial Sequence
  Description of Artificial Sequence: Synthetic oligonucleotide
cccuagcuauagucuguac

SEQ ID NO: 380572 - RNA, 19 nt, Artificial Sequence
  Description of Artificial Sequence: Synthetic oligonucleotide
guacguucgccccgcucgu

SEQ ID NO: 380573 - RNA, 19 nt, Artificial Sequence
  Description of Artificial Sequence: Synthetic oligonucleotide
cacugcgcggucgcggaca

SEQ ID NO: 380574 - RNA, 19 nt, Artificial Sequence
  Description of Artificial Sequence: Synthetic oligonucleotide
guucgccccgcucguccuc

SEQ ID NO: 380575 - RNA, 19 nt, Artificial Sequence
  Description of Artificial Sequence: Synthetic oligonucleotide
guugaggugccugccuuuu

SEQ ID NO: 380576 - RNA, 19 nt, Artificial Sequence
  Description of Artificial Sequence: Synthetic oligonucleotide
cuucccaggcauuccgcuu

SEQ ID NO: 380577 - RNA, 19 nt, Artificial Sequence
  Description of Artificial Sequence: Synthetic oligonucleotide
cagagccgcuuccgguuga

SEQ ID NO: 380578 - RNA, 19 nt, Artificial Sequence
  Description of Artificial Sequence: Synthetic oligonucleotide
gccccgaguuuccguuucc

SEQ ID NO: 380579 - RNA, 19 nt, Artificial Sequence
  Description of Artificial Sequence: Synthetic oligonucleotide
gggcucggacaccuucuga

SEQ ID NO: 380580 - RNA, 19 nt, Artificial Sequence
  Description of Artificial Sequence: Synthetic oligonucleotide
uguggaccuuuagguucuu

SEQ ID NO: 380581 - RNA, 19 nt, Artificial Sequence
  Description of Artificial Sequence: Synthetic oligonucleotide
cgguuucaagagucaucgc

SEQ ID NO: 380582 - RNA, 19 nt, Artificial Sequence
  Description of Artificial Sequence: Synthetic oligonucleotide
ggacgcugucuucuuuugu

SEQ ID NO: 380583 - RNA, 19 nt, Artificial Sequence
  Description of Artificial Sequence: Synthetic oligonucleotide
gauccgccaagagcucccu

SEQ ID NO: 380584 - RNA, 19 nt, Artificial Sequence
  Description of Artificial Sequence: Synthetic oligonucleotide
cccugaauccuugaaggcu

SEQ ID NO: 380585 - RNA, 19 nt, Artificial Sequence
  Description of Artificial Sequence: Synthetic oligonucleotide
ccguaacuugucuaucccu

SEQ ID NO: 380586 - RNA, 19 nt, Artificial Sequence
  Description of Artificial Sequence: Synthetic oligonucleotide
cguaacuugucuaucccuu

SEQ ID NO: 380587 - RNA, 19 nt, Artificial Sequence
  Description of Artificial Sequence: Synthetic oligonucleotide
ccaggauacucuugucugu

SEQ ID NO: 380588 - RNA, 19 nt, Artificial Sequence
  Description of Artificial Sequence: Synthetic oligonucleotide
gagcuuggaucugccuggu

SEQ ID NO: 380589 - RNA, 19 nt, Artificial Sequence
  Description of Artificial Sequence: Synthetic oligonucleotide
cgcugagauacugccgcag

SEQ ID NO: 380590 - RNA, 19 nt, Artificial Sequence
  Description of Artificial Sequence: Synthetic oligonucleotide
gccguggaguggccucugc

SEQ ID NO: 380591 - RNA, 19 nt, Artificial Sequence
  Description of Artificial Sequence: Synthetic oligonucleotide
gcgcugagauacugccgca

SEQ ID NO: 380592 - RNA, 19 nt, Artificial Sequence
  Description of Artificial Sequence: Synthetic oligonucleotide
ugccugccuuuugcacagu

SEQ ID NO: 380593 - RNA, 19 nt, Artificial Sequence
  Description of Artificial Sequence: Synthetic oligonucleotide
gggcaugguaacagcgucu

SEQ ID NO: 380594 - RNA, 19 nt, Artificial Sequence
  Description of Artificial Sequence: Synthetic oligonucleotide
gcgucuggguccugagucu

SEQ ID NO: 380595 - RNA, 19 nt, Artificial Sequence
  Description of Artificial Sequence: Synthetic oligonucleotide
cccacagaaugggccugag

SEQ ID NO: 380596 - RNA, 19 nt, Artificial Sequence
  Description of Artificial Sequence: Synthetic oligonucleotide
gagccccgaguuuccguuu

SEQ ID NO: 380597 - RNA, 19 nt, Artificial Sequence
  Description of Artificial Sequence: Synthetic oligonucleotide
ccaucgggagacuggcucu

SEQ ID NO: 380598 - RNA, 19 nt, Artificial Sequence
  Description of Artificial Sequence: Synthetic oligonucleotide
ccuuagucuuggcagcaau

SEQ ID NO: 380599 - RNA, 19 nt, Artificial Sequence
  Description of Artificial Sequence: Synthetic oligonucleotide
ggcuugcuauagagguaga

SEQ ID NO: 380600 - RNA, 19 nt, Artificial Sequence
  Description of Artificial Sequence: Synthetic oligonucleotide
ggacacccuucucgcugga

SEQ ID NO: 380601 - RNA, 19 nt, Artificial Sequence
  Description of Artificial Sequence: Synthetic oligonucleotide
gcggucgcggacacccuuc

SEQ ID NO: 380602 - RNA, 19 nt, Artificial Sequence
  Description of Artificial Sequence: Synthetic oligonucleotide
cugccgccaacaacuccau

SEQ ID NO: 380603 - RNA, 19 nt, Artificial Sequence
  Description of Artificial Sequence: Synthetic oligonucleotide
guaccagugugugguccuu

SEQ ID NO: 380604 - RNA, 19 nt, Artificial Sequence
  Description of Artificial Sequence: Synthetic oligonucleotide
cugcgcggucgcggacacc

SEQ ID NO: 380605 - RNA, 19 nt, Artificial Sequence
  Description of Artificial Sequence: Synthetic oligonucleotide
ggggcucguccuguaccca

SEQ ID NO: 380606 - RNA, 19 nt, Artificial Sequence
  Description of Artificial Sequence: Synthetic oligonucleotide
ccgcuuccgguugaaggga

SEQ ID NO: 380607 - RNA, 19 nt, Artificial Sequence
  Description of Artificial Sequence: Synthetic oligonucleotide
gcucguccuguacccacau

SEQ ID NO: 380608 - RNA, 19 nt, Artificial Sequence
  Description of Artificial Sequence: Synthetic oligonucleotide
gcguccucgcgcugagaua

SEQ ID NO: 380609 - RNA, 19 nt, Artificial Sequence
  Description of Artificial Sequence: Synthetic oligonucleotide
ccacagcggaaagcucauc

SEQ ID NO: 380610 - RNA, 19 nt, Artificial Sequence
  Description of Artificial Sequence: Synthetic oligonucleotide
ccccuagcuauagucugua

SEQ ID NO: 380611 - RNA, 19 nt, Artificial Sequence
  Description of Artificial Sequence: Synthetic oligonucleotide
cugcguccucgcgcugaga

SEQ ID NO: 380612 - RNA, 19 nt, Artificial Sequence
  Description of Artificial Sequence: Synthetic oligonucleotide
guccucgcgcugagauacu

SEQ ID NO: 380613 - RNA, 19 nt, Artificial Sequence
  Description of Artificial Sequence: Synthetic oligonucleotide
cuuuggcgugguggcuggu

SEQ ID NO: 380614 - RNA, 19 nt, Artificial Sequence
  Description of Artificial Sequence: Synthetic oligonucleotide
cguucgccccgcucguccu

SEQ ID NO: 380615 - RNA, 19 nt, Artificial Sequence
  Description of Artificial Sequence: Synthetic oligonucleotide
cgcggacacccuucucgcu

SEQ ID NO: 380616 - RNA, 19 nt, Artificial Sequence
  Description of Artificial Sequence: Synthetic oligonucleotide
cgcggucgcggacacccuu

SEQ ID NO: 380617 - RNA, 19 nt, Artificial Sequence
  Description of Artificial Sequence: Synthetic oligonucleotide
gcgcggucgcggacacccu

SEQ ID NO: 380618 - RNA, 19 nt, Artificial Sequence
  Description of Artificial Sequence: Synthetic oligonucleotide
ucuguuauuaaucagaaau

SEQ ID NO: 380619 - RNA, 19 nt, Artificial Sequence
  Description of Artificial Sequence: Synthetic oligonucleotide
agugugaaaagcccuaacc

SEQ ID NO: 380620 - RNA, 19 nt, Artificial Sequence
  Description of Artificial Sequence: Synthetic oligonucleotide
uuuaacuuaguuuaacugu

SEQ ID NO: 380621 - RNA, 19 nt, Artificial Sequence
  Description of Artificial Sequence: Synthetic oligonucleotide
uaguuuagagcuuuuaaag

SEQ ID NO: 380622 - RNA, 19 nt, Artificial Sequence
  Description of Artificial Sequence: Synthetic oligonucleotide
uaauacuuaauucuuugug

SEQ ID NO: 380623 - RNA, 19 nt, Artificial Sequence
  Description of Artificial Sequence: Synthetic oligonucleotide
aguuuagagcuuuuaaagg

SEQ ID NO: 380624 - RNA, 19 nt, Artificial Sequence
  Description of Artificial Sequence: Synthetic oligonucleotide
uuaccgauaagguaaaugu

SEQ ID NO: 380625 - RNA, 19 nt, Artificial Sequence
  Description of Artificial Sequence: Synthetic oligonucleotide
auuaucaccuacccgauag

SEQ ID NO: 380626 - RNA, 19 nt, Artificial Sequence
  Description of Artificial Sequence: Synthetic oligonucleotide
uacgagaugacucuuuacc

SEQ ID NO: 380627 - RNA, 19 nt, Artificial Sequence
  Description of Artificial Sequence: Synthetic oligonucleotide
auaucgaucccugaaaacg

SEQ ID NO: 380628 - RNA, 19 nt, Artificial Sequence
  Description of Artificial Sequence: Synthetic oligonucleotide
uaaaugugcacauucuccc

SEQ ID NO: 380629 - RNA, 19 nt, Artificial Sequence
  Description of Artificial Sequence: Synthetic oligonucleotide
uguauacccaaacuaacac

SEQ ID NO: 380630 - RNA, 19 nt, Artificial Sequence
  Description of Artificial Sequence: Synthetic oligonucleotide
ugaauucuagaguugauuc

SEQ ID NO: 380631 - RNA, 19 nt, Artificial Sequence
  Description of Artificial Sequence: Synthetic oligonucleotide
uuaacuuaguuuaacuguc

SEQ ID NO: 380632 - RNA, 19 nt, Artificial Sequence
  Description of Artificial Sequence: Synthetic oligonucleotide
ucccugaaaacguagauac

SEQ ID NO: 380633 - RNA, 19 nt, Artificial Sequence
  Description of Artificial Sequence: Synthetic oligonucleotide
aaaccgagaacauuccuca

SEQ ID NO: 380634 - RNA, 19 nt, Artificial Sequence
  Description of Artificial Sequence: Synthetic oligonucleotide
uuuaugaacaguuccuaac

SEQ ID NO: 380635 - RNA, 19 nt, Artificial Sequence
  Description of Artificial Sequence: Synthetic oligonucleotide
accgauaagguaaaugugc

SEQ ID NO: 380636 - RNA, 19 nt, Artificial Sequence
  Description of Artificial Sequence: Synthetic oligonucleotide
ucauguauacccaaacuaa

SEQ ID NO: 380637 - RNA, 19 nt, Artificial Sequence
  Description of Artificial Sequence: Synthetic oligonucleotide
aaaacguagauacuuccau

SEQ ID NO: 380638 - RNA, 19 nt, Artificial Sequence
  Description of Artificial Sequence: Synthetic oligonucleotide
ugagaucggucuuugaaag

SEQ ID NO: 380639 - RNA, 19 nt, Artificial Sequence
  Description of Artificial Sequence: Synthetic oligonucleotide
ugaaaagcccuaaccagag

SEQ ID NO: 380640 - RNA, 19 nt, Artificial Sequence
  Description of Artificial Sequence: Synthetic oligonucleotide
uuuagagcuuuuaaaggac

SEQ ID NO: 380641 - RNA, 19 nt, Artificial Sequence
  Description of Artificial Sequence: Synthetic oligonucleotide
aaguuuauagguauuggca

SEQ ID NO: 380642 - RNA, 19 nt, Artificial Sequence
  Description of Artificial Sequence: Synthetic oligonucleotide
ugcaaauugguaagcagca

SEQ ID NO: 380643 - RNA, 19 nt, Artificial Sequence
  Description of Artificial Sequence: Synthetic oligonucleotide
cacauuaucaccuacccga

SEQ ID NO: 380644 - RNA, 19 nt, Artificial Sequence
  Description of Artificial Sequence: Synthetic oligonucleotide
caaauugguaagcagcacc

SEQ ID NO: 380645 - RNA, 19 nt, Artificial Sequence
  Description of Artificial Sequence: Synthetic oligonucleotide
uuagagcuuuuaaaggacc

SEQ ID NO: 380646 - RNA, 19 nt, Artificial Sequence
  Description of Artificial Sequence: Synthetic oligonucleotide
ugauacaugucugacaccu

SEQ ID NO: 380647 - RNA, 19 nt, Artificial Sequence
  Description of Artificial Sequence: Synthetic oligonucleotide
uauauggcaucuuucccag

SEQ ID NO: 380648 - RNA, 19 nt, Artificial Sequence
  Description of Artificial Sequence: Synthetic oligonucleotide
cuagaguugauucuugcug

SEQ ID NO: 380649 - RNA, 19 nt, Artificial Sequence
  Description of Artificial Sequence: Synthetic oligonucleotide
ugacaccucauaaaucucc

SEQ ID NO: 380650 - RNA, 19 nt, Artificial Sequence
  Description of Artificial Sequence: Synthetic oligonucleotide
uuauaucgaucccugaaaa

SEQ ID NO: 380651 - RNA, 19 nt, Artificial Sequence
  Description of Artificial Sequence: Synthetic oligonucleotide
aguuuauagguauuggcau

SEQ ID NO: 380652 - RNA, 19 nt, Artificial Sequence
  Description of Artificial Sequence: Synthetic oligonucleotide
uuuaccgauaagguaaaug

SEQ ID NO: 380653 - RNA, 19 nt, Artificial Sequence
  Description of Artificial Sequence: Synthetic oligonucleotide
agauuguauauauuugagu

SEQ ID NO: 380654 - RNA, 19 nt, Artificial Sequence
  Description of Artificial Sequence: Synthetic oligonucleotide
uagaucauucuccucgccc

SEQ ID NO: 380655 - RNA, 19 nt, Artificial Sequence
  Description of Artificial Sequence: Synthetic oligonucleotide
cuagaaggggauuauagca

SEQ ID NO: 380656 - RNA, 19 nt, Artificial Sequence
  Description of Artificial Sequence: Synthetic oligonucleotide
  modified_base (6)..(6): a, c, u, g, unknown or other
aguggngaaauccucugug

SEQ ID NO: 380657 - RNA, 19 nt, Artificial Sequence
  Description of Artificial Sequence: Synthetic oligonucleotide
gaagguuugguaaagaagu

SEQ ID NO: 380658 - RNA, 19 nt, Artificial Sequence
  Description of Artificial Sequence: Synthetic oligonucleotide
  modified_base (4)..(4): a, c, u, g, unknown or other
uggngaaauccucugugcu

SEQ ID NO: 380659 - RNA, 19 nt, Artificial Sequence
  Description of Artificial Sequence: Synthetic oligonucleotide
caaguaaguagaugauucc

SEQ ID NO: 380660 - RNA, 19 nt, Artificial Sequence
  Description of Artificial Sequence: Synthetic oligonucleotide
cucuuuaccgauaagguaa

SEQ ID NO: 380661 - RNA, 19 nt, Artificial Sequence
  Description of Artificial Sequence: Synthetic oligonucleotide
aagcccuaaccagaguacc

SEQ ID NO: 380662 - RNA, 19 nt, Artificial Sequence
  Description of Artificial Sequence: Synthetic oligonucleotide
cauguauacccaaacuaac

SEQ ID NO: 380663 - RNA, 19 nt, Artificial Sequence
  Description of Artificial Sequence: Synthetic oligonucleotide
uaacuuaguuuaacugucc

SEQ ID NO: 380664 - RNA, 19 nt, Artificial Sequence
  Description of Artificial Sequence: Synthetic oligonucleotide
uuacagcuagcaaucuucc

SEQ ID NO: 380665 - RNA, 19 nt, Artificial Sequence
  Description of Artificial Sequence: Synthetic oligonucleotide
ugauccaggcuucuauugc

SEQ ID NO: 380666 - RNA, 19 nt, Artificial Sequence
  Description of Artificial Sequence: Synthetic oligonucleotide
uaucgaucccugaaaacgu

SEQ ID NO: 380667 - RNA, 19 nt, Artificial Sequence
  Description of Artificial Sequence: Synthetic oligonucleotide
acugaguugucucugucca

SEQ ID NO: 380668 - RNA, 19 nt, Artificial Sequence
  Description of Artificial Sequence: Synthetic oligonucleotide
ugcguuaccuccuuucaug

SEQ ID NO: 380669 - RNA, 19 nt, Artificial Sequence
  Description of Artificial Sequence: Synthetic oligonucleotide
agguuagaagugaacaugg

SEQ ID NO: 380670 - RNA, 19 nt, Artificial Sequence
  Description of Artificial Sequence: Synthetic oligonucleotide
  modified_base (7)..(7): a, c, u, g, unknown or other
aaguggngaaauccucugu

SEQ ID NO: 380671 - RNA, 19 nt, Artificial Sequence
  Description of Artificial Sequence: Synthetic oligonucleotide
accuuaaugccucuuguga

SEQ ID NO: 380672 - RNA, 19 nt, Artificial Sequence
  Description of Artificial Sequence: Synthetic oligonucleotide
uaugaacaguuccuaacuc

SEQ ID NO: 380673 - RNA, 19 nt, Artificial Sequence
  Description of Artificial Sequence: Synthetic oligonucleotide
uaccgauaagguaaaugug

SEQ ID NO: 380674 - RNA, 19 nt, Artificial Sequence
  Description of Artificial Sequence: Synthetic oligonucleotide
ucuuaccugcguuaccucc

SEQ ID NO: 380675 - RNA, 19 nt, Artificial Sequence
  Description of Artificial Sequence: Synthetic oligonucleotide
agugagaucggucuuugaa

SEQ ID NO: 380676 - RNA, 19 nt, Artificial Sequence
  Description of Artificial Sequence: Synthetic oligonucleotide
cuuuuaaaggaccagagau

SEQ ID NO: 380677 - RNA, 19 nt, Artificial Sequence
  Description of Artificial Sequence: Synthetic oligonucleotide
uauaucgaucccugaaaac

SEQ ID NO: 380678 - RNA, 19 nt, Artificial Sequence
  Description of Artificial Sequence: Synthetic oligonucleotide
ugguaacaucagcaaauag

SEQ ID NO: 380679 - RNA, 19 nt, Artificial Sequence
  Description of Artificial Sequence: Synthetic oligonucleotide
uucagcucgaagcuucaca

SEQ ID NO: 380680 - RNA, 19 nt, Artificial Sequence
  Description of Artificial Sequence: Synthetic oligonucleotide
cuaucguccgauucuuugc

SEQ ID NO: 380681 - RNA, 19 nt, Artificial Sequence
  Description of Artificial Sequence: Synthetic oligonucleotide
auaagguaaaugugcacau

SEQ ID NO: 380682 - RNA, 19 nt, Artificial Sequence
  Description of Artificial Sequence: Synthetic oligonucleotide
uaucguccgauucuuugca

SEQ ID NO: 380683 - RNA, 19 nt, Artificial Sequence
  Description of Artificial Sequence: Synthetic oligonucleotide
aaccagaguaccccacgag

SEQ ID NO: 380684 - RNA, 19 nt, Artificial Sequence
  Description of Artificial Sequence: Synthetic oligonucleotide
uguggaaaagugacaacua

SEQ ID NO: 380685 - RNA, 19 nt, Artificial Sequence
  Description of Artificial Sequence: Synthetic oligonucleotide
guaguuuucauccauggau

SEQ ID NO: 380686 - RNA, 19 nt, Artificial Sequence
  Description of Artificial Sequence: Synthetic oligonucleotide
ucgaucccugaaaacguag

SEQ ID NO: 380687 - RNA, 19 nt, Artificial Sequence
  Description of Artificial Sequence: Synthetic oligonucleotide
auagaugggaaaacauuag

SEQ ID NO: 380688 - RNA, 19 nt, Artificial Sequence
  Description of Artificial Sequence: Synthetic oligonucleotide
ucccgugguaaauauaauc

SEQ ID NO: 380689 - RNA, 19 nt, Artificial Sequence
  Description of Artificial Sequence: Synthetic oligonucleotide
agcaaauagcuccuccucu

SEQ ID NO: 380690 - RNA, 19 nt, Artificial Sequence
  Description of Artificial Sequence: Synthetic oligonucleotide
gggaauuucaggugacugg

SEQ ID NO: 380691 - RNA, 19 nt, Artificial Sequence
  Description of Artificial Sequence: Synthetic oligonucleotide
uacgccgugggauggaccc

SEQ ID NO: 380692 - RNA, 19 nt, Artificial Sequence
  Description of Artificial Sequence: Synthetic oligonucleotide
aggggauuauagcacacca

SEQ ID NO: 380693 - RNA, 19 nt, Artificial Sequence
  Description of Artificial Sequence: Synthetic oligonucleotide
augggaaccaagauacuuc

SEQ ID NO: 380694 - RNA, 19 nt, Artificial Sequence
  Description of Artificial Sequence: Synthetic oligonucleotide
uguacugugcgugcgagaa

SEQ ID NO: 380695 - RNA, 19 nt, Artificial Sequence
  Description of Artificial Sequence: Synthetic oligonucleotide
guuuauagguauuggcauc

SEQ ID NO: 380696 - RNA, 19 nt, Artificial Sequence
  Description of Artificial Sequence: Synthetic oligonucleotide
ugacaacuagccacuuugc

SEQ ID NO: 380697 - RNA, 19 nt, Artificial Sequence
  Description of Artificial Sequence: Synthetic oligonucleotide
gaaaccgagaacauuccuc

SEQ ID NO: 380698 - RNA, 19 nt, Artificial Sequence
  Description of Artificial Sequence: Synthetic oligonucleotide
auauuugaguuuggaaaag

SEQ ID NO: 380699 - RNA, 19 nt, Artificial Sequence
  Description of Artificial Sequence: Synthetic oligonucleotide
uagauacuuccauuacagc

SEQ ID NO: 380700 - RNA, 19 nt, Artificial Sequence
  Description of Artificial Sequence: Synthetic oligonucleotide
cucgaagcuucacaguccc

SEQ ID NO: 380701 - RNA, 19 nt, Artificial Sequence
  Description of Artificial Sequence: Synthetic oligonucleotide
  modified_base (5)..(5): a, c, u, g, unknown or other
guggngaaauccucugugc

SEQ ID NO: 380702 - RNA, 19 nt, Artificial Sequence
  Description of Artificial Sequence: Synthetic oligonucleotide
auuuccacauacgccgugg

SEQ ID NO: 380703 - RNA, 19 nt, Artificial Sequence
  Description of Artificial Sequence: Synthetic oligonucleotide
ugugcgugcgagaaaccga

SEQ ID NO: 380704 - RNA, 19 nt, Artificial Sequence
  Description of Artificial Sequence: Synthetic oligonucleotide
uacugugcgugcgagaaac

SEQ ID NO: 380705 - RNA, 19 nt, Artificial Sequence
  Description of Artificial Sequence: Synthetic oligonucleotide
ucuuuaccgauaagguaaa

SEQ ID NO: 380706 - RNA, 19 nt, Artificial Sequence
  Description of Artificial Sequence: Synthetic oligonucleotide
cucauguauacccaaacua

SEQ ID NO: 380707 - RNA, 19 nt, Artificial Sequence
  Description of Artificial Sequence: Synthetic oligonucleotide
agcuaguccugagugacuc

SEQ ID NO: 380708 - RNA, 19 nt, Artificial Sequence
  Description of Artificial Sequence: Synthetic oligonucleotide
gucacggggauaauggcag

SEQ ID NO: 380709 - RNA, 19 nt, Artificial Sequence
  Description of Artificial Sequence: Synthetic oligonucleotide
  modified_base (8)..(8): a, c, u, g, unknown or other
caaguggngaaauccucug

SEQ ID NO: 380710 - RNA, 19 nt, Artificial Sequence
  Description of Artificial Sequence: Synthetic oligonucleotide
ucguccgauucuuugcagc

SEQ ID NO: 380711 - RNA, 19 nt, Artificial Sequence
  Description of Artificial Sequence: Synthetic oligonucleotide
ucuuucuuaccugcguuac

SEQ ID NO: 380712 - RNA, 19 nt, Artificial Sequence
  Description of Artificial Sequence: Synthetic oligonucleotide
gucuuaggccaacacaaac

SEQ ID NO: 380713 - RNA, 19 nt, Artificial Sequence
  Description of Artificial Sequence: Synthetic oligonucleotide
guuagggcuacguacaccu

SEQ ID NO: 380714 - RNA, 19 nt, Artificial Sequence
  Description of Artificial Sequence: Synthetic oligonucleotide
agucgggaagguuugguaa

SEQ ID NO: 380715 - RNA, 19 nt, Artificial Sequence
  Description of Artificial Sequence: Synthetic oligonucleotide
ggcuacguacaccucacgg

SEQ ID NO: 380716 - RNA, 19 nt, Artificial Sequence
  Description of Artificial Sequence: Synthetic oligonucleotide
guagagcucaggaucacug

SEQ ID NO: 380717 - RNA, 19 nt, Artificial Sequence
  Description of Artificial Sequence: Synthetic oligonucleotide
auguauacccaaacuaaca

SEQ ID NO: 380718 - RNA, 19 nt, Artificial Sequence
  Description of Artificial Sequence: Synthetic oligonucleotide
uccgcuguaccgaguuagg

SEQ ID NO: 380719 - RNA, 19 nt, Artificial Sequence
  Description of Artificial Sequence: Synthetic oligonucleotide
uagugugaaaagcccuaac

SEQ ID NO: 380720 - RNA, 19 nt, Artificial Sequence
  Description of Artificial Sequence: Synthetic oligonucleotide
cagauaccaggguauguug

SEQ ID NO: 380721 - RNA, 19 nt, Artificial Sequence
  Description of Artificial Sequence: Synthetic oligonucleotide
agcagcaccuuaaugccuc

SEQ ID NO: 380722 - RNA, 19 nt, Artificial Sequence
  Description of Artificial Sequence: Synthetic oligonucleotide
gugcgagaaaccgagaaca

SEQ ID NO: 380723 - RNA, 19 nt, Artificial Sequence
  Description of Artificial Sequence: Synthetic oligonucleotide
agucccgugguaaauauaa

SEQ ID NO: 380724 - RNA, 19 nt, Artificial Sequence
  Description of Artificial Sequence: Synthetic oligonucleotide
uuaguuuaacuguccccuc

SEQ ID NO: 380725 - RNA, 19 nt, Artificial Sequence
  Description of Artificial Sequence: Synthetic oligonucleotide
caccagaucuuuauguaca

SEQ ID NO: 380726 - RNA, 19 nt, Artificial Sequence
  Description of Artificial Sequence: Synthetic oligonucleotide
aagucgggaagguuuggua

SEQ ID NO: 380727 - RNA, 19 nt, Artificial Sequence
  Description of Artificial Sequence: Synthetic oligonucleotide
aucaccuacccgauaguag

SEQ ID NO: 380728 - RNA, 19 nt, Artificial Sequence
  Description of Artificial Sequence: Synthetic oligonucleotide
gguaagcagcaccuuaaug

SEQ ID NO: 380729 - RNA, 19 nt, Artificial Sequence
  Description of Artificial Sequence: Synthetic oligonucleotide
caccuuaaugccucuugug

SEQ ID NO: 380730 - RNA, 19 nt, Artificial Sequence
  Description of Artificial Sequence: Synthetic oligonucleotide
ggacccucccacuacauac

SEQ ID NO: 380731 - RNA, 19 nt, Artificial Sequence
  Description of Artificial Sequence: Synthetic oligonucleotide
accucuaacugaguugucu

SEQ ID NO: 380732 - RNA, 19 nt, Artificial Sequence
  Description of Artificial Sequence: Synthetic oligonucleotide
caccucacgguuuucccac

SEQ ID NO: 380733 - RNA, 19 nt, Artificial Sequence
  Description of Artificial Sequence: Synthetic oligonucleotide
acauuccucaaagagcgau

SEQ ID NO: 380734 - RNA, 19 nt, Artificial Sequence
  Description of Artificial Sequence: Synthetic oligonucleotide
cuuguacugugcgugcgag

SEQ ID NO: 380735 - RNA, 19 nt, Artificial Sequence
  Description of Artificial Sequence: Synthetic oligonucleotide
caaucacccgguugugagc

SEQ ID NO: 380736 - RNA, 19 nt, Artificial Sequence
  Description of Artificial Sequence: Synthetic oligonucleotide
ucgaagcuucacagucccg

SEQ ID NO: 380737 - RNA, 19 nt, Artificial Sequence
  Description of Artificial Sequence: Synthetic oligonucleotide
uggcuuaucuauccauaua

SEQ ID NO: 380738 - RNA, 19 nt, Artificial Sequence
  Description of Artificial Sequence: Synthetic oligonucleotide
ucgggaagguuugguaaag

SEQ ID NO: 380739 - RNA, 19 nt, Artificial Sequence
  Description of Artificial Sequence: Synthetic oligonucleotide
ugcgagaaaccgagaacau

SEQ ID NO: 380740 - RNA, 19 nt, Artificial Sequence
  Description of Artificial Sequence: Synthetic oligonucleotide
cauuacucugaaucaggga

SEQ ID NO: 380741 - RNA, 19 nt, Artificial Sequence
  Description of Artificial Sequence: Synthetic oligonucleotide
cccgugguaaauauaauca

SEQ ID NO: 380742 - RNA, 19 nt, Artificial Sequence
  Description of Artificial Sequence: Synthetic oligonucleotide
  modified_base (3)..(3): a, c, u, g, unknown or other
ggngaaauccucugugcuc

SEQ ID NO: 380743 - RNA, 19 nt, Artificial Sequence
  Description of Artificial Sequence: Synthetic oligonucleotide
uaucaccuacccgauagua

SEQ ID NO: 380744 - RNA, 19 nt, Artificial Sequence
  Description of Artificial Sequence: Synthetic oligonucleotide
augacucuuuaccgauaag

SEQ ID NO: 380745 - RNA, 19 nt, Artificial Sequence
  Description of Artificial Sequence: Synthetic oligonucleotide
aucguccgauucuuugcag

SEQ ID NO: 380746 - RNA, 19 nt, Artificial Sequence
  Description of Artificial Sequence: Synthetic oligonucleotide
ccgaguuagggcuacguac

SEQ ID NO: 380747 - RNA, 19 nt, Artificial Sequence
  Description of Artificial Sequence: Synthetic oligonucleotide
acagucccgugguaaauau

SEQ ID NO: 380748 - RNA, 19 nt, Artificial Sequence
  Description of Artificial Sequence: Synthetic oligonucleotide
accucacgguuuucccacc

SEQ ID NO: 380749 - RNA, 19 nt, Artificial Sequence
  Description of Artificial Sequence: Synthetic oligonucleotide
auaagucgggaagguuugg

SEQ ID NO: 380750 - RNA, 19 nt, Artificial Sequence
  Description of Artificial Sequence: Synthetic oligonucleotide
cuccgcuguaccgaguuag

SEQ ID NO: 380751 - RNA, 19 nt, Artificial Sequence
  Description of Artificial Sequence: Synthetic oligonucleotide
ggaacauggaaccccaucu

SEQ ID NO: 380752 - RNA, 19 nt, Artificial Sequence
  Description of Artificial Sequence: Synthetic oligonucleotide
uuccuucaagcuaguccug

SEQ ID NO: 380753 - RNA, 19 nt, Artificial Sequence
  Description of Artificial Sequence: Synthetic oligonucleotide
ucggccuuccacugagaug

SEQ ID NO: 380754 - RNA, 19 nt, Artificial Sequence
  Description of Artificial Sequence: Synthetic oligonucleotide
ugguaagcagcaccuuaau

SEQ ID NO: 380755 - RNA, 19 nt, Artificial Sequence
  Description of Artificial Sequence: Synthetic oligonucleotide
guacgagaugacucuuuac

SEQ ID NO: 380756 - RNA, 19 nt, Artificial Sequence
  Description of Artificial Sequence: Synthetic oligonucleotide
gugcgugcgagaaaccgag

SEQ ID NO: 380757 - RNA, 19 nt, Artificial Sequence
  Description of Artificial Sequence: Synthetic oligonucleotide
gacaacuagccacuuugcu

SEQ ID NO: 380758 - RNA, 19 nt, Artificial Sequence
  Description of Artificial Sequence: Synthetic oligonucleotide
gaccagagauuguauauau

SEQ ID NO: 380759 - RNA, 19 nt, Artificial Sequence
  Description of Artificial Sequence: Synthetic oligonucleotide
cugacagauagaugggaaa

SEQ ID NO: 380760 - RNA, 19 nt, Artificial Sequence
  Description of Artificial Sequence: Synthetic oligonucleotide
uguaccgaguuagggcuac

SEQ ID NO: 380761 - RNA, 19 nt, Artificial Sequence
  Description of Artificial Sequence: Synthetic oligonucleotide
guuccuaacucuugauuua

SEQ ID NO: 380762 - RNA, 19 nt, Artificial Sequence
  Description of Artificial Sequence: Synthetic oligonucleotide
aaccgagaacauuccucaa

SEQ ID NO: 380763 - RNA, 19 nt, Artificial Sequence
  Description of Artificial Sequence: Synthetic oligonucleotide
ucggccugagugagaucgg

SEQ ID NO: 380764 - RNA, 19 nt, Artificial Sequence
  Description of Artificial Sequence: Synthetic oligonucleotide
ggaaccaagauacuucuau

SEQ ID NO: 380765 - RNA, 19 nt, Artificial Sequence
  Description of Artificial Sequence: Synthetic oligonucleotide
cacuuguacugugcgugcg

SEQ ID NO: 380766 - RNA, 19 nt, Artificial Sequence
  Description of Artificial Sequence: Synthetic oligonucleotide
cacauacgccgugggaugg

SEQ ID NO: 380767 - RNA, 19 nt, Artificial Sequence
  Description of Artificial Sequence: Synthetic oligonucleotide
cuuccagagggauggggca

SEQ ID NO: 380768 - RNA, 19 nt, Artificial Sequence
  Description of Artificial Sequence: Synthetic oligonucleotide
  modified_base (13)..(13): a, c, u, g, unknown or other
uggggcaaguggngaaauc

SEQ ID NO: 380769 - RNA, 19 nt, Artificial Sequence
  Description of Artificial Sequence: Synthetic oligonucleotide
uacguacaccucacgguuu

SEQ ID NO: 380770 - RNA, 19 nt, Artificial Sequence
  Description of Artificial Sequence: Synthetic oligonucleotide
cagcacaaucacccgguug

SEQ ID NO: 380771 - RNA, 19 nt, Artificial Sequence
  Description of Artificial Sequence: Synthetic oligonucleotide
acugugcgugcgagaaacc

SEQ ID NO: 380772 - RNA, 19 nt, Artificial Sequence
  Description of Artificial Sequence: Synthetic oligonucleotide
cccgauaguagaugacugc

SEQ ID NO: 380773 - RNA, 19 nt, Artificial Sequence
  Description of Artificial Sequence: Synthetic oligonucleotide
gaaccaagauacuucuauu

SEQ ID NO: 380774 - RNA, 19 nt, Artificial Sequence
  Description of Artificial Sequence: Synthetic oligonucleotide
gcguuaccuccuuucaugc

SEQ ID NO: 380775 - RNA, 19 nt, Artificial Sequence
  Description of Artificial Sequence: Synthetic oligonucleotide
cacggggauaauggcagag

SEQ ID NO: 380776 - RNA, 19 nt, Artificial Sequence
  Description of Artificial Sequence: Synthetic oligonucleotide
auacgccgugggauggacc

SEQ ID NO: 380777 - RNA, 19 nt, Artificial Sequence
  Description of Artificial Sequence: Synthetic oligonucleotide
aggccucgggaagacaaag

SEQ ID NO: 380778 - RNA, 19 nt, Artificial Sequence
  Description of Artificial Sequence: Synthetic oligonucleotide
cagagucuaagcagcagua

SEQ ID NO: 380779 - RNA, 19 nt, Artificial Sequence
  Description of Artificial Sequence: Synthetic oligonucleotide
uuauagguauuggcaucuc

SEQ ID NO: 380780 - RNA, 19 nt, Artificial Sequence
  Description of Artificial Sequence: Synthetic oligonucleotide
uuagggcuacguacaccuc

SEQ ID NO: 380781 - RNA, 19 nt, Artificial Sequence
  Description of Artificial Sequence: Synthetic oligonucleotide
uaccgaguuagggcuacgu

SEQ ID NO: 380782 - RNA, 19 nt, Artificial Sequence
  Description of Artificial Sequence: Synthetic oligonucleotide
cugcaugggaaccaagaua

SEQ ID NO: 380783 - RNA, 19 nt, Artificial Sequence
  Description of Artificial Sequence: Synthetic oligonucleotide
uacuuccauuacagcuagc

SEQ ID NO: 380784 - RNA, 19 nt, Artificial Sequence
  Description of Artificial Sequence: Synthetic oligonucleotide
gucgggaagguuugguaaa

SEQ ID NO: 380785 - RNA, 19 nt, Artificial Sequence
  Description of Artificial Sequence: Synthetic oligonucleotide
guggguacgagaugacucu

SEQ ID NO: 380786 - RNA, 19 nt, Artificial Sequence
  Description of Artificial Sequence: Synthetic oligonucleotide
uuaccugcguuaccuccuu

SEQ ID NO: 380787 - RNA, 19 nt, Artificial Sequence
  Description of Artificial Sequence: Synthetic oligonucleotide
accgaguuagggcuacgua

SEQ ID NO: 380788 - RNA, 19 nt, Artificial Sequence
  Description of Artificial Sequence: Synthetic oligonucleotide
ucacggggauaauggcaga

SEQ ID NO: 380789 - RNA, 19 nt, Artificial Sequence
  Description of Artificial Sequence: Synthetic oligonucleotide
gggaacauggaaccccauc

SEQ ID NO: 380790 - RNA, 19 nt, Artificial Sequence
  Description of Artificial Sequence: Synthetic oligonucleotide
gcaaaggugcacaccauuc

SEQ ID NO: 380791 - RNA, 19 nt, Artificial Sequence
  Description of Artificial Sequence: Synthetic oligonucleotide
uggauaagucgggaagguu

SEQ ID NO: 380792 - RNA, 19 nt, Artificial Sequence
  Description of Artificial Sequence: Synthetic oligonucleotide
acauuaucaccuacccgau

SEQ ID NO: 380793 - RNA, 19 nt, Artificial Sequence
  Description of Artificial Sequence: Synthetic oligonucleotide
acggggauaauggcagagu

SEQ ID NO: 380794 - RNA, 19 nt, Artificial Sequence
  Description of Artificial Sequence: Synthetic oligonucleotide
ugcgugcgagaaaccgaga

SEQ ID NO: 380795 - RNA, 19 nt, Artificial Sequence
  Description of Artificial Sequence: Synthetic oligonucleotide
cuuaccugcguuaccuccu

SEQ ID NO: 380796 - RNA, 19 nt, Artificial Sequence
  Description of Artificial Sequence: Synthetic oligonucleotide
ccuacccgauaguagauga

SEQ ID NO: 380797 - RNA, 19 nt, Artificial Sequence
  Description of Artificial Sequence: Synthetic oligonucleotide
agagcgaugucagcugaua

SEQ ID NO: 380798 - RNA, 19 nt, Artificial Sequence
  Description of Artificial Sequence: Synthetic oligonucleotide
agaggguauccugcagugu

SEQ ID NO: 380799 - RNA, 19 nt, Artificial Sequence
  Description of Artificial Sequence: Synthetic oligonucleotide
aagagcgaugucagcugau

SEQ ID NO: 380800 - RNA, 19 nt, Artificial Sequence
  Description of Artificial Sequence: Synthetic oligonucleotide
gccaccuaucguccgauuc

SEQ ID NO: 380801 - RNA, 19 nt, Artificial Sequence
  Description of Artificial Sequence: Synthetic oligonucleotide
ccuaaccagaguaccccac

SEQ ID NO: 380802 - RNA, 19 nt, Artificial Sequence
  Description of Artificial Sequence: Synthetic oligonucleotide
gguauccugcaguguuuug

SEQ ID NO: 380803 - RNA, 19 nt, Artificial Sequence
  Description of Artificial Sequence: Synthetic oligonucleotide
cauacgccgugggauggac

SEQ ID NO: 380804 - RNA, 19 nt, Artificial Sequence
  Description of Artificial Sequence: Synthetic oligonucleotide
cuacguacaccucacgguu

SEQ ID NO: 380805 - RNA, 19 nt, Artificial Sequence
  Description of Artificial Sequence: Synthetic oligonucleotide
guccgauucuuugcagcug

SEQ ID NO: 380806 - RNA, 19 nt, Artificial Sequence
  Description of Artificial Sequence: Synthetic oligonucleotide
ccacauacgccgugggaug

SEQ ID NO: 380807 - RNA, 19 nt, Artificial Sequence
  Description of Artificial Sequence: Synthetic oligonucleotide
cguagauacuuccauuaca

SEQ ID NO: 380808 - RNA, 19 nt, Artificial Sequence
  Description of Artificial Sequence: Synthetic oligonucleotide
cuggcuuaucuauccauau

SEQ ID NO: 380809 - RNA, 19 nt, Artificial Sequence
  Description of Artificial Sequence: Synthetic oligonucleotide
cgauaagguaaaugugcac

SEQ ID NO: 380810 - RNA, 19 nt, Artificial Sequence
  Description of Artificial Sequence: Synthetic oligonucleotide
ggauaagucgggaagguuu

SEQ ID NO: 380811 - RNA, 19 nt, Artificial Sequence
  Description of Artificial Sequence: Synthetic oligonucleotide
gguuagaagugaacaugga

SEQ ID NO: 380812 - RNA, 19 nt, Artificial Sequence
  Description of Artificial Sequence: Synthetic oligonucleotide
aagccgggugaagcugucu

SEQ ID NO: 380813 - RNA, 19 nt, Artificial Sequence
  Description of Artificial Sequence: Synthetic oligonucleotide
aucgaucccugaaaacgua

SEQ ID NO: 380814 - RNA, 19 nt, Artificial Sequence
  Description of Artificial Sequence: Synthetic oligonucleotide
ccgugguaaauauaaucaa

SEQ ID NO: 380815 - RNA, 19 nt, Artificial Sequence
  Description of Artificial Sequence: Synthetic oligonucleotide
cacggggucacggggauaa

SEQ ID NO: 380816 - RNA, 19 nt, Artificial Sequence
  Description of Artificial Sequence: Synthetic oligonucleotide
gcgugcgagaaaccgagaa

SEQ ID NO: 380817 - RNA, 19 nt, Artificial Sequence
  Description of Artificial Sequence: Synthetic oligonucleotide
ccgauaguagaugacugca

SEQ ID NO: 380818 - RNA, 19 nt, Artificial Sequence
  Description of Artificial Sequence: Synthetic oligonucleotide
guaccgaguuagggcuacg

SEQ ID NO: 380819 - RNA, 19 nt, Artificial Sequence
  Description of Artificial Sequence: Synthetic oligonucleotide
cauuaucaccuacccgaua

SEQ ID NO: 380820 - RNA, 19 nt, Artificial Sequence
  Description of Artificial Sequence: Synthetic oligonucleotide
cgugcgagaaaccgagaac

SEQ ID NO: 380821 - RNA, 19 nt, Artificial Sequence
  Description of Artificial Sequence: Synthetic oligonucleotide
cccaaacuaacacauuacu

SEQ ID NO: 380822 - RNA, 19 nt, Artificial Sequence
  Description of Artificial Sequence: Synthetic oligonucleotide
cggggauaauggcagaguc

SEQ ID NO: 380823 - RNA, 19 nt, Artificial Sequence
  Description of Artificial Sequence: Synthetic oligonucleotide
ccuucgggucuuucuuacc

SEQ ID NO: 380824 - RNA, 19 nt, Artificial Sequence
  Description of Artificial Sequence: Synthetic oligonucleotide
cguuaccuccuuucaugcc

SEQ ID NO: 380825 - RNA, 19 nt, Artificial Sequence
  Description of Artificial Sequence: Synthetic oligonucleotide
ggaccagagauuguauaua

SEQ ID NO: 380826 - RNA, 19 nt, Artificial Sequence
  Description of Artificial Sequence: Synthetic oligonucleotide
caccucuaacugaguuguc

SEQ ID NO: 380827 - RNA, 19 nt, Artificial Sequence
  Description of Artificial Sequence: Synthetic oligonucleotide
guacugugcgugcgagaaa

SEQ ID NO: 380828 - RNA, 19 nt, Artificial Sequence
  Description of Artificial Sequence: Synthetic oligonucleotide
uaccugcguuaccuccuuu

SEQ ID NO: 380829 - RNA, 19 nt, Artificial Sequence
  Description of Artificial Sequence: Synthetic oligonucleotide
cacagucccgugguaaaua

SEQ ID NO: 380830 - RNA, 19 nt, Artificial Sequence
  Description of Artificial Sequence: Synthetic oligonucleotide
ccacuuacacugauggagu

SEQ ID NO: 380831 - RNA, 19 nt, Artificial Sequence
  Description of Artificial Sequence: Synthetic oligonucleotide
cuguaccgaguuagggcua

SEQ ID NO: 380832 - RNA, 19 nt, Artificial Sequence
  Description of Artificial Sequence: Synthetic oligonucleotide
caggaucacugugccuauc

SEQ ID NO: 380833 - RNA, 19 nt, Artificial Sequence
  Description of Artificial Sequence: Synthetic oligonucleotide
cacagauaccaggguaugu

SEQ ID NO: 380834 - RNA, 19 nt, Artificial Sequence
  Description of Artificial Sequence: Synthetic oligonucleotide
cucggccuuccacugagau

SEQ ID NO: 380835 - RNA, 19 nt, Artificial Sequence
  Description of Artificial Sequence: Synthetic oligonucleotide
caggccucgggaagacaaa

SEQ ID NO: 380836 - RNA, 19 nt, Artificial Sequence
  Description of Artificial Sequence: Synthetic oligonucleotide
cagucccgugguaaauaua

SEQ ID NO: 380837 - RNA, 19 nt, Artificial Sequence
  Description of Artificial Sequence: Synthetic oligonucleotide
cgaucccugaaaacguaga

SEQ ID NO: 380838 - RNA, 19 nt, Artificial Sequence
  Description of Artificial Sequence: Synthetic oligonucleotide
cccuaaccagaguacccca

SEQ ID NO: 380839 - RNA, 19 nt, Artificial Sequence
  Description of Artificial Sequence: Synthetic oligonucleotide
cugcguuaccuccuuucau

SEQ ID NO: 380840 - RNA, 19 nt, Artificial Sequence
  Description of Artificial Sequence: Synthetic oligonucleotide
ccaccuaucguccgauucu

SEQ ID NO: 380841 - RNA, 19 nt, Artificial Sequence
  Description of Artificial Sequence: Synthetic oligonucleotide
accuaucguccgauucuuu

SEQ ID NO: 380842 - RNA, 19 nt, Artificial Sequence
  Description of Artificial Sequence: Synthetic oligonucleotide
acgccgugggauggacccu

SEQ ID NO: 380843 - RNA, 19 nt, Artificial Sequence
  Description of Artificial Sequence: Synthetic oligonucleotide
ccgugggauggacccuccc

SEQ ID NO: 380844 - RNA, 19 nt, Artificial Sequence
  Description of Artificial Sequence: Synthetic oligonucleotide
gucccgugguaaauauaau

SEQ ID NO: 380845 - RNA, 19 nt, Artificial Sequence
  Description of Artificial Sequence: Synthetic oligonucleotide
cggggucacggggauaaug

SEQ ID NO: 380846 - RNA, 19 nt, Artificial Sequence
  Description of Artificial Sequence: Synthetic oligonucleotide
gcgagaaaccgagaacauu

SEQ ID NO: 380847 - RNA, 19 nt, Artificial Sequence
  Description of Artificial Sequence: Synthetic oligonucleotide
cgauaguagaugacugcau

SEQ ID NO: 380848 - RNA, 19 nt, Artificial Sequence
  Description of Artificial Sequence: Synthetic oligonucleotide
gccuccgcuguaccgaguu

SEQ ID NO: 380849 - RNA, 19 nt, Artificial Sequence
  Description of Artificial Sequence: Synthetic oligonucleotide
gccgugggauggacccucc

SEQ ID NO: 380850 - RNA, 19 nt, Artificial Sequence
  Description of Artificial Sequence: Synthetic oligonucleotide
acggggucacggggauaau

SEQ ID NO: 380851 - RNA, 19 nt, Artificial Sequence
  Description of Artificial Sequence: Synthetic oligonucleotide
ggguacgagaugacucuuu

SEQ ID NO: 380852 - RNA, 19 nt, Artificial Sequence
  Description of Artificial Sequence: Synthetic oligonucleotide
gccuaucugcaagccacau

SEQ ID NO: 380853 - RNA, 19 nt, Artificial Sequence
  Description of Artificial Sequence: Synthetic oligonucleotide
ccuccgcuguaccgaguua

SEQ ID NO: 380854 - RNA, 19 nt, Artificial Sequence
  Description of Artificial Sequence: Synthetic oligonucleotide
gcacggggucacggggaua

SEQ ID NO: 380855 - RNA, 19 nt, Artificial Sequence
  Description of Artificial Sequence: Synthetic oligonucleotide
uuuauuaauaucuggauau

SEQ ID NO: 380856 - RNA, 19 nt, Artificial Sequence
  Description of Artificial Sequence: Synthetic oligonucleotide
accauugauugauugaucc

SEQ ID NO: 380857 - RNA, 19 nt, Artificial Sequence
  Description of Artificial Sequence: Synthetic oligonucleotide
aggacuagaccucauacgc

SEQ ID NO: 380858 - RNA, 19 nt, Artificial Sequence
  Description of Artificial Sequence: Synthetic oligonucleotide
gaagguaggcccuugauug

SEQ ID NO: 380859 - RNA, 19 nt, Artificial Sequence
  Description of Artificial Sequence: Synthetic oligonucleotide
gaggcuaccccguacaugg

SEQ ID NO: 380860 - RNA, 19 nt, Artificial Sequence
  Description of Artificial Sequence: Synthetic oligonucleotide
uuguucaguauucauagac

SEQ ID NO: 380861 - RNA, 19 nt, Artificial Sequence
  Description of Artificial Sequence: Synthetic oligonucleotide
cuugcuauuagcagagagg

SEQ ID NO: 380862 - RNA, 19 nt, Artificial Sequence
  Description of Artificial Sequence: Synthetic oligonucleotide
ucuguuguaacagagggcu

SEQ ID NO: 380863 - RNA, 19 nt, Artificial Sequence
  Description of Artificial Sequence: Synthetic oligonucleotide
ugagaaguuaccuuuugga

SEQ ID NO: 380864 - RNA, 19 nt, Artificial Sequence
  Description of Artificial Sequence: Synthetic oligonucleotide
ugagauugcuauuagcaga

SEQ ID NO: 380865 - RNA, 19 nt, Artificial Sequence
  Description of Artificial Sequence: Synthetic oligonucleotide
cuuucucaaggccagaccc

SEQ ID NO: 380866 - RNA, 19 nt, Artificial Sequence
  Description of Artificial Sequence: Synthetic oligonucleotide
auaauagggaguguaacag

SEQ ID NO: 380867 - RNA, 19 nt, Artificial Sequence
  Description of Artificial Sequence: Synthetic oligonucleotide
uguaagucagggcugcacc

SEQ ID NO: 380868 - RNA, 19 nt, Artificial Sequence
  Description of Artificial Sequence: Synthetic oligonucleotide
agaucugcuaggcaggaag

SEQ ID NO: 380869 - RNA, 19 nt, Artificial Sequence
  Description of Artificial Sequence: Synthetic oligonucleotide
uaauagggaguguaacagg

SEQ ID NO: 380870 - RNA, 19 nt, Artificial Sequence
  Description of Artificial Sequence: Synthetic oligonucleotide
ugcugaacagcucaccacc

SEQ ID NO: 380871 - RNA, 19 nt, Artificial Sequence
  Description of Artificial Sequence: Synthetic oligonucleotide
uuaaggauacccaccccag

SEQ ID NO: 380872 - RNA, 19 nt, Artificial Sequence
  Description of Artificial Sequence: Synthetic oligonucleotide
acaagacuccccuucuccc

SEQ ID NO: 380873 - RNA, 19 nt, Artificial Sequence
  Description of Artificial Sequence: Synthetic oligonucleotide
aaggauacccaccccagca

SEQ ID NO: 380874 - RNA, 19 nt, Artificial Sequence
  Description of Artificial Sequence: Synthetic oligonucleotide
uaugaucuaagguuuccca

SEQ ID NO: 380875 - RNA, 19 nt, Artificial Sequence
  Description of Artificial Sequence: Synthetic oligonucleotide
aaaguauccccaggguagc

SEQ ID NO: 380876 - RNA, 19 nt, Artificial Sequence
  Description of Artificial Sequence: Synthetic oligonucleotide
ugauguuuucaaaauggaa

SEQ ID NO: 380877 - RNA, 19 nt, Artificial Sequence
  Description of Artificial Sequence: Synthetic oligonucleotide
guuguugcacccuugugag

SEQ ID NO: 380878 - RNA, 19 nt, Artificial Sequence
  Description of Artificial Sequence: Synthetic oligonucleotide
auacgcauggcucggcagc

SEQ ID NO: 380879 - RNA, 19 nt, Artificial Sequence
  Description of Artificial Sequence: Synthetic oligonucleotide
agaaguaaggccaaguccu

SEQ ID NO: 380880 - RNA, 19 nt, Artificial Sequence
  Description of Artificial Sequence: Synthetic oligonucleotide
agcaguauuguccuagcug

SEQ ID NO: 380881 - RNA, 19 nt, Artificial Sequence
  Description of Artificial Sequence: Synthetic oligonucleotide
uggacuauacagccucugg

SEQ ID NO: 380882 - RNA, 19 nt, Artificial Sequence
  Description of Artificial Sequence: Synthetic oligonucleotide
auaugaucuaagguuuccc

SEQ ID NO: 380883 - RNA, 19 nt, Artificial Sequence
  Description of Artificial Sequence: Synthetic oligonucleotide
acauaauagggaguguaac

SEQ ID NO: 380884 - RNA, 19 nt, Artificial Sequence
  Description of Artificial Sequence: Synthetic oligonucleotide
cuuggggaagccauauugg

SEQ ID NO: 380885 - RNA, 19 nt, Artificial Sequence
  Description of Artificial Sequence: Synthetic oligonucleotide
cucuguaggaaaaggguag

SEQ ID NO: 380886 - RNA, 19 nt, Artificial Sequence
  Description of Artificial Sequence: Synthetic oligonucleotide
uggaccuaggaccucagga

SEQ ID NO: 380887 - RNA, 19 nt, Artificial Sequence
  Description of Artificial Sequence: Synthetic oligonucleotide
ugauugauugauccaggga

SEQ ID NO: 380888 - RNA, 19 nt, Artificial Sequence
  Description of Artificial Sequence: Synthetic oligonucleotide
uccccaagaagguaggccc

SEQ ID NO: 380889 - RNA, 19 nt, Artificial Sequence
  Description of Artificial Sequence: Synthetic oligonucleotide
agaaguuaccuuuuggaua

SEQ ID NO: 380890 - RNA, 19 nt, Artificial Sequence
  Description of Artificial Sequence: Synthetic oligonucleotide
cuagcugauaugaucuaag

SEQ ID NO: 380891 - RNA, 19 nt, Artificial Sequence
  Description of Artificial Sequence: Synthetic oligonucleotide
guaacagggugucugcagg

SEQ ID NO: 380892 - RNA, 19 nt, Artificial Sequence
  Description of Artificial Sequence: Synthetic oligonucleotide
cugagauugcuauuagcag

SEQ ID NO: 380893 - RNA, 19 nt, Artificial Sequence
  Description of Artificial Sequence: Synthetic oligonucleotide
accucauacgcauggcucg

SEQ ID NO: 380894 - RNA, 19 nt, Artificial Sequence
  Description of Artificial Sequence: Synthetic oligonucleotide
agcuacugguuguugcacc

SEQ ID NO: 380895 - RNA, 19 nt, Artificial Sequence
  Description of Artificial Sequence: Synthetic oligonucleotide
ucucgucgcacaccuaggg

SEQ ID NO: 380896 - RNA, 19 nt, Artificial Sequence
  Description of Artificial Sequence: Synthetic oligonucleotide
uguaacagagggcucccca

SEQ ID NO: 380897 - RNA, 19 nt, Artificial Sequence
  Description of Artificial Sequence: Synthetic oligonucleotide
ggaucuaggaacaaggcug

SEQ ID NO: 380898 - RNA, 19 nt, Artificial Sequence
  Description of Artificial Sequence: Synthetic oligonucleotide
ucgucgcacaccuagggcc

SEQ ID NO: 380899 - RNA, 19 nt, Artificial Sequence
  Description of Artificial Sequence: Synthetic oligonucleotide
guuaaggauacccacccca

SEQ ID NO: 380900 - RNA, 19 nt, Artificial Sequence
  Description of Artificial Sequence: Synthetic oligonucleotide
agcugauaugaucuaaggu

SEQ ID NO: 380901 - RNA, 19 nt, Artificial Sequence
  Description of Artificial Sequence: Synthetic oligonucleotide
cauaauagggaguguaaca

SEQ ID NO: 380902 - RNA, 19 nt, Artificial Sequence
  Description of Artificial Sequence: Synthetic oligonucleotide
aagccuggucaccacguuc

SEQ ID NO: 380903 - RNA, 19 nt, Artificial Sequence
  Description of Artificial Sequence: Synthetic oligonucleotide
guuuauuaauaucuggaua

SEQ ID NO: 380904 - RNA, 19 nt, Artificial Sequence
  Description of Artificial Sequence: Synthetic oligonucleotide
cagagagggacuuuucuac

SEQ ID NO: 380905 - RNA, 19 nt, Artificial Sequence
  Description of Artificial Sequence: Synthetic oligonucleotide
uugaggagccgguuguuag

SEQ ID NO: 380906 - RNA, 19 nt, Artificial Sequence
  Description of Artificial Sequence: Synthetic oligonucleotide
caggacuagaccucauacg

SEQ ID NO: 380907 - RNA, 19 nt, Artificial Sequence
  Description of Artificial Sequence: Synthetic oligonucleotide
auuguccuagcugauauga

SEQ ID NO: 380908 - RNA, 19 nt, Artificial Sequence
  Description of Artificial Sequence: Synthetic oligonucleotide
aggaucuaggaacaaggcu

SEQ ID NO: 380909 - RNA, 19 nt, Artificial Sequence
  Description of Artificial Sequence: Synthetic oligonucleotide
augacgaugaggaggcagc

SEQ ID NO: 380910 - RNA, 19 nt, Artificial Sequence
  Description of Artificial Sequence: Synthetic oligonucleotide
uguccuagcugauaugauc

SEQ ID NO: 380911 - RNA, 19 nt, Artificial Sequence
  Description of Artificial Sequence: Synthetic oligonucleotide
cuuggauguguagaguagg

SEQ ID NO: 380912 - RNA, 19 nt, Artificial Sequence
  Description of Artificial Sequence: Synthetic oligonucleotide
ugguagucgucagucaccg

SEQ ID NO: 380913 - RNA, 19 nt, Artificial Sequence
  Description of Artificial Sequence: Synthetic oligonucleotide
gaaggacccucucugcucc

SEQ ID NO: 380914 - RNA, 19 nt, Artificial Sequence
  Description of Artificial Sequence: Synthetic oligonucleotide
ugaugcauguucucauaca

SEQ ID NO: 380915 - RNA, 19 nt, Artificial Sequence
  Description of Artificial Sequence: Synthetic oligonucleotide
guuaccuuuuggauagggg

SEQ ID NO: 380916 - RNA, 19 nt, Artificial Sequence
  Description of Artificial Sequence: Synthetic oligonucleotide
agguagcccagccuugcgc

SEQ ID NO: 380917 - RNA, 19 nt, Artificial Sequence
  Description of Artificial Sequence: Synthetic oligonucleotide
uccagcaguauuguccuag

SEQ ID NO: 380918 - RNA, 19 nt, Artificial Sequence
  Description of Artificial Sequence: Synthetic oligonucleotide
ucuagaaguaaggccaagu

SEQ ID NO: 380919 - RNA, 19 nt, Artificial Sequence
  Description of Artificial Sequence: Synthetic oligonucleotide
gaguguaacagggugucug

SEQ ID NO: 380920 - RNA, 19 nt, Artificial Sequence
  Description of Artificial Sequence: Synthetic oligonucleotide
gcuauuagcagagagggac

SEQ ID NO: 380921 - RNA, 19 nt, Artificial Sequence
  Description of Artificial Sequence: Synthetic oligonucleotide
agagccuccgaacauugca

SEQ ID NO: 380922 - RNA, 19 nt, Artificial Sequence
  Description of Artificial Sequence: Synthetic oligonucleotide
uuucucaaggccagaccca

SEQ ID NO: 380923 - RNA, 19 nt, Artificial Sequence
  Description of Artificial Sequence: Synthetic oligonucleotide
cacaagacuccccuucucc

SEQ ID NO: 380924 - RNA, 19 nt, Artificial Sequence
  Description of Artificial Sequence: Synthetic oligonucleotide
gaccuaggaccucaggagc

SEQ ID NO: 380925 - RNA, 19 nt, Artificial Sequence
  Description of Artificial Sequence: Synthetic oligonucleotide
aaccaauggccagauaccu

SEQ ID NO: 380926 - RNA, 19 nt, Artificial Sequence
  Description of Artificial Sequence: Synthetic oligonucleotide
cauaucacaugacuuguca

SEQ ID NO: 380927 - RNA, 19 nt, Artificial Sequence
  Description of Artificial Sequence: Synthetic oligonucleotide
aggauacccaccccagcac

SEQ ID NO: 380928 - RNA, 19 nt, Artificial Sequence
  Description of Artificial Sequence: Synthetic oligonucleotide
ugauaugaucuaagguuuc

SEQ ID NO: 380929 - RNA, 19 nt, Artificial Sequence
  Description of Artificial Sequence: Synthetic oligonucleotide
cuugacgucucggugggcg

SEQ ID NO: 380930 - RNA, 19 nt, Artificial Sequence
  Description of Artificial Sequence: Synthetic oligonucleotide
caggaucuaggaacaaggc

SEQ ID NO: 380931 - RNA, 19 nt, Artificial Sequence
  Description of Artificial Sequence: Synthetic oligonucleotide
aaaucuggggucagcgaag

SEQ ID NO: 380932 - RNA, 19 nt, Artificial Sequence
  Description of Artificial Sequence: Synthetic oligonucleotide
ugaucuuugucuuccugua

SEQ ID NO: 380933 - RNA, 19 nt, Artificial Sequence
  Description of Artificial Sequence: Synthetic oligonucleotide
agagcuacugguuguugca

SEQ ID NO: 380934 - RNA, 19 nt, Artificial Sequence
  Description of Artificial Sequence: Synthetic oligonucleotide
aaguccuaaagcagagcag

SEQ ID NO: 380935 - RNA, 19 nt, Artificial Sequence
  Description of Artificial Sequence: Synthetic oligonucleotide
ucggugagcuuaagcacag

SEQ ID NO: 380936 - RNA, 19 nt, Artificial Sequence
  Description of Artificial Sequence: Synthetic oligonucleotide
agagacagaucuccccaag

SEQ ID NO: 380937 - RNA, 19 nt, Artificial Sequence
  Description of Artificial Sequence: Synthetic oligonucleotide
aaguauccccaggguagcc

SEQ ID NO: 380938 - RNA, 19 nt, Artificial Sequence
  Description of Artificial Sequence: Synthetic oligonucleotide
auaaauccagcaguauugu

SEQ ID NO: 380939 - RNA, 19 nt, Artificial Sequence
  Description of Artificial Sequence: Synthetic oligonucleotide
ugguaugugggcugugcug

SEQ ID NO: 380940 - RNA, 19 nt, Artificial Sequence
  Description of Artificial Sequence: Synthetic oligonucleotide
uaccugagauugcuauuag

SEQ ID NO: 380941 - RNA, 19 nt, Artificial Sequence
  Description of Artificial Sequence: Synthetic oligonucleotide
gguaugugggcugugcugg

SEQ ID NO: 380942 - RNA, 19 nt, Artificial Sequence
  Description of Artificial Sequence: Synthetic oligonucleotide
uauuguccuagcugauaug

SEQ ID NO: 380943 - RNA, 19 nt, Artificial Sequence
  Description of Artificial Sequence: Synthetic oligonucleotide
uggaguagaagggugggaa

SEQ ID NO: 380944 - RNA, 19 nt, Artificial Sequence
  Description of Artificial Sequence: Synthetic oligonucleotide
aggcggauuagcugcuugg

SEQ ID NO: 380945 - RNA, 19 nt, Artificial Sequence
  Description of Artificial Sequence: Synthetic oligonucleotide
agcccuugcuauuagcaga

SEQ ID NO: 380946 - RNA, 19 nt, Artificial Sequence
  Description of Artificial Sequence: Synthetic oligonucleotide
gugguagcacuccagcacc

SEQ ID NO: 380947 - RNA, 19 nt, Artificial Sequence
  Description of Artificial Sequence: Synthetic oligonucleotide
auugauugauccagggaug

SEQ ID NO: 380948 - RNA, 19 nt, Artificial Sequence
  Description of Artificial Sequence: Synthetic oligonucleotide
aacugguagucgucaguca

SEQ ID NO: 380949 - RNA, 19 nt, Artificial Sequence
  Description of Artificial Sequence: Synthetic oligonucleotide
gguuguugcacccuuguga

SEQ ID NO: 380950 - RNA, 19 nt, Artificial Sequence
  Description of Artificial Sequence: Synthetic oligonucleotide
accaaauagaagcgaugcu

SEQ ID NO: 380951 - RNA, 19 nt, Artificial Sequence
  Description of Artificial Sequence: Synthetic oligonucleotide
guuggaguagaaggguggg

SEQ ID NO: 380952 - RNA, 19 nt, Artificial Sequence
  Description of Artificial Sequence: Synthetic oligonucleotide
ugugagagagacagaucuc

SEQ ID NO: 380953 - RNA, 19 nt, Artificial Sequence
  Description of Artificial Sequence: Synthetic oligonucleotide
auaucuggauauaaaucca

SEQ ID NO: 380954 - RNA, 19 nt, Artificial Sequence
  Description of Artificial Sequence: Synthetic oligonucleotide
ucauacgcauggcucggca

SEQ ID NO: 380955 - RNA, 19 nt, Artificial Sequence
  Description of Artificial Sequence: Synthetic oligonucleotide
gcuaaaucuggggucagcg

SEQ ID NO: 380956 - RNA, 19 nt, Artificial Sequence
  Description of Artificial Sequence: Synthetic oligonucleotide
accgcguacuucuugggcu

SEQ ID NO: 380957 - RNA, 19 nt, Artificial Sequence
  Description of Artificial Sequence: Synthetic oligonucleotide
uccgagguagcccagccuu

SEQ ID NO: 380958 - RNA, 19 nt, Artificial Sequence
  Description of Artificial Sequence: Synthetic oligonucleotide
ggacuauacagccucuggc

SEQ ID NO: 380959 - RNA, 19 nt, Artificial Sequence
  Description of Artificial Sequence: Synthetic oligonucleotide
aagguaggcccuugauugu

SEQ ID NO: 380960 - RNA, 19 nt, Artificial Sequence
  Description of Artificial Sequence: Synthetic oligonucleotide
uuauuaauaucuggauaua

SEQ ID NO: 380961 - RNA, 19 nt, Artificial Sequence
  Description of Artificial Sequence: Synthetic oligonucleotide
gguagcccagccuugcgcg

SEQ ID NO: 380962 - RNA, 19 nt, Artificial Sequence
  Description of Artificial Sequence: Synthetic oligonucleotide
aguaaggccaaguccuaaa

SEQ ID NO: 380963 - RNA, 19 nt, Artificial Sequence
  Description of Artificial Sequence: Synthetic oligonucleotide
cugguagucgucagucacc

SEQ ID NO: 380964 - RNA, 19 nt, Artificial Sequence
  Description of Artificial Sequence: Synthetic oligonucleotide
gucaccacguuccuggauc

SEQ ID NO: 380965 - RNA, 19 nt, Artificial Sequence
  Description of Artificial Sequence: Synthetic oligonucleotide
auagcaaccaauggccaga

SEQ ID NO: 380966 - RNA, 19 nt, Artificial Sequence
  Description of Artificial Sequence: Synthetic oligonucleotide
agagccguggccucacuca

SEQ ID NO: 380967 - RNA, 19 nt, Artificial Sequence
  Description of Artificial Sequence: Synthetic oligonucleotide
gcugauaugaucuaagguu

SEQ ID NO: 380968 - RNA, 19 nt, Artificial Sequence
  Description of Artificial Sequence: Synthetic oligonucleotide
gagaaguuaccuuuuggau

SEQ ID NO: 380969 - RNA, 19 nt, Artificial Sequence
  Description of Artificial Sequence: Synthetic oligonucleotide
caugacgaugaggaggcag

SEQ ID NO: 380970 - RNA, 19 nt, Artificial Sequence
  Description of Artificial Sequence: Synthetic oligonucleotide
gguuguuagaggucuucag

SEQ ID NO: 380971 - RNA, 19 nt, Artificial Sequence
  Description of Artificial Sequence: Synthetic oligonucleotide
ucagcgaagaaggacccuc

SEQ ID NO: 380972 - RNA, 19 nt, Artificial Sequence
  Description of Artificial Sequence: Synthetic oligonucleotide
ugcuauuagcagagaggga

SEQ ID NO: 380973 - RNA, 19 nt, Artificial Sequence
  Description of Artificial Sequence: Synthetic oligonucleotide
uuagcagagagggacuuuu

SEQ ID NO: 380974 - RNA, 19 nt, Artificial Sequence
  Description of Artificial Sequence: Synthetic oligonucleotide
agaagcgaugcuggggagg

SEQ ID NO: 380975 - RNA, 19 nt, Artificial Sequence
  Description of Artificial Sequence: Synthetic oligonucleotide
agcgaagaaggacccucuc

SEQ ID NO: 380976 - RNA, 19 nt, Artificial Sequence
  Description of Artificial Sequence: Synthetic oligonucleotide
cauacgcauggcucggcag

SEQ ID NO: 380977 - RNA, 19 nt, Artificial Sequence
  Description of Artificial Sequence: Synthetic oligonucleotide
uuguugcacccuugugagg

SEQ ID NO: 380978 - RNA, 19 nt, Artificial Sequence
  Description of Artificial Sequence: Synthetic oligonucleotide
aaucuggggucagcgaaga

SEQ ID NO: 380979 - RNA, 19 nt, Artificial Sequence
  Description of Artificial Sequence: Synthetic oligonucleotide
agggaugguucaugaacug

SEQ ID NO: 380980 - RNA, 19 nt, Artificial Sequence
  Description of Artificial Sequence: Synthetic oligonucleotide
ugguuguugcacccuugug

SEQ ID NO: 380981 - RNA, 19 nt, Artificial Sequence
  Description of Artificial Sequence: Synthetic oligonucleotide
ucaccgcguacuucuuggg

SEQ ID NO: 380982 - RNA, 19 nt, Artificial Sequence
  Description of Artificial Sequence: Synthetic oligonucleotide
acauaucacaugacuuguc

SEQ ID NO: 380983 - RNA, 19 nt, Artificial Sequence
  Description of Artificial Sequence: Synthetic oligonucleotide
gugccaggcacuugucagg

SEQ ID NO: 380984 - RNA, 19 nt, Artificial Sequence
  Description of Artificial Sequence: Synthetic oligonucleotide
auguguagaguagguuuuc

SEQ ID NO: 380985 - RNA, 19 nt, Artificial Sequence
  Description of Artificial Sequence: Synthetic oligonucleotide
cuccgaacauugcagucug

SEQ ID NO: 380986 - RNA, 19 nt, Artificial Sequence
  Description of Artificial Sequence: Synthetic oligonucleotide
gaccucauacgcauggcuc

SEQ ID NO: 380987 - RNA, 19 nt, Artificial Sequence
  Description of Artificial Sequence: Synthetic oligonucleotide
ugcauuccaugacgaugag

SEQ ID NO: 380988 - RNA, 19 nt, Artificial Sequence
  Description of Artificial Sequence: Synthetic oligonucleotide
gccauauuggcccaagcga

SEQ ID NO: 380989 - RNA, 19 nt, Artificial Sequence
  Description of Artificial Sequence: Synthetic oligonucleotide
ggcagaccaaauagaagcg

SEQ ID NO: 380990 - RNA, 19 nt, Artificial Sequence
  Description of Artificial Sequence: Synthetic oligonucleotide
gacuagaccucauacgcau

SEQ ID NO: 380991 - RNA, 19 nt, Artificial Sequence
  Description of Artificial Sequence: Synthetic oligonucleotide
agaccaaauagaagcgaug

SEQ ID NO: 380992 - RNA, 19 nt, Artificial Sequence
  Description of Artificial Sequence: Synthetic oligonucleotide
cacauaauagggaguguaa

SEQ ID NO: 380993 - RNA, 19 nt, Artificial Sequence
  Description of Artificial Sequence: Synthetic oligonucleotide
ccuugcuauuagcagagag

SEQ ID NO: 380994 - RNA, 19 nt, Artificial Sequence
  Description of Artificial Sequence: Synthetic oligonucleotide
gagguagcccagccuugcg

SEQ ID NO: 380995 - RNA, 19 nt, Artificial Sequence
  Description of Artificial Sequence: Synthetic oligonucleotide
guauuguccuagcugauau

SEQ ID NO: 380996 - RNA, 19 nt, Artificial Sequence
  Description of Artificial Sequence: Synthetic oligonucleotide
cucgucgcacaccuagggc

SEQ ID NO: 380997 - RNA, 19 nt, Artificial Sequence
  Description of Artificial Sequence: Synthetic oligonucleotide
cuagggccugaccuccugg

SEQ ID NO: 380998 - RNA, 19 nt, Artificial Sequence
  Description of Artificial Sequence: Synthetic oligonucleotide
uaccccguacauggcaggg

SEQ ID NO: 380999 - RNA, 19 nt, Artificial Sequence
  Description of Artificial Sequence: Synthetic oligonucleotide
cugauaugaucuaagguuu

SEQ ID NO: 381000 - RNA, 19 nt, Artificial Sequence
  Description of Artificial Sequence: Synthetic oligonucleotide
cuaaaucuggggucagcga

SEQ ID NO: 381001 - RNA, 19 nt, Artificial Sequence
  Description of Artificial Sequence: Synthetic oligonucleotide
uauuagcagagagggacuu

SEQ ID NO: 381002 - RNA, 19 nt, Artificial Sequence
  Description of Artificial Sequence: Synthetic oligonucleotide
agaggcacgggauggugau

SEQ ID NO: 381003 - RNA, 19 nt, Artificial Sequence
  Description of Artificial Sequence: Synthetic oligonucleotide
uuguccuagcugauaugau

SEQ ID NO: 381004 - RNA, 19 nt, Artificial Sequence
  Description of Artificial Sequence: Synthetic oligonucleotide
cucucgucgcacaccuagg

SEQ ID NO: 381005 - RNA, 19 nt, Artificial Sequence
  Description of Artificial Sequence: Synthetic oligonucleotide
cucaagggcucuugaggac

SEQ ID NO: 381006 - RNA, 19 nt, Artificial Sequence
  Description of Artificial Sequence: Synthetic oligonucleotide
aaguaaggccaaguccuaa

SEQ ID NO: 381007 - RNA, 19 nt, Artificial Sequence
  Description of Artificial Sequence: Synthetic oligonucleotide
agguaggcccuugauuguc

SEQ ID NO: 381008 - RNA, 19 nt, Artificial Sequence
  Description of Artificial Sequence: Synthetic oligonucleotide
agucaccgcguacuucuug

SEQ ID NO: 381009 - RNA, 19 nt, Artificial Sequence
  Description of Artificial Sequence: Synthetic oligonucleotide
uaacagagggcuccccauu

SEQ ID NO: 381010 - RNA, 19 nt, Artificial Sequence
  Description of Artificial Sequence: Synthetic oligonucleotide
cuaccccguacauggcagg

SEQ ID NO: 381011 - RNA, 19 nt, Artificial Sequence
  Description of Artificial Sequence: Synthetic oligonucleotide
gaacaaggcugggugccag

SEQ ID NO: 381012 - RNA, 19 nt, Artificial Sequence
  Description of Artificial Sequence: Synthetic oligonucleotide
uccuugacuucaucccagu

SEQ ID NO: 381013 - RNA, 19 nt, Artificial Sequence
  Description of Artificial Sequence: Synthetic oligonucleotide
ggcuggacuauacagccuc

SEQ ID NO: 381014 - RNA, 19 nt, Artificial Sequence
  Description of Artificial Sequence: Synthetic oligonucleotide
agccuccgaacauugcagu

SEQ ID NO: 381015 - RNA, 19 nt, Artificial Sequence
  Description of Artificial Sequence: Synthetic oligonucleotide
uucucaaggccagacccau

SEQ ID NO: 381016 - RNA, 19 nt, Artificial Sequence
  Description of Artificial Sequence: Synthetic oligonucleotide
uacugguuguugcacccuu

SEQ ID NO: 381017 - RNA, 19 nt, Artificial Sequence
  Description of Artificial Sequence: Synthetic oligonucleotide
ccaggacuagaccucauac

SEQ ID NO: 381018 - RNA, 19 nt, Artificial Sequence
  Description of Artificial Sequence: Synthetic oligonucleotide
uuggaguagaaggguggga

SEQ ID NO: 381019 - RNA, 19 nt, Artificial Sequence
  Description of Artificial Sequence: Synthetic oligonucleotide
auuggcccaagcgaauccu

SEQ ID NO: 381020 - RNA, 19 nt, Artificial Sequence
  Description of Artificial Sequence: Synthetic oligonucleotide
gagagggacuuuucuaccu

SEQ ID NO: 381021 - RNA, 19 nt, Artificial Sequence
  Description of Artificial Sequence: Synthetic oligonucleotide
caccgcguacuucuugggc

SEQ ID NO: 381022 - RNA, 19 nt, Artificial Sequence
  Description of Artificial Sequence: Synthetic oligonucleotide
ucccagugaucuuugucuu

SEQ ID NO: 381023 - RNA, 19 nt, Artificial Sequence
  Description of Artificial Sequence: Synthetic oligonucleotide
agcgaauccuucucuucau

SEQ ID NO: 381024 - RNA, 19 nt, Artificial Sequence
  Description of Artificial Sequence: Synthetic oligonucleotide
uacgcauggcucggcagcc

SEQ ID NO: 381025 - RNA, 19 nt, Artificial Sequence
  Description of Artificial Sequence: Synthetic oligonucleotide
agccgguuguuagaggucu

SEQ ID NO: 381026 - RNA, 19 nt, Artificial Sequence
  Description of Artificial Sequence: Synthetic oligonucleotide
gauauaaauccagcaguau

SEQ ID NO: 381027 - RNA, 19 nt, Artificial Sequence
  Description of Artificial Sequence: Synthetic oligonucleotide
aggucugaucuagaguaga

SEQ ID NO: 381028 - RNA, 19 nt, Artificial Sequence
  Description of Artificial Sequence: Synthetic oligonucleotide
acacuucugcccagugcgc

SEQ ID NO: 381029 - RNA, 19 nt, Artificial Sequence
  Description of Artificial Sequence: Synthetic oligonucleotide
cugcuaggcaggaagaggu

SEQ ID NO: 381030 - RNA, 19 nt, Artificial Sequence
  Description of Artificial Sequence: Synthetic oligonucleotide
uccuccgcuuguugaggag

SEQ ID NO: 381031 - RNA, 19 nt, Artificial Sequence
  Description of Artificial Sequence: Synthetic oligonucleotide
aacucccaguggucuagaa

SEQ ID NO: 381032 - RNA, 19 nt, Artificial Sequence
  Description of Artificial Sequence: Synthetic oligonucleotide
uugacgucucggugggcga

SEQ ID NO: 381033 - RNA, 19 nt, Artificial Sequence
  Description of Artificial Sequence: Synthetic oligonucleotide
ccuuggauguguagaguag

SEQ ID NO: 381034 - RNA, 19 nt, Artificial Sequence
  Description of Artificial Sequence: Synthetic oligonucleotide
accccguacauggcagggc

SEQ ID NO: 381035 - RNA, 19 nt, Artificial Sequence
  Description of Artificial Sequence: Synthetic oligonucleotide
agagaccucugaccacuca

SEQ ID NO: 381036 - RNA, 19 nt, Artificial Sequence
  Description of Artificial Sequence: Synthetic oligonucleotide
uggauguguagaguagguu

SEQ ID NO: 381037 - RNA, 19 nt, Artificial Sequence
  Description of Artificial Sequence: Synthetic oligonucleotide
gguuaaggauacccacccc

SEQ ID NO: 381038 - RNA, 19 nt, Artificial Sequence
  Description of Artificial Sequence: Synthetic oligonucleotide
cuggcuaaaucugggguca

SEQ ID NO: 381039 - RNA, 19 nt, Artificial Sequence
  Description of Artificial Sequence: Synthetic oligonucleotide
accugcaacugagaugaga

SEQ ID NO: 381040 - RNA, 19 nt, Artificial Sequence
  Description of Artificial Sequence: Synthetic oligonucleotide
cuggaccuaggaccucagg

SEQ ID NO: 381041 - RNA, 19 nt, Artificial Sequence
  Description of Artificial Sequence: Synthetic oligonucleotide
aguggugguccaccuccug

SEQ ID NO: 381042 - RNA, 19 nt, Artificial Sequence
  Description of Artificial Sequence: Synthetic oligonucleotide
gccucucucucagugaaag

SEQ ID NO: 381043 - RNA, 19 nt, Artificial Sequence
  Description of Artificial Sequence: Synthetic oligonucleotide
cuagggccugagcaccgcc

SEQ ID NO: 381044 - RNA, 19 nt, Artificial Sequence
  Description of Artificial Sequence: Synthetic oligonucleotide
uccgcuuguugaggagccg

SEQ ID NO: 381045 - RNA, 19 nt, Artificial Sequence
  Description of Artificial Sequence: Synthetic oligonucleotide
ccaaggugggcccaucgag

SEQ ID NO: 381046 - RNA, 19 nt, Artificial Sequence
  Description of Artificial Sequence: Synthetic oligonucleotide
agugcgccggugguagcac

SEQ ID NO: 381047 - RNA, 19 nt, Artificial Sequence
  Description of Artificial Sequence: Synthetic oligonucleotide
gagcuuaagcacagcaucu

SEQ ID NO: 381048 - RNA, 19 nt, Artificial Sequence
  Description of Artificial Sequence: Synthetic oligonucleotide
gcagcgcuugccgugaugc

SEQ ID NO: 381049 - RNA, 19 nt, Artificial Sequence
  Description of Artificial Sequence: Synthetic oligonucleotide
cagagccuccgaacauugc

SEQ ID NO: 381050 - RNA, 19 nt, Artificial Sequence
  Description of Artificial Sequence: Synthetic oligonucleotide
cauacacauccaggacgcg

SEQ ID NO: 381051 - RNA, 19 nt, Artificial Sequence
  Description of Artificial Sequence: Synthetic oligonucleotide
gccuugcgcguccagaggc

SEQ ID NO: 381052 - RNA, 19 nt, Artificial Sequence
  Description of Artificial Sequence: Synthetic oligonucleotide
cuggacuauacagccucug

SEQ ID NO: 381053 - RNA, 19 nt, Artificial Sequence
  Description of Artificial Sequence: Synthetic oligonucleotide
gucuagaaguaaggccaag

SEQ ID NO: 381054 - RNA, 19 nt, Artificial Sequence
  Description of Artificial Sequence: Synthetic oligonucleotide
gggaugguucaugaacugc

SEQ ID NO: 381055 - RNA, 19 nt, Artificial Sequence
  Description of Artificial Sequence: Synthetic oligonucleotide
cuauuagcagagagggacu

SEQ ID NO: 381056 - RNA, 19 nt, Artificial Sequence
  Description of Artificial Sequence: Synthetic oligonucleotide
uguguaagucagggcugca

SEQ ID NO: 381057 - RNA, 19 nt, Artificial Sequence
  Description of Artificial Sequence: Synthetic oligonucleotide
gguugugacagggcgcuug

SEQ ID NO: 381058 - RNA, 19 nt, Artificial Sequence
  Description of Artificial Sequence: Synthetic oligonucleotide
acaaaaggauguacaugau

SEQ ID NO: 381059 - RNA, 19 nt, Artificial Sequence
  Description of Artificial Sequence: Synthetic oligonucleotide
gucugaucuagaguagaaa

SEQ ID NO: 381060 - RNA, 19 nt, Artificial Sequence
  Description of Artificial Sequence: Synthetic oligonucleotide
ggauaacugguagucguca

SEQ ID NO: 381061 - RNA, 19 nt, Artificial Sequence
  Description of Artificial Sequence: Synthetic oligonucleotide
ccucagagaccucugacca

SEQ ID NO: 381062 - RNA, 19 nt, Artificial Sequence
  Description of Artificial Sequence: Synthetic oligonucleotide
caagaagguaggcccuuga

SEQ ID NO: 381063 - RNA, 19 nt, Artificial Sequence
  Description of Artificial Sequence: Synthetic oligonucleotide
uuggcccaagcgaauccuu

SEQ ID NO: 381064 - RNA, 19 nt, Artificial Sequence
  Description of Artificial Sequence: Synthetic oligonucleotide
uccgaacauugcagucugu

SEQ ID NO: 381065 - RNA, 19 nt, Artificial Sequence
  Description of Artificial Sequence: Synthetic oligonucleotide
guauggaguggggucugug

SEQ ID NO: 381066 - RNA, 19 nt, Artificial Sequence
  Description of Artificial Sequence: Synthetic oligonucleotide
acuagaccucauacgcaug

SEQ ID NO: 381067 - RNA, 19 nt, Artificial Sequence
  Description of Artificial Sequence: Synthetic oligonucleotide
ccauauuggcccaagcgaa

SEQ ID NO: 381068 - RNA, 19 nt, Artificial Sequence
  Description of Artificial Sequence: Synthetic oligonucleotide
cuccacaacucccaguggu

SEQ ID NO: 381069 - RNA, 19 nt, Artificial Sequence
  Description of Artificial Sequence: Synthetic oligonucleotide
ggagccgguuguuagaggu

SEQ ID NO: 381070 - RNA, 19 nt, Artificial Sequence
  Description of Artificial Sequence: Synthetic oligonucleotide
ccaucgagugcaccuggcg

SEQ ID NO: 381071 - RNA, 19 nt, Artificial Sequence
  Description of Artificial Sequence: Synthetic oligonucleotide
uggcuaaaucuggggucag

SEQ ID NO: 381072 - RNA, 19 nt, Artificial Sequence
  Description of Artificial Sequence: Synthetic oligonucleotide
uguauggaguggggucugu

SEQ ID NO: 381073 - RNA, 19 nt, Artificial Sequence
  Description of Artificial Sequence: Synthetic oligonucleotide
gcccuugcuauuagcagag

SEQ ID NO: 381074 - RNA, 19 nt, Artificial Sequence
  Description of Artificial Sequence: Synthetic oligonucleotide
gcuaccccguacauggcag

SEQ ID NO: 381075 - RNA, 19 nt, Artificial Sequence
  Description of Artificial Sequence: Synthetic oligonucleotide
ugccgugaugcauguucuc

SEQ ID NO: 381076 - RNA, 19 nt, Artificial Sequence
  Description of Artificial Sequence: Synthetic oligonucleotide
gaaguaaggccaaguccua

SEQ ID NO: 381077 - RNA, 19 nt, Artificial Sequence
  Description of Artificial Sequence: Synthetic oligonucleotide
gucgucagucaccgcguac

SEQ ID NO: 381078 - RNA, 19 nt, Artificial Sequence
  Description of Artificial Sequence: Synthetic oligonucleotide
gggaguguaacaggguguc

SEQ ID NO: 381079 - RNA, 19 nt, Artificial Sequence
  Description of Artificial Sequence: Synthetic oligonucleotide
cucauacgcauggcucggc

SEQ ID NO: 381080 - RNA, 19 nt, Artificial Sequence
  Description of Artificial Sequence: Synthetic oligonucleotide
gggcacaagacuccccuuc

SEQ ID NO: 381081 - RNA, 19 nt, Artificial Sequence
  Description of Artificial Sequence: Synthetic oligonucleotide
cauugcagucuguccccuc

SEQ ID NO: 381082 - RNA, 19 nt, Artificial Sequence
  Description of Artificial Sequence: Synthetic oligonucleotide
cuugcgcguccagaggcac

SEQ ID NO: 381083 - RNA, 19 nt, Artificial Sequence
  Description of Artificial Sequence: Synthetic oligonucleotide
gaggacugguaugugggcu

SEQ ID NO: 381084 - RNA, 19 nt, Artificial Sequence
  Description of Artificial Sequence: Synthetic oligonucleotide
guaacagagggcuccccau

SEQ ID NO: 381085 - RNA, 19 nt, Artificial Sequence
  Description of Artificial Sequence: Synthetic oligonucleotide
agggcauuuugggugguuu

SEQ ID NO: 381086 - RNA, 19 nt, Artificial Sequence
  Description of Artificial Sequence: Synthetic oligonucleotide
auuagcagagagggacuuu

SEQ ID NO: 381087 - RNA, 19 nt, Artificial Sequence
  Description of Artificial Sequence: Synthetic oligonucleotide
gcagagagggacuuuucua

SEQ ID NO: 381088 - RNA, 19 nt, Artificial Sequence
  Description of Artificial Sequence: Synthetic oligonucleotide
aguaagcaggcuggacuau

SEQ ID NO: 381089 - RNA, 19 nt, Artificial Sequence
  Description of Artificial Sequence: Synthetic oligonucleotide
acgcauggcucggcagccc

SEQ ID NO: 381090 - RNA, 19 nt, Artificial Sequence
  Description of Artificial Sequence: Synthetic oligonucleotide
gcgaauccuucucuucaug

SEQ ID NO: 381091 - RNA, 19 nt, Artificial Sequence
  Description of Artificial Sequence: Synthetic oligonucleotide
ccuggucauaguccacccg

SEQ ID NO: 381092 - RNA, 19 nt, Artificial Sequence
  Description of Artificial Sequence: Synthetic oligonucleotide
auacagccucuggcagacc

SEQ ID NO: 381093 - RNA, 19 nt, Artificial Sequence
  Description of Artificial Sequence: Synthetic oligonucleotide
ggggucagcgaagaaggac

SEQ ID NO: 381094 - RNA, 19 nt, Artificial Sequence
  Description of Artificial Sequence: Synthetic oligonucleotide
gguaggcccuugauugucc

SEQ ID NO: 381095 - RNA, 19 nt, Artificial Sequence
  Description of Artificial Sequence: Synthetic oligonucleotide
uggccucacucaagccaca

SEQ ID NO: 381096 - RNA, 19 nt, Artificial Sequence
  Description of Artificial Sequence: Synthetic oligonucleotide
ggcggauuagcugcuuggc

SEQ ID NO: 381097 - RNA, 19 nt, Artificial Sequence
  Description of Artificial Sequence: Synthetic oligonucleotide
cagagccguggccucacuc

SEQ ID NO: 381098 - RNA, 19 nt, Artificial Sequence
  Description of Artificial Sequence: Synthetic oligonucleotide
cagaucuccccaagaaggu

SEQ ID NO: 381099 - RNA, 19 nt, Artificial Sequence
  Description of Artificial Sequence: Synthetic oligonucleotide
cacgggcgcuccgagguag

SEQ ID NO: 381100 - RNA, 19 nt, Artificial Sequence
  Description of Artificial Sequence: Synthetic oligonucleotide
gggcauuuugggugguuuc

SEQ ID NO: 381101 - RNA, 19 nt, Artificial Sequence
  Description of Artificial Sequence: Synthetic oligonucleotide
caccuggcggggcacaaga

SEQ ID NO: 381102 - RNA, 19 nt, Artificial Sequence
  Description of Artificial Sequence: Synthetic oligonucleotide
cacuugucaggucaucuau

SEQ ID NO: 381103 - RNA, 19 nt, Artificial Sequence
  Description of Artificial Sequence: Synthetic oligonucleotide
ccggugguagcacuccagc

SEQ ID NO: 381104 - RNA, 19 nt, Artificial Sequence
  Description of Artificial Sequence: Synthetic oligonucleotide
gaacugcaugauggucagc

SEQ ID NO: 381105 - RNA, 19 nt, Artificial Sequence
  Description of Artificial Sequence: Synthetic oligonucleotide
gcccaucgagugcaccugg

SEQ ID NO: 381106 - RNA, 19 nt, Artificial Sequence
  Description of Artificial Sequence: Synthetic oligonucleotide
cagagaccucugaccacuc

SEQ ID NO: 381107 - RNA, 19 nt, Artificial Sequence
  Description of Artificial Sequence: Synthetic oligonucleotide
cuaagguuucccagccagu

SEQ ID NO: 381108 - RNA, 19 nt, Artificial Sequence
  Description of Artificial Sequence: Synthetic oligonucleotide
ggcuaccccguacauggca

SEQ ID NO: 381109 - RNA, 19 nt, Artificial Sequence
  Description of Artificial Sequence: Synthetic oligonucleotide
gcggauuagcugcuuggca

SEQ ID NO: 381110 - RNA, 19 nt, Artificial Sequence
  Description of Artificial Sequence: Synthetic oligonucleotide
ggaggcuaccccguacaug

SEQ ID NO: 381111 - RNA, 19 nt, Artificial Sequence
  Description of Artificial Sequence: Synthetic oligonucleotide
cagucuguccccucuggcu

SEQ ID NO: 381112 - RNA, 19 nt, Artificial Sequence
  Description of Artificial Sequence: Synthetic oligonucleotide
cauauuggcccaagcgaau

SEQ ID NO: 381113 - RNA, 19 nt, Artificial Sequence
  Description of Artificial Sequence: Synthetic oligonucleotide
gcuccgagguagcccagcc

SEQ ID NO: 381114 - RNA, 19 nt, Artificial Sequence
  Description of Artificial Sequence: Synthetic oligonucleotide
ccgaacauugcagucuguc

SEQ ID NO: 381115 - RNA, 19 nt, Artificial Sequence
  Description of Artificial Sequence: Synthetic oligonucleotide
gagccgguuguuagagguc

SEQ ID NO: 381116 - RNA, 19 nt, Artificial Sequence
  Description of Artificial Sequence: Synthetic oligonucleotide
ggcuaaaucuggggucagc

SEQ ID NO: 381117 - RNA, 19 nt, Artificial Sequence
  Description of Artificial Sequence: Synthetic oligonucleotide
ccuccgcuuguugaggagc

SEQ ID NO: 381118 - RNA, 19 nt, Artificial Sequence
  Description of Artificial Sequence: Synthetic oligonucleotide
ccucauacgcauggcucgg

SEQ ID NO: 381119 - RNA, 19 nt, Artificial Sequence
  Description of Artificial Sequence: Synthetic oligonucleotide
gccgugaugcauguucuca

SEQ ID NO: 381120 - RNA, 19 nt, Artificial Sequence
  Description of Artificial Sequence: Synthetic oligonucleotide
cacaacucccaguggucua

SEQ ID NO: 381121 - RNA, 19 nt, Artificial Sequence
  Description of Artificial Sequence: Synthetic oligonucleotide
cugccucgccauccauggc

SEQ ID NO: 381122 - RNA, 19 nt, Artificial Sequence
  Description of Artificial Sequence: Synthetic oligonucleotide
acgggcgcuccgagguagc

SEQ ID NO: 381123 - RNA, 19 nt, Artificial Sequence
  Description of Artificial Sequence: Synthetic oligonucleotide
gcacuugucaggucaucua

SEQ ID NO: 381124 - RNA, 19 nt, Artificial Sequence
  Description of Artificial Sequence: Synthetic oligonucleotide
gagccacauaauagggagu

SEQ ID NO: 381125 - RNA, 19 nt, Artificial Sequence
  Description of Artificial Sequence: Synthetic oligonucleotide
ccacauaauagggagugua

SEQ ID NO: 381126 - RNA, 19 nt, Artificial Sequence
  Description of Artificial Sequence: Synthetic oligonucleotide
ccuccacaacucccagugg

SEQ ID NO: 381127 - RNA, 19 nt, Artificial Sequence
  Description of Artificial Sequence: Synthetic oligonucleotide
gcccaagcgaauccuucuc

SEQ ID NO: 381128 - RNA, 19 nt, Artificial Sequence
  Description of Artificial Sequence: Synthetic oligonucleotide
cccagugcgccggugguag

SEQ ID NO: 381129 - RNA, 19 nt, Artificial Sequence
  Description of Artificial Sequence: Synthetic oligonucleotide
aagcgaugcuggggaggga

SEQ ID NO: 381130 - RNA, 19 nt, Artificial Sequence
  Description of Artificial Sequence: Synthetic oligonucleotide
cccaucgagugcaccuggc

SEQ ID NO: 381131 - RNA, 19 nt, Artificial Sequence
  Description of Artificial Sequence: Synthetic oligonucleotide
gcgcuugccgugaugcaug

SEQ ID NO: 381132 - RNA, 19 nt, Artificial Sequence
  Description of Artificial Sequence: Synthetic oligonucleotide
acgucucggugggcgaugu

SEQ ID NO: 381133 - RNA, 19 nt, Artificial Sequence
  Description of Artificial Sequence: Synthetic oligonucleotide
ggcacaagacuccccuucu

SEQ ID NO: 381134 - RNA, 19 nt, Artificial Sequence
  Description of Artificial Sequence: Synthetic oligonucleotide
ggauggccgugccaauguc

SEQ ID NO: 381135 - RNA, 19 nt, Artificial Sequence
  Description of Artificial Sequence: Synthetic oligonucleotide
cagcgaagaaggacccucu

SEQ ID NO: 381136 - RNA, 19 nt, Artificial Sequence
  Description of Artificial Sequence: Synthetic oligonucleotide
accuggaggcuaccccgua

SEQ ID NO: 381137 - RNA, 19 nt, Artificial Sequence
  Description of Artificial Sequence: Synthetic oligonucleotide
agacagcaacauggccucu

SEQ ID NO: 381138 - RNA, 19 nt, Artificial Sequence
  Description of Artificial Sequence: Synthetic oligonucleotide
gcugcaccgcccagggaag

SEQ ID NO: 381139 - RNA, 19 nt, Artificial Sequence
  Description of Artificial Sequence: Synthetic oligonucleotide
cagcaguauuguccuagcu

SEQ ID NO: 381140 - RNA, 19 nt, Artificial Sequence
  Description of Artificial Sequence: Synthetic oligonucleotide
ggcccaucgagugcaccug

SEQ ID NO: 381141 - RNA, 19 nt, Artificial Sequence
  Description of Artificial Sequence: Synthetic oligonucleotide
ccgcguacuucuugggcuc

SEQ ID NO: 381142 - RNA, 19 nt, Artificial Sequence
  Description of Artificial Sequence: Synthetic oligonucleotide
auccagcaguauuguccua

SEQ ID NO: 381143 - RNA, 19 nt, Artificial Sequence
  Description of Artificial Sequence: Synthetic oligonucleotide
cagugcgccggugguagca

SEQ ID NO: 381144 - RNA, 19 nt, Artificial Sequence
  Description of Artificial Sequence: Synthetic oligonucleotide
ggcggggcacaagacuccc

SEQ ID NO: 381145 - RNA, 19 nt, Artificial Sequence
  Description of Artificial Sequence: Synthetic oligonucleotide
cccguacauggcagggcag

SEQ ID NO: 381146 - RNA, 19 nt, Artificial Sequence
  Description of Artificial Sequence: Synthetic oligonucleotide
ccuagcugauaugaucuaa

SEQ ID NO: 381147 - RNA, 19 nt, Artificial Sequence
  Description of Artificial Sequence: Synthetic oligonucleotide
gccggugguagcacuccag

SEQ ID NO: 381148 - RNA, 19 nt, Artificial Sequence
  Description of Artificial Sequence: Synthetic oligonucleotide
ccccguacauggcagggca

SEQ ID NO: 381149 - RNA, 19 nt, Artificial Sequence
  Description of Artificial Sequence: Synthetic oligonucleotide
ggcccaagcgaauccuucu

SEQ ID NO: 381150 - RNA, 19 nt, Artificial Sequence
  Description of Artificial Sequence: Synthetic oligonucleotide
gcacucccuuucacaaaag

SEQ ID NO: 381151 - RNA, 19 nt, Artificial Sequence
  Description of Artificial Sequence: Synthetic oligonucleotide
ccgagguagcccagccuug

SEQ ID NO: 381152 - RNA, 19 nt, Artificial Sequence
  Description of Artificial Sequence: Synthetic oligonucleotide
gggcccaucgagugcaccu

SEQ ID NO: 381153 - RNA, 19 nt, Artificial Sequence
  Description of Artificial Sequence: Synthetic oligonucleotide
ccuugccguucacacccag

SEQ ID NO: 381154 - RNA, 19 nt, Artificial Sequence
  Description of Artificial Sequence: Synthetic oligonucleotide
ccagagcuacugguuguug

SEQ ID NO: 381155 - RNA, 19 nt, Artificial Sequence
  Description of Artificial Sequence: Synthetic oligonucleotide
guagcccagccuugcgcgu

SEQ ID NO: 381156 - RNA, 19 nt, Artificial Sequence
  Description of Artificial Sequence: Synthetic oligonucleotide
ccgguuguuagaggucuuc

SEQ ID NO: 381157 - RNA, 19 nt, Artificial Sequence
  Description of Artificial Sequence: Synthetic oligonucleotide
agccucuggcagaccaaau

SEQ ID NO: 381158 - RNA, 19 nt, Artificial Sequence
  Description of Artificial Sequence: Synthetic oligonucleotide
accgcccaaggugggccca

SEQ ID NO: 381159 - RNA, 19 nt, Artificial Sequence
  Description of Artificial Sequence: Synthetic oligonucleotide
cacguuccuggauccugcu

SEQ ID NO: 381160 - RNA, 19 nt, Artificial Sequence
  Description of Artificial Sequence: Synthetic oligonucleotide
agccucucucucagugaaa

SEQ ID NO: 381161 - RNA, 19 nt, Artificial Sequence
  Description of Artificial Sequence: Synthetic oligonucleotide
gucagcgaagaaggacccu

SEQ ID NO: 381162 - RNA, 19 nt, Artificial Sequence
  Description of Artificial Sequence: Synthetic oligonucleotide
ccuugcgcguccagaggca

SEQ ID NO: 381163 - RNA, 19 nt, Artificial Sequence
  Description of Artificial Sequence: Synthetic oligonucleotide
ccguacauggcagggcaga

SEQ ID NO: 381164 - RNA, 19 nt, Artificial Sequence
  Description of Artificial Sequence: Synthetic oligonucleotide
ccuagggccugagcaccgc

SEQ ID NO: 381165 - RNA, 19 nt, Artificial Sequence
  Description of Artificial Sequence: Synthetic oligonucleotide
cuccgagguagcccagccu

SEQ ID NO: 381166 - RNA, 19 nt, Artificial Sequence
  Description of Artificial Sequence: Synthetic oligonucleotide
ccacccgcaugguggccag

SEQ ID NO: 381167 - RNA, 19 nt, Artificial Sequence
  Description of Artificial Sequence: Synthetic oligonucleotide
ccuccgaacauugcagucu

SEQ ID NO: 381168 - RNA, 19 nt, Artificial Sequence
  Description of Artificial Sequence: Synthetic oligonucleotide
aggcagcgcuugccgugau

SEQ ID NO: 381169 - RNA, 19 nt, Artificial Sequence
  Description of Artificial Sequence: Synthetic oligonucleotide
ccccacgggcgcuccgagg

SEQ ID NO: 381170 - RNA, 19 nt, Artificial Sequence
  Description of Artificial Sequence: Synthetic oligonucleotide
cgugaugcauguucucaua

SEQ ID NO: 381171 - RNA, 19 nt, Artificial Sequence
  Description of Artificial Sequence: Synthetic oligonucleotide
gcgccggugguagcacucc

SEQ ID NO: 381172 - RNA, 19 nt, Artificial Sequence
  Description of Artificial Sequence: Synthetic oligonucleotide
ccagccuugcgcguccaga

SEQ ID NO: 381173 - RNA, 19 nt, Artificial Sequence
  Description of Artificial Sequence: Synthetic oligonucleotide
ccaagcgaauccuucucuu

SEQ ID NO: 381174 - RNA, 19 nt, Artificial Sequence
  Description of Artificial Sequence: Synthetic oligonucleotide
ggaguguaacagggugucu

SEQ ID NO: 381175 - RNA, 19 nt, Artificial Sequence
  Description of Artificial Sequence: Synthetic oligonucleotide
gggcuguauggaguggggu

SEQ ID NO: 381176 - RNA, 19 nt, Artificial Sequence
  Description of Artificial Sequence: Synthetic oligonucleotide
gcuugacgucucggugggc

SEQ ID NO: 381177 - RNA, 19 nt, Artificial Sequence
  Description of Artificial Sequence: Synthetic oligonucleotide
gcguacuucuugggcucuc

SEQ ID NO: 381178 - RNA, 19 nt, Artificial Sequence
  Description of Artificial Sequence: Synthetic oligonucleotide
ccccaagaagguaggcccu

SEQ ID NO: 381179 - RNA, 19 nt, Artificial Sequence
  Description of Artificial Sequence: Synthetic oligonucleotide
ggugucugcagggcauuuu

SEQ ID NO: 381180 - RNA, 19 nt, Artificial Sequence
  Description of Artificial Sequence: Synthetic oligonucleotide
cagucaccgcguacuucuu

SEQ ID NO: 381181 - RNA, 19 nt, Artificial Sequence
  Description of Artificial Sequence: Synthetic oligonucleotide
ggggcacaagacuccccuu

SEQ ID NO: 381182 - RNA, 19 nt, Artificial Sequence
  Description of Artificial Sequence: Synthetic oligonucleotide
cgagugcaccuggcggggc

SEQ ID NO: 381183 - RNA, 19 nt, Artificial Sequence
  Description of Artificial Sequence: Synthetic oligonucleotide
cugcaccgcccagggaagu

SEQ ID NO: 381184 - RNA, 19 nt, Artificial Sequence
  Description of Artificial Sequence: Synthetic oligonucleotide
cgggcgcuccgagguagcc

SEQ ID NO: 381185 - RNA, 19 nt, Artificial Sequence
  Description of Artificial Sequence: Synthetic oligonucleotide
cccuugcuauuagcagaga

SEQ ID NO: 381186 - RNA, 19 nt, Artificial Sequence
  Description of Artificial Sequence: Synthetic oligonucleotide
cuguagcacucgggcugua

SEQ ID NO: 381187 - RNA, 19 nt, Artificial Sequence
  Description of Artificial Sequence: Synthetic oligonucleotide
ccaugacgaugaggaggca

SEQ ID NO: 381188 - RNA, 19 nt, Artificial Sequence
  Description of Artificial Sequence: Synthetic oligonucleotide
gcccagugcgccgguggua

SEQ ID NO: 381189 - RNA, 19 nt, Artificial Sequence
  Description of Artificial Sequence: Synthetic oligonucleotide
cgccggugguagcacucca

SEQ ID NO: 381190 - RNA, 19 nt, Artificial Sequence
  Description of Artificial Sequence: Synthetic oligonucleotide
ccacgggcgcuccgaggua

SEQ ID NO: 381191 - RNA, 19 nt, Artificial Sequence
  Description of Artificial Sequence: Synthetic oligonucleotide
cgcguacuucuugggcucu

SEQ ID NO: 381192 - RNA, 19 nt, Artificial Sequence
  Description of Artificial Sequence: Synthetic oligonucleotide
ccgcccaaggugggcccau

SEQ ID NO: 381193 - RNA, 19 nt, Artificial Sequence
  Description of Artificial Sequence: Synthetic oligonucleotide
uguaagaccacaaacauug

SEQ ID NO: 381194 - RNA, 19 nt, Artificial Sequence
  Description of Artificial Sequence: Synthetic oligonucleotide
aauaaucugaguccagugg

SEQ ID NO: 381195 - RNA, 19 nt, Artificial Sequence
  Description of Artificial Sequence: Synthetic oligonucleotide
ucaaguaugaagaacaaau

SEQ ID NO: 381196 - RNA, 19 nt, Artificial Sequence
  Description of Artificial Sequence: Synthetic oligonucleotide
uuagguaaggcucaaagac

SEQ ID NO: 381197 - RNA, 19 nt, Artificial Sequence
  Description of Artificial Sequence: Synthetic oligonucleotide
ugauagcugacuuugaucc

SEQ ID NO: 381198 - RNA, 19 nt, Artificial Sequence
  Description of Artificial Sequence: Synthetic oligonucleotide
aaguauuccgcuuauuaag

SEQ ID NO: 381199 - RNA, 19 nt, Artificial Sequence
  Description of Artificial Sequence: Synthetic oligonucleotide
auaaugauaacuguguuag

SEQ ID NO: 381200 - RNA, 19 nt, Artificial Sequence
  Description of Artificial Sequence: Synthetic oligonucleotide
uauacgaucguacaugugu

SEQ ID NO: 381201 - RNA, 19 nt, Artificial Sequence
  Description of Artificial Sequence: Synthetic oligonucleotide
uguuguaagaccacaaaca

SEQ ID NO: 381202 - RNA, 19 nt, Artificial Sequence
  Description of Artificial Sequence: Synthetic oligonucleotide
aaaaguauacaugaggccu

SEQ ID NO: 381203 - RNA, 19 nt, Artificial Sequence
  Description of Artificial Sequence: Synthetic oligonucleotide
ucauauuuaagauaucagu

SEQ ID NO: 381204 - RNA, 19 nt, Artificial Sequence
  Description of Artificial Sequence: Synthetic oligonucleotide
accuguaucagguaccagc

SEQ ID NO: 381205 - RNA, 19 nt, Artificial Sequence
  Description of Artificial Sequence: Synthetic oligonucleotide
aaaguuuauuauuuccugu

SEQ ID NO: 381206 - RNA, 19 nt, Artificial Sequence
  Description of Artificial Sequence: Synthetic oligonucleotide
augaaagacauauagguau

SEQ ID NO: 381207 - RNA, 19 nt, Artificial Sequence
  Description of Artificial Sequence: Synthetic oligonucleotide
aacacgucaaggaagauug

SEQ ID NO: 381208 - RNA, 19 nt, Artificial Sequence
  Description of Artificial Sequence: Synthetic oligonucleotide
ucuauugggccuaagguac

SEQ ID NO: 381209 - RNA, 19 nt, Artificial Sequence
  Description of Artificial Sequence: Synthetic oligonucleotide
aaauaaucugaguccagug

SEQ ID NO: 381210 - RNA, 19 nt, Artificial Sequence
  Description of Artificial Sequence: Synthetic oligonucleotide
cauaaagaguuuuccaucc

SEQ ID NO: 381211 - RNA, 19 nt, Artificial Sequence
  Description of Artificial Sequence: Synthetic oligonucleotide
aucguuaguauucugcauc

SEQ ID NO: 381212 - RNA, 19 nt, Artificial Sequence
  Description of Artificial Sequence: Synthetic oligonucleotide
ucaauuguugaaaagcuua

SEQ ID NO: 381213 - RNA, 19 nt, Artificial Sequence
  Description of Artificial Sequence: Synthetic oligonucleotide
auuuauaguauuguacagg

SEQ ID NO: 381214 - RNA, 19 nt, Artificial Sequence
  Description of Artificial Sequence: Synthetic oligonucleotide
guuauccauagacaaacgg

SEQ ID NO: 381215 - RNA, 19 nt, Artificial Sequence
  Description of Artificial Sequence: Synthetic oligonucleotide
uuaaugacuucucauugga

SEQ ID NO: 381216 - RNA, 19 nt, Artificial Sequence
  Description of Artificial Sequence: Synthetic oligonucleotide
ucuggguugucaucgaggg

SEQ ID NO: 381217 - RNA, 19 nt, Artificial Sequence
  Description of Artificial Sequence: Synthetic oligonucleotide
uugauccuaauccuaacug

SEQ ID NO: 381218 - RNA, 19 nt, Artificial Sequence
  Description of Artificial Sequence: Synthetic oligonucleotide
ugauguuaucuuuaggugu

SEQ ID NO: 381219 - RNA, 19 nt, Artificial Sequence
  Description of Artificial Sequence: Synthetic oligonucleotide
ugacauccgauuaaagaag

SEQ ID NO: 381220 - RNA, 19 nt, Artificial Sequence
  Description of Artificial Sequence: Synthetic oligonucleotide
uagacaaacggaaaggaau

SEQ ID NO: 381221 - RNA, 19 nt, Artificial Sequence
  Description of Artificial Sequence: Synthetic oligonucleotide
uauugcacuaagucguggg

SEQ ID NO: 381222 - RNA, 19 nt, Artificial Sequence
  Description of Artificial Sequence: Synthetic oligonucleotide
aauuugaugaaaagugucu

SEQ ID NO: 381223 - RNA, 19 nt, Artificial Sequence
  Description of Artificial Sequence: Synthetic oligonucleotide
aguaguuucaccaagguuu

SEQ ID NO: 381224 - RNA, 19 nt, Artificial Sequence
  Description of Artificial Sequence: Synthetic oligonucleotide
uguaucagguaccagcgac

SEQ ID NO: 381225 - RNA, 19 nt, Artificial Sequence
  Description of Artificial Sequence: Synthetic oligonucleotide
aaaauaaucugaguccagu

SEQ ID NO: 381226 - RNA, 19 nt, Artificial Sequence
  Description of Artificial Sequence: Synthetic oligonucleotide
uuaagagcuuuaaugcaug

SEQ ID NO: 381227 - RNA, 19 nt, Artificial Sequence
  Description of Artificial Sequence: Synthetic oligonucleotide
uuugauccuaauccuaacu

SEQ ID NO: 381228 - RNA, 19 nt, Artificial Sequence
  Description of Artificial Sequence: Synthetic oligonucleotide
ugaaagacauauagguaug

SEQ ID NO: 381229 - RNA, 19 nt, Artificial Sequence
  Description of Artificial Sequence: Synthetic oligonucleotide
aacugcucuuuauacgauc

SEQ ID NO: 381230 - RNA, 19 nt, Artificial Sequence
  Description of Artificial Sequence: Synthetic oligonucleotide
uuuauacgaucguacaugu

SEQ ID NO: 381231 - RNA, 19 nt, Artificial Sequence
  Description of Artificial Sequence: Synthetic oligonucleotide
uaguuauccauagacaaac

SEQ ID NO: 381232 - RNA, 19 nt, Artificial Sequence
  Description of Artificial Sequence: Synthetic oligonucleotide
guuaaggccaaacacguca

SEQ ID NO: 381233 - RNA, 19 nt, Artificial Sequence
  Description of Artificial Sequence: Synthetic oligonucleotide
uccgauuaaagaaggaaau

SEQ ID NO: 381234 - RNA, 19 nt, Artificial Sequence
  Description of Artificial Sequence: Synthetic oligonucleotide
uccuuaauacgcucaauga

SEQ ID NO: 381235 - RNA, 19 nt, Artificial Sequence
  Description of Artificial Sequence: Synthetic oligonucleotide
aaaccagaauuuacuaggg

SEQ ID NO: 381236 - RNA, 19 nt, Artificial Sequence
  Description of Artificial Sequence: Synthetic oligonucleotide
cuuuauacgaucguacaug

SEQ ID NO: 381237 - RNA, 19 nt, Artificial Sequence
  Description of Artificial Sequence: Synthetic oligonucleotide
gaagaguccguuugaguag

SEQ ID NO: 381238 - RNA, 19 nt, Artificial Sequence
  Description of Artificial Sequence: Synthetic oligonucleotide
cuuuagguguaaagaagcc

SEQ ID NO: 381239 - RNA, 19 nt, Artificial Sequence
  Description of Artificial Sequence: Synthetic oligonucleotide
ucuuuauacgaucguacau

SEQ ID NO: 381240 - RNA, 19 nt, Artificial Sequence
  Description of Artificial Sequence: Synthetic oligonucleotide
uccauccucaguuaaugca

SEQ ID NO: 381241 - RNA, 19 nt, Artificial Sequence
  Description of Artificial Sequence: Synthetic oligonucleotide
gacauccgauuaaagaagg

SEQ ID NO: 381242 - RNA, 19 nt, Artificial Sequence
  Description of Artificial Sequence: Synthetic oligonucleotide
uuaauacgcucaaugacuu

SEQ ID NO: 381243 - RNA, 19 nt, Artificial Sequence
  Description of Artificial Sequence: Synthetic oligonucleotide
agaacccgcacuuagguaa

SEQ ID NO: 381244 - RNA, 19 nt, Artificial Sequence
  Description of Artificial Sequence: Synthetic oligonucleotide
gaauugucaccccacauaa

SEQ ID NO: 381245 - RNA, 19 nt, Artificial Sequence
  Description of Artificial Sequence: Synthetic oligonucleotide
aacuguguuagcaaaacua

SEQ ID NO: 381246 - RNA, 19 nt, Artificial Sequence
  Description of Artificial Sequence: Synthetic oligonucleotide
uuuaugcaacacugaacag

SEQ ID NO: 381247 - RNA, 19 nt, Artificial Sequence
  Description of Artificial Sequence: Synthetic oligonucleotide
auagaacccgcacuuaggu

SEQ ID NO: 381248 - RNA, 19 nt, Artificial Sequence
  Description of Artificial Sequence: Synthetic oligonucleotide
cauagaacccgcacuuagg

SEQ ID NO: 381249 - RNA, 19 nt, Artificial Sequence
  Description of Artificial Sequence: Synthetic oligonucleotide
uccgccaugccgaaaaccu

SEQ ID NO: 381250 - RNA, 19 nt, Artificial Sequence
  Description of Artificial Sequence: Synthetic oligonucleotide
aguccccucuaauggaggc

SEQ ID NO: 381251 - RNA, 19 nt, Artificial Sequence
  Description of Artificial Sequence: Synthetic oligonucleotide
gccaauuugaugaaaagug

SEQ ID NO: 381252 - RNA, 19 nt, Artificial Sequence
  Description of Artificial Sequence: Synthetic oligonucleotide
ugacuuugauccuaauccu

SEQ ID NO: 381253 - RNA, 19 nt, Artificial Sequence
  Description of Artificial Sequence: Synthetic oligonucleotide
ugauugaucagcagcugau

SEQ ID NO: 381254 - RNA, 19 nt, Artificial Sequence
  Description of Artificial Sequence: Synthetic oligonucleotide
cuuaauacgcucaaugacu

SEQ ID NO: 381255 - RNA, 19 nt, Artificial Sequence
  Description of Artificial Sequence: Synthetic oligonucleotide
ucuauugcacuaagucgug

SEQ ID NO: 381256 - RNA, 19 nt, Artificial Sequence
  Description of Artificial Sequence: Synthetic oligonucleotide
aaccagaauuuacuaggga

SEQ ID NO: 381257 - RNA, 19 nt, Artificial Sequence
  Description of Artificial Sequence: Synthetic oligonucleotide
ugucaaugacauccgauua

SEQ ID NO: 381258 - RNA, 19 nt, Artificial Sequence
  Description of Artificial Sequence: Synthetic oligonucleotide
aauccuaacugaccccagu

SEQ ID NO: 381259 - RNA, 19 nt, Artificial Sequence
  Description of Artificial Sequence: Synthetic oligonucleotide
aaccaaucugcccuucaga

SEQ ID NO: 381260 - RNA, 19 nt, Artificial Sequence
  Description of Artificial Sequence: Synthetic oligonucleotide
cuaagguacugcccuagcc

SEQ ID NO: 381261 - RNA, 19 nt, Artificial Sequence
  Description of Artificial Sequence: Synthetic oligonucleotide
uucggguuccuacaguuuc

SEQ ID NO: 381262 - RNA, 19 nt, Artificial Sequence
  Description of Artificial Sequence: Synthetic oligonucleotide
gauccuaauccuaacugac

SEQ ID NO: 381263 - RNA, 19 nt, Artificial Sequence
  Description of Artificial Sequence: Synthetic oligonucleotide
augggcauagaacccgcac

SEQ ID NO: 381264 - RNA, 19 nt, Artificial Sequence
  Description of Artificial Sequence: Synthetic oligonucleotide
uugcugauagcugacuuug

SEQ ID NO: 381265 - RNA, 19 nt, Artificial Sequence
  Description of Artificial Sequence: Synthetic oligonucleotide
ugcacuaagucguggggug

SEQ ID NO: 381266 - RNA, 19 nt, Artificial Sequence
  Description of Artificial Sequence: Synthetic oligonucleotide
guaccagcgacucaggcuc

SEQ ID NO: 381267 - RNA, 19 nt, Artificial Sequence
  Description of Artificial Sequence: Synthetic oligonucleotide
acgacuuuaucugugagaa

SEQ ID NO: 381268 - RNA, 19 nt, Artificial Sequence
  Description of Artificial Sequence: Synthetic oligonucleotide
uauuccgcuuauuaagaau

SEQ ID NO: 381269 - RNA, 19 nt, Artificial Sequence
  Description of Artificial Sequence: Synthetic oligonucleotide
uacgcucaaugacuuuggg

SEQ ID NO: 381270 - RNA, 19 nt, Artificial Sequence
  Description of Artificial Sequence: Synthetic oligonucleotide
agauuggagguacaaguau

SEQ ID NO: 381271 - RNA, 19 nt, Artificial Sequence
  Description of Artificial Sequence: Synthetic oligonucleotide
ugcccuucagaauugucac

SEQ ID NO: 381272 - RNA, 19 nt, Artificial Sequence
  Description of Artificial Sequence: Synthetic oligonucleotide
aucaguaguuucaccaagg

SEQ ID NO: 381273 - RNA, 19 nt, Artificial Sequence
  Description of Artificial Sequence: Synthetic oligonucleotide
agacauauagguaugucau

SEQ ID NO: 381274 - RNA, 19 nt, Artificial Sequence
  Description of Artificial Sequence: Synthetic oligonucleotide
uuuuccaugucggccaucu

SEQ ID NO: 381275 - RNA, 19 nt, Artificial Sequence
  Description of Artificial Sequence: Synthetic oligonucleotide
ucguacauguguccuuuug

SEQ ID NO: 381276 - RNA, 19 nt, Artificial Sequence
  Description of Artificial Sequence: Synthetic oligonucleotide
uugucaccccacauaaaga

SEQ ID NO: 381277 - RNA, 19 nt, Artificial Sequence
  Description of Artificial Sequence: Synthetic oligonucleotide
uacuagggauauuuucagc

SEQ ID NO: 381278 - RNA, 19 nt, Artificial Sequence
  Description of Artificial Sequence: Synthetic oligonucleotide
gguaauauccacaagagau

SEQ ID NO: 381279 - RNA, 19 nt, Artificial Sequence
  Description of Artificial Sequence: Synthetic oligonucleotide
uguugaaacuagggugugg

SEQ ID NO: 381280 - RNA, 19 nt, Artificial Sequence
  Description of Artificial Sequence: Synthetic oligonucleotide
aggcauacacgacuuuauc

SEQ ID NO: 381281 - RNA, 19 nt, Artificial Sequence
  Description of Artificial Sequence: Synthetic oligonucleotide
aggccuauaucugucauca

SEQ ID NO: 381282 - RNA, 19 nt, Artificial Sequence
  Description of Artificial Sequence: Synthetic oligonucleotide
cugauagcugacuuugauc

SEQ ID NO: 381283 - RNA, 19 nt, Artificial Sequence
  Description of Artificial Sequence: Synthetic oligonucleotide
uuuugacccaugugguucu

SEQ ID NO: 381284 - RNA, 19 nt, Artificial Sequence
  Description of Artificial Sequence: Synthetic oligonucleotide
uucugaccugucaaugaca

SEQ ID NO: 381285 - RNA, 19 nt, Artificial Sequence
  Description of Artificial Sequence: Synthetic oligonucleotide
uuauacgaucguacaugug

SEQ ID NO: 381286 - RNA, 19 nt, Artificial Sequence
  Description of Artificial Sequence: Synthetic oligonucleotide
uacgaucguacaugugucc

SEQ ID NO: 381287 - RNA, 19 nt, Artificial Sequence
  Description of Artificial Sequence: Synthetic oligonucleotide
caacggucacuucaugagg

SEQ ID NO: 381288 - RNA, 19 nt, Artificial Sequence
  Description of Artificial Sequence: Synthetic oligonucleotide
auacgaucguacauguguc

SEQ ID NO: 381289 - RNA, 19 nt, Artificial Sequence
  Description of Artificial Sequence: Synthetic oligonucleotide
uuauaguauuguacaggau

SEQ ID NO: 381290 - RNA, 19 nt, Artificial Sequence
  Description of Artificial Sequence: Synthetic oligonucleotide
uuguaagaccacaaacauu

SEQ ID NO: 381291 - RNA, 19 nt, Artificial Sequence
  Description of Artificial Sequence: Synthetic oligonucleotide
ggagguacaaguauuccgc

SEQ ID NO: 381292 - RNA, 19 nt, Artificial Sequence
  Description of Artificial Sequence: Synthetic oligonucleotide
cauuggcuuaggaaauuac

SEQ ID NO: 381293 - RNA, 19 nt, Artificial Sequence
  Description of Artificial Sequence: Synthetic oligonucleotide
uugggccuaagguacugcc

SEQ ID NO: 381294 - RNA, 19 nt, Artificial Sequence
  Description of Artificial Sequence: Synthetic oligonucleotide
aguauuccgcuuauuaaga

SEQ ID NO: 381295 - RNA, 19 nt, Artificial Sequence
  Description of Artificial Sequence: Synthetic oligonucleotide
gaauuuacuagggauauuu

SEQ ID NO: 381296 - RNA, 19 nt, Artificial Sequence
  Description of Artificial Sequence: Synthetic oligonucleotide
uaauccuaacugaccccag

SEQ ID NO: 381297 - RNA, 19 nt, Artificial Sequence
  Description of Artificial Sequence: Synthetic oligonucleotide
agacgugcugauaaagauc

SEQ ID NO: 381298 - RNA, 19 nt, Artificial Sequence
  Description of Artificial Sequence: Synthetic oligonucleotide
gacgugcugauaaagaucu

SEQ ID NO: 381299 - RNA, 19 nt, Artificial Sequence
  Description of Artificial Sequence: Synthetic oligonucleotide
accauugaagcagaacaug

SEQ ID NO: 381300 - RNA, 19 nt, Artificial Sequence
  Description of Artificial Sequence: Synthetic oligonucleotide
agcaggggcgacucuauug

SEQ ID NO: 381301 - RNA, 19 nt, Artificial Sequence
  Description of Artificial Sequence: Synthetic oligonucleotide
acaggcuaccugaaucacc

SEQ ID NO: 381302 - RNA, 19 nt, Artificial Sequence
  Description of Artificial Sequence: Synthetic oligonucleotide
acaaacggaaaggaauuga

SEQ ID NO: 381303 - RNA, 19 nt, Artificial Sequence
  Description of Artificial Sequence: Synthetic oligonucleotide
aaaguauacaugaggccua

SEQ ID NO: 381304 - RNA, 19 nt, Artificial Sequence
  Description of Artificial Sequence: Synthetic oligonucleotide
acgucaaggaagauuggag

SEQ ID NO: 381305 - RNA, 19 nt, Artificial Sequence
  Description of Artificial Sequence: Synthetic oligonucleotide
uaguauuguacaggauuug

SEQ ID NO: 381306 - RNA, 19 nt, Artificial Sequence
  Description of Artificial Sequence: Synthetic oligonucleotide
uccccucuaauggaggcag

SEQ ID NO: 381307 - RNA, 19 nt, Artificial Sequence
  Description of Artificial Sequence: Synthetic oligonucleotide
ugggccuaagguacugccc

SEQ ID NO: 381308 - RNA, 19 nt, Artificial Sequence
  Description of Artificial Sequence: Synthetic oligonucleotide
auuccgcuuauuaagaaua

SEQ ID NO: 381309 - RNA, 19 nt, Artificial Sequence
  Description of Artificial Sequence: Synthetic oligonucleotide
aagauuggagguacaagua

SEQ ID NO: 381310 - RNA, 19 nt, Artificial Sequence
  Description of Artificial Sequence: Synthetic oligonucleotide
auccgauuaaagaaggaaa

SEQ ID NO: 381311 - RNA, 19 nt, Artificial Sequence
  Description of Artificial Sequence: Synthetic oligonucleotide
ugugauugaucagcagcug

SEQ ID NO: 381312 - RNA, 19 nt, Artificial Sequence
  Description of Artificial Sequence: Synthetic oligonucleotide
cugcccuucagaauuguca

SEQ ID NO: 381313 - RNA, 19 nt, Artificial Sequence
  Description of Artificial Sequence: Synthetic oligonucleotide
gcaggggcgacucuauugg

SEQ ID NO: 381314 - RNA, 19 nt, Artificial Sequence
  Description of Artificial Sequence: Synthetic oligonucleotide
aucugugauugaucagcag

SEQ ID NO: 381315 - RNA, 19 nt, Artificial Sequence
  Description of Artificial Sequence: Synthetic oligonucleotide
gugauugaucagcagcuga

SEQ ID NO: 381316 - RNA, 19 nt, Artificial Sequence
  Description of Artificial Sequence: Synthetic oligonucleotide
cuaauccuaacugacccca

SEQ ID NO: 381317 - RNA, 19 nt, Artificial Sequence
  Description of Artificial Sequence: Synthetic oligonucleotide
uugcacuaagucguggggu

SEQ ID NO: 381318 - RNA, 19 nt, Artificial Sequence
  Description of Artificial Sequence: Synthetic oligonucleotide
cucuauugggccuaaggua

SEQ ID NO: 381319 - RNA, 19 nt, Artificial Sequence
  Description of Artificial Sequence: Synthetic oligonucleotide
ggaucguuaguauucugca

SEQ ID NO: 381320 - RNA, 19 nt, Artificial Sequence
  Description of Artificial Sequence: Synthetic oligonucleotide
uuccucuauugcacuaagu

SEQ ID NO: 381321 - RNA, 19 nt, Artificial Sequence
  Description of Artificial Sequence: Synthetic oligonucleotide
uguaccugcuucggaaaga

SEQ ID NO: 381322 - RNA, 19 nt, Artificial Sequence
  Description of Artificial Sequence: Synthetic oligonucleotide
ccaacggucacuucaugag

SEQ ID NO: 381323 - RNA, 19 nt, Artificial Sequence
  Description of Artificial Sequence: Synthetic oligonucleotide
aggcuauuugaucuccuau

SEQ ID NO: 381324 - RNA, 19 nt, Artificial Sequence
  Description of Artificial Sequence: Synthetic oligonucleotide
acuuugauccuaauccuaa

SEQ ID NO: 381325 - RNA, 19 nt, Artificial Sequence
  Description of Artificial Sequence: Synthetic oligonucleotide
aggggcgacucuauugggc

SEQ ID NO: 381326 - RNA, 19 nt, Artificial Sequence
  Description of Artificial Sequence: Synthetic oligonucleotide
ccauagacaaacggaaagg

SEQ ID NO: 381327 - RNA, 19 nt, Artificial Sequence
  Description of Artificial Sequence: Synthetic oligonucleotide
acgaagaguccguuugagu

SEQ ID NO: 381328 - RNA, 19 nt, Artificial Sequence
  Description of Artificial Sequence: Synthetic oligonucleotide
agaaaagugccaaggccca

SEQ ID NO: 381329 - RNA, 19 nt, Artificial Sequence
  Description of Artificial Sequence: Synthetic oligonucleotide
ccgcuuauuaagaauauga

SEQ ID NO: 381330 - RNA, 19 nt, Artificial Sequence
  Description of Artificial Sequence: Synthetic oligonucleotide
ccuaauuuuccaugucggc

SEQ ID NO: 381331 - RNA, 19 nt, Artificial Sequence
  Description of Artificial Sequence: Synthetic oligonucleotide
aguggaucguuaguauucu

SEQ ID NO: 381332 - RNA, 19 nt, Artificial Sequence
  Description of Artificial Sequence: Synthetic oligonucleotide
ggaacucaggucuaucaca

SEQ ID NO: 381333 - RNA, 19 nt, Artificial Sequence
  Description of Artificial Sequence: Synthetic oligonucleotide
uaagucgugggguggcaaa

SEQ ID NO: 381334 - RNA, 19 nt, Artificial Sequence
  Description of Artificial Sequence: Synthetic oligonucleotide
uucgccgcagacgugcuga

SEQ ID NO: 381335 - RNA, 19 nt, Artificial Sequence
  Description of Artificial Sequence: Synthetic oligonucleotide
ucggguuccuacaguuucu

SEQ ID NO: 381336 - RNA, 19 nt, Artificial Sequence
  Description of Artificial Sequence: Synthetic oligonucleotide
cgcuuauuaagaauaugag

SEQ ID NO: 381337 - RNA, 19 nt, Artificial Sequence
  Description of Artificial Sequence: Synthetic oligonucleotide
ucgagggcaucaauaguuu

SEQ ID NO: 381338 - RNA, 19 nt, Artificial Sequence
  Description of Artificial Sequence: Synthetic oligonucleotide
ugcugauagcugacuuuga

SEQ ID NO: 381339 - RNA, 19 nt, Artificial Sequence
  Description of Artificial Sequence: Synthetic oligonucleotide
cauccgauuaaagaaggaa

SEQ ID NO: 381340 - RNA, 19 nt, Artificial Sequence
  Description of Artificial Sequence: Synthetic oligonucleotide
acccgcacuuagguaaggc

SEQ ID NO: 381341 - RNA, 19 nt, Artificial Sequence
  Description of Artificial Sequence: Synthetic oligonucleotide
auacacgacuuuaucugug

SEQ ID NO: 381342 - RNA, 19 nt, Artificial Sequence
  Description of Artificial Sequence: Synthetic oligonucleotide
uucaaaccaaucugcccuu

SEQ ID NO: 381343 - RNA, 19 nt, Artificial Sequence
  Description of Artificial Sequence: Synthetic oligonucleotide
aguuaaggccaaacacguc

SEQ ID NO: 381344 - RNA, 19 nt, Artificial Sequence
  Description of Artificial Sequence: Synthetic oligonucleotide
acgaucguacauguguccu

SEQ ID NO: 381345 - RNA, 19 nt, Artificial Sequence
  Description of Artificial Sequence: Synthetic oligonucleotide
guugaaacuaggguguggu

SEQ ID NO: 381346 - RNA, 19 nt, Artificial Sequence
  Description of Artificial Sequence: Synthetic oligonucleotide
guauuccgcuuauuaagaa

SEQ ID NO: 381347 - RNA, 19 nt, Artificial Sequence
  Description of Artificial Sequence: Synthetic oligonucleotide
ggggcgacucuauugggcc

SEQ ID NO: 381348 - RNA, 19 nt, Artificial Sequence
  Description of Artificial Sequence: Synthetic oligonucleotide
cccaucgcgacccucuugg

SEQ ID NO: 381349 - RNA, 19 nt, Artificial Sequence
  Description of Artificial Sequence: Synthetic oligonucleotide
cagguucggguuccuacag

SEQ ID NO: 381350 - RNA, 19 nt, Artificial Sequence
  Description of Artificial Sequence: Synthetic oligonucleotide
ccuaauccuaacugacccc

SEQ ID NO: 381351 - RNA, 19 nt, Artificial Sequence
  Description of Artificial Sequence: Synthetic oligonucleotide
uagaacccgcacuuaggua

SEQ ID NO: 381352 - RNA, 19 nt, Artificial Sequence
  Description of Artificial Sequence: Synthetic oligonucleotide
caggcuaccugaaucaccu

SEQ ID NO: 381353 - RNA, 19 nt, Artificial Sequence
  Description of Artificial Sequence: Synthetic oligonucleotide
gaacccgcacuuagguaag

SEQ ID NO: 381354 - RNA, 19 nt, Artificial Sequence
  Description of Artificial Sequence: Synthetic oligonucleotide
gauuggcuucccaacgguc

SEQ ID NO: 381355 - RNA, 19 nt, Artificial Sequence
  Description of Artificial Sequence: Synthetic oligonucleotide
gaauuucggaagaacugcu

SEQ ID NO: 381356 - RNA, 19 nt, Artificial Sequence
  Description of Artificial Sequence: Synthetic oligonucleotide
ggcauacacgacuuuaucu

SEQ ID NO: 381357 - RNA, 19 nt, Artificial Sequence
  Description of Artificial Sequence: Synthetic oligonucleotide
cauauagguaugucauucu

SEQ ID NO: 381358 - RNA, 19 nt, Artificial Sequence
  Description of Artificial Sequence: Synthetic oligonucleotide
agguguaaagaagccaauu

SEQ ID NO: 381359 - RNA, 19 nt, Artificial Sequence
  Description of Artificial Sequence: Synthetic oligonucleotide
aacccgcacuuagguaagg

SEQ ID NO: 381360 - RNA, 19 nt, Artificial Sequence
  Description of Artificial Sequence: Synthetic oligonucleotide
acaagagauccaugagauu

SEQ ID NO: 381361 - RNA, 19 nt, Artificial Sequence
  Description of Artificial Sequence: Synthetic oligonucleotide
uaauacgcucaaugacuuu

SEQ ID NO: 381362 - RNA, 19 nt, Artificial Sequence
  Description of Artificial Sequence: Synthetic oligonucleotide
cacuaagucgugggguggc

SEQ ID NO: 381363 - RNA, 19 nt, Artificial Sequence
  Description of Artificial Sequence: Synthetic oligonucleotide
gacuuugauccuaauccua

SEQ ID NO: 381364 - RNA, 19 nt, Artificial Sequence
  Description of Artificial Sequence: Synthetic oligonucleotide
gaacucaggucuaucacau

SEQ ID NO: 381365 - RNA, 19 nt, Artificial Sequence
  Description of Artificial Sequence: Synthetic oligonucleotide
caggggcgacucuauuggg

SEQ ID NO: 381366 - RNA, 19 nt, Artificial Sequence
  Description of Artificial Sequence: Synthetic oligonucleotide
acggucacuucaugaggga

SEQ ID NO: 381367 - RNA, 19 nt, Artificial Sequence
  Description of Artificial Sequence: Synthetic oligonucleotide
gguguaaagaagccaauuu

SEQ ID NO: 381368 - RNA, 19 nt, Artificial Sequence
  Description of Artificial Sequence: Synthetic oligonucleotide
gaucguuaguauucugcau

SEQ ID NO: 381369 - RNA, 19 nt, Artificial Sequence
  Description of Artificial Sequence: Synthetic oligonucleotide
gcaaaacuaugaaauaucu

SEQ ID NO: 381370 - RNA, 19 nt, Artificial Sequence
  Description of Artificial Sequence: Synthetic oligonucleotide
aagucgugggguggcaaaa

SEQ ID NO: 381371 - RNA, 19 nt, Artificial Sequence
  Description of Artificial Sequence: Synthetic oligonucleotide
guuugaguaggcugacacu

SEQ ID NO: 381372 - RNA, 19 nt, Artificial Sequence
  Description of Artificial Sequence: Synthetic oligonucleotide
acauuggcuuaggaaauua

SEQ ID NO: 381373 - RNA, 19 nt, Artificial Sequence
  Description of Artificial Sequence: Synthetic oligonucleotide
cacgucaaggaagauugga

SEQ ID NO: 381374 - RNA, 19 nt, Artificial Sequence
  Description of Artificial Sequence: Synthetic oligonucleotide
gauuuugacccaugugguu

SEQ ID NO: 381375 - RNA, 19 nt, Artificial Sequence
  Description of Artificial Sequence: Synthetic oligonucleotide
ccgcacuuagguaaggcuc

SEQ ID NO: 381376 - RNA, 19 nt, Artificial Sequence
  Description of Artificial Sequence: Synthetic oligonucleotide
agguucggguuccuacagu

SEQ ID NO: 381377 - RNA, 19 nt, Artificial Sequence
  Description of Artificial Sequence: Synthetic oligonucleotide
acauccgauuaaagaagga

SEQ ID NO: 381378 - RNA, 19 nt, Artificial Sequence
  Description of Artificial Sequence: Synthetic oligonucleotide
uaccagcgacucaggcucc

SEQ ID NO: 381379 - RNA, 19 nt, Artificial Sequence
  Description of Artificial Sequence: Synthetic oligonucleotide
uguacaggauuuggacuuu

SEQ ID NO: 381380 - RNA, 19 nt, Artificial Sequence
  Description of Artificial Sequence: Synthetic oligonucleotide
uggggugaucugugauuga

SEQ ID NO: 381381 - RNA, 19 nt, Artificial Sequence
  Description of Artificial Sequence: Synthetic oligonucleotide
cagacgugcugauaaagau

SEQ ID NO: 381382 - RNA, 19 nt, Artificial Sequence
  Description of Artificial Sequence: Synthetic oligonucleotide
acacgucaaggaagauugg

SEQ ID NO: 381383 - RNA, 19 nt, Artificial Sequence
  Description of Artificial Sequence: Synthetic oligonucleotide
ugaucuccuauuggcuuua

SEQ ID NO: 381384 - RNA, 19 nt, Artificial Sequence
  Description of Artificial Sequence: Synthetic oligonucleotide
guuugcugauagcugacuu

SEQ ID NO: 381385 - RNA, 19 nt, Artificial Sequence
  Description of Artificial Sequence: Synthetic oligonucleotide
gccgcagacgugcugauaa

SEQ ID NO: 381386 - RNA, 19 nt, Artificial Sequence
  Description of Artificial Sequence: Synthetic oligonucleotide
agaauuuacuagggauauu

SEQ ID NO: 381387 - RNA, 19 nt, Artificial Sequence
  Description of Artificial Sequence: Synthetic oligonucleotide
cauucucggguucuccaaa

SEQ ID NO: 381388 - RNA, 19 nt, Artificial Sequence
  Description of Artificial Sequence: Synthetic oligonucleotide
aucuccuauuggcuuuauu

SEQ ID NO: 381389 - RNA, 19 nt, Artificial Sequence
  Description of Artificial Sequence: Synthetic oligonucleotide
gccgaaaaccuugaaggga

SEQ ID NO: 381390 - RNA, 19 nt, Artificial Sequence
  Description of Artificial Sequence: Synthetic oligonucleotide
acuaagucgugggguggca

SEQ ID NO: 381391 - RNA, 19 nt, Artificial Sequence
  Description of Artificial Sequence: Synthetic oligonucleotide
gcagacgugcugauaaaga

SEQ ID NO: 381392 - RNA, 19 nt, Artificial Sequence
  Description of Artificial Sequence: Synthetic oligonucleotide
caccauugaagcagaacau

SEQ ID NO: 381393 - RNA, 19 nt, Artificial Sequence
  Description of Artificial Sequence: Synthetic oligonucleotide
accagcgacucaggcuccg

SEQ ID NO: 381394 - RNA, 19 nt, Artificial Sequence
  Description of Artificial Sequence: Synthetic oligonucleotide
cuguaucagguaccagcga

SEQ ID NO: 381395 - RNA, 19 nt, Artificial Sequence
  Description of Artificial Sequence: Synthetic oligonucleotide
gcacuaagucguggggugg

SEQ ID NO: 381396 - RNA, 19 nt, Artificial Sequence
  Description of Artificial Sequence: Synthetic oligonucleotide
caugucggccaucuccaaa

SEQ ID NO: 381397 - RNA, 19 nt, Artificial Sequence
  Description of Artificial Sequence: Synthetic oligonucleotide
ccuaagguacugcccuagc

SEQ ID NO: 381398 - RNA, 19 nt, Artificial Sequence
  Description of Artificial Sequence: Synthetic oligonucleotide
guauucacgaagaguccgu

SEQ ID NO: 381399 - RNA, 19 nt, Artificial Sequence
  Description of Artificial Sequence: Synthetic oligonucleotide
guaucagguaccagcgacu

SEQ ID NO: 381400 - RNA, 19 nt, Artificial Sequence
  Description of Artificial Sequence: Synthetic oligonucleotide
gauugaucagcagcugauu

SEQ ID NO: 381401 - RNA, 19 nt, Artificial Sequence
  Description of Artificial Sequence: Synthetic oligonucleotide
aucguacauguguccuuuu

SEQ ID NO: 381402 - RNA, 19 nt, Artificial Sequence
  Description of Artificial Sequence: Synthetic oligonucleotide
ggcuccgccaugccgaaaa

SEQ ID NO: 381403 - RNA, 19 nt, Artificial Sequence
  Description of Artificial Sequence: Synthetic oligonucleotide
gggccuaagguacugcccu

SEQ ID NO: 381404 - RNA, 19 nt, Artificial Sequence
  Description of Artificial Sequence: Synthetic oligonucleotide
ccuaacugaccccaguugu

SEQ ID NO: 381405 - RNA, 19 nt, Artificial Sequence
  Description of Artificial Sequence: Synthetic oligonucleotide
cuucgccgcagacgugcug

SEQ ID NO: 381406 - RNA, 19 nt, Artificial Sequence
  Description of Artificial Sequence: Synthetic oligonucleotide
cuauugggccuaagguacu
